(19) United States
(12) Patent Application Publication
(10) Pub. No.: US 2023/0416942 A1
(43) Pub. Date: Dec. 28, 2023

(54) Nanobody Compositions and Methods of Use of the Same

(71) Applicant: YALE UNIVERSITY, New Haven, CT (US)

(72) Inventors: Aaron Ring, New Haven, CT (US); Feimei Liu, New Haven, CT (US)

(21) Appl. No.: 18/042,385

(22) PCT Filed: Aug. 20, 2021
(86) PCT No.: PCT/US21/46858

§ 371 Date: Feb. 21, 2023

Related U.S. Application Data
(60) Provisional application No. 63/068,586, filed on Aug. 21, 2020.

(51) Int. Cl. C40B 30/04; G16B 40/00; C07K 16/00

(52) U.S. Cl. CPC C40B 30/04; G16B 40/00; C07K 2317/569; C07K 2317/24; C07K 16/005

(57) ABSTRACT

The invention provides methods for identifying nanobodies that bind with high affinity to secreted proteins or extracellular proteins, as well and compositions comprising the identified nanobodies and methods of use thereof.

### CROSS REFERENCE TO RELATED APPLICATIONS

[0001] This application claims priority to U.S. Provisional Application No. 63/068,586, filed Aug. 21, 2020 which is hereby incorporated by reference herein in its entirety.

### BACKGROUND OF THE INVENTION

[0002] Antibody discovery remains a labor and resource-intensive process involving immunization of animals or use of synthetic libraries with a molecular selection system such as phage display. Antibodies discovery campaigns thus typical focus on a single antigen target at one time. Currently, no solution exists that offers high-throughput selection of antibodies against many antigens simulatenously. Increases in throughput are typically accomplished with the use of robotics to perform multiple individual antibody selections in parallel. Accordingly, there exists a need for improved methods for the identification of antibodies, or antibody fragments, that bind to their target with high affinity and for novel antibodies, or antibody fragments, that can be used for the detection, diagnosis, prevention and treatment of diseases or disorders. The present invention meets this need.

### SUMMARY

[0003] In one embodiment, the invention relates to an isolated antibody or antibody fragment that specifically binds to a target protein or peptide, wherein the target protein or peptide is selected from the group consisting of a secreted protein or peptide and an extracellular protein or peptide.

[0004] In one embodiment, the antibody or antibody fragment is a monoclonal antibody, a polyclonal antibody, a single chain antibody, an immunoconjugate, a glycoengineered antibody, or a bispecific antibody or other multispecific antibody.

[0005] In one embodiment, the antibody is a single chain antibody. In one embodiment, the single chain antibody is a nanobody.

[0006] In one embodiment, the nanobody has a predicted binding score of at least 0.5. In one embodiment, the predicted binding score is determined using a machine learning algorithm wherein the machine learning algorithm comprises a multi-class classifier based on a logistic regression model.

[0007] In one embodiment, the antibody or antibody fragment specifically binds to the secreted or extracellular protein or peptide with an affinity of at least 10⁻⁶ M.

[0008] In one embodiment, the antibody or antibody fragment comprises a therapeutic agent or a detection moiety.

[0009] In one embodiment, the antibody is a humanized antibody, a chimeric antibody, a fully human antibody, or an antibody mimetic.

[0010] In one embodiment, the secreted or extracellular protein or peptide is selected from the group consisting of a target provided in Table 2.

[0011] In one embodiment, the extracellular protein or peptide is CCL16, CD302, CD3D, CD3E, CEACAM4, IL10RA, IL13, IL17A, IL1RN, IL21, PROCR, TIGIT, TNF, TNFRSF17, or TNFSF18.

[0012] In one embodiment, the antibody or antibody fragment comprises at least one of a) the heavy chain CDR1 sequence of SEQ ID NO:1-SEQ ID NO:42890; b) the heavy chain CDR2 sequence of SEQ ID NO:1-SEQ ID NO:42890; or c) the heavy chain CDR3 sequence of SEQ ID NO:1-SEQ ID NO:42890.

[0013] In one embodiment, the antibody or antibody fragment comprises each of: a) the heavy chain CDR1 sequence, b) the heavy chain CDR2 sequence and c) the heavy chain CDR3 sequence SEQ ID NO:1-SEQ ID NO:42890, wherein each of the CDR1, CDR2 and CDR3 sequence are from the same SEQ ID NO.

[0014] In one embodiment, the antibody or antibody fragment comprises an amino acid sequence as set forth in any one of SEQ ID NO:1-SEQ ID NO:42890, or a fragment thereof. In one embodiment, the fragment of SEQ ID NO:1-SEQ ID NO:42890 comprises the CDR1, CDR2 and CDR3 sequences of a nanobody as set forth in SEQ ID NO:1-SEQ ID NO:42890.

[0015] For each of the nanobodies as set forth in SEQ ID NO:1-SEQ ID NO:42890, the CDR1 sequence is defined as the region flanked by GSLRLSCAAS (SEQ ID NO:42891) . . . GWYRQAPGKE (SEQ ID NO:42892); the CDR2 sequence is defined as the region flanked by WYRQAPGKER (SEQ ID NO:42893) . . . ADSVKGRFTI (SEQ ID NO:42894); and CDR3 is defined as the region flanked by KPEDTAVYYC (SEQ ID NO:42895) . . . WGQGTQVTVS (SEQ ID NO:42896). For example, the CDR1, CDR2, and CDR3 of SEQ ID NO:1 are amino acid residues 26-34, amino acid residues 46-59, and amino acid residues 96-111, respectively.

[0016] In one embodiment, the invention relates to a composition comprising an isolated antibody or antibody fragment that specifically binds to a target protein or peptide, wherein the target protein or peptide is selected from the group consisting of a secreted protein or peptide and an extracellular protein or peptide.

[0017] In one embodiment, the invention relates to a nucleic acid molecule encoding an isolated antibody or antibody fragment that specifically binds to a target protein or peptide, wherein the target protein or peptide is selected from the group consisting of a secreted protein or peptide and an extracellular protein or peptide.

[0018] In one embodiment, the invention relates to a composition comprising a nucleic acid molecule encoding an isolated antibody or antibody fragment that specifically binds to a target protein or peptide, wherein the target protein or peptide is selected from the group consisting of a secreted protein or peptide and an extracellular protein or peptide.

[0019] In one embodiment, the invention relates to an expression vector comprising a nucleic acid molecule encoding an isolated antibody or antibody fragment that specifically binds to a target protein or peptide, wherein the target protein or peptide is selected from the group consisting of a secreted protein or peptide and an extracellular protein or peptide.

[0020] In one embodiment, the invention relates to an isolated host cell comprising a nucleic acid molecule encoding an isolated antibody or antibody fragment that specifically binds to a target protein or peptide, wherein the target protein or peptide is selected from the group consisting of a secreted protein or peptide and an extracellular protein or peptide.

[0021] In one embodiment, the invention relates to a method of treating or preventing a disease or disorder in a subject in need thereof, the method comprising the step of administering an isolated antibody or antibody fragment that specifically binds to a target protein or peptide, wherein the target protein or peptide is selected from the group consisting of a secreted protein or peptide and an extracellular protein or peptide.

[0022] In one embodiment, the invention relates to a method of treating or preventing a disease or disorder in a subject in need thereof, the method comprising the step of administering a composition comprising an isolated antibody or antibody fragment that specifically binds to a target protein or peptide, wherein the target protein or peptide is selected from the group consisting of a secreted protein or peptide and an extracellular protein or peptide.

[0023] In one embodiment, the invention relates to a method of treating or preventing a disease or disorder in a subject in need thereof, the method comprising the step of administering a nucleic acid molecule encoding an isolated antibody or antibody fragment that specifically binds to a target protein or peptide, wherein the target protein or peptide is selected from the group consisting of a secreted protein or peptide and an extracellular protein or peptide.

[0024] In one embodiment, the invention relates to a method of treating or preventing a disease or disorder in a subject in need thereof, the method comprising the step of administering a composition comprising a nucleic acid molecule encoding an isolated antibody or antibody fragment that specifically binds to a target protein or peptide, wherein the target protein or peptide is selected from the group consisting of a secreted protein or peptide and an extracellular protein or peptide.

[0025] In one embodiment, the invention relates to a method of detecting a target secreted or extracellular protein or peptide in a sample, the method comprising: a) contacting the sample with the antibody or antibody fragment that specifically binds to a target protein or peptide, wherein the target protein or peptide is selected from the group consisting of a secreted protein or peptide and an extracellular protein or peptide, and b) detecting binding of the antibody or antibody fragment to the target secreted or extracellular protein or peptide.

[0026] In one embodiment, the invention relates to a method of diagnosing a disease or disorder in a subject in need thereof, the method comprising: a) contacting a biological sample of the subject with the antibody or antibody fragment that specifically binds to a target protein or peptide, wherein the target protein or peptide is selected from the group consisting of a secreted protein or peptide and an extracellular protein or peptide, b) determining the level of the target secreted or extracellular protein or peptide in the biological sample of the subject, c) comparing the level of the target secreted or extracellular protein or peptide in the biological sample of the subject with a comparator control, and d) diagnosing the subject with a disease or disorder associated with a differential level of the target secreted or extracellular protein or peptide when the level of the target secreted or extracellular protein or peptide in the biological sample of the subject of subject is significantly different when compared with the level of the target secreted or extracellular protein or peptide in the comparator control. In one embodiment, the method further comprises a step of administering a treatment to the subject that was diagnosed as having a disease or disorder.

[0027] In one embodiment, the comparator control is at least one selected from the group consisting of: a positive control, a negative control, a historical control, a historical norm, or the level of a reference molecule in the biological sample.

[0028] In one embodiment, the invention relates to a method of selecting an antibody or antibody fragment that specifically binds to a target protein or peptide, wherein the target protein or peptide is selected from the group consisting of a secreted protein or peptide and an extracellular protein or peptide, the method comprising the steps of: a) contacting a support comprising a display library of target secreted and extracellular proteins or peptides with a phage display library of candidate antibodies or antibody fragments, such that a complex is formed between the candidate antibody and the target secreted and extracellular proteins or peptide; b) cleaving the complex from the support using a protease; c) isolating the nucleic acid molecule encoding the antibody or antibody fragment; and d) sequencing the nucleic acid molecule encoding the antibody or antibody fragment.

[0029] In one embodiment, the method further comprises predicting the binding score of the antibody or antibody fragment using a machine learning algorithm, wherein the machine learning algorithm comprises a multi-class classifier based on a logistic regression model.

### BRIEF DESCRIPTION OF THE DRAWINGS

[0030] The foregoing summary, as well as the following detailed description of preferred embodiments of the invention, will be better understood when read in conjunction with the appended drawings. For the purpose of illustrating the invention, there are shown in the drawings embodiments which are presently preferred. It should be understood, however, that the invention is not limited to the precise arrangements and instrumentalities of the embodiments shown in the drawings.

[0031] FIG. 1 depicts a schematic representation of the comprehensive nanobody discovery campaign on 3,088 human extracellular and secreted proteins.

[0032] FIG. 2 depicts a schematic representation of the HAPPY selection workflow.

[0033] FIG. 3 depicts a schematic representation of affinity selection of phage displayed nanobodies on yeast displayed antigens.

[0034] FIG. 4 depicts a schematic representation of phage elution from yeast surface by 3C protease reaction.

[0035] FIG. 5A and FIG. 5B depict representative results of flow cytometry analysis of polyclonal selection output phage binding on antigen displaying yeast. FIG. 5A depicts schematics illustrating flow cytometric measurements of phage displaying binder nanobodies (left) and non-binder nanobodies (right). FIG. 5B depicts flow cytometric measurements showing binding of phage output from the deconvolution selection to individual antigen-yeast strains. Values of background corrected mean fluorescence intensity (MFI) are listed in the table. Among the 96 wells, 45 (47%) demonstrate clear phage binding signal over background (MFI>50).

[0036] FIG. 6A through FIG. 6C depict the characterization of individual recombinant nanobody Fc fusion proteins. FIG. 6A depicts representative results of ELISA assays. FIG. 6B depicts representative results of Biolayer Interferometry assays. FIG. 6C depicts a representative list of nanobodies and human protein antigens that were characterized by ELISA.

[0037] FIG. 7A and FIG. 7B depict a prediction of Binders via Machine Learning Modeling. FIG. 7A depicts a schematic representation of the machine learning model that predicts Binding Score. FIG. 7B depicts representative performance results of the machine learning model, using three different random partitions of training and testing datasets.

[0038] FIG. 8 depicts a correlation between machine learning predicted binding score and the probability of binding evaluated with experimental validation.

### DETAILED DESCRIPTION OF THE INVENTION

[0039] Even though antibodies are the most widely used class of protein binding tool and therapeutic drug format, there are serious flaws in their reliability. It was shown that fewer than half of around 6,000 routinely used commercial antibodies actually recognized their targets specifically. This invention relates, in part, to the development of a novel high-throughput screening technique (referred to herein as “HAPPY”) that allows for discovery of nanobodies against extracellular and secreted proteins in humans. This invention relates, in part, to nanobodies that bind to their target with high affinity, and the use of the nanobodies of the invention to bind to, or inhibit, their target. In some embodiments, the invention relates, in part, to methods of diagnosing, treating or preventing diseases and disorders diagnosable, preventable and treatable using the nanobodies of the invention.

### Definitions

[0040] Unless defined otherwise, all technical and scientific terms used herein have the same meaning as commonly understood by one of ordinary skill in the art to which this invention belongs. Although any methods and materials similar or equivalent to those described herein can be used in the practice or testing of the present invention, the preferred methods and materials are described.

[0041] Generally, the nomenclature used herein and the laboratory procedures in cell culture, molecular genetics, organic chemistry, and nucleic acid chemistry and hybridization are those well-known and commonly employed in the art.

[0042] Standard techniques are used for nucleic acid and peptide synthesis. The techniques and procedures are generally performed according to conventional methods in the art and various general references (e.g., Sambrook and Russell, 2012, Molecular Cloning, A Laboratory Approach, Cold Spring Harbor Press, Cold Spring Harbor, NY, and Ausubel et al., 2012, Current Protocols in Molecular Biology, John Wiley & Sons, NY), which are provided throughout this document.

[0043] The nomenclature used herein and the laboratory procedures used in analytical chemistry and organic syntheses described below are those well-known and commonly employed in the art. Standard techniques or modifications thereof are used for chemical syntheses and chemical analyses.

[0044] The articles “a” and “an” are used herein to refer to one or to more than one (i.e., to at least one) of the grammatical object of the article. By way of example, “an element” means one element or more than one element.

[0045] “About” as used herein when referring to a measurable value such as an amount, a temporal duration, and the like, is meant to encompass variations of ±20%, or ±10%, or ±5%, or ±1%, or ±0.1% from the specified value, as such variations are appropriate to perform the disclosed methods.

[0046] The term “abnormal” when used in the context of organisms, tissues, cells or components thereof, refers to those organisms, tissues, cells or components thereof that differ in at least one observable or detectable characteristic (e.g., age, treatment, time of day, etc.) from those organisms, tissues, cells or components thereof that display the “normal” (expected/homeostatic) respective characteristic. Characteristics which are normal or expected for one cell, tissue type, or subject, might be abnormal for a different cell or tissue type.

[0047] The term “analog” as used herein generally refers to compounds that are generally structurally similar to the compound of which they are an analog, or “parent” compound. Generally analogs will retain certain characteristics of the parent compound, e.g., a biological or pharmacological activity. An analog may lack other, less desirable characteristics, e.g., antigenicity, proteolytic instability, toxicity, and the like. An analog includes compounds in which a particular biological activity of the parent is reduced, while one or more distinct biological activities of the parent are unaffected in the “analog.” As applied to polypeptides, the term “analog” may have varying ranges of amino acid sequence identity to the parent compound, for example at least about 70%, more preferably at least about 80%-85% or about 86%-89%, and still more preferably at least about 90%, about 92%, about 94%, about 96%, about 98% or about 99% of the amino acids in a given amino acid sequence the parent or a selected portion or domain of the parent. As applied to polypeptides, the term “analog” generally refers to polypeptides which are comprised of a segment of about at least 3 amino acids that has substantial identity to at least a portion of a binding domain fusion protein. Analogs typically are at least 5 amino acids long, at least 20 amino acids long or longer, at least 50 amino acids long or longer, at least 100 amino acids long or longer, at least 150 amino acids long or longer, at least 200 amino acids long or longer, and more typically at least 250 amino acids long or longer. Some analogs may lack substantial biological activity but may still be employed for various uses, such as for raising antibodies to predetermined epitopes, as an immunological reagent to detect and/or purify reactive antibodies by affinity chromatography, or as a competitive or noncompetitive agonist, antagonist, or partial agonist of a binding domain fusion protein function.

[0048] The term “antibody,” as used herein, refers to an immunoglobulin molecule which is able to specifically bind to a specific epitope of a binding partner molecule. Antibodies can be intact immunoglobulins derived from natural sources, or from recombinant sources and can be immunoreactive portions of intact immunoglobulins. The antibodies in the present invention may exist in a variety of forms including, for example, polyclonal antibodies, monoclonal antibodies, intracellular antibodies (“intrabodies”), Fv, Fab, Fab′, F(ab)2 and F(ab′)2, as well as single chain antibodies (scFv), heavy chain antibodies, such as camelid antibodies, and humanized antibodies (Harlow et al., 1999, Using Antibodies: A Laboratory Manual, Cold Spring Harbor Laboratory Press, NY; Harlow et al., 1989, Antibodies: A Laboratory Manual, Cold Spring Harbor, New York; Houston et al., 1988, Proc. Natl. Acad. Sci. USA 85:5879-5883; Bird et al., 1988, Science 242:423-426).

[0049] The term “antibody fragment” refers to at least one portion of an intact antibody and refers to the antigenic determining variable regions of an intact antibody. Examples of antibody fragments include, but are not limited to, Fab, Fab′, F(ab′)2, and Fv fragments, linear antibodies, sdAb (either V_{L} or V_{H}), camelid V_{HH} domains, scFv antibodies, and multi-specific antibodies formed from antibody fragments. The term “scFv” refers to a fusion protein comprising at least one antibody fragment comprising a variable region of a light chain and at least one antibody fragment comprising a variable region of a heavy chain, wherein the light and heavy chain variable regions are contiguously linked via a short flexible polypeptide linker, and capable of being expressed as a single chain polypeptide, and wherein the scFv retains the specificity of the intact antibody from which it was derived. Unless specified, as used herein an scFv may have the V_{L} and V_{H} variable regions in either order, e.g., with respect to the N-terminal and C-terminal ends of the polypeptide, the scFv may comprise V_{L}-linker-V_{H} or may comprise V_{H}-linker-V_{L}.

[0050] An “antibody heavy chain,” as used herein, refers to the larger of the two types of polypeptide chains present in antibody molecules in their naturally occurring conformations, and which normally determines the class to which the antibody belongs.

[0051] An “antibody light chain,” as used herein, refers to the smaller of the two types of polypeptide chains present in antibody molecules in their naturally occurring conformations. Kappa (κ) and lambda (λ) light chains refer to the two major antibody light chain isotypes.

[0052] By the term “synthetic antibody” as used herein, is meant an antibody which is generated using recombinant DNA technology, such as, for example, an antibody expressed by a bacteriophage as described herein. The term should also be construed to mean an antibody which has been generated by the synthesis of a DNA molecule encoding the antibody and which DNA molecule expresses an antibody protein, or an amino acid sequence specifying the antibody, wherein the DNA or amino acid sequence has been obtained using synthetic DNA or amino acid sequence technology which is available and well known in the art.

[0053] A “chimeric antibody” refers to a type of engineered antibody which contains a naturally-occurring variable region (light chain and heavy chains) derived from a donor antibody in association with light and heavy chain constant regions derived from an acceptor antibody.

[0054] A “humanized antibody” refers to a type of engineered antibody having its CDRs derived from a non-human donor immunoglobulin, the remaining immunoglobulin-derived parts of the molecule being derived from one (or more) human immunoglobulin(s). In addition, framework support residues may be altered to preserve binding affinity (see, e.g., 1989, Queen et al., Proc. Natl. Acad Sci USA, 86:10029-10032; 1991, Hodgson et al., Bio/Technology, 9:421). A suitable human acceptor antibody may be one selected from a conventional database, e.g., the KABAT database, Los Alamos database, and Swiss Protein database, by homology to the nucleotide and amino acid sequences of the donor antibody. A human antibody characterized by a homology to the framework regions of the donor antibody (on an amino acid basis) may be suitable to provide a heavy chain constant region and/or a heavy chain variable framework region for insertion of the donor CDRs. A suitable acceptor antibody capable of donating light chain constant or variable framework regions may be selected in a similar manner. It should be noted that the acceptor antibody heavy and light chains are not required to originate from the same acceptor antibody. The prior art describes several ways of producing such humanized antibodies (see for example EP-A-0239400 and EP-A-054951).

[0055] The term “donor antibody” refers to an antibody (monoclonal, and/or recombinant) which contributes the amino acid sequences of its variable regions, CDRs, or other functional fragments or analogs thereof to a first immunoglobulin partner, so as to provide the altered immunoglobulin coding region and resulting expressed altered antibody with the binding specificity and neutralizing activity characteristic of the donor antibody.

[0056] The term “acceptor antibody” refers to an antibody (monoclonal and/or recombinant) heterologous to the donor antibody, which contributes all (or any portion, but in some embodiments all) of the amino acid sequences encoding its heavy and/or light chain framework regions and/or its heavy and/or light chain constant regions to the first immunoglobulin partner. In certain embodiments a human antibody is the acceptor antibody.

[0057] “CDRs” are defined as the complementarity determining region amino acid sequences of an antibody which are the hypervariable regions of immunoglobulin heavy and light chains. See, e.g., Kabat et al., Sequences of Proteins of Immunological Interest, 4th Ed., U.S. Department of Health and Human Services, National Institutes of Health (1987). There are three heavy chain and three light chain CDRs (or CDR regions) in the variable portion of an immunoglobulin. Thus, “CDRs” as used herein refers to all three heavy chain CDRs, or all three light chain CDRs (or both all heavy and all light chain CDRs, if appropriate). The structure and protein folding of the antibody may mean that other residues are considered part of the binding region and would be understood to be so by a skilled person. See for example Chothia et al., (1989) Conformations of immunoglobulin hypervariable regions; Nature 342, p 877-883.

[0058] The term “framework” or “framework sequence” refers to the remaining sequences of a variable region minus the CDRs. Because the exact definition of a CDR sequence may be determined by different systems, the meaning of a framework sequence is subject to correspondingly different interpretations. The six CDRs (CDR-L1, -L2, and -L3 of light chain and CDR-H1, -H2, and -H3 of heavy chain) also divide the framework regions on the light chain and the heavy chain into four sub-regions (FR1, FR2, FR3 and FR4) on each chain, in which CDR1 is positioned between FR1 and FR2, CDR2 between FR2 and FR3, and CDR3 between FR3 and FR4. Without specifying the particular sub-regions as FR1, FR2, FR3 or FR4, a framework region, as referred by others, represents the combined FR's within the variable region of a single, naturally occurring immunoglobulin chain. An FR represents one of the four sub-regions, and FRs represents two or more of the four sub-regions constituting a framework region.

[0059] As used herein, an “immunoassay” refers to any binding assay that uses an antibody capable of binding specifically to a target molecule to detect and quantify the target molecule.

[0060] By the term “specifically binds,” as used herein with respect to an antibody, is meant an antibody which recognizes a specific binding partner molecule, but does not substantially recognize or bind other molecules in a sample. For example, an antibody or nanobody that specifically binds to a binding partner molecule from one species may also bind to that binding partner molecule from one or more species. But, such cross-species reactivity does not itself alter the classification of an antibody as specific. In another example, an antibody or nanobody that specifically binds to binding partner molecule may also bind to different allelic forms of the binding partner molecule. However, such cross reactivity does not itself alter the classification of an antibody as specific.

[0061] In some instances, the terms “specific binding” or “specifically binding”, can be used in reference to the interaction of an antibody, a protein, or a peptide with a second binding partner molecule, to mean that the interaction is dependent upon the presence of a particular structure (e.g., an antigenic determinant or epitope) on the binding partner molecule; for example, an antibody recognizes and binds to a specific protein structure rather than to proteins generally. If an antibody is specific for epitope “A”, the presence of a molecule containing epitope A (or free, unlabeled A), in a reaction containing labeled “A” and the antibody, will reduce the amount of labeled A bound to the antibody. In some instances, the terms “specific binding” and “specifically binding” refers to selective binding, wherein the antibody recognizes a sequence or conformational epitope important for the enhanced affinity of binding to the binding partner molecule.

[0062] The term “epitope” has its ordinary meaning of a site on binding partner molecule recognized by an antibody or a binding portion thereof or other binding molecule, such as, for example, an scFv. Epitopes may be molecules or segments of amino acids, including segments that represent a small portion of a whole protein or polypeptide. Epitopes may be conformational (i.e., discontinuous). That is, they may be formed from amino acids encoded by noncontiguous parts of a primary sequence that have been juxtaposed by protein folding.

[0063] The phrase “biological sample” as used herein, is intended to include any sample comprising a cell, a tissue, or a bodily fluid in which expression of a nucleic acid or polypeptide can be detected. Examples of such biological samples include but are not limited to blood, lymph, bone marrow, biopsies and smears. Samples that are liquid in nature are referred to herein as “bodily fluids.” Biological samples may be obtained from a patient by a variety of techniques including, for example, by scraping or swabbing an area or by using a needle to obtain bodily fluids. Methods for collecting various body samples are well known in the art.

[0064] As used herein, “conjugated” refers to covalent attachment of one molecule to a second molecule.

[0065] A “coding region” of a gene consists of the nucleotide residues of the coding strand of the gene and the nucleotides of the non-coding strand of the gene which are homologous with or complementary to, respectively, the coding region of an mRNA molecule which is produced by transcription of the gene.

[0066] A “coding region” of a mRNA molecule also consists of the nucleotide residues of the mRNA molecule which are matched with an anti-codon region of a transfer RNA molecule during translation of the mRNA molecule or which encode a stop codon. The coding region may thus include nucleotide residues comprising codons for amino acid residues which are not present in the mature protein encoded by the mRNA molecule (e.g., amino acid residues in a protein export signal sequence).

[0067] “Complementary” as used herein to refer to a nucleic acid, refers to the broad concept of sequence complementarity between regions of two nucleic acid strands or between two regions of the same nucleic acid strand. It is known that an adenine residue of a first nucleic acid region is capable of forming specific hydrogen bonds (“base pairing”) with a residue of a second nucleic acid region which is antiparallel to the first region if the residue is thymine or uracil. Similarly, it is known that a cytosine residue of a first nucleic acid strand is capable of base pairing with a residue of a second nucleic acid strand which is antiparallel to the first strand if the residue is guanine. A first region of a nucleic acid is complementary to a second region of the same or a different nucleic acid if, when the two regions are arranged in an antiparallel fashion, at least one nucleotide residue of the first region is capable of base pairing with a residue of the second region. Preferably, the first region comprises a first portion and the second region comprises a second portion, whereby, when the first and second portions are arranged in an antiparallel fashion, at least about 50%, and preferably at least about 75%, at least about 90%, or at least about 95% of the nucleotide residues of the first portion are capable of base pairing with nucleotide residues in the second portion. More preferably, all nucleotide residues of the first portion are capable of base pairing with nucleotide residues in the second portion.

[0068] As used herein, the term “derivative” includes a chemical modification of a polypeptide, polynucleotide, or other molecule. In the context of this invention, a “derivative polypeptide,” for example, one modified by glycosylation, pegylation, or any similar process, retains binding activity. For example, the term “derivative” of binding domain includes binding domain fusion proteins, variants, or fragments that have been chemically modified, as, for example, by addition of one or more polyethylene glycol molecules, sugars, phosphates, and/or other such molecules, where the molecule or molecules are not naturally attached to wild-type binding domain fusion proteins. A “derivative” of a polypeptide further includes those polypeptides that are “derived” from a reference polypeptide by having, for example, amino acid substitutions, deletions, or insertions relative to a reference polypeptide. Thus, a polypeptide may be “derived” from a wild-type polypeptide or from any other polypeptide. As used herein, a compound, including polypeptides, may also be “derived” from a particular source, for example from a particular organism, tissue type, or from a particular polypeptide, nucleic acid, or other compound that is present in a particular organism or a particular tissue type.

[0069] The term “DNA” as used herein is defined as deoxyribonucleic acid.

[0070] “Encoding” refers to the inherent property of specific sequences of nucleotides in a polynucleotide, such as a gene, a cDNA, or an mRNA, to serve as templates for synthesis of other polymers and macromolecules in biological processes having either a defined sequence of nucleotides (i.e., rRNA, tRNA and mRNA) or a defined sequence of amino acids and the biological properties resulting there from. Thus, a gene encodes a protein if transcription and translation of mRNA corresponding to that gene produces the protein in a cell or other biological system. Both the coding strand, the nucleotide sequence of which is identical to the mRNA sequence and is usually provided in sequence listings, and the non-coding strand, used as the template for transcription of a gene or cDNA, can be referred to as encoding the protein or other product of that gene or cDNA.

[0071] Unless otherwise specified, a “nucleotide sequence encoding an amino acid sequence” includes all nucleotide sequences that are degenerate versions of each other and that encode the same amino acid sequence. The phrase nucleotide sequence that encodes a protein or an RNA may also include introns to the extent that the nucleotide sequence encoding the protein may in some version contain an intron(s).

[0072] A “disease” is a state of health of an animal wherein the animal cannot maintain homeostasis, and wherein if the disease is not ameliorated then the animal's health continues to deteriorate.

[0073] In contrast, a “disorder” in an animal is a state of health in which the animal is able to maintain homeostasis, but in which the animal's state of health is less favorable than it would be in the absence of the disorder. Left untreated, a disorder does not necessarily cause a further decrease in the animal's state of health.

[0074] A disease or disorder is “alleviated” if the severity of a sign or symptom of the disease or disorder, the frequency with which such a sign or symptom is experienced by a patient, or both, is reduced.

[0075] An “effective amount” or “therapeutically effective amount” of a compound is that amount of compound which is sufficient to provide a beneficial effect to the subject to which the compound is administered.

[0076] The term “epitope” as used herein refers to a protein determinant capable of binding to an antibody. Epitopes usually consist of chemically active surface groupings of molecules such as amino acids or sugar side chains and usually have specific three dimensional structural characteristics, as well as specific charge characteristics. Conformational and non-conformational epitopes are distinguished in that the binding to the former but not the latter is lost in the presence of denaturing solvents.

[0077] The term “high affinity” for binding domain polypeptides described herein refers to a dissociation constant (Kd) of at least about 10⁻⁶M, preferably at least about 10⁻⁷M, more preferably at least about 10⁻⁸M or stronger, more preferably at least about 10⁻⁹M or stronger, more preferably at least about 10⁻¹⁰M or stronger, for example, up to 10⁻¹²M or stronger. However, “high affinity” binding can vary for other binding domain polypeptides.

[0078] The term “inhibit,” as used herein, means to suppress or block an activity or function, for example, about ten percent relative to a control value. Preferably, the activity is suppressed or blocked by 50% compared to a control value, more preferably by 75%, and even more preferably by 95%. “Inhibit,” as used herein, also means to reduce the level of a molecule, a reaction, an interaction, a gene, an mRNA, and/or a protein's expression, stability, function or activity by a measurable amount or to prevent entirely. Inhibitors are compounds that, e.g., bind to, partially or totally block activity, decrease, prevent, delay activation, inactivate, desensitize, or down regulate a protein, a gene, and an mRNA stability, expression, function and activity, e.g., antagonists.

[0079] The terms “modulator” and “modulation” of a molecule of interest, as used herein in its various forms, is intended to encompass antagonism, agonism, partial antagonism and/or partial agonism of an activity associated the protease of interest. In various embodiments, “modulators” may inhibit or stimulate protease expression or activity. Such modulators include small molecules agonists and antagonists of a protease molecule, antisense molecules, ribozymes, triplex molecules, and RNAi polynucleotides, and others.

[0080] As used herein, an “instructional material” includes a publication, a recording, a diagram, or any other medium of expression which can be used to communicate the usefulness of a compound, composition, vector, or delivery system of the invention in the kit for effecting alleviation of the various diseases or disorders recited herein. Optionally, or alternately, the instructional material can describe one or more methods of alleviating the diseases or disorders in a cell or a tissue of a mammal. The instructional material of the kit of the invention can, for example, be affixed to a container which contains the identified compound, composition, vector, or delivery system of the invention or be shipped together with a container which contains the identified compound, composition, vector, or delivery system. Alternatively, the instructional material can be shipped separately from the container with the intention that the instructional material and the compound be used cooperatively by the recipient.

[0081] “Isolated” means altered or removed from the natural state. For example, a nucleic acid or a peptide naturally present in its normal context in a living animal is not “isolated,” but the same nucleic acid or peptide partially or completely separated from the coexisting materials of its natural context is “isolated.” An isolated nucleic acid or protein can exist in substantially purified form, or can exist in a non-native environment such as, for example, a host cell.

[0082] An “isolated nucleic acid” refers to a nucleic acid segment or fragment which has been separated from sequences which flank it in a naturally occurring state, i.e., a DNA fragment which has been removed from the sequences which are normally adjacent to the fragment, i.e., the sequences adjacent to the fragment in a genome in which it naturally occurs. The term also applies to nucleic acids which have been substantially purified from other components which naturally accompany the nucleic acid, i.e., RNA or DNA or proteins, which naturally accompany it in the cell. The term therefore includes, for example, a recombinant DNA which is incorporated into a vector, into an autonomously replicating plasmid or virus, or into the genomic DNA of a prokaryote or eukaryote, or which exists as a separate molecule (i.e., as a cDNA or a genomic or cDNA fragment produced by PCR or restriction enzyme digestion) independent of other sequences. It also includes a recombinant DNA which is part of a hybrid gene encoding additional polypeptide sequence.

[0083] In the context of the present invention, the following abbreviations for the commonly occurring nucleic acid bases are used. “A” refers to adenosine, “C” refers to cytosine, “G” refers to guanosine, “T” refers to thymidine, and “U” refers to uridine. The term “polynucleotide” as used herein is defined as a chain of nucleotides. Furthermore, nucleic acids are polymers of nucleotides. Thus, nucleic acids and polynucleotides as used herein are interchangeable. One skilled in the art has the general knowledge that nucleic acids are polynucleotides, which can be hydrolyzed into the monomeric “nucleotides.” The monomeric nucleotides can be hydrolyzed into nucleosides. As used herein polynucleotides include, but are not limited to, all nucleic acid sequences which are obtained by any means available in the art, including, without limitation, recombinant means, i.e., the cloning of nucleic acid sequences from a recombinant library or a cell genome, using ordinary cloning technology and PCR, and the like, and by synthetic means.

[0084] As used herein, the terms “peptide,” “polypeptide,” and “protein” are used interchangeably, and refer to a compound comprised of amino acid residues covalently linked by peptide bonds. A protein or peptide must contain at least two amino acids, and no limitation is placed on the maximum number of amino acids that can comprise a protein's or peptide's sequence. Polypeptides include any peptide or protein comprising two or more amino acids joined to each other by peptide bonds. As used herein, the term refers to both short chains, which also commonly are referred to in the art as peptides, oligopeptides and oligomers, for example, and to longer chains, which generally are referred to in the art as proteins, of which there are many types. “Polypeptides” include, for example, biologically active fragments, substantially homologous polypeptides, oligopeptides, homodimers, heterodimers, variants of polypeptides, modified polypeptides, derivatives, analogs, fusion proteins, among others. The polypeptides include natural peptides, recombinant peptides, synthetic peptides, or a combination thereof.

[0085] The term “conservative substitution,” when describing a polypeptide, refers to a change in the amino acid composition of the polypeptide that does not substantially alter the activity of the polypeptide, i.e., substitution of amino acids with other amino acids having similar properties. Conservative substitution tables providing functionally similar amino acids are well known in the art. The following six groups each contain amino acids that are generally understood to represent conservative substitutions for one another: (1) Alanine (A), Serine (S), Threonine (T); (2) Aspartic acid (D), Glutamic acid (E); (3) Asparagine (N), Glutamine (Q); (4) Arginine (R), Lysine (K); (5) Isoleucine (I), Leucine (L), Methionine (M), Valine (V); and (6) Phenylalanine (F), Tyrosine (Y), Tryptophan (W) (see also, Creighton, 1984, Proteins, W. H. Freeman and Company). In addition to the above-defined conservative substitutions, other modifications of amino acid residues can also result in “conservatively modified variants.” For example, one may regard all charged amino acids as substitutions for each other whether they are positive or negative. In addition, conservatively modified variants can also result from individual substitutions, deletions or additions which alter, add or delete a single amino acid or a small percentage of amino acids, for example, often less than 5%, in an encoded sequence. Further, a conservatively modified variant can be made from a recombinant polypeptide by substituting a codon for an amino acid employed by the native or wild-type gene with a different codon for the same amino acid.

[0086] The term “RNA” as used herein is defined as ribonucleic acid. The term “recombinant DNA” as used herein is defined as DNA produced by joining pieces of DNA from different sources.

[0087] The term “recombinant polypeptide” as used herein is defined as a polypeptide produced by using recombinant DNA methods.

[0088] The term “single chain antibody” is an antibody that contains an antigen binding site that is composed of a single polypeptide chain. One example of a single chain antibody is a single-chain variable fragment (scFv) antibody, which is a fusion protein that contains the variable regions of the heavy (VH) and light chains (VL) of a classical antibody connected by a short linker peptide of about ten to about 25 amino acids. A single-chain antibody can also be obtained by immunization of a camelid (e.g., a camel, llama or alpaca) or a cartilaginous fish (e.g., a shark), which make antibodies that are composed of only heavy chains. A monomeric variable domain of a heavy chain antibody binds antigen.

[0089] By “pharmaceutically acceptable” it is meant, for example, a carrier, diluent or excipient that is compatible with the other ingredients of the formulation and generally safe for administration to a recipient thereof. As used herein, “pharmaceutically acceptable carrier” includes any material, which when combined with the conjugate retains the conjugates' activity and is non-reactive with the subject's immune systems. Examples include, but are not limited to, any of the standard pharmaceutical carriers such as a phosphate buffered saline solution, water, emulsions such as oil/water emulsion, and various types of wetting agents. Other carriers may also include sterile solutions, tablets including coated tablets and capsules. Typically such carriers contain excipients such as starch, milk, sugar, certain types of clay, gelatin, stearic acid or salts thereof, magnesium or calcium stearate, talc, vegetable fats or oils, gums, glycols, or other known excipients. Such carriers may also include flavor and color additives or other ingredients. Compositions comprising such carriers are formulated by well-known conventional methods.

[0090] The term “a population of cells that comprise a library of surface-tethered extracellular capture agents” refers to a population of that cells that expresses (i.e., “displays”) a surface-tethered capture agent on their exterior surface and the amino acid sequence of the capture agent differs from cell to cell.

[0091] The terms “patient,” “subject,” “individual,” and the like are used interchangeably herein, and refer to any animal, preferably a mammal, and most preferably a human, having a complement system, including a human in need of therapy for, or susceptible to, a condition or its sequelae. Thus, the individual may include, for example, dogs, cats, pigs, cows, sheep, goats, horses, rats, monkeys, and mice and humans.

[0092] The phrase “percent (%) identity” refers to the percentage of sequence similarity found in a comparison of two or more amino acid sequences. Percent identity can be determined electronically using any suitable software. Likewise, “similarity” between two polypeptides (or one or more portions of either or both of them) is determined by comparing the amino acid sequence of one polypeptide to the amino acid sequence of a second polypeptide. Any suitable algorithm useful for such comparisons can be adapted for application in the context of the invention.

[0093] A “therapeutic” treatment is a treatment administered to a subject who exhibits signs of pathology, for the purpose of diminishing or eliminating those signs.

[0094] “Therapeutically effective amount” is an amount of a compound of the invention, that when administered to a patient, ameliorates a symptom of the disease. The amount of a compound of the invention which constitutes a “therapeutically effective amount” will vary depending on the compound, the disease state and its severity, the age of the patient to be treated, and the like. The therapeutically effective amount can be determined routinely by one of ordinary skill in the art having regard to his own knowledge and to this disclosure.

[0095] The terms “treat,” “treating,” and “treatment,” refer to therapeutic or preventative measures described herein. The methods of “treatment” employ administration to a subject, in need of such treatment, a composition of the present invention, for example, a subject afflicted a disease or disorder, or a subject who ultimately may acquire such a disease or disorder, in order to prevent, cure, delay, reduce the severity of, or ameliorate one or more symptoms of the disorder or recurring disorder, or in order to prolong the survival of a subject beyond that expected in the absence of such treatment.

[0096] “Variant” as the term is used herein, is a nucleic acid sequence or a peptide sequence that differs in sequence from a reference nucleic acid sequence or peptide sequence respectively, but retains essential biological properties of the reference molecule. Changes in the sequence of a nucleic acid variant may not alter the amino acid sequence of a peptide encoded by the reference nucleic acid, or may result in amino acid substitutions, additions, deletions, fusions and truncations. Changes in the sequence of peptide variants are typically limited or conservative, so that the sequences of the reference peptide and the variant are closely similar overall and, in many regions, identical. A variant and reference peptide can differ in amino acid sequence by one or more substitutions, additions, deletions in any combination. A variant of a nucleic acid or peptide can be a naturally occurring such as an allelic variant, or can be a variant that is not known to occur naturally. Non-naturally occurring variants of nucleic acids and peptides may be made by mutagenesis techniques or by direct synthesis

[0097] Ranges: throughout this disclosure, various aspects of the invention can be presented in a range format. It should be understood that the description in range format is merely for convenience and brevity and should not be construed as an inflexible limitation on the scope of the invention. Accordingly, the description of a range should be considered to have specifically disclosed all the possible subranges as well as individual numerical values within that range. For example, description of a range such as from 1 to 6 should be considered to have specifically disclosed subranges such as from 1 to 3, from 1 to 4, from 1 to 5, from 2 to 4, from 2 to 6, from 3 to 6 etc., as well as individual numbers within that range, for example, 1, 2, 2.7, 3, 4, 5, 5.3, and 6. This applies regardless of the breadth of the range.

### Description

[0098] This invention is based, in part, on the development of a method of detecting proteins or peptides that bind with high affinity to a target protein such as a secreted protein or extracellular protein. In some embodiments, the invention provides a library of antibodies or nanobodies that bind with high affinity to secreted or extracellular proteins. In some embodiments, the invention relates to methods of using the proteins or peptides (e.g, antibodies or nanobodies) of the invention to bind to their target protein. In some embodiments, the invention relates to methods of using the proteins or peptides (e.g, antibodies or nanobodies) of the invention to treat or prevent diseases or disorder. In various embodiments, the invention is directed to compositions and methods for treating a disease or disorder in an individual by administering to a subject in need thereof at least one protein or peptide (e.g, antibody or nanobody) of the invention.

[0099] In certain embodiments, the protein or peptide of the invention is considered an antibody because it binds to a target (e.g., a secreted protein or peptide or an extracellular protein or peptide). In one embodiment, the antibody comprises a heavy chain constant region, such as an IgG1, IgG2, IgG3, IgG4, IgA, IgE, IgM or IgD constant region. Preferably, the heavy chain constant region is an IgG1 heavy chain constant region or an IgG4 heavy chain constant region. Furthermore, the antibody can comprise a light chain constant region, either a kappa light chain constant region or a lambda light chain constant region. Preferably, the antibody comprises a kappa light chain constant region. Alternatively, the antibody portion can be, for example, a Fab fragment or a single chain Fv fragment.

[0100] In some embodiments, the peptide compositions of the invention decrease the level or activity (e.g., enzymatic activity, substrate binding activity, receptor binding activity, etc.) of the target secreted or extracelluar protein or peptide. The binding peptides of the invention include a variety of forms of antibodies including, for example, polyclonal antibodies, monoclonal antibodies, intracellular antibodies (“intrabodies”), Fv, Fab and F(ab)2, single chain antibodies (scFv), heavy chain antibodies (such as camelid antibodies), synthetic antibodies, chimeric antibodies, and a humanized antibodies.

[0101] In some embodiments, the invention provides a library of engineered heavy chain antibodies, or nanobodies. As with other antibodies of non-human origin, an amino acid sequence of a nanobody can be altered recombinantly to obtain a sequence that more closely resembles a human sequence, i.e., the nanobody can be “humanized” to thereby further reduce the potential immunogenicity of the antibody.

[0102] In some embodiments, the invention relates to the binding portion of an antibody or nanobody that comprises one or more fragments of an antibody or nanobody that retain the ability to specifically bind to binding partner molecule. It has been shown that the binding function of an antibody can be performed by fragments of a full-length antibody. Examples of binding fragments encompassed within the term “binding portion” of an antibody include (i) a Fab fragment, a monovalent fragment consisting of the VL, VH, CL and CH1 domains; (ii) a F(ab′)2 fragment, a bivalent fragment comprising two Fab fragments linked by a disulfide bridge at the hinge region; (iii) a Fd fragment consisting of the VH and CH1 domains; (iv) a FIT fragment consisting of the VL and VH domains of a single arm of an antibody, (v) a dAb fragment (Ward et al., (1989) Nature 341:544-546), which consists of a VH domain; and (vi) an isolated complementarity determining region (CDR). Furthermore, although the two domains of the Fv fragment, VL and VH, are coded for by separate genes, they can be joined, using recombinant methods, by a synthetic linker that enables them to be made as a single protein chain in which the VL and VH regions pair to form monovalent molecules (known as single chain Fv (scFv); see e.g., Bird et al. (1988) Science 242:423-426; and Huston et al. (1988) Proc. Natl. Acad. Sci. USA 85:5879-5883). Such single chain antibodies are also intended to be encompassed within the term “binding portion” of an antibody. These antibody fragments are obtained using conventional techniques known to those with skill in the art, and the fragments are screened for utility in the same manner as are intact antibodies. Binding portions can be produced by recombinant DNA techniques, or by enzymatic or chemical cleavage of intact immunoglobulins.

### Nanobody Compositions

[0103] In some embodiments, the invention provides single chain antibodies, or nanobody polypeptides, that are directed against or can specifically bind to at least one secreted or extracellular protein or peptide, as well as compounds and constructs, (e.g., fusion proteins and polypeptides) that comprise at least one such amino acid sequence, and nucleic acid molecules encoding the nanobodies of the invention.

[0104] It should be noted that, in general, the term nanobody as used herein is not limited to a specific biological material or a specific method of preparation. For example, methods for preparing the nanobodies of the present invention include, but are not limited to, (1) isolation of a V_{HH} domain of a natural heavy chain antibody, (2) expression of a nucleotide sequence encoding a natural V_{HH} domain, (3) humanization of natural V_{HH} domains or expression of nucleic acids encoding the humanized V_{HH} domains, and (4) carnelization of natural V_{H} domains from any animal species, particularly mammals (eg, humans), or expression of a nucleic acid encoding a camelized V_{H} domain, (5) and synthesis of nanobodies or nucleic acids encoding nanobodies using amino acid or nucleic acid synthesis techniques. Suitable methods and techniques for carrying out the above will be apparent to those skilled in the art based on the disclosure herein, including, for example, the methods and techniques detailed below.

[0105] In some embodiments, the nanobodies of the present invention comprise an amino acid sequence that matches the amino acid sequence of a natural V_{HH} domain, but is “humanized” by substitution of one or more amino acid residues of the amino acid sequence of said native V_{HH} sequence with one or more amino acid residues occurring at corresponding positions of a V_{H} domain from a conventional human 4-chain antibody. The humanized nanobody of the present invention can be obtained by any suitable method known in the art.

[0106] In some embodiments, the nanobodies of the present invention are derived from a conventional 4-chain antibody by “camelization” (ie, substitution of one or more amino acid residues of a V_{H} domain with one or more amino acid residues occurring at corresponding positions in the V_{HH} domain of the heavy chain antibody). In some embodiments, the camelization occurs at the amino acid position present at the V_{H}-V_{L} junction and so-called Camelidae characteristic residues (see eg WO 94/04678). The camelized nanobody of the present invention can be obtained by any appropriate method known in the art.

[0107] In various embodiments, the invention provides nucleic acid molecules encoding the nanobodies, including humanized or camelized nanobodies, of the invention. is It can be carried out by expressing the nucleotide sequence thus obtained. In some embodiments, a nucleotide sequence encoding the humanized or camelized nanobody of interest of the present invention is designed, and the nucleic acid sequences thus obtained can be expressed in order to provide the nanobodies of interest of the present invention.

[0108] In one embodiment, the nanobodies of the invention binds to and, thereby partially or substantially alters at least one biological activity of the target (e.g., enzymatic activity, substrate binding activity, receptor binding activity, etc.).

[0109] In some embodiments, the invention includes compositions comprising an antibody or nanobody that specifically binds to a secreted or extracellular protein or peptide. In one embodiment, secreted or extracellular proteins or peptides include, but are not limited to GDPD1, METRN, PLA2G5, CD320, LGALS1, SCGB1A1, PRRG1, CEACAM7, SLC22A1, SCGB1C2, SPINK4, SIGLEC16, ZG16, LAMA3, TUSC5, LRRTM2, ENDOU, SV2C, TRPC3, GNRH2, OS9, FCGR2C, MMP24, FCAMR, EPHA7, MYORG, EDDM3A, FGF22, MST1, ACVRL1, GML, GPM6A, SLC6A8, RNFT2, FGFR2, S100A12, NODAL, CFHR1, FLJ36131, SPN, WFDC2, CCL24, MCP, ARSE, SCGB1D2, TRPC7, ODAPH, LIPM, MFAP4, HEPH, RNASE6, IL9, PRSS44, SLURP1, BAGE2, ABI3BP, CPA6, HP, TMEM206, INHA, C17orf77, ATP6AP2, GP2, CSH2, IFI30, FIBCD1, LDLRAD3, TSPAN9, AHSG, TSPAN2, TRPV1, LRIG2, IL18RAP, APOA1, IL28RA, IL1RAPL2, IER3, DPP10, BPIFA4P, SLC22A13, DEFB116, PTPNS1L2, PSORS1C2, TSPAN33, CD48, MOG, EFNA4, SERPINB2, SIGLEC15, MFAP3L, BPIFB1, NPTX2, HEXA, HAPLN3, FOLR2, TNFRSF19, SEMG2, PRRT1, S100A13, EXOC3-AS1, ENPP7, CD99L2, CNPY2, ACVR2B, CD164L2, LDLRAD2, TGFA, SCRG1, C14orf93, AMN, SBSPON, LMBRD1, AGRP, C5orf64, LRRC25, C22orf46, PAEP, IL25, EPHB2, PTPRA, POFUT2, TSHR, PNLIPRP1, VNN1, RTBDN, CLEC2D, NRN1, FRZB, NOG, TMPRSS11B, APOA2, NIPAL1, IFNA17, SPACA1, FLRT3, L1CAM, FZD7, GREM2, MMP15, VN1R2, MCFD2, FKBP9, C1orf54, SLC6A14, KDR, NPDC1, ILS, SCN4B, PRH1, KLK10, SLC22A10, GFOD2, ZPBP2, CGB3, IL27RA, CSN1S1, THBS3, DRAXIN, CD164, DEFB126, FAM19A4, UNQ6190/PRO20217, WFDC13, MMP13, TNFRSF11A, PTPRC, LINC00527, CLDN7, TPSD1, SEMA3E, GDF7, SCGB1D1, REG3G, CDH13, GABRB2, KLK15, FOLR1, AMIGO2, SLC6A2, PGA4, RNASE3, CHRNA4, SCARA5, KCNA6, CSN3, SCGB1C1, SLC22A4, CFP, UNQ6494/PRO21346, FCGRT, PSG9, TMEM41A, ABHD15, ROR1, ACKR2, POMC, MMP1, TNFRSF10D, IL3RA, NPC2, PSG4, TFF1, KCNMB3, CCL22, ULBP3, TIMD4, CD200R1, PCSK9, NXPH2, IL31RA, FP248, REG1B, LYPD1, CST9LP1, GYPA, ASTL, EMC10, FSHB, ANGPTL5, C11orf94, ZACN, CD55, CLDN1, APCDD1L, BSPH1, WFDC12, NGRN, TPBGL, GDF3, FKBP7, LYZL1, VASH2, TGFB2, CDCP1, GABRA5, CELA2B, SIRPB2, TNFSF8, UPK1B, PTCRA, CHRNB2, TMEM235, CSHL1, CCL27, APOF, SIGLEC8, FGF18, TMPRSS11D, TNFRSF13C, SLC22A25, UGT1A1, APOC2, SLCO2A1, CRTAC1, XCL1, FAM24A, PCSK2, FGF23, PTGDS, FAT2, ABCG2, LTA, CHRNA3, IGSF5, HSD11B1L, GDF11, KLRF1, THEM6, ENTPD5, CYR61, CES5A, RBP4, ANXA2P2, GM2A, SLC6A15, SCG5, CLDN14, C1R, SLC39A14, CST3, TNMD, SAA2, CHRNB4, NCAM1, NOV, PATE3, FAM3A, LAMP5, OGN, IFNA6, LRIT3, PANX3, ADM, FGF7, CSPG5, GFRA1, VWC2L, CCL15, MPEG1, CST5, TOR1B, LY6G5B, IL31, P4HB, CST7, OBP2B, PDGFD, DPEP2, GABRR3, LEG1, NTM, SPACA7, GNPTG, NPPC, ADAM30, OOSP1, IL17RD, TECTB, RNASE11, SECTM1, REG4, LAIR1, CA4, CRISPLD2, CCL16, CCL11, CTSW, UPK1A, CD9, LPAL2, SEMG1, IL17RA, CCL18, CNTN5, KRTDAP, BPIFC, LIPG, CCL8, MPZL1, CLPSL1, CST8, IL2RA, ECE1, F11, MSMP, KLK12, ACP4, CD59, PLGLA, EOGT, IL1RN, TNFRSF6B, PLA2G2A, ENTPD8, RNF128, FGFR3, FCGR3A, ABHD12, HBEGF, LRRC8B, MME, GPA33, IL5RA, TNFRSF10B, TFF2, NBL1, PROKR2, GUCY2F, CLPTM1L, AGER, ERBB2, DYNAP, IFNA5, DEFB132, TMEM158, AJAP1, IL6ST, SDF2L1, RAMP1, AMELX, NRN1L, EGFL3, SLC44A5, SSBP3-AS1, IL1RL1, CNGA3, IL17BR, CLEC-6, BTBD17, ZP4, NAALADL1, GLRA3, LY6G5C, CD300LG, NXPE3, IGF1, LGALS7, CCL4L1, SCARF2, PRTN3, LHFPL5, HTRA3, IFNGR2, PAP, MMP2, NRXN3, CALY, TEPP, B2M, TNFRSF19L, LRFN1, SCGB2A2, S100A8, ENSP00000381830, LY6G6F, SLC6A13, TMX2, IL22, C9orf47, MIA2, CFH, TIMP4, SRGN, PRND, PILRA, SFTA2, IL32, XG, ACVR2A, JTB, BMPR1A, CHRNA2, CLEC1B, SLC5A1, CHRNA9, VSTM2B, PSG6, CYTL1, FCGR1B, ADAM11, EPHA10, LOC348174, SERPINF2, CD70, TAS1R2, HLA-DRB3, FIGF, WISP3, LY6G6D, SLC6A9, MSLN, PPT1, EQTN, LHB, CD47, CD99, IFITM10, SPINK8, TEX46, MIA, TNFSF10, EVI2A, C6orf120, GABRA1, CHAD, IL8RB, KIR2DS2, AGPAT1, GZMK, TMEM169, PLGRKT, R3HDML, CRP, F7, CBLN4, KCNV2, IL10RB, IFNA8, OAS1, PRSS54, LCN9, C2orf40, HTR3C, SLC38A2, PCSK1N, PLXNA4, SPINK6, CTSD, FITM1, C2orf69, CHRNA1, SGSH, LY9, CD2, MCEMP1, RNF130, EPHA5, IL17F, FCN1, CSF3, CLPS, FLJ37218, SERPINB5, PRSS3, CXCL9, C9orf135, DIPK2B, C1QTNF2, ARSI, MASP1, GDF5, HTRA1, EMCN, LINC00305, NGFR, PRSS23, SERPINA7, PRRT3, HPR, SV2A, NAAA, SHISA8, PRSS2, ASIC1, DKK3, SLC29A4, FBLN5, MMP3, CXCL11, IL12RB2, ERVFRD-1, LY96, WNT16, CALR3, PROK2, SLC38A4, AXL, EDAR, GRIA1, LECT2, C6, FKBP11, GITR, FNDC4, CYP2D7, SERPIND1, RLN1, SERPINA9, LYNX1, C4A, CT83, LRG1, ABHD18, SLC39A12, GABRE, RNASE8, LSAMP, GABRA2, PDGFC, SLC6A1, DGAT2L7P, SLC22A8, CLDN17, PNLIP, IGSF21, FCRL1, ERP27, NAPSA, EFNA1, SLAMF6, PODN, OVCH1, Ly6L, SIGLEC9, FGF4, PF4V1, UPK3BL1, LMBRD2, LILRA5, IL8, PDIA2, PRNP, TNFRSF8, SLC2A2, HAMP, LY6D, C1orf32, TMEM108, CLDN20, LRRC8A, SLC6A7, TSPAN7, KIR2DS3, COL8A1, BTNL8, ICAM1, SERPINA13P, NRG4, SGCD, GLRA2, HEPACAM2, CST6, BTNL3, CSTL1, ANGPT4, DDR1, IL36B, S100A7, WFDC9, TMEM119, DPEP1, CLDN12, TSHB, F3, FGF1, NRG2, TM9SF1, FAM19A3, CDH2, TLR5, FAM3D, LYPD6B, ACP7, NTF3, CHGA, PIP, KIR2DS5, FAM24B, CFHR5, SLC34A3, CD6, ADAM32, RNF148, DCN, FGF21, RSPO4, SLC22A31, MMP27, FGF17, TGFB3, SLC15A1, GKN2, BST2, C5, CD8B2, SLC6A5, IGFBP5, FCRL6, LRRC3C, SIAE, IL1F5, C11orf45, SFTPA1, IZUMO4, IL22RA1, ACVR1, CD28, BTLA, CD302, GPHA2, LCN12, OSTN, FAM189A2, EPHA1, BTNL2, HDHD5, UNC5A, NOX1, BAGE3, CREG2, VEGFB, CBG, PRR27, CD244, HAPLN2, KIR3DS1, LPL, GYPC, P2RX5, GLT1D1, ARSJ, DNASE2B, PVR, CLPSL2, CD37, SMOC2, EDA2R, GABRQ, WISP2, FAM187B, SLC41A2, SPOCK1, KCNK1, DLK1, TPSAB1, IL1F6, MFAP2, STIM2, BCAN, SLC52A3, C19orf18, ATP1B2, TGFBR1, NPTN, LRP10, AND5, UMOD, TNFRSF7, RNF174, HLA-DRB4, PROCR, FGF19, OSM, RAET1L, CD83, ASIC4, ERVMER34-1, SELL, PRCP, SPINT2, CEACAM4, PVRL4, IZUMO, BVES, MFGE8, MICA, GASK1A, TMEM156, APOC3, MIF, ERVV-2, DLK2, SHBG, EPHB1, COLQ, CD163, NETO1, CLEC9A, PLXDC2, ERVK13-1, CLDN2, DEFA1, C1QR1, LHFPL1, ADAMTS15, PDCD6IP, BMPR2, GABRG1, NRTN, BTN3A3, CTSS, NCSTN, CDH26, CUTA, TM2D1, TRPC4, SLC6A20, ALB, SHISAL1, TIGIT, CLEC10A, CD163L1, ENPEP, APOD, KCT2, PTPRN2, CPA2, RNASE13, KLK13, KLK11, UNC5D, RSPO1, CD19, MMP28, FCER2, ILDR1, ENPP4, CD300E, UGT2A3, APCS, MUC5AC, CEACAM20, CLDN11, LCN2, ENPP5, SDC1, C9, CXCL1, SLCO1B1, ADAM2, SLC22A2, CD40LG, NHLRC3, INSL6, LDLR, LAMC1, CACNG4, IL28B, GAST, PROZ, UGT3A1, NCR3, ASTN2, VIT, OTOS, GGT7, AGT, PRSS3P2, SPINK14, CRLF1, CPN2, ICAM2, FAM19A2, SDCBP, LIFR, KLRG1, CD80, CD53, CA12, BMPR1B, SIGLEC7, RESP18, SEMA7A, PHEX, IGSF8, ASAM, MESD, TNFSF18, CSAG1, IGSF6, PDPN, SERPINI1, TRPC5, SMIM23, LCN6, CCL2, C10orf59, LYSMD3, CBLN3, RLN2, PCDHB1, BGN, TENM1, KISS1, GRIK3, FKBP14, IGSF4C, ITGA5, CTSK, CRELD1, CDH22, ICAM3, KLRC3, TNFRSF5, SLC5A8, FAM200A, TRABD2A, SHISA7, SCN3B, CFC1, CST1, LRRC8C, SIGIRR, MANF, CES3, CD34, KLK2, C1QL3, MFRP, IL7, DMP1, IL1A, SCN1B, TM2D3, OC90, LGALS3BP, HPN, REN, LRRN4CL, OVGP1, CLDN10, VSTM2A, A1BG, PAPLN, TSPAN31, SLC10A5, IFNE, LILRA4, DEFB113, C12orf49, METTL9, CHRNE, BTN2A1, SFTPD, PLAC1, SPAG11B, PEBP4, SYCN, ABCG1, THY1, IGF2, TNFRSF11B, CXCL5, NFAM1, DEFB136, IGFL1, NIPAL4, IHH, EVI2B, TBSP, CPED1, GKN1, CXCL2, BGLAP, KIR3DP1, VPREB1, KLK5, FST, CLEC12B, LIF, PRR4, PDIA6, LYZL6, DKFZp686O24166, CES4A, ATP1B3, EPGN, TNFRSF1A, VWC2, NXPE4, GPC1, TTYH3, TSPAN12, SLC10A4, CST4, SERPINA5, MINPP1, SLC6A11, NINJ1, THBD, TNFRSF10A, SPINK1, SIGLEC12, TMEM59L, ADCY5, CSMD1, KCNMB2, LRCH3, NTRK3, TMC4, KLK4, TMX1, TFPI, ANGPTL4, TEX101, TMPRSS4, EGFL7, ITPRIPL1, DEFA5, MUCL3, FCMR, LIPN, CSF2, CD72, RHBDD1, CLEC4A, ULBP2, CHRNB3, MUC1, GP6, DHRS4L2, TRH, SLC22A9, LSR, IL1F7, ADAM5, WNT7B, PLAUR, SOSTDC1, PTGS2, RS1, LRFN3, ADAMTSL5, IL2RB, TREM2, GPIHBP1, OPN1MW, ENG, IGSF10, GABRA4, MMP9, ANO6, GPHB5, DPT, IL11RA, APOO, SPACA3, TMEM182, LINGO3, PTN, CLEC19A, ACRV1, CXCL6, GUCA2A, GALNS, TMEM123, CLEC6A, ADAM15, TM7SF3, TULP1, BRINP3, FDCSP, ORM2, LCN15, VMP1, AMIGO3, CLDN8, FCRL4, SMPDL3B, PRRG3, WNT9B, MICB, ITLN2, SHISA4, INHBC, IGLON5, ARSK, TTR, FAM171A1, PPT2, SMO, PINLYP, SLCO1B3, RNASE9, SLC2A12, ADAM23, CES2, NAGPA, TSPAN3, PTX3, PCDHB7, SLCO2B1, PDZD11, CCL19, RNASE10, CTSV, PDILT, DKK1, MMP7, CLEC7A, CNPY4, MFSD2A, PRV1, SLC2A13, KLRK1, SLC1A1, FAM19A5, SMR3A, NT5E, TRABD2B, GLDN, ST14, IFNG, PIGR, PTHLH, CEACAM18, CD3D, FXYD5, BDNF, ENTPD2, RGMB, C1QL1, CTSG, PVRL1, LRFN2, MPZL3, CLEC17A, CADM2, PGF, KIRREL2, MOXD2P, SCGB3A1, LYPD8, EPCAM, KLRF2, SPP1, HSPA13, CES1P1, RAMP2, MLN, GABRG2, CST11, TNFSF13B, IGFBP6, NPPB, CNDP1, CD274, TMIGD1, PRADC1, SLAMF8, LYSMD4, SGCZ, LYZ, HS3ST1, LY6K, LY6H, LRRC32, GNLY, C6orf25, SCGN, FCN2, LOC644613, SSPN, AMY2B, FGFBP3, IL2RG, PCYOX1, GPC2, TNFRSF10C, CLDN18, SIGLEC10, NENF, CNTFR, PATE1, ICOSLG, IL29, CHGB, LY86, LRRC3B, SLC3A1, CA11, CECR9, P2RX2, CLDN16, SLC39A4, ROS1, TUFT1, STC2, SERPINE1, SPON2, GSG1L, EVA1C, TGFBR3L, CLDN19, CLDN9, BPIFA1, NTNG2, PSG2, HMSD, ASIC3, EBI3, SPINK13, ASIP, PRAP1, PGC, C1QTNF3, BMP2, LRRC26, FSTL3, IL15RA, GP1BB, PDCD1, COL26A1, SPINK9, TNF, C10orf25, IFNA14, ART1, ITGA6, CGA, PRSS8, BTC, GINM1, WNT4, CHRNG, DSC3, KCNMB4, MAG, SIRPA, SPATA20, LRTM1, TDGF1, C1RL, PLA2G2E, SLC4A2, INSL5, SDC4, DCD, CD226, TMIGD2, LRRC8D, RNASE12, ERP29, PGA3, BACE1, FBN2, COCH, SPOCK2, ENSP00000320207, RCN3, PCDHB5, TMEM130, WNT3A, RET, SLC22A6, OLFM2, CDH8, C1QBP, TMPRSS11F, PRSS55, C3, BY55, LGALS3, DDR2, NRROS, IDE, SOST, UGT8, SEMA3C, MARCO, SV2B, STC1, ENTPD3, LAIR2, GRN, GGT3P, GDF15, TNFRSF4, HHLA2, CTSH, AMHR2, PDCD1LG2, VNN3, IGLL5, CEACAM6, TREML1, SLC2A10, SCGB2B2, TM2D2, ASIC2, CSN2, LGMN, IGFBP7, MGP, DUOXA2, CGB7, TNFRSF6, FCN3, KLK3, EMB, TAS1R3, TMEM102, LCN1P1, FGF8, PMCH, IL4R, IL13, ASGR1, C1QTNF12, PRLR, OAF, PVRL2, APOE, TNFSF13, TNFSF9, CDH24, CLEC2A, SLC6A19, CHIA, LACRT, FAM3C, ICOS, ACKR1, SLC24A3, NTRK1, CDSN, TYROBP, CEACAM21, GUSB, FMR1NB, LUM, ESM1, RNASET2, KLK8, VSIG1, SLC1A5, VPREB3, MMP26, WFDC3, DAND5, SUSD3, SUMF1, TINAGL1, ODAM, TNFAIP6, ANGPTL8, DKK2, ATP4B, MANSC4, SPARC, IL33, SERPINC1, AZGP1, DNAJC10, EPYC, FGF9, IFNK, RDH5, SLC22A14, CFHR2, PNLIPRP3, TSLP, OXT, VMO1, IL1B, ERVFC1, ATP1B1, HCRTR2, IZUMO1R, MSMB, CST9L, BSG, UNQ5830/PRO19650/PRO19816, TNFSF15, AMBP, SIGLEC6, IFNL2, SSC4D, PSG5, IL1RAP, EMC7, FLT3LG, LYPD5, SERPINI2, TSPAN13, FLRT1, SIGLEC5, PRELP, EMR1, HYAL1, PLGLB1, LRRC4C, FURIN, P2RX1, PLA2G12B, NRXN1, WFDC8, SCARF1, SHISA5, SDC2, SDC3, POGLUT1, PLA2G2F, SLPI, PSCA, CNTN2, GGT1, UCMA, ATRAID, C17orf67, CNGA1, RAIVIP3, ITGB5, BMP5, RNF149, WISP1, MPO, CHRND, ADCK1, DNASE1L2, ERVK-18, PCDHGB6, HYAL2, CGB1, SEMA4D, TFPI2, C1QTNF6, BMP4, MMP11, SDF4, ANTXRL, CCK, OMD, GDPD3, HSD17B7, MDGA2, KLRC1, TMEM161A, P GLYRP1, C1QB, XK, P S APL1, C SF 2RA, OP CML, KLRC2, DCSTAMP, LHFPL6, SIGLEC11, IL18BP, UNQ6126/PRO20091, DPP6, ELFN1, OLFM1, KREMEN2, IL21, DNASE1L3, CLCA3P, ADM2, CD68, AGR3, NEGR1, TRPC1, AFP, SEMA3A, PRSS42, FAM174A, FCRL2, GPC4, UNC5C, TPBG, TNFRSF14, PLVAP, SLC34A2, RGMA, ECSCR, EFNB1, LCTL, CPAMD8, DKKL1, HPX, EREG, VEGFC, CLEC2B, IZUMO2, IGFBP3, SCGB2A1, TGFBR2, BCAM, MMP17, SGCB, JCHAIN, INHBE, COLEC11, PI3, FCRLM1, TCTN3, EMC1, NETO2, MUC21, CD3 G, RAET1E, CBLN2, PCSK1, JAG1, CLDN3, IL19, SPX, NTN3, CARTPT, ADAM7, UNQ9165/PRO28630, ASGR2, CDCP2, F1146089, ERVW-1, FCRL3, SOWAHA, WIF1, LRRC37B, GRM3, MUC13, SDF2, PLA2G12A, SCGB3A2, CD36, ERMAP, KLRD1, KLKB1, SFN, GABRA6, CCL20, PLBD2, PSG8, BMP10, VCAM1, PDGFB, SUSD6, VEGFA, EFNA5, NLGN4X, SYNDIG1L, PCDH10, FAM180A, IFNA13, PPBP, TREML4, CTSF, TMEM190, LALBA, HLA-DRB1, SFRP2, CGREF1, CTRB2, GPI, LRRN1, DNASE1, PCDHB3, PKDCC, PLA2G15, IL22RA2, WNT5B, GPLD1, HAPLN1, MPZL2, CCL21, C1QTNF7, CPA5, CLTRN, PLA2G10, ALKAL1,INS, IFNW1, NUCB1, OBP2A, PRNT, FUCA1, ENH3, TMEM8B, CFD, AGPAT2, PCDHB9, CDH2O, ADIPOQ, MFAP5, RSPO2, IL16, F11R, SLC39A5, CHI3L1, PLA2G2D, C4BPA, GDF2, CTSA, SNCA, PRL, TMEM9, BMP6, FLT3, UGT2A1, RSPO3, KIR3DX1, FETUB, ABHD17B, SORT1, LGALS9, CADM1, FAM198B, FSTL1, FAM20C, CCL25, OIT3, TMEM9B, LY6G6C, F13B, ABCG8, SPACA6P, IDS, PGLYRP3, RXFP1, CD300LD, KIR2DL4, TXNDC15, OPN4, FAM187A, VTN, IL20, NLGN4Y, SRPX2, TMPRSS11A, KLK9, FSHR, TCTN2, PCYOX1L, SLCO4A1, LOXL4, GZMB, OOSP2, LYPD3, PAMR1, MUC7, ART4, CLU, TXNDC12, LLCFC1, CD69, CTHRC1, CTLA4, HAVCR2, WFIKKN1, TLR6, GDF8, GPX7, S100A9, EFNA2, FCRL5, KLRC4, SFRP4, BMP8A, SGCE, TMEM149, SLC1A4, LRRC4B, CD200, GNRH1, ADAMTS16, COL14A1, LRRN5, LCN10, FLT1, PLA2G3, CSF3R, HTR3B, GP9, LRFN5, FIBIN, MMP8, CXCL17, PRSS50, CDH5, CXCL10, ZP2, GLB1, DEFB135, MEPE, TSPAN1, APP, ELFN2, KIR2DS4, C7, TNFRSF21, WNT7A, FKBP10, TMEM204, GRIA3, AVP, IL21R, CD300LB, FCAR, TMED1, CALR, PDGFA, ADAMDEC1, CHRDL1, FKBP2, C OLEC10, PO STN, TNF SF14, C11orf24, ERVK-7, SPINK7, ADGRE3, TNFRSF17, FGF20, SAA4, C1QTNF5, TWSG1, SLC22A20P, MFAP3, BMP3, BTN2A2, HPSE, PRDX4, PTPRJ, PKD2, CEACAM1, CHRNA6, ENPP3, ARTS, FZD10, TMEM25, EDDM3B, LIPK, ITGB8, C2orf66, SNORC, TGFBI, ITLN1, SERPINA1, CRTAP, TEX264, UNCSB, SFTA3, RETNLB, AQP10, CCL3, NRP1, SERPINF1, SPAG11A, DEFB112, TMPRSS13, PLA2G7, LINGO2, IGDCC3, TMEM81, KSP37, IFNGR1, CFB, ITGB1, KITLG, SCARA3, TIMP2, ROR2, GATD1, LRIT2, ZP3, CD86, LY75, PRSS58, PON1, PSPN, FOXRED2, RCN2, FNDCS, SLAMF9, HAVCR1, APOM, GABRD, DUOXA1, APMAP, TSPAN8, HRG, TAC4, NCR1, KIR2DL5B, FGFRL1, RETN, ERVH48-1, NRG1, GBA, CCL7, TSKU, VSTM5, NDP, ROBO2, CLEC4C, CDNF, AMY1A, CD44, SEMA4F, GSG1L2, NTF5, FNDC7, C5orf38, CXCL3, IL6, EFEMP2, BTNL9, NGFB, GPR108, PLAT, CD300LF, DNAJB9, NXPH1, C2, PCDH12, DEFB108B, CNPY3, ARSG, WNT8A, IL4, IL1R2, VSTM4, PNLIPRP2, AGRN, IL9R, PLA2G1B, BTNL10, CHIT1, CCR9, ANO4, PIANP, EDEM2, SFRP1, GDF10, CCL1, SHISA9, IL17RC, BTN1A1, CRELD2, LYG1, CD74, LRTM2, PGLYRP4, CCL23, TMEM91, TTYH2, PGLYRP2, CCDC126, C1QTNF1, SEMA3B, LYPD2, BPIFA3, PTPRG, IMPG1, CRISP1, KAL1, CTF1, SFTPA2, PPIA, CD248, NAGA, DNAJC3, C1QL2, VSIG8, C1orf233, KCNMB1, NTRK2, CELA1, ADAM19, IGFBP4, AMTN, SEMA3D, IGFL4, GVQW1, CX3CL1, C1QTNF9B, VASN, TMEM59, LILRA3, CA6, EPPIN, TMEM132A, KLK6, RTN4R, AKR1B10, CD207, CPE, INHBB, SLC22A5, FGB, LGI1, CHID1, PTPRR, TM4SF6, CD300A, NOPE, EFNB2, IGF2R, FAM3B, SMOC1, TMX4, NINJ2, LHCGR, IGIP, ENH1, IL15, PTCH2, CR1L, TPP1, PROK1, CCBE1, RNPEP, SPP2, IL13RA2, HSD17B13, SFTPB, CASQ1, CD96, NPNT, LILRB1, MXRA8, LEP, CDHR2, DNASE2, CA14, F2, VSIG4, GGH, OTOR, WFDC10A, FGF5, IGSF11, FSTL5, NOX5, GLRA1, BMP15, FGG, LRRC52, FGFR1, LRRTM1, TMCO3, LRP12, MPL, MEP1A, LRRC4, EPHA8, METTL7A, CCL17, IGLL1, FAM234A, CDH10, GABRA3, LINGO4, CCDC134, DHRS7, GDF1, RSPRY1, KIR3DL3, FJX1, GP5, PRSS57, WNT5A, PCDHB6, MMP10, TXN, C19orf10, TNFRSF1B, JAM3, CHRNA5, SLC34A1, EPHA2, PCOLCE, HAPLN4, DHRS7C, IL34, SGCA, IL6R, PTTG1IP, TREML2, CCDC70, CDH19, CLCC1, AMBN, BTN2A3P, SLC8B1, TMEM154, NUCB2, ADCYAP1, ERVK-24, GHR, CFHR4, ALPL, C1QC, CPO, C11orf44, OVCH2, GPX5, TOR2A, SHISA6, CCL28, CD84, NXPH3, LRRC55, CRLF2, RCN1, ASIC5, SLC22A11, XCL2, LYPD6, DAG1, LILRB2, TNFSF6, MMP25, CDH1, BAMBI, KLK14, SCN2B, FOLR3, TSPAN15, C21orf62, LAG3, HGFAC, CEACAM19, ADAMTS18, CHI3L2, TINAG, AMY2A, CLEC4E, SPESP1, LRCOL1, GFRAL, EPO, P2RX3, GABRB3, SIRPB1, CPVL, CD151, IL17A, HABP2, KAZALD1, EGFLAM, NCR2, PRG3, CD14, SLC20A1, IGFL2, ERLEC1, C4BPB, LILRB4, ADGRE4P, TMEM95, THNSL2, IFNAR2, PM20D1, HPSE2, RNF43, IL13RA1, DLL1, GFRA3, LTBR, IL17C, TFRC, RARRES2, ZPBP, LCAT, VSIG2, CGB2, IL3, ACVR1B, TNA, CLEC1A, ARSD, PNLDC1, CXCL13, AMICA1, THBS2, MZB1, ANGPTL3, IZUMO3, ATP1A1, ADAM9, PECAM1, IL2ORB, IL1F9, UGT1A9, CPM, CD63, CMA1, CNNM4, PRSS21, WNT6, CXCL16, CYB5D2, SLC5A4, RNF167, SERPINAll, MAGT1, LINGO1, TLR3, NPR3, SLIT3, DNASE1L1, GBP1, ARSF, IL2, OTOL1, MR1, MMRN1, MUC15, OPTC, PLET1, CLEC5A, CBA, CD3E, FCGR2A, SPACA5, TNFSF11, BMP1, LCN1, CDH9, AMIGO1, SLC26A2, P2RX6, SHISA2, ULBP1, OLR1, GIF, WNT8B, FAM19A1, C8B, CHODL, SPACA4, CER1, SGCG, PATE2, CRISPLD1, CDH17, CDH15, NAXE, TLR2, SLAMF7, P2RX7, TMEM8, FCRLB, CCL13, TULP3, GDF9, SULF2, PTX4, LGI3, ANO10, GALP, FAM168B, ALPI, FGL2, TIMP3, ANO2, SERPINA4, WNT2, EFNA3, SERPINA2, CEACAM8, INSL3, PCDHGA4, CD81, GLRA4, EDIL3, ALPPL2, PATE4, CD4, LGR5, TGFB1, IL7R, APOC1, FZD4, FCER1A, CD5L, P2RX4, KERA, LYG2, HYAL4, PTH, C3orf58, ERP44, ISLR, CASQ2, CXCL12, ERVV-1, NTS, TARM1, P4HA1, ADAM28, KLRB1, NCAM2, LRRC15, TMEM155, SEMA6C, SERPINA12, ANGPTL1, SEMA6A, SERPINA3, HEPACAM, C1orf159, PF4, TCN2, MBL2, MEGF10, PRRG4, IL23R, HTR3A, LIPA, IGFL3, LOX, CD200R1L, IGSF4B, SELE, LAS2, C17orf99, IGFALS, COLGALT2, ZG16B, CBLN1, DGCR2, PCDHGC3, TMEM178A, VSTM2L, CNTN4, ACP5, TNXB, CEACAM16, CD38, GZMA, TPSB2, IL17B, KEL, IFNA2, CD5, LILRB3, SLAMF1, TEK, PCDHB16, SPINK5, TNFRSF12A, VLDLR, PDGFRB, HLA-DRB5, CRTAM, GFOD1, LRRC38, MATN1, MMP14, MUSK, IL1F10, LRRC21, GDPD5, REG1A, FGL1, EPOR, GNS, C1QA, ANTXR2, SLCO3A1, ENTPD1, ADAM29, PLBD1, HLA-DOB, LAMB3, IL1RAPL1, GDPD2, ITGA8, SRPX, CASP4, PI16, EPDR1, PROS1, ABHD17A, SCUBE2, CLEC4F, CREG1, ATP6AP1, CLEC4G, PRS S47, EFEMP1, CE Sl, CFC1B, TSPAN18, CD33, ITGA2, GABRG3, GH1, KIRREL3, C15orf61, GABRP, HEXB, HRC, GLIPR1, VWA2, PCDH2O, NOTUM, LRRC24, ITFG1, LRRTM4, COL10A1, SLC39A8, PVRL3, PRSS41, KCNE4, WFIKKN2, SMPDL3A, DPEP3, CDH23, IGFBP2, PCDHA9, FAM172A, HSPA5, GAS1, TMPRSS2, IFNB1, PTPRD, NLGN1, UGT1A3, CILP2, CD58, MFI2, TNFRSF9, P SAP, ENDOD1, APLP1, IL17RE, C1QTNF4, CPB2, TLR1, KIRREL, ECM1, SPARCL1, COMT, CALU, CST9, CLUL1, NLGN3, MUCL1, LRFN4, CCL26, TRIL, CD209, TMPRSS3, LGR8, CRISP3, METRNL, WNT9A, FGF6, UGT1A6, THPO, MMP21, ISLR2, COLEC12, DLL4, CDH18, TMEM120A, TMEM219, C9orf72, OLFML3, ALCAM, EPHB6, ITIH3, SERPINA6, DHRS13, FN1, CHRDL2, CNTN6, KLK1, LGR6, NDNF, ERO1B, CRISP2, DKK4, C10orf54, DEFB129, LRRTM3, ELSPBP1, ASPN, ADGRG7, GFRA2, FAM132B, CLEC4M, LGI2, PLA2G2C, CCDC47, AOC2, ZPLD1, MDK, QPCT, AGA, RTN4RL2, PKD2L1, BTD, LILRA1, PRG2, CNTN1, VNN2, UGT2B28, PRSS37, PILRB, CD300C, NPIPB7, FAM171B, DHRS9, PZP, IGFBP1, ESAM, ADGRE2, CDH16, NOTCH2NL, IFNAR1, IL1R1, MATN2, TMEFF1, TM9SF3, APCDD1, NEU1, ANXA1, FGFBP1, GDNF, CNTN3, ITGAM, CTSZ, AIMP1, METTL24, COMP, CST2, PRSS22, SCG3, CFI, CEACAM5, IGFBPL1, INFL4, GPC6, LTF, PLTP, FBN3, IL12RB1, CDH6, C6orf89, FMOD, CPXM2, ISM2, PRSS48, LILRB6, MSR1, SEMA4C, SIRPG, CD276, GDF6, PROC, TREH, SPON1, C17orf80, AGR2, SLCO4C1, NXPE1, PODNL1, PCDH9, PDIA3, RTN4RL1, F9, SIDT2, FLRT2, GSN, WFDC1, PLAC9, SCG2, F12, NTNG1, GHDC, MMP12, SPINT4, MAN2B1, TIMP1, NXPH4, LIPC, SOD3, EGFL6, IGSF9, NID1, ENPP6, APOA4, GC, COL9A3, HTR3E, CLDN23, ARTN, CSF2RB, HYAL3, TULP2, TACSTD2, GPC5, CPA1, SLITRK4, CLDN4, SLITRK3, ADAMTS17, ANGPT2, DLL3, GZMH, PRSS35, IL23A, LAD1, ADAM21, ANGPTL6, LIPF, C7orf69, OLFM3, IL2ORA, UGT2B10, GAA, FZD9, DPP7, CLEC14A, CHL1, CIS, LGI4, SCARB1, BCHE, CLEC3A, ITGB7, PCOLCE2, CALHM1, BOC, SEMA4B, CP, GABRB1, NPIPB15, CLSTN1, HNRNPA2B1, SLITRK5, PCDHB15, CNTNAP4, APOH, INSR, ABHD2, CXCL14, OLFML1, LRPAP1, DSC1, CLN5, IGSF1, TLR7, IL10RA, GP1BA, BRICD5, GCG, BPIFA2, FGF16, CEACAM3, BMP8B, APLP2, TSPAN17, LIPI, WNT3, SERPINH1, SIGLEC14, ERO1A, GABRR2, P3H3, LRP5, CLCF1, IL17D, PI15, GZMM, APOA5, LEPR, NOX4, SERPING1, IMPG2, LRP11, F5, CNTNAP2, LYZL4, TMEM178B, SLIT2, SCNN1B, CETP, VTCN1, PTPRF, OTOA, IL1RL2, SERPINE2, TNR, TGOLN2, CDH3, TOR3A, TP53I13, NAMPT, UGT1A8, ART3, BST1, OXNAD1, CPB1, EDA, MADCAM1, CHRNB1, OSMR, NCAN, PLA1A, GGT5, ITGB6, ITGAX, MEGF9, DEAF1, CD7, ITGB2, EFNB3, CRHBP, TLR9, BPIFB3, CLEC11A, TREM1, LEFTY2, TSPAN5, AOC3, LYPD4, CD180, UGT3A2, ELANE, LRRN4, DDRGK1, CDON, ATP1A3, PCDHGB3, CELA3A, HTR3D, DEFB128, PTPRO, LRIG3, TF, WNT11, HTRA4, NTNS, ERBB3, ATP2C2, IL10, LY6E, IL4I1, TLR4, ICAM4, TMPRSS12, PCDHB11, HLA-F, PRSS33, MRC1, LAYN, FBLN1, TCTN1, PROKR1, EPHA4, PRSS1, ADAM20, ANTXR1, SELPLG, NFASC, APOC4, ASPRV1, TMC3, CCLS, NRP2, CILP, IGF1R, SEC11B, AREG, ECM2, TFR2, CD79B, ACVR1C, CTRL, MEP1B, LYVE1, TMPRSS11E, F13A1, TYRO3, ADAM22, RNASE1, NID2, C6orf15, PDGFRA, NELL1, GLRB, FREM1, MMP19, ENAM, CPQ, MET, ITGBL1, TIE1, PODXL, PRTG, FAM20A, CLEC12A, LRRC19, CLCA4, HSD17B6, CDT6, SLC4A7, ITGA2B, EGFR, DNAJB11, DCST1, GREM1, JAG2, SCPEP1, HIDE1, ADAM18, KLK7, SPATA6, HHIP, KIR3DL2, CTSE, BACE2, LUZP2, CPN1, C14orf37, CLCA1, IL26, SLC5A5, LRRN3, SELP, P4HA2, MDGA1, ASTN1, CTSC, AZU1, SCUBE1, BPI, MYOC, KIAA0319L, CELA3B, NPTX1, CNTNAP5, and SNED1. In one embodiment, the secreted or extracellular protein or peptide is a target provided in Table 2. In one embodiment, the secreted or extracellular protein or peptide is CCL16, CD302, CD3D, CD3E, CEACAM4, ILlORA, IL13, IL17A, IL1RN, IL21, PROCR, TIGIT, TNF, TNFRSF17, or TNFSF18.

[0110] In some embodiments, a nanobody that binds to a secreted or extracellular protein or peptide of the invention inhibits, blocks, or interferes with at least one activity of the secreted or extracellular protein or peptide (e.g., enzymatic activity, substrate binding activity, receptor binding activity, etc.), in vitro, in situ and/or in vivo.

[0111] In one aspect, this disclosure provides an isolated antibody, or binding portion thereof, comprising a heavy chain variable region comprising at least one, two or all three CDR sequences of a SEQ ID NO selected from the group consisting of SEQ ID NO:1-SEQ ID NO:42890 as defined by the CDR flanking regions as set forth in SEQ ID NO:42891 and SEQ ID NO:42892 flanking CDR1, SEQ ID NO:42893 and SEQ ID NO:42894 flanking CDR2 and SEQ ID NO:42895 and SEQ ID NO:42896 flanking CDR3 for each of SEQ ID NO:1-SEQ ID NO:42890. Accordingly, in some embodiments, the invention comprises a nanobody comprising at least one, two or all three CDR sequences of a SEQ ID NO selected from the group consisting of SEQ ID NO:1-SEQ ID NO:42890 as defined by the CDR flanking regions as set forth in SEQ ID NO:42891 and SEQ ID NO:42892 flanking CDR1, SEQ ID NO:42893 and SEQ ID NO:42894 flanking CDR2 and SEQ ID NO:42895 and SEQ ID NO:42896 flanking CDR3 for each of SEQ ID NO:1-SEQ ID NO:42890.

[0112] In one aspect, this disclosure provides a nucleic acid molecule comprising a nucleotide sequence encoding an isolated antibody, or binding portion thereof, comprising a heavy chain variable region comprising at least one, two or all three CDR sequences of a SEQ ID NO selected from the group consisting of SEQ ID NO:1-SEQ ID NO:42890 as defined by the CDR flanking regions as set forth in SEQ ID NO:42891 and SEQ ID NO:42892 flanking CDR1, SEQ ID NO:42893 and SEQ ID NO:42894 flanking CDR2 and SEQ ID NO:42895 and SEQ ID NO:42896 flanking CDR3 for each of SEQ ID NO:1-SEQ ID NO:42890. Accordingly, in some embodiments, the invention comprises a nucleic acid molecule comprising a nucleotide sequence encoding a nanobody comprising at least one, two or all three CDR sequences of a SEQ ID NO selected from the group consisting of SEQ ID NO:1-SEQ ID NO:42890 as defined by the CDR flanking regions as set forth in SEQ ID NO:42891 and SEQ ID NO:42892 flanking CDR1, SEQ ID NO:42893 and SEQ ID NO:42894 flanking CDR2 and SEQ ID NO:42895 and SEQ ID NO:42896 flanking CDR3 for each of SEQ ID NO:1-SEQ ID NO:42890.

[0113] The antibody CDR sequences of the nanobodies set forth in SEQ ID NO:1-SEQ ID NO:42890, as defined by the CDR flanking regions as set forth in SEQ ID NO:42891 and SEQ ID NO:42892 flanking CDR1, SEQ ID NO:42893 and SEQ ID NO:42894 flanking CDR2 and SEQ ID NO:42895 and SEQ ID NO:42896 flanking CDR3, establish a novel family of secreted or extracellular protein binding proteins, isolated in accordance with this invention, and comprising polypeptides that include the CDR sequences listed. To generate and to select CDR's of the invention having binding and/or detection and/or inhibitory activity, standard methods known in the art for generating binding proteins of the present invention and assessing the binding and/or detection and/or inhibitory characteristics of those binding protein may be used, including but not limited to those specifically described herein.

[0114] In some embodiments, the invention comprises a nanobody comprising an amino acid sequence selected from the group consisting of SEQ ID NO:1-SEQ ID NO:42890. In some embodiments, the invention comprises a nucleic acid molecule comprising a nucleotide sequence encoding a nanobody comprising an amino acid sequence selected from the group consisting of SEQ ID NO:1-SEQ ID NO:42890.

[0115] The following is a non-limiting example of the compositions of the invention. The following is provided as an example of the use of the CDR sequences as defined by the flanking regions as set forth in SEQ ID NO:42891 and SEQ ID NO:42892 flanking CDR1, SEQ ID NO:42893 and SEQ ID NO:42894 flanking CDR2 and SEQ ID NO:42895 and SEQ ID NO:42896 flanking CDR3 to identify the compositions of the invention, and is not limiting as the invention should be construed to include similar compositions for each of SEQ ID NO:1-SEQ ID NO:42890.

[0116] In one embodiment, the composition comprises an antibody, or fragment thereof, for binding to CCL16. In one embodiment, the composition comprises a nucleic acid molecule encoding an antibody, or fragment thereof, for binding to CCL16. In one embodiment, the antibody, or fragment thereof, for binding to CCL16 has a binding score of at least 0.9.

[0117] In one embodiment, the antibody, or fragment thereof, for binding to CCL16 comprises at least one, at least two, or each of a heavy chain CDR1 sequence comprising amino acid residues 26-32 of SEQ ID NO:3779, a heavy chain CDR2 sequence comprising amino acid residues 46-57 of SEQ ID NO:3779, and a heavy chain CDR3 sequence comprising amino acid residues 96-105 of SEQ ID NO:3779. In one embodiment, the antibody, or fragment thereof, for binding to CCL16 comprises an amino acid sequence as set forth in SEQ ID NO:3779.

[0118] In one embodiment, the invention provides a nucleic acid molecule comprising a nucleotide sequence encoding an antibody, or fragment thereof, for binding to CCL16 comprising at least one, at least two, or each of a heavy chain CDR1 sequence comprising amino acid residues 26-32 of SEQ ID NO:3823, a heavy chain CDR2 sequence comprising amino acid residues 46-57 of SEQ ID NO:3823, and a heavy chain CDR3 sequence comprising amino acid residues 96-109 of SEQ ID NO:3823. In one embodiment, the nucleic acid molecule comprises a nucleotide sequence encoding an amino acid sequence as set forth in SEQ ID NO:3823.

[0119] In some embodiments, the secreted or extracellular protein binding molecules (e.g., antibodies, etc.) of the present invention, exhibit a high capacity to detect and bind their target, as indicated in Table 2, in a complex mixture of salts, compounds and other polypeptides, e.g., as assessed by any one of several in vitro and in vivo assays known in the art. The skilled artisan will understand that the secreted or extracellular protein binding molecules (e.g., nanobodies, etc.) described herein as useful in the methods of diagnosis and treatment and prevention of disease, are also useful in procedures and methods of the invention that include, but are not limited to, an immunochromatography assay, an immunodot assay, a Luminex assay, an ELISA assay, an ELISPOT assay, a protein microarray assay, a Western blot assay, a mass spectrophotometry assay, a radioimmunoassay (MA), a radioimmunodiffusion assay, a liquid chromatography-tandem mass spectrometry assay, an ouchterlony immunodiffusion assay, reverse phase protein microarray, a rocket immunoelectrophoresis assay, an immunohistostaining assay, an immunoprecipitation assay, a complement fixation assay, FACS, a protein chip assay, separation and purification processes, and affinity chromatography (see also, 2007, Van Emon, Immunoassay and Other Bioanalytical Techniques, CRC Press; 2005, Wild, Immunoassay Handbook, Gulf Professional Publishing; 1996, Diamandis and Christopoulos, Immunoassay, Academic Press; 2005, Joos, Microarrays in Clinical Diagnosis, Humana Press; 2005, Hamdan and Righetti, Proteomics Today, John Wiley and Sons; 2007).

[0120] More preferably, the secreted or extracellular protein binding molecules (e.g., nanobodies, etc.) of the present invention, exhibit a high capacity to reduce or to inhibit an activity of their target as indicated in Table 2 (e.g., enzymatic activity, substrate binding activity, receptor binding activity, etc.) as assessed by any one of several in vitro and in vivo assays known in the art.

[0121] As used herein, a secreted or extracellular protein binding molecules (e.g., nanobody, etc.) that “specifically binds to a target protein” is intended to refer to a secreted or extracellular protein binding molecules (e.g., nanobody, etc.) that binds to a target protein of any animal. In some embodiments, that antibody binds to a human secreted or extracellular protein.

[0122] In some embodiments, the secreted or extracellular protein binding molecule (e.g., nanobody, etc.) is predicted to bind to its target protein with a binding score of at least 0.5, at least 0.6, at least 0.7, at least 0.8, at least 0.9, at least 0.91, at least 0.92, at least 0.93, at least 0.94, at least 0.95, at least 0.96, at least 0.97, at least 0.98, at least 0.99 or greater than 0.99.

[0123] In some embodiments, the secreted or extracellular protein binding molecule (e.g., nanobody, etc.) binds to its target protein with a KD of 1×10⁻⁶ M or less, more preferably 1×10⁻⁷ M or less, more preferably 1×10⁻⁸ M or less, more preferably 5×10⁻⁹ M or less, more preferably 1×10⁻⁹ M or less or even more preferably 3×10⁻¹⁰ M or less. The term “does not substantially bind” to a protein or cells, as used herein, means does not bind or does not bind with a high affinity to the protein or cells, i.e., binds to the protein or cells with a KD of greater than 1×10⁶ M or more, more preferably 1×10⁵ M or more, more preferably 1×10⁴ M or more, more preferably 1×10³ M or more, even more preferably 1×10² M or more. The term “KD”, as used herein, is intended to refer to the dissociation constant, which is obtained from the ratio of Kd to Ka (i.e., Kd/Ka) and is expressed as a molar concentration (M). KD values for a secreted or extracellular protein binding molecule (e.g., nanobody, etc.) can be determined using methods well established in the art. A preferred method for determining the KD of a binding molecule (e.g., antibody, etc.) is by using surface plasmon resonance, preferably using a biosensor system such as a Biacore® system.

[0124] As used herein, the term “high affinity” refers to a nanobody having a KD of 1×10⁻⁷ M or less, more preferably 5×10⁻⁸ M or less, even more preferably 1×10⁻⁸ M or less, even more preferably 5×10⁻⁹ M or less and even more preferably 1×10⁻⁹ M or less for a target binding partner molecule. However, “high affinity” binding can vary between antibody isotypes. For example, “high affinity” binding for an IgM isotype refers to an antibody having a KD of 10⁻⁶ M or less, more preferably 10⁻⁷ M or less, even more preferably 10⁻⁸ M or less.

### Multiparatopic Antibodies

[0125] In some embodiments, the present invention provides amino acid sequences and antibody compositions that are capable of binding to two or more different antigenic determinants, or epitopes. In this context, the amino acid sequences and polypeptides of the invention are also referred to as “multiparatopic” (such as e.g. “biparatopic” or “triparatopic”, etc.) amino acid sequences and polypeptides. The multiparatopic amino acid sequences and polypeptides of the invention can be directed against any antigenic determinants, or epitopes. For example, and generally, a biparatopic polypeptide of the invention may comprise at least one amino acid sequence or nanobody directed against a first antigenic determinant or epitope, and at least one amino acid sequence or nanobody directed against a second antigenic determinant or epitope different from the first antigenic determinant or epitope. In some embodiments, the amino acid sequences and/or nanobodies are linked, for example via a suitable linker.

[0126] A triparatopic polypeptide of the invention may comprise at least one further amino acid sequence or nanobody of the invention directed against a third antigenic determinant or epitope, different from both the first and second antigenic determinant, epitope, part or domain.

[0127] In some embodiments, multiparatopic polypeptides of the invention may contain at least two amino acid sequences or nanobodies of the invention directed against at least two different antigenic determinants or epitopes of the same secreted or extracellular protein or peptide. In some embodiments, multiparatopic polypeptides of the invention may contain at least two amino acid sequences or nanobodies of the invention directed against at least two different antigenic determinants or epitopes of at least two different secreted or extracellular proteins or peptides.

### Generation Of Nanobodies

[0128] The invention provides a method of generating nanobody compositions that bind to a target extracellular or secreted protein with high affinity. In one embodiment, the nanobodies of the invention can be generated by using a high-throughput screening technique (HAPPY) that combines two technologies in directed evolution: yeast surface display and phage display.

[0129] In one embodiment, the method comprises the steps of panning phage-displayed nanobodies against a library of displayed extracellular antigens, eluting the phage using a protease to cleave the nanobody-bound antigens off the dusplay surface, and quantifying the degree of enrichment of individual nanobodies using next-generation sequencing.

[0130] In one embodiment the nanobodies of the invention are displayed as a phage library, where that phage comprises human immunoglobulin genes and the library expresses human antibody binding domains as, for example, nanobodies, single chain antibodies (scFv), as Fab, or some other construct exhibiting paired or unpaired antibody variable regions (Vaughan et lo al. Nature Biotechnology 14:309-314 (1996): Sheets et al. PITAS (USA) 95:6157-6162 (1998)); Hoogenboom and Winter, J. Mol. Biol., 227:381 (1991); Marks et al. J. Mol. Biol., 222:581 (1991)). Such phage display methods for isolating human antibodies are established in the art. See for example: U.S. Pat. Nos. 5,223,409; 5,403,484; and 5,571,698 to Ladner et al.; U.S. Pat. Nos. 5,427,908 and 5,580,717 to Dower et al.; U.S. Pat. Nos. 5,969,108 and 6,172,197 to McCafferty et al.; and U.S. Pat. Nos. 5,885,793; 6,521,404; 6,544,731; 6,555,313; 6,582,915 and 6,593,081 to Griffiths et al.

[0131] Preparation of a display library of secreted proteins, extracellular proteins, peptide fragments thereof, or any combination thereof can be performed using any suitable technique. Display techniques such as yeast display (Boder, Raeeszadeh-Sarmazdeh et al. 2012; Bosma, Rink et al. 2019; Linciano, Pluda et al. 2019) and bacterial display (Samuelson, Gunneriusson et al. 2002; Lofblom 2011; Shivange and Daugherty 2015), in which a polypeptide is genetically fused or non-covalently tethered to an outer membrane protein of the yeast or bacterial cell, has enabled the screening of large combinatorial libraries of linear peptides (e.g., 10⁶ to 10⁹ members) from which peptide ligands for a target molecule of interest could be identified (Shivange and Daugherty 2015; Linciano, Pluda et al. 2019). In one embodiment the secreted proteins, extracellular proteins, peptide fragments thereof, or any combination thereof are displayed as a yeast library.

In some embodiments, other cell types can be used to display secreted or extrecellular proteins. In addition to yeast and bacterial cells, mammalian cells, insect cells, and plant cells could be used. In some embodiments the yeast cell is from the species Saccharomyces cerevisiae, Schizosaccharomyces pombe, or Pichia pastoris, or Kluyveromyces lactis. In some embodiments the bacterial cell is from the species Escherichia coli or Bacillus subtilis. In some embodiments the insect cell is derived from the species Spodoptera frupperda, Trichoplusia ni, or Drosophila melanogaster. In some embodiments the mammalian cell is derived from the species Homo sapiens, Mus musculis, or Cricetulus griseus. In one embodiment the secreted proteins, extracellular proteins, peptide fragments thereof, or any combination thereof are displayed as a yeast library.

[0132] The isolated nucleic acids of the present invention can be made using (a) recombinant methods, (b) synthetic techniques, (c) purification techniques, or combinations thereof, as well-known in the art. DNA encoding the nanobodies is readily isolated and sequenced using methods known in the art. Display techniques, such as phage display, wherein the coding sequence and the translation product are linked, allow for simplified selection of an antibody or nanobody that binds to a target and isolation of the nucleic acid. After phage selection, the antibody coding regions from the phage can be isolated and directly sequenced, used to generate whole nanobodies, including humanized nanobodies, or any other desired binding fragment, or expressed in any desired host, including mammalian cells, insect cells, plant cells, yeast, and bacteria.

### Machine Learning Methods of Identifying Nanobodies with High Binding

[0133] In some embodiments, machine learning algorithms or general linear models are used to produce a predictor of target binding, or a binding score. Exemplary maching learning algorithms that can be used to generate a binding score, include, but are not limited to, logistic regression models, random forest analysis, support vector machines, neural networks, naive Bayes classifier, and nearest neighbour algorithms. The model is a multi-class classifier based on a logistic regression model.

[0134] In one emboidment, the binding score provides categorical values indicating the probability of whether a nanobody 1) binds to its target antigen via ELISA, but not a negative control antigen BSA; 2) binds to both the target antigen and BSA by ELISA; or 3) binds to neither target antigen or BSA by ELISA. In one emboidment, the binding score provides, the probability of a given nanobody being able to bind to target antigen, but not the control antigen, in ELISA format.

[0135] Factors which may be used as inputs to a machine learning model include, but are not limited to, percentage of NGS read count of a nanobody compared to the total read count of all nanobodies in Round 1 input, percentage of NGS read count of a nanobody compared to the total read count of all nanobodies in Round 1 output, percentage of NGS read count of a nanobody compared to the total read count of all nanobodies in Round 2 input, percentage of NGS read count of a nanobody compared to the total read count of all nanobodies in Round 2 output, percentage of NGS read count of a nanobody compared to the total read count of all nanobodies in Round 3 input, percentage of NGS read count of a nanobody compared to the total read count of all nanobodies in Round 3 output, fold change of a nanobody's abundance from Round 1 input to Round 1 output, fold change of a nanobody's abundance from Round 2 input to Round 2 output, fold change of a nanobody's abundance from Round 3 input to Round 3 output, rotal number of rounds where a nanobody enriched (enrichment>1), growth bias between Round 1 and 2 (Fold change of a nanobody's abundance from Round 1 output to Round 2 input), growth bias between Round 2 and 3 (Fold change of a nanobody's abundance from Round 2 output to Round 3 input), mean fluorescent intensity of FLAG staining on yeast as measured by flow cytometry, percentage of yeast stained positively by FLAG as measured by flow cytometry, and mean fluorescent intensity of polyclonal phage binding on yeast after Round 3, as measured by flow cytometry.

[0136] In some embodiments, a nanobody is identified as having high affinity for its target when the binding score is at least 0.5, at least 0.6, at least 0.7, at least 0.8, at least 0.9, at least 0.91, at least 0.92, at least 0.93, at least 0.94, at least 0.95, at least 0.96, at least 0.97, at least 0.98, at least 0.99 or greater than 0.99.

### Methods of Using the Binding Molecules

[0137] Given the properties of the secreted or extracellular protein binding molecules (e.g., nanobodies, etc.) of the present invention, the secreted or extracellular protein binding molecules are suitable as diagnostic, therapeutic and prophylactic agents for diagnosing, treating or preventing diseases, disorders and associated conditions in humans and animals.

[0138] In general, use comprises administering a therapeutically or prophylactically effective amount of one or more nanobodies or binding fragments of the present invention to a susceptible subject or one exhibiting a condition in which the target activity is known to have pathological sequelae. Any active form of the secreted or extracellular protein binding molecules (e.g., nanobodies, etc.) can be administered, including antibody Fab and F(ab′)2 fragments.

[0139] In some embodiments, the secreted or extracellular protein binding molecule used is compatible with the recipient species such that an immune response to the secreted or extracellular protein binding molecule does not result in an unacceptably short circulating half-life or induce an immune response to the secreted or extracellular protein binding molecule in the subject.

[0140] Treatment of individuals may comprise the administration of a therapeutically effective amount of the secreted or extracellular protein binding molecule of the present invention. The secreted or extracellular protein binding molecule can be provided in a kit as described below. The secreted or extracellular protein binding molecule can be used or administered as a mixture, for example in equal amounts, or individually, provided in sequence, or administered all at once. In providing a patient with the secreted or extracellular protein binding molecule, the dosage of administered agent will vary depending upon such factors as the patient's age, weight, height, sex, general medical condition, previous medical history, etc.

[0141] In general, if administering a systemic dose of a secreted or extracellular protein binding molecule, it is desirable to provide the recipient with a dosage of a secreted or extracellular protein binding molecule which is in the range of from about 1 ng/kg-100 ng/kg, 100 ng/kg-500 ng/kg, 500 ng/kg-1 μg/kg, 1μg/kg-100 μg/kg, 100 μg/kg-500 μg/kg, 500 μg/kg-1 mg/kg, 1 mg/kg-50 mg/kg, 50 mg/kg-100 mg/kg, 100 mg/kg-500 mg/kg (body weight of recipient), although a lower or higher dosage may be administered. Dosages as low as about 1.0 mg/kg may be expected to show some efficacy. Preferably, about 5 mg/kg is an acceptable dosage, although dosage levels up to about 50 mg/kg are also preferred especially for therapeutic use. Alternatively, administration of a specific amount of the secreted or extracellular protein binding molecule may be given which is not based upon the weight of the patient such as an amount in the range of 1 μg-100 μg, 1 mg-100 mg, or 1 gm-100 gm. For example, site specific administration may be to body compartment or cavity such as intrarticular, intrabronchial, intraabdominal, intracapsular, intracartilaginous, intracavitary, intracelial, intracelebellar, intracerebroventricular, intracolic, intracervical, intragastric, intrahepatic, intramyocardial, intraosteal, intrapelvic, intrapericardiac, intraperitoneal, intrapleural, intraprostatic, intrapulmonary, intrarectal, intrarenal, intraretinal, intraspinal, intrasynovial, intrathoracic, intrauterine, intravesical, intralesional, vaginal, rectal, buccal, sublingual, intranasal, ophthalmic,or transdermal means.

[0142] The secreted or extracellular protein binding molecule composition can be prepared for use for parenteral (subcutaneous, intramuscular or intravenous) or any other administration particularly in the form of liquid solutions or suspensions; for use in vaginal or rectal administration particularly in semisolid forms such as, but not limited to, creams and suppositories; for buccal, or sublingual administration such as, but not limited to, in the form of tablets or capsules; or intranasally such as, but not limited to, the form of powders, nasal drops or aerosols or certain agents; or ophthalmically such as, but not limited to, eye drops; or for the treatment of dental disease; or transdermally such as not limited to a gel, ointment, lotion, suspension or patch delivery system with chemical enhancers such as dimethyl sulfoxide to either modify the skin structure or to increase the drug concentration in the transdermal patch, or with oxidizing agents that enable the application of formulations containing proteins and peptides onto the skin (WO 98/53847), or applications of electric fields to create transient transport pathways such as electroporation, or to increase the mobility of charged drugs through the skin such as iontophoresis, or application of ultrasound such as sonophoresis (U.S. Pat. Nos. 4,309,989 and 4,767,402).

[0143] The secreted or extracellular protein binding molecules of the present invention can be formulated according to known methods to prepare pharmaceutically useful compositions, whereby these materials, or their functional derivatives, are combined in admixture with a pharmaceutically acceptable carrier vehicle. Suitable vehicles and their formulation, inclusive of other human proteins, e.g., human serum albumin, are described, for example, in Remington's Pharmaceutical Sciences (16th ed., Osol, A. ed., Mack Easton Pa. (1980)). In order to form a pharmaceutically acceptable composition suitable for effective administration, such compositions will contain an effective amount of the above-described compounds together with a suitable amount of carrier vehicle. Additional pharmaceutical methods may be employed to control the duration of action. Controlled release preparations may be achieved through the use of polymers to complex or absorb the compounds. Another possible method to control the duration of action by controlled release preparations is to incorporate the compounds of the present invention into particles of a polymeric material such as polyesters, polyamino acids, hydrogels, poly(lacticacid) or ethylene vinylacetate copolymers. Alternatively, instead of incorporating these agents into polymeric particles, it is possible to entrap these materials in microcapsules prepared, for example, interfacial polymerization, for example, hydroxymethylcellulose or gelatin-microcapsules and poly(methylmethacylate)-microcapsules, respectively, or in colloidal drug delivery systems, for example, liposomes, albumin microspheres, microemulsions, nanoparticles, and nanocapsules or in macroemulsions.

[0144] The treatment may be given in a single dose schedule, or preferably a multiple dose schedule in which a primary course of treatment may be with 1-10 separate doses, followed by other doses given at subsequent time intervals required to maintain and or reinforce the response, for example, at 1-4 months for a second dose, and if needed, a subsequent dose(s) after several months. Examples of suitable treatment schedules include: (i) 0, 1 month and 6 months, (ii) 0, 7 days and 1 month, (iii) 0 and 1 month, (iv) 0 and 6 months, or other schedules sufficient to elicit the desired responses expected to reduce disease symptoms, or reduce severity of disease.

### Methods of Diagnosis

[0145] In some embodiments, an increase in the level of a secreted or extracellular protein, in a subject's cell, tissue, or bodily fluid, compared with a comparator is used in the methods of the invention as marker for the diagnosis of a disease or disorder, assessing the severity of a disease or disorder, and for monitoring the effect or effectiveness of a treatment of a disease or disorder.

[0146] In one embodiment, the invention is a method of diagnosing a disease or disorder by assessing the level of a secreted or extracellular protein in a patient. Non-limiting examples of this embodiment would be the use of a binder against a secreted or extracellular protein for PET imaging, SPECT imaging, MRI imaging, radiographic imaging, ultrasound imaging, fluorescence imaging, or bioluminescent imaging. In such examples, the binder that recognizes an extracellular or secreted protein may be fused or conjugated to a detection moiety. These moieties may include (but are not limited to) a radioisotope, a magnetic spin-label, a fluorophore, a fluorescent protein, or a bioluminescent protein.

[0147] In one embodiment, the invention is a method of diagnosing a disease or disorder of a subject by assessing the level of a secreted or extracellular protein, in a biological sample of the subject. In one embodiment, the biological sample of the subject is a cell, tissue, or bodily fluid. Non-limiting examples of bodily fluids in which the level of a secreted or extracellular protein, can be assessed include, but are not limited to, blood, serum, plasma and urine. In various embodiments, the level of a secreted or extracellular protein, in the biological sample of the subject is compared with the secreted or extracellular protein level in a comparator. Non-limiting examples of comparators include, but are not limited to, a negative control, a positive control, an expected normal background value of the subject, a historical normal background value of the subject, an expected normal background value of a population that the subject is a member of, or a historical normal background value of a population that the subject is a member of In some embodiments, the method of diagnosing includes a further step of treating the patient for the diagnosed disease or disorder.

[0148] In another embodiment, the invention is a method of assessing the severity of a disease or disorder of a subject by assessing the level of a secreted or extracellular protein in a biological sample of the subject. In one embodiment, the biological sample of the subject is a cell, tissue, or bodily fluid. Non-limiting examples of bodily fluids in which the level of a secreted or extracellular protein can be assessed include, but are not limited to, blood, serum, plasma and urine. In various embodiments, the level of a secreted or extracellular protein in the biological sample of the subject is compared with the secreted or extracellular protein level in a comparator. Non-limiting examples of comparators include, but are not limited to, a negative control, a positive control, an expected normal background value of the subject, a historical normal background value of the subject, an expected normal background value of a population that the subject is a member of, or a historical normal background value of a population that the subject is a member of In some embodiments, the method of assessing the severity includes a further step of treating the patient for the disease or disorder.

[0149] In another embodiment, the invention is a method of monitoring the effect of a treatment of a disease or disorder of a subject by assessing the level of a secreted or extracellular protein in a biological sample of the subject. In one embodiment, the biological sample of the subject is a cell, tissue, or bodily fluid. Non-limiting examples of bodily fluids in which the level of a secreted or extracellular protein can be assessed include, but are not limited to, blood, serum, plasma and urine. In various embodiments, the level of a secreted or extracellular protein in the biological sample of the subject is compared with the secreted or extracellular protein level in a comparator. Non-limiting examples of comparators include, but are not limited to, a negative control, a positive control, an expected normal background value of the subject, a historical normal background value of the subject, an expected normal background value of a population that the subject is a member of, or a historical normal background value of a population that the subject is a member of In some embodiments, the method of monitoring the effect of a treatment includes a further step of treating the patient for the disease or disorder.

[0150] In various embodiments, the subject is a human subject, and may be of any race, sex and age. Representative subjects include those who are suspected of having experienced a disease or disorder, those who have been diagnosed as having experienced a disease or disorder, those who have been diagnosed as having a disease or disorder, and those who are at risk of developing a disease or disorder.

[0151] Information obtained from the methods of the invention described herein can be used alone, or in combination with other information (e.g., disease status, disease history, vital signs, blood chemistry, etc.) from the subject or from the biological sample obtained from the subject.

[0152] In the diagnostic methods of the invention, a biological sample obtained from a subject is assessed for the level of a secreted or extracellular protein contained therein. In one embodiment, the biological sample is a sample containing at least a fragment of a secreted or extracellular protein useful in the methods described herein.

[0153] In other various embodiments of the methods of the invention, the level of a secreted or extracellular protein is determined to be increased when the level of a secreted or extracellular protein is increased by at least 10%, by at least 20%, by at least 30%, by at least 40%, by at least 50%, by at least 60%, by at least 70%, by at least 80%, by at least 90%, by at least 100%, by at least 200%, by at least 300%, by at least 400%, by at least 500%, by at least 600%, by at least 700%, by at least 800%, by at least 900%, by at least 1000%, when compared to with a comparator control. In various embodiments, an increased level of a secreted or extracellular protein is indicative of a disease or disorder.

[0154] In the methods of the invention, a biological sample from a subject is assessed for the level of a secreted or extracellular protein in the biological sample obtained from the patient. The level of a secreted or extracellular protein in the biological sample can be determined by assessing the amount of target polypeptide, or a fragment thereof, in the biological sample, the amount of target mRNA, or a fragment, in the biological sample, the amount of target activity (e.g., enzymatic activity, substrate binding activity, receptor binding activity, etc.) in the biological sample, or a combination thereof. In some embodiments, the level of a secreted or extracellular protein in the biological sample is determined in an assay using at least one of the secreted or extracellular protein binding molecules of the invention described elsewhere herein.

[0155] Methods of measuring a secreted or extracellular protein levels in a biological sample obtained from a patient include, but are not limited to, an immunochromatography assay, an immunodot assay, a Luminex assay, an ELISA assay, an ELISPOT assay, a protein microarray assay, a Western blot assay, a mass spectrophotometry assay, a radioimmunoassay (MA), a radioimmunodiffusion assay, a liquid chromatography-tandem mass spectrometry assay, an ouchterlony immunodiffusion assay, reverse phase protein microarray, a rocket immunoelectrophoresis assay, an immunohistostaining assay, an immunofluorescence assay, an immunoprecipitation assay, a complement fixation assay, FACS, flow cytometry, mass cytometry (e.g., CyTOF), CITE-seq, REAP-seq, MIBI-TOF, an enzyme-substrate binding assay, an enzymatic assay, an enzymatic assay employing a detectable molecule, such as a chromophore, fluorophore, or radioactive substrate, a isotopic label, a substrate binding assay employing such a substrate, a substrate displacement assay employing such a substrate, and a protein chip assay (see also, 2007, Van Emon, Immunoassay and Other Bioanalytical Techniques, CRC Press; 2005, Wild, Immunoassay Handbook, Gulf Professional Publishing; 1996, Diamandis and Christopoulos, Immunoassay, Academic Press; 2005, Joos, Microarrays in Clinical Diagnosis, Humana Press; 2005, Hamdan and Righetti, Proteomics Today, John Wiley and Sons; 2007). In some embodiments, the level of a secreted or extracellular protein in the biological sample is measure with an assay that uses at least one of the secreted or extracellular protein binding molecules of the invention that are described elsewhere herein.

### Kits

[0156] The present invention also provides kits which are useful for carrying out the present invention. In some embodiments, the kit comprises one or more secreted or extracellular protein binding molecule which binds an epitope of its target protein as provided in Table 2 of the invention and an instructional material which describes, for instance, administering the secreted or extracellular protein binding molecule to an individual as a therapeutic treatment or use of the secreted or extracellular protein binding molecule in an assay as described elsewhere herein.

[0157] The present kits comprise a first container containing or packaged in association with the above-described nanobodies. The kit may also comprise another container containing or packaged in association solutions necessary or convenient for carrying out the invention. The containers can be made of glass, plastic or foil and can be a vial, bottle, pouch, tube, bag, etc. The kit may also contain written information, such as procedures for carrying out the present invention or analytical information, such as the amount of reagent contained in the first container means. The container may be in another container apparatus, e.g. a box or a bag, along with the written information.

[0158] Yet another aspect of the present invention is a kit for detecting a secreted or extracellular protein in a biological sample. In some embodiments, the kit includes a container holding one or more secreted or extracellular protein binding molecule which binds an epitope of its target protein as provided in Table 2 and instructions for using the secreted or extracellular protein binding molecule for the purpose of binding to the target to form complex and detecting the formation of the complex such that the presence or absence of the complex correlates with presence or absence of the target in the sample. Examples of containers include multi-well plates which allow simultaneous detection of the target in multiple samples.

[0159] In some embodiments, the kit further comprises a carrier suitable for dissolving or suspending the secreted or extracellular protein binding molecule, or combinations thereof, of the invention, for instance, a pharmaceutically acceptable carrier for dissolving or suspending the secreted or extracellular protein binding molecule prior to administering the secreted or extracellular protein binding molecule of the invention to an individual. Optionally, the kit comprises an applicator for administering the secreted or extracellular protein binding molecule.

### EXPERIMENTAL EXAMPLES

[0160] The invention is now described with reference to the following Examples. These Examples are provided for the purpose of illustration only and the invention should in no way be construed as being limited to these Examples, but rather should be construed to encompass any and all variations which become evident as a result of the teaching provided herein.

[0161] Without further description, it is believed that one of ordinary skill in the art can, using the preceding description and the following illustrative examples, make and utilize the compounds of the present invention and practice the claimed methods. The following working examples therefore, specifically point out the preferred embodiments of the present invention, and are not to be construed as limiting in any way the remainder of the disclosure.

### Example 1: Display of Human Antigens on the Surface of Yeast

### Library Design

[0162] An initial library of 1384 human extracellular proteins was assembled based on protein domains, immunological functions, and yeast-display compatibility. The extracellular portion of each protein was identified by manual inspection of topological domains annotated in the SwissProt database (January 2018). For proteins with uncertain topology, full sequences were run through SignalP 4, Topcons, and GPIPred to identify most likely topologies. For proteins with multiple extracellular portions, in general the longest individual region was chosen for initial amplification. cDNAs for chosen proteins were purchased from GE Dharmacon or DNASU. The protein sequences were further modified to match isoforms available in purchased cDNAs. Proteins whose cDNAs were not purchased were ordered as synthesized gene fragments produced by Twist Bioscience. This human exoproteome library was expanded to encompass an additional 1704 human extracellular proteins for a total of 3088, representing the set of 59.9% of extracellular proteins and nearly all proteins with ectodomain/secreted regions>50 amino acids.

### Library Construction

[0163] A two-step PCR process was used to amplify cDNAs for cloning into a barcoded yeast-display vector. cDNAs were amplified with gene-specific primers, with the forward primer containing a 5′ sequence (CTGTTATTGCTAGCGTTTTAGCA; SEQ ID NO: 42897) and the reverse primer containing a 5′ sequence (GCCACCAGAAGCGGCCGC; SEQ ID NO:43898) for template addition in the second step of PCR. PCR reactions were conducted using 1 μL pooled cDNA, gene-specific primers, and the following PCR settings: 98° C. denaturation, 58° C. annealing, 72° C. extension, 35 rounds of amplification. 1μL of PCR product was used for direct amplification by common primers Aga2FOR and 159REV, and the following PCR settings: 98° C. denaturation, 58° C. annealing, 72° C. extension, 35 rounds of amplification. PCR product was purified using magnetic PCR purification beads (AvanBio). 90 μL beads were added to the PCR product and supernatant was removed. Beads were washed twice with 200 μL 70% ethanol and resuspended in 50 μL water to elute PCR products from the beads. Beads were removed from purified PCR products. The 15 bp barcode fragment was constructed by overlap PCR. 4 primers (bc1, bc2, bc3, bc4) were mixed in equimolar ratios and used as template for a PCR reaction using the following PCR settings: 98° C. denaturation, 55° C. annealing, 72° C. extension, 35 rounds of amplification. Purified product was reamplified with the first and fourth primer using identical PCR conditions. PCR products were run on 2% agarose gels and purified by gel extraction (Qiagen). Purified barcode and gene products were combined with linearized yeast-display vector (pDD003 digested with EcoRI and BamHI) and electroporated into JAR300 yeast cell using a 96-well electroporater (BTX Harvard Apparatus) using the following electroporation conditions: Square wave, 500 V, 5 ms pulse, 2 mm gap. Yeast cell were immediately recovered into 1 mL liquid synthetic dextrose medium lacking uracil (SDO-Ura) in 96-well deepwell blocks and grown overnight at 30° C. Yeast cell were passaged once by 1:10 dilution in SDO-Ura, then frozen as glycerol stocks. To induce antigen expression, yeast were recovered and expanded in liquid synthetic dextrose medium with casamino acids (SDCAA) at 30° C. for 24 hours, and induced by diluting 1:10 into liquid synthetic galactose medium with casamino acids (SGCAA) and cultured at 30° C. for 24 hours. 10⁷ yeast cells were pelleted for each well in V bottom 96-well plates (BrandTech) and resuspend in 150 μL PBE (PBS with 0.5% BSA and 0.5 mM EDTA) containing 1:500 biotinylated anti-FLAG antibody (GenScript). Yeast cell were stained at 4° C. for 1 hour, and washed three times with 200 μL PBE. FLAG displaying yeast was magnetically enriched using Streptavidin coated magnetic beads 0.24-0.47 um, 0.5% w/v (SPHERO). Yeast were expanded in liquid synthetic dextrose medium with casamino acids (SDCAA) at 30° C. overnight, then frozen as glycerol stocks. To induce antigen expression, FLAG enriched yeast were recovered and expanded in liquid synthetic dextrose medium with casamino acids (SDCAA) at 30° C. for 24 hours, and induced by diluting 1:10 into liquid synthetic galactose medium with casamino acids (SGCAA) and cultured at 30° C. for 24 hours. Display of antigens was quantitated by incubating yeast cells in PBE containing 1:3,000 anti-FLAG PE antibody (BioLegend) at 4° C. for 30 minutes and detecting FLAG display on a flow cytometer (SONY).

### Example 2: Display of a Synthetic Nanobody Library on the Surface of Bacteriophage

### Phage Displayed Nanobody Library Assembly

[0164] A synthetic nanobody library was displayed on the surface of M13 filamentous bacteriophage. The synthetic nanobody library was constructed as described before (McMahon, C. et al, Nat Struct Mol Biol. 2018). The nanobody library fragments were digested with restriction enzymes FseI and NsiI at 37° C. for 1 hour and purified by gel extraction (Qiagen). A P3 gene surface display phagemid vector p443 were subjected to restriction digestion at FseI and NsiI at 37° C. for 1 hour and purified by gel extraction (Qiagen). Purified nanobody library fragments and linearized p443 vector were combined and ligated with T4 DNA Ligase (NEB) at 16° C. overnight. Ligation product was purified by Qiaquick PCR Purification Kit (Qiagen) and eluted in water. The purified phagemid library was electroporated into electrocompetent E. coli strain SR320 with the following electroporation settings: 2500 V, 125Ω, and 50 μF. E. coli cells were immediately recovered into 5 mL S.O.C. medium (Corning) for 1 hour by shaking at 37° C. at rotation speed of 220 rpm. M13K07 helper phage particles were added to a final concentration of 10¹⁰ phage per mL for 1 hour at 37° C. The mixture was expanded in 1 L 2YT medium supplemented with Tetracycline (at final concentration of 10 μg/mL), Kanamycin (at final concentration of 50 μg/mL) and Carbenicillin (at final concentration of 100 μg/mL) overnight at 37° C. 10 μL of fresh electroporation culture was serially diluted and plated on LB/Carbenicillin agar plates overnight to estimate the number of colony forming units in the electroporation mixture. The overnight culture was centrifuged, and the phage particles were harvested from the supernatant by precipitation with ⅕ final volume of PEG/NaCl on ice for 30 minutes. The precipitate was resuspended in PBS. A final concentration of 10% glycerol was added and thoroughly mixed to the phage solution before aliquoting and storage at −80° C. The resulting library contained 2.4×10¹⁰ transformants. Each aliquot contained 10¹³ phage particles.

### Selection of HA Displaying Phage Nanobody Library

[0165] The naïve library was selected for expression of HA tag and counter-selected against binding for Neutravidin or promiscuous binding to plates. Anti-HA antibody and Neutravidin (Thermo Fischer Scientific) was immobilized on 96-well MaxiSorp plate (Thermo Scientific) at 4° C. overnight, at a final concentration of 25 pg/mL in PBS. The plates was blocked in Blocking Buffer (PBS with 0.5% BSA) for 2 hours at room temperature. The naïve library was applied onto the Neutravidin plate and incubated at room temperature for 1 hour. Collect the unbound phage solution from Neutravidin plate and apply onto anti-HA plate. The anti-HA plate was incubated at room temperature for 2 hours. The plate was washed 6 times with PT (PBS with 0.05% Tween 20). The phage particles were eluted by incubation with 0.1N HCl solution at room temperature for 5-10 minutes. The elution solution was collected and neutralized by addition of ⅛ volume of Tris pH 11 solution. The mixture was added to 50 mL of log-phase OmniMax culture and cultured for 45 minutes at 37° C. with 220 rpm shaking. M13K07 helper phage particles were added to a final concentration of 10¹⁰ phage per mL for 1 hour at 37° C. The culture was expanded to 1 L of 2YT medium supplemented with Kanamycin and Carbenicillin, and cultured overnight. The overnight culture was centrifuged, and the phage particles were harvested from the supernatant by precipitation with ⅕ final volume of PEG/NaCl on ice for 30 minutes. The precipitate was resuspended in PBS. A final concentration of 10% glycerol was added and thoroughly mixed to the phage solution before aliquoting and storage at −80° C. Each aliquot contained 10¹³ phage particles.

### Example 3: High-Throughput Selection of Phage Displayed Nanobodies on Yeast Displayed Antigens

### HAPPY Selection Procedures

[0166] A comprehensive nanobody selection campaign was performed on 3,088 human extracellular and secreted proteins (FIG. 1). The strategy used to select phage nanobodies specific to yeast antigens is shown in FIG. 2. This workflow, termed HAPPY (High Throughput Antibody discovery by Panning Phage on Yeast), enabled high-throughput affinity selection. In brief, the high-throughput selection pipeline entailed incubation of the collection of nanobody-phage library with a mixed pool of yeast, containing 96 unique strains at a time. Unbound phage were removed by washing the yeast, and the mixed pool of reactive phage were eluted from the surface of yeast. The phage output was amplified, purified, and subjected to a second round of selection of the same process (FIG. 3). The elution was achieved via a proteolytic reaction with HRV 3C protease that enables specific release of phage from displayed antigens (FIG. 4). Lastly, the selection output from the second round were subjected to a third round of selection comprised of individual selections on single yeast strains displaying a unique protein antigen in a highly parallelized process in microtiter plates. After the third round of selection, enriched nanobodies for each antigen were identified by sequencing the phage genomic DNA via next generation sequencing.

[0167] To induce antigen expression, yeast were recovered and expanded in liquid synthetic dextrose medium with casamino acids (SDCAA) at 30° C., and induced by diluting 1:10 into liquid synthetic galactose medium with casamino acids (SGCAA) and cultured at 30° C. for 24 hours. All selection steps were carried out at 30° C. using PBE buffer (PBS with 0.5% BSA and 2 mM EDTA). For Round 1, approximately 10¹³ phage particles were counter-selected with 10⁹ yeast cells transformed with pDD003 expressing only the empty vector. Positive selection was performed by applying the counter-selected phage pool to a mixed pool of 96 antigen displaying yeasts, with approximately 10⁷ yeast cells for each antigen. After washing, 3C protease was added to release antigen binding phage. The polyclonal phage output was amplified via infection of E. coli OmniMax2 (ThermoFischer). The infection culture was purified and subjected to the second round of selection. On the third round of selection, the counter-selection was performed as the previous rounds. The counter-selected phage were split into 96-well plates, each well containing one strain of yeast. Each well was individually washed and eluted.

[0168] The general enrichment of reactive phage in the polyclonal phage pool of each well can be monitored by applying the polyclonal phage output to the antigen yeast, and detecting phage binding on yeast by flow cytometry using anti-HA PE antibodies (BioLegend) (FIG. 5).

### Next Generation Sequencing Library Preparation and Sequencing

[0169] To sequence the nanobodies, a two-step PCR process was employed to prepare next generation sequencing library. A first round of PCR was used to amplify a DNA sequence containing the nanobody region on the phagemid. The overnight amplification culture of polyclonal phage output form the final round of selection was used to as the template. PCR reactions were conducted using primers FL3(GTCTCGTGGGCTCGGAGATGTGTATAAGAGACAGNNNNNNNNCGTATGGGTAAGAACCACCGCT; SEQ ID NO:42899) and FL9(TCGTCGGCAGCGTCAGATGTGTATAAGAGACAGNNNNNNNNAGCTGCGCGGCGAGC; SEQ ID NO:42900). PCR product was purified using magnetic PCR purification beads (AvanBio). 45 μL beads were added to the PCR product and supernatant was removed. Beads were washed twice with 100 μL 70% ethanol and resuspended in 25 μL water to elute PCR products from the beads. Beads were removed from purified PCR products. A second round of PCR was conducted using 1 μL purified PCR product and Nextera i5 and i7 dual-index library primers (Illumina). The concentration of outer PCR product of each well of a plate was normalized using Just-a-Plate (Charm Biotech). The normalized product was pooled and concentrated using a Qiagen DNA purification column (Qiagen). The concentrated product was run on a 2% agarose gel, and a band at approximately 450 base pairs was excised and extracted using a QlAquicl Gel Extraction Kit (Qiagen) according to standard manufacturer protocols. The DNA library was sequenced with Illumina Hi Seq and Illumina v2 300 PE kit according to standard manufacturer protocols.

### Example 4: Nanobody Expression, Purification, and Characterization

[0170] Individual nanobodies were recombinantly expressed and characterized by ELISA and Biolayer Interferometry. Examples were shown in FIG. 6. Additional validation data was included in Table 1.

### Nanobody Protein Production

[0171] The nanobodies were expressed as a Fc fusion protein by cloning into a mammalian expression vector pCER243. Protein was produced by transfection into Expi293 cells (Thermo Fisher Scientific) according to standard manufacturer protocols. Transfected cells were maintained according to manufacturer protocols. 4 days post-transfection, media was clarified by centrifugation at 300 g for 5 minutes. Protein was purified from clarified media using Protein A magnetic beads (Lytic Solutions). Protein purity was verified by SDS-PAGE.

### ELISAs

[0172] Recombinant human protein was diluted in PBS to a final concentration of 5 μg/mL and was immobilized on 96-well flat bottom MaxiSorp plates (Thermo Fisher Scientific) and placed at 4° C. overnight. Plates were washed three times with 225 μL ELISA wash buffer (PBS with 0.05% Tween 20) and 200 μL ELISA blocking buffer (PBS with 1% Casein) was added to the well. Plates were incubated with shaking for 2 hours at room temperature. ELISA blocking buffer was removed from the wells and appropriate dilutions of recombinant nanobodies in 100 μL ELISA blocking buffer was added to each well. Plates were incubated with shaking for 2 hours at room temperature. Plates were washed 3 times with 225 μL ELISA wash buffer and 1:5000 goat anti-human IgG HRP (Millipore Sigma) in 100 μL ELISA blocking buffer was added to the wells. Plates were incubated with shaking for 1 hour at room temperature. Plates were washed 6 times with 225 μL ELISA wash buffer. 50 μL TMB substrate (BD Biosciences) was added to the wells and plates were incubated for 15 minutes in the dark at room temperature. 50 μL 1 M sulfuric acid was added to the wells and absorbance at 450 nm was measured in a Synergy HTX Multi-Mode Microplate Reader (BioTek). FIG. 6 provides representative examples of ELISA assay results that demonstrate the specific, does-dependent binding of the nanobodies to the antigens.

### Biolayer Interferometry Assays

[0173] Octet RED96 System (ForteBio) was used to perform kinetic measurement of nanobody binding to antigens. For Anti-Penta-His Biosensors (HIS1K), his-tagged recombinant human proteins were first immobilized onto the biosensors, and recombinant nanobodies fused with human IgG1 were applied to detect binding. For Anti-Human IgG Fc Capture Biosensors (AHC), recombinant nanobodies fused with human IgG1 were first loaded onto the biosensors, and probes were dipped in serial dilutions of recombinant human antigens. FIG. 7 provides representative examples of BLI assay results that demonstrate specific and high-affinity binding of the nanobody:antigen pairs.

### REAP Assays

[0174] REAP (Rapid Extracellular Antigen Profiling) was used to profile the specificity of nanobodies. REAP was described in Wang, E., Dai, Y, Rosen, C., et al. bioRxiv, 2021 as a technology to profile interaction of an antibody against the human exoproteome. In brief, individual nanobodies were applied to a genetically barcoded, yeast-displayed human antigen library, and nanobody-bound yeast were magnetically enriched via Protein G coated beads. The selected yeast populations were subjected to next generation sequencing. The barcode information was used to calculate REAP Scores to describe the binding profiles of nanobodies to the human exoproteome. An interaction of a REAP Score above 2 is considered significant. FIG. 8 provides examples of REAP assay results for a select set of nanobodies. These results indicate that the recombinant nanobodies bind their antigen targets predicted via HAPPY with a high degree of specificity.

[0175] Table 1 provides data on a subset of the identified nanobodies that were further validated.

TABLE 1
Validated Nanobodies

| | | | | BLI AHC | BLI | REAP | |
|---|---|---|---|---|---|---|---|
| | | | ELISA | Sensor | HIS1K | Binding | REAP |
| SEQ ID | | | EC50 | KD | Sensor | to | Off- |
| NO: | Nb Name | Target | (M) | (M) | Binding | Targets | Targets |
| 1434 | B2M_Nb3.750 | B2M | N.A. | N.A. | Yes | Yes | 0 |
| 3779 | CCL16_Nb2.1 | CCL16 | 8.82E−10 | 1.74E−08 | N.A. | Yes | 2 |
| 3823 | CCL16_Nb2.5 | CCL16 | 1.78E−09 | N.A. | N.A. | Yes | 0 |
| 5485 | CD302_Nb26 | CD302 | 8.50E−09 | N.A. | N.A. | Yes | >10 |
| 5525 | CD302_Nb28 | CD302 | 6.84E−10 | N.A. | N.A. | Yes | 9 |
| 5523 | CD302_Nb30 | CD302 | 2.21E−09 | N.A. | N.A. | Yes | >10 |
| 5506 | CD302_Nb31 | CD302 | 1.26E−09 | N.A. | N.A. | Yes | >10 |
| 5519 | CD302_Nb32 | CD302 | 4.90E−10 | N.A. | N.A. | Yes | >10 |
| 5484 | CD302_Nb33 | CD302 | 2.26E−09 | N.A. | N.A. | Yes | >10 |
| 5524 | CD302_Nb35 | CD302 | 6.54E−10 | N.A. | N.A. | Yes | >10 |
| 5830 | CD3D_Nb2.33 | CD3D | 8.22E−09 | N.A. | N.A. | Yes | 1 |
| 5831 | CD3D_Nb2.34 | CD3D | 5.75E−10 | N.A. | N.A. | Yes | 2 |
| 5833 | CD3D_Nb2.35 | CD3D | 1.72E−09 | N.A. | N.A. | Yes | 3 |
| 5832 | CD3D_Nb2.36 | CD3D | 2.96E−08 | N.A. | N.A. | Yes | 1 |
| 5922 | CD3E_Nb2.73 | CD3E | 7.35E−10 | N.A. | N.A. | Yes | >10 |
| 5921 | CD3E_Nb2.74 | CD3E | 1.20E−09 | N.A. | N.A. | Yes | 2 |
| 5923 | CD3E_Nb2.76 | CD3E | 1.61E−08 | N.A. | N.A. | Yes | >10 |
| 5920 | CD3E_Nb2.77 | CD3E | 6.70E−10 | N.A. | N.A. | Yes | 8 |
| 5918 | CD3E_Nb2.79 | CD3E | 5.79E−10 | N.A. | N.A. | Yes | 7 |
| 5919 | CD3E_Nb2.80 | CD3E | 1.79E−08 | N.A. | N.A. | Yes | >10 |
| 7786 | CEACAM4_Nb36 | CEACAM4 | 1.56E−08 | N.A. | N.A. | Yes | 0 |
| 7787 | CEACAM4_Nb40 | CEACAM4 | 1.45E−08 | N.A. | N.A. | Yes | 5 |
| 7788 | CEACAM4_Nb41 | CEACAM4 | 3.27E−08 | N.A. | N.A. | Yes | 7 |
| 18220 | IGF1_Nb3.33 | IGF1 | N.A. | N.A. | N.A. | Yes | 0 |
| 19216 | IL10RA_Nb72 | IL10RA | 1.69E−08 | N.A. | N.A. | Yes | 8 |
| 19836 | IL13_Nb2.41 | IL13 | 1.02E−09 | N.A. | N.A. | Yes | 6 |
| 19837 | IL13_Nb2.42 | IL13 | 3.84E−08 | N.A. | N.A. | Yes | 0 |
| 20033 | IL17A_Nb2.90 | IL17A | 2.49E−10 | 9.77E−10 | N.A. | Yes | 3 |
| 20034 | IL17A_Nb2.92 | IL17A | 1.79E−10 | 6.56E−10 | N.A. | Yes | 0 |
| 21477 | IL1RN_Nb75 | IL1RN | 6.90E−09 | N.A. | N.A. | Yes | 0 |
| 21474 | IL1RN_Nb77 | IL1RN | 1.68E−10 | 8.52E−07 | N.A. | Yes | 5 |
| 21842 | IL21_Nb2.28 | IL21 | 3.14E−09 | N.A. | N.A. | Yes | 5 |
| 21838 | IL21 Nb2.29 | IL21 | 3.73E−09 | N.A. | N.A. | Yes | 7 |
| 21841 | IL21_Nb2.30 | IL21 | 7.16E−09 | N.A. | N.A. | Yes | 1 |
| 22330 | IL2RG_Nb3.454 | IL2RG | N.A. | N.A. | Yes | Yes | 0 |
| 24801 | LAIR2_Nb2.51 | LAIR2 | 3.79E−10 | N.A. | N.A. | Yes | 0 |
| 33801 | PROCR_Nb83 | PROCR | 1.27E−09 | N.A. | N.A. | Yes | 0 |
| 33767 | PROCR_Nb85 | PROCR | 3.52E−10 | N.A. | N.A. | Yes | 0 |
| 33867 | PROCR_Nb87 | PROCR | 1.04E−11 | 9.21E−08 | N.A. | Yes | 3 |
| 33766 | PROCR_Nb88 | PROCR | 2.87E−10 | 6.29E−08 | N.A. | Yes | 0 |
| 33765 | PROCR_Nb89 | PROCR | 5.65E−10 | N.A. | N.A. | Yes | 0 |
| 33768 | PROCR_Nb90 | PROCR | 1.74E−09 | N.A. | N.A. | Yes | 1 |
| 37689 | TIGIT_Nb2.81 | TIGIT | 2.98E−08 | N.A. | N.A. | Yes | 0 |
| 37690 | TIGIT_Nb2.82 | TIGIT | 1.28E−08 | N.A. | N.A. | Yes | 0 |
| 37688 | TIGIT_Nb2.84 | TIGIT | 4.83E−07 | N.A. | N.A. | Yes | 0 |
| 38013 | TMEM149_Nb3.446 | TMEM149 | N.A. | N.A. | N.D. | Yes | 0 |
| 38006 | TMEM149_Nb3.530 | TMEM149 | N.A. | N.A. | N.D. | Yes | 0 |
| 38406 | TNF_Nb105 | TNF | 5.57E−09 | N.A. | N.A. | Yes | 2 |
| 38381 | TNF_Nb109 | TNF | 2.38E−08 | N.A. | N.A. | Yes | 7 |
| 38949 | TNFRSF17_Nb2.18 | TNFRSF17 | 2.82E−09 | N.A. | N.A. | Yes | 1 |
| 38841 | TNFRSF17_Nb2.19 | TNFRSF17 | 2.84E−09 | N.A. | N.A. | Yes | 3 |
| 38925 | TNFRSF17_Nb2.20 | TNFRSF17 | 1.02E−09 | N.A. | N.A. | Yes | 0 |
| 38950 | TNFRSF17_Nb2.21 | TNFRSF17 | 4.75E−09 | N.A. | N.A. | Yes | 5 |
| 38951 | TNFRSF17_Nb2.23 | TNFRSF17 | 7.57E−09 | N.A. | N.A. | Yes | 2 |
| 39974 | TNFSF18_Nb101 | TNFSF18 | 2.26E−08 | N.A. | N.A. | Yes | 0 |
| 39973 | TNFSF18_Nb93 | TNFSF18 | 1.59E−09 | N.A. | N.A. | Yes | 0 |
| 40065 | TNFSF18_Nb94 | TNFSF18 | 7.18E−08 | N.A. | N.A. | Yes | 1 |
| 39972 | TNFSF18_Nb96 | TNFSF18 | 4.07E−09 | N.A. | N.A. | Yes | 6 |
| 39971 | TNFSF18_Nb98 | TNFSF18 | 6.05E−09 | N.A. | N.A. | Yes | 4 |

### Example 5: Prediction of High-Confidence Nanobodies Using Next Generation Sequencing Data

[0176] As part of the HAPPY selection workflow, nanobody pools before and after each round of the selection were subjected to next generation sequencing, which provided information on the binding behavior of each unique nanobody during the selection pressure. For instance, nanobodies that increased in abundance after the selection process indicated binding to the antigen. For another instance, nanobodies with high read counts for multiple antigenic targets indicate poly-specificity or poly-reactivity. Utilizing the next generation sequencing data, a computational pipeline was developed to select the highest-confidence nanobodies from the 24 billion nanobody variants in the library. Nanobodies predicted to have favorable outcomes in terms of both affinity and specificity to the targets were identified by applying the following steps:
[0177] 1. Nanobody sequences with an internal stop codon were removed.
[0178] 2. Next generation sequencing data were de-noised by filtering out sequences with less than 5 read counts. This cutoff was chosen to maximize the reproducibility of sequencing results between replicate samples.
[0179] 3. Only nanobodies that were consistently detected before and after the selection procedure were considered.
[0180] 4. Nanobodies with read counts greater than 200 were selected. This criterion puts the nanobody read count in the 97^{th} percentile of total read count, increasing the confidence in the affinity of the nanobody to a given antigen.
[0181] 5. Nanobodies that were detected against less than 5 antigens were chosen. This step limits the poly-specificity of nanobodies with respect to antigens.

[0182] Using this computational pipeline, 42843 nanobodies against 1068 antigens were identified and included in the Sequence Listing. For each of the nanobodies in the sequences listing, the CDR1 sequence is defined as the region flanked by GSLRLSCAAS (SEQ ID NO:42891) GWYRQAPGKE (SEQ ID NO:42892); the CDR2 sequence is defined as the region flanked by WYRQAPGKER (SEQ ID NO:42893) . . . ADSVKGRFTI (SEQ ID NO:42894); and CDR3 is defined as the region flanked by KPEDTAVYYC (SEQ ID NO:42895) . . . WGQGTQVTVS (SEQ ID NO:42896). For example, the CDR1, CDR2, and CDR3 of SEQ ID NO:1 are aa26-34, aa46-59, and aa96-111, respectively.

Lengthy table referenced here
US20230416942A1-20231228-T00001
Please refer to the end of the specification for access instructions.

[0183] The disclosures of each and every patent, patent application, and publication cited herein are hereby incorporated herein by reference in their entirety.

[0184] While this invention has been disclosed with reference to specific embodiments, it is apparent that other embodiments and variations of this invention may be devised by others skilled in the art without departing from the true spirit and scope of the invention. The appended claims are intended to be construed to include all such embodiments and equivalent variations.

LENGTHY TABLES
The patent application contains a lengthy table section. A copy of the table is available in electronic form from the USPTO web site (https://seqdata.uspto.gov/?pageRequest=docDetail&DocID=US20230416942A1). An electronic copy of the table will also be available from the USPTO upon request and payment of the fee set forth in 37 CFR 1.19(b)(3).

The application's sequence listing, which the Patent Office published only in electronic form, follows.

SEQUENCE LISTING (42900 sequences)

SEQ ID NO: 1 - protein, 122 aa, Artificial Sequence
  Chemically Synthesized
QVQLQESGGGLVQAGGSLRLSCAASGSISRYDYMGWYRQAPGKEREFVATIGSGASTYYADSVKGRFTISRDNAKNTVYLQMNSLKPEDTAVYYCAAADRPLEVTYAWLGYWGQGTQVTVSS

SEQ ID NO: 2 - protein, 118 aa, Artificial Sequence
  Chemically Synthesized
QVQLQESGGGLVQAGGSLRLSCAASGYIFYWSVMGWYRQAPGKEREFVAGIDVGSSTNYADSVKGRFTISRDNAKNTVYLQMNSLKPEDTAVYYCAADDWVDGGYDYWGQGTQVTVSS

SEQ ID NO: 3 - protein, 118 aa, Artificial Sequence
  Chemically Synthesized
QVQLQESGGGLVQAGGSLRLSCAASGTISDSPNMGWYRQAPGKERELVAAIAVGTNTNYADSVKGRFTISRDNAKNTVYLQMNSLKPEDTAVYYCAVLSYDAFSYYYWGQGTQVTVSS

SEQ ID NO: 4 - protein, 125 aa, Artificial Sequence
  Chemically Synthesized
QVQLQESGGGLVQAGGSLRLSCAASGYISASLMGWYRQAPGKERELVAAITDGANTYYADSVKGRFTISRDNAKNTVYLQMNSLKPEDTAVYYCAAASWYSYYLAWQAYPYHGYWGQGTQVTVSS

SEQ ID NO: 5 - protein, 122 aa, Artificial Sequence
  Chemically Synthesized
QVQLQESGGGLVQAGGSLRLSCAASGTIFRRKAMGWYRQAPGKEREFVAGITRGSNTNYADSVKGRFTISRDNAKNTVYLQMNSLKPEDTAVYYCAALNTYAYPLHYPHYYWGQGTQVTVSS

SEQ ID NO: 6 - protein, 126 aa, Artificial Sequence
  Chemically Synthesized
QVQLQESGGGLVQAGGSLRLSCAASGYIFHYYWMGWYRQAPGKERELVAAITNGTITYYADSVKGRFTISRDNAKNTVYLQMNSLKPEDTAVYYCAALYRPYSDQFWYGLYDHTYWGQGTQVTVSS

SEQ ID NO: 7 - protein, 122 aa, Artificial Sequence
  Chemically Synthesized
QVQLQESGGGLVQAGGSLRLSCAASGTIFQYRRMGWYRQAPGKERELVAAITTGGITYYADSVKGRFTISRDNAKNTVYLQMNSLKPEDTAVYYCAAVPAETRAYGTYHVYWGQGTQVTVSS

SEQ ID NO: 8 - protein, 118 aa, Artificial Sequence
  Chemically Synthesized
QVQLQESGGGLVQAGGSLRLSCAASGYISLPVDMGWYRQAPGKEREFVASITKGGSTYYADSVKGRFTISRDNAKNTVYLQMNSLKPEDTAVYYCAAIALYGPYHYYWGQGTQVTVSS

SEQ ID NO: 9 - protein, 117 aa, Artificial Sequence
  Chemically Synthesized
QVQLQESGGGLVQAGGSLRLSCAASGTISALVQMGWYRQAPGKEREFVATISYGATTYYADSVKGRFTISRDNAKNTVYLQMNSLKPEDTAVYYCAVTVYREQLNYWGQGTQVTVSS

SEQ ID NO: 10 - protein, 118 aa, Artificial Sequence
  Chemically Synthesized
QVQLQESGGGLVQAGGSLRLSCAASGTISLTVHMGWYRQAPGKERELVATIGSGGTTNYADSVKGRFTISRDNAKNTVYLQMNSLKPEDTAVYYCAAYGWRYYLHGYWGQGTQVTVSS

SEQ ID NO: 11 - protein, 126 aa, Artificial Sequence
  Chemically Synthesized
QVQLQESGGGLVQAGGSLRLSCAASGTISDYYYMGWYRQAPGKEREFVAAITYGTITYYADSVKGRFTISRDNAKNTVYLQMNSLKPEDTAVYYCAAGRYHAYYGGELSPLDYPYWGQGTQVTVSS

SEQ ID NO: 12 - protein, 118 aa, Artificial Sequence
  Chemically Synthesized
QVQLQESGGGLVQAGGSLRLSCAASGTISSYLNMGWYRQAPGKEREFVASIGNGASTNYADSVKGRFTISRDNAKNTVYLQMNSLKPEDTAVYYCAVDRSYDVLHGYWGQGTQVTVSS

SEQ ID NO: 13 - protein, 122 aa, Artificial Sequence
  Chemically Synthesized
QVQLQESGGGLVQAGGSLRLSCAASGTIFTHTTMGWYRQAPGKERELVAGIDGGTITYYADSVKGRFTISRDNAKNTVYLQMNSLKPEDTAVYYCAVDGTLNNYLYVAFAYWGQGTQVTVSS

SEQ ID NO: 14 - protein, 116 aa, Artificial Sequence
  Chemically Synthesized
QVQLQESGGGLVQAGGSLRLSCAASGSIFTTLMGWYRQAPGKEREFVASISSVVLPYADSVKGRFTISRDNAKNTVYLQMNSLKPEDTAVYYCAAGYPLPRTHHYWGQGTQVTVSS

SEQ ID NO: 15 - protein, 116 aa, Artificial Sequence
  Chemically Synthesized
QVQLQESGGGLVQAGGSLRLSCAASGTIFFYLYMGWYRQAPGKEREFVAGIDSVVPYADSVKGRFTISRDNAKNTVYLQMNSLKPEDTAVYYCAAPYGLAADYEYWGQGTQVTVSS

SEQ ID NO: 16 - protein, 122 aa, Artificial Sequence
  Chemically Synthesized
QVQLQESGGGLVQAGGSLRLSCAASGSISSSYVMGWYRQAPGKEREFVATISSGASTYYADSVKGRFTISRDNAKNTVYLQMNSLKPEDTAVYYCAVPAGRSDSYHPYSSYWGQGTQVTVSS

SEQ ID NO: 17 - protein, 122 aa, Artificial Sequence
  Chemically Synthesized
QVQLQESGGGLVQAGGSLRLSCAASGSISVWTTMGWYRQAPGKERELVASIDWGANTYYADSVKGRFTISRDNAKNTVYLQMNSLKPEDTAVYYCAAYIGWDVDDWFVLGYWGQGTQVTVSS

SEQ ID NO: 18 - protein, 114 aa, Artificial Sequence
  Chemically Synthesized
QVQLQESGGGLVQAGGSLRLSCAASGNIFWSTDMGWYRQAPGKEREFVLTVLLPYADSVKGRFTISRDNAKNTVYLQMNSLKPEDTAVYYCAAINGQYHGFFYWGQGTQVTVSS

SEQ ID NO: 19 - protein, 121 aa, Artificial Sequence
  Chemically Synthesized
QVQLQESGGGLVQAGGSLRLSCAASGTIFAVVTMGWYRQAPGKERELVAGIDLGSNTYYADSVKGRFTISRDNAKNTVYLQMNSLKPEDTAVYYCAVGRTGTERADYDLYWGQGTQVTVSS

SEQ ID NO: 20 - protein, 121 aa, Artificial Sequence
  Chemically Synthesized
QVQLQESGGGLVQAGGSLRLSCAASGYISPAASMGWYRQAPGKEREFVAGIGYGASTYYADSVKGRFTISRDNAKNTVYLQMNSLKPEDTAVYYCAAWEGYPYSTVVTMYWGQGTQVTVSS

SEQ ID NO: 21 - protein, 122 aa, Artificial Sequence
  Chemically Synthesized
QVQLQESGGGLVQAGGSLRLSCAASGSIFYYGLMGWYRQAPGKERELVAAIGLGAITNYADSVKGRFTISRDNAKNTVYLQMNSLKPEDTAVYYCAAYVGNATAPFTCSLYWGQGTQVTVSS

SEQ ID NO: 22 - protein, 122 aa, Artificial Sequence
  Chemically Synthesized
QVQLQESGGGLVQAGGSLRLSCAASGSIFDYYTMGWYRQAPGKEREFVAGISGGGTTYYADSVKGRFTISRDNAKNTVYLQMNSLKPEDTAVYYCAVGGITQLYALRYFIYWGQGTQVTVSS

SEQ ID NO: 23 - protein, 117 aa, Artificial Sequence
  Chemically Synthesized
QVQLQESGGGLVQAGGSLRLSCAASGSIFLAVWMGWYRQAPGKEREFVASIDRGGSTYYADSVKGRFTISRDNAKNTVYLQMNSLKPEDTAVYYCAASESTGLTFYWGQGTQVTVSS

SEQ ID NO: 24 - protein, 113 aa, Artificial Sequence
  Chemically Synthesized
QVQLQESGGGLVQAGGSLRLSCAASGTISYGNDMGWYRQAPGKEREFVAAITQGASTNYADSVKGRFTISRDNAKNTVYLQMNSLKPEDTAVYYCAVLSVSYWGQGTQVTVSS

SEQ ID NO: 25 - protein, 126 aa, Artificial Sequence
  Chemically Synthesized
QVQLQESGGGLVQAGGSLRLSCAASGYISRYYDMGWYRQAPGKERELVASITPGSTTNYADSVKGRFTISRDNAKNTVYLQMNSLKPEDTAVYYCAVSRYGALRYGDVRIYYYRYWGQGTQVTVSS

SEQ ID NO: 26 - protein, 126 aa, Artificial Sequence
  Chemically Synthesized
QVQLQESGGGLVQAGGSLRLSCAASGNIFYHDGMGWYRQAPGKEREFVASIASGSTTNYADSVKGRFTISRDNAKNTVYLQMNSLKPEDTAVYYCAAQIYQTQRVGGYDIYYHYYWGQGTQVTVSS

SEQ ID NO: 27 - protein, 122 aa, Artificial Sequence
  Chemically Synthesized
QVQLQESGGGLVQAGGSLRLSCAASGYISRAYIMGWYRQAPGKEREFVAAINNGGSTYYADSVKGRFTISRDNAKNTVYLQMNSLKPEDTAVYYCAADSEDYTAYVTYFGYWGQGTQVTVSS

SEQ ID NO: 28 - protein, 122 aa, Artificial Sequence
  Chemically Synthesized
QVQLQESGGGLVQAGGSLRLSCAASGTISPEYYMGWYRQAPGKEREFVATIAGGGTTYYADSVKGRFTISRDNAKNTVYLQMNSLKPEDTAVYYCAAKRDWGYPYRYLLGYWGQGTQVTVSS

SEQ ID NO: 29 - protein, 118 aa, Artificial Sequence
  Chemically Synthesized
QVQLQESGGGLVQAGGSLRLSCAASGTIFDLYYMGWYRQAPGKERELVATIGWGGITYYADSVKGRFTISRDNAKNTVYLQMNSLKPEDTAVYYCAAERDNRQKFSYWGQGTQVTVSS

SEQ ID NO: 30 - protein, 121 aa, Artificial Sequence
  Chemically Synthesized
QVQLQESGGGLVQAGGSLRLSCAASGSIFAFTHMGWYRQAPGKEREFVATIDSVLLPYADSVKGRFTISRDNAKNTVYLQMNSLKPEDTAVYYCAAVGYNPYAFGYDFTYWGQGTQVTVSS

SEQ ID NO: 31 - protein, 118 aa, Artificial Sequence
  Chemically Synthesized
QVQLQESGGGLVQAGGSLRLSCAASGNISRWDAMGWYRQAPGKERELVAAINIGTTTNYADSVKGRFTISRDNAKNTVYLQMNSLKPEDTAVYYCAALLRNYGSLWYWGQGTQVTVSS

SEQ ID NO: 32 - protein, 122 aa, Artificial Sequence
  Chemically Synthesized
QVQLQESGGGLVQAGGSLRLSCAASGNISYISHMGWYRQAPGKERELVAAIAYGAITNYADSVKGRFTISRDNAKNTVYLQMNSLKPEDTAVYYCAAYSPFGYVYPDTFQYWGQGTQVTVSS

SEQ ID NO: 33 - protein, 117 aa, Artificial Sequence
  Chemically Synthesized
QVQLQESGGGLVQAGGSLRLSCAASGNIFYFNRMGWYRQAPGKERELVATIGIGGITNYADSVKGRFTISRDNAKNTVYLQMNSLKPEDTAVYYCAASTLLTLLIYWGQGTQVTVSS

SEQ ID NO: 34 - protein, 121 aa, Artificial Sequence
  Chemically Synthesized
QVQLQESGGGLVQAGGSLRLSCAASGTISRTITMGWYRQAPGKERELVAGIGWGGTTYYADSVKGRFTISRDNAKNTVYLQMNSLKPEDTAVYYCAVDVNPDHEHFYRYYWGQGTQVTVSS

SEQ ID NO: 35 - protein, 117 aa, Artificial Sequence
  Chemically Synthesized
QVQLQESGGGLVQAGGSLRLSCAASGTIFSLTMGWYRQAPGKERELVAGINRGSNTYYADSVKGRFTISRDNAKNTVYLQMNSLKPEDTAVYYCAAVASGVQTFGYWGQGTQVTVSS

SEQ ID NO: 36 - protein, 126 aa, Artificial Sequence
  Chemically Synthesized
QVQLQESGGGLVQAGGSLRLSCAASGNIFVYTYMGWYRQAPGKEREFVAAITDGGITNYADSVKGRFTISRDNAKNTVYLQMNSLKPEDTAVYYCAAYDRDYVADFKTPTADHHYWGQGTQVTVSS

SEQ ID NO: 37 - protein, 114 aa, Artificial Sequence
  Chemically Synthesized
QVQLQESGGGLVQAGGSLRLSCAASGTISHYDVMGWYRQAPGKERELVASIAQGGTTYYADSVKGRFTISRDNAKNTVYLQMNSLKPEDTAVYYCAVGYYHRYWGQGTQVTVSS

SEQ ID NO: 38 - protein, 122 aa, Artificial Sequence
  Chemically Synthesized
QVQLQESGGGLVQAGGSLRLSCAASGYIFASAVMGWYRQAPGKERELVAAIARGTSTYYADSVKGRFTISRDNAKNTVYLQMNSLKPEDTAVYYCAVGGRARRLSSVNLPYWGQGTQVTVSS

SEQ ID NO: 39 - protein, 118 aa, Artificial Sequence
  Chemically Synthesized
QVQLQESGGGLVQAGGSLRLSCAASGTIFDYSFMGWYRQAPGKERELVAGISLGSNTYYADSVKGRFTISRDNAKNTVYLQMNSLKPEDTAVYYCAAARVYYPVHYYWGQGTQVTVSS

SEQ ID NO: 40 - protein, 118 aa, Artificial Sequence
  Chemically Synthesized
QVQLQESGGGLVQAGGSLRLSCAASGYISSLAYMGWYRQAPGKEREFVAAINNGSTTYYADSVKGRFTISRDNAKNTVYLQMNSLKPEDTAVYYCAVKGGYNSYYYYWGQGTQVTVSS

SEQ ID NO: 41 - protein, 117 aa, Artificial Sequence
  Chemically Synthesized
QVQLQESGGGLVQAGGSLRLSCAASGSISYSYYMGWYRQAPGKEREFVAAIGRGSNTNYADSVKGRFTISRDNAKNTVYLQMNSLKPEDTAVYYCAARYDTGSCMYWGQGTQVTVSS

SEQ ID NO: 42 - protein, 113 aa, Artificial Sequence
  Chemically Synthesized
QVQLQESGGGLVQAGGSLRLSCAASGTISYSEYMGWYRQAPGKERELVTVVLPYADSVKGRFTISRDNAKNTVYLQMNSLKPEDTAVYYCAVDDTEGSSYGYWGQGTQVTVSS

SEQ ID NO: 43 - protein, 118 aa, Artificial Sequence
  Chemically Synthesized
QVQLQESGGGLVQAGGSLRLSCAASGNISLAPYMGWYRQAPGKERELVAGITYGGITNYADSVKGRFTISRDNAKNTVYLQMNSLKPEDTAVYYCAATWDDYNRLDYWGQGTQVTVSS

SEQ ID NO: 44 - protein, 122 aa, Artificial Sequence
  Chemically Synthesized
QVQLQESGGGLVQAGGSLRLSCAASGYISTSPYMGWYRQAPGKEREFVATIGSGTSTNYADSVKGRFTISRDNAKNTVYLQMNSLKPEDTAVYYCAVYYTPGDGPPSALYYWGQGTQVTVSS

SEQ ID NO: 45 - protein, 114 aa, Artificial Sequence
  Chemically Synthesized
QVQLQESGGGLVQAGGSLRLSCAASGNISDSRYMGWYRQAPGKERELVASGNTNYADSVKGRFTISRDNAKNTVYLQMNSLKPEDTAVYYCAVLIYGGHAYYYWGQGTQVTVSS

SEQ ID NO: 46 - protein, 126 aa, Artificial Sequence
  Chemically Synthesized
QVQLQESGGGLVQAGGSLRLSCAASGTIFYATTMGWYRQAPGKERELVAAIAYGTSTNYADSVKGRFTISRDNAKNTVYLQMNSLKPEDTAVYYCAVYTQRPSPLQPYYAVVLRYWGQGTQVTVSS

SEQ ID NO: 47 - protein, 109 aa, Artificial Sequence
  Chemically Synthesized
QVQLQESGGGLVQAGGSLRLSCAASGSISADSTMGWYRQAPGKERELVAGIGMVLLPYADSVKGRFTISRDNAKNTVYLQMNSLKPEDTAVYYCAVYYWGQGTQVTVSS

SEQ ID NO: 48 - protein, 127 aa, Artificial Sequence
  Chemically Synthesized
QVQLQESGGGLVQAGGSLRLSCAASGNIFYHYGMGWYRQAPGKEREFVASIGFGTTTNYADSVKGRFTISRDNAKNTVYLQMNSLKPEDTAVYYCAVGRILENYYFYGVGSLTHRYWGQGTQVTVSS

SEQ ID NO: 49 - protein, 117 aa, Artificial Sequence
  Chemically Synthesized
QVQLQESGGGLVQAGGSLRLSCAASGSISPYIMGWYRQAPGKEREFVAAITYGGSTNYADSVKGRFTISRDNAKNTVYLQMNSLKPEDTAVYYCAATWLEGYYHDYWGQGTQVTVSS

SEQ ID NO: 50 - protein, 118 aa, Artificial Sequence
  Chemically Synthesized
QVQLQESGGGLVQAGGSLRLSCAASGSIFLTVYMGWYRQAPGKEREFVASIAGGSSTNYADSVKGRFTISRDNAKNTVYLQMNSLKPEDTAVYYCAVRYLIGDELTYWGQGTQVTVSS

SEQ ID NO: 51 - protein, 118 aa, Artificial Sequence
  Chemically Synthesized
QVQLQESGGGLVQAGGSLRLSCAASGTISYDSLMGWYRQAPGKERELVATITYGSNTNYADSVKGRFTISRDNAKNTVYLQMNSLKPEDTAVYYCAARYVLFRKLGYWGQGTQVTVSS

SEQ ID NO: 52 - protein, 117 aa, Artificial Sequence
  Chemically Synthesized
QVQLQESGGGLVQAGGSLRLSCAASGSIFGYGQMGWYRQAPGKERELLPVLIVVLVPYADSVKGRFTISRDNAKNTVYLQMNSLKPEDTAVYYCAVLRGASYYYPYWGQGTQVTVSS

SEQ ID NO: 53 - protein, 122 aa, Artificial Sequence
  Chemically Synthesized
QVQLQESGGGLVQAGGSLRLSCAASGNISRGDDMGWYRQAPGKERELVAAIAQGSNTNYADSVKGRFTISRDNAKNTVYLQMNSLKPEDTAVYYCAVDAADAPNDTDALFYWGQGTQVTVSS

SEQ ID NO: 54 - protein, 118 aa, Artificial Sequence
  Chemically Synthesized
QVQLQESGGGLVQAGGSLRLSCAASGTIFLGDYMGWYRQAPGKERELVAAIAIGGITNYADSVKGRFTISRDNAKNTVYLQMNSLKPEDTAVYYCAVALLDTYLYDYWGQGTQVTVSS

SEQ ID NO: 55 - protein, 121 aa, Artificial Sequence
  Chemically Synthesized
QVQLQESGGGLVQAGGSLRLSCAASGNISRQDYMGWYRQAPGKEREFVAAITAGGITNYADSVKGRFTISRDNAKNTVYLQMNSLKPEDTAVYYCAAGDTKIESTTLTIYWGQGTQVTVSS

SEQ ID NO: 56 - protein, 116 aa, Artificial Sequence
  Chemically Synthesized
QVQLQESGGGLVQAGGSLRLSCAASGNIFDRGMGWYRQAPGKERELVATIADGTSTYYADSVKGRFTISRDNAKNTVYLQMNSLKPEDTAVYYCAASSSRLSTMYWGQGTQVTVSS

SEQ ID NO: 57 - protein, 115 aa, Artificial Sequence
  Chemically Synthesized
QVQLQESGGGLVQAGGSLRLSCAASGYISATSYMGWYRQAPGKEREFVAGIGSGSNTNYADSVKGRFTISRDNAKNTVYLQMNSLKPEDTAVYYCAVNDGQHSYWGQGTQVTVSS

SEQ ID NO: 58 - protein, 126 aa, Artificial Sequence
  Chemically Synthesized
QVQLQESGGGLVQAGGSLRLSCAASGYISRDLFMGWYRQAPGKEREFVASINGGATTNYADSVKGRFTISRDNAKNTVYLQMNSLKPEDTAVYYCAVDGWYYILRYWDGLGYLEYWGQGTQVTVSS

SEQ ID NO: 59 - protein, 118 aa, Artificial Sequence
  Chemically Synthesized
QVQLQESGGGLVQAGGSLRLSCAASGSISYYTTMGWYRQAPGKERELVATISYGTTTYYADSVKGRFTISRDNAKNTVYLQMNSLKPEDTAVYYCAVRFDLLFVHAYWGQGTQVTVSS

SEQ ID NO: 60 - protein, 126 aa, Artificial Sequence
  Chemically Synthesized
QVQLQESGGGLVQAGGSLRLSCAASGNISGRAWMGWYRQAPGKERELVASITSGTSTYYADSVKGRFTISRDNAKNTVYLQMNSLKPEDTAVYYCAATNYDNGPPYLIDYNTHSYWGQGTQVTVSS

SEQ ID NO: 61 - protein, 113 aa, Artificial Sequence
  Chemically Synthesized
QVQLQESGGGLVQAGGSLRLSCAASGYISDYYAMGWYRQAPGKEREFVAAITTGGSTNYADSVKGRFTISRDNAKNTVYLQMNSLKPEDTAVYYCAVPDHEYWGQGTQVTVSS

SEQ ID NO: 62 - protein, 117 aa, Artificial Sequence
  Chemically Synthesized
QVQLQESGGGLVQAGGSLRLSCAASGNISFVQNMGWYRQAPGKEREFVATINDGGTTYYADSVKGRFTISRDNAKNTVYLQMNSLKPEDTAVYYCAAYYPYLHHVYWGQGTQVTVSS

SEQ ID NO: 63 - protein, 122 aa, Artificial Sequence
  Chemically Synthesized
QVQLQESGGGLVQAGGSLRLSCAASGSIFAVDIMGWYRQAPGKEREFVASIALGGSTNYADSVKGRFTISRDNAKNTVYLQMNSLKPEDTAVYYCAVVYILYDDGSATHIYWGQGTQVTVSS

SEQ ID NO: 64 - protein, 122 aa, Artificial Sequence
  Chemically Synthesized
QVQLQESGGGLVQAGGSLRLSCAASGNIFRDLAMGWYRQAPGKERELVAAIGFGSSTYYADSVKGRFTISRDNAKNTVYLQMNSLKPEDTAVYYCAAIGALTVDTYVYHGYWGQGTQVTVSS

SEQ ID NO: 65 - protein, 118 aa, Artificial Sequence
  Chemically Synthesized
QVQLQESGGGLVQAGGSLRLSCAASGSISAYTYMGWYRQAPGKERELVASIAYGSTTYYADSVKGRFTISRDNAKNTVYLQMNSLKPEDTAVYYCAVIAREFDSYAYWGQGTQVTVSS

SEQ ID NO: 66 - protein, 117 aa, Artificial Sequence
  Chemically Synthesized
QVQLQESGGGLVQAGGSLRLSCAASGTISDYSHMGWYRQAPGKERELVASIGYGSNTNYADSVKGRFTISRDNAKNTVYLQMNSLKPEDTAVYYCAVGPNGDWYDYWGQGTQVTVSS

SEQ ID NO: 67 - protein, 118 aa, Artificial Sequence
  Chemically Synthesized
QVQLQESGGGLVQAGGSLRLSCAASGTISNIAVMGWYRQAPGKERELVASIDQGGNTNYADSVKGRFTISRDNAKNTVYLQMNSLKPEDTAVYYCAALYTYASYFYYWGQGTQVTVSS

SEQ ID NO: 68 - protein, 118 aa, Artificial Sequence
  Chemically Synthesized
QVQLQESGGGLVQAGGSLRLSCAASGNIFGYDYMGWYRQAPGKERELVASINDGGITNYADSVKGRFTISRDNAKNTVYLQMNSLKPEDTAVYYCAADQYLTERYDYWGQGTQVTVSS

SEQ ID NO: 69 - protein, 120 aa, Artificial Sequence
  Chemically Synthesized
QVQLQESGGGLVQAGGSLRLSCAASGYIFYAYDMGWYRQAPGKERELVATIIGVLVPYADSVKGRFTISRDNAKNTVYLQMNSLKPEDTAVYYCAADSPTSVWLLTTIYWGQGTQVTVSS

SEQ ID NO: 70 - protein, 119 aa, Artificial Sequence
  Chemically Synthesized
QVQLQESGGGLVQAGGSLRLSCAASGTISLSNAMGWYRQAPGKEREFVASIVVVPYADSVKGRFTISRDNAKNTVYLQMNSLKPEDTAVYYCAVDWYWSRDYNVRFGYWGQGTQVTVSS

SEQ ID NO: 71 - protein, 122 aa, Artificial Sequence
  Chemically Synthesized
QVQLQESGGGLVQAGGSLRLSCAASGNIFYAQDMGWYRQAPGKERELVAAIDTGGITNYADSVKGRFTISRDNAKNTVYLQMNSLKPEDTAVYYCAVVIVVQDWIWAVHYYWGQGTQVTVSS

SEQ ID NO: 72 - protein, 119 aa, Artificial Sequence
  Chemically Synthesized
QVQLQESGGGLVQAGGSLRLSCAASGYIFVTSMGWYRQAPGKEREFVAAIDDGSTTNYADSVKGRFTISRDNAKNTVYLQMNSLKPEDTAVYYCAVGPFVMKTVVTMYWGQGTQVTVSS

SEQ ID NO: 73 - protein, 122 aa, Artificial Sequence
  Chemically Synthesized
QVQLQESGGGLVQAGGSLRLSCAASGSIFQTTDMGWYRQAPGKERELVATIAGGTSTNYADSVKGRFTISRDNAKNTVYLQMNSLKPEDTAVYYCAAVDAVDRQEHRNLIYWGQGTQVTVSS

SEQ ID NO: 74 - protein, 125 aa, Artificial Sequence
  Chemically Synthesized
QVQLQESGGGLVQAGGSLRLSCAASGNISDQHAMGWYRQAPGKEREFVAGIGYGANTNYADSVKGRFTISRDNAKNTVYLQMNSLKPEDTAVYYCAITWWVPGSTTFTTVTLMYWGQGTQVTVSS

SEQ ID NO: 75 - protein, 119 aa, Artificial Sequence
  Chemically Synthesized
QVQLQESGGGLVQAGGSLRLSCAASGSMGWYRQAPGKEREFVATIGDGGNTYYADSVKGRFTISRDNAKNTVYLQMNSLKPEDTAVYYCAAGATGVSLLTLRTRTTLYWGQGTQVTVSS

SEQ ID NO: 76 - protein, 113 aa, Artificial Sequence
  Chemically Synthesized
QVQLQESGGGLVQAGGSLRLSCAASGLHSMGWYRQAPGKERELVATITSGANTYYADSVKGRFTISRDNAKNTVYLQMNSLKPEDTAVYYCAALISGSGSHYWGQGTQVTVSS

SEQ ID NO: 77 - protein, 117 aa, Artificial Sequence
  Chemically Synthesized
QVQLQESGGGLVQAGGSLRLSCAASGNIFPVTRMGWYRQAPGKEREFVAGMLRCYYLYADSVKGRFTISRDNAKNTVYLQMNSLKPEDTAVYYCAVYDGVRQTFRYWGQGTQVTVSS

SEQ ID NO: 78 - protein, 118 aa, Artificial Sequence
  Chemically Synthesized
QVQLQESGGGLVQAGGSLRLSCAASGTISSSTYMGWYRQAPGKERELVAAIGDGSSTNYADSVKGRFTISRDNAKNTVYLQMNSLKPEDTAVYYCAAFTYYRTPYPYWGQGTQVTVSS

SEQ ID NO: 79 - protein, 118 aa, Artificial Sequence
  Chemically Synthesized
QVQLQESGGGLVQAGGSLRLSCAASGSIFSDSVMGWYRQAPGKERELVATITAGSTTNYADSVKGRFTISRDNAKNTVYLQMNSLKPEDTAVYYCAVQHYAPANHYYWGQGTQVTVSS

SEQ ID NO: 80 - protein, 118 aa, Artificial Sequence
  Chemically Synthesized
QVQLQESGGGLVQAGGSLRLSCAASGSISRIDVMGWYRQAPGKEREFVASISYGTNTNYADSVKGRFTISRDNAKNTVYLQMNSLKPEDTAVYYCAAAAYKYDDLRYWGQGTQVTVSS

SEQ ID NO: 81 - protein, 118 aa, Artificial Sequence
  Chemically Synthesized
QVQLQESGGGLVQAGGSLRLSCAASGTISDWYYMGWYRQAPGKEREFVASIGVGGSTNYADSVKGRFTISRDNAKNTVYLQMNSLKPEDTAVYYCAVRDRHRGTYAYWGQGTQVTVSS

SEQ ID NO: 82 - protein, 117 aa, Artificial Sequence
  Chemically Synthesized
QVQLQESGGGLVQAGGSLRLSCAASGTIFGSTYMGWYRQAPGKERELVAGISDGVLPYADSVKGRFTISRDNAKNTVYLQMNSLKPEDTAVYYCAVDDYAYTSHSYWGQGTQVTVSS

SEQ ID NO: 83 - protein, 126 aa, Artificial Sequence
  Chemically Synthesized
QVQLQESGGGLVQAGGSLRLSCAASGTIFDSHTMGWYRQAPGKERELVATINRGGSTYYADSVKGRFTISRDNAKNTVYLQMNSLKPEDTAVYYCAVVQVTYSAPGRAGYVDHLYWGQGTQVTVSS

SEQ ID NO: 84 - protein, 120 aa, Artificial Sequence
  Chemically Synthesized
QVQLQESGGGLVQAGGSLRLSCAASGSIFGQESMGWYRQAPGKEREFVAAIGDGSNTYYADSVKGRFTISRDNAKNTVYLQMNSLKPEDTAVYYCAVGSVTLTKLTTIYWGQGTQVTVSS

SEQ ID NO: 85 - protein, 117 aa, Artificial Sequence
  Chemically Synthesized
QVQLQESGGGLVQAGGSLRLSCAASGSISQSGRMGWYRQAPGKEREFVATIAAVVLPYADSVKGRFTISRDNAKNTVYLQMNSLKPEDTAVYYCAAYQRGTSNYWYWGQGTQVTVSS

SEQ ID NO: 86 - protein, 122 aa, Artificial Sequence
  Chemically Synthesized
QVQLQESGGGLVQAGGSLRLSCAASGSIFRIPGMGWYRQAPGKERELVAGIDNGSTTNYADSVKGRFTISRDNAKNTVYLQMNSLKPEDTAVYYCAAEYWDVIGYPSTFGYWGQGTQVTVSS

SEQ ID NO: 87 - protein, 122 aa, Artificial Sequence
  Chemically Synthesized
QVQLQESGGGLVQAGGSLRLSCAASGNISPYYNMGWYRQAPGKERELVAAINLGGTTNYADSVKGRFTISRDNAKNTVYLQMNSLKPEDTAVYYCAAYRNTYYYNIQPFVYWGQGTQVTVSS

SEQ ID NO: 88 - protein, 117 aa, Artificial Sequence
  Chemically Synthesized
QVQLQESGGGLVQAGGSLRLSCAASGNISDPYYMGWYRQAPGKEREFVASITDGANTYADSVKGRFTISRDNAKNTVYLQMNSLKPEDTAVYYCAVHNAYVSTLAYWGQGTQVTVSS

SEQ ID NO: 89 - protein, 118 aa, Artificial Sequence
  Chemically Synthesized
QVQLQESGGGLVQAGGSLRLSCAASGSISGYRTMGWYRQAPGKEREFVAAIGVGASTYYADSVKGRFTISRDNAKNTVYLQMNSLKPEDTAVYYCAVAYYRQSPHAYWGQGTQVTVSS

SEQ ID NO: 90 - protein, 117 aa, Artificial Sequence
  Chemically Synthesized
QVQLQESGGGLVQAGGSLRLSCAASGSISYGEAMGWYRQAPGKERELVATITSVVIPYADSVKGRFTISRDNAKNTVYLQMNSLKPEDTAVYYCAVDTTYILPLGYWGQGTQVTVSS

SEQ ID NO: 91 - protein, 118 aa, Artificial Sequence
  Chemically Synthesized
QVQLQESGGGLVQAGGSLRLSCAASGTIFYGYDMGWYRQAPGKEREFVAGISEGANTYYADSVKGRFTISRDNAKNTVYLQMNSLKPEDTAVYYCAVYDQNDDILAYWGQGTQVTVSS

SEQ ID NO: 92 - protein, 124 aa, Artificial Sequence
  Chemically Synthesized
QVQLQESGGGLVQAGGSLRLSCAASGTIFVRSMGWYRQAPGKERELVASIDSGGTTNYADSVKGRFTISRDNAKNTVYLQMNSLKPEDTAVYYCAADDRVDDYAQDPHDRHTYWGQGTQVTVSS

SEQ ID NO: 93 - protein, 112 aa, Artificial Sequence
  Chemically Synthesized
QVQLQESGGGLVQAGGSLRLSCAASGSISYRHGMGWYRQAPGKERELVASITFGATTYYADSVKGRFTISRDNAKNTVYLQMNSLKPEDTAVYYCAVDDIYWGQGTQVTVSS

SEQ ID NO: 94 - protein, 123 aa, Artificial Sequence
  Chemically Synthesized
QVQLQESGGGLVQAGGSLRLSCAASGTISARNYMGWYRQAPGKERELVATISDGATTYYADSVKGRFTISRDNAKNTVYLQMNSLKPEDTAVYYCAVASVPSPRGVVRTHSYWGQGTQVTVSS

SEQ ID NO: 95 - protein, 117 aa, Artificial Sequence
  Chemically Synthesized
QVQLQESGGGLVQAGGSLRLSCAASGYISVRKMGWYRQAPGKEREFVATIDDGSTTNYADSVKGRFTISRDNAKNTVYLQMNSLKPEDTAVYYCAADYVDYYPFGYWGQGTQVTVSS

SEQ ID NO: 96 - protein, 121 aa, Artificial Sequence
  Chemically Synthesized
QVQLQESGGGLVQAGGSLRLSCAASGNIFDYAMGWYRQAPGKEREFVASIAYGTTTYYADSVKGRFTISRDNAKNTVYLQMNSLKPEDTAVYYCAALRFSAGRGNAPFVYWGQGTQVTVSS

SEQ ID NO: 97 - protein, 122 aa, Artificial Sequence
  Chemically Synthesized
QVQLQESGGGLVQAGGSLRLSCAASGSISIGTTMGWYRQAPGKERELVATIGDGGSTYYADSVKGRFTISRDNAKNTVYLQMNSLKPEDTAVYYCAAWRGHAKHYTYDYYYWGQGTQVTVSS

SEQ ID NO: 98 - protein, 118 aa, Artificial Sequence
  Chemically Synthesized
QVQLQESGGGLVQAGGSLRLSCAASGTISTYHVMGWYRQAPGKEREFVASITAGGITNYADSVKGRFTISRDNAKNTVYLQMNSLKPEDTAVYYCAALRPWTYDYGYWGQGTQVTVSS

SEQ ID NO: 99 - protein, 122 aa, Artificial Sequence
  Chemically Synthesized
QVQLQESGGGLVQAGGSLRLSCAASGTISGIPFMGWYRQAPGKERELVASIGEGTSTNYADSVKGRFTISRDNAKNTVYLQMNSLKPEDTAVYYCAAKGKLYYVYKTYHGYWGQGTQVTVSS

SEQ ID NO: 100 - protein, 117 aa, Artificial Sequence
  Chemically Synthesized
QVQLQESGGGLVQAGGSLRLSCAASGYIFARDRMGWYRQAPGKERELVALLIGVLIPYADSVKGRFTISRDNAKNTVYLQMNSLKPEDTAVYYCAARRDSGYDHLYWGQGTQVTVSS

SEQ ID NO: 101 - protein, 126 aa, Artificial Sequence
  Chemically Synthesized
QVQLQESGGGLVQAGGSLRLSCAASGSISGYFYMGWYRQAPGKERELVAAIGYGANTNYADSVKGRFTISRDNAKNTVYLQMNSLKPEDTAVYYCAAAWWDDQTDYPYGYDSLDYWGQGTQVTVSS

SEQ ID NO: 102 - protein, 122 aa, Artificial Sequence
  Chemically Synthesized
QVQLQESGGGLVQAGGSLRLSCAASGNISRYKYMGWYRQAPGKEREFVAAINDGGTTYYADSVKGRFTISRDNAKNTVYLQMNSLKPEDTAVYYCAAIDQHSNQHVYYLDYWGQGTQVTVSS

SEQ ID NO: 103 - protein, 118 aa, Artificial Sequence
  Chemically Synthesized
QVQLQESGGGLVQAGGSLRLSCAASGNISQYAYMGWYRQAPGKERELVAAIGYGSNTNYADSVKGRFTISRDNAKNTVYLQMNSLKPEDTAVYYCAVWIYYDTLYTYWGQGTQVTVSS

SEQ ID NO: 104 - protein, 122 aa, Artificial Sequence
  Chemically Synthesized
QVQLQESGGGLVQAGGSLRLSCAASGNISADIDMGWYRQAPGKEREFVAAISYGAITNYADSVKGRFTISRDNAKNTVYLQMNSLKPEDTAVYYCAAWGFLDYDRYENHYYWGQGTQVTVSS

SEQ ID NO: 105 - protein, 118 aa, Artificial Sequence
  Chemically Synthesized
QVQLQESGGGLVQAGGSLRLSCAASGTIFFVLLMGWYRQAPGKEREFVATISLGGITNYADSVKGRFTISRDNAKNTVYLQMNSLKPEDTAVYYCAARTPLVTQHAYWGQGTQVTVSS

SEQ ID NO: 106 - protein, 122 aa, Artificial Sequence
  Chemically Synthesized
QVQLQESGGGLVQAGGSLRLSCAASGNIFEAYDMGWYRQAPGKERELVAAISYGGITNYADSVKGRFTISRDNAKNTVYLQMNSLKPEDTAVYYCAAYYPRISHTFGYYTYWGQGTQVTVSS

SEQ ID NO: 107 - protein, 116 aa, Artificial Sequence
  Chemically Synthesized
QVQLQESGGGLVQAGGSLRLSCAASGNISYVSDMGWYRQAPGKEREFVAAIASVLIPYADSVKGRFTISRDNAKNTVYLQMNSLKPEDTAVYYCAAYYDSRYHNYWGQGTQVTVSS

SEQ ID NO: 108 - protein, 122 aa, Artificial Sequence
  Chemically Synthesized
QVQLQESGGGLVQAGGSLRLSCAASGTISTQAVMGWYRQAPGKEREFVAAITAGSSTNYADSVKGRFTISRDNAKNTVYLQMNSLKPEDTAVYYCAVPYPNYEYHNGQLGYWGQGTQVTVSS

SEQ ID NO: 109 - protein, 117 aa, Artificial Sequence
  Chemically Synthesized
QVQLQESGGGLVQAGGSLRLSCAASGSIFNPSMGWYRQAPGKERELVAAIGDGSITNYADSVKGRFTISRDNAKNTVYLQMNSLKPEDTAVYYCAVTFTSCTTTFYWGQGTQVTVSS

SEQ ID NO: 110 - protein, 122 aa, Artificial Sequence
  Chemically Synthesized
QVQLQESGGGLVQAGGSLRLSCAASGNISTTYAMGWYRQAPGKEREFVASITAGASTYYADSVKGRFTISRDNAKNTVYLQMNSLKPEDTAVYYCAVIPYHGSVPLYWHLYWGQGTQVTVSS

SEQ ID NO: 111 - protein, 109 aa, Artificial Sequence
  Chemically Synthesized
QVQLQESGGGLVQAGGSLRLSCAASGTIFRGGYMGWYRQAPGKERELVASIGSGGNTYYADSVKGRFTISRDNAKNTVYLQMNSLKPEDTAVYYCAMYWGQGTQVTVSS

SEQ ID NO: 112 - protein, 123 aa, Artificial Sequence
  Chemically Synthesized
QVQLQESGGGLVQAGGSLRLSCAASGYIFPPYIMGWYRQAPGKEREFVATIGVGGITNYADSVKGRFTISRDNAKNTVYLQMNSLKPEDTAVYYCAVDLDYTDYDAALDFGYWGQGTQVTVSS

SEQ ID NO: 113 - protein, 112 aa, Artificial Sequence
  Chemically Synthesized
QVQLQESGGGLVQAGGSLRLSCAASGNIFTSNYMGWYRQAPGKEREIPYADSVKGRFTISRDNAKNTVYLQMNSLKPEDTAVYYCAAPSGLADHYGDALVYWGQGTQVTVSS

SEQ ID NO: 114 - protein, 122 aa, Artificial Sequence
  Chemically Synthesized
QVQLQESGGGLVQAGGSLRLSCAASGSISDIRYMGWYRQAPGKERELVAAIAVGTITNYADSVKGRFTISRDNAKNTVYLQMNSLKPEDTAVYYCAVATQSIDGTVGFHHYWGQGTQVTVSS

SEQ ID NO: 115 - protein, 118 aa, Artificial Sequence
  Chemically Synthesized
QVQLQESGGGLVQAGGSLRLSCAASGYIFGLTRIMGWYRQAPGKERELVAAIAYGAITNYADSVKGRFTISRDNAKNTVYLQMNSLKPEDTAVYYCAVVYRSTTSFYWGQGTQVTVSS

SEQ ID NO: 116 - protein, 118 aa, Artificial Sequence
  Chemically Synthesized
QVQLQESGGGLVQAGGSLRLSCAASGNISGRGSMGWYRQAPGKEREFVASITRGGSTYYADSVKGRFTISRDNAKNTVYLQMNSLKPEDTAVYYCAVGTDVDVYHDYWGQGTQVTVSS

SEQ ID NO: 117 - protein, 126 aa, Artificial Sequence
  Chemically Synthesized
QVQLQESGGGLVQAGGSLRLSCAASGNISDSRYMGWYRQAPGKEREFVATIDDGAITNYADSVKGRFTISRDNAKNTVYLQMNSLKPEDTAVYYCAAGYDIWDYYPHLRFADHSYWGQGTQVTVSS

SEQ ID NO: 118 - protein, 113 aa, Artificial Sequence
  Chemically Synthesized
QVQLQESGGGLVQAGGSLRLSCAASGSIMGWYRQAPGKEREFVAAIDRGAITNYADSVKGRFTISRDNAKNTVYLQMNSLKPEDTAVYYCAAPYRGEQSLDYWGQGTQVTVSS

SEQ ID NO: 119 - protein, 124 aa, Artificial Sequence
  Chemically Synthesized
QVQLQESGGGLVQAGGSLRLSCAASGYITTLMGWYRQAPGKERELVATINDGSSTYYADSVKGRFTISRDNAKNTVYLQMNSLKPEDTAVYYCAVYHPYVPWVDYDDTIYHDYWGQGTQVTVSS

SEQ ID NO: 120 - protein, 126 aa, Artificial Sequence
  Chemically Synthesized
QVQLQESGGGLVQAGGSLRLSCAASGTIFYRSYMGWYRQAPGKEREFVAGISAGSSTYYADSVKGRFTISRDNAKNTVYLQMNSLKPEDTAVYYCAVGVVRDKNGTLSLIRNFGYWGQGTQVTVSS

SEQ ID NO: 121 - protein, 122 aa, Artificial Sequence
  Chemically Synthesized
QVQLQESGGGLVQAGGSLRLSCAASGTISGIDIMGWYRQAPGKERELVAGIGTGAITNYADSVKGRFTISRDNAKNTVYLQMNSLKPEDTAVYYCAAEPVYGSRYTYYLVYWGQGTQVTVSS

SEQ ID NO: 122 - protein, 117 aa, Artificial Sequence
  Chemically Synthesized
QVQLQESGGGLVQAGGSLRLSCAASGTISLYVYMGWYRQAPGKEREFVAGIAEGTNTYYADSVKGRFTISRDNAKNTVYLQMNSLKPEDTAVYYCAVDRDAHYLSYWGQGTQVTVSS

SEQ ID NO: 123 - protein, 126 aa, Artificial Sequence
  Chemically Synthesized
QVQLQESGGGLVQAGGSLRLSCAASGNISYIVPMGWYRQAPGKEREFVAGITPGGTTYYADSVKGRFTISRDNAKNTVYLQMNSLKPEDTAVYYCAVTTSGHPQDYWYYQYSYDYWGQGTQVTVSS

SEQ ID NO: 124 - protein, 122 aa, Artificial Sequence
  Chemically Synthesized
QVQLQESGGGLVQAGGSLRLSCAASGTIFWSVYMGWYRQAPGKEREFVAAIGGGTSTNYADSVKGRFTISRDNAKNTVYLQMNSLKPEDTAVYYCAVYIDPDYWSSAYYPYWGQGTQVTVSS

SEQ ID NO: 125 - protein, 122 aa, Artificial Sequence
  Chemically Synthesized
QVQLQESGGGLVQAGGSLRLSCAASGNIFSEWRMGWYRQAPGKERELVAAISYGTSTNYADSVKGRFTISRDNAKNTVYLQMNSLKPEDTAVYYCAADDGVNEHYGANHRYWGQGTQVTVSS

SEQ ID NO: 126 - protein, 118 aa, Artificial Sequence
  Chemically Synthesized
QVQLQESGGGLVQAGGSLRLSCAASGSIFFRHRMGWYRQAPGKERELVAAISTGGTTYYADSVKGRFTISRDNAKNTVYLQMNSLKPEDTAVYYCAVFLFDEVYHSYWGQGTQVTVSS

SEQ ID NO: 127 - protein, 121 aa, Artificial Sequence
  Chemically Synthesized
QVQLQESGGGLVQAGGSLRLSCAASGNISDSVMGWYRQAPGKEREFVASIDIGATTYYADSVKGRFTISRDNAKNTVYLQMNSLKPEDTAVYYCAASRQGESAQEQDHSYWGQGTQVTVSS

SEQ ID NO: 128 - protein, 122 aa, Artificial Sequence
  Chemically Synthesized
QVQLQESGGGLVQAGGSLRLSCAASGTIFTSSVMGWYRQAPGKERELVAAISVGGSTYYADSVKGRFTISRDNAKNTVYLQMNSLKPEDTAVYYCAAYLDYWYGASNVHDYWGQGTQVTVSS

SEQ ID NO: 129 - protein, 122 aa, Artificial Sequence
  Chemically Synthesized
QVQLQESGGGLVQAGGSLRLSCAASGYISRDTLMGWYRQAPGKEREFVAGIGDGATTNYADSVKGRFTISRDNAKNTVYLQMNSLKPEDTAVYYCAAQLYYIGHQVDGHTYWGQGTQVTVSS

SEQ ID NO: 130 - protein, 122 aa, Artificial Sequence
  Chemically Synthesized
QVQLQESGGGLVQAGGSLRLSCAASGSISIQHVMGWYRQAPGKERELVASIGFGGTTYYADSVKGRFTISRDNAKNTVYLQMNSLKPEDTAVYYCAAADSRFYVYDHGLSYWGQGTQVTVSS

SEQ ID NO: 131 - protein, 126 aa, Artificial Sequence
  Chemically Synthesized
QVQLQESGGGLVQAGGSLRLSCAASGNIFQGEGMGWYRQAPGKERELVATIAVGTTTNYADSVKGRFTISRDNAKNTVYLQMNSLKPEDTAVYYCAVGGGNAFADYYQGLSSYLYWGQGTQVTVSS

SEQ ID NO: 132 - protein, 118 aa, Artificial Sequence
  Chemically Synthesized
QVQLQESGGGLVQAGGSLRLSCAASGNIFRNNYMGWYRQAPGKEREFVAGITVGTTTYYADSVKGRFTISRDNAKNTVYLQMNSLKPEDTAVYYCAVYDYVWYILAYWGQGTQVTVSS

SEQ ID NO: 133 - protein, 117 aa, Artificial Sequence
  Chemically Synthesized
QVQLQESGGGLVQAGGSLRLSCAASGYILTLTMGWYRQAPGKERELVAGIGYGGSTNYADSVKGRFTISRDNAKNTVYLQMNSLKPEDTAVYYCAAGYNNSERYLYWGQGTQVTVSS

SEQ ID NO: 134 - protein, 122 aa, Artificial Sequence
  Chemically Synthesized
QVQLQESGGGLVQAGGSLRLSCAASGNISYTTEMGWYRQAPGKERELVAAIDDGSTTNYADSVKGRFTISRDNAKNTVYLQMNSLKPEDTAVYYCAVDADRSSDDIVAHIYWGQGTQVTVSS

SEQ ID NO: 135 - protein, 117 aa, Artificial Sequence
  Chemically Synthesized
QVQLQESGGGLVQAGGSLRLSCAASGSISRQPYMGWYRQAPGKERELVASIDEVLVPYADSVKGRFTISRDNAKNTVYLQMNSLKPEDTAVYYCAVRAYAKLTFTYWGQGTQVTVSS

SEQ ID NO: 136 - protein, 117 aa, Artificial Sequence
  Chemically Synthesized
QVQLQESGGGLVQAGGSLRLSCAASGYISRNTVMGWYRQAPGKERELVATIALGTITYYADSVKGRFTISRDNAKNTVYLQMNSLKPEDTAVYYCAVVADRGRYHYWGQGTQVTVSS

SEQ ID NO: 137 - protein, 125 aa, Artificial Sequence
  Chemically Synthesized
QVQLQESGGGLVQAGGSLRLSCAASGNISGPPYMGWYRQAPGKEREFVASISTGTTTYADSVKGRFTISRDNAKNTVYLQMNSLKPEDTAVYYCAVGNEVVKYYLIADVTTLVYWGQGTQVTVSS

SEQ ID NO: 138 - protein, 118 aa, Artificial Sequence
  Chemically Synthesized
QVQLQESGGGLVQAGGSLRLSCAASGSIFNYALMGWYRQAPGKERELVASISYGGNTNYADSVKGRFTISRDNAKNTVYLQMNSLKPEDTAVYYCAVGASKYGYHGYWGQGTQVTVSS

SEQ ID NO: 139 - protein, 125 aa, Artificial Sequence
  Chemically Synthesized
QVQLQESGGGLVQAGGSLRLSCAASGYISGVHWMGWYRQAPGKERELLPVLMVVLLPYADSVKGRFTISRDNAKNTVYLQMNSLKPEDTAVYYCAAKYRVRGEVAIAPDASHDYWGQGTQVTVSS

SEQ ID NO: 140 - protein, 118 aa, Artificial Sequence
  Chemically Synthesized
QVQLQESGGGLVQAGGSLRLSCAASGNIFATWLMGWYRQAPGKEREFVASISDGTSTYYADSVKGRFTISRDNAKNTVYLQMNSLKPEDTAVYYCAVDYITDRELDYWGQGTQVTVSS

SEQ ID NO: 141 - protein, 118 aa, Artificial Sequence
  Chemically Synthesized
QVQLQESGGGLVQAGGSLRLSCAASGNISAYYLMGWYRQAPGKEREFVATIAPGGTTNYADSVKGRFTISRDNAKNTVYLQMNSLKPEDTAVYYCAAYPDDADRFDYWGQGTQVTVSS

SEQ ID NO: 142 - protein, 117 aa, Artificial Sequence
  Chemically Synthesized
QVQLQESGGGLVQAGGSLRLSCAASGTISTRDYMGWYRQAPGKEREFAAITGGGSTNYADSVKGRFTISRDNAKNTVYLQMNSLKPEDTAVYYCAADYDDGDGHYYWGQGTQVTVSS

SEQ ID NO: 143 - protein, 117 aa, Artificial Sequence
  Chemically Synthesized
QVQLQESGGGLVQAGGSLRLSCAASGTISYSFMGWYRQAPGKEREFVAGISLGATTNYADSVKGRFTISRDNAKNTVYLQMNSLKPEDTAVYYCAAVYEQIRPYSYWGQGTQVTVSS

SEQ ID NO: 144 - protein, 121 aa, Artificial Sequence
  Chemically Synthesized
QVQLQESGGGLVQAGGSLRLSCAASGNIFRVSYMGWYRQAPGKERELVAGIASVVVPYADSVKGRFTISRDNAKNTVYLQMNSLKPEDTAVYYCAAYGGYSRLYRYVHGYWGQGTQVTVSS

SEQ ID NO: 145 - protein, 118 aa, Artificial Sequence
  Chemically Synthesized
QVQLQESGGGLVQAGGSLRLSCAASGSISARYYMGWYRQAPGKERELVASITDGGITNYADSVKGRFTISRDNAKNTVYLQMNSLKPEDTAVYYCAVYGLTLGVFSYWGQGTQVTVSS

SEQ ID NO: 146 - protein, 116 aa, Artificial Sequence
  Chemically Synthesized
QVQLQESGGGLVQAGGSLRLSCAASGNIFVTMGWYRQAPGKERELVAGITPGTTTYYADSVKGRFTISRDNAKNTVYLQMNSLKPEDTAVYYCAVVYGGVNDLEYWGQGTQVTVSS

SEQ ID NO: 147 - protein, 118 aa, Artificial Sequence
  Chemically Synthesized
QVQLQESGGGLVQAGGSLRLSCAASGYISYRQWMGWYRQAPGKERELVASIGSGASTYYADSVKGRFTISRDNAKNTVYLQMNSLKPEDTAVYYCAVGRRDDSQLLYWGQGTQVTVSS

SEQ ID NO: 148 - protein, 122 aa, Artificial Sequence
  Chemically Synthesized
QVQLQESGGGLVQAGGSLRLSCAASGTISQVSAMGWYRQAPGKERELVASIAIGATTYYADSVKGRFTISRDNAKNTVYLQMNSLKPEDTAVYYCAAAGRYSDGDWAEHYYWGQGTQVTVSS

SEQ ID NO: 149 - protein, 122 aa, Artificial Sequence
  Chemically Synthesized
QVQLQESGGGLVQAGGSLRLSCAASGTISQTYGMGWYRQAPGKERELVAGIGRGASTYYADSVKGRFTISRDNAKNTVYLQMNSLKPEDTAVYYCAVDPYYYSRPYLGHPYWGQGTQVTVSS

SEQ ID NO: 150 - protein, 117 aa, Artificial Sequence
  Chemically Synthesized
QVQLQESGGGLVQAGGSLRLSCAASGNIFRPGTMGWYRQAPGKEREFVAAIDYGTTTNYADSVKGRFTISRDNAKNTVYLQMNSLKPEDTAVYYCAVTASKLVSLYWGQGTQVTVSS

SEQ ID NO: 151 - protein, 122 aa, Artificial Sequence
  Chemically Synthesized
QVQLQESGGGLVQAGGSLRLSCAASGTISSTAYMGWYRQAPGKEREFVASINQGGTTNYADSVKGRFTISRDNAKNTVYLQMNSLKPEDTAVYYCAALYVDGYIFPYLLYYWGQGTQVTVSS

SEQ ID NO: 152 - protein, 124 aa, Artificial Sequence
  Chemically Synthesized
QVQLQESGGGLVQAGGSLRLSCAASGYILTLVMGWYRQAPGKERELVATINSVVIPYADSVKGRFTISRDNAKNTVYLQMNSLKPEDTAVYYCAVDLKDIVALAYGVRYAHYYWGQGTQVTVSS

SEQ ID NO: 153 - protein, 118 aa, Artificial Sequence
  Chemically Synthesized
QVQLQESGGGLVQAGGSLRLSCAASGSIFGSHTMGWYRQAPGKEREFVAAITQGANTNYADSVKGRFTISRDNAKNTVYLQMNSLKPEDTAVYYCAAAFPYGDTYRYWGQGTQVTVSS

SEQ ID NO: 154 - protein, 118 aa, Artificial Sequence
  Chemically Synthesized
QVQLQESGGGLVQAGGSLRLSCAASGTISVGYVMGWYRQAPGKERELVASITSGAITNYADSVKGRFTISRDNAKNTVYLQMNSLKPEDTAVYYCAVDAFETQDLDYWGQGTQVTVSS

SEQ ID NO: 155 - protein, 118 aa, Artificial Sequence
  Chemically Synthesized
QVQLQESGGGLVQAGGSLRLSCAASGSISYSDYMGWYRQAPGKEREFVASIAYGGITNYADSVKGRFTISRDNAKNTVYLQMNSLKPEDTAVYYCAVPSPTNLAHPYWGQGTQVTVSS

SEQ ID NO: 156 - protein, 126 aa, Artificial Sequence
  Chemically Synthesized
QVQLQESGGGLVQAGGSLRLSCAASGNIFHTHGMGWYRQAPGKERELVAGITQGSNTNYADSVKGRFTISRDNAKNTVYLQMNSLKPEDTAVYYCAAADRYVDWDHSYTSSWSYYWGQGTQVTVSS

SEQ ID NO: 157 - protein, 118 aa, Artificial Sequence
  Chemically Synthesized
QVQLQESGGGLVQAGGSLRLSCAASGYISWVYAMGWYRQAPGKERELVAAIAAGGNTNYADSVKGRFTISRDNAKNTVYLQMNSLKPEDTAVYYCAARRQYDTHLYYWGQGTQVTVSS

SEQ ID NO: 158 - protein, 122 aa, Artificial Sequence
  Chemically Synthesized
QVQLQESGGGLVQAGGSLRLSCAASGTISGADNMGWYRQAPGKERELVATITQGANTYYADSVKGRFTISRDNAKNTVYLQMNSLKPEDTAVYYCAAGGPRAYSWLDILEYWGQGTQVTVSS

SEQ ID NO: 159 - protein, 122 aa, Artificial Sequence
  Chemically Synthesized
QVQLQESGGGLVQAGGSLRLSCAASGTIFTVGSMGWYRQAPGKEREFVATIDVGGTTNYADSVKGRFTISRDNAKNTVYLQMNSLKPEDTAVYYCAAYGPSNDVSQAWLTYWGQGTQVTVSS

SEQ ID NO: 160 - protein, 118 aa, Artificial Sequence
  Chemically Synthesized
QVQLQESGGGLVQAGGSLRLSCAASGNISTGPPMGWYRQAPGKEREFVATIDGGAITNYADSVKGRFTISRDNAKNTVYLQMNSLKPEDTAVYYCAAEYPLSDRHGYWGQGTQVTVSS

SEQ ID NO: 161 - protein, 126 aa, Artificial Sequence
  Chemically Synthesized
QVQLQESGGGLVQAGGSLRLSCAASGTISSFLMGWYRQAPGKEREFVATINAGGNTNYADSVKGRFTISRDNAKNTVYLQMNSLKPEDTAVYYCAAEPVNDDTYGSGGGYAYGAYWGQGTQVTVSS

SEQ ID NO: 162 - protein, 118 aa, Artificial Sequence
  Chemically Synthesized
QVQLQESGGGLVQAGGSLRLSCAASGNISSYYNMGWYRQAPGKERELVASIDYGANTNYADSVKGRFTISRDNAKNTVYLQMNSLKPEDTAVYYCAVRTGTGYDLGYWGQGTQVTVSS

SEQ ID NO: 163 - protein, 125 aa, Artificial Sequence
  Chemically Synthesized
QVQLQESGGGLVQAGGSLRLSCAASGNISAYSGMGWYRQAPGKERELVATIDVGAITNYADSVKGRFTISRDNAKNTVYLQMNSLKPEDTAVYYCALLKTTRLVLSLLRTSCIYWGQGTQVTVSS

SEQ ID NO: 164 - protein, 126 aa, Artificial Sequence
  Chemically Synthesized
QVQLQESGGGLVQAGGSLRLSCAASGTISPPGRMGWYRQAPGKERELVATISIGTTTYYADSVKGRFTISRDNAKNTVYLQMNSLKPEDTAVYYCAIAYRETLLYADQRYVEFDYWGQGTQVTVSS

SEQ ID NO: 165 - protein, 121 aa, Artificial Sequence
  Chemically Synthesized
QVQLQESGGGLVQAGGSLRLSCAASGTIFPHQWMGWYRQAPGKEREFVATIGSGASTNYADSVKGRFTISRDNAKNTVYLQMNSLKPEDTAVYYCAAVSGRAQPYYASIYWGQGTQVTVSS

SEQ ID NO: 166 - protein, 117 aa, Artificial Sequence
  Chemically Synthesized
QVQLQESGGGLVQAGGSLRLSCAASGYISYPWDMGWYRQAPGKEREFVATIAVGSSTYYADSVKGRFTISRDNAKNTVYLQMNSLKPEDTAVYYCAAQFQISSTIYWGQGTQVTVSS

SEQ ID NO: 167 - protein, 117 aa, Artificial Sequence
  Chemically Synthesized
QVQLQESGGGLVQAGGSLRLSCAASGTFLRSGMGWYRQAPGKERELVAAIAFGSTTNYADSVKGRFTISRDNAKNTVYLQMNSLKPEDTAVYYCAADAFVRRYFAYWGQGTQVTVSS

SEQ ID NO: 168 - protein, 123 aa, Artificial Sequence
  Chemically Synthesized
QVQLQESGGGLVQAGGSLRLSCAASGYISDYVGMGWYRQAPGKERELVATIDYGTTTYYADSVKGRFTISRDNAKNTVYLQMNSLKPEDTAVYYCAAPRNSYALDGHSIHRYWGQGTQVTVSS

SEQ ID NO: 169 - protein, 122 aa, Artificial Sequence
  Chemically Synthesized
QVQLQESGGGLVQAGGSLRLSCAASGSISQQHYMGWYRQAPGKEREFVASITWGGTTNYADSVKGRFTISRDNAKNTVYLQMNSLKPEDTAVYYCAAQSVDQYVAGDGYPYWGQGTQVTVSS

SEQ ID NO: 170 - protein, 122 aa, Artificial Sequence
  Chemically Synthesized
QVQLQESGGGLVQAGGSLRLSCAASGYIFGVGDMGWYRQAPGKERELVAGIAYGSTTYYADSVKGRFTISRDNAKNTVYLQMNSLKPEDTAVYYCAAIVDNDVQSITPHTYWGQGTQVTVSS

SEQ ID NO: 171 - protein, 122 aa, Artificial Sequence
  Chemically Synthesized
QVQLQESGGGLVQAGGSLRLSCAASGNISEYRSMGWYRQAPGKEREFVASIANGAITYYADSVKGRFTISRDNAKNTVYLQMNSLKPEDTAVYYCAAQNRRQLGGDYYHRYWGQGTQVTVSS

SEQ ID NO: 172 - protein, 123 aa, Artificial Sequence
  Chemically Synthesized
QVQLQESGGGLVQAGGSLRLSCAASGTGTTMGWYRQAPGKERELVAAIDPGTITYYADSVKGRFTISRDNAKNTVYLQMNSLKPEDTAVYYCAAAGDWTRLDPRYYHDYLDYWGQGTQVTVSS

SEQ ID NO: 173 - protein, 120 aa, Artificial Sequence
  Chemically Synthesized
QVQLQESGGGLVQAGGSLRLSCAASGTISALTMGWYRQAPGKERELVAGISLGAITNYADSVKGRFTISRDNAKNTVYLQMNSLKPEDTAVYYCAVTLCVLTTGTTTFYWGQGTQVTVSS

SEQ ID NO: 174 - protein, 117 aa, Artificial Sequence
  Chemically Synthesized
QVQLQESGGGLVQAGGSLRLSCAASGYIFQRYHMGWYRQAPGKEREFVAGIDGGGSTYYADSVKGRFTISRDNAKNTVYLQMNSLKPEDTAVYYCAATGPLYYLQYWGQGTQVTVSS

SEQ ID NO: 175 - protein, 118 aa, Artificial Sequence
  Chemically Synthesized
QVQLQESGGGLVQAGGSLRLSCAASGTISWDDYMGWYRQAPGKERELVAGIGAGGTTYYADSVKGRFTISRDNAKNTVYLQMNSLKPEDTAVYYCAVLPITELSHGYWGQGTQVTVSS

SEQ ID NO: 176 - protein, 117 aa, Artificial Sequence
  Chemically Synthesized
QVQLQESGGGLVQAGGSLRLSCAASGNISGKSAMGWYRQAPGKEREFVPLLLSVLLPYADSVKGRFTISRDNAKNTVYLQMNSLKPEDTAVYYCAVYNQYDVWFNYWGQGTQVTVSS

SEQ ID NO: 177 - protein, 126 aa, Artificial Sequence
  Chemically Synthesized
QVQLQESGGGLVQAGGSLRLSCAASGNISRVYPMGWYRQAPGKEREFVATISDGSSTNYADSVKGRFTISRDNAKNTVYLQMNSLKPEDTAVYYCAVGQGGWYRGGPTASGAHQYWGQGTQVTVSS

SEQ ID NO: 178 - protein, 114 aa, Artificial Sequence
  Chemically Synthesized
QVQLQESGGGLVQAGGSLRLSCAASGYISGHGEMGWYRQAPGKERELVATIAWGASTNYADSVKGRFTISRDNAKNTVYLQMNSLKPEDTAVYYCASNGPYPYWGQGTQVTVSS

SEQ ID NO: 179 - protein, 117 aa, Artificial Sequence
  Chemically Synthesized
QVQLQESGGGLVQAGGSLRLSCAASGYISYREPMGWYRQAPGKERELVATIGVGSTTNYADSVKGRFTISRDNAKNTVYLQMNSLKPEDTAVYYCAVTSIGTVFFYWGQGTQVTVSS

SEQ ID NO: 180 - protein, 118 aa, Artificial Sequence
  Chemically Synthesized
QVQLQESGGGLVQAGGSLRLSCAASGSISYSREMGWYRQAPGKEREFVAAIATGGNTNYADSVKGRFTISRDNAKNTVYLQMNSLKPEDTAVYYCAAWRDIDLPYDYWGQGTQVTVSS

SEQ ID NO: 181 - protein, 116 aa, Artificial Sequence
  Chemically Synthesized
QVQLQESGGGLVQAGGSLRLSCAASGNISDYRSMGWYRQAPGKERELVAAIAKGGNTNYADSVKGRFTISRDNAKNTVYLQMNSLKPEDTAVYYCAADTLLRLFYWGQGTQVTVSS

SEQ ID NO: 182 - protein, 125 aa, Artificial Sequence
  Chemically Synthesized
QVQLQESGGGLVQAGGSLRLSCAASGTISAHYDMGWYRQAPGKERELVAAINAGTSTNYADSVKGRFTISRDNAKNTVYLQMNSLKPEDTAVYYCAVDYHPGYQLYADAHETIYWGQGTQVTVSS

SEQ ID NO: 183 - protein, 116 aa, Artificial Sequence
  Chemically Synthesized
QVQLQESGGGLVQAGGSLRLSCAASGSIFPDTQMGWYRQAPGKEREFVASMLLVLLPYADSVKGRFTISRDNAKNTVYLQMNSLKPEDTAVYYCAAGITWESRMYWGQGTQVTVSS

SEQ ID NO: 184 - protein, 113 aa, Artificial Sequence
  Chemically Synthesized
QVQLQESGGGLVQAGGSLRLSCAASGYIFYYRTMGWYRQAPGKERELVAAINYGANTNYADSVKGRFTISRDNAKNTVYLQMNSLKPEDTAVYYCALRTLRYWGQGTQVTVSS

SEQ ID NO: 185 - protein, 122 aa, Artificial Sequence
  Chemically Synthesized
QVQLQESGGGLVQAGGSLRLSCAASGSISYDDFMGWYRQAPGKERELVASIGKGSNTNYADSVKGRFTISRDNAKNTVYLQMNSLKPEDTAVYYCAATDRYYADQQAALYYWGQGTQVTVSS

SEQ ID NO: 186 - protein, 118 aa, Artificial Sequence
  Chemically Synthesized
QVQLQESGGGLVQAGGSLRLSCAASGNIFDTIEMGWYRQAPGKEREFVATISAGGTTYYADSVKGRFTISRDNAKNTVYLQMNSLKPEDTAVYYCAVSDSRYYWFGYWGQGTQVTVSS

SEQ ID NO: 187 - protein, 122 aa, Artificial Sequence
  Chemically Synthesized
QVQLQESGGGLVQAGGSLRLSCAASGTIFYLVVMGWYRQAPGKEREFVATIGIGTTTYYADSVKGRFTISRDNAKNTVYLQMNSLKPEDTAVYYCAAYLDYQHREINPHIYWGQGTQVTVSS

SEQ ID NO: 188 - protein, 121 aa, Artificial Sequence
  Chemically Synthesized
QVQLQESGGGLVQAGGSLRLSCAASGTIFVGMMGWYRQAPGKERELVAGIDDGTSTYYADSVKGRFTISRDNAKNTVYLQMNSLKPEDTAVYYCAANYFHDDDYDAGLAYWGQGTQVTVSS

SEQ ID NO: 189 - protein, 125 aa, Artificial Sequence
  Chemically Synthesized
QVQLQESGGGLVQAGGSLRLSCAASGTIFRGTYMGWYRQAPGKEREFVATITTGTITYYADSVKGRFTISRDNAKNTVYLQMNSLKPEDTAVYYCAALYWASGYTNVIYWSHGYWGQGTQVTVSS

SEQ ID NO: 190 - protein, 117 aa, Artificial Sequence
  Chemically Synthesized
QVQLQESGGGLVQAGGSLRLSCAASGYIFYATDMGWYRQAPGKEREFVATITHGSITYYADSVKGRFTISRDNAKNTVYLQMNSLKPEDTAVYYCAVSLGRYALLYWGQGTQVTVSS

SEQ ID NO: 191 - protein, 121 aa, Artificial Sequence
  Chemically Synthesized
QVQLQESGGGLVQAGGSLRLSCAASGYISTSRYMGWYRQAPGKERELVATITSVLLPYADSVKGRFTISRDNAKNTVYLQMNSLKPEDTAVYYCAVLDGEDPSEYDVYVYWGQGTQVTVSS

SEQ ID NO: 192 - protein, 118 aa, Artificial Sequence
  Chemically Synthesized
QVQLQESGGGLVQAGGSLRLSCAASGTIFDHGLMGWYRQAPGKEREFVAGIAVGGTTNYADSVKGRFTISRDNAKNTVYLQMNSLKPEDTAVYYCAVTPSIGSGYYYWGQGTQVTVSS

SEQ ID NO: 193 - protein, 122 aa, Artificial Sequence
  Chemically Synthesized
QVQLQESGGGLVQAGGSLRLSCAASGTISGYSYMGWYRQAPGKERELVAGITKGSTTYYADSVKGRFTISRDNAKNTVYLQMNSLKPEDTAVYYCAVQWAPYYYVTYVHEYWGQGTQVTVSS

SEQ ID NO: 194 - protein, 117 aa, Artificial Sequence
  Chemically Synthesized
QVQLQESGGGLVQAGGSLRLSCAASGNISTLTMGWYRQAPGKEREFVAGIAPGASTNYADSVKGRFTISRDNAKNTVYLQMNSLKPEDTAVYYCAVYPYVTPLYIYWGQGTQVTVSS

SEQ ID NO: 195 - protein, 122 aa, Artificial Sequence
  Chemically Synthesized
QVQLQESGGGLVQAGGSLRLSCAASGTISYAAYMGWYRQAPGKERELVATITHGASTYADSVKGRFTISRDNAKNTVYLQMNSLKPEDTAVYYCAAQTDYRSRDTYGSYSYWGQGTQVTVSS

SEQ ID NO: 196 - protein, 121 aa, Artificial Sequence
  Chemically Synthesized
QVQLQESGGGLVQAGGSLRLSCAASGTIFKDGQMGWYRQAPGKEREFVPLLMLVVLPYADSVKGRFTISRDNAKNTVYLQMNSLKPEDTAVYYCAAVAVDVGLSYPDFPYWGQGTQVTVSS

SEQ ID NO: 197 - protein, 125 aa, Artificial Sequence
  Chemically Synthesized
QVQLQESGGGLVQAGGSLRLSCAASGSISQDLGMGWYRQAPGKERELVATISDGGNTYYADSVKGRFTISRDNAKNTVYLQMNSLKPEDTAVYYCAAYTYDYYRDYQYLYVPFYWGQGTQVTVSS

SEQ ID NO: 198 - protein, 118 aa, Artificial Sequence
  Chemically Synthesized
QVQLQESGGGLVQAGGSLRLSCAASGTISSDYGMGWYRQAPGKERELVAGIDYGTSTYYADSVKGRFTISRDNAKNTVYLQMNSLKPEDTAVYYCAVNSQDDYWHAYWGQGTQVTVSS

SEQ ID NO: 199 - protein, 126 aa, Artificial Sequence
  Chemically Synthesized
QVQLQESGGGLVQAGGSLRLSCAASGSISYYTSMGWYRQAPGKERELVAGINFGTITNYADSVKGRFTISRDNAKNTVYLQMNSLKPEDTAVYYCAAGDSPEYIVPFGTADLYEYWGQGTQVTVSS

SEQ ID NO: 200 - protein, 118 aa, Artificial Sequence
  Chemically Synthesized
QVQLQESGGGLVQAGGSLRLSCAASGYIFASAIMGWYRQAPGKERELVAGIGTGANTYYADSVKGRFTISRDNAKNTVYLQMNSLKPEDTAVYYCAVPSYVDDSYGYWGQGTQVTVSS

SEQ ID NO: 201 - protein, 122 aa, Artificial Sequence
  Chemically Synthesized
QVQLQESGGGLVQAGGSLRLSCAASGYISDVTTMGWYRQAPGKEREFVAGIADGGNTNYADSVKGRFTISRDNAKNTVYLQMNSLKPEDTAVYYCAAYIWFGYVYRIYHRYWGQGTQVTVSS

SEQ ID NO: 202 - protein, 118 aa, Artificial Sequence
  Chemically Synthesized
QVQLQESGGGLVQAGGSLRLSCAASGNISGYVGMGWYRQAPGKEREFVATIGIGGTTNYADSVKGRFTISRDNAKNTVYLQMNSLKPEDTAVYYCAVTGYGDNELYYWGQGTQVTVSS

SEQ ID NO: 203 - protein, 118 aa, Artificial Sequence
  Chemically Synthesized
QVQLQESGGGLVQAGGSLRLSCAASGSIFQFSYMGWYRQAPGKEREFVAGIARGGNTYYADSVKGRFTISRDNAKNTVYLQMNSLKPEDTAVYYCAARPDRPIPYFYWGQGTQVTVSS

SEQ ID NO: 204 - protein, 122 aa, Artificial Sequence
  Chemically Synthesized
QVQLQESGGGLVQAGGSLRLSCAASGYISYVPFMGWYRQAPGKERELVATIAFGSNTYYADSVKGRFTISRDNAKNTVYLQMNSLKPEDTAVYYCAVGYYPGPIYTYNLIYWGQGTQVTVSS

SEQ ID NO: 205 - protein, 126 aa, Artificial Sequence
  Chemically Synthesized
QVQLQESGGGLVQAGGSLRLSCAASGYIFDGGGMGWYRQAPGKEREFVASITGGATTYYADSVKGRFTISRDNAKNTVYLQMNSLKPEDTAVYYCAATYEHIYVNGTRVDPYLYYWGQGTQVTVSS

SEQ ID NO: 206 - protein, 121 aa, Artificial Sequence
  Chemically Synthesized
QVQLQESGGGLVQAGGSLRLSCAASGTISYTDSMGWYRQAPGKEREFVASINDGGITNYADSVKGRFTISRDNAKNTVYLQMNSLKPEDTAVYYCAVGPTDAPYWDTGIYWGQGTQVTVSS

SEQ ID NO: 207 - protein, 118 aa, Artificial Sequence
  Chemically Synthesized
QVQLQESGGGLVQAGGSLRLSCAASGNIFLYADMGWYRQAPGKEREFVASIGIGGSTNYADSVKGRFTISRDNAKNTVYLQMNSLKPEDTAVYYCAALWRYWSAHGYWGQGTQVTVSS

SEQ ID NO: 208 - protein, 117 aa, Artificial Sequence
  Chemically Synthesized
QVQLQESGGGLVQAGGSLRLSCAASGSISPTSTMGWYRQAPGKEREFVAGIDYGTITNYADSVKGRFTISRDNAKNTVYLQMNSLKPEDTAVYYCAAFTLNGSVIYWGQGTQVTVSS

SEQ ID NO: 209 - protein, 118 aa, Artificial Sequence
  Chemically Synthesized
QVQLQESGGGLVQAGGSLRLSCAASGYISVEYLMGWYRQAPGKEREFVAAIDVGSTTNYADSVKGRFTISRDNAKNTVYLQMNSLKPEDTAVYYCAAGGTKHGDFEYWGQGTQVTVSS

SEQ ID NO: 210 - protein, 117 aa, Artificial Sequence
  Chemically Synthesized
QVQLQESGGGLVQAGGSLRLSCAASGSISTDRMGWYRQAPGKEREFVASINGGGNTNYADSVKGRFTISRDNAKNTVYLQMNSLKPEDTAVYYCAVEQGLDVRHYYWGQGTQVTVSS

SEQ ID NO: 211 - protein, 117 aa, Artificial Sequence
  Chemically Synthesized
QVQLQESGGGLVQAGGSLRLSCAASGTISLAGGMGWYRQAPGKERELVATIAVGSNTYYADSVKGRFTISRDNAKNTVYLQMNSLKPEDTAVYYCAVYDSVVPLTYWGQGTQVTVSS

SEQ ID NO: 212 - protein, 125 aa, Artificial Sequence
  Chemically Synthesized
QVQLQESGGGLVQAGGSLRLSCAASGYISQWADMGWYRQAPGKEREFVAGINDGTSTNYADSVKGRFTISRDNAKNTVYLQMNSLKPEDTAVYYCAVYQENTYLSDASTLVTIYWGQGTQVTVSS

SEQ ID NO: 213 - protein, 118 aa, Artificial Sequence
  Chemically Synthesized
QVQLQESGGGLVQAGGSLRLSCAASGNIFHYQEMGWYRQAPGKERELVASIAWGGTTYYADSVKGRFTISRDNAKNTVYLQMNSLKPEDTAVYYCAADGPQYWYLNYWGQGTQVTVSS

SEQ ID NO: 214 - protein, 122 aa, Artificial Sequence
  Chemically Synthesized
QVQLQESGGGLVQAGGSLRLSCAASGNIFNTYGMGWYRQAPGKEREFVATISQGASTYYADSVKGRFTISRDNAKNTVYLQMNSLKPEDTAVYYCAAVDDDSPTVAELFDYWGQGTQVTVSS

SEQ ID NO: 215 - protein, 121 aa, Artificial Sequence
  Chemically Synthesized
QVQLQESGGGLVQAGGSLRLSCAASGYIFYSYYMGWYRQAPGKEREFVASIGSGTSTNYADSVKGRFTISRDNAKNTVYLQMNSLKPEDTAVYYCAVGLGNEKYSFSCIYWGQGTQVTVSS

SEQ ID NO: 216 - protein, 122 aa, Artificial Sequence
  Chemically Synthesized
QVQLQESGGGLVQAGGSLRLSCAASGTIFLHLRMGWYRQAPGKEREFVASIDGGANTNYADSVKGRFTISRDNAKNTVYLQMNSLKPEDTAVYYCAVVGPPTRGRGATYDYWGQGTQVTVSS

SEQ ID NO: 217 - protein, 110 aa, Artificial Sequence
  Chemically Synthesized
QVQLQESGGGLVQAGGSLRLSCAASGTIFYSATMGWYRQAPGKEREFVAAYADSVKGRFTISRDNAKNTVYLQMNSLKPEDTAVYYCAAYEWDFTLLNYWGQGTQVTVSS

SEQ ID NO: 218 - protein, 122 aa, Artificial Sequence
  Chemically Synthesized
QVQLQESGGGLVQAGGSLRLSCAASGNIFGYTDMGWYRQAPGKERELVASITIGSITNYADSVKGRFTISRDNAKNTVYLQMNSLKPEDTAVYYCAVYVYTNAPYQDEYTYWGQGTQVTVSS

SEQ ID NO: 219 - protein, 117 aa, Artificial Sequence
  Chemically Synthesized
QVQLQESGGGLVQAGGSLRLSCAASGNISDDRYMGWYRQAPGKERELVATINSGAITYYADSVKGRFTISRDNAKNTVYLQMNSLKPEDTAVYYCAVVTFDWGTFYWGQGTQVTVSS

SEQ ID NO: 220 - protein, 118 aa, Artificial Sequence
  Chemically Synthesized
QVQLQESGGGLVQAGGSLRLSCAASGSISQWLYMGWYRQAPGKEREFVASITSGGTTNYADSVKGRFTISRDNAKNTVYLQMNSLKPEDTAVYYCAAGGPDAVGHAYWGQGTQVTVSS

SEQ ID NO: 221 - protein, 118 aa, Artificial Sequence
  Chemically Synthesized
QVQLQESGGGLVQAGGSLRLSCAASGTIFDYRGMGWYRQAPGKEREFVATISLGTTTNYADSVKGRFTISRDNAKNTVYLQMNSLKPEDTAVYYCAVYGYDAVVHRYWGQGTQVTVSS

SEQ ID NO: 222 - protein, 118 aa, Artificial Sequence
  Chemically Synthesized
QVQLQESGGGLVQAGGSLRLSCAASGSIFHRFYMGWYRQAPGKERELVAAIDRGTITYYADSVKGRFTISRDNAKNTVYLQMNSLKPEDTAVYYCAVLPWYYNDYTYWGQGTQVTVSS

SEQ ID NO: 223 - protein, 118 aa, Artificial Sequence
  Chemically Synthesized
QVQLQESGGGLVQAGGSLRLSCAASGTIFVVVVMGWYRQAPGKEREFVAGITDGANTYYADSVKGRFTISRDNAKNTVYLQMNSLKPEDTAVYYCAATPYYPYGYDYWGQGTQVTVSS

SEQ ID NO: 224 - protein, 119 aa, Artificial Sequence
  Chemically Synthesized
QVQLQESGGGLVQAGGSLRLSCAASGYISTLRVMGWYRQAPGKEREFVAGIADGGTTYYADSVKGRFTISRDNAKNTVYLQMNSLKPEDTAVYYCAVWVLLTTVRPFYWGQGTQVTVSS

SEQ ID NO: 225 - protein, 117 aa, Artificial Sequence
  Chemically Synthesized
QVQLQESGGGLVQAGGSLRLSCAASGSISIQPDMGWYRQAPGKEREFVAGIDPGTSTYYADSVKGRFTISRDNAKNTVYLQMNSLKPEDTAVYYCAVYQDGPSTIYWGQGTQVTVSS

SEQ ID NO: 226 - protein, 118 aa, Artificial Sequence
  Chemically Synthesized
QVQLQESGGGLVQAGGSLRLSCAASGYISWTRAMGWYRQAPGKEREFVATIDRGSTTYYADSVKGRFTISRDNAKNTVYLQMNSLKPEDTAVYYCAALNHLYHYLGYWGQGTQVTVSS

SEQ ID NO: 227 - protein, 122 aa, Artificial Sequence
  Chemically Synthesized
QVQLQESGGGLVQAGGSLRLSCAASGYISWGDYMGWYRQAPGKERELVAAIAVGASTYYADSVKGRFTISRDNAKNTVYLQMNSLKPEDTAVYYCAAPLNWYYHYLFHHNYWGQGTQVTVSS

SEQ ID NO: 228 - protein, 116 aa, Artificial Sequence
  Chemically Synthesized
QVQLQESGGGLVQAGGSLRLSCAASGYSDRYDMGWYRQAPGKERELVATITPGGTTNYADSVKGRFTISRDNAKNTVYLQMNSLKPEDTAVYYCAVDYHPDSIIYWGQGTQVTVSS

SEQ ID NO: 229 - protein, 118 aa, Artificial Sequence
  Chemically Synthesized
QVQLQESGGGLVQAGGSLRLSCAASGNISGDPWMGWYRQAPGKEREFVASIDGGGITYYADSVKGRFTISRDNAKNTVYLQMNSLKPEDTAVYYCAAVIENGDQFRYWGQGTQVTVSS

SEQ ID NO: 230 - protein, 118 aa, Artificial Sequence
  Chemically Synthesized
QVQLQESGGGLVQAGGSLRLSCAASGTISAHYTMGWYRQAPGKERELVATIGLGTTTYYADSVKGRFTISRDNAKNTVYLQMNSLKPEDTAVYYCAVGYPNQVDFRYWGQGTQVTVSS

SEQ ID NO: 231 - protein, 122 aa, Artificial Sequence
  Chemically Synthesized
QVQLQESGGGLVQAGGSLRLSCAASGTIFAYQYMGWYRQAPGKEREFVASIGLGTSTYYADSVKGRFTISRDNAKNTVYLQMNSLKPEDTAVYYCAAYRGPDERYDGRHEYWGQGTQVTVSS

SEQ ID NO: 232 - protein, 121 aa, Artificial Sequence
  Chemically Synthesized
QVQLQESGGGLVQAGGSLRLSCAASGYIFPGQRMGWYRQAPGKEREFVASMLTVLIPYADSVKGRFTISRDNAKNTVYLQMNSLKPEDTAVYYCAVGSLRNNTPGIYHEYWGQGTQVTVSS

SEQ ID NO: 233 - protein, 126 aa, Artificial Sequence
  Chemically Synthesized
QVQLQESGGGLVQAGGSLRLSCAASGYIFSRDFMGWYRQAPGKERELVAGIDFGAITNYADSVKGRFTISRDNAKNTVYLQMNSLKPEDTAVYYCAVRDSYTPIYQSRYTDNLAYWGQGTQVTVSS

SEQ ID NO: 234 - protein, 126 aa, Artificial Sequence
  Chemically Synthesized
QVQLQESGGGLVQAGGSLRLSCAASGNISYWDSMGWYRQAPGKERELVASISLGTTTYYADSVKGRFTISRDNAKNTVYLQMNSLKPEDTAVYYCAVYYNDGGYVDFEYPEHLWYWGQGTQVTVSS

SEQ ID NO: 235 - protein, 109 aa, Artificial Sequence
  Chemically Synthesized
QVQLQESGGGLVQAGGSLRLSCAASGYISGLAEMGWYRQAPGKERELVAGIGNGAITNYADSVKGRFTISRDNAKNTVYLQMNSLKPEDTAVYYCAVYWGQGTQVTVSS

SEQ ID NO: 236 - protein, 118 aa, Artificial Sequence
  Chemically Synthesized
QVQLQESGGGLVQAGGSLRLSCAASGTIFTAHAMGWYRQAPGKERELVATIDTGANTYYADSVKGRFTISRDNAKNTVYLQMNSLKPEDTAVYYCAVYTTGDYGLGYWGQGTQVTVSS

SEQ ID NO: 237 - protein, 117 aa, Artificial Sequence
  Chemically Synthesized
QVQLQESGGGLVQAGGSLRLSCAASGSISDACMGWYRQAPGKERELVAAITGGTTTNYADSVKGRFTISRDNAKNTVYLQMNSLKPEDTAVYYCAVPNRFAQYFQYWGQGTQVTVSS

SEQ ID NO: 238 - protein, 117 aa, Artificial Sequence
  Chemically Synthesized
QVQLQESGGGLVQAGGSLRLSCAASGTISYRFRMGWYRQAPGKERELVALLVTVVLPYADSVKGRFTISRDNAKNTVYLQMNSLKPEDTAVYYCAADADLVYYLTYWGQGTQVTVSS

SEQ ID NO: 239 - protein, 121 aa, Artificial Sequence
  Chemically Synthesized
QVQLQESGGGLVQAGGSLRLSCAASGTIFARLYMGWYRQAPGKEREFVATIAYGTSTYYADSVKGRFTISRDNAKNTVYLQMNSLKPEDTAVYYCAVPYVLSRLRKVLFYWGQGTQVTVSS

SEQ ID NO: 240 - protein, 122 aa, Artificial Sequence
  Chemically Synthesized
QVQLQESGGGLVQAGGSLRLSCAASGTIFDSYGMGWYRQAPGKEREFVATIDYGGSTYYADSVKGRFTISRDNAKNTVYLQMNSLKPEDTAVYYCAAVDLRDGPPYQGHNYWGQGTQVTVSS

SEQ ID NO: 241 - protein, 119 aa, Artificial Sequence
  Chemically Synthesized
QVQLQESGGGLVQAGGSLRLSCAASGTISGSDDDVMGWYRQAPGKERELVASISGGSNTYYADSVKGRFTISRDNAKNTVYLQMNSLKPEDTAVYYCAALTLRLTTIYWGQGTQVTVSS

SEQ ID NO: 242 - protein, 118 aa, Artificial Sequence
  Chemically Synthesized
QVQLQESGGGLVQAGGSLRLSCAASGSIFVYAYMGWYRQAPGKERELVATINYGASTYYADSVKGRFTISRDNAKNTVYLQMNSLKPEDTAVYYCAVRRTYTANHDYWGQGTQVTVSS

SEQ ID NO: 243 - protein, 117 aa, Artificial Sequence
  Chemically Synthesized
QVQLQESGGGLVQAGGSLRLSCAASGNISSDYGMGWYRQAPGKEREFVALLISVVIPYADSVKGRFTISRDNAKNTVYLQMNSLKPEDTAVYYCAAVYTDDHPLNYWGQGTQVTVSS

SEQ ID NO: 244 - protein, 126 aa, Artificial Sequence
  Chemically Synthesized
QVQLQESGGGLVQAGGSLRLSCAASGTISTVYYMGWYRQAPGKERELVASIDYGGNTYYADSVKGRFTISRDNAKNTVYLQMNSLKPEDTAVYYCAAYDWYATLDQGSTNFGHAYWGQGTQVTVSS

SEQ ID NO: 245 - protein, 117 aa, Artificial Sequence
  Chemically Synthesized
QVQLQESGGGLVQAGGSLRLSCAASGNISRSRMGWYRQAPGKERELVAAITVGSSTNYADSVKGRFTISRDNAKNTVYLQMNSLKPEDTAVYYCAADLYYDASYGYWGQGTQVTVSS

SEQ ID NO: 246 - protein, 117 aa, Artificial Sequence
  Chemically Synthesized
QVQLQESGGGLVQAGGSLRLSCAASGSISPVYDMGWYRQAPGKERELVASIGEVLIPYADSVKGRFTISRDNAKNTVYLQMNSLKPEDTAVYYCAAYGYSVSVHWYWGQGTQVTVSS

SEQ ID NO: 247 - protein, 118 aa, Artificial Sequence
  Chemically Synthesized
QVQLQESGGGLVQAGGSLRLSCAASGYISRYVSMGWYRQAPGKERELVATITDGGITYYADSVKGRFTISRDNAKNTVYLQMNSLKPEDTAVYYCAADGDTDQPYDYWGQGTQVTVSS

SEQ ID NO: 248 - protein, 122 aa, Artificial Sequence
  Chemically Synthesized
QVQLQESGGGLVQAGGSLRLSCAASGNIFRLRVMGWYRQAPGKERELVAGINFGASTYYADSVKGRFTISRDNAKNTVYLQMNSLKPEDTAVYYCAAWGDLINYEPTSHGYWGQGTQVTVSS

SEQ ID NO: 249 - protein, 117 aa, Artificial Sequence
  Chemically Synthesized
QVQLQESGGGLVQAGGSLRLSCAASGNISWWYVMGWYRQAPGKERELVASISGGTNTNYADSVKGRFTISRDNAKNTVYLQMNSLKPEDTAVYYCAAEHDADRYVYWGQGTQVTVSS

SEQ ID NO: 250 - protein, 118 aa, Artificial Sequence
  Chemically Synthesized
QVQLQESGGGLVQAGGSLRLSCAASGSISAHTYMGWYRQAPGKERELVATIDKGGSTYYADSVKGRFTISRDNAKNTVYLQMNSLKPEDTAVYYCAVRYYYQAVHDYWGQGTQVTVSS

SEQ ID NO: 251 - protein, 126 aa, Artificial Sequence
  Chemically Synthesized
QVQLQESGGGLVQAGGSLRLSCAASGTIFRVYYMGWYRQAPGKERELVAAIDYGTTTYYADSVKGRFTISRDNAKNTVYLQMNSLKPEDTAVYYCAVPPNAYGGRTRWGRRDHYYWGQGTQVTVSS

SEQ ID NO: 252 - protein, 121 aa, Artificial Sequence
  Chemically Synthesized
QVQLQESGGGLVQAGGSLRLSCAASGSIFTPPYMGWYRQAPGKEREFVAAITDVVLPYADSVKGRFTISRDNAKNTVYLQMNSLKPEDTAVYYCAVVPDSYYGERNRHYYWGQGTQVTVSS

SEQ ID NO: 253 - protein, 114 aa, Artificial Sequence
  Chemically Synthesized
QVQLQESGGGLVQAGGSLRLSCAASGNIFTLRMGWYRQAPGKEREFVAGISSGASTNYADSVKGRFTISRDNAKNTVYLQMNSLKPEDTAVYYCAALLYESAYWGQGTQVTVSS

SEQ ID NO: 254 - protein, 118 aa, Artificial Sequence
  Chemically Synthesized
QVQLQESGGGLVQAGGSLRLSCAASGNISIDGTMGWYRQAPGKEREFVAGIGYGGSTYYADSVKGRFTISRDNAKNTVYLQMNSLKPEDTAVYYCAAVTSRPNLLGYWGQGTQVTVSS

SEQ ID NO: 255 - protein, 122 aa, Artificial Sequence
  Chemically Synthesized
QVQLQESGGGLVQAGGSLRLSCAASGYISTTVTMGWYRQAPGKEREFVAAISDGSNTNYADSVKGRFTISRDNAKNTVYLQMNSLKPEDTAVYYCAADVYSAFTDVRDYYYWGQGTQVTVSS

SEQ ID NO: 256 - protein, 118 aa, Artificial Sequence
  Chemically Synthesized
QVQLQESGGGLVQAGGSLRLSCAASGNISLHYQMGWYRQAPGKERELVAAIDSGSTTNYADSVKGRFTISRDNAKNTVYLQMNSLKPEDTAVYYCAAYVWDGSTHYYWGQGTQVTVSS

SEQ ID NO: 257 - protein, 118 aa, Artificial Sequence
  Chemically Synthesized
QVQLQESGGGLVQAGGSLRLSCAASGSIFLPGIMGWYRQAPGKEREFVAGIAYGSITNYADSVKGRFTISRDNAKNTVYLQMNSLKPEDTAVYYCAVNTSSQTYYRYWGQGTQVTVSS

SEQ ID NO: 258 - protein, 120 aa, Artificial Sequence
  Chemically Synthesized
QVQLQESGGGLVQAGGSLRLSCAASGTLQRPMGWYRQAPGKEREFVATIDGGTSTNYADSVKGRFTISRDNAKNTVYLQMNSLKPEDTAVYYCAVLTITEYYVGYQHYYWGQGTQVTVSS

SEQ ID NO: 259 - protein, 126 aa, Artificial Sequence
  Chemically Synthesized
QVQLQESGGGLVQAGGSLRLSCAASGNISFYVSMGWYRQAPGKEREFVAAISSGGTTYYADSVKGRFTISRDNAKNTVYLQMNSLKPEDTAVYYCAADERKANATPPYVQDILRYWGQGTQVTVSS

SEQ ID NO: 260 - protein, 120 aa, Artificial Sequence
  Chemically Synthesized
QVQLQESGGGLVQAGGSLRLSCAASGTISFTGVMGWYRQAPGKERELVASINYGTITNYADSVKGRFTISRDNAKNTVYLQMNSLKPEDTAVYYCAAYTTPYGEYTFAYWGQGTQVTVSS

SEQ ID NO: 261 - protein, 122 aa, Artificial Sequence
  Chemically Synthesized
QVQLQESGGGLVQAGGSLRLSCAASGYISTANTMGWYRQAPGKERELVAAISSGSSTYYADSVKGRFTISRDNAKNTVYLQMNSLKPEDTAVYYCAVQVQPRDDKLAYFRYWGQGTQVTVSS

SEQ ID NO: 262 - protein, 123 aa, Artificial Sequence
  Chemically Synthesized
QVQLQESGGGLVQAGGSLRLSCAASGNIGTMGWYRQAPGKERELVATIDAGGITNYADSVKGRFTISRDNAKNTVYLQMNSLKPEDTAVYYCAAQYQYSRSVTDAYTDVHGYWGQGTQVTVSS

SEQ ID NO: 263 - protein, 122 aa, Artificial Sequence
  Chemically Synthesized
QVQLQESGGGLVQAGGSLRLSCAASGSISDKLYMGWYRQAPGKEREFVAAITDGGNTNYADSVKGRFTISRDNAKNTVYLQMNSLKPEDTAVYYCAANVADYAHREDYLTYWGQGTQVTVSS

SEQ ID NO: 264 - protein, 118 aa, Artificial Sequence
  Chemically Synthesized
QVQLQESGGGLVQAGGSLRLSCAASGYIFGPVNMGWYRQAPGKEREFVASIGGGASTYYADSVKGRFTISRDNAKNTVYLQMNSLKPEDTAVYYCAAIFETYAEFLYWGQGTQVTVSS

SEQ ID NO: 265 - protein, 118 aa, Artificial Sequence
  Chemically Synthesized
QVQLQESGGGLVQAGGSLRLSCAASGNISFLAWMGWYRQAPGKEREFVATITFGSTTNYADSVKGRFTISRDNAKNTVYLQMNSLKPEDTAVYYCAAWYTYSYIHAYWGQGTQVTVSS

SEQ ID NO: 266 - protein, 118 aa, Artificial Sequence
  Chemically Synthesized
QVQLQESGGGLVQAGGSLRLSCAASGYISDAPGMGWYRQAPGKEREFVAAIAQGGSTNYADSVKGRFTISRDNAKNTVYLQMNSLKPEDTAVYYCAVDTFLLLWFGYWGQGTQVTVSS

SEQ ID NO: 267 - protein, 125 aa, Artificial Sequence
  Chemically Synthesized
QVQLQESGGGLVQAGGSLRLSCAASGSISGPVEMGWYRQAPGKERELVASIAEGAITNYADSVKGRFTISRDNAKNTVYLQMNSLKPEDTAVYYCAVDYVPSYNLSSWTLTVWYWGQGTQVTVSS

SEQ ID NO: 268 - protein, 122 aa, Artificial Sequence
  Chemically Synthesized
QVQLQESGGGLVQAGGSLRLSCAASGTIFNFLRMGWYRQAPGKEREFVAAITGGGTTNYADSVKGRFTISRDNAKNTVYLQMNSLKPEDTAVYYCAVTGWSYSYIVIDHGYWGQGTQVTVSS

SEQ ID NO: 269 - protein, 122 aa, Artificial Sequence
  Chemically Synthesized
QVQLQESGGGLVQAGGSLRLSCAASGTIFDPYRMGWYRQAPGKEREFVAAIDLGGITNYADSVKGRFTISRDNAKNTVYLQMNSLKPEDTAVYYCAVYDLTGYISYSDFDYWGQGTQVTVSS

SEQ ID NO: 270 - protein, 118 aa, Artificial Sequence
  Chemically Synthesized
QVQLQESGGGLVQAGGSLRLSCAASGNISDGGYMGWYRQAPGKEREFVATIGKGSTTYYADSVKGRFTISRDNAKNTVYLQMNSLKPEDTAVYYCAAGRGPVLYYTYWGQGTQVTVSS

SEQ ID NO: 271 - protein, 122 aa, Artificial Sequence
  Chemically Synthesized
QVQLQESGGGLVQAGGSLRLSCAASGSIFTPYYMGWYRQAPGKERELVATIDRGGITNYADSVKGRFTISRDNAKNTVYLQMNSLKPEDTAVYYCAARSPSPGGGYTQFTYWGQGTQVTVSS

SEQ ID NO: 272 - protein, 125 aa, Artificial Sequence
  Chemically Synthesized
QVQLQESGGGLVQAGGSLRLSCAASGSISWLGVMGWYRQAPGKEREFVAAITPGGTTYYADSVKGRFTISRDNAKNTVYLQMNSLKPEDTAVYYCAASLTVTLLVFSLTWLVIYWGQGTQVTVSS

SEQ ID NO: 273 - protein, 109 aa, Artificial Sequence
  Chemically Synthesized
QVQLQESGGGLVQAGGSLRLSCAASGYISPDQQMGWYRQAPGKEREFVATIGSGSITNYADSVKGRFTISRDNAKNTVYLQMNSLKPEDTAVYYCASYWGQGTQVTVSS

SEQ ID NO: 274 - protein, 125 aa, Artificial Sequence
  Chemically Synthesized
QVQLQESGGGLVQAGGSLRLSCAASGYISTEGDMGWYRQAPGKEREFVAGINTGTITYYADSVKGRFTISRDNAKNTVYLQMNSLKPEDTAVYYCAVPYVDYTPNDWDRSLRMYWGQGTQVTVSS

SEQ ID NO: 275 - protein, 118 aa, Artificial Sequence
  Chemically Synthesized
QVQLQESGGGLVQAGGSLRLSCAASGYISLARPMGWYRQAPGKEREFVAGINYGTSTNYADSVKGRFTISRDNAKNTVYLQMNSLKPEDTAVYYCAVYTSWRWRYYYWGQGTQVTVSS

SEQ ID NO: 276 - protein, 118 aa, Artificial Sequence
  Chemically Synthesized
QVQLQESGGGLVQAGGSLRLSCAASGNISYLDGMGWYRQAPGKEREFVATIGYGGITYYADSVKGRFTISRDNAKNTVYLQMNSLKPEDTAVYYCAVAHDRTYQYSYWGQGTQVTVSS

SEQ ID NO: 277 - protein, 117 aa, Artificial Sequence
  Chemically Synthesized
QVQLQESGGGLVQAGGSLRLSCAASGTIFLYNYMGWYRQAPGKERELVATIDVGGTTYYADSVKGRFTISRDNAKNTVYLQMNSLKPEDTAVYYCAAFPSDVILWYWGQGTQVTVSS

SEQ ID NO: 278 - protein, 118 aa, Artificial Sequence
  Chemically Synthesized
QVQLQESGGGLVQAGGSLRLSCAASGNISKSVDMGWYRQAPGKEREFVAAITSGGSTYYADSVKGRFTISRDNAKNTVYLQMNSLKPEDTAVYYCAVELAGRYAFDYWGQGTQVTVSS

SEQ ID NO: 279 - protein, 117 aa, Artificial Sequence
  Chemically Synthesized
QVQLQESGGGLVQAGGSLRLSCAASGSISYAASMGWYRQAPGKERELLPLLVLVVLPYADSVKGRFTISRDNAKNTVYLQMNSLKPEDTAVYYCAAKGHIEWNHLYWGQGTQVTVSS

SEQ ID NO: 280 - protein, 118 aa, Artificial Sequence
  Chemically Synthesized
QVQLQESGGGLVQAGGSLRLSCAASGNIFYGYIMGWYRQAPGKERELVAAIDYGTTTYYADSVKGRFTISRDNAKNTVYLQMNSLKPEDTAVYYCAAYYDADQGFLYWGQGTQVTVSS

SEQ ID NO: 281 - protein, 113 aa, Artificial Sequence
  Chemically Synthesized
QVQLQESGGGLVQAGGSLRLSCAASGYISRRVGMGWYRQAPGKERELVAGISNGGSTYYADSVKGRFTISRDNAKNTVYLQMNSLKPEDTAVYYCAAVSFIYWGQGTQVTVSS

SEQ ID NO: 282 - protein, 122 aa, Artificial Sequence
  Chemically Synthesized
QVQLQESGGGLVQAGGSLRLSCAASGTISRIVTMGWYRQAPGKERELVAAITGGGSTYYADSVKGRFTISRDNAKNTVYLQMNSLKPEDTAVYYCAAGAQDRQRTRPGHIYWGQGTQVTVSS

SEQ ID NO: 283 - protein, 117 aa, Artificial Sequence
  Chemically Synthesized
QVQLQESGGGLVQAGGSLRLSCAASGSIFAELKMGWYRQAPGKERELVAGISGGSTTNYADSVKGRFTISRDNAKNTVYLQMNSLKPEDTAVYYCAADDYLDSYTYWGQGTQVTVSS

SEQ ID NO: 284 - protein, 118 aa, Artificial Sequence
  Chemically Synthesized
QVQLQESGGGLVQAGGSLRLSCAASGSISEDGVMGWYRQAPGKEREFVAAIDEGGNTYYADSVKGRFTISRDNAKNTVYLQMNSLKPEDTAVYYCAAYYRWTGRHQYWGQGTQVTVSS

SEQ ID NO: 285 - protein, 125 aa, Artificial Sequence
  Chemically Synthesized
QVQLQESGGGLVQAGGSLRLSCAASGYISDLYRMGWYRQAPGKERELVASIGVGGTTYYADSVKGRFTISRDNAKNTVYLQMNSLKPEDTAVYYCAVFIDNWYASGTTLTTSMYWGQGTQVTVSS

SEQ ID NO: 286 - protein, 118 aa, Artificial Sequence
  Chemically Synthesized
QVQLQESGGGLVQAGGSLRLSCAASGSIFARFDMGWYRQAPGKERELVAAIASGGSTYYADSVKGRFTISRDNAKNTVYLQMNSLKPEDTAVYYCAVDGGYIGGYDYWGQGTQVTVSS

SEQ ID NO: 287 - protein, 118 aa, Artificial Sequence
  Chemically Synthesized
QVQLQESGGGLVQAGGSLRLSCAASGYISVQWVMGWYRQAPGKEREFVAAINEGATTYYADSVKGRFTISRDNAKNTVYLQMNSLKPEDTAVYYCAAYDSRADPHDYWGQGTQVTVSS

SEQ ID NO: 288 - protein, 117 aa, Artificial Sequence
  Chemically Synthesized
QVQLQESGGGLVQAGGSLRLSCAASGSFLLFTMGWYRQAPGKEREFVAAIDPGTTTYYADSVKGRFTISRDNAKNTVYLQMNSLKPEDTAVYYCAAGVDTDHRHDYWGQGTQVTVSS

SEQ ID NO: 289 - protein, 122 aa, Artificial Sequence
  Chemically Synthesized
QVQLQESGGGLVQAGGSLRLSCAASGTISYLRDMGWYRQAPGKEREFVAGISQGASTNYADSVKGRFTISRDNAKNTVYLQMNSLKPEDTAVYYCAVSEWDYLGQNGYHLYWGQGTQVTVSS

SEQ ID NO: 290 - protein, 121 aa, Artificial Sequence
  Chemically Synthesized
QVQLQESGGGLVQAGGSLRLSCAASGNIFRLNAMGWYRQAPGKERELVAGIGYGGSTNYADSVKGRFTISRDNAKNTVYLQMNSLKPEDTAVYYCAVGLIQAALNDNLWYWGQGTQVTVSS

SEQ ID NO: 291 - protein, 118 aa, Artificial Sequence
  Chemically Synthesized
QVQLQESGGGLVQAGGSLRLSCAASGYISGPYYMGWYRQAPGKEREFVAGIGEGGTTYYADSVKGRFTISRDNAKNTVYLQMNSLKPEDTAVYYCAVDAVDDRPHYYWGQGTQVTVSS

SEQ ID NO: 292 - protein, 126 aa, Artificial Sequence
  Chemically Synthesized
QVQLQESGGGLVQAGGSLRLSCAASGSISNYTGMGWYRQAPGKERELVAAIAGGGNTYYADSVKGRFTISRDNAKNTVYLQMNSLKPEDTAVYYCAVIILDGIPAKGGYYDVYTYWGQGTQVTVSS

SEQ ID NO: 293 - protein, 118 aa, Artificial Sequence
  Chemically Synthesized
QVQLQESGGGLVQAGGSLRLSCAASGYIFRYQRMGWYRQAPGKERELVASINWGGITNYADSVKGRFTISRDNAKNTVYLQMNSLKPEDTAVYYCAALLYYFERFGYWGQGTQVTVSS

SEQ ID NO: 294 - protein, 117 aa, Artificial Sequence
  Chemically Synthesized
QVQLQESGGGLVQAGGSLRLSCAASGSISRDTQMGWYRQAPGKERELVAAINYGANTYYADSVKGRFTISRDNAKNTVYLQMNSLKPEDTAVYYCAVYVYPVYHDYWGQGTQVTVSS

SEQ ID NO: 295 - protein, 118 aa, Artificial Sequence
  Chemically Synthesized
QVQLQESGGGLVQAGGSLRLSCAASGNISWDWIMGWYRQAPGKEREFVASITLGSSTNYADSVKGRFTISRDNAKNTVYLQMNSLKPEDTAVYYCAVYDVYGGVLPYWGQGTQVTVSS

SEQ ID NO: 296 - protein, 123 aa, Artificial Sequence
  Chemically Synthesized
QVQLQESGGGLVQAGGSLRLSCAASGNIFLYDVMGWYRQAPGKERELAAIGWGGITYYADSVKGRFTISRDNAKNTVYLQMNSLKPEDTAVYYCAVAKYRGAYYYIQLPEPYWGQGTQVTVSS

SEQ ID NO: 297 - protein, 122 aa, Artificial Sequence
  Chemically Synthesized
QVQLQESGGGLVQAGGSLRLSCAASGTISDVSPMGWYRQAPGKERELVAAIDSGSTTNYADSVKGRFTISRDNAKNTVYLQMNSLKPEDTAVYYCAALRILPEPYVYDLDYWGQGTQVTVSS

SEQ ID NO: 298 - protein, 118 aa, Artificial Sequence
  Chemically Synthesized
QVQLQESGGGLVQAGGSLRLSCAASGNISTDHTMGWYRQAPGKEREFVASIAYGASTYYADSVKGRFTISRDNAKNTVYLQMNSLKPEDTAVYYCAAVQYGLYSHGYWGQGTQVTVSS

SEQ ID NO: 299 - protein, 126 aa, Artificial Sequence
  Chemically Synthesized
QVQLQESGGGLVQAGGSLRLSCAASGTISVPYYMGWYRQAPGKEREFVATIGVGTNTNYADSVKGRFTISRDNAKNTVYLQMNSLKPEDTAVYYCAARIPGYNAYYDTWRDDHFYWGQGTQVTVSS

SEQ ID NO: 300 - protein, 122 aa, Artificial Sequence
  Chemically Synthesized
QVQLQESGGGLVQAGGSLRLSCAASGSISGIDLMGWYRQAPGKERELVAAITSGTNTYYADSVKGRFTISRDNAKNTVYLQMNSLKPEDTAVYYCAAVDVWDHGWYDVYYYWGQGTQVTVSS

SEQ ID NO: 301 - protein, 125 aa, Artificial Sequence
  Chemically Synthesized
QVQLQESGGGLVQAGGSLRLSCAASGTISYGWMGWYRQAPGKEREFVASINLGAITYYADSVKGRFTISRDNAKNTVYLQMNSLKPEDTAVYYCAVRYIGVQRDYYPTYVGLWYWGQGTQVTVSS

SEQ ID NO: 302 - protein, 122 aa, Artificial Sequence
  Chemically Synthesized
QVQLQESGGGLVQAGGSLRLSCAASGTIFDQSVMGWYRQAPGKEREFVAAINEGANTYYADSVKGRFTISRDNAKNTVYLQMNSLKPEDTAVYYCAAYYYPSKWTGGTYQYWGQGTQVTVSS

SEQ ID NO: 303 - protein, 122 aa, Artificial Sequence
  Chemically Synthesized
QVQLQESGGGLVQAGGSLRLSCAASGNISISVAMGWYRQAPGKERELVASINDGGTTYYADSVKGRFTISRDNAKNTVYLQMNSLKPEDTAVYYCAAGRIGRYGGDSFHSYWGQGTQVTVSS

SEQ ID NO: 304 - protein, 111 aa, Artificial Sequence
  Chemically Synthesized
QVQLQESGGGLVQAGGSLRLSCAASGNISPGGYMGWYRQAPGKERELVATISEGGITNYADSVKGRFTISRDNAKNTVYLQMNSLKPEDTAVYYCAVIFYWGQGTQVTVSS

SEQ ID NO: 305 - protein, 122 aa, Artificial Sequence
  Chemically Synthesized
QVQLQESGGGLVQAGGSLRLSCAASGTISYREPMGWYRQAPGKEREFVATISTGSITNYADSVKGRFTISRDNAKNTVYLQMNSLKPEDTAVYYCAVYVDSFKTVTQRFAYWGQGTQVTVSS

SEQ ID NO: 306 - protein, 122 aa, Artificial Sequence
  Chemically Synthesized
QVQLQESGGGLVQAGGSLRLSCAASGTIFYSQYMGWYRQAPGKERELVAGIGTGWYYQYADSVKGRFTISRDNAKNTVYLQMNSLKPEDTAVYYCAVLYDTFEYSVYVHEYWGQGTQVTVSS

SEQ ID NO: 307 - protein, 118 aa, Artificial Sequence
  Chemically Synthesized
QVQLQESGGGLVQAGGSLRLSCAASGYILMGWYRQAPGKERELVASIAYGGNTNYADSVKGRFTISRDNAKNTVYLQMNSLKPEDTAVYYCAVRRSYYDGPYRVFYYWGQGTQVTVSS

SEQ ID NO: 308 - protein, 120 aa, Artificial Sequence
  Chemically Synthesized
QVQLQESGGGLVQAGGSLRLSCAASGNIFSRRTMGWYRQAPGKERELVAAINDGATTNYADSVKGRFTISRDNAKNTVYLQMNSLKPEDTAVYYCAAWDTVDTYIAHVYWGQGTQVTVSS

SEQ ID NO: 309 - protein, 118 aa, Artificial Sequence
  Chemically Synthesized
QVQLQESGGGLVQAGGSLRLSCAASGTISTQSVMGWYRQAPGKERELVATITTGTTTNYADSVKGRFTISRDNAKNTVYLQMNSLKPEDTAVYYCAAYDNSQLYHFYWGQGTQVTVSS

SEQ ID NO: 310 - protein, 111 aa, Artificial Sequence
  Chemically Synthesized
QVQLQESGGGLVQAGGSLRLSCAASGSMGWYRQAPGKERELVAGINPGSTTNYADSVKGRFTISRDNAKNTVYLQMNSLKPEDTAVYYCAAHEPHSTLLYWGQGTQVTVSS

SEQ ID NO: 311 - protein, 122 aa, Artificial Sequence
  Chemically Synthesized
QVQLQESGGGLVQAGGSLRLSCAASGNISPIYYMGWYRQAPGKEREFVAGIDSGSNTNYADSVKGRFTISRDNAKNTVYLQMNSLKPEDTAVYYCAVDRPPSGDVVYSYSYWGQGTQVTVSS

SEQ ID NO: 312 - protein, 114 aa, Artificial Sequence
  Chemically Synthesized
QVQLQESGGGLVQAGGSLRLSCAASGNISQWVIMGWYRQAPGKERELVATYADSVKGRFTISRDNAKNTVYLQMNSLKPEDTAVYYCAVDYDDNIDLYVNLYYWGQGTQVTVSS

SEQ ID NO: 313 - protein, 122 aa, Artificial Sequence
  Chemically Synthesized
QVQLQESGGGLVQAGGSLRLSCAASGTISWYGSMGWYRQAPGKERELVAGITHGSNTYYADSVKGRFTISRDNAKNTVYLQMNSLKPEDTAVYYCAATSPYQYPFYDTHYYWGQGTQVTVSS

SEQ ID NO: 314 - protein, 122 aa, Artificial Sequence
  Chemically Synthesized
QVQLQESGGGLVQAGGSLRLSCAASGSISLVSNMGWYRQAPGKERELVATISNGANTNYADSVKGRFTISRDNAKNTVYLQMNSLKPEDTAVYYCAADTDLTFSYVYLHYYWGQGTQVTVSS

SEQ ID NO: 315 - protein, 117 aa, Artificial Sequence
  Chemically Synthesized
QVQLQESGGGLVQAGGSLRLSCAASGNIFLKRYMGWYRQAPGKEREFVAGIGVVLVPYADSVKGRFTISRDNAKNTVYLQMNSLKPEDTAVYYCAVGYRDYWHLDYWGQGTQVTVSS

SEQ ID NO: 316 - protein, 118 aa, Artificial Sequence
  Chemically Synthesized
QVQLQESGGGLVQAGGSLRLSCAASGTISPRVGMGWYRQAPGKERELVATIDGGGNTNYADSVKGRFTISRDNAKNTVYLQMNSLKPEDTAVYYCAVAPWKLYYHLYWGQGTQVTVSS

SEQ ID NO: 317 - protein, 122 aa, Artificial Sequence
  Chemically Synthesized
QVQLQESGGGLVQAGGSLRLSCAASGNIFDYQNMGWYRQAPGKERELVAAISRGANTNYADSVKGRFTISRDNAKNTVYLQMNSLKPEDTAVYYCAADTGWYEYGYEQHPYWGQGTQVTVSS

SEQ ID NO: 318 - protein, 119 aa, Artificial Sequence
  Chemically Synthesized
QVQLQESGGGLVQAGGSLRLSCAASGTISHDLDMGWYRQAPGKERELVATISGGGITNYADSVKGRFTISRDNAKNTVYLQMNSLKPEDTAVYYCAAWYYGLSPPYPYWGQGTQVTVSS

SEQ ID NO: 319 - protein, 117 aa, Artificial Sequence
  Chemically Synthesized
QVQLQESGGGLVQAGGSLRLSCAASGNIFPYYAMGWYRQAPGKERELVAAISYGATTYYADSVKGRFTISRDNAKNTVYLQMNSLKPEDTAVYYCAVLLYGPTHGYWGQGTQVTVSS

SEQ ID NO: 320 - protein, 120 aa, Artificial Sequence
  Chemically Synthesized
QVQLQESGGGLVQAGGSLRLSCAASGTIFDRTHMGWYRQAPGKEREFVASISSGSKPYADSVKGRFTISRDNAKNTVYLQMNSLKPEDTAVYYCAALNQYDGDTFRHDYWGQGTQVTVSS

SEQ ID NO: 321 - protein, 118 aa, Artificial Sequence
  Chemically Synthesized
QVQLQESGGGLVQAGGSLRLSCAASGSIFVSHDMGWYRQAPGKERELVATIAHGSSTNYADSVKGRFTISRDNAKNTVYLQMNSLKPEDTAVYYCAAYERGAHDLGYWGQGTQVTVSS

SEQ ID NO: 322 - protein, 118 aa, Artificial Sequence
  Chemically Synthesized
QVQLQESGGGLVQAGGSLRLSCAASGYIFGADDMGWYRQAPGKERELVASINTGTNTYYADSVKGRFTISRDNAKNTVYLQMNSLKPEDTAVYYCAVDDTVGGHHYYWGQGTQVTVSS

SEQ ID NO: 323 - protein, 112 aa, Artificial Sequence
  Chemically Synthesized
QVQLQESGGGLVQAGGSLRLSCAASGNISTHTVMGWYRQAPGKEREFVASIDYGGTTNYADSVKGRFTISRDNAKNTVYLQMNSLKPEDTAVYYCAVDYAYWGQGTQVTVSS

SEQ ID NO: 324 - protein, 117 aa, Artificial Sequence
  Chemically Synthesized
QVQLQESGGGLVQAGGSLRLSCAASGTISPELTMGWYRQAPGKEREFVALLVTVLVPYADSVKGRFTISRDNAKNTVYLQMNSLKPEDTAVYYCAAAFIGYITFRYWGQGTQVTVSS

SEQ ID NO: 325 - protein, 121 aa, Artificial Sequence
  Chemically Synthesized
QVQLQESGGGLVQAGGSLRLSCAASGNIFPGNYMGWYRQAPGKERELVAAITDGTTTNYADSVKGRFTISRDNAKNTVYLQMNSLKPEDTAVYYCAAEDYVYYVDLRPQYWGQGTQVTVSS

SEQ ID NO: 326 - protein, 125 aa, Artificial Sequence
  Chemically Synthesized
QVQLQESGGGLVQAGGSLRLSCAASGNIFDPLAMGWYRQAPGKEREFVAAIGRGGNTYYADSVKGRFTISRDNAKNTVYLQMNSLKPEDTAVYYCAVLDFNTGYPPSRVGSVFYWGQGTQVTVSS

SEQ ID NO: 327 - protein, 111 aa, Artificial Sequence
  Chemically Synthesized
QVQLQESGGGLVQAGGSLRLSCAASGSIFSYHLMGWYRQAPGKERELVASISDGAITYYADSVKGRFTISRDNAKNTVYLQMNSLKPEDTAVYYCAVDTYWGQGTQVTVSS

SEQ ID NO: 328 - protein, 122 aa, Artificial Sequence
  Chemically Synthesized
QVQLQESGGGLVQAGGSLRLSCAASGYISGLYAMGWYRQAPGKERELVATINTGSNTNYADSVKGRFTISRDNAKNTVYLQMNSLKPEDTAVYYCAVDYRNARSHKIYFWYWGQGTQVTVSS

SEQ ID NO: 329 - protein, 116 aa, Artificial Sequence
  Chemically Synthesized
QVQLQESGGGLVQAGGSLRLSCAASGNISYATYMGWYRQAPGKEREFVASINRGANTNYADSVKGRFTISRDNAKNTVYLQMNSLKPEDTAVYYCAATTSFTCLYWGQGTQVTVSS

SEQ ID NO: 330 - protein, 118 aa, Artificial Sequence
  Chemically Synthesized
QVQLQESGGGLVQAGGSLRLSCAASGTIFRYSYMGWYRQAPGKERELVASINKGANTNYADSVKGRFTISRDNAKNTVYLQMNSLKPEDTAVYYCAALGYAEVELRYWGQGTQVTVSS

SEQ ID NO: 331 - protein, 123 aa, Artificial Sequence
  Chemically Synthesized
QVQLQESGGGLVQAGGSLRLSCAASGTISGVMGWYRQAPGKERELVASIGVGRIPYADSVKGRFTISRDNAKNTVYLQMNSLKPEDTAVYYCAAYVYGYYRRDYYHITAHEYWGQGTQVTVSS

SEQ ID NO: 332 - protein, 118 aa, Artificial Sequence
  Chemically Synthesized
QVQLQESGGGLVQAGGSLRLSCAASGSIFVIEYMGWYRQAPGKEREFVAGINQGSSTNYADSVKGRFTISRDNAKNTVYLQMNSLKPEDTAVYYCAALIKVPADYRYWGQGTQVTVSS

SEQ ID NO: 333 - protein, 121 aa, Artificial Sequence
  Chemically Synthesized
QVQLQESGGGLVQAGGSLRLSCAASGNIFSRAYMGWYRQAPGKEREFVAAIAKGTNTNYADSVKGRFTISRDNAKNTVYLQMNSLKPEDTAVYYCAVYAGFDSLTLTTIYWGQGTQVTVSS

SEQ ID NO: 334 - protein, 118 aa, Artificial Sequence
  Chemically Synthesized
QVQLQESGGGLVQAGGSLRLSCAASGYIFGQSSMGWYRQAPGKEREFVATINYGTSTYYADSVKGRFTISRDNAKNTVYLQMNSLKPEDTAVYYCAVPSYYTGVLTYWGQGTQVTVSS

SEQ ID NO: 335 - protein, 122 aa, Artificial Sequence
  Chemically Synthesized
QVQLQESGGGLVQAGGSLRLSCAASGNISSNDVMGWYRQAPGKEREFVAAITPGGSTYYADSVKGRFTISRDNAKNTVYLQMNSLKPEDTAVYYCAVATSALLFWYYQYRYWGQGTQVTVSS

SEQ ID NO: 336 - protein, 117 aa, Artificial Sequence
  Chemically Synthesized
QVQLQESGGGLVQAGGSLRLSCAASGSIFWGIGMGWYRQAPGKERELVASIGYGASTYADSVKGRFTISRDNAKNTVYLQMNSLKPEDTAVYYCAVYHPSYPDLSYWGQGTQVTVSS

SEQ ID NO: 337 - protein, 122 aa, Artificial Sequence
  Chemically Synthesized
QVQLQESGGGLVQAGGSLRLSCAASGTIFRTIYMGWYRQAPGKERELVAAISIGTSTYYADSVKGRFTISRDNAKNTVYLQMNSLKPEDTAVYYCAANDYYIRGYGGYHYYWGQGTQVTVSS

SEQ ID NO: 338 - protein, 126 aa, Artificial Sequence
  Chemically Synthesized
QVQLQESGGGLVQAGGSLRLSCAASGTISGDSPMGWYRQAPGKERELVAGIAYGTITNYADSVKGRFTISRDNAKNTVYLQMNSLKPEDTAVYYCAVFTYVAYEWDYYFDFGYPYWGQGTQVTVSS

SEQ ID NO: 339 - protein, 117 aa, Artificial Sequence
  Chemically Synthesized
QVQLQESGGGLVQAGGSLRLSCAASGTISYYTYMGWYRQAPGKERELASIDYGTSTYYADSVKGRFTISRDNAKNTVYLQMNSLKPEDTAVYYCAARETYRYYLDYWGQGTQVTVSS

SEQ ID NO: 340 - protein, 111 aa, Artificial Sequence
  Chemically Synthesized
QVQLQESGGGLVQAGGSLRLSCAASGYISSHRRMGWYRQAPGKEREFVASIDTGANTNYADSVKGRFTISRDNAKNTVYLQMNSLKPEDTAVYYCAIHHYWGQGTQVTVSS

SEQ ID NO: 341 - protein, 122 aa, Artificial Sequence
  Chemically Synthesized
QVQLQESGGGLVQAGGSLRLSCAASGTISRRDGMGWYRQAPGKEREFVATIDYGGSTYYADSVKGRFTISRDNAKNTVYLQMNSLKPEDTAVYYCAVTGRGDYLYFHNHYYWGQGTQVTVSS

SEQ ID NO: 342 - protein, 111 aa, Artificial Sequence
  Chemically Synthesized
QVQLQESGGGLVQAGGSLRLSCAASGNIFNLRYMGWYRQAPGKERELVAAIARGSITYYADSVKGRFTISRDNAKNTVYLQMNSLKPEDTAVYYCALHYYWGQGTQVTVSS

SEQ ID NO: 343 - protein, 116 aa, Artificial Sequence
  Chemically Synthesized
QVQLQESGGGLVQAGGSLRLSCAASGTIFASTMGWYRQAPGKERELVASIGQGGSTNYADSVKGRFTISRDNAKNTVYLQMNSLKPEDTAVYYCAAPATNAYHGYWGQGTQVTVSS

SEQ ID NO: 344 - protein, 118 aa, Artificial Sequence
  Chemically Synthesized
QVQLQESGGGLVQAGGSLRLSCAASGSIFPPWNMGWYRQAPGKEREFVASINRGATTNYADSVKGRFTISRDNAKNTVYLQMNSLKPEDTAVYYCAAGAIYGGYHKYWGQGTQVTVSS

SEQ ID NO: 345 - protein, 123 aa, Artificial Sequence
  Chemically Synthesized
QVQLQESGGGLVQAGGSLRLSCAASGTISPSVTMGWYRQAPGKERELVAAINDGGSTYYADSVKGRFTISRDNAKNTVYLQMNSLKPEDTAVYYCAVLYFYHRAVDYSIHWYWGQGTQVTVSS

SEQ ID NO: 346 - protein, 118 aa, Artificial Sequence
  Chemically Synthesized
QVQLQESGGGLVQAGGSLRLSCAASGNISANDYMGWYRQAPGKERELVASIDRGGSTNYADSVKGRFTISRDNAKNTVYLQMNSLKPEDTAVYYCAADDAQLSDFRYWGQGTQVTVSS

SEQ ID NO: 347 - protein, 118 aa, Artificial Sequence
  Chemically Synthesized
QVQLQESGGGLVQAGGSLRLSCAASGTIFAYPSMGWYRQAPGKEREFVASIGTGANTYYADSVKGRFTISRDNAKNTVYLQMNSLKPEDTAVYYCAAKRPYVTDFRYWGQGTQVTVSS

SEQ ID NO: 348 - protein, 110 aa, Artificial Sequence
  Chemically Synthesized
QVQLQESGGGLVQAGGSLRLSCAASGTIFDDADMGWYRQAPGKERELVASITPGGNTNYADSVKGRFTISRDNAKNTVYLQMNSLKPEDTAVYYCAAIYWGQGTQVTVSS

SEQ ID NO: 349 - protein, 118 aa, Artificial Sequence
  Chemically Synthesized
QVQLQESGGGLVQAGGSLRLSCAASGTISFTRIMGWYRQAPGKERELVATIANGSSTYYADSVKGRFTISRDNAKNTVYLQMNSLKPEDTAVYYCAVFYYEYSSYAYWGQGTQVTVSS

SEQ ID NO: 350 - protein, 126 aa, Artificial Sequence
  Chemically Synthesized
QVQLQESGGGLVQAGGSLRLSCAASGTISASYDMGWYRQAPGKERELVATIAAGGTTNYADSVKGRFTISRDNAKNTVYLQMNSLKPEDTAVYYCAAYYYGSRYGARYNDADHHYWGQGTQVTVSS

SEQ ID NO: 351 - protein, 121 aa, Artificial Sequence
  Chemically Synthesized
QVQLQESGGGLVQAGGSLRLSCAASGTISREGTMGWYRQAPGKEREFVAGIADGTTTYYADSVKGRFTISRDNAKNTVYLQMNSLKPEDTAVYYCAANSTTTLILTTSIYWGQGTQVTVSS

SEQ ID NO: 352 - protein, 121 aa, Artificial Sequence
  Chemically Synthesized
QVQLQESGGGLVQAGGSLRLSCAASGTISTAKRMGWYRQAPGKERELVATITYGGTTYYADSVKGRFTISRDNAKNTVYLQMNSLKPEDTAVYYCAVGRGIQWDGGNGLYWGQGTQVTVSS

SEQ ID NO: 353 - protein, 122 aa, Artificial Sequence
  Chemically Synthesized
QVQLQESGGGLVQAGGSLRLSCAASGNIFDDAAMGWYRQAPGKERELVAAISYGGITYYADSVKGRFTISRDNAKNTVYLQMNSLKPEDTAVYYCAAIFIAASRDYYVHFYWGQGTQVTVSS

SEQ ID NO: 354 - protein, 122 aa, Artificial Sequence
  Chemically Synthesized
QVQLQESGGGLVQAGGSLRLSCAASGTIFILQYMGWYRQAPGKERELVASISLGGNTNYADSVKGRFTISRDNAKNTVYLQMNSLKPEDTAVYYCAVPTPAADQGWGYHDYWGQGTQVTVSS

SEQ ID NO: 355 - protein, 117 aa, Artificial Sequence
  Chemically Synthesized
QVQLQESGGGLVQAGGSLRLSCAASGNISAIYPMGWYRQAPGKEREFVATIGAGAITYYADSVKGRFTISRDNAKNTVYLQMNSLKPEDTAVYYCAVQGSIQDSMYWGQGTQVTVSS

SEQ ID NO: 356 - protein, 121 aa, Artificial Sequence
  Chemically Synthesized
QVQLQESGGGLVQAGGSLRLSCAASGYIFGNGIMGWYRQAPGKEREFVAGIGPGGTTYYADSVKGRFTISRDNAKNTVYLQMNSLKPEDTAVYYCAAYDGDGGYPSESMYWGQGTQVTVSS

SEQ ID NO: 357 - protein, 118 aa, Artificial Sequence
  Chemically Synthesized
QVQLQESGGGLVQAGGSLRLSCAASGTISGWPDMGWYRQAPGKEREFVASISYGANTYYADSVKGRFTISRDNAKNTVYLQMNSLKPEDTAVYYCAVYDPYYDQHLYWGQGTQVTVSS

SEQ ID NO: 358 - protein, 117 aa, Artificial Sequence
  Chemically Synthesized
QVQLQESGGGLVQAGGSLRLSCAASGLFLLLVMGWYRQAPGKERELVATINPGSSTYYADSVKGRFTISRDNAKNTVYLQMNSLKPEDTAVYYCAAYAPSESDYPYWGQGTQVTVSS

SEQ ID NO: 359 - protein, 118 aa, Artificial Sequence
  Chemically Synthesized
QVQLQESGGGLVQAGGSLRLSCAASGTIFRPYIMGWYRQAPGKERELVAAIGNGGTTNYADSVKGRFTISRDNAKNTVYLQMNSLKPEDTAVYYCAVVRGDAADLGYWGQGTQVTVSS

SEQ ID NO: 360 - protein, 115 aa, Artificial Sequence
  Chemically Synthesized
QVQLQESGGGLVQAGGSLRLSCAASGNISGTLYMGWYRQAPGKEREFVAAIDTGGTTYYADSVKGRFTISRDNAKNTVYLQMNSLKPEDTAVYYCAVPDYGLDYWGQGTQVTVSS

SEQ ID NO: 361 - protein, 113 aa, Artificial Sequence
  Chemically Synthesized
QVQLQESGGGLVQAGGSLRLSCAASGSISTGPGMGWYRQAPGKERELVAYADSVKGRFTISRDNAKNTVYLQMNSLKPEDTAVYYCAVAYFDVHRQQRFYGYWGQGTQVTVSS

SEQ ID NO: 362 - protein, 117 aa, Artificial Sequence
  Chemically Synthesized
QVQLQESGGGLVQAGGSLRLSCAASGSISQEGPMGWYRQAPGKERELVAGITTVLVPYADSVKGRFTISRDNAKNTVYLQMNSLKPEDTAVYYCAVTYYVGYGYQYWGQGTQVTVSS

SEQ ID NO: 363 - protein, 117 aa, Artificial Sequence
  Chemically Synthesized
QVQLQESGGGLVQAGGSLRLSCAASGTIFDRSTMGWYRQAPGKERELVATIGTGGTTNYADSVKGRFTISRDNAKNTVYLQMNSLKPEDTAVYYCAVTTNLTLVMYWGQGTQVTVSS

SEQ ID NO: 364 - protein, 122 aa, Artificial Sequence
  Chemically Synthesized
QVQLQESGGGLVQAGGSLRLSCAASGTIFQGFTMGWYRQAPGKEREFVAGITDGTSTNYADSVKGRFTISRDNAKNTVYLQMNSLKPEDTAVYYCAAADQSEDAGDTYHDYWGQGTQVTVSS

SEQ ID NO: 365 - protein, 103 aa, Artificial Sequence
  Chemically Synthesized
QVQLQESGGGLVQAGGSLRLSCAASGSISAWVYMGWYRQAPGKEREQYADSVKGRFTISRDNAKNTVYLQMNSLKPEDTAVYYCAVDDDLTYWGQGTQVTVSS

SEQ ID NO: 366 - protein, 111 aa, Artificial Sequence
  Chemically Synthesized
QVQLQESGGGLVQAGGSLRLSCAASGTIFIDVYMGWYRQAPGKERELVASIAYGSTTNYADSVKGRFTISRDNAKNTVYLQMNSLKPEDTAVYYCAAVIYWGQGTQVTVSS

SEQ ID NO: 367 - protein, 120 aa, Artificial Sequence
  Chemically Synthesized
QVQLQESGGGLVQAGGSLRLSCAASGTISSSGMGWYRQAPGKERELVAAITYGGNTYYADSVKGRFTISRDNAKNTVYLQMNSLKPEDTAVYYCAAGPLAYSTTLTLIYWGQGTQVTVSS

SEQ ID NO: 368 - protein, 118 aa, Artificial Sequence
  Chemically Synthesized
QVQLQESGGGLVQAGGSLRLSCAASGNISRADSMGWYRQAPGKERELVATITFGGSTYYADSVKGRFTISRDNAKNTVYLQMNSLKPEDTAVYYCAATTGEVHGHPYWGQGTQVTVSS

SEQ ID NO: 369 - protein, 122 aa, Artificial Sequence
  Chemically Synthesized
QVQLQESGGGLVQAGGSLRLSCAASGSISQTDGMGWYRQAPGKERELVAGISDGTITYYADSVKGRFTISRDNAKNTVYLQMNSLKPEDTAVYYCAVHSVRDDQVVRTLDYWGQGTQVTVSS

SEQ ID NO: 370 - protein, 118 aa, Artificial Sequence
  Chemically Synthesized
QVQLQESGGGLVQAGGSLRLSCAASGTIFHRYYMGWYRQAPGKERELVAAISGGATTYYADSVKGRFTISRDNAKNTVYLQMNSLKPEDTAVYYCAVHRGGHFGHDYWGQGTQVTVSS

SEQ ID NO: 371 - protein, 116 aa, Artificial Sequence
  Chemically Synthesized
QVQLQESGGGLVQAGGSLRLSCAASGYISVNMGWYRQAPGKERELVAAIGHGSTTNYADSVKGRFTISRDNAKNTVYLQMNSLKPEDTAVYYCAVVQTYGIYLGYWGQGTQVTVSS

SEQ ID NO: 372 - protein, 118 aa, Artificial Sequence
  Chemically Synthesized
QVQLQESGGGLVQAGGSLRLSCAASGSIFYYTYMGWYRQAPGKEREFVASIATGGTTNYADSVKGRFTISRDNAKNTVYLQMNSLKPEDTAVYYCAAYRGWGPPHYYWGQGTQVTVSS

SEQ ID NO: 373 - protein, 122 aa, Artificial Sequence
  Chemically Synthesized
QVQLQESGGGLVQAGGSLRLSCAASGTISYGVSMGWYRQAPGKERELVAAIAYGASTYYADSVKGRFTISRDNAKNTVYLQMNSLKPEDTAVYYCAVYYHAYYYRVAPFNYWGQGTQVTVSS

SEQ ID NO: 374 - protein, 115 aa, Artificial Sequence
  Chemically Synthesized
QVQLQESGGGLVQAGGSLRLSCAASGSVVSMGWYRQAPGKEREFVATIALGGNTNYADSVKGRFTISRDNAKNTVYLQMNSLKPEDTAVYYCAVGAVGGATHRYWGQGTQVTVSS

SEQ ID NO: 375 - protein, 123 aa, Artificial Sequence
  Chemically Synthesized
QVQLQESGGGLVQAGGSLRLSCAASGTIFPKQHMGWYRQAPGKEREFVAAITRGSITYYADSVKGRFTISRDNAKNTVYLQMNSLKPEDTAVYYCAVWDDGRSLYGYIRLDYWGQGTQVTVSS

SEQ ID NO: 376 - protein, 117 aa, Artificial Sequence
  Chemically Synthesized
QVQLQESGGGLVQAGGSLRLSCAASGSIFPLYVMGWYRQAPGKERELVAGLVSVLIPYADSVKGRFTISRDNAKNTVYLQMNSLKPEDTAVYYCAVYRTWDDPHGYWGQGTQVTVSS

SEQ ID NO: 377 - protein, 126 aa, Artificial Sequence
  Chemically Synthesized
QVQLQESGGGLVQAGGSLRLSCAASGNISDYGFMGWYRQAPGKERELVAAITYGSTTYYADSVKGRFTISRDNAKNTVYLQMNSLKPEDTAVYYCAVVYWFYYGARRPSYDVLTYWGQGTQVTVSS

SEQ ID NO: 378 - protein, 118 aa, Artificial Sequence
  Chemically Synthesized
QVQLQESGGGLVQAGGSLRLSCAASGSISYPIPMGWYRQAPGKEREFVAAIGQGTITYYADSVKGRFTISRDNAKNTVYLQMNSLKPEDTAVYYCAVPYYLAYVHTYWGQGTQVTVSS

SEQ ID NO: 379 - protein, 126 aa, Artificial Sequence
  Chemically Synthesized
QVQLQESGGGLVQAGGSLRLSCAASGTISASPYMGWYRQAPGKEREFVAGIAGGTTYQYADSVKGRFTISRDNAKNTVYLQMNSLKPEDTAVYYCAAWLYDTREVYRDRYTPYEYWGQGTQVTVSS

SEQ ID NO: 380 - protein, 122 aa, Artificial Sequence
  Chemically Synthesized
QVQLQESGGGLVQAGGSLRLSCAASGYISSVWDMGWYRQAPGKEREFVAAISPGSSTNYADSVKGRFTISRDNAKNTVYLQMNSLKPEDTAVYYCAVYTERDKGAISGYGYWGQGTQVTVSS

SEQ ID NO: 381 - protein, 117 aa, Artificial Sequence
  Chemically Synthesized
QVQLQESGGGLVQAGGSLRLSCAASGYISASGMGWYRQAPGKERELVATISRGTITNYADSVKGRFTISRDNAKNTVYLQMNSLKPEDTAVYYCAATGAYPRTLGYWGQGTQVTVSS

SEQ ID NO: 382 - protein, 125 aa, Artificial Sequence
  Chemically Synthesized
QVQLQESGGGLVQAGGSLRLSCAASGTIFYYSSMGWYRQAPGKERELVASIGIGGNTNYADSVKGRFTISRDNAKNTVYLQMNSLKPEDTAVYYCAVRPAPVYGSSFDQLPDHYWGQGTQVTVSS

SEQ ID NO: 383 - protein, 118 aa, Artificial Sequence
  Chemically Synthesized
QVQLQESGGGLVQAGGSLRLSCAASGNISDYTAMGWYRQAPGKERELVAAISDGGTTYYADSVKGRFTISRDNAKNTVYLQMNSLKPEDTAVYYCAASRYGSYTHRYWGQGTQVTVSS

SEQ ID NO: 384 - protein, 110 aa, Artificial Sequence
  Chemically Synthesized
QVQLQESGGGLVQAGGSLRLSCAASGNISTQLDMGWYRQAPGKEREFVAAISKGASTYYADSVKGRFTISRDNAKNTVYLQMNSLKPEDTAVYYCAATYWGQGTQVTVSS

SEQ ID NO: 385 - protein, 121 aa, Artificial Sequence
  Chemically Synthesized
QVQLQESGGGLVQAGGSLRLSCAASGNISVVDVMGWYRQAPGKERELVAGIDGGSITYYADSVKGRFTISRDNAKNTVYLQMNSLKPEDTAVYYCAVRYVDLSGLTYFGYWGQGTQVTVSS

SEQ ID NO: 386 - protein, 118 aa, Artificial Sequence
  Chemically Synthesized
QVQLQESGGGLVQAGGSLRLSCAASGNISTFIDMGWYRQAPGKERELVASIDYGGSTYYADSVKGRFTISRDNAKNTVYLQMNSLKPEDTAVYYCAVAGSIDYHHWYWGQGTQVTVSS

SEQ ID NO: 387 - protein, 125 aa, Artificial Sequence
  Chemically Synthesized
QVQLQESGGGLVQAGGSLRLSCAASGNISNTWQMGWYRQAPGKEREFVASLVLVVVPYADSVKGRFTISRDNAKNTVYLQMNSLKPEDTAVYYCAVKGLSDSDSDRYLYQDFTYWGQGTQVTVSS

SEQ ID NO: 388 - protein, 122 aa, Artificial Sequence
  Chemically Synthesized
QVQLQESGGGLVQAGGSLRLSCAASGNIFYNYDMGWYRQAPGKEREFVASISTGTTTYYADSVKGRFTISRDNAKNTVYLQMNSLKPEDTAVYYCAAAGYYYGSEYATHTYWGQGTQVTVSS

SEQ ID NO: 389 - protein, 118 aa, Artificial Sequence
  Chemically Synthesized
QVQLQESGGGLVQAGGSLRLSCAASGTIFWLNNMGWYRQAPGKERELVASISYGGSTYYADSVKGRFTISRDNAKNTVYLQMNSLKPEDTAVYYCAVAYYYSQHLTYWGQGTQVTVSS

SEQ ID NO: 390 - protein, 124 aa, Artificial Sequence
  Chemically Synthesized
QVQLQESGGGLVQAGGSLRLSCAASGSISRSSKMGWYRQAPGKERELVAGIAYGATTNYADSVKGRFTISRDNAKNTVYLQMNSLKPEDTAVYYCAAQAQPDQDPVYIYSGLYWGQGTQVTVSS

SEQ ID NO: 391 - protein, 117 aa, Artificial Sequence
  Chemically Synthesized
QVQLQESGGGLVQAGGSLRLSCAASGTISYTFNMGWYRQAPGKERELVAAINYGTNTNYADSVKGRFTISRDNAKNTVYLQMNSLKPEDTAVYYCAADKLMVLNFYWGQGTQVTVSS

SEQ ID NO: 392 - protein, 126 aa, Artificial Sequence
  Chemically Synthesized
QVQLQESGGGLVQAGGSLRLSCAASGTIFGDYWMGWYRQAPGKERELVASIGSGASTNYADSVKGRFTISRDNAKNTVYLQMNSLKPEDTAVYYCAVGEFSFKLGRRRYWAPFSYWGQGTQVTVSS

SEQ ID NO: 393 - protein, 118 aa, Artificial Sequence
  Chemically Synthesized
QVQLQESGGGLVQAGGSLRLSCAASGNISVDYDMGWYRQAPGKERELVAGINVGASTNYADSVKGRFTISRDNAKNTVYLQMNSLKPEDTAVYYCAAESPSLVAFRYWGQGTQVTVSS

SEQ ID NO: 394 - protein, 126 aa, Artificial Sequence
  Chemically Synthesized
QVQLQESGGGLVQAGGSLRLSCAASGYIFGPRVMGWYRQAPGKERELVATIGPGWYYLYADSVKGRFTISRDNAKNTVYLQMNSLKPEDTAVYYCAAISRGPVVLGDQRVYLFDYWGQGTQVTVSS

SEQ ID NO: 395 - protein, 118 aa, Artificial Sequence
  Chemically Synthesized
QVQLQESGGGLVQAGGSLRLSCAASGYISVVWSMGWYRQAPGKERELVASIDNGSSTYYADSVKGRFTISRDNAKNTVYLQMNSLKPEDTAVYYCAAVHWGQGYYVYWGQGTQVTVSS

SEQ ID NO: 396 - protein, 117 aa, Artificial Sequence
  Chemically Synthesized
QVQLQESGGGLVQAGGSLRLSCAASGYIFSSVMGWYRQAPGKEREFVASISDGANTYYADSVKGRFTISRDNAKNTVYLQMNSLKPEDTAVYYCAVLGYRYYGFSYWGQGTQVTVSS

SEQ ID NO: 397 - protein, 118 aa, Artificial Sequence
  Chemically Synthesized
QVQLQESGGGLVQAGGSLRLSCAASGTIFITGDMGWYRQAPGKERELVAAIGRGSTTNYADSVKGRFTISRDNAKNTVYLQMNSLKPEDTAVYYCAVWYGYVFRHVYWGQGTQVTVSS

SEQ ID NO: 398 - protein, 126 aa, Artificial Sequence
  Chemically Synthesized
QVQLQESGGGLVQAGGSLRLSCAASGSIFVDWAMGWYRQAPGKERELVASIDYGSSTYYADSVKGRFTISRDNAKNTVYLQMNSLKPEDTAVYYCAAIDVQYQSPYSRTIDVYLYWGQGTQVTVSS

SEQ ID NO: 399 - protein, 122 aa, Artificial Sequence
  Chemically Synthesized
QVQLQESGGGLVQAGGSLRLSCAASGTISYPDRMGWYRQAPGKERELVASIGTGGSTYYADSVKGRFTISRDNAKNTVYLQMNSLKPEDTAVYYCAAKIPDPYDERYGHDYWGQGTQVTVSS

SEQ ID NO: 400 - protein, 118 aa, Artificial Sequence
  Chemically Synthesized
QVQLQESGGGLVQAGGSLRLSCAASGNISVYVFMGWYRQAPGKERELVAAISDGTSTYYADSVKGRFTISRDNAKNTVYLQMNSLKPEDTAVYYCAVYTAYDSLHIYWGQGTQVTVSS

SEQ ID NO: 401 - protein, 112 aa, Artificial Sequence
  Chemically Synthesized
QVQLQESGGGLVQAGGSLRLSCAASGTIFGDRTMGWYRQAPGKEREFVAGIGVGSITNYADSVKGRFTISRDNAKNTVYLQMNSLKPEDTAVYYCAVTLIYWGQGTQVTVSS

SEQ ID NO: 402 - protein, 114 aa, Artificial Sequence
  Chemically Synthesized
QVQLQESGGGLVQAGGSLRLSCAASGSISGSQLMGWYRQAPGKERELVATITYGTTTNYADSVKGRFTISRDNAKNTVYLQMNSLKPEDTAVYYCAVGLGKTYWGQGTQVTVSS

SEQ ID NO: 403 - protein, 118 aa, Artificial Sequence
  Chemically Synthesized
QVQLQESGGGLVQAGGSLRLSCAASGNISTYGPMGWYRQAPGKEREFVAAITQGGNTNYADSVKGRFTISRDNAKNTVYLQMNSLKPEDTAVYYCAAPYSYSDTLGYWGQGTQVTVSS

SEQ ID NO: 404 - protein, 125 aa, Artificial Sequence
  Chemically Synthesized
QVQLQESGGGLVQAGGSLRLSCAASGNIFPSRSMGWYRQAPGKEREFVAGIANGGTTYYADSVKGRFTISRDNAKNTVYLQMNSLKPEDTAVYYCAAATWSLGNDGYGYLTNLYWGQGTQVTVSS

SEQ ID NO: 405 - protein, 114 aa, Artificial Sequence
  Chemically Synthesized
QVQLQESGGGLVQAGGSLRLSCAASGYIFAVNEMGWYRQAPGKERELVAGYYQYADSVKGRFTISRDNAKNTVYLQMNSLKPEDTAVYYCASPYYGDYYVYTYWGQGTQVTVSS

SEQ ID NO: 406 - protein, 122 aa, Artificial Sequence
  Chemically Synthesized
QVQLQESGGGLVQAGGSLRLSCAASGTISPDDYMGWYRQAPGKERELVAAIDHGGNTYYADSVKGRFTISRDNAKNTVYLQMNSLKPEDTAVYYCAAITIKAYQAYDIYYYWGQGTQVTVSS

SEQ ID NO: 407 - protein, 122 aa, Artificial Sequence
  Chemically Synthesized
QVQLQESGGGLVQAGGSLRLSCAASGYIFDTYYMGWYRQAPGKEREFVASIAIGGITNYADSVKGRFTISRDNAKNTVYLQMNSLKPEDTAVYYCAAYAIRVLSIYDPYTYWGQGTQVTVSS

SEQ ID NO: 408 - protein, 118 aa, Artificial Sequence
  Chemically Synthesized
QVQLQESGGGLVQAGGSLRLSCAASGTIFVDVRMGWYRQAPGKEREFVAAIAFGSITYYADSVKGRFTISRDNAKNTVYLQMNSLKPEDTAVYYCAAVDTLGDAHEYWGQGTQVTVSS

SEQ ID NO: 409 - protein, 119 aa, Artificial Sequence
  Chemically Synthesized
QVQLQESGGGLVQAGGSLRLSCAASGSISWLNTMGWYRQAPGKERELVATIGWGAITNYADSVKGRFTISRDNAKNTVYLQMNSLKPEDTAVYYCAVYDCTTLTTCMYWGQGTQVTVSS

SEQ ID NO: 410 - protein, 126 aa, Artificial Sequence
  Chemically Synthesized
QVQLQESGGGLVQAGGSLRLSCAASGTISYDDIMGWYRQAPGKERELVATIGYGANTNYADSVKGRFTISRDNAKNTVYLQMNSLKPEDTAVYYCAADLGRRYDHTLWNETDYSYWGQGTQVTVSS

SEQ ID NO: 411 - protein, 118 aa, Artificial Sequence
  Chemically Synthesized
QVQLQESGGGLVQAGGSLRLSCAASGTISYYGIMGWYRQAPGKERELVAAIAGGTTTNYADSVKGRFTISRDNAKNTVYLQMNSLKPEDTAVYYCAASSSIDDWLNYWGQGTQVTVSS

SEQ ID NO: 412 - protein, 117 aa, Artificial Sequence
  Chemically Synthesized
QVQLQESGGGLVQAGGSLRLSCAASGYIFRMEMGWYRQAPGKEREFVATISDSVLLPYADSVKGRFTISRDNAKNTVYLQMNSLKPEDTAVYYCAVYAGARTWFVYWGQGTQVTVSS

SEQ ID NO: 413 - protein, 121 aa, Artificial Sequence
  Chemically Synthesized
QVQLQESGGGLVQAGGSLRLSCAASGTISQPDGMGWYRQAPGKERELVAGIAYGSTTYYADSVKGRFTISRDNAKNTVYLQMNSLKPEDTAVYYCAASTSTTGLLTTRIYWGQGTQVTVSS

SEQ ID NO: 414 - protein, 121 aa, Artificial Sequence
  Chemically Synthesized
QVQLQESGGGLVQAGGSLRLSCAASGYISYGGYMGWYRQAPGKEREFVASINYGGNTYYADSVKGRFTISRDNAKNTVYLQMNSLKPEDTAVYYCASCWSAGYSELHFLYWGQGTQVTVSS

SEQ ID NO: 415 - protein, 116 aa, Artificial Sequence
  Chemically Synthesized
QVQLQESGGGLVQAGGSLRLSCAASGTISGSVMGWYRQAPGKEREFVALLVLVVVPYADSVKGRFTISRDNAKNTVYLQMNSLKPEDTAVYYCAADAYESSYFLYWGQGTQVTVSS

SEQ ID NO: 416 - protein, 121 aa, Artificial Sequence
  Chemically Synthesized
QVQLQESGGGLVQAGGSLRLSCAASGTIFFSVMGWYRQAPGKERELVAAINLGSSTYYADSVKGRFTISRDNAKNTVYLQMNSLKPEDTAVYYCAADLGILHEPDYVHTYWGQGTQVTVSS

SEQ ID NO: 417 - protein, 118 aa, Artificial Sequence
  Chemically Synthesized
QVQLQESGGGLVQAGGSLRLSCAASGSISDPDDMGWYRQAPGKERELVASIDGGASTYYADSVKGRFTISRDNAKNTVYLQMNSLKPEDTAVYYCAALYFLTYVHIYWGQGTQVTVSS

SEQ ID NO: 418 - protein, 118 aa, Artificial Sequence
  Chemically Synthesized
QVQLQESGGGLVQAGGSLRLSCAASGNISLSAIMGWYRQAPGKEREFVATISWGGSTYYADSVKGRFTISRDNAKNTVYLQMNSLKPEDTAVYYCAVIYDYDWTHVYWGQGTQVTVSS

SEQ ID NO: 419 - protein, 117 aa, Artificial Sequence
  Chemically Synthesized
QVQLQESGGGLVQAGGSLRLSCAASGNISTWAGMGWYRQAPGKERELVAGITTGSTTNYADSVKGRFTISRDNAKNTVYLQMNSLKPEDTAVYYCAAWESSLTCLYWGQGTQVTVSS

SEQ ID NO: 420 - protein, 122 aa, Artificial Sequence
  Chemically Synthesized
QVQLQESGGGLVQAGGSLRLSCAASGYIFPYYIMGWYRQAPGKERELVAGIGRGGSTYYADSVKGRFTISRDNAKNTVYLQMNSLKPEDTAVYYCAAFFNLPYLIPKLYYYWGQGTQVTVSS

SEQ ID NO: 421 - protein, 121 aa, Artificial Sequence
  Chemically Synthesized
QVQLQESGGGLVQAGGSLRLSCAASGTISQTRRMGWYRQAPGKERELVASIAAGATTNYADSVKGRFTISRDNAKNTVYLQMNSLKPEDTAVYYCAVTPYGLSSKTSNIYWGQGTQVTVSS

SEQ ID NO: 422 - protein, 122 aa, Artificial Sequence
  Chemically Synthesized
QVQLQESGGGLVQAGGSLRLSCAASGNISYNTDMGWYRQAPGKERELVAGIGPGGTTYYADSVKGRFTISRDNAKNTVYLQMNSLKPEDTAVYYCAAIYIYRGDDYWVHIYWGQGTQVTVSS

SEQ ID NO: 423 - protein, 122 aa, Artificial Sequence
  Chemically Synthesized
QVQLQESGGGLVQAGGSLRLSCAASGNIFARWKMGWYRQAPGKEREFVAGIGLGTTTYYADSVKGRFTISRDNAKNTVYLQMNSLKPEDTAVYYCAAYHTQHQKGPPYLRYWGQGTQVTVSS

SEQ ID NO: 424 - protein, 118 aa, Artificial Sequence
  Chemically Synthesized
QVQLQESGGGLVQAGGSLRLSCAASGYISYFQGMGWYRQAPGKEREFVASINEGASTYYADSVKGRFTISRDNAKNTVYLQMNSLKPEDTAVYYCAAYGWDHVTLDYWGQGTQVTVSS

SEQ ID NO: 425 - protein, 121 aa, Artificial Sequence
  Chemically Synthesized
QVQLQESGGGLVQAGGSLRLSCAASGNISLRPWMGWYRQAPGKEREFVAGITDGSITNYADSVKGRFTISRDNAKNTVYLQMNSLKPEDTAVYYCAARYSWQGNDDSLLYWGQGTQVTVSS

SEQ ID NO: 426 - protein, 113 aa, Artificial Sequence
  Chemically Synthesized
QVQLQESGGGLVQAGGSLRLSCAASGNISEALPMGWYRQAPGKERELVASIARGATTNYADSVKGRFTISRDNAKNTVYLQMNSLKPEDTAVYYCATLKTMYWGQGTQVTVSS

SEQ ID NO: 427 - protein, 118 aa, Artificial Sequence
  Chemically Synthesized
QVQLQESGGGLVQAGGSLRLSCAASGTISAFTVMGWYRQAPGKERELVATINGGTTTNYADSVKGRFTISRDNAKNTVYLQMNSLKPEDTAVYYCAAVDYPHVGFQYWGQGTQVTVSS

SEQ ID NO: 428 - protein, 119 aa, Artificial Sequence
  Chemically Synthesized
QVQLQESGGGLVQAGGSLRLSCAASGTISTDAGPMGWYRQAPGKERELVATIAAGGTTYYADSVKGRFTISRDNAKNTVYLQMNSLKPEDTAVYYCAARGTHWPAYPYWGQGTQVTVSS

SEQ ID NO: 429 - protein, 118 aa, Artificial Sequence
  Chemically Synthesized
QVQLQESGGGLVQAGGSLRLSCAASGNISVPDGMGWYRQAPGKERELVATITHGTSTNYADSVKGRFTISRDNAKNTVYLQMNSLKPEDTAVYYCAVPDRDTHDLDYWGQGTQVTVSS

SEQ ID NO: 430 - protein, 118 aa, Artificial Sequence
  Chemically Synthesized
QVQLQESGGGLVQAGGSLRLSCAASGNIFKTWYMGWYRQAPGKEREFVAGISGGSTTNYADSVKGRFTISRDNAKNTVYLQMNSLKPEDTAVYYCAVEPQYTTYHAYWGQGTQVTVSS

SEQ ID NO: 431 - protein, 121 aa, Artificial Sequence
  Chemically Synthesized
QVQLQESGGGLVQAGGSLRLSCAASGNIFGSDDMGWYRQAPGKERELVATIDYGSTTYYADSVKGRFTISRDNAKNTVYLQMNSLKPEDTAVYYCAVGYWYNPSTRTVIYWGQGTQVTVSS

SEQ ID NO: 432 - protein, 126 aa, Artificial Sequence
  Chemically Synthesized
QVQLQESGGGLVQAGGSLRLSCAASGYISYKKHMGWYRQAPGKEREFVASISLGGTTNYADSVKGRFTISRDNAKNTVYLQMNSLKPEDTAVYYCAVGRPLYVSDYDLTIRHLDYWGQGTQVTVSS

SEQ ID NO: 433 - protein, 121 aa, Artificial Sequence
  Chemically Synthesized
QVQLQESGGGLVQAGGSLRLSCAASGSISLGSMGWYRQAPGKEREFVAGIAPGGNTNYADSVKGRFTISRDNAKNTVYLQMNSLKPEDTAVYYCAAGTYRGTQFQGYHAYWGQGTQVTVSS

SEQ ID NO: 434 - protein, 126 aa, Artificial Sequence
  Chemically Synthesized
QVQLQESGGGLVQAGGSLRLSCAASGYISATYSMGWYRQAPGKERELVASIASGANTNYADSVKGRFTISRDNAKNTVYLQMNSLKPEDTAVYYCAAGEHLSGGWKPDDPYDFDYWGQGTQVTVSS

SEQ ID NO: 435 - protein, 118 aa, Artificial Sequence
  Chemically Synthesized
QVQLQESGGGLVQAGGSLRLSCAASGNISSYPYMGWYRQAPGKERELVASITYGSITYYADSVKGRFTISRDNAKNTVYLQMNSLKPEDTAVYYCAVHGIDYTGLYYWGQGTQVTVSS

SEQ ID NO: 436 - protein, 121 aa, Artificial Sequence
  Chemically Synthesized
QVQLQESGGGLVQAGGSLRLSCAASGSISVGYYMGWYRQAPGKERELVAAIGYGATTYYADSVKGRFTISRDNAKNTVYLQMNSLKPEDTAVYYCAVESRYPQVSEPSLYWGQGTQVTVSS

SEQ ID NO: 437 - protein, 118 aa, Artificial Sequence
  Chemically Synthesized
QVQLQESGGGLVQAGGSLRLSCAASGTIFDTVYMGWYRQAPGKEREFVATIDPGSNTYYADSVKGRFTISRDNAKNTVYLQMNSLKPEDTAVYYCAVHGRYNDTHSYWGQGTQVTVSS

SEQ ID NO: 438 - protein, 122 aa, Artificial Sequence
  Chemically Synthesized
QVQLQESGGGLVQAGGSLRLSCAASGTIFDRYLMGWYRQAPGKEREFVAGITAGGNTNYADSVKGRFTISRDNAKNTVYLQMNSLKPEDTAVYYCAVRDGSGEADGSRLEYWGQGTQVTVSS

SEQ ID NO: 439 - protein, 117 aa, Artificial Sequence
  Chemically Synthesized
QVQLQESGGGLVQAGGSLRLSCAASGTIFVVYMGWYRQAPGKERELVAAITDGTITNYADSVKGRFTISRDNAKNTVYLQMNSLKPEDTAVYYCAVYYPIDEQHGYWGQGTQVTVSS

SEQ ID NO: 440 - protein, 121 aa, Artificial Sequence
  Chemically Synthesized
QVQLQESGGGLVQAGGSLRLSCAASGTISGNYMGWYRQAPGKEREFVASISYGGITYYADSVKGRFTISRDNAKNTVYLQMNSLKPEDTAVYYCAAYRPTRLDDTPYFYYWGQGTQVTVSS

SEQ ID NO: 441 - protein, 118 aa, Artificial Sequence
  Chemically Synthesized
QVQLQESGGGLVQAGGSLRLSCAASGNISTYGPMGWYRQAPGKERELVAGIAYGTTTNYADSVKGRFTISRDNAKNTVYLQMNSLKPEDTAVYYCAAITGGLRGHEYWGQGTQVTVSS

SEQ ID NO: 442 - protein, 122 aa, Artificial Sequence
  Chemically Synthesized
QVQLQESGGGLVQAGGSLRLSCAASGTIFYSYRMGWYRQAPGKERELVAAIDYGGTTNYADSVKGRFTISRDNAKNTVYLQMNSLKPEDTAVYYCALGPLFIIQRRAGLRYWGQGTQVTVSS

SEQ ID NO: 443 - protein, 121 aa, Artificial Sequence
  Chemically Synthesized
QVQLQESGGGLVQAGGSLRLSCAASGTIFFLYYMGWYRQAPGKERELVATINYGSTTNYADSVKGRFTISRDNAKNTVYLQMNSLKPEDTAVYYCAAQYRLGYLGEYSLYWGQGTQVTVSS

SEQ ID NO: 444 - protein, 118 aa, Artificial Sequence
  Chemically Synthesized
QVQLQESGGGLVQAGGSLRLSCAASGTISRYYYMGWYRQAPGKERELVAAIDRGANTYYADSVKGRFTISRDNAKNTVYLQMNSLKPEDTAVYYCAVDYGVYPYHSYWGQGTQVTVSS

SEQ ID NO: 445 - protein, 122 aa, Artificial Sequence
  Chemically Synthesized
QVQLQESGGGLVQAGGSLRLSCAASGTIFYRTIMGWYRQAPGKERELVATIGDGANTYYADSVKGRFTISRDNAKNTVYLQMNSLKPEDTAVYYCAVQDIQYVTRFDPHGYWGQGTQVTVSS

SEQ ID NO: 446 - protein, 118 aa, Artificial Sequence
  Chemically Synthesized
QVQLQESGGGLVQAGGSLRLSCAASGYISGYTQMGWYRQAPGKERELVATISYGGTTYYADSVKGRFTISRDNAKNTVYLQMNSLKPEDTAVYYCAASDYYGPSYVYWGQGTQVTVSS

SEQ ID NO: 447 - protein, 118 aa, Artificial Sequence
  Chemically Synthesized
QVQLQESGGGLVQAGGSLRLSCAASGNIFPIFAMGWYRQAPGKEREFVASIGHGGTTNYADSVKGRFTISRDNAKNTVYLQMNSLKPEDTAVYYCAVSWYRGRQLAYWGQGTQVTVSS

SEQ ID NO: 448 - protein, 122 aa, Artificial Sequence
  Chemically Synthesized
QVQLQESGGGLVQAGGSLRLSCAASGNISARVSMGWYRQAPGKERELVAAIGYGASTNYADSVKGRFTISRDNAKNTVYLQMNSLKPEDTAVYYCAVLYYGEDGYDAAYPYWGQGTQVTVSS

SEQ ID NO: 449 - protein, 122 aa, Artificial Sequence
  Chemically Synthesized
QVQLQESGGGLVQAGGSLRLSCAASGNISGSTSMGWYRQAPGKERELVASIAYGASTYYADSVKGRFTISRDNAKNTVYLQMNSLKPEDTAVYYCAAIADDDAKPDSWYWYWGQGTQVTVSS

SEQ ID NO: 450 - protein, 109 aa, Artificial Sequence
  Chemically Synthesized
QVQLQESGGGLVQAGGSLRLSCAASGNIFADYSMGWYRQAPGKERELVAGIAAGTSTNYADSVKGRFTISRDNAKNTVYLQMNSLKPEDTAVYYCAAYWGQGTQVTVSS

SEQ ID NO: 451 - protein, 126 aa, Artificial Sequence
  Chemically Synthesized
QVQLQESGGGLVQAGGSLRLSCAASGYISYTGRMGWYRQAPGKERELVAGIAAGSITYYADSVKGRFTISRDNAKNTVYLQMNSLKPEDTAVYYCAVAKQGVRRYDQDVYDYHYYWGQGTQVTVSS

SEQ ID NO: 452 - protein, 121 aa, Artificial Sequence
  Chemically Synthesized
QVQLQESGGGLVQAGGSLRLSCAASGYIFKQDYMGWYRQAPGKEREFLPVLVLVVVPYADSVKGRFTISRDNAKNTVYLQMNSLKPEDTAVYYCAAQINAIQTDGPSLYYWGQGTQVTVSS

SEQ ID NO: 453 - protein, 114 aa, Artificial Sequence
  Chemically Synthesized
QVQLQESGGGLVQAGGSLRLSCAASGYISQSSTMGWYRQAPGKEREFVARWYYLYADSVKGRFTISRDNAKNTVYLQMNSLKPEDTAVYYCAAIAVVADLLVYWGQGTQVTVSS

SEQ ID NO: 454 - protein, 114 aa, Artificial Sequence
  Chemically Synthesized
QVQLQESGGGLVQAGGSLRLSCAASGTIFAAVFMGWYRQAPGKEREFVASISYGGNTNYADSVKGRFTISRDNAKNTVYLQMNSLKPEDTAVYYCAGRRNPFYWGQGTQVTVSS

SEQ ID NO: 455 - protein, 119 aa, Artificial Sequence
  Chemically Synthesized
QVQLQESGGGLVQAGGSLRLSCAASGNISWRDFMGWYRQAPGKERELVASISVGNYYQYADSVKGRFTISRDNAKNTVYLQMNSLKPEDTAVYYCAVLSLLTRTLCMYWGQGTQVTVSS

SEQ ID NO: 456 - protein, 113 aa, Artificial Sequence
  Chemically Synthesized
QVQLQESGGGLVQAGGSLRLSCAASGYISRSGMGWYRQAPGKERELVASINSVLLPYADSVKGRFTISRDNAKNTVYLQMNSLKPEDTAVYYCAATTATHAYWGQGTQVTVSS

SEQ ID NO: 457 - protein, 122 aa, Artificial Sequence
  Chemically Synthesized
QVQLQESGGGLVQAGGSLRLSCAASGTIFRLRYMGWYRQAPGKERELVAAISGGGTTNYADSVKGRFTISRDNAKNTVYLQMNSLKPEDTAVYYCAVGWRSGEPYLLFYYYWGQGTQVTVSS

SEQ ID NO: 458 - protein, 122 aa, Artificial Sequence
  Chemically Synthesized
QVQLQESGGGLVQAGGSLRLSCAASGTISWYAYMGWYRQAPGKEREFVATIGTGTSTYYADSVKGRFTISRDNAKNTVYLQMNSLKPEDTAVYYCAVIYGYRDWDSTVFDYWGQGTQVTVSS

SEQ ID NO: 459 - protein, 118 aa, Artificial Sequence
  Chemically Synthesized
QVQLQESGGGLVQAGGSLRLSCAASGNISAVFTMGWYRQAPGKERELVAGIDHGGNTNYADSVKGRFTISRDNAKNTVYLQMNSLKPEDTAVYYCAVQYQVGATHVYWGQGTQVTVSS

SEQ ID NO: 460 - protein, 111 aa, Artificial Sequence
  Chemically Synthesized
QVQLQESGGGLVQAGGSLRLSCAASGNISNTQYMGWYRQAPGKEREFVASINDGTTTNYADSVKGRFTISRDNAKNTVYLQMNSLKPEDTAVYYCAVGRYWGQGTQVTVSS

SEQ ID NO: 461 - protein, 122 aa, Artificial Sequence
  Chemically Synthesized
QVQLQESGGGLVQAGGSLRLSCAASGNISLVYDMGWYRQAPGKERELVAAITGGASTYYADSVKGRFTISRDNAKNTVYLQMNSLKPEDTAVYYCAARYDNHRYTTYCLYYWGQGTQVTVSS

SEQ ID NO: 462 - protein, 122 aa, Artificial Sequence
  Chemically Synthesized
QVQLQESGGGLVQAGGSLRLSCAASGNIFGAAVMGWYRQAPGKEREFVAGIDNGATTYYADSVKGRFTISRDNAKNTVYLQMNSLKPEDTAVYYCAADNSATSYGYPTHVYWGQGTQVTVSS

SEQ ID NO: 463 - protein, 122 aa, Artificial Sequence
  Chemically Synthesized
QVQLQESGGGLVQAGGSLRLSCAASGSISDFRDMGWYRQAPGKERELVASIGTGTNTYYADSVKGRFTISRDNAKNTVYLQMNSLKPEDTAVYYCAAWRDTPLASTADYYYWGQGTQVTVSS

SEQ ID NO: 464 - protein, 122 aa, Artificial Sequence
  Chemically Synthesized
QVQLQESGGGLVQAGGSLRLSCAASGYISVWPGMGWYRQAPGKERELVASITYGTTTNYADSVKGRFTISRDNAKNTVYLQMNSLKPEDTAVYYCAASYATDLYYRQPFDYWGQGTQVTVSS

SEQ ID NO: 465 - protein, 125 aa, Artificial Sequence
  Chemically Synthesized
QVQLQESGGGLVQAGGSLRLSCAASGTIFGPRYMGWYRQAPGKERELVAGINDGTTTYYADSVKGRFTISRDNAKNTVYLQMNSLKPEDTAVYYCAAGVSAPSDLSWFSDLIFYWGQGTQVTVSS

SEQ ID NO: 466 - protein, 120 aa, Artificial Sequence
  Chemically Synthesized
QVQLQESGGGLVQAGGSLRLSCAASGTISSDRYMGWYRQAPGKERELVAAISLGGTTYYADSVKGRFTISRDNAKNTVYLQMNSLKPEDTAVYYCAVVGPYDEGEVHRYWGQGTQVTVSS

SEQ ID NO: 467 - protein, 118 aa, Artificial Sequence
  Chemically Synthesized
QVQLQESGGGLVQAGGSLRLSCAASGNISPLYSMGWYRQAPGKERELVATIAYGASTNYADSVKGRFTISRDNAKNTVYLQMNSLKPEDTAVYYCAVWQLEVHWYPYWGQGTQVTVSS

SEQ ID NO: 468 - protein, 121 aa, Artificial Sequence
  Chemically Synthesized
QVQLQESGGGLVQAGGSLRLSCAASGYISELRPMGWYRQAPGKEREFVASISTGASTYADSVKGRFTISRDNAKNTVYLQMNSLKPEDTAVYYCAATRPRDDYGPFYLYYWGQGTQVTVSS

SEQ ID NO: 469 - protein, 118 aa, Artificial Sequence
  Chemically Synthesized
QVQLQESGGGLVQAGGSLRLSCAASGNIFGDYTMGWYRQAPGKEREFVASIGTGTITNYADSVKGRFTISRDNAKNTVYLQMNSLKPEDTAVYYCAVPSYDFYDHYYWGQGTQVTVSS

SEQ ID NO: 470 - protein, 117 aa, Artificial Sequence
  Chemically Synthesized
QVQLQESGGGLVQAGGSLRLSCAASGNIFSEQVMGWYRQAPGKERELVAAIALGANTNYADSVKGRFTISRDNAKNTVYLQMNSLKPEDTAVYYCAALRWLLPASYWGQGTQVTVSS

SEQ ID NO: 471 - protein, 113 aa, Artificial Sequence
  Chemically Synthesized
QVQLQESGGGLVQAGGSLRLSCAASGYISTGSSMGWYRQAPGKEREFDGTNTNYADSVKGRFTISRDNAKNTVYLQMNSLKPEDTAVYYCAVRYSYSEGHEYWGQGTQVTVSS

SEQ ID NO: 472 - protein, 123 aa, Artificial Sequence
  Chemically Synthesized
QVQLQESGGGLVQAGGSLRLSCAASGYISLNLRMGWYRQAPGKERELVATISEGGSTNYADSVKGRFTISRDNAKNTVYLQMNSLKPEDTAVYYCAADDQSTNTGWSYPSCYWGQGTQVTVSS

SEQ ID NO: 473 - protein, 125 aa, Artificial Sequence
  Chemically Synthesized
QVQLQESGGGLVQAGGSLRLSCAASGSIFTLVMGWYRQAPGKERELVATIGSGGNTNYADSVKGRFTISRDNAKNTVYLQMNSLKPEDTAVYYCAVWGEVYLFDTYHYYGGYRYWGQGTQVTVSS

SEQ ID NO: 474 - protein, 118 aa, Artificial Sequence
  Chemically Synthesized
QVQLQESGGGLVQAGGSLRLSCAASGSIFVYWTMGWYRQAPGKEREFVATINRGTTTYYADSVKGRFTISRDNAKNTVYLQMNSLKPEDTAVYYCAAVYYSVGTHPYWGQGTQVTVSS

SEQ ID NO: 475 - protein, 125 aa, Artificial Sequence
  Chemically Synthesized
QVQLQESGGGLVQAGGSLRLSCAASGNISLYVSMGWYRQAPGKERELVAAISYGGNTYYADSVKGRFTISRDNAKNTVYLQMNSLKPEDTAVYYCAAGPVVVYTSFTLSLLLMYWGQGTQVTVSS

SEQ ID NO: 476 - protein, 122 aa, Artificial Sequence
  Chemically Synthesized
QVQLQESGGGLVQAGGSLRLSCAASGYISGAESMGWYRQAPGKEREFVAAISRGSNTYYADSVKGRFTISRDNAKNTVYLQMNSLKPEDTAVYYCAVVYYIEPYGTDRYAYWGQGTQVTVSS

SEQ ID NO: 477 - protein, 125 aa, Artificial Sequence
  Chemically Synthesized
QVQLQESGGGLVQAGGSLRLSCAASGNISRGGPMGWYRQAPGKEREFVASIGKGGSTYYADSVKGRFTISRDNAKNTVYLQMNSLKPEDTAVYYCAAIYYGNYENTTLLSSVLYWGQGTQVTVSS

SEQ ID NO: 478 - protein, 117 aa, Artificial Sequence
  Chemically Synthesized
QVQLQESGGGLVQAGGSLRLSCAASGSISTLRMGWYRQAPGKEREFVASIGYGGTTNYADSVKGRFTISRDNAKNTVYLQMNSLKPEDTAVYYCAVDNEDFGFHHYWGQGTQVTVSS

SEQ ID NO: 479 - protein, 114 aa, Artificial Sequence
  Chemically Synthesized
QVQLQESGGGLVQAGGSLRLSCAASGSILVLMGWYRQAPGKERELVAAIAEGTNTNYADSVKGRFTISRDNAKNTVYLQMNSLKPEDTAVYYCAASSDGHLAYWGQGTQVTVSS

SEQ ID NO: 480 - protein, 118 aa, Artificial Sequence
  Chemically Synthesized
QVQLQESGGGLVQAGGSLRLSCAASGSIFAYYMGWYRQAPGKERELVAAIATGGSTYYADSVKGRFTISRDNAKNTVYLQMNSLKPEDTAVYYCAANKINYRYGLYYWGQGTQVTVSS

SEQ ID NO: 481 - protein, 126 aa, Artificial Sequence
  Chemically Synthesized
QVQLQESGGGLVQAGGSLRLSCAASGYIFRYVRMGWYRQAPGKEREFVATISRGGNTYYADSVKGRFTISRDNAKNTVYLQMNSLKPEDTAVYYCAAGAARYSYYWSRYTDTFVYWGQGTQVTVSS

SEQ ID NO: 482 - protein, 118 aa, Artificial Sequence
  Chemically Synthesized
QVQLQESGGGLVQAGGSLRLSCAASGNISNGVVMGWYRQAPGKEREFVAAISYGGNTNYADSVKGRFTISRDNAKNTVYLQMNSLKPEDTAVYYCAVADPTEYGYLYWGQGTQVTVSS

SEQ ID NO: 483 - protein, 126 aa, Artificial Sequence
  Chemically Synthesized
QVQLQESGGGLVQAGGSLRLSCAASGSISEDFIMGWYRQAPGKERELVAAIGSGGSTYYADSVKGRFTISRDNAKNTVYLQMNSLKPEDTAVYYCAVVDYGYRDSGATFTQDHHYWGQGTQVTVSS

SEQ ID NO: 484 - protein, 118 aa, Artificial Sequence
  Chemically Synthesized
QVQLQESGGGLVQAGGSLRLSCAASGTISLPYWMGWYRQAPGKEREFVAGIGLGGTTNYADSVKGRFTISRDNAKNTVYLQMNSLKPEDTAVYYCAVYGQGPDSFGYWGQGTQVTVSS

SEQ ID NO: 485 - protein, 122 aa, Artificial Sequence
  Chemically Synthesized
QVQLQESGGGLVQAGGSLRLSCAASGTISYSQVMGWYRQAPGKERELVAAITTGTNTYYADSVKGRFTISRDNAKNTVYLQMNSLKPEDTAVYYCAARIWFGDDVSPRFAYWGQGTQVTVSS

SEQ ID NO: 486 - protein, 121 aa, Artificial Sequence
  Chemically Synthesized
QVQLQESGGGLVQAGGSLRLSCAASGTIFYDGGMGWYRQAPGKEREFVAAIAAGGITYADSVKGRFTISRDNAKNTVYLQMNSLKPEDTAVYYCAAYSFLYDTPPIYLDYWGQGTQVTVSS

SEQ ID NO: 487 - protein, 122 aa, Artificial Sequence
  Chemically Synthesized
QVQLQESGGGLVQAGGSLRLSCAASGSIFVGSYMGWYRQAPGKERELVATIAYGGNTNYADSVKGRFTISRDNAKNTVYLQMNSLKPEDTAVYYCAAEDTPGESPLFDHAYWGQGTQVTVSS

SEQ ID NO: 488 - protein, 118 aa, Artificial Sequence
  Chemically Synthesized
QVQLQESGGGLVQAGGSLRLSCAASGSISESYNMGWYRQAPGKERELVAGIAYGSNTYYADSVKGRFTISRDNAKNTVYLQMNSLKPEDTAVYYCAVYSYGVGAHPYWGQGTQVTVSS

SEQ ID NO: 489 - protein, 126 aa, Artificial Sequence
  Chemically Synthesized
QVQLQESGGGLVQAGGSLRLSCAASGTISRKTRMGWYRQAPGKERELVAAISIGGSTYYADSVKGRFTISRDNAKNTVYLQMNSLKPEDTAVYYCAIRPRYWTQDSWYTRAYHHYWGQGTQVTVSS

SEQ ID NO: 490 - protein, 117 aa, Artificial Sequence
  Chemically Synthesized
QVQLQESGGGLVQAGGSLRLSCAASGYISVLGNMGWYRQAPGKEREFVAGISVGSITNYADSVKGRFTISRDNAKNTVYLQMNSLKPEDTAVYYCAVNYEYSDTLYWGQGTQVTVSS

SEQ ID NO: 491 - protein, 118 aa, Artificial Sequence
  Chemically Synthesized
QVQLQESGGGLVQAGGSLRLSCAASGSISPARFMGWYRQAPGKEREFVATISSGANTYYADSVKGRFTISRDNAKNTVYLQMNSLKPEDTAVYYCAAHPLDLPSHAYWGQGTQVTVSS

SEQ ID NO: 492 - protein, 126 aa, Artificial Sequence
  Chemically Synthesized
QVQLQESGGGLVQAGGSLRLSCAASGSISRAGLMGWYRQAPGKEREFVAGITLGATTNYADSVKGRFTISRDNAKNTVYLQMNSLKPEDTAVYYCAVYRPYKGQGHSQVIIRLYYWGQGTQVTVSS

SEQ ID NO: 493 - protein, 118 aa, Artificial Sequence
  Chemically Synthesized
QVQLQESGGGLVQAGGSLRLSCAASGYIFSFQYMGWYRQAPGKERELVAAITRGGNTYYADSVKGRFTISRDNAKNTVYLQMNSLKPEDTAVYYCAAIRRGGPKLGYWGQGTQVTVSS

SEQ ID NO: 494 - protein, 118 aa, Artificial Sequence
  Chemically Synthesized
QVQLQESGGGLVQAGGSLRLSCAASGYIFSVHAMGWYRQAPGKERELVASITVGANTYYADSVKGRFTISRDNAKNTVYLQMNSLKPEDTAVYYCAARRQIIVDLWYWGQGTQVTVSS

SEQ ID NO: 495 - protein, 117 aa, Artificial Sequence
  Chemically Synthesized
QVQLQESGGGLVQAGGSLRLSCAASGTIFTVPSMGWYRQAPGKERELVATIGLGATTNYADSVKGRFTISRDNAKNTVYLQMNSLKPEDTAVYYCAANSKYQSYDYWGQGTQVTVSS

SEQ ID NO: 496 - protein, 118 aa, Artificial Sequence
  Chemically Synthesized
QVQLQESGGGLVQAGGSLRLSCAASGTIFVSLYMGWYRQAPGKEREFVATIASGSNTNYADSVKGRFTISRDNAKNTVYLQMNSLKPEDTAVYYCAAWSTTSGGHLYWGQGTQVTVSS

SEQ ID NO: 497 - protein, 122 aa, Artificial Sequence
  Chemically Synthesized
QVQLQESGGGLVQAGGSLRLSCAASGNISYYNDMGWYRQAPGKERELVASISGGTSTYYADSVKGRFTISRDNAKNTVYLQMNSLKPEDTAVYYCAAPREGGRGGRRALSYWGQGTQVTVSS

SEQ ID NO: 498 - protein, 122 aa, Artificial Sequence
  Chemically Synthesized
QVQLQESGGGLVQAGGSLRLSCAASGYISDGYKMGWYRQAPGKEREFVATIGQGTITYYADSVKGRFTISRDNAKNTVYLQMNSLKPEDTAVYYCAADLFNYPYHHLVLLYWGQGTQVTVSS

SEQ ID NO: 499 - protein, 122 aa, Artificial Sequence
  Chemically Synthesized
QVQLQESGGGLVQAGGSLRLSCAASGYIFYDAIMGWYRQAPGKEREFVATISTGTNTYYADSVKGRFTISRDNAKNTVYLQMNSLKPEDTAVYYCAAINGDYVLPYAGFVYWGQGTQVTVSS

SEQ ID NO: 500 - protein, 126 aa, Artificial Sequence
  Chemically Synthesized
QVQLQESGGGLVQAGGSLRLSCAASGTISLQTRMGWYRQAPGKERELVAAINGGGNTYYADSVKGRFTISRDNAKNTVYLQMNSLKPEDTAVYYCAVYTQSVDYAYWQYPYNHYYWGQGTQVTVSS

SEQ ID NO: 501 - protein, 122 aa, Artificial Sequence
  Chemically Synthesized
QVQLQESGGGLVQAGGSLRLSCAASGTIFDDTVMGWYRQAPGKEREFVASIGPGGSTNYADSVKGRFTISRDNAKNTVYLQMNSLKPEDTAVYYCAVRTAGSYTLPYDHYYWGQGTQVTVSS

SEQ ID NO: 502 - protein, 126 aa, Artificial Sequence
  Chemically Synthesized
QVQLQESGGGLVQAGGSLRLSCAASGSISVDYIMGWYRQAPGKERELVVAIDVGTTTYYADSVKGRFTISRDNAKNTVYLQMNSLKPEDTAVYYCAVPPLDTVPDIGDSVDVYYYWGQGTQVTVSS

SEQ ID NO: 503 - protein, 116 aa, Artificial Sequence
  Chemically Synthesized
QVQLQESGGGLVQAGGSLRLSCAASGTIFFHYMGWYRQAPGKEREFVATISDGGITNYADSVKGRFTISRDNAKNTVYLQMNSLKPEDTAVYYCATRKLVTVTIYWGQGTQVTVSS

SEQ ID NO: 504 - protein, 122 aa, Artificial Sequence
  Chemically Synthesized
QVQLQESGGGLVQAGGSLRLSCAASGTIFYTPDMGWYRQAPGKEREFVATISDGATTYYADSVKGRFTISRDNAKNTVYLQMNSLKPEDTAVYYCAVDHDFADVERDVLRYWGQGTQVTVSS

SEQ ID NO: 505 - protein, 118 aa, Artificial Sequence
  Chemically Synthesized
QVQLQESGGGLVQAGGSLRLSCAASGTISWPWHMGWYRQAPGKEREFVAGIAIGSNTNYADSVKGRFTISRDNAKNTVYLQMNSLKPEDTAVYYCAVGLHGYPKYDYWGQGTQVTVSS

SEQ ID NO: 506 - protein, 122 aa, Artificial Sequence
  Chemically Synthesized
QVQLQESGGGLVQAGGSLRLSCAASGNIFDTWRMGWYRQAPGKEREFVATIGPGATTYYADSVKGRFTISRDNAKNTVYLQMNSLKPEDTAVYYCAADQQGDRYPTYHYYYWGQGTQVTVSS

SEQ ID NO: 507 - protein, 126 aa, Artificial Sequence
  Chemically Synthesized
QVQLQESGGGLVQAGGSLRLSCAASGNISAYARMGWYRQAPGKEREFVAGISQGATTNYADSVKGRFTISRDNAKNTVYLQMNSLKPEDTAVYYCAVNLSARYTVWASPWRYHVYWGQGTQVTVSS

SEQ ID NO: 508 - protein, 118 aa, Artificial Sequence
  Chemically Synthesized
QVQLQESGGGLVQAGGSLRLSCAASGSIFGLAHMGWYRQAPGKERELVAGITYGGTTYYADSVKGRFTISRDNAKNTVYLQMNSLKPEDTAVYYCAVVYKSTHGHVYWGQGTQVTVSS

SEQ ID NO: 509 - protein, 110 aa, Artificial Sequence
  Chemically Synthesized
QVQLQESGGGLVQAGGSLRLSCAASGYISSDYSMGWYRQAPGKEREFVATINWGTTTNYADSVKGRFTISRDNAKNTVYLQMNSLKPEDTAVYYCAVIYWGQGTQVTVSS

SEQ ID NO: 510 - protein, 118 aa, Artificial Sequence
  Chemically Synthesized
QVQLQESGGGLVQAGGSLRLSCAASGTISADDQMGWYRQAPGKEREFVATIAPGANTYYADSVKGRFTISRDNAKNTVYLQMNSLKPEDTAVYYCAAYAYDGGWHSYWGQGTQVTVSS

SEQ ID NO: 511 - protein, 107 aa, Artificial Sequence
  Chemically Synthesized
QVQLQESGGGLVQAGGSLRLSCAASGNIFEYVNMGWYRQAPGKERELYADSVKGRFTISRDNAKNTVYLQMNSLKPEDTAVYYCAVNDWYDRSYDYWGQGTQVTVSS

SEQ ID NO: 512 - protein, 122 aa, Artificial Sequence
  Chemically Synthesized
QVQLQESGGGLVQAGGSLRLSCAASGYIFYDDDMGWYRQAPGKEREFVATIDSGGNTNYADSVKGRFTISRDNAKNTVYLQMNSLKPEDTAVYYCAAYAYDRYSHWNYLPYWGQGTQVTVSS

SEQ ID NO: 513 - protein, 122 aa, Artificial Sequence
  Chemically Synthesized
QVQLQESGGGLVQAGGSLRLSCAASGSIFLFTGMGWYRQAPGKEREFVATIADGSTTNYADSVKGRFTISRDNAKNTVYLQMNSLKPEDTAVYYCAADRKYRTYDVTLHDYWGQGTQVTVSS

SEQ ID NO: 514 - protein, 118 aa, Artificial Sequence
  Chemically Synthesized
QVQLQESGGGLVQAGGSLRLSCAASGNISPTIAMGWYRQAPGKERELVAGIDTGAITYYADSVKGRFTISRDNAKNTVYLQMNSLKPEDTAVYYCAVGYDNSRAHPYWGQGTQVTVSS

SEQ ID NO: 515 - protein, 126 aa, Artificial Sequence
  Chemically Synthesized
QVQLQESGGGLVQAGGSLRLSCAASGNISYIIFMGWYRQAPGKERELVATIAAGGTTNYADSVKGRFTISRDNAKNTVYLQMNSLKPEDTAVYYCAVKALYIPTYHGLDIRYHGYWGQGTQVTVSS

SEQ ID NO: 516 - protein, 122 aa, Artificial Sequence
  Chemically Synthesized
QVQLQESGGGLVQAGGSLRLSCAASGYISFIRDMGWYRQAPGKEREFVASIAIGTTTNYADSVKGRFTISRDNAKNTVYLQMNSLKPEDTAVYYCAVVGARTYTTGLQHGYWGQGTQVTVSS

SEQ ID NO: 517 - protein, 118 aa, Artificial Sequence
  Chemically Synthesized
QVQLQESGGGLVQAGGSLRLSCAASGSISAPVGMGWYRQAPGKERELVATITYGSTTNYADSVKGRFTISRDNAKNTVYLQMNSLKPEDTAVYYCAAYDIYYTRHHYWGQGTQVTVSS

SEQ ID NO: 518 - protein, 118 aa, Artificial Sequence
  Chemically Synthesized
QVQLQESGGGLVQAGGSLRLSCAASGTIFIQYPMGWYRQAPGKEREFVAGIGLGGSTYYADSVKGRFTISRDNAKNTVYLQMNSLKPEDTAVYYCAVLRYYLTSFAYWGQGTQVTVSS

SEQ ID NO: 519 - protein, 108 aa, Artificial Sequence
  Chemically Synthesized
QVQLQESGGGLVQAGGSLRLSCAASGSISLSLTMGWYRQAPGKEREFVASITSVLVPYADSVKGRFTISRDNAKNTVYLQMNSLKPEDTAVYYCAAYWGQGTQVTVSS

SEQ ID NO: 520 - protein, 122 aa, Artificial Sequence
  Chemically Synthesized
QVQLQESGGGLVQAGGSLRLSCAASGSISADILMGWYRQAPGKERELVATIGVGSTTYYADSVKGRFTISRDNAKNTVYLQMNSLKPEDTAVYYCAAYQVGDYTKKDHYDYWGQGTQVTVSS

SEQ ID NO: 521 - protein, 118 aa, Artificial Sequence
  Chemically Synthesized
QVQLQESGGGLVQAGGSLRLSCAASGYIFPYIVMGWYRQAPGKEREFVAGIDYGANTNYADSVKGRFTISRDNAKNTVYLQMNSLKPEDTAVYYCAVINPLTNDYSYWGQGTQVTVSS

SEQ ID NO: 522 - protein, 122 aa, Artificial Sequence
  Chemically Synthesized
QVQLQESGGGLVQAGGSLRLSCAASGTIFDDPYMGWYRQAPGKERELVATITAGTSTNYADSVKGRFTISRDNAKNTVYLQMNSLKPEDTAVYYCAVTAGGTYPAYRGHLYWGQGTQVTVSS

SEQ ID NO: 523 - protein, 119 aa, Artificial Sequence
  Chemically Synthesized
QVQLQESGGGLVQAGGSLRLSCAASGTISDDLSMGWYRQAPGKERELVAAISEGASTYYADSVKGRFTISRDNAKNTVYLQMNSLKPEDTAVYYCAAMLLTTRLGLMYWGQGTQVTVSS

SEQ ID NO: 524 - protein, 121 aa, Artificial Sequence
  Chemically Synthesized
QVQLQESGGGLVQAGGSLRLSCAASGYIFSARWMGWYRQAPGKEREFVAAIDYGGNTYYADSVKGRFTISRDNAKNTVYLQMNSLKPEDTAVYYCALVLVLSGSCTVRMYWGQGTQVTVSS

SEQ ID NO: 525 - protein, 121 aa, Artificial Sequence
  Chemically Synthesized
QVQLQESGGGLVQAGGSLRLSCAASGTIFYFYIMGWYRQAPGKEREFVAGIATGSSTYYADSVKGRFTISRDNAKNTVYLQMNSLKPEDTAVYYCAARATVDESQGAQFYWGQGTQVTVSS

SEQ ID NO: 526 - protein, 111 aa, Artificial Sequence
  Chemically Synthesized
QVQLQESGGGLVQAGGSLRLSCAASGNIFYVDWMGWYRQAPGKERELVATISIGANTNYADSVKGRFTISRDNAKNTVYLQMNSLKPEDTAVYYCAADFYWGQGTQVTVSS

SEQ ID NO: 527 - protein, 109 aa, Artificial Sequence
  Chemically Synthesized
QVQLQESGGGLVQAGGSLRLSCAASGYISGREGMGWYRQAPGKERELVAAIDYGSNTYYADSVKGRFTISRDNAKNTVYLQMNSLKPEDTAVYYCAVYWGQGTQVTVSS

SEQ ID NO: 528 - protein, 118 aa, Artificial Sequence
  Chemically Synthesized
QVQLQESGGGLVQAGGSLRLSCAASGYISRDSSMGWYRQAPGKERELVATIAYGGITYYADSVKGRFTISRDNAKNTVYLQMNSLKPEDTAVYYCAVDDYIYDSFWYWGQGTQVTVSS

SEQ ID NO: 529 - protein, 116 aa, Artificial Sequence
  Chemically Synthesized
QVQLQESGGGLVQAGGSLRLSCAASGNISPYYRMGWYRQAPGKEREFVASIDLGANTYYADSVKGRFTISRDNAKNTVYLQMNSLKPEDTAVYYCAVQDTANFGYWGQGTQVTVSS

SEQ ID NO: 530 - protein, 125 aa, Artificial Sequence
  Chemically Synthesized
QVQLQESGGGLVQAGGSLRLSCAASGNISRPDYMGWYRQAPGKERELVAAISAGTTTYADSVKGRFTISRDNAKNTVYLQMNSLKPEDTAVYYCAVGEEGDYGDYDGGYNVHIYWGQGTQVTVSS

SEQ ID NO: 531 - protein, 126 aa, Artificial Sequence
  Chemically Synthesized
QVQLQESGGGLVQAGGSLRLSCAASGNISYWDSMGWYRQAPGKERELVAGIGYGTITNYADSVKGRFTISRDNAKNTVYLQMNSLKPEDTAVYYCAVHLDWERGAYYWDPARFHYWGQGTQVTVSS

SEQ ID NO: 532 - protein, 118 aa, Artificial Sequence
  Chemically Synthesized
QVQLQESGGGLVQAGGSLRLSCAASGTISGRYYMGWYRQAPGKERELVAGIGYGGITYYADSVKGRFTISRDNAKNTVYLQMNSLKPEDTAVYYCAAQYDVPSPHYYWGQGTQVTVSS

SEQ ID NO: 533 - protein, 121 aa, Artificial Sequence
  Chemically Synthesized
QVQLQESGGGLVQAGGSLRLSCAASGTIFTVRYMGWYRQAPGKEREFVAAIDFGTITNYADSVKGRFTISRDNAKNTVYLQMNSLKPEDTAVYYCAASLTLVLVTLTTIYWGQGTQVTVSS

SEQ ID NO: 534 - protein, 119 aa, Artificial Sequence
  Chemically Synthesized
QVQLQESGGGLVQAGGSLRLSCAASGYISDHWYMGWYRQAPGKEREFVAGIDTGGSTYYADSVKGRFTISRDNAKNTVYLQMNSLKPEDTAVYYCAVYSITPKGGHKYWGQGTQVTVSS

SEQ ID NO: 535 - protein, 110 aa, Artificial Sequence
  Chemically Synthesized
QVQLQESGGGLVQAGGSLRLSCAASGTIFHSPYMGWYRQAPGKEREFVASIANGSNTYYADSVKGRFTISRDNAKNTVYLQMNSLKPEDTAVYYCAALYWGQGTQVTVSS

SEQ ID NO: 536 - protein, 122 aa, Artificial Sequence
  Chemically Synthesized
QVQLQESGGGLVQAGGSLRLSCAASGSISLTTVMGWYRQAPGKERELVASINQGGNTNYADSVKGRFTISRDNAKNTVYLQMNSLKPEDTAVYYCAVYLWYATPYRHYHTYWGQGTQVTVSS

SEQ ID NO: 537 - protein, 122 aa, Artificial Sequence
  Chemically Synthesized
QVQLQESGGGLVQAGGSLRLSCAASGTIFQVAFMGWYRQAPGKEREFVAGINLGGTTNYADSVKGRFTISRDNAKNTVYLQMNSLKPEDTAVYYCAVPYTEAVYVRYRLYYWGQGTQVTVSS

SEQ ID NO: 538 - protein, 122 aa, Artificial Sequence
  Chemically Synthesized
QVQLQESGGGLVQAGGSLRLSCAASGNISRSRGMGWYRQAPGKEREFVASISYGSSTYYADSVKGRFTISRDNAKNTVYLQMNSLKPEDTAVYYCAAGYDDAVLYIIKYWYWGQGTQVTVSS

SEQ ID NO: 539 - protein, 118 aa, Artificial Sequence
  Chemically Synthesized
QVQLQESGGGLVQAGGSLRLSCAASGTIFGDYFMGWYRQAPGKERELVAGITVGTITYYADSVKGRFTISRDNAKNTVYLQMNSLKPEDTAVYYCAVALYLDGYYRYWGQGTQVTVSS

SEQ ID NO: 540 - protein, 117 aa, Artificial Sequence
  Chemically Synthesized
QVQLQESGGGLVQAGGSLRLSCAASGSISPWRGMGWYRQAPGKERELVASIDQGGNTYYADSVKGRFTISRDNAKNTVYLQMNSLKPEDTAVYYCAADAGPSLVFYWGQGTQVTVSS

SEQ ID NO: 541 - protein, 110 aa, Artificial Sequence
  Chemically Synthesized
QVQLQESGGGLVQAGGSLRLSCAASGSISQTYFMGWYRQAPGKERELVAAIANGSTTNYADSVKGRFTISRDNAKNTVYLQMNSLKPEDTAVYYCAHFYWGQGTQVTVSS

SEQ ID NO: 542 - protein, 118 aa, Artificial Sequence
  Chemically Synthesized
QVQLQESGGGLVQAGGSLRLSCAASGNIFTTDYMGWYRQAPGKERELVASITDGTSTYYADSVKGRFTISRDNAKNTVYLQMNSLKPEDTAVYYCAVGPGYYQSLVYWGQGTQVTVSS

SEQ ID NO: 543 - protein, 126 aa, Artificial Sequence
  Chemically Synthesized
QVQLQESGGGLVQAGGSLRLSCAASGSISGGKEMGWYRQAPGKEREFVAAITSGSSTNYADSVKGRFTISRDNAKNTVYLQMNSLKPEDTAVYYCAADAALPSIHISPPDPDYGYWGQGTQVTVSS

SEQ ID NO: 544 - protein, 118 aa, Artificial Sequence
  Chemically Synthesized
QVQLQESGGGLVQAGGSLRLSCAASGSISEPVYMGWYRQAPGKERELVASIDAGGSTYYADSVKGRFTISRDNAKNTVYLQMNSLKPEDTAVYYCAAATRKDGAYGYWGQGTQVTVSS

SEQ ID NO: 545 - protein, 119 aa, Artificial Sequence
  Chemically Synthesized
QVQLQESGGGLVQAGGSLRLSCAASGYISQHASMGWYRQAPGKERELVATISAGGSTNYADSVKGRFTISRDNAKNTVYLQMNSLKPEDTAVYYCAARRSYSYVALVYWGQGTQVTVSS

SEQ ID NO: 546 - protein, 122 aa, Artificial Sequence
  Chemically Synthesized
QVQLQESGGGLVQAGGSLRLSCAASGTISTFWYMGWYRQAPGKEREFVAAISLGSSTYYADSVKGRFTISRDNAKNTVYLQMNSLKPEDTAVYYCAARKWSIYGARGIHTYWGQGTQVTVSS

SEQ ID NO: 547 - protein, 122 aa, Artificial Sequence
  Chemically Synthesized
QVQLQESGGGLVQAGGSLRLSCAASGYISDTGYMGWYRQAPGKERELVATIDDGTSTNYADSVKGRFTISRDNAKNTVYLQMNSLKPEDTAVYYCAVDGIYNGAGTASLPYWGQGTQVTVSS

SEQ ID NO: 548 - protein, 118 aa, Artificial Sequence
  Chemically Synthesized
QVQLQESGGGLVQAGGSLRLSCAASGSISRYPDMGWYRQAPGKERELVAAITYGTNTNYADSVKGRFTISRDNAKNTVYLQMNSLKPEDTAVYYCAVYNDDAHYLRYWGQGTQVTVSS

SEQ ID NO: 549 - protein, 118 aa, Artificial Sequence
  Chemically Synthesized
QVQLQESGGGLVQAGGSLRLSCAASGNISIDYSMGWYRQAPGKEREFVAGINSGGTTNYADSVKGRFTISRDNAKNTVYLQMNSLKPEDTAVYYCAAPDYDYDSYYYWGQGTQVTVSS

SEQ ID NO: 550 - protein, 118 aa, Artificial Sequence
  Chemically Synthesized
QVQLQESGGGLVQAGGSLRLSCAASGYISQWDYMGWYRQAPGKEREFVATIAYGSNTNYADSVKGRFTISRDNAKNTVYLQMNSLKPEDTAVYYCAVGPYPYAAFPYWGQGTQVTVSS

SEQ ID NO: 551 - protein, 126 aa, Artificial Sequence
  Chemically Synthesized
QVQLQESGGGLVQAGGSLRLSCAASGNIFSYGTMGWYRQAPGKEREFVAGIDRGATTYYADSVKGRFTISRDNAKNTVYLQMNSLKPEDTAVYYCAAPRVPYSTRPYAHRIWLYYWGQGTQVTVSS

SEQ ID NO: 552 - protein, 117 aa, Artificial Sequence
  Chemically Synthesized
QVQLQESGGGLVQAGGSLRLSCAASGYIFYYSLMGWYRQAPGKERELVAGIGYGGTTNYADSVKGRFTISRDNAKNTVYLQMNSLKPEDTAVYYCAARWDSADYRYWGQGTQVTVSS

SEQ ID NO: 553 - protein, 120 aa, Artificial Sequence
  Chemically Synthesized
QVQLQESGGGLVQAGGSLRLSCAASGNIFGLTVMGWYRQAPGKERELVASFWCYYQYADSVKGRFTISRDNAKNTVYLQMNSLKPEDTAVYYCAVYHAYQRDTYYVHRYWGQGTQVTVSS

SEQ ID NO: 554 - protein, 118 aa, Artificial Sequence
  Chemically Synthesized
QVQLQESGGGLVQAGGSLRLSCAASGNIFLVFAMGWYRQAPGKEREFVASIAPGGTTNYADSVKGRFTISRDNAKNTVYLQMNSLKPEDTAVYYCAVGGHQAPGYYYWGQGTQVTVSS

SEQ ID NO: 555 - protein, 122 aa, Artificial Sequence
  Chemically Synthesized
QVQLQESGGGLVQAGGSLRLSCAASGNIFGDWTMGWYRQAPGKEREFVASIGRGGTTYYADSVKGRFTISRDNAKNTVYLQMNSLKPEDTAVYYCAVGYTDRQDGGGDHLYWGQGTQVTVSS

SEQ ID NO: 556 - protein, 121 aa, Artificial Sequence
  Chemically Synthesized
QVQLQESGGGLVQAGGSLRLSCAASGNISVSTDMGWYRQAPGKEREFVGRYYLRWYYLYADSVKGRFTISRDNAKNTVYLQMNSLKPEDTAVYYCAVRLLFTLLLLVTFYWGQGTQVTVSS

SEQ ID NO: 557 - protein, 118 aa, Artificial Sequence
  Chemically Synthesized
QVQLQESGGGLVQAGGSLRLSCAASGNIFAPKWMGWYRQAPGKERELVAAISRGGSTYYADSVKGRFTISRDNAKNTVYLQMNSLKPEDTAVYYCAVLTYGYGQHRYWGQGTQVTVSS

SEQ ID NO: 558 - protein, 118 aa, Artificial Sequence
  Chemically Synthesized
QVQLQESGGGLVQAGGSLRLSCAASGYIFFNKYMGWYRQAPGKERELVAAISPGGTTYYADSVKGRFTISRDNAKNTVYLQMNSLKPEDTAVYYCAAYGYTYDEYPYWGQGTQVTVSS

SEQ ID NO: 559 - protein, 125 aa, Artificial Sequence
  Chemically Synthesized
QVQLQESGGGLVQAGGSLRLSCAASGNIFYGDAMGWYRQAPGKERELVAGIAPGGTTNYADSVKGRFTISRDNAKNTVYLQMNSLKPEDTAVYYCAAKPTYSCLCRRLSVVRFYWGQGTQVTVSS

SEQ ID NO: 560 - protein, 118 aa, Artificial Sequence
  Chemically Synthesized
QVQLQESGGGLVQAGGSLRLSCAASGTISFTYQMGWYRQAPGKEREFVAGINYGGITNYADSVKGRFTISRDNAKNTVYLQMNSLKPEDTAVYYCAALDDDDYYFPYWGQGTQVTVSS

SEQ ID NO: 561 - protein, 118 aa, Artificial Sequence
  Chemically Synthesized
QVQLQESGGGLVQAGGSLRLSCAASGTIFWYAYMGWYRQAPGKERELVAAIGYGGTTNYADSVKGRFTISRDNAKNTVYLQMNSLKPEDTAVYYCAVYVGYSVPFIYWGQGTQVTVSS

SEQ ID NO: 562 - protein, 117 aa, Artificial Sequence
  Chemically Synthesized
QVQLQESGGGLVQAGGSLRLSCAASGNISRPPDMGWYRQAPGKEREFVAGINGGGITNYADSVKGRFTISRDNAKNTVYLQMNSLKPEDTAVYYCAVSTISRLNLYWGQGTQVTVSS

SEQ ID NO: 563 - protein, 125 aa, Artificial Sequence
  Chemically Synthesized
QVQLQESGGGLVQAGGSLRLSCAASGTISDDSEMGWYRQAPGKEREFVAGIAKGANTYYADSVKGRFTISRDNAKNTVYLQMNSLKPEDTAVYYCAVPRWFNSGSVLNVTLVLYWGQGTQVTVSS

SEQ ID NO: 564 - protein, 117 aa, Artificial Sequence
  Chemically Synthesized
QVQLQESGGGLVQAGGSLRLSCAASGTFLTTTMGWYRQAPGKEREFVAGIAFGTTTNYADSVKGRFTISRDNAKNTVYLQMNSLKPEDTAVYYCAANDTYYPSFQYWGQGTQVTVSS

SEQ ID NO: 565 - protein, 126 aa, Artificial Sequence
  Chemically Synthesized
QVQLQESGGGLVQAGGSLRLSCAASGNISLLFIMGWYRQAPGKERELVASIAVGATTNYADSVKGRFTISRDNAKNTVYLQMNSLKPEDTAVYYCAAVRDYALAGETLTITQYSYWGQGTQVTVSS

SEQ ID NO: 566 - protein, 122 aa, Artificial Sequence
  Chemically Synthesized
QVQLQESGGGLVQAGGSLRLSCAASGSISGGLSMGWYRQAPGKEREFVAAISAGSNTYYADSVKGRFTISRDNAKNTVYLQMNSLKPEDTAVYYCAAGYSYAEYLNFVFDYWGQGTQVTVSS

SEQ ID NO: 567 - protein, 118 aa, Artificial Sequence
  Chemically Synthesized
QVQLQESGGGLVQAGGSLRLSCAASGSISGRPYMGWYRQAPGKEREFVAAIAGGTNTYYADSVKGRFTISRDNAKNTVYLQMNSLKPEDTAVYYCAAGEDRGRDFDYWGQGTQVTVSS

SEQ ID NO: 568 - protein, 121 aa, Artificial Sequence
  Chemically Synthesized
QVQLQESGGGLVQAGGSLRLSCAASGNISYFPSMGWYRQAPGKERELVAAISDGGNTYYADSVKGRFTISRDNAKNTVYLQMNSLKPEDTAVYYCAVLWFLSTNTVSVVYWGQGTQVTVSS

SEQ ID NO: 569 - protein, 126 aa, Artificial Sequence
  Chemically Synthesized
QVQLQESGGGLVQAGGSLRLSCAASGSISTLRHMGWYRQAPGKERELVAAIDRGTSTYYADSVKGRFTISRDNAKNTVYLQMNSLKPEDTAVYYCAVGTYWAYAYYVYYPYSYRYWGQGTQVTVSS

SEQ ID NO: 570 - protein, 122 aa, Artificial Sequence
  Chemically Synthesized
QVQLQESGGGLVQAGGSLRLSCAASGYIFPSREMGWYRQAPGKEREFVAAIGLGAITYYADSVKGRFTISRDNAKNTVYLQMNSLKPEDTAVYYCAVRARLRPYFRYSHIYWGQGTQVTVSS

SEQ ID NO: 571 - protein, 122 aa, Artificial Sequence
  Chemically Synthesized
QVQLQESGGGLVQAGGSLRLSCAASGTIFRYAIMGWYRQAPGKERELVAGITTGASTNYADSVKGRFTISRDNAKNTVYLQMNSLKPEDTAVYYCAATWYYDYYLYGAHPYWGQGTQVTVSS

SEQ ID NO: 572 - protein, 117 aa, Artificial Sequence
  Chemically Synthesized
QVQLQESGGGLVQAGGSLRLSCAASGYISRWYYMGWYRQAPGKERELVASINYGSNTNYADSVKGRFTISRDNAKNTVYLQMNSLKPEDTAVYYCAADASLKTCIYWGQGTQVTVSS

SEQ ID NO: 573 - protein, 113 aa, Artificial Sequence
  Chemically Synthesized
QVQLQESGGGLVQAGGSLRLSCAASGFFPYWYMGWYRQAPGKEREFVATISGGTNTNYADSVKGRFTISRDNAKNTVYLQMNSLKPEDTAVYYCAGIPDSLYWGQGTQVTVSS

SEQ ID NO: 574 - protein, 125 aa, Artificial Sequence
  Chemically Synthesized
QVQLQESGGGLVQAGGSLRLSCAASGYISRRRIMGWYRQAPGKEREFVAGIAYGGTTYYADSVKGRFTISRDNAKNTVYLQMNSLKPEDTAVYYCAARWGTLAGFPSYEGRLGYWGQGTQVTVSS

SEQ ID NO: 575 - protein, 112 aa, Artificial Sequence
  Chemically Synthesized
QVQLQESGGGLVQAGGSLRLSCAASGTISYYDYMGWYRQAPGKERELVATISDGSTTYYADSVKGRFTISRDNAKNTVYLQMNSLKPEDTAVYYCAAGSLYWGQGTQVTVSS

SEQ ID NO: 576 - protein, 118 aa, Artificial Sequence
  Chemically Synthesized
QVQLQESGGGLVQAGGSLRLSCAASGTISYPVRMGWYRQAPGKERELVAAIDNGTNTNYADSVKGRFTISRDNAKNTVYLQMNSLKPEDTAVYYCAVSYIDRDYLRYWGQGTQVTVSS

SEQ ID NO: 577 - protein, 129 aa, Artificial Sequence
  Chemically Synthesized
QVQLQESGGGLVQAGGSLRLSCAASGNIFLPTVMGWYRQAPGKERELVAGIAFGTITYYADSVKGRFTISRDNAKNTVYLQMNSLKPEDTAVYYCAVDGLYSTGWAQTYDDGDVWHGYWGQGTQVTVSS

SEQ ID NO: 578 - protein, 121 aa, Artificial Sequence
  Chemically Synthesized
QVQLQESGGGLVQAGGSLRLSCAASGSISTVYTMGWYRQAPGKEREFVAAISGGGNTYYADSVKGRFTISRDNAKNTVYLQMNSLKPEDTAVYYCAAYSPIELDLRTYRYWGQGTQVTVSS

SEQ ID NO: 579 - protein, 117 aa, Artificial Sequence
  Chemically Synthesized
QVQLQESGGGLVQAGGSLRLSCAASGNISAWSYMGWYRQAPGKEREFVAAITSGGNTNYADSVKGRFTISRDNAKNTVYLQMNSLKPEDTAVYYCAVTVYSPRSLYWGQGTQVTVSS

SEQ ID NO: 580 - protein, 118 aa, Artificial Sequence
  Chemically Synthesized
QVQLQESGGGLVQAGGSLRLSCAASGSISGIDEMGWYRQAPGKERELVASIASGSSTNYADSVKGRFTISRDNAKNTVYLQMNSLKPEDTAVYYCAVGYQQYRPLYYWGQGTQVTVSS

SEQ ID NO: 581 - protein, 118 aa, Artificial Sequence
  Chemically Synthesized
QVQLQESGGGLVQAGGSLRLSCAASGSIFQTRYMGWYRQAPGKERELVASIGVGTTTYYADSVKGRFTISRDNAKNTVYLQMNSLKPEDTAVYYCAVRPRNGPYHFYWGQGTQVTVSS

SEQ ID NO: 582 - protein, 112 aa, Artificial Sequence
  Chemically Synthesized
QVQLQESGGGLVQAGGSLRLSCAASGTISTQHVMGWYRQAPGKEREFVAAIGAGTTTYYADSVKGRFTISRDNAKNTVYLQMNSLKPEDTAVYYCAAGYYYWGQGTQVTVSS

SEQ ID NO: 583 - protein, 125 aa, Artificial Sequence
  Chemically Synthesized
QVQLQESGGGLVQAGGSLRLSCAASGNIFRHSDMGWYRQAPGKERELVATINAGSTTYYADSVKGRFTISRDNAKNTVYLQMNSLKPEDTAVYYCAAWTQESYDYSLLLVTGIYWGQGTQVTVSS

SEQ ID NO: 584 - protein, 117 aa, Artificial Sequence
  Chemically Synthesized
QVQLQESGGGLVQAGGSLRLSCAASGNISVGARMGWYRQAPGKEREFVASMLMVVIPYADSVKGRFTISRDNAKNTVYLQMNSLKPEDTAVYYCAVVVYLGTEHEYWGQGTQVTVSS

SEQ ID NO: 585 - protein, 121 aa, Artificial Sequence
  Chemically Synthesized
QVQLQESGGGLVQAGGSLRLSCAASGIFFVTVMGWYRQAPGKEREFVAGISSGSSTYYADSVKGRFTISRDNAKNTVYLQMNSLKPEDTAVYYCAARSTAGDAISTWHRYWGQGTQVTVSS

SEQ ID NO: 586 - protein, 118 aa, Artificial Sequence
  Chemically Synthesized
QVQLQESGGGLVQAGGSLRLSCAASGNISPRQWMGWYRQAPGKEREFVAAITWGSNTYYADSVKGRFTISRDNAKNTVYLQMNSLKPEDTAVYYCAAYDYQRGYHGYWGQGTQVTVSS

SEQ ID NO: 587 - protein, 118 aa, Artificial Sequence
  Chemically Synthesized
QVQLQESGGGLVQAGGSLRLSCAASGTISLDDAMGWYRQAPGKERELVASIGPGGNTYYADSVKGRFTISRDNAKNTVYLQMNSLKPEDTAVYYCAVYTGWDRYYYYWGQGTQVTVSS

SEQ ID NO: 588 - protein, 126 aa, Artificial Sequence
  Chemically Synthesized
QVQLQESGGGLVQAGGSLRLSCAASGTIFRYYNMGWYRQAPGKERELVATITSGGSTYYADSVKGRFTISRDNAKNTVYLQMNSLKPEDTAVYYCAAGYRTYKYGPRYTYLFYEYWGQGTQVTVSS

SEQ ID NO: 589 - protein, 118 aa, Artificial Sequence
  Chemically Synthesized
QVQLQESGGGLVQAGGSLRLSCAASGTISAYIAMGWYRQAPGKERELVATIATGATTYYADSVKGRFTISRDNAKNTVYLQMNSLKPEDTAVYYCAATYRYDPGYRYWGQGTQVTVSS

SEQ ID NO: 590 - protein, 118 aa, Artificial Sequence
  Chemically Synthesized
QVQLQESGGGLVQAGGSLRLSCAASGNIFADTAMGWYRQAPGKERELVAAITYGASTNYADSVKGRFTISRDNAKNTVYLQMNSLKPEDTAVYYCAVTPDVNSYLGYWGQGTQVTVSS

SEQ ID NO: 591 - protein, 118 aa, Artificial Sequence
  Chemically Synthesized
QVQLQESGGGLVQAGGSLRLSCAASGSISRRRPMGWYRQAPGKEREFVASIGFGSNTYYADSVKGRFTISRDNAKNTVYLQMNSLKPEDTAVYYCAVGWLRYYSFSYWGQGTQVTVSS

SEQ ID NO: 592 - protein, 121 aa, Artificial Sequence
  Chemically Synthesized
QVQLQESGGGLVQAGGSLRLSCAASGNISGYYFMGWYRQAPGKEREFVAGISDGIIPYADSVKGRFTISRDNAKNTVYLQMNSLKPEDTAVYYCAASGRYNDENTYRHAYWGQGTQVTVSS

SEQ ID NO: 593 - protein, 122 aa, Artificial Sequence
  Chemically Synthesized
QVQLQESGGGLVQAGGSLRLSCAASGYISLGALMGWYRQAPGKERELVAGINVGTNTYYADSVKGRFTISRDNAKNTVYLQMNSLKPEDTAVYYCAAEAASNQQEVLAYYYWGQGTQVTVSS

SEQ ID NO: 594 - protein, 122 aa, Artificial Sequence
  Chemically Synthesized
QVQLQESGGGLVQAGGSLRLSCAASGYISRVDYMGWYRQAPGKERELVAAIGPGSITYYADSVKGRFTISRDNAKNTVYLQMNSLKPEDTAVYYCAVDDYYAVYPYTYLHYWGQGTQVTVSS

SEQ ID NO: 595 - protein, 118 aa, Artificial Sequence
  Chemically Synthesized
QVQLQESGGGLVQAGGSLRLSCAASGYISGPGVMGWYRQAPGKERELVAAINVGSNTYYADSVKGRFTISRDNAKNTVYLQMNSLKPEDTAVYYCAALDDDDYDLGYWGQGTQVTVSS

SEQ ID NO: 596 - protein, 118 aa, Artificial Sequence
  Chemically Synthesized
QVQLQESGGGLVQAGGSLRLSCAASGTISYYTAMGWYRQAPGKERELVAGIADGGSTYYADSVKGRFTISRDNAKNTVYLQMNSLKPEDTAVYYCAVIDGGGSSHVYWGQGTQVTVSS

SEQ ID NO: 597 - protein, 118 aa, Artificial Sequence
  Chemically Synthesized
QVQLQESGGGLVQAGGSLRLSCAASGTISSLNAMGWYRQAPGKEREFVASIGYGSNTYYADSVKGRFTISRDNAKNTVYLQMNSLKPEDTAVYYCAAIYYWSGLYAYWGQGTQVTVSS

SEQ ID NO: 598 - protein, 122 aa, Artificial Sequence
  Chemically Synthesized
QVQLQESGGGLVQAGGSLRLSCAASGTISYHRSMGWYRQAPGKEREFVATISRGSTTNYADSVKGRFTISRDNAKNTVYLQMNSLKPEDTAVYYCAAVPWYTFGYSLYYWYWGQGTQVTVSS

SEQ ID NO: 599 - protein, 117 aa, Artificial Sequence
  Chemically Synthesized
QVQLQESGGGLVQAGGSLRLSCAASGTISRQAYMGWYRQAPGKERELVASIDDGASTYYADSVKGRFTISRDNAKNTVYLQMNSLKPEDTAVYYCAYSLPTDAHDYWGQGTQVTVSS

SEQ ID NO: 600 - protein, 117 aa, Artificial Sequence
  Chemically Synthesized
QVQLQESGGGLVQAGGSLRLSCAASGSISSFTIMGWYRQAPGKERELVAAISAGASTYYADSVKGRFTISRDNAKNTVYLQMNSLKPEDTAVYYCAASDPDWAYDYWGQGTQVTVSS

SEQ ID NO: 601 - protein, 118 aa, Artificial Sequence
  Chemically Synthesized
QVQLQESGGGLVQAGGSLRLSCAASGNISTRWVMGWYRQAPGKERELVAGINNGGITYYADSVKGRFTISRDNAKNTVYLQMNSLKPEDTAVYYCAAGDTSSYPFGYWGQGTQVTVSS

SEQ ID NO: 602 - protein, 117 aa, Artificial Sequence
  Chemically Synthesized
QVQLQESGGGLVQAGGSLRLSCAASGSIFADGAMGWYRQAPGKEREFVAAITPGTTTYYADSVKGRFTISRDNAKNTVYLQMNSLKPEDTAVYYCAYSLPTDAHDYWGQGTQVTVSS

SEQ ID NO: 603 - protein, 118 aa, Artificial Sequence
  Chemically Synthesized
QVQLQESGGGLVQAGGSLRLSCAASGSIFYPVVMGWYRQAPGKERELVAGIDGGTTTYYADSVKGRFTISRDNAKNTVYLQMNSLKPEDTAVYYCAAYNRYTHNLDYWGQGTQVTVSS

SEQ ID NO: 604 - protein, 122 aa, Artificial Sequence
  Chemically Synthesized
QVQLQESGGGLVQAGGSLRLSCAASGSIFYPVVMGWYRQAPGKERELVAGIDGGTTTYYADSVKGRFTISRDNAKNTVYLQMNSLKPEDTAVYYCAVPFKTRYGRGNLFWYWGQGTQVTVSS

SEQ ID NO: 605 - protein, 117 aa, Artificial Sequence
  Chemically Synthesized
QVQLQESGGGLVQAGGSLRLSCAASGTIFDTPVMGWYRQAPGKEREFVAGIGYGATTNYADSVKGRFTISRDNAKNTVYLQMNSLKPEDTAVYYCAYSLPTDAHDYWGQGTQVTVSS

SEQ ID NO: 606 - protein, 118 aa, Artificial Sequence
  Chemically Synthesized
QVQLQESGGGLVQAGGSLRLSCAASGSISDSYYMGWYRQAPGKERELVASIAYGASTYYADSVKGRFTISRDNAKNTVYLQMNSLKPEDTAVYYCAAAGYENYRHIYWGQGTQVTVSS

SEQ ID NO: 607 - protein, 118 aa, Artificial Sequence
  Chemically Synthesized
QVQLQESGGGLVQAGGSLRLSCAASGSIFYDWLMGWYRQAPGKERELVAGINDGATTYYADSVKGRFTISRDNAKNTVYLQMNSLKPEDTAVYYCAAVKYATAYYEYWGQGTQVTVSS

SEQ ID NO: 608 - protein, 118 aa, Artificial Sequence
  Chemically Synthesized
QVQLQESGGGLVQAGGSLRLSCAASGSIFYPVVMGWYRQAPGKERELVAGIDGGTTTYYADSVKGRFTISRDNAKNTVYLQMNSLKPEDTAVYYCAAYLVYRQRHQYWGQGTQVTVSS

SEQ ID NO: 609 - protein, 126 aa, Artificial Sequence
  Chemically Synthesized
QVQLQESGGGLVQAGGSLRLSCAASGSIFYPVVMGWYRQAPGKERELVAGIDGGTTTYYADSVKGRFTISRDNAKNTVYLQMNSLKPEDTAVYYCAVQIDDDTVYWEDWQYYYVYWGQGTQVTVSS

SEQ ID NO: 610 - protein, 118 aa, Artificial Sequence
  Chemically Synthesized
QVQLQESGGGLVQAGGSLRLSCAASGNISLYWDMGWYRQAPGKERELVAAIAHGGITNYADSVKGRFTISRDNAKNTVYLQMNSLKPEDTAVYYCAVHAYIVPYHRYWGQGTQVTVSS

SEQ ID NO: 611 - protein, 118 aa, Artificial Sequence
  Chemically Synthesized
QVQLQESGGGLVQAGGSLRLSCAASGYIFGPVGMGWYRQAPGKERELVAGIGLGANTNYADSVKGRFTISRDNAKNTVYLQMNSLKPEDTAVYYCAVYHYGSTPHAYWGQGTQVTVSS

SEQ ID NO: 612 - protein, 118 aa, Artificial Sequence
  Chemically Synthesized
QVQLQESGGGLVQAGGSLRLSCAASGNIFPRYLMGWYRQAPGKEREFVATITRGASTYYADSVKGRFTISRDNAKNTVYLQMNSLKPEDTAVYYCAVARLQWKSHTYWGQGTQVTVSS

SEQ ID NO: 613 - protein, 117 aa, Artificial Sequence
  Chemically Synthesized
QVQLQESGGGLVQAGGSLRLSCAASGTIFGRGAMGWYRQAPGKEREFVATIADGTTTYADSVKGRFTISRDNAKNTVYLQMNSLKPEDTAVYYCAAWRTRIYELEYWGQGTQVTVSS

SEQ ID NO: 614 - protein, 117 aa, Artificial Sequence
  Chemically Synthesized
QVQLQESGGGLVQAGGSLRLSCAASGTIFVTWMGWYRQAPGKEREFVAAIDAGTSTNYADSVKGRFTISRDNAKNTVYLQMNSLKPEDTAVYYCAVHTYYDRVHEYWGQGTQVTVSS

SEQ ID NO: 615 - protein, 117 aa, Artificial Sequence
  Chemically Synthesized
QVQLQESGGGLVQAGGSLRLSCAASGTIFRWQGMGWYRQAPGKEREFVASIGRGGSTYYADSVKGRFTISRDNAKNTVYLQMNSLKPEDTAVYYCAAVASQSTDYYWGQGTQVTVSS

SEQ ID NO: 616 - protein, 117 aa, Artificial Sequence
  Chemically Synthesized
QVQLQESGGGLVQAGGSLRLSCAASGSIFSLTMGWYRQAPGKEREFVAAIAGGANTNYADSVKGRFTISRDNAKNTVYLQMNSLKPEDTAVYYCAAYVVGYARYYYWGQGTQVTVSS

SEQ ID NO: 617 - protein, 126 aa, Artificial Sequence
  Chemically Synthesized
QVQLQESGGGLVQAGGSLRLSCAASGYISGHNYMGWYRQAPGKERELVAGIDIGAITYYADSVKGRFTISRDNAKNTVYLQMNSLKPEDTAVYYCAAIIAYPTITDSNVTRVFVYWGQGTQVTVSS

SEQ ID NO: 618 - protein, 118 aa, Artificial Sequence
  Chemically Synthesized
QVQLQESGGGLVQAGGSLRLSCAASGNIFWAKSMGWYRQAPGKERELVAAIARGASTYYADSVKGRFTISRDNAKNTVYLQMNSLKPEDTAVYYCAVFPGSYFRHGYWGQGTQVTVSS

SEQ ID NO: 619 - protein, 122 aa, Artificial Sequence
  Chemically Synthesized
QVQLQESGGGLVQAGGSLRLSCAASGYIFPYEQMGWYRQAPGKERELVASIDYGATTNYADSVKGRFTISRDNAKNTVYLQMNSLKPEDTAVYYCAADYYSGTGVYDGLRYWGQGTQVTVSS

SEQ ID NO: 620 - protein, 116 aa, Artificial Sequence
  Chemically Synthesized
QVQLQESGGGLVQAGGSLRLSCAASGNIFYVGSMGWYRQAPGKERELVATISRGYYYQYADSVKGRFTISRDNAKNTVYLQMNSLKPEDTAVYYCAVDTRYSLAYWGQGTQVTVSS

SEQ ID NO: 621 - protein, 118 aa, Artificial Sequence
  Chemically Synthesized
QVQLQESGGGLVQAGGSLRLSCAASGSISSPYVMGWYRQAPGKERELVATINSGSTTNYADSVKGRFTISRDNAKNTVYLQMNSLKPEDTAVYYCAAYYPYLDTHVYWGQGTQVTVSS

SEQ ID NO: 622 - protein, 117 aa, Artificial Sequence
  Chemically Synthesized
QVQLQESGGGLVQAGGSLRLSCAASGNIFGADLMGWYRQAPGKEREFVAAIDTGGLPYADSVKGRFTISRDNAKNTVYLQMNSLKPEDTAVYYCAVAPYTDFQLAYWGQGTQVTVSS

SEQ ID NO: 623 - protein, 118 aa, Artificial Sequence
  Chemically Synthesized
QVQLQESGGGLVQAGGSLRLSCAASGSISRYFYMGWYRQAPGKERELVATIAPGSSTNYADSVKGRFTISRDNAKNTVYLQMNSLKPEDTAVYYCAVYYRAGYDHDYWGQGTQVTVSS

SEQ ID NO: 624 - protein, 118 aa, Artificial Sequence
  Chemically Synthesized
QVQLQESGGGLVQAGGSLRLSCAASGTISYTSYMGWYRQAPGKEREFVAGITWGTSTYYADSVKGRFTISRDNAKNTVYLQMNSLKPEDTAVYYCAVDVSYGAQFGYWGQGTQVTVSS

SEQ ID NO: 625 - protein, 122 aa, Artificial Sequence
  Chemically Synthesized
QVQLQESGGGLVQAGGSLRLSCAASGSISVDAPMGWYRQAPGKERELVASIGYGSSTNYADSVKGRFTISRDNAKNTVYLQMNSLKPEDTAVYYCAAESYLIHAYENYFVYWGQGTQVTVSS

SEQ ID NO: 626 - protein, 111 aa, Artificial Sequence
  Chemically Synthesized
QVQLQESGGGLVQAGGSLRLSCAASGSIFRDYGMGWYRQAPGKERELVASIDAGGITYYADSVKGRFTISRDNAKNTVYLQMNSLKPEDTAVYYCAVNFYWGQGTQVTVSS

SEQ ID NO: 627 - protein, 118 aa, Artificial Sequence
  Chemically Synthesized
QVQLQESGGGLVQAGGSLRLSCAASGTISPSSLMGWYRQAPGKERELVASIDGGGITYYADSVKGRFTISRDNAKNTVYLQMNSLKPEDTAVYYCAVYNLDDSYHAYWGQGTQVTVSS

SEQ ID NO: 628 - protein, 118 aa, Artificial Sequence
  Chemically Synthesized
QVQLQESGGGLVQAGGSLRLSCAASGTISISDWMGWYRQAPGKEREFVATIASGTITNYADSVKGRFTISRDNAKNTVYLQMNSLKPEDTAVYYCAVPLVFILPLFYWGQGTQVTVSS

SEQ ID NO: 629 - protein, 123 aa, Artificial Sequence
  Chemically Synthesized
QVQLQESGGGLVQAGGSLRLSCAASGTISYDYYMGWYRQAPGKERELVAAIDYGSSTYYADSVKGRFTISRDNAKNTVYLQMNSLKPEDTAVYYCAVWSYVDRDYYGDDHRYWGQGTQVTVSS

SEQ ID NO: 630 - protein, 121 aa, Artificial Sequence
  Chemically Synthesized
QVQLQESGGGLVQAGGSLRLSCAASGTIFLPATMGWYRQAPGKERELVATIGDGATLYADSVKGRFTISRDNAKNTVYLQMNSLKPEDTAVYYCAADGDDRKVYWSDLYYWGQGTQVTVSS

SEQ ID NO: 631 - protein, 110 aa, Artificial Sequence
  Chemically Synthesized
QVQLQESGGGLVQAGGSLRLSCAASGTIFAPGDMGWYRQAPGKEREFVAGIGGGGITNYADSVKGRFTISRDNAKNTVYLQMNSLKPEDTAVYYCAVLYWGQGTQVTVSS

SEQ ID NO: 632 - protein, 117 aa, Artificial Sequence
  Chemically Synthesized
QVQLQESGGGLVQAGGSLRLSCAASGNISYRLGMGWYRQAPGKERELVATIDSVVIPYADSVKGRFTISRDNAKNTVYLQMNSLKPEDTAVYYCAADSYISGQHAYWGQGTQVTVSS

SEQ ID NO: 633 - protein, 122 aa, Artificial Sequence
  Chemically Synthesized
QVQLQESGGGLVQAGGSLRLSCAASGTISPYDEMGWYRQAPGKERELVATIAYGASTYYADSVKGRFTISRDNAKNTVYLQMNSLKPEDTAVYYCAVFLWYNRPGRGPHDYWGQGTQVTVSS

SEQ ID NO: 634 - protein, 122 aa, Artificial Sequence
  Chemically Synthesized
QVQLQESGGGLVQAGGSLRLSCAASGTISGLWPMGWYRQAPGKEREFVATITDGASTYYADSVKGRFTISRDNAKNTVYLQMNSLKPEDTAVYYCAASRGYDHDGYATFGYWGQGTQVTVSS

SEQ ID NO: 635 - protein, 126 aa, Artificial Sequence
  Chemically Synthesized
QVQLQESGGGLVQAGGSLRLSCAASGNISYVHWMGWYRQAPGKERELVATITTGTSTYYADSVKGRFTISRDNAKNTVYLQMNSLKPEDTAVYYCAVHYYDWYGDRESYVGSHTYWGQGTQVTVSS

SEQ ID NO: 636 - protein, 122 aa, Artificial Sequence
  Chemically Synthesized
QVQLQESGGGLVQAGGSLRLSCAASGTISPYSAMGWYRQAPGKERELVATITIGSTTNYADSVKGRFTISRDNAKNTVYLQMNSLKPEDTAVYYCAVIIYDTAISRRDYGYWGQGTQVTVSS

SEQ ID NO: 637 - protein, 122 aa, Artificial Sequence
  Chemically Synthesized
QVQLQESGGGLVQAGGSLRLSCAASGNIFDYRYMGWYRQAPGKEREFVAAIAYGSITNYADSVKGRFTISRDNAKNTVYLQMNSLKPEDTAVYYCAVNRGTYYLNADYLWYWGQGTQVTVSS

SEQ ID NO: 638 - protein, 115 aa, Artificial Sequence
  Chemically Synthesized
QVQLQESGGGLVQAGGSLRLSCAASGNISHGYYMGWYRQAPGKERELVAGITYGSSTNYADSVKGRFTISRDNAKNTVYLQMNSLKPEDTAVYYCAVWSKSHAYWGQGTQVTVSS

SEQ ID NO: 639 - protein, 112 aa, Artificial Sequence
  Chemically Synthesized
QVQLQESGGGLVQAGGSLRLSCAASGYIFDVNVMGWYRQAPGKEREFVASIAGGTITNYADSVKGRFTISRDNAKNTVYLQMNSLKPEDTAVYYCAAVLMYWGQGTQVTVSS

SEQ ID NO: 640 - protein, 117 aa, Artificial Sequence
  Chemically Synthesized
QVQLQESGGGLVQAGGSLRLSCAASGNISRYSQMGWYRQAPGKERELVAVLMLVVVPYADSVKGRFTISRDNAKNTVYLQMNSLKPEDTAVYYCAAYQDVTGILDYWGQGTQVTVSS

SEQ ID NO: 641 - protein, 122 aa, Artificial Sequence
  Chemically Synthesized
QVQLQESGGGLVQAGGSLRLSCAASGTIFVSLGMGWYRQAPGKERELVATIDRGGITYYADSVKGRFTISRDNAKNTVYLQMNSLKPEDTAVYYCAVHTSTDGDYAYWHYYWGQGTQVTVSS

SEQ ID NO: 642 - protein, 118 aa, Artificial Sequence
  Chemically Synthesized
QVQLQESGGGLVQAGGSLRLSCAASGTIFKLGTMGWYRQAPGKERELVASIGQGTITNYADSVKGRFTISRDNAKNTVYLQMNSLKPEDTAVYYCAVSPARYSLHNYWGQGTQVTVSS

SEQ ID NO: 643 - protein, 122 aa, Artificial Sequence
  Chemically Synthesized
QVQLQESGGGLVQAGGSLRLSCAASGTISGDGAMGWYRQAPGKERELVASIGEGANTYYADSVKGRFTISRDNAKNTVYLQMNSLKPEDTAVYYCAARDLYDEDRRDLHRYWGQGTQVTVSS

SEQ ID NO: 644 - protein, 118 aa, Artificial Sequence
  Chemically Synthesized
QVQLQESGGGLVQAGGSLRLSCAASGNISERSGMGWYRQAPGKERELVATIATGGITYYADSVKGRFTISRDNAKNTVYLQMNSLKPEDTAVYYCAAYIKRNSAHYYWGQGTQVTVSS

SEQ ID NO: 645 - protein, 125 aa, Artificial Sequence
  Chemically Synthesized
QVQLQESGGGLVQAGGSLRLSCAASGNIFRDRYMGWYRQAPGKEREFVAGIAIGTSTYYADSVKGRFTISRDNAKNTVYLQMNSLKPEDTAVYYCAVRPIEVRTRLVKTVLGIYWGQGTQVTVSS

SEQ ID NO: 646 - protein, 111 aa, Artificial Sequence
  Chemically Synthesized
QVQLQESGGGLVQAGGSLRLSCAASGYIFQIYVMGWYRQAPGKEREFVAGITTGSTTYYADSVKGRFTISRDNAKNTVYLQMNSLKPEDTAVYYCAVGDYWGQGTQVTVSS

SEQ ID NO: 647 - protein, 118 aa, Artificial Sequence
  Chemically Synthesized
QVQLQESGGGLVQAGGSLRLSCAASGNISGRFSMGWYRQAPGKERELVAAIGHGGSTYYADSVKGRFTISRDNAKNTVYLQMNSLKPEDTAVYYCAAYTPFYKSHTYWGQGTQVTVSS

SEQ ID NO: 648 - protein, 125 aa, Artificial Sequence
  Chemically Synthesized
QVQLQESGGGLVQAGGSLRLSCAASGNISWWTVMGWYRQAPGKERELVAAIALGGITYYADSVKGRFTISRDNAKNTVYLQMNSLKPEDTAVYYCAVTLTTKLLGLRSSIYSCYWGQGTQVTVSS

SEQ ID NO: 649 - protein, 117 aa, Artificial Sequence
  Chemically Synthesized
QVQLQESGGGLVQAGGSLRLSCAASGSIFISLMGWYRQAPGKEREFVAGIGDGSNTYYADSVKGRFTISRDNAKNTVYLQMNSLKPEDTAVYYCAVYGTPGGRHYYWGQGTQVTVSS

SEQ ID NO: 650 - protein, 117 aa, Artificial Sequence
  Chemically Synthesized
QVQLQESGGGLVQAGGSLRLSCAASGSISGDRSMGWYRQAPGKEREFVATITYGSTTYADSVKGRFTISRDNAKNTVYLQMNSLKPEDTAVYYCAADYKDGYYHYYWGQGTQVTVSS

SEQ ID NO: 651 - protein, 121 aa, Artificial Sequence
  Chemically Synthesized
QVQLQESGGGLVQAGGSLRLSCAASGNISAAYGMGWYRQAPGKEREFVATIGNGGNTNYADSVKGRFTISRDNAKNTVYLQMNSLKPEDTAVYYCAVYIGLITLTLTFFYWGQGTQVTVSS

SEQ ID NO: 652 - protein, 125 aa, Artificial Sequence
  Chemically Synthesized
QVQLQESGGGLVQAGGSLRLSCAASGNISYFSMGWYRQAPGKERELVAGIGGGATTNYADSVKGRFTISRDNAKNTVYLQMNSLKPEDTAVYYCAVGDVTTQAAPPIIDYFLYYWGQGTQVTVSS

SEQ ID NO: 653 - protein, 121 aa, Artificial Sequence
  Chemically Synthesized
QVQLQESGGGLVQAGGSLRLSCAASGTISPYTYMGWYRQAPGKERELVAAIMLVLIPYADSVKGRFTISRDNAKNTVYLQMNSLKPEDTAVYYCAVPYVVFTKTWVTFLYWGQGTQVTVSS

SEQ ID NO: 654 - protein, 126 aa, Artificial Sequence
  Chemically Synthesized
QVQLQESGGGLVQAGGSLRLSCAASGNISRPYNMGWYRQAPGKEREFVATISVGSTTYYADSVKGRFTISRDNAKNTVYLQMNSLKPEDTAVYYCAAGLQYQWDGAGRTSWRYAYWGQGTQVTVSS

SEQ ID NO: 655 - protein, 118 aa, Artificial Sequence
  Chemically Synthesized
QVQLQESGGGLVQAGGSLRLSCAASGNISIRYSMGWYRQAPGKEREFVASINGGSSTYYADSVKGRFTISRDNAKNTVYLQMNSLKPEDTAVYYCAVVPDDDYLYVYWGQGTQVTVSS

SEQ ID NO: 656 - protein, 118 aa, Artificial Sequence
  Chemically Synthesized
QVQLQESGGGLVQAGGSLRLSCAASGNIFGYGLMGWYRQAPGKERELVAAIGSGGNTYYADSVKGRFTISRDNAKNTVYLQMNSLKPEDTAVYYCAVQYPYYDTFRYWGQGTQVTVSS

SEQ ID NO: 657 - protein, 118 aa, Artificial Sequence
  Chemically Synthesized
QVQLQESGGGLVQAGGSLRLSCAASGNIFYRASMGWYRQAPGKERELVASIAYGTTTYYADSVKGRFTISRDNAKNTVYLQMNSLKPEDTAVYYCAVIYYEYGDYSYWGQGTQVTVSS

SEQ ID NO: 658 - protein, 120 aa, Artificial Sequence
  Chemically Synthesized
QVQLQESGGGLVQAGGSLRLSCAASGNFLLVTMGWYRQAPGKEREFVATIGYGATTNYADSVKGRFTISRDNAKNTVYLQMNSLKPEDTAVYYCAVVFDPYRWDEVYHYWGQGTQVTVSS

SEQ ID NO: 659 - protein, 115 aa, Artificial Sequence
  Chemically Synthesized
QVQLQESGGGLVQAGGSLRLSCAASGTIFGDYYMGWYRQAPGKERELVAAINQGAITYYADSVKGRFTISRDNAKNTVYLQMNSLKPEDTAVYYCAATIDWFYYWGQGTQVTVSS

SEQ ID NO: 660 - protein, 122 aa, Artificial Sequence
  Chemically Synthesized
QVQLQESGGGLVQAGGSLRLSCAASGSISLLPPMGWYRQAPGKERELVATISAGGSTNYADSVKGRFTISRDNAKNTVYLQMNSLKPEDTAVYYCAVIDQESPHSLFYYVYWGQGTQVTVSS

SEQ ID NO: 661 - protein, 118 aa, Artificial Sequence
  Chemically Synthesized
QVQLQESGGGLVQAGGSLRLSCAASGYIFVILSMGWYRQAPGKEREFVAGISNGTTTYYADSVKGRFTISRDNAKNTVYLQMNSLKPEDTAVYYCAAVYRYNQYLYYWGQGTQVTVSS

SEQ ID NO: 662 - protein, 118 aa, Artificial Sequence
  Chemically Synthesized
QVQLQESGGGLVQAGGSLRLSCAASGSISGRWAMGWYRQAPGKEREFVAAIASGATTNYADSVKGRFTISRDNAKNTVYLQMNSLKPEDTAVYYCAAGYAYGGYHLYWGQGTQVTVSS

SEQ ID NO: 663 - protein, 125 aa, Artificial Sequence
  Chemically Synthesized
QVQLQESGGGLVQAGGSLRLSCAASGYIFDSVGMGWYRQAPGKERELVAAIDDGSSTNYADSVKGRFTISRDNAKNTVYLQMNSLKPEDTAVYYCAVREYYRRAYLTPPTGHGYWGQGTQVTVSS

SEQ ID NO: 664 - protein, 118 aa, Artificial Sequence
  Chemically Synthesized
QVQLQESGGGLVQAGGSLRLSCAASGSIFGSYRMGWYRQAPGKEREFVAAIGRGGNTYYADSVKGRFTISRDNAKNTVYLQMNSLKPEDTAVYYCAAYDYPYWKHDYWGQGTQVTVSS

SEQ ID NO: 665 - protein, 122 aa, Artificial Sequence
  Chemically Synthesized
QVQLQESGGGLVQAGGSLRLSCAASGNISAVPRMGWYRQAPGKERELVAGIDVGTNTNYADSVKGRFTISRDNAKNTVYLQMNSLKPEDTAVYYCAALGPAFAQVRDPHAYWGQGTQVTVSS

SEQ ID NO: 666 - protein, 122 aa, Artificial Sequence
  Chemically Synthesized
QVQLQESGGGLVQAGGSLRLSCAASGSISYWSDMGWYRQAPGKERELVAAIAWGGSTYYADSVKGRFTISRDNAKNTVYLQMNSLKPEDTAVYYCAAYAYDVDWSYLYFVYWGQGTQVTVSS

SEQ ID NO: 667 - protein, 122 aa, Artificial Sequence
  Chemically Synthesized
QVQLQESGGGLVQAGGSLRLSCAASGTIFVKRLMGWYRQAPGKEREFVASIDYGTTTNYADSVKGRFTISRDNAKNTVYLQMNSLKPEDTAVYYCAAYTRWTRLFLTRHGYWGQGTQVTVSS

SEQ ID NO: 668 - protein, 117 aa, Artificial Sequence
  Chemically Synthesized
QVQLQESGGGLVQAGGSLRLSCAASGNISDPYSMGWYRQAPGKEREFVAGIDGGASTNYADSVKGRFTISRDNAKNTVYLQMNSLKPEDTAVYYCAVSVYKSTTFYWGQGTQVTVSS

SEQ ID NO: 669 - protein, 117 aa, Artificial Sequence
  Chemically Synthesized
QVQLQESGGGLVQAGGSLRLSCAASGNISYSLMGWYRQAPGKEREFVAGISYGATTNYADSVKGRFTISRDNAKNTVYLQMNSLKPEDTAVYYCAVYLERHLYHYYWGQGTQVTVSS

SEQ ID NO: 670 - protein, 122 aa, Artificial Sequence
  Chemically Synthesized
QVQLQESGGGLVQAGGSLRLSCAASGNIFDLYYMGWYRQAPGKEREFVAAIDSGGTTYYADSVKGRFTISRDNAKNTVYLQMNSLKPEDTAVYYCAARRDYGVYVVGGHYYWGQGTQVTVSS

SEQ ID NO: 671 - protein, 117 aa, Artificial Sequence
  Chemically Synthesized
QVQLQESGGGLVQAGGSLRLSCAASGSIFPYNMGWYRQAPGKEREFVAAIGHGSNTYYADSVKGRFTISRDNAKNTVYLQMNSLKPEDTAVYYCAVRTQYYFVYPYWGQGTQVTVSS

SEQ ID NO: 672 - protein, 126 aa, Artificial Sequence
  Chemically Synthesized
QVQLQESGGGLVQAGGSLRLSCAASGYIFAGRDMGWYRQAPGKERELVAGIARGGSTYYADSVKGRFTISRDNAKNTVYLQMNSLKPEDTAVYYCAANLDYTDYAQAHRGETHLYWGQGTQVTVSS

SEQ ID NO: 673 - protein, 118 aa, Artificial Sequence
  Chemically Synthesized
QVQLQESGGGLVQAGGSLRLSCAASGTIFAYSFMGWYRQAPGKERELVAGIDRGGSTYYADSVKGRFTISRDNAKNTVYLQMNSLKPEDTAVYYCAVEPYPFASHAYWGQGTQVTVSS

SEQ ID NO: 674 - protein, 122 aa, Artificial Sequence
  Chemically Synthesized
QVQLQESGGGLVQAGGSLRLSCAASGTIFGTGFMGWYRQAPGKERELVAGITHGSTTNYADSVKGRFTISRDNAKNTVYLQMNSLKPEDTAVYYCAADSPRYSIGFDDLTYWGQGTQVTVSS

SEQ ID NO: 675 - protein, 118 aa, Artificial Sequence
  Chemically Synthesized
QVQLQESGGGLVQAGGSLRLSCAASGTIFADITMGWYRQAPGKERELVAAISYGGSTYYADSVKGRFTISRDNAKNTVYLQMNSLKPEDTAVYYCAAQPIPLYTLDYWGQGTQVTVSS

SEQ ID NO: 676 - protein, 118 aa, Artificial Sequence
  Chemically Synthesized
QVQLQESGGGLVQAGGSLRLSCAASGTISLTYVMGWYRQAPGKEREFVAGIGGGSTTNYADSVKGRFTISRDNAKNTVYLQMNSLKPEDTAVYYCAVQPTDYSRHPYWGQGTQVTVSS

SEQ ID NO: 677 - protein, 117 aa, Artificial Sequence
  Chemically Synthesized
QVQLQESGGGLVQAGGSLRLSCAASGSISFSWMGWYRQAPGKEREFVAAINSGASTYYADSVKGRFTISRDNAKNTVYLQMNSLKPEDTAVYYCAVSSPYAEDFGYWGQGTQVTVSS

SEQ ID NO: 678 - protein, 121 aa, Artificial Sequence
  Chemically Synthesized
QVQLQESGGGLVQAGGSLRLSCAASGSISIAPYMGWYRQAPGKEREFVATIAGGGSTYYADSVKGRFTISRDNAKNTVYLQMNSLKPEDTAVYYCAADPSTSRTLCSLIYWGQGTQVTVSS

SEQ ID NO: 679 - protein, 117 aa, Artificial Sequence
  Chemically Synthesized
QVQLQESGGGLVQAGGSLRLSCAASGTISDAVYMGWYRQAPGKEREFVATITYGGTTNYADSVKGRFTISRDNAKNTVYLQMNSLKPEDTAVYYCAAAEFDVSTMYWGQGTQVTVSS

SEQ ID NO: 680 - protein, 118 aa, Artificial Sequence
  Chemically Synthesized
QVQLQESGGGLVQAGGSLRLSCAASGNISPYTYMGWYRQAPGKERELVAGITYGTTTYYADSVKGRFTISRDNAKNTVYLQMNSLKPEDTAVYYCAVSHARWYVYRYWGQGTQVTVSS

SEQ ID NO: 681 - protein, 126 aa, Artificial Sequence
  Chemically Synthesized
QVQLQESGGGLVQAGGSLRLSCAASGYISLQLYMGWYRQAPGKEREFVASITYGSTTYYADSVKGRFTISRDNAKNTVYLQMNSLKPEDTAVYYCAARYGTSFRAWRNVQGAFVYWGQGTQVTVSS

SEQ ID NO: 682 - protein, 115 aa, Artificial Sequence
  Chemically Synthesized
QVQLQESGGGLVQAGGSLRLSCAASGNIFLGSYMGWYRQAPGKERELVAGISTGSNTNYADSVKGRFTISRDNAKNTVYLQMNSLKPEDTAVYYCAAGTVRYWYWGQGTQVTVSS

SEQ ID NO: 683 - protein, 118 aa, Artificial Sequence
  Chemically Synthesized
QVQLQESGGGLVQAGGSLRLSCAASGSISGFVIMGWYRQAPGKERELVAAIDQGATTNYADSVKGRFTISRDNAKNTVYLQMNSLKPEDTAVYYCAASDDPPAIFDYWGQGTQVTVSS

SEQ ID NO: 684 - protein, 126 aa, Artificial Sequence
  Chemically Synthesized
QVQLQESGGGLVQAGGSLRLSCAASGYIFAGPVMGWYRQAPGKERELVAAITYGGITNYADSVKGRFTISRDNAKNTVYLQMNSLKPEDTAVYYCAVDQGLQSRYKGYPSDVHYYWGQGTQVTVSS

SEQ ID NO: 685 - protein, 125 aa, Artificial Sequence
  Chemically Synthesized
QVQLQESGGGLVQAGGSLRLSCAASGTISRPFSMGWYRQAPGKERELVAGISSVLLPYADSVKGRFTISRDNAKNTVYLQMNSLKPEDTAVYYCAVRYAEYYYYDTYPSGLFTYWGQGTQVTVSS

SEQ ID NO: 686 - protein, 122 aa, Artificial Sequence
  Chemically Synthesized
QVQLQESGGGLVQAGGSLRLSCAASGTISTDYVMGWYRQAPGKERELVAAITTGGITYYADSVKGRFTISRDNAKNTVYLQMNSLKPEDTAVYYCAAYGSDLDTPDTDHQYWGQGTQVTVSS

SEQ ID NO: 687 - protein, 118 aa, Artificial Sequence
  Chemically Synthesized
QVQLQESGGGLVQAGGSLRLSCAASGNISAYQGMGWYRQAPGKERELVASINAGSTTYYADSVKGRFTISRDNAKNTVYLQMNSLKPEDTAVYYCAAPYRPAYRLYYWGQGTQVTVSS

SEQ ID NO: 688 - protein, 115 aa, Artificial Sequence
  Chemically Synthesized
QVQLQESGGGLVQAGGSLRLSCAASGIGVVMGWYRQAPGKERELVATITTGTTTNYADSVKGRFTISRDNAKNTVYLQMNSLKPEDTAVYYCAVARDNWYTLDYWGQGTQVTVSS

SEQ ID NO: 689 - protein, 126 aa, Artificial Sequence
  Chemically Synthesized
QVQLQESGGGLVQAGGSLRLSCAASGNISPDPTMGWYRQAPGKERELVASINQGASTYYADSVKGRFTISRDNAKNTVYLQMNSLKPEDTAVYYCAVDYTYRYASTTQRGYYHDYWGQGTQVTVSS

SEQ ID NO: 690 - protein, 118 aa, Artificial Sequence
  Chemically Synthesized
QVQLQESGGGLVQAGGSLRLSCAASGYISFNEYMGWYRQAPGKERELVAGIAYGGSTNYADSVKGRFTISRDNAKNTVYLQMNSLKPEDTAVYYCAVWADDRWTHDYWGQGTQVTVSS

SEQ ID NO: 691 - protein, 117 aa, Artificial Sequence
  Chemically Synthesized
QVQLQESGGGLVQAGGSLRLSCAASGTISLLFTMGWYRQAPGKERELVAAISRGASTYYADSVKGRFTISRDNAKNTVYLQMNSLKPEDTAVYYCAAFDTTDSRMYWGQGTQVTVSS

SEQ ID NO: 692 - protein, 116 aa, Artificial Sequence
  Chemically Synthesized
QVQLQESGGGLVQAGGSLRLSCAASGTIFLAPIMGWYRQAPGKERELPVLIGVLLPYADSVKGRFTISRDNAKNTVYLQMNSLKPEDTAVYYCAVYIPDYDDHGYWGQGTQVTVSS

SEQ ID NO: 693 - protein, 118 aa, Artificial Sequence
  Chemically Synthesized
QVQLQESGGGLVQAGGSLRLSCAASGSIFVLLYMGWYRQAPGKERELVASITVGGNTNYADSVKGRFTISRDNAKNTVYLQMNSLKPEDTAVYYCAAGAPSQAAYDYWGQGTQVTVSS

SEQ ID NO: 694 - protein, 122 aa, Artificial Sequence
  Chemically Synthesized
QVQLQESGGGLVQAGGSLRLSCAASGNISLASGMGWYRQAPGKERELVATIDGGATTYYADSVKGRFTISRDNAKNTVYLQMNSLKPEDTAVYYCAADSPIVIQHSQYLRYWGQGTQVTVSS

SEQ ID NO: 695 - protein, 118 aa, Artificial Sequence
  Chemically Synthesized
QVQLQESGGGLVQAGGSLRLSCAASGNISASPYMGWYRQAPGKERELVAAIGDGGTTYYADSVKGRFTISRDNAKNTVYLQMNSLKPEDTAVYYCAVQLYATLGYGYWGQGTQVTVSS

SEQ ID NO: 696 - protein, 122 aa, Artificial Sequence
  Chemically Synthesized
QVQLQESGGGLVQAGGSLRLSCAASGNIFFDWFMGWYRQAPGKEREFVATINDGTNTYYADSVKGRFTISRDNAKNTVYLQMNSLKPEDTAVYYCAVVDDWDDYWDPYFGYWGQGTQVTVSS

SEQ ID NO: 697 - protein, 122 aa, Artificial Sequence
  Chemically Synthesized
QVQLQESGGGLVQAGGSLRLSCAASGTIFRPGAMGWYRQAPGKEREFVAAIGAGSITNYADSVKGRFTISRDNAKNTVYLQMNSLKPEDTAVYYCAAPNYQAWDVYDSHAYWGQGTQVTVSS

SEQ ID NO: 698 - protein, 118 aa, Artificial Sequence
  Chemically Synthesized
QVQLQESGGGLVQAGGSLRLSCAASGYISFVTMGWYRQAPGKEREFVATISHGGSTNYADSVKGRFTISRDNAKNTVYLQMNSLKPEDTAVYYCAAYWEQWADYFYYWGQGTQVTVSS

SEQ ID NO: 699 - protein, 122 aa, Artificial Sequence
  Chemically Synthesized
QVQLQESGGGLVQAGGSLRLSCAASGTISYAGLMGWYRQAPGKERELVATINYGTSTYYADSVKGRFTISRDNAKNTVYLQMNSLKPEDTAVYYCAVWRGSPDTSWEIFPYWGQGTQVTVSS

SEQ ID NO: 700 - protein, 118 aa, Artificial Sequence
  Chemically Synthesized
QVQLQESGGGLVQAGGSLRLSCAASGYISVAVIMGWYRQAPGKERELVATIGVGSTTYYADSVKGRFTISRDNAKNTVYLQMNSLKPEDTAVYYCAVGSGAYAALGYWGQGTQVTVSS

SEQ ID NO: 701 - protein, 123 aa, Artificial Sequence
  Chemically Synthesized
QVQLQESGGGLVQAGGSLRLSCAASGYISYQSIMGWYRQAPGKERELVATINTGANTNYADSVKGRFTISRDNAKNTVYLQMNSLKPEDTAVYYCAAGEYEETPDNDFLFQYWGQGTQVTVSS

SEQ ID NO: 702 - protein, 118 aa, Artificial Sequence
  Chemically Synthesized
QVQLQESGGGLVQAGGSLRLSCAASGNISSSTSMGWYRQAPGKEREFVASISRGSITNYADSVKGRFTISRDNAKNTVYLQMNSLKPEDTAVYYCAASDDWYALLFYWGQGTQVTVSS

SEQ ID NO: 703 - protein, 118 aa, Artificial Sequence
  Chemically Synthesized
QVQLQESGGGLVQAGGSLRLSCAASGYIFDGQWMGWYRQAPGKEREFVASIDSGSNTYYADSVKGRFTISRDNAKNTVYLQMNSLKPEDTAVYYCAVTKGYGDNLGYWGQGTQVTVSS

SEQ ID NO: 704 - protein, 121 aa, Artificial Sequence
  Chemically Synthesized
QVQLQESGGGLVQAGGSLRLSCAASGNIFWPLMGWYRQAPGKERELVAGIDGGTNTYYADSVKGRFTISRDNAKNTVYLQMNSLKPEDTAVYYCAVDYPNQRDVRRYHGYWGQGTQVTVSS

SEQ ID NO: 705 - protein, 122 aa, Artificial Sequence
  Chemically Synthesized
QVQLQESGGGLVQAGGSLRLSCAASGSISTIYDMGWYRQAPGKEREFVASINDGTTTNYADSVKGRFTISRDNAKNTVYLQMNSLKPEDTAVYYCAVVYDLTSIDNAWHAYWGQGTQVTVSS

SEQ ID NO: 706 - protein, 121 aa, Artificial Sequence
  Chemically Synthesized
QVQLQESGGGLVQAGGSLRLSCAASGYIFGKFMGWYRQAPGKERELVAGISVGSTTYYADSVKGRFTISRDNAKNTVYLQMNSLKPEDTAVYYCAVYIWDVDYDYVYHAYWGQGTQVTVSS

SEQ ID NO: 707 - protein, 117 aa, Artificial Sequence
  Chemically Synthesized
QVQLQESGGGLVQAGGSLRLSCAASGYISNSTDMGWYRQAPGKEREFASIDYGTNTNYADSVKGRFTISRDNAKNTVYLQMNSLKPEDTAVYYCAAVRTWAYAHTYWGQGTQVTVSS

SEQ ID NO: 708 - protein, 121 aa, Artificial Sequence
  Chemically Synthesized
QVQLQESGGGLVQAGGSLRLSCAASGSIFRVLYMGWYRQAPGKEREFVASINRGGSTNYADSVKGRFTISRDNAKNTVYLQMNSLKPEDTAVYYCALLLTICLVTVLLIYWGQGTQVTVSS

SEQ ID NO: 709 - protein, 118 aa, Artificial Sequence
  Chemically Synthesized
QVQLQESGGGLVQAGGSLRLSCAASGTISTDGVMGWYRQAPGKERELVAAISQGGTTYYADSVKGRFTISRDNAKNTVYLQMNSLKPEDTAVYYCAVYASPDKVHDYWGQGTQVTVSS

SEQ ID NO: 710 - protein, 111 aa, Artificial Sequence
  Chemically Synthesized
QVQLQESGGGLVQAGGSLRLSCAASGTISYGDRMGWYRQAPGKEREFVATIGYGSSTNYADSVKGRFTISRDNAKNTVYLQMNSLKPEDTAVYYCAPYDYWGQGTQVTVSS

SEQ ID NO: 711 - protein, 118 aa, Artificial Sequence
  Chemically Synthesized
QVQLQESGGGLVQAGGSLRLSCAASGTIFVDVDMGWYRQAPGKEREFVAGISGGTSTNYADSVKGRFTISRDNAKNTVYLQMNSLKPEDTAVYYCAVFRSAAYVHAYWGQGTQVTVSS

SEQ ID NO: 712 - protein, 115 aa, Artificial Sequence
  Chemically Synthesized
QVQLQESGGGLVQAGGSLRLSCAASGYISLQGSMGWYRQAPGKERELVAGIDVGASTYYADSVKGRFTISRDNAKNTVYLQMNSLKPEDTAVYYCAAYSHSAYYWGQGTQVTVSS

SEQ ID NO: 713 - protein, 118 aa, Artificial Sequence
  Chemically Synthesized
QVQLQESGGGLVQAGGSLRLSCAASGTISGVVVMGWYRQAPGKEREFVASIGNGSITYYADSVKGRFTISRDNAKNTVYLQMNSLKPEDTAVYYCAASPYLPWRHQYWGQGTQVTVSS

SEQ ID NO: 714 - protein, 118 aa, Artificial Sequence
  Chemically Synthesized
QVQLQESGGGLVQAGGSLRLSCAASGTIFGPLDMGWYRQAPGKERELVAAINDGTSTYYADSVKGRFTISRDNAKNTVYLQMNSLKPEDTAVYYCAALDLLRTPHSYWGQGTQVTVSS

SEQ ID NO: 715 - protein, 125 aa, Artificial Sequence
  Chemically Synthesized
QVQLQESGGGLVQAGGSLRLSCAASGYISTGDNMGWYRQAPGKERELVATITLGTTTNYADSVKGRFTISRDNAKNTVYLQMNSLKPEDTAVYYCAVSTTLVFGFRLSTNCCMYWGQGTQVTVSS

SEQ ID NO: 716 - protein, 123 aa, Artificial Sequence
  Chemically Synthesized
QVQLQESGGGLVQAGGSLRLSCAASGSTATGDMGWYRQAPGKEREFVASIDVGSITYYADSVKGRFTISRDNAKNTVYLQMNSLKPEDTAVYYCAVYNYVGLVTYDVGRSIYWGQGTQVTVSS

SEQ ID NO: 717 - protein, 113 aa, Artificial Sequence
  Chemically Synthesized
QVQLQESGGGLVQAGGSLRLSCAASGNIFDRPFMGWYRQAPGKERELVASITGGGITNYADSVKGRFTISRDNAKNTVYLQMNSLKPEDTAVYYCAVDGHDYWGQGTQVTVSS

SEQ ID NO: 718 - protein, 118 aa, Artificial Sequence
  Chemically Synthesized
QVQLQESGGGLVQAGGSLRLSCAASGSIFYHVRMGWYRQAPGKERELVAAISRGASTYYADSVKGRFTISRDNAKNTVYLQMNSLKPEDTAVYYCAVLATNLDWYEYWGQGTQVTVSS

SEQ ID NO: 719 - protein, 109 aa, Artificial Sequence
  Chemically Synthesized
QVQLQESGGGLVQAGGSLRLSCAASGSISRYAYMGWYRQAPGKERELVASINQGANTNYADSVKGRFTISRDNAKNTVYLQMNSLKPEDTAVYYCAVYWGQGTQVTVSS

SEQ ID NO: 720 - protein, 118 aa, Artificial Sequence
  Chemically Synthesized
QVQLQESGGGLVQAGGSLRLSCAASGTIFVRRKMGWYRQAPGKERELVAGIDTGTTTNYADSVKGRFTISRDNAKNTVYLQMNSLKPEDTAVYYCAVAVYGPYEFYYWGQGTQVTVSS

SEQ ID NO: 721 - protein, 119 aa, Artificial Sequence
  Chemically Synthesized
QVQLQESGGGLVQAGGSLRLSCAASGWSVLMGWYRQAPGKERELVATITSGANTYYADSVKGRFTISRDNAKNTVYLQMNSLKPEDTAVYYCAAYDIYVDKDHYDLGYWGQGTQVTVSS

SEQ ID NO: 722 - protein, 121 aa, Artificial Sequence
  Chemically Synthesized
QVQLQESGGGLVQAGGSLRLSCAASGYISTRRMGWYRQAPGKERELVASIGGGGSTNYADSVKGRFTISRDNAKNTVYLQMNSLKPEDTAVYYCAAWAPLRTGYYTQFKYWGQGTQVTVSS

SEQ ID NO: 723 - protein, 118 aa, Artificial Sequence
  Chemically Synthesized
QVQLQESGGGLVQAGGSLRLSCAASGYIFWTPYMGWYRQAPGKERELVAAITQGSNTNYADSVKGRFTISRDNAKNTVYLQMNSLKPEDTAVYYCAAGFKWTHPYDYWGQGTQVTVSS

SEQ ID NO: 724 - protein, 118 aa, Artificial Sequence
  Chemically Synthesized
QVQLQESGGGLVQAGGSLRLSCAASGTIFDWLFMGWYRQAPGKEREFVAGINEGSITNYADSVKGRFTISRDNAKNTVYLQMNSLKPEDTAVYYCAADAQNILSSCYWGQGTQVTVSS

SEQ ID NO: 725 - protein, 118 aa, Artificial Sequence
  Chemically Synthesized
QVQLQESGGGLVQAGGSLRLSCAASGSISDYVIMGWYRQAPGKEREFVATITSGGNTYYADSVKGRFTISRDNAKNTVYLQMNSLKPEDTAVYYCAVYIHVGVNLDYWGQGTQVTVSS

SEQ ID NO: 726 - protein, 118 aa, Artificial Sequence
  Chemically Synthesized
QVQLQESGGGLVQAGGSLRLSCAASGTIFYYRTMGWYRQAPGKEREFVAGINYGASTYYADSVKGRFTISRDNAKNTVYLQMNSLKPEDTAVYYCAVSHLYIYYLKYWGQGTQVTVSS

SEQ ID NO: 727 - protein, 118 aa, Artificial Sequence
  Chemically Synthesized
QVQLQESGGGLVQAGGSLRLSCAASGSISPWLVMGWYRQAPGKERELVATINDGSITNYADSVKGRFTISRDNAKNTVYLQMNSLKPEDTAVYYCAVDDDGHPTSCYWGQGTQVTVSS

SEQ ID NO: 728 - protein, 117 aa, Artificial Sequence
  Chemically Synthesized
QVQLQESGGGLVQAGGSLRLSCAASGSIFFDYDMGWYRQAPGKEREFVAAISLGAITNYADSVKGRFTISRDNAKNTVYLQMNSLKPEDTAVYYCAAPLSLLTTLYWGQGTQVTVSS

SEQ ID NO: 729 - protein, 118 aa, Artificial Sequence
  Chemically Synthesized
QVQLQESGGGLVQAGGSLRLSCAASGYISNQYLMGWYRQAPGKERELVAAINTGATTYYADSVKGRFTISRDNAKNTVYLQMNSLKPEDTAVYYCAAPTSPKTTFSYWGQGTQVTVSS

SEQ ID NO: 730 - protein, 118 aa, Artificial Sequence
  Chemically Synthesized
QVQLQESGGGLVQAGGSLRLSCAASGYISWARYMGWYRQAPGKEREFVASIDYGGNTNYADSVKGRFTISRDNAKNTVYLQMNSLKPEDTAVYYCAVQLIRYLYHGYWGQGTQVTVSS

SEQ ID NO: 731 - protein, 118 aa, Artificial Sequence
  Chemically Synthesized
QVQLQESGGGLVQAGGSLRLSCAASGYIFTHRSMGWYRQAPGKEREFVATIGFGTNTYYADSVKGRFTISRDNAKNTVYLQMNSLKPEDTAVYYCAVRTDDAQHHAYWGQGTQVTVSS

SEQ ID NO: 732 - protein, 118 aa, Artificial Sequence
  Chemically Synthesized
QVQLQESGGGLVQAGGSLRLSCAASGNISASYYMGWYRQAPGKEREFVATISEGSSTYYADSVKGRFTISRDNAKNTVYLQMNSLKPEDTAVYYCAARRYDDAEFTYWGQGTQVTVSS

SEQ ID NO: 733 - protein, 111 aa, Artificial Sequence
  Chemically Synthesized
QVQLQESGGGLVQAGGSLRLSCAASGTISTYRSMGWYRQAPGKERELVAGISNGTITYYADSVKGRFTISRDNAKNTVYLQMNSLKPEDTAVYYCAVCLYWGQGTQVTVSS

SEQ ID NO: 734 - protein, 122 aa, Artificial Sequence
  Chemically Synthesized
QVQLQESGGGLVQAGGSLRLSCAASGYISADRDMGWYRQAPGKERELVASIGYGSNTNYADSVKGRFTISRDNAKNTVYLQMNSLKPEDTAVYYCAVQAEGDDNNKQAYYYWGQGTQVTVSS

SEQ ID NO: 735 - protein, 122 aa, Artificial Sequence
  Chemically Synthesized
QVQLQESGGGLVQAGGSLRLSCAASGTIFATLDMGWYRQAPGKERELVAAIDSGANTNYADSVKGRFTISRDNAKNTVYLQMNSLKPEDTAVYYCAAPGDIDDYRYSAFGYWGQGTQVTVSS

SEQ ID NO: 736 - protein, 118 aa, Artificial Sequence
  Chemically Synthesized
QVQLQESGGGLVQAGGSLRLSCAASGYISHLGAMGWYRQAPGKERELVASISFGGSTYYADSVKGRFTISRDNAKNTVYLQMNSLKPEDTAVYYCAAGGYQDLRYYYWGQGTQVTVSS

SEQ ID NO: 737 - protein, 117 aa, Artificial Sequence
  Chemically Synthesized
QVQLQESGGGLVQAGGSLRLSCAASGYISWSTMGWYRQAPGKEREFVASIAYGTTTYYADSVKGRFTISRDNAKNTVYLQMNSLKPEDTAVYYCAASNSQDDLHTYWGQGTQVTVSS

SEQ ID NO: 738 - protein, 118 aa, Artificial Sequence
  Chemically Synthesized
QVQLQESGGGLVQAGGSLRLSCAASGNIFKWHWMGWYRQAPGKERELVATIATGATTNYADSVKGRFTISRDNAKNTVYLQMNSLKPEDTAVYYCAVRYYHYGAFDYWGQGTQVTVSS

SEQ ID NO: 739 - protein, 118 aa, Artificial Sequence
  Chemically Synthesized
QVQLQESGGGLVQAGGSLRLSCAASGTIFHGLPMGWYRQAPGKERELVAGITDGATTNYADSVKGRFTISRDNAKNTVYLQMNSLKPEDTAVYYCAVIYYADVLHYYWGQGTQVTVSS

SEQ ID NO: 740 - protein, 121 aa, Artificial Sequence
  Chemically Synthesized
QVQLQESGGGLVQAGGSLRLSCAASGYISLGTYMGWYRQAPGKERELVAAMIMVLLPYADSVKGRFTISRDNAKNTVYLQMNSLKPEDTAVYYCAVDEQGNAVEDLKHEYWGQGTQVTVSS

SEQ ID NO: 741 - protein, 118 aa, Artificial Sequence
  Chemically Synthesized
QVQLQESGGGLVQAGGSLRLSCAASGNISYYIKMGWYRQAPGKERELVAGIAVGSTTYYADSVKGRFTISRDNAKNTVYLQMNSLKPEDTAVYYCAADQGVYADYLYWGQGTQVTVSS

SEQ ID NO: 742 - protein, 116 aa, Artificial Sequence
  Chemically Synthesized
QVQLQESGGGLVQAGGSLRLSCAASGTISYRRPMGWYRQAPGKEREFVAILVVVLPYADSVKGRFTISRDNAKNTVYLQMNSLKPEDTAVYYCAAYRSWSPFFAYWGQGTQVTVSS

SEQ ID NO: 743 - protein, 118 aa, Artificial Sequence
  Chemically Synthesized
QVQLQESGGGLVQAGGSLRLSCAASGSIFAPYSMGWYRQAPGKEREFVASINAGGSTNYADSVKGRFTISRDNAKNTVYLQMNSLKPEDTAVYYCAARLKWLPWLNYWGQGTQVTVSS

SEQ ID NO: 744 - protein, 121 aa, Artificial Sequence
  Chemically Synthesized
QVQLQESGGGLVQAGGSLRLSCAASGSIFVPNDMGWYRQAPGKEREFVAGIAAGTSTNYADSVKGRFTISRDNAKNTVYLQMNSLKPEDTAVYYCAVEPDYPAILDDHYYWGQGTQVTVSS

SEQ ID NO: 745 - protein, 125 aa, Artificial Sequence
  Chemically Synthesized
QVQLQESGGGLVQAGGSLRLSCAASGNISAVPYMGWYRQAPGKEREFVATINLGATTNYADSVKGRFTISRDNAKNTVYLQMNSLKPEDTAVYYCAAYYLNDGTADYESPFHDYWGQGTQVTVSS

SEQ ID NO: 746 - protein, 118 aa, Artificial Sequence
  Chemically Synthesized
QVQLQESGGGLVQAGGSLRLSCAASGSIFGTYGMGWYRQAPGKERELVASIGIGSITYYADSVKGRFTISRDNAKNTVYLQMNSLKPEDTAVYYCAVYSYITYYFRYWGQGTQVTVSS

SEQ ID NO: 747 - protein, 122 aa, Artificial Sequence
  Chemically Synthesized
QVQLQESGGGLVQAGGSLRLSCAASGNISYGQVMGWYRQAPGKEREFVATITDGTITNYADSVKGRFTISRDNAKNTVYLQMNSLKPEDTAVYYCAAWYDVIEPLTLPVLYWGQGTQVTVSS

SEQ ID NO: 748 - protein, 126 aa, Artificial Sequence
  Chemically Synthesized
QVQLQESGGGLVQAGGSLRLSCAASGYISEDTTMGWYRQAPGKERELVATIDPGGNTYYADSVKGRFTISRDNAKNTVYLQMNSLKPEDTAVYYCAAGGLSYRSRAGYSAYDYRYWGQGTQVTVSS

SEQ ID NO: 749 - protein, 118 aa, Artificial Sequence
  Chemically Synthesized
QVQLQESGGGLVQAGGSLRLSCAASGYISTRDRMGWYRQAPGKEREFVATIDGGTITNYADSVKGRFTISRDNAKNTVYLQMNSLKPEDTAVYYCAVVTPSGYSYDYWGQGTQVTVSS

SEQ ID NO: 750 - protein, 118 aa, Artificial Sequence
  Chemically Synthesized
QVQLQESGGGLVQAGGSLRLSCAASGNISIPNTMGWYRQAPGKERELVAGIGYGGITYYADSVKGRFTISRDNAKNTVYLQMNSLKPEDTAVYYCAVQSASRYYLSYWGQGTQVTVSS

SEQ ID NO: 751 - protein, 118 aa, Artificial Sequence
  Chemically Synthesized
QVQLQESGGGLVQAGGSLRLSCAASGNISPYGVMGWYRQAPGKERELVATITNGGSTYYADSVKGRFTISRDNAKNTVYLQMNSLKPEDTAVYYCAAGASSTVTTLYWGQGTQVTVSS

SEQ ID NO: 752 - protein, 113 aa, Artificial Sequence
  Chemically Synthesized
QVQLQESGGGLVQAGGSLRLSCAASGNISLPGVMGWYRQAPGKEREFVATIARGGNTYADSVKGRFTISRDNAKNTVYLQMNSLKPEDTAVYYCAIDYYHGYWGQGTQVTVSS

SEQ ID NO: 753 - protein, 122 aa, Artificial Sequence
  Chemically Synthesized
QVQLQESGGGLVQAGGSLRLSCAASGTIFSLKIMGWYRQAPGKERELVATIDKGGTTYYADSVKGRFTISRDNAKNTVYLQMNSLKPEDTAVYYCAAYDDPFGPIISYHYYWGQGTQVTVSS

SEQ ID NO: 754 - protein, 117 aa, Artificial Sequence
  Chemically Synthesized
QVQLQESGGGLVQAGGSLRLSCAASGNIFGTFNMGWYRQAPGKERELVASISSVLVPYADSVKGRFTISRDNAKNTVYLQMNSLKPEDTAVYYCAVPYSDGARHGYWGQGTQVTVSS

SEQ ID NO: 755 - protein, 118 aa, Artificial Sequence
  Chemically Synthesized
QVQLQESGGGLVQAGGSLRLSCAASGTISYVTGMGWYRQAPGKEREFVAGIGEGGTTNYADSVKGRFTISRDNAKNTVYLQMNSLKPEDTAVYYCAAYYVDDPSHPYWGQGTQVTVSS

SEQ ID NO: 756 - protein, 118 aa, Artificial Sequence
  Chemically Synthesized
QVQLQESGGGLVQAGGSLRLSCAASGSIFYWLQMGWYRQAPGKERELVATIGQGTITYYADSVKGRFTISRDNAKNTVYLQMNSLKPEDTAVYYCAADYGIRYDFYYWGQGTQVTVSS

SEQ ID NO: 757 - protein, 121 aa, Artificial Sequence
  Chemically Synthesized
QVQLQESGGGLVQAGGSLRLSCAASGNISKHVGMGWYRQAPGKERELVAGITNGGSTYYADSVKGRFTISRDNAKNTVYLQMNSLKPEDTAVYYCAAPYRASTTTTVFIYWGQGTQVTVSS

SEQ ID NO: 758 - protein, 118 aa, Artificial Sequence
  Chemically Synthesized
QVQLQESGGGLVQAGGSLRLSCAASGSISPRLFMGWYRQAPGKERELVASINDGSSTNYADSVKGRFTISRDNAKNTVYLQMNSLKPEDTAVYYCAAFPLPYYLHAYWGQGTQVTVSS

SEQ ID NO: 759 - protein, 109 aa, Artificial Sequence
  Chemically Synthesized
QVQLQESGGGLVQAGGSLRLSCAASGSISRESRMGWYRQAPGKERELVATIAEGGSTNYADSVKGRFTISRDNAKNTVYLQMNSLKPEDTAVYYCAVYWGQGTQVTVSS

SEQ ID NO: 760 - protein, 118 aa, Artificial Sequence
  Chemically Synthesized
QVQLQESGGGLVQAGGSLRLSCAASGYIFPDFFMGWYRQAPGKERELVASITGGTTTYYADSVKGRFTISRDNAKNTVYLQMNSLKPEDTAVYYCAANSYVRYIYDYWGQGTQVTVSS

SEQ ID NO: 761 - protein, 117 aa, Artificial Sequence
  Chemically Synthesized
QVQLQESGGGLVQAGGSLRLSCAASGTISRTLSMGWYRQAPGKERELVATITDGAITNYADSVKGRFTISRDNAKNTVYLQMNSLKPEDTAVYYCAVWDIDTTVMYWGQGTQVTVSS

SEQ ID NO: 762 - protein, 122 aa, Artificial Sequence
  Chemically Synthesized
QVQLQESGGGLVQAGGSLRLSCAASGTISETDVMGWYRQAPGKERELVATIGDGSSTNYADSVKGRFTISRDNAKNTVYLQMNSLKPEDTAVYYCAAAWEVKWFRDDLHPYWGQGTQVTVSS

SEQ ID NO: 763 - protein, 112 aa, Artificial Sequence
  Chemically Synthesized
QVQLQESGGGLVQAGGSLRLSCAASGTISYIRLMGWYRQAPGKERELVAGIGWGGSTNYADSVKGRFTISRDNAKNTVYLQMNSLKPEDTAVYYCADYHYYWGQGTQVTVSS

SEQ ID NO: 764 - protein, 117 aa, Artificial Sequence
  Chemically Synthesized
QVQLQESGGGLVQAGGSLRLSCAASGTIFLVTMGWYRQAPGKERELVATIGIGATTYYADSVKGRFTISRDNAKNTVYLQMNSLKPEDTAVYYCAAVNNYIGNLAYWGQGTQVTVSS

SEQ ID NO: 765 - protein, 122 aa, Artificial Sequence
  Chemically Synthesized
QVQLQESGGGLVQAGGSLRLSCAASGYISATFSMGWYRQAPGKERELVAAISGGANTNYADSVKGRFTISRDNAKNTVYLQMNSLKPEDTAVYYCAATSNASRQSSQRYSYWGQGTQVTVSS

SEQ ID NO: 766 - protein, 125 aa, Artificial Sequence
  Chemically Synthesized
QVQLQESGGGLVQAGGSLRLSCAASGSISDKYTMGWYRQAPGKEREFVASINPGATTNYADSVKGRFTISRDNAKNTVYLQMNSLKPEDTAVYYCAVVDRSHSGNSTTTVVTMYWGQGTQVTVSS

SEQ ID NO: 767 - protein, 122 aa, Artificial Sequence
  Chemically Synthesized
QVQLQESGGGLVQAGGSLRLSCAASGYIFYPAIMGWYRQAPGKERELVASIAWGGITYYADSVKGRFTISRDNAKNTVYLQMNSLKPEDTAVYYCAVDDGLLRAYWADYEYWGQGTQVTVSS

SEQ ID NO: 768 - protein, 126 aa, Artificial Sequence
  Chemically Synthesized
QVQLQESGGGLVQAGGSLRLSCAASGTIFPYPLMGWYRQAPGKEREFVASINEGSTTNYADSVKGRFTISRDNAKNTVYLQMNSLKPEDTAVYYCAVNYVSELYDDYTYRGWYAYWGQGTQVTVSS

SEQ ID NO: 769 - protein, 118 aa, Artificial Sequence
  Chemically Synthesized
QVQLQESGGGLVQAGGSLRLSCAASGTISVYDVMGWYRQAPGKEREFVAAIDTGGTTNYADSVKGRFTISRDNAKNTVYLQMNSLKPEDTAVYYCAAYVRNTSGHFYWGQGTQVTVSS

SEQ ID NO: 770 - protein, 121 aa, Artificial Sequence
  Chemically Synthesized
QVQLQESGGGLVQAGGSLRLSCAASGNISAAPYMGWYRQAPGKEREFVATIDYGASTYYADSVKGRFTISRDNAKNTVYLQMNSLKPEDTAVYYCAAGLPDLYYGSSSLYWGQGTQVTVSS

SEQ ID NO: 771 - protein, 118 aa, Artificial Sequence
  Chemically Synthesized
QVQLQESGGGLVQAGGSLRLSCAASGYISRTGRMGWYRQAPGKEREFVAGIAQGTITNYADSVKGRFTISRDNAKNTVYLQMNSLKPEDTAVYYCAVRNWLDIGHAYWGQGTQVTVSS

SEQ ID NO: 772 - protein, 112 aa, Artificial Sequence
  Chemically Synthesized
QVQLQESGGGLVQAGGSLRLSCAASGSMGWYRQAPGKEREFVATIADGTSTYYADSVKGRFTISRDNAKNTVYLQMNSLKPEDTAVYYCAVYVYTNPFLTYWGQGTQVTVSS

SEQ ID NO: 773 - protein, 118 aa, Artificial Sequence
  Chemically Synthesized
QVQLQESGGGLVQAGGSLRLSCAASGSISTDDFMGWYRQAPGKERELVASIAFGGNTYYADSVKGRFTISRDNAKNTVYLQMNSLKPEDTAVYYCAVDYIIRNWHDYWGQGTQVTVSS

SEQ ID NO: 774 - protein, 118 aa, Artificial Sequence
  Chemically Synthesized
QVQLQESGGGLVQAGGSLRLSCAASGNIFYAADMGWYRQAPGKEREFVAGITYGSSTNYADSVKGRFTISRDNAKNTVYLQMNSLKPEDTAVYYCAATHDVQDLLVYWGQGTQVTVSS

SEQ ID NO: 775 - protein, 116 aa, Artificial Sequence
  Chemically Synthesized
QVQLQESGGGLVQAGGSLRLSCAASGTIPMGWYRQAPGKERELVAAIGGGSTNYADSVKGRFTISRDNAKNTVYLQMNSLKPEDTAVYYCAVKRDDDVDYSTTMYWGQGTQVTVSS

SEQ ID NO: 776 - protein, 125 aa, Artificial Sequence
  Chemically Synthesized
QVQLQESGGGLVQAGGSLRLSCAASGTIFTSTMGWYRQAPGKERELVAAIAYGTSTYYADSVKGRFTISRDNAKNTVYLQMNSLKPEDTAVYYCAAVYALSSIEKTDDSEILQYWGQGTQVTVSS

SEQ ID NO: 777 - protein, 118 aa, Artificial Sequence
  Chemically Synthesized
QVQLQESGGGLVQAGGSLRLSCAASGYIFDDGGMGWYRQAPGKEREFVAGIDYGGSTNYADSVKGRFTISRDNAKNTVYLQMNSLKPEDTAVYYCAVPRDLDRQYWYWGQGTQVTVSS

SEQ ID NO: 778 - protein, 121 aa, Artificial Sequence
  Chemically Synthesized
QVQLQESGGGLVQAGGSLRLSCAASGTISSSGTMGWYRQAPGKERELLPVLVRVLLPYADSVKGRFTISRDNAKNTVYLQMNSLKPEDTAVYYCAAYDQTWTGALYGHDYWGQGTQVTVSS

SEQ ID NO: 779 - protein, 122 aa, Artificial Sequence
  Chemically Synthesized
QVQLQESGGGLVQAGGSLRLSCAASGNISGDTLMGWYRQAPGKEREFVAGISTGATTYYADSVKGRFTISRDNAKNTVYLQMNSLKPEDTAVYYCAVLYRGPYYVRGSHGYWGQGTQVTVSS

SEQ ID NO: 780 - protein, 118 aa, Artificial Sequence
  Chemically Synthesized
QVQLQESGGGLVQAGGSLRLSCAASGNISTYVAMGWYRQAPGKERELVASINDGTNTNYADSVKGRFTISRDNAKNTVYLQMNSLKPEDTAVYYCAVVREYLTIHAYWGQGTQVTVSS

SEQ ID NO: 781 - protein, 115 aa, Artificial Sequence
  Chemically Synthesized
QVQLQESGGGLVQAGGSLRLSCAASGSISATGSMGWYRQAPGKERELVVVSVVLPYADSVKGRFTISRDNAKNTVYLQMNSLKPEDTAVYYCAADPWILGWHSYWGQGTQVTVSS

SEQ ID NO: 782 - protein, 118 aa, Artificial Sequence
  Chemically Synthesized
QVQLQESGGGLVQAGGSLRLSCAASGSIFYLLNMGWYRQAPGKEREFVATIADGGNTYYADSVKGRFTISRDNAKNTVYLQMNSLKPEDTAVYYCAVGTAYRDHHSYWGQGTQVTVSS

SEQ ID NO: 783 - protein, 122 aa, Artificial Sequence
  Chemically Synthesized
QVQLQESGGGLVQAGGSLRLSCAASGNIFDGSYMGWYRQAPGKEREFVATISPGGITNYADSVKGRFTISRDNAKNTVYLQMNSLKPEDTAVYYCAAEGADASTTGDQLRYWGQGTQVTVSS

SEQ ID NO: 784 - protein, 120 aa, Artificial Sequence
  Chemically Synthesized
QVQLQESGGGLVQAGGSLRLSCAASGSISTWLMGWYRQAPGKERELVATITTGATTNYADSVKGRFTISRDNAKNTVYLQMNSLKPEDTAVYYCAAVGYYVDRTKRHRYWGQGTQVTVSS

SEQ ID NO: 785 - protein, 118 aa, Artificial Sequence
  Chemically Synthesized
QVQLQESGGGLVQAGGSLRLSCAASGNISYTLNMGWYRQAPGKERELVASIDSGGNTYYADSVKGRFTISRDNAKNTVYLQMNSLKPEDTAVYYCAVGPFDRYVHWYWGQGTQVTVSS

SEQ ID NO: 786 - protein, 126 aa, Artificial Sequence
  Chemically Synthesized
QVQLQESGGGLVQAGGSLRLSCAASGYIFSTYYMGWYRQAPGKEREFVAAIDDGATTNYADSVKGRFTISRDNAKNTVYLQMNSLKPEDTAVYYCAAWTTLYWSDGLRGYYIHDYWGQGTQVTVSS

SEQ ID NO: 787 - protein, 118 aa, Artificial Sequence
  Chemically Synthesized
QVQLQESGGGLVQAGGSLRLSCAASGNISGVVYMGWYRQAPGKERELVAGINTGGITNYADSVKGRFTISRDNAKNTVYLQMNSLKPEDTAVYYCAVVDFAYHGYVYWGQGTQVTVSS

SEQ ID NO: 788 - protein, 118 aa, Artificial Sequence
  Chemically Synthesized
QVQLQESGGGLVQAGGSLRLSCAASGTIFGGNSMGWYRQAPGKEREFVATISQGGSTYYADSVKGRFTISRDNAKNTVYLQMNSLKPEDTAVYYCAVTPSPHRLFTYWGQGTQVTVSS

SEQ ID NO: 789 - protein, 110 aa, Artificial Sequence
  Chemically Synthesized
QVQLQESGGGLVQAGGSLRLSCAASGNIFLQDIMGWYRQAPGKERELVASISAGASTNYADSVKGRFTISRDNAKNTVYLQMNSLKPEDTAVYYCAAWYWGQGTQVTVSS

SEQ ID NO: 790 - protein, 126 aa, Artificial Sequence
  Chemically Synthesized
QVQLQESGGGLVQAGGSLRLSCAASGTIFAGQAMGWYRQAPGKERELVATIAWGTTTYYADSVKGRFTISRDNAKNTVYLQMNSLKPEDTAVYYCAANYGYVRVWSIDDSLGFEYWGQGTQVTVSS

SEQ ID NO: 791 - protein, 118 aa, Artificial Sequence
  Chemically Synthesized
QVQLQESGGGLVQAGGSLRLSCAASGNIFYRYVMGWYRQAPGKEREFVASIDYGANTNYADSVKGRFTISRDNAKNTVYLQMNSLKPEDTAVYYCAVNVRYQSAHLYWGQGTQVTVSS

SEQ ID NO: 792 - protein, 118 aa, Artificial Sequence
  Chemically Synthesized
QVQLQESGGGLVQAGGSLRLSCAASGTIFPDNYMGWYRQAPGKEREFVAGIAYGANTNYADSVKGRFTISRDNAKNTVYLQMNSLKPEDTAVYYCAANYGTGLPLGYWGQGTQVTVSS

SEQ ID NO: 793 - protein, 122 aa, Artificial Sequence
  Chemically Synthesized
QVQLQESGGGLVQAGGSLRLSCAASGTISLLRYMGWYRQAPGKERELVASIDRGGTTNYADSVKGRFTISRDNAKNTVYLQMNSLKPEDTAVYYCAADDTLGGGVDYGYYYWGQGTQVTVSS

SEQ ID NO: 794 - protein, 122 aa, Artificial Sequence
  Chemically Synthesized
QVQLQESGGGLVQAGGSLRLSCAASGYIFAYYSMGWYRQAPGKERELVASITSGATTYYADSVKGRFTISRDNAKNTVYLQMNSLKPEDTAVYYCAVPYAYAGDYPGYHAYWGQGTQVTVSS

SEQ ID NO: 795 - protein, 122 aa, Artificial Sequence
  Chemically Synthesized
QVQLQESGGGLVQAGGSLRLSCAASGNISYGDYMGWYRQAPGKEREFVAAITPGTITYYADSVKGRFTISRDNAKNTVYLQMNSLKPEDTAVYYCAATAWTPNTRHTDHDYWGQGTQVTVSS

SEQ ID NO: 796 - protein, 118 aa, Artificial Sequence
  Chemically Synthesized
QVQLQESGGGLVQAGGSLRLSCAASGNISYPLYMGWYRQAPGKERELVAAIGAGTSTNYADSVKGRFTISRDNAKNTVYLQMNSLKPEDTAVYYCAVKLYFIANYSYWGQGTQVTVSS

SEQ ID NO: 797 - protein, 117 aa, Artificial Sequence
  Chemically Synthesized
QVQLQESGGGLVQAGGSLRLSCAASGSISSYRTMGWYRQAPGKEREFVAGITDGSSTNYADSVKGRFTISRDNAKNTVYLQMNSLKPEDTAVYYCAAVRSLTRVFYWGQGTQVTVSS

SEQ ID NO: 798 - protein, 126 aa, Artificial Sequence
  Chemically Synthesized
QVQLQESGGGLVQAGGSLRLSCAASGSISRDLRMGWYRQAPGKEREFVATIGYGGITNYADSVKGRFTISRDNAKNTVYLQMNSLKPEDTAVYYCAVDLAAVSLDSYPSPSGHAYWGQGTQVTVSS

SEQ ID NO: 799 - protein, 118 aa, Artificial Sequence
  Chemically Synthesized
QVQLQESGGGLVQAGGSLRLSCAASGNISDLVVMGWYRQAPGKEREFVAAIDAGSTTNYADSVKGRFTISRDNAKNTVYLQMNSLKPEDTAVYYCAVVHPKYVYFYYWGQGTQVTVSS

SEQ ID NO: 800 - protein, 118 aa, Artificial Sequence
  Chemically Synthesized
QVQLQESGGGLVQAGGSLRLSCAASGTIFRPPDMGWYRQAPGKERELVAGIASGASTNYADSVKGRFTISRDNAKNTVYLQMNSLKPEDTAVYYCAAYGHAWTQYDYWGQGTQVTVSS

SEQ ID NO: 801 - protein, 124 aa, Artificial Sequence
  Chemically Synthesized
QVQLQESGGGLVQAGGSLRLSCAASGSIFTLLMGWYRQAPGKERELVAAITGGSSTYYADSVKGRFTISRDNAKNTVYLQMNSLKPEDTAVYYCAAVYRDYYSYPVDEGAFQYWGQGTQVTVSS

SEQ ID NO: 802 - protein, 125 aa, Artificial Sequence
  Chemically Synthesized
QVQLQESGGGLVQAGGSLRLSCAASGSIFRTSMGWYRQAPGKERELVAAIGGGTSTNYADSVKGRFTISRDNAKNTVYLQMNSLKPEDTAVYYCAVSDDGWYLESYLYLYSFYYWGQGTQVTVSS

SEQ ID NO: 803 - protein, 122 aa, Artificial Sequence
  Chemically Synthesized
QVQLQESGGGLVQAGGSLRLSCAASGNISDSEGMGWYRQAPGKEREFVASINYGTNTYYADSVKGRFTISRDNAKNTVYLQMNSLKPEDTAVYYCAVNVAAPRYYPTYHYYWGQGTQVTVSS

SEQ ID NO: 804 - protein, 121 aa, Artificial Sequence
  Chemically Synthesized
QVQLQESGGGLVQAGGSLRLSCAASGTISSTTMGWYRQAPGKEREFVASIAGGSITNYADSVKGRFTISRDNAKNTVYLQMNSLKPEDTAVYYCAVRSPRGYAWIDRFDYWGQGTQVTVSS

SEQ ID NO: 805 - protein, 118 aa, Artificial Sequence
  Chemically Synthesized
QVQLQESGGGLVQAGGSLRLSCAASGSIFDRREMGWYRQAPGKERELVAAIDKGANTNYADSVKGRFTISRDNAKNTVYLQMNSLKPEDTAVYYCAVVRPYIDYFAYWGQGTQVTVSS

SEQ ID NO: 806 - protein, 122 aa, Artificial Sequence
  Chemically Synthesized
QVQLQESGGGLVQAGGSLRLSCAASGNISHVDYMGWYRQAPGKEREFVAAIAFGGITYYADSVKGRFTISRDNAKNTVYLQMNSLKPEDTAVYYCAVIYQPYDGYPTHHYYWGQGTQVTVSS

SEQ ID NO: 807 - protein, 122 aa, Artificial Sequence
  Chemically Synthesized
QVQLQESGGGLVQAGGSLRLSCAASGNIFSYRGMGWYRQAPGKERELVAGIGDGSSTNYADSVKGRFTISRDNAKNTVYLQMNSLKPEDTAVYYCAVTWDAKGPRSQIFPYWGQGTQVTVSS

SEQ ID NO: 808 - protein, 118 aa, Artificial Sequence
  Chemically Synthesized
QVQLQESGGGLVQAGGSLRLSCAASGTIFQYVGMGWYRQAPGKERELVAAIDTGANTYYADSVKGRFTISRDNAKNTVYLQMNSLKPEDTAVYYCAALSPKDRPFHYWGQGTQVTVSS

SEQ ID NO: 809 - protein, 122 aa, Artificial Sequence
  Chemically Synthesized
QVQLQESGGGLVQAGGSLRLSCAASGTIFLDYAMGWYRQAPGKERELVASIGYGGTTNYADSVKGRFTISRDNAKNTVYLQMNSLKPEDTAVYYCAVPYAHYRPHREYYRYWGQGTQVTVSS

SEQ ID NO: 810 - protein, 120 aa, Artificial Sequence
  Chemically Synthesized
QVQLQESGGGLVQAGGSLRLSCAASGSIFDAYIMGWYRQAPGKEREFVATIDDGIPYADSVKGRFTISRDNAKNTVYLQMNSLKPEDTAVYYCAAEYSSDVVDTVYFYYWGQGTQVTVSS

SEQ ID NO: 811 - protein, 118 aa, Artificial Sequence
  Chemically Synthesized
QVQLQESGGGLVQAGGSLRLSCAASGTIFFTVLMGWYRQAPGKEREFVASIASGSTTNYADSVKGRFTISRDNAKNTVYLQMNSLKPEDTAVYYCAANYPTYPYHSYWGQGTQVTVSS

SEQ ID NO: 812 - protein, 122 aa, Artificial Sequence
  Chemically Synthesized
QVQLQESGGGLVQAGGSLRLSCAASGTISPWAVMGWYRQAPGKEREFVAAIDVGASTNYADSVKGRFTISRDNAKNTVYLQMNSLKPEDTAVYYCAVDHLYAGSRDIRYRYWGQGTQVTVSS

SEQ ID NO: 813 - protein, 117 aa, Artificial Sequence
  Chemically Synthesized
QVQLQESGGGLVQAGGSLRLSCAASGTISDQYRMGWYRQAPGKEREFVATINRGTNTYYADSVKGRFTISRDNAKNTVYLQMNSLKPEDTAVYYCAADNSLNGTMYWGQGTQVTVSS

SEQ ID NO: 814 - protein, 126 aa, Artificial Sequence
  Chemically Synthesized
QVQLQESGGGLVQAGGSLRLSCAASGTIFADWNMGWYRQAPGKERELVAAISPGSNTNYADSVKGRFTISRDNAKNTVYLQMNSLKPEDTAVYYCAVTVYDQLYVFLGIGSGHQYWGQGTQVTVSS

SEQ ID NO: 815 - protein, 122 aa, Artificial Sequence
  Chemically Synthesized
QVQLQESGGGLVQAGGSLRLSCAASGNISRYTYMGWYRQAPGKEREFVAAISYGTITNYADSVKGRFTISRDNAKNTVYLQMNSLKPEDTAVYYCAAYIYDPWSAYEQHVYWGQGTQVTVSS

SEQ ID NO: 816 - protein, 118 aa, Artificial Sequence
  Chemically Synthesized
QVQLQESGGGLVQAGGSLRLSCAASGNIFYWRRMGWYRQAPGKERELVAAITYGAITYYADSVKGRFTISRDNAKNTVYLQMNSLKPEDTAVYYCAVWYRWPKTLYYWGQGTQVTVSS

SEQ ID NO: 817 - protein, 118 aa, Artificial Sequence
  Chemically Synthesized
QVQLQESGGGLVQAGGSLRLSCAASGTISSAAYMGWYRQAPGKERELVAAIAPGSTTNYADSVKGRFTISRDNAKNTVYLQMNSLKPEDTAVYYCAVESQSVSPLLYWGQGTQVTVSS

SEQ ID NO: 818 - protein, 118 aa, Artificial Sequence
  Chemically Synthesized
QVQLQESGGGLVQAGGSLRLSCAASGTIFPHSMGWYRQAPGKERELVASITYGDYADSVKGRFTISRDNAKNTVYLQMNSLKPEDTAVYYCAAYRLQYYYLRQRHQYWGQGTQVTVSS

SEQ ID NO: 819 - protein, 118 aa, Artificial Sequence
  Chemically Synthesized
QVQLQESGGGLVQAGGSLRLSCAASGSIFISGYMGWYRQAPGKERELVATIAYGSSTYYADSVKGRFTISRDNAKNTVYLQMNSLKPEDTAVYYCAATNDGDGIHRYWGQGTQVTVSS

SEQ ID NO: 820 - protein, 122 aa, Artificial Sequence
  Chemically Synthesized
QVQLQESGGGLVQAGGSLRLSCAASGTISGTAHMGWYRQAPGKEREFVASINPGATTNYADSVKGRFTISRDNAKNTVYLQMNSLKPEDTAVYYCAVYFYAVYSVYLGHRYWGQGTQVTVSS

SEQ ID NO: 821 - protein, 118 aa, Artificial Sequence
  Chemically Synthesized
QVQLQESGGGLVQAGGSLRLSCAASGTIFLYYHMGWYRQAPGKEREFVAGISIGGITYYADSVKGRFTISRDNAKNTVYLQMNSLKPEDTAVYYCAVKGVPFLTHDYWGQGTQVTVSS

SEQ ID NO: 822 - protein, 117 aa, Artificial Sequence
  Chemically Synthesized
QVQLQESGGGLVQAGGSLRLSCAASGYIFQRYKMGWYRQAPGKERELLPLLVTVLIPYADSVKGRFTISRDNAKNTVYLQMNSLKPEDTAVYYCAATYIVTSVLLYWGQGTQVTVSS

SEQ ID NO: 823 - protein, 116 aa, Artificial Sequence
  Chemically Synthesized
QVQLQESGGGLVQAGGSLRLSCAASGSISGDTMGWYRQAPGKERELVAILLTVLLPYADSVKGRFTISRDNAKNTVYLQMNSLKPEDTAVYYCAVYTVSIVDFTYWGQGTQVTVSS

SEQ ID NO: 824 - protein, 122 aa, Artificial Sequence
  Chemically Synthesized
QVQLQESGGGLVQAGGSLRLSCAASGTISAVDGMGWYRQAPGKEREFVATISRGGSTNYADSVKGRFTISRDNAKNTVYLQMNSLKPEDTAVYYCAVQYDRNQVVYAVHRYWGQGTQVTVSS

SEQ ID NO: 825 - protein, 113 aa, Artificial Sequence
  Chemically Synthesized
QVQLQESGGGLVQAGGSLRLSCAASGNISSDNYMGWYRQAPGKERELVAAINKGSTTNYADSVKGRFTISRDNAKNTVYLQMNSLKPEDTAVYYCADRLASYWGQGTQVTVSS

SEQ ID NO: 826 - protein, 110 aa, Artificial Sequence
  Chemically Synthesized
QVQLQESGGGLVQAGGSLRLSCAASGYISTYSNMGWYRQAPGKERELVAAIDHGAITYYADSVKGRFTISRDNAKNTVYLQMNSLKPEDTAVYYCAAWYWGQGTQVTVSS

SEQ ID NO: 827 - protein, 118 aa, Artificial Sequence
  Chemically Synthesized
QVQLQESGGGLVQAGGSLRLSCAASGYIFSYIDMGWYRQAPGKERELVASIGNGTTTNYADSVKGRFTISRDNAKNTVYLQMNSLKPEDTAVYYCAVDDNFLDSACYWGQGTQVTVSS

SEQ ID NO: 828 - protein, 121 aa, Artificial Sequence
  Chemically Synthesized
QVQLQESGGGLVQAGGSLRLSCAASGNISYTYTMGWYRQAPGKERELVATIGLGTSTYYADSVKGRFTISRDNAKNTVYLQMNSLKPEDTAVYYCAAYHSRYGYNFRSFYWGQGTQVTVSS

SEQ ID NO: 829 - protein, 118 aa, Artificial Sequence
  Chemically Synthesized
QVQLQESGGGLVQAGGSLRLSCAASGSISDAYIMGWYRQAPGKEREFVASIAYGGTTNYADSVKGRFTISRDNAKNTVYLQMNSLKPEDTAVYYCAVWAYYNTGLRYWGQGTQVTVSS

SEQ ID NO: 830 - protein, 120 aa, Artificial Sequence
  Chemically Synthesized
QVQLQESGGGLVQAGGSLRLSCAASGYISYTYNMGWYRQAPGKERELVAGIGSVVVPYADSVKGRFTISRDNAKNTVYLQMNSLKPEDTAVYYCAAYYSTIASVSSYLYWGQGTQVTVSS

SEQ ID NO: 831 - protein, 118 aa, Artificial Sequence
  Chemically Synthesized
QVQLQESGGGLVQAGGSLRLSCAASGTIFAYVPMGWYRQAPGKERELVAAISSGTTTYYADSVKGRFTISRDNAKNTVYLQMNSLKPEDTAVYYCAAQILYYRIHPYWGQGTQVTVSS

SEQ ID NO: 832 - protein, 117 aa, Artificial Sequence
  Chemically Synthesized
QVQLQESGGGLVQAGGSLRLSCAASGNISRYGTMGWYRQAPGKERELVAGISEGSITYYADSVKGRFTISRDNAKNTVYLQMNSLKPEDTAVYYCAAYDYDWQYGYWGQGTQVTVSS

SEQ ID NO: 833 - protein, 126 aa, Artificial Sequence
  Chemically Synthesized
QVQLQESGGGLVQAGGSLRLSCAASGTISPYYTMGWYRQAPGKEREFVASIGAGANTYYADSVKGRFTISRDNAKNTVYLQMNSLKPEDTAVYYCAVYREPYKSDFDYSSDVHAYWGQGTQVTVSS

SEQ ID NO: 834 - protein, 117 aa, Artificial Sequence
  Chemically Synthesized
QVQLQESGGGLVQAGGSLRLSCAASGTIFGTYSMGWYRQAPGKEREFVAGISPGASTYYADSVKGRFTISRDNAKNTVYLQMNSLKPEDTAVYYCAAYKADYSSIYWGQGTQVTVSS

SEQ ID NO: 835 - protein, 117 aa, Artificial Sequence
  Chemically Synthesized
QVQLQESGGGLVQAGGSLRLSCAASGSISSYYPMGWYRQAPGKERELVAGIAPGTTTYADSVKGRFTISRDNAKNTVYLQMNSLKPEDTAVYYCAVNELYSCLVSYWGQGTQVTVSS

SEQ ID NO: 836 - protein, 121 aa, Artificial Sequence
  Chemically Synthesized
QVQLQESGGGLVQAGGSLRLSCAASGYILLTTMGWYRQAPGKEREFVATISNGGSTNYADSVKGRFTISRDNAKNTVYLQMNSLKPEDTAVYYCAAGIGGSYRTLRGYNYWGQGTQVTVSS

SEQ ID NO: 837 - protein, 121 aa, Artificial Sequence
  Chemically Synthesized
QVQLQESGGGLVQAGGSLRLSCAASGSIFAGDMGWYRQAPGKEREFVASINNGAITYYADSVKGRFTISRDNAKNTVYLQMNSLKPEDTAVYYCAASRGRTHNLDVRHPYWGQGTQVTVSS

SEQ ID NO: 838 - protein, 122 aa, Artificial Sequence
  Chemically Synthesized
QVQLQESGGGLVQAGGSLRLSCAASGTIFEPSYMGWYRQAPGKEREFVAGITEGANTYYADSVKGRFTISRDNAKNTVYLQMNSLKPEDTAVYYCAVVRLLKDYLPGYHWYWGQGTQVTVSS

SEQ ID NO: 839 - protein, 126 aa, Artificial Sequence
  Chemically Synthesized
QVQLQESGGGLVQAGGSLRLSCAASGTIFQRVGMGWYRQAPGKEREFVAGITYGGSTYYADSVKGRFTISRDNAKNTVYLQMNSLKPEDTAVYYCAAALQGYLYSPVQNTYQHYYWGQGTQVTVSS

SEQ ID NO: 840 - protein, 118 aa, Artificial Sequence
  Chemically Synthesized
QVQLQESGGGLVQAGGSLRLSCAASGSISDYASMGWYRQAPGKEREFVAAIDHGTSTNYADSVKGRFTISRDNAKNTVYLQMNSLKPEDTAVYYCAVGRRYVYYHGYWGQGTQVTVSS

SEQ ID NO: 841 - protein, 126 aa, Artificial Sequence
  Chemically Synthesized
QVQLQESGGGLVQAGGSLRLSCAASGSIFQYYTMGWYRQAPGKERELVASISLGSITYYADSVKGRFTISRDNAKNTVYLQMNSLKPEDTAVYYCAAGRRYPFQTVLDRYYLHGYWGQGTQVTVSS

SEQ ID NO: 842 - protein, 117 aa, Artificial Sequence
  Chemically Synthesized
QVQLQESGGGLVQAGGSLRLSCAASGTIFSLVMGWYRQAPGKEREFVAGIGDGTITNYADSVKGRFTISRDNAKNTVYLQMNSLKPEDTAVYYCAVYTPIEYGHAYWGQGTQVTVSS

SEQ ID NO: 843 - protein, 121 aa, Artificial Sequence
  Chemically Synthesized
QVQLQESGGGLVQAGGSLRLSCAASGTISGPYGMGWYRQAPGKEREFVAGIADGANTNYADSVKGRFTISRDNAKNTVYLQMNSLKPEDTAVYYCAVPLGYPSYDNVHRYWGQGTQVTVSS

SEQ ID NO: 844 - protein, 117 aa, Artificial Sequence
  Chemically Synthesized
QVQLQESGGGLVQAGGSLRLSCAASGNISYLRSMGWYRQAPGKEREFVASINQGTNTYYADSVKGRFTISRDNAKNTVYLQMNSLKPEDTAVYYCAVYRGYGSTIYWGQGTQVTVSS

SEQ ID NO: 845 - protein, 110 aa, Artificial Sequence
  Chemically Synthesized
QVQLQESGGGLVQAGGSLRLSCAASGTIFVRDDMGWYRQAPGKEREFVATYADSVKGRFTISRDNAKNTVYLQMNSLKPEDTAVYYCAAVSYSGLPHQYWGQGTQVTVSS

SEQ ID NO: 846 - protein, 113 aa, Artificial Sequence
  Chemically Synthesized
QVQLQESGGGLVQAGGSLRLSCAASGNIFARFYMGWYRQAPGKEREFVAYADSVKGRFTISRDNAKNTVYLQMNSLKPEDTAVYYCAAVGTAYSPSGSAVFYWGQGTQVTVSS

SEQ ID NO: 847 - protein, 122 aa, Artificial Sequence
  Chemically Synthesized
QVQLQESGGGLVQAGGSLRLSCAASGNISDRYDMGWYRQAPGKEREFVAGITGGTSTYYADSVKGRFTISRDNAKNTVYLQMNSLKPEDTAVYYCAAWAYGIAYLYVVYLYWGQGTQVTVSS

SEQ ID NO: 848 - protein, 120 aa, Artificial Sequence
  Chemically Synthesized
QVQLQESGGGLVQAGGSLRLSCAASGSISLDQYMGWYRQAPGKEREFVAAIDGGTTNYADSVKGRFTISRDNAKNTVYLQMNSLKPEDTAVYYCAAAFQRYRRYLYTFYWGQGTQVTVSS

SEQ ID NO: 849 - protein, 126 aa, Artificial Sequence
  Chemically Synthesized
QVQLQESGGGLVQAGGSLRLSCAASGNIFAYTAMGWYRQAPGKEREFVAGIDRGGITNYADSVKGRFTISRDNAKNTVYLQMNSLKPEDTAVYYCAADAGSPWDQTYTDPDRLRYWGQGTQVTVSS

SEQ ID NO: 850 - protein, 118 aa, Artificial Sequence
  Chemically Synthesized
QVQLQESGGGLVQAGGSLRLSCAASGNISDSRLMGWYRQAPGKERELVATIDQGGTTNYADSVKGRFTISRDNAKNTVYLQMNSLKPEDTAVYYCAVYDRATTLTLYWGQGTQVTVSS

SEQ ID NO: 851 - protein, 118 aa, Artificial Sequence
  Chemically Synthesized
QVQLQESGGGLVQAGGSLRLSCAASGTIFPVIVMGWYRQAPGKERELVATINFGSSTYYADSVKGRFTISRDNAKNTVYLQMNSLKPEDTAVYYCAAYAYVLDRFHYWGQGTQVTVSS

SEQ ID NO: 852 - protein, 122 aa, Artificial Sequence
  Chemically Synthesized
QVQLQESGGGLVQAGGSLRLSCAASGTISYRRNMGWYRQAPGKERELVAAINDGASTYYADSVKGRFTISRDNAKNTVYLQMNSLKPEDTAVYYCAVNWGTDYTTPLVLDYWGQGTQVTVSS

SEQ ID NO: 853 - protein, 118 aa, Artificial Sequence
  Chemically Synthesized
QVQLQESGGGLVQAGGSLRLSCAASGTIFQRYYMGWYRQAPGKEREFVAGISWGASTNYADSVKGRFTISRDNAKNTVYLQMNSLKPEDTAVYYCAVYYTLTDPYLYWGQGTQVTVSS

SEQ ID NO: 854 - protein, 125 aa, Artificial Sequence
  Chemically Synthesized
QVQLQESGGGLVQAGGSLRLSCAASGTIFYTGYMGWYRQAPGKERELVATITDGVIPYADSVKGRFTISRDNAKNTVYLQMNSLKPEDTAVYYCAAIQPSGGPSTSYGFNTLYYWGQGTQVTVSS

SEQ ID NO: 855 - protein, 122 aa, Artificial Sequence
  Chemically Synthesized
QVQLQESGGGLVQAGGSLRLSCAASGTISKRDYMGWYRQAPGKERELVAGISYGGITNYADSVKGRFTISRDNAKNTVYLQMNSLKPEDTAVYYCAADDPTLPLYDRPYRYWGQGTQVTVSS

SEQ ID NO: 856 - protein, 122 aa, Artificial Sequence
  Chemically Synthesized
QVQLQESGGGLVQAGGSLRLSCAASGYIFLEIDMGWYRQAPGKERELVASISDGGSTNYADSVKGRFTISRDNAKNTVYLQMNSLKPEDTAVYYCAVAYRNDTSGRCCSFYWGQGTQVTVSS

SEQ ID NO: 857 - protein, 117 aa, Artificial Sequence
  Chemically Synthesized
QVQLQESGGGLVQAGGSLRLSCAASGYIFRAQYMGWYRQAPGKERELVAGIDDGIVPYADSVKGRFTISRDNAKNTVYLQMNSLKPEDTAVYYCAVGSNVPGRHYYWGQGTQVTVSS

SEQ ID NO: 858 - protein, 122 aa, Artificial Sequence
  Chemically Synthesized
QVQLQESGGGLVQAGGSLRLSCAASGTIFSPGIMGWYRQAPGKERELVAAITDGTITNYADSVKGRFTISRDNAKNTVYLQMNSLKPEDTAVYYCAVFLRRTGWRYRPHRYWGQGTQVTVSS

SEQ ID NO: 859 - protein, 126 aa, Artificial Sequence
  Chemically Synthesized
QVQLQESGGGLVQAGGSLRLSCAASGTIFNPYVMGWYRQAPGKEREFVASIDDGAITNYADSVKGRFTISRDNAKNTVYLQMNSLKPEDTAVYYCAVTDYAYRGILTLFYIVYDYWGQGTQVTVSS

SEQ ID NO: 860 - protein, 126 aa, Artificial Sequence
  Chemically Synthesized
QVQLQESGGGLVQAGGSLRLSCAASGNISRYIIMGWYRQAPGKERELVAGIDIGANTNYADSVKGRFTISRDNAKNTVYLQMNSLKPEDTAVYYCAAGEADRTYPVPPWYDAHRYWGQGTQVTVSS

SEQ ID NO: 861 - protein, 116 aa, Artificial Sequence
  Chemically Synthesized
QVQLQESGGGLVQAGGSLRLSCAASGNIFYDYYMGWYRQAPGKEREFAAISRVLIPYADSVKGRFTISRDNAKNTVYLQMNSLKPEDTAVYYCAVNGYPDPSYPYWGQGTQVTVSS

SEQ ID NO: 862 - protein, 118 aa, Artificial Sequence
  Chemically Synthesized
QVQLQESGGGLVQAGGSLRLSCAASGSIFVDRAMGWYRQAPGKEREFVAGIAVGSTTYYADSVKGRFTISRDNAKNTVYLQMNSLKPEDTAVYYCAANRWYFPAHPYWGQGTQVTVSS

SEQ ID NO: 863 - protein, 118 aa, Artificial Sequence
  Chemically Synthesized
QVQLQESGGGLVQAGGSLRLSCAASGNIFLGSMGWYRQAPGKEREFVAGIDPGGTTNYADSVKGRFTISRDNAKNTVYLQMNSLKPEDTAVYYCAVLLRDGDRTFGYWGQGTQVTVSS

SEQ ID NO: 864 - protein, 109 aa, Artificial Sequence
  Chemically Synthesized
QVQLQESGGGLVQAGGSLRLSCAASGTIFRQQRMGWYRQAPGKERELVAAISTGSITYYADSVKGRFTISRDNAKNTVYLQMNSLKPEDTAVYYCAVYWGQGTQVTVSS

SEQ ID NO: 865 - protein, 109 aa, Artificial Sequence
  Chemically Synthesized
QVQLQESGGGLVQAGGSLRLSCAASGNIFVRNAMGWYRQAPGKERELVAGIGGGATTNYADSVKGRFTISRDNAKNTVYLQMNSLKPEDTAVYYCAVYWGQGTQVTVSS

SEQ ID NO: 866 - protein, 117 aa, Artificial Sequence
  Chemically Synthesized
QVQLQESGGGLVQAGGSLRLSCAASGYIFAVAVMGWYRQAPGKEREFVAGINRGSSTYYADSVKGRFTISRDNAKNTVYLQMNSLKPEDTAVYYCAAQVHDIGLVYWGQGTQVTVSS

SEQ ID NO: 867 - protein, 118 aa, Artificial Sequence
  Chemically Synthesized
QVQLQESGGGLVQAGGSLRLSCAASGYISEPPLMGWYRQAPGKERELVAGITLGAITYYADSVKGRFTISRDNAKNTVYLQMNSLKPEDTAVYYCAVSRIGGTRLYYWGQGTQVTVSS

SEQ ID NO: 868 - protein, 118 aa, Artificial Sequence
  Chemically Synthesized
QVQLQESGGGLVQAGGSLRLSCAASGSIFYHALMGWYRQAPGKERELVATIDPGGNTYYADSVKGRFTISRDNAKNTVYLQMNSLKPEDTAVYYCAVDARGLGDFWYWGQGTQVTVSS

SEQ ID NO: 869 - protein, 117 aa, Artificial Sequence
  Chemically Synthesized
QVQLQESGGGLVQAGGSLRLSCAASGNIFLSVMGWYRQAPGKERELVAGISDGANTNYADSVKGRFTISRDNAKNTVYLQMNSLKPEDTAVYYCAVVRYDDVILSYWGQGTQVTVSS

SEQ ID NO: 870 - protein, 117 aa, Artificial Sequence
  Chemically Synthesized
QVQLQESGGGLVQAGGSLRLSCAASGSIFSSLMGWYRQAPGKEREFVAGIDTGASTYYADSVKGRFTISRDNAKNTVYLQMNSLKPEDTAVYYCAVQLIGPAGYQYWGQGTQVTVSS

SEQ ID NO: 871 - protein, 112 aa, Artificial Sequence
  Chemically Synthesized
QVQLQESGGGLVQAGGSLRLSCAASGYISRYTQMGWYRQAPGKEREFVGTTTYYADSVKGRFTISRDNAKNTVYLQMNSLKPEDTAVYYCAADPAVTLLIYWGQGTQVTVSS

SEQ ID NO: 872 - protein, 122 aa, Artificial Sequence
  Chemically Synthesized
QVQLQESGGGLVQAGGSLRLSCAASGNISLGGFMGWYRQAPGKEREFVAAIAGGSTTYYADSVKGRFTISRDNAKNTVYLQMNSLKPEDTAVYYCAVPRVRSTYLYGPFTYWGQGTQVTVSS

SEQ ID NO: 873 - protein, 122 aa, Artificial Sequence
  Chemically Synthesized
QVQLQESGGGLVQAGGSLRLSCAASGYIFPYGFMGWYRQAPGKEREFVATIAHGASTNYADSVKGRFTISRDNAKNTVYLQMNSLKPEDTAVYYCAVRGGSYPRDVYPFTYWGQGTQVTVSS

SEQ ID NO: 874 - protein, 122 aa, Artificial Sequence
  Chemically Synthesized
QVQLQESGGGLVQAGGSLRLSCAASGYIFIYTQMGWYRQAPGKEREFVAGIGDGTNTNYADSVKGRFTISRDNAKNTVYLQMNSLKPEDTAVYYCAAYTDGYTGREIQFSYWGQGTQVTVSS

SEQ ID NO: 875 - protein, 118 aa, Artificial Sequence
  Chemically Synthesized
QVQLQESGGGLVQAGGSLRLSCAASGNISDFITMGWYRQAPGKERELVATIGAGTNTNYADSVKGRFTISRDNAKNTVYLQMNSLKPEDTAVYYCAAGDQPETLHYYWGQGTQVTVSS

SEQ ID NO: 876 - protein, 117 aa, Artificial Sequence
  Chemically Synthesized
QVQLQESGGGLVQAGGSLRLSCAASGSISTRLMGWYRQAPGKEREFVASIAWGATTNYADSVKGRFTISRDNAKNTVYLQMNSLKPEDTAVYYCAVYDYWRFAYWYWGQGTQVTVSS

SEQ ID NO: 877 - protein, 117 aa, Artificial Sequence
  Chemically Synthesized
QVQLQESGGGLVQAGGSLRLSCAASGYISERGDMGWYRQAPGKERELVATIGLGTLPYADSVKGRFTISRDNAKNTVYLQMNSLKPEDTAVYYCAVAPYSSDVHYYWGQGTQVTVSS

SEQ ID NO: 878 - protein, 121 aa, Artificial Sequence
  Chemically Synthesized
QVQLQESGGGLVQAGGSLRLSCAASGNIFSGPSMGWYRQAPGKERELVATIADGTTTYYADSVKGRFTISRDNAKNTVYLQMNSLKPEDTAVYYCAVYGYVPDRDYYLVYWGQGTQVTVSS

SEQ ID NO: 879 - protein, 118 aa, Artificial Sequence
  Chemically Synthesized
QVQLQESGGGLVQAGGSLRLSCAASGSIFDNPHMGWYRQAPGKERELVAAISTGGITYYADSVKGRFTISRDNAKNTVYLQMNSLKPEDTAVYYCAAIFIYDDIHEYWGQGTQVTVSS

SEQ ID NO: 880 - protein, 118 aa, Artificial Sequence
  Chemically Synthesized
QVQLQESGGGLVQAGGSLRLSCAASGSISQRDGMGWYRQAPGKERELVASIADGSNTNYADSVKGRFTISRDNAKNTVYLQMNSLKPEDTAVYYCAVLGHRTYSHGYWGQGTQVTVSS

SEQ ID NO: 881 - protein, 118 aa, Artificial Sequence
  Chemically Synthesized
QVQLQESGGGLVQAGGSLRLSCAASGNISGDGRMGWYRQAPGKERELVATITRGGITYYADSVKGRFTISRDNAKNTVYLQMNSLKPEDTAVYYCAVGNTPTDLYAYWGQGTQVTVSS

SEQ ID NO: 882 - protein, 118 aa, Artificial Sequence
  Chemically Synthesized
QVQLQESGGGLVQAGGSLRLSCAASGSIFGFHIMGWYRQAPGKEREFVATIANGAITYYADSVKGRFTISRDNAKNTVYLQMNSLKPEDTAVYYCAVYLATYDSLGYWGQGTQVTVSS

SEQ ID NO: 883 - protein, 121 aa, Artificial Sequence
  Chemically Synthesized
QVQLQESGGGLVQAGGSLRLSCAASGNISLYNMGWYRQAPGKERELVATINDGATTYYADSVKGRFTISRDNAKNTVYLQMNSLKPEDTAVYYCAVVFIDRDDDATYLLYWGQGTQVTVSS

SEQ ID NO: 884 - protein, 118 aa, Artificial Sequence
  Chemically Synthesized
QVQLQESGGGLVQAGGSLRLSCAASGSIFAVWYMGWYRQAPGKERELVAAIASGASTYYADSVKGRFTISRDNAKNTVYLQMNSLKPEDTAVYYCAVGRLLYGVHLYWGQGTQVTVSS

SEQ ID NO: 885 - protein, 118 aa, Artificial Sequence
  Chemically Synthesized
QVQLQESGGGLVQAGGSLRLSCAASGTISIYTYMGWYRQAPGKERELVAGIGYGTTTYYADSVKGRFTISRDNAKNTVYLQMNSLKPEDTAVYYCAVLTRYSTAHSYWGQGTQVTVSS

SEQ ID NO: 886 - protein, 118 aa, Artificial Sequence
  Chemically Synthesized
QVQLQESGGGLVQAGGSLRLSCAASGSIFLIYWMGWYRQAPGKEREFVAAINAGGTTNYADSVKGRFTISRDNAKNTVYLQMNSLKPEDTAVYYCAVFRVRKYYHWYWGQGTQVTVSS

SEQ ID NO: 887 - protein, 126 aa, Artificial Sequence
  Chemically Synthesized
QVQLQESGGGLVQAGGSLRLSCAASGYISGGYYMGWYRQAPGKEREFVATIADGATTYYADSVKGRFTISRDNAKNTVYLQMNSLKPEDTAVYYCAVDFPSYGLLDDYLGYVFYYWGQGTQVTVSS

SEQ ID NO: 888 - protein, 120 aa, Artificial Sequence
  Chemically Synthesized
QVQLQESGGGLVQAGGSLRLSCAASGTISATTMGWYRQAPGKERELVAGISDGANTNYADSVKGRFTISRDNAKNTVYLQMNSLKPEDTAVYYCAAWDIYQSTVTLVMYWGQGTQVTVSS

SEQ ID NO: 889 - protein, 126 aa, Artificial Sequence
  Chemically Synthesized
QVQLQESGGGLVQAGGSLRLSCAASGTIFRRGSMGWYRQAPGKERELVAAISFGSITYYADSVKGRFTISRDNAKNTVYLQMNSLKPEDTAVYYCAAPVGYAYTQYENTYDPLNYWGQGTQVTVSS

SEQ ID NO: 890 - protein, 118 aa, Artificial Sequence
  Chemically Synthesized
QVQLQESGGGLVQAGGSLRLSCAASGTISYRYDMGWYRQAPGKEREFVAAIGSGSTTNYADSVKGRFTISRDNAKNTVYLQMNSLKPEDTAVYYCAVESPFLYGFYYWGQGTQVTVSS

SEQ ID NO: 891 - protein, 117 aa, Artificial Sequence
  Chemically Synthesized
QVQLQESGGGLVQAGGSLRLSCAASGNIFYEYYMGWYRQAPGKERELVATIDVGANTYYADSVKGRFTISRDNAKNTVYLQMNSLKPEDTAVYYCAVHPDSTTTFYWGQGTQVTVSS

SEQ ID NO: 892 - protein, 117 aa, Artificial Sequence
  Chemically Synthesized
QVQLQESGGGLVQAGGSLRLSCAASGTISSFIMGWYRQAPGKERELVASINNGTSTNYADSVKGRFTISRDNAKNTVYLQMNSLKPEDTAVYYCAVQYEYAYYLNYWGQGTQVTVSS

SEQ ID NO: 893 - protein, 110 aa, Artificial Sequence
  Chemically Synthesized
QVQLQESGGGLVQAGGSLRLSCAASGSIFGQNQMGWYRQAPGKEREFVAAIAYGGSTYYADSVKGRFTISRDNAKNTVYLQMNSLKPEDTAVYYCAALYWGQGTQVTVSS

SEQ ID NO: 894 - protein, 121 aa, Artificial Sequence
  Chemically Synthesized
QVQLQESGGGLVQAGGSLRLSCAASGYIFSGYVMGWYRQAPGKERELVAAISSVLLPYADSVKGRFTISRDNAKNTVYLQMNSLKPEDTAVYYCAVAYDYDALYRADLDYWGQGTQVTVSS

SEQ ID NO: 895 - protein, 117 aa, Artificial Sequence
  Chemically Synthesized
QVQLQESGGGLVQAGGSLRLSCAASGYISPTDTMGWYRQAPGKERELVATIAYGGINLYADSVKGRFTISRDNAKNTVYLQMNSLKPEDTAVYYCAASYVALRYGYWGQGTQVTVSS

SEQ ID NO: 896 - protein, 118 aa, Artificial Sequence
  Chemically Synthesized
QVQLQESGGGLVQAGGSLRLSCAASGSIFPSVIMGWYRQAPGKERELVAAIDTGTSTYYADSVKGRFTISRDNAKNTVYLQMNSLKPEDTAVYYCAAYAKPLYLHWYWGQGTQVTVSS

SEQ ID NO: 897 - protein, 117 aa, Artificial Sequence
  Chemically Synthesized
QVQLQESGGGLVQAGGSLRLSCAASGTISPGLNMGWYRQAPGKERELVAAIAYGTIPYADSVKGRFTISRDNAKNTVYLQMNSLKPEDTAVYYCAAVIGPHVGHSYWGQGTQVTVSS

SEQ ID NO: 898 - protein, 118 aa, Artificial Sequence
  Chemically Synthesized
QVQLQESGGGLVQAGGSLRLSCAASGYIFVAYTMGWYRQAPGKERELVASISWGTITYYADSVKGRFTISRDNAKNTVYLQMNSLKPEDTAVYYCAAAYTDVKWHGYWGQGTQVTVSS

SEQ ID NO: 899 - protein, 113 aa, Artificial Sequence
  Chemically Synthesized
QVQLQESGGGLVQAGGSLRLSCAASGSIFGWDDMGWYRQAPGKERELVAYADSVKGRFTISRDNAKNTVYLQMNSLKPEDTAVYYCAARVDTDRYAYGTHQYWGQGTQVTVSS

SEQ ID NO: 900 - protein, 126 aa, Artificial Sequence
  Chemically Synthesized
QVQLQESGGGLVQAGGSLRLSCAASGSISSWLNMGWYRQAPGKERELVASIAYGGNTNYADSVKGRFTISRDNAKNTVYLQMNSLKPEDTAVYYCAASPQLVWPTAYWGSYWHAYWGQGTQVTVSS

SEQ ID NO: 901 - protein, 126 aa, Artificial Sequence
  Chemically Synthesized
QVQLQESGGGLVQAGGSLRLSCAASGTISYPLYMGWYRQAPGKERELVASITSGGSTNYADSVKGRFTISRDNAKNTVYLQMNSLKPEDTAVYYCAVTILGDTPQTGGIPITHYYWGQGTQVTVSS

SEQ ID NO: 902 - protein, 118 aa, Artificial Sequence
  Chemically Synthesized
QVQLQESGGGLVQAGGSLRLSCAASGNISTYSGMGWYRQAPGKEREFVATISYGSITYYADSVKGRFTISRDNAKNTVYLQMNSLKPEDTAVYYCAAWQLSRWPYQYWGQGTQVTVSS

SEQ ID NO: 903 - protein, 122 aa, Artificial Sequence
  Chemically Synthesized
QVQLQESGGGLVQAGGSLRLSCAASGSISWQGYMGWYRQAPGKERELVAAITPGGITYYADSVKGRFTISRDNAKNTVYLQMNSLKPEDTAVYYCAVYGYGHNQVRLIYDYWGQGTQVTVSS

SEQ ID NO: 904 - protein, 118 aa, Artificial Sequence
  Chemically Synthesized
QVQLQESGGGLVQAGGSLRLSCAASGNISRANYMGWYRQAPGKEREFVAAISPGATTYYADSVKGRFTISRDNAKNTVYLQMNSLKPEDTAVYYCAAILTIRPEHPYWGQGTQVTVSS

SEQ ID NO: 905 - protein, 122 aa, Artificial Sequence
  Chemically Synthesized
QVQLQESGGGLVQAGGSLRLSCAASGSISPTVYMGWYRQAPGKERELVATIDWGTSTYYADSVKGRFTISRDNAKNTVYLQMNSLKPEDTAVYYCAVTEPSKVPYWTPLVYWGQGTQVTVSS

SEQ ID NO: 906 - protein, 118 aa, Artificial Sequence
  Chemically Synthesized
QVQLQESGGGLVQAGGSLRLSCAASGNISRDDGMGWYRQAPGKEREFVATIDYGATTNYADSVKGRFTISRDNAKNTVYLQMNSLKPEDTAVYYCAADGYYVSFLDYWGQGTQVTVSS

SEQ ID NO: 907 - protein, 117 aa, Artificial Sequence
  Chemically Synthesized
QVQLQESGGGLVQAGGSLRLSCAASGYISSTLVMGWYRQAPGKERELVATINYGGTTYYADSVKGRFTISRDNAKNTVYLQMNSLKPEDTAVYYCAASGPLDDVMYWGQGTQVTVSS

SEQ ID NO: 908 - protein, 126 aa, Artificial Sequence
  Chemically Synthesized
QVQLQESGGGLVQAGGSLRLSCAASGTISQYNAMGWYRQAPGKEREFVATIDYGGTTNYADSVKGRFTISRDNAKNTVYLQMNSLKPEDTAVYYCALTRRTTTVVTTVRGTVLIYWGQGTQVTVSS

SEQ ID NO: 909 - protein, 118 aa, Artificial Sequence
  Chemically Synthesized
QVQLQESGGGLVQAGGSLRLSCAASGYISIYYYMGWYRQAPGKERELVAAISYGSTTNYADSVKGRFTISRDNAKNTVYLQMNSLKPEDTAVYYCAVASTYSVAFDYWGQGTQVTVSS

SEQ ID NO: 910 - protein, 121 aa, Artificial Sequence
  Chemically Synthesized
QVQLQESGGGLVQAGGSLRLSCAASGTISPRLNMGWYRQAPGKEREFVAAIGGGATTYYADSVKGRFTISRDNAKNTVYLQMNSLKPEDTAVYYCAAVLGWHAPRHQSFYWGQGTQVTVSS

SEQ ID NO: 911 - protein, 118 aa, Artificial Sequence
  Chemically Synthesized
QVQLQESGGGLVQAGGSLRLSCAASGTISVVYDMGWYRQAPGKERELVAGISLGGTTNYADSVKGRFTISRDNAKNTVYLQMNSLKPEDTAVYYCAVGRTSRQYYKYWGQGTQVTVSS

SEQ ID NO: 912 - protein, 124 aa, Artificial Sequence
  Chemically Synthesized
QVQLQESGGGLVQAGGSLRLSCAASGNILMTVMGWYRQAPGKEREFVAGISDGAITYYADSVKGRFTISRDNAKNTVYLQMNSLKPEDTAVYYCAVWYSDFPSLTTTSWVTLYWGQGTQVTVSS

SEQ ID NO: 913 - protein, 113 aa, Artificial Sequence
  Chemically Synthesized
QVQLQESGGGLVQAGGSLRLSCAASGSISLWPYMGWYRQAPGKERELVAAITYGGTTYYADSVKGRFTISRDNAKNTVYLQMNSLKPEDTAVYYCAVGLNIYWGQGTQVTVSS

SEQ ID NO: 914 - protein, 118 aa, Artificial Sequence
  Chemically Synthesized
QVQLQESGGGLVQAGGSLRLSCAASGTIFYTQYMGWYRQAPGKERELVAAINYGGTTYYADSVKGRFTISRDNAKNTVYLQMNSLKPEDTAVYYCAVGIYHATPHYYWGQGTQVTVSS

SEQ ID NO: 915 - protein, 117 aa, Artificial Sequence
  Chemically Synthesized
QVQLQESGGGLVQAGGSLRLSCAASGNIDRYLMGWYRQAPGKERELVAGIGYGTNTYYADSVKGRFTISRDNAKNTVYLQMNSLKPEDTAVYYCAAYRRRKHGYYYWGQGTQVTVSS

SEQ ID NO: 916 - protein, 122 aa, Artificial Sequence
  Chemically Synthesized
QVQLQESGGGLVQAGGSLRLSCAASGSISAVLYMGWYRQAPGKERELVAAIAWGSNTYYADSVKGRFTISRDNAKNTVYLQMNSLKPEDTAVYYCAAPWEGALFITYGHEYWGQGTQVTVSS

SEQ ID NO: 917 - protein, 118 aa, Artificial Sequence
  Chemically Synthesized
QVQLQESGGGLVQAGGSLRLSCAASGNIFRDRYMGWYRQAPGKERELVASIADGAITYYADSVKGRFTISRDNAKNTVYLQMNSLKPEDTAVYYCAADGDQGQDLDYWGQGTQVTVSS

SEQ ID NO: 918 - protein, 125 aa, Artificial Sequence
  Chemically Synthesized
QVQLQESGGGLVQAGGSLRLSCAASGTISSTSWMGWYRQAPGKERELVATIAQGATTNYADSVKGRFTISRDNAKNTVYLQMNSLKPEDTAVYYCAVAYYWPDYYYRYFNWHTYWGQGTQVTVSS

SEQ ID NO: 919 - protein, 121 aa, Artificial Sequence
  Chemically Synthesized
QVQLQESGGGLVQAGGSLRLSCAASGYISLDRGMGWYRQAPGKERELVATISPGATTYADSVKGRFTISRDNAKNTVYLQMNSLKPEDTAVYYCAAEHYWAWPPSRELGYWGQGTQVTVSS

SEQ ID NO: 920 - protein, 122 aa, Artificial Sequence
  Chemically Synthesized
QVQLQESGGGLVQAGGSLRLSCAASGTIFLRQIMGWYRQAPGKEREFVASINIGTSTNYADSVKGRFTISRDNAKNTVYLQMNSLKPEDTAVYYCAVNILYDWAWDDFYYYWGQGTQVTVSS

SEQ ID NO: 921 - protein, 117 aa, Artificial Sequence
  Chemically Synthesized
QVQLQESGGGLVQAGGSLRLSCAASGTILLLFMGWYRQAPGKEREFVAAITGGASTYYADSVKGRFTISRDNAKNTVYLQMNSLKPEDTAVYYCAVGLYAETDFYYWGQGTQVTVSS

SEQ ID NO: 922 - protein, 118 aa, Artificial Sequence
  Chemically Synthesized
QVQLQESGGGLVQAGGSLRLSCAASGYISTYDLMGWYRQAPGKERELVAAIGYGGITNYADSVKGRFTISRDNAKNTVYLQMNSLKPEDTAVYYCAVYIYSGTGYFYWGQGTQVTVSS

SEQ ID NO: 923 - protein, 122 aa, Artificial Sequence
  Chemically Synthesized
QVQLQESGGGLVQAGGSLRLSCAASGTISVYYYMGWYRQAPGKEREFVAGISYGNTTNYADSVKGRFTISRDNAKNTVYLQMNSLKPEDTAVYYCAASNPAHYSGDDVLWYWGQGTQVTVSS

SEQ ID NO: 924 - protein, 126 aa, Artificial Sequence
  Chemically Synthesized
QVQLQESGGGLVQAGGSLRLSCAASGNIFDSAVMGWYRQAPGKERELVASIGDGASTYYADSVKGRFTISRDNAKNTVYLQMNSLKPEDTAVYYCAVGDGHVSLPVRPACYYFCYWGQGTQVTVSS

SEQ ID NO: 925 - protein, 122 aa, Artificial Sequence
  Chemically Synthesized
QVQLQESGGGLVQAGGSLRLSCAASGNISLWYNMGWYRQAPGKERELVAAINGGGTTNYADSVKGRFTISRDNAKNTVYLQMNSLKPEDTAVYYCAVYRAYAARDKSFYWYWGQGTQVTVSS

SEQ ID NO: 926 - protein, 118 aa, Artificial Sequence
  Chemically Synthesized
QVQLQESGGGLVQAGGSLRLSCAASGSIFDNYQMGWYRQAPGKERELVATIGDGSITYYADSVKGRFTISRDNAKNTVYLQMNSLKPEDTAVYYCAVFSQDRRGFVYWGQGTQVTVSS

SEQ ID NO: 927 - protein, 117 aa, Artificial Sequence
  Chemically Synthesized
QVQLQESGGGLVQAGGSLRLSCAASGTISVVNVMGWYRQAPGKEREFVAGIDNGGNTYYADSVKGRFTISRDNAKNTVYLQMNSLKPEDTAVYYCAAYYDVLIHFYWGQGTQVTVSS

SEQ ID NO: 928 - protein, 117 aa, Artificial Sequence
  Chemically Synthesized
QVQLQESGGGLVQAGGSLRLSCAASGSIFQHRFMGWYRQAPGKERELVAAINGGASTNYADSVKGRFTISRDNAKNTVYLQMNSLKPEDTAVYYCAVQSNRSTLMYWGQGTQVTVSS

SEQ ID NO: 929 - protein, 119 aa, Artificial Sequence
  Chemically Synthesized
QVQLQESGGGLVQAGGSLRLSCAASGSISSDGGMGWYRQAPGKEREFVASISGGGSTNYADSVKGRFTISRDNAKNTVYLQMNSLKPEDTAVYYCAVEQTLNYAVHWYWGQGTQVTVSS

SEQ ID NO: 930 - protein, 122 aa, Artificial Sequence
  Chemically Synthesized
QVQLQESGGGLVQAGGSLRLSCAASGTIFRKDYMGWYRQAPGKERELVASISDGTNTYYADSVKGRFTISRDNAKNTVYLQMNSLKPEDTAVYYCAVGTYRRGRYEGYHRYWGQGTQVTVSS

SEQ ID NO: 931 - protein, 118 aa, Artificial Sequence
  Chemically Synthesized
QVQLQESGGGLVQAGGSLRLSCAASGYISGVTPMGWYRQAPGKERELVATIAVGSTTYYADSVKGRFTISRDNAKNTVYLQMNSLKPEDTAVYYCAADGGYSWYHHYWGQGTQVTVSS

SEQ ID NO: 932 - protein, 118 aa, Artificial Sequence
  Chemically Synthesized
QVQLQESGGGLVQAGGSLRLSCAASGSISWLTDMGWYRQAPGKERELVASIAYGGSTYYADSVKGRFTISRDNAKNTVYLQMNSLKPEDTAVYYCAVAPWAIPTLTYWGQGTQVTVSS

SEQ ID NO: 933 - protein, 121 aa, Artificial Sequence
  Chemically Synthesized
QVQLQESGGGLVQAGGSLRLSCAASGTIFVYADMGWYRQAPGKEREFVPLLVTVLLPYADSVKGRFTISRDNAKNTVYLQMNSLKPEDTAVYYCAARAYGREVSGYDFRYWGQGTQVTVSS

SEQ ID NO: 934 - protein, 121 aa, Artificial Sequence
  Chemically Synthesized
QVQLQESGGGLVQAGGSLRLSCAASGNISTTLMGWYRQAPGKERELVAAISIGGSTNYADSVKGRFTISRDNAKNTVYLQMNSLKPEDTAVYYCAAIHYTGFSGEKRLYYWGQGTQVTVSS

SEQ ID NO: 935 - protein, 117 aa, Artificial Sequence
  Chemically Synthesized
QVQLQESGGGLVQAGGSLRLSCAASGTIFYSDWMGWYRQAPGKERELVATIGGGSTTNYADSVKGRFTISRDNAKNTVYLQMNSLKPEDTAVYYCAVVARTLYPLYWGQGTQVTVSS

SEQ ID NO: 936 - protein, 117 aa, Artificial Sequence
  Chemically Synthesized
QVQLQESGGGLVQAGGSLRLSCAASGNISIDDTMGWYRQAPGKEREFVAAIGSGASTNYADSVKGRFTISRDNAKNTVYLQMNSLKPEDTAVYYCAVVLSVLLALYWGQGTQVTVSS

SEQ ID NO: 937 - protein, 120 aa, Artificial Sequence
  Chemically Synthesized
QVQLQESGGGLVQAGGSLRLSCAASGSISHPWYMGWYRQAPGKEREFVAGIADGTSTNYADSVKGRFTISRDNAKNTVYLQMNSLKPEDTAVYYCAVYVRYALYFRYYYWGQGTQVTVSS

SEQ ID NO: 938 - protein, 126 aa, Artificial Sequence
  Chemically Synthesized
QVQLQESGGGLVQAGGSLRLSCAASGSIFYSRVMGWYRQAPGKERELVAAINAGGNTNYADSVKGRFTISRDNAKNTVYLQMNSLKPEDTAVYYCAVIDSWYGAVETDNASIHRYWGQGTQVTVSS

SEQ ID NO: 939 - protein, 118 aa, Artificial Sequence
  Chemically Synthesized
QVQLQESGGGLVQAGGSLRLSCAASGNISVLDNMGWYRQAPGKERELVATISLGTSTYYADSVKGRFTISRDNAKNTVYLQMNSLKPEDTAVYYCAVIGGDIAYYHYWGQGTQVTVSS

SEQ ID NO: 940 - protein, 112 aa, Artificial Sequence
  Chemically Synthesized
QVQLQESGGGLVQAGGSLRLSCAASGNMGWYRQAPGKEREFVASITAGASTYYADSVKGRFTISRDNAKNTVYLQMNSLKPEDTAVYYCAVHRQGDYGHRYWGQGTQVTVSS

SEQ ID NO: 941 - protein, 120 aa, Artificial Sequence
  Chemically Synthesized
QVQLQESGGGLVQAGGSLRLSCAASGNSERRAMGWYRQAPGKEREFVATIELVLLPYADSVKGRFTISRDNAKNTVYLQMNSLKPEDTAVYYCAAHPYWSRIDRDAHWYWGQGTQVTVSS

SEQ ID NO: 942 - protein, 122 aa, Artificial Sequence
  Chemically Synthesized
QVQLQESGGGLVQAGGSLRLSCAASGNISDSGSMGWYRQAPGKEREFVAAINIGTITYYADSVKGRFTISRDNAKNTVYLQMNSLKPEDTAVYYCAVAGAGSAGSVPLHAYWGQGTQVTVSS

SEQ ID NO: 943 - protein, 121 aa, Artificial Sequence
  Chemically Synthesized
QVQLQESGGGLVQAGGSLRLSCAASGSISADLWMGWYRQAPGKEREFVAGIASVLLPYADSVKGRFTISRDNAKNTVYLQMNSLKPEDTAVYYCAATRYRNYDGNDAHRYWGQGTQVTVSS

SEQ ID NO: 944 - protein, 117 aa, Artificial Sequence
  Chemically Synthesized
QVQLQESGGGLVQAGGSLRLSCAASGTISTSDDMGWYRQAPGKEREFVATIADGATTNYADSVKGRFTISRDNAKNTVYLQMNSLKPEDTAVYYCAVDLGNSLLLYWGQGTQVTVSS

SEQ ID NO: 945 - protein, 121 aa, Artificial Sequence
  Chemically Synthesized
QVQLQESGGGLVQAGGSLRLSCAASGNISDDRYMGWYRQAPGKERELVAGINRGSSTNYADSVKGRFTISRDNAKNTVYLQMNSLKPEDTAVYYCAAADDTYVAVLDSLYWGQGTQVTVSS

SEQ ID NO: 946 - protein, 117 aa, Artificial Sequence
  Chemically Synthesized
QVQLQESGGGLVQAGGSLRLSCAASGTIFRLYGMGWYRQAPGKEREFVAGIASVLLPYADSVKGRFTISRDNAKNTVYLQMNSLKPEDTAVYYCAAYAFDYYRFDYWGQGTQVTVSS

SEQ ID NO: 947 - protein, 122 aa, Artificial Sequence
  Chemically Synthesized
QVQLQESGGGLVQAGGSLRLSCAASGTISSHYIMGWYRQAPGKERELVATIAVGSTTNYADSVKGRFTISRDNAKNTVYLQMNSLKPEDTAVYYCAVRQAERYQADYSHSYWGQGTQVTVSS

SEQ ID NO: 948 - protein, 126 aa, Artificial Sequence
  Chemically Synthesized
QVQLQESGGGLVQAGGSLRLSCAASGYIFLYYQMGWYRQAPGKERELVAGIGYGSTTNYADSVKGRFTISRDNAKNTVYLQMNSLKPEDTAVYYCAVGHYSAADPDADYHPGLAYWGQGTQVTVSS

SEQ ID NO: 949 - protein, 118 aa, Artificial Sequence
  Chemically Synthesized
QVQLQESGGGLVQAGGSLRLSCAASGYISSDADMGWYRQAPGKEREFVATIAAGAITNYADSVKGRFTISRDNAKNTVYLQMNSLKPEDTAVYYCAVYRLYDDWFAYWGQGTQVTVSS

SEQ ID NO: 950 - protein, 118 aa, Artificial Sequence
  Chemically Synthesized
QVQLQESGGGLVQAGGSLRLSCAASGYISGSHDMGWYRQAPGKEREFVATIGYGGSTYYADSVKGRFTISRDNAKNTVYLQMNSLKPEDTAVYYCAVPYVYDLSLAYWGQGTQVTVSS

SEQ ID NO: 951 - protein, 118 aa, Artificial Sequence
  Chemically Synthesized
QVQLQESGGGLVQAGGSLRLSCAASGYISRRNWMGWYRQAPGKEREFVATISVGTTTNYADSVKGRFTISRDNAKNTVYLQMNSLKPEDTAVYYCAAGYTAYYGLTYWGQGTQVTVSS

SEQ ID NO: 952 - protein, 122 aa, Artificial Sequence
  Chemically Synthesized
QVQLQESGGGLVQAGGSLRLSCAASGNIFSVYGMGWYRQAPGKERELVATISNGGSTYYADSVKGRFTISRDNAKNTVYLQMNSLKPEDTAVYYCAAWERQDALSIGTHPYWGQGTQVTVSS

SEQ ID NO: 953 - protein, 116 aa, Artificial Sequence
  Chemically Synthesized
QVQLQESGGGLVQAGGSLRLSCAASGTISGIYMGWYRQAPGKEREFVATIDAGSSTNYADSVKGRFTISRDNAKNTVYLQMNSLKPEDTAVYYCAVGSVPIANMYWGQGTQVTVSS

SEQ ID NO: 954 - protein, 118 aa, Artificial Sequence
  Chemically Synthesized
QVQLQESGGGLVQAGGSLRLSCAASGTIFFLYYMGWYRQAPGKERELVATITNGAITYYADSVKGRFTISRDNAKNTVYLQMNSLKPEDTAVYYCAAPYIVYAGLFYWGQGTQVTVSS

SEQ ID NO: 955 - protein, 116 aa, Artificial Sequence
  Chemically Synthesized
QVQLQESGGGLVQAGGSLRLSCAASGTIFGDSVMGWYRQAPGKERELVAAIAYGASTNYADSVKGRFTISRDNAKNTVYLQMNSLKPEDTAVYYCAVGDEAVPCYWGQGTQVTVSS

SEQ ID NO: 956 - protein, 116 aa, Artificial Sequence
  Chemically Synthesized
QVQLQESGGGLVQAGGSLRLSCAASGTISDVTMGWYRQAPGKERELVATISDGAITYYADSVKGRFTISRDNAKNTVYLQMNSLKPEDTAVYYCAARASLVCTLYWGQGTQVTVSS

SEQ ID NO: 957 - protein, 118 aa, Artificial Sequence
  Chemically Synthesized
QVQLQESGGGLVQAGGSLRLSCAASGTIFYIDDMGWYRQAPGKERELVATIDGGTITYYADSVKGRFTISRDNAKNTVYLQMNSLKPEDTAVYYCAAQDYSVQSLPYWGQGTQVTVSS

SEQ ID NO: 958 - protein, 112 aa, Artificial Sequence
  Chemically Synthesized
QVQLQESGGGLVQAGGSLRLSCAASGTIFLRPMGWYRQAPGKEREFVAGINYGGTTYYADSVKGRFTISRDNAKNTVYLQMNSLKPEDTAVYYCAALCSIYWGQGTQVTVSS

SEQ ID NO: 959 - protein, 118 aa, Artificial Sequence
  Chemically Synthesized
QVQLQESGGGLVQAGGSLRLSCAASGTISYDTFMGWYRQAPGKERELVAGIGDGANTNYADSVKGRFTISRDNAKNTVYLQMNSLKPEDTAVYYCAADVGEQWVLVYWGQGTQVTVSS

SEQ ID NO: 960 - protein, 115 aa, Artificial Sequence
  Chemically Synthesized
QVQLQESGGGLVQAGGSLRLSCAASGNISHQSMGWYRQAPGKERELVAGIDAGGITNYADSVKGRFTISRDNAKNTVYLQMNSLKPEDTAVYYCAADAGDNFGYWGQGTQVTVSS

SEQ ID NO: 961 - protein, 117 aa, Artificial Sequence
  Chemically Synthesized
QVQLQESGGGLVQAGGSLRLSCAASGIFLVTVMGWYRQAPGKEREFVAAITYGANTNYADSVKGRFTISRDNAKNTVYLQMNSLKPEDTAVYYCAALAYFYHPLDYWGQGTQVTVSS

SEQ ID NO: 962 - protein, 121 aa, Artificial Sequence
  Chemically Synthesized
QVQLQESGGGLVQAGGSLRLSCAASGYIFGGHDMGWYRQAPGKERELVASISSVLIPYADSVKGRFTISRDNAKNTVYLQMNSLKPEDTAVYYCAVPQYATYPVYVAYTYWGQGTQVTVSS

SEQ ID NO: 963 - protein, 122 aa, Artificial Sequence
  Chemically Synthesized
QVQLQESGGGLVQAGGSLRLSCAASGNIFGQYYMGWYRQAPGKEREFVAAINNGGTTNYADSVKGRFTISRDNAKNTVYLQMNSLKPEDTAVYYCAADTHAWYGGDDYFAYWGQGTQVTVSS

SEQ ID NO: 964 - protein, 122 aa, Artificial Sequence
  Chemically Synthesized
QVQLQESGGGLVQAGGSLRLSCAASGYISTRYYMGWYRQAPGKEREFVASINYGGTTNYADSVKGRFTISRDNAKNTVYLQMNSLKPEDTAVYYCAVYGYVTITNQYRHLYWGQGTQVTVSS

SEQ ID NO: 965 - protein, 118 aa, Artificial Sequence
  Chemically Synthesized
QVQLQESGGGLVQAGGSLRLSCAASGNISFSNDMGWYRQAPGKEREFVASIGEGSTTNYADSVKGRFTISRDNAKNTVYLQMNSLKPEDTAVYYCAVGSYPGPAAWYWGQGTQVTVSS

SEQ ID NO: 966 - protein, 118 aa, Artificial Sequence
  Chemically Synthesized
QVQLQESGGGLVQAGGSLRLSCAASGTISTNSYMGWYRQAPGKEREFVATISAGGITYYADSVKGRFTISRDNAKNTVYLQMNSLKPEDTAVYYCAARGYNDLSYYYWGQGTQVTVSS

SEQ ID NO: 967 - protein, 122 aa, Artificial Sequence
  Chemically Synthesized
QVQLQESGGGLVQAGGSLRLSCAASGTIFWPWTMGWYRQAPGKERELVATISGGSNTNYADSVKGRFTISRDNAKNTVYLQMNSLKPEDTAVYYCAVPYLYELPFDVQYDYWGQGTQVTVSS

SEQ ID NO: 968 - protein, 122 aa, Artificial Sequence
  Chemically Synthesized
QVQLQESGGGLVQAGGSLRLSCAASGNISDFPGMGWYRQAPGKERELVAAISDGATTYYADSVKGRFTISRDNAKNTVYLQMNSLKPEDTAVYYCAAIDGPAYLDEGWYVYWGQGTQVTVSS

SEQ ID NO: 969 - protein, 118 aa, Artificial Sequence
  Chemically Synthesized
QVQLQESGGGLVQAGGSLRLSCAASGTISNYYYMGWYRQAPGKEREFVAAITYGGTTYYADSVKGRFTISRDNAKNTVYLQMNSLKPEDTAVYYCAAWHTPYFRHDYWGQGTQVTVSS

SEQ ID NO: 970 - protein, 118 aa, Artificial Sequence
  Chemically Synthesized
QVQLQESGGGLVQAGGSLRLSCAASGNISWPDYMGWYRQAPGKEREFVATITGGATTNYADSVKGRFTISRDNAKNTVYLQMNSLKPEDTAVYYCAAAGHFTSRLAYWGQGTQVTVSS

SEQ ID NO: 971 - protein, 121 aa, Artificial Sequence
  Chemically Synthesized
QVQLQESGGGLVQAGGSLRLSCAASGSIFGYAMGWYRQAPGKERELVATITTGANTNYADSVKGRFTISRDNAKNTVYLQMNSLKPEDTAVYYCAVGLVRGDYLITDHYYWGQGTQVTVSS

SEQ ID NO: 972 - protein, 112 aa, Artificial Sequence
  Chemically Synthesized
QVQLQESGGGLVQAGGSLRLSCAASGTIFDADDMGWYRQAPGKEREFVALLVTVLIPYADSVKGRFTISRDNAKNTVYLQMNSLKPEDTAVYYCAVYDHSYWGQGTQVTVSS

SEQ ID NO: 973 - protein, 126 aa, Artificial Sequence
  Chemically Synthesized
QVQLQESGGGLVQAGGSLRLSCAASGYISRYGVMGWYRQAPGKEREFVASIDAGSNTYYADSVKGRFTISRDNAKNTVYLQMNSLKPEDTAVYYCAVDTIAPQYLDRSYNGSHAYWGQGTQVTVSS

SEQ ID NO: 974 - protein, 116 aa, Artificial Sequence
  Chemically Synthesized
QVQLQESGGGLVQAGGSLRLSCAASGTIFGVYMGWYRQAPGKERELVATITAGANTNYADSVKGRFTISRDNAKNTVYLQMNSLKPEDTAVYYCAVWYYPDLLMYWGQGTQVTVSS

SEQ ID NO: 975 - protein, 118 aa, Artificial Sequence
  Chemically Synthesized
QVQLQESGGGLVQAGGSLRLSCAASGSISDLYRMGWYRQAPGKERELVASITSGASTYYADSVKGRFTISRDNAKNTVYLQMNSLKPEDTAVYYCAAEPAGERGYPYWGQGTQVTVSS

SEQ ID NO: 976 - protein, 122 aa, Artificial Sequence
  Chemically Synthesized
QVQLQESGGGLVQAGGSLRLSCAASGNISPRGYMGWYRQAPGKEREFVATIADGGITYYADSVKGRFTISRDNAKNTVYLQMNSLKPEDTAVYYCAVLAYDNLYGDYQLYYWGQGTQVTVSS

SEQ ID NO: 977 - protein, 121 aa, Artificial Sequence
  Chemically Synthesized
QVQLQESGGGLVQAGGSLRLSCAASGNIFDRIGMGWYRQAPGKEREFVATIATVLVPYADSVKGRFTISRDNAKNTVYLQMNSLKPEDTAVYYCAATYWRIDAWYGYFPYWGQGTQVTVSS

SEQ ID NO: 978 - protein, 126 aa, Artificial Sequence
  Chemically Synthesized
QVQLQESGGGLVQAGGSLRLSCAASGYISADVAMGWYRQAPGKEREFVASIGEGASTYYADSVKGRFTISRDNAKNTVYLQMNSLKPEDTAVYYCAADLPFDHFYLSGNPYSYFYWGQGTQVTVSS

SEQ ID NO: 979 - protein, 117 aa, Artificial Sequence
  Chemically Synthesized
QVQLQESGGGLVQAGGSLRLSCAASGTIFDGWDMGWYRQAPGKEREFVAAIAVGTTTNYADSVKGRFTISRDNAKNTVYLQMNSLKPEDTAVYYCAVSGDYGYHAYWGQGTQVTVSS

SEQ ID NO: 980 - protein, 118 aa, Artificial Sequence
  Chemically Synthesized
QVQLQESGGGLVQAGGSLRLSCAASGSIFYDAFMGWYRQAPGKERELVAGIANGTSTNYADSVKGRFTISRDNAKNTVYLQMNSLKPEDTAVYYCAAYDWDHRYHYYWGQGTQVTVSS

SEQ ID NO: 981 - protein, 121 aa, Artificial Sequence
  Chemically Synthesized
QVQLQESGGGLVQAGGSLRLSCAASGNISYADSMGWYRQAPGKERELVASLLTVLLPYADSVKGRFTISRDNAKNTVYLQMNSLKPEDTAVYYCAAGAHYGHASFGALAYWGQGTQVTVSS

SEQ ID NO: 982 - protein, 126 aa, Artificial Sequence
  Chemically Synthesized
QVQLQESGGGLVQAGGSLRLSCAASGSISTYYTMGWYRQAPGKEREFVAGINLGSNTYYADSVKGRFTISRDNAKNTVYLQMNSLKPEDTAVYYCAATQSIYQEPYWVVEYTHAYWGQGTQVTVSS

SEQ ID NO: 983 - protein, 118 aa, Artificial Sequence
  Chemically Synthesized
QVQLQESGGGLVQAGGSLRLSCAASGNIFRTLIMGWYRQAPGKERELVAAIAQGTTTYYADSVKGRFTISRDNAKNTVYLQMNSLKPEDTAVYYCAVVYKWFRPLDYWGQGTQVTVSS

SEQ ID NO: 984 - protein, 117 aa, Artificial Sequence
  Chemically Synthesized
QVQLQESGGGLVQAGGSLRLSCAASGSIFQRPQMGWYRQAPGKERELVATITGGSITNYADSVKGRFTISRDNAKNTVYLQMNSLKPEDTAVYYCAVRYQYRSFIYWGQGTQVTVSS

SEQ ID NO: 985 - protein, 126 aa, Artificial Sequence
  Chemically Synthesized
QVQLQESGGGLVQAGGSLRLSCAASGYIFPYSLMGWYRQAPGKEREFVASITIGSNTYYADSVKGRFTISRDNAKNTVYLQMNSLKPEDTAVYYCAVYRYDEADYGVWYDLYFAYWGQGTQVTVSS

SEQ ID NO: 986 - protein, 121 aa, Artificial Sequence
  Chemically Synthesized
QVQLQESGGGLVQAGGSLRLSCAASGNISSTRMGWYRQAPGKERELVATITEGTTTNYADSVKGRFTISRDNAKNTVYLQMNSLKPEDTAVYYCAAQYRRASWYDTYFQYWGQGTQVTVSS

SEQ ID NO: 987 - protein, 109 aa, Artificial Sequence
  Chemically Synthesized
QVQLQESGGGLVQAGGSLRLSCAASGNISYVDRMGWYRQAPGKERELVATIGDGANTYYADSVKGRFTISRDNAKNTVYLQMNSLKPEDTAVYYCASYWGQGTQVTVSS

SEQ ID NO: 988 - protein, 118 aa, Artificial Sequence
  Chemically Synthesized
QVQLQESGGGLVQAGGSLRLSCAASGSIFARHRMGWYRQAPGKEREFVATITGGSITNYADSVKGRFTISRDNAKNTVYLQMNSLKPEDTAVYYCAVGDLSTQYYAYWGQGTQVTVSS

SEQ ID NO: 989 - protein, 118 aa, Artificial Sequence
  Chemically Synthesized
QVQLQESGGGLVQAGGSLRLSCAASGSIFYQPRMGWYRQAPGKERELVAGISQGGTTYYADSVKGRFTISRDNAKNTVYLQMNSLKPEDTAVYYCAAYTVETYFYGYWGQGTQVTVSS

SEQ ID NO: 990 - protein, 118 aa, Artificial Sequence
  Chemically Synthesized
QVQLQESGGGLVQAGGSLRLSCAASGNISRGSYMGWYRQAPGKEREFVATIGRGTNTNYADSVKGRFTISRDNAKNTVYLQMNSLKPEDTAVYYCAADTYSPSNFYYWGQGTQVTVSS

SEQ ID NO: 991 - protein, 121 aa, Artificial Sequence
  Chemically Synthesized
QVQLQESGGGLVQAGGSLRLSCAASGSIFDQIGMGWYRQAPGKERELVAAMLLVLVPYADSVKGRFTISRDNAKNTVYLQMNSLKPEDTAVYYCASVGFHYKQIRDYFSYWGQGTQVTVSS

SEQ ID NO: 992 - protein, 115 aa, Artificial Sequence
  Chemically Synthesized
QVQLQESGGGLVQAGGSLRLSCAASGSICCMGWYRQAPGKERELVATITYGSSTYYADSVKGRFTISRDNAKNTVYLQMNSLKPEDTAVYYCAVYQYLSHSYQYWGQGTQVTVSS

SEQ ID NO: 993 - protein, 118 aa, Artificial Sequence
  Chemically Synthesized
QVQLQESGGGLVQAGGSLRLSCAASGSIFHDPYMGWYRQAPGKEREFVAGIGIGTTTYYADSVKGRFTISRDNAKNTVYLQMNSLKPEDTAVYYCAATLRYVDYHTYWGQGTQVTVSS

SEQ ID NO: 994 - protein, 126 aa, Artificial Sequence
  Chemically Synthesized
QVQLQESGGGLVQAGGSLRLSCAASGYIFDDAYMGWYRQAPGKEREFVATISHGATTNYADSVKGRFTISRDNAKNTVYLQMNSLKPEDTAVYYCAVVPDYDTPVFPNGYLKFDYWGQGTQVTVSS

SEQ ID NO: 995 - protein, 118 aa, Artificial Sequence
  Chemically Synthesized
QVQLQESGGGLVQAGGSLRLSCAASGNISGGEAMGWYRQAPGKERELVAAITTGSTTYYADSVKGRFTISRDNAKNTVYLQMNSLKPEDTAVYYCAAYDDVAVKYNYWGQGTQVTVSS

SEQ ID NO: 996 - protein, 117 aa, Artificial Sequence
  Chemically Synthesized
QVQLQESGGGLVQAGGSLRLSCAASGTISGWDTMGWYRQAPGKEREFVASIGKGTNTYYADSVKGRFTISRDNAKNTVYLQMNSLKPEDTAVYYCAVLYTDFVLLYWGQGTQVTVSS

SEQ ID NO: 997 - protein, 118 aa, Artificial Sequence
  Chemically Synthesized
QVQLQESGGGLVQAGGSLRLSCAASGTISYDTGMGWYRQAPGKEREFVAGITGGTITNYADSVKGRFTISRDNAKNTVYLQMNSLKPEDTAVYYCAAGGDQRDQHPYWGQGTQVTVSS

SEQ ID NO: 998 - protein, 117 aa, Artificial Sequence
  Chemically Synthesized
QVQLQESGGGLVQAGGSLRLSCAASGNISGSGPMGWYRQAPGKEREFVATIVTVLLPYADSVKGRFTISRDNAKNTVYLQMNSLKPEDTAVYYCAVAGTGYITHAYWGQGTQVTVSS

SEQ ID NO: 999 - protein, 118 aa, Artificial Sequence
  Chemically Synthesized
QVQLQESGGGLVQAGGSLRLSCAASGYIFIGAGMGWYRQAPGKERELVAAITRGTITYYADSVKGRFTISRDNAKNTVYLQMNSLKPEDTAVYYCAVGTRRLVRFLYWGQGTQVTVSS

SEQ ID NO: 1000 - protein, 117 aa, Artificial Sequence
  Chemically Synthesized
QVQLQESGGGLVQAGGSLRLSCAASGTISYASYMGWYRQAPGKERELVASIGNGTSTNYADSVKGRFTISRDNAKNTVYLQMNSLKPEDTAVYYCAVNWYLGSTLYWGQGTQVTVSS

SEQ ID NO: 1001 - protein, 121 aa, Artificial Sequence
  Chemically Synthesized
QVQLQESGGGLVQAGGSLRLSCAASGNISPDVHMGWYRQAPGKERELVATIGWWYYQYADSVKGRFTISRDNAKNTVYLQMNSLKPEDTAVYYCAADWPWESADYYALTYWGQGTQVTVSS

SEQ ID NO: 1002 - protein, 119 aa, Artificial Sequence
  Chemically Synthesized
QVQLQESGGGLVQAGGSLRLSCAASGNISDSYDMGWYRQAPGKEREFVAAIDVGASTYYADSVKGRFTISRDNAKNTVYLQMNSLKPEDTAVYYCAYRQDAYAIGHLYWGQGTQVTVSS

SEQ ID NO: 1003 - protein, 118 aa, Artificial Sequence
  Chemically Synthesized
QVQLQESGGGLVQAGGSLRLSCAASGNISTVPYMGWYRQAPGKERELVATIAFGANTNYADSVKGRFTISRDNAKNTVYLQMNSLKPEDTAVYYCAVETTDRKVFYYWGQGTQVTVSS

SEQ ID NO: 1004 - protein, 122 aa, Artificial Sequence
  Chemically Synthesized
QVQLQESGGGLVQAGGSLRLSCAASGSISLFERMGWYRQAPGKEREFVASIDYGANTNYADSVKGRFTISRDNAKNTVYLQMNSLKPEDTAVYYCAVYATRVGPWRIYYSYWGQGTQVTVSS

SEQ ID NO: 1005 - protein, 126 aa, Artificial Sequence
  Chemically Synthesized
QVQLQESGGGLVQAGGSLRLSCAASGNISRYTHMGWYRQAPGKEREFVAAIDDGTTTYYADSVKGRFTISRDNAKNTVYLQMNSLKPEDTAVYYCAVYPPHAYPLQWWYGDYFPYWGQGTQVTVSS

SEQ ID NO: 1006 - protein, 118 aa, Artificial Sequence
  Chemically Synthesized
QVQLQESGGGLVQAGGSLRLSCAASGTIFYNYEMGWYRQAPGKEREFVASIDDGTTTYYADSVKGRFTISRDNAKNTVYLQMNSLKPEDTAVYYCAASVYYTDSHGYWGQGTQVTVSS

SEQ ID NO: 1007 - protein, 118 aa, Artificial Sequence
  Chemically Synthesized
QVQLQESGGGLVQAGGSLRLSCAASGNIFQSAPMGWYRQAPGKEREFVAGIDGGGTTYYADSVKGRFTISRDNAKNTVYLQMNSLKPEDTAVYYCAVDLGAYDLFTYWGQGTQVTVSS

SEQ ID NO: 1008 - protein, 118 aa, Artificial Sequence
  Chemically Synthesized
QVQLQESGGGLVQAGGSLRLSCAASGNISGYYYMGWYRQAPGKEREFVAAIGSGGTTNYADSVKGRFTISRDNAKNTVYLQMNSLKPEDTAVYYCAVYSQLSYSLAYWGQGTQVTVSS

SEQ ID NO: 1009 - protein, 122 aa, Artificial Sequence
  Chemically Synthesized
QVQLQESGGGLVQAGGSLRLSCAASGNIFRARDMGWYRQAPGKERELVASIGYGGNTNYADSVKGRFTISRDNAKNTVYLQMNSLKPEDTAVYYCAVGSTLYDDYRLLYVYWGQGTQVTVSS

SEQ ID NO: 1010 - protein, 118 aa, Artificial Sequence
  Chemically Synthesized
QVQLQESGGGLVQAGGSLRLSCAASGTIFVPYYMGWYRQAPGKERELVAGITEGSTTYYADSVKGRFTISRDNAKNTVYLQMNSLKPEDTAVYYCAVGPPTADGYAYWGQGTQVTVSS

SEQ ID NO: 1011 - protein, 125 aa, Artificial Sequence
  Chemically Synthesized
QVQLQESGGGLVQAGGSLRLSCAASGNISGLVRMGWYRQAPGKERELVATITYGSTNQYADSVKGRFTISRDNAKNTVYLQMNSLKPEDTAVYYCAVGVHTYVSLVTTITRTMYWGQGTQVTVSS

SEQ ID NO: 1012 - protein, 122 aa, Artificial Sequence
  Chemically Synthesized
QVQLQESGGGLVQAGGSLRLSCAASGYIFAIRRMGWYRQAPGKEREFVAGIAAGANTYYADSVKGRFTISRDNAKNTVYLQMNSLKPEDTAVYYCAVGPSAWFRPLYVYRYWGQGTQVTVSS

SEQ ID NO: 1013 - protein, 122 aa, Artificial Sequence
  Chemically Synthesized
QVQLQESGGGLVQAGGSLRLSCAASGSIFGSRDMGWYRQAPGKEREFVATIDYGAITYYADSVKGRFTISRDNAKNTVYLQMNSLKPEDTAVYYCAVYAVDGSYTVGRHSYWGQGTQVTVSS

SEQ ID NO: 1014 - protein, 121 aa, Artificial Sequence
  Chemically Synthesized
QVQLQESGGGLVQAGGSLRLSCAASGYISRVLDMGWYRQAPGKEREFVATIAYGGITYYADSVKGRFTISRDNAKNTVYLQMNSLKPEDTAVYYCAVATVWYRGDSTRMYWGQGTQVTVSS

SEQ ID NO: 1015 - protein, 122 aa, Artificial Sequence
  Chemically Synthesized
QVQLQESGGGLVQAGGSLRLSCAASGSISRTYYMGWYRQAPGKERELVAAITAGGNTNYADSVKGRFTISRDNAKNTVYLQMNSLKPEDTAVYYCAVSYRYTGRADVTFRYWGQGTQVTVSS

SEQ ID NO: 1016 - protein, 118 aa, Artificial Sequence
  Chemically Synthesized
QVQLQESGGGLVQAGGSLRLSCAASGYISYPYYMGWYRQAPGKEREFVASIAGGGNTNYADSVKGRFTISRDNAKNTVYLQMNSLKPEDTAVYYCAVIVAGYTQLHYWGQGTQVTVSS

SEQ ID NO: 1017 - protein, 122 aa, Artificial Sequence
  Chemically Synthesized
QVQLQESGGGLVQAGGSLRLSCAASGSIFDSPFMGWYRQAPGKEREFVASIGNGGSTYYADSVKGRFTISRDNAKNTVYLQMNSLKPEDTAVYYCAAGTAGYYGHKTQHHYWGQGTQVTVSS

SEQ ID NO: 1018 - protein, 122 aa, Artificial Sequence
  Chemically Synthesized
QVQLQESGGGLVQAGGSLRLSCAASGTISYSPGMGWYRQAPGKERELVAAIAVGGNTNYADSVKGRFTISRDNAKNTVYLQMNSLKPEDTAVYYCAAIDGTYDAYIWVLDYWGQGTQVTVSS

SEQ ID NO: 1019 - protein, 123 aa, Artificial Sequence
  Chemically Synthesized
QVQLQESGGGLVQAGGSLRLSCAASGTISDHTGMGWYRQAPGKERELVASIDVGTNTYYADSVKGRFTISRDNAKNTVYLQMNSLKPEDTAVYYCAVRAPRDYGESLTVTIYWGQGTQVTVSS

SEQ ID NO: 1020 - protein, 122 aa, Artificial Sequence
  Chemically Synthesized
QVQLQESGGGLVQAGGSLRLSCAASGTISAYTDMGWYRQAPGKEREFVAAIDSGASTNYADSVKGRFTISRDNAKNTVYLQMNSLKPEDTAVYYCAAYYPYYVVDARGHGYWGQGTQVTVSS

SEQ ID NO: 1021 - protein, 126 aa, Artificial Sequence
  Chemically Synthesized
QVQLQESGGGLVQAGGSLRLSCAASGTIFYTSRMGWYRQAPGKEREFVAAISAGANTYYADSVKGRFTISRDNAKNTVYLQMNSLKPEDTAVYYCAAKRYSRLSHWFIADRDLTYWGQGTQVTVSS

SEQ ID NO: 1022 - protein, 126 aa, Artificial Sequence
  Chemically Synthesized
QVQLQESGGGLVQAGGSLRLSCAASGTISSFTYMGWYRQAPGKERELVASISSGSTTYYADSVKGRFTISRDNAKNTVYLQMNSLKPEDTAVYYCAVRYLFLDRSRYNPTYTLQYWGQGTQVTVSS

SEQ ID NO: 1023 - protein, 126 aa, Artificial Sequence
  Chemically Synthesized
QVQLQESGGGLVQAGGSLRLSCAASGTISTAGVMGWYRQAPGKEREFVAAITYGGNTNYADSVKGRFTISRDNAKNTVYLQMNSLKPEDTAVYYCAVPEYYTYASDLYLDQVHHYWGQGTQVTVSS

SEQ ID NO: 1024 - protein, 122 aa, Artificial Sequence
  Chemically Synthesized
QVQLQESGGGLVQAGGSLRLSCAASGTIFVPSGMGWYRQAPGKEREFVATINSGATTYYADSVKGRFTISRDNAKNTVYLQMNSLKPEDTAVYYCAAARSGRYTLRTYHYYWGQGTQVTVSS

SEQ ID NO: 1025 - protein, 118 aa, Artificial Sequence
  Chemically Synthesized
QVQLQESGGGLVQAGGSLRLSCAASGTISWPRYMGWYRQAPGKEREFVAAIGRGATTYYADSVKGRFTISRDNAKNTVYLQMNSLKPEDTAVYYCAAQYVLGYGHGYWGQGTQVTVSS

SEQ ID NO: 1026 - protein, 126 aa, Artificial Sequence
  Chemically Synthesized
QVQLQESGGGLVQAGGSLRLSCAASGNIFWGYEMGWYRQAPGKERELVAAIGWGTNTNYADSVKGRFTISRDNAKNTVYLQMNSLKPEDTAVYYCASRTTLGGQWYLGYLSRLGYWGQGTQVTVSS

SEQ ID NO: 1027 - protein, 126 aa, Artificial Sequence
  Chemically Synthesized
QVQLQESGGGLVQAGGSLRLSCAASGTIFRGFKMGWYRQAPGKEREFVAAISAGTTTYYADSVKGRFTISRDNAKNTVYLQMNSLKPEDTAVYYCAVYYVYDNANRKDYDAYLYYWGQGTQVTVSS

SEQ ID NO: 1028 - protein, 113 aa, Artificial Sequence
  Chemically Synthesized
QVQLQESGGGLVQAGGSLRLSCAASGNISLDLSMGWYRQAPGKERENTYYADSVKGRFTISRDNAKNTVYLQMNSLKPEDTAVYYCAAGYVNGYDYQGNLSYWGQGTQVTVSS

SEQ ID NO: 1029 - protein, 111 aa, Artificial Sequence
  Chemically Synthesized
QVQLQESGGGLVQAGGSLRLSCAASGTIFYYLYMGWYRQAPGKEREFVAGIGTGAITYADSVKGRFTISRDNAKNTVYLQMNSLKPEDTAVYYCAAYPWYWGQGTQVTVSS

SEQ ID NO: 1030 - protein, 118 aa, Artificial Sequence
  Chemically Synthesized
QVQLQESGGGLVQAGGSLRLSCAASGNIFLATSMGWYRQAPGKEREFVAAINAGGSTYYADSVKGRFTISRDNAKNTVYLQMNSLKPEDTAVYYCAVIVQYGYGFGYWGQGTQVTVSS

SEQ ID NO: 1031 - protein, 118 aa, Artificial Sequence
  Chemically Synthesized
QVQLQESGGGLVQAGGSLRLSCAASGTIFLLGVMGWYRQAPGKERELVAAIGVGATTYYADSVKGRFTISRDNAKNTVYLQMNSLKPEDTAVYYCAAYTRAEFDLDYWGQGTQVTVSS

SEQ ID NO: 1032 - protein, 117 aa, Artificial Sequence
  Chemically Synthesized
QVQLQESGGGLVQAGGSLRLSCAASGNIFGYRSMGWYRQAPGKERELVASIMTVVLPYADSVKGRFTISRDNAKNTVYLQMNSLKPEDTAVYYCAAFEYFNGLHAYWGQGTQVTVSS

SEQ ID NO: 1033 - protein, 118 aa, Artificial Sequence
  Chemically Synthesized
QVQLQESGGGLVQAGGSLRLSCAASGTIFGADEMGWYRQAPGKERELVAAISYGAITYYADSVKGRFTISRDNAKNTVYLQMNSLKPEDTAVYYCAVDQDKRVDYGYWGQGTQVTVSS

SEQ ID NO: 1034 - protein, 126 aa, Artificial Sequence
  Chemically Synthesized
QVQLQESGGGLVQAGGSLRLSCAASGTIFRYGNMGWYRQAPGKERELVAGIGVGSNTYYADSVKGRFTISRDNAKNTVYLQMNSLKPEDTAVYYCAAAGYVAQSRSYDDYNVLSYWGQGTQVTVSS

SEQ ID NO: 1035 - protein, 126 aa, Artificial Sequence
  Chemically Synthesized
QVQLQESGGGLVQAGGSLRLSCAASGTISYLIAMGWYRQAPGKERELVATITLGGNTYYADSVKGRFTISRDNAKNTVYLQMNSLKPEDTAVYYCAVGIYDDVRGRRYAERDHWYWGQGTQVTVSS

SEQ ID NO: 1036 - protein, 122 aa, Artificial Sequence
  Chemically Synthesized
QVQLQESGGGLVQAGGSLRLSCAASGNISPHNDMGWYRQAPGKERELVATITPGATTYYADSVKGRFTISRDNAKNTVYLQMNSLKPEDTAVYYCAVQYFAAYYRPYLHVYWGQGTQVTVSS

SEQ ID NO: 1037 - protein, 121 aa, Artificial Sequence
  Chemically Synthesized
QVQLQESGGGLVQAGGSLRLSCAASGNIFGLTYMGWYRQAPGKEREFVAAIAYGGTTYYADSVKGRFTISRDNAKNTVYLQMNSLKPEDTAVYYCAVAAALLDKTGRSIYWGQGTQVTVSS

SEQ ID NO: 1038 - protein, 117 aa, Artificial Sequence
  Chemically Synthesized
QVQLQESGGGLVQAGGSLRLSCAASGTIFDTTDMGWYRQAPGKEREFVATIASGASTNYADSVKGRFTISRDNAKNTVYLQMNSLKPEDTAVYYCAVAIDTVDPCYWGQGTQVTVSS

SEQ ID NO: 1039 - protein, 119 aa, Artificial Sequence
  Chemically Synthesized
QVQLQESGGGLVQAGGSLRLSCAASGSIFSLVAMGWYRQAPGKEREFVAAINDGASTYYADSVKGRFTISRDNAKNTVYLQMNSLKPEDTAVYYCASDWWDSTRYYTYWGQGTQVTVSS

SEQ ID NO: 1040 - protein, 111 aa, Artificial Sequence
  Chemically Synthesized
QVQLQESGGGLVQAGGSLRLSCAASGYISDTDMGWYRQAPGKEREFVAGIDNGASTYYADSVKGRFTISRDNAKNTVYLQMNSLKPEDTAVYYCATLVIYWGQGTQVTVSS

SEQ ID NO: 1041 - protein, 121 aa, Artificial Sequence
  Chemically Synthesized
QVQLQESGGGLVQAGGSLRLSCAASGNIFGDEYMGWYRQAPGKEREFVAAIATGSITYYADSVKGRFTISRDNAKNTVYLQMNSLKPEDTAVYYCAAPRYYAYYTNLRRYWGQGTQVTVSS

SEQ ID NO: 1042 - protein, 118 aa, Artificial Sequence
  Chemically Synthesized
QVQLQESGGGLVQAGGSLRLSCAASGYISYGPFMGWYRQAPGKERELVAAISDGTSTNYADSVKGRFTISRDNAKNTVYLQMNSLKPEDTAVYYCAARNVYDSDYSYWGQGTQVTVSS

SEQ ID NO: 1043 - protein, 122 aa, Artificial Sequence
  Chemically Synthesized
QVQLQESGGGLVQAGGSLRLSCAASGNISPSRHMGWYRQAPGKERELVAGISYGGNTNYADSVKGRFTISRDNAKNTVYLQMNSLKPEDTAVYYCAVEDSEIDRAPRHHRYWGQGTQVTVSS

SEQ ID NO: 1044 - protein, 122 aa, Artificial Sequence
  Chemically Synthesized
QVQLQESGGGLVQAGGSLRLSCAASGYISAPQDMGWYRQAPGKERELVAAIGYGASTYYADSVKGRFTISRDNAKNTVYLQMNSLKPEDTAVYYCAARTSTDPPYGTGHRYWGQGTQVTVSS

SEQ ID NO: 1045 - protein, 118 aa, Artificial Sequence
  Chemically Synthesized
QVQLQESGGGLVQAGGSLRLSCAASGSIFEYQYMGWYRQAPGKERELVAAIGQGGITYYADSVKGRFTISRDNAKNTVYLQMNSLKPEDTAVYYCAVADTYYYAYRYWGQGTQVTVSS

SEQ ID NO: 1046 - protein, 122 aa, Artificial Sequence
  Chemically Synthesized
QVQLQESGGGLVQAGGSLRLSCAASGNIFLSFYMGWYRQAPGKERELVATIGDGSTTYYADSVKGRFTISRDNAKNTVYLQMNSLKPEDTAVYYCAAYIITPIYFGLYYYYWGQGTQVTVSS

SEQ ID NO: 1047 - protein, 125 aa, Artificial Sequence
  Chemically Synthesized
QVQLQESGGGLVQAGGSLRLSCAASGNIFGATSMGWYRQAPGKEREFVASITRGGTTYYADSVKGRFTISRDNAKNTVYLQMNSLKPEDTAVYYCAVYWDDDASWGVYDRYHGYWGQGTQVTVSS

SEQ ID NO: 1048 - protein, 121 aa, Artificial Sequence
  Chemically Synthesized
QVQLQESGGGLVQAGGSLRLSCAASGSISLYEGMGWYRQAPGKERELVAAISGGGNTNYADSVKGRFTISRDNAKNTVYLQMNSLKPEDTAVYYCAAGRYLDPYSTVFIYWGQGTQVTVSS

SEQ ID NO: 1049 - protein, 118 aa, Artificial Sequence
  Chemically Synthesized
QVQLQESGGGLVQAGGSLRLSCAASGNIFYSYSMGWYRQAPGKEREFVASIAYGGNTNYADSVKGRFTISRDNAKNTVYLQMNSLKPEDTAVYYCAAYPYDDYPHTYWGQGTQVTVSS

SEQ ID NO: 1050 - protein, 118 aa, Artificial Sequence
  Chemically Synthesized
QVQLQESGGGLVQAGGSLRLSCAASGTISPVRSMGWYRQAPGKERELVATIGNGATTNYADSVKGRFTISRDNAKNTVYLQMNSLKPEDTAVYYCAVIRYGYIGHFYWGQGTQVTVSS

SEQ ID NO: 1051 - protein, 118 aa, Artificial Sequence
  Chemically Synthesized
QVQLQESGGGLVQAGGSLRLSCAASGYIFLYIFMGWYRQAPGKEREFVAGIGPGGITYYADSVKGRFTISRDNAKNTVYLQMNSLKPEDTAVYYCAADTGPYDYLDYWGQGTQVTVSS

SEQ ID NO: 1052 - protein, 122 aa, Artificial Sequence
  Chemically Synthesized
QVQLQESGGGLVQAGGSLRLSCAASGTIFPSRTMGWYRQAPGKEREFVASITYGANTYYADSVKGRFTISRDNAKNTVYLQMNSLKPEDTAVYYCAAYPYAVKRQYDRFAYWGQGTQVTVSS

SEQ ID NO: 1053 - protein, 124 aa, Artificial Sequence
  Chemically Synthesized
QVQLQESGGGLVQAGGSLRLSCAASGTISLYAMGWYRQAPGKERELVAGISWGSSTNYADSVKGRFTISRDNAKNTVYLQMNSLKPEDTAVYYCAAGDPYDKRVKSNVTIRMYWGQGTQVTVSS

SEQ ID NO: 1054 - protein, 118 aa, Artificial Sequence
  Chemically Synthesized
QVQLQESGGGLVQAGGSLRLSCAASGTIFYFGGMGWYRQAPGKERELVASISYGGITNYADSVKGRFTISRDNAKNTVYLQMNSLKPEDTAVYYCAAIRRYINLHAYWGQGTQVTVSS

SEQ ID NO: 1055 - protein, 119 aa, Artificial Sequence
  Chemically Synthesized
QVQLQESGGGLVQAGGSLRLSCAASGTISFDDYMGWYRQAPGKERELVAGIAEGAITNYADSVKGRFTISRDNAKNTVYLQMNSLKPEDTAVYYCAARNPLAGRGYDYWGQGTQVTVSS

SEQ ID NO: 1056 - protein, 122 aa, Artificial Sequence
  Chemically Synthesized
QVQLQESGGGLVQAGGSLRLSCAASGTIFGVSVMGWYRQAPGKERELVAAIATGTNTYYADSVKGRFTISRDNAKNTVYLQMNSLKPEDTAVYYCAVGPQYGYYVGGYYAYWGQGTQVTVSS

SEQ ID NO: 1057 - protein, 118 aa, Artificial Sequence
  Chemically Synthesized
QVQLQESGGGLVQAGGSLRLSCAASGYISAVNVMGWYRQAPGKEREFVAAIDLGGNTNYADSVKGRFTISRDNAKNTVYLQMNSLKPEDTAVYYCAAWEIGGRGHRYWGQGTQVTVSS

SEQ ID NO: 1058 - protein, 117 aa, Artificial Sequence
  Chemically Synthesized
QVQLQESGGGLVQAGGSLRLSCAASGTISTPQWMGWYRQAPGKEREFVASIAGGGTNYADSVKGRFTISRDNAKNTVYLQMNSLKPEDTAVYYCAAYTSDKYWFWYWGQGTQVTVSS

SEQ ID NO: 1059 - protein, 122 aa, Artificial Sequence
  Chemically Synthesized
QVQLQESGGGLVQAGGSLRLSCAASGTIFQWAYMGWYRQAPGKERELVASIGNGSNTNYADSVKGRFTISRDNAKNTVYLQMNSLKPEDTAVYYCAVILIQDPYDGDDHVYWGQGTQVTVSS

SEQ ID NO: 1060 - protein, 126 aa, Artificial Sequence
  Chemically Synthesized
QVQLQESGGGLVQAGGSLRLSCAASGSISDVDYMGWYRQAPGKERELVAGIDDGGITYYADSVKGRFTISRDNAKNTVYLQMNSLKPEDTAVYYCAVYPAVAYTGDEYIDTALWYWGQGTQVTVSS

SEQ ID NO: 1061 - protein, 117 aa, Artificial Sequence
  Chemically Synthesized
QVQLQESGGGLVQAGGSLRLSCAASGYIFYYYTMGWYRQAPGKERELVATIGDGSNTNYADSVKGRFTISRDNAKNTVYLQMNSLKPEDTAVYYCAASNTKLVSIYWGQGTQVTVSS

SEQ ID NO: 1062 - protein, 114 aa, Artificial Sequence
  Chemically Synthesized
QVQLQESGGGLVQAGGSLRLSCAASGYIFEYSYMGWYRQAPGKERELVAGIADVLVPYADSVKGRFTISRDNAKNTVYLQMNSLKPEDTAVYYCAVYELVVYYWGQGTQVTVSS

SEQ ID NO: 1063 - protein, 118 aa, Artificial Sequence
  Chemically Synthesized
QVQLQESGGGLVQAGGSLRLSCAASGTIFDAWLMGWYRQAPGKERELVATITIGGTTYYADSVKGRFTISRDNAKNTVYLQMNSLKPEDTAVYYCAAIANDTWRFPYWGQGTQVTVSS

SEQ ID NO: 1064 - protein, 122 aa, Artificial Sequence
  Chemically Synthesized
QVQLQESGGGLVQAGGSLRLSCAASGYISTLGYMGWYRQAPGKEREFVAAIGTGANTNYADSVKGRFTISRDNAKNTVYLQMNSLKPEDTAVYYCAVAPYTGNVYPYWFYYWGQGTQVTVSS

SEQ ID NO: 1065 - protein, 122 aa, Artificial Sequence
  Chemically Synthesized
QVQLQESGGGLVQAGGSLRLSCAASGTIFNSFAMGWYRQAPGKERELVAAINYGASTNYADSVKGRFTISRDNAKNTVYLQMNSLKPEDTAVYYCAVILYSYYDHVYAHLYWGQGTQVTVSS

SEQ ID NO: 1066 - protein, 118 aa, Artificial Sequence
  Chemically Synthesized
QVQLQESGGGLVQAGGSLRLSCAASGYISPDLWMGWYRQAPGKERELVAAITIGANTNYADSVKGRFTISRDNAKNTVYLQMNSLKPEDTAVYYCAVVYTAYVPYVYWGQGTQVTVSS

SEQ ID NO: 1067 - protein, 118 aa, Artificial Sequence
  Chemically Synthesized
QVQLQESGGGLVQAGGSLRLSCAASGSISPTVYMGWYRQAPGKEREFVASIAAGTTTNYADSVKGRFTISRDNAKNTVYLQMNSLKPEDTAVYYCAADIRARYSLAYWGQGTQVTVSS

SEQ ID NO: 1068 - protein, 122 aa, Artificial Sequence
  Chemically Synthesized
QVQLQESGGGLVQAGGSLRLSCAASGTIFGYLAMGWYRQAPGKERELVAAISTGTTTYYADSVKGRFTISRDNAKNTVYLQMNSLKPEDTAVYYCAVLYWYVTWRVYDFIYWGQGTQVTVSS

SEQ ID NO: 1069 - protein, 118 aa, Artificial Sequence
  Chemically Synthesized
QVQLQESGGGLVQAGGSLRLSCAASGNIFYDTDMGWYRQAPGKERELVAAITRGATTNYADSVKGRFTISRDNAKNTVYLQMNSLKPEDTAVYYCAVLTTVAELYAYWGQGTQVTVSS

SEQ ID NO: 1070 - protein, 122 aa, Artificial Sequence
  Chemically Synthesized
QVQLQESGGGLVQAGGSLRLSCAASGNIFNYDAMGWYRQAPGKEREFVATITDGSNTNYADSVKGRFTISRDNAKNTVYLQMNSLKPEDTAVYYCAVRVLKYLYYYLYHLYWGQGTQVTVSS

SEQ ID NO: 1071 - protein, 126 aa, Artificial Sequence
  Chemically Synthesized
QVQLQESGGGLVQAGGSLRLSCAASGYIFAFDTMGWYRQAPGKERELVAAISNGGITYYADSVKGRFTISRDNAKNTVYLQMNSLKPEDTAVYYCAVDYSRDTPSGYWQGESHYYWGQGTQVTVSS

SEQ ID NO: 1072 - protein, 118 aa, Artificial Sequence
  Chemically Synthesized
QVQLQESGGGLVQAGGSLRLSCAASGTISYPYIMGWYRQAPGKEREFVAAIDLGCYYQYADSVKGRFTISRDNAKNTVYLQMNSLKPEDTAVYYCAVTWDISGGFGYWGQGTQVTVSS

SEQ ID NO: 1073 - protein, 118 aa, Artificial Sequence
  Chemically Synthesized
QVQLQESGGGLVQAGGSLRLSCAASGNIFTYSYMGWYRQAPGKEREFVATITEGASTYYADSVKGRFTISRDNAKNTVYLQMNSLKPEDTAVYYCAVSEYYLYYYRYWGQGTQVTVSS

SEQ ID NO: 1074 - protein, 122 aa, Artificial Sequence
  Chemically Synthesized
QVQLQESGGGLVQAGGSLRLSCAASGTISTYNYMGWYRQAPGKERELVAAINRGATTNYADSVKGRFTISRDNAKNTVYLQMNSLKPEDTAVYYCAVGKIRATRYGGYHYYWGQGTQVTVSS

SEQ ID NO: 1075 - protein, 113 aa, Artificial Sequence
  Chemically Synthesized
QVQLQESGGGLVQAGGSLRLSCAASGTIFSSPWMGWYRQAPGKEREFVATIAGGGITYYADSVKGRFTISRDNAKNTVYLQMNSLKPEDTAVYYCAARDHDYWGQGTQVTVSS

SEQ ID NO: 1076 - protein, 117 aa, Artificial Sequence
  Chemically Synthesized
QVQLQESGGGLVQAGGSLRLSCAASGTIFTTLMGWYRQAPGKERELVAAINYGAITNYADSVKGRFTISRDNAKNTVYLQMNSLKPEDTAVYYCAADLDDTYWYRYWGQGTQVTVSS

SEQ ID NO: 1077 - protein, 126 aa, Artificial Sequence
  Chemically Synthesized
QVQLQESGGGLVQAGGSLRLSCAASGNISPYAIMGWYRQAPGKERELVAAINLGGITYYADSVKGRFTISRDNAKNTVYLQMNSLKPEDTAVYYCAVYRYYRPSQPGIDYALHRYWGQGTQVTVSS

SEQ ID NO: 1078 - protein, 116 aa, Artificial Sequence
  Chemically Synthesized
QVQLQESGGGLVQAGGSLRLSCAASGSISTSRMGWYRQAPGKERELVAGISDGAITYYADSVKGRFTISRDNAKNTVYLQMNSLKPEDTAVYYCAVQYHVAFTFYWGQGTQVTVSS

SEQ ID NO: 1079 - protein, 118 aa, Artificial Sequence
  Chemically Synthesized
QVQLQESGGGLVQAGGSLRLSCAASGYISAAAYMGWYRQAPGKERELVATITGGATTYYADSVKGRFTISRDNAKNTVYLQMNSLKPEDTAVYYCAAGPYDTLTHLYWGQGTQVTVSS

SEQ ID NO: 1080 - protein, 109 aa, Artificial Sequence
  Chemically Synthesized
QVQLQESGGGLVQAGGSLRLSCAASGNISHVVRMGWYRQAPGKERELVASITYGATTNYADSVKGRFTISRDNAKNTVYLQMNSLKPEDTAVYYCAFYWGQGTQVTVSS

SEQ ID NO: 1081 - protein, 126 aa, Artificial Sequence
  Chemically Synthesized
QVQLQESGGGLVQAGGSLRLSCAASGNISGDGYMGWYRQAPGKERELVAAIGDGTSTYYADSVKGRFTISRDNAKNTVYLQMNSLKPEDTAVYYCAAGYVTPAGDDDLPDTAFVYWGQGTQVTVSS

SEQ ID NO: 1082 - protein, 117 aa, Artificial Sequence
  Chemically Synthesized
QVQLQESGGGLVQAGGSLRLSCAASGNISWRWIMGWYRQAPGKEREFVAGIAVGRLPYADSVKGRFTISRDNAKNTVYLQMNSLKPEDTAVYYCAVAVYDDATHDYWGQGTQVTVSS

SEQ ID NO: 1083 - protein, 111 aa, Artificial Sequence
  Chemically Synthesized
QVQLQESGGGLVQAGGSLRLSCAASGTISSVSMGWYRQAPGKEREFVAGIDRGATTNYADSVKGRFTISRDNAKNTVYLQMNSLKPEDTAVYYCAAVLVYWGQGTQVTVSS

SEQ ID NO: 1084 - protein, 122 aa, Artificial Sequence
  Chemically Synthesized
QVQLQESGGGLVQAGGSLRLSCAASGTIFPTRRMGWYRQAPGKERELVASITYGTTTNYADSVKGRFTISRDNAKNTVYLQMNSLKPEDTAVYYCAVNTDGYQDAKAYLSYWGQGTQVTVSS

SEQ ID NO: 1085 - protein, 120 aa, Artificial Sequence
  Chemically Synthesized
QVQLQESGGGLVQAGGSLRLSCAASGTIFLTFMGWYRQAPGKERELVAAINRGASTNYADSVKGRFTISRDNAKNTVYLQMNSLKPEDTAVYYCAFTLRSTRTTTGVMYWGQGTQVTVSS

SEQ ID NO: 1086 - protein, 126 aa, Artificial Sequence
  Chemically Synthesized
QVQLQESGGGLVQAGGSLRLSCAASGTISVPIYMGWYRQAPGKERELVASISSGTITNYADSVKGRFTISRDNAKNTVYLQMNSLKPEDTAVYYCAAYYVGDPHFYPLGLVVLGYWGQGTQVTVSS

SEQ ID NO: 1087 - protein, 122 aa, Artificial Sequence
  Chemically Synthesized
QVQLQESGGGLVQAGGSLRLSCAASGNISGLYEMGWYRQAPGKEREFVATISDGTTTNYADSVKGRFTISRDNAKNTVYLQMNSLKPEDTAVYYCAAGDDAAKRRAYRYAYWGQGTQVTVSS

SEQ ID NO: 1088 - protein, 118 aa, Artificial Sequence
  Chemically Synthesized
QVQLQESGGGLVQAGGSLRLSCAASGTIFVADPMGWYRQAPGKERELVAGITRGANTYYADSVKGRFTISRDNAKNTVYLQMNSLKPEDTAVYYCAVIAIEYHLHAYWGQGTQVTVSS

SEQ ID NO: 1089 - protein, 118 aa, Artificial Sequence
  Chemically Synthesized
QVQLQESGGGLVQAGGSLRLSCAASGTISPPYTMGWYRQAPGKEREFVATIAAGSNTNYADSVKGRFTISRDNAKNTVYLQMNSLKPEDTAVYYCAVVYLRDIPFFYWGQGTQVTVSS

SEQ ID NO: 1090 - protein, 121 aa, Artificial Sequence
  Chemically Synthesized
QVQLQESGGGLVQAGGSLRLSCAASGYIFWSLMGWYRQAPGKERELVATIGYGSSTYYADSVKGRFTISRDNAKNTVYLQMNSLKPEDTAVYYCAAYDAGPYTNLFQHGYWGQGTQVTVSS

SEQ ID NO: 1091 - protein, 118 aa, Artificial Sequence
  Chemically Synthesized
QVQLQESGGGLVQAGGSLRLSCAASGTISELYYMGWYRQAPGKEREFVATINDGTITNYADSVKGRFTISRDNAKNTVYLQMNSLKPEDTAVYYCAVLYDGYAYHSYWGQGTQVTVSS

SEQ ID NO: 1092 - protein, 117 aa, Artificial Sequence
  Chemically Synthesized
QVQLQESGGGLVQAGGSLRLSCAASGYISPPYGMGWYRQAPGKERELVASISRGSITNYADSVKGRFTISRDNAKNTVYLQMNSLKPEDTAVYYCAVYGYAYDHQYWGQGTQVTVSS

SEQ ID NO: 1093 - protein, 122 aa, Artificial Sequence
  Chemically Synthesized
QVQLQESGGGLVQAGGSLRLSCAASGNISHYVGMGWYRQAPGKERELVATITTGGNTYYADSVKGRFTISRDNAKNTVYLQMNSLKPEDTAVYYCAVNRHNVYIVYSGLRYWGQGTQVTVSS

SEQ ID NO: 1094 - protein, 126 aa, Artificial Sequence
  Chemically Synthesized
QVQLQESGGGLVQAGGSLRLSCAASGYISFHPLMGWYRQAPGKERELVAGIGYGTTTYYADSVKGRFTISRDNAKNTVYLQMNSLKPEDTAVYYCAAYYRIVPDVYYYYGYDYHYWGQGTQVTVSS

SEQ ID NO: 1095 - protein, 117 aa, Artificial Sequence
  Chemically Synthesized
QVQLQESGGGLVQAGGSLRLSCAASGTIFDFIMGWYRQAPGKERELVAAITLGAITYYADSVKGRFTISRDNAKNTVYLQMNSLKPEDTAVYYCAANYQDTDRHWYWGQGTQVTVSS

SEQ ID NO: 1096 - protein, 105 aa, Artificial Sequence
  Chemically Synthesized
QVQLQESGGGLVQAGGSLRLSCAASGSCMGWYRQAPGKERELVATITDGSSTNYADSVKGRFTISRDNAKNTVYLQMNSLKPEDTAVYYCAAVYWGQGTQVTVSS

SEQ ID NO: 1097 - protein, 117 aa, Artificial Sequence
  Chemically Synthesized
QVQLQESGGGLVQAGGSLRLSCAASGTIFSGDGMGWYRQAPGKEREFVAAIGSVLVPYADSVKGRFTISRDNAKNTVYLQMNSLKPEDTAVYYCAVVYPYVVLHGYWGQGTQVTVSS

SEQ ID NO: 1098 - protein, 126 aa, Artificial Sequence
  Chemically Synthesized
QVQLQESGGGLVQAGGSLRLSCAASGSISYEPTMGWYRQAPGKEREFVAGIADGASTNYADSVKGRFTISRDNAKNTVYLQMNSLKPEDTAVYYCAATYQYATLVSRDYYYHHAYWGQGTQVTVSS

SEQ ID NO: 1099 - protein, 122 aa, Artificial Sequence
  Chemically Synthesized
QVQLQESGGGLVQAGGSLRLSCAASGNISGPRSMGWYRQAPGKERELVAGISRGTITYYADSVKGRFTISRDNAKNTVYLQMNSLKPEDTAVYYCAVGVGRYYYSYYPHYYWGQGTQVTVSS

SEQ ID NO: 1100 - protein, 118 aa, Artificial Sequence
  Chemically Synthesized
QVQLQESGGGLVQAGGSLRLSCAASGTISDYVYMGWYRQAPGKERELVATISAGGTTYYADSVKGRFTISRDNAKNTVYLQMNSLKPEDTAVYYCAALSAGQYRYDYWGQGTQVTVSS

SEQ ID NO: 1101 - protein, 110 aa, Artificial Sequence
  Chemically Synthesized
QVQLQESGGGLVQAGGSLRLSCAASGNMGWYRQAPGKERELVASITQGTSTYYADSVKGRFTISRDNAKNTVYLQMNSLKPEDTAVYYCAVYGYGVHDYWGQGTQVTVSS

SEQ ID NO: 1102 - protein, 122 aa, Artificial Sequence
  Chemically Synthesized
QVQLQESGGGLVQAGGSLRLSCAASGYISWDDDMGWYRQAPGKERELVATINSGGITNYADSVKGRFTISRDNAKNTVYLQMNSLKPEDTAVYYCAAYPYTLTYEWYTYGYWGQGTQVTVSS

SEQ ID NO: 1103 - protein, 126 aa, Artificial Sequence
  Chemically Synthesized
QVQLQESGGGLVQAGGSLRLSCAASGSISGSSNMGWYRQAPGKERELVAAIDDGTTTNYADSVKGRFTISRDNAKNTVYLQMNSLKPEDTAVYYCAVRGTGWAGPFPPWYGDHAYWGQGTQVTVSS

SEQ ID NO: 1104 - protein, 118 aa, Artificial Sequence
  Chemically Synthesized
QVQLQESGGGLVQAGGSLRLSCAASGNISAADIMGWYRQAPGKERELVASISYGANTYYADSVKGRFTISRDNAKNTVYLQMNSLKPEDTAVYYCAASGYSDSSFAYWGQGTQVTVSS

SEQ ID NO: 1105 - protein, 116 aa, Artificial Sequence
  Chemically Synthesized
QVQLQESGGGLVQAGGSLRLSCAASGYISLYPDMGWYRQAPGKERELVATIGRGANTNYADSVKGRFTISRDNAKNTVYLQMNSLKPEDTAVYYCAVPSLLTSFYWGQGTQVTVSS

SEQ ID NO: 1106 - protein, 118 aa, Artificial Sequence
  Chemically Synthesized
QVQLQESGGGLVQAGGSLRLSCAASGSIFGSNEMGWYRQAPGKEREFVATITSGGNTNYADSVKGRFTISRDNAKNTVYLQMNSLKPEDTAVYYCAARTYTYPFHYYWGQGTQVTVSS

SEQ ID NO: 1107 - protein, 118 aa, Artificial Sequence
  Chemically Synthesized
QVQLQESGGGLVQAGGSLRLSCAASGTISRRDYMGWYRQAPGKERELVASIDVGSTTYYADSVKGRFTISRDNAKNTVYLQMNSLKPEDTAVYYCAAGYDPWEPHDYWGQGTQVTVSS

SEQ ID NO: 1108 - protein, 118 aa, Artificial Sequence
  Chemically Synthesized
QVQLQESGGGLVQAGGSLRLSCAASGNISTGLYMGWYRQAPGKERELVAAIDVGGNTYYADSVKGRFTISRDNAKNTVYLQMNSLKPEDTAVYYCAADYDPWYLFAYWGQGTQVTVSS

SEQ ID NO: 1109 - protein, 117 aa, Artificial Sequence
  Chemically Synthesized
QVQLQESGGGLVQAGGSLRLSCAASGNISGYWAMGWYRQAPGKEREFVAAIASGGNTYYADSVKGRFTISRDNAKNTVYLQMNSLKPEDTAVYYCAVYDWEDELTYWGQGTQVTVSS

SEQ ID NO: 1110 - protein, 121 aa, Artificial Sequence
  Chemically Synthesized
QVQLQESGGGLVQAGGSLRLSCAASGNIFRYLDMGWYRQAPGKERELVAAIAVGSNTYYADSVKGRFTISRDNAKNTVYLQMNSLKPEDTAVYYCAAYVYTDDQWSGHSYWGQGTQVTVSS

SEQ ID NO: 1111 - protein, 118 aa, Artificial Sequence
  Chemically Synthesized
QVQLQESGGGLVQAGGSLRLSCAASGSIFARYYMGWYRQAPGKERELVAAIDRGSTTYYADSVKGRFTISRDNAKNTVYLQMNSLKPEDTAVYYCAASRFDPWYHDYWGQGTQVTVSS

SEQ ID NO: 1112 - protein, 118 aa, Artificial Sequence
  Chemically Synthesized
QVQLQESGGGLVQAGGSLRLSCAASGSIFRLIFMGWYRQAPGKEREFVASIDYGSTTNYADSVKGRFTISRDNAKNTVYLQMNSLKPEDTAVYYCAVYYSDDYDLDYWGQGTQVTVSS

SEQ ID NO: 1113 - protein, 118 aa, Artificial Sequence
  Chemically Synthesized
QVQLQESGGGLVQAGGSLRLSCAASGSIFLQYYMGWYRQAPGKERELVASIDDGANTYYADSVKGRFTISRDNAKNTVYLQMNSLKPEDTAVYYCAADDYDPWDHYYWGQGTQVTVSS

SEQ ID NO: 1114 - protein, 118 aa, Artificial Sequence
  Chemically Synthesized
QVQLQESGGGLVQAGGSLRLSCAASGTISRRDYMGWYRQAPGKERELVASIDVGSTTYYADSVKGRFTISRDNAKNTVYLQMNSLKPEDTAVYYCAVDSYDPYDLAYWGQGTQVTVSS

SEQ ID NO: 1115 - protein, 122 aa, Artificial Sequence
  Chemically Synthesized
QVQLQESGGGLVQAGGSLRLSCAASGSISPGEYMGWYRQAPGKEREFVASIDVGTITNYADSVKGRFTISRDNAKNTVYLQMNSLKPEDTAVYYCAVGVTPSLSAYYSHWYWGQGTQVTVSS

SEQ ID NO: 1116 - protein, 126 aa, Artificial Sequence
  Chemically Synthesized
QVQLQESGGGLVQAGGSLRLSCAASGTIFYTYDMGWYRQAPGKERELVASIGRGGTTYYADSVKGRFTISRDNAKNTVYLQMNSLKPEDTAVYYCAALLYYPDNDLDYGVYSHSYWGQGTQVTVSS

SEQ ID NO: 1117 - protein, 116 aa, Artificial Sequence
  Chemically Synthesized
QVQLQESGGGLVQAGGSLRLSCAASGNIFFIDMGWYRQAPGKEREFVATMVTVLLPYADSVKGRFTISRDNAKNTVYLQMNSLKPEDTAVYYCAVYYLGYARHYYWGQGTQVTVSS

SEQ ID NO: 1118 - protein, 119 aa, Artificial Sequence
  Chemically Synthesized
QVQLQESGGGLVQAGGSLRLSCAASGSISKALGMGWYRQAPGKEREFVASINVGSITYYADSVKGRFTISRDNAKNTVYLQMNSLKPEDTAVYYCAVLDPWYDDSFLYWGQGTQVTVSS

SEQ ID NO: 1119 - protein, 118 aa, Artificial Sequence
  Chemically Synthesized
QVQLQESGGGLVQAGGSLRLSCAASGTIFYFIEMGWYRQAPGKERELVASIDYGATTYYADSVKGRFTISRDNAKNTVYLQMNSLKPEDTAVYYCAVSTADDYAHFYWGQGTQVTVSS

SEQ ID NO: 1120 - protein, 122 aa, Artificial Sequence
  Chemically Synthesized
QVQLQESGGGLVQAGGSLRLSCAASGTISGQTDMGWYRQAPGKEREFVATISGGASTYYADSVKGRFTISRDNAKNTVYLQMNSLKPEDTAVYYCAVGFYSGEDDWDYHVYWGQGTQVTVSS

SEQ ID NO: 1121 - protein, 121 aa, Artificial Sequence
  Chemically Synthesized
QVQLQESGGGLVQAGGSLRLSCAASGYIFYYLYMGWYRQAPGKEREFVAGIDFGGTTNYADSVKGRFTISRDNAKNTVYLQMNSLKPEDTAVYYCAVEYTDINTYYYLDYWGQGTQVTVSS

SEQ ID NO: 1122 - protein, 121 aa, Artificial Sequence
  Chemically Synthesized
QVQLQESGGGLVQAGGSLRLSCAASGTIFGADMGWYRQAPGKEREFVASIGSGSNTYYADSVKGRFTISRDNAKNTVYLQMNSLKPEDTAVYYCAALYFGKGWDDQQYTYWGQGTQVTVSS

SEQ ID NO: 1123 - protein, 115 aa, Artificial Sequence
  Chemically Synthesized
QVQLQESGGGLVQAGGSLRLSCAASGYIFDSSGMGWYRQAPGKEREFVATIAAGGSTYYADSVKGRFTISRDNAKNTVYLQMNSLKPEDTAVYYCAVYRRPYVYWGQGTQVTVSS

SEQ ID NO: 1124 - protein, 122 aa, Artificial Sequence
  Chemically Synthesized
QVQLQESGGGLVQAGGSLRLSCAASGTISLGAGMGWYRQAPGKERELVATITNGGSTYYADSVKGRFTISRDNAKNTVYLQMNSLKPEDTAVYYCAVPQWYDWYQDDYHVYWGQGTQVTVSS

SEQ ID NO: 1125 - protein, 118 aa, Artificial Sequence
  Chemically Synthesized
QVQLQESGGGLVQAGGSLRLSCAASGSIFQWYYMGWYRQAPGKERELVATISVGGITNYADSVKGRFTISRDNAKNTVYLQMNSLKPEDTAVYYCAARITYDYRFAYWGQGTQVTVSS

SEQ ID NO: 1126 - protein, 118 aa, Artificial Sequence
  Chemically Synthesized
QVQLQESGGGLVQAGGSLRLSCAASGSIFWDGYMGWYRQAPGKEREFVAAIAFGASTNYADSVKGRFTISRDNAKNTVYLQMNSLKPEDTAVYYCAAHYDGRRPYGYWGQGTQVTVSS

SEQ ID NO: 1127 - protein, 118 aa, Artificial Sequence
  Chemically Synthesized
QVQLQESGGGLVQAGGSLRLSCAASGYIFADEYMGWYRQAPGKERELVASISYGTTTYYADSVKGRFTISRDNAKNTVYLQMNSLKPEDTAVYYCAAATYGDLLLSYWGQGTQVTVSS

SEQ ID NO: 1128 - protein, 118 aa, Artificial Sequence
  Chemically Synthesized
QVQLQESGGGLVQAGGSLRLSCAASGYISLPLYMGWYRQAPGKERELVAAIGTGSSTYYADSVKGRFTISRDNAKNTVYLQMNSLKPEDTAVYYCAAYHRWLRAHSYWGQGTQVTVSS

SEQ ID NO: 1129 - protein, 121 aa, Artificial Sequence
  Chemically Synthesized
QVQLQESGGGLVQAGGSLRLSCAASGSIFAQVWMGWYRQAPGKEREFVAGISTGGSTYYADSVKGRFTISRDNAKNTVYLQMNSLKPEDTAVYYCAAPSGTLLNRTTTFYWGQGTQVTVSS

SEQ ID NO: 1130 - protein, 118 aa, Artificial Sequence
  Chemically Synthesized
QVQLQESGGGLVQAGGSLRLSCAASGNISGDYAMGWYRQAPGKERELVASIDLGSTTNYADSVKGRFTISRDNAKNTVYLQMNSLKPEDTAVYYCAVTRYWLWDFSYWGQGTQVTVSS

SEQ ID NO: 1131 - protein, 119 aa, Artificial Sequence
  Chemically Synthesized
QVQLQESGGGLVQAGGSLRLSCAASGTIFPWTSMGWYRQAPGKEREFVAGIGPAGAITYYADSVKGRFTISRDNAKNTVYLQMNSLKPEDTAVYYCAVTDVIYHPLAYWGQGTQVTVSS

SEQ ID NO: 1132 - protein, 120 aa, Artificial Sequence
  Chemically Synthesized
QVQLQESGGGLVQAGGSLRLSCAASGYIFLSTMGWYRQAPGKEREFVASITRGTYLYADSVKGRFTISRDNAKNTVYLQMNSLKPEDTAVYYCAVVQYVSDGGYGSLDYWGQGTQVTVSS

SEQ ID NO: 1133 - protein, 118 aa, Artificial Sequence
  Chemically Synthesized
QVQLQESGGGLVQAGGSLRLSCAASGTIFVLLYMGWYRQAPGKEREFVAAITYGASTNYADSVKGRFTISRDNAKNTVYLQMNSLKPEDTAVYYCAAYFPWYARYQYWGQGTQVTVSS

SEQ ID NO: 1134 - protein, 118 aa, Artificial Sequence
  Chemically Synthesized
QVQLQESGGGLVQAGGSLRLSCAASGTISRSNYMGWYRQAPGKERELVASITSGASTNYADSVKGRFTISRDNAKNTVYLQMNSLKPEDTAVYYCAAYPTAQDYHPYWGQGTQVTVSS

SEQ ID NO: 1135 - protein, 122 aa, Artificial Sequence
  Chemically Synthesized
QVQLQESGGGLVQAGGSLRLSCAASGTIFWARFMGWYRQAPGKEREFVAAINRGTTTNYADSVKGRFTISRDNAKNTVYLQMNSLKPEDTAVYYCAVWYRPWVDYGWRYGYWGQGTQVTVSS

SEQ ID NO: 1136 - protein, 121 aa, Artificial Sequence
  Chemically Synthesized
QVQLQESGGGLVQAGGSLRLSCAASGSISYRSMGWYRQAPGKEREFVASIGYGSSTYYADSVKGRFTISRDNAKNTVYLQMNSLKPEDTAVYYCAAEHTEPSYWSRHFDYWGQGTQVTVSS

SEQ ID NO: 1137 - protein, 118 aa, Artificial Sequence
  Chemically Synthesized
QVQLQESGGGLVQAGGSLRLSCAASGTIFLYELMGWYRQAPGKEREFVASINDGSNTNYADSVKGRFTISRDNAKNTVYLQMNSLKPEDTAVYYCAAPLIHTGPHRYWGQGTQVTVSS

SEQ ID NO: 1138 - protein, 122 aa, Artificial Sequence
  Chemically Synthesized
QVQLQESGGGLVQAGGSLRLSCAASGNIFYYWDMGWYRQAPGKERELVASISAGTTTYYADSVKGRFTISRDNAKNTVYLQMNSLKPEDTAVYYCAVYTLLDLDVASGFPYWGQGTQVTVSS

SEQ ID NO: 1139 - protein, 122 aa, Artificial Sequence
  Chemically Synthesized
QVQLQESGGGLVQAGGSLRLSCAASGYIFLTPYMGWYRQAPGKERELVAAIDRGSTTYYADSVKGRFTISRDNAKNTVYLQMNSLKPEDTAVYYCAARRTLPDYTYLNFYYWGQGTQVTVSS

SEQ ID NO: 1140 - protein, 122 aa, Artificial Sequence
  Chemically Synthesized
QVQLQESGGGLVQAGGSLRLSCAASGTISTPVYMGWYRQAPGKERELVAAITYGGSTYYADSVKGRFTISRDNAKNTVYLQMNSLKPEDTAVYYCAAGYSWHGDGAYRHAYWGQGTQVTVSS

SEQ ID NO: 1141 - protein, 118 aa, Artificial Sequence
  Chemically Synthesized
QVQLQESGGGLVQAGGSLRLSCAASGYIFVYLTMGWYRQAPGKERELVAAIGTGANTYYADSVKGRFTISRDNAKNTVYLQMNSLKPEDTAVYYCAVFRYGDAYYYYWGQGTQVTVSS

SEQ ID NO: 1142 - protein, 122 aa, Artificial Sequence
  Chemically Synthesized
QVQLQESGGGLVQAGGSLRLSCAASGYIFTLPYMGWYRQAPGKEREFVAGISYGGTTYYADSVKGRFTISRDNAKNTVYLQMNSLKPEDTAVYYCAAAGDYGYYRFGLHRYWGQGTQVTVSS

SEQ ID NO: 1143 - protein, 118 aa, Artificial Sequence
  Chemically Synthesized
QVQLQESGGGLVQAGGSLRLSCAASGSISVYSYMGWYRQAPGKEREFVAAIDYGGTTNYADSVKGRFTISRDNAKNTVYLQMNSLKPEDTAVYYCAVGDWVTTFSSYWGQGTQVTVSS

SEQ ID NO: 1144 - protein, 118 aa, Artificial Sequence
  Chemically Synthesized
QVQLQESGGGLVQAGGSLRLSCAASGNIFHYRWMGWYRQAPGKERELVASIGSGTSTNYADSVKGRFTISRDNAKNTVYLQMNSLKPEDTAVYYCAAWYPQNRDHDYWGQGTQVTVSS

SEQ ID NO: 1145 - protein, 121 aa, Artificial Sequence
  Chemically Synthesized
QVQLQESGGGLVQAGGSLRLSCAASGYIFGTYAMGWYRQAPGKERELVPVLLVVLLPYADSVKGRFTISRDNAKNTVYLQMNSLKPEDTAVYYCAAGERDHSVGVHPHAYWGQGTQVTVSS

SEQ ID NO: 1146 - protein, 118 aa, Artificial Sequence
  Chemically Synthesized
QVQLQESGGGLVQAGGSLRLSCAASGNIFEDYSMGWYRQAPGKEREFVATITAGSNTYYADSVKGRFTISRDNAKNTVYLQMNSLKPEDTAVYYCAVIDDYTHTYIYWGQGTQVTVSS

SEQ ID NO: 1147 - protein, 126 aa, Artificial Sequence
  Chemically Synthesized
QVQLQESGGGLVQAGGSLRLSCAASGNISWPDAMGWYRQAPGKERELVATIDHGSSTYYADSVKGRFTISRDNAKNTVYLQMNSLKPEDTAVYYCAAWYRDGSQPYLPEGPRLVYWGQGTQVTVSS

SEQ ID NO: 1148 - protein, 124 aa, Artificial Sequence
  Chemically Synthesized
QVQLQESGGGLVQAGGSLRLSCAASGNISRRGLMGWYRQAPGKEREFVAGIGYGAITNYADSVKGRFTISRDNAKNTVYLQMNSLKPEDTAVYYCAAHNWGDWWNVYVRYYTYWGQGTQVTVSS

SEQ ID NO: 1149 - protein, 117 aa, Artificial Sequence
  Chemically Synthesized
QVQLQESGGGLVQAGGSLRLSCAASGTISDSEYMGWYRQAPGKERELVASINYGGTTYYADSVKGRFTISRDNAKNTVYLQMNSLKPEDTAVYYCAAATCVSCTLYWGQGTQVTVSS

SEQ ID NO: 1150 - protein, 126 aa, Artificial Sequence
  Chemically Synthesized
QVQLQESGGGLVQAGGSLRLSCAASGTIFSSGYMGWYRQAPGKEREFVATITGGTNTYYADSVKGRFTISRDNAKNTVYLQMNSLKPEDTAVYYCAVGWGTWYDRGTDYAPEHPYWGQGTQVTVSS

SEQ ID NO: 1151 - protein, 125 aa, Artificial Sequence
  Chemically Synthesized
QVQLQESGGGLVQAGGSLRLSCAASGNISERAYMGWYRQAPGKERELVASITLGASTNYADSVKGRFTISRDNAKNTVYLQMNSLKPEDTAVYYCAVVLHRRRWFRPWYRSHYYWGQGTQVTVSS

SEQ ID NO: 1152 - protein, 122 aa, Artificial Sequence
  Chemically Synthesized
QVQLQESGGGLVQAGGSLRLSCAASGNIFDASYMGWYRQAPGKEREFVAGIDTGGTTYYADSVKGRFTISRDNAKNTVYLQMNSLKPEDTAVYYCAVYRRYDFGPGYFYSYWGQGTQVTVSS

SEQ ID NO: 1153 - protein, 121 aa, Artificial Sequence
  Chemically Synthesized
QVQLQESGGGLVQAGGSLRLSCAASGNIFSNKMGWYRQAPGKERELVASIALGANTNYADSVKGRFTISRDNAKNTVYLQMNSLKPEDTAVYYCAADYWWYYVIADRHRYWGQGTQVTVSS

SEQ ID NO: 1154 - protein, 122 aa, Artificial Sequence
  Chemically Synthesized
QVQLQESGGGLVQAGGSLRLSCAASGNISGRDYMGWYRQAPGKERELVASINSGTTTYYADSVKGRFTISRDNAKNTVYLQMNSLKPEDTAVYYCAARDEALHVLSVPLPYWGQGTQVTVSS

SEQ ID NO: 1155 - protein, 117 aa, Artificial Sequence
  Chemically Synthesized
QVQLQESGGGLVQAGGSLRLSCAASGSISRTAAMGWYRQAPGKEREFVASAGGGNTYYADSVKGRFTISRDNAKNTVYLQMNSLKPEDTAVYYCAALWHDERRHYYWGQGTQVTVSS

SEQ ID NO: 1156 - protein, 122 aa, Artificial Sequence
  Chemically Synthesized
QVQLQESGGGLVQAGGSLRLSCAASGTISWYAAMGWYRQAPGKERELVAGITWGTNTNYADSVKGRFTISRDNAKNTVYLQMNSLKPEDTAVYYCAAQYWSTLGYRAYHNYWGQGTQVTVSS

SEQ ID NO: 1157 - protein, 118 aa, Artificial Sequence
  Chemically Synthesized
QVQLQESGGGLVQAGGSLRLSCAASGYISLIYYMGWYRQAPGKEREFVATITPGSITYYADSVKGRFTISRDNAKNTVYLQMNSLKPEDTAVYYCAAGGDYVQFFRYWGQGTQVTVSS

SEQ ID NO: 1158 - protein, 126 aa, Artificial Sequence
  Chemically Synthesized
QVQLQESGGGLVQAGGSLRLSCAASGSISYALYMGWYRQAPGKERELVAGITFGTSTYYADSVKGRFTISRDNAKNTVYLQMNSLKPEDTAVYYCAVVTHQTHQGDLSRGDPHDYWGQGTQVTVSS

SEQ ID NO: 1159 - protein, 110 aa, Artificial Sequence
  Chemically Synthesized
QVQLQESGGGLVQAGGSLRLSCAASGNISNTVYMGWYRQAPGKEREFVATIDRGASTYYADSVKGRFTISRDNAKNTVYLQMNSLKPEDTAVYYCAAYYWGQGTQVTVSS

SEQ ID NO: 1160 - protein, 117 aa, Artificial Sequence
  Chemically Synthesized
QVQLQESGGGLVQAGGSLRLSCAASGNIFPAYAMGWYRQAPGKERELVATISGVVIPYADSVKGRFTISRDNAKNTVYLQMNSLKPEDTAVYYCAAGLQHDDHLVYWGQGTQVTVSS

SEQ ID NO: 1161 - protein, 122 aa, Artificial Sequence
  Chemically Synthesized
QVQLQESGGGLVQAGGSLRLSCAASGTISIRWGMGWYRQAPGKERELVAAIGNGTITYYADSVKGRFTISRDNAKNTVYLQMNSLKPEDTAVYYCAVYTDYQNAQYYLHYYWGQGTQVTVSS

SEQ ID NO: 1162 - protein, 121 aa, Artificial Sequence
  Chemically Synthesized
QVQLQESGGGLVQAGGSLRLSCAASGNISSTYTMGWYRQAPGKEREFVAAIAAGGSTYYADSVKGRFTISRDNAKNTVYLQMNSLKPEDTAVYYCAVGYGYDDPDRLLTYWGQGTQVTVSS

SEQ ID NO: 1163 - protein, 110 aa, Artificial Sequence
  Chemically Synthesized
QVQLQESGGGLVQAGGSLRLSCAASGNISYSTRMGWYRQAPGKEREFVAAIDAGTTTNYADSVKGRFTISRDNAKNTVYLQMNSLKPEDTAVYYCAHSYWGQGTQVTVSS

SEQ ID NO: 1164 - protein, 126 aa, Artificial Sequence
  Chemically Synthesized
QVQLQESGGGLVQAGGSLRLSCAASGTISPSADMGWYRQAPGKERELVAAISYGGNTNYADSVKGRFTISRDNAKNTVYLQMNSLKPEDTAVYYCAVDTLVTDWDRDVTGEVYGYWGQGTQVTVSS

SEQ ID NO: 1165 - protein, 117 aa, Artificial Sequence
  Chemically Synthesized
QVQLQESGGGLVQAGGSLRLSCAASGSISAGVVMGWYRQAPGKERELVASIGAGSITYADSVKGRFTISRDNAKNTVYLQMNSLKPEDTAVYYCAVYTGQSYYHRYWGQGTQVTVSS

SEQ ID NO: 1166 - protein, 109 aa, Artificial Sequence
  Chemically Synthesized
QVQLQESGGGLVQAGGSLRLSCAASGNISDYFYMGWYRQAPGKERELVDYADSVKGRFTISRDNAKNTVYLQMNSLKPEDTAVYYCAVFYVTDYDHDYWGQGTQVTVSS

SEQ ID NO: 1167 - protein, 118 aa, Artificial Sequence
  Chemically Synthesized
QVQLQESGGGLVQAGGSLRLSCAASGYISVYYYMGWYRQAPGKERELVAAINYGGTTNYADSVKGRFTISRDNAKNTVYLQMNSLKPEDTAVYYCAVGSNWFYPLRYWGQGTQVTVSS

SEQ ID NO: 1168 - protein, 118 aa, Artificial Sequence
  Chemically Synthesized
QVQLQESGGGLVQAGGSLRLSCAASGNISGWRYMGWYRQAPGKEREFVAGIGGGGTTNYADSVKGRFTISRDNAKNTVYLQMNSLKPEDTAVYYCAVLLFRDVYHYYWGQGTQVTVSS

SEQ ID NO: 1169 - protein, 124 aa, Artificial Sequence
  Chemically Synthesized
QVQLQESGGGLVQAGGSLRLSCAASGTISTPRRMGWYRQAPGKEREFVASIAAGGTTYYADSVKGRFTISRDNAKNTVYLQMNSLKPEDTAVYYCAALYDGRYDAPETRYHYYWGQGTQVTVSS

SEQ ID NO: 1170 - protein, 118 aa, Artificial Sequence
  Chemically Synthesized
QVQLQESGGGLVQAGGSLRLSCAASGYISDDDDMGWYRQAPGKEREFVAAISVGSTTNYADSVKGRFTISRDNAKNTVYLQMNSLKPEDTAVYYCAVGDGRDTPLVYWGQGTQVTVSS

SEQ ID NO: 1171 - protein, 118 aa, Artificial Sequence
  Chemically Synthesized
QVQLQESGGGLVQAGGSLRLSCAASGNISTRLEMGWYRQAPGKEREFVAGINDGANTYYADSVKGRFTISRDNAKNTVYLQMNSLKPEDTAVYYCAAVAGSYDYHYYWGQGTQVTVSS

SEQ ID NO: 1172 - protein, 117 aa, Artificial Sequence
  Chemically Synthesized
QVQLQESGGGLVQAGGSLRLSCAASGTIFSNYGMGWYRQAPGKEREFVAGIILVVVPYADSVKGRFTISRDNAKNTVYLQMNSLKPEDTAVYYCAVPVTDWLAFSYWGQGTQVTVSS

SEQ ID NO: 1173 - protein, 121 aa, Artificial Sequence
  Chemically Synthesized
QVQLQESGGGLVQAGGSLRLSCAASGNIFLLSDMGWYRQAPGKERELVATIAAGSYYLYADSVKGRFTISRDNAKNTVYLQMNSLKPEDTAVYYCAVYYYTYRAPAENMYWGQGTQVTVSS

SEQ ID NO: 1174 - protein, 118 aa, Artificial Sequence
  Chemically Synthesized
QVQLQESGGGLVQAGGSLRLSCAASGTISADARMGWYRQAPGKEREFVAGISGGATTYYADSVKGRFTISRDNAKNTVYLQMNSLKPEDTAVYYCAAVITARSHFFYWGQGTQVTVSS

SEQ ID NO: 1175 - protein, 122 aa, Artificial Sequence
  Chemically Synthesized
QVQLQESGGGLVQAGGSLRLSCAASGSIFARYGMGWYRQAPGKERELVASIDVGAITNYADSVKGRFTISRDNAKNTVYLQMNSLKPEDTAVYYCAVEGARSYHRPYSYYYWGQGTQVTVSS

SEQ ID NO: 1176 - protein, 118 aa, Artificial Sequence
  Chemically Synthesized
QVQLQESGGGLVQAGGSLRLSCAASGSISRVGAMGWYRQAPGKEREFVAGISYGSNTNYADSVKGRFTISRDNAKNTVYLQMNSLKPEDTAVYYCAAYDQQYPYHLYWGQGTQVTVSS

SEQ ID NO: 1177 - protein, 118 aa, Artificial Sequence
  Chemically Synthesized
QVQLQESGGGLVQAGGSLRLSCAASGYISGTLQMGWYRQAPGKEREFVATINNGTITYYADSVKGRFTISRDNAKNTVYLQMNSLKPEDTAVYYCAAVSWSGSWYWYWGQGTQVTVSS

SEQ ID NO: 1178 - protein, 122 aa, Artificial Sequence
  Chemically Synthesized
QVQLQESGGGLVQAGGSLRLSCAASGNISFYNPMGWYRQAPGKERELVATISGGGNTNYADSVKGRFTISRDNAKNTVYLQMNSLKPEDTAVYYCAVYGNGDYLTDYAYFYWGQGTQVTVSS

SEQ ID NO: 1179 - protein, 122 aa, Artificial Sequence
  Chemically Synthesized
QVQLQESGGGLVQAGGSLRLSCAASGTISADSSMGWYRQAPGKEREFVATITGGATTYYADSVKGRFTISRDNAKNTVYLQMNSLKPEDTAVYYCAAVTVTLGSARGVYYYWGQGTQVTVSS

SEQ ID NO: 1180 - protein, 118 aa, Artificial Sequence
  Chemically Synthesized
QVQLQESGGGLVQAGGSLRLSCAASGNISYSTNMGWYRQAPGKEREFVAAITYGGNTYYADSVKGRFTISRDNAKNTVYLQMNSLKPEDTAVYYCAAVSYRDSYHYYWGQGTQVTVSS

SEQ ID NO: 1181 - protein, 118 aa, Artificial Sequence
  Chemically Synthesized
QVQLQESGGGLVQAGGSLRLSCAASGTIFAAWRMGWYRQAPGKERELVAAIDRGTSTYYADSVKGRFTISRDNAKNTVYLQMNSLKPEDTAVYYCAAYSGNGEEHPYWGQGTQVTVSS

SEQ ID NO: 1182 - protein, 118 aa, Artificial Sequence
  Chemically Synthesized
QVQLQESGGGLVQAGGSLRLSCAASGNIFQSFAMGWYRQAPGKEREFVASIAGGGTTNYADSVKGRFTISRDNAKNTVYLQMNSLKPEDTAVYYCAAVTYSKGVHGYWGQGTQVTVSS

SEQ ID NO: 1183 - protein, 117 aa, Artificial Sequence
  Chemically Synthesized
QVQLQESGGGLVQAGGSLRLSCAASGTIFWPSYMGWYRQAPGKERELVAGIDIGASTNYADSVKGRFTISRDNAKNTVYLQMNSLKPEDTAVYYCAADTQQSYSLYWGQGTQVTVSS

SEQ ID NO: 1184 - protein, 122 aa, Artificial Sequence
  Chemically Synthesized
QVQLQESGGGLVQAGGSLRLSCAASGSIFYPQYMGWYRQAPGKERELVASIDRGTITYYADSVKGRFTISRDNAKNTVYLQMNSLKPEDTAVYYCAAYDSTDSWDIYTYPYWGQGTQVTVSS

SEQ ID NO: 1185 - protein, 117 aa, Artificial Sequence
  Chemically Synthesized
QVQLQESGGGLVQAGGSLRLSCAASGSIFPRRNMGWYRQAPGKEREFVASISYGTITYYADSVKGRFTISRDNAKNTVYLQMNSLKPEDTAVYYCAARRGRYPHGYWGQGTQVTVSS

SEQ ID NO: 1186 - protein, 121 aa, Artificial Sequence
  Chemically Synthesized
QVQLQESGGGLVQAGGSLRLSCAASGSISDGLIMGWYRQAPGKEREFVAAIAAGGTTYADSVKGRFTISRDNAKNTVYLQMNSLKPEDTAVYYCAVWYYREGIIQFAFRYWGQGTQVTVSS

SEQ ID NO: 1187 - protein, 126 aa, Artificial Sequence
  Chemically Synthesized
QVQLQESGGGLVQAGGSLRLSCAASGTIFDYYDMGWYRQAPGKEREFVAAISSGTNTYYADSVKGRFTISRDNAKNTVYLQMNSLKPEDTAVYYCAVGYNGQRDYQEAGGYRYVYWGQGTQVTVSS

SEQ ID NO: 1188 - protein, 118 aa, Artificial Sequence
  Chemically Synthesized
QVQLQESGGGLVQAGGSLRLSCAASGTISYVSYMGWYRQAPGKEREFVAGIASGSSTNYADSVKGRFTISRDNAKNTVYLQMNSLKPEDTAVYYCAAVYRQGGYFGYWGQGTQVTVSS

SEQ ID NO: 1189 - protein, 118 aa, Artificial Sequence
  Chemically Synthesized
QVQLQESGGGLVQAGGSLRLSCAASGNISRSLAMGWYRQAPGKEREFVAGIAYGANTNYADSVKGRFTISRDNAKNTVYLQMNSLKPEDTAVYYCAALYYQGGKFYYWGQGTQVTVSS

SEQ ID NO: 1190 - protein, 114 aa, Artificial Sequence
  Chemically Synthesized
QVQLQESGGGLVQAGGSLRLSCAASGNISGDRYMGWYRQAPGKEREFAGIGTGTITNYADSVKGRFTISRDNAKNTVYLQMNSLKPEDTAVYYCAVPRELYHYWGQGTQVTVSS

SEQ ID NO: 1191 - protein, 118 aa, Artificial Sequence
  Chemically Synthesized
QVQLQESGGGLVQAGGSLRLSCAASGNISSREGMGWYRQAPGKERELVASISYGTTTYYADSVKGRFTISRDNAKNTVYLQMNSLKPEDTAVYYCAADAASYSPYPYWGQGTQVTVSS

SEQ ID NO: 1192 - protein, 118 aa, Artificial Sequence
  Chemically Synthesized
QVQLQESGGGLVQAGGSLRLSCAASGNISVWYDMGWYRQAPGKEREFVATIGEGGSTYYADSVKGRFTISRDNAKNTVYLQMNSLKPEDTAVYYCAAWSYADSYHPYWGQGTQVTVSS

SEQ ID NO: 1193 - protein, 118 aa, Artificial Sequence
  Chemically Synthesized
QVQLQESGGGLVQAGGSLRLSCAASGTISSWPHMGWYRQAPGKEREFVASIAYGGTTNYADSVKGRFTISRDNAKNTVYLQMNSLKPEDTAVYYCAVGYLRYDQFKYWGQGTQVTVSS

SEQ ID NO: 1194 - protein, 121 aa, Artificial Sequence
  Chemically Synthesized
QVQLQESGGGLVQAGGSLRLSCAASGTISGYVMGWYRQAPGKERELVASIGDGASTYYADSVKGRFTISRDNAKNTVYLQMNSLKPEDTAVYYCAVAAYQRTDLGYQHDYWGQGTQVTVSS

SEQ ID NO: 1195 - protein, 121 aa, Artificial Sequence
  Chemically Synthesized
QVQLQESGGGLVQAGGSLRLSCAASGYISVEEYMGWYRQAPGKEREFVATINYGAITNYADSVKGRFTISRDNAKNTVYLQMNSLKPEDTAVYYCAAGISLGYALVSRFYWGQGTQVTVSS

SEQ ID NO: 1196 - protein, 117 aa, Artificial Sequence
  Chemically Synthesized
QVQLQESGGGLVQAGGSLRLSCAASGTISPLPYMGWYRQAPGKERELVAGIASVVLPYADSVKGRFTISRDNAKNTVYLQMNSLKPEDTAVYYCAAPYVAYRDYPYWGQGTQVTVSS

SEQ ID NO: 1197 - protein, 118 aa, Artificial Sequence
  Chemically Synthesized
QVQLQESGGGLVQAGGSLRLSCAASGSISWSRAMGWYRQAPGKEREFVATINSGSNTNYADSVKGRFTISRDNAKNTVYLQMNSLKPEDTAVYYCAVRYYGIYRHNYWGQGTQVTVSS

SEQ ID NO: 1198 - protein, 121 aa, Artificial Sequence
  Chemically Synthesized
QVQLQESGGGLVQAGGSLRLSCAASGTISEPGAMGWYRQAPGKERELVAGISKGSITYYADSVKGRFTISRDNAKNTVYLQMNSLKPEDTAVYYCAAYGYDDVDDYDSFYWGQGTQVTVSS

SEQ ID NO: 1199 - protein, 122 aa, Artificial Sequence
  Chemically Synthesized
QVQLQESGGGLVQAGGSLRLSCAASGNISGGVVMGWYRQAPGKERELVAAIGTGGSTYYADSVKGRFTISRDNAKNTVYLQMNSLKPEDTAVYYCAVYYDLVYTVPQYHGYWGQGTQVTVSS

SEQ ID NO: 1200 - protein, 122 aa, Artificial Sequence
  Chemically Synthesized
QVQLQESGGGLVQAGGSLRLSCAASGTIFESLSMGWYRQAPGKERELVATIDHGGSTYYADSVKGRFTISRDNAKNTVYLQMNSLKPEDTAVYYCAVFDRGDGILWRYHPYWGQGTQVTVSS

SEQ ID NO: 1201 - protein, 118 aa, Artificial Sequence
  Chemically Synthesized
QVQLQESGGGLVQAGGSLRLSCAASGSIFGPSYMGWYRQAPGKERELVAAIGRGGSTYYADSVKGRFTISRDNAKNTVYLQMNSLKPEDTAVYYCAAPVGYYSGHKYWGQGTQVTVSS

SEQ ID NO: 1202 - protein, 121 aa, Artificial Sequence
  Chemically Synthesized
QVQLQESGGGLVQAGGSLRLSCAASGYISRTREMGWYRQAPGKEREFVAAINSGASTNYADSVKGRFTISRDNAKNTVYLQMNSLKPEDTAVYYCAAEDTVTNSSTRTIYWGQGTQVTVSS

SEQ ID NO: 1203 - protein, 116 aa, Artificial Sequence
  Chemically Synthesized
QVQLQESGGGLVQAGGSLRLSCAASGTIFRAYVMGWYRQAPGKEREFVAAIGGGTTTYYADSVKGRFTISRDNAKNTVYLQMNSLKPEDTAVYYCAVGPPYLHLYWGQGTQVTVSS

SEQ ID NO: 1204 - protein, 125 aa, Artificial Sequence
  Chemically Synthesized
QVQLQESGGGLVQAGGSLRLSCAASGTIFDAVMGWYRQAPGKERELVAGIDSGGTTNYADSVKGRFTISRDNAKNTVYLQMNSLKPEDTAVYYCAVYGDPYYDNYPDYYQGLKYWGQGTQVTVSS

SEQ ID NO: 1205 - protein, 117 aa, Artificial Sequence
  Chemically Synthesized
QVQLQESGGGLVQAGGSLRLSCAASGTISKTHGMGWYRQAPGKEREFVAGINAGTNTYYADSVKGRFTISRDNAKNTVYLQMNSLKPEDTAVYYCAVHWYYLFYGYWGQGTQVTVSS

SEQ ID NO: 1206 - protein, 118 aa, Artificial Sequence
  Chemically Synthesized
QVQLQESGGGLVQAGGSLRLSCAASGTIFRHYIMGWYRQAPGKEREFVAAIGTGANTYYADSVKGRFTISRDNAKNTVYLQMNSLKPEDTAVYYCAVIVYQEYEYYYWGQGTQVTVSS

SEQ ID NO: 1207 - protein, 117 aa, Artificial Sequence
  Chemically Synthesized
QVQLQESGGGLVQAGGSLRLSCAASGNIFYYPYMGWYRQAPGKERELVASIVLVVLPYADSVKGRFTISRDNAKNTVYLQMNSLKPEDTAVYYCAANGFYWHDLWYWGQGTQVTVSS

SEQ ID NO: 1208 - protein, 126 aa, Artificial Sequence
  Chemically Synthesized
QVQLQESGGGLVQAGGSLRLSCAASGYIFDVDGMGWYRQAPGKERELVAAIDTGGITNYADSVKGRFTISRDNAKNTVYLQMNSLKPEDTAVYYCAVDWVPLTDGAQVRFFSSCYWGQGTQVTVSS

SEQ ID NO: 1209 - protein, 125 aa, Artificial Sequence
  Chemically Synthesized
QVQLQESGGGLVQAGGSLRLSCAASGTIFQYPNMGWYRQAPGKEREFVAAITLGGIPYADSVKGRFTISRDNAKNTVYLQMNSLKPEDTAVYYCAVEGQDLWYDPYFAYYEFRYWGQGTQVTVSS

SEQ ID NO: 1210 - protein, 118 aa, Artificial Sequence
  Chemically Synthesized
QVQLQESGGGLVQAGGSLRLSCAASGTIFQLPYMGWYRQAPGKERELVATIGDGASTNYADSVKGRFTISRDNAKNTVYLQMNSLKPEDTAVYYCAAYGRGAPTHLYWGQGTQVTVSS

SEQ ID NO: 1211 - protein, 118 aa, Artificial Sequence
  Chemically Synthesized
QVQLQESGGGLVQAGGSLRLSCAASGNISDPWYMGWYRQAPGKEREFVASIGSGGITYYADSVKGRFTISRDNAKNTVYLQMNSLKPEDTAVYYCAVSDYTRPYYSYWGQGTQVTVSS

SEQ ID NO: 1212 - protein, 118 aa, Artificial Sequence
  Chemically Synthesized
QVQLQESGGGLVQAGGSLRLSCAASGNISYHGYMGWYRQAPGKEREFVASIANGSTTYYADSVKGRFTISRDNAKNTVYLQMNSLKPEDTAVYYCAVNGAVGAYFWYWGQGTQVTVSS

SEQ ID NO: 1213 - protein, 121 aa, Artificial Sequence
  Chemically Synthesized
QVQLQESGGGLVQAGGSLRLSCAASGYISDQYYMGWYRQAPGKERELLPVLLRVVVPYADSVKGRFTISRDNAKNTVYLQMNSLKPEDTAVYYCAADYHDYEWYVQVYTYWGQGTQVTVSS

SEQ ID NO: 1214 - protein, 126 aa, Artificial Sequence
  Chemically Synthesized
QVQLQESGGGLVQAGGSLRLSCAASGNISPTRDMGWYRQAPGKERELVAGIAPGTTTYYADSVKGRFTISRDNAKNTVYLQMNSLKPEDTAVYYCAAKKVDDDAPDRAWQSPHDYWGQGTQVTVSS

SEQ ID NO: 1215 - protein, 118 aa, Artificial Sequence
  Chemically Synthesized
QVQLQESGGGLVQAGGSLRLSCAASGYIFLSDDMGWYRQAPGKERELVAGIAGGAITNYADSVKGRFTISRDNAKNTVYLQMNSLKPEDTAVYYCAVTPNLVDYYYYWGQGTQVTVSS

SEQ ID NO: 1216 - protein, 127 aa, Artificial Sequence
  Chemically Synthesized
QVQLQESGGGLVQAGGSLRLSCAASGTIFRRSIMGWYRQAPGKERELVATIAAGSSTNYADSVKGRFTISRDNAKNTVYLQMNSLKPEDTAVYYCAAYFTPFYAQWRSDRAAPHDYWGQGTQVTVSS

SEQ ID NO: 1217 - protein, 122 aa, Artificial Sequence
  Chemically Synthesized
QVQLQESGGGLVQAGGSLRLSCAASGTIFQVVIMGWYRQAPGKERELVAAISEGGNTNYADSVKGRFTISRDNAKNTVYLQMNSLKPEDTAVYYCAAYYYDIRNGYPQHDYWGQGTQVTVSS

SEQ ID NO: 1218 - protein, 121 aa, Artificial Sequence
  Chemically Synthesized
QVQLQESGGGLVQAGGSLRLSCAASGSISYRADMGWYRQAPGKERELVASIGYGANTYYADSVKGRFTISRDNAKNTVYLQMNSLKPEDTAVYYCAVDDLLYDSSVLFMYWGQGTQVTVSS

SEQ ID NO: 1219 - protein, 118 aa, Artificial Sequence
  Chemically Synthesized
QVQLQESGGGLVQAGGSLRLSCAASGTIFGAGRMGWYRQAPGKERELVASITTGATTNYADSVKGRFTISRDNAKNTVYLQMNSLKPEDTAVYYCAADEEYAEYHRYWGQGTQVTVSS

SEQ ID NO: 1220 - protein, 118 aa, Artificial Sequence
  Chemically Synthesized
QVQLQESGGGLVQAGGSLRLSCAASGSIFPIDVMGWYRQAPGKERELVATITEGCYYQYADSVKGRFTISRDNAKNTVYLQMNSLKPEDTAVYYCAAYYYNYSVFGYWGQGTQVTVSS

SEQ ID NO: 1221 - protein, 118 aa, Artificial Sequence
  Chemically Synthesized
QVQLQESGGGLVQAGGSLRLSCAASGYIFHYTYMGWYRQAPGKERELVATISYGASTYYADSVKGRFTISRDNAKNTVYLQMNSLKPEDTAVYYCAVFYPYATSFSYWGQGTQVTVSS

SEQ ID NO: 1222 - protein, 126 aa, Artificial Sequence
  Chemically Synthesized
QVQLQESGGGLVQAGGSLRLSCAASGTISIDYYMGWYRQAPGKEREFVATINIGASTNYADSVKGRFTISRDNAKNTVYLQMNSLKPEDTAVYYCAANYTVHDVGRYHYATGHPYWGQGTQVTVSS

SEQ ID NO: 1223 - protein, 122 aa, Artificial Sequence
  Chemically Synthesized
QVQLQESGGGLVQAGGSLRLSCAASGYISDYITMGWYRQAPGKEREFVAGIARGTTTNYADSVKGRFTISRDNAKNTVYLQMNSLKPEDTAVYYCAAFDRIYNYWVSPHLYWGQGTQVTVSS

SEQ ID NO: 1224 - protein, 119 aa, Artificial Sequence
  Chemically Synthesized
QVQLQESGGGLVQAGGSLRLSCAASGSISYDPGMGWYRQAPGKEREFVALRWYYQYADSVKGRFTISRDNAKNTVYLQMNSLKPEDTAVYYCAVPDGEGGYLPYEFAYWGQGTQVTVSS

SEQ ID NO: 1225 - protein, 118 aa, Artificial Sequence
  Chemically Synthesized
QVQLQESGGGLVQAGGSLRLSCAASGSIFRFVIMGWYRQAPGKERELVAGIGYGATTYYADSVKGRFTISRDNAKNTVYLQMNSLKPEDTAVYYCAAYYYLDLLFPYWGQGTQVTVSS

SEQ ID NO: 1226 - protein, 121 aa, Artificial Sequence
  Chemically Synthesized
QVQLQESGGGLVQAGGSLRLSCAASGTIFSTLMGWYRQAPGKERELVAGIGTGTTTNYADSVKGRFTISRDNAKNTVYLQMNSLKPEDTAVYYCAADNGDDNTALRHFAYWGQGTQVTVSS

SEQ ID NO: 1227 - protein, 118 aa, Artificial Sequence
  Chemically Synthesized
QVQLQESGGGLVQAGGSLRLSCAASGTIFHYRPMGWYRQAPGKERELVAAINVGSNTYYADSVKGRFTISRDNAKNTVYLQMNSLKPEDTAVYYCAVIYYIGQYYHYWGQGTQVTVSS

SEQ ID NO: 1228 - protein, 126 aa, Artificial Sequence
  Chemically Synthesized
QVQLQESGGGLVQAGGSLRLSCAASGTIFVTYAMGWYRQAPGKEREFVASITAGGTTYYADSVKGRFTISRDNAKNTVYLQMNSLKPEDTAVYYCAAENIWDVPWRYVGSVDHSYWGQGTQVTVSS

SEQ ID NO: 1229 - protein, 122 aa, Artificial Sequence
  Chemically Synthesized
QVQLQESGGGLVQAGGSLRLSCAASGSISLYSGMGWYRQAPGKERELVATIAYGTTTNYADSVKGRFTISRDNAKNTVYLQMNSLKPEDTAVYYCAVTTVFGGGDGYFLGYWGQGTQVTVSS

SEQ ID NO: 1230 - protein, 121 aa, Artificial Sequence
  Chemically Synthesized
QVQLQESGGGLVQAGGSLRLSCAASGSIFDFQDMGWYRQAPGKEREFVAAIGSGTSTYYADSVKGRFTISRDNAKNTVYLQMNSLKPEDTAVYYCAVVPQFLTESSLPSYWGQGTQVTVSS

SEQ ID NO: 1231 - protein, 121 aa, Artificial Sequence
  Chemically Synthesized
QVQLQESGGGLVQAGGSLRLSCAASGTIFKYTMGWYRQAPGKEREFVAGIAWGGTTNYADSVKGRFTISRDNAKNTVYLQMNSLKPEDTAVYYCAVNWWLTWYHDDYLTYWGQGTQVTVSS

SEQ ID NO: 1232 - protein, 122 aa, Artificial Sequence
  Chemically Synthesized
QVQLQESGGGLVQAGGSLRLSCAASGYIFPWEYMGWYRQAPGKERELVATISIGSSTNYADSVKGRFTISRDNAKNTVYLQMNSLKPEDTAVYYCAASNANGYYYAYDLYYWGQGTQVTVSS

SEQ ID NO: 1233 - protein, 111 aa, Artificial Sequence
  Chemically Synthesized
QVQLQESGGGLVQAGGSLRLSCAASGYISARQDMGWYRQAPGKEREFVATIDYGTTTYYADSVKGRFTISRDNAKNTVYLQMNSLKPEDTAVYYCAAHDYWGQGTQVTVSS

SEQ ID NO: 1234 - protein, 118 aa, Artificial Sequence
  Chemically Synthesized
QVQLQESGGGLVQAGGSLRLSCAASGYISATDRMGWYRQAPGKERELVATIADGTNTNYADSVKGRFTISRDNAKNTVYLQMNSLKPEDTAVYYCAVRPRDSDQHYYWGQGTQVTVSS

SEQ ID NO: 1235 - protein, 117 aa, Artificial Sequence
  Chemically Synthesized
QVQLQESGGGLVQAGGSLRLSCAASGNISGYIMGWYRQAPGKERELVAAIGGGGSTNYADSVKGRFTISRDNAKNTVYLQMNSLKPEDTAVYYCAVFYRFRVVHWYWGQGTQVTVSS

SEQ ID NO: 1236 - protein, 126 aa, Artificial Sequence
  Chemically Synthesized
QVQLQESGGGLVQAGGSLRLSCAASGYISVLSRMGWYRQAPGKERELVAAIGNGAITYYADSVKGRFTISRDNAKNTVYLQMNSLKPEDTAVYYCAAPHSYRGGEGPDNVDALPYWGQGTQVTVSS

SEQ ID NO: 1237 - protein, 126 aa, Artificial Sequence
  Chemically Synthesized
QVQLQESGGGLVQAGGSLRLSCAASGSIFAYHTMGWYRQAPGKERELVASITAGGTTYYADSVKGRFTISRDNAKNTVYLQMNSLKPEDTAVYYCAAYVQTYAYYTLNSPAQHSYWGQGTQVTVSS

SEQ ID NO: 1238 - protein, 117 aa, Artificial Sequence
  Chemically Synthesized
QVQLQESGGGLVQAGGSLRLSCAASGYIFYYYAMGWYRQAPGKEREFVASIGDGAITYADSVKGRFTISRDNAKNTVYLQMNSLKPEDTAVYYCAAPQRYSRDYSYWGQGTQVTVSS

SEQ ID NO: 1239 - protein, 122 aa, Artificial Sequence
  Chemically Synthesized
QVQLQESGGGLVQAGGSLRLSCAASGTISSYVEMGWYRQAPGKERELVAAIDYGGTTYYADSVKGRFTISRDNAKNTVYLQMNSLKPEDTAVYYCAAVKVPFHYTAYLYDYWGQGTQVTVSS

SEQ ID NO: 1240 - protein, 118 aa, Artificial Sequence
  Chemically Synthesized
QVQLQESGGGLVQAGGSLRLSCAASGSIFDYYLMGWYRQAPGKEREFVAAITAGATTYYADSVKGRFTISRDNAKNTVYLQMNSLKPEDTAVYYCAVLHDLGYLYTYWGQGTQVTVSS

SEQ ID NO: 1241 - protein, 117 aa, Artificial Sequence
  Chemically Synthesized
QVQLQESGGGLVQAGGSLRLSCAASGTISFGDPMGWYRQAPGKERELVATITAGGTTNYADSVKGRFTISRDNAKNTVYLQMNSLKPEDTAVYYCAADVRVESYSYWGQGTQVTVSS

SEQ ID NO: 1242 - protein, 122 aa, Artificial Sequence
  Chemically Synthesized
QVQLQESGGGLVQAGGSLRLSCAASGNISQLDIMGWYRQAPGKEREFVASIATGTITNYADSVKGRFTISRDNAKNTVYLQMNSLKPEDTAVYYCAVYYWTNYSAYSYHGYWGQGTQVTVSS

SEQ ID NO: 1243 - protein, 125 aa, Artificial Sequence
  Chemically Synthesized
QVQLQESGGGLVQAGGSLRLSCAASGTISQDALMGWYRQAPGKEREFVAAIDLGTTTNYADSVKGRFTISRDNAKNTVYLQMNSLKPEDTAVYYCAVVDWYYYTQPRNGLEDLYWGQGTQVTVSS

SEQ ID NO: 1244 - protein, 124 aa, Artificial Sequence
  Chemically Synthesized
QVQLQESGGGLVQAGGSLRLSCAASGNISSKVMGWYRQAPGKEREFVAGIAGGGTTYYADSVKGRFTISRDNAKNTVYLQMNSLKPEDTAVYYCAALDDYIYYDGYSRVFLIYWGQGTQVTVSS

SEQ ID NO: 1245 - protein, 118 aa, Artificial Sequence
  Chemically Synthesized
QVQLQESGGGLVQAGGSLRLSCAASGYISTAVAMGWYRQAPGKERELVAGISFGGSTNYADSVKGRFTISRDNAKNTVYLQMNSLKPEDTAVYYCAVDTEYTFIHYYWGQGTQVTVSS

SEQ ID NO: 1246 - protein, 120 aa, Artificial Sequence
  Chemically Synthesized
QVQLQESGGGLVQAGGSLRLSCAASGYIFDKYYMGWYRQAPGKERELVASISDGASTNYADSVKGRFTISRDNAKNTVYLQMNSLKPEDTAVYYCAAQYTWDSINYFNYWGQGTQVTVSS

SEQ ID NO: 1247 - protein, 116 aa, Artificial Sequence
  Chemically Synthesized
QVQLQESGGGLVQAGGSLRLSCAASGSIFPFDGMGWYRQAPGKERELVAGINSGTTYYADSVKGRFTISRDNAKNTVYLQMNSLKPEDTAVYYCAVVVSLNCLLYWGQGTQVTVSS

SEQ ID NO: 1248 - protein, 121 aa, Artificial Sequence
  Chemically Synthesized
QVQLQESGGGLVQAGGSLRLSCAASGTIFYRYIMGWYRQAPGKEREFVAAINTGATTYYADSVKGRFTISRDNAKNTVYLQMNSLKPEDTAVYYCAVGSVRTRTVRRPSYWGQGTQVTVSS

SEQ ID NO: 1249 - protein, 118 aa, Artificial Sequence
  Chemically Synthesized
QVQLQESGGGLVQAGGSLRLSCAASGNISSHYLMGWYRQAPGKEREFVAAIGQGTTTYYADSVKGRFTISRDNAKNTVYLQMNSLKPEDTAVYYCAVWFYASYAYGYWGQGTQVTVSS

SEQ ID NO: 1250 - protein, 118 aa, Artificial Sequence
  Chemically Synthesized
QVQLQESGGGLVQAGGSLRLSCAASGSISDPAAMGWYRQAPGKEREFVASITLGTITYYADSVKGRFTISRDNAKNTVYLQMNSLKPEDTAVYYCAAEGWTDFGHNYWGQGTQVTVSS

SEQ ID NO: 1251 - protein, 120 aa, Artificial Sequence
  Chemically Synthesized
QVQLQESGGGLVQAGGSLRLSCAASGNIFDYDMGWYRQAPGKERELVATINYGSITYYADSVKGRFTISRDNAKNTVYLQMNSLKPEDTAVYYCAVYGDHYGSTSDYHYWGQGTQVTVSS

SEQ ID NO: 1252 - protein, 122 aa, Artificial Sequence
  Chemically Synthesized
QVQLQESGGGLVQAGGSLRLSCAASGTIFQGLWMGWYRQAPGKEREFVASIGPGGITNYADSVKGRFTISRDNAKNTVYLQMNSLKPEDTAVYYCAVDTHYKADYVKYLPYWGQGTQVTVSS

SEQ ID NO: 1253 - protein, 110 aa, Artificial Sequence
  Chemically Synthesized
QVQLQESGGGLVQAGGSLRLSCAASGNIFTYIVMGWYRQAPGKEREFVAALVMVLLPYADSVKGRFTISRDNAKNTVYLQMNSLKPEDTAVYYCAAVDYWGQGTQVTVSS

SEQ ID NO: 1254 - protein, 124 aa, Artificial Sequence
  Chemically Synthesized
QVQLQESGGGLVQAGGSLRLSCAASGSIFHSGLMGWYRQAPGKERELVATIGWYYLYADSVKGRFTISRDNAKNTVYLQMNSLKPEDTAVYYCAVDGDPTYVGGYRYHYVLDYWGQGTQVTVSS

SEQ ID NO: 1255 - protein, 121 aa, Artificial Sequence
  Chemically Synthesized
QVQLQESGGGLVQAGGSLRLSCAASGNISPQYTMGWYRQAPGKEREFVAAISGGAITNYADSVKGRFTISRDNAKNTVYLQMNSLKPEDTAVYYCAAGSALESYTPSSIYWGQGTQVTVSS

SEQ ID NO: 1256 - protein, 118 aa, Artificial Sequence
  Chemically Synthesized
QVQLQESGGGLVQAGGSLRLSCAASGNIFDPCYMGWYRQAPGKERELVASIAPGATTNYADSVKGRFTISRDNAKNTVYLQMNSLKPEDTAVYYCAVAHHYTYYHGYWGQGTQVTVSS

SEQ ID NO: 1257 - protein, 118 aa, Artificial Sequence
  Chemically Synthesized
QVQLQESGGGLVQAGGSLRLSCAASGSISYRGRMGWYRQAPGKEREFVAGIAYGTSTYYADSVKGRFTISRDNAKNTVYLQMNSLKPEDTAVYYCAVRDISGSIHVYWGQGTQVTVSS

SEQ ID NO: 1258 - protein, 118 aa, Artificial Sequence
  Chemically Synthesized
QVQLQESGGGLVQAGGSLRLSCAASGTISAVRGMGWYRQAPGKEREFVAGINRGSTTYYADSVKGRFTISRDNAKNTVYLQMNSLKPEDTAVYYCAAKYDAPGSLLYWGQGTQVTVSS

SEQ ID NO: 1259 - protein, 118 aa, Artificial Sequence
  Chemically Synthesized
QVQLQESGGGLVQAGGSLRLSCAASGSISYRGRMGWYRQAPGKEREFVAGIAYGTSTYYADSVKGRFTISRDNAKNTVYLQMNSLKPEDTAVYYCAARYNDGYSHFYWGQGTQVTVSS

SEQ ID NO: 1260 - protein, 118 aa, Artificial Sequence
  Chemically Synthesized
QVQLQESGGGLVQAGGSLRLSCAASGNISGIIGMGWYRQAPGKERELVAAISGGGNTYYADSVKGRFTISRDNAKNTVYLQMNSLKPEDTAVYYCAAKYDAPGSLLYWGQGTQVTVSS

SEQ ID NO: 1261 - protein, 118 aa, Artificial Sequence
  Chemically Synthesized
QVQLQESGGGLVQAGGSLRLSCAASGSISYRGRMGWYRQAPGKEREFVAGIAYGTSTYYADSVKGRFTISRDNAKNTVYLQMNSLKPEDTAVYYCAAEGIHGAGHLYWGQGTQVTVSS

SEQ ID NO: 1262 - protein, 118 aa, Artificial Sequence
  Chemically Synthesized
QVQLQESGGGLVQAGGSLRLSCAASGSISSYVRMGWYRQAPGKEREFVAGIGTGTNTYYADSVKGRFTISRDNAKNTVYLQMNSLKPEDTAVYYCAAKYDAPGSLLYWGQGTQVTVSS

SEQ ID NO: 1263 - protein, 118 aa, Artificial Sequence
  Chemically Synthesized
QVQLQESGGGLVQAGGSLRLSCAASGSISYRGRMGWYRQAPGKEREFVAGIGTGTNTYYADSVKGRFTISRDNAKNTVYLQMNSLKPEDTAVYYCAAEGIHGAGHLYWGQGTQVTVSS

SEQ ID NO: 1264 - protein, 122 aa, Artificial Sequence
  Chemically Synthesized
QVQLQESGGGLVQAGGSLRLSCAASGSISYRGRMGWYRQAPGKEREFVAGIAYGTSTYYADSVKGRFTISRDNAKNTVYLQMNSLKPEDTAVYYCAAQERAAGKAVVFHLYWGQGTQVTVSS

SEQ ID NO: 1265 - protein, 118 aa, Artificial Sequence
  Chemically Synthesized
QVQLQESGGGLVQAGGSLRLSCAASGNISDYVRMGWYRQAPGKEREFVAGISVGSSTYYADSVKGRFTISRDNAKNTVYLQMNSLKPEDTAVYYCAAKYDAPGSLLYWGQGTQVTVSS

SEQ ID NO: 1266 - protein, 118 aa, Artificial Sequence
  Chemically Synthesized
QVQLQESGGGLVQAGGSLRLSCAASGSISYRGRMGWYRQAPGKEREFVAGIAYGTSTYYADSVKGRFTISRDNAKNTVYLQMNSLKPEDTAVYYCAAKYAAPGSLLYWGQGTQVTVSS

SEQ ID NO: 1267 - protein, 118 aa, Artificial Sequence
  Chemically Synthesized
QVQLQESGGGLVQAGGSLRLSCAASGSISYRGRMGWYRQAPGKEREFVAGIAYGTSTYYADSVKGRFTISRDNAKNTVYLQMNSLKPEDTAVYYCAAKYDAPGSRLYWGQGTQVTVSS

SEQ ID NO: 1268 - protein, 118 aa, Artificial Sequence
  Chemically Synthesized
QVQLQESGGGLVQAGGSLRLSCAASGSISYRGRMGWYRQAPGKEREFVAGIAYGTSTSYADSVKGRFTISRDNAKNTVYLQMNSLKPEDTAVYYCAAKYDAPGSLLYWGQGTQVTVSS

SEQ ID NO: 1269 - protein, 126 aa, Artificial Sequence
  Chemically Synthesized
QVQLQESGGGLVQAGGSLRLSCAASGSISYRGRMGWYRQAPGKEREFVAGIAYGTSTYYADSVKGRFTISRDNAKNTVYLQMNSLKPEDTAVYYCAVTYKGADYLPAGRIQWLYYWGQGTQVTVSS

SEQ ID NO: 1270 - protein, 122 aa, Artificial Sequence
  Chemically Synthesized
QVQLQESGGGLVQAGGSLRLSCAASGSISYRGRMGWYRQAPGKEREFVAGIAYGTSTYYADSVKGRFTISRDNAKNTVYLQMNSLKPEDTAVYYCAAVEGHEAVSRGYHSYWGQGTQVTVSS

SEQ ID NO: 1271 - protein, 118 aa, Artificial Sequence
  Chemically Synthesized
QVQLQESGGGLVQAGGSLRLSCAASGNIFSIVAMGWYRQAPGKEREFVAAIAKGASTNYADSVKGRFTISRDNAKNTVYLQMNSLKPEDTAVYYCAAKYDAPGSLLYWGQGTQVTVSS

SEQ ID NO: 1272 - protein, 118 aa, Artificial Sequence
  Chemically Synthesized
QVQLQESGGGLVQAGGSLRLSCAASGSISSYVRMGWYRQAPGKEREFVAGIAYGTSTYYADSVKGRFTISRDNAKNTVYLQMNSLKPEDTAVYYCAAKYDAPGSLLYWGQGTQVTVSS

SEQ ID NO: 1273 - protein, 118 aa, Artificial Sequence
  Chemically Synthesized
QVQLQESGGGLVQAGGSLRLSCAASGNISDYVRMGWYRQAPGKEREFVAGIAYGTSTYYADSVKGRFTISRDNAKNTVYLQMNSLKPEDTAVYYCAAKYDAPGSLLYWGQGTQVTVSS

SEQ ID NO: 1274 - protein, 118 aa, Artificial Sequence
  Chemically Synthesized
QVQLQESGGGLVQAGGSLRLSCAASGNISAIIAMGWYRQAPGKERELVAGIDDGTNTNYADSVKGRFTISRDNAKNTVYLQMNSLKPEDTAVYYCAVLAYSEIWYGYWGQGTQVTVSS

SEQ ID NO: 1275 - protein, 126 aa, Artificial Sequence
  Chemically Synthesized
QVQLQESGGGLVQAGGSLRLSCAASGTISFWSIMGWYRQAPGKERELVAGITEGGNTYYADSVKGRFTISRDNAKNTVYLQMNSLKPEDTAVYYCAVTSFQPGVNARYPYTLHPYWGQGTQVTVSS

SEQ ID NO: 1276 - protein, 126 aa, Artificial Sequence
  Chemically Synthesized
QVQLQESGGGLVQAGGSLRLSCAASGTIFYGAAMGWYRQAPGKEREFVAAIGGGSITYYADSVKGRFTISRDNAKNTVYLQMNSLKPEDTAVYYCAAHVLRIGYHVIAQSAGFTYWGQGTQVTVSS

SEQ ID NO: 1277 - protein, 122 aa, Artificial Sequence
  Chemically Synthesized
QVQLQESGGGLVQAGGSLRLSCAASGNISSHHLMGWYRQAPGKEREFVAAITTGANTYYADSVKGRFTISRDNAKNTVYLQMNSLKPEDTAVYYCAVFYYDALRQALALYYWGQGTQVTVSS

SEQ ID NO: 1278 - protein, 122 aa, Artificial Sequence
  Chemically Synthesized
QVQLQESGGGLVQAGGSLRLSCAASGTISDGTHMGWYRQAPGKERELVAAIGQGSNTYYADSVKGRFTISRDNAKNTVYLQMNSLKPEDTAVYYCAAGRYWATGRYYAFPYWGQGTQVTVSS

SEQ ID NO: 1279 - protein, 126 aa, Artificial Sequence
  Chemically Synthesized
QVQLQESGGGLVQAGGSLRLSCAASGTIFPRSIMGWYRQAPGKERELVAGITEGGNTYYADSVKGRFTISRDNAKNTVYLQMNSLKPEDTAVYYCAVTSVQPGVNARYPYTLHPYWGQGTQVTVSS

SEQ ID NO: 1280 - protein, 126 aa, Artificial Sequence
  Chemically Synthesized
QVQLQESGGGLVQAGGSLRLSCAASGYIFRQAAMGWYRQAPGKEREFVAAIGSGTNTYYADSVKGRFTISRDNAKNTVYLQMNSLKPEDTAVYYCAAYIYPSYNVTDYDGGALWYWGQGTQVTVSS

SEQ ID NO: 1281 - protein, 122 aa, Artificial Sequence
  Chemically Synthesized
QVQLQESGGGLVQAGGSLRLSCAASGTIFYVDEMGWYRQAPGKEREFVAAIDVGGSTYYADSVKGRFTISRDNAKNTVYLQMNSLKPEDTAVYYCAVYGQYAKYGSYFFLYWGQGTQVTVSS

SEQ ID NO: 1282 - protein, 122 aa, Artificial Sequence
  Chemically Synthesized
QVQLQESGGGLVQAGGSLRLSCAASGNIFRVAGMGWYRQAPGKERELVAAIGGGSTTYYADSVKGRFTISRDNAKNTVYLQMNSLKPEDTAVYYCAAADVGKDIYGYSLLYWGQGTQVTVSS

SEQ ID NO: 1283 - protein, 122 aa, Artificial Sequence
  Chemically Synthesized
QVQLQESGGGLVQAGGSLRLSCAASGSISVDYAMGWYRQAPGKEREFVAAIGGGAITYYADSVKGRFTISRDNAKNTVYLQMNSLKPEDTAVYYCAAHRYSWDRGSITYDYWGQGTQVTVSS

SEQ ID NO: 1284 - protein, 126 aa, Artificial Sequence
  Chemically Synthesized
QVQLQESGGGLVQAGGSLRLSCAASGTIFPRSIMGWYRQAPGKERELVAGITEGGNTYYADSVKGRFTISRDNAKNTVYLQMNSLKPEDTAVYYCAVTSFQPGVNARDPYTLHPYWGQGTQVTVSS

SEQ ID NO: 1285 - protein, 122 aa, Artificial Sequence
  Chemically Synthesized
QVQLQESGGGLVQAGGSLRLSCAASGTIFSDLIMGWYRQAPGKERELVAAIGAGATTYYADSVKGRFTISRDNAKNTVYLQMNSLKPEDTAVYYCAVLYASSSSYDGVHYYWGQGTQVTVSS

SEQ ID NO: 1286 - protein, 118 aa, Artificial Sequence
  Chemically Synthesized
QVQLQESGGGLVQAGGSLRLSCAASGYIFYYAGMGWYRQAPGKEREFVASITRGGTTNYADSVKGRFTISRDNAKNTVYLQMNSLKPEDTAVYYCAAFAYYLRYHPYWGQGTQVTVSS

SEQ ID NO: 1287 - protein, 126 aa, Artificial Sequence
  Chemically Synthesized
QVQLQESGGGLVQAGGSLRLSCAASGSISNQYAMGWYRQAPGKERELVAAISQGTNTYYADSVKGRFTISRDNAKNTVYLQMNSLKPEDTAVYYCAAHLYTYPDGFYELGLSYDYWGQGTQVTVSS

SEQ ID NO: 1288 - protein, 126 aa, Artificial Sequence
  Chemically Synthesized
QVQLQESGGGLVQAGGSLRLSCAASGTIFPRSIMGWYRQAPGKERERVAGITEGGNTYYADSVKGRFTISRDNAKNTVYLQMNSLKPEDTAVYYCAVTSFQPGVNARYPYTLHPYWGQGTQVTVSS

SEQ ID NO: 1289 - protein, 118 aa, Artificial Sequence
  Chemically Synthesized
QVQLQESGGGLVQAGGSLRLSCAASGTIFPRSIMGWYRQAPGKERELVAGITEGGNTYYADSVKGRFTISRDNAKNTVYLQMNSLKPEDTAVYYCAAPRRYGPTHTYWGQGTQVTVSS

SEQ ID NO: 1290 - protein, 122 aa, Artificial Sequence
  Chemically Synthesized
QVQLQESGGGLVQAGGSLRLSCAASGTISVISIMGWYRQAPGKERELVAGIDHGGNTYYADSVKGRFTISRDNAKNTVYLQMNSLKPEDTAVYYCAALYRYQGDPDRVHGYWGQGTQVTVSS

SEQ ID NO: 1291 - protein, 118 aa, Artificial Sequence
  Chemically Synthesized
QVQLQESGGGLVQAGGSLRLSCAASGTIFPTYVMGWYRQAPGKERELVAAIGWGGNTYYADSVKGRFTISRDNAKNTVYLQMNSLKPEDTAVYYCAADDDTYDGYYYWGQGTQVTVSS

SEQ ID NO: 1292 - protein, 118 aa, Artificial Sequence
  Chemically Synthesized
QVQLQESGGGLVQAGGSLRLSCAASGYISRRGTMGWYRQAPGKEREFVAGIAVGGNTNYADSVKGRFTISRDNAKNTVYLQMNSLKPEDTAVYYCAVGYFGTRVHDYWGQGTQVTVSS

SEQ ID NO: 1293 - protein, 117 aa, Artificial Sequence
  Chemically Synthesized
QVQLQESGGGLVQAGGSLRLSCAASGNISSWDLMGWYRQAPGKEREFVAGIGYGSNTYYADSVKGRFTISRDNAKNTVYLQMNSLKPEDTAVYYCAVLPQAPLFDYWGQGTQVTVSS

SEQ ID NO: 1294 - protein, 118 aa, Artificial Sequence
  Chemically Synthesized
QVQLQESGGGLVQAGGSLRLSCAASGNIFLRTYMGWYRQAPGKEREFVATINPGGITYYADSVKGRFTISRDNAKNTVYLQMNSLKPEDTAVYYCAVKPWVASAFWYWGQGTQVTVSS

SEQ ID NO: 1295 - protein, 118 aa, Artificial Sequence
  Chemically Synthesized
QVQLQESGGGLVQAGGSLRLSCAASGYIFSNHYMGWYRQAPGKEREFVAGITQGANTYYADSVKGRFTISRDNAKNTVYLQMNSLKPEDTAVYYCAAFFPLDYGHDYWGQGTQVTVSS

SEQ ID NO: 1296 - protein, 122 aa, Artificial Sequence
  Chemically Synthesized
QVQLQESGGGLVQAGGSLRLSCAASGTISYWDYMGWYRQAPGKEREFVAAIDEGGTTYYADSVKGRFTISRDNAKNTVYLQMNSLKPEDTAVYYCAALRYSRLYPNRQHTYWGQGTQVTVSS

SEQ ID NO: 1297 - protein, 118 aa, Artificial Sequence
  Chemically Synthesized
QVQLQESGGGLVQAGGSLRLSCAASGSIFLTPGMGWYRQAPGKEREFVAGINYGGSTNYADSVKGRFTISRDNAKNTVYLQMNSLKPEDTAVYYCAVVYIGEGYYVYWGQGTQVTVSS

SEQ ID NO: 1298 - protein, 122 aa, Artificial Sequence
  Chemically Synthesized
QVQLQESGGGLVQAGGSLRLSCAASGSIFGSYVMGWYRQAPGKEREFVATIAQGTSTYYADSVKGRFTISRDNAKNTVYLQMNSLKPEDTAVYYCAVGYLEKWQSRIYFVYWGQGTQVTVSS

SEQ ID NO: 1299 - protein, 126 aa, Artificial Sequence
  Chemically Synthesized
QVQLQESGGGLVQAGGSLRLSCAASGTISQYRPMGWYRQAPGKERELVAAIGRGSSTYYADSVKGRFTISRDNAKNTVYLQMNSLKPEDTAVYYCAVTSFQPGVNARYPYTLHPYWGQGTQVTVSS

SEQ ID NO: 1300 - protein, 126 aa, Artificial Sequence
  Chemically Synthesized
QVQLQESGGGLVQAGGSLRLSCAASGNISEDYVMGWYRQAPGKEREFVASIGQGAITYYADSVKGRFTISRDNAKNTVYLQMNSLKPEDTAVYYCAVGGPYQYPDIRWVRVRYDYWGQGTQVTVSS

SEQ ID NO: 1301 - protein, 118 aa, Artificial Sequence
  Chemically Synthesized
QVQLQESGGGLVQAGGSLRLSCAASGSISGYYFMGWYRQAPGKEREFVAGIAQGTSTYYADSVKGRFTISRDNAKNTVYLQMNSLKPEDTAVYYCAVVTEYHTPLGYWGQGTQVTVSS

SEQ ID NO: 1302 - protein, 122 aa, Artificial Sequence
  Chemically Synthesized
QVQLQESGGGLVQAGGSLRLSCAASGYIFADRYMGWYRQAPGKERELVAGITRGGSTNYADSVKGRFTISRDNAKNTVYLQMNSLKPEDTAVYYCAVPYITYYPYIQPHLYWGQGTQVTVSS

SEQ ID NO: 1303 - protein, 126 aa, Artificial Sequence
  Chemically Synthesized
QVQLQESGGGLVQAGGSLRLSCAASGTIFPRSIMGWYRQAPGKERELVAGITEGGNTYYADSVKGRFTISRDNAKNTVYLQMNSLKPEDTAVYYCAGTSFQPGVNARYPYTLHPYWGQGTQVTVSS

SEQ ID NO: 1304 - protein, 111 aa, Artificial Sequence
  Chemically Synthesized
QVQLQESGGGLVQAGGSLRLSCAASGTISLSNPMGWYRQAPGKEREFVAAIAEGAITNYADSVKGRFTISRDNAKNTVYLQMNSLKPEDTAVYYCASVIYWGQGTQVTVSS

SEQ ID NO: 1305 - protein, 122 aa, Artificial Sequence
  Chemically Synthesized
QVQLQESGGGLVQAGGSLRLSCAASGNISVSPSMGWYRQAPGKEREFVAGITNGSTTYYADSVKGRFTISRDNAKNTVYLQMNSLKPEDTAVYYCAAYAIRYLPDVRYHRYWGQGTQVTVSS

SEQ ID NO: 1306 - protein, 121 aa, Artificial Sequence
  Chemically Synthesized
QVQLQESGGGLVQAGGSLRLSCAASGYISGYPRMGWYRQAPGKEREFVAAIGDGAITNYADSVKGRFTISRDNAKNTVYLQMNSLKPEDTAVYYCAVVHYWARDVIGFGYWGQGTQVTVSS

SEQ ID NO: 1307 - protein, 115 aa, Artificial Sequence
  Chemically Synthesized
QVQLQESGGGLVQAGGSLRLSCAASGYIFTYRNMGWYRQAPGKEREFVAGIARGSSTNYADSVKGRFTISRDNAKNTVYLQMNSLKPEDTAVYYCAVYIRRYDYWGQGTQVTVSS

SEQ ID NO: 1308 - protein, 126 aa, Artificial Sequence
  Chemically Synthesized
QVQLQESGGGLVQAGGSLRLSCAASGTISFWSIMGWYRQAPGKERELVAGITQGGSTYYADSVKGRFTISRDNAKNTVYLQMNSLKPEDTAVYYCAALTLTYWADLYYDPGLHGYWGQGTQVTVSS

SEQ ID NO: 1309 - protein, 115 aa, Artificial Sequence
  Chemically Synthesized
QVQLQESGGGLVQAGGSLRLSCAASGTIFPRSIMGWYRQAPGKERELVAGITEGGNTYYADSVKGRFTISRDNAKNTVYLQMNSLKPEDTAVYYCAVNSFYHEYWGQGTQVTVSS

SEQ ID NO: 1310 - protein, 118 aa, Artificial Sequence
  Chemically Synthesized
QVQLQESGGGLVQAGGSLRLSCAASGNISWEYTMGWYRQAPGKEREFVAGIGYGSITYYADSVKGRFTISRDNAKNTVYLQMNSLKPEDTAVYYCAVVAFPQALHDYWGQGTQVTVSS

SEQ ID NO: 1311 - protein, 118 aa, Artificial Sequence
  Chemically Synthesized
QVQLQESGGGLVQAGGSLRLSCAASGNIFVRGSMGWYRQAPGKEREFVAGITSGTTTYYADSVKGRFTISRDNAKNTVYLQMNSLKPEDTAVYYCAVVRGYPTLYTYWGQGTQVTVSS

SEQ ID NO: 1312 - protein, 118 aa, Artificial Sequence
  Chemically Synthesized
QVQLQESGGGLVQAGGSLRLSCAASGSIFPFYYMGWYRQAPGKERELVATITWGSTTYYADSVKGRFTISRDNAKNTVYLQMNSLKPEDTAVYYCAVLSIIWQHYRYWGQGTQVTVSS

SEQ ID NO: 1313 - protein, 121 aa, Artificial Sequence
  Chemically Synthesized
QVQLQESGGGLVQAGGSLRLSCAASGTISDYDMGWYRQAPGKEREFVATIGSGSTTYYADSVKGRFTISRDNAKNTVYLQMNSLKPEDTAVYYCAVGRLQYGRWYYYHRYWGQGTQVTVSS

SEQ ID NO: 1314 - protein, 118 aa, Artificial Sequence
  Chemically Synthesized
QVQLQESGGGLVQAGGSLRLSCAASGSISPYGTMGWYRQAPGKEREFVAAIGTGSNTYYADSVKGRFTISRDNAKNTVYLQMNSLKPEDTAVYYCAVIRRLIWRHDYWGQGTQVTVSS

SEQ ID NO: 1315 - protein, 118 aa, Artificial Sequence
  Chemically Synthesized
QVQLQESGGGLVQAGGSLRLSCAASGTISVLVSMGWYRQAPGKEREFVAGITRGGSTYYADSVKGRFTISRDNAKNTVYLQMNSLKPEDTAVYYCAAYAYLVYLHRYWGQGTQVTVSS

SEQ ID NO: 1316 - protein, 118 aa, Artificial Sequence
  Chemically Synthesized
QVQLQESGGGLVQAGGSLRLSCAASGTIFPRSIMGWYRQAPGKERELVAGITEGGNTYYADSVKGRFTISRDNAKNTVYLQMNSLKPEDTAVYYCAVLAYSEIWYGYWGQGTQVTVSS

SEQ ID NO: 1317 - protein, 118 aa, Artificial Sequence
  Chemically Synthesized
QVQLQESGGGLVQAGGSLRLSCAASGSIFYYYGMGWYRQAPGKEREFVAGITRGATTYYADSVKGRFTISRDNAKNTVYLQMNSLKPEDTAVYYCAAKAFAYLGHGYWGQGTQVTVSS

SEQ ID NO: 1318 - protein, 115 aa, Artificial Sequence
  Chemically Synthesized
QVQLQESGGGLVQAGGSLRLSCAASGSISSGLYMGWYRQAPGKEREFVAAITAGGTTYYADSVKGRFTISRDNAKNTVYLQMNSLKPEDTAVYYCANYYDEFDYWGQGTQVTVSS

SEQ ID NO: 1319 - protein, 126 aa, Artificial Sequence
  Chemically Synthesized
QVQLQESGGGLVQAGGSLRLSCAASGNISYPRYMGWYRQAPGKERELVAGIGLGSITYYADSVKGRFTISRDNAKNTVYLQMNSLKPEDTAVYYCAVRTVRYLGAVRVPYTGHWYWGQGTQVTVSS

SEQ ID NO: 1320 - protein, 118 aa, Artificial Sequence
  Chemically Synthesized
QVQLQESGGGLVQAGGSLRLSCAASGTIFARDGMGWYRQAPGKERELVASIAVGTNTNYADSVKGRFTISRDNAKNTVYLQMNSLKPEDTAVYYCAAITFYTPWLTYWGQGTQVTVSS

SEQ ID NO: 1321 - protein, 126 aa, Artificial Sequence
  Chemically Synthesized
QVQLQESGGGLVQAGGSLRLSCAASGSISRDRYMGWYRQAPGKEREFVAAIDGGSNTYYADSVKGRFTISRDNAKNTVYLQMNSLKPEDTAVYYCAVTSFQPGVNARYPYTLHPYWGQGTQVTVSS

SEQ ID NO: 1322 - protein, 122 aa, Artificial Sequence
  Chemically Synthesized
QVQLQESGGGLVQAGGSLRLSCAASGTISVISIMGWYRQAPGKERELVAGIDHGGNTYYADSVKGRFTISRDNAKNTVYLQMNSLKPEDTAVYYCAALYRDQGDPDRFHGYWGQGTQVTVSS

SEQ ID NO: 1323 - protein, 118 aa, Artificial Sequence
  Chemically Synthesized
QVQLQESGGGLVQAGGSLRLSCAASGTISSAPDMGWYRQAPGKERELVASISPGASTYYADSVKGRFTISRDNAKNTVYLQMNSLKPEDTAVYYCAALPYHNKPYLYWGQGTQVTVSS

SEQ ID NO: 1324 - protein, 118 aa, Artificial Sequence
  Chemically Synthesized
QVQLQESGGGLVQAGGSLRLSCAASGTIFYAFYMGWYRQAPGKERELVAGITSGGITYYADSVKGRFTISRDNAKNTVYLQMNSLKPEDTAVYYCAAYLRKRGVHLYWGQGTQVTVSS

SEQ ID NO: 1325 - protein, 118 aa, Artificial Sequence
  Chemically Synthesized
QVQLQESGGGLVQAGGSLRLSCAASGTISVISIMGWYRQAPGKERELVAGIDHGGNTYYADSVKGRFTISRDNAKNTVYLQMNSLKPEDTAVYYCAAPRRYGPTHTYWGQGTQVTVSS

SEQ ID NO: 1326 - protein, 118 aa, Artificial Sequence
  Chemically Synthesized
QVQLQESGGGLVQAGGSLRLSCAASGNISQWYIMGWYRQAPGKEREFVAGIAGGASTYYADSVKGRFTISRDNAKNTVYLQMNSLKPEDTAVYYCAAFYTSTRNLDYWGQGTQVTVSS

SEQ ID NO: 1327 - protein, 126 aa, Artificial Sequence
  Chemically Synthesized
QVQLQESGGGLVQAGGSLRLSCAASGYISDHSGMGWYRQAPGKEREFVAGITRGATTYYADSVKGRFTISRDNAKNTVYLQMNSLKPEDTAVYYCAVYARIDTRYRPGGIYYYRYWGQGTQVTVSS

SEQ ID NO: 1328 - protein, 118 aa, Artificial Sequence
  Chemically Synthesized
QVQLQESGGGLVQAGGSLRLSCAASGTIFSAYAMGWYRQAPGKEREFVAGIGGGASTYYADSVKGRFTISRDNAKNTVYLQMNSLKPEDTAVYYCAAHHYDQGFFDYWGQGTQVTVSS

SEQ ID NO: 1329 - protein, 122 aa, Artificial Sequence
  Chemically Synthesized
QVQLQESGGGLVQAGGSLRLSCAASGNISADEDMGWYRQAPGKEREFVASIAWGATTNYADSVKGRFTISRDNAKNTVYLQMNSLKPEDTAVYYCAAGRYYSTPQYRYHYYWGQGTQVTVSS

SEQ ID NO: 1330 - protein, 118 aa, Artificial Sequence
  Chemically Synthesized
QVQLQESGGGLVQAGGSLRLSCAASGSIFLRYLMGWYRQAPGKEREFVAGIAVGGITYYADSVKGRFTISRDNAKNTVYLQMNSLKPEDTAVYYCAVHDRRDEDYDYWGQGTQVTVSS

SEQ ID NO: 1331 - protein, 122 aa, Artificial Sequence
  Chemically Synthesized
QVQLQESGGGLVQAGGSLRLSCAASGTISWYDEMGWYRQAPGKEREFVASIGYGSNTYYADSVKGRFTISRDNAKNTVYLQMNSLKPEDTAVYYCAALRLGYYILPQDLVYWGQGTQVTVSS

SEQ ID NO: 1332 - protein, 118 aa, Artificial Sequence
  Chemically Synthesized
QVQLQESGGGLVQAGGSLRLSCAASGYISFQYIMGWYRQAPGKEREFVAGITWGTSTYYADSVKGRFTISRDNAKNTVYLQMNSLKPEDTAVYYCAVVYRYGTNHDYWGQGTQVTVSS

SEQ ID NO: 1333 - protein, 118 aa, Artificial Sequence
  Chemically Synthesized
QVQLQESGGGLVQAGGSLRLSCAASGNISDSLYMGWYRQAPGKEREFVAGIGIGSTTYYADSVKGRFTISRDNAKNTVYLQMNSLKPEDTAVYYCAAFLTYLPNYDYWGQGTQVTVSS

SEQ ID NO: 1334 - protein, 119 aa, Artificial Sequence
  Chemically Synthesized
QVQLQESGGGLVQAGGSLRLSCAASGNISWIYRMGWYRQAPGKEREFVAAIAYGTTTYYADSVKGRFTISRDNAKNTVYLQMNSLKPEDTAVYYCAAGQRYRVRPFYYWGQGTQVTVSS

SEQ ID NO: 1335 - protein, 118 aa, Artificial Sequence
  Chemically Synthesized
QVQLQESGGGLVQAGGSLRLSCAASGNISTSRYMGWYRQAPGKERELVAGINPGATTNYADSVKGRFTISRDNAKNTVYLQMNSLKPEDTAVYYCAAPSWSVHKHGYWGQGTQVTVSS

SEQ ID NO: 1336 - protein, 122 aa, Artificial Sequence
  Chemically Synthesized
QVQLQESGGGLVQAGGSLRLSCAASGYISDRYSMGWYRQAPGKEREFVATIDAGAITNYADSVKGRFTISRDNAKNTVYLQMNSLKPEDTAVYYCAVDIPTTYGTQHNYYYWGQGTQVTVSS

SEQ ID NO: 1337 - protein, 118 aa, Artificial Sequence
  Chemically Synthesized
QVQLQESGGGLVQAGGSLRLSCAASGSISYPDYMGWYRQAPGKERELVASIGQGTITNYADSVKGRFTISRDNAKNTVYLQMNSLKPEDTAVYYCAVIIWQQPFLPYWGQGTQVTVSS

SEQ ID NO: 1338 - protein, 121 aa, Artificial Sequence
  Chemically Synthesized
QVQLQESGGGLVQAGGSLRLSCAASGNIFADDQMGWYRQAPGKERELVASLLLVVLPYADSVKGRFTISRDNAKNTVYLQMNSLKPEDTAVYYCAVELHEDTGGYLTFPYWGQGTQVTVSS

SEQ ID NO: 1339 - protein, 125 aa, Artificial Sequence
  Chemically Synthesized
QVQLQESGGGLVQAGGSLRLSCAASGNIFYSSFMGWYRQAPGKEREFVAGIATGSTTNYADSVKGRFTISRDNAKNTVYLQMNSLKPEDTAVYYCAVDDTDQLSTGGYPTDLTYWGQGTQVTVSS

SEQ ID NO: 1340 - protein, 118 aa, Artificial Sequence
  Chemically Synthesized
QVQLQESGGGLVQAGGSLRLSCAASGYIFSYYLMGWYRQAPGKERELVAGIGLGAITYYADSVKGRFTISRDNAKNTVYLQMNSLKPEDTAVYYCAAYRGGYRTLAYWGQGTQVTVSS

SEQ ID NO: 1341 - protein, 126 aa, Artificial Sequence
  Chemically Synthesized
QVQLQESGGGLVQAGGSLRLSCAASGTISPYGSMGWYRQAPGKERELVAAITYGGNTYYADSVKGRFTISRDNAKNTVYLQMNSLKPEDTAVYYCAAGVLLHYGGGWRPGGYYDYWGQGTQVTVSS

SEQ ID NO: 1342 - protein, 117 aa, Artificial Sequence
  Chemically Synthesized
QVQLQESGGGLVQAGGSLRLSCAASGYIFQHHSMGWYRQAPGKEREFVAAIGKGSITNYADSVKGRFTISRDNAKNTVYLQMNSLKPEDTAVYYCAVNYLVGTSLYWGQGTQVTVSS

SEQ ID NO: 1343 - protein, 118 aa, Artificial Sequence
  Chemically Synthesized
QVQLQESGGGLVQAGGSLRLSCAASGTISLRSYMGWYRQAPGKEREFVAGIGSGSNTYYADSVKGRFTISRDNAKNTVYLQMNSLKPEDTAVYYCAVKTLYWSHYIYWGQGTQVTVSS

SEQ ID NO: 1344 - protein, 127 aa, Artificial Sequence
  Chemically Synthesized
QVQLQESGGGLVQAGGSLRLSCAASGNIFGSAYMGWYRQAPGKERELVAAIAFGASTYYADSVKGRFTISRDNAKNTVYLQMNSLKPEDTAVYYCAVADGAYAAFTRPQNADLFIYWGQGTQVTVSS

SEQ ID NO: 1345 - protein, 113 aa, Artificial Sequence
  Chemically Synthesized
QVQLQESGGGLVQAGGSLRLSCAASGYIFAPDAMGWYRQAPGKERELVAGISTGSNTNYADSVKGRFTISRDNAKNTVYLQMNSLKPEDTAVYYCAVDTYSYWGQGTQVTVSS

SEQ ID NO: 1346 - protein, 121 aa, Artificial Sequence
  Chemically Synthesized
QVQLQESGGGLVQAGGSLRLSCAASGNISQTSMGWYRQAPGKEREFVAAISYGTSTNYADSVKGRFTISRDNAKNTVYLQMNSLKPEDTAVYYCAVDKYKTGQWTDLHGYWGQGTQVTVSS

SEQ ID NO: 1347 - protein, 117 aa, Artificial Sequence
  Chemically Synthesized
QVQLQESGGGLVQAGGSLRLSCAASGSIFYSNWMGWYRQAPGKEREFVATIDGVLLPYADSVKGRFTISRDNAKNTVYLQMNSLKPEDTAVYYCAAWAYYSASHGYWGQGTQVTVSS

SEQ ID NO: 1348 - protein, 118 aa, Artificial Sequence
  Chemically Synthesized
QVQLQESGGGLVQAGGSLRLSCAASGNISMGWYRQAPGKEREFVAGIAYGSSTYYADSVKGRFTISRDNAKNTVYLQMNSLKPEDTAVYYCAAYYVYVQVYDWVHIYWGQGTQVTVSS

SEQ ID NO: 1349 - protein, 126 aa, Artificial Sequence
  Chemically Synthesized
QVQLQESGGGLVQAGGSLRLSCAASGNISRLYYMGWYRQAPGKERELVAAIAAGATTNYADSVKGRFTISRDNAKNTVYLQMNSLKPEDTAVYYCAVAAKSVQNYYYYVIVNHSYWGQGTQVTVSS

SEQ ID NO: 1350 - protein, 118 aa, Artificial Sequence
  Chemically Synthesized
QVQLQESGGGLVQAGGSLRLSCAASGNISQATYMGWYRQAPGKERELVASITSGGNTNYADSVKGRFTISRDNAKNTVYLQMNSLKPEDTAVYYCAVYYPGDTPYRYWGQGTQVTVSS

SEQ ID NO: 1351 - protein, 126 aa, Artificial Sequence
  Chemically Synthesized
QVQLQESGGGLVQAGGSLRLSCAASGNISHLSNMGWYRQAPGKEREFVASIDIGGSTYYADSVKGRFTISRDNAKNTVYLQMNSLKPEDTAVYYCAAPGKTPRVDRGRHTSRFRYWGQGTQVTVSS

SEQ ID NO: 1352 - protein, 117 aa, Artificial Sequence
  Chemically Synthesized
QVQLQESGGGLVQAGGSLRLSCAASGTISVNGSMGWYRQAPGKERELVAAISWGTSTYYADSVKGRFTISRDNAKNTVYLQMNSLKPEDTAVYYCAAEDTVYHSLYWGQGTQVTVSS

SEQ ID NO: 1353 - protein, 118 aa, Artificial Sequence
  Chemically Synthesized
QVQLQESGGGLVQAGGSLRLSCAASGYISYSYGMGWYRQAPGKEREFVASINRGANTYYADSVKGRFTISRDNAKNTVYLQMNSLKPEDTAVYYCAVDRDIQAGYQYWGQGTQVTVSS

SEQ ID NO: 1354 - protein, 115 aa, Artificial Sequence
  Chemically Synthesized
QVQLQESGGGLVQAGGSLRLSCAASGNIFVMGWYRQAPGKERELVASIDLGANTYYADSVKGRFTISRDNAKNTVYLQMNSLKPEDTAVYYCAAYYWYYARHVYWGQGTQVTVSS

SEQ ID NO: 1355 - protein, 122 aa, Artificial Sequence
  Chemically Synthesized
QVQLQESGGGLVQAGGSLRLSCAASGYIFSLPDMGWYRQAPGKERELVAAINGGGTTNYADSVKGRFTISRDNAKNTVYLQMNSLKPEDTAVYYCAVLYWYYADYHLRTYYWGQGTQVTVSS

SEQ ID NO: 1356 - protein, 118 aa, Artificial Sequence
  Chemically Synthesized
QVQLQESGGGLVQAGGSLRLSCAASGYIFASRGMGWYRQAPGKERELVAGIGSGAITNYADSVKGRFTISRDNAKNTVYLQMNSLKPEDTAVYYCAVYGDTDTGLAYWGQGTQVTVSS

SEQ ID NO: 1357 - protein, 117 aa, Artificial Sequence
  Chemically Synthesized
QVQLQESGGGLVQAGGSLRLSCAASGYISVREYMGWYRQAPGKEREFVATISTGATTNYADSVKGRFTISRDNAKNTVYLQMNSLKPEDTAVYYCAVDGHFPHWLYWGQGTQVTVSS

SEQ ID NO: 1358 - protein, 117 aa, Artificial Sequence
  Chemically Synthesized
QVQLQESGGGLVQAGGSLRLSCAASGNISYLSLMGWYRQAPGKEREFVATIAPVVVPYADSVKGRFTISRDNAKNTVYLQMNSLKPEDTAVYYCAATGYSPIGHDYWGQGTQVTVSS

SEQ ID NO: 1359 - protein, 122 aa, Artificial Sequence
  Chemically Synthesized
QVQLQESGGGLVQAGGSLRLSCAASGYISRRGGMGWYRQAPGKEREFVATITLGASTYYADSVKGRFTISRDNAKNTVYLQMNSLKPEDTAVYYCAAHRWRTRYRYGYHAYWGQGTQVTVSS

SEQ ID NO: 1360 - protein, 118 aa, Artificial Sequence
  Chemically Synthesized
QVQLQESGGGLVQAGGSLRLSCAASGSIFTQFGMGWYRQAPGKERELVAGISGGTITYYADSVKGRFTISRDNAKNTVYLQMNSLKPEDTAVYYCAVGGLSSVSYYYWGQGTQVTVSS

SEQ ID NO: 1361 - protein, 122 aa, Artificial Sequence
  Chemically Synthesized
QVQLQESGGGLVQAGGSLRLSCAASGTISFYAYMGWYRQAPGKEREFVATITFGGSTTNYADSVKGRFTISRDNAKNTVYLQMNSLKPEDTAVYYCAADYPNVYSLSTLFYWGQGTQVTVSS

SEQ ID NO: 1362 - protein, 126 aa, Artificial Sequence
  Chemically Synthesized
QVQLQESGGGLVQAGGSLRLSCAASGTIFYTRIMGWYRQAPGKERELVAGIGAGSITYYADSVKGRFTISRDNAKNTVYLQMNSLKPEDTAVYYCAARPYIYPSVRFRITDDHDYWGQGTQVTVSS

SEQ ID NO: 1363 - protein, 121 aa, Artificial Sequence
  Chemically Synthesized
QVQLQESGGGLVQAGGSLRLSCAASGYIFGTTQMGWYRQAPGKEREFVASINAGTTTYYADSVKGRFTISRDNAKNTVYLQMNSLKPEDTAVYYCAVWYEGGLPDISLMYWGQGTQVTVSS

SEQ ID NO: 1364 - protein, 118 aa, Artificial Sequence
  Chemically Synthesized
QVQLQESGGGLVQAGGSLRLSCAASGNISSRYEMGWYRQAPGKERELVATIGLGGNTYYADSVKGRFTISRDNAKNTVYLQMNSLKPEDTAVYYCAAYASGYYTLVYWGQGTQVTVSS

SEQ ID NO: 1365 - protein, 126 aa, Artificial Sequence
  Chemically Synthesized
QVQLQESGGGLVQAGGSLRLSCAASGSISDDLYMGWYRQAPGKERELVATISAGGNTYYADSVKGRFTISRDNAKNTVYLQMNSLKPEDTAVYYCAAVFYTPINRVYSTSTQYQYWGQGTQVTVSS

SEQ ID NO: 1366 - protein, 118 aa, Artificial Sequence
  Chemically Synthesized
QVQLQESGGGLVQAGGSLRLSCAASGSIFLYSVMGWYRQAPGKEREFVASIGRGSNTNYADSVKGRFTISRDNAKNTVYLQMNSLKPEDTAVYYCAVGYELQILFPYWGQGTQVTVSS

SEQ ID NO: 1367 - protein, 118 aa, Artificial Sequence
  Chemically Synthesized
QVQLQESGGGLVQAGGSLRLSCAASGTISPTSDMGWYRQAPGKERELVASINPGSITNYADSVKGRFTISRDNAKNTVYLQMNSLKPEDTAVYYCAAWVDLYDGLDYWGQGTQVTVSS

SEQ ID NO: 1368 - protein, 120 aa, Artificial Sequence
  Chemically Synthesized
QVQLQESGGGLVQAGGSLRLSCAASGYISRPYLMGWYRQAPGKEREFVVLILVLLPYADSVKGRFTISRDNAKNTVYLQMNSLKPEDTAVYYCAADDSDGTPPQTELYYWGQGTQVTVSS

SEQ ID NO: 1369 - protein, 123 aa, Artificial Sequence
  Chemically Synthesized
QVQLQESGGGLVQAGGSLRLSCAASGNILVCTMGWYRQAPGKERELVASINQDYQYADSVKGRFTISRDNAKNTVYLQMNSLKPEDTAVYYCAVWSQPSYTGWPSYGADHNYWGQGTQVTVSS

SEQ ID NO: 1370 - protein, 118 aa, Artificial Sequence
  Chemically Synthesized
QVQLQESGGGLVQAGGSLRLSCAASGYISSRAIMGWYRQAPGKERELVAAISGGASTNYADSVKGRFTISRDNAKNTVYLQMNSLKPEDTAVYYCAVPVDDIGDPSYWGQGTQVTVSS

SEQ ID NO: 1371 - protein, 118 aa, Artificial Sequence
  Chemically Synthesized
QVQLQESGGGLVQAGGSLRLSCAASGYIFGPFLMGWYRQAPGKEREFVAAITFGATTYYADSVKGRFTISRDNAKNTVYLQMNSLKPEDTAVYYCAAPYWSYLIHFYWGQGTQVTVSS

SEQ ID NO: 1372 - protein, 122 aa, Artificial Sequence
  Chemically Synthesized
QVQLQESGGGLVQAGGSLRLSCAASGSISRYVGMGWYRQAPGKERELVATISVGATTYYADSVKGRFTISRDNAKNTVYLQMNSLKPEDTAVYYCAVTAVRYGFYYLIYQYWGQGTQVTVSS

SEQ ID NO: 1373 - protein, 126 aa, Artificial Sequence
  Chemically Synthesized
QVQLQESGGGLVQAGGSLRLSCAASGSISRAYSMGWYRQAPGKERELVATIASGGTTNYADSVKGRFTISRDNAKNTVYLQMNSLKPEDTAVYYCAVSIVRDPRPRTYGSVYYYYWGQGTQVTVSS

SEQ ID NO: 1374 - protein, 118 aa, Artificial Sequence
  Chemically Synthesized
QVQLQESGGGLVQAGGSLRLSCAASGSIFYYTYMGWYRQAPGKEREFVATIGYGGNTYYADSVKGRFTISRDNAKNTVYLQMNSLKPEDTAVYYCAAVLYYVPPLRYWGQGTQVTVSS

SEQ ID NO: 1375 - protein, 126 aa, Artificial Sequence
  Chemically Synthesized
QVQLQESGGGLVQAGGSLRLSCAASGYIFRYSVMGWYRQAPGKEREFVAAISVGANTYYADSVKGRFTISRDNAKNTVYLQMNSLKPEDTAVYYCAADLGVDTGGLDDLVTDYGYWGQGTQVTVSS

SEQ ID NO: 1376 - protein, 124 aa, Artificial Sequence
  Chemically Synthesized
QVQLQESGGGLVQAGGSLRLSCAASGNISVYYSMGWYRQAPGKERELVAAINTGSTTYYADSVKGRFTISRDNAKNTVYLQMNSLKPEDTAVYYCAAYYKRTDGYTHRTYLIYWGQGTQVTVSS

SEQ ID NO: 1377 - protein, 124 aa, Artificial Sequence
  Chemically Synthesized
QVQLQESGGGLVQAGGSLRLSCAASGSISINGAMGWYRQAPGKERELVAGIARGATTYYADSVKGRFTISRDNAKNTVYLQMNSLKPEDTAVYYCAAYYNRTDGYTHRTYLIYWGQGTQVTVSS

SEQ ID NO: 1378 - protein, 124 aa, Artificial Sequence
  Chemically Synthesized
QVQLQESGGGLVQAGGSLRLSCAASGSISINGAMGWYRQAPGKERELVAGIARGATTYYADSVKGRFTISRDNAKNTVYLQMNSLKPEDTAVYYCAAYYTRTDGYTHRTYLIYWGQGTQVTVSS

SEQ ID NO: 1379 - protein, 118 aa, Artificial Sequence
  Chemically Synthesized
QVQLQESGGGLVQAGGSLRLSCAASGSISINGAMGWYRQAPGKERELVAGIARGATTYYADSVKGRFTISRDNAKNTVYLQMNSLKPEDTAVYYCAAIYNAGSEYWYWGQGTQVTVSS

SEQ ID NO: 1380 - protein, 124 aa, Artificial Sequence
  Chemically Synthesized
QVQLQESGGGLVQAGGSLRLSCAASGYIFGPGRMGWYRQAPGKERELVATIDTGANTNYADSVKGRFTISRDNAKNTVYLQMNSLKPEDTAVYYCAAYYKRTDGYTHRTYLIYWGQGTQVTVSS

SEQ ID NO: 1381 - protein, 118 aa, Artificial Sequence
  Chemically Synthesized
QVQLQESGGGLVQAGGSLRLSCAASGNISRSDNMGWYRQAPGKEREFVATITAGTSTNYADSVKGRFTISRDNAKNTVYLQMNSLKPEDTAVYYCAAGDDIAIYFLYWGQGTQVTVSS

SEQ ID NO: 1382 - protein, 120 aa, Artificial Sequence
  Chemically Synthesized
QVQLQESGGGLVQAGGSLRLSCAASGNIFVAYDMGWYRQAPGKERELVATIASVVLPYADSVKGRFTISRDNAKNTVYLQMNSLKPEDTAVYYCAAGYYGYTRWRDHDYWGQGTQVTVSS

SEQ ID NO: 1383 - protein, 118 aa, Artificial Sequence
  Chemically Synthesized
QVQLQESGGGLVQAGGSLRLSCAASGNIFANAYMGWYRQAPGKEREFVATIASGGSTYYADSVKGRFTISRDNAKNTVYLQMNSLKPEDTAVYYCAVISHTQRTYYYWGQGTQVTVSS

SEQ ID NO: 1384 - protein, 121 aa, Artificial Sequence
  Chemically Synthesized
QVQLQESGGGLVQAGGSLRLSCAASGNISSVAVMGWYRQAPGKERELVASIDGGITNYADSVKGRFTISRDNAKNTVYLQMNSLKPEDTAVYYCAVQSRWYRYWAGGLFYWGQGTQVTVSS

SEQ ID NO: 1385 - protein, 118 aa, Artificial Sequence
  Chemically Synthesized
QVQLQESGGGLVQAGGSLRLSCAASGTISSYSQMGWYRQAPGKERELVASITSGGITYYADSVKGRFTISRDNAKNTVYLQMNSLKPEDTAVYYCAADRDGTALYIYWGQGTQVTVSS

SEQ ID NO: 1386 - protein, 110 aa, Artificial Sequence
  Chemically Synthesized
QVQLQESGGGLVQAGGSLRLSCAASGNISRRPQMGWYRQAPGKERELVAGIGDGAITYYADSVKGRFTISRDNAKNTVYLQMNSLKPEDTAVYYCAVMYWGQGTQVTVSS

SEQ ID NO: 1387 - protein, 124 aa, Artificial Sequence
  Chemically Synthesized
QVQLQESGGGLVQAGGSLRLSCAASGTISSWVMGWYRQAPGKERELVALLLKVVIPYADSVKGRFTISRDNAKNTVYLQMNSLKPEDTAVYYCAVRDYPRDYHNDVDDFLHGYWGQGTQVTVSS

SEQ ID NO: 1388 - protein, 119 aa, Artificial Sequence
  Chemically Synthesized
QVQLQESGGGLVQAGGSLRLSCAASGYIFSNTMGWYRQAPGKERELVASIMTVLLPYADSVKGRFTISRDNAKNTVYLQMNSLKPEDTAVYYCAADAYIDYYQYYAIYWGQGTQVTVSS

SEQ ID NO: 1389 - protein, 118 aa, Artificial Sequence
  Chemically Synthesized
QVQLQESGGGLVQAGGSLRLSCAASGYISIYLRMGWYRQAPGKERELVAGIGVGSNTNYADSVKGRFTISRDNAKNTVYLQMNSLKPEDTAVYYCAVFDPPWGYFDYWGQGTQVTVSS

SEQ ID NO: 1390 - protein, 118 aa, Artificial Sequence
  Chemically Synthesized
QVQLQESGGGLVQAGGSLRLSCAASGTISSLWPMGWYRQAPGKEREFVATIGGGSTTYYADSVKGRFTISRDNAKNTVYLQMNSLKPEDTAVYYCAVAGGGSAYLPYWGQGTQVTVSS

SEQ ID NO: 1391 - protein, 122 aa, Artificial Sequence
  Chemically Synthesized
QVQLQESGGGLVQAGGSLRLSCAASGNISGDWVMGWYRQAPGKERELVAAIGEGSTTNYADSVKGRFTISRDNAKNTVYLQMNSLKPEDTAVYYCAAATPWKPYYLTLHLYWGQGTQVTVSS

SEQ ID NO: 1392 - protein, 120 aa, Artificial Sequence
  Chemically Synthesized
QVQLQESGGGLVQAGGSLRLSCAASGNISNGSMGWYRQAPGKERELVAAIGGGSSTNYADSVKGRFTISRDNAKNTVYLQMNSLKPEDTAVYYCAASRWYYYHVGTGIYWGQGTQVTVSS

SEQ ID NO: 1393 - protein, 124 aa, Artificial Sequence
  Chemically Synthesized
QVQLQESGGGLVQAGGSLRLSCAASGSISGSYWMGWYRQAPGKEREFVAGIGGGASTYYADSVKGRFTISRDNAKNTVYLQMNSLKPEDTAVYYCAARVVWQVSTVRTPLHGYWGQGTQVTVSS

SEQ ID NO: 1394 - protein, 118 aa, Artificial Sequence
  Chemically Synthesized
QVQLQESGGGLVQAGGSLRLSCAASGYISGTYLMGWYRQAPGKEREFVAGIGYGANTYYADSVKGRFTISRDNAKNTVYLQMNSLKPEDTAVYYCAAYWQDLPSHDYWGQGTQVTVSS

SEQ ID NO: 1395 - protein, 118 aa, Artificial Sequence
  Chemically Synthesized
QVQLQESGGGLVQAGGSLRLSCAASGTISLPDYMGWYRQAPGKEREFVATIDHGASTNYADSVKGRFTISRDNAKNTVYLQMNSLKPEDTAVYYCAAWDRRRYYHLYWGQGTQVTVSS

SEQ ID NO: 1396 - protein, 117 aa, Artificial Sequence
  Chemically Synthesized
QVQLQESGGGLVQAGGSLRLSCAASGYIFWDTYMGWYRQAPGKEREFVAAITQGTTTYYADSVKGRFTISRDNAKNTVYLQMNSLKPEDTAVYYCAVRGWGSVTMYWGQGTQVTVSS

SEQ ID NO: 1397 - protein, 118 aa, Artificial Sequence
  Chemically Synthesized
QVQLQESGGGLVQAGGSLRLSCAASGNIFGLDKMGWYRQAPGKERELVAGIDGGASTYYADSVKGRFTISRDNAKNTVYLQMNSLKPEDTAVYYCAVDTYDYQYFSYWGQGTQVTVSS

SEQ ID NO: 1398 - protein, 122 aa, Artificial Sequence
  Chemically Synthesized
QVQLQESGGGLVQAGGSLRLSCAASGTISWVYGMGWYRQAPGKERELVASIDYGATTNYADSVKGRFTISRDNAKNTVYLQMNSLKPEDTAVYYCAAEPFLYEPDYVGLPYWGQGTQVTVSS

SEQ ID NO: 1399 - protein, 118 aa, Artificial Sequence
  Chemically Synthesized
QVQLQESGGGLVQAGGSLRLSCAASGNIFAFSLMGWYRQAPGKEREFVAAISYGTITYYADSVKGRFTISRDNAKNTVYLQMNSLKPEDTAVYYCAVYRWDYYGYGYWGQGTQVTVSS

SEQ ID NO: 1400 - protein, 122 aa, Artificial Sequence
  Chemically Synthesized
QVQLQESGGGLVQAGGSLRLSCAASGKFLTTVSMGWYRQAPGKERELVATISGGSSTNYADSVKGRFTISRDNAKNTVYLQMNSLKPEDTAVYYCAVVLYDRSFGSRHLAYWGQGTQVTVSS

SEQ ID NO: 1401 - protein, 122 aa, Artificial Sequence
  Chemically Synthesized
QVQLQESGGGLVQAGGSLRLSCAASGSIFYKNNMGWYRQAPGKEREFVASIGLGTSTNYADSVKGRFTISRDNAKNTVYLQMNSLKPEDTAVYYCAAYQRTGSDYVLKYHYWGQGTQVTVSS

SEQ ID NO: 1402 - protein, 118 aa, Artificial Sequence
  Chemically Synthesized
QVQLQESGGGLVQAGGSLRLSCAASGTISVLYVMGWYRQAPGKERELVAAINSGATTNYADSVKGRFTISRDNAKNTVYLQMNSLKPEDTAVYYCAVTSVTNTVTIYWGQGTQVTVSS

SEQ ID NO: 1403 - protein, 126 aa, Artificial Sequence
  Chemically Synthesized
QVQLQESGGGLVQAGGSLRLSCAASGTISPIQDMGWYRQAPGKERELVATITLGSNTNYADSVKGRFTISRDNAKNTVYLQMNSLKPEDTAVYYCAAQWDWNYIYEYGEDPYLYYWGQGTQVTVSS

SEQ ID NO: 1404 - protein, 124 aa, Artificial Sequence
  Chemically Synthesized
QVQLQESGGGLVQAGGSLRLSCAASGNIFAELYMGWYRQAPGKEREFVASIAYGASTYYADSVKGRFTISRDNAKNTVYLQMNSLKPEDTAVYYCAAGGDWRPSVRAYTWHRYWGQGTQVTVSS

SEQ ID NO: 1405 - protein, 117 aa, Artificial Sequence
  Chemically Synthesized
QVQLQESGGGLVQAGGSLRLSCAASGTISSRLMGWYRQAPGKERELVAAIDVGGSTNYADSVKGRFTISRDNAKNTVYLQMNSLKPEDTAVYYCAARGGTDDRHSYWGQGTQVTVSS

SEQ ID NO: 1406 - protein, 118 aa, Artificial Sequence
  Chemically Synthesized
QVQLQESGGGLVQAGGSLRLSCAASGSIFGRQEMGWYRQAPGKERELVATIAYGGSTYYADSVKGRFTISRDNAKNTVYLQMNSLKPEDTAVYYCAAPGSAYRQHEYWGQGTQVTVSS

SEQ ID NO: 1407 - protein, 122 aa, Artificial Sequence
  Chemically Synthesized
QVQLQESGGGLVQAGGSLRLSCAASGTIFGSGSMGWYRQAPGKERELVASITDGSSTYYADSVKGRFTISRDNAKNTVYLQMNSLKPEDTAVYYCAAVYSSKGEPIYRYVYWGQGTQVTVSS

SEQ ID NO: 1408 - protein, 118 aa, Artificial Sequence
  Chemically Synthesized
QVQLQESGGGLVQAGGSLRLSCAASGSISELHYMGWYRQAPGKEREFVASIGDGTSTNYADSVKGRFTISRDNAKNTVYLQMNSLKPEDTAVYYCAVFGQTSTGHGYWGQGTQVTVSS

SEQ ID NO: 1409 - protein, 118 aa, Artificial Sequence
  Chemically Synthesized
QVQLQESGGGLVQAGGSLRLSCAASGTISVYPAMGWYRQAPGKERELVAGIAQGATTYYADSVKGRFTISRDNAKNTVYLQMNSLKPEDTAVYYCAVYSSYVYKLDYWGQGTQVTVSS

SEQ ID NO: 1410 - protein, 114 aa, Artificial Sequence
  Chemically Synthesized
QVQLQESGGGLVQAGGSLRLSCAASGTISYLYIMGWYRQAPGKEREFVAAIGGGASTYYADSVKGRFTISRDNAKNTVYLQMNSLKPEDTAVYYCAVAQSLRYWGQGTQVTVSS

SEQ ID NO: 1411 - protein, 118 aa, Artificial Sequence
  Chemically Synthesized
QVQLQESGGGLVQAGGSLRLSCAASGTIFQVPRMGWYRQAPGKEREFVASITVGATTYYADSVKGRFTISRDNAKNTVYLQMNSLKPEDTAVYYCAAYIGGDDAFAYWGQGTQVTVSS

SEQ ID NO: 1412 - protein, 118 aa, Artificial Sequence
  Chemically Synthesized
QVQLQESGGGLVQAGGSLRLSCAASGYISRRAFMGWYRQAPGKEREFVAAISTGGSTYYADSVKGRFTISRDNAKNTVYLQMNSLKPEDTAVYYCAVGSRYRRGHDYWGQGTQVTVSS

SEQ ID NO: 1413 - protein, 118 aa, Artificial Sequence
  Chemically Synthesized
QVQLQESGGGLVQAGGSLRLSCAASGSISLIDWMGWYRQAPGKEREFVASITYGSSTYYADSVKGRFTISRDNAKNTVYLQMNSLKPEDTAVYYCAAWVPAVQNLDYWGQGTQVTVSS

SEQ ID NO: 1414 - protein, 118 aa, Artificial Sequence
  Chemically Synthesized
QVQLQESGGGLVQAGGSLRLSCAASGTISYVATMGWYRQAPGKEREFVAAITSGGTTYYADSVKGRFTISRDNAKNTVYLQMNSLKPEDTAVYYCAVTPYVYARFTYWGQGTQVTVSS

SEQ ID NO: 1415 - protein, 118 aa, Artificial Sequence
  Chemically Synthesized
QVQLQESGGGLVQAGGSLRLSCAASGTISKTDTMGWYRQAPGKEREFVATIADGGTTNYADSVKGRFTISRDNAKNTVYLQMNSLKPEDTAVYYCAAWVPAVQNLDYWGQGTQVTVSS

SEQ ID NO: 1416 - protein, 118 aa, Artificial Sequence
  Chemically Synthesized
QVQLQESGGGLVQAGGSLRLSCAASGSISLIDWMGWYRQAPGKEREFVAAITSGGTTYYADSVKGRFTISRDNAKNTVYLQMNSLKPEDTAVYYCAAWVPAVQNLDYWGQGTQVTVSS

SEQ ID NO: 1417 - protein, 118 aa, Artificial Sequence
  Chemically Synthesized
QVQLQESGGGLVQAGGSLRLSCAASGTISYVATMGWYRQAPGKEREFVAAITSGGTTYYADSVKGRFTISRDNAKNTVYLQMNSLKPEDTAVYYCAAIARYPLPFYYWGQGTQVTVSS

SEQ ID NO: 1418 - protein, 118 aa, Artificial Sequence
  Chemically Synthesized
QVQLQESGGGLVQAGGSLRLSCAASGSISLIDWMGWYRQAPGKEREFVASITYGSSTYYADSVKGRFTISRDNAKNTVYLQMNSLKPEDTAVYYCAAWYYLPFPYYYWGQGTQVTVSS

SEQ ID NO: 1419 - protein, 118 aa, Artificial Sequence
  Chemically Synthesized
QVQLQESGGGLVQAGGSLRLSCAASGTIFWRAWMGWYRQAPGKERELVAGISNGGSTYYADSVKGRFTISRDNAKNTVYLQMNSLKPEDTAVYYCAVTPYVYARFTYWGQGTQVTVSS

SEQ ID NO: 1420 - protein, 117 aa, Artificial Sequence
  Chemically Synthesized
QVQLQESGGGLVQAGGSLRLSCAASGTISPDGYMGWYRQAPGKERELVAGISRGSSTYYADSVKGRFTISRDNAKNTVYLQMNSLKPEDTAVYYCAATPRDAFHLYWGQGTQVTVSS

SEQ ID NO: 1421 - protein, 118 aa, Artificial Sequence
  Chemically Synthesized
QVQLQESGGGLVQAGGSLRLSCAASGTIFTVDDMGWYRQAPGKERELVATITDGGNTYYADSVKGRFTISRDNAKNTVYLQMNSLKPEDTAVYYCAAWVPAVQNLDYWGQGTQVTVSS

SEQ ID NO: 1422 - protein, 118 aa, Artificial Sequence
  Chemically Synthesized
QVQLQESGGGLVQAGGSLRLSCAASGTISSRPYMGWYRQAPGKERELVASISGGGSTNYADSVKGRFTISRDNAKNTVYLQMNSLKPEDTAVYYCAVYGDWAVILPYWGQGTQVTVSS

SEQ ID NO: 1423 - protein, 119 aa, Artificial Sequence
  Chemically Synthesized
QVQLQESGGGLVQAGGSLRLSCAASGNISELYVYMGWYRQAPGKERELVATITHGGNTYYADSVKGRFTISRDNAKNTVYLQMNSLKPEDTAVYYCAVYDWFPGAYDYWGQGTQVTVSS

SEQ ID NO: 1424 - protein, 118 aa, Artificial Sequence
  Chemically Synthesized
QVQLQESGGGLVQAGGSLRLSCAASGYISGYSIMGWYRQAPGKEREFVASISQGGITYYADSVKGRFTISRDNAKNTVYLQMNSLKPEDTAVYYCAAVYDPQVRHIYWGQGTQVTVSS

SEQ ID NO: 1425 - protein, 116 aa, Artificial Sequence
  Chemically Synthesized
QVQLQESGGGLVQAGGSLRLSCAASGTIFGGYIMGWYRQAPGKEREFVASITTGTSTYYADSVKGRFTISRDNAKNTVYLQMNSLKPEDTAVYYCAYHVQYPHTYWGQGTQVTVSS

SEQ ID NO: 1426 - protein, 118 aa, Artificial Sequence
  Chemically Synthesized
QVQLQESGGGLVQAGGSLRLSCAASGTIFWRAWMGWYRQAPGKERELVAGISNGGSTYYADSVKGRFTISRDNAKNTVYLQMNSLKPEDTAVYYCAAWVPAVQNLDYWGQGTQVTVSS

SEQ ID NO: 1427 - protein, 118 aa, Artificial Sequence
  Chemically Synthesized
QVQLQESGGGLVQAGGSLRLSCAASGYIFLPQWMGWYRQAPGKEREFVASISGGGTTYYADSVKGRFTISRDNAKNTVYLQMNSLKPEDTAVYYCAVLPTVYDGHLYWGQGTQVTVSS

SEQ ID NO: 1428 - protein, 118 aa, Artificial Sequence
  Chemically Synthesized
QVQLQESGGGLVQAGGSLRLSCAASGNISYTWYMGWYRQAPGKERELVASITTGGSTYYADSVKGRFTISRDNAKNTVYLQMNSLKPEDTAVYYCAVRYVFHGLFDYWGQGTQVTVSS

SEQ ID NO: 1429 - protein, 118 aa, Artificial Sequence
  Chemically Synthesized
QVQLQESGGGLVQAGGSLRLSCAASGTISGGDYMGWYRQAPGKEREFVASIGYGSTTYYADSVKGRFTISRDNAKNTVYLQMNSLKPEDTAVYYCAAALYPQYAHTYWGQGTQVTVSS

SEQ ID NO: 1430 - protein, 118 aa, Artificial Sequence
  Chemically Synthesized
QVQLQESGGGLVQAGGSLRLSCAASGNISYTDGMGWYRQAPGKERELVAGIGRGTSTNYADSVKGRFTISRDNAKNTVYLQMNSLKPEDTAVYYCAVTPYVYARFTYWGQGTQVTVSS

SEQ ID NO: 1431 - protein, 118 aa, Artificial Sequence
  Chemically Synthesized
QVQLQESGGGLVQAGGSLRLSCAASGNISYDAYMGWYRQAPGKEREFVAGISRGGITYYADSVKGRFTISRDNAKNTVYLQMNSLKPEDTAVYYCAAQSDAWSRLLYWGQGTQVTVSS

SEQ ID NO: 1432 - protein, 118 aa, Artificial Sequence
  Chemically Synthesized
QVQLQESGGGLVQAGGSLRLSCAASGNIFAADVMGWYRQAPGKEREFVASIGDGSTTNYADSVKGRFTISRDNAKNTVYLQMNSLKPEDTAVYYCAVSLYPGYYHHYWGQGTQVTVSS

SEQ ID NO: 1433 - protein, 120 aa, Artificial Sequence
  Chemically Synthesized
QVQLQESGGGLVQAGGSLRLSCAASGNISSRDYMGWYRQAPGKERELVAGIDYGSITNYADSVKGRFTISRDNAKNTVYLQMNSLKPEDTAVYYCAAFYGDPAWFYYFYWGQGTQVTVSS

SEQ ID NO: 1434 - protein, 118 aa, Artificial Sequence
  Chemically Synthesized
QVQLQESGGGLVQAGGSLRLSCAASGSISQYDEMGWYRQAPGKERELVAGINAGSSTYYADSVKGRFTISRDNAKNTVYLQMNSLKPEDTAVYYCAASSHTDADYAYWGQGTQVTVSS

SEQ ID NO: 1435 - protein, 117 aa, Artificial Sequence
  Chemically Synthesized
QVQLQESGGGLVQAGGSLRLSCAASGTIFGQWYMGWYRQAPGKERELVAGITTGSNTNYADSVKGRFTISRDNAKNTVYLQMNSLKPEDTAVYYCAVRGDIYIGFYWGQGTQVTVSS

SEQ ID NO: 1436 - protein, 126 aa, Artificial Sequence
  Chemically Synthesized
QVQLQESGGGLVQAGGSLRLSCAASGNISTTVYMGWYRQAPGKEREFVASINTGGSTNYADSVKGRFTISRDNAKNTVYLQMNSLKPEDTAVYYCAVDSLGAYDTPSKDDDYHHYWGQGTQVTVSS

SEQ ID NO: 1437 - protein, 118 aa, Artificial Sequence
  Chemically Synthesized
QVQLQESGGGLVQAGGSLRLSCAASGTIFDAPDMGWYRQAPGKEREFVAAIGYGGNTNYADSVKGRFTISRDNAKNTVYLQMNSLKPEDTAVYYCAAYIFDVRLLGYWGQGTQVTVSS

SEQ ID NO: 1438 - protein, 122 aa, Artificial Sequence
  Chemically Synthesized
QVQLQESGGGLVQAGGSLRLSCAASGTISAYYIMGWYRQAPGKEREFVASISDGASTYYADSVKGRFTISRDNAKNTVYLQMNSLKPEDTAVYYCAAPNRVPDTPNYDFDYWGQGTQVTVSS

SEQ ID NO: 1439 - protein, 122 aa, Artificial Sequence
  Chemically Synthesized
QVQLQESGGGLVQAGGSLRLSCAASGYIFLYRNMGWYRQAPGKERELVATISRGGITYYADSVKGRFTISRDNAKNTVYLQMNSLKPEDTAVYYCAAIRRRASYSGDAYPYWGQGTQVTVSS

SEQ ID NO: 1440 - protein, 118 aa, Artificial Sequence
  Chemically Synthesized
QVQLQESGGGLVQAGGSLRLSCAASGYIFRYSYMGWYRQAPGKEREFVATISYGAITNYADSVKGRFTISRDNAKNTVYLQMNSLKPEDTAVYYCAVTQHRSAPYDYWGQGTQVTVSS

SEQ ID NO: 1441 - protein, 111 aa, Artificial Sequence
  Chemically Synthesized
QVQLQESGGGLVQAGGSLRLSCAASGTIFTWYYMGWYRQAPGKERELVAGIAYGGSTYYADSVKGRFTISRDNAKNTVYLQMNSLKPEDTAVYYCAYHRYWGQGTQVTVSS

SEQ ID NO: 1442 - protein, 118 aa, Artificial Sequence
  Chemically Synthesized
QVQLQESGGGLVQAGGSLRLSCAASGTISDQDGMGWYRQAPGKEREFVAGIGGGSTTYYADSVKGRFTISRDNAKNTVYLQMNSLKPEDTAVYYCAVDSSERYQHFYWGQGTQVTVSS

SEQ ID NO: 1443 - protein, 118 aa, Artificial Sequence
  Chemically Synthesized
QVQLQESGGGLVQAGGSLRLSCAASGTIFVYYWMGWYRQAPGKERELVATIGFGGSTYYADSVKGRFTISRDNAKNTVYLQMNSLKPEDTAVYYCAAPGGDEYDHQYWGQGTQVTVSS

SEQ ID NO: 1444 - protein, 118 aa, Artificial Sequence
  Chemically Synthesized
QVQLQESGGGLVQAGGSLRLSCAASGYIFSVDSMGWYRQAPGKEREFVAAIDSGANTYYADSVKGRFTISRDNAKNTVYLQMNSLKPEDTAVYYCAVYPYRGYDFTYWGQGTQVTVSS

SEQ ID NO: 1445 - protein, 122 aa, Artificial Sequence
  Chemically Synthesized
QVQLQESGGGLVQAGGSLRLSCAASGTIFRHYGMGWYRQAPGKEREFVASIAHCTSTNYADSVKGRFTISRDNAKNTVYLQMNSLKPEDTAVYYCAVSWDGRYALSYVHPYWGQGTQVTVSS

SEQ ID NO: 1446 - protein, 122 aa, Artificial Sequence
  Chemically Synthesized
QVQLQESGGGLVQAGGSLRLSCAASGNIFSLRQMGWYRQAPGKERELVATIAIGTTTNYADSVKGRFTISRDNAKNTVYLQMNSLKPEDTAVYYCAVYDGVPRDDWGYLYYWGQGTQVTVSS

SEQ ID NO: 1447 - protein, 122 aa, Artificial Sequence
  Chemically Synthesized
QVQLQESGGGLVQAGGSLRLSCAASGNISPPEDMGWYRQAPGKEREFVASIDGGSTTNYADSVKGRFTISRDNAKNTVYLQMNSLKPEDTAVYYCAVAAFTGGASASYYPYWGQGTQVTVSS

SEQ ID NO: 1448 - protein, 119 aa, Artificial Sequence
  Chemically Synthesized
QVQLQESGGGLVQAGGSLRLSCAASGNTMGWYRQAPGKEREFVATISDGGNTNYADSVKGRFTISRDNAKNTVYLQMNSLKPEDTAVYYCAVPSSDSQYGFPGTEHGYWGQGTQVTVSS

SEQ ID NO: 1449 - protein, 118 aa, Artificial Sequence
  Chemically Synthesized
QVQLQESGGGLVQAGGSLRLSCAASGTISLDDPMGWYRQAPGKERELLPVLLLVVLPYADSVKGRFTISRDNAKNTVYLQMNSLKPEDTAVYYCAVYGAYDRGDHYYWGQGTQVTVSS

SEQ ID NO: 1450 - protein, 122 aa, Artificial Sequence
  Chemically Synthesized
QVQLQESGGGLVQAGGSLRLSCAASGNIFRPYHMGWYRQAPGKERELVATIGRGSSTNYADSVKGRFTISRDNAKNTVYLQMNSLKPEDTAVYYCAAGVQDVSDVEDYHPYWGQGTQVTVSS

SEQ ID NO: 1451 - protein, 118 aa, Artificial Sequence
  Chemically Synthesized
QVQLQESGGGLVQAGGSLRLSCAASGTISARSVMGWYRQAPGKEREFVATIGDGTITNYADSVKGRFTISRDNAKNTVYLQMNSLKPEDTAVYYCAADVYYLEQFYYWGQGTQVTVSS

SEQ ID NO: 1452 - protein, 118 aa, Artificial Sequence
  Chemically Synthesized
QVQLQESGGGLVQAGGSLRLSCAASGYIFDRYIMGWYRQAPGKERELVAAISSGTNTYYADSVKGRFTISRDNAKNTVYLQMNSLKPEDTAVYYCAVPYSWYYGYAYWGQGTQVTVSS

SEQ ID NO: 1453 - protein, 121 aa, Artificial Sequence
  Chemically Synthesized
QVQLQESGGGLVQAGGSLRLSCAASGTISQGYYMGWYRQAPGKEREFVAAITAGANTNYADSVKGRFTISRDNAKNTVYLQMNSLKPEDTAVYYCAVLVGLTTSRLLVMYWGQGTQVTVSS

SEQ ID NO: 1454 - protein, 126 aa, Artificial Sequence
  Chemically Synthesized
QVQLQESGGGLVQAGGSLRLSCAASGYISAPAIMGWYRQAPGKEREFVATITYGATTNYADSVKGRFTISRDNAKNTVYLQMNSLKPEDTAVYYCAAGDGYPFRTKGATYDPHYYWGQGTQVTVSS

SEQ ID NO: 1455 - protein, 126 aa, Artificial Sequence
  Chemically Synthesized
QVQLQESGGGLVQAGGSLRLSCAASGSISDYWRMGWYRQAPGKERELVAAIDPGSSTNYADSVKGRFTISRDNAKNTVYLQMNSLKPEDTAVYYCAVDYYLQQDWLGYRSSWYGYWGQGTQVTVSS

SEQ ID NO: 1456 - protein, 121 aa, Artificial Sequence
  Chemically Synthesized
QVQLQESGGGLVQAGGSLRLSCAASGNISRYDAMGWYRQAPGKERELVATINSVLLPYADSVKGRFTISRDNAKNTVYLQMNSLKPEDTAVYYCAVIGTVETDWNYYYQYWGQGTQVTVSS

SEQ ID NO: 1457 - protein, 117 aa, Artificial Sequence
  Chemically Synthesized
QVQLQESGGGLVQAGGSLRLSCAASGSIFAYSLMGWYRQAPGKEREFVAAITGGAITYYADSVKGRFTISRDNAKNTVYLQMNSLKPEDTAVYYCAAPYRYTDFEYWGQGTQVTVSS

SEQ ID NO: 1458 - protein, 110 aa, Artificial Sequence
  Chemically Synthesized
QVQLQESGGGLVQAGGSLRLSCAASGSIFRYGVMGWYRQAPGKERELYYQYADSVKGRFTISRDNAKNTVYLQMNSLKPEDTAVYYCAVATIFSTGHRYWGQGTQVTVSS

SEQ ID NO: 1459 - protein, 122 aa, Artificial Sequence
  Chemically Synthesized
QVQLQESGGGLVQAGGSLRLSCAASGNISESFYMGWYRQAPGKEREFVAGIGPGSNTYYADSVKGRFTISRDNAKNTVYLQMNSLKPEDTAVYYCAVQVPLSSYSWQVFTYWGQGTQVTVSS

SEQ ID NO: 1460 - protein, 118 aa, Artificial Sequence
  Chemically Synthesized
QVQLQESGGGLVQAGGSLRLSCAASGNISLHRDMGWYRQAPGKEREFVATIADGGTTYYADSVKGRFTISRDNAKNTVYLQMNSLKPEDTAVYYCAVDTSIRYGHDYWGQGTQVTVSS

SEQ ID NO: 1461 - protein, 120 aa, Artificial Sequence
  Chemically Synthesized
QVQLQESGGGLVQAGGSLRLSCAASGNISQDRAMGWYRQAPGKEREFVATINYGASTNYADSVKGRFTISRDNAKNTVYLQMNSLKPEDTAVYYCAATLSDYYPSRHTYWGQGTQVTVSS

SEQ ID NO: 1462 - protein, 121 aa, Artificial Sequence
  Chemically Synthesized
QVQLQESGGGLVQAGGSLRLSCAASGNISDYTWMGWYRQAPGKEREFVATISPGTTTYADSVKGRFTISRDNAKNTVYLQMNSLKPEDTAVYYCAAVRYEIGAKSWYHDYWGQGTQVTVSS

SEQ ID NO: 1463 - protein, 116 aa, Artificial Sequence
  Chemically Synthesized
QVQLQESGGGLVQAGGSLRLSCAASGTIFQYAMGWYRQAPGKEREFVAAIGGGTNTYYADSVKGRFTISRDNAKNTVYLQMNSLKPEDTAVYYCALTLSVTGSIYWGQGTQVTVSS

SEQ ID NO: 1464 - protein, 116 aa, Artificial Sequence
  Chemically Synthesized
QVQLQESGGGLVQAGGSLRLSCAASGTISYESWMGWYRQAPGKERELVAGINYGSNYADSVKGRFTISRDNAKNTVYLQMNSLKPEDTAVYYCAVYTYTYYSFAYWGQGTQVTVSS

SEQ ID NO: 1465 - protein, 118 aa, Artificial Sequence
  Chemically Synthesized
QVQLQESGGGLVQAGGSLRLSCAASGNISFYEYMGWYRQAPGKERELVAGIGYGGTTNYADSVKGRFTISRDNAKNTVYLQMNSLKPEDTAVYYCAAGHIDTAELWYWGQGTQVTVSS

SEQ ID NO: 1466 - protein, 119 aa, Artificial Sequence
  Chemically Synthesized
QVQLQESGGGLVQAGGSLRLSCAASGNILTLMGWYRQAPGKERELVASINAGTITNYADSVKGRFTISRDNAKNTVYLQMNSLKPEDTAVYYCAARDDSTVICTTTFYWGQGTQVTVSS

SEQ ID NO: 1467 - protein, 126 aa, Artificial Sequence
  Chemically Synthesized
QVQLQESGGGLVQAGGSLRLSCAASGSISLDRDMGWYRQAPGKEREFVAAIDIGSNTYYADSVKGRFTISRDNAKNTVYLQMNSLKPEDTAVYYCAALTPTVLREYGFYVGWFRYWGQGTQVTVSS

SEQ ID NO: 1468 - protein, 117 aa, Artificial Sequence
  Chemically Synthesized
QVQLQESGGGLVQAGGSLRLSCAASGTIFGDGHMGWYRQAPGKERELVPVLVTVVVPYADSVKGRFTISRDNAKNTVYLQMNSLKPEDTAVYYCAAVARVRRRHEYWGQGTQVTVSS

SEQ ID NO: 1469 - protein, 117 aa, Artificial Sequence
  Chemically Synthesized
QVQLQESGGGLVQAGGSLRLSCAASGTISDRLMGWYRQAPGKERELVATIDYGTNTYYADSVKGRFTISRDNAKNTVYLQMNSLKPEDTAVYYCAANYDGYFAFSYWGQGTQVTVSS

SEQ ID NO: 1470 - protein, 126 aa, Artificial Sequence
  Chemically Synthesized
QVQLQESGGGLVQAGGSLRLSCAASGYISPTGRMGWYRQAPGKERELVATIGYGGTTNYADSVKGRFTISRDNAKNTVYLQMNSLKPEDTAVYYCAVYDDGYGVYTPYNYDYFHYWGQGTQVTVSS

SEQ ID NO: 1471 - protein, 122 aa, Artificial Sequence
  Chemically Synthesized
QVQLQESGGGLVQAGGSLRLSCAASGNIFGAADMGWYRQAPGKEREFVAGIAQGGSTYYADSVKGRFTISRDNAKNTVYLQMNSLKPEDTAVYYCAVDDSYTTYVAAYHYYWGQGTQVTVSS

SEQ ID NO: 1472 - protein, 121 aa, Artificial Sequence
  Chemically Synthesized
QVQLQESGGGLVQAGGSLRLSCAASGTISFDGVMGWYRQAPGKERELVASITPGGSTNYADSVKGRFTISRDNAKNTVYLQMNSLKPEDTAVYYCAVARSDYIYPYHTFYWGQGTQVTVSS

SEQ ID NO: 1473 - protein, 117 aa, Artificial Sequence
  Chemically Synthesized
QVQLQESGGGLVQAGGSLRLSCAASGTIFFTAGMGWYRQAPGKERELVAGISWGTSTNYADSVKGRFTISRDNAKNTVYLQMNSLKPEDTAVYYCALVLKVSGLIYWGQGTQVTVSS

SEQ ID NO: 1474 - protein, 118 aa, Artificial Sequence
  Chemically Synthesized
QVQLQESGGGLVQAGGSLRLSCAASGNISDDLYMGWYRQAPGKERELVAAIDIGAITYYADSVKGRFTISRDNAKNTVYLQMNSLKPEDTAVYYCAAVWVTNGPFDYWGQGTQVTVSS

SEQ ID NO: 1475 - protein, 122 aa, Artificial Sequence
  Chemically Synthesized
QVQLQESGGGLVQAGGSLRLSCAASGSISYREYMGWYRQAPGKEREFVAAIGDGANTYYADSVKGRFTISRDNAKNTVYLQMNSLKPEDTAVYYCAAGWLYFKFDSGSHYYWGQGTQVTVSS

SEQ ID NO: 1476 - protein, 118 aa, Artificial Sequence
  Chemically Synthesized
QVQLQESGGGLVQAGGSLRLSCAASGTIFGPAAMGWYRQAPGKEREFVASIDDGTITNYADSVKGRFTISRDNAKNTVYLQMNSLKPEDTAVYYCAVQYYYPDDLPYWGQGTQVTVSS

SEQ ID NO: 1477 - protein, 117 aa, Artificial Sequence
  Chemically Synthesized
QVQLQESGGGLVQAGGSLRLSCAASGTISEAAYMGWYRQAPGKERELVATILVVVVPYADSVKGRFTISRDNAKNTVYLQMNSLKPEDTAVYYCAADVPYTLRLAYWGQGTQVTVSS

SEQ ID NO: 1478 - protein, 118 aa, Artificial Sequence
  Chemically Synthesized
QVQLQESGGGLVQAGGSLRLSCAASGSISFYYRMGWYRQAPGKERELVAAIDYGGNTNYADSVKGRFTISRDNAKNTVYLQMNSLKPEDTAVYYCAVDYPQYAGHRYWGQGTQVTVSS

SEQ ID NO: 1479 - protein, 117 aa, Artificial Sequence
  Chemically Synthesized
QVQLQESGGGLVQAGGSLRLSCAASGSISAFPIMGWYRQAPGKERELVAAISFGTNTYYADSVKGRFTISRDNAKNTVYLQMNSLKPEDTAVYYCAADYTAYSTMYWGQGTQVTVSS

SEQ ID NO: 1480 - protein, 118 aa, Artificial Sequence
  Chemically Synthesized
QVQLQESGGGLVQAGGSLRLSCAASGSIFYPVYMGWYRQAPGKEREFVATIGTGGSTYYADSVKGRFTISRDNAKNTVYLQMNSLKPEDTAVYYCAAHVRGTPPFDYWGQGTQVTVSS

SEQ ID NO: 1481 - protein, 118 aa, Artificial Sequence
  Chemically Synthesized
QVQLQESGGGLVQAGGSLRLSCAASGSIFVDISMGWYRQAPGKERELVASISQGGITNYADSVKGRFTISRDNAKNTVYLQMNSLKPEDTAVYYCAARTADFRGHTYWGQGTQVTVSS

SEQ ID NO: 1482 - protein, 117 aa, Artificial Sequence
  Chemically Synthesized
QVQLQESGGGLVQAGGSLRLSCAASGYFWSALMGWYRQAPGKEREFVATITYGTNTNYADSVKGRFTISRDNAKNTVYLQMNSLKPEDTAVYYCAVGVDAWSHHGYWGQGTQVTVSS

SEQ ID NO: 1483 - protein, 116 aa, Artificial Sequence
  Chemically Synthesized
QVQLQESGGGLVQAGGSLRLSCAASGYISSGPGMGWYRQAPGKERELVASISYGATTYYADSVKGRFTISRDNAKNTVYLQMNSLKPEDTAVYYCAAGPLDNFGYWGQGTQVTVSS

SEQ ID NO: 1484 - protein, 118 aa, Artificial Sequence
  Chemically Synthesized
QVQLQESGGGLVQAGGSLRLSCAASGNIFRYASMGWYRQAPGKERELVAAIGYGGSTYYADSVKGRFTISRDNAKNTVYLQMNSLKPEDTAVYYCAAYDVQDYPHEYWGQGTQVTVSS

SEQ ID NO: 1485 - protein, 122 aa, Artificial Sequence
  Chemically Synthesized
QVQLQESGGGLVQAGGSLRLSCAASGTISYATYMGWYRQAPGKEREFVASISRGTITYYADSVKGRFTISRDNAKNTVYLQMNSLKPEDTAVYYCAVVQAFGDLRYFRHGYWGQGTQVTVSS

SEQ ID NO: 1486 - protein, 118 aa, Artificial Sequence
  Chemically Synthesized
QVQLQESGGGLVQAGGSLRLSCAASGTISNTYAMGWYRQAPGKERELVATIGTGAITYYADSVKGRFTISRDNAKNTVYLQMNSLKPEDTAVYYCAVDNRRRPQFYYWGQGTQVTVSS

SEQ ID NO: 1487 - protein, 124 aa, Artificial Sequence
  Chemically Synthesized
QVQLQESGGGLVQAGGSLRLSCAASGTISNYAMGWYRQAPGKERELVATIDSGGITYYADSVKGRFTISRDNAKNTVYLQMNSLKPEDTAVYYCAAGYRIDRYNLYNFYDFGYWGQGTQVTVSS

SEQ ID NO: 1488 - protein, 120 aa, Artificial Sequence
  Chemically Synthesized
QVQLQESGGGLVQAGGSLRLSCAASGTIFGPYKMGWYRQAPGKERELSLLMLVLLPYADSVKGRFTISRDNAKNTVYLQMNSLKPEDTAVYYCAVVYADRAWRDGDHPYWGQGTQVTVSS

SEQ ID NO: 1489 - protein, 122 aa, Artificial Sequence
  Chemically Synthesized
QVQLQESGGGLVQAGGSLRLSCAASGTISGEYYMGWYRQAPGKEREFVAAITVGGTTYYADSVKGRFTISRDNAKNTVYLQMNSLKPEDTAVYYCAVQETALKDYGTDYAYWGQGTQVTVSS

SEQ ID NO: 1490 - protein, 117 aa, Artificial Sequence
  Chemically Synthesized
QVQLQESGGGLVQAGGSLRLSCAASGYISRSQWMGWYRQAPGKERELLPVLISVLVPYADSVKGRFTISRDNAKNTVYLQMNSLKPEDTAVYYCAAYELEDHSHFYWGQGTQVTVSS

SEQ ID NO: 1491 - protein, 117 aa, Artificial Sequence
  Chemically Synthesized
QVQLQESGGGLVQAGGSLRLSCAASGNISFASYMGWYRQAPGKEREFVAGIDEVLVPYADSVKGRFTISRDNAKNTVYLQMNSLKPEDTAVYYCAAGDGWADSHLYWGQGTQVTVSS

SEQ ID NO: 1492 - protein, 118 aa, Artificial Sequence
  Chemically Synthesized
QVQLQESGGGLVQAGGSLRLSCAASGTISGYYYMGWYRQAPGKERELVAGIGSGSTTNYADSVKGRFTISRDNAKNTVYLQMNSLKPEDTAVYYCAVDDLPHWGLDYWGQGTQVTVSS

SEQ ID NO: 1493 - protein, 120 aa, Artificial Sequence
  Chemically Synthesized
QVQLQESGGGLVQAGGSLRLSCAASGSIFDAKVMGWYRQAPGKERELVATITYGGSTYYADSVKGRFTISRDNAKNTVYLQMNSLKPEDTAVYYCAAVTNADYIHPHEYWGQGTQVTVSS

SEQ ID NO: 1494 - protein, 121 aa, Artificial Sequence
  Chemically Synthesized
QVQLQESGGGLVQAGGSLRLSCAASGTIFTYPVMGWYRQAPGKERELVASINDGTNTNYADSVKGRFTISRDNAKNTVYLQMNSLKPEDTAVYYCAVYDPYADAVDVTLYWGQGTQVTVSS

SEQ ID NO: 1495 - protein, 121 aa, Artificial Sequence
  Chemically Synthesized
QVQLQESGGGLVQAGGSLRLSCAASGYIFLGYMGWYRQAPGKERELVAGIAGGTSTYYADSVKGRFTISRDNAKNTVYLQMNSLKPEDTAVYYCAVDFGPYTTWGRGFDYWGQGTQVTVSS

SEQ ID NO: 1496 - protein, 118 aa, Artificial Sequence
  Chemically Synthesized
QVQLQESGGGLVQAGGSLRLSCAASGTISYRLHMGWYRQAPGKERELVAAIAYGTTTNYADSVKGRFTISRDNAKNTVYLQMNSLKPEDTAVYYCAVSRHYSRRHLYWGQGTQVTVSS

SEQ ID NO: 1497 - protein, 121 aa, Artificial Sequence
  Chemically Synthesized
QVQLQESGGGLVQAGGSLRLSCAASGTISLGYTMGWYRQAPGKERELVATITEVVLPYADSVKGRFTISRDNAKNTVYLQMNSLKPEDTAVYYCAVFDPVYIGPYYDLDYWGQGTQVTVSS

SEQ ID NO: 1498 - protein, 126 aa, Artificial Sequence
  Chemically Synthesized
QVQLQESGGGLVQAGGSLRLSCAASGTIFWPDYMGWYRQAPGKEREFVAAIADGTTTYYADSVKGRFTISRDNAKNTVYLQMNSLKPEDTAVYYCAADARSHLYEYLHYYFIFSYWGQGTQVTVSS

SEQ ID NO: 1499 - protein, 122 aa, Artificial Sequence
  Chemically Synthesized
QVQLQESGGGLVQAGGSLRLSCAASGNISVSRFMGWYRQAPGKERELVASISYGTTTNYADSVKGRFTISRDNAKNTVYLQMNSLKPEDTAVYYCAAEPFDDPPRDPPHGYWGQGTQVTVSS

SEQ ID NO: 1500 - protein, 118 aa, Artificial Sequence
  Chemically Synthesized
QVQLQESGGGLVQAGGSLRLSCAASGTIFRRDGMGWYRQAPGKERELVATIGEGGITYYADSVKGRFTISRDNAKNTVYLQMNSLKPEDTAVYYCAAYTRGSNHLSYWGQGTQVTVSS

SEQ ID NO: 1501 - protein, 117 aa, Artificial Sequence
  Chemically Synthesized
QVQLQESGGGLVQAGGSLRLSCAASGTIFIASYMGWYRQAPGKERELVAGIDAGSTTNYADSVKGRFTISRDNAKNTVYLQMNSLKPEDTAVYYCAVLLAFSTCMYWGQGTQVTVSS

SEQ ID NO: 1502 - protein, 122 aa, Artificial Sequence
  Chemically Synthesized
QVQLQESGGGLVQAGGSLRLSCAASGNIFPGTYMGWYRQAPGKEREFVAAIATGGITYYADSVKGRFTISRDNAKNTVYLQMNSLKPEDTAVYYCAAYVDYPDLYADLYAYWGQGTQVTVSS

SEQ ID NO: 1503 - protein, 114 aa, Artificial Sequence
  Chemically Synthesized
QVQLQESGGGLVQAGGSLRLSCAASGCLVMGWYRQAPGKEREFVASIDPGSITYYADSVKGRFTISRDNAKNTVYLQMNSLKPEDTAVYYCAARGIDNSVHRYWGQGTQVTVSS

SEQ ID NO: 1504 - protein, 114 aa, Artificial Sequence
  Chemically Synthesized
QVQLQESGGGLVQAGGSLRLSCAASGNISIASVMGWYRQAPGKERELVAAIAGGSTTNYADSVKGRFTISRDNAKNTVYLQMNSLKPEDTAVYYCAVDYAFYYWGQGTQVTVSS

SEQ ID NO: 1505 - protein, 120 aa, Artificial Sequence
  Chemically Synthesized
QVQLQESGGGLVQAGGSLRLSCAASGSIFYTYMGWYRQAPGKEREFVASISNGTITNYADSVKGRFTISRDNAKNTVYLQMNSLKPEDTAVYYCAANVTDVQKDTYFVYWGQGTQVTVSS

SEQ ID NO: 1506 - protein, 117 aa, Artificial Sequence
  Chemically Synthesized
QVQLQESGGGLVQAGGSLRLSCAASGSIFSDYIMGWYRQAPGKEREFVATIDHGTTTNYADSVKGRFTISRDNAKNTVYLQMNSLKPEDTAVYYCAVLLTLTNVIYWGQGTQVTVSS

SEQ ID NO: 1507 - protein, 110 aa, Artificial Sequence
  Chemically Synthesized
QVQLQESGGGLVQAGGSLRLSCAASGTISLGTQMGWYRQAPGKEREFVAGINDGANTNYADSVKGRFTISRDNAKNTVYLQMNSLKPEDTAVYYCAYYYWGQGTQVTVSS

SEQ ID NO: 1508 - protein, 126 aa, Artificial Sequence
  Chemically Synthesized
QVQLQESGGGLVQAGGSLRLSCAASGTISYIRTMGWYRQAPGKEREFVASINLGGTTYYADSVKGRFTISRDNAKNTVYLQMNSLKPEDTAVYYCAAREFDALIPQYHYPYDYTYWGQGTQVTVSS

SEQ ID NO: 1509 - protein, 122 aa, Artificial Sequence
  Chemically Synthesized
QVQLQESGGGLVQAGGSLRLSCAASGYISRRVRMGWYRQAPGKERELVASITSGTTTNYADSVKGRFTISRDNAKNTVYLQMNSLKPEDTAVYYCAARAYLVGYTQVPHLYWGQGTQVTVSS

SEQ ID NO: 1510 - protein, 118 aa, Artificial Sequence
  Chemically Synthesized
QVQLQESGGGLVQAGGSLRLSCAASGTIFYATHMGWYRQAPGKERELVATIDDGASTNYADSVKGRFTISRDNAKNTVYLQMNSLKPEDTAVYYCAVTYSYDDAHYYWGQGTQVTVSS

SEQ ID NO: 1511 - protein, 118 aa, Artificial Sequence
  Chemically Synthesized
QVQLQESGGGLVQAGGSLRLSCAASGTISGILQMGWYRQAPGKEREFVATIAGGTITNYADSVKGRFTISRDNAKNTVYLQMNSLKPEDTAVYYCAVATNVGVQYVYWGQGTQVTVSS

SEQ ID NO: 1512 - protein, 117 aa, Artificial Sequence
  Chemically Synthesized
QVQLQESGGGLVQAGGSLRLSCAASGNIFYYQDMGWYRQAPGKERELVAGIDYGASTNYADSVKGRFTISRDNAKNTVYLQMNSLKPEDTAVYYCAVVQYYSTRIYWGQGTQVTVSS

SEQ ID NO: 1513 - protein, 122 aa, Artificial Sequence
  Chemically Synthesized
QVQLQESGGGLVQAGGSLRLSCAASGYIFDSTGMGWYRQAPGKERELVASIDHGGITNYADSVKGRFTISRDNAKNTVYLQMNSLKPEDTAVYYCAVVSGPLIYGGPHLNYWGQGTQVTVSS

SEQ ID NO: 1514 - protein, 120 aa, Artificial Sequence
  Chemically Synthesized
QVQLQESGGGLVQAGGSLRLSCAASGTILLTTMGWYRQAPGKEREFVPLLIWVVIPYADSVKGRFTISRDNAKNTVYLQMNSLKPEDTAVYYCAADGKPGVDYVAIILYWGQGTQVTVSS

SEQ ID NO: 1515 - protein, 122 aa, Artificial Sequence
  Chemically Synthesized
QVQLQESGGGLVQAGGSLRLSCAASGTISGVYLMGWYRQAPGKERELVAGIGYGGNTNYADSVKGRFTISRDNAKNTVYLQMNSLKPEDTAVYYCAAHDDDANHYYDIYWYWGQGTQVTVSS

SEQ ID NO: 1516 - protein, 118 aa, Artificial Sequence
  Chemically Synthesized
QVQLQESGGGLVQAGGSLRLSCAASGYISYDDQMGWYRQAPGKERELVATIDDGSITYYADSVKGRFTISRDNAKNTVYLQMNSLKPEDTAVYYCAVRVVLTYILIYWGQGTQVTVSS

SEQ ID NO: 1517 - protein, 118 aa, Artificial Sequence
  Chemically Synthesized
QVQLQESGGGLVQAGGSLRLSCAASGYISPFFTMGWYRQAPGKERELVATITAGGITYYADSVKGRFTISRDNAKNTVYLQMNSLKPEDTAVYYCAASDHYSNYHWYWGQGTQVTVSS

SEQ ID NO: 1518 - protein, 126 aa, Artificial Sequence
  Chemically Synthesized
QVQLQESGGGLVQAGGSLRLSCAASGYIFDRVYMGWYRQAPGKERELVAAIAYGSTTNYADSVKGRFTISRDNAKNTVYLQMNSLKPEDTAVYYCAVAGQWFLEYYYLRPDRYYYWGQGTQVTVSS

SEQ ID NO: 1519 - protein, 115 aa, Artificial Sequence
  Chemically Synthesized
QVQLQESGGGLVQAGGSLRLSCAASGYIFRFNAMGWYRQAPGKERELVAAITYGGSTYYADSVKGRFTISRDNAKNTVYLQMNSLKPEDTAVYYCAAGYDNHLYWGQGTQVTVSS

SEQ ID NO: 1520 - protein, 122 aa, Artificial Sequence
  Chemically Synthesized
QVQLQESGGGLVQAGGSLRLSCAASGTISDDFVMGWYRQAPGKERELVAAIAYGTITNYADSVKGRFTISRDNAKNTVYLQMNSLKPEDTAVYYCAVLQYTYYYGGAGHVYWGQGTQVTVSS

SEQ ID NO: 1521 - protein, 118 aa, Artificial Sequence
  Chemically Synthesized
QVQLQESGGGLVQAGGSLRLSCAASGYISWYVTMGWYRQAPGKERELVASITRGTITYYADSVKGRFTISRDNAKNTVYLQMNSLKPEDTAVYYCAAYRSWLHYFPYWGQGTQVTVSS

SEQ ID NO: 1522 - protein, 118 aa, Artificial Sequence
  Chemically Synthesized
QVQLQESGGGLVQAGGSLRLSCAASGSIFQIPLMGWYRQAPGKERELVASIGRGASTNYADSVKGRFTISRDNAKNTVYLQMNSLKPEDTAVYYCAVYGYFSRRLRYWGQGTQVTVSS

SEQ ID NO: 1523 - protein, 109 aa, Artificial Sequence
  Chemically Synthesized
QVQLQESGGGLVQAGGSLRLSCAASGTISFGPYMGWYRQAPGKEREFVAAISIGSSTNYADSVKGRFTISRDNAKNTVYLQMNSLKPEDTAVYYCADYWGQGTQVTVSS

SEQ ID NO: 1524 - protein, 118 aa, Artificial Sequence
  Chemically Synthesized
QVQLQESGGGLVQAGGSLRLSCAASGYIFTYPSMGWYRQAPGKERELVATITVGTTTYYADSVKGRFTISRDNAKNTVYLQMNSLKPEDTAVYYCAASGYDYGRLYYWGQGTQVTVSS

SEQ ID NO: 1525 - protein, 118 aa, Artificial Sequence
  Chemically Synthesized
QVQLQESGGGLVQAGGSLRLSCAASGTIFIKTPMGWYRQAPGKEREFVAGIGLGASTYYADSVKGRFTISRDNAKNTVYLQMNSLKPEDTAVYYCAVYPYITYGHYYWGQGTQVTVSS

SEQ ID NO: 1526 - protein, 118 aa, Artificial Sequence
  Chemically Synthesized
QVQLQESGGGLVQAGGSLRLSCAASGTISYAYDMGWYRQAPGKERELVASINPGGTTNYADSVKGRFTISRDNAKNTVYLQMNSLKPEDTAVYYCAAITYYVYGFNYWGQGTQVTVSS

SEQ ID NO: 1527 - protein, 118 aa, Artificial Sequence
  Chemically Synthesized
QVQLQESGGGLVQAGGSLRLSCAASGYISLIYNMGWYRQAPGKERELVASISLGGTTNYADSVKGRFTISRDNAKNTVYLQMNSLKPEDTAVYYCAVQYWATSAHDYWGQGTQVTVSS

SEQ ID NO: 1528 - protein, 118 aa, Artificial Sequence
  Chemically Synthesized
QVQLQESGGGLVQAGGSLRLSCAASGYIFGLFSMGWYRQAPGKEREFVASIGGGATTNYADSVKGRFTISRDNAKNTVYLQMNSLKPEDTAVYYCAARPPVNGGHRYWGQGTQVTVSS

SEQ ID NO: 1529 - protein, 120 aa, Artificial Sequence
  Chemically Synthesized
QVQLQESGGGLVQAGGSLRLSCAASGTIFYTLYMGWYRQAPGKERELVAYYLYADSVKGRFTISRDNAKNTVYLQMNSLKPEDTAVYYCAAYRRVKPSSYPSVDHLYYYWGQGTQVTVSS

SEQ ID NO: 1530 - protein, 118 aa, Artificial Sequence
  Chemically Synthesized
QVQLQESGGGLVQAGGSLRLSCAASGTISYSDVMGWYRQAPGKEREFVATIALGSTTYYADSVKGRFTISRDNAKNTVYLQMNSLKPEDTAVYYCAVGPVPLADYNYWGQGTQVTVSS

SEQ ID NO: 1531 - protein, 126 aa, Artificial Sequence
  Chemically Synthesized
QVQLQESGGGLVQAGGSLRLSCAASGSIFGIRLMGWYRQAPGKEREFVASITYGGTTNYADSVKGRFTISRDNAKNTVYLQMNSLKPEDTAVYYCAVFVDDQGYVPYDTGYPHTYWGQGTQVTVSS

SEQ ID NO: 1532 - protein, 117 aa, Artificial Sequence
  Chemically Synthesized
QVQLQESGGGLVQAGGSLRLSCAASGNISHSDDMGWYRQAPGKERELVAGITSGTSTNYADSVKGRFTISRDNAKNTVYLQMNSLKPEDTAVYYCAAQSLTKLSMYWGQGTQVTVSS

SEQ ID NO: 1533 - protein, 117 aa, Artificial Sequence
  Chemically Synthesized
QVQLQESGGGLVQAGGSLRLSCAASGNISTSTMGWYRQAPGKERELVAGIDSGSSTYYADSVKGRFTISRDNAKNTVYLQMNSLKPEDTAVYYCAVDDTDNVWLWYWGQGTQVTVSS

SEQ ID NO: 1534 - protein, 122 aa, Artificial Sequence
  Chemically Synthesized
QVQLQESGGGLVQAGGSLRLSCAASGYISDRAYMGWYRQAPGKEREFVAAIGSGSNTYYADSVKGRFTISRDNAKNTVYLQMNSLKPEDTAVYYCAARKWKVRYGANYLTYWGQGTQVTVSS

SEQ ID NO: 1535 - protein, 122 aa, Artificial Sequence
  Chemically Synthesized
QVQLQESGGGLVQAGGSLRLSCAASGSISPYLRMGWYRQAPGKERELVAGIDAGGTTYYADSVKGRFTISRDNAKNTVYLQMNSLKPEDTAVYYCAAIYDTYADNVDSFLYWGQGTQVTVSS

SEQ ID NO: 1536 - protein, 118 aa, Artificial Sequence
  Chemically Synthesized
QVQLQESGGGLVQAGGSLRLSCAASGNIFYVFAMGWYRQAPGKEREFVAGIDDGSSTNYADSVKGRFTISRDNAKNTVYLQMNSLKPEDTAVYYCAAYNDYIVILYYWGQGTQVTVSS

SEQ ID NO: 1537 - protein, 118 aa, Artificial Sequence
  Chemically Synthesized
QVQLQESGGGLVQAGGSLRLSCAASGNIFPDGDMGWYRQAPGKEREFVATIDSGTSTNYADSVKGRFTISRDNAKNTVYLQMNSLKPEDTAVYYCAVATAYRYAHRYWGQGTQVTVSS

SEQ ID NO: 1538 - protein, 124 aa, Artificial Sequence
  Chemically Synthesized
QVQLQESGGGLVQAGGSLRLSCAASGNIFAVAYMGWYRQAPGKERELVAGIAVGGSTNYADSVKGRFTISRDNAKNTVYLQMNSLKPEDTAVYYCAVSLRDEIDYDGVRNYGYWGQGTQVTVSS

SEQ ID NO: 1539 - protein, 118 aa, Artificial Sequence
  Chemically Synthesized
QVQLQESGGGLVQAGGSLRLSCAASGTISYSYEMGWYRQAPGKERELVAAITQGTSTNYADSVKGRFTISRDNAKNTVYLQMNSLKPEDTAVYYCAAYDYAYDTYWYWGQGTQVTVSS

SEQ ID NO: 1540 - protein, 117 aa, Artificial Sequence
  Chemically Synthesized
QVQLQESGGGLVQAGGSLRLSCAASGNIFLTYFMGWYRQAPGKERELVASISGGSSTNYADSVKGRFTISRDNAKNTVYLQMNSLKPEDTAVYYCAAYTYSTTTMYWGQGTQVTVSS

SEQ ID NO: 1541 - protein, 126 aa, Artificial Sequence
  Chemically Synthesized
QVQLQESGGGLVQAGGSLRLSCAASGTIFDDYPMGWYRQAPGKERELVATIAYGGSTYYADSVKGRFTISRDNAKNTVYLQMNSLKPEDTAVYYCAVLTSFHASRDLDWHVVYVYWGQGTQVTVSS

SEQ ID NO: 1542 - protein, 118 aa, Artificial Sequence
  Chemically Synthesized
QVQLQESGGGLVQAGGSLRLSCAASGSIFIWGTMGWYRQAPGKEREFVATIGHGATTYYADSVKGRFTISRDNAKNTVYLQMNSLKPEDTAVYYCAAPSRYYSRFVYWGQGTQVTVSS

SEQ ID NO: 1543 - protein, 118 aa, Artificial Sequence
  Chemically Synthesized
QVQLQESGGGLVQAGGSLRLSCAASGYISQYWYMGWYRQAPGKERELVASISFGSITNYADSVKGRFTISRDNAKNTVYLQMNSLKPEDTAVYYCAVTSDDFDLFVYWGQGTQVTVSS

SEQ ID NO: 1544 - protein, 109 aa, Artificial Sequence
  Chemically Synthesized
QVQLQESGGGLVQAGGSLRLSCAASGYISDVFMGWYRQAPGKEREFVATISKGSITNYADSVKGRFTISRDNAKNTVYLQMNSLKPEDTAVYYCAYYYWGQGTQVTVSS

SEQ ID NO: 1545 - protein, 118 aa, Artificial Sequence
  Chemically Synthesized
QVQLQESGGGLVQAGGSLRLSCAASGNISLGGYMGWYRQAPGKEREFVAGIAIGGSTNYADSVKGRFTISRDNAKNTVYLQMNSLKPEDTAVYYCAVLYIFRSYYDYWGQGTQVTVSS

SEQ ID NO: 1546 - protein, 115 aa, Artificial Sequence
  Chemically Synthesized
QVQLQESGGGLVQAGGSLRLSCAASGTISGTVRMGWYRQAPGKEREFVAIRVVHQYADSVKGRFTISRDNAKNTVYLQMNSLKPEDTAVYYCAAGYRIYYNYVYWGQGTQVTVSS

SEQ ID NO: 1547 - protein, 113 aa, Artificial Sequence
  Chemically Synthesized
QVQLQESGGGLVQAGGSLRLSCAASGTISDVYMGWYRQAPGKERELVATIAGGGTTNYADSVKGRFTISRDNAKNTVYLQMNSLKPEDTAVYYCAVDDSYSYWGQGTQVTVSS

SEQ ID NO: 1548 - protein, 121 aa, Artificial Sequence
  Chemically Synthesized
QVQLQESGGGLVQAGGSLRLSCAASGTIFYYYIMGWYRQAPGKERELVAGIDSVLLPYADSVKGRFTISRDNAKNTVYLQMNSLKPEDTAVYYCAVGYIDFVAPLIEHYYWGQGTQVTVSS

SEQ ID NO: 1549 - protein, 118 aa, Artificial Sequence
  Chemically Synthesized
QVQLQESGGGLVQAGGSLRLSCAASGNIFDGNAMGWYRQAPGKERELVAAISDGTSTYYADSVKGRFTISRDNAKNTVYLQMNSLKPEDTAVYYCAANGEDVLGLQYWGQGTQVTVSS

SEQ ID NO: 1550 - protein, 126 aa, Artificial Sequence
  Chemically Synthesized
QVQLQESGGGLVQAGGSLRLSCAASGYIFPSVSMGWYRQAPGKEREFVAAINYGGSTYYADSVKGRFTISRDNAKNTVYLQMNSLKPEDTAVYYCAVPQRFWLLYYWGGDHSHYYWGQGTQVTVSS

SEQ ID NO: 1551 - protein, 122 aa, Artificial Sequence
  Chemically Synthesized
QVQLQESGGGLVQAGGSLRLSCAASGNIFGYPYMGWYRQAPGKEREFVAGIAEGGSTYYADSVKGRFTISRDNAKNTVYLQMNSLKPEDTAVYYCAVSGDGIWYISDYFDYWGQGTQVTVSS

SEQ ID NO: 1552 - protein, 114 aa, Artificial Sequence
  Chemically Synthesized
QVQLQESGGGLVQAGGSLRLSCAASGYISEQPSMGWYRQAPGKERELVASITTGPYADSVKGRFTISRDNAKNTVYLQMNSLKPEDTAVYYCAAYRFFGTHQYWGQGTQVTVSS

SEQ ID NO: 1553 - protein, 126 aa, Artificial Sequence
  Chemically Synthesized
QVQLQESGGGLVQAGGSLRLSCAASGTISFAYSMGWYRQAPGKEREFVAGIARGATTYYADSVKGRFTISRDNAKNTVYLQMNSLKPEDTAVYYCAAAALDWYVVDNGIHPGHYYWGQGTQVTVSS

SEQ ID NO: 1554 - protein, 118 aa, Artificial Sequence
  Chemically Synthesized
QVQLQESGGGLVQAGGSLRLSCAASGNIFDYPLMGWYRQAPGKEREFVAAITDGTITNYADSVKGRFTISRDNAKNTVYLQMNSLKPEDTAVYYCAAVTYQEDYLTYWGQGTQVTVSS

SEQ ID NO: 1555 - protein, 125 aa, Artificial Sequence
  Chemically Synthesized
QVQLQESGGGLVQAGGSLRLSCAASGNISEHAPMGWYRQAPGKERELVAAINGGTTTNYADSVKGRFTISRDNAKNTVYLQMNSLKPEDTAVYYCAVVYGSDYNDYAPSDTHYYWGQGTQVTVSS

SEQ ID NO: 1556 - protein, 118 aa, Artificial Sequence
  Chemically Synthesized
QVQLQESGGGLVQAGGSLRLSCAASGTISRITAMGWYRQAPGKEREFVASITRGASTYYADSVKGRFTISRDNAKNTVYLQMNSLKPEDTAVYYCAAYARWYYAHKYWGQGTQVTVSS

SEQ ID NO: 1557 - protein, 122 aa, Artificial Sequence
  Chemically Synthesized
QVQLQESGGGLVQAGGSLRLSCAASGYISPTYEMGWYRQAPGKEREFVATINAGTNTNYADSVKGRFTISRDNAKNTVYLQMNSLKPEDTAVYYCAADYPRSGDPYRRHGYWGQGTQVTVSS

SEQ ID NO: 1558 - protein, 118 aa, Artificial Sequence
  Chemically Synthesized
QVQLQESGGGLVQAGGSLRLSCAASGTIFDRPAMGWYRQAPGKERELVAAIGFGASTNYADSVKGRFTISRDNAKNTVYLQMNSLKPEDTAVYYCAVTWTDSYLYYYWGQGTQVTVSS

SEQ ID NO: 1559 - protein, 118 aa, Artificial Sequence
  Chemically Synthesized
QVQLQESGGGLVQAGGSLRLSCAASGNISSDHYMGWYRQAPGKEREFVAAIDPGTITNYADSVKGRFTISRDNAKNTVYLQMNSLKPEDTAVYYCAVRDNYQVQHTYWGQGTQVTVSS

SEQ ID NO: 1560 - protein, 116 aa, Artificial Sequence
  Chemically Synthesized
QVQLQESGGGLVQAGGSLRLSCAASGNISYPTSMGWYRQAPGKEREFVASITWGGITYYADSVKGRFTISRDNAKNTVYLQMNSLKPEDTAVYYCAVHYSQIHSYWGQGTQVTVSS

SEQ ID NO: 1561 - protein, 126 aa, Artificial Sequence
  Chemically Synthesized
QVQLQESGGGLVQAGGSLRLSCAASGYISDLFLMGWYRQAPGKERELVAGIGHGTSTYYADSVKGRFTISRDNAKNTVYLQMNSLKPEDTAVYYCAVGTGVADYYSWDYSDTHDYWGQGTQVTVSS

SEQ ID NO: 1562 - protein, 125 aa, Artificial Sequence
  Chemically Synthesized
QVQLQESGGGLVQAGGSLRLSCAASGNISDASAMGWYRQAPGKEREFVASIAGGANTNYADSVKGRFTISRDNAKNTVYLQMNSLKPEDTAVYYCAVITAYCCFLRRFCSVPWYWGQGTQVTVSS

SEQ ID NO: 1563 - protein, 123 aa, Artificial Sequence
  Chemically Synthesized
QVQLQESGGGLVQAGGSLRLSCAASGTISQRTSMGWYRQAPGKERELVASINVGANTNYADSVKGRFTISRDNAKNTVYLQMNSLKPEDTAVYYCAAPDHPIVDGYTALLDYWGQGTQVTVSS

SEQ ID NO: 1564 - protein, 118 aa, Artificial Sequence
  Chemically Synthesized
QVQLQESGGGLVQAGGSLRLSCAASGTISPSYGMGWYRQAPGKERELVASINDGSITNYADSVKGRFTISRDNAKNTVYLQMNSLKPEDTAVYYCAVTYYDGQASCYWGQGTQVTVSS

SEQ ID NO: 1565 - protein, 126 aa, Artificial Sequence
  Chemically Synthesized
QVQLQESGGGLVQAGGSLRLSCAASGTISITTNMGWYRQAPGKERELVAGIARGAITNYADSVKGRFTISRDNAKNTVYLQMNSLKPEDTAVYYCAAIAGQQWILDHPLDGILEYWGQGTQVTVSS

SEQ ID NO: 1566 - protein, 116 aa, Artificial Sequence
  Chemically Synthesized
QVQLQESGGGLVQAGGSLRLSCAASGNISSVETMGWYRQAPGKEREFVAGINYGSTTNYADSVKGRFTISRDNAKNTVYLQMNSLKPEDTAVYYCAVHDPDFYYYWGQGTQVTVSS

SEQ ID NO: 1567 - protein, 122 aa, Artificial Sequence
  Chemically Synthesized
QVQLQESGGGLVQAGGSLRLSCAASGTIFAYYYMGWYRQAPGKEREFVATISVGGSTYYADSVKGRFTISRDNAKNTVYLQMNSLKPEDTAVYYCAVRVYPYWDYPSFHSYWGQGTQVTVSS

SEQ ID NO: 1568 - protein, 105 aa, Artificial Sequence
  Chemically Synthesized
QVQLQESGGGLVQAGGSLRLSCAASGTYMGWYRQAPGKERELVAAIANGTNTNYADSVKGRFTISRDNAKNTVYLQMNSLKPEDTAVYYCAAIYWGQGTQVTVSS

SEQ ID NO: 1569 - protein, 118 aa, Artificial Sequence
  Chemically Synthesized
QVQLQESGGGLVQAGGSLRLSCAASGTIFTRYGMGWYRQAPGKERELVAGITSGTTTYYADSVKGRFTISRDNAKNTVYLQMNSLKPEDTAVYYCAAPALAYPRHSYWGQGTQVTVSS

SEQ ID NO: 1570 - protein, 110 aa, Artificial Sequence
  Chemically Synthesized
QVQLQESGGGLVQAGGSLRLSCAASGSISTLVYMGWYRQAPGKEREFVAAIADVLLPYADSVKGRFTISRDNAKNTVYLQMNSLKPEDTAVYYCAFSFYWGQGTQVTVSS

SEQ ID NO: 1571 - protein, 126 aa, Artificial Sequence
  Chemically Synthesized
QVQLQESGGGLVQAGGSLRLSCAASGTIFITWIMGWYRQAPGKERELVAGIDYGSTTNYADSVKGRFTISRDNAKNTVYLQMNSLKPEDTAVYYCAAYNRTPSDAVYLDAHYYDYWGQGTQVTVSS

SEQ ID NO: 1572 - protein, 125 aa, Artificial Sequence
  Chemically Synthesized
QVQLQESGGGLVQAGGSLRLSCAASGSIFASRDMGWYRQAPGKEREFVATIGTGALPYADSVKGRFTISRDNAKNTVYLQMNSLKPEDTAVYYCAVDANRRRYDNTYPYYPHDYWGQGTQVTVSS

SEQ ID NO: 1573 - protein, 118 aa, Artificial Sequence
  Chemically Synthesized
QVQLQESGGGLVQAGGSLRLSCAASGNIFPGNFMGWYRQAPGKEREFVATITDGGNTNYADSVKGRFTISRDNAKNTVYLQMNSLKPEDTAVYYCAVDYTTPVPHGYWGQGTQVTVSS

SEQ ID NO: 1574 - protein, 117 aa, Artificial Sequence
  Chemically Synthesized
QVQLQESGGGLVQAGGSLRLSCAASGSISPYYMGWYRQAPGKERELVAAIGLGTSTNYADSVKGRFTISRDNAKNTVYLQMNSLKPEDTAVYYCAATRPDPWDFPYWGQGTQVTVSS

SEQ ID NO: 1575 - protein, 118 aa, Artificial Sequence
  Chemically Synthesized
QVQLQESGGGLVQAGGSLRLSCAASGYISYPLRMGWYRQAPGKERELVAAISYGGNTYYADSVKGRFTISRDNAKNTVYLQMNSLKPEDTAVYYCAVDARRYRYHRYWGQGTQVTVSS

SEQ ID NO: 1576 - protein, 118 aa, Artificial Sequence
  Chemically Synthesized
QVQLQESGGGLVQAGGSLRLSCAASGTIFVRDVMGWYRQAPGKERELVATITWGATTYYADSVKGRFTISRDNAKNTVYLQMNSLKPEDTAVYYCAVDYGGLYPFSYWGQGTQVTVSS

SEQ ID NO: 1577 - protein, 125 aa, Artificial Sequence
  Chemically Synthesized
QVQLQESGGGLVQAGGSLRLSCAASGTIFYALDMGWYRQAPGKERELVATIAYGGSTNYADSVKGRFTISRDNAKNTVYLQMNSLKPEDTAVYYCAADGGVVADDGKRTSVRMYWGQGTQVTVSS

SEQ ID NO: 1578 - protein, 125 aa, Artificial Sequence
  Chemically Synthesized
QVQLQESGGGLVQAGGSLRLSCAASGNISITSMGWYRQAPGKERELVASIAIGSITYYADSVKGRFTISRDNAKNTVYLQMNSLKPEDTAVYYCAVDLTAYPDDQYWYAANLPYWGQGTQVTVSS

SEQ ID NO: 1579 - protein, 122 aa, Artificial Sequence
  Chemically Synthesized
QVQLQESGGGLVQAGGSLRLSCAASGYISYDPYMGWYRQAPGKERELVAGISDGATTNYADSVKGRFTISRDNAKNTVYLQMNSLKPEDTAVYYCAALRYSTGGFYTHHGYWGQGTQVTVSS

SEQ ID NO: 1580 - protein, 122 aa, Artificial Sequence
  Chemically Synthesized
QVQLQESGGGLVQAGGSLRLSCAASGTISVPGLMGWYRQAPGKEREFVAAIAPGGNTYYADSVKGRFTISRDNAKNTVYLQMNSLKPEDTAVYYCAVVGYYIAWNYGALYYWGQGTQVTVSS

SEQ ID NO: 1581 - protein, 125 aa, Artificial Sequence
  Chemically Synthesized
QVQLQESGGGLVQAGGSLRLSCAASGNIFPVHMGWYRQAPGKERELVAGISDGTSTYYADSVKGRFTISRDNAKNTVYLQMNSLKPEDTAVYYCAAEVRKTVDANSYPTDGYTYWGQGTQVTVSS

SEQ ID NO: 1582 - protein, 122 aa, Artificial Sequence
  Chemically Synthesized
QVQLQESGGGLVQAGGSLRLSCAASGTISPYLWMGWYRQAPGKERELVAGITNGASTYYADSVKGRFTISRDNAKNTVYLQMNSLKPEDTAVYYCAADVRLYDYQPNTLVYWGQGTQVTVSS

SEQ ID NO: 1583 - protein, 117 aa, Artificial Sequence
  Chemically Synthesized
QVQLQESGGGLVQAGGSLRLSCAASGNISQYTDMGWYRQAPGKEREFVAGINSVLLPYADSVKGRFTISRDNAKNTVYLQMNSLKPEDTAVYYCAVAYEIRYSHFYWGQGTQVTVSS

SEQ ID NO: 1584 - protein, 118 aa, Artificial Sequence
  Chemically Synthesized
QVQLQESGGGLVQAGGSLRLSCAASGNIFYIWYMGWYRQAPGKEREFVASIDYGANTYYADSVKGRFTISRDNAKNTVYLQMNSLKPEDTAVYYCAVYTIRRRGYPYWGQGTQVTVSS

SEQ ID NO: 1585 - protein, 119 aa, Artificial Sequence
  Chemically Synthesized
QVQLQESGGGLVQAGGSLRLSCAASGYIFHRGYMGWYRQAPGKEREFVASISYGTITNYADSVKGRFTISRDNAKNTVYLQMNSLKPEDTAVYYCAYAHWTRYYDLQYWGQGTQVTVSS

SEQ ID NO: 1586 - protein, 118 aa, Artificial Sequence
  Chemically Synthesized
QVQLQESGGGLVQAGGSLRLSCAASGTISAAQLMGWYRQAPGKEREFVATITKGGTTYYADSVKGRFTISRDNAKNTVYLQMNSLKPEDTAVYYCAVTRDSHWDYAYWGQGTQVTVSS

SEQ ID NO: 1587 - protein, 119 aa, Artificial Sequence
  Chemically Synthesized
QVQLQESGGGLVQAGGSLRLSCAASGSISPGSYMGWYRQAPGKERELVAAIASGASTNYADSVKGRFTISRDNAKNTVYLQMNSLKPEDTAVYYCAVANSDDPYRHDYWGQGTQVTVSS

SEQ ID NO: 1588 - protein, 117 aa, Artificial Sequence
  Chemically Synthesized
QVQLQESGGGLVQAGGSLRLSCAASGTISWSVYMGWYRQAPGKERELVAGIDEGGITYYADSVKGRFTISRDNAKNTVYLQMNSLKPEDTAVYYCAARYTYGGADYWGQGTQVTVSS

SEQ ID NO: 1589 - protein, 122 aa, Artificial Sequence
  Chemically Synthesized
QVQLQESGGGLVQAGGSLRLSCAASGSISDGDNMGWYRQAPGKERELVATISRGGTTNYADSVKGRFTISRDNAKNTVYLQMNSLKPEDTAVYYCAVEDRSDLRDWSDLRYWGQGTQVTVSS

SEQ ID NO: 1590 - protein, 118 aa, Artificial Sequence
  Chemically Synthesized
QVQLQESGGGLVQAGGSLRLSCAASGNISSSYWMGWYRQAPGKEREFVATINPGTTTYYADSVKGRFTISRDNAKNTVYLQMNSLKPEDTAVYYCAATTYASYVHDYWGQGTQVTVSS

SEQ ID NO: 1591 - protein, 126 aa, Artificial Sequence
  Chemically Synthesized
QVQLQESGGGLVQAGGSLRLSCAASGTIFYTRDMGWYRQAPGKERELVATIDTGGSTYYADSVKGRFTISRDNAKNTVYLQMNSLKPEDTAVYYCAVLPDPAQAHYRQLAGGHPYWGQGTQVTVSS

SEQ ID NO: 1592 - protein, 119 aa, Artificial Sequence
  Chemically Synthesized
QVQLQESGGGLVQAGGSLRLSCAASGNIFAVLMGWYRQAPGKERELVAAIDDGSNTYYADSVKGRFTISRDNAKNTVYLQMNSLKPEDTAVYYCAATYPYDYGPSYGYWGQGTQVTVSS

SEQ ID NO: 1593 - protein, 118 aa, Artificial Sequence
  Chemically Synthesized
QVQLQESGGGLVQAGGSLRLSCAASGYISGLQDMGWYRQAPGKERELVAGISIGASTYYADSVKGRFTISRDNAKNTVYLQMNSLKPEDTAVYYCAAGPAYSYWHAYWGQGTQVTVSS

SEQ ID NO: 1594 - protein, 121 aa, Artificial Sequence
  Chemically Synthesized
QVQLQESGGGLVQAGGSLRLSCAASGNISRGDYMGWYRQAPGKERELVASISDGTSTNYADSVKGRFTISRDNAKNTVYLQMNSLKPEDTAVYYCAVDSSLRLLTTSCFYWGQGTQVTVSS

SEQ ID NO: 1595 - protein, 121 aa, Artificial Sequence
  Chemically Synthesized
QVQLQESGGGLVQAGGSLRLSCAASGTIFYVDYMGWYRQAPGKEREFVAAITSVLIPYADSVKGRFTISRDNAKNTVYLQMNSLKPEDTAVYYCAASANVAYWFYIDHGYWGQGTQVTVSS

SEQ ID NO: 1596 - protein, 122 aa, Artificial Sequence
  Chemically Synthesized
QVQLQESGGGLVQAGGSLRLSCAASGTISGQGYMGWYRQAPGKEREFVAAISFGGTTNYADSVKGRFTISRDNAKNTVYLQMNSLKPEDTAVYYCAAYEYDFLADSDAHQYWGQGTQVTVSS

SEQ ID NO: 1597 - protein, 118 aa, Artificial Sequence
  Chemically Synthesized
QVQLQESGGGLVQAGGSLRLSCAASGSIFPGAYMGWYRQAPGKERELVAAINRGGNTYYADSVKGRFTISRDNAKNTVYLQMNSLKPEDTAVYYCAAKRRYYWHLDYWGQGTQVTVSS

SEQ ID NO: 1598 - protein, 115 aa, Artificial Sequence
  Chemically Synthesized
QVQLQESGGGLVQAGGSLRLSCAASGNIFLTFPMGWYRQAPGKERERWYYYQYADSVKGRFTISRDNAKNTVYLQMNSLKPEDTAVYYCAAYSWDALWWRVAHYWGQGTQVTVSS

SEQ ID NO: 1599 - protein, 118 aa, Artificial Sequence
  Chemically Synthesized
QVQLQESGGGLVQAGGSLRLSCAASGTIFIYAFMGWYRQAPGKEREFVATIDGGSNTNYADSVKGRFTISRDNAKNTVYLQMNSLKPEDTAVYYCAVNAPGNVHLHYWGQGTQVTVSS

SEQ ID NO: 1600 - protein, 125 aa, Artificial Sequence
  Chemically Synthesized
QVQLQESGGGLVQAGGSLRLSCAASGYIFGPYVMGWYRQAPGKERELVASIDGGATTNYADSVKGRFTISRDNAKNTVYLQMNSLKPEDTAVYYCAAQQSIADPLGDTTPSPLYWGQGTQVTVSS

SEQ ID NO: 1601 - protein, 116 aa, Artificial Sequence
  Chemically Synthesized
QVQLQESGGGLVQAGGSLRLSCAASGSIFRDDRMGWYRQAPGKERELVASITYGANTNYADSVKGRFTISRDNAKNTVYLQMNSLKPEDTAVYYCAALFYDGHIYWGQGTQVTVSS

SEQ ID NO: 1602 - protein, 118 aa, Artificial Sequence
  Chemically Synthesized
QVQLQESGGGLVQAGGSLRLSCAASGSIFRIATMGWYRQAPGKEREFVAAINYGSNTYYADSVKGRFTISRDNAKNTVYLQMNSLKPEDTAVYYCAAYYVYRSFHSYWGQGTQVTVSS

SEQ ID NO: 1603 - protein, 122 aa, Artificial Sequence
  Chemically Synthesized
QVQLQESGGGLVQAGGSLRLSCAASGTISTGRYMGWYRQAPGKEREFVASIGDGASTNYADSVKGRFTISRDNAKNTVYLQMNSLKPEDTAVYYCAARAIYYRYSGLVHGYWGQGTQVTVSS

SEQ ID NO: 1604 - protein, 117 aa, Artificial Sequence
  Chemically Synthesized
QVQLQESGGGLVQAGGSLRLSCAASGYISRILKMGWYRQAPGKEREFVASINGGGNTYYADSVKGRFTISRDNAKNTVYLQMNSLKPEDTAVYYCAAYQDVYSNIYWGQGTQVTVSS

SEQ ID NO: 1605 - protein, 122 aa, Artificial Sequence
  Chemically Synthesized
QVQLQESGGGLVQAGGSLRLSCAASGTISGLRAMGWYRQAPGKERELVAGINPGGITNYADSVKGRFTISRDNAKNTVYLQMNSLKPEDTAVYYCAVGVSYRLVTWGEHGYWGQGTQVTVSS

SEQ ID NO: 1606 - protein, 117 aa, Artificial Sequence
  Chemically Synthesized
QVQLQESGGGLVQAGGSLRLSCAASGNIFDGSMGWYRQAPGKERELVAAIDYGTTTNYADSVKGRFTISRDNAKNTVYLQMNSLKPEDTAVYYCAVELGTHTYYRYWGQGTQVTVSS

SEQ ID NO: 1607 - protein, 111 aa, Artificial Sequence
  Chemically Synthesized
QVQLQESGGGLVQAGGSLRLSCAASGYISGGFYMGWYRQAPGKERELVATIASGASTYYADSVKGRFTISRDNAKNTVYLQMNSLKPEDTAVYYCAVVLYWGQGTQVTVSS

SEQ ID NO: 1608 - protein, 118 aa, Artificial Sequence
  Chemically Synthesized
QVQLQESGGGLVQAGGSLRLSCAASGSIFGGHVMGWYRQAPGKEREFVAAISPGASTYYADSVKGRFTISRDNAKNTVYLQMNSLKPEDTAVYYCAAWFYGYHQFGYWGQGTQVTVSS

SEQ ID NO: 1609 - protein, 121 aa, Artificial Sequence
  Chemically Synthesized
QVQLQESGGGLVQAGGSLRLSCAASGSISVDTYMGWYRQAPGKERELVASIVTVVVPYADSVKGRFTISRDNAKNTVYLQMNSLKPEDTAVYYCAATLYVERYFAADFLYWGQGTQVTVSS

SEQ ID NO: 1610 - protein, 117 aa, Artificial Sequence
  Chemically Synthesized
QVQLQESGGGLVQAGGSLRLSCAASGNIFSRLMGWYRQAPGKERELVAAIDRGSITYYADSVKGRFTISRDNAKNTVYLQMNSLKPEDTAVYYCAVVRAFSVRLEYWGQGTQVTVSS

SEQ ID NO: 1611 - protein, 118 aa, Artificial Sequence
  Chemically Synthesized
QVQLQESGGGLVQAGGSLRLSCAASGNISSDNSMGWYRQAPGKERELVAAINYGAITNYADSVKGRFTISRDNAKNTVYLQMNSLKPEDTAVYYCAAWDGQERPYYYWGQGTQVTVSS

SEQ ID NO: 1612 - protein, 118 aa, Artificial Sequence
  Chemically Synthesized
QVQLQESGGGLVQAGGSLRLSCAASGTIFTGYWMGWYRQAPGKERELVASIGYGTITYYADSVKGRFTISRDNAKNTVYLQMNSLKPEDTAVYYCAAYNVTGHYFPYWGQGTQVTVSS

SEQ ID NO: 1613 - protein, 117 aa, Artificial Sequence
  Chemically Synthesized
QVQLQESGGGLVQAGGSLRLSCAASGIFLLLRMGWYRQAPGKERELVASIGDGANTNYADSVKGRFTISRDNAKNTVYLQMNSLKPEDTAVYYCAVIWDPPDGHPYWGQGTQVTVSS

SEQ ID NO: 1614 - protein, 122 aa, Artificial Sequence
  Chemically Synthesized
QVQLQESGGGLVQAGGSLRLSCAASGSISDRSNMGWYRQAPGKERELVAGITYGGSTYYADSVKGRFTISRDNAKNTVYLQMNSLKPEDTAVYYCAARIDYGAWAGRDHSYWGQGTQVTVSS

SEQ ID NO: 1615 - protein, 126 aa, Artificial Sequence
  Chemically Synthesized
QVQLQESGGGLVQAGGSLRLSCAASGTISYHQLMGWYRQAPGKEREFVASIGQGATTYYADSVKGRFTISRDNAKNTVYLQMNSLKPEDTAVYYCAATISDQAPEWTLINYSFAYWGQGTQVTVSS

SEQ ID NO: 1616 - protein, 117 aa, Artificial Sequence
  Chemically Synthesized
QVQLQESGGGLVQAGGSLRLSCAASGTISREPDMGWYRQAPGKERELVATISDGTTTYYADSVKGRFTISRDNAKNTVYLQMNSLKPEDTAVYYCAAYALSAVSFYWGQGTQVTVSS

SEQ ID NO: 1617 - protein, 118 aa, Artificial Sequence
  Chemically Synthesized
QVQLQESGGGLVQAGGSLRLSCAASGYISYYYVMGWYRQAPGKERELVAAIAYGSNTNYADSVKGRFTISRDNAKNTVYLQMNSLKPEDTAVYYCAVVQVYYTPYEYWGQGTQVTVSS

SEQ ID NO: 1618 - protein, 118 aa, Artificial Sequence
  Chemically Synthesized
QVQLQESGGGLVQAGGSLRLSCAASGTIFLLWQMGWYRQAPGKERELVATINSGSNTYYADSVKGRFTISRDNAKNTVYLQMNSLKPEDTAVYYCAVPSARWYIHWYWGQGTQVTVSS

SEQ ID NO: 1619 - protein, 118 aa, Artificial Sequence
  Chemically Synthesized
QVQLQESGGGLVQAGGSLRLSCAASGTIFYYNYMGWYRQAPGKERELVASITHGTSTNYADSVKGRFTISRDNAKNTVYLQMNSLKPEDTAVYYCAAWRGYFAIHWYWGQGTQVTVSS

SEQ ID NO: 1620 - protein, 122 aa, Artificial Sequence
  Chemically Synthesized
QVQLQESGGGLVQAGGSLRLSCAASGSIFGLLQMGWYRQAPGKERELVATIDTGGTTNYADSVKGRFTISRDNAKNTVYLQMNSLKPEDTAVYYCAAYDTLLDDLYFALRYWGQGTQVTVSS

SEQ ID NO: 1621 - protein, 122 aa, Artificial Sequence
  Chemically Synthesized
QVQLQESGGGLVQAGGSLRLSCAASGTIFSYDGMGWYRQAPGKEREFVATIAVGTSTNYADSVKGRFTISRDNAKNTVYLQMNSLKPEDTAVYYCAATYYGYDYWKQYFDYWGQGTQVTVSS

SEQ ID NO: 1622 - protein, 122 aa, Artificial Sequence
  Chemically Synthesized
QVQLQESGGGLVQAGGSLRLSCAASGTIFVDNAMGWYRQAPGKERELVATITGGTTTYYADSVKGRFTISRDNAKNTVYLQMNSLKPEDTAVYYCAARGYIDYLWYIFYRYWGQGTQVTVSS

SEQ ID NO: 1623 - protein, 117 aa, Artificial Sequence
  Chemically Synthesized
QVQLQESGGGLVQAGGSLRLSCAASGNISGTYFMGWYRQAPGKERELVATIAFGGITNYADSVKGRFTISRDNAKNTVYLQMNSLKPEDTAVYYCAAEGPYASLIYWGQGTQVTVSS

SEQ ID NO: 1624 - protein, 118 aa, Artificial Sequence
  Chemically Synthesized
QVQLQESGGGLVQAGGSLRLSCAASGYIFPSGIMGWYRQAPGKERELVAGISSGSTTNYADSVKGRFTISRDNAKNTVYLQMNSLKPEDTAVYYCAAPYGPILLFGYWGQGTQVTVSS

SEQ ID NO: 1625 - protein, 117 aa, Artificial Sequence
  Chemically Synthesized
QVQLQESGGGLVQAGGSLRLSCAASGSFLTRHMGWYRQAPGKERELVAGIGYGSNTYYADSVKGRFTISRDNAKNTVYLQMNSLKPEDTAVYYCAVSRIPYRAYGYWGQGTQVTVSS

SEQ ID NO: 1626 - protein, 122 aa, Artificial Sequence
  Chemically Synthesized
QVQLQESGGGLVQAGGSLRLSCAASGSIFWTIHMGWYRQAPGKEREFVAGIGRGGTTYYADSVKGRFTISRDNAKNTVYLQMNSLKPEDTAVYYCAARIYYYFYDLYDLGYWGQGTQVTVSS

SEQ ID NO: 1627 - protein, 126 aa, Artificial Sequence
  Chemically Synthesized
QVQLQESGGGLVQAGGSLRLSCAASGTISGNYYMGWYRQAPGKEREFVASIGRGSTTYYADSVKGRFTISRDNAKNTVYLQMNSLKPEDTAVYYCAVDYVPAPLFVAVNDWDFAYWGQGTQVTVSS

SEQ ID NO: 1628 - protein, 117 aa, Artificial Sequence
  Chemically Synthesized
QVQLQESGGGLVQAGGSLRLSCAASGSIFHNRVMGWYRQAPGKERELVASIDDGTTTNYADSVKGRFTISRDNAKNTVYLQMNSLKPEDTAVYYCAAYSSSVSVFYWGQGTQVTVSS

SEQ ID NO: 1629 - protein, 125 aa, Artificial Sequence
  Chemically Synthesized
QVQLQESGGGLVQAGGSLRLSCAASGSIFDSTSMGWYRQAPGKERELVAAISPGANTYYADSVKGRFTISRDNAKNTVYLQMNSLKPEDTAVYYCAVLAADGSANDDDADGCIYWGQGTQVTVSS

SEQ ID NO: 1630 - protein, 125 aa, Artificial Sequence
  Chemically Synthesized
QVQLQESGGGLVQAGGSLRLSCAASGTILLLLMGWYRQAPGKEREFVATITTGSTTYYADSVKGRFTISRDNAKNTVYLQMNSLKPEDTAVYYCAVHYWASWGVKPEYSYRHAYWGQGTQVTVSS

SEQ ID NO: 1631 - protein, 118 aa, Artificial Sequence
  Chemically Synthesized
QVQLQESGGGLVQAGGSLRLSCAASGNIFRGQYMGWYRQAPGKERELVAAISVGSITYYADSVKGRFTISRDNAKNTVYLQMNSLKPEDTAVYYCAVTYYADYYHVYWGQGTQVTVSS

SEQ ID NO: 1632 - protein, 118 aa, Artificial Sequence
  Chemically Synthesized
QVQLQESGGGLVQAGGSLRLSCAASGTISVAWFMGWYRQAPGKERELVAGIDPGTITNYADSVKGRFTISRDNAKNTVYLQMNSLKPEDTAVYYCAAYGDRQTYYDYWGQGTQVTVSS

SEQ ID NO: 1633 - protein, 118 aa, Artificial Sequence
  Chemically Synthesized
QVQLQESGGGLVQAGGSLRLSCAASGNIFYTHNMGWYRQAPGKEREFVAGISPGTTTNYADSVKGRFTISRDNAKNTVYLQMNSLKPEDTAVYYCAAYAYAEGRFYYWGQGTQVTVSS

SEQ ID NO: 1634 - protein, 118 aa, Artificial Sequence
  Chemically Synthesized
QVQLQESGGGLVQAGGSLRLSCAASGSIFGGWTMGWYRQAPGKERELVATITGGGSTYYADSVKGRFTISRDNAKNTVYLQMNSLKPEDTAVYYCAAGSSYYDAHSYWGQGTQVTVSS

SEQ ID NO: 1635 - protein, 121 aa, Artificial Sequence
  Chemically Synthesized
QVQLQESGGGLVQAGGSLRLSCAASGYISGTYQMGWYRQAPGKERELVAGISGGGTTYYADSVKGRFTISRDNAKNTVYLQMNSLKPEDTAVYYCAAGPAYSTVVVVCLYWGQGTQVTVSS

SEQ ID NO: 1636 - protein, 118 aa, Artificial Sequence
  Chemically Synthesized
QVQLQESGGGLVQAGGSLRLSCAASGTISYARDMGWYRQAPGKEREFVAAISLGASTYYADSVKGRFTISRDNAKNTVYLQMNSLKPEDTAVYYCAVRTYVDYFFAYWGQGTQVTVSS

SEQ ID NO: 1637 - protein, 122 aa, Artificial Sequence
  Chemically Synthesized
QVQLQESGGGLVQAGGSLRLSCAASGYIFWSQYMGWYRQAPGKEREFVATIAPGSSTYYADSVKGRFTISRDNAKNTVYLQMNSLKPEDTAVYYCAVDDGGDDIIADRLYYWGQGTQVTVSS

SEQ ID NO: 1638 - protein, 122 aa, Artificial Sequence
  Chemically Synthesized
QVQLQESGGGLVQAGGSLRLSCAASGSIFHFEPMGWYRQAPGKERELVASITYQYADSVKGRFTISRDNAKNTVYLQMNSLKPEDTAVYYCAAYANIRDYFGVGYYRHFYYWGQGTQVTVSS

SEQ ID NO: 1639 - protein, 118 aa, Artificial Sequence
  Chemically Synthesized
QVQLQESGGGLVQAGGSLRLSCAASGTISVSSGMGWYRQAPGKEREFVAAISDGASTNYADSVKGRFTISRDNAKNTVYLQMNSLKPEDTAVYYCAVGRSYPFRYRYWGQGTQVTVSS

SEQ ID NO: 1640 - protein, 118 aa, Artificial Sequence
  Chemically Synthesized
QVQLQESGGGLVQAGGSLRLSCAASGTIFTIYDMGWYRQAPGKERELVATIDAGSNTNYADSVKGRFTISRDNAKNTVYLQMNSLKPEDTAVYYCAVYGGRYVPFAYWGQGTQVTVSS

SEQ ID NO: 1641 - protein, 122 aa, Artificial Sequence
  Chemically Synthesized
QVQLQESGGGLVQAGGSLRLSCAASGTIFAGAYMGWYRQAPGKERELVATIAPGSSTYYADSVKGRFTISRDNAKNTVYLQMNSLKPEDTAVYYCAARPLYSSDGGWYHVYWGQGTQVTVSS

SEQ ID NO: 1642 - protein, 118 aa, Artificial Sequence
  Chemically Synthesized
QVQLQESGGGLVQAGGSLRLSCAASGNIFSLQNMGWYRQAPGKERELVAGITSGGTTYYADSVKGRFTISRDNAKNTVYLQMNSLKPEDTAVYYCAALSSYATVYEYWGQGTQVTVSS

SEQ ID NO: 1643 - protein, 112 aa, Artificial Sequence
  Chemically Synthesized
QVQLQESGGGLVQAGGSLRLSCAASGTYMGWYRQAPGKERELVASIALGAITNYADSVKGRFTISRDNAKNTVYLQMNSLKPEDTAVYYCAADGTNLVLDYWGQGTQVTVSS

SEQ ID NO: 1644 - protein, 118 aa, Artificial Sequence
  Chemically Synthesized
QVQLQESGGGLVQAGGSLRLSCAASGYIFSGFYMGWYRQAPGKERELVASIAYGAITNYADSVKGRFTISRDNAKNTVYLQMNSLKPEDTAVYYCAVAPARYGNFDYWGQGTQVTVSS

SEQ ID NO: 1645 - protein, 118 aa, Artificial Sequence
  Chemically Synthesized
QVQLQESGGGLVQAGGSLRLSCAASGNIFGYPAMGWYRQAPGKEREFVAGINVGGTTNYADSVKGRFTISRDNAKNTVYLQMNSLKPEDTAVYYCAVFPDYKLSFGYWGQGTQVTVSS

SEQ ID NO: 1646 - protein, 118 aa, Artificial Sequence
  Chemically Synthesized
QVQLQESGGGLVQAGGSLRLSCAASGTISYRTRMGWYRQAPGKERELVASIGYGTNTNYADSVKGRFTISRDNAKNTVYLQMNSLKPEDTAVYYCAVTLDYHPEFTYWGQGTQVTVSS

SEQ ID NO: 1647 - protein, 125 aa, Artificial Sequence
  Chemically Synthesized
QVQLQESGGGLVQAGGSLRLSCAASGSIFADQYMGWYRQAPGKEREFVATIAYGASTNYADSVKGRFTISRDNAKNTVYLQMNSLKPEDTAVYYCAAWHEEHDWRDYHVYEYYYWGQGTQVTVSS

SEQ ID NO: 1648 - protein, 122 aa, Artificial Sequence
  Chemically Synthesized
QVQLQESGGGLVQAGGSLRLSCAASGSISYDDAMGWYRQAPGKERELVATIAPGATTYYADSVKGRFTISRDNAKNTVYLQMNSLKPEDTAVYYCAAILRLYEQRVEYFLYWGQGTQVTVSS

SEQ ID NO: 1649 - protein, 126 aa, Artificial Sequence
  Chemically Synthesized
QVQLQESGGGLVQAGGSLRLSCAASGSIFYSSVMGWYRQAPGKERELVATIAKGSSTYYADSVKGRFTISRDNAKNTVYLQMNSLKPEDTAVYYCAAKIRHYRGYGYLIRYDHLYWGQGTQVTVSS

SEQ ID NO: 1650 - protein, 122 aa, Artificial Sequence
  Chemically Synthesized
QVQLQESGGGLVQAGGSLRLSCAASGTISYLVIMGWYRQAPGKERELVATIDAGTITYYADSVKGRFTISRDNAKNTVYLQMNSLKPEDTAVYYCAVSRTWYYFTSAPFLYWGQGTQVTVSS

SEQ ID NO: 1651 - protein, 117 aa, Artificial Sequence
  Chemically Synthesized
QVQLQESGGGLVQAGGSLRLSCAASGYIFGDSKMGWYRQAPGKERELVAGIGVGGTTNYADSVKGRFTISRDNAKNTVYLQMNSLKPEDTAVYYCAVSTTVTTNFYWGQGTQVTVSS

SEQ ID NO: 1652 - protein, 126 aa, Artificial Sequence
  Chemically Synthesized
QVQLQESGGGLVQAGGSLRLSCAASGSISDWYGMGWYRQAPGKEREFVATIDHGGITYYADSVKGRFTISRDNAKNTVYLQMNSLKPEDTAVYYCAAIYPIERDVYGYPVWYLDYWGQGTQVTVSS

SEQ ID NO: 1653 - protein, 118 aa, Artificial Sequence
  Chemically Synthesized
QVQLQESGGGLVQAGGSLRLSCAASGNIFQARAMGWYRQAPGKEREFVAGISDGASTYYADSVKGRFTISRDNAKNTVYLQMNSLKPEDTAVYYCAADERVVATLRYWGQGTQVTVSS

SEQ ID NO: 1654 - protein, 126 aa, Artificial Sequence
  Chemically Synthesized
QVQLQESGGGLVQAGGSLRLSCAASGTISYRYIMGWYRQAPGKEREFVAAITLGTTTNYADSVKGRFTISRDNAKNTVYLQMNSLKPEDTAVYYCAVQRYVRGKWRYDRDYLFRYWGQGTQVTVSS

SEQ ID NO: 1655 - protein, 118 aa, Artificial Sequence
  Chemically Synthesized
QVQLQESGGGLVQAGGSLRLSCAASGNIFTTETMGWYRQAPGKERELVATIGRGGTTYYADSVKGRFTISRDNAKNTVYLQMNSLKPEDTAVYYCAVYTVPWYEYSYWGQGTQVTVSS

SEQ ID NO: 1656 - protein, 122 aa, Artificial Sequence
  Chemically Synthesized
QVQLQESGGGLVQAGGSLRLSCAASGTISQRGRMGWYRQAPGKERELVAAIAYGANTYYADSVKGRFTISRDNAKNTVYLQMNSLKPEDTAVYYCAVARTQETSVLVLAWYWGQGTQVTVSS

SEQ ID NO: 1657 - protein, 118 aa, Artificial Sequence
  Chemically Synthesized
QVQLQESGGGLVQAGGSLRLSCAASGSIFLTTLMGWYRQAPGKERELVASIGAGSITNYADSVKGRFTISRDNAKNTVYLQMNSLKPEDTAVYYCAVQHVPRYAYQYWGQGTQVTVSS

SEQ ID NO: 1658 - protein, 126 aa, Artificial Sequence
  Chemically Synthesized
QVQLQESGGGLVQAGGSLRLSCAASGTISYTDSMGWYRQAPGKEREFVASIASGGTTYYADSVKGRFTISRDNAKNTVYLQMNSLKPEDTAVYYCAVGGSSDDFAGDYDSDYHQYWGQGTQVTVSS

SEQ ID NO: 1659 - protein, 118 aa, Artificial Sequence
  Chemically Synthesized
QVQLQESGGGLVQAGGSLRLSCAASGTIFRYSSMGWYRQAPGKERELVAAISFGATTNYADSVKGRFTISRDNAKNTVYLQMNSLKPEDTAVYYCAVVAIETRYLSYWGQGTQVTVSS

SEQ ID NO: 1660 - protein, 118 aa, Artificial Sequence
  Chemically Synthesized
QVQLQESGGGLVQAGGSLRLSCAASGYIFYYSFMGWYRQAPGKEREFVAGINYGGITYYADSVKGRFTISRDNAKNTVYLQMNSLKPEDTAVYYCAAYHGWHYEHYYWGQGTQVTVSS

SEQ ID NO: 1661 - protein, 125 aa, Artificial Sequence
  Chemically Synthesized
QVQLQESGGGLVQAGGSLRLSCAASGTISSDVDMGWYRQAPGKEREFVASINWGSSTNYADSVKGRFTISRDNAKNTVYLQMNSLKPEDTAVYYCAVLGGYRGYDGIDTNGQQYWGQGTQVTVSS

SEQ ID NO: 1662 - protein, 122 aa, Artificial Sequence
  Chemically Synthesized
QVQLQESGGGLVQAGGSLRLSCAASGTISRGVGMGWYRQAPGKERELVASINPGGNTYYADSVKGRFTISRDNAKNTVYLQMNSLKPEDTAVYYCAAYLYTPGDPPSRHGYWGQGTQVTVSS

SEQ ID NO: 1663 - protein, 122 aa, Artificial Sequence
  Chemically Synthesized
QVQLQESGGGLVQAGGSLRLSCAASGTIFYEAYMGWYRQAPGKERELVAAIAAGASTYYADSVKGRFTISRDNAKNTVYLQMNSLKPEDTAVYYCAVQDRDDKATYRLHNYWGQGTQVTVSS

SEQ ID NO: 1664 - protein, 116 aa, Artificial Sequence
  Chemically Synthesized
QVQLQESGGGLVQAGGSLRLSCAASGTIFQPWPMGWYRQAPGKERELVATITGATTYYADSVKGRFTISRDNAKNTVYLQMNSLKPEDTAVYYCAVLSLWEGFSYWGQGTQVTVSS

SEQ ID NO: 1665 - protein, 118 aa, Artificial Sequence
  Chemically Synthesized
QVQLQESGGGLVQAGGSLRLSCAASGNISDSSYMGWYRQAPGKERELVASISGGSSTYYADSVKGRFTISRDNAKNTVYLQMNSLKPEDTAVYYCAVVRYDTVYHYYWGQGTQVTVSS

SEQ ID NO: 1666 - protein, 126 aa, Artificial Sequence
  Chemically Synthesized
QVQLQESGGGLVQAGGSLRLSCAASGSIFAGGEMGWYRQAPGKERELVATISGGSTTYYADSVKGRFTISRDNAKNTVYLQMNSLKPEDTAVYYCAARRTRYPAYTHRRRDAYPYWGQGTQVTVSS

SEQ ID NO: 1667 - protein, 115 aa, Artificial Sequence
  Chemically Synthesized
QVQLQESGGGLVQAGGSLRLSCAASGSIFPFDFMGWYRQAPGKEREFVASITRGGTTNYADSVKGRFTISRDNAKNTVYLQMNSLKPEDTAVYYCAALTTKTMYWGQGTQVTVSS

SEQ ID NO: 1668 - protein, 117 aa, Artificial Sequence
  Chemically Synthesized
QVQLQESGGGLVQAGGSLRLSCAASGYIFDAVAMGWYRQAPGKEREFVATIDDGTITYYADSVKGRFTISRDNAKNTVYLQMNSLKPEDTAVYYCALSRVVTVVIYWGQGTQVTVSS

SEQ ID NO: 1669 - protein, 122 aa, Artificial Sequence
  Chemically Synthesized
QVQLQESGGGLVQAGGSLRLSCAASGYISRGARMGWYRQAPGKERELVAAIGRGGNTYYADSVKGRFTISRDNAKNTVYLQMNSLKPEDTAVYYCAATRIRYGTELYVHQYWGQGTQVTVSS

SEQ ID NO: 1670 - protein, 121 aa, Artificial Sequence
  Chemically Synthesized
QVQLQESGGGLVQAGGSLRLSCAASGTIFAVEYMGWYRQAPGKERELVATIAYGGNTNYADSVKGRFTISRDNAKNTVYLQMNSLKPEDTAVYYCAYSYRLPGVGRWFVYWGQGTQVTVSS

SEQ ID NO: 1671 - protein, 118 aa, Artificial Sequence
  Chemically Synthesized
QVQLQESGGGLVQAGGSLRLSCAASGSIFYLHYMGWYRQAPGKEREFVAGIARGSTTYYADSVKGRFTISRDNAKNTVYLQMNSLKPEDTAVYYCAVWGRAIRYHAYWGQGTQVTVSS

SEQ ID NO: 1672 - protein, 122 aa, Artificial Sequence
  Chemically Synthesized
QVQLQESGGGLVQAGGSLRLSCAASGTISTPEGMGWYRQAPGKEREFVASIDYGTNTYYADSVKGRFTISRDNAKNTVYLQMNSLKPEDTAVYYCAAGPGSIVLSDAQLSYWGQGTQVTVSS

SEQ ID NO: 1673 - protein, 122 aa, Artificial Sequence
  Chemically Synthesized
QVQLQESGGGLVQAGGSLRLSCAASGNISRDLEMGWYRQAPGKERELVAGIDYGASTNYADSVKGRFTISRDNAKNTVYLQMNSLKPEDTAVYYCAAPNDGISHWFRDYYYWGQGTQVTVSS

SEQ ID NO: 1674 - protein, 122 aa, Artificial Sequence
  Chemically Synthesized
QVQLQESGGGLVQAGGSLRLSCAASGNISAVTAMGWYRQAPGKERELVAGITRGGTTYYADSVKGRFTISRDNAKNTVYLQMNSLKPEDTAVYYCAAYAWSRTHYRGRHRYWGQGTQVTVSS

SEQ ID NO: 1675 - protein, 126 aa, Artificial Sequence
  Chemically Synthesized
QVQLQESGGGLVQAGGSLRLSCAASGTIFKDSYMGWYRQAPGKEREFVATIAYGGTTYYADSVKGRFTISRDNAKNTVYLQMNSLKPEDTAVYYCAVPYTTGDAPTYADVVRHVYWGQGTQVTVSS

SEQ ID NO: 1676 - protein, 117 aa, Artificial Sequence
  Chemically Synthesized
QVQLQESGGGLVQAGGSLRLSCAASGTIFPTQDMGWYRQAPGKEREFVAGITDCYYQYADSVKGRFTISRDNAKNTVYLQMNSLKPEDTAVYYCAAQARNATSLSYWGQGTQVTVSS

SEQ ID NO: 1677 - protein, 125 aa, Artificial Sequence
  Chemically Synthesized
QVQLQESGGGLVQAGGSLRLSCAASGSIFSVTMGWYRQAPGKERELVATIDKGTITNYADSVKGRFTISRDNAKNTVYLQMNSLKPEDTAVYYCAVTGTQGEIEYKLNETPFLYWGQGTQVTVSS

SEQ ID NO: 1678 - protein, 121 aa, Artificial Sequence
  Chemically Synthesized
QVQLQESGGGLVQAGGSLRLSCAASGTISDSSMGWYRQAPGKEREFVAGIGDGASTYYADSVKGRFTISRDNAKNTVYLQMNSLKPEDTAVYYCAVRQDGDGDTGDHHEYWGQGTQVTVSS

SEQ ID NO: 1679 - protein, 122 aa, Artificial Sequence
  Chemically Synthesized
QVQLQESGGGLVQAGGSLRLSCAASGSISYPTTMGWYRQAPGKEREFVAGIGIGTITNYADSVKGRFTISRDNAKNTVYLQMNSLKPEDTAVYYCAVYRAYTGGWDDLYAYWGQGTQVTVSS

SEQ ID NO: 1680 - protein, 118 aa, Artificial Sequence
  Chemically Synthesized
QVQLQESGGGLVQAGGSLRLSCAASGNISVKWGMGWYRQAPGKEREFVAGITPGTTTNYADSVKGRFTISRDNAKNTVYLQMNSLKPEDTAVYYCAATWYDLYVYTYWGQGTQVTVSS

SEQ ID NO: 1681 - protein, 118 aa, Artificial Sequence
  Chemically Synthesized
QVQLQESGGGLVQAGGSLRLSCAASGYIFDTYWMGWYRQAPGKEREFVAAITYGGITYYADSVKGRFTISRDNAKNTVYLQMNSLKPEDTAVYYCAAWPLYRRGYYYWGQGTQVTVSS

SEQ ID NO: 1682 - protein, 118 aa, Artificial Sequence
  Chemically Synthesized
QVQLQESGGGLVQAGGSLRLSCAASGTIFGPTNMGWYRQAPGKEREFVAGINYGGITYYADSVKGRFTISRDNAKNTVYLQMNSLKPEDTAVYYCAAYYRARTRHLYWGQGTQVTVSS

SEQ ID NO: 1683 - protein, 118 aa, Artificial Sequence
  Chemically Synthesized
QVQLQESGGGLVQAGGSLRLSCAASGNISRRSVMGWYRQAPGKEREFVASIDSGGITNYADSVKGRFTISRDNAKNTVYLQMNSLKPEDTAVYYCAVYYLGYDRHRYWGQGTQVTVSS

SEQ ID NO: 1684 - protein, 118 aa, Artificial Sequence
  Chemically Synthesized
QVQLQESGGGLVQAGGSLRLSCAASGNISSYVYMGWYRQAPGKERELVAGIDKGSSTNYADSVKGRFTISRDNAKNTVYLQMNSLKPEDTAVYYCAVHVFILYDYKYWGQGTQVTVSS

SEQ ID NO: 1685 - protein, 118 aa, Artificial Sequence
  Chemically Synthesized
QVQLQESGGGLVQAGGSLRLSCAASGYISRAPVMGWYRQAPGKEREFVASITFGTTTYYADSVKGRFTISRDNAKNTVYLQMNSLKPEDTAVYYCAADRYGVLWYSYWGQGTQVTVSS

SEQ ID NO: 1686 - protein, 118 aa, Artificial Sequence
  Chemically Synthesized
QVQLQESGGGLVQAGGSLRLSCAASGTISRERIMGWYRQAPGKEREFVASIAIGGITYYADSVKGRFTISRDNAKNTVYLQMNSLKPEDTAVYYCAAFGRRYYHFRYWGQGTQVTVSS

SEQ ID NO: 1687 - protein, 118 aa, Artificial Sequence
  Chemically Synthesized
QVQLQESGGGLVQAGGSLRLSCAASGYIFRKPSMGWYRQAPGKEREFVAAIGWGTTTYYADSVKGRFTISRDNAKNTVYLQMNSLKPEDTAVYYCAVTTQFRRPFSYWGQGTQVTVSS

SEQ ID NO: 1688 - protein, 118 aa, Artificial Sequence
  Chemically Synthesized
QVQLQESGGGLVQAGGSLRLSCAASGNIFDGAIMGWYRQAPGKEREFVASISFGTSTYYADSVKGRFTISRDNAKNTVYLQMNSLKPEDTAVYYCAVVYAQGDAFRYWGQGTQVTVSS

SEQ ID NO: 1689 - protein, 112 aa, Artificial Sequence
  Chemically Synthesized
QVQLQESGGGLVQAGGSLRLSCAASGSIFNDPDMGWYRQAPGKEREFVATINEGASTYYADSVKGRFTISRDNAKNTVYLQMNSLKPEDTAVYYCAVRLPYWGQGTQVTVSS

SEQ ID NO: 1690 - protein, 122 aa, Artificial Sequence
  Chemically Synthesized
QVQLQESGGGLVQAGGSLRLSCAASGNISYYIPMGWYRQAPGKERELVAGIDPGTITNYADSVKGRFTISRDNAKNTVYLQMNSLKPEDTAVYYCAAVSDALGPSYFLLDYWGQGTQVTVSS

SEQ ID NO: 1691 - protein, 126 aa, Artificial Sequence
  Chemically Synthesized
QVQLQESGGGLVQAGGSLRLSCAASGTIFFDYTMGWYRQAPGKERELVASIASGTTTYYADSVKGRFTISRDNAKNTVYLQMNSLKPEDTAVYYCAARPNTYVLIGVWDNRYLTYWGQGTQVTVSS

SEQ ID NO: 1692 - protein, 118 aa, Artificial Sequence
  Chemically Synthesized
QVQLQESGGGLVQAGGSLRLSCAASGNIFGARAMGWYRQAPGKEREFVAGIGYGSTTYYADSVKGRFTISRDNAKNTVYLQMNSLKPEDTAVYYCAVDPDTVTAHPYWGQGTQVTVSS

SEQ ID NO: 1693 - protein, 118 aa, Artificial Sequence
  Chemically Synthesized
QVQLQESGGGLVQAGGSLRLSCAASGTISLIQWMGWYRQAPGKEREFVAGISLGGTTYYADSVKGRFTISRDNAKNTVYLQMNSLKPEDTAVYYCAAGADRYAAYTYWGQGTQVTVSS

SEQ ID NO: 1694 - protein, 118 aa, Artificial Sequence
  Chemically Synthesized
QVQLQESGGGLVQAGGSLRLSCAASGNISPSVYMGWYRQAPGKEREFVAAIGSGGITNYADSVKGRFTISRDNAKNTVYLQMNSLKPEDTAVYYCAVVYRAGRYLGYWGQGTQVTVSS

SEQ ID NO: 1695 - protein, 118 aa, Artificial Sequence
  Chemically Synthesized
QVQLQESGGGLVQAGGSLRLSCAASGSISVGVAMGWYRQAPGKERELVATITDGGNTYYADSVKGRFTISRDNAKNTVYLQMNSLKPEDTAVYYCAADGGDTDNHRYWGQGTQVTVSS

SEQ ID NO: 1696 - protein, 117 aa, Artificial Sequence
  Chemically Synthesized
QVQLQESGGGLVQAGGSLRLSCAASGTIFSDWDMGWYRQAPGKEREFVAAINAGASTYYADSVKGRFTISRDNAKNTVYLQMNSLKPEDTAVYYCAVRDYSSVGIYWGQGTQVTVSS

SEQ ID NO: 1697 - protein, 118 aa, Artificial Sequence
  Chemically Synthesized
QVQLQESGGGLVQAGGSLRLSCAASGYISRPKYMGWYRQAPGKEREFVASISPGGNTNYADSVKGRFTISRDNAKNTVYLQMNSLKPEDTAVYYCAATLYLRPYLGYWGQGTQVTVSS

SEQ ID NO: 1698 - protein, 122 aa, Artificial Sequence
  Chemically Synthesized
QVQLQESGGGLVQAGGSLRLSCAASGSIFVDKIMGWYRQAPGKEREFVAAINFIGTSTNYADSVKGRFTISRDNAKNTVYLQMNSLKPEDTAVYYCAARRYRPKTDSSVMYWGQGTQVTVSS

SEQ ID NO: 1699 - protein, 122 aa, Artificial Sequence
  Chemically Synthesized
QVQLQESGGGLVQAGGSLRLSCAASGSISPDVYMGWYRQAPGKERELVASIGYGSSTYYADSVKGRFTISRDNAKNTVYLQMNSLKPEDTAVYYCAAVVLGYWVYYANHTYWGQGTQVTVSS

SEQ ID NO: 1700 - protein, 112 aa, Artificial Sequence
  Chemically Synthesized
QVQLQESGGGLVQAGGSLRLSCAASGYISRTYGMGWYRQAPGKEREFVATIDQGANTNYADSVKGRFTISRDNAKNTVYLQMNSLKPEDTAVYYCAAKSDYWGQGTQVTVSS

SEQ ID NO: 1701 - protein, 118 aa, Artificial Sequence
  Chemically Synthesized
QVQLQESGGGLVQAGGSLRLSCAASGSISTGYDMGWYRQAPGKEREFVATISIGGNTYYADSVKGRFTISRDNAKNTVYLQMNSLKPEDTAVYYCAVGRLGFRDHDYWGQGTQVTVSS

SEQ ID NO: 1702 - protein, 118 aa, Artificial Sequence
  Chemically Synthesized
QVQLQESGGGLVQAGGSLRLSCAASGSIFYGGYMGWYRQAPGKEREFVAGISYGGTTYYADSVKGRFTISRDNAKNTVYLQMNSLKPEDTAVYYCAARTADVGDLVYWGQGTQVTVSS

SEQ ID NO: 1703 - protein, 118 aa, Artificial Sequence
  Chemically Synthesized
QVQLQESGGGLVQAGGSLRLSCAASGSIFIATLMGWYRQAPGKEREFVATIGSGTNTYYADSVKGRFTISRDNAKNTVYLQMNSLKPEDTAVYYCAVGLVRYQSHVYWGQGTQVTVSS

SEQ ID NO: 1704 - protein, 126 aa, Artificial Sequence
  Chemically Synthesized
QVQLQESGGGLVQAGGSLRLSCAASGYIFDKSKMGWYRQAPGKERELVAAIAYGSNTNYADSVKGRFTISRDNAKNTVYLQMNSLKPEDTAVYYCAVDYPGAYVPRGISYTNFAYWGQGTQVTVSS

SEQ ID NO: 1705 - protein, 126 aa, Artificial Sequence
  Chemically Synthesized
QVQLQESGGGLVQAGGSLRLSCAASGYIFGSFRMGWYRQAPGKEREFVAAIGAGGNTNYADSVKGRFTISRDNAKNTVYLQMNSLKPEDTAVYYCAAEPWPGDLPAYHPYSPFYYWGQGTQVTVSS

SEQ ID NO: 1706 - protein, 122 aa, Artificial Sequence
  Chemically Synthesized
QVQLQESGGGLVQAGGSLRLSCAASGYIFWVYKMGWYRQAPGKEREFVAGITYGTTTYYADSVKGRFTISRDNAKNTVYLQMNSLKPEDTAVYYCAVGSLAWHKYDKGYRYWGQGTQVTVSS

SEQ ID NO: 1707 - protein, 126 aa, Artificial Sequence
  Chemically Synthesized
QVQLQESGGGLVQAGGSLRLSCAASGNIFRRARMGWYRQAPGKERELVATIGIGASTYYADSVKGRFTISRDNAKNTVYLQMNSLKPEDTAVYYCAVTYWGRYGYLYGKHGGHDYWGQGTQVTVSS

SEQ ID NO: 1708 - protein, 126 aa, Artificial Sequence
  Chemically Synthesized
QVQLQESGGGLVQAGGSLRLSCAASGTIFRYYAMGWYRQAPGKERELVAAIDPGGNTYYADSVKGRFTISRDNAKNTVYLQMNSLKPEDTAVYYCAVRRRRGLRPLVDGGSAHYYWGQGTQVTVSS

SEQ ID NO: 1709 - protein, 118 aa, Artificial Sequence
  Chemically Synthesized
QVQLQESGGGLVQAGGSLRLSCAASGNIFDYSIMGWYRQAPGKERELVATIDAGSSTYYADSVKGRFTISRDNAKNTVYLQMNSLKPEDTAVYYCAVWVNYYIRHSYWGQGTQVTVSS

SEQ ID NO: 1710 - protein, 118 aa, Artificial Sequence
  Chemically Synthesized
QVQLQESGGGLVQAGGSLRLSCAASGSIFYQRYMGWYRQAPGKEREFVAAIDYGGSTYYADSVKGRFTISRDNAKNTVYLQMNSLKPEDTAVYYCAVPTRRWFRHYYWGQGTQVTVSS

SEQ ID NO: 1711 - protein, 118 aa, Artificial Sequence
  Chemically Synthesized
QVQLQESGGGLVQAGGSLRLSCAASGTIFRYRYMGWYRQAPGKEREFVAGIALGSTTYYADSVKGRFTISRDNAKNTVYLQMNSLKPEDTAVYYCAVYGLWYATFRYWGQGTQVTVSS

SEQ ID NO: 1712 - protein, 126 aa, Artificial Sequence
  Chemically Synthesized
QVQLQESGGGLVQAGGSLRLSCAASGNISTLRLMGWYRQAPGKEREFVAGIARGSNTYYADSVKGRFTISRDNAKNTVYLQMNSLKPEDTAVYYCAAGYTHWDYRYGGRIVRHTYWGQGTQVTVSS

SEQ ID NO: 1713 - protein, 118 aa, Artificial Sequence
  Chemically Synthesized
QVQLQESGGGLVQAGGSLRLSCAASGYIFDWRNMGWYRQAPGKERELVAAISYGGITNYADSVKGRFTISRDNAKNTVYLQMNSLKPEDTAVYYCAAASLYRWRFGYWGQGTQVTVSS

SEQ ID NO: 1714 - protein, 118 aa, Artificial Sequence
  Chemically Synthesized
QVQLQESGGGLVQAGGSLRLSCAASGNISRSPGMGWYRQAPGKERELVAAIAVGGITYYADSVKGRFTISRDNAKNTVYLQMNSLKPEDTAVYYCAAYSWNPNAYYYWGQGTQVTVSS

SEQ ID NO: 1715 - protein, 117 aa, Artificial Sequence
  Chemically Synthesized
QVQLQESGGGLVQAGGSLRLSCAASGTIFAFREMGWYRQAPGKEREFVAAIGRGAITYYADSVKGRFTISRDNAKNTVYLQMNSLKPEDTAVYYCAVYYRVYPHYYWGQGTQVTVSS

SEQ ID NO: 1716 - protein, 117 aa, Artificial Sequence
  Chemically Synthesized
QVQLQESGGGLVQAGGSLRLSCAASGYILLVVMGWYRQAPGKERELVASITTGANTYYADSVKGRFTISRDNAKNTVYLQMNSLKPEDTAVYYCAADVGVEYYYAYWGQGTQVTVSS

SEQ ID NO: 1717 - protein, 118 aa, Artificial Sequence
  Chemically Synthesized
QVQLQESGGGLVQAGGSLRLSCAASGTIFALRPMGWYRQAPGKEREFVATIASGSTTYYADSVKGRFTISRDNAKNTVYLQMNSLKPEDTAVYYCAAVRYIWGWHTYWGQGTQVTVSS

SEQ ID NO: 1718 - protein, 118 aa, Artificial Sequence
  Chemically Synthesized
QVQLQESGGGLVQAGGSLRLSCAASGYIFRWSWMGWYRQAPGKERELVAAIGYGGITNYADSVKGRFTISRDNAKNTVYLQMNSLKPEDTAVYYCAVTRLHYYRHWYWGQGTQVTVSS

SEQ ID NO: 1719 - protein, 122 aa, Artificial Sequence
  Chemically Synthesized
QVQLQESGGGLVQAGGSLRLSCAASGTISARGRMGWYRQAPGKERELVASISYGGTTYYADSVKGRFTISRDNAKNTVYLQMNSLKPEDTAVYYCAAPYITTYPYRHRHSYWGQGTQVTVSS

SEQ ID NO: 1720 - protein, 121 aa, Artificial Sequence
  Chemically Synthesized
QVQLQESGGGLVQAGGSLRLSCAASGTISFTPYMGWYRQAPGKERELVATITYGASTYYADSVKGRFTISRDNAKNTVYLQMNSLKPEDTAVYYCAAIFALYQYWTSYLYWGQGTQVTVSS

SEQ ID NO: 1721 - protein, 117 aa, Artificial Sequence
  Chemically Synthesized
QVQLQESGGGLVQAGGSLRLSCAASGTISAGRDMGWYRQAPGKERELVAGIGAGTTTYYADSVKGRFTISRDNAKNTVYLQMNSLKPEDTAVYYCAAESVRTLVIYWGQGTQVTVSS

SEQ ID NO: 1722 - protein, 122 aa, Artificial Sequence
  Chemically Synthesized
QVQLQESGGGLVQAGGSLRLSCAASGSISDVTPMGWYRQAPGKERELVASIGHGTSTYYADSVKGRFTISRDNAKNTVYLQMNSLKPEDTAVYYCAASVKTYHFRWRYHRYWGQGTQVTVSS

SEQ ID NO: 1723 - protein, 122 aa, Artificial Sequence
  Chemically Synthesized
QVQLQESGGGLVQAGGSLRLSCAASGTIFTPRYMGWYRQAPGKERELVASITGGGITYYADSVKGRFTISRDNAKNTVYLQMNSLKPEDTAVYYCAAVTNRYFPYRVRHHYWGQGTQVTVSS

SEQ ID NO: 1724 - protein, 122 aa, Artificial Sequence
  Chemically Synthesized
QVQLQESGGGLVQAGGSLRLSCAASGSISYYGTMGWYRQAPGKEREFVASIARGSSTNYADSVKGRFTISRDNAKNTVYLQMNSLKPEDTAVYYCAVTHRWGTGRRRPHVYWGQGTQVTVSS

SEQ ID NO: 1725 - protein, 122 aa, Artificial Sequence
  Chemically Synthesized
QVQLQESGGGLVQAGGSLRLSCAASGNIFEGRTMGWYRQAPGKEREFVAGIDLGGSTYYADSVKGRFTISRDNAKNTVYLQMNSLKPEDTAVYYCAVFLEHPYSYNVVLLYWGQGTQVTVSS

SEQ ID NO: 1726 - protein, 115 aa, Artificial Sequence
  Chemically Synthesized
QVQLQESGGGLVQAGGSLRLSCAASGSISADPMGWYRQAPGKEREFVAAILVVVIPYADSVKGRFTISRDNAKNTVYLQMNSLKPEDTAVYYCAVSPLSRYHSYWGQGTQVTVSS

SEQ ID NO: 1727 - protein, 122 aa, Artificial Sequence
  Chemically Synthesized
QVQLQESGGGLVQAGGSLRLSCAASGSISRRQYMGWYRQAPGKERELVAAIGRGASTNYADSVKGRFTISRDNAKNTVYLQMNSLKPEDTAVYYCAARRYYYGHYGYTYYYWGQGTQVTVSS

SEQ ID NO: 1728 - protein, 118 aa, Artificial Sequence
  Chemically Synthesized
QVQLQESGGGLVQAGGSLRLSCAASGYISSRHYMGWYRQAPGKEREFVAAINRGANTYYADSVKGRFTISRDNAKNTVYLQMNSLKPEDTAVYYCAAYSVRKTSFTYWGQGTQVTVSS

SEQ ID NO: 1729 - protein, 122 aa, Artificial Sequence
  Chemically Synthesized
QVQLQESGGGLVQAGGSLRLSCAASGYISRGRFMGWYRQAPGKERELVAGIGYGATTNYADSVKGRFTISRDNAKNTVYLQMNSLKPEDTAVYYCAAWGYKRTWSRHDYGYWGQGTQVTVSS

SEQ ID NO: 1730 - protein, 109 aa, Artificial Sequence
  Chemically Synthesized
QVQLQESGGGLVQAGGSLRLSCAASGNISGRPDMGWYRQAPGKERELVAAIDAGTNTYYADSVKGRFTISRDNAKNTVYLQMNSLKPEDTAVYYCAAYWGQGTQVTVSS

SEQ ID NO: 1731 - protein, 117 aa, Artificial Sequence
  Chemically Synthesized
QVQLQESGGGLVQAGGSLRLSCAASGTISVAVMGWYRQAPGKERELVAGIAYGATTNYADSVKGRFTISRDNAKNTVYLQMNSLKPEDTAVYYCAAYYTESLSFHYWGQGTQVTVSS

SEQ ID NO: 1732 - protein, 126 aa, Artificial Sequence
  Chemically Synthesized
QVQLQESGGGLVQAGGSLRLSCAASGTIFGYFFMGWYRQAPGKERELVAGITDGGNTNYADSVKGRFTISRDNAKNTVYLQMNSLKPEDTAVYYCAAYDRIQRVSRGDDYKWHYYWGQGTQVTVSS

SEQ ID NO: 1733 - protein, 118 aa, Artificial Sequence
  Chemically Synthesized
QVQLQESGGGLVQAGGSLRLSCAASGYISRWRAMGWYRQAPGKERELVASISRGTITYYADSVKGRFTISRDNAKNTVYLQMNSLKPEDTAVYYCAVGYYIFNYYDYWGQGTQVTVSS

SEQ ID NO: 1734 - protein, 121 aa, Artificial Sequence
  Chemically Synthesized
QVQLQESGGGLVQAGGSLRLSCAASGSISYGSMGWYRQAPGKERELVASIATGTSTYYADSVKGRFTISRDNAKNTVYLQMNSLKPEDTAVYYCAAEDKDGGGRKDIHYYWGQGTQVTVSS

SEQ ID NO: 1735 - protein, 122 aa, Artificial Sequence
  Chemically Synthesized
QVQLQESGGGLVQAGGSLRLSCAASGNIFYYLYMGWYRQAPGKERELVATIDYGATTNYADSVKGRFTISRDNAKNTVYLQMNSLKPEDTAVYYCAVYLIRGHITAFIHGYWGQGTQVTVSS

SEQ ID NO: 1736 - protein, 116 aa, Artificial Sequence
  Chemically Synthesized
QVQLQESGGGLVQAGGSLRLSCAASGYISRHTHMGWYRQAPGKERELVAGTFGTSTNYADSVKGRFTISRDNAKNTVYLQMNSLKPEDTAVYYCAVKQRYHRYIYWGQGTQVTVSS

SEQ ID NO: 1737 - protein, 122 aa, Artificial Sequence
  Chemically Synthesized
QVQLQESGGGLVQAGGSLRLSCAASGYIFRYYVMGWYRQAPGKEREFVATIARGSTTYYADSVKGRFTISRDNAKNTVYLQMNSLKPEDTAVYYCAALSWRAYNVPARLRYWGQGTQVTVSS

SEQ ID NO: 1738 - protein, 126 aa, Artificial Sequence
  Chemically Synthesized
QVQLQESGGGLVQAGGSLRLSCAASGTISYPGIMGWYRQAPGKERELVATISYGTTTYYADSVKGRFTISRDNAKNTVYLQMNSLKPEDTAVYYCAVWKRYVDGSYGLLQTVHFYWGQGTQVTVSS

SEQ ID NO: 1739 - protein, 126 aa, Artificial Sequence
  Chemically Synthesized
QVQLQESGGGLVQAGGSLRLSCAASGTISLKHYMGWYRQAPGKEREFVAGIGYGANTNYADSVKGRFTISRDNAKNTVYLQMNSLKPEDTAVYYCAVRSYVKRHNTSNHRWYLWYWGQGTQVTVSS

SEQ ID NO: 1740 - protein, 121 aa, Artificial Sequence
  Chemically Synthesized
QVQLQESGGGLVQAGGSLRLSCAASGNILTLCMGWYRQAPGKEREFVAAISIGGNTNYADSVKGRFTISRDNAKNTVYLQMNSLKPEDTAVYYCAVRQWRDYYIFYDHSYWGQGTQVTVSS

SEQ ID NO: 1741 - protein, 122 aa, Artificial Sequence
  Chemically Synthesized
QVQLQESGGGLVQAGGSLRLSCAASGTIFRVTRMGWYRQAPGKEREFVAGIAYGSNTNYADSVKGRFTISRDNAKNTVYLQMNSLKPEDTAVYYCAAGRYWNYYITQTHVYWGQGTQVTVSS

SEQ ID NO: 1742 - protein, 118 aa, Artificial Sequence
  Chemically Synthesized
QVQLQESGGGLVQAGGSLRLSCAASGYIFAPYYMGWYRQAPGKERELVASINHGGNTNYADSVKGRFTISRDNAKNTVYLQMNSLKPEDTAVYYCAAPSRYYYRYRYWGQGTQVTVSS

SEQ ID NO: 1743 - protein, 126 aa, Artificial Sequence
  Chemically Synthesized
QVQLQESGGGLVQAGGSLRLSCAASGTIFYRRYMGWYRQAPGKEREFVAAITFGGNTYYADSVKGRFTISRDNAKNTVYLQMNSLKPEDTAVYYCAAAGRGYYLNDGSAHARYYYWGQGTQVTVSS

SEQ ID NO: 1744 - protein, 122 aa, Artificial Sequence
  Chemically Synthesized
QVQLQESGGGLVQAGGSLRLSCAASGYIFYSYTMGWYRQAPGKERELVATIGRGGNTNYADSVKGRFTISRDNAKNTVYLQMNSLKPEDTAVYYCAAYSWYLLHFHTGHRYWGQGTQVTVSS

SEQ ID NO: 1745 - protein, 117 aa, Artificial Sequence
  Chemically Synthesized
QVQLQESGGGLVQAGGSLRLSCAASGSIFVSTMGWYRQAPGKEREFVAAISTGSNTNYADSVKGRFTISRDNAKNTVYLQMNSLKPEDTAVYYCAADAFGGALLVYWGQGTQVTVSS

SEQ ID NO: 1746 - protein, 126 aa, Artificial Sequence
  Chemically Synthesized
QVQLQESGGGLVQAGGSLRLSCAASGTIFRYVYMGWYRQAPGKERELVATIGSGAITYYADSVKGRFTISRDNAKNTVYLQMNSLKPEDTAVYYCAVGAFRRRSDYYNGRTAFEYWGQGTQVTVSS

SEQ ID NO: 1747 - protein, 122 aa, Artificial Sequence
  Chemically Synthesized
QVQLQESGGGLVQAGGSLRLSCAASGYIFWRNYMGWYRQAPGKEREFVAGITRGSNTNYADSVKGRFTISRDNAKNTVYLQMNSLKPEDTAVYYCAVYRNELWGFSWYHHYWGQGTQVTVSS

SEQ ID NO: 1748 - protein, 122 aa, Artificial Sequence
  Chemically Synthesized
QVQLQESGGGLVQAGGSLRLSCAASGTIFYRTVMGWYRQAPGKEREFVAAITRGAITNYADSVKGRFTISRDNAKNTVYLQMNSLKPEDTAVYYCAVQTRVRRDFYPLYLYWGQGTQVTVSS

SEQ ID NO: 1749 - protein, 122 aa, Artificial Sequence
  Chemically Synthesized
QVQLQESGGGLVQAGGSLRLSCAASGSIFRYNPMGWYRQAPGKEREFVAGIDQGATTNYADSVKGRFTISRDNAKNTVYLQMNSLKPEDTAVYYCAAYRWVRDDYLYLFWYWGQGTQVTVSS

SEQ ID NO: 1750 - protein, 118 aa, Artificial Sequence
  Chemically Synthesized
QVQLQESGGGLVQAGGSLRLSCAASGYIFYYRTMGWYRQAPGKEREFVASITRGSITNYADSVKGRFTISRDNAKNTVYLQMNSLKPEDTAVYYCAVYPPRHRYYVYWGQGTQVTVSS

SEQ ID NO: 1751 - protein, 126 aa, Artificial Sequence
  Chemically Synthesized
QVQLQESGGGLVQAGGSLRLSCAASGSIFPIFAMGWYRQAPGKERELVATIGRGASTYYADSVKGRFTISRDNAKNTVYLQMNSLKPEDTAVYYCAALSQGYEYFVPYGDTGHYYWGQGTQVTVSS

SEQ ID NO: 1752 - protein, 123 aa, Artificial Sequence
  Chemically Synthesized
QVQLQESGGGLVQAGGSLRLSCAASGTISASRPMGWYRQAPGKEREFVAAIGRGSTTNYADSVKGRFTISRDNAKNTVYLQMNSLKPEDTAVYYCAVRPWYTYNQRGPRYIYWGQGTQVTVSS

SEQ ID NO: 1753 - protein, 118 aa, Artificial Sequence
  Chemically Synthesized
QVQLQESGGGLVQAGGSLRLSCAASGTIFAYVYMGWYRQAPGKERELVAGIAFGASTYYADSVKGRFTISRDNAKNTVYLQMNSLKPEDTAVYYCAARDVTRPVYVYWGQGTQVTVSS

SEQ ID NO: 1754 - protein, 118 aa, Artificial Sequence
  Chemically Synthesized
QVQLQESGGGLVQAGGSLRLSCAASGYIFRTTTMGWYRQAPGKEREFVAAINRGSNTYYADSVKGRFTISRDNAKNTVYLQMNSLKPEDTAVYYCAVYRFYRPDHFYWGQGTQVTVSS

SEQ ID NO: 1755 - protein, 118 aa, Artificial Sequence
  Chemically Synthesized
QVQLQESGGGLVQAGGSLRLSCAASGSISPRRSMGWYRQAPGKERELVASINVGASTNYADSVKGRFTISRDNAKNTVYLQMNSLKPEDTAVYYCAVPYYRYRHFYYWGQGTQVTVSS

SEQ ID NO: 1756 - protein, 122 aa, Artificial Sequence
  Chemically Synthesized
QVQLQESGGGLVQAGGSLRLSCAASGYISHAYAMGWYRQAPGKERELVATIAWGTITNYADSVKGRFTISRDNAKNTVYLQMNSLKPEDTAVYYCAAGRYFRWRIPRYLRYWGQGTQVTVSS

SEQ ID NO: 1757 - protein, 118 aa, Artificial Sequence
  Chemically Synthesized
QVQLQESGGGLVQAGGSLRLSCAASGTIFNHRYMGWYRQAPGKERELVAAIAKGGITYYADSVKGRFTISRDNAKNTVYLQMNSLKPEDTAVYYCAAYTRANRWFYYWGQGTQVTVSS

SEQ ID NO: 1758 - protein, 126 aa, Artificial Sequence
  Chemically Synthesized
QVQLQESGGGLVQAGGSLRLSCAASGNISRYSQMGWYRQAPGKEREFVATIDNGGTTNYADSVKGRFTISRDNAKNTVYLQMNSLKPEDTAVYYCAVLNYTGYRLYRWWFKAYWYWGQGTQVTVSS

SEQ ID NO: 1759 - protein, 118 aa, Artificial Sequence
  Chemically Synthesized
QVQLQESGGGLVQAGGSLRLSCAASGNISQRLRMGWYRQAPGKEREFVAGIGLGSNTYYADSVKGRFTISRDNAKNTVYLQMNSLKPEDTAVYYCAAGRRRALTLYYWGQGTQVTVSS

SEQ ID NO: 1760 - protein, 118 aa, Artificial Sequence
  Chemically Synthesized
QVQLQESGGGLVQAGGSLRLSCAASGYISYGAYMGWYRQAPGKEREFVAGISPGGSTYYADSVKGRFTISRDNAKNTVYLQMNSLKPEDTAVYYCAVSWAGKTSHNYWGQGTQVTVSS

SEQ ID NO: 1761 - protein, 118 aa, Artificial Sequence
  Chemically Synthesized
QVQLQESGGGLVQAGGSLRLSCAASGTIFLRRYMGWYRQAPGKEREFVAGISGGATTNYADSVKGRFTISRDNAKNTVYLQMNSLKPEDTAVYYCAVYRWRRYPYEYWGQGTQVTVSS

SEQ ID NO: 1762 - protein, 118 aa, Artificial Sequence
  Chemically Synthesized
QVQLQESGGGLVQAGGSLRLSCAASGSIFYFSYMGWYRQAPGKEREFVAAIDYGSTTYYADSVKGRFTISRDNAKNTVYLQMNSLKPEDTAVYYCAVRRAWLRRHDYWGQGTQVTVSS

SEQ ID NO: 1763 - protein, 125 aa, Artificial Sequence
  Chemically Synthesized
QVQLQESGGGLVQAGGSLRLSCAASGSISWSSMGWYRQAPGKERELVATIAYGGITYYADSVKGRFTISRDNAKNTVYLQMNSLKPEDTAVYYCAVSARYWRYTWFTGYTSYPYWGQGTQVTVSS

SEQ ID NO: 1764 - protein, 118 aa, Artificial Sequence
  Chemically Synthesized
QVQLQESGGGLVQAGGSLRLSCAASGYISTYSYMGWYRQAPGKERELVATIGSGAITNYADSVKGRFTISRDNAKNTVYLQMNSLKPEDTAVYYCAAVIRYGYGLSYWGQGTQVTVSS

SEQ ID NO: 1765 - protein, 122 aa, Artificial Sequence
  Chemically Synthesized
QVQLQESGGGLVQAGGSLRLSCAASGTISRWIRMGWYRQAPGKERELVAAISYGGNTYYADSVKGRFTISRDNAKNTVYLQMNSLKPEDTAVYYCAVGRYQHTVGYNTHRYWGQGTQVTVSS

SEQ ID NO: 1766 - protein, 121 aa, Artificial Sequence
  Chemically Synthesized
QVQLQESGGGLVQAGGSLRLSCAASGYISFKYMGWYRQAPGKEREFVAAITRGTSTNYADSVKGRFTISRDNAKNTVYLQMNSLKPEDTAVYYCAAVWRADRWTYYNHTYWGQGTQVTVSS

SEQ ID NO: 1767 - protein, 119 aa, Artificial Sequence
  Chemically Synthesized
QVQLQESGGGLVQAGGSLRLSCAASGNIFRAGYMGWYRQAPGKEREFVASISWGASTYYADSVKGRFTISRDNAKNTVYLQMNSLKPEDTAVYYCAQLRPGRVNSHYYWGQGTQVTVSS

SEQ ID NO: 1768 - protein, 116 aa, Artificial Sequence
  Chemically Synthesized
QVQLQESGGGLVQAGGSLRLSCAASGYIFRPTYMGWYRQAPGKEREFVAGIAFGTITNYADSVKGRFTISRDNAKNTVYLQMNSLKPEDTAVYYCAVRYVRTYYYWGQGTQVTVSS

SEQ ID NO: 1769 - protein, 117 aa, Artificial Sequence
  Chemically Synthesized
QVQLQESGGGLVQAGGSLRLSCAASGYISTDGAMGWYRQAPGKEREFVATIDVGTITNYADSVKGRFTISRDNAKNTVYLQMNSLKPEDTAVYYCAVYSYAYDSLYWGQGTQVTVSS

SEQ ID NO: 1770 - protein, 122 aa, Artificial Sequence
  Chemically Synthesized
QVQLQESGGGLVQAGGSLRLSCAASGNISYSRYMGWYRQAPGKEREFVATITYGGSTYYADSVKGRFTISRDNAKNTVYLQMNSLKPEDTAVYYCAVRFGTHRYQRAGLKYWGQGTQVTVSS

SEQ ID NO: 1771 - protein, 118 aa, Artificial Sequence
  Chemically Synthesized
QVQLQESGGGLVQAGGSLRLSCAASGSISRTAYMGWYRQAPGKEREFVAGISYGSTTYYADSVKGRFTISRDNAKNTVYLQMNSLKPEDTAVYYCAVIFGPRPTLLYWGQGTQVTVSS

SEQ ID NO: 1772 - protein, 118 aa, Artificial Sequence
  Chemically Synthesized
QVQLQESGGGLVQAGGSLRLSCAASGNIFRPYYMGWYRQAPGKERELVAAIDVGGITYYADSVKGRFTISRDNAKNTVYLQMNSLKPEDTAVYYCAVSSRYRARHAYWGQGTQVTVSS

SEQ ID NO: 1773 - protein, 118 aa, Artificial Sequence
  Chemically Synthesized
QVQLQESGGGLVQAGGSLRLSCAASGSIFYWSNMGWYRQAPGKERELVAAISLGTITNYADSVKGRFTISRDNAKNTVYLQMNSLKPEDTAVYYCAVWGLIRRYHSYWGQGTQVTVSS

SEQ ID NO: 1774 - protein, 126 aa, Artificial Sequence
  Chemically Synthesized
QVQLQESGGGLVQAGGSLRLSCAASGSISGVRRMGWYRQAPGKEREFVAAITRGGSTNYADSVKGRFTISRDNAKNTVYLQMNSLKPEDTAVYYCAVGRRTGVDYLYGGGYFHLYWGQGTQVTVSS

SEQ ID NO: 1775 - protein, 118 aa, Artificial Sequence
  Chemically Synthesized
QVQLQESGGGLVQAGGSLRLSCAASGTIFGRGGMGWYRQAPGKEREFVAAITYGSNTNYADSVKGRFTISRDNAKNTVYLQMNSLKPEDTAVYYCAATYGGVWKHFYWGQGTQVTVSS

SEQ ID NO: 1776 - protein, 118 aa, Artificial Sequence
  Chemically Synthesized
QVQLQESGGGLVQAGGSLRLSCAASGTISAGRTMGWYRQAPGKERELVAAIARGTSTNYADSVKGRFTISRDNAKNTVYLQMNSLKPEDTAVYYCAVQKRWPLTHAYWGQGTQVTVSS

SEQ ID NO: 1777 - protein, 118 aa, Artificial Sequence
  Chemically Synthesized
QVQLQESGGGLVQAGGSLRLSCAASGTIFYLGIMGWYRQAPGKEREFVAAIAPGASTYYADSVKGRFTISRDNAKNTVYLQMNSLKPEDTAVYYCAVARRRVYYLAYWGQGTQVTVSS

SEQ ID NO: 1778 - protein, 118 aa, Artificial Sequence
  Chemically Synthesized
QVQLQESGGGLVQAGGSLRLSCAASGTIFYYDFMGWYRQAPGKEREFVATIAQGGNTNYADSVKGRFTISRDNAKNTVYLQMNSLKPEDTAVYYCAALSVRRYTLNYWGQGTQVTVSS

SEQ ID NO: 1779 - protein, 117 aa, Artificial Sequence
  Chemically Synthesized
QVQLQESGGGLVQAGGSLRLSCAASGTIFLTYYMGWYRQAPGKEREFVATIDVGGTTNYADSVKGRFTISRDNAKNTVYLQMNSLKPEDTAVYYCAAKNNRDWHVYWGQGTQVTVSS

SEQ ID NO: 1780 - protein, 126 aa, Artificial Sequence
  Chemically Synthesized
QVQLQESGGGLVQAGGSLRLSCAASGSIFGRRYMGWYRQAPGKERELVASITVGGTTNYADSVKGRFTISRDNAKNTVYLQMNSLKPEDTAVYYCAATPRYYAAYRPFYRDRYFYWGQGTQVTVSS

SEQ ID NO: 1781 - protein, 122 aa, Artificial Sequence
  Chemically Synthesized
QVQLQESGGGLVQAGGSLRLSCAASGTIFDYVGMGWYRQAPGKERELVASISRGTSTYYADSVKGRFTISRDNAKNTVYLQMNSLKPEDTAVYYCAAVRRRTRGYSFWHRYWGQGTQVTVSS

SEQ ID NO: 1782 - protein, 118 aa, Artificial Sequence
  Chemically Synthesized
QVQLQESGGGLVQAGGSLRLSCAASGYIFTSAYMGWYRQAPGKERELVAAISTGASTYYADSVKGRFTISRDNAKNTVYLQMNSLKPEDTAVYYCAVAHGYWRYHSYWGQGTQVTVSS

SEQ ID NO: 1783 - protein, 126 aa, Artificial Sequence
  Chemically Synthesized
QVQLQESGGGLVQAGGSLRLSCAASGTIFTVSYMGWYRQAPGKEREFVAAISAGSNTNYADSVKGRFTISRDNAKNTVYLQMNSLKPEDTAVYYCAASRRQFGWSWFRQWYYLRYWGQGTQVTVSS

SEQ ID NO: 1784 - protein, 122 aa, Artificial Sequence
  Chemically Synthesized
QVQLQESGGGLVQAGGSLRLSCAASGYISSYRYMGWYRQAPGKERELVAAISWGATTYYADSVKGRFTISRDNAKNTVYLQMNSLKPEDTAVYYCAAGRPIRFGYTYRHGYWGQGTQVTVSS

SEQ ID NO: 1785 - protein, 126 aa, Artificial Sequence
  Chemically Synthesized
QVQLQESGGGLVQAGGSLRLSCAASGNISYVRPMGWYRQAPGKEREFVASISKGSNTNYADSVKGRFTISRDNAKNTVYLQMNSLKPEDTAVYYCAVYQYVYHYPGTWRNGRHQYWGQGTQVTVSS

SEQ ID NO: 1786 - protein, 122 aa, Artificial Sequence
  Chemically Synthesized
QVQLQESGGGLVQAGGSLRLSCAASGTIFSIYHMGWYRQAPGKEREFVAAIAYGANTNYADSVKGRFTISRDNAKNTVYLQMNSLKPEDTAVYYCAATDLQSDTGVVRHYYWGQGTQVTVSS

SEQ ID NO: 1787 - protein, 118 aa, Artificial Sequence
  Chemically Synthesized
QVQLQESGGGLVQAGGSLRLSCAASGSISPRYSMGWYRQAPGKEREFVAGITYGAITYYADSVKGRFTISRDNAKNTVYLQMNSLKPEDTAVYYCAARRYGYGILTYWGQGTQVTVSS

SEQ ID NO: 1788 - protein, 126 aa, Artificial Sequence
  Chemically Synthesized
QVQLQESGGGLVQAGGSLRLSCAASGYIFAYAGMGWYRQAPGKERELVAGIDRGSNTYYADSVKGRFTISRDNAKNTVYLQMNSLKPEDTAVYYCAADTKKSYQWYHYYYRGHYYWGQGTQVTVSS

SEQ ID NO: 1789 - protein, 122 aa, Artificial Sequence
  Chemically Synthesized
QVQLQESGGGLVQAGGSLRLSCAASGYIFRFVYMGWYRQAPGKEREFVAGIAYGANTYYADSVKGRFTISRDNAKNTVYLQMNSLKPEDTAVYYCAVQTRLGGSHRKYHRYWGQGTQVTVSS

SEQ ID NO: 1790 - protein, 118 aa, Artificial Sequence
  Chemically Synthesized
QVQLQESGGGLVQAGGSLRLSCAASGTISYGYYMGWYRQAPGKEREFVATISRGSSTYYADSVKGRFTISRDNAKNTVYLQMNSLKPEDTAVYYCAVSYFWLGYFGYWGQGTQVTVSS

SEQ ID NO: 1791 - protein, 118 aa, Artificial Sequence
  Chemically Synthesized
QVQLQESGGGLVQAGGSLRLSCAASGSIFYITAMGWYRQAPGKEREFVAGIAGGTSTNYADSVKGRFTISRDNAKNTVYLQMNSLKPEDTAVYYCAAVSRRRNSKAYWGQGTQVTVSS

SEQ ID NO: 1792 - protein, 126 aa, Artificial Sequence
  Chemically Synthesized
QVQLQESGGGLVQAGGSLRLSCAASGNISERGAMGWYRQAPGKEREFVAGIAYGTTTYYADSVKGRFTISRDNAKNTVYLQMNSLKPEDTAVYYCAVKIRYALGFYGHNPRVYRYWGQGTQVTVSS

SEQ ID NO: 1793 - protein, 125 aa, Artificial Sequence
  Chemically Synthesized
QVQLQESGGGLVQAGGSLRLSCAASGTIFYNYGMGWYRQAPGKERELVAAINVGATTYYADSVKGRFTISRDNAKNTVYLQMNSLKPEDTAVYYCAVGYGRAINSGTNCSRNLYWGQGTQVTVSS

SEQ ID NO: 1794 - protein, 118 aa, Artificial Sequence
  Chemically Synthesized
QVQLQESGGGLVQAGGSLRLSCAASGYIFGYLVMGWYRQAPGKERELVATINRGGSTNYADSVKGRFTISRDNAKNTVYLQMNSLKPEDTAVYYCAAVWTRRYLHLYWGQGTQVTVSS

SEQ ID NO: 1795 - protein, 118 aa, Artificial Sequence
  Chemically Synthesized
QVQLQESGGGLVQAGGSLRLSCAASGTIFTLNQMGWYRQAPGKERELVATITRGGNTYYADSVKGRFTISRDNAKNTVYLQMNSLKPEDTAVYYCAVGYRWVYYYVYWGQGTQVTVSS

SEQ ID NO: 1796 - protein, 122 aa, Artificial Sequence
  Chemically Synthesized
QVQLQESGGGLVQAGGSLRLSCAASGNIFTVQSMGWYRQAPGKERELVASIGNGSITNYADSVKGRFTISRDNAKNTVYLQMNSLKPEDTAVYYCAVADGDAQEWVYTYSYWGQGTQVTVSS

SEQ ID NO: 1797 - protein, 118 aa, Artificial Sequence
  Chemically Synthesized
QVQLQESGGGLVQAGGSLRLSCAASGNIFWRYRMGWYRQAPGKEREFVAGINFGATTYYADSVKGRFTISRDNAKNTVYLQMNSLKPEDTAVYYCAVGRPEYRFHGYWGQGTQVTVSS

SEQ ID NO: 1798 - protein, 118 aa, Artificial Sequence
  Chemically Synthesized
QVQLQESGGGLVQAGGSLRLSCAASGTIFRFSYMGWYRQAPGKEREFVATIGRGTTTYYADSVKGRFTISRDNAKNTVYLQMNSLKPEDTAVYYCAVTAYVGWRHKYWGQGTQVTVSS

SEQ ID NO: 1799 - protein, 122 aa, Artificial Sequence
  Chemically Synthesized
QVQLQESGGGLVQAGGSLRLSCAASGNISYRATMGWYRQAPGKEREFVASIGNGATTNYADSVKGRFTISRDNAKNTVYLQMNSLKPEDTAVYYCAALRRVLWHYSQRHPYWGQGTQVTVSS

SEQ ID NO: 1800 - protein, 122 aa, Artificial Sequence
  Chemically Synthesized
QVQLQESGGGLVQAGGSLRLSCAASGTISYRWPMGWYRQAPGKERELVAGIGRGGITYYADSVKGRFTISRDNAKNTVYLQMNSLKPEDTAVYYCAAYRFYAGDRGRHHGYWGQGTQVTVSS

SEQ ID NO: 1801 - protein, 118 aa, Artificial Sequence
  Chemically Synthesized
QVQLQESGGGLVQAGGSLRLSCAASGYISRRYLMGWYRQAPGKEREFVAAIAAGTNTNYADSVKGRFTISRDNAKNTVYLQMNSLKPEDTAVYYCAVFVRTRVWHTYWGQGTQVTVSS

SEQ ID NO: 1802 - protein, 118 aa, Artificial Sequence
  Chemically Synthesized
QVQLQESGGGLVQAGGSLRLSCAASGYISLLTYMGWYRQAPGKERELVATIARGGSTNYADSVKGRFTISRDNAKNTVYLQMNSLKPEDTAVYYCAAQRRFPYWYRYWGQGTQVTVSS

SEQ ID NO: 1803 - protein, 122 aa, Artificial Sequence
  Chemically Synthesized
QVQLQESGGGLVQAGGSLRLSCAASGSISTFRAMGWYRQAPGKEREFVAGIGPGSTTNYADSVKGRFTISRDNAKNTVYLQMNSLKPEDTAVYYCAVWLTYPFTGGDVYTYWGQGTQVTVSS

SEQ ID NO: 1804 - protein, 119 aa, Artificial Sequence
  Chemically Synthesized
QVQLQESGGGLVQAGGSLRLSCAASGSISRFPIVMGWYRQAPGKEREFVASIAWGASTYYADSVKGRFTISRDNAKNTVYLQMNSLKPEDTAVYYCAAQRPRAYRHPYWGQGTQVTVSS

SEQ ID NO: 1805 - protein, 110 aa, Artificial Sequence
  Chemically Synthesized
QVQLQESGGGLVQAGGSLRLSCAASGYISTVYFMGWYRQAPGKERELVATISGATTNYADSVKGRFTISRDNAKNTVYLQMNSLKPEDTAVYYCAVPLYWGQGTQVTVSS

SEQ ID NO: 1806 - protein, 118 aa, Artificial Sequence
  Chemically Synthesized
QVQLQESGGGLVQAGGSLRLSCAASGYIFGWSRMGWYRQAPGKEREFVATIGIGGSTNYADSVKGRFTISRDNAKNTVYLQMNSLKPEDTAVYYCAASRRGWGRLRYWGQGTQVTVSS

SEQ ID NO: 1807 - protein, 117 aa, Artificial Sequence
  Chemically Synthesized
QVQLQESGGGLVQAGGSLRLSCAASGSIFPVRRMGWYRQAPGKERELVAAINYGGNTNYADSVKGRFTISRDNAKNTVYLQMNSLKPEDTAVYYCAARYTFYPHRYWGQGTQVTVSS

SEQ ID NO: 1808 - protein, 109 aa, Artificial Sequence
  Chemically Synthesized
QVQLQESGGGLVQAGGSLRLSCAASGYISFITSMGWYRQAPGKERELVATIAYGGNTYYADSVKGRFTISRDNAKNTVYLQMNSLKPEDTAVYYCAAYWGQGTQVTVSS

SEQ ID NO: 1809 - protein, 118 aa, Artificial Sequence
  Chemically Synthesized
QVQLQESGGGLVQAGGSLRLSCAASGSIFATRRMGWYRQAPGKEREFVASIDRGATTYYADSVKGRFTISRDNAKNTVYLQMNSLKPEDTAVYYCAVLRRIYYYHWYWGQGTQVTVSS

SEQ ID NO: 1810 - protein, 118 aa, Artificial Sequence
  Chemically Synthesized
QVQLQESGGGLVQAGGSLRLSCAASGSIFVYSYMGWYRQAPGKERELVAAIGRGSNTNYADSVKGRFTISRDNAKNTVYLQMNSLKPEDTAVYYCAAYYRTFSRHYYWGQGTQVTVSS

SEQ ID NO: 1811 - protein, 121 aa, Artificial Sequence
  Chemically Synthesized
QVQLQESGGGLVQAGGSLRLSCAASGYISDVYGMGWYRQAPGKEREFVASIAAGSSTNYADSVKGRFTISRDNAKNTVYLQMNSLKPEDTAVYYCAVYRDLYRRSLRFMYWGQGTQVTVSS

SEQ ID NO: 1812 - protein, 122 aa, Artificial Sequence
  Chemically Synthesized
QVQLQESGGGLVQAGGSLRLSCAASGTIFHPYLMGWYRQAPGKEREFVATINGGTSTYYADSVKGRFTISRDNAKNTVYLQMNSLKPEDTAVYYCAAWPYYRPWRNGYYRYWGQGTQVTVSS

SEQ ID NO: 1813 - protein, 118 aa, Artificial Sequence
  Chemically Synthesized
QVQLQESGGGLVQAGGSLRLSCAASGTIFPRRPMGWYRQAPGKEREFVAAITRGTITYYADSVKGRFTISRDNAKNTVYLQMNSLKPEDTAVYYCAARYRYSGVFSYWGQGTQVTVSS

SEQ ID NO: 1814 - protein, 118 aa, Artificial Sequence
  Chemically Synthesized
QVQLQESGGGLVQAGGSLRLSCAASGSISRATAMGWYRQAPGKEREFVATISRGSTTNYADSVKGRFTISRDNAKNTVYLQMNSLKPEDTAVYYCAVLWGYYRKYLYWGQGTQVTVSS

SEQ ID NO: 1815 - protein, 122 aa, Artificial Sequence
  Chemically Synthesized
QVQLQESGGGLVQAGGSLRLSCAASGSISRQRVMGWYRQAPGKEREFVAAITSGATTNYADSVKGRFTISRDNAKNTVYLQMNSLKPEDTAVYYCAVVQRYRYGGYGGYVYWGQGTQVTVSS

SEQ ID NO: 1816 - protein, 122 aa, Artificial Sequence
  Chemically Synthesized
QVQLQESGGGLVQAGGSLRLSCAASGSISQYLWMGWYRQAPGKERELVATISFGGNTNYADSVKGRFTISRDNAKNTVYLQMNSLKPEDTAVYYCAANNDYDLRIYWYHYYWGQGTQVTVSS

SEQ ID NO: 1817 - protein, 118 aa, Artificial Sequence
  Chemically Synthesized
QVQLQESGGGLVQAGGSLRLSCAASGNIFWRRVMGWYRQAPGKEREFVAGISSGSSTYYADSVKGRFTISRDNAKNTVYLQMNSLKPEDTAVYYCAAKYRRVDQHRYWGQGTQVTVSS

SEQ ID NO: 1818 - protein, 125 aa, Artificial Sequence
  Chemically Synthesized
QVQLQESGGGLVQAGGSLRLSCAASGYIFGLGQMGWYRQAPGKERELVAGIGAGSSTNYADSVKGRFTISRDNAKNTVYLQMNSLKPEDTAVYYCAAKYYSYSRGDGRRRWHSYWGQGTQVTVSS

SEQ ID NO: 1819 - protein, 118 aa, Artificial Sequence
  Chemically Synthesized
QVQLQESGGGLVQAGGSLRLSCAASGYISRRIKMGWYRQAPGKERELVATINVGGNTYYADSVKGRFTISRDNAKNTVYLQMNSLKPEDTAVYYCAVRRDPRWYHYYWGQGTQVTVSS

SEQ ID NO: 1820 - protein, 125 aa, Artificial Sequence
  Chemically Synthesized
QVQLQESGGGLVQAGGSLRLSCAASGYISDYYMGWYRQAPGKEREFVAAITGGSNTYYADSVKGRFTISRDNAKNTVYLQMNSLKPEDTAVYYCAVRYHYRWHTRRSDYGYHYYWGQGTQVTVSS

SEQ ID NO: 1821 - protein, 118 aa, Artificial Sequence
  Chemically Synthesized
QVQLQESGGGLVQAGGSLRLSCAASGNIFSLHRMGWYRQAPGKEREFVAAIALGGITYYADSVKGRFTISRDNAKNTVYLQMNSLKPEDTAVYYCAASQLFVRRYYYWGQGTQVTVSS

SEQ ID NO: 1822 - protein, 122 aa, Artificial Sequence
  Chemically Synthesized
QVQLQESGGGLVQAGGSLRLSCAASGSISRWRTMGWYRQAPGKERELVAGIGRGGITYYADSVKGRFTISRDNAKNTVYLQMNSLKPEDTAVYYCAVISRRIHTKQPYFNYWGQGTQVTVSS

SEQ ID NO: 1823 - protein, 126 aa, Artificial Sequence
  Chemically Synthesized
QVQLQESGGGLVQAGGSLRLSCAASGYIFAIKVMGWYRQAPGKEREFVAAIAEGGSTNYADSVKGRFTISRDNAKNTVYLQMNSLKPEDTAVYYCAARVTDVAGRWYTWTRPHLYWGQGTQVTVSS

SEQ ID NO: 1824 - protein, 126 aa, Artificial Sequence
  Chemically Synthesized
QVQLQESGGGLVQAGGSLRLSCAASGNIFRVYAMGWYRQAPGKERELVAAIGYGATTYYADSVKGRFTISRDNAKNTVYLQMNSLKPEDTAVYYCAARRLKVTDTSQATRRFHRYWGQGTQVTVSS

SEQ ID NO: 1825 - protein, 122 aa, Artificial Sequence
  Chemically Synthesized
QVQLQESGGGLVQAGGSLRLSCAASGSISYTRYMGWYRQAPGKEREFVATIGQGSNTYYADSVKGRFTISRDNAKNTVYLQMNSLKPEDTAVYYCAAYRAARLDAERRLRYWGQGTQVTVSS

SEQ ID NO: 1826 - protein, 118 aa, Artificial Sequence
  Chemically Synthesized
QVQLQESGGGLVQAGGSLRLSCAASGSIFDLDAMGWYRQAPGKEREFVAGINYGGITYYADSVKGRFTISRDNAKNTVYLQMNSLKPEDTAVYYCAAAPNGVDLLEYWGQGTQVTVSS

SEQ ID NO: 1827 - protein, 118 aa, Artificial Sequence
  Chemically Synthesized
QVQLQESGGGLVQAGGSLRLSCAASGSIFGWYRMGWYRQAPGKEREFVAGISVGSSTNYADSVKGRFTISRDNAKNTVYLQMNSLKPEDTAVYYCAVFRYAYFRLKYWGQGTQVTVSS

SEQ ID NO: 1828 - protein, 118 aa, Artificial Sequence
  Chemically Synthesized
QVQLQESGGGLVQAGGSLRLSCAASGTIFYPWSMGWYRQAPGKERELVATISHGTTTNYADSVKGRFTISRDNAKNTVYLQMNSLKPEDTAVYYCAVHDNDDGDHGYWGQGTQVTVSS

SEQ ID NO: 1829 - protein, 125 aa, Artificial Sequence
  Chemically Synthesized
QVQLQESGGGLVQAGGSLRLSCAASGTIFSDQFMGWYRQAPGKEREFVATINQGGTTYADSVKGRFTISRDNAKNTVYLQMNSLKPEDTAVYYCAAVNPWIVDEDSWLGSPHEYWGQGTQVTVSS

SEQ ID NO: 1830 - protein, 121 aa, Artificial Sequence
  Chemically Synthesized
QVQLQESGGGLVQAGGSLRLSCAASGTIFPTYIMGWYRQAPGKEREFVAGITVGGTTYYADSVKGRFTISRDNAKNTVYLQMNSLKPEDTAVYYCAAHNSAVLRSTQHGYWGQGTQVTVSS

SEQ ID NO: 1831 - protein, 117 aa, Artificial Sequence
  Chemically Synthesized
QVQLQESGGGLVQAGGSLRLSCAASGTISLPAYMGWYRQAPGKEREFVAAIGYGAITYADSVKGRFTISRDNAKNTVYLQMNSLKPEDTAVYYCAAYLAGNQYLDYWGQGTQVTVSS

SEQ ID NO: 1832 - protein, 126 aa, Artificial Sequence
  Chemically Synthesized
QVQLQESGGGLVQAGGSLRLSCAASGNIFPSLWMGWYRQAPGKEREFVAAISSGSSTYYADSVKGRFTISRDNAKNTVYLQMNSLKPEDTAVYYCAVSYQLERGFDHVDPRDLDYWGQGTQVTVSS

SEQ ID NO: 1833 - protein, 118 aa, Artificial Sequence
  Chemically Synthesized
QVQLQESGGGLVQAGGSLRLSCAASGYIFGDRPMGWYRQAPGKEREFVASIAHGANTNYADSVKGRFTISRDNAKNTVYLQMNSLKPEDTAVYYCAVDRDADRHFRYWGQGTQVTVSS

SEQ ID NO: 1834 - protein, 112 aa, Artificial Sequence
  Chemically Synthesized
QVQLQESGGGLVQAGGSLRLSCAASGSISSRVMGWYRQAPGKEREFVATIGNYADSVKGRFTISRDNAKNTVYLQMNSLKPEDTAVYYCAAPSDLFSEYGYWGQGTQVTVSS

SEQ ID NO: 1835 - protein, 117 aa, Artificial Sequence
  Chemically Synthesized
QVQLQESGGGLVQAGGSLRLSCAASGSIFRTDEMGWYRQAPGKERELVATISPGTSTNYADSVKGRFTISRDNAKNTVYLQMNSLKPEDTAVYYCAVFETLTTFLYWGQGTQVTVSS

SEQ ID NO: 1836 - protein, 118 aa, Artificial Sequence
  Chemically Synthesized
QVQLQESGGGLVQAGGSLRLSCAASGSISTDPAMGWYRQAPGKEREFVASIDAGGSTNYADSVKGRFTISRDNAKNTVYLQMNSLKPEDTAVYYCAARRVDERDYDYWGQGTQVTVSS

SEQ ID NO: 1837 - protein, 122 aa, Artificial Sequence
  Chemically Synthesized
QVQLQESGGGLVQAGGSLRLSCAASGNISGEIGMGWYRQAPGKERELVATISTGGSTNYADSVKGRFTISRDNAKNTVYLQMNSLKPEDTAVYYCAVAVYYADYLWFDFYYWGQGTQVTVSS

SEQ ID NO: 1838 - protein, 118 aa, Artificial Sequence
  Chemically Synthesized
QVQLQESGGGLVQAGGSLRLSCAASGTISLNGGMGWYRQAPGKERELVATITIGGSTYYADSVKGRFTISRDNAKNTVYLQMNSLKPEDTAVYYCAAGPQDERWLFYWGQGTQVTVSS

SEQ ID NO: 1839 - protein, 118 aa, Artificial Sequence
  Chemically Synthesized
QVQLQESGGGLVQAGGSLRLSCAASGNISVTGGMGWYRQAPGKERELVATIASGSSTNYADSVKGRFTISRDNAKNTVYLQMNSLKPEDTAVYYCAAYEAGYWWYSYWGQGTQVTVSS

SEQ ID NO: 1840 - protein, 118 aa, Artificial Sequence
  Chemically Synthesized
QVQLQESGGGLVQAGGSLRLSCAASGNIFTGWSMGWYRQAPGKERELVASIGYGTSTNYADSVKGRFTISRDNAKNTVYLQMNSLKPEDTAVYYCAVWYQQYGNYYYWGQGTQVTVSS

SEQ ID NO: 1841 - protein, 118 aa, Artificial Sequence
  Chemically Synthesized
QVQLQESGGGLVQAGGSLRLSCAASGNIFRWTVMGWYRQAPGKERELVAGINYGTSTYYADSVKGRFTISRDNAKNTVYLQMNSLKPEDTAVYYCAAYTPRRRYHYYWGQGTQVTVSS

SEQ ID NO: 1842 - protein, 119 aa, Artificial Sequence
  Chemically Synthesized
QVQLQESGGGLVQAGGSLRLSCAASGNIFSIVFMGWYRQAPGKERELVAAIGLGATTNYADSVKGRFTISRDNAKNTVYLQMNSLKPEDTAVYYCAVYAYSDPWWHYYWGQGTQVTVSS

SEQ ID NO: 1843 - protein, 121 aa, Artificial Sequence
  Chemically Synthesized
QVQLQESGGGLVQAGGSLRLSCAASGNIFPRYMGWYRQAPGKERELVAGIARGTSTNYADSVKGRFTISRDNAKNTVYLQMNSLKPEDTAVYYCAVRYYKIYGYATGHPYWGQGTQVTVSS

SEQ ID NO: 1844 - protein, 121 aa, Artificial Sequence
  Chemically Synthesized
QVQLQESGGGLVQAGGSLRLSCAASGTISYYWDMGWYRQAPGKEREFVAGINNGAITYYADSVKGRFTISRDNAKNTVYLQMNSLKPEDTAVYYCAVYQWYARSTLLFIYWGQGTQVTVSS

SEQ ID NO: 1845 - protein, 118 aa, Artificial Sequence
  Chemically Synthesized
QVQLQESGGGLVQAGGSLRLSCAASGTIFYYGYMGWYRQAPGKEREFVATISVGAITNYADSVKGRFTISRDNAKNTVYLQMNSLKPEDTAVYYCAAGYRQHYKHYYWGQGTQVTVSS

SEQ ID NO: 1846 - protein, 122 aa, Artificial Sequence
  Chemically Synthesized
QVQLQESGGGLVQAGGSLRLSCAASGNISDYPVMGWYRQAPGKERELVAGIGRGTNTYYADSVKGRFTISRDNAKNTVYLQMNSLKPEDTAVYYCAAYPGDSWYGYDGLSYWGQGTQVTVSS

SEQ ID NO: 1847 - protein, 118 aa, Artificial Sequence
  Chemically Synthesized
QVQLQESGGGLVQAGGSLRLSCAASGSIFRDYYMGWYRQAPGKEREFVAGITGGSITYYADSVKGRFTISRDNAKNTVYLQMNSLKPEDTAVYYCAARNYRSTNYAYWGQGTQVTVSS

SEQ ID NO: 1848 - protein, 123 aa, Artificial Sequence
  Chemically Synthesized
QVQLQESGGGLVQAGGSLRLSCAASGSIFGAPDMGWYRQAPGKEREFVASITDGGSTNYADSVKGRFTISRDNAKNTVYLQMNSLKPEDTAVYYCAVRYAFDRDYEGGRHRYWGQGTQVTVSS

SEQ ID NO: 1849 - protein, 121 aa, Artificial Sequence
  Chemically Synthesized
QVQLQESGGGLVQAGGSLRLSCAASGYISPVGTMGWYRQAPGKERELLPLLILVLVPYADSVKGRFTISRDNAKNTVYLQMNSLKPEDTAVYYCAARGTEYADVLGGYDYWGQGTQVTVSS

SEQ ID NO: 1850 - protein, 122 aa, Artificial Sequence
  Chemically Synthesized
QVQLQESGGGLVQAGGSLRLSCAASGTIFLFSYMGWYRQAPGKEREFVAAIDDGGTTYYADSVKGRFTISRDNAKNTVYLQMNSLKPEDTAVYYCAAQGTTYDDYSAPLYYWGQGTQVTVSS

SEQ ID NO: 1851 - protein, 118 aa, Artificial Sequence
  Chemically Synthesized
QVQLQESGGGLVQAGGSLRLSCAASGNIFDSANMGWYRQAPGKERELVASIDYGGNTYYADSVKGRFTISRDNAKNTVYLQMNSLKPEDTAVYYCAVTIFTFAQHLYWGQGTQVTVSS

SEQ ID NO: 1852 - protein, 122 aa, Artificial Sequence
  Chemically Synthesized
QVQLQESGGGLVQAGGSLRLSCAASGTISRSYWMGWYRQAPGKEREFVATIAAGSNTYYADSVKGRFTISRDNAKNTVYLQMNSLKPEDTAVYYCAALYYHYTYYLGSFAYWGQGTQVTVSS

SEQ ID NO: 1853 - protein, 118 aa, Artificial Sequence
  Chemically Synthesized
QVQLQESGGGLVQAGGSLRLSCAASGYIFERYIMGWYRQAPGKEREFVASISYGGITNYADSVKGRFTISRDNAKNTVYLQMNSLKPEDTAVYYCAAGKIPSYYYPYWGQGTQVTVSS

SEQ ID NO: 1854 - protein, 122 aa, Artificial Sequence
  Chemically Synthesized
QVQLQESGGGLVQAGGSLRLSCAASGSIFTDGYMGWYRQAPGKERELVAAINSGGTTYYADSVKGRFTISRDNAKNTVYLQMNSLKPEDTAVYYCAVIQLGDFYDTYALSYWGQGTQVTVSS

SEQ ID NO: 1855 - protein, 118 aa, Artificial Sequence
  Chemically Synthesized
QVQLQESGGGLVQAGGSLRLSCAASGNIFYIRIMGWYRQAPGKERELVAAISYGANTYYADSVKGRFTISRDNAKNTVYLQMNSLKPEDTAVYYCAAYYAVPFLHTYWGQGTQVTVSS

SEQ ID NO: 1856 - protein, 125 aa, Artificial Sequence
  Chemically Synthesized
QVQLQESGGGLVQAGGSLRLSCAASGNIFPNSTMGWYRQAPGKERELVATIAIGGNTNYADSVKGRFTISRDNAKNTVYLQMNSLKPEDTAVYYCAADSYSGYPLWRVYWQHDYWGQGTQVTVSS

SEQ ID NO: 1857 - protein, 122 aa, Artificial Sequence
  Chemically Synthesized
QVQLQESGGGLVQAGGSLRLSCAASGSISDYTDMGWYRQAPGKEREFVAGIAPGGITYYADSVKGRFTISRDNAKNTVYLQMNSLKPEDTAVYYCAANYYDANLGDSVLDYWGQGTQVTVSS

SEQ ID NO: 1858 - protein, 118 aa, Artificial Sequence
  Chemically Synthesized
QVQLQESGGGLVQAGGSLRLSCAASGSISHRVNMGWYRQAPGKERELVAAISYGSNTYYADSVKGRFTISRDNAKNTVYLQMNSLKPEDTAVYYCAAYYLYYHSHGYWGQGTQVTVSS

SEQ ID NO: 1859 - protein, 126 aa, Artificial Sequence
  Chemically Synthesized
QVQLQESGGGLVQAGGSLRLSCAASGTIFRPATMGWYRQAPGKERELVASITNGGNTNYADSVKGRFTISRDNAKNTVYLQMNSLKPEDTAVYYCAAYRYRWQLLYSRPGGYHSYWGQGTQVTVSS

SEQ ID NO: 1860 - protein, 110 aa, Artificial Sequence
  Chemically Synthesized
QVQLQESGGGLVQAGGSLRLSCAASGNISGGWQMGWYRQAPGKEREFVASIAYGTTTYYADSVKGRFTISRDNAKNTVYLQMNSLKPEDTAVYYCAVGYWGQGTQVTVSS

SEQ ID NO: 1861 - protein, 118 aa, Artificial Sequence
  Chemically Synthesized
QVQLQESGGGLVQAGGSLRLSCAASGSIFYGLYMGWYRQAPGKERELVASINAGATTYYADSVKGRFTISRDNAKNTVYLQMNSLKPEDTAVYYCAAYSSPSVPVIYWGQGTQVTVSS

SEQ ID NO: 1862 - protein, 118 aa, Artificial Sequence
  Chemically Synthesized
QVQLQESGGGLVQAGGSLRLSCAASGYIFWIFRMGWYRQAPGKEREFVATITGGGSTYYADSVKGRFTISRDNAKNTVYLQMNSLKPEDTAVYYCAVRRVSTRTHVYWGQGTQVTVSS

SEQ ID NO: 1863 - protein, 118 aa, Artificial Sequence
  Chemically Synthesized
QVQLQESGGGLVQAGGSLRLSCAASGSIFTLYLMGWYRQAPGKEREFVASISHGGNTYYADSVKGRFTISRDNAKNTVYLQMNSLKPEDTAVYYCAVDYTSLDAYDYWGQGTQVTVSS

SEQ ID NO: 1864 - protein, 118 aa, Artificial Sequence
  Chemically Synthesized
QVQLQESGGGLVQAGGSLRLSCAASGSISWTRRMGWYRQAPGKEREFVAAITSGASTYYADSVKGRFTISRDNAKNTVYLQMNSLKPEDTAVYYCAASQWIRSSLRYWGQGTQVTVSS

SEQ ID NO: 1865 - protein, 109 aa, Artificial Sequence
  Chemically Synthesized
QVQLQESGGGLVQAGGSLRLSCAASGTIFNEAQMGWYRQAPGKEREFVAAIDSGASTNYADSVKGRFTISRDNAKNTVYLQMNSLKPEDTAVYYCAFYWGQGTQVTVSS

SEQ ID NO: 1866 - protein, 118 aa, Artificial Sequence
  Chemically Synthesized
QVQLQESGGGLVQAGGSLRLSCAASGYISHSDRMGWYRQAPGKEREFVATINPGSTTNYADSVKGRFTISRDNAKNTVYLQMNSLKPEDTAVYYCAANRLIVWQHYYWGQGTQVTVSS

SEQ ID NO: 1867 - protein, 121 aa, Artificial Sequence
  Chemically Synthesized
QVQLQESGGGLVQAGGSLRLSCAASGSISVRTMGWYRQAPGKERELVASINDGTITYYADSVKGRFTISRDNAKNTVYLQMNSLKPEDTAVYYCAVHTDVYDESQTYHFYWGQGTQVTVSS

SEQ ID NO: 1868 - protein, 122 aa, Artificial Sequence
  Chemically Synthesized
QVQLQESGGGLVQAGGSLRLSCAASGNIFRTRRMGWYRQAPGKERELVAGIGEGSNTYYADSVKGRFTISRDNAKNTVYLQMNSLKPEDTAVYYCAALNRKRKQYPPWHYYWGQGTQVTVSS

SEQ ID NO: 1869 - protein, 118 aa, Artificial Sequence
  Chemically Synthesized
QVQLQESGGGLVQAGGSLRLSCAASGNIFYRRYMGWYRQAPGKEREFVASIARGGTTNYADSVKGRFTISRDNAKNTVYLQMNSLKPEDTAVYYCAVYAYGGRHLTYWGQGTQVTVSS

SEQ ID NO: 1870 - protein, 123 aa, Artificial Sequence
  Chemically Synthesized
QVQLQESGGGLVQAGGSLRLSCAASGSIFPWYAMGWYRQAPGKEREFVASISYGASTYYADSVKGRFTISRDNAKNTVYLQMNSLKPEDTAVYYCAVKLYPLHYVDYTYHRYWGQGTQVTVSS

SEQ ID NO: 1871 - protein, 122 aa, Artificial Sequence
  Chemically Synthesized
QVQLQESGGGLVQAGGSLRLSCAASGYIFATNNMGWYRQAPGKERELVATIGRGTTTYYADSVKGRFTISRDNAKNTVYLQMNSLKPEDTAVYYCAVGTASYRNRYRYFDYWGQGTQVTVSS

SEQ ID NO: 1872 - protein, 118 aa, Artificial Sequence
  Chemically Synthesized
QVQLQESGGGLVQAGGSLRLSCAASGSISYDYYMGWYRQAPGKERELVAGITRGAITNYADSVKGRFTISRDNAKNTVYLQMNSLKPEDTAVYYCAVRNATYGYHAYWGQGTQVTVSS

SEQ ID NO: 1873 - protein, 122 aa, Artificial Sequence
  Chemically Synthesized
QVQLQESGGGLVQAGGSLRLSCAASGSISPRTVMGWYRQAPGKERELVATIGFGGTTNYADSVKGRFTISRDNAKNTVYLQMNSLKPEDTAVYYCAVVWPLYVSTGWHHGYWGQGTQVTVSS

SEQ ID NO: 1874 - protein, 118 aa, Artificial Sequence
  Chemically Synthesized
QVQLQESGGGLVQAGGSLRLSCAASGTISSPYSMGWYRQAPGKERELVAGIDNGAITNYADSVKGRFTISRDNAKNTVYLQMNSLKPEDTAVYYCAVQSSVGTYHVYWGQGTQVTVSS

SEQ ID NO: 1875 - protein, 122 aa, Artificial Sequence
  Chemically Synthesized
QVQLQESGGGLVQAGGSLRLSCAASGNIFVAQYMGWYRQAPGKEREFVAGITDGASTYYADSVKGRFTISRDNAKNTVYLQMNSLKPEDTAVYYCAAYYQYYDWAWRRHRYWGQGTQVTVSS

SEQ ID NO: 1876 - protein, 121 aa, Artificial Sequence
  Chemically Synthesized
QVQLQESGGGLVQAGGSLRLSCAASGSISYVYAMGWYRQAPGKEREFVAAIGGGGITYYADSVKGRFTISRDNAKNTVYLQMNSLKPEDTAVYYCAAKYTQGYWYDESMYWGQGTQVTVSS

SEQ ID NO: 1877 - protein, 126 aa, Artificial Sequence
  Chemically Synthesized
QVQLQESGGGLVQAGGSLRLSCAASGYIFGRAYMGWYRQAPGKEREFVAAITGGSNTYYADSVKGRFTISRDNAKNTVYLQMNSLKPEDTAVYYCAAYDPPSYGGRENRRLYLDYWGQGTQVTVSS

SEQ ID NO: 1878 - protein, 113 aa, Artificial Sequence
  Chemically Synthesized
QVQLQESGGGLVQAGGSLRLSCAASGYIMGWYRQAPGKEREFVAGINVGSNTYYADSVKGRFTISRDNAKNTVYLQMNSLKPEDTAVYYCAVAGGAGYYHGYWGQGTQVTVSS

SEQ ID NO: 1879 - protein, 119 aa, Artificial Sequence
  Chemically Synthesized
QVQLQESGGGLVQAGGSLRLSCAASGTIFVVLYMGWYRQAPGKEREFVAGIALGGTTYYADSVKGRFTISRDNAKNTVYLQMNSLKPEDTAVYYCAVLDNTSFTTVTYWGQGTQVTVSS

SEQ ID NO: 1880 - protein, 118 aa, Artificial Sequence
  Chemically Synthesized
QVQLQESGGGLVQAGGSLRLSCAASGNISPLRYMGWYRQAPGKEREFVAAINGGSTTYYADSVKGRFTISRDNAKNTVYLQMNSLKPEDTAVYYCAAGYRYGRALGYWGQGTQVTVSS

SEQ ID NO: 1881 - protein, 126 aa, Artificial Sequence
  Chemically Synthesized
QVQLQESGGGLVQAGGSLRLSCAASGTISLFSVMGWYRQAPGKEREFVAGITYGTTTYYADSVKGRFTISRDNAKNTVYLQMNSLKPEDTAVYYCAAFAGYLRDPYTYLRIDHVYWGQGTQVTVSS

SEQ ID NO: 1882 - protein, 125 aa, Artificial Sequence
  Chemically Synthesized
QVQLQESGGGLVQAGGSLRLSCAASGSISAYAMGWYRQAPGKERELVAAIGWGTTTYYADSVKGRFTISRDNAKNTVYLQMNSLKPEDTAVYYCAAVPYGRYSHEGLYYGFHGYWGQGTQVTVSS

SEQ ID NO: 1883 - protein, 118 aa, Artificial Sequence
  Chemically Synthesized
QVQLQESGGGLVQAGGSLRLSCAASGNIFRYAYMGWYRQAPGKEREFVASITAGAITYYADSVKGRFTISRDNAKNTVYLQMNSLKPEDTAVYYCAVYYVYRYRYGYWGQGTQVTVSS

SEQ ID NO: 1884 - protein, 126 aa, Artificial Sequence
  Chemically Synthesized
QVQLQESGGGLVQAGGSLRLSCAASGTISYLGVMGWYRQAPGKEREFVASIGFGGNTNYADSVKGRFTISRDNAKNTVYLQMNSLKPEDTAVYYCAVRDVDNGYGGIRRDNDLTYWGQGTQVTVSS

SEQ ID NO: 1885 - protein, 118 aa, Artificial Sequence
  Chemically Synthesized
QVQLQESGGGLVQAGGSLRLSCAASGNIFFWRYMGWYRQAPGKERELVAAISIGGSTYYADSVKGRFTISRDNAKNTVYLQMNSLKPEDTAVYYCAVTGSDPDVLAYWGQGTQVTVSS

SEQ ID NO: 1886 - protein, 118 aa, Artificial Sequence
  Chemically Synthesized
QVQLQESGGGLVQAGGSLRLSCAASGYISKRTIMGWYRQAPGKEREFVAAISRGTITYYADSVKGRFTISRDNAKNTVYLQMNSLKPEDTAVYYCAAQRYDYKYFPYWGQGTQVTVSS

SEQ ID NO: 1887 - protein, 122 aa, Artificial Sequence
  Chemically Synthesized
QVQLQESGGGLVQAGGSLRLSCAASGTIFGYVTMGWYRQAPGKERELVATIARGGITNYADSVKGRFTISRDNAKNTVYLQMNSLKPEDTAVYYCAAKNYFSYFTYRDFAYWGQGTQVTVSS

SEQ ID NO: 1888 - protein, 118 aa, Artificial Sequence
  Chemically Synthesized
QVQLQESGGGLVQAGGSLRLSCAASGSIFGSRLMGWYRQAPGKERELVASITKGTITNYADSVKGRFTISRDNAKNTVYLQMNSLKPEDTAVYYCAASRRAGYGYRYWGQGTQVTVSS

SEQ ID NO: 1889 - protein, 122 aa, Artificial Sequence
  Chemically Synthesized
QVQLQESGGGLVQAGGSLRLSCAASGYISSRRPMGWYRQAPGKEREFVAAIGLGGITYYADSVKGRFTISRDNAKNTVYLQMNSLKPEDTAVYYCAVHRRTRDTWVGTYYYWGQGTQVTVSS

SEQ ID NO: 1890 - protein, 113 aa, Artificial Sequence
  Chemically Synthesized
QVQLQESGGGLVQAGGSLRLSCAASGSIFDRKQMGWYRQAPGKERELVATINAGAITNYADSVKGRFTISRDNAKNTVYLQMNSLKPEDTAVYYCATLWNFYWGQGTQVTVSS

SEQ ID NO: 1891 - protein, 118 aa, Artificial Sequence
  Chemically Synthesized
QVQLQESGGGLVQAGGSLRLSCAASGYISPSSYMGWYRQAPGKERELVATINYGGITNYADSVKGRFTISRDNAKNTVYLQMNSLKPEDTAVYYCAVEGGRRWKYGYWGQGTQVTVSS

SEQ ID NO: 1892 - protein, 118 aa, Artificial Sequence
  Chemically Synthesized
QVQLQESGGGLVQAGGSLRLSCAASGTISFLYYMGWYRQAPGKEREFVAGITYGSNTNYADSVKGRFTISRDNAKNTVYLQMNSLKPEDTAVYYCAVWRWRRVHHPYWGQGTQVTVSS

SEQ ID NO: 1893 - protein, 122 aa, Artificial Sequence
  Chemically Synthesized
QVQLQESGGGLVQAGGSLRLSCAASGYIFRRDVMGWYRQAPGKEREFVAAIDAGGTTYYADSVKGRFTISRDNAKNTVYLQMNSLKPEDTAVYYCAAIDYRQDEEYPWHLYWGQGTQVTVSS

SEQ ID NO: 1894 - protein, 126 aa, Artificial Sequence
  Chemically Synthesized
QVQLQESGGGLVQAGGSLRLSCAASGTISPLGYMGWYRQAPGKEREFVATIAGGSSTNYADSVKGRFTISRDNAKNTVYLQMNSLKPEDTAVYYCAAVYDPYVLGLPEFVSDLYYWGQGTQVTVSS

SEQ ID NO: 1895 - protein, 118 aa, Artificial Sequence
  Chemically Synthesized
QVQLQESGGGLVQAGGSLRLSCAASGNIFRPTFMGWYRQAPGKEREFVAGIARGGTTNYADSVKGRFTISRDNAKNTVYLQMNSLKPEDTAVYYCAVRYWPRYYHAYWGQGTQVTVSS

SEQ ID NO: 1896 - protein, 117 aa, Artificial Sequence
  Chemically Synthesized
QVQLQESGGGLVQAGGSLRLSCAASGSISGDYMGWYRQAPGKEREFVASISVGTSTYYADSVKGRFTISRDNAKNTVYLQMNSLKPEDTAVYYCAAYDGRNADLRYWGQGTQVTVSS

SEQ ID NO: 1897 - protein, 125 aa, Artificial Sequence
  Chemically Synthesized
QVQLQESGGGLVQAGGSLRLSCAASGYIFTVYMGWYRQAPGKEREFVAAITYGGNTYYADSVKGRFTISRDNAKNTVYLQMNSLKPEDTAVYYCAAIEWSTLGEYYSWSSDLSYWGQGTQVTVSS

SEQ ID NO: 1898 - protein, 118 aa, Artificial Sequence
  Chemically Synthesized
QVQLQESGGGLVQAGGSLRLSCAASGNISTNIQMGWYRQAPGKEREFVAAIDSGTTTNYADSVKGRFTISRDNAKNTVYLQMNSLKPEDTAVYYCAVYYQDVTDYLYWGQGTQVTVSS

SEQ ID NO: 1899 - protein, 118 aa, Artificial Sequence
  Chemically Synthesized
QVQLQESGGGLVQAGGSLRLSCAASGSIFDRVWMGWYRQAPGKERELVASISGGANTYYADSVKGRFTISRDNAKNTVYLQMNSLKPEDTAVYYCAVGVYEKDYHIYWGQGTQVTVSS

SEQ ID NO: 1900 - protein, 126 aa, Artificial Sequence
  Chemically Synthesized
QVQLQESGGGLVQAGGSLRLSCAASGSIFFVLFMGWYRQAPGKERELVAGIGTGGITYYADSVKGRFTISRDNAKNTVYLQMNSLKPEDTAVYYCAVYDWYWWRWVQPRWSSHAYWGQGTQVTVSS

SEQ ID NO: 1901 - protein, 123 aa, Artificial Sequence
  Chemically Synthesized
QVQLQESGGGLVQAGGSLRLSCAASGTIFFYDIMGWYRQAPGKERELVATIAGGSTTYYADSVKGRFTISRDNAKNTVYLQMNSLKPEDTAVYYCAVAPWGGGYYYVAYLAYWGQGTQVTVSS

SEQ ID NO: 1902 - protein, 118 aa, Artificial Sequence
  Chemically Synthesized
QVQLQESGGGLVQAGGSLRLSCAASGNISDYVGMGWYRQAPGKERELVAAITYGSSTYYADSVKGRFTISRDNAKNTVYLQMNSLKPEDTAVYYCAVGGDDIPYLGYWGQGTQVTVSS

SEQ ID NO: 1903 - protein, 121 aa, Artificial Sequence
  Chemically Synthesized
QVQLQESGGGLVQAGGSLRLSCAASGSIFLLYSMGWYRQAPGKEREFVATINGAITNYADSVKGRFTISRDNAKNTVYLQMNSLKPEDTAVYYCAAQWLYSAYSSFRHDYWGQGTQVTVSS

SEQ ID NO: 1904 - protein, 118 aa, Artificial Sequence
  Chemically Synthesized
QVQLQESGGGLVQAGGSLRLSCAASGNIFGPDDMGWYRQAPGKERELVAGIGDGGSTYYADSVKGRFTISRDNAKNTVYLQMNSLKPEDTAVYYCAAYYDKRIDFGYWGQGTQVTVSS

SEQ ID NO: 1905 - protein, 117 aa, Artificial Sequence
  Chemically Synthesized
QVQLQESGGGLVQAGGSLRLSCAASGTIFSRQDMGWYRQAPGKERELVATITRGAITYYADSVKGRFTISRDNAKNTVYLQMNSLKPEDTAVYYCAALLRLNPSFYWGQGTQVTVSS

SEQ ID NO: 1906 - protein, 118 aa, Artificial Sequence
  Chemically Synthesized
QVQLQESGGGLVQAGGSLRLSCAASGSISRSRYMGWYRQAPGKERELVASINPGSTTNYADSVKGRFTISRDNAKNTVYLQMNSLKPEDTAVYYCAVTRYYLRRYVYWGQGTQVTVSS

SEQ ID NO: 1907 - protein, 123 aa, Artificial Sequence
  Chemically Synthesized
QVQLQESGGGLVQAGGSLRLSCAASGNISVRAQMGWYRQAPGKEREFVAAIAGRGGITYYADSVKGRFTISRDNAKNTVYLQMNSLKPEDTAVYYCAAFEALPSIYAWYFLYWGQGTQVTVSS

SEQ ID NO: 1908 - protein, 121 aa, Artificial Sequence
  Chemically Synthesized
QVQLQESGGGLVQAGGSLRLSCAASGTIFPASMGWYRQAPGKEREFVAGISQGGSTNYADSVKGRFTISRDNAKNTVYLQMNSLKPEDTAVYYCAAFGTYDYLESAGHFYWGQGTQVTVSS

SEQ ID NO: 1909 - protein, 126 aa, Artificial Sequence
  Chemically Synthesized
QVQLQESGGGLVQAGGSLRLSCAASGYISNNPRMGWYRQAPGKEREFVAGINRGSTTYYADSVKGRFTISRDNAKNTVYLQMNSLKPEDTAVYYCAAAGKRRWNKDRNREYGYVYWGQGTQVTVSS

SEQ ID NO: 1910 - protein, 118 aa, Artificial Sequence
  Chemically Synthesized
QVQLQESGGGLVQAGGSLRLSCAASGSISDYPYMGWYRQAPGKERELVAAIDSGTTTNYADSVKGRFTISRDNAKNTVYLQMNSLKPEDTAVYYCAAYAHHLDGYYYWGQGTQVTVSS

SEQ ID NO: 1911 - protein, 118 aa, Artificial Sequence
  Chemically Synthesized
QVQLQESGGGLVQAGGSLRLSCAASGYISRQRYMGWYRQAPGKEREFVAAISAGASTYYADSVKGRFTISRDNAKNTVYLQMNSLKPEDTAVYYCAAYFTRYYRYVYWGQGTQVTVSS

SEQ ID NO: 1912 - protein, 122 aa, Artificial Sequence
  Chemically Synthesized
QVQLQESGGGLVQAGGSLRLSCAASGSISGYGYMGWYRQAPGKEREFVATIGGGGTTYYADSVKGRFTISRDNAKNTVYLQMNSLKPEDTAVYYCAVVGRHYWYQVYRHTYWGQGTQVTVSS

SEQ ID NO: 1913 - protein, 118 aa, Artificial Sequence
  Chemically Synthesized
QVQLQESGGGLVQAGGSLRLSCAASGNIFNTNDMGWYRQAPGKERELVAAISYGTSTNYADSVKGRFTISRDNAKNTVYLQMNSLKPEDTAVYYCAADDYLYDVHGYWGQGTQVTVSS

SEQ ID NO: 1914 - protein, 118 aa, Artificial Sequence
  Chemically Synthesized
QVQLQESGGGLVQAGGSLRLSCAASGSIFTSGFMGWYRQAPGKERELVATINPGTNTNYADSVKGRFTISRDNAKNTVYLQMNSLKPEDTAVYYCAVQNLRVPYHGYWGQGTQVTVSS

SEQ ID NO: 1915 - protein, 126 aa, Artificial Sequence
  Chemically Synthesized
QVQLQESGGGLVQAGGSLRLSCAASGNISYGYLMGWYRQAPGKEREFVAGIGKGTSTYYADSVKGRFTISRDNAKNTVYLQMNSLKPEDTAVYYCAAVDGYDSRHGGPYYGVHYYWGQGTQVTVSS

SEQ ID NO: 1916 - protein, 122 aa, Artificial Sequence
  Chemically Synthesized
QVQLQESGGGLVQAGGSLRLSCAASGYISQQKNMGWYRQAPGKEREFVASIGRGAITNYADSVKGRFTISRDNAKNTVYLQMNSLKPEDTAVYYCAAFRHNYVYAFWRHGYWGQGTQVTVSS

SEQ ID NO: 1917 - protein, 122 aa, Artificial Sequence
  Chemically Synthesized
QVQLQESGGGLVQAGGSLRLSCAASGTISYDYYMGWYRQAPGKEREFVAAIAIGSITNYADSVKGRFTISRDNAKNTVYLQMNSLKPEDTAVYYCAAHARDPKDPRYAHLYWGQGTQVTVSS

SEQ ID NO: 1918 - protein, 122 aa, Artificial Sequence
  Chemically Synthesized
QVQLQESGGGLVQAGGSLRLSCAASGSISWPWFMGWYRQAPGKERELVAAIGVGGITYYADSVKGRFTISRDNAKNTVYLQMNSLKPEDTAVYYCAAQRNDASAILYTHNYWGQGTQVTVSS

SEQ ID NO: 1919 - protein, 120 aa, Artificial Sequence
  Chemically Synthesized
QVQLQESGGGLVQAGGSLRLSCAASGSISVYAGMGWYRQAPGKEREFVAAINYGANTYYADSVKGRFTISRDNAKNTVYLQMNSLKPEDTAVYYCAVVYYQRADGNYYYWGQGTQVTVSS

SEQ ID NO: 1920 - protein, 118 aa, Artificial Sequence
  Chemically Synthesized
QVQLQESGGGLVQAGGSLRLSCAASGYISGYYYMGWYRQAPGKERELVASIAQGSTTNYADSVKGRFTISRDNAKNTVYLQMNSLKPEDTAVYYCAVYALDISGHAYWGQGTQVTVSS

SEQ ID NO: 1921 - protein, 118 aa, Artificial Sequence
  Chemically Synthesized
QVQLQESGGGLVQAGGSLRLSCAASGNIFGGKYMGWYRQAPGKEREFVATIALGGNTNYADSVKGRFTISRDNAKNTVYLQMNSLKPEDTAVYYCAVQDRTPLGFYYWGQGTQVTVSS

SEQ ID NO: 1922 - protein, 125 aa, Artificial Sequence
  Chemically Synthesized
QVQLQESGGGLVQAGGSLRLSCAASGNISWGYMGWYRQAPGKERELVATIARGTTTYYADSVKGRFTISRDNAKNTVYLQMNSLKPEDTAVYYCAVDYQADVYEDYLYTQWHAYWGQGTQVTVSS

SEQ ID NO: 1923 - protein, 121 aa, Artificial Sequence
  Chemically Synthesized
QVQLQESGGGLVQAGGSLRLSCAASGTIMGWYRQAPGKERELVATIAYGTNTNYADSVKGRFTISRDNAKNTVYLQMNSLKPEDTAVYYCAAKQFPYRNAYYWPREQHPYWGQGTQVTVSS

SEQ ID NO: 1924 - protein, 126 aa, Artificial Sequence
  Chemically Synthesized
QVQLQESGGGLVQAGGSLRLSCAASGSISTKSVMGWYRQAPGKEREFVAGISKGGITNYADSVKGRFTISRDNAKNTVYLQMNSLKPEDTAVYYCAAGILYEPTRTPYLRRVLVYWGQGTQVTVSS

SEQ ID NO: 1925 - protein, 117 aa, Artificial Sequence
  Chemically Synthesized
QVQLQESGGGLVQAGGSLRLSCAASGYIFYYDNMGWYRQAPGKERELVATIGRGGITNYADSVKGRFTISRDNAKNTVYLQMNSLKPEDTAVYYCAARGSVYLHYYWGQGTQVTVSS

SEQ ID NO: 1926 - protein, 124 aa, Artificial Sequence
  Chemically Synthesized
QVQLQESGGGLVQAGGSLRLSCAASGSISADDVMGWYRQAPGKEREFVAGIASVVIPYADSVKGRFTISRDNAKNTVYLQMNSLKPEDTAVYYCAVGLGDSYADPVYYQYHGYWGQGTQVTVSS

SEQ ID NO: 1927 - protein, 118 aa, Artificial Sequence
  Chemically Synthesized
QVQLQESGGGLVQAGGSLRLSCAASGTIFNWIVMGWYRQAPGKERELVAGIGGGTSTYYADSVKGRFTISRDNAKNTVYLQMNSLKPEDTAVYYCAAPTDGVQAFYYWGQGTQVTVSS

SEQ ID NO: 1928 - protein, 122 aa, Artificial Sequence
  Chemically Synthesized
QVQLQESGGGLVQAGGSLRLSCAASGTISVYSPMGWYRQAPGKEREFVAGISYGATTNYADSVKGRFTISRDNAKNTVYLQMNSLKPEDTAVYYCAVWDQANPNLAPIHAYWGQGTQVTVSS

SEQ ID NO: 1929 - protein, 118 aa, Artificial Sequence
  Chemically Synthesized
QVQLQESGGGLVQAGGSLRLSCAASGSISYGSVMGWYRQAPGKERELVAGINWGTITYYADSVKGRFTISRDNAKNTVYLQMNSLKPEDTAVYYCAAYRVRRSRFVYWGQGTQVTVSS

SEQ ID NO: 1930 - protein, 122 aa, Artificial Sequence
  Chemically Synthesized
QVQLQESGGGLVQAGGSLRLSCAASGYIFPIYYMGWYRQAPGKEREFVASINTGGSTYYADSVKGRFTISRDNAKNTVYLQMNSLKPEDTAVYYCAAVIGAYQAWGWDYIYWGQGTQVTVSS

SEQ ID NO: 1931 - protein, 118 aa, Artificial Sequence
  Chemically Synthesized
QVQLQESGGGLVQAGGSLRLSCAASGNISAIDYMGWYRQAPGKEREFVAAIGDGGNTNYADSVKGRFTISRDNAKNTVYLQMNSLKPEDTAVYYCAVYGQWRPWHAYWGQGTQVTVSS

SEQ ID NO: 1932 - protein, 126 aa, Artificial Sequence
  Chemically Synthesized
QVQLQESGGGLVQAGGSLRLSCAASGYIFLLNVMGWYRQAPGKEREFVASINRGSITYYADSVKGRFTISRDNAKNTVYLQMNSLKPEDTAVYYCAASGSPKYTAYFYYATDFIYWGQGTQVTVSS

SEQ ID NO: 1933 - protein, 122 aa, Artificial Sequence
  Chemically Synthesized
QVQLQESGGGLVQAGGSLRLSCAASGTISKYRYMGWYRQAPGKERELVATINRGASTNYADSVKGRFTISRDNAKNTVYLQMNSLKPEDTAVYYCAATSIRRWRENYSFWYWGQGTQVTVSS

SEQ ID NO: 1934 - protein, 122 aa, Artificial Sequence
  Chemically Synthesized
QVQLQESGGGLVQAGGSLRLSCAASGTISRYAWMGWYRQAPGKERELVASITDGGTTYYADSVKGRFTISRDNAKNTVYLQMNSLKPEDTAVYYCAADDGFYYTYRGSLKYWGQGTQVTVSS

SEQ ID NO: 1935 - protein, 118 aa, Artificial Sequence
  Chemically Synthesized
QVQLQESGGGLVQAGGSLRLSCAASGNISNFIYMGWYRQAPGKEREFVATIGVGGTTNYADSVKGRFTISRDNAKNTVYLQMNSLKPEDTAVYYCAAYHGFAWAHWYWGQGTQVTVSS

SEQ ID NO: 1936 - protein, 118 aa, Artificial Sequence
  Chemically Synthesized
QVQLQESGGGLVQAGGSLRLSCAASGNIFRYHAMGWYRQAPGKERELVASINTGGSTNYADSVKGRFTISRDNAKNTVYLQMNSLKPEDTAVYYCAADRGRAAWLYYWGQGTQVTVSS

SEQ ID NO: 1937 - protein, 118 aa, Artificial Sequence
  Chemically Synthesized
QVQLQESGGGLVQAGGSLRLSCAASGTIFVRARMGWYRQAPGKERELVAGITRGGSTYYADSVKGRFTISRDNAKNTVYLQMNSLKPEDTAVYYCAVVRAYVYGHTYWGQGTQVTVSS

SEQ ID NO: 1938 - protein, 118 aa, Artificial Sequence
  Chemically Synthesized
QVQLQESGGGLVQAGGSLRLSCAASGTISRGWAMGWYRQAPGKERELVASIGYGGTTNYADSVKGRFTISRDNAKNTVYLQMNSLKPEDTAVYYCAARSWWRTFHLYWGQGTQVTVSS

SEQ ID NO: 1939 - protein, 122 aa, Artificial Sequence
  Chemically Synthesized
QVQLQESGGGLVQAGGSLRLSCAASGYISRYDWMGWYRQAPGKERELVAAIGAGATTYYADSVKGRFTISRDNAKNTVYLQMNSLKPEDTAVYYCAAAGWYRLPVLADHVYWGQGTQVTVSS

SEQ ID NO: 1940 - protein, 115 aa, Artificial Sequence
  Chemically Synthesized
QVQLQESGGGLVQAGGSLRLSCAASGNIFDAPVMGWYRQAPGKERELVASIDYGGITYADSVKGRFTISRDNAKNTVYLQMNSLKPEDTAVYYCAVGTYDPHYYWGQGTQVTVSS

SEQ ID NO: 1941 - protein, 126 aa, Artificial Sequence
  Chemically Synthesized
QVQLQESGGGLVQAGGSLRLSCAASGTISASGVMGWYRQAPGKEREFVASIGQGAITYYADSVKGRFTISRDNAKNTVYLQMNSLKPEDTAVYYCAATSDPTGYYSGGYDYGYDYWGQGTQVTVSS

SEQ ID NO: 1942 - protein, 118 aa, Artificial Sequence
  Chemically Synthesized
QVQLQESGGGLVQAGGSLRLSCAASGYISPQYDMGWYRQAPGKERELVATIDVGGSTYYADSVKGRFTISRDNAKNTVYLQMNSLKPEDTAVYYCAVADAQNSSLYYWGQGTQVTVSS

SEQ ID NO: 1943 - protein, 126 aa, Artificial Sequence
  Chemically Synthesized
QVQLQESGGGLVQAGGSLRLSCAASGSIFYPDYMGWYRQAPGKERELVASIDSGANTNYADSVKGRFTISRDNAKNTVYLQMNSLKPEDTAVYYCAASVVDTVWGSLIYTLFHTYWGQGTQVTVSS

SEQ ID NO: 1944 - protein, 124 aa, Artificial Sequence
  Chemically Synthesized
QVQLQESGGGLVQAGGSLRLSCAASGYISRRPYMGWYRQAPGKERELVAAIGSGGSTYYADSVKGRFTISRDNAKNTVYLQMNSLKPEDTAVYYCAVAYARRVLTQYYRDYYYWGQGTQVTVSS

SEQ ID NO: 1945 - protein, 118 aa, Artificial Sequence
  Chemically Synthesized
QVQLQESGGGLVQAGGSLRLSCAASGTISVRVAMGWYRQAPGKERELVAAITGGGNTYYADSVKGRFTISRDNAKNTVYLQMNSLKPEDTAVYYCAAGPVTIDGHRYWGQGTQVTVSS

SEQ ID NO: 1946 - protein, 118 aa, Artificial Sequence
  Chemically Synthesized
QVQLQESGGGLVQAGGSLRLSCAASGTISERLDMGWYRQAPGKERELVAAIDRGATTNYADSVKGRFTISRDNAKNTVYLQMNSLKPEDTAVYYCAAYYDGQYYLQYWGQGTQVTVSS

SEQ ID NO: 1947 - protein, 118 aa, Artificial Sequence
  Chemically Synthesized
QVQLQESGGGLVQAGGSLRLSCAASGYIFTKYIMGWYRQAPGKEREFVAGIGAGGITNYADSVKGRFTISRDNAKNTVYLQMNSLKPEDTAVYYCAVVRRGYRSFWYWGQGTQVTVSS

SEQ ID NO: 1948 - protein, 122 aa, Artificial Sequence
  Chemically Synthesized
QVQLQESGGGLVQAGGSLRLSCAASGSIFLDRYMGWYRQAPGKEREFVATIGYGASTYYADSVKGRFTISRDNAKNTVYLQMNSLKPEDTAVYYCAAKLALYYTHVTEFRYWGQGTQVTVSS

SEQ ID NO: 1949 - protein, 122 aa, Artificial Sequence
  Chemically Synthesized
QVQLQESGGGLVQAGGSLRLSCAASGNIFTVRPMGWYRQAPGKERELVAGINSGSTTYYADSVKGRFTISRDNAKNTVYLQMNSLKPEDTAVYYCAARGYVNRWQFYRHTYWGQGTQVTVSS

SEQ ID NO: 1950 - protein, 118 aa, Artificial Sequence
  Chemically Synthesized
QVQLQESGGGLVQAGGSLRLSCAASGYIFPSSYMGWYRQAPGKERELVAAIDYGGSTYYADSVKGRFTISRDNAKNTVYLQMNSLKPEDTAVYYCAVARARRISHPYWGQGTQVTVSS

SEQ ID NO: 1951 - protein, 122 aa, Artificial Sequence
  Chemically Synthesized
QVQLQESGGGLVQAGGSLRLSCAASGYIFLYGYMGWYRQAPGKERELVAAITVGSITYYADSVKGRFTISRDNAKNTVYLQMNSLKPEDTAVYYCAVDGQRYHYDYVYHPYWGQGTQVTVSS

SEQ ID NO: 1952 - protein, 118 aa, Artificial Sequence
  Chemically Synthesized
QVQLQESGGGLVQAGGSLRLSCAASGYIFGVYRMGWYRQAPGKEREFVAGITAGSNTNYADSVKGRFTISRDNAKNTVYLQMNSLKPEDTAVYYCAADDERAWSLGYWGQGTQVTVSS

SEQ ID NO: 1953 - protein, 126 aa, Artificial Sequence
  Chemically Synthesized
QVQLQESGGGLVQAGGSLRLSCAASGYISYTADMGWYRQAPGKERELVAGIGLGGSTYYADSVKGRFTISRDNAKNTVYLQMNSLKPEDTAVYYCAVPRVYLDLGGYSRGQDLWYWGQGTQVTVSS

SEQ ID NO: 1954 - protein, 118 aa, Artificial Sequence
  Chemically Synthesized
QVQLQESGGGLVQAGGSLRLSCAASGYIFQRYSMGWYRQAPGKEREFVASINVGANTYYADSVKGRFTISRDNAKNTVYLQMNSLKPEDTAVYYCAADRHYAWWFRYWGQGTQVTVSS

SEQ ID NO: 1955 - protein, 118 aa, Artificial Sequence
  Chemically Synthesized
QVQLQESGGGLVQAGGSLRLSCAASGNIFLSINMGWYRQAPGKERELVAGIARGGSTNYADSVKGRFTISRDNAKNTVYLQMNSLKPEDTAVYYCAAWYYYASVLTYWGQGTQVTVSS

SEQ ID NO: 1956 - protein, 122 aa, Artificial Sequence
  Chemically Synthesized
QVQLQESGGGLVQAGGSLRLSCAASGTIFRGLSMGWYRQAPGKERELVAAIAGGTTTNYADSVKGRFTISRDNAKNTVYLQMNSLKPEDTAVYYCAVWDPYWWVNNRRHGYWGQGTQVTVSS

SEQ ID NO: 1957 - protein, 118 aa, Artificial Sequence
  Chemically Synthesized
QVQLQESGGGLVQAGGSLRLSCAASGTIFNDADMGWYRQAPGKERELVAAITFGANYLYADSVKGRFTISRDNAKNTVYLQMNSLKPEDTAVYYCAVGDIGSPDYYYWGQGTQVTVSS

SEQ ID NO: 1958 - protein, 122 aa, Artificial Sequence
  Chemically Synthesized
QVQLQESGGGLVQAGGSLRLSCAASGSIFPRFYMGWYRQAPGKEREFVATIADGTTTYYADSVKGRFTISRDNAKNTVYLQMNSLKPEDTAVYYCAVRTLSRGYGYYTHRYWGQGTQVTVSS

SEQ ID NO: 1959 - protein, 117 aa, Artificial Sequence
  Chemically Synthesized
QVQLQESGGGLVQAGGSLRLSCAASGNIFDISAMGWYRQAPGKERELVAAIAIGTTTNYADSVKGRFTISRDNAKNTVYLQMNSLKPEDTAVYYCAAYEPKQVTFYWGQGTQVTVSS

SEQ ID NO: 1960 - protein, 126 aa, Artificial Sequence
  Chemically Synthesized
QVQLQESGGGLVQAGGSLRLSCAASGNIFYSYTMGWYRQAPGKERELVATIGDGGITNYADSVKGRFTISRDNAKNTVYLQMNSLKPEDTAVYYCAVQRVYPYPRGLQLGWPFYYWGQGTQVTVSS

SEQ ID NO: 1961 - protein, 118 aa, Artificial Sequence
  Chemically Synthesized
QVQLQESGGGLVQAGGSLRLSCAASGNISTYLLMGWYRQAPGKEREFVATIDAGANTNYADSVKGRFTISRDNAKNTVYLQMNSLKPEDTAVYYCAVGLYSDRTLAYWGQGTQVTVSS

SEQ ID NO: 1962 - protein, 118 aa, Artificial Sequence
  Chemically Synthesized
QVQLQESGGGLVQAGGSLRLSCAASGNISESSFMGWYRQAPGKERELVATISDGSTTNYADSVKGRFTISRDNAKNTVYLQMNSLKPEDTAVYYCAVYAPSNDVLLYWGQGTQVTVSS

SEQ ID NO: 1963 - protein, 118 aa, Artificial Sequence
  Chemically Synthesized
QVQLQESGGGLVQAGGSLRLSCAASGSISWYYRMGWYRQAPGKEREFVATIGHGTITNYADSVKGRFTISRDNAKNTVYLQMNSLKPEDTAVYYCAVYRWYKHGFAYWGQGTQVTVSS

SEQ ID NO: 1964 - protein, 118 aa, Artificial Sequence
  Chemically Synthesized
QVQLQESGGGLVQAGGSLRLSCAASGNISTPRGMGWYRQAPGKERELVASIAYGSSTNYADSVKGRFTISRDNAKNTVYLQMNSLKPEDTAVYYCAVVLGFYRRYLYWGQGTQVTVSS

SEQ ID NO: 1965 - protein, 117 aa, Artificial Sequence
  Chemically Synthesized
QVQLQESGGGLVQAGGSLRLSCAASGTIFIYYYMGWYRQAPGKEREFVAGIAQGGSTYYADSVKGRFTISRDNAKNTVYLQMNSLKPEDTAVYYCAAYYRFRYHPYWGQGTQVTVSS

SEQ ID NO: 1966 - protein, 118 aa, Artificial Sequence
  Chemically Synthesized
QVQLQESGGGLVQAGGSLRLSCAASGTIFLFTRMGWYRQAPGKEREFVASIDRGSSTYYADSVKGRFTISRDNAKNTVYLQMNSLKPEDTAVYYCAVGKGYRYRHYYWGQGTQVTVSS

SEQ ID NO: 1967 - protein, 118 aa, Artificial Sequence
  Chemically Synthesized
QVQLQESGGGLVQAGGSLRLSCAASGYIFLSTSMGWYRQAPGKERELVATITLGATTYYADSVKGRFTISRDNAKNTVYLQMNSLKPEDTAVYYCAVSVPGGFDLAYWGQGTQVTVSS

SEQ ID NO: 1968 - protein, 122 aa, Artificial Sequence
  Chemically Synthesized
QVQLQESGGGLVQAGGSLRLSCAASGYISRRPYMGWYRQAPGKEREFVAGIGYGTNTYYADSVKGRFTISRDNAKNTVYLQMNSLKPEDTAVYYCAVQRRWQQGVSFGHHYWGQGTQVTVSS

SEQ ID NO: 1969 - protein, 118 aa, Artificial Sequence
  Chemically Synthesized
QVQLQESGGGLVQAGGSLRLSCAASGNIFYFSTMGWYRQAPGKERELVASIGRGGNTNYADSVKGRFTISRDNAKNTVYLQMNSLKPEDTAVYYCAAIWVLRRWHTYWGQGTQVTVSS

SEQ ID NO: 1970 - protein, 115 aa, Artificial Sequence
  Chemically Synthesized
QVQLQESGGGLVQAGGSLRLSCAASGYISPYLYMGWYRQAPGKERELVAAITLGTTTYYADSVKGRFTISRDNAKNTVYLQMNSLKPEDTAVYYCAGEFTTVMYWGQGTQVTVSS

SEQ ID NO: 1971 - protein, 118 aa, Artificial Sequence
  Chemically Synthesized
QVQLQESGGGLVQAGGSLRLSCAASGYIFWPSWMGWYRQAPGKEREFVAAIASGGNTYYADSVKGRFTISRDNAKNTVYLQMNSLKPEDTAVYYCAVLADFEIHYDYWGQGTQVTVSS

SEQ ID NO: 1972 - protein, 125 aa, Artificial Sequence
  Chemically Synthesized
QVQLQESGGGLVQAGGSLRLSCAASGNIFVVLMGWYRQAPGKEREFVASIGTGASTNYADSVKGRFTISRDNAKNTVYLQMNSLKPEDTAVYYCAPGGTQADADHTTYRYPYFYWGQGTQVTVSS

SEQ ID NO: 1973 - protein, 118 aa, Artificial Sequence
  Chemically Synthesized
QVQLQESGGGLVQAGGSLRLSCAASGYIFLPQVMGWYRQAPGKERELVAGISGGGNTYYADSVKGRFTISRDNAKNTVYLQMNSLKPEDTAVYYCAVSYQRGRWLVYWGQGTQVTVSS

SEQ ID NO: 1974 - protein, 122 aa, Artificial Sequence
  Chemically Synthesized
QVQLQESGGGLVQAGGSLRLSCAASGYISRTWYMGWYRQAPGKERELVAAITQGTSTNYADSVKGRFTISRDNAKNTVYLQMNSLKPEDTAVYYCAAKTGNKRRFRYAYVYWGQGTQVTVSS

SEQ ID NO: 1975 - protein, 121 aa, Artificial Sequence
  Chemically Synthesized
QVQLQESGGGLVQAGGSLRLSCAASGTIFVSWIMGWYRQAPGKERELVATITAGTSTYYADSVKGRFTISRDNAKNTVYLQMNSLKPEDTAVYYCAADGYHVDELADAHYWGQGTQVTVSS

SEQ ID NO: 1976 - protein, 123 aa, Artificial Sequence
  Chemically Synthesized
QVQLQESGGGLVQAGGSLRLSCAASGTISLYYSMGWYRQAPGKERELVASIDVGGITYYADSVKGRFTISRDNAKNTVYLQMNSLKPEDTAVYYCAVTDKNGRGDHTADYRYWGQGTQVTVSS

SEQ ID NO: 1977 - protein, 117 aa, Artificial Sequence
  Chemically Synthesized
QVQLQESGGGLVQAGGSLRLSCAASGTILVWLMGWYRQAPGKEREFVAAIARGGNTYYADSVKGRFTISRDNAKNTVYLQMNSLKPEDTAVYYCAAATQYTFPYDYWGQGTQVTVSS

SEQ ID NO: 1978 - protein, 112 aa, Artificial Sequence
  Chemically Synthesized
QVQLQESGGGLVQAGGSLRLSCAASGYMGWYRQAPGKEREFVAAIGLGASTYYADSVKGRFTISRDNAKNTVYLQMNSLKPEDTAVYYCAVRGRWGPKHRYWGQGTQVTVSS

SEQ ID NO: 1979 - protein, 113 aa, Artificial Sequence
  Chemically Synthesized
QVQLQESGGGLVQAGGSLRLSCAASGNISIVPYMGWYRQAPGKEREFVAAISYGSTTNYADSVKGRFTISRDNAKNTVYLQMNSLKPEDTAVYYCAAQTSIYWGQGTQVTVSS

SEQ ID NO: 1980 - protein, 118 aa, Artificial Sequence
  Chemically Synthesized
QVQLQESGGGLVQAGGSLRLSCAASGYISPTENMGWYRQAPGKERELVATIAGGGNTNYADSVKGRFTISRDNAKNTVYLQMNSLKPEDTAVYYCAAYYKYDIPHDYWGQGTQVTVSS

SEQ ID NO: 1981 - protein, 118 aa, Artificial Sequence
  Chemically Synthesized
QVQLQESGGGLVQAGGSLRLSCAASGNISGPDYMGWYRQAPGKEREFVAAIGIGGNTYYADSVKGRFTISRDNAKNTVYLQMNSLKPEDTAVYYCAVGGKEPIIFDYWGQGTQVTVSS

SEQ ID NO: 1982 - protein, 117 aa, Artificial Sequence
  Chemically Synthesized
QVQLQESGGGLVQAGGSLRLSCAASGYIFVSTMGWYRQAPGKERELVASIDHGSNTNYADSVKGRFTISRDNAKNTVYLQMNSLKPEDTAVYYCAANIRSDRLLLYWGQGTQVTVSS

SEQ ID NO: 1983 - protein, 118 aa, Artificial Sequence
  Chemically Synthesized
QVQLQESGGGLVQAGGSLRLSCAASGTIFYATPMGWYRQAPGKEREFVAAIAYGASTYYADSVKGRFTISRDNAKNTVYLQMNSLKPEDTAVYYCAVKPRRHWAHRYWGQGTQVTVSS

SEQ ID NO: 1984 - protein, 112 aa, Artificial Sequence
  Chemically Synthesized
QVQLQESGGGLVQAGGSLRLSCAASGTIFYDYYMGWYRQAPGKEREFVAAIGYGSSTYYADSVKGRFTISRDNAKNTVYLQMNSLKPEDTAVYYCATGYYYWGQGTQVTVSS

SEQ ID NO: 1985 - protein, 119 aa, Artificial Sequence
  Chemically Synthesized
QVQLQESGGGLVQAGGSLRLSCAASGTIFPYGYRMGWYRQAPGKEREFVASIGYGATTYYADSVKGRFTISRDNAKNTVYLQMNSLKPEDTAVYYCAVRTRYWRNHTYWGQGTQVTVSS

SEQ ID NO: 1986 - protein, 118 aa, Artificial Sequence
  Chemically Synthesized
QVQLQESGGGLVQAGGSLRLSCAASGTISGYSRMGWYRQAPGKEREFVATITYGATTYYADSVKGRFTISRDNAKNTVYLQMNSLKPEDTAVYYCAVRQSYYRVHRYWGQGTQVTVSS

SEQ ID NO: 1987 - protein, 122 aa, Artificial Sequence
  Chemically Synthesized
QVQLQESGGGLVQAGGSLRLSCAASGNISYPLYMGWYRQAPGKERELVATIDVGGNTNYADSVKGRFTISRDNAKNTVYLQMNSLKPEDTAVYYCAAHDDDIDQYTYVLTYWGQGTQVTVSS

SEQ ID NO: 1988 - protein, 122 aa, Artificial Sequence
  Chemically Synthesized
QVQLQESGGGLVQAGGSLRLSCAASGTISVVRLMGWYRQAPGKEREFVAAINRGSTTYYADSVKGRFTISRDNAKNTVYLQMNSLKPEDTAVYYCAVARETYGYDSWAFRYWGQGTQVTVSS

SEQ ID NO: 1989 - protein, 116 aa, Artificial Sequence
  Chemically Synthesized
QVQLQESGGGLVQAGGSLRLSCAASGYIFSDAYMGWYRQAPGKEREFVAGITYGTITYYADSVKGRFTISRDNAKNTVYLQMNSLKPEDTAVYYCAVATYIWYLYWGQGTQVTVSS

SEQ ID NO: 1990 - protein, 121 aa, Artificial Sequence
  Chemically Synthesized
QVQLQESGGGLVQAGGSLRLSCAASGNIFFYNKMGWYRQAPGKERELVASIGYGGTTYYADSVKGRFTISRDNAKNTVYLQMNSLKPEDTAVYYCAVYEDLVVSSLSTMYWGQGTQVTVSS

SEQ ID NO: 1991 - protein, 115 aa, Artificial Sequence
  Chemically Synthesized
QVQLQESGGGLVQAGGSLRLSCAASGNIFTSDYMGWYRQAPGKERELVATIDRGTITYYADSVKGRFTISRDNAKNTVYLQMNSLKPEDTAVYYCATIYGNYGYWGQGTQVTVSS

SEQ ID NO: 1992 - protein, 121 aa, Artificial Sequence
  Chemically Synthesized
QVQLQESGGGLVQAGGSLRLSCAASGTISFRPTMGWYRQAPGKEREFVAASTGGTTYYADSVKGRFTISRDNAKNTVYLQMNSLKPEDTAVYYCAAQPQYDDFDERLFTYWGQGTQVTVSS

SEQ ID NO: 1993 - protein, 118 aa, Artificial Sequence
  Chemically Synthesized
QVQLQESGGGLVQAGGSLRLSCAASGNIFARYGMGWYRQAPGKERELVATITYGSSTYYADSVKGRFTISRDNAKNTVYLQMNSLKPEDTAVYYCAVSYRRRFPLYYWGQGTQVTVSS

SEQ ID NO: 1994 - protein, 118 aa, Artificial Sequence
  Chemically Synthesized
QVQLQESGGGLVQAGGSLRLSCAASGSIFRYRTMGWYRQAPGKERELVASISYGGNTNYADSVKGRFTISRDNAKNTVYLQMNSLKPEDTAVYYCAVIRYRAWTYRYWGQGTQVTVSS

SEQ ID NO: 1995 - protein, 122 aa, Artificial Sequence
  Chemically Synthesized
QVQLQESGGGLVQAGGSLRLSCAASGTIFFPRYMGWYRQAPGKERELVAGIARGSNTYYADSVKGRFTISRDNAKNTVYLQMNSLKPEDTAVYYCAVIGLYGRSPNRGHVYWGQGTQVTVSS

SEQ ID NO: 1996 - protein, 122 aa, Artificial Sequence
  Chemically Synthesized
QVQLQESGGGLVQAGGSLRLSCAASGTIFLYYYMGWYRQAPGKEREFIASISDGANTYYADSVKGRFTISRDNAKNTVYLQMNSLKPEDTAVYYCAADDEYTSPYYGQFPYWGQGTQVTVSS

SEQ ID NO: 1997 - protein, 119 aa, Artificial Sequence
  Chemically Synthesized
QVQLQESGGGLVQAGGSLRLSCAASGNIFGRARMGWYRQAPGKEREFVAGINVGGSTTYYADSVKGRFTISRDNAKNTVYLQMNSLKPEDTAVYYCAVYRNRGYTHWYWGQGTQVTVSS

SEQ ID NO: 1998 - protein, 126 aa, Artificial Sequence
  Chemically Synthesized
QVQLQESGGGLVQAGGSLRLSCAASGNIFRVPYMGWYRQAPGKEREFVAAITYGSNTYYADSVKGRFTISRDNAKNTVYLQMNSLKPEDTAVYYCAVGLSRLYTSHSYYRARYPYWGQGTQVTVSS

SEQ ID NO: 1999 - protein, 126 aa, Artificial Sequence
  Chemically Synthesized
QVQLQESGGGLVQAGGSLRLSCAASGSISDTARMGWYRQAPGKEREFVAGIAQGANTYYADSVKGRFTISRDNAKNTVYLQMNSLKPEDTAVYYCAASVPGERSYAILRYELHPYWGQGTQVTVSS

SEQ ID NO: 2000 - protein, 122 aa, Artificial Sequence
  Chemically Synthesized
QVQLQESGGGLVQAGGSLRLSCAASGYISSLYYMGWYRQAPGKERELVAGITPGANTYYADSVKGRFTISRDNAKNTVYLQMNSLKPEDTAVYYCAVRTYSHNTDNQYFGYWGQGTQVTVSS

SEQ ID NO: 2001 - protein, 122 aa, Artificial Sequence
  Chemically Synthesized
QVQLQESGGGLVQAGGSLRLSCAASGNISYGISMGWYRQAPGKERELVAGIGIGGITYYADSVKGRFTISRDNAKNTVYLQMNSLKPEDTAVYYCAARSFSDHGQRDVHNYWGQGTQVTVSS

SEQ ID NO: 2002 - protein, 122 aa, Artificial Sequence
  Chemically Synthesized
QVQLQESGGGLVQAGGSLRLSCAASGTISNPVRMGWYRQAPGKEREFVASITYGASTNYADSVKGRFTISRDNAKNTVYLQMNSLKPEDTAVYYCAANLKRGRNLAEQYQYWGQGTQVTVSS

SEQ ID NO: 2003 - protein, 126 aa, Artificial Sequence
  Chemically Synthesized
QVQLQESGGGLVQAGGSLRLSCAASGTISKRPNMGWYRQAPGKERELVATIATGSNTNYADSVKGRFTISRDNAKNTVYLQMNSLKPEDTAVYYCAVERDSAYGAQWFRFGSHVYWGQGTQVTVSS

SEQ ID NO: 2004 - protein, 122 aa, Artificial Sequence
  Chemically Synthesized
QVQLQESGGGLVQAGGSLRLSCAASGTISALAAMGWYRQAPGKERELVAAIARGSTTYYADSVKGRFTISRDNAKNTVYLQMNSLKPEDTAVYYCAAWTLRYYRPSRNYKYWGQGTQVTVSS

SEQ ID NO: 2005 - protein, 118 aa, Artificial Sequence
  Chemically Synthesized
QVQLQESGGGLVQAGGSLRLSCAASGNIFWRPIMGWYRQAPGKERELVATITRGAITYYADSVKGRFTISRDNAKNTVYLQMNSLKPEDTAVYYCAVSYAFYNYHAYWGQGTQVTVSS

SEQ ID NO: 2006 - protein, 122 aa, Artificial Sequence
  Chemically Synthesized
QVQLQESGGGLVQAGGSLRLSCAASGNISDRDYMGWYRQAPGKEREFVAGIAYGAITNYADSVKGRFTISRDNAKNTVYLQMNSLKPEDTAVYYCAAEHYIYPILYSYLRYWGQGTQVTVSS

SEQ ID NO: 2007 - protein, 122 aa, Artificial Sequence
  Chemically Synthesized
QVQLQESGGGLVQAGGSLRLSCAASGYIFRYTVMGWYRQAPGKEREFVATITYGSSTYYADSVKGRFTISRDNAKNTVYLQMNSLKPEDTAVYYCAAAYLPSYYFTGTHAYWGQGTQVTVSS

SEQ ID NO: 2008 - protein, 118 aa, Artificial Sequence
  Chemically Synthesized
QVQLQESGGGLVQAGGSLRLSCAASGTIFWWPEMGWYRQAPGKEREFVASISRGTSTNYADSVKGRFTISRDNAKNTVYLQMNSLKPEDTAVYYCAVKRFYTRRYYYWGQGTQVTVSS

SEQ ID NO: 2009 - protein, 118 aa, Artificial Sequence
  Chemically Synthesized
QVQLQESGGGLVQAGGSLRLSCAASGTISDALIMGWYRQAPGKERELVAGIGLGTNTYYADSVKGRFTISRDNAKNTVYLQMNSLKPEDTAVYYCAVHEGNFYRYYYWGQGTQVTVSS

SEQ ID NO: 2010 - protein, 125 aa, Artificial Sequence
  Chemically Synthesized
QVQLQESGGGLVQAGGSLRLSCAASGSILTFTMGWYRQAPGKEREFVASIAGGASTYYADSVKGRFTISRDNAKNTVYLQMNSLKPEDTAVYYCAALSSVRFRGRDIYYRAHYYWGQGTQVTVSS

SEQ ID NO: 2011 - protein, 118 aa, Artificial Sequence
  Chemically Synthesized
QVQLQESGGGLVQAGGSLRLSCAASGYISRYFAMGWYRQAPGKEREFVATISSGAITYYADSVKGRFTISRDNAKNTVYLQMNSLKPEDTAVYYCAVFTYDEAGLPYWGQGTQVTVSS

SEQ ID NO: 2012 - protein, 122 aa, Artificial Sequence
  Chemically Synthesized
QVQLQESGGGLVQAGGSLRLSCAASGNIFSVRWMGWYRQAPGKERELVASISYGGTTYYADSVKGRFTISRDNAKNTVYLQMNSLKPEDTAVYYCAVDYWRYYPWYYRHTYWGQGTQVTVSS

SEQ ID NO: 2013 - protein, 118 aa, Artificial Sequence
  Chemically Synthesized
QVQLQESGGGLVQAGGSLRLSCAASGSISQQRVMGWYRQAPGKEREFVAAITYGGTTYYADSVKGRFTISRDNAKNTVYLQMNSLKPEDTAVYYCAAGQDETRDLPYWGQGTQVTVSS

SEQ ID NO: 2014 - protein, 122 aa, Artificial Sequence
  Chemically Synthesized
QVQLQESGGGLVQAGGSLRLSCAASGYISVRPFMGWYRQAPGKERELVAAINRGGSTYYADSVKGRFTISRDNAKNTVYLQMNSLKPEDTAVYYCAAYTQARIAYRTELHYWGQGTQVTVSS

SEQ ID NO: 2015 - protein, 117 aa, Artificial Sequence
  Chemically Synthesized
QVQLQESGGGLVQAGGSLRLSCAASGYIFQDRMGWYRQAPGKERELVASIDRGSNTNYADSVKGRFTISRDNAKNTVYLQMNSLKPEDTAVYYCAAGDQGVIGLTYWGQGTQVTVSS

SEQ ID NO: 2016 - protein, 117 aa, Artificial Sequence
  Chemically Synthesized
QVQLQESGGGLVQAGGSLRLSCAASGYIFFSPMGWYRQAPGKEREFVAAIGRGGTTYYADSVKGRFTISRDNAKNTVYLQMNSLKPEDTAVYYCAVKLYQVFRHAYWGQGTQVTVSS

SEQ ID NO: 2017 - protein, 117 aa, Artificial Sequence
  Chemically Synthesized
QVQLQESGGGLVQAGGSLRLSCAASGNIFSNIAMGWYRQAPGKERELVAAIDGGGNTNYADSVKGRFTISRDNAKNTVYLQMNSLKPEDTAVYYCAGLYDHPVYKYWGQGTQVTVSS

SEQ ID NO: 2018 - protein, 122 aa, Artificial Sequence
  Chemically Synthesized
QVQLQESGGGLVQAGGSLRLSCAASGTIFYGGRMGWYRQAPGKEREFVAAITGGGTTYYADSVKGRFTISRDNAKNTVYLQMNSLKPEDTAVYYCAARNLDGLRGYFAHNYWGQGTQVTVSS

SEQ ID NO: 2019 - protein, 122 aa, Artificial Sequence
  Chemically Synthesized
QVQLQESGGGLVQAGGSLRLSCAASGTISYILYMGWYRQAPGKERELVAGIALGATTYYADSVKGRFTISRDNAKNTVYLQMNSLKPEDTAVYYCAVVSQRKEYSYETYGYWGQGTQVTVSS

SEQ ID NO: 2020 - protein, 117 aa, Artificial Sequence
  Chemically Synthesized
QVQLQESGGGLVQAGGSLRLSCAASGNIFGPWWMGWYRQAPGKERELLLVLVPYADSVKGRFTISRDNAKNTVYLQMNSLKPEDTAVYYCAVPGRLHRYTDYSYYYWGQGTQVTVSS

SEQ ID NO: 2021 - protein, 118 aa, Artificial Sequence
  Chemically Synthesized
QVQLQESGGGLVQAGGSLRLSCAASGYISWGRVMGWYRQAPGKEREFVAGISYGGNTYYADSVKGRFTISRDNAKNTVYLQMNSLKPEDTAVYYCAADTDRQKSHRYWGQGTQVTVSS

SEQ ID NO: 2022 - protein, 122 aa, Artificial Sequence
  Chemically Synthesized
QVQLQESGGGLVQAGGSLRLSCAASGTISRYYYMGWYRQAPGKERELVASISSGSTTYYADSVKGRFTISRDNAKNTVYLQMNSLKPEDTAVYYCAAQFPYYPIKYLLHPYWGQGTQVTVSS

SEQ ID NO: 2023 - protein, 126 aa, Artificial Sequence
  Chemically Synthesized
QVQLQESGGGLVQAGGSLRLSCAASGYIFYTTDMGWYRQAPGKEREFVATINYGATTNYADSVKGRFTISRDNAKNTVYLQMNSLKPEDTAVYYCAANTGFASRYSGPSWAWLTYWGQGTQVTVSS

SEQ ID NO: 2024 - protein, 126 aa, Artificial Sequence
  Chemically Synthesized
QVQLQESGGGLVQAGGSLRLSCAASGYIFVYYDMGWYRQAPGKERELVASISYGGNTYYADSVKGRFTISRDNAKNTVYLQMNSLKPEDTAVYYCAVWILYQYQFDFQYGDTFVYWGQGTQVTVSS

SEQ ID NO: 2025 - protein, 122 aa, Artificial Sequence
  Chemically Synthesized
QVQLQESGGGLVQAGGSLRLSCAASGTISRDASMGWYRQAPGKEREFVASIGVGSTTNYADSVKGRFTISRDNAKNTVYLQMNSLKPEDTAVYYCAAGTQNWRRYRLAYRYWGQGTQVTVSS

SEQ ID NO: 2026 - protein, 118 aa, Artificial Sequence
  Chemically Synthesized
QVQLQESGGGLVQAGGSLRLSCAASGYISSHRAMGWYRQAPGKERELVAGIGAGTTTYYADSVKGRFTISRDNAKNTVYLQMNSLKPEDTAVYYCAVVRYWRSGLYYWGQGTQVTVSS

SEQ ID NO: 2027 - protein, 116 aa, Artificial Sequence
  Chemically Synthesized
QVQLQESGGGLVQAGGSLRLSCAASGNISTLSYMGWYRQAPGKERELVAAIGDGGITYYADSVKGRFTISRDNAKNTVYLQMNSLKPEDTAVYYCAAQDYYYLGYWGQGTQVTVSS

SEQ ID NO: 2028 - protein, 120 aa, Artificial Sequence
  Chemically Synthesized
QVQLQESGGGLVQAGGSLRLSCAASGSWYRPMGWYRQAPGKERELVATISHGGTTNYADSVKGRFTISRDNAKNTVYLQMNSLKPEDTAVYYCAAWGLLWVWGGDIYKYWGQGTQVTVSS

SEQ ID NO: 2029 - protein, 126 aa, Artificial Sequence
  Chemically Synthesized
QVQLQESGGGLVQAGGSLRLSCAASGYIFFTTPMGWYRQAPGKERELVASISSGSTTYYADSVKGRFTISRDNAKNTVYLQMNSLKPEDTAVYYCAVRSVTHRDQYWTGTQYFPYWGQGTQVTVSS

SEQ ID NO: 2030 - protein, 118 aa, Artificial Sequence
  Chemically Synthesized
QVQLQESGGGLVQAGGSLRLSCAASGYIFDTTYMGWYRQAPGKEREFVAGITSGASTYYADSVKGRFTISRDNAKNTVYLQMNSLKPEDTAVYYCAADILLARSYDYWGQGTQVTVSS

SEQ ID NO: 2031 - protein, 115 aa, Artificial Sequence
  Chemically Synthesized
QVQLQESGGGLVQAGGSLRLSCAASGIRLHMGWYRQAPGKERELVATIASGAITNYADSVKGRFTISRDNAKNTVYLQMNSLKPEDTAVYYCAVATSYGSPLDYWGQGTQVTVSS

SEQ ID NO: 2032 - protein, 118 aa, Artificial Sequence
  Chemically Synthesized
QVQLQESGGGLVQAGGSLRLSCAASGSIFARYGMGWYRQAPGKEREFVAAIGGGGNTYYADSVKGRFTISRDNAKNTVYLQMNSLKPEDTAVYYCAVYGTPHFSFVYWGQGTQVTVSS

SEQ ID NO: 2033 - protein, 126 aa, Artificial Sequence
  Chemically Synthesized
QVQLQESGGGLVQAGGSLRLSCAASGNISYRGSMGWYRQAPGKERELVAAIGRGGTTYYADSVKGRFTISRDNAKNTVYLQMNSLKPEDTAVYYCAVVRLWDRDRLRWAVGDLYYWGQGTQVTVSS

SEQ ID NO: 2034 - protein, 118 aa, Artificial Sequence
  Chemically Synthesized
QVQLQESGGGLVQAGGSLRLSCAASGNISYDWFMGWYRQAPGKERELVAAIAVGSNTYYADSVKGRFTISRDNAKNTVYLQMNSLKPEDTAVYYCAVFIGHDRDLFYWGQGTQVTVSS

SEQ ID NO: 2035 - protein, 117 aa, Artificial Sequence
  Chemically Synthesized
QVQLQESGGGLVQAGGSLRLSCAASGNISLRDAMGWYRQAPGKERELVASMITVLLPYADSVKGRFTISRDNAKNTVYLQMNSLKPEDTAVYYCAVGAYDQYDLAYWGQGTQVTVSS

SEQ ID NO: 2036 - protein, 118 aa, Artificial Sequence
  Chemically Synthesized
QVQLQESGGGLVQAGGSLRLSCAASGTIFGPSKMGWYRQAPGKEREFVASIAGGSTTNYADSVKGRFTISRDNAKNTVYLQMNSLKPEDTAVYYCAFDQGFYTLFAYWGQGTQVTVSS

SEQ ID NO: 2037 - protein, 118 aa, Artificial Sequence
  Chemically Synthesized
QVQLQESGGGLVQAGGSLRLSCAASGNIFRPFYMGWYRQAPGKERELVASITNGAITNYADSVKGRFTISRDNAKNTVYLQMNSLKPEDTAVYYCAVRRRYVPRYAYWGQGTQVTVSS

SEQ ID NO: 2038 - protein, 121 aa, Artificial Sequence
  Chemically Synthesized
QVQLQESGGGLVQAGGSLRLSCAASGTISVYQYMGWYRQAPGKERELVATINDGGITNYADSVKGRFTISRDNAKNTVYLQMNSLKPEDTAVYYCAVIAYVSDIYFLSIYWGQGTQVTVSS

SEQ ID NO: 2039 - protein, 118 aa, Artificial Sequence
  Chemically Synthesized
QVQLQESGGGLVQAGGSLRLSCAASGYISRRWSMGWYRQAPGKEREFVATIASGASTNYADSVKGRFTISRDNAKNTVYLQMNSLKPEDTAVYYCAVRNYWRSYHYYWGQGTQVTVSS

SEQ ID NO: 2040 - protein, 122 aa, Artificial Sequence
  Chemically Synthesized
QVQLQESGGGLVQAGGSLRLSCAASGNISRPYRMGWYRQAPGKERELVASISWGGNTYYADSVKGRFTISRDNAKNTVYLQMNSLKPEDTAVYYCAVGLKRGYWYTRSYGYWGQGTQVTVSS

SEQ ID NO: 2041 - protein, 122 aa, Artificial Sequence
  Chemically Synthesized
QVQLQESGGGLVQAGGSLRLSCAASGNIFFYIRMGWYRQAPGKEREFVAAITRGGNTYYADSVKGRFTISRDNAKNTVYLQMNSLKPEDTAVYYCAVVARYPYAVSYQYRYWGQGTQVTVSS

SEQ ID NO: 2042 - protein, 122 aa, Artificial Sequence
  Chemically Synthesized
QVQLQESGGGLVQAGGSLRLSCAASGNIFPYHYMGWYRQAPGKERELVAAISTGGTTYYADSVKGRFTISRDNAKNTVYLQMNSLKPEDTAVYYCAAARGGRYQDGRRYNYWGQGTQVTVSS

SEQ ID NO: 2043 - protein, 118 aa, Artificial Sequence
  Chemically Synthesized
QVQLQESGGGLVQAGGSLRLSCAASGNIFRQWYMGWYRQAPGKERELVASITVGTNTYYADSVKGRFTISRDNAKNTVYLQMNSLKPEDTAVYYCAVSGKWWKGFYYWGQGTQVTVSS

SEQ ID NO: 2044 - protein, 118 aa, Artificial Sequence
  Chemically Synthesized
QVQLQESGGGLVQAGGSLRLSCAASGNISYDTGMGWYRQAPGKERELVASIDYGASTYYADSVKGRFTISRDNAKNTVYLQMNSLKPEDTAVYYCAVTVDTDAGLSYWGQGTQVTVSS

SEQ ID NO: 2045 - protein, 114 aa, Artificial Sequence
  Chemically Synthesized
QVQLQESGGGLVQAGGSLRLSCAASGSISLPSYMGWYRQAPGKERELVAGIDPGGSTYYADSVKGRFTISRDNAKNTVYLQMNSLKPEDTAVYYCAVTRDLFYWGQGTQVTVSS

SEQ ID NO: 2046 - protein, 118 aa, Artificial Sequence
  Chemically Synthesized
QVQLQESGGGLVQAGGSLRLSCAASGSISSNIDMGWYRQAPGKEREFVAGIDYGGSTNYADSVKGRFTISRDNAKNTVYLQMNSLKPEDTAVYYCAAGASYRDYFAYWGQGTQVTVSS

SEQ ID NO: 2047 - protein, 118 aa, Artificial Sequence
  Chemically Synthesized
QVQLQESGGGLVQAGGSLRLSCAASGYISRWTTMGWYRQAPGKEREFVAGITVGASTNYADSVKGRFTISRDNAKNTVYLQMNSLKPEDTAVYYCAVRPRRWPILSYWGQGTQVTVSS

SEQ ID NO: 2048 - protein, 115 aa, Artificial Sequence
  Chemically Synthesized
QVQLQESGGGLVQAGGSLRLSCAASGTISYSYEMGWYRQAPGKERELVAAIAGGAITNYADSVKGRFTISRDNAKNTVYLQMNSLKPEDTAVYYCAVARPGHDYWGQGTQVTVSS

SEQ ID NO: 2049 - protein, 122 aa, Artificial Sequence
  Chemically Synthesized
QVQLQESGGGLVQAGGSLRLSCAASGYIFYIYRMGWYRQAPGKERELVAGIAFGGITYYADSVKGRFTISRDNAKNTVYLQMNSLKPEDTAVYYCAVYGRARWKQLYSYDYWGQGTQVTVSS

SEQ ID NO: 2050 - protein, 122 aa, Artificial Sequence
  Chemically Synthesized
QVQLQESGGGLVQAGGSLRLSCAASGSISPGYIMGWYRQAPGKEREFVAGISRGGSTYYADSVKGRFTISRDNAKNTVYLQMNSLKPEDTAVYYCAVDSYTTRFWPYGYPYWGQGTQVTVSS

SEQ ID NO: 2051 - protein, 116 aa, Artificial Sequence
  Chemically Synthesized
QVQLQESGGGLVQAGGSLRLSCAASGSIFPAYAMGWYRQAPGKEREFVATISYGGNTYADSVKGRFTISRDNAKNTVYLQMNSLKPEDTAVYYCAVYDSNIPHYYWGQGTQVTVSS

SEQ ID NO: 2052 - protein, 126 aa, Artificial Sequence
  Chemically Synthesized
QVQLQESGGGLVQAGGSLRLSCAASGSIFGVTDMGWYRQAPGKEREFVASISYGGSTNYADSVKGRFTISRDNAKNTVYLQMNSLKPEDTAVYYCAVDDGPDTRSRPYDPTRHTYWGQGTQVTVSS

SEQ ID NO: 2053 - protein, 122 aa, Artificial Sequence
  Chemically Synthesized
QVQLQESGGGLVQAGGSLRLSCAASGTIFRRIYMGWYRQAPGKERELVAGIAVGGSTYYADSVKGRFTISRDNAKNTVYLQMNSLKPEDTAVYYCAVVYRFVYPRTLPHSYWGQGTQVTVSS

SEQ ID NO: 2054 - protein, 118 aa, Artificial Sequence
  Chemically Synthesized
QVQLQESGGGLVQAGGSLRLSCAASGTISWQSIMGWYRQAPGKERELVAAIADGGITNYADSVKGRFTISRDNAKNTVYLQMNSLKPEDTAVYYCAADSYYYSAYYYWGQGTQVTVSS

SEQ ID NO: 2055 - protein, 118 aa, Artificial Sequence
  Chemically Synthesized
QVQLQESGGGLVQAGGSLRLSCAASGTIFAYHTMGWYRQAPGKEREFVAGITWGAITNYADSVKGRFTISRDNAKNTVYLQMNSLKPEDTAVYYCAVDYNSVPWHWYWGQGTQVTVSS

SEQ ID NO: 2056 - protein, 121 aa, Artificial Sequence
  Chemically Synthesized
QVQLQESGGGLVQAGGSLRLSCAASGNIFWDRVMGWYRQAPGKEREFVASIGLGGNTYYADSVKGRFTISRDNAKNTVYLQMNSLKPEDTAVYYCAAVTQYSYNSDSCIYWGQGTQVTVSS

SEQ ID NO: 2057 - protein, 119 aa, Artificial Sequence
  Chemically Synthesized
QVQLQESGGGLVQAGGSLRLSCAASGTIFPLVPMGWYRQAPGKEREFVATIGRGSITYYADSVKGRFTISRDNAKNTVYLQMNSLKPEDTAVYYCAAYWLAASHRHSYWGQGTQVTVSS

SEQ ID NO: 2058 - protein, 121 aa, Artificial Sequence
  Chemically Synthesized
QVQLQESGGGLVQAGGSLRLSCAASGSIFPRSVMGWYRQAPGKERELVAGIASGAITYYADSVKGRFTISRDNAKNTVYLQMNSLKPEDTAVYYCAVGIYRRWKRDSHGYWGQGTQVTVSS

SEQ ID NO: 2059 - protein, 118 aa, Artificial Sequence
  Chemically Synthesized
QVQLQESGGGLVQAGGSLRLSCAASGNIFRDPPMGWYRQAPGKEREFVAAITAGGSTYYADSVKGRFTISRDNAKNTVYLQMNSLKPEDTAVYYCAVELSSQYDHSYWGQGTQVTVSS

SEQ ID NO: 2060 - protein, 121 aa, Artificial Sequence
  Chemically Synthesized
QVQLQESGGGLVQAGGSLRLSCAASGSISGYLDMGWYRQAPGKERELVAAIAYGTITYYADSVKGRFTISRDNAKNTVYLQMNSLKPEDTAVYYCAVWQSTWRADRNFAYWGQGTQVTVSS

SEQ ID NO: 2061 - protein, 118 aa, Artificial Sequence
  Chemically Synthesized
QVQLQESGGGLVQAGGSLRLSCAASGTIFLPFYMGWYRQAPGKERELVAAIAGGSTTYYADSVKGRFTISRDNAKNTVYLQMNSLKPEDTAVYYCAAHQRTYWGHAYWGQGTQVTVSS

SEQ ID NO: 2062 - protein, 126 aa, Artificial Sequence
  Chemically Synthesized
QVQLQESGGGLVQAGGSLRLSCAASGTIFLLVWMGWYRQAPGKEREFVAGIAAGSTTNYADSVKGRFTISRDNAKNTVYLQMNSLKPEDTAVYYCAVIKHGSPGDGYWTGYDYSYWGQGTQVTVSS

SEQ ID NO: 2063 - protein, 117 aa, Artificial Sequence
  Chemically Synthesized
QVQLQESGGGLVQAGGSLRLSCAASGTIFRIYFMGWYRQAPGKERELVAAIGRGTSTYYADSVKGRFTISRDNAKNTVYLQMNSLKPEDTAVYYCAALTFRKRYHYWGQGTQVTVSS

SEQ ID NO: 2064 - protein, 118 aa, Artificial Sequence
  Chemically Synthesized
QVQLQESGGGLVQAGGSLRLSCAASGYIFRYRNMGWYRQAPGKERELVASISYGTITYYADSVKGRFTISRDNAKNTVYLQMNSLKPEDTAVYYCAAVRGFYYPHRYWGQGTQVTVSS

SEQ ID NO: 2065 - protein, 115 aa, Artificial Sequence
  Chemically Synthesized
QVQLQESGGGLVQAGGSLRLSCAASGYIFVTQYMGWYRQAPGKERELVAGINDGATTNYADSVKGRFTISRDNAKNTVYLQMNSLKPEDTAVYYCAGWLDYPYYWGQGTQVTVSS

SEQ ID NO: 2066 - protein, 118 aa, Artificial Sequence
  Chemically Synthesized
QVQLQESGGGLVQAGGSLRLSCAASGNIFSYRYMGWYRQAPGKEREFVASIDRGGSTYYADSVKGRFTISRDNAKNTVYLQMNSLKPEDTAVYYCAAFRRKYRTFGYWGQGTQVTVSS

SEQ ID NO: 2067 - protein, 122 aa, Artificial Sequence
  Chemically Synthesized
QVQLQESGGGLVQAGGSLRLSCAASGYIFVVDPMGWYRQAPGKERELVASITPGGSTNYADSVKGRFTISRDNAKNTVYLQMNSLKPEDTAVYYCAVRSQYYWWRHYYLGYWGQGTQVTVSS

SEQ ID NO: 2068 - protein, 122 aa, Artificial Sequence
  Chemically Synthesized
QVQLQESGGGLVQAGGSLRLSCAASGYISYYRGMGWYRQAPGKEREFVATITPGSTTYYADSVKGRFTISRDNAKNTVYLQMNSLKPEDTAVYYCAVEPTDPYTYTPFYRYWGQGTQVTVSS

SEQ ID NO: 2069 - protein, 122 aa, Artificial Sequence
  Chemically Synthesized
QVQLQESGGGLVQAGGSLRLSCAASGYISGVSYMGWYRQAPGKERELVAAITVGSNTYYADSVKGRFTISRDNAKNTVYLQMNSLKPEDTAVYYCAVYDYTISRNDRRHYYWGQGTQVTVSS

SEQ ID NO: 2070 - protein, 122 aa, Artificial Sequence
  Chemically Synthesized
QVQLQESGGGLVQAGGSLRLSCAASGYISYYYNMGWYRQAPGKERELVASIGYGGTTNYADSVKGRFTISRDNAKNTVYLQMNSLKPEDTAVYYCAALGRVRVAYSRYHRYWGQGTQVTVSS

SEQ ID NO: 2071 - protein, 122 aa, Artificial Sequence
  Chemically Synthesized
QVQLQESGGGLVQAGGSLRLSCAASGTIFEGRAMGWYRQAPGKERELVATIAAGANTYYADSVKGRFTISRDNAKNTVYLQMNSLKPEDTAVYYCAVAEYLRTLAEQLYVYWGQGTQVTVSS

SEQ ID NO: 2072 - protein, 117 aa, Artificial Sequence
  Chemically Synthesized
QVQLQESGGGLVQAGGSLRLSCAASGTIFRGVLMGWYRQAPGKERELVAAINYGGSTYYADSVKGRFTISRDNAKNTVYLQMNSLKPEDTAVYYCAAQRVYGSHAYWGQGTQVTVSS

SEQ ID NO: 2073 - protein, 122 aa, Artificial Sequence
  Chemically Synthesized
QVQLQESGGGLVQAGGSLRLSCAASGYISFILYMGWYRQAPGKERELVAAIAWGASTNYADSVKGRFTISRDNAKNTVYLQMNSLKPEDTAVYYCAVLVRTDARWPSPHVYWGQGTQVTVSS

SEQ ID NO: 2074 - protein, 118 aa, Artificial Sequence
  Chemically Synthesized
QVQLQESGGGLVQAGGSLRLSCAASGSIFNRRYMGWYRQAPGKEREFVATINPGSNTYYADSVKGRFTISRDNAKNTVYLQMNSLKPEDTAVYYCAVHNRWALGHGYWGQGTQVTVSS

SEQ ID NO: 2075 - protein, 118 aa, Artificial Sequence
  Chemically Synthesized
QVQLQESGGGLVQAGGSLRLSCAASGYISSLTTMGWYRQAPGKEREFVATIGYGTSTNYADSVKGRFTISRDNAKNTVYLQMNSLKPEDTAVYYCAAGVAVPYFLPYWGQGTQVTVSS

SEQ ID NO: 2076 - protein, 118 aa, Artificial Sequence
  Chemically Synthesized
QVQLQESGGGLVQAGGSLRLSCAASGNIFRWYTMGWYRQAPGKEREFVAGITSGTSTYYADSVKGRFTISRDNAKNTVYLQMNSLKPEDTAVYYCAVKWGYQRLYRYWGQGTQVTVSS

SEQ ID NO: 2077 - protein, 122 aa, Artificial Sequence
  Chemically Synthesized
QVQLQESGGGLVQAGGSLRLSCAASGYISTDIYMGWYRQAPGKEREFVAAIATGGITYYADSVKGRFTISRDNAKNTVYLQMNSLKPEDTAVYYCAVQRNPYTIYFRPFHYWGQGTQVTVSS

SEQ ID NO: 2078 - protein, 125 aa, Artificial Sequence
  Chemically Synthesized
QVQLQESGGGLVQAGGSLRLSCAASGNISYLYMGWYRQAPGKEREFVAGINRGTNTNYADSVKGRFTISRDNAKNTVYLQMNSLKPEDTAVYYCAVHQVVGAGIVRGWRRLFDYWGQGTQVTVSS

SEQ ID NO: 2079 - protein, 118 aa, Artificial Sequence
  Chemically Synthesized
QVQLQESGGGLVQAGGSLRLSCAASGNIFHREQMGWYRQAPGKERELVAGITFGGITYYADSVKGRFTISRDNAKNTVYLQMNSLKPEDTAVYYCAVRLWPGRYHIYWGQGTQVTVSS

SEQ ID NO: 2080 - protein, 122 aa, Artificial Sequence
  Chemically Synthesized
QVQLQESGGGLVQAGGSLRLSCAASGSIFLPDPMGWYRQAPGKEREFVAAITRGTTTYYADSVKGRFTISRDNAKNTVYLQMNSLKPEDTAVYYCAAYIPNYRVRKWRLRYWGQGTQVTVSS

SEQ ID NO: 2081 - protein, 118 aa, Artificial Sequence
  Chemically Synthesized
QVQLQESGGGLVQAGGSLRLSCAASGYISGYPTMGWYRQAPGKERELVATIAFGAITNYADSVKGRFTISRDNAKNTVYLQMNSLKPEDTAVYYCAVAPTINSQLPYWGQGTQVTVSS

SEQ ID NO: 2082 - protein, 122 aa, Artificial Sequence
  Chemically Synthesized
QVQLQESGGGLVQAGGSLRLSCAASGYISQSTYMGWYRQAPGKERELVAGITIGTNTNYADSVKGRFTISRDNAKNTVYLQMNSLKPEDTAVYYCAADDESYVVGQHSLQYWGQGTQVTVSS

SEQ ID NO: 2083 - protein, 117 aa, Artificial Sequence
  Chemically Synthesized
QVQLQESGGGLVQAGGSLRLSCAASGSIFNDRYMGWYRQAPGKERELVASIDAGSTTYYADSVKGRFTISRDNAKNTVYLQMNSLKPEDTAVYYCAAQTSLLSSMYWGQGTQVTVSS

SEQ ID NO: 2084 - protein, 117 aa, Artificial Sequence
  Chemically Synthesized
QVQLQESGGGLVQAGGSLRLSCAASGSIFGAERMGWYRQAPGKEREFVATIAPGGTTNYADSVKGRFTISRDNAKNTVYLQMNSLKPEDTAVYYCAFRTRSTCRLYWGQGTQVTVSS

SEQ ID NO: 2085 - protein, 118 aa, Artificial Sequence
  Chemically Synthesized
QVQLQESGGGLVQAGGSLRLSCAASGNISDLRCMGWYRQAPGKEREFVAAIANGSITNYADSVKGRFTISRDNAKNTVYLQMNSLKPEDTAVYYCAVAYDYLCCSLYWGQGTQVTVSS

SEQ ID NO: 2086 - protein, 117 aa, Artificial Sequence
  Chemically Synthesized
QVQLQESGGGLVQAGGSLRLSCAASGSISRRDTMGWYRQAPGKERELVASINMVLLPYADSVKGRFTISRDNAKNTVYLQMNSLKPEDTAVYYCAVGYPGRGGLLYWGQGTQVTVSS

SEQ ID NO: 2087 - protein, 122 aa, Artificial Sequence
  Chemically Synthesized
QVQLQESGGGLVQAGGSLRLSCAASGNIFGWRPMGWYRQAPGKERELVAAIAQGANTYYADSVKGRFTISRDNAKNTVYLQMNSLKPEDTAVYYCAARARSDYYQRTHHRYWGQGTQVTVSS

SEQ ID NO: 2088 - protein, 118 aa, Artificial Sequence
  Chemically Synthesized
QVQLQESGGGLVQAGGSLRLSCAASGYISRYRPMGWYRQAPGKEREFVAGINQGGNTNYADSVKGRFTISRDNAKNTVYLQMNSLKPEDTAVYYCAARVSRYLYHGYWGQGTQVTVSS

SEQ ID NO: 2089 - protein, 122 aa, Artificial Sequence
  Chemically Synthesized
QVQLQESGGGLVQAGGSLRLSCAASGNISQQLAMGWYRQAPGKEREFVAGITRGGNTYYADSVKGRFTISRDNAKNTVYLQMNSLKPEDTAVYYCAVYYDDVQYYGYVYAYWGQGTQVTVSS

SEQ ID NO: 2090 - protein, 118 aa, Artificial Sequence
  Chemically Synthesized
QVQLQESGGGLVQAGGSLRLSCAASGTISDYPYMGWYRQAPGKERELVAGIGSGSSTYYADSVKGRFTISRDNAKNTVYLQMNSLKPEDTAVYYCAALDAYGYRHGYWGQGTQVTVSS

SEQ ID NO: 2091 - protein, 118 aa, Artificial Sequence
  Chemically Synthesized
QVQLQESGGGLVQAGGSLRLSCAASGYIFVRFSMGWYRQAPGKEREFVAAITYGGTTYYADSVKGRFTISRDNAKNTVYLQMNSLKPEDTAVYYCAVGRRYRANFYYWGQGTQVTVSS

SEQ ID NO: 2092 - protein, 109 aa, Artificial Sequence
  Chemically Synthesized
QVQLQESGGGLVQAGGSLRLSCAASGNISLDSFMGWYRQAPGKERELVATITGGTTYYADSVKGRFTISRDNAKNTVYLQMNSLKPEDTAVYYCAASYWGQGTQVTVSS

SEQ ID NO: 2093 - protein, 118 aa, Artificial Sequence
  Chemically Synthesized
QVQLQESGGGLVQAGGSLRLSCAASGTISHTRYMGWYRQAPGKERELVAGIAYGGTTNYADSVKGRFTISRDNAKNTVYLQMNSLKPEDTAVYYCAVLIYSAPLHGYWGQGTQVTVSS

SEQ ID NO: 2094 - protein, 121 aa, Artificial Sequence
  Chemically Synthesized
QVQLQESGGGLVQAGGSLRLSCAASGSIFLHWYMGWYRQAPGKEREFVASIGYGSNTYYADSVKGRFTISRDNAKNTVYLQMNSLKPEDTAVYYCAALNWYGRTTDLYPYWGQGTQVTVSS

SEQ ID NO: 2095 - protein, 122 aa, Artificial Sequence
  Chemically Synthesized
QVQLQESGGGLVQAGGSLRLSCAASGTISEIAGMGWYRQAPGKERELVAAIGSGANTYYADSVKGRFTISRDNAKNTVYLQMNSLKPEDTAVYYCAVDGWTGNSPYTPYQYWGQGTQVTVSS

SEQ ID NO: 2096 - protein, 122 aa, Artificial Sequence
  Chemically Synthesized
QVQLQESGGGLVQAGGSLRLSCAASGNIFGIYSMGWYRQAPGKERELVASIAYGTSTYYADSVKGRFTISRDNAKNTVYLQMNSLKPEDTAVYYCAAVNLYYLIEESHLIYWGQGTQVTVSS

SEQ ID NO: 2097 - protein, 118 aa, Artificial Sequence
  Chemically Synthesized
QVQLQESGGGLVQAGGSLRLSCAASGSISGLVLMGWYRQAPGKEREFVAAINYGGITYYADSVKGRFTISRDNAKNTVYLQMNSLKPEDTAVYYCAAYSFSGPRFVYWGQGTQVTVSS

SEQ ID NO: 2098 - protein, 122 aa, Artificial Sequence
  Chemically Synthesized
QVQLQESGGGLVQAGGSLRLSCAASGTISGEGYMGWYRQAPGKERELVAAIGYGSSTNYADSVKGRFTISRDNAKNTVYLQMNSLKPEDTAVYYCAVVRYATSTYDYYYYYWGQGTQVTVSS

SEQ ID NO: 2099 - protein, 122 aa, Artificial Sequence
  Chemically Synthesized
QVQLQESGGGLVQAGGSLRLSCAASGYIFVGPDMGWYRQAPGKEREFVATITSGGNTYYADSVKGRFTISRDNAKNTVYLQMNSLKPEDTAVYYCAVGYYRRAAYYVEYSYWGQGTQVTVSS

SEQ ID NO: 2100 - protein, 118 aa, Artificial Sequence
  Chemically Synthesized
QVQLQESGGGLVQAGGSLRLSCAASGTIFRTVVMGWYRQAPGKEREFVAGITTGSNTYYADSVKGRFTISRDNAKNTVYLQMNSLKPEDTAVYYCAVYRWDYGTFGYWGQGTQVTVSS

SEQ ID NO: 2101 - protein, 118 aa, Artificial Sequence
  Chemically Synthesized
QVQLQESGGGLVQAGGSLRLSCAASGYISDYLEMGWYRQAPGKEREFVASIAFGSNTYYADSVKGRFTISRDNAKNTVYLQMNSLKPEDTAVYYCAVYAYATEPFIYWGQGTQVTVSS

SEQ ID NO: 2102 - protein, 118 aa, Artificial Sequence
  Chemically Synthesized
QVQLQESGGGLVQAGGSLRLSCAASGYISWGSVMGWYRQAPGKEREFVAGINDGTNTYYADSVKGRFTISRDNAKNTVYLQMNSLKPEDTAVYYCAALGPIDTLHDYWGQGTQVTVSS

SEQ ID NO: 2103 - protein, 126 aa, Artificial Sequence
  Chemically Synthesized
QVQLQESGGGLVQAGGSLRLSCAASGNIFYWYNMGWYRQAPGKEREFVASITQGTTTYYADSVKGRFTISRDNAKNTVYLQMNSLKPEDTAVYYCAVTDYRSYYYYLLYPVYHRYWGQGTQVTVSS

SEQ ID NO: 2104 - protein, 118 aa, Artificial Sequence
  Chemically Synthesized
QVQLQESGGGLVQAGGSLRLSCAASGYISYDSFMGWYRQAPGKEREFVAGIAYGSNTYYADSVKGRFTISRDNAKNTVYLQMNSLKPEDTAVYYCAALSIRTTDFDYWGQGTQVTVSS

SEQ ID NO: 2105 - protein, 126 aa, Artificial Sequence
  Chemically Synthesized
QVQLQESGGGLVQAGGSLRLSCAASGYISGTGYMGWYRQAPGKERELVAAIGYGTSTNYADSVKGRFTISRDNAKNTVYLQMNSLKPEDTAVYYCAAFIFDDNYTPRRYWSVYQYWGQGTQVTVSS

SEQ ID NO: 2106 - protein, 115 aa, Artificial Sequence
  Chemically Synthesized
QVQLQESGGGLVQAGGSLRLSCAASGSIFWYGNMGWYRQAPGKEREFVATITRGTITYYADSVKGRFTISRDNAKNTVYLQMNSLKPEDTAVYYCAAPATDHYYWGQGTQVTVSS

SEQ ID NO: 2107 - protein, 118 aa, Artificial Sequence
  Chemically Synthesized
QVQLQESGGGLVQAGGSLRLSCAASGYIFRYDLMGWYRQAPGKEREFVAGIAAGTITYYADSVKGRFTISRDNAKNTVYLQMNSLKPEDTAVYYCAAFDYYDYSYDYWGQGTQVTVSS

SEQ ID NO: 2108 - protein, 117 aa, Artificial Sequence
  Chemically Synthesized
QVQLQESGGGLVQAGGSLRLSCAASGYIFYYDSMGWYRQAPGKEREFVASIGGGSTTYYADSVKGRFTISRDNAKNTVYLQMNSLKPEDTAVYYCAVLRWQSAHDYWGQGTQVTVSS

SEQ ID NO: 2109 - protein, 126 aa, Artificial Sequence
  Chemically Synthesized
QVQLQESGGGLVQAGGSLRLSCAASGNISGYQDMGWYRQAPGKERELVASIGTGATTNYADSVKGRFTISRDNAKNTVYLQMNSLKPEDTAVYYCAALSDALYYTPYYRYQWHIYWGQGTQVTVSS

SEQ ID NO: 2110 - protein, 118 aa, Artificial Sequence
  Chemically Synthesized
QVQLQESGGGLVQAGGSLRLSCAASGTISQIDLMGWYRQAPGKEREFVAGIAWGTITNYADSVKGRFTISRDNAKNTVYLQMNSLKPEDTAVYYCAAFNAYSPALDYWGQGTQVTVSS

SEQ ID NO: 2111 - protein, 110 aa, Artificial Sequence
  Chemically Synthesized
QVQLQESGGGLVQAGGSLRLSCAASGNISSTSMGWYRQAPGKEREFVAGIADGGSTNYADSVKGRFTISRDNAKNTVYLQMNSLKPEDTAVYYCAYSIYWGQGTQVTVSS

SEQ ID NO: 2112 - protein, 118 aa, Artificial Sequence
  Chemically Synthesized
QVQLQESGGGLVQAGGSLRLSCAASGYIFYRTLMGWYRQAPGKERELVASIGVGGITYYADSVKGRFTISRDNAKNTVYLQMNSLKPEDTAVYYCAAGVGSSLTHYYWGQGTQVTVSS

SEQ ID NO: 2113 - protein, 118 aa, Artificial Sequence
  Chemically Synthesized
QVQLQESGGGLVQAGGSLRLSCAASGNISLTKVMGWYRQAPGKERELVAGIALGTITNYADSVKGRFTISRDNAKNTVYLQMNSLKPEDTAVYYCAAPEGAAWPFDYWGQGTQVTVSS

SEQ ID NO: 2114 - protein, 118 aa, Artificial Sequence
  Chemically Synthesized
QVQLQESGGGLVQAGGSLRLSCAASGYISIAAHMGWYRQAPGKERELVAGIGPGGTTKYADSVKGRFTISRDNAKNTVYLQMNSLKPEDTAVYYCAVFIATKSYHWYWGQGTQVTVSS

SEQ ID NO: 2115 - protein, 117 aa, Artificial Sequence
  Chemically Synthesized
QVQLQESGGGLVQAGGSLRLSCAASGSISYYRAMGWYRQAPGKERELVAAIARGGNTNYADSVKGRFTISRDNAKNTVYLQMNSLKPEDTAVYYCAVYSTRRTRIYWGQGTQVTVSS

SEQ ID NO: 2116 - protein, 109 aa, Artificial Sequence
  Chemically Synthesized
QVQLQESGGGLVQAGGSLRLSCAASGSISWPSSMGWYRQAPGKERELVAAINPGTSTYYADSVKGRFTISRDNAKNTVYLQMNSLKPEDTAVYYCAIYWGQGTQVTVSS

SEQ ID NO: 2117 - protein, 118 aa, Artificial Sequence
  Chemically Synthesized
QVQLQESGGGLVQAGGSLRLSCAASGTIFRYSWMGWYRQAPGKEREFVAGIDHGSSTYYADSVKGRFTISRDNAKNTVYLQMNSLKPEDTAVYYCAAWKYYSHRLRYWGQGTQVTVSS

SEQ ID NO: 2118 - protein, 116 aa, Artificial Sequence
  Chemically Synthesized
QVQLQESGGGLVQAGGSLRLSCAASGSISWDPTMGWYRQAPGKEREFVATIDSGATTNYADSVKGRFTISRDNAKNTVYLQMNSLKPEDTAVYYCAVDRSSVSSYWGQGTQVTVSS

SEQ ID NO: 2119 - protein, 110 aa, Artificial Sequence
  Chemically Synthesized
QVQLQESGGGLVQAGGSLRLSCAASGSISVYYYMGWYRQAPGKERELVLVPYADSVKGRFTISRDNAKNTVYLQMNSLKPEDTAVYYCAAYRTTGLSFYWGQGTQVTVSS

SEQ ID NO: 2120 - protein, 125 aa, Artificial Sequence
  Chemically Synthesized
QVQLQESGGGLVQAGGSLRLSCAASGTIFPVWVMGWYRQAPGKERELVAAINVGANTNYADSVKGRFTISRDNAKNTVYLQMNSLKPEDTAVYYCAAWIISTRLTTTTTTSLMYWGQGTQVTVSS

SEQ ID NO: 2121 - protein, 118 aa, Artificial Sequence
  Chemically Synthesized
QVQLQESGGGLVQAGGSLRLSCAASGYISQEPPMGWYRQAPGKEREFVASITFGGNTNYADSVKGRFTISRDNAKNTVYLQMNSLKPEDTAVYYCAVTRDYYDQHAYWGQGTQVTVSS

SEQ ID NO: 2122 - protein, 118 aa, Artificial Sequence
  Chemically Synthesized
QVQLQESGGGLVQAGGSLRLSCAASGSISFLVDMGWYRQAPGKEREFVATIDPGATTYYADSVKGRFTISRDNAKNTVYLQMNSLKPEDTAVYYCAVGVYARQALRYWGQGTQVTVSS

SEQ ID NO: 2123 - protein, 121 aa, Artificial Sequence
  Chemically Synthesized
QVQLQESGGGLVQAGGSLRLSCAASGTIFVDYFMGWYRQAPGKEREFVAAISIGSSTNYADSVKGRFTISRDNAKNTVYLQMNSLKPEDTAVYYCAADRSLTITLVLLFYWGQGTQVTVSS

SEQ ID NO: 2124 - protein, 118 aa, Artificial Sequence
  Chemically Synthesized
QVQLQESGGGLVQAGGSLRLSCAASGSIFYIPNMGWYRQAPGKERELVAGINQAGTNTNYADSVKGRFTISRDNAKNTVYLQMNSLKPEDTAVYYCAVRRTIDSCLYWGQGTQVTVSS

SEQ ID NO: 2125 - protein, 118 aa, Artificial Sequence
  Chemically Synthesized
QVQLQESGGGLVQAGGSLRLSCAASGTISSRQSMGWYRQAPGKERELVATIAIGGTTNYADSVKGRFTISRDNAKNTVYLQMNSLKPEDTAVYYCAAPTDVTVSHAYWGQGTQVTVSS

SEQ ID NO: 2126 - protein, 118 aa, Artificial Sequence
  Chemically Synthesized
QVQLQESGGGLVQAGGSLRLSCAASGTIFDRVYMGWYRQAPGKERELVAGIGFGGNTNYADSVKGRFTISRDNAKNTVYLQMNSLKPEDTAVYYCAAYNDTFVTHGYWGQGTQVTVSS

SEQ ID NO: 2127 - protein, 122 aa, Artificial Sequence
  Chemically Synthesized
QVQLQESGGGLVQAGGSLRLSCAASGYISGPRTMGWYRQAPGKEREFVASIGPGATTYYADSVKGRFTISRDNAKNTVYLQMNSLKPEDTAVYYCAAYYYVYGYYLTHHDYWGQGTQVTVSS

SEQ ID NO: 2128 - protein, 122 aa, Artificial Sequence
  Chemically Synthesized
QVQLQESGGGLVQAGGSLRLSCAASGSIFTSDLMGWYRQAPGKEREFVAGIDHGGNTYYADSVKGRFTISRDNAKNTVYLQMNSLKPEDTAVYYCAVDTYYYQSRGDYYDYWGQGTQVTVSS

SEQ ID NO: 2129 - protein, 118 aa, Artificial Sequence
  Chemically Synthesized
QVQLQESGGGLVQAGGSLRLSCAASGTIFSWTYMGWYRQAPGKEREFVAAINAGGNTYYADSVKGRFTISRDNAKNTVYLQMNSLKPEDTAVYYCAVYDRQPIGHYYWGQGTQVTVSS

SEQ ID NO: 2130 - protein, 115 aa, Artificial Sequence
  Chemically Synthesized
QVQLQESGGGLVQAGGSLRLSCAASGNMFRMGWYRQAPGKERELVATIAAGANTYYADSVKGRFTISRDNAKNTVYLQMNSLKPEDTAVYYCAVSSAIWIVHYYWGQGTQVTVSS

SEQ ID NO: 2131 - protein, 122 aa, Artificial Sequence
  Chemically Synthesized
QVQLQESGGGLVQAGGSLRLSCAASGTIFDNDYMGWYRQAPGKEREFVAGIDQGASTYYADSVKGRFTISRDNAKNTVYLQMNSLKPEDTAVYYCAADWTSGLLARTGLDYWGQGTQVTVSS

SEQ ID NO: 2132 - protein, 118 aa, Artificial Sequence
  Chemically Synthesized
QVQLQESGGGLVQAGGSLRLSCAASGNISRADSMGWYRQAPGKEREFVAAITTGGITNYADSVKGRFTISRDNAKNTVYLQMNSLKPEDTAVYYCAANQSDAVWHTYWGQGTQVTVSS

SEQ ID NO: 2133 - protein, 122 aa, Artificial Sequence
  Chemically Synthesized
QVQLQESGGGLVQAGGSLRLSCAASGNIFRSYDMGWYRQAPGKEREFVASINLGSTTYYADSVKGRFTISRDNAKNTVYLQMNSLKPEDTAVYYCAVVYTGPNDGSPYYSYWGQGTQVTVSS

SEQ ID NO: 2134 - protein, 117 aa, Artificial Sequence
  Chemically Synthesized
QVQLQESGGGLVQAGGSLRLSCAASGNISIRGSMGWYRQAPGKERELVAGIDDGLIPYADSVKGRFTISRDNAKNTVYLQMNSLKPEDTAVYYCAVTYVYVDRHPYWGQGTQVTVSS

SEQ ID NO: 2135 - protein, 121 aa, Artificial Sequence
  Chemically Synthesized
QVQLQESGGGLVQAGGSLRLSCAASGTISQYYYMGWYRQAPGKERELVAVLVTVVLPYADSVKGRFTISRDNAKNTVYLQMNSLKPEDTAVYYCAVANYLSFVGDGSLGYWGQGTQVTVSS

SEQ ID NO: 2136 - protein, 117 aa, Artificial Sequence
  Chemically Synthesized
QVQLQESGGGLVQAGGSLRLSCAASGNISYQFMGWYRQAPGKERELVASIGQGGSTNYADSVKGRFTISRDNAKNTVYLQMNSLKPEDTAVYYCAAQEGSYLYYAYWGQGTQVTVSS

SEQ ID NO: 2137 - protein, 118 aa, Artificial Sequence
  Chemically Synthesized
QVQLQESGGGLVQAGGSLRLSCAASGSIFVVVYMGWYRQAPGKERELVAAINRGGITNYADSVKGRFTISRDNAKNTVYLQMNSLKPEDTAVYYCAVRTQDQYYHQYWGQGTQVTVSS

SEQ ID NO: 2138 - protein, 118 aa, Artificial Sequence
  Chemically Synthesized
QVQLQESGGGLVQAGGSLRLSCAASGNISGTSAMGWYRQAPGKEREFVATIGIGGNTNYADSVKGRFTISRDNAKNTVYLQMNSLKPEDTAVYYCAVVFIYGNVLQYWGQGTQVTVSS

SEQ ID NO: 2139 - protein, 118 aa, Artificial Sequence
  Chemically Synthesized
QVQLQESGGGLVQAGGSLRLSCAASGNISQVYRMGWYRQAPGKERELVASISDGATTYYADSVKGRFTISRDNAKNTVYLQMNSLKPEDTAVYYCAAVDGQTYIHKYWGQGTQVTVSS

SEQ ID NO: 2140 - protein, 110 aa, Artificial Sequence
  Chemically Synthesized
QVQLQESGGGLVQAGGSLRLSCAASGSIFSTLWMGWYRQAPGKERELVATIDRGGSTYYADSVKGRFTISRDNAKNTVYLQMNSLKPEDTAVYYCAVSYWGQGTQVTVSS

SEQ ID NO: 2141 - protein, 122 aa, Artificial Sequence
  Chemically Synthesized
QVQLQESGGGLVQAGGSLRLSCAASGSISDGSGMGWYRQAPGKERELVAGIADGANTYYADSVKGRFTISRDNAKNTVYLQMNSLKPEDTAVYYCAVYKVYQQNFFDDLFYWGQGTQVTVSS

SEQ ID NO: 2142 - protein, 117 aa, Artificial Sequence
  Chemically Synthesized
QVQLQESGGGLVQAGGSLRLSCAASGTIFAVYEMGWYRQAPGKERELVAAISTGSTNYADSVKGRFTISRDNAKNTVYLQMNSLKPEDTAVYYCAVHDYRGYVFYYWGQGTQVTVSS

SEQ ID NO: 2143 - protein, 111 aa, Artificial Sequence
  Chemically Synthesized
QVQLQESGGGLVQAGGSLRLSCAASGTIFGTGGMGWYRQAPGKERELVAAIATGSTTYYADSVKGRFTISRDNAKNTVYLQMNSLKPEDTAVYYCARHLYWGQGTQVTVSS

SEQ ID NO: 2144 - protein, 122 aa, Artificial Sequence
  Chemically Synthesized
QVQLQESGGGLVQAGGSLRLSCAASGSISAWIYMGWYRQAPGKERELVAAIAQGSSTYYADSVKGRFTISRDNAKNTVYLQMNSLKPEDTAVYYCAVYGVILRTPDPDYDYWGQGTQVTVSS

SEQ ID NO: 2145 - protein, 117 aa, Artificial Sequence
  Chemically Synthesized
QVQLQESGGGLVQAGGSLRLSCAASGSISLSGTMGWYRQAPGKERELVAAIDQGGNTYYADSVKGRFTISRDNAKNTVYLQMNSLKPEDTAVYYCAVDPSVSGTMYWGQGTQVTVSS

SEQ ID NO: 2146 - protein, 118 aa, Artificial Sequence
  Chemically Synthesized
QVQLQESGGGLVQAGGSLRLSCAASGSISVQYAMGWYRQAPGKERELVASISYGANTNYADSVKGRFTISRDNAKNTVYLQMNSLKPEDTAVYYCAAQGYIYDNLTYWGQGTQVTVSS

SEQ ID NO: 2147 - protein, 122 aa, Artificial Sequence
  Chemically Synthesized
QVQLQESGGGLVQAGGSLRLSCAASGYIFTADDMGWYRQAPGKERELVAAIAAGGTTNYADSVKGRFTISRDNAKNTVYLQMNSLKPEDTAVYYCAVGYLSTLDFFDIYRYWGQGTQVTVSS

SEQ ID NO: 2148 - protein, 116 aa, Artificial Sequence
  Chemically Synthesized
QVQLQESGGGLVQAGGSLRLSCAASGSIFDAPDMGWYRQAPGKEREFVAGINSVVLPYADSVKGRFTISRDNAKNTVYLQMNSLKPEDTAVYYCAAGAHTWSRIYWGQGTQVTVSS

SEQ ID NO: 2149 - protein, 109 aa, Artificial Sequence
  Chemically Synthesized
QVQLQESGGGLVQAGGSLRLSCAASGNISTRPGMGWYRQAPGKERELVAGIDQGGNTNYADSVKGRFTISRDNAKNTVYLQMNSLKPEDTAVYYCASYWGQGTQVTVSS

SEQ ID NO: 2150 - protein, 118 aa, Artificial Sequence
  Chemically Synthesized
QVQLQESGGGLVQAGGSLRLSCAASGTILMGWYRQAPGKERELVAAITHGTTTYYADSVKGRFTISRDNAKNTVYLQMNSLKPEDTAVYYCAVTLVLPLQLHLDHYYWGQGTQVTVSS

SEQ ID NO: 2151 - protein, 118 aa, Artificial Sequence
  Chemically Synthesized
QVQLQESGGGLVQAGGSLRLSCAASGYISDTDGMGWYRQAPGKERELVASISGGATTNYADSVKGRFTISRDNAKNTVYLQMNSLKPEDTAVYYCAADDEQFVYLDYWGQGTQVTVSS

SEQ ID NO: 2152 - protein, 117 aa, Artificial Sequence
  Chemically Synthesized
QVQLQESGGGLVQAGGSLRLSCAASGNISTYGYMGWYRQAPGKEREFVAAIGYGGTTYYADSVKGRFTISRDNAKNTVYLQMNSLKPEDTAVYYCAVRYTRWSLRYWGQGTQVTVSS

SEQ ID NO: 2153 - protein, 125 aa, Artificial Sequence
  Chemically Synthesized
QVQLQESGGGLVQAGGSLRLSCAASGNISDYSDMGWYRQAPGKEREFVAAIDGGTSTNYADSVKGRFTISRDNAKNTVYLQMNSLKPEDTAVYYCAVGYSYRATVSLLVTNLLYWGQGTQVTVSS

SEQ ID NO: 2154 - protein, 118 aa, Artificial Sequence
  Chemically Synthesized
QVQLQESGGGLVQAGGSLRLSCAASGTIFPTYYMGWYRQAPGKERELVATIDRGSNTNYADSVKGRFTISRDNAKNTVYLQMNSLKPEDTAVYYCAAGGLDEPRHTYWGQGTQVTVSS

SEQ ID NO: 2155 - protein, 117 aa, Artificial Sequence
  Chemically Synthesized
QVQLQESGGGLVQAGGSLRLSCAASGSIFTLDDMGWYRQAPGKERELVAGIARGTNTYADSVKGRFTISRDNAKNTVYLQMNSLKPEDTAVYYCAAWGDLREYYPYWGQGTQVTVSS

SEQ ID NO: 2156 - protein, 121 aa, Artificial Sequence
  Chemically Synthesized
QVQLQESGGGLVQAGGSLRLSCAASGNISDDSFMGWYRQAPGKEREFVASISEVVIPYADSVKGRFTISRDNAKNTVYLQMNSLKPEDTAVYYCAVRYVHRVDDDHVYLYWGQGTQVTVSS

SEQ ID NO: 2157 - protein, 126 aa, Artificial Sequence
  Chemically Synthesized
QVQLQESGGGLVQAGGSLRLSCAASGNIFRDVGMGWYRQAPGKEREFVASISYGTNTNYADSVKGRFTISRDNAKNTVYLQMNSLKPEDTAVYYCAATSWDDAQTGYWVGIDFRYWGQGTQVTVSS

SEQ ID NO: 2158 - protein, 118 aa, Artificial Sequence
  Chemically Synthesized
QVQLQESGGGLVQAGGSLRLSCAASGTIFDYAQMGWYRQAPGKERELVAGITGGSTTNYADSVKGRFTISRDNAKNTVYLQMNSLKPEDTAVYYCAVAYRAKHGFDYWGQGTQVTVSS

SEQ ID NO: 2159 - protein, 114 aa, Artificial Sequence
  Chemically Synthesized
QVQLQESGGGLVQAGGSLRLSCAASGTIFDPAVMGWYRQAPGKERELVASINPGSNTNYADSVKGRFTISRDNAKNTVYLQMNSLKPEDTAVYYCAAYSGLFYWGQGTQVTVSS

SEQ ID NO: 2160 - protein, 118 aa, Artificial Sequence
  Chemically Synthesized
QVQLQESGGGLVQAGGSLRLSCAASGTIFRDPLMGWYRQAPGKEREFVASIAWGAITNYADSVKGRFTISRDNAKNTVYLQMNSLKPEDTAVYYCAVPQGGAHRHLYWGQGTQVTVSS

SEQ ID NO: 2161 - protein, 122 aa, Artificial Sequence
  Chemically Synthesized
QVQLQESGGGLVQAGGSLRLSCAASGSIFPLDHMGWYRQAPGKERELVATIDRGAITNYADSVKGRFTISRDNAKNTVYLQMNSLKPEDTAVYYCAVQVPDFADYAPVFAYWGQGTQVTVSS

SEQ ID NO: 2162 - protein, 118 aa, Artificial Sequence
  Chemically Synthesized
QVQLQESGGGLVQAGGSLRLSCAASGNISYLTAMGWYRQAPGKEREFVAAIGRGSNTYYADSVKGRFTISRDNAKNTVYLQMNSLKPEDTAVYYCAVTRTLWWQYPYWGQGTQVTVSS

SEQ ID NO: 2163 - protein, 122 aa, Artificial Sequence
  Chemically Synthesized
QVQLQESGGGLVQAGGSLRLSCAASGTISKHVDMGWYRQAPGKERELVASISRGGSTNYADSVKGRFTISRDNAKNTVYLQMNSLKPEDTAVYYCAVAINNDWDPPYPHDYWGQGTQVTVSS

SEQ ID NO: 2164 - protein, 118 aa, Artificial Sequence
  Chemically Synthesized
QVQLQESGGGLVQAGGSLRLSCAASGTISAGPEMGWYRQAPGKERELVAGISYGATTNYADSVKGRFTISRDNAKNTVYLQMNSLKPEDTAVYYCAVTWNFYNEHDYWGQGTQVTVSS

SEQ ID NO: 2165 - protein, 122 aa, Artificial Sequence
  Chemically Synthesized
QVQLQESGGGLVQAGGSLRLSCAASGSIFGLWFMGWYRQAPGKERELVAAISNGASTYYADSVKGRFTISRDNAKNTVYLQMNSLKPEDTAVYYCAAIYRDDYDGTEGHDYWGQGTQVTVSS

SEQ ID NO: 2166 - protein, 118 aa, Artificial Sequence
  Chemically Synthesized
QVQLQESGGGLVQAGGSLRLSCAASGNISVVDVMGWYRQAPGKEREFVAGISEGGITNYADSVKGRFTISRDNAKNTVYLQMNSLKPEDTAVYYCAVYNPYGLRLVYWGQGTQVTVSS

SEQ ID NO: 2167 - protein, 122 aa, Artificial Sequence
  Chemically Synthesized
QVQLQESGGGLVQAGGSLRLSCAASGSIFYAYVMGWYRQAPGKERELVATITQGAITNYADSVKGRFTISRDNAKNTVYLQMNSLKPEDTAVYYCAVREWITLTGPPGYRYWGQGTQVTVSS

SEQ ID NO: 2168 - protein, 122 aa, Artificial Sequence
  Chemically Synthesized
QVQLQESGGGLVQAGGSLRLSCAASGSISATATMGWYRQAPGKEREFVAAIGYGTITNYADSVKGRFTISRDNAKNTVYLQMNSLKPEDTAVYYCAVNEYDVDAYQIVHGYWGQGTQVTVSS

SEQ ID NO: 2169 - protein, 126 aa, Artificial Sequence
  Chemically Synthesized
QVQLQESGGGLVQAGGSLRLSCAASGNISGQHTMGWYRQAPGKERELVAAINGGTTTYYADSVKGRFTISRDNAKNTVYLQMNSLKPEDTAVYYCAAFLNSYDPYAWDDPRGYSYWGQGTQVTVSS

SEQ ID NO: 2170 - protein, 118 aa, Artificial Sequence
  Chemically Synthesized
QVQLQESGGGLVQAGGSLRLSCAASGTISINRYMGWYRQAPGKERELVAAISYGSITNYADSVKGRFTISRDNAKNTVYLQMNSLKPEDTAVYYCAAIVYVDTDHYYWGQGTQVTVSS

SEQ ID NO: 2171 - protein, 126 aa, Artificial Sequence
  Chemically Synthesized
QVQLQESGGGLVQAGGSLRLSCAASGNISLANNMGWYRQAPGKEREFVAGIGRGASTYYADSVKGRFTISRDNAKNTVYLQMNSLKPEDTAVYYCAVPYYGGDPHGDPYYLTLYYWGQGTQVTVSS

SEQ ID NO: 2172 - protein, 122 aa, Artificial Sequence
  Chemically Synthesized
QVQLQESGGGLVQAGGSLRLSCAASGSISWHGAMGWYRQAPGKERELVAGITLGGTTYYADSVKGRFTISRDNAKNTVYLQMNSLKPEDTAVYYCAAYAGPGGITQTYLSYWGQGTQVTVSS

SEQ ID NO: 2173 - protein, 118 aa, Artificial Sequence
  Chemically Synthesized
QVQLQESGGGLVQAGGSLRLSCAASGNISPYDAMGWYRQAPGKEREFVAAIDVGGSTYYADSVKGRFTISRDNAKNTVYLQMNSLKPEDTAVYYCAVGPLPEALLDYWGQGTQVTVSS

SEQ ID NO: 2174 - protein, 118 aa, Artificial Sequence
  Chemically Synthesized
QVQLQESGGGLVQAGGSLRLSCAASGSISTWYLMGWYRQAPGKEREFVATITYGASTNYADSVKGRFTISRDNAKNTVYLQMNSLKPEDTAVYYCAVAPDYVSLFAYWGQGTQVTVSS

SEQ ID NO: 2175 - protein, 118 aa, Artificial Sequence
  Chemically Synthesized
QVQLQESGGGLVQAGGSLRLSCAASGSISPAYVMGWYRQAPGKERELVAGIDVGGTTYYADSVKGRFTISRDNAKNTVYLQMNSLKPEDTAVYYCAVRSHANDIYLYWGQGTQVTVSS

SEQ ID NO: 2176 - protein, 113 aa, Artificial Sequence
  Chemically Synthesized
QVQLQESGGGLVQAGGSLRLSCAASGTIFASKHMGWYRQAPGKEREFVAGITYGGSTNYADSVKGRFTISRDNAKNTVYLQMNSLKPEDTAVYYCAAYSHKYWGQGTQVTVSS

SEQ ID NO: 2177 - protein, 117 aa, Artificial Sequence
  Chemically Synthesized
QVQLQESGGGLVQAGGSLRLSCAASGTIFLYLYMGWYRQAPGKEREFVAGITGGTTNYADSVKGRFTISRDNAKNTVYLQMNSLKPEDTAVYYCAASRRNRGDLRYWGQGTQVTVSS

SEQ ID NO: 2178 - protein, 126 aa, Artificial Sequence
  Chemically Synthesized
QVQLQESGGGLVQAGGSLRLSCAASGSISYWYAMGWYRQAPGKEREFVASIAQGASTYYADSVKGRFTISRDNAKNTVYLQMNSLKPEDTAVYYCAAGWTNTTDTRYWGTYTHYYWGQGTQVTVSS

SEQ ID NO: 2179 - protein, 118 aa, Artificial Sequence
  Chemically Synthesized
QVQLQESGGGLVQAGGSLRLSCAASGSISHDGDMGWYRQAPGKERELVASIAAGASTNYADSVKGRFTISRDNAKNTVYLQMNSLKPEDTAVYYCAALRAHAEWHDYWGQGTQVTVSS

SEQ ID NO: 2180 - protein, 122 aa, Artificial Sequence
  Chemically Synthesized
QVQLQESGGGLVQAGGSLRLSCAASGNIFRVVYMGWYRQAPGKEREFVAGINNGTSTNYADSVKGRFTISRDNAKNTVYLQMNSLKPEDTAVYYCAASVNYPWFPRRYHRYWGQGTQVTVSS

SEQ ID NO: 2181 - protein, 122 aa, Artificial Sequence
  Chemically Synthesized
QVQLQESGGGLVQAGGSLRLSCAASGYISDLAYMGWYRQAPGKERELVAGITDGGNTNYADSVKGRFTISRDNAKNTVYLQMNSLKPEDTAVYYCAALQYGHEYRDAGHVYWGQGTQVTVSS

SEQ ID NO: 2182 - protein, 118 aa, Artificial Sequence
  Chemically Synthesized
QVQLQESGGGLVQAGGSLRLSCAASGNISYLSRMGWYRQAPGKEREFVATIDDGTITNYADSVKGRFTISRDNAKNTVYLQMNSLKPEDTAVYYCAVGKSDPTVYRYWGQGTQVTVSS

SEQ ID NO: 2183 - protein, 122 aa, Artificial Sequence
  Chemically Synthesized
QVQLQESGGGLVQAGGSLRLSCAASGNIFYSSSMGWYRQAPGKEREFVATIDQGTNTNYADSVKGRFTISRDNAKNTVYLQMNSLKPEDTAVYYCAVGGTTSFQNDTNYVYWGQGTQVTVSS

SEQ ID NO: 2184 - protein, 117 aa, Artificial Sequence
  Chemically Synthesized
QVQLQESGGGLVQAGGSLRLSCAASGNIFAPYDMGWYRQAPGKEREFVASISWGGNTYYADSVKGRFTISRDNAKNTVYLQMNSLKPEDTAVYYCAVPADTSSFIYWGQGTQVTVSS

SEQ ID NO: 2185 - protein, 118 aa, Artificial Sequence
  Chemically Synthesized
QVQLQESGGGLVQAGGSLRLSCAASGSISYKDYMGWYRQAPGKERELVAGINDGSTTNYADSVKGRFTISRDNAKNTVYLQMNSLKPEDTAVYYCAVYVDPYSVHVYWGQGTQVTVSS

SEQ ID NO: 2186 - protein, 112 aa, Artificial Sequence
  Chemically Synthesized
QVQLQESGGGLVQAGGSLRLSCAASGYISDYGSMGWYRQAPGKEREFLTVLLPYADSVKGRFTISRDNAKNTVYLQMNSLKPEDTAVYYCAARQPVVAPLYWGQGTQVTVSS

SEQ ID NO: 2187 - protein, 118 aa, Artificial Sequence
  Chemically Synthesized
QVQLQESGGGLVQAGGSLRLSCAASGYIFRGPDMGWYRQAPGKEREFVAGITYGGTTYYADSVKGRFTISRDNAKNTVYLQMNSLKPEDTAVYYCAVRRRLRWLHSYWGQGTQVTVSS

SEQ ID NO: 2188 - protein, 118 aa, Artificial Sequence
  Chemically Synthesized
QVQLQESGGGLVQAGGSLRLSCAASGYISYRARMGWYRQAPGKERELVAAITTGGTTYYADSVKGRFTISRDNAKNTVYLQMNSLKPEDTAVYYCAAGAWTWHRHGYWGQGTQVTVSS

SEQ ID NO: 2189 - protein, 118 aa, Artificial Sequence
  Chemically Synthesized
QVQLQESGGGLVQAGGSLRLSCAASGTIFERATMGWYRQAPGKERELVATIAVGTSTYYADSVKGRFTISRDNAKNTVYLQMNSLKPEDTAVYYCAAYHNINASLRYWGQGTQVTVSS

SEQ ID NO: 2190 - protein, 118 aa, Artificial Sequence
  Chemically Synthesized
QVQLQESGGGLVQAGGSLRLSCAASGTIFYTSVMGWYRQAPGKERELVATIGYGATTNYADSVKGRFTISRDNAKNTVYLQMNSLKPEDTAVYYCAVYIDVQQGLDYWGQGTQVTVSS

SEQ ID NO: 2191 - protein, 122 aa, Artificial Sequence
  Chemically Synthesized
QVQLQESGGGLVQAGGSLRLSCAASGYIFWHNTMGWYRQAPGKEREFVASITRGTSTYYADSVKGRFTISRDNAKNTVYLQMNSLKPEDTAVYYCAARWYYNAKWRYAHGYWGQGTQVTVSS

SEQ ID NO: 2192 - protein, 122 aa, Artificial Sequence
  Chemically Synthesized
QVQLQESGGGLVQAGGSLRLSCAASGNIFRLGHMGWYRQAPGKEREFVAAISRGGTTYYADSVKGRFTISRDNAKNTVYLQMNSLKPEDTAVYYCAVGTYGLYSHPYTLTYWGQGTQVTVSS

SEQ ID NO: 2193 - protein, 123 aa, Artificial Sequence
  Chemically Synthesized
QVQLQESGGGLVQAGGSLRLSCAASGTIFLIPFMGWYRQAPGKEREFVAAIDLGTTTYYADSVKGRFTISRDNAKNTVYLQMNSLKPEDTAVYYCAAQAQYRPEVTQTLHDYWGQGTQVTVSS

SEQ ID NO: 2194 - protein, 117 aa, Artificial Sequence
  Chemically Synthesized
QVQLQESGGGLVQAGGSLRLSCAASGYIFGSVMGWYRQAPGKEREFVATIDIGGTTNYADSVKGRFTISRDNAKNTVYLQMNSLKPEDTAVYYCAVYYTDKPPFIYWGQGTQVTVSS

SEQ ID NO: 2195 - protein, 118 aa, Artificial Sequence
  Chemically Synthesized
QVQLQESGGGLVQAGGSLRLSCAASGTISYGDAMGWYRQAPGKERELVAGITDGASTNYADSVKGRFTISRDNAKNTVYLQMNSLKPEDTAVYYCAAYADYLKYYQYWGQGTQVTVSS

SEQ ID NO: 2196 - protein, 126 aa, Artificial Sequence
  Chemically Synthesized
QVQLQESGGGLVQAGGSLRLSCAASGTIFGQQSMGWYRQAPGKERELVAAIDYGGTTNYADSVKGRFTISRDNAKNTVYLQMNSLKPEDTAVYYCAVGAYGDRGQYYTIDSPFRYWGQGTQVTVSS

SEQ ID NO: 2197 - protein, 122 aa, Artificial Sequence
  Chemically Synthesized
QVQLQESGGGLVQAGGSLRLSCAASGYISDPKVMGWYRQAPGKERELVATIAAGGTTYYADSVKGRFTISRDNAKNTVYLQMNSLKPEDTAVYYCAAYYDYRVTDKVNHDYWGQGTQVTVSS

SEQ ID NO: 2198 - protein, 117 aa, Artificial Sequence
  Chemically Synthesized
QVQLQESGGGLVQAGGSLRLSCAASGTISFTKPMGWYRQAPGKEREFVAAISYGGSTNYADSVKGRFTISRDNAKNTVYLQMNSLKPEDTAVYYCAVALYYRRYYYWGQGTQVTVSS

SEQ ID NO: 2199 - protein, 119 aa, Artificial Sequence
  Chemically Synthesized
QVQLQESGGGLVQAGGSLRLSCAASGTISDPPYMGWYRQAPGKEREFVASIAPGANTNYADSVKGRFTISRDNAKNTVYLQMNSLKPEDTAVYYCAAYGNYHPDPHSYWGQGTQVTVSS

SEQ ID NO: 2200 - protein, 122 aa, Artificial Sequence
  Chemically Synthesized
QVQLQESGGGLVQAGGSLRLSCAASGTISYGVEMGWYRQAPGKERELVAGIDGGGSTNYADSVKGRFTISRDNAKNTVYLQMNSLKPEDTAVYYCAAASPWLVYTTHYHGYWGQGTQVTVSS

SEQ ID NO: 2201 - protein, 121 aa, Artificial Sequence
  Chemically Synthesized
QVQLQESGGGLVQAGGSLRLSCAASGYISWEVMGWYRQAPGKERELVAGIGYGANTNYADSVKGRFTISRDNAKNTVYLQMNSLKPEDTAVYYCAVHVNLGSALADNYPYWGQGTQVTVSS

SEQ ID NO: 2202 - protein, 118 aa, Artificial Sequence
  Chemically Synthesized
QVQLQESGGGLVQAGGSLRLSCAASGSIFAPYSMGWYRQAPGKERELVATISNGATTNYADSVKGRFTISRDNAKNTVYLQMNSLKPEDTAVYYCAAAQPDRDDYRYWGQGTQVTVSS

SEQ ID NO: 2203 - protein, 118 aa, Artificial Sequence
  Chemically Synthesized
QVQLQESGGGLVQAGGSLRLSCAASGTIFHYRTMGWYRQAPGKERELVAAINYGGNTYYADSVKGRFTISRDNAKNTVYLQMNSLKPEDTAVYYCAARRPLSYTYRYWGQGTQVTVSS

SEQ ID NO: 2204 - protein, 117 aa, Artificial Sequence
  Chemically Synthesized
QVQLQESGGGLVQAGGSLRLSCAASGYISYYGTMGWYRQAPGKERELVAAIGSGGITYYADSVKGRFTISRDNAKNTVYLQMNSLKPEDTAVYYCAVYYPYGVHLYWGQGTQVTVSS

SEQ ID NO: 2205 - protein, 117 aa, Artificial Sequence
  Chemically Synthesized
QVQLQESGGGLVQAGGSLRLSCAASGTIFAEYVMGWYRQAPGKERELVATITPGSITNYADSVKGRFTISRDNAKNTVYLQMNSLKPEDTAVYYCAVSYNYYPFVYWGQGTQVTVSS

SEQ ID NO: 2206 - protein, 121 aa, Artificial Sequence
  Chemically Synthesized
QVQLQESGGGLVQAGGSLRLSCAASGYIFAENNMGWYRQAPGKEREFVAAITQGGNTNYADSVKGRFTISRDNAKNTVYLQMNSLKPEDTAVYYCAVENYGIDSTTRVLYWGQGTQVTVSS

SEQ ID NO: 2207 - protein, 122 aa, Artificial Sequence
  Chemically Synthesized
QVQLQESGGGLVQAGGSLRLSCAASGNIFIPDYMGWYRQAPGKERELVAGIADGSTTNYADSVKGRFTISRDNAKNTVYLQMNSLKPEDTAVYYCAVDWSGHTYYRHGHAYWGQGTQVTVSS

SEQ ID NO: 2208 - protein, 121 aa, Artificial Sequence
  Chemically Synthesized
QVQLQESGGGLVQAGGSLRLSCAASGNISNGLMGWYRQAPGKEREFVASISDGGSTYYADSVKGRFTISRDNAKNTVYLQMNSLKPEDTAVYYCAAYDTFGDYAAYDHYYWGQGTQVTVSS

SEQ ID NO: 2209 - protein, 115 aa, Artificial Sequence
  Chemically Synthesized
QVQLQESGGGLVQAGGSLRLSCAASGYISPWAIMGWYRQAPGKERELVASISDGGTTYYADSVKGRFTISRDNAKNTVYLQMNSLKPEDTAVYYCANTLTTLFYWGQGTQVTVSS

SEQ ID NO: 2210 - protein, 118 aa, Artificial Sequence
  Chemically Synthesized
QVQLQESGGGLVQAGGSLRLSCAASGTISARYTMGWYRQAPGKEREFVAAITQGANTNYADSVKGRFTISRDNAKNTVYLQMNSLKPEDTAVYYCAADQDDKWTHSYWGQGTQVTVSS

SEQ ID NO: 2211 - protein, 122 aa, Artificial Sequence
  Chemically Synthesized
QVQLQESGGGLVQAGGSLRLSCAASGTIFYAISMGWYRQAPGKERELVASIAPGGNTNYADSVKGRFTISRDNAKNTVYLQMNSLKPEDTAVYYCAVNPVPQRVYAYQFGYWGQGTQVTVSS

SEQ ID NO: 2212 - protein, 121 aa, Artificial Sequence
  Chemically Synthesized
QVQLQESGGGLVQAGGSLRLSCAASGTISVVSRMGWYRQAPGKERELVATIVSVLLPYADSVKGRFTISRDNAKNTVYLQMNSLKPEDTAVYYCAAPGWASRVHDDALYYWGQGTQVTVSS

SEQ ID NO: 2213 - protein, 119 aa, Artificial Sequence
  Chemically Synthesized
QVQLQESGGGLVQAGGSLRLSCAASGNIFDPLYMGWYRQAPGKERELVATIGRHGSTTYYADSVKGRFTISRDNAKNTVYLQMNSLKPEDTAVYYCAARRWYGFYHYYWGQGTQVTVSS

SEQ ID NO: 2214 - protein, 121 aa, Artificial Sequence
  Chemically Synthesized
QVQLQESGGGLVQAGGSLRLSCAASGCLMGWYRQAPGKERELVATISYGSTTNYADSVKGRFTISRDNAKNTVYLQMNSLKPEDTAVYYCAARVDSNSPRSTPNSLSYAYWGQGTQVTVSS

SEQ ID NO: 2215 - protein, 117 aa, Artificial Sequence
  Chemically Synthesized
QVQLQESGGGLVQAGGSLRLSCAASGSISYDYMGWYRQAPGKEREFVAAIDQGGNTYYADSVKGRFTISRDNAKNTVYLQMNSLKPEDTAVYYCAVRDYRYGAYPYWGQGTQVTVSS

SEQ ID NO: 2216 - protein, 118 aa, Artificial Sequence
  Chemically Synthesized
QVQLQESGGGLVQAGGSLRLSCAASGSISNFYRMGWYRQAPGKEREFGAGGNTNYADSVKGRFTISRDNAKNTVYLQMNSLKPEDTAVYYCAAFAEDADGYYQHHYYWGQGTQVTVSS

SEQ ID NO: 2217 - protein, 117 aa, Artificial Sequence
  Chemically Synthesized
QVQLQESGGGLVQAGGSLRLSCAASGTIFGKKVMGWYRQAPGKEREFVAGITAGTTTNYADSVKGRFTISRDNAKNTVYLQMNSLKPEDTAVYYCAANRRKSLTLYWGQGTQVTVSS

SEQ ID NO: 2218 - protein, 113 aa, Artificial Sequence
  Chemically Synthesized
QVQLQESGGGLVQAGGSLRLSCAASGYIFDRLRMGWYRQAPGKERELVASINQGSSTNYADSVKGRFTISRDNAKNTVYLQMNSLKPEDTAVYYCAVRCVIYWGQGTQVTVSS

SEQ ID NO: 2219 - protein, 122 aa, Artificial Sequence
  Chemically Synthesized
QVQLQESGGGLVQAGGSLRLSCAASGNIFTLYRMGWYRQAPGKEREFVAAISGGTSTYYADSVKGRFTISRDNAKNTVYLQMNSLKPEDTAVYYCAVASRYRYGGVQYFRYWGQGTQVTVSS

SEQ ID NO: 2220 - protein, 118 aa, Artificial Sequence
  Chemically Synthesized
QVQLQESGGGLVQAGGSLRLSCAASGSIFALTVMGWYRQAPGKERELVAGIDVGGSTYYADSVKGRFTISRDNAKNTVYLQMNSLKPEDTAVYYCAASIADIYGYPYWGQGTQVTVSS

SEQ ID NO: 2221 - protein, 122 aa, Artificial Sequence
  Chemically Synthesized
QVQLQESGGGLVQAGGSLRLSCAASGNIFEPYYMGWYRQAPGKERELVAGISDGAITYYADSVKGRFTISRDNAKNTVYLQMNSLKPEDTAVYYCAADRLYSTYASLPHAYWGQGTQVTVSS

SEQ ID NO: 2222 - protein, 118 aa, Artificial Sequence
  Chemically Synthesized
QVQLQESGGGLVQAGGSLRLSCAASGSIFLLYAMGWYRQAPGKERELVASIDIGANTYYADSVKGRFTISRDNAKNTVYLQMNSLKPEDTAVYYCAAYDGSSPQFGYWGQGTQVTVSS

SEQ ID NO: 2223 - protein, 117 aa, Artificial Sequence
  Chemically Synthesized
QVQLQESGGGLVQAGGSLRLSCAASGTIFSSYMGWYRQAPGKEREFVATISRGSITYYADSVKGRFTISRDNAKNTVYLQMNSLKPEDTAVYYCAVHYYDFALYWYWGQGTQVTVSS

SEQ ID NO: 2224 - protein, 117 aa, Artificial Sequence
  Chemically Synthesized
QVQLQESGGGLVQAGGSLRLSCAASGSISAAFTMGWYRQAPGKEREFVAGINRGGNTNYADSVKGRFTISRDNAKNTVYLQMNSLKPEDTAVYYCAVYYGPYGHGYWGQGTQVTVSS

SEQ ID NO: 2225 - protein, 118 aa, Artificial Sequence
  Chemically Synthesized
QVQLQESGGGLVQAGGSLRLSCAASGNISSVTYMGWYRQAPGKEREFVATINSGAITYYADSVKGRFTISRDNAKNTVYLQMNSLKPEDTAVYYCAVKRGPIGKHDYWGQGTQVTVSS

SEQ ID NO: 2226 - protein, 126 aa, Artificial Sequence
  Chemically Synthesized
QVQLQESGGGLVQAGGSLRLSCAASGNISGPSSMGWYRQAPGKERELVAAIGPGGSTYYADSVKGRFTISRDNAKNTVYLQMNSLKPEDTAVYYCAVVTDIQTTGGYGDWTWFRYWGQGTQVTVSS

SEQ ID NO: 2227 - protein, 118 aa, Artificial Sequence
  Chemically Synthesized
QVQLQESGGGLVQAGGSLRLSCAASGNIFASHGMGWYRQAPGKERELLPLLVVVVLPYADSVKGRFTISRDNAKNTVYLQMNSLKPEDTAVYYCAADVISEIVTLRYWGQGTQVTVSS

SEQ ID NO: 2228 - protein, 117 aa, Artificial Sequence
  Chemically Synthesized
QVQLQESGGGLVQAGGSLRLSCAASGSIFTTMMGWYRQAPGKERELVATISAGGTTNYADSVKGRFTISRDNAKNTVYLQMNSLKPEDTAVYYCAAFRVSPYTHDYWGQGTQVTVSS

SEQ ID NO: 2229 - protein, 118 aa, Artificial Sequence
  Chemically Synthesized
QVQLQESGGGLVQAGGSLRLSCAASGTIFAYYLMGWYRQAPGKERELVAAIGTGTTTNYADSVKGRFTISRDNAKNTVYLQMNSLKPEDTAVYYCAVDLKNPYRYYYWGQGTQVTVSS

SEQ ID NO: 2230 - protein, 119 aa, Artificial Sequence
  Chemically Synthesized
QVQLQESGGGLVQAGGSLRLSCAASGSISAPSFRMGWYRQAPGKERELVAGIDDGGTTYYADSVKGRFTISRDNAKNTVYLQMNSLKPEDTAVYYCAAENDRQQGYAYWGQGTQVTVSS

SEQ ID NO: 2231 - protein, 122 aa, Artificial Sequence
  Chemically Synthesized
QVQLQESGGGLVQAGGSLRLSCAASGYISYPDYMGWYRQAPGKERELVAAITGGGTTYYADSVKGRFTISRDNAKNTVYLQMNSLKPEDTAVYYCAAYYQDNGWLPYPHRYWGQGTQVTVSS

SEQ ID NO: 2232 - protein, 118 aa, Artificial Sequence
  Chemically Synthesized
QVQLQESGGGLVQAGGSLRLSCAASGTIFQLDDMGWYRQAPGKEREFVAGITSGGSTYYADSVKGRFTISRDNAKNTVYLQMNSLKPEDTAVYYCAAGHYAHYDLNYWGQGTQVTVSS

SEQ ID NO: 2233 - protein, 118 aa, Artificial Sequence
  Chemically Synthesized
QVQLQESGGGLVQAGGSLRLSCAASGNIFVARIMGWYRQAPGKERELVAAITGGATTYYADSVKGRFTISRDNAKNTVYLQMNSLKPEDTAVYYCAVFFTLTDPFRYWGQGTQVTVSS

SEQ ID NO: 2234 - protein, 126 aa, Artificial Sequence
  Chemically Synthesized
QVQLQESGGGLVQAGGSLRLSCAASGNIFAYFYMGWYRQAPGKERELVAAIGDGASTNYADSVKGRFTISRDNAKNTVYLQMNSLKPEDTAVYYCAVRRYRWYLFPIDYYRDHTYWGQGTQVTVSS

SEQ ID NO: 2235 - protein, 119 aa, Artificial Sequence
  Chemically Synthesized
QVQLQESGGGLVQAGGSLRLSCAASGTISPYYIMGWYRQAPGKERELVAAIALGGTTNYADSVKGRFTISRDNAKNTVYLQMNSLKPEDTAVYYCAVQHAGDTDEHAYWGQGTQVTVSS

SEQ ID NO: 2236 - protein, 121 aa, Artificial Sequence
  Chemically Synthesized
QVQLQESGGGLVQAGGSLRLSCAASGNISSRSMGWYRQAPGKEREFVAGINSGATTNYADSVKGRFTISRDNAKNTVYLQMNSLKPEDTAVYYCAAWADDVQLYYSIHEYWGQGTQVTVSS

SEQ ID NO: 2237 - protein, 118 aa, Artificial Sequence
  Chemically Synthesized
QVQLQESGGGLVQAGGSLRLSCAASGNISSSPYMGWYRQAPGKERELVAGIDLGANTNYADSVKGRFTISRDNAKNTVYLQMNSLKPEDTAVYYCAATRKHGAHFPYWGQGTQVTVSS

SEQ ID NO: 2238 - protein, 118 aa, Artificial Sequence
  Chemically Synthesized
QVQLQESGGGLVQAGGSLRLSCAASGSISLGAKMGWYRQAPGKERELVAGIGVGATTYYADSVKGRFTISRDNAKNTVYLQMNSLKPEDTAVYYCAAGLAVSLGLWYWGQGTQVTVSS

SEQ ID NO: 2239 - protein, 125 aa, Artificial Sequence
  Chemically Synthesized
QVQLQESGGGLVQAGGSLRLSCAASGTIFDDAFMGWYRQAPGKERELVAAITDGGTTYYADSVKGRFTISRDNAKNTVYLQMNSLKPEDTAVYYCAVWGPYSIPLPYDNDLYVYWGQGTQVTVSS

SEQ ID NO: 2240 - protein, 119 aa, Artificial Sequence
  Chemically Synthesized
QVQLQESGGGLVQAGGSLRLSCAASGYISSPFWMGWYRQAPGKERELVATIDGGGNTNYADSVKGRFTISRDNAKNTVYLQMNSLKPEDTAVYYCAVRGRDGDYNHWYWGQGTQVTVSS

SEQ ID NO: 2241 - protein, 125 aa, Artificial Sequence
  Chemically Synthesized
QVQLQESGGGLVQAGGSLRLSCAASGTISYYSTMGWYRQAPGKEREFVAGIGDGSITYYADSVKGRFTISRDNAKNTVYLQMNSLKPEDTAVYYCAADEKLYPYTRYAAILSLYWGQGTQVTVSS

SEQ ID NO: 2242 - protein, 118 aa, Artificial Sequence
  Chemically Synthesized
QVQLQESGGGLVQAGGSLRLSCAASGSIFWASYMGWYRQAPGKERELVASIAVGAITNYADSVKGRFTISRDNAKNTVYLQMNSLKPEDTAVYYCAVDRYYRDDYDYWGQGTQVTVSS

SEQ ID NO: 2243 - protein, 116 aa, Artificial Sequence
  Chemically Synthesized
QVQLQESGGGLVQAGGSLRLSCAASGYISVYTWMGWYRQAPGKEREFVASIGYGTTTYYADSVKGRFTISRDNAKNTVYLQMNSLKPEDTAVYYCAAADYRYHDYWGQGTQVTVSS

SEQ ID NO: 2244 - protein, 121 aa, Artificial Sequence
  Chemically Synthesized
QVQLQESGGGLVQAGGSLRLSCAASGYFLADRMGWYRQAPGKEREFVAAISGGAITNYADSVKGRFTISRDNAKNTVYLQMNSLKPEDTAVYYCAAISIGDHDRDLGHYYWGQGTQVTVSS

SEQ ID NO: 2245 - protein, 118 aa, Artificial Sequence
  Chemically Synthesized
QVQLQESGGGLVQAGGSLRLSCAASGNISPRWDMGWYRQAPGKEREFVASIAGGGITYYADSVKGRFTISRDNAKNTVYLQMNSLKPEDTAVYYCAVNDGAVGYHYYWGQGTQVTVSS

SEQ ID NO: 2246 - protein, 126 aa, Artificial Sequence
  Chemically Synthesized
QVQLQESGGGLVQAGGSLRLSCAASGNISYTYYMGWYRQAPGKEREFVASIAQGGTTNYADSVKGRFTISRDNAKNTVYLQMNSLKPEDTAVYYCAVNDYYVDYTDQNSDSLHTYWGQGTQVTVSS

SEQ ID NO: 2247 - protein, 122 aa, Artificial Sequence
  Chemically Synthesized
QVQLQESGGGLVQAGGSLRLSCAASGNISRTTYMGWYRQAPGKEREFVASISDGATTNYADSVKGRFTISRDNAKNTVYLQMNSLKPEDTAVYYCAVQSQFINWRPYGFSYWGQGTQVTVSS

SEQ ID NO: 2248 - protein, 118 aa, Artificial Sequence
  Chemically Synthesized
QVQLQESGGGLVQAGGSLRLSCAASGNISQYTSMGWYRQAPGKEREFVASIDTGASTYYADSVKGRFTISRDNAKNTVYLQMNSLKPEDTAVYYCAVVTTLSWTGLYWGQGTQVTVSS

SEQ ID NO: 2249 - protein, 126 aa, Artificial Sequence
  Chemically Synthesized
QVQLQESGGGLVQAGGSLRLSCAASGSIFGDLAMGWYRQAPGKEREFVAAIGYGSITYYADSVKGRFTISRDNAKNTVYLQMNSLKPEDTAVYYCAVTVIAAGGQFFNWDRTLIYWGQGTQVTVSS

SEQ ID NO: 2250 - protein, 115 aa, Artificial Sequence
  Chemically Synthesized
QVQLQESGGGLVQAGGSLRLSCAASGYISLLPLMGWYRQAPGKEREFVATINWGATTYYADSVKGRFTISRDNAKNTVYLQMNSLKPEDTAVYYCAGRGTVYPYWGQGTQVTVSS

SEQ ID NO: 2251 - protein, 109 aa, Artificial Sequence
  Chemically Synthesized
QVQLQESGGGLVQAGGSLRLSCAASGYISTVTMGWYRQAPGKEREFVATIGNGATTYYADSVKGRFTISRDNAKNTVYLQMNSLKPEDTAVYYCAVIYWGQGTQVTVSS

SEQ ID NO: 2252 - protein, 117 aa, Artificial Sequence
  Chemically Synthesized
QVQLQESGGGLVQAGGSLRLSCAASGYISSTNSMGWYRQAPGKERELVAGITSGATTYADSVKGRFTISRDNAKNTVYLQMNSLKPEDTAVYYCAVPRHYSPLHSYWGQGTQVTVSS

SEQ ID NO: 2253 - protein, 122 aa, Artificial Sequence
  Chemically Synthesized
QVQLQESGGGLVQAGGSLRLSCAASGSIFSLLEMGWYRQAPGKEREFVATIDAGGNTYYADSVKGRFTISRDNAKNTVYLQMNSLKPEDTAVYYCAVDYYQIYYSRLYYFYWGQGTQVTVSS

SEQ ID NO: 2254 - protein, 122 aa, Artificial Sequence
  Chemically Synthesized
QVQLQESGGGLVQAGGSLRLSCAASGSISVAPGMGWYRQAPGKEREFVATIGRGTNTNYADSVKGRFTISRDNAKNTVYLQMNSLKPEDTAVYYCAVSDEDYPGRRGILVYWGQGTQVTVSS

SEQ ID NO: 2255 - protein, 126 aa, Artificial Sequence
  Chemically Synthesized
QVQLQESGGGLVQAGGSLRLSCAASGYISALKTMGWYRQAPGKERELVAAIGHGGNTYYADSVKGRFTISRDNAKNTVYLQMNSLKPEDTAVYYCAANVGRHGYRTQHRPELHLYWGQGTQVTVSS

SEQ ID NO: 2256 - protein, 123 aa, Artificial Sequence
  Chemically Synthesized
QVQLQESGGGLVQAGGSLRLSCAASGYISVEYFMGWYRQAPGKEREFVATIAYGGSTYYADSVKGRFTISRDNAKNTVYLQMNSLKPEDTAVYYCAVQHGGVGTYSVRYYYYWGQGTQVTVSS

SEQ ID NO: 2257 - protein, 122 aa, Artificial Sequence
  Chemically Synthesized
QVQLQESGGGLVQAGGSLRLSCAASGYIFVHLGMGWYRQAPGKEREFVATIGHGGITNYADSVKGRFTISRDNAKNTVYLQMNSLKPEDTAVYYCAAYGYWRYYNVYYLQYWGQGTQVTVSS

SEQ ID NO: 2258 - protein, 121 aa, Artificial Sequence
  Chemically Synthesized
QVQLQESGGGLVQAGGSLRLSCAASGNIFKDGTMGWYRQAPGKERELVAGIADGAITYYADSVKGRFTISRDNAKNTVYLQMNSLKPEDTAVYYCAADGDVYPDALSHPYWGQGTQVTVSS

SEQ ID NO: 2259 - protein, 121 aa, Artificial Sequence
  Chemically Synthesized
QVQLQESGGGLVQAGGSLRLSCAASGSIFSHSLMGWYRQAPGKERELVATIGEGASTNYADSVKGRFTISRDNAKNTVYLQMNSLKPEDTAVYYCAVDTADTEFSGGAFYWGQGTQVTVSS

SEQ ID NO: 2260 - protein, 118 aa, Artificial Sequence
  Chemically Synthesized
QVQLQESGGGLVQAGGSLRLSCAASGSISYSTMGWYRQAPGKERELVAGITDGATTYYADSVKGRFTISRDNAKNTVYLQMNSLKPEDTAVYYCAVDDDYRYGLNSYWGQGTQVTVSS

SEQ ID NO: 2261 - protein, 112 aa, Artificial Sequence
  Chemically Synthesized
QVQLQESGGGLVQAGGSLRLSCAASGTISDGYRMGWYRQAPGKERELVAGIGGGSITNYADSVKGRFTISRDNAKNTVYLQMNSLKPEDTAVYYCADTLDYWGQGTQVTVSS

SEQ ID NO: 2262 - protein, 118 aa, Artificial Sequence
  Chemically Synthesized
QVQLQESGGGLVQAGGSLRLSCAASGYISYYYHMGWYRQAPGKERELVASIALGGTTNYADSVKGRFTISRDNAKNTVYLQMNSLKPEDTAVYYCAALYGYVPSLYYWGQGTQVTVSS

SEQ ID NO: 2263 - protein, 118 aa, Artificial Sequence
  Chemically Synthesized
QVQLQESGGGLVQAGGSLRLSCAASGYISARYVMGWYRQAPGKEREFVAAIDLGGNTNYADSVKGRFTISRDNAKNTVYLQMNSLKPEDTAVYYCAAVPFYYWFLPYWGQGTQVTVSS

SEQ ID NO: 2264 - protein, 118 aa, Artificial Sequence
  Chemically Synthesized
QVQLQESGGGLVQAGGSLRLSCAASGTISSVYAMGWYRQAPGKERELVAAITEGASTYYADSVKGRFTISRDNAKNTVYLQMNSLKPEDTAVYYCAAVGGADEVFYYWGQGTQVTVSS

SEQ ID NO: 2265 - protein, 122 aa, Artificial Sequence
  Chemically Synthesized
QVQLQESGGGLVQAGGSLRLSCAASGSIFLYDDMGWYRQAPGKERELVAAIGYGTSTNYADSVKGRFTISRDNAKNTVYLQMNSLKPEDTAVYYCAVYIRLYRYIIATHHYWGQGTQVTVSS

SEQ ID NO: 2266 - protein, 118 aa, Artificial Sequence
  Chemically Synthesized
QVQLQESGGGLVQAGGSLRLSCAASGYIFRPRGMGWYRQAPGKEREFVAGITSGGNTNYADSVKGRFTISRDNAKNTVYLQMNSLKPEDTAVYYCAVFYRWGRGLVYWGQGTQVTVSS

SEQ ID NO: 2267 - protein, 118 aa, Artificial Sequence
  Chemically Synthesized
QVQLQESGGGLVQAGGSLRLSCAASGYISQRRGMGWYRQAPGKERELVATITFGGITYYADSVKGRFTISRDNAKNTVYLQMNSLKPEDTAVYYCAVVYRRHPRLGYWGQGTQVTVSS

SEQ ID NO: 2268 - protein, 121 aa, Artificial Sequence
  Chemically Synthesized
QVQLQESGGGLVQAGGSLRLSCAASGSIFYGPTMGWYRQAPGKEREFVATIDAGGNTYYADSVKGRFTISRDNAKNTVYLQMNSLKPEDTAVYYCAADGGYARRYTYDIYWGQGTQVTVSS

SEQ ID NO: 2269 - protein, 122 aa, Artificial Sequence
  Chemically Synthesized
QVQLQESGGGLVQAGGSLRLSCAASGTISRSHLMGWYRQAPGKEREFVAGINTGSSTNYADSVKGRFTISRDNAKNTVYLQMNSLKPEDTAVYYCAAYGLADLDDYYGFLYWGQGTQVTVSS

SEQ ID NO: 2270 - protein, 122 aa, Artificial Sequence
  Chemically Synthesized
QVQLQESGGGLVQAGGSLRLSCAASGTIFDSTNMGWYRQAPGKERELVAGIDTGSSTNYADSVKGRFTISRDNAKNTVYLQMNSLKPEDTAVYYCAVRGYQATASVPGFYYWGQGTQVTVSS

SEQ ID NO: 2271 - protein, 126 aa, Artificial Sequence
  Chemically Synthesized
QVQLQESGGGLVQAGGSLRLSCAASGNISAIYYMGWYRQAPGKEREFVAGINYGGTTNYADSVKGRFTISRDNAKNTVYLQMNSLKPEDTAVYYCAAYNFDGDKSEPVYYPGPYYWGQGTQVTVSS

SEQ ID NO: 2272 - protein, 126 aa, Artificial Sequence
  Chemically Synthesized
QVQLQESGGGLVQAGGSLRLSCAASGTIFYFYDMGWYRQAPGKEREFVAAITYGGSTYYADSVKGRFTISRDNAKNTVYLQMNSLKPEDTAVYYCAVYYFYRQGLRIWDVGPFRYWGQGTQVTVSS

SEQ ID NO: 2273 - protein, 122 aa, Artificial Sequence
  Chemically Synthesized
QVQLQESGGGLVQAGGSLRLSCAASGTIFSVPIMGWYRQAPGKERELVAGIGYGASTYYADSVKGRFTISRDNAKNTVYLQMNSLKPEDTAVYYCAALYYYYQTITYILDYWGQGTQVTVSS

SEQ ID NO: 2274 - protein, 126 aa, Artificial Sequence
  Chemically Synthesized
QVQLQESGGGLVQAGGSLRLSCAASGYISIRLSMGWYRQAPGKEREFVAAIGRGATTYYADSVKGRFTISRDNAKNTVYLQMNSLKPEDTAVYYCAVNKYTSSGRPRYWNRYLGYWGQGTQVTVSS

SEQ ID NO: 2275 - protein, 126 aa, Artificial Sequence
  Chemically Synthesized
QVQLQESGGGLVQAGGSLRLSCAASGTIFTFTYMGWYRQAPGKEREFVAGISYGSNTNYADSVKGRFTISRDNAKNTVYLQMNSLKPEDTAVYYCAVTFLGPFANVWWNRAWHPYWGQGTQVTVSS

SEQ ID NO: 2276 - protein, 117 aa, Artificial Sequence
  Chemically Synthesized
QVQLQESGGGLVQAGGSLRLSCAASGYISTRTMGWYRQAPGKERELVATISFGGSTYYADSVKGRFTISRDNAKNTVYLQMNSLKPEDTAVYYCAVDVTWYDYLGYWGQGTQVTVSS

SEQ ID NO: 2277 - protein, 118 aa, Artificial Sequence
  Chemically Synthesized
QVQLQESGGGLVQAGGSLRLSCAASGSIFTYTYMGWYRQAPGKEREFVAAISDGATNLYADSVKGRFTISRDNAKNTVYLQMNSLKPEDTAVYYCAADGHGYGVHYYWGQGTQVTVSS

SEQ ID NO: 2278 - protein, 122 aa, Artificial Sequence
  Chemically Synthesized
QVQLQESGGGLVQAGGSLRLSCAASGTIFVPHYMGWYRQAPGKERELVASIGAGANTYYADSVKGRFTISRDNAKNTVYLQMNSLKPEDTAVYYCAVYRDSDYYWDTPLYYWGQGTQVTVSS

SEQ ID NO: 2279 - protein, 122 aa, Artificial Sequence
  Chemically Synthesized
QVQLQESGGGLVQAGGSLRLSCAASGYIFTPVQMGWYRQAPGKERELVAGISKGSSTYYADSVKGRFTISRDNAKNTVYLQMNSLKPEDTAVYYCAAVTARKRWRSQGHTYWGQGTQVTVSS

SEQ ID NO: 2280 - protein, 122 aa, Artificial Sequence
  Chemically Synthesized
QVQLQESGGGLVQAGGSLRLSCAASGNISYVEWMGWYRQAPGKEREFVATIGYGGITYYADSVKGRFTISRDNAKNTVYLQMNSLKPEDTAVYYCAVLLNGDYTTTITFHYWGQGTQVTVSS

SEQ ID NO: 2281 - protein, 116 aa, Artificial Sequence
  Chemically Synthesized
QVQLQESGGGLVQAGGSLRLSCAASGSISYRRAMGWYRQAPGKERELVAAIAYGANTYYADSVKGRFTISRDNAKNTVYLQMNSLKPEDTAVYYCAARAYGYHNYWGQGTQVTVSS

SEQ ID NO: 2282 - protein, 118 aa, Artificial Sequence
  Chemically Synthesized
QVQLQESGGGLVQAGGSLRLSCAASGYIFNNRGMGWYRQAPGKERELVAGIDVGGNTYYADSVKGRFTISRDNAKNTVYLQMNSLKPEDTAVYYCAATVRWWRTHQYWGQGTQVTVSS

SEQ ID NO: 2283 - protein, 118 aa, Artificial Sequence
  Chemically Synthesized
QVQLQESGGGLVQAGGSLRLSCAASGTISPVVDMGWYRQAPGKERELVAGIDAGGITNYADSVKGRFTISRDNAKNTVYLQMNSLKPEDTAVYYCAVSAAYNTGHAYWGQGTQVTVSS

SEQ ID NO: 2284 - protein, 122 aa, Artificial Sequence
  Chemically Synthesized
QVQLQESGGGLVQAGGSLRLSCAASGTISDSQRMGWYRQAPGKEREFVATIGWGTNTNYADSVKGRFTISRDNAKNTVYLQMNSLKPEDTAVYYCAVPFGYVNYRYHLFGYWGQGTQVTVSS

SEQ ID NO: 2285 - protein, 120 aa, Artificial Sequence
  Chemically Synthesized
QVQLQESGGGLVQAGGSLRLSCAASGSIFRRPTMGWYRQAPGKEREFVASITAGASTYYADSVKGRFTISRDNAKNTVYLQMNSLKPEDTAVYYCAAGTPRRYGRNHYYWGQGTQVTVSS

SEQ ID NO: 2286 - protein, 126 aa, Artificial Sequence
  Chemically Synthesized
QVQLQESGGGLVQAGGSLRLSCAASGTIFDYDYMGWYRQAPGKEREFVAAIDAGASTYYADSVKGRFTISRDNAKNTVYLQMNSLKPEDTAVYYCAVADDDRGASVTRSRRLHTYWGQGTQVTVSS

SEQ ID NO: 2287 - protein, 122 aa, Artificial Sequence
  Chemically Synthesized
QVQLQESGGGLVQAGGSLRLSCAASGTISAAPVMGWYRQAPGKERELVAGISSGGTTYYADSVKGRFTISRDNAKNTVYLQMNSLKPEDTAVYYCAAESGLYNDEAGDLLYWGQGTQVTVSS

SEQ ID NO: 2288 - protein, 118 aa, Artificial Sequence
  Chemically Synthesized
QVQLQESGGGLVQAGGSLRLSCAASGTIFGTDIMGWYRQAPGKEREFVATISAGASTYYADSVKGRFTISRDNAKNTVYLQMNSLKPEDTAVYYCAADFRGEYRHYYWGQGTQVTVSS

SEQ ID NO: 2289 - protein, 117 aa, Artificial Sequence
  Chemically Synthesized
QVQLQESGGGLVQAGGSLRLSCAASGNIFAQAWMGWYRQAPGKEREFVAGIGRGTTYYADSVKGRFTISRDNAKNTVYLQMNSLKPEDTAVYYCAVGYAAPRNLWYWGQGTQVTVSS

SEQ ID NO: 2290 - protein, 118 aa, Artificial Sequence
  Chemically Synthesized
QVQLQESGGGLVQAGGSLRLSCAASGTISGGYTMGWYRQAPGKERELVASINNGGSTYYADSVKGRFTISRDNAKNTVYLQMNSLKPEDTAVYYCAVGDVYYTGLVYWGQGTQVTVSS

SEQ ID NO: 2291 - protein, 118 aa, Artificial Sequence
  Chemically Synthesized
QVQLQESGGGLVQAGGSLRLSCAASGTISLIYYMGWYRQAPGKERELVAAINGGGNTYYADSVKGRFTISRDNAKNTVYLQMNSLKPEDTAVYYCAAETYLNGWLQYWGQGTQVTVSS

SEQ ID NO: 2292 - protein, 122 aa, Artificial Sequence
  Chemically Synthesized
QVQLQESGGGLVQAGGSLRLSCAASGSISHGAPMGWYRQAPGKEREFVAGIGHGSNTYYADSVKGRFTISRDNAKNTVYLQMNSLKPEDTAVYYCAAYKQWADFSDYSHWYWGQGTQVTVSS

SEQ ID NO: 2293 - protein, 121 aa, Artificial Sequence
  Chemically Synthesized
QVQLQESGGGLVQAGGSLRLSCAASGNISLDDVMGWYRQAPGKEREFVAAIAQGGNTYYADSVKGRFTISRDNAKNTVYLQMNSLKPEDTAVYYCAAQSSVTWSFWDTMYWGQGTQVTVSS

SEQ ID NO: 2294 - protein, 121 aa, Artificial Sequence
  Chemically Synthesized
QVQLQESGGGLVQAGGSLRLSCAASGSISYPLAMGWYRQAPGKERELVAGISIGTTTNYADSVKGRFTISRDNAKNTVYLQMNSLKPEDTAVYYCAVNYEYSSTLTRCFYWGQGTQVTVSS

SEQ ID NO: 2295 - protein, 118 aa, Artificial Sequence
  Chemically Synthesized
QVQLQESGGGLVQAGGSLRLSCAASGTISEAYRMGWYRQAPGKEREFVAGIGYGGITNYADSVKGRFTISRDNAKNTVYLQMNSLKPEDTAVYYCAVWGYWNYYYYYWGQGTQVTVSS

SEQ ID NO: 2296 - protein, 122 aa, Artificial Sequence
  Chemically Synthesized
QVQLQESGGGLVQAGGSLRLSCAASGNIFPRTVMGWYRQAPGKEREFVAGINVGTTTYYADSVKGRFTISRDNAKNTVYLQMNSLKPEDTAVYYCAVRQHAFSRWAPYLVYWGQGTQVTVSS

SEQ ID NO: 2297 - protein, 123 aa, Artificial Sequence
  Chemically Synthesized
QVQLQESGGGLVQAGGSLRLSCAASGSISGSSRGMGWYRQAPGKEREFVAGIGAGGNTNYADSVKGRFTISRDNAKNTVYLQMNSLKPEDTAVYYCAAWDYQTQSSPAWYYYWGQGTQVTVSS

SEQ ID NO: 2298 - protein, 118 aa, Artificial Sequence
  Chemically Synthesized
QVQLQESGGGLVQAGGSLRLSCAASGYISDSRKMGWYRQAPGKERELVASIAHGTTTNYADSVKGRFTISRDNAKNTVYLQMNSLKPEDTAVYYCAAWRYAPYSHRYWGQGTQVTVSS

SEQ ID NO: 2299 - protein, 118 aa, Artificial Sequence
  Chemically Synthesized
QVQLQESGGGLVQAGGSLRLSCAASGNISGRYYMGWYRQAPGKERELVASIDYGAITYYADSVKGRFTISRDNAKNTVYLQMNSLKPEDTAVYYCAVLVEYPLEHYYWGQGTQVTVSS

SEQ ID NO: 2300 - protein, 109 aa, Artificial Sequence
  Chemically Synthesized
QVQLQESGGGLVQAGGSLRLSCAASGTIFTLSMGWYRQAPGKEREFVATITYGATTNYADSVKGRFTISRDNAKNTVYLQMNSLKPEDTAVYYCAFGYWGQGTQVTVSS

SEQ ID NO: 2301 - protein, 121 aa, Artificial Sequence
  Chemically Synthesized
QVQLQESGGGLVQAGGSLRLSCAASGTIFSTTMGWYRQAPGKEREFVAAINQGTITNYADSVKGRFTISRDNAKNTVYLQMNSLKPEDTAVYYCAVDGYPDRTIYGEFWYWGQGTQVTVSS

SEQ ID NO: 2302 - protein, 126 aa, Artificial Sequence
  Chemically Synthesized
QVQLQESGGGLVQAGGSLRLSCAASGNISYFYYMGWYRQAPGKEREFVATIADGSITNYADSVKGRFTISRDNAKNTVYLQMNSLKPEDTAVYYCAAHGDAYTPSYYSDGWGHGYWGQGTQVTVSS

SEQ ID NO: 2303 - protein, 118 aa, Artificial Sequence
  Chemically Synthesized
QVQLQESGGGLVQAGGSLRLSCAASGSISGYYDMGWYRQAPGKEREFVAAIGYGTTYQYADSVKGRFTISRDNAKNTVYLQMNSLKPEDTAVYYCAVYDDVYPAFFYWGQGTQVTVSS

SEQ ID NO: 2304 - protein, 118 aa, Artificial Sequence
  Chemically Synthesized
QVQLQESGGGLVQAGGSLRLSCAASGTISAVYRMGWYRQAPGKEREFVAAITLGGTTYYADSVKGRFTISRDNAKNTVYLQMNSLKPEDTAVYYCAVVGDDGVAHQYWGQGTQVTVSS

SEQ ID NO: 2305 - protein, 125 aa, Artificial Sequence
  Chemically Synthesized
QVQLQESGGGLVQAGGSLRLSCAASGNFLNVRMGWYRQAPGKEREFVAAISGGGSTNYADSVKGRFTISRDNAKNTVYLQMNSLKPEDTAVYYCAVLAATGQDDSRSYFGYYWYWGQGTQVTVSS

SEQ ID NO: 2306 - protein, 125 aa, Artificial Sequence
  Chemically Synthesized
QVQLQESGGGLVQAGGSLRLSCAASGTISDPGYMGWYRQAPGKERELVATIAPGTSTNYADSVKGRFTISRDNAKNTVYLQMNSLKPEDTAVYYCAARAWRFLNGPYPNSSTIYWGQGTQVTVSS

SEQ ID NO: 2307 - protein, 126 aa, Artificial Sequence
  Chemically Synthesized
QVQLQESGGGLVQAGGSLRLSCAASGNIFYLVDMGWYRQAPGKERELVATINSGAITYYADSVKGRFTISRDNAKNTVYLQMNSLKPEDTAVYYCAVVVTNPVDLTNYAYLGLAYWGQGTQVTVSS

SEQ ID NO: 2308 - protein, 118 aa, Artificial Sequence
  Chemically Synthesized
QVQLQESGGGLVQAGGSLRLSCAASGTIFYYSRMGWYRQAPGKEREFVAGIARGTTTYYADSVKGRFTISRDNAKNTVYLQMNSLKPEDTAVYYCAVVRKLNRYYRYWGQGTQVTVSS

SEQ ID NO: 2309 - protein, 118 aa, Artificial Sequence
  Chemically Synthesized
QVQLQESGGGLVQAGGSLRLSCAASGNISVEYDMGWYRQAPGKEREFVAAISRGTITYYADSVKGRFTISRDNAKNTVYLQMNSLKPEDTAVYYCAVDYRGHQLHPYWGQGTQVTVSS

SEQ ID NO: 2310 - protein, 125 aa, Artificial Sequence
  Chemically Synthesized
QVQLQESGGGLVQAGGSLRLSCAASGTISRSTQMGWYRQAPGKEREFVAAINIGTNTNYADSVKGRFTISRDNAKNTVYLQMNSLKPEDTAVYYCAAYGYYYKLDYGPQWRYGYWGQGTQVTVSS

SEQ ID NO: 2311 - protein, 122 aa, Artificial Sequence
  Chemically Synthesized
QVQLQESGGGLVQAGGSLRLSCAASGYISRYGAMGWYRQAPGKEREFVAAIDLGSTTYYADSVKGRFTISRDNAKNTVYLQMNSLKPEDTAVYYCAVHLDVYLYGYYILWYWGQGTQVTVSS

SEQ ID NO: 2312 - protein, 118 aa, Artificial Sequence
  Chemically Synthesized
QVQLQESGGGLVQAGGSLRLSCAASGYISRGGIMGWYRQAPGKERELVATITYGASTNYADSVKGRFTISRDNAKNTVYLQMNSLKPEDTAVYYCAVVAGQLIAFEYWGQGTQVTVSS

SEQ ID NO: 2313 - protein, 112 aa, Artificial Sequence
  Chemically Synthesized
QVQLQESGGGLVQAGGSLRLSCAASGYMGWYRQAPGKEREFVAAIGGGANTYYADSVKGRFTISRDNAKNTVYLQMNSLKPEDTAVYYCAALTDGEAAHLYWGQGTQVTVSS

SEQ ID NO: 2314 - protein, 126 aa, Artificial Sequence
  Chemically Synthesized
QVQLQESGGGLVQAGGSLRLSCAASGNIFDYLFMGWYRQAPGKEREFVASISVGANTYYADSVKGRFTISRDNAKNTVYLQMNSLKPEDTAVYYCAADYAAVWIGFVHYIRDHPYWGQGTQVTVSS

SEQ ID NO: 2315 - protein, 118 aa, Artificial Sequence
  Chemically Synthesized
QVQLQESGGGLVQAGGSLRLSCAASGNISQTPRMGWYRQAPGKEREFVAGIARGTNTNYADSVKGRFTISRDNAKNTVYLQMNSLKPEDTAVYYCAARRRWIPAHSYWGQGTQVTVSS

SEQ ID NO: 2316 - protein, 118 aa, Artificial Sequence
  Chemically Synthesized
QVQLQESGGGLVQAGGSLRLSCAASGTISFTNEMGWYRQAPGKEREFVAAIGDGATTYYADSVKGRFTISRDNAKNTVYLQMNSLKPEDTAVYYCAAKSNGNPGYDYWGQGTQVTVSS

SEQ ID NO: 2317 - protein, 122 aa, Artificial Sequence
  Chemically Synthesized
QVQLQESGGGLVQAGGSLRLSCAASGYIFGPVIMGWYRQAPGKERELVATIDDGTITYYADSVKGRFTISRDNAKNTVYLQMNSLKPEDTAVYYCAVYQQNGSRSYYTHGYWGQGTQVTVSS

SEQ ID NO: 2318 - protein, 109 aa, Artificial Sequence
  Chemically Synthesized
QVQLQESGGGLVQAGGSLRLSCAASGYISSTRYMGWYRQAPGKERELVATITDGSTNYADSVKGRFTISRDNAKNTVYLQMNSLKPEDTAVYYCAYYYWGQGTQVTVSS

SEQ ID NO: 2319 - protein, 125 aa, Artificial Sequence
  Chemically Synthesized
QVQLQESGGGLVQAGGSLRLSCAASGNIFDYTLMGWYRQAPGKERELVAGIGEGGTTNYADSVKGRFTISRDNAKNTVYLQMNSLKPEDTAVYYCAAQYPDVYILTSGTLLSSYWGQGTQVTVSS

SEQ ID NO: 2320 - protein, 118 aa, Artificial Sequence
  Chemically Synthesized
QVQLQESGGGLVQAGGSLRLSCAASGYISTTRRMGWYRQAPGKERELVASITIGAITYYADSVKGRFTISRDNAKNTVYLQMNSLKPEDTAVYYCAAYSYFFARYPYWGQGTQVTVSS

SEQ ID NO: 2321 - protein, 122 aa, Artificial Sequence
  Chemically Synthesized
QVQLQESGGGLVQAGGSLRLSCAASGSIFYNYDMGWYRQAPGKEREFVAGIAIGGSTYYADSVKGRFTISRDNAKNTVYLQMNSLKPEDTAVYYCAVKIHAFPYLFSFHYYWGQGTQVTVSS

SEQ ID NO: 2322 - protein, 121 aa, Artificial Sequence
  Chemically Synthesized
QVQLQESGGGLVQAGGSLRLSCAASGSIFYFTHMGWYRQAPGKERELVAGIARGSNTYYADSVKGRFTISRDNAKNTVYLQMNSLKPEDTAVYYCAAFRRRPDAVNRFGYWGQGTQVTVSS

SEQ ID NO: 2323 - protein, 118 aa, Artificial Sequence
  Chemically Synthesized
QVQLQESGGGLVQAGGSLRLSCAASGTIFYFSAMGWYRQAPGKERELVATINRGSNTYYADSVKGRFTISRDNAKNTVYLQMNSLKPEDTAVYYCAVPARRWNHHRYWGQGTQVTVSS

SEQ ID NO: 2324 - protein, 122 aa, Artificial Sequence
  Chemically Synthesized
QVQLQESGGGLVQAGGSLRLSCAASGSIFIRHDMGWYRQAPGKEREFVATIGSGSSTYYADSVKGRFTISRDNAKNTVYLQMNSLKPEDTAVYYCAASPIAYYHSYLRLPYWGQGTQVTVSS

SEQ ID NO: 2325 - protein, 117 aa, Artificial Sequence
  Chemically Synthesized
QVQLQESGGGLVQAGGSLRLSCAASGSISSTTMGWYRQAPGKERELVAGIGYGATTYYADSVKGRFTISRDNAKNTVYLQMNSLKPEDTAVYYCAVNYTQYTRLQYWGQGTQVTVSS

SEQ ID NO: 2326 - protein, 118 aa, Artificial Sequence
  Chemically Synthesized
QVQLQESGGGLVQAGGSLRLSCAASGNISYFGTMGWYRQAPGKEREFVATISWGAITYYADSVKGRFTISRDNAKNTVYLQMNSLKPEDTAVYYCAAGTADTRSYVYWGQGTQVTVSS

SEQ ID NO: 2327 - protein, 118 aa, Artificial Sequence
  Chemically Synthesized
QVQLQESGGGLVQAGGSLRLSCAASGTISYRRYMGWYRQAPGKEREFVAAIGRGGITYYADSVKGRFTISRDNAKNTVYLQMNSLKPEDTAVYYCAVIRHYRGAFLYWGQGTQVTVSS

SEQ ID NO: 2328 - protein, 126 aa, Artificial Sequence
  Chemically Synthesized
QVQLQESGGGLVQAGGSLRLSCAASGNIFPNFFMGWYRQAPGKEREFVAAIAFGTNTYYADSVKGRFTISRDNAKNTVYLQMNSLKPEDTAVYYCAVTEQAKLTGLYDDFFYHGYWGQGTQVTVSS

SEQ ID NO: 2329 - protein, 123 aa, Artificial Sequence
  Chemically Synthesized
QVQLQESGGGLVQAGGSLRLSCAASGSISGRQDMGWYRQAPGKEREFVAGIDYVGSTNYADSVKGRFTISRDNAKNTVYLQMNSLKPEDTAVYYCAVPELPVDASRIRYVPYWGQGTQVTVSS

SEQ ID NO: 2330 - protein, 118 aa, Artificial Sequence
  Chemically Synthesized
QVQLQESGGGLVQAGGSLRLSCAASGTIFGVDNMGWYRQAPGKERELVAGIDGGGNTYYADSVKGRFTISRDNAKNTVYLQMNSLKPEDTAVYYCAARYGAYYWHRYWGQGTQVTVSS

SEQ ID NO: 2331 - protein, 126 aa, Artificial Sequence
  Chemically Synthesized
QVQLQESGGGLVQAGGSLRLSCAASGTISYQNYMGWYRQAPGKEREFVAGIAYGAITNYADSVKGRFTISRDNAKNTVYLQMNSLKPEDTAVYYCAVDIRGWLPYWPVATYFHPYWGQGTQVTVSS

SEQ ID NO: 2332 - protein, 118 aa, Artificial Sequence
  Chemically Synthesized
QVQLQESGGGLVQAGGSLRLSCAASGTIFIHEIMGWYRQAPGKEREFVATINRGTSTNYADSVKGRFTISRDNAKNTVYLQMNSLKPEDTAVYYCAVYDGQIQRLSYWGQGTQVTVSS

SEQ ID NO: 2333 - protein, 118 aa, Artificial Sequence
  Chemically Synthesized
QVQLQESGGGLVQAGGSLRLSCAASGTIFTVTYMGWYRQAPGKERELVAGISYGGSTYYADSVKGRFTISRDNAKNTVYLQMNSLKPEDTAVYYCAVLYRYGDDYAYWGQGTQVTVSS

SEQ ID NO: 2334 - protein, 121 aa, Artificial Sequence
  Chemically Synthesized
QVQLQESGGGLVQAGGSLRLSCAASGSIFTVDTMGWYRQAPGKEREFVAGISSGANTNYADSVKGRFTISRDNAKNTVYLQMNSLKPEDTAVYYCAAGIDRTQVWSSGIYWGQGTQVTVSS

SEQ ID NO: 2335 - protein, 111 aa, Artificial Sequence
  Chemically Synthesized
QVQLQESGGGLVQAGGSLRLSCAASGNISTAPYMGWYRQAPGKEREFVATIDWGTSTNYADSVKGRFTISRDNAKNTVYLQMNSLKPEDTAVYYCAYYHYWGQGTQVTVSS

SEQ ID NO: 2336 - protein, 118 aa, Artificial Sequence
  Chemically Synthesized
QVQLQESGGGLVQAGGSLRLSCAASGNIFPVDGMGWYRQAPGKEREFVASIDDGSITYYADSVKGRFTISRDNAKNTVYLQMNSLKPEDTAVYYCAVYAVTYPPLYYWGQGTQVTVSS

SEQ ID NO: 2337 - protein, 118 aa, Artificial Sequence
  Chemically Synthesized
QVQLQESGGGLVQAGGSLRLSCAASGNISPPYSMGWYRQAPGKEREFVATITYGGNTYYADSVKGRFTISRDNAKNTVYLQMNSLKPEDTAVYYCAVGIFADAPLTYWGQGTQVTVSS

SEQ ID NO: 2338 - protein, 118 aa, Artificial Sequence
  Chemically Synthesized
QVQLQESGGGLVQAGGSLRLSCAASGTISVYTDMGWYRQAPGKERELVAAIGVGTITYYADSVKGRFTISRDNAKNTVYLQMNSLKPEDTAVYYCAAEWYYYVPFPYWGQGTQVTVSS

SEQ ID NO: 2339 - protein, 118 aa, Artificial Sequence
  Chemically Synthesized
QVQLQESGGGLVQAGGSLRLSCAASGSIFFAPFMGWYRQAPGKERELVASISRGGNTYYADSVKGRFTISRDNAKNTVYLQMNSLKPEDTAVYYCAALASYGRTLRYWGQGTQVTVSS

SEQ ID NO: 2340 - protein, 109 aa, Artificial Sequence
  Chemically Synthesized
QVQLQESGGGLVQAGGSLRLSCAASGTIFYWSYMGWYRQAPGKEREFVATISLGTITYYADSVKGRFTISRDNAKNTVYLQMNSLKPEDTAVYYCAVYWGQGTQVTVSS

SEQ ID NO: 2341 - protein, 117 aa, Artificial Sequence
  Chemically Synthesized
QVQLQESGGGLVQAGGSLRLSCAASGYISGLYYMGWYRQAPGKEREFVAAISEGGTTNYADSVKGRFTISRDNAKNTVYLQMNSLKPEDTAVYYCAVTDLLAIFSYWGQGTQVTVSS

SEQ ID NO: 2342 - protein, 118 aa, Artificial Sequence
  Chemically Synthesized
QVQLQESGGGLVQAGGSLRLSCAASGNISGDGVMGWYRQAPGKERELVASIGDGSTTNYADSVKGRFTISRDNAKNTVYLQMNSLKPEDTAVYYCAADPTIHSFYHYWGQGTQVTVSS

SEQ ID NO: 2343 - protein, 118 aa, Artificial Sequence
  Chemically Synthesized
QVQLQESGGGLVQAGGSLRLSCAASGTISYIYTMGWYRQAPGKEREFVATIGYGGNTNYADSVKGRFTISRDNAKNTVYLQMNSLKPEDTAVYYCAVTGFGPNTHTYWGQGTQVTVSS

SEQ ID NO: 2344 - protein, 118 aa, Artificial Sequence
  Chemically Synthesized
QVQLQESGGGLVQAGGSLRLSCAASGTISRIWYMGWYRQAPGKERELVAGIARGTNTYYADSVKGRFTISRDNAKNTVYLQMNSLKPEDTAVYYCAAYTYYGYIHRYWGQGTQVTVSS

SEQ ID NO: 2345 - protein, 117 aa, Artificial Sequence
  Chemically Synthesized
QVQLQESGGGLVQAGGSLRLSCAASGTIFDITMGWYRQAPGKEREFVAAINLGSTTNYADSVKGRFTISRDNAKNTVYLQMNSLKPEDTAVYYCAAGPKDTYFHDYWGQGTQVTVSS

SEQ ID NO: 2346 - protein, 122 aa, Artificial Sequence
  Chemically Synthesized
QVQLQESGGGLVQAGGSLRLSCAASGTISYYSVMGWYRQAPGKEREFVAGIDHGGSTYYADSVKGRFTISRDNAKNTVYLQMNSLKPEDTAVYYCAVRARPYTPSARPYLYWGQGTQVTVSS

SEQ ID NO: 2347 - protein, 118 aa, Artificial Sequence
  Chemically Synthesized
QVQLQESGGGLVQAGGSLRLSCAASGTISADYYMGWYRQAPGKEREFVASISSGSITNYADSVKGRFTISRDNAKNTVYLQMNSLKPEDTAVYYCAALNWNDESYQYWGQGTQVTVSS

SEQ ID NO: 2348 - protein, 117 aa, Artificial Sequence
  Chemically Synthesized
QVQLQESGGGLVQAGGSLRLSCAASGIFWYEAMGWYRQAPGKERELVAGINYGSTTNYADSVKGRFTISRDNAKNTVYLQMNSLKPEDTAVYYCAAYRFRYYPYLYWGQGTQVTVSS

SEQ ID NO: 2349 - protein, 125 aa, Artificial Sequence
  Chemically Synthesized
QVQLQESGGGLVQAGGSLRLSCAASGSIFATRDMGWYRQAPGKERELVASISRGANTYYADSVKGRFTISRDNAKNTVYLQMNSLKPEDTAVYYCAVYGYWYPYDGAADSKTIYWGQGTQVTVSS

SEQ ID NO: 2350 - protein, 110 aa, Artificial Sequence
  Chemically Synthesized
QVQLQESGGGLVQAGGSLRLSCAASGYIFGYTLMGWYRQAPGKERELVAGIAPGSTTYYADSVKGRFTISRDNAKNTVYLQMNSLKPEDTAVYYCAVMYWGQGTQVTVSS

SEQ ID NO: 2351 - protein, 118 aa, Artificial Sequence
  Chemically Synthesized
QVQLQESGGGLVQAGGSLRLSCAASGSISYYPSMGWYRQAPGKERELVAAISQGTSTYYADSVKGRFTISRDNAKNTVYLQMNSLKPEDTAVYYCAAIDTVYVDHDYWGQGTQVTVSS

SEQ ID NO: 2352 - protein, 118 aa, Artificial Sequence
  Chemically Synthesized
QVQLQESGGGLVQAGGSLRLSCAASGNISYLIAMGWYRQAPGKEREFVATINGGANTYYADSVKGRFTISRDNAKNTVYLQMNSLKPEDTAVYYCAVQGQDAQFHSYWGQGTQVTVSS

SEQ ID NO: 2353 - protein, 118 aa, Artificial Sequence
  Chemically Synthesized
QVQLQESGGGLVQAGGSLRLSCAASGTISGYYNMGWYRQAPGKEREFVAAIGRGTNTYYADSVKGRFTISRDNAKNTVYLQMNSLKPEDTAVYYCAVYYRAARPHGYWGQGTQVTVSS

SEQ ID NO: 2354 - protein, 122 aa, Artificial Sequence
  Chemically Synthesized
QVQLQESGGGLVQAGGSLRLSCAASGNIFYTSGMGWYRQAPGKEREFVAAITVGGITYYADSVKGRFTISRDNAKNTVYLQMNSLKPEDTAVYYCAVGQVTYAYGPDWTFYWGQGTQVTVSS

SEQ ID NO: 2355 - protein, 126 aa, Artificial Sequence
  Chemically Synthesized
QVQLQESGGGLVQAGGSLRLSCAASGNISSSRRMGWYRQAPGKEREFVATINEGANTNYADSVKGRFTISRDNAKNTVYLQMNSLKPEDTAVYYCAAGTKSTLEYQAVAAWNHRYWGQGTQVTVSS

SEQ ID NO: 2356 - protein, 124 aa, Artificial Sequence
  Chemically Synthesized
QVQLQESGGGLVQAGGSLRLSCAASGNISGPRDMGWYRQAPGKERELVAGRWWYYQYADSVKGRFTISRDNAKNTVYLQMNSLKPEDTAVYYCAVNAYVDYDRSIYYYEYLGYWGQGTQVTVSS

SEQ ID NO: 2357 - protein, 116 aa, Artificial Sequence
  Chemically Synthesized
QVQLQESGGGLVQAGGSLRLSCAASGSIFGAVYMGWYRQAPGKERELVASIDTGGNTNYADSVKGRFTISRDNAKNTVYLQMNSLKPEDTAVYYCAVYDGHLSLYWGQGTQVTVSS

SEQ ID NO: 2358 - protein, 125 aa, Artificial Sequence
  Chemically Synthesized
QVQLQESGGGLVQAGGSLRLSCAASGTISYTRYMGWYRQAPGKEREFVAAITGGTSTNYADSVKGRFTISRDNAKNTVYLQMNSLKPEDTAVYYCAAYTTVDAYYDRYVNVSMYWGQGTQVTVSS

SEQ ID NO: 2359 - protein, 118 aa, Artificial Sequence
  Chemically Synthesized
QVQLQESGGGLVQAGGSLRLSCAASGTIFGYAIMGWYRQAPGKERELVASINGGGTTNYADSVKGRFTISRDNAKNTVYLQMNSLKPEDTAVYYCAVRYGYLYYFRYWGQGTQVTVSS

SEQ ID NO: 2360 - protein, 113 aa, Artificial Sequence
  Chemically Synthesized
QVQLQESGGGLVQAGGSLRLSCAASGTIFVDTTMGWYRQAPGKERELVAGIDLGGITYYADSVKGRFTISRDNAKNTVYLQMNSLKPEDTAVYYCAAYLPIYWGQGTQVTVSS

SEQ ID NO: 2361 - protein, 122 aa, Artificial Sequence
  Chemically Synthesized
QVQLQESGGGLVQAGGSLRLSCAASGNIFGLLAMGWYRQAPGKERELVASINEGGSTNYADSVKGRFTISRDNAKNTVYLQMNSLKPEDTAVYYCAAQDSDRQGRIDLLAYWGQGTQVTVSS

SEQ ID NO: 2362 - protein, 118 aa, Artificial Sequence
  Chemically Synthesized
QVQLQESGGGLVQAGGSLRLSCAASGYISVWPLMGWYRQAPGKERELVAAIAAGANTYYADSVKGRFTISRDNAKNTVYLQMNSLKPEDTAVYYCAVVRIYYETLEYWGQGTQVTVSS

SEQ ID NO: 2363 - protein, 118 aa, Artificial Sequence
  Chemically Synthesized
QVQLQESGGGLVQAGGSLRLSCAASGYISTNTWMGWYRQAPGKEREFVAGIGPGSTTYYADSVKGRFTISRDNAKNTVYLQMNSLKPEDTAVYYCAAGTSVAAVYGYWGQGTQVTVSS

SEQ ID NO: 2364 - protein, 122 aa, Artificial Sequence
  Chemically Synthesized
QVQLQESGGGLVQAGGSLRLSCAASGSISDATGMGWYRQAPGKEREFVASIGDGTTTYYADSVKGRFTISRDNAKNTVYLQMNSLKPEDTAVYYCAVREKQGSKPSGAHDYWGQGTQVTVSS

SEQ ID NO: 2365 - protein, 116 aa, Artificial Sequence
  Chemically Synthesized
QVQLQESGGGLVQAGGSLRLSCAASGTISHRSYMGWYRQAPGKERELVATIGYGTNTNYADSVKGRFTISRDNAKNTVYLQMNSLKPEDTAVYYCAAFYQDSYFYWGQGTQVTVSS

SEQ ID NO: 2366 - protein, 110 aa, Artificial Sequence
  Chemically Synthesized
QVQLQESGGGLVQAGGSLRLSCAASGYIFYTYYMGWYRQAPGKEREFVASITAGGTTYYADSVKGRFTISRDNAKNTVYLQMNSLKPEDTAVYYCAAYYWGQGTQVTVSS

SEQ ID NO: 2367 - protein, 126 aa, Artificial Sequence
  Chemically Synthesized
QVQLQESGGGLVQAGGSLRLSCAASGTIFPRYIMGWYRQAPGKERELVATITGGTNTYYADSVKGRFTISRDNAKNTVYLQMNSLKPEDTAVYYCAVHDNVQYVTYNTTDSIFQYWGQGTQVTVSS

SEQ ID NO: 2368 - protein, 117 aa, Artificial Sequence
  Chemically Synthesized
QVQLQESGGGLVQAGGSLRLSCAASGTISFVVSMGWYRQAPGKEREFVAAINYGGSTNYADSVKGRFTISRDNAKNTVYLQMNSLKPEDTAVYYCAVVSWPYNLTYWGQGTQVTVSS

SEQ ID NO: 2369 - protein, 118 aa, Artificial Sequence
  Chemically Synthesized
QVQLQESGGGLVQAGGSLRLSCAASGTISDDLAMGWYRQAPGKEREFVATIDRGTTTYYADSVKGRFTISRDNAKNTVYLQMNSLKPEDTAVYYCAVYAGYSPAYYYWGQGTQVTVSS

SEQ ID NO: 2370 - protein, 118 aa, Artificial Sequence
  Chemically Synthesized
QVQLQESGGGLVQAGGSLRLSCAASGSIFGQYVMGWYRQAPGKEREFVAGIGSGGSTNYADSVKGRFTISRDNAKNTVYLQMNSLKPEDTAVYYCAVLLDTSNYHSYWGQGTQVTVSS

SEQ ID NO: 2371 - protein, 118 aa, Artificial Sequence
  Chemically Synthesized
QVQLQESGGGLVQAGGSLRLSCAASGSIFRATVMGWYRQAPGKEREFVASIAPGSITYYADSVKGRFTISRDNAKNTVYLQMNSLKPEDTAVYYCAASLAYPLTFGYWGQGTQVTVSS

SEQ ID NO: 2372 - protein, 110 aa, Artificial Sequence
  Chemically Synthesized
QVQLQESGGGLVQAGGSLRLSCAASGSIFHGDSMGWYRQAPGKERELVAAIGFGANTYYADSVKGRFTISRDNAKNTVYLQMNSLKPEDTAVYYCAYFYWGQGTQVTVSS

SEQ ID NO: 2373 - protein, 113 aa, Artificial Sequence
  Chemically Synthesized
QVQLQESGGGLVQAGGSLRLSCAASGTISPANYMGWYRQAPGKEREFVAGIASVLVPYADSVKGRFTISRDNAKNTVYLQMNSLKPEDTAVYYCAVPTWLSYWGQGTQVTVSS

SEQ ID NO: 2374 - protein, 110 aa, Artificial Sequence
  Chemically Synthesized
QVQLQESGGGLVQAGGSLRLSCAASGNISYYVFMGWYRQAPGKERELVASIAYGGTTNYADSVKGRFTISRDNAKNTVYLQMNSLKPEDTAVYYCAYFYWGQGTQVTVSS

SEQ ID NO: 2375 - protein, 118 aa, Artificial Sequence
  Chemically Synthesized
QVQLQESGGGLVQAGGSLRLSCAASGTIFGVTYMGWYRQAPGKERELVAAIGAGSNTNYADSVKGRFTISRDNAKNTVYLQMNSLKPEDTAVYYCAALDVPSRPHEYWGQGTQVTVSS

SEQ ID NO: 2376 - protein, 126 aa, Artificial Sequence
  Chemically Synthesized
QVQLQESGGGLVQAGGSLRLSCAASGNIFRVDFMGWYRQAPGKERELVATIGAGSNTNYADSVKGRFTISRDNAKNTVYLQMNSLKPEDTAVYYCAVYDDDYDFGHPTTDDSLAYWGQGTQVTVSS

SEQ ID NO: 2377 - protein, 122 aa, Artificial Sequence
  Chemically Synthesized
QVQLQESGGGLVQAGGSLRLSCAASGTISPTDIMGWYRQAPGKEREFVASITYGSITYYADSVKGRFTISRDNAKNTVYLQMNSLKPEDTAVYYCAVGYPSWYSNDSPHAYWGQGTQVTVSS

SEQ ID NO: 2378 - protein, 126 aa, Artificial Sequence
  Chemically Synthesized
QVQLQESGGGLVQAGGSLRLSCAASGTIFPAQYMGWYRQAPGKERELVATITLGGNTYYADSVKGRFTISRDNAKNTVYLQMNSLKPEDTAVYYCAVGYLYFTYGLFRGGAYLNYWGQGTQVTVSS

SEQ ID NO: 2379 - protein, 118 aa, Artificial Sequence
  Chemically Synthesized
QVQLQESGGGLVQAGGSLRLSCAASGSISVYADMGWYRQAPGKERELVAAIDDGTSTYYADSVKGRFTISRDNAKNTVYLQMNSLKPEDTAVYYCAVGEIDQFAHDYWGQGTQVTVSS

SEQ ID NO: 2380 - protein, 118 aa, Artificial Sequence
  Chemically Synthesized
QVQLQESGGGLVQAGGSLRLSCAASGSIFKYGIMGWYRQAPGKERELVAGITWGANTNYADSVKGRFTISRDNAKNTVYLQMNSLKPEDTAVYYCAVYRYHDRPYIYWGQGTQVTVSS

SEQ ID NO: 2381 - protein, 118 aa, Artificial Sequence
  Chemically Synthesized
QVQLQESGGGLVQAGGSLRLSCAASGNIFGRYAMGWYRQAPGKEREFVASIGGGAITYYADSVKGRFTISRDNAKNTVYLQMNSLKPEDTAVYYCAVPDIDDLYHYYWGQGTQVTVSS

SEQ ID NO: 2382 - protein, 116 aa, Artificial Sequence
  Chemically Synthesized
QVQLQESGGGLVQAGGSLRLSCAASGNISDHVMGWYRQAPGKERELVAAITYGGTTYYADSVKGRFTISRDNAKNTVYLQMNSLKPEDTAVYYCAAVNLSTTVLYWGQGTQVTVSS

SEQ ID NO: 2383 - protein, 112 aa, Artificial Sequence
  Chemically Synthesized
QVQLQESGGGLVQAGGSLRLSCAASGSIFYRWTMGWYRQAPGKEREITVLVPYADSVKGRFTISRDNAKNTVYLQMNSLKPEDTAVYYCAALAAYTRYYIYWGQGTQVTVSS

SEQ ID NO: 2384 - protein, 117 aa, Artificial Sequence
  Chemically Synthesized
QVQLQESGGGLVQAGGSLRLSCAASGTIFYSLMGWYRQAPGKEREFVAAIADGSITYYADSVKGRFTISRDNAKNTVYLQMNSLKPEDTAVYYCAVYVDYASDHYYWGQGTQVTVSS

SEQ ID NO: 2385 - protein, 117 aa, Artificial Sequence
  Chemically Synthesized
QVQLQESGGGLVQAGGSLRLSCAASGSISQLPYMGWYRQAPGKERELVASIATGATTNYADSVKGRFTISRDNAKNTVYLQMNSLKPEDTAVYYCAAHPGDNSTFYWGQGTQVTVSS

SEQ ID NO: 2386 - protein, 118 aa, Artificial Sequence
  Chemically Synthesized
QVQLQESGGGLVQAGGSLRLSCAASGYIFRRTTMGWYRQAPGKERELVAGISGGTTTYYADSVKGRFTISRDNAKNTVYLQMNSLKPEDTAVYYCAAYYRSKAWHSYWGQGTQVTVSS

SEQ ID NO: 2387 - protein, 118 aa, Artificial Sequence
  Chemically Synthesized
QVQLQESGGGLVQAGGSLRLSCAASGNIFDGFIMGWYRQAPGKERELVATITSGTSTNYADSVKGRFTISRDNAKNTVYLQMNSLKPEDTAVYYCAARFANVYHYVYWGQGTQVTVSS

SEQ ID NO: 2388 - protein, 118 aa, Artificial Sequence
  Chemically Synthesized
QVQLQESGGGLVQAGGSLRLSCAASGYIFDVNFMGWYRQAPGKERELVASITNGGNTYYADSVKGRFTISRDNAKNTVYLQMNSLKPEDTAVYYCAVQYKVTVDHAYWGQGTQVTVSS

SEQ ID NO: 2389 - protein, 117 aa, Artificial Sequence
  Chemically Synthesized
QVQLQESGGGLVQAGGSLRLSCAASGTIFGYNYMGWYRQAPGKEREFVASISYGANTYYADSVKGRFTISRDNAKNTVYLQMNSLKPEDTAVYYCAVLTSTLLVFYWGQGTQVTVSS

SEQ ID NO: 2390 - protein, 112 aa, Artificial Sequence
  Chemically Synthesized
QVQLQESGGGLVQAGGSLRLSCAASGNISYDKYMGWYRQAPGKERELVASITYGTTTNYADSVKGRFTISRDNAKNTVYLQMNSLKPEDTAVYYCAVTGMYWGQGTQVTVSS

SEQ ID NO: 2391 - protein, 118 aa, Artificial Sequence
  Chemically Synthesized
QVQLQESGGGLVQAGGSLRLSCAASGYISDHYVMGWYRQAPGKERELVASINGGASTNYADSVKGRFTISRDNAKNTVYLQMNSLKPEDTAVYYCAVYYYLWVDFNYWGQGTQVTVSS

SEQ ID NO: 2392 - protein, 126 aa, Artificial Sequence
  Chemically Synthesized
QVQLQESGGGLVQAGGSLRLSCAASGTIFTRSVMGWYRQAPGKERELVAAITAGASTNYADSVKGRFTISRDNAKNTVYLQMNSLKPEDTAVYYCAARFIPYQWYTSPSGQGHPYWGQGTQVTVSS

SEQ ID NO: 2393 - protein, 118 aa, Artificial Sequence
  Chemically Synthesized
QVQLQESGGGLVQAGGSLRLSCAASGNISFDVDMGWYRQAPGKERELVAAITSGTTTYYADSVKGRFTISRDNAKNTVYLQMNSLKPEDTAVYYCAVQRDVDYVLFYWGQGTQVTVSS

SEQ ID NO: 2394 - protein, 117 aa, Artificial Sequence
  Chemically Synthesized
QVQLQESGGGLVQAGGSLRLSCAASGTIFRYGFMGWYRQAPGKERELLPVLMLVLIPYADSVKGRFTISRDNAKNTVYLQMNSLKPEDTAVYYCAADGPDNPTLDYWGQGTQVTVSS

SEQ ID NO: 2395 - protein, 113 aa, Artificial Sequence
  Chemically Synthesized
QVQLQESGGGLVQAGGSLRLSCAASGSISDVTMGWYRQAPGKEREFVATISRGGITNYADSVKGRFTISRDNAKNTVYLQMNSLKPEDTAVYYCAARGTYEYWGQGTQVTVSS

SEQ ID NO: 2396 - protein, 118 aa, Artificial Sequence
  Chemically Synthesized
QVQLQESGGGLVQAGGSLRLSCAASGNISWGPYMGWYRQAPGKEREFVAGITGGSITNYADSVKGRFTISRDNAKNTVYLQMNSLKPEDTAVYYCAAYAPASDYHYYWGQGTQVTVSS

SEQ ID NO: 2397 - protein, 122 aa, Artificial Sequence
  Chemically Synthesized
QVQLQESGGGLVQAGGSLRLSCAASGYISARGAMGWYRQAPGKERELVATIDAGANTNYADSVKGRFTISRDNAKNTVYLQMNSLKPEDTAVYYCAADYASEQAQYPSYAYWGQGTQVTVSS

SEQ ID NO: 2398 - protein, 122 aa, Artificial Sequence
  Chemically Synthesized
QVQLQESGGGLVQAGGSLRLSCAASGYISAGAAMGWYRQAPGKERELVATIAWGTITNYADSVKGRFTISRDNAKNTVYLQMNSLKPEDTAVYYCAVDTYYVTRGYADYGYWGQGTQVTVSS

SEQ ID NO: 2399 - protein, 122 aa, Artificial Sequence
  Chemically Synthesized
QVQLQESGGGLVQAGGSLRLSCAASGTISQVLQMGWYRQAPGKERELVATITDGSSTNYADSVKGRFTISRDNAKNTVYLQMNSLKPEDTAVYYCAVYAYYKARDRDPYYYWGQGTQVTVSS

SEQ ID NO: 2400 - protein, 122 aa, Artificial Sequence
  Chemically Synthesized
QVQLQESGGGLVQAGGSLRLSCAASGSISTLGDMGWYRQAPGKERELVAAIDNGASTNYADSVKGRFTISRDNAKNTVYLQMNSLKPEDTAVYYCAVPTRNRGTGAPSYGYWGQGTQVTVSS

SEQ ID NO: 2401 - protein, 117 aa, Artificial Sequence
  Chemically Synthesized
QVQLQESGGGLVQAGGSLRLSCAASGYIFVSLMGWYRQAPGKERELVAGIGRGSTTYYADSVKGRFTISRDNAKNTVYLQMNSLKPEDTAVYYCAVEDDEQDGHYYWGQGTQVTVSS

SEQ ID NO: 2402 - protein, 117 aa, Artificial Sequence
  Chemically Synthesized
QVQLQESGGGLVQAGGSLRLSCAASGTISSTYVMGWYRQAPGKERELVATISYGGNTNYADSVKGRFTISRDNAKNTVYLQMNSLKPEDTAVYYCAASSSVTRVIYWGQGTQVTVSS

SEQ ID NO: 2403 - protein, 117 aa, Artificial Sequence
  Chemically Synthesized
QVQLQESGGGLVQAGGSLRLSCAASGTISGYIVMGWYRQAPGKEREFVPLLITVLVPYADSVKGRFTISRDNAKNTVYLQMNSLKPEDTAVYYCAATNPHESGHNYWGQGTQVTVSS

SEQ ID NO: 2404 - protein, 122 aa, Artificial Sequence
  Chemically Synthesized
QVQLQESGGGLVQAGGSLRLSCAASGTISGELYMGWYRQAPGKERELVATIGTGANTYYADSVKGRFTISRDNAKNTVYLQMNSLKPEDTAVYYCAVPTALKRTVTGFLTYWGQGTQVTVSS

SEQ ID NO: 2405 - protein, 117 aa, Artificial Sequence
  Chemically Synthesized
QVQLQESGGGLVQAGGSLRLSCAASGNIFWWKTMGWYRQAPGKEREFVAAIAYGANTNYADSVKGRFTISRDNAKNTVYLQMNSLKPEDTAVYYCAVAYHVLLHDYWGQGTQVTVSS

SEQ ID NO: 2406 - protein, 118 aa, Artificial Sequence
  Chemically Synthesized
QVQLQESGGGLVQAGGSLRLSCAASGTISLDREMGWYRQAPGKEREFVATISNGASTNYADSVKGRFTISRDNAKNTVYLQMNSLKPEDTAVYYCAADYDDRDGLVYWGQGTQVTVSS

SEQ ID NO: 2407 - protein, 118 aa, Artificial Sequence
  Chemically Synthesized
QVQLQESGGGLVQAGGSLRLSCAASGTISYYYDMGWYRQAPGKEREFVASISAGASTNYADSVKGRFTISRDNAKNTVYLQMNSLKPEDTAVYYCAVYGSDRGNLPYWGQGTQVTVSS

SEQ ID NO: 2408 - protein, 118 aa, Artificial Sequence
  Chemically Synthesized
QVQLQESGGGLVQAGGSLRLSCAASGSIFRGPYMGWYRQAPGKEREFVAAIDYGGITYYADSVKGRFTISRDNAKNTVYLQMNSLKPEDTAVYYCAAGDYTAYNLDYWGQGTQVTVSS

SEQ ID NO: 2409 - protein, 117 aa, Artificial Sequence
  Chemically Synthesized
QVQLQESGGGLVQAGGSLRLSCAASGSIFWTDNMGWYRQAPGKERELVAAMIMVLVPYADSVKGRFTISRDNAKNTVYLQMNSLKPEDTAVYYCAATTGYPAVLYYWGQGTQVTVSS

SEQ ID NO: 2410 - protein, 118 aa, Artificial Sequence
  Chemically Synthesized
QVQLQESGGGLVQAGGSLRLSCAASGSISGIQTMGWYRQAPGKERELVASIASGGNTNYADSVKGRFTISRDNAKNTVYLQMNSLKPEDTAVYYCAAYAYDARNHSYWGQGTQVTVSS

SEQ ID NO: 2411 - protein, 118 aa, Artificial Sequence
  Chemically Synthesized
QVQLQESGGGLVQAGGSLRLSCAASGSIFGVGGMGWYRQAPGKEREFVASIDVGSNTYYADSVKGRFTISRDNAKNTVYLQMNSLKPEDTAVYYCAAYYKEQTVLAYWGQGTQVTVSS

SEQ ID NO: 2412 - protein, 122 aa, Artificial Sequence
  Chemically Synthesized
QVQLQESGGGLVQAGGSLRLSCAASGYIFAGRYMGWYRQAPGKEREFVASINPGANTNYADSVKGRFTISRDNAKNTVYLQMNSLKPEDTAVYYCAAWGYRDRYLTKALYYWGQGTQVTVSS

SEQ ID NO: 2413 - protein, 118 aa, Artificial Sequence
  Chemically Synthesized
QVQLQESGGGLVQAGGSLRLSCAASGNISATAIMGWYRQAPGKEREFVAGIAYGTNTYYADSVKGRFTISRDNAKNTVYLQMNSLKPEDTAVYYCAVGRYDYVDHLYWGQGTQVTVSS

SEQ ID NO: 2414 - protein, 117 aa, Artificial Sequence
  Chemically Synthesized
QVQLQESGGGLVQAGGSLRLSCAASGSIFTWIMGWYRQAPGKERELVAGINRGGSTYYADSVKGRFTISRDNAKNTVYLQMNSLKPEDTAVYYCAAGYYPDGDFAYWGQGTQVTVSS

SEQ ID NO: 2415 - protein, 118 aa, Artificial Sequence
  Chemically Synthesized
QVQLQESGGGLVQAGGSLRLSCAASGNIFRTRYMGWYRQAPGKEREFVASITTGGNTYYADSVKGRFTISRDNAKNTVYLQMNSLKPEDTAVYYCAADLLYYDAFYYWGQGTQVTVSS

SEQ ID NO: 2416 - protein, 118 aa, Artificial Sequence
  Chemically Synthesized
QVQLQESGGGLVQAGGSLRLSCAASGYISDWADMGWYRQAPGKEREFVAAIGGGTITYYADSVKGRFTISRDNAKNTVYLQMNSLKPEDTAVYYCAAYPGGRYQHLYWGQGTQVTVSS

SEQ ID NO: 2417 - protein, 118 aa, Artificial Sequence
  Chemically Synthesized
QVQLQESGGGLVQAGGSLRLSCAASGSISRRTYMGWYRQAPGKEREFVAAIGGGTITYYADSVKGRFTISRDNAKNTVYLQMNSLKPEDTAVYYCAAKRHAYRGHYYWGQGTQVTVSS

SEQ ID NO: 2418 - protein, 118 aa, Artificial Sequence
  Chemically Synthesized
QVQLQESGGGLVQAGGSLRLSCAASGTIFRTTVMGWYRQAPGKEREFVATIDKGSNTYYADSVKGRFTISRDNAKNTVYLQMNSLKPEDTAVYYCAAYPGGRYQHLYWGQGTQVTVSS

SEQ ID NO: 2419 - protein, 118 aa, Artificial Sequence
  Chemically Synthesized
QVQLQESGGGLVQAGGSLRLSCAASGSISRIRRMGWYRQAPGKERELVATIAGGASTNYADSVKGRFTISRDNAKNTVYLQMNSLKPEDTAVYYCAAYPGGRYQHLYWGQGTQVTVSS

SEQ ID NO: 2420 - protein, 118 aa, Artificial Sequence
  Chemically Synthesized
QVQLQESGGGLVQAGGSLRLSCAASGNIFPAWQMGWYRQAPGKERELVASIAYGSTTYYADSVKGRFTISRDNAKNTVYLQMNSLKPEDTAVYYCAAYPGGRYQHLYWGQGTQVTVSS

SEQ ID NO: 2421 - protein, 125 aa, Artificial Sequence
  Chemically Synthesized
QVQLQESGGGLVQAGGSLRLSCAASGNIFGQQRMGWYRQAPGKEREFVASINDGSNTYYADSVKGRFTISRDNAKNTVYLQMNSLKPEDTAVYYCAADDQGASLTISTRVVLIYWGQGTQVTVSS

SEQ ID NO: 2422 - protein, 118 aa, Artificial Sequence
  Chemically Synthesized
QVQLQESGGGLVQAGGSLRLSCAASGTIFDVPYMGWYRQAPGKEREFVAAINAGAITNYADSVKGRFTISRDNAKNTVYLQMNSLKPEDTAVYYCAARRDTYYLHEYWGQGTQVTVSS

SEQ ID NO: 2423 - protein, 117 aa, Artificial Sequence
  Chemically Synthesized
QVQLQESGGGLVQAGGSLRLSCAASGSIFFLFVMGWYRQAPGKERELVAAIASVLLPYADSVKGRFTISRDNAKNTVYLQMNSLKPEDTAVYYCAVFQQYGQTYSYWGQGTQVTVSS

SEQ ID NO: 2424 - protein, 116 aa, Artificial Sequence
  Chemically Synthesized
QVQLQESGGGLVQAGGSLRLSCAASGYIFRYMGWYRQAPGKEREFVAGINPGGITYYADSVKGRFTISRDNAKNTVYLQMNSLKPEDTAVYYCAAGRTHYLGLHYWGQGTQVTVSS

SEQ ID NO: 2425 - protein, 118 aa, Artificial Sequence
  Chemically Synthesized
QVQLQESGGGLVQAGGSLRLSCAASGYIFYVQYMGWYRQAPGKEREFVASISDGTSTNYADSVKGRFTISRDNAKNTVYLQMNSLKPEDTAVYYCAVVAYLKTDLDYWGQGTQVTVSS

SEQ ID NO: 2426 - protein, 122 aa, Artificial Sequence
  Chemically Synthesized
QVQLQESGGGLVQAGGSLRLSCAASGSISYPASMGWYRQAPGKEREFVAGISDGTNTYYADSVKGRFTISRDNAKNTVYLQMNSLKPEDTAVYYCAAYYKYRGDRGLAYRYWGQGTQVTVSS

SEQ ID NO: 2427 - protein, 118 aa, Artificial Sequence
  Chemically Synthesized
QVQLQESGGGLVQAGGSLRLSCAASGTISLTFKMGWYRQAPGKEREFVAGISDGGNTYYADSVKGRFTISRDNAKNTVYLQMNSLKPEDTAVYYCAAVFPWYHSLTYWGQGTQVTVSS

SEQ ID NO: 2428 - protein, 117 aa, Artificial Sequence
  Chemically Synthesized
QVQLQESGGGLVQAGGSLRLSCAASGSISDTDAMGWYRQAPGKERELLPLLVVVVLPYADSVKGRFTISRDNAKNTVYLQMNSLKPEDTAVYYCAVEAEAPQGHSYWGQGTQVTVSS

SEQ ID NO: 2429 - protein, 118 aa, Artificial Sequence
  Chemically Synthesized
QVQLQESGGGLVQAGGSLRLSCAASGYISDRHYMGWYRQAPGKEREFVATINYGGTTNYADSVKGRFTISRDNAKNTVYLQMNSLKPEDTAVYYCAVGTGNSITHIYWGQGTQVTVSS

SEQ ID NO: 2430 - protein, 118 aa, Artificial Sequence
  Chemically Synthesized
QVQLQESGGGLVQAGGSLRLSCAASGYISPPFRMGWYRQAPGKERELVASIDDGGTTYYADSVKGRFTISRDNAKNTVYLQMNSLKPEDTAVYYCAVAGDSDQDFDYWGQGTQVTVSS

SEQ ID NO: 2431 - protein, 118 aa, Artificial Sequence
  Chemically Synthesized
QVQLQESGGGLVQAGGSLRLSCAASGNISASYYMGWYRQAPGKERELVAGIAEGSTTYYADSVKGRFTISRDNAKNTVYLQMNSLKPEDTAVYYCAAHYPRSVELDYWGQGTQVTVSS

SEQ ID NO: 2432 - protein, 121 aa, Artificial Sequence
  Chemically Synthesized
QVQLQESGGGLVQAGGSLRLSCAASGTIFYYHVMGWYRQAPGKERELVAAIAPGSNTYYADSVKGRFTISRDNAKNTVYLQMNSLKPEDTAVYYCAIIQGAGRYGIAYRYWGQGTQVTVSS

SEQ ID NO: 2433 - protein, 118 aa, Artificial Sequence
  Chemically Synthesized
QVQLQESGGGLVQAGGSLRLSCAASGSISRFGTMGWYRQAPGKERELVASIAYGSITNYADSVKGRFTISRDNAKNTVYLQMNSLKPEDTAVYYCAAVADSDTPHGYWGQGTQVTVSS

SEQ ID NO: 2434 - protein, 116 aa, Artificial Sequence
  Chemically Synthesized
QVQLQESGGGLVQAGGSLRLSCAASGNISSPTMGWYRQAPGKERELVASIDYGATTYYADSVKGRFTISRDNAKNTVYLQMNSLKPEDTAVYYCAPAYRQYRYAYWGQGTQVTVSS

SEQ ID NO: 2435 - protein, 118 aa, Artificial Sequence
  Chemically Synthesized
QVQLQESGGGLVQAGGSLRLSCAASGYISQGLSMGWYRQAPGKERELVASIALGSSTNYADSVKGRFTISRDNAKNTVYLQMNSLKPEDTAVYYCAVYAPYRWTFQYWGQGTQVTVSS

SEQ ID NO: 2436 - protein, 112 aa, Artificial Sequence
  Chemically Synthesized
QVQLQESGGGLVQAGGSLRLSCAASGTIFRPDTMGWYRQAPGKEREFVAAIADGSNTNYADSVKGRFTISRDNAKNTVYLQMNSLKPEDTAVYYCAADDYYWGQGTQVTVSS

SEQ ID NO: 2437 - protein, 121 aa, Artificial Sequence
  Chemically Synthesized
QVQLQESGGGLVQAGGSLRLSCAASGTIFDADFMGWYRQAPGKEREFVATISHGSTTYYADSVKGRFTISRDNAKNTVYLQMNSLKPEDTAVYYCAAALGSSDRTGLSFYWGQGTQVTVSS

SEQ ID NO: 2438 - protein, 117 aa, Artificial Sequence
  Chemically Synthesized
QVQLQESGGGLVQAGGSLRLSCAASGSISTVAMGWYRQAPGKERELVATIAWGGSTYYADSVKGRFTISRDNAKNTVYLQMNSLKPEDTAVYYCAVDRYDYWLYEYWGQGTQVTVSS

SEQ ID NO: 2439 - protein, 121 aa, Artificial Sequence
  Chemically Synthesized
QVQLQESGGGLVQAGGSLRLSCAASGTISTLIIMGWYRQAPGKEREFVASIDTGANTNYADSVKGRFTISRDNAKNTVYLQMNSLKPEDTAVYYCAVSGVTSTVTTLFMYWGQGTQVTVSS

SEQ ID NO: 2440 - protein, 119 aa, Artificial Sequence
  Chemically Synthesized
QVQLQESGGGLVQAGGSLRLSCAASGNISYDTNMGWYRQAPGKERELVATIDIGGITNYADSVKGRFTISRDNAKNTVYLQMNSLKPEDTAVYYCAARAAGTWYSSSYWGQGTQVTVSS

SEQ ID NO: 2441 - protein, 118 aa, Artificial Sequence
  Chemically Synthesized
QVQLQESGGGLVQAGGSLRLSCAASGTISFARYMGWYRQAPGKERELVAAITEGAITNYADSVKGRFTISRDNAKNTVYLQMNSLKPEDTAVYYCAVREDTFTDFSYWGQGTQVTVSS

SEQ ID NO: 2442 - protein, 126 aa, Artificial Sequence
  Chemically Synthesized
QVQLQESGGGLVQAGGSLRLSCAASGYIFGYVYMGWYRQAPGKERELVAAIAVGATTNYADSVKGRFTISRDNAKNTVYLQMNSLKPEDTAVYYCAVTQTYDATGGDDVPYELDYWGQGTQVTVSS

SEQ ID NO: 2443 - protein, 118 aa, Artificial Sequence
  Chemically Synthesized
QVQLQESGGGLVQAGGSLRLSCAASGYISGRAPMGWYRQAPGKEREFVATINVGANTNYADSVKGRFTISRDNAKNTVYLQMNSLKPEDTAVYYCAAFRPPWVQFDYWGQGTQVTVSS

SEQ ID NO: 2444 - protein, 126 aa, Artificial Sequence
  Chemically Synthesized
QVQLQESGGGLVQAGGSLRLSCAASGTIFWAGWMGWYRQAPGKEREFVAGIDFGGTTNYADSVKGRFTISRDNAKNTVYLQMNSLKPEDTAVYYCAADGYEEQDTVSYRAWRYGYWGQGTQVTVSS

SEQ ID NO: 2445 - protein, 122 aa, Artificial Sequence
  Chemically Synthesized
QVQLQESGGGLVQAGGSLRLSCAASGTIFVYYDMGWYRQAPGKERELVASISLGGNTYYADSVKGRFTISRDNAKNTVYLQMNSLKPEDTAVYYCAALDNWDYDARRNLLYWGQGTQVTVSS

SEQ ID NO: 2446 - protein, 118 aa, Artificial Sequence
  Chemically Synthesized
QVQLQESGGGLVQAGGSLRLSCAASGTIFDDLNMGWYRQAPGKEREFVAAITWGSSTYYADSVKGRFTISRDNAKNTVYLQMNSLKPEDTAVYYCAAPYYRHYDFAYWGQGTQVTVSS

SEQ ID NO: 2447 - protein, 122 aa, Artificial Sequence
  Chemically Synthesized
QVQLQESGGGLVQAGGSLRLSCAASGYIFPYPTMGWYRQAPGKEREFVASIGAGGITYYADSVKGRFTISRDNAKNTVYLQMNSLKPEDTAVYYCAALWYYLRDLWTNYGYWGQGTQVTVSS

SEQ ID NO: 2448 - protein, 118 aa, Artificial Sequence
  Chemically Synthesized
QVQLQESGGGLVQAGGSLRLSCAASGSISVYYGMGWYRQAPGKEREFVAGITQGGTTNYADSVKGRFTISRDNAKNTVYLQMNSLKPEDTAVYYCAATRWYPRTHRYWGQGTQVTVSS

SEQ ID NO: 2449 - protein, 126 aa, Artificial Sequence
  Chemically Synthesized
QVQLQESGGGLVQAGGSLRLSCAASGNIFTVDAMGWYRQAPGKERELVATIGWGSTTYYADSVKGRFTISRDNAKNTVYLQMNSLKPEDTAVYYCAAPLDHRFGYYYKPFYAHHYWGQGTQVTVSS

SEQ ID NO: 2450 - protein, 127 aa, Artificial Sequence
  Chemically Synthesized
QVQLQESGGGLVQAGGSLRLSCAASGTISYIIYMGWYRQAPGKEREFVAAIADGSTTNYADSVKGRFTISRDNAKNTVYLQMNSLKPEDTAVYYCAAYYFAVRYRPSGTYLHRHRYWGQGTQVTVSS

SEQ ID NO: 2451 - protein, 120 aa, Artificial Sequence
  Chemically Synthesized
QVQLQESGGGLVQAGGSLRLSCAASGNIFRHYPMGWYRQAPGKERELVATINSGSSTNYADSVKGRFTISRDNAKNTVYLQMNSLKPEDTAVYYCAAGYQSVASTNGIYWGQGTQVTVSS

SEQ ID NO: 2452 - protein, 118 aa, Artificial Sequence
  Chemically Synthesized
QVQLQESGGGLVQAGGSLRLSCAASGYISTYTYMGWYRQAPGKERELVAAISLGGSTYYADSVKGRFTISRDNAKNTVYLQMNSLKPEDTAVYYCAVYHFRYRRHYYWGQGTQVTVSS

SEQ ID NO: 2453 - protein, 122 aa, Artificial Sequence
  Chemically Synthesized
QVQLQESGGGLVQAGGSLRLSCAASGYIFVISLMGWYRQAPGKEREFVATINGGGNTYYADSVKGRFTISRDNAKNTVYLQMNSLKPEDTAVYYCAAVRWYRGQRRNPHGYWGQGTQVTVSS

SEQ ID NO: 2454 - protein, 126 aa, Artificial Sequence
  Chemically Synthesized
QVQLQESGGGLVQAGGSLRLSCAASGTIFYGDPMGWYRQAPGKEREFVATIDNGTTTNYADSVKGRFTISRDNAKNTVYLQMNSLKPEDTAVYYCAADDDIPRQLLYYFVVYLPYWGQGTQVTVSS

SEQ ID NO: 2455 - protein, 122 aa, Artificial Sequence
  Chemically Synthesized
QVQLQESGGGLVQAGGSLRLSCAASGYIFGYRDMGWYRQAPGKERELVAGIDAGSITYYADSVKGRFTISRDNAKNTVYLQMNSLKPEDTAVYYCAARDRYRDTDAYEHTYWGQGTQVTVSS

SEQ ID NO: 2456 - protein, 124 aa, Artificial Sequence
  Chemically Synthesized
QVQLQESGGGLVQAGGSLRLSCAASGSISTTAVMGWYRQAPGKERELVAAISLVLLPYADSVKGRFTISRDNAKNTVYLQMNSLKPEDTAVYYCAVYDFVDGRVPSKYSSRHYWGQGTQVTVSS

SEQ ID NO: 2457 - protein, 126 aa, Artificial Sequence
  Chemically Synthesized
QVQLQESGGGLVQAGGSLRLSCAASGTISHLNDMGWYRQAPGKERELVASIAFGSSTNYADSVKGRFTISRDNAKNTVYLQMNSLKPEDTAVYYCAVYIRDYIISVYWSQNDHDYWGQGTQVTVSS

SEQ ID NO: 2458 - protein, 126 aa, Artificial Sequence
  Chemically Synthesized
QVQLQESGGGLVQAGGSLRLSCAASGYIFLDHQMGWYRQAPGKEREFVAAIGYGSTTYYADSVKGRFTISRDNAKNTVYLQMNSLKPEDTAVYYCAVSWYYGNHYTGDRGFIHGYWGQGTQVTVSS

SEQ ID NO: 2459 - protein, 118 aa, Artificial Sequence
  Chemically Synthesized
QVQLQESGGGLVQAGGSLRLSCAASGSISLINGMGWYRQAPGKERELVAAITRGASTYYADSVKGRFTISRDNAKNTVYLQMNSLKPEDTAVYYCAAVAGYRGRHWYWGQGTQVTVSS

SEQ ID NO: 2460 - protein, 117 aa, Artificial Sequence
  Chemically Synthesized
QVQLQESGGGLVQAGGSLRLSCAASGTISFVWDMGWYRQAPGKERELVAGIAYGGSTNYADSVKGRFTISRDNAKNTVYLQMNSLKPEDTAVYYCAADPYKYPHPYWGQGTQVTVSS

SEQ ID NO: 2461 - protein, 122 aa, Artificial Sequence
  Chemically Synthesized
QVQLQESGGGLVQAGGSLRLSCAASGTISDYYSMGWYRQAPGKEREFVATIAVGAITNYADSVKGRFTISRDNAKNTVYLQMNSLKPEDTAVYYCAVNGYTTSLDDVYHGYWGQGTQVTVSS

SEQ ID NO: 2462 - protein, 122 aa, Artificial Sequence
  Chemically Synthesized
QVQLQESGGGLVQAGGSLRLSCAASGTISAGDTMGWYRQAPGKERELVAGISLGGSTYYADSVKGRFTISRDNAKNTVYLQMNSLKPEDTAVYYCAADSAGRIHEGYIHDYWGQGTQVTVSS

SEQ ID NO: 2463 - protein, 118 aa, Artificial Sequence
  Chemically Synthesized
QVQLQESGGGLVQAGGSLRLSCAASGNISYTYTMGWYRQAPGKEREFVAGIATGANTYYADSVKGRFTISRDNAKNTVYLQMNSLKPEDTAVYYCAADIVTGRRYDYWGQGTQVTVSS

SEQ ID NO: 2464 - protein, 126 aa, Artificial Sequence
  Chemically Synthesized
QVQLQESGGGLVQAGGSLRLSCAASGNISLFRYMGWYRQAPGKEREFVASITGGASTNYADSVKGRFTISRDNAKNTVYLQMNSLKPEDTAVYYCAVVPFVTRYVAFIEDYKLGYWGQGTQVTVSS

SEQ ID NO: 2465 - protein, 122 aa, Artificial Sequence
  Chemically Synthesized
QVQLQESGGGLVQAGGSLRLSCAASGTISYDRDMGWYRQAPGKERELVATIDPGSITNYADSVKGRFTISRDNAKNTVYLQMNSLKPEDTAVYYCAVYYPYSQNSRYNYEYWGQGTQVTVSS

SEQ ID NO: 2466 - protein, 118 aa, Artificial Sequence
  Chemically Synthesized
QVQLQESGGGLVQAGGSLRLSCAASGYISDRYVMGWYRQAPGKERELVASIDVGGITNYADSVKGRFTISRDNAKNTVYLQMNSLKPEDTAVYYCAVQRIWDDALGYWGQGTQVTVSS

SEQ ID NO: 2467 - protein, 126 aa, Artificial Sequence
  Chemically Synthesized
QVQLQESGGGLVQAGGSLRLSCAASGYISRYTDMGWYRQAPGKEREFVAAIDGGTSTYYADSVKGRFTISRDNAKNTVYLQMNSLKPEDTAVYYCAVGHETWEWYYAPDPPYLYYWGQGTQVTVSS

SEQ ID NO: 2468 - protein, 123 aa, Artificial Sequence
  Chemically Synthesized
QVQLQESGGGLVQAGGSLRLSCAASGTISIIVYMGWYRQAPGKEREFVASIAVGGATTYYADSVKGRFTISRDNAKNTVYLQMNSLKPEDTAVYYCAAGYYYDHVGYRLYAYWGQGTQVTVSS

SEQ ID NO: 2469 - protein, 120 aa, Artificial Sequence
  Chemically Synthesized
QVQLQESGGGLVQAGGSLRLSCAASGTISWYYVMGWYRQAPGKEREFVATITDGGSTYYADSVKGRFTISRDNAKNTVYLQMNSLKPEDTAVYYCAAYTPYDLVSVVMYWGQGTQVTVSS

SEQ ID NO: 2470 - protein, 117 aa, Artificial Sequence
  Chemically Synthesized
QVQLQESGGGLVQAGGSLRLSCAASGSISYGADMGWYRQAPGKEREFVAGINPGTITNYADSVKGRFTISRDNAKNTVYLQMNSLKPEDTAVYYCAAVCSVRSSLYWGQGTQVTVSS

SEQ ID NO: 2471 - protein, 122 aa, Artificial Sequence
  Chemically Synthesized
QVQLQESGGGLVQAGGSLRLSCAASGNISAYGSMGWYRQAPGKERELVAGITYGASTYYADSVKGRFTISRDNAKNTVYLQMNSLKPEDTAVYYCAVDSASRLVFRYGHGYWGQGTQVTVSS

SEQ ID NO: 2472 - protein, 122 aa, Artificial Sequence
  Chemically Synthesized
QVQLQESGGGLVQAGGSLRLSCAASGNISAYAYMGWYRQAPGKERELVAAITWGGTTYYADSVKGRFTISRDNAKNTVYLQMNSLKPEDTAVYYCAVYVSQTEAVYAELYYWGQGTQVTVSS

SEQ ID NO: 2473 - protein, 118 aa, Artificial Sequence
  Chemically Synthesized
QVQLQESGGGLVQAGGSLRLSCAASGYIFYLRHMGWYRQAPGKERELVAAIGVGSNTYYADSVKGRFTISRDNAKNTVYLQMNSLKPEDTAVYYCAAAVRRYRYLSYWGQGTQVTVSS

SEQ ID NO: 2474 - protein, 122 aa, Artificial Sequence
  Chemically Synthesized
QVQLQESGGGLVQAGGSLRLSCAASGYISRSRTMGWYRQAPGKEREFVAGINLGGTTYYADSVKGRFTISRDNAKNTVYLQMNSLKPEDTAVYYCAVYLYLPNDLYAGLRYWGQGTQVTVSS

SEQ ID NO: 2475 - protein, 118 aa, Artificial Sequence
  Chemically Synthesized
QVQLQESGGGLVQAGGSLRLSCAASGYIFDSSYMGWYRQAPGKEREFVASITDGANTYYADSVKGRFTISRDNAKNTVYLQMNSLKPEDTAVYYCAAYSRSYDFYWYWGQGTQVTVSS

SEQ ID NO: 2476 - protein, 118 aa, Artificial Sequence
  Chemically Synthesized
QVQLQESGGGLVQAGGSLRLSCAASGNIFQASTMGWYRQAPGKERELVASIDQGGTTYYADSVKGRFTISRDNAKNTVYLQMNSLKPEDTAVYYCAAYYPGRDYHRYWGQGTQVTVSS

SEQ ID NO: 2477 - protein, 113 aa, Artificial Sequence
  Chemically Synthesized
QVQLQESGGGLVQAGGSLRLSCAASGSISNAQDMGWYRQAPGKEREFVAGIAVGANTNYADSVKGRFTISRDNAKNTVYLQMNSLKPEDTAVYYCAALVSIYWGQGTQVTVSS

SEQ ID NO: 2478 - protein, 118 aa, Artificial Sequence
  Chemically Synthesized
QVQLQESGGGLVQAGGSLRLSCAASGNIFYIIYMGWYRQAPGKEREFVAGIGAGSSTNYADSVKGRFTISRDNAKNTVYLQMNSLKPEDTAVYYCAAWHRSVRILRYWGQGTQVTVSS

SEQ ID NO: 2479 - protein, 118 aa, Artificial Sequence
  Chemically Synthesized
QVQLQESGGGLVQAGGSLRLSCAASGSISTVHAMGWYRQAPGKERELVASIDYGSTTYYADSVKGRFTISRDNAKNTVYLQMNSLKPEDTAVYYCAAITWSRVDYLYWGQGTQVTVSS

SEQ ID NO: 2480 - protein, 116 aa, Artificial Sequence
  Chemically Synthesized
QVQLQESGGGLVQAGGSLRLSCAASGYISLKADMGWYRQAPGKEREFVASIGFGTSTNYADSVKGRFTISRDNAKNTVYLQMNSLKPEDTAVYYCAAIYTDTSFYWGQGTQVTVSS

SEQ ID NO: 2481 - protein, 126 aa, Artificial Sequence
  Chemically Synthesized
QVQLQESGGGLVQAGGSLRLSCAASGNIFVIQLMGWYRQAPGKERELVAAIGYGTTTYYADSVKGRFTISRDNAKNTVYLQMNSLKPEDTAVYYCAVITRKAVTSGPYWTKYFRYWGQGTQVTVSS

SEQ ID NO: 2482 - protein, 112 aa, Artificial Sequence
  Chemically Synthesized
QVQLQESGGGLVQAGGSLRLSCAASGNISGYGYMGWYRQAPGKEREFVAGIASGANTYYADSVKGRFTISRDNAKNTVYLQMNSLKPEDTAVYYCAVYHYYWGQGTQVTVSS

SEQ ID NO: 2483 - protein, 122 aa, Artificial Sequence
  Chemically Synthesized
QVQLQESGGGLVQAGGSLRLSCAASGYISVATVMGWYRQAPGKERELVASITEGTNTNYADSVKGRFTISRDNAKNTVYLQMNSLKPEDTAVYYCAVRDQGRPKVVGDYPYWGQGTQVTVSS

SEQ ID NO: 2484 - protein, 126 aa, Artificial Sequence
  Chemically Synthesized
QVQLQESGGGLVQAGGSLRLSCAASGSISPVTYMGWYRQAPGKEREFVAAISYGANTNYADSVKGRFTISRDNAKNTVYLQMNSLKPEDTAVYYCAAYRGHGYTFYVHPRLRHWYWGQGTQVTVSS

SEQ ID NO: 2485 - protein, 122 aa, Artificial Sequence
  Chemically Synthesized
QVQLQESGGGLVQAGGSLRLSCAASGNIFRQANMGWYRQAPGKEREFVAGINDGASTYYADSVKGRFTISRDNAKNTVYLQMNSLKPEDTAVYYCAVPIALRAPEGYVLWYWGQGTQVTVSS

SEQ ID NO: 2486 - protein, 120 aa, Artificial Sequence
  Chemically Synthesized
QVQLQESGGGLVQAGGSLRLSCAASGTIFEPYYMGWYRQAPGKEREFVATIASGTTTYYADSVKGRFTISRDNAKNTVYLQMNSLKPEDTAVYYCAVPFYDLDYGVLPYWGQGTQVTVSS

SEQ ID NO: 2487 - protein, 118 aa, Artificial Sequence
  Chemically Synthesized
QVQLQESGGGLVQAGGSLRLSCAASGSISYGYRMGWYRQAPGKERELVAAIAFGTTTNYADSVKGRFTISRDNAKNTVYLQMNSLKPEDTAVYYCAASQLYAVDLWYWGQGTQVTVSS

SEQ ID NO: 2488 - protein, 122 aa, Artificial Sequence
  Chemically Synthesized
QVQLQESGGGLVQAGGSLRLSCAASGNIFLFSSMGWYRQAPGKERELVATIGYGGTTYYADSVKGRFTISRDNAKNTVYLQMNSLKPEDTAVYYCAVIYYVQYFGVVYYIYWGQGTQVTVSS

SEQ ID NO: 2489 - protein, 118 aa, Artificial Sequence
  Chemically Synthesized
QVQLQESGGGLVQAGGSLRLSCAASGNISVVYVMGWYRQAPGKERELVASIGYGTSTYYADSVKGRFTISRDNAKNTVYLQMNSLKPEDTAVYYCAVNAPSVDGHTYWGQGTQVTVSS

SEQ ID NO: 2490 - protein, 118 aa, Artificial Sequence
  Chemically Synthesized
QVQLQESGGGLVQAGGSLRLSCAASGSIFYVDPMGWYRQAPGKERELVAGISYGTITNYADSVKGRFTISRDNAKNTVYLQMNSLKPEDTAVYYCAAVNPDNIPASYWGQGTQVTVSS

SEQ ID NO: 2491 - protein, 122 aa, Artificial Sequence
  Chemically Synthesized
QVQLQESGGGLVQAGGSLRLSCAASGSIFGAAGMGWYRQAPGKERELVAGISRGSSTYYADSVKGRFTISRDNAKNTVYLQMNSLKPEDTAVYYCAAWTRYDYDTSYIYGYWGQGTQVTVSS

SEQ ID NO: 2492 - protein, 122 aa, Artificial Sequence
  Chemically Synthesized
QVQLQESGGGLVQAGGSLRLSCAASGNISDRWYMGWYRQAPGKEREFVASIGPGSITNYADSVKGRFTISRDNAKNTVYLQMNSLKPEDTAVYYCAVETYRGWKDTHWYRYWGQGTQVTVSS

SEQ ID NO: 2493 - protein, 122 aa, Artificial Sequence
  Chemically Synthesized
QVQLQESGGGLVQAGGSLRLSCAASGTIFLYADMGWYRQAPGKEREFVAAIDAGAITYYADSVKGRFTISRDNAKNTVYLQMNSLKPEDTAVYYCAAWSYYEPADPTRHVYWGQGTQVTVSS

SEQ ID NO: 2494 - protein, 109 aa, Artificial Sequence
  Chemically Synthesized
QVQLQESGGGLVQAGGSLRLSCAASGTISIQPNMGWYRQAPGKERELVATIDNGATTYYADSVKGRFTISRDNAKNTVYLQMNSLKPEDTAVYYCAVYWGQGTQVTVSS

SEQ ID NO: 2495 - protein, 121 aa, Artificial Sequence
  Chemically Synthesized
QVQLQESGGGLVQAGGSLRLSCAASGSIFTQNYMGWYRQAPGKERELVAAIAIGSNTNYADSVKGRFTISRDNAKNTVYLQMNSLKPEDTAVYYCAAQDYSKTLFSRVLYWGQGTQVTVSS

SEQ ID NO: 2496 - protein, 115 aa, Artificial Sequence
  Chemically Synthesized
QVQLQESGGGLVQAGGSLRLSCAASGTMGWYRQAPGKERELVVAITYGTITYYADSVKGRFTISRDNAKNTVYLQMNSLKPEDTAVYYCAADSTSCTGLTVTMYWGQGTQVTVSS

SEQ ID NO: 2497 - protein, 118 aa, Artificial Sequence
  Chemically Synthesized
QVQLQESGGGLVQAGGSLRLSCAASGNIFYLVLMGWYRQAPGKERELVAGITFGAITNYADSVKGRFTISRDNAKNTVYLQMNSLKPEDTAVYYCAAGVPWTKYLPYWGQGTQVTVSS

SEQ ID NO: 2498 - protein, 122 aa, Artificial Sequence
  Chemically Synthesized
QVQLQESGGGLVQAGGSLRLSCAASGYISYVTYMGWYRQAPGKEREFVAGISYGASTNYADSVKGRFTISRDNAKNTVYLQMNSLKPEDTAVYYCAVNTRYYASTFRGHRYWGQGTQVTVSS

SEQ ID NO: 2499 - protein, 117 aa, Artificial Sequence
  Chemically Synthesized
QVQLQESGGGLVQAGGSLRLSCAASGNIFKLGDMGWYRQAPGKERELVASIDDGSNTNYADSVKGRFTISRDNAKNTVYLQMNSLKPEDTAVYYCAVSLSTNGFIYWGQGTQVTVSS

SEQ ID NO: 2500 - protein, 118 aa, Artificial Sequence
  Chemically Synthesized
QVQLQESGGGLVQAGGSLRLSCAASGNIFSQDTMGWYRQAPGKEREFVATITWGGSTNYADSVKGRFTISRDNAKNTVYLQMNSLKPEDTAVYYCAVAYTQTEGYDYWGQGTQVTVSS

SEQ ID NO: 2501 - protein, 125 aa, Artificial Sequence
  Chemically Synthesized
QVQLQESGGGLVQAGGSLRLSCAASGYISDERPMGWYRQAPGKEREFVAAIDIGTNTNYADSVKGRFTISRDNAKNTVYLQMNSLKPEDTAVYYCAVQYADTSTLIVSLTNVMYWGQGTQVTVSS

SEQ ID NO: 2502 - protein, 118 aa, Artificial Sequence
  Chemically Synthesized
QVQLQESGGGLVQAGGSLRLSCAASGNISGDPDMGWYRQAPGKERELVASIGWGTTTYYADSVKGRFTISRDNAKNTVYLQMNSLKPEDTAVYYCAVYPIPWEYLWYWGQGTQVTVSS

SEQ ID NO: 2503 - protein, 122 aa, Artificial Sequence
  Chemically Synthesized
QVQLQESGGGLVQAGGSLRLSCAASGNIFVASRMGWYRQAPGKERELVAAIGYGSSTYYADSVKGRFTISRDNAKNTVYLQMNSLKPEDTAVYYCAVYVFDDVDPGVLYWYWGQGTQVTVSS

SEQ ID NO: 2504 - protein, 117 aa, Artificial Sequence
  Chemically Synthesized
QVQLQESGGGLVQAGGSLRLSCAASGTISSAYGMGWYRQAPGKERELVATINYGGSTYYADSVKGRFTISRDNAKNTVYLQMNSLKPEDTAVYYCAARDNSRNFVYWGQGTQVTVSS

SEQ ID NO: 2505 - protein, 118 aa, Artificial Sequence
  Chemically Synthesized
QVQLQESGGGLVQAGGSLRLSCAASGTISATEPMGWYRQAPGKERELVAAITTGGTTYYADSVKGRFTISRDNAKNTVYLQMNSLKPEDTAVYYCAAPTHYDIPLVYWGQGTQVTVSS

SEQ ID NO: 2506 - protein, 122 aa, Artificial Sequence
  Chemically Synthesized
QVQLQESGGGLVQAGGSLRLSCAASGTISPTLYMGWYRQAPGKEREFVAGIATGSNTYYADSVKGRFTISRDNAKNTVYLQMNSLKPEDTAVYYCAVTYTEDYYSLIQHWYWGQGTQVTVSS

SEQ ID NO: 2507 - protein, 122 aa, Artificial Sequence
  Chemically Synthesized
QVQLQESGGGLVQAGGSLRLSCAASGNIFYVGYMGWYRQAPGKERELVATISVGTTTYYADSVKGRFTISRDNAKNTVYLQMNSLKPEDTAVYYCAAYRDVAKGPYYGFYYWGQGTQVTVSS

SEQ ID NO: 2508 - protein, 118 aa, Artificial Sequence
  Chemically Synthesized
QVQLQESGGGLVQAGGSLRLSCAASGNIFDAIGMGWYRQAPGKERELVAAIAYGATTYYADSVKGRFTISRDNAKNTVYLQMNSLKPEDTAVYYCAVAYAPKGRHAYWGQGTQVTVSS

SEQ ID NO: 2509 - protein, 118 aa, Artificial Sequence
  Chemically Synthesized
QVQLQESGGGLVQAGGSLRLSCAASGTIFYYYYMGWYRQAPGKERELVAAITPGGTTNYADSVKGRFTISRDNAKNTVYLQMNSLKPEDTAVYYCAADDTYSSNYDYWGQGTQVTVSS

SEQ ID NO: 2510 - protein, 118 aa, Artificial Sequence
  Chemically Synthesized
QVQLQESGGGLVQAGGSLRLSCAASGNISHYDKMGWYRQAPGKEREFVAAINPGSNTNYADSVKGRFTISRDNAKNTVYLQMNSLKPEDTAVYYCAVRRPNVQYHAYWGQGTQVTVSS

SEQ ID NO: 2511 - protein, 121 aa, Artificial Sequence
  Chemically Synthesized
QVQLQESGGGLVQAGGSLRLSCAASGNISDIDIMGWYRQAPGKERELVAAIDRGASTYYADSVKGRFTISRDNAKNTVYLQMNSLKPEDTAVYYCAAYYDQYVYPSTTMYWGQGTQVTVSS

SEQ ID NO: 2512 - protein, 122 aa, Artificial Sequence
  Chemically Synthesized
QVQLQESGGGLVQAGGSLRLSCAASGSIFGRYPMGWYRQAPGKEREFVAGINFGSTTNYADSVKGRFTISRDNAKNTVYLQMNSLKPEDTAVYYCAAYLHGPFRYHRPFSYWGQGTQVTVSS

SEQ ID NO: 2513 - protein, 131 aa, Artificial Sequence
  Chemically Synthesized
QVQLQESGGGLVQAGGSLRLSCAASGTIFLYHDMGWYRQAPGKERELVAAISSGSTTNYADSVKGRFTISRDNAKNTVYLQMNSLKPEDTAVYYCAVDSDRNGFEDSREYARYSDQVLDYWGQGTQVTVSS

SEQ ID NO: 2514 - protein, 120 aa, Artificial Sequence
  Chemically Synthesized
QVQLQESGGGLVQAGGSLRLSCAASGTISRDDSMGWYRQAPGKERELVASIGEGTSTNYADSVKGRFTISRDNAKNTVYLQMNSLKPEDTAVYYCAAGDYLWDRTSYVYWGQGTQVTVSS

SEQ ID NO: 2515 - protein, 122 aa, Artificial Sequence
  Chemically Synthesized
QVQLQESGGGLVQAGGSLRLSCAASGNISSGDWMGWYRQAPGKEREFVASIDYGTSTNYADSVKGRFTISRDNAKNTVYLQMNSLKPEDTAVYYCAVPAGTPKDGVYYHAYWGQGTQVTVSS

SEQ ID NO: 2516 - protein, 117 aa, Artificial Sequence
  Chemically Synthesized
QVQLQESGGGLVQAGGSLRLSCAASGTISVYLYMGWYRQAPGKERELLPLLMTVVIPYADSVKGRFTISRDNAKNTVYLQMNSLKPEDTAVYYCAVANLFPRGFYYWGQGTQVTVSS

SEQ ID NO: 2517 - protein, 126 aa, Artificial Sequence
  Chemically Synthesized
QVQLQESGGGLVQAGGSLRLSCAASGTISTGDIMGWYRQAPGKERELVATIGSGGTTYYADSVKGRFTISRDNAKNTVYLQMNSLKPEDTAVYYCAAVSTPYYWLADGIDPRYYYWGQGTQVTVSS

SEQ ID NO: 2518 - protein, 118 aa, Artificial Sequence
  Chemically Synthesized
QVQLQESGGGLVQAGGSLRLSCAASGTISDYIVMGWYRQAPGKERELVASIGPGANTYYADSVKGRFTISRDNAKNTVYLQMNSLKPEDTAVYYCAASTQGPDLHPYWGQGTQVTVSS

SEQ ID NO: 2519 - protein, 122 aa, Artificial Sequence
  Chemically Synthesized
QVQLQESGGGLVQAGGSLRLSCAASGTISSDDSMGWYRQAPGKERELVATINIGTSTNYADSVKGRFTISRDNAKNTVYLQMNSLKPEDTAVYYCAVFDPYYSSSDWWLGYWGQGTQVTVSS

SEQ ID NO: 2520 - protein, 118 aa, Artificial Sequence
  Chemically Synthesized
QVQLQESGGGLVQAGGSLRLSCAASGSIFPDDEMGWYRQAPGKEREFVASITVGASTNYADSVKGRFTISRDNAKNTVYLQMNSLKPEDTAVYYCAVPLALSAGLPYWGQGTQVTVSS

SEQ ID NO: 2521 - protein, 122 aa, Artificial Sequence
  Chemically Synthesized
QVQLQESGGGLVQAGGSLRLSCAASGYISRIGYMGWYRQAPGKEREFVAGISYGGSTYYADSVKGRFTISRDNAKNTVYLQMNSLKPEDTAVYYCAVQQDEYQAPVPYYEYWGQGTQVTVSS

SEQ ID NO: 2522 - protein, 118 aa, Artificial Sequence
  Chemically Synthesized
QVQLQESGGGLVQAGGSLRLSCAASGYIFQPGPMGWYRQAPGKERELCCRYCFWYYYQYADSVKGRFTISRDNAKNTVYLQMNSLKPEDTAVYYCAAVDANYRYFSYWGQGTQVTVSS

SEQ ID NO: 2523 - protein, 121 aa, Artificial Sequence
  Chemically Synthesized
QVQLQESGGGLVQAGGSLRLSCAASGYISDYYHMGWYRQAPGKEREFVASIGYGGITYYADSVKGRFTISRDNAKNTVYLQMNSLKPEDTAVYYCAAYGGYPLESVLTFYWGQGTQVTVSS

SEQ ID NO: 2524 - protein, 122 aa, Artificial Sequence
  Chemically Synthesized
QVQLQESGGGLVQAGGSLRLSCAASGSISPRSYMGWYRQAPGKERELVAGIDVGGTTYYADSVKGRFTISRDNAKNTVYLQMNSLKPEDTAVYYCAVGITYESDAYYLHWYWGQGTQVTVSS

SEQ ID NO: 2525 - protein, 126 aa, Artificial Sequence
  Chemically Synthesized
QVQLQESGGGLVQAGGSLRLSCAASGYIFLADVMGWYRQAPGKEREFVAGIAEGTNTNYADSVKGRFTISRDNAKNTVYLQMNSLKPEDTAVYYCAAYLFGAYHWPYRLVDYHDYWGQGTQVTVSS

SEQ ID NO: 2526 - protein, 118 aa, Artificial Sequence
  Chemically Synthesized
QVQLQESGGGLVQAGGSLRLSCAASGSISVAGSMGWYRQAPGKERELVASITDGTSTNYADSVKGRFTISRDNAKNTVYLQMNSLKPEDTAVYYCAAVAQTHQSHTYWGQGTQVTVSS

SEQ ID NO: 2527 - protein, 118 aa, Artificial Sequence
  Chemically Synthesized
QVQLQESGGGLVQAGGSLRLSCAASGYISRYILMGWYRQAPGKERELVAAIGGGATTYYADSVKGRFTISRDNAKNTVYLQMNSLKPEDTAVYYCAAYHYYASYYVYWGQGTQVTVSS

SEQ ID NO: 2528 - protein, 123 aa, Artificial Sequence
  Chemically Synthesized
QVQLQESGGGLVQAGGSLRLSCAASGSIFTAVYMGWYRQAPGKEREFVAAIGTGGNTNYADSVKGRFTISRDNAKNTVYLQMNSLKPEDTAVYYCAADSYGAYVEFYGKYAYWGQGTQVTVSS

SEQ ID NO: 2529 - protein, 117 aa, Artificial Sequence
  Chemically Synthesized
QVQLQESGGGLVQAGGSLRLSCAASGYISDDVGMGWYRQAPGKERELVASIDGGATTYYADSVKGRFTISRDNAKNTVYLQMNSLKPEDTAVYYCAAYVYSVGTLYWGQGTQVTVSS

SEQ ID NO: 2530 - protein, 118 aa, Artificial Sequence
  Chemically Synthesized
QVQLQESGGGLVQAGGSLRLSCAASGSISGPDIMGWYRQAPGKERELVASIGYGANTYYADSVKGRFTISRDNAKNTVYLQMNSLKPEDTAVYYCAVTGDNFLEYSYWGQGTQVTVSS

SEQ ID NO: 2531 - protein, 121 aa, Artificial Sequence
  Chemically Synthesized
QVQLQESGGGLVQAGGSLRLSCAASGYISDEWTMGWYRQAPGKEREFVATIDHGTTTNYADSVKGRFTISRDNAKNTVYLQMNSLKPEDTAVYYCAAAYPYIIYRNLYHYWGQGTQVTVSS

SEQ ID NO: 2532 - protein, 121 aa, Artificial Sequence
  Chemically Synthesized
QVQLQESGGGLVQAGGSLRLSCAASGSIFYEYMGWYRQAPGKERELVASIGIGGSTNYADSVKGRFTISRDNAKNTVYLQMNSLKPEDTAVYYCAALKITYLATQQDFSYWGQGTQVTVSS

SEQ ID NO: 2533 - protein, 121 aa, Artificial Sequence
  Chemically Synthesized
QVQLQESGGGLVQAGGSLRLSCAASGIFLFTTMGWYRQAPGKERELVATIAVGTNTNYADSVKGRFTISRDNAKNTVYLQMNSLKPEDTAVYYCAAWEAGGDDLPNQLYYWGQGTQVTVSS

SEQ ID NO: 2534 - protein, 121 aa, Artificial Sequence
  Chemically Synthesized
QVQLQESGGGLVQAGGSLRLSCAASGSIFGWQDMGWYRQAPGKEREFVAGISDGGTTNYADSVKGRFTISRDNAKNTVYLQMNSLKPEDTAVYYCAAQRTYTQTDYIYLYWGQGTQVTVSS

SEQ ID NO: 2535 - protein, 118 aa, Artificial Sequence
  Chemically Synthesized
QVQLQESGGGLVQAGGSLRLSCAASGNISQGYYMGWYRQAPGKERELVASIDRGTTTYYADSVKGRFTISRDNAKNTVYLQMNSLKPEDTAVYYCAAVYTYYYQHQYWGQGTQVTVSS

SEQ ID NO: 2536 - protein, 122 aa, Artificial Sequence
  Chemically Synthesized
QVQLQESGGGLVQAGGSLRLSCAASGTISAYIYMGWYRQAPGKEREFVAGINGGTNTNYADSVKGRFTISRDNAKNTVYLQMNSLKPEDTAVYYCAVTDPATRLYRETLDYWGQGTQVTVSS

SEQ ID NO: 2537 - protein, 117 aa, Artificial Sequence
  Chemically Synthesized
QVQLQESGGGLVQAGGSLRLSCAASGTISSYGNMGWYRQAPGKEREFVAGINGTTTYYADSVKGRFTISRDNAKNTVYLQMNSLKPEDTAVYYCAASAYRSADLIYWGQGTQVTVSS

SEQ ID NO: 2538 - protein, 115 aa, Artificial Sequence
  Chemically Synthesized
QVQLQESGGGLVQAGGSLRLSCAASGTISDAGSMGWYRQAPGKERELVATIGRGANTYYADSVKGRFTISRDNAKNTVYLQMNSLKPEDTAVYYCAAYTLSAHYWGQGTQVTVSS

SEQ ID NO: 2539 - protein, 119 aa, Artificial Sequence
  Chemically Synthesized
QVQLQESGGGLVQAGGSLRLSCAASGNIFLVGRMGWYRQAPGKERELVASISDGSTTYYADSVKGRFTISRDNAKNTVYLQMNSLKPEDTAVYYCAAWTQHGGDVLAYWGQGTQVTVSS

SEQ ID NO: 2540 - protein, 126 aa, Artificial Sequence
  Chemically Synthesized
QVQLQESGGGLVQAGGSLRLSCAASGTIFYVYYMGWYRQAPGKERELVASIGLGAITNYADSVKGRFTISRDNAKNTVYLQMNSLKPEDTAVYYCAVQDRGTDDYVYNGRRFLLYWGQGTQVTVSS

SEQ ID NO: 2541 - protein, 121 aa, Artificial Sequence
  Chemically Synthesized
QVQLQESGGGLVQAGGSLRLSCAASGSIMGWYRQAPGKEREFVAAIAPGSSTNYADSVKGRFTISRDNAKNTVYLQMNSLKPEDTAVYYCAVVNTRYVYLYEYDQDELDYWGQGTQVTVSS

SEQ ID NO: 2542 - protein, 126 aa, Artificial Sequence
  Chemically Synthesized
QVQLQESGGGLVQAGGSLRLSCAASGNISGVRAMGWYRQAPGKEREFVAGIGNGGNTNYADSVKGRFTISRDNAKNTVYLQMNSLKPEDTAVYYCAAYYDGDYYSGAYLIYLHYYWGQGTQVTVSS

SEQ ID NO: 2543 - protein, 118 aa, Artificial Sequence
  Chemically Synthesized
QVQLQESGGGLVQAGGSLRLSCAASGSIFYGRYMGWYRQAPGKEREFVATISGGTSTNYADSVKGRFTISRDNAKNTVYLQMNSLKPEDTAVYYCAVYPYGPVRHDYWGQGTQVTVSS

SEQ ID NO: 2544 - protein, 117 aa, Artificial Sequence
  Chemically Synthesized
QVQLQESGGGLVQAGGSLRLSCAASGNISGLRYMGWYRQAPGKERELVAAIGFGATTYYADSVKGRFTISRDNAKNTVYLQMNSLKPEDTAVYYCAVQAYAGSLIYWGQGTQVTVSS

SEQ ID NO: 2545 - protein, 116 aa, Artificial Sequence
  Chemically Synthesized
QVQLQESGGGLVQAGGSLRLSCAASGTISNNDVMGWYRQAPGKERELVASIAGGSNTYYADSVKGRFTISRDNAKNTVYLQMNSLKPEDTAVYYCAYYHTQVHYYWGQGTQVTVSS

SEQ ID NO: 2546 - protein, 122 aa, Artificial Sequence
  Chemically Synthesized
QVQLQESGGGLVQAGGSLRLSCAASGSISAGNTMGWYRQAPGKERELVATIATGANTYYADSVKGRFTISRDNAKNTVYLQMNSLKPEDTAVYYCAVAEYDYGDPRGGHIYWGQGTQVTVSS

SEQ ID NO: 2547 - protein, 118 aa, Artificial Sequence
  Chemically Synthesized
QVQLQESGGGLVQAGGSLRLSCAASGTIFALYYMGWYRQAPGKEREFVAGIGRGSTTNYADSVKGRFTISRDNAKNTVYLQMNSLKPEDTAVYYCAARQYYFWGHPYWGQGTQVTVSS

SEQ ID NO: 2548 - protein, 126 aa, Artificial Sequence
  Chemically Synthesized
QVQLQESGGGLVQAGGSLRLSCAASGYISYQADMGWYRQAPGKEREFVAAITRGASTYYADSVKGRFTISRDNAKNTVYLQMNSLKPEDTAVYYCAATLYDSRRDDDFYDDKYYYWGQGTQVTVSS

SEQ ID NO: 2549 - protein, 121 aa, Artificial Sequence
  Chemically Synthesized
QVQLQESGGGLVQAGGSLRLSCAASGSISESAMGWYRQAPGKERELVASIADGTSTNYADSVKGRFTISRDNAKNTVYLQMNSLKPEDTAVYYCAVSWDPYGDITGPYWYWGQGTQVTVSS

SEQ ID NO: 2550 - protein, 117 aa, Artificial Sequence
  Chemically Synthesized
QVQLQESGGGLVQAGGSLRLSCAASGTISAWRYMGWYRQAPGKEREFVATIAYGANTYYADSVKGRFTISRDNAKNTVYLQMNSLKPEDTAVYYCAVSNTSIVVMYWGQGTQVTVSS

SEQ ID NO: 2551 - protein, 117 aa, Artificial Sequence
  Chemically Synthesized
QVQLQESGGGLVQAGGSLRLSCAASGNIFSWAEMGWYRQAPGKEREFVASIDVGATTYYADSVKGRFTISRDNAKNTVYLQMNSLKPEDTAVYYCAVWVTRVSTLYWGQGTQVTVSS

SEQ ID NO: 2552 - protein, 123 aa, Artificial Sequence
  Chemically Synthesized
QVQLQESGGGLVQAGGSLRLSCAASGSIFYREGMGWYRQAPGKERELVATITDGGTSTYYADSVKGRFTISRDNAKNTVYLQMNSLKPEDTAVYYCAAPPYYDDAYFVAFKYWGQGTQVTVSS

SEQ ID NO: 2553 - protein, 117 aa, Artificial Sequence
  Chemically Synthesized
QVQLQESGGGLVQAGGSLRLSCAASGTISRSLMGWYRQAPGKEREFVAAITGGTNTYYADSVKGRFTISRDNAKNTVYLQMNSLKPEDTAVYYCAVDWYVLWRLYYWGQGTQVTVSS

SEQ ID NO: 2554 - protein, 121 aa, Artificial Sequence
  Chemically Synthesized
QVQLQESGGGLVQAGGSLRLSCAASGNISGVGDMGWYRQAPGKERELVATIGGGEYQYADSVKGRFTISRDNAKNTVYLQMNSLKPEDTAVYYCAASRYAVDLDLDDLWYWGQGTQVTVSS

SEQ ID NO: 2555 - protein, 125 aa, Artificial Sequence
  Chemically Synthesized
QVQLQESGGGLVQAGGSLRLSCAASGYIFRTRMGWYRQAPGKERELVAAITHGGITNYADSVKGRFTISRDNAKNTVYLQMNSLKPEDTAVYYCAAYGRAYRDGLEWYTNYLAYWGQGTQVTVSS

SEQ ID NO: 2556 - protein, 118 aa, Artificial Sequence
  Chemically Synthesized
QVQLQESGGGLVQAGGSLRLSCAASGTISLLDEMGWYRQAPGKERELVAGITSGGNTNYADSVKGRFTISRDNAKNTVYLQMNSLKPEDTAVYYCAVAIWKDRDHDYWGQGTQVTVSS

SEQ ID NO: 2557 - protein, 125 aa, Artificial Sequence
  Chemically Synthesized
QVQLQESGGGLVQAGGSLRLSCAASGTIFSAPWMGWYRQAPGKERELVAGIDDGSTTYYADSVKGRFTISRDNAKNTVYLQMNSLKPEDTAVYYCAVVYPTEYDRADSATTRMYWGQGTQVTVSS

SEQ ID NO: 2558 - protein, 118 aa, Artificial Sequence
  Chemically Synthesized
QVQLQESGGGLVQAGGSLRLSCAASGNIFETIDMGWYRQAPGKEREFVAGIGLGASTYYADSVKGRFTISRDNAKNTVYLQMNSLKPEDTAVYYCAVYPRDWTAHAYWGQGTQVTVSS

SEQ ID NO: 2559 - protein, 126 aa, Artificial Sequence
  Chemically Synthesized
QVQLQESGGGLVQAGGSLRLSCAASGTISSLTYMGWYRQAPGKERELVATISYGAITYYADSVKGRFTISRDNAKNTVYLQMNSLKPEDTAVYYCAAYSRYPYPSYRWNELGHYYWGQGTQVTVSS

SEQ ID NO: 2560 - protein, 118 aa, Artificial Sequence
  Chemically Synthesized
QVQLQESGGGLVQAGGSLRLSCAASGNISPRYVMGWYRQAPGKEREFVAGIGRGSITYYADSVKGRFTISRDNAKNTVYLQMNSLKPEDTAVYYCAAGSSKISPHWYWGQGTQVTVSS

SEQ ID NO: 2561 - protein, 120 aa, Artificial Sequence
  Chemically Synthesized
QVQLQESGGGLVQAGGSLRLSCAASGTISSVGMGWYRQAPGKEREFVATIDDGTITYYADSVKGRFTISRDNAKNTVYLQMNSLKPEDTAVYYCAADNYFDPVDYALTYWGQGTQVTVSS

SEQ ID NO: 2562 - protein, 118 aa, Artificial Sequence
  Chemically Synthesized
QVQLQESGGGLVQAGGSLRLSCAASGSISDYLYMGWYRQAPGKEREFVAGIDTGSSTNYADSVKGRFTISRDNAKNTVYLQMNSLKPEDTAVYYCAVYIHRDVNHRYWGQGTQVTVSS

SEQ ID NO: 2563 - protein, 122 aa, Artificial Sequence
  Chemically Synthesized
QVQLQESGGGLVQAGGSLRLSCAASGSIFRVYIMGWYRQAPGKEREFVAAITDGGTTNYADSVKGRFTISRDNAKNTVYLQMNSLKPEDTAVYYCAAFWYINSSGYLSHEYWGQGTQVTVSS

SEQ ID NO: 2564 - protein, 110 aa, Artificial Sequence
  Chemically Synthesized
QVQLQESGGGLVQAGGSLRLSCAASGNIFRTVVMGWYRQAPGKEREFVASITSGTSTYYADSVKGRFTISRDNAKNTVYLQMNSLKPEDTAVYYCAAYYWGQGTQVTVSS

SEQ ID NO: 2565 - protein, 116 aa, Artificial Sequence
  Chemically Synthesized
QVQLQESGGGLVQAGGSLRLSCAASGSISPLQEMGWYRQAPGKERELPLLVVVLIPYADSVKGRFTISRDNAKNTVYLQMNSLKPEDTAVYYCAAYYDDVYIHTYWGQGTQVTVSS

SEQ ID NO: 2566 - protein, 118 aa, Artificial Sequence
  Chemically Synthesized
QVQLQESGGGLVQAGGSLRLSCAASGTISGIVGMGWYRQAPGKEREFVAGIDSGTTTYYADSVKGRFTISRDNAKNTVYLQMNSLKPEDTAVYYCAVPRYAAYAYWYWGQGTQVTVSS

SEQ ID NO: 2567 - protein, 122 aa, Artificial Sequence
  Chemically Synthesized
QVQLQESGGGLVQAGGSLRLSCAASGTIFGNPGMGWYRQAPGKEREFVAGISDGTTTYYADSVKGRFTISRDNAKNTVYLQMNSLKPEDTAVYYCAVIVGGRTSTHYRLLYWGQGTQVTVSS

SEQ ID NO: 2568 - protein, 118 aa, Artificial Sequence
  Chemically Synthesized
QVQLQESGGGLVQAGGSLRLSCAASGTISGEKVMGWYRQAPGKEREFVAAIAQGGNTYYADSVKGRFTISRDNAKNTVYLQMNSLKPEDTAVYYCAVSSWYRERHFYWGQGTQVTVSS

SEQ ID NO: 2569 - protein, 118 aa, Artificial Sequence
  Chemically Synthesized
QVQLQESGGGLVQAGGSLRLSCAASGNIFPRWTMGWYRQAPGKEREFVAAITKGGTTYYADSVKGRFTISRDNAKNTVYLQMNSLKPEDTAVYYCAAALYRIGSLAYWGQGTQVTVSS

SEQ ID NO: 2570 - protein, 118 aa, Artificial Sequence
  Chemically Synthesized
QVQLQESGGGLVQAGGSLRLSCAASGNIFYASTMGWYRQAPGKEREFVASITYGASTNYADSVKGRFTISRDNAKNTVYLQMNSLKPEDTAVYYCAAHYDYFADFDYWGQGTQVTVSS

SEQ ID NO: 2571 - protein, 118 aa, Artificial Sequence
  Chemically Synthesized
QVQLQESGGGLVQAGGSLRLSCAASGTISDPYAMGWYRQAPGKEREFVAGISSGSTTYYADSVKGRFTISRDNAKNTVYLQMNSLKPEDTAVYYCAVPKDYYLRLNYWGQGTQVTVSS

SEQ ID NO: 2572 - protein, 122 aa, Artificial Sequence
  Chemically Synthesized
QVQLQESGGGLVQAGGSLRLSCAASGYISTGYPMGWYRQAPGKERELVAGITTGGSTYYADSVKGRFTISRDNAKNTVYLQMNSLKPEDTAVYYCAAIDLQDYRYGYAYQYWGQGTQVTVSS

SEQ ID NO: 2573 - protein, 118 aa, Artificial Sequence
  Chemically Synthesized
QVQLQESGGGLVQAGGSLRLSCAASGYIFGDRAMGWYRQAPGKEREFVAGISTGGTTYYADSVKGRFTISRDNAKNTVYLQMNSLKPEDTAVYYCAALSRYQYRYVYWGQGTQVTVSS

SEQ ID NO: 2574 - protein, 122 aa, Artificial Sequence
  Chemically Synthesized
QVQLQESGGGLVQAGGSLRLSCAASGSISLDYYMGWYRQAPGKEREFVASITTGSTTNYADSVKGRFTISRDNAKNTVYLQMNSLKPEDTAVYYCAAIPWHAYTDRAHYVYWGQGTQVTVSS

SEQ ID NO: 2575 - protein, 122 aa, Artificial Sequence
  Chemically Synthesized
QVQLQESGGGLVQAGGSLRLSCAASGYIFQTRIMGWYRQAPGKEREFVAGISRGSSTYYADSVKGRFTISRDNAKNTVYLQMNSLKPEDTAVYYCAAPRAYDSSRRRYHLYWGQGTQVTVSS

SEQ ID NO: 2576 - protein, 126 aa, Artificial Sequence
  Chemically Synthesized
QVQLQESGGGLVQAGGSLRLSCAASGNISYRLVMGWYRQAPGKEREFVAGIGYGSNTYYADSVKGRFTISRDNAKNTVYLQMNSLKPEDTAVYYCAAPDQQYYSSHGYLAKRHFYWGQGTQVTVSS

SEQ ID NO: 2577 - protein, 107 aa, Artificial Sequence
  Chemically Synthesized
QVQLQESGGGLVQAGGSLRLSCAASGTIFTLPYMGWYRQAPGKERELVVLVPYADSVKGRFTISRDNAKNTVYLQMNSLKPEDTAVYYCAARVYAYWGQGTQVTVSS

SEQ ID NO: 2578 - protein, 123 aa, Artificial Sequence
  Chemically Synthesized
QVQLQESGGGLVQAGGSLRLSCAASGNIFSDSAMGWYRQAPGKEREFVAGIAPGGTTYYADSVKGRFTISRDNAKNTVYLQMNSLKPEDTAVYYCAVPYAYLQHDDGVRLLYWGQGTQVTVSS

SEQ ID NO: 2579 - protein, 122 aa, Artificial Sequence
  Chemically Synthesized
QVQLQESGGGLVQAGGSLRLSCAASGSISYRIGMGWYRQAPGKEREFVAGISQGSSTYYADSVKGRFTISRDNAKNTVYLQMNSLKPEDTAVYYCAAIAGYSDQNQHVLRYWGQGTQVTVSS

SEQ ID NO: 2580 - protein, 118 aa, Artificial Sequence
  Chemically Synthesized
QVQLQESGGGLVQAGGSLRLSCAASGNIFARRVMGWYRQAPGKEREFVAAIAYGGSTNYADSVKGRFTISRDNAKNTVYLQMNSLKPEDTAVYYCAVVWLYKSYHIYWGQGTQVTVSS

SEQ ID NO: 2581 - protein, 118 aa, Artificial Sequence
  Chemically Synthesized
QVQLQESGGGLVQAGGSLRLSCAASGNISETGAMGWYRQAPGKEREFVAGIGGGTNTYYADSVKGRFTISRDNAKNTVYLQMNSLKPEDTAVYYCAVPYGYTRRHVYWGQGTQVTVSS

SEQ ID NO: 2582 - protein, 126 aa, Artificial Sequence
  Chemically Synthesized
QVQLQESGGGLVQAGGSLRLSCAASGNIFGSIVMGWYRQAPGKEREFVAGISGGTTTYYADSVKGRFTISRDNAKNTVYLQMNSLKPEDTAVYYCAALRPYLADVETNLWGSYRYWGQGTQVTVSS

SEQ ID NO: 2583 - protein, 122 aa, Artificial Sequence
  Chemically Synthesized
QVQLQESGGGLVQAGGSLRLSCAASGSIFFGSSMGWYRQAPGKEREFVAGIDRGATTYYADSVKGRFTISRDNAKNTVYLQMNSLKPEDTAVYYCAVPHGYGRTYYDRYYYWGQGTQVTVSS

SEQ ID NO: 2584 - protein, 118 aa, Artificial Sequence
  Chemically Synthesized
QVQLQESGGGLVQAGGSLRLSCAASGSISPYLTMGWYRQAPGKEREFVAAITRGTNTYYADSVKGRFTISRDNAKNTVYLQMNSLKPEDTAVYYCAATNWHPYRLSYWGQGTQVTVSS

SEQ ID NO: 2585 - protein, 126 aa, Artificial Sequence
  Chemically Synthesized
QVQLQESGGGLVQAGGSLRLSCAASGNISPQSLMGWYRQAPGKEREFVAGISPGTTTYYADSVKGRFTISRDNAKNTVYLQMNSLKPEDTAVYYCAAPVKASKQEASDAIRDHLYWGQGTQVTVSS

SEQ ID NO: 2586 - protein, 122 aa, Artificial Sequence
  Chemically Synthesized
QVQLQESGGGLVQAGGSLRLSCAASGYIFAAGVMGWYRQAPGKERELVAGIAGGANTYYADSVKGRFTISRDNAKNTVYLQMNSLKPEDTAVYYCAADSYRYAYRGYTFLYWGQGTQVTVSS

SEQ ID NO: 2587 - protein, 126 aa, Artificial Sequence
  Chemically Synthesized
QVQLQESGGGLVQAGGSLRLSCAASGTIFYRVGMGWYRQAPGKEREFVAGIASGSSTYYADSVKGRFTISRDNAKNTVYLQMNSLKPEDTAVYYCAVVTDKQPTYIPGYRIYYLYWGQGTQVTVSS

SEQ ID NO: 2588 - protein, 115 aa, Artificial Sequence
  Chemically Synthesized
QVQLQESGGGLVQAGGSLRLSCAASGTIFWRAGMGWYRQAPGKEREFVAGISFGSTTYYADSVKGRFTISRDNAKNTVYLQMNSLKPEDTAVYYCAAIVGAHRYWGQGTQVTVSS

SEQ ID NO: 2589 - protein, 122 aa, Artificial Sequence
  Chemically Synthesized
QVQLQESGGGLVQAGGSLRLSCAASGYIFDHVDMGWYRQAPGKERELVATINDGGNTYYADSVKGRFTISRDNAKNTVYLQMNSLKPEDTAVYYCAVQYDYKRNDFNPYQYWGQGTQVTVSS

SEQ ID NO: 2590 - protein, 118 aa, Artificial Sequence
  Chemically Synthesized
QVQLQESGGGLVQAGGSLRLSCAASGNIFSGRVMGWYRQAPGKEREFVAAISRGGITNYADSVKGRFTISRDNAKNTVYLQMNSLKPEDTAVYYCAVVQYTYSYYLYWGQGTQVTVSS

SEQ ID NO: 2591 - protein, 115 aa, Artificial Sequence
  Chemically Synthesized
QVQLQESGGGLVQAGGSLRLSCAASGNIFAQRPMGWYRQAPGKEREFVAGISGGTTTYYADSVKGRFTISRDNAKNTVYLQMNSLKPEDTAVYYCAALSGGHFYWGQGTQVTVSS

SEQ ID NO: 2592 - protein, 118 aa, Artificial Sequence
  Chemically Synthesized
QVQLQESGGGLVQAGGSLRLSCAASGTISRLYTMGWYRQAPGKEREFVAAISTGGTTYYADSVKGRFTISRDNAKNTVYLQMNSLKPEDTAVYYCAAARFAVRGHGYWGQGTQVTVSS

SEQ ID NO: 2593 - protein, 126 aa, Artificial Sequence
  Chemically Synthesized
QVQLQESGGGLVQAGGSLRLSCAASGSISYKWYMGWYRQAPGKEREFVAAITDGGSTNYADSVKGRFTISRDNAKNTVYLQMNSLKPEDTAVYYCAVLYYDTREHGVNTENFHYYWGQGTQVTVSS

SEQ ID NO: 2594 - protein, 122 aa, Artificial Sequence
  Chemically Synthesized
QVQLQESGGGLVQAGGSLRLSCAASGNIFYEPFMGWYRQAPGKERELVASIADGSSTNYADSVKGRFTISRDNAKNTVYLQMNSLKPEDTAVYYCAANTYTGRGNYPFFDYWGQGTQVTVSS

SEQ ID NO: 2595 - protein, 119 aa, Artificial Sequence
  Chemically Synthesized
QVQLQESGGGLVQAGGSLRLSCAASGYIFPPGGMGWYRQAPGKERELVAGINIGATTNYADSVKGRFTISRDNAKNTVYLQMNSLKPEDTAVYYCALVTYTDAYYHYYWGQGTQVTVSS

SEQ ID NO: 2596 - protein, 118 aa, Artificial Sequence
  Chemically Synthesized
QVQLQESGGGLVQAGGSLRLSCAASGTISLKYNMGWYRQAPGKEREFVAAISYGGNTNYADSVKGRFTISRDNAKNTVYLQMNSLKPEDTAVYYCAAWHDERDFHWYWGQGTQVTVSS

SEQ ID NO: 2597 - protein, 126 aa, Artificial Sequence
  Chemically Synthesized
QVQLQESGGGLVQAGGSLRLSCAASGSISPRYPMGWYRQAPGKERELVASIDHGTITYYADSVKGRFTISRDNAKNTVYLQMNSLKPEDTAVYYCAAGTLNLFRYYQSYPRVHWYWGQGTQVTVSS

SEQ ID NO: 2598 - protein, 118 aa, Artificial Sequence
  Chemically Synthesized
QVQLQESGGGLVQAGGSLRLSCAASGSIFQTTRMGWYRQAPGKEREFVAGIDDGATTYYADSVKGRFTISRDNAKNTVYLQMNSLKPEDTAVYYCAVLQYHDSWHPYWGQGTQVTVSS

SEQ ID NO: 2599 - protein, 118 aa, Artificial Sequence
  Chemically Synthesized
QVQLQESGGGLVQAGGSLRLSCAASGNISTRSFMGWYRQAPGKEREFVAAIDEGGTTNYADSVKGRFTISRDNAKNTVYLQMNSLKPEDTAVYYCAAIFYYTQFHYYWGQGTQVTVSS

SEQ ID NO: 2600 - protein, 118 aa, Artificial Sequence
  Chemically Synthesized
QVQLQESGGGLVQAGGSLRLSCAASGSIFLRWYMGWYRQAPGKEREFVAAITNGTSTNYADSVKGRFTISRDNAKNTVYLQMNSLKPEDTAVYYCAVLAYDYLFHYYWGQGTQVTVSS

SEQ ID NO: 2601 - protein, 113 aa, Artificial Sequence
  Chemically Synthesized
QVQLQESGGGLVQAGGSLRLSCAASGTISSLATMGWYRQAPGKERELVAAIDYGYYQYADSVKGRFTISRDNAKNTVYLQMNSLKPEDTAVYYCAFLLVNLYWGQGTQVTVSS

SEQ ID NO: 2602 - protein, 118 aa, Artificial Sequence
  Chemically Synthesized
QVQLQESGGGLVQAGGSLRLSCAASGSIFGARDMGWYRQAPGKERELVATIDTGGTTNYADSVKGRFTISRDNAKNTVYLQMNSLKPEDTAVYYCAVIDYYGGVHVYWGQGTQVTVSS

SEQ ID NO: 2603 - protein, 118 aa, Artificial Sequence
  Chemically Synthesized
QVQLQESGGGLVQAGGSLRLSCAASGTIFYDTYMGWYRQAPGKEREFVATIGAGSTTYYADSVKGRFTISRDNAKNTVYLQMNSLKPEDTAVYYCAAIEQGRGAYYYWGQGTQVTVSS

SEQ ID NO: 2604 - protein, 123 aa, Artificial Sequence
  Chemically Synthesized
QVQLQESGGGLVQAGGSLRLSCAASGSIFDVQGMGWYRQAPGKERELVATIDSGGTTYYADSVKGRFTISRDNAKNTVYLQMNSLKPEDTAVYYCAADTDPVRDGVYNGHGYWGQGTQVTVSS

SEQ ID NO: 2605 - protein, 126 aa, Artificial Sequence
  Chemically Synthesized
QVQLQESGGGLVQAGGSLRLSCAASGSIFTRYFMGWYRQAPGKEREFVAAITDGSTTNYADSVKGRFTISRDNAKNTVYLQMNSLKPEDTAVYYCAVITIDSVATGTGQYIFYYYWGQGTQVTVSS

SEQ ID NO: 2606 - protein, 122 aa, Artificial Sequence
  Chemically Synthesized
QVQLQESGGGLVQAGGSLRLSCAASGTISAPYNMGWYRQAPGKEREFVATITYGANTNYADSVKGRFTISRDNAKNTVYLQMNSLKPEDTAVYYCAVVKYTATTARYVHHYWGQGTQVTVSS

SEQ ID NO: 2607 - protein, 118 aa, Artificial Sequence
  Chemically Synthesized
QVQLQESGGGLVQAGGSLRLSCAASGTIFDSQYMGWYRQAPGKEREFVAGIGVGTSTNYADSVKGRFTISRDNAKNTVYLQMNSLKPEDTAVYYCAVATYVAVWYYYWGQGTQVTVSS

SEQ ID NO: 2608 - protein, 125 aa, Artificial Sequence
  Chemically Synthesized
QVQLQESGGGLVQAGGSLRLSCAASGNIFISDDMGWYRQAPGKERELVATISAGTITNYADSVKGRFTISRDNAKNTVYLQMNSLKPEDTAVYYCAALVTDAQYDYYYNHFHFYWGQGTQVTVSS

SEQ ID NO: 2609 - protein, 118 aa, Artificial Sequence
  Chemically Synthesized
QVQLQESGGGLVQAGGSLRLSCAASGTIFDYFVMGWYRQAPGKEREFVASINGGAITNYADSVKGRFTISRDNAKNTVYLQMNSLKPEDTAVYYCAVFDGTAYVYDYWGQGTQVTVSS

SEQ ID NO: 2610 - protein, 118 aa, Artificial Sequence
  Chemically Synthesized
QVQLQESGGGLVQAGGSLRLSCAASGTIFRVDPMGWYRQAPGKEREFVAGITGGGSTNYADSVKGRFTISRDNAKNTVYLQMNSLKPEDTAVYYCAAYVNNYLWFLYWGQGTQVTVSS

SEQ ID NO: 2611 - protein, 110 aa, Artificial Sequence
  Chemically Synthesized
QVQLQESGGGLVQAGGSLRLSCAASGTIFRASTMGWYRQAPGKEREFVAGYADSVKGRFTISRDNAKNTVYLQMNSLKPEDTAVYYCAAEYWGGQAHPYWGQGTQVTVSS

SEQ ID NO: 2612 - protein, 118 aa, Artificial Sequence
  Chemically Synthesized
QVQLQESGGGLVQAGGSLRLSCAASGSISTLWRMGWYRQAPGKEREFVAGISTGGTTYYADSVKGRFTISRDNAKNTVYLQMNSLKPEDTAVYYCAAFYYDHISHGYWGQGTQVTVSS

SEQ ID NO: 2613 - protein, 118 aa, Artificial Sequence
  Chemically Synthesized
QVQLQESGGGLVQAGGSLRLSCAASGSIFATPRMGWYRQAPGKEREFVAGIGDGASTYYADSVKGRFTISRDNAKNTVYLQMNSLKPEDTAVYYCAVLFYDLGYHPYWGQGTQVTVSS

SEQ ID NO: 2614 - protein, 118 aa, Artificial Sequence
  Chemically Synthesized
QVQLQESGGGLVQAGGSLRLSCAASGYIFYAYYMGWYRQAPGKEREFVAAITEGAITNYADSVKGRFTISRDNAKNTVYLQMNSLKPEDTAVYYCAAYVELFPGHDYWGQGTQVTVSS

SEQ ID NO: 2615 - protein, 118 aa, Artificial Sequence
  Chemically Synthesized
QVQLQESGGGLVQAGGSLRLSCAASGNISDSGSMGWYRQAPGKEREFVAAIGYGANTNYADSVKGRFTISRDNAKNTVYLQMNSLKPEDTAVYYCAAIIRYNRYLAYWGQGTQVTVSS

SEQ ID NO: 2616 - protein, 118 aa, Artificial Sequence
  Chemically Synthesized
QVQLQESGGGLVQAGGSLRLSCAASGYISAISYMGWYRQAPGKEREFVATIDRGASTNYADSVKGRFTISRDNAKNTVYLQMNSLKPEDTAVYYCAAITYSATSYYYWGQGTQVTVSS

SEQ ID NO: 2617 - protein, 118 aa, Artificial Sequence
  Chemically Synthesized
QVQLQESGGGLVQAGGSLRLSCAASGSISRKDKMGWYRQAPGKERELVAAITVGGTTYYADSVKGRFTISRDNAKNTVYLQMNSLKPEDTAVYYCAAVGRWGGWHYYWGQGTQVTVSS

SEQ ID NO: 2618 - protein, 118 aa, Artificial Sequence
  Chemically Synthesized
QVQLQESGGGLVQAGGSLRLSCAASGNISGLYVMGWYRQAPGKEREFVASINDGSTTYYADSVKGRFTISRDNAKNTVYLQMNSLKPEDTAVYYCAVVTYLSGWYYYWGQGTQVTVSS

SEQ ID NO: 2619 - protein, 118 aa, Artificial Sequence
  Chemically Synthesized
QVQLQESGGGLVQAGGSLRLSCAASGTISWRRNMGWYRQAPGKEREFVAGIARGTTTNYADSVKGRFTISRDNAKNTVYLQMNSLKPEDTAVYYCAAYSRYPWYYPYWGQGTQVTVSS

SEQ ID NO: 2620 - protein, 118 aa, Artificial Sequence
  Chemically Synthesized
QVQLQESGGGLVQAGGSLRLSCAASGTISGSYVMGWYRQAPGKERELVASISTGGTTYYADSVKGRFTISRDNAKNTVYLQMNSLKPEDTAVYYCAVDLERTFPHQYWGQGTQVTVSS

SEQ ID NO: 2621 - protein, 126 aa, Artificial Sequence
  Chemically Synthesized
QVQLQESGGGLVQAGGSLRLSCAASGNISDYYAMGWYRQAPGKEREFVATISVGSNTNYADSVKGRFTISRDNAKNTVYLQMNSLKPEDTAVYYCAALQWYRGDRVNPDTQWHAYWGQGTQVTVSS

SEQ ID NO: 2622 - protein, 118 aa, Artificial Sequence
  Chemically Synthesized
QVQLQESGGGLVQAGGSLRLSCAASGSIFPGYAMGWYRQAPGKERELVAAIGYGGNTNYADSVKGRFTISRDNAKNTVYLQMNSLKPEDTAVYYCAVTIGYANPYLYWGQGTQVTVSS

SEQ ID NO: 2623 - protein, 118 aa, Artificial Sequence
  Chemically Synthesized
QVQLQESGGGLVQAGGSLRLSCAASGTISYPRYMGWYRQAPGKEREFVASITYGTITNYADSVKGRFTISRDNAKNTVYLQMNSLKPEDTAVYYCAAIWYIVNYHGYWGQGTQVTVSS

SEQ ID NO: 2624 - protein, 119 aa, Artificial Sequence
  Chemically Synthesized
QVQLQESGGGLVQAGGSLRLSCAASGNIFPERTMGWYRQAPGKEREFVAAINNGGITYYADSVKGRFTISRDNAKNTVYLQMNSLKPEDTAVYYCAVVGRYYGRYHHYWGQGTQVTVSS

SEQ ID NO: 2625 - protein, 117 aa, Artificial Sequence
  Chemically Synthesized
QVQLQESGGGLVQAGGSLRLSCAASGTISYASMGWYRQAPGKEREFVATISQGGTTNYADSVKGRFTISRDNAKNTVYLQMNSLKPEDTAVYYCAVYYQSWVDLVYWGQGTQVTVSS

SEQ ID NO: 2626 - protein, 118 aa, Artificial Sequence
  Chemically Synthesized
QVQLQESGGGLVQAGGSLRLSCAASGNISLFVAMGWYRQAPGKEREFVAAINQGANTNYADSVKGRFTISRDNAKNTVYLQMNSLKPEDTAVYYCAALSIDSVYHNYWGQGTQVTVSS

SEQ ID NO: 2627 - protein, 124 aa, Artificial Sequence
  Chemically Synthesized
QVQLQESGGGLVQAGGSLRLSCAASGNISADDDMGWYRQAPGKERELVAAIGSGTNTYYADSVKGRFTISRDNAKNTVYLQMNSLKPEDTAVYYCAAHVRSWVGQYGDTDFYYWGQGTQVTVSS

SEQ ID NO: 2628 - protein, 118 aa, Artificial Sequence
  Chemically Synthesized
QVQLQESGGGLVQAGGSLRLSCAASGTIFPDFLMGWYRQAPGKEREFVAGIDSGAITNYADSVKGRFTISRDNAKNTVYLQMNSLKPEDTAVYYCAVREYYSRRHPYWGQGTQVTVSS

SEQ ID NO: 2629 - protein, 117 aa, Artificial Sequence
  Chemically Synthesized
QVQLQESGGGLVQAGGSLRLSCAASGSILVLTMGWYRQAPGKERELVAGISYGGNTYYADSVKGRFTISRDNAKNTVYLQMNSLKPEDTAVYYCAAGEDVYLDHEYWGQGTQVTVSS

SEQ ID NO: 2630 - protein, 118 aa, Artificial Sequence
  Chemically Synthesized
QVQLQESGGGLVQAGGSLRLSCAASGYISRIQSMGWYRQAPGKEREFVAGIGVGGNTNYADSVKGRFTISRDNAKNTVYLQMNSLKPEDTAVYYCAAYNRYIRFYGYWGQGTQVTVSS

SEQ ID NO: 2631 - protein, 118 aa, Artificial Sequence
  Chemically Synthesized
QVQLQESGGGLVQAGGSLRLSCAASGNISDKYYMGWYRQAPGKEREFVAGISTGSTTYYADSVKGRFTISRDNAKNTVYLQMNSLKPEDTAVYYCAVYYYVRPAHVYWGQGTQVTVSS

SEQ ID NO: 2632 - protein, 122 aa, Artificial Sequence
  Chemically Synthesized
QVQLQESGGGLVQAGGSLRLSCAASGSISRRYYMGWYRQAPGKEREFVATIAIGANTNYADSVKGRFTISRDNAKNTVYLQMNSLKPEDTAVYYCAAVGQGNDGGTAYHYYWGQGTQVTVSS

SEQ ID NO: 2633 - protein, 118 aa, Artificial Sequence
  Chemically Synthesized
QVQLQESGGGLVQAGGSLRLSCAASGSIFRYDYMGWYRQAPGKEREFVAGIAYGGTTNYADSVKGRFTISRDNAKNTVYLQMNSLKPEDTAVYYCAVYYNLIRRHGYWGQGTQVTVSS

SEQ ID NO: 2634 - protein, 117 aa, Artificial Sequence
  Chemically Synthesized
QVQLQESGGGLVQAGGSLRLSCAASGNILVSTMGWYRQAPGKEREFVAGINIGTITNYADSVKGRFTISRDNAKNTVYLQMNSLKPEDTAVYYCAAYAWQAVDYQYWGQGTQVTVSS

SEQ ID NO: 2635 - protein, 118 aa, Artificial Sequence
  Chemically Synthesized
QVQLQESGGGLVQAGGSLRLSCAASGSIFGPLIMGWYRQAPGKEREFVAGISNGSSTNYADSVKGRFTISRDNAKNTVYLQMNSLKPEDTAVYYCAALDGYHSRHGYWGQGTQVTVSS

SEQ ID NO: 2636 - protein, 118 aa, Artificial Sequence
  Chemically Synthesized
QVQLQESGGGLVQAGGSLRLSCAASGTIFAKYDMGWYRQAPGKERELVAAITDGGSTYYADSVKGRFTISRDNAKNTVYLQMNSLKPEDTAVYYCAVYNRGTSYHAYWGQGTQVTVSS

SEQ ID NO: 2637 - protein, 122 aa, Artificial Sequence
  Chemically Synthesized
QVQLQESGGGLVQAGGSLRLSCAASGNIFDYFIMGWYRQAPGKEREFVAAIGVGGTTYYADSVKGRFTISRDNAKNTVYLQMNSLKPEDTAVYYCAALAVPGGDPAPRHYYWGQGTQVTVSS

SEQ ID NO: 2638 - protein, 118 aa, Artificial Sequence
  Chemically Synthesized
QVQLQESGGGLVQAGGSLRLSCAASGSISYPNVMGWYRQAPGKEREFVAGINVGSTTNYADSVKGRFTISRDNAKNTVYLQMNSLKPEDTAVYYCAAVRRLVSWLYYWGQGTQVTVSS

SEQ ID NO: 2639 - protein, 119 aa, Artificial Sequence
  Chemically Synthesized
QVQLQESGGGLVQAGGSLRLSCAASGNISDVRHNMGWYRQAPGKEREFVAGIARGSSTNYADSVKGRFTISRDNAKNTVYLQMNSLKPEDTAVYYCAVVVPARPYHYYWGQGTQVTVSS

SEQ ID NO: 2640 - protein, 118 aa, Artificial Sequence
  Chemically Synthesized
QVQLQESGGGLVQAGGSLRLSCAASGTIFNDSVMGWYRQAPGKEREFVAGISAGTNTNYADSVKGRFTISRDNAKNTVYLQMNSLKPEDTAVYYCAAVTHTFPRYGYWGQGTQVTVSS

SEQ ID NO: 2641 - protein, 118 aa, Artificial Sequence
  Chemically Synthesized
QVQLQESGGGLVQAGGSLRLSCAASGTISQPYGMGWYRQAPGKEREFVAAINTGATTNYADSVKGRFTISRDNAKNTVYLQMNSLKPEDTAVYYCAVLTRDVHFHTYWGQGTQVTVSS

SEQ ID NO: 2642 - protein, 117 aa, Artificial Sequence
  Chemically Synthesized
QVQLQESGGGLVQAGGSLRLSCAASGTIFQWYNMGWYRQAPGKERELVAVLVTVVIPYADSVKGRFTISRDNAKNTVYLQMNSLKPEDTAVYYCAVVKYDREGLDYWGQGTQVTVSS

SEQ ID NO: 2643 - protein, 118 aa, Artificial Sequence
  Chemically Synthesized
QVQLQESGGGLVQAGGSLRLSCAASGNISIYTRMGWYRQAPGKERELVAAIGRGGNTYYADSVKGRFTISRDNAKNTVYLQMNSLKPEDTAVYYCAVTAEGRPGHSYWGQGTQVTVSS

SEQ ID NO: 2644 - protein, 126 aa, Artificial Sequence
  Chemically Synthesized
QVQLQESGGGLVQAGGSLRLSCAASGTIFGDYTMGWYRQAPGKEREFVAGITDGGSTYYADSVKGRFTISRDNAKNTVYLQMNSLKPEDTAVYYCAVDYVGDAQYDDTQERALYYWGQGTQVTVSS

SEQ ID NO: 2645 - protein, 118 aa, Artificial Sequence
  Chemically Synthesized
QVQLQESGGGLVQAGGSLRLSCAASGTISQAWSMGWYRQAPGKERELVASIGDGGITNYADSVKGRFTISRDNAKNTVYLQMNSLKPEDTAVYYCAVRNRDNLYYVYWGQGTQVTVSS

SEQ ID NO: 2646 - protein, 126 aa, Artificial Sequence
  Chemically Synthesized
QVQLQESGGGLVQAGGSLRLSCAASGNIFSVLGMGWYRQAPGKEREFVASIDIGGSTYYADSVKGRFTISRDNAKNTVYLQMNSLKPEDTAVYYCAAHRVDDVDYDYLTAWPHDYWGQGTQVTVSS

SEQ ID NO: 2647 - protein, 118 aa, Artificial Sequence
  Chemically Synthesized
QVQLQESGGGLVQAGGSLRLSCAASGSISTHAAMGWYRQAPGKEREFVASIGQGGTTNYADSVKGRFTISRDNAKNTVYLQMNSLKPEDTAVYYCAAYQAGYIVLGYWGQGTQVTVSS

SEQ ID NO: 2648 - protein, 119 aa, Artificial Sequence
  Chemically Synthesized
QVQLQESGGGLVQAGGSLRLSCAASGTISQIRSMGWYRQAPGKEREFVATIDAGGTTNYADSVKGRFTISRDNAKNTVYLQMNSLKPEDTAVYYCAVLDYYYPDYYYYWGQGTQVTVSS

SEQ ID NO: 2649 - protein, 117 aa, Artificial Sequence
  Chemically Synthesized
QVQLQESGGGLVQAGGSLRLSCAASGNIFYEDPMGWYRQAPGKERELVASIGYGTSTYYADSVKGRFTISRDNAKNTVYLQMNSLKPEDTAVYYCAVDSPYRYFAYWGQGTQVTVSS

SEQ ID NO: 2650 - protein, 118 aa, Artificial Sequence
  Chemically Synthesized
QVQLQESGGGLVQAGGSLRLSCAASGNISQYRTMGWYRQAPGKEREFVASISFGSNTYYADSVKGRFTISRDNAKNTVYLQMNSLKPEDTAVYYCAAGSRARSLLSYWGQGTQVTVSS

SEQ ID NO: 2651 - protein, 118 aa, Artificial Sequence
  Chemically Synthesized
QVQLQESGGGLVQAGGSLRLSCAASGNISGGLYMGWYRQAPGKEREFVAAIAYGATTNYADSVKGRFTISRDNAKNTVYLQMNSLKPEDTAVYYCAVVPNYDHRLYYWGQGTQVTVSS

SEQ ID NO: 2652 - protein, 126 aa, Artificial Sequence
  Chemically Synthesized
QVQLQESGGGLVQAGGSLRLSCAASGSIFGYLYMGWYRQAPGKEREFVATIARGATTNYADSVKGRFTISRDNAKNTVYLQMNSLKPEDTAVYYCAADYATPSLLGSYRVRLLYYWGQGTQVTVSS

SEQ ID NO: 2653 - protein, 118 aa, Artificial Sequence
  Chemically Synthesized
QVQLQESGGGLVQAGGSLRLSCAASGTIFAFRYMGWYRQAPGKERELVASINAGGSTYYADSVKGRFTISRDNAKNTVYLQMNSLKPEDTAVYYCAAYYYISYIFGYWGQGTQVTVSS

SEQ ID NO: 2654 - protein, 118 aa, Artificial Sequence
  Chemically Synthesized
QVQLQESGGGLVQAGGSLRLSCAASGTISYEFNMGWYRQAPGKEREFVATIDHGAITYYADSVKGRFTISRDNAKNTVYLQMNSLKPEDTAVYYCAVVLRRRPYHYYWGQGTQVTVSS

SEQ ID NO: 2655 - protein, 126 aa, Artificial Sequence
  Chemically Synthesized
QVQLQESGGGLVQAGGSLRLSCAASGYISPPDFMGWYRQAPGKERELVAGIGYGSTTYYADSVKGRFTISRDNAKNTVYLQMNSLKPEDTAVYYCAADAGYGVYGNIWYGHLLHYWGQGTQVTVSS

SEQ ID NO: 2656 - protein, 122 aa, Artificial Sequence
  Chemically Synthesized
QVQLQESGGGLVQAGGSLRLSCAASGNISKSFVMGWYRQAPGKEREFVAGIGGGANTNYADSVKGRFTISRDNAKNTVYLQMNSLKPEDTAVYYCAVVLQYNGRNSAFHYYWGQGTQVTVSS

SEQ ID NO: 2657 - protein, 118 aa, Artificial Sequence
  Chemically Synthesized
QVQLQESGGGLVQAGGSLRLSCAASGNISYTYIMGWYRQAPGKEREFVAGITPGANTNYADSVKGRFTISRDNAKNTVYLQMNSLKPEDTAVYYCAALRYGVVYHYYWGQGTQVTVSS

SEQ ID NO: 2658 - protein, 118 aa, Artificial Sequence
  Chemically Synthesized
QVQLQESGGGLVQAGGSLRLSCAASGYISQYYTMGWYRQAPGKEREFVAAINYGTSTNYADSVKGRFTISRDNAKNTVYLQMNSLKPEDTAVYYCAVWTLAWTAFYYWGQGTQVTVSS

SEQ ID NO: 2659 - protein, 118 aa, Artificial Sequence
  Chemically Synthesized
QVQLQESGGGLVQAGGSLRLSCAASGTIFSSRYMGWYRQAPGKEREFVAAINSGGITNYADSVKGRFTISRDNAKNTVYLQMNSLKPEDTAVYYCAAVTYALGWHYYWGQGTQVTVSS

SEQ ID NO: 2660 - protein, 118 aa, Artificial Sequence
  Chemically Synthesized
QVQLQESGGGLVQAGGSLRLSCAASGNISPSWYMGWYRQAPGKEREFVAAIASGTSTNYADSVKGRFTISRDNAKNTVYLQMNSLKPEDTAVYYCAAVYYESRYLGYWGQGTQVTVSS

SEQ ID NO: 2661 - protein, 118 aa, Artificial Sequence
  Chemically Synthesized
QVQLQESGGGLVQAGGSLRLSCAASGNISVPYKMGWYRQAPGKERELVASIAYGANTYYADSVKGRFTISRDNAKNTVYLQMNSLKPEDTAVYYCAAVSTTSPYHYYWGQGTQVTVSS

SEQ ID NO: 2662 - protein, 126 aa, Artificial Sequence
  Chemically Synthesized
QVQLQESGGGLVQAGGSLRLSCAASGTIFSHYYMGWYRQAPGKEREFVAGISYGGNTYYADSVKGRFTISRDNAKNTVYLQMNSLKPEDTAVYYCAADGINGRGQYYDDWWDLEYWGQGTQVTVSS

SEQ ID NO: 2663 - protein, 118 aa, Artificial Sequence
  Chemically Synthesized
QVQLQESGGGLVQAGGSLRLSCAASGTISSPYSMGWYRQAPGKEREFVATISAGTSTNYADSVKGRFTISRDNAKNTVYLQMNSLKPEDTAVYYCAVVLRYRYYHGYWGQGTQVTVSS

SEQ ID NO: 2664 - protein, 118 aa, Artificial Sequence
  Chemically Synthesized
QVQLQESGGGLVQAGGSLRLSCAASGNISVWHYMGWYRQAPGKERELVASIGLGGNTYYADSVKGRFTISRDNAKNTVYLQMNSLKPEDTAVYYCAVLSWIITDYPYWGQGTQVTVSS

SEQ ID NO: 2665 - protein, 123 aa, Artificial Sequence
  Chemically Synthesized
QVQLQESGGGLVQAGGSLRLSCAASGYISLLGVMGWYRQAPGKEREFVAGIAGGANTNYADSVKGRFTISRDNAKNTVYLQMNSLKPEDTAVYYCAALGDRNPSRTTYRHYYWGQGTQVTVSS

SEQ ID NO: 2666 - protein, 118 aa, Artificial Sequence
  Chemically Synthesized
QVQLQESGGGLVQAGGSLRLSCAASGSIFAVRAMGWYRQAPGKERELVASINTGGNTNYADSVKGRFTISRDNAKNTVYLQMNSLKPEDTAVYYCAVVLRRQGYYYYWGQGTQVTVSS

SEQ ID NO: 2667 - protein, 111 aa, Artificial Sequence
  Chemically Synthesized
QVQLQESGGGLVQAGGSLRLSCAASGSISITGDMGWYRQAPGKERELVAGPYADSVKGRFTISRDNAKNTVYLQMNSLKPEDTAVYYCAVRDWDYYDFGYWGQGTQVTVSS

SEQ ID NO: 2668 - protein, 110 aa, Artificial Sequence
  Chemically Synthesized
QVQLQESGGGLVQAGGSLRLSCAASGNISRYHDMGWYRQAPGKERELVANYADSVKGRFTISRDNAKNTVYLQMNSLKPEDTAVYYCAASRLTQYYHAYWGQGTQVTVSS

SEQ ID NO: 2669 - protein, 122 aa, Artificial Sequence
  Chemically Synthesized
QVQLQESGGGLVQAGGSLRLSCAASGYIFRLGHMGWYRQAPGKERELVAGIDVGGSTNYADSVKGRFTISRDNAKNTVYLQMNSLKPEDTAVYYCAALTAGAGGRGSYLYYWGQGTQVTVSS

SEQ ID NO: 2670 - protein, 121 aa, Artificial Sequence
  Chemically Synthesized
QVQLQESGGGLVQAGGSLRLSCAASGTISGRRDMGWYRQAPGKERELVATIGPGGNTNYADSVKGRFTISRDNAKNTVYLQMNSLKPEDTAVYYCAVGRYGYRYRYYLDYWGQGTQVTVSS

SEQ ID NO: 2671 - protein, 122 aa, Artificial Sequence
  Chemically Synthesized
QVQLQESGGGLVQAGGSLRLSCAASGTIFYRAVMGWYRQAPGKEREFVAGINYGTNTYYADSVKGRFTISRDNAKNTVYLQMNSLKPEDTAVYYCAVNKVEDERYLYRHYYWGQGTQVTVSS

SEQ ID NO: 2672 - protein, 122 aa, Artificial Sequence
  Chemically Synthesized
QVQLQESGGGLVQAGGSLRLSCAASGTISYRLSVMGWYRQAPGKERELVATITGGSNTNYADSVKGRFTISRDNAKNTVYLQMNSLKPEDTAVYYCAVEPGDSWTRTVTFYWGQGTQVTVSS

SEQ ID NO: 2673 - protein, 118 aa, Artificial Sequence
  Chemically Synthesized
QVQLQESGGGLVQAGGSLRLSCAASGTISSITAMGWYRQAPGKERELVAAITTYYADSVKGRFTISRDNAKNTVYLQMNSLKPEDTAVYYCAVKTWSYRVNRYVYVYWGQGTQVTVSS

SEQ ID NO: 2674 - protein, 118 aa, Artificial Sequence
  Chemically Synthesized
QVQLQESGGGLVQAGGSLRLSCAASGSIFGPSIMGWYRQAPGKEREFVASITSGAITNYADSVKGRFTISRDNAKNTVYLQMNSLKPEDTAVYYCAAITYWGRYHGYWGQGTQVTVSS

SEQ ID NO: 2675 - protein, 118 aa, Artificial Sequence
  Chemically Synthesized
QVQLQESGGGLVQAGGSLRLSCAASGSIFVTAYMGWYRQAPGKEREFVAAINYGTSTNYADSVKGRFTISRDNAKNTVYLQMNSLKPEDTAVYYCAAVPYRAPYHYYWGQGTQVTVSS

SEQ ID NO: 2676 - protein, 125 aa, Artificial Sequence
  Chemically Synthesized
QVQLQESGGGLVQAGGSLRLSCAASGNIFYWYMGWYRQAPGKERELVAGIGPGATTNYADSVKGRFTISRDNAKNTVYLQMNSLKPEDTAVYYCAALYQGGYVGYPVTAGEHLYWGQGTQVTVSS

SEQ ID NO: 2677 - protein, 118 aa, Artificial Sequence
  Chemically Synthesized
QVQLQESGGGLVQAGGSLRLSCAASGYIFESTRMGWYRQAPGKEREFVAGIAGGSSTNYADSVKGRFTISRDNAKNTVYLQMNSLKPEDTAVYYCAVVGYDLGWHYYWGQGTQVTVSS

SEQ ID NO: 2678 - protein, 122 aa, Artificial Sequence
  Chemically Synthesized
QVQLQESGGGLVQAGGSLRLSCAASGTIFRRTYMGWYRQAPGKEREFVAAIDFGATTNYADSVKGRFTISRDNAKNTVYLQMNSLKPEDTAVYYCAAVYLYRDKGQLAYYYWGQGTQVTVSS

SEQ ID NO: 2679 - protein, 122 aa, Artificial Sequence
  Chemically Synthesized
QVQLQESGGGLVQAGGSLRLSCAASGNIFVRAVMGWYRQAPGKEREFVAGIADGGTTNYADSVKGRFTISRDNAKNTVYLQMNSLKPEDTAVYYCAVYLFGDHHVYGAHYYWGQGTQVTVSS

SEQ ID NO: 2680 - protein, 126 aa, Artificial Sequence
  Chemically Synthesized
QVQLQESGGGLVQAGGSLRLSCAASGYIFGKFYMGWYRQAPGKEREFVAAIDHGGTTNYADSVKGRFTISRDNAKNTVYLQMNSLKPEDTAVYYCAVVGRGGDGNYYTSLQWHYYWGQGTQVTVSS

SEQ ID NO: 2681 - protein, 121 aa, Artificial Sequence
  Chemically Synthesized
QVQLQESGGGLVQAGGSLRLSCAASGTISENRYMGWYRQAPGKERELVASIAAGTSTNYADSVKGRFTISRDNAKNTVYLQMNSLKPEDTAVYYCAAQGIQSVKLTTLIYWGQGTQVTVSS

SEQ ID NO: 2682 - protein, 126 aa, Artificial Sequence
  Chemically Synthesized
QVQLQESGGGLVQAGGSLRLSCAASGTISTPFYMGWYRQAPGKERELVAGITVGGTTYYADSVKGRFTISRDNAKNTVYLQMNSLKPEDTAVYYCAVYNIHEPPYGTEGDAGHAYWGQGTQVTVSS

SEQ ID NO: 2683 - protein, 122 aa, Artificial Sequence
  Chemically Synthesized
QVQLQESGGGLVQAGGSLRLSCAASGNISTRTAMGWYRQAPGKERELVATIGRGGSTNYADSVKGRFTISRDNAKNTVYLQMNSLKPEDTAVYYCAVRRYSGGSYHRWHKYWGQGTQVTVSS

SEQ ID NO: 2684 - protein, 117 aa, Artificial Sequence
  Chemically Synthesized
QVQLQESGGGLVQAGGSLRLSCAASGTFSFVAMGWYRQAPGKEREFVASITSGGSTYYADSVKGRFTISRDNAKNTVYLQMNSLKPEDTAVYYCAVYRSDATDYDYWGQGTQVTVSS

SEQ ID NO: 2685 - protein, 118 aa, Artificial Sequence
  Chemically Synthesized
QVQLQESGGGLVQAGGSLRLSCAASGYISHGAYMGWYRQAPGKEREFVASITYGGNTNYADSVKGRFTISRDNAKNTVYLQMNSLKPEDTAVYYCAVAFYESTWHYYWGQGTQVTVSS

SEQ ID NO: 2686 - protein, 122 aa, Artificial Sequence
  Chemically Synthesized
QVQLQESGGGLVQAGGSLRLSCAASGTISGLNLMGWYRQAPGKERELVATITEGSITYYADSVKGRFTISRDNAKNTVYLQMNSLKPEDTAVYYCAALLTVYYDYWYALVYWGQGTQVTVSS

SEQ ID NO: 2687 - protein, 118 aa, Artificial Sequence
  Chemically Synthesized
QVQLQESGGGLVQAGGSLRLSCAASGTIFETFAMGWYRQAPGKEREFVAGITGGASTNYADSVKGRFTISRDNAKNTVYLQMNSLKPEDTAVYYCAVLYYNTDYHYYWGQGTQVTVSS

SEQ ID NO: 2688 - protein, 118 aa, Artificial Sequence
  Chemically Synthesized
QVQLQESGGGLVQAGGSLRLSCAASGNISLYRSMGWYRQAPGKEREFVAAIANGASTYYADSVKGRFTISRDNAKNTVYLQMNSLKPEDTAVYYCAAVRGTRRYHYYWGQGTQVTVSS

SEQ ID NO: 2689 - protein, 118 aa, Artificial Sequence
  Chemically Synthesized
QVQLQESGGGLVQAGGSLRLSCAASGNISASGHMGWYRQAPGKEREFVATIGYGSTTNYADSVKGRFTISRDNAKNTVYLQMNSLKPEDTAVYYCAAVFRDYRYHGYWGQGTQVTVSS

SEQ ID NO: 2690 - protein, 122 aa, Artificial Sequence
  Chemically Synthesized
QVQLQESGGGLVQAGGSLRLSCAASGTISRLDGMGWYRQAPGKEREFVASIGKGSSTNYADSVKGRFTISRDNAKNTVYLQMNSLKPEDTAVYYCAAYVRYRYDVSRYHYYWGQGTQVTVSS

SEQ ID NO: 2691 - protein, 122 aa, Artificial Sequence
  Chemically Synthesized
QVQLQESGGGLVQAGGSLRLSCAASGTIFDWVGMGWYRQAPGKEREFVATIAYGGNTNYADSVKGRFTISRDNAKNTVYLQMNSLKPEDTAVYYCAVLSRGYSSVGPYLTYWGQGTQVTVSS

SEQ ID NO: 2692 - protein, 117 aa, Artificial Sequence
  Chemically Synthesized
QVQLQESGGGLVQAGGSLRLSCAASGTIFGPGAMGWYRQAPGKEREFVAAITIGSSTYYADSVKGRFTISRDNAKNTVYLQMNSLKPEDTAVYYCAVQYTKADVHYWGQGTQVTVSS

SEQ ID NO: 2693 - protein, 122 aa, Artificial Sequence
  Chemically Synthesized
QVQLQESGGGLVQAGGSLRLSCAASGYIFGDDFMGWYRQAPGKEREFVAAIDPGTNTNYADSVKGRFTISRDNAKNTVYLQMNSLKPEDTAVYYCAAGASERADLYVNLGYWGQGTQVTVSS

SEQ ID NO: 2694 - protein, 117 aa, Artificial Sequence
  Chemically Synthesized
QVQLQESGGGLVQAGGSLRLSCAASGTISSLLMGWYRQAPGKERELVASISWGGSTNYADSVKGRFTISRDNAKNTVYLQMNSLKPEDTAVYYCAAQTQGIYSYYYWGQGTQVTVSS

SEQ ID NO: 2695 - protein, 118 aa, Artificial Sequence
  Chemically Synthesized
QVQLQESGGGLVQAGGSLRLSCAASGYISGLVRMGWYRQAPGKEREFVAAINVGSTTYYADSVKGRFTISRDNAKNTVYLQMNSLKPEDTAVYYCAVLSYYSAYHYYWGQGTQVTVSS

SEQ ID NO: 2696 - protein, 118 aa, Artificial Sequence
  Chemically Synthesized
QVQLQESGGGLVQAGGSLRLSCAASGTISTDYAMGWYRQAPGKEREFVASIGAGGSTYYADSVKGRFTISRDNAKNTVYLQMNSLKPEDTAVYYCAAANLVRQYLYYWGQGTQVTVSS

SEQ ID NO: 2697 - protein, 118 aa, Artificial Sequence
  Chemically Synthesized
QVQLQESGGGLVQAGGSLRLSCAASGYISERWYMGWYRQAPGKEREFVAGIAEGATTNYADSVKGRFTISRDNAKNTVYLQMNSLKPEDTAVYYCAAAYYRGGWHGYWGQGTQVTVSS

SEQ ID NO: 2698 - protein, 122 aa, Artificial Sequence
  Chemically Synthesized
QVQLQESGGGLVQAGGSLRLSCAASGTISYGGHMGWYRQAPGKERELVASIGIGGTTNYADSVKGRFTISRDNAKNTVYLQMNSLKPEDTAVYYCAVYDGYYEAYADVFTYWGQGTQVTVSS

SEQ ID NO: 2699 - protein, 117 aa, Artificial Sequence
  Chemically Synthesized
QVQLQESGGGLVQAGGSLRLSCAASGSISLSLPMGWYRQAPGKERELVATISFVVLPYADSVKGRFTISRDNAKNTVYLQMNSLKPEDTAVYYCAAYRVIRIYHVYWGQGTQVTVSS

SEQ ID NO: 2700 - protein, 118 aa, Artificial Sequence
  Chemically Synthesized
QVQLQESGGGLVQAGGSLRLSCAASGSISRRPLMGWYRQAPGKEREFVATITYGANTYYADSVKGRFTISRDNAKNTVYLQMNSLKPEDTAVYYCAALIGWYLRHWYWGQGTQVTVSS

SEQ ID NO: 2701 - protein, 124 aa, Artificial Sequence
  Chemically Synthesized
QVQLQESGGGLVQAGGSLRLSCAASGNISLPYTMGWYRQAPGKEREFVAAITIGATTNYADSVKGRFTISRDNAKNTVYLQMNSLKPEDTAVYYCAALYFYRGISARIVYHSYWGQGTQVTVSS

SEQ ID NO: 2702 - protein, 122 aa, Artificial Sequence
  Chemically Synthesized
QVQLQESGGGLVQAGGSLRLSCAASGTISNTYGMGWYRQAPGKEREFVAAISFGASTNYADSVKGRFTISRDNAKNTVYLQMNSLKPEDTAVYYCAVILFGGRRGATYHWYWGQGTQVTVSS

SEQ ID NO: 2703 - protein, 118 aa, Artificial Sequence
  Chemically Synthesized
QVQLQESGGGLVQAGGSLRLSCAASGNISPSYIMGWYRQAPGKEREFVAGITDGANTYYADSVKGRFTISRDNAKNTVYLQMNSLKPEDTAVYYCAAVTRADRILYYWGQGTQVTVSS

SEQ ID NO: 2704 - protein, 118 aa, Artificial Sequence
  Chemically Synthesized
QVQLQESGGGLVQAGGSLRLSCAASGYIFYILRMGWYRQAPGKERELVATISVGATTYYADSVKGRFTISRDNAKNTVYLQMNSLKPEDTAVYYCAVVTPRSRDHYYWGQGTQVTVSS

SEQ ID NO: 2705 - protein, 118 aa, Artificial Sequence
  Chemically Synthesized
QVQLQESGGGLVQAGGSLRLSCAASGYISHDSYMGWYRQAPGKEREFVASIGHGATTNYADSVKGRFTISRDNAKNTVYLQMNSLKPEDTAVYYCAVLERNPRYLYYWGQGTQVTVSS

SEQ ID NO: 2706 - protein, 122 aa, Artificial Sequence
  Chemically Synthesized
QVQLQESGGGLVQAGGSLRLSCAASGYIFYNYAMGWYRQAPGKERELVAGIDVGGTTNYADSVKGRFTISRDNAKNTVYLQMNSLKPEDTAVYYCAVVLYQSDDILTVLPYWGQGTQVTVSS

SEQ ID NO: 2707 - protein, 118 aa, Artificial Sequence
  Chemically Synthesized
QVQLQESGGGLVQAGGSLRLSCAASGNISGYYAMGWYRQAPGKEREFVAGITHGASTYYADSVKGRFTISRDNAKNTVYLQMNSLKPEDTAVYYCAAVVRRRYWLWYWGQGTQVTVSS

SEQ ID NO: 2708 - protein, 121 aa, Artificial Sequence
  Chemically Synthesized
QVQLQESGGGLVQAGGSLRLSCAASGYISQSDDMGWYRQAPGKEREFVASIGYGTSTNYADSVKGRFTISRDNAKNTVYLQMNSLKPEDTAVYYCAAGGQGSVVLTLLIYWGQGTQVTVSS

SEQ ID NO: 2709 - protein, 126 aa, Artificial Sequence
  Chemically Synthesized
QVQLQESGGGLVQAGGSLRLSCAASGSISQYDLMGWYRQAPGKEREFVAGITRGGSTYYADSVKGRFTISRDNAKNTVYLQMNSLKPEDTAVYYCAAETDRFVDDRGPYQYIHWYWGQGTQVTVSS

SEQ ID NO: 2710 - protein, 113 aa, Artificial Sequence
  Chemically Synthesized
QVQLQESGGGLVQAGGSLRLSCAASGSYMGWYRQAPGKERELVAAITSGGNTNYADSVKGRFTISRDNAKNTVYLQMNSLKPEDTAVYYCAVPFWYQRYLPYWGQGTQVTVSS

SEQ ID NO: 2711 - protein, 125 aa, Artificial Sequence
  Chemically Synthesized
QVQLQESGGGLVQAGGSLRLSCAASGTFLVTLMGWYRQAPGKERELVATISRGTNTNYADSVKGRFTISRDNAKNTVYLQMNSLKPEDTAVYYCAVPGGRATTPRPITSGELYYWGQGTQVTVSS

SEQ ID NO: 2712 - protein, 126 aa, Artificial Sequence
  Chemically Synthesized
QVQLQESGGGLVQAGGSLRLSCAASGNISGDGEMGWYRQAPGKERELVATIGVGTSTYYADSVKGRFTISRDNAKNTVYLQMNSLKPEDTAVYYCAAGDWRDPNGQRRRPGDHWYWGQGTQVTVSS

SEQ ID NO: 2713 - protein, 126 aa, Artificial Sequence
  Chemically Synthesized
QVQLQESGGGLVQAGGSLRLSCAASGTIFSYYGMGWYRQAPGKERELVAAIAYGTNTNYADSVKGRFTISRDNAKNTVYLQMNSLKPEDTAVYYCAVGRPLYQSDRRGFDAYLWYWGQGTQVTVSS

SEQ ID NO: 2714 - protein, 116 aa, Artificial Sequence
  Chemically Synthesized
QVQLQESGGGLVQAGGSLRLSCAASGTIFYTDYMGWYRQAPGKEREFVASIASVVVPYADSVKGRFTISRDNAKNTVYLQMNSLKPEDTAVYYCAVDDLNVGSLYWGQGTQVTVSS

SEQ ID NO: 2715 - protein, 126 aa, Artificial Sequence
  Chemically Synthesized
QVQLQESGGGLVQAGGSLRLSCAASGTIFNYFEMGWYRQAPGKEREFVASIATGSTTNYADSVKGRFTISRDNAKNTVYLQMNSLKPEDTAVYYCAVQWYYYNGNGDGNYYVHYYWGQGTQVTVSS

SEQ ID NO: 2716 - protein, 118 aa, Artificial Sequence
  Chemically Synthesized
QVQLQESGGGLVQAGGSLRLSCAASGNISPTSYMGWYRQAPGKERELVASIDGGGNTNYADSVKGRFTISRDNAKNTVYLQMNSLKPEDTAVYYCAVFREWNQGHYYWGQGTQVTVSS

SEQ ID NO: 2717 - protein, 122 aa, Artificial Sequence
  Chemically Synthesized
QVQLQESGGGLVQAGGSLRLSCAASGYIFDGKNMGWYRQAPGKERELVAGITYGGTTYYADSVKGRFTISRDNAKNTVYLQMNSLKPEDTAVYYCAAASVYGVYRTGRFGYWGQGTQVTVSS

SEQ ID NO: 2718 - protein, 118 aa, Artificial Sequence
  Chemically Synthesized
QVQLQESGGGLVQAGGSLRLSCAASGYISHRYRMGWYRQAPGKEREFVASISYGTITYYADSVKGRFTISRDNAKNTVYLQMNSLKPEDTAVYYCAVPRPLTYRFYYWGQGTQVTVSS

SEQ ID NO: 2719 - protein, 118 aa, Artificial Sequence
  Chemically Synthesized
QVQLQESGGGLVQAGGSLRLSCAASGYIFPFTYMGWYRQAPGKEREFVASINYGTITYYADSVKGRFTISRDNAKNTVYLQMNSLKPEDTAVYYCAAWWRTTVWFDYWGQGTQVTVSS

SEQ ID NO: 2720 - protein, 124 aa, Artificial Sequence
  Chemically Synthesized
QVQLQESGGGLVQAGGSLRLSCAASGNISWFTYMGWYRQAPGKERELVAAITDGASTNYADSVKGRFTISRDNAKNTVYLQMNSLKPEDTAVYYCAVRYSRQEVRSDYDWSFYWGQGTQVTVSS

SEQ ID NO: 2721 - protein, 118 aa, Artificial Sequence
  Chemically Synthesized
QVQLQESGGGLVQAGGSLRLSCAASGTIFRDTYMGWYRQAPGKEREFVAAIASGTNTYYADSVKGRFTISRDNAKNTVYLQMNSLKPEDTAVYYCAADYLRDDYLVYWGQGTQVTVSS

SEQ ID NO: 2722 - protein, 126 aa, Artificial Sequence
  Chemically Synthesized
QVQLQESGGGLVQAGGSLRLSCAASGTISQYANMGWYRQAPGKERELVATINVGSNTYYADSVKGRFTISRDNAKNTVYLQMNSLKPEDTAVYYCAVNYIDWYLAYWSFREYFDYWGQGTQVTVSS

SEQ ID NO: 2723 - protein, 118 aa, Artificial Sequence
  Chemically Synthesized
QVQLQESGGGLVQAGGSLRLSCAASGTIFEGTYMGWYRQAPGKERELVASISYGGITYYADSVKGRFTISRDNAKNTVYLQMNSLKPEDTAVYYCAVYVYTGGYHYYWGQGTQVTVSS

SEQ ID NO: 2724 - protein, 125 aa, Artificial Sequence
  Chemically Synthesized
QVQLQESGGGLVQAGGSLRLSCAASGSISFEFMGWYRQAPGKERELVAGITYGGSTYYADSVKGRFTISRDNAKNTVYLQMNSLKPEDTAVYYCAVQLNDNRRARADYVPDFQYWGQGTQVTVSS

SEQ ID NO: 2725 - protein, 126 aa, Artificial Sequence
  Chemically Synthesized
QVQLQESGGGLVQAGGSLRLSCAASGSISYDPNMGWYRQAPGKEREFVAGIGPGGTTNYADSVKGRFTISRDNAKNTVYLQMNSLKPEDTAVYYCAVWFGYLSITDALDQDRYGYWGQGTQVTVSS

SEQ ID NO: 2726 - protein, 120 aa, Artificial Sequence
  Chemically Synthesized
QVQLQESGGGLVQAGGSLRLSCAASGTIFAIVAMGWYRQAPGKERELVAAITSVLLPYADSVKGRFTISRDNAKNTVYLQMNSLKPEDTAVYYCAAGSVYDSTTTVLLYWGQGTQVTVSS

SEQ ID NO: 2727 - protein, 116 aa, Artificial Sequence
  Chemically Synthesized
QVQLQESGGGLVQAGGSLRLSCAASGYISRSLDMGWYRQAPGKERELGITDGANTNYADSVKGRFTISRDNAKNTVYLQMNSLKPEDTAVYYCAVQITDTRQLRYWGQGTQVTVSS

SEQ ID NO: 2728 - protein, 122 aa, Artificial Sequence
  Chemically Synthesized
QVQLQESGGGLVQAGGSLRLSCAASGTISYGVSMGWYRQAPGKEREFVAAISRGTSTYYADSVKGRFTISRDNAKNTVYLQMNSLKPEDTAVYYCAAYGRWNINYLRYHRYWGQGTQVTVSS

SEQ ID NO: 2729 - protein, 110 aa, Artificial Sequence
  Chemically Synthesized
QVQLQESGGGLVQAGGSLRLSCAASGSIFAYRPMGWYRQAPGKEREFVASIGDGTTTYYADSVKGRFTISRDNAKNTVYLQMNSLKPEDTAVYYCAFPYWGQGTQVTVSS

SEQ ID NO: 2730 - protein, 122 aa, Artificial Sequence
  Chemically Synthesized
QVQLQESGGGLVQAGGSLRLSCAASGYIFVGGYMGWYRQAPGKERELVATIADGSITNYADSVKGRFTISRDNAKNTVYLQMNSLKPEDTAVYYCAVYYYLIQHRWGPLKYWGQGTQVTVSS

SEQ ID NO: 2731 - protein, 117 aa, Artificial Sequence
  Chemically Synthesized
QVQLQESGGGLVQAGGSLRLSCAASGYISLSLGMGWYRQAPGKERELVATIGYGGNTNYADSVKGRFTISRDNAKNTVYLQMNSLKPEDTAVYYCAAYTEHLSFFYWGQGTQVTVSS

SEQ ID NO: 2732 - protein, 118 aa, Artificial Sequence
  Chemically Synthesized
QVQLQESGGGLVQAGGSLRLSCAASGYISSASFMGWYRQAPGKEREFVAGINSGASTNYADSVKGRFTISRDNAKNTVYLQMNSLKPEDTAVYYCAAYIDYTDWHYYWGQGTQVTVSS

SEQ ID NO: 2733 - protein, 125 aa, Artificial Sequence
  Chemically Synthesized
QVQLQESGGGLVQAGGSLRLSCAASGTISADEMGWYRQAPGKERELVATIGYGASTNYADSVKGRFTISRDNAKNTVYLQMNSLKPEDTAVYYCAVAYNLTALTSPYRGRQHNYWGQGTQVTVSS

SEQ ID NO: 2734 - protein, 117 aa, Artificial Sequence
  Chemically Synthesized
QVQLQESGGGLVQAGGSLRLSCAASGSIFYVSKMGWYRQAPGKERELVAGIGYGATTNYADSVKGRFTISRDNAKNTVYLQMNSLKPEDTAVYYCAASMLTTLVMYWGQGTQVTVSS

SEQ ID NO: 2735 - protein, 117 aa, Artificial Sequence
  Chemically Synthesized
QVQLQESGGGLVQAGGSLRLSCAASGYISSYPKMGWYRQAPGKEREFVATIAQGATTNYADSVKGRFTISRDNAKNTVYLQMNSLKPEDTAVYYCAVLLLTTVLMYWGQGTQVTVSS

SEQ ID NO: 2736 - protein, 119 aa, Artificial Sequence
  Chemically Synthesized
QVQLQESGGGLVQAGGSLRLSCAASGTIFLLDMGWYRQAPGKEREFVATILTVLLPYADSVKGRFTISRDNAKNTVYLQMNSLKPEDTAVYYCAADYVDSYVFVGALYWGQGTQVTVSS

SEQ ID NO: 2737 - protein, 121 aa, Artificial Sequence
  Chemically Synthesized
QVQLQESGGGLVQAGGSLRLSCAASGTIFRGIVMGWYRQAPGKEREFVAAIAIGTITNYADSVKGRFTISRDNAKNTVYLQMNSLKPEDTAVYYCAAQVRYASLTMLTIYWGQGTQVTVSS

SEQ ID NO: 2738 - protein, 118 aa, Artificial Sequence
  Chemically Synthesized
QVQLQESGGGLVQAGGSLRLSCAASGYISRAYYMGWYRQAPGKEREFVAGITHGAITYYADSVKGRFTISRDNAKNTVYLQMNSLKPEDTAVYYCAAGSSLTVGFWYWGQGTQVTVSS

SEQ ID NO: 2739 - protein, 115 aa, Artificial Sequence
  Chemically Synthesized
QVQLQESGGGLVQAGGSLRLSCAASGYISWAYAMGWYRQAPGKERELVATIGYGTSTYYADSVKGRFTISRDNAKNTVYLQMNSLKPEDTAVYYCAFRYLTHSYWGQGTQVTVSS

SEQ ID NO: 2740 - protein, 125 aa, Artificial Sequence
  Chemically Synthesized
QVQLQESGGGLVQAGGSLRLSCAASGTISYDRAMGWYRQAPGKERELVAAIGLGSSTYYADSVKGRFTISRDNAKNTVYLQMNSLKPEDTAVYYCAARYGQDYSLLGNTLRTIYWGQGTQVTVSS

SEQ ID NO: 2741 - protein, 122 aa, Artificial Sequence
  Chemically Synthesized
QVQLQESGGGLVQAGGSLRLSCAASGSIFPDDRMGWYRQAPGKEREFVAGIGGGSNTNYADSVKGRFTISRDNAKNTVYLQMNSLKPEDTAVYYCAVNDESESRTTIDHSYWGQGTQVTVSS

SEQ ID NO: 2742 - protein, 116 aa, Artificial Sequence
  Chemically Synthesized
QVQLQESGGGLVQAGGSLRLSCAASGSIFLYDIMGWYRQAPGKEREFVAGIGSGTNTNYADSVKGRFTISRDNAKNTVYLQMNSLKPEDTAVYYCAALSVASTYYWGQGTQVTVSS

SEQ ID NO: 2743 - protein, 120 aa, Artificial Sequence
  Chemically Synthesized
QVQLQESGGGLVQAGGSLRLSCAASGSIFTDEYMGWYRQAPGKERELVPLLVTVLVPYADSVKGRFTISRDNAKNTVYLQMNSLKPEDTAVYYCAVEWAWVGYLYYLPYWGQGTQVTVSS

SEQ ID NO: 2744 - protein, 118 aa, Artificial Sequence
  Chemically Synthesized
QVQLQESGGGLVQAGGSLRLSCAASGSIFTYIVMGWYRQAPGKEREFVATIGDGTNTYYADSVKGRFTISRDNAKNTVYLQMNSLKPEDTAVYYCAVEDSPNSRFWYWGQGTQVTVSS

SEQ ID NO: 2745 - protein, 122 aa, Artificial Sequence
  Chemically Synthesized
QVQLQESGGGLVQAGGSLRLSCAASGNISPYYYMGWYRQAPGKERELVAGISYGSITYYADSVKGRFTISRDNAKNTVYLQMNSLKPEDTAVYYCAAIGYKTLTDIKNLDYWGQGTQVTVSS

SEQ ID NO: 2746 - protein, 117 aa, Artificial Sequence
  Chemically Synthesized
QVQLQESGGGLVQAGGSLRLSCAASGSISQVYTMGWYRQAPGKEREFVATIGVGAITNYADSVKGRFTISRDNAKNTVYLQMNSLKPEDTAVYYCAAYTAYYSDLYWGQGTQVTVSS

SEQ ID NO: 2747 - protein, 118 aa, Artificial Sequence
  Chemically Synthesized
QVQLQESGGGLVQAGGSLRLSCAASGTISGITYMGWYRQAPGKERELVASISYGGSTYYADSVKGRFTISRDNAKNTVYLQMNSLKPEDTAVYYCAVRRVYRALFGYWGQGTQVTVSS

SEQ ID NO: 2748 - protein, 117 aa, Artificial Sequence
  Chemically Synthesized
QVQLQESGGGLVQAGGSLRLSCAASGTIFSADIMGWYRQAPGKERELVAGIAWGSTYYADSVKGRFTISRDNAKNTVYLQMNSLKPEDTAVYYCAVVAVYFLPFAYWGQGTQVTVSS

SEQ ID NO: 2749 - protein, 122 aa, Artificial Sequence
  Chemically Synthesized
QVQLQESGGGLVQAGGSLRLSCAASGSISGWYFMGWYRQAPGKEREFVATISYGGITYYADSVKGRFTISRDNAKNTVYLQMNSLKPEDTAVYYCAVDGRYQQTYGWRHYYWGQGTQVTVSS

SEQ ID NO: 2750 - protein, 125 aa, Artificial Sequence
  Chemically Synthesized
QVQLQESGGGLVQAGGSLRLSCAASGYIFNPYTMGWYRQAPGKEREFVATIAGGASTNYADSVKGRFTISRDNAKNTVYLQMNSLKPEDTAVYYCAADNDYDALYDLNFPRRLYWGQGTQVTVSS

SEQ ID NO: 2751 - protein, 122 aa, Artificial Sequence
  Chemically Synthesized
QVQLQESGGGLVQAGGSLRLSCAASGNISDYRYMGWYRQAPGKERELVATIGDGGITNYADSVKGRFTISRDNAKNTVYLQMNSLKPEDTAVYYCAAGLQTHTLDPSYYDYWGQGTQVTVSS

SEQ ID NO: 2752 - protein, 121 aa, Artificial Sequence
  Chemically Synthesized
QVQLQESGGGLVQAGGSLRLSCAASGNIFAYVFMGWYRQAPGKEREFVATITYGGITNYADSVKGRFTISRDNAKNTVYLQMNSLKPEDTAVYYCAVELEWQDGYDAHKYWGQGTQVTVSS

SEQ ID NO: 2753 - protein, 126 aa, Artificial Sequence
  Chemically Synthesized
QVQLQESGGGLVQAGGSLRLSCAASGSIFVSNDMGWYRQAPGKEREFVASIGRGTNTNYADSVKGRFTISRDNAKNTVYLQMNSLKPEDTAVYYCAALQSGPYDVDYGSYDYFQYWGQGTQVTVSS

SEQ ID NO: 2754 - protein, 117 aa, Artificial Sequence
  Chemically Synthesized
QVQLQESGGGLVQAGGSLRLSCAASGYIFRTISMGWYRQAPGKERELVASINVGAITYYADSVKGRFTISRDNAKNTVYLQMNSLKPEDTAVYYCAAISADFYYYYWGQGTQVTVSS

SEQ ID NO: 2755 - protein, 120 aa, Artificial Sequence
  Chemically Synthesized
QVQLQESGGGLVQAGGSLRLSCAASGTIFYYYMGWYRQAPGKEREFVAVLVTVVLPYADSVKGRFTISRDNAKNTVYLQMNSLKPEDTAVYYCAVYHERYDATRTEFGYWGQGTQVTVSS

SEQ ID NO: 2756 - protein, 126 aa, Artificial Sequence
  Chemically Synthesized
QVQLQESGGGLVQAGGSLRLSCAASGTISHDDSMGWYRQAPGKEREFVAGIDDGGSTYYADSVKGRFTISRDNAKNTVYLQMNSLKPEDTAVYYCAVDSGPSNLYYADTYYNLTYWGQGTQVTVSS

SEQ ID NO: 2757 - protein, 118 aa, Artificial Sequence
  Chemically Synthesized
QVQLQESGGGLVQAGGSLRLSCAASGTISYDGYMGWYRQAPGKERELVASITVGGSTYYADSVKGRFTISRDNAKNTVYLQMNSLKPEDTAVYYCAAAEYDDTYHGYWGQGTQVTVSS

SEQ ID NO: 2758 - protein, 126 aa, Artificial Sequence
  Chemically Synthesized
QVQLQESGGGLVQAGGSLRLSCAASGYIFDPYFMGWYRQAPGKEREFVAAITAGTITYYADSVKGRFTISRDNAKNTVYLQMNSLKPEDTAVYYCAVTWPLVLGVVGVDAQYHPYWGQGTQVTVSS

SEQ ID NO: 2759 - protein, 122 aa, Artificial Sequence
  Chemically Synthesized
QVQLQESGGGLVQAGGSLRLSCAASGNIFSQRDMGWYRQAPGKERELVAGINSGANTYYADSVKGRFTISRDNAKNTVYLQMNSLKPEDTAVYYCAAQDDDADLIRLFLGYWGQGTQVTVSS

SEQ ID NO: 2760 - protein, 118 aa, Artificial Sequence
  Chemically Synthesized
QVQLQESGGGLVQAGGSLRLSCAASGTIFRYYSMGWYRQAPGKERELVAAIGLGSSTNYADSVKGRFTISRDNAKNTVYLQMNSLKPEDTAVYYCAVYATTETQHYYWGQGTQVTVSS

SEQ ID NO: 2761 - protein, 126 aa, Artificial Sequence
  Chemically Synthesized
QVQLQESGGGLVQAGGSLRLSCAASGSISDAGYMGWYRQAPGKERELVASITYGGITNYADSVKGRFTISRDNAKNTVYLQMNSLKPEDTAVYYCAAYPNDSYRDYLQGSVLYAYWGQGTQVTVSS

SEQ ID NO: 2762 - protein, 118 aa, Artificial Sequence
  Chemically Synthesized
QVQLQESGGGLVQAGGSLRLSCAASGNISDWDYMGWYRQAPGKEREFVAAIDRGGITYYADSVKGRFTISRDNAKNTVYLQMNSLKPEDTAVYYCAAWNPFLYVYQYWGQGTQVTVSS

SEQ ID NO: 2763 - protein, 122 aa, Artificial Sequence
  Chemically Synthesized
QVQLQESGGGLVQAGGSLRLSCAASGSIFNYGYMGWYRQAPGKEREFVASISYGASTNYADSVKGRFTISRDNAKNTVYLQMNSLKPEDTAVYYCAVDQAYDYQLPYGHTYWGQGTQVTVSS

SEQ ID NO: 2764 - protein, 122 aa, Artificial Sequence
  Chemically Synthesized
QVQLQESGGGLVQAGGSLRLSCAASGYIFDNDTMGWYRQAPGKERELVATIDLGTTTYYADSVKGRFTISRDNAKNTVYLQMNSLKPEDTAVYYCAVYLYYADEYDAGHGYWGQGTQVTVSS

SEQ ID NO: 2765 - protein, 118 aa, Artificial Sequence
  Chemically Synthesized
QVQLQESGGGLVQAGGSLRLSCAASGNIFLDFLMGWYRQAPGKERELVATITSGASTYYADSVKGRFTISRDNAKNTVYLQMNSLKPEDTAVYYCAVVYQHHDYLTYWGQGTQVTVSS

SEQ ID NO: 2766 - protein, 118 aa, Artificial Sequence
  Chemically Synthesized
QVQLQESGGGLVQAGGSLRLSCAASGTISAGDFMGWYRQAPGKEREFVAGIGIGTTTYYADSVKGRFTISRDNAKNTVYLQMNSLKPEDTAVYYCAAQEGLSRSYGYWGQGTQVTVSS

SEQ ID NO: 2767 - protein, 118 aa, Artificial Sequence
  Chemically Synthesized
QVQLQESGGGLVQAGGSLRLSCAASGYISTSYGMGWYRQAPGKERELVAGIDYGGITNYADSVKGRFTISRDNAKNTVYLQMNSLKPEDTAVYYCAVPDYPYRVYSYWGQGTQVTVSS

SEQ ID NO: 2768 - protein, 118 aa, Artificial Sequence
  Chemically Synthesized
QVQLQESGGGLVQAGGSLRLSCAASGTIFDVYSMGWYRQAPGKEREFVAGIASGTITYYADSVKGRFTISRDNAKNTVYLQMNSLKPEDTAVYYCAVIEIWIYRHAYWGQGTQVTVSS

SEQ ID NO: 2769 - protein, 118 aa, Artificial Sequence
  Chemically Synthesized
QVQLQESGGGLVQAGGSLRLSCAASGTIFSYLSMGWYRQAPGKEREFVATINFGTTTNYADSVKGRFTISRDNAKNTVYLQMNSLKPEDTAVYYCAAYVYSDYVYHYWGQGTQVTVSS

SEQ ID NO: 2770 - protein, 122 aa, Artificial Sequence
  Chemically Synthesized
QVQLQESGGGLVQAGGSLRLSCAASGNISATYGMGWYRQAPGKEREFVAAITFGSITYYADSVKGRFTISRDNAKNTVYLQMNSLKPEDTAVYYCAVYDPAYPYHTDVHFYWGQGTQVTVSS

SEQ ID NO: 2771 - protein, 122 aa, Artificial Sequence
  Chemically Synthesized
QVQLQESGGGLVQAGGSLRLSCAASGTISDNDAMGWYRQAPGKEREFVAGIGAGSNTNYADSVKGRFTISRDNAKNTVYLQMNSLKPEDTAVYYCAADDSYGYYLLGSHAYWGQGTQVTVSS

SEQ ID NO: 2772 - protein, 118 aa, Artificial Sequence
  Chemically Synthesized
QVQLQESGGGLVQAGGSLRLSCAASGSIFARVEMGWYRQAPGKEREFVAAITWGGNTYYADSVKGRFTISRDNAKNTVYLQMNSLKPEDTAVYYCAVTHRRKRFHIYWGQGTQVTVSS

SEQ ID NO: 2773 - protein, 118 aa, Artificial Sequence
  Chemically Synthesized
QVQLQESGGGLVQAGGSLRLSCAASGNISAISAMGWYRQAPGKEREFVATITTGASTYYADSVKGRFTISRDNAKNTVYLQMNSLKPEDTAVYYCAVTYYDFKPHLYWGQGTQVTVSS

SEQ ID NO: 2774 - protein, 118 aa, Artificial Sequence
  Chemically Synthesized
QVQLQESGGGLVQAGGSLRLSCAASGNISLSLYMGWYRQAPGKERELVASIGEGAITYYADSVKGRFTISRDNAKNTVYLQMNSLKPEDTAVYYCAVEYKRIGDLRYWGQGTQVTVSS

SEQ ID NO: 2775 - protein, 122 aa, Artificial Sequence
  Chemically Synthesized
QVQLQESGGGLVQAGGSLRLSCAASGTISHARFMGWYRQAPGKEREFVAGISYGTSTYYADSVKGRFTISRDNAKNTVYLQMNSLKPEDTAVYYCAASNIWPYDVFQDHAYWGQGTQVTVSS

SEQ ID NO: 2776 - protein, 118 aa, Artificial Sequence
  Chemically Synthesized
QVQLQESGGGLVQAGGSLRLSCAASGTIFGGLYMGWYRQAPGKERELVASITPGGITNYADSVKGRFTISRDNAKNTVYLQMNSLKPEDTAVYYCAVDTAGGYSLSYWGQGTQVTVSS

SEQ ID NO: 2777 - protein, 118 aa, Artificial Sequence
  Chemically Synthesized
QVQLQESGGGLVQAGGSLRLSCAASGNISVLYVMGWYRQAPGKEREFVASIGYGTSTNYADSVKGRFTISRDNAKNTVYLQMNSLKPEDTAVYYCAVYRQYWVWHRYWGQGTQVTVSS

SEQ ID NO: 2778 - protein, 121 aa, Artificial Sequence
  Chemically Synthesized
QVQLQESGGGLVQAGGSLRLSCAASGYIFDDSAMGWYRQAPGKERELVAGITRGATTYADSVKGRFTISRDNAKNTVYLQMNSLKPEDTAVYYCAATYFDDAPGAVEHNYWGQGTQVTVSS

SEQ ID NO: 2779 - protein, 121 aa, Artificial Sequence
  Chemically Synthesized
QVQLQESGGGLVQAGGSLRLSCAASGTISSSRYMGWYRQAPGKERELVASIDAGAITNYADSVKGRFTISRDNAKNTVYLQMNSLKPEDTAVYYCAVGSPSVNTSRLNMYWGQGTQVTVSS

SEQ ID NO: 2780 - protein, 122 aa, Artificial Sequence
  Chemically Synthesized
QVQLQESGGGLVQAGGSLRLSCAASGNIFGGFDMGWYRQAPGKEREFVASISYGGNTNYADSVKGRFTISRDNAKNTVYLQMNSLKPEDTAVYYCAAHYHVYDYGDTAYSYWGQGTQVTVSS

SEQ ID NO: 2781 - protein, 126 aa, Artificial Sequence
  Chemically Synthesized
QVQLQESGGGLVQAGGSLRLSCAASGSISWQYVMGWYRQAPGKERELVAGIDFGGITNYADSVKGRFTISRDNAKNTVYLQMNSLKPEDTAVYYCAVTDGDTTIGLKAVDLSHDYWGQGTQVTVSS

SEQ ID NO: 2782 - protein, 118 aa, Artificial Sequence
  Chemically Synthesized
QVQLQESGGGLVQAGGSLRLSCAASGSISDYYYMGWYRQAPGKERELVAAITWGATTYYADSVKGRFTISRDNAKNTVYLQMNSLKPEDTAVYYCAVIQDDLRVHDYWGQGTQVTVSS

SEQ ID NO: 2783 - protein, 118 aa, Artificial Sequence
  Chemically Synthesized
QVQLQESGGGLVQAGGSLRLSCAASGSIFHDYVMGWYRQAPGKERELVAGIADGSTTYYADSVKGRFTISRDNAKNTVYLQMNSLKPEDTAVYYCAVRKGRDDFYYYWGQGTQVTVSS

SEQ ID NO: 2784 - protein, 126 aa, Artificial Sequence
  Chemically Synthesized
QVQLQESGGGLVQAGGSLRLSCAASGTISYGQDMGWYRQAPGKERELVAAITWGASTNYADSVKGRFTISRDNAKNTVYLQMNSLKPEDTAVYYCAVIRSPWNLPYYIFSYWYDYWGQGTQVTVSS

SEQ ID NO: 2785 - protein, 118 aa, Artificial Sequence
  Chemically Synthesized
QVQLQESGGGLVQAGGSLRLSCAASGTISPASRMGWYRQAPGKERELVAAIAYGGNTNYADSVKGRFTISRDNAKNTVYLQMNSLKPEDTAVYYCAVDEYHAYILYYWGQGTQVTVSS

SEQ ID NO: 2786 - protein, 123 aa, Artificial Sequence
  Chemically Synthesized
QVQLQESGGGLVQAGGSLRLSCAASGNIFGRDYMGWYRQAPGKERELVATIGIGGTTYYADSVKGRFTISRDNAKNTVYLQMNSLKPEDTAVYYCAVGAIFDRDQIALQYAYWGQGTQVTVSS

SEQ ID NO: 2787 - protein, 125 aa, Artificial Sequence
  Chemically Synthesized
QVQLQESGGGLVQAGGSLRLSCAASGYISSEYWMGWYRQAPGKERELLPVLIRVLLPYADSVKGRFTISRDNAKNTVYLQMNSLKPEDTAVYYCAAPYVPRRTYYSRYDPNHWYWGQGTQVTVSS

SEQ ID NO: 2788 - protein, 118 aa, Artificial Sequence
  Chemically Synthesized
QVQLQESGGGLVQAGGSLRLSCAASGNISRYAQMGWYRQAPGKERELVASITVGSNTYYADSVKGRFTISRDNAKNTVYLQMNSLKPEDTAVYYCAATIDADYGHAYWGQGTQVTVSS

SEQ ID NO: 2789 - protein, 116 aa, Artificial Sequence
  Chemically Synthesized
QVQLQESGGGLVQAGGSLRLSCAASGNISHVSYMGWYRQAPGKERELVAAIDVGGNTYYADSVKGRFTISRDNAKNTVYLQMNSLKPEDTAVYYCAVYYYISHPYWGQGTQVTVSS

SEQ ID NO: 2790 - protein, 118 aa, Artificial Sequence
  Chemically Synthesized
QVQLQESGGGLVQAGGSLRLSCAASGYISSRYGMGWYRQAPGKERELVATISYGGSTYYADSVKGRFTISRDNAKNTVYLQMNSLKPEDTAVYYCAAVEYGTRVHAYWGQGTQVTVSS

SEQ ID NO: 2791 - protein, 118 aa, Artificial Sequence
  Chemically Synthesized
QVQLQESGGGLVQAGGSLRLSCAASGNISTADAMGWYRQAPGKERELVASIGGGASTNYADSVKGRFTISRDNAKNTVYLQMNSLKPEDTAVYYCAATDDKDDGHAYWGQGTQVTVSS

SEQ ID NO: 2792 - protein, 118 aa, Artificial Sequence
  Chemically Synthesized
QVQLQESGGGLVQAGGSLRLSCAASGYIFTAQGMGWYRQAPGKEREFVATIDGGASTYYADSVKGRFTISRDNAKNTVYLQMNSLKPEDTAVYYCAVDARQYVDYLYWGQGTQVTVSS

SEQ ID NO: 2793 - protein, 122 aa, Artificial Sequence
  Chemically Synthesized
QVQLQESGGGLVQAGGSLRLSCAASGSIFSVYYMGWYRQAPGKEREFVASISPGASTNYADSVKGRFTISRDNAKNTVYLQMNSLKPEDTAVYYCAVIGYSDDPDTNTHQYWGQGTQVTVSS

SEQ ID NO: 2794 - protein, 121 aa, Artificial Sequence
  Chemically Synthesized
QVQLQESGGGLVQAGGSLRLSCAASGYISWQEFMGWYRQAPGKEREFVATIGSGGTTYYADSVKGRFTISRDNAKNTVYLQMNSLKPEDTAVYYCAVGSYGGPSLKLLLYWGQGTQVTVSS

SEQ ID NO: 2795 - protein, 126 aa, Artificial Sequence
  Chemically Synthesized
QVQLQESGGGLVQAGGSLRLSCAASGYIFVIGRMGWYRQAPGKEREFVASIGAGSTTYYADSVKGRFTISRDNAKNTVYLQMNSLKPEDTAVYYCAVDRTDRERHILYRQRGYDYWGQGTQVTVSS

SEQ ID NO: 2796 - protein, 122 aa, Artificial Sequence
  Chemically Synthesized
QVQLQESGGGLVQAGGSLRLSCAASGSISTHLYMGWYRQAPGKERELVASINGGGTTYYADSVKGRFTISRDNAKNTVYLQMNSLKPEDTAVYYCAVNDAVQQNGDYHFSYWGQGTQVTVSS

SEQ ID NO: 2797 - protein, 118 aa, Artificial Sequence
  Chemically Synthesized
QVQLQESGGGLVQAGGSLRLSCAASGTISAYIDMGWYRQAPGKERELVATITSGGTTYYADSVKGRFTISRDNAKNTVYLQMNSLKPEDTAVYYCAVPRYPYPYLVYWGQGTQVTVSS

SEQ ID NO: 2798 - protein, 118 aa, Artificial Sequence
  Chemically Synthesized
QVQLQESGGGLVQAGGSLRLSCAASGTISNGYNMGWYRQAPGKEREFVATIDYGTSTYYADSVKGRFTISRDNAKNTVYLQMNSLKPEDTAVYYCAVNIYTVTYFVYWGQGTQVTVSS

SEQ ID NO: 2799 - protein, 118 aa, Artificial Sequence
  Chemically Synthesized
QVQLQESGGGLVQAGGSLRLSCAASGNISTIDIMGWYRQAPGKEREFVATINYGAITYYADSVKGRFTISRDNAKNTVYLQMNSLKPEDTAVYYCAAQSNQYNTHSYWGQGTQVTVSS

SEQ ID NO: 2800 - protein, 118 aa, Artificial Sequence
  Chemically Synthesized
QVQLQESGGGLVQAGGSLRLSCAASGTIFYIWYMGWYRQAPGKEREFVASIAFGGTTNYADSVKGRFTISRDNAKNTVYLQMNSLKPEDTAVYYCAVVLKYGSPHAYWGQGTQVTVSS

SEQ ID NO: 2801 - protein, 126 aa, Artificial Sequence
  Chemically Synthesized
QVQLQESGGGLVQAGGSLRLSCAASGYISFLNKMGWYRQAPGKEREFVAAITTGGSTYYADSVKGRFTISRDNAKNTVYLQMNSLKPEDTAVYYCAVVYEYFRFYRYDFYDRHYYWGQGTQVTVSS

SEQ ID NO: 2802 - protein, 122 aa, Artificial Sequence
  Chemically Synthesized
QVQLQESGGGLVQAGGSLRLSCAASGYIFAYRDMGWYRQAPGKERELVAGIDAGGNTYYADSVKGRFTISRDNAKNTVYLQMNSLKPEDTAVYYCAAPYPYYREDLVWHYYWGQGTQVTVSS

SEQ ID NO: 2803 - protein, 118 aa, Artificial Sequence
  Chemically Synthesized
QVQLQESGGGLVQAGGSLRLSCAASGYIFLGYPMGWYRQAPGKERELVASIDYGGSTYYADSVKGRFTISRDNAKNTVYLQMNSLKPEDTAVYYCAVRRSFHPAYVYWGQGTQVTVSS

SEQ ID NO: 2804 - protein, 126 aa, Artificial Sequence
  Chemically Synthesized
QVQLQESGGGLVQAGGSLRLSCAASGYISRVFAMGWYRQAPGKERELVASIDNGSTTNYADSVKGRFTISRDNAKNTVYLQMNSLKPEDTAVYYCAAVYNGPYRWYEYYRKWLRYWGQGTQVTVSS

SEQ ID NO: 2805 - protein, 118 aa, Artificial Sequence
  Chemically Synthesized
QVQLQESGGGLVQAGGSLRLSCAASGSISRATVMGWYRQAPGKERELVATIALGAITYYADSVKGRFTISRDNAKNTVYLQMNSLKPEDTAVYYCAVASWGGYGYPYWGQGTQVTVSS

SEQ ID NO: 2806 - protein, 126 aa, Artificial Sequence
  Chemically Synthesized
QVQLQESGGGLVQAGGSLRLSCAASGYIFPVDTMGWYRQAPGKEREFVASIAGGATTNYADSVKGRFTISRDNAKNTVYLQMNSLKPEDTAVYYCAAKRYVIYRTAYDVVSDHYYWGQGTQVTVSS

SEQ ID NO: 2807 - protein, 118 aa, Artificial Sequence
  Chemically Synthesized
QVQLQESGGGLVQAGGSLRLSCAASGTIFHVGFMGWYRQAPGKERELVAAIAAGGTTYYADSVKGRFTISRDNAKNTVYLQMNSLKPEDTAVYYCAVSYSINDRHDYWGQGTQVTVSS

SEQ ID NO: 2808 - protein, 118 aa, Artificial Sequence
  Chemically Synthesized
QVQLQESGGGLVQAGGSLRLSCAASGYIFPRNWMGWYRQAPGKERELVAAITYGSTTNYADSVKGRFTISRDNAKNTVYLQMNSLKPEDTAVYYCAAYTRRYYSYYYWGQGTQVTVSS

SEQ ID NO: 2809 - protein, 122 aa, Artificial Sequence
  Chemically Synthesized
QVQLQESGGGLVQAGGSLRLSCAASGNIFLLRGMGWYRQAPGKERELVATIGDGANTYYADSVKGRFTISRDNAKNTVYLQMNSLKPEDTAVYYCAVDDYIAPPDGEAHAYWGQGTQVTVSS

SEQ ID NO: 2810 - protein, 118 aa, Artificial Sequence
  Chemically Synthesized
QVQLQESGGGLVQAGGSLRLSCAASGYISRTRFMGWYRQAPGKEREFVAGIGYGANTNYADSVKGRFTISRDNAKNTVYLQMNSLKPEDTAVYYCAATAPYYRYHDYWGQGTQVTVSS

SEQ ID NO: 2811 - protein, 117 aa, Artificial Sequence
  Chemically Synthesized
QVQLQESGGGLVQAGGSLRLSCAASGNIFPYFGMGWYRQAPGKERELVASIDVGASTNYADSVKGRFTISRDNAKNTVYLQMNSLKPEDTAVYYCAAPYSDQGLNYWGQGTQVTVSS

SEQ ID NO: 2812 - protein, 118 aa, Artificial Sequence
  Chemically Synthesized
QVQLQESGGGLVQAGGSLRLSCAASGYISAPSRMGWYRQAPGKEREFVAGISYGTSTNYADSVKGRFTISRDNAKNTVYLQMNSLKPEDTAVYYCAARGADPRPHYYWGQGTQVTVSS

SEQ ID NO: 2813 - protein, 118 aa, Artificial Sequence
  Chemically Synthesized
QVQLQESGGGLVQAGGSLRLSCAASGNISYGTYMGWYRQAPGKERELVATIGYGGTTYYADSVKGRFTISRDNAKNTVYLQMNSLKPEDTAVYYCAVLGWWDDNHSYWGQGTQVTVSS

SEQ ID NO: 2814 - protein, 122 aa, Artificial Sequence
  Chemically Synthesized
QVQLQESGGGLVQAGGSLRLSCAASGSISYERVMGWYRQAPGKEREFVAGIAGGTTTNYADSVKGRFTISRDNAKNTVYLQMNSLKPEDTAVYYCAADRDYGGGSDSYLFYWGQGTQVTVSS

SEQ ID NO: 2815 - protein, 122 aa, Artificial Sequence
  Chemically Synthesized
QVQLQESGGGLVQAGGSLRLSCAASGSISWYSWMGWYRQAPGKEREFVAAITPGSITNYADSVKGRFTISRDNAKNTVYLQMNSLKPEDTAVYYCAARDYRVWPYIIYHEYWGQGTQVTVSS

SEQ ID NO: 2816 - protein, 126 aa, Artificial Sequence
  Chemically Synthesized
QVQLQESGGGLVQAGGSLRLSCAASGYISTALSMGWYRQAPGKEREFVASITVGGTTNYADSVKGRFTISRDNAKNTVYLQMNSLKPEDTAVYYCAVVQYYEDEHPPRDYLVFAYWGQGTQVTVSS

SEQ ID NO: 2817 - protein, 122 aa, Artificial Sequence
  Chemically Synthesized
QVQLQESGGGLVQAGGSLRLSCAASGYISWVRTMGWYRQAPGKERELVASIAGGGITNYADSVKGRFTISRDNAKNTVYLQMNSLKPEDTAVYYCAVGYTYGGQYYGTFGYWGQGTQVTVSS

SEQ ID NO: 2818 - protein, 118 aa, Artificial Sequence
  Chemically Synthesized
QVQLQESGGGLVQAGGSLRLSCAASGYISGSDAMGWYRQAPGKERELVATITSGGNTYYADSVKGRFTISRDNAKNTVYLQMNSLKPEDTAVYYCAAVNDPTDYFSYWGQGTQVTVSS

SEQ ID NO: 2819 - protein, 122 aa, Artificial Sequence
  Chemically Synthesized
QVQLQESGGGLVQAGGSLRLSCAASGNIFAPDHMGWYRQAPGKERELVASIGDGGNTYYADSVKGRFTISRDNAKNTVYLQMNSLKPEDTAVYYCAAEYTYGWFSRRYFTYWGQGTQVTVSS

SEQ ID NO: 2820 - protein, 122 aa, Artificial Sequence
  Chemically Synthesized
QVQLQESGGGLVQAGGSLRLSCAASGTIFPGWYMGWYRQAPGKERELVAAITPGGTTYYADSVKGRFTISRDNAKNTVYLQMNSLKPEDTAVYYCAVVGVGSWRPDVDHTYWGQGTQVTVSS

SEQ ID NO: 2821 - protein, 122 aa, Artificial Sequence
  Chemically Synthesized
QVQLQESGGGLVQAGGSLRLSCAASGSISPQVFMGWYRQAPGKERELVAAISYGTSTYYADSVKGRFTISRDNAKNTVYLQMNSLKPEDTAVYYCAAIRVTGDGRRARYRYWGQGTQVTVSS

SEQ ID NO: 2822 - protein, 122 aa, Artificial Sequence
  Chemically Synthesized
QVQLQESGGGLVQAGGSLRLSCAASGYIFDSRYMGWYRQAPGKEREFVATISVGGSTNYADSVKGRFTISRDNAKNTVYLQMNSLKPEDTAVYYCAAQYWRYYLFRRGFYYWGQGTQVTVSS

SEQ ID NO: 2823 - protein, 118 aa, Artificial Sequence
  Chemically Synthesized
QVQLQESGGGLVQAGGSLRLSCAASGTISYPLRMGWYRQAPGKERELVASIGRGAITNYADSVKGRFTISRDNAKNTVYLQMNSLKPEDTAVYYCAAYQDADKYLRYWGQGTQVTVSS

SEQ ID NO: 2824 - protein, 118 aa, Artificial Sequence
  Chemically Synthesized
QVQLQESGGGLVQAGGSLRLSCAASGTISISVVMGWYRQAPGKERELVASIDNGTNTNYADSVKGRFTISRDNAKNTVYLQMNSLKPEDTAVYYCAAQYRDDRRLYYWGQGTQVTVSS

SEQ ID NO: 2825 - protein, 112 aa, Artificial Sequence
  Chemically Synthesized
QVQLQESGGGLVQAGGSLRLSCAASGTISVYPLMGWYRQAPGKERELVAGISYGAITYYADSVKGRFTISRDNAKNTVYLQMNSLKPEDTAVYYCAYDLTYWGQGTQVTVSS

SEQ ID NO: 2826 - protein, 122 aa, Artificial Sequence
  Chemically Synthesized
QVQLQESGGGLVQAGGSLRLSCAASGTISANYIMGWYRQAPGKEREFVAGISPGGTTNYADSVKGRFTISRDNAKNTVYLQMNSLKPEDTAVYYCAAYGYWRGTFVGYFTYWGQGTQVTVSS

SEQ ID NO: 2827 - protein, 118 aa, Artificial Sequence
  Chemically Synthesized
QVQLQESGGGLVQAGGSLRLSCAASGTISLYLGMGWYRQAPGKEREFVATIDSGGITYYADSVKGRFTISRDNAKNTVYLQMNSLKPEDTAVYYCAATYILRYYLVYWGQGTQVTVSS

SEQ ID NO: 2828 - protein, 126 aa, Artificial Sequence
  Chemically Synthesized
QVQLQESGGGLVQAGGSLRLSCAASGSIFYWPNMGWYRQAPGKERELVASIDLGSNTYYADSVKGRFTISRDNAKNTVYLQMNSLKPEDTAVYYCAVHIGIWYTYDIQDRGTHNYWGQGTQVTVSS

SEQ ID NO: 2829 - protein, 122 aa, Artificial Sequence
  Chemically Synthesized
QVQLQESGGGLVQAGGSLRLSCAASGSIFDDNQMGWYRQAPGKERELVAAIDDGASTNYADSVKGRFTISRDNAKNTVYLQMNSLKPEDTAVYYCAVGDDIVLPFLYRYSYWGQGTQVTVSS

SEQ ID NO: 2830 - protein, 126 aa, Artificial Sequence
  Chemically Synthesized
QVQLQESGGGLVQAGGSLRLSCAASGSISSDLYMGWYRQAPGKERELVASIAVGATTYYADSVKGRFTISRDNAKNTVYLQMNSLKPEDTAVYYCAVDPGGTDDILDILESYYPYWGQGTQVTVSS

SEQ ID NO: 2831 - protein, 122 aa, Artificial Sequence
  Chemically Synthesized
QVQLQESGGGLVQAGGSLRLSCAASGYIFYPRHMGWYRQAPGKERELVAAIARGAITYYADSVKGRFTISRDNAKNTVYLQMNSLKPEDTAVYYCAVYQPSDANLFRYYRYWGQGTQVTVSS

SEQ ID NO: 2832 - protein, 113 aa, Artificial Sequence
  Chemically Synthesized
QVQLQESGGGLVQAGGSLRLSCAASGNIFRGVSMGWYRQAPGKERELVAAINTGGTTYYADSVKGRFTISRDNAKNTVYLQMNSLKPEDTAVYYCAAGQYTYWGQGTQVTVSS

SEQ ID NO: 2833 - protein, 122 aa, Artificial Sequence
  Chemically Synthesized
QVQLQESGGGLVQAGGSLRLSCAASGSISYYHTMGWYRQAPGKERELVAAIALGTITYYADSVKGRFTISRDNAKNTVYLQMNSLKPEDTAVYYCAALGSYAVKYAGGLRYWGQGTQVTVSS

SEQ ID NO: 2834 - protein, 118 aa, Artificial Sequence
  Chemically Synthesized
QVQLQESGGGLVQAGGSLRLSCAASGTIFRVYYMGWYRQAPGKEREFVASISFGTTTYYADSVKGRFTISRDNAKNTVYLQMNSLKPEDTAVYYCAADVWRGDALGYWGQGTQVTVSS

SEQ ID NO: 2835 - protein, 122 aa, Artificial Sequence
  Chemically Synthesized
QVQLQESGGGLVQAGGSLRLSCAASGTIFANLSMGWYRQAPGKERELVATISRGSNTYYADSVKGRFTISRDNAKNTVYLQMNSLKPEDTAVYYCAAYAVTYSARDHVHTYWGQGTQVTVSS

SEQ ID NO: 2836 - protein, 122 aa, Artificial Sequence
  Chemically Synthesized
QVQLQESGGGLVQAGGSLRLSCAASGSISDLRDMGWYRQAPGKEREFVAAINAGTTTNYADSVKGRFTISRDNAKNTVYLQMNSLKPEDTAVYYCAAGARDYAQHYNWLVYWGQGTQVTVSS

SEQ ID NO: 2837 - protein, 118 aa, Artificial Sequence
  Chemically Synthesized
QVQLQESGGGLVQAGGSLRLSCAASGSISPQQRMGWYRQAPGKEREFVAAIGAGSSTNYADSVKGRFTISRDNAKNTVYLQMNSLKPEDTAVYYCAVYTIDSPDHVYWGQGTQVTVSS

SEQ ID NO: 2838 - protein, 126 aa, Artificial Sequence
  Chemically Synthesized
QVQLQESGGGLVQAGGSLRLSCAASGNIFDQYDMGWYRQAPGKERELVASINWGTITYYADSVKGRFTISRDNAKNTVYLQMNSLKPEDTAVYYCAAAYYIGVYARSNIIGGLNYWGQGTQVTVSS

SEQ ID NO: 2839 - protein, 122 aa, Artificial Sequence
  Chemically Synthesized
QVQLQESGGGLVQAGGSLRLSCAASGNISQYSQMGWYRQAPGKEREFVASIDQGSTTNYADSVKGRFTISRDNAKNTVYLQMNSLKPEDTAVYYCAADTVSAPYYSTLLDYWGQGTQVTVSS

SEQ ID NO: 2840 - protein, 126 aa, Artificial Sequence
  Chemically Synthesized
QVQLQESGGGLVQAGGSLRLSCAASGNIFRGHDMGWYRQAPGKERELVASIAYGTTTNYADSVKGRFTISRDNAKNTVYLQMNSLKPEDTAVYYCAAKNLEYRRRRPYTYHALHYWGQGTQVTVSS

SEQ ID NO: 2841 - protein, 118 aa, Artificial Sequence
  Chemically Synthesized
QVQLQESGGGLVQAGGSLRLSCAASGSIFRTPEMGWYRQAPGKEREFVAGIALGATTYYADSVKGRFTISRDNAKNTVYLQMNSLKPEDTAVYYCAVYYSHYNTYAYWGQGTQVTVSS

SEQ ID NO: 2842 - protein, 122 aa, Artificial Sequence
  Chemically Synthesized
QVQLQESGGGLVQAGGSLRLSCAASGNIFTLVTMGWYRQAPGKEREFVASIAFGATTYYADSVKGRFTISRDNAKNTVYLQMNSLKPEDTAVYYCAATYGRQVSDPYRYRYWGQGTQVTVSS

SEQ ID NO: 2843 - protein, 122 aa, Artificial Sequence
  Chemically Synthesized
QVQLQESGGGLVQAGGSLRLSCAASGNISGEPWMGWYRQAPGKERELVAAINYGTITYYADSVKGRFTISRDNAKNTVYLQMNSLKPEDTAVYYCAVGYVPDIGLGIYYDYWGQGTQVTVSS

SEQ ID NO: 2844 - protein, 126 aa, Artificial Sequence
  Chemically Synthesized
QVQLQESGGGLVQAGGSLRLSCAASGTIFSRRYMGWYRQAPGKEREFVAGIDRGTNTNYADSVKGRFTISRDNAKNTVYLQMNSLKPEDTAVYYCAVTRTAPWSHWQGTARLYPYWGQGTQVTVSS

SEQ ID NO: 2845 - protein, 125 aa, Artificial Sequence
  Chemically Synthesized
QVQLQESGGGLVQAGGSLRLSCAASGNISDGWYMGWYRQAPGKERELVAGIGHGSNTYYADSVKGRFTISRDNAKNTVYLQMNSLKPEDTAVYYCAAVYATSTSRTVTTRTNIYWGQGTQVTVSS

SEQ ID NO: 2846 - protein, 117 aa, Artificial Sequence
  Chemically Synthesized
QVQLQESGGGLVQAGGSLRLSCAASGYISSLTMGWYRQAPGKEREFVAGIDYGTNTNYADSVKGRFTISRDNAKNTVYLQMNSLKPEDTAVYYCAVENVHYRPFWYWGQGTQVTVSS

SEQ ID NO: 2847 - protein, 122 aa, Artificial Sequence
  Chemically Synthesized
QVQLQESGGGLVQAGGSLRLSCAASGYISVDTYMGWYRQAPGKEREFVATIGLGGNTYYADSVKGRFTISRDNAKNTVYLQMNSLKPEDTAVYYCAAYFDVIIDTLKSHAYWGQGTQVTVSS

SEQ ID NO: 2848 - protein, 118 aa, Artificial Sequence
  Chemically Synthesized
QVQLQESGGGLVQAGGSLRLSCAASGNISWVHSMGWYRQAPGKEREFVAAIGYGASTYYADSVKGRFTISRDNAKNTVYLQMNSLKPEDTAVYYCAVGVYWIDWHLYWGQGTQVTVSS

SEQ ID NO: 2849 - protein, 116 aa, Artificial Sequence
  Chemically Synthesized
QVQLQESGGGLVQAGGSLRLSCAASGTISDNGGMGWYRQAPGKEREFVAAIDLGSSTYADSVKGRFTISRDNAKNTVYLQMNSLKPEDTAVYYCAVDIDYATNLYWGQGTQVTVSS

SEQ ID NO: 2850 - protein, 118 aa, Artificial Sequence
  Chemically Synthesized
QVQLQESGGGLVQAGGSLRLSCAASGNIFPVDDMGWYRQAPGKEREFVASIDPGANTNYADSVKGRFTISRDNAKNTVYLQMNSLKPEDTAVYYCAVYPYRDRDHPYWGQGTQVTVSS

SEQ ID NO: 2851 - protein, 122 aa, Artificial Sequence
  Chemically Synthesized
QVQLQESGGGLVQAGGSLRLSCAASGNIFGSHFMGWYRQAPGKEREFVAGINFGANTNYADSVKGRFTISRDNAKNTVYLQMNSLKPEDTAVYYCAVPRYNERYIYDIHYYWGQGTQVTVSS

SEQ ID NO: 2852 - protein, 126 aa, Artificial Sequence
  Chemically Synthesized
QVQLQESGGGLVQAGGSLRLSCAASGSISDDQTMGWYRQAPGKEREFVASITRGGTTYYADSVKGRFTISRDNAKNTVYLQMNSLKPEDTAVYYCAVDGVISASRHYATYYRLSYWGQGTQVTVSS

SEQ ID NO: 2853 - protein, 117 aa, Artificial Sequence
  Chemically Synthesized
QVQLQESGGGLVQAGGSLRLSCAASGTILTVLMGWYRQAPGKERELVAAIDLGGNTYYADSVKGRFTISRDNAKNTVYLQMNSLKPEDTAVYYCAAANVWTPRLTYWGQGTQVTVSS

SEQ ID NO: 2854 - protein, 126 aa, Artificial Sequence
  Chemically Synthesized
QVQLQESGGGLVQAGGSLRLSCAASGTISPQSVMGWYRQAPGKEREFVAAISNGTNTNYADSVKGRFTISRDNAKNTVYLQMNSLKPEDTAVYYCAADARDIVGDLTAYDFILVYWGQGTQVTVSS

SEQ ID NO: 2855 - protein, 116 aa, Artificial Sequence
  Chemically Synthesized
QVQLQESGGGLVQAGGSLRLSCAASGTISYFMGWYRQAPGKERELVATIGSGSNTNYADSVKGRFTISRDNAKNTVYLQMNSLKPEDTAVYYCAVIYVDYLQLPYWGQGTQVTVSS

SEQ ID NO: 2856 - protein, 118 aa, Artificial Sequence
  Chemically Synthesized
QVQLQESGGGLVQAGGSLRLSCAASGYISHPRYMGWYRQAPGKERELVATITRGSTTYYADSVKGRFTISRDNAKNTVYLQMNSLKPEDTAVYYCAASRVARYWYAYWGQGTQVTVSS

SEQ ID NO: 2857 - protein, 122 aa, Artificial Sequence
  Chemically Synthesized
QVQLQESGGGLVQAGGSLRLSCAASGTISGYVDMGWYRQAPGKERELVAGITWGTSTNYADSVKGRFTISRDNAKNTVYLQMNSLKPEDTAVYYCAAPATEPFQFYDGHGYWGQGTQVTVSS

SEQ ID NO: 2858 - protein, 122 aa, Artificial Sequence
  Chemically Synthesized
QVQLQESGGGLVQAGGSLRLSCAASGSIFTDVTMGWYRQAPGKERELVAAISRGGTTYYADSVKGRFTISRDNAKNTVYLQMNSLKPEDTAVYYCAAADVNIGYAYAYLWYWGQGTQVTVSS

SEQ ID NO: 2859 - protein, 121 aa, Artificial Sequence
  Chemically Synthesized
QVQLQESGGGLVQAGGSLRLSCAASGNISRSYAMGWYRQAPGKEREFVAAIDQGAITYADSVKGRFTISRDNAKNTVYLQMNSLKPEDTAVYYCAAIVYYGYPGYLWYDYWGQGTQVTVSS

SEQ ID NO: 2860 - protein, 126 aa, Artificial Sequence
  Chemically Synthesized
QVQLQESGGGLVQAGGSLRLSCAASGTISVPPTMGWYRQAPGKERELVAAIDYGAITYYADSVKGRFTISRDNAKNTVYLQMNSLKPEDTAVYYCAAPADGGSQIRRRAHDAHHYWGQGTQVTVSS

SEQ ID NO: 2861 - protein, 122 aa, Artificial Sequence
  Chemically Synthesized
QVQLQESGGGLVQAGGSLRLSCAASGNISGYNYMGWYRQAPGKEREFVASIGYGGSTYYADSVKGRFTISRDNAKNTVYLQMNSLKPEDTAVYYCAAFPWDWGPWFNWFRYWGQGTQVTVSS

SEQ ID NO: 2862 - protein, 118 aa, Artificial Sequence
  Chemically Synthesized
QVQLQESGGGLVQAGGSLRLSCAASGSIFYLAYMGWYRQAPGKEREFVASINYGSNTYYADSVKGRFTISRDNAKNTVYLQMNSLKPEDTAVYYCAVIRRKYRSLAYWGQGTQVTVSS

SEQ ID NO: 2863 - protein, 118 aa, Artificial Sequence
  Chemically Synthesized
QVQLQESGGGLVQAGGSLRLSCAASGTIFADTVMGWYRQAPGKERELVAGIGDGTTTYYADSVKGRFTISRDNAKNTVYLQMNSLKPEDTAVYYCAAQSAVRFNLRYWGQGTQVTVSS

SEQ ID NO: 2864 - protein, 118 aa, Artificial Sequence
  Chemically Synthesized
QVQLQESGGGLVQAGGSLRLSCAASGSIFLILIMGWYRQAPGKEREFVAGITPGGTTNYADSVKGRFTISRDNAKNTVYLQMNSLKPEDTAVYYCAAYDYDGGDYTYWGQGTQVTVSS

SEQ ID NO: 2865 - protein, 122 aa, Artificial Sequence
  Chemically Synthesized
QVQLQESGGGLVQAGGSLRLSCAASGTISGTYFMGWYRQAPGKERELVAGINYGSITNYADSVKGRFTISRDNAKNTVYLQMNSLKPEDTAVYYCAALYGLAFIDDYSHDYWGQGTQVTVSS

SEQ ID NO: 2866 - protein, 118 aa, Artificial Sequence
  Chemically Synthesized
QVQLQESGGGLVQAGGSLRLSCAASGTISDKSYMGWYRQAPGKEREFVASIDSGTTTYYADSVKGRFTISRDNAKNTVYLQMNSLKPEDTAVYYCAASTAGNEPFRYWGQGTQVTVSS

SEQ ID NO: 2867 - protein, 118 aa, Artificial Sequence
  Chemically Synthesized
QVQLQESGGGLVQAGGSLRLSCAASGYIFDEPSMGWYRQAPGKERELVATIGFGASTNYADSVKGRFTISRDNAKNTVYLQMNSLKPEDTAVYYCAAKSGRSPHLDYWGQGTQVTVSS

SEQ ID NO: 2868 - protein, 122 aa, Artificial Sequence
  Chemically Synthesized
QVQLQESGGGLVQAGGSLRLSCAASGNISVTSAMGWYRQAPGKERELVAAIASGGNTYYADSVKGRFTISRDNAKNTVYLQMNSLKPEDTAVYYCAAGRIAEYLDAITFDYWGQGTQVTVSS

SEQ ID NO: 2869 - protein, 118 aa, Artificial Sequence
  Chemically Synthesized
QVQLQESGGGLVQAGGSLRLSCAASGTIFLDSGMGWYRQAPGKERELVASITRGAITYYADSVKGRFTISRDNAKNTVYLQMNSLKPEDTAVYYCAAYSEIYRDLLYWGQGTQVTVSS

SEQ ID NO: 2870 - protein, 116 aa, Artificial Sequence
  Chemically Synthesized
QVQLQESGGGLVQAGGSLRLSCAASGTFLVTLMGWYRQAPGKEREFVAGITAGTTTYYADSVKGRFTISRDNAKNTVYLQMNSLKPEDTAVYYCAVEGIGSALLYWGQGTQVTVSS

SEQ ID NO: 2871 - protein, 118 aa, Artificial Sequence
  Chemically Synthesized
QVQLQESGGGLVQAGGSLRLSCAASGYIFSQRFMGWYRQAPGKERELVASIGWGSSTYYADSVKGRFTISRDNAKNTVYLQMNSLKPEDTAVYYCAVWSGKRIRHVYWGQGTQVTVSS

SEQ ID NO: 2872 - protein, 121 aa, Artificial Sequence
  Chemically Synthesized
QVQLQESGGGLVQAGGSLRLSCAASGYIFDFSMGWYRQAPGKERELVAGIARGASTNYADSVKGRFTISRDNAKNTVYLQMNSLKPEDTAVYYCAAHSWQLEPRYTIHQYWGQGTQVTVSS

SEQ ID NO: 2873 - protein, 122 aa, Artificial Sequence
  Chemically Synthesized
QVQLQESGGGLVQAGGSLRLSCAASGNISTTADMGWYRQAPGKERELVAGISYGTTTNYADSVKGRFTISRDNAKNTVYLQMNSLKPEDTAVYYCAVESYVPVAYRGQHAYWGQGTQVTVSS

SEQ ID NO: 2874 - protein, 118 aa, Artificial Sequence
  Chemically Synthesized
QVQLQESGGGLVQAGGSLRLSCAASGYIFILQYMGWYRQAPGKERELVAGIARGGNTNYADSVKGRFTISRDNAKNTVYLQMNSLKPEDTAVYYCAVATLPYEYYYYWGQGTQVTVSS

SEQ ID NO: 2875 - protein, 126 aa, Artificial Sequence
  Chemically Synthesized
QVQLQESGGGLVQAGGSLRLSCAASGTIFGRRGMGWYRQAPGKEREFVASINGGSTTNYADSVKGRFTISRDNAKNTVYLQMNSLKPEDTAVYYCAAQPVLKLGAWYSRFAQHRYWGQGTQVTVSS

SEQ ID NO: 2876 - protein, 122 aa, Artificial Sequence
  Chemically Synthesized
QVQLQESGGGLVQAGGSLRLSCAASGNISFRVAMGWYRQAPGKEREFVASIDYGASTNYADSVKGRFTISRDNAKNTVYLQMNSLKPEDTAVYYCAVFDDTKRREYANHYYWGQGTQVTVSS

SEQ ID NO: 2877 - protein, 118 aa, Artificial Sequence
  Chemically Synthesized
QVQLQESGGGLVQAGGSLRLSCAASGNIFSPRYMGWYRQAPGKEREFVAAIARGGTTNYADSVKGRFTISRDNAKNTVYLQMNSLKPEDTAVYYCAAYPSIRFSHWYWGQGTQVTVSS

SEQ ID NO: 2878 - protein, 122 aa, Artificial Sequence
  Chemically Synthesized
QVQLQESGGGLVQAGGSLRLSCAASGYIFQGDTMGWYRQAPGKERELVAAITAGTNTNYADSVKGRFTISRDNAKNTVYLQMNSLKPEDTAVYYCAARDAFFSAATRQYTYWGQGTQVTVSS

SEQ ID NO: 2879 - protein, 118 aa, Artificial Sequence
  Chemically Synthesized
QVQLQESGGGLVQAGGSLRLSCAASGSIFYDYYMGWYRQAPGKERELVAAINTGGITYYADSVKGRFTISRDNAKNTVYLQMNSLKPEDTAVYYCAVPDYSDQYYHYWGQGTQVTVSS

SEQ ID NO: 2880 - protein, 126 aa, Artificial Sequence
  Chemically Synthesized
QVQLQESGGGLVQAGGSLRLSCAASGTIFDTQLMGWYRQAPGKERELVAAIAYGAITYYADSVKGRFTISRDNAKNTVYLQMNSLKPEDTAVYYCAASDGYSGSPYRNSLGYHAYWGQGTQVTVSS

SEQ ID NO: 2881 - protein, 118 aa, Artificial Sequence
  Chemically Synthesized
QVQLQESGGGLVQAGGSLRLSCAASGYIFPPAGMGWYRQAPGKERELVAAIAHGTSTYYADSVKGRFTISRDNAKNTVYLQMNSLKPEDTAVYYCAVRYPNAWRYRYWGQGTQVTVSS

SEQ ID NO: 2882 - protein, 118 aa, Artificial Sequence
  Chemically Synthesized
QVQLQESGGGLVQAGGSLRLSCAASGSIFFVWSMGWYRQAPGKERELVASISWGGNTNYADSVKGRFTISRDNAKNTVYLQMNSLKPEDTAVYYCAVRGIGWGYLRYWGQGTQVTVSS

SEQ ID NO: 2883 - protein, 122 aa, Artificial Sequence
  Chemically Synthesized
QVQLQESGGGLVQAGGSLRLSCAASGTISQTDIMGWYRQAPGKERELVASIAYGAITYYADSVKGRFTISRDNAKNTVYLQMNSLKPEDTAVYYCAVYDDSHDIPEANLRYWGQGTQVTVSS

SEQ ID NO: 2884 - protein, 118 aa, Artificial Sequence
  Chemically Synthesized
QVQLQESGGGLVQAGGSLRLSCAASGYIFAVNYMGWYRQAPGKEREFVAGIGVGAITNYADSVKGRFTISRDNAKNTVYLQMNSLKPEDTAVYYCAAQGIIAGWFLYWGQGTQVTVSS

SEQ ID NO: 2885 - protein, 118 aa, Artificial Sequence
  Chemically Synthesized
QVQLQESGGGLVQAGGSLRLSCAASGSISYDYVMGWYRQAPGKEREFVAGIGAGTNTNYADSVKGRFTISRDNAKNTVYLQMNSLKPEDTAVYYCAVYYDVGDVYRYWGQGTQVTVSS

SEQ ID NO: 2886 - protein, 118 aa, Artificial Sequence
  Chemically Synthesized
QVQLQESGGGLVQAGGSLRLSCAASGSISTIRRMGWYRQAPGKEREFVAAIAFGANTYYADSVKGRFTISRDNAKNTVYLQMNSLKPEDTAVYYCAVTYSRGKRHSYWGQGTQVTVSS

SEQ ID NO: 2887 - protein, 122 aa, Artificial Sequence
  Chemically Synthesized
QVQLQESGGGLVQAGGSLRLSCAASGYIFWPYPMGWYRQAPGKEREFVASIGYGANTYYADSVKGRFTISRDNAKNTVYLQMNSLKPEDTAVYYCAVSRRRNAWYIGRFNYWGQGTQVTVSS

SEQ ID NO: 2888 - protein, 126 aa, Artificial Sequence
  Chemically Synthesized
QVQLQESGGGLVQAGGSLRLSCAASGSIFAPRRMGWYRQAPGKEREFVAAIAIGGTTYYADSVKGRFTISRDNAKNTVYLQMNSLKPEDTAVYYCAASPYDAEDYADTYSYRLQYWGQGTQVTVSS

SEQ ID NO: 2889 - protein, 118 aa, Artificial Sequence
  Chemically Synthesized
QVQLQESGGGLVQAGGSLRLSCAASGNISASPHMGWYRQAPGKEREFVASIARGANTYYADSVKGRFTISRDNAKNTVYLQMNSLKPEDTAVYYCAVRRRSQWYLDYWGQGTQVTVSS

SEQ ID NO: 2890 - protein, 118 aa, Artificial Sequence
  Chemically Synthesized
QVQLQESGGGLVQAGGSLRLSCAASGYIFWYYKMGWYRQAPGKERELVASIGPGSSTYYADSVKGRFTISRDNAKNTVYLQMNSLKPEDTAVYYCAAFTDRYVRFRYWGQGTQVTVSS

SEQ ID NO: 2891 - protein, 122 aa, Artificial Sequence
  Chemically Synthesized
QVQLQESGGGLVQAGGSLRLSCAASGYISTLTMGWYRQAPGKEREFVATISSGATTNYADSVKGRFTISRDNAKNTVYLQMNSLKPEDTAVYYCAAYDYSLTVTVSTCSMYWGQGTQVTVSS

SEQ ID NO: 2892 - protein, 122 aa, Artificial Sequence
  Chemically Synthesized
QVQLQESGGGLVQAGGSLRLSCAASGYISYAYYMGWYRQAPGKEREFVATINSGGATTNYADSVKGRFTISRDNAKNTVYLQMNSLKPEDTAVYYCAVNFTAEAYNAYDLYWGQGTQVTVSS

SEQ ID NO: 2893 - protein, 116 aa, Artificial Sequence
  Chemically Synthesized
QVQLQESGGGLVQAGGSLRLSCAASGSISDTYYMGWYRQAPGKERELVASIGNGATTNYADSVKGRFTISRDNAKNTVYLQMNSLKPEDTAVYYCAATGDYVLYYWGQGTQVTVSS

SEQ ID NO: 2894 - protein, 117 aa, Artificial Sequence
  Chemically Synthesized
QVQLQESGGGLVQAGGSLRLSCAASGTIFQLGKMGWYRQAPGKERELVAAINYGGNTNYADSVKGRFTISRDNAKNTVYLQMNSLKPEDTAVYYCAVTYGETPFIYWGQGTQVTVSS

SEQ ID NO: 2895 - protein, 118 aa, Artificial Sequence
  Chemically Synthesized
QVQLQESGGGLVQAGGSLRLSCAASGTISDADDMGWYRQAPGKERELVAAIAQGTITYYADSVKGRFTISRDNAKNTVYLQMNSLKPEDTAVYYCAVYLHVYLPYGYWGQGTQVTVSS

SEQ ID NO: 2896 - protein, 120 aa, Artificial Sequence
  Chemically Synthesized
QVQLQESGGGLVQAGGSLRLSCAASGYILNLVMGWYRQAPGKEREFVASIDAGANTYYADSVKGRFTISRDNAKNTVYLQMNSLKPEDTAVYYCAAPGDQTNGGLHESYWGQGTQVTVSS

SEQ ID NO: 2897 - protein, 117 aa, Artificial Sequence
  Chemically Synthesized
QVQLQESGGGLVQAGGSLRLSCAASGTISYYQAMGWYRQAPGKEREFVATIGNGGITNYADSVKGRFTISRDNAKNTVYLQMNSLKPEDTAVYYCAAGSLLSLSIYWGQGTQVTVSS

SEQ ID NO: 2898 - protein, 118 aa, Artificial Sequence
  Chemically Synthesized
QVQLQESGGGLVQAGGSLRLSCAASGTISGYVDMGWYRQAPGKEREFVATIDYGSTTNYADSVKGRFTISRDNAKNTVYLQMNSLKPEDTAVYYCAVDFNTEDDLDYWGQGTQVTVSS

SEQ ID NO: 2899 - protein, 125 aa, Artificial Sequence
  Chemically Synthesized
QVQLQESGGGLVQAGGSLRLSCAASGSIFPKTDMGWYRQAPGKERELVATIGYGATTNYADSVKGRFTISRDNAKNTVYLQMNSLKPEDTAVYYCAVPRYKTTAGYQSVRSSMYWGQGTQVTVSS

SEQ ID NO: 2900 - protein, 117 aa, Artificial Sequence
  Chemically Synthesized
QVQLQESGGGLVQAGGSLRLSCAASGYIFWYTEMGWYRQAPGKEREFVASITRGSITNYADSVKGRFTISRDNAKNTVYLQMNSLKPEDTAVYYCAVDVHGGGHSYWGQGTQVTVSS

SEQ ID NO: 2901 - protein, 122 aa, Artificial Sequence
  Chemically Synthesized
QVQLQESGGGLVQAGGSLRLSCAASGTIFLVYVMGWYRQAPGKERELVAGISYGAITNYADSVKGRFTISRDNAKNTVYLQMNSLKPEDTAVYYCAVGHPETVDGVRDYHYWGQGTQVTVSS

SEQ ID NO: 2902 - protein, 117 aa, Artificial Sequence
  Chemically Synthesized
QVQLQESGGGLVQAGGSLRLSCAASGTIFPSGYMGWYRQAPGKEREFVAAISRGTITNYADSVKGRFTISRDNAKNTVYLQMNSLKPEDTAVYYCAVVGDTDVFYYWGQGTQVTVSS

SEQ ID NO: 2903 - protein, 126 aa, Artificial Sequence
  Chemically Synthesized
QVQLQESGGGLVQAGGSLRLSCAASGSIFPYSRMGWYRQAPGKEREFVATITTGSSTNYADSVKGRFTISRDNAKNTVYLQMNSLKPEDTAVYYCAVYHYHDHRQYGYYVNTHAYWGQGTQVTVSS

SEQ ID NO: 2904 - protein, 118 aa, Artificial Sequence
  Chemically Synthesized
QVQLQESGGGLVQAGGSLRLSCAASGTIFFPIYMGWYRQAPGKERELVASISPGGITYYADSVKGRFTISRDNAKNTVYLQMNSLKPEDTAVYYCAVTASRYDGYYYWGQGTQVTVSS

SEQ ID NO: 2905 - protein, 122 aa, Artificial Sequence
  Chemically Synthesized
QVQLQESGGGLVQAGGSLRLSCAASGTISWYVDMGWYRQAPGKERELVAAITKGGITYYADSVKGRFTISRDNAKNTVYLQMNSLKPEDTAVYYCAAYIGVNDGYNISHYYWGQGTQVTVSS

SEQ ID NO: 2906 - protein, 126 aa, Artificial Sequence
  Chemically Synthesized
QVQLQESGGGLVQAGGSLRLSCAASGNISYNLRMGWYRQAPGKERELVAGIDDGTTTNYADSVKGRFTISRDNAKNTVYLQMNSLKPEDTAVYYCAAPYYFWQLRGTYAETYYYYWGQGTQVTVSS

SEQ ID NO: 2907 - protein, 121 aa, Artificial Sequence
  Chemically Synthesized
QVQLQESGGGLVQAGGSLRLSCAASGTISPPSFMGWYRQAPGKEREFVAGIAQGATTNYADSVKGRFTISRDNAKNTVYLQMNSLKPEDTAVYYCAVGSDSDLDSLGSIYWGQGTQVTVSS

SEQ ID NO: 2908 - protein, 118 aa, Artificial Sequence
  Chemically Synthesized
QVQLQESGGGLVQAGGSLRLSCAASGNISWFENMGWYRQAPGKERELVASIDSGSSTYYADSVKGRFTISRDNAKNTVYLQMNSLKPEDTAVYYCAAARYYVYVFDYWGQGTQVTVSS

SEQ ID NO: 2909 - protein, 116 aa, Artificial Sequence
  Chemically Synthesized
QVQLQESGGGLVQAGGSLRLSCAASGYFSGYCMGWYRQAPGKERELVATIILVLVPYADSVKGRFTISRDNAKNTVYLQMNSLKPEDTAVYYCAAEHGDYDYFSYWGQGTQVTVSS

SEQ ID NO: 2910 - protein, 122 aa, Artificial Sequence
  Chemically Synthesized
QVQLQESGGGLVQAGGSLRLSCAASGYISRSGTMGWYRQAPGKEREFVATIAFGSSTYYADSVKGRFTISRDNAKNTVYLQMNSLKPEDTAVYYCAAPGQNYVDTEGDHRYWGQGTQVTVSS

SEQ ID NO: 2911 - protein, 116 aa, Artificial Sequence
  Chemically Synthesized
QVQLQESGGGLVQAGGSLRLSCAASGYILTLMGWYRQAPGKERELVAAIDNGSITYYADSVKGRFTISRDNAKNTVYLQMNSLKPEDTAVYYCAAHYHYPDYYAYWGQGTQVTVSS

SEQ ID NO: 2912 - protein, 122 aa, Artificial Sequence
  Chemically Synthesized
QVQLQESGGGLVQAGGSLRLSCAASGTISPLDYMGWYRQAPGKERELVAGIDLGTNTNYADSVKGRFTISRDNAKNTVYLQMNSLKPEDTAVYYCAVYDTVEIDTALRHPYWGQGTQVTVSS

SEQ ID NO: 2913 - protein, 115 aa, Artificial Sequence
  Chemically Synthesized
QVQLQESGGGLVQAGGSLRLSCAASGTIFDVLHMGWYRQAPGKERELVAAITYGGSTNYADSVKGRFTISRDNAKNTVYLQMNSLKPEDTAVYYCAAGESIHAYWGQGTQVTVSS

SEQ ID NO: 2914 - protein, 126 aa, Artificial Sequence
  Chemically Synthesized
QVQLQESGGGLVQAGGSLRLSCAASGYIFDRNSMGWYRQAPGKEREFVAAIDQGGITYYADSVKGRFTISRDNAKNTVYLQMNSLKPEDTAVYYCAATPSYLGSKDAYAGVELIYWGQGTQVTVSS

SEQ ID NO: 2915 - protein, 114 aa, Artificial Sequence
  Chemically Synthesized
QVQLQESGGGLVQAGGSLRLSCAASGTISGVRRMGWYRQAPGKEREFVAAIDVGSITYYADSVKGRFTISRDNAKNTVYLQMNSLKPEDTAVYYCAWLDDYVYWGQGTQVTVSS

SEQ ID NO: 2916 - protein, 117 aa, Artificial Sequence
  Chemically Synthesized
QVQLQESGGGLVQAGGSLRLSCAASGTISTVVMGWYRQAPGKERELVAGIAYGSNTYYADSVKGRFTISRDNAKNTVYLQMNSLKPEDTAVYYCAAQETQLTTHHYWGQGTQVTVSS

SEQ ID NO: 2917 - protein, 118 aa, Artificial Sequence
  Chemically Synthesized
QVQLQESGGGLVQAGGSLRLSCAASGNISGWRIMGWYRQAPGKEREFVASIAYGSNTYYADSVKGRFTISRDNAKNTVYLQMNSLKPEDTAVYYCAVVQRYRTGLLYWGQGTQVTVSS

SEQ ID NO: 2918 - protein, 118 aa, Artificial Sequence
  Chemically Synthesized
QVQLQESGGGLVQAGGSLRLSCAASGNIFDVPDMGWYRQAPGKEREFVAGITYGSSTNYADSVKGRFTISRDNAKNTVYLQMNSLKPEDTAVYYCAAIYGVQLSFVYWGQGTQVTVSS

SEQ ID NO: 2919 - protein, 118 aa, Artificial Sequence
  Chemically Synthesized
QVQLQESGGGLVQAGGSLRLSCAASGTIFVYVYMGWYRQAPGKERELVAGIAYGGTTNYADSVKGRFTISRDNAKNTVYLQMNSLKPEDTAVYYCAAGVGGSYPFGYWGQGTQVTVSS

SEQ ID NO: 2920 - protein, 118 aa, Artificial Sequence
  Chemically Synthesized
QVQLQESGGGLVQAGGSLRLSCAASGYIFANYDMGWYRQAPGKERELVASIGYGATTYYADSVKGRFTISRDNAKNTVYLQMNSLKPEDTAVYYCAVVIPTRVHLGYWGQGTQVTVSS

SEQ ID NO: 2921 - protein, 122 aa, Artificial Sequence
  Chemically Synthesized
QVQLQESGGGLVQAGGSLRLSCAASGTISRGAYMGWYRQAPGKEREFVASIGRGSTTYYADSVKGRFTISRDNAKNTVYLQMNSLKPEDTAVYYCAADIDADGDASNQLYYWGQGTQVTVSS

SEQ ID NO: 2922 - protein, 126 aa, Artificial Sequence
  Chemically Synthesized
QVQLQESGGGLVQAGGSLRLSCAASGNISLWVDMGWYRQAPGKERELVAAITHGTITNYADSVKGRFTISRDNAKNTVYLQMNSLKPEDTAVYYCAAHSYYANYVVDLGEYPHAYWGQGTQVTVSS

SEQ ID NO: 2923 - protein, 118 aa, Artificial Sequence
  Chemically Synthesized
QVQLQESGGGLVQAGGSLRLSCAASGTIFPSPDMGWYRQAPGKEREFVASITAGGTTNYADSVKGRFTISRDNAKNTVYLQMNSLKPEDTAVYYCAVQDLPYQGLLYWGQGTQVTVSS

SEQ ID NO: 2924 - protein, 118 aa, Artificial Sequence
  Chemically Synthesized
QVQLQESGGGLVQAGGSLRLSCAASGNIFWPSIMGWYRQAPGKERELVAGIASGGITYYADSVKGRFTISRDNAKNTVYLQMNSLKPEDTAVYYCAVGGDAYVRHPYWGQGTQVTVSS

SEQ ID NO: 2925 - protein, 118 aa, Artificial Sequence
  Chemically Synthesized
QVQLQESGGGLVQAGGSLRLSCAASGYISDYESMGWYRQAPGKEREFVATIAGGGSTNYADSVKGRFTISRDNAKNTVYLQMNSLKPEDTAVYYCAARSRVSATHAYWGQGTQVTVSS

SEQ ID NO: 2926 - protein, 119 aa, Artificial Sequence
  Chemically Synthesized
QVQLQESGGGLVQAGGSLRLSCAASGSISDSNGMGWYRQAPGKERERINSGANTYYADSVKGRFTISRDNAKNTVYLQMNSLKPEDTAVYYCAVWGGNPGYLSRRHAYWGQGTQVTVSS

SEQ ID NO: 2927 - protein, 118 aa, Artificial Sequence
  Chemically Synthesized
QVQLQESGGGLVQAGGSLRLSCAASGTISYRYYMGWYRQAPGKERELVAAITYGGSTYYADSVKGRFTISRDNAKNTVYLQMNSLKPEDTAVYYCAANYTFTYIHRYWGQGTQVTVSS

SEQ ID NO: 2928 - protein, 118 aa, Artificial Sequence
  Chemically Synthesized
QVQLQESGGGLVQAGGSLRLSCAASGTIFGSSRMGWYRQAPGKEREFVASIGSGTTTNYADSVKGRFTISRDNAKNTVYLQMNSLKPEDTAVYYCAVGDAVQRSYGYWGQGTQVTVSS

SEQ ID NO: 2929 - protein, 122 aa, Artificial Sequence
  Chemically Synthesized
QVQLQESGGGLVQAGGSLRLSCAASGNIFPEVAMGWYRQAPGKEREFVAAINYGTNTYYADSVKGRFTISRDNAKNTVYLQMNSLKPEDTAVYYCAAVVYRAHGGRYRLDYWGQGTQVTVSS

SEQ ID NO: 2930 - protein, 118 aa, Artificial Sequence
  Chemically Synthesized
QVQLQESGGGLVQAGGSLRLSCAASGYIFYDNRMGWYRQAPGKERELVATITVGATTNYADSVKGRFTISRDNAKNTVYLQMNSLKPEDTAVYYCAVWRIDYNHYAYWGQGTQVTVSS

SEQ ID NO: 2931 - protein, 118 aa, Artificial Sequence
  Chemically Synthesized
QVQLQESGGGLVQAGGSLRLSCAASGNIFGSTIMGWYRQAPGKEREFVAAINYGSSTNYADSVKGRFTISRDNAKNTVYLQMNSLKPEDTAVYYCAAVRRYPPYYGYWGQGTQVTVSS

SEQ ID NO: 2932 - protein, 126 aa, Artificial Sequence
  Chemically Synthesized
QVQLQESGGGLVQAGGSLRLSCAASGYISLQDDMGWYRQAPGKERELVAAIDEGASTYYADSVKGRFTISRDNAKNTVYLQMNSLKPEDTAVYYCAVWSDDNNYYYAYYHYPHLYWGQGTQVTVSS

SEQ ID NO: 2933 - protein, 118 aa, Artificial Sequence
  Chemically Synthesized
QVQLQESGGGLVQAGGSLRLSCAASGSIFNWPTMGWYRQAPGKERELVAAITYGSTTNYADSVKGRFTISRDNAKNTVYLQMNSLKPEDTAVYYCAAYYQSLDYHLYWGQGTQVTVSS

SEQ ID NO: 2934 - protein, 122 aa, Artificial Sequence
  Chemically Synthesized
QVQLQESGGGLVQAGGSLRLSCAASGNISGGLYMGWYRQAPGKEREFVASIGGGTSTNYADSVKGRFTISRDNAKNTVYLQMNSLKPEDTAVYYCAAVGAGNTSYGYWHGYWGQGTQVTVSS

SEQ ID NO: 2935 - protein, 121 aa, Artificial Sequence
  Chemically Synthesized
QVQLQESGGGLVQAGGSLRLSCAASGNISKYRSMGWYRQAPGKERELVATIGRGTTTYYADSVKGRFTISRDNAKNTVYLQMNSLKPEDTAVYYCAAAYNHRWTAQAHVYWGQGTQVTVSS

SEQ ID NO: 2936 - protein, 118 aa, Artificial Sequence
  Chemically Synthesized
QVQLQESGGGLVQAGGSLRLSCAASGTISDVYRMGWYRQAPGKEREFVAAIDVGGNTNYADSVKGRFTISRDNAKNTVYLQMNSLKPEDTAVYYCAVVTVARRYHHYWGQGTQVTVSS

SEQ ID NO: 2937 - protein, 115 aa, Artificial Sequence
  Chemically Synthesized
QVQLQESGGGLVQAGGSLRLSCAASGNISPSTNMGWYRQAPGKERELVATIDYGTTTYYADSVKGRFTISRDNAKNTVYLQMNSLKPEDTAVYYCAAYRYWLAYWGQGTQVTVSS

SEQ ID NO: 2938 - protein, 125 aa, Artificial Sequence
  Chemically Synthesized
QVQLQESGGGLVQAGGSLRLSCAASGTISTYVIMGWYRQAPGKERELVAAIDYGSTTYYADSVKGRFTISRDNAKNTVYLQMNSLKPEDTAVYYCAANNPYEGSGRRYGAVLVYWGQGTQVTVSS

SEQ ID NO: 2939 - protein, 118 aa, Artificial Sequence
  Chemically Synthesized
QVQLQESGGGLVQAGGSLRLSCAASGTISVSRVMGWYRQAPGKEREFVAAIGYGATTNYADSVKGRFTISRDNAKNTVYLQMNSLKPEDTAVYYCAALVYRRNYLYYWGQGTQVTVSS

SEQ ID NO: 2940 - protein, 112 aa, Artificial Sequence
  Chemically Synthesized
QVQLQESGGGLVQAGGSLRLSCAASGSYMGWYRQAPGKERELVATLLLVVLPYADSVKGRFTISRDNAKNTVYLQMNSLKPEDTAVYYCAAYDNFPNAHVYWGQGTQVTVSS

SEQ ID NO: 2941 - protein, 122 aa, Artificial Sequence
  Chemically Synthesized
QVQLQESGGGLVQAGGSLRLSCAASGNISFVREMGWYRQAPGKEREFVAAINYGANTYYADSVKGRFTISRDNAKNTVYLQMNSLKPEDTAVYYCAVDPRPYVPYSDYYDYWGQGTQVTVSS

SEQ ID NO: 2942 - protein, 118 aa, Artificial Sequence
  Chemically Synthesized
QVQLQESGGGLVQAGGSLRLSCAASGTISRATYMGWYRQAPGKERELVAAIDLGSNTYYADSVKGRFTISRDNAKNTVYLQMNSLKPEDTAVYYCAVYFVHTYVHVYWGQGTQVTVSS

SEQ ID NO: 2943 - protein, 121 aa, Artificial Sequence
  Chemically Synthesized
QVQLQESGGGLVQAGGSLRLSCAASGNIFLYEDMGWYRQAPGKEREFVAGISRGTTTNYADSVKGRFTISRDNAKNTVYLQMNSLKPEDTAVYYCAARSRTLLLTTTTIYWGQGTQVTVSS

SEQ ID NO: 2944 - protein, 117 aa, Artificial Sequence
  Chemically Synthesized
QVQLQESGGGLVQAGGSLRLSCAASGTISYWDIMGWYRQAPGKERELVAGITYGANTYYADSVKGRFTISRDNAKNTVYLQMNSLKPEDTAVYYCAVLSPVYRSSYWGQGTQVTVSS

SEQ ID NO: 2945 - protein, 118 aa, Artificial Sequence
  Chemically Synthesized
QVQLQESGGGLVQAGGSLRLSCAASGSISVIRYMGWYRQAPGKEREFVAAIDYGANTNYADSVKGRFTISRDNAKNTVYLQMNSLKPEDTAVYYCAVIVDTTDWHSYWGQGTQVTVSS

SEQ ID NO: 2946 - protein, 126 aa, Artificial Sequence
  Chemically Synthesized
QVQLQESGGGLVQAGGSLRLSCAASGTIFYRLGMGWYRQAPGKERELVASIDAGGTTYYADSVKGRFTISRDNAKNTVYLQMNSLKPEDTAVYYCAADDDYGYATYWIDDVDLYYWGQGTQVTVSS

SEQ ID NO: 2947 - protein, 117 aa, Artificial Sequence
  Chemically Synthesized
QVQLQESGGGLVQAGGSLRLSCAASGTISYDSYMGWYRQAPGKERELVASIAGGTSTNYADSVKGRFTISRDNAKNTVYLQMNSLKPEDTAVYYCAVGSTTTRLIYWGQGTQVTVSS

SEQ ID NO: 2948 - protein, 125 aa, Artificial Sequence
  Chemically Synthesized
QVQLQESGGGLVQAGGSLRLSCAASGNISRGDDMGWYRQAPGKEREFVAAISGGTTTNYADSVKGRFTISRDNAKNTVYLQMNSLKPEDTAVYYCAVGDSSRTTSLTRLTLNIYWGQGTQVTVSS

SEQ ID NO: 2949 - protein, 118 aa, Artificial Sequence
  Chemically Synthesized
QVQLQESGGGLVQAGGSLRLSCAASGNISYPRWMGWYRQAPGKERELVASIGRGTSTNYADSVKGRFTISRDNAKNTVYLQMNSLKPEDTAVYYCAANRYYQRAFYYWGQGTQVTVSS

SEQ ID NO: 2950 - protein, 118 aa, Artificial Sequence
  Chemically Synthesized
QVQLQESGGGLVQAGGSLRLSCAASGNISGYILMGWYRQAPGKEREFVAAIDYGTSTNYADSVKGRFTISRDNAKNTVYLQMNSLKPEDTAVYYCAAVNRWYRWYYYWGQGTQVTVSS

SEQ ID NO: 2951 - protein, 118 aa, Artificial Sequence
  Chemically Synthesized
QVQLQESGGGLVQAGGSLRLSCAASGSIFRGRGMGWYRQAPGKERELVAAISTGASTNYADSVKGRFTISRDNAKNTVYLQMNSLKPEDTAVYYCAVAYQSPRTHVYWGQGTQVTVSS

SEQ ID NO: 2952 - protein, 122 aa, Artificial Sequence
  Chemically Synthesized
QVQLQESGGGLVQAGGSLRLSCAASGSISRLYGMGWYRQAPGKEREFVAGINGGTSTNYADSVKGRFTISRDNAKNTVYLQMNSLKPEDTAVYYCAVIVAYARGNPTWYYYWGQGTQVTVSS

SEQ ID NO: 2953 - protein, 118 aa, Artificial Sequence
  Chemically Synthesized
QVQLQESGGGLVQAGGSLRLSCAASGYISTGPPMGWYRQAPGKERELVAGINSGTSTNYADSVKGRFTISRDNAKNTVYLQMNSLKPEDTAVYYCAADLYYFTGYGYWGQGTQVTVSS

SEQ ID NO: 2954 - protein, 126 aa, Artificial Sequence
  Chemically Synthesized
QVQLQESGGGLVQAGGSLRLSCAASGNISSSVVMGWYRQAPGKERELVATISRGTSTYYADSVKGRFTISRDNAKNTVYLQMNSLKPEDTAVYYCAAYYRYVQFQTYYFDPNLGYWGQGTQVTVSS

SEQ ID NO: 2955 - protein, 122 aa, Artificial Sequence
  Chemically Synthesized
QVQLQESGGGLVQAGGSLRLSCAASGTISPLTRMGWYRQAPGKEREFVAAIDFGGNTNYADSVKGRFTISRDNAKNTVYLQMNSLKPEDTAVYYCAVLYLGYPTRYTWHYYWGQGTQVTVSS

SEQ ID NO: 2956 - protein, 121 aa, Artificial Sequence
  Chemically Synthesized
QVQLQESGGGLVQAGGSLRLSCAASGNISTYTMGWYRQAPGKEREFVAGIGGGGSTNYADSVKGRFTISRDNAKNTVYLQMNSLKPEDTAVYYCAVTGYDDSSYERYFYYWGQGTQVTVSS

SEQ ID NO: 2957 - protein, 121 aa, Artificial Sequence
  Chemically Synthesized
QVQLQESGGGLVQAGGSLRLSCAASGTISHDGTMGWYRQAPGKEREFVALLMKVVLPYADSVKGRFTISRDNAKNTVYLQMNSLKPEDTAVYYCAAWAFDYIVTTPFHVYWGQGTQVTVSS

SEQ ID NO: 2958 - protein, 121 aa, Artificial Sequence
  Chemically Synthesized
QVQLQESGGGLVQAGGSLRLSCAASGTISRVGGMGWYRQAPGKEREFVAGISGGSTYYADSVKGRFTISRDNAKNTVYLQMNSLKPEDTAVYYCAVVSHRGANTGQYFYYWGQGTQVTVSS

SEQ ID NO: 2959 - protein, 118 aa, Artificial Sequence
  Chemically Synthesized
QVQLQESGGGLVQAGGSLRLSCAASGNISRNLIMGWYRQAPGKEREFVASIDEGGTTNYADSVKGRFTISRDNAKNTVYLQMNSLKPEDTAVYYCAALKLSRFLHYYWGQGTQVTVSS

SEQ ID NO: 2960 - protein, 118 aa, Artificial Sequence
  Chemically Synthesized
QVQLQESGGGLVQAGGSLRLSCAASGNISLPYYMGWYRQAPGKEREFVAGIDYGTNTYYADSVKGRFTISRDNAKNTVYLQMNSLKPEDTAVYYCAVRYSYYTVHYYWGQGTQVTVSS

SEQ ID NO: 2961 - protein, 118 aa, Artificial Sequence
  Chemically Synthesized
QVQLQESGGGLVQAGGSLRLSCAASGSISHYVDMGWYRQAPGKEREFVAAINDGASTYYADSVKGRFTISRDNAKNTVYLQMNSLKPEDTAVYYCAVSPITRYAHRYWGQGTQVTVSS

SEQ ID NO: 2962 - protein, 118 aa, Artificial Sequence
  Chemically Synthesized
QVQLQESGGGLVQAGGSLRLSCAASGTISYDYIMGWYRQAPGKERELVASIGSGGITNYADSVKGRFTISRDNAKNTVYLQMNSLKPEDTAVYYCAASIGDYLTFAYWGQGTQVTVSS

SEQ ID NO: 2963 - protein, 122 aa, Artificial Sequence
  Chemically Synthesized
QVQLQESGGGLVQAGGSLRLSCAASGSISHNSLMGWYRQAPGKEREFVAAIAVGASTNYADSVKGRFTISRDNAKNTVYLQMNSLKPEDTAVYYCAAVYRDIYSDVRYFYYWGQGTQVTVSS

SEQ ID NO: 2964 - protein, 118 aa, Artificial Sequence
  Chemically Synthesized
QVQLQESGGGLVQAGGSLRLSCAASGYISWLLTMGWYRQAPGKERELVATIAYGASTYYADSVKGRFTISRDNAKNTVYLQMNSLKPEDTAVYYCAAYYDLDTIFYYWGQGTQVTVSS

SEQ ID NO: 2965 - protein, 118 aa, Artificial Sequence
  Chemically Synthesized
QVQLQESGGGLVQAGGSLRLSCAASGTIFLSDGMGWYRQAPGKERELVAAIDNGGNTNYADSVKGRFTISRDNAKNTVYLQMNSLKPEDTAVYYCAVWLYADQYHVYWGQGTQVTVSS

SEQ ID NO: 2966 - protein, 122 aa, Artificial Sequence
  Chemically Synthesized
QVQLQESGGGLVQAGGSLRLSCAASGSISYDGPMGWYRQAPGKEREFVAAISSGAITNYADSVKGRFTISRDNAKNTVYLQMNSLKPEDTAVYYCAALLIDNVHPRTYLAYWGQGTQVTVSS

SEQ ID NO: 2967 - protein, 124 aa, Artificial Sequence
  Chemically Synthesized
QVQLQESGGGLVQAGGSLRLSCAASGNISQLYMGWYRQAPGKERELVAGIDGGASTNYADSVKGRFTISRDNAKNTVYLQMNSLKPEDTAVYYCAATNWYVDKSSRGTTGLIYWGQGTQVTVSS

SEQ ID NO: 2968 - protein, 117 aa, Artificial Sequence
  Chemically Synthesized
QVQLQESGGGLVQAGGSLRLSCAASGTISPRINMGWYRQAPGKEREFVAAIAAGTSTYYADSVKGRFTISRDNAKNTVYLQMNSLKPEDTAVYYCAAVDRQYYSYYWGQGTQVTVSS

SEQ ID NO: 2969 - protein, 118 aa, Artificial Sequence
  Chemically Synthesized
QVQLQESGGGLVQAGGSLRLSCAASGNISSYIYMGWYRQAPGKEREFVASITGGTITNYADSVKGRFTISRDNAKNTVYLQMNSLKPEDTAVYYCAALFTYPDDYSYWGQGTQVTVSS

SEQ ID NO: 2970 - protein, 118 aa, Artificial Sequence
  Chemically Synthesized
QVQLQESGGGLVQAGGSLRLSCAASGSISRTSPMGWYRQAPGKEREFVAGITYGSTTNYADSVKGRFTISRDNAKNTVYLQMNSLKPEDTAVYYCAVITWNDGYHPYWGQGTQVTVSS

SEQ ID NO: 2971 - protein, 125 aa, Artificial Sequence
  Chemically Synthesized
QVQLQESGGGLVQAGGSLRLSCAASGSISDYESMGWYRQAPGKERELVAAITGGGITYYADSVKGRFTISRDNAKNTVYLQMNSLKPEDTAVYYCAVVDRAIIRTTVSTFTTMYWGQGTQVTVSS

SEQ ID NO: 2972 - protein, 126 aa, Artificial Sequence
  Chemically Synthesized
QVQLQESGGGLVQAGGSLRLSCAASGSISSPGNMGWYRQAPGKERELVASIALGASTNYADSVKGRFTISRDNAKNTVYLQMNSLKPEDTAVYYCAADTTYSLVQETVQWGTHTYWGQGTQVTVSS

SEQ ID NO: 2973 - protein, 118 aa, Artificial Sequence
  Chemically Synthesized
QVQLQESGGGLVQAGGSLRLSCAASGTIFVPKYMGWYRQAPGKEREFVASINYGGSTYYADSVKGRFTISRDNAKNTVYLQMNSLKPEDTAVYYCAAIATNGRYLYYWGQGTQVTVSS

SEQ ID NO: 2974 - protein, 118 aa, Artificial Sequence
  Chemically Synthesized
QVQLQESGGGLVQAGGSLRLSCAASGNISIYPDMGWYRQAPGKEREFVATITAGGITYYADSVKGRFTISRDNAKNTVYLQMNSLKPEDTAVYYCAVYYAQVNRHDYWGQGTQVTVSS

SEQ ID NO: 2975 - protein, 118 aa, Artificial Sequence
  Chemically Synthesized
QVQLQESGGGLVQAGGSLRLSCAASGTISDGYRMGWYRQAPGKERELVASIDSGASTYYADSVKGRFTISRDNAKNTVYLQMNSLKPEDTAVYYCAARDDGYYYLRYWGQGTQVTVSS

SEQ ID NO: 2976 - protein, 122 aa, Artificial Sequence
  Chemically Synthesized
QVQLQESGGGLVQAGGSLRLSCAASGSIFNETDMGWYRQAPGKERELVATITYGASTYYADSVKGRFTISRDNAKNTVYLQMNSLKPEDTAVYYCAAGRNDRGWRSDSHGYWGQGTQVTVSS

SEQ ID NO: 2977 - protein, 109 aa, Artificial Sequence
  Chemically Synthesized
QVQLQESGGGLVQAGGSLRLSCAASGSIFDYGTMGWYRQAPGKEREFVAAISYGATTNYADSVKGRFTISRDNAKNTVYLQMNSLKPEDTAVYYCAMYWGQGTQVTVSS

SEQ ID NO: 2978 - protein, 116 aa, Artificial Sequence
  Chemically Synthesized
QVQLQESGGGLVQAGGSLRLSCAASGNISGYDFMGWYRQAPGKERELVAAISGGSSTYYADSVKGRFTISRDNAKNTVYLQMNSLKPEDTAVYYCAVDPGRSHVYWGQGTQVTVSS

SEQ ID NO: 2979 - protein, 118 aa, Artificial Sequence
  Chemically Synthesized
QVQLQESGGGLVQAGGSLRLSCAASGNISAQVYMGWYRQAPGKEREFVAAIDAGSTTYYADSVKGRFTISRDNAKNTVYLQMNSLKPEDTAVYYCAVGSPKYDVHYYWGQGTQVTVSS

SEQ ID NO: 2980 - protein, 118 aa, Artificial Sequence
  Chemically Synthesized
QVQLQESGGGLVQAGGSLRLSCAASGTIFFIIVMGWYRQAPGKERELVASINRGGSTNYADSVKGRFTISRDNAKNTVYLQMNSLKPEDTAVYYCAAYDQYAPWFPYWGQGTQVTVSS

SEQ ID NO: 2981 - protein, 118 aa, Artificial Sequence
  Chemically Synthesized
QVQLQESGGGLVQAGGSLRLSCAASGTISTLKYMGWYRQAPGKEREFVAGIDFGGTTYYADSVKGRFTISRDNAKNTVYLQMNSLKPEDTAVYYCAAVLSNTVTLFYWGQGTQVTVSS

SEQ ID NO: 2982 - protein, 122 aa, Artificial Sequence
  Chemically Synthesized
QVQLQESGGGLVQAGGSLRLSCAASGTISYTYWMGWYRQAPGKEREFVAAIGYGGTTNYADSVKGRFTISRDNAKNTVYLQMNSLKPEDTAVYYCAALYTTLNRGSSPHYYWGQGTQVTVSS

SEQ ID NO: 2983 - protein, 118 aa, Artificial Sequence
  Chemically Synthesized
QVQLQESGGGLVQAGGSLRLSCAASGTISNRGYMGWYRQAPGKEREFVAGINTGATTYYADSVKGRFTISRDNAKNTVYLQMNSLKPEDTAVYYCAVTGYDDLKYDYWGQGTQVTVSS

SEQ ID NO: 2984 - protein, 118 aa, Artificial Sequence
  Chemically Synthesized
QVQLQESGGGLVQAGGSLRLSCAASGNISPDTYMGWYRQAPGKERELVAAIDHGASTYYADSVKGRFTISRDNAKNTVYLQMNSLKPEDTAVYYCAVEIVGTEALYYWGQGTQVTVSS

SEQ ID NO: 2985 - protein, 118 aa, Artificial Sequence
  Chemically Synthesized
QVQLQESGGGLVQAGGSLRLSCAASGTISGSKTMGWYRQAPGKERELVATIAYGSTTYYADSVKGRFTISRDNAKNTVYLQMNSLKPEDTAVYYCADWVLSSYNHRYWGQGTQVTVSS

SEQ ID NO: 2986 - protein, 113 aa, Artificial Sequence
  Chemically Synthesized
QVQLQESGGGLVQAGGSLRLSCAASGNISVDSMGWYRQAPGKERELVATIAFGSTTNYADSVKGRFTISRDNAKNTVYLQMNSLKPEDTAVYYCAVGADYPYWGQGTQVTVSS

SEQ ID NO: 2987 - protein, 118 aa, Artificial Sequence
  Chemically Synthesized
QVQLQESGGGLVQAGGSLRLSCAASGTIFVRYSMGWYRQAPGKERELVAGINAGGITNYADSVKGRFTISRDNAKNTVYLQMNSLKPEDTAVYYCAVGLAYPKRHRYWGQGTQVTVSS

SEQ ID NO: 2988 - protein, 122 aa, Artificial Sequence
  Chemically Synthesized
QVQLQESGGGLVQAGGSLRLSCAASGSISGQWQMGWYRQAPGKEREFVASIGYGGTTYYADSVKGRFTISRDNAKNTVYLQMNSLKPEDTAVYYCAVVYDRGAHVGSALGYWGQGTQVTVSS

SEQ ID NO: 2989 - protein, 118 aa, Artificial Sequence
  Chemically Synthesized
QVQLQESGGGLVQAGGSLRLSCAASGSISPYRDMGWYRQAPGKEREFVAGITYGTSTNYADSVKGRFTISRDNAKNTVYLQMNSLKPEDTAVYYCAAIAYGTYPFSYWGQGTQVTVSS

SEQ ID NO: 2990 - protein, 118 aa, Artificial Sequence
  Chemically Synthesized
QVQLQESGGGLVQAGGSLRLSCAASGTISGYRSMGWYRQAPGKERELVAGIDTGANTNYADSVKGRFTISRDNAKNTVYLQMNSLKPEDTAVYYCAVWSLTWSSHTYWGQGTQVTVSS

SEQ ID NO: 2991 - protein, 119 aa, Artificial Sequence
  Chemically Synthesized
QVQLQESGGGLVQAGGSLRLSCAASGYISRPAYMGWYRQAPGKERELVATIGLGGSTYYADSVKGRFTISRDNAKNTVYLQMNSLKPEDTAVYYCAVEATDYSVLLPYWGQGTQVTVSS

SEQ ID NO: 2992 - protein, 117 aa, Artificial Sequence
  Chemically Synthesized
QVQLQESGGGLVQAGGSLRLSCAASGYISITSMGWYRQAPGKERELVAGISTGAITNYADSVKGRFTISRDNAKNTVYLQMNSLKPEDTAVYYCAVYLYDGTVYNYWGQGTQVTVSS

SEQ ID NO: 2993 - protein, 126 aa, Artificial Sequence
  Chemically Synthesized
QVQLQESGGGLVQAGGSLRLSCAASGTIFFIGYMGWYRQAPGKEREFVAAINVGGTTNYADSVKGRFTISRDNAKNTVYLQMNSLKPEDTAVYYCAVGTQRDTDWGGPDQIDHSYWGQGTQVTVSS

SEQ ID NO: 2994 - protein, 121 aa, Artificial Sequence
  Chemically Synthesized
QVQLQESGGGLVQAGGSLRLSCAASGSISTDILMGWYRQAPGKEREFVATITNGTTTNYADSVKGRFTISRDNAKNTVYLQMNSLKPEDTAVYYCAAYTDESTATTTTIYWGQGTQVTVSS

SEQ ID NO: 2995 - protein, 122 aa, Artificial Sequence
  Chemically Synthesized
QVQLQESGGGLVQAGGSLRLSCAASGTISYVGIMGWYRQAPGKERELVAAISYGGSTYYADSVKGRFTISRDNAKNTVYLQMNSLKPEDTAVYYCAVWTYGTRYWGPKHLYWGQGTQVTVSS

SEQ ID NO: 2996 - protein, 122 aa, Artificial Sequence
  Chemically Synthesized
QVQLQESGGGLVQAGGSLRLSCAASGTIFDHGSMGWYRQAPGKERELVAAIGSGSNTYYADSVKGRFTISRDNAKNTVYLQMNSLKPEDTAVYYCAVVYYGRADAYLGHQYWGQGTQVTVSS

SEQ ID NO: 2997 - protein, 126 aa, Artificial Sequence
  Chemically Synthesized
QVQLQESGGGLVQAGGSLRLSCAASGSIFYTDHMGWYRQAPGKERELVATIGAGTTTNYADSVKGRFTISRDNAKNTVYLQMNSLKPEDTAVYYCAAYDGSYPEPYALLYIPYRYWGQGTQVTVSS

SEQ ID NO: 2998 - protein, 122 aa, Artificial Sequence
  Chemically Synthesized
QVQLQESGGGLVQAGGSLRLSCAASGTIFVVLTMGWYRQAPGKEREFVATIALGSTTNYADSVKGRFTISRDNAKNTVYLQMNSLKPEDTAVYYCAVQQQEQDRSYTSLGYWGQGTQVTVSS

SEQ ID NO: 2999 - protein, 121 aa, Artificial Sequence
  Chemically Synthesized
QVQLQESGGGLVQAGGSLRLSCAASGYISYYHSMGWYRQAPGKEREFVAAINTGGITNYADSVKGRFTISRDNAKNTVYLQMNSLKPEDTAVYYCAARSDLAPVVSSTFYWGQGTQVTVSS

SEQ ID NO: 3000 - protein, 121 aa, Artificial Sequence
  Chemically Synthesized
QVQLQESGGGLVQAGGSLRLSCAASGTISSYDRMGWYRQAPGKERELVATIGLGGNTYYADSVKGRFTISRDNAKNTVYLQMNSLKPEDTAVYYCAAYWGVRKSTSVVMYWGQGTQVTVSS

SEQ ID NO: 3001 - protein, 118 aa, Artificial Sequence
  Chemically Synthesized
QVQLQESGGGLVQAGGSLRLSCAASGTIFTGTYMGWYRQAPGKERELVAAITDGGTTYYADSVKGRFTISRDNAKNTVYLQMNSLKPEDTAVYYCAVEVTYRYRFTYWGQGTQVTVSS

SEQ ID NO: 3002 - protein, 125 aa, Artificial Sequence
  Chemically Synthesized
QVQLQESGGGLVQAGGSLRLSCAASGYISANRMGWYRQAPGKERELVATINTGATTNYADSVKGRFTISRDNAKNTVYLQMNSLKPEDTAVYYCAAHVYYAYYGDSAPYTYFGYWGQGTQVTVSS

SEQ ID NO: 3003 - protein, 118 aa, Artificial Sequence
  Chemically Synthesized
QVQLQESGGGLVQAGGSLRLSCAASGNISRQYYMGWYRQAPGKERELVAGIGYGGTTYYADSVKGRFTISRDNAKNTVYLQMNSLKPEDTAVYYCAVSGDVPYFFNYWGQGTQVTVSS

SEQ ID NO: 3004 - protein, 117 aa, Artificial Sequence
  Chemically Synthesized
QVQLQESGGGLVQAGGSLRLSCAASGYISQYAYMGWYRQAPGKERELVATITSVLVPYADSVKGRFTISRDNAKNTVYLQMNSLKPEDTAVYYCAAQPAPRYSYDYWGQGTQVTVSS

SEQ ID NO: 3005 - protein, 117 aa, Artificial Sequence
  Chemically Synthesized
QVQLQESGGGLVQAGGSLRLSCAASGSISQIRSMGWYRQAPGKEREFVATIDYGANTNYADSVKGRFTISRDNAKNTVYLQMNSLKPEDTAVYYCAVSNCTTSTLYWGQGTQVTVSS

SEQ ID NO: 3006 - protein, 125 aa, Artificial Sequence
  Chemically Synthesized
QVQLQESGGGLVQAGGSLRLSCAASGTISYAYYMGWYRQAPGKERELVAGIALGASTYYADSVKGRFTISRDNAKNTVYLQMNSLKPEDTAVYYCAVTWLYTVIQTHLSSLTIYWGQGTQVTVSS

SEQ ID NO: 3007 - protein, 121 aa, Artificial Sequence
  Chemically Synthesized
QVQLQESGGGLVQAGGSLRLSCAASGYISLLYWMGWYRQAPGKEREFVATISSVVVPYADSVKGRFTISRDNAKNTVYLQMNSLKPEDTAVYYCAAYVDGDPDRYLFHYYWGQGTQVTVSS

SEQ ID NO: 3008 - protein, 117 aa, Artificial Sequence
  Chemically Synthesized
QVQLQESGGGLVQAGGSLRLSCAASGSIFGPAYMGWYRQAPGKERELVATIALGGSTNYADSVKGRFTISRDNAKNTVYLQMNSLKPEDTAVYYCAVADILYVTIYWGQGTQVTVSS

SEQ ID NO: 3009 - protein, 126 aa, Artificial Sequence
  Chemically Synthesized
QVQLQESGGGLVQAGGSLRLSCAASGNISAATYMGWYRQAPGKEREFVAGITRGGNTYYADSVKGRFTISRDNAKNTVYLQMNSLKPEDTAVYYCAAGAPAHGVPYYDHYAYHAYWGQGTQVTVSS

SEQ ID NO: 3010 - protein, 118 aa, Artificial Sequence
  Chemically Synthesized
QVQLQESGGGLVQAGGSLRLSCAASGNISYRRYMGWYRQAPGKERELVAAIAYGATTNYADSVKGRFTISRDNAKNTVYLQMNSLKPEDTAVYYCAVAYRYLAGFGYWGQGTQVTVSS

SEQ ID NO: 3011 - protein, 118 aa, Artificial Sequence
  Chemically Synthesized
QVQLQESGGGLVQAGGSLRLSCAASGTIFGYPPMGWYRQAPGKEREFVAAITYGGITYYADSVKGRFTISRDNAKNTVYLQMNSLKPEDTAVYYCAAWNLYDAFLLYWGQGTQVTVSS

SEQ ID NO: 3012 - protein, 118 aa, Artificial Sequence
  Chemically Synthesized
QVQLQESGGGLVQAGGSLRLSCAASGTISLYGWMGWYRQAPGKEREFVASISLGGTTNYADSVKGRFTISRDNAKNTVYLQMNSLKPEDTAVYYCAVAIGHPYTYFYWGQGTQVTVSS

SEQ ID NO: 3013 - protein, 110 aa, Artificial Sequence
  Chemically Synthesized
QVQLQESGGGLVQAGGSLRLSCAASGTIFGTDNMGWYRQAPGKEREFVAAITAGGNTNYADSVKGRFTISRDNAKNTVYLQMNSLKPEDTAVYYCAAWYWGQGTQVTVSS

SEQ ID NO: 3014 - protein, 116 aa, Artificial Sequence
  Chemically Synthesized
QVQLQESGGGLVQAGGSLRLSCAASGSIFPWSMGWYRQAPGKEREFVAAIDNGSITNYADSVKGRFTISRDNAKNTVYLQMNSLKPEDTAVYYCAADRYYVDHDYWGQGTQVTVSS

SEQ ID NO: 3015 - protein, 117 aa, Artificial Sequence
  Chemically Synthesized
QVQLQESGGGLVQAGGSLRLSCAASGYIFNTQDMGWYRQAPGKEREFVAGIDIGASTNYADSVKGRFTISRDNAKNTVYLQMNSLKPEDTAVYYCAAYASLTSRLYWGQGTQVTVSS

SEQ ID NO: 3016 - protein, 118 aa, Artificial Sequence
  Chemically Synthesized
QVQLQESGGGLVQAGGSLRLSCAASGNISTTFPMGWYRQAPGKERELVAGITEGSSTYYADSVKGRFTISRDNAKNTVYLQMNSLKPEDTAVYYCAATISWSWDLYYWGQGTQVTVSS

SEQ ID NO: 3017 - protein, 122 aa, Artificial Sequence
  Chemically Synthesized
QVQLQESGGGLVQAGGSLRLSCAASGSIFYRGVMGWYRQAPGKERELVASIAHGGTTNYADSVKGRFTISRDNAKNTVYLQMNSLKPEDTAVYYCAAKYAQAFFDDDVYVYWGQGTQVTVSS

SEQ ID NO: 3018 - protein, 115 aa, Artificial Sequence
  Chemically Synthesized
QVQLQESGGGLVQAGGSLRLSCAASGNILVMGWYRQAPGKERELVASITSGAITNYADSVKGRFTISRDNAKNTVYLQMNSLKPEDTAVYYCAARWWDYQDHRYWGQGTQVTVSS

SEQ ID NO: 3019 - protein, 121 aa, Artificial Sequence
  Chemically Synthesized
QVQLQESGGGLVQAGGSLRLSCAASGNIFDADMGWYRQAPGKERELVAAISYGGNTNYADSVKGRFTISRDNAKNTVYLQMNSLKPEDTAVYYCAAQYSIQSRPLFLYGYWGQGTQVTVSS

SEQ ID NO: 3020 - protein, 118 aa, Artificial Sequence
  Chemically Synthesized
QVQLQESGGGLVQAGGSLRLSCAASGSISDKYDMGWYRQAPGKEREFVASINIGSNTNYADSVKGRFTISRDNAKNTVYLQMNSLKPEDTAVYYCAAYYLGVDDFDYWGQGTQVTVSS

SEQ ID NO: 3021 - protein, 119 aa, Artificial Sequence
  Chemically Synthesized
QVQLQESGGGLVQAGGSLRLSCAASGSISDGLTMGWYRQAPGKEREFVATINPAGANTNYADSVKGRFTISRDNAKNTVYLQMNSLKPEDTAVYYCAVGGYRSPHYDYWGQGTQVTVSS

SEQ ID NO: 3022 - protein, 118 aa, Artificial Sequence
  Chemically Synthesized
QVQLQESGGGLVQAGGSLRLSCAASGTIFVFAVMGWYRQAPGKEREFVASITSGGITNYADSVKGRFTISRDNAKNTVYLQMNSLKPEDTAVYYCAARRDRGARHEYWGQGTQVTVSS

SEQ ID NO: 3023 - protein, 117 aa, Artificial Sequence
  Chemically Synthesized
QVQLQESGGGLVQAGGSLRLSCAASGYFLTTLMGWYRQAPGKERELVAGIGSGSNTYYADSVKGRFTISRDNAKNTVYLQMNSLKPEDTAVYYCAADLYLALTLPYWGQGTQVTVSS

SEQ ID NO: 3024 - protein, 117 aa, Artificial Sequence
  Chemically Synthesized
QVQLQESGGGLVQAGGSLRLSCAASGNISVGGYMGWYRQAPGKEREFVAAIGPGTTNYADSVKGRFTISRDNAKNTVYLQMNSLKPEDTAVYYCAVDDGLGDTHDYWGQGTQVTVSS

SEQ ID NO: 3025 - protein, 124 aa, Artificial Sequence
  Chemically Synthesized
QVQLQESGGGLVQAGGSLRLSCAASGTISVDYLMGWYRQAPGKERELVATLILVLIPYADSVKGRFTISRDNAKNTVYLQMNSLKPEDTAVYYCAAYYDWYDYLWSYLNDYDYWGQGTQVTVSS

SEQ ID NO: 3026 - protein, 118 aa, Artificial Sequence
  Chemically Synthesized
QVQLQESGGGLVQAGGSLRLSCAASGNISSPDVMGWYRQAPGKERELVATIAWGGNTYYADSVKGRFTISRDNAKNTVYLQMNSLKPEDTAVYYCAVAYQGRRFLRYWGQGTQVTVSS

SEQ ID NO: 3027 - protein, 118 aa, Artificial Sequence
  Chemically Synthesized
QVQLQESGGGLVQAGGSLRLSCAASGYISQSLDMGWYRQAPGKEREFVASITGGGSTYYADSVKGRFTISRDNAKNTVYLQMNSLKPEDTAVYYCAVYTHVPWVHPYWGQGTQVTVSS

SEQ ID NO: 3028 - protein, 118 aa, Artificial Sequence
  Chemically Synthesized
QVQLQESGGGLVQAGGSLRLSCAASGYISRINRMGWYRQAPGKEREFVASIDAGGNTNYADSVKGRFTISRDNAKNTVYLQMNSLKPEDTAVYYCAVTTILVYTLSYWGQGTQVTVSS

SEQ ID NO: 3029 - protein, 122 aa, Artificial Sequence
  Chemically Synthesized
QVQLQESGGGLVQAGGSLRLSCAASGYISYIRGMGWYRQAPGKERELVAAINRGTTTYYADSVKGRFTISRDNAKNTVYLQMNSLKPEDTAVYYCAVWGRSYGYTRYLHSYWGQGTQVTVSS

SEQ ID NO: 3030 - protein, 122 aa, Artificial Sequence
  Chemically Synthesized
QVQLQESGGGLVQAGGSLRLSCAASGNIFYDNTMGWYRQAPGKEREFVAGIASGTSTYYADSVKGRFTISRDNAKNTVYLQMNSLKPEDTAVYYCAAAANYRAYDSIGLAYWGQGTQVTVSS

SEQ ID NO: 3031 - protein, 126 aa, Artificial Sequence
  Chemically Synthesized
QVQLQESGGGLVQAGGSLRLSCAASGYIFSLERMGWYRQAPGKEREFVASISAGTNTYYADSVKGRFTISRDNAKNTVYLQMNSLKPEDTAVYYCAVYYVAGDDPTYFVADRHAYWGQGTQVTVSS

SEQ ID NO: 3032 - protein, 118 aa, Artificial Sequence
  Chemically Synthesized
QVQLQESGGGLVQAGGSLRLSCAASGTISNDDDMGWYRQAPGKERELVASIASGTNTNYADSVKGRFTISRDNAKNTVYLQMNSLKPEDTAVYYCAVYYPSDSWLGYWGQGTQVTVSS

SEQ ID NO: 3033 - protein, 125 aa, Artificial Sequence
  Chemically Synthesized
QVQLQESGGGLVQAGGSLRLSCAASGNIFLYRAMGWYRQAPGKEREFVAGIAYGGNPYADSVKGRFTISRDNAKNTVYLQMNSLKPEDTAVYYCAVDLRSGIHSGYRSVSDFLYWGQGTQVTVSS

SEQ ID NO: 3034 - protein, 118 aa, Artificial Sequence
  Chemically Synthesized
QVQLQESGGGLVQAGGSLRLSCAASGTISADYVMGWYRQAPGKEREFVAGIDRGGTTYYADSVKGRFTISRDNAKNTVYLQMNSLKPEDTAVYYCAVGAYARRDLIYWGQGTQVTVSS

SEQ ID NO: 3035 - protein, 118 aa, Artificial Sequence
  Chemically Synthesized
QVQLQESGGGLVQAGGSLRLSCAASGTIFQFFLMGWYRQAPGKERELVAGITYGTTTYYADSVKGRFTISRDNAKNTVYLQMNSLKPEDTAVYYCAADRQAGLVYDYWGQGTQVTVSS

SEQ ID NO: 3036 - protein, 121 aa, Artificial Sequence
  Chemically Synthesized
QVQLQESGGGLVQAGGSLRLSCAASGTISGSLMGWYRQAPGKERELVATINRGSSTYYADSVKGRFTISRDNAKNTVYLQMNSLKPEDTAVYYCAATEYRVVDTYDTYGYWGQGTQVTVSS

SEQ ID NO: 3037 - protein, 118 aa, Artificial Sequence
  Chemically Synthesized
QVQLQESGGGLVQAGGSLRLSCAASGYISAFGYMGWYRQAPGKEREFVAAIGQGGSTNYADSVKGRFTISRDNAKNTVYLQMNSLKPEDTAVYYCAVEGYYGDYYGYWGQGTQVTVSS

SEQ ID NO: 3038 - protein, 122 aa, Artificial Sequence
  Chemically Synthesized
QVQLQESGGGLVQAGGSLRLSCAASGTISGVDNMGWYRQAPGKEREFVAAIGNGTNTNYADSVKGRFTISRDNAKNTVYLQMNSLKPEDTAVYYCAVPWVDEDPSDVLYGYWGQGTQVTVSS

SEQ ID NO: 3039 - protein, 118 aa, Artificial Sequence
  Chemically Synthesized
QVQLQESGGGLVQAGGSLRLSCAASGSIFRTYAMGWYRQAPGKERELVAAIAEGSNTYYADSVKGRFTISRDNAKNTVYLQMNSLKPEDTAVYYCAALYSVIDDYDYWGQGTQVTVSS

SEQ ID NO: 3040 - protein, 118 aa, Artificial Sequence
  Chemically Synthesized
QVQLQESGGGLVQAGGSLRLSCAASGNIFHQYNMGWYRQAPGKERELVAGITFGAITNYADSVKGRFTISRDNAKNTVYLQMNSLKPEDTAVYYCAASEPWTTDFDYWGQGTQVTVSS

SEQ ID NO: 3041 - protein, 115 aa, Artificial Sequence
  Chemically Synthesized
QVQLQESGGGLVQAGGSLRLSCAASGNISSYSYMGWYRQAPGKEREFVAAITYGQYADSVKGRFTISRDNAKNTVYLQMNSLKPEDTAVYYCAATRYVLLHHPYWGQGTQVTVSS

SEQ ID NO: 3042 - protein, 122 aa, Artificial Sequence
  Chemically Synthesized
QVQLQESGGGLVQAGGSLRLSCAASGTIFHYVIMGWYRQAPGKERELVAGINYGTSTNYADSVKGRFTISRDNAKNTVYLQMNSLKPEDTAVYYCAAYYYLGWRYYPRYDYWGQGTQVTVSS

SEQ ID NO: 3043 - protein, 118 aa, Artificial Sequence
  Chemically Synthesized
QVQLQESGGGLVQAGGSLRLSCAASGYISYAYYMGWYRQAPGKERELVAGITRGSNTYYADSVKGRFTISRDNAKNTVYLQMNSLKPEDTAVYYCAVGRVSQYYFAYWGQGTQVTVSS

SEQ ID NO: 3044 - protein, 113 aa, Artificial Sequence
  Chemically Synthesized
QVQLQESGGGLVQAGGSLRLSCAASGSISTHDLMGWYRQAPGKERELVAAIDPGSSTKYADSVKGRFTISRDNAKNTVYLQMNSLKPEDTAVYYCAVRLFKYWGQGTQVTVSS

SEQ ID NO: 3045 - protein, 118 aa, Artificial Sequence
  Chemically Synthesized
QVQLQESGGGLVQAGGSLRLSCAASGSISVLVSMGWYRQAPGKEREFVAGISKGSSTYYADSVKGRFTISRDNAKNTVYLQMNSLKPEDTAVYYCAAWVIHRYFFDYWGQGTQVTVSS

SEQ ID NO: 3046 - protein, 117 aa, Artificial Sequence
  Chemically Synthesized
QVQLQESGGGLVQAGGSLRLSCAASGNISFSLMGWYRQAPGKERELVAGIGDGGTTNYADSVKGRFTISRDNAKNTVYLQMNSLKPEDTAVYYCAVEYDTYTIHQYWGQGTQVTVSS

SEQ ID NO: 3047 - protein, 118 aa, Artificial Sequence
  Chemically Synthesized
QVQLQESGGGLVQAGGSLRLSCAASGTISGIGYMGWYRQAPGKEREFVAAIAWGTITYYADSVKGRFTISRDNAKNTVYLQMNSLKPEDTAVYYCAVPLFFPTEHLYWGQGTQVTVSS

SEQ ID NO: 3048 - protein, 122 aa, Artificial Sequence
  Chemically Synthesized
QVQLQESGGGLVQAGGSLRLSCAASGYIFPAIWMGWYRQAPGKERELVAAISYGATTYYADSVKGRFTISRDNAKNTVYLQMNSLKPEDTAVYYCAASVQTVWGYKRNFWYWGQGTQVTVSS

SEQ ID NO: 3049 - protein, 118 aa, Artificial Sequence
  Chemically Synthesized
QVQLQESGGGLVQAGGSLRLSCAASGSIFRDHYMGWYRQAPGKERELVATINVGSNTNYADSVKGRFTISRDNAKNTVYLQMNSLKPEDTAVYYCAVKLYRYVAHAYWGQGTQVTVSS

SEQ ID NO: 3050 - protein, 110 aa, Artificial Sequence
  Chemically Synthesized
QVQLQESGGGLVQAGGSLRLSCAASGYISILAWMGWYRQAPGKERELVATIGEGSNTYYADSVKGRFTISRDNAKNTVYLQMNSLKPEDTAVYYCALLYWGQGTQVTVSS

SEQ ID NO: 3051 - protein, 118 aa, Artificial Sequence
  Chemically Synthesized
QVQLQESGGGLVQAGGSLRLSCAASGSISYDHWMGWYRQAPGKERELVATIGGGTITYYADSVKGRFTISRDNAKNTVYLQMNSLKPEDTAVYYCAVAYPYDYLHTYWGQGTQVTVSS

SEQ ID NO: 3052 - protein, 122 aa, Artificial Sequence
  Chemically Synthesized
QVQLQESGGGLVQAGGSLRLSCAASGTIFYRYIMGWYRQAPGKEREFVAAIGTGATTNYADSVKGRFTISRDNAKNTVYLQMNSLKPEDTAVYYCAVVEHIGDPYYRVYVYWGQGTQVTVSS

SEQ ID NO: 3053 - protein, 121 aa, Artificial Sequence
  Chemically Synthesized
QVQLQESGGGLVQAGGSLRLSCAASGSIFLSRRMGWYRQAPGKERELVATINIGGSTYYADSVKGRFTISRDNAKNTVYLQMNSLKPEDTAVYYCAVGSLGLVTVNRLIYWGQGTQVTVSS

SEQ ID NO: 3054 - protein, 117 aa, Artificial Sequence
  Chemically Synthesized
QVQLQESGGGLVQAGGSLRLSCAASGSISYFYDMGWYRQAPGKERELVAGITAGGSTYYADSVKGRFTISRDNAKNTVYLQMNSLKPEDTAVYYCAVASLTVRRLYWGQGTQVTVSS

SEQ ID NO: 3055 - protein, 126 aa, Artificial Sequence
  Chemically Synthesized
QVQLQESGGGLVQAGGSLRLSCAASGTIFVGDVMGWYRQAPGKERELVASIDGGATTYYADSVKGRFTISRDNAKNTVYLQMNSLKPEDTAVYYCAARYASQDIYPLDDPDTHRYWGQGTQVTVSS

SEQ ID NO: 3056 - protein, 117 aa, Artificial Sequence
  Chemically Synthesized
QVQLQESGGGLVQAGGSLRLSCAASGTIFRRNIMGWYRQAPGKERELVASIDDGASTYADSVKGRFTISRDNAKNTVYLQMNSLKPEDTAVYYCAAQTYPYYYLQYWGQGTQVTVSS

SEQ ID NO: 3057 - protein, 122 aa, Artificial Sequence
  Chemically Synthesized
QVQLQESGGGLVQAGGSLRLSCAASGYIFLYYYMGWYRQAPGKEREFVATITPGTNTNYADSVKGRFTISRDNAKNTVYLQMNSLKPEDTAVYYCAAVPKYTIYYYRYFTYWGQGTQVTVSS

SEQ ID NO: 3058 - protein, 116 aa, Artificial Sequence
  Chemically Synthesized
QVQLQESGGGLVQAGGSLRLSCAASGSISYAYSMGWYRQAPGKEREFVATSGWYYQYADSVKGRFTISRDNAKNTVYLQMNSLKPEDTAVYYCAVGVGNPYDLVYWGQGTQVTVSS

SEQ ID NO: 3059 - protein, 117 aa, Artificial Sequence
  Chemically Synthesized
QVQLQESGGGLVQAGGSLRLSCAASGYFSAWLMGWYRQAPGKERELVAGIAGGAITNYADSVKGRFTISRDNAKNTVYLQMNSLKPEDTAVYYCAADAQGKRKFDYWGQGTQVTVSS

SEQ ID NO: 3060 - protein, 121 aa, Artificial Sequence
  Chemically Synthesized
QVQLQESGGGLVQAGGSLRLSCAASGSISWDLTMGWYRQAPGKEREFVPVLVRVLVPYADSVKGRFTISRDNAKNTVYLQMNSLKPEDTAVYYCAVPYSLVIGVYSYHGYWGQGTQVTVSS

SEQ ID NO: 3061 - protein, 117 aa, Artificial Sequence
  Chemically Synthesized
QVQLQESGGGLVQAGGSLRLSCAASGNIFSERYMGWYRQAPGKERELVAAITYGASTNYADSVKGRFTISRDNAKNTVYLQMNSLKPEDTAVYYCAAVSTRPDFSYWGQGTQVTVSS

SEQ ID NO: 3062 - protein, 121 aa, Artificial Sequence
  Chemically Synthesized
QVQLQESGGGLVQAGGSLRLSCAASGYIFSTGRMGWYRQAPGKERELVAGIDSVLVPYADSVKGRFTISRDNAKNTVYLQMNSLKPEDTAVYYCAAVKFYAGYTPITHAYWGQGTQVTVSS

SEQ ID NO: 3063 - protein, 118 aa, Artificial Sequence
  Chemically Synthesized
QVQLQESGGGLVQAGGSLRLSCAASGNISSWWGMGWYRQAPGKEREFVAGIGDGGITNYADSVKGRFTISRDNAKNTVYLQMNSLKPEDTAVYYCAVFYVYRRPHAYWGQGTQVTVSS

SEQ ID NO: 3064 - protein, 118 aa, Artificial Sequence
  Chemically Synthesized
QVQLQESGGGLVQAGGSLRLSCAASGYISLPGHMGWYRQAPGKEREFVAAIGYGTTTNYADSVKGRFTISRDNAKNTVYLQMNSLKPEDTAVYYCAVTTYPYLAFAYWGQGTQVTVSS

SEQ ID NO: 3065 - protein, 117 aa, Artificial Sequence
  Chemically Synthesized
QVQLQESGGGLVQAGGSLRLSCAASGSIFTTTMGWYRQAPGKEREFVATISAGSITNYADSVKGRFTISRDNAKNTVYLQMNSLKPEDTAVYYCAAVTWTLYWLVYWGQGTQVTVSS

SEQ ID NO: 3066 - protein, 122 aa, Artificial Sequence
  Chemically Synthesized
QVQLQESGGGLVQAGGSLRLSCAASGNISRLHYMGWYRQAPGKEREFVASIGRGATTYYADSVKGRFTISRDNAKNTVYLQMNSLKPEDTAVYYCAAVLYRHVYYWLPHDYWGQGTQVTVSS

SEQ ID NO: 3067 - protein, 118 aa, Artificial Sequence
  Chemically Synthesized
QVQLQESGGGLVQAGGSLRLSCAASGNISGKIAMGWYRQAPGKEREFVASINTGSTTNYADSVKGRFTISRDNAKNTVYLQMNSLKPEDTAVYYCAVAGNAPDWLYYWGQGTQVTVSS

SEQ ID NO: 3068 - protein, 126 aa, Artificial Sequence
  Chemically Synthesized
QVQLQESGGGLVQAGGSLRLSCAASGTIFARRYMGWYRQAPGKEREFVAGINLGSNTNYADSVKGRFTISRDNAKNTVYLQMNSLKPEDTAVYYCAVRRYYDFNYIAYGKRPLTYWGQGTQVTVSS

SEQ ID NO: 3069 - protein, 118 aa, Artificial Sequence
  Chemically Synthesized
QVQLQESGGGLVQAGGSLRLSCAASGSISYFVAMGWYRQAPGKEREFVATIADGTTTNYADSVKGRFTISRDNAKNTVYLQMNSLKPEDTAVYYCAAIGKTGRYFYYWGQGTQVTVSS

SEQ ID NO: 3070 - protein, 117 aa, Artificial Sequence
  Chemically Synthesized
QVQLQESGGGLVQAGGSLRLSCAASGNISDYGVMGWYRQAPGKEREFVATIDGGSTYYADSVKGRFTISRDNAKNTVYLQMNSLKPEDTAVYYCAVDIPYGSDLLYWGQGTQVTVSS

SEQ ID NO: 3071 - protein, 121 aa, Artificial Sequence
  Chemically Synthesized
QVQLQESGGGLVQAGGSLRLSCAASGSISLPYYMGWYRQAPGKERELVAGIGAGTNTYYADSVKGRFTISRDNAKNTVYLQMNSLKPEDTAVYYCAARFPYGTGHVNLDYWGQGTQVTVSS

SEQ ID NO: 3072 - protein, 118 aa, Artificial Sequence
  Chemically Synthesized
QVQLQESGGGLVQAGGSLRLSCAASGYISGTPYMGWYRQAPGKERELVASISYGSNTNYADSVKGRFTISRDNAKNTVYLQMNSLKPEDTAVYYCAVVVYDAGWLYYWGQGTQVTVSS

SEQ ID NO: 3073 - protein, 122 aa, Artificial Sequence
  Chemically Synthesized
QVQLQESGGGLVQAGGSLRLSCAASGNISGLQGMGWYRQAPGKEREFVAGISYGGSTNYADSVKGRFTISRDNAKNTVYLQMNSLKPEDTAVYYCAAVTQNVHTDSSRFGYWGQGTQVTVSS

SEQ ID NO: 3074 - protein, 118 aa, Artificial Sequence
  Chemically Synthesized
QVQLQESGGGLVQAGGSLRLSCAASGSIFLGATMGWYRQAPGKEREFVAGIGAGGNTNYADSVKGRFTISRDNAKNTVYLQMNSLKPEDTAVYYCAAGWYVKSYHYYWGQGTQVTVSS

SEQ ID NO: 3075 - protein, 118 aa, Artificial Sequence
  Chemically Synthesized
QVQLQESGGGLVQAGGSLRLSCAASGNISSVGYMGWYRQAPGKERELVATIDRGGTTNYADSVKGRFTISRDNAKNTVYLQMNSLKPEDTAVYYCAATNINYQPFYYWGQGTQVTVSS

SEQ ID NO: 3076 - protein, 122 aa, Artificial Sequence
  Chemically Synthesized
QVQLQESGGGLVQAGGSLRLSCAASGTIFDYGRMGWYRQAPGKEREFVASISDGGITNYADSVKGRFTISRDNAKNTVYLQMNSLKPEDTAVYYCAAGNYAYNADVGPLTYWGQGTQVTVSS

SEQ ID NO: 3077 - protein, 118 aa, Artificial Sequence
  Chemically Synthesized
QVQLQESGGGLVQAGGSLRLSCAASGSISAYDLMGWYRQAPGKERELVATIADGEYYQYADSVKGRFTISRDNAKNTVYLQMNSLKPEDTAVYYCAAVTYSADGHYYWGQGTQVTVSS

SEQ ID NO: 3078 - protein, 121 aa, Artificial Sequence
  Chemically Synthesized
QVQLQESGGGLVQAGGSLRLSCAASGTISGHLTMGWYRQAPGKEREFVAGINSVVLPYADSVKGRFTISRDNAKNTVYLQMNSLKPEDTAVYYCAASWAYDRVDYISLDYWGQGTQVTVSS

SEQ ID NO: 3079 - protein, 111 aa, Artificial Sequence
  Chemically Synthesized
QVQLQESGGGLVQAGGSLRLSCAASGNISWVPRMGWYRQAPGKEREFVAAIATGGTTYYADSVKGRFTISRDNAKNTVYLQMNSLKPEDTAVYYCALLDYWGQGTQVTVSS

SEQ ID NO: 3080 - protein, 115 aa, Artificial Sequence
  Chemically Synthesized
QVQLQESGGGLVQAGGSLRLSCAASGTISLVMGWYRQAPGKERELVATINAGTSTNYADSVKGRFTISRDNAKNTVYLQMNSLKPEDTAVYYCAVSVTVKLRIYWGQGTQVTVSS

SEQ ID NO: 3081 - protein, 116 aa, Artificial Sequence
  Chemically Synthesized
QVQLQESGGGLVQAGGSLRLSCAASGTISESTAMGWYRQAPGKEREFVATIDHGTTTYYADSVKGRFTISRDNAKNTVYLQMNSLKPEDTAVYYCAAGRLWGHAYWGQGTQVTVSS

SEQ ID NO: 3082 - protein, 113 aa, Artificial Sequence
  Chemically Synthesized
QVQLQESGGGLVQAGGSLRLSCAASGNIFADGDMGWYRQAPGKERELVASIGAGGTTNYADSVKGRFTISRDNAKNTVYLQMNSLKPEDTAVYYCAPVDHYYWGQGTQVTVSS

SEQ ID NO: 3083 - protein, 122 aa, Artificial Sequence
  Chemically Synthesized
QVQLQESGGGLVQAGGSLRLSCAASGTISDLPTMGWYRQAPGKEREFVAGIGDGSITYYADSVKGRFTISRDNAKNTVYLQMNSLKPEDTAVYYCAAIGPGKPREGRRHGYWGQGTQVTVSS

SEQ ID NO: 3084 - protein, 118 aa, Artificial Sequence
  Chemically Synthesized
QVQLQESGGGLVQAGGSLRLSCAASGSIFYGYVMGWYRQAPGKERELVATISSGATTNYADSVKGRFTISRDNAKNTVYLQMNSLKPEDTAVYYCAVYDDTYKAYDYWGQGTQVTVSS

SEQ ID NO: 3085 - protein, 120 aa, Artificial Sequence
  Chemically Synthesized
QVQLQESGGGLVQAGGSLRLSCAASGSISYRYGMGWYRQAPGKERELVAGIGIGTNTYYADSVKGRFTISRDNAKNTVYLQMNSLKPEDTAVYYCAVIQWAYDGGWHYYWGQGTQVTVSS

SEQ ID NO: 3086 - protein, 118 aa, Artificial Sequence
  Chemically Synthesized
QVQLQESGGGLVQAGGSLRLSCAASGNISGLSRMGWYRQAPGKEREFVASINVGGSTNYADSVKGRFTISRDNAKNTVYLQMNSLKPEDTAVYYCAVVVRLKYYYGYWGQGTQVTVSS

SEQ ID NO: 3087 - protein, 122 aa, Artificial Sequence
  Chemically Synthesized
QVQLQESGGGLVQAGGSLRLSCAASGNISDNDDMGWYRQAPGKERELVASIGSGAITYYADSVKGRFTISRDNAKNTVYLQMNSLKPEDTAVYYCAVADYEWGTTWYHLTYWGQGTQVTVSS

SEQ ID NO: 3088 - protein, 121 aa, Artificial Sequence
  Chemically Synthesized
QVQLQESGGGLVQAGGSLRLSCAASGSIFWRYAMGWYRQAPGKERELVAGIDVGATTNYADSVKGRFTISRDNAKNTVYLQMNSLKPEDTAVYYCAVGLDLQYDVSACMYWGQGTQVTVSS

SEQ ID NO: 3089 - protein, 118 aa, Artificial Sequence
  Chemically Synthesized
QVQLQESGGGLVQAGGSLRLSCAASGSISRAVDMGWYRQAPGKERELVASISSGTNTYYADSVKGRFTISRDNAKNTVYLQMNSLKPEDTAVYYCAAYTLYSEVLYYWGQGTQVTVSS

SEQ ID NO: 3090 - protein, 126 aa, Artificial Sequence
  Chemically Synthesized
QVQLQESGGGLVQAGGSLRLSCAASGYIFVYLGMGWYRQAPGKEREFVAAITYGTTTYYADSVKGRFTISRDNAKNTVYLQMNSLKPEDTAVYYCAVGDLGEDWYWGTQYGDYPYWGQGTQVTVSS

SEQ ID NO: 3091 - protein, 121 aa, Artificial Sequence
  Chemically Synthesized
QVQLQESGGGLVQAGGSLRLSCAASGYIFLSLMGWYRQAPGKEREFVATITYGASTYYADSVKGRFTISRDNAKNTVYLQMNSLKPEDTAVYYCAVRWLKSANDSSRLYYWGQGTQVTVSS

SEQ ID NO: 3092 - protein, 116 aa, Artificial Sequence
  Chemically Synthesized
QVQLQESGGGLVQAGGSLRLSCAASGNISSRQVMGWYRQAPGKERELVATIGPGSSTYYADSVKGRFTISRDNAKNTVYLQMNSLKPEDTAVYYCAVAGGDTYGYWGQGTQVTVSS

SEQ ID NO: 3093 - protein, 117 aa, Artificial Sequence
  Chemically Synthesized
QVQLQESGGGLVQAGGSLRLSCAASGNIFYVVAMGWYRQAPGKERELVAGIASGATTNYADSVKGRFTISRDNAKNTVYLQMNSLKPEDTAVYYCAAVISANLHLYWGQGTQVTVSS

SEQ ID NO: 3094 - protein, 122 aa, Artificial Sequence
  Chemically Synthesized
QVQLQESGGGLVQAGGSLRLSCAASGTISPWYTMGWYRQAPGKERELVASISDGTSTNYADSVKGRFTISRDNAKNTVYLQMNSLKPEDTAVYYCAVYASTGERDRDEFSYWGQGTQVTVSS

SEQ ID NO: 3095 - protein, 122 aa, Artificial Sequence
  Chemically Synthesized
QVQLQESGGGLVQAGGSLRLSCAASGNIFGSWWMGWYRQAPGKERELVATINVGSSTNYADSVKGRFTISRDNAKNTVYLQMNSLKPEDTAVYYCAVRVLLDEWYTAYYPYWGQGTQVTVSS

SEQ ID NO: 3096 - protein, 112 aa, Artificial Sequence
  Chemically Synthesized
QVQLQESGGGLVQAGGSLRLSCAASGNISNSTAMGWYRQAPGKEREFVASIDSGGNTNYADSVKGRFTISRDNAKNTVYLQMNSLKPEDTAVYYCAAYHYYWGQGTQVTVSS

SEQ ID NO: 3097 - protein, 122 aa, Artificial Sequence
  Chemically Synthesized
QVQLQESGGGLVQAGGSLRLSCAASGNISGYYAMGWYRQAPGKERELVAAISWGANTNYADSVKGRFTISRDNAKNTVYLQMNSLKPEDTAVYYCAAVITFQDGKHTYHGYWGQGTQVTVSS

SEQ ID NO: 3098 - protein, 118 aa, Artificial Sequence
  Chemically Synthesized
QVQLQESGGGLVQAGGSLRLSCAASGTIFTYSYMGWYRQAPGKERELVAAINRGTNTNYADSVKGRFTISRDNAKNTVYLQMNSLKPEDTAVYYCAAYKRVYSRYSYWGQGTQVTVSS

SEQ ID NO: 3099 - protein, 118 aa, Artificial Sequence
  Chemically Synthesized
QVQLQESGGGLVQAGGSLRLSCAASGNIFTGFGMGWYRQAPGKERELVAAITYGAITYYADSVKGRFTISRDNAKNTVYLQMNSLKPEDTAVYYCAAQYLVETGHRYWGQGTQVTVSS

SEQ ID NO: 3100 - protein, 122 aa, Artificial Sequence
  Chemically Synthesized
QVQLQESGGGLVQAGGSLRLSCAASGNISYGPIMGWYRQAPGKEREFVAGIGRGTNTNYADSVKGRFTISRDNAKNTVYLQMNSLKPEDTAVYYCAVLYDANVDRDRYHYYWGQGTQVTVSS

SEQ ID NO: 3101 - protein, 122 aa, Artificial Sequence
  Chemically Synthesized
QVQLQESGGGLVQAGGSLRLSCAASGYIFKDRYMGWYRQAPGKEREFVAAINDGTNTNYADSVKGRFTISRDNAKNTVYLQMNSLKPEDTAVYYCAAIDRSVYTRADDHLYWGQGTQVTVSS

SEQ ID NO: 3102 - protein, 117 aa, Artificial Sequence
  Chemically Synthesized
QVQLQESGGGLVQAGGSLRLSCAASGYILVIGMGWYRQAPGKERELVATIDLGGTTYYADSVKGRFTISRDNAKNTVYLQMNSLKPEDTAVYYCAANYGYREEHWYWGQGTQVTVSS

SEQ ID NO: 3103 - protein, 118 aa, Artificial Sequence
  Chemically Synthesized
QVQLQESGGGLVQAGGSLRLSCAASGNISHATYMGWYRQAPGKERELVAAIGTGANTNYADSVKGRFTISRDNAKNTVYLQMNSLKPEDTAVYYCAVGPYYVVFHAYWGQGTQVTVSS

SEQ ID NO: 3104 - protein, 126 aa, Artificial Sequence
  Chemically Synthesized
QVQLQESGGGLVQAGGSLRLSCAASGTISYRDAMGWYRQAPGKEREFVASINLGSTTNYADSVKGRFTISRDNAKNTVYLQMNSLKPEDTAVYYCAALVRYRVQRTDRDVAFHDYWGQGTQVTVSS

SEQ ID NO: 3105 - protein, 118 aa, Artificial Sequence
  Chemically Synthesized
QVQLQESGGGLVQAGGSLRLSCAASGSISLYAVMGWYRQAPGKEREFVAAIDTGTTTNYADSVKGRFTISRDNAKNTVYLQMNSLKPEDTAVYYCAALGRTDYYHYYWGQGTQVTVSS

SEQ ID NO: 3106 - protein, 122 aa, Artificial Sequence
  Chemically Synthesized
QVQLQESGGGLVQAGGSLRLSCAASGNISYNLTMGWYRQAPGKEREFVAGIGRGGSTNYADSVKGRFTISRDNAKNTVYLQMNSLKPEDTAVYYCAALVVRYGSTVDYLPYWGQGTQVTVSS

SEQ ID NO: 3107 - protein, 111 aa, Artificial Sequence
  Chemically Synthesized
QVQLQESGGGLVQAGGSLRLSCAASGTIFDAYSMGWYRQAPGKEREFVAGIDFGGNTNYADSVKGRFTISRDNAKNTVYLQMNSLKPEDTAVYYCATLIYWGQGTQVTVSS

SEQ ID NO: 3108 - protein, 118 aa, Artificial Sequence
  Chemically Synthesized
QVQLQESGGGLVQAGGSLRLSCAASGTIFIARNMGWYRQAPGKEREFVAGIDLGSSTYYADSVKGRFTISRDNAKNTVYLQMNSLKPEDTAVYYCAALAYDTQYHYYWGQGTQVTVSS

SEQ ID NO: 3109 - protein, 118 aa, Artificial Sequence
  Chemically Synthesized
QVQLQESGGGLVQAGGSLRLSCAASGTISPAWVMGWYRQAPGKEREFVAGINYGGITNYADSVKGRFTISRDNAKNTVYLQMNSLKPEDTAVYYCAALVAQVPWHHYWGQGTQVTVSS

SEQ ID NO: 3110 - protein, 120 aa, Artificial Sequence
  Chemically Synthesized
QVQLQESGGGLVQAGGSLRLSCAASGTIFNGDDMGWYRQAPGKERELVASIAVVLPYADSVKGRFTISRDNAKNTVYLQMNSLKPEDTAVYYCAVRDDVWDDDDYIFGYWGQGTQVTVSS

SEQ ID NO: 3111 - protein, 118 aa, Artificial Sequence
  Chemically Synthesized
QVQLQESGGGLVQAGGSLRLSCAASGNISRFVSMGWYRQAPGKEREFVASINEGGSTNYADSVKGRFTISRDNAKNTVYLQMNSLKPEDTAVYYCAAYYRDYDYHGYWGQGTQVTVSS

SEQ ID NO: 3112 - protein, 118 aa, Artificial Sequence
  Chemically Synthesized
QVQLQESGGGLVQAGGSLRLSCAASGTIFADGNMGWYRQAPGKEREFVAGIAYGGITNYADSVKGRFTISRDNAKNTVYLQMNSLKPEDTAVYYCAALSQRDRRHYYWGQGTQVTVSS

SEQ ID NO: 3113 - protein, 118 aa, Artificial Sequence
  Chemically Synthesized
QVQLQESGGGLVQAGGSLRLSCAASGNISGGAVMGWYRQAPGKEREFVASITHGGITNYADSVKGRFTISRDNAKNTVYLQMNSLKPEDTAVYYCAVLILTRHYHHYWGQGTQVTVSS

SEQ ID NO: 3114 - protein, 116 aa, Artificial Sequence
  Chemically Synthesized
QVQLQESGGGLVQAGGSLRLSCAASGSISPAAYMGWYRQAPGKERELVATISYGTTTYYADSVKGRFTISRDNAKNTVYLQMNSLKPEDTAVYYCAATTGTTKHYWGQGTQVTVSS

SEQ ID NO: 3115 - protein, 117 aa, Artificial Sequence
  Chemically Synthesized
QVQLQESGGGLVQAGGSLRLSCAASGTISLSQAMGWYRQAPGKERELVAAISTVVLPYADSVKGRFTISRDNAKNTVYLQMNSLKPEDTAVYYCAAVSVDGYSYVYWGQGTQVTVSS

SEQ ID NO: 3116 - protein, 121 aa, Artificial Sequence
  Chemically Synthesized
QVQLQESGGGLVQAGGSLRLSCAASGNFLLLLMGWYRQAPGKERELVDGATTYYADSVKGRFTISRDNAKNTVYLQMNSLKPEDTAVYYCAVAILQARTRYQGDVVQHDYWGQGTQVTVSS

SEQ ID NO: 3117 - protein, 117 aa, Artificial Sequence
  Chemically Synthesized
QVQLQESGGGLVQAGGSLRLSCAASGTISGPSMGWYRQAPGKERELVAAIADGTSTNYADSVKGRFTISRDNAKNTVYLQMNSLKPEDTAVYYCAAGYYTLNAHGYWGQGTQVTVSS

SEQ ID NO: 3118 - protein, 118 aa, Artificial Sequence
  Chemically Synthesized
QVQLQESGGGLVQAGGSLRLSCAASGTISYAVGMGWYRQAPGKEREFVAAIGTGGNTNYADSVKGRFTISRDNAKNTVYLQMNSLKPEDTAVYYCAAVAAGVRYHYYWGQGTQVTVSS

SEQ ID NO: 3119 - protein, 118 aa, Artificial Sequence
  Chemically Synthesized
QVQLQESGGGLVQAGGSLRLSCAASGNISRGSAMGWYRQAPGKEREFVASIGTGGTTNYADSVKGRFTISRDNAKNTVYLQMNSLKPEDTAVYYCAAVSYDVRYHYYWGQGTQVTVSS

SEQ ID NO: 3120 - protein, 121 aa, Artificial Sequence
  Chemically Synthesized
QVQLQESGGGLVQAGGSLRLSCAASGYISRPYDMGWYRQAPGKERELVAGMVVVLLPYADSVKGRFTISRDNAKNTVYLQMNSLKPEDTAVYYCAVHVVITQGYYYPFIYWGQGTQVTVSS

SEQ ID NO: 3121 - protein, 122 aa, Artificial Sequence
  Chemically Synthesized
QVQLQESGGGLVQAGGSLRLSCAASGNISYGPWMGWYRQAPGKERELVASITDGGTTYYADSVKGRFTISRDNAKNTVYLQMNSLKPEDTAVYYCAAIDYASNLNHRRHGYWGQGTQVTVSS

SEQ ID NO: 3122 - protein, 118 aa, Artificial Sequence
  Chemically Synthesized
QVQLQESGGGLVQAGGSLRLSCAASGNIFYAAIMGWYRQAPGKEREFVATISHGSTTYYADSVKGRFTISRDNAKNTVYLQMNSLKPEDTAVYYCAVQSESYYPFDYWGQGTQVTVSS

SEQ ID NO: 3123 - protein, 118 aa, Artificial Sequence
  Chemically Synthesized
QVQLQESGGGLVQAGGSLRLSCAASGTIFDFYIMGWYRQAPGKEREFVAAIDTGSNTYYADSVKGRFTISRDNAKNTVYLQMNSLKPEDTAVYYCAVYVRRLAVYYYWGQGTQVTVSS

SEQ ID NO: 3124 - protein, 122 aa, Artificial Sequence
  Chemically Synthesized
QVQLQESGGGLVQAGGSLRLSCAASGTISFLDYMGWYRQAPGKERELVAAINQGAITYYADSVKGRFTISRDNAKNTVYLQMNSLKPEDTAVYYCAVDSYVPQYHHLGHRYWGQGTQVTVSS

SEQ ID NO: 3125 - protein, 118 aa, Artificial Sequence
  Chemically Synthesized
QVQLQESGGGLVQAGGSLRLSCAASGNIFDYGSMGWYRQAPGKEREFVAAIGYGGTTYYADSVKGRFTISRDNAKNTVYLQMNSLKPEDTAVYYCAVYYDINGIFSYWGQGTQVTVSS

SEQ ID NO: 3126 - protein, 120 aa, Artificial Sequence
  Chemically Synthesized
QVQLQESGGGLVQAGGSLRLSCAASGYIFFTFSMGWYRQAPGKERELVASIALGGNTNYADSVKGRFTISRDNAKNTVYLQMNSLKPEDTAVYYCAADSPTDSDAPLNYWGQGTQVTVSS

SEQ ID NO: 3127 - protein, 118 aa, Artificial Sequence
  Chemically Synthesized
QVQLQESGGGLVQAGGSLRLSCAASGNIFGYRVMGWYRQAPGKERELVATISAGANTNYADSVKGRFTISRDNAKNTVYLQMNSLKPEDTAVYYCAAGPGSDPRHSYWGQGTQVTVSS

SEQ ID NO: 3128 - protein, 122 aa, Artificial Sequence
  Chemically Synthesized
QVQLQESGGGLVQAGGSLRLSCAASGTISNGYYMGWYRQAPGKEREFVASISRGAITNYADSVKGRFTISRDNAKNTVYLQMNSLKPEDTAVYYCAATVTTVGLTTLVVIYWGQGTQVTVSS

SEQ ID NO: 3129 - protein, 122 aa, Artificial Sequence
  Chemically Synthesized
QVQLQESGGGLVQAGGSLRLSCAASGTIFYNTVMGWYRQAPGKEREFVAAIDTGTNTNYADSVKGRFTISRDNAKNTVYLQMNSLKPEDTAVYYCAAWDGDSHLEWYFYYYWGQGTQVTVSS

SEQ ID NO: 3130 - protein, 117 aa, Artificial Sequence
  Chemically Synthesized
QVQLQESGGGLVQAGGSLRLSCAASGSISNDDWMGWYRQAPGKEREFVASITFVLLPYADSVKGRFTISRDNAKNTVYLQMNSLKPEDTAVYYCAATLDYRSLHFYWGQGTQVTVSS

SEQ ID NO: 3131 - protein, 116 aa, Artificial Sequence
  Chemically Synthesized
QVQLQESGGGLVQAGGSLRLSCAASGNIFAHDRMGWYRQAPGKEREFVATIDTGGITNYADSVKGRFTISRDNAKNTVYLQMNSLKPEDTAVYYCAATYINEGYYWGQGTQVTVSS

SEQ ID NO: 3132 - protein, 126 aa, Artificial Sequence
  Chemically Synthesized
QVQLQESGGGLVQAGGSLRLSCAASGTIFSDQIMGWYRQAPGKERELVAAIAIGTITYYADSVKGRFTISRDNAKNTVYLQMNSLKPEDTAVYYCAVDNVEYQWVSRTESRSYRYWGQGTQVTVSS

SEQ ID NO: 3133 - protein, 118 aa, Artificial Sequence
  Chemically Synthesized
QVQLQESGGGLVQAGGSLRLSCAASGNISIVLPMGWYRQAPGKERELVAAIDTGTTTNYADSVKGRFTISRDNAKNTVYLQMNSLKPEDTAVYYCAAAANTFGAHYYWGQGTQVTVSS

SEQ ID NO: 3134 - protein, 126 aa, Artificial Sequence
  Chemically Synthesized
QVQLQESGGGLVQAGGSLRLSCAASGTISWQEQMGWYRQAPGKEREFVATINYGAITYYADSVKGRFTISRDNAKNTVYLQMNSLKPEDTAVYYCAVGQVYKYDVLGDYQRGHVYWGQGTQVTVSS

SEQ ID NO: 3135 - protein, 118 aa, Artificial Sequence
  Chemically Synthesized
QVQLQESGGGLVQAGGSLRLSCAASGTISYSRFMGWYRQAPGKEREFVASIGNGGNTYYADSVKGRFTISRDNAKNTVYLQMNSLKPEDTAVYYCAADDYRYVYHPYWGQGTQVTVSS

SEQ ID NO: 3136 - protein, 121 aa, Artificial Sequence
  Chemically Synthesized
QVQLQESGGGLVQAGGSLRLSCAASGTIFDDLMGWYRQAPGKEREFVATITQGTTTYYADSVKGRFTISRDNAKNTVYLQMNSLKPEDTAVYYCAAHLVGVSDDGDDHAYWGQGTQVTVSS

SEQ ID NO: 3137 - protein, 122 aa, Artificial Sequence
  Chemically Synthesized
QVQLQESGGGLVQAGGSLRLSCAASGTISDQHPMGWYRQAPGKERELVAGITYGSTTYYADSVKGRFTISRDNAKNTVYLQMNSLKPEDTAVYYCAGYRSSGQRLPGHSWYWGQGTQVTVSS

SEQ ID NO: 3138 - protein, 118 aa, Artificial Sequence
  Chemically Synthesized
QVQLQESGGGLVQAGGSLRLSCAASGNIYQYMGWYRQAPGKERELVATSWWYYQYADSVKGRFTISRDNAKNTVYLQMNSLKPEDTAVYYCAAPILYSSYERYKLRYWGQGTQVTVSS

SEQ ID NO: 3139 - protein, 118 aa, Artificial Sequence
  Chemically Synthesized
QVQLQESGGGLVQAGGSLRLSCAASGNISYDAIMGWYRQAPGKERELVASIDTGANTYYADSVKGRFTISRDNAKNTVYLQMNSLKPEDTAVYYCAVIRDRSGFYLYWGQGTQVTVSS

SEQ ID NO: 3140 - protein, 114 aa, Artificial Sequence
  Chemically Synthesized
QVQLQESGGGLVQAGGSLRLSCAASGSIFGIYGMGWYRQAPGKEREFVAAITPGATTNYADSVKGRFTISRDNAKNTVYLQMNSLKPEDTAVYYCATTTVVMYWGQGTQVTVSS

SEQ ID NO: 3141 - protein, 122 aa, Artificial Sequence
  Chemically Synthesized
QVQLQESGGGLVQAGGSLRLSCAASGSISEYRYMGWYRQAPGKERELVATIDRGAITNYADSVKGRFTISRDNAKNTVYLQMNSLKPEDTAVYYCAVDAGYYYVWYEYYAYWGQGTQVTVSS

SEQ ID NO: 3142 - protein, 118 aa, Artificial Sequence
  Chemically Synthesized
QVQLQESGGGLVQAGGSLRLSCAASGNISQIRYMGWYRQAPGKERELVASIGYGGITYYADSVKGRFTISRDNAKNTVYLQMNSLKPEDTAVYYCAAWRRRDYGFGYWGQGTQVTVSS

SEQ ID NO: 3143 - protein, 117 aa, Artificial Sequence
  Chemically Synthesized
QVQLQESGGGLVQAGGSLRLSCAASGSIFTTYHMGWYRQAPGKERELVASIDHGSTTNYADSVKGRFTISRDNAKNTVYLQMNSLKPEDTAVYYCAVELSVTLNIYWGQGTQVTVSS

SEQ ID NO: 3144 - protein, 122 aa, Artificial Sequence
  Chemically Synthesized
QVQLQESGGGLVQAGGSLRLSCAASGSIFRVRSMGWYRQAPGKEREFVATIDPGATTNYADSVKGRFTISRDNAKNTVYLQMNSLKPEDTAVYYCAAGHPTTFAYRTVPWYWGQGTQVTVSS

SEQ ID NO: 3145 - protein, 117 aa, Artificial Sequence
  Chemically Synthesized
QVQLQESGGGLVQAGGSLRLSCAASGNISDDGYMGWYRQAPGKEREFVATIAPGTNTNYADSVKGRFTISRDNAKNTVYLQMNSLKPEDTAVYYCAAFASDFGSLYWGQGTQVTVSS

SEQ ID NO: 3146 - protein, 118 aa, Artificial Sequence
  Chemically Synthesized
QVQLQESGGGLVQAGGSLRLSCAASGSIFDQVIMGWYRQAPGKERELVAAITDGSTTNYADSVKGRFTISRDNAKNTVYLQMNSLKPEDTAVYYCAVHDYFPRNLTYWGQGTQVTVSS

SEQ ID NO: 3147 - protein, 122 aa, Artificial Sequence
  Chemically Synthesized
QVQLQESGGGLVQAGGSLRLSCAASGNISPRVDMGWYRQAPGKEREFVAGIGYGGITYYADSVKGRFTISRDNAKNTVYLQMNSLKPEDTAVYYCAVAAVGRGLDIYDHYYWGQGTQVTVSS

SEQ ID NO: 3148 - protein, 118 aa, Artificial Sequence
  Chemically Synthesized
QVQLQESGGGLVQAGGSLRLSCAASGSISRTHYMGWYRQAPGKEREFVAGITLGSTTYYADSVKGRFTISRDNAKNTVYLQMNSLKPEDTAVYYCAATYRYWRYYFYWGQGTQVTVSS

SEQ ID NO: 3149 - protein, 118 aa, Artificial Sequence
  Chemically Synthesized
QVQLQESGGGLVQAGGSLRLSCAASGTIFYDSGMGWYRQAPGKERELVATIAFGSITYYADSVKGRFTISRDNAKNTVYLQMNSLKPEDTAVYYCAALIYVFIYFGYWGQGTQVTVSS

SEQ ID NO: 3150 - protein, 126 aa, Artificial Sequence
  Chemically Synthesized
QVQLQESGGGLVQAGGSLRLSCAASGSISYWWVMGWYRQAPGKERELVATISLGSTTYYADSVKGRFTISRDNAKNTVYLQMNSLKPEDTAVYYCAARYNDTRYERPIRSSSHPYWGQGTQVTVSS

SEQ ID NO: 3151 - protein, 121 aa, Artificial Sequence
  Chemically Synthesized
QVQLQESGGGLVQAGGSLRLSCAASGTISYDHGMGWYRQAPGKEREFVAGIDPGTTTYYADSVKGRFTISRDNAKNTVYLQMNSLKPEDTAVYYCAAQYSTFTTLLSFMYWGQGTQVTVSS

SEQ ID NO: 3152 - protein, 118 aa, Artificial Sequence
  Chemically Synthesized
QVQLQESGGGLVQAGGSLRLSCAASGTISWNGRMGWYRQAPGKERELVATIARGGITYYADSVKGRFTISRDNAKNTVYLQMNSLKPEDTAVYYCAAGPIGDVVYPYWGQGTQVTVSS

SEQ ID NO: 3153 - protein, 121 aa, Artificial Sequence
  Chemically Synthesized
QVQLQESGGGLVQAGGSLRLSCAASGNISDIPVMGWYRQAPGKERELVAAIASGAITYYADSVKGRFTISRDNAKNTVYLQMNSLKPEDTAVYYCAVAANELPTYDFVIYWGQGTQVTVSS

SEQ ID NO: 3154 - protein, 122 aa, Artificial Sequence
  Chemically Synthesized
QVQLQESGGGLVQAGGSLRLSCAASGSISSAYPMGWYRQAPGKEREFVAGITQGTNTYYADSVKGRFTISRDNAKNTVYLQMNSLKPEDTAVYYCAVWLTAYITDYRYHWYWGQGTQVTVSS

SEQ ID NO: 3155 - protein, 118 aa, Artificial Sequence
  Chemically Synthesized
QVQLQESGGGLVQAGGSLRLSCAASGNIFAKYLMGWYRQAPGKEREFVASINYGGNTNYADSVKGRFTISRDNAKNTVYLQMNSLKPEDTAVYYCAADTDVAVVHAYWGQGTQVTVSS

SEQ ID NO: 3156 - protein, 126 aa, Artificial Sequence
  Chemically Synthesized
QVQLQESGGGLVQAGGSLRLSCAASGTIFSTLTMGWYRQAPGKEREFVAAITTGTTTNYADSVKGRFTISRDNAKNTVYLQMNSLKPEDTAVYYCAAPYNDPTGDTDASYLKHIYWGQGTQVTVSS

SEQ ID NO: 3157 - protein, 126 aa, Artificial Sequence
  Chemically Synthesized
QVQLQESGGGLVQAGGSLRLSCAASGTISEPPVMGWYRQAPGKERELVATISYGGITNYADSVKGRFTISRDNAKNTVYLQMNSLKPEDTAVYYCAVDIGDVYDNYGRVVYAYDYWGQGTQVTVSS

SEQ ID NO: 3158 - protein, 118 aa, Artificial Sequence
  Chemically Synthesized
QVQLQESGGGLVQAGGSLRLSCAASGYISGAPTMGWYRQAPGKEREFVAGISSGANTNYADSVKGRFTISRDNAKNTVYLQMNSLKPEDTAVYYCAVTDDIVGVHGYWGQGTQVTVSS

SEQ ID NO: 3159 - protein, 118 aa, Artificial Sequence
  Chemically Synthesized
QVQLQESGGGLVQAGGSLRLSCAASGNISPDRGMGWYRQAPGKEREFVATISVGASTNYADSVKGRFTISRDNAKNTVYLQMNSLKPEDTAVYYCAAYDILGRALSYWGQGTQVTVSS

SEQ ID NO: 3160 - protein, 122 aa, Artificial Sequence
  Chemically Synthesized
QVQLQESGGGLVQAGGSLRLSCAASGTIFYFYDMGWYRQAPGKERELVATIDYGSTTNYADSVKGRFTISRDNAKNTVYLQMNSLKPEDTAVYYCAALDEWVYIYSYDLFYWGQGTQVTVSS

SEQ ID NO: 3161 - protein, 118 aa, Artificial Sequence
  Chemically Synthesized
QVQLQESGGGLVQAGGSLRLSCAASGYISYLSDMGWYRQAPGKERELVAAITYGTSTNYADSVKGRFTISRDNAKNTVYLQMNSLKPEDTAVYYCAVATSWYQYLAYWGQGTQVTVSS

SEQ ID NO: 3162 - protein, 110 aa, Artificial Sequence
  Chemically Synthesized
QVQLQESGGGLVQAGGSLRLSCAASGSIFAIYDMGWYRQAPGKEREFVASIGSGSITNYADSVKGRFTISRDNAKNTVYLQMNSLKPEDTAVYYCAADYWGQGTQVTVSS

SEQ ID NO: 3163 - protein, 120 aa, Artificial Sequence
  Chemically Synthesized
QVQLQESGGGLVQAGGSLRLSCAASGSISDGYLMGWYRQAPGKERELLPVLVVVVLPYADSVKGRFTISRDNAKNTVYLQMNSLKPEDTAVYYCAAGPDYYYSSTGTIYWGQGTQVTVSS

SEQ ID NO: 3164 - protein, 121 aa, Artificial Sequence
  Chemically Synthesized
QVQLQESGGGLVQAGGSLRLSCAASGNISYQFRMGWYRQAPGKEREFVAAIAWGGITNYADSVKGRFTISRDNAKNTVYLQMNSLKPEDTAVYYCAADYDDSTLVVTLMYWGQGTQVTVSS

SEQ ID NO: 3165 - protein, 122 aa, Artificial Sequence
  Chemically Synthesized
QVQLQESGGGLVQAGGSLRLSCAASGYISNPHYMGWYRQAPGKEREFVAAIASGTSTYYADSVKGRFTISRDNAKNTVYLQMNSLKPEDTAVYYCAANADGFVTDVILFIYWGQGTQVTVSS

SEQ ID NO: 3166 - protein, 117 aa, Artificial Sequence
  Chemically Synthesized
QVQLQESGGGLVQAGGSLRLSCAASGSIFSLVMGWYRQAPGKERELVASIAEGGSTNYADSVKGRFTISRDNAKNTVYLQMNSLKPEDTAVYYCAVGVGLPLYFTYWGQGTQVTVSS

SEQ ID NO: 3167 - protein, 111 aa, Artificial Sequence
  Chemically Synthesized
QVQLQESGGGLVQAGGSLRLSCAASGNIFYPERMGWYRQAPGKERELVATINYADSVKGRFTISRDNAKNTVYLQMNSLKPEDTAVYYCAVADTRYAFAYWGQGTQVTVSS

SEQ ID NO: 3168 - protein, 118 aa, Artificial Sequence
  Chemically Synthesized
QVQLQESGGGLVQAGGSLRLSCAASGSIFTTYRMGWYRQAPGKEREFVATITYGTNTNYADSVKGRFTISRDNAKNTVYLQMNSLKPEDTAVYYCAVRRYVGRKFDYWGQGTQVTVSS

SEQ ID NO: 3169 - protein, 122 aa, Artificial Sequence
  Chemically Synthesized
QVQLQESGGGLVQAGGSLRLSCAASGYIFGYTFMGWYRQAPGKEREFVAAIDDGTSTNYADSVKGRFTISRDNAKNTVYLQMNSLKPEDTAVYYCAVNTQYNYQYDSPHRYWGQGTQVTVSS

SEQ ID NO: 3170 - protein, 126 aa, Artificial Sequence
  Chemically Synthesized
QVQLQESGGGLVQAGGSLRLSCAASGYIFRPRAMGWYRQAPGKERELVAGISYGSTTNYADSVKGRFTISRDNAKNTVYLQMNSLKPEDTAVYYCAVSGIWGLGTVDDRDETYPYWGQGTQVTVSS

SEQ ID NO: 3171 - protein, 117 aa, Artificial Sequence
  Chemically Synthesized
QVQLQESGGGLVQAGGSLRLSCAASGTIFYSYLMGWYRQAPGKEREFVASISSVLIPYADSVKGRFTISRDNAKNTVYLQMNSLKPEDTAVYYCAVYENADDALSYWGQGTQVTVSS

SEQ ID NO: 3172 - protein, 110 aa, Artificial Sequence
  Chemically Synthesized
QVQLQESGGGLVQAGGSLRLSCAASGNIFNYNAMGWYRQAPGKERELVASIANGSSTNYADSVKGRFTISRDNAKNTVYLQMNSLKPEDTAVYYCAAIYWGQGTQVTVSS

SEQ ID NO: 3173 - protein, 118 aa, Artificial Sequence
  Chemically Synthesized
QVQLQESGGGLVQAGGSLRLSCAASGSISRDPSMGWYRQAPGKERELVAAIGAGSSTYYADSVKGRFTISRDNAKNTVYLQMNSLKPEDTAVYYCAVDRSGYIYHRYWGQGTQVTVSS

SEQ ID NO: 3174 - protein, 125 aa, Artificial Sequence
  Chemically Synthesized
QVQLQESGGGLVQAGGSLRLSCAASGSIFIGNTMGWYRQAPGKEREFVASISFGASTYYADSVKGRFTISRDNAKNTVYLQMNSLKPEDTAVYYCAALDRYPHGNARRGDVHQYWGQGTQVTVSS

SEQ ID NO: 3175 - protein, 122 aa, Artificial Sequence
  Chemically Synthesized
QVQLQESGGGLVQAGGSLRLSCAASGSIFPASNMGWYRQAPGKERELVATITDGGTTNYADSVKGRFTISRDNAKNTVYLQMNSLKPEDTAVYYCAALLTAHPDYEGRFAYWGQGTQVTVSS

SEQ ID NO: 3176 - protein, 117 aa, Artificial Sequence
  Chemically Synthesized
QVQLQESGGGLVQAGGSLRLSCAASGNIFPLQGMGWYRQAPGKEREFVAAINYGSTTYYADSVKGRFTISRDNAKNTVYLQMNSLKPEDTAVYYCAAYNTSVTVIYWGQGTQVTVSS

SEQ ID NO: 3177 - protein, 117 aa, Artificial Sequence
  Chemically Synthesized
QVQLQESGGGLVQAGGSLRLSCAASGNISEGNVMGWYRQAPGKERELVATINPGSITYYADSVKGRFTISRDNAKNTVYLQMNSLKPEDTAVYYCAVTPSVNGTMYWGQGTQVTVSS

SEQ ID NO: 3178 - protein, 122 aa, Artificial Sequence
  Chemically Synthesized
QVQLQESGGGLVQAGGSLRLSCAASGTIFKDDYMGWYRQAPGKERELVAAINAGGSTNYADSVKGRFTISRDNAKNTVYLQMNSLKPEDTAVYYCAAIAHAQDGYYPYLHYWGQGTQVTVSS

SEQ ID NO: 3179 - protein, 118 aa, Artificial Sequence
  Chemically Synthesized
QVQLQESGGGLVQAGGSLRLSCAASGNISGDDGMGWYRQAPGKEREFVATIGRGTSTYYADSVKGRFTISRDNAKNTVYLQMNSLKPEDTAVYYCAVGGYVYSYLDYWGQGTQVTVSS

SEQ ID NO: 3180 - protein, 118 aa, Artificial Sequence
  Chemically Synthesized
QVQLQESGGGLVQAGGSLRLSCAASGYISFAYVMGWYRQAPGKERELVATIADGTITYYADSVKGRFTISRDNAKNTVYLQMNSLKPEDTAVYYCAAVDRLIYYYVYWGQGTQVTVSS

SEQ ID NO: 3181 - protein, 121 aa, Artificial Sequence
  Chemically Synthesized
QVQLQESGGGLVQAGGSLRLSCAASGYISRSEWMGWYRQAPGKERELVATISLGGTTYYADSVKGRFTISRDNAKNTVYLQMNSLKPEDTAVYYCAAYYTYRDKAYNYRYWGQGTQVTVSS

SEQ ID NO: 3182 - protein, 122 aa, Artificial Sequence
  Chemically Synthesized
QVQLQESGGGLVQAGGSLRLSCAASGYIFLVYGMGWYRQAPGKERELVASINEGTNTYYADSVKGRFTISRDNAKNTVYLQMNSLKPEDTAVYYCAAGWNGYPANIFPYDYWGQGTQVTVSS

SEQ ID NO: 3183 - protein, 122 aa, Artificial Sequence
  Chemically Synthesized
QVQLQESGGGLVQAGGSLRLSCAASGNIFTASMGWYRQAPGKEREFVASMVVLPYADSVKGRFTISRDNAKNTVYLQMNSLKPEDTAVYYCAVTQWYDGYVGYLVGHPLTYWGQGTQVTVSS

SEQ ID NO: 3184 - protein, 126 aa, Artificial Sequence
  Chemically Synthesized
QVQLQESGGGLVQAGGSLRLSCAASGTISEPRFMGWYRQAPGKERELVATITIGTNTNYADSVKGRFTISRDNAKNTVYLQMNSLKPEDTAVYYCAARYWSDWYVSYYNGWRYPYWGQGTQVTVSS

SEQ ID NO: 3185 - protein, 117 aa, Artificial Sequence
  Chemically Synthesized
QVQLQESGGGLVQAGGSLRLSCAASGYILTRTMGWYRQAPGKEREFVAAIGNGGSTNYADSVKGRFTISRDNAKNTVYLQMNSLKPEDTAVYYCAVESQAEAYHDYWGQGTQVTVSS

SEQ ID NO: 3186 - protein, 119 aa, Artificial Sequence
  Chemically Synthesized
QVQLQESGGGLVQAGGSLRLSCAASGTISAGTMGWYRQAPGKERELVASIADGGNTNYADSVKGRFTISRDNAKNTVYLQMNSLKPEDTAVYYCALLRRTFVFTLCIYWGQGTQVTVSS

SEQ ID NO: 3187 - protein, 121 aa, Artificial Sequence
  Chemically Synthesized
QVQLQESGGGLVQAGGSLRLSCAASGYIFSVFMGWYRQAPGKEREFVAAIDTGSITYYADSVKGRFTISRDNAKNTVYLQMNSLKPEDTAVYYCAVAYSAQFGGYITHEYWGQGTQVTVSS

SEQ ID NO: 3188 - protein, 122 aa, Artificial Sequence
  Chemically Synthesized
QVQLQESGGGLVQAGGSLRLSCAASGSISPANWMGWYRQAPGKEREFVAGIDFGASTNYADSVKGRFTISRDNAKNTVYLQMNSLKPEDTAVYYCAATVRGYIVSDPWHWYWGQGTQVTVSS

SEQ ID NO: 3189 - protein, 117 aa, Artificial Sequence
  Chemically Synthesized
QVQLQESGGGLVQAGGSLRLSCAASGYISQQSLMGWYRQAPGKERELVAGINEGATTYYADSVKGRFTISRDNAKNTVYLQMNSLKPEDTAVYYCAADPVRLRSIYWGQGTQVTVSS

SEQ ID NO: 3190 - protein, 118 aa, Artificial Sequence
  Chemically Synthesized
QVQLQESGGGLVQAGGSLRLSCAASGTIFDRDYMGWYRQAPGKERELVAAIAYGTITNYADSVKGRFTISRDNAKNTVYLQMNSLKPEDTAVYYCAAYTEEDGHYGYWGQGTQVTVSS

SEQ ID NO: 3191 - protein, 116 aa, Artificial Sequence
  Chemically Synthesized
QVQLQESGGGLVQAGGSLRLSCAASGNISNYYMGWYRQAPGKEREFVAGISNGSTTNYADSVKGRFTISRDNAKNTVYLQMNSLKPEDTAVYYCAADRYYALLMYWGQGTQVTVSS

SEQ ID NO: 3192 - protein, 118 aa, Artificial Sequence
  Chemically Synthesized
QVQLQESGGGLVQAGGSLRLSCAASGSIFYYPLMGWYRQAPGKERELVATIAYGSITNYADSVKGRFTISRDNAKNTVYLQMNSLKPEDTAVYYCAVVIIYGNDFSYWGQGTQVTVSS

SEQ ID NO: 3193 - protein, 122 aa, Artificial Sequence
  Chemically Synthesized
QVQLQESGGGLVQAGGSLRLSCAASGTISGDTTMGWYRQAPGKEREFVASIAYGAITYYADSVKGRFTISRDNAKNTVYLQMNSLKPEDTAVYYCAAYQIVAISDAGGYDYWGQGTQVTVSS

SEQ ID NO: 3194 - protein, 118 aa, Artificial Sequence
  Chemically Synthesized
QVQLQESGGGLVQAGGSLRLSCAASGSISTSGYMGWYRQAPGKEREFVASIGDGGTTNYADSVKGRFTISRDNAKNTVYLQMNSLKPEDTAVYYCAVGYADRHTHWYWGQGTQVTVSS

SEQ ID NO: 3195 - protein, 118 aa, Artificial Sequence
  Chemically Synthesized
QVQLQESGGGLVQAGGSLRLSCAASGYIFVFGYMGWYRQAPGKEREFVATIGVGTNTNYADSVKGRFTISRDNAKNTVYLQMNSLKPEDTAVYYCAARRGIRYGHYYWGQGTQVTVSS

SEQ ID NO: 3196 - protein, 121 aa, Artificial Sequence
  Chemically Synthesized
QVQLQESGGGLVQAGGSLRLSCAASGSIFAGYAMGWYRQAPGKEREFVAGINDGGSTNYADSVKGRFTISRDNAKNTVYLQMNSLKPEDTAVYYCAANGEVVRTTRLTLYWGQGTQVTVSS

SEQ ID NO: 3197 - protein, 122 aa, Artificial Sequence
  Chemically Synthesized
QVQLQESGGGLVQAGGSLRLSCAASGSIFTTNYMGWYRQAPGKEREFVASITRGGNTYYADSVKGRFTISRDNAKNTVYLQMNSLKPEDTAVYYCAARAYNNVPVYYYHVYWGQGTQVTVSS

SEQ ID NO: 3198 - protein, 114 aa, Artificial Sequence
  Chemically Synthesized
QVQLQESGGGLVQAGGSLRLSCAASGSISGRREMGWYRQAPGKEREFVASINPGSSTNYADSVKGRFTISRDNAKNTVYLQMNSLKPEDTAVYYCAVYLVLDYWGQGTQVTVSS

SEQ ID NO: 3199 - protein, 110 aa, Artificial Sequence
  Chemically Synthesized
QVQLQESGGGLVQAGGSLRLSCAASGYISTGPWMGWYRQAPGKERELVAGINYGASTNYADSVKGRFTISRDNAKNTVYLQMNSLKPEDTAVYYCAAIYWGQGTQVTVSS

SEQ ID NO: 3200 - protein, 121 aa, Artificial Sequence
  Chemically Synthesized
QVQLQESGGGLVQAGGSLRLSCAASGIFLSTNMGWYRQAPGKEREFVAGITAGTSTYYADSVKGRFTISRDNAKNTVYLQMNSLKPEDTAVYYCAVWRYVFYRHISYHAYWGQGTQVTVSS

SEQ ID NO: 3201 - protein, 118 aa, Artificial Sequence
  Chemically Synthesized
QVQLQESGGGLVQAGGSLRLSCAASGYIFDGLSMGWYRQAPGKEREFVAGITFGTSTNYADSVKGRFTISRDNAKNTVYLQMNSLKPEDTAVYYCAVVYIADYSLDYWGQGTQVTVSS

SEQ ID NO: 3202 - protein, 118 aa, Artificial Sequence
  Chemically Synthesized
QVQLQESGGGLVQAGGSLRLSCAASGNIFDFGTMGWYRQAPGKERELVAAIGDGGSTNYADSVKGRFTISRDNAKNTVYLQMNSLKPEDTAVYYCAVHRGYAYDHDYWGQGTQVTVSS

SEQ ID NO: 3203 - protein, 122 aa, Artificial Sequence
  Chemically Synthesized
QVQLQESGGGLVQAGGSLRLSCAASGNISLIGLMGWYRQAPGKERELVAGIAIGGITNYADSVKGRFTISRDNAKNTVYLQMNSLKPEDTAVYYCAAVYDIGYYYWYGHTYWGQGTQVTVSS

SEQ ID NO: 3204 - protein, 117 aa, Artificial Sequence
  Chemically Synthesized
QVQLQESGGGLVQAGGSLRLSCAASGLFFTFLMGWYRQAPGKEREFVAGINFGGSTNYADSVKGRFTISRDNAKNTVYLQMNSLKPEDTAVYYCAASQDYWIVHSYWGQGTQVTVSS

SEQ ID NO: 3205 - protein, 119 aa, Artificial Sequence
  Chemically Synthesized
QVQLQESGGGLVQAGGSLRLSCAASGYIFTYVVMGWYRQAPGKERELVAFGASTNYADSVKGRFTISRDNAKNTVYLQMNSLKPEDTAVYYCAVATKGLYGRYRDHSYWGQGTQVTVSS

SEQ ID NO: 3206 - protein, 117 aa, Artificial Sequence
  Chemically Synthesized
QVQLQESGGGLVQAGGSLRLSCAASGSIFDWHMGWYRQAPGKERELVASIDGGAITNYADSVKGRFTISRDNAKNTVYLQMNSLKPEDTAVYYCAALYDGYHVHDYWGQGTQVTVSS

SEQ ID NO: 3207 - protein, 118 aa, Artificial Sequence
  Chemically Synthesized
QVQLQESGGGLVQAGGSLRLSCAASGSIFNDFLMGWYRQAPGKERELVAAIGNGSITYYADSVKGRFTISRDNAKNTVYLQMNSLKPEDTAVYYCAVTFPQIGDHDYWGQGTQVTVSS

SEQ ID NO: 3208 - protein, 122 aa, Artificial Sequence
  Chemically Synthesized
QVQLQESGGGLVQAGGSLRLSCAASGNISDVIHMGWYRQAPGKEREFVAAIGSGGITYYADSVKGRFTISRDNAKNTVYLQMNSLKPEDTAVYYCAAGLYRPQDGQYYLDYWGQGTQVTVSS

SEQ ID NO: 3209 - protein, 125 aa, Artificial Sequence
  Chemically Synthesized
QVQLQESGGGLVQAGGSLRLSCAASGSISYPGRMGWYRQAPGKERELVAGIAHGGITNYADSVKGRFTISRDNAKNTVYLQMNSLKPEDTAVYYCAASLTVRLLTTHFYLVPLYWGQGTQVTVSS

SEQ ID NO: 3210 - protein, 118 aa, Artificial Sequence
  Chemically Synthesized
QVQLQESGGGLVQAGGSLRLSCAASGTIFRWAVMGWYRQAPGKEREFVASIGIGGTTYYADSVKGRFTISRDNAKNTVYLQMNSLKPEDTAVYYCAVTFGQPDAYEYWGQGTQVTVSS

SEQ ID NO: 3211 - protein, 118 aa, Artificial Sequence
  Chemically Synthesized
QVQLQESGGGLVQAGGSLRLSCAASGNISAKYYMGWYRQAPGKERELVAGIAEGGTTYYADSVKGRFTISRDNAKNTVYLQMNSLKPEDTAVYYCAAAYWDYEGHYYWGQGTQVTVSS

SEQ ID NO: 3212 - protein, 122 aa, Artificial Sequence
  Chemically Synthesized
QVQLQESGGGLVQAGGSLRLSCAASGSISGRAGMGWYRQAPGKERELVATIGAGTSTNYADSVKGRFTISRDNAKNTVYLQMNSLKPEDTAVYYCAADQRYQYNAHIPFDYWGQGTQVTVSS

SEQ ID NO: 3213 - protein, 118 aa, Artificial Sequence
  Chemically Synthesized
QVQLQESGGGLVQAGGSLRLSCAASGNISYTVDMGWYRQAPGKERELVATIDYGGNTYYADSVKGRFTISRDNAKNTVYLQMNSLKPEDTAVYYCAVNSLYYPYYAYWGQGTQVTVSS

SEQ ID NO: 3214 - protein, 114 aa, Artificial Sequence
  Chemically Synthesized
QVQLQESGGGLVQAGGSLRLSCAASGSIFASLMGWYRQAPGKEREFVAGIGYGTITNYADSVKGRFTISRDNAKNTVYLQMNSLKPEDTAVYYCAVSYAWFDYWGQGTQVTVSS

SEQ ID NO: 3215 - protein, 117 aa, Artificial Sequence
  Chemically Synthesized
QVQLQESGGGLVQAGGSLRLSCAASGYISGSAVMGWYRQAPGKEREFVAAIADGGSTNYADSVKGRFTISRDNAKNTVYLQMNSLKPEDTAVYYCAVSTRTVGGLYWGQGTQVTVSS

SEQ ID NO: 3216 - protein, 117 aa, Artificial Sequence
  Chemically Synthesized
QVQLQESGGGLVQAGGSLRLSCAASGNIFWPGTMGWYRQAPGKERELVASIAYGGITNYADSVKGRFTISRDNAKNTVYLQMNSLKPEDTAVYYCAVWWYYLYHAYWGQGTQVTVSS

SEQ ID NO: 3217 - protein, 118 aa, Artificial Sequence
  Chemically Synthesized
QVQLQESGGGLVQAGGSLRLSCAASGNISSDVTMGWYRQAPGKEREFVAGISDGGNTYYADSVKGRFTISRDNAKNTVYLQMNSLKPEDTAVYYCAVYRPYDDTFPYWGQGTQVTVSS

SEQ ID NO: 3218 - protein, 118 aa, Artificial Sequence
  Chemically Synthesized
QVQLQESGGGLVQAGGSLRLSCAASGSIFPFGYMGWYRQAPGKERELVATIDSGGSTYYADSVKGRFTISRDNAKNTVYLQMNSLKPEDTAVYYCAVRRRYYRYHGYWGQGTQVTVSS

SEQ ID NO: 3219 - protein, 122 aa, Artificial Sequence
  Chemically Synthesized
QVQLQESGGGLVQAGGSLRLSCAASGSIFEFYYMGWYRQAPGKERELVATIAAGTTTNYADSVKGRFTISRDNAKNTVYLQMNSLKPEDTAVYYCAVIGRGTYWERTTFIYWGQGTQVTVSS

SEQ ID NO: 3220 - protein, 119 aa, Artificial Sequence
  Chemically Synthesized
QVQLQESGGGLVQAGGSLRLSCAASGSISSDAYMGWYRQAPGKEREFVASITYGSNTYYADSVKGRFTISRDNAKNTVYLQMNSLKPEDTAVYYCAALHDDYQYGFDYWGQGTQVTVSS

SEQ ID NO: 3221 - protein, 122 aa, Artificial Sequence
  Chemically Synthesized
QVQLQESGGGLVQAGGSLRLSCAASGNIFGLTFMGWYRQAPGKERELVAAINYGANTYYADSVKGRFTISRDNAKNTVYLQMNSLKPEDTAVYYCAADGYGDGYYWSYHRYWGQGTQVTVSS

SEQ ID NO: 3222 - protein, 120 aa, Artificial Sequence
  Chemically Synthesized
QVQLQESGGGLVQAGGSLRLSCAASGNISRWPYMGWYRQAPGKERELVAAISLGSTTYYADSVKGRFTISRDNAKNTVYLQMNSLKPEDTAVYYCAVWTHPSTDWSHYYWGQGTQVTVSS

SEQ ID NO: 3223 - protein, 117 aa, Artificial Sequence
  Chemically Synthesized
QVQLQESGGGLVQAGGSLRLSCAASGNIFAGYYMGWYRQAPGKERELVAGITWGSNTYYADSVKGRFTISRDNAKNTVYLQMNSLKPEDTAVYYCAANRPRSLTLYWGQGTQVTVSS

SEQ ID NO: 3224 - protein, 125 aa, Artificial Sequence
  Chemically Synthesized
QVQLQESGGGLVQAGGSLRLSCAASGSIFPVVAMGWYRQAPGKERELVAGIDSGGTTYYADSVKGRFTISRDNAKNTVYLQMNSLKPEDTAVYYCAAYKNTEQQKLDIADTHYYWGQGTQVTVSS

SEQ ID NO: 3225 - protein, 118 aa, Artificial Sequence
  Chemically Synthesized
QVQLQESGGGLVQAGGSLRLSCAASGSISFFYAMGWYRQAPGKEREFVAGIDDGSSTYYADSVKGRFTISRDNAKNTVYLQMNSLKPEDTAVYYCAVYPLVDTVYLYWGQGTQVTVSS

SEQ ID NO: 3226 - protein, 118 aa, Artificial Sequence
  Chemically Synthesized
QVQLQESGGGLVQAGGSLRLSCAASGTIFVGDGMGWYRQAPGKEREFVAAIATGASTNYADSVKGRFTISRDNAKNTVYLQMNSLKPEDTAVYYCAAVVVGASRLSYWGQGTQVTVSS

SEQ ID NO: 3227 - protein, 118 aa, Artificial Sequence
  Chemically Synthesized
QVQLQESGGGLVQAGGSLRLSCAASGTISYLVGMGWYRQAPGKERELVASISPGTSTNYADSVKGRFTISRDNAKNTVYLQMNSLKPEDTAVYYCAAGQYYDYLYAYWGQGTQVTVSS

SEQ ID NO: 3228 - protein, 114 aa, Artificial Sequence
  Chemically Synthesized
QVQLQESGGGLVQAGGSLRLSCAASGNISDYTMGWYRQAPGKERELVAGISRGATTNYADSVKGRFTISRDNAKNTVYLQMNSLKPEDTAVYYCAVTGYDHYYWGQGTQVTVSS

SEQ ID NO: 3229 - protein, 123 aa, Artificial Sequence
  Chemically Synthesized
QVQLQESGGGLVQAGGSLRLSCAASGTIFEVYLMGWYRQAPGKEREFVAAISYGTTTYYADSVKGRFTISRDNAKNTVYLQMNSLKPEDTAVYYCAVAEDWWDAYTPSQLVYWGQGTQVTVSS

SEQ ID NO: 3230 - protein, 121 aa, Artificial Sequence
  Chemically Synthesized
QVQLQESGGGLVQAGGSLRLSCAASGYISAFLIMGWYRQAPGKERELVATITRGGNTYYADSVKGRFTISRDNAKNTVYLQMNSLKPEDTAVYYCAAAEYSARREKGSFYWGQGTQVTVSS

SEQ ID NO: 3231 - protein, 118 aa, Artificial Sequence
  Chemically Synthesized
QVQLQESGGGLVQAGGSLRLSCAASGSISAPDIMGWYRQAPGKEREFVAAIDGGSNTNYADSVKGRFTISRDNAKNTVYLQMNSLKPEDTAVYYCAAIFYSYAWHGYWGQGTQVTVSS

SEQ ID NO: 3232 - protein, 117 aa, Artificial Sequence
  Chemically Synthesized
QVQLQESGGGLVQAGGSLRLSCAASGTIFSFPPMGWYRQAPGKERELVASIGIGSITYYADSVKGRFTISRDNAKNTVYLQMNSLKPEDTAVYYCAADYYDYGHWYWGQGTQVTVSS

SEQ ID NO: 3233 - protein, 121 aa, Artificial Sequence
  Chemically Synthesized
QVQLQESGGGLVQAGGSLRLSCAASGNIFYKSMGWYRQAPGKEREFVAGIADGTTTNYADSVKGRFTISRDNAKNTVYLQMNSLKPEDTAVYYCAVVPIIYNDHRYDLQYWGQGTQVTVSS

SEQ ID NO: 3234 - protein, 117 aa, Artificial Sequence
  Chemically Synthesized
QVQLQESGGGLVQAGGSLRLSCAASGNISSISMGWYRQAPGKERELVASIALGGNTYYADSVKGRFTISRDNAKNTVYLQMNSLKPEDTAVYYCAVNDSVRYTHHYWGQGTQVTVSS

SEQ ID NO: 3235 - protein, 122 aa, Artificial Sequence
  Chemically Synthesized
QVQLQESGGGLVQAGGSLRLSCAASGYISFENIMGWYRQAPGKERELVATIDSGGTTNYADSVKGRFTISRDNAKNTVYLQMNSLKPEDTAVYYCAVDPYNGGRYGIEFYYWGQGTQVTVSS

SEQ ID NO: 3236 - protein, 118 aa, Artificial Sequence
  Chemically Synthesized
QVQLQESGGGLVQAGGSLRLSCAASGTISNVDNMGWYRQAPGKERELVAGINSGGSTYYADSVKGRFTISRDNAKNTVYLQMNSLKPEDTAVYYCAVKKGIVVYFYYWGQGTQVTVSS

SEQ ID NO: 3237 - protein, 116 aa, Artificial Sequence
  Chemically Synthesized
QVQLQESGGGLVQAGGSLRLSCAASGTIFDTVRMGWYRQAPGKERELVATIAYGANTYYADSVKGRFTISRDNAKNTVYLQMNSLKPEDTAVYYCAVGVPYQLDYWGQGTQVTVSS

SEQ ID NO: 3238 - protein, 118 aa, Artificial Sequence
  Chemically Synthesized
QVQLQESGGGLVQAGGSLRLSCAASGNISDVTAMGWYRQAPGKEREFVATIAVGGSTNYADSVKGRFTISRDNAKNTVYLQMNSLKPEDTAVYYCAVDPYFVPRHWYWGQGTQVTVSS

SEQ ID NO: 3239 - protein, 118 aa, Artificial Sequence
  Chemically Synthesized
QVQLQESGGGLVQAGGSLRLSCAASGNIFDYVTMGWYRQAPGKERELVATINYGGITNYADSVKGRFTISRDNAKNTVYLQMNSLKPEDTAVYYCAVVLGDDDWLRYWGQGTQVTVSS

SEQ ID NO: 3240 - protein, 122 aa, Artificial Sequence
  Chemically Synthesized
QVQLQESGGGLVQAGGSLRLSCAASGYISGGGRMGWYRQAPGKERELVASINFGANTNYADSVKGRFTISRDNAKNTVYLQMNSLKPEDTAVYYCAAADGGQYHRYRYHDYWGQGTQVTVSS

SEQ ID NO: 3241 - protein, 122 aa, Artificial Sequence
  Chemically Synthesized
QVQLQESGGGLVQAGGSLRLSCAASGTISRPAAMGWYRQAPGKERELVAGIANGASTNYADSVKGRFTISRDNAKNTVYLQMNSLKPEDTAVYYCAVYALQAVYRQVGYVYWGQGTQVTVSS

SEQ ID NO: 3242 - protein, 117 aa, Artificial Sequence
  Chemically Synthesized
QVQLQESGGGLVQAGGSLRLSCAASGSISSYYPMGWYRQAPGKERELVPVLVKVLLPYADSVKGRFTISRDNAKNTVYLQMNSLKPEDTAVYYCAVDDVYYAYLLYWGQGTQVTVSS

SEQ ID NO: 3243 - protein, 118 aa, Artificial Sequence
  Chemically Synthesized
QVQLQESGGGLVQAGGSLRLSCAASGYIFAYYDMGWYRQAPGKERELVAGISLGTITYYADSVKGRFTISRDNAKNTVYLQMNSLKPEDTAVYYCAVGQDGDLTHDYWGQGTQVTVSS

SEQ ID NO: 3244 - protein, 118 aa, Artificial Sequence
  Chemically Synthesized
QVQLQESGGGLVQAGGSLRLSCAASGNISDYGVMGWYRQAPGKEREFVAAITDGGITNYADSVKGRFTISRDNAKNTVYLQMNSLKPEDTAVYYCAALHFTVAYFHYWGQGTQVTVSS

SEQ ID NO: 3245 - protein, 122 aa, Artificial Sequence
  Chemically Synthesized
QVQLQESGGGLVQAGGSLRLSCAASGTISPWSAMGWYRQAPGKEREFVASISDGASTNYADSVKGRFTISRDNAKNTVYLQMNSLKPEDTAVYYCAALFTRGGSRLFRYWYWGQGTQVTVSS

SEQ ID NO: 3246 - protein, 118 aa, Artificial Sequence
  Chemically Synthesized
QVQLQESGGGLVQAGGSLRLSCAASGSIFFYYTMGWYRQAPGKEREFVATINPGGSTNYADSVKGRFTISRDNAKNTVYLQMNSLKPEDTAVYYCAVWFSVADPLAYWGQGTQVTVSS

SEQ ID NO: 3247 - protein, 118 aa, Artificial Sequence
  Chemically Synthesized
QVQLQESGGGLVQAGGSLRLSCAASGTISYRSTMGWYRQAPGKEREFVAAINYGGNINYADSVKGRFTISRDNAKNTVYLQMNSLKPEDTAVYYCAALWSDYVNHYYWGQGTQVTVSS

SEQ ID NO: 3248 - protein, 122 aa, Artificial Sequence
  Chemically Synthesized
QVQLQESGGGLVQAGGSLRLSCAASGTIFRILFMGWYRQAPGKEREFVAAIALGATTNYADSVKGRFTISRDNAKNTVYLQMNSLKPEDTAVYYCAATYIAYSDNAGWHDYWGQGTQVTVSS

SEQ ID NO: 3249 - protein, 122 aa, Artificial Sequence
  Chemically Synthesized
QVQLQESGGGLVQAGGSLRLSCAASGTISVDRVMGWYRQAPGKERELVAAISGGSTTNYADSVKGRFTISRDNAKNTVYLQMNSLKPEDTAVYYCAVADDDVFGRTPPYYYWGQGTQVTVSS

SEQ ID NO: 3250 - protein, 122 aa, Artificial Sequence
  Chemically Synthesized
QVQLQESGGGLVQAGGSLRLSCAASGTISTIKVMGWYRQAPGKEREFVAAINGGSNTNYADSVKGRFTISRDNAKNTVYLQMNSLKPEDTAVYYCAAVTSILQNHTAYHAYWGQGTQVTVSS

SEQ ID NO: 3251 - protein, 122 aa, Artificial Sequence
  Chemically Synthesized
QVQLQESGGGLVQAGGSLRLSCAASGSIFTVDQMGWYRQAPGKERELVAAISLGSSTYYADSVKGRFTISRDNAKNTVYLQMNSLKPEDTAVYYCAAFTVRYYADALGFDYWGQGTQVTVSS

SEQ ID NO: 3252 - protein, 125 aa, Artificial Sequence
  Chemically Synthesized
QVQLQESGGGLVQAGGSLRLSCAASGNIFLVQDMGWYRQAPGKERELVAGITAGSITNYADSVKGRFTISRDNAKNTVYLQMNSLKPEDTAVYYCAVRSSVRTSTTTRTLSTMYWGQGTQVTVSS

SEQ ID NO: 3253 - protein, 122 aa, Artificial Sequence
  Chemically Synthesized
QVQLQESGGGLVQAGGSLRLSCAASGSIFASKRMGWYRQAPGKERELVAGIAPGSITYYADSVKGRFTISRDNAKNTVYLQMNSLKPEDTAVYYCAALRRTDLTGGGYLYYWGQGTQVTVSS

SEQ ID NO: 3254 - protein, 122 aa, Artificial Sequence
  Chemically Synthesized
QVQLQESGGGLVQAGGSLRLSCAASGYIFRNYIMGWYRQAPGKERELVATISTGANTNYADSVKGRFTISRDNAKNTVYLQMNSLKPEDTAVYYCAVTYYQHPTDTASHLYWGQGTQVTVSS

SEQ ID NO: 3255 - protein, 120 aa, Artificial Sequence
  Chemically Synthesized
QVQLQESGGGLVQAGGSLRLSCAASGTISWGSSMGWYRQAPGKERELVATIAVGTITNYADSVKGRFTISRDNAKNTVYLQMNSLKPEDTAVYYCAVLSVEPFYSRLIYWGQGTQVTVSS

SEQ ID NO: 3256 - protein, 121 aa, Artificial Sequence
  Chemically Synthesized
QVQLQESGGGLVQAGGSLRLSCAASGNISDTYDMGWYRQAPGKEREFVASISPGASTNYADSVKGRFTISRDNAKNTVYLQMNSLKPEDTAVYYCAAGRGSFVLSVRTIYWGQGTQVTVSS

SEQ ID NO: 3257 - protein, 117 aa, Artificial Sequence
  Chemically Synthesized
QVQLQESGGGLVQAGGSLRLSCAASGTIFYGDYMGWYRQAPGKERELVAGISVGSTNYADSVKGRFTISRDNAKNTVYLQMNSLKPEDTAVYYCAAPSWYDGPHDYWGQGTQVTVSS

SEQ ID NO: 3258 - protein, 110 aa, Artificial Sequence
  Chemically Synthesized
QVQLQESGGGLVQAGGSLRLSCAASGTISPWDDMGWYRQAPGKERELVAAITPGASTNYADSVKGRFTISRDNAKNTVYLQMNSLKPEDTAVYYCAAIYWGQGTQVTVSS

SEQ ID NO: 3259 - protein, 118 aa, Artificial Sequence
  Chemically Synthesized
QVQLQESGGGLVQAGGSLRLSCAASGNISAETAMGWYRQAPGKERELVAGIGAGGNTNYADSVKGRFTISRDNAKNTVYLQMNSLKPEDTAVYYCAVIYWTGRYHWYWGQGTQVTVSS

SEQ ID NO: 3260 - protein, 118 aa, Artificial Sequence
  Chemically Synthesized
QVQLQESGGGLVQAGGSLRLSCAASGSISSYYAMGWYRQAPGKEREFVAAIAKGASTYYADSVKGRFTISRDNAKNTVYLQMNSLKPEDTAVYYCAVLVRQPLDHGYWGQGTQVTVSS

SEQ ID NO: 3261 - protein, 121 aa, Artificial Sequence
  Chemically Synthesized
QVQLQESGGGLVQAGGSLRLSCAASGNISWYGLMGWYRQAPGKEREFVATISSGGNTNYADSVKGRFTISRDNAKNTVYLQMNSLKPEDTAVYYCAAPDSGRLSGNTTIYWGQGTQVTVSS

SEQ ID NO: 3262 - protein, 118 aa, Artificial Sequence
  Chemically Synthesized
QVQLQESGGGLVQAGGSLRLSCAASGTISWYDIMGWYRQAPGKERELVASIGSGSITYYADSVKGRFTISRDNAKNTVYLQMNSLKPEDTAVYYCAVTSGYVNRHAYWGQGTQVTVSS

SEQ ID NO: 3263 - protein, 109 aa, Artificial Sequence
  Chemically Synthesized
QVQLQESGGGLVQAGGSLRLSCAASGTCLPGMGWYRQAPGKERELVAAINAGANTNYADSVKGRFTISRDNAKNTVYLQMNSLKPEDTAVYYCAYHYYWGQGTQVTVSS

SEQ ID NO: 3264 - protein, 118 aa, Artificial Sequence
  Chemically Synthesized
QVQLQESGGGLVQAGGSLRLSCAASGNISRYVAMGWYRQAPGKEREFVAGIARGSSTNYADSVKGRFTISRDNAKNTVYLQMNSLKPEDTAVYYCAAYWKAGLRYYYWGQGTQVTVSS

SEQ ID NO: 3265 - protein, 112 aa, Artificial Sequence
  Chemically Synthesized
QVQLQESGGGLVQAGGSLRLSCAASGTISSTYTMGWYRQAPGKEREFVATISPGAITYYADSVKGRFTISRDNAKNTVYLQMNSLKPEDTAVYYCAVAYRYWGQGTQVTVSS

SEQ ID NO: 3266 - protein, 118 aa, Artificial Sequence
  Chemically Synthesized
QVQLQESGGGLVQAGGSLRLSCAASGNISDTLIMGWYRQAPGKEREFVAAINGGGTTNYADSVKGRFTISRDNAKNTVYLQMNSLKPEDTAVYYCAALGLRYRAHYYWGQGTQVTVSS

SEQ ID NO: 3267 - protein, 118 aa, Artificial Sequence
  Chemically Synthesized
QVQLQESGGGLVQAGGSLRLSCAASGTIFGLTAMGWYRQAPGKERELVAAIGYGGITYYADSVKGRFTISRDNAKNTVYLQMNSLKPEDTAVYYCAVHTYRFGRHPYWGQGTQVTVSS

SEQ ID NO: 3268 - protein, 125 aa, Artificial Sequence
  Chemically Synthesized
QVQLQESGGGLVQAGGSLRLSCAASGTIFYTYYMGWYRQAPGKERELLPLLVRVLVPYADSVKGRFTISRDNAKNTVYLQMNSLKPEDTAVYYCAAVVTTDSTYPYAVYVPHTYWGQGTQVTVSS

SEQ ID NO: 3269 - protein, 122 aa, Artificial Sequence
  Chemically Synthesized
QVQLQESGGGLVQAGGSLRLSCAASGSIFQRAYMGWYRQAPGKEREFVASINIGSSTNYADSVKGRFTISRDNAKNTVYLQMNSLKPEDTAVYYCAALDDGAGLRTSWHWYWGQGTQVTVSS

SEQ ID NO: 3270 - protein, 118 aa, Artificial Sequence
  Chemically Synthesized
QVQLQESGGGLVQAGGSLRLSCAASGTISASTFMGWYRQAPGKERELVASIDSGGNTNYADSVKGRFTISRDNAKNTVYLQMNSLKPEDTAVYYCAVYQYLHNPHYYWGQGTQVTVSS

SEQ ID NO: 3271 - protein, 126 aa, Artificial Sequence
  Chemically Synthesized
QVQLQESGGGLVQAGGSLRLSCAASGSIFDARTMGWYRQAPGKERELVAAISDGTTTNYADSVKGRFTISRDNAKNTVYLQMNSLKPEDTAVYYCAARGIFPQGDYLYYHYPHAYWGQGTQVTVSS

SEQ ID NO: 3272 - protein, 118 aa, Artificial Sequence
  Chemically Synthesized
QVQLQESGGGLVQAGGSLRLSCAASGYISRVSIMGWYRQAPGKERELVASIDHGGSTNYADSVKGRFTISRDNAKNTVYLQMNSLKPEDTAVYYCAAVWRDGRWHAYWGQGTQVTVSS

SEQ ID NO: 3273 - protein, 118 aa, Artificial Sequence
  Chemically Synthesized
QVQLQESGGGLVQAGGSLRLSCAASGNIFPYDPMGWYRQAPGKEREFVAGIGYGANTYYADSVKGRFTISRDNAKNTVYLQMNSLKPEDTAVYYCAADPTEYSWLRYWGQGTQVTVSS

SEQ ID NO: 3274 - protein, 118 aa, Artificial Sequence
  Chemically Synthesized
QVQLQESGGGLVQAGGSLRLSCAASGNIFGALNMGWYRQAPGKERELVASIAVGGITYYADSVKGRFTISRDNAKNTVYLQMNSLKPEDTAVYYCAALEGGYVYYVYWGQGTQVTVSS

SEQ ID NO: 3275 - protein, 122 aa, Artificial Sequence
  Chemically Synthesized
QVQLQESGGGLVQAGGSLRLSCAASGYISSDDDMGWYRQAPGKERELVAGIGTGTITNYADSVKGRFTISRDNAKNTVYLQMNSLKPEDTAVYYCAAGWPSQPDVGVYLGYWGQGTQVTVSS

SEQ ID NO: 3276 - protein, 126 aa, Artificial Sequence
  Chemically Synthesized
QVQLQESGGGLVQAGGSLRLSCAASGNISLSGVMGWYRQAPGKERELVAAITSGSITYYADSVKGRFTISRDNAKNTVYLQMNSLKPEDTAVYYCAASPWDYLDILAEWDRGHYYWGQGTQVTVSS

SEQ ID NO: 3277 - protein, 117 aa, Artificial Sequence
  Chemically Synthesized
QVQLQESGGGLVQAGGSLRLSCAASGSISKSIMGWYRQAPGKERELVATINYGGITNYADSVKGRFTISRDNAKNTVYLQMNSLKPEDTAVYYCAASTYTYRHLYYWGQGTQVTVSS

SEQ ID NO: 3278 - protein, 118 aa, Artificial Sequence
  Chemically Synthesized
QVQLQESGGGLVQAGGSLRLSCAASGTIFRPTLMGWYRQAPGKERELVAGITYGASTNYADSVKGRFTISRDNAKNTVYLQMNSLKPEDTAVYYCAALYRRQTYLYYWGQGTQVTVSS

SEQ ID NO: 3279 - protein, 122 aa, Artificial Sequence
  Chemically Synthesized
QVQLQESGGGLVQAGGSLRLSCAASGNISRGGAMGWYRQAPGKEREFVAAISVGATTNYADSVKGRFTISRDNAKNTVYLQMNSLKPEDTAVYYCAARDGGYHQYAVTHYYWGQGTQVTVSS

SEQ ID NO: 3280 - protein, 115 aa, Artificial Sequence
  Chemically Synthesized
QVQLQESGGGLVQAGGSLRLSCAASGNISTATFMGWYRQAPGKERELVATITTVVVPYADSVKGRFTISRDNAKNTVYLQMNSLKPEDTAVYYCAVPYDHEYLYWGQGTQVTVSS

SEQ ID NO: 3281 - protein, 118 aa, Artificial Sequence
  Chemically Synthesized
QVQLQESGGGLVQAGGSLRLSCAASGNISVPTVMGWYRQAPGKEREFVAAITYGGNTNYADSVKGRFTISRDNAKNTVYLQMNSLKPEDTAVYYCAALTRTSSYYWYWGQGTQVTVSS

SEQ ID NO: 3282 - protein, 118 aa, Artificial Sequence
  Chemically Synthesized
QVQLQESGGGLVQAGGSLRLSCAASGYISDPPYMGWYRQAPGKERELVASIDDGGSTYYADSVKGRFTISRDNAKNTVYLQMNSLKPEDTAVYYCAARSTRPTNHGYWGQGTQVTVSS

SEQ ID NO: 3283 - protein, 125 aa, Artificial Sequence
  Chemically Synthesized
QVQLQESGGGLVQAGGSLRLSCAASGNIFLYDDMGWYRQAPGKEREFVASIGYGGITYYADSVKGRFTISRDNAKNTVYLQMNSLKPEDTAVYYCAARYDYATLGVRSTGGTFYWGQGTQVTVSS

SEQ ID NO: 3284 - protein, 122 aa, Artificial Sequence
  Chemically Synthesized
QVQLQESGGGLVQAGGSLRLSCAASGSISTSTYMGWYRQAPGKERELVAGIAFGTITNYADSVKGRFTISRDNAKNTVYLQMNSLKPEDTAVYYCAVDDNNQELRAEDYPYWGQGTQVTVSS

SEQ ID NO: 3285 - protein, 115 aa, Artificial Sequence
  Chemically Synthesized
QVQLQESGGGLVQAGGSLRLSCAASGTISNKRKMGWYRQAPGKERELVATITDGAITNYADSVKGRFTISRDNAKNTVYLQMNSLKPEDTAVYYCAAYSERIVYWGQGTQVTVSS

SEQ ID NO: 3286 - protein, 116 aa, Artificial Sequence
  Chemically Synthesized
QVQLQESGGGLVQAGGSLRLSCAASGNIFDLKYMGWYRQAPGKERELVAGIASGGITYYADSVKGRFTISRDNAKNTVYLQMNSLKPEDTAVYYCATDGRGDHFYWGQGTQVTVSS

SEQ ID NO: 3287 - protein, 126 aa, Artificial Sequence
  Chemically Synthesized
QVQLQESGGGLVQAGGSLRLSCAASGNISDARAMGWYRQAPGKERELVASISRGANTNYADSVKGRFTISRDNAKNTVYLQMNSLKPEDTAVYYCAVYNGGSQTVIRAPVRRLAYWGQGTQVTVSS

SEQ ID NO: 3288 - protein, 117 aa, Artificial Sequence
  Chemically Synthesized
QVQLQESGGGLVQAGGSLRLSCAASGYIFLTLMGWYRQAPGKERELVAAIGRGANTYYADSVKGRFTISRDNAKNTVYLQMNSLKPEDTAVYYCAVGAVLDTYFFYWGQGTQVTVSS

SEQ ID NO: 3289 - protein, 117 aa, Artificial Sequence
  Chemically Synthesized
QVQLQESGGGLVQAGGSLRLSCAASGNISQRYGMGWYRQAPGKEREFVAGIDSVVVPYADSVKGRFTISRDNAKNTVYLQMNSLKPEDTAVYYCAAYAWPSRSHYYWGQGTQVTVSS

SEQ ID NO: 3290 - protein, 118 aa, Artificial Sequence
  Chemically Synthesized
QVQLQESGGGLVQAGGSLRLSCAASGTISDLNTMGWYRQAPGKERELVASIDRGGNTYYADSVKGRFTISRDNAKNTVYLQMNSLKPEDTAVYYCAVGWRYYALFGYWGQGTQVTVSS

SEQ ID NO: 3291 - protein, 118 aa, Artificial Sequence
  Chemically Synthesized
QVQLQESGGGLVQAGGSLRLSCAASGNIFSGYDMGWYRQAPGKEREFVAAIGTGTTTYYADSVKGRFTISRDNAKNTVYLQMNSLKPEDTAVYYCAAYAHGQEDLHYWGQGTQVTVSS

SEQ ID NO: 3292 - protein, 122 aa, Artificial Sequence
  Chemically Synthesized
QVQLQESGGGLVQAGGSLRLSCAASGSIFAYPIMGWYRQAPGKERELVATINRGGNTYYADSVKGRFTISRDNAKNTVYLQMNSLKPEDTAVYYCAAIYWPTRRNDYVHAYWGQGTQVTVSS

SEQ ID NO: 3293 - protein, 121 aa, Artificial Sequence
  Chemically Synthesized
QVQLQESGGGLVQAGGSLRLSCAASGTISSTYDMGWYRQAPGKERELVATITTGGITNYADSVKGRFTISRDNAKNTVYLQMNSLKPEDTAVYYCALTTGTCWLLVLTLYWGQGTQVTVSS

SEQ ID NO: 3294 - protein, 121 aa, Artificial Sequence
  Chemically Synthesized
QVQLQESGGGLVQAGGSLRLSCAASGTIFDSNMGWYRQAPGKEREFVASISGGASTNYADSVKGRFTISRDNAKNTVYLQMNSLKPEDTAVYYCAVTGHDVYQDPYDLPYWGQGTQVTVSS

SEQ ID NO: 3295 - protein, 119 aa, Artificial Sequence
  Chemically Synthesized
QVQLQESGGGLVQAGGSLRLSCAASGYISYVTYMGWYRQAPGKEREFVAGIDYGGITNYADSVKGRFTISRDNAKNTVYLQMNSLKPEDTAVYYCAANSGVRVVTFYYWGQGTQVTVSS

SEQ ID NO: 3296 - protein, 122 aa, Artificial Sequence
  Chemically Synthesized
QVQLQESGGGLVQAGGSLRLSCAASGNISGSRVMGWYRQAPGKERELVAAIGHGGTTYYADSVKGRFTISRDNAKNTVYLQMNSLKPEDTAVYYCAVNDESWNWPGVRHEYWGQGTQVTVSS

SEQ ID NO: 3297 - protein, 118 aa, Artificial Sequence
  Chemically Synthesized
QVQLQESGGGLVQAGGSLRLSCAASGTISRGYLMGWYRQAPGKERELVASIGPGTSTYYADSVKGRFTISRDNAKNTVYLQMNSLKPEDTAVYYCAVTFTDHLQFIYWGQGTQVTVSS

SEQ ID NO: 3298 - protein, 119 aa, Artificial Sequence
  Chemically Synthesized
QVQLQESGGGLVQAGGSLRLSCAASGNISLARAMGWYRQAPGKEREFVAGINEGGTTNYADSVKGRFTISRDNAKNTVYLQMNSLKPEDTAVYYCAYVTYEYRTYHYYWGQGTQVTVSS

SEQ ID NO: 3299 - protein, 118 aa, Artificial Sequence
  Chemically Synthesized
QVQLQESGGGLVQAGGSLRLSCAASGNISYYYGMGWYRQAPGKEREFVAGITFGGTTNYADSVKGRFTISRDNAKNTVYLQMNSLKPEDTAVYYCAAVYYADGYLFYWGQGTQVTVSS

SEQ ID NO: 3300 - protein, 118 aa, Artificial Sequence
  Chemically Synthesized
QVQLQESGGGLVQAGGSLRLSCAASGYISRHINMGWYRQAPGKEREFVASISHGTITNYADSVKGRFTISRDNAKNTVYLQMNSLKPEDTAVYYCAAVWVDDYYHYYWGQGTQVTVSS

SEQ ID NO: 3301 - protein, 118 aa, Artificial Sequence
  Chemically Synthesized
QVQLQESGGGLVQAGGSLRLSCAASGNISNTFAMGWYRQAPGKERELVAGITYGGNTNYADSVKGRFTISRDNAKNTVYLQMNSLKPEDTAVYYCAVLYLSDSWHYYWGQGTQVTVSS

SEQ ID NO: 3302 - protein, 118 aa, Artificial Sequence
  Chemically Synthesized
QVQLQESGGGLVQAGGSLRLSCAASGTIFHDTSMGWYRQAPGKEREFVAGISYGGNTNYADSVKGRFTISRDNAKNTVYLQMNSLKPEDTAVYYCAVLSRIKPRHYYWGQGTQVTVSS

SEQ ID NO: 3303 - protein, 121 aa, Artificial Sequence
  Chemically Synthesized
QVQLQESGGGLVQAGGSLRLSCAASGNISHNWYMGWYRQAPGKERELVAAIDGGTTTNYADSVKGRFTISRDNAKNTVYLQMNSLKPEDTAVYYCAVPDWTNGTFASVIYWGQGTQVTVSS

SEQ ID NO: 3304 - protein, 122 aa, Artificial Sequence
  Chemically Synthesized
QVQLQESGGGLVQAGGSLRLSCAASGSIFLHSNMGWYRQAPGKEREFVAAISLGGTTNYADSVKGRFTISRDNAKNTVYLQMNSLKPEDTAVYYCAVLRVYREARTRYHYYWGQGTQVTVSS

SEQ ID NO: 3305 - protein, 117 aa, Artificial Sequence
  Chemically Synthesized
QVQLQESGGGLVQAGGSLRLSCAASGTIFPGYTMGWYRQAPGKEREFVASINYGATTYYADSVKGRFTISRDNAKNTVYLQMNSLKPEDTAVYYCAVLSLGTWYYYWGQGTQVTVSS

SEQ ID NO: 3306 - protein, 118 aa, Artificial Sequence
  Chemically Synthesized
QVQLQESGGGLVQAGGSLRLSCAASGSISPHGAMGWYRQAPGKEREFVATISTGATTNYADSVKGRFTISRDNAKNTVYLQMNSLKPEDTAVYYCAAIFRGIALHYYWGQGTQVTVSS

SEQ ID NO: 3307 - protein, 117 aa, Artificial Sequence
  Chemically Synthesized
QVQLQESGGGLVQAGGSLRLSCAASGSISPSTYMGWYRQAPGKERELVATIAYGGITNYADSVKGRFTISRDNAKNTVYLQMNSLKPEDTAVYYCAVHVTYRGAYYWGQGTQVTVSS

SEQ ID NO: 3308 - protein, 118 aa, Artificial Sequence
  Chemically Synthesized
QVQLQESGGGLVQAGGSLRLSCAASGYIFGQYNMGWYRQAPGKERELVASITGGSSTNYADSVKGRFTISRDNAKNTVYLQMNSLKPEDTAVYYCAVDDQTQDLLWYWGQGTQVTVSS

SEQ ID NO: 3309 - protein, 120 aa, Artificial Sequence
  Chemically Synthesized
QVQLQESGGGLVQAGGSLRLSCAASGNISGGRPMGWYRQAPGKEREFVAGIAYGSSTYYADSVKGRFTISRDNAKNTVYLQMNSLKPEDTAVYYCAVARRDYYRHDYWYWGQGTQVTVSS

SEQ ID NO: 3310 - protein, 118 aa, Artificial Sequence
  Chemically Synthesized
QVQLQESGGGLVQAGGSLRLSCAASGSIFDLVDMGWYRQAPGKERELVATIDGGGITYYADSVKGRFTISRDNAKNTVYLQMNSLKPEDTAVYYCAAKSYWWWLHTYWGQGTQVTVSS

SEQ ID NO: 3311 - protein, 121 aa, Artificial Sequence
  Chemically Synthesized
QVQLQESGGGLVQAGGSLRLSCAASGYISAEYYMGWYRQAPGKEREFLPVLLTVVLPYADSVKGRFTISRDNAKNTVYLQMNSLKPEDTAVYYCAVINAGWSYRTWVHRYWGQGTQVTVSS

SEQ ID NO: 3312 - protein, 118 aa, Artificial Sequence
  Chemically Synthesized
QVQLQESGGGLVQAGGSLRLSCAASGTISYTAWMGWYRQAPGKERELVASITSPYADSVKGRFTISRDNAKNTVYLQMNSLKPEDTAVYYCAVYRFYDAYIYPTYLYWGQGTQVTVSS

SEQ ID NO: 3313 - protein, 118 aa, Artificial Sequence
  Chemically Synthesized
QVQLQESGGGLVQAGGSLRLSCAASGTISYRPRMGWYRQAPGKERELVAGITVGSSTYYADSVKGRFTISRDNAKNTVYLQMNSLKPEDTAVYYCAARPYRTRGYVYWGQGTQVTVSS

SEQ ID NO: 3314 - protein, 122 aa, Artificial Sequence
  Chemically Synthesized
QVQLQESGGGLVQAGGSLRLSCAASGYISDLDVMGWYRQAPGKERELVASIGYGSTTYYADSVKGRFTISRDNAKNTVYLQMNSLKPEDTAVYYCAAGPDLQKKGYTAYWYWGQGTQVTVSS

SEQ ID NO: 3315 - protein, 116 aa, Artificial Sequence
  Chemically Synthesized
QVQLQESGGGLVQAGGSLRLSCAASGTISYIIMGWYRQAPGKEREFVASISFGTNTNYADSVKGRFTISRDNAKNTVYLQMNSLKPEDTAVYYCAASRTLVRLMYWGQGTQVTVSS

SEQ ID NO: 3316 - protein, 118 aa, Artificial Sequence
  Chemically Synthesized
QVQLQESGGGLVQAGGSLRLSCAASGTISVVFAMGWYRQAPGKERELVASIDFGSTTNYADSVKGRFTISRDNAKNTVYLQMNSLKPEDTAVYYCAVYVIINYILYYWGQGTQVTVSS

SEQ ID NO: 3317 - protein, 118 aa, Artificial Sequence
  Chemically Synthesized
QVQLQESGGGLVQAGGSLRLSCAASGNISDAIDMGWYRQAPGKEREFVAAITYGGNTYYADSVKGRFTISRDNAKNTVYLQMNSLKPEDTAVYYCAVLLHTDDNHRYWGQGTQVTVSS

SEQ ID NO: 3318 - protein, 118 aa, Artificial Sequence
  Chemically Synthesized
QVQLQESGGGLVQAGGSLRLSCAASGNISGSISMGWYRQAPGKEREFVAGISRGATTNYADSVKGRFTISRDNAKNTVYLQMNSLKPEDTAVYYCAAVFRSPYLHYYWGQGTQVTVSS

SEQ ID NO: 3319 - protein, 118 aa, Artificial Sequence
  Chemically Synthesized
QVQLQESGGGLVQAGGSLRLSCAASGTIFPSARMGWYRQAPGKEREFVAAINGGSTTYYADSVKGRFTISRDNAKNTVYLQMNSLKPEDTAVYYCAALWWYVSYHYYWGQGTQVTVSS

SEQ ID NO: 3320 - protein, 126 aa, Artificial Sequence
  Chemically Synthesized
QVQLQESGGGLVQAGGSLRLSCAASGTISYDFSMGWYRQAPGKERELVAAIDKGANTNYADSVKGRFTISRDNAKNTVYLQMNSLKPEDTAVYYCAVIYYPYVQYTAVKLNEYGYWGQGTQVTVSS

SEQ ID NO: 3321 - protein, 118 aa, Artificial Sequence
  Chemically Synthesized
QVQLQESGGGLVQAGGSLRLSCAASGTIFSYFAMGWYRQAPGKEREFVATIGGGGTTNYADSVKGRFTISRDNAKNTVYLQMNSLKPEDTAVYYCAALIYDGDYHDYWGQGTQVTVSS

SEQ ID NO: 3322 - protein, 119 aa, Artificial Sequence
  Chemically Synthesized
QVQLQESGGGLVQAGGSLRLSCAASGTISSVWVMGWYRQAPGKERELVATIGSGTTTNYADSVKGRFTISRDNAKNTVYLQMNSLKPEDTAVYYCAAEGAGQSAVYRYWGQGTQVTVSS

SEQ ID NO: 3323 - protein, 118 aa, Artificial Sequence
  Chemically Synthesized
QVQLQESGGGLVQAGGSLRLSCAASGTISESRVMGWYRQAPGKEREFVASITYGGTTNYADSVKGRFTISRDNAKNTVYLQMNSLKPEDTAVYYCAAAEYLDRWHGYWGQGTQVTVSS

SEQ ID NO: 3324 - protein, 122 aa, Artificial Sequence
  Chemically Synthesized
QVQLQESGGGLVQAGGSLRLSCAASGTISYDATMGWYRQAPGKERELVATIDSGTNTYYADSVKGRFTISRDNAKNTVYLQMNSLKPEDTAVYYCAATYVVVVVWSVPHEYWGQGTQVTVSS

SEQ ID NO: 3325 - protein, 118 aa, Artificial Sequence
  Chemically Synthesized
QVQLQESGGGLVQAGGSLRLSCAASGNIFAHSYMGWYRQAPGKEREFVAGIGAGTTTNYADSVKGRFTISRDNAKNTVYLQMNSLKPEDTAVYYCAVLYLTDRYHYYWGQGTQVTVSS

SEQ ID NO: 3326 - protein, 118 aa, Artificial Sequence
  Chemically Synthesized
QVQLQESGGGLVQAGGSLRLSCAASGYISHPSQMGWYRQAPGKEREFVAAIAYGSTTNYADSVKGRFTISRDNAKNTVYLQMNSLKPEDTAVYYCAALYQRPLYLYYWGQGTQVTVSS

SEQ ID NO: 3327 - protein, 122 aa, Artificial Sequence
  Chemically Synthesized
QVQLQESGGGLVQAGGSLRLSCAASGNISDYFMGWYRQAPGKEREFVASINLTGTTTYYADSVKGRFTISRDNAKNTVYLQMNSLKPEDTAVYYCAALYIVRRHVGDFYYYWGQGTQVTVSS

SEQ ID NO: 3328 - protein, 121 aa, Artificial Sequence
  Chemically Synthesized
QVQLQESGGGLVQAGGSLRLSCAASGTIFDWHGMGWYRQAPGKEREFVAAINRGASTYYADSVKGRFTISRDNAKNTVYLQMNSLKPEDTAVYYCAVIWRVLTGPYPYYYWGQGTQVTVSS

SEQ ID NO: 3329 - protein, 117 aa, Artificial Sequence
  Chemically Synthesized
QVQLQESGGGLVQAGGSLRLSCAASGSISYVDDMGWYRQAPGKEREFVAAITTGSITNYADSVKGRFTISRDNAKNTVYLQMNSLKPEDTAVYYCAADQVRAVHRYWGQGTQVTVSS

SEQ ID NO: 3330 - protein, 118 aa, Artificial Sequence
  Chemically Synthesized
QVQLQESGGGLVQAGGSLRLSCAASGNISVYLRMGWYRQAPGKEREFVAGIGDGTITNYADSVKGRFTISRDNAKNTVYLQMNSLKPEDTAVYYCAAVYRDSLYHHYWGQGTQVTVSS

SEQ ID NO: 3331 - protein, 119 aa, Artificial Sequence
  Chemically Synthesized
QVQLQESGGGLVQAGGSLRLSCAASGNISTHYAMGWYRQAPGKEREFVAGIANGASTNYADSVKGRFTISRDNAKNTVYLQMNSLKPEDTAVYYCAALGYIGDRYHAYWGQGTQVTVSS

SEQ ID NO: 3332 - protein, 118 aa, Artificial Sequence
  Chemically Synthesized
QVQLQESGGGLVQAGGSLRLSCAASGYIFSLRTMGWYRQAPGKEREFVAAISYGGNTNYADSVKGRFTISRDNAKNTVYLQMNSLKPEDTAVYYCAVDYDYYALHGYWGQGTQVTVSS

SEQ ID NO: 3333 - protein, 118 aa, Artificial Sequence
  Chemically Synthesized
QVQLQESGGGLVQAGGSLRLSCAASGYISPPSIMGWYRQAPGKEREFVAGIAYGATTNYADSVKGRFTISRDNAKNTVYLQMNSLKPEDTAVYYCAVVYRVVRYFYYWGQGTQVTVSS

SEQ ID NO: 3334 - protein, 118 aa, Artificial Sequence
  Chemically Synthesized
QVQLQESGGGLVQAGGSLRLSCAASGNISALGWMGWYRQAPGKEREFVASISGGTSTYYADSVKGRFTISRDNAKNTVYLQMNSLKPEDTAVYYCAAAGRGYNYLFYWGQGTQVTVSS

SEQ ID NO: 3335 - protein, 118 aa, Artificial Sequence
  Chemically Synthesized
QVQLQESGGGLVQAGGSLRLSCAASGYIFYRYYMGWYRQAPGKEREFVASIGYGASTNYADSVKGRFTISRDNAKNTVYLQMNSLKPEDTAVYYCAVAFNDEQWHYYWGQGTQVTVSS

SEQ ID NO: 3336 - protein, 118 aa, Artificial Sequence
  Chemically Synthesized
QVQLQESGGGLVQAGGSLRLSCAASGNISSPTLMGWYRQAPGKEREFVAGIAYGTSTNYADSVKGRFTISRDNAKNTVYLQMNSLKPEDTAVYYCAVIARDYYLYYYWGQGTQVTVSS

SEQ ID NO: 3337 - protein, 117 aa, Artificial Sequence
  Chemically Synthesized
QVQLQESGGGLVQAGGSLRLSCAASGYIFFYSNMGWYRQAPGKERELLPLLMTVLVPYADSVKGRFTISRDNAKNTVYLQMNSLKPEDTAVYYCAAYYLDRTYHSYWGQGTQVTVSS

SEQ ID NO: 3338 - protein, 125 aa, Artificial Sequence
  Chemically Synthesized
QVQLQESGGGLVQAGGSLRLSCAASGLFLTTLMGWYRQAPGKERELVAAIGPGGTTNYADSVKGRFTISRDNAKNTVYLQMNSLKPEDTAVYYCAVGEAVRFPERLTPTGDYEYWGQGTQVTVSS

SEQ ID NO: 3339 - protein, 121 aa, Artificial Sequence
  Chemically Synthesized
QVQLQESGGGLVQAGGSLRLSCAASGTIFLTLMGWYRQAPGKEREFVAAITYGTSTYYADSVKGRFTISRDNAKNTVYLQMNSLKPEDTAVYYCAAYYTSPDVGIDGHDYWGQGTQVTVSS

SEQ ID NO: 3340 - protein, 118 aa, Artificial Sequence
  Chemically Synthesized
QVQLQESGGGLVQAGGSLRLSCAASGYIFYLSGMGWYRQAPGKEREFVASIATGASTNYADSVKGRFTISRDNAKNTVYLQMNSLKPEDTAVYYCAVVYRARGWHYYWGQGTQVTVSS

SEQ ID NO: 3341 - protein, 116 aa, Artificial Sequence
  Chemically Synthesized
QVQLQESGGGLVQAGGSLRLSCAASGNIFPDLTMGWYRQAPGKEREFVATINSGAITNYADSVKGRFTISRDNAKNTVYLQMNSLKPEDTAVYYCAATLNMLTIYWGQGTQVTVSS

SEQ ID NO: 3342 - protein, 118 aa, Artificial Sequence
  Chemically Synthesized
QVQLQESGGGLVQAGGSLRLSCAASGSIFVSDHMGWYRQAPGKERELVAGIAHGATTYYADSVKGRFTISRDNAKNTVYLQMNSLKPEDTAVYYCAVLDDRVSSYTYWGQGTQVTVSS

SEQ ID NO: 3343 - protein, 118 aa, Artificial Sequence
  Chemically Synthesized
QVQLQESGGGLVQAGGSLRLSCAASGYISGSRYMGWYRQAPGKEREFVAAITSGGTTNYADSVKGRFTISRDNAKNTVYLQMNSLKPEDTAVYYCAAILQRVAYLYYWGQGTQVTVSS

SEQ ID NO: 3344 - protein, 122 aa, Artificial Sequence
  Chemically Synthesized
QVQLQESGGGLVQAGGSLRLSCAASGYIFARLYMGWYRQAPGKEREFVAAINTGGITNYADSVKGRFTISRDNAKNTVYLQMNSLKPEDTAVYYCAAIYLDDDYRPSIHWYWGQGTQVTVSS

SEQ ID NO: 3345 - protein, 117 aa, Artificial Sequence
  Chemically Synthesized
QVQLQESGGGLVQAGGSLRLSCAASGTIFAIGYMGWYRQAPGKEREFVAGIAWGTNTNYADSVKGRFTISRDNAKNTVYLQMNSLKPEDTAVYYCAVVYSTAKHIYWGQGTQVTVSS

SEQ ID NO: 3346 - protein, 119 aa, Artificial Sequence
  Chemically Synthesized
QVQLQESGGGLVQAGGSLRLSCAASGYIFGNPTMGWYRQAPGKEREFVAGIGSGSSTNYADSVKGRFTISRDNAKNTVYLQMNSLKPEDTAVYYCAALFAYRGDRFYYWGQGTQVTVSS

SEQ ID NO: 3347 - protein, 121 aa, Artificial Sequence
  Chemically Synthesized
QVQLQESGGGLVQAGGSLRLSCAASGNISWVIVMGWYRQAPGKERELVAGIGRGGSTYYADSVKGRFTISRDNAKNTVYLQMNSLKPEDTAVYYCAATYYSLNCTVSVFYWGQGTQVTVSS

SEQ ID NO: 3348 - protein, 118 aa, Artificial Sequence
  Chemically Synthesized
QVQLQESGGGLVQAGGSLRLSCAASGNISSYFSMGWYRQAPGKEREFVAGISIGGTTNYADSVKGRFTISRDNAKNTVYLQMNSLKPEDTAVYYCAAVIYNRVFFGYWGQGTQVTVSS

SEQ ID NO: 3349 - protein, 117 aa, Artificial Sequence
  Chemically Synthesized
QVQLQESGGGLVQAGGSLRLSCAASGTISPRDRMGWYRQAPGKEREFVAGIAVGAITYYADSVKGRFTISRDNAKNTVYLQMNSLKPEDTAVYYCAAVETRYRYYYWGQGTQVTVSS

SEQ ID NO: 3350 - protein, 118 aa, Artificial Sequence
  Chemically Synthesized
QVQLQESGGGLVQAGGSLRLSCAASGTISVTYSMGWYRQAPGKEREFVAGIGDGTSTNYADSVKGRFTISRDNAKNTVYLQMNSLKPEDTAVYYCAAITYDGTHHYYWGQGTQVTVSS

SEQ ID NO: 3351 - protein, 122 aa, Artificial Sequence
  Chemically Synthesized
QVQLQESGGGLVQAGGSLRLSCAASGSISRGRVMGWYRQAPGKEREFVAAISHGGITNYADSVKGRFTISRDNAKNTVYLQMNSLKPEDTAVYYCAAIDQAYGTRHYWHHYWGQGTQVTVSS

SEQ ID NO: 3352 - protein, 118 aa, Artificial Sequence
  Chemically Synthesized
QVQLQESGGGLVQAGGSLRLSCAASGSIFYYAAMGWYRQAPGKEREFVAAIGGGGNTYYADSVKGRFTISRDNAKNTVYLQMNSLKPEDTAVYYCAALSSYSRRLYYWGQGTQVTVSS

SEQ ID NO: 3353 - protein, 118 aa, Artificial Sequence
  Chemically Synthesized
QVQLQESGGGLVQAGGSLRLSCAASGTIFRVYRMGWYRQAPGKEREFVAGIGDGSNTNYADSVKGRFTISRDNAKNTVYLQMNSLKPEDTAVYYCAAVGGSPTYYHYWGQGTQVTVSS

SEQ ID NO: 3354 - protein, 118 aa, Artificial Sequence
  Chemically Synthesized
QVQLQESGGGLVQAGGSLRLSCAASGTISGKLRMGWYRQAPGKEREFVAGIGLGSSTYYADSVKGRFTISRDNAKNTVYLQMNSLKPEDTAVYYCAAVQVEYRRYYYWGQGTQVTVSS

SEQ ID NO: 3355 - protein, 118 aa, Artificial Sequence
  Chemically Synthesized
QVQLQESGGGLVQAGGSLRLSCAASGSIFIGDIMGWYRQAPGKEREFVASIGQGASTYYADSVKGRFTISRDNAKNTVYLQMNSLKPEDTAVYYCAVLYYAQTWFYYWGQGTQVTVSS

SEQ ID NO: 3356 - protein, 118 aa, Artificial Sequence
  Chemically Synthesized
QVQLQESGGGLVQAGGSLRLSCAASGNIFQGYSMGWYRQAPGKEREFVAAITYGSTTNYADSVKGRFTISRDNAKNTVYLQMNSLKPEDTAVYYCAAIVAYRGYHWYWGQGTQVTVSS

SEQ ID NO: 3357 - protein, 118 aa, Artificial Sequence
  Chemically Synthesized
QVQLQESGGGLVQAGGSLRLSCAASGNIFTILYMGWYRQAPGKEREFVAAITAGANTNYADSVKGRFTISRDNAKNTVYLQMNSLKPEDTAVYYCAALNYFGRWHSYWGQGTQVTVSS

SEQ ID NO: 3358 - protein, 118 aa, Artificial Sequence
  Chemically Synthesized
QVQLQESGGGLVQAGGSLRLSCAASGTIFRFDYMGWYRQAPGKEREFVAGIAAGTNTNYADSVKGRFTISRDNAKNTVYLQMNSLKPEDTAVYYCAVARRQGGWHYYWGQGTQVTVSS

SEQ ID NO: 3359 - protein, 118 aa, Artificial Sequence
  Chemically Synthesized
QVQLQESGGGLVQAGGSLRLSCAASGNIFQSPYMGWYRQAPGKEREFVAGIDYGGITNYADSVKGRFTISRDNAKNTVYLQMNSLKPEDTAVYYCAALYRDGYYFYYWGQGTQVTVSS

SEQ ID NO: 3360 - protein, 117 aa, Artificial Sequence
  Chemically Synthesized
QVQLQESGGGLVQAGGSLRLSCAASGSISYDEDMGWYRQAPGKERELVASIDYGGNTYYADSVKGRFTISRDNAKNTVYLQMNSLKPEDTAVYYCAAGWNARDYDYWGQGTQVTVSS

SEQ ID NO: 3361 - protein, 119 aa, Artificial Sequence
  Chemically Synthesized
QVQLQESGGGLVQAGGSLRLSCAASGTISIPSQYMGWYRQAPGKERELVASITYGASTYYADSVKGRFTISRDNAKNTVYLQMNSLKPEDTAVYYCAVLYYDDQYHYYWGQGTQVTVSS

SEQ ID NO: 3362 - protein, 122 aa, Artificial Sequence
  Chemically Synthesized
QVQLQESGGGLVQAGGSLRLSCAASGSISHLYSMGWYRQAPGKEREFVAGISEGGTTNYADSVKGRFTISRDNAKNTVYLQMNSLKPEDTAVYYCAALTDVYRNVDPRHWYWGQGTQVTVSS

SEQ ID NO: 3363 - protein, 118 aa, Artificial Sequence
  Chemically Synthesized
QVQLQESGGGLVQAGGSLRLSCAASGNISLEPGMGWYRQAPGKEREFVASISSGSTTNYADSVKGRFTISRDNAKNTVYLQMNSLKPEDTAVYYCAVLYRYRKWLYYWGQGTQVTVSS

SEQ ID NO: 3364 - protein, 118 aa, Artificial Sequence
  Chemically Synthesized
QVQLQESGGGLVQAGGSLRLSCAASGSIFRAFVMGWYRQAPGKEREFVAGINHGGTTNYADSVKGRFTISRDNAKNTVYLQMNSLKPEDTAVYYCAVVRGGGTVLYYWGQGTQVTVSS

SEQ ID NO: 3365 - protein, 117 aa, Artificial Sequence
  Chemically Synthesized
QVQLQESGGGLVQAGGSLRLSCAASGIFFTGVMGWYRQAPGKEREFVAGINRGTITNYADSVKGRFTISRDNAKNTVYLQMNSLKPEDTAVYYCAAGQYYYTDLLYWGQGTQVTVSS

SEQ ID NO: 3366 - protein, 118 aa, Artificial Sequence
  Chemically Synthesized
QVQLQESGGGLVQAGGSLRLSCAASGTIFLVYYMGWYRQAPGKEREFVASIGFGAITNYADSVKGRFTISRDNAKNTVYLQMNSLKPEDTAVYYCAVYDTLTTYYHYWGQGTQVTVSS

SEQ ID NO: 3367 - protein, 118 aa, Artificial Sequence
  Chemically Synthesized
QVQLQESGGGLVQAGGSLRLSCAASGSISRLAYMGWYRQAPGKEREFVAAIDYGGTTNYADSVKGRFTISRDNAKNTVYLQMNSLKPEDTAVYYCAALTYSLRYYYYWGQGTQVTVSS

SEQ ID NO: 3368 - protein, 118 aa, Artificial Sequence
  Chemically Synthesized
QVQLQESGGGLVQAGGSLRLSCAASGNISSAYYMGWYRQAPGKERELVATITYGGNTYYADSVKGRFTISRDNAKNTVYLQMNSLKPEDTAVYYCAAGNITHSALRYWGQGTQVTVSS

SEQ ID NO: 3369 - protein, 118 aa, Artificial Sequence
  Chemically Synthesized
QVQLQESGGGLVQAGGSLRLSCAASGYISGYFVMGWYRQAPGKEREFVASINLGAITNYADSVKGRFTISRDNAKNTVYLQMNSLKPEDTAVYYCAAATYTRRWHAYWGQGTQVTVSS

SEQ ID NO: 3370 - protein, 122 aa, Artificial Sequence
  Chemically Synthesized
QVQLQESGGGLVQAGGSLRLSCAASGSISDTVSMGWYRQAPGKEREFVATITYGSTTNYADSVKGRFTISRDNAKNTVYLQMNSLKPEDTAVYYCAVYIYDGVYARTRHDYWGQGTQVTVSS

SEQ ID NO: 3371 - protein, 117 aa, Artificial Sequence
  Chemically Synthesized
QVQLQESGGGLVQAGGSLRLSCAASGSIFGIYSMGWYRQAPGKEREFVAAIGHGASTYYADSVKGRFTISRDNAKNTVYLQMNSLKPEDTAVYYCAVYYGGTDHTYWGQGTQVTVSS

SEQ ID NO: 3372 - protein, 118 aa, Artificial Sequence
  Chemically Synthesized
QVQLQESGGGLVQAGGSLRLSCAASGTISSYYSMGWYRQAPGKEREFVAGIGKGTNTNYADSVKGRFTISRDNAKNTVYLQMNSLKPEDTAVYYCAAAWPFYGPHYYWGQGTQVTVSS

SEQ ID NO: 3373 - protein, 118 aa, Artificial Sequence
  Chemically Synthesized
QVQLQESGGGLVQAGGSLRLSCAASGSISRADPMGWYRQAPGKEREFVAAINPGTNTNYADSVKGRFTISRDNAKNTVYLQMNSLKPEDTAVYYCAVIVRANRYLAYWGQGTQVTVSS

SEQ ID NO: 3374 - protein, 118 aa, Artificial Sequence
  Chemically Synthesized
QVQLQESGGGLVQAGGSLRLSCAASGSISSNSTMGWYRQAPGKEREFVAGISRGSNTNYADSVKGRFTISRDNAKNTVYLQMNSLKPEDTAVYYCAVVVYDGLWHWYWGQGTQVTVSS

SEQ ID NO: 3375 - protein, 118 aa, Artificial Sequence
  Chemically Synthesized
QVQLQESGGGLVQAGGSLRLSCAASGNIFATGYMGWYRQAPGKEREFVAGINSGTSTNYADSVKGRFTISRDNAKNTVYLQMNSLKPEDTAVYYCAVIWYDLRYLYYWGQGTQVTVSS

SEQ ID NO: 3376 - protein, 122 aa, Artificial Sequence
  Chemically Synthesized
QVQLQESGGGLVQAGGSLRLSCAASGTISWYWYMGWYRQAPGKERELVATIALGTSTNYADSVKGRFTISRDNAKNTVYLQMNSLKPEDTAVYYCAAYTRYSRDLSVQYSYWGQGTQVTVSS

SEQ ID NO: 3377 - protein, 118 aa, Artificial Sequence
  Chemically Synthesized
QVQLQESGGGLVQAGGSLRLSCAASGTISYDLTMGWYRQAPGKEREFVAGISGGNTNYADSVKGRFTISRDNAKNTVYLQMNSLKPEDTAVYYCAVIWYLAESWLHYWGQGTQVTVSS

SEQ ID NO: 3378 - protein, 118 aa, Artificial Sequence
  Chemically Synthesized
QVQLQESGGGLVQAGGSLRLSCAASGSISGYTGMGWYRQAPGKERELVAGIDVGGNTYYADSVKGRFTISRDNAKNTVYLQMNSLKPEDTAVYYCAVVVIVYWPLFYWGQGTQVTVSS

SEQ ID NO: 3379 - protein, 117 aa, Artificial Sequence
  Chemically Synthesized
QVQLQESGGGLVQAGGSLRLSCAASGTISFWDMGWYRQAPGKERELVASIATGGITYYADSVKGRFTISRDNAKNTVYLQMNSLKPEDTAVYYCAAQGHGRYRHDYWGQGTQVTVSS

SEQ ID NO: 3380 - protein, 118 aa, Artificial Sequence
  Chemically Synthesized
QVQLQESGGGLVQAGGSLRLSCAASGTISPVRYMGWYRQAPGKEREFVATISYGSTTNYADSVKGRFTISRDNAKNTVYLQMNSLKPEDTAVYYCAAVHAVRTFYYYWGQGTQVTVSS

SEQ ID NO: 3381 - protein, 118 aa, Artificial Sequence
  Chemically Synthesized
QVQLQESGGGLVQAGGSLRLSCAASGSISPYWSMGWYRQAPGKEREFVAGIAYGGTTYYADSVKGRFTISRDNAKNTVYLQMNSLKPEDTAVYYCAVYYYVYDAHFYWGQGTQVTVSS

SEQ ID NO: 3382 - protein, 118 aa, Artificial Sequence
  Chemically Synthesized
QVQLQESGGGLVQAGGSLRLSCAASGNISSSSSMGWYRQAPGKEREFVAGINGGANTNYADSVKGRFTISRDNAKNTVYLQMNSLKPEDTAVYYCAAVWFGQSYLGYWGQGTQVTVSS

SEQ ID NO: 3383 - protein, 118 aa, Artificial Sequence
  Chemically Synthesized
QVQLQESGGGLVQAGGSLRLSCAASGNISYRGYMGWYRQAPGKEREFVAAIAIGGNTNYADSVKGRFTISRDNAKNTVYLQMNSLKPEDTAVYYCAAVYRIVRYHSYWGQGTQVTVSS

SEQ ID NO: 3384 - protein, 122 aa, Artificial Sequence
  Chemically Synthesized
QVQLQESGGGLVQAGGSLRLSCAASGSIFWYPYMGWYRQAPGKERELVATIAGGTTTNYADSVKGRFTISRDNAKNTVYLQMNSLKPEDTAVYYCAALVDYSSIVRDGHSYWGQGTQVTVSS

SEQ ID NO: 3385 - protein, 118 aa, Artificial Sequence
  Chemically Synthesized
QVQLQESGGGLVQAGGSLRLSCAASGTIFGYYVMGWYRQAPGKEREFVAGIAAGGNTNYADSVKGRFTISRDNAKNTVYLQMNSLKPEDTAVYYCAALDGYRAHHYYWGQGTQVTVSS

SEQ ID NO: 3386 - protein, 122 aa, Artificial Sequence
  Chemically Synthesized
QVQLQESGGGLVQAGGSLRLSCAASGTIFYTGYMGWYRQAPGKEREFVATIGRGANTYYADSVKGRFTISRDNAKNTVYLQMNSLKPEDTAVYYCAARHRPRGYDRIWHYYWGQGTQVTVSS

SEQ ID NO: 3387 - protein, 121 aa, Artificial Sequence
  Chemically Synthesized
QVQLQESGGGLVQAGGSLRLSCAASGSILVSLMGWYRQAPGKEREFVAGIGDGAITNYADSVKGRFTISRDNAKNTVYLQMNSLKPEDTAVYYCAAYTSSYSYSPRPYSYWGQGTQVTVSS

SEQ ID NO: 3388 - protein, 126 aa, Artificial Sequence
  Chemically Synthesized
QVQLQESGGGLVQAGGSLRLSCAASGNISRYATMGWYRQAPGKEREFVAAITYGAITNYADSVKGRFTISRDNAKNTVYLQMNSLKPEDTAVYYCAVILYPDKFPFALYRLVHSYWGQGTQVTVSS

SEQ ID NO: 3389 - protein, 118 aa, Artificial Sequence
  Chemically Synthesized
QVQLQESGGGLVQAGGSLRLSCAASGNISVGGAMGWYRQAPGKEREFVAGINIGAITNYADSVKGRFTISRDNAKNTVYLQMNSLKPEDTAVYYCAVLVYDNQYHYYWGQGTQVTVSS

SEQ ID NO: 3390 - protein, 121 aa, Artificial Sequence
  Chemically Synthesized
QVQLQESGGGLVQAGGSLRLSCAASGYISGDSMGWYRQAPGKEREFVAGINQGASTYYADSVKGRFTISRDNAKNTVYLQMNSLKPEDTAVYYCAADSGVDYGAADQLYYWGQGTQVTVSS

SEQ ID NO: 3391 - protein, 118 aa, Artificial Sequence
  Chemically Synthesized
QVQLQESGGGLVQAGGSLRLSCAASGTIFDLWYMGWYRQAPGKERELVASISSGGTTNYADSVKGRFTISRDNAKNTVYLQMNSLKPEDTAVYYCAVVYHRYSWHSYWGQGTQVTVSS

SEQ ID NO: 3392 - protein, 118 aa, Artificial Sequence
  Chemically Synthesized
QVQLQESGGGLVQAGGSLRLSCAASGYISEDTYMGWYRQAPGKEREFVAGIGGGANTNYADSVKGRFTISRDNAKNTVYLQMNSLKPEDTAVYYCAVPYARIASFIYWGQGTQVTVSS

SEQ ID NO: 3393 - protein, 118 aa, Artificial Sequence
  Chemically Synthesized
QVQLQESGGGLVQAGGSLRLSCAASGTIFYYANMGWYRQAPGKEREFVAAITPGGITNYADSVKGRFTISRDNAKNTVYLQMNSLKPEDTAVYYCAALAIRGTWHYYWGQGTQVTVSS

SEQ ID NO: 3394 - protein, 118 aa, Artificial Sequence
  Chemically Synthesized
QVQLQESGGGLVQAGGSLRLSCAASGNISVDVYMGWYRQAPGKEREFVATITKGATTNYADSVKGRFTISRDNAKNTVYLQMNSLKPEDTAVYYCAAVTYGPSYYYYWGQGTQVTVSS

SEQ ID NO: 3395 - protein, 118 aa, Artificial Sequence
  Chemically Synthesized
QVQLQESGGGLVQAGGSLRLSCAASGNIFRLIAMGWYRQAPGKEREFVAAINAGSITNYADSVKGRFTISRDNAKNTVYLQMNSLKPEDTAVYYCAAVQQDGAYHGYWGQGTQVTVSS

SEQ ID NO: 3396 - protein, 118 aa, Artificial Sequence
  Chemically Synthesized
QVQLQESGGGLVQAGGSLRLSCAASGSIFPSLKMGWYRQAPGKEREFVAAIAAGATTNYADSVKGRFTISRDNAKNTVYLQMNSLKPEDTAVYYCAAYLHAGYHHYYWGQGTQVTVSS

SEQ ID NO: 3397 - protein, 118 aa, Artificial Sequence
  Chemically Synthesized
QVQLQESGGGLVQAGGSLRLSCAASGNISGQTYMGWYRQAPGKEREFVASITSGATTNYADSVKGRFTISRDNAKNTVYLQMNSLKPEDTAVYYCAAIVSTYRYLSYWGQGTQVTVSS

SEQ ID NO: 3398 - protein, 118 aa, Artificial Sequence
  Chemically Synthesized
QVQLQESGGGLVQAGGSLRLSCAASGSISGRIYMGWYRQAPGKERELVAGIAFGASTNYADSVKGRFTISRDNAKNTVYLQMNSLKPEDTAVYYCAVIDYQGRYFYYWGQGTQVTVSS

SEQ ID NO: 3399 - protein, 118 aa, Artificial Sequence
  Chemically Synthesized
QVQLQESGGGLVQAGGSLRLSCAASGTISRVDIMGWYRQAPGKEREFVAAINDGGITNYADSVKGRFTISRDNAKNTVYLQMNSLKPEDTAVYYCAVIARENYYYYYWGQGTQVTVSS

SEQ ID NO: 3400 - protein, 122 aa, Artificial Sequence
  Chemically Synthesized
QVQLQESGGGLVQAGGSLRLSCAASGNISVGIKMGWYRQAPGKEREFVAAIGHGATTNYADSVKGRFTISRDNAKNTVYLQMNSLKPEDTAVYYCAALILSDRRPSRYHAYWGQGTQVTVSS

SEQ ID NO: 3401 - protein, 118 aa, Artificial Sequence
  Chemically Synthesized
QVQLQESGGGLVQAGGSLRLSCAASGTISYRWRMGWYRQAPGKEREFVAGIDDGTSTNYADSVKGRFTISRDNAKNTVYLQMNSLKPEDTAVYYCAVVVLTGGVLYYWGQGTQVTVSS

SEQ ID NO: 3402 - protein, 119 aa, Artificial Sequence
  Chemically Synthesized
QVQLQESGGGLVQAGGSLRLSCAASGNISIYAYMGWYRQAPGKERELVASINAGGTSTYYADSVKGRFTISRDNAKNTVYLQMNSLKPEDTAVYYCAAGYRYGGAFVYWGQGTQVTVSS

SEQ ID NO: 3403 - protein, 118 aa, Artificial Sequence
  Chemically Synthesized
QVQLQESGGGLVQAGGSLRLSCAASGSISARTYMGWYRQAPGKERELVASINQGASTNYADSVKGRFTISRDNAKNTVYLQMNSLKPEDTAVYYCAVDGLYYAGLAYWGQGTQVTVSS

SEQ ID NO: 3404 - protein, 126 aa, Artificial Sequence
  Chemically Synthesized
QVQLQESGGGLVQAGGSLRLSCAASGSISPAATMGWYRQAPGKERELVASIGLGSSTYYADSVKGRFTISRDNAKNTVYLQMNSLKPEDTAVYYCAVYVYPGYPLIWLFYRGHDYWGQGTQVTVSS

SEQ ID NO: 3405 - protein, 126 aa, Artificial Sequence
  Chemically Synthesized
QVQLQESGGGLVQAGGSLRLSCAASGNIFPLVAMGWYRQAPGKEREFVAGIAPGANTNYADSVKGRFTISRDNAKNTVYLQMNSLKPEDTAVYYCAAISTSTRGQGGRSSRGLHYWGQGTQVTVSS

SEQ ID NO: 3406 - protein, 122 aa, Artificial Sequence
  Chemically Synthesized
QVQLQESGGGLVQAGGSLRLSCAASGNISEDVYMGWYRQAPGKERELVAAISTGSTTYYADSVKGRFTISRDNAKNTVYLQMNSLKPEDTAVYYCAAVQGRAASSLPRHSYWGQGTQVTVSS

SEQ ID NO: 3407 - protein, 125 aa, Artificial Sequence
  Chemically Synthesized
QVQLQESGGGLVQAGGSLRLSCAASGNISYLEFMGWYRQAPGKERELVAGIDTWWYYQYADSVKGRFTISRDNAKNTVYLQMNSLKPEDTAVYYCAASPRTLLTLLLRLTTCLYWGQGTQVTVSS

SEQ ID NO: 3408 - protein, 123 aa, Artificial Sequence
  Chemically Synthesized
QVQLQESGGGLVQAGGSLRLSCAASGNIFRWYGMGWYRQAPGKEREFVAGITYGGNTYYADSVKGRFTISRDNAKNTVYLQMNSLKPEDTAVYYCAVYYYLDDFDTYSQHGYWGQGTQVTVSS

SEQ ID NO: 3409 - protein, 118 aa, Artificial Sequence
  Chemically Synthesized
QVQLQESGGGLVQAGGSLRLSCAASGTISYGRAMGWYRQAPGKEREFVAGITGGGNTYYADSVKGRFTISRDNAKNTVYLQMNSLKPEDTAVYYCAARKSPPWWHRYWGQGTQVTVSS

SEQ ID NO: 3410 - protein, 118 aa, Artificial Sequence
  Chemically Synthesized
QVQLQESGGGLVQAGGSLRLSCAASGTISDYESMGWYRQAPGKERELVATITRGGTTNYADSVKGRFTISRDNAKNTVYLQMNSLKPEDTAVYYCAAFRDLHLCLSYWGQGTQVTVSS

SEQ ID NO: 3411 - protein, 118 aa, Artificial Sequence
  Chemically Synthesized
QVQLQESGGGLVQAGGSLRLSCAASGNISRYPYMGWYRQAPGKERELVAAINQGSITNYADSVKGRFTISRDNAKNTVYLQMNSLKPEDTAVYYCAAVLAFKTRYGYWGQGTQVTVSS

SEQ ID NO: 3412 - protein, 118 aa, Artificial Sequence
  Chemically Synthesized
QVQLQESGGGLVQAGGSLRLSCAASGTIFRPWYMGWYRQAPGKEREFVAAIAGGSTTYYADSVKGRFTISRDNAKNTVYLQMNSLKPEDTAVYYCAVDIRKHRTHPYWGQGTQVTVSS

SEQ ID NO: 3413 - protein, 117 aa, Artificial Sequence
  Chemically Synthesized
QVQLQESGGGLVQAGGSLRLSCAASGTISSLFMGWYRQAPGKERELVAAINYGASTYYADSVKGRFTISRDNAKNTVYLQMNSLKPEDTAVYYCAVDDNDYPFHQYWGQGTQVTVSS

SEQ ID NO: 3414 - protein, 119 aa, Artificial Sequence
  Chemically Synthesized
QVQLQESGGGLVQAGGSLRLSCAASGNIFLDGYMGWYRQAPGKERELVAAISKGGSTYYADSVKGRFTISRDNAKNTVYLQMNSLKPEDTAVYYCAAYWYQGVRDLSYWGQGTQVTVSS

SEQ ID NO: 3415 - protein, 118 aa, Artificial Sequence
  Chemically Synthesized
QVQLQESGGGLVQAGGSLRLSCAASGTIFAGTTMGWYRQAPGKEREFVATIDQGSSTYYADSVKGRFTISRDNAKNTVYLQMNSLKPEDTAVYYCAAAGYTYVDHVYWGQGTQVTVSS

SEQ ID NO: 3416 - protein, 115 aa, Artificial Sequence
  Chemically Synthesized
QVQLQESGGGLVQAGGSLRLSCAASGTIFYQAQMGWYRQAPGKERELVAAITGGASTYYADSVKGRFTISRDNAKNTVYLQMNSLKPEDTAVYYCAAITYYHTYWGQGTQVTVSS

SEQ ID NO: 3417 - protein, 115 aa, Artificial Sequence
  Chemically Synthesized
QVQLQESGGGLVQAGGSLRLSCAASGSISDRDTMGWYRQAPGKEREFVATIDYGTSTYYADSVKGRFTISRDNAKNTVYLQMNSLKPEDTAVYYCAVITYDHRYWGQGTQVTVSS

SEQ ID NO: 3418 - protein, 121 aa, Artificial Sequence
  Chemically Synthesized
QVQLQESGGGLVQAGGSLRLSCAASGTISSLFMGWYRQAPGKERELVAAINYGASTYYADSVKGRFTISRDNAKNTVYLQMNSLKPEDTAVYYCAAQDDDDHDWPYYHEYWGQGTQVTVSS

SEQ ID NO: 3419 - protein, 115 aa, Artificial Sequence
  Chemically Synthesized
QVQLQESGGGLVQAGGSLRLSCAASGTIFYQAQMGWYRQAPGKERELVAAISKGGSTYYADSVKGRFTISRDNAKNTVYLQMNSLKPEDTAVYYCAVITYDHIYWGQGTQVTVSS

SEQ ID NO: 3420 - protein, 121 aa, Artificial Sequence
  Chemically Synthesized
QVQLQESGGGLVQAGGSLRLSCAASGTISSLFMGWYRQAPGKERELVAAINYGASTYYADSVKGRFTISRDNAKNTVYLQMNSLKPEDTAVYYCAVFDDDEDYSISEYPYWGQGTQVTVSS

SEQ ID NO: 3421 - protein, 118 aa, Artificial Sequence
  Chemically Synthesized
QVQLQESGGGLVQAGGSLRLSCAASGNIFTGSVMGWYRQAPGKERELVATIDEGSSTYYADSVKGRFTISRDNAKNTVYLQMNSLKPEDTAVYYCAAAYWYNYDYYYWGQGTQVTVSS

SEQ ID NO: 3422 - protein, 118 aa, Artificial Sequence
  Chemically Synthesized
QVQLQESGGGLVQAGGSLRLSCAASGNISLYSYMGWYRQAPGKERELVATINRGASTNYADSVKGRFTISRDNAKNTVYLQMNSLKPEDTAVYYCAAASWERYDYVYWGQGTQVTVSS

SEQ ID NO: 3423 - protein, 119 aa, Artificial Sequence
  Chemically Synthesized
QVQLQESGGGLVQAGGSLRLSCAASGSISVGYNMGWYRQAPGKERELVAAINSGGNTYYADSVKGRFTISRDNAKNTVYLQMNSLKPEDTAVYYCAAYWYQGVRDLSYWGQGTQVTVSS

SEQ ID NO: 3424 - protein, 115 aa, Artificial Sequence
  Chemically Synthesized
QVQLQESGGGLVQAGGSLRLSCAASGNIFLDGYMGWYRQAPGKERELVAAITGGASTYYADSVKGRFTISRDNAKNTVYLQMNSLKPEDTAVYYCAVITYDHRYWGQGTQVTVSS

SEQ ID NO: 3425 - protein, 126 aa, Artificial Sequence
  Chemically Synthesized
QVQLQESGGGLVQAGGSLRLSCAASGNISYIWAMGWYRQAPGKEREFVAAIDVGANTYYADSVKGRFTISRDNAKNTVYLQMNSLKPEDTAVYYCAVQGYNDDGYEFVYPDEHGYWGQGTQVTVSS

SEQ ID NO: 3426 - protein, 119 aa, Artificial Sequence
  Chemically Synthesized
QVQLQESGGGLVQAGGSLRLSCAASGTIFYQAQMGWYRQAPGKERELVAAISKGGSTYYADSVKGRFTISRDNAKNTVYLQMNSLKPEDTAVYYCAAYWYPGVRDLSYWGQGTQVTVSS

SEQ ID NO: 3427 - protein, 118 aa, Artificial Sequence
  Chemically Synthesized
QVQLQESGGGLVQAGGSLRLSCAASGTIFDNSTMGWYRQAPGKEREFVAGIDLGTSTNYADSVKGRFTISRDNAKNTVYLQMNSLKPEDTAVYYCAAGDRSWWQFPYWGQGTQVTVSS

SEQ ID NO: 3428 - protein, 115 aa, Artificial Sequence
  Chemically Synthesized
QVQLQESGGGLVQAGGSLRLSCAASGTISVGIDMGWYRQAPGKERELVAAINYGASTYYADSVKGRFTISRDNAKNTVYLQMNSLKPEDTAVYYCAVITYDHRYWGQGTQVTVSS

SEQ ID NO: 3429 - protein, 115 aa, Artificial Sequence
  Chemically Synthesized
QVQLQESGGGLVQAGGSLRLSCAASGSISDDYYMGWYRQAPGKERELVAAITDGTNTYYADSVKGRFTISRDNAKNTVYLQMNSLKPEDTAVYYCAAVTYAYVYWGQGTQVTVSS

SEQ ID NO: 3430 - protein, 119 aa, Artificial Sequence
  Chemically Synthesized
QVQLQESGGGLVQAGGSLRLSCAASGTIFYQAQMGWYRQAPGKERELVAAISKGGSTYYADSVKGRFTISRDNAKNTVYLQMNSLKPEDTAVYYCAAFWYQGVRDLSYWGQGTQVTVSS

SEQ ID NO: 3431 - protein, 119 aa, Artificial Sequence
  Chemically Synthesized
QVQLQESGGGLVQAGGSLRLSCAASGTIFYQAQMGWYRQAPGKERELVAAISKGGSTYYADSVKGRFTISRDNAKNTVYLQMNSLKPEDTAVYYCAAYWDQGVRDLSYWGQGTQVTVSS

SEQ ID NO: 3432 - protein, 119 aa, Artificial Sequence
  Chemically Synthesized
QVQLQESGGGLVQAGGSLRLSCAASGTIFYQAQMGWYRQAPGKERELVAAISKGGSTSYADSVKGRFTISRDNAKNTVYLQMNSLKPEDTAVYYCAAYWYQGVRDLSYWGQGTQVTVSS

SEQ ID NO: 3433 - protein, 117 aa, Artificial Sequence
  Chemically Synthesized
QVQLQESGGGLVQAGGSLRLSCAASGNISFVYGMGWYRQAPGKEREFVAGIGWGTSTYYADSVKGRFTISRDNAKNTVYLQMNSLKPEDTAVYYCAVSDWYTDYDYWGQGTQVTVSS

SEQ ID NO: 3434 - protein, 119 aa, Artificial Sequence
  Chemically Synthesized
QVQLQESGGGLVQAGGSLRLSCAASGTIFYQAQMGWYRQAPGKERELVAAISKGGSTYYADSVKGRFTISRDNAKNTVYLQMNSLKPEDTAVYYCAAYWFQGVRDLSYWGQGTQVTVSS

SEQ ID NO: 3435 - protein, 118 aa, Artificial Sequence
  Chemically Synthesized
QVQLQESGGGLVQAGGSLRLSCAASGNIFYYTYMGWYRQAPGKERELVATIDRGTNTYYADSVKGRFTISRDNAKNTVYLQMNSLKPEDTAVYYCAAVDWRASQYVYWGQGTQVTVSS

SEQ ID NO: 3436 - protein, 118 aa, Artificial Sequence
  Chemically Synthesized
QVQLQESGGGLVQAGGSLRLSCAASGTIFPLTLMGWYRQAPGKERELVATISEGGITNYADSVKGRFTISRDNAKNTVYLQMNSLKPEDTAVYYCAAASYRTWDHVYWGQGTQVTVSS

SEQ ID NO: 3437 - protein, 117 aa, Artificial Sequence
  Chemically Synthesized
QVQLQESGGGLVQAGGSLRLSCAASGYIFRDGAMGWYRQAPGKERELVATISWGTTTNYADSVKGRFTISRDNAKNTVYLQMNSLKPEDTAVYYCAAWDAYQDLVYWGQGTQVTVSS

SEQ ID NO: 3438 - protein, 118 aa, Artificial Sequence
  Chemically Synthesized
QVQLQESGGGLVQAGGSLRLSCAASGNISAQDYMGWYRQAPGKERELVAAIGDGGITYYADSVKGRFTISRDNAKNTVYLQMNSLKPEDTAVYYCAADDDGYPYLEYWGQGTQVTVSS

SEQ ID NO: 3439 - protein, 119 aa, Artificial Sequence
  Chemically Synthesized
QVQLQESGGGLVQAGGSLRLSCAASGTIFYQAQMGWYRQAPGKERELVAASSKGGSTYYADSVKGRFTISRDNAKNTVYLQMNSLKPEDTAVYYCAAYWYQGVRDLSYWGQGTQVTVSS

SEQ ID NO: 3440 - protein, 118 aa, Artificial Sequence
  Chemically Synthesized
QVQLQESGGGLVQAGGSLRLSCAASGRRWMGWYRQAPGKERELVATIAYGSITNYADSVKGRFTISRDNAKNTVYLQMNSLKPEDTAVYYCAVGYKPYPLQYDRLAYWGQGTQVTVSS

SEQ ID NO: 3441 - protein, 115 aa, Artificial Sequence
  Chemically Synthesized
QVQLQESGGGLVQAGGSLRLSCAASGNISGYRDMGWYRQAPGKEREFVASIDYGGNTYYADSVKGRFTISRDNAKNTVYLQMNSLKPEDTAVYYCAVITYDHRYWGQGTQVTVSS

SEQ ID NO: 3442 - protein, 118 aa, Artificial Sequence
  Chemically Synthesized
QVQLQESGGGLVQAGGSLRLSCAASGTIFYQAQMGWYRQAPGKERELVAAISKGGSTYYADSVKGRFTISRDNAKNTVYLQMNSLKPEDTAVYYCAAAYWYNYDYYYWGQGTQVTVSS

SEQ ID NO: 3443 - protein, 122 aa, Artificial Sequence
  Chemically Synthesized
QVQLQESGGGLVQAGGSLRLSCAASGYIFPSDIMGWYRQAPGKEREFVAGIDAGANTNYADSVKGRFTISRDNAKNTVYLQMNSLKPEDTAVYYCAARQFGQWEDFPSHDYWGQGTQVTVSS

SEQ ID NO: 3444 - protein, 115 aa, Artificial Sequence
  Chemically Synthesized
QVQLQESGGGLVQAGGSLRLSCAASGTIFYQAQMGWYRQAPGKERELVAAINSGGNTYYADSVKGRFTISRDNAKNTVYLQMNSLKPEDTAVYYCAVITYDHIYWGQGTQVTVSS

SEQ ID NO: 3445 - protein, 119 aa, Artificial Sequence
  Chemically Synthesized
QVQLQESGGGLVQAGGSLRLSCAASGTIFYQAQMGWYRQAPGKERELVAAISKGGSTYYADSVKGRFTISRDNAKNTVYLQMNSLKPEDTAVYYCAAYWYLGVRDLSYWGQGTQVTVSS

SEQ ID NO: 3446 - protein, 122 aa, Artificial Sequence
  Chemically Synthesized
QVQLQESGGGLVQAGGSLRLSCAASGTISYDDYMGWYRQAPGKERELVASIGLGGSTYYADSVKGRFTISRDNAKNTVYLQMNSLKPEDTAVYYCAVFDDDEDYSISEYPYWGQGTQVTVSS

SEQ ID NO: 3447 - protein, 119 aa, Artificial Sequence
  Chemically Synthesized
QVQLQESGGGLVQAGGSLRLSCAASGNIFYQAQMGWYRQAPGKERELVAAISKGGSTYYADSVKGRFTISRDNAKNTVYLQMNSLKPEDTAVYYCAAYWYQGVRDLSYWGQGTQVTVSS

SEQ ID NO: 3448 - protein, 119 aa, Artificial Sequence
  Chemically Synthesized
QVQLQESGGGLVQAGGSLRLSCAASGTIFYQAQMGWYRQAPGKERELVAAISKGGSTDYADSVKGRFTISRDNAKNTVYLQMNSLKPEDTAVYYCAAYWYQGVRDLSYWGQGTQVTVSS

SEQ ID NO: 3449 - protein, 122 aa, Artificial Sequence
  Chemically Synthesized
QVQLQESGGGLVQAGGSLRLSCAASGYIFRYAYMGWYRQAPGKEREFVATITIGTNTYYADSVKGRFTISRDNAKNTVYLQMNSLKPEDTAVYYCAAYAYRVDSSYYDLDYWGQGTQVTVSS

SEQ ID NO: 3450 - protein, 117 aa, Artificial Sequence
  Chemically Synthesized
QVQLQESGGGLVQAGGSLRLSCAASGTISSLFMGWYRQAPGKERELVAAINYGASTYYADSVKGRFTISRDNAKNTVYLQMNSLKPEDTAVYYCAVSDTDIRAYGYWGQGTQVTVSS

SEQ ID NO: 3451 - protein, 118 aa, Artificial Sequence
  Chemically Synthesized
QVQLQESGGGLVQAGGSLRLSCAASGSIFHADDMGWYRQAPGKERELVASITLGANTYYADSVKGRFTISRDNAKNTVYLQMNSLKPEDTAVYYCAVDDDIYPFLNYWGQGTQVTVSS

SEQ ID NO: 3452 - protein, 119 aa, Artificial Sequence
  Chemically Synthesized
QVQLQESGGGLVQAGGSLRLSCAASGTIFYQAQMGWYRQAPGKERELVAALSKGGSTYYADSVKGRFTISRDNAKNTVYLQMNSLKPEDTAVYYCAAYWYQGVRDLSYWGQGTQVTVSS

SEQ ID NO: 3453 - protein, 119 aa, Artificial Sequence
  Chemically Synthesized
QVQLQESGGGLVQAGGSLRLSCAASGTIFYQAQMGWYRQAPGKERELVAAISKGGSTYYADSVKGRFTISRDNAKNTVYLQMNSLKPEDTAVYYCAAYWYQCVRDLSYWGQGTQVTVSS

SEQ ID NO: 3454 - protein, 119 aa, Artificial Sequence
  Chemically Synthesized
QVQLQESGGGLVQAGGSLRLSCAASGTIFYQAQMGWYRQAPGKERELVAAISKGGSTYYADSVKGRFTISRDNAKNTVYLQMNSLKPEDTAVYYCAAYWYQGVRVLSYWGQGTQVTVSS

SEQ ID NO: 3455 - protein, 117 aa, Artificial Sequence
  Chemically Synthesized
QVQLQESGGGLVQAGGSLRLSCAASGNISASLMGWYRQAPGKERELVAGIDYGASTNYADSVKGRFTISRDNAKNTVYLQMNSLKPEDTAVYYCAAYRTYVVRFQYWGQGTQVTVSS

SEQ ID NO: 3456 - protein, 126 aa, Artificial Sequence
  Chemically Synthesized
QVQLQESGGGLVQAGGSLRLSCAASGTIFYQAQMGWYRQAPGKERELVAAISKGGSTYYADSVKGRFTISRDNAKNTVYLQMNSLKPEDTAVYYCAVQGYNDDGYEFVYPDEHGYWGQGTQVTVSS

SEQ ID NO: 3457 - protein, 117 aa, Artificial Sequence
  Chemically Synthesized
QVQLQESGGGLVQAGGSLRLSCAASGYIFTSYDMGWYRQAPGKEREFVAAITSVLLPYADSVKGRFTISRDNAKNTVYLQMNSLKPEDTAVYYCAVNDAPSVGFRYWGQGTQVTVSS

SEQ ID NO: 3458 - protein, 119 aa, Artificial Sequence
  Chemically Synthesized
QVQLQESGGGLVQAGGSLRLSCAASGTIFYQAQMGWYRQAPGKERELVAAISKGGRTYYADSVKGRFTISRDNAKNTVYLQMNSLKPEDTAVYYCAAYWYQGVRDLSYWGQGTQVTVSS

SEQ ID NO: 3459 - protein, 118 aa, Artificial Sequence
  Chemically Synthesized
QVQLQESGGGLVQAGGSLRLSCAASGSISYEYYMGWYRQAPGKERELVASIAYGTSTYYADSVKGRFTISRDNAKNTVYLQMNSLKPEDTAVYYCAADADVYPYLQYWGQGTQVTVSS

SEQ ID NO: 3460 - protein, 119 aa, Artificial Sequence
  Chemically Synthesized
QVQLQESGGGLVQAGGSLRLSCAASGTIFYQAQMGWYRQAPGKERELVAAISKGGSTYYADSVKGRFTISRDNAKNTVYLQMNSLKPEDTAVYYCADYWYQGVRDLSYWGQGTQVTVSS

SEQ ID NO: 3461 - protein, 119 aa, Artificial Sequence
  Chemically Synthesized
QVQLQESGGGLVQAGGSLRLSCAASGTIFYQAQMGWYRQAPGKERELVAAISKGGSTYYADSVKGRFTISRDNAKNTVYLQMNSLKPEDTAVYYCAAYWYQGVRELSYWGQGTQVTVSS

SEQ ID NO: 3462 - protein, 114 aa, Artificial Sequence
  Chemically Synthesized
QVQLQESGGGLVQAGGSLRLSCAASGTISSLFMGWYRQAPGKERELVAAITGGASTYYADSVKGRFTISRDNAKNTVYLQMNSLKPEDTAVYYCAAITYYHTYWGQGTQVTVSS

SEQ ID NO: 3463 - protein, 122 aa, Artificial Sequence
  Chemically Synthesized
QVQLQESGGGLVQAGGSLRLSCAASGYISWLLAMGWYRQAPGKERELVATINYGTSTNYADSVKGRFTISRDNAKNTVYLQMNSLKPEDTAVYYCAAYYGYAADHKGAFTYWGQGTQVTVSS

SEQ ID NO: 3464 - protein, 119 aa, Artificial Sequence
  Chemically Synthesized
QVQLQESGGGLVQAGGSLRLSCAASGTIFYQAQMGWYRQAPGKERELVAAISKGGSTYYADSVKGRFTISRDNAKNTVYLQMNSLKPEDTAVYYCAAYLYQGVRDLSYWGQGTQVTVSS

SEQ ID NO: 3465 - protein, 119 aa, Artificial Sequence
  Chemically Synthesized
QVQLQESGGGLVQAGGSLRLSCAASGTIFYQAQMGWYRQAPGKERELVAAISNGGSTYYADSVKGRFTISRDNAKNTVYLQMNSLKPEDTAVYYCAAYWYQGVRDLSYWGQGTQVTVSS

SEQ ID NO: 3466 - protein, 121 aa, Artificial Sequence
  Chemically Synthesized
QVQLQESGGGLVQAGGSLRLSCAASGSISPDQDMGWYRQAPGKERELVAGIDYGSITYYADSVKGRFTISRDNAKNTVYLQMNSLKPEDTAVYYCAVQYDEPGISDYHEYWGQGTQVTVSS

SEQ ID NO: 3467 - protein, 119 aa, Artificial Sequence
  Chemically Synthesized
QVQLQESGGGLVQAGGSLRLSCAASGTIFYQAQMGWYRQAPGKERELVAAIRKGGSTYYADSVKGRFTISRDNAKNTVYLQMNSLKPEDTAVYYCAAYWYQGVRDLSYWGQGTQVTVSS

SEQ ID NO: 3468 - protein, 122 aa, Artificial Sequence
  Chemically Synthesized
QVQLQESGGGLVQAGGSLRLSCAASGSIFDDDSMGWYRQAPGKEREFVAAIAYGSTTYYADSVKGRFTISRDNAKNTVYLQMNSLKPEDTAVYYCAAYAYIYYEDEFYLDYWGQGTQVTVSS

SEQ ID NO: 3469 - protein, 119 aa, Artificial Sequence
  Chemically Synthesized
QVQLQESGGGLVQAGGSLRLSCAASGTIFYQAQMGWYRQAPGKERELVAAISKGGSTYYADSVKGRFTISRDNAKNTVYLQMNSLKPEDTAVYYCAAYWYQGVRDISYWGQGTQVTVSS

SEQ ID NO: 3470 - protein, 119 aa, Artificial Sequence
  Chemically Synthesized
QVQLQESGGGLVQAGGSLRLSCAASGTIFYQAQMGWYRQAPGKERELVAAISKGGSTYYADSVKGRFTISRDNAKNTVYLQMNSLKPEDTAVYYCAAYWYHGVRDLSYWGQGTQVTVSS

SEQ ID NO: 3471 - protein, 118 aa, Artificial Sequence
  Chemically Synthesized
QVQLQESGGGLVQAGGSLRLSCAASGTISYDDYMGWYRQAPGKERELVASIGLGGSTYYADSVKGRFTISRDNAKNTVYLQMNSLKPEDTAVYYCAVDDNDDPFHQYWGQGTQVTVSS

SEQ ID NO: 3472 - protein, 119 aa, Artificial Sequence
  Chemically Synthesized
QVQLQESGGGLVQAGGSLRLSCAASGNISLNLGMGWYRQAPGKERELVATIAWGTSTNYADSVKGRFTISRDNAKNTVYLQMNSLKPEDTAVYYCAVQKWWDSSYHVYWGQGTQVTVSS

SEQ ID NO: 3473 - protein, 122 aa, Artificial Sequence
  Chemically Synthesized
QVQLQESGGGLVQAGGSLRLSCAASGYIFALYAMGWYRQAPGKERELVATISPGGSTYYADSVKGRFTISRDNAKNTVYLQMNSLKPEDTAVYYCAAYSQTSPSDGYYHGYWGQGTQVTVSS

SEQ ID NO: 3474 - protein, 118 aa, Artificial Sequence
  Chemically Synthesized
QVQLQESGGGLVQAGGSLRLSCAASGSIFETGTMGWYRQAPGKERELVATIDQGSSTNYADSVKGRFTISRDNAKNTVYLQMNSLKPEDTAVYYCAVAWWHTPSHAYWGQGTQVTVSS

SEQ ID NO: 3475 - protein, 118 aa, Artificial Sequence
  Chemically Synthesized
QVQLQESGGGLVQAGGSLRLSCAASGTIFFFIFMGWYRQAPGKEREFVAGISYGANTYYADSVKGRFTISRDNAKNTVYLQMNSLKPEDTAVYYCAVQYLPRGGYPYWGQGTQVTVSS

SEQ ID NO: 3476 - protein, 117 aa, Artificial Sequence
  Chemically Synthesized
QVQLQESGGGLVQAGGSLRLSCAASGTIFVALGMGWYRQAPGKERELVASIAAGTTTYYADSVKGRFTISRDNAKNTVYLQMNSLKPEDTAVYYCAATGGVGYHRYWGQGTQVTVSS

SEQ ID NO: 3477 - protein, 118 aa, Artificial Sequence
  Chemically Synthesized
QVQLQESGGGLVQAGGSLRLSCAASGNIFPVRSMGWYRQAPGKERELVASIAGGTSTYYADSVKGRFTISRDNAKNTVYLQMNSLKPEDTAVYYCAATYALGFLHIYWGQGTQVTVSS

SEQ ID NO: 3478 - protein, 119 aa, Artificial Sequence
  Chemically Synthesized
QVQLQESGGGLVQAGGSLRLSCAASGTIFNQAQMGWYRQAPGKERELVAAISKGGSTYYADSVKGRFTISRDNAKNTVYLQMNSLKPEDTAVYYCAAYWYQGVRDLSYWGQGTQVTVSS

SEQ ID NO: 3479 - protein, 117 aa, Artificial Sequence
  Chemically Synthesized
QVQLQESGGGLVQAGGSLRLSCAASGYISGDWDMGWYRQAPGKERELVAAIDNGATTYYADSVKGRFTISRDNAKNTVYLQMNSLKPEDTAVYYCAASPRAYYHPYWGQGTQVTVSS

SEQ ID NO: 3480 - protein, 118 aa, Artificial Sequence
  Chemically Synthesized
QVQLQESGGGLVQAGGSLRLSCAASGYIFDSDTMGWYRQAPGKEREFVAAINTGASTYYADSVKGRFTISRDNAKNTVYLQMNSLKPEDTAVYYCAAWGRREQLLGYWGQGTQVTVSS

SEQ ID NO: 3481 - protein, 122 aa, Artificial Sequence
  Chemically Synthesized
QVQLQESGGGLVQAGGSLRLSCAASGNIFRRNLMGWYRQAPGKERELVAGIGRGGITNYADSVKGRFTISRDNAKNTVYLQMNSLKPEDTAVYYCAATTGYPDRDRRGHYYWGQGTQVTVSS

SEQ ID NO: 3482 - protein, 115 aa, Artificial Sequence
  Chemically Synthesized
QVQLQESGGGLVQAGGSLRLSCAASGYIFDTFLMGWYRQAPGKEREFVASINYGANTYYADSVKGRFTISRDNAKNTVYLQMNSLKPEDTAVYYCAADLEGDMYWGQGTQVTVSS

SEQ ID NO: 3483 - protein, 122 aa, Artificial Sequence
  Chemically Synthesized
QVQLQESGGGLVQAGGSLRLSCAASGYIFIRPPMGWYRQAPGKEREFVAAIGTGGTTYYADSVKGRFTISRDNAKNTVYLQMNSLKPEDTAVYYCAVGRYYIRWQSAVHIYWGQGTQVTVSS

SEQ ID NO: 3484 - protein, 121 aa, Artificial Sequence
  Chemically Synthesized
QVQLQESGGGLVQAGGSLRLSCAASGNIFHTKAMGWYRQAPGKEREFVAAINRGSSTNYADSVKGRFTISRDNAKNTVYLQMNSLKPEDTAVYYCAVYYRRRSGTWWHDYWGQGTQVTVSS

SEQ ID NO: 3485 - protein, 118 aa, Artificial Sequence
  Chemically Synthesized
QVQLQESGGGLVQAGGSLRLSCAASGYISWYGVMGWYRQAPGKERELVAGINRGSNTYYADSVKGRFTISRDNAKNTVYLQMNSLKPEDTAVYYCAAIRARYGGFRYWGQGTQVTVSS

SEQ ID NO: 3486 - protein, 118 aa, Artificial Sequence
  Chemically Synthesized
QVQLQESGGGLVQAGGSLRLSCAASGSIFVIPRMGWYRQAPGKEREFVATIGWGGNTNYADSVKGRFTISRDNAKNTVYLQMNSLKPEDTAVYYCAVKYVYLRPFGYWGQGTQVTVSS

SEQ ID NO: 3487 - protein, 121 aa, Artificial Sequence
  Chemically Synthesized
QVQLQESGGGLVQAGGSLRLSCAASGSIFGPRYMGWYRQAPGKERELVAGIGNGAITNYADSVKGRFTISRDNAKNTVYLQMNSLKPEDTAVYYCAAVNHDQASSRTLIYWGQGTQVTVSS

SEQ ID NO: 3488 - protein, 119 aa, Artificial Sequence
  Chemically Synthesized
QVQLQESGGGLVQAGGSLRLSCAASGYISGQYDMGWYRQAPGKERELVAAITDGSNTYYADSVKGRFTISRDNAKNTVYLQMNSLKPEDTAVYYCAVIDDYDYWYYVYWGQGTQVTVSS

SEQ ID NO: 3489 - protein, 118 aa, Artificial Sequence
  Chemically Synthesized
QVQLQESGGGLVQAGGSLRLSCAASGNIFSRRGMGWYRQAPGKEREFVAGIGPGGITNYADSVKGRFTISRDNAKNTVYLQMNSLKPEDTAVYYCAAWSWRYRAFTYWGQGTQVTVSS

SEQ ID NO: 3490 - protein, 118 aa, Artificial Sequence
  Chemically Synthesized
QVQLQESGGGLVQAGGSLRLSCAASGNISYSYFMGWYRQAPGKEREFVASIASGTNTNYADSVKGRFTISRDNAKNTVYLQMNSLKPEDTAVYYCAVKRHWYTTHRYWGQGTQVTVSS

SEQ ID NO: 3491 - protein, 118 aa, Artificial Sequence
  Chemically Synthesized
QVQLQESGGGLVQAGGSLRLSCAASGNISGLRYMGWYRQAPGKERELVAAINAGGTTYYADSVKGRFTISRDNAKNTVYLQMNSLKPEDTAVYYCAAYLYVRVWYDYWGQGTQVTVSS

SEQ ID NO: 3492 - protein, 118 aa, Artificial Sequence
  Chemically Synthesized
QVQLQESGGGLVQAGGSLRLSCAASGTISWYSYMGWYRQAPGKEREFVAAINHGTITYYADSVKGRFTISRDNAKNTVYLQMNSLKPEDTAVYYCAATSKLRYQFRYWGQGTQVTVSS

SEQ ID NO: 3493 - protein, 110 aa, Artificial Sequence
  Chemically Synthesized
QVQLQESGGGLVQAGGSLRLSCAASGNIFEATVMGWYRQAPGKERELVATIGIGTNTNYADSVKGRFTISRDNAKNTVYLQMNSLKPEDTAVYYCAAIYWGQGTQVTVSS

SEQ ID NO: 3494 - protein, 117 aa, Artificial Sequence
  Chemically Synthesized
QVQLQESGGGLVQAGGSLRLSCAASGTISSYYMGWYRQAPGKEREFVAAIAYGGSTNYADSVKGRFTISRDNAKNTVYLQMNSLKPEDTAVYYCAATYAQYDDYIYWGQGTQVTVSS

SEQ ID NO: 3495 - protein, 118 aa, Artificial Sequence
  Chemically Synthesized
QVQLQESGGGLVQAGGSLRLSCAASGYISRRAVMGWYRQAPGKEREFVAGITAGGNTYYADSVKGRFTISRDNAKNTVYLQMNSLKPEDTAVYYCAVDAWRKGRYPYWGQGTQVTVSS

SEQ ID NO: 3496 - protein, 118 aa, Artificial Sequence
  Chemically Synthesized
QVQLQESGGGLVQAGGSLRLSCAASGTIFRVPSMGWYRQAPGKERELVAAIDSGSITYYADSVKGRFTISRDNAKNTVYLQMNSLKPEDTAVYYCAARRRYVRFFAYWGQGTQVTVSS

SEQ ID NO: 3497 - protein, 122 aa, Artificial Sequence
  Chemically Synthesized
QVQLQESGGGLVQAGGSLRLSCAASGTISKRVYMGWYRQAPGKERELVAAIGRGGNTYYADSVKGRFTISRDNAKNTVYLQMNSLKPEDTAVYYCAVVRTVNHYQWTNHYYWGQGTQVTVSS

SEQ ID NO: 3498 - protein, 118 aa, Artificial Sequence
  Chemically Synthesized
QVQLQESGGGLVQAGGSLRLSCAASGTIFRYYYMGWYRQAPGKERELVAAINYGANTYYADSVKGRFTISRDNAKNTVYLQMNSLKPEDTAVYYCAVAGKRYRQYVYWGQGTQVTVSS

SEQ ID NO: 3499 - protein, 118 aa, Artificial Sequence
  Chemically Synthesized
QVQLQESGGGLVQAGGSLRLSCAASGYISRTIYMGWYRQAPGKEREFVAAIGEGSITNYADSVKGRFTISRDNAKNTVYLQMNSLKPEDTAVYYCAVYADHGRNFPYWGQGTQVTVSS

SEQ ID NO: 3500 - protein, 117 aa, Artificial Sequence
  Chemically Synthesized
QVQLQESGGGLVQAGGSLRLSCAASGTISRRSTMGWYRQAPGKERELVASISYGSSTYYADSVKGRFTISRDNAKNTVYLQMNSLKPEDTAVYYCAARQRYRYHWYWGQGTQVTVSS

SEQ ID NO: 3501 - protein, 118 aa, Artificial Sequence
  Chemically Synthesized
QVQLQESGGGLVQAGGSLRLSCAASGTIFALRGMGWYRQAPGKERELVAAINVGATTNYADSVKGRFTISRDNAKNTVYLQMNSLKPEDTAVYYCAAQRWWVGTFSYWGQGTQVTVSS

SEQ ID NO: 3502 - protein, 118 aa, Artificial Sequence
  Chemically Synthesized
QVQLQESGGGLVQAGGSLRLSCAASGTIFWRYGMGWYRQAPGKERELVAAINTGTTTNYADSVKGRFTISRDNAKNTVYLQMNSLKPEDTAVYYCAVGYLFRRGLYYWGQGTQVTVSS

SEQ ID NO: 3503 - protein, 122 aa, Artificial Sequence
  Chemically Synthesized
QVQLQESGGGLVQAGGSLRLSCAASGTISGQYVMGWYRQAPGKEREFVASIATGTTTNYADSVKGRFTISRDNAKNTVYLQMNSLKPEDTAVYYCAVLVVDYDRAGAAYRYWGQGTQVTVSS

SEQ ID NO: 3504 - protein, 112 aa, Artificial Sequence
  Chemically Synthesized
QVQLQESGGGLVQAGGSLRLSCAASGNIFRYNHMGWYRQAPGKEREFVATIDSGAITYYADSVKGRFTISRDNAKNTVYLQMNSLKPEDTAVYYCAGLYDYWGQGTQVTVSS

SEQ ID NO: 3505 - protein, 118 aa, Artificial Sequence
  Chemically Synthesized
QVQLQESGGGLVQAGGSLRLSCAASGYIFRPLGMGWYRQAPGKERELVATIGRGSNTYYADSVKGRFTISRDNAKNTVYLQMNSLKPEDTAVYYCAARARVIRDYGYWGQGTQVTVSS

SEQ ID NO: 3506 - protein, 113 aa, Artificial Sequence
  Chemically Synthesized
QVQLQESGGGLVQAGGSLRLSCAASGNIFDLSPMGWYRQAPGKEREFVASIGHGGNTYYADSVKGRFTISRDNAKNTVYLQMNSLKPEDTAVYYCAVGDLPYWGQGTQVTVSS

SEQ ID NO: 3507 - protein, 118 aa, Artificial Sequence
  Chemically Synthesized
QVQLQESGGGLVQAGGSLRLSCAASGTIFRGVIMGWYRQAPGKEREFVAAIGRGGTTYYADSVKGRFTISRDNAKNTVYLQMNSLKPEDTAVYYCAVIYRPYYFFTYWGQGTQVTVSS

SEQ ID NO: 3508 - protein, 118 aa, Artificial Sequence
  Chemically Synthesized
QVQLQESGGGLVQAGGSLRLSCAASGTIFRELAMGWYRQAPGKEREFVASISYGSSTYYADSVKGRFTISRDNAKNTVYLQMNSLKPEDTAVYYCAVVLGRGYVHAYWGQGTQVTVSS

SEQ ID NO: 3509 - protein, 122 aa, Artificial Sequence
  Chemically Synthesized
QVQLQESGGGLVQAGGSLRLSCAASGTISPSDSMGWYRQAPGKERELVAGISTGSSTYYADSVKGRFTISRDNAKNTVYLQMNSLKPEDTAVYYCAATALDRPYLDKAYTYWGQGTQVTVSS

SEQ ID NO: 3510 - protein, 124 aa, Artificial Sequence
  Chemically Synthesized
QVQLQESGGGLVQAGGSLRLSCAASGTISDPSHMGWYRQAPGKERELVAGITEGTITYYADSVKGRFTISRDNAKNTVYLQMNSLKPEDTAVYYCAVISYQTWSGRDAYYHDYWGQGTQVTVSS

SEQ ID NO: 3511 - protein, 118 aa, Artificial Sequence
  Chemically Synthesized
QVQLQESGGGLVQAGGSLRLSCAASGNISYYYYMGWYRQAPGKERELVATIAAGATTYYADSVKGRFTISRDNAKNTVYLQMNSLKPEDTAVYYCAVRRFWRPYHPYWGQGTQVTVSS

SEQ ID NO: 3512 - protein, 115 aa, Artificial Sequence
  Chemically Synthesized
QVQLQESGGGLVQAGGSLRLSCAASGSISAHPSMGWYRQAPGKERELVAGIYADSVKGRFTISRDNAKNTVYLQMNSLKPEDTAVYYCAADDDYAQTDWYDLSYWGQGTQVTVSS

SEQ ID NO: 3513 - protein, 118 aa, Artificial Sequence
  Chemically Synthesized
QVQLQESGGGLVQAGGSLRLSCAASGYISRPADMGWYRQAPGKEREFVATITGGATTNYADSVKGRFTISRDNAKNTVYLQMNSLKPEDTAVYYCAVGQDEIYDLRYWGQGTQVTVSS

SEQ ID NO: 3514 - protein, 116 aa, Artificial Sequence
  Chemically Synthesized
QVQLQESGGGLVQAGGSLRLSCAASGNISTPYRMGWYRQAPGKERELVAAISFGTNTYYADSVKGRFTISRDNAKNTVYLQMNSLKPEDTAVYYCAVHRYWGLRYWGQGTQVTVSS

SEQ ID NO: 3515 - protein, 122 aa, Artificial Sequence
  Chemically Synthesized
QVQLQESGGGLVQAGGSLRLSCAASGNIFPGRLMGWYRQAPGKEREFVAAIDRGATTYYADSVKGRFTISRDNAKNTVYLQMNSLKPEDTAVYYCAAWPWTARYRYQGYRYWGQGTQVTVSS

SEQ ID NO: 3516 - protein, 118 aa, Artificial Sequence
  Chemically Synthesized
QVQLQESGGGLVQAGGSLRLSCAASGNIFSGYGMGWYRQAPGKERELVASIDTGTTTYYADSVKGRFTISRDNAKNTVYLQMNSLKPEDTAVYYCAAYRADPYYHVYWGQGTQVTVSS

SEQ ID NO: 3517 - protein, 114 aa, Artificial Sequence
  Chemically Synthesized
QVQLQESGGGLVQAGGSLRLSCAASGTIFHVRWMGWYRQAPGKERELVASISSGANTYYADSVKGRFTISRDNAKNTVYLQMNSLKPEDTAVYYCAPKWRHRYWGQGTQVTVSS

SEQ ID NO: 3518 - protein, 121 aa, Artificial Sequence
  Chemically Synthesized
QVQLQESGGGLVQAGGSLRLSCAASGYIFRFRMGWYRQAPGKERELVATIGRGTNTYYADSVKGRFTISRDNAKNTVYLQMNSLKPEDTAVYYCAVGRRYYGYHEPVHPYWGQGTQVTVSS

SEQ ID NO: 3519 - protein, 118 aa, Artificial Sequence
  Chemically Synthesized
QVQLQESGGGLVQAGGSLRLSCAASGSISRRGWMGWYRQAPGKERELVAGINGGSTTYYADSVKGRFTISRDNAKNTVYLQMNSLKPEDTAVYYCAVFYGRYYRHYYWGQGTQVTVSS

SEQ ID NO: 3520 - protein, 118 aa, Artificial Sequence
  Chemically Synthesized
QVQLQESGGGLVQAGGSLRLSCAASGSIFRYPTMGWYRQAPGKERELVASIDVGASTYYADSVKGRFTISRDNAKNTVYLQMNSLKPEDTAVYYCAVAYRWYRSYAYWGQGTQVTVSS

SEQ ID NO: 3521 - protein, 122 aa, Artificial Sequence
  Chemically Synthesized
QVQLQESGGGLVQAGGSLRLSCAASGNISDPPIMGWYRQAPGKEREFVAGINWGSNTNYADSVKGRFTISRDNAKNTVYLQMNSLKPEDTAVYYCAAHTDVRPRWYYYHAYWGQGTQVTVSS

SEQ ID NO: 3522 - protein, 118 aa, Artificial Sequence
  Chemically Synthesized
QVQLQESGGGLVQAGGSLRLSCAASGTIFFLQRMGWYRQAPGKEREFVAGITPGSNTYYADSVKGRFTISRDNAKNTVYLQMNSLKPEDTAVYYCAVVRYLAYYHTYWGQGTQVTVSS

SEQ ID NO: 3523 - protein, 118 aa, Artificial Sequence
  Chemically Synthesized
QVQLQESGGGLVQAGGSLRLSCAASGTISRRRGMGWYRQAPGKERELVATITSGATTNYADSVKGRFTISRDNAKNTVYLQMNSLKPEDTAVYYCAVSLWRWRWHVYWGQGTQVTVSS

SEQ ID NO: 3524 - protein, 120 aa, Artificial Sequence
  Chemically Synthesized
QVQLQESGGGLVQAGGSLRLSCAASGNIFSARPMGWYRQAPGKERELAVLVRVVVPYADSVKGRFTISRDNAKNTVYLQMNSLKPEDTAVYYCAAGPYGNGSHEYRHSYWGQGTQVTVSS

SEQ ID NO: 3525 - protein, 122 aa, Artificial Sequence
  Chemically Synthesized
QVQLQESGGGLVQAGGSLRLSCAASGYIFISRFMGWYRQAPGKERELVASIARGGTTNYADSVKGRFTISRDNAKNTVYLQMNSLKPEDTAVYYCAVIAVRRPYSYRAYRYWGQGTQVTVSS

SEQ ID NO: 3526 - protein, 122 aa, Artificial Sequence
  Chemically Synthesized
QVQLQESGGGLVQAGGSLRLSCAASGTIFAILRMGWYRQAPGKERELVAGIGYGTSTYYADSVKGRFTISRDNAKNTVYLQMNSLKPEDTAVYYCAAPYRVYGRRPNYFNYWGQGTQVTVSS

SEQ ID NO: 3527 - protein, 126 aa, Artificial Sequence
  Chemically Synthesized
QVQLQESGGGLVQAGGSLRLSCAASGYISHYRLMGWYRQAPGKERELVASIGTGSITNYADSVKGRFTISRDNAKNTVYLQMNSLKPEDTAVYYCAVYTGRYIYRGDAFIRRHIYWGQGTQVTVSS

SEQ ID NO: 3528 - protein, 118 aa, Artificial Sequence
  Chemically Synthesized
QVQLQESGGGLVQAGGSLRLSCAASGNISYRAYMGWYRQAPGKEREFVAAISRGSSTNYADSVKGRFTISRDNAKNTVYLQMNSLKPEDTAVYYCAVGGAYRYRYGYWGQGTQVTVSS

SEQ ID NO: 3529 - protein, 126 aa, Artificial Sequence
  Chemically Synthesized
QVQLQESGGGLVQAGGSLRLSCAASGTISSRVWMGWYRQAPGKEREFVASINWGSNTNYADSVKGRFTISRDNAKNTVYLQMNSLKPEDTAVYYCAARYYFWFWKTPTYEYAHYYWGQGTQVTVSS

SEQ ID NO: 3530 - protein, 118 aa, Artificial Sequence
  Chemically Synthesized
QVQLQESGGGLVQAGGSLRLSCAASGYIFQLWYMGWYRQAPGKERELVAAIDYGANTYYADSVKGRFTISRDNAKNTVYLQMNSLKPEDTAVYYCAVADTRLYDLGYWGQGTQVTVSS

SEQ ID NO: 3531 - protein, 118 aa, Artificial Sequence
  Chemically Synthesized
QVQLQESGGGLVQAGGSLRLSCAASGNIFRLRFMGWYRQAPGKERELVAAIGFGSNTYYADSVKGRFTISRDNAKNTVYLQMNSLKPEDTAVYYCAVATYQRNPHRYWGQGTQVTVSS

SEQ ID NO: 3532 - protein, 118 aa, Artificial Sequence
  Chemically Synthesized
QVQLQESGGGLVQAGGSLRLSCAASGYISDYALMGWYRQAPGKERELVATITQGGTTYYADSVKGRFTISRDNAKNTVYLQMNSLKPEDTAVYYCAVTGPQSDYLVYWGQGTQVTVSS

SEQ ID NO: 3533 - protein, 115 aa, Artificial Sequence
  Chemically Synthesized
QVQLQESGGGLVQAGGSLRLSCAASGYISRGPRMGWYRQAPGKEREFVATIARGGITYYADSVKGRFTISRDNAKNTVYLQMNSLKPEDTAVYYCAARAVTHRYWGQGTQVTVSS

SEQ ID NO: 3534 - protein, 118 aa, Artificial Sequence
  Chemically Synthesized
QVQLQESGGGLVQAGGSLRLSCAASGTISYRFEMGWYRQAPGKERELVATIDRGGTTYYADSVKGRFTISRDNAKNTVYLQMNSLKPEDTAVYYCAVARPVHYRFYYWGQGTQVTVSS

SEQ ID NO: 3535 - protein, 118 aa, Artificial Sequence
  Chemically Synthesized
QVQLQESGGGLVQAGGSLRLSCAASGSIFVRRYMGWYRQAPGKEREFVAAINYGTNTYYADSVKGRFTISRDNAKNTVYLQMNSLKPEDTAVYYCAVTGRYDYRLPYWGQGTQVTVSS

SEQ ID NO: 3536 - protein, 118 aa, Artificial Sequence
  Chemically Synthesized
QVQLQESGGGLVQAGGSLRLSCAASGNISRVYYMGWYRQAPGKEREFVAAITGGAITNYADSVKGRFTISRDNAKNTVYLQMNSLKPEDTAVYYCAARRRFYYAHTYWGQGTQVTVSS

SEQ ID NO: 3537 - protein, 118 aa, Artificial Sequence
  Chemically Synthesized
QVQLQESGGGLVQAGGSLRLSCAASGNIFTIAAMGWYRQAPGKEREFVAAITGGATTYYADSVKGRFTISRDNAKNTVYLQMNSLKPEDTAVYYCAVRGPVRYRHRYWGQGTQVTVSS

SEQ ID NO: 3538 - protein, 118 aa, Artificial Sequence
  Chemically Synthesized
QVQLQESGGGLVQAGGSLRLSCAASGTIFQAQVMGWYRQAPGKERELVASINRGGNTYYADSVKGRFTISRDNAKNTVYLQMNSLKPEDTAVYYCAAQVYKRRRYVYWGQGTQVTVSS

SEQ ID NO: 3539 - protein, 118 aa, Artificial Sequence
  Chemically Synthesized
QVQLQESGGGLVQAGGSLRLSCAASGTIFLPSRMGWYRQAPGKEREFVATIAWGTNTYYADSVKGRFTISRDNAKNTVYLQMNSLKPEDTAVYYCAAARKRGYDHGYWGQGTQVTVSS

SEQ ID NO: 3540 - protein, 122 aa, Artificial Sequence
  Chemically Synthesized
QVQLQESGGGLVQAGGSLRLSCAASGNIFWFGQMGWYRQAPGKERELVAAIAYGANTNYADSVKGRFTISRDNAKNTVYLQMNSLKPEDTAVYYCAVARYRPYHPYTSYRYWGQGTQVTVSS

SEQ ID NO: 3541 - protein, 126 aa, Artificial Sequence
  Chemically Synthesized
QVQLQESGGGLVQAGGSLRLSCAASGNISPQGSMGWYRQAPGKERELVAAISVGTSTYYADSVKGRFTISRDNAKNTVYLQMNSLKPEDTAVYYCAVSDPVYATTRFWRRWYHYYWGQGTQVTVSS

SEQ ID NO: 3542 - protein, 122 aa, Artificial Sequence
  Chemically Synthesized
QVQLQESGGGLVQAGGSLRLSCAASGNIFWVRAMGWYRQAPGKERELVAAIGRGGNTNYADSVKGRFTISRDNAKNTVYLQMNSLKPEDTAVYYCAAYRKGWSATSNPYLYWGQGTQVTVSS

SEQ ID NO: 3543 - protein, 114 aa, Artificial Sequence
  Chemically Synthesized
QVQLQESGGGLVQAGGSLRLSCAASGTISLRWFMGWYRQAPGKEREFVAGISYGGNTYYADSVKGRFTISRDNAKNTVYLQMNSLKPEDTAVYYCAVGYRHRYWGQGTQVTVSS

SEQ ID NO: 3544 - protein, 118 aa, Artificial Sequence
  Chemically Synthesized
QVQLQESGGGLVQAGGSLRLSCAASGTIFLYYAMGWYRQAPGKERELVAAINWGTSTYYADSVKGRFTISRDNAKNTVYLQMNSLKPEDTAVYYCAVYRRYTVKHPYWGQGTQVTVSS

SEQ ID NO: 3545 - protein, 118 aa, Artificial Sequence
  Chemically Synthesized
QVQLQESGGGLVQAGGSLRLSCAASGSIFNWLKMGWYRQAPGKERELVASITWGGTTNYADSVKGRFTISRDNAKNTVYLQMNSLKPEDTAVYYCAARHLINHYHQYWGQGTQVTVSS

SEQ ID NO: 3546 - protein, 118 aa, Artificial Sequence
  Chemically Synthesized
QVQLQESGGGLVQAGGSLRLSCAASGNISRWRAMGWYRQAPGKEREFVAAITAGGTTNYADSVKGRFTISRDNAKNTVYLQMNSLKPEDTAVYYCAVRGRRYAYYPYWGQGTQVTVSS

SEQ ID NO: 3547 - protein, 118 aa, Artificial Sequence
  Chemically Synthesized
QVQLQESGGGLVQAGGSLRLSCAASGTIFHYRGMGWYRQAPGKEREFVAGISYGATTNYADSVKGRFTISRDNAKNTVYLQMNSLKPEDTAVYYCAVRLFRHRGFLYWGQGTQVTVSS

SEQ ID NO: 3548 - protein, 118 aa, Artificial Sequence
  Chemically Synthesized
QVQLQESGGGLVQAGGSLRLSCAASGYISPWGRMGWYRQAPGKERELVAGISGGSNTNYADSVKGRFTISRDNAKNTVYLQMNSLKPEDTAVYYCAARRWGYRFHSYWGQGTQVTVSS

SEQ ID NO: 3549 - protein, 122 aa, Artificial Sequence
  Chemically Synthesized
QVQLQESGGGLVQAGGSLRLSCAASGYISRRNYMGWYRQAPGKERELVASIDSGASTYYADSVKGRFTISRDNAKNTVYLQMNSLKPEDTAVYYCAVSYRFRTSYGTDHYYWGQGTQVTVSS

SEQ ID NO: 3550 - protein, 118 aa, Artificial Sequence
  Chemically Synthesized
QVQLQESGGGLVQAGGSLRLSCAASGNIFWSYIMGWYRQAPGKERELVAAIARGGNTYYADSVKGRFTISRDNAKNTVYLQMNSLKPEDTAVYYCAVPYGTRRHYWYWGQGTQVTVSS

SEQ ID NO: 3551 - protein, 122 aa, Artificial Sequence
  Chemically Synthesized
QVQLQESGGGLVQAGGSLRLSCAASGYISRKYVMGWYRQAPGKEREFVAAISIGGSTYYADSVKGRFTISRDNAKNTVYLQMNSLKPEDTAVYYCAAAYRHRGPRGYPYGYWGQGTQVTVSS

SEQ ID NO: 3552 - protein, 122 aa, Artificial Sequence
  Chemically Synthesized
QVQLQESGGGLVQAGGSLRLSCAASGSISRRSRMGWYRQAPGKEREFVASISFGTITYYADSVKGRFTISRDNAKNTVYLQMNSLKPEDTAVYYCAVREYYNYSYAKRFVYWGQGTQVTVSS

SEQ ID NO: 3553 - protein, 122 aa, Artificial Sequence
  Chemically Synthesized
QVQLQESGGGLVQAGGSLRLSCAASGTISSSDEMGWYRQAPGKEREFVAAIDLGANTNYADSVKGRFTISRDNAKNTVYLQMNSLKPEDTAVYYCAADPVYDNSGRVGYWYWGQGTQVTVSS

SEQ ID NO: 3554 - protein, 115 aa, Artificial Sequence
  Chemically Synthesized
QVQLQESGGGLVQAGGSLRLSCAASGYIFWYRYMGWYRQAPGKERELVATIDPGANTNYADSVKGRFTISRDNAKNTVYLQMNSLKPEDTAVYYCAVSRRWHGYWGQGTQVTVSS

SEQ ID NO: 3555 - protein, 122 aa, Artificial Sequence
  Chemically Synthesized
QVQLQESGGGLVQAGGSLRLSCAASGSISWRYSMGWYRQAPGKERELVASIGIGTNTYYADSVKGRFTISRDNAKNTVYLQMNSLKPEDTAVYYCAARRRGYPYYYRQLTYWGQGTQVTVSS

SEQ ID NO: 3556 - protein, 118 aa, Artificial Sequence
  Chemically Synthesized
QVQLQESGGGLVQAGGSLRLSCAASGNISSTRSMGWYRQAPGKERELVAAIAYGAITYYADSVKGRFTISRDNAKNTVYLQMNSLKPEDTAVYYCAVYWRWRLGHGYWGQGTQVTVSS

SEQ ID NO: 3557 - protein, 118 aa, Artificial Sequence
  Chemically Synthesized
QVQLQESGGGLVQAGGSLRLSCAASGYISDRYTMGWYRQAPGKERELVASISYGSNTNYADSVKGRFTISRDNAKNTVYLQMNSLKPEDTAVYYCAAVRDPVRYHSYWGQGTQVTVSS

SEQ ID NO: 3558 - protein, 122 aa, Artificial Sequence
  Chemically Synthesized
QVQLQESGGGLVQAGGSLRLSCAASGSISWYRYMGWYRQAPGKEREFVAAIGYGGNTYYADSVKGRFTISRDNAKNTVYLQMNSLKPEDTAVYYCAVGKWDRYSRYPYYNYWGQGTQVTVSS

SEQ ID NO: 3559 - protein, 126 aa, Artificial Sequence
  Chemically Synthesized
QVQLQESGGGLVQAGGSLRLSCAASGNIFPLGTMGWYRQAPGKERELVATIAYGAITYYADSVKGRFTISRDNAKNTVYLQMNSLKPEDTAVYYCAAGLYLYGYPLDVYLPTFRYWGQGTQVTVSS

SEQ ID NO: 3560 - protein, 126 aa, Artificial Sequence
  Chemically Synthesized
QVQLQESGGGLVQAGGSLRLSCAASGYIFVPFAMGWYRQAPGKEREFVAAIGIGTSTNYADSVKGRFTISRDNAKNTVYLQMNSLKPEDTAVYYCAVYYVGYYYEIIDYGDYHWYWGQGTQVTVSS

SEQ ID NO: 3561 - protein, 124 aa, Artificial Sequence
  Chemically Synthesized
QVQLQESGGGLVQAGGSLRLSCAASGSISTPVMGWYRQAPGKERELVASIGWGATTNYADSVKGRFTISRDNAKNTVYLQMNSLKPEDTAVYYCAVGSTTTVLLLVLTSRVFYWGQGTQVTVSS

SEQ ID NO: 3562 - protein, 126 aa, Artificial Sequence
  Chemically Synthesized
QVQLQESGGGLVQAGGSLRLSCAASGTIFTRPYMGWYRQAPGKERELVAGIANGGTTYYADSVKGRFTISRDNAKNTVYLQMNSLKPEDTAVYYCAAYKRWTYILYFQRDAPFRYWGQGTQVTVSS

SEQ ID NO: 3563 - protein, 118 aa, Artificial Sequence
  Chemically Synthesized
QVQLQESGGGLVQAGGSLRLSCAASGNISDDDDMGWYRQAPGKEREFVATIGVGSSTYYADSVKGRFTISRDNAKNTVYLQMNSLKPEDTAVYYCAAEGLTGGYFDYWGQGTQVTVSS

SEQ ID NO: 3564 - protein, 115 aa, Artificial Sequence
  Chemically Synthesized
QVQLQESGGGLVQAGGSLRLSCAASGYISQRRIMGWYRQAPGKEREFVAAIDLGGSTNYADSVKGRFTISRDNAKNTVYLQMNSLKPEDTAVYYCAVSKWRHPYWGQGTQVTVSS

SEQ ID NO: 3565 - protein, 119 aa, Artificial Sequence
  Chemically Synthesized
QVQLQESGGGLVQAGGSLRLSCAASGYISDESYMGWYRQAPGKEREFVAAITSWYYYQYADSVKGRFTISRDNAKNTVYLQMNSLKPEDTAVYYCAVGYTYYDDEHDYWGQGTQVTVSS

SEQ ID NO: 3566 - protein, 118 aa, Artificial Sequence
  Chemically Synthesized
QVQLQESGGGLVQAGGSLRLSCAASGSIFARGAMGWYRQAPGKERELVATINSGGITYYADSVKGRFTISRDNAKNTVYLQMNSLKPEDTAVYYCAVSRWKYYRFPYWGQGTQVTVSS

SEQ ID NO: 3567 - protein, 122 aa, Artificial Sequence
  Chemically Synthesized
QVQLQESGGGLVQAGGSLRLSCAASGTISRYRYMGWYRQAPGKEREFVAAINTGANTNYADSVKGRFTISRDNAKNTVYLQMNSLKPEDTAVYYCAVQWWSYTQQTRRLSYWGQGTQVTVSS

SEQ ID NO: 3568 - protein, 121 aa, Artificial Sequence
  Chemically Synthesized
QVQLQESGGGLVQAGGSLRLSCAASGTISGDPMGWYRQAPGKEREFVAGITYGASTNYADSVKGRFTISRDNAKNTVYLQMNSLKPEDTAVYYCAVAGGGAYYGSVTYYYWGQGTQVTVSS

SEQ ID NO: 3569 - protein, 118 aa, Artificial Sequence
  Chemically Synthesized
QVQLQESGGGLVQAGGSLRLSCAASGYISQWDPMGWYRQAPGKERELVAAIAPGSNTYYADSVKGRFTISRDNAKNTVYLQMNSLKPEDTAVYYCAAAHYGRRNHRYWGQGTQVTVSS

SEQ ID NO: 3570 - protein, 122 aa, Artificial Sequence
  Chemically Synthesized
QVQLQESGGGLVQAGGSLRLSCAASGTIFRPVFMGWYRQAPGKERELVAAIGTGANTYYADSVKGRFTISRDNAKNTVYLQMNSLKPEDTAVYYCAAGPRFNYHQNRYYRYWGQGTQVTVSS

SEQ ID NO: 3571 - protein, 118 aa, Artificial Sequence
  Chemically Synthesized
QVQLQESGGGLVQAGGSLRLSCAASGSIFRYRYMGWYRQAPGKERELVAGINRGGNTYYADSVKGRFTISRDNAKNTVYLQMNSLKPEDTAVYYCAAVRRVYPRYYYWGQGTQVTVSS

SEQ ID NO: 3572 - protein, 118 aa, Artificial Sequence
  Chemically Synthesized
QVQLQESGGGLVQAGGSLRLSCAASGSIFRSTYMGWYRQAPGKEREFVATIGFGSNTYYADSVKGRFTISRDNAKNTVYLQMNSLKPEDTAVYYCAVIRGRQARHVYWGQGTQVTVSS

SEQ ID NO: 3573 - protein, 126 aa, Artificial Sequence
  Chemically Synthesized
QVQLQESGGGLVQAGGSLRLSCAASGNISFYVLMGWYRQAPGKERELVAAINDGGNTYYADSVKGRFTISRDNAKNTVYLQMNSLKPEDTAVYYCAVYQRYYRINFGLYSPNHSYWGQGTQVTVSS

SEQ ID NO: 3574 - protein, 122 aa, Artificial Sequence
  Chemically Synthesized
QVQLQESGGGLVQAGGSLRLSCAASGNIFYYSRMGWYRQAPGKEREFVATIGRGGTTNYADSVKGRFTISRDNAKNTVYLQMNSLKPEDTAVYYCAVGTFRRPGSPDRHRYWGQGTQVTVSS

SEQ ID NO: 3575 - protein, 118 aa, Artificial Sequence
  Chemically Synthesized
QVQLQESGGGLVQAGGSLRLSCAASGYISRVRYMGWYRQAPGKERELVASIGDGTTTYYADSVKGRFTISRDNAKNTVYLQMNSLKPEDTAVYYCAAYRHGADDHVYWGQGTQVTVSS

SEQ ID NO: 3576 - protein, 118 aa, Artificial Sequence
  Chemically Synthesized
QVQLQESGGGLVQAGGSLRLSCAASGNIFDIGAMGWYRQAPGKERELVAGIGIGASTYYADSVKGRFTISRDNAKNTVYLQMNSLKPEDTAVYYCAAYLRTVGPHYYWGQGTQVTVSS

SEQ ID NO: 3577 - protein, 122 aa, Artificial Sequence
  Chemically Synthesized
QVQLQESGGGLVQAGGSLRLSCAASGSIFALRRMGWYRQAPGKEREFVAAITRGGSTNYADSVKGRFTISRDNAKNTVYLQMNSLKPEDTAVYYCAVNSPYYVTYRWYHIYWGQGTQVTVSS

SEQ ID NO: 3578 - protein, 118 aa, Artificial Sequence
  Chemically Synthesized
QVQLQESGGGLVQAGGSLRLSCAASGSISYVRTMGWYRQAPGKERELVAAINRGSNTNYADSVKGRFTISRDNAKNTVYLQMNSLKPEDTAVYYCAVLYYNGWRYPYWGQGTQVTVSS

SEQ ID NO: 3579 - protein, 126 aa, Artificial Sequence
  Chemically Synthesized
QVQLQESGGGLVQAGGSLRLSCAASGYISLARRMGWYRQAPGKERELVAGITLGGNTNYADSVKGRFTISRDNAKNTVYLQMNSLKPEDTAVYYCAVSRYVRSYYPSSGGRYHVYWGQGTQVTVSS

SEQ ID NO: 3580 - protein, 122 aa, Artificial Sequence
  Chemically Synthesized
QVQLQESGGGLVQAGGSLRLSCAASGYISSRDVMGWYRQAPGKERELVATINWGGITYYADSVKGRFTISRDNAKNTVYLQMNSLKPEDTAVYYCAVRSHYYYYRNWYHRYWGQGTQVTVSS

SEQ ID NO: 3581 - protein, 118 aa, Artificial Sequence
  Chemically Synthesized
QVQLQESGGGLVQAGGSLRLSCAASGYIFWVRAMGWYRQAPGKEREFVAGIGLGGTTNYADSVKGRFTISRDNAKNTVYLQMNSLKPEDTAVYYCAALFPYSRQHKYWGQGTQVTVSS

SEQ ID NO: 3582 - protein, 118 aa, Artificial Sequence
  Chemically Synthesized
QVQLQESGGGLVQAGGSLRLSCAASGTIFSRPGMGWYRQAPGKEREFVAAITPGSNTNYADSVKGRFTISRDNAKNTVYLQMNSLKPEDTAVYYCAAHRRSPYQHRYWGQGTQVTVSS

SEQ ID NO: 3583 - protein, 118 aa, Artificial Sequence
  Chemically Synthesized
QVQLQESGGGLVQAGGSLRLSCAASGYISVTYLMGWYRQAPGKEREFVAAIADGGTTYYADSVKGRFTISRDNAKNTVYLQMNSLKPEDTAVYYCAAGYTLSWAFLYWGQGTQVTVSS

SEQ ID NO: 3584 - protein, 122 aa, Artificial Sequence
  Chemically Synthesized
QVQLQESGGGLVQAGGSLRLSCAASGTISRYNPMGWYRQAPGKERELVAGIGWGGITYYADSVKGRFTISRDNAKNTVYLQMNSLKPEDTAVYYCAAYYVRYYFTSDRHLYWGQGTQVTVSS

SEQ ID NO: 3585 - protein, 118 aa, Artificial Sequence
  Chemically Synthesized
QVQLQESGGGLVQAGGSLRLSCAASGTIFWGHYMGWYRQAPGKERELVAAITWGTNTYYADSVKGRFTISRDNAKNTVYLQMNSLKPEDTAVYYCAAYFVRRSWHRYWGQGTQVTVSS

SEQ ID NO: 3586 - protein, 118 aa, Artificial Sequence
  Chemically Synthesized
QVQLQESGGGLVQAGGSLRLSCAASGTISARVYMGWYRQAPGKEREFVAAISNGTITYYADSVKGRFTISRDNAKNTVYLQMNSLKPEDTAVYYCAVAVYNIFDYDYWGQGTQVTVSS

SEQ ID NO: 3587 - protein, 118 aa, Artificial Sequence
  Chemically Synthesized
QVQLQESGGGLVQAGGSLRLSCAASGNISWWRPMGWYRQAPGKERELVAAIGWGTTTYYADSVKGRFTISRDNAKNTVYLQMNSLKPEDTAVYYCAVRSTRRDSHVYWGQGTQVTVSS

SEQ ID NO: 3588 - protein, 118 aa, Artificial Sequence
  Chemically Synthesized
QVQLQESGGGLVQAGGSLRLSCAASGTIFKPPYMGWYRQAPGKEREFVATINYGGSTYYADSVKGRFTISRDNAKNTVYLQMNSLKPEDTAVYYCAARRYYYRQYYYWGQGTQVTVSS

SEQ ID NO: 3589 - protein, 122 aa, Artificial Sequence
  Chemically Synthesized
QVQLQESGGGLVQAGGSLRLSCAASGTISPRRPMGWYRQAPGKERELVAGITAGGITYYADSVKGRFTISRDNAKNTVYLQMNSLKPEDTAVYYCAAFWKWKSYIYQQYGYWGQGTQVTVSS

SEQ ID NO: 3590 - protein, 118 aa, Artificial Sequence
  Chemically Synthesized
QVQLQESGGGLVQAGGSLRLSCAASGYISYWSIMGWYRQAPGKERELVAGITSGANTYYADSVKGRFTISRDNAKNTVYLQMNSLKPEDTAVYYCAVVRRQSKRYYYWGQGTQVTVSS

SEQ ID NO: 3591 - protein, 122 aa, Artificial Sequence
  Chemically Synthesized
QVQLQESGGGLVQAGGSLRLSCAASGTISRRYYMGWYRQAPGKERELVATISIGANTNYADSVKGRFTISRDNAKNTVYLQMNSLKPEDTAVYYCAVRYGYWGYRPRLYNYWGQGTQVTVSS

SEQ ID NO: 3592 - protein, 116 aa, Artificial Sequence
  Chemically Synthesized
QVQLQESGGGLVQAGGSLRLSCAASGTISYWVFMGWYRQAPGKERELVAAITYGATTYYADSVKGRFTISRDNAKNTVYLQMNSLKPEDTAVYYCAAALRYDYDYWGQGTQVTVSS

SEQ ID NO: 3593 - protein, 118 aa, Artificial Sequence
  Chemically Synthesized
QVQLQESGGGLVQAGGSLRLSCAASGTIFVHGRMGWYRQAPGKEREFVAGIGSGSNTNYADSVKGRFTISRDNAKNTVYLQMNSLKPEDTAVYYCAAFRRVWRAFAYWGQGTQVTVSS

SEQ ID NO: 3594 - protein, 118 aa, Artificial Sequence
  Chemically Synthesized
QVQLQESGGGLVQAGGSLRLSCAASGSIFYGRAMGWYRQAPGKERELVAGINYGGSTYYADSVKGRFTISRDNAKNTVYLQMNSLKPEDTAVYYCAAPRTWWSRYTYWGQGTQVTVSS

SEQ ID NO: 3595 - protein, 122 aa, Artificial Sequence
  Chemically Synthesized
QVQLQESGGGLVQAGGSLRLSCAASGNISYPTQMGWYRQAPGKEREFVASIARGTTTNYADSVKGRFTISRDNAKNTVYLQMNSLKPEDTAVYYCAADYAYYVYPWADFDYWGQGTQVTVSS

SEQ ID NO: 3596 - protein, 118 aa, Artificial Sequence
  Chemically Synthesized
QVQLQESGGGLVQAGGSLRLSCAASGYIFQGIFMGWYRQAPGKERELVASIGFGSITYYADSVKGRFTISRDNAKNTVYLQMNSLKPEDTAVYYCAVHAALWPYYDYWGQGTQVTVSS

SEQ ID NO: 3597 - protein, 118 aa, Artificial Sequence
  Chemically Synthesized
QVQLQESGGGLVQAGGSLRLSCAASGSISDYTYMGWYRQAPGKERELVASINVGANTYYADSVKGRFTISRDNAKNTVYLQMNSLKPEDTAVYYCAAHETSDQYFIYWGQGTQVTVSS

SEQ ID NO: 3598 - protein, 122 aa, Artificial Sequence
  Chemically Synthesized
QVQLQESGGGLVQAGGSLRLSCAASGTISRRELMGWYRQAPGKERELVAGIGAGGNTYYADSVKGRFTISRDNAKNTVYLQMNSLKPEDTAVYYCAVWPRRPTGGARRHNYWGQGTQVTVSS

SEQ ID NO: 3599 - protein, 126 aa, Artificial Sequence
  Chemically Synthesized
QVQLQESGGGLVQAGGSLRLSCAASGTISDGDTMGWYRQAPGKERELVATIGYGGSTYYADSVKGRFTISRDNAKNTVYLQMNSLKPEDTAVYYCAVYRWLGRIWTYRRPEVLIYWGQGTQVTVSS

SEQ ID NO: 3600 - protein, 122 aa, Artificial Sequence
  Chemically Synthesized
QVQLQESGGGLVQAGGSLRLSCAASGYIFYLNLMGWYRQAPGKERELVAGIGVGGNTNYADSVKGRFTISRDNAKNTVYLQMNSLKPEDTAVYYCAANESKYDYFQIYYNYWGQGTQVTVSS

SEQ ID NO: 3601 - protein, 122 aa, Artificial Sequence
  Chemically Synthesized
QVQLQESGGGLVQAGGSLRLSCAASGNIFRRAYMGWYRQAPGKEREFVASIAFGSNTYYADSVKGRFTISRDNAKNTVYLQMNSLKPEDTAVYYCAVKTARWPWRYESHEYWGQGTQVTVSS

SEQ ID NO: 3602 - protein, 122 aa, Artificial Sequence
  Chemically Synthesized
QVQLQESGGGLVQAGGSLRLSCAASGTIFNRSTMGWYRQAPGKERELVAAINAGASTYYADSVKGRFTISRDNAKNTVYLQMNSLKPEDTAVYYCAAGRVPYRYRYSYHAYWGQGTQVTVSS

SEQ ID NO: 3603 - protein, 118 aa, Artificial Sequence
  Chemically Synthesized
QVQLQESGGGLVQAGGSLRLSCAASGTIFGRRIMGWYRQAPGKEREFVAAIASGGNTYYADSVKGRFTISRDNAKNTVYLQMNSLKPEDTAVYYCAAGTIFGTRHHYWGQGTQVTVSS

SEQ ID NO: 3604 - protein, 118 aa, Artificial Sequence
  Chemically Synthesized
QVQLQESGGGLVQAGGSLRLSCAASGTISPYYKMGWYRQAPGKEREFVAGITRGGNTYYADSVKGRFTISRDNAKNTVYLQMNSLKPEDTAVYYCAVRRRAYLYHYYWGQGTQVTVSS

SEQ ID NO: 3605 - protein, 118 aa, Artificial Sequence
  Chemically Synthesized
QVQLQESGGGLVQAGGSLRLSCAASGNISSYVWMGWYRQAPGKERELVAAIDYGGSTNYADSVKGRFTISRDNAKNTVYLQMNSLKPEDTAVYYCAVSYNVYRSLSYWGQGTQVTVSS

SEQ ID NO: 3606 - protein, 118 aa, Artificial Sequence
  Chemically Synthesized
QVQLQESGGGLVQAGGSLRLSCAASGYISYRGYMGWYRQAPGKERELVAAITYGATTNYADSVKGRFTISRDNAKNTVYLQMNSLKPEDTAVYYCAVYSRRRYAYGYWGQGTQVTVSS

SEQ ID NO: 3607 - protein, 120 aa, Artificial Sequence
  Chemically Synthesized
QVQLQESGGGLVQAGGSLRLSCAASGYIFARQGMGWYRQAPGKERELVATIGWGATYADSVKGRFTISRDNAKNTVYLQMNSLKPEDTAVYYCAADRVGYGADAKYHHYWGQGTQVTVSS

SEQ ID NO: 3608 - protein, 126 aa, Artificial Sequence
  Chemically Synthesized
QVQLQESGGGLVQAGGSLRLSCAASGSISRRTGMGWYRQAPGKERELVAGIAQGGNTNYADSVKGRFTISRDNAKNTVYLQMNSLKPEDTAVYYCAVWSTYFYYWYRYPRYAHLYWGQGTQVTVSS

SEQ ID NO: 3609 - protein, 118 aa, Artificial Sequence
  Chemically Synthesized
QVQLQESGGGLVQAGGSLRLSCAASGNIFYYAVMGWYRQAPGKERELVAAIGQGTSTYYADSVKGRFTISRDNAKNTVYLQMNSLKPEDTAVYYCAVRRYYRWDYYYWGQGTQVTVSS

SEQ ID NO: 3610 - protein, 118 aa, Artificial Sequence
  Chemically Synthesized
QVQLQESGGGLVQAGGSLRLSCAASGSIFRPKDMGWYRQAPGKEREFVAGISLGANTYYADSVKGRFTISRDNAKNTVYLQMNSLKPEDTAVYYCAVVYRFHRGYAYWGQGTQVTVSS

SEQ ID NO: 3611 - protein, 118 aa, Artificial Sequence
  Chemically Synthesized
QVQLQESGGGLVQAGGSLRLSCAASGTIFYYRFMGWYRQAPGKERELVAAISGGSSTYYADSVKGRFTISRDNAKNTVYLQMNSLKPEDTAVYYCAVKTWYTRWLRYWGQGTQVTVSS

SEQ ID NO: 3612 - protein, 118 aa, Artificial Sequence
  Chemically Synthesized
QVQLQESGGGLVQAGGSLRLSCAASGYISRYAYMGWYRQAPGKEREFVAGISSGGSTNYADSVKGRFTISRDNAKNTVYLQMNSLKPEDTAVYYCAVIRYYRWRFTYWGQGTQVTVSS

SEQ ID NO: 3613 - protein, 126 aa, Artificial Sequence
  Chemically Synthesized
QVQLQESGGGLVQAGGSLRLSCAASGTIFRVRVMGWYRQAPGKEREFVATIGPGTITYYADSVKGRFTISRDNAKNTVYLQMNSLKPEDTAVYYCAVGVRRADHTGRPRNRVFIYWGQGTQVTVSS

SEQ ID NO: 3614 - protein, 122 aa, Artificial Sequence
  Chemically Synthesized
QVQLQESGGGLVQAGGSLRLSCAASGSISRAGGMGWYRQAPGKEREFVAAINTGSSTYYADSVKGRFTISRDNAKNTVYLQMNSLKPEDTAVYYCAAKRRVAYHFYTHYHYWGQGTQVTVSS

SEQ ID NO: 3615 - protein, 118 aa, Artificial Sequence
  Chemically Synthesized
QVQLQESGGGLVQAGGSLRLSCAASGNIFGLAKMGWYRQAPGKEREFVATIAVGAITNYADSVKGRFTISRDNAKNTVYLQMNSLKPEDTAVYYCAVNDYYTYTFWYWGQGTQVTVSS

SEQ ID NO: 3616 - protein, 118 aa, Artificial Sequence
  Chemically Synthesized
QVQLQESGGGLVQAGGSLRLSCAASGNIFSPAYMGWYRQAPGKERELVAGIGRGANTNYADSVKGRFTISRDNAKNTVYLQMNSLKPEDTAVYYCAVYRWYGYGFIYWGQGTQVTVSS

SEQ ID NO: 3617 - protein, 118 aa, Artificial Sequence
  Chemically Synthesized
QVQLQESGGGLVQAGGSLRLSCAASGTISYWRRMGWYRQAPGKERELVAAIGKGGITNYADSVKGRFTISRDNAKNTVYLQMNSLKPEDTAVYYCAAPLRVIPYFIYWGQGTQVTVSS

SEQ ID NO: 3618 - protein, 118 aa, Artificial Sequence
  Chemically Synthesized
QVQLQESGGGLVQAGGSLRLSCAASGTIFATNSMGWYRQAPGKERELVATIGGGGTTNYADSVKGRFTISRDNAKNTVYLQMNSLKPEDTAVYYCAVSYGDDHLLPYWGQGTQVTVSS

SEQ ID NO: 3619 - protein, 122 aa, Artificial Sequence
  Chemically Synthesized
QVQLQESGGGLVQAGGSLRLSCAASGTISGTTVMGWYRQAPGKERELVAAINYGSNTYYADSVKGRFTISRDNAKNTVYLQMNSLKPEDTAVYYCAAYTYVQGRGSGRLLYWGQGTQVTVSS

SEQ ID NO: 3620 - protein, 126 aa, Artificial Sequence
  Chemically Synthesized
QVQLQESGGGLVQAGGSLRLSCAASGTIFQYDVMGWYRQAPGKERELVAGIDYGTSTNYADSVKGRFTISRDNAKNTVYLQMNSLKPEDTAVYYCAAYYVQGADGNDYYWSIHRYWGQGTQVTVSS

SEQ ID NO: 3621 - protein, 118 aa, Artificial Sequence
  Chemically Synthesized
QVQLQESGGGLVQAGGSLRLSCAASGYISYRPTMGWYRQAPGKERELVAAIGLGGNTYYADSVKGRFTISRDNAKNTVYLQMNSLKPEDTAVYYCAVRWHPYYHHRYWGQGTQVTVSS

SEQ ID NO: 3622 - protein, 120 aa, Artificial Sequence
  Chemically Synthesized
QVQLQESGGGLVQAGGSLRLSCAASGTISYRSYMGWYRQAPGKEREFVASIGIGSITYYADSVKGRFTISRDNAKNTVYLQMNSLKPEDTAVYYCAVTRFGTDRRKHRYWGQGTQVTVSS

SEQ ID NO: 3623 - protein, 126 aa, Artificial Sequence
  Chemically Synthesized
QVQLQESGGGLVQAGGSLRLSCAASGTIFDLHDMGWYRQAPGKEREFVASIADGASTYYADSVKGRFTISRDNAKNTVYLQMNSLKPEDTAVYYCAVVAGDPFWQAVLGGLLHGYWGQGTQVTVSS

SEQ ID NO: 3624 - protein, 121 aa, Artificial Sequence
  Chemically Synthesized
QVQLQESGGGLVQAGGSLRLSCAASGYISYSRTMGWYRQAPGKEREFVASITYGGSTYYADSVKGRFTISRDNAKNTVYLQMNSLKPEDTAVYYCAADYWRATNTSLTLYWGQGTQVTVSS

SEQ ID NO: 3625 - protein, 122 aa, Artificial Sequence
  Chemically Synthesized
QVQLQESGGGLVQAGGSLRLSCAASGTIFTHPAMGWYRQAPGKEREFVAGIGGGGSTYYADSVKGRFTISRDNAKNTVYLQMNSLKPEDTAVYYCAAYVVITAHTDYYHGYWGQGTQVTVSS

SEQ ID NO: 3626 - protein, 121 aa, Artificial Sequence
  Chemically Synthesized
QVQLQESGGGLVQAGGSLRLSCAASGNIFVGHDMGWYRQAPGKEREFVAGISYGTTTNYADSVKGRFTISRDNAKNTVYLQMNSLKPEDTAVYYCAVHRYLLGHAYPYSYWGQGTQVTVSS

SEQ ID NO: 3627 - protein, 122 aa, Artificial Sequence
  Chemically Synthesized
QVQLQESGGGLVQAGGSLRLSCAASGNISGDYHMGWYRQAPGKEREFVAAITKGGSTYYADSVKGRFTISRDNAKNTVYLQMNSLKPEDTAVYYCAVTLLLVYLDDTWLVYWGQGTQVTVSS

SEQ ID NO: 3628 - protein, 125 aa, Artificial Sequence
  Chemically Synthesized
QVQLQESGGGLVQAGGSLRLSCAASGTISHYELMGWYRQAPGKEREFVAGITVGTITNYADSVKGRFTISRDNAKNTVYLQMNSLKPEDTAVYYCAASVLTSTGITWTSLPLCYWGQGTQVTVSS

SEQ ID NO: 3629 - protein, 117 aa, Artificial Sequence
  Chemically Synthesized
QVQLQESGGGLVQAGGSLRLSCAASGYISGQYPMGWYRQAPGKERELVAGIADGGNTYYADSVKGRFTISRDNAKNTVYLQMNSLKPEDTAVYYCAVNAASTRTMYWGQGTQVTVSS

SEQ ID NO: 3630 - protein, 117 aa, Artificial Sequence
  Chemically Synthesized
QVQLQESGGGLVQAGGSLRLSCAASGYISVIAGMGWYRQAPGKEREFVASIDFGGTTNYADSVKGRFTISRDNAKNTVYLQMNSLKPEDTAVYYCAAHDSTLNTLYWGQGTQVTVSS

SEQ ID NO: 3631 - protein, 116 aa, Artificial Sequence
  Chemically Synthesized
QVQLQESGGGLVQAGGSLRLSCAASGTIFVLTMGWYRQAPGKERELVATIDQGGNTNYADSVKGRFTISRDNAKNTVYLQMNSLKPEDTAVYYCAVYRYQSYLVYWGQGTQVTVSS

SEQ ID NO: 3632 - protein, 122 aa, Artificial Sequence
  Chemically Synthesized
QVQLQESGGGLVQAGGSLRLSCAASGTISYDSVMGWYRQAPGKEREFVAAIDRGASTNYADSVKGRFTISRDNAKNTVYLQMNSLKPEDTAVYYCAAAQANYNTGYRYHAYWGQGTQVTVSS

SEQ ID NO: 3633 - protein, 122 aa, Artificial Sequence
  Chemically Synthesized
QVQLQESGGGLVQAGGSLRLSCAASGYISYWGAMGWYRQAPGKERELVATIATGGSTNYADSVKGRFTISRDNAKNTVYLQMNSLKPEDTAVYYCAAWYLLVGTSHYIYWYWGQGTQVTVSS

SEQ ID NO: 3634 - protein, 114 aa, Artificial Sequence
  Chemically Synthesized
QVQLQESGGGLVQAGGSLRLSCAASGYIFFFKYMGWYRQAPGKERELVAAIANGASTYYADSVKGRFTISRDNAKNTVYLQMNSLKPEDTAVYYCAVAPPLRYWGQGTQVTVSS

SEQ ID NO: 3635 - protein, 118 aa, Artificial Sequence
  Chemically Synthesized
QVQLQESGGGLVQAGGSLRLSCAASGSISRPDVMGWYRQAPGKEREFVAAIAGGATTNYADSVKGRFTISRDNAKNTVYLQMNSLKPEDTAVYYCAVLQYVYQHYIYWGQGTQVTVSS

SEQ ID NO: 3636 - protein, 122 aa, Artificial Sequence
  Chemically Synthesized
QVQLQESGGGLVQAGGSLRLSCAASGNISYVPDMGWYRQAPGKEREFVASIGYGGITYYADSVKGRFTISRDNAKNTVYLQMNSLKPEDTAVYYCAVGVYIDLDDQSAHLYWGQGTQVTVSS

SEQ ID NO: 3637 - protein, 121 aa, Artificial Sequence
  Chemically Synthesized
QVQLQESGGGLVQAGGSLRLSCAASGSIFITVYMGWYRQAPGKERELVASITKVVLPYADSVKGRFTISRDNAKNTVYLQMNSLKPEDTAVYYCAAWDNAYTDTWRVFGYWGQGTQVTVSS

SEQ ID NO: 3638 - protein, 122 aa, Artificial Sequence
  Chemically Synthesized
QVQLQESGGGLVQAGGSLRLSCAASGYISRTLFMGWYRQAPGKERELVASIDEGATTNYADSVKGRFTISRDNAKNTVYLQMNSLKPEDTAVYYCAALIVWYANRDVIHGYWGQGTQVTVSS

SEQ ID NO: 3639 - protein, 126 aa, Artificial Sequence
  Chemically Synthesized
QVQLQESGGGLVQAGGSLRLSCAASGNISLVYVMGWYRQAPGKEREFVAAIANGTNTNYADSVKGRFTISRDNAKNTVYLQMNSLKPEDTAVYYCAVVDWDDPYALGVSGRYHYYWGQGTQVTVSS

SEQ ID NO: 3640 - protein, 118 aa, Artificial Sequence
  Chemically Synthesized
QVQLQESGGGLVQAGGSLRLSCAASGNISPFDVMGWYRQAPGKEREFVAAIGDGGNTNYADSVKGRFTISRDNAKNTVYLQMNSLKPEDTAVYYCAAIDWDRWRYPYWGQGTQVTVSS

SEQ ID NO: 3641 - protein, 118 aa, Artificial Sequence
  Chemically Synthesized
QVQLQESGGGLVQAGGSLRLSCAASGTISYGAWMGWYRQAPGKERELVAAINPGGITYYADSVKGRFTISRDNAKNTVYLQMNSLKPEDTAVYYCAVYDWDRNRLEYWGQGTQVTVSS

SEQ ID NO: 3642 - protein, 122 aa, Artificial Sequence
  Chemically Synthesized
QVQLQESGGGLVQAGGSLRLSCAASGSISASIYMGWYRQAPGKEREFVAAIDYGGITYYADSVKGRFTISRDNAKNTVYLQMNSLKPEDTAVYYCAVLVVATDDHLTIHGYWGQGTQVTVSS

SEQ ID NO: 3643 - protein, 118 aa, Artificial Sequence
  Chemically Synthesized
QVQLQESGGGLVQAGGSLRLSCAASGTISYYHTMGWYRQAPGKEREFVAGINPGANTNYADSVKGRFTISRDNAKNTVYLQMNSLKPEDTAVYYCAVLERRGRYYYYWGQGTQVTVSS

SEQ ID NO: 3644 - protein, 117 aa, Artificial Sequence
  Chemically Synthesized
QVQLQESGGGLVQAGGSLRLSCAASGYIFPALTMGWYRQAPGKEREFVAGIGAGTNTYYADSVKGRFTISRDNAKNTVYLQMNSLKPEDTAVYYCAVSLLDTLYRYWGQGTQVTVSS

SEQ ID NO: 3645 - protein, 122 aa, Artificial Sequence
  Chemically Synthesized
QVQLQESGGGLVQAGGSLRLSCAASGNISAAWTMGWYRQAPGKEREFVAGIAPGANTNYADSVKGRFTISRDNAKNTVYLQMNSLKPEDTAVYYCAAVTVGHPPDYGYYYYWGQGTQVTVSS

SEQ ID NO: 3646 - protein, 117 aa, Artificial Sequence
  Chemically Synthesized
QVQLQESGGGLVQAGGSLRLSCAASGTIFGAVVMGWYRQAPGKEREFVAAITRGGNTNYADSVKGRFTISRDNAKNTVYLQMNSLKPEDTAVYYCAVAQVDVTLGYWGQGTQVTVSS

SEQ ID NO: 3647 - protein, 118 aa, Artificial Sequence
  Chemically Synthesized
QVQLQESGGGLVQAGGSLRLSCAASGTISRARDMGWYRQAPGKERELVASIGYGSSTYYADSVKGRFTISRDNAKNTVYLQMNSLKPEDTAVYYCAAYQLAYLLHKYWGQGTQVTVSS

SEQ ID NO: 3648 - protein, 119 aa, Artificial Sequence
  Chemically Synthesized
QVQLQESGGGLVQAGGSLRLSCAASGNISPGPYMGWYRQAPGKEREFVAAINDGANTYYADSVKGRFTISRDNAKNTVYLQMNSLKPEDTAVYYCAVVDGDAVRHFWYWGQGTQVTVSS

SEQ ID NO: 3649 - protein, 122 aa, Artificial Sequence
  Chemically Synthesized
QVQLQESGGGLVQAGGSLRLSCAASGTISYVAYMGWYRQAPGKERELVATITYGTSTNYADSVKGRFTISRDNAKNTVYLQMNSLKPEDTAVYYCAVQVLWDGYYAYDHYYWGQGTQVTVSS

SEQ ID NO: 3650 - protein, 118 aa, Artificial Sequence
  Chemically Synthesized
QVQLQESGGGLVQAGGSLRLSCAASGTISLAYAMGWYRQAPGKEREFVAGISLGTITNYADSVKGRFTISRDNAKNTVYLQMNSLKPEDTAVYYCAAYGSVDNTYYYWGQGTQVTVSS

SEQ ID NO: 3651 - protein, 118 aa, Artificial Sequence
  Chemically Synthesized
QVQLQESGGGLVQAGGSLRLSCAASGSIFARSTMGWYRQAPGKEREFVAGIDDGGNTYYADSVKGRFTISRDNAKNTVYLQMNSLKPEDTAVYYCAVSYAGLQLYNYWGQGTQVTVSS

SEQ ID NO: 3652 - protein, 117 aa, Artificial Sequence
  Chemically Synthesized
QVQLQESGGGLVQAGGSLRLSCAASGTIFPAGWMGWYRQAPGKERELVASIAAGATTNYADSVKGRFTISRDNAKNTVYLQMNSLKPEDTAVYYCAVYISNVYHGYWGQGTQVTVSS

SEQ ID NO: 3653 - protein, 118 aa, Artificial Sequence
  Chemically Synthesized
QVQLQESGGGLVQAGGSLRLSCAASGSISFGTRMGWYRQAPGKEREFVAGINRGSITYYADSVKGRFTISRDNAKNTVYLQMNSLKPEDTAVYYCAADPPHTIDYYYWGQGTQVTVSS

SEQ ID NO: 3654 - protein, 122 aa, Artificial Sequence
  Chemically Synthesized
QVQLQESGGGLVQAGGSLRLSCAASGTIFGPQSMGWYRQAPGKEREFVATINDGSNTNYADSVKGRFTISRDNAKNTVYLQMNSLKPEDTAVYYCAVDATYDPEDWFGHYYWGQGTQVTVSS

SEQ ID NO: 3655 - protein, 118 aa, Artificial Sequence
  Chemically Synthesized
QVQLQESGGGLVQAGGSLRLSCAASGTISETQSMGWYRQAPGKERELVATIAGGGNTNYADSVKGRFTISRDNAKNTVYLQMNSLKPEDTAVYYCAVGLVITVYHTYWGQGTQVTVSS

SEQ ID NO: 3656 - protein, 118 aa, Artificial Sequence
  Chemically Synthesized
QVQLQESGGGLVQAGGSLRLSCAASGTIFAWTLMGWYRQAPGKERELVATIAIGSTTNYADSVKGRFTISRDNAKNTVYLQMNSLKPEDTAVYYCAVRIVSYRTHNYWGQGTQVTVSS

SEQ ID NO: 3657 - protein, 122 aa, Artificial Sequence
  Chemically Synthesized
QVQLQESGGGLVQAGGSLRLSCAASGSISPSTYMGWYRQAPGKERELVASINDGSNTNYADSVKGRFTISRDNAKNTVYLQMNSLKPEDTAVYYCAAESRKWIEYYRNLEYWGQGTQVTVSS

SEQ ID NO: 3658 - protein, 117 aa, Artificial Sequence
  Chemically Synthesized
QVQLQESGGGLVQAGGSLRLSCAASGTISYQNVMGWYRQAPGKEREFVAAIANYADSVKGRFTISRDNAKNTVYLQMNSLKPEDTAVYYCAVRNAFDYAIGPTHYYWGQGTQVTVSS

SEQ ID NO: 3659 - protein, 117 aa, Artificial Sequence
  Chemically Synthesized
QVQLQESGGGLVQAGGSLRLSCAASGTISAYVVMGWYRQAPGKEREFVASISYGGTTYYADSVKGRFTISRDNAKNTVYLQMNSLKPEDTAVYYCAASVGQSWLYYWGQGTQVTVSS

SEQ ID NO: 3660 - protein, 122 aa, Artificial Sequence
  Chemically Synthesized
QVQLQESGGGLVQAGGSLRLSCAASGSISQGSSMGWYRQAPGKEREFVATIALGATTNYADSVKGRFTISRDNAKNTVYLQMNSLKPEDTAVYYCAVPLTHSAHSAPSFLYWGQGTQVTVSS

SEQ ID NO: 3661 - protein, 117 aa, Artificial Sequence
  Chemically Synthesized
QVQLQESGGGLVQAGGSLRLSCAASGSISWRYQMGWYRQAPGKEREFVAAIAAGASTYYADSVKGRFTISRDNAKNTVYLQMNSLKPEDTAVYYCAVGLAYSTLMYWGQGTQVTVSS

SEQ ID NO: 3662 - protein, 126 aa, Artificial Sequence
  Chemically Synthesized
QVQLQESGGGLVQAGGSLRLSCAASGSISERYIMGWYRQAPGKEREFVAAIAYGANTNYADSVKGRFTISRDNAKNTVYLQMNSLKPEDTAVYYCAVGGPWTYRKGLHGRYYFDYWGQGTQVTVSS

SEQ ID NO: 3663 - protein, 126 aa, Artificial Sequence
  Chemically Synthesized
QVQLQESGGGLVQAGGSLRLSCAASGSISVDRLMGWYRQAPGKERELVAAIGDGTTTNYADSVKGRFTISRDNAKNTVYLQMNSLKPEDTAVYYCAADNDLGYGYYPYSYYGYYYWGQGTQVTVSS

SEQ ID NO: 3664 - protein, 118 aa, Artificial Sequence
  Chemically Synthesized
QVQLQESGGGLVQAGGSLRLSCAASGSISPVKNMGWYRQAPGKERELVAAIGYGATTNYADSVKGRFTISRDNAKNTVYLQMNSLKPEDTAVYYCAVYRWVSPDHEYWGQGTQVTVSS

SEQ ID NO: 3665 - protein, 125 aa, Artificial Sequence
  Chemically Synthesized
QVQLQESGGGLVQAGGSLRLSCAASGNIFLTTMGWYRQAPGKERELVAGISVGSITNYADSVKGRFTISRDNAKNTVYLQMNSLKPEDTAVYYCAAIRPYRRQYAVPYGLHFLYWGQGTQVTVSS

SEQ ID NO: 3666 - protein, 117 aa, Artificial Sequence
  Chemically Synthesized
QVQLQESGGGLVQAGGSLRLSCAASGTISSYNEMGWYRQAPGKERELVASIADGASTNYADSVKGRFTISRDNAKNTVYLQMNSLKPEDTAVYYCAAHLWDFPSMYWGQGTQVTVSS

SEQ ID NO: 3667 - protein, 121 aa, Artificial Sequence
  Chemically Synthesized
QVQLQESGGGLVQAGGSLRLSCAASGNIFTTSMGWYRQAPGKEREFVAAISAGSTTNYADSVKGRFTISRDNAKNTVYLQMNSLKPEDTAVYYCAVVGGEGRYPTDLHYYWGQGTQVTVSS

SEQ ID NO: 3668 - protein, 118 aa, Artificial Sequence
  Chemically Synthesized
QVQLQESGGGLVQAGGSLRLSCAASGYISDVDSMGWYRQAPGKERELVASINSGAITYYADSVKGRFTISRDNAKNTVYLQMNSLKPEDTAVYYCAVVKRAGGNFVYWGQGTQVTVSS

SEQ ID NO: 3669 - protein, 119 aa, Artificial Sequence
  Chemically Synthesized
QVQLQESGGGLVQAGGSLRLSCAASGYIFANYYMGWYRQAPGKEREFVATIGYGSTTYYADSVKGRFTISRDNAKNTVYLQMNSLKPEDTAVYYCAVYYSPYYLRHYYWGQGTQVTVSS

SEQ ID NO: 3670 - protein, 117 aa, Artificial Sequence
  Chemically Synthesized
QVQLQESGGGLVQAGGSLRLSCAASGYISGYYSMGWYRQAPGKEREFVATISSVVVPYADSVKGRFTISRDNAKNTVYLQMNSLKPEDTAVYYCAVAVDITRNFDYWGQGTQVTVSS

SEQ ID NO: 3671 - protein, 118 aa, Artificial Sequence
  Chemically Synthesized
QVQLQESGGGLVQAGGSLRLSCAASGSISWYDAMGWYRQAPGKERELVAGITYGGSTNYADSVKGRFTISRDNAKNTVYLQMNSLKPEDTAVYYCAVYVPADHYHTYWGQGTQVTVSS

SEQ ID NO: 3672 - protein, 118 aa, Artificial Sequence
  Chemically Synthesized
QVQLQESGGGLVQAGGSLRLSCAASGYIFRAWYMGWYRQAPGKERELVAAIAYGTTTNYADSVKGRFTISRDNAKNTVYLQMNSLKPEDTAVYYCAVGNIRRYYLPYWGQGTQVTVSS

SEQ ID NO: 3673 - protein, 110 aa, Artificial Sequence
  Chemically Synthesized
QVQLQESGGGLVQAGGSLRLSCAASGYISTNSAMGWYRQAPGKERELVAGIDSGASTNYADSVKGRFTISRDNAKNTVYLQMNSLKPEDTAVYYCAVRYWGQGTQVTVSS

SEQ ID NO: 3674 - protein, 117 aa, Artificial Sequence
  Chemically Synthesized
QVQLQESGGGLVQAGGSLRLSCAASGTIFTSLMGWYRQAPGKERELVAGIAGGTNTNYADSVKGRFTISRDNAKNTVYLQMNSLKPEDTAVYYCAADDDPYNVLSYWGQGTQVTVSS

SEQ ID NO: 3675 - protein, 121 aa, Artificial Sequence
  Chemically Synthesized
QVQLQESGGGLVQAGGSLRLSCAASGNILTSVMGWYRQAPGKERELVASIGLGTITYYADSVKGRFTISRDNAKNTVYLQMNSLKPEDTAVYYCAVIYNDNVYDYVDLYYWGQGTQVTVSS

SEQ ID NO: 3676 - protein, 118 aa, Artificial Sequence
  Chemically Synthesized
QVQLQESGGGLVQAGGSLRLSCAASGTIFSDYDMGWYRQAPGKEREFVASIDYGGSTYYADSVKGRFTISRDNAKNTVYLQMNSLKPEDTAVYYCAVVLGVYEPYLYWGQGTQVTVSS

SEQ ID NO: 3677 - protein, 122 aa, Artificial Sequence
  Chemically Synthesized
QVQLQESGGGLVQAGGSLRLSCAASGNIFAGSVMGWYRQAPGKEREFVATIGAGSTTYYADSVKGRFTISRDNAKNTVYLQMNSLKPEDTAVYYCAAYVYVGSSEIYVHFYWGQGTQVTVSS

SEQ ID NO: 3678 - protein, 117 aa, Artificial Sequence
  Chemically Synthesized
QVQLQESGGGLVQAGGSLRLSCAASGNILVTHMGWYRQAPGKEREFVASIADGTSTNYADSVKGRFTISRDNAKNTVYLQMNSLKPEDTAVYYCAADGSREDYYDYWGQGTQVTVSS

SEQ ID NO: 3679 - protein, 121 aa, Artificial Sequence
  Chemically Synthesized
QVQLQESGGGLVQAGGSLRLSCAASGNFLTVTMGWYRQAPGKERELVASIGIGTITNYADSVKGRFTISRDNAKNTVYLQMNSLKPEDTAVYYCAAVPVITPYYDTRHVYWGQGTQVTVSS

SEQ ID NO: 3680 - protein, 118 aa, Artificial Sequence
  Chemically Synthesized
QVQLQESGGGLVQAGGSLRLSCAASGYISHKPTMGWYRQAPGKEREFVAGISNGGSTYYADSVKGRFTISRDNAKNTVYLQMNSLKPEDTAVYYCAALGYRRYIFRYWGQGTQVTVSS

SEQ ID NO: 3681 - protein, 116 aa, Artificial Sequence
  Chemically Synthesized
QVQLQESGGGLVQAGGSLRLSCAASGTIFSVLMGWYRQAPGKEREFVAAIAHGSNTYADSVKGRFTISRDNAKNTVYLQMNSLKPEDTAVYYCAVEYESWTQLGYWGQGTQVTVSS

SEQ ID NO: 3682 - protein, 126 aa, Artificial Sequence
  Chemically Synthesized
QVQLQESGGGLVQAGGSLRLSCAASGSISDYIFMGWYRQAPGKERELVASIAVGTSTNYADSVKGRFTISRDNAKNTVYLQMNSLKPEDTAVYYCAAWEDHRTFDEGRYNWLHYYWGQGTQVTVSS

SEQ ID NO: 3683 - protein, 126 aa, Artificial Sequence
  Chemically Synthesized
QVQLQESGGGLVQAGGSLRLSCAASGYISNSLRMGWYRQAPGKERELVAAITYGTSTNYADSVKGRFTISRDNAKNTVYLQMNSLKPEDTAVYYCAAVYDYTVDQPGGWFWRFYYWGQGTQVTVSS

SEQ ID NO: 3684 - protein, 117 aa, Artificial Sequence
  Chemically Synthesized
QVQLQESGGGLVQAGGSLRLSCAASGSISSGPFMGWYRQAPGKEREFVAAITGGAITNYADSVKGRFTISRDNAKNTVYLQMNSLKPEDTAVYYCAVRAVPANHAYWGQGTQVTVSS

SEQ ID NO: 3685 - protein, 118 aa, Artificial Sequence
  Chemically Synthesized
QVQLQESGGGLVQAGGSLRLSCAASGTIFPFTLMGWYRQAPGKEREFVAAISTGAITYYADSVKGRFTISRDNAKNTVYLQMNSLKPEDTAVYYCAALVPYNWYLSYWGQGTQVTVSS

SEQ ID NO: 3686 - protein, 122 aa, Artificial Sequence
  Chemically Synthesized
QVQLQESGGGLVQAGGSLRLSCAASGTIFEDPDMGWYRQAPGKERELVATIDQGGSTNYADSVKGRFTISRDNAKNTVYLQMNSLKPEDTAVYYCAVYYNGDSYYWSLYYYWGQGTQVTVSS

SEQ ID NO: 3687 - protein, 122 aa, Artificial Sequence
  Chemically Synthesized
QVQLQESGGGLVQAGGSLRLSCAASGSIFYYASMGWYRQAPGKERELVATITNGGNTYYADSVKGRFTISRDNAKNTVYLQMNSLKPEDTAVYYCAANRYGFQTRGVLHNYWGQGTQVTVSS

SEQ ID NO: 3688 - protein, 122 aa, Artificial Sequence
  Chemically Synthesized
QVQLQESGGGLVQAGGSLRLSCAASGTIFPYVYMGWYRQAPGKEREFVAGITPGGTTNYADSVKGRFTISRDNAKNTVYLQMNSLKPEDTAVYYCAVYYSTSCSGCTLVMYWGQGTQVTVSS

SEQ ID NO: 3689 - protein, 122 aa, Artificial Sequence
  Chemically Synthesized
QVQLQESGGGLVQAGGSLRLSCAASGTIFRTQGMGWYRQAPGKERELVAAIAIGSSTNYADSVKGRFTISRDNAKNTVYLQMNSLKPEDTAVYYCAAKFTAHDPSRLSHIYWGQGTQVTVSS

SEQ ID NO: 3690 - protein, 117 aa, Artificial Sequence
  Chemically Synthesized
QVQLQESGGGLVQAGGSLRLSCAASGYISGGDRMGWYRQAPGKERELVATITDGGSTYYADSVKGRFTISRDNAKNTVYLQMNSLKPEDTAVYYCAAGDDLYVSIYWGQGTQVTVSS

SEQ ID NO: 3691 - protein, 110 aa, Artificial Sequence
  Chemically Synthesized
QVQLQESGGGLVQAGGSLRLSCAASGYIFQYYKMGWYRQAPGKEREFVATIAYGTTTNYADSVKGRFTISRDNAKNTVYLQMNSLKPEDTAVYYCAVPYWGQGTQVTVSS

SEQ ID NO: 3692 - protein, 118 aa, Artificial Sequence
  Chemically Synthesized
QVQLQESGGGLVQAGGSLRLSCAASGTISATLVMGWYRQAPGKEREFVAAIDTGGSTYYADSVKGRFTISRDNAKNTVYLQMNSLKPEDTAVYYCAVGYLDWYPHAYWGQGTQVTVSS

SEQ ID NO: 3693 - protein, 122 aa, Artificial Sequence
  Chemically Synthesized
QVQLQESGGGLVQAGGSLRLSCAASGNISSSSGMGWYRQAPGKEREFVAGINYGANTYYADSVKGRFTISRDNAKNTVYLQMNSLKPEDTAVYYCAVRYYWYAYYVRSHQYWGQGTQVTVSS

SEQ ID NO: 3694 - protein, 121 aa, Artificial Sequence
  Chemically Synthesized
QVQLQESGGGLVQAGGSLRLSCAASGNIFYRIAMGWYRQAPGKERELLPVLLVVVLPYADSVKGRFTISRDNAKNTVYLQMNSLKPEDTAVYYCAVSRTLYHTVYYRHYYWGQGTQVTVSS

SEQ ID NO: 3695 - protein, 118 aa, Artificial Sequence
  Chemically Synthesized
QVQLQESGGGLVQAGGSLRLSCAASGSISDHYNMGWYRQAPGKERELVAAIGHGGNTNYADSVKGRFTISRDNAKNTVYLQMNSLKPEDTAVYYCAVRDASRGRFGYWGQGTQVTVSS

SEQ ID NO: 3696 - protein, 122 aa, Artificial Sequence
  Chemically Synthesized
QVQLQESGGGLVQAGGSLRLSCAASGTISDVDFMGWYRQAPGKERELVAGIAHGGTTNYADSVKGRFTISRDNAKNTVYLQMNSLKPEDTAVYYCAADVSPSQPVTNDYPYWGQGTQVTVSS

SEQ ID NO: 3697 - protein, 118 aa, Artificial Sequence
  Chemically Synthesized
QVQLQESGGGLVQAGGSLRLSCAASGYIFGYWLMGWYRQAPGKERELVASISYGANTYYADSVKGRFTISRDNAKNTVYLQMNSLKPEDTAVYYCAVAITFWNHFYYWGQGTQVTVSS

SEQ ID NO: 3698 - protein, 111 aa, Artificial Sequence
  Chemically Synthesized
QVQLQESGGGLVQAGGSLRLSCAASGTIFQGGFMGWYRQAPGKERELVAAIDYGSNTYYADSVKGRFTISRDNAKNTVYLQMNSLKPEDTAVYYCAYHLYWGQGTQVTVSS

SEQ ID NO: 3699 - protein, 117 aa, Artificial Sequence
  Chemically Synthesized
QVQLQESGGGLVQAGGSLRLSCAASGSIFPNADMGWYRQAPGKERELVASITAGTITYYADSVKGRFTISRDNAKNTVYLQMNSLKPEDTAVYYCAADGDVFTVIYWGQGTQVTVSS

SEQ ID NO: 3700 - protein, 113 aa, Artificial Sequence
  Chemically Synthesized
QVQLQESGGGLVQAGGSLRLSCAASGTISQYDTMGWYRQAPGKERELVAAIGDGASTNYADSVKGRFTISRDNAKNTVYLQMNSLKPEDTAVYYCAVNDHTYWGQGTQVTVSS

SEQ ID NO: 3701 - protein, 118 aa, Artificial Sequence
  Chemically Synthesized
QVQLQESGGGLVQAGGSLRLSCAASGYIFQGYEMGWYRQAPGKEREFVAAIGNGGTTYYADSVKGRFTISRDNAKNTVYLQMNSLKPEDTAVYYCAAAVDTDLRYDYWGQGTQVTVSS

SEQ ID NO: 3702 - protein, 126 aa, Artificial Sequence
  Chemically Synthesized
QVQLQESGGGLVQAGGSLRLSCAASGSISVRYTMGWYRQAPGKERELVAAINVGATTYYADSVKGRFTISRDNAKNTVYLQMNSLKPEDTAVYYCAVYRRDYYDQRRIYDVKYVYWGQGTQVTVSS

SEQ ID NO: 3703 - protein, 122 aa, Artificial Sequence
  Chemically Synthesized
QVQLQESGGGLVQAGGSLRLSCAASGSISLKYQMGWYRQAPGKEREFVAAITYGGNTYYADSVKGRFTISRDNAKNTVYLQMNSLKPEDTAVYYCAATYIYDPWIPSPLNYWGQGTQVTVSS

SEQ ID NO: 3704 - protein, 118 aa, Artificial Sequence
  Chemically Synthesized
QVQLQESGGGLVQAGGSLRLSCAASGTIFDRSSMGWYRQAPGKERELVATIGDGGSTYYADSVKGRFTISRDNAKNTVYLQMNSLKPEDTAVYYCAVGYDNVRTYGYWGQGTQVTVSS

SEQ ID NO: 3705 - protein, 118 aa, Artificial Sequence
  Chemically Synthesized
QVQLQESGGGLVQAGGSLRLSCAASGNISGVDYMGWYRQAPGKEREFVAGIAEGASTNYADSVKGRFTISRDNAKNTVYLQMNSLKPEDTAVYYCAAGQSADDLYFYWGQGTQVTVSS

SEQ ID NO: 3706 - protein, 122 aa, Artificial Sequence
  Chemically Synthesized
QVQLQESGGGLVQAGGSLRLSCAASGNISPGATMGWYRQAPGKEREFVAGIAGGGSTNYADSVKGRFTISRDNAKNTVYLQMNSLKPEDTAVYYCAALGYQFHEDAGYHYYWGQGTQVTVSS

SEQ ID NO: 3707 - protein, 121 aa, Artificial Sequence
  Chemically Synthesized
QVQLQESGGGLVQAGGSLRLSCAASGTISPGTDMGWYRQAPGKERELVAAIDPGGTTYYADSVKGRFTISRDNAKNTVYLQMNSLKPEDTAVYYCAAPSYYFVDNARKLYWGQGTQVTVSS

SEQ ID NO: 3708 - protein, 121 aa, Artificial Sequence
  Chemically Synthesized
QVQLQESGGGLVQAGGSLRLSCAASGYIFGTHTMGWYRQAPGKERELVAGISRGTSTNYADSVKGRFTISRDNAKNTVYLQMNSLKPEDTAVYYCAAVQYGGDRVQYSMYWGQGTQVTVSS

SEQ ID NO: 3709 - protein, 118 aa, Artificial Sequence
  Chemically Synthesized
QVQLQESGGGLVQAGGSLRLSCAASGNIFQYYFMGWYRQAPGKEREFVASITYGGITYYADSVKGRFTISRDNAKNTVYLQMNSLKPEDTAVYYCAVRWGYWNYYPYWGQGTQVTVSS

SEQ ID NO: 3710 - protein, 118 aa, Artificial Sequence
  Chemically Synthesized
QVQLQESGGGLVQAGGSLRLSCAASGTISYTRVMGWYRQAPGKEREFVAGISAGSTTNYADSVKGRFTISRDNAKNTVYLQMNSLKPEDTAVYYCAAVWGDYDYYWYWGQGTQVTVSS

SEQ ID NO: 3711 - protein, 118 aa, Artificial Sequence
  Chemically Synthesized
QVQLQESGGGLVQAGGSLRLSCAASGTIFDGWTMGWYRQAPGKERELVAGINSGSSTYYADSVKGRFTISRDNAKNTVYLQMNSLKPEDTAVYYCAAYGRGAPYLGYWGQGTQVTVSS

SEQ ID NO: 3712 - protein, 120 aa, Artificial Sequence
  Chemically Synthesized
QVQLQESGGGLVQAGGSLRLSCAASGYIFGYPYMGWYRQAPGKEREFVAAIAQGSITNYADSVKGRFTISRDNAKNTVYLQMNSLKPEDTAVYYCAVALYFRDRHYHGYWGQGTQVTVSS

SEQ ID NO: 3713 - protein, 118 aa, Artificial Sequence
  Chemically Synthesized
QVQLQESGGGLVQAGGSLRLSCAASGSISSPWVMGWYRQAPGKEREFVAAIGRGTSTNYADSVKGRFTISRDNAKNTVYLQMNSLKPEDTAVYYCAANTLTPTYHLYWGQGTQVTVSS

SEQ ID NO: 3714 - protein, 118 aa, Artificial Sequence
  Chemically Synthesized
QVQLQESGGGLVQAGGSLRLSCAASGTISSYGPMGWYRQAPGKEREFVAAIARGTNTNYADSVKGRFTISRDNAKNTVYLQMNSLKPEDTAVYYCAAIVWQRKYLWYWGQGTQVTVSS

SEQ ID NO: 3715 - protein, 118 aa, Artificial Sequence
  Chemically Synthesized
QVQLQESGGGLVQAGGSLRLSCAASGNISYAYFMGWYRQAPGKEREFVATISYGGTTNYADSVKGRFTISRDNAKNTVYLQMNSLKPEDTAVYYCAADAERGYPHYYWGQGTQVTVSS

SEQ ID NO: 3716 - protein, 114 aa, Artificial Sequence
  Chemically Synthesized
QVQLQESGGGLVQAGGSLRLSCAASGNIFGSSQMGWYRQAPGKERELVTYYADSVKGRFTISRDNAKNTVYLQMNSLKPEDTAVYYCAVYQDDVTDGRGIHSYWGQGTQVTVSS

SEQ ID NO: 3717 - protein, 126 aa, Artificial Sequence
  Chemically Synthesized
QVQLQESGGGLVQAGGSLRLSCAASGNISAYTIMGWYRQAPGKEREFVAGISLGTSTNYADSVKGRFTISRDNAKNTVYLQMNSLKPEDTAVYYCAAIAATGSGSNGRIYTYHYYWGQGTQVTVSS

SEQ ID NO: 3718 - protein, 122 aa, Artificial Sequence
  Chemically Synthesized
QVQLQESGGGLVQAGGSLRLSCAASGSIFVLKYMGWYRQAPGKERELVAAINYGATTYYADSVKGRFTISRDNAKNTVYLQMNSLKPEDTAVYYCAVTWNNPWEYFDDYDYWGQGTQVTVSS

SEQ ID NO: 3719 - protein, 118 aa, Artificial Sequence
  Chemically Synthesized
QVQLQESGGGLVQAGGSLRLSCAASGNISRIYVMGWYRQAPGKERELVAGINRGATTYYADSVKGRFTISRDNAKNTVYLQMNSLKPEDTAVYYCAVDGWGQSFLDYWGQGTQVTVSS

SEQ ID NO: 3720 - protein, 118 aa, Artificial Sequence
  Chemically Synthesized
QVQLQESGGGLVQAGGSLRLSCAASGNISGYYAMGWYRQAPGKEREFVAGISRGGITNYADSVKGRFTISRDNAKNTVYLQMNSLKPEDTAVYYCAAGTYSGGLHIYWGQGTQVTVSS

SEQ ID NO: 3721 - protein, 122 aa, Artificial Sequence
  Chemically Synthesized
QVQLQESGGGLVQAGGSLRLSCAASGYISGSKSMGWYRQAPGKEREFVAAITNGATTNYADSVKGRFTISRDNAKNTVYLQMNSLKPEDTAVYYCAARTYRSRYPTRVLPYWGQGTQVTVSS

SEQ ID NO: 3722 - protein, 118 aa, Artificial Sequence
  Chemically Synthesized
QVQLQESGGGLVQAGGSLRLSCAASGNISDLPFMGWYRQAPGKEREFVAGINIGGNTNYADSVKGRFTISRDNAKNTVYLQMNSLKPEDTAVYYCAVVYYSSAYHFYWGQGTQVTVSS

SEQ ID NO: 3723 - protein, 125 aa, Artificial Sequence
  Chemically Synthesized
QVQLQESGGGLVQAGGSLRLSCAASGTIFDHWYMGWYRQAPGKEREFVASISSGSNTYYADSVKGRFTISRDNAKNTVYLQMNSLKPEDTAVYYCAVTGYPWWPWYRKGYLHYYWGQGTQVTVSS

SEQ ID NO: 3724 - protein, 122 aa, Artificial Sequence
  Chemically Synthesized
QVQLQESGGGLVQAGGSLRLSCAASGSISAYAVMGWYRQAPGKEREFVAGISFGSITYYADSVKGRFTISRDNAKNTVYLQMNSLKPEDTAVYYCAAYVGPRSGYYRYHRYWGQGTQVTVSS

SEQ ID NO: 3725 - protein, 126 aa, Artificial Sequence
  Chemically Synthesized
QVQLQESGGGLVQAGGSLRLSCAASGNISVVPIMGWYRQAPGKERELVAAISRGGTTYYADSVKGRFTISRDNAKNTVYLQMNSLKPEDTAVYYCAVYVRVDVRTDDAITQWYRYWGQGTQVTVSS

SEQ ID NO: 3726 - protein, 122 aa, Artificial Sequence
  Chemically Synthesized
QVQLQESGGGLVQAGGSLRLSCAASGYISGRDPMGWYRQAPGKEREFVATIGIGTTTYYADSVKGRFTISRDNAKNTVYLQMNSLKPEDTAVYYCAADVGYYSHSGKVLTYWGQGTQVTVSS

SEQ ID NO: 3727 - protein, 118 aa, Artificial Sequence
  Chemically Synthesized
QVQLQESGGGLVQAGGSLRLSCAASGSISARYIMGWYRQAPGKEREFVAAIASGSSTNYADSVKGRFTISRDNAKNTVYLQMNSLKPEDTAVYYCAVLSYTRVWHRYWGQGTQVTVSS

SEQ ID NO: 3728 - protein, 122 aa, Artificial Sequence
  Chemically Synthesized
QVQLQESGGGLVQAGGSLRLSCAASGSIFSPAIMGWYRQAPGKERELVAAISEGTNTNYADSVKGRFTISRDNAKNTVYLQMNSLKPEDTAVYYCAVYIYDSGTATLWFRYWGQGTQVTVSS

SEQ ID NO: 3729 - protein, 122 aa, Artificial Sequence
  Chemically Synthesized
QVQLQESGGGLVQAGGSLRLSCAASGTIFSPYYMGWYRQAPGKERELVAAINSGGITYYADSVKGRFTISRDNAKNTVYLQMNSLKPEDTAVYYCAVRNRDRYVTDRWYSYWGQGTQVTVSS

SEQ ID NO: 3730 - protein, 122 aa, Artificial Sequence
  Chemically Synthesized
QVQLQESGGGLVQAGGSLRLSCAASGYISIPPIMGWYRQAPGKEREFVAAIAYGGITNYADSVKGRFTISRDNAKNTVYLQMNSLKPEDTAVYYCAVLYYTTLLNYRWHRYWGQGTQVTVSS

SEQ ID NO: 3731 - protein, 118 aa, Artificial Sequence
  Chemically Synthesized
QVQLQESGGGLVQAGGSLRLSCAASGNISDDVAMGWYRQAPGKERELVAAIGAGASTYYADSVKGRFTISRDNAKNTVYLQMNSLKPEDTAVYYCAAWAYDPFLYYYWGQGTQVTVSS

SEQ ID NO: 3732 - protein, 122 aa, Artificial Sequence
  Chemically Synthesized
QVQLQESGGGLVQAGGSLRLSCAASGNISAPAIMGWYRQAPGKEREFVAAISRGATTNYADSVKGRFTISRDNAKNTVYLQMNSLKPEDTAVYYCAAYLYYDAEGHPWFQYWGQGTQVTVSS

SEQ ID NO: 3733 - protein, 126 aa, Artificial Sequence
  Chemically Synthesized
QVQLQESGGGLVQAGGSLRLSCAASGTISSPAIMGWYRQAPGKEREFVAAIASGTITNYADSVKGRFTISRDNAKNTVYLQMNSLKPEDTAVYYCAVYAYGRNTYSDRYHDWLRYWGQGTQVTVSS

SEQ ID NO: 3734 - protein, 118 aa, Artificial Sequence
  Chemically Synthesized
QVQLQESGGGLVQAGGSLRLSCAASGNISAPAIMGWYRQAPGKEREFVAAISRGATTNYADSVKGRFTISRDNAKNTVYLQMNSLKPEDTAVYYCAVYYFGSSWHRYWGQGTQVTVSS

SEQ ID NO: 3735 - protein, 120 aa, Artificial Sequence
  Chemically Synthesized
QVQLQESGGGLVQAGGSLRLSCAASGTIFDYEVMGWYRQAPGKEREFVAAISEGGSTNYADSVKGRFTISRDNAKNTVYLQMNSLKPEDTAVYYCAAYYRNDSQRWLRYWGQGTQVTVSS

SEQ ID NO: 3736 - protein, 122 aa, Artificial Sequence
  Chemically Synthesized
QVQLQESGGGLVQAGGSLRLSCAASGYISGPIFMGWYRQAPGKERELVASIGEGTTTYYADSVKGRFTISRDNAKNTVYLQMNSLKPEDTAVYYCAADAWDDVNDVPVHTYWGQGTQVTVSS

SEQ ID NO: 3737 - protein, 118 aa, Artificial Sequence
  Chemically Synthesized
QVQLQESGGGLVQAGGSLRLSCAASGYIFADGAMGWYRQAPGKEREFVATISIGSTTYYADSVKGRFTISRDNAKNTVYLQMNSLKPEDTAVYYCAVRVYDPYDHIYWGQGTQVTVSS

SEQ ID NO: 3738 - protein, 118 aa, Artificial Sequence
  Chemically Synthesized
QVQLQESGGGLVQAGGSLRLSCAASGTISGQRVMGWYRQAPGKERELVAAISPGASTYYADSVKGRFTISRDNAKNTVYLQMNSLKPEDTAVYYCAVYYFGSSWHRYWGQGTQVTVSS

SEQ ID NO: 3739 - protein, 122 aa, Artificial Sequence
  Chemically Synthesized
QVQLQESGGGLVQAGGSLRLSCAASGSISLYIIMGWYRQAPGKEREFVAAIAEGGNTNYADSVKGRFTISRDNAKNTVYLQMNSLKPEDTAVYYCAAYAKRDHPAKGWFRYWGQGTQVTVSS

SEQ ID NO: 3740 - protein, 122 aa, Artificial Sequence
  Chemically Synthesized
QVQLQESGGGLVQAGGSLRLSCAASGSISPFPIMGWYRQAPGKEREFVAAISLGATTNYADSVKGRFTISRDNAKNTVYLQMNSLKPEDTAVYYCAVYRYQRFEWRPWYRYWGQGTQVTVSS

SEQ ID NO: 3741 - protein, 122 aa, Artificial Sequence
  Chemically Synthesized
QVQLQESGGGLVQAGGSLRLSCAASGNISAPAIMGWYRQAPGKEREFVAAISRGATTNYADSVKGRFTISRDNAKNTVYLQMNSLKPEDTAVYYCAVYLKNNEVPAVWHRYWGQGTQVTVSS

SEQ ID NO: 3742 - protein, 122 aa, Artificial Sequence
  Chemically Synthesized
QVQLQESGGGLVQAGGSLRLSCAASGSISKDDYMGWYRQAPGKERELVASIGYGGITYYADSVKGRFTISRDNAKNTVYLQMNSLKPEDTAVYYCAAYLYYDAEGHPWFQYWGQGTQVTVSS

SEQ ID NO: 3743 - protein, 122 aa, Artificial Sequence
  Chemically Synthesized
QVQLQESGGGLVQAGGSLRLSCAASGTIFEAVYMGWYRQAPGKEREFVATIDYGSNTYYADSVKGRFTISRDNAKNTVYLQMNSLKPEDTAVYYCAADYWVEDGNYSYLTYWGQGTQVTVSS

SEQ ID NO: 3744 - protein, 118 aa, Artificial Sequence
  Chemically Synthesized
QVQLQESGGGLVQAGGSLRLSCAASGTISGQRVMGWYRQAPGKERELVAAISPGASTYYADSVKGRFTISRDNAKNTVYLQMNSLKPEDTAVYYCAVASLHDDDHLYWGQGTQVTVSS

SEQ ID NO: 3745 - protein, 122 aa, Artificial Sequence
  Chemically Synthesized
QVQLQESGGGLVQAGGSLRLSCAASGTISGLAIMGWYRQAPGKEREFVAAISSGGSTNYADSVKGRFTISRDNAKNTVYLQMNSLKPEDTAVYYCAAYVIIDVSVKHWHRYWGQGTQVTVSS

SEQ ID NO: 3746 - protein, 122 aa, Artificial Sequence
  Chemically Synthesized
QVQLQESGGGLVQAGGSLRLSCAASGNIFDYNIMGWYRQAPGKEREFVAGIATGATTNYADSVKGRFTISRDNAKNTVYLQMNSLKPEDTAVYYCAAYTLLDGTGSGWHRYWGQGTQVTVSS

SEQ ID NO: 3747 - protein, 122 aa, Artificial Sequence
  Chemically Synthesized
QVQLQESGGGLVQAGGSLRLSCAASGYISDWPIMGWYRQAPGKEREFVAAISYGTNTNYADSVKGRFTISRDNAKNTVYLQMNSLKPEDTAVYYCAAYRYGYGDNNQWLRYWGQGTQVTVSS

SEQ ID NO: 3748 - protein, 117 aa, Artificial Sequence
  Chemically Synthesized
QVQLQESGGGLVQAGGSLRLSCAASGTISQDPQMGWYRQAPGKEREFVATIGDGSITYYADSVKGRFTISRDNAKNTVYLQMNSLKPEDTAVYYCAADDYDYELVYWGQGTQVTVSS

SEQ ID NO: 3749 - protein, 126 aa, Artificial Sequence
  Chemically Synthesized
QVQLQESGGGLVQAGGSLRLSCAASGNIFRQNIMGWYRQAPGKEREFVAAISDGAITNYADSVKGRFTISRDNAKNTVYLQMNSLKPEDTAVYYCAAIYGDYNYPGSGKRAWHRYWGQGTQVTVSS

SEQ ID NO: 3750 - protein, 119 aa, Artificial Sequence
  Chemically Synthesized
QVQLQESGGGLVQAGGSLRLSCAASGNISRHKIMGWYRQAPGKEREFVAAIAWGANTNYADSVKGRFTISRDNAKNTVYLQMNSLKPEDTAVYYCAAYEYASPAWFRYWGQGTQVTVSS

SEQ ID NO: 3751 - protein, 118 aa, Artificial Sequence
  Chemically Synthesized
QVQLQESGGGLVQAGGSLRLSCAASGTIFDYKVMGWYRQAPGKEREFVAAIDNGTTTNYADSVKGRFTISRDNAKNTVYLQMNSLKPEDTAVYYCAAYQYVGGWYRYWGQGTQVTVSS

SEQ ID NO: 3752 - protein, 118 aa, Artificial Sequence
  Chemically Synthesized
QVQLQESGGGLVQAGGSLRLSCAASGSISAVRIMGWYRQAPGKEREFVAAIAAGTSTNYADSVKGRFTISRDNAKNTVYLQMNSLKPEDTAVYYCAAYYYDKVWYRYWGQGTQVTVSS

SEQ ID NO: 3753 - protein, 122 aa, Artificial Sequence
  Chemically Synthesized
QVQLQESGGGLVQAGGSLRLSCAASGNIFHSDYMGWYRQAPGKERELVAGIDGGGNTYYADSVKGRFTISRDNAKNTVYLQMNSLKPEDTAVYYCAVTVFDGGRNRYDHDYWGQGTQVTVSS

SEQ ID NO: 3754 - protein, 118 aa, Artificial Sequence
  Chemically Synthesized
QVQLQESGGGLVQAGGSLRLSCAASGSISNSRIMGWYRQAPGKEREFVAGISSGATTNYADSVKGRFTISRDNAKNTVYLQMNSLKPEDTAVYYCAAYYYQGDWYRYWGQGTQVTVSS

SEQ ID NO: 3755 - protein, 122 aa, Artificial Sequence
  Chemically Synthesized
QVQLQESGGGLVQAGGSLRLSCAASGSISHAQIMGWYRQAPGKEREFVAAIGRGSTTYYADSVKGRFTISRDNAKNTVYLQMNSLKPEDTAVYYCAALRRVVSGATDWHRYWGQGTQVTVSS

SEQ ID NO: 3756 - protein, 118 aa, Artificial Sequence
  Chemically Synthesized
QVQLQESGGGLVQAGGSLRLSCAASGNISRPQIMGWYRQAPGKEREFVAAITDGGSTNYADSVKGRFTISRDNAKNTVYLQMNSLKPEDTAVYYCAVYIAYISWLRYWGQGTQVTVSS

SEQ ID NO: 3757 - protein, 126 aa, Artificial Sequence
  Chemically Synthesized
QVQLQESGGGLVQAGGSLRLSCAASGTISDYQDMGWYRQAPGKEREFVASISDGSITYYADSVKGRFTISRDNAKNTVYLQMNSLKPEDTAVYYCAAEDNEPYDDQTLYSDLYDYWGQGTQVTVSS

SEQ ID NO: 3758 - protein, 122 aa, Artificial Sequence
  Chemically Synthesized
QVQLQESGGGLVQAGGSLRLSCAASGYISDWRYMGWYRQAPGKERELVASINGGTSTYYADSVKGRFTISRDNAKNTVYLQMNSLKPEDTAVYYCAAYLYYDAEGHPWFQYWGQGTQVTVSS

SEQ ID NO: 3759 - protein, 122 aa, Artificial Sequence
  Chemically Synthesized
QVQLQESGGGLVQAGGSLRLSCAASGTISSSGIMGWYRQAPGKEREFVAAINYGTNTNYADSVKGRFTISRDNAKNTVYLQMNSLKPEDTAVYYCAAYVGVYGRGYSWLRYWGQGTQVTVSS

SEQ ID NO: 3760 - protein, 118 aa, Artificial Sequence
  Chemically Synthesized
QVQLQESGGGLVQAGGSLRLSCAASGNIFGWEIMGWYRQAPGKEREFVAAISYGGTTNYADSVKGRFTISRDNAKNTVYLQMNSLKPEDTAVYYCAAYRYRVNWHRYWGQGTQVTVSS

SEQ ID NO: 3761 - protein, 126 aa, Artificial Sequence
  Chemically Synthesized
QVQLQESGGGLVQAGGSLRLSCAASGSISPYYIMGWYRQAPGKEREFVAAIDVGASTNYADSVKGRFTISRDNAKNTVYLQMNSLKPEDTAVYYCAVYLYAPYDPYARTVPWHRYWGQGTQVTVSS

SEQ ID NO: 3762 - protein, 118 aa, Artificial Sequence
  Chemically Synthesized
QVQLQESGGGLVQAGGSLRLSCAASGTISTSQIMGWYRQAPGKEREFVAGIANGGSTNYADSVKGRFTISRDNAKNTVYLQMNSLKPEDTAVYYCAAFFYYSVWHRYWGQGTQVTVSS

SEQ ID NO: 3763 - protein, 126 aa, Artificial Sequence
  Chemically Synthesized
QVQLQESGGGLVQAGGSLRLSCAASGYISGSSIMGWYRQAPGKEREFVAAISPGTSTNYADSVKGRFTISRDNAKNTVYLQMNSLKPEDTAVYYCAVVAKVLNLNLNYTKQWYRYWGQGTQVTVSS

SEQ ID NO: 3764 - protein, 118 aa, Artificial Sequence
  Chemically Synthesized
QVQLQESGGGLVQAGGSLRLSCAASGYIFQVVYMGWYRQAPGKEREFVAAIDNGGSTNYADSVKGRFTISRDNAKNTVYLQMNSLKPEDTAVYYCAVVDWKYSRYSYWGQGTQVTVSS

SEQ ID NO: 3765 - protein, 118 aa, Artificial Sequence
  Chemically Synthesized
QVQLQESGGGLVQAGGSLRLSCAASGNIFRADIMGWYRQAPGKEREFVAAIARGATTYYADSVKGRFTISRDNAKNTVYLQMNSLKPEDTAVYYCAVLDYDRKWYRYWGQGTQVTVSS

SEQ ID NO: 3766 - protein, 118 aa, Artificial Sequence
  Chemically Synthesized
QVQLQESGGGLVQAGGSLRLSCAASGSISAVRIMGWYRQAPGKEREFVAAITRGATTNYADSVKGRFTISRDNAKNTVYLQMNSLKPEDTAVYYCAVYYFGSSWHRYWGQGTQVTVSS

SEQ ID NO: 3767 - protein, 118 aa, Artificial Sequence
  Chemically Synthesized
QVQLQESGGGLVQAGGSLRLSCAASGSIFPDGAMGWYRQAPGKERELVAAIDGGASTYYADSVKGRFTISRDNAKNTVYLQMNSLKPEDTAVYYCAVASLHDDDHLYWGQGTQVTVSS

SEQ ID NO: 3768 - protein, 118 aa, Artificial Sequence
  Chemically Synthesized
QVQLQESGGGLVQAGGSLRLSCAASGNISDWPVMGWYRQAPGKEREFVAAIATGANTNYADSVKGRFTISRDNAKNTVYLQMNSLKPEDTAVYYCAAYRWSVTWFRYWGQGTQVTVSS

SEQ ID NO: 3769 - protein, 118 aa, Artificial Sequence
  Chemically Synthesized
QVQLQESGGGLVQAGGSLRLSCAASGTISYWRIMGWYRQAPGKEREFVAAITRGATTNYADSVKGRFTISRDNAKNTVYLQMNSLKPEDTAVYYCAAYYYDKVWYRYWGQGTQVTVSS

SEQ ID NO: 3770 - protein, 118 aa, Artificial Sequence
  Chemically Synthesized
QVQLQESGGGLVQAGGSLRLSCAASGNISVVPIMGWYRQAPGKERELVAAISRGGTTYYADSVKGRFTISRDNAKNTVYLQMNSLKPEDTAVYYCAVASLHDDDHLYWGQGTQVTVSS

SEQ ID NO: 3771 - protein, 126 aa, Artificial Sequence
  Chemically Synthesized
QVQLQESGGGLVQAGGSLRLSCAASGNISPNDGMGWYRQAPGKERELVATISLGGTTNYADSVKGRFTISRDNAKNTVYLQMNSLKPEDTAVYYCAVYYYEGVEQGVYYYTYLDYWGQGTQVTVSS

SEQ ID NO: 3772 - protein, 118 aa, Artificial Sequence
  Chemically Synthesized
QVQLQESGGGLVQAGGSLRLSCAASGNIFDYNIMGWYRQAPGKEREFVAGIATGATTNYADSVKGRFTISRDNAKNTVYLQMNSLKPEDTAVYYCAVYYFGSSWHRYWGQGTQVTVSS

SEQ ID NO: 3773 - protein, 118 aa, Artificial Sequence
  Chemically Synthesized
QVQLQESGGGLVQAGGSLRLSCAASGTIFQNAIMGWYRQAPGKEREFVAAISYGATTNYADSVKGRFTISRDNAKNTVYLQMNSLKPEDTAVYYCAVLTRGGGWFRYWGQGTQVTVSS

SEQ ID NO: 3774 - protein, 118 aa, Artificial Sequence
  Chemically Synthesized
QVQLQESGGGLVQAGGSLRLSCAASGTIFGIYAMGWYRQAPGKERELVAGIGRGSSTYYADSVKGRFTISRDNAKNTVYLQMNSLKPEDTAVYYCAAQVRADTLLSYWGQGTQVTVSS

SEQ ID NO: 3775 - protein, 126 aa, Artificial Sequence
  Chemically Synthesized
QVQLQESGGGLVQAGGSLRLSCAASGTISYASIMGWYRQAPGKEREFVAAISAGTITNYADSVKGRFTISRDNAKNTVYLQMNSLKPEDTAVYYCAVITLGYYVDADTSYQWHRYWGQGTQVTVSS

SEQ ID NO: 3776 - protein, 118 aa, Artificial Sequence
  Chemically Synthesized
QVQLQESGGGLVQAGGSLRLSCAASGNISEFLEMGWYRQAPGKERELVAAIASGAITYYADSVKGRFTISRDNAKNTVYLQMNSLKPEDTAVYYCAVYDIAIDLHYYWGQGTQVTVSS

SEQ ID NO: 3777 - protein, 118 aa, Artificial Sequence
  Chemically Synthesized
QVQLQESGGGLVQAGGSLRLSCAASGNISPNDDMGWYRQAPGKERELVAAIADGTITYYADSVKGRFTISRDNAKNTVYLQMNSLKPEDTAVYYCAVDLWLDGFLTYWGQGTQVTVSS

SEQ ID NO: 3778 - protein, 121 aa, Artificial Sequence
  Chemically Synthesized
QVQLQESGGGLVQAGGSLRLSCAASGNISTSYTMGWYRQAPGKEREFVAAIAYGTTTYYADSVKGRFTISRDNAKNTVYLQMNSLKPEDTAVYYCAAAYQWDEYGPTYWYWGQGTQVTVSS

SEQ ID NO: 3779 - protein, 118 aa, Artificial Sequence
  Chemically Synthesized
QVQLQESGGGLVQAGGSLRLSCAASGYISSYWDMGWYRQAPGKERELVAAIAPGTITYYADSVKGRFTISRDNAKNTVYLQMNSLKPEDTAVYYCAASEFDNEAHDYWGQGTQVTVSS

SEQ ID NO: 3780 - protein, 128 aa, Artificial Sequence
  Chemically Synthesized
QVQLQESGGGLVQAGGSLRLSCAASGTIFRDWGMGWYRQAPGKERELVASIGFGGNTNYADSVKGRFTISRDNAKNTVYLQMNSLKPEDTAVYYCAAQWHQPTYVERSADSYHYHGYWGQGTQVTVSS

SEQ ID NO: 3781 - protein, 122 aa, Artificial Sequence
  Chemically Synthesized
QVQLQESGGGLVQAGGSLRLSCAASGYISRTDDMGWYRQAPGKERELVAAIADGTITYYADSVKGRFTISRDNAKNTVYLQMNSLKPEDTAVYYCAVWEYYYFPLGDEYTYWGQGTQVTVSS

SEQ ID NO: 3782 - protein, 121 aa, Artificial Sequence
  Chemically Synthesized
QVQLQESGGGLVQAGGSLRLSCAASGSIFTLTGMGWYRQAPGKERELVATIDPGGNTNYADSVKGRFTISRDNAKNTVYLQMNSLKPEDTAVYYCAAAYQWDEYGPTYWYWGQGTQVTVSS

SEQ ID NO: 3783 - protein, 117 aa, Artificial Sequence
  Chemically Synthesized
QVQLQESGGGLVQAGGSLRLSCAASGSISRPIVMGWYRQAPGKEREFVATISDGTNTYYADSVKGRFTISRDNAKNTVYLQMNSLKPEDTAVYYCAALSVTRLSIYWGQGTQVTVSS

SEQ ID NO: 3784 - protein, 121 aa, Artificial Sequence
  Chemically Synthesized
QVQLQESGGGLVQAGGSLRLSCAASGNISTSYTMGWYRQAPGKEREFVAAIAYGTTTYYADSVKGRFTISRDNAKNTVYLQMNSLKPEDTAVYYCAAAYQWDDYGPTYWYWGQGTQVTVSS

SEQ ID NO: 3785 - protein, 127 aa, Artificial Sequence
  Chemically Synthesized
QVQLQESGGGLVQAGGSLRLSCAASGYIFSSDSMGWYRQAPGKERELVAAINDGTITYYADSVKGRFTISRDNAKNTVYLQMNSLKPEDTAVYYCAADEYIDPYYDYYVGYDLLGYWGQGTQVTVSS

SEQ ID NO: 3786 - protein, 121 aa, Artificial Sequence
  Chemically Synthesized
QVQLQESGGGLVQAGGSLRLSCAASGNISTSYTMGWYRQAPGKEREFVAAIAYGTTTYYADSVKGRFTISRDNAKNTVYLQMNSLKPEDTAVYYCAAADQWDEYGPTYWYWGQGTQVTVSS

SEQ ID NO: 3787 - protein, 126 aa, Artificial Sequence
  Chemically Synthesized
QVQLQESGGGLVQAGGSLRLSCAASGNISTSYTMGWYRQAPGKEREFVAAIAYGTTTYYADSVKGRFTISRDNAKNTVYLQMNSLKPEDTAVYYCAAKRIIRKSHGDRTYITHSYWGQGTQVTVSS

SEQ ID NO: 3788 - protein, 118 aa, Artificial Sequence
  Chemically Synthesized
QVQLQESGGGLVQAGGSLRLSCAASGNISYSQSMGWYRQAPGKEREFVAAITSGANTNYADSVKGRFTISRDNAKNTVYLQMNSLKPEDTAVYYCAAYSVPHGDYFYWGQGTQVTVSS

SEQ ID NO: 3789 - protein, 118 aa, Artificial Sequence
  Chemically Synthesized
QVQLQESGGGLVQAGGSLRLSCAASGSIFRAAYMGWYRQAPGKERELVATIGYGTSTYYADSVKGRFTISRDNAKNTVYLQMNSLKPEDTAVYYCAALRLGRYKHLYWGQGTQVTVSS

SEQ ID NO: 3790 - protein, 118 aa, Artificial Sequence
  Chemically Synthesized
QVQLQESGGGLVQAGGSLRLSCAASGTISYRAWMGWYRQAPGKERELVASITHGGNTNYADSVKGRFTISRDNAKNTVYLQMNSLKPEDTAVYYCAVRHWYRYYHAYWGQGTQVTVSS

SEQ ID NO: 3791 - protein, 126 aa, Artificial Sequence
  Chemically Synthesized
QVQLQESGGGLVQAGGSLRLSCAASGSISWLGAMGWYRQAPGKERELVAAINYGATTYYADSVKGRFTISRDNAKNTVYLQMNSLKPEDTAVYYCAVYLYLSNDDPYGPSEPHPYWGQGTQVTVSS

SEQ ID NO: 3792 - protein, 121 aa, Artificial Sequence
  Chemically Synthesized
QVQLQESGGGLVQAGGSLRLSCAASGSISSSQMGWYRQAPGKERELVAAIGYGGTTYYADSVKGRFTISRDNAKNTVYLQMNSLKPEDTAVYYCAVRYDYAHHVGARFDYWGQGTQVTVSS

SEQ ID NO: 3793 - protein, 117 aa, Artificial Sequence
  Chemically Synthesized
QVQLQESGGGLVQAGGSLRLSCAASGYISLYIWMGWYRQAPGKEREFVAGITKGANTNYADSVKGRFTISRDNAKNTVYLQMNSLKPEDTAVYYCAVVHDATNHYYWGQGTQVTVSS

SEQ ID NO: 3794 - protein, 117 aa, Artificial Sequence
  Chemically Synthesized
QVQLQESGGGLVQAGGSLRLSCAASGNILTMNMGWYRQAPGKERELVATITSGASTNYADSVKGRFTISRDNAKNTVYLQMNSLKPEDTAVYYCAVYRYYVVRHHYWGQGTQVTVSS

SEQ ID NO: 3795 - protein, 121 aa, Artificial Sequence
  Chemically Synthesized
QVQLQESGGGLVQAGGSLRLSCAASGNISTSYTMGWYRQAPGKEREFVAAIAYGTTTYYADSVKGRFTISRDNAKNTVYLQMNSLKPEDTAVYYCAAAYQWDEYGPSYWYWGQGTQVTVSS

SEQ ID NO: 3796 - protein, 122 aa, Artificial Sequence
  Chemically Synthesized
QVQLQESGGGLVQAGGSLRLSCAASGNISSRDQMGWYRQAPGKERELVATISGGGITNYADSVKGRFTISRDNAKNTVYLQMNSLKPEDTAVYYCAADAASLKGGDDGLDYWGQGTQVTVSS

SEQ ID NO: 3797 - protein, 122 aa, Artificial Sequence
  Chemically Synthesized
QVQLQESGGGLVQAGGSLRLSCAASGYISYVVGMGWYRQAPGKERELVATITSGTNTYYADSVKGRFTISRDNAKNTVYLQMNSLKPEDTAVYYCAARVRGFRDYAPYHTYWGQGTQVTVSS

SEQ ID NO: 3798 - protein, 118 aa, Artificial Sequence
  Chemically Synthesized
QVQLQESGGGLVQAGGSLRLSCAASGSIFQYEIMGWYRQAPGKERELVATITYGSTTNYADSVKGRFTISRDNAKNTVYLQMNSLKPEDTAVYYCAATQPTYGEHYYWGQGTQVTVSS

SEQ ID NO: 3799 - protein, 121 aa, Artificial Sequence
  Chemically Synthesized
QVQLQESGGGLVQAGGSLRLSCAASGNISTSYTMGWYRQAPGKEREVVAAIAYGTTTYYADSVKGRFTISRDNAKNTVYLQMNSLKPEDTAVYYCAAAYQWDEYGPTYWYWGQGTQVTVSS

SEQ ID NO: 3800 - protein, 121 aa, Artificial Sequence
  Chemically Synthesized
QVQLQESGGGLVQAGGSLRLSCAASGNISTSYTMGWYRQAPGKEREFVAAIAYGTTTYYADSVKGRFTISRDNAKNTVYLQMNSLKPEDTAVYYCAAAYQWDEDGPTYWYWGQGTQVTVSS

SEQ ID NO: 3801 - protein, 121 aa, Artificial Sequence
  Chemically Synthesized
QVQLQESGGGLVQAGGSLRLSCAASGSIFTLTGMGWYRQAPGKEREFVAAIAYGTTTYYADSVKGRFTISRDNAKNTVYLQMNSLKPEDTAVYYCAAAYQWDEYGPTYWYWGQGTQVTVSS

SEQ ID NO: 3802 - protein, 121 aa, Artificial Sequence
  Chemically Synthesized
QVQLQESGGGLVQAGGSLRLSCAASGNISTSYTMGWYRQAPGKEREFVAAIAYGTTTYYADSVKGRFTISRDNAKNTVYLQMNSLKPEDTAVYYCAAAYQWDEFGPTYWYWGQGTQVTVSS

SEQ ID NO: 3803 - protein, 121 aa, Artificial Sequence
  Chemically Synthesized
QVQLQESGGGLVQAGGSLRLSCAASGNISERVYMGWYRQAPGKEREFVASMVTVVLPYADSVKGRFTISRDNAKNTVYLQMNSLKPEDTAVYYCAVYAGIYGDGEYSYDYWGQGTQVTVSS

SEQ ID NO: 3804 - protein, 119 aa, Artificial Sequence
  Chemically Synthesized
QVQLQESGGGLVQAGGSLRLSCAASGTISVPRDMGWYRQAPGKEREFVAAIGYGATTYADSVKGRFTISRDNAKNTVYLQMNSLKPEDTAVYYCAADDRYGVYDDYYYWGQGTQVTVSS

SEQ ID NO: 3805 - protein, 121 aa, Artificial Sequence
  Chemically Synthesized
QVQLQESGGGLVQAGGSLRLSCAASGYISRIYYMGWYRQAPGKERELVATIASGGNTNYADSVKGRFTISRDNAKNTVYLQMNSLKPEDTAVYYCAAAYQWDEYGPTYWYWGQGTQVTVSS

SEQ ID NO: 3806 - protein, 121 aa, Artificial Sequence
  Chemically Synthesized
QVQLQESGGGLVQAGGSLRLSCAASGNISTSYTMGWYRQAPGKEREFVAAIAYGTTTYYADSVKGRFTISRDNAKNTVYLQMNSLKPEDTAVYYCAAAYQCDEYGPTYWYWGQGTQVTVSS

SEQ ID NO: 3807 - protein, 118 aa, Artificial Sequence
  Chemically Synthesized
QVQLQESGGGLVQAGGSLRLSCAASGNISYVYYMGWYRQAPGKEREFVAGIASGGSTYYADSVKGRFTISRDNAKNTVYLQMNSLKPEDTAVYYCAVQIRSDPSYAYWGQGTQVTVSS

SEQ ID NO: 3808 - protein, 121 aa, Artificial Sequence
  Chemically Synthesized
QVQLQESGGGLVQAGGSLRLSCAASGNISTSYTMGWYRQAPGKEREFVAAIAYGTTTNYADSVKGRFTISRDNAKNTVYLQMNSLKPEDTAVYYCAAAYQWDEYGPTYWYWGQGTQVTVSS

SEQ ID NO: 3809 - protein, 121 aa, Artificial Sequence
  Chemically Synthesized
QVQLQESGGGLVQAGGSLRLSCAASGNISTSYTMGWYRQAPGKEREFVAAIAYGTTTYYADSVKGRFTISRDNAKNTVYLQMNSLKPEDTAVYYCAAAYLWDEYGPTYWYWGQGTQVTVSS

SEQ ID NO: 3810 - protein, 125 aa, Artificial Sequence
  Chemically Synthesized
QVQLQESGGGLVQAGGSLRLSCAASGNISGELRMGWYRQAPGKERELVATLILVVLPYADSVKGRFTISRDNAKNTVYLQMNSLKPEDTAVYYCAVDAQEADVWGFYTKELLDYWGQGTQVTVSS

SEQ ID NO: 3811 - protein, 121 aa, Artificial Sequence
  Chemically Synthesized
QVQLQESGGGLVQAGGSLRLSCAASGNISTSYTMGWYRQAPGKEREFVAAIAYGTTTYYADSVKGRFTISRDNAKNTVYLQMNSLKPEDTAVYYCAAAYQWDEYGQTYWYWGQGTQVTVSS

SEQ ID NO: 3812 - protein, 125 aa, Artificial Sequence
  Chemically Synthesized
QVQLQESGGGLVQAGGSLRLSCAASGTIFYVDSMGWYRQAPGKERELVASITAGASTYYADSVKGRFTISRDNAKNTVYLQMNSLKPEDTAVYYCAALHYTWVSADIAATVFVYWGQGTQVTVSS

SEQ ID NO: 3813 - protein, 121 aa, Artificial Sequence
  Chemically Synthesized
QVQLQESGGGLVQAGGSLRLSCAASGNISTSYTMGWYRQAPGKEREFVAAIAYGTTTYYADSVKGRFTISRDNAKNTVYLQMNSLKPEDTAVYYCAAAYQWDEYGPTFWYWGQGTQVTVSS

SEQ ID NO: 3814 - protein, 118 aa, Artificial Sequence
  Chemically Synthesized
QVQLQESGGGLVQAGGSLRLSCAASGYISYEYDMGWYRQAPGKERELVAAIAYGAITYYADSVKGRFTISRDNAKNTVYLQMNSLKPEDTAVYYCAVDVANSKTLIYWGQGTQVTVSS

SEQ ID NO: 3815 - protein, 122 aa, Artificial Sequence
  Chemically Synthesized
QVQLQESGGGLVQAGGSLRLSCAASGTIFHYWYMGWYRQAPGKERELVATIAYGGITNYADSVKGRFTISRDNAKNTVYLQMNSLKPEDTAVYYCAVARYTYYLPDWYHHYWGQGTQVTVSS

SEQ ID NO: 3816 - protein, 118 aa, Artificial Sequence
  Chemically Synthesized
QVQLQESGGGLVQAGGSLRLSCAASGYIFGYRRMGWYRQAPGKEREFVAGIGYGGNTNYADSVKGRFTISRDNAKNTVYLQMNSLKPEDTAVYYCAVTQWWYANHTYWGQGTQVTVSS

SEQ ID NO: 3817 - protein, 121 aa, Artificial Sequence
  Chemically Synthesized
QVQLQESGGGLVQAGGSLRLSCAASGYILVTFMGWYRQAPGKEREFVAAIGDGTNTYYADSVKGRFTISRDNAKNTVYLQMNSLKPEDTAVYYCAARVYRWYDLHRSHDYWGQGTQVTVSS

SEQ ID NO: 3818 - protein, 119 aa, Artificial Sequence
  Chemically Synthesized
QVQLQESGGGLVQAGGSLRLSCAASGYISVDANGMGWYRQAPGKERELVATIAYGTNTYYADSVKGRFTISRDNAKNTVYLQMNSLKPEDTAVYYCAAADYAYAPFDYWGQGTQVTVSS

SEQ ID NO: 3819 - protein, 118 aa, Artificial Sequence
  Chemically Synthesized
QVQLQESGGGLVQAGGSLRLSCAASGTIFGYVSMGWYRQAPGKERELVATITYGSSTNYADSVKGRFTISRDNAKNTVYLQMNSLKPEDTAVYYCAAVYTYLALHIYWGQGTQVTVSS

SEQ ID NO: 3820 - protein, 121 aa, Artificial Sequence
  Chemically Synthesized
QVQLQESGGGLVQAGGSLRLSCAASGNISTSYTMGWYRQAPGKEREFVAAIAYGTTTYYADSVKGRFTISRDNAKNTVYLQMNSLKPEDTAVYYCASAYQWDEYGPTYWYWGQGTQVTVSS

SEQ ID NO: 3821 - protein, 121 aa, Artificial Sequence
  Chemically Synthesized
QVQLQESGGGLVQAGGSLRLSCAASGNISTSYTMGWYRQAPGKEREFVAAIANGTTTYYADSVKGRFTISRDNAKNTVYLQMNSLKPEDTAVYYCAAAYQWDEYGPTYWYWGQGTQVTVSS

SEQ ID NO: 3822 - protein, 118 aa, Artificial Sequence
  Chemically Synthesized
QVQLQESGGGLVQAGGSLRLSCAASGTIFYYRPMGWYRQAPGKEREFVAGISKGTNTNYADSVKGRFTISRDNAKNTVYLQMNSLKPEDTAVYYCAANGRVGWPFAYWGQGTQVTVSS

SEQ ID NO: 3823 - protein, 122 aa, Artificial Sequence
  Chemically Synthesized
QVQLQESGGGLVQAGGSLRLSCAASGYIFGVYDMGWYRQAPGKERELVATISAGGTTNYADSVKGRFTISRDNAKNTVYLQMNSLKPEDTAVYYCAAYTDYSPYDGAALVYWGQGTQVTVSS

SEQ ID NO: 3824 - protein, 118 aa, Artificial Sequence
  Chemically Synthesized
QVQLQESGGGLVQAGGSLRLSCAASGSIFRRSYMGWYRQAPGKERELVATISYGGTTYYADSVKGRFTISRDNAKNTVYLQMNSLKPEDTAVYYCAVYYYARNYHRYWGQGTQVTVSS

SEQ ID NO: 3825 - protein, 126 aa, Artificial Sequence
  Chemically Synthesized
QVQLQESGGGLVQAGGSLRLSCAASGTISGEEDMGWYRQAPGKERELVAAIDDGATTYYADSVKGRFTISRDNAKNTVYLQMNSLKPEDTAVYYCAVYVYYYYYYGIDEAYDLDYWGQGTQVTVSS

SEQ ID NO: 3826 - protein, 118 aa, Artificial Sequence
  Chemically Synthesized
QVQLQESGGGLVQAGGSLRLSCAASGSISNTQTMGWYRQAPGKEREFVAAINGGGNTNYADSVKGRFTISRDNAKNTVYLQMNSLKPEDTAVYYCAVYGDYYVRLFYWGQGTQVTVSS

SEQ ID NO: 3827 - protein, 117 aa, Artificial Sequence
  Chemically Synthesized
QVQLQESGGGLVQAGGSLRLSCAASGYISATRAMGWYRQAPGKEREFVASIARGTNTYADSVKGRFTISRDNAKNTVYLQMNSLKPEDTAVYYCAADDWYLVHLYYWGQGTQVTVSS

SEQ ID NO: 3828 - protein, 125 aa, Artificial Sequence
  Chemically Synthesized
QVQLQESGGGLVQAGGSLRLSCAASGNISSRIMGWYRQAPGKEREFVAAITYGASTNYADSVKGRFTISRDNAKNTVYLQMNSLKPEDTAVYYCAAIDTGVLEPYVAWSSTHAYWGQGTQVTVSS

SEQ ID NO: 3829 - protein, 118 aa, Artificial Sequence
  Chemically Synthesized
QVQLQESGGGLVQAGGSLRLSCAASGNIFVDKLMGWYRQAPGKERELVATINNGSITNYADSVKGRFTISRDNAKNTVYLQMNSLKPEDTAVYYCAAPGQKATYLFYWGQGTQVTVSS

SEQ ID NO: 3830 - protein, 118 aa, Artificial Sequence
  Chemically Synthesized
QVQLQESGGGLVQAGGSLRLSCAASGNISRGIVMGWYRQAPGKEREFVATIGVGGSTNYADSVKGRFTISRDNAKNTVYLQMNSLKPEDTAVYYCAAHRGLISRLPYWGQGTQVTVSS

SEQ ID NO: 3831 - protein, 118 aa, Artificial Sequence
  Chemically Synthesized
QVQLQESGGGLVQAGGSLRLSCAASGSISLSYYMGWYRQAPGKERELVATISSGANTYYADSVKGRFTISRDNAKNTVYLQMNSLKPEDTAVYYCAAWDGQYGQFYYWGQGTQVTVSS

SEQ ID NO: 3832 - protein, 121 aa, Artificial Sequence
  Chemically Synthesized
QVQLQESGGGLVQAGGSLRLSCAASGSISTYYWMGWYRQAPGKERELVASISTVVVPYADSVKGRFTISRDNAKNTVYLQMNSLKPEDTAVYYCAVVDRDRGGEFLEYYYWGQGTQVTVSS

SEQ ID NO: 3833 - protein, 125 aa, Artificial Sequence
  Chemically Synthesized
QVQLQESGGGLVQAGGSLRLSCAASGTIFWRASMGWYRQAPGKEREFVATITPGSSTNYADSVKGRFTISRDNAKNTVYLQMNSLKPEDTAVYYCAAYNWPYDKYRWYHSTSLYWGQGTQVTVSS

SEQ ID NO: 3834 - protein, 117 aa, Artificial Sequence
  Chemically Synthesized
QVQLQESGGGLVQAGGSLRLSCAASGYIFHLAMGWYRQAPGKERELVATIDVGAITNYADSVKGRFTISRDNAKNTVYLQMNSLKPEDTAVYYCAANTYDVLYYYYWGQGTQVTVSS

SEQ ID NO: 3835 - protein, 121 aa, Artificial Sequence
  Chemically Synthesized
QVQLQESGGGLVQAGGSLRLSCAASGNIFDRRKMGWYRQAPGKERELVAAISRGSRPYADSVKGRFTISRDNAKNTVYLQMNSLKPEDTAVYYCAVDWPIYYTGDYLHNYWGQGTQVTVSS

SEQ ID NO: 3836 - protein, 122 aa, Artificial Sequence
  Chemically Synthesized
QVQLQESGGGLVQAGGSLRLSCAASGNISYASNMGWYRQAPGKERELVATIAVGSSNQYADSVKGRFTISRDNAKNTVYLQMNSLKPEDTAVYYCAARSAQLEWGGDGHSYWGQGTQVTVSS

SEQ ID NO: 3837 - protein, 118 aa, Artificial Sequence
  Chemically Synthesized
QVQLQESGGGLVQAGGSLRLSCAASGSISYIPSMGWYRQAPGKERELVASIGGGTSTNYADSVKGRFTISRDNAKNTVYLQMNSLKPEDTAVYYCAASSYLQPSLGYWGQGTQVTVSS

SEQ ID NO: 3838 - protein, 122 aa, Artificial Sequence
  Chemically Synthesized
QVQLQESGGGLVQAGGSLRLSCAASGSISVQSDMGWYRQAPGKEREFVASINRGTSTYYADSVKGRFTISRDNAKNTVYLQMNSLKPEDTAVYYCAVSRINGWDYVPLHRYWGQGTQVTVSS

SEQ ID NO: 3839 - protein, 118 aa, Artificial Sequence
  Chemically Synthesized
QVQLQESGGGLVQAGGSLRLSCAASGTIFAIVYMGWYRQAPGKERELVASIDNGSSTNYADSVKGRFTISRDNAKNTVYLQMNSLKPEDTAVYYCAVYYSYLYYHYYWGQGTQVTVSS

SEQ ID NO: 3840 - protein, 118 aa, Artificial Sequence
  Chemically Synthesized
QVQLQESGGGLVQAGGSLRLSCAASGYIFYDNLMGWYRQAPGKERELVAAITYGGSTYYADSVKGRFTISRDNAKNTVYLQMNSLKPEDTAVYYCAAGGRTYDYHGYWGQGTQVTVSS

SEQ ID NO: 3841 - protein, 119 aa, Artificial Sequence
  Chemically Synthesized
QVQLQESGGGLVQAGGSLRLSCAASGNIFRGRGMGWYRQAPGKERELVATIAYGTITNYADSVKGRFTISRDNAKNTVYLQMNSLKPEDTAVYYCAVYHRNNGRAHRYWGQGTQVTVSS

SEQ ID NO: 3842 - protein, 118 aa, Artificial Sequence
  Chemically Synthesized
QVQLQESGGGLVQAGGSLRLSCAASGTIFTIYDMGWYRQAPGKEREFVAAIANGTTTYYADSVKGRFTISRDNAKNTVYLQMNSLKPEDTAVYYCAVYPDDYFYFYYWGQGTQVTVSS

SEQ ID NO: 3843 - protein, 117 aa, Artificial Sequence
  Chemically Synthesized
QVQLQESGGGLVQAGGSLRLSCAASGTIFASTMGWYRQAPGKERELVAAIGDGGSTYYADSVKGRFTISRDNAKNTVYLQMNSLKPEDTAVYYCAAYKYAIHAYDYWGQGTQVTVSS

SEQ ID NO: 3844 - protein, 121 aa, Artificial Sequence
  Chemically Synthesized
QVQLQESGGGLVQAGGSLRLSCAASGNISWYQDMGWYRQAPGKEREFVASIDSVLLPYADSVKGRFTISRDNAKNTVYLQMNSLKPEDTAVYYCAVPRRYGFDTAPFLVYWGQGTQVTVSS

SEQ ID NO: 3845 - protein, 118 aa, Artificial Sequence
  Chemically Synthesized
QVQLQESGGGLVQAGGSLRLSCAASGTISPRAFMGWYRQAPGKEREFVASIAGGGNTYYADSVKGRFTISRDNAKNTVYLQMNSLKPEDTAVYYCAANASDDGSHVYWGQGTQVTVSS

SEQ ID NO: 3846 - protein, 110 aa, Artificial Sequence
  Chemically Synthesized
QVQLQESGGGLVQAGGSLRLSCAASGNFLSVLMGWYRQAPGKERELVASNQYADSVKGRFTISRDNAKNTVYLQMNSLKPEDTAVYYCAAGGATEPHWYWGQGTQVTVSS

SEQ ID NO: 3847 - protein, 119 aa, Artificial Sequence
  Chemically Synthesized
QVQLQESGGGLVQAGGSLRLSCAASGTISVQLDMGWYRQAPGKEREFVAAITFGANTNYADSVKGRFTISRDNAKNTVYLQMNSLKPEDTAVYYCAVDRSVGRDDHTYWGQGTQVTVSS

SEQ ID NO: 3848 - protein, 122 aa, Artificial Sequence
  Chemically Synthesized
QVQLQESGGGLVQAGGSLRLSCAASGNIFYVNVMGWYRQAPGKEREFVAAIGTGSSTYYADSVKGRFTISRDNAKNTVYLQMNSLKPEDTAVYYCAVERYRRRGRGNGHYYWGQGTQVTVSS

SEQ ID NO: 3849 - protein, 113 aa, Artificial Sequence
  Chemically Synthesized
QVQLQESGGGLVQAGGSLRLSCAASGNIFDATNMGWYRQAPGKERELVATIDRGTNTYYADSVKGRFTISRDNAKNTVYLQMNSLKPEDTAVYYCAVWFTLYWGQGTQVTVSS

SEQ ID NO: 3850 - protein, 117 aa, Artificial Sequence
  Chemically Synthesized
QVQLQESGGGLVQAGGSLRLSCAASGTIFAASMGWYRQAPGKEREFVAAITYGSITYYADSVKGRFTISRDNAKNTVYLQMNSLKPEDTAVYYCAAGGVYAYYHYYWGQGTQVTVSS

SEQ ID NO: 3851 - protein, 118 aa, Artificial Sequence
  Chemically Synthesized
QVQLQESGGGLVQAGGSLRLSCAASGTISYYYVMGWYRQAPGKEREFVAAISYGTNTNYADSVKGRFTISRDNAKNTVYLQMNSLKPEDTAVYYCAAAWYRYKPFPYWGQGTQVTVSS

SEQ ID NO: 3852 - protein, 117 aa, Artificial Sequence
  Chemically Synthesized
QVQLQESGGGLVQAGGSLRLSCAASGTISPGSMGWYRQAPGKERELVAAISDGSTTNYADSVKGRFTISRDNAKNTVYLQMNSLKPEDTAVYYCAARGDYLYELAYWGQGTQVTVSS

SEQ ID NO: 3853 - protein, 112 aa, Artificial Sequence
  Chemically Synthesized
QVQLQESGGGLVQAGGSLRLSCAASGNIFYTYAMGWYRQAPGKERELVAAISDGGTTNYADSVKGRFTISRDNAKNTVYLQMNSLKPEDTAVYYCAAQLLYWGQGTQVTVSS

SEQ ID NO: 3854 - protein, 122 aa, Artificial Sequence
  Chemically Synthesized
QVQLQESGGGLVQAGGSLRLSCAASGYIFRDGEMGWYRQAPGKERELVATISWGTITYYADSVKGRFTISRDNAKNTVYLQMNSLKPEDTAVYYCAADTTNPSYPHDYHVYWGQGTQVTVSS

SEQ ID NO: 3855 - protein, 117 aa, Artificial Sequence
  Chemically Synthesized
QVQLQESGGGLVQAGGSLRLSCAASGNISDTNMGWYRQAPGKERELVAAIGPGSITYYADSVKGRFTISRDNAKNTVYLQMNSLKPEDTAVYYCAVDAQPDSLHGYWGQGTQVTVSS

SEQ ID NO: 3856 - protein, 122 aa, Artificial Sequence
  Chemically Synthesized
QVQLQESGGGLVQAGGSLRLSCAASGTIFPYTTMGWYRQAPGKERELVAAIGAGTTTYYADSVKGRFTISRDNAKNTVYLQMNSLKPEDTAVYYCAVTQKPWWSLYAVYYYWGQGTQVTVSS

SEQ ID NO: 3857 - protein, 118 aa, Artificial Sequence
  Chemically Synthesized
QVQLQESGGGLVQAGGSLRLSCAASGTIFPLLFMGWYRQAPGKEREFVASIADGSITYYADSVKGRFTISRDNAKNTVYLQMNSLKPEDTAVYYCAVWYTRGYLLTYWGQGTQVTVSS

SEQ ID NO: 3858 - protein, 122 aa, Artificial Sequence
  Chemically Synthesized
QVQLQESGGGLVQAGGSLRLSCAASGTIFAPYGMGWYRQAPGKERELVAGIGPGGNTNYADSVKGRFTISRDNAKNTVYLQMNSLKPEDTAVYYCAVTWYRDVRPRRWYRYWGQGTQVTVSS

SEQ ID NO: 3859 - protein, 117 aa, Artificial Sequence
  Chemically Synthesized
QVQLQESGGGLVQAGGSLRLSCAASGYISVPSDMGWYRQAPGKERELVAGILPYADSVKGRFTISRDNAKNTVYLQMNSLKPEDTAVYYCAANATADYDRNDYHWYWGQGTQVTVSS

SEQ ID NO: 3860 - protein, 118 aa, Artificial Sequence
  Chemically Synthesized
QVQLQESGGGLVQAGGSLRLSCAASGNISYVAIMGWYRQAPGKERELVAGIGRGATTNYADSVKGRFTISRDNAKNTVYLQMNSLKPEDTAVYYCAAYGDYLYWLIYWGQGTQVTVSS

SEQ ID NO: 3861 - protein, 126 aa, Artificial Sequence
  Chemically Synthesized
QVQLQESGGGLVQAGGSLRLSCAASGTISGDFSMGWYRQAPGKERELVASIGYGASTNYADSVKGRFTISRDNAKNTVYLQMNSLKPEDTAVYYCAAWTPSVYTYLLQDKQGLGYWGQGTQVTVSS

SEQ ID NO: 3862 - protein, 118 aa, Artificial Sequence
  Chemically Synthesized
QVQLQESGGGLVQAGGSLRLSCAASGNIFVQKYMGWYRQAPGKERELVAGIDGGSTTNYADSVKGRFTISRDNAKNTVYLQMNSLKPEDTAVYYCAVDVSGAGNHAYWGQGTQVTVSS

SEQ ID NO: 3863 - protein, 123 aa, Artificial Sequence
  Chemically Synthesized
QVQLQESGGGLVQAGGSLRLSCAASGYIFYYGQMGWYRQAPGKEREFVASIGKGTTTYYADSVKGRFTISRDNAKNTVYLQMNSLKPEDTAVYYCAVNQQAAYYPYVSTFYYWGQGTQVTVSS

SEQ ID NO: 3864 - protein, 126 aa, Artificial Sequence
  Chemically Synthesized
QVQLQESGGGLVQAGGSLRLSCAASGYISYPQSMGWYRQAPGKERELVAAIAYGGSTNYADSVKGRFTISRDNAKNTVYLQMNSLKPEDTAVYYCAVDSTYPRGYDYDYPFAFYYWGQGTQVTVSS

SEQ ID NO: 3865 - protein, 123 aa, Artificial Sequence
  Chemically Synthesized
QVQLQESGGGLVQAGGSLRLSCAASGYIFYLRTMGWYRQAPGKERELVAAIAYGATTYYADSVKGRFTISRDNAKNTVYLQMNSLKPEDTAVYYCAVSYYIDSLADRAYHPYWGQGTQVTVSS

SEQ ID NO: 3866 - protein, 118 aa, Artificial Sequence
  Chemically Synthesized
QVQLQESGGGLVQAGGSLRLSCAASGNISSHDYMGWYRQAPGKERELVATITYGATTNYADSVKGRFTISRDNAKNTVYLQMNSLKPEDTAVYYCAAQLLRKYLHEYWGQGTQVTVSS

SEQ ID NO: 3867 - protein, 118 aa, Artificial Sequence
  Chemically Synthesized
QVQLQESGGGLVQAGGSLRLSCAASGTISQVGGMGWYRQAPGKERELVATIADGGITNYADSVKGRFTISRDNAKNTVYLQMNSLKPEDTAVYYCAAVRVGKYLYWYWGQGTQVTVSS

SEQ ID NO: 3868 - protein, 118 aa, Artificial Sequence
  Chemically Synthesized
QVQLQESGGGLVQAGGSLRLSCAASGSISNRYYMGWYRQAPGKEREFVASISRGSNTNYADSVKGRFTISRDNAKNTVYLQMNSLKPEDTAVYYCAAVSRYGLLLSYWGQGTQVTVSS

SEQ ID NO: 3869 - protein, 126 aa, Artificial Sequence
  Chemically Synthesized
QVQLQESGGGLVQAGGSLRLSCAASGSIFNRKSMGWYRQAPGKERELVAGIASGTNTYYADSVKGRFTISRDNAKNTVYLQMNSLKPEDTAVYYCAALYRYAYLPYDYNYRQYSYWGQGTQVTVSS

SEQ ID NO: 3870 - protein, 126 aa, Artificial Sequence
  Chemically Synthesized
QVQLQESGGGLVQAGGSLRLSCAASGNISNKSLMGWYRQAPGKERELVAAINGGANTYYADSVKGRFTISRDNAKNTVYLQMNSLKPEDTAVYYCAVYRPYEPVYHHQPDDQLQYWGQGTQVTVSS

SEQ ID NO: 3871 - protein, 118 aa, Artificial Sequence
  Chemically Synthesized
QVQLQESGGGLVQAGGSLRLSCAASGSISWTYPMGWYRQAPGKEREFVATIGSGATTNYADSVKGRFTISRDNAKNTVYLQMNSLKPEDTAVYYCAAPLVRLPNHVYWGQGTQVTVSS

SEQ ID NO: 3872 - protein, 118 aa, Artificial Sequence
  Chemically Synthesized
QVQLQESGGGLVQAGGSLRLSCAASGTISYSGYMGWYRQAPGKEREFVATIGGGATTNYADSVKGRFTISRDNAKNTVYLQMNSLKPEDTAVYYCAAYESNSAYYHYWGQGTQVTVSS

SEQ ID NO: 3873 - protein, 121 aa, Artificial Sequence
  Chemically Synthesized
QVQLQESGGGLVQAGGSLRLSCAASGTISGGPTMGWYRQAPGKERELVAAISTGSNTYYADSVKGRFTISRDNAKNTVYLQMNSLKPEDTAVYYCAVPRIQYSGGQTYFYWGQGTQVTVSS

SEQ ID NO: 3874 - protein, 122 aa, Artificial Sequence
  Chemically Synthesized
QVQLQESGGGLVQAGGSLRLSCAASGYIFGYYYMGWYRQAPGKERELVAAIAGGATTNYADSVKGRFTISRDNAKNTVYLQMNSLKPEDTAVYYCAAYGPYLIWYVDNHWYWGQGTQVTVSS

SEQ ID NO: 3875 - protein, 118 aa, Artificial Sequence
  Chemically Synthesized
QVQLQESGGGLVQAGGSLRLSCAASGTISPKLAMGWYRQAPGKERELVAAISGGGITNYADSVKGRFTISRDNAKNTVYLQMNSLKPEDTAVYYCAAVFDKSNWLTYWGQGTQVTVSS

SEQ ID NO: 3876 - protein, 118 aa, Artificial Sequence
  Chemically Synthesized
QVQLQESGGGLVQAGGSLRLSCAASGTISGYSYMGWYRQAPGKERELVAAIGTGGNTNYADSVKGRFTISRDNAKNTVYLQMNSLKPEDTAVYYCAVQTNFSQDHPYWGQGTQVTVSS

SEQ ID NO: 3877 - protein, 126 aa, Artificial Sequence
  Chemically Synthesized
QVQLQESGGGLVQAGGSLRLSCAASGYISDYADMGWYRQAPGKERELVAGIDRGGITNYADSVKGRFTISRDNAKNTVYLQMNSLKPEDTAVYYCAVDHNVRYDFAVLDKYFHAYWGQGTQVTVSS

SEQ ID NO: 3878 - protein, 116 aa, Artificial Sequence
  Chemically Synthesized
QVQLQESGGGLVQAGGSLRLSCAASGYISVVKMGWYRQAPGKERELVATINYGGTTYYADSVKGRFTISRDNAKNTVYLQMNSLKPEDTAVYYCAAPTADRSYAYWGQGTQVTVSS

SEQ ID NO: 3879 - protein, 118 aa, Artificial Sequence
  Chemically Synthesized
QVQLQESGGGLVQAGGSLRLSCAASGNIFPYRFMGWYRQAPGKERELVAGIGRGATTNYADSVKGRFTISRDNAKNTVYLQMNSLKPEDTAVYYCAVRGQRRWIFSYWGQGTQVTVSS

SEQ ID NO: 3880 - protein, 122 aa, Artificial Sequence
  Chemically Synthesized
QVQLQESGGGLVQAGGSLRLSCAASGTISTRRYMGWYRQAPGKERELVAAITRGGNTYYADSVKGRFTISRDNAKNTVYLQMNSLKPEDTAVYYCAVRYYGRGQTNRVHDYWGQGTQVTVSS

SEQ ID NO: 3881 - protein, 118 aa, Artificial Sequence
  Chemically Synthesized
QVQLQESGGGLVQAGGSLRLSCAASGTISRAGRMGWYRQAPGKERELVASIAWGTSTYYADSVKGRFTISRDNAKNTVYLQMNSLKPEDTAVYYCAARYYYSAALRYWGQGTQVTVSS

SEQ ID NO: 3882 - protein, 118 aa, Artificial Sequence
  Chemically Synthesized
QVQLQESGGGLVQAGGSLRLSCAASGNIFRRAAMGWYRQAPGKEREFVAAITSGSNTYYADSVKGRFTISRDNAKNTVYLQMNSLKPEDTAVYYCAAYIAFWYAFQYWGQGTQVTVSS

SEQ ID NO: 3883 - protein, 122 aa, Artificial Sequence
  Chemically Synthesized
QVQLQESGGGLVQAGGSLRLSCAASGTIFYRLRMGWYRQAPGKERELVAAIGYGSSTYYADSVKGRFTISRDNAKNTVYLQMNSLKPEDTAVYYCAAIWRANTYYSRPHYYWGQGTQVTVSS

SEQ ID NO: 3884 - protein, 118 aa, Artificial Sequence
  Chemically Synthesized
QVQLQESGGGLVQAGGSLRLSCAASGYISRYERMGWYRQAPGKERELVATIGDGAITNYADSVKGRFTISRDNAKNTVYLQMNSLKPEDTAVYYCAVPWPYRAPHSYWGQGTQVTVSS

SEQ ID NO: 3885 - protein, 126 aa, Artificial Sequence
  Chemically Synthesized
QVQLQESGGGLVQAGGSLRLSCAASGNISGWIVMGWYRQAPGKERELVAAISVGTITNYADSVKGRFTISRDNAKNTVYLQMNSLKPEDTAVYYCAVATRYKRLDSLSIPLDHWYWGQGTQVTVSS

SEQ ID NO: 3886 - protein, 115 aa, Artificial Sequence
  Chemically Synthesized
QVQLQESGGGLVQAGGSLRLSCAASGSIFYVNNMGWYRQAPGKERELVASISPGTITNYADSVKGRFTISRDNAKNTVYLQMNSLKPEDTAVYYCALLTTLTIYWGQGTQVTVSS

SEQ ID NO: 3887 - protein, 118 aa, Artificial Sequence
  Chemically Synthesized
QVQLQESGGGLVQAGGSLRLSCAASGSISHYVYMGWYRQAPGKERELVASINRGTNTYYADSVKGRFTISRDNAKNTVYLQMNSLKPEDTAVYYCAVVPSARSRHPYWGQGTQVTVSS

SEQ ID NO: 3888 - protein, 117 aa, Artificial Sequence
  Chemically Synthesized
QVQLQESGGGLVQAGGSLRLSCAASGNISHVSMGWYRQAPGKERELVASINNGTSTNYADSVKGRFTISRDNAKNTVYLQMNSLKPEDTAVYYCAASVYTIPYLVYWGQGTQVTVSS

SEQ ID NO: 3889 - protein, 118 aa, Artificial Sequence
  Chemically Synthesized
QVQLQESGGGLVQAGGSLRLSCAASGSIFQLRVMGWYRQAPGKERELVASITQGSTTYYADSVKGRFTISRDNAKNTVYLQMNSLKPEDTAVYYCAAESRSGTAFRYWGQGTQVTVSS

SEQ ID NO: 3890 - protein, 118 aa, Artificial Sequence
  Chemically Synthesized
QVQLQESGGGLVQAGGSLRLSCAASGTISSTQSMGWYRQAPGKERELVATITDGTSTYYADSVKGRFTISRDNAKNTVYLQMNSLKPEDTAVYYCAVSRRYYWRFRYWGQGTQVTVSS

SEQ ID NO: 3891 - protein, 122 aa, Artificial Sequence
  Chemically Synthesized
QVQLQESGGGLVQAGGSLRLSCAASGSISASYYMGWYRQAPGKERELVATIAVGTTTNYADSVKGRFTISRDNAKNTVYLQMNSLKPEDTAVYYCAALYDTYYEKGTYHLYWGQGTQVTVSS

SEQ ID NO: 3892 - protein, 117 aa, Artificial Sequence
  Chemically Synthesized
QVQLQESGGGLVQAGGSLRLSCAASGYIFPWYLMGWYRQAPGKEREFVAAIGSVVLPYADSVKGRFTISRDNAKNTVYLQMNSLKPEDTAVYYCAVKGRAYSYYGYWGQGTQVTVSS

SEQ ID NO: 3893 - protein, 118 aa, Artificial Sequence
  Chemically Synthesized
QVQLQESGGGLVQAGGSLRLSCAASGNIFRRWSMGWYRQAPGKERELVASITSGASTYYADSVKGRFTISRDNAKNTVYLQMNSLKPEDTAVYYCAVTRELRHSFIYWGQGTQVTVSS

SEQ ID NO: 3894 - protein, 122 aa, Artificial Sequence
  Chemically Synthesized
QVQLQESGGGLVQAGGSLRLSCAASGNISVAFIMGWYRQAPGKERELVAAISHGGTTYYADSVKGRFTISRDNAKNTVYLQMNSLKPEDTAVYYCAVAPRYLRLYATAHWYWGQGTQVTVSS

SEQ ID NO: 3895 - protein, 118 aa, Artificial Sequence
  Chemically Synthesized
QVQLQESGGGLVQAGGSLRLSCAASGNIFDSQDMGWYRQAPGKEREFVASIAAGTSTNYADSVKGRFTISRDNAKNTVYLQMNSLKPEDTAVYYCAVDGNIGYWFRYWGQGTQVTVSS

SEQ ID NO: 3896 - protein, 122 aa, Artificial Sequence
  Chemically Synthesized
QVQLQESGGGLVQAGGSLRLSCAASGNISGDDAMGWYRQAPGKERELVASITYGTSTNYADSVKGRFTISRDNAKNTVYLQMNSLKPEDTAVYYCAAHYTGHFPVVWQFEYWGQGTQVTVSS

SEQ ID NO: 3897 - protein, 121 aa, Artificial Sequence
  Chemically Synthesized
QVQLQESGGGLVQAGGSLRLSCAASGTIFSTNDMGWYRQAPGKEREFVAGITAGANTYYADSVKGRFTISRDNAKNTVYLQMNSLKPEDTAVYYCAVAYNYIDYSFRLIYWGQGTQVTVSS

SEQ ID NO: 3898 - protein, 119 aa, Artificial Sequence
  Chemically Synthesized
QVQLQESGGGLVQAGGSLRLSCAASGNIFYYYKMGWYRQAPGKEREFVAGIGQGGAITYYADSVKGRFTISRDNAKNTVYLQMNSLKPEDTAVYYCAVRFYGLRDHVYWGQGTQVTVSS

SEQ ID NO: 3899 - protein, 117 aa, Artificial Sequence
  Chemically Synthesized
QVQLQESGGGLVQAGGSLRLSCAASGYFLRCWMGWYRQAPGKERELVAGITEGTITYYADSVKGRFTISRDNAKNTVYLQMNSLKPEDTAVYYCAVALPYSVPFYYWGQGTQVTVSS

SEQ ID NO: 3900 - protein, 118 aa, Artificial Sequence
  Chemically Synthesized
QVQLQESGGGLVQAGGSLRLSCAASGNIFELPGMGWYRQAPGKEREFVASIGYGGITYYADSVKGRFTISRDNAKNTVYLQMNSLKPEDTAVYYCAARRRTWHAYRYWGQGTQVTVSS

SEQ ID NO: 3901 - protein, 122 aa, Artificial Sequence
  Chemically Synthesized
QVQLQESGGGLVQAGGSLRLSCAASGTIFGVQNMGWYRQAPGKEREFVAAITLGATTNYADSVKGRFTISRDNAKNTVYLQMNSLKPEDTAVYYCAAYYQTHYVFRRGHQYWGQGTQVTVSS

SEQ ID NO: 3902 - protein, 118 aa, Artificial Sequence
  Chemically Synthesized
QVQLQESGGGLVQAGGSLRLSCAASGYISRAGFMGWYRQAPGKERELVASINRGGITYYADSVKGRFTISRDNAKNTVYLQMNSLKPEDTAVYYCAVYGPRWFKYGYWGQGTQVTVSS

SEQ ID NO: 3903 - protein, 118 aa, Artificial Sequence
  Chemically Synthesized
QVQLQESGGGLVQAGGSLRLSCAASGTIFRWRPMGWYRQAPGKERELVASINAGATTNYADSVKGRFTISRDNAKNTVYLQMNSLKPEDTAVYYCAAVAYTYRSFHYWGQGTQVTVSS

SEQ ID NO: 3904 - protein, 117 aa, Artificial Sequence
  Chemically Synthesized
QVQLQESGGGLVQAGGSLRLSCAASGTIFIWLMGWYRQAPGKERELVASIADGSTTNYADSVKGRFTISRDNAKNTVYLQMNSLKPEDTAVYYCAVYRTGLWDYSYWGQGTQVTVSS

SEQ ID NO: 3905 - protein, 114 aa, Artificial Sequence
  Chemically Synthesized
QVQLQESGGGLVQAGGSLRLSCAASGSILMGWYRQAPGKEREFVASIDVGSTTYYADSVKGRFTISRDNAKNTVYLQMNSLKPEDTAVYYCAAGDYGADNHVYWGQGTQVTVSS

SEQ ID NO: 3906 - protein, 118 aa, Artificial Sequence
  Chemically Synthesized
QVQLQESGGGLVQAGGSLRLSCAASGSIFYPAPMGWYRQAPGKEREFVATIDGGANTYYADSVKGRFTISRDNAKNTVYLQMNSLKPEDTAVYYCAVDYLPIDYHGYWGQGTQVTVSS

SEQ ID NO: 3907 - protein, 117 aa, Artificial Sequence
  Chemically Synthesized
QVQLQESGGGLVQAGGSLRLSCAASGTIFDAVAMGWYRQAPGKEREFVAAINRGSNTNYADSVKGRFTISRDNAKNTVYLQMNSLKPEDTAVYYCAVLYSCTNRFYWGQGTQVTVSS

SEQ ID NO: 3908 - protein, 115 aa, Artificial Sequence
  Chemically Synthesized
QVQLQESGGGLVQAGGSLRLSCAASGYIFSTGHMGWYRQAPGKEREFVASINYGANTYYADSVKGRFTISRDNAKNTVYLQMNSLKPEDTAVYYCAATTCRLIYWGQGTQVTVSS

SEQ ID NO: 3909 - protein, 117 aa, Artificial Sequence
  Chemically Synthesized
QVQLQESGGGLVQAGGSLRLSCAASGTIFFDSMGWYRQAPGKERELVATISGGTTTYYADSVKGRFTISRDNAKNTVYLQMNSLKPEDTAVYYCAAIGSGHYALEYWGQGTQVTVSS

SEQ ID NO: 3910 - protein, 122 aa, Artificial Sequence
  Chemically Synthesized
QVQLQESGGGLVQAGGSLRLSCAASGNISRYVVMGWYRQAPGKEREFVASIASGTTTNYADSVKGRFTISRDNAKNTVYLQMNSLKPEDTAVYYCAVRRGWRWYDISSHGYWGQGTQVTVSS

SEQ ID NO: 3911 - protein, 118 aa, Artificial Sequence
  Chemically Synthesized
QVQLQESGGGLVQAGGSLRLSCAASGSIFAGYTMGWYRQAPGKEREFVAGIAYGGTTNYADSVKGRFTISRDNAKNTVYLQMNSLKPEDTAVYYCAAYAYVYSGHLYWGQGTQVTVSS

SEQ ID NO: 3912 - protein, 109 aa, Artificial Sequence
  Chemically Synthesized
QVQLQESGGGLVQAGGSLRLSCAASGSISPVGKMGWYRQAPGKERELVAGIDPGGNTNYADSVKGRFTISRDNAKNTVYLQMNSLKPEDTAVYYCAVYWGQGTQVTVSS

SEQ ID NO: 3913 - protein, 118 aa, Artificial Sequence
  Chemically Synthesized
QVQLQESGGGLVQAGGSLRLSCAASGNISWSRSMGWYRQAPGKEREFVATIARGGITNYADSVKGRFTISRDNAKNTVYLQMNSLKPEDTAVYYCAARYGRYYGHVYWGQGTQVTVSS

SEQ ID NO: 3914 - protein, 118 aa, Artificial Sequence
  Chemically Synthesized
QVQLQESGGGLVQAGGSLRLSCAASGTISYALPMGWYRQAPGKEREFVAAISRGTSTYYADSVKGRFTISRDNAKNTVYLQMNSLKPEDTAVYYCAVIWRRLHAHRYWGQGTQVTVSS

SEQ ID NO: 3915 - protein, 122 aa, Artificial Sequence
  Chemically Synthesized
QVQLQESGGGLVQAGGSLRLSCAASGTISGYDTMGWYRQAPGKERELVATISLGTITNYADSVKGRFTISRDNAKNTVYLQMNSLKPEDTAVYYCAVRHYYWGLWYAFHDYWGQGTQVTVSS

SEQ ID NO: 3916 - protein, 113 aa, Artificial Sequence
  Chemically Synthesized
QVQLQESGGGLVQAGGSLRLSCAASGYIMGWYRQAPGKERELVASIDTGTITYYADSVKGRFTISRDNAKNTVYLQMNSLKPEDTAVYYCAAWYQDTPWYPYWGQGTQVTVSS

SEQ ID NO: 3917 - protein, 118 aa, Artificial Sequence
  Chemically Synthesized
QVQLQESGGGLVQAGGSLRLSCAASGYISRRGYMGWYRQAPGKEREFVAAITKGGSTYYADSVKGRFTISRDNAKNTVYLQMNSLKPEDTAVYYCAAKPYYADYHTYWGQGTQVTVSS

SEQ ID NO: 3918 - protein, 118 aa, Artificial Sequence
  Chemically Synthesized
QVQLQESGGGLVQAGGSLRLSCAASGYISRHWYMGWYRQAPGKERELVAAIAVGGNTYYADSVKGRFTISRDNAKNTVYLQMNSLKPEDTAVYYCAVRYIYRTYHAYWGQGTQVTVSS

SEQ ID NO: 3919 - protein, 126 aa, Artificial Sequence
  Chemically Synthesized
QVQLQESGGGLVQAGGSLRLSCAASGYISRRSPMGWYRQAPGKEREFVAGIGAGATTYYADSVKGRFTISRDNAKNTVYLQMNSLKPEDTAVYYCAVRYWYSRPYWSQYTYAHAYWGQGTQVTVSS

SEQ ID NO: 3920 - protein, 122 aa, Artificial Sequence
  Chemically Synthesized
QVQLQESGGGLVQAGGSLRLSCAASGTISWRSIMGWYRQAPGKERELVAGINYGAITNYADSVKGRFTISRDNAKNTVYLQMNSLKPEDTAVYYCAANEIYYRYPLDIHQYWGQGTQVTVSS

SEQ ID NO: 3921 - protein, 118 aa, Artificial Sequence
  Chemically Synthesized
QVQLQESGGGLVQAGGSLRLSCAASGNIFRPLRMGWYRQAPGKEREFVATITRGSSTNYADSVKGRFTISRDNAKNTVYLQMNSLKPEDTAVYYCAVRYRFVNYHGYWGQGTQVTVSS

SEQ ID NO: 3922 - protein, 118 aa, Artificial Sequence
  Chemically Synthesized
QVQLQESGGGLVQAGGSLRLSCAASGNISGPYSMGWYRQAPGKEREFVAGIDDGGNTYYADSVKGRFTISRDNAKNTVYLQMNSLKPEDTAVYYCAVYNYHYEHYQYWGQGTQVTVSS

SEQ ID NO: 3923 - protein, 126 aa, Artificial Sequence
  Chemically Synthesized
QVQLQESGGGLVQAGGSLRLSCAASGYISYAFDMGWYRQAPGKEREFVATISQGTNTNYADSVKGRFTISRDNAKNTVYLQMNSLKPEDTAVYYCAVPLDYRYQSESIDEEYHDYWGQGTQVTVSS

SEQ ID NO: 3924 - protein, 122 aa, Artificial Sequence
  Chemically Synthesized
QVQLQESGGGLVQAGGSLRLSCAASGYISGLIGMGWYRQAPGKEREFVASIDYGSNTYYADSVKGRFTISRDNAKNTVYLQMNSLKPEDTAVYYCAVYLYTGYNFITYHSYWGQGTQVTVSS

SEQ ID NO: 3925 - protein, 122 aa, Artificial Sequence
  Chemically Synthesized
QVQLQESGGGLVQAGGSLRLSCAASGYISDSITMGWYRQAPGKEREFVASIAYGGSTYYADSVKGRFTISRDNAKNTVYLQMNSLKPEDTAVYYCAADHYQVVAGNDHYDYWGQGTQVTVSS

SEQ ID NO: 3926 - protein, 118 aa, Artificial Sequence
  Chemically Synthesized
QVQLQESGGGLVQAGGSLRLSCAASGNIFQDKRMGWYRQAPGKERELVATIGAGTITNYADSVKGRFTISRDNAKNTVYLQMNSLKPEDTAVYYCAVKGYYATHVFYWGQGTQVTVSS

SEQ ID NO: 3927 - protein, 122 aa, Artificial Sequence
  Chemically Synthesized
QVQLQESGGGLVQAGGSLRLSCAASGNISYLQSMGWYRQAPGKEREFVAAISYGTNTYYADSVKGRFTISRDNAKNTVYLQMNSLKPEDTAVYYCAVAGGLGYVLFNSHFYWGQGTQVTVSS

SEQ ID NO: 3928 - protein, 118 aa, Artificial Sequence
  Chemically Synthesized
QVQLQESGGGLVQAGGSLRLSCAASGNIFPLRYMGWYRQAPGKERELVASINRGTNTNYADSVKGRFTISRDNAKNTVYLQMNSLKPEDTAVYYCAAYAQNRWQFRYWGQGTQVTVSS

SEQ ID NO: 3929 - protein, 122 aa, Artificial Sequence
  Chemically Synthesized
QVQLQESGGGLVQAGGSLRLSCAASGTISPSRYMGWYRQAPGKEREFVAAISYGGTTYYADSVKGRFTISRDNAKNTVYLQMNSLKPEDTAVYYCAVVYRKWYYTKAGHTYWGQGTQVTVSS

SEQ ID NO: 3930 - protein, 118 aa, Artificial Sequence
  Chemically Synthesized
QVQLQESGGGLVQAGGSLRLSCAASGTIFYRTLMGWYRQAPGKEREFVATIGSGTSTYYADSVKGRFTISRDNAKNTVYLQMNSLKPEDTAVYYCAVVGYYWSRYPYWGQGTQVTVSS

SEQ ID NO: 3931 - protein, 118 aa, Artificial Sequence
  Chemically Synthesized
QVQLQESGGGLVQAGGSLRLSCAASGNIFPQYIMGWYRQAPGKEREFVAAITFGGTNYADSVKGRFTISRDNAKNTVYLQMNSLKPEDTAVYYCAVIYWKRASWLRYWGQGTQVTVSS

SEQ ID NO: 3932 - protein, 122 aa, Artificial Sequence
  Chemically Synthesized
QVQLQESGGGLVQAGGSLRLSCAASGYIFYYYYMGWYRQAPGKEREFVASINYGASTNYADSVKGRFTISRDNAKNTVYLQMNSLKPEDTAVYYCAVSRRYVGYYGARHRYWGQGTQVTVSS

SEQ ID NO: 3933 - protein, 121 aa, Artificial Sequence
  Chemically Synthesized
QVQLQESGGGLVQAGGSLRLSCAASGTIFYILIMGWYRQAPGKERELVAGIDAGGITNYADSVKGRFTISRDNAKNTVYLQMNSLKPEDTAVYYCAVTVAERSLRDIYGYWGQGTQVTVSS

SEQ ID NO: 3934 - protein, 118 aa, Artificial Sequence
  Chemically Synthesized
QVQLQESGGGLVQAGGSLRLSCAASGYISYARVMGWYRQAPGKERELVAAINYGTNTYYADSVKGRFTISRDNAKNTVYLQMNSLKPEDTAVYYCAAYANAWAHHGYWGQGTQVTVSS

SEQ ID NO: 3935 - protein, 118 aa, Artificial Sequence
  Chemically Synthesized
QVQLQESGGGLVQAGGSLRLSCAASGNIFDRRGMGWYRQAPGKERELVAAITDGSSTNYADSVKGRFTISRDNAKNTVYLQMNSLKPEDTAVYYCAVNGAVLRGLSYWGQGTQVTVSS

SEQ ID NO: 3936 - protein, 126 aa, Artificial Sequence
  Chemically Synthesized
QVQLQESGGGLVQAGGSLRLSCAASGNIFPYTRMGWYRQAPGKERELVASITIGANTNYADSVKGRFTISRDNAKNTVYLQMNSLKPEDTAVYYCAAGGAAIYWRYYFGWDPYRYWGQGTQVTVSS

SEQ ID NO: 3937 - protein, 118 aa, Artificial Sequence
  Chemically Synthesized
QVQLQESGGGLVQAGGSLRLSCAASGTISRYQYMGWYRQAPGKERELVAGIATGSITYYADSVKGRFTISRDNAKNTVYLQMNSLKPEDTAVYYCAVKYRYWHHFGYWGQGTQVTVSS

SEQ ID NO: 3938 - protein, 117 aa, Artificial Sequence
  Chemically Synthesized
QVQLQESGGGLVQAGGSLRLSCAASGYIFPDYTMGWYRQAPGKERELVASITRGSNTYYADSVKGRFTISRDNAKNTVYLQMNSLKPEDTAVYYCARALYDYFFDYWGQGTQVTVSS

SEQ ID NO: 3939 - protein, 117 aa, Artificial Sequence
  Chemically Synthesized
QVQLQESGGGLVQAGGSLRLSCAASGSIFLNDSMGWYRQAPGKERELVAGISGGGTTYYADSVKGRFTISRDNAKNTVYLQMNSLKPEDTAVYYCAAYSYRSTNMYWGQGTQVTVSS

SEQ ID NO: 3940 - protein, 118 aa, Artificial Sequence
  Chemically Synthesized
QVQLQESGGGLVQAGGSLRLSCAASGTISGHPRMGWYRQAPGKERELVAGISWGGITYYADSVKGRFTISRDNAKNTVYLQMNSLKPEDTAVYYCAVGLRRRYSLGYWGQGTQVTVSS

SEQ ID NO: 3941 - protein, 122 aa, Artificial Sequence
  Chemically Synthesized
QVQLQESGGGLVQAGGSLRLSCAASGNIFITYAMGWYRQAPGKERELVATINYGSNTNYADSVKGRFTISRDNAKNTVYLQMNSLKPEDTAVYYCAAWPASPPYYVWSYWYWGQGTQVTVSS

SEQ ID NO: 3942 - protein, 118 aa, Artificial Sequence
  Chemically Synthesized
QVQLQESGGGLVQAGGSLRLSCAASGYIFRYKLMGWYRQAPGKERELVAAIDRGSTTYYADSVKGRFTISRDNAKNTVYLQMNSLKPEDTAVYYCAAAVPHYSRHYYWGQGTQVTVSS

SEQ ID NO: 3943 - protein, 122 aa, Artificial Sequence
  Chemically Synthesized
QVQLQESGGGLVQAGGSLRLSCAASGTIFFFPFMGWYRQAPGKERELVAGIDYGSNTNYADSVKGRFTISRDNAKNTVYLQMNSLKPEDTAVYYCAAYTLRRYHYRHVAYYWGQGTQVTVSS

SEQ ID NO: 3944 - protein, 109 aa, Artificial Sequence
  Chemically Synthesized
QVQLQESGGGLVQAGGSLRLSCAASGSIFTSDHMGWYRQAPGKERELVATITVGSNTYYADSVKGRFTISRDNAKNTVYLQMNSLKPEDTAVYYCAGYWGQGTQVTVSS

SEQ ID NO: 3945 - protein, 118 aa, Artificial Sequence
  Chemically Synthesized
QVQLQESGGGLVQAGGSLRLSCAASGTISDETRMGWYRQAPGKERELVAGIAQGGITYYADSVKGRFTISRDNAKNTVYLQMNSLKPEDTAVYYCAVLGEDFLYFAYWGQGTQVTVSS

SEQ ID NO: 3946 - protein, 122 aa, Artificial Sequence
  Chemically Synthesized
QVQLQESGGGLVQAGGSLRLSCAASGSISARRYMGWYRQAPGKERELVATITRGGNTYYADSVKGRFTISRDNAKNTVYLQMNSLKPEDTAVYYCAARFSYTGISSLYHPYWGQGTQVTVSS

SEQ ID NO: 3947 - protein, 122 aa, Artificial Sequence
  Chemically Synthesized
QVQLQESGGGLVQAGGSLRLSCAASGNIFSKGWMGWYRQAPGKEREFVASITDGSITYYADSVKGRFTISRDNAKNTVYLQMNSLKPEDTAVYYCAVDILYRVAYYDDHSYWGQGTQVTVSS

SEQ ID NO: 3948 - protein, 118 aa, Artificial Sequence
  Chemically Synthesized
QVQLQESGGGLVQAGGSLRLSCAASGSISYYYLMGWYRQAPGKERELVAAIAYGTITNYADSVKGRFTISRDNAKNTVYLQMNSLKPEDTAVYYCAVSDYAIWDYGYWGQGTQVTVSS

SEQ ID NO: 3949 - protein, 125 aa, Artificial Sequence
  Chemically Synthesized
QVQLQESGGGLVQAGGSLRLSCAASGNIFYLTVMGWYRQAPGKERELVATIDGGGSTNYADSVKGRFTISRDNAKNTVYLQMNSLKPEDTAVYYCAAGTDPYYPSYLRLPDFGYWGQGTQVTVSS

SEQ ID NO: 3950 - protein, 117 aa, Artificial Sequence
  Chemically Synthesized
QVQLQESGGGLVQAGGSLRLSCAASGTISRVSMGWYRQAPGKERELVAGISEGGNTNYADSVKGRFTISRDNAKNTVYLQMNSLKPEDTAVYYCAAADQSYDHLGYWGQGTQVTVSS

SEQ ID NO: 3951 - protein, 118 aa, Artificial Sequence
  Chemically Synthesized
QVQLQESGGGLVQAGGSLRLSCAASGSIFPRRPMGWYRQAPGKERELVAAITYGGTTYYADSVKGRFTISRDNAKNTVYLQMNSLKPEDTAVYYCAAYRYGQGYHSYWGQGTQVTVSS

SEQ ID NO: 3952 - protein, 117 aa, Artificial Sequence
  Chemically Synthesized
QVQLQESGGGLVQAGGSLRLSCAASGTISARRYMGWYRQAPGKEREFVATIGGGTTYYADSVKGRFTISRDNAKNTVYLQMNSLKPEDTAVYYCAVTSRRYVTHLYWGQGTQVTVSS

SEQ ID NO: 3953 - protein, 121 aa, Artificial Sequence
  Chemically Synthesized
QVQLQESGGGLVQAGGSLRLSCAASGNISKPPNMGWYRQAPGKEREFVASIGLGGSTNYADSVKGRFTISRDNAKNTVYLQMNSLKPEDTAVYYCAVLDYSTALDATTHYWGQGTQVTVSS

SEQ ID NO: 3954 - protein, 122 aa, Artificial Sequence
  Chemically Synthesized
QVQLQESGGGLVQAGGSLRLSCAASGNISWDSYMGWYRQAPGKERELVAAITKGSTTYYADSVKGRFTISRDNAKNTVYLQMNSLKPEDTAVYYCAVRYGYRLRPYGRHGYWGQGTQVTVSS

SEQ ID NO: 3955 - protein, 118 aa, Artificial Sequence
  Chemically Synthesized
QVQLQESGGGLVQAGGSLRLSCAASGYISWWDDMGWYRQAPGKERELVATIDDGSNTNYADSVKGRFTISRDNAKNTVYLQMNSLKPEDTAVYYCAVTSPVDFDHVYWGQGTQVTVSS

SEQ ID NO: 3956 - protein, 118 aa, Artificial Sequence
  Chemically Synthesized
QVQLQESGGGLVQAGGSLRLSCAASGTIFLGKFMGWYRQAPGKERELVAGIADGTTTYYADSVKGRFTISRDNAKNTVYLQMNSLKPEDTAVYYCAAENDRGGPHAYWGQGTQVTVSS

SEQ ID NO: 3957 - protein, 126 aa, Artificial Sequence
  Chemically Synthesized
QVQLQESGGGLVQAGGSLRLSCAASGYISFQTIMGWYRQAPGKEREFVAAISYGANTYYADSVKGRFTISRDNAKNTVYLQMNSLKPEDTAVYYCAVRRQGYRYHSYIAYYGYQYWGQGTQVTVSS

SEQ ID NO: 3958 - protein, 126 aa, Artificial Sequence
  Chemically Synthesized
QVQLQESGGGLVQAGGSLRLSCAASGSISHSANMGWYRQAPGKEREFVAGISYGGTTYYADSVKGRFTISRDNAKNTVYLQMNSLKPEDTAVYYCAARHPQNWRDIQYPLNAYQYWGQGTQVTVSS

SEQ ID NO: 3959 - protein, 118 aa, Artificial Sequence
  Chemically Synthesized
QVQLQESGGGLVQAGGSLRLSCAASGTIFGGYTMGWYRQAPGKEREFVAAISSGSSTYYADSVKGRFTISRDNAKNTVYLQMNSLKPEDTAVYYCAVYYYARYFHPYWGQGTQVTVSS

SEQ ID NO: 3960 - protein, 122 aa, Artificial Sequence
  Chemically Synthesized
QVQLQESGGGLVQAGGSLRLSCAASGSISGRSPMGWYRQAPGKERELVASIALGASTYYADSVKGRFTISRDNAKNTVYLQMNSLKPEDTAVYYCAARVGVYYYYRKPHAYWGQGTQVTVSS

SEQ ID NO: 3961 - protein, 125 aa, Artificial Sequence
  Chemically Synthesized
QVQLQESGGGLVQAGGSLRLSCAASGTIFAGHDMGWYRQAPGKERELVAGIGEGTTTNYADSVKGRFTISRDNAKNTVYLQMNSLKPEDTAVYYCAVGPSGARPAFRDILTYAYWGQGTQVTVSS

SEQ ID NO: 3962 - protein, 121 aa, Artificial Sequence
  Chemically Synthesized
QVQLQESGGGLVQAGGSLRLSCAASGSISAGYRMGWYRQAPGKERELVAAIASVLLPYADSVKGRFTISRDNAKNTVYLQMNSLKPEDTAVYYCAAQVASPSQGIYVYSYWGQGTQVTVSS

SEQ ID NO: 3963 - protein, 113 aa, Artificial Sequence
  Chemically Synthesized
QVQLQESGGGLVQAGGSLRLSCAASGNISWYRLMGWYRQAPGKEREFVASIGKGSNTNYADSVKGRFTISRDNAKNTVYLQMNSLKPEDTAVYYCAFRFLSYWGQGTQVTVSS

SEQ ID NO: 3964 - protein, 118 aa, Artificial Sequence
  Chemically Synthesized
QVQLQESGGGLVQAGGSLRLSCAASGNISYWYYMGWYRQAPGKEREFVASIDLGGTTYYADSVKGRFTISRDNAKNTVYLQMNSLKPEDTAVYYCAVYGYWTLTFGYWGQGTQVTVSS

SEQ ID NO: 3965 - protein, 118 aa, Artificial Sequence
  Chemically Synthesized
QVQLQESGGGLVQAGGSLRLSCAASGNIFRYRYMGWYRQAPGKERELVASIAYGGITYYADSVKGRFTISRDNAKNTVYLQMNSLKPEDTAVYYCAAYGWAWYPYKYWGQGTQVTVSS

SEQ ID NO: 3966 - protein, 121 aa, Artificial Sequence
  Chemically Synthesized
QVQLQESGGGLVQAGGSLRLSCAASGNIFDYREMGWYRQAPGKEREFVATIGVGANTNYADSVKGRFTISRDNAKNTVYLQMNSLKPEDTAVYYCAVNSSLPVRWSSASYWGQGTQVTVSS

SEQ ID NO: 3967 - protein, 120 aa, Artificial Sequence
  Chemically Synthesized
QVQLQESGGGLVQAGGSLRLSCAASGSISDETPMGWYRQAPGKEREFVATIGVGSSTNYADSVKGRFTISRDNAKNTVYLQMNSLKPEDTAVYYCAVIDLVRLTTTLFYWGQGTQVTVSS

SEQ ID NO: 3968 - protein, 118 aa, Artificial Sequence
  Chemically Synthesized
QVQLQESGGGLVQAGGSLRLSCAASGYISRRAAMGWYRQAPGKERELVASIAAGGTTYYADSVKGRFTISRDNAKNTVYLQMNSLKPEDTAVYYCAVRYWYGWIHVYWGQGTQVTVSS

SEQ ID NO: 3969 - protein, 118 aa, Artificial Sequence
  Chemically Synthesized
QVQLQESGGGLVQAGGSLRLSCAASGYISRWYYMGWYRQAPGKERELVATIGYGGSTYYADSVKGRFTISRDNAKNTVYLQMNSLKPEDTAVYYCAVRRYGYTFLSYWGQGTQVTVSS

SEQ ID NO: 3970 - protein, 122 aa, Artificial Sequence
  Chemically Synthesized
QVQLQESGGGLVQAGGSLRLSCAASGNISRVRNMGWYRQAPGKERELVASISWGTSTYYADSVKGRFTISRDNAKNTVYLQMNSLKPEDTAVYYCAALFRRYSHLGDYHGYWGQGTQVTVSS

SEQ ID NO: 3971 - protein, 121 aa, Artificial Sequence
  Chemically Synthesized
QVQLQESGGGLVQAGGSLRLSCAASGNISYYDVMGWYRQAPGKEREFVAGITYGGTTNYADSVKGRFTISRDNAKNTVYLQMNSLKPEDTAVYYCAAGNDRGYWYYGTYYWGQGTQVTVSS

SEQ ID NO: 3972 - protein, 122 aa, Artificial Sequence
  Chemically Synthesized
QVQLQESGGGLVQAGGSLRLSCAASGNIFRYGIMGWYRQAPGKERELVAGITYGSNTYYADSVKGRFTISRDNAKNTVYLQMNSLKPEDTAVYYCAAIHGRFWGGYRGHDYWGQGTQVTVSS

SEQ ID NO: 3973 - protein, 122 aa, Artificial Sequence
  Chemically Synthesized
QVQLQESGGGLVQAGGSLRLSCAASGTIFGAAIMGWYRQAPGKERELVAGITSGSTTYYADSVKGRFTISRDNAKNTVYLQMNSLKPEDTAVYYCAVLLRLTDKVDRAYGYWGQGTQVTVSS

SEQ ID NO: 3974 - protein, 118 aa, Artificial Sequence
  Chemically Synthesized
QVQLQESGGGLVQAGGSLRLSCAASGYIFRRQYMGWYRQAPGKERELVASIAEGGITYYADSVKGRFTISRDNAKNTVYLQMNSLKPEDTAVYYCAVGIDYDSNFYYWGQGTQVTVSS

SEQ ID NO: 3975 - protein, 112 aa, Artificial Sequence
  Chemically Synthesized
QVQLQESGGGLVQAGGSLRLSCAASGSIFPGINMGWYRQAPGKERELVASISYGTTTYYADSVKGRFTISRDNAKNTVYLQMNSLKPEDTAVYYCASWHQYWGQGTQVTVSS

SEQ ID NO: 3976 - protein, 126 aa, Artificial Sequence
  Chemically Synthesized
QVQLQESGGGLVQAGGSLRLSCAASGNISDSGAMGWYRQAPGKEREFVAAIAQGSSTYYADSVKGRFTISRDNAKNTVYLQMNSLKPEDTAVYYCAVDIGLGDDWQDPRSDGLSYWGQGTQVTVSS

SEQ ID NO: 3977 - protein, 118 aa, Artificial Sequence
  Chemically Synthesized
QVQLQESGGGLVQAGGSLRLSCAASGYIFNRRSMGWYRQAPGKEREFVAGIDLGAITNYADSVKGRFTISRDNAKNTVYLQMNSLKPEDTAVYYCAAGDPRSPWLLYWGQGTQVTVSS

SEQ ID NO: 3978 - protein, 122 aa, Artificial Sequence
  Chemically Synthesized
QVQLQESGGGLVQAGGSLRLSCAASGSISVALTMGWYRQAPGKERELVAGITYGGITYYADSVKGRFTISRDNAKNTVYLQMNSLKPEDTAVYYCAARITGVGLLTVRHYYWGQGTQVTVSS

SEQ ID NO: 3979 - protein, 122 aa, Artificial Sequence
  Chemically Synthesized
QVQLQESGGGLVQAGGSLRLSCAASGTISPRYWMGWYRQAPGKEREFVAAIAYGAITNYADSVKGRFTISRDNAKNTVYLQMNSLKPEDTAVYYCAAYSPWGPYYDWWYHYWGQGTQVTVSS

SEQ ID NO: 3980 - protein, 122 aa, Artificial Sequence
  Chemically Synthesized
QVQLQESGGGLVQAGGSLRLSCAASGYISRGGAMGWYRQAPGKEREFVAGIGYGATTNYADSVKGRFTISRDNAKNTVYLQMNSLKPEDTAVYYCAALRYQYYPQGKSYRYWGQGTQVTVSS

SEQ ID NO: 3981 - protein, 118 aa, Artificial Sequence
  Chemically Synthesized
QVQLQESGGGLVQAGGSLRLSCAASGTISNYDYMGWYRQAPGKERELVAGIAQGGTTYYADSVKGRFTISRDNAKNTVYLQMNSLKPEDTAVYYCAVQIFFGINYSYWGQGTQVTVSS

SEQ ID NO: 3982 - protein, 118 aa, Artificial Sequence
  Chemically Synthesized
QVQLQESGGGLVQAGGSLRLSCAASGYIFYYNVMGWYRQAPGKEREFVAGITRGSITYYADSVKGRFTISRDNAKNTVYLQMNSLKPEDTAVYYCAAKGYGYAGHRYWGQGTQVTVSS

SEQ ID NO: 3983 - protein, 122 aa, Artificial Sequence
  Chemically Synthesized
QVQLQESGGGLVQAGGSLRLSCAASGTISRTYHMGWYRQAPGKERELVATIGGGGSTNYADSVKGRFTISRDNAKNTVYLQMNSLKPEDTAVYYCAVPWPPYDSRVPYHYYWGQGTQVTVSS

SEQ ID NO: 3984 - protein, 126 aa, Artificial Sequence
  Chemically Synthesized
QVQLQESGGGLVQAGGSLRLSCAASGNISPYYGMGWYRQAPGKERELVAAIAYGSNTNYADSVKGRFTISRDNAKNTVYLQMNSLKPEDTAVYYCAVPYPWDRDKWYDLGGNHHYWGQGTQVTVSS

SEQ ID NO: 3985 - protein, 122 aa, Artificial Sequence
  Chemically Synthesized
QVQLQESGGGLVQAGGSLRLSCAASGTIFGWRSMGWYRQAPGKERELVASISRGGITNYADSVKGRFTISRDNAKNTVYLQMNSLKPEDTAVYYCAVGPYRGRAWSTYHLYWGQGTQVTVSS

SEQ ID NO: 3986 - protein, 118 aa, Artificial Sequence
  Chemically Synthesized
QVQLQESGGGLVQAGGSLRLSCAASGNISRTRYMGWYRQAPGKERELVAAINIGASTYYADSVKGRFTISRDNAKNTVYLQMNSLKPEDTAVYYCAVQYRRWIGHSYWGQGTQVTVSS

SEQ ID NO: 3987 - protein, 118 aa, Artificial Sequence
  Chemically Synthesized
QVQLQESGGGLVQAGGSLRLSCAASGTISPRNDMGWYRQAPGKERELVATIDIGATTYYADSVKGRFTISRDNAKNTVYLQMNSLKPEDTAVYYCAADDRGPGQHGYWGQGTQVTVSS

SEQ ID NO: 3988 - protein, 125 aa, Artificial Sequence
  Chemically Synthesized
QVQLQESGGGLVQAGGSLRLSCAASGNIFSGGYMGWYRQAPGKERELVATITAGAITYYADSVKGRFTISRDNAKNTVYLQMNSLKPEDTAVYYCAVLFRSGWADHDEAGDDHYWGQGTQVTVSS

SEQ ID NO: 3989 - protein, 118 aa, Artificial Sequence
  Chemically Synthesized
QVQLQESGGGLVQAGGSLRLSCAASGTIFWRGAMGWYRQAPGKEREFVAGIAYGSSTNYADSVKGRFTISRDNAKNTVYLQMNSLKPEDTAVYYCAVVYRTYRWFAYWGQGTQVTVSS

SEQ ID NO: 3990 - protein, 122 aa, Artificial Sequence
  Chemically Synthesized
QVQLQESGGGLVQAGGSLRLSCAASGTISYYYTMGWYRQAPGKEREFVAAIGYGATTNYADSVKGRFTISRDNAKNTVYLQMNSLKPEDTAVYYCAVGAWWRWYQYGVLRYWGQGTQVTVSS

SEQ ID NO: 3991 - protein, 117 aa, Artificial Sequence
  Chemically Synthesized
QVQLQESGGGLVQAGGSLRLSCAASGTIFAFYMGWYRQAPGKEREFVAGISNGSNTNYADSVKGRFTISRDNAKNTVYLQMNSLKPEDTAVYYCAATSYLYDGYVYWGQGTQVTVSS

SEQ ID NO: 3992 - protein, 122 aa, Artificial Sequence
  Chemically Synthesized
QVQLQESGGGLVQAGGSLRLSCAASGTISEAARMGWYRQAPGKERELVAGITFGGITYYADSVKGRFTISRDNAKNTVYLQMNSLKPEDTAVYYCAVYVPTYDYARRRLYYWGQGTQVTVSS

SEQ ID NO: 3993 - protein, 122 aa, Artificial Sequence
  Chemically Synthesized
QVQLQESGGGLVQAGGSLRLSCAASGYISEYLYMGWYRQAPGKEREFVAAINGGGITNYADSVKGRFTISRDNAKNTVYLQMNSLKPEDTAVYYCAAYYPIPNWSVALFGYWGQGTQVTVSS

SEQ ID NO: 3994 - protein, 118 aa, Artificial Sequence
  Chemically Synthesized
QVQLQESGGGLVQAGGSLRLSCAASGSISRRNYMGWYRQAPGKERELVASINTGAITYYADSVKGRFTISRDNAKNTVYLQMNSLKPEDTAVYYCAVRGRWHLTHGYWGQGTQVTVSS

SEQ ID NO: 3995 - protein, 115 aa, Artificial Sequence
  Chemically Synthesized
QVQLQESGGGLVQAGGSLRLSCAASGNIFQPPEMGWYRQAPGKERELVAYLYADSVKGRFTISRDNAKNTVYLQMNSLKPEDTAVYYCAAEVVYIHWYDDFLTYWGQGTQVTVSS

SEQ ID NO: 3996 - protein, 115 aa, Artificial Sequence
  Chemically Synthesized
QVQLQESGGGLVQAGGSLRLSCAASGSIFNYDYMGWYRQAPGKEREFVATITYGTITYYADSVKGRFTISRDNAKNTVYLQMNSLKPEDTAVYYCALDIWPFYYWGQGTQVTVSS

SEQ ID NO: 3997 - protein, 122 aa, Artificial Sequence
  Chemically Synthesized
QVQLQESGGGLVQAGGSLRLSCAASGYISGYTYMGWYRQAPGKEREFVAGITTGGTTYYADSVKGRFTISRDNAKNTVYLQMNSLKPEDTAVYYCAVREYVWYRRAGFYAYWGQGTQVTVSS

SEQ ID NO: 3998 - protein, 118 aa, Artificial Sequence
  Chemically Synthesized
QVQLQESGGGLVQAGGSLRLSCAASGTIFWYQYMGWYRQAPGKERELVATIGRGTSTNYADSVKGRFTISRDNAKNTVYLQMNSLKPEDTAVYYCAVLHRWQRYHFYWGQGTQVTVSS

SEQ ID NO: 3999 - protein, 122 aa, Artificial Sequence
  Chemically Synthesized
QVQLQESGGGLVQAGGSLRLSCAASGSIFRYTRMGWYRQAPGKEREFVAGIGDGTITYYADSVKGRFTISRDNAKNTVYLQMNSLKPEDTAVYYCAVGTRYRLWPSHHHGYWGQGTQVTVSS

SEQ ID NO: 4000 - protein, 122 aa, Artificial Sequence
  Chemically Synthesized
QVQLQESGGGLVQAGGSLRLSCAASGTISGGRWMGWYRQAPGKEREFVAGIDYGGITNYADSVKGRFTISRDNAKNTVYLQMNSLKPEDTAVYYCAVVLRVRQRYSAVHVYWGQGTQVTVSS

SEQ ID NO: 4001 - protein, 118 aa, Artificial Sequence
  Chemically Synthesized
QVQLQESGGGLVQAGGSLRLSCAASGYISQSGDMGWYRQAPGKERELVASIDHGATTYYADSVKGRFTISRDNAKNTVYLQMNSLKPEDTAVYYCAVVRSVGWAHEYWGQGTQVTVSS

SEQ ID NO: 4002 - protein, 118 aa, Artificial Sequence
  Chemically Synthesized
QVQLQESGGGLVQAGGSLRLSCAASGYISRLRAMGWYRQAPGKERELVAAITRGSNTNYADSVKGRFTISRDNAKNTVYLQMNSLKPEDTAVYYCAAATPYVWWLYYWGQGTQVTVSS

SEQ ID NO: 4003 - protein, 122 aa, Artificial Sequence
  Chemically Synthesized
QVQLQESGGGLVQAGGSLRLSCAASGTIFGSGYMGWYRQAPGKERELVAAIGYGSITYYADSVKGRFTISRDNAKNTVYLQMNSLKPEDTAVYYCAVRRPKRYGPASPHAYWGQGTQVTVSS

SEQ ID NO: 4004 - protein, 118 aa, Artificial Sequence
  Chemically Synthesized
QVQLQESGGGLVQAGGSLRLSCAASGYISRRARMGWYRQAPGKEREFVASINLGATTNYADSVKGRFTISRDNAKNTVYLQMNSLKPEDTAVYYCAVQSPYLVRHRYWGQGTQVTVSS

SEQ ID NO: 4005 - protein, 117 aa, Artificial Sequence
  Chemically Synthesized
QVQLQESGGGLVQAGGSLRLSCAASGSIFYQRKMGWYRQAPGKEREFVAGISVGATTYYADSVKGRFTISRDNAKNTVYLQMNSLKPEDTAVYYCAVWRIWRYHVYWGQGTQVTVSS

SEQ ID NO: 4006 - protein, 122 aa, Artificial Sequence
  Chemically Synthesized
QVQLQESGGGLVQAGGSLRLSCAASGSISPYVYMGWYRQAPGKERELVASIGIGANTYYADSVKGRFTISRDNAKNTVYLQMNSLKPEDTAVYYCAVYYGYAGQYDDVFTYWGQGTQVTVSS

SEQ ID NO: 4007 - protein, 118 aa, Artificial Sequence
  Chemically Synthesized
QVQLQESGGGLVQAGGSLRLSCAASGNISDHNIMGWYRQAPGKEREFVAGISDGASTNYADSVKGRFTISRDNAKNTVYLQMNSLKPEDTAVYYCAVRNYYPVWYHYWGQGTQVTVSS

SEQ ID NO: 4008 - protein, 125 aa, Artificial Sequence
  Chemically Synthesized
QVQLQESGGGLVQAGGSLRLSCAASGTIFYRYYMGWYRQAPGKEREFVASIARGATTNYADSVKGRFTISRDNAKNTVYLQMNSLKPEDTAVYYCAAGPQSRVLLKTLKLSTFYWGQGTQVTVSS

SEQ ID NO: 4009 - protein, 118 aa, Artificial Sequence
  Chemically Synthesized
QVQLQESGGGLVQAGGSLRLSCAASGSISQDKGMGWYRQAPGKEREFVAGIDYGANTNYADSVKGRFTISRDNAKNTVYLQMNSLKPEDTAVYYCAAIGPEGVGYVYWGQGTQVTVSS

SEQ ID NO: 4010 - protein, 116 aa, Artificial Sequence
  Chemically Synthesized
QVQLQESGGGLVQAGGSLRLSCAASGSISGDYGMGWYRQAPGKEREFVASINVGTTNYADSVKGRFTISRDNAKNTVYLQMNSLKPEDTAVYYCAVDDDANDVFYWGQGTQVTVSS

SEQ ID NO: 4011 - protein, 118 aa, Artificial Sequence
  Chemically Synthesized
QVQLQESGGGLVQAGGSLRLSCAASGNIFGPNYMGWYRQAPGKEREFVATITDGGSTYYADSVKGRFTISRDNAKNTVYLQMNSLKPEDTAVYYCAAEADSLRSHGYWGQGTQVTVSS

SEQ ID NO: 4012 - protein, 118 aa, Artificial Sequence
  Chemically Synthesized
QVQLQESGGGLVQAGGSLRLSCAASGYIFAVYAMGWYRQAPGKEREFVASINRGTTTNYADSVKGRFTISRDNAKNTVYLQMNSLKPEDTAVYYCAVQSRYWAVHPYWGQGTQVTVSS

SEQ ID NO: 4013 - protein, 125 aa, Artificial Sequence
  Chemically Synthesized
QVQLQESGGGLVQAGGSLRLSCAASGNISWRETMGWYRQAPGKERELVASIDRGGTTNYADSVKGRFTISRDNAKNTVYLQMNSLKPEDTAVYYCAAYYNAEPSIRYRRGPVFYWGQGTQVTVSS

SEQ ID NO: 4014 - protein, 118 aa, Artificial Sequence
  Chemically Synthesized
QVQLQESGGGLVQAGGSLRLSCAASGYISVRGPMGWYRQAPGKERELVAAITYGASTYYADSVKGRFTISRDNAKNTVYLQMNSLKPEDTAVYYCAVQYVRAIRYVYWGQGTQVTVSS

SEQ ID NO: 4015 - protein, 118 aa, Artificial Sequence
  Chemically Synthesized
QVQLQESGGGLVQAGGSLRLSCAASGYISRPTVMGWYRQAPGKERELVAGISRGSSTYYADSVKGRFTISRDNAKNTVYLQMNSLKPEDTAVYYCAAYRQYRYLHVYWGQGTQVTVSS

SEQ ID NO: 4016 - protein, 118 aa, Artificial Sequence
  Chemically Synthesized
QVQLQESGGGLVQAGGSLRLSCAASGTISYADDMGWYRQAPGKERELVAGINQGATTNYADSVKGRFTISRDNAKNTVYLQMNSLKPEDTAVYYCAAPYTDGVYYVYWGQGTQVTVSS

SEQ ID NO: 4017 - protein, 118 aa, Artificial Sequence
  Chemically Synthesized
QVQLQESGGGLVQAGGSLRLSCAASGYIFATSSMGWYRQAPGKEREFVAAIGRGAITYYADSVKGRFTISRDNAKNTVYLQMNSLKPEDTAVYYCAASTARRIDLNYWGQGTQVTVSS

SEQ ID NO: 4018 - protein, 117 aa, Artificial Sequence
  Chemically Synthesized
QVQLQESGGGLVQAGGSLRLSCAASGSISSGSTMGWYRQAPGKERELVAAILTVVLPYADSVKGRFTISRDNAKNTVYLQMNSLKPEDTAVYYCAATADTTAYLGYWGQGTQVTVSS

SEQ ID NO: 4019 - protein, 118 aa, Artificial Sequence
  Chemically Synthesized
QVQLQESGGGLVQAGGSLRLSCAASGTIFTTREMGWYRQAPGKEREFVATITDGTSTNYADSVKGRFTISRDNAKNTVYLQMNSLKPEDTAVYYCAAYYDWSSGHYYWGQGTQVTVSS

SEQ ID NO: 4020 - protein, 118 aa, Artificial Sequence
  Chemically Synthesized
QVQLQESGGGLVQAGGSLRLSCAASGNISYVGDMGWYRQAPGKERELVAAITWGTITNYADSVKGRFTISRDNAKNTVYLQMNSLKPEDTAVYYCAVIYRLVDVYTYWGQGTQVTVSS

SEQ ID NO: 4021 - protein, 118 aa, Artificial Sequence
  Chemically Synthesized
QVQLQESGGGLVQAGGSLRLSCAASGYISFVPTMGWYRQAPGKEREFVAAITRGSITNYADSVKGRFTISRDNAKNTVYLQMNSLKPEDTAVYYCAVTRRYHTRHVYWGQGTQVTVSS

SEQ ID NO: 4022 - protein, 117 aa, Artificial Sequence
  Chemically Synthesized
QVQLQESGGGLVQAGGSLRLSCAASGSISYVRAMGWYRQAPGKERELVAAITDGATTYYADSVKGRFTISRDNAKNTVYLQMNSLKPEDTAVYYCAALIWYYIHFYWGQGTQVTVSS

SEQ ID NO: 4023 - protein, 118 aa, Artificial Sequence
  Chemically Synthesized
QVQLQESGGGLVQAGGSLRLSCAASGTISYHYDMGWYRQAPGKEREFVASITRGSNTHYADSVKGRFTISRDNAKNTVYLQMNSLKPEDTAVYYCAVGIDSGVAFRYWGQGTQVTVSS

SEQ ID NO: 4024 - protein, 120 aa, Artificial Sequence
  Chemically Synthesized
QVQLQESGGGLVQAGGSLRLSCAASGSIFPARVMGWYRQAPGKEREFVAAINYADSVKGRFTISRDNAKNTVYLQMNSLKPEDTAVYYCAVYYTTDGGVYGYYPDGLTYWGQGTQVTVSS

SEQ ID NO: 4025 - protein, 118 aa, Artificial Sequence
  Chemically Synthesized
QVQLQESGGGLVQAGGSLRLSCAASGYISLIDPMGWYRQAPGKERELVAAISFGANTYYADSVKGRFTISRDNAKNTVYLQMNSLKPEDTAVYYCAVGYWPDLSHRYWGQGTQVTVSS

SEQ ID NO: 4026 - protein, 126 aa, Artificial Sequence
  Chemically Synthesized
QVQLQESGGGLVQAGGSLRLSCAASGNISDPVVMGWYRQAPGKEREFVATIDYGTNTNYADSVKGRFTISRDNAKNTVYLQMNSLKPEDTAVYYCAVPHFYYRYLTSPADSTHFYWGQGTQVTVSS

SEQ ID NO: 4027 - protein, 122 aa, Artificial Sequence
  Chemically Synthesized
QVQLQESGGGLVQAGGSLRLSCAASGTISTILTMGWYRQAPGKEREFVASITDGTSTYYADSVKGRFTISRDNAKNTVYLQMNSLKPEDTAVYYCAVILETLTLDRWTLVYWGQGTQVTVSS

SEQ ID NO: 4028 - protein, 109 aa, Artificial Sequence
  Chemically Synthesized
QVQLQESGGGLVQAGGSLRLSCAASGSIFPDVSMGWYRQAPGKERELVATIGYGSSTYYADSVKGRFTISRDNAKNTVYLQMNSLKPEDTAVYYCAMYWGQGTQVTVSS

SEQ ID NO: 4029 - protein, 118 aa, Artificial Sequence
  Chemically Synthesized
QVQLQESGGGLVQAGGSLRLSCAASGNISRTPHMGWYRQAPGKEREFVATIGVGATTYYADSVKGRFTISRDNAKNTVYLQMNSLKPEDTAVYYCAVDVDATSGLAYWGQGTQVTVSS

SEQ ID NO: 4030 - protein, 117 aa, Artificial Sequence
  Chemically Synthesized
QVQLQESGGGLVQAGGSLRLSCAASGNIFIDSTMGWYRQAPGKEREFVAGISPGGNTYYADSVKGRFTISRDNAKNTVYLQMNSLKPEDTAVYYCAVGYTRLLHPYWGQGTQVTVSS

SEQ ID NO: 4031 - protein, 118 aa, Artificial Sequence
  Chemically Synthesized
QVQLQESGGGLVQAGGSLRLSCAASGNISAGTGMGWYRQAPGKEREFVASIDYGSITNYADSVKGRFTISRDNAKNTVYLQMNSLKPEDTAVYYCAVRYLDYAYHTYWGQGTQVTVSS

SEQ ID NO: 4032 - protein, 113 aa, Artificial Sequence
  Chemically Synthesized
QVQLQESGGGLVQAGGSLRLSCAASGYIFTGLAMGWYRQAPGKERELVAAIGPGTSTNYADSVKGRFTISRDNAKNTVYLQMNSLKPEDTAVYYCAGRLPFYWGQGTQVTVSS

SEQ ID NO: 4033 - protein, 114 aa, Artificial Sequence
  Chemically Synthesized
QVQLQESGGGLVQAGGSLRLSCAASGSIFPDRMGWYRQAPGKERELVAAIGTGGNTYYADSVKGRFTISRDNAKNTVYLQMNSLKPEDTAVYYCAVNPQIHDYWGQGTQVTVSS

SEQ ID NO: 4034 - protein, 108 aa, Artificial Sequence
  Chemically Synthesized
QVQLQESGGGLVQAGGSLRLSCAASGTIFGGSWMGWYRQAPGKEREFVAALLRVVLPYADSVKGRFTISRDNAKNTVYLQMNSLKPEDTAVYYCAYYWGQGTQVTVSS

SEQ ID NO: 4035 - protein, 120 aa, Artificial Sequence
  Chemically Synthesized
QVQLQESGGGLVQAGGSLRLSCAASGYIFGDPYMGWYRQAPGKERELVASIGYGATTNYADSVKGRFTISRDNAKNTVYLQMNSLKPEDTAVYYCAAGHDEGPWDGHVYWGQGTQVTVSS

SEQ ID NO: 4036 - protein, 124 aa, Artificial Sequence
  Chemically Synthesized
QVQLQESGGGLVQAGGSLRLSCAASGNISHRNVMGWYRQAPGKEREFVAGITVGSSTYYADSVKGRFTISRDNAKNTVYLQMNSLKPEDTAVYYCAAWSDYYPFYAYYGAHYYWGQGTQVTVSS

SEQ ID NO: 4037 - protein, 118 aa, Artificial Sequence
  Chemically Synthesized
QVQLQESGGGLVQAGGSLRLSCAASGYISWYNVMGWYRQAPGKEREFVAGIADGGNTNYADSVKGRFTISRDNAKNTVYLQMNSLKPEDTAVYYCAVVRSAYTRFDYWGQGTQVTVSS

SEQ ID NO: 4038 - protein, 122 aa, Artificial Sequence
  Chemically Synthesized
QVQLQESGGGLVQAGGSLRLSCAASGSISDATSMGWYRQAPGKEREFVAGIGNGSITYYADSVKGRFTISRDNAKNTVYLQMNSLKPEDTAVYYCAVGNQNQPTDGTVFGYWGQGTQVTVSS

SEQ ID NO: 4039 - protein, 122 aa, Artificial Sequence
  Chemically Synthesized
QVQLQESGGGLVQAGGSLRLSCAASGSIFPGYWMGWYRQAPGKERELVASIGQGSSTNYADSVKGRFTISRDNAKNTVYLQMNSLKPEDTAVYYCAAVGDTDIQKFRPFAYWGQGTQVTVSS

SEQ ID NO: 4040 - protein, 117 aa, Artificial Sequence
  Chemically Synthesized
QVQLQESGGGLVQAGGSLRLSCAASGTIFDITAMGWYRQAPGKERELLPVLLLVVLPYADSVKGRFTISRDNAKNTVYLQMNSLKPEDTAVYYCAVTGNSRSGYYYWGQGTQVTVSS

SEQ ID NO: 4041 - protein, 126 aa, Artificial Sequence
  Chemically Synthesized
QVQLQESGGGLVQAGGSLRLSCAASGTISIWGAMGWYRQAPGKEREFVAGIGHGSNTYYADSVKGRFTISRDNAKNTVYLQMNSLKPEDTAVYYCAVTYLYYLLGDDWTYSGHWYWGQGTQVTVSS

SEQ ID NO: 4042 - protein, 118 aa, Artificial Sequence
  Chemically Synthesized
QVQLQESGGGLVQAGGSLRLSCAASGTIFYVDFMGWYRQAPGKERELVAAINGGSNTNYADSVKGRFTISRDNAKNTVYLQMNSLKPEDTAVYYCAVLGRHVTTYWYWGQGTQVTVSS

SEQ ID NO: 4043 - protein, 121 aa, Artificial Sequence
  Chemically Synthesized
QVQLQESGGGLVQAGGSLRLSCAASGNISRRNEMGWYRQAPGKEREFVASISDGATTYYADSVKGRFTISRDNAKNTVYLQMNSLKPEDTAVYYCAVDREQVQVADSTLYWGQGTQVTVSS

SEQ ID NO: 4044 - protein, 117 aa, Artificial Sequence
  Chemically Synthesized
QVQLQESGGGLVQAGGSLRLSCAASGNIFVFTRMGWYRQAPGKEREFVAILVTVLLPYADSVKGRFTISRDNAKNTVYLQMNSLKPEDTAVYYCAVQLVYDLRFVYWGQGTQVTVSS

SEQ ID NO: 4045 - protein, 118 aa, Artificial Sequence
  Chemically Synthesized
QVQLQESGGGLVQAGGSLRLSCAASGTIFAYYYMGWYRQAPGKERELVAAITVGTITYYADSVKGRFTISRDNAKNTVYLQMNSLKPEDTAVYYCAVWQTVSDNYPYWGQGTQVTVSS

SEQ ID NO: 4046 - protein, 112 aa, Artificial Sequence
  Chemically Synthesized
QVQLQESGGGLVQAGGSLRLSCAASGTISSPWYMGWYRQAPGKEREFVAAIARGGITYYADSVKGRFTISRDNAKNTVYLQMNSLKPEDTAVYYCAVDLLYWGQGTQVTVSS

SEQ ID NO: 4047 - protein, 118 aa, Artificial Sequence
  Chemically Synthesized
QVQLQESGGGLVQAGGSLRLSCAASGTISAPRGMGWYRQAPGKERELVATIGSGANTNYADSVKGRFTISRDNAKNTVYLQMNSLKPEDTAVYYCAVADKGGYYFGYWGQGTQVTVSS

SEQ ID NO: 4048 - protein, 118 aa, Artificial Sequence
  Chemically Synthesized
QVQLQESGGGLVQAGGSLRLSCAASGNIFFPAYMGWYRQAPGKEREFVAGIGGGTNTNYADSVKGRFTISRDNAKNTVYLQMNSLKPEDTAVYYCAVAGRTLSILFYWGQGTQVTVSS

SEQ ID NO: 4049 - protein, 116 aa, Artificial Sequence
  Chemically Synthesized
QVQLQESGGGLVQAGGSLRLSCAASGYIFVSNMGWYRQAPGKERELVAVLVLVLLPYADSVKGRFTISRDNAKNTVYLQMNSLKPEDTAVYYCAAGHDHAVAYYYWGQGTQVTVSS

SEQ ID NO: 4050 - protein, 126 aa, Artificial Sequence
  Chemically Synthesized
QVQLQESGGGLVQAGGSLRLSCAASGSIFGRHYMGWYRQAPGKERELVAAINYGAITNYADSVKGRFTISRDNAKNTVYLQMNSLKPEDTAVYYCAAGGEDYWIFAHGYPRSHRYWGQGTQVTVSS

SEQ ID NO: 4051 - protein, 118 aa, Artificial Sequence
  Chemically Synthesized
QVQLQESGGGLVQAGGSLRLSCAASGTISDTYYMGWYRQAPGKERELVATITYGSSTNYADSVKGRFTISRDNAKNTVYLQMNSLKPEDTAVYYCAVQAPDPDALDYWGQGTQVTVSS

SEQ ID NO: 4052 - protein, 118 aa, Artificial Sequence
  Chemically Synthesized
QVQLQESGGGLVQAGGSLRLSCAASGSISPNYSMGWYRQAPGKEREFVAGIDRGSSTYYADSVKGRFTISRDNAKNTVYLQMNSLKPEDTAVYYCAAYESADADLGYWGQGTQVTVSS

SEQ ID NO: 4053 - protein, 118 aa, Artificial Sequence
  Chemically Synthesized
QVQLQESGGGLVQAGGSLRLSCAASGSISRRFRMGWYRQAPGKEREFVATITYGGITYYADSVKGRFTISRDNAKNTVYLQMNSLKPEDTAVYYCAVPPRLRYRLGYWGQGTQVTVSS

SEQ ID NO: 4054 - protein, 121 aa, Artificial Sequence
  Chemically Synthesized
QVQLQESGGGLVQAGGSLRLSCAASGSISYVDYMGWYRQAPGKERELVASIGVGGSTNYADSVKGRFTISRDNAKNTVYLQMNSLKPEDTAVYYCAANYEDYVQSTLLMYWGQGTQVTVSS

SEQ ID NO: 4055 - protein, 118 aa, Artificial Sequence
  Chemically Synthesized
QVQLQESGGGLVQAGGSLRLSCAASGYIFAGGPMGWYRQAPGKEREFVASIDPGSSTNYADSVKGRFTISRDNAKNTVYLQMNSLKPEDTAVYYCAVKRYYDYYHTYWGQGTQVTVSS

SEQ ID NO: 4056 - protein, 122 aa, Artificial Sequence
  Chemically Synthesized
QVQLQESGGGLVQAGGSLRLSCAASGTIFLVLRMGWYRQAPGKEREFVAGIGEGTSTYYADSVKGRFTISRDNAKNTVYLQMNSLKPEDTAVYYCAAQGNVLAQSADRHAYWGQGTQVTVSS

SEQ ID NO: 4057 - protein, 117 aa, Artificial Sequence
  Chemically Synthesized
QVQLQESGGGLVQAGGSLRLSCAASGNISRSRVMGWYRQAPGKERELVASITSGGNTYYADSVKGRFTISRDNAKNTVYLQMNSLKPEDTAVYYCAAYYQQYSTMYWGQGTQVTVSS

SEQ ID NO: 4058 - protein, 118 aa, Artificial Sequence
  Chemically Synthesized
QVQLQESGGGLVQAGGSLRLSCAASGTIFGYPYMGWYRQAPGKEREFVAAIGPGATTYYADSVKGRFTISRDNAKNTVYLQMNSLKPEDTAVYYCAASPASGVHLDYWGQGTQVTVSS

SEQ ID NO: 4059 - protein, 117 aa, Artificial Sequence
  Chemically Synthesized
QVQLQESGGGLVQAGGSLRLSCAASGTISGEYGMGWYRQAPGKERELVATIDSVVIPYADSVKGRFTISRDNAKNTVYLQMNSLKPEDTAVYYCAVYDPDGLYHGYWGQGTQVTVSS

SEQ ID NO: 4060 - protein, 117 aa, Artificial Sequence
  Chemically Synthesized
QVQLQESGGGLVQAGGSLRLSCAASGYIFVYGVMGWYRQAPGKEREFVAAIDSVLLPYADSVKGRFTISRDNAKNTVYLQMNSLKPEDTAVYYCAVDESTGHVYPYWGQGTQVTVSS

SEQ ID NO: 4061 - protein, 121 aa, Artificial Sequence
  Chemically Synthesized
QVQLQESGGGLVQAGGSLRLSCAASGNISFPYAMGWYRQAPGKEREFVAGITGGSSTNYADSVKGRFTISRDNAKNTVYLQMNSLKPEDTAVYYCAVWPYSLLVTLLFMYWGQGTQVTVSS

SEQ ID NO: 4062 - protein, 117 aa, Artificial Sequence
  Chemically Synthesized
QVQLQESGGGLVQAGGSLRLSCAASGNISVDYGMGWYRQAPGKEREFVASIDSGASTYYADSVKGRFTISRDNAKNTVYLQMNSLKPEDTAVYYCAVSVTTLLTMYWGQGTQVTVSS

SEQ ID NO: 4063 - protein, 116 aa, Artificial Sequence
  Chemically Synthesized
QVQLQESGGGLVQAGGSLRLSCAASGSMGWYRQAPGKERELVASITVGTSTNYADSVKGRFTISRDNAKNTVYLQMNSLKPEDTAVYYCAADVYYETNAANYHVYWGQGTQVTVSS

SEQ ID NO: 4064 - protein, 122 aa, Artificial Sequence
  Chemically Synthesized
QVQLQESGGGLVQAGGSLRLSCAASGNISYWKYMGWYRQAPGKEREFVAGIDSGGSTNYADSVKGRFTISRDNAKNTVYLQMNSLKPEDTAVYYCAATTGDRYTYVSYYSYWGQGTQVTVSS

SEQ ID NO: 4065 - protein, 122 aa, Artificial Sequence
  Chemically Synthesized
QVQLQESGGGLVQAGGSLRLSCAASGTIFANFIMGWYRQAPGKERELVAGIGWGTTTYYADSVKGRFTISRDNAKNTVYLQMNSLKPEDTAVYYCAVRPRSRGDHGTRHGYWGQGTQVTVSS

SEQ ID NO: 4066 - protein, 118 aa, Artificial Sequence
  Chemically Synthesized
QVQLQESGGGLVQAGGSLRLSCAASGTISGLTIMGWYRQAPGKERELVAAIGWGASTYYADSVKGRFTISRDNAKNTVYLQMNSLKPEDTAVYYCAAKPQIRKAHAYWGQGTQVTVSS

SEQ ID NO: 4067 - protein, 118 aa, Artificial Sequence
  Chemically Synthesized
QVQLQESGGGLVQAGGSLRLSCAASGNISPPEYMGWYRQAPGKERELVAGIGWGSSTYYADSVKGRFTISRDNAKNTVYLQMNSLKPEDTAVYYCAAAFQERRRYGYWGQGTQVTVSS

SEQ ID NO: 4068 - protein, 118 aa, Artificial Sequence
  Chemically Synthesized
QVQLQESGGGLVQAGGSLRLSCAASGNISWPQYMGWYRQAPGKERELVAAIGFGATTYYADSVKGRFTISRDNAKNTVYLQMNSLKPEDTAVYYCAVAYRTSVRHAYWGQGTQVTVSS

SEQ ID NO: 4069 - protein, 118 aa, Artificial Sequence
  Chemically Synthesized
QVQLQESGGGLVQAGGSLRLSCAASGYISDDTIMGWYRQAPGKERELVAGIGWGTSTYYADSVKGRFTISRDNAKNTVYLQMNSLKPEDTAVYYCAVRYRRVPRHGYWGQGTQVTVSS

SEQ ID NO: 4070 - protein, 118 aa, Artificial Sequence
  Chemically Synthesized
QVQLQESGGGLVQAGGSLRLSCAASGYISPPNYMGWYRQAPGKERELVAAIGWGSNTYYADSVKGRFTISRDNAKNTVYLQMNSLKPEDTAVYYCAARWTDGAPHPYWGQGTQVTVSS

SEQ ID NO: 4071 - protein, 118 aa, Artificial Sequence
  Chemically Synthesized
QVQLQESGGGLVQAGGSLRLSCAASGNISDGYVMGWYRQAPGKEREFVASITPGGTTNYADSVKGRFTISRDNAKNTVYLQMNSLKPEDTAVYYCAATSDELRRLVYWGQGTQVTVSS

SEQ ID NO: 4072 - protein, 122 aa, Artificial Sequence
  Chemically Synthesized
QVQLQESGGGLVQAGGSLRLSCAASGTISKYRYMGWYRQAPGKERELVAAIGWGTITYYADSVKGRFTISRDNAKNTVYLQMNSLKPEDTAVYYCAASFAGEDAPYRRLVYWGQGTQVTVSS

SEQ ID NO: 4073 - protein, 122 aa, Artificial Sequence
  Chemically Synthesized
QVQLQESGGGLVQAGGSLRLSCAASGSIFYDPYMGWYRQAPGKERELVAAIGWGTSTYYADSVKGRFTISRDNAKNTVYLQMNSLKPEDTAVYYCAAQFHTGATGRRGLAYWGQGTQVTVSS

SEQ ID NO: 4074 - protein, 115 aa, Artificial Sequence
  Chemically Synthesized
QVQLQESGGGLVQAGGSLRLSCAASGSISYISAMGWYRQAPGKERELVAAIGVGTITYYADSVKGRFTISRDNAKNTVYLQMNSLKPEDTAVYYCAVSTGGHAYWGQGTQVTVSS

SEQ ID NO: 4075 - protein, 116 aa, Artificial Sequence
  Chemically Synthesized
QVQLQESGGGLVQAGGSLRLSCAASGIRPRVMGWYRQAPGKERELVAGIGAGTITYYADSVKGRFTISRDNAKNTVYLQMNSLKPEDTAVYYCAVKTFGSGLHAYWGQGTQVTVSS

SEQ ID NO: 4076 - protein, 122 aa, Artificial Sequence
  Chemically Synthesized
QVQLQESGGGLVQAGGSLRLSCAASGSISSNNRMGWYRQAPGKEREFVAGIDYGSNTYYADSVKGRFTISRDNAKNTVYLQMNSLKPEDTAVYYCAAVYFTYQPDVRRHVYWGQGTQVTVSS

SEQ ID NO: 4077 - protein, 119 aa, Artificial Sequence
  Chemically Synthesized
QVQLQESGGGLVQAGGSLRLSCAASGNISVHGVMGWYRQAPGKERELVAAIGWGTITYYADSVKGRFTISRDNAKNTVYLQMNSLKPEDTAVYYCAVRYYRTRGHPAYWGQGTQVTVSS

SEQ ID NO: 4078 - protein, 126 aa, Artificial Sequence
  Chemically Synthesized
QVQLQESGGGLVQAGGSLRLSCAASGNISSGPIMGWYRQAPGKERELVAGIGWGASTYYADSVKGRFTISRDNAKNTVYLQMNSLKPEDTAVYYCAAKNYNLRNSYAGNGYNHRYWGQGTQVTVSS

SEQ ID NO: 4079 - protein, 121 aa, Artificial Sequence
  Chemically Synthesized
QVQLQESGGGLVQAGGSLRLSCAASGNIFDRSTMGWYRQAPGKEREFVAGIDRGSITYYADSVKGRFTISRDNAKNTVYLQMNSLKPEDTAVYYCAAFHRAYAIDTRYRYWGQGTQVTVSS

SEQ ID NO: 4080 - protein, 118 aa, Artificial Sequence
  Chemically Synthesized
QVQLQESGGGLVQAGGSLRLSCAASGSIFYLRLMGWYRQAPGKERELVAAIGFGTNTYYADSVKGRFTISRDNAKNTVYLQMNSLKPEDTAVYYCAVGIHGQKYHPYWGQGTQVTVSS

SEQ ID NO: 4081 - protein, 122 aa, Artificial Sequence
  Chemically Synthesized
QVQLQESGGGLVQAGGSLRLSCAASGNISGPDDMGWYRQAPGKERELVAGITSGTTTYYADSVKGRFTISRDNAKNTVYLQMNSLKPEDTAVYYCAVVNLYDIAGRDGYDYWGQGTQVTVSS

SEQ ID NO: 4082 - protein, 122 aa, Artificial Sequence
  Chemically Synthesized
QVQLQESGGGLVQAGGSLRLSCAASGNIFGPTVMGWYRQAPGKEREFVAGIGTGATTYYADSVKGRFTISRDNAKNTVYLQMNSLKPEDTAVYYCAAFPYYVWFIPSYHYYWGQGTQVTVSS

SEQ ID NO: 4083 - protein, 118 aa, Artificial Sequence
  Chemically Synthesized
QVQLQESGGGLVQAGGSLRLSCAASGNIFRGSVMGWYRQAPGKERELVAGIGFGTTTYYADSVKGRFTISRDNAKNTVYLQMNSLKPEDTAVYYCAVSEGRYTRHAYWGQGTQVTVSS

SEQ ID NO: 4084 - protein, 126 aa, Artificial Sequence
  Chemically Synthesized
QVQLQESGGGLVQAGGSLRLSCAASGTISRSRAMGWYRQAPGKERELVAGIGRGTTTYYADSVKGRFTISRDNAKNTVYLQMNSLKPEDTAVYYCAVSYTTSVSGQYAGRRHHSYWGQGTQVTVSS

SEQ ID NO: 4085 - protein, 118 aa, Artificial Sequence
  Chemically Synthesized
QVQLQESGGGLVQAGGSLRLSCAASGTIFVSKDMGWYRQAPGKERELVAGIAFGAITYYADSVKGRFTISRDNAKNTVYLQMNSLKPEDTAVYYCAVFRKHENSFSYWGQGTQVTVSS

SEQ ID NO: 4086 - protein, 122 aa, Artificial Sequence
  Chemically Synthesized
QVQLQESGGGLVQAGGSLRLSCAASGTISYDSYMGWYRQAPGKERELVAAIGWGSTTYYADSVKGRFTISRDNAKNTVYLQMNSLKPEDTAVYYCAATYFTDISRKNRLRYWGQGTQVTVSS

SEQ ID NO: 4087 - protein, 118 aa, Artificial Sequence
  Chemically Synthesized
QVQLQESGGGLVQAGGSLRLSCAASGNISVGPIMGWYRQAPGKERELVAAIGWGTITYYADSVKGRFTISRDNAKNTVYLQMNSLKPEDTAVYYCAVNGPQRPGHVYWGQGTQVTVSS

SEQ ID NO: 4088 - protein, 124 aa, Artificial Sequence
  Chemically Synthesized
QVQLQESGGGLVQAGGSLRLSCAASGTISYDSVMGWYRQAPGKEREFVPVLLTVLIPYADSVKGRFTISRDNAKNTVYLQMNSLKPEDTAVYYCAAYPYAATDRTDPDGDLFYWGQGTQVTVSS

SEQ ID NO: 4089 - protein, 118 aa, Artificial Sequence
  Chemically Synthesized
QVQLQESGGGLVQAGGSLRLSCAASGTIFRFLAMGWYRQAPGKERELVASINSGATTYYADSVKGRFTISRDNAKNTVYLQMNSLKPEDTAVYYCAASSYTAGPLYYWGQGTQVTVSS

SEQ ID NO: 4090 - protein, 118 aa, Artificial Sequence
  Chemically Synthesized
QVQLQESGGGLVQAGGSLRLSCAASGTIFLLSGMGWYRQAPGKERELVAAIGAGGNTYYADSVKGRFTISRDNAKNTVYLQMNSLKPEDTAVYYCAVGRHLDGPHEYWGQGTQVTVSS

SEQ ID NO: 4091 - protein, 118 aa, Artificial Sequence
  Chemically Synthesized
QVQLQESGGGLVQAGGSLRLSCAASGTISIAVIMGWYRQAPGKERELVAAIGWGTTTYYADSVKGRFTISRDNAKNTVYLQMNSLKPEDTAVYYCAVTLHHHGKHNYWGQGTQVTVSS

SEQ ID NO: 4092 - protein, 118 aa, Artificial Sequence
  Chemically Synthesized
QVQLQESGGGLVQAGGSLRLSCAASGYISLRSYMGWYRQAPGKEREFVAAIGYGASTNYADSVKGRFTISRDNAKNTVYLQMNSLKPEDTAVYYCAVAFRYRSRLPYWGQGTQVTVSS

SEQ ID NO: 4093 - protein, 118 aa, Artificial Sequence
  Chemically Synthesized
QVQLQESGGGLVQAGGSLRLSCAASGTIFRRPIMGWYRQAPGKEREFVAAITAGTTTYYADSVKGRFTISRDNAKNTVYLQMNSLKPEDTAVYYCAVQRLAGRQLSYWGQGTQVTVSS

SEQ ID NO: 4094 - protein, 126 aa, Artificial Sequence
  Chemically Synthesized
QVQLQESGGGLVQAGGSLRLSCAASGNISRGDAMGWYRQAPGKEREFVAAIDPGATTYYADSVKGRFTISRDNAKNTVYLQMNSLKPEDTAVYYCAAYGTTYGPPNTYAWDWYSYWGQGTQVTVSS

SEQ ID NO: 4095 - protein, 118 aa, Artificial Sequence
  Chemically Synthesized
QVQLQESGGGLVQAGGSLRLSCAASGTIFRTSTMGWYRQAPGKERELVAGITRGGSTYYADSVKGRFTISRDNAKNTVYLQMNSLKPEDTAVYYCAARPRAIVYHLYWGQGTQVTVSS

SEQ ID NO: 4096 - protein, 118 aa, Artificial Sequence
  Chemically Synthesized
QVQLQESGGGLVQAGGSLRLSCAASGYISGTPYMGWYRQAPGKEREFVAAIGYGTTTNYADSVKGRFTISRDNAKNTVYLQMNSLKPEDTAVYYCAVARASTGGLTYWGQGTQVTVSS

SEQ ID NO: 4097 - protein, 118 aa, Artificial Sequence
  Chemically Synthesized
QVQLQESGGGLVQAGGSLRLSCAASGTISRTYLMGWYRQAPGKEREFVASIAYGSNTYYADSVKGRFTISRDNAKNTVYLQMNSLKPEDTAVYYCAVDTTYDVRLDYWGQGTQVTVSS

SEQ ID NO: 4098 - protein, 122 aa, Artificial Sequence
  Chemically Synthesized
QVQLQESGGGLVQAGGSLRLSCAASGYISYYLSMGWYRQAPGKERELVATITYGATTYYADSVKGRFTISRDNAKNTVYLQMNSLKPEDTAVYYCAARASRWGYVIGSHAYWGQGTQVTVSS

SEQ ID NO: 4099 - protein, 118 aa, Artificial Sequence
  Chemically Synthesized
QVQLQESGGGLVQAGGSLRLSCAASGSIFGVRAMGWYRQAPGKERELVAAIGWGTITYYADSVKGRFTISRDNAKNTVYLQMNSLKPEDTAVYYCAVSRSSTSIYPYWGQGTQVTVSS

SEQ ID NO: 4100 - protein, 118 aa, Artificial Sequence
  Chemically Synthesized
QVQLQESGGGLVQAGGSLRLSCAASGTIFVGYDMGWYRQAPGKERELVAAITYGGTTYYADSVKGRFTISRDNAKNTVYLQMNSLKPEDTAVYYCAVTTNGGERGQYWGQGTQVTVSS

SEQ ID NO: 4101 - protein, 122 aa, Artificial Sequence
  Chemically Synthesized
QVQLQESGGGLVQAGGSLRLSCAASGNISITTCMGWYRQAPGKEREFVAGIGRGGITYYADSVKGRFTISRDNAKNTVYLQMNSLKPEDTAVYYCAADDAWYYSYDAGFTYWGQGTQVTVSS

SEQ ID NO: 4102 - protein, 118 aa, Artificial Sequence
  Chemically Synthesized
QVQLQESGGGLVQAGGSLRLSCAASGTIFWYTYMGWYRQAPGKERELVAAIGSGGTTYYADSVKGRFTISRDNAKNTVYLQMNSLKPEDTAVYYCAVTRRGWRAFVYWGQGTQVTVSS

SEQ ID NO: 4103 - protein, 118 aa, Artificial Sequence
  Chemically Synthesized
QVQLQESGGGLVQAGGSLRLSCAASGTISRRSRMGWYRQAPGKERELVAAISAGTITYYADSVKGRFTISRDNAKNTVYLQMNSLKPEDTAVYYCAVTAYDERSLWYWGQGTQVTVSS

SEQ ID NO: 4104 - protein, 121 aa, Artificial Sequence
  Chemically Synthesized
QVQLQESGGGLVQAGGSLRLSCAASGYISRHTVMGWYRQAPGKEREFVATIARGGIPYADSVKGRFTISRDNAKNTVYLQMNSLKPEDTAVYYCAAITWTDRYYVWRHVYWGQGTQVTVSS

SEQ ID NO: 4105 - protein, 122 aa, Artificial Sequence
  Chemically Synthesized
QVQLQESGGGLVQAGGSLRLSCAASGSISYTVVMGWYRQAPGKEREFVAAIGNGSITYYADSVKGRFTISRDNAKNTVYLQMNSLKPEDTAVYYCAAVARRGHYSRHHHYYWGQGTQVTVSS

SEQ ID NO: 4106 - protein, 113 aa, Artificial Sequence
  Chemically Synthesized
QVQLQESGGGLVQAGGSLRLSCAASGSISAYRYMGWYRQAPGKEREFVAGIDLGGTTYYADSVKGRFTISRDNAKNTVYLQMNSLKPEDTAVYYCAADYGFYWGQGTQVTVSS

SEQ ID NO: 4107 - protein, 118 aa, Artificial Sequence
  Chemically Synthesized
QVQLQESGGGLVQAGGSLRLSCAASGNIFRIRGMGWYRQAPGKERELVASIAWGGTTYYADSVKGRFTISRDNAKNTVYLQMNSLKPEDTAVYYCAAATYYLKHLGYWGQGTQVTVSS

SEQ ID NO: 4108 - protein, 118 aa, Artificial Sequence
  Chemically Synthesized
QVQLQESGGGLVQAGGSLRLSCAASGTIFRPTRMGWYRQAPGKERELVASISYGSNTYYADSVKGRFTISRDNAKNTVYLQMNSLKPEDTAVYYCAAKYYAHRYFTYWGQGTQVTVSS

SEQ ID NO: 4109 - protein, 117 aa, Artificial Sequence
  Chemically Synthesized
QVQLQESGGGLVQAGGSLRLSCAASGNISSSTDMGWYRQAPGKEREFVATIGAGGNTYYADSVKGRFTISRDNAKNTVYLQMNSLKPEDTAVYYCAVPNVWRGLDYWGQGTQVTVSS

SEQ ID NO: 4110 - protein, 122 aa, Artificial Sequence
  Chemically Synthesized
QVQLQESGGGLVQAGGSLRLSCAASGTIFVTGLMGWYRQAPGKEREFVAAITAGSNTYYADSVKGRFTISRDNAKNTVYLQMNSLKPEDTAVYYCAVYYIGGVYTRWALDYWGQGTQVTVSS

SEQ ID NO: 4111 - protein, 118 aa, Artificial Sequence
  Chemically Synthesized
QVQLQESGGGLVQAGGSLRLSCAASGTISEWTKMGWYRQAPGKERELVAGIAVGSSTNYADSVKGRFTISRDNAKNTVYLQMNSLKPEDTAVYYCAAPYDWYRQYGYWGQGTQVTVSS

SEQ ID NO: 4112 - protein, 122 aa, Artificial Sequence
  Chemically Synthesized
QVQLQESGGGLVQAGGSLRLSCAASGTIFIAAGMGWYRQAPGKERELVAAIDHGGITYYADSVKGRFTISRDNAKNTVYLQMNSLKPEDTAVYYCAAGQGKETGQRSGHGYWGQGTQVTVSS

SEQ ID NO: 4113 - protein, 115 aa, Artificial Sequence
  Chemically Synthesized
QVQLQESGGGLVQAGGSLRLSCAASGSISGIRVMGWYRQAPGKERELVAGIGFGTTTYYADSVKGRFTISRDNAKNTVYLQMNSLKPEDTAVYYCAAKYTRHAYWGQGTQVTVSS

SEQ ID NO: 4114 - protein, 118 aa, Artificial Sequence
  Chemically Synthesized
QVQLQESGGGLVQAGGSLRLSCAASGNIFVHAFMGWYRQAPGKEREFVATIATGSITNYADSVKGRFTISRDNAKNTVYLQMNSLKPEDTAVYYCAVYARYTHYYAYWGQGTQVTVSS

SEQ ID NO: 4115 - protein, 126 aa, Artificial Sequence
  Chemically Synthesized
QVQLQESGGGLVQAGGSLRLSCAASGTISQSTNMGWYRQAPGKERELVATITAGASTNYADSVKGRFTISRDNAKNTVYLQMNSLKPEDTAVYYCAAESHLIGPQFGPHVAKFAYWGQGTQVTVSS

SEQ ID NO: 4116 - protein, 121 aa, Artificial Sequence
  Chemically Synthesized
QVQLQESGGGLVQAGGSLRLSCAASGYISPRYYMGWYRQAPGKERELVPVLLTVLIPYADSVKGRFTISRDNAKNTVYLQMNSLKPEDTAVYYCAARQPYRYETWTVYYYWGQGTQVTVSS

SEQ ID NO: 4117 - protein, 118 aa, Artificial Sequence
  Chemically Synthesized
QVQLQESGGGLVQAGGSLRLSCAASGSISSPTAMGWYRQAPGKEREFVAGIARGASTYYADSVKGRFTISRDNAKNTVYLQMNSLKPEDTAVYYCAALGYESGVHRYWGQGTQVTVSS

SEQ ID NO: 4118 - protein, 122 aa, Artificial Sequence
  Chemically Synthesized
QVQLQESGGGLVQAGGSLRLSCAASGNISYVVTMGWYRQAPGKEREFVATISQGTSTYYADSVKGRFTISRDNAKNTVYLQMNSLKPEDTAVYYCAARTDITGGRTTTHGYWGQGTQVTVSS

SEQ ID NO: 4119 - protein, 118 aa, Artificial Sequence
  Chemically Synthesized
QVQLQESGGGLVQAGGSLRLSCAASGYIFRYTTMGWYRQAPGKEREFVASIAHGGNTYYADSVKGRFTISRDNAKNTVYLQMNSLKPEDTAVYYCAAGWQPFYFFSYWGQGTQVTVSS

SEQ ID NO: 4120 - protein, 121 aa, Artificial Sequence
  Chemically Synthesized
QVQLQESGGGLVQAGGSLRLSCAASGNIFGPFSMGWYRQAPGKERELVAAIDEGSTPYADSVKGRFTISRDNAKNTVYLQMNSLKPEDTAVYYCAVPVDWPWLSYVVLYYWGQGTQVTVSS

SEQ ID NO: 4121 - protein, 122 aa, Artificial Sequence
  Chemically Synthesized
QVQLQESGGGLVQAGGSLRLSCAASGNISDGRTMGWYRQAPGKERELVAAISYGASTYYADSVKGRFTISRDNAKNTVYLQMNSLKPEDTAVYYCAVGGRHDANEERGHGYWGQGTQVTVSS

SEQ ID NO: 4122 - protein, 122 aa, Artificial Sequence
  Chemically Synthesized
QVQLQESGGGLVQAGGSLRLSCAASGYISYAEPMGWYRQAPGKERELVATIDAGASTNYADSVKGRFTISRDNAKNTVYLQMNSLKPEDTAVYYCAVGSFPYYYAPYLLSYWGQGTQVTVSS

SEQ ID NO: 4123 - protein, 122 aa, Artificial Sequence
  Chemically Synthesized
QVQLQESGGGLVQAGGSLRLSCAASGNISPPNYMGWYRQAPGKERELVAGIGFGSSTYYADSVKGRFTISRDNAKNTVYLQMNSLKPEDTAVYYCAAGWRDGVRWGYRHGYWGQGTQVTVSS

SEQ ID NO: 4124 - protein, 122 aa, Artificial Sequence
  Chemically Synthesized
QVQLQESGGGLVQAGGSLRLSCAASGYISDTLVMGWYRQAPGKERELVATIGNGGSTNYADSVKGRFTISRDNAKNTVYLQMNSLKPEDTAVYYCAATYYDSGDDGAGLDYWGQGTQVTVSS

SEQ ID NO: 4125 - protein, 125 aa, Artificial Sequence
  Chemically Synthesized
QVQLQESGGGLVQAGGSLRLSCAASGNILTLVMGWYRQAPGKERELVAAITAGTITYYADSVKGRFTISRDNAKNTVYLQMNSLKPEDTAVYYCAAAYTVRGEREYPIYQTHPYWGQGTQVTVSS

SEQ ID NO: 4126 - protein, 113 aa, Artificial Sequence
  Chemically Synthesized
QVQLQESGGGLVQAGGSLRLSCAASGYIMGWYRQAPGKEREFVAAIAGGTTTNYADSVKGRFTISRDNAKNTVYLQMNSLKPEDTAVYYCAVTRNYSDLYAYWGQGTQVTVSS

SEQ ID NO: 4127 - protein, 118 aa, Artificial Sequence
  Chemically Synthesized
QVQLQESGGGLVQAGGSLRLSCAASGNIFGLLYMGWYRQAPGKERELVAGIDDGSNTNYADSVKGRFTISRDNAKNTVYLQMNSLKPEDTAVYYCAVDYSDHLDLTYWGQGTQVTVSS

SEQ ID NO: 4128 - protein, 124 aa, Artificial Sequence
  Chemically Synthesized
QVQLQESGGGLVQAGGSLRLSCAASGTISIDQYMGWYRQAPGKERELVASINIGASTYADSVKGRFTISRDNAKNTVYLQMNSLKPEDTAVYYCAAYLTYHTTTYSTVTLVLYWGQGTQVTVSS

SEQ ID NO: 4129 - protein, 109 aa, Artificial Sequence
  Chemically Synthesized
QVQLQESGGGLVQAGGSLRLSCAASGTIFNVFDMGWYRQAPGKERELVAAIDYGGNTNYADSVKGRFTISRDNAKNTVYLQMNSLKPEDTAVYYCAVYWGQGTQVTVSS

SEQ ID NO: 4130 - protein, 117 aa, Artificial Sequence
  Chemically Synthesized
QVQLQESGGGLVQAGGSLRLSCAASGYIFVRGGMGWYRQAPGKERELVASISDGTTTYYADSVKGRFTISRDNAKNTVYLQMNSLKPEDTAVYYCALWLTTVRLMYWGQGTQVTVSS

SEQ ID NO: 4131 - protein, 117 aa, Artificial Sequence
  Chemically Synthesized
QVQLQESGGGLVQAGGSLRLSCAASGSISWAPMGWYRQAPGKERELVASISWGGSTYYADSVKGRFTISRDNAKNTVYLQMNSLKPEDTAVYYCAAYDIVVPIFSYWGQGTQVTVSS

SEQ ID NO: 4132 - protein, 118 aa, Artificial Sequence
  Chemically Synthesized
QVQLQESGGGLVQAGGSLRLSCAASGSIFSDYVMGWYRQAPGKEREFVASIGTGANTNYADSVKGRFTISRDNAKNTVYLQMNSLKPEDTAVYYCAVQSPGHQFFYYWGQGTQVTVSS

SEQ ID NO: 4133 - protein, 122 aa, Artificial Sequence
  Chemically Synthesized
QVQLQESGGGLVQAGGSLRLSCAASGSIFGDYSMGWYRQAPGKERELVASIDAGGSTNYADSVKGRFTISRDNAKNTVYLQMNSLKPEDTAVYYCAATQGYWTHVADTHSYWGQGTQVTVSS

SEQ ID NO: 4134 - protein, 118 aa, Artificial Sequence
  Chemically Synthesized
QVQLQESGGGLVQAGGSLRLSCAASGSISYIADMGWYRQAPGKERELVASITTGGTTYYADSVKGRFTISRDNAKNTVYLQMNSLKPEDTAVYYCAVYGDVSLGFRYWGQGTQVTVSS

SEQ ID NO: 4135 - protein, 121 aa, Artificial Sequence
  Chemically Synthesized
QVQLQESGGGLVQAGGSLRLSCAASGYISATQRMGWYRQAPGKERELVAGIGSGATTYYADSVKGRFTISRDNAKNTVYLQMNSLKPEDTAVYYCAAWSVYTSDDSFRMYWGQGTQVTVSS

SEQ ID NO: 4136 - protein, 118 aa, Artificial Sequence
  Chemically Synthesized
QVQLQESGGGLVQAGGSLRLSCAASGNIFFYNDMGWYRQAPGKEREFVAGINVGANTNYADSVKGRFTISRDNAKNTVYLQMNSLKPEDTAVYYCAVDRASFPDHYYWGQGTQVTVSS

SEQ ID NO: 4137 - protein, 118 aa, Artificial Sequence
  Chemically Synthesized
QVQLQESGGGLVQAGGSLRLSCAASGTISRWKDMGWYRQAPGKERELVASINAGAITNYADSVKGRFTISRDNAKNTVYLQMNSLKPEDTAVYYCAALRRTGVLFTYWGQGTQVTVSS

SEQ ID NO: 4138 - protein, 118 aa, Artificial Sequence
  Chemically Synthesized
QVQLQESGGGLVQAGGSLRLSCAASGTISYAKPMGWYRQAPGKERELVATIAYGCYYLYADSVKGRFTISRDNAKNTVYLQMNSLKPEDTAVYYCAVYYNVTDDHYYWGQGTQVTVSS

SEQ ID NO: 4139 - protein, 118 aa, Artificial Sequence
  Chemically Synthesized
QVQLQESGGGLVQAGGSLRLSCAASGYISTYHVMGWYRQAPGKEREFVAGIAGGGNTNYADSVKGRFTISRDNAKNTVYLQMNSLKPEDTAVYYCAVGYYDWGVHLYWGQGTQVTVSS

SEQ ID NO: 4140 - protein, 125 aa, Artificial Sequence
  Chemically Synthesized
QVQLQESGGGLVQAGGSLRLSCAASGTIFPLASMGWYRQAPGKEREFVAAINLGGTTNYADSVKGRFTISRDNAKNTVYLQMNSLKPEDTAVYYCAVLDDASDSVSSCTTCRFYWGQGTQVTVSS

SEQ ID NO: 4141 - protein, 122 aa, Artificial Sequence
  Chemically Synthesized
QVQLQESGGGLVQAGGSLRLSCAASGSISDNSKMGWYRQAPGKERELVASITGGGITNYADSVKGRFTISRDNAKNTVYLQMNSLKPEDTAVYYCAAYYTGEDQGPYYHWYWGQGTQVTVSS

SEQ ID NO: 4142 - protein, 118 aa, Artificial Sequence
  Chemically Synthesized
QVQLQESGGGLVQAGGSLRLSCAASGYIFYANDMGWYRQAPGKERELVASIGRGGNTYYADSVKGRFTISRDNAKNTVYLQMNSLKPEDTAVYYCAVSPHDSDYLGYWGQGTQVTVSS

SEQ ID NO: 4143 - protein, 117 aa, Artificial Sequence
  Chemically Synthesized
QVQLQESGGGLVQAGGSLRLSCAASGTIFDATIMGWYRQAPGKEREFVATIAKGASTYYADSVKGRFTISRDNAKNTVYLQMNSLKPEDTAVYYCAAAQYSCTVMYWGQGTQVTVSS

SEQ ID NO: 4144 - protein, 118 aa, Artificial Sequence
  Chemically Synthesized
QVQLQESGGGLVQAGGSLRLSCAASGYISRTSSMGWYRQAPGKEREFVATITPGGNTNYADSVKGRFTISRDNAKNTVYLQMNSLKPEDTAVYYCAVGSDIQRFHGYWGQGTQVTVSS

SEQ ID NO: 4145 - protein, 126 aa, Artificial Sequence
  Chemically Synthesized
QVQLQESGGGLVQAGGSLRLSCAASGYISADGRMGWYRQAPGKERELVASIDVGSSTNYADSVKGRFTISRDNAKNTVYLQMNSLKPEDTAVYYCAAPADYGTAYRLIAGYSLDYWGQGTQVTVSS

SEQ ID NO: 4146 - protein, 122 aa, Artificial Sequence
  Chemically Synthesized
QVQLQESGGGLVQAGGSLRLSCAASGTISTEDYMGWYRQAPGKERELVAAINWGTSTYYADSVKGRFTISRDNAKNTVYLQMNSLKPEDTAVYYCAAVAYVQRFYITGLDYWGQGTQVTVSS

SEQ ID NO: 4147 - protein, 117 aa, Artificial Sequence
  Chemically Synthesized
QVQLQESGGGLVQAGGSLRLSCAASGNISAYGLMGWYRQAPGKERELVAGISAVVLPYADSVKGRFTISRDNAKNTVYLQMNSLKPEDTAVYYCAVAPTYIYWHDYWGQGTQVTVSS

SEQ ID NO: 4148 - protein, 118 aa, Artificial Sequence
  Chemically Synthesized
QVQLQESGGGLVQAGGSLRLSCAASGTISFWLVMGWYRQAPGKEREFVAAIGYGGNTNYADSVKGRFTISRDNAKNTVYLQMNSLKPEDTAVYYCAVYKSNHRRHYYWGQGTQVTVSS

SEQ ID NO: 4149 - protein, 118 aa, Artificial Sequence
  Chemically Synthesized
QVQLQESGGGLVQAGGSLRLSCAASGSISLVLYYMGWYRQAPGKERELVASITPGGITNYADSVKGRFTISRDNAKNTVYLQMNSLKPEDTAVYYCAAESNTETTLYWGQGTQVTVSS

SEQ ID NO: 4150 - protein, 126 aa, Artificial Sequence
  Chemically Synthesized
QVQLQESGGGLVQAGGSLRLSCAASGSISYTYDMGWYRQAPGKERELVATIAYGGTTNYADSVKGRFTISRDNAKNTVYLQMNSLKPEDTAVYYCAANDTNVDDDVFSVVYRHAYWGQGTQVTVSS

SEQ ID NO: 4151 - protein, 126 aa, Artificial Sequence
  Chemically Synthesized
QVQLQESGGGLVQAGGSLRLSCAASGTIFPSQYMGWYRQAPGKERELVASIGYGANTNYADSVKGRFTISRDNAKNTVYLQMNSLKPEDTAVYYCAAGASVLRAGLGDTSLYFWYWGQGTQVTVSS

SEQ ID NO: 4152 - protein, 118 aa, Artificial Sequence
  Chemically Synthesized
QVQLQESGGGLVQAGGSLRLSCAASGYISDYDAMGWYRQAPGKERELVASINRGGNTYYADSVKGRFTISRDNAKNTVYLQMNSLKPEDTAVYYCAAIFRDREDHYYWGQGTQVTVSS

SEQ ID NO: 4153 - protein, 118 aa, Artificial Sequence
  Chemically Synthesized
QVQLQESGGGLVQAGGSLRLSCAASGTISDTTVMGWYRQAPGKERELVAAINHGGITNYADSVKGRFTISRDNAKNTVYLQMNSLKPEDTAVYYCAAPTYAEYQHDYWGQGTQVTVSS

SEQ ID NO: 4154 - protein, 118 aa, Artificial Sequence
  Chemically Synthesized
QVQLQESGGGLVQAGGSLRLSCAASGNISHDYDMGWYRQAPGKEREFVATIGIGSITNYADSVKGRFTISRDNAKNTVYLQMNSLKPEDTAVYYCAADDAITGDYQYWGQGTQVTVSS

SEQ ID NO: 4155 - protein, 118 aa, Artificial Sequence
  Chemically Synthesized
QVQLQESGGGLVQAGGSLRLSCAASGYISSDYAMGWYRQAPGKERELVASIDDGAITNYADSVKGRFTISRDNAKNTVYLQMNSLKPEDTAVYYCAALSYRPGLHPYWGQGTQVTVSS

SEQ ID NO: 4156 - protein, 122 aa, Artificial Sequence
  Chemically Synthesized
QVQLQESGGGLVQAGGSLRLSCAASGNISAPQVMGWYRQAPGKERELVATIAEGTSTNYADSVKGRFTISRDNAKNTVYLQMNSLKPEDTAVYYCAATLGPPNETGFELYYWGQGTQVTVSS

SEQ ID NO: 4157 - protein, 122 aa, Artificial Sequence
  Chemically Synthesized
QVQLQESGGGLVQAGGSLRLSCAASGNISYVATMGWYRQAPGKEREFVASISDGASTYYADSVKGRFTISRDNAKNTVYLQMNSLKPEDTAVYYCAAAIYPYFRGPPSLPYWGQGTQVTVSS

SEQ ID NO: 4158 - protein, 126 aa, Artificial Sequence
  Chemically Synthesized
QVQLQESGGGLVQAGGSLRLSCAASGNIFPYRSMGWYRQAPGKERELVASIGYGGTTYYADSVKGRFTISRDNAKNTVYLQMNSLKPEDTAVYYCAADYPKFPDWNRYDLQKYWYWGQGTQVTVSS

SEQ ID NO: 4159 - protein, 118 aa, Artificial Sequence
  Chemically Synthesized
QVQLQESGGGLVQAGGSLRLSCAASGTISYTRGMGWYRQAPGKEREFVATINSGGITNYADSVKGRFTISRDNAKNTVYLQMNSLKPEDTAVYYCAVPESYLTVHWYWGQGTQVTVSS

SEQ ID NO: 4160 - protein, 122 aa, Artificial Sequence
  Chemically Synthesized
QVQLQESGGGLVQAGGSLRLSCAASGNIFLGYYMGWYRQAPGKERELVAGIGDGAITNYADSVKGRFTISRDNAKNTVYLQMNSLKPEDTAVYYCAADDRVHYPAWVGHVYWGQGTQVTVSS

SEQ ID NO: 4161 - protein, 123 aa, Artificial Sequence
  Chemically Synthesized
QVQLQESGGGLVQAGGSLRLSCAASGYISLYWSMGWYRQAPGKERELVATINDGSTTYYADSVKGRFTISRDNAKNTVYLQMNSLKPEDTAVYYCAATTQEDSAYLYNYYDYWGQGTQVTVSS

SEQ ID NO: 4162 - protein, 117 aa, Artificial Sequence
  Chemically Synthesized
QVQLQESGGGLVQAGGSLRLSCAASGNIFHTYRMGWYRQAPGKEREFVASISQGANTNYADSVKGRFTISRDNAKNTVYLQMNSLKPEDTAVYYCAAHPFSNVLMYWGQGTQVTVSS

SEQ ID NO: 4163 - protein, 121 aa, Artificial Sequence
  Chemically Synthesized
QVQLQESGGGLVQAGGSLRLSCAASGSISDPYVMGWYRQAPGKERELVAGINHGTTTNYADSVKGRFTISRDNAKNTVYLQMNSLKPEDTAVYYCALKSLLTTVTTTVIYWGQGTQVTVSS

SEQ ID NO: 4164 - protein, 117 aa, Artificial Sequence
  Chemically Synthesized
QVQLQESGGGLVQAGGSLRLSCAASGSISTSSMGWYRQAPGKERELVAAITAGANTNYADSVKGRFTISRDNAKNTVYLQMNSLKPEDTAVYYCAVHSNTLVQFAYWGQGTQVTVSS

SEQ ID NO: 4165 - protein, 122 aa, Artificial Sequence
  Chemically Synthesized
QVQLQESGGGLVQAGGSLRLSCAASGTISRGPDMGWYRQAPGKERELVATITFGASTYYADSVKGRFTISRDNAKNTVYLQMNSLKPEDTAVYYCAVQDYLGDRDTQDYLYWGQGTQVTVSS

SEQ ID NO: 4166 - protein, 118 aa, Artificial Sequence
  Chemically Synthesized
QVQLQESGGGLVQAGGSLRLSCAASGTIFRVYDMGWYRQAPGKERELVAAIALGASTNYADSVKGRFTISRDNAKNTVYLQMNSLKPEDTAVYYCAVTIKATYGLSYWGQGTQVTVSS

SEQ ID NO: 4167 - protein, 117 aa, Artificial Sequence
  Chemically Synthesized
QVQLQESGGGLVQAGGSLRLSCAASGNIFSGRRMGWYRQAPGKERELVAGIADGSSTYYADSVKGRFTISRDNAKNTVYLQMNSLKPEDTAVYYCAATYGVVSSLYWGQGTQVTVSS

SEQ ID NO: 4168 - protein, 122 aa, Artificial Sequence
  Chemically Synthesized
QVQLQESGGGLVQAGGSLRLSCAASGYISDYDEMGWYRQAPGKEREFVASINSGSITYYADSVKGRFTISRDNAKNTVYLQMNSLKPEDTAVYYCAVSPRTYGRDVDLHTYWGQGTQVTVSS

SEQ ID NO: 4169 - protein, 118 aa, Artificial Sequence
  Chemically Synthesized
QVQLQESGGGLVQAGGSLRLSCAASGSIFSYYYMGWYRQAPGKEREFVATISLGGTTNYADSVKGRFTISRDNAKNTVYLQMNSLKPEDTAVYYCAAYYDGYGDLDYWGQGTQVTVSS

SEQ ID NO: 4170 - protein, 122 aa, Artificial Sequence
  Chemically Synthesized
QVQLQESGGGLVQAGGSLRLSCAASGNISRGGVMGWYRQAPGKEREFVAGIGDGGNTYYADSVKGRFTISRDNAKNTVYLQMNSLKPEDTAVYYCAVYRNQYHPDYESYAYWGQGTQVTVSS

SEQ ID NO: 4171 - protein, 122 aa, Artificial Sequence
  Chemically Synthesized
QVQLQESGGGLVQAGGSLRLSCAASGYISTLLIMGWYRQAPGKERELVATIALGGNTYYADSVKGRFTISRDNAKNTVYLQMNSLKPEDTAVYYCAVNTRVRPVGPYYHQYWGQGTQVTVSS

SEQ ID NO: 4172 - protein, 118 aa, Artificial Sequence
  Chemically Synthesized
QVQLQESGGGLVQAGGSLRLSCAASGTIFRPAIMGWYRQAPGKERELVATISNGAITYYADSVKGRFTISRDNAKNTVYLQMNSLKPEDTAVYYCAVYADGYAQFRYWGQGTQVTVSS

SEQ ID NO: 4173 - protein, 118 aa, Artificial Sequence
  Chemically Synthesized
QVQLQESGGGLVQAGGSLRLSCAASGYISGHSSMGWYRQAPGKERELVAAIDWGAITNYADSVKGRFTISRDNAKNTVYLQMNSLKPEDTAVYYCAADVRYRFNHYYWGQGTQVTVSS

SEQ ID NO: 4174 - protein, 118 aa, Artificial Sequence
  Chemically Synthesized
QVQLQESGGGLVQAGGSLRLSCAASGTISVSIVMGWYRQAPGKERELVATIDPGATTYYADSVKGRFTISRDNAKNTVYLQMNSLKPEDTAVYYCAVYYLTDPYFLYWGQGTQVTVSS

SEQ ID NO: 4175 - protein, 126 aa, Artificial Sequence
  Chemically Synthesized
QVQLQESGGGLVQAGGSLRLSCAASGTISGNGWMGWYRQAPGKERELVAAISDGGNTYYADSVKGRFTISRDNAKNTVYLQMNSLKPEDTAVYYCAVTNEYIVETEATYLLVFIYWGQGTQVTVSS

SEQ ID NO: 4176 - protein, 117 aa, Artificial Sequence
  Chemically Synthesized
QVQLQESGGGLVQAGGSLRLSCAASGTISVAISMGWYRQAPGKERELVAAITSVLLPYADSVKGRFTISRDNAKNTVYLQMNSLKPEDTAVYYCAADDDGPDSHDYWGQGTQVTVSS

SEQ ID NO: 4177 - protein, 121 aa, Artificial Sequence
  Chemically Synthesized
QVQLQESGGGLVQAGGSLRLSCAASGLFFGTVMGWYRQAPGKEREFVATITTGGITNYADSVKGRFTISRDNAKNTVYLQMNSLKPEDTAVYYCAVYAIVRPGWYYAHTYWGQGTQVTVSS

SEQ ID NO: 4178 - protein, 118 aa, Artificial Sequence
  Chemically Synthesized
QVQLQESGGGLVQAGGSLRLSCAASGSIFHMGWYRQAPGKERELVASIDDGTNKYADSVKGRFTISRDNAKNTVYLQMNSLKPEDTAVYYCAADWYFRLFGSFGHTYWGQGTQVTVSS

SEQ ID NO: 4179 - protein, 117 aa, Artificial Sequence
  Chemically Synthesized
QVQLQESGGGLVQAGGSLRLSCAASGYIFYGTGMGWYRQAPGKERELVATITDGTSPYADSVKGRFTISRDNAKNTVYLQMNSLKPEDTAVYYCAVTYASDNDYSYWGQGTQVTVSS

SEQ ID NO: 4180 - protein, 118 aa, Artificial Sequence
  Chemically Synthesized
QVQLQESGGGLVQAGGSLRLSCAASGNISADGSMGWYRQAPGKEREFVAGIAYGGITYYADSVKGRFTISRDNAKNTVYLQMNSLKPEDTAVYYCAARDSRWRYFPYWGQGTQVTVSS

SEQ ID NO: 4181 - protein, 118 aa, Artificial Sequence
  Chemically Synthesized
QVQLQESGGGLVQAGGSLRLSCAASGNISYAYTMGWYRQAPGKEREFVATITTGSSTNYADSVKGRFTISRDNAKNTVYLQMNSLKPEDTAVYYCAVYFGVDIRFSYWGQGTQVTVSS

SEQ ID NO: 4182 - protein, 118 aa, Artificial Sequence
  Chemically Synthesized
QVQLQESGGGLVQAGGSLRLSCAASGSISDSQFMGWYRQAPGKERELVAGIDDGGTTNYADSVKGRFTISRDNAKNTVYLQMNSLKPEDTAVYYCAVYPLSRYDLTYWGQGTQVTVSS

SEQ ID NO: 4183 - protein, 122 aa, Artificial Sequence
  Chemically Synthesized
QVQLQESGGGLVQAGGSLRLSCAASGNISLSEPMGWYRQAPGKEREFVATIGQGGSTNYADSVKGRFTISRDNAKNTVYLQMNSLKPEDTAVYYCAVLSTYGLYDYDLHGYWGQGTQVTVSS

SEQ ID NO: 4184 - protein, 122 aa, Artificial Sequence
  Chemically Synthesized
QVQLQESGGGLVQAGGSLRLSCAASGNISGWSYMGWYRQAPGKEREFVAGIDLGSSTNYADSVKGRFTISRDNAKNTVYLQMNSLKPEDTAVYYCAATDIQWWGLAREYPYWGQGTQVTVSS

SEQ ID NO: 4185 - protein, 117 aa, Artificial Sequence
  Chemically Synthesized
QVQLQESGGGLVQAGGSLRLSCAASGTISAYINMGWYRQAPGKERELVAGISSGSNTNYADSVKGRFTISRDNAKNTVYLQMNSLKPEDTAVYYCAVSDASTGQFYWGQGTQVTVSS

SEQ ID NO: 4186 - protein, 117 aa, Artificial Sequence
  Chemically Synthesized
QVQLQESGGGLVQAGGSLRLSCAASGNIFTQAPMGWYRQAPGKEREFVAAILSVLVPYADSVKGRFTISRDNAKNTVYLQMNSLKPEDTAVYYCAVLTAYAGDFYYWGQGTQVTVSS

SEQ ID NO: 4187 - protein, 118 aa, Artificial Sequence
  Chemically Synthesized
QVQLQESGGGLVQAGGSLRLSCAASGNIFRHYAMGWYRQAPGKERELVAAINTGSNTYYADSVKGRFTISRDNAKNTVYLQMNSLKPEDTAVYYCAASYRYVGPHGYWGQGTQVTVSS

SEQ ID NO: 4188 - protein, 126 aa, Artificial Sequence
  Chemically Synthesized
QVQLQESGGGLVQAGGSLRLSCAASGSISDLFTMGWYRQAPGKEREFVATINHGSTTNYADSVKGRFTISRDNAKNTVYLQMNSLKPEDTAVYYCAVVRDDLIYYYTYRADNYAYWGQGTQVTVSS

SEQ ID NO: 4189 - protein, 118 aa, Artificial Sequence
  Chemically Synthesized
QVQLQESGGGLVQAGGSLRLSCAASGTISFVHKMGWYRQAPGKERELVAAIGYGSITYYADSVKGRFTISRDNAKNTVYLQMNSLKPEDTAVYYCAAGPWRRDDFSYWGQGTQVTVSS

SEQ ID NO: 4190 - protein, 121 aa, Artificial Sequence
  Chemically Synthesized
QVQLQESGGGLVQAGGSLRLSCAASGNISAEWRMGWYRQAPGKERELVATIDRGAITYYADSVKGRFTISRDNAKNTVYLQMNSLKPEDTAVYYCAAAGRLDRRSAYYVYWGQGTQVTVSS

SEQ ID NO: 4191 - protein, 118 aa, Artificial Sequence
  Chemically Synthesized
QVQLQESGGGLVQAGGSLRLSCAASGNIFAILYMGWYRQAPGKERELVAAIGYGGTTYYADSVKGRFTISRDNAKNTVYLQMNSLKPEDTAVYYCAVSGYKYYSHFYWGQGTQVTVSS

SEQ ID NO: 4192 - protein, 122 aa, Artificial Sequence
  Chemically Synthesized
QVQLQESGGGLVQAGGSLRLSCAASGNISAGAFMGWYRQAPGKEREFVASIAYGGITNYADSVKGRFTISRDNAKNTVYLQMNSLKPEDTAVYYCAVIADSLDVYVGYHIYWGQGTQVTVSS

SEQ ID NO: 4193 - protein, 112 aa, Artificial Sequence
  Chemically Synthesized
QVQLQESGGGLVQAGGSLRLSCAASGNISGEYVMGWYRQAPGKERELVATIGGGASTYYADSVKGRFTISRDNAKNTVYLQMNSLKPEDTAVYYCAVLLMYWGQGTQVTVSS

SEQ ID NO: 4194 - protein, 122 aa, Artificial Sequence
  Chemically Synthesized
QVQLQESGGGLVQAGGSLRLSCAASGSISQSLRMGWYRQAPGKERELVAAINDGTTTNYADSVKGRFTISRDNAKNTVYLQMNSLKPEDTAVYYCAVGKYVYRPYGRKYTYWGQGTQVTVSS

SEQ ID NO: 4195 - protein, 117 aa, Artificial Sequence
  Chemically Synthesized
QVQLQESGGGLVQAGGSLRLSCAASGSISAYYMGWYRQAPGKEREFVAAIGIGATTYYADSVKGRFTISRDNAKNTVYLQMNSLKPEDTAVYYCAATPLYEVLHFYWGQGTQVTVSS

SEQ ID NO: 4196 - protein, 118 aa, Artificial Sequence
  Chemically Synthesized
QVQLQESGGGLVQAGGSLRLSCAASGSISKYRYMGWYRQAPGKEREFVAGITYGANTYYADSVKGRFTISRDNAKNTVYLQMNSLKPEDTAVYYCAVDSPPSPDYYYWGQGTQVTVSS

SEQ ID NO: 4197 - protein, 118 aa, Artificial Sequence
  Chemically Synthesized
QVQLQESGGGLVQAGGSLRLSCAASGYISPVRGMGWYRQAPGKERELVATIGTGSSTNYADSVKGRFTISRDNAKNTVYLQMNSLKPEDTAVYYCAVQYDPSYQHSYWGQGTQVTVSS

SEQ ID NO: 4198 - protein, 118 aa, Artificial Sequence
  Chemically Synthesized
QVQLQESGGGLVQAGGSLRLSCAASGSISGRRGMGWYRQAPGKERELVAAISDGASTYYADSVKGRFTISRDNAKNTVYLQMNSLKPEDTAVYYCAVRSDGNSNYIYWGQGTQVTVSS

SEQ ID NO: 4199 - protein, 118 aa, Artificial Sequence
  Chemically Synthesized
QVQLQESGGGLVQAGGSLRLSCAASGYISWRQKMGWYRQAPGKEREFVAAIGTGANTNYADSVKGRFTISRDNAKNTVYLQMNSLKPEDTAVYYCAVEWNTRAHYPYWGQGTQVTVSS

SEQ ID NO: 4200 - protein, 126 aa, Artificial Sequence
  Chemically Synthesized
QVQLQESGGGLVQAGGSLRLSCAASGYISGSGLMGWYRQAPGKERELVATIAIGGTTYYADSVKGRFTISRDNAKNTVYLQMNSLKPEDTAVYYCAVFLYPSYTIQYWLSYTLGYWGQGTQVTVSS

SEQ ID NO: 4201 - protein, 118 aa, Artificial Sequence
  Chemically Synthesized
QVQLQESGGGLVQAGGSLRLSCAASGTISSLAQMGWYRQAPGKERELVASIASGSTTNYADSVKGRFTISRDNAKNTVYLQMNSLKPEDTAVYYCAVYLLFLYWYDYWGQGTQVTVSS

SEQ ID NO: 4202 - protein, 113 aa, Artificial Sequence
  Chemically Synthesized
QVQLQESGGGLVQAGGSLRLSCAASGTISDGYDMGWYRQAPGKERELVAAIAPYADSVKGRFTISRDNAKNTVYLQMNSLKPEDTAVYYCAAGTINIVSLIYWGQGTQVTVSS

SEQ ID NO: 4203 - protein, 122 aa, Artificial Sequence
  Chemically Synthesized
QVQLQESGGGLVQAGGSLRLSCAASGTISRHTIMGWYRQAPGKEREFVASINNGATTYYADSVKGRFTISRDNAKNTVYLQMNSLKPEDTAVYYCAVRRVYGPFSWVYHVYWGQGTQVTVSS

SEQ ID NO: 4204 - protein, 115 aa, Artificial Sequence
  Chemically Synthesized
QVQLQESGGGLVQAGGSLRLSCAASGYIFLMGWYRQAPGKEREFVATISPGSTTNYADSVKGRFTISRDNAKNTVYLQMNSLKPEDTAVYYCAVPDRSGSVHVYWGQGTQVTVSS

SEQ ID NO: 4205 - protein, 118 aa, Artificial Sequence
  Chemically Synthesized
QVQLQESGGGLVQAGGSLRLSCAASGSISDFTIMGWYRQAPGKEREFVASIAFGSNTNYADSVKGRFTISRDNAKNTVYLQMNSLKPEDTAVYYCAVYSPSADTLYYWGQGTQVTVSS

SEQ ID NO: 4206 - protein, 116 aa, Artificial Sequence
  Chemically Synthesized
QVQLQESGGGLVQAGGSLRLSCAASGNIFLHPYMGWYRQAPGKERELVAAITEGTTTNYADSVKGRFTISRDNAKNTVYLQMNSLKPEDTAVYYCAAYLWYIFSYWGQGTQVTVSS

SEQ ID NO: 4207 - protein, 118 aa, Artificial Sequence
  Chemically Synthesized
QVQLQESGGGLVQAGGSLRLSCAASGTISKLRIMGWYRQAPGKERELVAGITRGSITYYADSVKGRFTISRDNAKNTVYLQMNSLKPEDTAVYYCAVYQTRIGLLRYWGQGTQVTVSS

SEQ ID NO: 4208 - protein, 122 aa, Artificial Sequence
  Chemically Synthesized
QVQLQESGGGLVQAGGSLRLSCAASGSISPFGYMGWYRQAPGKEREFVAAIGEGGSTNYADSVKGRFTISRDNAKNTVYLQMNSLKPEDTAVYYCAVDDLINSDRQTYHDYWGQGTQVTVSS

SEQ ID NO: 4209 - protein, 121 aa, Artificial Sequence
  Chemically Synthesized
QVQLQESGGGLVQAGGSLRLSCAASGNIFPAREMGWYRQAPGKERELVAGLLTVVVPYADSVKGRFTISRDNAKNTVYLQMNSLKPEDTAVYYCAVTGRAQRKDQLDHYYWGQGTQVTVSS

SEQ ID NO: 4210 - protein, 117 aa, Artificial Sequence
  Chemically Synthesized
QVQLQESGGGLVQAGGSLRLSCAASGYISRYVTMGWYRQAPGKERELVASIDYGSNTNYADSVKGRFTISRDNAKNTVYLQMNSLKPEDTAVYYCAAGSTGTSFMYWGQGTQVTVSS

SEQ ID NO: 4211 - protein, 121 aa, Artificial Sequence
  Chemically Synthesized
QVQLQESGGGLVQAGGSLRLSCAASGSISSAPYMGWYRQAPGKERELVAGITGSSTYYADSVKGRFTISRDNAKNTVYLQMNSLKPEDTAVYYCAVVHTYQGYPKVDYRYWGQGTQVTVSS

SEQ ID NO: 4212 - protein, 112 aa, Artificial Sequence
  Chemically Synthesized
QVQLQESGGGLVQAGGSLRLSCAASGYISGNTIMGWYRQAPGKEREFALLMTVVIPYADSVKGRFTISRDNAKNTVYLQMNSLKPEDTAVYYCAVPWHFDYWGQGTQVTVSS

SEQ ID NO: 4213 - protein, 120 aa, Artificial Sequence
  Chemically Synthesized
QVQLQESGGGLVQAGGSLRLSCAASGTIWYSGMGWYRQAPGKEREFVAAITWGANTYYADSVKGRFTISRDNAKNTVYLQMNSLKPEDTAVYYCAADDYTDGTVWGHDYWGQGTQVTVSS

SEQ ID NO: 4214 - protein, 122 aa, Artificial Sequence
  Chemically Synthesized
QVQLQESGGGLVQAGGSLRLSCAASGSIFDTAYMGWYRQAPGKEREFVAAITGGGITNYADSVKGRFTISRDNAKNTVYLQMNSLKPEDTAVYYCAVPYAYYPTRDDYYPYWGQGTQVTVSS

SEQ ID NO: 4215 - protein, 120 aa, Artificial Sequence
  Chemically Synthesized
QVQLQESGGGLVQAGGSLRLSCAASGNIFTYRMGWYRQAPGKEREFVAAIDVGGSTYYADSVKGRFTISRDNAKNTVYLQMNSLKPEDTAVYYCAAPRYTQRYADYLYYWGQGTQVTVSS

SEQ ID NO: 4216 - protein, 122 aa, Artificial Sequence
  Chemically Synthesized
QVQLQESGGGLVQAGGSLRLSCAASGYIFDSRYMGWYRQAPGKERELVASIGSGAITYYADSVKGRFTISRDNAKNTVYLQMNSLKPEDTAVYYCAVDPADIGWYRTELTYWGQGTQVTVSS

SEQ ID NO: 4217 - protein, 117 aa, Artificial Sequence
  Chemically Synthesized
QVQLQESGGGLVQAGGSLRLSCAASGTISVYSVMGWYRQAPGKERELVATINSVLVPYADSVKGRFTISRDNAKNTVYLQMNSLKPEDTAVYYCAAPVRGAGNHAYWGQGTQVTVSS

SEQ ID NO: 4218 - protein, 117 aa, Artificial Sequence
  Chemically Synthesized
QVQLQESGGGLVQAGGSLRLSCAASGNISSTTMGWYRQAPGKEREFVAGIGFGGITYYADSVKGRFTISRDNAKNTVYLQMNSLKPEDTAVYYCAVYYDDGARHYYWGQGTQVTVSS

SEQ ID NO: 4219 - protein, 118 aa, Artificial Sequence
  Chemically Synthesized
QVQLQESGGGLVQAGGSLRLSCAASGSIFQLVTMGWYRQAPGKEREFVAGISDGAITYYADSVKGRFTISRDNAKNTVYLQMNSLKPEDTAVYYCAAPDRTRSSLTYWGQGTQVTVSS

SEQ ID NO: 4220 - protein, 118 aa, Artificial Sequence
  Chemically Synthesized
QVQLQESGGGLVQAGGSLRLSCAASGNISDRWFMGWYRQAPGKEREFVAAITGGGTTNYADSVKGRFTISRDNAKNTVYLQMNSLKPEDTAVYYCAADSAYGRRLGYWGQGTQVTVSS

SEQ ID NO: 4221 - protein, 118 aa, Artificial Sequence
  Chemically Synthesized
QVQLQESGGGLVQAGGSLRLSCAASGSISLNVYMGWYRQAPGKEREFVAGIGTGSNTYYADSVKGRFTISRDNAKNTVYLQMNSLKPEDTAVYYCAVLPNLVYIHDYWGQGTQVTVSS

SEQ ID NO: 4222 - protein, 118 aa, Artificial Sequence
  Chemically Synthesized
QVQLQESGGGLVQAGGSLRLSCAASGSISGTFPMGWYRQAPGKERELVATIDYGTTTNYADSVKGRFTISRDNAKNTVYLQMNSLKPEDTAVYYCAAGYDLGWRYWYWGQGTQVTVSS

SEQ ID NO: 4223 - protein, 122 aa, Artificial Sequence
  Chemically Synthesized
QVQLQESGGGLVQAGGSLRLSCAASGTISYHAYMGWYRQAPGKERELVAAITLGGTTYYADSVKGRFTISRDNAKNTVYLQMNSLKPEDTAVYYCAVVHTWDRGARKYHDYWGQGTQVTVSS

SEQ ID NO: 4224 - protein, 110 aa, Artificial Sequence
  Chemically Synthesized
QVQLQESGGGLVQAGGSLRLSCAASGYISRGVSMGWYRQAPGKEREFVASITYGGSTNYADSVKGRFTISRDNAKNTVYLQMNSLKPEDTAVYYCAAVYWGQGTQVTVSS

SEQ ID NO: 4225 - protein, 118 aa, Artificial Sequence
  Chemically Synthesized
QVQLQESGGGLVQAGGSLRLSCAASGYIFGYVVMGWYRQAPGKERELVASITTGAITNYADSVKGRFTISRDNAKNTVYLQMNSLKPEDTAVYYCAVAYTDDYGLVYWGQGTQVTVSS

SEQ ID NO: 4226 - protein, 118 aa, Artificial Sequence
  Chemically Synthesized
QVQLQESGGGLVQAGGSLRLSCAASGTIFESLYMGWYRQAPGKERELVAAIDFGTITNYADSVKGRFTISRDNAKNTVYLQMNSLKPEDTAVYYCAAADDDVYLPSYWGQGTQVTVSS

SEQ ID NO: 4227 - protein, 125 aa, Artificial Sequence
  Chemically Synthesized
QVQLQESGGGLVQAGGSLRLSCAASGSISRSQDMGWYRQAPGKEREFVAAISSGGITYYADSVKGRFTISRDNAKNTVYLQMNSLKPEDTAVYYCAATFAGLSFQYSQYGDHDYWGQGTQVTVSS

SEQ ID NO: 4228 - protein, 118 aa, Artificial Sequence
  Chemically Synthesized
QVQLQESGGGLVQAGGSLRLSCAASGTISYTGYMGWYRQAPGKERELVASIGDGSSTNYADSVKGRFTISRDNAKNTVYLQMNSLKPEDTAVYYCAAGDYAYAGFRYWGQGTQVTVSS

SEQ ID NO: 4229 - protein, 117 aa, Artificial Sequence
  Chemically Synthesized
QVQLQESGGGLVQAGGSLRLSCAASGTISATVMGWYRQAPGKERELVAAIAGGSNTYYADSVKGRFTISRDNAKNTVYLQMNSLKPEDTAVYYCAATSEYEDRHVYWGQGTQVTVSS

SEQ ID NO: 4230 - protein, 122 aa, Artificial Sequence
  Chemically Synthesized
QVQLQESGGGLVQAGGSLRLSCAASGSISYVYAMGWYRQAPGKEREFVASIAEGTTTYYADSVKGRFTISRDNAKNTVYLQMNSLKPEDTAVYYCAASRTRGPDPQDVHGYWGQGTQVTVSS

SEQ ID NO: 4231 - protein, 122 aa, Artificial Sequence
  Chemically Synthesized
QVQLQESGGGLVQAGGSLRLSCAASGTIFDATAMGWYRQAPGKEREFVASIAHGSSTYYADSVKGRFTISRDNAKNTVYLQMNSLKPEDTAVYYCAVVPTSESDGLRVHRYWGQGTQVTVSS

SEQ ID NO: 4232 - protein, 117 aa, Artificial Sequence
  Chemically Synthesized
QVQLQESGGGLVQAGGSLRLSCAASGTISFYRYMGWYRQAPGKERELVAAISRGSNTYYADSVKGRFTISRDNAKNTVYLQMNSLKPEDTAVYYCAAGYRHSWHQYWGQGTQVTVSS

SEQ ID NO: 4233 - protein, 122 aa, Artificial Sequence
  Chemically Synthesized
QVQLQESGGGLVQAGGSLRLSCAASGNISLSTHMGWYRQAPGKEREFVATISDGSSTYYADSVKGRFTISRDNAKNTVYLQMNSLKPEDTAVYYCAAYLAWNIDYRDGLAYWGQGTQVTVSS

SEQ ID NO: 4234 - protein, 118 aa, Artificial Sequence
  Chemically Synthesized
QVQLQESGGGLVQAGGSLRLSCAASGTIFDQRLMGWYRQAPGKEREFVAGIDYGASTNYADSVKGRFTISRDNAKNTVYLQMNSLKPEDTAVYYCAAPHREQQLHAYWGQGTQVTVSS

SEQ ID NO: 4235 - protein, 118 aa, Artificial Sequence
  Chemically Synthesized
QVQLQESGGGLVQAGGSLRLSCAASGYISYYDVMGWYRQAPGKEREFVASIGDGGITNYADSVKGRFTISRDNAKNTVYLQMNSLKPEDTAVYYCAVRNLYYYNLLYWGQGTQVTVSS

SEQ ID NO: 4236 - protein, 118 aa, Artificial Sequence
  Chemically Synthesized
QVQLQESGGGLVQAGGSLRLSCAASGSIFDLDSMGWYRQAPGKEREFVAGIDYGSTTNYADSVKGRFTISRDNAKNTVYLQMNSLKPEDTAVYYCAVPVYPRARLDYWGQGTQVTVSS

SEQ ID NO: 4237 - protein, 117 aa, Artificial Sequence
  Chemically Synthesized
QVQLQESGGGLVQAGGSLRLSCAASGSISSPAGMGWYRQAPGKEREFVATIDIGGITNYADSVKGRFTISRDNAKNTVYLQMNSLKPEDTAVYYCAVGLYSVTGLYWGQGTQVTVSS

SEQ ID NO: 4238 - protein, 122 aa, Artificial Sequence
  Chemically Synthesized
QVQLQESGGGLVQAGGSLRLSCAASGYISYDPSMGWYRQAPGKERELVAGIASGSSTYYADSVKGRFTISRDNAKNTVYLQMNSLKPEDTAVYYCAVDEFLANTWYAYLYYWGQGTQVTVSS

SEQ ID NO: 4239 - protein, 114 aa, Artificial Sequence
  Chemically Synthesized
QVQLQESGGGLVQAGGSLRLSCAASGNISYVVLMGWYRQAPGKERELVATITPGSITNYADSVKGRFTISRDNAKNTVYLQMNSLKPEDTAVYYCAVVTTSLYWGQGTQVTVSS

SEQ ID NO: 4240 - protein, 118 aa, Artificial Sequence
  Chemically Synthesized
QVQLQESGGGLVQAGGSLRLSCAASGSISGPTYMGWYRQAPGKEREFVATIAVGTTTNYADSVKGRFTISRDNAKNTVYLQMNSLKPEDTAVYYCAADDNYDYVLGYWGQGTQVTVSS

SEQ ID NO: 4241 - protein, 113 aa, Artificial Sequence
  Chemically Synthesized
QVQLQESGGGLVQAGGSLRLSCAASGYYMGWYRQAPGKERELVAAINDGTTTNYADSVKGRFTISRDNAKNTVYLQMNSLKPEDTAVYYCAVADNVNATLWYWGQGTQVTVSS

SEQ ID NO: 4242 - protein, 122 aa, Artificial Sequence
  Chemically Synthesized
QVQLQESGGGLVQAGGSLRLSCAASGSIFPTYHMGWYRQAPGKEREFVATINYGGYYQYADSVKGRFTISRDNAKNTVYLQMNSLKPEDTAVYYCAVYDGGGAPYAFTYGYWGQGTQVTVSS

SEQ ID NO: 4243 - protein, 116 aa, Artificial Sequence
  Chemically Synthesized
QVQLQESGGGLVQAGGSLRLSCAASGTISVSAWMGWYRQAPGKERELVAGIDHGSITYYADSVKGRFTISRDNAKNTVYLQMNSLKPEDTAVYYCAAYKKGAYAYWGQGTQVTVSS

SEQ ID NO: 4244 - protein, 122 aa, Artificial Sequence
  Chemically Synthesized
QVQLQESGGGLVQAGGSLRLSCAASGNISVDYYMGWYRQAPGKEREFVAAIDSGGTTYYADSVKGRFTISRDNAKNTVYLQMNSLKPEDTAVYYCAAAYDGGDYGPVFFAYWGQGTQVTVSS

SEQ ID NO: 4245 - protein, 121 aa, Artificial Sequence
  Chemically Synthesized
QVQLQESGGGLVQAGGSLRLSCAASGSIFDFGMGWYRQAPGKEREFVASINPGGSTYYADSVKGRFTISRDNAKNTVYLQMNSLKPEDTAVYYCAVYYYYDDWNDDLFDYWGQGTQVTVSS

SEQ ID NO: 4246 - protein, 124 aa, Artificial Sequence
  Chemically Synthesized
QVQLQESGGGLVQAGGSLRLSCAASGSIFYAEMGWYRQAPGKEREFVAAIDSGASTYYADSVKGRFTISRDNAKNTVYLQMNSLKPEDTAVYYCAVYQSLRTWLYAYPSRLRYWGQGTQVTVSS

SEQ ID NO: 4247 - protein, 122 aa, Artificial Sequence
  Chemically Synthesized
QVQLQESGGGLVQAGGSLRLSCAASGNISADSVMGWYRQAPGKEREFVAGIGYGGITYYADSVKGRFTISRDNAKNTVYLQMNSLKPEDTAVYYCAAGTAQYVDGPYVLGYWGQGTQVTVSS

SEQ ID NO: 4248 - protein, 122 aa, Artificial Sequence
  Chemically Synthesized
QVQLQESGGGLVQAGGSLRLSCAASGTISQADYMGWYRQAPGKEREFVAAIDAGTSTYYADSVKGRFTISRDNAKNTVYLQMNSLKPEDTAVYYCAAYLGGDYAEPYLLYYWGQGTQVTVSS

SEQ ID NO: 4249 - protein, 126 aa, Artificial Sequence
  Chemically Synthesized
QVQLQESGGGLVQAGGSLRLSCAASGTISRDAYMGWYRQAPGKERELVASIGRGSSTNYADSVKGRFTISRDNAKNTVYLQMNSLKPEDTAVYYCAVRVYRPPGGDHYADVYYGYWGQGTQVTVSS

SEQ ID NO: 4250 - protein, 126 aa, Artificial Sequence
  Chemically Synthesized
QVQLQESGGGLVQAGGSLRLSCAASGNIFDIVGMGWYRQAPGKEREFVAAITVGTTTYYADSVKGRFTISRDNAKNTVYLQMNSLKPEDTAVYYCAVALAPNGQPGGYEPYYFRYWGQGTQVTVSS

SEQ ID NO: 4251 - protein, 116 aa, Artificial Sequence
  Chemically Synthesized
QVQLQESGGGLVQAGGSLRLSCAASGYISGEPYMGWYRQAPGKERELVAAIDNGSNTNYADSVKGRFTISRDNAKNTVYLQMNSLKPEDTAVYYCAANRPQYYLYWGQGTQVTVSS

SEQ ID NO: 4252 - protein, 126 aa, Artificial Sequence
  Chemically Synthesized
QVQLQESGGGLVQAGGSLRLSCAASGNIFYLRNMGWYRQAPGKERELVAGISDGGTTNYADSVKGRFTISRDNAKNTVYLQMNSLKPEDTAVYYCAVRYTSDKRVSWINWSNHYYWGQGTQVTVSS

SEQ ID NO: 4253 - protein, 122 aa, Artificial Sequence
  Chemically Synthesized
QVQLQESGGGLVQAGGSLRLSCAASGNISPHSRMGWYRQAPGKERELVATISFGTNTNYADSVKGRFTISRDNAKNTVYLQMNSLKPEDTAVYYCAAARYDFPYGDYRHLYWGQGTQVTVSS

SEQ ID NO: 4254 - protein, 118 aa, Artificial Sequence
  Chemically Synthesized
QVQLQESGGGLVQAGGSLRLSCAASGSISRVNLMGWYRQAPGKERELVATIGTGASTYYADSVKGRFTISRDNAKNTVYLQMNSLKPEDTAVYYCAAVIKAVRYHFYWGQGTQVTVSS

SEQ ID NO: 4255 - protein, 121 aa, Artificial Sequence
  Chemically Synthesized
QVQLQESGGGLVQAGGSLRLSCAASGTIFPYTYMGWYRQAPGKEREFVASIGPGGITNYADSVKGRFTISRDNAKNTVYLQMNSLKPEDTAVYYCAAPSLVSRNLTTTIYWGQGTQVTVSS

SEQ ID NO: 4256 - protein, 122 aa, Artificial Sequence
  Chemically Synthesized
QVQLQESGGGLVQAGGSLRLSCAASGTISAHAYMGWYRQAPGKERELVASIAYGSTTNYADSVKGRFTISRDNAKNTVYLQMNSLKPEDTAVYYCAADGGHPHSYNYDFDYWGQGTQVTVSS

SEQ ID NO: 4257 - protein, 118 aa, Artificial Sequence
  Chemically Synthesized
QVQLQESGGGLVQAGGSLRLSCAASGTISYEPDMGWYRQAPGKERELVATIARGSTTYYADSVKGRFTISRDNAKNTVYLQMNSLKPEDTAVYYCAADGVHAAEHYYWGQGTQVTVSS

SEQ ID NO: 4258 - protein, 117 aa, Artificial Sequence
  Chemically Synthesized
QVQLQESGGGLVQAGGSLRLSCAASGNIFSLSMGWYRQAPGKERELVASINQGSNTNYADSVKGRFTISRDNAKNTVYLQMNSLKPEDTAVYYCAALDWDGRTLDYWGQGTQVTVSS

SEQ ID NO: 4259 - protein, 117 aa, Artificial Sequence
  Chemically Synthesized
QVQLQESGGGLVQAGGSLRLSCAASGYIFYRDEMGWYRQAPGKEREFVASIGIGSSTYYADSVKGRFTISRDNAKNTVYLQMNSLKPEDTAVYYCAAYDDYSTVLYWGQGTQVTVSS

SEQ ID NO: 4260 - protein, 118 aa, Artificial Sequence
  Chemically Synthesized
QVQLQESGGGLVQAGGSLRLSCAASGSISQYYLMGWYRQAPGKEREFVAAIALGASTYYADSVKGRFTISRDNAKNTVYLQMNSLKPEDTAVYYCAVQVRSYDDHSYWGQGTQVTVSS

SEQ ID NO: 4261 - protein, 126 aa, Artificial Sequence
  Chemically Synthesized
QVQLQESGGGLVQAGGSLRLSCAASGNISRYKLMGWYRQAPGKERELVATITYGGNTYYADSVKGRFTISRDNAKNTVYLQMNSLKPEDTAVYYCAVPLPDAQGDQRYWFVAFWYWGQGTQVTVSS

SEQ ID NO: 4262 - protein, 126 aa, Artificial Sequence
  Chemically Synthesized
QVQLQESGGGLVQAGGSLRLSCAASGSISGGISMGWYRQAPGKERELVATIGYGGNTNYADSVKGRFTISRDNAKNTVYLQMNSLKPEDTAVYYCAAWYNTEYARPYLERYRFVYWGQGTQVTVSS

SEQ ID NO: 4263 - protein, 119 aa, Artificial Sequence
  Chemically Synthesized
QVQLQESGGGLVQAGGSLRLSCAASGSISNYNHMGWYRQAPGKEREFVAGITDGTSTNYADSVKGRFTISRDNAKNTVYLQMNSLKPEDTAVYYCAVVYRYVGWYFYYWGQGTQVTVSS

SEQ ID NO: 4264 - protein, 117 aa, Artificial Sequence
  Chemically Synthesized
QVQLQESGGGLVQAGGSLRLSCAASGYISYDYYMGWYRQAPGKERELVAAISYGTNTNYADSVKGRFTISRDNAKNTVYLQMNSLKPEDTAVYYCAVDWDVYQSMYWGQGTQVTVSS

SEQ ID NO: 4265 - protein, 120 aa, Artificial Sequence
  Chemically Synthesized
QVQLQESGGGLVQAGGSLRLSCAASGTIFGYDGMGWYRQAPGKERELLPLLMTVVIPYADSVKGRFTISRDNAKNTVYLQMNSLKPEDTAVYYCAAYLWDDWPARHHRYWGQGTQVTVSS

SEQ ID NO: 4266 - protein, 125 aa, Artificial Sequence
  Chemically Synthesized
QVQLQESGGGLVQAGGSLRLSCAASGTISPYSFMGWYRQAPGKERELVASIGRGGSTYYADSVKGRFTISRDNAKNTVYLQMNSLKPEDTAVYYCAAPGLSQDSADLTYKYHWYWGQGTQVTVSS

SEQ ID NO: 4267 - protein, 118 aa, Artificial Sequence
  Chemically Synthesized
QVQLQESGGGLVQAGGSLRLSCAASGYISHRGYMGWYRQAPGKEREFVAGITYGASTYYADSVKGRFTISRDNAKNTVYLQMNSLKPEDTAVYYCAAGKPNYRYYRYWGQGTQVTVSS

SEQ ID NO: 4268 - protein, 121 aa, Artificial Sequence
  Chemically Synthesized
QVQLQESGGGLVQAGGSLRLSCAASGSIFAAQYMGWYRQAPGKEREFVASISVGATTYYADSVKGRFTISRDNAKNTVYLQMNSLKPEDTAVYYCAVWNAYDFRTTTGMYWGQGTQVTVSS

SEQ ID NO: 4269 - protein, 118 aa, Artificial Sequence
  Chemically Synthesized
QVQLQESGGGLVQAGGSLRLSCAASGNIFYRLLMGWYRQAPGKERELVAGIDFGSTTNYADSVKGRFTISRDNAKNTVYLQMNSLKPEDTAVYYCAAIYQYGTDFWYWGQGTQVTVSS

SEQ ID NO: 4270 - protein, 126 aa, Artificial Sequence
  Chemically Synthesized
QVQLQESGGGLVQAGGSLRLSCAASGYIFSNYGMGWYRQAPGKERELVASIDGGTNTNYADSVKGRFTISRDNAKNTVYLQMNSLKPEDTAVYYCAAYDDYLRDRSSHGVDDFDYWGQGTQVTVSS

SEQ ID NO: 4271 - protein, 126 aa, Artificial Sequence
  Chemically Synthesized
QVQLQESGGGLVQAGGSLRLSCAASGSISYPVTMGWYRQAPGKEREFVAGINYGTNTYYADSVKGRFTISRDNAKNTVYLQMNSLKPEDTAVYYCAAVTEQDGSGARGGRDEFLYWGQGTQVTVSS

SEQ ID NO: 4272 - protein, 118 aa, Artificial Sequence
  Chemically Synthesized
QVQLQESGGGLVQAGGSLRLSCAASGNIFYWAYMGWYRQAPGKEREFVAAINSGTTTYYADSVKGRFTISRDNAKNTVYLQMNSLKPEDTAVYYCAVQQYDWSDLYYWGQGTQVTVSS

SEQ ID NO: 4273 - protein, 122 aa, Artificial Sequence
  Chemically Synthesized
QVQLQESGGGLVQAGGSLRLSCAASGTIFYYVYMGWYRQAPGKEREFVAAIGRGGSTYYADSVKGRFTISRDNAKNTVYLQMNSLKPEDTAVYYCAVDVRGAEYGYSGLDYWGQGTQVTVSS

SEQ ID NO: 4274 - protein, 126 aa, Artificial Sequence
  Chemically Synthesized
QVQLQESGGGLVQAGGSLRLSCAASGTIFTLTYMGWYRQAPGKEREFVATIGLGATTYYADSVKGRFTISRDNAKNTVYLQMNSLKPEDTAVYYCAVEVHQGTDLNYVATTIYLYWGQGTQVTVSS

SEQ ID NO: 4275 - protein, 122 aa, Artificial Sequence
  Chemically Synthesized
QVQLQESGGGLVQAGGSLRLSCAASGSISDTSTMGWYRQAPGKEREFVASIGAGATTNYADSVKGRFTISRDNAKNTVYLQMNSLKPEDTAVYYCAVGAGRSDAYLDDPCYWGQGTQVTVSS

SEQ ID NO: 4276 - protein, 122 aa, Artificial Sequence
  Chemically Synthesized
QVQLQESGGGLVQAGGSLRLSCAASGNIFKPDIMGWYRQAPGKEREFVAAIASGSNTYYADSVKGRFTISRDNAKNTVYLQMNSLKPEDTAVYYCAVPAYQYLPNWSYLSYWGQGTQVTVSS

SEQ ID NO: 4277 - protein, 118 aa, Artificial Sequence
  Chemically Synthesized
QVQLQESGGGLVQAGGSLRLSCAASGTIFVVSMGWYRQAPGKEREFVATIGAGANTNYADSVKGRFTISRDNAKNTVYLQMNSLKPEDTAVYYCAAQRLPYAELFGYWGQGTQVTVSS

SEQ ID NO: 4278 - protein, 121 aa, Artificial Sequence
  Chemically Synthesized
QVQLQESGGGLVQAGGSLRLSCAASGSISDQLGMGWYRQAPGKERELVATIGYGTSPYADSVKGRFTISRDNAKNTVYLQMNSLKPEDTAVYYCAAHYHGSTRQYTDLQYWGQGTQVTVSS

SEQ ID NO: 4279 - protein, 118 aa, Artificial Sequence
  Chemically Synthesized
QVQLQESGGGLVQAGGSLRLSCAASGNIFYWRAMGWYRQAPGKEREFVAAISYGGSTYYADSVKGRFTISRDNAKNTVYLQMNSLKPEDTAVYYCAVQRLYHYIYDYWGQGTQVTVSS

SEQ ID NO: 4280 - protein, 126 aa, Artificial Sequence
  Chemically Synthesized
QVQLQESGGGLVQAGGSLRLSCAASGTIFPTSYMGWYRQAPGKERELVAGIGTGGNTNYADSVKGRFTISRDNAKNTVYLQMNSLKPEDTAVYYCAVAGTSLHAWNVPYYGVHSYWGQGTQVTVSS

SEQ ID NO: 4281 - protein, 125 aa, Artificial Sequence
  Chemically Synthesized
QVQLQESGGGLVQAGGSLRLSCAASGTIFVLTMGWYRQAPGKEREFVASIAGGSNTNYADSVKGRFTISRDNAKNTVYLQMNSLKPEDTAVYYCAAGTPVLRFIFLLNAWYHFYWGQGTQVTVSS

SEQ ID NO: 4282 - protein, 125 aa, Artificial Sequence
  Chemically Synthesized
QVQLQESGGGLVQAGGSLRLSCAASGYIFLGEDMGWYRQAPGKEREFVASISYGTITYYADSVKGRFTISRDNAKNTVYLQMNSLKPEDTAVYYCAAYDSAYDTYSTGLTGSLYWGQGTQVTVSS

SEQ ID NO: 4283 - protein, 114 aa, Artificial Sequence
  Chemically Synthesized
QVQLQESGGGLVQAGGSLRLSCAASGSISGDANMGWYRQAPGKEREFVATIDLGGTTYYADSVKGRFTISRDNAKNTVYLQMNSLKPEDTAVYYCAAASFLRYWGQGTQVTVSS

SEQ ID NO: 4284 - protein, 109 aa, Artificial Sequence
  Chemically Synthesized
QVQLQESGGGLVQAGGSLRLSCAASGYIFPSTTMGWYRQAPGKERELVATISYGTSTYYADSVKGRFTISRDNAKNTVYLQMNSLKPEDTAVYYCAEYWGQGTQVTVSS

SEQ ID NO: 4285 - protein, 124 aa, Artificial Sequence
  Chemically Synthesized
QVQLQESGGGLVQAGGSLRLSCAASGNIFGGLYMGWYRQAPGKERELVATISPGTITYADSVKGRFTISRDNAKNTVYLQMNSLKPEDTAVYYCAAYFETAGPHPSHSGSTFYWGQGTQVTVSS

SEQ ID NO: 4286 - protein, 118 aa, Artificial Sequence
  Chemically Synthesized
QVQLQESGGGLVQAGGSLRLSCAASGNIFIRNDMGWYRQAPGKEREFVAGIDYGGTTYYADSVKGRFTISRDNAKNTVYLQMNSLKPEDTAVYYCAARYVWDAQLPYWGQGTQVTVSS

SEQ ID NO: 4287 - protein, 122 aa, Artificial Sequence
  Chemically Synthesized
QVQLQESGGGLVQAGGSLRLSCAASGYIFDRARMGWYRQAPGKERELVASISPGSNTNYADSVKGRFTISRDNAKNTVYLQMNSLKPEDTAVYYCAAGDVTYGNPSDLFSYWGQGTQVTVSS

SEQ ID NO: 4288 - protein, 126 aa, Artificial Sequence
  Chemically Synthesized
QVQLQESGGGLVQAGGSLRLSCAASGNISFPYYMGWYRQAPGKERELVATIALGGITNYADSVKGRFTISRDNAKNTVYLQMNSLKPEDTAVYYCAAYYQSDYGVDYTLYVRLVYWGQGTQVTVSS

SEQ ID NO: 4289 - protein, 118 aa, Artificial Sequence
  Chemically Synthesized
QVQLQESGGGLVQAGGSLRLSCAASGSIFRDAQMGWYRQAPGKERELVAGIADGGTTYYADSVKGRFTISRDNAKNTVYLQMNSLKPEDTAVYYCAALYADPPSHRYWGQGTQVTVSS

SEQ ID NO: 4290 - protein, 121 aa, Artificial Sequence
  Chemically Synthesized
QVQLQESGGGLVQAGGSLRLSCAASGNIFSVQMGWYRQAPGKERELVAAIADGAITNYADSVKGRFTISRDNAKNTVYLQMNSLKPEDTAVYYCAVYGEVDQYVQLYHDYWGQGTQVTVSS

SEQ ID NO: 4291 - protein, 118 aa, Artificial Sequence
  Chemically Synthesized
QVQLQESGGGLVQAGGSLRLSCAASGYISSYTGMGWYRQAPGKERELVAAIDTGGITYYADSVKGRFTISRDNAKNTVYLQMNSLKPEDTAVYYCAAYYGDYRQYDYWGQGTQVTVSS

SEQ ID NO: 4292 - protein, 121 aa, Artificial Sequence
  Chemically Synthesized
QVQLQESGGGLVQAGGSLRLSCAASGSIFPLLNMGWYRQAPGKERELVAAISGGAITNYADSVKGRFTISRDNAKNTVYLQMNSLKPEDTAVYYCAAGVDHYNSPHHGIYWGQGTQVTVSS

SEQ ID NO: 4293 - protein, 120 aa, Artificial Sequence
  Chemically Synthesized
QVQLQESGGGLVQAGGSLRLSCAASGSFLLRIMGWYRQAPGKERELVATISEGTTNYADSVKGRFTISRDNAKNTVYLQMNSLKPEDTAVYYCAAAYLYSHDRASTHYYWGQGTQVTVSS

SEQ ID NO: 4294 - protein, 118 aa, Artificial Sequence
  Chemically Synthesized
QVQLQESGGGLVQAGGSLRLSCAASGYIFAGRGMGWYRQAPGKEREFVASIGRGSTTYYADSVKGRFTISRDNAKNTVYLQMNSLKPEDTAVYYCAVFARSPYTHKYWGQGTQVTVSS

SEQ ID NO: 4295 - protein, 118 aa, Artificial Sequence
  Chemically Synthesized
QVQLQESGGGLVQAGGSLRLSCAASGTIFQGYGMGWYRQAPGKERELVAAINAGTITYYADSVKGRFTISRDNAKNTVYLQMNSLKPEDTAVYYCAVDRDKNASHQYWGQGTQVTVSS

SEQ ID NO: 4296 - protein, 118 aa, Artificial Sequence
  Chemically Synthesized
QVQLQESGGGLVQAGGSLRLSCAASGNIFTASTMGWYRQAPGKEREFVATISYGTNTNYADSVKGRFTISRDNAKNTVYLQMNSLKPEDTAVYYCAADKPQLYTFPYWGQGTQVTVSS

SEQ ID NO: 4297 - protein, 120 aa, Artificial Sequence
  Chemically Synthesized
QVQLQESGGGLVQAGGSLRLSCAASGNISISLMGWYRQAPGKERELVAGITYGSITNYADSVKGRFTISRDNAKNTVYLQMNSLKPEDTAVYYCAVVAYRYYYSADHDYWGQGTQVTVSS

SEQ ID NO: 4298 - protein, 116 aa, Artificial Sequence
  Chemically Synthesized
QVQLQESGGGLVQAGGSLRLSCAASGTISYVWYMGWYRQAPGKERELLPVLLTVVLPYADSVKGRFTISRDNAKNTVYLQMNSLKPEDTAVYYCAVSRTTLQLSYWGQGTQVTVSS

SEQ ID NO: 4299 - protein, 118 aa, Artificial Sequence
  Chemically Synthesized
QVQLQESGGGLVQAGGSLRLSCAASGTISQPTAMGWYRQAPGKEREFVAAIGYGASTYYADSVKGRFTISRDNAKNTVYLQMNSLKPEDTAVYYCAVYRDPSSPLYYWGQGTQVTVSS

SEQ ID NO: 4300 - protein, 119 aa, Artificial Sequence
  Chemically Synthesized
QVQLQESGGGLVQAGGSLRLSCAASGTISFLDYMGWYRQAPGKEREGGNTNYADSVKGRFTISRDNAKNTVYLQMNSLKPEDTAVYYCAVRYGETKFREQYIGYSHGYWGQGTQVTVSS

SEQ ID NO: 4301 - protein, 111 aa, Artificial Sequence
  Chemically Synthesized
QVQLQESGGGLVQAGGSLRLSCAASGYISPINDMGWYRQAPGKERELVAGINTGGTTNYADSVKGRFTISRDNAKNTVYLQMNSLKPEDTAVYYCAYFYYWGQGTQVTVSS

SEQ ID NO: 4302 - protein, 117 aa, Artificial Sequence
  Chemically Synthesized
QVQLQESGGGLVQAGGSLRLSCAASGYIFPSNAMGWYRQAPGKEREFVATITYGTTTYYADSVKGRFTISRDNAKNTVYLQMNSLKPEDTAVYYCAVSYSSDEFLYWGQGTQVTVSS

SEQ ID NO: 4303 - protein, 125 aa, Artificial Sequence
  Chemically Synthesized
QVQLQESGGGLVQAGGSLRLSCAASGTISYIHLMGWYRQAPGKERELVATIGHGGTTNYADSVKGRFTISRDNAKNTVYLQMNSLKPEDTAVYYCAVGLDRITSYDPEDWVYLYWGQGTQVTVSS

SEQ ID NO: 4304 - protein, 118 aa, Artificial Sequence
  Chemically Synthesized
QVQLQESGGGLVQAGGSLRLSCAASGSISTYDFMGWYRQAPGKERELVATINHGTSTNYADSVKGRFTISRDNAKNTVYLQMNSLKPEDTAVYYCAVASPGTAYFAYWGQGTQVTVSS

SEQ ID NO: 4305 - protein, 118 aa, Artificial Sequence
  Chemically Synthesized
QVQLQESGGGLVQAGGSLRLSCAASGTIFTPRYMGWYRQAPGKERELVAAIASGATTNYADSVKGRFTISRDNAKNTVYLQMNSLKPEDTAVYYCAVRNWVIRYYLYWGQGTQVTVSS

SEQ ID NO: 4306 - protein, 112 aa, Artificial Sequence
  Chemically Synthesized
QVQLQESGGGLVQAGGSLRLSCAASGTISDSWVMGWYRQAPGKEREFVATIARGTNTNYADSVKGRFTISRDNAKNTVYLQMNSLKPEDTAVYYCAARCLYWGQGTQVTVSS

SEQ ID NO: 4307 - protein, 122 aa, Artificial Sequence
  Chemically Synthesized
QVQLQESGGGLVQAGGSLRLSCAASGTISASAGMGWYRQAPGKERELVASIDAGGTTYYADSVKGRFTISRDNAKNTVYLQMNSLKPEDTAVYYCAVDYYDYLYDQIYHIYWGQGTQVTVSS

SEQ ID NO: 4308 - protein, 118 aa, Artificial Sequence
  Chemically Synthesized
QVQLQESGGGLVQAGGSLRLSCAASGTISAEIYMGWYRQAPGKERELVASISFGANTYYADSVKGRFTISRDNAKNTVYLQMNSLKPEDTAVYYCAVLIVTDYTHDYWGQGTQVTVSS

SEQ ID NO: 4309 - protein, 118 aa, Artificial Sequence
  Chemically Synthesized
QVQLQESGGGLVQAGGSLRLSCAASGTIFPRGQMGWYRQAPGKEREFVAGIGGGSTTYYADSVKGRFTISRDNAKNTVYLQMNSLKPEDTAVYYCAVTSPYRATLAYWGQGTQVTVSS

SEQ ID NO: 4310 - protein, 126 aa, Artificial Sequence
  Chemically Synthesized
QVQLQESGGGLVQAGGSLRLSCAASGNIFYDPYMGWYRQAPGKERELVATIAVGTSTYYADSVKGRFTISRDNAKNTVYLQMNSLKPEDTAVYYCAATYPFFYAYLRADSGYLKYWGQGTQVTVSS

SEQ ID NO: 4311 - protein, 118 aa, Artificial Sequence
  Chemically Synthesized
QVQLQESGGGLVQAGGSLRLSCAASGSISDYALMGWYRQAPGKERELVATIATGSSTNYADSVKGRFTISRDNAKNTVYLQMNSLKPEDTAVYYCAVSPGISYDHRYWGQGTQVTVSS

SEQ ID NO: 4312 - protein, 117 aa, Artificial Sequence
  Chemically Synthesized
QVQLQESGGGLVQAGGSLRLSCAASGTIFSLFDMGWYRQAPGKERELVASINGGGSTNYADSVKGRFTISRDNAKNTVYLQMNSLKPEDTAVYYCAATRQRDTSMYWGQGTQVTVSS

SEQ ID NO: 4313 - protein, 125 aa, Artificial Sequence
  Chemically Synthesized
QVQLQESGGGLVQAGGSLRLSCAASGYISDDREMGWYRQAPGKEREFVPVLVTVLLPYADSVKGRFTISRDNAKNTVYLQMNSLKPEDTAVYYCAAVDTYAYWQIGIADYLYQYWGQGTQVTVSS

SEQ ID NO: 4314 - protein, 118 aa, Artificial Sequence
  Chemically Synthesized
QVQLQESGGGLVQAGGSLRLSCAASGSISAGYWMGWYRQAPGKEREFVAGIATGGITNYADSVKGRFTISRDNAKNTVYLQMNSLKPEDTAVYYCAARPYQYDYHLYWGQGTQVTVSS

SEQ ID NO: 4315 - protein, 117 aa, Artificial Sequence
  Chemically Synthesized
QVQLQESGGGLVQAGGSLRLSCAASGSILHRRMGWYRQAPGKERELVASIAVGSTTNYADSVKGRFTISRDNAKNTVYLQMNSLKPEDTAVYYCAATYPDILPLGYWGQGTQVTVSS

SEQ ID NO: 4316 - protein, 119 aa, Artificial Sequence
  Chemically Synthesized
QVQLQESGGGLVQAGGSLRLSCAASGTISFADTDMGWYRQAPGKEREFVAAIAGGTNTYYADSVKGRFTISRDNAKNTVYLQMNSLKPEDTAVYYCAVWPYIIRYHDYWGQGTQVTVSS

SEQ ID NO: 4317 - protein, 126 aa, Artificial Sequence
  Chemically Synthesized
QVQLQESGGGLVQAGGSLRLSCAASGTISEYYTMGWYRQAPGKEREFVAGIDAGGITYYADSVKGRFTISRDNAKNTVYLQMNSLKPEDTAVYYCAADYLGDTIWYHDDVYLLAYWGQGTQVTVSS

SEQ ID NO: 4318 - protein, 122 aa, Artificial Sequence
  Chemically Synthesized
QVQLQESGGGLVQAGGSLRLSCAASGSISYRPRMGWYRQAPGKEREFVAGINVGSITYYADSVKGRFTISRDNAKNTVYLQMNSLKPEDTAVYYCAVVVDGPLTQESTHPYWGQGTQVTVSS

SEQ ID NO: 4319 - protein, 122 aa, Artificial Sequence
  Chemically Synthesized
QVQLQESGGGLVQAGGSLRLSCAASGYISGGPTMGWYRQAPGKERELVAGISLGASTYYADSVKGRFTISRDNAKNTVYLQMNSLKPEDTAVYYCAAVRYDEASDNVQYQYWGQGTQVTVSS

SEQ ID NO: 4320 - protein, 122 aa, Artificial Sequence
  Chemically Synthesized
QVQLQESGGGLVQAGGSLRLSCAASGTISTIDGMGWYRQAPGKEREFVASIAWGGNTYYADSVKGRFTISRDNAKNTVYLQMNSLKPEDTAVYYCAAILFRGGARGGTYDYWGQGTQVTVSS

SEQ ID NO: 4321 - protein, 122 aa, Artificial Sequence
  Chemically Synthesized
QVQLQESGGGLVQAGGSLRLSCAASGTIFDGLSMGWYRQAPGKEREFVAAIASGGSTNYADSVKGRFTISRDNAKNTVYLQMNSLKPEDTAVYYCAVYVPGPKEAYYQHRYWGQGTQVTVSS

SEQ ID NO: 4322 - protein, 118 aa, Artificial Sequence
  Chemically Synthesized
QVQLQESGGGLVQAGGSLRLSCAASGNISADAYMGWYRQAPGKERELVASIDGGGSTYYADSVKGRFTISRDNAKNTVYLQMNSLKPEDTAVYYCAVKYPSLPTYDYWGQGTQVTVSS

SEQ ID NO: 4323 - protein, 126 aa, Artificial Sequence
  Chemically Synthesized
QVQLQESGGGLVQAGGSLRLSCAASGSIFGATGMGWYRQAPGKEREFVAAITYGASTYYADSVKGRFTISRDNAKNTVYLQMNSLKPEDTAVYYCAAYSDYWPSYYYYSYYRHPYWGQGTQVTVSS

SEQ ID NO: 4324 - protein, 118 aa, Artificial Sequence
  Chemically Synthesized
QVQLQESGGGLVQAGGSLRLSCAASGNISFTAGMGWYRQAPGKERELVAGISRGAITNYADSVKGRFTISRDNAKNTVYLQMNSLKPEDTAVYYCAVVVDSWYTFTYWGQGTQVTVSS

SEQ ID NO: 4325 - protein, 126 aa, Artificial Sequence
  Chemically Synthesized
QVQLQESGGGLVQAGGSLRLSCAASGTISFYRAMGWYRQAPGKERELVATIAYGGTTNYADSVKGRFTISRDNAKNTVYLQMNSLKPEDTAVYYCAARQAAYRYPYGEYRRYHYYWGQGTQVTVSS

SEQ ID NO: 4326 - protein, 127 aa, Artificial Sequence
  Chemically Synthesized
QVQLQESGGGLVQAGGSLRLSCAASGYIFYWAEMGWYRQAPGKEREFVAAIADGGITNYADSVKGRFTISRDNAKNTVYLQMNSLKPEDTAVYYCAAYIPYYPVSTYDYVAINHWYWGQGTQVTVSS

SEQ ID NO: 4327 - protein, 118 aa, Artificial Sequence
  Chemically Synthesized
QVQLQESGGGLVQAGGSLRLSCAASGTIFWIVLMGWYRQAPGKEREFVATIANGTNTYYADSVKGRFTISRDNAKNTVYLQMNSLKPEDTAVYYCAAYRQYVAFFVYWGQGTQVTVSS

SEQ ID NO: 4328 - protein, 118 aa, Artificial Sequence
  Chemically Synthesized
QVQLQESGGGLVQAGGSLRLSCAASGSIFNRTVMGWYRQAPGKEREFVAAINEGTNTNYADSVKGRFTISRDNAKNTVYLQMNSLKPEDTAVYYCAVDEPWLWSFNYWGQGTQVTVSS

SEQ ID NO: 4329 - protein, 118 aa, Artificial Sequence
  Chemically Synthesized
QVQLQESGGGLVQAGGSLRLSCAASGSIFSGNLMGWYRQAPGKEREFVASIAGGTTTYYADSVKGRFTISRDNAKNTVYLQMNSLKPEDTAVYYCAVTDVGYGYHTYWGQGTQVTVSS

SEQ ID NO: 4330 - protein, 122 aa, Artificial Sequence
  Chemically Synthesized
QVQLQESGGGLVQAGGSLRLSCAASGYISPPSSMGWYRQAPGKERELVAAIDSGGNTYYADSVKGRFTISRDNAKNTVYLQMNSLKPEDTAVYYCAVGDPLLYEYIYYHAYWGQGTQVTVSS

SEQ ID NO: 4331 - protein, 122 aa, Artificial Sequence
  Chemically Synthesized
QVQLQESGGGLVQAGGSLRLSCAASGNISAGADMGWYRQAPGKEREFVAGIGDGTSTYYADSVKGRFTISRDNAKNTVYLQMNSLKPEDTAVYYCAATVYNLYYYGANFDYWGQGTQVTVSS

SEQ ID NO: 4332 - protein, 118 aa, Artificial Sequence
  Chemically Synthesized
QVQLQESGGGLVQAGGSLRLSCAASGTIFRALIMGWYRQAPGKERELVASIALGAITNYADSVKGRFTISRDNAKNTVYLQMNSLKPEDTAVYYCAVLLDDYADFPYWGQGTQVTVSS

SEQ ID NO: 4333 - protein, 118 aa, Artificial Sequence
  Chemically Synthesized
QVQLQESGGGLVQAGGSLRLSCAASGNIFAQKVMGWYRQAPGKEREFVAGIAGGANTYYADSVKGRFTISRDNAKNTVYLQMNSLKPEDTAVYYCAAGDYGYWTHGYWGQGTQVTVSS

SEQ ID NO: 4334 - protein, 122 aa, Artificial Sequence
  Chemically Synthesized
QVQLQESGGGLVQAGGSLRLSCAASGYISDRSDMGWYRQAPGKERELVASINTGSSTNYADSVKGRFTISRDNAKNTVYLQMNSLKPEDTAVYYCAVPTSYGGQYHDNHYYWGQGTQVTVSS

SEQ ID NO: 4335 - protein, 126 aa, Artificial Sequence
  Chemically Synthesized
QVQLQESGGGLVQAGGSLRLSCAASGTISDAKAMGWYRQAPGKERELVATIGYGTTTYYADSVKGRFTISRDNAKNTVYLQMNSLKPEDTAVYYCAVPDLLYPRGNYNKVSLLFYWGQGTQVTVSS

SEQ ID NO: 4336 - protein, 118 aa, Artificial Sequence
  Chemically Synthesized
QVQLQESGGGLVQAGGSLRLSCAASGSISPLARMGWYRQAPGKERELVAGIGKGTITYYADSVKGRFTISRDNAKNTVYLQMNSLKPEDTAVYYCAVVDAYQEDLTYWGQGTQVTVSS

SEQ ID NO: 4337 - protein, 122 aa, Artificial Sequence
  Chemically Synthesized
QVQLQESGGGLVQAGGSLRLSCAASGNISRVWWMGWYRQAPGKEREFVAAIAPGATTNYADSVKGRFTISRDNAKNTVYLQMNSLKPEDTAVYYCAVDGLVHRGYSPDYSYWGQGTQVTVSS

SEQ ID NO: 4338 - protein, 118 aa, Artificial Sequence
  Chemically Synthesized
QVQLQESGGGLVQAGGSLRLSCAASGSISQDHSMGWYRQAPGKERELVAGIGTGANTNYADSVKGRFTISRDNAKNTVYLQMNSLKPEDTAVYYCAARSSCYYPASYWGQGTQVTVSS

SEQ ID NO: 4339 - protein, 108 aa, Artificial Sequence
  Chemically Synthesized
QVQLQESGGGLVQAGGSLRLSCAASGNIFLSDYMGWYRQAPGKERELPYADSVKGRFTISRDNAKNTVYLQMNSLKPEDTAVYYCAAYVTWDLKFVYWGQGTQVTVSS

SEQ ID NO: 4340 - protein, 122 aa, Artificial Sequence
  Chemically Synthesized
QVQLQESGGGLVQAGGSLRLSCAASGSISFGHSMGWYRQAPGKEREFVASIADGSSTNYADSVKGRFTISRDNAKNTVYLQMNSLKPEDTAVYYCAVERWPWHDLRYYHYYWGQGTQVTVSS

SEQ ID NO: 4341 - protein, 123 aa, Artificial Sequence
  Chemically Synthesized
QVQLQESGGGLVQAGGSLRLSCAASGYIFGDYSMGWYRQAPGKERELVATIGRGSITNYADSVKGRFTISRDNAKNTVYLQMNSLKPEDTAVYYCAVEYGYTTTFVEDYLGYWGQGTQVTVSS

SEQ ID NO: 4342 - protein, 121 aa, Artificial Sequence
  Chemically Synthesized
QVQLQESGGGLVQAGGSLRLSCAASGYISLAGLMGWYRQAPGKEREFVAAISGGGSTNYADSVKGRFTISRDNAKNTVYLQMNSLKPEDTAVYYCAALVLTLGTTVWFIYWGQGTQVTVSS

SEQ ID NO: 4343 - protein, 121 aa, Artificial Sequence
  Chemically Synthesized
QVQLQESGGGLVQAGGSLRLSCAASGYISQHAWMGWYRQAPGKERELVAAIDRGTTTYYADSVKGRFTISRDNAKNTVYLQMNSLKPEDTAVYYCAVAIINRKYLLSNFYWGQGTQVTVSS

SEQ ID NO: 4344 - protein, 118 aa, Artificial Sequence
  Chemically Synthesized
QVQLQESGGGLVQAGGSLRLSCAASGYISGAYAMGWYRQAPGKERELVATIAYGATTNYADSVKGRFTISRDNAKNTVYLQMNSLKPEDTAVYYCAVRLYVSGSYLYWGQGTQVTVSS

SEQ ID NO: 4345 - protein, 121 aa, Artificial Sequence
  Chemically Synthesized
QVQLQESGGGLVQAGGSLRLSCAASGTISSQGPMGWYRQAPGKERELVASIGAGSSTYADSVKGRFTISRDNAKNTVYLQMNSLKPEDTAVYYCAAKAKDYQATADRYDYWGQGTQVTVSS

SEQ ID NO: 4346 - protein, 126 aa, Artificial Sequence
  Chemically Synthesized
QVQLQESGGGLVQAGGSLRLSCAASGYISPGWSMGWYRQAPGKERELVASITSGTSTNYADSVKGRFTISRDNAKNTVYLQMNSLKPEDTAVYYCAVDGSSRPPFGRDPPEDHGYWGQGTQVTVSS

SEQ ID NO: 4347 - protein, 115 aa, Artificial Sequence
  Chemically Synthesized
QVQLQESGGGLVQAGGSLRLSCAASGTISVRWYMGWYRQAPGKERELVVIPYADSVKGRFTISRDNAKNTVYLQMNSLKPEDTAVYYCAAPRRGYLGRVYLHYYWGQGTQVTVSS

SEQ ID NO: 4348 - protein, 118 aa, Artificial Sequence
  Chemically Synthesized
QVQLQESGGGLVQAGGSLRLSCAASGSISDRSLMGWYRQAPGKERELVAGIARGTSTYYADSVKGRFTISRDNAKNTVYLQMNSLKPEDTAVYYCAAIYISDPYHWYWGQGTQVTVSS

SEQ ID NO: 4349 - protein, 118 aa, Artificial Sequence
  Chemically Synthesized
QVQLQESGGGLVQAGGSLRLSCAASGSISSYSIMGWYRQAPGKERELVATITAGSSTNYADSVKGRFTISRDNAKNTVYLQMNSLKPEDTAVYYCAAPYYDHPYLFYWGQGTQVTVSS

SEQ ID NO: 4350 - protein, 111 aa, Artificial Sequence
  Chemically Synthesized
QVQLQESGGGLVQAGGSLRLSCAASGYISRYDYMGWYRQAPGKERELVATIASGSITYYADSVKGRFTISRDNAKNTVYLQMNSLKPEDTAVYYCAARDYWGQGTQVTVSS

SEQ ID NO: 4351 - protein, 121 aa, Artificial Sequence
  Chemically Synthesized
QVQLQESGGGLVQAGGSLRLSCAASGNIFRGYYMGWYRQAPGKERELVASITDGTNTYYADSVKGRFTISRDNAKNTVYLQMNSLKPEDTAVYYCAVSTLLTTVTNSTIYWGQGTQVTVSS

SEQ ID NO: 4352 - protein, 118 aa, Artificial Sequence
  Chemically Synthesized
QVQLQESGGGLVQAGGSLRLSCAASGTIFAYRRMGWYRQAPGKERELVAAIGRGGNTNYADSVKGRFTISRDNAKNTVYLQMNSLKPEDTAVYYCAATRGPRHTHWYWGQGTQVTVSS

SEQ ID NO: 4353 - protein, 125 aa, Artificial Sequence
  Chemically Synthesized
QVQLQESGGGLVQAGGSLRLSCAASGSISEITYMGWYRQAPGKEREFVAAIARGATTNYADSVKGRFTISRDNAKNTVYLQMNSLKPEDTAVYYCAVPKWQSYGKAWTHYTYIYWGQGTQVTVSS

SEQ ID NO: 4354 - protein, 122 aa, Artificial Sequence
  Chemically Synthesized
QVQLQESGGGLVQAGGSLRLSCAASGYISPRYPMGWYRQAPGKERELVASIASGAITNYADSVKGRFTISRDNAKNTVYLQMNSLKPEDTAVYYCAVGGYQGLRESISHYYWGQGTQVTVSS

SEQ ID NO: 4355 - protein, 116 aa, Artificial Sequence
  Chemically Synthesized
QVQLQESGGGLVQAGGSLRLSCAASGNISLSMMGWYRQAPGKEREFVATIGPGGTTYYADSVKGRFTISRDNAKNTVYLQMNSLKPEDTAVYYCAAWKPSTTTWYWGQGTQVTVSS

SEQ ID NO: 4356 - protein, 111 aa, Artificial Sequence
  Chemically Synthesized
QVQLQESGGGLVQAGGSLRLSCAASGNIFLRYVMGWYRQAPGKERELVASIAYGGITNYADSVKGRFTISRDNAKNTVYLQMNSLKPEDTAVYYCAVGKYWGQGTQVTVSS

SEQ ID NO: 4357 - protein, 117 aa, Artificial Sequence
  Chemically Synthesized
QVQLQESGGGLVQAGGSLRLSCAASGNISTSVMGWYRQAPGKEREFVASITRGTNTYYADSVKGRFTISRDNAKNTVYLQMNSLKPEDTAVYYCAVASYDDDDHTYWGQGTQVTVSS

SEQ ID NO: 4358 - protein, 117 aa, Artificial Sequence
  Chemically Synthesized
QVQLQESGGGLVQAGGSLRLSCAASGTIFWVDPMGWYRQAPGKEREFVASITSVLLPYADSVKGRFTISRDNAKNTVYLQMNSLKPEDTAVYYCAVRYYAEDSHGYWGQGTQVTVSS

SEQ ID NO: 4359 - protein, 122 aa, Artificial Sequence
  Chemically Synthesized
QVQLQESGGGLVQAGGSLRLSCAASGTISPGGSMGWYRQAPGKERELVAAIGYGANTNYADSVKGRFTISRDNAKNTVYLQMNSLKPEDTAVYYCAVDREPYPDKYYSYGYWGQGTQVTVSS

SEQ ID NO: 4360 - protein, 126 aa, Artificial Sequence
  Chemically Synthesized
QVQLQESGGGLVQAGGSLRLSCAASGTIFTSYWMGWYRQAPGKERELVAGIGYGGNTYYADSVKGRFTISRDNAKNTVYLQMNSLKPEDTAVYYCAAGRDNPQDYGDGVPYTYGYWGQGTQVTVSS

SEQ ID NO: 4361 - protein, 124 aa, Artificial Sequence
  Chemically Synthesized
QVQLQESGGGLVQAGGSLRLSCAASGNISYDGAMGWYRQAPGKERELLPLLLLVLLPYADSVKGRFTISRDNAKNTVYLQMNSLKPEDTAVYYCAAYDSRGTWGYYNEFYYNYWGQGTQVTVSS

SEQ ID NO: 4362 - protein, 121 aa, Artificial Sequence
  Chemically Synthesized
QVQLQESGGGLVQAGGSLRLSCAASGTIFQWTGMGWYRQAPGKEREFVAGINYGASTNYADSVKGRFTISRDNAKNTVYLQMNSLKPEDTAVYYCAVSTSGTTLTLVLIYWGQGTQVTVSS

SEQ ID NO: 4363 - protein, 115 aa, Artificial Sequence
  Chemically Synthesized
QVQLQESGGGLVQAGGSLRLSCAASGYISTMGWYRQAPGKEREFVASIDPGTITNYADSVKGRFTISRDNAKNTVYLQMNSLKPEDTAVYYCAVQLGFGNNHGYWGQGTQVTVSS

SEQ ID NO: 4364 - protein, 118 aa, Artificial Sequence
  Chemically Synthesized
QVQLQESGGGLVQAGGSLRLSCAASGYIFDRYVMGWYRQAPGKERELVAGIAWGAITNYADSVKGRFTISRDNAKNTVYLQMNSLKPEDTAVYYCAVSNGHSYGLIYWGQGTQVTVSS

SEQ ID NO: 4365 - protein, 126 aa, Artificial Sequence
  Chemically Synthesized
QVQLQESGGGLVQAGGSLRLSCAASGNIFIDDIMGWYRQAPGKERELVATISLGTTTNYADSVKGRFTISRDNAKNTVYLQMNSLKPEDTAVYYCAADYAGGTPNTDPYRDRYDYWGQGTQVTVSS

SEQ ID NO: 4366 - protein, 126 aa, Artificial Sequence
  Chemically Synthesized
QVQLQESGGGLVQAGGSLRLSCAASGNIFKFWYMGWYRQAPGKEREFVAGISRGSITYYADSVKGRFTISRDNAKNTVYLQMNSLKPEDTAVYYCAAGYYWVVVYRDPTRFGFPYWGQGTQVTVSS

SEQ ID NO: 4367 - protein, 121 aa, Artificial Sequence
  Chemically Synthesized
QVQLQESGGGLVQAGGSLRLSCAASGNIFTAYDMGWYRQAPGKEREFVATINQGGITNYADSVKGRFTISRDNAKNTVYLQMNSLKPEDTAVYYCAAFSLGSRPGSKVMYWGQGTQVTVSS

SEQ ID NO: 4368 - protein, 117 aa, Artificial Sequence
  Chemically Synthesized
QVQLQESGGGLVQAGGSLRLSCAASGTISVDFGMGWYRQAPGKERELVASISVGATTNYADSVKGRFTISRDNAKNTVYLQMNSLKPEDTAVYYCAVDWVSVSVIYWGQGTQVTVSS

SEQ ID NO: 4369 - protein, 118 aa, Artificial Sequence
  Chemically Synthesized
QVQLQESGGGLVQAGGSLRLSCAASGNIFLFDFMGWYRQAPGKEREFVAAITAGANTNYADSVKGRFTISRDNAKNTVYLQMNSLKPEDTAVYYCAVAYNRPYRFVYWGQGTQVTVSS

SEQ ID NO: 4370 - protein, 118 aa, Artificial Sequence
  Chemically Synthesized
QVQLQESGGGLVQAGGSLRLSCAASGTISYGVKMGWYRQAPGKERELVAAIGVGTNTYYADSVKGRFTISRDNAKNTVYLQMNSLKPEDTAVYYCAVPYGGGYRYYYWGQGTQVTVSS

SEQ ID NO: 4371 - protein, 118 aa, Artificial Sequence
  Chemically Synthesized
QVQLQESGGGLVQAGGSLRLSCAASGSIFYTGIMGWYRQAPGKERELVATIDYGSITNYADSVKGRFTISRDNAKNTVYLQMNSLKPEDTAVYYCAAVGGYVTPFWYWGQGTQVTVSS

SEQ ID NO: 4372 - protein, 126 aa, Artificial Sequence
  Chemically Synthesized
QVQLQESGGGLVQAGGSLRLSCAASGNISASSSMGWYRQAPGKEREFVATITVGTNTYYADSVKGRFTISRDNAKNTVYLQMNSLKPEDTAVYYCAVEPYYVYNYYYRYGEAFGYWGQGTQVTVSS

SEQ ID NO: 4373 - protein, 122 aa, Artificial Sequence
  Chemically Synthesized
QVQLQESGGGLVQAGGSLRLSCAASGNIFYGNIMGWYRQAPGKERELVAAIGPGSTTYYADSVKGRFTISRDNAKNTVYLQMNSLKPEDTAVYYCAVLYDFLYTWDVDFYYWGQGTQVTVSS

SEQ ID NO: 4374 - protein, 126 aa, Artificial Sequence
  Chemically Synthesized
QVQLQESGGGLVQAGGSLRLSCAASGYIFYLLYMGWYRQAPGKERELVATIGQGSNTNYADSVKGRFTISRDNAKNTVYLQMNSLKPEDTAVYYCAAWGQVYRSDNLYYKLWHDYWGQGTQVTVSS

SEQ ID NO: 4375 - protein, 123 aa, Artificial Sequence
  Chemically Synthesized
QVQLQESGGGLVQAGGSLRLSCAASGSISPFLVMGWYRQAPGKEREFVAGITIGSSTNYADSVKGRFTISRDNAKNTVYLQMNSLKPEDTAVYYCAVGFLPYFYYAYQIHLYWGQGTQVTVSS

SEQ ID NO: 4376 - protein, 122 aa, Artificial Sequence
  Chemically Synthesized
QVQLQESGGGLVQAGGSLRLSCAASGYISPTGVMGWYRQAPGKERELVATIGNGGNTNYADSVKGRFTISRDNAKNTVYLQMNSLKPEDTAVYYCAVIASPFYRDHPVFLYWGQGTQVTVSS

SEQ ID NO: 4377 - protein, 122 aa, Artificial Sequence
  Chemically Synthesized
QVQLQESGGGLVQAGGSLRLSCAASGSIFYVHEMGWYRQAPGKERELVAAIGFGANTNYADSVKGRFTISRDNAKNTVYLQMNSLKPEDTAVYYCAVWFHFDVNDNSGFNYWGQGTQVTVSS

SEQ ID NO: 4378 - protein, 116 aa, Artificial Sequence
  Chemically Synthesized
QVQLQESGGGLVQAGGSLRLSCAASGYISGPARMGWYRQAPGKEREFVAGITVGTSTNYADSVKGRFTISRDNAKNTVYLQMNSLKPEDTAVYYCAAADTPYHGYWGQGTQVTVSS

SEQ ID NO: 4379 - protein, 126 aa, Artificial Sequence
  Chemically Synthesized
QVQLQESGGGLVQAGGSLRLSCAASGSISSYIRMGWYRQAPGKEREFVATITAGSTTYYADSVKGRFTISRDNAKNTVYLQMNSLKPEDTAVYYCAVGPLLSYQVWLYNRYGLGYWGQGTQVTVSS

SEQ ID NO: 4380 - protein, 121 aa, Artificial Sequence
  Chemically Synthesized
QVQLQESGGGLVQAGGSLRLSCAASGTISYSDMGWYRQAPGKERELVATITTGGITNYADSVKGRFTISRDNAKNTVYLQMNSLKPEDTAVYYCAAEIEGPRDVYDGHSYWGQGTQVTVSS

SEQ ID NO: 4381 - protein, 118 aa, Artificial Sequence
  Chemically Synthesized
QVQLQESGGGLVQAGGSLRLSCAASGNIFPQFAMGWYRQAPGKEREFVAGISAGGSTNYADSVKGRFTISRDNAKNTVYLQMNSLKPEDTAVYYCAARSDGLPFHDYWGQGTQVTVSS

SEQ ID NO: 4382 - protein, 122 aa, Artificial Sequence
  Chemically Synthesized
QVQLQESGGGLVQAGGSLRLSCAASGSIFRVSAMGWYRQAPGKERELVAAITHGASTYYADSVKGRFTISRDNAKNTVYLQMNSLKPEDTAVYYCAVIAYGLYRLQYTHYYWGQGTQVTVSS

SEQ ID NO: 4383 - protein, 118 aa, Artificial Sequence
  Chemically Synthesized
QVQLQESGGGLVQAGGSLRLSCAASGSISLSDVMGWYRQAPGKERELVATIAYGGSTYYADSVKGRFTISRDNAKNTVYLQMNSLKPEDTAVYYCAVSLGSTVQHPYWGQGTQVTVSS

SEQ ID NO: 4384 - protein, 118 aa, Artificial Sequence
  Chemically Synthesized
QVQLQESGGGLVQAGGSLRLSCAASGNIFWDPAMGWYRQAPGKEREFVATITFGSSTYYADSVKGRFTISRDNAKNTVYLQMNSLKPEDTAVYYCAVKHQETGPHAYWGQGTQVTVSS

SEQ ID NO: 4385 - protein, 117 aa, Artificial Sequence
  Chemically Synthesized
QVQLQESGGGLVQAGGSLRLSCAASGYISSNADMGWYRQAPGKEREFVAAIGFGASTNYADSVKGRFTISRDNAKNTVYLQMNSLKPEDTAVYYCAVSNDYGIYVYWGQGTQVTVSS

SEQ ID NO: 4386 - protein, 118 aa, Artificial Sequence
  Chemically Synthesized
QVQLQESGGGLVQAGGSLRLSCAASGTIFTLWYMGWYRQAPGKEREFVAAITQGSSTYYADSVKGRFTISRDNAKNTVYLQMNSLKPEDTAVYYCAARSRRDYGFNYWGQGTQVTVSS

SEQ ID NO: 4387 - protein, 118 aa, Artificial Sequence
  Chemically Synthesized
QVQLQESGGGLVQAGGSLRLSCAASGYISDYATMGWYRQAPGKERELVAGISYGTNTYYADSVKGRFTISRDNAKNTVYLQMNSLKPEDTAVYYCAAETGYYATHWYWGQGTQVTVSS

SEQ ID NO: 4388 - protein, 123 aa, Artificial Sequence
  Chemically Synthesized
QVQLQESGGGLVQAGGSLRLSCAASGSILRMGWYRQAPGKEREFVAAIAKGASTNYADSVKGRFTISRDNAKNTVYLQMNSLKPEDTAVYYCAADTDNKGNGDYSGDGAYAYWGQGTQVTVSS

SEQ ID NO: 4389 - protein, 118 aa, Artificial Sequence
  Chemically Synthesized
QVQLQESGGGLVQAGGSLRLSCAASGTIFYNTYMGWYRQAPGKEREFVAAITSGGITNYADSVKGRFTISRDNAKNTVYLQMNSLKPEDTAVYYCAALYQHATWHAYWGQGTQVTVSS

SEQ ID NO: 4390 - protein, 122 aa, Artificial Sequence
  Chemically Synthesized
QVQLQESGGGLVQAGGSLRLSCAASGYIFPQSIMGWYRQAPGKEREFVASISIGSSTYYADSVKGRFTISRDNAKNTVYLQMNSLKPEDTAVYYCAAIHYGHGRQQQYFYYWGQGTQVTVSS

SEQ ID NO: 4391 - protein, 118 aa, Artificial Sequence
  Chemically Synthesized
QVQLQESGGGLVQAGGSLRLSCAASGNISVDDLMGWYRQAPGKERELVASITAGSSTYYADSVKGRFTISRDNAKNTVYLQMNSLKPEDTAVYYCAVKGVGVYPLDYWGQGTQVTVSS

SEQ ID NO: 4392 - protein, 118 aa, Artificial Sequence
  Chemically Synthesized
QVQLQESGGGLVQAGGSLRLSCAASGNISGHFYMGWYRQAPGKERELVASIAYGATTNYADSVKGRFTISRDNAKNTVYLQMNSLKPEDTAVYYCAAVRYLHTYHHYWGQGTQVTVSS

SEQ ID NO: 4393 - protein, 125 aa, Artificial Sequence
  Chemically Synthesized
QVQLQESGGGLVQAGGSLRLSCAASGYIFAIAYMGWYRQAPGKERELVAAISTGGNTYYADSVKGRFTISRDNAKNTVYLQMNSLKPEDTAVYYCAVAQVGPRRPYYVFSLTLYWGQGTQVTVSS

SEQ ID NO: 4394 - protein, 122 aa, Artificial Sequence
  Chemically Synthesized
QVQLQESGGGLVQAGGSLRLSCAASGNIFAYTVMGWYRQAPGKERELVATIDDGSTTNYADSVKGRFTISRDNAKNTVYLQMNSLKPEDTAVYYCAASVYVADKDEGDYLYWGQGTQVTVSS

SEQ ID NO: 4395 - protein, 118 aa, Artificial Sequence
  Chemically Synthesized
QVQLQESGGGLVQAGGSLRLSCAASGTIFVVFDMGWYRQAPGKEREFVAGITRGANTNYADSVKGRFTISRDNAKNTVYLQMNSLKPEDTAVYYCAAIWWDDTYHYYWGQGTQVTVSS

SEQ ID NO: 4396 - protein, 121 aa, Artificial Sequence
  Chemically Synthesized
QVQLQESGGGLVQAGGSLRLSCAASGSIFGVASMGWYRQAPGKEREFVAGINPGTITYYADSVKGRFTISRDNAKNTVYLQMNSLKPEDTAVYYCAAVYRDGVGGSVLGYWGQGTQVTVSS

SEQ ID NO: 4397 - protein, 126 aa, Artificial Sequence
  Chemically Synthesized
QVQLQESGGGLVQAGGSLRLSCAASGTIFYAGTMGWYRQAPGKEREFVASISSGSTTNYADSVKGRFTISRDNAKNTVYLQMNSLKPEDTAVYYCAVVFYGYGHSESYRKPYHYYWGQGTQVTVSS

SEQ ID NO: 4398 - protein, 118 aa, Artificial Sequence
  Chemically Synthesized
QVQLQESGGGLVQAGGSLRLSCAASGNISYLVDMGWYRQAPGKERELVASIGYGSSTYYADSVKGRFTISRDNAKNTVYLQMNSLKPEDTAVYYCAVYTHDDAGLAYWGQGTQVTVSS

SEQ ID NO: 4399 - protein, 122 aa, Artificial Sequence
  Chemically Synthesized
QVQLQESGGGLVQAGGSLRLSCAASGTIFDTTPMGWYRQAPGKERELVASIGWGGITYYADSVKGRFTISRDNAKNTVYLQMNSLKPEDTAVYYCAVALGYRPLPPYYHDYWGQGTQVTVSS

SEQ ID NO: 4400 - protein, 126 aa, Artificial Sequence
  Chemically Synthesized
QVQLQESGGGLVQAGGSLRLSCAASGYISKRYYMGWYRQAPGKERELVASITDGGTTYYADSVKGRFTISRDNAKNTVYLQMNSLKPEDTAVYYCAVGAGPGAREPDYYPYGLWYWGQGTQVTVSS

SEQ ID NO: 4401 - protein, 118 aa, Artificial Sequence
  Chemically Synthesized
QVQLQESGGGLVQAGGSLRLSCAASGTISYYFVMGWYRQAPGKERELVASIDLGASTNYADSVKGRFTISRDNAKNTVYLQMNSLKPEDTAVYYCAVQNRPDGFYPYWGQGTQVTVSS

SEQ ID NO: 4402 - protein, 117 aa, Artificial Sequence
  Chemically Synthesized
QVQLQESGGGLVQAGGSLRLSCAASGTISGQDDMGWYRQAPGKEREFVAAIDIGSTTYYADSVKGRFTISRDNAKNTVYLQMNSLKPEDTAVYYCAASTRTSTLFYWGQGTQVTVSS

SEQ ID NO: 4403 - protein, 121 aa, Artificial Sequence
  Chemically Synthesized
QVQLQESGGGLVQAGGSLRLSCAASGNIFYNWGMGWYRQAPGKERELVATISSGGSTYYADSVKGRFTISRDNAKNTVYLQMNSLKPEDTAVYYCAAFIPFDDWTAPFDYWGQGTQVTVSS

SEQ ID NO: 4404 - protein, 119 aa, Artificial Sequence
  Chemically Synthesized
QVQLQESGGGLVQAGGSLRLSCAASGNISDVMGWYRQAPGKEREFVAGIGKVVLPYADSVKGRFTISRDNAKNTVYLQMNSLKPEDTAVYYCAAVNQDWFVQYGTHTYWGQGTQVTVSS

SEQ ID NO: 4405 - protein, 126 aa, Artificial Sequence
  Chemically Synthesized
QVQLQESGGGLVQAGGSLRLSCAASGNISYDDTMGWYRQAPGKEREFVAGINRGSTTNYADSVKGRFTISRDNAKNTVYLQMNSLKPEDTAVYYCAALTRRVYRSSDFYTQYFGYWGQGTQVTVSS

SEQ ID NO: 4406 - protein, 126 aa, Artificial Sequence
  Chemically Synthesized
QVQLQESGGGLVQAGGSLRLSCAASGTIFAPHDMGWYRQAPGKEREFVASIDEGSTTNYADSVKGRFTISRDNAKNTVYLQMNSLKPEDTAVYYCAAYYREYSWYRNEYYWDLYYWGQGTQVTVSS

SEQ ID NO: 4407 - protein, 126 aa, Artificial Sequence
  Chemically Synthesized
QVQLQESGGGLVQAGGSLRLSCAASGTISYYRAMGWYRQAPGKERELVASINFGGTTNYADSVKGRFTISRDNAKNTVYLQMNSLKPEDTAVYYCAALTVTGPYNSHDRRRFFYYWGQGTQVTVSS

SEQ ID NO: 4408 - protein, 118 aa, Artificial Sequence
  Chemically Synthesized
QVQLQESGGGLVQAGGSLRLSCAASGSISYAGEMGWYRQAPGKEREFVASITPGTTTNYADSVKGRFTISRDNAKNTVYLQMNSLKPEDTAVYYCAAVYDEYKDLGYWGQGTQVTVSS

SEQ ID NO: 4409 - protein, 118 aa, Artificial Sequence
  Chemically Synthesized
QVQLQESGGGLVQAGGSLRLSCAASGTIFAVYNMGWYRQAPGKEREFVAAITDGTNTNYADSVKGRFTISRDNAKNTVYLQMNSLKPEDTAVYYCAAIIHAGGWHGYWGQGTQVTVSS

SEQ ID NO: 4410 - protein, 122 aa, Artificial Sequence
  Chemically Synthesized
QVQLQESGGGLVQAGGSLRLSCAASGTISQYSEMGWYRQAPGKERELVAAIGYGSITNYADSVKGRFTISRDNAKNTVYLQMNSLKPEDTAVYYCAAESYATTPLYYDYRYWGQGTQVTVSS

SEQ ID NO: 4411 - protein, 118 aa, Artificial Sequence
  Chemically Synthesized
QVQLQESGGGLVQAGGSLRLSCAASGTISALPDMGWYRQAPGKERELVASITEGSSTNYADSVKGRFTISRDNAKNTVYLQMNSLKPEDTAVYYCAVAYGVHGSYDYWGQGTQVTVSS

SEQ ID NO: 4412 - protein, 122 aa, Artificial Sequence
  Chemically Synthesized
QVQLQESGGGLVQAGGSLRLSCAASGYISLPEYMGWYRQAPGKERELVAAINVGANTNYADSVKGRFTISRDNAKNTVYLQMNSLKPEDTAVYYCAVITPDLLTVDVYHDYWGQGTQVTVSS

SEQ ID NO: 4413 - protein, 122 aa, Artificial Sequence
  Chemically Synthesized
QVQLQESGGGLVQAGGSLRLSCAASGTIFPSDYMGWYRQAPGKERELVATIDAGSTTNYADSVKGRFTISRDNAKNTVYLQMNSLKPEDTAVYYCAAQDYWAPADDLTHPYWGQGTQVTVSS

SEQ ID NO: 4414 - protein, 125 aa, Artificial Sequence
  Chemically Synthesized
QVQLQESGGGLVQAGGSLRLSCAASGNIFTRGYMGWYRQAPGKEREFVATITQGSNYLYADSVKGRFTISRDNAKNTVYLQMNSLKPEDTAVYYCAAERYSLKTTLKFWVTCIYWGQGTQVTVSS

SEQ ID NO: 4415 - protein, 118 aa, Artificial Sequence
  Chemically Synthesized
QVQLQESGGGLVQAGGSLRLSCAASGYISALYYMGWYRQAPGKEREFVAGIGDGTTTNYADSVKGRFTISRDNAKNTVYLQMNSLKPEDTAVYYCAADTVVPQQHIYWGQGTQVTVSS

SEQ ID NO: 4416 - protein, 126 aa, Artificial Sequence
  Chemically Synthesized
QVQLQESGGGLVQAGGSLRLSCAASGTISDRRYMGWYRQAPGKERELVAGISYGSITYYADSVKGRFTISRDNAKNTVYLQMNSLKPEDTAVYYCAVGRELVADFVQIYRRGFYYWGQGTQVTVSS

SEQ ID NO: 4417 - protein, 126 aa, Artificial Sequence
  Chemically Synthesized
QVQLQESGGGLVQAGGSLRLSCAASGTISSGYTMGWYRQAPGKEREFVASISYGSNTNYADSVKGRFTISRDNAKNTVYLQMNSLKPEDTAVYYCAVDKRLVRYLRQEYYRALRYWGQGTQVTVSS

SEQ ID NO: 4418 - protein, 121 aa, Artificial Sequence
  Chemically Synthesized
QVQLQESGGGLVQAGGSLRLSCAASGNIFWTTMGWYRQAPGKERELVAAIAAGAITNYADSVKGRFTISRDNAKNTVYLQMNSLKPEDTAVYYCAVHYAEPTFFTFNHLYWGQGTQVTVSS

SEQ ID NO: 4419 - protein, 125 aa, Artificial Sequence
  Chemically Synthesized
QVQLQESGGGLVQAGGSLRLSCAASGTISLVHMGWYRQAPGKERELVATIALGAITNYADSVKGRFTISRDNAKNTVYLQMNSLKPEDTAVYYCAADYYWDTVRTHLLDRGFDYWGQGTQVTVSS

SEQ ID NO: 4420 - protein, 118 aa, Artificial Sequence
  Chemically Synthesized
QVQLQESGGGLVQAGGSLRLSCAASGYIFRYAAMGWYRQAPGKERELVATITVGGITYYADSVKGRFTISRDNAKNTVYLQMNSLKPEDTAVYYCAVRDADEYLLIYWGQGTQVTVSS

SEQ ID NO: 4421 - protein, 121 aa, Artificial Sequence
  Chemically Synthesized
QVQLQESGGGLVQAGGSLRLSCAASGLFLTLRMGWYRQAPGKERELVASIDYGTNTYYADSVKGRFTISRDNAKNTVYLQMNSLKPEDTAVYYCAVRRDHYTYDLDRHTYWGQGTQVTVSS

SEQ ID NO: 4422 - protein, 118 aa, Artificial Sequence
  Chemically Synthesized
QVQLQESGGGLVQAGGSLRLSCAASGTISWDAFMGWYRQAPGKEREFVASIGEGANTNYADSVKGRFTISRDNAKNTVYLQMNSLKPEDTAVYYCAATRNWRTEHRYWGQGTQVTVSS

SEQ ID NO: 4423 - protein, 118 aa, Artificial Sequence
  Chemically Synthesized
QVQLQESGGGLVQAGGSLRLSCAASGTISDPYDMGWYRQAPGKERELVAAISTGGSTYYADSVKGRFTISRDNAKNTVYLQMNSLKPEDTAVYYCAANRGPPVFLWYWGQGTQVTVSS

SEQ ID NO: 4424 - protein, 118 aa, Artificial Sequence
  Chemically Synthesized
QVQLQESGGGLVQAGGSLRLSCAASGSISPGGHMGWYRQAPGKEREFVAGINWGGITNYADSVKGRFTISRDNAKNTVYLQMNSLKPEDTAVYYCAVVFYFDKWHWYWGQGTQVTVSS

SEQ ID NO: 4425 - protein, 121 aa, Artificial Sequence
  Chemically Synthesized
QVQLQESGGGLVQAGGSLRLSCAASGTIFLAVFMGWYRQAPGKEREFVASISNGTTTNYADSVKGRFTISRDNAKNTVYLQMNSLKPEDTAVYYCAATIISKLLTVTVFYWGQGTQVTVSS

SEQ ID NO: 4426 - protein, 113 aa, Artificial Sequence
  Chemically Synthesized
QVQLQESGGGLVQAGGSLRLSCAASGTIFHDYSMGWYRQAPGKERELVASIGAGSNTYYADSVKGRFTISRDNAKNTVYLQMNSLKPEDTAVYYCAVCRTIYWGQGTQVTVSS

SEQ ID NO: 4427 - protein, 122 aa, Artificial Sequence
  Chemically Synthesized
QVQLQESGGGLVQAGGSLRLSCAASGTISEERRMGWYRQAPGKERELVATISYGATTNYADSVKGRFTISRDNAKNTVYLQMNSLKPEDTAVYYCAVYRYADDGDYQVHVYWGQGTQVTVSS

SEQ ID NO: 4428 - protein, 121 aa, Artificial Sequence
  Chemically Synthesized
QVQLQESGGGLVQAGGSLRLSCAASGNISSANTMGWYRQAPGKEREVASIGQGTSTYYADSVKGRFTISRDNAKNTVYLQMNSLKPEDTAVYYCAADFYTDNDAYPQHYYWGQGTQVTVSS

SEQ ID NO: 4429 - protein, 118 aa, Artificial Sequence
  Chemically Synthesized
QVQLQESGGGLVQAGGSLRLSCAASGYISTSWGMGWYRQAPGKEREFVATIGDGGTTYYADSVKGRFTISRDNAKNTVYLQMNSLKPEDTAVYYCAVGLYVPYDFWYWGQGTQVTVSS

SEQ ID NO: 4430 - protein, 118 aa, Artificial Sequence
  Chemically Synthesized
QVQLQESGGGLVQAGGSLRLSCAASGSISDWRAMGWYRQAPGKEREFVAAIGYGASTNYADSVKGRFTISRDNAKNTVYLQMNSLKPEDTAVYYCAAVVGQQGHHYYWGQGTQVTVSS

SEQ ID NO: 4431 - protein, 122 aa, Artificial Sequence
  Chemically Synthesized
QVQLQESGGGLVQAGGSLRLSCAASGSISDLWDMGWYRQAPGKEREFVASIDWGGITYYADSVKGRFTISRDNAKNTVYLQMNSLKPEDTAVYYCAVNYDATYGLSDYHYYWGQGTQVTVSS

SEQ ID NO: 4432 - protein, 118 aa, Artificial Sequence
  Chemically Synthesized
QVQLQESGGGLVQAGGSLRLSCAASGSISYVADMGWYRQAPGKERELVAAIDRGSITYYADSVKGRFTISRDNAKNTVYLQMNSLKPEDTAVYYCAVVRYYGPYFWYWGQGTQVTVSS

SEQ ID NO: 4433 - protein, 118 aa, Artificial Sequence
  Chemically Synthesized
QVQLQESGGGLVQAGGSLRLSCAASGNISTTINMGWYRQAPGKEREFVAAITDGTNTYYADSVKGRFTISRDNAKNTVYLQMNSLKPEDTAVYYCAVYRAYDDPLRYWGQGTQVTVSS

SEQ ID NO: 4434 - protein, 118 aa, Artificial Sequence
  Chemically Synthesized
QVQLQESGGGLVQAGGSLRLSCAASGTISRDPQMGWYRQAPGKEREFVAAIGYGSITYYADSVKGRFTISRDNAKNTVYLQMNSLKPEDTAVYYCAVDRNWYVYHVYWGQGTQVTVSS

SEQ ID NO: 4435 - protein, 111 aa, Artificial Sequence
  Chemically Synthesized
QVQLQESGGGLVQAGGSLRLSCAASGYIFWYDAMGWYRQAPGKERELVAAIASVVVPYADSVKGRFTISRDNAKNTVYLQMNSLKPEDTAVYYCATVVIYWGQGTQVTVSS

SEQ ID NO: 4436 - protein, 118 aa, Artificial Sequence
  Chemically Synthesized
QVQLQESGGGLVQAGGSLRLSCAASGNISTPSYMGWYRQAPGKERELVAGINWGTITNYADSVKGRFTISRDNAKNTVYLQMNSLKPEDTAVYYCAVLYRYNTWFGYWGQGTQVTVSS

SEQ ID NO: 4437 - protein, 118 aa, Artificial Sequence
  Chemically Synthesized
QVQLQESGGGLVQAGGSLRLSCAASGYISYRLTMGWYRQAPGKERELVLPYADSVKGRFTISRDNAKNTVYLQMNSLKPEDTAVYYCAVFYSTGNGANPFYLNRLYYWGQGTQVTVSS

SEQ ID NO: 4438 - protein, 118 aa, Artificial Sequence
  Chemically Synthesized
QVQLQESGGGLVQAGGSLRLSCAASGTISSSGYMGWYRQAPGKERELVASISQGGTTNYADSVKGRFTISRDNAKNTVYLQMNSLKPEDTAVYYCAVVTYDGGWYGYWGQGTQVTVSS

SEQ ID NO: 4439 - protein, 110 aa, Artificial Sequence
  Chemically Synthesized
QVQLQESGGGLVQAGGSLRLSCAASGNIFGDAHMGWYRQAPGKERELVASITYGTSTNYADSVKGRFTISRDNAKNTVYLQMNSLKPEDTAVYYCAAYYWGQGTQVTVSS

SEQ ID NO: 4440 - protein, 114 aa, Artificial Sequence
  Chemically Synthesized
QVQLQESGGGLVQAGGSLRLSCAASGTIFRVSSMGWYRQAPGKEREFIAYGASTYYADSVKGRFTISRDNAKNTVYLQMNSLKPEDTAVYYCAAGVDVYAHSYWGQGTQVTVSS

SEQ ID NO: 4441 - protein, 122 aa, Artificial Sequence
  Chemically Synthesized
QVQLQESGGGLVQAGGSLRLSCAASGSIFYTEGMGWYRQAPGKERELVASIDSGAITYYADSVKGRFTISRDNAKNTVYLQMNSLKPEDTAVYYCAAIDTHVWSGDYSFPYWGQGTQVTVSS

SEQ ID NO: 4442 - protein, 122 aa, Artificial Sequence
  Chemically Synthesized
QVQLQESGGGLVQAGGSLRLSCAASGSIFTTYIMGWYRQAPGKERELVAAITYGAITYYADSVKGRFTISRDNAKNTVYLQMNSLKPEDTAVYYCAAFQYTDILTILNYGYWGQGTQVTVSS

SEQ ID NO: 4443 - protein, 121 aa, Artificial Sequence
  Chemically Synthesized
QVQLQESGGGLVQAGGSLRLSCAASGSIFQILYMGWYRQAPGKEREFVAGINYGGVPYADSVKGRFTISRDNAKNTVYLQMNSLKPEDTAVYYCAAYAYSDRRHAIDHLYWGQGTQVTVSS

SEQ ID NO: 4444 - protein, 122 aa, Artificial Sequence
  Chemically Synthesized
QVQLQESGGGLVQAGGSLRLSCAASGNISSGSFMGWYRQAPGKERELVAGISSGTNTNYADSVKGRFTISRDNAKNTVYLQMNSLKPEDTAVYYCAVWPSPYLEITYYHAYWGQGTQVTVSS

SEQ ID NO: 4445 - protein, 126 aa, Artificial Sequence
  Chemically Synthesized
QVQLQESGGGLVQAGGSLRLSCAASGTISYYYVMGWYRQAPGKERELVASIAIGGITNYADSVKGRFTISRDNAKNTVYLQMNSLKPEDTAVYYCAVGYWYYDYVPAYTYPVYWYWGQGTQVTVSS

SEQ ID NO: 4446 - protein, 121 aa, Artificial Sequence
  Chemically Synthesized
QVQLQESGGGLVQAGGSLRLSCAASGTISLHEAMGWYRQAPGKERELVASIDYGTTTYYADSVKGRFTISRDNAKNTVYLQMNSLKPEDTAVYYCAASTRTRTLTTLLMYWGQGTQVTVSS

SEQ ID NO: 4447 - protein, 126 aa, Artificial Sequence
  Chemically Synthesized
QVQLQESGGGLVQAGGSLRLSCAASGTISSGNYMGWYRQAPGKERELVATIGAGTITYYADSVKGRFTISRDNAKNTVYLQMNSLKPEDTAVYYCAVEDSGVVDGPRYPVGYHWYWGQGTQVTVSS

SEQ ID NO: 4448 - protein, 117 aa, Artificial Sequence
  Chemically Synthesized
QVQLQESGGGLVQAGGSLRLSCAASGNIFPFAMGWYRQAPGKERELVASISWGTTTNYADSVKGRFTISRDNAKNTVYLQMNSLKPEDTAVYYCAVQGWSRSPYGYWGQGTQVTVSS

SEQ ID NO: 4449 - protein, 118 aa, Artificial Sequence
  Chemically Synthesized
QVQLQESGGGLVQAGGSLRLSCAASGYIFGQGTMGWYRQAPGKEREFVAGIDPGANTYYADSVKGRFTISRDNAKNTVYLQMNSLKPEDTAVYYCAAYYPIYSYLSYWGQGTQVTVSS

SEQ ID NO: 4450 - protein, 117 aa, Artificial Sequence
  Chemically Synthesized
QVQLQESGGGLVQAGGSLRLSCAASGTISSDLMGWYRQAPGKEREFVAAITEGGNTNYADSVKGRFTISRDNAKNTVYLQMNSLKPEDTAVYYCAVIFFSEGYHAYWGQGTQVTVSS

SEQ ID NO: 4451 - protein, 126 aa, Artificial Sequence
  Chemically Synthesized
QVQLQESGGGLVQAGGSLRLSCAASGNISPQVIMGWYRQAPGKEREFVATINPGGNTYYADSVKGRFTISRDNAKNTVYLQMNSLKPEDTAVYYCAAVDRRYSSGRDSYTGYYNYWGQGTQVTVSS

SEQ ID NO: 4452 - protein, 118 aa, Artificial Sequence
  Chemically Synthesized
QVQLQESGGGLVQAGGSLRLSCAASGTIFYATYMGWYRQAPGKEREFVAAISAGGTTNYADSVKGRFTISRDNAKNTVYLQMNSLKPEDTAVYYCAAAWYHDVYHYYWGQGTQVTVSS

SEQ ID NO: 4453 - protein, 121 aa, Artificial Sequence
  Chemically Synthesized
QVQLQESGGGLVQAGGSLRLSCAASGTIFDWNYMGWYRQAPGKERELVASISGGGNTNYADSVKGRFTISRDNAKNTVYLQMNSLKPEDTAVYYCAVGADYRFVGTTCLYWGQGTQVTVSS

SEQ ID NO: 4454 - protein, 118 aa, Artificial Sequence
  Chemically Synthesized
QVQLQESGGGLVQAGGSLRLSCAASGTISRPVVMGWYRQAPGKEREFVAGIAGGAITNYADSVKGRFTISRDNAKNTVYLQMNSLKPEDTAVYYCAVLSYIQGYLYYWGQGTQVTVSS

SEQ ID NO: 4455 - protein, 115 aa, Artificial Sequence
  Chemically Synthesized
QVQLQESGGGLVQAGGSLRLSCAASGSIFTNDGMGWYRQAPGKERELVAAISSTNYADSVKGRFTISRDNAKNTVYLQMNSLKPEDTAVYYCAANSVYYRHYDYWGQGTQVTVSS

SEQ ID NO: 4456 - protein, 121 aa, Artificial Sequence
  Chemically Synthesized
QVQLQESGGGLVQAGGSLRLSCAASGTIFPNPSMGWYRQAPGKERELVATITTGSNTNYADSVKGRFTISRDNAKNTVYLQMNSLKPEDTAVYYCAAYSVYYLHYTSNFYWGQGTQVTVSS

SEQ ID NO: 4457 - protein, 118 aa, Artificial Sequence
  Chemically Synthesized
QVQLQESGGGLVQAGGSLRLSCAASGSISGPSIMGWYRQAPGKEREFVASITYGSNTYYADSVKGRFTISRDNAKNTVYLQMNSLKPEDTAVYYCAVIYTAGGYLYYWGQGTQVTVSS

SEQ ID NO: 4458 - protein, 118 aa, Artificial Sequence
  Chemically Synthesized
QVQLQESGGGLVQAGGSLRLSCAASGTISAYIGMGWYRQAPGKEREFVAAINYGSNTYYADSVKGRFTISRDNAKNTVYLQMNSLKPEDTAVYYCAVGPYDTTQHGYWGQGTQVTVSS

SEQ ID NO: 4459 - protein, 120 aa, Artificial Sequence
  Chemically Synthesized
QVQLQESGGGLVQAGGSLRLSCAASGTIFSPYSMGWYRQAPGKERELVASINGGTSTNYADSVKGRFTISRDNAKNTVYLQMNSLKPEDTAVYYCAAGDGTTLLTCCLYWGQGTQVTVSS

SEQ ID NO: 4460 - protein, 122 aa, Artificial Sequence
  Chemically Synthesized
QVQLQESGGGLVQAGGSLRLSCAASGTISSSYGMGWYRQAPGKEREFVAGIDPGGTTYYADSVKGRFTISRDNAKNTVYLQMNSLKPEDTAVYYCAVITDGDPSYGSYYIYWGQGTQVTVSS

SEQ ID NO: 4461 - protein, 118 aa, Artificial Sequence
  Chemically Synthesized
QVQLQESGGGLVQAGGSLRLSCAASGNIFRAYSMGWYRQAPGKEREFVAGISAGASTYYADSVKGRFTISRDNAKNTVYLQMNSLKPEDTAVYYCAVLYYDGAYHAYWGQGTQVTVSS

SEQ ID NO: 4462 - protein, 122 aa, Artificial Sequence
  Chemically Synthesized
QVQLQESGGGLVQAGGSLRLSCAASGNISWIVAMGWYRQAPGKEREFVAAISAGTTTNYADSVKGRFTISRDNAKNTVYLQMNSLKPEDTAVYYCAVIAEQPSQQYPRYYYWGQGTQVTVSS

SEQ ID NO: 4463 - protein, 118 aa, Artificial Sequence
  Chemically Synthesized
QVQLQESGGGLVQAGGSLRLSCAASGYISTYDFMGWYRQAPGKERELVASIDQGTTTNYADSVKGRFTISRDNAKNTVYLQMNSLKPEDTAVYYCAAQSYRGAGLPYWGQGTQVTVSS

SEQ ID NO: 4464 - protein, 118 aa, Artificial Sequence
  Chemically Synthesized
QVQLQESGGGLVQAGGSLRLSCAASGTISYGSYMGWYRQAPGKEREFVASIDSGGSTYYADSVKGRFTISRDNAKNTVYLQMNSLKPEDTAVYYCAVANVNTSYYEYWGQGTQVTVSS

SEQ ID NO: 4465 - protein, 122 aa, Artificial Sequence
  Chemically Synthesized
QVQLQESGGGLVQAGGSLRLSCAASGTISEPLVMGWYRQAPGKEREFVASIASGASTNYADSVKGRFTISRDNAKNTVYLQMNSLKPEDTAVYYCAAVDAFYGRRGAYFYYWGQGTQVTVSS

SEQ ID NO: 4466 - protein, 118 aa, Artificial Sequence
  Chemically Synthesized
QVQLQESGGGLVQAGGSLRLSCAASGTIFFFAPMGWYRQAPGKERELVAGIGDGTITNYADSVKGRFTISRDNAKNTVYLQMNSLKPEDTAVYYCAAPTPSGADFTYWGQGTQVTVSS

SEQ ID NO: 4467 - protein, 117 aa, Artificial Sequence
  Chemically Synthesized
QVQLQESGGGLVQAGGSLRLSCAASGTISYRYSMGWYRQAPGKEREFVASITSVVIPYADSVKGRFTISRDNAKNTVYLQMNSLKPEDTAVYYCAAYAAGDDRYYYWGQGTQVTVSS

SEQ ID NO: 4468 - protein, 118 aa, Artificial Sequence
  Chemically Synthesized
QVQLQESGGGLVQAGGSLRLSCAASGYISQRTTMGWYRQAPGKEREFVAAIGDGGTTNYADSVKGRFTISRDNAKNTVYLQMNSLKPEDTAVYYCAAVYYRDTYHGYWGQGTQVTVSS

SEQ ID NO: 4469 - protein, 118 aa, Artificial Sequence
  Chemically Synthesized
QVQLQESGGGLVQAGGSLRLSCAASGTISGKLYMGWYRQAPGKEREFVATINDGDNTNYADSVKGRFTISRDNAKNTVYLQMNSLKPEDTAVYYCAAYHDDGGLHGYWGQGTQVTVSS

SEQ ID NO: 4470 - protein, 118 aa, Artificial Sequence
  Chemically Synthesized
QVQLQESGGGLVQAGGSLRLSCAASGYIFDGYGMGWYRQAPGKERELVAAISYGGNTYYADSVKGRFTISRDNAKNTVYLQMNSLKPEDTAVYYCAVDGWPDSHFTYWGQGTQVTVSS

SEQ ID NO: 4471 - protein, 116 aa, Artificial Sequence
  Chemically Synthesized
QVQLQESGGGLVQAGGSLRLSCAASGSIFWSSMGWYRQAPGKERELVAGIGPGTSTNYADSVKGRFTISRDNAKNTVYLQMNSLKPEDTAVYYCAVIYASDILGYWGQGTQVTVSS

SEQ ID NO: 4472 - protein, 126 aa, Artificial Sequence
  Chemically Synthesized
QVQLQESGGGLVQAGGSLRLSCAASGTISAAAYMGWYRQAPGKEREFVASIDLGSNTNYADSVKGRFTISRDNAKNTVYLQMNSLKPEDTAVYYCAALKRVAKGPSDVDVSWLVYWGQGTQVTVSS

SEQ ID NO: 4473 - protein, 118 aa, Artificial Sequence
  Chemically Synthesized
QVQLQESGGGLVQAGGSLRLSCAASGYISDPTGMGWYRQAPGKERELVAAIAGGSITNYADSVKGRFTISRDNAKNTVYLQMNSLKPEDTAVYYCAVLLYDTLYHYYWGQGTQVTVSS

SEQ ID NO: 4474 - protein, 121 aa, Artificial Sequence
  Chemically Synthesized
QVQLQESGGGLVQAGGSLRLSCAASGNIFTHAVMGWYRQAPGKERELVAGIIAGTITNYADSVKGRFTISRDNAKNTVYLQMNSLKPEDTAVYYCAATDDFNRSTRSSFYWGQGTQVTVSS

SEQ ID NO: 4475 - protein, 120 aa, Artificial Sequence
  Chemically Synthesized
QVQLQESGGGLVQAGGSLRLSCAASGTIFWYTKMGWYRQAPGKEREFVAAIADGTTYADSVKGRFTISRDNAKNTVYLQMNSLKPEDTAVYYCAAGDYIDVLYTDGHPYWGQGTQVTVSS

SEQ ID NO: 4476 - protein, 118 aa, Artificial Sequence
  Chemically Synthesized
QVQLQESGGGLVQAGGSLRLSCAASGYISDYTRMGWYRQAPGKERELVASIDAGASTYYADSVKGRFTISRDNAKNTVYLQMNSLKPEDTAVYYCAAVIIPPWLHPYWGQGTQVTVSS

SEQ ID NO: 4477 - protein, 117 aa, Artificial Sequence
  Chemically Synthesized
QVQLQESGGGLVQAGGSLRLSCAASGNISGYPDMGWYRQAPGKEREFVAAIDSGTTYYADSVKGRFTISRDNAKNTVYLQMNSLKPEDTAVYYCAALVRTVDNHSYWGQGTQVTVSS

SEQ ID NO: 4478 - protein, 118 aa, Artificial Sequence
  Chemically Synthesized
QVQLQESGGGLVQAGGSLRLSCAASGYISTRGGMGWYRQAPGKEREFVASINFGGNTNYADSVKGRFTISRDNAKNTVYLQMNSLKPEDTAVYYCAAVLYSLVWHAYWGQGTQVTVSS

SEQ ID NO: 4479 - protein, 126 aa, Artificial Sequence
  Chemically Synthesized
QVQLQESGGGLVQAGGSLRLSCAASGNIFDVYDMGWYRQAPGKERELVATIGDGGTTNYADSVKGRFTISRDNAKNTVYLQMNSLKPEDTAVYYCAVESYIGRFRESERDFGHHYWGQGTQVTVSS

SEQ ID NO: 4480 - protein, 122 aa, Artificial Sequence
  Chemically Synthesized
QVQLQESGGGLVQAGGSLRLSCAASGSIFNYGGMGWYRQAPGKERELVAAIAIGSNTYYADSVKGRFTISRDNAKNTVYLQMNSLKPEDTAVYYCAVDYKRERDNTWAYYYWGQGTQVTVSS

SEQ ID NO: 4481 - protein, 122 aa, Artificial Sequence
  Chemically Synthesized
QVQLQESGGGLVQAGGSLRLSCAASGSISLYGSMGWYRQAPGKEREFVAAINTGGITYYADSVKGRFTISRDNAKNTVYLQMNSLKPEDTAVYYCAAYFGGDVRTPPFHDYWGQGTQVTVSS

SEQ ID NO: 4482 - protein, 117 aa, Artificial Sequence
  Chemically Synthesized
QVQLQESGGGLVQAGGSLRLSCAASGTISTPRDMGWYRQAPGKEREFVASITGGGTTYYADSVKGRFTISRDNAKNTVYLQMNSLKPEDTAVYYCAVRTLTTTVFYWGQGTQVTVSS

SEQ ID NO: 4483 - protein, 113 aa, Artificial Sequence
  Chemically Synthesized
QVQLQESGGGLVQAGGSLRLSCAASGNISQQFYMGWYRQAPGKERELVAGITRGSTTYYADSVKGRFTISRDNAKNTVYLQMNSLKPEDTAVYYCAAPYHEYWGQGTQVTVSS

SEQ ID NO: 4484 - protein, 118 aa, Artificial Sequence
  Chemically Synthesized
QVQLQESGGGLVQAGGSLRLSCAASGTIFVDDVMGWYRQAPGKEREFVASITRGGSTYYADSVKGRFTISRDNAKNTVYLQMNSLKPEDTAVYYCAAIQYRGNWFYYWGQGTQVTVSS

SEQ ID NO: 4485 - protein, 120 aa, Artificial Sequence
  Chemically Synthesized
QVQLQESGGGLVQAGGSLRLSCAASGYMGWYRQAPGKERELVATIGRGGTTNYADSVKGRFTISRDNAKNTVYLQMNSLKPEDTAVYYCAVTAQRDGLGPYVSTYLHSYWGQGTQVTVSS

SEQ ID NO: 4486 - protein, 118 aa, Artificial Sequence
  Chemically Synthesized
QVQLQESGGGLVQAGGSLRLSCAASGYIFAVAYMGWYRQAPGKERELVAAIDYGGSTYYADSVKGRFTISRDNAKNTVYLQMNSLKPEDTAVYYCAVWVPYLYDYAYWGQGTQVTVSS

SEQ ID NO: 4487 - protein, 118 aa, Artificial Sequence
  Chemically Synthesized
QVQLQESGGGLVQAGGSLRLSCAASGNISYDVYMGWYRQAPGKERELVASIDRGTITYYADSVKGRFTISRDNAKNTVYLQMNSLKPEDTAVYYCAVWYTPDKPYPYWGQGTQVTVSS

SEQ ID NO: 4488 - protein, 118 aa, Artificial Sequence
  Chemically Synthesized
QVQLQESGGGLVQAGGSLRLSCAASGTISARYSMGWYRQAPGKEREFVASISTGSNTNYADSVKGRFTISRDNAKNTVYLQMNSLKPEDTAVYYCAVVIAGHPIFWYWGQGTQVTVSS

SEQ ID NO: 4489 - protein, 118 aa, Artificial Sequence
  Chemically Synthesized
QVQLQESGGGLVQAGGSLRLSCAASGTIFRDGKMGWYRQAPGKEREFVAAINGGGTTYYADSVKGRFTISRDNAKNTVYLQMNSLKPEDTAVYYCAAVRFDDTYYYYWGQGTQVTVSS

SEQ ID NO: 4490 - protein, 118 aa, Artificial Sequence
  Chemically Synthesized
QVQLQESGGGLVQAGGSLRLSCAASGSIFSNAIMGWYRQAPGKEREFVAGITNGGTTNYADSVKGRFTISRDNAKNTVYLQMNSLKPEDTAVYYCAALYKPPDKLWYWGQGTQVTVSS

SEQ ID NO: 4491 - protein, 118 aa, Artificial Sequence
  Chemically Synthesized
QVQLQESGGGLVQAGGSLRLSCAASGNISWKARMGWYRQAPGKEREFVAAIGVGANTNYADSVKGRFTISRDNAKNTVYLQMNSLKPEDTAVYYCAVVYADQVWHFYWGQGTQVTVSS

SEQ ID NO: 4492 - protein, 118 aa, Artificial Sequence
  Chemically Synthesized
QVQLQESGGGLVQAGGSLRLSCAASGNISDSIGMGWYRQAPGKERELVAGIALGTSTNYADSVKGRFTISRDNAKNTVYLQMNSLKPEDTAVYYCAVSYRHWDALTYWGQGTQVTVSS

SEQ ID NO: 4493 - protein, 117 aa, Artificial Sequence
  Chemically Synthesized
QVQLQESGGGLVQAGGSLRLSCAASGSIFLALGMGWYRQAPGKEREFVAGITYGGNTNYADSVKGRFTISRDNAKNTVYLQMNSLKPEDTAVYYCAADGGLSVLRYWGQGTQVTVSS

SEQ ID NO: 4494 - protein, 117 aa, Artificial Sequence
  Chemically Synthesized
QVQLQESGGGLVQAGGSLRLSCAASGSISSLTMGWYRQAPGKERELVAAIGSGANTNYADSVKGRFTISRDNAKNTVYLQMNSLKPEDTAVYYCAVNRDDDVGLGYWGQGTQVTVSS

SEQ ID NO: 4495 - protein, 126 aa, Artificial Sequence
  Chemically Synthesized
QVQLQESGGGLVQAGGSLRLSCAASGTIFQYNYMGWYRQAPGKEREFVAGIDGGGNTYYADSVKGRFTISRDNAKNTVYLQMNSLKPEDTAVYYCAVDYVPGTVQLPHVGGPYAYWGQGTQVTVSS

SEQ ID NO: 4496 - protein, 122 aa, Artificial Sequence
  Chemically Synthesized
QVQLQESGGGLVQAGGSLRLSCAASGTISDEYEMGWYRQAPGKERELVASISTGSTTYYADSVKGRFTISRDNAKNTVYLQMNSLKPEDTAVYYCAVNLEGYRVAAGALEYWGQGTQVTVSS

SEQ ID NO: 4497 - protein, 118 aa, Artificial Sequence
  Chemically Synthesized
QVQLQESGGGLVQAGGSLRLSCAASGSISYVYGMGWYRQAPGKEREFVAGITVGTTTYYADSVKGRFTISRDNAKNTVYLQMNSLKPEDTAVYYCAAVTYRLGYHSYWGQGTQVTVSS

SEQ ID NO: 4498 - protein, 112 aa, Artificial Sequence
  Chemically Synthesized
QVQLQESGGGLVQAGGSLRLSCAASGNISYLLYMGWYRQAPGKERELVASITSGGITYYADSVKGRFTISRDNAKNTVYLQMNSLKPEDTAVYYCAAHEMYWGQGTQVTVSS

SEQ ID NO: 4499 - protein, 118 aa, Artificial Sequence
  Chemically Synthesized
QVQLQESGGGLVQAGGSLRLSCAASGTISRYTYMGWYRQAPGKEREFVAAITGGATTNYADSVKGRFTISRDNAKNTVYLQMNSLKPEDTAVYYCAVYPGARDYFAYWGQGTQVTVSS

SEQ ID NO: 4500 - protein, 122 aa, Artificial Sequence
  Chemically Synthesized
QVQLQESGGGLVQAGGSLRLSCAASGSISDTLLMGWYRQAPGKEREFVAAINYGANTNYADSVKGRFTISRDNAKNTVYLQMNSLKPEDTAVYYCAVVDTTPYQARRYHHYWGQGTQVTVSS

SEQ ID NO: 4501 - protein, 118 aa, Artificial Sequence
  Chemically Synthesized
QVQLQESGGGLVQAGGSLRLSCAASGTIFYARYMGWYRQAPGKEREFVAAIDNGTITYYADSVKGRFTISRDNAKNTVYLQMNSLKPEDTAVYYCAVTPRKWRGHRYWGQGTQVTVSS

SEQ ID NO: 4502 - protein, 122 aa, Artificial Sequence
  Chemically Synthesized
QVQLQESGGGLVQAGGSLRLSCAASGTISRYPRMGWYRQAPGKEREFVAAIAYGANTYYADSVKGRFTISRDNAKNTVYLQMNSLKPEDTAVYYCAADGSSRRGWYDYHDYWGQGTQVTVSS

SEQ ID NO: 4503 - protein, 118 aa, Artificial Sequence
  Chemically Synthesized
QVQLQESGGGLVQAGGSLRLSCAASGYIFTDGTMGWYRQAPGKEREFVASINVGSTTNYADSVKGRFTISRDNAKNTVYLQMNSLKPEDTAVYYCAAVVARQGLFYYWGQGTQVTVSS

SEQ ID NO: 4504 - protein, 121 aa, Artificial Sequence
  Chemically Synthesized
QVQLQESGGGLVQAGGSLRLSCAASGNISGPGYMGWYRQAPGKERELVATINDGSITNYADSVKGRFTISRDNAKNTVYLQMNSLKPEDTAVYYCAAYRTSRSADFIRLYWGQGTQVTVSS

SEQ ID NO: 4505 - protein, 126 aa, Artificial Sequence
  Chemically Synthesized
QVQLQESGGGLVQAGGSLRLSCAASGTIFWYAIMGWYRQAPGKERELVAAIAYGSSTYYADSVKGRFTISRDNAKNTVYLQMNSLKPEDTAVYYCAVQDGEQESVRYAEDTAHQYWGQGTQVTVSS

SEQ ID NO: 4506 - protein, 113 aa, Artificial Sequence
  Chemically Synthesized
QVQLQESGGGLVQAGGSLRLSCAASGTIFDDTYMGWYRQAPGKEREFVAGIGRGANTYYADSVKGRFTISRDNAKNTVYLQMNSLKPEDTAVYYCAARLLIYWGQGTQVTVSS

SEQ ID NO: 4507 - protein, 118 aa, Artificial Sequence
  Chemically Synthesized
QVQLQESGGGLVQAGGSLRLSCAASGYISTQYIMGWYRQAPGKERELVAAINDGASTNYADSVKGRFTISRDNAKNTVYLQMNSLKPEDTAVYYCAAVHDAGSKLSYWGQGTQVTVSS

SEQ ID NO: 4508 - protein, 117 aa, Artificial Sequence
  Chemically Synthesized
QVQLQESGGGLVQAGGSLRLSCAASGSISPYDDMGWYRQAPGKERELVASIAQGGTTYYADSVKGRFTISRDNAKNTVYLQMNSLKPEDTAVYYCAVRGPRASTMYWGQGTQVTVSS

SEQ ID NO: 4509 - protein, 126 aa, Artificial Sequence
  Chemically Synthesized
QVQLQESGGGLVQAGGSLRLSCAASGTISGYLRMGWYRQAPGKERELVASIAAGSSTYYADSVKGRFTISRDNAKNTVYLQMNSLKPEDTAVYYCAADLYDLPDNRHRVWASHTYWGQGTQVTVSS

SEQ ID NO: 4510 - protein, 120 aa, Artificial Sequence
  Chemically Synthesized
QVQLQESGGGLVQAGGSLRLSCAASGSISSAGMGWYRQAPGKEREFVAAINDGGNTNYADSVKGRFTISRDNAKNTVYLQMNSLKPEDTAVYYCAAGALQDSSLTLVFYWGQGTQVTVSS

SEQ ID NO: 4511 - protein, 118 aa, Artificial Sequence
  Chemically Synthesized
QVQLQESGGGLVQAGGSLRLSCAASGTISVIAYMGWYRQAPGKERELVASINLGSSTYYADSVKGRFTISRDNAKNTVYLQMNSLKPEDTAVYYCAVESYVHDNLVYWGQGTQVTVSS

SEQ ID NO: 4512 - protein, 117 aa, Artificial Sequence
  Chemically Synthesized
QVQLQESGGGLVQAGGSLRLSCAASGYILVTVMGWYRQAPGKERELVATIASGGITNYADSVKGRFTISRDNAKNTVYLQMNSLKPEDTAVYYCAVPHRYGRWLGYWGQGTQVTVSS

SEQ ID NO: 4513 - protein, 118 aa, Artificial Sequence
  Chemically Synthesized
QVQLQESGGGLVQAGGSLRLSCAASGNISPAQYMGWYRQAPGKEREFVATITYGSTTNYADSVKGRFTISRDNAKNTVYLQMNSLKPEDTAVYYCAVLYYDQRYYSYWGQGTQVTVSS

SEQ ID NO: 4514 - protein, 122 aa, Artificial Sequence
  Chemically Synthesized
QVQLQESGGGLVQAGGSLRLSCAASGSIFQPYAMGWYRQAPGKEREFVASINGGGTTNYADSVKGRFTISRDNAKNTVYLQMNSLKPEDTAVYYCAALLDVGERATRYLPYWGQGTQVTVSS

SEQ ID NO: 4515 - protein, 117 aa, Artificial Sequence
  Chemically Synthesized
QVQLQESGGGLVQAGGSLRLSCAASGNISAYSWMGWYRQAPGKERELVATINRGGKPYADSVKGRFTISRDNAKNTVYLQMNSLKPEDTAVYYCAVYSQRGEDHPYWGQGTQVTVSS

SEQ ID NO: 4516 - protein, 118 aa, Artificial Sequence
  Chemically Synthesized
QVQLQESGGGLVQAGGSLRLSCAASGNISALDYMGWYRQAPGKERELVAGIGTGATTNYADSVKGRFTISRDNAKNTVYLQMNSLKPEDTAVYYCAAADPYRTAFQYWGQGTQVTVSS

SEQ ID NO: 4517 - protein, 118 aa, Artificial Sequence
  Chemically Synthesized
QVQLQESGGGLVQAGGSLRLSCAASGSISYSYPMGWYRQAPGKEREFVAAIDIGTNTNYADSVKGRFTISRDNAKNTVYLQMNSLKPEDTAVYYCAALLKRDGYLYYWGQGTQVTVSS

SEQ ID NO: 4518 - protein, 126 aa, Artificial Sequence
  Chemically Synthesized
QVQLQESGGGLVQAGGSLRLSCAASGNISSYVSMGWYRQAPGKEREFVAGINGGTITNYADSVKGRFTISRDNAKNTVYLQMNSLKPEDTAVYYCAANDLGPHRWYYRYPHGHYYWGQGTQVTVSS

SEQ ID NO: 4519 - protein, 118 aa, Artificial Sequence
  Chemically Synthesized
QVQLQESGGGLVQAGGSLRLSCAASGTISILVYMGWYRQAPGKEREFVAGIGPGTNTYYADSVKGRFTISRDNAKNTVYLQMNSLKPEDTAVYYCAVYYAPRAYFNYWGQGTQVTVSS

SEQ ID NO: 4520 - protein, 126 aa, Artificial Sequence
  Chemically Synthesized
QVQLQESGGGLVQAGGSLRLSCAASGNIFWDYIMGWYRQAPGKEREFVAAITRGCITNYADSVKGRFTISRDNAKNTVYLQMNSLKPEDTAVYYCAVNAKYVFDYYGVYPGIYHYWGQGTQVTVSS

SEQ ID NO: 4521 - protein, 120 aa, Artificial Sequence
  Chemically Synthesized
QVQLQESGGGLVQAGGSLRLSCAASGTISTTWDMGWYRQAPGKEREFVASIATVLIPYADSVKGRFTISRDNAKNTVYLQMNSLKPEDTAVYYCAVVGYVTYFPLYYWYWGQGTQVTVSS

SEQ ID NO: 4522 - protein, 118 aa, Artificial Sequence
  Chemically Synthesized
QVQLQESGGGLVQAGGSLRLSCAASGSISVPTYMGWYRQAPGKERELVAGINYGGITNYADSVKGRFTISRDNAKNTVYLQMNSLKPEDTAVYYCAAAIYTGGRLTYWGQGTQVTVSS

SEQ ID NO: 4523 - protein, 118 aa, Artificial Sequence
  Chemically Synthesized
QVQLQESGGGLVQAGGSLRLSCAASGTIFDGVAMGWYRQAPGKERELVAAISYGSTTYYADSVKGRFTISRDNAKNTVYLQMNSLKPEDTAVYYCAVVGSQAVPLGYWGQGTQVTVSS

SEQ ID NO: 4524 - protein, 118 aa, Artificial Sequence
  Chemically Synthesized
QVQLQESGGGLVQAGGSLRLSCAASGYISGYSWMGWYRQAPGKERELVAGIAYGANTYYADSVKGRFTISRDNAKNTVYLQMNSLKPEDTAVYYCAVGQPAYAHLHYWGQGTQVTVSS

SEQ ID NO: 4525 - protein, 116 aa, Artificial Sequence
  Chemically Synthesized
QVQLQESGGGLVQAGGSLRLSCAASGNIFYGPSMGWYRQAPGKERELVAAITRGATTNYADSVKGRFTISRDNAKNTVYLQMNSLKPEDTAVYYCAVDAYTLFSYWGQGTQVTVSS

SEQ ID NO: 4526 - protein, 121 aa, Artificial Sequence
  Chemically Synthesized
QVQLQESGGGLVQAGGSLRLSCAASGTISFPYYMGWYRQAPGKERELVATIATGSNTNYADSVKGRFTISRDNAKNTVYLQMNSLKPEDTAVYYCAARRPWYEAYIPYDYWGQGTQVTVSS

SEQ ID NO: 4527 - protein, 125 aa, Artificial Sequence
  Chemically Synthesized
QVQLQESGGGLVQAGGSLRLSCAASGTISADFAMGWYRQAPGKEREFVATIDAGSTTYYADSVKGRFTISRDNAKNTVYLQMNSLKPEDTAVYYCAVVDYHSTLRSGVLTVVMYWGQGTQVTVSS

SEQ ID NO: 4528 - protein, 118 aa, Artificial Sequence
  Chemically Synthesized
QVQLQESGGGLVQAGGSLRLSCAASGYIFITGLMGWYRQAPGKERELVATISYGAITYYADSVKGRFTISRDNAKNTVYLQMNSLKPEDTAVYYCAVWGTYRSSYDYWGQGTQVTVSS

SEQ ID NO: 4529 - protein, 117 aa, Artificial Sequence
  Chemically Synthesized
QVQLQESGGGLVQAGGSLRLSCAASGSISGYTIMGWYRQAPGKEREFVATISSGTITNYADSVKGRFTISRDNAKNTVYLQMNSLKPEDTAVYYCAAGIYSLFTLYWGQGTQVTVSS

SEQ ID NO: 4530 - protein, 117 aa, Artificial Sequence
  Chemically Synthesized
QVQLQESGGGLVQAGGSLRLSCAASGYISDRYDMGWYRQAPGKERELLPVLVTVLVPYADSVKGRFTISRDNAKNTVYLQMNSLKPEDTAVYYCAAGHEDYAGHRYWGQGTQVTVSS

SEQ ID NO: 4531 - protein, 122 aa, Artificial Sequence
  Chemically Synthesized
QVQLQESGGGLVQAGGSLRLSCAASGNISLVIYMGWYRQAPGKEREFVATIGYGTTTYYADSVKGRFTISRDNAKNTVYLQMNSLKPEDTAVYYCAATTHLRGDEPPWLGYWGQGTQVTVSS

SEQ ID NO: 4532 - protein, 118 aa, Artificial Sequence
  Chemically Synthesized
QVQLQESGGGLVQAGGSLRLSCAASGNIFGASTMGWYRQAPGKERELVAAISYGGTTNYADSVKGRFTISRDNAKNTVYLQMNSLKPEDTAVYYCAVLVTTHPYLFYWGQGTQVTVSS

SEQ ID NO: 4533 - protein, 119 aa, Artificial Sequence
  Chemically Synthesized
QVQLQESGGGLVQAGGSLRLSCAASGYIFGADTDMGWYRQAPGKERELVAAIADGAITNYADSVKGRFTISRDNAKNTVYLQMNSLKPEDTAVYYCAVSPRFRRSLVYWGQGTQVTVSS

SEQ ID NO: 4534 - protein, 126 aa, Artificial Sequence
  Chemically Synthesized
QVQLQESGGGLVQAGGSLRLSCAASGNIFHDLYMGWYRQAPGKEREFVAGINRGSITYYADSVKGRFTISRDNAKNTVYLQMNSLKPEDTAVYYCAVAEAYRQHTYVNTLLPLFYWGQGTQVTVSS

SEQ ID NO: 4535 - protein, 118 aa, Artificial Sequence
  Chemically Synthesized
QVQLQESGGGLVQAGGSLRLSCAASGYIFVLGGMGWYRQAPGKEREFVAAITGGGNTNYADSVKGRFTISRDNAKNTVYLQMNSLKPEDTAVYYCAADTFRNRPHAYWGQGTQVTVSS

SEQ ID NO: 4536 - protein, 124 aa, Artificial Sequence
  Chemically Synthesized
QVQLQESGGGLVQAGGSLRLSCAASGTISSRTSMGWYRQAPGKEREFVASISYGGSTNYADSVKGRFTISRDNAKNTVYLQMNSLKPEDTAVYYCAVENQFDDGRGPGTWHSYWGQGTQVTVSS

SEQ ID NO: 4537 - protein, 122 aa, Artificial Sequence
  Chemically Synthesized
QVQLQESGGGLVQAGGSLRLSCAASGNISELFYMGWYRQAPGKERELVAGISLGSTTNYADSVKGRFTISRDNAKNTVYLQMNSLKPEDTAVYYCAVADGYVREAANDFDYWGQGTQVTVSS

SEQ ID NO: 4538 - protein, 122 aa, Artificial Sequence
  Chemically Synthesized
QVQLQESGGGLVQAGGSLRLSCAASGSISGPTSMGWYRQAPGKERELVASIDAGANTNYADSVKGRFTISRDNAKNTVYLQMNSLKPEDTAVYYCAVLSVSTAPYVRYHYYWGQGTQVTVSS

SEQ ID NO: 4539 - protein, 116 aa, Artificial Sequence
  Chemically Synthesized
QVQLQESGGGLVQAGGSLRLSCAASGNIFLPTQMGWYRQAPGKEREFVATIGAGSTTNYADSVKGRFTISRDNAKNTVYLQMNSLKPEDTAVYYCAVLYDRNHYYWGQGTQVTVSS

SEQ ID NO: 4540 - protein, 118 aa, Artificial Sequence
  Chemically Synthesized
QVQLQESGGGLVQAGGSLRLSCAASGNISVNAIMGWYRQAPGKEREFVAGINLGTSTNYADSVKGRFTISRDNAKNTVYLQMNSLKPEDTAVYYCAALQRLDDWHAYWGQGTQVTVSS

SEQ ID NO: 4541 - protein, 118 aa, Artificial Sequence
  Chemically Synthesized
QVQLQESGGGLVQAGGSLRLSCAASGSIFDYVAMGWYRQAPGKEREFVATIDYGTNTYYADSVKGRFTISRDNAKNTVYLQMNSLKPEDTAVYYCAAGLQDWYDFGYWGQGTQVTVSS

SEQ ID NO: 4542 - protein, 118 aa, Artificial Sequence
  Chemically Synthesized
QVQLQESGGGLVQAGGSLRLSCAASGTIFYLGYMGWYRQAPGKERELVAGIDPGTSTNYADSVKGRFTISRDNAKNTVYLQMNSLKPEDTAVYYCAVVWQDGQYHYYWGQGTQVTVSS

SEQ ID NO: 4543 - protein, 118 aa, Artificial Sequence
  Chemically Synthesized
QVQLQESGGGLVQAGGSLRLSCAASGTIFDSYYMGWYRQAPGKERELVAAITNGTITNYADSVKGRFTISRDNAKNTVYLQMNSLKPEDTAVYYCAVTYRDYVDLPYWGQGTQVTVSS

SEQ ID NO: 4544 - protein, 120 aa, Artificial Sequence
  Chemically Synthesized
QVQLQESGGGLVQAGGSLRLSCAASGYISQDSYMGWYRQAPGKEREFVAGIARGSTTYYADSVKGRFTISRDNAKNTVYLQMNSLKPEDTAVYYCAAVTTGDESTWYYYWGQGTQVTVSS

SEQ ID NO: 4545 - protein, 118 aa, Artificial Sequence
  Chemically Synthesized
QVQLQESGGGLVQAGGSLRLSCAASGTIFRRWPMGWYRQAPGKEREFVASISDGANTNYADSVKGRFTISRDNAKNTVYLQMNSLKPEDTAVYYCAVYFYDEGHHYYWGQGTQVTVSS

SEQ ID NO: 4546 - protein, 116 aa, Artificial Sequence
  Chemically Synthesized
QVQLQESGGGLVQAGGSLRLSCAASGTISLWRYMGWYRQAPGKEREFVASIGYGTSTNYADSVKGRFTISRDNAKNTVYLQMNSLKPEDTAVYYCAAAVAPLFYYWGQGTQVTVSS

SEQ ID NO: 4547 - protein, 125 aa, Artificial Sequence
  Chemically Synthesized
QVQLQESGGGLVQAGGSLRLSCAASGTISYVPRMGWYRQAPGKEREFVAAIDTGGSTYYADSVKGRFTISRDNAKNTVYLQMNSLKPEDTAVYYCAVEIDRDPRGYYALTSILYWGQGTQVTVSS

SEQ ID NO: 4548 - protein, 121 aa, Artificial Sequence
  Chemically Synthesized
QVQLQESGGGLVQAGGSLRLSCAASGNIFAELTMGWYRQAPGKEREFVASIGYGTTTYYADSVKGRFTISRDNAKNTVYLQMNSLKPEDTAVYYCAVNLYSHYYAGTTIYWGQGTQVTVSS

SEQ ID NO: 4549 - protein, 122 aa, Artificial Sequence
  Chemically Synthesized
QVQLQESGGGLVQAGGSLRLSCAASGTISRPDGMGWYRQAPGKEREFVATIDYGGNTNYADSVKGRFTISRDNAKNTVYLQMNSLKPEDTAVYYCAARTDVEPNTPAYLDYWGQGTQVTVSS

SEQ ID NO: 4550 - protein, 126 aa, Artificial Sequence
  Chemically Synthesized
QVQLQESGGGLVQAGGSLRLSCAASGTISFVYGMGWYRQAPGKERELVATIGSGSTTNYADSVKGRFTISRDNAKNTVYLQMNSLKPEDTAVYYCAVWAGRATYAILVPDRPHLYWGQGTQVTVSS

SEQ ID NO: 4551 - protein, 117 aa, Artificial Sequence
  Chemically Synthesized
QVQLQESGGGLVQAGGSLRLSCAASGYIFYDIYMGWYRQAPGKEREFVATIGQGTTTNYADSVKGRFTISRDNAKNTVYLQMNSLKPEDTAVYYCAVEPSSIPGIYWGQGTQVTVSS

SEQ ID NO: 4552 - protein, 118 aa, Artificial Sequence
  Chemically Synthesized
QVQLQESGGGLVQAGGSLRLSCAASGSISTSKSMGWYRQAPGKEREFVATIGSGGSTYYADSVKGRFTISRDNAKNTVYLQMNSLKPEDTAVYYCAAYVLPYKVHKYWGQGTQVTVSS

SEQ ID NO: 4553 - protein, 118 aa, Artificial Sequence
  Chemically Synthesized
QVQLQESGGGLVQAGGSLRLSCAASGNISTTLLMGWYRQAPGKERELVAAISLGGSTNYADSVKGRFTISRDNAKNTVYLQMNSLKPEDTAVYYCAALYRSGQWYNYWGQGTQVTVSS

SEQ ID NO: 4554 - protein, 127 aa, Artificial Sequence
  Chemically Synthesized
QVQLQESGGGLVQAGGSLRLSCAASGNISSRVYMGWYRQAPGKEREFVASITTGSSTYYADSVKGRFTISRDNAKNTVYLQMNSLKPEDTAVYYCAVDWYTTRYARYAADFSGLTYWGQGTQVTVSS

SEQ ID NO: 4555 - protein, 122 aa, Artificial Sequence
  Chemically Synthesized
QVQLQESGGGLVQAGGSLRLSCAASGTISDVITMGWYRQAPGKEREFVASITDGAITNYADSVKGRFTISRDNAKNTVYLQMNSLKPEDTAVYYCAVDINLWYGTNADLRYWGQGTQVTVSS

SEQ ID NO: 4556 - protein, 126 aa, Artificial Sequence
  Chemically Synthesized
QVQLQESGGGLVQAGGSLRLSCAASGTISPYWDMGWYRQAPGKERELVASIGSGGITNYADSVKGRFTISRDNAKNTVYLQMNSLKPEDTAVYYCAAIVYTYRTTYYGRAYVHVYWGQGTQVTVSS

SEQ ID NO: 4557 - protein, 117 aa, Artificial Sequence
  Chemically Synthesized
QVQLQESGGGLVQAGGSLRLSCAASGNISSDDYMGWYRQAPGKERELVATIVVVLLPYADSVKGRFTISRDNAKNTVYLQMNSLKPEDTAVYYCAATPRDYGYLGYWGQGTQVTVSS

SEQ ID NO: 4558 - protein, 126 aa, Artificial Sequence
  Chemically Synthesized
QVQLQESGGGLVQAGGSLRLSCAASGTIFYHHYMGWYRQAPGKERELVAGIGLGAITYYADSVKGRFTISRDNAKNTVYLQMNSLKPEDTAVYYCAVDHYNPTNDNPYDYRDHSYWGQGTQVTVSS

SEQ ID NO: 4559 - protein, 118 aa, Artificial Sequence
  Chemically Synthesized
QVQLQESGGGLVQAGGSLRLSCAASGYIFYSNAMGWYRQAPGKERELVASIAWGTSTNYADSVKGRFTISRDNAKNTVYLQMNSLKPEDTAVYYCAATDAYRFLFAYWGQGTQVTVSS

SEQ ID NO: 4560 - protein, 122 aa, Artificial Sequence
  Chemically Synthesized
QVQLQESGGGLVQAGGSLRLSCAASGTISYYYWMGWYRQAPGKEREFVAAISSGGITNYADSVKGRFTISRDNAKNTVYLQMNSLKPEDTAVYYCAARRNRWESRVNLFPYWGQGTQVTVSS

SEQ ID NO: 4561 - protein, 118 aa, Artificial Sequence
  Chemically Synthesized
QVQLQESGGGLVQAGGSLRLSCAASGTISTSYLMGWYRQAPGKEREFVAGIDHGGNTNYADSVKGRFTISRDNAKNTVYLQMNSLKPEDTAVYYCAALIYGNQFHYYWGQGTQVTVSS

SEQ ID NO: 4562 - protein, 121 aa, Artificial Sequence
  Chemically Synthesized
QVQLQESGGGLVQAGGSLRLSCAASGNIFGLTGMGWYRQAPGKEREFVASINRGGSTNYADSVKGRFTISRDNAKNTVYLQMNSLKPEDTAVYYCAAIDRVYGGYKFLHYWGQGTQVTVSS

SEQ ID NO: 4563 - protein, 122 aa, Artificial Sequence
  Chemically Synthesized
QVQLQESGGGLVQAGGSLRLSCAASGNISQVYRMGWYRQAPGKEREFVAGISSGSNTNYADSVKGRFTISRDNAKNTVYLQMNSLKPEDTAVYYCAAVAYRDGDGPKILGYWGQGTQVTVSS

SEQ ID NO: 4564 - protein, 118 aa, Artificial Sequence
  Chemically Synthesized
QVQLQESGGGLVQAGGSLRLSCAASGNIFIDYTMGWYRQAPGKEREFVASISRGSSTNYADSVKGRFTISRDNAKNTVYLQMNSLKPEDTAVYYCAVLCWLTSTTIYWGQGTQVTVSS

SEQ ID NO: 4565 - protein, 118 aa, Artificial Sequence
  Chemically Synthesized
QVQLQESGGGLVQAGGSLRLSCAASGSISITTFMGWYRQAPGKERELVAGITFGGNTYYADSVKGRFTISRDNAKNTVYLQMNSLKPEDTAVYYCAAPYRTTDNYVYWGQGTQVTVSS

SEQ ID NO: 4566 - protein, 118 aa, Artificial Sequence
  Chemically Synthesized
QVQLQESGGGLVQAGGSLRLSCAASGYIFFDADMGWYRQAPGKERELVASIAQGSTTYYADSVKGRFTISRDNAKNTVYLQMNSLKPEDTAVYYCAVLDDVGYYHSYWGQGTQVTVSS

SEQ ID NO: 4567 - protein, 118 aa, Artificial Sequence
  Chemically Synthesized
QVQLQESGGGLVQAGGSLRLSCAASGYIFRGTWMGWYRQAPGKEREFVAAISRGGITYYADSVKGRFTISRDNAKNTVYLQMNSLKPEDTAVYYCAVRKRRDTTFDYWGQGTQVTVSS

SEQ ID NO: 4568 - protein, 118 aa, Artificial Sequence
  Chemically Synthesized
QVQLQESGGGLVQAGGSLRLSCAASGYISRLFAMGWYRQAPGKERELVAAIAAGASTYYADSVKGRFTISRDNAKNTVYLQMNSLKPEDTAVYYCAARGGGRYLHDYWGQGTQVTVSS

SEQ ID NO: 4569 - protein, 120 aa, Artificial Sequence
  Chemically Synthesized
QVQLQESGGGLVQAGGSLRLSCAASGYISYKSWMGWYRQAPGKEREFVAGITSVLVPYADSVKGRFTISRDNAKNTVYLQMNSLKPEDTAVYYCAADYTDPSLFSGLLYWGQGTQVTVSS

SEQ ID NO: 4570 - protein, 123 aa, Artificial Sequence
  Chemically Synthesized
QVQLQESGGGLVQAGGSLRLSCAASGSIFPSCMGWYRQAPGKERELVAAITYGASTNYADSVKGRFTISRDNAKNTVYLQMNSLKPEDTAVYYCAASEPGDYYDDDQTAPSYWGQGTQVTVSS

SEQ ID NO: 4571 - protein, 118 aa, Artificial Sequence
  Chemically Synthesized
QVQLQESGGGLVQAGGSLRLSCAASGTISTYYNMGWYRQAPGKEREFVATINVGTSTYYADSVKGRFTISRDNAKNTVYLQMNSLKPEDTAVYYCAADGTYDETFTYWGQGTQVTVSS

SEQ ID NO: 4572 - protein, 117 aa, Artificial Sequence
  Chemically Synthesized
QVQLQESGGGLVQAGGSLRLSCAASGNISADSLMGWYRQAPGKERELVATISGGGSTYYADSVKGRFTISRDNAKNTVYLQMNSLKPEDTAVYYCAADYLGTRLRYWGQGTQVTVSS

SEQ ID NO: 4573 - protein, 117 aa, Artificial Sequence
  Chemically Synthesized
QVQLQESGGGLVQAGGSLRLSCAASGNISDDEAMGWYRQAPGKEREFVAAIGDGATTYYADSVKGRFTISRDNAKNTVYLQMNSLKPEDTAVYYCAAPYSLLSGFYWGQGTQVTVSS

SEQ ID NO: 4574 - protein, 126 aa, Artificial Sequence
  Chemically Synthesized
QVQLQESGGGLVQAGGSLRLSCAASGNISYSVYMGWYRQAPGKEREFVAGIAAGANTNYADSVKGRFTISRDNAKNTVYLQMNSLKPEDTAVYYCAAYYEVDGDAPGGAGHTFEYWGQGTQVTVSS

SEQ ID NO: 4575 - protein, 117 aa, Artificial Sequence
  Chemically Synthesized
QVQLQESGGGLVQAGGSLRLSCAASGYISYPFYMGWYRQAPGKERELVATIALGTTTYYADSVKGRFTISRDNAKNTVYLQMNSLKPEDTAVYYCAAGDWLEQFLYWGQGTQVTVSS

SEQ ID NO: 4576 - protein, 122 aa, Artificial Sequence
  Chemically Synthesized
QVQLQESGGGLVQAGGSLRLSCAASGNISGDNRMGWYRQAPGKERELVAAITTGTNTNYADSVKGRFTISRDNAKNTVYLQMNSLKPEDTAVYYCAVPGLVSGDLLGDHFYWGQGTQVTVSS

SEQ ID NO: 4577 - protein, 126 aa, Artificial Sequence
  Chemically Synthesized
QVQLQESGGGLVQAGGSLRLSCAASGSISGINGMGWYRQAPGKEREFVAGISVGTSTNYADSVKGRFTISRDNAKNTVYLQMNSLKPEDTAVYYCAVYYSNFPYSYDIYFIIHYYWGQGTQVTVSS

SEQ ID NO: 4578 - protein, 121 aa, Artificial Sequence
  Chemically Synthesized
QVQLQESGGGLVQAGGSLRLSCAASGNISDRPVMGWYRQAPGKEREFVAGIGYGTNTNYADSVKGRFTISRDNAKNTVYLQMNSLKPEDTAVYYCAAAFLNGGSCTTGLYWGQGTQVTVSS

SEQ ID NO: 4579 - protein, 114 aa, Artificial Sequence
  Chemically Synthesized
QVQLQESGGGLVQAGGSLRLSCAASGTISNNYLMGWYRQAPGKEREFVATIGHGGNTNYADSVKGRFTISRDNAKNTVYLQMNSLKPEDTAVYYCAGLRRLSYWGQGTQVTVSS

SEQ ID NO: 4580 - protein, 126 aa, Artificial Sequence
  Chemically Synthesized
QVQLQESGGGLVQAGGSLRLSCAASGYISDRWYMGWYRQAPGKERELVATISRGSNTYYADSVKGRFTISRDNAKNTVYLQMNSLKPEDTAVYYCAVSNVGDIRDRQYPLYAYYYWGQGTQVTVSS

SEQ ID NO: 4581 - protein, 117 aa, Artificial Sequence
  Chemically Synthesized
QVQLQESGGGLVQAGGSLRLSCAASGNIFLLASMGWYRQAPGKEREFVATIDPGTSTYADSVKGRFTISRDNAKNTVYLQMNSLKPEDTAVYYCAVYALPYAPLPYWGQGTQVTVSS

SEQ ID NO: 4582 - protein, 122 aa, Artificial Sequence
  Chemically Synthesized
QVQLQESGGGLVQAGGSLRLSCAASGTIFTASPMGWYRQAPGKERELVATIGYGANTNYADSVKGRFTISRDNAKNTVYLQMNSLKPEDTAVYYCAVGGLYLVDARYSHVYWGQGTQVTVSS

SEQ ID NO: 4583 - protein, 126 aa, Artificial Sequence
  Chemically Synthesized
QVQLQESGGGLVQAGGSLRLSCAASGYISFISYMGWYRQAPGKEREFVAGIGEGGSTYYADSVKGRFTISRDNAKNTVYLQMNSLKPEDTAVYYCAAVYFDDQPRTRRGGDYYYYWGQGTQVTVSS

SEQ ID NO: 4584 - protein, 118 aa, Artificial Sequence
  Chemically Synthesized
QVQLQESGGGLVQAGGSLRLSCAASGSISVPFLMGWYRQAPGKEREFVATITAGSSTYYADSVKGRFTISRDNAKNTVYLQMNSLKPEDTAVYYCAVYDTLGDDHTYWGQGTQVTVSS

SEQ ID NO: 4585 - protein, 125 aa, Artificial Sequence
  Chemically Synthesized
QVQLQESGGGLVQAGGSLRLSCAASGSIFHTDRMGWYRQAPGKERELVAAITAGSSTYADSVKGRFTISRDNAKNTVYLQMNSLKPEDTAVYYCAVVQNGGWTPYNNAVYRYRYWGQGTQVTVSS

SEQ ID NO: 4586 - protein, 118 aa, Artificial Sequence
  Chemically Synthesized
QVQLQESGGGLVQAGGSLRLSCAASGYISERDGMGWYRQAPGKERELVAGIAKGSITYYADSVKGRFTISRDNAKNTVYLQMNSLKPEDTAVYYCAAILDPLDSHGYWGQGTQVTVSS

SEQ ID NO: 4587 - protein, 118 aa, Artificial Sequence
  Chemically Synthesized
QVQLQESGGGLVQAGGSLRLSCAASGTISDGYYMGWYRQAPGKEREFVAAISPGGNTNYADSVKGRFTISRDNAKNTVYLQMNSLKPEDTAVYYCAVVIRYVGYHHYWGQGTQVTVSS

SEQ ID NO: 4588 - protein, 118 aa, Artificial Sequence
  Chemically Synthesized
QVQLQESGGGLVQAGGSLRLSCAASGTISPALRMGWYRQAPGKEREFVATISDGGSTNYADSVKGRFTISRDNAKNTVYLQMNSLKPEDTAVYYCAAITYRSYFYWYWGQGTQVTVSS

SEQ ID NO: 4589 - protein, 116 aa, Artificial Sequence
  Chemically Synthesized
QVQLQESGGGLVQAGGSLRLSCAASGYIFEAYFMGWYRQAPGKEREFVAGIGLGATTYYADSVKGRFTISRDNAKNTVYLQMNSLKPEDTAVYYCAAGVYPQLIYWGQGTQVTVSS

SEQ ID NO: 4590 - protein, 124 aa, Artificial Sequence
  Chemically Synthesized
QVQLQESGGGLVQAGGSLRLSCAASGTISAGGGMGWYRQAPGKEREFVAGMLLVVQYADSVKGRFTISRDNAKNTVYLQMNSLKPEDTAVYYCAVSPQDDIEARTDEVGGHRYWGQGTQVTVSS

SEQ ID NO: 4591 - protein, 122 aa, Artificial Sequence
  Chemically Synthesized
QVQLQESGGGLVQAGGSLRLSCAASGTISGITSMGWYRQAPGKERELVAAIANGTTTYYADSVKGRFTISRDNAKNTVYLQMNSLKPEDTAVYYCAANISQGPPPGQTLTYWGQGTQVTVSS

SEQ ID NO: 4592 - protein, 110 aa, Artificial Sequence
  Chemically Synthesized
QVQLQESGGGLVQAGGSLRLSCAASGSISPDAYMGWYRQAPGKERELVATINFGSNTYYADSVKGRFTISRDNAKNTVYLQMNSLKPEDTAVYYCAVRYWGQGTQVTVSS

SEQ ID NO: 4593 - protein, 119 aa, Artificial Sequence
  Chemically Synthesized
QVQLQESGGGLVQAGGSLRLSCAASGNIFGTLLMGWYRQAPGKERELVASIDYGGSTTYYADSVKGRFTISRDNAKNTVYLQMNSLKPEDTAVYYCAVVRYGWPLHRYWGQGTQVTVSS

SEQ ID NO: 4594 - protein, 118 aa, Artificial Sequence
  Chemically Synthesized
QVQLQESGGGLVQAGGSLRLSCAASGTISPSYDMGWYRQAPGKEREFVAGIARGGSTYYADSVKGRFTISRDNAKNTVYLQMNSLKPEDTAVYYCAAIPWVAYGFGYWGQGTQVTVSS

SEQ ID NO: 4595 - protein, 118 aa, Artificial Sequence
  Chemically Synthesized
QVQLQESGGGLVQAGGSLRLSCAASGSISRNIRMGWYRQAPGKEREFVAGITKGSITNYADSVKGRFTISRDNAKNTVYLQMNSLKPEDTAVYYCAAIDAYDYYHYYWGQGTQVTVSS

SEQ ID NO: 4596 - protein, 118 aa, Artificial Sequence
  Chemically Synthesized
QVQLQESGGGLVQAGGSLRLSCAASGTISQAGSMGWYRQAPGKEREFVAGIADGASTYYADSVKGRFTISRDNAKNTVYLQMNSLKPEDTAVYYCAAGDGIGYALAYWGQGTQVTVSS

SEQ ID NO: 4597 - protein, 122 aa, Artificial Sequence
  Chemically Synthesized
QVQLQESGGGLVQAGGSLRLSCAASGYIFAYVVMGWYRQAPGKERELVAGITLGTSTYYADSVKGRFTISRDNAKNTVYLQMNSLKPEDTAVYYCAAIGDWYPSSYGGHIYWGQGTQVTVSS

SEQ ID NO: 4598 - protein, 118 aa, Artificial Sequence
  Chemically Synthesized
QVQLQESGGGLVQAGGSLRLSCAASGSIFDTWYMGWYRQAPGKEREFVATITSGASTNYADSVKGRFTISRDNAKNTVYLQMNSLKPEDTAVYYCAAALYYKTWHAYWGQGTQVTVSS

SEQ ID NO: 4599 - protein, 118 aa, Artificial Sequence
  Chemically Synthesized
QVQLQESGGGLVQAGGSLRLSCAASGTIFVSNGMGWYRQAPGKEREFVAAIASGSITNYADSVKGRFTISRDNAKNTVYLQMNSLKPEDTAVYYCAAVQDGLPYYPYWGQGTQVTVSS

SEQ ID NO: 4600 - protein, 117 aa, Artificial Sequence
  Chemically Synthesized
QVQLQESGGGLVQAGGSLRLSCAASGTISFYVMGWYRQAPGKERELVASISVGGSTNYADSVKGRFTISRDNAKNTVYLQMNSLKPEDTAVYYCAAGHSTGQSYSYWGQGTQVTVSS

SEQ ID NO: 4601 - protein, 122 aa, Artificial Sequence
  Chemically Synthesized
QVQLQESGGGLVQAGGSLRLSCAASGSIFHSPAMGWYRQAPGKEREFVASIGDGGITNYADSVKGRFTISRDNAKNTVYLQMNSLKPEDTAVYYCAVVTYGYRRYPPYHYYWGQGTQVTVSS

SEQ ID NO: 4602 - protein, 125 aa, Artificial Sequence
  Chemically Synthesized
QVQLQESGGGLVQAGGSLRLSCAASGNIFVWSHMGWYRQAPGKERELVATIASVVVPYADSVKGRFTISRDNAKNTVYLQMNSLKPEDTAVYYCAAYTDQWILWSLFGYYTHDYWGQGTQVTVSS

SEQ ID NO: 4603 - protein, 122 aa, Artificial Sequence
  Chemically Synthesized
QVQLQESGGGLVQAGGSLRLSCAASGTISGYWSMGWYRQAPGKEREFVAAITDGTTTNYADSVKGRFTISRDNAKNTVYLQMNSLKPEDTAVYYCAANDRYPDQALAGHTYWGQGTQVTVSS

SEQ ID NO: 4604 - protein, 122 aa, Artificial Sequence
  Chemically Synthesized
QVQLQESGGGLVQAGGSLRLSCAASGSIFPYRDMGWYRQAPGKEREFVAGITTGASTNYADSVKGRFTISRDNAKNTVYLQMNSLKPEDTAVYYCAAKYNYKWAYYRAFPYWGQGTQVTVSS

SEQ ID NO: 4605 - protein, 118 aa, Artificial Sequence
  Chemically Synthesized
QVQLQESGGGLVQAGGSLRLSCAASGTISYQGDMGWYRQAPGKERELVATISYGANTNYADSVKGRFTISRDNAKNTVYLQMNSLKPEDTAVYYCAAYPEQLQDFDYWGQGTQVTVSS

SEQ ID NO: 4606 - protein, 122 aa, Artificial Sequence
  Chemically Synthesized
QVQLQESGGGLVQAGGSLRLSCAASGTISTYDAMGWYRQAPGKERELVASIARGGITYYADSVKGRFTISRDNAKNTVYLQMNSLKPEDTAVYYCAAYTDWYSYSPRLHDYWGQGTQVTVSS

SEQ ID NO: 4607 - protein, 118 aa, Artificial Sequence
  Chemically Synthesized
QVQLQESGGGLVQAGGSLRLSCAASGSISGPSVMGWYRQAPGKEREFVASINRGATTNYADSVKGRFTISRDNAKNTVYLQMNSLKPEDTAVYYCAVVYYDAAYHSYWGQGTQVTVSS

SEQ ID NO: 4608 - protein, 120 aa, Artificial Sequence
  Chemically Synthesized
QVQLQESGGGLVQAGGSLRLSCAASGNISRGPYMGWYRQAPGKERELVAGISAGATTYYADSVKGRFTISRDNAKNTVYLQMNSLKPEDTAVYYCAAGLSVTRLFTRMYWGQGTQVTVSS

SEQ ID NO: 4609 - protein, 118 aa, Artificial Sequence
  Chemically Synthesized
QVQLQESGGGLVQAGGSLRLSCAASGTIFTVKAMGWYRQAPGKEREFVAGIGSGSTTNYADSVKGRFTISRDNAKNTVYLQMNSLKPEDTAVYYCAVLIVVYGLHPYWGQGTQVTVSS

SEQ ID NO: 4610 - protein, 118 aa, Artificial Sequence
  Chemically Synthesized
QVQLQESGGGLVQAGGSLRLSCAASGNIFAPSAMGWYRQAPGKEREFVATISAGTSTNYADSVKGRFTISRDNAKNTVYLQMNSLKPEDTAVYYCAVIELTDRYHGYWGQGTQVTVSS

SEQ ID NO: 4611 - protein, 121 aa, Artificial Sequence
  Chemically Synthesized
QVQLQESGGGLVQAGGSLRLSCAASGNISGRKRMGWYRQAPGKEREFVAAITVGGSTNYADSVKGRFTISRDNAKNTVYLQMNSLKPEDTAVYYCAVDEVLVAVYWPTLYWGQGTQVTVSS

SEQ ID NO: 4612 - protein, 115 aa, Artificial Sequence
  Chemically Synthesized
QVQLQESGGGLVQAGGSLRLSCAASGYIFGLDYMGWYRQAPGKEREFVAAITRGATTYYADSVKGRFTISRDNAKNTVYLQMNSLKPEDTAVYYCASGVHAFGYWGQGTQVTVSS

SEQ ID NO: 4613 - protein, 122 aa, Artificial Sequence
  Chemically Synthesized
QVQLQESGGGLVQAGGSLRLSCAASGSISYASYMGWYRQAPGKERELVAAIALGSITNYADSVKGRFTISRDNAKNTVYLQMNSLKPEDTAVYYCAVYSRVYAGDWRAFVYWGQGTQVTVSS

SEQ ID NO: 4614 - protein, 118 aa, Artificial Sequence
  Chemically Synthesized
QVQLQESGGGLVQAGGSLRLSCAASGTISYRVRMGWYRQAPGKEREFVAAINQGGITYYADSVKGRFTISRDNAKNTVYLQMNSLKPEDTAVYYCAALRVSRGYHYYWGQGTQVTVSS

SEQ ID NO: 4615 - protein, 112 aa, Artificial Sequence
  Chemically Synthesized
QVQLQESGGGLVQAGGSLRLSCAASGRMGWYRQAPGKERELVATITFGSSTYYADSVKGRFTISRDNAKNTVYLQMNSLKPEDTAVYYCAARNRPWGDFYYWGQGTQVTVSS

SEQ ID NO: 4616 - protein, 118 aa, Artificial Sequence
  Chemically Synthesized
QVQLQESGGGLVQAGGSLRLSCAASGTIFYGYVMGWYRQAPGKEREFVATIATGAITYYADSVKGRFTISRDNAKNTVYLQMNSLKPEDTAVYYCAVRYSRWGGLVYWGQGTQVTVSS

SEQ ID NO: 4617 - protein, 118 aa, Artificial Sequence
  Chemically Synthesized
QVQLQESGGGLVQAGGSLRLSCAASGYISNTVLMGWYRQAPGKERELVAGINWGGTTNYADSVKGRFTISRDNAKNTVYLQMNSLKPEDTAVYYCAVLQSNLGLHSYWGQGTQVTVSS

SEQ ID NO: 4618 - protein, 117 aa, Artificial Sequence
  Chemically Synthesized
QVQLQESGGGLVQAGGSLRLSCAASGNIFTPSNMGWYRQAPGKERELVAAIAYGSNTYYADSVKGRFTISRDNAKNTVYLQMNSLKPEDTAVYYCAADVEFRSSMYWGQGTQVTVSS

SEQ ID NO: 4619 - protein, 113 aa, Artificial Sequence
  Chemically Synthesized
QVQLQESGGGLVQAGGSLRLSCAASGTISAGGEMGWYRQAPGKEREFVATIDVVVLPYADSVKGRFTISRDNAKNTVYLQMNSLKPEDTAVYYCAVDYTDLYWGQGTQVTVSS

SEQ ID NO: 4620 - protein, 118 aa, Artificial Sequence
  Chemically Synthesized
QVQLQESGGGLVQAGGSLRLSCAASGNISGNPWMGWYRQAPGKEREFVAAISFGATTYYADSVKGRFTISRDNAKNTVYLQMNSLKPEDTAVYYCAARYPQDYYLGYWGQGTQVTVSS

SEQ ID NO: 4621 - protein, 119 aa, Artificial Sequence
  Chemically Synthesized
QVQLQESGGGLVQAGGSLRLSCAASGNISPALVMGWYRQAPGKERELVAGIDYGGITNYADSVKGRFTISRDNAKNTVYLQMNSLKPEDTAVYYCAAGWYSGGSYLGYWGQGTQVTVSS

SEQ ID NO: 4622 - protein, 117 aa, Artificial Sequence
  Chemically Synthesized
QVQLQESGGGLVQAGGSLRLSCAASGNIFYTTYMGWYRQAPGKERELVAAITYGTITNYADSVKGRFTISRDNAKNTVYLQMNSLKPEDTAVYYCAWSADYPYHAYWGQGTQVTVSS

SEQ ID NO: 4623 - protein, 118 aa, Artificial Sequence
  Chemically Synthesized
QVQLQESGGGLVQAGGSLRLSCAASGTISPITYMGWYRQAPGKEREFVAAITVGGSTNYADSVKGRFTISRDNAKNTVYLQMNSLKPEDTAVYYCAALQDFPKRYYYWGQGTQVTVSS

SEQ ID NO: 4624 - protein, 119 aa, Artificial Sequence
  Chemically Synthesized
QVQLQESGGGLVQAGGSLRLSCAASGNISVGSWSMGWYRQAPGKEREFVAGIGDGATTNYADSVKGRFTISRDNAKNTVYLQMNSLKPEDTAVYYCAALLRSARILYYWGQGTQVTVSS

SEQ ID NO: 4625 - protein, 121 aa, Artificial Sequence
  Chemically Synthesized
QVQLQESGGGLVQAGGSLRLSCAASGTIFTNANMGWYRQAPGKERELVAAIAYGSTTNYADSVKGRFTISRDNAKNTVYLQMNSLKPEDTAVYYCAVIGDPSKLLGTNIYWGQGTQVTVSS

SEQ ID NO: 4626 - protein, 118 aa, Artificial Sequence
  Chemically Synthesized
QVQLQESGGGLVQAGGSLRLSCAASGYISDGLGMGWYRQAPGKEREFVASIGDGTNTYYADSVKGRFTISRDNAKNTVYLQMNSLKPEDTAVYYCAANYQYDEHHAYWGQGTQVTVSS

SEQ ID NO: 4627 - protein, 121 aa, Artificial Sequence
  Chemically Synthesized
QVQLQESGGGLVQAGGSLRLSCAASGTISYNTFMGWYRQAPGKEREFVATISTGSNTNYADSVKGRFTISRDNAKNTVYLQMNSLKPEDTAVYYCAVLLYERPYRTWFYYWGQGTQVTVSS

SEQ ID NO: 4628 - protein, 122 aa, Artificial Sequence
  Chemically Synthesized
QVQLQESGGGLVQAGGSLRLSCAASGYIFDTGNMGWYRQAPGKEREFVAAINTGGTTNYADSVKGRFTISRDNAKNTVYLQMNSLKPEDTAVYYCAALATSDGPQGRYLVYWGQGTQVTVSS

SEQ ID NO: 4629 - protein, 126 aa, Artificial Sequence
  Chemically Synthesized
QVQLQESGGGLVQAGGSLRLSCAASGSISDPYGMGWYRQAPGKEREFVAGINDGSITNYADSVKGRFTISRDNAKNTVYLQMNSLKPEDTAVYYCAAAYRSFTGEVYGGRYRLYYWGQGTQVTVSS

SEQ ID NO: 4630 - protein, 122 aa, Artificial Sequence
  Chemically Synthesized
QVQLQESGGGLVQAGGSLRLSCAASGTISYPTHMGWYRQAPGKERELVAAIGQGGTTYYADSVKGRFTISRDNAKNTVYLQMNSLKPEDTAVYYCAAHDNGDNTVFIVLVYWGQGTQVTVSS

SEQ ID NO: 4631 - protein, 126 aa, Artificial Sequence
  Chemically Synthesized
QVQLQESGGGLVQAGGSLRLSCAASGTISGVYLMGWYRQAPGKEREFVAAIGGGGITNYADSVKGRFTISRDNAKNTVYLQMNSLKPEDTAVYYCAVYTQLYKRDQTDLYKGLQYWGQGTQVTVSS

SEQ ID NO: 4632 - protein, 120 aa, Artificial Sequence
  Chemically Synthesized
QVQLQESGGGLVQAGGSLRLSCAASGYIFSVLSMGWYRQAPGKERELVAAIDLGTTTYYADSVKGRFTISRDNAKNTVYLQMNSLKPEDTAVYYCAADGHVVAWHSYYYWGQGTQVTVSS

SEQ ID NO: 4633 - protein, 118 aa, Artificial Sequence
  Chemically Synthesized
QVQLQESGGGLVQAGGSLRLSCAASGTIFEEFAMGWYRQAPGKEREFVAAIGVGANTNYADSVKGRFTISRDNAKNTVYLQMNSLKPEDTAVYYCAARPWYTLAYNYWGQGTQVTVSS

SEQ ID NO: 4634 - protein, 118 aa, Artificial Sequence
  Chemically Synthesized
QVQLQESGGGLVQAGGSLRLSCAASGNISYFPVMGWYRQAPGKERELVAGISTGGSTNYADSVKGRFTISRDNAKNTVYLQMNSLKPEDTAVYYCAAIRYEAVYYWYWGQGTQVTVSS

SEQ ID NO: 4635 - protein, 118 aa, Artificial Sequence
  Chemically Synthesized
QVQLQESGGGLVQAGGSLRLSCAASGTISLEAYMGWYRQAPGKERELVAAIAQGGNTNYADSVKGRFTISRDNAKNTVYLQMNSLKPEDTAVYYCAVGYYYLAVHWYWGQGTQVTVSS

SEQ ID NO: 4636 - protein, 117 aa, Artificial Sequence
  Chemically Synthesized
QVQLQESGGGLVQAGGSLRLSCAASGTISLARSMGWYRQAPGKERELVASINKGTNTNYADSVKGRFTISRDNAKNTVYLQMNSLKPEDTAVYYCAVAQYADYLGYWGQGTQVTVSS

SEQ ID NO: 4637 - protein, 118 aa, Artificial Sequence
  Chemically Synthesized
QVQLQESGGGLVQAGGSLRLSCAASGNIFRRYYMGWYRQAPGKEREFVAAIGYGATTNYADSVKGRFTISRDNAKNTVYLQMNSLKPEDTAVYYCAVVFTGAPYHYYWGQGTQVTVSS

SEQ ID NO: 4638 - protein, 118 aa, Artificial Sequence
  Chemically Synthesized
QVQLQESGGGLVQAGGSLRLSCAASGNISGIDKMGWYRQAPGKERELVAAIGVGGITNYADSVKGRFTISRDNAKNTVYLQMNSLKPEDTAVYYCAAEDIASAEYLYWGQGTQVTVSS

SEQ ID NO: 4639 - protein, 118 aa, Artificial Sequence
  Chemically Synthesized
QVQLQESGGGLVQAGGSLRLSCAASGSIFERNYMGWYRQAPGKEREFVAAITDGASTYYADSVKGRFTISRDNAKNTVYLQMNSLKPEDTAVYYCAVEPDEVVFLYYWGQGTQVTVSS

SEQ ID NO: 4640 - protein, 117 aa, Artificial Sequence
  Chemically Synthesized
QVQLQESGGGLVQAGGSLRLSCAASGIFGYFIMGWYRQAPGKEREFVAGIGFGANTNYADSVKGRFTISRDNAKNTVYLQMNSLKPEDTAVYYCAAYLYDYGDLRYWGQGTQVTVSS

SEQ ID NO: 4641 - protein, 122 aa, Artificial Sequence
  Chemically Synthesized
QVQLQESGGGLVQAGGSLRLSCAASGYIFLSPFMGWYRQAPGKEREFVASITAGSSTYYADSVKGRFTISRDNAKNTVYLQMNSLKPEDTAVYYCAAFLQSWIGDSLEHIYWGQGTQVTVSS

SEQ ID NO: 4642 - protein, 122 aa, Artificial Sequence
  Chemically Synthesized
QVQLQESGGGLVQAGGSLRLSCAASGTISYDLYMGWYRQAPGKEREFVAGIAGGATTYYADSVKGRFTISRDNAKNTVYLQMNSLKPEDTAVYYCAVIKVDTSYYAQGYAYWGQGTQVTVSS

SEQ ID NO: 4643 - protein, 124 aa, Artificial Sequence
  Chemically Synthesized
QVQLQESGGGLVQAGGSLRLSCAASGNILLVLMGWYRQAPGKERELVAIDYGGITNYADSVKGRFTISRDNAKNTVYLQMNSLKPEDTAVYYCAADSYALSDIDPDRIAEYIYWGQGTQVTVSS

SEQ ID NO: 4644 - protein, 125 aa, Artificial Sequence
  Chemically Synthesized
QVQLQESGGGLVQAGGSLRLSCAASGTISYYNQMGWYRQAPGKERELVAGIDDGGNTYYADSVKGRFTISRDNAKNTVYLQMNSLKPEDTAVYYCAVLLLYNGAGVSVVLLVFYWGQGTQVTVSS

SEQ ID NO: 4645 - protein, 118 aa, Artificial Sequence
  Chemically Synthesized
QVQLQESGGGLVQAGGSLRLSCAASGSISYSEDMGWYRQAPGKERELVAGINYGGTTYYADSVKGRFTISRDNAKNTVYLQMNSLKPEDTAVYYCAAVDQSYHNHTYWGQGTQVTVSS

SEQ ID NO: 4646 - protein, 118 aa, Artificial Sequence
  Chemically Synthesized
QVQLQESGGGLVQAGGSLRLSCAASGTISDGYYMGWYRQAPGKEREFVASIASGASTNYADSVKGRFTISRDNAKNTVYLQMNSLKPEDTAVYYCAAYSLLLRPYAYWGQGTQVTVSS

SEQ ID NO: 4647 - protein, 117 aa, Artificial Sequence
  Chemically Synthesized
QVQLQESGGGLVQAGGSLRLSCAASGNISLDSDMGWYRQAPGKERELVASIAAGASTNYADSVKGRFTISRDNAKNTVYLQMNSLKPEDTAVYYCAVQYSGRGAFYWGQGTQVTVSS

SEQ ID NO: 4648 - protein, 118 aa, Artificial Sequence
  Chemically Synthesized
QVQLQESGGGLVQAGGSLRLSCAASGNISYAIDMGWYRQAPGKERELVATINRGGSTYYADSVKGRFTISRDNAKNTVYLQMNSLKPEDTAVYYCAVDRTIIVDHYYWGQGTQVTVSS

SEQ ID NO: 4649 - protein, 121 aa, Artificial Sequence
  Chemically Synthesized
QVQLQESGGGLVQAGGSLRLSCAASGTISYPHTMGWYRQAPGKEREFVAAINDGGTTNYADSVKGRFTISRDNAKNTVYLQMNSLKPEDTAVYYCAVYSYLQDSSTLVMYWGQGTQVTVSS

SEQ ID NO: 4650 - protein, 121 aa, Artificial Sequence
  Chemically Synthesized
QVQLQESGGGLVQAGGSLRLSCAASGNISYTNGMGWYRQAPGKERELVAAIDGGSSTYYADSVKGRFTISRDNAKNTVYLQMNSLKPEDTAVYYCAVDDDSPGGLQYYLYWGQGTQVTVSS

SEQ ID NO: 4651 - protein, 126 aa, Artificial Sequence
  Chemically Synthesized
QVQLQESGGGLVQAGGSLRLSCAASGYISGSINMGWYRQAPGKEREFVAAITTGGITYYADSVKGRFTISRDNAKNTVYLQMNSLKPEDTAVYYCAVVDGYPDPLDQRSDLTLYYWGQGTQVTVSS

SEQ ID NO: 4652 - protein, 118 aa, Artificial Sequence
  Chemically Synthesized
QVQLQESGGGLVQAGGSLRLSCAASGYISLARYMGWYRQAPGKERELVAAITYGGTTYYADSVKGRFTISRDNAKNTVYLQMNSLKPEDTAVYYCAVWRVRWHRYTYWGQGTQVTVSS

SEQ ID NO: 4653 - protein, 122 aa, Artificial Sequence
  Chemically Synthesized
QVQLQESGGGLVQAGGSLRLSCAASGNISDAYDMGWYRQAPGKEREFVASIGAGGITYYADSVKGRFTISRDNAKNTVYLQMNSLKPEDTAVYYCAVTLRWDDIYYSAFDYWGQGTQVTVSS

SEQ ID NO: 4654 - protein, 122 aa, Artificial Sequence
  Chemically Synthesized
QVQLQESGGGLVQAGGSLRLSCAASGSISYGGAMGWYRQAPGKEREFVASIGPGGITNYADSVKGRFTISRDNAKNTVYLQMNSLKPEDTAVYYCAADGTIDAYSYFVHGYWGQGTQVTVSS

SEQ ID NO: 4655 - protein, 118 aa, Artificial Sequence
  Chemically Synthesized
QVQLQESGGGLVQAGGSLRLSCAASGTISHYTLMGWYRQAPGKERELVASIASGGTTYYADSVKGRFTISRDNAKNTVYLQMNSLKPEDTAVYYCAVQTDRVPAFNYWGQGTQVTVSS

SEQ ID NO: 4656 - protein, 118 aa, Artificial Sequence
  Chemically Synthesized
QVQLQESGGGLVQAGGSLRLSCAASGYIFWAIEMGWYRQAPGKEREFVAAISDGTTTYYADSVKGRFTISRDNAKNTVYLQMNSLKPEDTAVYYCAAHWPDEYTFQYWGQGTQVTVSS

SEQ ID NO: 4657 - protein, 118 aa, Artificial Sequence
  Chemically Synthesized
QVQLQESGGGLVQAGGSLRLSCAASGYISAYTGMGWYRQAPGKERELVAGIAKGAITYYADSVKGRFTISRDNAKNTVYLQMNSLKPEDTAVYYCAAPWYDHYALGYWGQGTQVTVSS

SEQ ID NO: 4658 - protein, 121 aa, Artificial Sequence
  Chemically Synthesized
QVQLQESGGGLVQAGGSLRLSCAASGNISPYGDMGWYRQAPGKERELVAVLVTVLLPYADSVKGRFTISRDNAKNTVYLQMNSLKPEDTAVYYCAAVDTYIYDTDIRHGYWGQGTQVTVSS

SEQ ID NO: 4659 - protein, 118 aa, Artificial Sequence
  Chemically Synthesized
QVQLQESGGGLVQAGGSLRLSCAASGTIFPRVAMGWYRQAPGKEREFVAGIARGGNTYYADSVKGRFTISRDNAKNTVYLQMNSLKPEDTAVYYCAVQGDYDSAHDYWGQGTQVTVSS

SEQ ID NO: 4660 - protein, 118 aa, Artificial Sequence
  Chemically Synthesized
QVQLQESGGGLVQAGGSLRLSCAASGYISTTHFMGWYRQAPGKEREFVASIGVGGITYYADSVKGRFTISRDNAKNTVYLQMNSLKPEDTAVYYCAADRDADVSHFYWGQGTQVTVSS

SEQ ID NO: 4661 - protein, 119 aa, Artificial Sequence
  Chemically Synthesized
QVQLQESGGGLVQAGGSLRLSCAASGNISYVWKMGWYRQAPGKERELVATITIGANTYYADSVKGRFTISRDNAKNTVYLQMNSLKPEDTAVYYCAASTYPLRDQLEYWGQGTQVTVSS

SEQ ID NO: 4662 - protein, 118 aa, Artificial Sequence
  Chemically Synthesized
QVQLQESGGGLVQAGGSLRLSCAASGNISGPLRMGWYRQAPGKEREFVAGISDGGITNYADSVKGRFTISRDNAKNTVYLQMNSLKPEDTAVYYCAAQIRWRYAFPYWGQGTQVTVSS

SEQ ID NO: 4663 - protein, 121 aa, Artificial Sequence
  Chemically Synthesized
QVQLQESGGGLVQAGGSLRLSCAASGNIFGLVMGWYRQAPGKEREFVATIDDGTTTNYADSVKGRFTISRDNAKNTVYLQMNSLKPEDTAVYYCAAWADGEGADYADYDYWGQGTQVTVSS

SEQ ID NO: 4664 - protein, 122 aa, Artificial Sequence
  Chemically Synthesized
QVQLQESGGGLVQAGGSLRLSCAASGNISQAYTMGWYRQAPGKERELVAAIDYGATTYYADSVKGRFTISRDNAKNTVYLQMNSLKPEDTAVYYCAVVLSWRYGDTGSYGYWGQGTQVTVSS

SEQ ID NO: 4665 - protein, 116 aa, Artificial Sequence
  Chemically Synthesized
QVQLQESGGGLVQAGGSLRLSCAASGTISGSYLMGWYRQAPGKEREFVATISAGASTNYADSVKGRFTISRDNAKNTVYLQMNSLKPEDTAVYYCAVVSYDEHHYWGQGTQVTVSS

SEQ ID NO: 4666 - protein, 122 aa, Artificial Sequence
  Chemically Synthesized
QVQLQESGGGLVQAGGSLRLSCAASGNIFPIDIMGWYRQAPGKERELVAAITVGTITNYADSVKGRFTISRDNAKNTVYLQMNSLKPEDTAVYYCAVGHHTGDETDVYHEYWGQGTQVTVSS

SEQ ID NO: 4667 - protein, 121 aa, Artificial Sequence
  Chemically Synthesized
QVQLQESGGGLVQAGGSLRLSCAASGTISWYDSMGWYRQAPGKERELVASIAPGSTNYADSVKGRFTISRDNAKNTVYLQMNSLKPEDTAVYYCAAGRRVFYLRDGPYTYWGQGTQVTVSS

SEQ ID NO: 4668 - protein, 122 aa, Artificial Sequence
  Chemically Synthesized
QVQLQESGGGLVQAGGSLRLSCAASGSIFERASMGWYRQAPGKERELVATIDKGGITNYADSVKGRFTISRDNAKNTVYLQMNSLKPEDTAVYYCAANAGEDGPIVLQHPYWGQGTQVTVSS

SEQ ID NO: 4669 - protein, 122 aa, Artificial Sequence
  Chemically Synthesized
QVQLQESGGGLVQAGGSLRLSCAASGTIFLDTDMGWYRQAPGKERELVAGINDGASTYYADSVKGRFTISRDNAKNTVYLQMNSLKPEDTAVYYCAARDNATVRSDREYPYWGQGTQVTVSS

SEQ ID NO: 4670 - protein, 117 aa, Artificial Sequence
  Chemically Synthesized
QVQLQESGGGLVQAGGSLRLSCAASGNISWAYIMGWYRQAPGKERELVAGINQGGSTYYADSVKGRFTISRDNAKNTVYLQMNSLKPEDTAVYYCAVDESRLTTFYWGQGTQVTVSS

SEQ ID NO: 4671 - protein, 125 aa, Artificial Sequence
  Chemically Synthesized
QVQLQESGGGLVQAGGSLRLSCAASGNISPYRRMGWYRQAPGKERELVALLIWVVVPYADSVKGRFTISRDNAKNTVYLQMNSLKPEDTAVYYCAVEYLPYPHGVYDNRRPLHYWGQGTQVTVSS

SEQ ID NO: 4672 - protein, 118 aa, Artificial Sequence
  Chemically Synthesized
QVQLQESGGGLVQAGGSLRLSCAASGYIFWRPNMGWYRQAPGKEREFVATINWGTTTYYADSVKGRFTISRDNAKNTVYLQMNSLKPEDTAVYYCAVYKGRRLYLDYWGQGTQVTVSS

SEQ ID NO: 4673 - protein, 122 aa, Artificial Sequence
  Chemically Synthesized
QVQLQESGGGLVQAGGSLRLSCAASGTISVYTYMGWYRQAPGKERELVATIDDGTTTYYADSVKGRFTISRDNAKNTVYLQMNSLKPEDTAVYYCAVALFTSRVQYYVHGYWGQGTQVTVSS

SEQ ID NO: 4674 - protein, 126 aa, Artificial Sequence
  Chemically Synthesized
QVQLQESGGGLVQAGGSLRLSCAASGTISSDPYMGWYRQAPGKEREFVAAIGYGTNTYYADSVKGRFTISRDNAKNTVYLQMNSLKPEDTAVYYCAVAWYKDQLQFVWTASYHQYWGQGTQVTVSS

SEQ ID NO: 4675 - protein, 112 aa, Artificial Sequence
  Chemically Synthesized
QVQLQESGGGLVQAGGSLRLSCAASGNISPAGVYMGWYRQAPGKERELVASITFGTNTYYADSVKGRFTISRDNAKNTVYLQMNSLKPEDTAVYYCANGIYWGQGTQVTVSS

SEQ ID NO: 4676 - protein, 118 aa, Artificial Sequence
  Chemically Synthesized
QVQLQESGGGLVQAGGSLRLSCAASGYISRNQYMGWYRQAPGKERELVAGIDYGGNTYYADSVKGRFTISRDNAKNTVYLQMNSLKPEDTAVYYCAARTTTALFFPYWGQGTQVTVSS

SEQ ID NO: 4677 - protein, 126 aa, Artificial Sequence
  Chemically Synthesized
QVQLQESGGGLVQAGGSLRLSCAASGTIFPYYLMGWYRQAPGKERELVAGIALGTSTNYADSVKGRFTISRDNAKNTVYLQMNSLKPEDTAVYYCAAYYRSDYYHDNTVGFWHIYWGQGTQVTVSS

SEQ ID NO: 4678 - protein, 118 aa, Artificial Sequence
  Chemically Synthesized
QVQLQESGGGLVQAGGSLRLSCAASGTISYQGGMGWYRQAPGKERELVAGISYGTTTYYADSVKGRFTISRDNAKNTVYLQMNSLKPEDTAVYYCAAVYYPYGAYWYWGQGTQVTVSS

SEQ ID NO: 4679 - protein, 122 aa, Artificial Sequence
  Chemically Synthesized
QVQLQESGGGLVQAGGSLRLSCAASGSIFTLTYMGWYRQAPGKERELVAAIGEGSNTYYADSVKGRFTISRDNAKNTVYLQMNSLKPEDTAVYYCAAPYVDYYGVPIVLNYWGQGTQVTVSS

SEQ ID NO: 4680 - protein, 118 aa, Artificial Sequence
  Chemically Synthesized
QVQLQESGGGLVQAGGSLRLSCAASGYISFAAYMGWYRQAPGKEREFVAGISAGGNTNYADSVKGRFTISRDNAKNTVYLQMNSLKPEDTAVYYCAVPSSVDPDHVYWGQGTQVTVSS

SEQ ID NO: 4681 - protein, 118 aa, Artificial Sequence
  Chemically Synthesized
QVQLQESGGGLVQAGGSLRLSCAASGNISWRSQMGWYRQAPGKEREFVAAISPGASTYYADSVKGRFTISRDNAKNTVYLQMNSLKPEDTAVYYCAAYRAWRYRYGYWGQGTQVTVSS

SEQ ID NO: 4682 - protein, 118 aa, Artificial Sequence
  Chemically Synthesized
QVQLQESGGGLVQAGGSLRLSCAASGTIFTVGIMGWYRQAPGKEREFVAGIGGGGTTNYADSVKGRFTISRDNAKNTVYLQMNSLKPEDTAVYYCAVFQSNGGLHGYWGQGTQVTVSS

SEQ ID NO: 4683 - protein, 122 aa, Artificial Sequence
  Chemically Synthesized
QVQLQESGGGLVQAGGSLRLSCAASGTISADWNMGWYRQAPGKEREFVAGINGGSSTNYADSVKGRFTISRDNAKNTVYLQMNSLKPEDTAVYYCAVNVKTFGYYSPYHDYWGQGTQVTVSS

SEQ ID NO: 4684 - protein, 118 aa, Artificial Sequence
  Chemically Synthesized
QVQLQESGGGLVQAGGSLRLSCAASGSISWPDGMGWYRQAPGKERELVATIATGTTTYYADSVKGRFTISRDNAKNTVYLQMNSLKPEDTAVYYCAVPARGRGPHGYWGQGTQVTVSS

SEQ ID NO: 4685 - protein, 122 aa, Artificial Sequence
  Chemically Synthesized
QVQLQESGGGLVQAGGSLRLSCAASGNISTGVAMGWYRQAPGKEREFVATIAFGGITNYADSVKGRFTISRDNAKNTVYLQMNSLKPEDTAVYYCAARDQGDPYERDNYLYWGQGTQVTVSS

SEQ ID NO: 4686 - protein, 118 aa, Artificial Sequence
  Chemically Synthesized
QVQLQESGGGLVQAGGSLRLSCAASGTIFHQAQMGWYRQAPGKERELVAAIGDGASTYYADSVKGRFTISRDNAKNTVYLQMNSLKPEDTAVYYCAVPLYDTPYYFYWGQGTQVTVSS

SEQ ID NO: 4687 - protein, 122 aa, Artificial Sequence
  Chemically Synthesized
QVQLQESGGGLVQAGGSLRLSCAASGNISEQVWMGWYRQAPGKEREFVAAISYGSNTYYADSVKGRFTISRDNAKNTVYLQMNSLKPEDTAVYYCAVDGRYGGEYYSPLGYWGQGTQVTVSS

SEQ ID NO: 4688 - protein, 126 aa, Artificial Sequence
  Chemically Synthesized
QVQLQESGGGLVQAGGSLRLSCAASGTISANTVMGWYRQAPGKEREFVAAINFGSTTYYADSVKGRFTISRDNAKNTVYLQMNSLKPEDTAVYYCAVDRGPLYRYYRWDDDRYGYWGQGTQVTVSS

SEQ ID NO: 4689 - protein, 122 aa, Artificial Sequence
  Chemically Synthesized
QVQLQESGGGLVQAGGSLRLSCAASGTIFQRYVMGWYRQAPGKERELVASIGSGATTNYADSVKGRFTISRDNAKNTVYLQMNSLKPEDTAVYYCAASALDTVDGRTGHLYWGQGTQVTVSS

SEQ ID NO: 4690 - protein, 118 aa, Artificial Sequence
  Chemically Synthesized
QVQLQESGGGLVQAGGSLRLSCAASGTISGIVWMGWYRQAPGKEREFVASISEGAITNYADSVKGRFTISRDNAKNTVYLQMNSLKPEDTAVYYCAVYRYGGIYHPYWGQGTQVTVSS

SEQ ID NO: 4691 - protein, 121 aa, Artificial Sequence
  Chemically Synthesized
QVQLQESGGGLVQAGGSLRLSCAASGNISSYYAMGWYRQAPGKEREFVAAIDTGTSTYYADSVKGRFTISRDNAKNTVYLQMNSLKPEDTAVYYCAAGLIDSTKTRLTLYWGQGTQVTVSS

SEQ ID NO: 4692 - protein, 122 aa, Artificial Sequence
  Chemically Synthesized
QVQLQESGGGLVQAGGSLRLSCAASGYISSRYGMGWYRQAPGKEREFVATIGRGGSTNYADSVKGRFTISRDNAKNTVYLQMNSLKPEDTAVYYCAVRGDTWRYAYDLYRYWGQGTQVTVSS

SEQ ID NO: 4693 - protein, 121 aa, Artificial Sequence
  Chemically Synthesized
QVQLQESGGGLVQAGGSLRLSCAASGYISYPYTMGWYRQAPGKEREFVATINSVLIPYADSVKGRFTISRDNAKNTVYLQMNSLKPEDTAVYYCAVFWGYADLGRDVLGYWGQGTQVTVSS

SEQ ID NO: 4694 - protein, 118 aa, Artificial Sequence
  Chemically Synthesized
QVQLQESGGGLVQAGGSLRLSCAASGNISDRDYMGWYRQAPGKEREFVAGIDFGANTNYADSVKGRFTISRDNAKNTVYLQMNSLKPEDTAVYYCAANSYYVGEHFYWGQGTQVTVSS

SEQ ID NO: 4695 - protein, 127 aa, Artificial Sequence
  Chemically Synthesized
QVQLQESGGGLVQAGGSLRLSCAASGNISDVDSMGWYRQAPGKEREFVASISRGTSTNYADSVKGRFTISRDNAKNTVYLQMNSLKPEDTAVYYCAVDITYVDILGSQGRDGDFWYWGQGTQVTVSS

SEQ ID NO: 4696 - protein, 125 aa, Artificial Sequence
  Chemically Synthesized
QVQLQESGGGLVQAGGSLRLSCAASGTIFRQAYMGWYRQAPGKERELVAAISYGTTTNYADSVKGRFTISRDNAKNTVYLQMNSLKPEDTAVYYCAVEDGLEPYKQDRGAGYVYWGQGTQVTVSS

SEQ ID NO: 4697 - protein, 118 aa, Artificial Sequence
  Chemically Synthesized
QVQLQESGGGLVQAGGSLRLSCAASGSIFSRYTMGWYRQAPGKERELVAGINYGGTTNYADSVKGRFTISRDNAKNTVYLQMNSLKPEDTAVYYCAVTFDALDVHAYWGQGTQVTVSS

SEQ ID NO: 4698 - protein, 118 aa, Artificial Sequence
  Chemically Synthesized
QVQLQESGGGLVQAGGSLRLSCAASGNISSASLMGWYRQAPGKEREFVATITVGGSTNYADSVKGRFTISRDNAKNTVYLQMNSLKPEDTAVYYCAADQAQSSLLSYWGQGTQVTVSS

SEQ ID NO: 4699 - protein, 118 aa, Artificial Sequence
  Chemically Synthesized
QVQLQESGGGLVQAGGSLRLSCAASGTISLADDMGWYRQAPGKERELVASINDGSNTNYADSVKGRFTISRDNAKNTVYLQMNSLKPEDTAVYYCAVYYYVYQNFPYWGQGTQVTVSS

SEQ ID NO: 4700 - protein, 118 aa, Artificial Sequence
  Chemically Synthesized
QVQLQESGGGLVQAGGSLRLSCAASGTISTYYYMGWYRQAPGKEREFVAAIGIGTTTNYADSVKGRFTISRDNAKNTVYLQMNSLKPEDTAVYYCAALTLDDAYFYYWGQGTQVTVSS

SEQ ID NO: 4701 - protein, 121 aa, Artificial Sequence
  Chemically Synthesized
QVQLQESGGGLVQAGGSLRLSCAASGNISFPSYMGWYRQAPGKEREFVASIGTGTRPYADSVKGRFTISRDNAKNTVYLQMNSLKPEDTAVYYCAVVYHSSSNYGPRHYYWGQGTQVTVSS

SEQ ID NO: 4702 - protein, 118 aa, Artificial Sequence
  Chemically Synthesized
QVQLQESGGGLVQAGGSLRLSCAASGSISYAFSMGWYRQAPGKEREFVASIDSGASTNYADSVKGRFTISRDNAKNTVYLQMNSLKPEDTAVYYCAVLDSYAYNFPYWGQGTQVTVSS

SEQ ID NO: 4703 - protein, 118 aa, Artificial Sequence
  Chemically Synthesized
QVQLQESGGGLVQAGGSLRLSCAASGSISLSHFMGWYRQAPGKERELVAGIDTGATTYYADSVKGRFTISRDNAKNTVYLQMNSLKPEDTAVYYCAAVTVDYPALYYWGQGTQVTVSS

SEQ ID NO: 4704 - protein, 122 aa, Artificial Sequence
  Chemically Synthesized
QVQLQESGGGLVQAGGSLRLSCAASGNISYEYGMGWYRQAPGKEREFVAAINGGSSTNYADSVKGRFTISRDNAKNTVYLQMNSLKPEDTAVYYCAAHPVITTYLRRAYYYWGQGTQVTVSS

SEQ ID NO: 4705 - protein, 118 aa, Artificial Sequence
  Chemically Synthesized
QVQLQESGGGLVQAGGSLRLSCAASGTIFTYLYMGWYRQAPGKERELVASIAYGGTTYYADSVKGRFTISRDNAKNTVYLQMNSLKPEDTAVYYCAAGPFATGWHTYWGQGTQVTVSS

SEQ ID NO: 4706 - protein, 117 aa, Artificial Sequence
  Chemically Synthesized
QVQLQESGGGLVQAGGSLRLSCAASGNIFPLRMGWYRQAPGKEREFVATITGGSSTNYADSVKGRFTISRDNAKNTVYLQMNSLKPEDTAVYYCAVGLGDGPILLYWGQGTQVTVSS

SEQ ID NO: 4707 - protein, 117 aa, Artificial Sequence
  Chemically Synthesized
QVQLQESGGGLVQAGGSLRLSCAASGTIFTTVVMGWYRQAPGKERELVAAIGWGTTYYADSVKGRFTISRDNAKNTVYLQMNSLKPEDTAVYYCAVPKHVSADLDYWGQGTQVTVSS

SEQ ID NO: 4708 - protein, 122 aa, Artificial Sequence
  Chemically Synthesized
QVQLQESGGGLVQAGGSLRLSCAASGTISTETSMGWYRQAPGKERELVAAITTGGTTNYADSVKGRFTISRDNAKNTVYLQMNSLKPEDTAVYYCAAPPGYSTRLAADLWYWGQGTQVTVSS

SEQ ID NO: 4709 - protein, 126 aa, Artificial Sequence
  Chemically Synthesized
QVQLQESGGGLVQAGGSLRLSCAASGTISINSYMGWYRQAPGKEREFVATINTGGSTNYADSVKGRFTISRDNAKNTVYLQMNSLKPEDTAVYYCAAVDETADSANRTDDYTLWYWGQGTQVTVSS

SEQ ID NO: 4710 - protein, 126 aa, Artificial Sequence
  Chemically Synthesized
QVQLQESGGGLVQAGGSLRLSCAASGTIFSWFPMGWYRQAPGKERELVASIDDGGTTYYADSVKGRFTISRDNAKNTVYLQMNSLKPEDTAVYYCAATYWYSFVYLARLRGFHEYWGQGTQVTVSS

SEQ ID NO: 4711 - protein, 123 aa, Artificial Sequence
  Chemically Synthesized
QVQLQESGGGLVQAGGSLRLSCAASGNISLARVYMGWYRQAPGKEREFVASINDGSNTYYADSVKGRFTISRDNAKNTVYLQMNSLKPEDTAVYYCAAEYYYWNEVYPYLWYWGQGTQVTVSS

SEQ ID NO: 4712 - protein, 116 aa, Artificial Sequence
  Chemically Synthesized
QVQLQESGGGLVQAGGSLRLSCAASGSIFQTGYMGWYRQAPGKERELVAAISGGAYYADSVKGRFTISRDNAKNTVYLQMNSLKPEDTAVYYCAVGYADAYQYDYWGQGTQVTVSS

SEQ ID NO: 4713 - protein, 122 aa, Artificial Sequence
  Chemically Synthesized
QVQLQESGGGLVQAGGSLRLSCAASGNISLYGYMGWYRQAPGKEREFVAGISYGANTYYADSVKGRFTISRDNAKNTVYLQMNSLKPEDTAVYYCAVAEDGRTYYYLLPSYWGQGTQVTVSS

SEQ ID NO: 4714 - protein, 118 aa, Artificial Sequence
  Chemically Synthesized
QVQLQESGGGLVQAGGSLRLSCAASGTIFRNGGMGWYRQAPGKERELVAAIAGGTNTYYADSVKGRFTISRDNAKNTVYLQMNSLKPEDTAVYYCAAYSAGYRYYSYWGQGTQVTVSS

SEQ ID NO: 4715 - protein, 126 aa, Artificial Sequence
  Chemically Synthesized
QVQLQESGGGLVQAGGSLRLSCAASGSIFSSQVMGWYRQAPGKEREFVAAISYGAITYYADSVKGRFTISRDNAKNTVYLQMNSLKPEDTAVYYCAAVYQWYWFRRDQYYGNLDYWGQGTQVTVSS

SEQ ID NO: 4716 - protein, 121 aa, Artificial Sequence
  Chemically Synthesized
QVQLQESGGGLVQAGGSLRLSCAASGYISEDTYMGWYRQAPGKEREFVASINDGGNTNYADSVKGRFTISRDNAKNTVYLQMNSLKPEDTAVYYCALTWVTLVTTNTRFYWGQGTQVTVSS

SEQ ID NO: 4717 - protein, 117 aa, Artificial Sequence
  Chemically Synthesized
QVQLQESGGGLVQAGGSLRLSCAASGSILVVLMGWYRQAPGKEREFVAGITTGAITNYADSVKGRFTISRDNAKNTVYLQMNSLKPEDTAVYYCAVGYTDDIHYYYWGQGTQVTVSS

SEQ ID NO: 4718 - protein, 118 aa, Artificial Sequence
  Chemically Synthesized
QVQLQESGGGLVQAGGSLRLSCAASGNIFYNYAMGWYRQAPGKERELVAAITYGGSTYYADSVKGRFTISRDNAKNTVYLQMNSLKPEDTAVYYCAAKLAKRYSFYYWGQGTQVTVSS

SEQ ID NO: 4719 - protein, 117 aa, Artificial Sequence
  Chemically Synthesized
QVQLQESGGGLVQAGGSLRLSCAASGTIFRSTMGWYRQAPGKERELVASITYGASTNYADSVKGRFTISRDNAKNTVYLQMNSLKPEDTAVYYCAVPPDISNDHAYWGQGTQVTVSS

SEQ ID NO: 4720 - protein, 118 aa, Artificial Sequence
  Chemically Synthesized
QVQLQESGGGLVQAGGSLRLSCAASGTIFDSTYMGWYRQAPGKERELVAAIDHGGITYYADSVKGRFTISRDNAKNTVYLQMNSLKPEDTAVYYCAANGYDDPSHAYWGQGTQVTVSS

SEQ ID NO: 4721 - protein, 121 aa, Artificial Sequence
  Chemically Synthesized
QVQLQESGGGLVQAGGSLRLSCAASGTIFYYPTMGWYRQAPGKEREFVATINQGTSTNYADSVKGRFTISRDNAKNTVYLQMNSLKPEDTAVYYCAVLSSGGARYGAYLYWGQGTQVTVSS

SEQ ID NO: 4722 - protein, 126 aa, Artificial Sequence
  Chemically Synthesized
QVQLQESGGGLVQAGGSLRLSCAASGYISHFYIMGWYRQAPGKERELVAAITPGANTNYADSVKGRFTISRDNAKNTVYLQMNSLKPEDTAVYYCAVYIGLPYYPLYDPDLSHVYWGQGTQVTVSS

SEQ ID NO: 4723 - protein, 121 aa, Artificial Sequence
  Chemically Synthesized
QVQLQESGGGLVQAGGSLRLSCAASGSISSPETMGWYRQAPGKEREFVAGIGAGTNTYYADSVKGRFTISRDNAKNTVYLQMNSLKPEDTAVYYCAVYDPIVDGDWSTIYWGQGTQVTVSS

SEQ ID NO: 4724 - protein, 118 aa, Artificial Sequence
  Chemically Synthesized
QVQLQESGGGLVQAGGSLRLSCAASGYISTRDSMGWYRQAPGKEREFVASIGWGASTNYADSVKGRFTISRDNAKNTVYLQMNSLKPEDTAVYYCAADRDAVDDHRYWGQGTQVTVSS

SEQ ID NO: 4725 - protein, 121 aa, Artificial Sequence
  Chemically Synthesized
QVQLQESGGGLVQAGGSLRLSCAASGNISHLRYMGWYRQAPGKERELVASIGYGGSTNYADSVKGRFTISRDNAKNTVYLQMNSLKPEDTAVYYCAVDYVTSMTRTILFYWGQGTQVTVSS

SEQ ID NO: 4726 - protein, 121 aa, Artificial Sequence
  Chemically Synthesized
QVQLQESGGGLVQAGGSLRLSCAASGNISPTSEMGWYRQAPGKEREFVAGIGVGAITYYADSVKGRFTISRDNAKNTVYLQMNSLKPEDTAVYYCAVRPVLDRRGATTFYWGQGTQVTVSS

SEQ ID NO: 4727 - protein, 122 aa, Artificial Sequence
  Chemically Synthesized
QVQLQESGGGLVQAGGSLRLSCAASGSISWTLVMGWYRQAPGKEREFVATIGEGSTTNYADSVKGRFTISRDNAKNTVYLQMNSLKPEDTAVYYCAAEEDPDDTDETTYDYWGQGTQVTVSS

SEQ ID NO: 4728 - protein, 121 aa, Artificial Sequence
  Chemically Synthesized
QVQLQESGGGLVQAGGSLRLSCAASGTIFTRDGMGWYRQAPGKEREFVAGIGGGATNYADSVKGRFTISRDNAKNTVYLQMNSLKPEDTAVYYCAVGAQEAKDYYGDHRYWGQGTQVTVSS

SEQ ID NO: 4729 - protein, 117 aa, Artificial Sequence
  Chemically Synthesized
QVQLQESGGGLVQAGGSLRLSCAASGSIFQYDMGWYRQAPGKEREFVASIGSGTNTNYADSVKGRFTISRDNAKNTVYLQMNSLKPEDTAVYYCAVYRYLVHDFVYWGQGTQVTVSS

SEQ ID NO: 4730 - protein, 116 aa, Artificial Sequence
  Chemically Synthesized
QVQLQESGGGLVQAGGSLRLSCAASGYISWRASMGWYRQAPGKEREFVAAITHGTITYYADSVKGRFTISRDNAKNTVYLQMNSLKPEDTAVYYCAVEGRYIHFYWGQGTQVTVSS

SEQ ID NO: 4731 - protein, 118 aa, Artificial Sequence
  Chemically Synthesized
QVQLQESGGGLVQAGGSLRLSCAASGTIFTYYYMGWYRQAPGKEREFVAGIDAGGSTNYADSVKGRFTISRDNAKNTVYLQMNSLKPEDTAVYYCAAVGIGSYPLYYWGQGTQVTVSS

SEQ ID NO: 4732 - protein, 126 aa, Artificial Sequence
  Chemically Synthesized
QVQLQESGGGLVQAGGSLRLSCAASGNISDQFSMGWYRQAPGKEREFVAGIDGGANTYYADSVKGRFTISRDNAKNTVYLQMNSLKPEDTAVYYCAVYSLYRSGLFTNGVAAYTYWGQGTQVTVSS

SEQ ID NO: 4733 - protein, 115 aa, Artificial Sequence
  Chemically Synthesized
QVQLQESGGGLVQAGGSLRLSCAASGNISSIVYMGWYRQAPGKEREFVATIAGGTTYYADSVKGRFTISRDNAKNTVYLQMNSLKPEDTAVYYCAARYTLHSDYWGQGTQVTVSS

SEQ ID NO: 4734 - protein, 118 aa, Artificial Sequence
  Chemically Synthesized
QVQLQESGGGLVQAGGSLRLSCAASGNIFLRRYMGWYRQAPGKEREFVAGIDYGANTNYADSVKGRFTISRDNAKNTVYLQMNSLKPEDTAVYYCAVGGYWYGSYFYWGQGTQVTVSS

SEQ ID NO: 4735 - protein, 118 aa, Artificial Sequence
  Chemically Synthesized
QVQLQESGGGLVQAGGSLRLSCAASGNISAVVDMGWYRQAPGKERELVATIARGANTNYADSVKGRFTISRDNAKNTVYLQMNSLKPEDTAVYYCAAKEDTDTGHYYWGQGTQVTVSS

SEQ ID NO: 4736 - protein, 122 aa, Artificial Sequence
  Chemically Synthesized
QVQLQESGGGLVQAGGSLRLSCAASGSIFDLIYMGWYRQAPGKERELVAGIGTGGTTYYADSVKGRFTISRDNAKNTVYLQMNSLKPEDTAVYYCAVPYRHQDTLDNYLPYWGQGTQVTVSS

SEQ ID NO: 4737 - protein, 118 aa, Artificial Sequence
  Chemically Synthesized
QVQLQESGGGLVQAGGSLRLSCAASGYISGRQYMGWYRQAPGKERELVASITLGGTTNYADSVKGRFTISRDNAKNTVYLQMNSLKPEDTAVYYCAVYSTDDSWFYYWGQGTQVTVSS

SEQ ID NO: 4738 - protein, 117 aa, Artificial Sequence
  Chemically Synthesized
QVQLQESGGGLVQAGGSLRLSCAASGTIFFNYNMGWYRQAPGKEREFVAGINSVVLPYADSVKGRFTISRDNAKNTVYLQMNSLKPEDTAVYYCAAYYAKDTSLYYWGQGTQVTVSS

SEQ ID NO: 4739 - protein, 117 aa, Artificial Sequence
  Chemically Synthesized
QVQLQESGGGLVQAGGSLRLSCAASGYIFPFAMGWYRQAPGKEREFVATITVGAITYYADSVKGRFTISRDNAKNTVYLQMNSLKPEDTAVYYCAVWYLFNLVHSYWGQGTQVTVSS

SEQ ID NO: 4740 - protein, 122 aa, Artificial Sequence
  Chemically Synthesized
QVQLQESGGGLVQAGGSLRLSCAASGTIFYAYTMGWYRQAPGKEREFVATIAIGATTYYADSVKGRFTISRDNAKNTVYLQMNSLKPEDTAVYYCAVTYPDGYDGVGIYQYWGQGTQVTVSS

SEQ ID NO: 4741 - protein, 122 aa, Artificial Sequence
  Chemically Synthesized
QVQLQESGGGLVQAGGSLRLSCAASGNISYVYFMGWYRQAPGKEREFVATITAGSNTYYADSVKGRFTISRDNAKNTVYLQMNSLKPEDTAVYYCAANSRSSGDYWYTLDYWGQGTQVTVSS

SEQ ID NO: 4742 - protein, 115 aa, Artificial Sequence
  Chemically Synthesized
QVQLQESGGGLVQAGGSLRLSCAASGTISLTNYMGWYRQAPGKEREFVATIGYGYQYADSVKGRFTISRDNAKNTVYLQMNSLKPEDTAVYYCAVSTVLVVGMYWGQGTQVTVSS

SEQ ID NO: 4743 - protein, 117 aa, Artificial Sequence
  Chemically Synthesized
QVQLQESGGGLVQAGGSLRLSCAASGYISRYYSMGWYRQAPGKEREFVASIAYGATTYYADSVKGRFTISRDNAKNTVYLQMNSLKPEDTAVYYCAVPARYHYHYYWGQGTQVTVSS

SEQ ID NO: 4744 - protein, 117 aa, Artificial Sequence
  Chemically Synthesized
QVQLQESGGGLVQAGGSLRLSCAASGYISYGDGMGWYRQAPGKEREFVATIASVVLPYADSVKGRFTISRDNAKNTVYLQMNSLKPEDTAVYYCAAYHDVQDKHDYWGQGTQVTVSS

SEQ ID NO: 4745 - protein, 118 aa, Artificial Sequence
  Chemically Synthesized
QVQLQESGGGLVQAGGSLRLSCAASGYIFRRYNMGWYRQAPGKEREFVASISFGSTTYYADSVKGRFTISRDNAKNTVYLQMNSLKPEDTAVYYCAAARQKTYYHYYWGQGTQVTVSS

SEQ ID NO: 4746 - protein, 117 aa, Artificial Sequence
  Chemically Synthesized
QVQLQESGGGLVQAGGSLRLSCAASGNISQGTYMGWYRQAPGKERELVAAIDRGGTTYYADSVKGRFTISRDNAKNTVYLQMNSLKPEDTAVYYCAADTDQSSDMYWGQGTQVTVSS

SEQ ID NO: 4747 - protein, 119 aa, Artificial Sequence
  Chemically Synthesized
QVQLQESGGGLVQAGGSLRLSCAASGTIFDRYGMGWYRQAPGKERELVATINRGSITNYADSVKGRFTISRDNAKNTVYLQMNSLKPEDTAVYYCAAWYQYSDYYHYYWGQGTQVTVSS

SEQ ID NO: 4748 - protein, 116 aa, Artificial Sequence
  Chemically Synthesized
QVQLQESGGGLVQAGGSLRLSCAASGNMGWYRQAPGKEREFVASINIGGSTNYADSVKGRFTISRDNAKNTVYLQMNSLKPEDTAVYYCAVNYFIDVLGRAHYDYWGQGTQVTVSS

SEQ ID NO: 4749 - protein, 121 aa, Artificial Sequence
  Chemically Synthesized
QVQLQESGGGLVQAGGSLRLSCAASGTIFVTSMGWYRQAPGKERELVASIAYGSITNYADSVKGRFTISRDNAKNTVYLQMNSLKPEDTAVYYCAVDGTVWYRQYHDHYYWGQGTQVTVSS

SEQ ID NO: 4750 - protein, 122 aa, Artificial Sequence
  Chemically Synthesized
QVQLQESGGGLVQAGGSLRLSCAASGTISNGIYMGWYRQAPGKEREFVASIGDGANTYYADSVKGRFTISRDNAKNTVYLQMNSLKPEDTAVYYCAVGDGDGRQGGPIHDYWGQGTQVTVSS

SEQ ID NO: 4751 - protein, 126 aa, Artificial Sequence
  Chemically Synthesized
QVQLQESGGGLVQAGGSLRLSCAASGTIFGGGKMGWYRQAPGKEREFVAGITAGSNTNYADSVKGRFTISRDNAKNTVYLQMNSLKPEDTAVYYCAVLGRSSLQDGVYGHYHYYYWGQGTQVTVSS

SEQ ID NO: 4752 - protein, 126 aa, Artificial Sequence
  Chemically Synthesized
QVQLQESGGGLVQAGGSLRLSCAASGNIFPDASMGWYRQAPGKERELVASIGDGGITYYADSVKGRFTISRDNAKNTVYLQMNSLKPEDTAVYYCAAEDADAAVPAVYGVVPFYYWGQGTQVTVSS

SEQ ID NO: 4753 - protein, 117 aa, Artificial Sequence
  Chemically Synthesized
QVQLQESGGGLVQAGGSLRLSCAASGYSMGWYRQAPGKERELVAAIDYGSTTYYADSVKGRFTISRDNAKNTVYLQMNSLKPEDTAVYYCAAWVKPRGPTIAELQYWGQGTQVTVSS

SEQ ID NO: 4754 - protein, 118 aa, Artificial Sequence
  Chemically Synthesized
QVQLQESGGGLVQAGGSLRLSCAASGSISGPITMGWYRQAPGKERELVAAINGGSITNYADSVKGRFTISRDNAKNTVYLQMNSLKPEDTAVYYCAAIRWTDYWLYYWGQGTQVTVSS

SEQ ID NO: 4755 - protein, 121 aa, Artificial Sequence
  Chemically Synthesized
QVQLQESGGGLVQAGGSLRLSCAASGTIFTWAAMGWYRQAPGKEREFVATIVGVLVPYADSVKGRFTISRDNAKNTVYLQMNSLKPEDTAVYYCAVPLNKYWVRQAYHSYWGQGTQVTVSS

SEQ ID NO: 4756 - protein, 117 aa, Artificial Sequence
  Chemically Synthesized
QVQLQESGGGLVQAGGSLRLSCAASGNISSRRGMGWYRQAPGKERELVATIGYGSSTNYADSVKGRFTISRDNAKNTVYLQMNSLKPEDTAVYYCAVDDYYDNYSYWGQGTQVTVSS

SEQ ID NO: 4757 - protein, 113 aa, Artificial Sequence
  Chemically Synthesized
QVQLQESGGGLVQAGGSLRLSCAASGTISGLGSMGWYRQAPGKEREFVATIGTGSSTYYADSVKGRFTISRDNAKNTVYLQMNSLKPEDTAVYYCATLLTIYWGQGTQVTVSS

SEQ ID NO: 4758 - protein, 115 aa, Artificial Sequence
  Chemically Synthesized
QVQLQESGGGLVQAGGSLRLSCAASGTISLSWMGWYRQAPGKEREFVATISYGTSTNYADSVKGRFTISRDNAKNTVYLQMNSLKPEDTAVYYCAAYDDPIHYYWGQGTQVTVSS

SEQ ID NO: 4759 - protein, 111 aa, Artificial Sequence
  Chemically Synthesized
QVQLQESGGGLVQAGGSLRLSCAASGYISYWLYMGWYRQAPGKERELVAGISIGATTYYADSVKGRFTISRDNAKNTVYLQMNSLKPEDTAVYYCAADTYWGQGTQVTVSS

SEQ ID NO: 4760 - protein, 118 aa, Artificial Sequence
  Chemically Synthesized
QVQLQESGGGLVQAGGSLRLSCAASGTISYGVTMGWYRQAPGKEREFVAGIAAGANTNYADSVKGRFTISRDNAKNTVYLQMNSLKPEDTAVYYCAVIAYRGNYYWYWGQGTQVTVSS

SEQ ID NO: 4761 - protein, 118 aa, Artificial Sequence
  Chemically Synthesized
QVQLQESGGGLVQAGGSLRLSCAASGNISAVPYMGWYRQAPGKEREFVASISDGANTYYADSVKGRFTISRDNAKNTVYLQMNSLKPEDTAVYYCAAVLHNTGWYGYWGQGTQVTVSS

SEQ ID NO: 4762 - protein, 123 aa, Artificial Sequence
  Chemically Synthesized
QVQLQESGGGLVQAGGSLRLSCAASGSIFRVVTHMGWYRQAPGKEREFVAGIGPGANTNYADSVKGRFTISRDNAKNTVYLQMNSLKPEDTAVYYCAVVQYYEGRISEVFYYWGQGTQVTVSS

SEQ ID NO: 4763 - protein, 119 aa, Artificial Sequence
  Chemically Synthesized
QVQLQESGGGLVQAGGSLRLSCAASGSISPLTYMGWYRQAPGKEREFVASINAGTNTYYADSVKGRFTISRDNAKNTVYLQMNSLKPEDTAVYYCAALSYRDYVWHNYWGQGTQVTVSS

SEQ ID NO: 4764 - protein, 118 aa, Artificial Sequence
  Chemically Synthesized
QVQLQESGGGLVQAGGSLRLSCAASGTISPRSRMGWYRQAPGKEREFVASIDAGSSTNYADSVKGRFTISRDNAKNTVYLQMNSLKPEDTAVYYCAVAWQAVRSFGYWGQGTQVTVSS

SEQ ID NO: 4765 - protein, 118 aa, Artificial Sequence
  Chemically Synthesized
QVQLQESGGGLVQAGGSLRLSCAASGSISSGRNMGWYRQAPGKEREFVAGITNGTNTNYADSVKGRFTISRDNAKNTVYLQMNSLKPEDTAVYYCAAYYLWRQSHRYWGQGTQVTVSS

SEQ ID NO: 4766 - protein, 118 aa, Artificial Sequence
  Chemically Synthesized
QVQLQESGGGLVQAGGSLRLSCAASGSISGIDTMGWYRQAPGKERELVATITAGGITYYADSVKGRFTISRDNAKNTVYLQMNSLKPEDTAVYYCAVDAHQYRDFRYWGQGTQVTVSS

SEQ ID NO: 4767 - protein, 122 aa, Artificial Sequence
  Chemically Synthesized
QVQLQESGGGLVQAGGSLRLSCAASGNIFYNPAMGWYRQAPGKEREFVATITSGGNTNYADSVKGRFTISRDNAKNTVYLQMNSLKPEDTAVYYCAVRDLANDYPPDIYWYWGQGTQVTVSS

SEQ ID NO: 4768 - protein, 122 aa, Artificial Sequence
  Chemically Synthesized
QVQLQESGGGLVQAGGSLRLSCAASGNISDDDNMGWYRQAPGKEREFVAGINYGANTNYADSVKGRFTISRDNAKNTVYLQMNSLKPEDTAVYYCAAVLARVQYTARRLYYWGQGTQVTVSS

SEQ ID NO: 4769 - protein, 118 aa, Artificial Sequence
  Chemically Synthesized
QVQLQESGGGLVQAGGSLRLSCAASGTISYFYHMGWYRQAPGKEREFVAAIGLGATTNYADSVKGRFTISRDNAKNTVYLQMNSLKPEDTAVYYCAAVYRSTGWHAYWGQGTQVTVSS

SEQ ID NO: 4770 - protein, 126 aa, Artificial Sequence
  Chemically Synthesized
QVQLQESGGGLVQAGGSLRLSCAASGNIFQWADMGWYRQAPGKEREFVAAIAPGSITNYADSVKGRFTISRDNAKNTVYLQMNSLKPEDTAVYYCAAGLFIASYFVGDDRDGLKYWGQGTQVTVSS

SEQ ID NO: 4771 - protein, 126 aa, Artificial Sequence
  Chemically Synthesized
QVQLQESGGGLVQAGGSLRLSCAASGSIFDDVVMGWYRQAPGKERELVATIAIGAITNYADSVKGRFTISRDNAKNTVYLQMNSLKPEDTAVYYCAVYVHGGQWPNDYAQWYHDYWGQGTQVTVSS

SEQ ID NO: 4772 - protein, 118 aa, Artificial Sequence
  Chemically Synthesized
QVQLQESGGGLVQAGGSLRLSCAASGTISGGVYMGWYRQAPGKEREFVAAITPGATTNYADSVKGRFTISRDNAKNTVYLQMNSLKPEDTAVYYCAADGQATTRHRYWGQGTQVTVSS

SEQ ID NO: 4773 - protein, 118 aa, Artificial Sequence
  Chemically Synthesized
QVQLQESGGGLVQAGGSLRLSCAASGTISGVSIMGWYRQAPGKEREFVAGISLGASTNYADSVKGRFTISRDNAKNTVYLQMNSLKPEDTAVYYCAAIGHRGYGHYYWGQGTQVTVSS

SEQ ID NO: 4774 - protein, 122 aa, Artificial Sequence
  Chemically Synthesized
QVQLQESGGGLVQAGGSLRLSCAASGTISPDYPMGWYRQAPGKERELVATISHGGITNYADSVKGRFTISRDNAKNTVYLQMNSLKPEDTAVYYCAVQIEDHFGDVDYHYYWGQGTQVTVSS

SEQ ID NO: 4775 - protein, 121 aa, Artificial Sequence
  Chemically Synthesized
QVQLQESGGGLVQAGGSLRLSCAASGYISVYDDMGWYRQAPGKERELVASIDAGAITNYADSVKGRFTISRDNAKNTVYLQMNSLKPEDTAVYYCAASVTRPGRHFSSSYWGQGTQVTVSS

SEQ ID NO: 4776 - protein, 118 aa, Artificial Sequence
  Chemically Synthesized
QVQLQESGGGLVQAGGSLRLSCAASGNISSTYDMGWYRQAPGKERELVAGIGFGSTTYYADSVKGRFTISRDNAKNTVYLQMNSLKPEDTAVYYCAVGRSGLIDHAYWGQGTQVTVSS

SEQ ID NO: 4777 - protein, 118 aa, Artificial Sequence
  Chemically Synthesized
QVQLQESGGGLVQAGGSLRLSCAASGNIFRGVVMGWYRQAPGKEREFVASITDGASTYYADSVKGRFTISRDNAKNTVYLQMNSLKPEDTAVYYCAVRDTDRDPFYYWGQGTQVTVSS

SEQ ID NO: 4778 - protein, 125 aa, Artificial Sequence
  Chemically Synthesized
QVQLQESGGGLVQAGGSLRLSCAASGNISQTAVMGWYRQAPGKEREFVASINAGSTNYADSVKGRFTISRDNAKNTVYLQMNSLKPEDTAVYYCAVVGARGEYDASGRYARYYYWGQGTQVTVSS

SEQ ID NO: 4779 - protein, 122 aa, Artificial Sequence
  Chemically Synthesized
QVQLQESGGGLVQAGGSLRLSCAASGTIFSPIVMGWYRQAPGKEREFVASISNGGSTYYADSVKGRFTISRDNAKNTVYLQMNSLKPEDTAVYYCAAISVNSAIAGRYFGYWGQGTQVTVSS

SEQ ID NO: 4780 - protein, 118 aa, Artificial Sequence
  Chemically Synthesized
QVQLQESGGGLVQAGGSLRLSCAASGSISPAILMGWYRQAPGKEREFVAGISFGANTNYADSVKGRFTISRDNAKNTVYLQMNSLKPEDTAVYYCAALHRGEVFHYYWGQGTQVTVSS

SEQ ID NO: 4781 - protein, 121 aa, Artificial Sequence
  Chemically Synthesized
QVQLQESGGGLVQAGGSLRLSCAASGTIFAYWYMGWYRQAPGKEREFVPVLMVVVLPYADSVKGRFTISRDNAKNTVYLQMNSLKPEDTAVYYCAVRGYLSDLTYVALDYWGQGTQVTVSS

SEQ ID NO: 4782 - protein, 118 aa, Artificial Sequence
  Chemically Synthesized
QVQLQESGGGLVQAGGSLRLSCAASGNISSYNAMGWYRQAPGKEREFVASITVGTNTYYADSVKGRFTISRDNAKNTVYLQMNSLKPEDTAVYYCAALQTHSVYYYYWGQGTQVTVSS

SEQ ID NO: 4783 - protein, 118 aa, Artificial Sequence
  Chemically Synthesized
QVQLQESGGGLVQAGGSLRLSCAASGNISVLPYMGWYRQAPGKERELVASIDLGANTNYADSVKGRFTISRDNAKNTVYLQMNSLKPEDTAVYYCAVGRTWYKLHAYWGQGTQVTVSS

SEQ ID NO: 4784 - protein, 118 aa, Artificial Sequence
  Chemically Synthesized
QVQLQESGGGLVQAGGSLRLSCAASGSIFWYYAMGWYRQAPGKEREFVASIAKGATTYYADSVKGRFTISRDNAKNTVYLQMNSLKPEDTAVYYCAVLVYTGKWHSYWGQGTQVTVSS

SEQ ID NO: 4785 - protein, 118 aa, Artificial Sequence
  Chemically Synthesized
QVQLQESGGGLVQAGGSLRLSCAASGTISLDDYMGWYRQAPGKERELVAGIASGAITYYADSVKGRFTISRDNAKNTVYLQMNSLKPEDTAVYYCAARSPTDDLFVYWGQGTQVTVSS

SEQ ID NO: 4786 - protein, 114 aa, Artificial Sequence
  Chemically Synthesized
QVQLQESGGGLVQAGGSLRLSCAASGTISDRILMGWYRQAPGKEREFVAAINVGTTTYYADSVKGRFTISRDNAKNTVYLQMNSLKPEDTAVYYCAVVDLLTYWGQGTQVTVSS

SEQ ID NO: 4787 - protein, 118 aa, Artificial Sequence
  Chemically Synthesized
QVQLQESGGGLVQAGGSLRLSCAASGYISYGTNMGWYRQAPGKEREFVAAISYGSNTNYADSVKGRFTISRDNAKNTVYLQMNSLKPEDTAVYYCAVVYPRDYRYYYWGQGTQVTVSS

SEQ ID NO: 4788 - protein, 118 aa, Artificial Sequence
  Chemically Synthesized
QVQLQESGGGLVQAGGSLRLSCAASGTISHTIAMGWYRQAPGKEREFVASIARGAITNYADSVKGRFTISRDNAKNTVYLQMNSLKPEDTAVYYCAAVRYLDAYLYYWGQGTQVTVSS

SEQ ID NO: 4789 - protein, 118 aa, Artificial Sequence
  Chemically Synthesized
QVQLQESGGGLVQAGGSLRLSCAASGTISGIRGMGWYRQAPGKEREFVASISYGGSTNYADSVKGRFTISRDNAKNTVYLQMNSLKPEDTAVYYCAVIIRFDRYYGYWGQGTQVTVSS

SEQ ID NO: 4790 - protein, 118 aa, Artificial Sequence
  Chemically Synthesized
QVQLQESGGGLVQAGGSLRLSCAASGSISRAIAMGWYRQAPGKEREFVATIGDGGITNYADSVKGRFTISRDNAKNTVYLQMNSLKPEDTAVYYCAVIDQTDRYLWYWGQGTQVTVSS

SEQ ID NO: 4791 - protein, 115 aa, Artificial Sequence
  Chemically Synthesized
QVQLQESGGGLVQAGGSLRLSCAASGNISYITAMGWYRQAPGKEREFVASIGGGASTNYADSVKGRFTISRDNAKNTVYLQMNSLKPEDTAVYYCAAIEDRHGYWGQGTQVTVSS

SEQ ID NO: 4792 - protein, 122 aa, Artificial Sequence
  Chemically Synthesized
QVQLQESGGGLVQAGGSLRLSCAASGTISGAYSMGWYRQAPGKEREFVAGITAGSSTNYADSVKGRFTISRDNAKNTVYLQMNSLKPEDTAVYYCAAIYYDVQYDGSLHGYWGQGTQVTVSS

SEQ ID NO: 4793 - protein, 122 aa, Artificial Sequence
  Chemically Synthesized
QVQLQESGGGLVQAGGSLRLSCAASGTIFQSSDMGWYRQAPGKEREFVAAISIGTNTNYADSVKGRFTISRDNAKNTVYLQMNSLKPEDTAVYYCAVVLYYRPDAYGYLGYWGQGTQVTVSS

SEQ ID NO: 4794 - protein, 122 aa, Artificial Sequence
  Chemically Synthesized
QVQLQESGGGLVQAGGSLRLSCAASGSIFTWYLMGWYRQAPGKEREFVATITTGATTYYADSVKGRFTISRDNAKNTVYLQMNSLKPEDTAVYYCAADDSGEVYWIDNFDYWGQGTQVTVSS

SEQ ID NO: 4795 - protein, 122 aa, Artificial Sequence
  Chemically Synthesized
QVQLQESGGGLVQAGGSLRLSCAASGSIFAALRMGWYRQAPGKEREFVAGIDPGANTYYADSVKGRFTISRDNAKNTVYLQMNSLKPEDTAVYYCAAVVYNYVGGVAPLGYWGQGTQVTVSS

SEQ ID NO: 4796 - protein, 115 aa, Artificial Sequence
  Chemically Synthesized
QVQLQESGGGLVQAGGSLRLSCAASGNSGPMGWYRQAPGKERELVATIAGGTITYYADSVKGRFTISRDNAKNTVYLQMNSLKPEDTAVYYCAVFNPSVSEFRYWGQGTQVTVSS

SEQ ID NO: 4797 - protein, 110 aa, Artificial Sequence
  Chemically Synthesized
QVQLQESGGGLVQAGGSLRLSCAASGNISWYDYMGWYRQAPGKERELVAAITVGANTYYADSVKGRFTISRDNAKNTVYLQMNSLKPEDTAVYYCALAYWGQGTQVTVSS

SEQ ID NO: 4798 - protein, 111 aa, Artificial Sequence
  Chemically Synthesized
QVQLQESGGGLVQAGGSLRLSCAASGTIFLAVVMGWYRQAPGKEREFVAGIAYGGITNYADSVKGRFTISRDNAKNTVYLQMNSLKPEDTAVYYCAAYDYWGQGTQVTVSS

SEQ ID NO: 4799 - protein, 117 aa, Artificial Sequence
  Chemically Synthesized
QVQLQESGGGLVQAGGSLRLSCAASGSISDNAMGWYRQAPGKEREFVASISQGSNTNYADSVKGRFTISRDNAKNTVYLQMNSLKPEDTAVYYCAAVYPQDDYYRYWGQGTQVTVSS

SEQ ID NO: 4800 - protein, 118 aa, Artificial Sequence
  Chemically Synthesized
QVQLQESGGGLVQAGGSLRLSCAASGNIFTSAEMGWYRQAPGKERELVATIDQGGNTYYADSVKGRFTISRDNAKNTVYLQMNSLKPEDTAVYYCAVRTYDRDFHYYWGQGTQVTVSS

SEQ ID NO: 4801 - protein, 117 aa, Artificial Sequence
  Chemically Synthesized
QVQLQESGGGLVQAGGSLRLSCAASGNISTYYWMGWYRQAPGKERELVATIGRGVIPYADSVKGRFTISRDNAKNTVYLQMNSLKPEDTAVYYCAVLDQYGAVLTYWGQGTQVTVSS

SEQ ID NO: 4802 - protein, 117 aa, Artificial Sequence
  Chemically Synthesized
QVQLQESGGGLVQAGGSLRLSCAASGNISSRYVMGWYRQAPGKERELVAVLLLVLLPYADSVKGRFTISRDNAKNTVYLQMNSLKPEDTAVYYCAADNRATSPLTYWGQGTQVTVSS

SEQ ID NO: 4803 - protein, 117 aa, Artificial Sequence
  Chemically Synthesized
QVQLQESGGGLVQAGGSLRLSCAASGSISGFDDMGWYRQAPGKERELVAAITSVVLPYADSVKGRFTISRDNAKNTVYLQMNSLKPEDTAVYYCAAQRDRSVKLDYWGQGTQVTVSS

SEQ ID NO: 4804 - protein, 118 aa, Artificial Sequence
  Chemically Synthesized
QVQLQESGGGLVQAGGSLRLSCAASGTISNRYFMGWYRQAPGKERELVAAINSGASTNYADSVKGRFTISRDNAKNTVYLQMNSLKPEDTAVYYCAVNYSWVDYYYYWGQGTQVTVSS

SEQ ID NO: 4805 - protein, 122 aa, Artificial Sequence
  Chemically Synthesized
QVQLQESGGGLVQAGGSLRLSCAASGSISIRTLMGWYRQAPGKEREFVAAITDGGITNYADSVKGRFTISRDNAKNTVYLQMNSLKPEDTAVYYCAADSTDQYVIAELHGYWGQGTQVTVSS

SEQ ID NO: 4806 - protein, 121 aa, Artificial Sequence
  Chemically Synthesized
QVQLQESGGGLVQAGGSLRLSCAASGYIFWSVTMGWYRQAPGKEREFVAGIGDGANTYADSVKGRFTISRDNAKNTVYLQMNSLKPEDTAVYYCAAAPYADIDYAYYLDYWGQGTQVTVSS

SEQ ID NO: 4807 - protein, 109 aa, Artificial Sequence
  Chemically Synthesized
QVQLQESGGGLVQAGGSLRLSCAASGNIFASTYMGWYRQAPGKERELTNYADSVKGRFTISRDNAKNTVYLQMNSLKPEDTAVYYCAAYGRDAVEFTYWGQGTQVTVSS

SEQ ID NO: 4808 - protein, 122 aa, Artificial Sequence
  Chemically Synthesized
QVQLQESGGGLVQAGGSLRLSCAASGNISYPYYMGWYRQAPGKEREFVASIAYGANTNYADSVKGRFTISRDNAKNTVYLQMNSLKPEDTAVYYCAAPDGTYSLGGGGLRYWGQGTQVTVSS

SEQ ID NO: 4809 - protein, 122 aa, Artificial Sequence
  Chemically Synthesized
QVQLQESGGGLVQAGGSLRLSCAASGTIFSHYRMGWYRQAPGKEREFVAAITQGGITYYADSVKGRFTISRDNAKNTVYLQMNSLKPEDTAVYYCAVDDGSADRRGPYHDYWGQGTQVTVSS

SEQ ID NO: 4810 - protein, 126 aa, Artificial Sequence
  Chemically Synthesized
QVQLQESGGGLVQAGGSLRLSCAASGTISLYQYMGWYRQAPGKERELVAGIADGTTTNYADSVKGRFTISRDNAKNTVYLQMNSLKPEDTAVYYCAATPYIDEPNESSATDLFYYWGQGTQVTVSS

SEQ ID NO: 4811 - protein, 123 aa, Artificial Sequence
  Chemically Synthesized
QVQLQESGGGLVQAGGSLRLSCAASGNIFDYVRMGWYRQAPGKERELVATIDSYQYADSVKGRFTISRDNAKNTVYLQMNSLKPEDTAVYYCAAYVRRADSSDRADYGTYSYWGQGTQVTVSS

SEQ ID NO: 4812 - protein, 122 aa, Artificial Sequence
  Chemically Synthesized
QVQLQESGGGLVQAGGSLRLSCAASGYIFDDYDMGWYRQAPGKEREFVATIGTGGSTNYADSVKGRFTISRDNAKNTVYLQMNSLKPEDTAVYYCAAFQNISTYVGPLLYYWGQGTQVTVSS

SEQ ID NO: 4813 - protein, 118 aa, Artificial Sequence
  Chemically Synthesized
QVQLQESGGGLVQAGGSLRLSCAASGNIFNAVVMGWYRQAPGKERELVATIGSGGTTNYADSVKGRFTISRDNAKNTVYLQMNSLKPEDTAVYYCAADVYYWSEHTYWGQGTQVTVSS

SEQ ID NO: 4814 - protein, 118 aa, Artificial Sequence
  Chemically Synthesized
QVQLQESGGGLVQAGGSLRLSCAASGTISITYSMGWYRQAPGKERELVAGITHGGITNYADSVKGRFTISRDNAKNTVYLQMNSLKPEDTAVYYCAVSGRIVNDFQYWGQGTQVTVSS

SEQ ID NO: 4815 - protein, 118 aa, Artificial Sequence
  Chemically Synthesized
QVQLQESGGGLVQAGGSLRLSCAASGSIFGAAYMGWYRQAPGKERELVAAISYGGSTYYADSVKGRFTISRDNAKNTVYLQMNSLKPEDTAVYYCAAYIPSIDAHGYWGQGTQVTVSS

SEQ ID NO: 4816 - protein, 126 aa, Artificial Sequence
  Chemically Synthesized
QVQLQESGGGLVQAGGSLRLSCAASGSISDQRYMGWYRQAPGKEREFVAGIGAGASTYYADSVKGRFTISRDNAKNTVYLQMNSLKPEDTAVYYCAVADYPYYYNDYAEYDTYTYWGQGTQVTVSS

SEQ ID NO: 4817 - protein, 118 aa, Artificial Sequence
  Chemically Synthesized
QVQLQESGGGLVQAGGSLRLSCAASGSIFSHISMGWYRQAPGKEREFVATIAFGATTYYADSVKGRFTISRDNAKNTVYLQMNSLKPEDTAVYYCAVEYYGYYPYYYWGQGTQVTVSS

SEQ ID NO: 4818 - protein, 118 aa, Artificial Sequence
  Chemically Synthesized
QVQLQESGGGLVQAGGSLRLSCAASGSIFYRYAMGWYRQAPGKEREFVAAIDYGGTTYYADSVKGRFTISRDNAKNTVYLQMNSLKPEDTAVYYCAVRLDYNTLLYYWGQGTQVTVSS

SEQ ID NO: 4819 - protein, 118 aa, Artificial Sequence
  Chemically Synthesized
QVQLQESGGGLVQAGGSLRLSCAASGTISGLTNMGWYRQAPGKEREFVAAITWGGNTYYADSVKGRFTISRDNAKNTVYLQMNSLKPEDTAVYYCAAYAPRVSGHDYWGQGTQVTVSS

SEQ ID NO: 4820 - protein, 113 aa, Artificial Sequence
  Chemically Synthesized
QVQLQESGGGLVQAGGSLRLSCAASGSISDYNYMGWYRQAPGKERELVAAINVGTITYYADSVKGRFTISRDNAKNTVYLQMNSLKPEDTAVYYCAAIRICYWGQGTQVTVSS

SEQ ID NO: 4821 - protein, 121 aa, Artificial Sequence
  Chemically Synthesized
QVQLQESGGGLVQAGGSLRLSCAASGYISQILYMGWYRQAPGKEREFVAVLILVVLPYADSVKGRFTISRDNAKNTVYLQMNSLKPEDTAVYYCAVDLTEPNDTSPPFAYWGQGTQVTVSS

SEQ ID NO: 4822 - protein, 117 aa, Artificial Sequence
  Chemically Synthesized
QVQLQESGGGLVQAGGSLRLSCAASGSISFPQNMGWYRQAPGKERELLPVLVTVLVPYADSVKGRFTISRDNAKNTVYLQMNSLKPEDTAVYYCAAVLRVDVILGYWGQGTQVTVSS

SEQ ID NO: 4823 - protein, 118 aa, Artificial Sequence
  Chemically Synthesized
QVQLQESGGGLVQAGGSLRLSCAASGSIFSGYAMGWYRQAPGKERELVATIGYGANTYYADSVKGRFTISRDNAKNTVYLQMNSLKPEDTAVYYCAVRRRYLRYFYYWGQGTQVTVSS

SEQ ID NO: 4824 - protein, 117 aa, Artificial Sequence
  Chemically Synthesized
QVQLQESGGGLVQAGGSLRLSCAASGSISSDIDMGWYRQAPGKEREFVAAIAQGGSTNYADSVKGRFTISRDNAKNTVYLQMNSLKPEDTAVYYCAAGYTNPWPFYWGQGTQVTVSS

SEQ ID NO: 4825 - protein, 113 aa, Artificial Sequence
  Chemically Synthesized
QVQLQESGGGLVQAGGSLRLSCAASGNISALTMGWYRQAPGKERELVASIAAGGSTYYADSVKGRFTISRDNAKNTVYLQMNSLKPEDTAVYYCAVALLHYYWGQGTQVTVSS

SEQ ID NO: 4826 - protein, 120 aa, Artificial Sequence
  Chemically Synthesized
QVQLQESGGGLVQAGGSLRLSCAASGYIFDDTMGWYRQAPGKERELVAAIGWGTNTNYADSVKGRFTISRDNAKNTVYLQMNSLKPEDTAVYYCAASSSRLLVSTNVMYWGQGTQVTVSS

SEQ ID NO: 4827 - protein, 122 aa, Artificial Sequence
  Chemically Synthesized
QVQLQESGGGLVQAGGSLRLSCAASGSIFGFAYMGWYRQAPGKEREFVAGINPGTITNYADSVKGRFTISRDNAKNTVYLQMNSLKPEDTAVYYCAAEGWYYRYDYAIYGYWGQGTQVTVSS

SEQ ID NO: 4828 - protein, 118 aa, Artificial Sequence
  Chemically Synthesized
QVQLQESGGGLVQAGGSLRLSCAASGNIFTNASMGWYRQAPGKEREFVAAITSGSNTYYADSVKGRFTISRDNAKNTVYLQMNSLKPEDTAVYYCAVSGQDDVFYNYWGQGTQVTVSS

SEQ ID NO: 4829 - protein, 118 aa, Artificial Sequence
  Chemically Synthesized
QVQLQESGGGLVQAGGSLRLSCAASGTIFRQIYMGWYRQAPGKEREFVATIGFGSTTNYADSVKGRFTISRDNAKNTVYLQMNSLKPEDTAVYYCAADDYPSYDLVYWGQGTQVTVSS

SEQ ID NO: 4830 - protein, 126 aa, Artificial Sequence
  Chemically Synthesized
QVQLQESGGGLVQAGGSLRLSCAASGSISSAYHMGWYRQAPGKERELVAAISYGGTTYYADSVKGRFTISRDNAKNTVYLQMNSLKPEDTAVYYCAVDGIVGYWPYTYAYYLLYYWGQGTQVTVSS

SEQ ID NO: 4831 - protein, 126 aa, Artificial Sequence
  Chemically Synthesized
QVQLQESGGGLVQAGGSLRLSCAASGYISITPYMGWYRQAPGKERELVASINWGSITYYADSVKGRFTISRDNAKNTVYLQMNSLKPEDTAVYYCAAGKRTLQQDLTYQGVLYVYWGQGTQVTVSS

SEQ ID NO: 4832 - protein, 126 aa, Artificial Sequence
  Chemically Synthesized
QVQLQESGGGLVQAGGSLRLSCAASGTIFSFIFMGWYRQAPGKEREFVAGIATGTTTYYADSVKGRFTISRDNAKNTVYLQMNSLKPEDTAVYYCALTLITLFRLLTVSVTNVFYWGQGTQVTVSS

SEQ ID NO: 4833 - protein, 126 aa, Artificial Sequence
  Chemically Synthesized
QVQLQESGGGLVQAGGSLRLSCAASGTIFDLYYMGWYRQAPGKERELVATIAYGTSTYYADSVKGRFTISRDNAKNTVYLQMNSLKPEDTAVYYCAAYDRVGDYDSSYIVASYHYWGQGTQVTVSS

SEQ ID NO: 4834 - protein, 115 aa, Artificial Sequence
  Chemically Synthesized
QVQLQESGGGLVQAGGSLRLSCAASGNIFTLLMGWYRQAPGKERELVAGISSGGNTNYADSVKGRFTISRDNAKNTVYLQMNSLKPEDTAVYYCAANSYSLHLYWGQGTQVTVSS

SEQ ID NO: 4835 - protein, 126 aa, Artificial Sequence
  Chemically Synthesized
QVQLQESGGGLVQAGGSLRLSCAASGNIFRDYAMGWYRQAPGKEREFVASISGGGSTYYADSVKGRFTISRDNAKNTVYLQMNSLKPEDTAVYYCAAIDQDEDQGKYAPSYWFGYWGQGTQVTVSS

SEQ ID NO: 4836 - protein, 121 aa, Artificial Sequence
  Chemically Synthesized
QVQLQESGGGLVQAGGSLRLSCAASGTISQGDYMGWYRQAPGKERELVATIAAVLLPYADSVKGRFTISRDNAKNTVYLQMNSLKPEDTAVYYCAAVEPVDDDYALLHDYWGQGTQVTVSS

SEQ ID NO: 4837 - protein, 122 aa, Artificial Sequence
  Chemically Synthesized
QVQLQESGGGLVQAGGSLRLSCAASGYISSDLLMGWYRQAPGKEREFVASITFGATTYYADSVKGRFTISRDNAKNTVYLQMNSLKPEDTAVYYCAVWLYPPSNPSYGYIYWGQGTQVTVSS

SEQ ID NO: 4838 - protein, 122 aa, Artificial Sequence
  Chemically Synthesized
QVQLQESGGGLVQAGGSLRLSCAASGTISAGADMGWYRQAPGKERELVAAINAGGSTYYADSVKGRFTISRDNAKNTVYLQMNSLKPEDTAVYYCAVTRIDIYLYDYIYRYWGQGTQVTVSS

SEQ ID NO: 4839 - protein, 118 aa, Artificial Sequence
  Chemically Synthesized
QVQLQESGGGLVQAGGSLRLSCAASGYIFAYGDMGWYRQAPGKERELVASIDIGSNTNYADSVKGRFTISRDNAKNTVYLQMNSLKPEDTAVYYCAVHGGPFIGLSYWGQGTQVTVSS

SEQ ID NO: 4840 - protein, 122 aa, Artificial Sequence
  Chemically Synthesized
QVQLQESGGGLVQAGGSLRLSCAASGNISGWAYMGWYRQAPGKERELVAAISNGGSTNYADSVKGRFTISRDNAKNTVYLQMNSLKPEDTAVYYCAVYWYPYARRRSRLKYWGQGTQVTVSS

SEQ ID NO: 4841 - protein, 116 aa, Artificial Sequence
  Chemically Synthesized
QVQLQESGGGLVQAGGSLRLSCAASGNISFAVLMGWYRQAPGKEREFVATINMVVVPYADSVKGRFTISRDNAKNTVYLQMNSLKPEDTAVYYCAVTYAPDPYGYWGQGTQVTVSS

SEQ ID NO: 4842 - protein, 121 aa, Artificial Sequence
  Chemically Synthesized
QVQLQESGGGLVQAGGSLRLSCAASGTISDPYVMGWYRQAPGKEREFVAAIAYGTSTNYADSVKGRFTISRDNAKNTVYLQMNSLKPEDTAVYYCAADDAVTWLFRDFIYWGQGTQVTVSS

SEQ ID NO: 4843 - protein, 125 aa, Artificial Sequence
  Chemically Synthesized
QVQLQESGGGLVQAGGSLRLSCAASGTIFYSPTMGWYRQAPGKEREFVAGITPGTSTNYADSVKGRFTISRDNAKNTVYLQMNSLKPEDTAVYYCAVDATTKLGYPSRILYLNYWGQGTQVTVSS

SEQ ID NO: 4844 - protein, 118 aa, Artificial Sequence
  Chemically Synthesized
QVQLQESGGGLVQAGGSLRLSCAASGYIFAALFMGWYRQAPGKEREFVAAISSGTTTYYADSVKGRFTISRDNAKNTVYLQMNSLKPEDTAVYYCAVTDTVTSYHHYWGQGTQVTVSS

SEQ ID NO: 4845 - protein, 118 aa, Artificial Sequence
  Chemically Synthesized
QVQLQESGGGLVQAGGSLRLSCAASGTISYIYFMGWYRQAPGKEREFVASISIGGTTYYADSVKGRFTISRDNAKNTVYLQMNSLKPEDTAVYYCAVRAPRRNHLRYWGQGTQVTVSS

SEQ ID NO: 4846 - protein, 112 aa, Artificial Sequence
  Chemically Synthesized
QVQLQESGGGLVQAGGSLRLSCAASGSISQYDSMGWYRQAPGKERELVATISAGGITYYADSVKGRFTISRDNAKNTVYLQMNSLKPEDTAVYYCAYGHEYWGQGTQVTVSS

SEQ ID NO: 4847 - protein, 115 aa, Artificial Sequence
  Chemically Synthesized
QVQLQESGGGLVQAGGSLRLSCAASGNISYASGMGWYRQAPGKERELVASITSGTSTYYADSVKGRFTISRDNAKNTVYLQMNSLKPEDTAVYYCAVLTTTTMYWGQGTQVTVSS

SEQ ID NO: 4848 - protein, 118 aa, Artificial Sequence
  Chemically Synthesized
QVQLQESGGGLVQAGGSLRLSCAASGTISSVYTMGWYRQAPGKERELVAAITVGGSTYYADSVKGRFTISRDNAKNTVYLQMNSLKPEDTAVYYCAAGSAAYSGHLYWGQGTQVTVSS

SEQ ID NO: 4849 - protein, 118 aa, Artificial Sequence
  Chemically Synthesized
QVQLQESGGGLVQAGGSLRLSCAASGTIFDGRYMGWYRQAPGKERELVASIGIGTTTNYADSVKGRFTISRDNAKNTVYLQMNSLKPEDTAVYYCAAYSGYVRLHDYWGQGTQVTVSS

SEQ ID NO: 4850 - protein, 126 aa, Artificial Sequence
  Chemically Synthesized
QVQLQESGGGLVQAGGSLRLSCAASGTISNWRLMGWYRQAPGKERELVASISAGTITNYADSVKGRFTISRDNAKNTVYLQMNSLKPEDTAVYYCAAITDRRGDRRVGLYTYFKYWGQGTQVTVSS

SEQ ID NO: 4851 - protein, 121 aa, Artificial Sequence
  Chemically Synthesized
QVQLQESGGGLVQAGGSLRLSCAASGIFLTFRMGWYRQAPGKERELVASITGGGTTYYADSVKGRFTISRDNAKNTVYLQMNSLKPEDTAVYYCAAGDDSASVRGYPHIYWGQGTQVTVSS

SEQ ID NO: 4852 - protein, 119 aa, Artificial Sequence
  Chemically Synthesized
QVQLQESGGGLVQAGGSLRLSCAASGSISRYGHMGWYRQAPGKEREFVASIAVGTSTNYADSVKGRFTISRDNAKNTVYLQMNSLKPEDTAVYYCAVATYDNNYLLNYWGQGTQVTVSS

SEQ ID NO: 4853 - protein, 122 aa, Artificial Sequence
  Chemically Synthesized
QVQLQESGGGLVQAGGSLRLSCAASGTISSYAAMGWYRQAPGKERELVAGIADGSTTYYADSVKGRFTISRDNAKNTVYLQMNSLKPEDTAVYYCAAKARTSTYPTPNHLYWGQGTQVTVSS

SEQ ID NO: 4854 - protein, 122 aa, Artificial Sequence
  Chemically Synthesized
QVQLQESGGGLVQAGGSLRLSCAASGYISPPNTMGWYRQAPGKERELVAAIADGGSTNYADSVKGRFTISRDNAKNTVYLQMNSLKPEDTAVYYCAAQNLYDDEGGIRFYYWGQGTQVTVSS

SEQ ID NO: 4855 - protein, 118 aa, Artificial Sequence
  Chemically Synthesized
QVQLQESGGGLVQAGGSLRLSCAASGTIFTSYRMGWYRQAPGKERELVASIGKGTITNYADSVKGRFTISRDNAKNTVYLQMNSLKPEDTAVYYCAAYGKSYYYHDYWGQGTQVTVSS

SEQ ID NO: 4856 - protein, 121 aa, Artificial Sequence
  Chemically Synthesized
QVQLQESGGGLVQAGGSLRLSCAASGNIFDNGAMGWYRQAPGKERELVAGINYGAIPYADSVKGRFTISRDNAKNTVYLQMNSLKPEDTAVYYCAVYRDLPLEDDWDHDYWGQGTQVTVSS

SEQ ID NO: 4857 - protein, 118 aa, Artificial Sequence
  Chemically Synthesized
QVQLQESGGGLVQAGGSLRLSCAASGSIFGVFRMGWYRQAPGKERELVATIDYGATTYYADSVKGRFTISRDNAKNTVYLQMNSLKPEDTAVYYCAVQYRNYVTFYYWGQGTQVTVSS

SEQ ID NO: 4858 - protein, 119 aa, Artificial Sequence
  Chemically Synthesized
QVQLQESGGGLVQAGGSLRLSCAASGTIFDYQYMGWYRQAPGKEREFVAGIDQGGNTYYADSVKGRFTISRDNAKNTVYLQMNSLKPEDTAVYYCAVFYPRYSDYLQYWGQGTQVTVSS

SEQ ID NO: 4859 - protein, 126 aa, Artificial Sequence
  Chemically Synthesized
QVQLQESGGGLVQAGGSLRLSCAASGNISDLPYMGWYRQAPGKERELVATISVGGNTNYADSVKGRFTISRDNAKNTVYLQMNSLKPEDTAVYYCAATLTDVPNTPYKRYTYHYYWGQGTQVTVSS

SEQ ID NO: 4860 - protein, 118 aa, Artificial Sequence
  Chemically Synthesized
QVQLQESGGGLVQAGGSLRLSCAASGYIFPSTTMGWYRQAPGKERELVASIDYGGNTYYADSVKGRFTISRDNAKNTVYLQMNSLKPEDTAVYYCAADHYYGQNLYYWGQGTQVTVSS

SEQ ID NO: 4861 - protein, 118 aa, Artificial Sequence
  Chemically Synthesized
QVQLQESGGGLVQAGGSLRLSCAASGNISYVESMGWYRQAPGKERELVAAISVGAITYYADSVKGRFTISRDNAKNTVYLQMNSLKPEDTAVYYCAAYVWGGKTHQYWGQGTQVTVSS

SEQ ID NO: 4862 - protein, 117 aa, Artificial Sequence
  Chemically Synthesized
QVQLQESGGGLVQAGGSLRLSCAASGNISDPYLMGWYRQAPGKERELVATISFVVVPYADSVKGRFTISRDNAKNTVYLQMNSLKPEDTAVYYCAVDTKVPDPLPYWGQGTQVTVSS

SEQ ID NO: 4863 - protein, 122 aa, Artificial Sequence
  Chemically Synthesized
QVQLQESGGGLVQAGGSLRLSCAASGTISQPSIMGWYRQAPGKERELVASINAGATTNYADSVKGRFTISRDNAKNTVYLQMNSLKPEDTAVYYCAVAGIRWYHVDGWHQYWGQGTQVTVSS

SEQ ID NO: 4864 - protein, 126 aa, Artificial Sequence
  Chemically Synthesized
QVQLQESGGGLVQAGGSLRLSCAASGNISATTGMGWYRQAPGKERELVATITYGTSTNYADSVKGRFTISRDNAKNTVYLQMNSLKPEDTAVYYCAAQKLAVNYYYGTYTRPYEYWGQGTQVTVSS

SEQ ID NO: 4865 - protein, 118 aa, Artificial Sequence
  Chemically Synthesized
QVQLQESGGGLVQAGGSLRLSCAASGYIFPPYYMGWYRQAPGKEREFVATIDYGGNTNYADSVKGRFTISRDNAKNTVYLQMNSLKPEDTAVYYCAAGHSDIVLFDYWGQGTQVTVSS

SEQ ID NO: 4866 - protein, 122 aa, Artificial Sequence
  Chemically Synthesized
QVQLQESGGGLVQAGGSLRLSCAASGYISPVSDMGWYRQAPGKERELVAAISRGATTYYADSVKGRFTISRDNAKNTVYLQMNSLKPEDTAVYYCAVSDLAGLNSVATFTYWGQGTQVTVSS

SEQ ID NO: 4867 - protein, 117 aa, Artificial Sequence
  Chemically Synthesized
QVQLQESGGGLVQAGGSLRLSCAASGNISGYQYMGWYRQAPGKEREFVATIADGANPYADSVKGRFTISRDNAKNTVYLQMNSLKPEDTAVYYCAADYHIRVYYQYWGQGTQVTVSS

SEQ ID NO: 4868 - protein, 118 aa, Artificial Sequence
  Chemically Synthesized
QVQLQESGGGLVQAGGSLRLSCAASGYISGTVYMGWYRQAPGKEREFVAGITAGGTTYYADSVKGRFTISRDNAKNTVYLQMNSLKPEDTAVYYCAVRAPYAWFHGYWGQGTQVTVSS

SEQ ID NO: 4869 - protein, 126 aa, Artificial Sequence
  Chemically Synthesized
QVQLQESGGGLVQAGGSLRLSCAASGTIFDSFDMGWYRQAPGKEREFVASITGGTSTNYADSVKGRFTISRDNAKNTVYLQMNSLKPEDTAVYYCAANQDIQYWPSGYADQYFDYWGQGTQVTVSS

SEQ ID NO: 4870 - protein, 118 aa, Artificial Sequence
  Chemically Synthesized
QVQLQESGGGLVQAGGSLRLSCAASGSISAYYEMGWYRQAPGKERELVATISRGTNTNYADSVKGRFTISRDNAKNTVYLQMNSLKPEDTAVYYCAAVTGYLTQHAYWGQGTQVTVSS

SEQ ID NO: 4871 - protein, 118 aa, Artificial Sequence
  Chemically Synthesized
QVQLQESGGGLVQAGGSLRLSCAASGNIFADDTMGWYRQAPGKERELVASIAPGTSTNYADSVKGRFTISRDNAKNTVYLQMNSLKPEDTAVYYCAATRARVRALEYWGQGTQVTVSS

SEQ ID NO: 4872 - protein, 112 aa, Artificial Sequence
  Chemically Synthesized
QVQLQESGGGLVQAGGSLRLSCAASGSIFGYGYMGWYRQAPGKEREFVAGISFGGITYYADSVKGRFTISRDNAKNTVYLQMNSLKPEDTAVYYCAVSNYYWGQGTQVTVSS

SEQ ID NO: 4873 - protein, 122 aa, Artificial Sequence
  Chemically Synthesized
QVQLQESGGGLVQAGGSLRLSCAASGNISRTGYMGWYRQAPGKERELVATIAYGTITNYADSVKGRFTISRDNAKNTVYLQMNSLKPEDTAVYYCAAVYDYRTQGDVWHGYWGQGTQVTVSS

SEQ ID NO: 4874 - protein, 117 aa, Artificial Sequence
  Chemically Synthesized
QVQLQESGGGLVQAGGSLRLSCAASGNIFALHNMGWYRQAPGKERELVAAITVGASTNYADSVKGRFTISRDNAKNTVYLQMNSLKPEDTAVYYCAVTVTLCTTFYWGQGTQVTVSS

SEQ ID NO: 4875 - protein, 117 aa, Artificial Sequence
  Chemically Synthesized
QVQLQESGGGLVQAGGSLRLSCAASGTISYYATMGWYRQAPGKEREFVASITGGATTYYADSVKGRFTISRDNAKNTVYLQMNSLKPEDTAVYYCAVYSCRFSTIYWGQGTQVTVSS

SEQ ID NO: 4876 - protein, 118 aa, Artificial Sequence
  Chemically Synthesized
QVQLQESGGGLVQAGGSLRLSCAASGSISSVYFMGWYRQAPGKERELVATIANGSITYYADSVKGRFTISRDNAKNTVYLQMNSLKPEDTAVYYCAVYDIDYPSHEYWGQGTQVTVSS

SEQ ID NO: 4877 - protein, 125 aa, Artificial Sequence
  Chemically Synthesized
QVQLQESGGGLVQAGGSLRLSCAASGSIFETGVMGWYRQAPGKEREFVASIDGGITYYADSVKGRFTISRDNAKNTVYLQMNSLKPEDTAVYYCAVNYVTYLVPGYVVPPYFPYWGQGTQVTVSS

SEQ ID NO: 4878 - protein, 111 aa, Artificial Sequence
  Chemically Synthesized
QVQLQESGGGLVQAGGSLRLSCAASGTIFPYYSMGWYRQAPGKEREFVAGISTGSNTNYADSVKGRFTISRDNAKNTVYLQMNSLKPEDTAVYYCAFDHYWGQGTQVTVSS

SEQ ID NO: 4879 - protein, 118 aa, Artificial Sequence
  Chemically Synthesized
QVQLQESGGGLVQAGGSLRLSCAASGTISAYGSMGWYRQAPGKERELVASIGAGTNTYYADSVKGRFTISRDNAKNTVYLQMNSLKPEDTAVYYCAADYYVATPLYYWGQGTQVTVSS

SEQ ID NO: 4880 - protein, 118 aa, Artificial Sequence
  Chemically Synthesized
QVQLQESGGGLVQAGGSLRLSCAASGSIFWYYQMGWYRQAPGKEREFVAAITYGAITYYADSVKGRFTISRDNAKNTVYLQMNSLKPEDTAVYYCAVVRTPRTVHVYWGQGTQVTVSS

SEQ ID NO: 4881 - protein, 118 aa, Artificial Sequence
  Chemically Synthesized
QVQLQESGGGLVQAGGSLRLSCAASGSIFGDDYMGWYRQAPGKERELVAAIAHGTITYYADSVKGRFTISRDNAKNTVYLQMNSLKPEDTAVYYCAAPDRPPYAHYYWGQGTQVTVSS

SEQ ID NO: 4882 - protein, 116 aa, Artificial Sequence
  Chemically Synthesized
QVQLQESGGGLVQAGGSLRLSCAASGTIFRGYAMGWYRQAPGKEREFVATIDNGTNTYYADSVKGRFTISRDNAKNTVYLQMNSLKPEDTAVYYCAGLRLSAVSYWGQGTQVTVSS

SEQ ID NO: 4883 - protein, 118 aa, Artificial Sequence
  Chemically Synthesized
QVQLQESGGGLVQAGGSLRLSCAASGSIFRPGIMGWYRQAPGKEREFVATINSGANTNYADSVKGRFTISRDNAKNTVYLQMNSLKPEDTAVYYCAVVPYYEDHHDYWGQGTQVTVSS

SEQ ID NO: 4884 - protein, 116 aa, Artificial Sequence
  Chemically Synthesized
QVQLQESGGGLVQAGGSLRLSCAASGSISYIEFMGWYRQAPGKERELVASIGWYYQYADSVKGRFTISRDNAKNTVYLQMNSLKPEDTAVYYCAAQQWPYDPHDYWGQGTQVTVSS

SEQ ID NO: 4885 - protein, 122 aa, Artificial Sequence
  Chemically Synthesized
QVQLQESGGGLVQAGGSLRLSCAASGSISYVYFMGWYRQAPGKERELVASISYGSTTYYADSVKGRFTISRDNAKNTVYLQMNSLKPEDTAVYYCAARDNDRRALTPLYQYWGQGTQVTVSS

SEQ ID NO: 4886 - protein, 118 aa, Artificial Sequence
  Chemically Synthesized
QVQLQESGGGLVQAGGSLRLSCAASGSISAYAIMGWYRQAPGKEREFVAGIAIGTTTYYADSVKGRFTISRDNAKNTVYLQMNSLKPEDTAVYYCAVATGPAYDHPYWGQGTQVTVSS

SEQ ID NO: 4887 - protein, 126 aa, Artificial Sequence
  Chemically Synthesized
QVQLQESGGGLVQAGGSLRLSCAASGYISYKTDMGWYRQAPGKERELVAAIGKGGNTNYADSVKGRFTISRDNAKNTVYLQMNSLKPEDTAVYYCAVDANQWQSYYRAVQLTLTYWGQGTQVTVSS

SEQ ID NO: 4888 - protein, 118 aa, Artificial Sequence
  Chemically Synthesized
QVQLQESGGGLVQAGGSLRLSCAASGYIFTATYMGWYRQAPGKERELVAGISYGTNTNYADSVKGRFTISRDNAKNTVYLQMNSLKPEDTAVYYCAALQSDTPYLIYWGQGTQVTVSS

SEQ ID NO: 4889 - protein, 118 aa, Artificial Sequence
  Chemically Synthesized
QVQLQESGGGLVQAGGSLRLSCAASGSIYGPTDMGWYRQAPGKERELVAGIAHGTITNYADSVKGRFTISRDNAKNTVYLQMNSLKPEDTAVYYCAAWVFLTYQLHYWGQGTQVTVSS

SEQ ID NO: 4890 - protein, 118 aa, Artificial Sequence
  Chemically Synthesized
QVQLQESGGGLVQAGGSLRLSCAASGTISRAWLMGWYRQAPGKEREFVAAISSGAITYYADSVKGRFTISRDNAKNTVYLQMNSLKPEDTAVYYCAVVDVYSGYHDYWGQGTQVTVSS

SEQ ID NO: 4891 - protein, 118 aa, Artificial Sequence
  Chemically Synthesized
QVQLQESGGGLVQAGGSLRLSCAASGTISDVDFMGWYRQAPGKERELVAAISRGANTNYADSVKGRFTISRDNAKNTVYLQMNSLKPEDTAVYYCAVGLTYGPYYYYWGQGTQVTVSS

SEQ ID NO: 4892 - protein, 122 aa, Artificial Sequence
  Chemically Synthesized
QVQLQESGGGLVQAGGSLRLSCAASGTISRADNMGWYRQAPGKERELVAAIGLGTSTYYADSVKGRFTISRDNAKNTVYLQMNSLKPEDTAVYYCAVYLPTDYLGLHQLVYWGQGTQVTVSS

SEQ ID NO: 4893 - protein, 122 aa, Artificial Sequence
  Chemically Synthesized
QVQLQESGGGLVQAGGSLRLSCAASGTIFLTSDMGWYRQAPGKERELVAGIGAGTITYYADSVKGRFTISRDNAKNTVYLQMNSLKPEDTAVYYCAVRYYETYYAYVHFWYWGQGTQVTVSS

SEQ ID NO: 4894 - protein, 122 aa, Artificial Sequence
  Chemically Synthesized
QVQLQESGGGLVQAGGSLRLSCAASGYISLTLYMGWYRQAPGKEREFVATIAFGGITNYADSVKGRFTISRDNAKNTVYLQMNSLKPEDTAVYYCAAGDRIIYSNTFPLYYWGQGTQVTVSS

SEQ ID NO: 4895 - protein, 118 aa, Artificial Sequence
  Chemically Synthesized
QVQLQESGGGLVQAGGSLRLSCAASGNISFRRVMGWYRQAPGKEREFVAGIADGAITYYADSVKGRFTISRDNAKNTVYLQMNSLKPEDTAVYYCAVVWPYRFTYSYWGQGTQVTVSS

SEQ ID NO: 4896 - protein, 117 aa, Artificial Sequence
  Chemically Synthesized
QVQLQESGGGLVQAGGSLRLSCAASGNIFRYDYMGWYRQAPGKERELVATIDYGASTYYADSVKGRFTISRDNAKNTVYLQMNSLKPEDTAVYYCAVYYDYGGWLYWGQGTQVTVSS

SEQ ID NO: 4897 - protein, 122 aa, Artificial Sequence
  Chemically Synthesized
QVQLQESGGGLVQAGGSLRLSCAASGNIFLSYAMGWYRQAPGKEREFVAAIGRGTSTNYADSVKGRFTISRDNAKNTVYLQMNSLKPEDTAVYYCAAWWYYLFYARDGYQYWGQGTQVTVSS

SEQ ID NO: 4898 - protein, 122 aa, Artificial Sequence
  Chemically Synthesized
QVQLQESGGGLVQAGGSLRLSCAASGTISSRAYMGWYRQAPGKERELVAGITWGGSTNYADSVKGRFTISRDNAKNTVYLQMNSLKPEDTAVYYCAVTTYYGDEDAASHLYWGQGTQVTVSS

SEQ ID NO: 4899 - protein, 118 aa, Artificial Sequence
  Chemically Synthesized
QVQLQESGGGLVQAGGSLRLSCAASGYISLYGGMGWYRQAPGKERELVAAISDGGNTNYADSVKGRFTISRDNAKNTVYLQMNSLKPEDTAVYYCAAIYADKTPYDYWGQGTQVTVSS

SEQ ID NO: 4900 - protein, 118 aa, Artificial Sequence
  Chemically Synthesized
QVQLQESGGGLVQAGGSLRLSCAASGNISSIDRMGWYRQAPGKERELVAGISAGGTTNYADSVKGRFTISRDNAKNTVYLQMNSLKPEDTAVYYCAAYQYAYDVLDYWGQGTQVTVSS

SEQ ID NO: 4901 - protein, 116 aa, Artificial Sequence
  Chemically Synthesized
QVQLQESGGGLVQAGGSLRLSCAASGNISSTWQMGWYRQAPGKERELVATITTGGITNYADSVKGRFTISRDNAKNTVYLQMNSLKPEDTAVYYCAVDGFWVHGYWGQGTQVTVSS

SEQ ID NO: 4902 - protein, 118 aa, Artificial Sequence
  Chemically Synthesized
QVQLQESGGGLVQAGGSLRLSCAASGSIFDPASMGWYRQAPGKERELVAGISLGASTYYADSVKGRFTISRDNAKNTVYLQMNSLKPEDTAVYYCAALHRSPDLLYYWGQGTQVTVSS

SEQ ID NO: 4903 - protein, 126 aa, Artificial Sequence
  Chemically Synthesized
QVQLQESGGGLVQAGGSLRLSCAASGYIFRYYVMGWYRQAPGKEREFVAGISYGGNTNYADSVKGRFTISRDNAKNTVYLQMNSLKPEDTAVYYCAVQVWNFYLYVGESYRSHYYWGQGTQVTVSS

SEQ ID NO: 4904 - protein, 117 aa, Artificial Sequence
  Chemically Synthesized
QVQLQESGGGLVQAGGSLRLSCAASGSISSHTEMGWYRQAPGKERELVAAISQGANTNYADSVKGRFTISRDNAKNTVYLQMNSLKPEDTAVYYCAVAAIETYFDYWGQGTQVTVSS

SEQ ID NO: 4905 - protein, 118 aa, Artificial Sequence
  Chemically Synthesized
QVQLQESGGGLVQAGGSLRLSCAASGTISRRGRMGWYRQAPGKERELVASIARGTSTYYADSVKGRFTISRDNAKNTVYLQMNSLKPEDTAVYYCAAAYILQVDHPYWGQGTQVTVSS

SEQ ID NO: 4906 - protein, 122 aa, Artificial Sequence
  Chemically Synthesized
QVQLQESGGGLVQAGGSLRLSCAASGYISVAPIMGWYRQAPGKERELVAGIGAGTNTNYADSVKGRFTISRDNAKNTVYLQMNSLKPEDTAVYYCAVDHRVLHGAVASHEYWGQGTQVTVSS

SEQ ID NO: 4907 - protein, 118 aa, Artificial Sequence
  Chemically Synthesized
QVQLQESGGGLVQAGGSLRLSCAASGSISADLVMGWYRQAPGKERELVAGIALGASTYYADSVKGRFTISRDNAKNTVYLQMNSLKPEDTAVYYCAVVSLDGAVHGYWGQGTQVTVSS

SEQ ID NO: 4908 - protein, 122 aa, Artificial Sequence
  Chemically Synthesized
QVQLQESGGGLVQAGGSLRLSCAASGNIFGADNMGWYRQAPGKERELVASINDGSTTYYADSVKGRFTISRDNAKNTVYLQMNSLKPEDTAVYYCAADGTPYGGYDYYHYYWGQGTQVTVSS

SEQ ID NO: 4909 - protein, 122 aa, Artificial Sequence
  Chemically Synthesized
QVQLQESGGGLVQAGGSLRLSCAASGTISAVRHMGWYRQAPGKERELVAGIAYGATTYYADSVKGRFTISRDNAKNTVYLQMNSLKPEDTAVYYCAVIIADREVQYADHIYWGQGTQVTVSS

SEQ ID NO: 4910 - protein, 121 aa, Artificial Sequence
  Chemically Synthesized
QVQLQESGGGLVQAGGSLRLSCAASGNISWSYYMGWYRQAPGKERELVASIAAGASTYYADSVKGRFTISRDNAKNTVYLQMNSLKPEDTAVYYCAAKPYGTLTSSCCFYWGQGTQVTVSS

SEQ ID NO: 4911 - protein, 126 aa, Artificial Sequence
  Chemically Synthesized
QVQLQESGGGLVQAGGSLRLSCAASGYIFVRAQMGWYRQAPGKEREFVAGISTGASTNYADSVKGRFTISRDNAKNTVYLQMNSLKPEDTAVYYCAAQIEDPQSYRAGPQRRLGYWGQGTQVTVSS

SEQ ID NO: 4912 - protein, 125 aa, Artificial Sequence
  Chemically Synthesized
QVQLQESGGGLVQAGGSLRLSCAASGNIFHYGEMGWYRQAPGKEREFVAAIDGGNTNYADSVKGRFTISRDNAKNTVYLQMNSLKPEDTAVYYCAVREHLGWEPFTVRNTAHFYWGQGTQVTVSS

SEQ ID NO: 4913 - protein, 118 aa, Artificial Sequence
  Chemically Synthesized
QVQLQESGGGLVQAGGSLRLSCAASGTISRTNVMGWYRQAPGKEREFVAAIGTGTITYYADSVKGRFTISRDNAKNTVYLQMNSLKPEDTAVYYCAVEPSPWLGYYYWGQGTQVTVSS

SEQ ID NO: 4914 - protein, 118 aa, Artificial Sequence
  Chemically Synthesized
QVQLQESGGGLVQAGGSLRLSCAASGNISAEHRMGWYRQAPGKEREFVAAIGFGGSTNYADSVKGRFTISRDNAKNTVYLQMNSLKPEDTAVYYCAVFKAYSWSHPYWGQGTQVTVSS

SEQ ID NO: 4915 - protein, 118 aa, Artificial Sequence
  Chemically Synthesized
QVQLQESGGGLVQAGGSLRLSCAASGNISVTVVMGWYRQAPGKERELVATIGYGTTTYYADSVKGRFTISRDNAKNTVYLQMNSLKPEDTAVYYCAVHSPRDVGFYYWGQGTQVTVSS

SEQ ID NO: 4916 - protein, 121 aa, Artificial Sequence
  Chemically Synthesized
QVQLQESGGGLVQAGGSLRLSCAASGTISWVNAMGWYRQAPGKERELVATIDRGTTTYYADSVKGRFTISRDNAKNTVYLQMNSLKPEDTAVYYCAVYISKNCIRTLSIYWGQGTQVTVSS

SEQ ID NO: 4917 - protein, 117 aa, Artificial Sequence
  Chemically Synthesized
QVQLQESGGGLVQAGGSLRLSCAASGTISSWYGMGWYRQAPGKERELLPVLLTVVLPYADSVKGRFTISRDNAKNTVYLQMNSLKPEDTAVYYCAVAAFDYVSLGYWGQGTQVTVSS

SEQ ID NO: 4918 - protein, 121 aa, Artificial Sequence
  Chemically Synthesized
QVQLQESGGGLVQAGGSLRLSCAASGTISYGSMGWYRQAPGKERELVASISRGSNTNYADSVKGRFTISRDNAKNTVYLQMNSLKPEDTAVYYCAVALYRTTYQAEYHTYWGQGTQVTVSS

SEQ ID NO: 4919 - protein, 124 aa, Artificial Sequence
  Chemically Synthesized
QVQLQESGGGLVQAGGSLRLSCAASGNIFTTMGWYRQAPGKERELVATIGSGAITNYADSVKGRFTISRDNAKNTVYLQMNSLKPEDTAVYYCAVQFYPRFDGSADYADSHRYWGQGTQVTVSS

SEQ ID NO: 4920 - protein, 116 aa, Artificial Sequence
  Chemically Synthesized
QVQLQESGGGLVQAGGSLRLSCAASGNMGWYRQAPGKEREFVAAISSGSNTNYADSVKGRFTISRDNAKNTVYLQMNSLKPEDTAVYYCAVAEFSLHYGTLRHLYWGQGTQVTVSS

SEQ ID NO: 4921 - protein, 111 aa, Artificial Sequence
  Chemically Synthesized
QVQLQESGGGLVQAGGSLRLSCAASGSISDRTMGWYRQAPGKEREFVASIAVGAITNYADSVKGRFTISRDNAKNTVYLQMNSLKPEDTAVYYCAADYYYWGQGTQVTVSS

SEQ ID NO: 4922 - protein, 117 aa, Artificial Sequence
  Chemically Synthesized
QVQLQESGGGLVQAGGSLRLSCAASGYISDSYGMGWYRQAPGKEREFVAGITPGTITYYADSVKGRFTISRDNAKNTVYLQMNSLKPEDTAVYYCAAVTYGTGHNYWGQGTQVTVSS

SEQ ID NO: 4923 - protein, 118 aa, Artificial Sequence
  Chemically Synthesized
QVQLQESGGGLVQAGGSLRLSCAASGNIFHDRGMGWYRQAPGKEREFVAGIDPGANTYYADSVKGRFTISRDNAKNTVYLQMNSLKPEDTAVYYCAAVHTVPNVLNYWGQGTQVTVSS

SEQ ID NO: 4924 - protein, 118 aa, Artificial Sequence
  Chemically Synthesized
QVQLQESGGGLVQAGGSLRLSCAASGNIFHPHGMGWYRQAPGKEREFVAGIDPGSNTYYADSVKGRFTISRDNAKNTVYLQMNSLKPEDTAVYYCAAVGPKRSRYGYWGQGTQVTVSS

SEQ ID NO: 4925 - protein, 118 aa, Artificial Sequence
  Chemically Synthesized
QVQLQESGGGLVQAGGSLRLSCAASGSISNAYGMGWYRQAPGKEREFVAGISPGGNTYYADSVKGRFTISRDNAKNTVYLQMNSLKPEDTAVYYCAAITQHSSGHVYWGQGTQVTVSS

SEQ ID NO: 4926 - protein, 118 aa, Artificial Sequence
  Chemically Synthesized
QVQLQESGGGLVQAGGSLRLSCAASGTISEDYGMGWYRQAPGKEREFVAGIAYGSNTYYADSVKGRFTISRDNAKNTVYLQMNSLKPEDTAVYYCAAVPPLLGSHAYWGQGTQVTVSS

SEQ ID NO: 4927 - protein, 122 aa, Artificial Sequence
  Chemically Synthesized
QVQLQESGGGLVQAGGSLRLSCAASGNISGVYGMGWYRQAPGKEREFVAGIDPGSITYYADSVKGRFTISRDNAKNTVYLQMNSLKPEDTAVYYCAAVDPVYTASAYALNYWGQGTQVTVSS

SEQ ID NO: 4928 - protein, 122 aa, Artificial Sequence
  Chemically Synthesized
QVQLQESGGGLVQAGGSLRLSCAASGTIFDQDGMGWYRQAPGKEREFVAGISPGTTTYYADSVKGRFTISRDNAKNTVYLQMNSLKPEDTAVYYCAVIRLGYSDTGQPYVYWGQGTQVTVSS

SEQ ID NO: 4929 - protein, 120 aa, Artificial Sequence
  Chemically Synthesized
QVQLQESGGGLVQAGGSLRLSCAASGSISYTYGMGWYRQAPGKEREFVAGISPGSSTYYADSVKGRFTISRDNAKNTVYLQMNSLKPEDTAVYYCAVVAYVPPTDSHVYWGQGTQVTVSS

SEQ ID NO: 4930 - protein, 116 aa, Artificial Sequence
  Chemically Synthesized
QVQLQESGGGLVQAGGSLRLSCAASGTISSAYGMGWYRQAPGKEREFVAGIDPGATTYYADSVKGRFTISRDNAKNTVYLQMNSLKPEDTAVYYCAAVVPYTHVYWGQGTQVTVSS

SEQ ID NO: 4931 - protein, 118 aa, Artificial Sequence
  Chemically Synthesized
QVQLQESGGGLVQAGGSLRLSCAASGSIFHGHGMGWYRQAPGKEREFVAGIAPGSSTYYADSVKGRFTISRDNAKNTVYLQMNSLKPEDTAVYYCAAIDSGGSHHLYWGQGTQVTVSS

SEQ ID NO: 4932 - protein, 118 aa, Artificial Sequence
  Chemically Synthesized
QVQLQESGGGLVQAGGSLRLSCAASGYISDSYGMGWYRQAPGKEREFVAGITPGTITYYADSVKGRFTISRDNAKNTVYLQMNSLKPEDTAVYYCAAVGRTLSEHVYWGQGTQVTVSS

SEQ ID NO: 4933 - protein, 118 aa, Artificial Sequence
  Chemically Synthesized
QVQLQESGGGLVQAGGSLRLSCAASGNIFAPYGMGWYRQAPGKEREFVAGIDPGAITYYADSVKGRFTISRDNAKNTVYLQMNSLKPEDTAVYYCAAVQALGGRLSYWGQGTQVTVSS

SEQ ID NO: 4934 - protein, 118 aa, Artificial Sequence
  Chemically Synthesized
QVQLQESGGGLVQAGGSLRLSCAASGNISSAFGMGWYRQAPGKEREFVAGIAPGSSTYYADSVKGRFTISRDNAKNTVYLQMNSLKPEDTAVYYCAALDRHIDVHVYWGQGTQVTVSS

SEQ ID NO: 4935 - protein, 118 aa, Artificial Sequence
  Chemically Synthesized
QVQLQESGGGLVQAGGSLRLSCAASGTIFGVAGMGWYRQAPGKEREFVAGIDPGANTYYADSVKGRFTISRDNAKNTVYLQMNSLKPEDTAVYYCAALYRQTAGHAYWGQGTQVTVSS

SEQ ID NO: 4936 - protein, 118 aa, Artificial Sequence
  Chemically Synthesized
QVQLQESGGGLVQAGGSLRLSCAASGYISDSYGMGWYRQAPGKEREFVAGIDPGGSTYYADSVKGRFTISRDNAKNTVYLQMNSLKPEDTAVYYCAVVSPRQGAYPYWGQGTQVTVSS

SEQ ID NO: 4937 - protein, 117 aa, Artificial Sequence
  Chemically Synthesized
QVQLQESGGGLVQAGGSLRLSCAASGNISAKPAMGWYRQAPGKEREFVAGIDPGGSTYYADSVKGRFTISRDNAKNTVYLQMNSLKPEDTAVYYCAAVTYGTGHNYWGQGTQVTVSS

SEQ ID NO: 4938 - protein, 122 aa, Artificial Sequence
  Chemically Synthesized
QVQLQESGGGLVQAGGSLRLSCAASGTISQDTGMGWYRQAPGKEREFVAGIAPGTNTYYADSVKGRFTISRDNAKNTVYLQMNSLKPEDTAVYYCAALKRISPVGRDYLSYWGQGTQVTVSS

SEQ ID NO: 4939 - protein, 117 aa, Artificial Sequence
  Chemically Synthesized
QVQLQESGGGLVQAGGSLRLSCAASGSIFLDGMGWYRQAPGKEREFVAGIAPGGSTYYADSVKGRFTISRDNAKNTVYLQMNSLKPEDTAVYYCAVVQYTGRVLSYWGQGTQVTVSS

SEQ ID NO: 4940 - protein, 118 aa, Artificial Sequence
  Chemically Synthesized
QVQLQESGGGLVQAGGSLRLSCAASGNISGPYAMGWYRQAPGKEREFVAGITPGTTTYYADSVKGRFTISRDNAKNTVYLQMNSLKPEDTAVYYCAAVTSTTSRYNYWGQGTQVTVSS

SEQ ID NO: 4941 - protein, 118 aa, Artificial Sequence
  Chemically Synthesized
QVQLQESGGGLVQAGGSLRLSCAASGNISGQYGMGWYRQAPGKEREFVAGITPGANTYYADSVKGRFTISRDNAKNTVYLQMNSLKPEDTAVYYCAVVSPRQGAYPYWGQGTQVTVSS

SEQ ID NO: 4942 - protein, 115 aa, Artificial Sequence
  Chemically Synthesized
QVQLQESGGGLVQAGGSLRLSCAASGTISGDYGMGWYRQAPGKEREFVAGIAPGTNTYYADSVKGRFTISRDNAKNTVYLQMNSLKPEDTAVYYCAVVRPYHRYWGQGTQVTVSS

SEQ ID NO: 4943 - protein, 122 aa, Artificial Sequence
  Chemically Synthesized
QVQLQESGGGLVQAGGSLRLSCAASGSISQVYGMGWYRQAPGKEREFVAGIDPGSITYYADSVKGRFTISRDNAKNTVYLQMNSLKPEDTAVYYCAAIRRAYDGRADGYAYWGQGTQVTVSS

SEQ ID NO: 4944 - protein, 118 aa, Artificial Sequence
  Chemically Synthesized
QVQLQESGGGLVQAGGSLRLSCAASGTISRGVGMGWYRQAPGKEREFVAGIAPGSNTYYADSVKGRFTISRDNAKNTVYLQMNSLKPEDTAVYYCAAITALADEHDYWGQGTQVTVSS

SEQ ID NO: 4945 - protein, 118 aa, Artificial Sequence
  Chemically Synthesized
QVQLQESGGGLVQAGGSLRLSCAASGSISTPYAMGWYRQAPGKEREFVAGIDPGAITYYADSVKGRFTISRDNAKNTVYLQMNSLKPEDTAVYYCAVLWITGATHIYWGQGTQVTVSS

SEQ ID NO: 4946 - protein, 118 aa, Artificial Sequence
  Chemically Synthesized
QVQLQESGGGLVQAGGSLRLSCAASGTIFRLAGMGWYRQAPGKEREFVAGISPGTSTYYADSVKGRFTISRDNAKNTVYLQMNSLKPEDTAVYYCAALYYGVTPHTYWGQGTQVTVSS

SEQ ID NO: 4947 - protein, 118 aa, Artificial Sequence
  Chemically Synthesized
QVQLQESGGGLVQAGGSLRLSCAASGYISALYGMGWYRQAPGKEREFVAGIAPGGITYYADSVKGRFTISRDNAKNTVYLQMNSLKPEDTAVYYCAAVSGDSHDHPYWGQGTQVTVSS

SEQ ID NO: 4948 - protein, 118 aa, Artificial Sequence
  Chemically Synthesized
QVQLQESGGGLVQAGGSLRLSCAASGYISDSYGMGWYRQAPGKEREFVAGITPGTTTYYADSVKGRFTISRDNAKNTVYLQMNSLKPEDTAVYYCAVLEPSQHLHVYWGQGTQVTVSS

SEQ ID NO: 4949 - protein, 118 aa, Artificial Sequence
  Chemically Synthesized
QVQLQESGGGLVQAGGSLRLSCAASGNIFVSYGMGWYRQAPGKEREFVAGIDPGAITYYADSVKGRFTISRDNAKNTVYLQMNSLKPEDTAVYYCAAVSPTDHAHGYWGQGTQVTVSS

SEQ ID NO: 4950 - protein, 118 aa, Artificial Sequence
  Chemically Synthesized
QVQLQESGGGLVQAGGSLRLSCAASGTISIDQGMGWYRQAPGKEREFVAGIAHGAITYYADSVKGRFTISRDNAKNTVYLQMNSLKPEDTAVYYCAAVTSTTSRYNYWGQGTQVTVSS

SEQ ID NO: 4951 - protein, 117 aa, Artificial Sequence
  Chemically Synthesized
QVQLQESGGGLVQAGGSLRLSCAASGSISQDYGMGWYRQAPGKEREFVAGISPGSTTYYADSVKGRFTISRDNAKNTVYLQMNSLKPEDTAVYYCAAVTYGTGHNYWGQGTQVTVSS

SEQ ID NO: 4952 - protein, 122 aa, Artificial Sequence
  Chemically Synthesized
QVQLQESGGGLVQAGGSLRLSCAASGSIFEQSGMGWYRQAPGKEREFVAGIDPGSITYYADSVKGRFTISRDNAKNTVYLQMNSLKPEDTAVYYCAVITALSTDDARYYVYWGQGTQVTVSS

SEQ ID NO: 4953 - protein, 118 aa, Artificial Sequence
  Chemically Synthesized
QVQLQESGGGLVQAGGSLRLSCAASGTIFDVYGMGWYRQAPGKEREFVAGISPGASTYYADSVKGRFTISRDNAKNTVYLQMNSLKPEDTAVYYCAALTVGQARYVYWGQGTQVTVSS

SEQ ID NO: 4954 - protein, 118 aa, Artificial Sequence
  Chemically Synthesized
QVQLQESGGGLVQAGGSLRLSCAASGTIFDHVGMGWYRQAPGKEREFVAGISPGANTYYADSVKGRFTISRDNAKNTVYLQMNSLKPEDTAVYYCAALVRDTDTHAYWGQGTQVTVSS

SEQ ID NO: 4955 - protein, 118 aa, Artificial Sequence
  Chemically Synthesized
QVQLQESGGGLVQAGGSLRLSCAASGYISGRDGMGWYRQAPGKEREFVAGIAPGTTTYYADSVKGRFTISRDNAKNTVYLQMNSLKPEDTAVYYCAVVGNDTTRHVYWGQGTQVTVSS

SEQ ID NO: 4956 - protein, 113 aa, Artificial Sequence
  Chemically Synthesized
QVQLQESGGGLVQAGGSLRLSCAASGSFLCTLMGWYRQAPGKERELLPVLLMVLVPYADSVKGRFTISRDNAKNTVYLQMNSLKPEDTAVYYCAVYTWYLAYWGQGTQVTVSS

SEQ ID NO: 4957 - protein, 117 aa, Artificial Sequence
  Chemically Synthesized
QVQLQESGGGLVQAGGSLRLSCAASGNISGPYAMGWYRQAPGKEREFVAGITPGTTTYYADSVKGRFTISRDNAKNTVYLQMNSLKPEDTAVYYCAAVTYGTGHNYWGQGTQVTVSS

SEQ ID NO: 4958 - protein, 118 aa, Artificial Sequence
  Chemically Synthesized
QVQLQESGGGLVQAGGSLRLSCAASGNISDSYGMGWYRQAPGKEREFVAGITPGTITYYADSVKGRFTISRDNAKNTVYLQMNSLKPEDTAVYYCAAVTSTTSRYNYWGQGTQVTVSS

SEQ ID NO: 4959 - protein, 122 aa, Artificial Sequence
  Chemically Synthesized
QVQLQESGGGLVQAGGSLRLSCAASGSISARQYMGWYRQAPGKERELVASISGGTITYYADSVKGRFTISRDNAKNTVYLQMNSLKPEDTAVYYCAAYAIYDRADRWTFRYWGQGTQVTVSS

SEQ ID NO: 4960 - protein, 122 aa, Artificial Sequence
  Chemically Synthesized
QVQLQESGGGLVQAGGSLRLSCAASGNISSVVGMGWYRQAPGKEREFVAAISQGGSTYYADSVKGRFTISRDNAKNTVYLQMNSLKPEDTAVYYCAAEEWYYQGSTWFFGYWGQGTQVTVSS

SEQ ID NO: 4961 - protein, 112 aa, Artificial Sequence
  Chemically Synthesized
QVQLQESGGGLVQAGGSLRLSCAASGTISAWYTMGWYRQAPGKERELVAGIAYGGITYYADSVKGRFTISRDNAKNTVYLQMNSLKPEDTAVYYCAARHDYWGQGTQVTVSS

SEQ ID NO: 4962 - protein, 118 aa, Artificial Sequence
  Chemically Synthesized
QVQLQESGGGLVQAGGSLRLSCAASGSISARLWMGWYRQAPGKERELVAGIGAGATTNYADSVKGRFTISRDNAKNTVYLQMNSLKPEDTAVYYCAVFVGRYAPYYYWGQGTQVTVSS

SEQ ID NO: 4963 - protein, 122 aa, Artificial Sequence
  Chemically Synthesized
QVQLQESGGGLVQAGGSLRLSCAASGTISTDVWMGWYRQAPGKERELVAGIGEGGNTYYADSVKGRFTISRDNAKNTVYLQMNSLKPEDTAVYYCAVFVRGYAYGFRPHYYWGQGTQVTVSS

SEQ ID NO: 4964 - protein, 119 aa, Artificial Sequence
  Chemically Synthesized
QVQLQESGGGLVQAGGSLRLSCAASGNISDTYYMGWYRQAPGKEREFVASIGRGGSTYYADSVKGRFTISRDNAKNTVYLQMNSLKPEDTAVYYCAVGYWSTANYFGYWGQGTQVTVSS

SEQ ID NO: 4965 - protein, 118 aa, Artificial Sequence
  Chemically Synthesized
QVQLQESGGGLVQAGGSLRLSCAASGNIFSYLYMGWYRQAPGKERELVATITDGTNTNYADSVKGRFTISRDNAKNTVYLQMNSLKPEDTAVYYCAAYLYYDASHSYWGQGTQVTVSS

SEQ ID NO: 4966 - protein, 118 aa, Artificial Sequence
  Chemically Synthesized
QVQLQESGGGLVQAGGSLRLSCAASGTISDYQWMGWYRQAPGKERELVAGISSGGTTYYADSVKGRFTISRDNAKNTVYLQMNSLKPEDTAVYYCAAFQKNDVAHYYWGQGTQVTVSS

SEQ ID NO: 4967 - protein, 118 aa, Artificial Sequence
  Chemically Synthesized
QVQLQESGGGLVQAGGSLRLSCAASGYISGYYWMGWYRQAPGKERELVAGIGYGANTYYADSVKGRFTISRDNAKNTVYLQMNSLKPEDTAVYYCAVFHYNPSPYYYWGQGTQVTVSS

SEQ ID NO: 4968 - protein, 118 aa, Artificial Sequence
  Chemically Synthesized
QVQLQESGGGLVQAGGSLRLSCAASGNIFASSEMGWYRQAPGKERELVASIDDGSNTYYADSVKGRFTISRDNAKNTVYLQMNSLKPEDTAVYYCAVYYDFGVDHIYWGQGTQVTVSS

SEQ ID NO: 4969 - protein, 126 aa, Artificial Sequence
  Chemically Synthesized
QVQLQESGGGLVQAGGSLRLSCAASGSIFRGHAMGWYRQAPGKERELVAGIGYGGSTNYADSVKGRFTISRDNAKNTVYLQMNSLKPEDTAVYYCAVGYSNDDDQSTYELPYHRYWGQGTQVTVSS

SEQ ID NO: 4970 - protein, 122 aa, Artificial Sequence
  Chemically Synthesized
QVQLQESGGGLVQAGGSLRLSCAASGYIFKPYLMGWYRQAPGKEREFVATITEGGNTYYADSVKGRFTISRDNAKNTVYLQMNSLKPEDTAVYYCAVRGVDDARDEDPYVYWGQGTQVTVSS

SEQ ID NO: 4971 - protein, 117 aa, Artificial Sequence
  Chemically Synthesized
QVQLQESGGGLVQAGGSLRLSCAASGNISGDKYMGWYRQAPGKERELVAAISSVLLPYADSVKGRFTISRDNAKNTVYLQMNSLKPEDTAVYYCAAGQLTYGYLGYWGQGTQVTVSS

SEQ ID NO: 4972 - protein, 118 aa, Artificial Sequence
  Chemically Synthesized
QVQLQESGGGLVQAGGSLRLSCAASGYIFRYRAMGWYRQAPGKEREFVAAIGIGASTNYADSVKGRFTISRDNAKNTVYLQMNSLKPEDTAVYYCAVGDSAGDYYVYWGQGTQVTVSS

SEQ ID NO: 4973 - protein, 118 aa, Artificial Sequence
  Chemically Synthesized
QVQLQESGGGLVQAGGSLRLSCAASGYIFVWWDMGWYRQAPGKERELVASISNGTSTNYADSVKGRFTISRDNAKNTVYLQMNSLKPEDTAVYYCAVLKPPDEYHPYWGQGTQVTVSS

SEQ ID NO: 4974 - protein, 126 aa, Artificial Sequence
  Chemically Synthesized
QVQLQESGGGLVQAGGSLRLSCAASGSISHPDEMGWYRQAPGKERELVAGIANGGSTNYADSVKGRFTISRDNAKNTVYLQMNSLKPEDTAVYYCAVDHGINFYSYGPSDPQFAYWGQGTQVTVSS

SEQ ID NO: 4975 - protein, 122 aa, Artificial Sequence
  Chemically Synthesized
QVQLQESGGGLVQAGGSLRLSCAASGSISTDIDMGWYRQAPGKERELVATINVGTSTNYADSVKGRFTISRDNAKNTVYLQMNSLKPEDTAVYYCAATVLNFYDYAFTHIYWGQGTQVTVSS

SEQ ID NO: 4976 - protein, 122 aa, Artificial Sequence
  Chemically Synthesized
QVQLQESGGGLVQAGGSLRLSCAASGSIFGVNGMGWYRQAPGKERELVASISIGGSTNYADSVKGRFTISRDNAKNTVYLQMNSLKPEDTAVYYCAAQGYTNIGGTWTHGYWGQGTQVTVSS

SEQ ID NO: 4977 - protein, 118 aa, Artificial Sequence
  Chemically Synthesized
QVQLQESGGGLVQAGGSLRLSCAASGYISAIGRMGWYRQAPGKEREFVAGIGDGSITNYADSVKGRFTISRDNAKNTVYLQMNSLKPEDTAVYYCAAYPVLLACFYYWGQGTQVTVSS

SEQ ID NO: 4978 - protein, 118 aa, Artificial Sequence
  Chemically Synthesized
QVQLQESGGGLVQAGGSLRLSCAASGYIFPGHDMGWYRQAPGKERELVASIDRGASTYYADSVKGRFTISRDNAKNTVYLQMNSLKPEDTAVYYCAVDRDRRYDHSYWGQGTQVTVSS

SEQ ID NO: 4979 - protein, 118 aa, Artificial Sequence
  Chemically Synthesized
QVQLQESGGGLVQAGGSLRLSCAASGTISYTDIMGWYRQAPGKERELVAAITYGGTTYYADSVKGRFTISRDNAKNTVYLQMNSLKPEDTAVYYCAADQGYYDDFTYWGQGTQVTVSS

SEQ ID NO: 4980 - protein, 118 aa, Artificial Sequence
  Chemically Synthesized
QVQLQESGGGLVQAGGSLRLSCAASGNISSGEVMGWYRQAPGKERELVATIDRGSTTYYADSVKGRFTISRDNAKNTVYLQMNSLKPEDTAVYYCAVYYGRYYGHKYWGQGTQVTVSS

SEQ ID NO: 4981 - protein, 122 aa, Artificial Sequence
  Chemically Synthesized
QVQLQESGGGLVQAGGSLRLSCAASGSISAYAYMGWYRQAPGKEREFVATIAYGTITNYADSVKGRFTISRDNAKNTVYLQMNSLKPEDTAVYYCAAGQTDTYGLYSYHAYWGQGTQVTVSS

SEQ ID NO: 4982 - protein, 118 aa, Artificial Sequence
  Chemically Synthesized
QVQLQESGGGLVQAGGSLRLSCAASGTISGEYDMGWYRQAPGKERELVATIAEGSTTNYADSVKGRFTISRDNAKNTVYLQMNSLKPEDTAVYYCAAEDDGRAAFTYWGQGTQVTVSS

SEQ ID NO: 4983 - protein, 118 aa, Artificial Sequence
  Chemically Synthesized
QVQLQESGGGLVQAGGSLRLSCAASGTIFPYREMGWYRQAPGKEREFVATIGAGASTNYADSVKGRFTISRDNAKNTVYLQMNSLKPEDTAVYYCAADRYKADHFGYWGQGTQVTVSS

SEQ ID NO: 4984 - protein, 121 aa, Artificial Sequence
  Chemically Synthesized
QVQLQESGGGLVQAGGSLRLSCAASGSIFANYSMGWYRQAPGKERELVATINWGGSTNYADSVKGRFTISRDNAKNTVYLQMNSLKPEDTAVYYCAAADKRYYAYTEHDYWGQGTQVTVSS

SEQ ID NO: 4985 - protein, 113 aa, Artificial Sequence
  Chemically Synthesized
QVQLQESGGGLVQAGGSLRLSCAASGNISYTYDMGWYRQAPGKERELVASIGYGSSTYYADSVKGRFTISRDNAKNTVYLQMNSLKPEDTAVYYCAALVGLYWGQGTQVTVSS

SEQ ID NO: 4986 - protein, 117 aa, Artificial Sequence
  Chemically Synthesized
QVQLQESGGGLVQAGGSLRLSCAASGSIFQADDMGWYRQAPGKERELVASIVVVVLPYADSVKGRFTISRDNAKNTVYLQMNSLKPEDTAVYYCAADDWAWRSLPYWGQGTQVTVSS

SEQ ID NO: 4987 - protein, 117 aa, Artificial Sequence
  Chemically Synthesized
QVQLQESGGGLVQAGGSLRLSCAASGYISNVYDMGWYRQAPGKERELVASMVTVLLPYADSVKGRFTISRDNAKNTVYLQMNSLKPEDTAVYYCAAEYPIYWRLVYWGQGTQVTVSS

SEQ ID NO: 4988 - protein, 122 aa, Artificial Sequence
  Chemically Synthesized
QVQLQESGGGLVQAGGSLRLSCAASGTIFAKLRMGWYRQAPGKERELVASIGFGSTTYYADSVKGRFTISRDNAKNTVYLQMNSLKPEDTAVYYCAALLTYWLPLDTYFGYWGQGTQVTVSS

SEQ ID NO: 4989 - protein, 118 aa, Artificial Sequence
  Chemically Synthesized
QVQLQESGGGLVQAGGSLRLSCAASGTIFRYDNMGWYRQAPGKEREFVAGINGGANTYYADSVKGRFTISRDNAKNTVYLQMNSLKPEDTAVYYCAVKASDPRAHYYWGQGTQVTVSS

SEQ ID NO: 4990 - protein, 122 aa, Artificial Sequence
  Chemically Synthesized
QVQLQESGGGLVQAGGSLRLSCAASGNIFGDDTMGWYRQAPGKERELVAGINGGTTTNYADSVKGRFTISRDNAKNTVYLQMNSLKPEDTAVYYCAAWDQHWWRAVEVHFYWGQGTQVTVSS

SEQ ID NO: 4991 - protein, 113 aa, Artificial Sequence
  Chemically Synthesized
QVQLQESGGGLVQAGGSLRLSCAASGNKMGWYRQAPGKEREFVASIDTGGSTNYADSVKGRFTISRDNAKNTVYLQMNSLKPEDTAVYYCAARYVYWSPHRYWGQGTQVTVSS

SEQ ID NO: 4992 - protein, 118 aa, Artificial Sequence
  Chemically Synthesized
QVQLQESGGGLVQAGGSLRLSCAASGTISRDDRMGWYRQAPGKERELVATINSGGITYYADSVKGRFTISRDNAKNTVYLQMNSLKPEDTAVYYCAVLYPLGLPHDYWGQGTQVTVSS

SEQ ID NO: 4993 - protein, 117 aa, Artificial Sequence
  Chemically Synthesized
QVQLQESGGGLVQAGGSLRLSCAASGYISRYYMGWYRQAPGKEREFVAAITRGTNTNYADSVKGRFTISRDNAKNTVYLQMNSLKPEDTAVYYCAVHSRYDYYLVYWGQGTQVTVSS

SEQ ID NO: 4994 - protein, 123 aa, Artificial Sequence
  Chemically Synthesized
QVQLQESGGGLVQAGGSLRLSCAASGNIFRGESMGWYRQAPGKEREFVATIDIGGITYYADSVKGRFTISRDNAKNTVYLQMNSLKPEDTAVYYCAVASDLVGTVERDRYPYWGQGTQVTVSS

SEQ ID NO: 4995 - protein, 126 aa, Artificial Sequence
  Chemically Synthesized
QVQLQESGGGLVQAGGSLRLSCAASGYISPTPYMGWYRQAPGKERELVASIGPGTITYYADSVKGRFTISRDNAKNTVYLQMNSLKPEDTAVYYCAVAEYSLTAYERDWYFPYWYWGQGTQVTVSS

SEQ ID NO: 4996 - protein, 118 aa, Artificial Sequence
  Chemically Synthesized
QVQLQESGGGLVQAGGSLRLSCAASGSISSTPDMGWYRQAPGKEREFVASIAGGSSTYYADSVKGRFTISRDNAKNTVYLQMNSLKPEDTAVYYCAVSGNAGRPFVYWGQGTQVTVSS

SEQ ID NO: 4997 - protein, 126 aa, Artificial Sequence
  Chemically Synthesized
QVQLQESGGGLVQAGGSLRLSCAASGYIFLLSIMGWYRQAPGKEREFVAGINSGSNTYYADSVKGRFTISRDNAKNTVYLQMNSLKPEDTAVYYCAAYIRSNGPDAQNIYTYFSYWGQGTQVTVSS

SEQ ID NO: 4998 - protein, 126 aa, Artificial Sequence
  Chemically Synthesized
QVQLQESGGGLVQAGGSLRLSCAASGNISNRIYMGWYRQAPGKERELVAGISGGANTNYADSVKGRFTISRDNAKNTVYLQMNSLKPEDTAVYYCAAWIEWDGGYAYWDVSDFLYWGQGTQVTVSS

SEQ ID NO: 4999 - protein, 117 aa, Artificial Sequence
  Chemically Synthesized
QVQLQESGGGLVQAGGSLRLSCAASGTIFDQTSMGWYRQAPGKERELVAAIAVGLIPYADSVKGRFTISRDNAKNTVYLQMNSLKPEDTAVYYCAATFDAYYYFYYWGQGTQVTVSS

SEQ ID NO: 5000 - protein, 122 aa, Artificial Sequence
  Chemically Synthesized
QVQLQESGGGLVQAGGSLRLSCAASGTISHVSYMGWYRQAPGKEREFVAAIDGGATTYYADSVKGRFTISRDNAKNTVYLQMNSLKPEDTAVYYCAVWLKYYYYLDSRYNYWGQGTQVTVSS

SEQ ID NO: 5001 - protein, 118 aa, Artificial Sequence
  Chemically Synthesized
QVQLQESGGGLVQAGGSLRLSCAASGSISPYTEMGWYRQAPGKEREFVAGISYGATTNYADSVKGRFTISRDNAKNTVYLQMNSLKPEDTAVYYCAVPFTSLYQLLYWGQGTQVTVSS

SEQ ID NO: 5002 - protein, 118 aa, Artificial Sequence
  Chemically Synthesized
QVQLQESGGGLVQAGGSLRLSCAASGNIFFVRGMGWYRQAPGKERELVASITQGGSTNYADSVKGRFTISRDNAKNTVYLQMNSLKPEDTAVYYCAVQRHYWRTYVYWGQGTQVTVSS

SEQ ID NO: 5003 - protein, 117 aa, Artificial Sequence
  Chemically Synthesized
QVQLQESGGGLVQAGGSLRLSCAASGNIFTDGYMGWYRQAPGKEREFVAGIASGSTTNYADSVKGRFTISRDNAKNTVYLQMNSLKPEDTAVYYCAANRYAWSVIYWGQGTQVTVSS

SEQ ID NO: 5004 - protein, 111 aa, Artificial Sequence
  Chemically Synthesized
QVQLQESGGGLVQAGGSLRLSCAASGNISGLSYMGWYRQAPGKERELYADSVKGRFTISRDNAKNTVYLQMNSLKPEDTAVYYCAVYYTYGRGDYGDLVYWGQGTQVTVSS

SEQ ID NO: 5005 - protein, 117 aa, Artificial Sequence
  Chemically Synthesized
QVQLQESGGGLVQAGGSLRLSCAASGNISYFIVMGWYRQAPGKERELVATIGDGSNTNYADSVKGRFTISRDNAKNTVYLQMNSLKPEDTAVYYCAVVLFGVLTFYWGQGTQVTVSS

SEQ ID NO: 5006 - protein, 118 aa, Artificial Sequence
  Chemically Synthesized
QVQLQESGGGLVQAGGSLRLSCAASGSIFVGDTMGWYRQAPGKEREFVAGISGGASTNYADSVKGRFTISRDNAKNTVYLQMNSLKPEDTAVYYCAAHDAGDSRHQYWGQGTQVTVSS

SEQ ID NO: 5007 - protein, 122 aa, Artificial Sequence
  Chemically Synthesized
QVQLQESGGGLVQAGGSLRLSCAASGTISGPYRMGWYRQAPGKEREFVASISPGATTNYADSVKGRFTISRDNAKNTVYLQMNSLKPEDTAVYYCAAEGDWGYDARTTYPYWGQGTQVTVSS

SEQ ID NO: 5008 - protein, 118 aa, Artificial Sequence
  Chemically Synthesized
QVQLQESGGGLVQAGGSLRLSCAASGYIFYYDEMGWYRQAPGKERELVATITTGAITNYADSVKGRFTISRDNAKNTVYLQMNSLKPEDTAVYYCAAAVSADAIFRYWGQGTQVTVSS

SEQ ID NO: 5009 - protein, 122 aa, Artificial Sequence
  Chemically Synthesized
QVQLQESGGGLVQAGGSLRLSCAASGSIFYRVYMGWYRQAPGKERELVATIDAGASTYYADSVKGRFTISRDNAKNTVYLQMNSLKPEDTAVYYCAVKIQPYRGDGKYYTYWGQGTQVTVSS

SEQ ID NO: 5010 - protein, 118 aa, Artificial Sequence
  Chemically Synthesized
QVQLQESGGGLVQAGGSLRLSCAASGTIFYHYRMGWYRQAPGKEREFVAAISAGSNTYYADSVKGRFTISRDNAKNTVYLQMNSLKPEDTAVYYCAVVRWRSPKYRYWGQGTQVTVSS

SEQ ID NO: 5011 - protein, 118 aa, Artificial Sequence
  Chemically Synthesized
QVQLQESGGGLVQAGGSLRLSCAASGYISTRPYMGWYRQAPGKERELVATISYGTSTNYADSVKGRFTISRDNAKNTVYLQMNSLKPEDTAVYYCAARNDGPTYFIYWGQGTQVTVSS

SEQ ID NO: 5012 - protein, 118 aa, Artificial Sequence
  Chemically Synthesized
QVQLQESGGGLVQAGGSLRLSCAASGSISIWGRMGWYRQAPGKEREFVAGITIGGNTNYADSVKGRFTISRDNAKNTVYLQMNSLKPEDTAVYYCAARARWLSFHTYWGQGTQVTVSS

SEQ ID NO: 5013 - protein, 118 aa, Artificial Sequence
  Chemically Synthesized
QVQLQESGGGLVQAGGSLRLSCAASGYISYWSAMGWYRQAPGKEREFVAGIATGSSTYYADSVKGRFTISRDNAKNTVYLQMNSLKPEDTAVYYCAVWRRFRGRHEYWGQGTQVTVSS

SEQ ID NO: 5014 - protein, 117 aa, Artificial Sequence
  Chemically Synthesized
QVQLQESGGGLVQAGGSLRLSCAASGTIFIVYMGWYRQAPGKERELVAAITYGGTTNYADSVKGRFTISRDNAKNTVYLQMNSLKPEDTAVYYCAVAVRITGQLAYWGQGTQVTVSS

SEQ ID NO: 5015 - protein, 122 aa, Artificial Sequence
  Chemically Synthesized
QVQLQESGGGLVQAGGSLRLSCAASGNISYSWSMGWYRQAPGKEREFVAGIGRGGTTYYADSVKGRFTISRDNAKNTVYLQMNSLKPEDTAVYYCAAARVRRYARYPFHEYWGQGTQVTVSS

SEQ ID NO: 5016 - protein, 118 aa, Artificial Sequence
  Chemically Synthesized
QVQLQESGGGLVQAGGSLRLSCAASGTIFHALIMGWYRQAPGKEREFVATIASGGSTYYADSVKGRFTISRDNAKNTVYLQMNSLKPEDTAVYYCAVYDRVYYDYGYWGQGTQVTVSS

SEQ ID NO: 5017 - protein, 115 aa, Artificial Sequence
  Chemically Synthesized
QVQLQESGGGLVQAGGSLRLSCAASGYISGRDYMGWYRQAPGKEREFVAAIDSGGTTNYADSVKGRFTISRDNAKNTVYLQMNSLKPEDTAVYYCAAYLGIHDYWGQGTQVTVSS

SEQ ID NO: 5018 - protein, 122 aa, Artificial Sequence
  Chemically Synthesized
QVQLQESGGGLVQAGGSLRLSCAASGTISGRSAMGWYRQAPGKERELVATISLGSTTNYADSVKGRFTISRDNAKNTVYLQMNSLKPEDTAVYYCAAGDWWEDRGGGQFGYWGQGTQVTVSS

SEQ ID NO: 5019 - protein, 126 aa, Artificial Sequence
  Chemically Synthesized
QVQLQESGGGLVQAGGSLRLSCAASGYIFGGLFMGWYRQAPGKERELVAAIDYGGNTYYADSVKGRFTISRDNAKNTVYLQMNSLKPEDTAVYYCAVYPVWFPYDWYWSLGDHLYWGQGTQVTVSS

SEQ ID NO: 5020 - protein, 119 aa, Artificial Sequence
  Chemically Synthesized
QVQLQESGGGLVQAGGSLRLSCAASGTISTTLPMGWYRQAPGKERELVASIDSGSTTYYADSVKGRFTISRDNAKNTVYLQMNSLKPEDTAVYYCAADRYYYRSGLWYWGQGTQVTVSS

SEQ ID NO: 5021 - protein, 118 aa, Artificial Sequence
  Chemically Synthesized
QVQLQESGGGLVQAGGSLRLSCAASGNIFNAWAMGWYRQAPGKEREFVATITTGTTTYYADSVKGRFTISRDNAKNTVYLQMNSLKPEDTAVYYCAAGDGYRWYHYYWGQGTQVTVSS

SEQ ID NO: 5022 - protein, 117 aa, Artificial Sequence
  Chemically Synthesized
QVQLQESGGGLVQAGGSLRLSCAASGTIFDTDMGWYRQAPGKEREFVASIDYGSITNYADSVKGRFTISRDNAKNTVYLQMNSLKPEDTAVYYCAAVLYPGNVYNYWGQGTQVTVSS

SEQ ID NO: 5023 - protein, 122 aa, Artificial Sequence
  Chemically Synthesized
QVQLQESGGGLVQAGGSLRLSCAASGYIFRGRTMGWYRQAPGKEREFVAGIDYGTNTYYADSVKGRFTISRDNAKNTVYLQMNSLKPEDTAVYYCAVTRYRQYYYTGYFQYWGQGTQVTVSS

SEQ ID NO: 5024 - protein, 118 aa, Artificial Sequence
  Chemically Synthesized
QVQLQESGGGLVQAGGSLRLSCAASGYIFAPTGMGWYRQAPGKERELVAGIAKGGNTYYADSVKGRFTISRDNAKNTVYLQMNSLKPEDTAVYYCAAQWKYIYRHQYWGQGTQVTVSS

SEQ ID NO: 5025 - protein, 122 aa, Artificial Sequence
  Chemically Synthesized
QVQLQESGGGLVQAGGSLRLSCAASGSISGLVWMGWYRQAPGKERELVASIADGASTNYADSVKGRFTISRDNAKNTVYLQMNSLKPEDTAVYYCAAYPDDDTLDDYGHFYWGQGTQVTVSS

SEQ ID NO: 5026 - protein, 126 aa, Artificial Sequence
  Chemically Synthesized
QVQLQESGGGLVQAGGSLRLSCAASGNIFRYGVMGWYRQAPGKEREFVAGIGYGGNTNYADSVKGRFTISRDNAKNTVYLQMNSLKPEDTAVYYCAVGAYWREWFGSRPGKPHVYWGQGTQVTVSS

SEQ ID NO: 5027 - protein, 118 aa, Artificial Sequence
  Chemically Synthesized
QVQLQESGGGLVQAGGSLRLSCAASGSIFTPRAMGWYRQAPGKERELVAGIGRGSSTNYADSVKGRFTISRDNAKNTVYLQMNSLKPEDTAVYYCAVSPWGIVRYRYWGQGTQVTVSS

SEQ ID NO: 5028 - protein, 122 aa, Artificial Sequence
  Chemically Synthesized
QVQLQESGGGLVQAGGSLRLSCAASGNISRDGIMGWYRQAPGKEREFVAGIDDGGNTYYADSVKGRFTISRDNAKNTVYLQMNSLKPEDTAVYYCAVTGDEDRGYDHDYAYWGQGTQVTVSS

SEQ ID NO: 5029 - protein, 118 aa, Artificial Sequence
  Chemically Synthesized
QVQLQESGGGLVQAGGSLRLSCAASGYISAGPTMGWYRQAPGKEREFVASIGSGGTTYYADSVKGRFTISRDNAKNTVYLQMNSLKPEDTAVYYCAVFNGQYVVHVYWGQGTQVTVSS

SEQ ID NO: 5030 - protein, 122 aa, Artificial Sequence
  Chemically Synthesized
QVQLQESGGGLVQAGGSLRLSCAASGNISHDPYMGWYRQAPGKEREFVAAIAGGSTTNYADSVKGRFTISRDNAKNTVYLQMNSLKPEDTAVYYCAARQSIIVPWPTVYHYWGQGTQVTVSS

SEQ ID NO: 5031 - protein, 114 aa, Artificial Sequence
  Chemically Synthesized
QVQLQESGGGLVQAGGSLRLSCAASGYIFGNYPMGWYRQAPGKERELTYGTSTYYADSVKGRFTISRDNAKNTVYLQMNSLKPEDTAVYYCAADRYYAWPFYYWGQGTQVTVSS

SEQ ID NO: 5032 - protein, 126 aa, Artificial Sequence
  Chemically Synthesized
QVQLQESGGGLVQAGGSLRLSCAASGYISDHTYMGWYRQAPGKEREFVATINWGSITNYADSVKGRFTISRDNAKNTVYLQMNSLKPEDTAVYYCAADVTGQVGTRYVYSFVLDYWGQGTQVTVSS

SEQ ID NO: 5033 - protein, 122 aa, Artificial Sequence
  Chemically Synthesized
QVQLQESGGGLVQAGGSLRLSCAASGNISVDLNMGWYRQAPGKERELVASIGYGATTYYADSVKGRFTISRDNAKNTVYLQMNSLKPEDTAVYYCAAFAAVSHDDDTVLSYWGQGTQVTVSS

SEQ ID NO: 5034 - protein, 122 aa, Artificial Sequence
  Chemically Synthesized
QVQLQESGGGLVQAGGSLRLSCAASGTIFYDYVMGWYRQAPGKERELVAGISYGGTTYYADSVKGRFTISRDNAKNTVYLQMNSLKPEDTAVYYCAARRYRYWLTYYRHAYWGQGTQVTVSS

SEQ ID NO: 5035 - protein, 118 aa, Artificial Sequence
  Chemically Synthesized
QVQLQESGGGLVQAGGSLRLSCAASGNISYRDHMGWYRQAPGKERELVASIGRGGTTNYADSVKGRFTISRDNAKNTVYLQMNSLKPEDTAVYYCAVYSRYFRIYRYWGQGTQVTVSS

SEQ ID NO: 5036 - protein, 116 aa, Artificial Sequence
  Chemically Synthesized
QVQLQESGGGLVQAGGSLRLSCAASGNISVDPDMGWYRQAPGKEREFVAAITAGGTTYYADSVKGRFTISRDNAKNTVYLQMNSLKPEDTAVYYCAALDAWGGIYWGQGTQVTVSS

SEQ ID NO: 5037 - protein, 126 aa, Artificial Sequence
  Chemically Synthesized
QVQLQESGGGLVQAGGSLRLSCAASGTIFDRYSMGWYRQAPGKEREFVAAINYGTTTYYADSVKGRFTISRDNAKNTVYLQMNSLKPEDTAVYYCAAHLYPTILYYIGLGKGYRYWGQGTQVTVSS

SEQ ID NO: 5038 - protein, 118 aa, Artificial Sequence
  Chemically Synthesized
QVQLQESGGGLVQAGGSLRLSCAASGYISRYIRMGWYRQAPGKEREFVASIGVGGITYYADSVKGRFTISRDNAKNTVYLQMNSLKPEDTAVYYCAVASRRARTYYYWGQGTQVTVSS

SEQ ID NO: 5039 - protein, 118 aa, Artificial Sequence
  Chemically Synthesized
QVQLQESGGGLVQAGGSLRLSCAASGSISYNDVMGWYRQAPGKERELVAAITYGTNTNYADSVKGRFTISRDNAKNTVYLQMNSLKPEDTAVYYCAVYDYIYVRLPYWGQGTQVTVSS

SEQ ID NO: 5040 - protein, 118 aa, Artificial Sequence
  Chemically Synthesized
QVQLQESGGGLVQAGGSLRLSCAASGSISSGYHMGWYRQAPGKERELVATINDGSNTNYADSVKGRFTISRDNAKNTVYLQMNSLKPEDTAVYYCAVRPTEGDQLFYWGQGTQVTVSS

SEQ ID NO: 5041 - protein, 122 aa, Artificial Sequence
  Chemically Synthesized
QVQLQESGGGLVQAGGSLRLSCAASGNISTQTYMGWYRQAPGKERELVASISYGTNTYYADSVKGRFTISRDNAKNTVYLQMNSLKPEDTAVYYCAARLYHGWRTRYQHRYWGQGTQVTVSS

SEQ ID NO: 5042 - protein, 118 aa, Artificial Sequence
  Chemically Synthesized
QVQLQESGGGLVQAGGSLRLSCAASGTIFDRYYMGWYRQAPGKERELVASIDAGGNTYYADSVKGRFTISRDNAKNTVYLQMNSLKPEDTAVYYCAAYQYDVIGFEYWGQGTQVTVSS

SEQ ID NO: 5043 - protein, 126 aa, Artificial Sequence
  Chemically Synthesized
QVQLQESGGGLVQAGGSLRLSCAASGTISKNLFMGWYRQAPGKERELVASIGSGGTTYYADSVKGRFTISRDNAKNTVYLQMNSLKPEDTAVYYCAAHQVLVYDDYSRYRYFHGYWGQGTQVTVSS

SEQ ID NO: 5044 - protein, 125 aa, Artificial Sequence
  Chemically Synthesized
QVQLQESGGGLVQAGGSLRLSCAASGSISSYFMGWYRQAPGKERELVAGIAYGTNTNYADSVKGRFTISRDNAKNTVYLQMNSLKPEDTAVYYCAVAAQYLQARGYGEGDYYYYWGQGTQVTVSS

SEQ ID NO: 5045 - protein, 122 aa, Artificial Sequence
  Chemically Synthesized
QVQLQESGGGLVQAGGSLRLSCAASGSIFREATMGWYRQAPGKEREFVATIGLGSSTNYADSVKGRFTISRDNAKNTVYLQMNSLKPEDTAVYYCAVYYDSDRTDYYAHAYWGQGTQVTVSS

SEQ ID NO: 5046 - protein, 126 aa, Artificial Sequence
  Chemically Synthesized
QVQLQESGGGLVQAGGSLRLSCAASGSIFGFVYMGWYRQAPGKEREFVAGITDGSTTYYADSVKGRFTISRDNAKNTVYLQMNSLKPEDTAVYYCAAQTDDRYTDWEYVTRQHYYWGQGTQVTVSS

SEQ ID NO: 5047 - protein, 118 aa, Artificial Sequence
  Chemically Synthesized
QVQLQESGGGLVQAGGSLRLSCAASGNISYIREMGWYRQAPGKEREFVASIAYGSITNYADSVKGRFTISRDNAKNTVYLQMNSLKPEDTAVYYCAVARYTWRWHRYWGQGTQVTVSS

SEQ ID NO: 5048 - protein, 122 aa, Artificial Sequence
  Chemically Synthesized
QVQLQESGGGLVQAGGSLRLSCAASGTIFYPYPMGWYRQAPGKERELVASISRGSSTYYADSVKGRFTISRDNAKNTVYLQMNSLKPEDTAVYYCAVPSRFRYWNYGPHVYWGQGTQVTVSS

SEQ ID NO: 5049 - protein, 115 aa, Artificial Sequence
  Chemically Synthesized
QVQLQESGGGLVQAGGSLRLSCAASGSISYRGFMGWYRQAPGKERELVAAITKGSITYYADSVKGRFTISRDNAKNTVYLQMNSLKPEDTAVYYCAAARWVYVYWGQGTQVTVSS

SEQ ID NO: 5050 - protein, 118 aa, Artificial Sequence
  Chemically Synthesized
QVQLQESGGGLVQAGGSLRLSCAASGTIFQYPRMGWYRQAPGKEREFVASITRGGSTNYADSVKGRFTISRDNAKNTVYLQMNSLKPEDTAVYYCAAWYILYSYFDYWGQGTQVTVSS

SEQ ID NO: 5051 - protein, 118 aa, Artificial Sequence
  Chemically Synthesized
QVQLQESGGGLVQAGGSLRLSCAASGTISRPYRMGWYRQAPGKERELVASISYGATTNYADSVKGRFTISRDNAKNTVYLQMNSLKPEDTAVYYCAVDELDDIPHGYWGQGTQVTVSS

SEQ ID NO: 5052 - protein, 115 aa, Artificial Sequence
  Chemically Synthesized
QVQLQESGGGLVQAGGSLRLSCAASGNIFRPPTMGWYRQAPGKERELVATINVGANTYYADSVKGRFTISRDNAKNTVYLQMNSLKPEDTAVYYCAARWLYHTYWGQGTQVTVSS

SEQ ID NO: 5053 - protein, 120 aa, Artificial Sequence
  Chemically Synthesized
QVQLQESGGGLVQAGGSLRLSCAASGTILVVLMGWYRQAPGKEREFVATIAYGANTYYADSVKGRFTISRDNAKNTVYLQMNSLKPEDTAVYYCAVVYAPPDDSHYHLYWGQGTQVTVSS

SEQ ID NO: 5054 - protein, 118 aa, Artificial Sequence
  Chemically Synthesized
QVQLQESGGGLVQAGGSLRLSCAASGYIFPNTGMGWYRQAPGKEREFVATISVGTITYYADSVKGRFTISRDNAKNTVYLQMNSLKPEDTAVYYCAARTRYPRGHRYWGQGTQVTVSS

SEQ ID NO: 5055 - protein, 122 aa, Artificial Sequence
  Chemically Synthesized
QVQLQESGGGLVQAGGSLRLSCAASGSIFFGDFMGWYRQAPGKEREFVASIAYGAITNYADSVKGRFTISRDNAKNTVYLQMNSLKPEDTAVYYCAVNFGLGHLVDAVLGYWGQGTQVTVSS

SEQ ID NO: 5056 - protein, 117 aa, Artificial Sequence
  Chemically Synthesized
QVQLQESGGGLVQAGGSLRLSCAASGNISTTKMGWYRQAPGKEREFVASISGGTNTNYADSVKGRFTISRDNAKNTVYLQMNSLKPEDTAVYYCAVDELATPYHNYWGQGTQVTVSS

SEQ ID NO: 5057 - protein, 126 aa, Artificial Sequence
  Chemically Synthesized
QVQLQESGGGLVQAGGSLRLSCAASGTIFDQDWMGWYRQAPGKEREFVATITIGTITYYADSVKGRFTISRDNAKNTVYLQMNSLKPEDTAVYYCAAGAQYTGYAISDFSYTFYYWGQGTQVTVSS

SEQ ID NO: 5058 - protein, 118 aa, Artificial Sequence
  Chemically Synthesized
QVQLQESGGGLVQAGGSLRLSCAASGTIFGWWYMGWYRQAPGKEREFVASITTGANTNYADSVKGRFTISRDNAKNTVYLQMNSLKPEDTAVYYCAVKAGTEGYHSYWGQGTQVTVSS

SEQ ID NO: 5059 - protein, 117 aa, Artificial Sequence
  Chemically Synthesized
QVQLQESGGGLVQAGGSLRLSCAASGTISYSGDMGWYRQAPGKERELVATINNGASTYYADSVKGRFTISRDNAKNTVYLQMNSLKPEDTAVYYCAARPYVGPALYWGQGTQVTVSS

SEQ ID NO: 5060 - protein, 126 aa, Artificial Sequence
  Chemically Synthesized
QVQLQESGGGLVQAGGSLRLSCAASGYISRSLGMGWYRQAPGKERELVAGIAYGSNTYYADSVKGRFTISRDNAKNTVYLQMNSLKPEDTAVYYCAARTQYARWQVITYGRDHRYWGQGTQVTVSS

SEQ ID NO: 5061 - protein, 117 aa, Artificial Sequence
  Chemically Synthesized
QVQLQESGGGLVQAGGSLRLSCAASGYIFAIVIMGWYRQAPGKEREFVAGIGQGAITYYADSVKGRFTISRDNAKNTVYLQMNSLKPEDTAVYYCAATVTNGRLIYWGQGTQVTVSS

SEQ ID NO: 5062 - protein, 123 aa, Artificial Sequence
  Chemically Synthesized
QVQLQESGGGLVQAGGSLRLSCAASGNIFYSRYMGWYRQAPGKEREFVATINTGGNTNYADSVKGRFTISRDNAKNTVYLQMNSLKPEDTAVYYCAAQPDRQKAAYARDFGYWGQGTQVTVSS

SEQ ID NO: 5063 - protein, 118 aa, Artificial Sequence
  Chemically Synthesized
QVQLQESGGGLVQAGGSLRLSCAASGSIFNAYHMGWYRQAPGKERELVATIATGGSTYYADSVKGRFTISRDNAKNTVYLQMNSLKPEDTAVYYCAAVAGGRDSLIYWGQGTQVTVSS

SEQ ID NO: 5064 - protein, 118 aa, Artificial Sequence
  Chemically Synthesized
QVQLQESGGGLVQAGGSLRLSCAASGNISRRNRMGWYRQAPGKEREFVASIGYGANTYYADSVKGRFTISRDNAKNTVYLQMNSLKPEDTAVYYCAVYTLRSWQYRYWGQGTQVTVSS

SEQ ID NO: 5065 - protein, 126 aa, Artificial Sequence
  Chemically Synthesized
QVQLQESGGGLVQAGGSLRLSCAASGSIFAQFGMGWYRQAPGKERELVASIAYGSSTYYADSVKGRFTISRDNAKNTVYLQMNSLKPEDTAVYYCAAYGFASFENPRYGHGRHDYWGQGTQVTVSS

SEQ ID NO: 5066 - protein, 122 aa, Artificial Sequence
  Chemically Synthesized
QVQLQESGGGLVQAGGSLRLSCAASGTISSSYSMGWYRQAPGKERELVASIDGGANTYYADSVKGRFTISRDNAKNTVYLQMNSLKPEDTAVYYCAVPEWRDDAEPPALYYWGQGTQVTVSS

SEQ ID NO: 5067 - protein, 122 aa, Artificial Sequence
  Chemically Synthesized
QVQLQESGGGLVQAGGSLRLSCAASGSISRGGRMGWYRQAPGKERELVAAIDAGGNTYYADSVKGRFTISRDNAKNTVYLQMNSLKPEDTAVYYCAVDRTDWVQAGDGFAYWGQGTQVTVSS

SEQ ID NO: 5068 - protein, 127 aa, Artificial Sequence
  Chemically Synthesized
QVQLQESGGGLVQAGGSLRLSCAASGYISGTYYMGWYRQAPGKERELVASITNGGTITYYADSVKGRFTISRDNAKNTVYLQMNSLKPEDTAVYYCAAPITVEYVDYYVLDGGFLYWGQGTQVTVSS

SEQ ID NO: 5069 - protein, 119 aa, Artificial Sequence
  Chemically Synthesized
QVQLQESGGGLVQAGGSLRLSCAASGYIFYRVLMGWYRQAPGKEREFVATISGGGNTNYADSVKGRFTISRDNAKNTVYLQMNSLKPEDTAVYYCAAVTRSWYYRYGYWGQGTQVTVSS

SEQ ID NO: 5070 - protein, 121 aa, Artificial Sequence
  Chemically Synthesized
QVQLQESGGGLVQAGGSLRLSCAASGSISRTFYMGWYRQAPGKERELVATIAGGASTNYADSVKGRFTISRDNAKNTVYLQMNSLKPEDTAVYYCAAYGRYYGYYRHRRYWGQGTQVTVSS

SEQ ID NO: 5071 - protein, 122 aa, Artificial Sequence
  Chemically Synthesized
QVQLQESGGGLVQAGGSLRLSCAASGSIFFYVDMGWYRQAPGKERELVAAIGGGTNTYYADSVKGRFTISRDNAKNTVYLQMNSLKPEDTAVYYCAVQWLSSYGLFSYLGYWGQGTQVTVSS

SEQ ID NO: 5072 - protein, 118 aa, Artificial Sequence
  Chemically Synthesized
QVQLQESGGGLVQAGGSLRLSCAASGNIFPAWDMGWYRQAPGKEREFVPLLVTVVVPYADSVKGRFTISRDNAKNTVYLQMNSLKPEDTAVYYCAVDSSQSSPGYYYWGQGTQVTVSS

SEQ ID NO: 5073 - protein, 118 aa, Artificial Sequence
  Chemically Synthesized
QVQLQESGGGLVQAGGSLRLSCAASGTISWFVYMGWYRQAPGKEREFVAGISYGGTTNYADSVKGRFTISRDNAKNTVYLQMNSLKPEDTAVYYCAVGYIARTLFYYWGQGTQVTVSS

SEQ ID NO: 5074 - protein, 126 aa, Artificial Sequence
  Chemically Synthesized
QVQLQESGGGLVQAGGSLRLSCAASGSIFSRSDMGWYRQAPGKERELVATITLGSITNYADSVKGRFTISRDNAKNTVYLQMNSLKPEDTAVYYCAVNLYYYTAYLGYDVDPLTYWGQGTQVTVSS

SEQ ID NO: 5075 - protein, 118 aa, Artificial Sequence
  Chemically Synthesized
QVQLQESGGGLVQAGGSLRLSCAASGSISVSYYMGWYRQAPGKEREFVAGIAYGTTTNYADSVKGRFTISRDNAKNTVYLQMNSLKPEDTAVYYCAVGSALYGWYRYWGQGTQVTVSS

SEQ ID NO: 5076 - protein, 118 aa, Artificial Sequence
  Chemically Synthesized
QVQLQESGGGLVQAGGSLRLSCAASGTISYAILMGWYRQAPGKEREFVAAISQGGSTYYADSVKGRFTISRDNAKNTVYLQMNSLKPEDTAVYYCAVYVYDRYQYDYWGQGTQVTVSS

SEQ ID NO: 5077 - protein, 122 aa, Artificial Sequence
  Chemically Synthesized
QVQLQESGGGLVQAGGSLRLSCAASGNIFYYTWMGWYRQAPGKERELVAAISGGASTNYADSVKGRFTISRDNAKNTVYLQMNSLKPEDTAVYYCAVSYGDDYLGAPFYDYWGQGTQVTVSS

SEQ ID NO: 5078 - protein, 118 aa, Artificial Sequence
  Chemically Synthesized
QVQLQESGGGLVQAGGSLRLSCAASGYISNRLYMGWYRQAPGKEREFVATIGYGTNTYYADSVKGRFTISRDNAKNTVYLQMNSLKPEDTAVYYCAASGRYGIYYKYWGQGTQVTVSS

SEQ ID NO: 5079 - protein, 126 aa, Artificial Sequence
  Chemically Synthesized
QVQLQESGGGLVQAGGSLRLSCAASGSIFIRVGMGWYRQAPGKERELVAAINDGSSTNYADSVKGRFTISRDNAKNTVYLQMNSLKPEDTAVYYCAAGRRKQVKYGGYTTAYHDYWGQGTQVTVSS

SEQ ID NO: 5080 - protein, 123 aa, Artificial Sequence
  Chemically Synthesized
QVQLQESGGGLVQAGGSLRLSCAASGYILLMGWYRQAPGKEREFVAAISQGTSTNYADSVKGRFTISRDNAKNTVYLQMNSLKPEDTAVYYCAVASNTHRIWGSWFYRPFAYWGQGTQVTVSS

SEQ ID NO: 5081 - protein, 122 aa, Artificial Sequence
  Chemically Synthesized
QVQLQESGGGLVQAGGSLRLSCAASGTISGNFYMGWYRQAPGKEREFVAAIGIGSITNYADSVKGRFTISRDNAKNTVYLQMNSLKPEDTAVYYCAVDGTAGSVAVDKLVYWGQGTQVTVSS

SEQ ID NO: 5082 - protein, 126 aa, Artificial Sequence
  Chemically Synthesized
QVQLQESGGGLVQAGGSLRLSCAASGYIFVYYPMGWYRQAPGKERELVASITVGTSTYYADSVKGRFTISRDNAKNTVYLQMNSLKPEDTAVYYCAVTQVKGPGALDVPSERYYYWGQGTQVTVSS

SEQ ID NO: 5083 - protein, 121 aa, Artificial Sequence
  Chemically Synthesized
QVQLQESGGGLVQAGGSLRLSCAASGTISTSVMGWYRQAPGKERELVAAISSGTSTYYADSVKGRFTISRDNAKNTVYLQMNSLKPEDTAVYYCAAPNDDADSGDGYHAYWGQGTQVTVSS

SEQ ID NO: 5084 - protein, 118 aa, Artificial Sequence
  Chemically Synthesized
QVQLQESGGGLVQAGGSLRLSCAASGNIFQITDMGWYRQAPGKERELVASIDQGTSTYYADSVKGRFTISRDNAKNTVYLQMNSLKPEDTAVYYCAVDDHGQHGLYYWGQGTQVTVSS

SEQ ID NO: 5085 - protein, 118 aa, Artificial Sequence
  Chemically Synthesized
QVQLQESGGGLVQAGGSLRLSCAASGYISYDGYMGWYRQAPGKERELVAAIGTGTSTYYADSVKGRFTISRDNAKNTVYLQMNSLKPEDTAVYYCAVYLVYNLFLAYWGQGTQVTVSS

SEQ ID NO: 5086 - protein, 118 aa, Artificial Sequence
  Chemically Synthesized
QVQLQESGGGLVQAGGSLRLSCAASGTIFTALVMGWYRQAPGKEREFVAGITVGAITNYADSVKGRFTISRDNAKNTVYLQMNSLKPEDTAVYYCAVYVPRARDLSYWGQGTQVTVSS

SEQ ID NO: 5087 - protein, 122 aa, Artificial Sequence
  Chemically Synthesized
QVQLQESGGGLVQAGGSLRLSCAASGYIFRWAYMGWYRQAPGKERELVASINGGANTNYADSVKGRFTISRDNAKNTVYLQMNSLKPEDTAVYYCAVWRPYRYLWTPYLYYWGQGTQVTVSS

SEQ ID NO: 5088 - protein, 118 aa, Artificial Sequence
  Chemically Synthesized
QVQLQESGGGLVQAGGSLRLSCAASGSIFSYLTMGWYRQAPGKERELVASIDSGTSTYYADSVKGRFTISRDNAKNTVYLQMNSLKPEDTAVYYCAVEGGSAYRHYYWGQGTQVTVSS

SEQ ID NO: 5089 - protein, 126 aa, Artificial Sequence
  Chemically Synthesized
QVQLQESGGGLVQAGGSLRLSCAASGNIFGSGSMGWYRQAPGKEREFVAGIAYGTITYYADSVKGRFTISRDNAKNTVYLQMNSLKPEDTAVYYCAVDKISLYLRTRQRPFPHDYWGQGTQVTVSS

SEQ ID NO: 5090 - protein, 122 aa, Artificial Sequence
  Chemically Synthesized
QVQLQESGGGLVQAGGSLRLSCAASGNISPLIRMGWYRQAPGKEREFVAGIDTGSITYYADSVKGRFTISRDNAKNTVYLQMNSLKPEDTAVYYCAVYKGRGRVNYILHRYWGQGTQVTVSS

SEQ ID NO: 5091 - protein, 117 aa, Artificial Sequence
  Chemically Synthesized
QVQLQESGGGLVQAGGSLRLSCAASGSISVWKDMGWYRQAPGKEREFVAGITYGASTNYADSVKGRFTISRDNAKNTVYLQMNSLKPEDTAVYYCAAYSPQPYFYYWGQGTQVTVSS

SEQ ID NO: 5092 - protein, 111 aa, Artificial Sequence
  Chemically Synthesized
QVQLQESGGGLVQAGGSLRLSCAASGNIFWTYQMGWYRQAPGKEREFVAGIDTGATTNYADSVKGRFTISRDNAKNTVYLQMNSLKPEDTAVYYCAVRFYWGQGTQVTVSS

SEQ ID NO: 5093 - protein, 118 aa, Artificial Sequence
  Chemically Synthesized
QVQLQESGGGLVQAGGSLRLSCAASGNISVTDTMGWYRQAPGKEREFVASIGVGSSTYYADSVKGRFTISRDNAKNTVYLQMNSLKPEDTAVYYCAASTPTDKYHTYWGQGTQVTVSS

SEQ ID NO: 5094 - protein, 119 aa, Artificial Sequence
  Chemically Synthesized
QVQLQESGGGLVQAGGSLRLSCAASGYIFDAPGMGWYRQAPGKERELVAAISAGATTNYADSVKGRFTISRDNAKNTVYLQMNSLKPEDTAVYYCAAYEYHDWDNHIYWGQGTQVTVSS

SEQ ID NO: 5095 - protein, 122 aa, Artificial Sequence
  Chemically Synthesized
QVQLQESGGGLVQAGGSLRLSCAASGYISAPYWMGWYRQAPGKEREFVATINDGSTTNYADSVKGRFTISRDNAKNTVYLQMNSLKPEDTAVYYCAAIAYYSVAGGTTYNYWGQGTQVTVSS

SEQ ID NO: 5096 - protein, 118 aa, Artificial Sequence
  Chemically Synthesized
QVQLQESGGGLVQAGGSLRLSCAASGTIFLLAFMGWYRQAPGKEREFVATISYGASTNYADSVKGRFTISRDNAKNTVYLQMNSLKPEDTAVYYCAADYSGRDYHRYWGQGTQVTVSS

SEQ ID NO: 5097 - protein, 122 aa, Artificial Sequence
  Chemically Synthesized
QVQLQESGGGLVQAGGSLRLSCAASGSIFRRSSMGWYRQAPGKEREFVAGIDAGAITYYADSVKGRFTISRDNAKNTVYLQMNSLKPEDTAVYYCAVVYKYYVSRNGEFPYWGQGTQVTVSS

SEQ ID NO: 5098 - protein, 118 aa, Artificial Sequence
  Chemically Synthesized
QVQLQESGGGLVQAGGSLRLSCAASGYIFDANIMGWYRQAPGKERELVAAIGDGTITYYADSVKGRFTISRDNAKNTVYLQMNSLKPEDTAVYYCAARYAYLRFLQYWGQGTQVTVSS

SEQ ID NO: 5099 - protein, 117 aa, Artificial Sequence
  Chemically Synthesized
QVQLQESGGGLVQAGGSLRLSCAASGTIFRGLDMGWYRQAPGKERELVATINYGSTTYYADSVKGRFTISRDNAKNTVYLQMNSLKPEDTAVYYCAARTTTTLTLYWGQGTQVTVSS

SEQ ID NO: 5100 - protein, 118 aa, Artificial Sequence
  Chemically Synthesized
QVQLQESGGGLVQAGGSLRLSCAASGYISAGRFMGWYRQAPGKERELVAAINRGSTTYYADSVKGRFTISRDNAKNTVYLQMNSLKPEDTAVYYCAAHHWKHRYHTYWGQGTQVTVSS

SEQ ID NO: 5101 - protein, 121 aa, Artificial Sequence
  Chemically Synthesized
QVQLQESGGGLVQAGGSLRLSCAASGYIFGSDGMGWYRQAPGKERELVATINGGTTTNYADSVKGRFTISRDNAKNTVYLQMNSLKPEDTAVYYCAAPGDTDHGTFRSLYWGQGTQVTVSS

SEQ ID NO: 5102 - protein, 118 aa, Artificial Sequence
  Chemically Synthesized
QVQLQESGGGLVQAGGSLRLSCAASGNIFSQHGMGWYRQAPGKERELVATIDDGGITNYADSVKGRFTISRDNAKNTVYLQMNSLKPEDTAVYYCAAHGDADVAHAYWGQGTQVTVSS

SEQ ID NO: 5103 - protein, 128 aa, Artificial Sequence
  Chemically Synthesized
QVQLQESGGGLVQAGGSLRLSCAASGNIFYLRKMGWYRQAPGKERELVASISAGGTTNYADSVKGRFTISRDNAKNTVYLQMNSLKPEDTAVYYCAATRYYYSSKPYYAYSSQSHGYWGQGTQVTVSS

SEQ ID NO: 5104 - protein, 119 aa, Artificial Sequence
  Chemically Synthesized
QVQLQESGGGLVQAGGSLRLSCAASGNIFQTWMGWYRQAPGKEREFVAGIAVGTITNYADSVKGRFTISRDNAKNTVYLQMNSLKPEDTAVYYCAVYYDFRYFWYHTYWGQGTQVTVSS

SEQ ID NO: 5105 - protein, 122 aa, Artificial Sequence
  Chemically Synthesized
QVQLQESGGGLVQAGGSLRLSCAASGTISNSYAMGWYRQAPGKERELVASINTGTNTYYADSVKGRFTISRDNAKNTVYLQMNSLKPEDTAVYYCAVVIGSDYDSLTFLYYWGQGTQVTVSS

SEQ ID NO: 5106 - protein, 126 aa, Artificial Sequence
  Chemically Synthesized
QVQLQESGGGLVQAGGSLRLSCAASGTIFARTYMGWYRQAPGKERELVASITYGANTNYADSVKGRFTISRDNAKNTVYLQMNSLKPEDTAVYYCAAYAGGAYTPRDWILLYHVYWGQGTQVTVSS

SEQ ID NO: 5107 - protein, 122 aa, Artificial Sequence
  Chemically Synthesized
QVQLQESGGGLVQAGGSLRLSCAASGYISWRRTMGWYRQAPGKEREFVATINTGSITNYADSVKGRFTISRDNAKNTVYLQMNSLKPEDTAVYYCAVYRWLYRNGDDPLGYWGQGTQVTVSS

SEQ ID NO: 5108 - protein, 117 aa, Artificial Sequence
  Chemically Synthesized
QVQLQESGGGLVQAGGSLRLSCAASGYIFGWVFMGWYRQAPGKERELVAGIGKGGNYYADSVKGRFTISRDNAKNTVYLQMNSLKPEDTAVYYCAVHTKWRRVHWYWGQGTQVTVSS

SEQ ID NO: 5109 - protein, 118 aa, Artificial Sequence
  Chemically Synthesized
QVQLQESGGGLVQAGGSLRLSCAASGNISDVYTMGWYRQAPGKERELVATIGDGGTTNYADSVKGRFTISRDNAKNTVYLQMNSLKPEDTAVYYCAVFIRDISWLQYWGQGTQVTVSS

SEQ ID NO: 5110 - protein, 118 aa, Artificial Sequence
  Chemically Synthesized
QVQLQESGGGLVQAGGSLRLSCAASGTIFVSRAMGWYRQAPGKERELVAAISRGGNTYYADSVKGRFTISRDNAKNTVYLQMNSLKPEDTAVYYCAVNVRSVRLFTYWGQGTQVTVSS

SEQ ID NO: 5111 - protein, 122 aa, Artificial Sequence
  Chemically Synthesized
QVQLQESGGGLVQAGGSLRLSCAASGTIFAYRPMGWYRQAPGKERELVAAIAKGSTTYYADSVKGRFTISRDNAKNTVYLQMNSLKPEDTAVYYCAVYLPYGYYRSRYHPYWGQGTQVTVSS

SEQ ID NO: 5112 - protein, 126 aa, Artificial Sequence
  Chemically Synthesized
QVQLQESGGGLVQAGGSLRLSCAASGYISDLYDMGWYRQAPGKERELVATISQGATTYYADSVKGRFTISRDNAKNTVYLQMNSLKPEDTAVYYCAVYDEGQYYVWAWHGRTHSYWGQGTQVTVSS

SEQ ID NO: 5113 - protein, 120 aa, Artificial Sequence
  Chemically Synthesized
QVQLQESGGGLVQAGGSLRLSCAASGSISLVPYMGWYRQAPGKEREFVATITDGANTNYADSVKGRFTISRDNAKNTVYLQMNSLKPEDTAVYYCALVTLLTTTTVRIYWGQGTQVTVSS

SEQ ID NO: 5114 - protein, 118 aa, Artificial Sequence
  Chemically Synthesized
QVQLQESGGGLVQAGGSLRLSCAASGTIFDSLYMGWYRQAPGKERELVASITDGATTYYADSVKGRFTISRDNAKNTVYLQMNSLKPEDTAVYYCAATRGAPYDHDYWGQGTQVTVSS

SEQ ID NO: 5115 - protein, 118 aa, Artificial Sequence
  Chemically Synthesized
QVQLQESGGGLVQAGGSLRLSCAASGYISAAGDMGWYRQAPGKEREFVATIASGTNTYYADSVKGRFTISRDNAKNTVYLQMNSLKPEDTAVYYCAVHDRRKSVFGYWGQGTQVTVSS

SEQ ID NO: 5116 - protein, 118 aa, Artificial Sequence
  Chemically Synthesized
QVQLQESGGGLVQAGGSLRLSCAASGNISPSYVMGWYRQAPGKEREFVAAIGGGSSTNYADSVKGRFTISRDNAKNTVYLQMNSLKPEDTAVYYCAARYLFTYSYSYWGQGTQVTVSS

SEQ ID NO: 5117 - protein, 118 aa, Artificial Sequence
  Chemically Synthesized
QVQLQESGGGLVQAGGSLRLSCAASGTISTDGIMGWYRQAPGKERELVAAIGPGTNTYYADSVKGRFTISRDNAKNTVYLQMNSLKPEDTAVYYCAAYTTTGPVYAYWGQGTQVTVSS

SEQ ID NO: 5118 - protein, 122 aa, Artificial Sequence
  Chemically Synthesized
QVQLQESGGGLVQAGGSLRLSCAASGYIFWPSYMGWYRQAPGKEREFVAGIALGAITNYADSVKGRFTISRDNAKNTVYLQMNSLKPEDTAVYYCAATRYGRWIDNTPFQYWGQGTQVTVSS

SEQ ID NO: 5119 - protein, 122 aa, Artificial Sequence
  Chemically Synthesized
QVQLQESGGGLVQAGGSLRLSCAASGNISYLSVMGWYRQAPGKERELVAAITAGGNTYYADSVKGRFTISRDNAKNTVYLQMNSLKPEDTAVYYCAVTVQRTWYQRHAHSYWGQGTQVTVSS

SEQ ID NO: 5120 - protein, 118 aa, Artificial Sequence
  Chemically Synthesized
QVQLQESGGGLVQAGGSLRLSCAASGNISTREIMGWYRQAPGKERELVASIGTGANTYYADSVKGRFTISRDNAKNTVYLQMNSLKPEDTAVYYCAVFHYSYVYYFYWGQGTQVTVSS

SEQ ID NO: 5121 - protein, 118 aa, Artificial Sequence
  Chemically Synthesized
QVQLQESGGGLVQAGGSLRLSCAASGTIFDSPFMGWYRQAPGKERELVAGISIGSTTYYADSVKGRFTISRDNAKNTVYLQMNSLKPEDTAVYYCAAGYQYYEGHNYWGQGTQVTVSS

SEQ ID NO: 5122 - protein, 121 aa, Artificial Sequence
  Chemically Synthesized
QVQLQESGGGLVQAGGSLRLSCAASGSIFSSVMGWYRQAPGKEREFVAAISFGGSTYYADSVKGRFTISRDNAKNTVYLQMNSLKPEDTAVYYCAVARSYNDANDTIFQYWGQGTQVTVSS

SEQ ID NO: 5123 - protein, 122 aa, Artificial Sequence
  Chemically Synthesized
QVQLQESGGGLVQAGGSLRLSCAASGYISPWQTMGWYRQAPGKEREFVATIGYGGSTYYADSVKGRFTISRDNAKNTVYLQMNSLKPEDTAVYYCAVNYWGWYSVAIRHQYWGQGTQVTVSS

SEQ ID NO: 5124 - protein, 122 aa, Artificial Sequence
  Chemically Synthesized
QVQLQESGGGLVQAGGSLRLSCAASGYISYAGYMGWYRQAPGKERELVAAISLGANTYYADSVKGRFTISRDNAKNTVYLQMNSLKPEDTAVYYCAAGRRYQPWYRTVFFYWGQGTQVTVSS

SEQ ID NO: 5125 - protein, 118 aa, Artificial Sequence
  Chemically Synthesized
QVQLQESGGGLVQAGGSLRLSCAASGNISNQARMGWYRQAPGKERELVATISYGGSTYYADSVKGRFTISRDNAKNTVYLQMNSLKPEDTAVYYCAVADSYDSGFGYWGQGTQVTVSS

SEQ ID NO: 5126 - protein, 116 aa, Artificial Sequence
  Chemically Synthesized
QVQLQESGGGLVQAGGSLRLSCAASGNISTRMGWYRQAPGKEREFVASIGNGGNTYYADSVKGRFTISRDNAKNTVYLQMNSLKPEDTAVYYCAVRPYWTAYHRYWGQGTQVTVSS

SEQ ID NO: 5127 - protein, 121 aa, Artificial Sequence
  Chemically Synthesized
QVQLQESGGGLVQAGGSLRLSCAASGSIFTAFPMGWYRQAPGKERELVATIDLVLLPYADSVKGRFTISRDNAKNTVYLQMNSLKPEDTAVYYCAVDDPNTGYYYQLYGYWGQGTQVTVSS

SEQ ID NO: 5128 - protein, 122 aa, Artificial Sequence
  Chemically Synthesized
QVQLQESGGGLVQAGGSLRLSCAASGYIFRKYVMGWYRQAPGKEREFVAAIGGGASTYYADSVKGRFTISRDNAKNTVYLQMNSLKPEDTAVYYCAVITYKAVHGTRYFWYWGQGTQVTVSS

SEQ ID NO: 5129 - protein, 115 aa, Artificial Sequence
  Chemically Synthesized
QVQLQESGGGLVQAGGSLRLSCAASGNISALPYMGWYRQAPGKERELVASITIGGITYYADSVKGRFTISRDNAKNTVYLQMNSLKPEDTAVYYCAAGRDYLSYWGQGTQVTVSS

SEQ ID NO: 5130 - protein, 118 aa, Artificial Sequence
  Chemically Synthesized
QVQLQESGGGLVQAGGSLRLSCAASGNISDGTYMGWYRQAPGKEREFVAGIDFGTNTYYADSVKGRFTISRDNAKNTVYLQMNSLKPEDTAVYYCAALLTDQWQYLYWGQGTQVTVSS

SEQ ID NO: 5131 - protein, 126 aa, Artificial Sequence
  Chemically Synthesized
QVQLQESGGGLVQAGGSLRLSCAASGSIFRVWTMGWYRQAPGKEREFVASIARGSITNYADSVKGRFTISRDNAKNTVYLQMNSLKPEDTAVYYCAVDWLAAITRTSTAWPYLFYWGQGTQVTVSS

SEQ ID NO: 5132 - protein, 122 aa, Artificial Sequence
  Chemically Synthesized
QVQLQESGGGLVQAGGSLRLSCAASGYIFYVSSMGWYRQAPGKERELVASIDYGTITYYADSVKGRFTISRDNAKNTVYLQMNSLKPEDTAVYYCAVRNFYEQWAGIPLSYWGQGTQVTVSS

SEQ ID NO: 5133 - protein, 118 aa, Artificial Sequence
  Chemically Synthesized
QVQLQESGGGLVQAGGSLRLSCAASGNIFYYWTMGWYRQAPGKEREFVASISTGTTTNYADSVKGRFTISRDNAKNTVYLQMNSLKPEDTAVYYCAWILWYRYHHYYWGQGTQVTVSS

SEQ ID NO: 5134 - protein, 118 aa, Artificial Sequence
  Chemically Synthesized
QVQLQESGGGLVQAGGSLRLSCAASGNISYRLYMGWYRQAPGKEREFVAGITRGGNTYYADSVKGRFTISRDNAKNTVYLQMNSLKPEDTAVYYCAAFRVYRSILDYWGQGTQVTVSS

SEQ ID NO: 5135 - protein, 125 aa, Artificial Sequence
  Chemically Synthesized
QVQLQESGGGLVQAGGSLRLSCAASGYIFDTGDMGWYRQAPGKERELVATITLGSNTYYADSVKGRFTISRDNAKNTVYLQMNSLKPEDTAVYYCAATYVPVSLVLMTRRLPLYWGQGTQVTVSS

SEQ ID NO: 5136 - protein, 118 aa, Artificial Sequence
  Chemically Synthesized
QVQLQESGGGLVQAGGSLRLSCAASGNISSPSDMGWYRQAPGKEREFVAGIDWGTNTNYADSVKGRFTISRDNAKNTVYLQMNSLKPEDTAVYYCAAISRSQDVHYYWGQGTQVTVSS

SEQ ID NO: 5137 - protein, 118 aa, Artificial Sequence
  Chemically Synthesized
QVQLQESGGGLVQAGGSLRLSCAASGSISWKYSMGWYRQAPGKEREFVAAISGGGSTYYADSVKGRFTISRDNAKNTVYLQMNSLKPEDTAVYYCAARHHWNYYFRYWGQGTQVTVSS

SEQ ID NO: 5138 - protein, 121 aa, Artificial Sequence
  Chemically Synthesized
QVQLQESGGGLVQAGGSLRLSCAASGSTDYRAMGWYRQAPGKEREFVAGIGQGATTYYADSVKGRFTISRDNAKNTVYLQMNSLKPEDTAVYYCAAYGYYRLPYVDYHSYWGQGTQVTVSS

SEQ ID NO: 5139 - protein, 118 aa, Artificial Sequence
  Chemically Synthesized
QVQLQESGGGLVQAGGSLRLSCAASGSISGEYYMGWYRQAPGKERELVASIGYGGITNYADSVKGRFTISRDNAKNTVYLQMNSLKPEDTAVYYCAAYRELDAFHPYWGQGTQVTVSS

SEQ ID NO: 5140 - protein, 122 aa, Artificial Sequence
  Chemically Synthesized
QVQLQESGGGLVQAGGSLRLSCAASGNISYFRRMGWYRQAPGKEREFVAAINWGANTNYADSVKGRFTISRDNAKNTVYLQMNSLKPEDTAVYYCAAGRIRSWGGTAPHTYWGQGTQVTVSS

SEQ ID NO: 5141 - protein, 122 aa, Artificial Sequence
  Chemically Synthesized
QVQLQESGGGLVQAGGSLRLSCAASGYISDYRIMGWYRQAPGKERELVAGITRGTSTYYADSVKGRFTISRDNAKNTVYLQMNSLKPEDTAVYYCAVYRGKVYWSSFYYAYWGQGTQVTVSS

SEQ ID NO: 5142 - protein, 122 aa, Artificial Sequence
  Chemically Synthesized
QVQLQESGGGLVQAGGSLRLSCAASGTIFVNGFMGWYRQAPGKERELVAGISSGTSTNYADSVKGRFTISRDNAKNTVYLQMNSLKPEDTAVYYCAVQVEDGYKLYRIHQYWGQGTQVTVSS

SEQ ID NO: 5143 - protein, 125 aa, Artificial Sequence
  Chemically Synthesized
QVQLQESGGGLVQAGGSLRLSCAASGTIFAFDAMGWYRQAPGKEREFVAGINSGASTYYADSVKGRFTISRDNAKNTVYLQMNSLKPEDTAVYYCALTGNWYRGYRFRYWQLYYWGQGTQVTVSS

SEQ ID NO: 5144 - protein, 117 aa, Artificial Sequence
  Chemically Synthesized
QVQLQESGGGLVQAGGSLRLSCAASGNISAGYGMGWYRQAPGKEREFVAGIGYGASTNYADSVKGRFTISRDNAKNTVYLQMNSLKPEDTAVYYCAAYSRLTWVMYWGQGTQVTVSS

SEQ ID NO: 5145 - protein, 118 aa, Artificial Sequence
  Chemically Synthesized
QVQLQESGGGLVQAGGSLRLSCAASGTIFTQYTMGWYRQAPGKEREFVATIDLGGTTNYADSVKGRFTISRDNAKNTVYLQMNSLKPEDTAVYYCAAYRQGAIDLVYWGQGTQVTVSS

SEQ ID NO: 5146 - protein, 126 aa, Artificial Sequence
  Chemically Synthesized
QVQLQESGGGLVQAGGSLRLSCAASGYISYPPGMGWYRQAPGKERELVATIDIGGNTYYADSVKGRFTISRDNAKNTVYLQMNSLKPEDTAVYYCAVRWYGDGRKYGTLYYLHAYWGQGTQVTVSS

SEQ ID NO: 5147 - protein, 125 aa, Artificial Sequence
  Chemically Synthesized
QVQLQESGGGLVQAGGSLRLSCAASGNIFDLTYMGWYRQAPGKERELVAGIGYGAITNYADSVKGRFTISRDNAKNTVYLQMNSLKPEDTAVYYCAASWWPWDDSKAPLVIFPYWGQGTQVTVSS

SEQ ID NO: 5148 - protein, 118 aa, Artificial Sequence
  Chemically Synthesized
QVQLQESGGGLVQAGGSLRLSCAASGYIFRQRYMGWYRQAPGKERELVAGISIGGSTYYADSVKGRFTISRDNAKNTVYLQMNSLKPEDTAVYYCAVRGRGFLSLLYWGQGTQVTVSS

SEQ ID NO: 5149 - protein, 126 aa, Artificial Sequence
  Chemically Synthesized
QVQLQESGGGLVQAGGSLRLSCAASGNIFPWFVMGWYRQAPGKERELVATIAYGSITNYADSVKGRFTISRDNAKNTVYLQMNSLKPEDTAVYYCAAPRPIYGSYAWRLASQHLYWGQGTQVTVSS

SEQ ID NO: 5150 - protein, 126 aa, Artificial Sequence
  Chemically Synthesized
QVQLQESGGGLVQAGGSLRLSCAASGTIFLYTKMGWYRQAPGKERELVATIDLGSITNYADSVKGRFTISRDNAKNTVYLQMNSLKPEDTAVYYCAAGVYSPDWGDLYPRPYLLYWGQGTQVTVSS

SEQ ID NO: 5151 - protein, 121 aa, Artificial Sequence
  Chemically Synthesized
QVQLQESGGGLVQAGGSLRLSCAASGSISRTFSMGWYRQAPGKERELVAGIANGTTTYYADSVKGRFTISRDNAKNTVYLQMNSLKPEDTAVYYCAAGYRFRYWYSKLRYWGQGTQVTVSS

SEQ ID NO: 5152 - protein, 118 aa, Artificial Sequence
  Chemically Synthesized
QVQLQESGGGLVQAGGSLRLSCAASGNISYLRYMGWYRQAPGKERELVAAIAYGASTNYADSVKGRFTISRDNAKNTVYLQMNSLKPEDTAVYYCAVVPRRRRSFVYWGQGTQVTVSS

SEQ ID NO: 5153 - protein, 122 aa, Artificial Sequence
  Chemically Synthesized
QVQLQESGGGLVQAGGSLRLSCAASGNIFDYWAMGWYRQAPGKERELVAGINNGAITYYADSVKGRFTISRDNAKNTVYLQMNSLKPEDTAVYYCAASSLLLGNDLTNHQYWGQGTQVTVSS

SEQ ID NO: 5154 - protein, 121 aa, Artificial Sequence
  Chemically Synthesized
QVQLQESGGGLVQAGGSLRLSCAASGSISPRQYMGWYRQAPGKERELVAAITRGAITNYADSVKGRFTISRDNAKNTVYLQMNSLKPEDTAVYYCAANGTFCVCRLNVLYWGQGTQVTVSS

SEQ ID NO: 5155 - protein, 122 aa, Artificial Sequence
  Chemically Synthesized
QVQLQESGGGLVQAGGSLRLSCAASGTIFRGPIMGWYRQAPGKEREFVASINEGASTNYADSVKGRFTISRDNAKNTVYLQMNSLKPEDTAVYYCAVRSGYYAYLSHSYDYWGQGTQVTVSS

SEQ ID NO: 5156 - protein, 121 aa, Artificial Sequence
  Chemically Synthesized
QVQLQESGGGLVQAGGSLRLSCAASGNIFYLYMGWYRQAPGKEREFVAGITDGATTYYADSVKGRFTISRDNAKNTVYLQMNSLKPEDTAVYYCAADSRYPRYSYPDYDYWGQGTQVTVSS

SEQ ID NO: 5157 - protein, 118 aa, Artificial Sequence
  Chemically Synthesized
QVQLQESGGGLVQAGGSLRLSCAASGSISQGSNMGWYRQAPGKEREFVASINPGATTYYADSVKGRFTISRDNAKNTVYLQMNSLKPEDTAVYYCAAGTGPSAGFPYWGQGTQVTVSS

SEQ ID NO: 5158 - protein, 118 aa, Artificial Sequence
  Chemically Synthesized
QVQLQESGGGLVQAGGSLRLSCAASGTIFRRGAMGWYRQAPGKEREFVAAIATGAITYYADSVKGRFTISRDNAKNTVYLQMNSLKPEDTAVYYCAATYYRLRGHPYWGQGTQVTVSS

SEQ ID NO: 5159 - protein, 117 aa, Artificial Sequence
  Chemically Synthesized
QVQLQESGGGLVQAGGSLRLSCAASGSISVDVRMGWYRQAPGKERELVAAINTGSTTYADSVKGRFTISRDNAKNTVYLQMNSLKPEDTAVYYCAVAAYRYHYYQYWGQGTQVTVSS

SEQ ID NO: 5160 - protein, 117 aa, Artificial Sequence
  Chemically Synthesized
QVQLQESGGGLVQAGGSLRLSCAASGTISAPDPMGWYRQAPGKERELVAAIGSGTTTNYADSVKGRFTISRDNAKNTVYLQMNSLKPEDTAVYYCAVEHYQSLTMYWGQGTQVTVSS

SEQ ID NO: 5161 - protein, 118 aa, Artificial Sequence
  Chemically Synthesized
QVQLQESGGGLVQAGGSLRLSCAASGYISQSFEMGWYRQAPGKEREFVAGIDYGASTYYADSVKGRFTISRDNAKNTVYLQMNSLKPEDTAVYYCAVFRQYDPTHVYWGQGTQVTVSS

SEQ ID NO: 5162 - protein, 126 aa, Artificial Sequence
  Chemically Synthesized
QVQLQESGGGLVQAGGSLRLSCAASGNISYIHDMGWYRQAPGKEREFVAGIASGTITNYADSVKGRFTISRDNAKNTVYLQMNSLKPEDTAVYYCAARPQKTKYLAYLATGPLLYWGQGTQVTVSS

SEQ ID NO: 5163 - protein, 122 aa, Artificial Sequence
  Chemically Synthesized
QVQLQESGGGLVQAGGSLRLSCAASGNISARLGMGWYRQAPGKEREFVAGITGGSITNYADSVKGRFTISRDNAKNTVYLQMNSLKPEDTAVYYCAADYWPNRFGYAYHDYWGQGTQVTVSS

SEQ ID NO: 5164 - protein, 121 aa, Artificial Sequence
  Chemically Synthesized
QVQLQESGGGLVQAGGSLRLSCAASGNISGYPAMGWYRQAPGKEREFVATIGAGSTTYYADSVKGRFTISRDNAKNTVYLQMNSLKPEDTAVYYCAVPDHSTVRTLLVMYWGQGTQVTVSS

SEQ ID NO: 5165 - protein, 118 aa, Artificial Sequence
  Chemically Synthesized
QVQLQESGGGLVQAGGSLRLSCAASGSISHSRTMGWYRQAPGKERELVAAINSGGSTNYADSVKGRFTISRDNAKNTVYLQMNSLKPEDTAVYYCAVSRRYLRTYVYWGQGTQVTVSS

SEQ ID NO: 5166 - protein, 121 aa, Artificial Sequence
  Chemically Synthesized
QVQLQESGGGLVQAGGSLRLSCAASGTIFGYGKMGWYRQAPGKEREFVAGITGGNTNYADSVKGRFTISRDNAKNTVYLQMNSLKPEDTAVYYCAVQYRYFPYYRYRYRYWGQGTQVTVSS

SEQ ID NO: 5167 - protein, 122 aa, Artificial Sequence
  Chemically Synthesized
QVQLQESGGGLVQAGGSLRLSCAASGTISRLYYMGWYRQAPGKERELVAAISRGGSTYYADSVKGRFTISRDNAKNTVYLQMNSLKPEDTAVYYCAVVPRYFYINDLDLAYWGQGTQVTVSS

SEQ ID NO: 5168 - protein, 111 aa, Artificial Sequence
  Chemically Synthesized
QVQLQESGGGLVQAGGSLRLSCAASGNISQDQVMGWYRQAPGKERELVAAITRGTSTYYADSVKGRFTISRDNAKNTVYLQMNSLKPEDTAVYYCAVPSYWGQGTQVTVSS

SEQ ID NO: 5169 - protein, 117 aa, Artificial Sequence
  Chemically Synthesized
QVQLQESGGGLVQAGGSLRLSCAASGYIFDTVNMGWYRQAPGKEREFVASIGGGGSTNYADSVKGRFTISRDNAKNTVYLQMNSLKPEDTAVYYCAALTAAYLSIYWGQGTQVTVSS

SEQ ID NO: 5170 - protein, 112 aa, Artificial Sequence
  Chemically Synthesized
QVQLQESGGGLVQAGGSLRLSCAASGTIFSGVIMGWYRQAPGKERELVAAIANGSTTNYADSVKGRFTISRDNAKNTVYLQMNSLKPEDTAVYYCAAHERYWGQGTQVTVSS

SEQ ID NO: 5171 - protein, 125 aa, Artificial Sequence
  Chemically Synthesized
QVQLQESGGGLVQAGGSLRLSCAASGTISYLDFMGWYRQAPGKERELVAGIGHGAITNYADSVKGRFTISRDNAKNTVYLQMNSLKPEDTAVYYCAAKYDFDYDDRSLTLVTLYWGQGTQVTVSS

SEQ ID NO: 5172 - protein, 122 aa, Artificial Sequence
  Chemically Synthesized
QVQLQESGGGLVQAGGSLRLSCAASGYISGTDFMGWYRQAPGKEREFVAGITRGTTTNYADSVKGRFTISRDNAKNTVYLQMNSLKPEDTAVYYCAVLDYEDWNLPNSHPYWGQGTQVTVSS

SEQ ID NO: 5173 - protein, 111 aa, Artificial Sequence
  Chemically Synthesized
QVQLQESGGGLVQAGGSLRLSCAASGSISYRRDMGWYRQAPGKERELVAGIGSGGITYYADSVKGRFTISRDNAKNTVYLQMNSLKPEDTAVYYCAVRIYWGQGTQVTVSS

SEQ ID NO: 5174 - protein, 118 aa, Artificial Sequence
  Chemically Synthesized
QVQLQESGGGLVQAGGSLRLSCAASGSIFWPTGMGWYRQAPGKERELVAAIAIGASTNYADSVKGRFTISRDNAKNTVYLQMNSLKPEDTAVYYCAAYYYHHVPHYYWGQGTQVTVSS

SEQ ID NO: 5175 - protein, 118 aa, Artificial Sequence
  Chemically Synthesized
QVQLQESGGGLVQAGGSLRLSCAASGSIFHRLLMGWYRQAPGKEREFVASISWGGNTNYADSVKGRFTISRDNAKNTVYLQMNSLKPEDTAVYYCAAVHAIYRLFPYWGQGTQVTVSS

SEQ ID NO: 5176 - protein, 121 aa, Artificial Sequence
  Chemically Synthesized
QVQLQESGGGLVQAGGSLRLSCAASGSIFPTEVMGWYRQAPGKEREFVAGIDGGTNTYYADSVKGRFTISRDNAKNTVYLQMNSLKPEDTAVYYCAAGIPDWDYPSFCLYWGQGTQVTVSS

SEQ ID NO: 5177 - protein, 121 aa, Artificial Sequence
  Chemically Synthesized
QVQLQESGGGLVQAGGSLRLSCAASGSILPGPMGWYRQAPGKERELVAGIAAGGNTNYADSVKGRFTISRDNAKNTVYLQMNSLKPEDTAVYYCAVYYFWISYGSRRHYYWGQGTQVTVSS

SEQ ID NO: 5178 - protein, 118 aa, Artificial Sequence
  Chemically Synthesized
QVQLQESGGGLVQAGGSLRLSCAASGYIFQYDYMGWYRQAPGKERELVATIAAGAITYYADSVKGRFTISRDNAKNTVYLQMNSLKPEDTAVYYCAAGQYSSLLYDYWGQGTQVTVSS

SEQ ID NO: 5179 - protein, 118 aa, Artificial Sequence
  Chemically Synthesized
QVQLQESGGGLVQAGGSLRLSCAASGTISQDIIMGWYRQAPGKEREFVAAITRGGTTYYADSVKGRFTISRDNAKNTVYLQMNSLKPEDTAVYYCAAQYLYWQYFDYWGQGTQVTVSS

SEQ ID NO: 5180 - protein, 117 aa, Artificial Sequence
  Chemically Synthesized
QVQLQESGGGLVQAGGSLRLSCAASGSIFLEYIMGWYRQAPGKERELVAGITAGSSTNYADSVKGRFTISRDNAKNTVYLQMNSLKPEDTAVYYCAAYYYGRASIYWGQGTQVTVSS

SEQ ID NO: 5181 - protein, 118 aa, Artificial Sequence
  Chemically Synthesized
QVQLQESGGGLVQAGGSLRLSCAASGTISLGRSMGWYRQAPGKERELVASINEGGITYYADSVKGRFTISRDNAKNTVYLQMNSLKPEDTAVYYCAAEYQPDGDLHYWGQGTQVTVSS

SEQ ID NO: 5182 - protein, 125 aa, Artificial Sequence
  Chemically Synthesized
QVQLQESGGGLVQAGGSLRLSCAASGNISVYDPMGWYRQAPGKEREFVATIDQGATTNYADSVKGRFTISRDNAKNTVYLQMNSLKPEDTAVYYCAASLTVVTLFWLFVRNSLYWGQGTQVTVSS

SEQ ID NO: 5183 - protein, 117 aa, Artificial Sequence
  Chemically Synthesized
QVQLQESGGGLVQAGGSLRLSCAASGNISVRGDMGWYRQAPGKEREFVATLILVLVPYADSVKGRFTISRDNAKNTVYLQMNSLKPEDTAVYYCAVVNVLTLDLGYWGQGTQVTVSS

SEQ ID NO: 5184 - protein, 118 aa, Artificial Sequence
  Chemically Synthesized
QVQLQESGGGLVQAGGSLRLSCAASGTISIVTDMGWYRQAPGKERELVAAIDGGSNTYYADSVKGRFTISRDNAKNTVYLQMNSLKPEDTAVYYCAASDSQSGYYDYWGQGTQVTVSS

SEQ ID NO: 5185 - protein, 122 aa, Artificial Sequence
  Chemically Synthesized
QVQLQESGGGLVQAGGSLRLSCAASGNISLEVDMGWYRQAPGKEREFVASITRGGTTYYADSVKGRFTISRDNAKNTVYLQMNSLKPEDTAVYYCAVVYTYGDTDGLDHSYWGQGTQVTVSS

SEQ ID NO: 5186 - protein, 118 aa, Artificial Sequence
  Chemically Synthesized
QVQLQESGGGLVQAGGSLRLSCAASGNISAYHYMGWYRQAPGKERELVATITDGSTTYYADSVKGRFTISRDNAKNTVYLQMNSLKPEDTAVYYCAVRPNGPSTYWYWGQGTQVTVSS

SEQ ID NO: 5187 - protein, 116 aa, Artificial Sequence
  Chemically Synthesized
QVQLQESGGGLVQAGGSLRLSCAASGSILMGWYRQAPGKEREFVAAISDGTNTYYADSVKGRFTISRDNAKNTVYLQMNSLKPEDTAVYYCAVGYLNSDYVLLYYWGQGTQVTVSS

SEQ ID NO: 5188 - protein, 125 aa, Artificial Sequence
  Chemically Synthesized
QVQLQESGGGLVQAGGSLRLSCAASGSIFRWVGMGWYRQAPGKERELVAAINHGTNTYYADSVKGRFTISRDNAKNTVYLQMNSLKPEDTAVYYCAVFYTPYRDEYRDVYVHSYWGQGTQVTVSS

SEQ ID NO: 5189 - protein, 113 aa, Artificial Sequence
  Chemically Synthesized
QVQLQESGGGLVQAGGSLRLSCAASGTISYYYPMGWYRQAPGKEREFVATISDGTITNYADSVKGRFTISRDNAKNTVYLQMNSLKPEDTAVYYCAVESLYYWGQGTQVTVSS

SEQ ID NO: 5190 - protein, 118 aa, Artificial Sequence
  Chemically Synthesized
QVQLQESGGGLVQAGGSLRLSCAASGNIFWHRDMGWYRQAPGKERELVATINYGGNTNYADSVKGRFTISRDNAKNTVYLQMNSLKPEDTAVYYCAAWSRRHRVFRYWGQGTQVTVSS

SEQ ID NO: 5191 - protein, 118 aa, Artificial Sequence
  Chemically Synthesized
QVQLQESGGGLVQAGGSLRLSCAASGNIFPRYRMGWYRQAPGKEREFVAAITLGTSTNYADSVKGRFTISRDNAKNTVYLQMNSLKPEDTAVYYCAADGSSRDVYVYWGQGTQVTVSS

SEQ ID NO: 5192 - protein, 126 aa, Artificial Sequence
  Chemically Synthesized
QVQLQESGGGLVQAGGSLRLSCAASGTISVDRGMGWYRQAPGKERELVASITEGGITYYADSVKGRFTISRDNAKNTVYLQMNSLKPEDTAVYYCAATRYGDPYLYNDHYDGHAYWGQGTQVTVSS

SEQ ID NO: 5193 - protein, 118 aa, Artificial Sequence
  Chemically Synthesized
QVQLQESGGGLVQAGGSLRLSCAASGNISYDDAMGWYRQAPGKERELVASIDYGGTTNYADSVKGRFTISRDNAKNTVYLQMNSLKPEDTAVYYCAVRTAFPHTHAYWGQGTQVTVSS

SEQ ID NO: 5194 - protein, 117 aa, Artificial Sequence
  Chemically Synthesized
QVQLQESGGGLVQAGGSLRLSCAASGYISDIYSMGWYRQAPGKEREFVATIGIGTIPYADSVKGRFTISRDNAKNTVYLQMNSLKPEDTAVYYCAVLAYHIDYHTYWGQGTQVTVSS

SEQ ID NO: 5195 - protein, 126 aa, Artificial Sequence
  Chemically Synthesized
QVQLQESGGGLVQAGGSLRLSCAASGYIFWWASMGWYRQAPGKERELVASIGYGATTNYADSVKGRFTISRDNAKNTVYLQMNSLKPEDTAVYYCAVTDIRYRLVPYNYVYYHPYWGQGTQVTVSS

SEQ ID NO: 5196 - protein, 125 aa, Artificial Sequence
  Chemically Synthesized
QVQLQESGGGLVQAGGSLRLSCAASGSIFALAAMGWYRQAPGKERELVAAIGNGTNTYYADSVKGRFTISRDNAKNTVYLQMNSLKPEDTAVYYCAVRYADFDGYGGRGIYHQYWGQGTQVTVSS

SEQ ID NO: 5197 - protein, 122 aa, Artificial Sequence
  Chemically Synthesized
QVQLQESGGGLVQAGGSLRLSCAASGNISIEYFMGWYRQAPGKERELVASIAYGSSTNYADSVKGRFTISRDNAKNTVYLQMNSLKPEDTAVYYCAVLLYHDLYYRTWFAYWGQGTQVTVSS

SEQ ID NO: 5198 - protein, 117 aa, Artificial Sequence
  Chemically Synthesized
QVQLQESGGGLVQAGGSLRLSCAASGNIFWSPGMGWYRQAPGKEREFVAAIDVGASTNYADSVKGRFTISRDNAKNTVYLQMNSLKPEDTAVYYCAVRWDDDVFTYWGQGTQVTVSS

SEQ ID NO: 5199 - protein, 118 aa, Artificial Sequence
  Chemically Synthesized
QVQLQESGGGLVQAGGSLRLSCAASGYISDYVIMGWYRQAPGKEREFVATITTGGTTYYADSVKGRFTISRDNAKNTVYLQMNSLKPEDTAVYYCAVYHYGDDPHDYWGQGTQVTVSS

SEQ ID NO: 5200 - protein, 117 aa, Artificial Sequence
  Chemically Synthesized
QVQLQESGGGLVQAGGSLRLSCAASGSISAYSDMGWYRQAPGKEREFVAGISYGANTYYADSVKGRFTISRDNAKNTVYLQMNSLKPEDTAVYYCAVRNAATSNMYWGQGTQVTVSS

SEQ ID NO: 5201 - protein, 118 aa, Artificial Sequence
  Chemically Synthesized
QVQLQESGGGLVQAGGSLRLSCAASGTISQQADMGWYRQAPGKEREFVASIDTGGTTYYADSVKGRFTISRDNAKNTVYLQMNSLKPEDTAVYYCAAWRDAEWGHDYWGQGTQVTVSS

SEQ ID NO: 5202 - protein, 121 aa, Artificial Sequence
  Chemically Synthesized
QVQLQESGGGLVQAGGSLRLSCAASGYISYPQTMGWYRQAPGKERELVAAINYGANTNYADSVKGRFTISRDNAKNTVYLQMNSLKPEDTAVYYCAAYAQPYSGVNVSLYWGQGTQVTVSS

SEQ ID NO: 5203 - protein, 118 aa, Artificial Sequence
  Chemically Synthesized
QVQLQESGGGLVQAGGSLRLSCAASGSIFRTVVMGWYRQAPGKERELVATITIGGTTNYADSVKGRFTISRDNAKNTVYLQMNSLKPEDTAVYYCAADAPQPGFLVYWGQGTQVTVSS

SEQ ID NO: 5204 - protein, 125 aa, Artificial Sequence
  Chemically Synthesized
QVQLQESGGGLVQAGGSLRLSCAASGTFLSRTMGWYRQAPGKEREFVAGITSGANTYYADSVKGRFTISRDNAKNTVYLQMNSLKPEDTAVYYCAAVAGYYPYGSAADTDFHAYWGQGTQVTVSS

SEQ ID NO: 5205 - protein, 126 aa, Artificial Sequence
  Chemically Synthesized
QVQLQESGGGLVQAGGSLRLSCAASGNISYLYGMGWYRQAPGKERELVAGIDPGSITNYADSVKGRFTISRDNAKNTVYLQMNSLKPEDTAVYYCAAYGQGKYTWTDAYRERLWYWGQGTQVTVSS

SEQ ID NO: 5206 - protein, 120 aa, Artificial Sequence
  Chemically Synthesized
QVQLQESGGGLVQAGGSLRLSCAASGYISPADIMGWYRQAPGKEREFVASISYGASTNYADSVKGRFTISRDNAKNTVYLQMNSLKPEDTAVYYCAVLSVPTFSTSNMYWGQGTQVTVSS

SEQ ID NO: 5207 - protein, 113 aa, Artificial Sequence
  Chemically Synthesized
QVQLQESGGGLVQAGGSLRLSCAASGTISETYDMGWYRQAPGKEREFVATIGYGATTNYADSVKGRFTISRDNAKNTVYLQMNSLKPEDTAVYYCAALDYVYWGQGTQVTVSS

SEQ ID NO: 5208 - protein, 115 aa, Artificial Sequence
  Chemically Synthesized
QVQLQESGGGLVQAGGSLRLSCAASGTIFPIGSMGWYRQAPGKERELVATITDGSITNYADSVKGRFTISRDNAKNTVYLQMNSLKPEDTAVYYCAVYTAHYAYWGQGTQVTVSS

SEQ ID NO: 5209 - protein, 123 aa, Artificial Sequence
  Chemically Synthesized
QVQLQESGGGLVQAGGSLRLSCAASGNISRTYSMGWYRQAPGKEREFVATIAYGGTTNYADSVKGRFTISRDNAKNTVYLQMNSLKPEDTAVYYCAVQTAQRGYWAWRRYTYWGQGTQVTVSS

SEQ ID NO: 5210 - protein, 118 aa, Artificial Sequence
  Chemically Synthesized
QVQLQESGGGLVQAGGSLRLSCAASGYISDYFYMGWYRQAPGKEREFVAGISDGSSTYYADSVKGRFTISRDNAKNTVYLQMNSLKPEDTAVYYCAVVYAFGDRHIYWGQGTQVTVSS

SEQ ID NO: 5211 - protein, 122 aa, Artificial Sequence
  Chemically Synthesized
QVQLQESGGGLVQAGGSLRLSCAASGNISYPAAMGWYRQAPGKERELVATITTGATTNYADSVKGRFTISRDNAKNTVYLQMNSLKPEDTAVYYCAVKWPIPDLPKYPHGYWGQGTQVTVSS

SEQ ID NO: 5212 - protein, 122 aa, Artificial Sequence
  Chemically Synthesized
QVQLQESGGGLVQAGGSLRLSCAASGYIFAYLDMGWYRQAPGKEREFVAGINPGAITNYADSVKGRFTISRDNAKNTVYLQMNSLKPEDTAVYYCAVENTLDTTAANEFSYWGQGTQVTVSS

SEQ ID NO: 5213 - protein, 118 aa, Artificial Sequence
  Chemically Synthesized
QVQLQESGGGLVQAGGSLRLSCAASGNIFDYRRMGWYRQAPGKERELVATITDGGSTNYADSVKGRFTISRDNAKNTVYLQMNSLKPEDTAVYYCAAWDAGSADLYYWGQGTQVTVSS

SEQ ID NO: 5214 - protein, 118 aa, Artificial Sequence
  Chemically Synthesized
QVQLQESGGGLVQAGGSLRLSCAASGTIFYQTDMGWYRQAPGKEREFVATITNGGTTNYADSVKGRFTISRDNAKNTVYLQMNSLKPEDTAVYYCAAYYLWVGGYDYWGQGTQVTVSS

SEQ ID NO: 5215 - protein, 118 aa, Artificial Sequence
  Chemically Synthesized
QVQLQESGGGLVQAGGSLRLSCAASGYIFPWYYMGWYRQAPGKEREFVASISFGSTTNYADSVKGRFTISRDNAKNTVYLQMNSLKPEDTAVYYCAAPYRWYNRLRYWGQGTQVTVSS

SEQ ID NO: 5216 - protein, 118 aa, Artificial Sequence
  Chemically Synthesized
QVQLQESGGGLVQAGGSLRLSCAASGTIFPSEAMGWYRQAPGKERELVATITAGAITYYADSVKGRFTISRDNAKNTVYLQMNSLKPEDTAVYYCAVPYYLDNGFFYWGQGTQVTVSS

SEQ ID NO: 5217 - protein, 118 aa, Artificial Sequence
  Chemically Synthesized
QVQLQESGGGLVQAGGSLRLSCAASGNISGGIGMGWYRQAPGKERELVATIGWGSSTLYADSVKGRFTISRDNAKNTVYLQMNSLKPEDTAVYYCAADDTFGYHLSYWGQGTQVTVSS

SEQ ID NO: 5218 - protein, 118 aa, Artificial Sequence
  Chemically Synthesized
QVQLQESGGGLVQAGGSLRLSCAASGNISPYTSMGWYRQAPGKEREFVAGIDGGTNTNYADSVKGRFTISRDNAKNTVYLQMNSLKPEDTAVYYCAAEGSTDVYLVYWGQGTQVTVSS

SEQ ID NO: 5219 - protein, 117 aa, Artificial Sequence
  Chemically Synthesized
QVQLQESGGGLVQAGGSLRLSCAASGSIFSGGTMGWYRQAPGKEREFVASIDSGGITYYADSVKGRFTISRDNAKNTVYLQMNSLKPEDTAVYYCAAATTDPDSIYWGQGTQVTVSS

SEQ ID NO: 5220 - protein, 122 aa, Artificial Sequence
  Chemically Synthesized
QVQLQESGGGLVQAGGSLRLSCAASGTISPAGPMGWYRQAPGKERELVAAISFGATTYYADSVKGRFTISRDNAKNTVYLQMNSLKPEDTAVYYCAVRSSYTRGPWTYYGYWGQGTQVTVSS

SEQ ID NO: 5221 - protein, 121 aa, Artificial Sequence
  Chemically Synthesized
QVQLQESGGGLVQAGGSLRLSCAASGTISDDSMGWYRQAPGKEREFVAAIDSGANTYYADSVKGRFTISRDNAKNTVYLQMNSLKPEDTAVYYCAVYWASDLPWQPDHDYWGQGTQVTVSS

SEQ ID NO: 5222 - protein, 112 aa, Artificial Sequence
  Chemically Synthesized
QVQLQESGGGLVQAGGSLRLSCAASGSIFAPDDMGWYRQAPGKERELVAAISYGTITYYADSVKGRFTISRDNAKNTVYLQMNSLKPEDTAVYYCAGTHGYWGQGTQVTVSS

SEQ ID NO: 5223 - protein, 122 aa, Artificial Sequence
  Chemically Synthesized
QVQLQESGGGLVQAGGSLRLSCAASGNIFYFDKMGWYRQAPGKERELVATIAYGAITYYADSVKGRFTISRDNAKNTVYLQMNSLKPEDTAVYYCAVDGYEQSLAFSDHLYWGQGTQVTVSS

SEQ ID NO: 5224 - protein, 123 aa, Artificial Sequence
  Chemically Synthesized
QVQLQESGGGLVQAGGSLRLSCAASGNISRLAYYMGWYRQAPGKEREFVASITAGSSTYYADSVKGRFTISRDNAKNTVYLQMNSLKPEDTAVYYCAVDPWYYIQWQDQHSYWGQGTQVTVSS

SEQ ID NO: 5225 - protein, 117 aa, Artificial Sequence
  Chemically Synthesized
QVQLQESGGGLVQAGGSLRLSCAASGTIFLSKTMGWYRQAPGKEREFVAGISYGSTTNYADSVKGRFTISRDNAKNTVYLQMNSLKPEDTAVYYCAVKSGVLLVMYWGQGTQVTVSS

SEQ ID NO: 5226 - protein, 118 aa, Artificial Sequence
  Chemically Synthesized
QVQLQESGGGLVQAGGSLRLSCAASGTIFGPAGMGWYRQAPGKEREFVAGIAPGGNTYYADSVKGRFTISRDNAKNTVYLQMNSLKPEDTAVYYCAAIGTFRGPHWYWGQGTQVTVSS

SEQ ID NO: 5227 - protein, 118 aa, Artificial Sequence
  Chemically Synthesized
QVQLQESGGGLVQAGGSLRLSCAASGNISRDGNMGWYRQAPGKEREFVAGIDRGTNTYYADSVKGRFTISRDNAKNTVYLQMNSLKPEDTAVYYCAVRVYYSTAFGYWGQGTQVTVSS

SEQ ID NO: 5228 - protein, 118 aa, Artificial Sequence
  Chemically Synthesized
QVQLQESGGGLVQAGGSLRLSCAASGNISDIRSMGWYRQAPGKEREFVATIDIGATTNYADSVKGRFTISRDNAKNTVYLQMNSLKPEDTAVYYCAVALTKGSDHLYWGQGTQVTVSS

SEQ ID NO: 5229 - protein, 116 aa, Artificial Sequence
  Chemically Synthesized
QVQLQESGGGLVQAGGSLRLSCAASGTIFVYDFMGWYRQAPGKEREFVAGIDSGTITYADSVKGRFTISRDNAKNTVYLQMNSLKPEDTAVYYCARIQPNGSTLYWGQGTQVTVSS

SEQ ID NO: 5230 - protein, 122 aa, Artificial Sequence
  Chemically Synthesized
QVQLQESGGGLVQAGGSLRLSCAASGNIFYATVMGWYRQAPGKEREFVAGINKGTITYYADSVKGRFTISRDNAKNTVYLQMNSLKPEDTAVYYCAVPQYARWYTTRYHVYWGQGTQVTVSS

SEQ ID NO: 5231 - protein, 122 aa, Artificial Sequence
  Chemically Synthesized
QVQLQESGGGLVQAGGSLRLSCAASGNIFYRGWMGWYRQAPGKERELVASISRGSSTNYADSVKGRFTISRDNAKNTVYLQMNSLKPEDTAVYYCAVYDRWWYGTSRRYVYWGQGTQVTVSS

SEQ ID NO: 5232 - protein, 126 aa, Artificial Sequence
  Chemically Synthesized
QVQLQESGGGLVQAGGSLRLSCAASGTISYRRNMGWYRQAPGKEREFVAGIAYGTITNYADSVKGRFTISRDNAKNTVYLQMNSLKPEDTAVYYCAVDRWDERQLNRGTWLWLVYWGQGTQVTVSS

SEQ ID NO: 5233 - protein, 122 aa, Artificial Sequence
  Chemically Synthesized
QVQLQESGGGLVQAGGSLRLSCAASGSIFRAYVMGWYRQAPGKERELVAGISDRWYYLYADSVKGRFTISRDNAKNTVYLQMNSLKPEDTAVYYCAADAGTTSTDGRYHDYWGQGTQVTVSS

SEQ ID NO: 5234 - protein, 118 aa, Artificial Sequence
  Chemically Synthesized
QVQLQESGGGLVQAGGSLRLSCAASGNIFDYVQMGWYRQAPGKERELVAGISIGSSTNYADSVKGRFTISRDNAKNTVYLQMNSLKPEDTAVYYCAADHVLGNDLLYWGQGTQVTVSS

SEQ ID NO: 5235 - protein, 119 aa, Artificial Sequence
  Chemically Synthesized
QVQLQESGGGLVQAGGSLRLSCAASGSISADLTMGWYRQAPGKEREFVAGIGYGGNTYYADSVKGRFTISRDNAKNTVYLQMNSLKPEDTAVYYCAVRHWSADDSYAYWGQGTQVTVSS

SEQ ID NO: 5236 - protein, 118 aa, Artificial Sequence
  Chemically Synthesized
QVQLQESGGGLVQAGGSLRLSCAASGSISHSVPMGWYRQAPGKERELVATITYGGITNYADSVKGRFTISRDNAKNTVYLQMNSLKPEDTAVYYCAVTAYRQDPYGYWGQGTQVTVSS

SEQ ID NO: 5237 - protein, 122 aa, Artificial Sequence
  Chemically Synthesized
QVQLQESGGGLVQAGGSLRLSCAASGNISTHRYMGWYRQAPGKEREFVATINFGGTTNYADSVKGRFTISRDNAKNTVYLQMNSLKPEDTAVYYCAADGGPRKVRSPVYYYWGQGTQVTVSS

SEQ ID NO: 5238 - protein, 125 aa, Artificial Sequence
  Chemically Synthesized
QVQLQESGGGLVQAGGSLRLSCAASGNISPIYYMGWYRQAPGKEREFVAAIADGASTYYADSVKGRFTISRDNAKNTVYLQMNSLKPEDTAVYYCAVYTPYPWSLLLTTLVRLYWGQGTQVTVSS

SEQ ID NO: 5239 - protein, 118 aa, Artificial Sequence
  Chemically Synthesized
QVQLQESGGGLVQAGGSLRLSCAASGTIFDDLRMGWYRQAPGKERELVASITGGANTYYADSVKGRFTISRDNAKNTVYLQMNSLKPEDTAVYYCAAYPINDYTHDYWGQGTQVTVSS

SEQ ID NO: 5240 - protein, 118 aa, Artificial Sequence
  Chemically Synthesized
QVQLQESGGGLVQAGGSLRLSCAASGTISTSYHMGWYRQAPGKEREFVAGITIGTSTNYADSVKGRFTISRDNAKNTVYLQMNSLKPEDTAVYYCAVFTTTLLVTIYWGQGTQVTVSS

SEQ ID NO: 5241 - protein, 122 aa, Artificial Sequence
  Chemically Synthesized
QVQLQESGGGLVQAGGSLRLSCAASGTISTYIGMGWYRQAPGKERELVATITYGSSTNYADSVKGRFTISRDNAKNTVYLQMNSLKPEDTAVYYCAASWDADILWSSYHEYWGQGTQVTVSS

SEQ ID NO: 5242 - protein, 118 aa, Artificial Sequence
  Chemically Synthesized
QVQLQESGGGLVQAGGSLRLSCAASGYISALTYMGWYRQAPGKERELVATIGLGGSTYYADSVKGRFTISRDNAKNTVYLQMNSLKPEDTAVYYCAVDGGWYAPLGYWGQGTQVTVSS

SEQ ID NO: 5243 - protein, 118 aa, Artificial Sequence
  Chemically Synthesized
QVQLQESGGGLVQAGGSLRLSCAASGYISDGTIMGWYRQAPGKERELVATIAGGTITNYADSVKGRFTISRDNAKNTVYLQMNSLKPEDTAVYYCAAARKTYPSLYYWGQGTQVTVSS

SEQ ID NO: 5244 - protein, 126 aa, Artificial Sequence
  Chemically Synthesized
QVQLQESGGGLVQAGGSLRLSCAASGYIFPWRYMGWYRQAPGKERELVAAISDGGITYYADSVKGRFTISRDNAKNTVYLQMNSLKPEDTAVYYCAVYGYDASIDEAGLRPRLSYWGQGTQVTVSS

SEQ ID NO: 5245 - protein, 122 aa, Artificial Sequence
  Chemically Synthesized
QVQLQESGGGLVQAGGSLRLSCAASGYIFYSGRMGWYRQAPGKEREFVAAIDSGAITYYADSVKGRFTISRDNAKNTVYLQMNSLKPEDTAVYYCAVYRDRYLPSVNNHVYWGQGTQVTVSS

SEQ ID NO: 5246 - protein, 118 aa, Artificial Sequence
  Chemically Synthesized
QVQLQESGGGLVQAGGSLRLSCAASGNISERDFMGWYRQAPGKEREFVASISYGASTNYADSVKGRFTISRDNAKNTVYLQMNSLKPEDTAVYYCAAVRRRAGDFYYWGQGTQVTVSS

SEQ ID NO: 5247 - protein, 122 aa, Artificial Sequence
  Chemically Synthesized
QVQLQESGGGLVQAGGSLRLSCAASGSIFYLYSMGWYRQAPGKEREFVAGIDYGANTYYADSVKGRFTISRDNAKNTVYLQMNSLKPEDTAVYYCAAVGYNNTYKTARHAYWGQGTQVTVSS

SEQ ID NO: 5248 - protein, 118 aa, Artificial Sequence
  Chemically Synthesized
QVQLQESGGGLVQAGGSLRLSCAASGYIFGGYYMGWYRQAPGKEREFVAAIGLGGTTNYADSVKGRFTISRDNAKNTVYLQMNSLKPEDTAVYYCAVQYNYQTGFQYWGQGTQVTVSS

SEQ ID NO: 5249 - protein, 115 aa, Artificial Sequence
  Chemically Synthesized
QVQLQESGGGLVQAGGSLRLSCAASGSISYQTYMGWYRQAPGKEREFVASITGGGNTNYADSVKGRFTISRDNAKNTVYLQMNSLKPEDTAVYYCAAAYYALLYWGQGTQVTVSS

SEQ ID NO: 5250 - protein, 122 aa, Artificial Sequence
  Chemically Synthesized
QVQLQESGGGLVQAGGSLRLSCAASGSISKDGTMGWYRQAPGKERELVAGIDDGANTNYADSVKGRFTISRDNAKNTVYLQMNSLKPEDTAVYYCAAVPYPGYDEETDHWYWGQGTQVTVSS

SEQ ID NO: 5251 - protein, 122 aa, Artificial Sequence
  Chemically Synthesized
QVQLQESGGGLVQAGGSLRLSCAASGYIFASPYMGWYRQAPGKERELVASISGGANTYYADSVKGRFTISRDNAKNTVYLQMNSLKPEDTAVYYCAAYIGNRLYIGYLHYYWGQGTQVTVSS

SEQ ID NO: 5252 - protein, 122 aa, Artificial Sequence
  Chemically Synthesized
QVQLQESGGGLVQAGGSLRLSCAASGTIFFDDDMGWYRQAPGKEREFVAGIAAGAITNYADSVKGRFTISRDNAKNTVYLQMNSLKPEDTAVYYCAVYSDEQFGELYRHYYWGQGTQVTVSS

SEQ ID NO: 5253 - protein, 117 aa, Artificial Sequence
  Chemically Synthesized
QVQLQESGGGLVQAGGSLRLSCAASGSIFRANSMGWYRQAPGKEREFVAGIGNGTITNYADSVKGRFTISRDNAKNTVYLQMNSLKPEDTAVYYCAAVDPVRSVIYWGQGTQVTVSS

SEQ ID NO: 5254 - protein, 118 aa, Artificial Sequence
  Chemically Synthesized
QVQLQESGGGLVQAGGSLRLSCAASGNIFWRYVMGWYRQAPGKERELVASIGVGTITYYADSVKGRFTISRDNAKNTVYLQMNSLKPEDTAVYYCAVVGVYYFLFPYWGQGTQVTVSS

SEQ ID NO: 5255 - protein, 117 aa, Artificial Sequence
  Chemically Synthesized
QVQLQESGGGLVQAGGSLRLSCAASGSISWSYGMGWYRQAPGKERELVAAIASVLYLYADSVKGRFTISRDNAKNTVYLQMNSLKPEDTAVYYCAVLTFKNQIHYYWGQGTQVTVSS

SEQ ID NO: 5256 - protein, 126 aa, Artificial Sequence
  Chemically Synthesized
QVQLQESGGGLVQAGGSLRLSCAASGSISKPSVMGWYRQAPGKERELVAGITGGGTTNYADSVKGRFTISRDNAKNTVYLQMNSLKPEDTAVYYCAAGIYYDYQVLPGRYGVHGYWGQGTQVTVSS

SEQ ID NO: 5257 - protein, 117 aa, Artificial Sequence
  Chemically Synthesized
QVQLQESGGGLVQAGGSLRLSCAASGYISRRVSMGWYRQAPGKEREFVAGIGRGGSTNYADSVKGRFTISRDNAKNTVYLQMNSLKPEDTAVYYCAVVARYGNHTYWGQGTQVTVSS

SEQ ID NO: 5258 - protein, 118 aa, Artificial Sequence
  Chemically Synthesized
QVQLQESGGGLVQAGGSLRLSCAASGYISRDDYMGWYRQAPGKEREFVAAIGLGSITNYADSVKGRFTISRDNAKNTVYLQMNSLKPEDTAVYYCAVYQKTYGSYSYWGQGTQVTVSS

SEQ ID NO: 5259 - protein, 122 aa, Artificial Sequence
  Chemically Synthesized
QVQLQESGGGLVQAGGSLRLSCAASGTIFSGLDMGWYRQAPGKERELVASISTGGSTYYADSVKGRFTISRDNAKNTVYLQMNSLKPEDTAVYYCAVAVVATYDLYQAHYYWGQGTQVTVSS

SEQ ID NO: 5260 - protein, 118 aa, Artificial Sequence
  Chemically Synthesized
QVQLQESGGGLVQAGGSLRLSCAASGYISNVPSMGWYRQAPGKERELVAAIDSGATTYYADSVKGRFTISRDNAKNTVYLQMNSLKPEDTAVYYCAVYQVNWDYFLYWGQGTQVTVSS

SEQ ID NO: 5261 - protein, 117 aa, Artificial Sequence
  Chemically Synthesized
QVQLQESGGGLVQAGGSLRLSCAASGSISYPWVMGWYRQAPGKERELVAAIAGGNTYYADSVKGRFTISRDNAKNTVYLQMNSLKPEDTAVYYCAAYYYPIPILVYWGQGTQVTVSS

SEQ ID NO: 5262 - protein, 118 aa, Artificial Sequence
  Chemically Synthesized
QVQLQESGGGLVQAGGSLRLSCAASGTISVAVLMGWYRQAPGKERELVATINAGSNTYYADSVKGRFTISRDNAKNTVYLQMNSLKPEDTAVYYCAVLITTGTYYHYWGQGTQVTVSS

SEQ ID NO: 5263 - protein, 118 aa, Artificial Sequence
  Chemically Synthesized
QVQLQESGGGLVQAGGSLRLSCAASGTIFWYVAMGWYRQAPGKERELVAAITVGASTYYADSVKGRFTISRDNAKNTVYLQMNSLKPEDTAVYYCAVPRGSRWLYRYWGQGTQVTVSS

SEQ ID NO: 5264 - protein, 121 aa, Artificial Sequence
  Chemically Synthesized
QVQLQESGGGLVQAGGSLRLSCAASGSISLADDMGWYRQAPGKEREFVASIGYGGITYYADSVKGRFTISRDNAKNTVYLQMNSLKPEDTAVYYCAVGWQADVSFLRTMYWGQGTQVTVSS

SEQ ID NO: 5265 - protein, 122 aa, Artificial Sequence
  Chemically Synthesized
QVQLQESGGGLVQAGGSLRLSCAASGSIFTYLNMGWYRQAPGKEREFVATIGIGSSTYYADSVKGRFTISRDNAKNTVYLQMNSLKPEDTAVYYCAVNHFWWYLPVLLSLYWGQGTQVTVSS

SEQ ID NO: 5266 - protein, 121 aa, Artificial Sequence
  Chemically Synthesized
QVQLQESGGGLVQAGGSLRLSCAASGSISGYIYMGWYRQAPGKERELVAAIAYGTITYYADSVKGRFTISRDNAKNTVYLQMNSLKPEDTAVYYCAVTPDYSVGRTNVMYWGQGTQVTVSS

SEQ ID NO: 5267 - protein, 126 aa, Artificial Sequence
  Chemically Synthesized
QVQLQESGGGLVQAGGSLRLSCAASGTIFLPYIMGWYRQAPGKERELVATISQGGITNYADSVKGRFTISRDNAKNTVYLQMNSLKPEDTAVYYCAVTQQNVDTSDYANRPPHYYWGQGTQVTVSS

SEQ ID NO: 5268 - protein, 126 aa, Artificial Sequence
  Chemically Synthesized
QVQLQESGGGLVQAGGSLRLSCAASGTISTLTYMGWYRQAPGKERELVAAIDGGGSTNYADSVKGRFTISRDNAKNTVYLQMNSLKPEDTAVYYCAVEHRGDGHRTRTGYVYHWYWGQGTQVTVSS

SEQ ID NO: 5269 - protein, 118 aa, Artificial Sequence
  Chemically Synthesized
QVQLQESGGGLVQAGGSLRLSCAASGSISEAQGMGWYRQAPGKEREFVAAIAYGSTTYYADSVKGRFTISRDNAKNTVYLQMNSLKPEDTAVYYCAVHGSLDYLHRYWGQGTQVTVSS

SEQ ID NO: 5270 - protein, 121 aa, Artificial Sequence
  Chemically Synthesized
QVQLQESGGGLVQAGGSLRLSCAASGIFLLTTMGWYRQAPGKEREFVAGIGYGGSTNYADSVKGRFTISRDNAKNTVYLQMNSLKPEDTAVYYCAAGDLLVGSFAPAHDYWGQGTQVTVSS

SEQ ID NO: 5271 - protein, 118 aa, Artificial Sequence
  Chemically Synthesized
QVQLQESGGGLVQAGGSLRLSCAASGTISGNSGMGWYRQAPGKERELVAGIAGGGSTNYADSVKGRFTISRDNAKNTVYLQMNSLKPEDTAVYYCAVNTLSSGQFDYWGQGTQVTVSS

SEQ ID NO: 5272 - protein, 122 aa, Artificial Sequence
  Chemically Synthesized
QVQLQESGGGLVQAGGSLRLSCAASGSISFVEDMGWYRQAPGKERELVASIDYGATTYYADSVKGRFTISRDNAKNTVYLQMNSLKPEDTAVYYCAVPNRYSIQDTSTYLYWGQGTQVTVSS

SEQ ID NO: 5273 - protein, 117 aa, Artificial Sequence
  Chemically Synthesized
QVQLQESGGGLVQAGGSLRLSCAASGSIFSRSPMGWYRQAPGKERELVATITVGGNTYYADSVKGRFTISRDNAKNTVYLQMNSLKPEDTAVYYCAASLIDYYFWYWGQGTQVTVSS

SEQ ID NO: 5274 - protein, 118 aa, Artificial Sequence
  Chemically Synthesized
QVQLQESGGGLVQAGGSLRLSCAASGNIFHINTMGWYRQAPGKERELVASIGYGSTTYYADSVKGRFTISRDNAKNTVYLQMNSLKPEDTAVYYCAAYSDYVRGYTYWGQGTQVTVSS

SEQ ID NO: 5275 - protein, 118 aa, Artificial Sequence
  Chemically Synthesized
QVQLQESGGGLVQAGGSLRLSCAASGNIFYFSPMGWYRQAPGKEREFVAAIGHGGITYYADSVKGRFTISRDNAKNTVYLQMNSLKPEDTAVYYCAAYPYTSYGLWYWGQGTQVTVSS

SEQ ID NO: 5276 - protein, 126 aa, Artificial Sequence
  Chemically Synthesized
QVQLQESGGGLVQAGGSLRLSCAASGSISQYGLMGWYRQAPGKEREFVAAIAEGGNTNYADSVKGRFTISRDNAKNTVYLQMNSLKPEDTAVYYCAVVQTPFYDSNLILSASHAYWGQGTQVTVSS

SEQ ID NO: 5277 - protein, 126 aa, Artificial Sequence
  Chemically Synthesized
QVQLQESGGGLVQAGGSLRLSCAASGTISSGFRMGWYRQAPGKERELVASISDGSITNYADSVKGRFTISRDNAKNTVYLQMNSLKPEDTAVYYCAVPWRSQNKYYARSTGGLRYWGQGTQVTVSS

SEQ ID NO: 5278 - protein, 122 aa, Artificial Sequence
  Chemically Synthesized
QVQLQESGGGLVQAGGSLRLSCAASGTISYVDAMGWYRQAPGKEREFVATIDFGSTTYYADSVKGRFTISRDNAKNTVYLQMNSLKPEDTAVYYCAVDPYLQYYTQYDLDYWGQGTQVTVSS

SEQ ID NO: 5279 - protein, 117 aa, Artificial Sequence
  Chemically Synthesized
QVQLQESGGGLVQAGGSLRLSCAASGYIFAGPRMGWYRQAPGKEREFVASIGRGSSTYADSVKGRFTISRDNAKNTVYLQMNSLKPEDTAVYYCAVRVADYFPYAYWGQGTQVTVSS

SEQ ID NO: 5280 - protein, 118 aa, Artificial Sequence
  Chemically Synthesized
QVQLQESGGGLVQAGGSLRLSCAASGTISYPEGMGWYRQAPGKERELVATITHGATTNYADSVKGRFTISRDNAKNTVYLQMNSLKPEDTAVYYCAAGTLDRQYHTYWGQGTQVTVSS

SEQ ID NO: 5281 - protein, 122 aa, Artificial Sequence
  Chemically Synthesized
QVQLQESGGGLVQAGGSLRLSCAASGNISRYKYMGWYRQAPGKERELVAAIAYGTSTNYADSVKGRFTISRDNAKNTVYLQMNSLKPEDTAVYYCAAGVPTPYYTRYRLGYWGQGTQVTVSS

SEQ ID NO: 5282 - protein, 118 aa, Artificial Sequence
  Chemically Synthesized
QVQLQESGGGLVQAGGSLRLSCAASGSIFRYRGMGWYRQAPGKEREFVATIAYGGSTYYADSVKGRFTISRDNAKNTVYLQMNSLKPEDTAVYYCAVIVYWHSRHGYWGQGTQVTVSS

SEQ ID NO: 5283 - protein, 118 aa, Artificial Sequence
  Chemically Synthesized
QVQLQESGGGLVQAGGSLRLSCAASGTIFFALSMGWYRQAPGKEREFVAAIAYGANTYYADSVKGRFTISRDNAKNTVYLQMNSLKPEDTAVYYCAVSRRRRWLHAYWGQGTQVTVSS

SEQ ID NO: 5284 - protein, 126 aa, Artificial Sequence
  Chemically Synthesized
QVQLQESGGGLVQAGGSLRLSCAASGSIFRRADMGWYRQAPGKERELVASITGGASTYYADSVKGRFTISRDNAKNTVYLQMNSLKPEDTAVYYCAADVDQLGDTIPNKNVPHPYWGQGTQVTVSS

SEQ ID NO: 5285 - protein, 118 aa, Artificial Sequence
  Chemically Synthesized
QVQLQESGGGLVQAGGSLRLSCAASGNISDYYNMGWYRQAPGKEREFVAAITSGGITNYADSVKGRFTISRDNAKNTVYLQMNSLKPEDTAVYYCAAYNDPRYPFGYWGQGTQVTVSS

SEQ ID NO: 5286 - protein, 120 aa, Artificial Sequence
  Chemically Synthesized
QVQLQESGGGLVQAGGSLRLSCAASGNIFRNYYMGWYRQAPGKEREFVASITSGATTYYADSVKGRFTISRDNAKNTVYLQMNSLKPEDTAVYYCAVQRYSYSYWRHVYWGQGTQVTVSS

SEQ ID NO: 5287 - protein, 122 aa, Artificial Sequence
  Chemically Synthesized
QVQLQESGGGLVQAGGSLRLSCAASGSISRGRDMGWYRQAPGKEREFVAGISLGTITNYADSVKGRFTISRDNAKNTVYLQMNSLKPEDTAVYYCAVTLTFLRGTTYLYLYWGQGTQVTVSS

SEQ ID NO: 5288 - protein, 111 aa, Artificial Sequence
  Chemically Synthesized
QVQLQESGGGLVQAGGSLRLSCAASGSIFYFYDMGWYRQAPGKERELVATITYGGSTYYADSVKGRFTISRDNAKNTVYLQMNSLKPEDTAVYYCAAHVYWGQGTQVTVSS

SEQ ID NO: 5289 - protein, 126 aa, Artificial Sequence
  Chemically Synthesized
QVQLQESGGGLVQAGGSLRLSCAASGTIFYADSMGWYRQAPGKERELVAGIGDGTTTNYADSVKGRFTISRDNAKNTVYLQMNSLKPEDTAVYYCAATDLTHGRLYDGDARTFGYWGQGTQVTVSS

SEQ ID NO: 5290 - protein, 120 aa, Artificial Sequence
  Chemically Synthesized
QVQLQESGGGLVQAGGSLRLSCAASGYISQSGMGWYRQAPGKEREFVAGIGPGGTTYYADSVKGRFTISRDNAKNTVYLQMNSLKPEDTAVYYCAVYYRGRGYYSLHRYWGQGTQVTVSS

SEQ ID NO: 5291 - protein, 118 aa, Artificial Sequence
  Chemically Synthesized
QVQLQESGGGLVQAGGSLRLSCAASGSIFPLWFMGWYRQAPGKEREFVASITLGASTNYADSVKGRFTISRDNAKNTVYLQMNSLKPEDTAVYYCAVIVRYYLPHGYWGQGTQVTVSS

SEQ ID NO: 5292 - protein, 121 aa, Artificial Sequence
  Chemically Synthesized
QVQLQESGGGLVQAGGSLRLSCAASGNISFVYFMGWYRQAPGKEREFVAAIADGSSTNYADSVKGRFTISRDNAKNTVYLQMNSLKPEDTAVYYCAAGEPSTVTTMTTIYWGQGTQVTVSS

SEQ ID NO: 5293 - protein, 122 aa, Artificial Sequence
  Chemically Synthesized
QVQLQESGGGLVQAGGSLRLSCAASGSIFYYRAMGWYRQAPGKEREFVAAIGYGGSTYYADSVKGRFTISRDNAKNTVYLQMNSLKPEDTAVYYCAAPLRGDIYQHYAHIYWGQGTQVTVSS

SEQ ID NO: 5294 - protein, 122 aa, Artificial Sequence
  Chemically Synthesized
QVQLQESGGGLVQAGGSLRLSCAASGYIFKRKYMGWYRQAPGKEREFVATIGPGGNTYYADSVKGRFTISRDNAKNTVYLQMNSLKPEDTAVYYCAAYVYLRRNDELRLAYWGQGTQVTVSS

SEQ ID NO: 5295 - protein, 118 aa, Artificial Sequence
  Chemically Synthesized
QVQLQESGGGLVQAGGSLRLSCAASGSISLGHYMGWYRQAPGKEREFVAGIAYGATTYYADSVKGRFTISRDNAKNTVYLQMNSLKPEDTAVYYCAAVSPYTSALDYWGQGTQVTVSS

SEQ ID NO: 5296 - protein, 118 aa, Artificial Sequence
  Chemically Synthesized
QVQLQESGGGLVQAGGSLRLSCAASGNIFYAGPMGWYRQAPGKERELVASIADGGSTNYADSVKGRFTISRDNAKNTVYLQMNSLKPEDTAVYYCAAYDYLAPQHVYWGQGTQVTVSS

SEQ ID NO: 5297 - protein, 125 aa, Artificial Sequence
  Chemically Synthesized
QVQLQESGGGLVQAGGSLRLSCAASGTIFDDYMGWYRQAPGKEREFVASINSGSNTYYADSVKGRFTISRDNAKNTVYLQMNSLKPEDTAVYYCAVTYYYYGVYPVYLTPGYSYWGQGTQVTVSS

SEQ ID NO: 5298 - protein, 118 aa, Artificial Sequence
  Chemically Synthesized
QVQLQESGGGLVQAGGSLRLSCAASGTISPAPYMGWYRQAPGKEREFVAGIGGGGTTYYADSVKGRFTISRDNAKNTVYLQMNSLKPEDTAVYYCAAYIFSYTAYRYWGQGTQVTVSS

SEQ ID NO: 5299 - protein, 118 aa, Artificial Sequence
  Chemically Synthesized
QVQLQESGGGLVQAGGSLRLSCAASGNISYFRPMGWYRQAPGKERELVATIGIGGSTYYADSVKGRFTISRDNAKNTVYLQMNSLKPEDTAVYYCAVHPDYASRLTYWGQGTQVTVSS

SEQ ID NO: 5300 - protein, 117 aa, Artificial Sequence
  Chemically Synthesized
QVQLQESGGGLVQAGGSLRLSCAASGNIFLTPYMGWYRQAPGKERELVASIGSVVLPYADSVKGRFTISRDNAKNTVYLQMNSLKPEDTAVYYCAADHSYVSSHDYWGQGTQVTVSS

SEQ ID NO: 5301 - protein, 121 aa, Artificial Sequence
  Chemically Synthesized
QVQLQESGGGLVQAGGSLRLSCAASGYISGYDIMGWYRQAPGKERELVATIASVVLPYADSVKGRFTISRDNAKNTVYLQMNSLKPEDTAVYYCAADDYYDKYAVDRLEYWGQGTQVTVSS

SEQ ID NO: 5302 - protein, 118 aa, Artificial Sequence
  Chemically Synthesized
QVQLQESGGGLVQAGGSLRLSCAASGSISAWLQMGWYRQAPGKEREFVAAIGRGANTNYADSVKGRFTISRDNAKNTVYLQMNSLKPEDTAVYYCAAYYSYYQHYYYWGQGTQVTVSS

SEQ ID NO: 5303 - protein, 122 aa, Artificial Sequence
  Chemically Synthesized
QVQLQESGGGLVQAGGSLRLSCAASGSISKYAYMGWYRQAPGKEREFVASITSGAITNYADSVKGRFTISRDNAKNTVYLQMNSLKPEDTAVYYCAVDYLYDYYWYAGLIYWGQGTQVTVSS

SEQ ID NO: 5304 - protein, 116 aa, Artificial Sequence
  Chemically Synthesized
QVQLQESGGGLVQAGGSLRLSCAASGSISDPYYMGWYRQAPGKERELVATITDGIVPYADSVKGRFTISRDNAKNTVYLQMNSLKPEDTAVYYCAFTLSFTSTIYWGQGTQVTVSS

SEQ ID NO: 5305 - protein, 121 aa, Artificial Sequence
  Chemically Synthesized
QVQLQESGGGLVQAGGSLRLSCAASGTIFAITMGWYRQAPGKERELVATISAGSTTYYADSVKGRFTISRDNAKNTVYLQMNSLKPEDTAVYYCAASTWDDVYYYYVHYYWGQGTQVTVSS

SEQ ID NO: 5306 - protein, 118 aa, Artificial Sequence
  Chemically Synthesized
QVQLQESGGGLVQAGGSLRLSCAASGTISDVIPMGWYRQAPGKERELVASIDHGGTTYYADSVKGRFTISRDNAKNTVYLQMNSLKPEDTAVYYCAVLALTDLLHVYWGQGTQVTVSS

SEQ ID NO: 5307 - protein, 126 aa, Artificial Sequence
  Chemically Synthesized
QVQLQESGGGLVQAGGSLRLSCAASGTIFLLRFMGWYRQAPGKERELVASITYGTTTYYADSVKGRFTISRDNAKNTVYLQMNSLKPEDTAVYYCAAYLFIPYLYQYIDYELFAYWGQGTQVTVSS

SEQ ID NO: 5308 - protein, 117 aa, Artificial Sequence
  Chemically Synthesized
QVQLQESGGGLVQAGGSLRLSCAASGNIFDPSDMGWYRQAPGKEREFVATINYGGTTNYADSVKGRFTISRDNAKNTVYLQMNSLKPEDTAVYYCAVGDGAVTTLYWGQGTQVTVSS

SEQ ID NO: 5309 - protein, 126 aa, Artificial Sequence
  Chemically Synthesized
QVQLQESGGGLVQAGGSLRLSCAASGNIFYYGDMGWYRQAPGKERELVASINQGANTNYADSVKGRFTISRDNAKNTVYLQMNSLKPEDTAVYYCAADRQNYQDGTYGIYLVLAYWGQGTQVTVSS

SEQ ID NO: 5310 - protein, 110 aa, Artificial Sequence
  Chemically Synthesized
QVQLQESGGGLVQAGGSLRLSCAASGYIFYVDDMGWYRQAPGKERELVASIAPGSSTNYADSVKGRFTISRDNAKNTVYLQMNSLKPEDTAVYYCAAIYWGQGTQVTVSS

SEQ ID NO: 5311 - protein, 118 aa, Artificial Sequence
  Chemically Synthesized
QVQLQESGGGLVQAGGSLRLSCAASGTISLYSPMGWYRQAPGKEREFVAAIAFGTTTYYADSVKGRFTISRDNAKNTVYLQMNSLKPEDTAVYYCAVAYYYDGIYVYWGQGTQVTVSS

SEQ ID NO: 5312 - protein, 122 aa, Artificial Sequence
  Chemically Synthesized
QVQLQESGGGLVQAGGSLRLSCAASGYIFGYYYMGWYRQAPGKERELVAAISYGSNTNYADSVKGRFTISRDNAKNTVYLQMNSLKPEDTAVYYCAVSSGSTPYNIQYYGYWGQGTQVTVSS

SEQ ID NO: 5313 - protein, 118 aa, Artificial Sequence
  Chemically Synthesized
QVQLQESGGGLVQAGGSLRLSCAASGTISLGDQMGWYRQAPGKERELVAAIDRGTTTNYADSVKGRFTISRDNAKNTVYLQMNSLKPEDTAVYYCAAHGDDAQLLLYWGQGTQVTVSS

SEQ ID NO: 5314 - protein, 118 aa, Artificial Sequence
  Chemically Synthesized
QVQLQESGGGLVQAGGSLRLSCAASGTISFYYYMGWYRQAPGKERELVAGITLGSNTYYADSVKGRFTISRDNAKNTVYLQMNSLKPEDTAVYYCAVWWEQGDRHYYWGQGTQVTVSS

SEQ ID NO: 5315 - protein, 118 aa, Artificial Sequence
  Chemically Synthesized
QVQLQESGGGLVQAGGSLRLSCAASGYIFRVFEMGWYRQAPGKEREFVAAIDNGGNTYYADSVKGRFTISRDNAKNTVYLQMNSLKPEDTAVYYCAAYQYYRQELLYWGQGTQVTVSS

SEQ ID NO: 5316 - protein, 122 aa, Artificial Sequence
  Chemically Synthesized
QVQLQESGGGLVQAGGSLRLSCAASGTIFDADSMGWYRQAPGKEREFVAGITHGTTTYYADSVKGRFTISRDNAKNTVYLQMNSLKPEDTAVYYCAVDLRDVKYADSTYEYWGQGTQVTVSS

SEQ ID NO: 5317 - protein, 126 aa, Artificial Sequence
  Chemically Synthesized
QVQLQESGGGLVQAGGSLRLSCAASGNIFADTYMGWYRQAPGKERELVAAINGGTITYYADSVKGRFTISRDNAKNTVYLQMNSLKPEDTAVYYCAPSSRYTPDYSRVSRAEYRYWGQGTQVTVSS

SEQ ID NO: 5318 - protein, 118 aa, Artificial Sequence
  Chemically Synthesized
QVQLQESGGGLVQAGGSLRLSCAASGSISYGYIMGWYRQAPGKEREFVAGITSGSTTYYADSVKGRFTISRDNAKNTVYLQMNSLKPEDTAVYYCAVLYWYLRGHDYWGQGTQVTVSS

SEQ ID NO: 5319 - protein, 122 aa, Artificial Sequence
  Chemically Synthesized
QVQLQESGGGLVQAGGSLRLSCAASGTIFDYLYMGWYRQAPGKERELVASITVGTSTYYADSVKGRFTISRDNAKNTVYLQMNSLKPEDTAVYYCAALQWYYDYVYPDHTYWGQGTQVTVSS

SEQ ID NO: 5320 - protein, 117 aa, Artificial Sequence
  Chemically Synthesized
QVQLQESGGGLVQAGGSLRLSCAASGYISSDPMGWYRQAPGKERELVATIGPGGNTYYADSVKGRFTISRDNAKNTVYLQMNSLKPEDTAVYYCAATPYNQQTHIYWGQGTQVTVSS

SEQ ID NO: 5321 - protein, 117 aa, Artificial Sequence
  Chemically Synthesized
QVQLQESGGGLVQAGGSLRLSCAASGYIFFYRMGWYRQAPGKEREFVATIGQGGSTYYADSVKGRFTISRDNAKNTVYLQMNSLKPEDTAVYYCAVYVYAAFRFGYWGQGTQVTVSS

SEQ ID NO: 5322 - protein, 118 aa, Artificial Sequence
  Chemically Synthesized
QVQLQESGGGLVQAGGSLRLSCAASGSISTLTDMGWYRQAPGKEREFVAAIGYGTNTYYADSVKGRFTISRDNAKNTVYLQMNSLKPEDTAVYYCAAIDARVIELVYWGQGTQVTVSS

SEQ ID NO: 5323 - protein, 118 aa, Artificial Sequence
  Chemically Synthesized
QVQLQESGGGLVQAGGSLRLSCAASGSIFPAWAMGWYRQAPGKERELVAGIGRGTSTYYADSVKGRFTISRDNAKNTVYLQMNSLKPEDTAVYYCAVRLVGIRWHWYWGQGTQVTVSS

SEQ ID NO: 5324 - protein, 118 aa, Artificial Sequence
  Chemically Synthesized
QVQLQESGGGLVQAGGSLRLSCAASGTIFFTPEMGWYRQAPGKERELVAGIGYGATTNYADSVKGRFTISRDNAKNTVYLQMNSLKPEDTAVYYCAARDYYSYFLDYWGQGTQVTVSS

SEQ ID NO: 5325 - protein, 118 aa, Artificial Sequence
  Chemically Synthesized
QVQLQESGGGLVQAGGSLRLSCAASGSIFRSPYMGWYRQAPGKEREFVATIGSGGNTYYADSVKGRFTISRDNAKNTVYLQMNSLKPEDTAVYYCAVYLGWSYYFRYWGQGTQVTVSS

SEQ ID NO: 5326 - protein, 122 aa, Artificial Sequence
  Chemically Synthesized
QVQLQESGGGLVQAGGSLRLSCAASGNIFYDGNMGWYRQAPGKEREFVAGITDGGTTYYADSVKGRFTISRDNAKNTVYLQMNSLKPEDTAVYYCAVITPYAYRRGGYFRYWGQGTQVTVSS

SEQ ID NO: 5327 - protein, 118 aa, Artificial Sequence
  Chemically Synthesized
QVQLQESGGGLVQAGGSLRLSCAASGTISYAYTMGWYRQAPGKERELVATIDGGSSTNYADSVKGRFTISRDNAKNTVYLQMNSLKPEDTAVYYCAVTQPSELYHDYWGQGTQVTVSS

SEQ ID NO: 5328 - protein, 126 aa, Artificial Sequence
  Chemically Synthesized
QVQLQESGGGLVQAGGSLRLSCAASGTISRRQWMGWYRQAPGKERELVATIGDGTTTNYADSVKGRFTISRDNAKNTVYLQMNSLKPEDTAVYYCAAYGWPQIRTDHRESNAHRYWGQGTQVTVSS

SEQ ID NO: 5329 - protein, 118 aa, Artificial Sequence
  Chemically Synthesized
QVQLQESGGGLVQAGGSLRLSCAASGSISTNTVMGWYRQAPGKEREFVAGIGAGGNTYYADSVKGRFTISRDNAKNTVYLQMNSLKPEDTAVYYCAVASWPADDFAYWGQGTQVTVSS

SEQ ID NO: 5330 - protein, 118 aa, Artificial Sequence
  Chemically Synthesized
QVQLQESGGGLVQAGGSLRLSCAASGYISARYYMGWYRQAPGKERELVAAITYGSSTYYADSVKGRFTISRDNAKNTVYLQMNSLKPEDTAVYYCAARYWYNIFYSYWGQGTQVTVSS

SEQ ID NO: 5331 - protein, 123 aa, Artificial Sequence
  Chemically Synthesized
QVQLQESGGGLVQAGGSLRLSCAASGTIFGTDAMGWYRQAPGKEREFVAAIDSGASTYYADSVKGRFTISRDNAKNTVYLQMNSLKPEDTAVYYCAVDPSHNDYSGNQPSCYWGQGTQVTVSS

SEQ ID NO: 5332 - protein, 118 aa, Artificial Sequence
  Chemically Synthesized
QVQLQESGGGLVQAGGSLRLSCAASGNIFLSITMGWYRQAPGKEREFVAGISTGGNTNYADSVKGRFTISRDNAKNTVYLQMNSLKPEDTAVYYCAAVVFTEATFVYWGQGTQVTVSS

SEQ ID NO: 5333 - protein, 118 aa, Artificial Sequence
  Chemically Synthesized
QVQLQESGGGLVQAGGSLRLSCAASGTIFYAGHMGWYRQAPGKERELVASIDGGGSTYYADSVKGRFTISRDNAKNTVYLQMNSLKPEDTAVYYCAVSDGKDGQHYYWGQGTQVTVSS

SEQ ID NO: 5334 - protein, 118 aa, Artificial Sequence
  Chemically Synthesized
QVQLQESGGGLVQAGGSLRLSCAASGNIFPYLNMGWYRQAPGKERELVAAIARGGNTYYADSVKGRFTISRDNAKNTVYLQMNSLKPEDTAVYYCAVWLSYAVRHQYWGQGTQVTVSS

SEQ ID NO: 5335 - protein, 118 aa, Artificial Sequence
  Chemically Synthesized
QVQLQESGGGLVQAGGSLRLSCAASGTISPYEVMGWYRQAPGKERELVATIGTGASTNYADSVKGRFTISRDNAKNTVYLQMNSLKPEDTAVYYCAVRVPPWVDYGYWGQGTQVTVSS

SEQ ID NO: 5336 - protein, 121 aa, Artificial Sequence
  Chemically Synthesized
QVQLQESGGGLVQAGGSLRLSCAASGNFLTFCMGWYRQAPGKERELVATIDGGASTNYADSVKGRFTISRDNAKNTVYLQMNSLKPEDTAVYYCAAGNPNRGQYRETHYYWGQGTQVTVSS

SEQ ID NO: 5337 - protein, 118 aa, Artificial Sequence
  Chemically Synthesized
QVQLQESGGGLVQAGGSLRLSCAASGSISPETDMGWYRQAPGKEREFVAAIGYGANTYYADSVKGRFTISRDNAKNTVYLQMNSLKPEDTAVYYCAVASFYPFLFDYWGQGTQVTVSS

SEQ ID NO: 5338 - protein, 111 aa, Artificial Sequence
  Chemically Synthesized
QVQLQESGGGLVQAGGSLRLSCAASGSIFPYYGMGWYRQAPGKEREFVAGIADGGVPYADSVKGRFTISRDNAKNTVYLQMNSLKPEDTAVYYCAVDARYWGQGTQVTVSS

SEQ ID NO: 5339 - protein, 119 aa, Artificial Sequence
  Chemically Synthesized
QVQLQESGGGLVQAGGSLRLSCAASGTIFKYNEMGWYRQAPGKEREFVAGIGYGGNTNYADSVKGRFTISRDNAKNTVYLQMNSLKPEDTAVYYCAADFLQGWTYHDYWGQGTQVTVSS

SEQ ID NO: 5340 - protein, 118 aa, Artificial Sequence
  Chemically Synthesized
QVQLQESGGGLVQAGGSLRLSCAASGTIFVTSYMGWYRQAPGKEREFVAGIGYGSITYYADSVKGRFTISRDNAKNTVYLQMNSLKPEDTAVYYCAAYHYNDALHDYWGQGTQVTVSS

SEQ ID NO: 5341 - protein, 118 aa, Artificial Sequence
  Chemically Synthesized
QVQLQESGGGLVQAGGSLRLSCAASGSISINEYMGWYRQAPGKEREFVAGIAYGASTYYADSVKGRFTISRDNAKNTVYLQMNSLKPEDTAVYYCAVFWAYLPQHDYWGQGTQVTVSS

SEQ ID NO: 5342 - protein, 118 aa, Artificial Sequence
  Chemically Synthesized
QVQLQESGGGLVQAGGSLRLSCAASGTIFYWYIMGWYRQAPGKEREFVAGIGHGSTTYYADSVKGRFTISRDNAKNTVYLQMNSLKPEDTAVYYCAAYHNYDFWLDYWGQGTQVTVSS

SEQ ID NO: 5343 - protein, 118 aa, Artificial Sequence
  Chemically Synthesized
QVQLQESGGGLVQAGGSLRLSCAASGYISYYGWMGWYRQAPGKEREFVASIAYGTITYYADSVKGRFTISRDNAKNTVYLQMNSLKPEDTAVYYCAAYSQLYRYFRYWGQGTQVTVSS

SEQ ID NO: 5344 - protein, 122 aa, Artificial Sequence
  Chemically Synthesized
QVQLQESGGGLVQAGGSLRLSCAASGYISVTHQMGWYRQAPGKERELVATIGVGAITYYADSVKGRFTISRDNAKNTVYLQMNSLKPEDTAVYYCAAQYDWTQLGGTYLAYWGQGTQVTVSS

SEQ ID NO: 5345 - protein, 121 aa, Artificial Sequence
  Chemically Synthesized
QVQLQESGGGLVQAGGSLRLSCAASGTISLDHRMGWYRQAPGKERELVATIDRGSNTNYADSVKGRFTISRDNAKNTVYLQMNSLKPEDTAVYYCAVARDPWDAYAWRQYWGQGTQVTVSS

SEQ ID NO: 5346 - protein, 118 aa, Artificial Sequence
  Chemically Synthesized
QVQLQESGGGLVQAGGSLRLSCAASGSISSADYMGWYRQAPGKERELVASINAGSSTYYADSVKGRFTISRDNAKNTVYLQMNSLKPEDTAVYYCAADEGDYPYLNYWGQGTQVTVSS

SEQ ID NO: 5347 - protein, 126 aa, Artificial Sequence
  Chemically Synthesized
QVQLQESGGGLVQAGGSLRLSCAASGNISYNIGMGWYRQAPGKEREFVAAINDGTTTYYADSVKGRFTISRDNAKNTVYLQMNSLKPEDTAVYYCAVYRWHHRSTASWIYAVHRYWGQGTQVTVSS

SEQ ID NO: 5348 - protein, 122 aa, Artificial Sequence
  Chemically Synthesized
QVQLQESGGGLVQAGGSLRLSCAASGYISYYRYMGWYRQAPGKERELVATIAAGTTTYYADSVKGRFTISRDNAKNTVYLQMNSLKPEDTAVYYCAAIYFTKYYTYVYLDYWGQGTQVTVSS

SEQ ID NO: 5349 - protein, 109 aa, Artificial Sequence
  Chemically Synthesized
QVQLQESGGGLVQAGGSLRLSCAASGYIFTATYMGWYRQAPGKERELVASIDDGSNTYYADSVKGRFTISRDNAKNTVYLQMNSLKPEDTAVYYCAAYWGQGTQVTVSS

SEQ ID NO: 5350 - protein, 118 aa, Artificial Sequence
  Chemically Synthesized
QVQLQESGGGLVQAGGSLRLSCAASGNISWFTSMGWYRQAPGKEREFVAAINNGAITNYADSVKGRFTISRDNAKNTVYLQMNSLKPEDTAVYYCAAIAEYTWRYAYWGQGTQVTVSS

SEQ ID NO: 5351 - protein, 116 aa, Artificial Sequence
  Chemically Synthesized
QVQLQESGGGLVQAGGSLRLSCAASGNISYAGMGWYRQAPGKERELVAAIDAGSITYYADSVKGRFTISRDNAKNTVYLQMNSLKPEDTAVYYCAARIFSNSALYWGQGTQVTVSS

SEQ ID NO: 5352 - protein, 118 aa, Artificial Sequence
  Chemically Synthesized
QVQLQESGGGLVQAGGSLRLSCAASGTISYTYTMGWYRQAPGKERELVAGIAAGGNTYYADSVKGRFTISRDNAKNTVYLQMNSLKPEDTAVYYCAVRAYDDLRLIYWGQGTQVTVSS

SEQ ID NO: 5353 - protein, 118 aa, Artificial Sequence
  Chemically Synthesized
QVQLQESGGGLVQAGGSLRLSCAASGNIFAGVYMGWYRQAPGKERELVASIALGAITNYADSVKGRFTISRDNAKNTVYLQMNSLKPEDTAVYYCAARGPYDTDLYYWGQGTQVTVSS

SEQ ID NO: 5354 - protein, 118 aa, Artificial Sequence
  Chemically Synthesized
QVQLQESGGGLVQAGGSLRLSCAASGNISAVNAMGWYRQAPGKEREFVAAIGGGAITNYADSVKGRFTISRDNAKNTVYLQMNSLKPEDTAVYYCAAIYYYYGLYIYWGQGTQVTVSS

SEQ ID NO: 5355 - protein, 122 aa, Artificial Sequence
  Chemically Synthesized
QVQLQESGGGLVQAGGSLRLSCAASGSISPGSGMGWYRQAPGKEREFVAGIGSGGTTYYADSVKGRFTISRDNAKNTVYLQMNSLKPEDTAVYYCAAYALVYTGGYAYFRYWGQGTQVTVSS

SEQ ID NO: 5356 - protein, 121 aa, Artificial Sequence
  Chemically Synthesized
QVQLQESGGGLVQAGGSLRLSCAASGTIFGSSMGWYRQAPGKERELVAAITQGGITYYADSVKGRFTISRDNAKNTVYLQMNSLKPEDTAVYYCAAQGTGGWYVEWDYGYWGQGTQVTVSS

SEQ ID NO: 5357 - protein, 118 aa, Artificial Sequence
  Chemically Synthesized
QVQLQESGGGLVQAGGSLRLSCAASGTIFVGPSMGWYRQAPGKEREFVAGITLGATTYYADSVKGRFTISRDNAKNTVYLQMNSLKPEDTAVYYCAVIGGLRGYHYYWGQGTQVTVSS

SEQ ID NO: 5358 - protein, 118 aa, Artificial Sequence
  Chemically Synthesized
QVQLQESGGGLVQAGGSLRLSCAASGTISARVGMGWYRQAPGKEREFVAGIGPGGTTNYADSVKGRFTISRDNAKNTVYLQMNSLKPEDTAVYYCAVTTGVGDVYGYWGQGTQVTVSS

SEQ ID NO: 5359 - protein, 118 aa, Artificial Sequence
  Chemically Synthesized
QVQLQESGGGLVQAGGSLRLSCAASGTIFISQAMGWYRQAPGKEREFVAGIGIGGNTYYADSVKGRFTISRDNAKNTVYLQMNSLKPEDTAVYYCAVPAFWYGIYFYWGQGTQVTVSS

SEQ ID NO: 5360 - protein, 118 aa, Artificial Sequence
  Chemically Synthesized
QVQLQESGGGLVQAGGSLRLSCAASGTISDGYIMGWYRQAPGKEREFVAGIALGANTYYADSVKGRFTISRDNAKNTVYLQMNSLKPEDTAVYYCAAQYRYSTWFDYWGQGTQVTVSS

SEQ ID NO: 5361 - protein, 122 aa, Artificial Sequence
  Chemically Synthesized
QVQLQESGGGLVQAGGSLRLSCAASGYISTTAGMGWYRQAPGKEREFVAGISLGSNTYYADSVKGRFTISRDNAKNTVYLQMNSLKPEDTAVYYCAVLHAVRRGPYGVHYYWGQGTQVTVSS

SEQ ID NO: 5362 - protein, 126 aa, Artificial Sequence
  Chemically Synthesized
QVQLQESGGGLVQAGGSLRLSCAASGYISTALDMGWYRQAPGKEREFVATINFGTNTNYADSVKGRFTISRDNAKNTVYLQMNSLKPEDTAVYYCAAIDLDAYYFGAGYVRDYSYWGQGTQVTVSS

SEQ ID NO: 5363 - protein, 118 aa, Artificial Sequence
  Chemically Synthesized
QVQLQESGGGLVQAGGSLRLSCAASGTIFFPWEMGWYRQAPGKEREFVASITYGGITNYADSVKGRFTISRDNAKNTVYLQMNSLKPEDTAVYYCAAYLTWDFRHDYWGQGTQVTVSS

SEQ ID NO: 5364 - protein, 123 aa, Artificial Sequence
  Chemically Synthesized
QVQLQESGGGLVQAGGSLRLSCAASGTISPDAEMGWYRQAPGKEREFVAGIGWGGNTNYADSVKGRFTISRDNAKNTVYLQMNSLKPEDTAVYYCAALDLQYYYQLGYQYPYWGQGTQVTVSS

SEQ ID NO: 5365 - protein, 118 aa, Artificial Sequence
  Chemically Synthesized
QVQLQESGGGLVQAGGSLRLSCAASGSIFVVRYMGWYRQAPGKERELVAAITHGTSTYYADSVKGRFTISRDNAKNTVYLQMNSLKPEDTAVYYCAAYWYRYPPHYYWGQGTQVTVSS

SEQ ID NO: 5366 - protein, 118 aa, Artificial Sequence
  Chemically Synthesized
QVQLQESGGGLVQAGGSLRLSCAASGNIFTFGPMGWYRQAPGKERELVAAIALGGTTYYADSVKGRFTISRDNAKNTVYLQMNSLKPEDTAVYYCAAYDIYRDYYVYWGQGTQVTVSS

SEQ ID NO: 5367 - protein, 125 aa, Artificial Sequence
  Chemically Synthesized
QVQLQESGGGLVQAGGSLRLSCAASGSIFLLVMGWYRQAPGKERELVAGIDKGGITYYADSVKGRFTISRDNAKNTVYLQMNSLKPEDTAVYYCAAGREYIPAYVDGHGDNLFYWGQGTQVTVSS

SEQ ID NO: 5368 - protein, 122 aa, Artificial Sequence
  Chemically Synthesized
QVQLQESGGGLVQAGGSLRLSCAASGYISFDIYMGWYRQAPGKEREFVAGIDRGTNTNYADSVKGRFTISRDNAKNTVYLQMNSLKPEDTAVYYCAAYVETRRYRWRYYAYWGQGTQVTVSS

SEQ ID NO: 5369 - protein, 117 aa, Artificial Sequence
  Chemically Synthesized
QVQLQESGGGLVQAGGSLRLSCAASGTISRDEAMGWYRQAPGKERELVAVLLVVVIPYADSVKGRFTISRDNAKNTVYLQMNSLKPEDTAVYYCAVYSGQAVWSCYWGQGTQVTVSS

SEQ ID NO: 5370 - protein, 125 aa, Artificial Sequence
  Chemically Synthesized
QVQLQESGGGLVQAGGSLRLSCAASGSISPNSMGWYRQAPGKEREFVATISGGANTNYADSVKGRFTISRDNAKNTVYLQMNSLKPEDTAVYYCAATQYRDTSLYEYVPTAHPYWGQGTQVTVSS

SEQ ID NO: 5371 - protein, 118 aa, Artificial Sequence
  Chemically Synthesized
QVQLQESGGGLVQAGGSLRLSCAASGNISSTYYMGWYRQAPGKERELVAGIDLGSSTNYADSVKGRFTISRDNAKNTVYLQMNSLKPEDTAVYYCAVVAGSAPIFWYWGQGTQVTVSS

SEQ ID NO: 5372 - protein, 121 aa, Artificial Sequence
  Chemically Synthesized
QVQLQESGGGLVQAGGSLRLSCAASGTISISDAMGWYRQAPGKEREFVAGISNGAITNYADSVKGRFTISRDNAKNTVYLQMNSLKPEDTAVYYCAADSSWWGSTCTLFYWGQGTQVTVSS

SEQ ID NO: 5373 - protein, 121 aa, Artificial Sequence
  Chemically Synthesized
QVQLQESGGGLVQAGGSLRLSCAASGSIFLQSFMGWYRQAPGKEREFVASINSVVIPYADSVKGRFTISRDNAKNTVYLQMNSLKPEDTAVYYCAATYAIATGGGTDYQYWGQGTQVTVSS

SEQ ID NO: 5374 - protein, 122 aa, Artificial Sequence
  Chemically Synthesized
QVQLQESGGGLVQAGGSLRLSCAASGYIFDVDYMGWYRQAPGKERELVAAIARGTITNYADSVKGRFTISRDNAKNTVYLQMNSLKPEDTAVYYCAAWSLRINTAGYDYYYWGQGTQVTVSS

SEQ ID NO: 5375 - protein, 118 aa, Artificial Sequence
  Chemically Synthesized
QVQLQESGGGLVQAGGSLRLSCAASGYIFLRAIMGWYRQAPGKERELVAGIGDGAITNYADSVKGRFTISRDNAKNTVYLQMNSLKPEDTAVYYCAVVYDFDYGHPYWGQGTQVTVSS

SEQ ID NO: 5376 - protein, 122 aa, Artificial Sequence
  Chemically Synthesized
QVQLQESGGGLVQAGGSLRLSCAASGNISPNSSMGWYRQAPGKERELVASISRGGNTYYADSVKGRFTISRDNAKNTVYLQMNSLKPEDTAVYYCAVGRSDSFGLDRGFVYWGQGTQVTVSS

SEQ ID NO: 5377 - protein, 111 aa, Artificial Sequence
  Chemically Synthesized
QVQLQESGGGLVQAGGSLRLSCAASGYISDSRMGWYRQAPGKERELVATIDIGSSTNYADSVKGRFTISRDNAKNTVYLQMNSLKPEDTAVYYCAVDHYYWGQGTQVTVSS

SEQ ID NO: 5378 - protein, 119 aa, Artificial Sequence
  Chemically Synthesized
QVQLQESGGGLVQAGGSLRLSCAASGNILVLTMGWYRQAPGKERELVAAIAYGANTNYADSVKGRFTISRDNAKNTVYLQMNSLKPEDTAVYYCAVYPPSLPTAWFQYWGQGTQVTVSS

SEQ ID NO: 5379 - protein, 111 aa, Artificial Sequence
  Chemically Synthesized
QVQLQESGGGLVQAGGSLRLSCAASGSIFTRYDMGWYRQAPGKERELVATISSGSNTNYADSVKGRFTISRDNAKNTVYLQMNSLKPEDTAVYYCAVPSYWGQGTQVTVSS

SEQ ID NO: 5380 - protein, 123 aa, Artificial Sequence
  Chemically Synthesized
QVQLQESGGGLVQAGGSLRLSCAASGNIFSDRGSMGWYRQAPGKERELVAAITDGGSTNYADSVKGRFTISRDNAKNTVYLQMNSLKPEDTAVYYCAVRPHVGWTDADYYDYWGQGTQVTVSS

SEQ ID NO: 5381 - protein, 125 aa, Artificial Sequence
  Chemically Synthesized
QVQLQESGGGLVQAGGSLRLSCAASGTISTRIDMGWYRQAPGKERELVPLLVWVLVPYADSVKGRFTISRDNAKNTVYLQMNSLKPEDTAVYYCAVVAYRNSYVLHTLHGVLTYWGQGTQVTVSS

SEQ ID NO: 5382 - protein, 122 aa, Artificial Sequence
  Chemically Synthesized
QVQLQESGGGLVQAGGSLRLSCAASGNIFYTFSMGWYRQAPGKERELVATIDRGGTTYYADSVKGRFTISRDNAKNTVYLQMNSLKPEDTAVYYCAAPPYKDKLIKRFLTYWGQGTQVTVSS

SEQ ID NO: 5383 - protein, 118 aa, Artificial Sequence
  Chemically Synthesized
QVQLQESGGGLVQAGGSLRLSCAASGNISPNRRMGWYRQAPGKEREFVAAIGDGGNTYYADSVKGRFTISRDNAKNTVYLQMNSLKPEDTAVYYCAVDYYTVDALPYWGQGTQVTVSS

SEQ ID NO: 5384 - protein, 118 aa, Artificial Sequence
  Chemically Synthesized
QVQLQESGGGLVQAGGSLRLSCAASGNISGRGRMGWYRQAPGKERELVAGITDGSNTYYADSVKGRFTISRDNAKNTVYLQMNSLKPEDTAVYYCAARRSYRWGFIYWGQGTQVTVSS

SEQ ID NO: 5385 - protein, 113 aa, Artificial Sequence
  Chemically Synthesized
QVQLQESGGGLVQAGGSLRLSCAASGNISVFSIMGWYRQAPGKEREFVASIALGSSTNYADSVKGRFTISRDNAKNTVYLQMNSLKPEDTAVYYCAAYLSNYWGQGTQVTVSS

SEQ ID NO: 5386 - protein, 125 aa, Artificial Sequence
  Chemically Synthesized
QVQLQESGGGLVQAGGSLRLSCAASGSISYYYMGWYRQAPGKEREFVAAIGTGTSTNYADSVKGRFTISRDNAKNTVYLQMNSLKPEDTAVYYCAATWETVTRRYINYNRYYDYWGQGTQVTVSS

SEQ ID NO: 5387 - protein, 117 aa, Artificial Sequence
  Chemically Synthesized
QVQLQESGGGLVQAGGSLRLSCAASGNISAGYYMGWYRQAPGKERELVAAITRGLIPYADSVKGRFTISRDNAKNTVYLQMNSLKPEDTAVYYCAVSGYAEGTLIYWGQGTQVTVSS

SEQ ID NO: 5388 - protein, 118 aa, Artificial Sequence
  Chemically Synthesized
QVQLQESGGGLVQAGGSLRLSCAASGYISYYPEMGWYRQAPGKEREFVAAISNGANTNYADSVKGRFTISRDNAKNTVYLQMNSLKPEDTAVYYCAAWHFAYSSLTYWGQGTQVTVSS

SEQ ID NO: 5389 - protein, 122 aa, Artificial Sequence
  Chemically Synthesized
QVQLQESGGGLVQAGGSLRLSCAASGNIFRYYGMGWYRQAPGKEREFVAGIGQGGSTYYADSVKGRFTISRDNAKNTVYLQMNSLKPEDTAVYYCAVYGVHYGDDRSTYYYWGQGTQVTVSS

SEQ ID NO: 5390 - protein, 121 aa, Artificial Sequence
  Chemically Synthesized
QVQLQESGGGLVQAGGSLRLSCAASGTIFQDRMGWYRQAPGKERELVAAITIGGTTNYADSVKGRFTISRDNAKNTVYLQMNSLKPEDTAVYYCAAYDYVHYTAIWYHLYWGQGTQVTVSS

SEQ ID NO: 5391 - protein, 111 aa, Artificial Sequence
  Chemically Synthesized
QVQLQESGGGLVQAGGSLRLSCAASGNISQPGYMGWYRQAPGKEREFVAAQYADSVKGRFTISRDNAKNTVYLQMNSLKPEDTAVYYCAAVLDYRHEHYYWGQGTQVTVSS

SEQ ID NO: 5392 - protein, 121 aa, Artificial Sequence
  Chemically Synthesized
QVQLQESGGGLVQAGGSLRLSCAASGNILNRLMGWYRQAPGKEREFVAAIDLGGITNYADSVKGRFTISRDNAKNTVYLQMNSLKPEDTAVYYCAVDTTYVHYDQVYFSYWGQGTQVTVSS

SEQ ID NO: 5393 - protein, 110 aa, Artificial Sequence
  Chemically Synthesized
QVQLQESGGGLVQAGGSLRLSCAASGNISGSRSMGWYRQAPGKERELVASIGYGTTTNYADSVKGRFTISRDNAKNTVYLQMNSLKPEDTAVYYCAVMYWGQGTQVTVSS

SEQ ID NO: 5394 - protein, 116 aa, Artificial Sequence
  Chemically Synthesized
QVQLQESGGGLVQAGGSLRLSCAASGTISDVVGMGWYRQAPGKEREFVAAIADGGNTYYADSVKGRFTISRDNAKNTVYLQMNSLKPEDTAVYYCAAEHVDEYLYWGQGTQVTVSS

SEQ ID NO: 5395 - protein, 122 aa, Artificial Sequence
  Chemically Synthesized
QVQLQESGGGLVQAGGSLRLSCAASGNIFDYGWMGWYRQAPGKEREFVATITVGTNTYYADSVKGRFTISRDNAKNTVYLQMNSLKPEDTAVYYCAAYLQGWLNDANAHYYWGQGTQVTVSS

SEQ ID NO: 5396 - protein, 118 aa, Artificial Sequence
  Chemically Synthesized
QVQLQESGGGLVQAGGSLRLSCAASGTISGYGWMGWYRQAPGKEREFVATITHGSSTYYADSVKGRFTISRDNAKNTVYLQMNSLKPEDTAVYYCAVYRYEESAYYYWGQGTQVTVSS

SEQ ID NO: 5397 - protein, 118 aa, Artificial Sequence
  Chemically Synthesized
QVQLQESGGGLVQAGGSLRLSCAASGTIFPRSGMGWYRQAPGKEREFVAGITPGGTTYYADSVKGRFTISRDNAKNTVYLQMNSLKPEDTAVYYCAAPIVRRSYLWYWGQGTQVTVSS

SEQ ID NO: 5398 - protein, 122 aa, Artificial Sequence
  Chemically Synthesized
QVQLQESGGGLVQAGGSLRLSCAASGYISEVGYMGWYRQAPGKEREFVAAITIGTNTYYADSVKGRFTISRDNAKNTVYLQMNSLKPEDTAVYYCAASLRADDTYIVYHNYWGQGTQVTVSS

SEQ ID NO: 5399 - protein, 122 aa, Artificial Sequence
  Chemically Synthesized
QVQLQESGGGLVQAGGSLRLSCAASGNISGYFWMGWYRQAPGKEREFVAAITRGGSTNYADSVKGRFTISRDNAKNTVYLQMNSLKPEDTAVYYCAATFYADYYSDSIYLYWGQGTQVTVSS

SEQ ID NO: 5400 - protein, 118 aa, Artificial Sequence
  Chemically Synthesized
QVQLQESGGGLVQAGGSLRLSCAASGSIFGAGWMGWYRQAPGKEREFVATITHGANTYYADSVKGRFTISRDNAKNTVYLQMNSLKPEDTAVYYCAAFFYDTNDLYYWGQGTQVTVSS

SEQ ID NO: 5401 - protein, 118 aa, Artificial Sequence
  Chemically Synthesized
QVQLQESGGGLVQAGGSLRLSCAASGTIFHFSGMGWYRQAPGKEREFVAAINDGTNTNYADSVKGRFTISRDNAKNTVYLQMNSLKPEDTAVYYCAVIYRTLDLHAYWGQGTQVTVSS

SEQ ID NO: 5402 - protein, 120 aa, Artificial Sequence
  Chemically Synthesized
QVQLQESGGGLVQAGGSLRLSCAASGTISSLFGMGWYRQAPGKERELVAAIDTGGTTNYADSVKGRFTISRDNAKNTVYLQMNSLKPEDTAVYYCAVVYYFLYWELYNYWGQGTQVTVSS

SEQ ID NO: 5403 - protein, 126 aa, Artificial Sequence
  Chemically Synthesized
QVQLQESGGGLVQAGGSLRLSCAASGNIFRLWYMGWYRQAPGKEREFVAAITYGGTTYYADSVKGRFTISRDNAKNTVYLQMNSLKPEDTAVYYCAAFYLPSVDTQYDEPSYHLYWGQGTQVTVSS

SEQ ID NO: 5404 - protein, 126 aa, Artificial Sequence
  Chemically Synthesized
QVQLQESGGGLVQAGGSLRLSCAASGTISQPFAMGWYRQAPGKEREFVAGIGPGSNTNYADSVKGRFTISRDNAKNTVYLQMNSLKPEDTAVYYCAVLYRGSHDDERFRYDVHYYWGQGTQVTVSS

SEQ ID NO: 5405 - protein, 118 aa, Artificial Sequence
  Chemically Synthesized
QVQLQESGGGLVQAGGSLRLSCAASGNISKPSQMGWYRQAPGKEREFVAGIGYGASTNYADSVKGRFTISRDNAKNTVYLQMNSLKPEDTAVYYCAARDGPRLQHYYWGQGTQVTVSS

SEQ ID NO: 5406 - protein, 118 aa, Artificial Sequence
  Chemically Synthesized
QVQLQESGGGLVQAGGSLRLSCAASGTISDSPVMGWYRQAPGKEREFVASINYGANTNYADSVKGRFTISRDNAKNTVYLQMNSLKPEDTAVYYCAALTRDLSWYYYWGQGTQVTVSS

SEQ ID NO: 5407 - protein, 118 aa, Artificial Sequence
  Chemically Synthesized
QVQLQESGGGLVQAGGSLRLSCAASGSIFSVTRMGWYRQAPGKEREFVASIGNGAITNYADSVKGRFTISRDNAKNTVYLQMNSLKPEDTAVYYCAALLYDRGYFAYWGQGTQVTVSS

SEQ ID NO: 5408 - protein, 122 aa, Artificial Sequence
  Chemically Synthesized
QVQLQESGGGLVQAGGSLRLSCAASGTISEPFGMGWYRQAPGKERELVAAIARGANTYYADSVKGRFTISRDNAKNTVYLQMNSLKPEDTAVYYCAAVYWGAGDDDVWLFYWGQGTQVTVSS

SEQ ID NO: 5409 - protein, 121 aa, Artificial Sequence
  Chemically Synthesized
QVQLQESGGGLVQAGGSLRLSCAASGYISEDYGMGWYRQAPGKEREFVAGISPGATTYYADSVKGRFTISRDNAKNTVYLQMNSLKPEDTAVYYCAAVRGRPRYGYKHSYWGQGTQVTVSS

SEQ ID NO: 5410 - protein, 117 aa, Artificial Sequence
  Chemically Synthesized
QVQLQESGGGLVQAGGSLRLSCAASGTISVIAYMGWYRQAPGKEREFVAGITPGTTYYADSVKGRFTISRDNAKNTVYLQMNSLKPEDTAVYYCAAYRLYGHVHGYWGQGTQVTVSS

SEQ ID NO: 5411 - protein, 118 aa, Artificial Sequence
  Chemically Synthesized
QVQLQESGGGLVQAGGSLRLSCAASGTISYIGGMGWYRQAPGKERELVAGIGVGTSTNYADSVKGRFTISRDNAKNTVYLQMNSLKPEDTAVYYCAAIGYDHGWHSYWGQGTQVTVSS

SEQ ID NO: 5412 - protein, 126 aa, Artificial Sequence
  Chemically Synthesized
QVQLQESGGGLVQAGGSLRLSCAASGTISPPWTMGWYRQAPGKEREFVAGITRGGNTNYADSVKGRFTISRDNAKNTVYLQMNSLKPEDTAVYYCAATYADNGVDANGETRPLGYWGQGTQVTVSS

SEQ ID NO: 5413 - protein, 122 aa, Artificial Sequence
  Chemically Synthesized
QVQLQESGGGLVQAGGSLRLSCAASGYISNPRPMGWYRQAPGKERELVASIDSGTSTNYADSVKGRFTISRDNAKNTVYLQMNSLKPEDTAVYYCAAHNADWRYDAFGHYYWGQGTQVTVSS

SEQ ID NO: 5414 - protein, 118 aa, Artificial Sequence
  Chemically Synthesized
QVQLQESGGGLVQAGGSLRLSCAASGYIFDSSYMGWYRQAPGKERELVASIDAGSITYYADSVKGRFTISRDNAKNTVYLQMNSLKPEDTAVYYCAAFVYEYYPHPYWGQGTQVTVSS

SEQ ID NO: 5415 - protein, 122 aa, Artificial Sequence
  Chemically Synthesized
QVQLQESGGGLVQAGGSLRLSCAASGTIFSVGGMGWYRQAPGKEREFVATITPGGITNYADSVKGRFTISRDNAKNTVYLQMNSLKPEDTAVYYCAAGVRGDLYYSGYHYYWGQGTQVTVSS

SEQ ID NO: 5416 - protein, 118 aa, Artificial Sequence
  Chemically Synthesized
QVQLQESGGGLVQAGGSLRLSCAASGYIFGYYAMGWYRQAPGKEREFVAGITRGGTTNYADSVKGRFTISRDNAKNTVYLQMNSLKPEDTAVYYCAAAFYTGRIFWYWGQGTQVTVSS

SEQ ID NO: 5417 - protein, 118 aa, Artificial Sequence
  Chemically Synthesized
QVQLQESGGGLVQAGGSLRLSCAASGYISDWVSMGWYRQAPGKEREFVATITWGSNTNYADSVKGRFTISRDNAKNTVYLQMNSLKPEDTAVYYCAAIVYTRSYYYYWGQGTQVTVSS

SEQ ID NO: 5418 - protein, 126 aa, Artificial Sequence
  Chemically Synthesized
QVQLQESGGGLVQAGGSLRLSCAASGYISWAIYMGWYRQAPGKEREFVAGIGRGSTTNYADSVKGRFTISRDNAKNTVYLQMNSLKPEDTAVYYCAVYLGERIDLFGWLVDIHAYWGQGTQVTVSS

SEQ ID NO: 5419 - protein, 118 aa, Artificial Sequence
  Chemically Synthesized
QVQLQESGGGLVQAGGSLRLSCAASGTISQRGGMGWYRQAPGKEREFVAGISYGASTYYADSVKGRFTISRDNAKNTVYLQMNSLKPEDTAVYYCAVYRYTVVYHYYWGQGTQVTVSS

SEQ ID NO: 5420 - protein, 121 aa, Artificial Sequence
  Chemically Synthesized
QVQLQESGGGLVQAGGSLRLSCAASGNIFAQVDMGWYRQAPGKERELVAGINGGSTTYYADSVKGRFTISRDNAKNTVYLQMNSLKPEDTAVYYCAVNRNVTRVRVTTIYWGQGTQVTVSS

SEQ ID NO: 5421 - protein, 109 aa, Artificial Sequence
  Chemically Synthesized
QVQLQESGGGLVQAGGSLRLSCAASGYIFDGYGMGWYRQAPGKERELVATIASGTNTYYADSVKGRFTISRDNAKNTVYLQMNSLKPEDTAVYYCADYWGQGTQVTVSS

SEQ ID NO: 5422 - protein, 118 aa, Artificial Sequence
  Chemically Synthesized
QVQLQESGGGLVQAGGSLRLSCAASGYISGRDDMGWYRQAPGKERELVAGINTGTTTYYADSVKGRFTISRDNAKNTVYLQMNSLKPEDTAVYYCAVPSWDYSTFDYWGQGTQVTVSS

SEQ ID NO: 5423 - protein, 126 aa, Artificial Sequence
  Chemically Synthesized
QVQLQESGGGLVQAGGSLRLSCAASGTISTPWVMGWYRQAPGKEREFVAGITRGANTYYADSVKGRFTISRDNAKNTVYLQMNSLKPEDTAVYYCAATLVPDVHGRSGYDSYYPYWGQGTQVTVSS

SEQ ID NO: 5424 - protein, 122 aa, Artificial Sequence
  Chemically Synthesized
QVQLQESGGGLVQAGGSLRLSCAASGNIFDGDVMGWYRQAPGKEREFVAAIAYGANTNYADSVKGRFTISRDNAKNTVYLQMNSLKPEDTAVYYCAALTLSTRPGSVRHYYWGQGTQVTVSS

SEQ ID NO: 5425 - protein, 118 aa, Artificial Sequence
  Chemically Synthesized
QVQLQESGGGLVQAGGSLRLSCAASGSISVESYMGWYRQAPGKEREFVASISAGGTTNYADSVKGRFTISRDNAKNTVYLQMNSLKPEDTAVYYCAVVYTEKRWYWYWGQGTQVTVSS

SEQ ID NO: 5426 - protein, 126 aa, Artificial Sequence
  Chemically Synthesized
QVQLQESGGGLVQAGGSLRLSCAASGTISDDGDMGWYRQAPGKERELVAAIADGTTTYYADSVKGRFTISRDNAKNTVYLQMNSLKPEDTAVYYCAAASIVPDSDNYYKRAYHVYWGQGTQVTVSS

SEQ ID NO: 5427 - protein, 118 aa, Artificial Sequence
  Chemically Synthesized
QVQLQESGGGLVQAGGSLRLSCAASGYISWYRAMGWYRQAPGKERELVAAIAYGSNTYYADSVKGRFTISRDNAKNTVYLQMNSLKPEDTAVYYCAVETPTPSLYDYWGQGTQVTVSS

SEQ ID NO: 5428 - protein, 117 aa, Artificial Sequence
  Chemically Synthesized
QVQLQESGGGLVQAGGSLRLSCAASGSILTMLMGWYRQAPGKERELVASIAGGTTTYYADSVKGRFTISRDNAKNTVYLQMNSLKPEDTAVYYCAAEYLNFNDFGYWGQGTQVTVSS

SEQ ID NO: 5429 - protein, 118 aa, Artificial Sequence
  Chemically Synthesized
QVQLQESGGGLVQAGGSLRLSCAASGNIFTHYYMGWYRQAPGKEREFVAGIDQGSTTYYADSVKGRFTISRDNAKNTVYLQMNSLKPEDTAVYYCAAVRDVADSHTYWGQGTQVTVSS

SEQ ID NO: 5430 - protein, 118 aa, Artificial Sequence
  Chemically Synthesized
QVQLQESGGGLVQAGGSLRLSCAASGTIFPPSVMGWYRQAPGKEREFVASIDYGSSTYYADSVKGRFTISRDNAKNTVYLQMNSLKPEDTAVYYCAAVGRHSGIHYYWGQGTQVTVSS

SEQ ID NO: 5431 - protein, 118 aa, Artificial Sequence
  Chemically Synthesized
QVQLQESGGGLVQAGGSLRLSCAASGTISVGYYMGWYRQAPGKEREFVAGIGAGGSTNYADSVKGRFTISRDNAKNTVYLQMNSLKPEDTAVYYCAATGIATDLLGYWGQGTQVTVSS

SEQ ID NO: 5432 - protein, 117 aa, Artificial Sequence
  Chemically Synthesized
QVQLQESGGGLVQAGGSLRLSCAASGTISPFAMGWYRQAPGKEREFVAAIADGTSTNYADSVKGRFTISRDNAKNTVYLQMNSLKPEDTAVYYCAAVIFDESYHYYWGQGTQVTVSS

SEQ ID NO: 5433 - protein, 123 aa, Artificial Sequence
  Chemically Synthesized
QVQLQESGGGLVQAGGSLRLSCAASGTIFSGWRMGWYRQAPGKERELVATITDGTNTNYADSVKGRFTISRDNAKNTVYLQMNSLKPEDTAVYYCAAFVDDDYYSTLTCTMYWGQGTQVTVSS

SEQ ID NO: 5434 - protein, 126 aa, Artificial Sequence
  Chemically Synthesized
QVQLQESGGGLVQAGGSLRLSCAASGTISTDAIMGWYRQAPGKERELVAAIDFGSNTYYADSVKGRFTISRDNAKNTVYLQMNSLKPEDTAVYYCAAYWASGASDTSGLYRLYYYWGQGTQVTVSS

SEQ ID NO: 5435 - protein, 118 aa, Artificial Sequence
  Chemically Synthesized
QVQLQESGGGLVQAGGSLRLSCAASGNISYPLLMGWYRQAPGKEREFVASIDLGTSTNYADSVKGRFTISRDNAKNTVYLQMNSLKPEDTAVYYCAAVTRFPRHLSYWGQGTQVTVSS

SEQ ID NO: 5436 - protein, 118 aa, Artificial Sequence
  Chemically Synthesized
QVQLQESGGGLVQAGGSLRLSCAASGNISQDVAMGWYRQAPGKEREFVATITWGSTTNYADSVKGRFTISRDNAKNTVYLQMNSLKPEDTAVYYCAVPRWGLDYLAYWGQGTQVTVSS

SEQ ID NO: 5437 - protein, 122 aa, Artificial Sequence
  Chemically Synthesized
QVQLQESGGGLVQAGGSLRLSCAASGNIFALRGMGWYRQAPGKEREFVAGISGGGSTNYADSVKGRFTISRDNAKNTVYLQMNSLKPEDTAVYYCAAVVYQLHRPDRYLGYWGQGTQVTVSS

SEQ ID NO: 5438 - protein, 118 aa, Artificial Sequence
  Chemically Synthesized
QVQLQESGGGLVQAGGSLRLSCAASGSISPPAGMGWYRQAPGKEREFVAGIGWGGNTNYADSVKGRFTISRDNAKNTVYLQMNSLKPEDTAVYYCAAVTYDSYYHWYWGQGTQVTVSS

SEQ ID NO: 5439 - protein, 118 aa, Artificial Sequence
  Chemically Synthesized
QVQLQESGGGLVQAGGSLRLSCAASGNIFGYRAMGWYRQAPGKERELVASITDGSTTYYADSVKGRFTISRDNAKNTVYLQMNSLKPEDTAVYYCAAIYRLTYWFYYWGQGTQVTVSS

SEQ ID NO: 5440 - protein, 125 aa, Artificial Sequence
  Chemically Synthesized
QVQLQESGGGLVQAGGSLRLSCAASGTISLWGFMGWYRQAPGKEREFVAGISEGGNTNYADSVKGRFTISRDNAKNTVYLQMNSLKPEDTAVYYCAVIWRDGGGRYVGGQLHYYWGQGTQVTVSS

SEQ ID NO: 5441 - protein, 118 aa, Artificial Sequence
  Chemically Synthesized
QVQLQESGGGLVQAGGSLRLSCAASGNIFWVSRMGWYRQAPGKERELVAAIGIGANTYYADSVKGRFTISRDNAKNTVYLQMNSLKPEDTAVYYCAALRRFQDHHRYWGQGTQVTVSS

SEQ ID NO: 5442 - protein, 118 aa, Artificial Sequence
  Chemically Synthesized
QVQLQESGGGLVQAGGSLRLSCAASGNISIGAAMGWYRQAPGKERELVAAIGYGSSTNYADSVKGRFTISRDNAKNTVYLQMNSLKPEDTAVYYCAVVYKRGRWYFYWGQGTQVTVSS

SEQ ID NO: 5443 - protein, 122 aa, Artificial Sequence
  Chemically Synthesized
QVQLQESGGGLVQAGGSLRLSCAASGSISGRVYMGWYRQAPGKERELVATIDRGAITNYADSVKGRFTISRDNAKNTVYLQMNSLKPEDTAVYYCAVYIYYQYYFKTNFKYWGQGTQVTVSS

SEQ ID NO: 5444 - protein, 116 aa, Artificial Sequence
  Chemically Synthesized
QVQLQESGGGLVQAGGSLRLSCAASGNIFSLYVMGWYRQAPGKERELVAGITGGTTNYADSVKGRFTISRDNAKNTVYLQMNSLKPEDTAVYYCALTTLTLSTMYWGQGTQVTVSS

SEQ ID NO: 5445 - protein, 118 aa, Artificial Sequence
  Chemically Synthesized
QVQLQESGGGLVQAGGSLRLSCAASGNISYTPYMGWYRQAPGKERELVAGINTGASTYYADSVKGRFTISRDNAKNTVYLQMNSLKPEDTAVYYCAVEAILLIDLDYWGQGTQVTVSS

SEQ ID NO: 5446 - protein, 110 aa, Artificial Sequence
  Chemically Synthesized
QVQLQESGGGLVQAGGSLRLSCAASGNIFDPRDMGWYRQAPGKEREFVAAITAGTNTNYADSVKGRFTISRDNAKNTVYLQMNSLKPEDTAVYYCALIYWGQGTQVTVSS

SEQ ID NO: 5447 - protein, 118 aa, Artificial Sequence
  Chemically Synthesized
QVQLQESGGGLVQAGGSLRLSCAASGSISYADTMGWYRQAPGKEREFVATISDGGSTYYADSVKGRFTISRDNAKNTVYLQMNSLKPEDTAVYYCAAIAYVTKWLAYWGQGTQVTVSS

SEQ ID NO: 5448 - protein, 126 aa, Artificial Sequence
  Chemically Synthesized
QVQLQESGGGLVQAGGSLRLSCAASGNIFAADAMGWYRQAPGKEREFVATITTGSNTNYADSVKGRFTISRDNAKNTVYLQMNSLKPEDTAVYYCAAVWKRTDVNDYSYSQYYWYWGQGTQVTVSS

SEQ ID NO: 5449 - protein, 126 aa, Artificial Sequence
  Chemically Synthesized
QVQLQESGGGLVQAGGSLRLSCAASGYISPDGYMGWYRQAPGKERELVAGITSGTITYYADSVKGRFTISRDNAKNTVYLQMNSLKPEDTAVYYCAVVLGTLHVPNESQAYSYAYWGQGTQVTVSS

SEQ ID NO: 5450 - protein, 118 aa, Artificial Sequence
  Chemically Synthesized
QVQLQESGGGLVQAGGSLRLSCAASGSIFRTYAMGWYRQAPGKEREFVAAITRGSNTYYADSVKGRFTISRDNAKNTVYLQMNSLKPEDTAVYYCAVSYNKRYPFTYWGQGTQVTVSS

SEQ ID NO: 5451 - protein, 118 aa, Artificial Sequence
  Chemically Synthesized
QVQLQESGGGLVQAGGSLRLSCAASGNISPTTDMGWYRQAPGKERELVAGITYGAITYYADSVKGRFTISRDNAKNTVYLQMNSLKPEDTAVYYCAAEANILGGHDYWGQGTQVTVSS

SEQ ID NO: 5452 - protein, 122 aa, Artificial Sequence
  Chemically Synthesized
QVQLQESGGGLVQAGGSLRLSCAASGTIFVVYGMGWYRQAPGKERELVAAINRGTNTNYADSVKGRFTISRDNAKNTVYLQMNSLKPEDTAVYYCAAIVTGDYRTRGWYYYWGQGTQVTVSS

SEQ ID NO: 5453 - protein, 118 aa, Artificial Sequence
  Chemically Synthesized
QVQLQESGGGLVQAGGSLRLSCAASGNIFGSNVMGWYRQAPGKEREFVAGIAGGSITYYADSVKGRFTISRDNAKNTVYLQMNSLKPEDTAVYYCAVYGDPSNSYPYWGQGTQVTVSS

SEQ ID NO: 5454 - protein, 121 aa, Artificial Sequence
  Chemically Synthesized
QVQLQESGGGLVQAGGSLRLSCAASGNISGYSMGWYRQAPGKEREFVASIDGGGNTYYADSVKGRFTISRDNAKNTVYLQMNSLKPEDTAVYYCAAITPTQGYVVDDHSYWGQGTQVTVSS

SEQ ID NO: 5455 - protein, 125 aa, Artificial Sequence
  Chemically Synthesized
QVQLQESGGGLVQAGGSLRLSCAASGTIFETTSMGWYRQAPGKEREFVASISYGAITYYADSVKGRFTISRDNAKNTVYLQMNSLKPEDTAVYYCAASSLLSSVSGTTTGLTMYWGQGTQVTVSS

SEQ ID NO: 5456 - protein, 117 aa, Artificial Sequence
  Chemically Synthesized
QVQLQESGGGLVQAGGSLRLSCAASGYISDTDKMGWYRQAPGKERELVATIGDGASTNYADSVKGRFTISRDNAKNTVYLQMNSLKPEDTAVYYCAAYDPHATASYWGQGTQVTVSS

SEQ ID NO: 5457 - protein, 117 aa, Artificial Sequence
  Chemically Synthesized
QVQLQESGGGLVQAGGSLRLSCAASGTIFYAYYMGWYRQAPGKERELLPVLVRVLLPYADSVKGRFTISRDNAKNTVYLQMNSLKPEDTAVYYCAVAFEGYTGLEYWGQGTQVTVSS

SEQ ID NO: 5458 - protein, 118 aa, Artificial Sequence
  Chemically Synthesized
QVQLQESGGGLVQAGGSLRLSCAASGNISRPASMGWYRQAPGKEREFVASINGGTITNYADSVKGRFTISRDNAKNTVYLQMNSLKPEDTAVYYCAVIWRVDRYHFYWGQGTQVTVSS

SEQ ID NO: 5459 - protein, 122 aa, Artificial Sequence
  Chemically Synthesized
QVQLQESGGGLVQAGGSLRLSCAASGNISRDSAMGWYRQAPGKEREFVAGIGLGTNTNYADSVKGRFTISRDNAKNTVYLQMNSLKPEDTAVYYCAVIIRSNANAVTYHFYWGQGTQVTVSS

SEQ ID NO: 5460 - protein, 121 aa, Artificial Sequence
  Chemically Synthesized
QVQLQESGGGLVQAGGSLRLSCAASGTISWNLHMGWYRQAPGKERELVAGISSVVVPYADSVKGRFTISRDNAKNTVYLQMNSLKPEDTAVYYCAVDTVVTAPYVKGHIYWGQGTQVTVSS

SEQ ID NO: 5461 - protein, 120 aa, Artificial Sequence
  Chemically Synthesized
QVQLQESGGGLVQAGGSLRLSCAASGYISGGDYMGWYRQAPGKEREFVAAIGIAGTITYYADSVKGRFTISRDNAKNTVYLQMNSLKPEDTAVYYCAVGTDIRDINHYYWGQGTQVTVSS

SEQ ID NO: 5462 - protein, 125 aa, Artificial Sequence
  Chemically Synthesized
QVQLQESGGGLVQAGGSLRLSCAASGTIFYLPGMGWYRQAPGKEREFVATIDYGTNTYYADSVKGRFTISRDNAKNTVYLQMNSLKPEDTAVYYCAADYGLDDDSGRPWWDFYYWGQGTQVTVSS

SEQ ID NO: 5463 - protein, 122 aa, Artificial Sequence
  Chemically Synthesized
QVQLQESGGGLVQAGGSLRLSCAASGYISGVTNMGWYRQAPGKEREFVAAIDAGATTNYADSVKGRFTISRDNAKNTVYLQMNSLKPEDTAVYYCAAIGRPDRVYLAYHYYWGQGTQVTVSS

SEQ ID NO: 5464 - protein, 110 aa, Artificial Sequence
  Chemically Synthesized
QVQLQESGGGLVQAGGSLRLSCAASGTISDYYMGWYRQAPGKEREFVAGITNGWYYQYADSVKGRFTISRDNAKNTVYLQMNSLKPEDTAVYYCAADYYWGQGTQVTVSS

SEQ ID NO: 5465 - protein, 122 aa, Artificial Sequence
  Chemically Synthesized
QVQLQESGGGLVQAGGSLRLSCAASGNIFRIRNMGWYRQAPGKEREFVASIALGGNTYYADSVKGRFTISRDNAKNTVYLQMNSLKPEDTAVYYCAVAPYAYVYHHRQYLYWGQGTQVTVSS

SEQ ID NO: 5466 - protein, 117 aa, Artificial Sequence
  Chemically Synthesized
QVQLQESGGGLVQAGGSLRLSCAASGTISYEGAMGWYRQAPGKERELVAGINGGTTNYADSVKGRFTISRDNAKNTVYLQMNSLKPEDTAVYYCAVLRRTRRWHWYWGQGTQVTVSS

SEQ ID NO: 5467 - protein, 118 aa, Artificial Sequence
  Chemically Synthesized
QVQLQESGGGLVQAGGSLRLSCAASGSISPYAPMGWYRQAPGKERELVAAIASGASTNYADSVKGRFTISRDNAKNTVYLQMNSLKPEDTAVYYCAVYQQGIPAHAYWGQGTQVTVSS

SEQ ID NO: 5468 - protein, 126 aa, Artificial Sequence
  Chemically Synthesized
QVQLQESGGGLVQAGGSLRLSCAASGTIFLPAIMGWYRQAPGKEREFVAAIDGGGITNYADSVKGRFTISRDNAKNTVYLQMNSLKPEDTAVYYCAAKYPQPIWAWAYGQYYHYYWGQGTQVTVSS

SEQ ID NO: 5469 - protein, 117 aa, Artificial Sequence
  Chemically Synthesized
QVQLQESGGGLVQAGGSLRLSCAASGTIFPWYAMGWYRQAPGKEREFVAAIGAGGNTYYADSVKGRFTISRDNAKNTVYLQMNSLKPEDTAVYYCAVLVYNPIHYYWGQGTQVTVSS

SEQ ID NO: 5470 - protein, 122 aa, Artificial Sequence
  Chemically Synthesized
QVQLQESGGGLVQAGGSLRLSCAASGYIFAVVAMGWYRQAPGKEREFVAGIGWGTNTNYADSVKGRFTISRDNAKNTVYLQMNSLKPEDTAVYYCAVIVVTDAQRSNYHYYWGQGTQVTVSS

SEQ ID NO: 5471 - protein, 118 aa, Artificial Sequence
  Chemically Synthesized
QVQLQESGGGLVQAGGSLRLSCAASGTIFSTPLMGWYRQAPGKEREFVAGIGLGGITNYADSVKGRFTISRDNAKNTVYLQMNSLKPEDTAVYYCAVHSRDYDSFHYWGQGTQVTVSS

SEQ ID NO: 5472 - protein, 118 aa, Artificial Sequence
  Chemically Synthesized
QVQLQESGGGLVQAGGSLRLSCAASGSISRLTYMGWYRQAPGKEREFVASIGAGANTNYADSVKGRFTISRDNAKNTVYLQMNSLKPEDTAVYYCAAIDRRNVYHYYWGQGTQVTVSS

SEQ ID NO: 5473 - protein, 122 aa, Artificial Sequence
  Chemically Synthesized
QVQLQESGGGLVQAGGSLRLSCAASGYISPISGMGWYRQAPGKERELVASINEGGNTYYADSVKGRFTISRDNAKNTVYLQMNSLKPEDTAVYYCAVQVVTRIYEQYDFYYWGQGTQVTVSS

SEQ ID NO: 5474 - protein, 117 aa, Artificial Sequence
  Chemically Synthesized
QVQLQESGGGLVQAGGSLRLSCAASGNISLGYTMGWYRQAPGKEREFVASISAGGTTYYADSVKGRFTISRDNAKNTVYLQMNSLKPEDTAVYYCAFQKGDDLFGYWGQGTQVTVSS

SEQ ID NO: 5475 - protein, 122 aa, Artificial Sequence
  Chemically Synthesized
QVQLQESGGGLVQAGGSLRLSCAASGTISDQGYMGWYRQAPGKEREFVAAIASGGITYYADSVKGRFTISRDNAKNTVYLQMNSLKPEDTAVYYCAVYYYNISDDGLHLSYWGQGTQVTVSS

SEQ ID NO: 5476 - protein, 124 aa, Artificial Sequence
  Chemically Synthesized
QVQLQESGGGLVQAGGSLRLSCAASGNISDYYTMGWYRQAPGKEREFVAAIGPGGTSTNYADSVKGRFTISRDNAKNTVYLQMNSLKPEDTAVYYCAALWFTYGGGRTDYYYYWGQGTQVTVSS

SEQ ID NO: 5477 - protein, 119 aa, Artificial Sequence
  Chemically Synthesized
QVQLQESGGGLVQAGGSLRLSCAASGNISSPDIMGWYRQAPGKEREFVAAIGIGTTTNYADSVKGRFTISRDNAKNTVYLQMNSLKPEDTAVYYCAVVYRGAFAYLYYWGQGTQVTVSS

SEQ ID NO: 5478 - protein, 116 aa, Artificial Sequence
  Chemically Synthesized
QVQLQESGGGLVQAGGSLRLSCAASGNIFETFMGWYRQAPGKERELVAGIAYGSTNYADSVKGRFTISRDNAKNTVYLQMNSLKPEDTAVYYCAVAGDGDQLHDYWGQGTQVTVSS

SEQ ID NO: 5479 - protein, 116 aa, Artificial Sequence
  Chemically Synthesized
QVQLQESGGGLVQAGGSLRLSCAASGTIFPAGSMGWYRQAPGKEREFVAGIGNGSITYYADSVKGRFTISRDNAKNTVYLQMNSLKPEDTAVYYCAAVYDNLHYYWGQGTQVTVSS

SEQ ID NO: 5480 - protein, 121 aa, Artificial Sequence
  Chemically Synthesized
QVQLQESGGGLVQAGGSLRLSCAASGTISRAIGMGWYRQAPGKEREFVAAIGDGANTYYADSVKGRFTISRDNAKNTVYLQMNSLKPEDTAVYYCAVLTRYGGHNRYHYYWGQGTQVTVSS

SEQ ID NO: 5481 - protein, 117 aa, Artificial Sequence
  Chemically Synthesized
QVQLQESGGGLVQAGGSLRLSCAASGYISTVVWMGWYRQAPGKEREFVAAIDYGGSTNYADSVKGRFTISRDNAKNTVYLQMNSLKPEDTAVYYCAAWESRNSSLYWGQGTQVTVSS

SEQ ID NO: 5482 - protein, 116 aa, Artificial Sequence
  Chemically Synthesized
QVQLQESGGGLVQAGGSLRLSCAASGYIFQSIVMGWYRQAPGKERELVAGIGYGANTYYADSVKGRFTISRDNAKNTVYLQMNSLKPEDTAVYYCAAIALYIDGYWGQGTQVTVSS

SEQ ID NO: 5483 - protein, 118 aa, Artificial Sequence
  Chemically Synthesized
QVQLQESGGGLVQAGGSLRLSCAASGNIFKFTAMGWYRQAPGKEREFVAAIGYGGTTNYADSVKGRFTISRDNAKNTVYLQMNSLKPEDTAVYYCAAIGRRGGLHYYWGQGTQVTVSS

SEQ ID NO: 5484 - protein, 121 aa, Artificial Sequence
  Chemically Synthesized
QVQLQESGGGLVQAGGSLRLSCAASGTISIIFAMGWYRQAPGKEREFVAGIGRGTTTYYADSVKGRFTISRDNAKNTVYLQMNSLKPEDTAVYYCAAHVFYDNVVQRHAYWGQGTQVTVSS

SEQ ID NO: 5485 - protein, 122 aa, Artificial Sequence
  Chemically Synthesized
QVQLQESGGGLVQAGGSLRLSCAASGNISFIGAMGWYRQAPGKEREFVAGINVGTNTYYADSVKGRFTISRDNAKNTVYLQMNSLKPEDTAVYYCAAYVFVSRIDLRYLVYWGQGTQVTVSS

SEQ ID NO: 5486 - protein, 120 aa, Artificial Sequence
  Chemically Synthesized
QVQLQESGGGLVQAGGSLRLSCAASGNISPRYSMGWYRQAPGKEREFVAGIAGGTTYYADSVKGRFTISRDNAKNTVYLQMNSLKPEDTAVYYCATLGGDKGHYSLHYYWGQGTQVTVSS

SEQ ID NO: 5487 - protein, 121 aa, Artificial Sequence
  Chemically Synthesized
QVQLQESGGGLVQAGGSLRLSCAASGTISDRIVMGWYRQAPGKERELVAGIGQGGNTYYADSVKGRFTISRDNAKNTVYLQMNSLKPEDTAVYYCAAHVFYDNVVQRHAYWGQGTQVTVSS

SEQ ID NO: 5488 - protein, 122 aa, Artificial Sequence
  Chemically Synthesized
QVQLQESGGGLVQAGGSLRLSCAASGTISIIFAMGWYRQAPGKEREFVAGIGRGTTTYYADSVKGRFTISRDNAKNTVYLQMNSLKPEDTAVYYCAVVGANVDDPRFVHRYWGQGTQVTVSS

SEQ ID NO: 5489 - protein, 121 aa, Artificial Sequence
  Chemically Synthesized
QVQLQESGGGLVQAGGSLRLSCAASGNISYIQSMGWYRQAPGKEREFVAGIARGSSTYYADSVKGRFTISRDNAKNTVYLQMNSLKPEDTAVYYCAAHVFYDNVVQRHAYWGQGTQVTVSS

SEQ ID NO: 5490 - protein, 118 aa, Artificial Sequence
  Chemically Synthesized
QVQLQESGGGLVQAGGSLRLSCAASGTISIIFAMGWYRQAPGKEREFVAGIGRGTTTYYADSVKGRFTISRDNAKNTVYLQMNSLKPEDTAVYYCAAYYQYYGLLRYWGQGTQVTVSS

SEQ ID NO: 5491 - protein, 118 aa, Artificial Sequence
  Chemically Synthesized
QVQLQESGGGLVQAGGSLRLSCAASGTISIIFAMGWYRQAPGKEREFVAGIGRGTTTYYADSVKGRFTISRDNAKNTVYLQMNSLKPEDTAVYYCAALDYRDGFHRYWGQGTQVTVSS

SEQ ID NO: 5492 - protein, 126 aa, Artificial Sequence
  Chemically Synthesized
QVQLQESGGGLVQAGGSLRLSCAASGTISGVAAMGWYRQAPGKEREFVAGIGAGATTYYADSVKGRFTISRDNAKNTVYLQMNSLKPEDTAVYYCAALVGSGRDGRNRDTRLHYYWGQGTQVTVSS

SEQ ID NO: 5493 - protein, 121 aa, Artificial Sequence
  Chemically Synthesized
QVQLQESGGGLVQAGGSLRLSCAASGNIFYDISMGWYRQAPGKEREFVAGIATGGNTYYADSVKGRFTISRDNAKNTVYLQMNSLKPEDTAVYYCAAHVFYDNVVQRHAYWGQGTQVTVSS

SEQ ID NO: 5494 - protein, 118 aa, Artificial Sequence
  Chemically Synthesized
QVQLQESGGGLVQAGGSLRLSCAASGNISQIYGMGWYRQAPGKEREFVAGITVGSNTYYADSVKGRFTISRDNAKNTVYLQMNSLKPEDTAVYYCAAYVYDRVALRYWGQGTQVTVSS

SEQ ID NO: 5495 - protein, 119 aa, Artificial Sequence
  Chemically Synthesized
QVQLQESGGGLVQAGGSLRLSCAASGYISGPTAMGWYRQAPGKEREFVAGISTGSSTYYADSVKGRFTISRDNAKNTVYLQMNSLKPEDTAVYYCAAYVSGRTVTLRYWGQGTQVTVSS

SEQ ID NO: 5496 - protein, 121 aa, Artificial Sequence
  Chemically Synthesized
QVQLQESGGGLVQAGGSLRLSCAASGTIFPYGAMGWYRQAPGKEREFVAAIAPGGTTNYADSVKGRFTISRDNAKNTVYLQMNSLKPEDTAVYYCAAHVFYDNVVQRHAYWGQGTQVTVSS

SEQ ID NO: 5497 - protein, 122 aa, Artificial Sequence
  Chemically Synthesized
QVQLQESGGGLVQAGGSLRLSCAASGYISSARSMGWYRQAPGKEREFVAGITSGTNTYYADSVKGRFTISRDNAKNTVYLQMNSLKPEDTAVYYCAAYVIYDGAYTNAHRYWGQGTQVTVSS

SEQ ID NO: 5498 - protein, 126 aa, Artificial Sequence
  Chemically Synthesized
QVQLQESGGGLVQAGGSLRLSCAASGTISIIFAMGWYRQAPGKEREFVAGIGRGTTTYYADSVKGRFTISRDNAKNTVYLQMNSLKPEDTAVYYCAARWKARGTGYGQWSKLHHYWGQGTQVTVSS

SEQ ID NO: 5499 - protein, 118 aa, Artificial Sequence
  Chemically Synthesized
QVQLQESGGGLVQAGGSLRLSCAASGYISRRTSMGWYRQAPGKEREFVAGIAYGSTTYYADSVKGRFTISRDNAKNTVYLQMNSLKPEDTAVYYCAAYDITYDGFRYWGQGTQVTVSS

SEQ ID NO: 5500 - protein, 118 aa, Artificial Sequence
  Chemically Synthesized
QVQLQESGGGLVQAGGSLRLSCAASGNISYVYSMGWYRQAPGKEREFVAGITYGASTYYADSVKGRFTISRDNAKNTVYLQMNSLKPEDTAVYYCAAYYHDAIWYRYWGQGTQVTVSS

SEQ ID NO: 5501 - protein, 125 aa, Artificial Sequence
  Chemically Synthesized
QVQLQESGGGLVQAGGSLRLSCAASGSISRVSMGWYRQAPGKEREFVAGITSGTNTYYADSVKGRFTISRDNAKNTVYLQMNSLKPEDTAVYYCAVYHAVRGARDGGTSRVYRYWGQGTQVTVSS

SEQ ID NO: 5502 - protein, 122 aa, Artificial Sequence
  Chemically Synthesized
QVQLQESGGGLVQAGGSLRLSCAASGTISSQNNMGWYRQAPGKEREFVAGIASGTTTYYADSVKGRFTISRDNAKNTVYLQMNSLKPEDTAVYYCAAYLWRQDDRKTLYRYWGQGTQVTVSS

SEQ ID NO: 5503 - protein, 118 aa, Artificial Sequence
  Chemically Synthesized
QVQLQESGGGLVQAGGSLRLSCAASGSISVDASMGWYRQAPGKEREFVAGIAEGGNTYYADSVKGRFTISRDNAKNTVYLQMNSLKPEDTAVYYCAVIIYLRTFHRYWGQGTQVTVSS

SEQ ID NO: 5504 - protein, 118 aa, Artificial Sequence
  Chemically Synthesized
QVQLQESGGGLVQAGGSLRLSCAASGNISDRDGMGWYRQAPGKEREFVAGIGGGANTYYADSVKGRFTISRDNAKNTVYLQMNSLKPEDTAVYYCAVVVYHGHVYRYWGQGTQVTVSS

SEQ ID NO: 5505 - protein, 117 aa, Artificial Sequence
  Chemically Synthesized
QVQLQESGGGLVQAGGSLRLSCAASGSISRVSMGWYRQAPGKEREFVAGITSGTNTYYADSVKGRFTISRDNAKNTVYLQMNSLKPEDTAVYYCAAYYQYYGLLRYWGQGTQVTVSS

SEQ ID NO: 5506 - protein, 118 aa, Artificial Sequence
  Chemically Synthesized
QVQLQESGGGLVQAGGSLRLSCAASGTIFKSAGMGWYRQAPGKEREFVAGIAPGAITYYADSVKGRFTISRDNAKNTVYLQMNSLKPEDTAVYYCAALVADGRPYRYWGQGTQVTVSS

SEQ ID NO: 5507 - protein, 118 aa, Artificial Sequence
  Chemically Synthesized
QVQLQESGGGLVQAGGSLRLSCAASGYIFHQTNMGWYRQAPGKEREFVAGISRGSSTYYADSVKGRFTISRDNAKNTVYLQMNSLKPEDTAVYYCAAYVIADYYYRYWGQGTQVTVSS

SEQ ID NO: 5508 - protein, 118 aa, Artificial Sequence
  Chemically Synthesized
QVQLQESGGGLVQAGGSLRLSCAASGSISWYRSMGWYRQAPGKEREFVAGITIGGNTYYADSVKGRFTISRDNAKNTVYLQMNSLKPEDTAVYYCAVYYGYDSVHYYWGQGTQVTVSS

SEQ ID NO: 5509 - protein, 121 aa, Artificial Sequence
  Chemically Synthesized
QVQLQESGGGLVQAGGSLRLSCAASGNISYIQSMGWYRQAPGKEREFVAGIGRGTTTYYADSVKGRFTISRDNAKNTVYLQMNSLKPEDTAVYYCAAHVFYDNVVQRHAYWGQGTQVTVSS

SEQ ID NO: 5510 - protein, 118 aa, Artificial Sequence
  Chemically Synthesized
QVQLQESGGGLVQAGGSLRLSCAASGTISIIFAMGWYRQAPGKEREFVAGIARGSSTYYADSVKGRFTISRDNAKNTVYLQMNSLKPEDTAVYYCAAYYQYYGLLRYWGQGTQVTVSS

SEQ ID NO: 5511 - protein, 118 aa, Artificial Sequence
  Chemically Synthesized
QVQLQESGGGLVQAGGSLRLSCAASGTISIIFAMGWYRQAPGKEREFVAGIATGGNTYYADSVKGRFTISRDNAKNTVYLQMNSLKPEDTAVYYCAALDYRDGFHRYWGQGTQVTVSS

SEQ ID NO: 5512 - protein, 121 aa, Artificial Sequence
  Chemically Synthesized
QVQLQESGGGLVQAGGSLRLSCAASGTISDRIVMGWYRQAPGKEREFVAGIGRGTTTYYADSVKGRFTISRDNAKNTVYLQMNSLKPEDTAVYYCAAHVFYDNVVQRHAYWGQGTQVTVSS

SEQ ID NO: 5513 - protein, 116 aa, Artificial Sequence
  Chemically Synthesized
QVQLQESGGGLVQAGGSLRLSCAASGSIFPSAGMGWYRQAPGKEREFVAGIAPGASTYYADSVKGRFTISRDNAKNTVYLQMNSLKPEDTAVYYCAAYYPRGYRYWGQGTQVTVSS

SEQ ID NO: 5514 - protein, 121 aa, Artificial Sequence
  Chemically Synthesized
QVQLQESGGGLVQAGGSLRLSCAASGTIFKNTAMGWYRQAPGKEREFVATIDSVVVPYADSVKGRFTISRDNAKNTVYLQMNSLKPEDTAVYYCAAEPGNDDYQAFGHWYWGQGTQVTVSS

SEQ ID NO: 5515 - protein, 125 aa, Artificial Sequence
  Chemically Synthesized
QVQLQESGGGLVQAGGSLRLSCAASGTIFDPQFMGWYRQAPGKERELVPVLILVVLPYADSVKGRFTISRDNAKNTVYLQMNSLKPEDTAVYYCAVDGDGYSVEADRNTSGYRYWGQGTQVTVSS

SEQ ID NO: 5516 - protein, 126 aa, Artificial Sequence
  Chemically Synthesized
QVQLQESGGGLVQAGGSLRLSCAASGSIFLVQGMGWYRQAPGKEREFVAGIASGSNTYYADSVKGRFTISRDNAKNTVYLQMNSLKPEDTAVYYCAALVGSGRDGRNRDTRLHYYWGQGTQVTVSS

SEQ ID NO: 5517 - protein, 116 aa, Artificial Sequence
  Chemically Synthesized
QVQLQESGGGLVQAGGSLRLSCAASGNIFTKLGMGWYRQAPGKEREFVAGIAPGASTYYADSVKGRFTISRDNAKNTVYLQMNSLKPEDTAVYYCAAYVPPFHRYWGQGTQVTVSS

SEQ ID NO: 5518 - protein, 118 aa, Artificial Sequence
  Chemically Synthesized
QVQLQESGGGLVQAGGSLRLSCAASGTISDRIVMGWYRQAPGKERELVAGIGQGGNTYYADSVKGRFTISRDNAKNTVYLQMNSLKPEDTAVYYCAALDYRDGFHRYWGQGTQVTVSS

SEQ ID NO: 5519 - protein, 118 aa, Artificial Sequence
  Chemically Synthesized
QVQLQESGGGLVQAGGSLRLSCAASGTIFPDSSMGWYRQAPGKEREFVAGITTGANTYYADSVKGRFTISRDNAKNTVYLQMNSLKPEDTAVYYCAAYHVDRAVFRYWGQGTQVTVSS

SEQ ID NO: 5520 - protein, 126 aa, Artificial Sequence
  Chemically Synthesized
QVQLQESGGGLVQAGGSLRLSCAASGTISIIFAMGWYRQAPGKEREFVAGIGRGTTTYYADSVKGRFTISRDNAKNTVYLQMNSLKPEDTAVYYCAAYYQTRGYRHDPESRWYRYWGQGTQVTVSS

SEQ ID NO: 5521 - protein, 118 aa, Artificial Sequence
  Chemically Synthesized
QVQLQESGGGLVQAGGSLRLSCAASGTISIIFAMGWYRQAPGKEREFVAGIGRGTTTYYADSVKGRFTISRDNAKNTVYLQMNSLKPEDTAVYYCAVITGNHRIFRYWGQGTQVTVSS

SEQ ID NO: 5522 - protein, 121 aa, Artificial Sequence
  Chemically Synthesized
QVQLQESGGGLVQAGGSLRLSCAASGNISFIGAMGWYRQAPGKEREFVAGINVGTNTYYADSVKGRFTISRDNAKNTVYLQMNSLKPEDTAVYYCAAHVFYDNVVQRHAYWGQGTQVTVSS

SEQ ID NO: 5523 - protein, 122 aa, Artificial Sequence
  Chemically Synthesized
QVQLQESGGGLVQAGGSLRLSCAASGSISLATGMGWYRQAPGKEREFVAGISVGTSTYYADSVKGRFTISRDNAKNTVYLQMNSLKPEDTAVYYCAAIAWHPSGARSYLRYWGQGTQVTVSS

SEQ ID NO: 5524 - protein, 118 aa, Artificial Sequence
  Chemically Synthesized
QVQLQESGGGLVQAGGSLRLSCAASGTISRVFVMGWYRQAPGKERELVAGIGGGTSTYYADSVKGRFTISRDNAKNTVYLQMNSLKPEDTAVYYCAAILSDRVLFRYWGQGTQVTVSS

SEQ ID NO: 5525 - protein, 122 aa, Artificial Sequence
  Chemically Synthesized
QVQLQESGGGLVQAGGSLRLSCAASGSISGVSGMGWYRQAPGKEREFVAGITTGTSTYYADSVKGRFTISRDNAKNTVYLQMNSLKPEDTAVYYCAAYANYVPSSRLYLRYWGQGTQVTVSS

SEQ ID NO: 5526 - protein, 110 aa, Artificial Sequence
  Chemically Synthesized
QVQLQESGGGLVQAGGSLRLSCAASGTIFSRYDMGWYRQAPGKEREFVASIDTGATTNYADSVKGRFTISRDNAKNTVYLQMNSLKPEDTAVYYCAVSYWGQGTQVTVSS

SEQ ID NO: 5527 - protein, 118 aa, Artificial Sequence
  Chemically Synthesized
QVQLQESGGGLVQAGGSLRLSCAASGTIFRSPYMGWYRQAPGKEREFVASISTGANTYYADSVKGRFTISRDNAKNTVYLQMNSLKPEDTAVYYCAAFGRQQYTLYYWGQGTQVTVSS

SEQ ID NO: 5528 - protein, 125 aa, Artificial Sequence
  Chemically Synthesized
QVQLQESGGGLVQAGGSLRLSCAASGYILCTRMGWYRQAPGKERELVATIGEGGNTNYADSVKGRFTISRDNAKNTVYLQMNSLKPEDTAVYYCAAVGYGFLISQTYTESLLYYWGQGTQVTVSS

SEQ ID NO: 5529 - protein, 117 aa, Artificial Sequence
  Chemically Synthesized
QVQLQESGGGLVQAGGSLRLSCAASGYISNVFHMGWYRQAPGKERELVATITSGGSTNYADSVKGRFTISRDNAKNTVYLQMNSLKPEDTAVYYCAAVSTLPVPCYWGQGTQVTVSS

SEQ ID NO: 5530 - protein, 122 aa, Artificial Sequence
  Chemically Synthesized
QVQLQESGGGLVQAGGSLRLSCAASGTISSWRDMGWYRQAPGKERELVATISSGGTTYYADSVKGRFTISRDNAKNTVYLQMNSLKPEDTAVYYCAATLYDAHPYDIDHVYWGQGTQVTVSS

SEQ ID NO: 5531 - protein, 117 aa, Artificial Sequence
  Chemically Synthesized
QVQLQESGGGLVQAGGSLRLSCAASGNISLPYVMGWYRQAPGKERELVATITDGASTNYADSVKGRFTISRDNAKNTVYLQMNSLKPEDTAVYYCAVIEGQTYVYYWGQGTQVTVSS

SEQ ID NO: 5532 - protein, 118 aa, Artificial Sequence
  Chemically Synthesized
QVQLQESGGGLVQAGGSLRLSCAASGNISGGLKMGWYRQAPGKERELVATIGAGTITNYADSVKGRFTISRDNAKNTVYLQMNSLKPEDTAVYYCAAYYATGPFLKYWGQGTQVTVSS

SEQ ID NO: 5533 - protein, 126 aa, Artificial Sequence
  Chemically Synthesized
QVQLQESGGGLVQAGGSLRLSCAASGSIFSYDPMGWYRQAPGKERELVASISRGASTYYADSVKGRFTISRDNAKNTVYLQMNSLKPEDTAVYYCAVQRWHRPYGGRQNRSDLTYWGQGTQVTVSS

SEQ ID NO: 5534 - protein, 118 aa, Artificial Sequence
  Chemically Synthesized
QVQLQESGGGLVQAGGSLRLSCAASGTISVNYHMGWYRQAPGKERELVASIGWGTTTYYADSVKGRFTISRDNAKNTVYLQMNSLKPEDTAVYYCAVSPQDIFDLDYWGQGTQVTVSS

SEQ ID NO: 5535 - protein, 122 aa, Artificial Sequence
  Chemically Synthesized
QVQLQESGGGLVQAGGSLRLSCAASGYISWQLYMGWYRQAPGKERELVATIDYGGITNYADSVKGRFTISRDNAKNTVYLQMNSLKPEDTAVYYCAAFTDYRQDNSDIHDYWGQGTQVTVSS

SEQ ID NO: 5536 - protein, 121 aa, Artificial Sequence
  Chemically Synthesized
QVQLQESGGGLVQAGGSLRLSCAASGSISPTYDMGWYRQAPGKEREFVATINYVVIPYADSVKGRFTISRDNAKNTVYLQMNSLKPEDTAVYYCAVAVGSDDLYFGYYAYWGQGTQVTVSS

SEQ ID NO: 5537 - protein, 113 aa, Artificial Sequence
  Chemically Synthesized
QVQLQESGGGLVQAGGSLRLSCAASGNISDYEAMGWYRQAPGKEREFVASISSVVIPYADSVKGRFTISRDNAKNTVYLQMNSLKPEDTAVYYCAATPYHYYWGQGTQVTVSS

SEQ ID NO: 5538 - protein, 126 aa, Artificial Sequence
  Chemically Synthesized
QVQLQESGGGLVQAGGSLRLSCAASGTISAYVYMGWYRQAPGKEREFVAAINDGAITYYADSVKGRFTISRDNAKNTVYLQMNSLKPEDTAVYYCAALRLVLEHPRYDGGWPLVYWGQGTQVTVSS

SEQ ID NO: 5539 - protein, 125 aa, Artificial Sequence
  Chemically Synthesized
QVQLQESGGGLVQAGGSLRLSCAASGNISTSDRMGWYRQAPGKERELVASIAGGANTYYADSVKGRFTISRDNAKNTVYLQMNSLKPEDTAVYYCAVVDGYLLRTWPARDGVLYWGQGTQVTVSS

SEQ ID NO: 5540 - protein, 118 aa, Artificial Sequence
  Chemically Synthesized
QVQLQESGGGLVQAGGSLRLSCAASGYISATYYMGWYRQAPGKEREFVATIATGSSTNYADSVKGRFTISRDNAKNTVYLQMNSLKPEDTAVYYCAVDTVTWAYLQYWGQGTQVTVSS

SEQ ID NO: 5541 - protein, 117 aa, Artificial Sequence
  Chemically Synthesized
QVQLQESGGGLVQAGGSLRLSCAASGNISHRGMGWYRQAPGKERELVAGISYGSSTNYADSVKGRFTISRDNAKNTVYLQMNSLKPEDTAVYYCAVVYPDIGVLEYWGQGTQVTVSS

SEQ ID NO: 5542 - protein, 116 aa, Artificial Sequence
  Chemically Synthesized
QVQLQESGGGLVQAGGSLRLSCAASGYIFPSMGWYRQAPGKEREFVATITYGGITYYADSVKGRFTISRDNAKNTVYLQMNSLKPEDTAVYYCAVYLYSWYSLLYWGQGTQVTVSS

SEQ ID NO: 5543 - protein, 115 aa, Artificial Sequence
  Chemically Synthesized
QVQLQESGGGLVQAGGSLRLSCAASGSISDPDIMGWYRQAPGKERELVATIDFGGYADSVKGRFTISRDNAKNTVYLQMNSLKPEDTAVYYCAVYPTDDNVLQYWGQGTQVTVSS

SEQ ID NO: 5544 - protein, 118 aa, Artificial Sequence
  Chemically Synthesized
QVQLQESGGGLVQAGGSLRLSCAASGNIFGYGYMGWYRQAPGKERELVATIAKGSNTNYADSVKGRFTISRDNAKNTVYLQMNSLKPEDTAVYYCAAVRRYQSILGYWGQGTQVTVSS

SEQ ID NO: 5545 - protein, 122 aa, Artificial Sequence
  Chemically Synthesized
QVQLQESGGGLVQAGGSLRLSCAASGYISYHRTMGWYRQAPGKEREFVAAIGYGATTYYADSVKGRFTISRDNAKNTVYLQMNSLKPEDTAVYYCAVDTVNGWDAGSVYPYWGQGTQVTVSS

SEQ ID NO: 5546 - protein, 118 aa, Artificial Sequence
  Chemically Synthesized
QVQLQESGGGLVQAGGSLRLSCAASGYIFAYSAMGWYRQAPGKEREFVAAIDDGGNTYYADSVKGRFTISRDNAKNTVYLQMNSLKPEDTAVYYCAADQYDVEYHLYWGQGTQVTVSS

SEQ ID NO: 5547 - protein, 122 aa, Artificial Sequence
  Chemically Synthesized
QVQLQESGGGLVQAGGSLRLSCAASGTISGSWNMGWYRQAPGKERELVATINWGSNTNYADSVKGRFTISRDNAKNTVYLQMNSLKPEDTAVYYCAVYATDILGTSDLFYYWGQGTQVTVSS

SEQ ID NO: 5548 - protein, 117 aa, Artificial Sequence
  Chemically Synthesized
QVQLQESGGGLVQAGGSLRLSCAASGNIFTYVMGWYRQAPGKERELVATIGIGTITNYADSVKGRFTISRDNAKNTVYLQMNSLKPEDTAVYYCAVYYTNTAYFWYWGQGTQVTVSS

SEQ ID NO: 5549 - protein, 126 aa, Artificial Sequence
  Chemically Synthesized
QVQLQESGGGLVQAGGSLRLSCAASGYISTPAIMGWYRQAPGKERELVASINDGSSTYYADSVKGRFTISRDNAKNTVYLQMNSLKPEDTAVYYCAAAAPYVYDLPDDYVPLYGYWGQGTQVTVSS

SEQ ID NO: 5550 - protein, 113 aa, Artificial Sequence
  Chemically Synthesized
QVQLQESGGGLVQAGGSLRLSCAASGTIFLRSGMGWYRQAPGKERELVAGISAGTITYYADSVKGRFTISRDNAKNTVYLQMNSLKPEDTAVYYCAADDYIYWGQGTQVTVSS

SEQ ID NO: 5551 - protein, 117 aa, Artificial Sequence
  Chemically Synthesized
QVQLQESGGGLVQAGGSLRLSCAASGNISAYGLMGWYRQAPGKERELLPVLIRVVIPYADSVKGRFTISRDNAKNTVYLQMNSLKPEDTAVYYCAVHSNDLPEFYYWGQGTQVTVSS

SEQ ID NO: 5552 - protein, 118 aa, Artificial Sequence
  Chemically Synthesized
QVQLQESGGGLVQAGGSLRLSCAASGSISIGAVMGWYRQAPGKEREFVASIAEGTSTNYADSVKGRFTISRDNAKNTVYLQMNSLKPEDTAVYYCAAEPERQYWHGYWGQGTQVTVSS

SEQ ID NO: 5553 - protein, 113 aa, Artificial Sequence
  Chemically Synthesized
QVQLQESGGGLVQAGGSLRLSCAASGSIMGWYRQAPGKERELVATIDEGTNTYYADSVKGRFTISRDNAKNTVYLQMNSLKPEDTAVYYCAARTGSYLLFWYWGQGTQVTVSS

SEQ ID NO: 5554 - protein, 118 aa, Artificial Sequence
  Chemically Synthesized
QVQLQESGGGLVQAGGSLRLSCAASGTISSAYSMGWYRQAPGKERELVASISNGSSTYYADSVKGRFTISRDNAKNTVYLQMNSLKPEDTAVYYCAATNDALHHHYYWGQGTQVTVSS

SEQ ID NO: 5555 - protein, 124 aa, Artificial Sequence
  Chemically Synthesized
QVQLQESGGGLVQAGGSLRLSCAASGSISYYPMGWYRQAPGKERELVAGIADGGNTNYADSVKGRFTISRDNAKNTVYLQMNSLKPEDTAVYYCAADGQYAYKEDDVWWPYYYWGQGTQVTVSS

SEQ ID NO: 5556 - protein, 121 aa, Artificial Sequence
  Chemically Synthesized
QVQLQESGGGLVQAGGSLRLSCAASGNISTNVMGWYRQAPGKERELVATIDVGSTTYYADSVKGRFTISRDNAKNTVYLQMNSLKPEDTAVYYCAAPGYYYQYPDEDFDYWGQGTQVTVSS

SEQ ID NO: 5557 - protein, 116 aa, Artificial Sequence
  Chemically Synthesized
QVQLQESGGGLVQAGGSLRLSCAASGTISSIHPMGWYRQAPGKEREFVGTTNYADSVKGRFTISRDNAKNTVYLQMNSLKPEDTAVYYCAVVDYILGSYGGDLGYWGQGTQVTVSS

SEQ ID NO: 5558 - protein, 118 aa, Artificial Sequence
  Chemically Synthesized
QVQLQESGGGLVQAGGSLRLSCAASGYIFGFSRMGWYRQAPGKEREFVAAITYGTSTYYADSVKGRFTISRDNAKNTVYLQMNSLKPEDTAVYYCAAYWYQPFDHDYWGQGTQVTVSS

SEQ ID NO: 5559 - protein, 118 aa, Artificial Sequence
  Chemically Synthesized
QVQLQESGGGLVQAGGSLRLSCAASGYISPIWAMGWYRQAPGKERELVAGITIGTSTNYADSVKGRFTISRDNAKNTVYLQMNSLKPEDTAVYYCAVPYDFLTTYGYWGQGTQVTVSS

SEQ ID NO: 5560 - protein, 117 aa, Artificial Sequence
  Chemically Synthesized
QVQLQESGGGLVQAGGSLRLSCAASGNISYSTMGWYRQAPGKEREFVAAISTGGITNYADSVKGRFTISRDNAKNTVYLQMNSLKPEDTAVYYCAVHYDVADGYGYWGQGTQVTVSS

SEQ ID NO: 5561 - protein, 117 aa, Artificial Sequence
  Chemically Synthesized
QVQLQESGGGLVQAGGSLRLSCAASGNISDPQYMGWYRQAPGKEREFVAAIITVVLPYADSVKGRFTISRDNAKNTVYLQMNSLKPEDTAVYYCAAYSAAAWYHRYWGQGTQVTVSS

SEQ ID NO: 5562 - protein, 118 aa, Artificial Sequence
  Chemically Synthesized
QVQLQESGGGLVQAGGSLRLSCAASGTIFGYTYMGWYRQAPGKEREFVAGIAYGATTYYADSVKGRFTISRDNAKNTVYLQMNSLKPEDTAVYYCAVYYGTPYSLAYWGQGTQVTVSS

SEQ ID NO: 5563 - protein, 122 aa, Artificial Sequence
  Chemically Synthesized
QVQLQESGGGLVQAGGSLRLSCAASGTIFYVKDMGWYRQAPGKEREFVATIDSGATTNYADSVKGRFTISRDNAKNTVYLQMNSLKPEDTAVYYCAAYTGPWLWPKAPHWYWGQGTQVTVSS

SEQ ID NO: 5564 - protein, 121 aa, Artificial Sequence
  Chemically Synthesized
QVQLQESGGGLVQAGGSLRLSCAASGSISPGTPMGWYRQAPGKEREFVASIDDGSITNYADSVKGRFTISRDNAKNTVYLQMNSLKPEDTAVYYCAADYYKWYLTLTLFYWGQGTQVTVSS

SEQ ID NO: 5565 - protein, 122 aa, Artificial Sequence
  Chemically Synthesized
QVQLQESGGGLVQAGGSLRLSCAASGTIFSSTAMGWYRQAPGKEREFVAGINYGANTNYADSVKGRFTISRDNAKNTVYLQMNSLKPEDTAVYYCAADYSDSYDDHPSYSYWGQGTQVTVSS

SEQ ID NO: 5566 - protein, 118 aa, Artificial Sequence
  Chemically Synthesized
QVQLQESGGGLVQAGGSLRLSCAASGNIFWHYVMGWYRQAPGKERELVAGINRGTITNYADSVKGRFTISRDNAKNTVYLQMNSLKPEDTAVYYCAVYTYYDPWFNYWGQGTQVTVSS

SEQ ID NO: 5567 - protein, 117 aa, Artificial Sequence
  Chemically Synthesized
QVQLQESGGGLVQAGGSLRLSCAASGNISYSNAMGWYRQAPGKEREFVAAIGGGSNTNYADSVKGRFTISRDNAKNTVYLQMNSLKPEDTAVYYCAAWTVSVQGLYWGQGTQVTVSS

SEQ ID NO: 5568 - protein, 118 aa, Artificial Sequence
  Chemically Synthesized
QVQLQESGGGLVQAGGSLRLSCAASGNISYYKYMGWYRQAPGKERELVAAIDYGAITNYADSVKGRFTISRDNAKNTVYLQMNSLKPEDTAVYYCAVPTKTDFELDYWGQGTQVTVSS

SEQ ID NO: 5569 - protein, 118 aa, Artificial Sequence
  Chemically Synthesized
QVQLQESGGGLVQAGGSLRLSCAASGTISGFLYMGWYRQAPGKEREFVAAIAVGATTYYADSVKGRFTISRDNAKNTVYLQMNSLKPEDTAVYYCAVYQILLYYHGYWGQGTQVTVSS

SEQ ID NO: 5570 - protein, 118 aa, Artificial Sequence
  Chemically Synthesized
QVQLQESGGGLVQAGGSLRLSCAASGTIFRRAYMGWYRQAPGKERELVAGISAGGITNYADSVKGRFTISRDNAKNTVYLQMNSLKPEDTAVYYCAVRWPWARLLVYWGQGTQVTVSS

SEQ ID NO: 5571 - protein, 117 aa, Artificial Sequence
  Chemically Synthesized
QVQLQESGGGLVQAGGSLRLSCAASGYIFWYTTMGWYRQAPGKEREFVATIGYGSSTYYADSVKGRFTISRDNAKNTVYLQMNSLKPEDTAVYYCAVAPWSGAFRYWGQGTQVTVSS

SEQ ID NO: 5572 - protein, 110 aa, Artificial Sequence
  Chemically Synthesized
QVQLQESGGGLVQAGGSLRLSCAASGNIFTSREMGWYRQAPGKERELVAGIDYGSTTNYADSVKGRFTISRDNAKNTVYLQMNSLKPEDTAVYYCAHQYWGQGTQVTVSS

SEQ ID NO: 5573 - protein, 122 aa, Artificial Sequence
  Chemically Synthesized
QVQLQESGGGLVQAGGSLRLSCAASGNISQPNAMGWYRQAPGKERELVAAISYGASTYYADSVKGRFTISRDNAKNTVYLQMNSLKPEDTAVYYCAVDYFTNQSRLHGYTYWGQGTQVTVSS

SEQ ID NO: 5574 - protein, 126 aa, Artificial Sequence
  Chemically Synthesized
QVQLQESGGGLVQAGGSLRLSCAASGNISDTRRMGWYRQAPGKERELVASIATGGTTYYADSVKGRFTISRDNAKNTVYLQMNSLKPEDTAVYYCAAWVLYKTFTLPTGWNTHFYWGQGTQVTVSS

SEQ ID NO: 5575 - protein, 127 aa, Artificial Sequence
  Chemically Synthesized
QVQLQESGGGLVQAGGSLRLSCAASGTISIVRDMGWYRQAPGKERELVAGIGYIGSSTYYADSVKGRFTISRDNAKNTVYLQMNSLKPEDTAVYYCAVPTIKVDERFELGSEYYVYWGQGTQVTVSS

SEQ ID NO: 5576 - protein, 118 aa, Artificial Sequence
  Chemically Synthesized
QVQLQESGGGLVQAGGSLRLSCAASGTIFQTYVMGWYRQAPGKERELVAGIDSGANTNYADSVKGRFTISRDNAKNTVYLQMNSLKPEDTAVYYCAVGLTPLQIHQYWGQGTQVTVSS

SEQ ID NO: 5577 - protein, 119 aa, Artificial Sequence
  Chemically Synthesized
QVQLQESGGGLVQAGGSLRLSCAASGNIFVVKYMGWYRQAPGKEREFVATISPYGGITYYADSVKGRFTISRDNAKNTVYLQMNSLKPEDTAVYYCAVYRYLWFDYYYWGQGTQVTVSS

SEQ ID NO: 5578 - protein, 122 aa, Artificial Sequence
  Chemically Synthesized
QVQLQESGGGLVQAGGSLRLSCAASGNIFYPNNMGWYRQAPGKERELVATIGLGASTYYADSVKGRFTISRDNAKNTVYLQMNSLKPEDTAVYYCAAYLRLYGDYSDQYDYWGQGTQVTVSS

SEQ ID NO: 5579 - protein, 118 aa, Artificial Sequence
  Chemically Synthesized
QVQLQESGGGLVQAGGSLRLSCAASGTISYPYDMGWYRQAPGKERELVAAIAAGGNTYYADSVKGRFTISRDNAKNTVYLQMNSLKPEDTAVYYCAANYPDDGGLDYWGQGTQVTVSS

SEQ ID NO: 5580 - protein, 118 aa, Artificial Sequence
  Chemically Synthesized
QVQLQESGGGLVQAGGSLRLSCAASGYISPPSTMGWYRQAPGKERELVAGITDGGITYYADSVKGRFTISRDNAKNTVYLQMNSLKPEDTAVYYCAVRKPYDYKHLYWGQGTQVTVSS

SEQ ID NO: 5581 - protein, 126 aa, Artificial Sequence
  Chemically Synthesized
QVQLQESGGGLVQAGGSLRLSCAASGYISDSTIMGWYRQAPGKERELVAGISDGTNTNYADSVKGRFTISRDNAKNTVYLQMNSLKPEDTAVYYCAAYGLDTYNFQPDDAVRHPYWGQGTQVTVSS

SEQ ID NO: 5582 - protein, 125 aa, Artificial Sequence
  Chemically Synthesized
QVQLQESGGGLVQAGGSLRLSCAASGSIFPDAMGWYRQAPGKERELVAAINTGSITNYADSVKGRFTISRDNAKNTVYLQMNSLKPEDTAVYYCAAIAYPYPTYYDYPRDDHYYWGQGTQVTVSS

SEQ ID NO: 5583 - protein, 122 aa, Artificial Sequence
  Chemically Synthesized
QVQLQESGGGLVQAGGSLRLSCAASGSIFPPAWMGWYRQAPGKEREFVASIAVGASTNYADSVKGRFTISRDNAKNTVYLQMNSLKPEDTAVYYCAVYTQETDYNGTTLGYWGQGTQVTVSS

SEQ ID NO: 5584 - protein, 118 aa, Artificial Sequence
  Chemically Synthesized
QVQLQESGGGLVQAGGSLRLSCAASGYISAGSYMGWYRQAPGKEREFVAGIANGASTNYADSVKGRFTISRDNAKNTVYLQMNSLKPEDTAVYYCAAPQSWRSLLDYWGQGTQVTVSS

SEQ ID NO: 5585 - protein, 116 aa, Artificial Sequence
  Chemically Synthesized
QVQLQESGGGLVQAGGSLRLSCAASGNIFTLLMGWYRQAPGKERELVAAIGTGTNTYYADSVKGRFTISRDNAKNTVYLQMNSLKPEDTAVYYCAAHRWIDEHYYWGQGTQVTVSS

SEQ ID NO: 5586 - protein, 118 aa, Artificial Sequence
  Chemically Synthesized
QVQLQESGGGLVQAGGSLRLSCAASGYIFRRARMGWYRQAPGKEREFVASITFGATTYYADSVKGRFTISRDNAKNTVYLQMNSLKPEDTAVYYCAAALRYISYLGYWGQGTQVTVSS

SEQ ID NO: 5587 - protein, 118 aa, Artificial Sequence
  Chemically Synthesized
QVQLQESGGGLVQAGGSLRLSCAASGTIFSNHYMGWYRQAPGKEREFVAAINSGGSTNYADSVKGRFTISRDNAKNTVYLQMNSLKPEDTAVYYCAADTPDRGYHYYWGQGTQVTVSS

SEQ ID NO: 5588 - protein, 122 aa, Artificial Sequence
  Chemically Synthesized
QVQLQESGGGLVQAGGSLRLSCAASGTIFGSHFMGWYRQAPGKEREFVASIGSGATTYYADSVKGRFTISRDNAKNTVYLQMNSLKPEDTAVYYCAASDRWLWPWDHRHWYWGQGTQVTVSS

SEQ ID NO: 5589 - protein, 126 aa, Artificial Sequence
  Chemically Synthesized
QVQLQESGGGLVQAGGSLRLSCAASGTISDDYDMGWYRQAPGKERELVAAISYGGSTYYADSVKGRFTISRDNAKNTVYLQMNSLKPEDTAVYYCAVADGYTHIVAWDYAGSLAYWGQGTQVTVSS

SEQ ID NO: 5590 - protein, 126 aa, Artificial Sequence
  Chemically Synthesized
QVQLQESGGGLVQAGGSLRLSCAASGTIFSTAGMGWYRQAPGKEREFVAAITAGTSTYYADSVKGRFTISRDNAKNTVYLQMNSLKPEDTAVYYCAAVRGEVDRLYTYQKYDFGYWGQGTQVTVSS

SEQ ID NO: 5591 - protein, 122 aa, Artificial Sequence
  Chemically Synthesized
QVQLQESGGGLVQAGGSLRLSCAASGSISDGTGMGWYRQAPGKERELVASITPGGTTYYADSVKGRFTISRDNAKNTVYLQMNSLKPEDTAVYYCAVYQPYYYLEDYPLGYWGQGTQVTVSS

SEQ ID NO: 5592 - protein, 125 aa, Artificial Sequence
  Chemically Synthesized
QVQLQESGGGLVQAGGSLRLSCAASGNIFYDGAMGWYRQAPGKEREFVAGIAYGGITYYADSVKGRFTISRDNAKNTVYLQMNSLKPEDTAVYYCAVFTDPLLDNNGYHGNGFYWGQGTQVTVSS

SEQ ID NO: 5593 - protein, 118 aa, Artificial Sequence
  Chemically Synthesized
QVQLQESGGGLVQAGGSLRLSCAASGSIFGSDVMGWYRQAPGKEREFVASIGGGGNTNYADSVKGRFTISRDNAKNTVYLQMNSLKPEDTAVYYCAARTRLLYAFSYWGQGTQVTVSS

SEQ ID NO: 5594 - protein, 117 aa, Artificial Sequence
  Chemically Synthesized
QVQLQESGGGLVQAGGSLRLSCAASGTIFWFLMGWYRQAPGKEREFVASIGAGATTNYADSVKGRFTISRDNAKNTVYLQMNSLKPEDTAVYYCAVNRDRVGWHGYWGQGTQVTVSS

SEQ ID NO: 5595 - protein, 124 aa, Artificial Sequence
  Chemically Synthesized
QVQLQESGGGLVQAGGSLRLSCAASGNISTLSMGWYRQAPGKEREFVASIDQGGITNYADSVKGRFTISRDNAKNTVYLQMNSLKPEDTAVYYCAVPPRSYDYNYSDDYAHDYWGQGTQVTVSS

SEQ ID NO: 5596 - protein, 121 aa, Artificial Sequence
  Chemically Synthesized
QVQLQESGGGLVQAGGSLRLSCAASGSISSQPTMGWYRQAPGKERELVAAISYGATTNYADSVKGRFTISRDNAKNTVYLQMNSLKPEDTAVYYCAVASRTSSTLCRSFYWGQGTQVTVSS

SEQ ID NO: 5597 - protein, 122 aa, Artificial Sequence
  Chemically Synthesized
QVQLQESGGGLVQAGGSLRLSCAASGNISFYYTMGWYRQAPGKERELVATIARGASTNYADSVKGRFTISRDNAKNTVYLQMNSLKPEDTAVYYCAALLAVYADDLLSYAYWGQGTQVTVSS

SEQ ID NO: 5598 - protein, 127 aa, Artificial Sequence
  Chemically Synthesized
QVQLQESGGGLVQAGGSLRLSCAASGTISTCCCMGWYRQAPGKERELVASISVGGSTYYADSVKGRFTISRDNAKNTVYLQMNSLKPEDTAVYYCAAWQTYAWLLYRLTGTTTVLYWGQGTQVTVSS

SEQ ID NO: 5599 - protein, 118 aa, Artificial Sequence
  Chemically Synthesized
QVQLQESGGGLVQAGGSLRLSCAASGSIFLPYAMGWYRQAPGKERELVASIAYGASNQYADSVKGRFTISRDNAKNTVYLQMNSLKPEDTAVYYCAVAVGYDQGHPYWGQGTQVTVSS

SEQ ID NO: 5600 - protein, 118 aa, Artificial Sequence
  Chemically Synthesized
QVQLQESGGGLVQAGGSLRLSCAASGYIFGPAGMGWYRQAPGKEREFVASIAYGTSTYYADSVKGRFTISRDNAKNTVYLQMNSLKPEDTAVYYCAVLTIILLTYWYWGQGTQVTVSS

SEQ ID NO: 5601 - protein, 118 aa, Artificial Sequence
  Chemically Synthesized
QVQLQESGGGLVQAGGSLRLSCAASGTISTTYSMGWYRQAPGKEREFVAGINAGGITNYADSVKGRFTISRDNAKNTVYLQMNSLKPEDTAVYYCAANGPVYKRHSYWGQGTQVTVSS

SEQ ID NO: 5602 - protein, 126 aa, Artificial Sequence
  Chemically Synthesized
QVQLQESGGGLVQAGGSLRLSCAASGTIFPPRTMGWYRQAPGKERELVASIDGGAITNYADSVKGRFTISRDNAKNTVYLQMNSLKPEDTAVYYCAAIEVGIYYAKLYGYVIHRYWGQGTQVTVSS

SEQ ID NO: 5603 - protein, 118 aa, Artificial Sequence
  Chemically Synthesized
QVQLQESGGGLVQAGGSLRLSCAASGTISDYRVMGWYRQAPGKEREFVATINAGTNTNYADSVKGRFTISRDNAKNTVYLQMNSLKPEDTAVYYCAVYLYEHTILQYWGQGTQVTVSS

SEQ ID NO: 5604 - protein, 118 aa, Artificial Sequence
  Chemically Synthesized
QVQLQESGGGLVQAGGSLRLSCAASGSIFDVDGMGWYRQAPGKERELVAAIALGSTTNYADSVKGRFTISRDNAKNTVYLQMNSLKPEDTAVYYCAAVYVAYFNFRYWGQGTQVTVSS

SEQ ID NO: 5605 - protein, 116 aa, Artificial Sequence
  Chemically Synthesized
QVQLQESGGGLVQAGGSLRLSCAASGTIFLVTLMGWYRQAPGKERELPLLLLVVLPYADSVKGRFTISRDNAKNTVYLQMNSLKPEDTAVYYCAVGSIVYIDYYYWGQGTQVTVSS

SEQ ID NO: 5606 - protein, 122 aa, Artificial Sequence
  Chemically Synthesized
QVQLQESGGGLVQAGGSLRLSCAASGNIFWSGYMGWYRQAPGKERELVAAIGTGGSTYYADSVKGRFTISRDNAKNTVYLQMNSLKPEDTAVYYCAAAPSVAATYPTTYQYWGQGTQVTVSS

SEQ ID NO: 5607 - protein, 118 aa, Artificial Sequence
  Chemically Synthesized
QVQLQESGGGLVQAGGSLRLSCAASGNISGDRRMGWYRQAPGKEREFVAAITVGSNTNYADSVKGRFTISRDNAKNTVYLQMNSLKPEDTAVYYCAVWYDDSRYLYYWGQGTQVTVSS

SEQ ID NO: 5608 - protein, 118 aa, Artificial Sequence
  Chemically Synthesized
QVQLQESGGGLVQAGGSLRLSCAASGYISSISVMGWYRQAPGKEREFVASITYGTITYYADSVKGRFTISRDNAKNTVYLQMNSLKPEDTAVYYCAAYPDGSPYYWYWGQGTQVTVSS

SEQ ID NO: 5609 - protein, 118 aa, Artificial Sequence
  Chemically Synthesized
QVQLQESGGGLVQAGGSLRLSCAASGYIFTLYLMGWYRQAPGKEREFVAAIGRGASTNYADSVKGRFTISRDNAKNTVYLQMNSLKPEDTAVYYCAVTDYQQDWLAYWGQGTQVTVSS

SEQ ID NO: 5610 - protein, 118 aa, Artificial Sequence
  Chemically Synthesized
QVQLQESGGGLVQAGGSLRLSCAASGNISQLSFMGWYRQAPGKEREFVAGIGWGGSTYYADSVKGRFTISRDNAKNTVYLQMNSLKPEDTAVYYCAVYYHDDYPLGYWGQGTQVTVSS

SEQ ID NO: 5611 - protein, 122 aa, Artificial Sequence
  Chemically Synthesized
QVQLQESGGGLVQAGGSLRLSCAASGSIFSLRDMGWYRQAPGKEREFVAAIGYGGNTNYADSVKGRFTISRDNAKNTVYLQMNSLKPEDTAVYYCAATDRDAYPYAVRHPYWGQGTQVTVSS

SEQ ID NO: 5612 - protein, 118 aa, Artificial Sequence
  Chemically Synthesized
QVQLQESGGGLVQAGGSLRLSCAASGTIFSFDDMGWYRQAPGKERELVASINEGSSTNYADSVKGRFTISRDNAKNTVYLQMNSLKPEDTAVYYCAAETYYYDYHSYWGQGTQVTVSS

SEQ ID NO: 5613 - protein, 117 aa, Artificial Sequence
  Chemically Synthesized
QVQLQESGGGLVQAGGSLRLSCAASGTIFRTTMGWYRQAPGKERELVAAIATGAITYYADSVKGRFTISRDNAKNTVYLQMNSLKPEDTAVYYCAVGQSRAGVHVYWGQGTQVTVSS

SEQ ID NO: 5614 - protein, 118 aa, Artificial Sequence
  Chemically Synthesized
QVQLQESGGGLVQAGGSLRLSCAASGNISGEYDMGWYRQAPGKERELVAAITDGASTYYADSVKGRFTISRDNAKNTVYLQMNSLKPEDTAVYYCAALGKVDWPLWYWGQGTQVTVSS

SEQ ID NO: 5615 - protein, 118 aa, Artificial Sequence
  Chemically Synthesized
QVQLQESGGGLVQAGGSLRLSCAASGYISANGYMGWYRQAPGKEREFVAGIADGSSTNYADSVKGRFTISRDNAKNTVYLQMNSLKPEDTAVYYCAVGDQSSRRFTYWGQGTQVTVSS

SEQ ID NO: 5616 - protein, 118 aa, Artificial Sequence
  Chemically Synthesized
QVQLQESGGGLVQAGGSLRLSCAASGNISGHYVMGWYRQAPGKERELVAAISVGTITYYADSVKGRFTISRDNAKNTVYLQMNSLKPEDTAVYYCAAGWPYDYRSFYWGQGTQVTVSS

SEQ ID NO: 5617 - protein, 118 aa, Artificial Sequence
  Chemically Synthesized
QVQLQESGGGLVQAGGSLRLSCAASGNIFVWRVMGWYRQAPGKERELVAAITDGAITYYADSVKGRFTISRDNAKNTVYLQMNSLKPEDTAVYYCAVKHGVQRYLDYWGQGTQVTVSS

SEQ ID NO: 5618 - protein, 122 aa, Artificial Sequence
  Chemically Synthesized
QVQLQESGGGLVQAGGSLRLSCAASGTISSTYYMGWYRQAPGKERELVATIASGANYLYADSVKGRFTISRDNAKNTVYLQMNSLKPEDTAVYYCAVVPLDGRIDSVAFLYWGQGTQVTVSS

SEQ ID NO: 5619 - protein, 118 aa, Artificial Sequence
  Chemically Synthesized
QVQLQESGGGLVQAGGSLRLSCAASGYISSIGPMGWYRQAPGKERELVATIDRGASTYYADSVKGRFTISRDNAKNTVYLQMNSLKPEDTAVYYCAAVYYPTTFYWYWGQGTQVTVSS

SEQ ID NO: 5620 - protein, 122 aa, Artificial Sequence
  Chemically Synthesized
QVQLQESGGGLVQAGGSLRLSCAASGYISTRVIMGWYRQAPGKERELVATINTGASTYYADSVKGRFTISRDNAKNTVYLQMNSLKPEDTAVYYCAVTRADIVWYTDLYYYWGQGTQVTVSS

SEQ ID NO: 5621 - protein, 126 aa, Artificial Sequence
  Chemically Synthesized
QVQLQESGGGLVQAGGSLRLSCAASGNISSRSTMGWYRQAPGKERELVATIARGGTTNYADSVKGRFTISRDNAKNTVYLQMNSLKPEDTAVYYCAVNGKPDGPQRVDSVYDYPYWGQGTQVTVSS

SEQ ID NO: 5622 - protein, 118 aa, Artificial Sequence
  Chemically Synthesized
QVQLQESGGGLVQAGGSLRLSCAASGSISAVNTMGWYRQAPGKERELVAAITSGSNTYYADSVKGRFTISRDNAKNTVYLQMNSLKPEDTAVYYCAVSPVGDDSFRYWGQGTQVTVSS

SEQ ID NO: 5623 - protein, 117 aa, Artificial Sequence
  Chemically Synthesized
QVQLQESGGGLVQAGGSLRLSCAASGTIFGDVIMGWYRQAPGKEREFVAGIDRGTITNYADSVKGRFTISRDNAKNTVYLQMNSLKPEDTAVYYCAVDVYASLLFYWGQGTQVTVSS

SEQ ID NO: 5624 - protein, 126 aa, Artificial Sequence
  Chemically Synthesized
QVQLQESGGGLVQAGGSLRLSCAASGSIFDASNMGWYRQAPGKEREFVAGISDGTNTNYADSVKGRFTISRDNAKNTVYLQMNSLKPEDTAVYYCAAPRRDQLFSLVGDVRRFLYWGQGTQVTVSS

SEQ ID NO: 5625 - protein, 118 aa, Artificial Sequence
  Chemically Synthesized
QVQLQESGGGLVQAGGSLRLSCAASGNIFLTWTMGWYRQAPGKEREFVAGIGYGSSTYYADSVKGRFTISRDNAKNTVYLQMNSLKPEDTAVYYCAVTTYVALRFKYWGQGTQVTVSS

SEQ ID NO: 5626 - protein, 122 aa, Artificial Sequence
  Chemically Synthesized
QVQLQESGGGLVQAGGSLRLSCAASGSISGPPYMGWYRQAPGKEREFVAAIGVGANTNYADSVKGRFTISRDNAKNTVYLQMNSLKPEDTAVYYCAAGQQSSYRIPSPHGYWGQGTQVTVSS

SEQ ID NO: 5627 - protein, 126 aa, Artificial Sequence
  Chemically Synthesized
QVQLQESGGGLVQAGGSLRLSCAASGNISDYYFMGWYRQAPGKERELVATINFGSTTYYADSVKGRFTISRDNAKNTVYLQMNSLKPEDTAVYYCAASVYLLDDDWYAYAVYHYYWGQGTQVTVSS

SEQ ID NO: 5628 - protein, 120 aa, Artificial Sequence
  Chemically Synthesized
QVQLQESGGGLVQAGGSLRLSCAASGTIFLYYDMGWYRQAPGKEREFVATIAFGGSTNYADSVKGRFTISRDNAKNTVYLQMNSLKPEDTAVYYCAPVDDIQVYDGHYYWGQGTQVTVSS

SEQ ID NO: 5629 - protein, 117 aa, Artificial Sequence
  Chemically Synthesized
QVQLQESGGGLVQAGGSLRLSCAASGTIFTLVMGWYRQAPGKERELVATIDIGTSTNYADSVKGRFTISRDNAKNTVYLQMNSLKPEDTAVYYCAVRYQRPHSFVYWGQGTQVTVSS

SEQ ID NO: 5630 - protein, 118 aa, Artificial Sequence
  Chemically Synthesized
QVQLQESGGGLVQAGGSLRLSCAASGYISPYRYMGWYRQAPGKERELVATITYGTTTYYADSVKGRFTISRDNAKNTVYLQMNSLKPEDTAVYYCAATFSGWASHQYWGQGTQVTVSS

SEQ ID NO: 5631 - protein, 122 aa, Artificial Sequence
  Chemically Synthesized
QVQLQESGGGLVQAGGSLRLSCAASGSIFGVPTMGWYRQAPGKERELVASIANGANTNYADSVKGRFTISRDNAKNTVYLQMNSLKPEDTAVYYCAADVELLIFYDETFRYWGQGTQVTVSS

SEQ ID NO: 5632 - protein, 117 aa, Artificial Sequence
  Chemically Synthesized
QVQLQESGGGLVQAGGSLRLSCAASGSIFDTVYMGWYRQAPGKEREFVATILLVLIPYADSVKGRFTISRDNAKNTVYLQMNSLKPEDTAVYYCAAYRTKYYGLDYWGQGTQVTVSS

SEQ ID NO: 5633 - protein, 122 aa, Artificial Sequence
  Chemically Synthesized
QVQLQESGGGLVQAGGSLRLSCAASGNIFLYPPMGWYRQAPGKERELVAGIDAGATTNYADSVKGRFTISRDNAKNTVYLQMNSLKPEDTAVYYCAVLGNPKYVLQDWYGYWGQGTQVTVSS

SEQ ID NO: 5634 - protein, 122 aa, Artificial Sequence
  Chemically Synthesized
QVQLQESGGGLVQAGGSLRLSCAASGNISDQGDMGWYRQAPGKEREFVAAIASGTTTYYADSVKGRFTISRDNAKNTVYLQMNSLKPEDTAVYYCAVDGATPITQDYYYDYWGQGTQVTVSS

SEQ ID NO: 5635 - protein, 118 aa, Artificial Sequence
  Chemically Synthesized
QVQLQESGGGLVQAGGSLRLSCAASGSIFSGDDMGWYRQAPGKEREFVATIGVGTITNYADSVKGRFTISRDNAKNTVYLQMNSLKPEDTAVYYCAVWYSYGYQHPYWGQGTQVTVSS

SEQ ID NO: 5636 - protein, 117 aa, Artificial Sequence
  Chemically Synthesized
QVQLQESGGGLVQAGGSLRLSCAASGTILFLVMGWYRQAPGKERELVAAIDSGANTNYADSVKGRFTISRDNAKNTVYLQMNSLKPEDTAVYYCAVYLDGDAYLYYWGQGTQVTVSS

SEQ ID NO: 5637 - protein, 118 aa, Artificial Sequence
  Chemically Synthesized
QVQLQESGGGLVQAGGSLRLSCAASGYIFRHVSMGWYRQAPGKERELVASIDLGANTNYADSVKGRFTISRDNAKNTVYLQMNSLKPEDTAVYYCAAVYYLILAHVYWGQGTQVTVSS

SEQ ID NO: 5638 - protein, 122 aa, Artificial Sequence
  Chemically Synthesized
QVQLQESGGGLVQAGGSLRLSCAASGNISVYWDMGWYRQAPGKEREFVAGINYGANTYYADSVKGRFTISRDNAKNTVYLQMNSLKPEDTAVYYCAVSTAYFAYGYVAYLYWGQGTQVTVSS

SEQ ID NO: 5639 - protein, 112 aa, Artificial Sequence
  Chemically Synthesized
QVQLQESGGGLVQAGGSLRLSCAASGTIFGAYDMGWYRQAPGKEREFVAAITWGATTNYADSVKGRFTISRDNAKNTVYLQMNSLKPEDTAVYYCAANYPYWGQGTQVTVSS

SEQ ID NO: 5640 - protein, 118 aa, Artificial Sequence
  Chemically Synthesized
QVQLQESGGGLVQAGGSLRLSCAASGNISEYAYMGWYRQAPGKEREFVAGINYGGITYYADSVKGRFTISRDNAKNTVYLQMNSLKPEDTAVYYCAANERGNTVHGYWGQGTQVTVSS

SEQ ID NO: 5641 - protein, 122 aa, Artificial Sequence
  Chemically Synthesized
QVQLQESGGGLVQAGGSLRLSCAASGYIFTYIYMGWYRQAPGKERELVATISYGSITNYADSVKGRFTISRDNAKNTVYLQMNSLKPEDTAVYYCAVAAWVAHDWFGSLQYWGQGTQVTVSS

SEQ ID NO: 5642 - protein, 122 aa, Artificial Sequence
  Chemically Synthesized
QVQLQESGGGLVQAGGSLRLSCAASGYISDRGVMGWYRQAPGKERELVATINGGTTTNYADSVKGRFTISRDNAKNTVYLQMNSLKPEDTAVYYCAVYDDWYIVLYPYLNYWGQGTQVTVSS

SEQ ID NO: 5643 - protein, 118 aa, Artificial Sequence
  Chemically Synthesized
QVQLQESGGGLVQAGGSLRLSCAASGSISGVGYMGWYRQAPGKERELVATIGWGANTNYADSVKGRFTISRDNAKNTVYLQMNSLKPEDTAVYYCAVRYLQTYGLAYWGQGTQVTVSS

SEQ ID NO: 5644 - protein, 117 aa, Artificial Sequence
  Chemically Synthesized
QVQLQESGGGLVQAGGSLRLSCAASGNIFVPANMGWYRQAPGKEREFVATISYGILPYADSVKGRFTISRDNAKNTVYLQMNSLKPEDTAVYYCAVYTSAQYPLDYWGQGTQVTVSS

SEQ ID NO: 5645 - protein, 112 aa, Artificial Sequence
  Chemically Synthesized
QVQLQESGGGLVQAGGSLRLSCAASGTISAVSWMGWYRQAPGKEREFVAAIAFGGNTNYADSVKGRFTISRDNAKNTVYLQMNSLKPEDTAVYYCAAWSSYWGQGTQVTVSS

SEQ ID NO: 5646 - protein, 118 aa, Artificial Sequence
  Chemically Synthesized
QVQLQESGGGLVQAGGSLRLSCAASGYISDLYYMGWYRQAPGKEREFVASIDAGTTTNYADSVKGRFTISRDNAKNTVYLQMNSLKPEDTAVYYCAVVDDRAYIYAYWGQGTQVTVSS

SEQ ID NO: 5647 - protein, 123 aa, Artificial Sequence
  Chemically Synthesized
QVQLQESGGGLVQAGGSLRLSCAASGTIFWEPPMGWYRQAPGKEREFVAAITYGSNTNYADSVKGRFTISRDNAKNTVYLQMNSLKPEDTAVYYCAVHYLDVRDEYGEHNDYWGQGTQVTVSS

SEQ ID NO: 5648 - protein, 117 aa, Artificial Sequence
  Chemically Synthesized
QVQLQESGGGLVQAGGSLRLSCAASGSIFSLSMGWYRQAPGKERELVAAINTGASTYYADSVKGRFTISRDNAKNTVYLQMNSLKPEDTAVYYCAAGNWFYGDHVYWGQGTQVTVSS

SEQ ID NO: 5649 - protein, 118 aa, Artificial Sequence
  Chemically Synthesized
QVQLQESGGGLVQAGGSLRLSCAASGYIFNPYGMGWYRQAPGKEREFVASISVGGTTNYADSVKGRFTISRDNAKNTVYLQMNSLKPEDTAVYYCAAFHPSDPYYEYWGQGTQVTVSS

SEQ ID NO: 5650 - protein, 122 aa, Artificial Sequence
  Chemically Synthesized
QVQLQESGGGLVQAGGSLRLSCAASGYIFYVYDMGWYRQAPGKERELVAGITDGGSTYYADSVKGRFTISRDNAKNTVYLQMNSLKPEDTAVYYCAVYYVEGYPQHYYYRYWGQGTQVTVSS

SEQ ID NO: 5651 - protein, 126 aa, Artificial Sequence
  Chemically Synthesized
QVQLQESGGGLVQAGGSLRLSCAASGNISDGTVMGWYRQAPGKERELVAGITVGGNTYYADSVKGRFTISRDNAKNTVYLQMNSLKPEDTAVYYCAVLGILYVTNDEVSISELDYWGQGTQVTVSS

SEQ ID NO: 5652 - protein, 120 aa, Artificial Sequence
  Chemically Synthesized
QVQLQESGGGLVQAGGSLRLSCAASGNILTLKMGWYRQAPGKEREFVAAISDGGSTYYADSVKGRFTISRDNAKNTVYLQMNSLKPEDTAVYYCAAEYHDYTITDSHNYWGQGTQVTVSS

SEQ ID NO: 5653 - protein, 118 aa, Artificial Sequence
  Chemically Synthesized
QVQLQESGGGLVQAGGSLRLSCAASGYISGYPAMGWYRQAPGKERELVAGITGGAITYYADSVKGRFTISRDNAKNTVYLQMNSLKPEDTAVYYCAVLYSQDGLLTYWGQGTQVTVSS

SEQ ID NO: 5654 - protein, 121 aa, Artificial Sequence
  Chemically Synthesized
QVQLQESGGGLVQAGGSLRLSCAASGYISAYYYMGWYRQAPGKERELVASIDPGGITNYADSVKGRFTISRDNAKNTVYLQMNSLKPEDTAVYYCAALRDLTTVTTLRIYWGQGTQVTVSS

SEQ ID NO: 5655 - protein, 118 aa, Artificial Sequence
  Chemically Synthesized
QVQLQESGGGLVQAGGSLRLSCAASGSISGRDAMGWYRQAPGKERELVATIGDGSSTNYADSVKGRFTISRDNAKNTVYLQMNSLKPEDTAVYYCAAYWRGIHVLNYWGQGTQVTVSS

SEQ ID NO: 5656 - protein, 118 aa, Artificial Sequence
  Chemically Synthesized
QVQLQESGGGLVQAGGSLRLSCAASGTIFDVYTMGWYRQAPGKEREFVASITFGAITNYADSVKGRFTISRDNAKNTVYLQMNSLKPEDTAVYYCAAVDYGARLLNYWGQGTQVTVSS

SEQ ID NO: 5657 - protein, 122 aa, Artificial Sequence
  Chemically Synthesized
QVQLQESGGGLVQAGGSLRLSCAASGNISRRDTMGWYRQAPGKEREFVATISDGTTTNYADSVKGRFTISRDNAKNTVYLQMNSLKPEDTAVYYCAVVTFVDLTYQGYLPYWGQGTQVTVSS

SEQ ID NO: 5658 - protein, 122 aa, Artificial Sequence
  Chemically Synthesized
QVQLQESGGGLVQAGGSLRLSCAASGYIFPRQTMGWYRQAPGKEREFVASITSGANTYYADSVKGRFTISRDNAKNTVYLQMNSLKPEDTAVYYCAVVFYDGRYRGRRYRYWGQGTQVTVSS

SEQ ID NO: 5659 - protein, 122 aa, Artificial Sequence
  Chemically Synthesized
QVQLQESGGGLVQAGGSLRLSCAASGSIFIYGYMGWYRQAPGKEREFVATIDLGSSTYYADSVKGRFTISRDNAKNTVYLQMNSLKPEDTAVYYCAVYYFGDVGSPWTYRYWGQGTQVTVSS

SEQ ID NO: 5660 - protein, 117 aa, Artificial Sequence
  Chemically Synthesized
QVQLQESGGGLVQAGGSLRLSCAASGSIFDGYDMGWYRQAPGKERELVAAINYGGITNYADSVKGRFTISRDNAKNTVYLQMNSLKPEDTAVYYCAVYSTTTKLIYWGQGTQVTVSS

SEQ ID NO: 5661 - protein, 118 aa, Artificial Sequence
  Chemically Synthesized
QVQLQESGGGLVQAGGSLRLSCAASGYISNVSAMGWYRQAPGKERELVAAIASGASTYYADSVKGRFTISRDNAKNTVYLQMNSLKPEDTAVYYCAVRPHLGYSLYYWGQGTQVTVSS

SEQ ID NO: 5662 - protein, 122 aa, Artificial Sequence
  Chemically Synthesized
QVQLQESGGGLVQAGGSLRLSCAASGNIFGYYNMGWYRQAPGKERELVAAIAIGASTNYADSVKGRFTISRDNAKNTVYLQMNSLKPEDTAVYYCAVQQHYRDENTPVLDYWGQGTQVTVSS

SEQ ID NO: 5663 - protein, 122 aa, Artificial Sequence
  Chemically Synthesized
QVQLQESGGGLVQAGGSLRLSCAASGNIFEYRAMGWYRQAPGKERELVAGISKGTNTNYADSVKGRFTISRDNAKNTVYLQMNSLKPEDTAVYYCAAVWGGDTTPGYPLDYWGQGTQVTVSS

SEQ ID NO: 5664 - protein, 121 aa, Artificial Sequence
  Chemically Synthesized
QVQLQESGGGLVQAGGSLRLSCAASGYISYDGYMGWYRQAPGKEREFVAAINRGGSTYYADSVKGRFTISRDNAKNTVYLQMNSLKPEDTAVYYCAAGHSVSGLTSGGIYWGQGTQVTVSS

SEQ ID NO: 5665 - protein, 122 aa, Artificial Sequence
  Chemically Synthesized
QVQLQESGGGLVQAGGSLRLSCAASGYISRWDTMGWYRQAPGKERELVATISYGSSTNYADSVKGRFTISRDNAKNTVYLQMNSLKPEDTAVYYCAAGWYRYWYDLVYYHYWGQGTQVTVSS

SEQ ID NO: 5666 - protein, 117 aa, Artificial Sequence
  Chemically Synthesized
QVQLQESGGGLVQAGGSLRLSCAASGTIFPSHTMGWYRQAPGKEREFASIGSGGITYYADSVKGRFTISRDNAKNTVYLQMNSLKPEDTAVYYCAANGPDYPDHQYWGQGTQVTVSS

SEQ ID NO: 5667 - protein, 122 aa, Artificial Sequence
  Chemically Synthesized
QVQLQESGGGLVQAGGSLRLSCAASGSISGGGGMGWYRQAPGKERELVAAIGRGAITNYADSVKGRFTISRDNAKNTVYLQMNSLKPEDTAVYYCAAPDGPRIHDPGDLDYWGQGTQVTVSS

SEQ ID NO: 5668 - protein, 115 aa, Artificial Sequence
  Chemically Synthesized
QVQLQESGGGLVQAGGSLRLSCAASGSISFSLMGWYRQAPGKEREFVASISYGGSTNYADSVKGRFTISRDNAKNTVYLQMNSLKPEDTAVYYCAVDGSIYFFYWGQGTQVTVSS

SEQ ID NO: 5669 - protein, 122 aa, Artificial Sequence
  Chemically Synthesized
QVQLQESGGGLVQAGGSLRLSCAASGTISYYIYMGWYRQAPGKEREFVAGITYGTSTNYADSVKGRFTISRDNAKNTVYLQMNSLKPEDTAVYYCAATGDHGTDLTQSLGYWGQGTQVTVSS

SEQ ID NO: 5670 - protein, 118 aa, Artificial Sequence
  Chemically Synthesized
QVQLQESGGGLVQAGGSLRLSCAASGNISSYNDMGWYRQAPGKEREFVAGIGDGTTTNYADSVKGRFTISRDNAKNTVYLQMNSLKPEDTAVYYCAAYEGPAGWLFYWGQGTQVTVSS

SEQ ID NO: 5671 - protein, 126 aa, Artificial Sequence
  Chemically Synthesized
QVQLQESGGGLVQAGGSLRLSCAASGTISDNYLMGWYRQAPGKEREFVASIDHGSSTYYADSVKGRFTISRDNAKNTVYLQMNSLKPEDTAVYYCAAKHYTDTWERDYYWHLHVYWGQGTQVTVSS

SEQ ID NO: 5672 - protein, 118 aa, Artificial Sequence
  Chemically Synthesized
QVQLQESGGGLVQAGGSLRLSCAASGTISRRHGMGWYRQAPGKEREFVAAISYGTTTYYADSVKGRFTISRDNAKNTVYLQMNSLKPEDTAVYYCAAQTGWYPRHPYWGQGTQVTVSS

SEQ ID NO: 5673 - protein, 118 aa, Artificial Sequence
  Chemically Synthesized
QVQLQESGGGLVQAGGSLRLSCAASGSISDSNYMGWYRQAPGKEREFVASINVGSTTNYADSVKGRFTISRDNAKNTVYLQMNSLKPEDTAVYYCAVGYQLGDSLYYWGQGTQVTVSS

SEQ ID NO: 5674 - protein, 124 aa, Artificial Sequence
  Chemically Synthesized
QVQLQESGGGLVQAGGSLRLSCAASGNISGHSMGWYRQAPGKEREFVATIADGGTTNYADSVKGRFTISRDNAKNTVYLQMNSLKPEDTAVYYCAAYPSTTTIRKTLVTFTIYWGQGTQVTVSS

SEQ ID NO: 5675 - protein, 125 aa, Artificial Sequence
  Chemically Synthesized
QVQLQESGGGLVQAGGSLRLSCAASGYISPRLTMGWYRQAPGKEREFVAGIAGGTTNYADSVKGRFTISRDNAKNTVYLQMNSLKPEDTAVYYCAVTHYTNRVLVYYDYVYLRYWGQGTQVTVSS

SEQ ID NO: 5676 - protein, 125 aa, Artificial Sequence
  Chemically Synthesized
QVQLQESGGGLVQAGGSLRLSCAASGSILNGTMGWYRQAPGKERELVATINGGGSTYYADSVKGRFTISRDNAKNTVYLQMNSLKPEDTAVYYCAVGVAYDSGPLVDYLYDYWYWGQGTQVTVSS

SEQ ID NO: 5677 - protein, 122 aa, Artificial Sequence
  Chemically Synthesized
QVQLQESGGGLVQAGGSLRLSCAASGYIFIIYAMGWYRQAPGKEREFVASIGGGASTNYADSVKGRFTISRDNAKNTVYLQMNSLKPEDTAVYYCAAYIGTTLPGYLYHLYWGQGTQVTVSS

SEQ ID NO: 5678 - protein, 126 aa, Artificial Sequence
  Chemically Synthesized
QVQLQESGGGLVQAGGSLRLSCAASGYISRVITMGWYRQAPGKEREFVASISGGTTTYYADSVKGRFTISRDNAKNTVYLQMNSLKPEDTAVYYCAVRRTRPGGQYLYAESRFPYWGQGTQVTVSS

SEQ ID NO: 5679 - protein, 108 aa, Artificial Sequence
  Chemically Synthesized
QVQLQESGGGLVQAGGSLRLSCAASGYISVKPYMGWYRQAPGKERELVIDDGTTTYYADSVKGRFTISRDNAKNTVYLQMNSLKPEDTAVYYCAAGYWGQGTQVTVSS

SEQ ID NO: 5680 - protein, 118 aa, Artificial Sequence
  Chemically Synthesized
QVQLQESGGGLVQAGGSLRLSCAASGNISPYPTMGWYRQAPGKERELVASIDRGANTNYADSVKGRFTISRDNAKNTVYLQMNSLKPEDTAVYYCAAGGGGKAAYLYWGQGTQVTVSS

SEQ ID NO: 5681 - protein, 118 aa, Artificial Sequence
  Chemically Synthesized
QVQLQESGGGLVQAGGSLRLSCAASGNISFYPDMGWYRQAPGKEREFVATIADGTNTNYADSVKGRFTISRDNAKNTVYLQMNSLKPEDTAVYYCAAYYIYPNALYYWGQGTQVTVSS

SEQ ID NO: 5682 - protein, 126 aa, Artificial Sequence
  Chemically Synthesized
QVQLQESGGGLVQAGGSLRLSCAASGTIFRYVPMGWYRQAPGKERELVAAINYGSTTYYADSVKGRFTISRDNAKNTVYLQMNSLKPEDTAVYYCAAYHTDSAWWHQLYYYPFGYWGQGTQVTVSS

SEQ ID NO: 5683 - protein, 120 aa, Artificial Sequence
  Chemically Synthesized
QVQLQESGGGLVQAGGSLRLSCAASGNMGWYRQAPGKERELVATINKGAITNYADSVKGRFTISRDNAKNTVYLQMNSLKPEDTAVYYCAAADDRYPYYSLDTTTEHWYWGQGTQVTVSS

SEQ ID NO: 5684 - protein, 126 aa, Artificial Sequence
  Chemically Synthesized
QVQLQESGGGLVQAGGSLRLSCAASGSIFITDIMGWYRQAPGKERELVAAITVGASTNYADSVKGRFTISRDNAKNTVYLQMNSLKPEDTAVYYCAVASQWLNRDYVPLYRSYYYWGQGTQVTVSS

SEQ ID NO: 5685 - protein, 109 aa, Artificial Sequence
  Chemically Synthesized
QVQLQESGGGLVQAGGSLRLSCAASGNIFLARSMGWYRQAPGKEREFVATITLGGNTYYADSVKGRFTISRDNAKNTVYLQMNSLKPEDTAVYYCALYWGQGTQVTVSS

SEQ ID NO: 5686 - protein, 118 aa, Artificial Sequence
  Chemically Synthesized
QVQLQESGGGLVQAGGSLRLSCAASGSIFGEYDMGWYRQAPGKERELVATIAKGSNTYYADSVKGRFTISRDNAKNTVYLQMNSLKPEDTAVYYCAVTASVNTGLYYWGQGTQVTVSS

SEQ ID NO: 5687 - protein, 122 aa, Artificial Sequence
  Chemically Synthesized
QVQLQESGGGLVQAGGSLRLSCAASGTISLLTTMGWYRQAPGKERELVAAIDAGSTTNYADSVKGRFTISRDNAKNTVYLQMNSLKPEDTAVYYCAVIRDAEYYAHDHYHYWGQGTQVTVSS

SEQ ID NO: 5688 - protein, 117 aa, Artificial Sequence
  Chemically Synthesized
QVQLQESGGGLVQAGGSLRLSCAASGNIFGPIYMGWYRQAPGKEREFVASIASGGNTNYADSVKGRFTISRDNAKNTVYLQMNSLKPEDTAVYYCALITTTFCSLYWGQGTQVTVSS

SEQ ID NO: 5689 - protein, 122 aa, Artificial Sequence
  Chemically Synthesized
QVQLQESGGGLVQAGGSLRLSCAASGSISSVTYMGWYRQAPGKERELVAGIAYGTITYYADSVKGRFTISRDNAKNTVYLQMNSLKPEDTAVYYCAAGYAYQGKNTDDHYYWGQGTQVTVSS

SEQ ID NO: 5690 - protein, 117 aa, Artificial Sequence
  Chemically Synthesized
QVQLQESGGGLVQAGGSLRLSCAASGYIFEPYIMGWYRQAPGKERELVASITGGTTYYADSVKGRFTISRDNAKNTVYLQMNSLKPEDTAVYYCAVVYLSDRAYVYWGQGTQVTVSS

SEQ ID NO: 5691 - protein, 122 aa, Artificial Sequence
  Chemically Synthesized
QVQLQESGGGLVQAGGSLRLSCAASGSISLYNRMGWYRQAPGKERELVAAINFGTSTNYADSVKGRFTISRDNAKNTVYLQMNSLKPEDTAVYYCAADYPDYAYAYGVYFYWGQGTQVTVSS

SEQ ID NO: 5692 - protein, 121 aa, Artificial Sequence
  Chemically Synthesized
QVQLQESGGGLVQAGGSLRLSCAASGSIFSNQDMGWYRQAPGKEREFVPVLLRVLIPYADSVKGRFTISRDNAKNTVYLQMNSLKPEDTAVYYCAAYFSIRPLVPQLHPYWGQGTQVTVSS

SEQ ID NO: 5693 - protein, 122 aa, Artificial Sequence
  Chemically Synthesized
QVQLQESGGGLVQAGGSLRLSCAASGTIFPSWYMGWYRQAPGKERELVATIAFGTTTYYADSVKGRFTISRDNAKNTVYLQMNSLKPEDTAVYYCAVPYTRPFVLYVQFYYWGQGTQVTVSS

SEQ ID NO: 5694 - protein, 125 aa, Artificial Sequence
  Chemically Synthesized
QVQLQESGGGLVQAGGSLRLSCAASGTIFTQSYMGWYRQAPGKEREFVAGIATVLLPYADSVKGRFTISRDNAKNTVYLQMNSLKPEDTAVYYCAVWLVQWVAASPLQTDAFPYWGQGTQVTVSS

SEQ ID NO: 5695 - protein, 122 aa, Artificial Sequence
  Chemically Synthesized
QVQLQESGGGLVQAGGSLRLSCAASGNISFNTLMGWYRQAPGKERELVASIGYGSTTNYADSVKGRFTISRDNAKNTVYLQMNSLKPEDTAVYYCAVPLASGYYYPYSHDYWGQGTQVTVSS

SEQ ID NO: 5696 - protein, 118 aa, Artificial Sequence
  Chemically Synthesized
QVQLQESGGGLVQAGGSLRLSCAASGSIFQRRYMGWYRQAPGKERELVASIASGGITYYADSVKGRFTISRDNAKNTVYLQMNSLKPEDTAVYYCAAILIRYRAYAYWGQGTQVTVSS

SEQ ID NO: 5697 - protein, 122 aa, Artificial Sequence
  Chemically Synthesized
QVQLQESGGGLVQAGGSLRLSCAASGTIFSDVYMGWYRQAPGKEREFVAAINQGSSTYYADSVKGRFTISRDNAKNTVYLQMNSLKPEDTAVYYCAAPRFHYGVSDDRYTYWGQGTQVTVSS

SEQ ID NO: 5698 - protein, 122 aa, Artificial Sequence
  Chemically Synthesized
QVQLQESGGGLVQAGGSLRLSCAASGYIFILYDMGWYRQAPGKEREFVASIASGSITNYADSVKGRFTISRDNAKNTVYLQMNSLKPEDTAVYYCAVFDQDAYYNTGYHWYWGQGTQVTVSS

SEQ ID NO: 5699 - protein, 118 aa, Artificial Sequence
  Chemically Synthesized
QVQLQESGGGLVQAGGSLRLSCAASGTIFNALHMGWYRQAPGKEREFVAAITRGGNTNYADSVKGRFTISRDNAKNTVYLQMNSLKPEDTAVYYCAARYGYWSDLWYWGQGTQVTVSS

SEQ ID NO: 5700 - protein, 112 aa, Artificial Sequence
  Chemically Synthesized
QVQLQESGGGLVQAGGSLRLSCAASGNIFRPIYMGWYRQAPGKERELVAGITPGATTNYADSVKGRFTISRDNAKNTVYLQMNSLKPEDTAVYYCASEHAYWGQGTQVTVSS

SEQ ID NO: 5701 - protein, 118 aa, Artificial Sequence
  Chemically Synthesized
QVQLQESGGGLVQAGGSLRLSCAASGTIFWSRPMGWYRQAPGKERELVATIANGANTNYADSVKGRFTISRDNAKNTVYLQMNSLKPEDTAVYYCAVGRVFYRYFVYWGQGTQVTVSS

SEQ ID NO: 5702 - protein, 117 aa, Artificial Sequence
  Chemically Synthesized
QVQLQESGGGLVQAGGSLRLSCAASGSISITAGMGWYRQAPGKERELVATIGTGTTTNYADSVKGRFTISRDNAKNTVYLQMNSLKPEDTAVYYCAVIINYADFYYWGQGTQVTVSS

SEQ ID NO: 5703 - protein, 116 aa, Artificial Sequence
  Chemically Synthesized
QVQLQESGGGLVQAGGSLRLSCAASGNISWYYMGWYRQAPGKERELLPVLLTVLLPYADSVKGRFTISRDNAKNTVYLQMNSLKPEDTAVYYCAVGYRYVYSLHYWGQGTQVTVSS

SEQ ID NO: 5704 - protein, 122 aa, Artificial Sequence
  Chemically Synthesized
QVQLQESGGGLVQAGGSLRLSCAASGSIFYTGAMGWYRQAPGKEREFVAAIGDGSTTYYADSVKGRFTISRDNAKNTVYLQMNSLKPEDTAVYYCAAPGYNYWPAVFKFGYWGQGTQVTVSS

SEQ ID NO: 5705 - protein, 121 aa, Artificial Sequence
  Chemically Synthesized
QVQLQESGGGLVQAGGSLRLSCAASGNIFDYTVMGWYRQAPGKEREFVAAITPGGTTNYADSVKGRFTISRDNAKNTVYLQMNSLKPEDTAVYYCAVGFLPLRSGEDHDYWGQGTQVTVSS

SEQ ID NO: 5706 - protein, 117 aa, Artificial Sequence
  Chemically Synthesized
QVQLQESGGGLVQAGGSLRLSCAASGTISFTSRMGWYRQAPGKEREFVATISSGTKPYADSVKGRFTISRDNAKNTVYLQMNSLKPEDTAVYYCAVDGTDFNYYPYWGQGTQVTVSS

SEQ ID NO: 5707 - protein, 121 aa, Artificial Sequence
  Chemically Synthesized
QVQLQESGGGLVQAGGSLRLSCAASGSIFGWVIMGWYRQAPGKEREFVATITSVLLPYADSVKGRFTISRDNAKNTVYLQMNSLKPEDTAVYYCAVVDNYYGTGSYLHAYWGQGTQVTVSS

SEQ ID NO: 5708 - protein, 121 aa, Artificial Sequence
  Chemically Synthesized
QVQLQESGGGLVQAGGSLRLSCAASGNISLQDGMGWYRQAPGKERELVAAISDGSTTNYADSVKGRFTISRDNAKNTVYLQMNSLKPEDTAVYYCAVTHYDYGDTRPSYYWGQGTQVTVSS

SEQ ID NO: 5709 - protein, 122 aa, Artificial Sequence
  Chemically Synthesized
QVQLQESGGGLVQAGGSLRLSCAASGNISPYVYMGWYRQAPGKERELVAAIDDGSSTYYADSVKGRFTISRDNAKNTVYLQMNSLKPEDTAVYYCAASADYVYFSRHGYAYWGQGTQVTVSS

SEQ ID NO: 5710 - protein, 109 aa, Artificial Sequence
  Chemically Synthesized
QVQLQESGGGLVQAGGSLRLSCAASGTIFRRGQMGWYRQAPGKEREFVAAISDGGTTNYADSVKGRFTISRDNAKNTVYLQMNSLKPEDTAVYYCAVYWGQGTQVTVSS

SEQ ID NO: 5711 - protein, 120 aa, Artificial Sequence
  Chemically Synthesized
QVQLQESGGGLVQAGGSLRLSCAASGTIYWSLMGWYRQAPGKEREFVAGIDIGATTNYADSVKGRFTISRDNAKNTVYLQMNSLKPEDTAVYYCAVKPDDFYVRSTRMYWGQGTQVTVSS

SEQ ID NO: 5712 - protein, 118 aa, Artificial Sequence
  Chemically Synthesized
QVQLQESGGGLVQAGGSLRLSCAASGTIFLWYDMGWYRQAPGKERELVAGITPGTNTNYADSVKGRFTISRDNAKNTVYLQMNSLKPEDTAVYYCAVWYDWADAYPYWGQGTQVTVSS

SEQ ID NO: 5713 - protein, 121 aa, Artificial Sequence
  Chemically Synthesized
QVQLQESGGGLVQAGGSLRLSCAASGTIFTSRYMGWYRQAPGKERELVAGIAQGGSTNYADSVKGRFTISRDNAKNTVYLQMNSLKPEDTAVYYCAAPYYWAFYVSLYEYWGQGTQVTVSS

SEQ ID NO: 5714 - protein, 126 aa, Artificial Sequence
  Chemically Synthesized
QVQLQESGGGLVQAGGSLRLSCAASGSISSDSRMGWYRQAPGKEREFVAGIGRGANTNYADSVKGRFTISRDNAKNTVYLQMNSLKPEDTAVYYCAVRVTGYPAYLRGPTGRHRYWGQGTQVTVSS

SEQ ID NO: 5715 - protein, 126 aa, Artificial Sequence
  Chemically Synthesized
QVQLQESGGGLVQAGGSLRLSCAASGNISSISAMGWYRQAPGKERELVAAISAGGNTYYADSVKGRFTISRDNAKNTVYLQMNSLKPEDTAVYYCAAFQKYYGAYYRDPADWLAYWGQGTQVTVSS

SEQ ID NO: 5716 - protein, 124 aa, Artificial Sequence
  Chemically Synthesized
QVQLQESGGGLVQAGGSLRLSCAASGNISTGGEMGWYRQAPGKERELVAGIDAGSTTNYADSVKGRFTISRDNAKNTVYLQMNSLKPEDTAVYYCAVTTNGTVLLRSTTFRMYWGQGTQVTVSS

SEQ ID NO: 5717 - protein, 118 aa, Artificial Sequence
  Chemically Synthesized
QVQLQESGGGLVQAGGSLRLSCAASGYISLYRYMGWYRQAPGKEREFVATISYGASTYYADSVKGRFTISRDNAKNTVYLQMNSLKPEDTAVYYCAAWSTRWRNLSYWGQGTQVTVSS

SEQ ID NO: 5718 - protein, 118 aa, Artificial Sequence
  Chemically Synthesized
QVQLQESGGGLVQAGGSLRLSCAASGNISDNSYMGWYRQAPGKERELVASIDYGGSTNYADSVKGRFTISRDNAKNTVYLQMNSLKPEDTAVYYCAAGPYWPTEYRYWGQGTQVTVSS

SEQ ID NO: 5719 - protein, 126 aa, Artificial Sequence
  Chemically Synthesized
QVQLQESGGGLVQAGGSLRLSCAASGNISGDTWMGWYRQAPGKEREFVATISYGGSTYYADSVKGRFTISRDNAKNTVYLQMNSLKPEDTAVYYCAVYRPESLRYSPNKSDDHGYWGQGTQVTVSS

SEQ ID NO: 5720 - protein, 121 aa, Artificial Sequence
  Chemically Synthesized
QVQLQESGGGLVQAGGSLRLSCAASGNISYAIYMGWYRQAPGKERELVATLVTVVLPYADSVKGRFTISRDNAKNTVYLQMNSLKPEDTAVYYCAAKYYTDFAYYTYFGYWGQGTQVTVSS

SEQ ID NO: 5721 - protein, 118 aa, Artificial Sequence
  Chemically Synthesized
QVQLQESGGGLVQAGGSLRLSCAASGNISYAQFMGWYRQAPGKEREFVAAIGTGSNTYYADSVKGRFTISRDNAKNTVYLQMNSLKPEDTAVYYCAVWSWAADYYVYWGQGTQVTVSS

SEQ ID NO: 5722 - protein, 117 aa, Artificial Sequence
  Chemically Synthesized
QVQLQESGGGLVQAGGSLRLSCAASGYISNRNFMGWYRQAPGKERELVAGIARGGSTYYADSVKGRFTISRDNAKNTVYLQMNSLKPEDTAVYYCAVSNWFTYYRYWGQGTQVTVSS

SEQ ID NO: 5723 - protein, 117 aa, Artificial Sequence
  Chemically Synthesized
QVQLQESGGGLVQAGGSLRLSCAASGYIFWYPIMGWYRQAPGKERELVATIGGGAITNYADSVKGRFTISRDNAKNTVYLQMNSLKPEDTAVYYCAVELFAYYHWYWGQGTQVTVSS

SEQ ID NO: 5724 - protein, 122 aa, Artificial Sequence
  Chemically Synthesized
QVQLQESGGGLVQAGGSLRLSCAASGTIFVSRAMGWYRQAPGKEREFVATIGGGTTTNYADSVKGRFTISRDNAKNTVYLQMNSLKPEDTAVYYCAAGPPYYWVTHASFRYWGQGTQVTVSS

SEQ ID NO: 5725 - protein, 127 aa, Artificial Sequence
  Chemically Synthesized
QVQLQESGGGLVQAGGSLRLSCAASGNIFRFSRMGWYRQAPGKERELVATISSGAITNYADSVKGRFTISRDNAKNTVYLQMNSLKPEDTAVYYCAAQSAWRGGGGLRWDRWYYGYWGQGTQVTVSS

SEQ ID NO: 5726 - protein, 126 aa, Artificial Sequence
  Chemically Synthesized
QVQLQESGGGLVQAGGSLRLSCAASGNIFAAAFMGWYRQAPGKERELVASIGYGATTNYADSVKGRFTISRDNAKNTVYLQMNSLKPEDTAVYYCAAVPTTWEDQFYPYSAPHDYWGQGTQVTVSS

SEQ ID NO: 5727 - protein, 118 aa, Artificial Sequence
  Chemically Synthesized
QVQLQESGGGLVQAGGSLRLSCAASGYISWRRYMGWYRQAPGKEREFVAAITYGGTTYYADSVKGRFTISRDNAKNTVYLQMNSLKPEDTAVYYCAVGAFYPRQYPYWGQGTQVTVSS

SEQ ID NO: 5728 - protein, 119 aa, Artificial Sequence
  Chemically Synthesized
QVQLQESGGGLVQAGGSLRLSCAASGYISSYDYMGWYRQAPGKEREFVATIGGGGNTYYADSVKGRFTISRDNAKNTVYLQMNSLKPEDTAVYYCAAGDRTSLLLLLYWGQGTQVTVSS

SEQ ID NO: 5729 - protein, 118 aa, Artificial Sequence
  Chemically Synthesized
QVQLQESGGGLVQAGGSLRLSCAASGTIFYPVSMGWYRQAPGKEREFVATIGYGATTNYADSVKGRFTISRDNAKNTVYLQMNSLKPEDTAVYYCAAKRYTRYRHVYWGQGTQVTVSS

SEQ ID NO: 5730 - protein, 122 aa, Artificial Sequence
  Chemically Synthesized
QVQLQESGGGLVQAGGSLRLSCAASGSISPATYMGWYRQAPGKERELVATIATGGTTNYADSVKGRFTISRDNAKNTVYLQMNSLKPEDTAVYYCAVYGVRHYIYVYIYAYWGQGTQVTVSS

SEQ ID NO: 5731 - protein, 118 aa, Artificial Sequence
  Chemically Synthesized
QVQLQESGGGLVQAGGSLRLSCAASGSIFYWTRMGWYRQAPGKERELVATIGFGASTNYADSVKGRFTISRDNAKNTVYLQMNSLKPEDTAVYYCAANTRRYRFHWYWGQGTQVTVSS

SEQ ID NO: 5732 - protein, 120 aa, Artificial Sequence
  Chemically Synthesized
QVQLQESGGGLVQAGGSLRLSCAASGYISVERMGWYRQAPGKERELVAAINRGAITNYADSVKGRFTISRDNAKNTVYLQMNSLKPEDTAVYYCAAGYWWYRGSYGPLYWGQGTQVTVSS

SEQ ID NO: 5733 - protein, 117 aa, Artificial Sequence
  Chemically Synthesized
QVQLQESGGGLVQAGGSLRLSCAASGNIFGASGMGWYRQAPGKEREFVASIAAGATTYYADSVKGRFTISRDNAKNTVYLQMNSLKPEDTAVYYCAATDKTRYLTYWGQGTQVTVSS

SEQ ID NO: 5734 - protein, 118 aa, Artificial Sequence
  Chemically Synthesized
QVQLQESGGGLVQAGGSLRLSCAASGTISWAYKMGWYRQAPGKEREFVAGIDNGAITNYADSVKGRFTISRDNAKNTVYLQMNSLKPEDTAVYYCAVLYDHRYAYGYWGQGTQVTVSS

SEQ ID NO: 5735 - protein, 118 aa, Artificial Sequence
  Chemically Synthesized
QVQLQESGGGLVQAGGSLRLSCAASGNIFFAVYMGWYRQAPGKERELVASIAYGSSTNYADSVKGRFTISRDNAKNTVYLQMNSLKPEDTAVYYCAARYWGTYYHLYWGQGTQVTVSS

SEQ ID NO: 5736 - protein, 117 aa, Artificial Sequence
  Chemically Synthesized
QVQLQESGGGLVQAGGSLRLSCAASGTIFYLRMGWYRQAPGKEREFVASIDEGAITNYADSVKGRFTISRDNAKNTVYLQMNSLKPEDTAVYYCAAASVNSDYLNYWGQGTQVTVSS

SEQ ID NO: 5737 - protein, 118 aa, Artificial Sequence
  Chemically Synthesized
QVQLQESGGGLVQAGGSLRLSCAASGNISRSYGMGWYRQAPGKEREFVASIDIGGNTYYADSVKGRFTISRDNAKNTVYLQMNSLKPEDTAVYYCAAYYGDPITLVYWGQGTQVTVSS

SEQ ID NO: 5738 - protein, 118 aa, Artificial Sequence
  Chemically Synthesized
QVQLQESGGGLVQAGGSLRLSCAASGNISFSTKMGWYRQAPGKERELVATISRGSNTYYADSVKGRFTISRDNAKNTVYLQMNSLKPEDTAVYYCAVEQHLWIRHRYWGQGTQVTVSS

SEQ ID NO: 5739 - protein, 122 aa, Artificial Sequence
  Chemically Synthesized
QVQLQESGGGLVQAGGSLRLSCAASGSIFPPSAMGWYRQAPGKERELVAGINLGGNTNYADSVKGRFTISRDNAKNTVYLQMNSLKPEDTAVYYCAARSRYYGGWFRTHYYWGQGTQVTVSS

SEQ ID NO: 5740 - protein, 118 aa, Artificial Sequence
  Chemically Synthesized
QVQLQESGGGLVQAGGSLRLSCAASGTIFYRPRMGWYRQAPGKERELVATINRGGNTNYADSVKGRFTISRDNAKNTVYLQMNSLKPEDTAVYYCAVGPNYRDRHPYWGQGTQVTVSS

SEQ ID NO: 5741 - protein, 117 aa, Artificial Sequence
  Chemically Synthesized
QVQLQESGGGLVQAGGSLRLSCAASGYISDRNIMGWYRQAPGKERELVATIAGGNTNYADSVKGRFTISRDNAKNTVYLQMNSLKPEDTAVYYCAAEAFNFSDFIYWGQGTQVTVSS

SEQ ID NO: 5742 - protein, 112 aa, Artificial Sequence
  Chemically Synthesized
QVQLQESGGGLVQAGGSLRLSCAASGTISTTHSMGWYRQAPGKEREFVASITYGSSTNYADSVKGRFTISRDNAKNTVYLQMNSLKPEDTAVYYCAVRPLYWGQGTQVTVSS

SEQ ID NO: 5743 - protein, 126 aa, Artificial Sequence
  Chemically Synthesized
QVQLQESGGGLVQAGGSLRLSCAASGSISTYVSMGWYRQAPGKERELVATINWGGTTYYADSVKGRFTISRDNAKNTVYLQMNSLKPEDTAVYYCAVGLYNDVPPYASAGADHYYWGQGTQVTVSS

SEQ ID NO: 5744 - protein, 117 aa, Artificial Sequence
  Chemically Synthesized
QVQLQESGGGLVQAGGSLRLSCAASGTISPNIDMGWYRQAPGKERELVAAITDGTITNYADSVKGRFTISRDNAKNTVYLQMNSLKPEDTAVYYCAVDYITDDHKYWGQGTQVTVSS

SEQ ID NO: 5745 - protein, 118 aa, Artificial Sequence
  Chemically Synthesized
QVQLQESGGGLVQAGGSLRLSCAASGSIFWRLPMGWYRQAPGKEREFVAGITRGANTNYADSVKGRFTISRDNAKNTVYLQMNSLKPEDTAVYYCAAYRTVYTRHYYWGQGTQVTVSS

SEQ ID NO: 5746 - protein, 116 aa, Artificial Sequence
  Chemically Synthesized
QVQLQESGGGLVQAGGSLRLSCAASGNIFARDYMGWYRQAPGKEREFVAAINPGANTNYADSVKGRFTISRDNAKNTVYLQMNSLKPEDTAVYYCADSVGWPHRYWGQGTQVTVSS

SEQ ID NO: 5747 - protein, 118 aa, Artificial Sequence
  Chemically Synthesized
QVQLQESGGGLVQAGGSLRLSCAASGSISYSYHMGWYRQAPGKEREFVAGISGGTITYYADSVKGRFTISRDNAKNTVYLQMNSLKPEDTAVYYCAARYNWSYYHQYWGQGTQVTVSS

SEQ ID NO: 5748 - protein, 119 aa, Artificial Sequence
  Chemically Synthesized
QVQLQESGGGLVQAGGSLRLSCAASGSIFSYLSMGWYRQAPGKERELVAAIDYGTNTYYADSVKGRFTISRDNAKNTVYLQMNSLKPEDTAVYYCAAARTTYRHYHRYWGQGTQVTVSS

SEQ ID NO: 5749 - protein, 118 aa, Artificial Sequence
  Chemically Synthesized
QVQLQESGGGLVQAGGSLRLSCAASGYIFGYQYMGWYRQAPGKERELVASINGGASTNYADSVKGRFTISRDNAKNTVYLQMNSLKPEDTAVYYCAATYRYITGHDYWGQGTQVTVSS

SEQ ID NO: 5750 - protein, 118 aa, Artificial Sequence
  Chemically Synthesized
QVQLQESGGGLVQAGGSLRLSCAASGNISSPLYMGWYRQAPGKERELVAAIDPGGSTYYADSVKGRFTISRDNAKNTVYLQMNSLKPEDTAVYYCAVDWTWNTPFLYWGQGTQVTVSS

SEQ ID NO: 5751 - protein, 102 aa, Artificial Sequence
  Chemically Synthesized
QVQLQESGGGLVQAGGSLRLSCAASGSISPDKGMGWYRQAPGKEREFVIPYADSVKGRFTISRDNAKNTVYLQMNSLKPEDTAVYYCALMYWGQGTQVTVSS

SEQ ID NO: 5752 - protein, 122 aa, Artificial Sequence
  Chemically Synthesized
QVQLQESGGGLVQAGGSLRLSCAASGTIFLYPYMGWYRQAPGKERELVASIGTGASTNYADSVKGRFTISRDNAKNTVYLQMNSLKPEDTAVYYCAVISLIDYLPYPSLGYWGQGTQVTVSS

SEQ ID NO: 5753 - protein, 109 aa, Artificial Sequence
  Chemically Synthesized
QVQLQESGGGLVQAGGSLRLSCAASGTISDESMGWYRQAPGKEREFVAAIASGSITNYADSVKGRFTISRDNAKNTVYLQMNSLKPEDTAVYYCAVYYWGQGTQVTVSS

SEQ ID NO: 5754 - protein, 118 aa, Artificial Sequence
  Chemically Synthesized
QVQLQESGGGLVQAGGSLRLSCAASGTISRGKIMGWYRQAPGKEREFVATINAGGSTNYADSVKGRFTISRDNAKNTVYLQMNSLKPEDTAVYYCAVKRWYYVNHEYWGQGTQVTVSS

SEQ ID NO: 5755 - protein, 118 aa, Artificial Sequence
  Chemically Synthesized
QVQLQESGGGLVQAGGSLRLSCAASGYISRYYRMGWYRQAPGKERELVASITRGANTNYADSVKGRFTISRDNAKNTVYLQMNSLKPEDTAVYYCAAQLYRYRPFFYWGQGTQVTVSS

SEQ ID NO: 5756 - protein, 120 aa, Artificial Sequence
  Chemically Synthesized
QVQLQESGGGLVQAGGSLRLSCAASGTISDVVYMGWYRQAPGKERELVASITNGVIPYADSVKGRFTISRDNAKNTVYLQMNSLKPEDTAVYYCAATVLTKTKLLVLFYWGQGTQVTVSS

SEQ ID NO: 5757 - protein, 122 aa, Artificial Sequence
  Chemically Synthesized
QVQLQESGGGLVQAGGSLRLSCAASGTISLDATMGWYRQAPGKEREFVAGIGYGASTYYADSVKGRFTISRDNAKNTVYLQMNSLKPEDTAVYYCAALTQYDEYYRVRHVYWGQGTQVTVSS

SEQ ID NO: 5758 - protein, 126 aa, Artificial Sequence
  Chemically Synthesized
QVQLQESGGGLVQAGGSLRLSCAASGNIFRRISMGWYRQAPGKERELVASIGTGGNTNYADSVKGRFTISRDNAKNTVYLQMNSLKPEDTAVYYCAAYRRPNWYYWYERRYPFRYWGQGTQVTVSS

SEQ ID NO: 5759 - protein, 118 aa, Artificial Sequence
  Chemically Synthesized
QVQLQESGGGLVQAGGSLRLSCAASGNIFQYVAMGWYRQAPGKEREFVAAISFGSNTYYADSVKGRFTISRDNAKNTVYLQMNSLKPEDTAVYYCAAAWVGDVEHDYWGQGTQVTVSS

SEQ ID NO: 5760 - protein, 118 aa, Artificial Sequence
  Chemically Synthesized
QVQLQESGGGLVQAGGSLRLSCAASGYIFRRYYMGWYRQAPGKEREFVAAISTGTTTYYADSVKGRFTISRDNAKNTVYLQMNSLKPEDTAVYYCAVIRYYNRGYGYWGQGTQVTVSS

SEQ ID NO: 5761 - protein, 122 aa, Artificial Sequence
  Chemically Synthesized
QVQLQESGGGLVQAGGSLRLSCAASGYISKWPKMGWYRQAPGKEREFVAGISTGTTTYYADSVKGRFTISRDNAKNTVYLQMNSLKPEDTAVYYCAAATLYANRYSTLLHYWGQGTQVTVSS

SEQ ID NO: 5762 - protein, 118 aa, Artificial Sequence
  Chemically Synthesized
QVQLQESGGGLVQAGGSLRLSCAASGSISTEAIMGWYRQAPGKEREFVASIGAGSNTYYADSVKGRFTISRDNAKNTVYLQMNSLKPEDTAVYYCAVTIYRYVYYIYWGQGTQVTVSS

SEQ ID NO: 5763 - protein, 126 aa, Artificial Sequence
  Chemically Synthesized
QVQLQESGGGLVQAGGSLRLSCAASGTIFYVGAMGWYRQAPGKERELVAGITGGTITYYADSVKGRFTISRDNAKNTVYLQMNSLKPEDTAVYYCAARRSYRRYDDSRNTYRLAYWGQGTQVTVSS

SEQ ID NO: 5764 - protein, 118 aa, Artificial Sequence
  Chemically Synthesized
QVQLQESGGGLVQAGGSLRLSCAASGYIFIFYSMGWYRQAPGKERELVAAITWGGNTYYADSVKGRFTISRDNAKNTVYLQMNSLKPEDTAVYYCAVAHPYYLSHRYWGQGTQVTVSS

SEQ ID NO: 5765 - protein, 118 aa, Artificial Sequence
  Chemically Synthesized
QVQLQESGGGLVQAGGSLRLSCAASGSIFQRKTMGWYRQAPGKERELVAAIAYGTITYYADSVKGRFTISRDNAKNTVYLQMNSLKPEDTAVYYCAVKPRYYSQHYYWGQGTQVTVSS

SEQ ID NO: 5766 - protein, 118 aa, Artificial Sequence
  Chemically Synthesized
QVQLQESGGGLVQAGGSLRLSCAASGNISGSWKMGWYRQAPGKEREFVAAINGGGITNYADSVKGRFTISRDNAKNTVYLQMNSLKPEDTAVYYCAASYWFGPYYGYWGQGTQVTVSS

SEQ ID NO: 5767 - protein, 118 aa, Artificial Sequence
  Chemically Synthesized
QVQLQESGGGLVQAGGSLRLSCAASGTIFVLTYMGWYRQAPGKERELVAGIASGTSTYYADSVKGRFTISRDNAKNTVYLQMNSLKPEDTAVYYCAVRGSYTYIYLYWGQGTQVTVSS

SEQ ID NO: 5768 - protein, 118 aa, Artificial Sequence
  Chemically Synthesized
QVQLQESGGGLVQAGGSLRLSCAASGTISYYRDMGWYRQAPGKEREFVAAIDDGSNTNYADSVKGRFTISRDNAKNTVYLQMNSLKPEDTAVYYCAVGNNDYDVFGYWGQGTQVTVSS

SEQ ID NO: 5769 - protein, 122 aa, Artificial Sequence
  Chemically Synthesized
QVQLQESGGGLVQAGGSLRLSCAASGYIFRVRGMGWYRQAPGKERELVASITSGGNTYYADSVKGRFTISRDNAKNTVYLQMNSLKPEDTAVYYCAAYDLRRGYYRGRHDYWGQGTQVTVSS

SEQ ID NO: 5770 - protein, 118 aa, Artificial Sequence
  Chemically Synthesized
QVQLQESGGGLVQAGGSLRLSCAASGYIFSRYTMGWYRQAPGKEREFVATIAYGTTTYYADSVKGRFTISRDNAKNTVYLQMNSLKPEDTAVYYCAAQTRWLRQHTYWGQGTQVTVSS

SEQ ID NO: 5771 - protein, 118 aa, Artificial Sequence
  Chemically Synthesized
QVQLQESGGGLVQAGGSLRLSCAASGYISYRYDMGWYRQAPGKERELVATINFGATTNYADSVKGRFTISRDNAKNTVYLQMNSLKPEDTAVYYCAVFGELGTPLSYWGQGTQVTVSS

SEQ ID NO: 5772 - protein, 118 aa, Artificial Sequence
  Chemically Synthesized
QVQLQESGGGLVQAGGSLRLSCAASGTIFPPYYMGWYRQAPGKEREFVAGIGTGSTTNYADSVKGRFTISRDNAKNTVYLQMNSLKPEDTAVYYCAAWLIDTTGYVYWGQGTQVTVSS

SEQ ID NO: 5773 - protein, 122 aa, Artificial Sequence
  Chemically Synthesized
QVQLQESGGGLVQAGGSLRLSCAASGNIFGVDYMGWYRQAPGKERELVASISAGASTYYADSVKGRFTISRDNAKNTVYLQMNSLKPEDTAVYYCAADRPVYVRLVGELGYWGQGTQVTVSS

SEQ ID NO: 5774 - protein, 118 aa, Artificial Sequence
  Chemically Synthesized
QVQLQESGGGLVQAGGSLRLSCAASGTIFNLTIMGWYRQAPGKEREFVAGIGRGSITNYADSVKGRFTISRDNAKNTVYLQMNSLKPEDTAVYYCAAGWLPYFGHYYWGQGTQVTVSS

SEQ ID NO: 5775 - protein, 124 aa, Artificial Sequence
  Chemically Synthesized
QVQLQESGGGLVQAGGSLRLSCAASGYIFPLISMGWYRQAPGKEREFVAGIDHGSNTYYADSVKGRFTISRDNAKNTVYLQMNSLKPEDTAVYYCAALYDHINRGSIRRGYPYWGQGTQVTVSS

SEQ ID NO: 5776 - protein, 122 aa, Artificial Sequence
  Chemically Synthesized
QVQLQESGGGLVQAGGSLRLSCAASGYISWRYSMGWYRQAPGKERELVATIGWGATTYYADSVKGRFTISRDNAKNTVYLQMNSLKPEDTAVYYCAAYHWPGDYPRRRYRYWGQGTQVTVSS

SEQ ID NO: 5777 - protein, 126 aa, Artificial Sequence
  Chemically Synthesized
QVQLQESGGGLVQAGGSLRLSCAASGTISLYIRMGWYRQAPGKERELVATISDGSNTYYADSVKGRFTISRDNAKNTVYLQMNSLKPEDTAVYYCAVQSNYTGYSVQYRYTDLTYWGQGTQVTVSS

SEQ ID NO: 5778 - protein, 118 aa, Artificial Sequence
  Chemically Synthesized
QVQLQESGGGLVQAGGSLRLSCAASGSIFPRKYMGWYRQAPGKEREFVATITRGTITYYADSVKGRFTISRDNAKNTVYLQMNSLKPEDTAVYYCAADKPYSREHLYWGQGTQVTVSS

SEQ ID NO: 5779 - protein, 118 aa, Artificial Sequence
  Chemically Synthesized
QVQLQESGGGLVQAGGSLRLSCAASGTIFTLRNMGWYRQAPGKERELVAAINAGSNTYYADSVKGRFTISRDNAKNTVYLQMNSLKPEDTAVYYCAVKKWRQRQHVYWGQGTQVTVSS

SEQ ID NO: 5780 - protein, 126 aa, Artificial Sequence
  Chemically Synthesized
QVQLQESGGGLVQAGGSLRLSCAASGTIFQSGDMGWYRQAPGKEREFVATIDGGTSTYYADSVKGRFTISRDNAKNTVYLQMNSLKPEDTAVYYCAVRNFQGYSGHWGYARYLDYWGQGTQVTVSS

SEQ ID NO: 5781 - protein, 118 aa, Artificial Sequence
  Chemically Synthesized
QVQLQESGGGLVQAGGSLRLSCAASGSISRQKIMGWYRQAPGKERELVASISAGSTTNYADSVKGRFTISRDNAKNTVYLQMNSLKPEDTAVYYCAVDLGYTNLFVYWGQGTQVTVSS

SEQ ID NO: 5782 - protein, 118 aa, Artificial Sequence
  Chemically Synthesized
QVQLQESGGGLVQAGGSLRLSCAASGYISSVYAMGWYRQAPGKEREFVAGISYGGSTYYADSVKGRFTISRDNAKNTVYLQMNSLKPEDTAVYYCAVGQQVPSWYGYWGQGTQVTVSS

SEQ ID NO: 5783 - protein, 118 aa, Artificial Sequence
  Chemically Synthesized
QVQLQESGGGLVQAGGSLRLSCAASGSIFDQSQMGWYRQAPGKERELVATINAGTSTYYADSVKGRFTISRDNAKNTVYLQMNSLKPEDTAVYYCAVTVVGGRTFTYWGQGTQVTVSS

SEQ ID NO: 5784 - protein, 124 aa, Artificial Sequence
  Chemically Synthesized
QVQLQESGGGLVQAGGSLRLSCAASGYISQVSLMGWYRQAPGKEREFVAAISQGGNTYYADSVKGRFTISRDNAKNTVYLQMNSLKPEDTAVYYCAVDVISRVADRRWYYHGYWGQGTQVTVSS

SEQ ID NO: 5785 - protein, 118 aa, Artificial Sequence
  Chemically Synthesized
QVQLQESGGGLVQAGGSLRLSCAASGSIFRFIVMGWYRQAPGKEREFVAAISGGGTTYYADSVKGRFTISRDNAKNTVYLQMNSLKPEDTAVYYCAVNAWYSRVHRYWGQGTQVTVSS

SEQ ID NO: 5786 - protein, 118 aa, Artificial Sequence
  Chemically Synthesized
QVQLQESGGGLVQAGGSLRLSCAASGNISYPDYMGWYRQAPGKEREFVAAIGDGTTTYYADSVKGRFTISRDNAKNTVYLQMNSLKPEDTAVYYCAAASILEINLTYWGQGTQVTVSS

SEQ ID NO: 5787 - protein, 118 aa, Artificial Sequence
  Chemically Synthesized
QVQLQESGGGLVQAGGSLRLSCAASGNIFSSYYMGWYRQAPGKERELVASGNTYYADSVKGRFTISRDNAKNTVYLQMNSLKPEDTAVYYCAADDGDFILLIWAHRYWGQGTQVTVSS

SEQ ID NO: 5788 - protein, 118 aa, Artificial Sequence
  Chemically Synthesized
QVQLQESGGGLVQAGGSLRLSCAASGTISPDGTMGWYRQAPGKEREFVAGIADGATTNYADSVKGRFTISRDNAKNTVYLQMNSLKPEDTAVYYCAAVLGYSPGFYYWGQGTQVTVSS

SEQ ID NO: 5789 - protein, 122 aa, Artificial Sequence
  Chemically Synthesized
QVQLQESGGGLVQAGGSLRLSCAASGTISDDSQMGWYRQAPGKEREFVAGINAGSITYYADSVKGRFTISRDNAKNTVYLQMNSLKPEDTAVYYCAATYQYVWWDAGTHVYWGQGTQVTVSS

SEQ ID NO: 5790 - protein, 118 aa, Artificial Sequence
  Chemically Synthesized
QVQLQESGGGLVQAGGSLRLSCAASGYIFTRRTMGWYRQAPGKERELVAAIDKGGTTNYADSVKGRFTISRDNAKNTVYLQMNSLKPEDTAVYYCAVQRHGNRGHHYWGQGTQVTVSS

SEQ ID NO: 5791 - protein, 118 aa, Artificial Sequence
  Chemically Synthesized
QVQLQESGGGLVQAGGSLRLSCAASGNIFRPGYMGWYRQAPGKEREFVAAISRGATTYYADSVKGRFTISRDNAKNTVYLQMNSLKPEDTAVYYCAVNTRGYTQFRYWGQGTQVTVSS

SEQ ID NO: 5792 - protein, 126 aa, Artificial Sequence
  Chemically Synthesized
QVQLQESGGGLVQAGGSLRLSCAASGSIFGAVDMGWYRQAPGKERELVAGIDQGGSTYYADSVKGRFTISRDNAKNTVYLQMNSLKPEDTAVYYCAVGGHTQIYQLYLAGVYLWYWGQGTQVTVSS

SEQ ID NO: 5793 - protein, 118 aa, Artificial Sequence
  Chemically Synthesized
QVQLQESGGGLVQAGGSLRLSCAASGSISSYYYMGWYRQAPGKEREFVATIGLGTSTNYADSVKGRFTISRDNAKNTVYLQMNSLKPEDTAVYYCAVDATYERGFTYWGQGTQVTVSS

SEQ ID NO: 5794 - protein, 118 aa, Artificial Sequence
  Chemically Synthesized
QVQLQESGGGLVQAGGSLRLSCAASGYISDYVYMGWYRQAPGKEREFVASINPGTITYYADSVKGRFTISRDNAKNTVYLQMNSLKPEDTAVYYCAVDRSIYSSLEYWGQGTQVTVSS

SEQ ID NO: 5795 - protein, 126 aa, Artificial Sequence
  Chemically Synthesized
QVQLQESGGGLVQAGGSLRLSCAASGYIFAPYAMGWYRQAPGKERELVASINWGSTTNYADSVKGRFTISRDNAKNTVYLQMNSLKPEDTAVYYCAVGYDTTYDHPYYDYAFHVYWGQGTQVTVSS

SEQ ID NO: 5796 - protein, 126 aa, Artificial Sequence
  Chemically Synthesized
QVQLQESGGGLVQAGGSLRLSCAASGTISFYESMGWYRQAPGKERELVAAITDGSTTYYADSVKGRFTISRDNAKNTVYLQMNSLKPEDTAVYYCAATDVFDWYRYYLTYLPYPYWGQGTQVTVSS

SEQ ID NO: 5797 - protein, 118 aa, Artificial Sequence
  Chemically Synthesized
QVQLQESGGGLVQAGGSLRLSCAASGYISVDVSMGWYRQAPGKERELVAGIGYGGNTYYADSVKGRFTISRDNAKNTVYLQMNSLKPEDTAVYYCAAWHGWLYWFSYWGQGTQVTVSS

SEQ ID NO: 5798 - protein, 126 aa, Artificial Sequence
  Chemically Synthesized
QVQLQESGGGLVQAGGSLRLSCAASGTISARRYMGWYRQAPGKERELVASISLGSNTYYADSVKGRFTISRDNAKNTVYLQMNSLKPEDTAVYYCAVRHYRGYPSVGYYRYRLSYWGQGTQVTVSS

SEQ ID NO: 5799 - protein, 117 aa, Artificial Sequence
  Chemically Synthesized
QVQLQESGGGLVQAGGSLRLSCAASGNISYAYGMGWYRQAPGKERELVATIGAGATTNYADSVKGRFTISRDNAKNTVYLQMNSLKPEDTAVYYCAAYDRGYKYEYWGQGTQVTVSS

SEQ ID NO: 5800 - protein, 122 aa, Artificial Sequence
  Chemically Synthesized
QVQLQESGGGLVQAGGSLRLSCAASGNISGYFGMGWYRQAPGKERELVAAIDDGATTYYADSVKGRFTISRDNAKNTVYLQMNSLKPEDTAVYYCAVRYNGYPALLGPHQYWGQGTQVTVSS

SEQ ID NO: 5801 - protein, 118 aa, Artificial Sequence
  Chemically Synthesized
QVQLQESGGGLVQAGGSLRLSCAASGSISAPGVMGWYRQAPGKEREFVATINAGATTYYADSVKGRFTISRDNAKNTVYLQMNSLKPEDTAVYYCAASAQGGIYYLYWGQGTQVTVSS

SEQ ID NO: 5802 - protein, 117 aa, Artificial Sequence
  Chemically Synthesized
QVQLQESGGGLVQAGGSLRLSCAASGTISPARGMGWYRQAPGKEREFVASIDLGGITYADSVKGRFTISRDNAKNTVYLQMNSLKPEDTAVYYCAVLYDRTYSLRYWGQGTQVTVSS

SEQ ID NO: 5803 - protein, 126 aa, Artificial Sequence
  Chemically Synthesized
QVQLQESGGGLVQAGGSLRLSCAASGSISHPAYMGWYRQAPGKEREFVAGIGFGGNTYYADSVKGRFTISRDNAKNTVYLQMNSLKPEDTAVYYCAAVVYWDSADVDRALSGFDYWGQGTQVTVSS

SEQ ID NO: 5804 - protein, 118 aa, Artificial Sequence
  Chemically Synthesized
QVQLQESGGGLVQAGGSLRLSCAASGYIFLWIDMGWYRQAPGKEREFVAAIGGGGSTYYADSVKGRFTISRDNAKNTVYLQMNSLKPEDTAVYYCAVLGYYPWNHSYWGQGTQVTVSS

SEQ ID NO: 5805 - protein, 122 aa, Artificial Sequence
  Chemically Synthesized
QVQLQESGGGLVQAGGSLRLSCAASGYISWAWGMGWYRQAPGKEREFVATITGGGITNYADSVKGRFTISRDNAKNTVYLQMNSLKPEDTAVYYCAAYADLYATYNYVYSYWGQGTQVTVSS

SEQ ID NO: 5806 - protein, 126 aa, Artificial Sequence
  Chemically Synthesized
QVQLQESGGGLVQAGGSLRLSCAASGYISGGGYMGWYRQAPGKEREFVASIGVGSNTNYADSVKGRFTISRDNAKNTVYLQMNSLKPEDTAVYYCAVPRWRSIFNTNYDKLYHGYWGQGTQVTVSS

SEQ ID NO: 5807 - protein, 121 aa, Artificial Sequence
  Chemically Synthesized
QVQLQESGGGLVQAGGSLRLSCAASGNIFSLWMGWYRQAPGKEREFVASIGYGTNTYYADSVKGRFTISRDNAKNTVYLQMNSLKPEDTAVYYCAADRATRGTNVRAFVYWGQGTQVTVSS

SEQ ID NO: 5808 - protein, 118 aa, Artificial Sequence
  Chemically Synthesized
QVQLQESGGGLVQAGGSLRLSCAASGNIFRISGMGWYRQAPGKERELVAGIGTGTTTYYADSVKGRFTISRDNAKNTVYLQMNSLKPEDTAVYYCAVAHRYGRWLVYWGQGTQVTVSS

SEQ ID NO: 5809 - protein, 126 aa, Artificial Sequence
  Chemically Synthesized
QVQLQESGGGLVQAGGSLRLSCAASGYISLVAAMGWYRQAPGKEREFVAAITHGTTTYYADSVKGRFTISRDNAKNTVYLQMNSLKPEDTAVYYCAAYQEYKKGNDTTVYKLLTYWGQGTQVTVSS

SEQ ID NO: 5810 - protein, 119 aa, Artificial Sequence
  Chemically Synthesized
QVQLQESGGGLVQAGGSLRLSCAASGSISPNWAIMGWYRQAPGKERELVATIAHGTTTYYADSVKGRFTISRDNAKNTVYLQMNSLKPEDTAVYYCAAKWRRYSWYLYWGQGTQVTVSS

SEQ ID NO: 5811 - protein, 126 aa, Artificial Sequence
  Chemically Synthesized
QVQLQESGGGLVQAGGSLRLSCAASGTIFDRQDMGWYRQAPGKEREFVAAITVGSSTNYADSVKGRFTISRDNAKNTVYLQMNSLKPEDTAVYYCAVHPGVYWSDKVGDTWGLDYWGQGTQVTVSS

SEQ ID NO: 5812 - protein, 126 aa, Artificial Sequence
  Chemically Synthesized
QVQLQESGGGLVQAGGSLRLSCAASGYIFRTYGMGWYRQAPGKERELVAAITTGSNTNYADSVKGRFTISRDNAKNTVYLQMNSLKPEDTAVYYCAVVGDYRAYDLSDTYIAHDYWGQGTQVTVSS

SEQ ID NO: 5813 - protein, 118 aa, Artificial Sequence
  Chemically Synthesized
QVQLQESGGGLVQAGGSLRLSCAASGSISAYAYMGWYRQAPGKERELVAGINRGANTYYADSVKGRFTISRDNAKNTVYLQMNSLKPEDTAVYYCAVRYLTTADLIYWGQGTQVTVSS

SEQ ID NO: 5814 - protein, 126 aa, Artificial Sequence
  Chemically Synthesized
QVQLQESGGGLVQAGGSLRLSCAASGTIFNRARMGWYRQAPGKERELVATINIGGSTNYADSVKGRFTISRDNAKNTVYLQMNSLKPEDTAVYYCAAKYTWNERYYPLYFGWHRYWGQGTQVTVSS

SEQ ID NO: 5815 - protein, 122 aa, Artificial Sequence
  Chemically Synthesized
QVQLQESGGGLVQAGGSLRLSCAASGSISASGYMGWYRQAPGKERELVASITAGAITYYADSVKGRFTISRDNAKNTVYLQMNSLKPEDTAVYYCAVYIYGPSSYYSSHTYWGQGTQVTVSS

SEQ ID NO: 5816 - protein, 118 aa, Artificial Sequence
  Chemically Synthesized
QVQLQESGGGLVQAGGSLRLSCAASGTISPFVYMGWYRQAPGKERELVAAIAFGANTYYADSVKGRFTISRDNAKNTVYLQMNSLKPEDTAVYYCAADRFKRRLHTYWGQGTQVTVSS

SEQ ID NO: 5817 - protein, 122 aa, Artificial Sequence
  Chemically Synthesized
QVQLQESGGGLVQAGGSLRLSCAASGTIFADGYMGWYRQAPGKERELVAAIANGGSTYYADSVKGRFTISRDNAKNTVYLQMNSLKPEDTAVYYCAVVAVIDPNTGAAYAYWGQGTQVTVSS

SEQ ID NO: 5818 - protein, 118 aa, Artificial Sequence
  Chemically Synthesized
QVQLQESGGGLVQAGGSLRLSCAASGTIFLRGTMGWYRQAPGKERELVAGISYGANTNYADSVKGRFTISRDNAKNTVYLQMNSLKPEDTAVYYCAVPTWLADTHAYWGQGTQVTVSS

SEQ ID NO: 5819 - protein, 122 aa, Artificial Sequence
  Chemically Synthesized
QVQLQESGGGLVQAGGSLRLSCAASGSIFPAWRMGWYRQAPGKEREFVAAITLGAITNYADSVKGRFTISRDNAKNTVYLQMNSLKPEDTAVYYCAVGRAVRSSKYPSHGYWGQGTQVTVSS

SEQ ID NO: 5820 - protein, 122 aa, Artificial Sequence
  Chemically Synthesized
QVQLQESGGGLVQAGGSLRLSCAASGNISALRKMGWYRQAPGKEREFVAAIGRGANTNYADSVKGRFTISRDNAKNTVYLQMNSLKPEDTAVYYCAVRVRDYRYDRASLGYWGQGTQVTVSS

SEQ ID NO: 5821 - protein, 122 aa, Artificial Sequence
  Chemically Synthesized
QVQLQESGGGLVQAGGSLRLSCAASGYIFIIKQMGWYRQAPGKERELVAAIGLGGNTYYADSVKGRFTISRDNAKNTVYLQMNSLKPEDTAVYYCAARGERYWWYSRKLQYWGQGTQVTVSS

SEQ ID NO: 5822 - protein, 115 aa, Artificial Sequence
  Chemically Synthesized
QVQLQESGGGLVQAGGSLRLSCAASGTIFHSVYMGWYRQAPGKERELVASIAWGASTYYADSVKGRFTISRDNAKNTVYLQMNSLKPEDTAVYYCAAHILIFDYWGQGTQVTVSS

SEQ ID NO: 5823 - protein, 118 aa, Artificial Sequence
  Chemically Synthesized
QVQLQESGGGLVQAGGSLRLSCAASGYIFSGTHMGWYRQAPGKERELVASIGSGASTYYADSVKGRFTISRDNAKNTVYLQMNSLKPEDTAVYYCAVWGTTYNDHIYWGQGTQVTVSS

SEQ ID NO: 5824 - protein, 126 aa, Artificial Sequence
  Chemically Synthesized
QVQLQESGGGLVQAGGSLRLSCAASGSIFQYWVMGWYRQAPGKEREFVAAIGRGTITNYADSVKGRFTISRDNAKNTVYLQMNSLKPEDTAVYYCAVAPYWIPGVRYRFYDPHYYWGQGTQVTVSS

SEQ ID NO: 5825 - protein, 121 aa, Artificial Sequence
  Chemically Synthesized
QVQLQESGGGLVQAGGSLRLSCAASGTIFTYGYMGWYRQAPGKERELVAAISLGGNTYYADSVKGRFTISRDNAKNTVYLQMNSLKPEDTAVYYCAVRYYDTTNWVGLMYWGQGTQVTVSS

SEQ ID NO: 5826 - protein, 123 aa, Artificial Sequence
  Chemically Synthesized
QVQLQESGGGLVQAGGSLRLSCAASGYIFVPYRYMGWYRQAPGKEREFVASINRGTTTYYADSVKGRFTISRDNAKNTVYLQMNSLKPEDTAVYYCAAWISALLYRISGHDYWGQGTQVTVSS

SEQ ID NO: 5827 - protein, 118 aa, Artificial Sequence
  Chemically Synthesized
QVQLQESGGGLVQAGGSLRLSCAASGTISSLPGMGWYRQAPGKEREFVATITDGTTTNYADSVKGRFTISRDNAKNTVYLQMNSLKPEDTAVYYCAAFYTGLYVHNYWGQGTQVTVSS

SEQ ID NO: 5828 - protein, 121 aa, Artificial Sequence
  Chemically Synthesized
QVQLQESGGGLVQAGGSLRLSCAASGNISYRWYMGWYRQAPGKEREFVASISFGSNTNYADSVKGRFTISRDNAKNTVYLQMNSLKPEDTAVYYCAANRRRRYGGGPFLYWGQGTQVTVSS

SEQ ID NO: 5829 - protein, 124 aa, Artificial Sequence
  Chemically Synthesized
QVQLQESGGGLVQAGGSLRLSCAASGSISLDRMGWYRQAPGKERELVAGIDYGANTYYADSVKGRFTISRDNAKNTVYLQMNSLKPEDTAVYYCALLLTTGTIVRPVVLLPLYWGQGTQVTVSS

SEQ ID NO: 5830 - protein, 122 aa, Artificial Sequence
  Chemically Synthesized
QVQLQESGGGLVQAGGSLRLSCAASGSIFYAEYMGWYRQAPGKEREFVAAITAGSTTYYADSVKGRFTISRDNAKNTVYLQMNSLKPEDTAVYYCAADGYYYGIEFTYYEYWGQGTQVTVSS

SEQ ID NO: 5831 - protein, 118 aa, Artificial Sequence
  Chemically Synthesized
QVQLQESGGGLVQAGGSLRLSCAASGTISTLDYMGWYRQAPGKEREFVAAINYGSNTYYADSVKGRFTISRDNAKNTVYLQMNSLKPEDTAVYYCAAADVTRPAYDYWGQGTQVTVSS

SEQ ID NO: 5832 - protein, 117 aa, Artificial Sequence
  Chemically Synthesized
QVQLQESGGGLVQAGGSLRLSCAASGSISAYWAMGWYRQAPGKEREFVAAINFGANTYYADSVKGRFTISRDNAKNTVYLQMNSLKPEDTAVYYCAAERDGDYHDYWGQGTQVTVSS

SEQ ID NO: 5833 - protein, 117 aa, Artificial Sequence
  Chemically Synthesized
QVQLQESGGGLVQAGGSLRLSCAASGTIFAYWYMGWYRQAPGKEREFVAAIGDGSSTYYADSVKGRFTISRDNAKNTVYLQMNSLKPEDTAVYYCAAEAPGYGHTYWGQGTQVTVSS

SEQ ID NO: 5834 - protein, 118 aa, Artificial Sequence
  Chemically Synthesized
QVQLQESGGGLVQAGGSLRLSCAASGNISGKGIMGWYRQAPGKEREFVAGIDYGASTNYADSVKGRFTISRDNAKNTVYLQMNSLKPEDTAVYYCAVATRYYPVHVYWGQGTQVTVSS

SEQ ID NO: 5835 - protein, 126 aa, Artificial Sequence
  Chemically Synthesized
QVQLQESGGGLVQAGGSLRLSCAASGNISYLLVMGWYRQAPGKEREFVAGIASGGSTYYADSVKGRFTISRDNAKNTVYLQMNSLKPEDTAVYYCAVTIKYRPRSGQTRNSSLGYWGQGTQVTVSS

SEQ ID NO: 5836 - protein, 122 aa, Artificial Sequence
  Chemically Synthesized
QVQLQESGGGLVQAGGSLRLSCAASGYISYIRAMGWYRQAPGKEREFVAGIAAGATTNYADSVKGRFTISRDNAKNTVYLQMNSLKPEDTAVYYCAVLIAGRNVDGARLAYWGQGTQVTVSS

SEQ ID NO: 5837 - protein, 118 aa, Artificial Sequence
  Chemically Synthesized
QVQLQESGGGLVQAGGSLRLSCAASGNISYSPIMGWYRQAPGKEREFVAGINWGGNTYYADSVKGRFTISRDNAKNTVYLQMNSLKPEDTAVYYCAAAYRAQRVHVYWGQGTQVTVSS

SEQ ID NO: 5838 - protein, 118 aa, Artificial Sequence
  Chemically Synthesized
QVQLQESGGGLVQAGGSLRLSCAASGSISRPRYMGWYRQAPGKEREFVAAIDYGANTNYADSVKGRFTISRDNAKNTVYLQMNSLKPEDTAVYYCAAYIPQGYILVYWGQGTQVTVSS

SEQ ID NO: 5839 - protein, 118 aa, Artificial Sequence
  Chemically Synthesized
QVQLQESGGGLVQAGGSLRLSCAASGNIFAPSVMGWYRQAPGKEREFVAGIALGSTTYYADSVKGRFTISRDNAKNTVYLQMNSLKPEDTAVYYCAAYYRAYQRHVYWGQGTQVTVSS

SEQ ID NO: 5840 - protein, 118 aa, Artificial Sequence
  Chemically Synthesized
QVQLQESGGGLVQAGGSLRLSCAASGSISSGAVMGWYRQAPGKEREFVAGINYGSNTYYADSVKGRFTISRDNAKNTVYLQMNSLKPEDTAVYYCAAAWRDGRIYAYWGQGTQVTVSS

SEQ ID NO: 5841 - protein, 118 aa, Artificial Sequence
  Chemically Synthesized
QVQLQESGGGLVQAGGSLRLSCAASGYISTYVVMGWYRQAPGKEREFVAAINQGANTYYADSVKGRFTISRDNAKNTVYLQMNSLKPEDTAVYYCAVGYRNKYVFVYWGQGTQVTVSS

SEQ ID NO: 5842 - protein, 118 aa, Artificial Sequence
  Chemically Synthesized
QVQLQESGGGLVQAGGSLRLSCAASGSIFYRYVMGWYRQAPGKEREFVAAINVGASTYYADSVKGRFTISRDNAKNTVYLQMNSLKPEDTAVYYCAAADKRGSIHVYWGQGTQVTVSS

SEQ ID NO: 5843 - protein, 122 aa, Artificial Sequence
  Chemically Synthesized
QVQLQESGGGLVQAGGSLRLSCAASGSISYRGVMGWYRQAPGKERELVAAIASGGNTYYADSVKGRFTISRDNAKNTVYLQMNSLKPEDTAVYYCAVKARANRYPVVAYAYWGQGTQVTVSS

SEQ ID NO: 5844 - protein, 118 aa, Artificial Sequence
  Chemically Synthesized
QVQLQESGGGLVQAGGSLRLSCAASGSIFRKSVMGWYRQAPGKEREFVAGITYGTTTNYADSVKGRFTISRDNAKNTVYLQMNSLKPEDTAVYYCAALLRGRDHLLYWGQGTQVTVSS

SEQ ID NO: 5845 - protein, 118 aa, Artificial Sequence
  Chemically Synthesized
QVQLQESGGGLVQAGGSLRLSCAASGNIFYTLVMGWYRQAPGKEREFVAGITFGSNTNYADSVKGRFTISRDNAKNTVYLQMNSLKPEDTAVYYCAALDRSTVRHVYWGQGTQVTVSS

SEQ ID NO: 5846 - protein, 122 aa, Artificial Sequence
  Chemically Synthesized
QVQLQESGGGLVQAGGSLRLSCAASGNIFGSLIMGWYRQAPGKEREFVAGISFGGSTYYADSVKGRFTISRDNAKNTVYLQMNSLKPEDTAVYYCAAAYINRDQRGFRLVYWGQGTQVTVSS

SEQ ID NO: 5847 - protein, 121 aa, Artificial Sequence
  Chemically Synthesized
QVQLQESGGGLVQAGGSLRLSCAASGSIFYASGMGWYRQAPGKEREFVAGIDRGATTYYADSVKGRFTISRDNAKNTVYLQMNSLKPEDTAVYYCAVISRHDRNLGFLVYWGQGTQVTVSS

SEQ ID NO: 5848 - protein, 122 aa, Artificial Sequence
  Chemically Synthesized
QVQLQESGGGLVQAGGSLRLSCAASGNISTYSAMGWYRQAPGKEREFVAAIAGGATTNYADSVKGRFTISRDNAKNTVYLQMNSLKPEDTAVYYCAAYFRQRKQGPSAHAYWGQGTQVTVSS

SEQ ID NO: 5849 - protein, 126 aa, Artificial Sequence
  Chemically Synthesized
QVQLQESGGGLVQAGGSLRLSCAASGTISYARAMGWYRQAPGKEREFVAAIAQGGSTNYADSVKGRFTISRDNAKNTVYLQMNSLKPEDTAVYYCAATYGHSHGDGGRRSTYYLYWGQGTQVTVSS

SEQ ID NO: 5850 - protein, 118 aa, Artificial Sequence
  Chemically Synthesized
QVQLQESGGGLVQAGGSLRLSCAASGYIFGRYWMGWYRQAPGKEREFVATIGRGAITYYADSVKGRFTISRDNAKNTVYLQMNSLKPEDTAVYYCAVKSFYAYYHTYWGQGTQVTVSS

SEQ ID NO: 5851 - protein, 116 aa, Artificial Sequence
  Chemically Synthesized
QVQLQESGGGLVQAGGSLRLSCAASGTISIYGPMGWYRQAPGKEREFVAAINYGSITYYADSVKGRFTISRDNAKNTVYLQMNSLKPEDTAVYYCAVNGYYYLVYWGQGTQVTVSS

SEQ ID NO: 5852 - protein, 118 aa, Artificial Sequence
  Chemically Synthesized
QVQLQESGGGLVQAGGSLRLSCAASGTIFGRGVMGWYRQAPGKEREFVAAIARGATTNYADSVKGRFTISRDNAKNTVYLQMNSLKPEDTAVYYCAATVGRRTHLAYWGQGTQVTVSS

SEQ ID NO: 5853 - protein, 122 aa, Artificial Sequence
  Chemically Synthesized
QVQLQESGGGLVQAGGSLRLSCAASGNISYYGVMGWYRQAPGKEREFVAGISYGTSTNYADSVKGRFTISRDNAKNTVYLQMNSLKPEDTAVYYCAALDDSRAYAGYRHLYWGQGTQVTVSS

SEQ ID NO: 5854 - protein, 118 aa, Artificial Sequence
  Chemically Synthesized
QVQLQESGGGLVQAGGSLRLSCAASGNIFTGRPMGWYRQAPGKEREFVAAISAGAITNYADSVKGRFTISRDNAKNTVYLQMNSLKPEDTAVYYCAVYFRGRPRLTYWGQGTQVTVSS

SEQ ID NO: 5855 - protein, 118 aa, Artificial Sequence
  Chemically Synthesized
QVQLQESGGGLVQAGGSLRLSCAASGTIFGQAVMGWYRQAPGKEREFVAAIAYGGSTYYADSVKGRFTISRDNAKNTVYLQMNSLKPEDTAVYYCAAGYKSYDWYVYWGQGTQVTVSS

SEQ ID NO: 5856 - protein, 122 aa, Artificial Sequence
  Chemically Synthesized
QVQLQESGGGLVQAGGSLRLSCAASGTISPTWVMGWYRQAPGKEREFVAGITYGATTYYADSVKGRFTISRDNAKNTVYLQMNSLKPEDTAVYYCAAQSPHHYGREYNLRYWGQGTQVTVSS

SEQ ID NO: 5857 - protein, 122 aa, Artificial Sequence
  Chemically Synthesized
QVQLQESGGGLVQAGGSLRLSCAASGYIFRSYVMGWYRQAPGKEREFVAGITGGTSTYYADSVKGRFTISRDNAKNTVYLQMNSLKPEDTAVYYCAAYHRYTDGYVRRYLYWGQGTQVTVSS

SEQ ID NO: 5858 - protein, 122 aa, Artificial Sequence
  Chemically Synthesized
QVQLQESGGGLVQAGGSLRLSCAASGTISQAAVMGWYRQAPGKEREFVAGITFGSSTYYADSVKGRFTISRDNAKNTVYLQMNSLKPEDTAVYYCAVGVRSTYPTHYYHAYWGQGTQVTVSS

SEQ ID NO: 5859 - protein, 120 aa, Artificial Sequence
  Chemically Synthesized
QVQLQESGGGLVQAGGSLRLSCAASGYISRIKIMGWYRQAPGKEREFVAGIAYGGSTYYADSVKGRFTISRDNAKNTVYLQMNSLKPEDTAVYYCAATVPPTKGYILAYWGQGTQVTVSS

SEQ ID NO: 5860 - protein, 118 aa, Artificial Sequence
  Chemically Synthesized
QVQLQESGGGLVQAGGSLRLSCAASGTIFTRTVMGWYRQAPGKEREFVAGITYGSSTYYADSVKGRFTISRDNAKNTVYLQMNSLKPEDTAVYYCAVLTRAHYRYYYWGQGTQVTVSS

SEQ ID NO: 5861 - protein, 115 aa, Artificial Sequence
  Chemically Synthesized
QVQLQESGGGLVQAGGSLRLSCAASGYISGFNPMGWYRQAPGKEREFVAAIGAGATTNYADSVKGRFTISRDNAKNTVYLQMNSLKPEDTAVYYCAVAYYRHVYWGQGTQVTVSS

SEQ ID NO: 5862 - protein, 122 aa, Artificial Sequence
  Chemically Synthesized
QVQLQESGGGLVQAGGSLRLSCAASGNISYTRAMGWYRQAPGKEREFVAGIASGGSTNYADSVKGRFTISRDNAKNTVYLQMNSLKPEDTAVYYCAAIYLAYPDRRIRLVYWGQGTQVTVSS

SEQ ID NO: 5863 - protein, 119 aa, Artificial Sequence
  Chemically Synthesized
QVQLQESGGGLVQAGGSLRLSCAASGTISRKDVMGWYRQAPGKEREFVAAIGNGTSTYYADSVKGRFTISRDNAKNTVYLQMNSLKPEDTAVYYCAVGKKYHDKWLFYWGQGTQVTVSS

SEQ ID NO: 5864 - protein, 122 aa, Artificial Sequence
  Chemically Synthesized
QVQLQESGGGLVQAGGSLRLSCAASGNIFGPPVMGWYRQAPGKEREFVAGITYGSTTYYADSVKGRFTISRDNAKNTVYLQMNSLKPEDTAVYYCAAQYRTAGQTYRRYLYWGQGTQVTVSS

SEQ ID NO: 5865 - protein, 122 aa, Artificial Sequence
  Chemically Synthesized
QVQLQESGGGLVQAGGSLRLSCAASGNIFSSVYMGWYRQAPGKEREFVAAISAGGITYYADSVKGRFTISRDNAKNTVYLQMNSLKPEDTAVYYCAVARRYYKGSQHWLVYWGQGTQVTVSS

SEQ ID NO: 5866 - protein, 122 aa, Artificial Sequence
  Chemically Synthesized
QVQLQESGGGLVQAGGSLRLSCAASGTISRRPIMGWYRQAPGKEREFVAGIAGGASTYYADSVKGRFTISRDNAKNTVYLQMNSLKPEDTAVYYCAVRDEHEGHRFYYLVYWGQGTQVTVSS

SEQ ID NO: 5867 - protein, 122 aa, Artificial Sequence
  Chemically Synthesized
QVQLQESGGGLVQAGGSLRLSCAASGSISTGPVMGWYRQAPGKEREFVAGITYGASTYYADSVKGRFTISRDNAKNTVYLQMNSLKPEDTAVYYCAAYYRPSDADTTKHVYWGQGTQVTVSS

SEQ ID NO: 5868 - protein, 118 aa, Artificial Sequence
  Chemically Synthesized
QVQLQESGGGLVQAGGSLRLSCAASGNIFRRDVMGWYRQAPGKEREFVAAITTGGSTYYADSVKGRFTISRDNAKNTVYLQMNSLKPEDTAVYYCAVYVRGYAPFVYWGQGTQVTVSS

SEQ ID NO: 5869 - protein, 122 aa, Artificial Sequence
  Chemically Synthesized
QVQLQESGGGLVQAGGSLRLSCAASGTIFRRGVMGWYRQAPGKEREFVAAISRGGNTYYADSVKGRFTISRDNAKNTVYLQMNSLKPEDTAVYYCAVEVFHEDLYPSRFYYWGQGTQVTVSS

SEQ ID NO: 5870 - protein, 115 aa, Artificial Sequence
  Chemically Synthesized
QVQLQESGGGLVQAGGSLRLSCAASGNISAHVIMGWYRQAPGKEREFVAGIDYGASTYYADSVKGRFTISRDNAKNTVYLQMNSLKPEDTAVYYCAVADKRHRYWGQGTQVTVSS

SEQ ID NO: 5871 - protein, 117 aa, Artificial Sequence
  Chemically Synthesized
QVQLQESGGGLVQAGGSLRLSCAASGNISLTYVMGWYRQAPGKERELVASIAQGGSTNYADSVKGRFTISRDNAKNTVYLQMNSLKPEDTAVYYCAADQLRDEYFYWGQGTQVTVSS

SEQ ID NO: 5872 - protein, 125 aa, Artificial Sequence
  Chemically Synthesized
QVQLQESGGGLVQAGGSLRLSCAASGSISPLDTMGWYRQAPGKEREFVAGITPGATTNYADSVKGRFTISRDNAKNTVYLQMNSLKPEDTAVYYCAALTRRASRSGNYSSRYLYWGQGTQVTVSS

SEQ ID NO: 5873 - protein, 118 aa, Artificial Sequence
  Chemically Synthesized
QVQLQESGGGLVQAGGSLRLSCAASGNISRTYIMGWYRQAPGKEREFVAAIGRGTITNYADSVKGRFTISRDNAKNTVYLQMNSLKPEDTAVYYCAAGRREWAWHVYWGQGTQVTVSS

SEQ ID NO: 5874 - protein, 121 aa, Artificial Sequence
  Chemically Synthesized
QVQLQESGGGLVQAGGSLRLSCAASGTIFRYSPMGWYRQAPGKEREFVAAIAQGGSTYYADSVKGRFTISRDNAKNTVYLQMNSLKPEDTAVYYCAVRAKDYNKVYYLYYWGQGTQVTVSS

SEQ ID NO: 5875 - protein, 118 aa, Artificial Sequence
  Chemically Synthesized
QVQLQESGGGLVQAGGSLRLSCAASGSISDKAVMGWYRQAPGKEREFVAGIASGTTTNYADSVKGRFTISRDNAKNTVYLQMNSLKPEDTAVYYCAAYYRNIYRFAYWGQGTQVTVSS

SEQ ID NO: 5876 - protein, 122 aa, Artificial Sequence
  Chemically Synthesized
QVQLQESGGGLVQAGGSLRLSCAASGTIFRPQVMGWYRQAPGKEREFVAGIATGSNTYYADSVKGRFTISRDNAKNTVYLQMNSLKPEDTAVYYCAVYWNTYNDTGLRYVYWGQGTQVTVSS

SEQ ID NO: 5877 - protein, 122 aa, Artificial Sequence
  Chemically Synthesized
QVQLQESGGGLVQAGGSLRLSCAASGNISYRYVMGWYRQAPGKEREFVAGITAGATTYYADSVKGRFTISRDNAKNTVYLQMNSLKPEDTAVYYCAVRRSYSAHAQYIYVYWGQGTQVTVSS

SEQ ID NO: 5878 - protein, 122 aa, Artificial Sequence
  Chemically Synthesized
QVQLQESGGGLVQAGGSLRLSCAASGTIFEWAIMGWYRQAPGKEREFVAGINYGGTTNYADSVKGRFTISRDNAKNTVYLQMNSLKPEDTAVYYCAAVVRVLQRPFSGLGYWGQGTQVTVSS

SEQ ID NO: 5879 - protein, 118 aa, Artificial Sequence
  Chemically Synthesized
QVQLQESGGGLVQAGGSLRLSCAASGNIFRSAVMGWYRQAPGKEREFVAGITYGASTYYADSVKGRFTISRDNAKNTVYLQMNSLKPEDTAVYYCAALYRDTVYLAYWGQGTQVTVSS

SEQ ID NO: 5880 - protein, 122 aa, Artificial Sequence
  Chemically Synthesized
QVQLQESGGGLVQAGGSLRLSCAASGTISESRVMGWYRQAPGKEREFVAAIARGGSTNYADSVKGRFTISRDNAKNTVYLQMNSLKPEDTAVYYCAATYTKSSSYDWRLLYWGQGTQVTVSS

SEQ ID NO: 5881 - protein, 119 aa, Artificial Sequence
  Chemically Synthesized
QVQLQESGGGLVQAGGSLRLSCAASGSISDGRTMGWYRQAPGKEREFVAGINRGTNTYYADSVKGRFTISRDNAKNTVYLQMNSLKPEDTAVYYCAVYARYQTYRYVYWGQGTQVTVSS

SEQ ID NO: 5882 - protein, 122 aa, Artificial Sequence
  Chemically Synthesized
QVQLQESGGGLVQAGGSLRLSCAASGSIFPEWVMGWYRQAPGKEREFVAGIAYGGSTNYADSVKGRFTISRDNAKNTVYLQMNSLKPEDTAVYYCAVAGRVGRGVDGYYAYWGQGTQVTVSS

SEQ ID NO: 5883 - protein, 126 aa, Artificial Sequence
  Chemically Synthesized
QVQLQESGGGLVQAGGSLRLSCAASGSISGYALMGWYRQAPGKEREFVAGINVGANTNYADSVKGRFTISRDNAKNTVYLQMNSLKPEDTAVYYCAVGWRGLYYHAGASYGVHVYWGQGTQVTVSS

SEQ ID NO: 5884 - protein, 118 aa, Artificial Sequence
  Chemically Synthesized
QVQLQESGGGLVQAGGSLRLSCAASGNISGHGVMGWYRQAPGKEREFVAGISFGSNTNYADSVKGRFTISRDNAKNTVYLQMNSLKPEDTAVYYCAVYIRARIAYLYWGQGTQVTVSS

SEQ ID NO: 5885 - protein, 122 aa, Artificial Sequence
  Chemically Synthesized
QVQLQESGGGLVQAGGSLRLSCAASGTISSWGAMGWYRQAPGKEREFVAAITYGASTNYADSVKGRFTISRDNAKNTVYLQMNSLKPEDTAVYYCAAQYRTSWANRRYLYYWGQGTQVTVSS

SEQ ID NO: 5886 - protein, 122 aa, Artificial Sequence
  Chemically Synthesized
QVQLQESGGGLVQAGGSLRLSCAASGNISLRRVMGWYRQAPGKEREFVAAITAGSTTNYADSVKGRFTISRDNAKNTVYLQMNSLKPEDTAVYYCAVGYRPNGNQLPYHVYWGQGTQVTVSS

SEQ ID NO: 5887 - protein, 122 aa, Artificial Sequence
  Chemically Synthesized
QVQLQESGGGLVQAGGSLRLSCAASGTIFERTHMGWYRQAPGKEREFVAAIAWGGTTNYADSVKGRFTISRDNAKNTVYLQMNSLKPEDTAVYYCAALRRVTTRNGGLLVYWGQGTQVTVSS

SEQ ID NO: 5888 - protein, 118 aa, Artificial Sequence
  Chemically Synthesized
QVQLQESGGGLVQAGGSLRLSCAASGTIFVRGIMGWYRQAPGKEREFVAGITKGSSTYYADSVKGRFTISRDNAKNTVYLQMNSLKPEDTAVYYCAAARRDVVIYAYWGQGTQVTVSS

SEQ ID NO: 5889 - protein, 118 aa, Artificial Sequence
  Chemically Synthesized
QVQLQESGGGLVQAGGSLRLSCAASGNIFYTRIMGWYRQAPGKERELVAAIGIGTSTYYADSVKGRFTISRDNAKNTVYLQMNSLKPEDTAVYYCAATARNRWYFRYWGQGTQVTVSS

SEQ ID NO: 5890 - protein, 122 aa, Artificial Sequence
  Chemically Synthesized
QVQLQESGGGLVQAGGSLRLSCAASGSIFRSLIMGWYRQAPGKEREFVAGITNGATTYYADSVKGRFTISRDNAKNTVYLQMNSLKPEDTAVYYCAAQRWKDSNSIYRLRYWGQGTQVTVSS

SEQ ID NO: 5891 - protein, 122 aa, Artificial Sequence
  Chemically Synthesized
QVQLQESGGGLVQAGGSLRLSCAASGNISFRYVMGWYRQAPGKEREFVAGITVGSITYYADSVKGRFTISRDNAKNTVYLQMNSLKPEDTAVYYCAVDSGYDRYRQYRFVYWGQGTQVTVSS

SEQ ID NO: 5892 - protein, 118 aa, Artificial Sequence
  Chemically Synthesized
QVQLQESGGGLVQAGGSLRLSCAASGNISGRVIMGWYRQAPGKEREFVAAISPGASTYYADSVKGRFTISRDNAKNTVYLQMNSLKPEDTAVYYCAARSRSYWQLLYWGQGTQVTVSS

SEQ ID NO: 5893 - protein, 117 aa, Artificial Sequence
  Chemically Synthesized
QVQLQESGGGLVQAGGSLRLSCAASGSISYGGVMGWYRQAPGKEREFVAAITVGGSTYYADSVKGRFTISRDNAKNTVYLQMNSLKPEDTAVYYCAAYIRRLSYVYWGQGTQVTVSS

SEQ ID NO: 5894 - protein, 118 aa, Artificial Sequence
  Chemically Synthesized
QVQLQESGGGLVQAGGSLRLSCAASGSISSFSVMGWYRQAPGKEREFVAGIAIGSNTNYADSVKGRFTISRDNAKNTVYLQMNSLKPEDTAVYYCAAYYRGLYRYYYWGQGTQVTVSS

SEQ ID NO: 5895 - protein, 118 aa, Artificial Sequence
  Chemically Synthesized
QVQLQESGGGLVQAGGSLRLSCAASGNISVPTVMGWYRQAPGKEREFVAAITRGSSTNYADSVKGRFTISRDNAKNTVYLQMNSLKPEDTAVYYCAVLRSQYPKLVYWGQGTQVTVSS

SEQ ID NO: 5896 - protein, 122 aa, Artificial Sequence
  Chemically Synthesized
QVQLQESGGGLVQAGGSLRLSCAASGYISYGTIMGWYRQAPGKEREFVAGINPGANTNYADSVKGRFTISRDNAKNTVYLQMNSLKPEDTAVYYCAAAWSVRDVTRRVYVYWGQGTQVTVSS

SEQ ID NO: 5897 - protein, 126 aa, Artificial Sequence
  Chemically Synthesized
QVQLQESGGGLVQAGGSLRLSCAASGYISRAAIMGWYRQAPGKEREFVAGITVGGSTNYADSVKGRFTISRDNAKNTVYLQMNSLKPEDTAVYYCAAGVGAQYTPRGRGYGYLVYWGQGTQVTVSS

SEQ ID NO: 5898 - protein, 121 aa, Artificial Sequence
  Chemically Synthesized
QVQLQESGGGLVQAGGSLRLSCAASGNISGRGVMGWYRQAPGKEREFVAAITIGSTTNYADSVKGRFTISRDNAKNTVYLQMNSLKPEDTAVYYCAVYVGRTTQNYYYAYWGQGTQVTVSS

SEQ ID NO: 5899 - protein, 122 aa, Artificial Sequence
  Chemically Synthesized
QVQLQESGGGLVQAGGSLRLSCAASGNISIGHIMGWYRQAPGKEREFVAGITAGTTTYYADSVKGRFTISRDNAKNTVYLQMNSLKPEDTAVYYCAAAAVDSRVYRVIHAYWGQGTQVTVSS

SEQ ID NO: 5900 - protein, 123 aa, Artificial Sequence
  Chemically Synthesized
QVQLQESGGGLVQAGGSLRLSCAASGTIFNWSIMGWYRQAPGKEREFVAGITYGASTYYADSVKGRFTISRDNAKNTVYLQMNSLKPEDTAVYYCAVGSRRREWDRGALLVYWGQGTQVTVSS

SEQ ID NO: 5901 - protein, 119 aa, Artificial Sequence
  Chemically Synthesized
QVQLQESGGGLVQAGGSLRLSCAASGSISFGYIMGWYRQAPGKEREFVAAIGSGASTNYADSVKGRFTISRDNAKNTVYLQMNSLKPEDTAVYYCAVPYVRRAYVLVYWGQGTQVTVSS

SEQ ID NO: 5902 - protein, 121 aa, Artificial Sequence
  Chemically Synthesized
QVQLQESGGGLVQAGGSLRLSCAASGNIFSYSIMGWYRQAPGKEREFVAGITYGGTTNYADSVKGRFTISRDNAKNTVYLQMNSLKPEDTAVYYCALLTRGDIPKFRYGYWGQGTQVTVSS

SEQ ID NO: 5903 - protein, 122 aa, Artificial Sequence
  Chemically Synthesized
QVQLQESGGGLVQAGGSLRLSCAASGTIFTQRIMGWYRQAPGKERELVAAINAGGTTYYADSVKGRFTISRDNAKNTVYLQMNSLKPEDTAVYYCAVPWRRPYPSQVVLVYWGQGTQVTVSS

SEQ ID NO: 5904 - protein, 119 aa, Artificial Sequence
  Chemically Synthesized
QVQLQESGGGLVQAGGSLRLSCAASGTISYSFIMGWYRQAPGKEREFVAAIGTGGTTNYADSVKGRFTISRDNAKNTVYLQMNSLKPEDTAVYYCAVGYRYRAAIFAYWGQGTQVTVSS

SEQ ID NO: 5905 - protein, 126 aa, Artificial Sequence
  Chemically Synthesized
QVQLQESGGGLVQAGGSLRLSCAASGSISAERVMGWYRQAPGKEREFVAAISYGGTTYYADSVKGRFTISRDNAKNTVYLQMNSLKPEDTAVYYCAVRGKNYARESYGYFPYFYYWGQGTQVTVSS

SEQ ID NO: 5906 - protein, 119 aa, Artificial Sequence
  Chemically Synthesized
QVQLQESGGGLVQAGGSLRLSCAASGSISRSPVMGWYRQAPGKEREFVAAIAYGGTTNYADSVKGRFTISRDNAKNTVYLQMNSLKPEDTAVYYCAVVARFSTYKFIYWGQGTQVTVSS

SEQ ID NO: 5907 - protein, 119 aa, Artificial Sequence
  Chemically Synthesized
QVQLQESGGGLVQAGGSLRLSCAASGTISYRALMGWYRQAPGKEREFVAGIAPGSTTNYADSVKGRFTISRDNAKNTVYLQMNSLKPEDTAVYYCAAAYRDKSYYLVYWGQGTQVTVSS

SEQ ID NO: 5908 - protein, 122 aa, Artificial Sequence
  Chemically Synthesized
QVQLQESGGGLVQAGGSLRLSCAASGNISLPTIMGWYRQAPGKEREFVAGIGRGTSTNYADSVKGRFTISRDNAKNTVYLQMNSLKPEDTAVYYCAAYWRRDRYDKYYLVYWGQGTQVTVSS

SEQ ID NO: 5909 - protein, 122 aa, Artificial Sequence
  Chemically Synthesized
QVQLQESGGGLVQAGGSLRLSCAASGNIFQDVVMGWYRQAPGKEREFVAAISSGGTTYYADSVKGRFTISRDNAKNTVYLQMNSLKPEDTAVYYCAVSPRRYASGYVRLVYWGQGTQVTVSS

SEQ ID NO: 5910 - protein, 119 aa, Artificial Sequence
  Chemically Synthesized
QVQLQESGGGLVQAGGSLRLSCAASGTIFPYRVMGWYRQAPGKEREFVAAITRGATTYYADSVKGRFTISRDNAKNTVYLQMNSLKPEDTAVYYCAVDLRSANGYLVYWGQGTQVTVSS

SEQ ID NO: 5911 - protein, 122 aa, Artificial Sequence
  Chemically Synthesized
QVQLQESGGGLVQAGGSLRLSCAASGYIFTGGVMGWYRQAPGKEREFVAGITSGSTTYYADSVKGRFTISRDNAKNTVYLQMNSLKPEDTAVYYCAVYIVRRRADRYYFVYWGQGTQVTVSS

SEQ ID NO: 5912 - protein, 118 aa, Artificial Sequence
  Chemically Synthesized
QVQLQESGGGLVQAGGSLRLSCAASGTISLPSIMGWYRQAPGKERELVAGITFGGTTYYADSVKGRFTISRDNAKNTVYLQMNSLKPEDTAVYYCAAGYRGPYWLVYWGQGTQVTVSS

SEQ ID NO: 5913 - protein, 118 aa, Artificial Sequence
  Chemically Synthesized
QVQLQESGGGLVQAGGSLRLSCAASGNIFRRSVMGWYRQAPGKEREFVAGIAKGGSTNYADSVKGRFTISRDNAKNTVYLQMNSLKPEDTAVYYCAAYITASHRFVYWGQGTQVTVSS

SEQ ID NO: 5914 - protein, 121 aa, Artificial Sequence
  Chemically Synthesized
QVQLQESGGGLVQAGGSLRLSCAASGSISPRYSMGWYRQAPGKEREFVAGISRGSTYYADSVKGRFTISRDNAKNTVYLQMNSLKPEDTAVYYCAAVRRYGYGGVNLYTYWGQGTQVTVSS

SEQ ID NO: 5915 - protein, 121 aa, Artificial Sequence
  Chemically Synthesized
QVQLQESGGGLVQAGGSLRLSCAASGNIFRHAVMGWYRQAPGKEREFVAGITYGGNTNYADSVKGRFTISRDNAKNTVYLQMNSLKPEDTAVYYCAVLYRYNSGPYYHLYWGQGTQVTVSS

SEQ ID NO: 5916 - protein, 118 aa, Artificial Sequence
  Chemically Synthesized
QVQLQESGGGLVQAGGSLRLSCAASGNISGEPIMGWYRQAPGKEREFVAGINRGGTTYYADSVKGRFTISRDNAKNTVYLQMNSLKPEDTAVYYCAVAYRYRVTLVYWGQGTQVTVSS

SEQ ID NO: 5917 - protein, 122 aa, Artificial Sequence
  Chemically Synthesized
QVQLQESGGGLVQAGGSLRLSCAASGSISRGAVMGWYRQAPGKEREFVAAIDAGAITNYADSVKGRFTISRDNAKNTVYLQMNSLKPEDTAVYYCAAGVRWDGPTSAYLVYWGQGTQVTVSS

SEQ ID NO: 5918 - protein, 122 aa, Artificial Sequence
  Chemically Synthesized
QVQLQESGGGLVQAGGSLRLSCAASGTISPWRVMGWYRQAPGKEREFVAGITPGTTTYYADSVKGRFTISRDNAKNTVYLQMNSLKPEDTAVYYCAVSAGASTPARYRLVYWGQGTQVTVSS

SEQ ID NO: 5919 - protein, 122 aa, Artificial Sequence
  Chemically Synthesized
QVQLQESGGGLVQAGGSLRLSCAASGNISRRYVMGWYRQAPGKEREFVAGISGGSSTYYADSVKGRFTISRDNAKNTVYLQMNSLKPEDTAVYYCAVLISGNTPNAISHYYWGQGTQVTVSS

SEQ ID NO: 5920 - protein, 122 aa, Artificial Sequence
  Chemically Synthesized
QVQLQESGGGLVQAGGSLRLSCAASGSISPVAVMGWYRQAPGKEREFVAAINYGANTYYADSVKGRFTISRDNAKNTVYLQMNSLKPEDTAVYYCAAATYAPYQRSGKLVYWGQGTQVTVSS

SEQ ID NO: 5921 - protein, 122 aa, Artificial Sequence
  Chemically Synthesized
QVQLQESGGGLVQAGGSLRLSCAASGTIFYASVMGWYRQAPGKEREFVAGITPGGSTNYADSVKGRFTISRDNAKNTVYLQMNSLKPEDTAVYYCAVYYRYSEGRIGGHAYWGQGTQVTVSS

SEQ ID NO: 5922 - protein, 122 aa, Artificial Sequence
  Chemically Synthesized
QVQLQESGGGLVQAGGSLRLSCAASGNISDITVMGWYRQAPGKEREFVAGINYGGSTNYADSVKGRFTISRDNAKNTVYLQMNSLKPEDTAVYYCAARYRYRYSAREFHDYWGQGTQVTVSS

SEQ ID NO: 5923 - protein, 118 aa, Artificial Sequence
  Chemically Synthesized
QVQLQESGGGLVQAGGSLRLSCAASGNIFGNVVMGWYRQAPGKEREFVAGINNGGSTNYADSVKGRFTISRDNAKNTVYLQMNSLKPEDTAVYYCAVYYYYLTYHLYWGQGTQVTVSS

SEQ ID NO: 5924 - protein, 126 aa, Artificial Sequence
  Chemically Synthesized
QVQLQESGGGLVQAGGSLRLSCAASGYISFSGLMGWYRQAPGKERELVAGIDHGANTNYADSVKGRFTISRDNAKNTVYLQMNSLKPEDTAVYYCAAQTPQGLLDYVDIAGRHWYWGQGTQVTVSS

SEQ ID NO: 5925 - protein, 122 aa, Artificial Sequence
  Chemically Synthesized
QVQLQESGGGLVQAGGSLRLSCAASGTISFRDGMGWYRQAPGKERELVAAIGYGSTTYYADSVKGRFTISRDNAKNTVYLQMNSLKPEDTAVYYCAVPTRQYWSLRTWFRYWGQGTQVTVSS

SEQ ID NO: 5926 - protein, 122 aa, Artificial Sequence
  Chemically Synthesized
QVQLQESGGGLVQAGGSLRLSCAASGSIFPTYAMGWYRQAPGKERELVAAINSGTNTYYADSVKGRFTISRDNAKNTVYLQMNSLKPEDTAVYYCAVNYVEFTGVTTVHRYWGQGTQVTVSS

SEQ ID NO: 5927 - protein, 122 aa, Artificial Sequence
  Chemically Synthesized
QVQLQESGGGLVQAGGSLRLSCAASGSISRGYGMGWYRQAPGKEREFVAGISYGTSTYYADSVKGRFTISRDNAKNTVYLQMNSLKPEDTAVYYCAVKWNRTGYNRIYHIYWGQGTQVTVSS

SEQ ID NO: 5928 - protein, 122 aa, Artificial Sequence
  Chemically Synthesized
QVQLQESGGGLVQAGGSLRLSCAASGNISSPIAMGWYRQAPGKEREFVAAISPGTNTYYADSVKGRFTISRDNAKNTVYLQMNSLKPEDTAVYYCAVWWRDVDDGYAWHRYWGQGTQVTVSS

SEQ ID NO: 5929 - protein, 118 aa, Artificial Sequence
  Chemically Synthesized
QVQLQESGGGLVQAGGSLRLSCAASGNIFRRNYMGWYRQAPGKEREFVAAISDGSTTYYADSVKGRFTISRDNAKNTVYLQMNSLKPEDTAVYYCAAGRYSWRSLRYWGQGTQVTVSS

SEQ ID NO: 5930 - protein, 118 aa, Artificial Sequence
  Chemically Synthesized
QVQLQESGGGLVQAGGSLRLSCAASGTISKRAVMGWYRQAPGKERELVAAIDSGATTYYADSVKGRFTISRDNAKNTVYLQMNSLKPEDTAVYYCAVRRAYYYHFAYWGQGTQVTVSS

SEQ ID NO: 5931 - protein, 117 aa, Artificial Sequence
  Chemically Synthesized
QVQLQESGGGLVQAGGSLRLSCAASGSISPKFYMGWYRQAPGKERELVATISQVLIPYADSVKGRFTISRDNAKNTVYLQMNSLKPEDTAVYYCAAYASYPYIHGYWGQGTQVTVSS

SEQ ID NO: 5932 - protein, 122 aa, Artificial Sequence
  Chemically Synthesized
QVQLQESGGGLVQAGGSLRLSCAASGSIFDPRVMGWYRQAPGKERELVAAIGRGTSTYYADSVKGRFTISRDNAKNTVYLQMNSLKPEDTAVYYCAVRPFRHSTRRGPHAYWGQGTQVTVSS

SEQ ID NO: 5933 - protein, 110 aa, Artificial Sequence
  Chemically Synthesized
QVQLQESGGGLVQAGGSLRLSCAASGTIFTASSMGWYRQAPGKERELVAKYADSVKGRFTISRDNAKNTVYLQMNSLKPEDTAVYYCAVRDLDIDDYYYWGQGTQVTVSS

SEQ ID NO: 5934 - protein, 117 aa, Artificial Sequence
  Chemically Synthesized
QVQLQESGGGLVQAGGSLRLSCAASGSISARDAMGWYRQAPGKEREFVASIASGTTTNYADSVKGRFTISRDNAKNTVYLQMNSLKPEDTAVYYCAAYDSYSTVIYWGQGTQVTVSS

SEQ ID NO: 5935 - protein, 122 aa, Artificial Sequence
  Chemically Synthesized
QVQLQESGGGLVQAGGSLRLSCAASGSISPYVSMGWYRQAPGKERELVATIGGGANTNYADSVKGRFTISRDNAKNTVYLQMNSLKPEDTAVYYCAAVSNVSARYLYFHLYWGQGTQVTVSS

SEQ ID NO: 5936 - protein, 121 aa, Artificial Sequence
  Chemically Synthesized
QVQLQESGGGLVQAGGSLRLSCAASGTISDVASMGWYRQAPGKEREFVASIDGGGTTNYADSVKGRFTISRDNAKNTVYLQMNSLKPEDTAVYYCAASLLTTCMTKLNLYWGQGTQVTVSS

SEQ ID NO: 5937 - protein, 122 aa, Artificial Sequence
  Chemically Synthesized
QVQLQESGGGLVQAGGSLRLSCAASGYISNYDTMGWYRQAPGKERELVAGIGPGATTNYADSVKGRFTISRDNAKNTVYLQMNSLKPEDTAVYYCAVTPTYTTPSHAYFYYWGQGTQVTVSS

SEQ ID NO: 5938 - protein, 117 aa, Artificial Sequence
  Chemically Synthesized
QVQLQESGGGLVQAGGSLRLSCAASGTIFRVIVMGWYRQAPGKERELVAAISSGQYLYADSVKGRFTISRDNAKNTVYLQMNSLKPEDTAVYYCAVGRYYRYGFRYWGQGTQVTVSS

SEQ ID NO: 5939 - protein, 118 aa, Artificial Sequence
  Chemically Synthesized
QVQLQESGGGLVQAGGSLRLSCAASGYISDEALMGWYRQAPGKERELVASIDGGSSTNYADSVKGRFTISRDNAKNTVYLQMNSLKPEDTAVYYCAVRAGYERWHPYWGQGTQVTVSS

SEQ ID NO: 5940 - protein, 122 aa, Artificial Sequence
  Chemically Synthesized
QVQLQESGGGLVQAGGSLRLSCAASGNISSGTLMGWYRQAPGKERELVAGISYGSITYYADSVKGRFTISRDNAKNTVYLQMNSLKPEDTAVYYCAVTYWYRLYYGRYFYYWGQGTQVTVSS

SEQ ID NO: 5941 - protein, 122 aa, Artificial Sequence
  Chemically Synthesized
QVQLQESGGGLVQAGGSLRLSCAASGSIFEQRPMGWYRQAPGKEREFVAGIAYGSTTNYADSVKGRFTISRDNAKNTVYLQMNSLKPEDTAVYYCAAYLGPYFYWYPRYRYWGQGTQVTVSS

SEQ ID NO: 5942 - protein, 126 aa, Artificial Sequence
  Chemically Synthesized
QVQLQESGGGLVQAGGSLRLSCAASGSISESAGMGWYRQAPGKEREFVAAIADGASTNYADSVKGRFTISRDNAKNTVYLQMNSLKPEDTAVYYCAVWYEEVLGDEYRGYVYHRYWGQGTQVTVSS

SEQ ID NO: 5943 - protein, 118 aa, Artificial Sequence
  Chemically Synthesized
QVQLQESGGGLVQAGGSLRLSCAASGTISRHRRMGWYRQAPGKEREFVAGIAGGGTTYYADSVKGRFTISRDNAKNTVYLQMNSLKPEDTAVYYCAAQRYRPGWLYYWGQGTQVTVSS

SEQ ID NO: 5944 - protein, 118 aa, Artificial Sequence
  Chemically Synthesized
QVQLQESGGGLVQAGGSLRLSCAASGNIFPFRAMGWYRQAPGKEREFVATIGLGGSTNYADSVKGRFTISRDNAKNTVYLQMNSLKPEDTAVYYCAASRYYYRTLGYWGQGTQVTVSS

SEQ ID NO: 5945 - protein, 118 aa, Artificial Sequence
  Chemically Synthesized
QVQLQESGGGLVQAGGSLRLSCAASGSIFRYIYMGWYRQAPGKERELVASITYGASTYYADSVKGRFTISRDNAKNTVYLQMNSLKPEDTAVYYCAARGKWRGKLYYWGQGTQVTVSS

SEQ ID NO: 5946 - protein, 127 aa, Artificial Sequence
  Chemically Synthesized
QVQLQESGGGLVQAGGSLRLSCAASGYISRRGVMGWYRQAPGKEREFVATINRGTNTYYADSVKGRFTISRDNAKNTVYLQMNSLKPEDTAVYYCAVIGVRRWWAIDAHADAAYWYWGQGTQVTVSS

SEQ ID NO: 5947 - protein, 118 aa, Artificial Sequence
  Chemically Synthesized
QVQLQESGGGLVQAGGSLRLSCAASGTISDYGNMGWYRQAPGKEREFVASISVGGTTYYADSVKGRFTISRDNAKNTVYLQMNSLKPEDTAVYYCAVHKNDTYRHPYWGQGTQVTVSS

SEQ ID NO: 5948 - protein, 122 aa, Artificial Sequence
  Chemically Synthesized
QVQLQESGGGLVQAGGSLRLSCAASGNIFTGLYMGWYRQAPGKERELVAAIAYGANTNYADSVKGRFTISRDNAKNTVYLQMNSLKPEDTAVYYCAAFILVVTNFSASHYYWGQGTQVTVSS

SEQ ID NO: 5949 - protein, 126 aa, Artificial Sequence
  Chemically Synthesized
QVQLQESGGGLVQAGGSLRLSCAASGNISYPLAMGWYRQAPGKEREFVAAISGGSNTNYADSVKGRFTISRDNAKNTVYLQMNSLKPEDTAVYYCAAKRPTYFYPAYSRYYYYRYWGQGTQVTVSS

SEQ ID NO: 5950 - protein, 121 aa, Artificial Sequence
  Chemically Synthesized
QVQLQESGGGLVQAGGSLRLSCAASGTISSLTMGWYRQAPGKEREFVAAINTGGSTTNYADSVKGRFTISRDNAKNTVYLQMNSLKPEDTAVYYCAVTRLFVRTVTRTMYWGQGTQVTVSS

SEQ ID NO: 5951 - protein, 122 aa, Artificial Sequence
  Chemically Synthesized
QVQLQESGGGLVQAGGSLRLSCAASGNIFRVITMGWYRQAPGKEREFVATIGYGTNTNYADSVKGRFTISRDNAKNTVYLQMNSLKPEDTAVYYCAASNTRPYGAGIHHVYWGQGTQVTVSS

SEQ ID NO: 5952 - protein, 118 aa, Artificial Sequence
  Chemically Synthesized
QVQLQESGGGLVQAGGSLRLSCAASGTIFAWWAMGWYRQAPGKEREFVASIAWGSNTYYADSVKGRFTISRDNAKNTVYLQMNSLKPEDTAVYYCAATRHGYRYHRYWGQGTQVTVSS

SEQ ID NO: 5953 - protein, 122 aa, Artificial Sequence
  Chemically Synthesized
QVQLQESGGGLVQAGGSLRLSCAASGSISIRYPMGWYRQAPGKERELVATIGRGASTYYADSVKGRFTISRDNAKNTVYLQMNSLKPEDTAVYYCAAPLYHGTYSYDAYDYWGQGTQVTVSS

SEQ ID NO: 5954 - protein, 118 aa, Artificial Sequence
  Chemically Synthesized
QVQLQESGGGLVQAGGSLRLSCAASGNIFRYKNMGWYRQAPGKERELVATISYGTTTYYADSVKGRFTISRDNAKNTVYLQMNSLKPEDTAVYYCAVAHTLTRKFFYWGQGTQVTVSS

SEQ ID NO: 5955 - protein, 122 aa, Artificial Sequence
  Chemically Synthesized
QVQLQESGGGLVQAGGSLRLSCAASGNIFYRRVMGWYRQAPGKERELVATITRGTNTNYADSVKGRFTISRDNAKNTVYLQMNSLKPEDTAVYYCAAHALAIQPFNSWFGYWGQGTQVTVSS

SEQ ID NO: 5956 - protein, 118 aa, Artificial Sequence
  Chemically Synthesized
QVQLQESGGGLVQAGGSLRLSCAASGSISLYTYMGWYRQAPGKERELVAGIARGSITYYADSVKGRFTISRDNAKNTVYLQMNSLKPEDTAVYYCAAVAYRYKRHPYWGQGTQVTVSS

SEQ ID NO: 5957 - protein, 122 aa, Artificial Sequence
  Chemically Synthesized
QVQLQESGGGLVQAGGSLRLSCAASGTISAVTSMGWYRQAPGKERELVATIADGGSTYYADSVKGRFTISRDNAKNTVYLQMNSLKPEDTAVYYCAVYYVPDLARAYGYRYWGQGTQVTVSS

SEQ ID NO: 5958 - protein, 115 aa, Artificial Sequence
  Chemically Synthesized
QVQLQESGGGLVQAGGSLRLSCAASGTIFRVRYMGWYRQAPGKERELVATIAPGSITYYADSVKGRFTISRDNAKNTVYLQMNSLKPEDTAVYYCAALRYGYQYWGQGTQVTVSS

SEQ ID NO: 5959 - protein, 118 aa, Artificial Sequence
  Chemically Synthesized
QVQLQESGGGLVQAGGSLRLSCAASGTIFFLVSMGWYRQAPGKERELVATITRGGNTNYADSVKGRFTISRDNAKNTVYLQMNSLKPEDTAVYYCAAYVPWSRKHSYWGQGTQVTVSS

SEQ ID NO: 5960 - protein, 117 aa, Artificial Sequence
  Chemically Synthesized
QVQLQESGGGLVQAGGSLRLSCAASGSISTSRMGWYRQAPGKEREFVAGIAGGGNTNYADSVKGRFTISRDNAKNTVYLQMNSLKPEDTAVYYCAADWNSDHPYDYWGQGTQVTVSS

SEQ ID NO: 5961 - protein, 122 aa, Artificial Sequence
  Chemically Synthesized
QVQLQESGGGLVQAGGSLRLSCAASGSIFTRRYMGWYRQAPGKEREFVAGISRGGNTYYADSVKGRFTISRDNAKNTVYLQMNSLKPEDTAVYYCAVRLARAGDVYAGHRYWGQGTQVTVSS

SEQ ID NO: 5962 - protein, 122 aa, Artificial Sequence
  Chemically Synthesized
QVQLQESGGGLVQAGGSLRLSCAASGYISASGGMGWYRQAPGKERELVAAIARGSTTNYADSVKGRFTISRDNAKNTVYLQMNSLKPEDTAVYYCAVGWGWWKLQRSIHLYWGQGTQVTVSS

SEQ ID NO: 5963 - protein, 118 aa, Artificial Sequence
  Chemically Synthesized
QVQLQESGGGLVQAGGSLRLSCAASGTIFFTRWMGWYRQAPGKEREFVASIGGGSSTYYADSVKGRFTISRDNAKNTVYLQMNSLKPEDTAVYYCAVGSRFVSRHVYWGQGTQVTVSS

SEQ ID NO: 5964 - protein, 118 aa, Artificial Sequence
  Chemically Synthesized
QVQLQESGGGLVQAGGSLRLSCAASGSIFVAYVMGWYRQAPGKERELVASIARGGITYYADSVKGRFTISRDNAKNTVYLQMNSLKPEDTAVYYCAVRLIANRYHYYWGQGTQVTVSS

SEQ ID NO: 5965 - protein, 118 aa, Artificial Sequence
  Chemically Synthesized
QVQLQESGGGLVQAGGSLRLSCAASGTISQKFIMGWYRQAPGKERELVAAISRGGNTYYADSVKGRFTISRDNAKNTVYLQMNSLKPEDTAVYYCAVYHYYKRYFNYWGQGTQVTVSS

SEQ ID NO: 5966 - protein, 122 aa, Artificial Sequence
  Chemically Synthesized
QVQLQESGGGLVQAGGSLRLSCAASGNISRRYYMGWYRQAPGKERELVAAINTGGITYYADSVKGRFTISRDNAKNTVYLQMNSLKPEDTAVYYCAVRYAYYSGRSHQYGYWGQGTQVTVSS

SEQ ID NO: 5967 - protein, 118 aa, Artificial Sequence
  Chemically Synthesized
QVQLQESGGGLVQAGGSLRLSCAASGSIFRYRPMGWYRQAPGKERELVASITYGTTTNYADSVKGRFTISRDNAKNTVYLQMNSLKPEDTAVYYCAAFRWHYVGYAYWGQGTQVTVSS

SEQ ID NO: 5968 - protein, 117 aa, Artificial Sequence
  Chemically Synthesized
QVQLQESGGGLVQAGGSLRLSCAASGNISDYSMGWYRQAPGKEREFVAAIAYGANTNYADSVKGRFTISRDNAKNTVYLQMNSLKPEDTAVYYCAADNTDYDSHWYWGQGTQVTVSS

SEQ ID NO: 5969 - protein, 118 aa, Artificial Sequence
  Chemically Synthesized
QVQLQESGGGLVQAGGSLRLSCAASGSISRYKFMGWYRQAPGKEREFVASIGNGSSTNYADSVKGRFTISRDNAKNTVYLQMNSLKPEDTAVYYCAVVRWSVFQHVYWGQGTQVTVSS

SEQ ID NO: 5970 - protein, 118 aa, Artificial Sequence
  Chemically Synthesized
QVQLQESGGGLVQAGGSLRLSCAASGTISGYEIMGWYRQAPGKERELVAAIGYGGTTYYADSVKGRFTISRDNAKNTVYLQMNSLKPEDTAVYYCAAVINNRHAFIYWGQGTQVTVSS

SEQ ID NO: 5971 - protein, 118 aa, Artificial Sequence
  Chemically Synthesized
QVQLQESGGGLVQAGGSLRLSCAASGTISYHVVMGWYRQAPGKEREFVASIAVGAITYYADSVKGRFTISRDNAKNTVYLQMNSLKPEDTAVYYCAVFNIVPLTLSYWGQGTQVTVSS

SEQ ID NO: 5972 - protein, 118 aa, Artificial Sequence
  Chemically Synthesized
QVQLQESGGGLVQAGGSLRLSCAASGYIFRVQGMGWYRQAPGKEREFVAAIGGGGITNYADSVKGRFTISRDNAKNTVYLQMNSLKPEDTAVYYCAVRYGWVWFHEYWGQGTQVTVSS

SEQ ID NO: 5973 - protein, 126 aa, Artificial Sequence
  Chemically Synthesized
QVQLQESGGGLVQAGGSLRLSCAASGNIFLFGGMGWYRQAPGKERELVAGIASGSITYYADSVKGRFTISRDNAKNTVYLQMNSLKPEDTAVYYCAAIRPYNFADARRGAGPFYYWGQGTQVTVSS

SEQ ID NO: 5974 - protein, 118 aa, Artificial Sequence
  Chemically Synthesized
QVQLQESGGGLVQAGGSLRLSCAASGTISAATYMGWYRQAPGKEREFVAGISEGGTTYYADSVKGRFTISRDNAKNTVYLQMNSLKPEDTAVYYCAVAYGWNVRYRYWGQGTQVTVSS

SEQ ID NO: 5975 - protein, 122 aa, Artificial Sequence
  Chemically Synthesized
QVQLQESGGGLVQAGGSLRLSCAASGYISGNNSMGWYRQAPGKEREFVAAINDGATTYYADSVKGRFTISRDNAKNTVYLQMNSLKPEDTAVYYCAVGYAYGRVANSDHFYWGQGTQVTVSS

SEQ ID NO: 5976 - protein, 118 aa, Artificial Sequence
  Chemically Synthesized
QVQLQESGGGLVQAGGSLRLSCAASGTISYRYAMGWYRQAPGKEREFVAAIAGGATTYYADSVKGRFTISRDNAKNTVYLQMNSLKPEDTAVYYCAVRSRRRSLHYYWGQGTQVTVSS

SEQ ID NO: 5977 - protein, 122 aa, Artificial Sequence
  Chemically Synthesized
QVQLQESGGGLVQAGGSLRLSCAASGTIFVHLAMGWYRQAPGKERELVASISYGSTTYYADSVKGRFTISRDNAKNTVYLQMNSLKPEDTAVYYCAASRRYSWLYKGWHPYWGQGTQVTVSS

SEQ ID NO: 5978 - protein, 118 aa, Artificial Sequence
  Chemically Synthesized
QVQLQESGGGLVQAGGSLRLSCAASGTISQQPSMGWYRQAPGKEREFVASISQGSSTNYADSVKGRFTISRDNAKNTVYLQMNSLKPEDTAVYYCAVNDGDSARHPYWGQGTQVTVSS

SEQ ID NO: 5979 - protein, 126 aa, Artificial Sequence
  Chemically Synthesized
QVQLQESGGGLVQAGGSLRLSCAASGSIFATRIMGWYRQAPGKEREFVATIDLGSSTNYADSVKGRFTISRDNAKNTVYLQMNSLKPEDTAVYYCAAGGAYLYHYQGDYYVLYDYWGQGTQVTVSS

SEQ ID NO: 5980 - protein, 120 aa, Artificial Sequence
  Chemically Synthesized
QVQLQESGGGLVQAGGSLRLSCAASGTIFGAPPMGWYRQAPGKERELVAGITDGANTYYADSVKGRFTISRDNAKNTVYLQMNSLKPEDTAVYYCAVLTNYADYWASIYWGQGTQVTVSS

SEQ ID NO: 5981 - protein, 118 aa, Artificial Sequence
  Chemically Synthesized
QVQLQESGGGLVQAGGSLRLSCAASGNISIRYIMGWYRQAPGKEREFVAAIGRGSNTYYADSVKGRFTISRDNAKNTVYLQMNSLKPEDTAVYYCAVERRAWYAHVYWGQGTQVTVSS

SEQ ID NO: 5982 - protein, 122 aa, Artificial Sequence
  Chemically Synthesized
QVQLQESGGGLVQAGGSLRLSCAASGTISRAFYMGWYRQAPGKERELVAAISLGASTNYADSVKGRFTISRDNAKNTVYLQMNSLKPEDTAVYYCAAKRRPHWGYRAYHYYWGQGTQVTVSS

SEQ ID NO: 5983 - protein, 116 aa, Artificial Sequence
  Chemically Synthesized
QVQLQESGGGLVQAGGSLRLSCAASGTISLLGYMGWYRQAPGKERELVASISDGSSTNYADSVKGRFTISRDNAKNTVYLQMNSLKPEDTAVYYCAAGPSQRYYYWGQGTQVTVSS

SEQ ID NO: 5984 - protein, 114 aa, Artificial Sequence
  Chemically Synthesized
QVQLQESGGGLVQAGGSLRLSCAASGTIFFLLSMGWYRQAPGKERELVATIAFGTITNYADSVKGRFTISRDNAKNTVYLQMNSLKPEDTAVYYCAAYLWHYYWGQGTQVTVSS

SEQ ID NO: 5985 - protein, 118 aa, Artificial Sequence
  Chemically Synthesized
QVQLQESGGGLVQAGGSLRLSCAASGSIFGYATMGWYRQAPGKERELVAAISRGATTNYADSVKGRFTISRDNAKNTVYLQMNSLKPEDTAVYYCAVRTAVYRRLDYWGQGTQVTVSS

SEQ ID NO: 5986 - protein, 109 aa, Artificial Sequence
  Chemically Synthesized
QVQLQESGGGLVQAGGSLRLSCAASGYIFYTDYMGWYRQAPGKERELDLYADSVKGRFTISRDNAKNTVYLQMNSLKPEDTAVYYCAARYWYYIPHPYWGQGTQVTVSS

SEQ ID NO: 5987 - protein, 118 aa, Artificial Sequence
  Chemically Synthesized
QVQLQESGGGLVQAGGSLRLSCAASGTISSPPKMGWYRQAPGKERELVATIGRGSITNYADSVKGRFTISRDNAKNTVYLQMNSLKPEDTAVYYCAARSSYVLTHRYWGQGTQVTVSS

SEQ ID NO: 5988 - protein, 118 aa, Artificial Sequence
  Chemically Synthesized
QVQLQESGGGLVQAGGSLRLSCAASGSISPQFTMGWYRQAPGKEREFVATISYGGTTYYADSVKGRFTISRDNAKNTVYLQMNSLKPEDTAVYYCAAWYTQYDDLGYWGQGTQVTVSS

SEQ ID NO: 5989 - protein, 118 aa, Artificial Sequence
  Chemically Synthesized
QVQLQESGGGLVQAGGSLRLSCAASGYIFRYTYMGWYRQAPGKERELVATIGRGANTYYADSVKGRFTISRDNAKNTVYLQMNSLKPEDTAVYYCAAVSRWNPSHPYWGQGTQVTVSS

SEQ ID NO: 5990 - protein, 121 aa, Artificial Sequence
  Chemically Synthesized
QVQLQESGGGLVQAGGSLRLSCAASGSISRLYSMGWYRQAPGKERELVALYAGGITYYADSVKGRFTISRDNAKNTVYLQMNSLKPEDTAVYYCAVIDWYIRVDRYHHPYWGQGTQVTVSS

SEQ ID NO: 5991 - protein, 117 aa, Artificial Sequence
  Chemically Synthesized
QVQLQESGGGLVQAGGSLRLSCAASGNIFSYGGMGWYRQAPGKERELVATITYGSSTNYADSVKGRFTISRDNAKNTVYLQMNSLKPEDTAVYYCAVRRYWARYPYWGQGTQVTVSS

SEQ ID NO: 5992 - protein, 119 aa, Artificial Sequence
  Chemically Synthesized
QVQLQESGGGLVQAGGSLRLSCAASGSISGAAAMGWYRQAPGKERELVAGIGEGGITYYADSVKGRFTISRDNAKNTVYLQMNSLKPEDTAVYYCAAAWYDDLTVHRYWGQGTQVTVSS

SEQ ID NO: 5993 - protein, 118 aa, Artificial Sequence
  Chemically Synthesized
QVQLQESGGGLVQAGGSLRLSCAASGTISSYSTMGWYRQAPGKEREFVAGIGIGGNTNYADSVKGRFTISRDNAKNTVYLQMNSLKPEDTAVYYCAAGHPHPYPLVYWGQGTQVTVSS

SEQ ID NO: 5994 - protein, 118 aa, Artificial Sequence
  Chemically Synthesized
QVQLQESGGGLVQAGGSLRLSCAASGTIFTLRYMGWYRQAPGKERELVAAIGRGGTTYYADSVKGRFTISRDNAKNTVYLQMNSLKPEDTAVYYCAARNLYRPYFGYWGQGTQVTVSS

SEQ ID NO: 5995 - protein, 118 aa, Artificial Sequence
  Chemically Synthesized
QVQLQESGGGLVQAGGSLRLSCAASGYIFRYNYMGWYRQAPGKERELVATITVGSITNYADSVKGRFTISRDNAKNTVYLQMNSLKPEDTAVYYCAVLRRYRHTYRYWGQGTQVTVSS

SEQ ID NO: 5996 - protein, 118 aa, Artificial Sequence
  Chemically Synthesized
QVQLQESGGGLVQAGGSLRLSCAASGYISRIAHMGWYRQAPGKERELVATIARGTITYYADSVKGRFTISRDNAKNTVYLQMNSLKPEDTAVYYCAAFAYWYRAHRYWGQGTQVTVSS

SEQ ID NO: 5997 - protein, 118 aa, Artificial Sequence
  Chemically Synthesized
QVQLQESGGGLVQAGGSLRLSCAASGYISSYFLMGWYRQAPGKERELVAAITRGGNTYYADSVKGRFTISRDNAKNTVYLQMNSLKPEDTAVYYCAVRRSRHGRHPYWGQGTQVTVSS

SEQ ID NO: 5998 - protein, 122 aa, Artificial Sequence
  Chemically Synthesized
QVQLQESGGGLVQAGGSLRLSCAASGNISQTAYMGWYRQAPGKEREFVAAITYGGNTYYADSVKGRFTISRDNAKNTVYLQMNSLKPEDTAVYYCAAQVRYYPWGRRYHYYWGQGTQVTVSS

SEQ ID NO: 5999 - protein, 122 aa, Artificial Sequence
  Chemically Synthesized
QVQLQESGGGLVQAGGSLRLSCAASGNIFYPWWMGWYRQAPGKEREFVASIGRGTNTNYADSVKGRFTISRDNAKNTVYLQMNSLKPEDTAVYYCAAAGYWRGRVFPAHIYWGQGTQVTVSS

SEQ ID NO: 6000 - protein, 126 aa, Artificial Sequence
  Chemically Synthesized
QVQLQESGGGLVQAGGSLRLSCAASGTIFTSQKMGWYRQAPGKERELVAAIALGTNTYYADSVKGRFTISRDNAKNTVYLQMNSLKPEDTAVYYCAALADFYSYVEIYDIWGFYYWGQGTQVTVSS

SEQ ID NO: 6001 - protein, 122 aa, Artificial Sequence
  Chemically Synthesized
QVQLQESGGGLVQAGGSLRLSCAASGNISPSRGMGWYRQAPGKERELVATINRGGNTYYADSVKGRFTISRDNAKNTVYLQMNSLKPEDTAVYYCAVYDYYYHAYYKYHSYWGQGTQVTVSS

SEQ ID NO: 6002 - protein, 122 aa, Artificial Sequence
  Chemically Synthesized
QVQLQESGGGLVQAGGSLRLSCAASGYISNVPRMGWYRQAPGKERELVATIAGGGTTYYADSVKGRFTISRDNAKNTVYLQMNSLKPEDTAVYYCAVTVEVKTTRDPRYDYWGQGTQVTVSS

SEQ ID NO: 6003 - protein, 126 aa, Artificial Sequence
  Chemically Synthesized
QVQLQESGGGLVQAGGSLRLSCAASGYISRRGRMGWYRQAPGKEREFVATIGYGASTYYADSVKGRFTISRDNAKNTVYLQMNSLKPEDTAVYYCAAYVVPYYYYTNHGRKQYTYWGQGTQVTVSS

SEQ ID NO: 6004 - protein, 118 aa, Artificial Sequence
  Chemically Synthesized
QVQLQESGGGLVQAGGSLRLSCAASGTISGLDSMGWYRQAPGKEREFVAGIGLGTNTNYADSVKGRFTISRDNAKNTVYLQMNSLKPEDTAVYYCAADYYVVSPHRYWGQGTQVTVSS

SEQ ID NO: 6005 - protein, 122 aa, Artificial Sequence
  Chemically Synthesized
QVQLQESGGGLVQAGGSLRLSCAASGSISRNYHMGWYRQAPGKERELVAGITRGASTNYADSVKGRFTISRDNAKNTVYLQMNSLKPEDTAVYYCAVLWTALSRYRTLYRYWGQGTQVTVSS

SEQ ID NO: 6006 - protein, 118 aa, Artificial Sequence
  Chemically Synthesized
QVQLQESGGGLVQAGGSLRLSCAASGNISRRAYMGWYRQAPGKERELVAGIDRGTSTYYADSVKGRFTISRDNAKNTVYLQMNSLKPEDTAVYYCAVGGAVRYYFRYWGQGTQVTVSS

SEQ ID NO: 6007 - protein, 126 aa, Artificial Sequence
  Chemically Synthesized
QVQLQESGGGLVQAGGSLRLSCAASGTIFYSHYMGWYRQAPGKERELVASIDWGGNTYYADSVKGRFTISRDNAKNTVYLQMNSLKPEDTAVYYCAASGPDEPFNTSWDTGSYRYWGQGTQVTVSS

SEQ ID NO: 6008 - protein, 126 aa, Artificial Sequence
  Chemically Synthesized
QVQLQESGGGLVQAGGSLRLSCAASGYISGGYSMGWYRQAPGKERELVATIDDGGTTYYADSVKGRFTISRDNAKNTVYLQMNSLKPEDTAVYYCAAYPLWVRDEADGVYARYYYWGQGTQVTVSS

SEQ ID NO: 6009 - protein, 122 aa, Artificial Sequence
  Chemically Synthesized
QVQLQESGGGLVQAGGSLRLSCAASGSIFAIHQMGWYRQAPGKEREFVAGINRGANTYYADSVKGRFTISRDNAKNTVYLQMNSLKPEDTAVYYCAVVWGVAWGRGRRHEYWGQGTQVTVSS

SEQ ID NO: 6010 - protein, 119 aa, Artificial Sequence
  Chemically Synthesized
QVQLQESGGGLVQAGGSLRLSCAASGYIFASRAYMGWYRQAPGKERELVAAIGRGTSTNYADSVKGRFTISRDNAKNTVYLQMNSLKPEDTAVYYCAVGWWWRGNYRYWGQGTQVTVSS

SEQ ID NO: 6011 - protein, 125 aa, Artificial Sequence
  Chemically Synthesized
QVQLQESGGGLVQAGGSLRLSCAASGSIFTYSMGWYRQAPGKEREFVASITRGGNTYYADSVKGRFTISRDNAKNTVYLQMNSLKPEDTAVYYCAAWRRRDQYYSRPGKTKHVYWGQGTQVTVSS

SEQ ID NO: 6012 - protein, 122 aa, Artificial Sequence
  Chemically Synthesized
QVQLQESGGGLVQAGGSLRLSCAASGNISYVAYMGWYRQAPGKEREFVATIAYGTNTNYADSVKGRFTISRDNAKNTVYLQMNSLKPEDTAVYYCAVYILYEGITSTDHVYWGQGTQVTVSS

SEQ ID NO: 6013 - protein, 118 aa, Artificial Sequence
  Chemically Synthesized
QVQLQESGGGLVQAGGSLRLSCAASGTIFWYGVMGWYRQAPGKEREFVAAITSGSITYYADSVKGRFTISRDNAKNTVYLQMNSLKPEDTAVYYCAVTRGRYRYHAYWGQGTQVTVSS

SEQ ID NO: 6014 - protein, 125 aa, Artificial Sequence
  Chemically Synthesized
QVQLQESGGGLVQAGGSLRLSCAASGNISKYYDMGWYRQAPGKERELVATIGTGTSTNYADSVKGRFTISRDNAKNTVYLQMNSLKPEDTAVYYCAAWGRYTLLTLDSRRRLSYWGQGTQVTVSS

SEQ ID NO: 6015 - protein, 122 aa, Artificial Sequence
  Chemically Synthesized
QVQLQESGGGLVQAGGSLRLSCAASGNIFWVPYMGWYRQAPGKERELVATITWGGTTNYADSVKGRFTISRDNAKNTVYLQMNSLKPEDTAVYYCAVRRGRDAFRPVLYSYWGQGTQVTVSS

SEQ ID NO: 6016 - protein, 122 aa, Artificial Sequence
  Chemically Synthesized
QVQLQESGGGLVQAGGSLRLSCAASGTIFRISYMGWYRQAPGKEREFVAAITRGGNTYYADSVKGRFTISRDNAKNTVYLQMNSLKPEDTAVYYCAAQKRVTRWNDGGFGYWGQGTQVTVSS

SEQ ID NO: 6017 - protein, 118 aa, Artificial Sequence
  Chemically Synthesized
QVQLQESGGGLVQAGGSLRLSCAASGSIFWHSWMGWYRQAPGKERELVAGISAGGSTYYADSVKGRFTISRDNAKNTVYLQMNSLKPEDTAVYYCAATDESGSSHTYWGQGTQVTVSS

SEQ ID NO: 6018 - protein, 122 aa, Artificial Sequence
  Chemically Synthesized
QVQLQESGGGLVQAGGSLRLSCAASGNISYQRYMGWYRQAPGKEREFVAAIAAGGITYYADSVKGRFTISRDNAKNTVYLQMNSLKPEDTAVYYCAAEYTPRYWSYRRHYYWGQGTQVTVSS

SEQ ID NO: 6019 - protein, 118 aa, Artificial Sequence
  Chemically Synthesized
QVQLQESGGGLVQAGGSLRLSCAASGSIFIRPAMGWYRQAPGKEREFVAAITNGGNTNYADSVKGRFTISRDNAKNTVYLQMNSLKPEDTAVYYCAARYVYRLRHIYWGQGTQVTVSS

SEQ ID NO: 6020 - protein, 118 aa, Artificial Sequence
  Chemically Synthesized
QVQLQESGGGLVQAGGSLRLSCAASGYIFSPGFMGWYRQAPGKEREFVATIAYGATTYYADSVKGRFTISRDNAKNTVYLQMNSLKPEDTAVYYCAVARRIWQRFAYWGQGTQVTVSS

SEQ ID NO: 6021 - protein, 118 aa, Artificial Sequence
  Chemically Synthesized
QVQLQESGGGLVQAGGSLRLSCAASGSISWVIKMGWYRQAPGKERELVAAINFGTITYYADSVKGRFTISRDNAKNTVYLQMNSLKPEDTAVYYCAVRANAFTAHYYWGQGTQVTVSS

SEQ ID NO: 6022 - protein, 122 aa, Artificial Sequence
  Chemically Synthesized
QVQLQESGGGLVQAGGSLRLSCAASGNISVKYGMGWYRQAPGKEREFVAGIDSGTSTYYADSVKGRFTISRDNAKNTVYLQMNSLKPEDTAVYYCAAYVALSPLHDVWHYYWGQGTQVTVSS

SEQ ID NO: 6023 - protein, 126 aa, Artificial Sequence
  Chemically Synthesized
QVQLQESGGGLVQAGGSLRLSCAASGSISKSYRMGWYRQAPGKERELVASISVGTNTYYADSVKGRFTISRDNAKNTVYLQMNSLKPEDTAVYYCATRVNRQSWIPADYRRYYTYWGQGTQVTVSS

SEQ ID NO: 6024 - protein, 115 aa, Artificial Sequence
  Chemically Synthesized
QVQLQESGGGLVQAGGSLRLSCAASGYIFAMGWYRQAPGKEREFVAGIAYGSITNYADSVKGRFTISRDNAKNTVYLQMNSLKPEDTAVYYCAARRYNRYAHVYWGQGTQVTVSS

SEQ ID NO: 6025 - protein, 122 aa, Artificial Sequence
  Chemically Synthesized
QVQLQESGGGLVQAGGSLRLSCAASGYISRSYTMGWYRQAPGKEREFVASIGRGSTTNYADSVKGRFTISRDNAKNTVYLQMNSLKPEDTAVYYCAVASIRKAWSYRAHLYWGQGTQVTVSS

SEQ ID NO: 6026 - protein, 122 aa, Artificial Sequence
  Chemically Synthesized
QVQLQESGGGLVQAGGSLRLSCAASGYIFSYVPMGWYRQAPGKEREFVATIGGGGTTYYADSVKGRFTISRDNAKNTVYLQMNSLKPEDTAVYYCAVKRRYWRGYYPQFGYWGQGTQVTVSS

SEQ ID NO: 6027 - protein, 125 aa, Artificial Sequence
  Chemically Synthesized
QVQLQESGGGLVQAGGSLRLSCAASGSISRVYAMGWYRQAPGKERELVAGITFGGITNYADSVKGRFTISRDNAKNTVYLQMNSLKPEDTAVYYCAAYYYSQSFCTTTTLTLIYWGQGTQVTVSS

SEQ ID NO: 6028 - protein, 126 aa, Artificial Sequence
  Chemically Synthesized
QVQLQESGGGLVQAGGSLRLSCAASGTISSYVYMGWYRQAPGKERELVATINDGGTTYYADSVKGRFTISRDNAKNTVYLQMNSLKPEDTAVYYCAVGYYWYILYIYQYEDRYLYWGQGTQVTVSS

SEQ ID NO: 6029 - protein, 118 aa, Artificial Sequence
  Chemically Synthesized
QVQLQESGGGLVQAGGSLRLSCAASGYISLRPYMGWYRQAPGKEREFVAGIARGATTNYADSVKGRFTISRDNAKNTVYLQMNSLKPEDTAVYYCAVYKAYRYYHVYWGQGTQVTVSS

SEQ ID NO: 6030 - protein, 122 aa, Artificial Sequence
  Chemically Synthesized
QVQLQESGGGLVQAGGSLRLSCAASGSIFDLLYMGWYRQAPGKERELVAAIGDGATTNYADSVKGRFTISRDNAKNTVYLQMNSLKPEDTAVYYCAVGRALQYYGPPYHYYWGQGTQVTVSS

SEQ ID NO: 6031 - protein, 122 aa, Artificial Sequence
  Chemically Synthesized
QVQLQESGGGLVQAGGSLRLSCAASGTISSETYMGWYRQAPGKEREFVAGITAGTTTYYADSVKGRFTISRDNAKNTVYLQMNSLKPEDTAVYYCAARYQAIHWWGRAYLYWGQGTQVTVSS

SEQ ID NO: 6032 - protein, 126 aa, Artificial Sequence
  Chemically Synthesized
QVQLQESGGGLVQAGGSLRLSCAASGYISWGWDMGWYRQAPGKERELVATIGKGASTNYADSVKGRFTISRDNAKNTVYLQMNSLKPEDTAVYYCAVTGNYLIWWRPFERYRLGYWGQGTQVTVSS

SEQ ID NO: 6033 - protein, 116 aa, Artificial Sequence
  Chemically Synthesized
QVQLQESGGGLVQAGGSLRLSCAASGNIFQTYSMGWYRQAPGKEREFVAGIAPGTTYADSVKGRFTISRDNAKNTVYLQMNSLKPEDTAVYYCAAGDPVRYVYAYWGQGTQVTVSS

SEQ ID NO: 6034 - protein, 126 aa, Artificial Sequence
  Chemically Synthesized
QVQLQESGGGLVQAGGSLRLSCAASGTIFLYVPMGWYRQAPGKEREFVATIAGGSTTYYADSVKGRFTISRDNAKNTVYLQMNSLKPEDTAVYYCAVAPEYAGILTSLGGYFHPYWGQGTQVTVSS

SEQ ID NO: 6035 - protein, 118 aa, Artificial Sequence
  Chemically Synthesized
QVQLQESGGGLVQAGGSLRLSCAASGNIFAAYSMGWYRQAPGKEREFVAGIDYGANTYYADSVKGRFTISRDNAKNTVYLQMNSLKPEDTAVYYCAVNYFAYTRHYYWGQGTQVTVSS

SEQ ID NO: 6036 - protein, 121 aa, Artificial Sequence
  Chemically Synthesized
QVQLQESGGGLVQAGGSLRLSCAASGNISGDGMGWYRQAPGKEREFVAAINTGANTNYADSVKGRFTISRDNAKNTVYLQMNSLKPEDTAVYYCAADRRNAYYYITLASYWGQGTQVTVSS

SEQ ID NO: 6037 - protein, 117 aa, Artificial Sequence
  Chemically Synthesized
QVQLQESGGGLVQAGGSLRLSCAASGSIFDPGQMGWYRQAPGKEREFVAGINGGGLPYADSVKGRFTISRDNAKNTVYLQMNSLKPEDTAVYYCAAGYPVVGLFSYWGQGTQVTVSS

SEQ ID NO: 6038 - protein, 118 aa, Artificial Sequence
  Chemically Synthesized
QVQLQESGGGLVQAGGSLRLSCAASGTIFRPKDMGWYRQAPGKEREFVASISYGATTYYADSVKGRFTISRDNAKNTVYLQMNSLKPEDTAVYYCAAKQYRYYSHVYWGQGTQVTVSS

SEQ ID NO: 6039 - protein, 118 aa, Artificial Sequence
  Chemically Synthesized
QVQLQESGGGLVQAGGSLRLSCAASGYISYPRYMGWYRQAPGKEREFVASIGRGGNTYYADSVKGRFTISRDNAKNTVYLQMNSLKPEDTAVYYCAVKYVAFWRLFYWGQGTQVTVSS

SEQ ID NO: 6040 - protein, 122 aa, Artificial Sequence
  Chemically Synthesized
QVQLQESGGGLVQAGGSLRLSCAASGNISFVGRMGWYRQAPGKEREFVAGINIGGITYYADSVKGRFTISRDNAKNTVYLQMNSLKPEDTAVYYCAVIYIETFWGTRYHDYWGQGTQVTVSS

SEQ ID NO: 6041 - protein, 118 aa, Artificial Sequence
  Chemically Synthesized
QVQLQESGGGLVQAGGSLRLSCAASGYIFRPFKMGWYRQAPGKEREFVATISWGTTTNYADSVKGRFTISRDNAKNTVYLQMNSLKPEDTAVYYCAAQFKRWRWYTYWGQGTQVTVSS

SEQ ID NO: 6042 - protein, 117 aa, Artificial Sequence
  Chemically Synthesized
QVQLQESGGGLVQAGGSLRLSCAASGTISQTPGMGWYRQAPGKERELVAGISGGGITYYADSVKGRFTISRDNAKNTVYLQMNSLKPEDTAVYYCAVSTLTLVFMYWGQGTQVTVSS

SEQ ID NO: 6043 - protein, 126 aa, Artificial Sequence
  Chemically Synthesized
QVQLQESGGGLVQAGGSLRLSCAASGNISNNPEMGWYRQAPGKEREFVASISLGATTNYADSVKGRFTISRDNAKNTVYLQMNSLKPEDTAVYYCAAGLRRWYSPIFQGNRRLSYWGQGTQVTVSS

SEQ ID NO: 6044 - protein, 126 aa, Artificial Sequence
  Chemically Synthesized
QVQLQESGGGLVQAGGSLRLSCAASGYIFPSREMGWYRQAPGKERELVATINRGASTNYADSVKGRFTISRDNAKNTVYLQMNSLKPEDTAVYYCAVWVRRYSGWLYKDRYNFGYWGQGTQVTVSS

SEQ ID NO: 6045 - protein, 118 aa, Artificial Sequence
  Chemically Synthesized
QVQLQESGGGLVQAGGSLRLSCAASGYISDYRGMGWYRQAPGKEREFVAGISDGTNTNYADSVKGRFTISRDNAKNTVYLQMNSLKPEDTAVYYCALLGTKVLTTMYWGQGTQVTVSS

SEQ ID NO: 6046 - protein, 122 aa, Artificial Sequence
  Chemically Synthesized
QVQLQESGGGLVQAGGSLRLSCAASGSIFTQAPMGWYRQAPGKEREFVAGIAYGTSTNYADSVKGRFTISRDNAKNTVYLQMNSLKPEDTAVYYCAVTYDYSPYVANGHSYWGQGTQVTVSS

SEQ ID NO: 6047 - protein, 118 aa, Artificial Sequence
  Chemically Synthesized
QVQLQESGGGLVQAGGSLRLSCAASGYISNVNFMGWYRQAPGKERELVAGITYGSNTYYADSVKGRFTISRDNAKNTVYLQMNSLKPEDTAVYYCAVYKYKGLRHKYWGQGTQVTVSS

SEQ ID NO: 6048 - protein, 118 aa, Artificial Sequence
  Chemically Synthesized
QVQLQESGGGLVQAGGSLRLSCAASGNISHYTVMGWYRQAPGKERELVASIAYGASTYYADSVKGRFTISRDNAKNTVYLQMNSLKPEDTAVYYCAAYGDTVRGHVYWGQGTQVTVSS

SEQ ID NO: 6049 - protein, 118 aa, Artificial Sequence
  Chemically Synthesized
QVQLQESGGGLVQAGGSLRLSCAASGTISTFLTMGWYRQAPGKEREFVAAIDYGTKYQYADSVKGRFTISRDNAKNTVYLQMNSLKPEDTAVYYCAASSAHQDPFDYWGQGTQVTVSS

SEQ ID NO: 6050 - protein, 118 aa, Artificial Sequence
  Chemically Synthesized
QVQLQESGGGLVQAGGSLRLSCAASGTISWTRDMGWYRQAPGKEREFVASIGTGGNTNYADSVKGRFTISRDNAKNTVYLQMNSLKPEDTAVYYCAVPYSILYKFVYWGQGTQVTVSS

SEQ ID NO: 6051 - protein, 126 aa, Artificial Sequence
  Chemically Synthesized
QVQLQESGGGLVQAGGSLRLSCAASGNISYRYYMGWYRQAPGKEREFVAGINRGTSTNYADSVKGRFTISRDNAKNTVYLQMNSLKPEDTAVYYCAVITWRRPKGSDIYYQRHDYWGQGTQVTVSS

SEQ ID NO: 6052 - protein, 126 aa, Artificial Sequence
  Chemically Synthesized
QVQLQESGGGLVQAGGSLRLSCAASGNIFRANIMGWYRQAPGKEREFVAAIGHGGSTYYADSVKGRFTISRDNAKNTVYLQMNSLKPEDTAVYYCAVWFYDYPGSDLDYYVYHRYWGQGTQVTVSS

SEQ ID NO: 6053 - protein, 126 aa, Artificial Sequence
  Chemically Synthesized
QVQLQESGGGLVQAGGSLRLSCAASGSISWPYDMGWYRQAPGKEREFVAAIAGGSNTYYADSVKGRFTISRDNAKNTVYLQMNSLKPEDTAVYYCAVWWSEADDTNGKNRTFYRYWGQGTQVTVSS

SEQ ID NO: 6054 - protein, 118 aa, Artificial Sequence
  Chemically Synthesized
QVQLQESGGGLVQAGGSLRLSCAASGNISRWFVMGWYRQAPGKEREFVASIGYGATTNYADSVKGRFTISRDNAKNTVYLQMNSLKPEDTAVYYCAAYYGWTLFLTYWGQGTQVTVSS

SEQ ID NO: 6055 - protein, 126 aa, Artificial Sequence
  Chemically Synthesized
QVQLQESGGGLVQAGGSLRLSCAASGYISRQRYMGWYRQAPGKEREFVAGISGGANTNYADSVKGRFTISRDNAKNTVYLQMNSLKPEDTAVYYCAAYYPWRTWGSYRDSYLHRYWGQGTQVTVSS

SEQ ID NO: 6056 - protein, 126 aa, Artificial Sequence
  Chemically Synthesized
QVQLQESGGGLVQAGGSLRLSCAASGNISRRKRMGWYRQAPGKERELVAAISSGGITNYADSVKGRFTISRDNAKNTVYLQMNSLKPEDTAVYYCAVKVFWTNTQYLVPKPNHGYWGQGTQVTVSS

SEQ ID NO: 6057 - protein, 118 aa, Artificial Sequence
  Chemically Synthesized
QVQLQESGGGLVQAGGSLRLSCAASGTIFGSYQMGWYRQAPGKEREFVAAISRGGITYYADSVKGRFTISRDNAKNTVYLQMNSLKPEDTAVYYCAVRPYRYNRHYYWGQGTQVTVSS

SEQ ID NO: 6058 - protein, 122 aa, Artificial Sequence
  Chemically Synthesized
QVQLQESGGGLVQAGGSLRLSCAASGSISDFERMGWYRQAPGKERELVAGIDYDGITNYADSVKGRFTISRDNAKNTVYLQMNSLKPEDTAVYYCAALPDPYWYDLVDFPYWGQGTQVTVSS

SEQ ID NO: 6059 - protein, 122 aa, Artificial Sequence
  Chemically Synthesized
QVQLQESGGGLVQAGGSLRLSCAASGYISRGGRMGWYRQAPGKERELVASINGGGSTNYADSVKGRFTISRDNAKNTVYLQMNSLKPEDTAVYYCAVWRRITWRGRDGYGYWGQGTQVTVSS

SEQ ID NO: 6060 - protein, 118 aa, Artificial Sequence
  Chemically Synthesized
QVQLQESGGGLVQAGGSLRLSCAASGSISYSYYMGWYRQAPGKEREFVAAIGYGASTYYADSVKGRFTISRDNAKNTVYLQMNSLKPEDTAVYYCAAAGWYYYDLDYWGQGTQVTVSS

SEQ ID NO: 6061 - protein, 121 aa, Artificial Sequence
  Chemically Synthesized
QVQLQESGGGLVQAGGSLRLSCAASGTISGYYRMGWYRQAPGKEREFVATINYGSSTNYADSVKGRFTISRDNAKNTVYLQMNSLKPEDTAVYYCAVGYFARFHRTYHAYWGQGTQVTVSS

SEQ ID NO: 6062 - protein, 122 aa, Artificial Sequence
  Chemically Synthesized
QVQLQESGGGLVQAGGSLRLSCAASGYIFTRGQMGWYRQAPGKERELVASIAAGTNTYYADSVKGRFTISRDNAKNTVYLQMNSLKPEDTAVYYCAAAVGGQKYHSRAHYYWGQGTQVTVSS

SEQ ID NO: 6063 - protein, 122 aa, Artificial Sequence
  Chemically Synthesized
QVQLQESGGGLVQAGGSLRLSCAASGSIFTDPYMGWYRQAPGKERELVATITKGGSTYYADSVKGRFTISRDNAKNTVYLQMNSLKPEDTAVYYCAAALFFRRPFERLHGYWGQGTQVTVSS

SEQ ID NO: 6064 - protein, 122 aa, Artificial Sequence
  Chemically Synthesized
QVQLQESGGGLVQAGGSLRLSCAASGSISHYWYMGWYRQAPGKEREFVATIDRGTNTYYADSVKGRFTISRDNAKNTVYLQMNSLKPEDTAVYYCAASLETGSLSYASLDYWGQGTQVTVSS

SEQ ID NO: 6065 - protein, 122 aa, Artificial Sequence
  Chemically Synthesized
QVQLQESGGGLVQAGGSLRLSCAASGNISRIVVMGWYRQAPGKERELVAAIGAGTNTNYADSVKGRFTISRDNAKNTVYLQMNSLKPEDTAVYYCAVARQRRSYNVSYLYYWGQGTQVTVSS

SEQ ID NO: 6066 - protein, 118 aa, Artificial Sequence
  Chemically Synthesized
QVQLQESGGGLVQAGGSLRLSCAASGYIFVLGYMGWYRQAPGKEREFVAAIARGGTTYYADSVKGRFTISRDNAKNTVYLQMNSLKPEDTAVYYCAVRRQWGYYHRYWGQGTQVTVSS

SEQ ID NO: 6067 - protein, 118 aa, Artificial Sequence
  Chemically Synthesized
QVQLQESGGGLVQAGGSLRLSCAASGTISPPDGMGWYRQAPGKERELVAGIGFGGTTNYADSVKGRFTISRDNAKNTVYLQMNSLKPEDTAVYYCAAGAVDFYAHTYWGQGTQVTVSS

SEQ ID NO: 6068 - protein, 120 aa, Artificial Sequence
  Chemically Synthesized
QVQLQESGGGLVQAGGSLRLSCAASGTISRVHVMGWYRQAPGKERELVAAIAYGSSTYYADSVKGRFTISRDNAKNTVYLQMNSLKPEDTAVYYCAGLRRGYYAVGHSYWGQGTQVTVSS

SEQ ID NO: 6069 - protein, 125 aa, Artificial Sequence
  Chemically Synthesized
QVQLQESGGGLVQAGGSLRLSCAASGTISQSYYMGWYRQAPGKEREFVAGIGGGSTTYYADSVKGRFTISRDNAKNTVYLQMNSLKPEDTAVYYCAAPWFNDRQWQPAWSTTIYWGQGTQVTVSS

SEQ ID NO: 6070 - protein, 117 aa, Artificial Sequence
  Chemically Synthesized
QVQLQESGGGLVQAGGSLRLSCAASGYIFAYYAMGWYRQAPGKEREFVAGISSGANTNYADSVKGRFTISRDNAKNTVYLQMNSLKPEDTAVYYCAAYFSTSTTFYWGQGTQVTVSS

SEQ ID NO: 6071 - protein, 122 aa, Artificial Sequence
  Chemically Synthesized
QVQLQESGGGLVQAGGSLRLSCAASGYIFIRYAMGWYRQAPGKEREFVAGISIGGTTYYADSVKGRFTISRDNAKNTVYLQMNSLKPEDTAVYYCAVWYSVRQRWPSPYKYWGQGTQVTVSS

SEQ ID NO: 6072 - protein, 120 aa, Artificial Sequence
  Chemically Synthesized
QVQLQESGGGLVQAGGSLRLSCAASGTIFKWLLMGWYRQAPGKEREFVATINYGGTTYYADSVKGRFTISRDNAKNTVYLQMNSLKPEDTAVYYCAVPGRNWRWRYHPYWGQGTQVTVSS

SEQ ID NO: 6073 - protein, 118 aa, Artificial Sequence
  Chemically Synthesized
QVQLQESGGGLVQAGGSLRLSCAASGNIFDIYYMGWYRQAPGKERELVAAIGPGASTYYADSVKGRFTISRDNAKNTVYLQMNSLKPEDTAVYYCAAGYYVNYPHNYWGQGTQVTVSS

SEQ ID NO: 6074 - protein, 117 aa, Artificial Sequence
  Chemically Synthesized
QVQLQESGGGLVQAGGSLRLSCAASGTIFPPHLMGWYRQAPGKEREFVAGIDRGSTTYYADSVKGRFTISRDNAKNTVYLQMNSLKPEDTAVYYCAVLAYRPQLDYWGQGTQVTVSS

SEQ ID NO: 6075 - protein, 122 aa, Artificial Sequence
  Chemically Synthesized
QVQLQESGGGLVQAGGSLRLSCAASGSIFRWGSMGWYRQAPGKERELVAGIDYGTSTYYADSVKGRFTISRDNAKNTVYLQMNSLKPEDTAVYYCAAARKRRAFWGLDHYYWGQGTQVTVSS

SEQ ID NO: 6076 - protein, 117 aa, Artificial Sequence
  Chemically Synthesized
QVQLQESGGGLVQAGGSLRLSCAASGYISYYSMGWYRQAPGKEREFVASITDGTNTNYADSVKGRFTISRDNAKNTVYLQMNSLKPEDTAVYYCAAADAYEVTFGYWGQGTQVTVSS

SEQ ID NO: 6077 - protein, 118 aa, Artificial Sequence
  Chemically Synthesized
QVQLQESGGGLVQAGGSLRLSCAASGTISYSYGMGWYRQAPGKERELVATIAPGATTYYADSVKGRFTISRDNAKNTVYLQMNSLKPEDTAVYYCAAYIPIVYNFAYWGQGTQVTVSS

SEQ ID NO: 6078 - protein, 122 aa, Artificial Sequence
  Chemically Synthesized
QVQLQESGGGLVQAGGSLRLSCAASGNIFGSSYMGWYRQAPGKEREFVATISWGSSTYYADSVKGRFTISRDNAKNTVYLQMNSLKPEDTAVYYCAAYYYGRYYFYNHHSYWGQGTQVTVSS

SEQ ID NO: 6079 - protein, 126 aa, Artificial Sequence
  Chemically Synthesized
QVQLQESGGGLVQAGGSLRLSCAASGNIFDHETMGWYRQAPGKERELVAAITSGGSTYYADSVKGRFTISRDNAKNTVYLQMNSLKPEDTAVYYCAVVIKFVETGYGLYLAGLAYWGQGTQVTVSS

SEQ ID NO: 6080 - protein, 118 aa, Artificial Sequence
  Chemically Synthesized
QVQLQESGGGLVQAGGSLRLSCAASGTISDYSSMGWYRQAPGKERELVAGIAPGATTYYADSVKGRFTISRDNAKNTVYLQMNSLKPEDTAVYYCAVDSNTSGDHRYWGQGTQVTVSS

SEQ ID NO: 6081 - protein, 122 aa, Artificial Sequence
  Chemically Synthesized
QVQLQESGGGLVQAGGSLRLSCAASGYIFWPYWMGWYRQAPGKERELVATIGYGGITNYADSVKGRFTISRDNAKNTVYLQMNSLKPEDTAVYYCAVPYFPLSDGHAQYDYWGQGTQVTVSS

SEQ ID NO: 6082 - protein, 118 aa, Artificial Sequence
  Chemically Synthesized
QVQLQESGGGLVQAGGSLRLSCAASGTISTAQTMGWYRQAPGKERELVAGIDVGSNTYYADSVKGRFTISRDNAKNTVYLQMNSLKPEDTAVYYCAVIGGISGNYRYWGQGTQVTVSS

SEQ ID NO: 6083 - protein, 118 aa, Artificial Sequence
  Chemically Synthesized
QVQLQESGGGLVQAGGSLRLSCAASGTIFYATAMGWYRQAPGKEREFVAAIARGGITYYADSVKGRFTISRDNAKNTVYLQMNSLKPEDTAVYYCAVKPAYRQKLVYWGQGTQVTVSS

SEQ ID NO: 6084 - protein, 118 aa, Artificial Sequence
  Chemically Synthesized
QVQLQESGGGLVQAGGSLRLSCAASGTIFQAYIMGWYRQAPGKERELVATIDPGASTNYADSVKGRFTISRDNAKNTVYLQMNSLKPEDTAVYYCAANQYAYYTFVYWGQGTQVTVSS

SEQ ID NO: 6085 - protein, 118 aa, Artificial Sequence
  Chemically Synthesized
QVQLQESGGGLVQAGGSLRLSCAASGSISWVGVMGWYRQAPGKEREFVAAISYGGITNYADSVKGRFTISRDNAKNTVYLQMNSLKPEDTAVYYCAVRRGYYYYYRYWGQGTQVTVSS

SEQ ID NO: 6086 - protein, 126 aa, Artificial Sequence
  Chemically Synthesized
QVQLQESGGGLVQAGGSLRLSCAASGSISGIGKMGWYRQAPGKEREFVASIAGGAITNYADSVKGRFTISRDNAKNTVYLQMNSLKPEDTAVYYCAAYGRTIGYDGGTGGVGHDYWGQGTQVTVSS

SEQ ID NO: 6087 - protein, 122 aa, Artificial Sequence
  Chemically Synthesized
QVQLQESGGGLVQAGGSLRLSCAASGSISSLGYMGWYRQAPGKERELVAAISWGAITYYADSVKGRFTISRDNAKNTVYLQMNSLKPEDTAVYYCAADLRWWYYGVDSFRYWGQGTQVTVSS

SEQ ID NO: 6088 - protein, 122 aa, Artificial Sequence
  Chemically Synthesized
QVQLQESGGGLVQAGGSLRLSCAASGNISFTSDMGWYRQAPGKEREFVAAIGLGGTTNYADSVKGRFTISRDNAKNTVYLQMNSLKPEDTAVYYCAVWYIPQQPYNAYLRYWGQGTQVTVSS

SEQ ID NO: 6089 - protein, 118 aa, Artificial Sequence
  Chemically Synthesized
QVQLQESGGGLVQAGGSLRLSCAASGTIFGYVYMGWYRQAPGKERELVAGINWGGSTYYADSVKGRFTISRDNAKNTVYLQMNSLKPEDTAVYYCAAGGLFATTHYYWGQGTQVTVSS

SEQ ID NO: 6090 - protein, 122 aa, Artificial Sequence
  Chemically Synthesized
QVQLQESGGGLVQAGGSLRLSCAASGTIFAYDWMGWYRQAPGKEREFVASITSGGSTYYADSVKGRFTISRDNAKNTVYLQMNSLKPEDTAVYYCAVVYYDYDQPPSPLFYWGQGTQVTVSS

SEQ ID NO: 6091 - protein, 118 aa, Artificial Sequence
  Chemically Synthesized
QVQLQESGGGLVQAGGSLRLSCAASGNIFYLSYMGWYRQAPGKEREFVAAIDLGANTYYADSVKGRFTISRDNAKNTVYLQMNSLKPEDTAVYYCAVLQPYYLPFTYWGQGTQVTVSS

SEQ ID NO: 6092 - protein, 118 aa, Artificial Sequence
  Chemically Synthesized
QVQLQESGGGLVQAGGSLRLSCAASGTISDITYMGWYRQAPGKERELVAAIDAGTNTNYADSVKGRFTISRDNAKNTVYLQMNSLKPEDTAVYYCAVRDSYVARLDYWGQGTQVTVSS

SEQ ID NO: 6093 - protein, 117 aa, Artificial Sequence
  Chemically Synthesized
QVQLQESGGGLVQAGGSLRLSCAASGSIFPARVMGWYRQAPGKEREFVASIDYGGSTYYADSVKGRFTISRDNAKNTVYLQMNSLKPEDTAVYYCAAYGPSSYSFYWGQGTQVTVSS

SEQ ID NO: 6094 - protein, 118 aa, Artificial Sequence
  Chemically Synthesized
QVQLQESGGGLVQAGGSLRLSCAASGSIFQYDVMGWYRQAPGKERELVAGIDDGSTTNYADSVKGRFTISRDNAKNTVYLQMNSLKPEDTAVYYCAAPYWVGATFPYWGQGTQVTVSS

SEQ ID NO: 6095 - protein, 122 aa, Artificial Sequence
  Chemically Synthesized
QVQLQESGGGLVQAGGSLRLSCAASGYISGVSYMGWYRQAPGKERELVAAITTGGTTYYADSVKGRFTISRDNAKNTVYLQMNSLKPEDTAVYYCAVDRRDDYVLPIRYRYWGQGTQVTVSS

SEQ ID NO: 6096 - protein, 121 aa, Artificial Sequence
  Chemically Synthesized
QVQLQESGGGLVQAGGSLRLSCAASGSIFSLTMGWYRQAPGKERELVASIAVGSNTNYADSVKGRFTISRDNAKNTVYLQMNSLKPEDTAVYYCAVESDGYVYLYDTYPYWGQGTQVTVSS

SEQ ID NO: 6097 - protein, 118 aa, Artificial Sequence
  Chemically Synthesized
QVQLQESGGGLVQAGGSLRLSCAASGYIFFRYVMGWYRQAPGKEREFVATISYGASTYYADSVKGRFTISRDNAKNTVYLQMNSLKPEDTAVYYCAAWYHYWSDLWYWGQGTQVTVSS

SEQ ID NO: 6098 - protein, 118 aa, Artificial Sequence
  Chemically Synthesized
QVQLQESGGGLVQAGGSLRLSCAASGTISYQWPMGWYRQAPGKERELVAAIGVGGSTNYADSVKGRFTISRDNAKNTVYLQMNSLKPEDTAVYYCAAYGPRQFWFVYWGQGTQVTVSS

SEQ ID NO: 6099 - protein, 118 aa, Artificial Sequence
  Chemically Synthesized
QVQLQESGGGLVQAGGSLRLSCAASGNIFLTPYMGWYRQAPGKEREFVASIGDGTTTNYADSVKGRFTISRDNAKNTVYLQMNSLKPEDTAVYYCAANRSYITGHYYWGQGTQVTVSS

SEQ ID NO: 6100 - protein, 126 aa, Artificial Sequence
  Chemically Synthesized
QVQLQESGGGLVQAGGSLRLSCAASGYISVDATMGWYRQAPGKEREFVATISPGGNTYYADSVKGRFTISRDNAKNTVYLQMNSLKPEDTAVYYCAVTIWHPVDGYGQYFYLLWYWGQGTQVTVSS

SEQ ID NO: 6101 - protein, 118 aa, Artificial Sequence
  Chemically Synthesized
QVQLQESGGGLVQAGGSLRLSCAASGSIFRYRYMGWYRQAPGKERELVAGITSGANTYYADSVKGRFTISRDNAKNTVYLQMNSLKPEDTAVYYCAVSAPWYLRYPYWGQGTQVTVSS

SEQ ID NO: 6102 - protein, 116 aa, Artificial Sequence
  Chemically Synthesized
QVQLQESGGGLVQAGGSLRLSCAASGNISQSTTMGWYRQAPGKEREFVATISGTNTYADSVKGRFTISRDNAKNTVYLQMNSLKPEDTAVYYCAVDPPYAILLDYWGQGTQVTVSS

SEQ ID NO: 6103 - protein, 112 aa, Artificial Sequence
  Chemically Synthesized
QVQLQESGGGLVQAGGSLRLSCAASGNIFGQPSMGWYRQAPGKEREFVAAIGDGTITNYADSVKGRFTISRDNAKNTVYLQMNSLKPEDTAVYYCAVHIDYWGQGTQVTVSS

SEQ ID NO: 6104 - protein, 117 aa, Artificial Sequence
  Chemically Synthesized
QVQLQESGGGLVQAGGSLRLSCAASGTIFVLDNMGWYRQAPGKERELVASINWVVLPYADSVKGRFTISRDNAKNTVYLQMNSLKPEDTAVYYCAVVVDTIVSHTYWGQGTQVTVSS

SEQ ID NO: 6105 - protein, 118 aa, Artificial Sequence
  Chemically Synthesized
QVQLQESGGGLVQAGGSLRLSCAASGTIFDDSYMGWYRQAPGKERELVAAIDYGGTTYYADSVKGRFTISRDNAKNTVYLQMNSLKPEDTAVYYCAAYYLGYQVYLYWGQGTQVTVSS

SEQ ID NO: 6106 - protein, 122 aa, Artificial Sequence
  Chemically Synthesized
QVQLQESGGGLVQAGGSLRLSCAASGNISTSSVMGWYRQAPGKERELVAGIGYGGNTYYADSVKGRFTISRDNAKNTVYLQMNSLKPEDTAVYYCAVGWYNLAYWYLWHAYWGQGTQVTVSS

SEQ ID NO: 6107 - protein, 117 aa, Artificial Sequence
  Chemically Synthesized
QVQLQESGGGLVQAGGSLRLSCAASGYISTTQDMGWYRQAPGKERELVASITPGSNTNYADSVKGRFTISRDNAKNTVYLQMNSLKPEDTAVYYCAVVRSHIDSIYWGQGTQVTVSS

SEQ ID NO: 6108 - protein, 120 aa, Artificial Sequence
  Chemically Synthesized
QVQLQESGGGLVQAGGSLRLSCAASGNIFYYDPMGWYRQAPGKERELVAAIAAGGSTYYADSVKGRFTISRDNAKNTVYLQMNSLKPEDTAVYYCAAEWDSAHTSYYGYWGQGTQVTVSS

SEQ ID NO: 6109 - protein, 123 aa, Artificial Sequence
  Chemically Synthesized
QVQLQESGGGLVQAGGSLRLSCAASGNISWYRYMGWYRQAPGKEREFVAAINYGATTNYADSVKGRFTISRDNAKNTVYLQMNSLKPEDTAVYYCAVAPAFDDYVDSDNYIYWGQGTQVTVSS

SEQ ID NO: 6110 - protein, 118 aa, Artificial Sequence
  Chemically Synthesized
QVQLQESGGGLVQAGGSLRLSCAASGNIFGGRPMGWYRQAPGKEREFVAAIGPGGTTYYADSVKGRFTISRDNAKNTVYLQMNSLKPEDTAVYYCAVYNVETVYHYYWGQGTQVTVSS

SEQ ID NO: 6111 - protein, 122 aa, Artificial Sequence
  Chemically Synthesized
QVQLQESGGGLVQAGGSLRLSCAASGSISTAGYMGWYRQAPGKEREFVAAISDGGITNYADSVKGRFTISRDNAKNTVYLQMNSLKPEDTAVYYCAAYVKTVPDIVDRHLYWGQGTQVTVSS

SEQ ID NO: 6112 - protein, 126 aa, Artificial Sequence
  Chemically Synthesized
QVQLQESGGGLVQAGGSLRLSCAASGTIFGWRWMGWYRQAPGKERELVASIGPGSSTYYADSVKGRFTISRDNAKNTVYLQMNSLKPEDTAVYYCAVGYLTRVLYDPLYYFDYYYWGQGTQVTVSS

SEQ ID NO: 6113 - protein, 113 aa, Artificial Sequence
  Chemically Synthesized
QVQLQESGGGLVQAGGSLRLSCAASGYIFSYRWMGWYRQAPGKERELVAGISYGGITYYADSVKGRFTISRDNAKNTVYLQMNSLKPEDTAVYYCAVHSHAYWGQGTQVTVSS

SEQ ID NO: 6114 - protein, 118 aa, Artificial Sequence
  Chemically Synthesized
QVQLQESGGGLVQAGGSLRLSCAASGNIFQYGHMGWYRQAPGKERELVATIAYGGITNYADSVKGRFTISRDNAKNTVYLQMNSLKPEDTAVYYCAVHVLQTLPHIYWGQGTQVTVSS

SEQ ID NO: 6115 - protein, 111 aa, Artificial Sequence
  Chemically Synthesized
QVQLQESGGGLVQAGGSLRLSCAASGSIFAPGSMGWYRQAPGKERELVAAIDSGGNTNYADSVKGRFTISRDNAKNTVYLQMNSLKPEDTAVYYCATSMYWGQGTQVTVSS

SEQ ID NO: 6116 - protein, 122 aa, Artificial Sequence
  Chemically Synthesized
QVQLQESGGGLVQAGGSLRLSCAASGNIFAGPYMGWYRQAPGKERELVATISGGGNTNYADSVKGRFTISRDNAKNTVYLQMNSLKPEDTAVYYCAASSYRALDDYVGYDYWGQGTQVTVSS

SEQ ID NO: 6117 - protein, 122 aa, Artificial Sequence
  Chemically Synthesized
QVQLQESGGGLVQAGGSLRLSCAASGSISPQFLMGWYRQAPGKEREFVAAIAYGAITYYADSVKGRFTISRDNAKNTVYLQMNSLKPEDTAVYYCAALYPAHRASGGYHGYWGQGTQVTVSS

SEQ ID NO: 6118 - protein, 117 aa, Artificial Sequence
  Chemically Synthesized
QVQLQESGGGLVQAGGSLRLSCAASGNIFGDVYMGWYRQAPGKEREFVAGIAWGGNTYYADSVKGRFTISRDNAKNTVYLQMNSLKPEDTAVYYCAAVALYRSLLYWGQGTQVTVSS

SEQ ID NO: 6119 - protein, 118 aa, Artificial Sequence
  Chemically Synthesized
QVQLQESGGGLVQAGGSLRLSCAASGTISPGLTMGWYRQAPGKEREFVATINYGGITNYADSVKGRFTISRDNAKNTVYLQMNSLKPEDTAVYYCAVVLYDYLLLTYWGQGTQVTVSS

SEQ ID NO: 6120 - protein, 118 aa, Artificial Sequence
  Chemically Synthesized
QVQLQESGGGLVQAGGSLRLSCAASGNIFKSMGWYRQAPGKEREFVATITQGGTTNYADSVKGRFTISRDNAKNTVYLQMNSLKPEDTAVYYCAVQDYYYYSYSVCYWGQGTQVTVSS

SEQ ID NO: 6121 - protein, 118 aa, Artificial Sequence
  Chemically Synthesized
QVQLQESGGGLVQAGGSLRLSCAASGNISARDWMGWYRQAPGKERELVAAISVGATTNYADSVKGRFTISRDNAKNTVYLQMNSLKPEDTAVYYCAVTINVYYHYQYWGQGTQVTVSS

SEQ ID NO: 6122 - protein, 117 aa, Artificial Sequence
  Chemically Synthesized
QVQLQESGGGLVQAGGSLRLSCAASGTIFATGTMGWYRQAPGKERELVATIGPGASTYYADSVKGRFTISRDNAKNTVYLQMNSLKPEDTAVYYCAANTYTRDYHYWGQGTQVTVSS

SEQ ID NO: 6123 - protein, 118 aa, Artificial Sequence
  Chemically Synthesized
QVQLQESGGGLVQAGGSLRLSCAASGSISYTYVMGWYRQAPGKEREFVAGIGIGGTTNYADSVKGRFTISRDNAKNTVYLQMNSLKPEDTAVYYCAALSPRQLIHYYWGQGTQVTVSS

SEQ ID NO: 6124 - protein, 118 aa, Artificial Sequence
  Chemically Synthesized
QVQLQESGGGLVQAGGSLRLSCAASGNISPIPDMGWYRQAPGKEREFVASIAGGGSTNYADSVKGRFTISRDNAKNTVYLQMNSLKPEDTAVYYCAVVYYRHRYHYYWGQGTQVTVSS

SEQ ID NO: 6125 - protein, 122 aa, Artificial Sequence
  Chemically Synthesized
QVQLQESGGGLVQAGGSLRLSCAASGTIFPLTDMGWYRQAPGKEREFVAGIGHGGTTYYADSVKGRFTISRDNAKNTVYLQMNSLKPEDTAVYYCAAVARYGGRPPRVHGYWGQGTQVTVSS

SEQ ID NO: 6126 - protein, 118 aa, Artificial Sequence
  Chemically Synthesized
QVQLQESGGGLVQAGGSLRLSCAASGYISVRWLMGWYRQAPGKEREFVAAIDGGSNTNYADSVKGRFTISRDNAKNTVYLQMNSLKPEDTAVYYCAAVGIQPPYHYYWGQGTQVTVSS

SEQ ID NO: 6127 - protein, 111 aa, Artificial Sequence
  Chemically Synthesized
QVQLQESGGGLVQAGGSLRLSCAASGYISVVDDMGWYRQAPGKERELVATIGNGGSTYYADSVKGRFTISRDNAKNTVYLQMNSLKPEDTAVYYCAVVIYWGQGTQVTVSS

SEQ ID NO: 6128 - protein, 122 aa, Artificial Sequence
  Chemically Synthesized
QVQLQESGGGLVQAGGSLRLSCAASGTISWVVKMGWYRQAPGKEREFVAGIDDGANTYYADSVKGRFTISRDNAKNTVYLQMNSLKPEDTAVYYCAVVDGYDYDQYRQHRYWGQGTQVTVSS

SEQ ID NO: 6129 - protein, 121 aa, Artificial Sequence
  Chemically Synthesized
QVQLQESGGGLVQAGGSLRLSCAASGNISTYPDMGWYRQAPGKEREFVAAINGGSTNYADSVKGRFTISRDNAKNTVYLQMNSLKPEDTAVYYCAVYPTIAGYLYYGHTYWGQGTQVTVSS

SEQ ID NO: 6130 - protein, 112 aa, Artificial Sequence
  Chemically Synthesized
QVQLQESGGGLVQAGGSLRLSCAASGNISYDLDMGWYRQAPGKERELVATINDGSNTNYADSVKGRFTISRDNAKNTVYLQMNSLKPEDTAVYYCAVTTMYWGQGTQVTVSS

SEQ ID NO: 6131 - protein, 122 aa, Artificial Sequence
  Chemically Synthesized
QVQLQESGGGLVQAGGSLRLSCAASGTISYHKVMGWYRQAPGKEREFVATINEGGSTNYADSVKGRFTISRDNAKNTVYLQMNSLKPEDTAVYYCAVRLAYLIDHQSYYRYWGQGTQVTVSS

SEQ ID NO: 6132 - protein, 117 aa, Artificial Sequence
  Chemically Synthesized
QVQLQESGGGLVQAGGSLRLSCAASGYISYAYYMGWYRQAPGKERELVAGITSGSTTNYADSVKGRFTISRDNAKNTVYLQMNSLKPEDTAVYYCAVDVRDITSLYWGQGTQVTVSS

SEQ ID NO: 6133 - protein, 118 aa, Artificial Sequence
  Chemically Synthesized
QVQLQESGGGLVQAGGSLRLSCAASGNIFHADTMGWYRQAPGKERELVAAINRGGNTNYADSVKGRFTISRDNAKNTVYLQMNSLKPEDTAVYYCAVWYSGGGDLRYWGQGTQVTVSS

SEQ ID NO: 6134 - protein, 118 aa, Artificial Sequence
  Chemically Synthesized
QVQLQESGGGLVQAGGSLRLSCAASGYISRRAIMGWYRQAPGKEREFVAGIAQGATTNYADSVKGRFTISRDNAKNTVYLQMNSLKPEDTAVYYCAAIDWGGLKLYYWGQGTQVTVSS

SEQ ID NO: 6135 - protein, 118 aa, Artificial Sequence
  Chemically Synthesized
QVQLQESGGGLVQAGGSLRLSCAASGNISEGSVMGWYRQAPGKEREFVASITAGANTNYADSVKGRFTISRDNAKNTVYLQMNSLKPEDTAVYYCAVVWYEGTYHAYWGQGTQVTVSS

SEQ ID NO: 6136 - protein, 114 aa, Artificial Sequence
  Chemically Synthesized
QVQLQESGGGLVQAGGSLRLSCAASGTISWNAVMGWYRQAPGKERELVAGIAGGGSTYYADSVKGRFTISRDNAKNTVYLQMNSLKPEDTAVYYCAVWYDLDYWGQGTQVTVSS

SEQ ID NO: 6137 - protein, 118 aa, Artificial Sequence
  Chemically Synthesized
QVQLQESGGGLVQAGGSLRLSCAASGTISSTEHMGWYRQAPGKEREFVATIDPGTTTYYADSVKGRFTISRDNAKNTVYLQMNSLKPEDTAVYYCAVGDSSQFTHPYWGQGTQVTVSS

SEQ ID NO: 6138 - protein, 118 aa, Artificial Sequence
  Chemically Synthesized
QVQLQESGGGLVQAGGSLRLSCAASGTIFRYYYMGWYRQAPGKEREFVAAIDTGASTNYADSVKGRFTISRDNAKNTVYLQMNSLKPEDTAVYYCAALRDYGRTHYYWGQGTQVTVSS

SEQ ID NO: 6139 - protein, 122 aa, Artificial Sequence
  Chemically Synthesized
QVQLQESGGGLVQAGGSLRLSCAASGTIFSYLFMGWYRQAPGKERELVAGIGWGGSTYYADSVKGRFTISRDNAKNTVYLQMNSLKPEDTAVYYCAVWLIRSGFSYSNLGYWGQGTQVTVSS

SEQ ID NO: 6140 - protein, 121 aa, Artificial Sequence
  Chemically Synthesized
QVQLQESGGGLVQAGGSLRLSCAASGNISVRVMGWYRQAPGKEREFVATIDLGANTYYADSVKGRFTISRDNAKNTVYLQMNSLKPEDTAVYYCAVTYLGDQYVYIDHSYWGQGTQVTVSS

SEQ ID NO: 6141 - protein, 122 aa, Artificial Sequence
  Chemically Synthesized
QVQLQESGGGLVQAGGSLRLSCAASGYISWLTYMGWYRQAPGKEREFVAAIGTGATTNYADSVKGRFTISRDNAKNTVYLQMNSLKPEDTAVYYCAVYNRYRSRLYLSHRYWGQGTQVTVSS

SEQ ID NO: 6142 - protein, 118 aa, Artificial Sequence
  Chemically Synthesized
QVQLQESGGGLVQAGGSLRLSCAASGSISDGGRMGWYRQAPGKERELVASIAFGSTTYYADSVKGRFTISRDNAKNTVYLQMNSLKPEDTAVYYCAAFTQDGSQHWYWGQGTQVTVSS

SEQ ID NO: 6143 - protein, 113 aa, Artificial Sequence
  Chemically Synthesized
QVQLQESGGGLVQAGGSLRLSCAASGNIFPAISMGWYRQAPGKEREFVASIDEGSSTYYADSVKGRFTISRDNAKNTVYLQMNSLKPEDTAVYYCAAPRHYYWGQGTQVTVSS

SEQ ID NO: 6144 - protein, 118 aa, Artificial Sequence
  Chemically Synthesized
QVQLQESGGGLVQAGGSLRLSCAASGSISEHYIMGWYRQAPGKEREFVASIAPGATTNYADSVKGRFTISRDNAKNTVYLQMNSLKPEDTAVYYCAVLFSLLRYHYYWGQGTQVTVSS

SEQ ID NO: 6145 - protein, 122 aa, Artificial Sequence
  Chemically Synthesized
QVQLQESGGGLVQAGGSLRLSCAASGSIFNELIMGWYRQAPGKEREFVATIGKGTITNYADSVKGRFTISRDNAKNTVYLQMNSLKPEDTAVYYCAAVFSHQDTRDHWLYYWGQGTQVTVSS

SEQ ID NO: 6146 - protein, 122 aa, Artificial Sequence
  Chemically Synthesized
QVQLQESGGGLVQAGGSLRLSCAASGTIFSGATMGWYRQAPGKEREFVASISAGANTNYADSVKGRFTISRDNAKNTVYLQMNSLKPEDTAVYYCAADSDSNGELAPWHYYWGQGTQVTVSS

SEQ ID NO: 6147 - protein, 122 aa, Artificial Sequence
  Chemically Synthesized
QVQLQESGGGLVQAGGSLRLSCAASGYIFEPARMGWYRQAPGKERELVASIGDGATTYYADSVKGRFTISRDNAKNTVYLQMNSLKPEDTAVYYCAARAPWYAYQFGPHRYWGQGTQVTVSS

SEQ ID NO: 6148 - protein, 118 aa, Artificial Sequence
  Chemically Synthesized
QVQLQESGGGLVQAGGSLRLSCAASGYISIRDWMGWYRQAPGKEREFVASIALGSNTYYADSVKGRFTISRDNAKNTVYLQMNSLKPEDTAVYYCAAYTYTYGPLIYWGQGTQVTVSS

SEQ ID NO: 6149 - protein, 117 aa, Artificial Sequence
  Chemically Synthesized
QVQLQESGGGLVQAGGSLRLSCAASGYIFVRIAMGWYRQAPGKERELVAAIAEGSTYYADSVKGRFTISRDNAKNTVYLQMNSLKPEDTAVYYCAVIEPGLPYLPYWGQGTQVTVSS

SEQ ID NO: 6150 - protein, 116 aa, Artificial Sequence
  Chemically Synthesized
QVQLQESGGGLVQAGGSLRLSCAASGNIRLLMGWYRQAPGKEREFVAAIDDGGITYYADSVKGRFTISRDNAKNTVYLQMNSLKPEDTAVYYCAVTGSPYNIFYYWGQGTQVTVSS

SEQ ID NO: 6151 - protein, 122 aa, Artificial Sequence
  Chemically Synthesized
QVQLQESGGGLVQAGGSLRLSCAASGTISEYRGMGWYRQAPGKERELVASIAVGASTNYADSVKGRFTISRDNAKNTVYLQMNSLKPEDTAVYYCAAITRDPFAPRTDHLYWGQGTQVTVSS

SEQ ID NO: 6152 - protein, 121 aa, Artificial Sequence
  Chemically Synthesized
QVQLQESGGGLVQAGGSLRLSCAASGSILGVTMGWYRQAPGKEREFVASISIGSSTNYADSVKGRFTISRDNAKNTVYLQMNSLKPEDTAVYYCAVFVDQPGARYGTHGYWGQGTQVTVSS

SEQ ID NO: 6153 - protein, 117 aa, Artificial Sequence
  Chemically Synthesized
QVQLQESGGGLVQAGGSLRLSCAASGNISRTYAMGWYRQAPGKEREFVAGITDGTITNYADSVKGRFTISRDNAKNTVYLQMNSLKPEDTAVYYCAVANIVSHHYYWGQGTQVTVSS

SEQ ID NO: 6154 - protein, 116 aa, Artificial Sequence
  Chemically Synthesized
QVQLQESGGGLVQAGGSLRLSCAASGYISTLSMGWYRQAPGKEREFVAGIDDGTNTNYADSVKGRFTISRDNAKNTVYLQMNSLKPEDTAVYYCAVTPWGSLTFYWGQGTQVTVSS

SEQ ID NO: 6155 - protein, 116 aa, Artificial Sequence
  Chemically Synthesized
QVQLQESGGGLVQAGGSLRLSCAASGSISDPFYMGWYRQAPGKEREFVASIKYADSVKGRFTISRDNAKNTVYLQMNSLKPEDTAVYYCAAYWQDSHTRYSAHAYWGQGTQVTVSS

SEQ ID NO: 6156 - protein, 118 aa, Artificial Sequence
  Chemically Synthesized
QVQLQESGGGLVQAGGSLRLSCAASGSISTTLMGWYRQAPGKEREFVAGIDSTNYADSVKGRFTISRDNAKNTVYLQMNSLKPEDTAVYYCAVYVYDVFWGGGVHTYWGQGTQVTVSS

SEQ ID NO: 6157 - protein, 125 aa, Artificial Sequence
  Chemically Synthesized
QVQLQESGGGLVQAGGSLRLSCAASGTISDSTMGWYRQAPGKERELVASIGGGGTTYYADSVKGRFTISRDNAKNTVYLQMNSLKPEDTAVYYCAVAYRVGKRLVVPANNPYDYWGQGTQVTVSS

SEQ ID NO: 6158 - protein, 122 aa, Artificial Sequence
  Chemically Synthesized
QVQLQESGGGLVQAGGSLRLSCAASGNISALDGMGWYRQAPGKEREFVAAITQGCYYQYADSVKGRFTISRDNAKNTVYLQMNSLKPEDTAVYYCAVAHLTHGLQRFYYQYWGQGTQVTVSS

SEQ ID NO: 6159 - protein, 122 aa, Artificial Sequence
  Chemically Synthesized
QVQLQESGGGLVQAGGSLRLSCAASGYIFPYASMGWYRQAPGKEREFVAAIDRGGNTYYADSVKGRFTISRDNAKNTVYLQMNSLKPEDTAVYYCAVYIQLGYRYGFIFQYWGQGTQVTVSS

SEQ ID NO: 6160 - protein, 118 aa, Artificial Sequence
  Chemically Synthesized
QVQLQESGGGLVQAGGSLRLSCAASGTISQTPYMGWYRQAPGKEREFVASIAIGTTTNYADSVKGRFTISRDNAKNTVYLQMNSLKPEDTAVYYCAVLYSQGYYYWYWGQGTQVTVSS

SEQ ID NO: 6161 - protein, 118 aa, Artificial Sequence
  Chemically Synthesized
QVQLQESGGGLVQAGGSLRLSCAASGTIFSYYDMGWYRQAPGKEREFVAGIAGGTITYYADSVKGRFTISRDNAKNTVYLQMNSLKPEDTAVYYCAVTYAYYQYYGYWGQGTQVTVSS

SEQ ID NO: 6162 - protein, 122 aa, Artificial Sequence
  Chemically Synthesized
QVQLQESGGGLVQAGGSLRLSCAASGYISDYSSMGWYRQAPGKERELVATINSGTNTNYADSVKGRFTISRDNAKNTVYLQMNSLKPEDTAVYYCAVSYYPFDATRWSLYYWGQGTQVTVSS

SEQ ID NO: 6163 - protein, 118 aa, Artificial Sequence
  Chemically Synthesized
QVQLQESGGGLVQAGGSLRLSCAASGYIFYWRVMGWYRQAPGKEREFVAAIGSGGTTYYADSVKGRFTISRDNAKNTVYLQMNSLKPEDTAVYYCAVHSVAYRRHQYWGQGTQVTVSS

SEQ ID NO: 6164 - protein, 118 aa, Artificial Sequence
  Chemically Synthesized
QVQLQESGGGLVQAGGSLRLSCAASGNISHGSTMGWYRQAPGKEREFVATIDSGATTQYADSVKGRFTISRDNAKNTVYLQMNSLKPEDTAVYYCAVYYVTAADLAYWGQGTQVTVSS

SEQ ID NO: 6165 - protein, 118 aa, Artificial Sequence
  Chemically Synthesized
QVQLQESGGGLVQAGGSLRLSCAASGSISDNRKMGWYRQAPGKERELVASIDIGGSTNYADSVKGRFTISRDNAKNTVYLQMNSLKPEDTAVYYCAGLAGLPLRLYYWGQGTQVTVSS

SEQ ID NO: 6166 - protein, 122 aa, Artificial Sequence
  Chemically Synthesized
QVQLQESGGGLVQAGGSLRLSCAASGSISGDAVMGWYRQAPGKERELVATIGYGASTYYADSVKGRFTISRDNAKNTVYLQMNSLKPEDTAVYYCAAHAYDSVYPYRYHSYWGQGTQVTVSS

SEQ ID NO: 6167 - protein, 118 aa, Artificial Sequence
  Chemically Synthesized
QVQLQESGGGLVQAGGSLRLSCAASGTISTQPEMGWYRQAPGKERELVAGINDGGSTNYADSVKGRFTISRDNAKNTVYLQMNSLKPEDTAVYYCAVADVDSRKHWYWGQGTQVTVSS

SEQ ID NO: 6168 - protein, 118 aa, Artificial Sequence
  Chemically Synthesized
QVQLQESGGGLVQAGGSLRLSCAASGTIFKYFDMGWYRQAPGKEREFVASIGRGTITNYADSVKGRFTISRDNAKNTVYLQMNSLKPEDTAVYYCAAYNGIGDPLRYWGQGTQVTVSS

SEQ ID NO: 6169 - protein, 126 aa, Artificial Sequence
  Chemically Synthesized
QVQLQESGGGLVQAGGSLRLSCAASGYIFGIVIMGWYRQAPGKERELVASITLGTSTYYADSVKGRFTISRDNAKNTVYLQMNSLKPEDTAVYYCAAYRTGPSYIGYAWQAGYGYWGQGTQVTVSS

SEQ ID NO: 6170 - protein, 118 aa, Artificial Sequence
  Chemically Synthesized
QVQLQESGGGLVQAGGSLRLSCAASGNIFGITFMGWYRQAPGKEREFVAGITLGGNTYYADSVKGRFTISRDNAKNTVYLQMNSLKPEDTAVYYCAVNYGDERVHPYWGQGTQVTVSS

SEQ ID NO: 6171 - protein, 118 aa, Artificial Sequence
  Chemically Synthesized
QVQLQESGGGLVQAGGSLRLSCAASGNIFYYSIMGWYRQAPGKEREFVATIGYGTNTNYADSVKGRFTISRDNAKNTVYLQMNSLKPEDTAVYYCAVGDYRFGHFDYWGQGTQVTVSS

SEQ ID NO: 6172 - protein, 118 aa, Artificial Sequence
  Chemically Synthesized
QVQLQESGGGLVQAGGSLRLSCAASGYIFVPYAMGWYRQAPGKEREFVAGISRGGTTYYADSVKGRFTISRDNAKNTVYLQMNSLKPEDTAVYYCAALHRYYHHLDYWGQGTQVTVSS

SEQ ID NO: 6173 - protein, 121 aa, Artificial Sequence
  Chemically Synthesized
QVQLQESGGGLVQAGGSLRLSCAASGSISLADGMGWYRQAPGKERELVAAIGIGGNTNYADSVKGRFTISRDNAKNTVYLQMNSLKPEDTAVYYCAVYRLDRSLTGWVFYWGQGTQVTVSS

SEQ ID NO: 6174 - protein, 118 aa, Artificial Sequence
  Chemically Synthesized
QVQLQESGGGLVQAGGSLRLSCAASGNISYYAGMGWYRQAPGKERELVAAIDTGATTNYADSVKGRFTISRDNAKNTVYLQMNSLKPEDTAVYYCAVNKAPYVQHDYWGQGTQVTVSS

SEQ ID NO: 6175 - protein, 118 aa, Artificial Sequence
  Chemically Synthesized
QVQLQESGGGLVQAGGSLRLSCAASGNISWRPYMGWYRQAPGKEREFVAGISDGGSTNYADSVKGRFTISRDNAKNTVYLQMNSLKPEDTAVYYCAAWTGHDYALAYWGQGTQVTVSS

SEQ ID NO: 6176 - protein, 121 aa, Artificial Sequence
  Chemically Synthesized
QVQLQESGGGLVQAGGSLRLSCAASGNISNIRSMGWYRQAPGKERELVASIGLGANTNYADSVKGRFTISRDNAKNTVYLQMNSLKPEDTAVYYCAAEHIADTRPGDSMYWGQGTQVTVSS

SEQ ID NO: 6177 - protein, 126 aa, Artificial Sequence
  Chemically Synthesized
QVQLQESGGGLVQAGGSLRLSCAASGNIFLWWYMGWYRQAPGKERELVAAIGIGGTTYYADSVKGRFTISRDNAKNTVYLQMNSLKPEDTAVYYCAVPPNYTGFGSVDDVAIHTYWGQGTQVTVSS

SEQ ID NO: 6178 - protein, 117 aa, Artificial Sequence
  Chemically Synthesized
QVQLQESGGGLVQAGGSLRLSCAASGTIFYTSYMGWYRQAPGKEREFVATIDNGSSTYADSVKGRFTISRDNAKNTVYLQMNSLKPEDTAVYYCAAGAVIHDDHYYWGQGTQVTVSS

SEQ ID NO: 6179 - protein, 126 aa, Artificial Sequence
  Chemically Synthesized
QVQLQESGGGLVQAGGSLRLSCAASGTISRLAYMGWYRQAPGKERELVAGINFGTITYYADSVKGRFTISRDNAKNTVYLQMNSLKPEDTAVYYCAATTGERWVIVNHIRQYFTYWGQGTQVTVSS

SEQ ID NO: 6180 - protein, 122 aa, Artificial Sequence
  Chemically Synthesized
QVQLQESGGGLVQAGGSLRLSCAASGYISVRFVMGWYRQAPGKERELVAAITLGSITNYADSVKGRFTISRDNAKNTVYLQMNSLKPEDTAVYYCAVGAADRSYDVDAYKYWGQGTQVTVSS

SEQ ID NO: 6181 - protein, 118 aa, Artificial Sequence
  Chemically Synthesized
QVQLQESGGGLVQAGGSLRLSCAASGTISSRRGMGWYRQAPGKEREFVASITYGTITNYADSVKGRFTISRDNAKNTVYLQMNSLKPEDTAVYYCAADSPYPYVYYYWGQGTQVTVSS

SEQ ID NO: 6182 - protein, 118 aa, Artificial Sequence
  Chemically Synthesized
QVQLQESGGGLVQAGGSLRLSCAASGYISDGSYMGWYRQAPGKERELVASISVGASTYYADSVKGRFTISRDNAKNTVYLQMNSLKPEDTAVYYCAAYYYYVYRYYYWGQGTQVTVSS

SEQ ID NO: 6183 - protein, 118 aa, Artificial Sequence
  Chemically Synthesized
QVQLQESGGGLVQAGGSLRLSCAASGNIFGAYYMGWYRQAPGKEREFVAGIGTGGNTYYADSVKGRFTISRDNAKNTVYLQMNSLKPEDTAVYYCAAPQAYGRRLFYWGQGTQVTVSS

SEQ ID NO: 6184 - protein, 117 aa, Artificial Sequence
  Chemically Synthesized
QVQLQESGGGLVQAGGSLRLSCAASGNISDGGYMGWYRQAPGKEREFVASISSVVLPYADSVKGRFTISRDNAKNTVYLQMNSLKPEDTAVYYCAAYTYRWHALYYWGQGTQVTVSS

SEQ ID NO: 6185 - protein, 118 aa, Artificial Sequence
  Chemically Synthesized
QVQLQESGGGLVQAGGSLRLSCAASGTIFRPYRMGWYRQAPGKERELVAAITSGGSTYYADSVKGRFTISRDNAKNTVYLQMNSLKPEDTAVYYCAVDWLYLRLLSYWGQGTQVTVSS

SEQ ID NO: 6186 - protein, 118 aa, Artificial Sequence
  Chemically Synthesized
QVQLQESGGGLVQAGGSLRLSCAASGSIFRYNYMGWYRQAPGKEREFVATISDGATTYYADSVKGRFTISRDNAKNTVYLQMNSLKPEDTAVYYCAADWLLYPYLVYWGQGTQVTVSS

SEQ ID NO: 6187 - protein, 118 aa, Artificial Sequence
  Chemically Synthesized
QVQLQESGGGLVQAGGSLRLSCAASGNISYGALMGWYRQAPGKERELVAGIDTGAITNYADSVKGRFTISRDNAKNTVYLQMNSLKPEDTAVYYCAVYHVYYGSFQYWGQGTQVTVSS

SEQ ID NO: 6188 - protein, 116 aa, Artificial Sequence
  Chemically Synthesized
QVQLQESGGGLVQAGGSLRLSCAASGYISHYLWMGWYRQAPGKERELVASINAGSITYYADSVKGRFTISRDNAKNTVYLQMNSLKPEDTAVYYCAVWFSIFHYYWGQGTQVTVSS

SEQ ID NO: 6189 - protein, 126 aa, Artificial Sequence
  Chemically Synthesized
QVQLQESGGGLVQAGGSLRLSCAASGYIFLFDYMGWYRQAPGKERELVAAISYGANTNYADSVKGRFTISRDNAKNTVYLQMNSLKPEDTAVYYCAVRPVYPWVGWRGASIFHTYWGQGTQVTVSS

SEQ ID NO: 6190 - protein, 118 aa, Artificial Sequence
  Chemically Synthesized
QVQLQESGGGLVQAGGSLRLSCAASGNISAFFSMGWYRQAPGKEREFVATINSGGSTNYADSVKGRFTISRDNAKNTVYLQMNSLKPEDTAVYYCAGLHCFVQYLQYWGQGTQVTVSS

SEQ ID NO: 6191 - protein, 118 aa, Artificial Sequence
  Chemically Synthesized
QVQLQESGGGLVQAGGSLRLSCAASGNISYYTDMGWYRQAPGKEREFVATIDSGSSTNYADSVKGRFTISRDNAKNTVYLQMNSLKPEDTAVYYCAADVPRRGGFYYWGQGTQVTVSS

SEQ ID NO: 6192 - protein, 117 aa, Artificial Sequence
  Chemically Synthesized
QVQLQESGGGLVQAGGSLRLSCAASGYISWPDFMGWYRQAPGKERELVASIGGGTSTYYADSVKGRFTISRDNAKNTVYLQMNSLKPEDTAVYYCAAVTIMVLTLYWGQGTQVTVSS

SEQ ID NO: 6193 - protein, 121 aa, Artificial Sequence
  Chemically Synthesized
QVQLQESGGGLVQAGGSLRLSCAASGSISWDYFMGWYRQAPGKEREFVAGIDTGSTTYYADSVKGRFTISRDNAKNTVYLQMNSLKPEDTAVYYCAAYYVDYDQSRAFGYWGQGTQVTVSS

SEQ ID NO: 6194 - protein, 122 aa, Artificial Sequence
  Chemically Synthesized
QVQLQESGGGLVQAGGSLRLSCAASGYISTYTYMGWYRQAPGKERELVAAIDDGGSTYYADSVKGRFTISRDNAKNTVYLQMNSLKPEDTAVYYCAARYHPTYTYAEYHIYWGQGTQVTVSS

SEQ ID NO: 6195 - protein, 117 aa, Artificial Sequence
  Chemically Synthesized
QVQLQESGGGLVQAGGSLRLSCAASGNISGGTDMGWYRQAPGKERELVASIGVGSNTNYADSVKGRFTISRDNAKNTVYLQMNSLKPEDTAVYYCAVPRDARTRIYWGQGTQVTVSS

SEQ ID NO: 6196 - protein, 125 aa, Artificial Sequence
  Chemically Synthesized
QVQLQESGGGLVQAGGSLRLSCAASGLFSSLLMGWYRQAPGKERELVAAISYGGITNYADSVKGRFTISRDNAKNTVYLQMNSLKPEDTAVYYCAVFLQPSEWWRGDADEGHWYWGQGTQVTVSS

SEQ ID NO: 6197 - protein, 117 aa, Artificial Sequence
  Chemically Synthesized
QVQLQESGGGLVQAGGSLRLSCAASGTISYVYMGWYRQAPGKERELVAAIDQGASTYYADSVKGRFTISRDNAKNTVYLQMNSLKPEDTAVYYCAAGRLVDVPHTYWGQGTQVTVSS

SEQ ID NO: 6198 - protein, 121 aa, Artificial Sequence
  Chemically Synthesized
QVQLQESGGGLVQAGGSLRLSCAASGTIMGWYRQAPGKEREFVAGIGYGGSTYYADSVKGRFTISRDNAKNTVYLQMNSLKPEDTAVYYCAVEPYPSYTSWSVYRQVHTYWGQGTQVTVSS

SEQ ID NO: 6199 - protein, 118 aa, Artificial Sequence
  Chemically Synthesized
QVQLQESGGGLVQAGGSLRLSCAASGTISYGYVMGWYRQAPGKERELVAGIGPGTSTYYADSVKGRFTISRDNAKNTVYLQMNSLKPEDTAVYYCAVDESGVSYFGYWGQGTQVTVSS

SEQ ID NO: 6200 - protein, 118 aa, Artificial Sequence
  Chemically Synthesized
QVQLQESGGGLVQAGGSLRLSCAASGTISRGYIMGWYRQAPGKEREFVASISYGATTNYADSVKGRFTISRDNAKNTVYLQMNSLKPEDTAVYYCAVEIDADGEYGYWGQGTQVTVSS

SEQ ID NO: 6201 - protein, 118 aa, Artificial Sequence
  Chemically Synthesized
QVQLQESGGGLVQAGGSLRLSCAASGSIFYPPLMGWYRQAPGKERELVAGISYGASTYYADSVKGRFTISRDNAKNTVYLQMNSLKPEDTAVYYCAANVSYWRSYAYWGQGTQVTVSS

SEQ ID NO: 6202 - protein, 117 aa, Artificial Sequence
  Chemically Synthesized
QVQLQESGGGLVQAGGSLRLSCAASGTISASGNMGWYRQAPGKERELVATIGDGASTYADSVKGRFTISRDNAKNTVYLQMNSLKPEDTAVYYCAATRYNPTRLGYWGQGTQVTVSS

SEQ ID NO: 6203 - protein, 112 aa, Artificial Sequence
  Chemically Synthesized
QVQLQESGGGLVQAGGSLRLSCAASGNIFDPLYMGWYRQAPGKERELVATINPGSNTNYADSVKGRFTISRDNAKNTVYLQMNSLKPEDTAVYYCAVDSLYWGQGTQVTVSS

SEQ ID NO: 6204 - protein, 127 aa, Artificial Sequence
  Chemically Synthesized
QVQLQESGGGLVQAGGSLRLSCAASGNIFDPAYMGWYRQAPGKEREFVAAINAGGTITNYADSVKGRFTISRDNAKNTVYLQMNSLKPEDTAVYYCAVGPYYYSYANVNQGAVHDYWGQGTQVTVSS

SEQ ID NO: 6205 - protein, 126 aa, Artificial Sequence
  Chemically Synthesized
QVQLQESGGGLVQAGGSLRLSCAASGSIFDIADMGWYRQAPGKEREFVAAIAQGANTQYADSVKGRFTISRDNAKNTVYLQMNSLKPEDTAVYYCAAQIADQIGEYDQDYSYHDYWGQGTQVTVSS

SEQ ID NO: 6206 - protein, 111 aa, Artificial Sequence
  Chemically Synthesized
QVQLQESGGGLVQAGGSLRLSCAASGSIFENSEMGWYRQAPGKERELVAAIGGGGNTYYADSVKGRFTISRDNAKNTVYLQMNSLKPEDTAVYYCAVVSYWGQGTQVTVSS

SEQ ID NO: 6207 - protein, 118 aa, Artificial Sequence
  Chemically Synthesized
QVQLQESGGGLVQAGGSLRLSCAASGSISYSFDMGWYRQAPGKEREFVAAISAGTSTNYADSVKGRFTISRDNAKNTVYLQMNSLKPEDTAVYYCAATYNAVTYHYYWGQGTQVTVSS

SEQ ID NO: 6208 - protein, 118 aa, Artificial Sequence
  Chemically Synthesized
QVQLQESGGGLVQAGGSLRLSCAASGSISDPYNMGWYRQAPGKEREFVATINTGGITYYADSVKGRFTISRDNAKNTVYLQMNSLKPEDTAVYYCAVTDSQAYVHIYWGQGTQVTVSS

SEQ ID NO: 6209 - protein, 118 aa, Artificial Sequence
  Chemically Synthesized
QVQLQESGGGLVQAGGSLRLSCAASGNISDGPYMGWYRQAPGKERELVAGINTGATTYYADSVKGRFTISRDNAKNTVYLQMNSLKPEDTAVYYCAVWLEDTYGHDYWGQGTQVTVSS

SEQ ID NO: 6210 - protein, 126 aa, Artificial Sequence
  Chemically Synthesized
QVQLQESGGGLVQAGGSLRLSCAASGYISSFWYMGWYRQAPGKERELVATIGIGGNTYYADSVKGRFTISRDNAKNTVYLQMNSLKPEDTAVYYCAADAAKDYYYYTVRDRILAYWGQGTQVTVSS

SEQ ID NO: 6211 - protein, 119 aa, Artificial Sequence
  Chemically Synthesized
QVQLQESGGGLVQAGGSLRLSCAASGSISYNYDMGWYRQAPGKEREFVAAIGDGGSTNYADSVKGRFTISRDNAKNTVYLQMNSLKPEDTAVYYCAVQSFPPITAFRYWGQGTQVTVSS

SEQ ID NO: 6212 - protein, 118 aa, Artificial Sequence
  Chemically Synthesized
QVQLQESGGGLVQAGGSLRLSCAASGYIFRWHKMGWYRQAPGKERELVAAIGRGTTTNYADSVKGRFTISRDNAKNTVYLQMNSLKPEDTAVYYCAAYRYAIYQLYYWGQGTQVTVSS

SEQ ID NO: 6213 - protein, 118 aa, Artificial Sequence
  Chemically Synthesized
QVQLQESGGGLVQAGGSLRLSCAASGYISPYRYMGWYRQAPGKEREFVAAINRGSITYYADSVKGRFTISRDNAKNTVYLQMNSLKPEDTAVYYCAVPYRYGKRLPYWGQGTQVTVSS

SEQ ID NO: 6214 - protein, 122 aa, Artificial Sequence
  Chemically Synthesized
QVQLQESGGGLVQAGGSLRLSCAASGNIFYTAIMGWYRQAPGKERELVAGIGQGGTTYYADSVKGRFTISRDNAKNTVYLQMNSLKPEDTAVYYCAVYYQLESKTPGYYGYWGQGTQVTVSS

SEQ ID NO: 6215 - protein, 118 aa, Artificial Sequence
  Chemically Synthesized
QVQLQESGGGLVQAGGSLRLSCAASGNIFFARWMGWYRQAPGKEREFVAAIGFGANTYYADSVKGRFTISRDNAKNTVYLQMNSLKPEDTAVYYCAVYVSYYTVHAYWGQGTQVTVSS

SEQ ID NO: 6216 - protein, 118 aa, Artificial Sequence
  Chemically Synthesized
QVQLQESGGGLVQAGGSLRLSCAASGSISLLFVMGWYRQAPGKEREFVASINGGANTNYADSVKGRFTISRDNAKNTVYLQMNSLKPEDTAVYYCAVVTNYSRTYIYWGQGTQVTVSS

SEQ ID NO: 6217 - protein, 126 aa, Artificial Sequence
  Chemically Synthesized
QVQLQESGGGLVQAGGSLRLSCAASGTIFDYLYMGWYRQAPGKERELVAAINAGTNTYYADSVKGRFTISRDNAKNTVYLQMNSLKPEDTAVYYCAVVAYTWHDPVNATNYYYAYWGQGTQVTVSS

SEQ ID NO: 6218 - protein, 113 aa, Artificial Sequence
  Chemically Synthesized
QVQLQESGGGLVQAGGSLRLSCAASGTISQAYTMGWYRQAPGKERELVAAIATGAITNYADSVKGRFTISRDNAKNTVYLQMNSLKPEDTAVYYCAAVALVYWGQGTQVTVSS

SEQ ID NO: 6219 - protein, 117 aa, Artificial Sequence
  Chemically Synthesized
QVQLQESGGGLVQAGGSLRLSCAASGSISGRYVMGWYRQAPGKERELVATIGGGTTNYADSVKGRFTISRDNAKNTVYLQMNSLKPEDTAVYYCAVIVYRAAPYVYWGQGTQVTVSS

SEQ ID NO: 6220 - protein, 118 aa, Artificial Sequence
  Chemically Synthesized
QVQLQESGGGLVQAGGSLRLSCAASGTISDYTTMGWYRQAPGKERELVASIAVGGSTYYADSVKGRFTISRDNAKNTVYLQMNSLKPEDTAVYYCAAVVQTRRGHLYWGQGTQVTVSS

SEQ ID NO: 6221 - protein, 122 aa, Artificial Sequence
  Chemically Synthesized
QVQLQESGGGLVQAGGSLRLSCAASGYIFQQDDMGWYRQAPGKEREFVAAIANGGNTNYADSVKGRFTISRDNAKNTVYLQMNSLKPEDTAVYYCAVRDSWYGAVNVSLDYWGQGTQVTVSS

SEQ ID NO: 6222 - protein, 117 aa, Artificial Sequence
  Chemically Synthesized
QVQLQESGGGLVQAGGSLRLSCAASGNISRSYRMGWYRQAPGKERELLPVLVRVSTTYADSVKGRFTISRDNAKNTVYLQMNSLKPEDTAVYYCAVAKQRSYYHRYWGQGTQVTVSS

SEQ ID NO: 6223 - protein, 115 aa, Artificial Sequence
  Chemically Synthesized
QVQLQESGGGLVQAGGSLRLSCAASGSISQTDYMGWYRQAPGKEREFVATIDYGASTNYADSVKGRFTISRDNAKNTVYLQMNSLKPEDTAVYYCAVYSHGYYYWGQGTQVTVSS

SEQ ID NO: 6224 - protein, 119 aa, Artificial Sequence
  Chemically Synthesized
QVQLQESGGGLVQAGGSLRLSCAASGNISYGGTMGWYRQAPGKERELVASIDDGSITNYADSVKGRFTISRDNAKNTVYLQMNSLKPEDTAVYYCAAPGANVLAFAAYWGQGTQVTVSS

SEQ ID NO: 6225 - protein, 118 aa, Artificial Sequence
  Chemically Synthesized
QVQLQESGGGLVQAGGSLRLSCAASGSISRAFLMGWYRQAPGKERELVATIDYGGSTNYADSVKGRFTISRDNAKNTVYLQMNSLKPEDTAVYYCAARTNSLVYFAYWGQGTQVTVSS

SEQ ID NO: 6226 - protein, 117 aa, Artificial Sequence
  Chemically Synthesized
QVQLQESGGGLVQAGGSLRLSCAASGTISPTGNMGWYRQAPGKEREFVAGITLVVIPYADSVKGRFTISRDNAKNTVYLQMNSLKPEDTAVYYCAVDIGEYRDLHYWGQGTQVTVSS

SEQ ID NO: 6227 - protein, 118 aa, Artificial Sequence
  Chemically Synthesized
QVQLQESGGGLVQAGGSLRLSCAASGSISGTQDMGWYRQAPGKERELVATITDGGTTYYADSVKGRFTISRDNAKNTVYLQMNSLKPEDTAVYYCAAYWKRYYDYRYWGQGTQVTVSS

SEQ ID NO: 6228 - protein, 118 aa, Artificial Sequence
  Chemically Synthesized
QVQLQESGGGLVQAGGSLRLSCAASGNISDYTSMGWYRQAPGKEREFVASISAGTITYYADSVKGRFTISRDNAKNTVYLQMNSLKPEDTAVYYCAVLYGPYGVYTYWGQGTQVTVSS

SEQ ID NO: 6229 - protein, 126 aa, Artificial Sequence
  Chemically Synthesized
QVQLQESGGGLVQAGGSLRLSCAASGTISDLSYMGWYRQAPGKERELVASITLGASTNYADSVKGRFTISRDNAKNTVYLQMNSLKPEDTAVYYCAVSDLTYDDYYTFYDYPHDYWGQGTQVTVSS

SEQ ID NO: 6230 - protein, 122 aa, Artificial Sequence
  Chemically Synthesized
QVQLQESGGGLVQAGGSLRLSCAASGNIFFRGDMGWYRQAPGKEREFVASINYGTITYYADSVKGRFTISRDNAKNTVYLQMNSLKPEDTAVYYCAVDWKDRFINSDDLGYWGQGTQVTVSS

SEQ ID NO: 6231 - protein, 126 aa, Artificial Sequence
  Chemically Synthesized
QVQLQESGGGLVQAGGSLRLSCAASGTIFGFGHMGWYRQAPGKERELVATIAPGATTYYADSVKGRFTISRDNAKNTVYLQMNSLKPEDTAVYYCAVRYNDGYYYYRVPRGGFPYWGQGTQVTVSS

SEQ ID NO: 6232 - protein, 118 aa, Artificial Sequence
  Chemically Synthesized
QVQLQESGGGLVQAGGSLRLSCAASGNIFSLRDMGWYRQAPGKERELVAAIAYGTNTNYADSVKGRFTISRDNAKNTVYLQMNSLKPEDTAVYYCAAYYPSDGRYQYWGQGTQVTVSS

SEQ ID NO: 6233 - protein, 122 aa, Artificial Sequence
  Chemically Synthesized
QVQLQESGGGLVQAGGSLRLSCAASGTISYAYLMGWYRQAPGKEREFVAGISWGSNTYYADSVKGRFTISRDNAKNTVYLQMNSLKPEDTAVYYCAAIYGYYAYVVAGHYYWGQGTQVTVSS

SEQ ID NO: 6234 - protein, 118 aa, Artificial Sequence
  Chemically Synthesized
QVQLQESGGGLVQAGGSLRLSCAASGTISDDYAMGWYRQAPGKERELVASIDAGGITNYADSVKGRFTISRDNAKNTVYLQMNSLKPEDTAVYYCAVPYYPLDGFDYWGQGTQVTVSS

SEQ ID NO: 6235 - protein, 117 aa, Artificial Sequence
  Chemically Synthesized
QVQLQESGGGLVQAGGSLRLSCAASGTIFSLFMGWYRQAPGKEREFVATIDWGSSTNYADSVKGRFTISRDNAKNTVYLQMNSLKPEDTAVYYCAVGSELVGVYTYWGQGTQVTVSS

SEQ ID NO: 6236 - protein, 121 aa, Artificial Sequence
  Chemically Synthesized
QVQLQESGGGLVQAGGSLRLSCAASGNIFDVSKMGWYRQAPGKEREFVAGISHGTNTNYADSVKGRFTISRDNAKNTVYLQMNSLKPEDTAVYYCAATTTDDTYSLVSMYWGQGTQVTVSS

SEQ ID NO: 6237 - protein, 126 aa, Artificial Sequence
  Chemically Synthesized
QVQLQESGGGLVQAGGSLRLSCAASGYISAYETMGWYRQAPGKERELVAAIDGGASTNYADSVKGRFTISRDNAKNTVYLQMNSLKPEDTAVYYCAVGRADVIRVLYSEPYLYNYWGQGTQVTVSS

SEQ ID NO: 6238 - protein, 122 aa, Artificial Sequence
  Chemically Synthesized
QVQLQESGGGLVQAGGSLRLSCAASGYIFSTWDMGWYRQAPGKEREFVATISSGSSTNYADSVKGRFTISRDNAKNTVYLQMNSLKPEDTAVYYCAVVYDGYYEWFNYLRYWGQGTQVTVSS

SEQ ID NO: 6239 - protein, 118 aa, Artificial Sequence
  Chemically Synthesized
QVQLQESGGGLVQAGGSLRLSCAASGTIFILGYMGWYRQAPGKERELVAAITVGSTTYYADSVKGRFTISRDNAKNTVYLQMNSLKPEDTAVYYCAVSYDYWYTLQYWGQGTQVTVSS

SEQ ID NO: 6240 - protein, 125 aa, Artificial Sequence
  Chemically Synthesized
QVQLQESGGGLVQAGGSLRLSCAASGYISGKAYMGWYRQAPGKEREFVASIGDGASTYYADSVKGRFTISRDNAKNTVYLQMNSLKPEDTAVYYCAAYSQYITYYGAFTLLVLYWGQGTQVTVSS

SEQ ID NO: 6241 - protein, 114 aa, Artificial Sequence
  Chemically Synthesized
QVQLQESGGGLVQAGGSLRLSCAASGSIFYNWGMGWYRQAPGKERELVAGYGANTNYADSVKGRFTISRDNAKNTVYLQMNSLKPEDTAVYYCAVNIVDVWWYWGQGTQVTVSS

SEQ ID NO: 6242 - protein, 121 aa, Artificial Sequence
  Chemically Synthesized
QVQLQESGGGLVQAGGSLRLSCAASGTIFNHAMGWYRQAPGKEREFVAAIADGGNTNYADSVKGRFTISRDNAKNTVYLQMNSLKPEDTAVYYCAAIDPLYSAHYRDHPYWGQGTQVTVSS

SEQ ID NO: 6243 - protein, 117 aa, Artificial Sequence
  Chemically Synthesized
QVQLQESGGGLVQAGGSLRLSCAASGNIFFSVMGWYRQAPGKERELVAAITGGGNTYYADSVKGRFTISRDNAKNTVYLQMNSLKPEDTAVYYCAVFDYSPWTYGYWGQGTQVTVSS

SEQ ID NO: 6244 - protein, 122 aa, Artificial Sequence
  Chemically Synthesized
QVQLQESGGGLVQAGGSLRLSCAASGNIFPPWDMGWYRQAPGKERELVATIAYGTNTNYADSVKGRFTISRDNAKNTVYLQMNSLKPEDTAVYYCAASEWASGGWFYNHLYWGQGTQVTVSS

SEQ ID NO: 6245 - protein, 118 aa, Artificial Sequence
  Chemically Synthesized
QVQLQESGGGLVQAGGSLRLSCAASGTIFLGNTMGWYRQAPGKERELVASISDGGNTYYADSVKGRFTISRDNAKNTVYLQMNSLKPEDTAVYYCAADTPWQQVHVYWGQGTQVTVSS

SEQ ID NO: 6246 - protein, 125 aa, Artificial Sequence
  Chemically Synthesized
QVQLQESGGGLVQAGGSLRLSCAASGNISFSYMGWYRQAPGKEREFVATISIGTITYYADSVKGRFTISRDNAKNTVYLQMNSLKPEDTAVYYCAAYSYDDTGGYARGTGSHYYWGQGTQVTVSS

SEQ ID NO: 6247 - protein, 115 aa, Artificial Sequence
  Chemically Synthesized
QVQLQESGGGLVQAGGSLRLSCAASGNISALPDMGWYRQAPGKERELVAAITPGTITYYADSVKGRFTISRDNAKNTVYLQMNSLKPEDTAVYYCAVDGDVHYYWGQGTQVTVSS

SEQ ID NO: 6248 - protein, 122 aa, Artificial Sequence
  Chemically Synthesized
QVQLQESGGGLVQAGGSLRLSCAASGYISVDPFMGWYRQAPGKEREFVATINTGGNTYYADSVKGRFTISRDNAKNTVYLQMNSLKPEDTAVYYCAVVQYHLTYARYYHVYWGQGTQVTVSS

SEQ ID NO: 6249 - protein, 122 aa, Artificial Sequence
  Chemically Synthesized
QVQLQESGGGLVQAGGSLRLSCAASGYIFFYNAMGWYRQAPGKERELVASIATGTITYYADSVKGRFTISRDNAKNTVYLQMNSLKPEDTAVYYCAVYRDDTLDYYDYHIYWGQGTQVTVSS

SEQ ID NO: 6250 - protein, 116 aa, Artificial Sequence
  Chemically Synthesized
QVQLQESGGGLVQAGGSLRLSCAASGTISRPRVMGWYRQAPGKEREFVATIGTGANTYYADSVKGRFTISRDNAKNTVYLQMNSLKPEDTAVYYCAVGGTIRYDYWGQGTQVTVSS

SEQ ID NO: 6251 - protein, 125 aa, Artificial Sequence
  Chemically Synthesized
QVQLQESGGGLVQAGGSLRLSCAASGNILVTTMGWYRQAPGKEREFVAAISAGTTTYYADSVKGRFTISRDNAKNTVYLQMNSLKPEDTAVYYCAVDLYYYYFRLYYLDYAFVYWGQGTQVTVSS

SEQ ID NO: 6252 - protein, 126 aa, Artificial Sequence
  Chemically Synthesized
QVQLQESGGGLVQAGGSLRLSCAASGYISDTWRMGWYRQAPGKEREFVATINGGSTTYYADSVKGRFTISRDNAKNTVYLQMNSLKPEDTAVYYCAVYWDRQGDPEQDDVARYDYWGQGTQVTVSS

SEQ ID NO: 6253 - protein, 112 aa, Artificial Sequence
  Chemically Synthesized
QVQLQESGGGLVQAGGSLRLSCAASGTISTRNSMGWYRQAPGKERELVATITYGTITNYADSVKGRFTISRDNAKNTVYLQMNSLKPEDTAVYYCAAYLSYWGQGTQVTVSS

SEQ ID NO: 6254 - protein, 118 aa, Artificial Sequence
  Chemically Synthesized
QVQLQESGGGLVQAGGSLRLSCAASGTISATSDMGWYRQAPGKEREFVASIGHGAITYYADSVKGRFTISRDNAKNTVYLQMNSLKPEDTAVYYCAADTPYQTDHLYWGQGTQVTVSS

SEQ ID NO: 6255 - protein, 118 aa, Artificial Sequence
  Chemically Synthesized
QVQLQESGGGLVQAGGSLRLSCAASGNISWGRVMGWYRQAPGKERELVASISWGGSTYYADSVKGRFTISRDNAKNTVYLQMNSLKPEDTAVYYCAAWSYWRARLGYWGQGTQVTVSS

SEQ ID NO: 6256 - protein, 118 aa, Artificial Sequence
  Chemically Synthesized
QVQLQESGGGLVQAGGSLRLSCAASGNISYRYIMGWYRQAPGKEREFVATINVGTTTNYADSVKGRFTISRDNAKNTVYLQMNSLKPEDTAVYYCAVSNDYGAAYYYWGQGTQVTVSS

SEQ ID NO: 6257 - protein, 118 aa, Artificial Sequence
  Chemically Synthesized
QVQLQESGGGLVQAGGSLRLSCAASGTIFYFWTMGWYRQAPGKERELVATITYGTNTYYADSVKGRFTISRDNAKNTVYLQMNSLKPEDTAVYYCAVKLTGLWYHAYWGQGTQVTVSS

SEQ ID NO: 6258 - protein, 122 aa, Artificial Sequence
  Chemically Synthesized
QVQLQESGGGLVQAGGSLRLSCAASGSIFSWTQMGWYRQAPGKERELVATISYGGSTNYADSVKGRFTISRDNAKNTVYLQMNSLKPEDTAVYYCAAGWGGITLRGVWHKYWGQGTQVTVSS

SEQ ID NO: 6259 - protein, 118 aa, Artificial Sequence
  Chemically Synthesized
QVQLQESGGGLVQAGGSLRLSCAASGTIFDAYTMGWYRQAPGKERELVAAIAFGAITNYADSVKGRFTISRDNAKNTVYLQMNSLKPEDTAVYYCAVRYWPGIAHFYWGQGTQVTVSS

SEQ ID NO: 6260 - protein, 109 aa, Artificial Sequence
  Chemically Synthesized
QVQLQESGGGLVQAGGSLRLSCAASGSISDSYYMGWYRQAPGKERELVAAITSGTNTNYADSVKGRFTISRDNAKNTVYLQMNSLKPEDTAVYYCAMYWGQGTQVTVSS

SEQ ID NO: 6261 - protein, 120 aa, Artificial Sequence
  Chemically Synthesized
QVQLQESGGGLVQAGGSLRLSCAASGTISADDSMGWYRQAPGKERELVATIGPGTSTNYADSVKGRFTISRDNAKNTVYLQMNSLKPEDTAVYYCAAVGTVTGISCSMYWGQGTQVTVSS

SEQ ID NO: 6262 - protein, 126 aa, Artificial Sequence
  Chemically Synthesized
QVQLQESGGGLVQAGGSLRLSCAASGYISWSPSMGWYRQAPGKERELVAGIGLGTSTNYADSVKGRFTISRDNAKNTVYLQMNSLKPEDTAVYYCAVPIQRLYDVSPTGVSLFYYWGQGTQVTVSS

SEQ ID NO: 6263 - protein, 120 aa, Artificial Sequence
  Chemically Synthesized
QVQLQESGGGLVQAGGSLRLSCAASGSISLYYMGWYRQAPGKEREFVATIDGGGSTYYADSVKGRFTISRDNAKNTVYLQMNSLKPEDTAVYYCAVHGIESGFTRSVMYWGQGTQVTVSS

SEQ ID NO: 6264 - protein, 117 aa, Artificial Sequence
  Chemically Synthesized
QVQLQESGGGLVQAGGSLRLSCAASGTISVSDDMGWYRQAPGKERELVATITDGGITYYADSVKGRFTISRDNAKNTVYLQMNSLKPEDTAVYYCAAHFKSSTEHYWGQGTQVTVSS

SEQ ID NO: 6265 - protein, 117 aa, Artificial Sequence
  Chemically Synthesized
QVQLQESGGGLVQAGGSLRLSCAASGSIFDYYYMGWYRQAPGKEREFVATIGNGTTTYYADSVKGRFTISRDNAKNTVYLQMNSLKPEDTAVYYCAANSWTNRVIYWGQGTQVTVSS

SEQ ID NO: 6266 - protein, 117 aa, Artificial Sequence
  Chemically Synthesized
QVQLQESGGGLVQAGGSLRLSCAASGYIFPTYRMGWYRQAPGKERELVAGINTGANTYYADSVKGRFTISRDNAKNTVYLQMNSLKPEDTAVYYCAAGVQISLNFYWGQGTQVTVSS

SEQ ID NO: 6267 - protein, 116 aa, Artificial Sequence
  Chemically Synthesized
QVQLQESGGGLVQAGGSLRLSCAASGYIFVNYFMGWYRQAPGKEREFVSGMLVVVPYADSVKGRFTISRDNAKNTVYLQMNSLKPEDTAVYYCAVPYYIRDSYYYWGQGTQVTVSS

SEQ ID NO: 6268 - protein, 110 aa, Artificial Sequence
  Chemically Synthesized
QVQLQESGGGLVQAGGSLRLSCAASGNISSVLMGWYRQAPGKERELVASIADGANTNYADSVKGRFTISRDNAKNTVYLQMNSLKPEDTAVYYCAAYLYWGQGTQVTVSS

SEQ ID NO: 6269 - protein, 118 aa, Artificial Sequence
  Chemically Synthesized
QVQLQESGGGLVQAGGSLRLSCAASGYISDTVGMGWYRQAPGKERELVAGISRGGTTNYADSVKGRFTISRDNAKNTVYLQMNSLKPEDTAVYYCAVYYIGWGPHYYWGQGTQVTVSS

SEQ ID NO: 6270 - protein, 122 aa, Artificial Sequence
  Chemically Synthesized
QVQLQESGGGLVQAGGSLRLSCAASGNIFTPDYMGWYRQAPGKEREFVAGIDPGSNTNYADSVKGRFTISRDNAKNTVYLQMNSLKPEDTAVYYCAAPDYYPSSVYDWYAYWGQGTQVTVSS

SEQ ID NO: 6271 - protein, 118 aa, Artificial Sequence
  Chemically Synthesized
QVQLQESGGGLVQAGGSLRLSCAASGNISGLGDMGWYRQAPGKEREFVAAIDIGGITNYADSVKGRFTISRDNAKNTVYLQMNSLKPEDTAVYYCAAYVDPGYDLAYWGQGTQVTVSS

SEQ ID NO: 6272 - protein, 118 aa, Artificial Sequence
  Chemically Synthesized
QVQLQESGGGLVQAGGSLRLSCAASGNISRRVPMGWYRQAPGKERELVAAINVGATTYYADSVKGRFTISRDNAKNTVYLQMNSLKPEDTAVYYCAASYAWYDQHTYWGQGTQVTVSS

SEQ ID NO: 6273 - protein, 122 aa, Artificial Sequence
  Chemically Synthesized
QVQLQESGGGLVQAGGSLRLSCAASGTISGVTDMGWYRQAPGKERELVATINDGATTYYADSVKGRFTISRDNAKNTVYLQMNSLKPEDTAVYYCAVYWSDDTVATAPHSYWGQGTQVTVSS

SEQ ID NO: 6274 - protein, 118 aa, Artificial Sequence
  Chemically Synthesized
QVQLQESGGGLVQAGGSLRLSCAASGSISDDFTMGWYRQAPGKERELVASIGPGAITYYADSVKGRFTISRDNAKNTVYLQMNSLKPEDTAVYYCAAVTAGPPYLGYWGQGTQVTVSS

SEQ ID NO: 6275 - protein, 124 aa, Artificial Sequence
  Chemically Synthesized
QVQLQESGGGLVQAGGSLRLSCAASGTIFSTSMGWYRQAPGKEREFVAAIDSVVVPYADSVKGRFTISRDNAKNTVYLQMNSLKPEDTAVYYCAVKTYYGVRLSTYQPWNHIYWGQGTQVTVSS

SEQ ID NO: 6276 - protein, 119 aa, Artificial Sequence
  Chemically Synthesized
QVQLQESGGGLVQAGGSLRLSCAASGYISDDKTAMGWYRQAPGKERELVAAIDLGGNTNYADSVKGRFTISRDNAKNTVYLQMNSLKPEDTAVYYCAVVTRIRGTLYYWGQGTQVTVSS

SEQ ID NO: 6277 - protein, 118 aa, Artificial Sequence
  Chemically Synthesized
QVQLQESGGGLVQAGGSLRLSCAASGNIFWPSEMGWYRQAPGKEREFVATIARGTTTNYADSVKGRFTISRDNAKNTVYLQMNSLKPEDTAVYYCAAWYYDAYVHGYWGQGTQVTVSS

SEQ ID NO: 6278 - protein, 126 aa, Artificial Sequence
  Chemically Synthesized
QVQLQESGGGLVQAGGSLRLSCAASGSIFYSPYMGWYRQAPGKERELVATIGTGSSTNYADSVKGRFTISRDNAKNTVYLQMNSLKPEDTAVYYCAVVHLDKGGSPATDDEYHGYWGQGTQVTVSS

SEQ ID NO: 6279 - protein, 111 aa, Artificial Sequence
  Chemically Synthesized
QVQLQESGGGLVQAGGSLRLSCAASGTISTPYPMGWYRQAPGKERELVASIGQGTSTYYADSVKGRFTISRDNAKNTVYLQMNSLKPEDTAVYYCAVTFYWGQGTQVTVSS

SEQ ID NO: 6280 - protein, 118 aa, Artificial Sequence
  Chemically Synthesized
QVQLQESGGGLVQAGGSLRLSCAASGYIFPVIYMGWYRQAPGKERELVAGINPGSSTNYADSVKGRFTISRDNAKNTVYLQMNSLKPEDTAVYYCAAGIYTNDRHIYWGQGTQVTVSS

SEQ ID NO: 6281 - protein, 118 aa, Artificial Sequence
  Chemically Synthesized
QVQLQESGGGLVQAGGSLRLSCAASGTIFTRSGMGWYRQAPGKEREFVAGISRGSITNYADSVKGRFTISRDNAKNTVYLQMNSLKPEDTAVYYCAVDYTPQQDYDYWGQGTQVTVSS

SEQ ID NO: 6282 - protein, 118 aa, Artificial Sequence
  Chemically Synthesized
QVQLQESGGGLVQAGGSLRLSCAASGNISPTATMGWYRQAPGKERELVAGITQGTNTYYADSVKGRFTISRDNAKNTVYLQMNSLKPEDTAVYYCAAGADSYRAHGYWGQGTQVTVSS

SEQ ID NO: 6283 - protein, 125 aa, Artificial Sequence
  Chemically Synthesized
QVQLQESGGGLVQAGGSLRLSCAASGNIFQYVQMGWYRQAPGKERELVAAIGKGTSTNYADSVKGRFTISRDNAKNTVYLQMNSLKPEDTAVYYCAAGLSGPIQSTSYWTTRYYWGQGTQVTVSS

SEQ ID NO: 6284 - protein, 117 aa, Artificial Sequence
  Chemically Synthesized
QVQLQESGGGLVQAGGSLRLSCAASGNISWDRYMGWYRQAPGKEREFVATITSGGNTNYADSVKGRFTISRDNAKNTVYLQMNSLKPEDTAVYYCAADQARGYTYYWGQGTQVTVSS

SEQ ID NO: 6285 - protein, 115 aa, Artificial Sequence
  Chemically Synthesized
QVQLQESGGGLVQAGGSLRLSCAASGSISPPVTMGWYRQAPGKERELVATISGGGTTYYADSVKGRFTISRDNAKNTVYLQMNSLKPEDTAVYYCAVLVRTTIYWGQGTQVTVSS

SEQ ID NO: 6286 - protein, 121 aa, Artificial Sequence
  Chemically Synthesized
QVQLQESGGGLVQAGGSLRLSCAASGNIFVGRTMGWYRQAPGKERELVASIGIVVVPYADSVKGRFTISRDNAKNTVYLQMNSLKPEDTAVYYCAAKWQVDGYRGREHSYWGQGTQVTVSS

SEQ ID NO: 6287 - protein, 111 aa, Artificial Sequence
  Chemically Synthesized
QVQLQESGGGLVQAGGSLRLSCAASGYISKGRTMGWYRQAPGKERELVASPYADSVKGRFTISRDNAKNTVYLQMNSLKPEDTAVYYCAAVYLVSWSYVYWGQGTQVTVSS

SEQ ID NO: 6288 - protein, 122 aa, Artificial Sequence
  Chemically Synthesized
QVQLQESGGGLVQAGGSLRLSCAASGTISQLEVMGWYRQAPGKEREFVAGISGGTITNYADSVKGRFTISRDNAKNTVYLQMNSLKPEDTAVYYCAAGGIQWNSPYPYHAYWGQGTQVTVSS

SEQ ID NO: 6289 - protein, 126 aa, Artificial Sequence
  Chemically Synthesized
QVQLQESGGGLVQAGGSLRLSCAASGYISYYDTMGWYRQAPGKERELVAGIGRGGSTYYADSVKGRFTISRDNAKNTVYLQMNSLKPEDTAVYYCAAAYYTRVNALYYPHGIHDYWGQGTQVTVSS

SEQ ID NO: 6290 - protein, 118 aa, Artificial Sequence
  Chemically Synthesized
QVQLQESGGGLVQAGGSLRLSCAASGNISQDYYMGWYRQAPGKERELVASINAGGSTNYADSVKGRFTISRDNAKNTVYLQMNSLKPEDTAVYYCAVLADPYLEHDYWGQGTQVTVSS

SEQ ID NO: 6291 - protein, 118 aa, Artificial Sequence
  Chemically Synthesized
QVQLQESGGGLVQAGGSLRLSCAASGTISYTRPMGWYRQAPGKEREFVAAISRGASTNYADSVKGRFTISRDNAKNTVYLQMNSLKPEDTAVYYCAATVGPSVPHYYWGQGTQVTVSS

SEQ ID NO: 6292 - protein, 122 aa, Artificial Sequence
  Chemically Synthesized
QVQLQESGGGLVQAGGSLRLSCAASGTISDYYPMGWYRQAPGKERELVAAITYGGSTNYADSVKGRFTISRDNAKNTVYLQMNSLKPEDTAVYYCAVVGSFYEFDPDYLYYWGQGTQVTVSS

SEQ ID NO: 6293 - protein, 111 aa, Artificial Sequence
  Chemically Synthesized
QVQLQESGGGLVQAGGSLRLSCAASGNISTYHTMGWYRQAPGKEREFVAYLYADSVKGRFTISRDNAKNTVYLQMNSLKPEDTAVYYCAVWYLEPTTHPYWGQGTQVTVSS

SEQ ID NO: 6294 - protein, 117 aa, Artificial Sequence
  Chemically Synthesized
QVQLQESGGGLVQAGGSLRLSCAASGTISDFSMGWYRQAPGKERELVAGIGEGAITNYADSVKGRFTISRDNAKNTVYLQMNSLKPEDTAVYYCAVYIYADTDYPYWGQGTQVTVSS

SEQ ID NO: 6295 - protein, 122 aa, Artificial Sequence
  Chemically Synthesized
QVQLQESGGGLVQAGGSLRLSCAASGNIFDGFYMGWYRQAPGKEREFVASIDGGTTTNYADSVKGRFTISRDNAKNTVYLQMNSLKPEDTAVYYCAVIYLTDGDDYAGYTYWGQGTQVTVSS

SEQ ID NO: 6296 - protein, 118 aa, Artificial Sequence
  Chemically Synthesized
QVQLQESGGGLVQAGGSLRLSCAASGSIFGYTYMGWYRQAPGKEREFVATIDQGSNTNYADSVKGRFTISRDNAKNTVYLQMNSLKPEDTAVYYCAAELYTRQNFAYWGQGTQVTVSS

SEQ ID NO: 6297 - protein, 118 aa, Artificial Sequence
  Chemically Synthesized
QVQLQESGGGLVQAGGSLRLSCAASGSIFYDAYMGWYRQAPGKERELVATISLGSITNYADSVKGRFTISRDNAKNTVYLQMNSLKPEDTAVYYCAAGYTLSRYHSYWGQGTQVTVSS

SEQ ID NO: 6298 - protein, 122 aa, Artificial Sequence
  Chemically Synthesized
QVQLQESGGGLVQAGGSLRLSCAASGTIFLPSIMGWYRQAPGKERELVASIGTGANTYYADSVKGRFTISRDNAKNTVYLQMNSLKPEDTAVYYCAVGHSFDGAVGHRYPYWGQGTQVTVSS

SEQ ID NO: 6299 - protein, 118 aa, Artificial Sequence
  Chemically Synthesized
QVQLQESGGGLVQAGGSLRLSCAASGTIFARDDMGWYRQAPGKERELVATIASGASTYYADSVKGRFTISRDNAKNTVYLQMNSLKPEDTAVYYCAAYNIRSDAFIYWGQGTQVTVSS

SEQ ID NO: 6300 - protein, 122 aa, Artificial Sequence
  Chemically Synthesized
QVQLQESGGGLVQAGGSLRLSCAASGSISRPYDMGWYRQAPGKERELVAAINYGGNTNYADSVKGRFTISRDNAKNTVYLQMNSLKPEDTAVYYCAASRLYVYHDDAGHQYWGQGTQVTVSS

SEQ ID NO: 6301 - protein, 126 aa, Artificial Sequence
  Chemically Synthesized
QVQLQESGGGLVQAGGSLRLSCAASGSISDDIVMGWYRQAPGKERELVASIDYGGSTNYADSVKGRFTISRDNAKNTVYLQMNSLKPEDTAVYYCAVGGQYLYHEDADVDYLLVYWGQGTQVTVSS

SEQ ID NO: 6302 - protein, 118 aa, Artificial Sequence
  Chemically Synthesized
QVQLQESGGGLVQAGGSLRLSCAASGTISYGYIMGWYRQAPGKERELVATITAGGNTNYADSVKGRFTISRDNAKNTVYLQMNSLKPEDTAVYYCAVWWADDLSFTYWGQGTQVTVSS

SEQ ID NO: 6303 - protein, 118 aa, Artificial Sequence
  Chemically Synthesized
QVQLQESGGGLVQAGGSLRLSCAASGNISSSTSMGWYRQAPGKERELVATIAFGGTTNYADSVKGRFTISRDNAKNTVYLQMNSLKPEDTAVYYCAADSPIQLDLIYWGQGTQVTVSS

SEQ ID NO: 6304 - protein, 118 aa, Artificial Sequence
  Chemically Synthesized
QVQLQESGGGLVQAGGSLRLSCAASGYISSDASMGWYRQAPGKEREFVATIGNGAITYYADSVKGRFTISRDNAKNTVYLQMNSLKPEDTAVYYCAADYVEPSAYYYWGQGTQVTVSS

SEQ ID NO: 6305 - protein, 122 aa, Artificial Sequence
  Chemically Synthesized
QVQLQESGGGLVQAGGSLRLSCAASGSISPDDQMGWYRQAPGKERELVASISSGSTTYYADSVKGRFTISRDNAKNTVYLQMNSLKPEDTAVYYCAAVGDTLRNLDNSHAYWGQGTQVTVSS

SEQ ID NO: 6306 - protein, 122 aa, Artificial Sequence
  Chemically Synthesized
QVQLQESGGGLVQAGGSLRLSCAASGNISQRWSMGWYRQAPGKEREFVAGIGRGGNTYYADSVKGRFTISRDNAKNTVYLQMNSLKPEDTAVYYCAAGARRWYYGPGLHYYWGQGTQVTVSS

SEQ ID NO: 6307 - protein, 118 aa, Artificial Sequence
  Chemically Synthesized
QVQLQESGGGLVQAGGSLRLSCAASGYISALYYMGWYRQAPGKEREFVASIGYGASTNYADSVKGRFTISRDNAKNTVYLQMNSLKPEDTAVYYCAAYRTVVYKHTYWGQGTQVTVSS

SEQ ID NO: 6308 - protein, 122 aa, Artificial Sequence
  Chemically Synthesized
QVQLQESGGGLVQAGGSLRLSCAASGNIFYDVVMGWYRQAPGKEREFVATIAPGGTTNYADSVKGRFTISRDNAKNTVYLQMNSLKPEDTAVYYCAAKYRLYGWANHGHGYWGQGTQVTVSS

SEQ ID NO: 6309 - protein, 122 aa, Artificial Sequence
  Chemically Synthesized
QVQLQESGGGLVQAGGSLRLSCAASGYISDSYNMGWYRQAPGKERELVAGIGIGGITYYADSVKGRFTISRDNAKNTVYLQMNSLKPEDTAVYYCAVDNDIVVWRSDYLAYWGQGTQVTVSS

SEQ ID NO: 6310 - protein, 125 aa, Artificial Sequence
  Chemically Synthesized
QVQLQESGGGLVQAGGSLRLSCAASGYIFLDNHMGWYRQAPGKEREFVAGITGGATTYYADSVKGRFTISRDNAKNTVYLQMNSLKPEDTAVYYCAVHFEYDGDKVNLDDGHPYWGQGTQVTVSS

SEQ ID NO: 6311 - protein, 118 aa, Artificial Sequence
  Chemically Synthesized
QVQLQESGGGLVQAGGSLRLSCAASGSISGLYWMGWYRQAPGKEREFVASISAGGSTNYADSVKGRFTISRDNAKNTVYLQMNSLKPEDTAVYYCAVGVASYRPYGYWGQGTQVTVSS

SEQ ID NO: 6312 - protein, 117 aa, Artificial Sequence
  Chemically Synthesized
QVQLQESGGGLVQAGGSLRLSCAASGSISTDRRMGWYRQAPGKEREFVAVLLTVLLPYADSVKGRFTISRDNAKNTVYLQMNSLKPEDTAVYYCAVIDIRSKDHGYWGQGTQVTVSS

SEQ ID NO: 6313 - protein, 116 aa, Artificial Sequence
  Chemically Synthesized
QVQLQESGGGLVQAGGSLRLSCAASGSIFITDYMGWYRQAPGKERELVASIGTGASTNYADSVKGRFTISRDNAKNTVYLQMNSLKPEDTAVYYCAVTGGLLSMYWGQGTQVTVSS

SEQ ID NO: 6314 - protein, 122 aa, Artificial Sequence
  Chemically Synthesized
QVQLQESGGGLVQAGGSLRLSCAASGYIFGGHSMGWYRQAPGKEREFVASISSGGITNYADSVKGRFTISRDNAKNTVYLQMNSLKPEDTAVYYCAVSDTRGPWYRWELRYWGQGTQVTVSS

SEQ ID NO: 6315 - protein, 121 aa, Artificial Sequence
  Chemically Synthesized
QVQLQESGGGLVQAGGSLRLSCAASGYISLWNAMGWYRQAPGKERELVAAISGWYYLYADSVKGRFTISRDNAKNTVYLQMNSLKPEDTAVYYCAAYSQDYAQDQGAHRYWGQGTQVTVSS

SEQ ID NO: 6316 - protein, 126 aa, Artificial Sequence
  Chemically Synthesized
QVQLQESGGGLVQAGGSLRLSCAASGYISDLFVMGWYRQAPGKEREFVAAIAGGTITNYADSVKGRFTISRDNAKNTVYLQMNSLKPEDTAVYYCAASQTALFEYQYADSRDLDYWGQGTQVTVSS

SEQ ID NO: 6317 - protein, 118 aa, Artificial Sequence
  Chemically Synthesized
QVQLQESGGGLVQAGGSLRLSCAASGYIFRRGTMGWYRQAPGKERELVAAITKGSTTYYADSVKGRFTISRDNAKNTVYLQMNSLKPEDTAVYYCAAYYGQSYQHRYWGQGTQVTVSS

SEQ ID NO: 6318 - protein, 122 aa, Artificial Sequence
  Chemically Synthesized
QVQLQESGGGLVQAGGSLRLSCAASGTIFGDERMGWYRQAPGKEREFVAAISDGGSTYYADSVKGRFTISRDNAKNTVYLQMNSLKPEDTAVYYCAAAFLADAEVNTYHLYWGQGTQVTVSS

SEQ ID NO: 6319 - protein, 126 aa, Artificial Sequence
  Chemically Synthesized
QVQLQESGGGLVQAGGSLRLSCAASGNISVRRNMGWYRQAPGKEREFVATIARGSNTNYADSVKGRFTISRDNAKNTVYLQMNSLKPEDTAVYYCAVGFRSSVYLYRDSQTRHTYWGQGTQVTVSS

SEQ ID NO: 6320 - protein, 109 aa, Artificial Sequence
  Chemically Synthesized
QVQLQESGGGLVQAGGSLRLSCAASGNIFADVGMGWYRQAPGKERELVAYADSVKGRFTISRDNAKNTVYLQMNSLKPEDTAVYYCAADDRTYKRLDYWGQGTQVTVSS

SEQ ID NO: 6321 - protein, 119 aa, Artificial Sequence
  Chemically Synthesized
QVQLQESGGGLVQAGGSLRLSCAASGTIFVDGQMGWYRQAPGKERELVASINSGGNTNYADSVKGRFTISRDNAKNTVYLQMNSLKPEDTAVYYCATTVTLLTVRSIYWGQGTQVTVSS

SEQ ID NO: 6322 - protein, 122 aa, Artificial Sequence
  Chemically Synthesized
QVQLQESGGGLVQAGGSLRLSCAASGNISLFSNMGWYRQAPGKERELVASIDEGGSTNYADSVKGRFTISRDNAKNTVYLQMNSLKPEDTAVYYCAAGWYRAGDVYGYFEYWGQGTQVTVSS

SEQ ID NO: 6323 - protein, 117 aa, Artificial Sequence
  Chemically Synthesized
QVQLQESGGGLVQAGGSLRLSCAASGYISNRDDMGWYRQAPGKEREFVASITYGGTTNYADSVKGRFTISRDNAKNTVYLQMNSLKPEDTAVYYCAVDSLLKTIFYWGQGTQVTVSS

SEQ ID NO: 6324 - protein, 126 aa, Artificial Sequence
  Chemically Synthesized
QVQLQESGGGLVQAGGSLRLSCAASGSIFWSLGMGWYRQAPGKERELVATIGKGASTYYADSVKGRFTISRDNAKNTVYLQMNSLKPEDTAVYYCAVLISGLNSDERVYQYSYAYWGQGTQVTVSS

SEQ ID NO: 6325 - protein, 116 aa, Artificial Sequence
  Chemically Synthesized
QVQLQESGGGLVQAGGSLRLSCAASGYISPQAFMGWYRQAPGKERELVASIADGTITYYADSVKGRFTISRDNAKNTVYLQMNSLKPEDTAVYYCAVDDSKGLGYWGQGTQVTVSS

SEQ ID NO: 6326 - protein, 118 aa, Artificial Sequence
  Chemically Synthesized
QVQLQESGGGLVQAGGSLRLSCAASGTIFWPIYMGWYRQAPGKEREFVAAISVGSSTYYADSVKGRFTISRDNAKNTVYLQMNSLKPEDTAVYYCAVPSSTYRDFYYWGQGTQVTVSS

SEQ ID NO: 6327 - protein, 117 aa, Artificial Sequence
  Chemically Synthesized
QVQLQESGGGLVQAGGSLRLSCAASGSIFPHDPMGWYRQAPGKERELVAGIAGGTNTNYADSVKGRFTISRDNAKNTVYLQMNSLKPEDTAVYYCAVTRQSLFTMYWGQGTQVTVSS

SEQ ID NO: 6328 - protein, 122 aa, Artificial Sequence
  Chemically Synthesized
QVQLQESGGGLVQAGGSLRLSCAASGSISPADTMGWYRQAPGKERELVATIDRGGTTYYADSVKGRFTISRDNAKNTVYLQMNSLKPEDTAVYYCAVPSDVTGIDYTAHLYWGQGTQVTVSS

SEQ ID NO: 6329 - protein, 118 aa, Artificial Sequence
  Chemically Synthesized
QVQLQESGGGLVQAGGSLRLSCAASGYIFGRDYMGWYRQAPGKEREFVASIAVGASTNYADSVKGRFTISRDNAKNTVYLQMNSLKPEDTAVYYCAADTGYPYLHKYWGQGTQVTVSS

SEQ ID NO: 6330 - protein, 126 aa, Artificial Sequence
  Chemically Synthesized
QVQLQESGGGLVQAGGSLRLSCAASGTISRGQGMGWYRQAPGKERELVASIALGTTTYYADSVKGRFTISRDNAKNTVYLQMNSLKPEDTAVYYCAARWYYYPWSWLIYGVYYAYWGQGTQVTVSS

SEQ ID NO: 6331 - protein, 121 aa, Artificial Sequence
  Chemically Synthesized
QVQLQESGGGLVQAGGSLRLSCAASGYISVGLHMGWYRQAPGKEREFVAVLVSVLLPYADSVKGRFTISRDNAKNTVYLQMNSLKPEDTAVYYCAVNLAEFGLVAYWHDYWGQGTQVTVSS

SEQ ID NO: 6332 - protein, 124 aa, Artificial Sequence
  Chemically Synthesized
QVQLQESGGGLVQAGGSLRLSCAASGTISGRYIMGWYRQAPGKERELVAAISVGGNTYYADSVKGRFTISRDNAKNTVYLQMNSLKPEDTAVYYCAAYRIIRRRYNTDSPLVYWGQGTQVTVSS

SEQ ID NO: 6333 - protein, 118 aa, Artificial Sequence
  Chemically Synthesized
QVQLQESGGGLVQAGGSLRLSCAASGSISQPYVMGWYRQAPGKEREFVAAIARGGSTYYADSVKGRFTISRDNAKNTVYLQMNSLKPEDTAVYYCAVIVYNATWHYYWGQGTQVTVSS

SEQ ID NO: 6334 - protein, 118 aa, Artificial Sequence
  Chemically Synthesized
QVQLQESGGGLVQAGGSLRLSCAASGSIFADPQMGWYRQAPGKEREFVAGINGGANTNYADSVKGRFTISRDNAKNTVYLQMNSLKPEDTAVYYCAVYAVKNGVLVYWGQGTQVTVSS

SEQ ID NO: 6335 - protein, 122 aa, Artificial Sequence
  Chemically Synthesized
QVQLQESGGGLVQAGGSLRLSCAASGSIFRVKYMGWYRQAPGKEREFVATIAYGTITYYADSVKGRFTISRDNAKNTVYLQMNSLKPEDTAVYYCAAAIVTDYRYWGSFVYWGQGTQVTVSS

SEQ ID NO: 6336 - protein, 118 aa, Artificial Sequence
  Chemically Synthesized
QVQLQESGGGLVQAGGSLRLSCAASGTISVGDRMGWYRQAPGKEREFVASITVGGTTNYADSVKGRFTISRDNAKNTVYLQMNSLKPEDTAVYYCAVTNDDDTYHDYWGQGTQVTVSS

SEQ ID NO: 6337 - protein, 121 aa, Artificial Sequence
  Chemically Synthesized
QVQLQESGGGLVQAGGSLRLSCAASGSISISGYMGWYRQAPGKERELVAAINGGTSTNYADSVKGRFTISRDNAKNTVYLQMNSLKPEDTAVYYCAVTWGQGSAEYSHTYWGQGTQVTVSS

SEQ ID NO: 6338 - protein, 111 aa, Artificial Sequence
  Chemically Synthesized
QVQLQESGGGLVQAGGSLRLSCAASGNILFLLMGWYRQAPGKEREFVASISTGSTPYADSVKGRFTISRDNAKNTVYLQMNSLKPEDTAVYYCAAKDHGYWGQGTQVTVSS

SEQ ID NO: 6339 - protein, 121 aa, Artificial Sequence
  Chemically Synthesized
QVQLQESGGGLVQAGGSLRLSCAASGYIFVRLMGWYRQAPGKERELVASIAQGTNTYYADSVKGRFTISRDNAKNTVYLQMNSLKPEDTAVYYCAVIPAGYLQQHLDLWYWGQGTQVTVSS

SEQ ID NO: 6340 - protein, 118 aa, Artificial Sequence
  Chemically Synthesized
QVQLQESGGGLVQAGGSLRLSCAASGTIFVYSYMGWYRQAPGKEREFVATIATGTITYYADSVKGRFTISRDNAKNTVYLQMNSLKPEDTAVYYCAVWSFVPAYHPYWGQGTQVTVSS

SEQ ID NO: 6341 - protein, 122 aa, Artificial Sequence
  Chemically Synthesized
QVQLQESGGGLVQAGGSLRLSCAASGTIFSGDGMGWYRQAPGKERELVATISNGTTTYYADSVKGRFTISRDNAKNTVYLQMNSLKPEDTAVYYCAVERGAEPIHNENYEYWGQGTQVTVSS

SEQ ID NO: 6342 - protein, 116 aa, Artificial Sequence
  Chemically Synthesized
QVQLQESGGGLVQAGGSLRLSCAASGTISDVTSMGWYRQAPGKEREFVATINTGSNTNYADSVKGRFTISRDNAKNTVYLQMNSLKPEDTAVYYCAGFTTVGYLYWGQGTQVTVSS

SEQ ID NO: 6343 - protein, 118 aa, Artificial Sequence
  Chemically Synthesized
QVQLQESGGGLVQAGGSLRLSCAASGSISYFSRMGWYRQAPGKEREFVASIAYGANTNYADSVKGRFTISRDNAKNTVYLQMNSLKPEDTAVYYCAAGHLLLPWHYYWGQGTQVTVSS

SEQ ID NO: 6344 - protein, 118 aa, Artificial Sequence
  Chemically Synthesized
QVQLQESGGGLVQAGGSLRLSCAASGTIFGTGYMGWYRQAPGKEREFVAGISYGANTYYADSVKGRFTISRDNAKNTVYLQMNSLKPEDTAVYYCAVNYYNYHYLIYWGQGTQVTVSS

SEQ ID NO: 6345 - protein, 122 aa, Artificial Sequence
  Chemically Synthesized
QVQLQESGGGLVQAGGSLRLSCAASGNIFAGQYMGWYRQAPGKEREFVAGINYGGSTYYADSVKGRFTISRDNAKNTVYLQMNSLKPEDTAVYYCAAKPWAQAYRVHNYHYWGQGTQVTVSS

SEQ ID NO: 6346 - protein, 118 aa, Artificial Sequence
  Chemically Synthesized
QVQLQESGGGLVQAGGSLRLSCAASGNISDSLWMGWYRQAPGKEREFVATINYGAITNYADSVKGRFTISRDNAKNTVYLQMNSLKPEDTAVYYCAAQDHDGTYLRYWGQGTQVTVSS

SEQ ID NO: 6347 - protein, 117 aa, Artificial Sequence
  Chemically Synthesized
QVQLQESGGGLVQAGGSLRLSCAASGYISSDPYMGWYRQAPGKEREFVATIADGSTNYADSVKGRFTISRDNAKNTVYLQMNSLKPEDTAVYYCAAASVSYAPLGYWGQGTQVTVSS

SEQ ID NO: 6348 - protein, 118 aa, Artificial Sequence
  Chemically Synthesized
QVQLQESGGGLVQAGGSLRLSCAASGNISHARRMGWYRQAPGKERELVAGINRGASTNYADSVKGRFTISRDNAKNTVYLQMNSLKPEDTAVYYCAVGPYRIGRHHYWGQGTQVTVSS

SEQ ID NO: 6349 - protein, 118 aa, Artificial Sequence
  Chemically Synthesized
QVQLQESGGGLVQAGGSLRLSCAASGTIFDPRWMGWYRQAPGKERELVAAIGVGGTTYYADSVKGRFTISRDNAKNTVYLQMNSLKPEDTAVYYCAARNWIGSRFGYWGQGTQVTVSS

SEQ ID NO: 6350 - protein, 122 aa, Artificial Sequence
  Chemically Synthesized
QVQLQESGGGLVQAGGSLRLSCAASGNISVGVFMGWYRQAPGKEREFVAGITGGSNTYYADSVKGRFTISRDNAKNTVYLQMNSLKPEDTAVYYCAALHQRDDTQWVHHDYWGQGTQVTVSS

SEQ ID NO: 6351 - protein, 122 aa, Artificial Sequence
  Chemically Synthesized
QVQLQESGGGLVQAGGSLRLSCAASGNISHGYAMGWYRQAPGKEREFVAAISRGSSTYYADSVKGRFTISRDNAKNTVYLQMNSLKPEDTAVYYCAVAHVYYYSYAAGYRYWGQGTQVTVSS

SEQ ID NO: 6352 - protein, 118 aa, Artificial Sequence
  Chemically Synthesized
QVQLQESGGGLVQAGGSLRLSCAASGNIFALLVMGWYRQAPGKEREFVAAIGIGGTTNYADSVKGRFTISRDNAKNTVYLQMNSLKPEDTAVYYCAAYEDDREALLYWGQGTQVTVSS

SEQ ID NO: 6353 - protein, 111 aa, Artificial Sequence
  Chemically Synthesized
QVQLQESGGGLVQAGGSLRLSCAASGYIFGYQYMGWYRQAPGKERELVASIGSVVLPYADSVKGRFTISRDNAKNTVYLQMNSLKPEDTAVYYCAVSYVYWGQGTQVTVSS

SEQ ID NO: 6354 - protein, 126 aa, Artificial Sequence
  Chemically Synthesized
QVQLQESGGGLVQAGGSLRLSCAASGYISDYWVMGWYRQAPGKERELVATIAHGTNTNYADSVKGRFTISRDNAKNTVYLQMNSLKPEDTAVYYCAVYVDWGPRHPGDDRGGYGYWGQGTQVTVSS

SEQ ID NO: 6355 - protein, 121 aa, Artificial Sequence
  Chemically Synthesized
QVQLQESGGGLVQAGGSLRLSCAASGSISAIYSMGWYRQAPGKERELVATIAYGANTNYADSVKGRFTISRDNAKNTVYLQMNSLKPEDTAVYYCAADVYNIKTDSKYGYWGQGTQVTVSS

SEQ ID NO: 6356 - protein, 126 aa, Artificial Sequence
  Chemically Synthesized
QVQLQESGGGLVQAGGSLRLSCAASGSIFPGVTMGWYRQAPGKERELVAGIAQGSTTNYADSVKGRFTISRDNAKNTVYLQMNSLKPEDTAVYYCAAYYDYIQPGADRVVAGYGYWGQGTQVTVSS

SEQ ID NO: 6357 - protein, 125 aa, Artificial Sequence
  Chemically Synthesized
QVQLQESGGGLVQAGGSLRLSCAASGTISSVQYMGWYRQAPGKEREFVAAINRGGNTNYADSVKGRFTISRDNAKNTVYLQMNSLKPEDTAVYYCAAYTQYLSAHNEVGHGYGYWGQGTQVTVSS

SEQ ID NO: 6358 - protein, 126 aa, Artificial Sequence
  Chemically Synthesized
QVQLQESGGGLVQAGGSLRLSCAASGNIFAGPDMGWYRQAPGKEREFVAGIDSGSTTNYADSVKGRFTISRDNAKNTVYLQMNSLKPEDTAVYYCAAWQDTKSASPIARYYGYGYWGQGTQVTVSS

SEQ ID NO: 6359 - protein, 119 aa, Artificial Sequence
  Chemically Synthesized
QVQLQESGGGLVQAGGSLRLSCAASGSISSYYTMGWYRQAPGKEREFVASIAGGSTTNYADSVKGRFTISRDNAKNTVYLQMNSLKPEDTAVYYCAAWVDAGYYGGGYWGQGTQVTVSS

SEQ ID NO: 6360 - protein, 126 aa, Artificial Sequence
  Chemically Synthesized
QVQLQESGGGLVQAGGSLRLSCAASGTIFYSYTMGWYRQAPGKEREFVAGIGSGASTYYADSVKGRFTISRDNAKNTVYLQMNSLKPEDTAVYYCAVYVDLRPLTTHLVRYGHGYWGQGTQVTVSS

SEQ ID NO: 6361 - protein, 118 aa, Artificial Sequence
  Chemically Synthesized
QVQLQESGGGLVQAGGSLRLSCAASGTISGYRDMGWYRQAPGKERELVATITSGGNTNYADSVKGRFTISRDNAKNTVYLQMNSLKPEDTAVYYCAVYVFTPLFHAYWGQGTQVTVSS

SEQ ID NO: 6362 - protein, 126 aa, Artificial Sequence
  Chemically Synthesized
QVQLQESGGGLVQAGGSLRLSCAASGNISGRYYMGWYRQAPGKEREFVATIDYGGTTNYADSVKGRFTISRDNAKNTVYLQMNSLKPEDTAVYYCAAYLDGITDSESIYSYGFGYWGQGTQVTVSS

SEQ ID NO: 6363 - protein, 126 aa, Artificial Sequence
  Chemically Synthesized
QVQLQESGGGLVQAGGSLRLSCAASGYISTTSDMGWYRQAPGKERELVASIGDGSSTNYADSVKGRFTISRDNAKNTVYLQMNSLKPEDTAVYYCAAWNDFPDAAHPDARYGYGYWGQGTQVTVSS

SEQ ID NO: 6364 - protein, 126 aa, Artificial Sequence
  Chemically Synthesized
QVQLQESGGGLVQAGGSLRLSCAASGTISDLYSMGWYRQAPGKERELVATIATGSITNYADSVKGRFTISRDNAKNTVYLQMNSLKPEDTAVYYCAAYRDTRGDVGDYTLYGHGYWGQGTQVTVSS

SEQ ID NO: 6365 - protein, 126 aa, Artificial Sequence
  Chemically Synthesized
QVQLQESGGGLVQAGGSLRLSCAASGNIFEHANMGWYRQAPGKERELVASIGYGSSTYYADSVKGRFTISRDNAKNTVYLQMNSLKPEDTAVYYCAVYREQSHGGRSPYSYGFGYWGQGTQVTVSS

SEQ ID NO: 6366 - protein, 126 aa, Artificial Sequence
  Chemically Synthesized
QVQLQESGGGLVQAGGSLRLSCAASGNIFYGPRMGWYRQAPGKERELVASIDSGGTTNYADSVKGRFTISRDNAKNTVYLQMNSLKPEDTAVYYCAVSADRVGRYDPGVRYGYVYWGQGTQVTVSS

SEQ ID NO: 6367 - protein, 126 aa, Artificial Sequence
  Chemically Synthesized
QVQLQESGGGLVQAGGSLRLSCAASGNISRGNYMGWYRQAPGKERELVASITPGASTYYADSVKGRFTISRDNAKNTVYLQMNSLKPEDTAVYYCAAYYDVTYQGDGIYSTGYGYWGQGTQVTVSS

SEQ ID NO: 6368 - protein, 125 aa, Artificial Sequence
  Chemically Synthesized
QVQLQESGGGLVQAGGSLRLSCAASGSISYYAAMGWYRQAPGKERELVASIGRGTSTNYADSVKGRFTISRDNAKNTVYLQMNSLKPEDTAVYYCAVWYDEVEARYGLRYGFGYWGQGTQVTVSS

SEQ ID NO: 6369 - protein, 126 aa, Artificial Sequence
  Chemically Synthesized
QVQLQESGGGLVQAGGSLRLSCAASGNISRDETMGWYRQAPGKEREFVATIGSGGTTNYADSVKGRFTISRDNAKNTVYLQMNSLKPEDTAVYYCAVYWQRTVRYGAVQVVGHGYWGQGTQVTVSS

SEQ ID NO: 6370 - protein, 122 aa, Artificial Sequence
  Chemically Synthesized
QVQLQESGGGLVQAGGSLRLSCAASGSISQQSAMGWYRQAPGKEREFVAAINQGTSTNYADSVKGRFTISRDNAKNTVYLQMNSLKPEDTAVYYCAAVYSRYGDDVYGHGYWGQGTQVTVSS

SEQ ID NO: 6371 - protein, 123 aa, Artificial Sequence
  Chemically Synthesized
QVQLQESGGGLVQAGGSLRLSCAASGSIFYWPDMGWYRQAPGKERELVAGISPGSTTNYADSVKGRFTISRDNAKNTVYLQMNSLKPEDTAVYYCAAWYDTVNGDQRYGHGYWGQGTQVTVSS

SEQ ID NO: 6372 - protein, 126 aa, Artificial Sequence
  Chemically Synthesized
QVQLQESGGGLVQAGGSLRLSCAASGNIFRPAVMGWYRQAPGKEREFVAGISYGANTNYADSVKGRFTISRDNAKNTVYLQMNSLKPEDTAVYYCAVFVRRHQTPPNYTRLLHTYWGQGTQVTVSS

SEQ ID NO: 6373 - protein, 122 aa, Artificial Sequence
  Chemically Synthesized
QVQLQESGGGLVQAGGSLRLSCAASGTIFGREVMGWYRQAPGKEREFVASIGYGSNTYYADSVKGRFTISRDNAKNTVYLQMNSLKPEDTAVYYCAVWYQEWADHAYGYGYWGQGTQVTVSS

SEQ ID NO: 6374 - protein, 123 aa, Artificial Sequence
  Chemically Synthesized
QVQLQESGGGLVQAGGSLRLSCAASGSISSGAAMGWYRQAPGKEREFVAGINYGANTNYADSVKGRFTISRDNAKNTVYLQMNSLKPEDTAVYYCAAFFTRYNDLYSYGYSYWGQGTQVTVSS

SEQ ID NO: 6375 - protein, 118 aa, Artificial Sequence
  Chemically Synthesized
QVQLQESGGGLVQAGGSLRLSCAASGSIFRSGHMGWYRQAPGKEREFVAGIAYGSSTYYADSVKGRFTISRDNAKNTVYLQMNSLKPEDTAVYYCAVLTYDTIYHDYWGQGTQVTVSS

SEQ ID NO: 6376 - protein, 126 aa, Artificial Sequence
  Chemically Synthesized
QVQLQESGGGLVQAGGSLRLSCAASGSIFDRVYMGWYRQAPGKERELVAGITVGGNTNYADSVKGRFTISRDNAKNTVYLQMNSLKPEDTAVYYCAASYSYDNDYQGYTRYGYGYWGQGTQVTVSS

SEQ ID NO: 6377 - protein, 126 aa, Artificial Sequence
  Chemically Synthesized
QVQLQESGGGLVQAGGSLRLSCAASGYISRRAVMGWYRQAPGKERELVAAIGRGSNTYYADSVKGRFTISRDNAKNTVYLQMNSLKPEDTAVYYCAVFRDSSAAGNVSYATGYGYWGQGTQVTVSS

SEQ ID NO: 6378 - protein, 122 aa, Artificial Sequence
  Chemically Synthesized
QVQLQESGGGLVQAGGSLRLSCAASGYISKVVDMGWYRQAPGKERELVASIAFGTTTYYADSVKGRFTISRDNAKNTVYLQMNSLKPEDTAVYYCAVWYDSLIPYYYGYGYWGQGTQVTVSS

SEQ ID NO: 6379 - protein, 123 aa, Artificial Sequence
  Chemically Synthesized
QVQLQESGGGLVQAGGSLRLSCAASGNISLYYAMGWYRQAPGKEREFVATIAYGSSTNYADSVKGRFTISRDNAKNTVYLQMNSLKPEDTAVYYCALIYDRAYPDYAYGFGYWGQGTQVTVSS

SEQ ID NO: 6380 - protein, 126 aa, Artificial Sequence
  Chemically Synthesized
QVQLQESGGGLVQAGGSLRLSCAASGNISFHSDMGWYRQAPGKERELVASINTGANTNYADSVKGRFTISRDNAKNTVYLQMNSLKPEDTAVYYCAVYYDGRKGRNSEVTYGHGYWGQGTQVTVSS

SEQ ID NO: 6381 - protein, 123 aa, Artificial Sequence
  Chemically Synthesized
QVQLQESGGGLVQAGGSLRLSCAASGNIFSYYYMGWYRQAPGKERELVASIGYGGNTNYADSVKGRFTISRDNAKNTVYLQMNSLKPEDTAVYYCAVWLDTDQISSASGHGYWGQGTQVTVSS

SEQ ID NO: 6382 - protein, 119 aa, Artificial Sequence
  Chemically Synthesized
QVQLQESGGGLVQAGGSLRLSCAASGNISYTYAMGWYRQAPGKERELVAAIGYGSNTYYADSVKGRFTISRDNAKNTVYLQMNSLKPEDTAVYYCAAVAGNSYWRHGYWGQGTQVTVSS

SEQ ID NO: 6383 - protein, 126 aa, Artificial Sequence
  Chemically Synthesized
QVQLQESGGGLVQAGGSLRLSCAASGTISRLASMGWYRQAPGKEREFVASIGPGGTTNYADSVKGRFTISRDNAKNTVYLQMNSLKPEDTAVYYCAVYFEHDVDGYGGVKYGFGYWGQGTQVTVSS

SEQ ID NO: 6384 - protein, 126 aa, Artificial Sequence
  Chemically Synthesized
QVQLQESGGGLVQAGGSLRLSCAASGSISWWFYMGWYRQAPGKEREFVAAITSGSSTNYADSVKGRFTISRDNAKNTVYLQMNSLKPEDTAVYYCAAWYDSRTPGSADTRYGHGYWGQGTQVTVSS

SEQ ID NO: 6385 - protein, 117 aa, Artificial Sequence
  Chemically Synthesized
QVQLQESGGGLVQAGGSLRLSCAASGNIFQHFYMGWYRQAPGKEREFVASIDHGSTTYYADSVKGRFTISRDNAKNTVYLQMNSLKPEDTAVYYCAANATGAFYDYWGQGTQVTVSS

SEQ ID NO: 6386 - protein, 126 aa, Artificial Sequence
  Chemically Synthesized
QVQLQESGGGLVQAGGSLRLSCAASGNIFAEGNMGWYRQAPGKEREFVAGIALGSTTNYADSVKGRFTISRDNAKNTVYLQMNSLKPEDTAVYYCAAWSRRVTYGLITSTYGHGYWGQGTQVTVSS

SEQ ID NO: 6387 - protein, 119 aa, Artificial Sequence
  Chemically Synthesized
QVQLQESGGGLVQAGGSLRLSCAASGNISPSPVMGWYRQAPGKERELVATINRGTTTNYADSVKGRFTISRDNAKNTVYLQMNSLKPEDTAVYYCAAYYSTDVYGYGYWGQGTQVTVSS

SEQ ID NO: 6388 - protein, 126 aa, Artificial Sequence
  Chemically Synthesized
QVQLQESGGGLVQAGGSLRLSCAASGSISPSSFMGWYRQAPGKERELVASINGGATTNYADSVKGRFTISRDNAKNTVYLQMNSLKPEDTAVYYCAAYYNANYQTADYIKWGFGYWGQGTQVTVSS

SEQ ID NO: 6389 - protein, 121 aa, Artificial Sequence
  Chemically Synthesized
QVQLQESGGGLVQAGGSLRLSCAASGSIFPGATMGWYRQAPGKERELVAAIGGGSNTNYADSVKGRFTISRDNAKNTVYLQMNSLKPEDTAVYYCAVYYDHVRTSYGFGYWGQGTQVTVSS

SEQ ID NO: 6390 - protein, 126 aa, Artificial Sequence
  Chemically Synthesized
QVQLQESGGGLVQAGGSLRLSCAASGTISTPGNMGWYRQAPGKERELVAGINSGGNTNYADSVKGRFTISRDNAKNTVYLQMNSLKPEDTAVYYCAVYYRRASSNSNGDVSGYGYWGQGTQVTVSS

SEQ ID NO: 6391 - protein, 117 aa, Artificial Sequence
  Chemically Synthesized
QVQLQESGGGLVQAGGSLRLSCAASGSIFPFYGMGWYRQAPGKEREFVAGIAYGSSTYYADSVKGRFTISRDNAKNTVYLQMNSLKPEDTAVYYCAAVGRTRWYDYWGQGTQVTVSS

SEQ ID NO: 6392 - protein, 122 aa, Artificial Sequence
  Chemically Synthesized
QVQLQESGGGLVQAGGSLRLSCAASGTIFRVDYMGWYRQAPGKERELVASISDGSSTNYADSVKGRFTISRDNAKNTVYLQMNSLKPEDTAVYYCAVDYARVYRDFTAYVYWGQGTQVTVSS

SEQ ID NO: 6393 - protein, 123 aa, Artificial Sequence
  Chemically Synthesized
QVQLQESGGGLVQAGGSLRLSCAASGYISGVWVMGWYRQAPGKEREFVATIDPGATTNYADSVKGRFTISRDNAKNTVYLQMNSLKPEDTAVYYCAVIVDYGNDGSRWGHGYWGQGTQVTVSS

SEQ ID NO: 6394 - protein, 126 aa, Artificial Sequence
  Chemically Synthesized
QVQLQESGGGLVQAGGSLRLSCAASGTISAVNDMGWYRQAPGKEREFVATINYGGSTNYADSVKGRFTISRDNAKNTVYLQMNSLKPEDTAVYYCAAYTDRSDDGFYQIKYGHGYWGQGTQVTVSS

SEQ ID NO: 6395 - protein, 121 aa, Artificial Sequence
  Chemically Synthesized
QVQLQESGGGLVQAGGSLRLSCAASGTISRSDTMGWYRQAPGKERELVAGIGDGATTNYADSVKGRFTISRDNAKNTVYLQMNSLKPEDTAVYYCAVYPADANQSDRYHYWGQGTQVTVSS

SEQ ID NO: 6396 - protein, 126 aa, Artificial Sequence
  Chemically Synthesized
QVQLQESGGGLVQAGGSLRLSCAASGSIFWQVEMGWYRQAPGKERELVAAIGYGSITYYADSVKGRFTISRDNAKNTVYLQMNSLKPEDTAVYYCAVWTDHAYGERGTDRYGYGYWGQGTQVTVSS

SEQ ID NO: 6397 - protein, 122 aa, Artificial Sequence
  Chemically Synthesized
QVQLQESGGGLVQAGGSLRLSCAASGNISYHAIMGWYRQAPGKEREFVAAINHGTNTNYADSVKGRFTISRDNAKNTVYLQMNSLKPEDTAVYYCAARYGHRGIARGAYWYWGQGTQVTVSS

SEQ ID NO: 6398 - protein, 123 aa, Artificial Sequence
  Chemically Synthesized
QVQLQESGGGLVQAGGSLRLSCAASGTISALYYMGWYRQAPGKERELVAGITGGGNTYYADSVKGRFTISRDNAKNTVYLQMNSLKPEDTAVYYCAVYGDFEQGITRYGFGYWGQGTQVTVSS

SEQ ID NO: 6399 - protein, 118 aa, Artificial Sequence
  Chemically Synthesized
QVQLQESGGGLVQAGGSLRLSCAASGNISYEYYMGWYRQAPGKERELVATIGYGAITYYADSVKGRFTISRDNAKNTVYLQMNSLKPEDTAVYYCAAVTWYIYYHDYWGQGTQVTVSS

SEQ ID NO: 6400 - protein, 122 aa, Artificial Sequence
  Chemically Synthesized
QVQLQESGGGLVQAGGSLRLSCAASGTIFTGYSMGWYRQAPGKERELVASIGGGGTTYYADSVKGRFTISRDNAKNTVYLQMNSLKPEDTAVYYCAVYVDRSRDDAFGYGYWGQGTQVTVSS

SEQ ID NO: 6401 - protein, 122 aa, Artificial Sequence
  Chemically Synthesized
QVQLQESGGGLVQAGGSLRLSCAASGYISLYTTMGWYRQAPGKERELVAAIAYGTNTNYADSVKGRFTISRDNAKNTVYLQMNSLKPEDTAVYYCAAYRYRETDVRYGFGYWGQGTQVTVSS

SEQ ID NO: 6402 - protein, 117 aa, Artificial Sequence
  Chemically Synthesized
QVQLQESGGGLVQAGGSLRLSCAASGTIFWSFYMGWYRQAPGKERELVAGIGKGSITNYADSVKGRFTISRDNAKNTVYLQMNSLKPEDTAVYYCAALSLLHSCIYWGQGTQVTVSS

SEQ ID NO: 6403 - protein, 125 aa, Artificial Sequence
  Chemically Synthesized
QVQLQESGGGLVQAGGSLRLSCAASGSISRDGAMGWYRQAPGKEREFVASIGYGSITNYADSVKGRFTISRDNAKNTVYLQMNSLKPEDTAVYYCAVWYEKYWSYGDETAGYGYWGQGTQVTVSS

SEQ ID NO: 6404 - protein, 123 aa, Artificial Sequence
  Chemically Synthesized
QVQLQESGGGLVQAGGSLRLSCAASGTISGGYNMGWYRQAPGKEREFVAAIAAGTTTNYADSVKGRFTISRDNAKNTVYLQMNSLKPEDTAVYYCAAYYDYRLDTFAVGHGYWGQGTQVTVSS

SEQ ID NO: 6405 - protein, 122 aa, Artificial Sequence
  Chemically Synthesized
QVQLQESGGGLVQAGGSLRLSCAASGNISWTYDMGWYRQAPGKEREFVASIDIGATTYYADSVKGRFTISRDNAKNTVYLQMNSLKPEDTAVYYCAAYIYLWDWLDDTHLYWGQGTQVTVSS

SEQ ID NO: 6406 - protein, 110 aa, Artificial Sequence
  Chemically Synthesized
QVQLQESGGGLVQAGGSLRLSCAASGTIFTPVYMGWYRQAPGKERELVASINGGSNTYYADSVKGRFTISRDNAKNTVYLQMNSLKPEDTAVYYCAAFYWGQGTQVTVSS

SEQ ID NO: 6407 - protein, 118 aa, Artificial Sequence
  Chemically Synthesized
QVQLQESGGGLVQAGGSLRLSCAASGTISDPAGMGWYRQAPGKERELVAAISYGTTTYYADSVKGRFTISRDNAKNTVYLQMNSLKPEDTAVYYCAVAYLLSVDHGYWGQGTQVTVSS

SEQ ID NO: 6408 - protein, 126 aa, Artificial Sequence
  Chemically Synthesized
QVQLQESGGGLVQAGGSLRLSCAASGNIFPYFFMGWYRQAPGKEREFVAGIDLGGNTYYADSVKGRFTISRDNAKNTVYLQMNSLKPEDTAVYYCAVIIGDTWFITTSSASHHDYWGQGTQVTVSS

SEQ ID NO: 6409 - protein, 122 aa, Artificial Sequence
  Chemically Synthesized
QVQLQESGGGLVQAGGSLRLSCAASGTISDTYAMGWYRQAPGKERELVAAIDDGGTTYYADSVKGRFTISRDNAKNTVYLQMNSLKPEDTAVYYCAAIQPYVYYWGDDHSYWGQGTQVTVSS

SEQ ID NO: 6410 - protein, 126 aa, Artificial Sequence
  Chemically Synthesized
QVQLQESGGGLVQAGGSLRLSCAASGTIFYPSDMGWYRQAPGKEREFVAGINYGTNTNYADSVKGRFTISRDNAKNTVYLQMNSLKPEDTAVYYCAVYYNRSYSHYIGLTHYFNYWGQGTQVTVSS

SEQ ID NO: 6411 - protein, 118 aa, Artificial Sequence
  Chemically Synthesized
QVQLQESGGGLVQAGGSLRLSCAASGSISSGYYMGWYRQAPGKERELVASIGNGAITNYADSVKGRFTISRDNAKNTVYLQMNSLKPEDTAVYYCAAVSWFDINHWYWGQGTQVTVSS

SEQ ID NO: 6412 - protein, 116 aa, Artificial Sequence
  Chemically Synthesized
QVQLQESGGGLVQAGGSLRLSCAASGYFSAGMMGWYRQAPGKERELVAAIGPGGSTNYADSVKGRFTISRDNAKNTVYLQMNSLKPEDTAVYYCAVKGRDDWSFYWGQGTQVTVSS

SEQ ID NO: 6413 - protein, 118 aa, Artificial Sequence
  Chemically Synthesized
QVQLQESGGGLVQAGGSLRLSCAASGNISYYGAMGWYRQAPGKEREFVAAIGGGSTTNYADSVKGRFTISRDNAKNTVYLQMNSLKPEDTAVYYCAVHNLTYGDHRYWGQGTQVTVSS

SEQ ID NO: 6414 - protein, 122 aa, Artificial Sequence
  Chemically Synthesized
QVQLQESGGGLVQAGGSLRLSCAASGYISVGAIMGWYRQAPGKERELVATIAYGGITNYADSVKGRFTISRDNAKNTVYLQMNSLKPEDTAVYYCAANYQYDTIRGQYYTYWGQGTQVTVSS

SEQ ID NO: 6415 - protein, 121 aa, Artificial Sequence
  Chemically Synthesized
QVQLQESGGGLVQAGGSLRLSCAASGSIFDHPHMGWYRQAPGKERELVAAITLVVLPYADSVKGRFTISRDNAKNTVYLQMNSLKPEDTAVYYCAVQAADIVPADGSLYYWGQGTQVTVSS

SEQ ID NO: 6416 - protein, 126 aa, Artificial Sequence
  Chemically Synthesized
QVQLQESGGGLVQAGGSLRLSCAASGYISILRFMGWYRQAPGKEREFVAGIGYGTTTNYADSVKGRFTISRDNAKNTVYLQMNSLKPEDTAVYYCAARFPTYPPTDRTKDAVLTYWGQGTQVTVSS

SEQ ID NO: 6417 - protein, 117 aa, Artificial Sequence
  Chemically Synthesized
QVQLQESGGGLVQAGGSLRLSCAASGNISNIDLMGWYRQAPGKEREFVATIASGASTYYADSVKGRFTISRDNAKNTVYLQMNSLKPEDTAVYYCAVDVYYSLTLYWGQGTQVTVSS

SEQ ID NO: 6418 - protein, 113 aa, Artificial Sequence
  Chemically Synthesized
QVQLQESGGGLVQAGGSLRLSCAASGTISAGNDMGWYRQAPGKEREFVAGINTGGNTYYADSVKGRFTISRDNAKNTVYLQMNSLKPEDTAVYYCAATDLIYWGQGTQVTVSS

SEQ ID NO: 6419 - protein, 122 aa, Artificial Sequence
  Chemically Synthesized
QVQLQESGGGLVQAGGSLRLSCAASGNISLYYIMGWYRQAPGKEREFVATISLGATTYYADSVKGRFTISRDNAKNTVYLQMNSLKPEDTAVYYCAVPYWTTSAWGYTHLYWGQGTQVTVSS

SEQ ID NO: 6420 - protein, 115 aa, Artificial Sequence
  Chemically Synthesized
QVQLQESGGGLVQAGGSLRLSCAASGNIFGTGNMGWYRQAPGKEREPVLVLVVIPYADSVKGRFTISRDNAKNTVYLQMNSLKPEDTAVYYCAAPYRQGGLHNYWGQGTQVTVSS

SEQ ID NO: 6421 - protein, 117 aa, Artificial Sequence
  Chemically Synthesized
QVQLQESGGGLVQAGGSLRLSCAASGSIFSLTMGWYRQAPGKEREFVAGITYGTITYYADSVKGRFTISRDNAKNTVYLQMNSLKPEDTAVYYCAAYSQGRDIHWYWGQGTQVTVSS

SEQ ID NO: 6422 - protein, 126 aa, Artificial Sequence
  Chemically Synthesized
QVQLQESGGGLVQAGGSLRLSCAASGTIFGDRIMGWYRQAPGKEREFVAAIAYGSITYYADSVKGRFTISRDNAKNTVYLQMNSLKPEDTAVYYCAVGYTVLYDQQRIQYANHSYWGQGTQVTVSS

SEQ ID NO: 6423 - protein, 122 aa, Artificial Sequence
  Chemically Synthesized
QVQLQESGGGLVQAGGSLRLSCAASGTISQSVSMGWYRQAPGKEREFVAAINHGGNTYYADSVKGRFTISRDNAKNTVYLQMNSLKPEDTAVYYCAVVYGPGYPYKYPYTYWGQGTQVTVSS

SEQ ID NO: 6424 - protein, 114 aa, Artificial Sequence
  Chemically Synthesized
QVQLQESGGGLVQAGGSLRLSCAASGTISSYSPMGWYRQAPGKERELVATIALGATTYYADSVKGRFTISRDNAKNTVYLQMNSLKPEDTAVYYCAVDRAISYWGQGTQVTVSS

SEQ ID NO: 6425 - protein, 117 aa, Artificial Sequence
  Chemically Synthesized
QVQLQESGGGLVQAGGSLRLSCAASGNISGTVYMGWYRQAPGKERELVATITSVLIPYADSVKGRFTISRDNAKNTVYLQMNSLKPEDTAVYYCAADVLWPLGLLYWGQGTQVTVSS

SEQ ID NO: 6426 - protein, 118 aa, Artificial Sequence
  Chemically Synthesized
QVQLQESGGGLVQAGGSLRLSCAASGYISRLYDMGWYRQAPGKEREFVAGITDGSSTNYADSVKGRFTISRDNAKNTVYLQMNSLKPEDTAVYYCAVGDDFVYGYRYWGQGTQVTVSS

SEQ ID NO: 6427 - protein, 118 aa, Artificial Sequence
  Chemically Synthesized
QVQLQESGGGLVQAGGSLRLSCAASGYISTYEYMGWYRQAPGKERELVASISDGAITYYADSVKGRFTISRDNAKNTVYLQMNSLKPEDTAVYYCAVTTPYQSDFSYWGQGTQVTVSS

SEQ ID NO: 6428 - protein, 126 aa, Artificial Sequence
  Chemically Synthesized
QVQLQESGGGLVQAGGSLRLSCAASGTISYPDSMGWYRQAPGKEREFVAAIDWGTNTYYADSVKGRFTISRDNAKNTVYLQMNSLKPEDTAVYYCAAWERNIYLDDAVALDAFNYWGQGTQVTVSS

SEQ ID NO: 6429 - protein, 123 aa, Artificial Sequence
  Chemically Synthesized
QVQLQESGGGLVQAGGSLRLSCAASGSFLLSGMGWYRQAPGKEREFVAGISQGANTNYADSVKGRFTISRDNAKNTVYLQMNSLKPEDTAVYYCAALHRPGYRQRTGPTHSYWGQGTQVTVSS

SEQ ID NO: 6430 - protein, 117 aa, Artificial Sequence
  Chemically Synthesized
QVQLQESGGGLVQAGGSLRLSCAASGNILVTLMGWYRQAPGKERELVATIDGGTSTYYADSVKGRFTISRDNAKNTVYLQMNSLKPEDTAVYYCAVRGIYSYRYHYWGQGTQVTVSS

SEQ ID NO: 6431 - protein, 118 aa, Artificial Sequence
  Chemically Synthesized
QVQLQESGGGLVQAGGSLRLSCAASGTISELWWMGWYRQAPGKEREFVAAISSGSNTYYADSVKGRFTISRDNAKNTVYLQMNSLKPEDTAVYYCAVAELFRRGHSYWGQGTQVTVSS

SEQ ID NO: 6432 - protein, 115 aa, Artificial Sequence
  Chemically Synthesized
QVQLQESGGGLVQAGGSLRLSCAASGTISTTRYMGWYRQAPGKERELVATIDGGGTTNYADSVKGRFTISRDNAKNTVYLQMNSLKPEDTAVYYCADLYSAYDYWGQGTQVTVSS

SEQ ID NO: 6433 - protein, 119 aa, Artificial Sequence
  Chemically Synthesized
QVQLQESGGGLVQAGGSLRLSCAASGTISGRTAMGWYRQAPGKERELVAIRVLVPYADSVKGRFTISRDNAKNTVYLQMNSLKPEDTAVYYCAAYVANAYYRSRWLNYWGQGTQVTVSS

SEQ ID NO: 6434 - protein, 119 aa, Artificial Sequence
  Chemically Synthesized
QVQLQESGGGLVQAGGSLRLSCAASGNISPTGGMGWYRQAPGKEREFVAAIGAGAITYYADSVKGRFTISRDNAKNTVYLQMNSLKPEDTAVYYCAADYVFDGTTFIYWGQGTQVTVSS

SEQ ID NO: 6435 - protein, 118 aa, Artificial Sequence
  Chemically Synthesized
QVQLQESGGGLVQAGGSLRLSCAASGYISVPAPMGWYRQAPGKERELVAAISFGGTTNYADSVKGRFTISRDNAKNTVYLQMNSLKPEDTAVYYCAADGTDNGNHAYWGQGTQVTVSS

SEQ ID NO: 6436 - protein, 122 aa, Artificial Sequence
  Chemically Synthesized
QVQLQESGGGLVQAGGSLRLSCAASGSISPAAIMGWYRQAPGKEREFVASIGFGGITYYADSVKGRFTISRDNAKNTVYLQMNSLKPEDTAVYYCAAEIYGYYYDSSIYPYWGQGTQVTVSS

SEQ ID NO: 6437 - protein, 126 aa, Artificial Sequence
  Chemically Synthesized
QVQLQESGGGLVQAGGSLRLSCAASGTISDITYMGWYRQAPGKERELVAGIDPGGITNYADSVKGRFTISRDNAKNTVYLQMNSLKPEDTAVYYCAVSTLIPPTRTYTRTLIHYYWGQGTQVTVSS

SEQ ID NO: 6438 - protein, 113 aa, Artificial Sequence
  Chemically Synthesized
QVQLQESGGGLVQAGGSLRLSCAASGYMMGWYRQAPGKEREFVASISGGSNTNYADSVKGRFTISRDNAKNTVYLQMNSLKPEDTAVYYCAAKVAYADTFSYWGQGTQVTVSS

SEQ ID NO: 6439 - protein, 122 aa, Artificial Sequence
  Chemically Synthesized
QVQLQESGGGLVQAGGSLRLSCAASGNISYVTDMGWYRQAPGKERELVAAIAAGSTTYYADSVKGRFTISRDNAKNTVYLQMNSLKPEDTAVYYCAADTFAWIREVALLPYWGQGTQVTVSS

SEQ ID NO: 6440 - protein, 118 aa, Artificial Sequence
  Chemically Synthesized
QVQLQESGGGLVQAGGSLRLSCAASGNISPFDVMGWYRQAPGKEREFVATIDSGASTYYADSVKGRFTISRDNAKNTVYLQMNSLKPEDTAVYYCAAISRHDGYFYYWGQGTQVTVSS

SEQ ID NO: 6441 - protein, 122 aa, Artificial Sequence
  Chemically Synthesized
QVQLQESGGGLVQAGGSLRLSCAASGTISDYFYMGWYRQAPGKEREFVAAISYGATTNYADSVKGRFTISRDNAKNTVYLQMNSLKPEDTAVYYCAAYENDDNDVYASHTYWGQGTQVTVSS

SEQ ID NO: 6442 - protein, 118 aa, Artificial Sequence
  Chemically Synthesized
QVQLQESGGGLVQAGGSLRLSCAASGTISGADVMGWYRQAPGKERELVAGIDPGGNTNYADSVKGRFTISRDNAKNTVYLQMNSLKPEDTAVYYCAAGTSWLSPHYYWGQGTQVTVSS

SEQ ID NO: 6443 - protein, 118 aa, Artificial Sequence
  Chemically Synthesized
QVQLQESGGGLVQAGGSLRLSCAASGNISDVIIMGWYRQAPGKEREFVAAISLGATTYYADSVKGRFTISRDNAKNTVYLQMNSLKPEDTAVYYCAAGVPDSVRLNYWGQGTQVTVSS

SEQ ID NO: 6444 - protein, 117 aa, Artificial Sequence
  Chemically Synthesized
QVQLQESGGGLVQAGGSLRLSCAASGSIFSTVMGWYRQAPGKEREFVATITGWATTYYADSVKGRFTISRDNAKNTVYLQMNSLKPEDTAVYYCAVTARYPDDFGYWGQGTQVTVSS

SEQ ID NO: 6445 - protein, 117 aa, Artificial Sequence
  Chemically Synthesized
QVQLQESGGGLVQAGGSLRLSCAASGTISGVGYMGWYRQAPGKERELVAAINYGGSTNYADSVKGRFTISRDNAKNTVYLQMNSLKPEDTAVYYCAASLTRVTTIYWGQGTQVTVSS

SEQ ID NO: 6446 - protein, 112 aa, Artificial Sequence
  Chemically Synthesized
QVQLQESGGGLVQAGGSLRLSCAASGNISDTTLMGWYRQAPGKERELVATIADGSNTNYADSVKGRFTISRDNAKNTVYLQMNSLKPEDTAVYYCANLVMYWGQGTQVTVSS

SEQ ID NO: 6447 - protein, 118 aa, Artificial Sequence
  Chemically Synthesized
QVQLQESGGGLVQAGGSLRLSCAASGYIFDYDYMGWYRQAPGKERELVAAINYGAITYYADSVKGRFTISRDNAKNTVYLQMNSLKPEDTAVYYCAAYAYYITHLRYWGQGTQVTVSS

SEQ ID NO: 6448 - protein, 122 aa, Artificial Sequence
  Chemically Synthesized
QVQLQESGGGLVQAGGSLRLSCAASGNISHTGTMGWYRQAPGKERELVATITGGAITNYADSVKGRFTISRDNAKNTVYLQMNSLKPEDTAVYYCAAPYAFERAYWRVFDYWGQGTQVTVSS

SEQ ID NO: 6449 - protein, 118 aa, Artificial Sequence
  Chemically Synthesized
QVQLQESGGGLVQAGGSLRLSCAASGSIFPYRYMGWYRQAPGKERELVASINRGAITNYADSVKGRFTISRDNAKNTVYLQMNSLKPEDTAVYYCAVSRYPFYPFVYWGQGTQVTVSS

SEQ ID NO: 6450 - protein, 122 aa, Artificial Sequence
  Chemically Synthesized
QVQLQESGGGLVQAGGSLRLSCAASGTISQDSYMGWYRQAPGKERELVAGIDGGGTTNYADSVKGRFTISRDNAKNTVYLQMNSLKPEDTAVYYCAADAQVHSDSDLQHVYWGQGTQVTVSS

SEQ ID NO: 6451 - protein, 118 aa, Artificial Sequence
  Chemically Synthesized
QVQLQESGGGLVQAGGSLRLSCAASGYISGGSGMGWYRQAPGKEREFVAGIDLGAITYYADSVKGRFTISRDNAKNTVYLQMNSLKPEDTAVYYCAADGYDSYALVYWGQGTQVTVSS

SEQ ID NO: 6452 - protein, 118 aa, Artificial Sequence
  Chemically Synthesized
QVQLQESGGGLVQAGGSLRLSCAASGNISYPLPMGWYRQAPGKEREFVASIGYGTITYYADSVKGRFTISRDNAKNTVYLQMNSLKPEDTAVYYCAADDTDGQDLHYWGQGTQVTVSS

SEQ ID NO: 6453 - protein, 113 aa, Artificial Sequence
  Chemically Synthesized
QVQLQESGGGLVQAGGSLRLSCAASGTISARVDMGWYRQAPGKEREFVAAIAYGSNTYYADSVKGRFTISRDNAKNTVYLQMNSLKPEDTAVYYCAALTNLYWGQGTQVTVSS

SEQ ID NO: 6454 - protein, 122 aa, Artificial Sequence
  Chemically Synthesized
QVQLQESGGGLVQAGGSLRLSCAASGSISWELDMGWYRQAPGKERELVAAIGGGTNTNYADSVKGRFTISRDNAKNTVYLQMNSLKPEDTAVYYCAADYYLGGYVPYDLVYWGQGTQVTVSS

SEQ ID NO: 6455 - protein, 121 aa, Artificial Sequence
  Chemically Synthesized
QVQLQESGGGLVQAGGSLRLSCAASGNIFGSLMGWYRQAPGKEREFVASITIGSITNYADSVKGRFTISRDNAKNTVYLQMNSLKPEDTAVYYCAVVPLSGLDRWYGLRYWGQGTQVTVSS

SEQ ID NO: 6456 - protein, 126 aa, Artificial Sequence
  Chemically Synthesized
QVQLQESGGGLVQAGGSLRLSCAASGYISYNGYMGWYRQAPGKERELVATITVGASTYYADSVKGRFTISRDNAKNTVYLQMNSLKPEDTAVYYCAVVDGTVYDSTERSAYVHDYWGQGTQVTVSS

SEQ ID NO: 6457 - protein, 122 aa, Artificial Sequence
  Chemically Synthesized
QVQLQESGGGLVQAGGSLRLSCAASGTISDFDGMGWYRQAPGKERELVATIGVGSSTNYADSVKGRFTISRDNAKNTVYLQMNSLKPEDTAVYYCAVDDNYQDHGDERYAYWGQGTQVTVSS

SEQ ID NO: 6458 - protein, 117 aa, Artificial Sequence
  Chemically Synthesized
QVQLQESGGGLVQAGGSLRLSCAASGNISAYDDMGWYRQAPGKERELVAALLLVVYQYADSVKGRFTISRDNAKNTVYLQMNSLKPEDTAVYYCAVGFAIGLTHYYWGQGTQVTVSS

SEQ ID NO: 6459 - protein, 118 aa, Artificial Sequence
  Chemically Synthesized
QVQLQESGGGLVQAGGSLRLSCAASGSIFRRVGMGWYRQAPGKERELVATIAIGGNTYYADSVKGRFTISRDNAKNTVYLQMNSLKPEDTAVYYCAAHADYQPNLLYWGQGTQVTVSS

SEQ ID NO: 6460 - protein, 126 aa, Artificial Sequence
  Chemically Synthesized
QVQLQESGGGLVQAGGSLRLSCAASGTISAYQYMGWYRQAPGKERELVATIGTGATTNYADSVKGRFTISRDNAKNTVYLQMNSLKPEDTAVYYCAVWYDVYVPSYTRDITAFQYWGQGTQVTVSS

SEQ ID NO: 6461 - protein, 117 aa, Artificial Sequence
  Chemically Synthesized
QVQLQESGGGLVQAGGSLRLSCAASGTISTRYMGWYRQAPGKEREFVAGITSGANTNYADSVKGRFTISRDNAKNTVYLQMNSLKPEDTAVYYCAVNDDYSGTHDYWGQGTQVTVSS

SEQ ID NO: 6462 - protein, 125 aa, Artificial Sequence
  Chemically Synthesized
QVQLQESGGGLVQAGGSLRLSCAASGTISFRDTMGWYRQAPGKEREFVATINEGTSTNYADSVKGRFTISRDNAKNTVYLQMNSLKPEDTAVYYCAVYVYRDLIGVLEDLYLRYWGQGTQVTVSS

SEQ ID NO: 6463 - protein, 117 aa, Artificial Sequence
  Chemically Synthesized
QVQLQESGGGLVQAGGSLRLSCAASGYIFYSLTMGWYRQAPGKEREFVASIASVLLPYADSVKGRFTISRDNAKNTVYLQMNSLKPEDTAVYYCAVIVGRDELHDYWGQGTQVTVSS

SEQ ID NO: 6464 - protein, 117 aa, Artificial Sequence
  Chemically Synthesized
QVQLQESGGGLVQAGGSLRLSCAASGTISTSLMGWYRQAPGKEREFVAGIADGSTTNYADSVKGRFTISRDNAKNTVYLQMNSLKPEDTAVYYCAVGPYIGGYFRYWGQGTQVTVSS

SEQ ID NO: 6465 - protein, 118 aa, Artificial Sequence
  Chemically Synthesized
QVQLQESGGGLVQAGGSLRLSCAASGSISAYVYMGWYRQAPGKERELVATIGLGTNTYYADSVKGRFTISRDNAKNTVYLQMNSLKPEDTAVYYCAVSYYLYLVYPYWGQGTQVTVSS

SEQ ID NO: 6466 - protein, 118 aa, Artificial Sequence
  Chemically Synthesized
QVQLQESGGGLVQAGGSLRLSCAASGNIFWQDRMGWYRQAPGKEREFVATIASGATTYYADSVKGRFTISRDNAKNTVYLQMNSLKPEDTAVYYCAAFGVDYQPYYYWGQGTQVTVSS

SEQ ID NO: 6467 - protein, 122 aa, Artificial Sequence
  Chemically Synthesized
QVQLQESGGGLVQAGGSLRLSCAASGTIFQYVDMGWYRQAPGKEREFVAAINHGGSTYYADSVKGRFTISRDNAKNTVYLQMNSLKPEDTAVYYCAVNTSYTLPDHDDLPYWGQGTQVTVSS

SEQ ID NO: 6468 - protein, 115 aa, Artificial Sequence
  Chemically Synthesized
QVQLQESGGGLVQAGGSLRLSCAASGNITVMGWYRQAPGKERELVAAINYGSNTYYADSVKGRFTISRDNAKNTVYLQMNSLKPEDTAVYYCAAPYTIQYAYRYWGQGTQVTVSS

SEQ ID NO: 6469 - protein, 122 aa, Artificial Sequence
  Chemically Synthesized
QVQLQESGGGLVQAGGSLRLSCAASGNISDYYYMGWYRQAPGKEREFVASIGPGSNTYYADSVKGRFTISRDNAKNTVYLQMNSLKPEDTAVYYCAVAYRETYYGRYALVYWGQGTQVTVSS

SEQ ID NO: 6470 - protein, 119 aa, Artificial Sequence
  Chemically Synthesized
QVQLQESGGGLVQAGGSLRLSCAASGYISAIDGMGWYRQAPGKERELVAALMTVLIPYADSVKGRFTISRDNAKNTVYLQMNSLKPEDTAVYYCAVINYLDGTERFDYWGQGTQVTVSS

SEQ ID NO: 6471 - protein, 118 aa, Artificial Sequence
  Chemically Synthesized
QVQLQESGGGLVQAGGSLRLSCAASGSIFTESWMGWYRQAPGKEREFVAGINYGATTYYADSVKGRFTISRDNAKNTVYLQMNSLKPEDTAVYYCAAYEVHANRFSYWGQGTQVTVSS

SEQ ID NO: 6472 - protein, 125 aa, Artificial Sequence
  Chemically Synthesized
QVQLQESGGGLVQAGGSLRLSCAASGNISATIYMGWYRQAPGKERELVATIDLGTSTNYADSVKGRFTISRDNAKNTVYLQMNSLKPEDTAVYYCAAYSYPWDWYIRYRRGHSYWGQGTQVTVSS

SEQ ID NO: 6473 - protein, 117 aa, Artificial Sequence
  Chemically Synthesized
QVQLQESGGGLVQAGGSLRLSCAASGNISSGLMGWYRQAPGKERELVATINTGSITNYADSVKGRFTISRDNAKNTVYLQMNSLKPEDTAVYYCAALGNVTFNFSYWGQGTQVTVSS

SEQ ID NO: 6474 - protein, 118 aa, Artificial Sequence
  Chemically Synthesized
QVQLQESGGGLVQAGGSLRLSCAASGTISYAGYMGWYRQAPGKERELVATISDGGSTYYADSVKGRFTISRDNAKNTVYLQMNSLKPEDTAVYYCAADDTSRYSYFYWGQGTQVTVSS

SEQ ID NO: 6475 - protein, 121 aa, Artificial Sequence
  Chemically Synthesized
QVQLQESGGGLVQAGGSLRLSCAASGTISSTTMGWYRQAPGKERELVASIGTGATTNYADSVKGRFTISRDNAKNTVYLQMNSLKPEDTAVYYCAVADVGSPRDYGYHSYWGQGTQVTVSS

SEQ ID NO: 6476 - protein, 122 aa, Artificial Sequence
  Chemically Synthesized
QVQLQESGGGLVQAGGSLRLSCAASGSISTFYAMGWYRQAPGKERELVAGISDGSSTNYADSVKGRFTISRDNAKNTVYLQMNSLKPEDTAVYYCAVDDTSPPYAFDYFGYWGQGTQVTVSS

SEQ ID NO: 6477 - protein, 118 aa, Artificial Sequence
  Chemically Synthesized
QVQLQESGGGLVQAGGSLRLSCAASGTISLHRSMGWYRQAPGKERELVAGIATGANTNYADSVKGRFTISRDNAKNTVYLQMNSLKPEDTAVYYCAAWQDDDRPFDYWGQGTQVTVSS

SEQ ID NO: 6478 - protein, 120 aa, Artificial Sequence
  Chemically Synthesized
QVQLQESGGGLVQAGGSLRLSCAASGNISHSMGWYRQAPGKERELVAGITGGAITNYADSVKGRFTISRDNAKNTVYLQMNSLKPEDTAVYYCAVGPPNDGVVWSAHYYWGQGTQVTVSS

SEQ ID NO: 6479 - protein, 118 aa, Artificial Sequence
  Chemically Synthesized
QVQLQESGGGLVQAGGSLRLSCAASGYISVEVQMGWYRQAPGKERELVAGITGGSTTNYADSVKGRFTISRDNAKNTVYLQMNSLKPEDTAVYYCAAANQLTDIFWYWGQGTQVTVSS

SEQ ID NO: 6480 - protein, 121 aa, Artificial Sequence
  Chemically Synthesized
QVQLQESGGGLVQAGGSLRLSCAASGNIFLRDSMGWYRQAPGKEREFVATIDAVLVPYADSVKGRFTISRDNAKNTVYLQMNSLKPEDTAVYYCAAARTPYYQNVLRLYYWGQGTQVTVSS

SEQ ID NO: 6481 - protein, 122 aa, Artificial Sequence
  Chemically Synthesized
QVQLQESGGGLVQAGGSLRLSCAASGSIFDGIYMGWYRQAPGKEREFVATIATGGNTNYADSVKGRFTISRDNAKNTVYLQMNSLKPEDTAVYYCAAPDVRPTGSYVKHVYWGQGTQVTVSS

SEQ ID NO: 6482 - protein, 126 aa, Artificial Sequence
  Chemically Synthesized
QVQLQESGGGLVQAGGSLRLSCAASGNISTSYIMGWYRQAPGKEREFVAGISYGANTNYADSVKGRFTISRDNAKNTVYLQMNSLKPEDTAVYYCAVYDVWTWDLISAGRHSLYYWGQGTQVTVSS

SEQ ID NO: 6483 - protein, 118 aa, Artificial Sequence
  Chemically Synthesized
QVQLQESGGGLVQAGGSLRLSCAASGNISASGAMGWYRQAPGKEREFVAGIDNGGSTYYADSVKGRFTISRDNAKNTVYLQMNSLKPEDTAVYYCAVYGDERPALYYWGQGTQVTVSS

SEQ ID NO: 6484 - protein, 126 aa, Artificial Sequence
  Chemically Synthesized
QVQLQESGGGLVQAGGSLRLSCAASGTIFYAPYMGWYRQAPGKERELVASITEGANTNYADSVKGRFTISRDNAKNTVYLQMNSLKPEDTAVYYCAADHGGYTDGVVPDVPVHLYWGQGTQVTVSS

SEQ ID NO: 6485 - protein, 118 aa, Artificial Sequence
  Chemically Synthesized
QVQLQESGGGLVQAGGSLRLSCAASGNIFTDPYMGWYRQAPGKERELVAGITGGANTNYADSVKGRFTISRDNAKNTVYLQMNSLKPEDTAVYYCAARYSDGNGLWYWGQGTQVTVSS

SEQ ID NO: 6486 - protein, 126 aa, Artificial Sequence
  Chemically Synthesized
QVQLQESGGGLVQAGGSLRLSCAASGSISARLYMGWYRQAPGKERELVAGIGAGGITNYADSVKGRFTISRDNAKNTVYLQMNSLKPEDTAVYYCAAGYAHEEYVNGAADDYHAYWGQGTQVTVSS

SEQ ID NO: 6487 - protein, 118 aa, Artificial Sequence
  Chemically Synthesized
QVQLQESGGGLVQAGGSLRLSCAASGNISSWYGMGWYRQAPGKERELVASIGPGASTNYADSVKGRFTISRDNAKNTVYLQMNSLKPEDTAVYYCAAHAYESVLFPYWGQGTQVTVSS

SEQ ID NO: 6488 - protein, 118 aa, Artificial Sequence
  Chemically Synthesized
QVQLQESGGGLVQAGGSLRLSCAASGNISRYLSMGWYRQAPGKEREFVAGIDYGGNTYYADSVKGRFTISRDNAKNTVYLQMNSLKPEDTAVYYCAAPSQSFPSFLYWGQGTQVTVSS

SEQ ID NO: 6489 - protein, 118 aa, Artificial Sequence
  Chemically Synthesized
QVQLQESGGGLVQAGGSLRLSCAASGYISGWGEMGWYRQAPGKERELVAAIDIGATTNYADSVKGRFTISRDNAKNTVYLQMNSLKPEDTAVYYCAADDFPIVIFWYWGQGTQVTVSS

SEQ ID NO: 6490 - protein, 122 aa, Artificial Sequence
  Chemically Synthesized
QVQLQESGGGLVQAGGSLRLSCAASGTISLQYPMGWYRQAPGKERELVAGIALGGNTNYADSVKGRFTISRDNAKNTVYLQMNSLKPEDTAVYYCAVRGRWGDGKYSPLAYWGQGTQVTVSS

SEQ ID NO: 6491 - protein, 117 aa, Artificial Sequence
  Chemically Synthesized
QVQLQESGGGLVQAGGSLRLSCAASGNISGGDVMGWYRQAPGKEREFVATIASVLLPYADSVKGRFTISRDNAKNTVYLQMNSLKPEDTAVYYCAAVIGYEYYHYYWGQGTQVTVSS

SEQ ID NO: 6492 - protein, 121 aa, Artificial Sequence
  Chemically Synthesized
QVQLQESGGGLVQAGGSLRLSCAASGYISNDSFMGWYRQAPGKEREFVASIDQGTSTYADSVKGRFTISRDNAKNTVYLQMNSLKPEDTAVYYCAAAAEAWRGYPRYYRYWGQGTQVTVSS

SEQ ID NO: 6493 - protein, 118 aa, Artificial Sequence
  Chemically Synthesized
QVQLQESGGGLVQAGGSLRLSCAASGTISSYAYMGWYRQAPGKERELVASIAPGGTTYYADSVKGRFTISRDNAKNTVYLQMNSLKPEDTAVYYCAAYVGHVNTYRYWGQGTQVTVSS

SEQ ID NO: 6494 - protein, 126 aa, Artificial Sequence
  Chemically Synthesized
QVQLQESGGGLVQAGGSLRLSCAASGTIFAPDAMGWYRQAPGKERELVAGIDPGASTYYADSVKGRFTISRDNAKNTVYLQMNSLKPEDTAVYYCAAVYLGHLGHWDKVRPLHDYWGQGTQVTVSS

SEQ ID NO: 6495 - protein, 125 aa, Artificial Sequence
  Chemically Synthesized
QVQLQESGGGLVQAGGSLRLSCAASGSISADYYMGWYRQAPGKEREFVASISRGSTTYYADSVKGRFTISRDNAKNTVYLQMNSLKPEDTAVYYCAVYQLYDLDSRTYSVDHYYWGQGTQVTVSS

SEQ ID NO: 6496 - protein, 122 aa, Artificial Sequence
  Chemically Synthesized
QVQLQESGGGLVQAGGSLRLSCAASGTIFPYKYMGWYRQAPGKERELVASISDGAITYYADSVKGRFTISRDNAKNTVYLQMNSLKPEDTAVYYCAVGSDVYGYDRPYLYYWGQGTQVTVSS

SEQ ID NO: 6497 - protein, 116 aa, Artificial Sequence
  Chemically Synthesized
QVQLQESGGGLVQAGGSLRLSCAASGSMGWYRQAPGKERELVASIAYGGITYYADSVKGRFTISRDNAKNTVYLQMNSLKPEDTAVYYCAVQGYYTYSYDGPYYYWGQGTQVTVSS

SEQ ID NO: 6498 - protein, 110 aa, Artificial Sequence
  Chemically Synthesized
QVQLQESGGGLVQAGGSLRLSCAASGYIFGQTLMGWYRQAPGKERELVATINYGTNTYYADSVKGRFTISRDNAKNTVYLQMNSLKPEDTAVYYCAHVYWGQGTQVTVSS

SEQ ID NO: 6499 - protein, 118 aa, Artificial Sequence
  Chemically Synthesized
QVQLQESGGGLVQAGGSLRLSCAASGTISAYYAMGWYRQAPGKERELVASIAYGATTNYADSVKGRFTISRDNAKNTVYLQMNSLKPEDTAVYYCAADTRWYDILTYWGQGTQVTVSS

SEQ ID NO: 6500 - protein, 118 aa, Artificial Sequence
  Chemically Synthesized
QVQLQESGGGLVQAGGSLRLSCAASGTIFQGDIMGWYRQAPGKERELVASIAYGGSTNYADSVKGRFTISRDNAKNTVYLQMNSLKPEDTAVYYCAAILLYGHAFNYWGQGTQVTVSS

SEQ ID NO: 6501 - protein, 122 aa, Artificial Sequence
  Chemically Synthesized
QVQLQESGGGLVQAGGSLRLSCAASGYISIYYNMGWYRQAPGKEREFVAGICRGANTYYADSVKGRFTISRDNAKNTVYLQMNSLKPEDTAVYYCAVPYDIQYGYARPHYYWGQGTQVTVSS

SEQ ID NO: 6502 - protein, 122 aa, Artificial Sequence
  Chemically Synthesized
QVQLQESGGGLVQAGGSLRLSCAASGNISWSGPMGWYRQAPGKEREFVAGISYGGSTYYADSVKGRFTISRDNAKNTVYLQMNSLKPEDTAVYYCAAPIYDDWPYIPYLGYWGQGTQVTVSS

SEQ ID NO: 6503 - protein, 118 aa, Artificial Sequence
  Chemically Synthesized
QVQLQESGGGLVQAGGSLRLSCAASGTISYYSYMGWYRQAPGKERELVAGITNGSNTYYADSVKGRFTISRDNAKNTVYLQMNSLKPEDTAVYYCAATQDAGDAHVYWGQGTQVTVSS

SEQ ID NO: 6504 - protein, 122 aa, Artificial Sequence
  Chemically Synthesized
QVQLQESGGGLVQAGGSLRLSCAASGSISHLYYMGWYRQAPGKERELVAGIADGSITNYADSVKGRFTISRDNAKNTVYLQMNSLKPEDTAVYYCAVVYYDYGWYNVLYGYWGQGTQVTVSS

SEQ ID NO: 6505 - protein, 112 aa, Artificial Sequence
  Chemically Synthesized
QVQLQESGGGLVQAGGSLRLSCAASGNIFYTSDMGWYRQAPGKERELVAGYQYADSVKGRFTISRDNAKNTVYLQMNSLKPEDTAVYYCAVDQYSAQSFTYWGQGTQVTVSS

SEQ ID NO: 6506 - protein, 118 aa, Artificial Sequence
  Chemically Synthesized
QVQLQESGGGLVQAGGSLRLSCAASGTISSNGEMGWYRQAPGKERELVAGIDYGTSTNYADSVKGRFTISRDNAKNTVYLQMNSLKPEDTAVYYCAANALDVGYYNYWGQGTQVTVSS

SEQ ID NO: 6507 - protein, 114 aa, Artificial Sequence
  Chemically Synthesized
QVQLQESGGGLVQAGGSLRLSCAASGSISTRRPMGWYRQAPGKEREFVATITVGGTTNYADSVKGRFTISRDNAKNTVYLQMNSLKPEDTAVYYCAASDGFDYWGQGTQVTVSS

SEQ ID NO: 6508 - protein, 126 aa, Artificial Sequence
  Chemically Synthesized
QVQLQESGGGLVQAGGSLRLSCAASGNISDADYMGWYRQAPGKERELVASIDTGTNTYYADSVKGRFTISRDNAKNTVYLQMNSLKPEDTAVYYCAADVDREDSRSALDVGDLGYWGQGTQVTVSS

SEQ ID NO: 6509 - protein, 125 aa, Artificial Sequence
  Chemically Synthesized
QVQLQESGGGLVQAGGSLRLSCAASGNISDYYDMGWYRQAPGKERELVASIASGASTYYADSVKGRFTISRDNAKNTVYLQMNSLKPEDTAVYYCAAGPAILPSMVVVVTTTFYWGQGTQVTVSS

SEQ ID NO: 6510 - protein, 117 aa, Artificial Sequence
  Chemically Synthesized
QVQLQESGGGLVQAGGSLRLSCAASGTISDPAYMGWYRQAPGKERELLPLLITVLLPYADSVKGRFTISRDNAKNTVYLQMNSLKPEDTAVYYCAVWGDYYFDFYYWGQGTQVTVSS

SEQ ID NO: 6511 - protein, 126 aa, Artificial Sequence
  Chemically Synthesized
QVQLQESGGGLVQAGGSLRLSCAASGNIFRRDRMGWYRQAPGKERELVAGIDVGANTYYADSVKGRFTISRDNAKNTVYLQMNSLKPEDTAVYYCAAQIADAYVNGLNDVGWHGYWGQGTQVTVSS

SEQ ID NO: 6512 - protein, 126 aa, Artificial Sequence
  Chemically Synthesized
QVQLQESGGGLVQAGGSLRLSCAASGTIFYVIHMGWYRQAPGKERELVAGIGYGTSTNYADSVKGRFTISRDNAKNTVYLQMNSLKPEDTAVYYCAALAQAGYGVRKTWYGGYPYWGQGTQVTVSS

SEQ ID NO: 6513 - protein, 118 aa, Artificial Sequence
  Chemically Synthesized
QVQLQESGGGLVQAGGSLRLSCAASGYISQDVAMGWYRQAPGKEREFVATISIGATTNYADSVKGRFTISRDNAKNTVYLQMNSLKPEDTAVYYCAAVVQDIADYYYWGQGTQVTVSS

SEQ ID NO: 6514 - protein, 117 aa, Artificial Sequence
  Chemically Synthesized
QVQLQESGGGLVQAGGSLRLSCAASGTISQTYLMGWYRQAPGKEREFVAAIDGGANTNYADSVKGRFTISRDNAKNTVYLQMNSLKPEDTAVYYCAASRPRGTSMYWGQGTQVTVSS

SEQ ID NO: 6515 - protein, 118 aa, Artificial Sequence
  Chemically Synthesized
QVQLQESGGGLVQAGGSLRLSCAASGTISGVLGMGWYRQAPGKEREFVAAIDDGSITNYADSVKGRFTISRDNAKNTVYLQMNSLKPEDTAVYYCAANVDDDAPFAYWGQGTQVTVSS

SEQ ID NO: 6516 - protein, 120 aa, Artificial Sequence
  Chemically Synthesized
QVQLQESGGGLVQAGGSLRLSCAASGSISSSTMGWYRQAPGKEREFVASIAPGATTNYADSVKGRFTISRDNAKNTVYLQMNSLKPEDTAVYYCAAYILYYDGDYPYYYWGQGTQVTVSS

SEQ ID NO: 6517 - protein, 122 aa, Artificial Sequence
  Chemically Synthesized
QVQLQESGGGLVQAGGSLRLSCAASGYISPPFHMGWYRQAPGKEREFVATISSGATTYYADSVKGRFTISRDNAKNTVYLQMNSLKPEDTAVYYCAVLYSYRYGEYPLHDYWGQGTQVTVSS

SEQ ID NO: 6518 - protein, 122 aa, Artificial Sequence
  Chemically Synthesized
QVQLQESGGGLVQAGGSLRLSCAASGTISDKVAMGWYRQAPGKERELVATIGDGANTYYADSVKGRFTISRDNAKNTVYLQMNSLKPEDTAVYYCAAHPSIYAYTPYHLLYWGQGTQVTVSS

SEQ ID NO: 6519 - protein, 116 aa, Artificial Sequence
  Chemically Synthesized
QVQLQESGGGLVQAGGSLRLSCAASGSISKVTRMGWYRQAPGKERELVAGITFGTNTNYADSVKGRFTISRDNAKNTVYLQMNSLKPEDTAVYYCAVYDQSAYLYWGQGTQVTVSS

SEQ ID NO: 6520 - protein, 125 aa, Artificial Sequence
  Chemically Synthesized
QVQLQESGGGLVQAGGSLRLSCAASGTISKHLDMGWYRQAPGKEREFVPLLLTVLLPYADSVKGRFTISRDNAKNTVYLQMNSLKPEDTAVYYCAVTDKSPDGRVVDRDHDFSYWGQGTQVTVSS

SEQ ID NO: 6521 - protein, 118 aa, Artificial Sequence
  Chemically Synthesized
QVQLQESGGGLVQAGGSLRLSCAASGYISGGVIMGWYRQAPGKERELVATIGYGGNTNYADSVKGRFTISRDNAKNTVYLQMNSLKPEDTAVYYCAVDPTYYTRLHYWGQGTQVTVSS

SEQ ID NO: 6522 - protein, 118 aa, Artificial Sequence
  Chemically Synthesized
QVQLQESGGGLVQAGGSLRLSCAASGTISYVYDMGWYRQAPGKEREFVAGIDYGANTNYADSVKGRFTISRDNAKNTVYLQMNSLKPEDTAVYYCAVDDTVTYNHNYWGQGTQVTVSS

SEQ ID NO: 6523 - protein, 118 aa, Artificial Sequence
  Chemically Synthesized
QVQLQESGGGLVQAGGSLRLSCAASGYISGYYDMGWYRQAPGKEREFVAGIDDGSITNYADSVKGRFTISRDNAKNTVYLQMNSLKPEDTAVYYCAVSDWQYATHRYWGQGTQVTVSS

SEQ ID NO: 6524 - protein, 122 aa, Artificial Sequence
  Chemically Synthesized
QVQLQESGGGLVQAGGSLRLSCAASGTISRAGDMGWYRQAPGKEREFVASIAEGASTNYADSVKGRFTISRDNAKNTVYLQMNSLKPEDTAVYYCAVYYSRDDYRGRDYRYWGQGTQVTVSS

SEQ ID NO: 6525 - protein, 116 aa, Artificial Sequence
  Chemically Synthesized
QVQLQESGGGLVQAGGSLRLSCAASGYIFGHYDMGWYRQAPGKERELVAIAVGSTTNYADSVKGRFTISRDNAKNTVYLQMNSLKPEDTAVYYCAASSNWLTGMYWGQGTQVTVSS

SEQ ID NO: 6526 - protein, 121 aa, Artificial Sequence
  Chemically Synthesized
QVQLQESGGGLVQAGGSLRLSCAASGYISLADDMGWYRQAPGKEREFVAGIAPGTITYYADSVKGRFTISRDNAKNTVYLQMNSLKPEDTAVYYCAATTYYRKAARLYFYWGQGTQVTVSS

SEQ ID NO: 6527 - protein, 122 aa, Artificial Sequence
  Chemically Synthesized
QVQLQESGGGLVQAGGSLRLSCAASGTISVSWIMGWYRQAPGKERELVAAIAKGTTTYYADSVKGRFTISRDNAKNTVYLQMNSLKPEDTAVYYCAVRHRTISVQDSTYAYWGQGTQVTVSS

SEQ ID NO: 6528 - protein, 118 aa, Artificial Sequence
  Chemically Synthesized
QVQLQESGGGLVQAGGSLRLSCAASGTISVTSDMGWYRQAPGKERELVAGINAGSITYYADSVKGRFTISRDNAKNTVYLQMNSLKPEDTAVYYCAVRQYGTTFHSYWGQGTQVTVSS

SEQ ID NO: 6529 - protein, 121 aa, Artificial Sequence
  Chemically Synthesized
QVQLQESGGGLVQAGGSLRLSCAASGYISDWSVMGWYRQAPGKERELVATISYGGITNYADSVKGRFTISRDNAKNTVYLQMNSLKPEDTAVYYCAARYAQGRTRSSTIYWGQGTQVTVSS

SEQ ID NO: 6530 - protein, 118 aa, Artificial Sequence
  Chemically Synthesized
QVQLQESGGGLVQAGGSLRLSCAASGNISGGLYMGWYRQAPGKERELVAAITYGSSTYYADSVKGRFTISRDNAKNTVYLQMNSLKPEDTAVYYCAVYDGSPSHHVYWGQGTQVTVSS

SEQ ID NO: 6531 - protein, 117 aa, Artificial Sequence
  Chemically Synthesized
QVQLQESGGGLVQAGGSLRLSCAASGSIFADDYMGWYRQAPGKERELVATISSVVVPYADSVKGRFTISRDNAKNTVYLQMNSLKPEDTAVYYCAADRPYRDTLIYWGQGTQVTVSS

SEQ ID NO: 6532 - protein, 116 aa, Artificial Sequence
  Chemically Synthesized
QVQLQESGGGLVQAGGSLRLSCAASGNISHRYDMGWYRQAPGKEREFVAAIADGTNTNYADSVKGRFTISRDNAKNTVYLQMNSLKPEDTAVYYCALVVTLRLMYWGQGTQVTVSS

SEQ ID NO: 6533 - protein, 118 aa, Artificial Sequence
  Chemically Synthesized
QVQLQESGGGLVQAGGSLRLSCAASGSISPDPYMGWYRQAPGKERELVATITSGTITNYADSVKGRFTISRDNAKNTVYLQMNSLKPEDTAVYYCAVYRYGTDYLRYWGQGTQVTVSS

SEQ ID NO: 6534 - protein, 118 aa, Artificial Sequence
  Chemically Synthesized
QVQLQESGGGLVQAGGSLRLSCAASGTIFRYVYMGWYRQAPGKERELVAAITWGGITYYADSVKGRFTISRDNAKNTVYLQMNSLKPEDTAVYYCAAYTYAYYYLRYWGQGTQVTVSS

SEQ ID NO: 6535 - protein, 118 aa, Artificial Sequence
  Chemically Synthesized
QVQLQESGGGLVQAGGSLRLSCAASGTISYNGYMGWYRQAPGKEREFVAAINLGSSTNYADSVKGRFTISRDNAKNTVYLQMNSLKPEDTAVYYCAAKGTVVVNHWYWGQGTQVTVSS

SEQ ID NO: 6536 - protein, 126 aa, Artificial Sequence
  Chemically Synthesized
QVQLQESGGGLVQAGGSLRLSCAASGNISWWHYMGWYRQAPGKEREFVASISFGTSTYYADSVKGRFTISRDNAKNTVYLQMNSLKPEDTAVYYCAAAYDSDRGYDILDGAGLYYWGQGTQVTVSS

SEQ ID NO: 6537 - protein, 118 aa, Artificial Sequence
  Chemically Synthesized
QVQLQESGGGLVQAGGSLRLSCAASGYISRSGYMGWYRQAPGKERELVAGISYGSSTNYADSVKGRFTISRDNAKNTVYLQMNSLKPEDTAVYYCAADSRGIVVHVYWGQGTQVTVSS

SEQ ID NO: 6538 - protein, 110 aa, Artificial Sequence
  Chemically Synthesized
QVQLQESGGGLVQAGGSLRLSCAASGYIFGRHYMGWYRQAPGKEREFVASISAGGITNYADSVKGRFTISRDNAKNTVYLQMNSLKPEDTAVYYCATMYWGQGTQVTVSS

SEQ ID NO: 6539 - protein, 118 aa, Artificial Sequence
  Chemically Synthesized
QVQLQESGGGLVQAGGSLRLSCAASGTISRWTAMGWYRQAPGKEREFVAGITKGSITYYADSVKGRFTISRDNAKNTVYLQMNSLKPEDTAVYYCAVQYLAGWWYKYWGQGTQVTVSS

SEQ ID NO: 6540 - protein, 122 aa, Artificial Sequence
  Chemically Synthesized
QVQLQESGGGLVQAGGSLRLSCAASGTISWDYGMGWYRQAPGKERELVAGIGDGANYLYADSVKGRFTISRDNAKNTVYLQMNSLKPEDTAVYYCAALDGLVYPRNVSFWYWGQGTQVTVSS

SEQ ID NO: 6541 - protein, 126 aa, Artificial Sequence
  Chemically Synthesized
QVQLQESGGGLVQAGGSLRLSCAASGTISSLISMGWYRQAPGKEREFVAAINDGGTTNYADSVKGRFTISRDNAKNTVYLQMNSLKPEDTAVYYCAAYGGPYGVLKRYPYWDLVYWGQGTQVTVSS

SEQ ID NO: 6542 - protein, 118 aa, Artificial Sequence
  Chemically Synthesized
QVQLQESGGGLVQAGGSLRLSCAASGSIFRYDYMGWYRQAPGKEREFVASISQGGITYYADSVKGRFTISRDNAKNTVYLQMNSLKPEDTAVYYCAAQSLGDDSHWYWGQGTQVTVSS

SEQ ID NO: 6543 - protein, 122 aa, Artificial Sequence
  Chemically Synthesized
QVQLQESGGGLVQAGGSLRLSCAASGNIFADENMGWYRQAPGKERELVASIGDGAITYYADSVKGRFTISRDNAKNTVYLQMNSLKPEDTAVYYCAVPRGHYYVSDVRHAYWGQGTQVTVSS

SEQ ID NO: 6544 - protein, 115 aa, Artificial Sequence
  Chemically Synthesized
QVQLQESGGGLVQAGGSLRLSCAASGTIFIRYDMGWYRQAPGKERELVASISWGTTTYYADSVKGRFTISRDNAKNTVYLQMNSLKPEDTAVYYCAAHVPYLDYWGQGTQVTVSS

SEQ ID NO: 6545 - protein, 117 aa, Artificial Sequence
  Chemically Synthesized
QVQLQESGGGLVQAGGSLRLSCAASGNIFQRGRMGWYRQAPGKEREFVATITSVLLPYADSVKGRFTISRDNAKNTVYLQMNSLKPEDTAVYYCAVLFRILYSHDYWGQGTQVTVSS

SEQ ID NO: 6546 - protein, 122 aa, Artificial Sequence
  Chemically Synthesized
QVQLQESGGGLVQAGGSLRLSCAASGTISRALDMGWYRQAPGKEREFVAAISYGTNTNYADSVKGRFTISRDNAKNTVYLQMNSLKPEDTAVYYCAVYNRDGYGIYERFAYWGQGTQVTVSS

SEQ ID NO: 6547 - protein, 112 aa, Artificial Sequence
  Chemically Synthesized
QVQLQESGGGLVQAGGSLRLSCAASGTISSEDWMGWYRQAPGKERELVATIAGGTTTYYADSVKGRFTISRDNAKNTVYLQMNSLKPEDTAVYYCADQFRYWGQGTQVTVSS

SEQ ID NO: 6548 - protein, 122 aa, Artificial Sequence
  Chemically Synthesized
QVQLQESGGGLVQAGGSLRLSCAASGNISDHAPMGWYRQAPGKERELVATITTGTITYYADSVKGRFTISRDNAKNTVYLQMNSLKPEDTAVYYCAAYDEGDVVSVAILGYWGQGTQVTVSS

SEQ ID NO: 6549 - protein, 126 aa, Artificial Sequence
  Chemically Synthesized
QVQLQESGGGLVQAGGSLRLSCAASGTISVAWAMGWYRQAPGKERELVAAIAWGTTTYYADSVKGRFTISRDNAKNTVYLQMNSLKPEDTAVYYCAAQWYGDADGTPWGDYFLDYWGQGTQVTVSS

SEQ ID NO: 6550 - protein, 122 aa, Artificial Sequence
  Chemically Synthesized
QVQLQESGGGLVQAGGSLRLSCAASGTISDPYDMGWYRQAPGKERELVASIGFGSNTYYADSVKGRFTISRDNAKNTVYLQMNSLKPEDTAVYYCAVDYAYRYEITGNLPYWGQGTQVTVSS

SEQ ID NO: 6551 - protein, 117 aa, Artificial Sequence
  Chemically Synthesized
QVQLQESGGGLVQAGGSLRLSCAASGSISDLHMGWYRQAPGKERELVAGIGDGANTNYADSVKGRFTISRDNAKNTVYLQMNSLKPEDTAVYYCAVHIKFPRYLGYWGQGTQVTVSS

SEQ ID NO: 6552 - protein, 118 aa, Artificial Sequence
  Chemically Synthesized
QVQLQESGGGLVQAGGSLRLSCAASGYIFRWPFMGWYRQAPGKEREFVAAIAEGGNTNYADSVKGRFTISRDNAKNTVYLQMNSLKPEDTAVYYCAAFVRSQFQHKYWGQGTQVTVSS

SEQ ID NO: 6553 - protein, 119 aa, Artificial Sequence
  Chemically Synthesized
QVQLQESGGGLVQAGGSLRLSCAASGNISVHQDMGWYRQAPGKERELVASIAVGANTNYADSVKGRFTISRDNAKNTVYLQMNSLKPEDTAVYYCAVDHLVYLYDLIYWGQGTQVTVSS

SEQ ID NO: 6554 - protein, 118 aa, Artificial Sequence
  Chemically Synthesized
QVQLQESGGGLVQAGGSLRLSCAASGTISARQYMGWYRQAPGKERELVATIGAGGSTYYADSVKGRFTISRDNAKNTVYLQMNSLKPEDTAVYYCAAYWPTSVGLYYWGQGTQVTVSS

SEQ ID NO: 6555 - protein, 122 aa, Artificial Sequence
  Chemically Synthesized
QVQLQESGGGLVQAGGSLRLSCAASGTIFGRGAMGWYRQAPGKERELVATIGGGTNTNYADSVKGRFTISRDNAKNTVYLQMNSLKPEDTAVYYCAAWITGPYFGYIPHGYWGQGTQVTVSS

SEQ ID NO: 6556 - protein, 118 aa, Artificial Sequence
  Chemically Synthesized
QVQLQESGGGLVQAGGSLRLSCAASGTISYHATMGWYRQAPGKERELVAAIGYGGITYYADSVKGRFTISRDNAKNTVYLQMNSLKPEDTAVYYCAVQAGYVWQYAYWGQGTQVTVSS

SEQ ID NO: 6557 - protein, 126 aa, Artificial Sequence
  Chemically Synthesized
QVQLQESGGGLVQAGGSLRLSCAASGYISQQYPMGWYRQAPGKERELVAGIDIGTSTYYADSVKGRFTISRDNAKNTVYLQMNSLKPEDTAVYYCAAYGREYPTSWTGRPFGYAYWGQGTQVTVSS

SEQ ID NO: 6558 - protein, 113 aa, Artificial Sequence
  Chemically Synthesized
QVQLQESGGGLVQAGGSLRLSCAASGNISWTYTMGWYRQAPGKEREFVAGIGPGGSTYYADSVKGRFTISRDNAKNTVYLQMNSLKPEDTAVYYCAAYVNDYWGQGTQVTVSS

SEQ ID NO: 6559 - protein, 118 aa, Artificial Sequence
  Chemically Synthesized
QVQLQESGGGLVQAGGSLRLSCAASGTISLRYDMGWYRQAPGKERELVAAIGKGATTNYADSVKGRFTISRDNAKNTVYLQMNSLKPEDTAVYYCAVGYDYQSWLQYWGQGTQVTVSS

SEQ ID NO: 6560 - protein, 118 aa, Artificial Sequence
  Chemically Synthesized
QVQLQESGGGLVQAGGSLRLSCAASGTIFYYSGMGWYRQAPGKEREFVAAIGWGGTTNYADSVKGRFTISRDNAKNTVYLQMNSLKPEDTAVYYCAAGVNLYPYLGYWGQGTQVTVSS

SEQ ID NO: 6561 - protein, 117 aa, Artificial Sequence
  Chemically Synthesized
QVQLQESGGGLVQAGGSLRLSCAASGTIFPVDMGWYRQAPGKEREFVATITQGASTYYADSVKGRFTISRDNAKNTVYLQMNSLKPEDTAVYYCAADDDGRDEHEYWGQGTQVTVSS

SEQ ID NO: 6562 - protein, 109 aa, Artificial Sequence
  Chemically Synthesized
QVQLQESGGGLVQAGGSLRLSCAASGNISDTVIMGWYRQAPGKERELVAAIGVGASTNYADSVKGRFTISRDNAKNTVYLQMNSLKPEDTAVYYCAIYWGQGTQVTVSS

SEQ ID NO: 6563 - protein, 126 aa, Artificial Sequence
  Chemically Synthesized
QVQLQESGGGLVQAGGSLRLSCAASGSISQLLGMGWYRQAPGKERELVATIDGGGTTNYADSVKGRFTISRDNAKNTVYLQMNSLKPEDTAVYYCAADAISTGLLSREGYYFYAYWGQGTQVTVSS

SEQ ID NO: 6564 - protein, 122 aa, Artificial Sequence
  Chemically Synthesized
QVQLQESGGGLVQAGGSLRLSCAASGTISSTSRMGWYRQAPGKEREFVAAITDGTNTYYADSVKGRFTISRDNAKNTVYLQMNSLKPEDTAVYYCAAYQPFRADYYSVYAYWGQGTQVTVSS

SEQ ID NO: 6565 - protein, 117 aa, Artificial Sequence
  Chemically Synthesized
QVQLQESGGGLVQAGGSLRLSCAASGNISADTYMGWYRQAPGKERELVAAIAFGSITYYADSVKGRFTISRDNAKNTVYLQMNSLKPEDTAVYYCAVILGYDSHAYWGQGTQVTVSS

SEQ ID NO: 6566 - protein, 120 aa, Artificial Sequence
  Chemically Synthesized
QVQLQESGGGLVQAGGSLRLSCAASGLFLSRTMGWYRQAPGKERELVASIADGSTTNYADSVKGRFTISRDNAKNTVYLQMNSLKPEDTAVYYCAAGYYDSWYAPRYLYWGQGTQVTVSS

SEQ ID NO: 6567 - protein, 121 aa, Artificial Sequence
  Chemically Synthesized
QVQLQESGGGLVQAGGSLRLSCAASGYISRNGAMGWYRQAPGKERELVAAISGGGITNYADSVKGRFTISRDNAKNTVYLQMNSLKPEDTAVYYCAAFTVTTVTVGTTIYWGQGTQVTVSS

SEQ ID NO: 6568 - protein, 118 aa, Artificial Sequence
  Chemically Synthesized
QVQLQESGGGLVQAGGSLRLSCAASGTIFRPRAMGWYRQAPGKERELVAGITYGGNTNYADSVKGRFTISRDNAKNTVYLQMNSLKPEDTAVYYCAVVDYDAYVLDYWGQGTQVTVSS

SEQ ID NO: 6569 - protein, 117 aa, Artificial Sequence
  Chemically Synthesized
QVQLQESGGGLVQAGGSLRLSCAASGTISIYGMGWYRQAPGKEREFVAAITSGTTTYYADSVKGRFTISRDNAKNTVYLQMNSLKPEDTAVYYCAANYETAGNHTYWGQGTQVTVSS

SEQ ID NO: 6570 - protein, 116 aa, Artificial Sequence
  Chemically Synthesized
QVQLQESGGGLVQAGGSLRLSCAASGNIFTYDYMGWYRQAPGKERELVASIGDGGITNYADSVKGRFTISRDNAKNTVYLQMNSLKPEDTAVYYCAATRGYTAYYWGQGTQVTVSS

SEQ ID NO: 6571 - protein, 118 aa, Artificial Sequence
  Chemically Synthesized
QVQLQESGGGLVQAGGSLRLSCAASGSISTQLYMGWYRQAPGKEREFVAAIGYGSSTYYADSVKGRFTISRDNAKNTVYLQMNSLKPEDTAVYYCAVITHYLDTFPYWGQGTQVTVSS

SEQ ID NO: 6572 - protein, 122 aa, Artificial Sequence
  Chemically Synthesized
QVQLQESGGGLVQAGGSLRLSCAASGYISIALHMGWYRQAPGKERELVAGIAPGTNTNYADSVKGRFTISRDNAKNTVYLQMNSLKPEDTAVYYCAVGRRSYYTRDDYLTYWGQGTQVTVSS

SEQ ID NO: 6573 - protein, 121 aa, Artificial Sequence
  Chemically Synthesized
QVQLQESGGGLVQAGGSLRLSCAASGTISEPLGMGWYRQAPGKERELVATIAQGGITYYADSVKGRFTISRDNAKNTVYLQMNSLKPEDTAVYYCAAATFTDDYAQYHDYWGQGTQVTVSS

SEQ ID NO: 6574 - protein, 117 aa, Artificial Sequence
  Chemically Synthesized
QVQLQESGGGLVQAGGSLRLSCAASGYIFLRRYMGWYRQAPGKERELVATINTGASTYYADSVKGRFTISRDNAKNTVYLQMNSLKPEDTAVYYCAVATGDYGYAYWGQGTQVTVSS

SEQ ID NO: 6575 - protein, 122 aa, Artificial Sequence
  Chemically Synthesized
QVQLQESGGGLVQAGGSLRLSCAASGNISNPYVMGWYRQAPGKEREFVAAITTGTNTYYADSVKGRFTISRDNAKNTVYLQMNSLKPEDTAVYYCAVGYGGYPYYQSDHYYWGQGTQVTVSS

SEQ ID NO: 6576 - protein, 118 aa, Artificial Sequence
  Chemically Synthesized
QVQLQESGGGLVQAGGSLRLSCAASGSISVDDFMGWYRQAPGKERELVASINTGGNTYYADSVKGRFTISRDNAKNTVYLQMNSLKPEDTAVYYCAATWSADRLPFYWGQGTQVTVSS

SEQ ID NO: 6577 - protein, 118 aa, Artificial Sequence
  Chemically Synthesized
QVQLQESGGGLVQAGGSLRLSCAASGTISTLTWMGWYRQAPGKEREFVAGISFGSTTYYADSVKGRFTISRDNAKNTVYLQMNSLKPEDTAVYYCAVGTASAYPFDYWGQGTQVTVSS

SEQ ID NO: 6578 - protein, 122 aa, Artificial Sequence
  Chemically Synthesized
QVQLQESGGGLVQAGGSLRLSCAASGTISYAVDMGWYRQAPGKERELVATIAHGTTTNYADSVKGRFTISRDNAKNTVYLQMNSLKPEDTAVYYCAVIYLRYDTYRYGYDYWGQGTQVTVSS

SEQ ID NO: 6579 - protein, 118 aa, Artificial Sequence
  Chemically Synthesized
QVQLQESGGGLVQAGGSLRLSCAASGNIFVPYPMGWYRQAPGKERELVASIADGTSTNYADSVKGRFTISRDNAKNTVYLQMNSLKPEDTAVYYCAADPQLDYPLPYWGQGTQVTVSS

SEQ ID NO: 6580 - protein, 121 aa, Artificial Sequence
  Chemically Synthesized
QVQLQESGGGLVQAGGSLRLSCAASGNIFLTVGMGWYRQAPGKEREFVASIAYGGTTNYADSVKGRFTISRDNAKNTVYLQMNSLKPEDTAVYYCAVLSSGTLSGVRSFYWGQGTQVTVSS

SEQ ID NO: 6581 - protein, 125 aa, Artificial Sequence
  Chemically Synthesized
QVQLQESGGGLVQAGGSLRLSCAASGSISSFCMGWYRQAPGKERELVAAIDHGSNTYYADSVKGRFTISRDNAKNTVYLQMNSLKPEDTAVYYCAVGVPYDVFYSTLHFQFLYYWGQGTQVTVSS

SEQ ID NO: 6582 - protein, 126 aa, Artificial Sequence
  Chemically Synthesized
QVQLQESGGGLVQAGGSLRLSCAASGYISTLDAMGWYRQAPGKEREFVAAISYGAITYYADSVKGRFTISRDNAKNTVYLQMNSLKPEDTAVYYCAAGPPFKDGEDRTVNKAYPYWGQGTQVTVSS

SEQ ID NO: 6583 - protein, 114 aa, Artificial Sequence
  Chemically Synthesized
QVQLQESGGGLVQAGGSLRLSCAASGSIFGGTMGWYRQAPGKERELVATINAGTITYYADSVKGRFTISRDNAKNTVYLQMNSLKPEDTAVYYCAVYDIYDFYWGQGTQVTVSS

SEQ ID NO: 6584 - protein, 122 aa, Artificial Sequence
  Chemically Synthesized
QVQLQESGGGLVQAGGSLRLSCAASGYIFAPGTMGWYRQAPGKEREFVAAIGRGASTYYADSVKGRFTISRDNAKNTVYLQMNSLKPEDTAVYYCAVVDSVTGQTVVWYGYWGQGTQVTVSS

SEQ ID NO: 6585 - protein, 119 aa, Artificial Sequence
  Chemically Synthesized
QVQLQESGGGLVQAGGSLRLSCAASGNIFNYQSMGWYRQAPGKERELVASIDSGTTTYYADSVKGRFTISRDNAKNTVYLQMNSLKPEDTAVYYCAVAERVGEWGYPYWGQGTQVTVSS

SEQ ID NO: 6586 - protein, 118 aa, Artificial Sequence
  Chemically Synthesized
QVQLQESGGGLVQAGGSLRLSCAASGTISEHRRMGWYRQAPGKEREFVASISAGSSTNYADSVKGRFTISRDNAKNTVYLQMNSLKPEDTAVYYCAVKGVDRRVHYYWGQGTQVTVSS

SEQ ID NO: 6587 - protein, 117 aa, Artificial Sequence
  Chemically Synthesized
QVQLQESGGGLVQAGGSLRLSCAASGTISGALQMGWYRQAPGKEREFVAGIDSGTSTYADSVKGRFTISRDNAKNTVYLQMNSLKPEDTAVYYCAVQNNAGGNFEYWGQGTQVTVSS

SEQ ID NO: 6588 - protein, 119 aa, Artificial Sequence
  Chemically Synthesized
QVQLQESGGGLVQAGGSLRLSCAASGTIFFSPTMGWYRQAPGKEREFVASIGYGTITYYADSVKGRFTISRDNAKNTVYLQMNSLKPEDTAVYYCAFVTSNSLVTVIYWGQGTQVTVSS

SEQ ID NO: 6589 - protein, 121 aa, Artificial Sequence
  Chemically Synthesized
QVQLQESGGGLVQAGGSLRLSCAASGNISGGSMGWYRQAPGKERELVAGINIGGTTNYADSVKGRFTISRDNAKNTVYLQMNSLKPEDTAVYYCAVRYTNRHYDRLIYGYWGQGTQVTVSS

SEQ ID NO: 6590 - protein, 118 aa, Artificial Sequence
  Chemically Synthesized
QVQLQESGGGLVQAGGSLRLSCAASGTISGKGGMGWYRQAPGKERELVAAITYGGSTYYADSVKGRFTISRDNAKNTVYLQMNSLKPEDTAVYYCAATFFGIEYFEYWGQGTQVTVSS

SEQ ID NO: 6591 - protein, 126 aa, Artificial Sequence
  Chemically Synthesized
QVQLQESGGGLVQAGGSLRLSCAASGTISGPTPMGWYRQAPGKEREFVASITYGTSTYYADSVKGRFTISRDNAKNTVYLQMNSLKPEDTAVYYCAVDAGQYRNDTDWDGGDHRYWGQGTQVTVSS

SEQ ID NO: 6592 - protein, 116 aa, Artificial Sequence
  Chemically Synthesized
QVQLQESGGGLVQAGGSLRLSCAASGYIFDVYSMGWYRQAPGKERELVAAIGTGGITNYADSVKGRFTISRDNAKNTVYLQMNSLKPEDTAVYYCAAYDDTGSSYWGQGTQVTVSS

SEQ ID NO: 6593 - protein, 118 aa, Artificial Sequence
  Chemically Synthesized
QVQLQESGGGLVQAGGSLRLSCAASGNIFDSYYMGWYRQAPGKERELVATIAFGGTTNYADSVKGRFTISRDNAKNTVYLQMNSLKPEDTAVYYCAAWPAYGQVHYYWGQGTQVTVSS

SEQ ID NO: 6594 - protein, 126 aa, Artificial Sequence
  Chemically Synthesized
QVQLQESGGGLVQAGGSLRLSCAASGTIFPYLDMGWYRQAPGKEREFVAAIAFGTTTYYADSVKGRFTISRDNAKNTVYLQMNSLKPEDTAVYYCAVTREGIVYIAPRVYSLHYYWGQGTQVTVSS

SEQ ID NO: 6595 - protein, 126 aa, Artificial Sequence
  Chemically Synthesized
QVQLQESGGGLVQAGGSLRLSCAASGYISTPVEMGWYRQAPGKERELVASIGGGAITNYADSVKGRFTISRDNAKNTVYLQMNSLKPEDTAVYYCAAIIWSTPGYNTGYHLGYWYWGQGTQVTVSS

SEQ ID NO: 6596 - protein, 122 aa, Artificial Sequence
  Chemically Synthesized
QVQLQESGGGLVQAGGSLRLSCAASGTISRAYKMGWYRQAPGKERELVATISTGTNTNYADSVKGRFTISRDNAKNTVYLQMNSLKPEDTAVYYCAVWVTDYYDEVSYHGYWGQGTQVTVSS

SEQ ID NO: 6597 - protein, 126 aa, Artificial Sequence
  Chemically Synthesized
QVQLQESGGGLVQAGGSLRLSCAASGTISNYKNMGWYRQAPGKEREFVASIDLGTTTYYADSVKGRFTISRDNAKNTVYLQMNSLKPEDTAVYYCAARGGRFIGIDRGIDSFHDYWGQGTQVTVSS

SEQ ID NO: 6598 - protein, 116 aa, Artificial Sequence
  Chemically Synthesized
QVQLQESGGGLVQAGGSLRLSCAASGNIFVVVAMGWYRQAPGKERELVASIAIGGTTNYADSVKGRFTISRDNAKNTVYLQMNSLKPEDTAVYYCAAIPPFSYDYWGQGTQVTVSS

SEQ ID NO: 6599 - protein, 118 aa, Artificial Sequence
  Chemically Synthesized
QVQLQESGGGLVQAGGSLRLSCAASGTISDLLTMGWYRQAPGKEREFVAGIAYGGTTNYADSVKGRFTISRDNAKNTVYLQMNSLKPEDTAVYYCAAVYPAEDGYGYWGQGTQVTVSS

SEQ ID NO: 6600 - protein, 122 aa, Artificial Sequence
  Chemically Synthesized
QVQLQESGGGLVQAGGSLRLSCAASGYISAAVGMGWYRQAPGKERELVASIDQGTSTYYADSVKGRFTISRDNAKNTVYLQMNSLKPEDTAVYYCAANVLPYRGQDQDLDYWGQGTQVTVSS

SEQ ID NO: 6601 - protein, 122 aa, Artificial Sequence
  Chemically Synthesized
QVQLQESGGGLVQAGGSLRLSCAASGYISLSQGMGWYRQAPGKEREFVATIATGGTTYYADSVKGRFTISRDNAKNTVYLQMNSLKPEDTAVYYCAAEYVEYHGWDDWHGYWGQGTQVTVSS

SEQ ID NO: 6602 - protein, 125 aa, Artificial Sequence
  Chemically Synthesized
QVQLQESGGGLVQAGGSLRLSCAASGSISWTGNMGWYRQAPGKERELVAGIGYGASTYYADSVKGRFTISRDNAKNTVYLQMNSLKPEDTAVYYCAALQFEPWYGYDSSQSTIYWGQGTQVTVSS

SEQ ID NO: 6603 - protein, 122 aa, Artificial Sequence
  Chemically Synthesized
QVQLQESGGGLVQAGGSLRLSCAASGYISFTYVMGWYRQAPGKERELVAAINQGSTTYYADSVKGRFTISRDNAKNTVYLQMNSLKPEDTAVYYCAVDATLYDWLAQAYGYWGQGTQVTVSS

SEQ ID NO: 6604 - protein, 126 aa, Artificial Sequence
  Chemically Synthesized
QVQLQESGGGLVQAGGSLRLSCAASGNISQSRVMGWYRQAPGKERELVAAINTGTTTYYADSVKGRFTISRDNAKNTVYLQMNSLKPEDTAVYYCAAYKYHATWFAYLKTYLYYYWGQGTQVTVSS

SEQ ID NO: 6605 - protein, 121 aa, Artificial Sequence
  Chemically Synthesized
QVQLQESGGGLVQAGGSLRLSCAASGSISTFLMGWYRQAPGKERELVAAISWGASTYYADSVKGRFTISRDNAKNTVYLQMNSLKPEDTAVYYCAAGSVTLYEPPWRLYYWGQGTQVTVSS

SEQ ID NO: 6606 - protein, 118 aa, Artificial Sequence
  Chemically Synthesized
QVQLQESGGGLVQAGGSLRLSCAASGYISDSREMGWYRQAPGKERELVAGIGVGSNTYYADSVKGRFTISRDNAKNTVYLQMNSLKPEDTAVYYCAVISWTSGGHPYWGQGTQVTVSS

SEQ ID NO: 6607 - protein, 122 aa, Artificial Sequence
  Chemically Synthesized
QVQLQESGGGLVQAGGSLRLSCAASGTISPVDYMGWYRQAPGKERELVASIDTGAITNYADSVKGRFTISRDNAKNTVYLQMNSLKPEDTAVYYCAATFLVPLFYAYYHRYWGQGTQVTVSS

SEQ ID NO: 6608 - protein, 122 aa, Artificial Sequence
  Chemically Synthesized
QVQLQESGGGLVQAGGSLRLSCAASGSISPYYYMGWYRQAPGKERELVAAINTGGSTNYADSVKGRFTISRDNAKNTVYLQMNSLKPEDTAVYYCAAIAGALNTDSRDYGYWGQGTQVTVSS

SEQ ID NO: 6609 - protein, 117 aa, Artificial Sequence
  Chemically Synthesized
QVQLQESGGGLVQAGGSLRLSCAASGTISYYYMGWYRQAPGKEREFVAAISYGASTYYADSVKGRFTISRDNAKNTVYLQMNSLKPEDTAVYYCAVIYPDIPGHDYWGQGTQVTVSS

SEQ ID NO: 6610 - protein, 122 aa, Artificial Sequence
  Chemically Synthesized
QVQLQESGGGLVQAGGSLRLSCAASGSISTTHGMGWYRQAPGKERELVASITYGATTYYADSVKGRFTISRDNAKNTVYLQMNSLKPEDTAVYYCAAYGGYSSTGAAKHLYWGQGTQVTVSS

SEQ ID NO: 6611 - protein, 118 aa, Artificial Sequence
  Chemically Synthesized
QVQLQESGGGLVQAGGSLRLSCAASGTISTRYNMGWYRQAPGKERELVAAITKGANTNYADSVKGRFTISRDNAKNTVYLQMNSLKPEDTAVYYCAVLGGSNTQLLYWGQGTQVTVSS

SEQ ID NO: 6612 - protein, 118 aa, Artificial Sequence
  Chemically Synthesized
QVQLQESGGGLVQAGGSLRLSCAASGTIFGHSPMGWYRQAPGKEREFVASINDGGITNYADSVKGRFTISRDNAKNTVYLQMNSLKPEDTAVYYCAAVWRPDGPFWYWGQGTQVTVSS

SEQ ID NO: 6613 - protein, 126 aa, Artificial Sequence
  Chemically Synthesized
QVQLQESGGGLVQAGGSLRLSCAASGNISSLGGMGWYRQAPGKEREFVASITNGANTNYADSVKGRFTISRDNAKNTVYLQMNSLKPEDTAVYYCAVSNYQFRWYNYFYLYRLSYWGQGTQVTVSS

SEQ ID NO: 6614 - protein, 126 aa, Artificial Sequence
  Chemically Synthesized
QVQLQESGGGLVQAGGSLRLSCAASGTISGPVHMGWYRQAPGKERELVAAIGYGSITNYADSVKGRFTISRDNAKNTVYLQMNSLKPEDTAVYYCAVYYRTYYPWYYVRYTGHQYWGQGTQVTVSS

SEQ ID NO: 6615 - protein, 120 aa, Artificial Sequence
  Chemically Synthesized
QVQLQESGGGLVQAGGSLRLSCAASGNISLLFMGWYRQAPGKERELVATITGGGNTYYADSVKGRFTISRDNAKNTVYLQMNSLKPEDTAVYYCAAVRAFENTLTVLFYWGQGTQVTVSS

SEQ ID NO: 6616 - protein, 117 aa, Artificial Sequence
  Chemically Synthesized
QVQLQESGGGLVQAGGSLRLSCAASGNIFYGRSMGWYRQAPGKERELLPLLLLVLLPYADSVKGRFTISRDNAKNTVYLQMNSLKPEDTAVYYCAVYTVSADYHDYWGQGTQVTVSS

SEQ ID NO: 6617 - protein, 118 aa, Artificial Sequence
  Chemically Synthesized
QVQLQESGGGLVQAGGSLRLSCAASGNIFPLSYMGWYRQAPGKERELVAAINFGGTTYYADSVKGRFTISRDNAKNTVYLQMNSLKPEDTAVYYCAALHIDFGQYNYWGQGTQVTVSS

SEQ ID NO: 6618 - protein, 121 aa, Artificial Sequence
  Chemically Synthesized
QVQLQESGGGLVQAGGSLRLSCAASGSISALDTMGWYRQAPGKERELVATIGYGTITYYADSVKGRFTISRDNAKNTVYLQMNSLKPEDTAVYYCAANRGEYYQEYGHDYWGQGTQVTVSS

SEQ ID NO: 6619 - protein, 121 aa, Artificial Sequence
  Chemically Synthesized
QVQLQESGGGLVQAGGSLRLSCAASGSISLSTYMGWYRQAPGKEREFVASIDIGANTNYADSVKGRFTISRDNAKNTVYLQMNSLKPEDTAVYYCAADAYIVTYNAVHTYWGQGTQVTVSS

SEQ ID NO: 6620 - protein, 112 aa, Artificial Sequence
  Chemically Synthesized
QVQLQESGGGLVQAGGSLRLSCAASGSISSEYFMGWYRQAPGKEREFVAGINPYADSVKGRFTISRDNAKNTVYLQMNSLKPEDTAVYYCAAHLADSDYSYWGQGTQVTVSS

SEQ ID NO: 6621 - protein, 121 aa, Artificial Sequence
  Chemically Synthesized
QVQLQESGGGLVQAGGSLRLSCAASGSISGVDYMGWYRQAPGKEREFVAGISVGGSTNYADSVKGRFTISRDNAKNTVYLQMNSLKPEDTAVYYCAVTFNYQHLSWTHFYWGQGTQVTVSS

SEQ ID NO: 6622 - protein, 118 aa, Artificial Sequence
  Chemically Synthesized
QVQLQESGGGLVQAGGSLRLSCAASGTISGPYYMGWYRQAPGKEREFVAAIARGASTNYADSVKGRFTISRDNAKNTVYLQMNSLKPEDTAVYYCAVYEKLRSDYVYWGQGTQVTVSS

SEQ ID NO: 6623 - protein, 127 aa, Artificial Sequence
  Chemically Synthesized
QVQLQESGGGLVQAGGSLRLSCAASGTISYTYTMGWYRQAPGKEREFVATIGPGGTTYYADSVKGRFTISRDNAKNTVYLQMNSLKPEDTAVYYCAAVYRITAYTGPTITAVAFTYWGQGTQVTVSS

SEQ ID NO: 6624 - protein, 117 aa, Artificial Sequence
  Chemically Synthesized
QVQLQESGGGLVQAGGSLRLSCAASGTIFGFGYMGWYRQAPGKEREFVAAINNGASTYYADSVKGRFTISRDNAKNTVYLQMNSLKPEDTAVYYCAASSTLVLLIYWGQGTQVTVSS

SEQ ID NO: 6625 - protein, 114 aa, Artificial Sequence
  Chemically Synthesized
QVQLQESGGGLVQAGGSLRLSCAASGYIFYLRYMGWYRQAPGKERELVASISYGTNTNYADSVKGRFTISRDNAKNTVYLQMNSLKPEDTAVYYCAVSTFVLYWGQGTQVTVSS

SEQ ID NO: 6626 - protein, 118 aa, Artificial Sequence
  Chemically Synthesized
QVQLQESGGGLVQAGGSLRLSCAASGTISADYIMGWYRQAPGKERELVAGIGPGTTTNYADSVKGRFTISRDNAKNTVYLQMNSLKPEDTAVYYCAAYPAPFAPHLYWGQGTQVTVSS

SEQ ID NO: 6627 - protein, 122 aa, Artificial Sequence
  Chemically Synthesized
QVQLQESGGGLVQAGGSLRLSCAASGTISVRYYMGWYRQAPGKERELVAAISVGSSTNYADSVKGRFTISRDNAKNTVYLQMNSLKPEDTAVYYCAVWIWTEQNGLVIHHYWGQGTQVTVSS

SEQ ID NO: 6628 - protein, 117 aa, Artificial Sequence
  Chemically Synthesized
QVQLQESGGGLVQAGGSLRLSCAASGYIFPTSQMGWYRQAPGKERELVAAIDYGGITNYADSVKGRFTISRDNAKNTVYLQMNSLKPEDTAVYYCAVESTTMLVLYWGQGTQVTVSS

SEQ ID NO: 6629 - protein, 118 aa, Artificial Sequence
  Chemically Synthesized
QVQLQESGGGLVQAGGSLRLSCAASGSIFTVYPMGWYRQAPGKERELVAGIGDGANTNYADSVKGRFTISRDNAKNTVYLQMNSLKPEDTAVYYCAVGYNEDEAYYYWGQGTQVTVSS

SEQ ID NO: 6630 - protein, 118 aa, Artificial Sequence
  Chemically Synthesized
QVQLQESGGGLVQAGGSLRLSCAASGNISRWGGMGWYRQAPGKEREFVAGINLGGITNYADSVKGRFTISRDNAKNTVYLQMNSLKPEDTAVYYCAVYNVEYLRFPYWGQGTQVTVSS

SEQ ID NO: 6631 - protein, 118 aa, Artificial Sequence
  Chemically Synthesized
QVQLQESGGGLVQAGGSLRLSCAASGSISRQRPMGWYRQAPGKEREFVAAITIGSNTNYADSVKGRFTISRDNAKNTVYLQMNSLKPEDTAVYYCAVSSYRVRFLAYWGQGTQVTVSS

SEQ ID NO: 6632 - protein, 122 aa, Artificial Sequence
  Chemically Synthesized
QVQLQESGGGLVQAGGSLRLSCAASGYIFGFVDMGWYRQAPGKERELVATIDGGSNTNYADSVKGRFTISRDNAKNTVYLQMNSLKPEDTAVYYCAADVIRDRLYWVILLYWGQGTQVTVSS

SEQ ID NO: 6633 - protein, 114 aa, Artificial Sequence
  Chemically Synthesized
QVQLQESGGGLVQAGGSLRLSCAASGNIFLRDWMGWYRQAPGKEREFVAAIGDGSITYYADSVKGRFTISRDNAKNTVYLQMNSLKPEDTAVYYCAVDDWRSYWGQGTQVTVSS

SEQ ID NO: 6634 - protein, 118 aa, Artificial Sequence
  Chemically Synthesized
QVQLQESGGGLVQAGGSLRLSCAASGSIFYGPTMGWYRQAPGKEREFVATIDHGATTYYADSVKGRFTISRDNAKNTVYLQMNSLKPEDTAVYYCAADQWGYYNHYYWGQGTQVTVSS

SEQ ID NO: 6635 - protein, 122 aa, Artificial Sequence
  Chemically Synthesized
QVQLQESGGGLVQAGGSLRLSCAASGTISRTVPMGWYRQAPGKERELVASIGPGGNTYYADSVKGRFTISRDNAKNTVYLQMNSLKPEDTAVYYCAVIGLAIYRPYRDHSYWGQGTQVTVSS

SEQ ID NO: 6636 - protein, 121 aa, Artificial Sequence
  Chemically Synthesized
QVQLQESGGGLVQAGGSLRLSCAASGSISSVVMGWYRQAPGKERELVAAISNGTITYYADSVKGRFTISRDNAKNTVYLQMNSLKPEDTAVYYCAVIGQAENDGGYLHTYWGQGTQVTVSS

SEQ ID NO: 6637 - protein, 118 aa, Artificial Sequence
  Chemically Synthesized
QVQLQESGGGLVQAGGSLRLSCAASGNISPFVAMGWYRQAPGKERELVAAIDDGSSTYYADSVKGRFTISRDNAKNTVYLQMNSLKPEDTAVYYCAVDAWYHDYLDYWGQGTQVTVSS

SEQ ID NO: 6638 - protein, 122 aa, Artificial Sequence
  Chemically Synthesized
QVQLQESGGGLVQAGGSLRLSCAASGNIFAGYYMGWYRQAPGKEREFVAAIDDGSITYYADSVKGRFTISRDNAKNTVYLQMNSLKPEDTAVYYCAAAVYGDAYLEGAFGYWGQGTQVTVSS

SEQ ID NO: 6639 - protein, 121 aa, Artificial Sequence
  Chemically Synthesized
QVQLQESGGGLVQAGGSLRLSCAASGTIFYGLWMGWYRQAPGKERELVATIAWGGTTNYADSVKGRFTISRDNAKNTVYLQMNSLKPEDTAVYYCAAPSYSSLLTCTCIYWGQGTQVTVSS

SEQ ID NO: 6640 - protein, 111 aa, Artificial Sequence
  Chemically Synthesized
QVQLQESGGGLVQAGGSLRLSCAASGNISRDDYMGWYRQAPGKEREFVASISDGANTNYADSVKGRFTISRDNAKNTVYLQMNSLKPEDTAVYYCAVTMYWGQGTQVTVSS

SEQ ID NO: 6641 - protein, 122 aa, Artificial Sequence
  Chemically Synthesized
QVQLQESGGGLVQAGGSLRLSCAASGTIFPYVSMGWYRQAPGKEREFVATINVGTITNYADSVKGRFTISRDNAKNTVYLQMNSLKPEDTAVYYCAAAVYDPVHQYTAYYYWGQGTQVTVSS

SEQ ID NO: 6642 - protein, 118 aa, Artificial Sequence
  Chemically Synthesized
QVQLQESGGGLVQAGGSLRLSCAASGTIFWIFYMGWYRQAPGKEREFVASINTGTNTNYADSVKGRFTISRDNAKNTVYLQMNSLKPEDTAVYYCAASHYFDPYFPYWGQGTQVTVSS

SEQ ID NO: 6643 - protein, 112 aa, Artificial Sequence
  Chemically Synthesized
QVQLQESGGGLVQAGGSLRLSCAASGSIFNGQGMGWYRQAPGKERELVATIGGGTNTNYADSVKGRFTISRDNAKNTVYLQMNSLKPEDTAVYYCAVSTLYWGQGTQVTVSS

SEQ ID NO: 6644 - protein, 121 aa, Artificial Sequence
  Chemically Synthesized
QVQLQESGGGLVQAGGSLRLSCAASGTIFGAPMGWYRQAPGKEREFVAAIDDGGSTYYADSVKGRFTISRDNAKNTVYLQMNSLKPEDTAVYYCAAIERIYSDTDYQLAYWGQGTQVTVSS

SEQ ID NO: 6645 - protein, 118 aa, Artificial Sequence
  Chemically Synthesized
QVQLQESGGGLVQAGGSLRLSCAASGYISWRDWMGWYRQAPGKEREFVAAIDGGSSTYYADSVKGRFTISRDNAKNTVYLQMNSLKPEDTAVYYCAVSAGTVEQHAYWGQGTQVTVSS

SEQ ID NO: 6646 - protein, 118 aa, Artificial Sequence
  Chemically Synthesized
QVQLQESGGGLVQAGGSLRLSCAASGSISSFYTMGWYRQAPGKERELVATISGGTTTYYADSVKGRFTISRDNAKNTVYLQMNSLKPEDTAVYYCAAGGSTTPFFIYWGQGTQVTVSS

SEQ ID NO: 6647 - protein, 118 aa, Artificial Sequence
  Chemically Synthesized
QVQLQESGGGLVQAGGSLRLSCAASGTISTPPDMGWYRQAPGKERELVASIGIGGTTNYADSVKGRFTISRDNAKNTVYLQMNSLKPEDTAVYYCAADSPPGYTFPYWGQGTQVTVSS

SEQ ID NO: 6648 - protein, 118 aa, Artificial Sequence
  Chemically Synthesized
QVQLQESGGGLVQAGGSLRLSCAASGNISPYAYMGWYRQAPGKERELVASISAGAITYYADSVKGRFTISRDNAKNTVYLQMNSLKPEDTAVYYCAVDDPYDNYYYYWGQGTQVTVSS

SEQ ID NO: 6649 - protein, 113 aa, Artificial Sequence
  Chemically Synthesized
QVQLQESGGGLVQAGGSLRLSCAASGNIFANKVMGWYRQAPGKEREFVAGIADGSNTYYADSVKGRFTISRDNAKNTVYLQMNSLKPEDTAVYYCAVSSHYYWGQGTQVTVSS

SEQ ID NO: 6650 - protein, 121 aa, Artificial Sequence
  Chemically Synthesized
QVQLQESGGGLVQAGGSLRLSCAASGTISPRDMGWYRQAPGKEREFVAGINAGSTTNYADSVKGRFTISRDNAKNTVYLQMNSLKPEDTAVYYCAATPWDRATGFYFHGYWGQGTQVTVSS

SEQ ID NO: 6651 - protein, 117 aa, Artificial Sequence
  Chemically Synthesized
QVQLQESGGGLVQAGGSLRLSCAASGTISGLVMGWYRQAPGKERELVAAITDGGITNYADSVKGRFTISRDNAKNTVYLQMNSLKPEDTAVYYCAADDHYVDPLTYWGQGTQVTVSS

SEQ ID NO: 6652 - protein, 118 aa, Artificial Sequence
  Chemically Synthesized
QVQLQESGGGLVQAGGSLRLSCAASGTIFVSAFMGWYRQAPGKERELVATISTGGNTYYADSVKGRFTISRDNAKNTVYLQMNSLKPEDTAVYYCAAWYQDDWSFDYWGQGTQVTVSS

SEQ ID NO: 6653 - protein, 114 aa, Artificial Sequence
  Chemically Synthesized
QVQLQESGGGLVQAGGSLRLSCAASGNISNYGDMGWYRQAPGKEREFVAAYADSVKGRFTISRDNAKNTVYLQMNSLKPEDTAVYYCAANEVDVYSYYDALQYWGQGTQVTVSS

SEQ ID NO: 6654 - protein, 118 aa, Artificial Sequence
  Chemically Synthesized
QVQLQESGGGLVQAGGSLRLSCAASGTIFRRRNMGWYRQAPGKERELVAGIAYGTTTYYADSVKGRFTISRDNAKNTVYLQMNSLKPEDTAVYYCAVYYYSGGVLVYWGQGTQVTVSS

SEQ ID NO: 6655 - protein, 118 aa, Artificial Sequence
  Chemically Synthesized
QVQLQESGGGLVQAGGSLRLSCAASGYIFPYGKMGWYRQAPGKEREFVATIGTGTSTYYADSVKGRFTISRDNAKNTVYLQMNSLKPEDTAVYYCAADSPLPYRYLYWGQGTQVTVSS

SEQ ID NO: 6656 - protein, 118 aa, Artificial Sequence
  Chemically Synthesized
QVQLQESGGGLVQAGGSLRLSCAASGYISPYDSMGWYRQAPGKEREFVAAITAGTSTNYADSVKGRFTISRDNAKNTVYLQMNSLKPEDTAVYYCAVWSYDRFPLYYWGQGTQVTVSS

SEQ ID NO: 6657 - protein, 118 aa, Artificial Sequence
  Chemically Synthesized
QVQLQESGGGLVQAGGSLRLSCAASGTIFQGGVMGWYRQAPGKEREFVAGIAQGGSTYYADSVKGRFTISRDNAKNTVYLQMNSLKPEDTAVYYCAVDAIRADTYRYWGQGTQVTVSS

SEQ ID NO: 6658 - protein, 115 aa, Artificial Sequence
  Chemically Synthesized
QVQLQESGGGLVQAGGSLRLSCAASGSIFVYHYMGWYRQAPGKEREFVAAIAPGANTNYADSVKGRFTISRDNAKNTVYLQMNSLKPEDTAVYYCAAISDYRHYWGQGTQVTVSS

SEQ ID NO: 6659 - protein, 122 aa, Artificial Sequence
  Chemically Synthesized
QVQLQESGGGLVQAGGSLRLSCAASGTIFSADFMGWYRQAPGKEREFVAGIGDGGNTNYADSVKGRFTISRDNAKNTVYLQMNSLKPEDTAVYYCAAGGPAKGRPDGYHGYWGQGTQVTVSS

SEQ ID NO: 6660 - protein, 122 aa, Artificial Sequence
  Chemically Synthesized
QVQLQESGGGLVQAGGSLRLSCAASGTIFDARYMGWYRQAPGKERELVAAIGGGASTNYADSVKGRFTISRDNAKNTVYLQMNSLKPEDTAVYYCAASDPDTDDAPDYHEYWGQGTQVTVSS

SEQ ID NO: 6661 - protein, 118 aa, Artificial Sequence
  Chemically Synthesized
QVQLQESGGGLVQAGGSLRLSCAASGYISWTPLMGWYRQAPGKEREFVAAITSGGNTYYADSVKGRFTISRDNAKNTVYLQMNSLKPEDTAVYYCAVELLYGYAFQYWGQGTQVTVSS

SEQ ID NO: 6662 - protein, 121 aa, Artificial Sequence
  Chemically Synthesized
QVQLQESGGGLVQAGGSLRLSCAASGYISDGLSMGWYRQAPGKEREFVASIARGAITYYADSVKGRFTISRDNAKNTVYLQMNSLKPEDTAVYYCAASLNTSRLVVLVIYWGQGTQVTVSS

SEQ ID NO: 6663 - protein, 122 aa, Artificial Sequence
  Chemically Synthesized
QVQLQESGGGLVQAGGSLRLSCAASGTISLYGAMGWYRQAPGKERELVAAISDGTNTYYADSVKGRFTISRDNAKNTVYLQMNSLKPEDTAVYYCAVQDYVLYLNSLRYYYWGQGTQVTVSS

SEQ ID NO: 6664 - protein, 118 aa, Artificial Sequence
  Chemically Synthesized
QVQLQESGGGLVQAGGSLRLSCAASGYISQDLSMGWYRQAPGKEREFVATISGGASTYYADSVKGRFTISRDNAKNTVYLQMNSLKPEDTAVYYCAATYQFAGALGYWGQGTQVTVSS

SEQ ID NO: 6665 - protein, 124 aa, Artificial Sequence
  Chemically Synthesized
QVQLQESGGGLVQAGGSLRLSCAASGTISDYNIMGWYRQAPGKERELVATIVTVLVPYADSVKGRFTISRDNAKNTVYLQMNSLKPEDTAVYYCAAYVFYTDADDNYIYDLDYWGQGTQVTVSS

SEQ ID NO: 6666 - protein, 117 aa, Artificial Sequence
  Chemically Synthesized
QVQLQESGGGLVQAGGSLRLSCAASGYISPYSMGWYRQAPGKERELVAAITEGGNTYYADSVKGRFTISRDNAKNTVYLQMNSLKPEDTAVYYCAAGPNDSESYWYWGQGTQVTVSS

SEQ ID NO: 6667 - protein, 118 aa, Artificial Sequence
  Chemically Synthesized
QVQLQESGGGLVQAGGSLRLSCAASGNISYPYVMGWYRQAPGKEREFVAGIDYGGTTYYADSVKGRFTISRDNAKNTVYLQMNSLKPEDTAVYYCAATGTVRDIHPYWGQGTQVTVSS

SEQ ID NO: 6668 - protein, 117 aa, Artificial Sequence
  Chemically Synthesized
QVQLQESGGGLVQAGGSLRLSCAASGTISAGYFMGWYRQAPGKERELVAAIATGASTYYADSVKGRFTISRDNAKNTVYLQMNSLKPEDTAVYYCAVYPYIAYFYYWGQGTQVTVSS

SEQ ID NO: 6669 - protein, 126 aa, Artificial Sequence
  Chemically Synthesized
QVQLQESGGGLVQAGGSLRLSCAASGSIFPRLYMGWYRQAPGKEREFVATIGDGSSTYYADSVKGRFTISRDNAKNTVYLQMNSLKPEDTAVYYCAAYGKDNYADVWDVYEYYYYWGQGTQVTVSS

SEQ ID NO: 6670 - protein, 122 aa, Artificial Sequence
  Chemically Synthesized
QVQLQESGGGLVQAGGSLRLSCAASGYISKRLAMGWYRQAPGKEREFVATIDPGTITYYADSVKGRFTISRDNAKNTVYLQMNSLKPEDTAVYYCAVAYSRRAYGSDFLDYWGQGTQVTVSS

SEQ ID NO: 6671 - protein, 118 aa, Artificial Sequence
  Chemically Synthesized
QVQLQESGGGLVQAGGSLRLSCAASGNIFTQSGMGWYRQAPGKEREFVASIGGGTNTNYADSVKGRFTISRDNAKNTVYLQMNSLKPEDTAVYYCAAGYTSYYAHKYWGQGTQVTVSS

SEQ ID NO: 6672 - protein, 114 aa, Artificial Sequence
  Chemically Synthesized
QVQLQESGGGLVQAGGSLRLSCAASGSISDEPVMGWYRQAPGKERELVASIDGGGNTYYADSVKGRFTISRDNAKNTVYLQMNSLKPEDTAVYYCAYYAIHVYWGQGTQVTVSS

SEQ ID NO: 6673 - protein, 125 aa, Artificial Sequence
  Chemically Synthesized
QVQLQESGGGLVQAGGSLRLSCAASGTISYDNYMGWYRQAPGKERELVAGISDGGITYYADSVKGRFTISRDNAKNTVYLQMNSLKPEDTAVYYCAVDNGLYAYYPETASSCIYWGQGTQVTVSS

SEQ ID NO: 6674 - protein, 118 aa, Artificial Sequence
  Chemically Synthesized
QVQLQESGGGLVQAGGSLRLSCAASGYISQGRSMGWYRQAPGKEREFVATIADGTNTYYADSVKGRFTISRDNAKNTVYLQMNSLKPEDTAVYYCAVAVTGWPYHTYWGQGTQVTVSS

SEQ ID NO: 6675 - protein, 118 aa, Artificial Sequence
  Chemically Synthesized
QVQLQESGGGLVQAGGSLRLSCAASGSISRELYMGWYRQAPGKERELVATIATGGTTNYADSVKGRFTISRDNAKNTVYLQMNSLKPEDTAVYYCAVWAWGSTYHGYWGQGTQVTVSS

SEQ ID NO: 6676 - protein, 115 aa, Artificial Sequence
  Chemically Synthesized
QVQLQESGGGLVQAGGSLRLSCAASGSIFSRYTMGWYRQAPGKERELVASITYGGTTNYADSVKGRFTISRDNAKNTVYLQMNSLKPEDTAVYYCAVYADWDIYWGQGTQVTVSS

SEQ ID NO: 6677 - protein, 118 aa, Artificial Sequence
  Chemically Synthesized
QVQLQESGGGLVQAGGSLRLSCAASGYISFDVYMGWYRQAPGKERELVASINRGATTYYADSVKGRFTISRDNAKNTVYLQMNSLKPEDTAVYYCAVYYVGYYTHGYWGQGTQVTVSS

SEQ ID NO: 6678 - protein, 126 aa, Artificial Sequence
  Chemically Synthesized
QVQLQESGGGLVQAGGSLRLSCAASGSISGPYTMGWYRQAPGKERELVAAISGGSTTNYADSVKGRFTISRDNAKNTVYLQMNSLKPEDTAVYYCAVYNSFVAYRTPYPGYSYAYWGQGTQVTVSS

SEQ ID NO: 6679 - protein, 119 aa, Artificial Sequence
  Chemically Synthesized
QVQLQESGGGLVQAGGSLRLSCAASGNIFRGRYMGWYRQAPGKEREFVAAIGFGGTTYYADSVKGRFTISRDNAKNTVYLQMNSLKPEDTAVYYCAAVTTGQLGHYRYWGQGTQVTVSS

SEQ ID NO: 6680 - protein, 118 aa, Artificial Sequence
  Chemically Synthesized
QVQLQESGGGLVQAGGSLRLSCAASGTISYFYPMGWYRQAPGKERELVAGINGGGTTYYADSVKGRFTISRDNAKNTVYLQMNSLKPEDTAVYYCAAYVSDSSYFGYWGQGTQVTVSS

SEQ ID NO: 6681 - protein, 122 aa, Artificial Sequence
  Chemically Synthesized
QVQLQESGGGLVQAGGSLRLSCAASGNIFWGRYMGWYRQAPGKEREFVASINTGANTYYADSVKGRFTISRDNAKNTVYLQMNSLKPEDTAVYYCAAYYLGYYVYKSSHRYWGQGTQVTVSS

SEQ ID NO: 6682 - protein, 122 aa, Artificial Sequence
  Chemically Synthesized
QVQLQESGGGLVQAGGSLRLSCAASGNISWYAVMGWYRQAPGKERELVAAIDHGTTTYYADSVKGRFTISRDNAKNTVYLQMNSLKPEDTAVYYCAVPGDDTGYVTRDFSYWGQGTQVTVSS

SEQ ID NO: 6683 - protein, 118 aa, Artificial Sequence
  Chemically Synthesized
QVQLQESGGGLVQAGGSLRLSCAASGSIFAFLIMGWYRQAPGKERELVAAIDLGGTTYYADSVKGRFTISRDNAKNTVYLQMNSLKPEDTAVYYCAVAWRGLYVLRYWGQGTQVTVSS

SEQ ID NO: 6684 - protein, 118 aa, Artificial Sequence
  Chemically Synthesized
QVQLQESGGGLVQAGGSLRLSCAASGNISYIDGMGWYRQAPGKERELVAAINFGANTYYADSVKGRFTISRDNAKNTVYLQMNSLKPEDTAVYYCAADPNLDYDHSYWGQGTQVTVSS

SEQ ID NO: 6685 - protein, 118 aa, Artificial Sequence
  Chemically Synthesized
QVQLQESGGGLVQAGGSLRLSCAASGNIFYTYYMGWYRQAPGKEREFVASITYGGTTNYADSVKGRFTISRDNAKNTVYLQMNSLKPEDTAVYYCAVWSTNQLTLDYWGQGTQVTVSS

SEQ ID NO: 6686 - protein, 126 aa, Artificial Sequence
  Chemically Synthesized
QVQLQESGGGLVQAGGSLRLSCAASGNIFPVWDMGWYRQAPGKERELVAGITYGAITNYADSVKGRFTISRDNAKNTVYLQMNSLKPEDTAVYYCAANAYVYDNKATDLDFTYQYWGQGTQVTVSS

SEQ ID NO: 6687 - protein, 122 aa, Artificial Sequence
  Chemically Synthesized
QVQLQESGGGLVQAGGSLRLSCAASGYIFSNRPMGWYRQAPGKERELVAAIGDGGSTYYADSVKGRFTISRDNAKNTVYLQMNSLKPEDTAVYYCAAINDGTSGGDSGAKYWGQGTQVTVSS

SEQ ID NO: 6688 - protein, 118 aa, Artificial Sequence
  Chemically Synthesized
QVQLQESGGGLVQAGGSLRLSCAASGYISASDVMGWYRQAPGKERELVATINYGANTYYADSVKGRFTISRDNAKNTVYLQMNSLKPEDTAVYYCAVYYYPVPYHPYWGQGTQVTVSS

SEQ ID NO: 6689 - protein, 121 aa, Artificial Sequence
  Chemically Synthesized
QVQLQESGGGLVQAGGSLRLSCAASGNIFYWSFMGWYRQAPGKERELVAAIDYGTITYYADSVKGRFTISRDNAKNTVYLQMNSLKPEDTAVYYCAVGYWATGDFDVLYYWGQGTQVTVSS

SEQ ID NO: 6690 - protein, 117 aa, Artificial Sequence
  Chemically Synthesized
QVQLQESGGGLVQAGGSLRLSCAASGYIFCVTMGWYRQAPGKERELVVAITEGSITNYADSVKGRFTISRDNAKNTVYLQMNSLKPEDTAVYYCAVRDVVATSASYWGQGTQVTVSS

SEQ ID NO: 6691 - protein, 122 aa, Artificial Sequence
  Chemically Synthesized
QVQLQESGGGLVQAGGSLRLSCAASGYIFSGWPMGWYRQAPGKERELVAAISTGASTYYADSVKGRFTISRDNAKNTVYLQMNSLKPEDTAVYYCAVVYSSIWFTRKRHGYWGQGTQVTVSS

SEQ ID NO: 6692 - protein, 125 aa, Artificial Sequence
  Chemically Synthesized
QVQLQESGGGLVQAGGSLRLSCAASGNISIRRYMGWYRQAPGKERELVASITSGANTNYADSVKGRFTISRDNAKNTVYLQMNSLKPEDTAVYYCAAVTRNLYAAIYLYPSRMYWGQGTQVTVSS

SEQ ID NO: 6693 - protein, 122 aa, Artificial Sequence
  Chemically Synthesized
QVQLQESGGGLVQAGGSLRLSCAASGNIFHYYVMGWYRQAPGKERELVATISGGATTYYADSVKGRFTISRDNAKNTVYLQMNSLKPEDTAVYYCAAVPTPRVKTYLNHYYWGQGTQVTVSS

SEQ ID NO: 6694 - protein, 113 aa, Artificial Sequence
  Chemically Synthesized
QVQLQESGGGLVQAGGSLRLSCAASGSIFYVFTMGWYRQAPGKEREFVASISYGGNTYYADSVKGRFTISRDNAKNTVYLQMNSLKPEDTAVYYCALLWNMYWGQGTQVTVSS

SEQ ID NO: 6695 - protein, 118 aa, Artificial Sequence
  Chemically Synthesized
QVQLQESGGGLVQAGGSLRLSCAASGTIFSDDGMGWYRQAPGKERELVAGITTGAITYYADSVKGRFTISRDNAKNTVYLQMNSLKPEDTAVYYCAVDEYNYYALDYWGQGTQVTVSS

SEQ ID NO: 6696 - protein, 122 aa, Artificial Sequence
  Chemically Synthesized
QVQLQESGGGLVQAGGSLRLSCAASGSISVSYPMGWYRQAPGKEREFVAAIDFGASTNYADSVKGRFTISRDNAKNTVYLQMNSLKPEDTAVYYCAAQLPDQWSGNDQHTYWGQGTQVTVSS

SEQ ID NO: 6697 - protein, 118 aa, Artificial Sequence
  Chemically Synthesized
QVQLQESGGGLVQAGGSLRLSCAASGSISSVRNMGWYRQAPGKERELVATIDRGATTNYADSVKGRFTISRDNAKNTVYLQMNSLKPEDTAVYYCAVFTYHSGSHAYWGQGTQVTVSS

SEQ ID NO: 6698 - protein, 126 aa, Artificial Sequence
  Chemically Synthesized
QVQLQESGGGLVQAGGSLRLSCAASGYISTAAEMGWYRQAPGKERELVATISSGGITNYADSVKGRFTISRDNAKNTVYLQMNSLKPEDTAVYYCAVYPNFHYIYAYLVANTHAYWGQGTQVTVSS

SEQ ID NO: 6699 - protein, 126 aa, Artificial Sequence
  Chemically Synthesized
QVQLQESGGGLVQAGGSLRLSCAASGTIFRPDYMGWYRQAPGKERELVAGISYGASTYYADSVKGRFTISRDNAKNTVYLQMNSLKPEDTAVYYCAVYDLYTEPTHHGGNDILVYWGQGTQVTVSS

SEQ ID NO: 6700 - protein, 126 aa, Artificial Sequence
  Chemically Synthesized
QVQLQESGGGLVQAGGSLRLSCAASGNIFPYDYMGWYRQAPGKEREFVAAISGGGITYYADSVKGRFTISRDNAKNTVYLQMNSLKPEDTAVYYCAVEPNQFPKGGVNDWDDHWYWGQGTQVTVSS

SEQ ID NO: 6701 - protein, 118 aa, Artificial Sequence
  Chemically Synthesized
QVQLQESGGGLVQAGGSLRLSCAASGNISDIVYMGWYRQAPGKEREFVATIDDGGNTYYADSVKGRFTISRDNAKNTVYLQMNSLKPEDTAVYYCAVYSVTPNNHDYWGQGTQVTVSS

SEQ ID NO: 6702 - protein, 126 aa, Artificial Sequence
  Chemically Synthesized
QVQLQESGGGLVQAGGSLRLSCAASGTISGLDDMGWYRQAPGKERELVAGINYGGTTNYADSVKGRFTISRDNAKNTVYLQMNSLKPEDTAVYYCAALQVKSDYFGLAQLYGHGYWGQGTQVTVSS

SEQ ID NO: 6703 - protein, 121 aa, Artificial Sequence
  Chemically Synthesized
QVQLQESGGGLVQAGGSLRLSCAASGNISREWIMGWYRQAPGKERELVAALLTVLLPYADSVKGRFTISRDNAKNTVYLQMNSLKPEDTAVYYCAVYYQPGESPRTPFIYWGQGTQVTVSS

SEQ ID NO: 6704 - protein, 126 aa, Artificial Sequence
  Chemically Synthesized
QVQLQESGGGLVQAGGSLRLSCAASGYISPSPDMGWYRQAPGKERELVAAIAAGTTTNYADSVKGRFTISRDNAKNTVYLQMNSLKPEDTAVYYCAASADYYIFYRNKSYSPHGYWGQGTQVTVSS

SEQ ID NO: 6705 - protein, 126 aa, Artificial Sequence
  Chemically Synthesized
QVQLQESGGGLVQAGGSLRLSCAASGSISAGEPMGWYRQAPGKEREFVAGIGIGSITYYADSVKGRFTISRDNAKNTVYLQMNSLKPEDTAVYYCAVIWYDQYDAAYWLDYWYPYWGQGTQVTVSS

SEQ ID NO: 6706 - protein, 125 aa, Artificial Sequence
  Chemically Synthesized
QVQLQESGGGLVQAGGSLRLSCAASGNIFWAYAMGWYRQAPGKERELLPVLIVVVLPYADSVKGRFTISRDNAKNTVYLQMNSLKPEDTAVYYCAADDANEDYRYGDNSTDLIYWGQGTQVTVSS

SEQ ID NO: 6707 - protein, 109 aa, Artificial Sequence
  Chemically Synthesized
QVQLQESGGGLVQAGGSLRLSCAASGYISLYSGMGWYRQAPGKEREFVASINAGASTNYADSVKGRFTISRDNAKNTVYLQMNSLKPEDTAVYYCAGYWGQGTQVTVSS

SEQ ID NO: 6708 - protein, 120 aa, Artificial Sequence
  Chemically Synthesized
QVQLQESGGGLVQAGGSLRLSCAASGYMGWYRQAPGKERELVATIGQGSSTNYADSVKGRFTISRDNAKNTVYLQMNSLKPEDTAVYYCAADQYYTYGGDANIYYRHVYWGQGTQVTVSS

SEQ ID NO: 6709 - protein, 117 aa, Artificial Sequence
  Chemically Synthesized
QVQLQESGGGLVQAGGSLRLSCAASGTISSASMGWYRQAPGKERELVAGIGFGGNTNYADSVKGRFTISRDNAKNTVYLQMNSLKPEDTAVYYCAAVVDYTASYDYWGQGTQVTVSS

SEQ ID NO: 6710 - protein, 112 aa, Artificial Sequence
  Chemically Synthesized
QVQLQESGGGLVQAGGSLRLSCAASGSISEGGIMGWYRQAPGKEREFDYADSVKGRFTISRDNAKNTVYLQMNSLKPEDTAVYYCAAYSWTYGYPDTYLRYWGQGTQVTVSS

SEQ ID NO: 6711 - protein, 118 aa, Artificial Sequence
  Chemically Synthesized
QVQLQESGGGLVQAGGSLRLSCAASGYISFIPGMGWYRQAPGKEREFVAGINIGTNTYYADSVKGRFTISRDNAKNTVYLQMNSLKPEDTAVYYCAVILGRPRPHYYWGQGTQVTVSS

SEQ ID NO: 6712 - protein, 122 aa, Artificial Sequence
  Chemically Synthesized
QVQLQESGGGLVQAGGSLRLSCAASGTIFVLSYMGWYRQAPGKERELVATIGVGGNTYYADSVKGRFTISRDNAKNTVYLQMNSLKPEDTAVYYCAALNRLWWTAYGSHQYWGQGTQVTVSS

SEQ ID NO: 6713 - protein, 126 aa, Artificial Sequence
  Chemically Synthesized
QVQLQESGGGLVQAGGSLRLSCAASGYIFYYRYMGWYRQAPGKERELVAAISYGGSTNYADSVKGRFTISRDNAKNTVYLQMNSLKPEDTAVYYCAAITAPDTAPESYPRYGYRYWGQGTQVTVSS

SEQ ID NO: 6714 - protein, 122 aa, Artificial Sequence
  Chemically Synthesized
QVQLQESGGGLVQAGGSLRLSCAASGNISSIKIMGWYRQAPGKERELVAGISGGSNTYYADSVKGRFTISRDNAKNTVYLQMNSLKPEDTAVYYCAVILFWDHTHYTYHTYWGQGTQVTVSS

SEQ ID NO: 6715 - protein, 122 aa, Artificial Sequence
  Chemically Synthesized
QVQLQESGGGLVQAGGSLRLSCAASGYISNYSYMGWYRQAPGKERELVAAINLGASTYYADSVKGRFTISRDNAKNTVYLQMNSLKPEDTAVYYCAAVNIAYRGGVVSHRYWGQGTQVTVSS

SEQ ID NO: 6716 - protein, 122 aa, Artificial Sequence
  Chemically Synthesized
QVQLQESGGGLVQAGGSLRLSCAASGYISYQYEMGWYRQAPGKEREFVAAIALGGTTYYADSVKGRFTISRDNAKNTVYLQMNSLKPEDTAVYYCAALLRDYYLYDDWHIYWGQGTQVTVSS

SEQ ID NO: 6717 - protein, 118 aa, Artificial Sequence
  Chemically Synthesized
QVQLQESGGGLVQAGGSLRLSCAASGTISVIDVMGWYRQAPGKERELVASIDWGGTTNYADSVKGRFTISRDNAKNTVYLQMNSLKPEDTAVYYCAAVYRVYDKYAYWGQGTQVTVSS

SEQ ID NO: 6718 - protein, 122 aa, Artificial Sequence
  Chemically Synthesized
QVQLQESGGGLVQAGGSLRLSCAASGNIFVIEPMGWYRQAPGKERELVAGIAYGATTYYADSVKGRFTISRDNAKNTVYLQMNSLKPEDTAVYYCAVLIYVAVLNYSAYDYWGQGTQVTVSS

SEQ ID NO: 6719 - protein, 121 aa, Artificial Sequence
  Chemically Synthesized
QVQLQESGGGLVQAGGSLRLSCAASGYISETRLMGWYRQAPGKERELVPLLVRVVVPYADSVKGRFTISRDNAKNTVYLQMNSLKPEDTAVYYCAAAYNYYYGTSGFHAYWGQGTQVTVSS

SEQ ID NO: 6720 - protein, 118 aa, Artificial Sequence
  Chemically Synthesized
QVQLQESGGGLVQAGGSLRLSCAASGYISRVYVMGWYRQAPGKEREFVAAISGGANTNYADSVKGRFTISRDNAKNTVYLQMNSLKPEDTAVYYCAVRFQRYSPYIYWGQGTQVTVSS

SEQ ID NO: 6721 - protein, 118 aa, Artificial Sequence
  Chemically Synthesized
QVQLQESGGGLVQAGGSLRLSCAASGSIFTYWYMGWYRQAPGKEREFVAGIGYGAITYYADSVKGRFTISRDNAKNTVYLQMNSLKPEDTAVYYCAVLGYSSGDHDYWGQGTQVTVSS

SEQ ID NO: 6722 - protein, 119 aa, Artificial Sequence
  Chemically Synthesized
QVQLQESGGGLVQAGGSLRLSCAASGTIFWYDGMGWYRQAPGKERELVAGITYGGITYYADSVKGRFTISRDNAKNTVYLQMNSLKPEDTAVYYCAVDDYGDYWSFDYWGQGTQVTVSS

SEQ ID NO: 6723 - protein, 118 aa, Artificial Sequence
  Chemically Synthesized
QVQLQESGGGLVQAGGSLRLSCAASGTISYWWLMGWYRQAPGKERELVAGIAYGATTYYADSVKGRFTISRDNAKNTVYLQMNSLKPEDTAVYYCAVYSYLGDGYDYWGQGTQVTVSS

SEQ ID NO: 6724 - protein, 121 aa, Artificial Sequence
  Chemically Synthesized
QVQLQESGGGLVQAGGSLRLSCAASGSISYSPLMGWYRQAPGKERELVAGIDYGGTTYYADSVKGRFTISRDNAKNTVYLQMNSLKPEDTAVYYCAARADDLYVDDILGYWGQGTQVTVSS

SEQ ID NO: 6725 - protein, 126 aa, Artificial Sequence
  Chemically Synthesized
QVQLQESGGGLVQAGGSLRLSCAASGTISLEPSMGWYRQAPGKEREFVAGIGAGSTTYYADSVKGRFTISRDNAKNTVYLQMNSLKPEDTAVYYCAVFHWYYPYSHGHFGHVYRYWGQGTQVTVSS

SEQ ID NO: 6726 - protein, 126 aa, Artificial Sequence
  Chemically Synthesized
QVQLQESGGGLVQAGGSLRLSCAASGNISLASGMGWYRQAPGKEREFVAGIGDGSNTYYADSVKGRFTISRDNAKNTVYLQMNSLKPEDTAVYYCAVYVLYLGTRGRYYQRFHRYWGQGTQVTVSS

SEQ ID NO: 6727 - protein, 126 aa, Artificial Sequence
  Chemically Synthesized
QVQLQESGGGLVQAGGSLRLSCAASGNISTQYNMGWYRQAPGKEREFVAGIGIGGNTYYADSVKGRFTISRDNAKNTVYLQMNSLKPEDTAVYYCAALTAGWPGGGRVTTYVFRYWGQGTQVTVSS

SEQ ID NO: 6728 - protein, 122 aa, Artificial Sequence
  Chemically Synthesized
QVQLQESGGGLVQAGGSLRLSCAASGNIFYLEGMGWYRQAPGKEREFVAGISAGAITNYADSVKGRFTISRDNAKNTVYLQMNSLKPEDTAVYYCAAYSTLRTDFRDPHLYWGQGTQVTVSS

SEQ ID NO: 6729 - protein, 118 aa, Artificial Sequence
  Chemically Synthesized
QVQLQESGGGLVQAGGSLRLSCAASGSISTVDYMGWYRQAPGKEREFVASIATGTTTNYADSVKGRFTISRDNAKNTVYLQMNSLKPEDTAVYYCAVERTYWYDLFYWGQGTQVTVSS

SEQ ID NO: 6730 - protein, 126 aa, Artificial Sequence
  Chemically Synthesized
QVQLQESGGGLVQAGGSLRLSCAASGTIFWYHWMGWYRQAPGKERELVAGIDYGTSTYYADSVKGRFTISRDNAKNTVYLQMNSLKPEDTAVYYCAVPYTGESTAYDLEGRPLNYWGQGTQVTVSS

SEQ ID NO: 6731 - protein, 118 aa, Artificial Sequence
  Chemically Synthesized
QVQLQESGGGLVQAGGSLRLSCAASGSIFRNADMGWYRQAPGKERELVAGIGHGATTYYADSVKGRFTISRDNAKNTVYLQMNSLKPEDTAVYYCAAHGLDYPNYGYWGQGTQVTVSS

SEQ ID NO: 6732 - protein, 122 aa, Artificial Sequence
  Chemically Synthesized
QVQLQESGGGLVQAGGSLRLSCAASGTISSYADMGWYRQAPGKERELVAGIGFGATTYYADSVKGRFTISRDNAKNTVYLQMNSLKPEDTAVYYCAAEWVDDEWDRRWFGYWGQGTQVTVSS

SEQ ID NO: 6733 - protein, 126 aa, Artificial Sequence
  Chemically Synthesized
QVQLQESGGGLVQAGGSLRLSCAASGTISPQLYMGWYRQAPGKERELVATIAGGTTTNYADSVKGRFTISRDNAKNTVYLQMNSLKPEDTAVYYCAADGYYVPVGPEVVYYPFDYWGQGTQVTVSS

SEQ ID NO: 6734 - protein, 118 aa, Artificial Sequence
  Chemically Synthesized
QVQLQESGGGLVQAGGSLRLSCAASGTISIVDDMGWYRQAPGKERELVATITIGANTNYADSVKGRFTISRDNAKNTVYLQMNSLKPEDTAVYYCAAVYYAPWLHLYWGQGTQVTVSS

SEQ ID NO: 6735 - protein, 108 aa, Artificial Sequence
  Chemically Synthesized
QVQLQESGGGLVQAGGSLRLSCAASGTGVDTMGWYRQAPGKERELVAGINGTTTYYADSVKGRFTISRDNAKNTVYLQMNSLKPEDTAVYYCAVWIYWGQGTQVTVSS

SEQ ID NO: 6736 - protein, 126 aa, Artificial Sequence
  Chemically Synthesized
QVQLQESGGGLVQAGGSLRLSCAASGNISHKDIMGWYRQAPGKERELVAAIAGGTNTNYADSVKGRFTISRDNAKNTVYLQMNSLKPEDTAVYYCAAWLYVADYLYRYYDGDFNYWGQGTQVTVSS

SEQ ID NO: 6737 - protein, 120 aa, Artificial Sequence
  Chemically Synthesized
QVQLQESGGGLVQAGGSLRLSCAASGTISHNGDMGWYRQAPGKEREFVAGISGSTNYADSVKGRFTISRDNAKNTVYLQMNSLKPEDTAVYYCAVYVPYDSPWGWYYEYWGQGTQVTVSS

SEQ ID NO: 6738 - protein, 122 aa, Artificial Sequence
  Chemically Synthesized
QVQLQESGGGLVQAGGSLRLSCAASGTISDWYGMGWYRQAPGKEREFVAGINYGTTTNYADSVKGRFTISRDNAKNTVYLQMNSLKPEDTAVYYCAADVYLLDRTSYLYEYWGQGTQVTVSS

SEQ ID NO: 6739 - protein, 126 aa, Artificial Sequence
  Chemically Synthesized
QVQLQESGGGLVQAGGSLRLSCAASGSISGDADMGWYRQAPGKEREFVAGIGRGAITYYADSVKGRFTISRDNAKNTVYLQMNSLKPEDTAVYYCAAEWLTYDESRDPEYLTFGYWGQGTQVTVSS

SEQ ID NO: 6740 - protein, 118 aa, Artificial Sequence
  Chemically Synthesized
QVQLQESGGGLVQAGGSLRLSCAASGTISVRHDMGWYRQAPGKERELVAGIDQGTNTYYADSVKGRFTISRDNAKNTVYLQMNSLKPEDTAVYYCAAHNNVAPYFGYWGQGTQVTVSS

SEQ ID NO: 6741 - protein, 111 aa, Artificial Sequence
  Chemically Synthesized
QVQLQESGGGLVQAGGSLRLSCAASGTIFYLAPMGWYRQAPGKERELVAGINEGANTYYADSVKGRFTISRDNAKNTVYLQMNSLKPEDTAVYYCAVWVYWGQGTQVTVSS

SEQ ID NO: 6742 - protein, 122 aa, Artificial Sequence
  Chemically Synthesized
QVQLQESGGGLVQAGGSLRLSCAASGNISVRSPMGWYRQAPGKERELVAGIDDGGNTYYADSVKGRFTISRDNAKNTVYLQMNSLKPEDTAVYYCAAWGLIYGTPRLYYRYWGQGTQVTVSS

SEQ ID NO: 6743 - protein, 126 aa, Artificial Sequence
  Chemically Synthesized
QVQLQESGGGLVQAGGSLRLSCAASGNIFDYVDMGWYRQAPGKEREFVAGINYGGTTYYADSVKGRFTISRDNAKNTVYLQMNSLKPEDTAVYYCAVGGYERGYTGADVTDYHDYWGQGTQVTVSS

SEQ ID NO: 6744 - protein, 118 aa, Artificial Sequence
  Chemically Synthesized
QVQLQESGGGLVQAGGSLRLSCAASGTISPSTVMGWYRQAPGKERELVAGIDDGGNTYYADSVKGRFTISRDNAKNTVYLQMNSLKPEDTAVYYCAVLIINGRLYDYWGQGTQVTVSS

SEQ ID NO: 6745 - protein, 122 aa, Artificial Sequence
  Chemically Synthesized
QVQLQESGGGLVQAGGSLRLSCAASGSIFYLADMGWYRQAPGKEREFVAAIGDGSTTNYADSVKGRFTISRDNAKNTVYLQMNSLKPEDTAVYYCAVYAYRDPYEQGWHYYWGQGTQVTVSS

SEQ ID NO: 6746 - protein, 122 aa, Artificial Sequence
  Chemically Synthesized
QVQLQESGGGLVQAGGSLRLSCAASGSISRDAIMGWYRQAPGKERELVAAIDDGSITYYADSVKGRFTISRDNAKNTVYLQMNSLKPEDTAVYYCAVGSLSFAARYKRLDYWGQGTQVTVSS

SEQ ID NO: 6747 - protein, 118 aa, Artificial Sequence
  Chemically Synthesized
QVQLQESGGGLVQAGGSLRLSCAASGNISPLDGMGWYRQAPGKEREFVAGIDLGAITNYADSVKGRFTISRDNAKNTVYLQMNSLKPEDTAVYYCAVADHNLLGHYYWGQGTQVTVSS

SEQ ID NO: 6748 - protein, 121 aa, Artificial Sequence
  Chemically Synthesized
QVQLQESGGGLVQAGGSLRLSCAASGYISYPSRMGWYRQAPGKEREFVAAIAGTTTNYADSVKGRFTISRDNAKNTVYLQMNSLKPEDTAVYYCAAIYRLHAQWRRWLWYWGQGTQVTVSS

SEQ ID NO: 6749 - protein, 119 aa, Artificial Sequence
  Chemically Synthesized
QVQLQESGGGLVQAGGSLRLSCAASGSIFRDQTMGWYRQAPGKEREFVASIDGGGSTYYADSVKGRFTISRDNAKNTVYLQMNSLKPEDTAVYYCAAWDYIRGFWHGYWGQGTQVTVSS

SEQ ID NO: 6750 - protein, 118 aa, Artificial Sequence
  Chemically Synthesized
QVQLQESGGGLVQAGGSLRLSCAASGSIFPGVSMGWYRQAPGKEREFVATISHGTTNQYADSVKGRFTISRDNAKNTVYLQMNSLKPEDTAVYYCAVIDTDEYDHGYWGQGTQVTVSS

SEQ ID NO: 6751 - protein, 126 aa, Artificial Sequence
  Chemically Synthesized
QVQLQESGGGLVQAGGSLRLSCAASGTIFTWRKMGWYRQAPGKEREFVASIAYGSSTNYADSVKGRFTISRDNAKNTVYLQMNSLKPEDTAVYYCAVYPGQYFWWHLSPTGHHGYWGQGTQVTVSS

SEQ ID NO: 6752 - protein, 122 aa, Artificial Sequence
  Chemically Synthesized
QVQLQESGGGLVQAGGSLRLSCAASGNIFDRYYMGWYRQAPGKEREFVATIAPGSSTNYADSVKGRFTISRDNAKNTVYLQMNSLKPEDTAVYYCAAVVYYRSHGAHIFHYWGQGTQVTVSS

SEQ ID NO: 6753 - protein, 118 aa, Artificial Sequence
  Chemically Synthesized
QVQLQESGGGLVQAGGSLRLSCAASGSISTQYNMGWYRQAPGKEREFVAAINHGASTNYADSVKGRFTISRDNAKNTVYLQMNSLKPEDTAVYYCAALYWDDAYLYYWGQGTQVTVSS

SEQ ID NO: 6754 - protein, 118 aa, Artificial Sequence
  Chemically Synthesized
QVQLQESGGGLVQAGGSLRLSCAASGNISDRSVMGWYRQAPGKERELVAAINRGSSTNYADSVKGRFTISRDNAKNTVYLQMNSLKPEDTAVYYCAVLAYSEGYLYYWGQGTQVTVSS

SEQ ID NO: 6755 - protein, 111 aa, Artificial Sequence
  Chemically Synthesized
QVQLQESGGGLVQAGGSLRLSCAASGYISQRYPMGWYRQAPGKERELVAGISAGGTTYYADSVKGRFTISRDNAKNTVYLQMNSLKPEDTAVYYCAVWSYWGQGTQVTVSS

SEQ ID NO: 6756 - protein, 118 aa, Artificial Sequence
  Chemically Synthesized
QVQLQESGGGLVQAGGSLRLSCAASGTIFDDDTMGWYRQAPGKEREFVAGIDDGGTTYYADSVKGRFTISRDNAKNTVYLQMNSLKPEDTAVYYCAVPNWYQYGHYYWGQGTQVTVSS

SEQ ID NO: 6757 - protein, 118 aa, Artificial Sequence
  Chemically Synthesized
QVQLQESGGGLVQAGGSLRLSCAASGNIFDYSYMGWYRQAPGKERELVAGINYGSTTNYADSVKGRFTISRDNAKNTVYLQMNSLKPEDTAVYYCAVFYRQGHRFTYWGQGTQVTVSS

SEQ ID NO: 6758 - protein, 123 aa, Artificial Sequence
  Chemically Synthesized
QVQLQESGGGLVQAGGSLRLSCAASGYIFRHSDMGWYRQAPGKERELVAAISYGSTTYYADSVKGRFTISRDNAKNTVYLQMNSLKPEDTAVYYCAVADYADVDGDYGHHKYWGQGTQVTVSS

SEQ ID NO: 6759 - protein, 118 aa, Artificial Sequence
  Chemically Synthesized
QVQLQESGGGLVQAGGSLRLSCAASGSISAYLPMGWYRQAPGKEREFVAGIGVGATTYYADSVKGRFTISRDNAKNTVYLQMNSLKPEDTAVYYCAVVPYAQPLHYYWGQGTQVTVSS

SEQ ID NO: 6760 - protein, 122 aa, Artificial Sequence
  Chemically Synthesized
QVQLQESGGGLVQAGGSLRLSCAASGNIFPGWDMGWYRQAPGKEREFVATIDDGAITNYADSVKGRFTISRDNAKNTVYLQMNSLKPEDTAVYYCAVWYSYTGGDYYDLLYWGQGTQVTVSS

SEQ ID NO: 6761 - protein, 122 aa, Artificial Sequence
  Chemically Synthesized
QVQLQESGGGLVQAGGSLRLSCAASGTISPPWYMGWYRQAPGKEREFVAAIDDGGTTNYADSVKGRFTISRDNAKNTVYLQMNSLKPEDTAVYYCAVYLQSQQQFYYQLGYWGQGTQVTVSS

SEQ ID NO: 6762 - protein, 111 aa, Artificial Sequence
  Chemically Synthesized
QVQLQESGGGLVQAGGSLRLSCAASGYIFSVTPMGWYRQAPGKERELVAGIDGGSTTYYADSVKGRFTISRDNAKNTVYLQMNSLKPEDTAVYYCAVYIYWGQGTQVTVSS

SEQ ID NO: 6763 - protein, 118 aa, Artificial Sequence
  Chemically Synthesized
QVQLQESGGGLVQAGGSLRLSCAASGNISNRGTMGWYRQAPGKERELVATIAYGGSTYYADSVKGRFTISRDNAKNTVYLQMNSLKPEDTAVYYCAVYFPYGGDLPYWGQGTQVTVSS

SEQ ID NO: 6764 - protein, 122 aa, Artificial Sequence
  Chemically Synthesized
QVQLQESGGGLVQAGGSLRLSCAASGYISQTVYMGWYRQAPGKERELVAAINQGSNTYYADSVKGRFTISRDNAKNTVYLQMNSLKPEDTAVYYCAAGYTPDRRYYLPYAYWGQGTQVTVSS

SEQ ID NO: 6765 - protein, 122 aa, Artificial Sequence
  Chemically Synthesized
QVQLQESGGGLVQAGGSLRLSCAASGTIFDFNDMGWYRQAPGKEREFVATISSGGNTYYADSVKGRFTISRDNAKNTVYLQMNSLKPEDTAVYYCAVWTYAEWTDVWYLDYWGQGTQVTVSS

SEQ ID NO: 6766 - protein, 118 aa, Artificial Sequence
  Chemically Synthesized
QVQLQESGGGLVQAGGSLRLSCAASGNISRGYTMGWYRQAPGKEREFVAGIDTGGTTYYADSVKGRFTISRDNAKNTVYLQMNSLKPEDTAVYYCAAYATGYLQLYYWGQGTQVTVSS

SEQ ID NO: 6767 - protein, 111 aa, Artificial Sequence
  Chemically Synthesized
QVQLQESGGGLVQAGGSLRLSCAASGTISDTPGMGWYRQAPGKERELVAGIDIGGITYYADSVKGRFTISRDNAKNTVYLQMNSLKPEDTAVYYCAYYIYWGQGTQVTVSS

SEQ ID NO: 6768 - protein, 111 aa, Artificial Sequence
  Chemically Synthesized
QVQLQESGGGLVQAGGSLRLSCAASGYIFDYHPMGWYRQAPGKERELVAGISEGGITYYADSVKGRFTISRDNAKNTVYLQMNSLKPEDTAVYYCAVFVYWGQGTQVTVSS

SEQ ID NO: 6769 - protein, 115 aa, Artificial Sequence
  Chemically Synthesized
QVQLQESGGGLVQAGGSLRLSCAASGNIFGDLVMGWYRQAPGKEREFVAAIAGGTTTYYADSVKGRFTISRDNAKNTVYLQMNSLKPEDTAVYYCAFVPAGSFYWGQGTQVTVSS

SEQ ID NO: 6770 - protein, 122 aa, Artificial Sequence
  Chemically Synthesized
QVQLQESGGGLVQAGGSLRLSCAASGSISDFGTMGWYRQAPGKERELVAGIGFGANTYYADSVKGRFTISRDNAKNTVYLQMNSLKPEDTAVYYCAVGDATDPYGQVALDYWGQGTQVTVSS

SEQ ID NO: 6771 - protein, 121 aa, Artificial Sequence
  Chemically Synthesized
QVQLQESGGGLVQAGGSLRLSCAASGYIFAIPMGWYRQAPGKERELVAGIGIGTITYYADSVKGRFTISRDNAKNTVYLQMNSLKPEDTAVYYCAAYGGGTNRSRDTFAYWGQGTQVTVSS

SEQ ID NO: 6772 - protein, 118 aa, Artificial Sequence
  Chemically Synthesized
QVQLQESGGGLVQAGGSLRLSCAASGNIFWTRTMGWYRQAPGKEREFVAAITAGGNTYYADSVKGRFTISRDNAKNTVYLQMNSLKPEDTAVYYCAAYYRGGRYFRYWGQGTQVTVSS

SEQ ID NO: 6773 - protein, 119 aa, Artificial Sequence
  Chemically Synthesized
QVQLQESGGGLVQAGGSLRLSCAASGYISWRPTVMGWYRQAPGKERELVATINYGGNTNYADSVKGRFTISRDNAKNTVYLQMNSLKPEDTAVYYCAARYRYRYPHGYWGQGTQVTVSS

SEQ ID NO: 6774 - protein, 122 aa, Artificial Sequence
  Chemically Synthesized
QVQLQESGGGLVQAGGSLRLSCAASGYIFDNGTMGWYRQAPGKEREFVAAITQGATTNYADSVKGRFTISRDNAKNTVYLQMNSLKPEDTAVYYCAVVLRYRPAWGEWLGYWGQGTQVTVSS

SEQ ID NO: 6775 - protein, 122 aa, Artificial Sequence
  Chemically Synthesized
QVQLQESGGGLVQAGGSLRLSCAASGSIFQPDSMGWYRQAPGKERELVAAIAAGSTTNYADSVKGRFTISRDNAKNTVYLQMNSLKPEDTAVYYCAAIAYWRYFRYVPHQYWGQGTQVTVSS

SEQ ID NO: 6776 - protein, 122 aa, Artificial Sequence
  Chemically Synthesized
QVQLQESGGGLVQAGGSLRLSCAASGYISRVTTMGWYRQAPGKERELVASINDGGSTNYADSVKGRFTISRDNAKNTVYLQMNSLKPEDTAVYYCAVDVYDRDGTALNLDYWGQGTQVTVSS

SEQ ID NO: 6777 - protein, 118 aa, Artificial Sequence
  Chemically Synthesized
QVQLQESGGGLVQAGGSLRLSCAASGTISLAARMGWYRQAPGKEREFVASIDWGTNTNYADSVKGRFTISRDNAKNTVYLQMNSLKPEDTAVYYCAAYAASWGGFRYWGQGTQVTVSS

SEQ ID NO: 6778 - protein, 125 aa, Artificial Sequence
  Chemically Synthesized
QVQLQESGGGLVQAGGSLRLSCAASGSISGDPYMGWYRQAPGKEREFVAGINLGTITYYADSVKGRFTISRDNAKNTVYLQMNSLKPEDTAVYYCAAYGWNPYGYTHSSPTGIYWGQGTQVTVSS

SEQ ID NO: 6779 - protein, 122 aa, Artificial Sequence
  Chemically Synthesized
QVQLQESGGGLVQAGGSLRLSCAASGSISLPDVMGWYRQAPGKERELVAGINDGTNTNYADSVKGRFTISRDNAKNTVYLQMNSLKPEDTAVYYCAVWERYRGAARLWYVYWGQGTQVTVSS

SEQ ID NO: 6780 - protein, 123 aa, Artificial Sequence
  Chemically Synthesized
QVQLQESGGGLVQAGGSLRLSCAASGTISYYSSMGWYRQAPGKEREFVAAINQGSSTYYADSVKGRFTISRDNAKNTVYLQMNSLKPEDTAVYYCAAGHLYSYLNDDAVYGYWGQGTQVTVSS

SEQ ID NO: 6781 - protein, 126 aa, Artificial Sequence
  Chemically Synthesized
QVQLQESGGGLVQAGGSLRLSCAASGYIFFVSRMGWYRQAPGKERELVATINYGSSTNYADSVKGRFTISRDNAKNTVYLQMNSLKPEDTAVYYCAVSYPYRYYGIQTKQYAYWYWGQGTQVTVSS

SEQ ID NO: 6782 - protein, 117 aa, Artificial Sequence
  Chemically Synthesized
QVQLQESGGGLVQAGGSLRLSCAASGSIFARTTMGWYRQAPGKERELVAAIDTGGTTNYADSVKGRFTISRDNAKNTVYLQMNSLKPEDTAVYYCAVLRRDWHGHYWGQGTQVTVSS

SEQ ID NO: 6783 - protein, 119 aa, Artificial Sequence
  Chemically Synthesized
QVQLQESGGGLVQAGGSLRLSCAASGNIFQYDYMGWYRQAPGKERELVAAIAYGTTTNYADSVKGRFTISRDNAKNTVYLQMNSLKPEDTAVYYCAADQDGYRYEHRYWGQGTQVTVSS

SEQ ID NO: 6784 - protein, 121 aa, Artificial Sequence
  Chemically Synthesized
QVQLQESGGGLVQAGGSLRLSCAASGTILTCRMGWYRQAPGKERELVATIGGGSNTNYADSVKGRFTISRDNAKNTVYLQMNSLKPEDTAVYYCAVTSGDEYDAGLYLDYWGQGTQVTVSS

SEQ ID NO: 6785 - protein, 118 aa, Artificial Sequence
  Chemically Synthesized
QVQLQESGGGLVQAGGSLRLSCAASGSISRDYIMGWYRQAPGKEREFVAAIAQGANTYYADSVKGRFTISRDNAKNTVYLQMNSLKPEDTAVYYCAAFYSYAHQFGYWGQGTQVTVSS

SEQ ID NO: 6786 - protein, 118 aa, Artificial Sequence
  Chemically Synthesized
QVQLQESGGGLVQAGGSLRLSCAASGSISSHYIMGWYRQAPGKERELVATITRGTSTYYADSVKGRFTISRDNAKNTVYLQMNSLKPEDTAVYYCAVWYLGSSDFPYWGQGTQVTVSS

SEQ ID NO: 6787 - protein, 118 aa, Artificial Sequence
  Chemically Synthesized
QVQLQESGGGLVQAGGSLRLSCAASGSIFNPRSMGWYRQAPGKERELVAAINYGGSTYYADSVKGRFTISRDNAKNTVYLQMNSLKPEDTAVYYCAAWTYYPDVHLYWGQGTQVTVSS

SEQ ID NO: 6788 - protein, 118 aa, Artificial Sequence
  Chemically Synthesized
QVQLQESGGGLVQAGGSLRLSCAASGTISTDSFMGWYRQAPGKEREFVAGIDRGSNTYYADSVKGRFTISRDNAKNTVYLQMNSLKPEDTAVYYCAAYEQNTYDHDYWGQGTQVTVSS

SEQ ID NO: 6789 - protein, 118 aa, Artificial Sequence
  Chemically Synthesized
QVQLQESGGGLVQAGGSLRLSCAASGSIFPYHAMGWYRQAPGKEREFVAGITHGGSTYYADSVKGRFTISRDNAKNTVYLQMNSLKPEDTAVYYCAVELIGVDPHNYWGQGTQVTVSS

SEQ ID NO: 6790 - protein, 125 aa, Artificial Sequence
  Chemically Synthesized
QVQLQESGGGLVQAGGSLRLSCAASGTISYVHAMGWYRQAPGKERELASIGGGTITNYADSVKGRFTISRDNAKNTVYLQMNSLKPEDTAVYYCAVTYRSYPQYERVVTGYHGYWGQGTQVTVSS

SEQ ID NO: 6791 - protein, 118 aa, Artificial Sequence
  Chemically Synthesized
QVQLQESGGGLVQAGGSLRLSCAASGSISPGGSMGWYRQAPGKEREFVATITAGGTTNYADSVKGRFTISRDNAKNTVYLQMNSLKPEDTAVYYCAVSEPGTRQLWYWGQGTQVTVSS

SEQ ID NO: 6792 - protein, 117 aa, Artificial Sequence
  Chemically Synthesized
QVQLQESGGGLVQAGGSLRLSCAASGYISGEYGMGWYRQAPGKERELVATISRGANTYYADSVKGRFTISRDNAKNTVYLQMNSLKPEDTAVYYCAADSYSSLVIYWGQGTQVTVSS

SEQ ID NO: 6793 - protein, 126 aa, Artificial Sequence
  Chemically Synthesized
QVQLQESGGGLVQAGGSLRLSCAASGTIFAADTMGWYRQAPGKERELVASIDSGSSTNYADSVKGRFTISRDNAKNTVYLQMNSLKPEDTAVYYCAVTGRNVGPYYWSLTVTTIYWGQGTQVTVSS

SEQ ID NO: 6794 - protein, 125 aa, Artificial Sequence
  Chemically Synthesized
QVQLQESGGGLVQAGGSLRLSCAASGNISTRQYMGWYRQAPGKEREFVAGITDGGITNYADSVKGRFTISRDNAKNTVYLQMNSLKPEDTAVYYCAAWLGYERRSNTDYYAYRYWGQGTQVTVSS

SEQ ID NO: 6795 - protein, 121 aa, Artificial Sequence
  Chemically Synthesized
QVQLQESGGGLVQAGGSLRLSCAASGTIFGLYEMGWYRQAPGKERELVAGIGSGRYQYADSVKGRFTISRDNAKNTVYLQMNSLKPEDTAVYYCAVYPVLAQDKSPYFTYWGQGTQVTVSS

SEQ ID NO: 6796 - protein, 118 aa, Artificial Sequence
  Chemically Synthesized
QVQLQESGGGLVQAGGSLRLSCAASGYISTRDVMGWYRQAPGKERELVAGISTGATTYYADSVKGRFTISRDNAKNTVYLQMNSLKPEDTAVYYCAADALGHDYHNYWGQGTQVTVSS

SEQ ID NO: 6797 - protein, 126 aa, Artificial Sequence
  Chemically Synthesized
QVQLQESGGGLVQAGGSLRLSCAASGNIFWSRYMGWYRQAPGKEREFVAGISYGGTTNYADSVKGRFTISRDNAKNTVYLQMNSLKPEDTAVYYCAVVVLGGLESDDSYASWFIYWGQGTQVTVSS

SEQ ID NO: 6798 - protein, 118 aa, Artificial Sequence
  Chemically Synthesized
QVQLQESGGGLVQAGGSLRLSCAASGSISYTDSMGWYRQAPGKERELVAAITSGAITYYADSVKGRFTISRDNAKNTVYLQMNSLKPEDTAVYYCAAYADGPLLYPYWGQGTQVTVSS

SEQ ID NO: 6799 - protein, 117 aa, Artificial Sequence
  Chemically Synthesized
QVQLQESGGGLVQAGGSLRLSCAASGTISDYSGMGWYRQAPGKEREFVASIDVGTNTNYADSVKGRFTISRDNAKNTVYLQMNSLKPEDTAVYYCAVRRRTTTLMYWGQGTQVTVSS

SEQ ID NO: 6800 - protein, 116 aa, Artificial Sequence
  Chemically Synthesized
QVQLQESGGGLVQAGGSLRLSCAASGYIFDIEYMGWYRQAPGKEREAGIGTGSSTYYADSVKGRFTISRDNAKNTVYLQMNSLKPEDTAVYYCAADDYYLWDYRYWGQGTQVTVSS

SEQ ID NO: 6801 - protein, 121 aa, Artificial Sequence
  Chemically Synthesized
QVQLQESGGGLVQAGGSLRLSCAASGTIFADYYMGWYRQAPGKEREFVATIDDGGNTNYADSVKGRFTISRDNAKNTVYLQMNSLKPEDTAVYYCAVTSLTLTTVFLGLYWGQGTQVTVSS

SEQ ID NO: 6802 - protein, 126 aa, Artificial Sequence
  Chemically Synthesized
QVQLQESGGGLVQAGGSLRLSCAASGSIFLDTGMGWYRQAPGKERELVAAITGGGITYYADSVKGRFTISRDNAKNTVYLQMNSLKPEDTAVYYCAVYYYYRRVPNRGTGYSFSYWGQGTQVTVSS

SEQ ID NO: 6803 - protein, 118 aa, Artificial Sequence
  Chemically Synthesized
QVQLQESGGGLVQAGGSLRLSCAASGNISRRPSMGWYRQAPGKERELVATIDPGGITNYADSVKGRFTISRDNAKNTVYLQMNSLKPEDTAVYYCAVTIIQYIPFPYWGQGTQVTVSS

SEQ ID NO: 6804 - protein, 122 aa, Artificial Sequence
  Chemically Synthesized
QVQLQESGGGLVQAGGSLRLSCAASGNISNYFTMGWYRQAPGKEREFVAAIDSGGSTYYADSVKGRFTISRDNAKNTVYLQMNSLKPEDTAVYYCAATTGDDDRVLRILPYWGQGTQVTVSS

SEQ ID NO: 6805 - protein, 118 aa, Artificial Sequence
  Chemically Synthesized
QVQLQESGGGLVQAGGSLRLSCAASGTISIYLSMGWYRQAPGKEREFVATIAYGASTYYADSVKGRFTISRDNAKNTVYLQMNSLKPEDTAVYYCAVGYVAQLYHFYWGQGTQVTVSS

SEQ ID NO: 6806 - protein, 118 aa, Artificial Sequence
  Chemically Synthesized
QVQLQESGGGLVQAGGSLRLSCAASGNIFALISMGWYRQAPGKEREFVASIAAGTSTNYADSVKGRFTISRDNAKNTVYLQMNSLKPEDTAVYYCAATDGLAESHYYWGQGTQVTVSS

SEQ ID NO: 6807 - protein, 126 aa, Artificial Sequence
  Chemically Synthesized
QVQLQESGGGLVQAGGSLRLSCAASGYISVLDSMGWYRQAPGKERELVASISYGSSTYYADSVKGRFTISRDNAKNTVYLQMNSLKPEDTAVYYCAADGGLALLYGRGSGTTYNYWGQGTQVTVSS

SEQ ID NO: 6808 - protein, 118 aa, Artificial Sequence
  Chemically Synthesized
QVQLQESGGGLVQAGGSLRLSCAASGNIFPLRAMGWYRQAPGKERELVAAIAAGAITYYADSVKGRFTISRDNAKNTVYLQMNSLKPEDTAVYYCAARSRTRTGYRYWGQGTQVTVSS

SEQ ID NO: 6809 - protein, 125 aa, Artificial Sequence
  Chemically Synthesized
QVQLQESGGGLVQAGGSLRLSCAASGSISYDYMGWYRQAPGKERELVAGISDGTNTYYADSVKGRFTISRDNAKNTVYLQMNSLKPEDTAVYYCAVVYNRTRIYYFYDIGLLYYWGQGTQVTVSS

SEQ ID NO: 6810 - protein, 121 aa, Artificial Sequence
  Chemically Synthesized
QVQLQESGGGLVQAGGSLRLSCAASGTIFVDVHMGWYRQAPGKERELVAAIGVGSSTYADSVKGRFTISRDNAKNTVYLQMNSLKPEDTAVYYCAVRSPWYPSNLASYPYWGQGTQVTVSS

SEQ ID NO: 6811 - protein, 126 aa, Artificial Sequence
  Chemically Synthesized
QVQLQESGGGLVQAGGSLRLSCAASGTISPSWYMGWYRQAPGKERELVASIGSGGTTYYADSVKGRFTISRDNAKNTVYLQMNSLKPEDTAVYYCAAESAQTSLYWGDRYYSYIYWGQGTQVTVSS

SEQ ID NO: 6812 - protein, 118 aa, Artificial Sequence
  Chemically Synthesized
QVQLQESGGGLVQAGGSLRLSCAASGTIFHPRTMGWYRQAPGKERELVAGISYGSNTYYADSVKGRFTISRDNAKNTVYLQMNSLKPEDTAVYYCAVYYPYWYYHGYWGQGTQVTVSS

SEQ ID NO: 6813 - protein, 116 aa, Artificial Sequence
  Chemically Synthesized
QVQLQESGGGLVQAGGSLRLSCAASGNISYFGTMGWYRQAPGKEREFVASIAGGIPYADSVKGRFTISRDNAKNTVYLQMNSLKPEDTAVYYCAVNTRYDPFLDYWGQGTQVTVSS

SEQ ID NO: 6814 - protein, 118 aa, Artificial Sequence
  Chemically Synthesized
QVQLQESGGGLVQAGGSLRLSCAASGTISRRWYMGWYRQAPGKERELVATISRGGSTNYADSVKGRFTISRDNAKNTVYLQMNSLKPEDTAVYYCAVYGYILYYHQYWGQGTQVTVSS

SEQ ID NO: 6815 - protein, 118 aa, Artificial Sequence
  Chemically Synthesized
QVQLQESGGGLVQAGGSLRLSCAASGSISGSYYMGWYRQAPGKERELVAGIAIGSTTNYADSVKGRFTISRDNAKNTVYLQMNSLKPEDTAVYYCAVGVLSRREFPYWGQGTQVTVSS

SEQ ID NO: 6816 - protein, 118 aa, Artificial Sequence
  Chemically Synthesized
QVQLQESGGGLVQAGGSLRLSCAASGNISGRADMGWYRQAPGKEREFVAAIADGSTTYYADSVKGRFTISRDNAKNTVYLQMNSLKPEDTAVYYCAAYKNRQYRLFYWGQGTQVTVSS

SEQ ID NO: 6817 - protein, 117 aa, Artificial Sequence
  Chemically Synthesized
QVQLQESGGGLVQAGGSLRLSCAASGSISYPDGMGWYRQAPGKEREFVASISNGSTTNYADSVKGRFTISRDNAKNTVYLQMNSLKPEDTAVYYCAVVDSTHNYRYWGQGTQVTVSS

SEQ ID NO: 6818 - protein, 114 aa, Artificial Sequence
  Chemically Synthesized
QVQLQESGGGLVQAGGSLRLSCAASGTIFADPNMGWYRQAPGKEREFVAGIGPGGSTNYADSVKGRFTISRDNAKNTVYLQMNSLKPEDTAVYYCAAGGYHPYWGQGTQVTVSS

SEQ ID NO: 6819 - protein, 118 aa, Artificial Sequence
  Chemically Synthesized
QVQLQESGGGLVQAGGSLRLSCAASGTIFGVPYMGWYRQAPGKERELVASIAIGAITNYADSVKGRFTISRDNAKNTVYLQMNSLKPEDTAVYYCAARDSPDLRHYYWGQGTQVTVSS

SEQ ID NO: 6820 - protein, 126 aa, Artificial Sequence
  Chemically Synthesized
QVQLQESGGGLVQAGGSLRLSCAASGYISGHSSMGWYRQAPGKEREFVATISIGGNTNYADSVKGRFTISRDNAKNTVYLQMNSLKPEDTAVYYCAALHIDDGADPDARIRYHYYWGQGTQVTVSS

SEQ ID NO: 6821 - protein, 121 aa, Artificial Sequence
  Chemically Synthesized
QVQLQESGGGLVQAGGSLRLSCAASGNISLYWVMGWYRQAPGKEREFVATIAYGSSTNYADSVKGRFTISRDNAKNTVYLQMNSLKPEDTAVYYCAAGYYYPADASRHTYWGQGTQVTVSS

SEQ ID NO: 6822 - protein, 112 aa, Artificial Sequence
  Chemically Synthesized
QVQLQESGGGLVQAGGSLRLSCAASGSMGWYRQAPGKERELVAAITLGGITNYADSVKGRFTISRDNAKNTVYLQMNSLKPEDTAVYYCAVARQERYAYDYWGQGTQVTVSS

SEQ ID NO: 6823 - protein, 123 aa, Artificial Sequence
  Chemically Synthesized
QVQLQESGGGLVQAGGSLRLSCAASGTISADGTMGWYRQAPGKERELVAAISYGANTNYADSVKGRFTISRDNAKNTVYLQMNSLKPEDTAVYYCAAYDGPTLYIVHLTYLYWGQGTQVTVSS

SEQ ID NO: 6824 - protein, 122 aa, Artificial Sequence
  Chemically Synthesized
QVQLQESGGGLVQAGGSLRLSCAASGNIFRAANMGWYRQAPGKEREFVAAIARGSTTNYADSVKGRFTISRDNAKNTVYLQMNSLKPEDTAVYYCAVPLDRTITTAGDYSYWGQGTQVTVSS

SEQ ID NO: 6825 - protein, 121 aa, Artificial Sequence
  Chemically Synthesized
QVQLQESGGGLVQAGGSLRLSCAASGSIFSTSMGWYRQAPGKERELVAGIDSGTITYYADSVKGRFTISRDNAKNTVYLQMNSLKPEDTAVYYCAADTSVTALPAVVHRYWGQGTQVTVSS

SEQ ID NO: 6826 - protein, 118 aa, Artificial Sequence
  Chemically Synthesized
QVQLQESGGGLVQAGGSLRLSCAASGNISGYSAMGWYRQAPGKEREFVASIDRGGNTNYADSVKGRFTISRDNAKNTVYLQMNSLKPEDTAVYYCAVGRDPRYALGYWGQGTQVTVSS

SEQ ID NO: 6827 - protein, 118 aa, Artificial Sequence
  Chemically Synthesized
QVQLQESGGGLVQAGGSLRLSCAASGYISYYYTMGWYRQAPGKERELVAAISAGASTYYADSVKGRFTISRDNAKNTVYLQMNSLKPEDTAVYYCAVTRYYVQWHAYWGQGTQVTVSS

SEQ ID NO: 6828 - protein, 118 aa, Artificial Sequence
  Chemically Synthesized
QVQLQESGGGLVQAGGSLRLSCAASGNIFVRRFMGWYRQAPGKERELVAAITGGGITYYADSVKGRFTISRDNAKNTVYLQMNSLKPEDTAVYYCAVQWWDPAGHYYWGQGTQVTVSS

SEQ ID NO: 6829 - protein, 122 aa, Artificial Sequence
  Chemically Synthesized
QVQLQESGGGLVQAGGSLRLSCAASGSIFLPYFMGWYRQAPGKERELVAAITPGSTTYYADSVKGRFTISRDNAKNTVYLQMNSLKPEDTAVYYCAVYYRDDPQPGGNYPYWGQGTQVTVSS

SEQ ID NO: 6830 - protein, 118 aa, Artificial Sequence
  Chemically Synthesized
QVQLQESGGGLVQAGGSLRLSCAASGNISYATDMGWYRQAPGKERELVAGISTGGSTNYADSVKGRFTISRDNAKNTVYLQMNSLKPEDTAVYYCAVPIRTGILHYYWGQGTQVTVSS

SEQ ID NO: 6831 - protein, 123 aa, Artificial Sequence
  Chemically Synthesized
QVQLQESGGGLVQAGGSLRLSCAASGNISVLGGMGWYRQAPGKERELVAAIARGGNTYYADSVKGRFTISRDNAKNTVYLQMNSLKPEDTAVYYCAAFDGEIAPDRVFLLGYWGQGTQVTVSS

SEQ ID NO: 6832 - protein, 113 aa, Artificial Sequence
  Chemically Synthesized
QVQLQESGGGLVQAGGSLRLSCAASGTIFRTGWMGWYRQAPGKERELVAAIADGAITYYADSVKGRFTISRDNAKNTVYLQMNSLKPEDTAVYYCAAVHHDYWGQGTQVTVSS

SEQ ID NO: 6833 - protein, 118 aa, Artificial Sequence
  Chemically Synthesized
QVQLQESGGGLVQAGGSLRLSCAASGTIFYPQHMGWYRQAPGKEREFVATIDIGGSTNYADSVKGRFTISRDNAKNTVYLQMNSLKPEDTAVYYCAAGTDYDDTFPYWGQGTQVTVSS

SEQ ID NO: 6834 - protein, 118 aa, Artificial Sequence
  Chemically Synthesized
QVQLQESGGGLVQAGGSLRLSCAASGNIFADIVMGWYRQAPGKEREFVASIGFGGNTNYADSVKGRFTISRDNAKNTVYLQMNSLKPEDTAVYYCAADFNTYGGFYYWGQGTQVTVSS

SEQ ID NO: 6835 - protein, 118 aa, Artificial Sequence
  Chemically Synthesized
QVQLQESGGGLVQAGGSLRLSCAASGTIFRFPGMGWYRQAPGKEREFVATIADGTITNYADSVKGRFTISRDNAKNTVYLQMNSLKPEDTAVYYCAVDVPYSVVFFYWGQGTQVTVSS

SEQ ID NO: 6836 - protein, 118 aa, Artificial Sequence
  Chemically Synthesized
QVQLQESGGGLVQAGGSLRLSCAASGYISYYSDMGWYRQAPGKERELVASIDYGASTYYADSVKGRFTISRDNAKNTVYLQMNSLKPEDTAVYYCAAVSDPPLAFLYWGQGTQVTVSS

SEQ ID NO: 6837 - protein, 111 aa, Artificial Sequence
  Chemically Synthesized
QVQLQESGGGLVQAGGSLRLSCAASGYIFYDDAMGWYRQAPGKEREFVVTYYADSVKGRFTISRDNAKNTVYLQMNSLKPEDTAVYYCAVYGTDYATHPYWGQGTQVTVSS

SEQ ID NO: 6838 - protein, 122 aa, Artificial Sequence
  Chemically Synthesized
QVQLQESGGGLVQAGGSLRLSCAASGTISFYSYMGWYRQAPGKERELVASIATGGNTNYADSVKGRFTISRDNAKNTVYLQMNSLKPEDTAVYYCAATYDGGVDYVQRYYYWGQGTQVTVSS

SEQ ID NO: 6839 - protein, 121 aa, Artificial Sequence
  Chemically Synthesized
QVQLQESGGGLVQAGGSLRLSCAASGSIFPPYMGWYRQAPGKEREFVASIASGTITNYADSVKGRFTISRDNAKNTVYLQMNSLKPEDTAVYYCAAEYANPQNRGADYTYWGQGTQVTVSS

SEQ ID NO: 6840 - protein, 126 aa, Artificial Sequence
  Chemically Synthesized
QVQLQESGGGLVQAGGSLRLSCAASGNISRAYFMGWYRQAPGKERELVATIANGTITYYADSVKGRFTISRDNAKNTVYLQMNSLKPEDTAVYYCAAPKFPIDGTDWYTVRLHDYWGQGTQVTVSS

SEQ ID NO: 6841 - protein, 122 aa, Artificial Sequence
  Chemically Synthesized
QVQLQESGGGLVQAGGSLRLSCAASGTIFSYWGMGWYRQAPGKEREFVATIDWGGSTNYADSVKGRFTISRDNAKNTVYLQMNSLKPEDTAVYYCAVAYLRATSTWSWFQYWGQGTQVTVSS

SEQ ID NO: 6842 - protein, 118 aa, Artificial Sequence
  Chemically Synthesized
QVQLQESGGGLVQAGGSLRLSCAASGSISLQYAMGWYRQAPGKERELVAAITLGTITNYADSVKGRFTISRDNAKNTVYLQMNSLKPEDTAVYYCAVSGAFSDLYAYWGQGTQVTVSS

SEQ ID NO: 6843 - protein, 118 aa, Artificial Sequence
  Chemically Synthesized
QVQLQESGGGLVQAGGSLRLSCAASGTISYYRVMGWYRQAPGKERELVAGISHGGSTYYADSVKGRFTISRDNAKNTVYLQMNSLKPEDTAVYYCAAYRYLWYPLGYWGQGTQVTVSS

SEQ ID NO: 6844 - protein, 118 aa, Artificial Sequence
  Chemically Synthesized
QVQLQESGGGLVQAGGSLRLSCAASGNISYRYKMGWYRQAPGKERELVAGINDGGTTNYADSVKGRFTISRDNAKNTVYLQMNSLKPEDTAVYYCAAHLFYYYILVYWGQGTQVTVSS

SEQ ID NO: 6845 - protein, 122 aa, Artificial Sequence
  Chemically Synthesized
QVQLQESGGGLVQAGGSLRLSCAASGTISFDDSMGWYRQAPGKERELVASITIGASTYYADSVKGRFTISRDNAKNTVYLQMNSLKPEDTAVYYCAVGYLYTPFDYLTYYYWGQGTQVTVSS

SEQ ID NO: 6846 - protein, 118 aa, Artificial Sequence
  Chemically Synthesized
QVQLQESGGGLVQAGGSLRLSCAASGNISQTVYMGWYRQAPGKEREFVASIDVGGITNYADSVKGRFTISRDNAKNTVYLQMNSLKPEDTAVYYCAVTYRYYWSFTYWGQGTQVTVSS

SEQ ID NO: 6847 - protein, 122 aa, Artificial Sequence
  Chemically Synthesized
QVQLQESGGGLVQAGGSLRLSCAASGTIFWYDDMGWYRQAPGKERELVATITRGTSTYYADSVKGRFTISRDNAKNTVYLQMNSLKPEDTAVYYCAPDYYHQTNTVSYYNYWGQGTQVTVSS

SEQ ID NO: 6848 - protein, 125 aa, Artificial Sequence
  Chemically Synthesized
QVQLQESGGGLVQAGGSLRLSCAASGSIFYQAGMGWYRQAPGKERELVASIAEVLIPYADSVKGRFTISRDNAKNTVYLQMNSLKPEDTAVYYCAATVQHAVYYPYDAGWALRYWGQGTQVTVSS

SEQ ID NO: 6849 - protein, 118 aa, Artificial Sequence
  Chemically Synthesized
QVQLQESGGGLVQAGGSLRLSCAASGNISSGYYMGWYRQAPGKERELVASIGGGGITYYADSVKGRFTISRDNAKNTVYLQMNSLKPEDTAVYYCAVYYRGDETYGYWGQGTQVTVSS

SEQ ID NO: 6850 - protein, 117 aa, Artificial Sequence
  Chemically Synthesized
QVQLQESGGGLVQAGGSLRLSCAASGYISGSVSMGWYRQAPGKEREFVAGIGYGGITNYADSVKGRFTISRDNAKNTVYLQMNSLKPEDTAVYYCADSWPYLYHQYWGQGTQVTVSS

SEQ ID NO: 6851 - protein, 122 aa, Artificial Sequence
  Chemically Synthesized
QVQLQESGGGLVQAGGSLRLSCAASGYISRARLMGWYRQAPGKEREFVASINYGGTTNYADSVKGRFTISRDNAKNTVYLQMNSLKPEDTAVYYCAAVFAGYDAYGGRHAYWGQGTQVTVSS

SEQ ID NO: 6852 - protein, 117 aa, Artificial Sequence
  Chemically Synthesized
QVQLQESGGGLVQAGGSLRLSCAASGSISWGDTMGWYRQAPGKERELVAGITYGTSTNYADSVKGRFTISRDNAKNTVYLQMNSLKPEDTAVYYCAVYRRRTTTMYWGQGTQVTVSS

SEQ ID NO: 6853 - protein, 121 aa, Artificial Sequence
  Chemically Synthesized
QVQLQESGGGLVQAGGSLRLSCAASGTISVPYTMGWYRQAPGKEREFVATISPGSSTNYADSVKGRFTISRDNAKNTVYLQMNSLKPEDTAVYYCAVSDDLRNIGAEYSYWGQGTQVTVSS

SEQ ID NO: 6854 - protein, 118 aa, Artificial Sequence
  Chemically Synthesized
QVQLQESGGGLVQAGGSLRLSCAASGNISSRDYMGWYRQAPGKEREFVATISSGGNTNYADSVKGRFTISRDNAKNTVYLQMNSLKPEDTAVYYCAVSGWRVPAYPYWGQGTQVTVSS

SEQ ID NO: 6855 - protein, 122 aa, Artificial Sequence
  Chemically Synthesized
QVQLQESGGGLVQAGGSLRLSCAASGSISSRAIMGWYRQAPGKEREFVATIARGSNTNYADSVKGRFTISRDNAKNTVYLQMNSLKPEDTAVYYCAAFSPSSTEPSDLYRYWGQGTQVTVSS

SEQ ID NO: 6856 - protein, 122 aa, Artificial Sequence
  Chemically Synthesized
QVQLQESGGGLVQAGGSLRLSCAASGYISRRYSMGWYRQAPGKERELVAGITYGASTYYADSVKGRFTISRDNAKNTVYLQMNSLKPEDTAVYYCAATWGGANYPRYPHRYWGQGTQVTVSS

SEQ ID NO: 6857 - protein, 122 aa, Artificial Sequence
  Chemically Synthesized
QVQLQESGGGLVQAGGSLRLSCAASGSISIAYGMGWYRQAPGKERELVASISYGANTYYADSVKGRFTISRDNAKNTVYLQMNSLKPEDTAVYYCAALRFHTTTGDQLHHYWGQGTQVTVSS

SEQ ID NO: 6858 - protein, 125 aa, Artificial Sequence
  Chemically Synthesized
QVQLQESGGGLVQAGGSLRLSCAASGTISDPQMGWYRQAPGKERELVAAIGRGGITYYADSVKGRFTISRDNAKNTVYLQMNSLKPEDTAVYYCAVFAVAGYYVLKFPNNVYIYWGQGTQVTVSS

SEQ ID NO: 6859 - protein, 118 aa, Artificial Sequence
  Chemically Synthesized
QVQLQESGGGLVQAGGSLRLSCAASGSIFATWAMGWYRQAPGKERELVASIDYGAITYYADSVKGRFTISRDNAKNTVYLQMNSLKPEDTAVYYCAVNTTRYPTFSYWGQGTQVTVSS

SEQ ID NO: 6860 - protein, 117 aa, Artificial Sequence
  Chemically Synthesized
QVQLQESGGGLVQAGGSLRLSCAASGSIFRYNRMGWYRQAPGKERELVAGINGGSTTNYADSVKGRFTISRDNAKNTVYLQMNSLKPEDTAVYYCAASLVNGLVLYWGQGTQVTVSS

SEQ ID NO: 6861 - protein, 126 aa, Artificial Sequence
  Chemically Synthesized
QVQLQESGGGLVQAGGSLRLSCAASGNISWVPRMGWYRQAPGKEREFVAAIADGANTNYADSVKGRFTISRDNAKNTVYLQMNSLKPEDTAVYYCAADEQYDTYLFVAYADTHVYWGQGTQVTVSS

SEQ ID NO: 6862 - protein, 118 aa, Artificial Sequence
  Chemically Synthesized
QVQLQESGGGLVQAGGSLRLSCAASGTIFSVVQMGWYRQAPGKERELVAAINHGGNTYYADSVKGRFTISRDNAKNTVYLQMNSLKPEDTAVYYCAARADAYYNFYYWGQGTQVTVSS

SEQ ID NO: 6863 - protein, 117 aa, Artificial Sequence
  Chemically Synthesized
QVQLQESGGGLVQAGGSLRLSCAASGTISYALTMGWYRQAPGKERELVAGIDAGTNTNYADSVKGRFTISRDNAKNTVYLQMNSLKPEDTAVYYCAAGDSSTTVIYWGQGTQVTVSS

SEQ ID NO: 6864 - protein, 118 aa, Artificial Sequence
  Chemically Synthesized
QVQLQESGGGLVQAGGSLRLSCAASGSISRRDTMGWYRQAPGKEREFVAGIDRGTITYYADSVKGRFTISRDNAKNTVYLQMNSLKPEDTAVYYCAAQLVKYYSHHYWGQGTQVTVSS

SEQ ID NO: 6865 - protein, 119 aa, Artificial Sequence
  Chemically Synthesized
QVQLQESGGGLVQAGGSLRLSCAASGTIFARQGMGWYRQAPGKERELVAAITNGGITNYADSVKGRFTISRDNAKNTVYLQMNSLKPEDTAVYYCAVSPPDGDLFHVYWGQGTQVTVSS

SEQ ID NO: 6866 - protein, 118 aa, Artificial Sequence
  Chemically Synthesized
QVQLQESGGGLVQAGGSLRLSCAASGTISVGPLMGWYRQAPGKERELVAAITLGTITYYADSVKGRFTISRDNAKNTVYLQMNSLKPEDTAVYYCAASYFTPGRHWYWGQGTQVTVSS

SEQ ID NO: 6867 - protein, 121 aa, Artificial Sequence
  Chemically Synthesized
QVQLQESGGGLVQAGGSLRLSCAASGYISNTYDMGWYRQAPGKEREFVATITAGTSTNYADSVKGRFTISRDNAKNTVYLQMNSLKPEDTAVYYCAASVSSTTVTWTSMYWGQGTQVTVSS

SEQ ID NO: 6868 - protein, 118 aa, Artificial Sequence
  Chemically Synthesized
QVQLQESGGGLVQAGGSLRLSCAASGNISYYQPMGWYRQAPGKERELVAAIGIGSSTYYADSVKGRFTISRDNAKNTVYLQMNSLKPEDTAVYYCAVFYYYYDWFVYWGQGTQVTVSS

SEQ ID NO: 6869 - protein, 119 aa, Artificial Sequence
  Chemically Synthesized
QVQLQESGGGLVQAGGSLRLSCAASGSISGPRNMGWYRQAPGKERELVATIAIGAITNYADSVKGRFTISRDNAKNTVYLQMNSLKPEDTAVYYCAAQYPRYDDDFGYWGQGTQVTVSS

SEQ ID NO: 6870 - protein, 119 aa, Artificial Sequence
  Chemically Synthesized
QVQLQESGGGLVQAGGSLRLSCAASGSISWTFTMGWYRQAPGKEREFVATITGGSSTNYADSVKGRFTISRDNAKNTVYLQMNSLKPEDTAVYYCAVTDGRVGYALVYWGQGTQVTVSS

SEQ ID NO: 6871 - protein, 110 aa, Artificial Sequence
  Chemically Synthesized
QVQLQESGGGLVQAGGSLRLSCAASGSIFPDKYMGWYRQAPGKERELVAGITGGTITYYADSVKGRFTISRDNAKNTVYLQMNSLKPEDTAVYYCAAKYWGQGTQVTVSS

SEQ ID NO: 6872 - protein, 118 aa, Artificial Sequence
  Chemically Synthesized
QVQLQESGGGLVQAGGSLRLSCAASGSISGSFAMGWYRQAPGKEREFVAAIGAGTNTYYADSVKGRFTISRDNAKNTVYLQMNSLKPEDTAVYYCAVLYIPAYTLSYWGQGTQVTVSS

SEQ ID NO: 6873 - protein, 118 aa, Artificial Sequence
  Chemically Synthesized
QVQLQESGGGLVQAGGSLRLSCAASGTISIRRVMGWYRQAPGKEREFVATITRGSSTNYADSVKGRFTISRDNAKNTVYLQMNSLKPEDTAVYYCAAGRRSSQQHGYWGQGTQVTVSS

SEQ ID NO: 6874 - protein, 118 aa, Artificial Sequence
  Chemically Synthesized
QVQLQESGGGLVQAGGSLRLSCAASGTISEPFRMGWYRQAPGKERELVATINGGSTTYYADSVKGRFTISRDNAKNTVYLQMNSLKPEDTAVYYCAAHQAERAYLRYWGQGTQVTVSS

SEQ ID NO: 6875 - protein, 122 aa, Artificial Sequence
  Chemically Synthesized
QVQLQESGGGLVQAGGSLRLSCAASGSIFDVYNMGWYRQAPGKERELVATIGTGAITYYADSVKGRFTISRDNAKNTVYLQMNSLKPEDTAVYYCAVYGEYVTYDDGNYRYWGQGTQVTVSS

SEQ ID NO: 6876 - protein, 114 aa, Artificial Sequence
  Chemically Synthesized
QVQLQESGGGLVQAGGSLRLSCAASGSISSTYGMGWYRQAPGKERELVATISYGTTTNYADSVKGRFTISRDNAKNTVYLQMNSLKPEDTAVYYCAALLTLFYWGQGTQVTVSS

SEQ ID NO: 6877 - protein, 126 aa, Artificial Sequence
  Chemically Synthesized
QVQLQESGGGLVQAGGSLRLSCAASGYIFGIGYMGWYRQAPGKEREFVAGIATGTTTNYADSVKGRFTISRDNAKNTVYLQMNSLKPEDTAVYYCAATVTTPYGDDRWLYYYHFYWGQGTQVTVSS

SEQ ID NO: 6878 - protein, 126 aa, Artificial Sequence
  Chemically Synthesized
QVQLQESGGGLVQAGGSLRLSCAASGSISYSYPMGWYRQAPGKERELVAAIGYGTTTNYADSVKGRFTISRDNAKNTVYLQMNSLKPEDTAVYYCAVRGDADRQSYYDYADYHTYWGQGTQVTVSS

SEQ ID NO: 6879 - protein, 122 aa, Artificial Sequence
  Chemically Synthesized
QVQLQESGGGLVQAGGSLRLSCAASGTISHIVVMGWYRQAPGKEREFVATIAPGSITNYADSVKGRFTISRDNAKNTVYLQMNSLKPEDTAVYYCAADIYILANAVYSHSYWGQGTQVTVSS

SEQ ID NO: 6880 - protein, 118 aa, Artificial Sequence
  Chemically Synthesized
QVQLQESGGGLVQAGGSLRLSCAASGYIFPRTFMGWYRQAPGKERELVATIGRGSITNYADSVKGRFTISRDNAKNTVYLQMNSLKPEDTAVYYCAVQLRQDTYFYYWGQGTQVTVSS

SEQ ID NO: 6881 - protein, 122 aa, Artificial Sequence
  Chemically Synthesized
QVQLQESGGGLVQAGGSLRLSCAASGNISYTFAMGWYRQAPGKERELVAAIDAGTSTNYADSVKGRFTISRDNAKNTVYLQMNSLKPEDTAVYYCAAWRDTYDGEFRDYPYWGQGTQVTVSS

SEQ ID NO: 6882 - protein, 122 aa, Artificial Sequence
  Chemically Synthesized
QVQLQESGGGLVQAGGSLRLSCAASGSIFGYSVMGWYRQAPGKEREFVAAISPGSSTYYADSVKGRFTISRDNAKNTVYLQMNSLKPEDTAVYYCAAGWPLIIYFSLGYSYWGQGTQVTVSS

SEQ ID NO: 6883 - protein, 122 aa, Artificial Sequence
  Chemically Synthesized
QVQLQESGGGLVQAGGSLRLSCAASGYIFPLSIMGWYRQAPGKERELVAAINYGGITYYADSVKGRFTISRDNAKNTVYLQMNSLKPEDTAVYYCAVGDDSTADYLDDFGYWGQGTQVTVSS

SEQ ID NO: 6884 - protein, 125 aa, Artificial Sequence
  Chemically Synthesized
QVQLQESGGGLVQAGGSLRLSCAASGYISQVLWMGWYRQAPGKEREFVAAIAVGSNTNYADSVKGRFTISRDNAKNTVYLQMNSLKPEDTAVYYCAVIYPYKLSDAQDRYGYPYWGQGTQVTVSS

SEQ ID NO: 6885 - protein, 122 aa, Artificial Sequence
  Chemically Synthesized
QVQLQESGGGLVQAGGSLRLSCAASGSISFYGYMGWYRQAPGKERELVATISSGAITNYADSVKGRFTISRDNAKNTVYLQMNSLKPEDTAVYYCAAGEYYVRDAGAPHPYWGQGTQVTVSS

SEQ ID NO: 6886 - protein, 122 aa, Artificial Sequence
  Chemically Synthesized
QVQLQESGGGLVQAGGSLRLSCAASGTIFYQQTMGWYRQAPGKERELVAGIDPGAITNYADSVKGRFTISRDNAKNTVYLQMNSLKPEDTAVYYCAVWLPFGQPYRVYFGYWGQGTQVTVSS

SEQ ID NO: 6887 - protein, 121 aa, Artificial Sequence
  Chemically Synthesized
QVQLQESGGGLVQAGGSLRLSCAASGYISYVAAMGWYRQAPGKERELVAGISYGGNTYYADSVKGRFTISRDNAKNTVYLQMNSLKPEDTAVYYCAVRRWTTKLTGTTMYWGQGTQVTVSS

SEQ ID NO: 6888 - protein, 122 aa, Artificial Sequence
  Chemically Synthesized
QVQLQESGGGLVQAGGSLRLSCAASGNISDAWSMGWYRQAPGKERELVATIDRGGITNYADSVKGRFTISRDNAKNTVYLQMNSLKPEDTAVYYCAVDDVASYDWDYSHGYWGQGTQVTVSS

SEQ ID NO: 6889 - protein, 118 aa, Artificial Sequence
  Chemically Synthesized
QVQLQESGGGLVQAGGSLRLSCAASGTIFPSQYMGWYRQAPGKEREFVAAIGFGTSTNYADSVKGRFTISRDNAKNTVYLQMNSLKPEDTAVYYCAADVYDTYNHRYWGQGTQVTVSS

SEQ ID NO: 6890 - protein, 116 aa, Artificial Sequence
  Chemically Synthesized
QVQLQESGGGLVQAGGSLRLSCAASGYIFPPYRMGWYRQAPGKEREFVAGITTGGSTNYADSVKGRFTISRDNAKNTVYLQMNSLKPEDTAVYYCAVYYRRYHQYWGQGTQVTVSS

SEQ ID NO: 6891 - protein, 121 aa, Artificial Sequence
  Chemically Synthesized
QVQLQESGGGLVQAGGSLRLSCAASGTIFDTLYMGWYRQAPGKERELVAAIDYGTSTNYADSVKGRFTISRDNAKNTVYLQMNSLKPEDTAVYYCAAYFPKYVVNVVQHYWGQGTQVTVSS

SEQ ID NO: 6892 - protein, 120 aa, Artificial Sequence
  Chemically Synthesized
QVQLQESGGGLVQAGGSLRLSCAASGTISYRYIMGWYRQAPGKEREFVALLITVVLPYADSVKGRFTISRDNAKNTVYLQMNSLKPEDTAVYYCAAYGQYTTVRTFTIYWGQGTQVTVSS

SEQ ID NO: 6893 - protein, 122 aa, Artificial Sequence
  Chemically Synthesized
QVQLQESGGGLVQAGGSLRLSCAASGNIFEYVYMGWYRQAPGKEREFVAGISYGASTYYADSVKGRFTISRDNAKNTVYLQMNSLKPEDTAVYYCAALIDGRDTSGFLYRYWGQGTQVTVSS

SEQ ID NO: 6894 - protein, 122 aa, Artificial Sequence
  Chemically Synthesized
QVQLQESGGGLVQAGGSLRLSCAASGTISGINEMGWYRQAPGKERELVATIALGGTTYYADSVKGRFTISRDNAKNTVYLQMNSLKPEDTAVYYCAAVYSPKSPSRQDFTYWGQGTQVTVSS

SEQ ID NO: 6895 - protein, 116 aa, Artificial Sequence
  Chemically Synthesized
QVQLQESGGGLVQAGGSLRLSCAASGNIFYEYRMGWYRQAPGKEREFVAGINSVVLPYADSVKGRFTISRDNAKNTVYLQMNSLKPEDTAVYYCAVVPTHYYYYYWGQGTQVTVSS

SEQ ID NO: 6896 - protein, 126 aa, Artificial Sequence
  Chemically Synthesized
QVQLQESGGGLVQAGGSLRLSCAASGYIFDGYIMGWYRQAPGKEREFVATIASGTTTYYADSVKGRFTISRDNAKNTVYLQMNSLKPEDTAVYYCAVVYYTHHLDEDDYRHDLDYWGQGTQVTVSS

SEQ ID NO: 6897 - protein, 122 aa, Artificial Sequence
  Chemically Synthesized
QVQLQESGGGLVQAGGSLRLSCAASGSISSWDPMGWYRQAPGKERELVAAITQGTNTNYADSVKGRFTISRDNAKNTVYLQMNSLKPEDTAVYYCAADRYTYQDYGLAYVYWGQGTQVTVSS

SEQ ID NO: 6898 - protein, 114 aa, Artificial Sequence
  Chemically Synthesized
QVQLQESGGGLVQAGGSLRLSCAASGTISYVLMGWYRQAPGKERELVASISTGGTTNYADSVKGRFTISRDNAKNTVYLQMNSLKPEDTAVYYCANVTTTSLYWGQGTQVTVSS

SEQ ID NO: 6899 - protein, 121 aa, Artificial Sequence
  Chemically Synthesized
QVQLQESGGGLVQAGGSLRLSCAASGYISVGLMGWYRQAPGKEREFVASIGQGSITYYADSVKGRFTISRDNAKNTVYLQMNSLKPEDTAVYYCAVTNQYRTYSHNGFDYWGQGTQVTVSS

SEQ ID NO: 6900 - protein, 122 aa, Artificial Sequence
  Chemically Synthesized
QVQLQESGGGLVQAGGSLRLSCAASGNISPWDAMGWYRQAPGKEREFVATITYGSNTYYADSVKGRFTISRDNAKNTVYLQMNSLKPEDTAVYYCAAEITEEDVGPLYLGYWGQGTQVTVSS

SEQ ID NO: 6901 - protein, 122 aa, Artificial Sequence
  Chemically Synthesized
QVQLQESGGGLVQAGGSLRLSCAASGTIFDATSMGWYRQAPGKEREFVATITVGGTTNYADSVKGRFTISRDNAKNTVYLQMNSLKPEDTAVYYCAVLRPTSSVPFGTFGYWGQGTQVTVSS

SEQ ID NO: 6902 - protein, 118 aa, Artificial Sequence
  Chemically Synthesized
QVQLQESGGGLVQAGGSLRLSCAASGYIFYWRNMGWYRQAPGKEREFVAAIALGGNTYYADSVKGRFTISRDNAKNTVYLQMNSLKPEDTAVYYCAVTGRYARGHPYWGQGTQVTVSS

SEQ ID NO: 6903 - protein, 124 aa, Artificial Sequence
  Chemically Synthesized
QVQLQESGGGLVQAGGSLRLSCAASGNIFSLSMGWYRQAPGKERELVASINPGATTNYADSVKGRFTISRDNAKNTVYLQMNSLKPEDTAVYYCAARYLDYEGHLRSVAYLRYWGQGTQVTVSS

SEQ ID NO: 6904 - protein, 122 aa, Artificial Sequence
  Chemically Synthesized
QVQLQESGGGLVQAGGSLRLSCAASGSISQRDSMGWYRQAPGKERELVAGIGFGTNTYYADSVKGRFTISRDNAKNTVYLQMNSLKPEDTAVYYCAAYWDESGRAYPQYWYWGQGTQVTVSS

SEQ ID NO: 6905 - protein, 126 aa, Artificial Sequence
  Chemically Synthesized
QVQLQESGGGLVQAGGSLRLSCAASGTISIDDPMGWYRQAPGKEREFVATITTGGITYYADSVKGRFTISRDNAKNTVYLQMNSLKPEDTAVYYCAAALLQYYYRSYDSSSILSYWGQGTQVTVSS

SEQ ID NO: 6906 - protein, 114 aa, Artificial Sequence
  Chemically Synthesized
QVQLQESGGGLVQAGGSLRLSCAASGNIFSYYYMGWYRQAPGKERELVAGISVGSIPYADSVKGRFTISRDNAKNTVYLQMNSLKPEDTAVYYCAADASEYLYWGQGTQVTVSS

SEQ ID NO: 6907 - protein, 118 aa, Artificial Sequence
  Chemically Synthesized
QVQLQESGGGLVQAGGSLRLSCAASGNIFRWQVMGWYRQAPGKEREFVAGITDGTITYYADSVKGRFTISRDNAKNTVYLQMNSLKPEDTAVYYCAVYVSDVQQHFYWGQGTQVTVSS

SEQ ID NO: 6908 - protein, 122 aa, Artificial Sequence
  Chemically Synthesized
QVQLQESGGGLVQAGGSLRLSCAASGYISDPYYMGWYRQAPGKEREFVAGIAYGGNTNYADSVKGRFTISRDNAKNTVYLQMNSLKPEDTAVYYCAVSAPAGPNTHELLYYWGQGTQVTVSS

SEQ ID NO: 6909 - protein, 116 aa, Artificial Sequence
  Chemically Synthesized
QVQLQESGGGLVQAGGSLRLSCAASGYIFGERKMGWYRQAPGKEREFVAAITWGGITNYADSVKGRFTISRDNAKNTVYLQMNSLKPEDTAVYYCAVVLTSTIIYWGQGTQVTVSS

SEQ ID NO: 6910 - protein, 122 aa, Artificial Sequence
  Chemically Synthesized
QVQLQESGGGLVQAGGSLRLSCAASGTIFQTQWMGWYRQAPGKEREFVAGITGGSTTNYADSVKGRFTISRDNAKNTVYLQMNSLKPEDTAVYYCAAYWNPRWYLYRDFSYWGQGTQVTVSS

SEQ ID NO: 6911 - protein, 118 aa, Artificial Sequence
  Chemically Synthesized
QVQLQESGGGLVQAGGSLRLSCAASGTISAVWSMGWYRQAPGKERELVAGIARGSITNYADSVKGRFTISRDNAKNTVYLQMNSLKPEDTAVYYCAVRYWFGITHDYWGQGTQVTVSS

SEQ ID NO: 6912 - protein, 121 aa, Artificial Sequence
  Chemically Synthesized
QVQLQESGGGLVQAGGSLRLSCAASGNIFPQDRMGWYRQAPGKEREFVATISAGTTTYADSVKGRFTISRDNAKNTVYLQMNSLKPEDTAVYYCAAEGYYYRAVGVEHGYWGQGTQVTVSS

SEQ ID NO: 6913 - protein, 122 aa, Artificial Sequence
  Chemically Synthesized
QVQLQESGGGLVQAGGSLRLSCAASGTISWDGYMGWYRQAPGKEREFVAGIALGTNTYYADSVKGRFTISRDNAKNTVYLQMNSLKPEDTAVYYCAVAYDRAFAHYTTYGYWGQGTQVTVSS

SEQ ID NO: 6914 - protein, 118 aa, Artificial Sequence
  Chemically Synthesized
QVQLQESGGGLVQAGGSLRLSCAASGNIFSTSVMGWYRQAPGKEREFVAAIDGGGTTYYADSVKGRFTISRDNAKNTVYLQMNSLKPEDTAVYYCAATLYGGYDYVYWGQGTQVTVSS

SEQ ID NO: 6915 - protein, 116 aa, Artificial Sequence
  Chemically Synthesized
QVQLQESGGGLVQAGGSLRLSCAASGNIFYLPYMGWYRQAPGKEREFVATIASGGITNYADSVKGRFTISRDNAKNTVYLQMNSLKPEDTAVYYCAAADDDTLQYWGQGTQVTVSS

SEQ ID NO: 6916 - protein, 122 aa, Artificial Sequence
  Chemically Synthesized
QVQLQESGGGLVQAGGSLRLSCAASGTISYFDTMGWYRQAPGKERELVASITGGGTTYYADSVKGRFTISRDNAKNTVYLQMNSLKPEDTAVYYCAAYNTWRLLDAGDHVYWGQGTQVTVSS

SEQ ID NO: 6917 - protein, 118 aa, Artificial Sequence
  Chemically Synthesized
QVQLQESGGGLVQAGGSLRLSCAASGNISDRNGMGWYRQAPGKEREFVATIGYGANTYYADSVKGRFTISRDNAKNTVYLQMNSLKPEDTAVYYCAVVRYHRVYFDYWGQGTQVTVSS

SEQ ID NO: 6918 - protein, 118 aa, Artificial Sequence
  Chemically Synthesized
QVQLQESGGGLVQAGGSLRLSCAASGSISYTVIMGWYRQAPGKEREFVATIADGGSTNYADSVKGRFTISRDNAKNTVYLQMNSLKPEDTAVYYCAANYRVDNVYGYWGQGTQVTVSS

SEQ ID NO: 6919 - protein, 115 aa, Artificial Sequence
  Chemically Synthesized
QVQLQESGGGLVQAGGSLRLSCAASGNISGLSYMGWYRQAPGKEREGITGGATTYYADSVKGRFTISRDNAKNTVYLQMNSLKPEDTAVYYCAAGQHARDDLYYWGQGTQVTVSS

SEQ ID NO: 6920 - protein, 122 aa, Artificial Sequence
  Chemically Synthesized
QVQLQESGGGLVQAGGSLRLSCAASGTISDVYYMGWYRQAPGKERELVAGISDGGNTYYADSVKGRFTISRDNAKNTVYLQMNSLKPEDTAVYYCAAANGDFTYYDYAHSYWGQGTQVTVSS

SEQ ID NO: 6921 - protein, 117 aa, Artificial Sequence
  Chemically Synthesized
QVQLQESGGGLVQAGGSLRLSCAASGYISTIDIMGWYRQAPGKERELVASITGGGSTYYADSVKGRFTISRDNAKNTVYLQMNSLKPEDTAVYYCAVVIDYDMTLYWGQGTQVTVSS

SEQ ID NO: 6922 - protein, 118 aa, Artificial Sequence
  Chemically Synthesized
QVQLQESGGGLVQAGGSLRLSCAASGNISGYRFMGWYRQAPGKERELVAGIDTGSITYYADSVKGRFTISRDNAKNTVYLQMNSLKPEDTAVYYCAAAANEDHDYGYWGQGTQVTVSS

SEQ ID NO: 6923 - protein, 122 aa, Artificial Sequence
  Chemically Synthesized
QVQLQESGGGLVQAGGSLRLSCAASGTISSTAYMGWYRQAPGKEREFVASIAVGAITNYADSVKGRFTISRDNAKNTVYLQMNSLKPEDTAVYYCAVIGEDATDGGGTLWYWGQGTQVTVSS

SEQ ID NO: 6924 - protein, 117 aa, Artificial Sequence
  Chemically Synthesized
QVQLQESGGGLVQAGGSLRLSCAASGYIFGWKYMGWYRQAPGKEREFVASIDLGTSTNYADSVKGRFTISRDNAKNTVYLQMNSLKPEDTAVYYCAVATDLVTVMYWGQGTQVTVSS

SEQ ID NO: 6925 - protein, 118 aa, Artificial Sequence
  Chemically Synthesized
QVQLQESGGGLVQAGGSLRLSCAASGTIFDGPVMGWYRQAPGKEREFVAAITYGTITNYADSVKGRFTISRDNAKNTVYLQMNSLKPEDTAVYYCAAYLYTIHYHYYWGQGTQVTVSS

SEQ ID NO: 6926 - protein, 113 aa, Artificial Sequence
  Chemically Synthesized
QVQLQESGGGLVQAGGSLRLSCAASGNISIGTMGWYRQAPGKERELVATISGGTSTNYADSVKGRFTISRDNAKNTVYLQMNSLKPEDTAVYYCAYDDTYYYWGQGTQVTVSS

SEQ ID NO: 6927 - protein, 118 aa, Artificial Sequence
  Chemically Synthesized
QVQLQESGGGLVQAGGSLRLSCAASGSISAHAYMGWYRQAPGKERELVAAIGGGATTYYADSVKGRFTISRDNAKNTVYLQMNSLKPEDTAVYYCAAGYPFRDYHYYWGQGTQVTVSS

SEQ ID NO: 6928 - protein, 118 aa, Artificial Sequence
  Chemically Synthesized
QVQLQESGGGLVQAGGSLRLSCAASGYIFDAYWMGWYRQAPGKERELVAAISRGTNTNYADSVKGRFTISRDNAKNTVYLQMNSLKPEDTAVYYCAVYVERPNLLGYWGQGTQVTVSS

SEQ ID NO: 6929 - protein, 126 aa, Artificial Sequence
  Chemically Synthesized
QVQLQESGGGLVQAGGSLRLSCAASGSIPTYQPMGWYRQAPGKERELVAAIALGGITYYADSVKGRFTISRDNAKNTVYLQMNSLKPEDTAVYYCAVLLDDPSAVPGGGQSLFLYWGQGTQVTVSS

SEQ ID NO: 6930 - protein, 118 aa, Artificial Sequence
  Chemically Synthesized
QVQLQESGGGLVQAGGSLRLSCAASGYISAESYMGWYRQAPGKEREFVAGITDGGNTYYADSVKGRFTISRDNAKNTVYLQMNSLKPEDTAVYYCAAYVGASPAHTYWGQGTQVTVSS

SEQ ID NO: 6931 - protein, 122 aa, Artificial Sequence
  Chemically Synthesized
QVQLQESGGGLVQAGGSLRLSCAASGTISDYQGMGWYRQAPGKEREFVAAIGRGSITYYADSVKGRFTISRDNAKNTVYLQMNSLKPEDTAVYYCAARNYWDYDYGHTLIYWGQGTQVTVSS

SEQ ID NO: 6932 - protein, 118 aa, Artificial Sequence
  Chemically Synthesized
QVQLQESGGGLVQAGGSLRLSCAASGTISGGSGMGWYRQAPGKERELVAGIGVGTSTYYADSVKGRFTISRDNAKNTVYLQMNSLKPEDTAVYYCAVYNRYLQYLYYWGQGTQVTVSS

SEQ ID NO: 6933 - protein, 126 aa, Artificial Sequence
  Chemically Synthesized
QVQLQESGGGLVQAGGSLRLSCAASGSISYVVVMGWYRQAPGKERELVAAIAHGASTNYADSVKGRFTISRDNAKNTVYLQMNSLKPEDTAVYYCAAGTRYLSDVRFYGKGLFPYWGQGTQVTVSS

SEQ ID NO: 6934 - protein, 122 aa, Artificial Sequence
  Chemically Synthesized
QVQLQESGGGLVQAGGSLRLSCAASGSIFWLSAMGWYRQAPGKERELVATIGSGTTTNYADSVKGRFTISRDNAKNTVYLQMNSLKPEDTAVYYCAVSRNRPYYPGQFYYYWGQGTQVTVSS

SEQ ID NO: 6935 - protein, 118 aa, Artificial Sequence
  Chemically Synthesized
QVQLQESGGGLVQAGGSLRLSCAASGSISFVAAMGWYRQAPGKERELVASIGHGGNTYYADSVKGRFTISRDNAKNTVYLQMNSLKPEDTAVYYCAVVDYTTQSYRYWGQGTQVTVSS

SEQ ID NO: 6936 - protein, 125 aa, Artificial Sequence
  Chemically Synthesized
QVQLQESGGGLVQAGGSLRLSCAASGNISVCWMGWYRQAPGKEREFVAGIDAGTTTYYADSVKGRFTISRDNAKNTVYLQMNSLKPEDTAVYYCAVIGSEVRVLYWTQTGPHAYWGQGTQVTVSS

SEQ ID NO: 6937 - protein, 122 aa, Artificial Sequence
  Chemically Synthesized
QVQLQESGGGLVQAGGSLRLSCAASGYISGGDYMGWYRQAPGKEREFVASISAGSSTYYADSVKGRFTISRDNAKNTVYLQMNSLKPEDTAVYYCAAPYRYAGPRGRALVYWGQGTQVTVSS

SEQ ID NO: 6938 - protein, 122 aa, Artificial Sequence
  Chemically Synthesized
QVQLQESGGGLVQAGGSLRLSCAASGTISHPTNMGWYRQAPGKERELVAAIALGATTNYADSVKGRFTISRDNAKNTVYLQMNSLKPEDTAVYYCAADPGSRPYGDAYYNYWGQGTQVTVSS

SEQ ID NO: 6939 - protein, 126 aa, Artificial Sequence
  Chemically Synthesized
QVQLQESGGGLVQAGGSLRLSCAASGSISYSLYMGWYRQAPGKEREFVAAIDRGGNTNYADSVKGRFTISRDNAKNTVYLQMNSLKPEDTAVYYCAVSLLFLGYINYRPGRAYNYWGQGTQVTVSS

SEQ ID NO: 6940 - protein, 120 aa, Artificial Sequence
  Chemically Synthesized
QVQLQESGGGLVQAGGSLRLSCAASGSIFPYDVMGWYRQAPGKEREFVASIADGSNTNYADSVKGRFTISRDNAKNTVYLQMNSLKPEDTAVYYCAATRDDSVNATYVYWGQGTQVTVSS

SEQ ID NO: 6941 - protein, 123 aa, Artificial Sequence
  Chemically Synthesized
QVQLQESGGGLVQAGGSLRLSCAASGNIFQIYYMGWYRQAPGKERELVATISPGASTYYADSVKGRFTISRDNAKNTVYLQMNSLKPEDTAVYYCAVYPYGSGTVYISPFGYWGQGTQVTVSS

SEQ ID NO: 6942 - protein, 122 aa, Artificial Sequence
  Chemically Synthesized
QVQLQESGGGLVQAGGSLRLSCAASGNISDYEYMGWYRQAPGKEREFVASITQGSNTYYADSVKGRFTISRDNAKNTVYLQMNSLKPEDTAVYYCAVGYFEYYPGVDYFFYWGQGTQVTVSS

SEQ ID NO: 6943 - protein, 118 aa, Artificial Sequence
  Chemically Synthesized
QVQLQESGGGLVQAGGSLRLSCAASGNISDDYVMGWYRQAPGKERELVATINTGTTTNYADSVKGRFTISRDNAKNTVYLQMNSLKPEDTAVYYCAVAYFTDRAHAYWGQGTQVTVSS

SEQ ID NO: 6944 - protein, 120 aa, Artificial Sequence
  Chemically Synthesized
QVQLQESGGGLVQAGGSLRLSCAASGTIFDTSRMGWYRQAPGKERELVAAIAYGTNTYYADSVKGRFTISRDNAKNTVYLQMNSLKPEDTAVYYCAAYPSWLLRGLLAYWGQGTQVTVSS

SEQ ID NO: 6945 - protein, 126 aa, Artificial Sequence
  Chemically Synthesized
QVQLQESGGGLVQAGGSLRLSCAASGNIFQVYNMGWYRQAPGKEREFVATINYGATTYYADSVKGRFTISRDNAKNTVYLQMNSLKPEDTAVYYCAVYVLGPGVGYTRYVYWLFYWGQGTQVTVSS

SEQ ID NO: 6946 - protein, 126 aa, Artificial Sequence
  Chemically Synthesized
QVQLQESGGGLVQAGGSLRLSCAASGNIFEAAFMGWYRQAPGKERELVATIGEGTSTNYADSVKGRFTISRDNAKNTVYLQMNSLKPEDTAVYYCAADYLAQDGGVSYVYPTLLYWGQGTQVTVSS

SEQ ID NO: 6947 - protein, 118 aa, Artificial Sequence
  Chemically Synthesized
QVQLQESGGGLVQAGGSLRLSCAASGYISHITRMGWYRQAPGKERELVATISFGTITNYADSVKGRFTISRDNAKNTVYLQMNSLKPEDTAVYYCAAKDRWRKYFTYWGQGTQVTVSS

SEQ ID NO: 6948 - protein, 126 aa, Artificial Sequence
  Chemically Synthesized
QVQLQESGGGLVQAGGSLRLSCAASGTISSDDAMGWYRQAPGKERELVAAITHGSSTYYADSVKGRFTISRDNAKNTVYLQMNSLKPEDTAVYYCAALFGYPTQTGAEPGHDHDYWGQGTQVTVSS

SEQ ID NO: 6949 - protein, 122 aa, Artificial Sequence
  Chemically Synthesized
QVQLQESGGGLVQAGGSLRLSCAASGYIFRYQVMGWYRQAPGKERELVAAINHGSTTNYADSVKGRFTISRDNAKNTVYLQMNSLKPEDTAVYYCAADRYSIDVYYLPHDYWGQGTQVTVSS

SEQ ID NO: 6950 - protein, 122 aa, Artificial Sequence
  Chemically Synthesized
QVQLQESGGGLVQAGGSLRLSCAASGTIFYWPRMGWYRQAPGKERELVAAIASGGNTYYADSVKGRFTISRDNAKNTVYLQMNSLKPEDTAVYYCAAKRVKEYATRASFRYWGQGTQVTVSS

SEQ ID NO: 6951 - protein, 126 aa, Artificial Sequence
  Chemically Synthesized
QVQLQESGGGLVQAGGSLRLSCAASGYISYRPVMGWYRQAPGKEREFVAGITWGATTNYADSVKGRFTISRDNAKNTVYLQMNSLKPEDTAVYYCAVRRYRGFDYSGYHYLRLYYWGQGTQVTVSS

SEQ ID NO: 6952 - protein, 122 aa, Artificial Sequence
  Chemically Synthesized
QVQLQESGGGLVQAGGSLRLSCAASGTISAYAYMGWYRQAPGKEREFVAGIDSGGTTYYADSVKGRFTISRDNAKNTVYLQMNSLKPEDTAVYYCAVSDSNGAGYEPRHRYWGQGTQVTVSS

SEQ ID NO: 6953 - protein, 125 aa, Artificial Sequence
  Chemically Synthesized
QVQLQESGGGLVQAGGSLRLSCAASGSISFDVMGWYRQAPGKEREFVAGINTGGNTYYADSVKGRFTISRDNAKNTVYLQMNSLKPEDTAVYYCAARYYYYLFRQTAWRRSHGYWGQGTQVTVSS

SEQ ID NO: 6954 - protein, 121 aa, Artificial Sequence
  Chemically Synthesized
QVQLQESGGGLVQAGGSLRLSCAASGTISYVSMGWYRQAPGKERELVAAITVGAITNYADSVKGRFTISRDNAKNTVYLQMNSLKPEDTAVYYCAVNQGSNLRFYSTFGYWGQGTQVTVSS

SEQ ID NO: 6955 - protein, 122 aa, Artificial Sequence
  Chemically Synthesized
QVQLQESGGGLVQAGGSLRLSCAASGTIFDPDVMGWYRQAPGKERELVAAISRGGNTNYADSVKGRFTISRDNAKNTVYLQMNSLKPEDTAVYYCAVYPTSDQELSVYYNYWGQGTQVTVSS

SEQ ID NO: 6956 - protein, 122 aa, Artificial Sequence
  Chemically Synthesized
QVQLQESGGGLVQAGGSLRLSCAASGTISLQAVMGWYRQAPGKERELVAAITWGATTNYADSVKGRFTISRDNAKNTVYLQMNSLKPEDTAVYYCAAGRWYSDYIPYDHNYWGQGTQVTVSS

SEQ ID NO: 6957 - protein, 118 aa, Artificial Sequence
  Chemically Synthesized
QVQLQESGGGLVQAGGSLRLSCAASGTIFYYYRMGWYRQAPGKEREFVASISSGTSTNYADSVKGRFTISRDNAKNTVYLQMNSLKPEDTAVYYCAVTPWALVKYHYWGQGTQVTVSS

SEQ ID NO: 6958 - protein, 120 aa, Artificial Sequence
  Chemically Synthesized
QVQLQESGGGLVQAGGSLRLSCAASGYISRVPAMGWYRQAPGKERELLPLLLTVLVPYADSVKGRFTISRDNAKNTVYLQMNSLKPEDTAVYYCALRTLFLRYFFLLAYWGQGTQVTVSS

SEQ ID NO: 6959 - protein, 126 aa, Artificial Sequence
  Chemically Synthesized
QVQLQESGGGLVQAGGSLRLSCAASGTISTTYYMGWYRQAPGKEREFVAAISTGTNTYYADSVKGRFTISRDNAKNTVYLQMNSLKPEDTAVYYCAVYAWYTLTIYTNARYDHVYWGQGTQVTVSS

SEQ ID NO: 6960 - protein, 118 aa, Artificial Sequence
  Chemically Synthesized
QVQLQESGGGLVQAGGSLRLSCAASGNIFPNGDMGWYRQAPGKEREFVAGINYGSSTYYADSVKGRFTISRDNAKNTVYLQMNSLKPEDTAVYYCAADHADDDDFVYWGQGTQVTVSS

SEQ ID NO: 6961 - protein, 122 aa, Artificial Sequence
  Chemically Synthesized
QVQLQESGGGLVQAGGSLRLSCAASGNIFATYYMGWYRQAPGKEREFVATIDYGTSTYYADSVKGRFTISRDNAKNTVYLQMNSLKPEDTAVYYCAAGDAGDWTVDGYHPYWGQGTQVTVSS

SEQ ID NO: 6962 - protein, 118 aa, Artificial Sequence
  Chemically Synthesized
QVQLQESGGGLVQAGGSLRLSCAASGYIFFTYVMGWYRQAPGKERELVAAISAGTSTNYADSVKGRFTISRDNAKNTVYLQMNSLKPEDTAVYYCAAWYEYFYYFKYWGQGTQVTVSS

SEQ ID NO: 6963 - protein, 118 aa, Artificial Sequence
  Chemically Synthesized
QVQLQESGGGLVQAGGSLRLSCAASGNIFPHAVMGWYRQAPGKEREFVAAIAGGSSTYYADSVKGRFTISRDNAKNTVYLQMNSLKPEDTAVYYCAARDYYYRLFRYWGQGTQVTVSS

SEQ ID NO: 6964 - protein, 126 aa, Artificial Sequence
  Chemically Synthesized
QVQLQESGGGLVQAGGSLRLSCAASGSISGYKVMGWYRQAPGKERELVAGIGYGANTNYADSVKGRFTISRDNAKNTVYLQMNSLKPEDTAVYYCAVAAVIHTYVYRDGDDKFPYWGQGTQVTVSS

SEQ ID NO: 6965 - protein, 122 aa, Artificial Sequence
  Chemically Synthesized
QVQLQESGGGLVQAGGSLRLSCAASGTISAYYVMGWYRQAPGKERELVASIANGSSTNYADSVKGRFTISRDNAKNTVYLQMNSLKPEDTAVYYCAAWRQATRDSFDGHGYWGQGTQVTVSS

SEQ ID NO: 6966 - protein, 115 aa, Artificial Sequence
  Chemically Synthesized
QVQLQESGGGLVQAGGSLRLSCAASGTIFPMGWYRQAPGKEREFVATITEGGSTYYADSVKGRFTISRDNAKNTVYLQMNSLKPEDTAVYYCAVYGYTYGHLYYWGQGTQVTVSS

SEQ ID NO: 6967 - protein, 126 aa, Artificial Sequence
  Chemically Synthesized
QVQLQESGGGLVQAGGSLRLSCAASGSIFDYIGMGWYRQAPGKERELVAAIDQGATTNYADSVKGRFTISRDNAKNTVYLQMNSLKPEDTAVYYCAVQYDSRSVDDSTYSSTHGYWGQGTQVTVSS

SEQ ID NO: 6968 - protein, 117 aa, Artificial Sequence
  Chemically Synthesized
QVQLQESGGGLVQAGGSLRLSCAASGTISWLRDMGWYRQAPGKEREFVATIDDGSITNYADSVKGRFTISRDNAKNTVYLQMNSLKPEDTAVYYCAVDSLLTLLMYWGQGTQVTVSS

SEQ ID NO: 6969 - protein, 121 aa, Artificial Sequence
  Chemically Synthesized
QVQLQESGGGLVQAGGSLRLSCAASGYIFPLANMGWYRQAPGKERELVASIAGGTTNYADSVKGRFTISRDNAKNTVYLQMNSLKPEDTAVYYCAVRGWYDYDYYEWYQYWGQGTQVTVSS

SEQ ID NO: 6970 - protein, 118 aa, Artificial Sequence
  Chemically Synthesized
QVQLQESGGGLVQAGGSLRLSCAASGSIFDTLFMGWYRQAPGKEREFVASIAGGTITNYADSVKGRFTISRDNAKNTVYLQMNSLKPEDTAVYYCAVIWVDGARLYYWGQGTQVTVSS

SEQ ID NO: 6971 - protein, 118 aa, Artificial Sequence
  Chemically Synthesized
QVQLQESGGGLVQAGGSLRLSCAASGNISDRATMGWYRQAPGKEREFVASITTGGSTYYADSVKGRFTISRDNAKNTVYLQMNSLKPEDTAVYYCAAGTWYDTYFDYWGQGTQVTVSS

SEQ ID NO: 6972 - protein, 121 aa, Artificial Sequence
  Chemically Synthesized
QVQLQESGGGLVQAGGSLRLSCAASGYIFKISMGWYRQAPGKEREFVAGIARGTITYYADSVKGRFTISRDNAKNTVYLQMNSLKPEDTAVYYCAADVASYRLKWTYYSYWGQGTQVTVSS

SEQ ID NO: 6973 - protein, 118 aa, Artificial Sequence
  Chemically Synthesized
QVQLQESGGGLVQAGGSLRLSCAASGYIFGGPRMGWYRQAPGKEREFVATIGRGGNTYYADSVKGRFTISRDNAKNTVYLQMNSLKPEDTAVYYCAVGGIWSRTHGYWGQGTQVTVSS

SEQ ID NO: 6974 - protein, 118 aa, Artificial Sequence
  Chemically Synthesized
QVQLQESGGGLVQAGGSLRLSCAASGNIFPTRYMGWYRQAPGKEREFVASIGRGTNTYYADSVKGRFTISRDNAKNTVYLQMNSLKPEDTAVYYCAVQRTWRGRLYYWGQGTQVTVSS

SEQ ID NO: 6975 - protein, 118 aa, Artificial Sequence
  Chemically Synthesized
QVQLQESGGGLVQAGGSLRLSCAASGSIFYGATMGWYRQAPGKERELVAAIGTGSNTYYADSVKGRFTISRDNAKNTVYLQMNSLKPEDTAVYYCAVLTPYERYHAYWGQGTQVTVSS

SEQ ID NO: 6976 - protein, 122 aa, Artificial Sequence
  Chemically Synthesized
QVQLQESGGGLVQAGGSLRLSCAASGYISDADFMGWYRQAPGKERELVAAISYGTNTYYADSVKGRFTISRDNAKNTVYLQMNSLKPEDTAVYYCAAVHIRAYVYTSLHGYWGQGTQVTVSS

SEQ ID NO: 6977 - protein, 122 aa, Artificial Sequence
  Chemically Synthesized
QVQLQESGGGLVQAGGSLRLSCAASGNIFTEVRMGWYRQAPGKERELVATIGTGGITYYADSVKGRFTISRDNAKNTVYLQMNSLKPEDTAVYYCAVNVSLWLVPYVDLDYWGQGTQVTVSS

SEQ ID NO: 6978 - protein, 118 aa, Artificial Sequence
  Chemically Synthesized
QVQLQESGGGLVQAGGSLRLSCAASGNIFTNYEMGWYRQAPGKERELVAGITSGGITYYADSVKGRFTISRDNAKNTVYLQMNSLKPEDTAVYYCAARYGEAVYYPYWGQGTQVTVSS

SEQ ID NO: 6979 - protein, 126 aa, Artificial Sequence
  Chemically Synthesized
QVQLQESGGGLVQAGGSLRLSCAASGSISAIAYMGWYRQAPGKEREFVATISTGTTTYYADSVKGRFTISRDNAKNTVYLQMNSLKPEDTAVYYCAATRLFYQRYSGYFYRRYGYWGQGTQVTVSS

SEQ ID NO: 6980 - protein, 126 aa, Artificial Sequence
  Chemically Synthesized
QVQLQESGGGLVQAGGSLRLSCAASGYISYGTAMGWYRQAPGKERELVAAISDGSITNYADSVKGRFTISRDNAKNTVYLQMNSLKPEDTAVYYCAAWSTGVARLKYFKVDDHDYWGQGTQVTVSS

SEQ ID NO: 6981 - protein, 124 aa, Artificial Sequence
  Chemically Synthesized
QVQLQESGGGLVQAGGSLRLSCAASGTISDRYRMGWYRQAPGKEREAGIGTGGNTNYADSVKGRFTISRDNAKNTVYLQMNSLKPEDTAVYYCAAIPIYYYASNSDTQTPFGYWGQGTQVTVSS

SEQ ID NO: 6982 - protein, 118 aa, Artificial Sequence
  Chemically Synthesized
QVQLQESGGGLVQAGGSLRLSCAASGYISHDGSMGWYRQAPGKEREFVATIGDGSITYYADSVKGRFTISRDNAKNTVYLQMNSLKPEDTAVYYCAATVGYYSDYEYWGQGTQVTVSS

SEQ ID NO: 6983 - protein, 122 aa, Artificial Sequence
  Chemically Synthesized
QVQLQESGGGLVQAGGSLRLSCAASGTIFAHYWMGWYRQAPGKERELVATIGEGTITNYADSVKGRFTISRDNAKNTVYLQMNSLKPEDTAVYYCAVGWNKREFHEVTFYYWGQGTQVTVSS

SEQ ID NO: 6984 - protein, 122 aa, Artificial Sequence
  Chemically Synthesized
QVQLQESGGGLVQAGGSLRLSCAASGYIFYPVYMGWYRQAPGKERELVAGIGYGSSTYYADSVKGRFTISRDNAKNTVYLQMNSLKPEDTAVYYCAAQYAYSPTPQGSHGYWGQGTQVTVSS

SEQ ID NO: 6985 - protein, 118 aa, Artificial Sequence
  Chemically Synthesized
QVQLQESGGGLVQAGGSLRLSCAASGYIFWGYSMGWYRQAPGKEREFVAGIALGSTTYYADSVKGRFTISRDNAKNTVYLQMNSLKPEDTAVYYCAAIISVTRRYYYWGQGTQVTVSS

SEQ ID NO: 6986 - protein, 126 aa, Artificial Sequence
  Chemically Synthesized
QVQLQESGGGLVQAGGSLRLSCAASGTIFREGSMGWYRQAPGKERELVASIGYGTTTNYADSVKGRFTISRDNAKNTVYLQMNSLKPEDTAVYYCAAYWLPTRTSSLIRFYAFDYWGQGTQVTVSS

SEQ ID NO: 6987 - protein, 118 aa, Artificial Sequence
  Chemically Synthesized
QVQLQESGGGLVQAGGSLRLSCAASGNIFWYSQMGWYRQAPGKEREFVATITHGATTNYADSVKGRFTISRDNAKNTVYLQMNSLKPEDTAVYYCAVVRYSPPVYGYWGQGTQVTVSS

SEQ ID NO: 6988 - protein, 118 aa, Artificial Sequence
  Chemically Synthesized
QVQLQESGGGLVQAGGSLRLSCAASGYIFYLALMGWYRQAPGKERELVAAIANGGITNYADSVKGRFTISRDNAKNTVYLQMNSLKPEDTAVYYCAVQYNAPSELTYWGQGTQVTVSS

SEQ ID NO: 6989 - protein, 122 aa, Artificial Sequence
  Chemically Synthesized
QVQLQESGGGLVQAGGSLRLSCAASGTIFPSAYMGWYRQAPGKEREFVAGITRGAITNYADSVKGRFTISRDNAKNTVYLQMNSLKPEDTAVYYCAVPYWWGFWLPYDFGYWGQGTQVTVSS

SEQ ID NO: 6990 - protein, 122 aa, Artificial Sequence
  Chemically Synthesized
QVQLQESGGGLVQAGGSLRLSCAASGSIFDNRAMGWYRQAPGKEREFVATIGTGTSTNYADSVKGRFTISRDNAKNTVYLQMNSLKPEDTAVYYCAAHYGTPEPYVYVLTYWGQGTQVTVSS

SEQ ID NO: 6991 - protein, 118 aa, Artificial Sequence
  Chemically Synthesized
QVQLQESGGGLVQAGGSLRLSCAASGTIFRSTTMGWYRQAPGKEREFVAGISRGGTTYYADSVKGRFTISRDNAKNTVYLQMNSLKPEDTAVYYCAAKTLWNWGYGYWGQGTQVTVSS

SEQ ID NO: 6992 - protein, 118 aa, Artificial Sequence
  Chemically Synthesized
QVQLQESGGGLVQAGGSLRLSCAASGYISLRDYMGWYRQAPGKERELVAAINQGGNTNYADSVKGRFTISRDNAKNTVYLQMNSLKPEDTAVYYCAVRKRYGDYYKYWGQGTQVTVSS

SEQ ID NO: 6993 - protein, 118 aa, Artificial Sequence
  Chemically Synthesized
QVQLQESGGGLVQAGGSLRLSCAASGYISQLVYMGWYRQAPGKEREFVATIGVGTITNYADSVKGRFTISRDNAKNTVYLQMNSLKPEDTAVYYCAVYYASIAYYQYWGQGTQVTVSS

SEQ ID NO: 6994 - protein, 116 aa, Artificial Sequence
  Chemically Synthesized
QVQLQESGGGLVQAGGSLRLSCAASGTISYLGHMGWYRQAPGKERELVAGINTGTITYYADSVKGRFTISRDNAKNTVYLQMNSLKPEDTAVYYCAATVGGDFSYWGQGTQVTVSS

SEQ ID NO: 6995 - protein, 122 aa, Artificial Sequence
  Chemically Synthesized
QVQLQESGGGLVQAGGSLRLSCAASGTIFYNSKMGWYRQAPGKERELVAAITIGGITYYADSVKGRFTISRDNAKNTVYLQMNSLKPEDTAVYYCAVARVGIPRVVSNLSYWGQGTQVTVSS

SEQ ID NO: 6996 - protein, 122 aa, Artificial Sequence
  Chemically Synthesized
QVQLQESGGGLVQAGGSLRLSCAASGTISYLSYMGWYRQAPGKEREFVASISQGGITNYADSVKGRFTISRDNAKNTVYLQMNSLKPEDTAVYYCAVASAYTDGDDYVHVYWGQGTQVTVSS

SEQ ID NO: 6997 - protein, 125 aa, Artificial Sequence
  Chemically Synthesized
QVQLQESGGGLVQAGGSLRLSCAASGNIFVWASMGWYRQAPGKEREFVAAISPGTSTNYADSVKGRFTISRDNAKNTVYLQMNSLKPEDTAVYYCAAGYTVDEAYLYQTYVYYYWGQGTQVTVSS

SEQ ID NO: 6998 - protein, 118 aa, Artificial Sequence
  Chemically Synthesized
QVQLQESGGGLVQAGGSLRLSCAASGTIFRRATMGWYRQAPGKEREFVAAIANGSNTYYADSVKGRFTISRDNAKNTVYLQMNSLKPEDTAVYYCAAIRTYSRWHYYWGQGTQVTVSS

SEQ ID NO: 6999 - protein, 117 aa, Artificial Sequence
  Chemically Synthesized
QVQLQESGGGLVQAGGSLRLSCAASGSISGDKDMGWYRQAPGKEREFVAGIAAGATTYYADSVKGRFTISRDNAKNTVYLQMNSLKPEDTAVYYCAVYSTFTRTLYWGQGTQVTVSS

SEQ ID NO: 7000 - protein, 122 aa, Artificial Sequence
  Chemically Synthesized
QVQLQESGGGLVQAGGSLRLSCAASGSIFNYWFMGWYRQAPGKERELVASIDHGGTTYYADSVKGRFTISRDNAKNTVYLQMNSLKPEDTAVYYCAVTAEYTGRNLNWFWYWGQGTQVTVSS

SEQ ID NO: 7001 - protein, 118 aa, Artificial Sequence
  Chemically Synthesized
QVQLQESGGGLVQAGGSLRLSCAASGTISYPTFMGWYRQAPGKERELVAGITVGAITYYADSVKGRFTISRDNAKNTVYLQMNSLKPEDTAVYYCAVYYTLYYDFEYWGQGTQVTVSS

SEQ ID NO: 7002 - protein, 118 aa, Artificial Sequence
  Chemically Synthesized
QVQLQESGGGLVQAGGSLRLSCAASGSIFPPLGMGWYRQAPGKEREFVASIDLGGITYYADSVKGRFTISRDNAKNTVYLQMNSLKPEDTAVYYCAVAYRQSIYHEYWGQGTQVTVSS

SEQ ID NO: 7003 - protein, 122 aa, Artificial Sequence
  Chemically Synthesized
QVQLQESGGGLVQAGGSLRLSCAASGNISGGFVMGWYRQAPGKEREFVATIALGGNTNYADSVKGRFTISRDNAKNTVYLQMNSLKPEDTAVYYCAVDVGTSALRSAWLTYWGQGTQVTVSS

SEQ ID NO: 7004 - protein, 122 aa, Artificial Sequence
  Chemically Synthesized
QVQLQESGGGLVQAGGSLRLSCAASGYIFQRVKMGWYRQAPGKERELVATIASGATTYYADSVKGRFTISRDNAKNTVYLQMNSLKPEDTAVYYCAVAPYFPYIPFGVYNYWGQGTQVTVSS

SEQ ID NO: 7005 - protein, 118 aa, Artificial Sequence
  Chemically Synthesized
QVQLQESGGGLVQAGGSLRLSCAASGNIFQSRWMGWYRQAPGKEREFVATIADGASTYYADSVKGRFTISRDNAKNTVYLQMNSLKPEDTAVYYCAVRRPTRDVFWYWGQGTQVTVSS

SEQ ID NO: 7006 - protein, 126 aa, Artificial Sequence
  Chemically Synthesized
QVQLQESGGGLVQAGGSLRLSCAASGYIFDNYQMGWYRQAPGKERELVAGIAVGSITYYADSVKGRFTISRDNAKNTVYLQMNSLKPEDTAVYYCAVGPSYEGVGNGDLGPGLGYWGQGTQVTVSS

SEQ ID NO: 7007 - protein, 122 aa, Artificial Sequence
  Chemically Synthesized
QVQLQESGGGLVQAGGSLRLSCAASGSISLTAIMGWYRQAPGKERELVAGISYGGSTNYADSVKGRFTISRDNAKNTVYLQMNSLKPEDTAVYYCAVSTTHFIIYWWSYVYWGQGTQVTVSS

SEQ ID NO: 7008 - protein, 118 aa, Artificial Sequence
  Chemically Synthesized
QVQLQESGGGLVQAGGSLRLSCAASGNISEDYSMGWYRQAPGKEREFVATISTGGITNYADSVKGRFTISRDNAKNTVYLQMNSLKPEDTAVYYCAVYYHVIFYYNYWGQGTQVTVSS

SEQ ID NO: 7009 - protein, 118 aa, Artificial Sequence
  Chemically Synthesized
QVQLQESGGGLVQAGGSLRLSCAASGYISRAGDMGWYRQAPGKEREFVAGISFGGTTYYADSVKGRFTISRDNAKNTVYLQMNSLKPEDTAVYYCAVYPGGELSFVYWGQGTQVTVSS

SEQ ID NO: 7010 - protein, 116 aa, Artificial Sequence
  Chemically Synthesized
QVQLQESGGGLVQAGGSLRLSCAASGSISSPDSMGWYRQAPGKERELVASINGGASTNYADSVKGRFTISRDNAKNTVYLQMNSLKPEDTAVYYCAHEAWRDLYYWGQGTQVTVSS

SEQ ID NO: 7011 - protein, 122 aa, Artificial Sequence
  Chemically Synthesized
QVQLQESGGGLVQAGGSLRLSCAASGYIFDHYYMGWYRQAPGKEREFVASIAIGSITNYADSVKGRFTISRDNAKNTVYLQMNSLKPEDTAVYYCAVGHWYILLYFSDHSYWGQGTQVTVSS

SEQ ID NO: 7012 - protein, 118 aa, Artificial Sequence
  Chemically Synthesized
QVQLQESGGGLVQAGGSLRLSCAASGYISGFGAMGWYRQAPGKEREFVAAITSGSITNYADSVKGRFTISRDNAKNTVYLQMNSLKPEDTAVYYCAAYYHAYVYYLYWGQGTQVTVSS

SEQ ID NO: 7013 - protein, 118 aa, Artificial Sequence
  Chemically Synthesized
QVQLQESGGGLVQAGGSLRLSCAASGNISRARSMGWYRQAPGKEREFVASIGFGTITYYADSVKGRFTISRDNAKNTVYLQMNSLKPEDTAVYYCAVRTRGWRNYWYWGQGTQVTVSS

SEQ ID NO: 7014 - protein, 126 aa, Artificial Sequence
  Chemically Synthesized
QVQLQESGGGLVQAGGSLRLSCAASGTISLGGIMGWYRQAPGKEREFVAGIGRGGSTYYADSVKGRFTISRDNAKNTVYLQMNSLKPEDTAVYYCAVARVAGDYTDVPGGVPLLYWGQGTQVTVSS

SEQ ID NO: 7015 - protein, 118 aa, Artificial Sequence
  Chemically Synthesized
QVQLQESGGGLVQAGGSLRLSCAASGNIFRYVAMGWYRQAPGKERELVAGITPGGSTNYADSVKGRFTISRDNAKNTVYLQMNSLKPEDTAVYYCAARPKLPWVLRYWGQGTQVTVSS

SEQ ID NO: 7016 - protein, 118 aa, Artificial Sequence
  Chemically Synthesized
QVQLQESGGGLVQAGGSLRLSCAASGSISSSNDMGWYRQAPGKERELVASIAYGTITYYADSVKGRFTISRDNAKNTVYLQMNSLKPEDTAVYYCAAEYAGTETYIYWGQGTQVTVSS

SEQ ID NO: 7017 - protein, 117 aa, Artificial Sequence
  Chemically Synthesized
QVQLQESGGGLVQAGGSLRLSCAASGTISYKAYMGWYRQAPGKERELVATIADGSSTYYADSVKGRFTISRDNAKNTVYLQMNSLKPEDTAVYYCAVLATVYYSMYWGQGTQVTVSS

SEQ ID NO: 7018 - protein, 122 aa, Artificial Sequence
  Chemically Synthesized
QVQLQESGGGLVQAGGSLRLSCAASGTISYGDYMGWYRQAPGKERELVASITVGANTYYADSVKGRFTISRDNAKNTVYLQMNSLKPEDTAVYYCAVDDDLFGVGSYRHDYWGQGTQVTVSS

SEQ ID NO: 7019 - protein, 118 aa, Artificial Sequence
  Chemically Synthesized
QVQLQESGGGLVQAGGSLRLSCAASGTIFTLIYMGWYRQAPGKEREFVAAIADGSTTYYADSVKGRFTISRDNAKNTVYLQMNSLKPEDTAVYYCAVRTTVGKVHYYWGQGTQVTVSS

SEQ ID NO: 7020 - protein, 118 aa, Artificial Sequence
  Chemically Synthesized
QVQLQESGGGLVQAGGSLRLSCAASGTISYWGRMGWYRQAPGKERELVATIAPGTNTYYADSVKGRFTISRDNAKNTVYLQMNSLKPEDTAVYYCAVSSSNSTSYSYWGQGTQVTVSS

SEQ ID NO: 7021 - protein, 129 aa, Artificial Sequence
  Chemically Synthesized
QVQLQESGGGLVQAGGSLRLSCAASGTISGPPAMGWYRQAPGKEREFVAGITLGSSTYYADSVKGRFTISRDNAKNTVYLQMNSLKPEDTAVYYCAAPPFYHVQAWSRATTDGYGGYYWGQGTQVTVSS

SEQ ID NO: 7022 - protein, 122 aa, Artificial Sequence
  Chemically Synthesized
QVQLQESGGGLVQAGGSLRLSCAASGNIFDDAQMGWYRQAPGKERELVASIDSGGNTNYADSVKGRFTISRDNAKNTVYLQMNSLKPEDTAVYYCAVYPHPYSKYYHSHTYWGQGTQVTVSS

SEQ ID NO: 7023 - protein, 118 aa, Artificial Sequence
  Chemically Synthesized
QVQLQESGGGLVQAGGSLRLSCAASGNISDWVYMGWYRQAPGKERELVATITLGAITNYADSVKGRFTISRDNAKNTVYLQMNSLKPEDTAVYYCAVLSSRSRNHVYWGQGTQVTVSS

SEQ ID NO: 7024 - protein, 118 aa, Artificial Sequence
  Chemically Synthesized
QVQLQESGGGLVQAGGSLRLSCAASGTIFVSYDMGWYRQAPGKERELVAGIDHGTITYYADSVKGRFTISRDNAKNTVYLQMNSLKPEDTAVYYCAVLSDYDYRYTYWGQGTQVTVSS

SEQ ID NO: 7025 - protein, 126 aa, Artificial Sequence
  Chemically Synthesized
QVQLQESGGGLVQAGGSLRLSCAASGNIFVIIRMGWYRQAPGKERELVAGIGYGGNTYYADSVKGRFTISRDNAKNTVYLQMNSLKPEDTAVYYCAAGRRAASNAGYDSARYYRYWGQGTQVTVSS

SEQ ID NO: 7026 - protein, 121 aa, Artificial Sequence
  Chemically Synthesized
QVQLQESGGGLVQAGGSLRLSCAASGTIFARYMGWYRQAPGKEREFVAGISAGATTNYADSVKGRFTISRDNAKNTVYLQMNSLKPEDTAVYYCAAYQPRDYPQSSGLYYWGQGTQVTVSS

SEQ ID NO: 7027 - protein, 121 aa, Artificial Sequence
  Chemically Synthesized
QVQLQESGGGLVQAGGSLRLSCAASGYIFALKDMGWYRQAPGKERELVASIAAGATTNYADSVKGRFTISRDNAKNTVYLQMNSLKPEDTAVYYCAAWTGYYLTGSTTLYWGQGTQVTVSS

SEQ ID NO: 7028 - protein, 122 aa, Artificial Sequence
  Chemically Synthesized
QVQLQESGGGLVQAGGSLRLSCAASGYISLVYGMGWYRQAPGKEREFVAAITVGAITNYADSVKGRFTISRDNAKNTVYLQMNSLKPEDTAVYYCAVGVTYPVYKDDSYYYWGQGTQVTVSS

SEQ ID NO: 7029 - protein, 119 aa, Artificial Sequence
  Chemically Synthesized
QVQLQESGGGLVQAGGSLRLSCAASGYISKAYYMGWYRQAPGKEREFVAGINEGGTITNYADSVKGRFTISRDNAKNTVYLQMNSLKPEDTAVYYCAVRQHDDDDHPYWGQGTQVTVSS

SEQ ID NO: 7030 - protein, 119 aa, Artificial Sequence
  Chemically Synthesized
QVQLQESGGGLVQAGGSLRLSCAASGSISAFLYMGWYRQAPGKEREFVASINYGTNTNYADSVKGRFTISRDNAKNTVYLQMNSLKPEDTAVYYCAAGVAVFGDTHAYWGQGTQVTVSS

SEQ ID NO: 7031 - protein, 125 aa, Artificial Sequence
  Chemically Synthesized
QVQLQESGGGLVQAGGSLRLSCAASGTIFPRYYMGWYRQAPGKERELVAAIDYGTITYYADSVKGRFTISRDNAKNTVYLQMNSLKPEDTAVYYCAAGTIRGGERVTSCVTLFYWGQGTQVTVSS

SEQ ID NO: 7032 - protein, 121 aa, Artificial Sequence
  Chemically Synthesized
QVQLQESGGGLVQAGGSLRLSCAASGSIFRPWGMGWYRQAPGKERELVASIDTGANTNYADSVKGRFTISRDNAKNTVYLQMNSLKPEDTAVYYCAADFNPHDIADPLTYWGQGTQVTVSS

SEQ ID NO: 7033 - protein, 122 aa, Artificial Sequence
  Chemically Synthesized
QVQLQESGGGLVQAGGSLRLSCAASGYISLALDMGWYRQAPGKERELVATISAGATTYYADSVKGRFTISRDNAKNTVYLQMNSLKPEDTAVYYCAVYGLGSRYYTASFYYWGQGTQVTVSS

SEQ ID NO: 7034 - protein, 122 aa, Artificial Sequence
  Chemically Synthesized
QVQLQESGGGLVQAGGSLRLSCAASGTISYGRKMGWYRQAPGKEREFVAGISSGTSTYYADSVKGRFTISRDNAKNTVYLQMNSLKPEDTAVYYCAVISAVLYRTNQYLVYWGQGTQVTVSS

SEQ ID NO: 7035 - protein, 118 aa, Artificial Sequence
  Chemically Synthesized
QVQLQESGGGLVQAGGSLRLSCAASGSISYFAPMGWYRQAPGKEREFVASIAYGASTYYADSVKGRFTISRDNAKNTVYLQMNSLKPEDTAVYYCAVLDGGGFYFIYWGQGTQVTVSS

SEQ ID NO: 7036 - protein, 114 aa, Artificial Sequence
  Chemically Synthesized
QVQLQESGGGLVQAGGSLRLSCAASGNISISQYMGWYRQAPGKEREFVAAISGGANTNYADSVKGRFTISRDNAKNTVYLQMNSLKPEDTAVYYCADYYRLSYWGQGTQVTVSS

SEQ ID NO: 7037 - protein, 122 aa, Artificial Sequence
  Chemically Synthesized
QVQLQESGGGLVQAGGSLRLSCAASGSISSRLTMGWYRQAPGKEREFVASIDYGTITNYADSVKGRFTISRDNAKNTVYLQMNSLKPEDTAVYYCAALDGSTYYTYQDYIYWGQGTQVTVSS

SEQ ID NO: 7038 - protein, 117 aa, Artificial Sequence
  Chemically Synthesized
QVQLQESGGGLVQAGGSLRLSCAASGTISSPVYMGWYRQAPGKEREFVAGIAGGITYYADSVKGRFTISRDNAKNTVYLQMNSLKPEDTAVYYCAVLPATDDTHDYWGQGTQVTVSS

SEQ ID NO: 7039 - protein, 118 aa, Artificial Sequence
  Chemically Synthesized
QVQLQESGGGLVQAGGSLRLSCAASGTISPYGAMGWYRQAPGKERELVASIGYGASTNYADSVKGRFTISRDNAKNTVYLQMNSLKPEDTAVYYCAALRLPWAYHVYWGQGTQVTVSS

SEQ ID NO: 7040 - protein, 125 aa, Artificial Sequence
  Chemically Synthesized
QVQLQESGGGLVQAGGSLRLSCAASGYISTLSSMGWYRQAPGKEREFVASIDIGTSTYYADSVKGRFTISRDNAKNTVYLQMNSLKPEDTAVYYCAVYDLRLEDIGNSASWHQYWGQGTQVTVSS

SEQ ID NO: 7041 - protein, 119 aa, Artificial Sequence
  Chemically Synthesized
QVQLQESGGGLVQAGGSLRLSCAASGYISLTTSMGWYRQAPGKEREFVAGITDGGNTYYADSVKGRFTISRDNAKNTVYLQMNSLKPEDTAVYYCAVVTPYIRNIFYYWGQGTQVTVSS

SEQ ID NO: 7042 - protein, 122 aa, Artificial Sequence
  Chemically Synthesized
QVQLQESGGGLVQAGGSLRLSCAASGSISIDYYMGWYRQAPGKEREFVASINYGGITYYADSVKGRFTISRDNAKNTVYLQMNSLKPEDTAVYYCAVTYGVKSWDYDPHAYWGQGTQVTVSS

SEQ ID NO: 7043 - protein, 122 aa, Artificial Sequence
  Chemically Synthesized
QVQLQESGGGLVQAGGSLRLSCAASGSISYFTYMGWYRQAPGKEREFVASIGGGGTTNYADSVKGRFTISRDNAKNTVYLQMNSLKPEDTAVYYCAARINIPSYEDPDLRYWGQGTQVTVSS

SEQ ID NO: 7044 - protein, 120 aa, Artificial Sequence
  Chemically Synthesized
QVQLQESGGGLVQAGGSLRLSCAASGYISLQYDMGWYRQAPGKEREFVASISHGSITYYADSVKGRFTISRDNAKNTVYLQMNSLKPEDTAVYYCAVGYYDALPYYYWYWGQGTQVTVSS

SEQ ID NO: 7045 - protein, 117 aa, Artificial Sequence
  Chemically Synthesized
QVQLQESGGGLVQAGGSLRLSCAASGYISYYSMGWYRQAPGKERELVAGITYGGSTYYADSVKGRFTISRDNAKNTVYLQMNSLKPEDTAVYYCAVDGPYEYTFDYWGQGTQVTVSS

SEQ ID NO: 7046 - protein, 118 aa, Artificial Sequence
  Chemically Synthesized
QVQLQESGGGLVQAGGSLRLSCAASGSISAGSLMGWYRQAPGKEREFVAGIGAGASTYYADSVKGRFTISRDNAKNTVYLQMNSLKPEDTAVYYCAAHDIYDADHDYWGQGTQVTVSS

SEQ ID NO: 7047 - protein, 119 aa, Artificial Sequence
  Chemically Synthesized
QVQLQESGGGLVQAGGSLRLSCAASGNIFRLYSRMGWYRQAPGKEREFVASIAYGGSTYYADSVKGRFTISRDNAKNTVYLQMNSLKPEDTAVYYCAVWYAYYGQHWYWGQGTQVTVSS

SEQ ID NO: 7048 - protein, 122 aa, Artificial Sequence
  Chemically Synthesized
QVQLQESGGGLVQAGGSLRLSCAASGSIFWPRSMGWYRQAPGKERELVATITYGSNTYYADSVKGRFTISRDNAKNTVYLQMNSLKPEDTAVYYCAVPRFGLYVPAYRFGYWGQGTQVTVSS

SEQ ID NO: 7049 - protein, 112 aa, Artificial Sequence
  Chemically Synthesized
QVQLQESGGGLVQAGGSLRLSCAASGTMGWYRQAPGKEREFVAGIGIGASTYYADSVKGRFTISRDNAKNTVYLQMNSLKPEDTAVYYCAAYADWDTGHYYWGQGTQVTVSS

SEQ ID NO: 7050 - protein, 118 aa, Artificial Sequence
  Chemically Synthesized
QVQLQESGGGLVQAGGSLRLSCAASGSISTDEIMGWYRQAPGKEREFVASITYGTNTYYADSVKGRFTISRDNAKNTVYLQMNSLKPEDTAVYYCAAVGWAYSSLVYWGQGTQVTVSS

SEQ ID NO: 7051 - protein, 114 aa, Artificial Sequence
  Chemically Synthesized
QVQLQESGGGLVQAGGSLRLSCAASGSIFDVDPMGWYRQAPGKEREFVAAIGYGSSTNYADSVKGRFTISRDNAKNTVYLQMNSLKPEDTAVYYCAVDGPYVYWGQGTQVTVSS

SEQ ID NO: 7052 - protein, 124 aa, Artificial Sequence
  Chemically Synthesized
QVQLQESGGGLVQAGGSLRLSCAASGNISWWVSMGWYRQAPGKEREFVAGIAEGTNTYYADSVKGRFTISRDNAKNTVYLQMNSLKPEDTAVYYCAVLRPIYGYPSSSHVYYYWGQGTQVTVSS

SEQ ID NO: 7053 - protein, 117 aa, Artificial Sequence
  Chemically Synthesized
QVQLQESGGGLVQAGGSLRLSCAASGYISLRYVMGWYRQAPGKEREFVAGIDGTITYYADSVKGRFTISRDNAKNTVYLQMNSLKPEDTAVYYCAAADWPSGGHDYWGQGTQVTVSS

SEQ ID NO: 7054 - protein, 118 aa, Artificial Sequence
  Chemically Synthesized
QVQLQESGGGLVQAGGSLRLSCAASGTIFGQAAMGWYRQAPGKEREFVAGIGSGSNTYYADSVKGRFTISRDNAKNTVYLQMNSLKPEDTAVYYCAVYIVQFSVHRYWGQGTQVTVSS

SEQ ID NO: 7055 - protein, 115 aa, Artificial Sequence
  Chemically Synthesized
QVQLQESGGGLVQAGGSLRLSCAASGTISRKSSMGWYRQAPGKEREFVAGIAQGGTTYYADSVKGRFTISRDNAKNTVYLQMNSLKPEDTAVYYCAVYRYGYGYWGQGTQVTVSS

SEQ ID NO: 7056 - protein, 118 aa, Artificial Sequence
  Chemically Synthesized
QVQLQESGGGLVQAGGSLRLSCAASGTIFQYFYMGWYRQAPGKERELVAGINYGTSTNYADSVKGRFTISRDNAKNTVYLQMNSLKPEDTAVYYCAVITYGGWLHLYWGQGTQVTVSS

SEQ ID NO: 7057 - protein, 118 aa, Artificial Sequence
  Chemically Synthesized
QVQLQESGGGLVQAGGSLRLSCAASGTISPGDPMGWYRQAPGKERELVATITTGATTYYADSVKGRFTISRDNAKNTVYLQMNSLKPEDTAVYYCAASRYVNDTYLYWGQGTQVTVSS

SEQ ID NO: 7058 - protein, 126 aa, Artificial Sequence
  Chemically Synthesized
QVQLQESGGGLVQAGGSLRLSCAASGNISSNYIMGWYRQAPGKEREFVAGIAYGTTTNYADSVKGRFTISRDNAKNTVYLQMNSLKPEDTAVYYCAALYWYHYGDAGYYVDALDYWGQGTQVTVSS

SEQ ID NO: 7059 - protein, 118 aa, Artificial Sequence
  Chemically Synthesized
QVQLQESGGGLVQAGGSLRLSCAASGTISADYLMGWYRQAPGKERELVAGITPGAITYYADSVKGRFTISRDNAKNTVYLQMNSLKPEDTAVYYCAVLYYPSGDLDYWGQGTQVTVSS

SEQ ID NO: 7060 - protein, 110 aa, Artificial Sequence
  Chemically Synthesized
QVQLQESGGGLVQAGGSLRLSCAASGTISHSWPMGWYRQAPGKERELVAAIGTGGITYYADSVKGRFTISRDNAKNTVYLQMNSLKPEDTAVYYCAVSYWGQGTQVTVSS

SEQ ID NO: 7061 - protein, 118 aa, Artificial Sequence
  Chemically Synthesized
QVQLQESGGGLVQAGGSLRLSCAASGTIFGGGYMGWYRQAPGKERELVASIGRGTITYYADSVKGRFTISRDNAKNTVYLQMNSLKPEDTAVYYCAVRAYYWAYHAYWGQGTQVTVSS

SEQ ID NO: 7062 - protein, 118 aa, Artificial Sequence
  Chemically Synthesized
QVQLQESGGGLVQAGGSLRLSCAASGTIFGDHIMGWYRQAPGKEREFVAGIDSGGTTYYADSVKGRFTISRDNAKNTVYLQMNSLKPEDTAVYYCAAVGFPDDTYDYWGQGTQVTVSS

SEQ ID NO: 7063 - protein, 118 aa, Artificial Sequence
  Chemically Synthesized
QVQLQESGGGLVQAGGSLRLSCAASGSISYSDYMGWYRQAPGKEREFVAGIGQGSTTYYADSVKGRFTISRDNAKNTVYLQMNSLKPEDTAVYYCAVVSFPTPYLTYWGQGTQVTVSS

SEQ ID NO: 7064 - protein, 122 aa, Artificial Sequence
  Chemically Synthesized
QVQLQESGGGLVQAGGSLRLSCAASGTISQRVGMGWYRQAPGKEREFVAGINSGTTTYYADSVKGRFTISRDNAKNTVYLQMNSLKPEDTAVYYCAAYQYGDREPRWYHRYWGQGTQVTVSS

SEQ ID NO: 7065 - protein, 107 aa, Artificial Sequence
  Chemically Synthesized
QVQLQESGGGLVQAGGSLRLSCAASGYISGRYDMGWYRQAPGKERELVASITQGPYADSVKGRFTISRDNAKNTVYLQMNSLKPEDTAVYYCAVYYWGQGTQVTVSS

SEQ ID NO: 7066 - protein, 122 aa, Artificial Sequence
  Chemically Synthesized
QVQLQESGGGLVQAGGSLRLSCAASGYISFVPYMGWYRQAPGKERELVATIGRGGTTNYADSVKGRFTISRDNAKNTVYLQMNSLKPEDTAVYYCAVTPHPQGVTWGGFAYWGQGTQVTVSS

SEQ ID NO: 7067 - protein, 122 aa, Artificial Sequence
  Chemically Synthesized
QVQLQESGGGLVQAGGSLRLSCAASGNIFVRVYMGWYRQAPGKERELVAGISVGANTNYADSVKGRFTISRDNAKNTVYLQMNSLKPEDTAVYYCAAKHDDTPYGAVTYTYWGQGTQVTVSS

SEQ ID NO: 7068 - protein, 126 aa, Artificial Sequence
  Chemically Synthesized
QVQLQESGGGLVQAGGSLRLSCAASGSISNPDGMGWYRQAPGKEREFVAGITSGGTTYYADSVKGRFTISRDNAKNTVYLQMNSLKPEDTAVYYCAVPRIGHRKSPGGLPYYHIYWGQGTQVTVSS

SEQ ID NO: 7069 - protein, 118 aa, Artificial Sequence
  Chemically Synthesized
QVQLQESGGGLVQAGGSLRLSCAASGTIFGGSIMGWYRQAPGKERELVAGIGYGATTNYADSVKGRFTISRDNAKNTVYLQMNSLKPEDTAVYYCAAHSYPDGRHDYWGQGTQVTVSS

SEQ ID NO: 7070 - protein, 118 aa, Artificial Sequence
  Chemically Synthesized
QVQLQESGGGLVQAGGSLRLSCAASGTISQDFLMGWYRQAPGKERELVAGIAAGTNTYYADSVKGRFTISRDNAKNTVYLQMNSLKPEDTAVYYCAVHYRWGPDFDYWGQGTQVTVSS

SEQ ID NO: 7071 - protein, 127 aa, Artificial Sequence
  Chemically Synthesized
QVQLQESGGGLVQAGGSLRLSCAASGNIFQDDSRMGWYRQAPGKERELVATIASGANTNYADSVKGRFTISRDNAKNTVYLQMNSLKPEDTAVYYCAVLGAAPYQFRHTVKRHHVYWGQGTQVTVSS

SEQ ID NO: 7072 - protein, 118 aa, Artificial Sequence
  Chemically Synthesized
QVQLQESGGGLVQAGGSLRLSCAASGYISVYRYMGWYRQAPGKEREFVAGIANGGITNYADSVKGRFTISRDNAKNTVYLQMNSLKPEDTAVYYCAVIHYGQWTYHYWGQGTQVTVSS

SEQ ID NO: 7073 - protein, 117 aa, Artificial Sequence
  Chemically Synthesized
QVQLQESGGGLVQAGGSLRLSCAASGNISSGLTMGWYRQAPGKERELVAAIGPGGNTYYADSVKGRFTISRDNAKNTVYLQMNSLKPEDTAVYYCAVNGYGGPYGYWGQGTQVTVSS

SEQ ID NO: 7074 - protein, 118 aa, Artificial Sequence
  Chemically Synthesized
QVQLQESGGGLVQAGGSLRLSCAASGTISWWVDMGWYRQAPGKERELVAAISGGGNTYYADSVKGRFTISRDNAKNTVYLQMNSLKPEDTAVYYCAAYYGYYQYHGYWGQGTQVTVSS

SEQ ID NO: 7075 - protein, 122 aa, Artificial Sequence
  Chemically Synthesized
QVQLQESGGGLVQAGGSLRLSCAASGTIFFWRHMGWYRQAPGKEREFVATISPGSSTNYADSVKGRFTISRDNAKNTVYLQMNSLKPEDTAVYYCAASRTPSYLYTYYYPYWGQGTQVTVSS

SEQ ID NO: 7076 - protein, 126 aa, Artificial Sequence
  Chemically Synthesized
QVQLQESGGGLVQAGGSLRLSCAASGSISSRTGMGWYRQAPGKEREFVAGISYGGNTYYADSVKGRFTISRDNAKNTVYLQMNSLKPEDTAVYYCAVYYASYGPSTSLRLAYFRYWGQGTQVTVSS

SEQ ID NO: 7077 - protein, 118 aa, Artificial Sequence
  Chemically Synthesized
QVQLQESGGGLVQAGGSLRLSCAASGYIFGLDYMGWYRQAPGKERELVATIDVGASTYYADSVKGRFTISRDNAKNTVYLQMNSLKPEDTAVYYCAAIPYYAPYHIYWGQGTQVTVSS

SEQ ID NO: 7078 - protein, 127 aa, Artificial Sequence
  Chemically Synthesized
QVQLQESGGGLVQAGGSLRLSCAASGYISYYLDMGWYRQAPGKERELVASIDVGGSTYYADSVKGRFTISRDNAKNTVYLQMNSLKPEDTAVYYCAVIPSLAYDYHPPNWYRSLPYWGQGTQVTVSS

SEQ ID NO: 7079 - protein, 118 aa, Artificial Sequence
  Chemically Synthesized
QVQLQESGGGLVQAGGSLRLSCAASGTIFNDEWMGWYRQAPGKEREFVATISSGTSTNYADSVKGRFTISRDNAKNTVYLQMNSLKPEDTAVYYCAAHARYYEGYQYWGQGTQVTVSS

SEQ ID NO: 7080 - protein, 118 aa, Artificial Sequence
  Chemically Synthesized
QVQLQESGGGLVQAGGSLRLSCAASGNIFYPYSMGWYRQAPGKEREFVAGITYGGTTYYADSVKGRFTISRDNAKNTVYLQMNSLKPEDTAVYYCAALNRYVRSFYYWGQGTQVTVSS

SEQ ID NO: 7081 - protein, 118 aa, Artificial Sequence
  Chemically Synthesized
QVQLQESGGGLVQAGGSLRLSCAASGTISGGFLMGWYRQAPGKERELVAGIADGGSTYYADSVKGRFTISRDNAKNTVYLQMNSLKPEDTAVYYCAAHTYPTTFFDYWGQGTQVTVSS

SEQ ID NO: 7082 - protein, 118 aa, Artificial Sequence
  Chemically Synthesized
QVQLQESGGGLVQAGGSLRLSCAASGNISDIAGMGWYRQAPGKERELVATIDGGGNTNYADSVKGRFTISRDNAKNTVYLQMNSLKPEDTAVYYCAAYHVRYPGHSYWGQGTQVTVSS

SEQ ID NO: 7083 - protein, 126 aa, Artificial Sequence
  Chemically Synthesized
QVQLQESGGGLVQAGGSLRLSCAASGNISGQDGMGWYRQAPGKERELVAGINRGGSTNYADSVKGRFTISRDNAKNTVYLQMNSLKPEDTAVYYCAAYWPYLERAYSIVLPDFYYWGQGTQVTVSS

SEQ ID NO: 7084 - protein, 118 aa, Artificial Sequence
  Chemically Synthesized
QVQLQESGGGLVQAGGSLRLSCAASGNISQLSIMGWYRQAPGKEREFVAGIGYGASTYYADSVKGRFTISRDNAKNTVYLQMNSLKPEDTAVYYCAAPSYPTIYHDYWGQGTQVTVSS

SEQ ID NO: 7085 - protein, 122 aa, Artificial Sequence
  Chemically Synthesized
QVQLQESGGGLVQAGGSLRLSCAASGSIFRPISMGWYRQAPGKEREFVAGITQGGNTYYADSVKGRFTISRDNAKNTVYLQMNSLKPEDTAVYYCAAYLTATGTYQTYFRYWGQGTQVTVSS

SEQ ID NO: 7086 - protein, 126 aa, Artificial Sequence
  Chemically Synthesized
QVQLQESGGGLVQAGGSLRLSCAASGTISLVLVMGWYRQAPGKERELVAAIGYGATTYYADSVKGRFTISRDNAKNTVYLQMNSLKPEDTAVYYCAADSKWLYYGSGDGTPRYGYWGQGTQVTVSS

SEQ ID NO: 7087 - protein, 122 aa, Artificial Sequence
  Chemically Synthesized
QVQLQESGGGLVQAGGSLRLSCAASGNISAWIDMGWYRQAPGKEREFVASISDGSTTNYADSVKGRFTISRDNAKNTVYLQMNSLKPEDTAVYYCAVGAYRYNRYLNYYWYWGQGTQVTVSS

SEQ ID NO: 7088 - protein, 110 aa, Artificial Sequence
  Chemically Synthesized
QVQLQESGGGLVQAGGSLRLSCAASGYISPYPSMGWYRQAPGKERELVAAIDSGANTYYADSVKGRFTISRDNAKNTVYLQMNSLKPEDTAVYYCAAIYWGQGTQVTVSS

SEQ ID NO: 7089 - protein, 119 aa, Artificial Sequence
  Chemically Synthesized
QVQLQESGGGLVQAGGSLRLSCAASGNISTGYSMGWYRQAPGKEREFVAGITYGTSTYYADSVKGRFTISRDNAKNTVYLQMNSLKPEDTAVYYCAAIGTDGHWAFRYWGQGTQVTVSS

SEQ ID NO: 7090 - protein, 118 aa, Artificial Sequence
  Chemically Synthesized
QVQLQESGGGLVQAGGSLRLSCAASGSISDILTMGWYRQAPGKEREFVASINDGATTYYADSVKGRFTISRDNAKNTVYLQMNSLKPEDTAVYYCAAEDFGNRDHPYWGQGTQVTVSS

SEQ ID NO: 7091 - protein, 118 aa, Artificial Sequence
  Chemically Synthesized
QVQLQESGGGLVQAGGSLRLSCAASGNIFPWYPMGWYRQAPGKERELVATIDVGASTNYADSVKGRFTISRDNAKNTVYLQMNSLKPEDTAVYYCAVWDYTPADHYYWGQGTQVTVSS

SEQ ID NO: 7092 - protein, 111 aa, Artificial Sequence
  Chemically Synthesized
QVQLQESGGGLVQAGGSLRLSCAASGSISGVGWMGWYRQAPGKEREFVAGINVGGITYYADSVKGRFTISRDNAKNTVYLQMNSLKPEDTAVYYCAAEGYWGQGTQVTVSS

SEQ ID NO: 7093 - protein, 118 aa, Artificial Sequence
  Chemically Synthesized
QVQLQESGGGLVQAGGSLRLSCAASGYISELLLMGWYRQAPGKERELVAGIAYGSTTYYADSVKGRFTISRDNAKNTVYLQMNSLKPEDTAVYYCAAFDHYDDIYDYWGQGTQVTVSS

SEQ ID NO: 7094 - protein, 118 aa, Artificial Sequence
  Chemically Synthesized
QVQLQESGGGLVQAGGSLRLSCAASGSIFSADDMGWYRQAPGKEREFVATINYGSSTNYADSVKGRFTISRDNAKNTVYLQMNSLKPEDTAVYYCAVIDAYVYWFDYWGQGTQVTVSS

SEQ ID NO: 7095 - protein, 115 aa, Artificial Sequence
  Chemically Synthesized
QVQLQESGGGLVQAGGSLRLSCAASGSISERRGMGWYRQAPGKEREFVAGIGAGASTYYADSVKGRFTISRDNAKNTVYLQMNSLKPEDTAVYYCAAPGWGHWYWGQGTQVTVSS

SEQ ID NO: 7096 - protein, 118 aa, Artificial Sequence
  Chemically Synthesized
QVQLQESGGGLVQAGGSLRLSCAASGTISASSQMGWYRQAPGKEREFVATINTGANTYYADSVKGRFTISRDNAKNTVYLQMNSLKPEDTAVYYCAVYTDFGEALAYWGQGTQVTVSS

SEQ ID NO: 7097 - protein, 119 aa, Artificial Sequence
  Chemically Synthesized
QVQLQESGGGLVQAGGSLRLSCAASGNISADYKMGWYRQAPGKERELVATISAGSNTNYADSVKGRFTISRDNAKNTVYLQMNSLKPEDTAVYYCAARYLPDGRKFNYWGQGTQVTVSS

SEQ ID NO: 7098 - protein, 126 aa, Artificial Sequence
  Chemically Synthesized
QVQLQESGGGLVQAGGSLRLSCAASGNISTDDKMGWYRQAPGKERELVASIGDGTTTYYADSVKGRFTISRDNAKNTVYLQMNSLKPEDTAVYYCAVQYTGEHGYTVPPGGYHRYWGQGTQVTVSS

SEQ ID NO: 7099 - protein, 114 aa, Artificial Sequence
  Chemically Synthesized
QVQLQESGGGLVQAGGSLRLSCAASGYILLTTMGWYRQAPGKEREFVATINHGTSTYYADSVKGRFTISRDNAKNTVYLQMNSLKPEDTAVYYCAAGYDGHAYWGQGTQVTVSS

SEQ ID NO: 7100 - protein, 121 aa, Artificial Sequence
  Chemically Synthesized
QVQLQESGGGLVQAGGSLRLSCAASGNISTSLLMGWYRQAPGKERELVAAIGSVLIPYADSVKGRFTISRDNAKNTVYLQMNSLKPEDTAVYYCAVSPEHYYVRHPRHYYWGQGTQVTVSS

SEQ ID NO: 7101 - protein, 118 aa, Artificial Sequence
  Chemically Synthesized
QVQLQESGGGLVQAGGSLRLSCAASGNISWRVRMGWYRQAPGKEREFVASIAAGSSTNYADSVKGRFTISRDNAKNTVYLQMNSLKPEDTAVYYCAALYPWYDQFGYWGQGTQVTVSS

SEQ ID NO: 7102 - protein, 122 aa, Artificial Sequence
  Chemically Synthesized
QVQLQESGGGLVQAGGSLRLSCAASGNIFTRYDMGWYRQAPGKEREFVASIGDGTTTNYADSVKGRFTISRDNAKNTVYLQMNSLKPEDTAVYYCAAYRGYPFSYGSGHVYWGQGTQVTVSS

SEQ ID NO: 7103 - protein, 122 aa, Artificial Sequence
  Chemically Synthesized
QVQLQESGGGLVQAGGSLRLSCAASGNIFWIYGMGWYRQAPGKERELVAAITRGGSTYYADSVKGRFTISRDNAKNTVYLQMNSLKPEDTAVYYCAVEGGLPYWPRAALYYWGQGTQVTVSS

SEQ ID NO: 7104 - protein, 122 aa, Artificial Sequence
  Chemically Synthesized
QVQLQESGGGLVQAGGSLRLSCAASGYIFLDYDMGWYRQAPGKEREFVATIDDGTITYYADSVKGRFTISRDNAKNTVYLQMNSLKPEDTAVYYCAAASDYLSLYTPDLRYWGQGTQVTVSS

SEQ ID NO: 7105 - protein, 118 aa, Artificial Sequence
  Chemically Synthesized
QVQLQESGGGLVQAGGSLRLSCAASGTIFYYYGMGWYRQAPGKEREFVAGITSGGSTNYADSVKGRFTISRDNAKNTVYLQMNSLKPEDTAVYYCAVIYNLDEYFGYWGQGTQVTVSS

SEQ ID NO: 7106 - protein, 125 aa, Artificial Sequence
  Chemically Synthesized
QVQLQESGGGLVQAGGSLRLSCAASGNISAGLEMGWYRQAPGKEREFVASITLGSNTYYADSVKGRFTISRDNAKNTVYLQMNSLKPEDTAVYYCAVRGQQVYLKASVTMVCIYWGQGTQVTVSS

SEQ ID NO: 7107 - protein, 118 aa, Artificial Sequence
  Chemically Synthesized
QVQLQESGGGLVQAGGSLRLSCAASGYISSTVRMGWYRQAPGKERELVAAIAAGGNTNYADSVKGRFTISRDNAKNTVYLQMNSLKPEDTAVYYCAVDDQYNPRHEYWGQGTQVTVSS

SEQ ID NO: 7108 - protein, 117 aa, Artificial Sequence
  Chemically Synthesized
QVQLQESGGGLVQAGGSLRLSCAASGTIFYYSMGWYRQAPGKERELVATINRGGSTYYADSVKGRFTISRDNAKNTVYLQMNSLKPEDTAVYYCAVGGRDVDDFDYWGQGTQVTVSS

SEQ ID NO: 7109 - protein, 116 aa, Artificial Sequence
  Chemically Synthesized
QVQLQESGGGLVQAGGSLRLSCAASGNISGLIDMGWYRQAPGKEREFVAAIDRGTSTYYADSVKGRFTISRDNAKNTVYLQMNSLKPEDTAVYYCAVVDPQYHIYWGQGTQVTVSS

SEQ ID NO: 7110 - protein, 118 aa, Artificial Sequence
  Chemically Synthesized
QVQLQESGGGLVQAGGSLRLSCAASGTIFDVEYMGWYRQAPGKEREFVAAISFGAITYYADSVKGRFTISRDNAKNTVYLQMNSLKPEDTAVYYCAVDVWYGDGHWYWGQGTQVTVSS

SEQ ID NO: 7111 - protein, 117 aa, Artificial Sequence
  Chemically Synthesized
QVQLQESGGGLVQAGGSLRLSCAASGSISSTVMGWYRQAPGKERELVAAINRGTTTNYADSVKGRFTISRDNAKNTVYLQMNSLKPEDTAVYYCAVYGEERYFFIYWGQGTQVTVSS

SEQ ID NO: 7112 - protein, 125 aa, Artificial Sequence
  Chemically Synthesized
QVQLQESGGGLVQAGGSLRLSCAASGSISGYTSMGWYRQAPGKERELVASINRGTNTNYADSVKGRFTISRDNAKNTVYLQMNSLKPEDTAVYYCAARWRYISYIRYIYTDAHYWGQGTQVTVSS

SEQ ID NO: 7113 - protein, 118 aa, Artificial Sequence
  Chemically Synthesized
QVQLQESGGGLVQAGGSLRLSCAASGYISNLDYMGWYRQAPGKEREFVAAIDRGSITYYADSVKGRFTISRDNAKNTVYLQMNSLKPEDTAVYYCAVGYHGWGSLQYWGQGTQVTVSS

SEQ ID NO: 7114 - protein, 116 aa, Artificial Sequence
  Chemically Synthesized
QVQLQESGGGLVQAGGSLRLSCAASGNISDYWDMGWYRQAPGKERELVAAINNGTTTYYADSVKGRFTISRDNAKNTVYLQMNSLKPEDTAVYYCAVFQQATPIYWGQGTQVTVSS

SEQ ID NO: 7115 - protein, 126 aa, Artificial Sequence
  Chemically Synthesized
QVQLQESGGGLVQAGGSLRLSCAASGYIFVLYVMGWYRQAPGKERELVASITYGTTTNYADSVKGRFTISRDNAKNTVYLQMNSLKPEDTAVYYCAADYPTYTRNGRGRRGDHYYWGQGTQVTVSS

SEQ ID NO: 7116 - protein, 118 aa, Artificial Sequence
  Chemically Synthesized
QVQLQESGGGLVQAGGSLRLSCAASGNISDYYDMGWYRQAPGKERELVATIGVGAITNYADSVKGRFTISRDNAKNTVYLQMNSLKPEDTAVYYCAVQLYVRDRYPYWGQGTQVTVSS

SEQ ID NO: 7117 - protein, 117 aa, Artificial Sequence
  Chemically Synthesized
QVQLQESGGGLVQAGGSLRLSCAASGNIFRLLLMGWYRQAPGKERELLPVLLTVLIPYADSVKGRFTISRDNAKNTVYLQMNSLKPEDTAVYYCAAFGQFNYGHTYWGQGTQVTVSS

SEQ ID NO: 7118 - protein, 126 aa, Artificial Sequence
  Chemically Synthesized
QVQLQESGGGLVQAGGSLRLSCAASGTISYAPVMGWYRQAPGKEREFVASIDGGATTNYADSVKGRFTISRDNAKNTVYLQMNSLKPEDTAVYYCAAHPYVTTSYPYYTGQLYAYWGQGTQVTVSS

SEQ ID NO: 7119 - protein, 110 aa, Artificial Sequence
  Chemically Synthesized
QVQLQESGGGLVQAGGSLRLSCAASGNIFTLRMGWYRQAPGKERELVATIGRGASTYYADSVKGRFTISRDNAKNTVYLQMNSLKPEDTAVYYCAGPFYWGQGTQVTVSS

SEQ ID NO: 7120 - protein, 118 aa, Artificial Sequence
  Chemically Synthesized
QVQLQESGGGLVQAGGSLRLSCAASGSIFSTRYMGWYRQAPGKERELVASIDNGGNTYYADSVKGRFTISRDNAKNTVYLQMNSLKPEDTAVYYCAVKGSGRRYLWYWGQGTQVTVSS

SEQ ID NO: 7121 - protein, 118 aa, Artificial Sequence
  Chemically Synthesized
QVQLQESGGGLVQAGGSLRLSCAASGTIFPFYYMGWYRQAPGKERELVASINDGSITNYADSVKGRFTISRDNAKNTVYLQMNSLKPEDTAVYYCAAPSQYDNGHTYWGQGTQVTVSS

SEQ ID NO: 7122 - protein, 121 aa, Artificial Sequence
  Chemically Synthesized
QVQLQESGGGLVQAGGSLRLSCAASGYISVGQGMGWYRQAPGKERELVASIAAVVLPYADSVKGRFTISRDNAKNTVYLQMNSLKPEDTAVYYCAVEDRVVLSRLQEYAYWGQGTQVTVSS

SEQ ID NO: 7123 - protein, 121 aa, Artificial Sequence
  Chemically Synthesized
QVQLQESGGGLVQAGGSLRLSCAASGNISRRDYMGWYRQAPGKEREFVAAIGTGSNTNYADSVKGRFTISRDNAKNTVYLQMNSLKPEDTAVYYCAVPADTSNTLTFLLYWGQGTQVTVSS

SEQ ID NO: 7124 - protein, 118 aa, Artificial Sequence
  Chemically Synthesized
QVQLQESGGGLVQAGGSLRLSCAASGYIFDHWGMGWYRQAPGKEREFVAAISDGTTTNYADSVKGRFTISRDNAKNTVYLQMNSLKPEDTAVYYCAADYYYGYTHGYWGQGTQVTVSS

SEQ ID NO: 7125 - protein, 123 aa, Artificial Sequence
  Chemically Synthesized
QVQLQESGGGLVQAGGSLRLSCAASGTIYDMGWYRQAPGKEREFVASIDPGAITYYADSVKGRFTISRDNAKNTVYLQMNSLKPEDTAVYYCAVYVGPYRSVYWVYGRTLTYWGQGTQVTVSS

SEQ ID NO: 7126 - protein, 125 aa, Artificial Sequence
  Chemically Synthesized
QVQLQESGGGLVQAGGSLRLSCAASGSISQYAYMGWYRQAPGKERELVASISRGSTTYYADSVKGRFTISRDNAKNTVYLQMNSLKPEDTAVYYCAVEELYATTLLTSSVMVMYWGQGTQVTVSS

SEQ ID NO: 7127 - protein, 125 aa, Artificial Sequence
  Chemically Synthesized
QVQLQESGGGLVQAGGSLRLSCAASGTISGYVWMGWYRQAPGKEREFVAAIMTVVVPYADSVKGRFTISRDNAKNTVYLQMNSLKPEDTAVYYCAVADKDWGDLEHADLDTHAYWGQGTQVTVSS

SEQ ID NO: 7128 - protein, 126 aa, Artificial Sequence
  Chemically Synthesized
QVQLQESGGGLVQAGGSLRLSCAASGNIFDHGDMGWYRQAPGKERELVATINGGGTTNYADSVKGRFTISRDNAKNTVYLQMNSLKPEDTAVYYCAVGSTQGIETNYQDESRYDYWGQGTQVTVSS

SEQ ID NO: 7129 - protein, 118 aa, Artificial Sequence
  Chemically Synthesized
QVQLQESGGGLVQAGGSLRLSCAASGYIFGPGRMGWYRQAPGKERELVATIDTGANTNYADSVKGRFTISRDNAKNTVYLQMNSLKPEDTAVYYCAVDVWYGDGHWYWGQGTQVTVSS

SEQ ID NO: 7130 - protein, 118 aa, Artificial Sequence
  Chemically Synthesized
QVQLQESGGGLVQAGGSLRLSCAASGYISWQPAMGWYRQAPGKEREFVASIGHGATTNYADSVKGRFTISRDNAKNTVYLQMNSLKPEDTAVYYCAVYGSISADFGYWGQGTQVTVSS

SEQ ID NO: 7131 - protein, 118 aa, Artificial Sequence
  Chemically Synthesized
QVQLQESGGGLVQAGGSLRLSCAASGNISFGLSMGWYRQAPGKEREFVATIGPGTNTNYADSVKGRFTISRDNAKNTVYLQMNSLKPEDTAVYYCAAVSPRDGAYAYWGQGTQVTVSS

SEQ ID NO: 7132 - protein, 117 aa, Artificial Sequence
  Chemically Synthesized
QVQLQESGGGLVQAGGSLRLSCAASGNISASFMGWYRQAPGKEREFVASIDYGASTYYADSVKGRFTISRDNAKNTVYLQMNSLKPEDTAVYYCAATGSDAYQLVYWGQGTQVTVSS

SEQ ID NO: 7133 - protein, 117 aa, Artificial Sequence
  Chemically Synthesized
QVQLQESGGGLVQAGGSLRLSCAASGNISDVHWMGWYRQAPGKEREFVAAINYGASTYYADSVKGRFTISRDNAKNTVYLQMNSLKPEDTAVYYCAVLGDADGHKYWGQGTQVTVSS

SEQ ID NO: 7134 - protein, 121 aa, Artificial Sequence
  Chemically Synthesized
QVQLQESGGGLVQAGGSLRLSCAASGTISPTVDMGWYRQAPGKERELVATIGQGTTTYYADSVKGRFTISRDNAKNTVYLQMNSLKPEDTAVYYCAVAEYSYDSCVLSIYWGQGTQVTVSS

SEQ ID NO: 7135 - protein, 122 aa, Artificial Sequence
  Chemically Synthesized
QVQLQESGGGLVQAGGSLRLSCAASGTISRYGEMGWYRQAPGKEREFVAAIDYGGTTYYADSVKGRFTISRDNAKNTVYLQMNSLKPEDTAVYYCAVYYTTISHYVQGHVYWGQGTQVTVSS

SEQ ID NO: 7136 - protein, 125 aa, Artificial Sequence
  Chemically Synthesized
QVQLQESGGGLVQAGGSLRLSCAASGSISYTGYMGWYRQAPGKERELVAAIGGGTTNYADSVKGRFTISRDNAKNTVYLQMNSLKPEDTAVYYCAALFAGAATFVHYLRRPHTYWGQGTQVTVSS

SEQ ID NO: 7137 - protein, 118 aa, Artificial Sequence
  Chemically Synthesized
QVQLQESGGGLVQAGGSLRLSCAASGNIFWDVDMGWYRQAPGKERELVATIDDGTITYYADSVKGRFTISRDNAKNTVYLQMNSLKPEDTAVYYCAVALDDFTYFGYWGQGTQVTVSS

SEQ ID NO: 7138 - protein, 118 aa, Artificial Sequence
  Chemically Synthesized
QVQLQESGGGLVQAGGSLRLSCAASGNIFFYDQMGWYRQAPGKEREFVASISTGASTNYADSVKGRFTISRDNAKNTVYLQMNSLKPEDTAVYYCAAAVEYNSQHLYWGQGTQVTVSS

SEQ ID NO: 7139 - protein, 118 aa, Artificial Sequence
  Chemically Synthesized
QVQLQESGGGLVQAGGSLRLSCAASGYISSSLFMGWYRQAPGKERELVATIDQGTNTYYADSVKGRFTISRDNAKNTVYLQMNSLKPEDTAVYYCAADIWPVPNYDYWGQGTQVTVSS

SEQ ID NO: 7140 - protein, 118 aa, Artificial Sequence
  Chemically Synthesized
QVQLQESGGGLVQAGGSLRLSCAASGSIFRRTFMGWYRQAPGKEREFVAAIDYGTSTYYADSVKGRFTISRDNAKNTVYLQMNSLKPEDTAVYYCAVYRRKRGDFYYWGQGTQVTVSS

SEQ ID NO: 7141 - protein, 118 aa, Artificial Sequence
  Chemically Synthesized
QVQLQESGGGLVQAGGSLRLSCAASGNISGLIDMGWYRQAPGKEREFVAAIDRGTSTYYADSVKGRFTISRDNAKNTVYLQMNSLKPEDTAVYYCAAIYNAGSEYWYWGQGTQVTVSS

SEQ ID NO: 7142 - protein, 118 aa, Artificial Sequence
  Chemically Synthesized
QVQLQESGGGLVQAGGSLRLSCAASGTISAVRDMGWYRQAPGKERELVASINAGGNTYYADSVKGRFTISRDNAKNTVYLQMNSLKPEDTAVYYCAVGFSSGRDHEYWGQGTQVTVSS

SEQ ID NO: 7143 - protein, 116 aa, Artificial Sequence
  Chemically Synthesized
QVQLQESGGGLVQAGGSLRLSCAASGSISDGYMGWYRQAPGKERELVAAIGVVLVPYADSVKGRFTISRDNAKNTVYLQMNSLKPEDTAVYYCAVGQTIDPDFVYWGQGTQVTVSS

SEQ ID NO: 7144 - protein, 122 aa, Artificial Sequence
  Chemically Synthesized
QVQLQESGGGLVQAGGSLRLSCAASGSIFSYDDMGWYRQAPGKEREFVASINDGATTNYADSVKGRFTISRDNAKNTVYLQMNSLKPEDTAVYYCAAPLSTNLDYVPLHGYWGQGTQVTVSS

SEQ ID NO: 7145 - protein, 122 aa, Artificial Sequence
  Chemically Synthesized
QVQLQESGGGLVQAGGSLRLSCAASGTISYDPLMGWYRQAPGKEREFVAAINVGGTTYYADSVKGRFTISRDNAKNTVYLQMNSLKPEDTAVYYCAAVSRYWLDYYDTHDYWGQGTQVTVSS

SEQ ID NO: 7146 - protein, 118 aa, Artificial Sequence
  Chemically Synthesized
QVQLQESGGGLVQAGGSLRLSCAASGTIFRFQYMGWYRQAPGKERELVATINRGGSTYYADSVKGRFTISRDNAKNTVYLQMNSLKPEDTAVYYCAANRFHPRYYVYWGQGTQVTVSS

SEQ ID NO: 7147 - protein, 119 aa, Artificial Sequence
  Chemically Synthesized
QVQLQESGGGLVQAGGSLRLSCAASGSIFGYNYMGWYRQAPGKEREFVATILSVLLPYADSVKGRFTISRDNAKNTVYLQMNSLKPEDTAVYYCAADAYWYDFPSLIYWGQGTQVTVSS

SEQ ID NO: 7148 - protein, 117 aa, Artificial Sequence
  Chemically Synthesized
QVQLQESGGGLVQAGGSLRLSCAASGTISRSWMGWYRQAPGKERELVAGIAGGGTTNYADSVKGRFTISRDNAKNTVYLQMNSLKPEDTAVYYCAAYIIYYDGLTYWGQGTQVTVSS

SEQ ID NO: 7149 - protein, 121 aa, Artificial Sequence
  Chemically Synthesized
QVQLQESGGGLVQAGGSLRLSCAASGTIFSLTMGWYRQAPGKEREFVAAIASGTTTNYADSVKGRFTISRDNAKNTVYLQMNSLKPEDTAVYYCAVDGYYQLWSDYRLGYWGQGTQVTVSS

SEQ ID NO: 7150 - protein, 117 aa, Artificial Sequence
  Chemically Synthesized
QVQLQESGGGLVQAGGSLRLSCAASGNIFPYSGMGWYRQAPGKEREFVASIGYGSNTNYADSVKGRFTISRDNAKNTVYLQMNSLKPEDTAVYYCAAYRYRRNYPYWGQGTQVTVSS

SEQ ID NO: 7151 - protein, 122 aa, Artificial Sequence
  Chemically Synthesized
QVQLQESGGGLVQAGGSLRLSCAASGSIFGGFLMGWYRQAPGKERELVASITSGGNTYYADSVKGRFTISRDNAKNTVYLQMNSLKPEDTAVYYCAAEIGGYGRHPDTLSYWGQGTQVTVSS

SEQ ID NO: 7152 - protein, 113 aa, Artificial Sequence
  Chemically Synthesized
QVQLQESGGGLVQAGGSLRLSCAASGTIFTIDTMGWYRQAPGKERELVASITYGGITNYADSVKGRFTISRDNAKNTVYLQMNSLKPEDTAVYYCAARQYDYWGQGTQVTVSS

SEQ ID NO: 7153 - protein, 116 aa, Artificial Sequence
  Chemically Synthesized
QVQLQESGGGLVQAGGSLRLSCAASGYISDLSAMGWYRQAPGKEREFVASITPGSITYYADSVKGRFTISRDNAKNTVYLQMNSLKPEDTAVYYCAAVRTLVSIYWGQGTQVTVSS

SEQ ID NO: 7154 - protein, 122 aa, Artificial Sequence
  Chemically Synthesized
QVQLQESGGGLVQAGGSLRLSCAASGSISHVASMGWYRQAPGKEREFVASISAGGITYYADSVKGRFTISRDNAKNTVYLQMNSLKPEDTAVYYCAAQYRFTIYPPRDHAYWGQGTQVTVSS

SEQ ID NO: 7155 - protein, 118 aa, Artificial Sequence
  Chemically Synthesized
QVQLQESGGGLVQAGGSLRLSCAASGTIFVTPIMGWYRQAPGKERELVAGIAFGATTNYADSVKGRFTISRDNAKNTVYLQMNSLKPEDTAVYYCAVHGHFLVGLYYWGQGTQVTVSS

SEQ ID NO: 7156 - protein, 117 aa, Artificial Sequence
  Chemically Synthesized
QVQLQESGGGLVQAGGSLRLSCAASGSISHSSLMGWYRQAPGKEREFVASIASGSNTYYADSVKGRFTISRDNAKNTVYLQMNSLKPEDTAVYYCAGYLLRSGPLYWGQGTQVTVSS

SEQ ID NO: 7157 - protein, 126 aa, Artificial Sequence
  Chemically Synthesized
QVQLQESGGGLVQAGGSLRLSCAASGNIFGGQVMGWYRQAPGKERELVATISGGGNTNYADSVKGRFTISRDNAKNTVYLQMNSLKPEDTAVYYCAVYWQNGWYRRWRDRAGFRYWGQGTQVTVSS

SEQ ID NO: 7158 - protein, 121 aa, Artificial Sequence
  Chemically Synthesized
QVQLQESGGGLVQAGGSLRLSCAASGTIFDAFNMGWYRQAPGKEREFVASIGRGGSTNYADSVKGRFTISRDNAKNTVYLQMNSLKPEDTAVYYCAVDGYSSRKVNTLIYWGQGTQVTVSS

SEQ ID NO: 7159 - protein, 118 aa, Artificial Sequence
  Chemically Synthesized
QVQLQESGGGLVQAGGSLRLSCAASGSISGGYYMGWYRQAPGKEREFVAAISEGAITNYADSVKGRFTISRDNAKNTVYLQMNSLKPEDTAVYYCAVYDGYAQDHTYWGQGTQVTVSS

SEQ ID NO: 7160 - protein, 117 aa, Artificial Sequence
  Chemically Synthesized
QVQLQESGGGLVQAGGSLRLSCAASGTISQYSYMGWYRQAPGKERELVATIADGATTNYADSVKGRFTISRDNAKNTVYLQMNSLKPEDTAVYYCAVRNHPRDSIYWGQGTQVTVSS

SEQ ID NO: 7161 - protein, 122 aa, Artificial Sequence
  Chemically Synthesized
QVQLQESGGGLVQAGGSLRLSCAASGTISRASWMGWYRQAPGKEREFVAAITDGSNTYYADSVKGRFTISRDNAKNTVYLQMNSLKPEDTAVYYCAVQAVEGDEFYYWYSYWGQGTQVTVSS

SEQ ID NO: 7162 - protein, 118 aa, Artificial Sequence
  Chemically Synthesized
QVQLQESGGGLVQAGGSLRLSCAASGNISPHVRMGWYRQAPGKEREFVATISYGASTNYADSVKGRFTISRDNAKNTVYLQMNSLKPEDTAVYYCAATYYNYPSYYYWGQGTQVTVSS

SEQ ID NO: 7163 - protein, 118 aa, Artificial Sequence
  Chemically Synthesized
QVQLQESGGGLVQAGGSLRLSCAASGSIFRPYPMGWYRQAPGKERELVASIDVGGTTYYADSVKGRFTISRDNAKNTVYLQMNSLKPEDTAVYYCAVQDWTTVDLWYWGQGTQVTVSS

SEQ ID NO: 7164 - protein, 126 aa, Artificial Sequence
  Chemically Synthesized
QVQLQESGGGLVQAGGSLRLSCAASGTISEHRDMGWYRQAPGKERELVATINAGSSTNYADSVKGRFTISRDNAKNTVYLQMNSLKPEDTAVYYCAAGADVYVASQTPTHYYYDYWGQGTQVTVSS

SEQ ID NO: 7165 - protein, 118 aa, Artificial Sequence
  Chemically Synthesized
QVQLQESGGGLVQAGGSLRLSCAASGSISDDYRMGWYRQAPGKEREFVAGIGAGGNTYYADSVKGRFTISRDNAKNTVYLQMNSLKPEDTAVYYCAVIWYYGNPYRYWGQGTQVTVSS

SEQ ID NO: 7166 - protein, 122 aa, Artificial Sequence
  Chemically Synthesized
QVQLQESGGGLVQAGGSLRLSCAASGTISWDYLMGWYRQAPGKERELVAGIGLGSNTNYADSVKGRFTISRDNAKNTVYLQMNSLKPEDTAVYYCAVATPAEAQRGARFPYWGQGTQVTVSS

SEQ ID NO: 7167 - protein, 122 aa, Artificial Sequence
  Chemically Synthesized
QVQLQESGGGLVQAGGSLRLSCAASGSISNGYTMGWYRQAPGKEREFVATIGQGTNTNYADSVKGRFTISRDNAKNTVYLQMNSLKPEDTAVYYCAFVTSSYDRREDGHGYWGQGTQVTVSS

SEQ ID NO: 7168 - protein, 119 aa, Artificial Sequence
  Chemically Synthesized
QVQLQESGGGLVQAGGSLRLSCAASGNIFAGSTMGWYRQAPGKEREFVASIADGTTTNYADSVKGRFTISRDNAKNTVYLQMNSLKPEDTAVYYCAVVGFTNTLNRIYWGQGTQVTVSS

SEQ ID NO: 7169 - protein, 122 aa, Artificial Sequence
  Chemically Synthesized
QVQLQESGGGLVQAGGSLRLSCAASGYIFSRLYMGWYRQAPGKEREFVAAINYGGNTYYADSVKGRFTISRDNAKNTVYLQMNSLKPEDTAVYYCAVTLGHYAYVYPKHYYWGQGTQVTVSS

SEQ ID NO: 7170 - protein, 122 aa, Artificial Sequence
  Chemically Synthesized
QVQLQESGGGLVQAGGSLRLSCAASGTIFPRDLMGWYRQAPGKERELVAGINAGSTTYYADSVKGRFTISRDNAKNTVYLQMNSLKPEDTAVYYCAADTHQYASPNEALVYWGQGTQVTVSS

SEQ ID NO: 7171 - protein, 117 aa, Artificial Sequence
  Chemically Synthesized
QVQLQESGGGLVQAGGSLRLSCAASGTISYSQTMGWYRQAPGKERELVASIGPGGTTYYADSVKGRFTISRDNAKNTVYLQMNSLKPEDTAVYYCAVTRYYVQLDYWGQGTQVTVSS

SEQ ID NO: 7172 - protein, 122 aa, Artificial Sequence
  Chemically Synthesized
QVQLQESGGGLVQAGGSLRLSCAASGYISHRYKMGWYRQAPGKERELVAAIAVGSSTYYADSVKGRFTISRDNAKNTVYLQMNSLKPEDTAVYYCAVKGRFVYPITRWHDYWGQGTQVTVSS

SEQ ID NO: 7173 - protein, 121 aa, Artificial Sequence
  Chemically Synthesized
QVQLQESGGGLVQAGGSLRLSCAASGYIFSDALMGWYRQAPGKERELVARLLSVVVPYADSVKGRFTISRDNAKNTVYLQMNSLKPEDTAVYYCAVWPWALRYVTSAYEYWGQGTQVTVSS

SEQ ID NO: 7174 - protein, 126 aa, Artificial Sequence
  Chemically Synthesized
QVQLQESGGGLVQAGGSLRLSCAASGNISRDYAMGWYRQAPGKEREFVAAIDQGAITYYADSVKGRFTISRDNAKNTVYLQMNSLKPEDTAVYYCAAHGPLYTPQSFLYVGYYPYWGQGTQVTVSS

SEQ ID NO: 7175 - protein, 126 aa, Artificial Sequence
  Chemically Synthesized
QVQLQESGGGLVQAGGSLRLSCAASGYISPYFSMGWYRQAPGKERELVAAITAGGSTNYADSVKGRFTISRDNAKNTVYLQMNSLKPEDTAVYYCAVLWQPTDIDGSVYGLKHAYWGQGTQVTVSS

SEQ ID NO: 7176 - protein, 122 aa, Artificial Sequence
  Chemically Synthesized
QVQLQESGGGLVQAGGSLRLSCAASGSISTTYYMGWYRQAPGKERELVATISSGGNTNYADSVKGRFTISRDNAKNTVYLQMNSLKPEDTAVYYCAAWPRRNAPLRRVHAYWGQGTQVTVSS

SEQ ID NO: 7177 - protein, 122 aa, Artificial Sequence
  Chemically Synthesized
QVQLQESGGGLVQAGGSLRLSCAASGYISWYYYMGWYRQAPGKEREFVAGISEGSTTNYADSVKGRFTISRDNAKNTVYLQMNSLKPEDTAVYYCAVHVPGDPYGENALAYWGQGTQVTVSS

SEQ ID NO: 7178 - protein, 116 aa, Artificial Sequence
  Chemically Synthesized
QVQLQESGGGLVQAGGSLRLSCAASGTIFKARVMGWYRQAPGKERELVAAINFGGTTYYADSVKGRFTISRDNAKNTVYLQMNSLKPEDTAVYYCAAYFRDDLYYWGQGTQVTVSS

SEQ ID NO: 7179 - protein, 118 aa, Artificial Sequence
  Chemically Synthesized
QVQLQESGGGLVQAGGSLRLSCAASGNISLRYSMGWYRQAPGKERELVATIGYGSTTYYADSVKGRFTISRDNAKNTVYLQMNSLKPEDTAVYYCAVAWDPRDNLIYWGQGTQVTVSS

SEQ ID NO: 7180 - protein, 121 aa, Artificial Sequence
  Chemically Synthesized
QVQLQESGGGLVQAGGSLRLSCAASGSFFGGVMGWYRQAPGKEREFVAAIDLGANTYYADSVKGRFTISRDNAKNTVYLQMNSLKPEDTAVYYCAAWYKDVYFPYDEYGYWGQGTQVTVSS

SEQ ID NO: 7181 - protein, 118 aa, Artificial Sequence
  Chemically Synthesized
QVQLQESGGGLVQAGGSLRLSCAASGTIFDYTKMGWYRQAPGKEREFVASISSGTITNYADSVKGRFTISRDNAKNTVYLQMNSLKPEDTAVYYCAALAYDNDNHGYWGQGTQVTVSS

SEQ ID NO: 7182 - protein, 122 aa, Artificial Sequence
  Chemically Synthesized
QVQLQESGGGLVQAGGSLRLSCAASGSISVELVMGWYRQAPGKEREFVAGIGSGGTTNYADSVKGRFTISRDNAKNTVYLQMNSLKPEDTAVYYCAAFVDIVQRYTFDHVYWGQGTQVTVSS

SEQ ID NO: 7183 - protein, 118 aa, Artificial Sequence
  Chemically Synthesized
QVQLQESGGGLVQAGGSLRLSCAASGSIFVPYTMGWYRQAPGKEREFVAGIGGGATTNYADSVKGRFTISRDNAKNTVYLQMNSLKPEDTAVYYCAVVSSGQYDFVYWGQGTQVTVSS

SEQ ID NO: 7184 - protein, 118 aa, Artificial Sequence
  Chemically Synthesized
QVQLQESGGGLVQAGGSLRLSCAASGNIFLDDTMGWYRQAPGKEREFVAAIGYGGITNYADSVKGRFTISRDNAKNTVYLQMNSLKPEDTAVYYCAADITRFYLHHYWGQGTQVTVSS

SEQ ID NO: 7185 - protein, 126 aa, Artificial Sequence
  Chemically Synthesized
QVQLQESGGGLVQAGGSLRLSCAASGSIFFDYDMGWYRQAPGKERELVATITPGGTTNYADSVKGRFTISRDNAKNTVYLQMNSLKPEDTAVYYCAVDDGWQRWFYWLPPERHHYWGQGTQVTVSS

SEQ ID NO: 7186 - protein, 118 aa, Artificial Sequence
  Chemically Synthesized
QVQLQESGGGLVQAGGSLRLSCAASGYISRYDTMGWYRQAPGKEREFVAAIGTGGNTYYADSVKGRFTISRDNAKNTVYLQMNSLKPEDTAVYYCAVWRAPTYIYPYWGQGTQVTVSS

SEQ ID NO: 7187 - protein, 117 aa, Artificial Sequence
  Chemically Synthesized
QVQLQESGGGLVQAGGSLRLSCAASGSIFRLTMGWYRQAPGKERELVATIGAGASTYYADSVKGRFTISRDNAKNTVYLQMNSLKPEDTAVYYCAAYLYASYYYDYWGQGTQVTVSS

SEQ ID NO: 7188 - protein, 118 aa, Artificial Sequence
  Chemically Synthesized
QVQLQESGGGLVQAGGSLRLSCAASGNISWTWPMGWYRQAPGKERELVAGISWGGSTNYADSVKGRFTISRDNAKNTVYLQMNSLKPEDTAVYYCAVIADPARYHRYWGQGTQVTVSS

SEQ ID NO: 7189 - protein, 118 aa, Artificial Sequence
  Chemically Synthesized
QVQLQESGGGLVQAGGSLRLSCAASGNISPRRIMGWYRQAPGKERELVAAISWGSTTNYADSVKGRFTISRDNAKNTVYLQMNSLKPEDTAVYYCAAYATTTYSHRYWGQGTQVTVSS

SEQ ID NO: 7190 - protein, 118 aa, Artificial Sequence
  Chemically Synthesized
QVQLQESGGGLVQAGGSLRLSCAASGNISDPDGMGWYRQAPGKEREFVATIGDGSNTYYADSVKGRFTISRDNAKNTVYLQMNSLKPEDTAVYYCAVRGGYTDDLTYWGQGTQVTVSS

SEQ ID NO: 7191 - protein, 118 aa, Artificial Sequence
  Chemically Synthesized
QVQLQESGGGLVQAGGSLRLSCAASGSISAYVVMGWYRQAPGKERELVAAIAYGSTTNYADSVKGRFTISRDNAKNTVYLQMNSLKPEDTAVYYCAVYLLDSALHSYWGQGTQVTVSS

SEQ ID NO: 7192 - protein, 117 aa, Artificial Sequence
  Chemically Synthesized
QVQLQESGGGLVQAGGSLRLSCAASGSISSLVMGWYRQAPGKEREFVAAISYGGTTYYADSVKGRFTISRDNAKNTVYLQMNSLKPEDTAVYYCAVARPLYYWHIYWGQGTQVTVSS

SEQ ID NO: 7193 - protein, 120 aa, Artificial Sequence
  Chemically Synthesized
QVQLQESGGGLVQAGGSLRLSCAASGTIFDYYGMGWYRQAPGKEREFVAGISYGGTTYYADSVKGRFTISRDNAKNTVYLQMNSLKPEDTAVYYCAAIADLSYVGPHSYWGQGTQVTVSS

SEQ ID NO: 7194 - protein, 117 aa, Artificial Sequence
  Chemically Synthesized
QVQLQESGGGLVQAGGSLRLSCAASGTISNLYTMGWYRQAPGKEREFVAGISYGGTTNYADSVKGRFTISRDNAKNTVYLQMNSLKPEDTAVYYCAAIDSYTYWYYWGQGTQVTVSS

SEQ ID NO: 7195 - protein, 119 aa, Artificial Sequence
  Chemically Synthesized
QVQLQESGGGLVQAGGSLRLSCAASGSISRVADMGWYRQAPGKEREYCYRYYYLYADSVKGRFTISRDNAKNTVYLQMNSLKPEDTAVYYCAAATNRVAWLHYYSHRYWGQGTQVTVSS

SEQ ID NO: 7196 - protein, 117 aa, Artificial Sequence
  Chemically Synthesized
QVQLQESGGGLVQAGGSLRLSCAASGYISDDPYMGWYRQAPGKEREFVASIDWGTITNYADSVKGRFTISRDNAKNTVYLQMNSLKPEDTAVYYCAAYYYTSTLIYWGQGTQVTVSS

SEQ ID NO: 7197 - protein, 117 aa, Artificial Sequence
  Chemically Synthesized
QVQLQESGGGLVQAGGSLRLSCAASGYIFVDPYMGWYRQAPGKERELVATLVLVLLPYADSVKGRFTISRDNAKNTVYLQMNSLKPEDTAVYYCAVDTDVPLSHRYWGQGTQVTVSS

SEQ ID NO: 7198 - protein, 118 aa, Artificial Sequence
  Chemically Synthesized
QVQLQESGGGLVQAGGSLRLSCAASGTIFYYNPMGWYRQAPGKERELVATIDVGTNTYYADSVKGRFTISRDNAKNTVYLQMNSLKPEDTAVYYCAAAYTSYVDLLYWGQGTQVTVSS

SEQ ID NO: 7199 - protein, 118 aa, Artificial Sequence
  Chemically Synthesized
QVQLQESGGGLVQAGGSLRLSCAASGNIFPYHRMGWYRQAPGKERELVAAIGYGAITYYADSVKGRFTISRDNAKNTVYLQMNSLKPEDTAVYYCAVYAKSHLGLAYWGQGTQVTVSS

SEQ ID NO: 7200 - protein, 117 aa, Artificial Sequence
  Chemically Synthesized
QVQLQESGGGLVQAGGSLRLSCAASGTIFGVLMGWYRQAPGKERELVAAISQGSNTNYADSVKGRFTISRDNAKNTVYLQMNSLKPEDTAVYYCAAYVYAKRYLLYWGQGTQVTVSS

SEQ ID NO: 7201 - protein, 110 aa, Artificial Sequence
  Chemically Synthesized
QVQLQESGGGLVQAGGSLRLSCAASGYISPDKWMGWYRQAPGKERELVATIGSGGITYYADSVKGRFTISRDNAKNTVYLQMNSLKPEDTAVYYCAVMYWGQGTQVTVSS

SEQ ID NO: 7202 - protein, 118 aa, Artificial Sequence
  Chemically Synthesized
QVQLQESGGGLVQAGGSLRLSCAASGSIFNGWFMGWYRQAPGKEREFVAAIDIGAITYYADSVKGRFTISRDNAKNTVYLQMNSLKPEDTAVYYCAADYRKYSSFDYWGQGTQVTVSS

SEQ ID NO: 7203 - protein, 118 aa, Artificial Sequence
  Chemically Synthesized
QVQLQESGGGLVQAGGSLRLSCAASGNIFDASEMGWYRQAPGKEREFVAAISYGASTNYADSVKGRFTISRDNAKNTVYLQMNSLKPEDTAVYYCAVIDTHYVGYWYWGQGTQVTVSS

SEQ ID NO: 7204 - protein, 118 aa, Artificial Sequence
  Chemically Synthesized
QVQLQESGGGLVQAGGSLRLSCAASGNISPDDTMGWYRQAPGKEREFVAGINAGGTTYYADSVKGRFTISRDNAKNTVYLQMNSLKPEDTAVYYCAAYYTYDGGLDYWGQGTQVTVSS

SEQ ID NO: 7205 - protein, 118 aa, Artificial Sequence
  Chemically Synthesized
QVQLQESGGGLVQAGGSLRLSCAASGSIFIAGNMGWYRQAPGKERELVAAIAGGGITNYADSVKGRFTISRDNAKNTVYLQMNSLKPEDTAVYYCAVPYNSFDVLPYWGQGTQVTVSS

SEQ ID NO: 7206 - protein, 118 aa, Artificial Sequence
  Chemically Synthesized
QVQLQESGGGLVQAGGSLRLSCAASGSIFGTYGMGWYRQAPGKERELVATIAVGGSTYYADSVKGRFTISRDNAKNTVYLQMNSLKPEDTAVYYCAAESPNVILHAYWGQGTQVTVSS

SEQ ID NO: 7207 - protein, 122 aa, Artificial Sequence
  Chemically Synthesized
QVQLQESGGGLVQAGGSLRLSCAASGSISHPDVMGWYRQAPGKERELVATIARGTNTYYADSVKGRFTISRDNAKNTVYLQMNSLKPEDTAVYYCAVAYGRDRLYFAWHAYWGQGTQVTVSS

SEQ ID NO: 7208 - protein, 118 aa, Artificial Sequence
  Chemically Synthesized
QVQLQESGGGLVQAGGSLRLSCAASGTISYGSWMGWYRQAPGKEREFVASIGTGGNTNYADSVKGRFTISRDNAKNTVYLQMNSLKPEDTAVYYCAAEGDVYYDFDYWGQGTQVTVSS

SEQ ID NO: 7209 - protein, 121 aa, Artificial Sequence
  Chemically Synthesized
QVQLQESGGGLVQAGGSLRLSCAASGNISQQSVMGWYRQAPGKERELVAGIDGVVLPYADSVKGRFTISRDNAKNTVYLQMNSLKPEDTAVYYCAVLPDTYYWNYGGHAYWGQGTQVTVSS

SEQ ID NO: 7210 - protein, 119 aa, Artificial Sequence
  Chemically Synthesized
QVQLQESGGGLVQAGGSLRLSCAASGNIFYSRWMGWYRQAPGKEREFVATIAIGTTTYYADSVKGRFTISRDNAKNTVYLQMNSLKPEDTAVYYCAALHIHVTRQHYYWGQGTQVTVSS

SEQ ID NO: 7211 - protein, 122 aa, Artificial Sequence
  Chemically Synthesized
QVQLQESGGGLVQAGGSLRLSCAASGTIFSYGRMGWYRQAPGKEREFVATITRGGTTYYADSVKGRFTISRDNAKNTVYLQMNSLKPEDTAVYYCAVILEGSIGQGSYHYYWGQGTQVTVSS

SEQ ID NO: 7212 - protein, 121 aa, Artificial Sequence
  Chemically Synthesized
QVQLQESGGGLVQAGGSLRLSCAASGTIFASTDMGWYRQAPGKEREFVATIGSVVIPYADSVKGRFTISRDNAKNTVYLQMNSLKPEDTAVYYCAVYSSHLFGRYKRHRYWGQGTQVTVSS

SEQ ID NO: 7213 - protein, 126 aa, Artificial Sequence
  Chemically Synthesized
QVQLQESGGGLVQAGGSLRLSCAASGNIFNAVYMGWYRQAPGKEREFVAAIGTGTTTYYADSVKGRFTISRDNAKNTVYLQMNSLKPEDTAVYYCAAIGAGQDVSYYYYYSQHVYWGQGTQVTVSS

SEQ ID NO: 7214 - protein, 125 aa, Artificial Sequence
  Chemically Synthesized
QVQLQESGGGLVQAGGSLRLSCAASGTIFYRTYMGWYRQAPGKERELLPVLVRVLIPYADSVKGRFTISRDNAKNTVYLQMNSLKPEDTAVYYCAVYGDSYWDYRYTYVRNHTYWGQGTQVTVSS

SEQ ID NO: 7215 - protein, 122 aa, Artificial Sequence
  Chemically Synthesized
QVQLQESGGGLVQAGGSLRLSCAASGYISDNWIMGWYRQAPGKEREFVAAIAGGGTTNYADSVKGRFTISRDNAKNTVYLQMNSLKPEDTAVYYCAVYVNRADDPYDLHTYWGQGTQVTVSS

SEQ ID NO: 7216 - protein, 118 aa, Artificial Sequence
  Chemically Synthesized
QVQLQESGGGLVQAGGSLRLSCAASGSISYIWPMGWYRQAPGKERELVASIAAGASTNYADSVKGRFTISRDNAKNTVYLQMNSLKPEDTAVYYCAVHQYLDFWLRYWGQGTQVTVSS

SEQ ID NO: 7217 - protein, 122 aa, Artificial Sequence
  Chemically Synthesized
QVQLQESGGGLVQAGGSLRLSCAASGSIFRAEDMGWYRQAPGKEREFVAAIGLGGTTNYADSVKGRFTISRDNAKNTVYLQMNSLKPEDTAVYYCAAGEEQYLYGVVRFDYWGQGTQVTVSS

SEQ ID NO: 7218 - protein, 126 aa, Artificial Sequence
  Chemically Synthesized
QVQLQESGGGLVQAGGSLRLSCAASGYISGGTWMGWYRQAPGKEREFVASIDSGSSTYYADSVKGRFTISRDNAKNTVYLQMNSLKPEDTAVYYCAVQGASHEPPRHDVTEYYTYWGQGTQVTVSS

SEQ ID NO: 7219 - protein, 120 aa, Artificial Sequence
  Chemically Synthesized
QVQLQESGGGLVQAGGSLRLSCAASGTFLTLTMGWYRQAPGKERELVAGISLGTSTNYADSVKGRFTISRDNAKNTVYLQMNSLKPEDTAVYYCAAYVGNAYIYGYFYYWGQGTQVTVSS

SEQ ID NO: 7220 - protein, 112 aa, Artificial Sequence
  Chemically Synthesized
QVQLQESGGGLVQAGGSLRLSCAASGSIFAYAHMGWYRQAPGKEREFVATIADGGTTYYADSVKGRFTISRDNAKNTVYLQMNSLKPEDTAVYYCAARLSYWGQGTQVTVSS

SEQ ID NO: 7221 - protein, 118 aa, Artificial Sequence
  Chemically Synthesized
QVQLQESGGGLVQAGGSLRLSCAASGSIFDLYYMGWYRQAPGKEREFVAAIDYGSTTYYADSVKGRFTISRDNAKNTVYLQMNSLKPEDTAVYYCAVHRYRRIGLGYWGQGTQVTVSS

SEQ ID NO: 7222 - protein, 118 aa, Artificial Sequence
  Chemically Synthesized
QVQLQESGGGLVQAGGSLRLSCAASGTISTYGLMGWYRQAPGKEREFVAAIGGGTNTNYADSVKGRFTISRDNAKNTVYLQMNSLKPEDTAVYYCAVASYSYRDLVYWGQGTQVTVSS

SEQ ID NO: 7223 - protein, 122 aa, Artificial Sequence
  Chemically Synthesized
QVQLQESGGGLVQAGGSLRLSCAASGTISPSYAMGWYRQAPGKERELVATIDSGSNTNYADSVKGRFTISRDNAKNTVYLQMNSLKPEDTAVYYCAVAIGVQSGVDAYYSYWGQGTQVTVSS

SEQ ID NO: 7224 - protein, 115 aa, Artificial Sequence
  Chemically Synthesized
QVQLQESGGGLVQAGGSLRLSCAASGTLPVLMGWYRQAPGKEREFVAAIAGGTTTNYADSVKGRFTISRDNAKNTVYLQMNSLKPEDTAVYYCAASSTTLTRLYWGQGTQVTVSS

SEQ ID NO: 7225 - protein, 122 aa, Artificial Sequence
  Chemically Synthesized
QVQLQESGGGLVQAGGSLRLSCAASGNISQRDYMGWYRQAPGKEREFVAAIDVGTNTNYADSVKGRFTISRDNAKNTVYLQMNSLKPEDTAVYYCAARDYDVHSRILRLSYWGQGTQVTVSS

SEQ ID NO: 7226 - protein, 118 aa, Artificial Sequence
  Chemically Synthesized
QVQLQESGGGLVQAGGSLRLSCAASGNISRYGYMGWYRQAPGKERELVASIGHGGNTYYADSVKGRFTISRDNAKNTVYLQMNSLKPEDTAVYYCAVVDSDADTYIYWGQGTQVTVSS

SEQ ID NO: 7227 - protein, 112 aa, Artificial Sequence
  Chemically Synthesized
QVQLQESGGGLVQAGGSLRLSCAASGNISYFGYMGWYRQAPGKEREFVATIDLLPYADSVKGRFTISRDNAKNTVYLQMNSLKPEDTAVYYCAAYDNQLDYWGQGTQVTVSS

SEQ ID NO: 7228 - protein, 122 aa, Artificial Sequence
  Chemically Synthesized
QVQLQESGGGLVQAGGSLRLSCAASGSISTYTNMGWYRQAPGKEREFVATIGSGANTNYADSVKGRFTISRDNAKNTVYLQMNSLKPEDTAVYYCAVRDPITGYYAFAYWYWGQGTQVTVSS

SEQ ID NO: 7229 - protein, 126 aa, Artificial Sequence
  Chemically Synthesized
QVQLQESGGGLVQAGGSLRLSCAASGYISLVREMGWYRQAPGKEREFVATISVGGTTYYADSVKGRFTISRDNAKNTVYLQMNSLKPEDTAVYYCAAHVFDWRDYNPYEYPTHPYWGQGTQVTVSS

SEQ ID NO: 7230 - protein, 118 aa, Artificial Sequence
  Chemically Synthesized
QVQLQESGGGLVQAGGSLRLSCAASGNIFLDYLMGWYRQAPGKEREFVAAITGGTNTYYADSVKGRFTISRDNAKNTVYLQMNSLKPEDTAVYYCAVVQFDVDGFDYWGQGTQVTVSS

SEQ ID NO: 7231 - protein, 118 aa, Artificial Sequence
  Chemically Synthesized
QVQLQESGGGLVQAGGSLRLSCAASGSISYDNSMGWYRQAPGKERELVAGINHGSITYYADSVKGRFTISRDNAKNTVYLQMNSLKPEDTAVYYCAVAVGPLGVYQYWGQGTQVTVSS

SEQ ID NO: 7232 - protein, 122 aa, Artificial Sequence
  Chemically Synthesized
QVQLQESGGGLVQAGGSLRLSCAASGTISRGYAMGWYRQAPGKEREFVAGITYGGSTYYADSVKGRFTISRDNAKNTVYLQMNSLKPEDTAVYYCAADPYRGKGNIPYHTYWGQGTQVTVSS

SEQ ID NO: 7233 - protein, 118 aa, Artificial Sequence
  Chemically Synthesized
QVQLQESGGGLVQAGGSLRLSCAASGSIFLAYYMGWYRQAPGKEREFVAAIGNGASTNYADSVKGRFTISRDNAKNTVYLQMNSLKPEDTAVYYCAVYGYVIDVHHYWGQGTQVTVSS

SEQ ID NO: 7234 - protein, 118 aa, Artificial Sequence
  Chemically Synthesized
QVQLQESGGGLVQAGGSLRLSCAASGNIFPSTDMGWYRQAPGKERELVAGIAQGGSTYYADSVKGRFTISRDNAKNTVYLQMNSLKPEDTAVYYCAVVDRGEYRFGYWGQGTQVTVSS

SEQ ID NO: 7235 - protein, 126 aa, Artificial Sequence
  Chemically Synthesized
QVQLQESGGGLVQAGGSLRLSCAASGTIFTVAIMGWYRQAPGKERELVASIGRGTITNYADSVKGRFTISRDNAKNTVYLQMNSLKPEDTAVYYCAVAYYAAGDDIYDYRPDYDYWGQGTQVTVSS

SEQ ID NO: 7236 - protein, 118 aa, Artificial Sequence
  Chemically Synthesized
QVQLQESGGGLVQAGGSLRLSCAASGYIFVTFVMGWYRQAPGKERELVAGIDDGANTYYADSVKGRFTISRDNAKNTVYLQMNSLKPEDTAVYYCAVPTDYRYAFYYWGQGTQVTVSS

SEQ ID NO: 7237 - protein, 126 aa, Artificial Sequence
  Chemically Synthesized
QVQLQESGGGLVQAGGSLRLSCAASGYIFDADDMGWYRQAPGKERELVASIGDGSTTNYADSVKGRFTISRDNAKNTVYLQMNSLKPEDTAVYYCAVTGLIAAGDDPPVYYRYDYWGQGTQVTVSS

SEQ ID NO: 7238 - protein, 118 aa, Artificial Sequence
  Chemically Synthesized
QVQLQESGGGLVQAGGSLRLSCAASGNISVVTYMGWYRQAPGKEREFVAGITWGATTYYADSVKGRFTISRDNAKNTVYLQMNSLKPEDTAVYYCAAAYLDSRPLAYWGQGTQVTVSS

SEQ ID NO: 7239 - protein, 117 aa, Artificial Sequence
  Chemically Synthesized
QVQLQESGGGLVQAGGSLRLSCAASGYISTSTMGWYRQAPGKERELVASINLGTTTNYADSVKGRFTISRDNAKNTVYLQMNSLKPEDTAVYYCAVGWQDYIAHVYWGQGTQVTVSS

SEQ ID NO: 7240 - protein, 118 aa, Artificial Sequence
  Chemically Synthesized
QVQLQESGGGLVQAGGSLRLSCAASGYISNILAMGWYRQAPGKEREFVAAINYGGNTYYADSVKGRFTISRDNAKNTVYLQMNSLKPEDTAVYYCAVHRRYIATHKYWGQGTQVTVSS

SEQ ID NO: 7241 - protein, 126 aa, Artificial Sequence
  Chemically Synthesized
QVQLQESGGGLVQAGGSLRLSCAASGTIFAFNYMGWYRQAPGKERELVAGITAGGNTNYADSVKGRFTISRDNAKNTVYLQMNSLKPEDTAVYYCAAGNTSYYRNARYSDYGHDYWGQGTQVTVSS

SEQ ID NO: 7242 - protein, 117 aa, Artificial Sequence
  Chemically Synthesized
QVQLQESGGGLVQAGGSLRLSCAASGSIFRVGMGWYRQAPGKERELVATIGYGGNTYYADSVKGRFTISRDNAKNTVYLQMNSLKPEDTAVYYCAAYVWGDDIHSYWGQGTQVTVSS

SEQ ID NO: 7243 - protein, 117 aa, Artificial Sequence
  Chemically Synthesized
QVQLQESGGGLVQAGGSLRLSCAASGSIFLRLMGWYRQAPGKERELVAGIAYGATTNYADSVKGRFTISRDNAKNTVYLQMNSLKPEDTAVYYCAVHLARTSTLAYWGQGTQVTVSS

SEQ ID NO: 7244 - protein, 122 aa, Artificial Sequence
  Chemically Synthesized
QVQLQESGGGLVQAGGSLRLSCAASGNISAYDYMGWYRQAPGKEREFVASIAGGANTYYADSVKGRFTISRDNAKNTVYLQMNSLKPEDTAVYYCAAHFSGIVRTQPLLYYWGQGTQVTVSS

SEQ ID NO: 7245 - protein, 113 aa, Artificial Sequence
  Chemically Synthesized
QVQLQESGGGLVQAGGSLRLSCAASGSISALPYMGWYRQAPGKEREFVAAINYGTNTYYADSVKGRFTISRDNAKNTVYLQMNSLKPEDTAVYYCAVLGHDYWGQGTQVTVSS

SEQ ID NO: 7246 - protein, 118 aa, Artificial Sequence
  Chemically Synthesized
QVQLQESGGGLVQAGGSLRLSCAASGNIFQPDYMGWYRQAPGKERELVAAIAWGASTYYADSVKGRFTISRDNAKNTVYLQMNSLKPEDTAVYYCAADNVYGYYHDYWGQGTQVTVSS

SEQ ID NO: 7247 - protein, 118 aa, Artificial Sequence
  Chemically Synthesized
QVQLQESGGGLVQAGGSLRLSCAASGTISDFYIMGWYRQAPGKEREFVAAIDYGTTTNYADSVKGRFTISRDNAKNTVYLQMNSLKPEDTAVYYCAAVDTIQPAHTYWGQGTQVTVSS

SEQ ID NO: 7248 - protein, 121 aa, Artificial Sequence
  Chemically Synthesized
QVQLQESGGGLVQAGGSLRLSCAASGSISPVPIMGWYRQAPGKEREFVPVLLLVLIPYADSVKGRFTISRDNAKNTVYLQMNSLKPEDTAVYYCAAQHGQYDTGARAHVYWGQGTQVTVSS

SEQ ID NO: 7249 - protein, 122 aa, Artificial Sequence
  Chemically Synthesized
QVQLQESGGGLVQAGGSLRLSCAASGNISRYGFMGWYRQAPGKEREFVAAIDYGGTTYYADSVKGRFTISRDNAKNTVYLQMNSLKPEDTAVYYCAAVDYRDAALDDDLWYWGQGTQVTVSS

SEQ ID NO: 7250 - protein, 119 aa, Artificial Sequence
  Chemically Synthesized
QVQLQESGGGLVQAGGSLRLSCAASGYIFWYPLMGWYRQAPGKEREFVAAISYGSSTNYADSVKGRFTISRDNAKNTVYLQMNSLKPEDTAVYYCAVGYLSPWYYHYYWGQGTQVTVSS

SEQ ID NO: 7251 - protein, 125 aa, Artificial Sequence
  Chemically Synthesized
QVQLQESGGGLVQAGGSLRLSCAASGYISNAEYMGWYRQAPGKERELVAGIVTVVIPYADSVKGRFTISRDNAKNTVYLQMNSLKPEDTAVYYCAAPYVDEKQAWDYFQTTHAYWGQGTQVTVSS

SEQ ID NO: 7252 - protein, 122 aa, Artificial Sequence
  Chemically Synthesized
QVQLQESGGGLVQAGGSLRLSCAASGSISADQTMGWYRQAPGKERELVAAIAQGGSTNYADSVKGRFTISRDNAKNTVYLQMNSLKPEDTAVYYCAASTGRLAYVGFVFTYWGQGTQVTVSS

SEQ ID NO: 7253 - protein, 122 aa, Artificial Sequence
  Chemically Synthesized
QVQLQESGGGLVQAGGSLRLSCAASGNIFYDPQMGWYRQAPGKEREFVASISDGTSTNYADSVKGRFTISRDNAKNTVYLQMNSLKPEDTAVYYCAAYRSIDIDGQDVHDYWGQGTQVTVSS

SEQ ID NO: 7254 - protein, 111 aa, Artificial Sequence
  Chemically Synthesized
QVQLQESGGGLVQAGGSLRLSCAASGNISAYWTMGWYRQAPGKEREFVAGIGLGASTNYADSVKGRFTISRDNAKNTVYLQMNSLKPEDTAVYYCAAYVYWGQGTQVTVSS

SEQ ID NO: 7255 - protein, 126 aa, Artificial Sequence
  Chemically Synthesized
QVQLQESGGGLVQAGGSLRLSCAASGNISEGQYMGWYRQAPGKEREFVASIGYGGITNYADSVKGRFTISRDNAKNTVYLQMNSLKPEDTAVYYCAVYYYVYVEQTYYGPYRHDYWGQGTQVTVSS

SEQ ID NO: 7256 - protein, 117 aa, Artificial Sequence
  Chemically Synthesized
QVQLQESGGGLVQAGGSLRLSCAASGTIFGVYPMGWYRQAPGKEREFVASIGGGGSTYYADSVKGRFTISRDNAKNTVYLQMNSLKPEDTAVYYCAVDDPSTTFMYWGQGTQVTVSS

SEQ ID NO: 7257 - protein, 118 aa, Artificial Sequence
  Chemically Synthesized
QVQLQESGGGLVQAGGSLRLSCAASGTISPQYKMGWYRQAPGKERELVAAIAVGATTYYADSVKGRFTISRDNAKNTVYLQMNSLKPEDTAVYYCAADLYHTYDHYYWGQGTQVTVSS

SEQ ID NO: 7258 - protein, 118 aa, Artificial Sequence
  Chemically Synthesized
QVQLQESGGGLVQAGGSLRLSCAASGSISVPVYMGWYRQAPGKEREFVASIDDGGNTYYADSVKGRFTISRDNAKNTVYLQMNSLKPEDTAVYYCAVGVHDAIYHAYWGQGTQVTVSS

SEQ ID NO: 7259 - protein, 116 aa, Artificial Sequence
  Chemically Synthesized
QVQLQESGGGLVQAGGSLRLSCAASGNFLLTMGWYRQAPGKEREFVAGITVGASTNYADSVKGRFTISRDNAKNTVYLQMNSLKPEDTAVYYCAAATTGPTLHPYWGQGTQVTVSS

SEQ ID NO: 7260 - protein, 118 aa, Artificial Sequence
  Chemically Synthesized
QVQLQESGGGLVQAGGSLRLSCAASGSISGGGSMGWYRQAPGKERELVATIGEGTITNYADSVKGRFTISRDNAKNTVYLQMNSLKPEDTAVYYCAVTSNFTLYYIYWGQGTQVTVSS

SEQ ID NO: 7261 - protein, 122 aa, Artificial Sequence
  Chemically Synthesized
QVQLQESGGGLVQAGGSLRLSCAASGNISEYNDMGWYRQAPGKEREFVASISYGAITYYADSVKGRFTISRDNAKNTVYLQMNSLKPEDTAVYYCAARSNNWPYASEQHPYWGQGTQVTVSS

SEQ ID NO: 7262 - protein, 118 aa, Artificial Sequence
  Chemically Synthesized
QVQLQESGGGLVQAGGSLRLSCAASGTIFLRYGMGWYRQAPGKERELVATISFGGITNYADSVKGRFTISRDNAKNTVYLQMNSLKPEDTAVYYCAVYIGHRWRYLYWGQGTQVTVSS

SEQ ID NO: 7263 - protein, 118 aa, Artificial Sequence
  Chemically Synthesized
QVQLQESGGGLVQAGGSLRLSCAASGNISGNLDMGWYRQAPGKEREFVATIGVGSTTYYADSVKGRFTISRDNAKNTVYLQMNSLKPEDTAVYYCAAYVAYYTVLLYWGQGTQVTVSS

SEQ ID NO: 7264 - protein, 118 aa, Artificial Sequence
  Chemically Synthesized
QVQLQESGGGLVQAGGSLRLSCAASGYISSPSFMGWYRQAPGKERELVATIGYGANTNYADSVKGRFTISRDNAKNTVYLQMNSLKPEDTAVYYCAVYYSDGYVHYYWGQGTQVTVSS

SEQ ID NO: 7265 - protein, 117 aa, Artificial Sequence
  Chemically Synthesized
QVQLQESGGGLVQAGGSLRLSCAASGTISPRFPMGWYRQAPGKEREFVAGIGYGSITYYADSVKGRFTISRDNAKNTVYLQMNSLKPEDTAVYYCAASLLLVTPFYWGQGTQVTVSS

SEQ ID NO: 7266 - protein, 118 aa, Artificial Sequence
  Chemically Synthesized
QVQLQESGGGLVQAGGSLRLSCAASGTIFGQRYMGWYRQAPGKERELVAAIGLGGSTYYADSVKGRFTISRDNAKNTVYLQMNSLKPEDTAVYYCAANYRNHQLHPYWGQGTQVTVSS

SEQ ID NO: 7267 - protein, 122 aa, Artificial Sequence
  Chemically Synthesized
QVQLQESGGGLVQAGGSLRLSCAASGNISDNGIMGWYRQAPGKERELVASIGYGGITYYADSVKGRFTISRDNAKNTVYLQMNSLKPEDTAVYYCAAYALTVSRYYWYHTYWGQGTQVTVSS

SEQ ID NO: 7268 - protein, 118 aa, Artificial Sequence
  Chemically Synthesized
QVQLQESGGGLVQAGGSLRLSCAASGNIFGAINMGWYRQAPGKERELVAAIGSGGTTYYADSVKGRFTISRDNAKNTVYLQMNSLKPEDTAVYYCAVDYSYRWHFDYWGQGTQVTVSS

SEQ ID NO: 7269 - protein, 116 aa, Artificial Sequence
  Chemically Synthesized
QVQLQESGGGLVQAGGSLRLSCAASGSISYDKSMGWYRQAPGKEREFVYADSVKGRFTISRDNAKNTVYLQMNSLKPEDTAVYYCAVYRSQYYLSTHYYGDLFEYWGQGTQVTVSS

SEQ ID NO: 7270 - protein, 122 aa, Artificial Sequence
  Chemically Synthesized
QVQLQESGGGLVQAGGSLRLSCAASGTISLALYMGWYRQAPGKEREFVASIDPGASTNYADSVKGRFTISRDNAKNTVYLQMNSLKPEDTAVYYCAAVPQSYFWDGGLHDYWGQGTQVTVSS

SEQ ID NO: 7271 - protein, 126 aa, Artificial Sequence
  Chemically Synthesized
QVQLQESGGGLVQAGGSLRLSCAASGTIFWTILMGWYRQAPGKEREFVAAISPGTSTYYADSVKGRFTISRDNAKNTVYLQMNSLKPEDTAVYYCAVGSGYTIRTDLGRLRKYYYWGQGTQVTVSS

SEQ ID NO: 7272 - protein, 125 aa, Artificial Sequence
  Chemically Synthesized
QVQLQESGGGLVQAGGSLRLSCAASGSISAAIEMGWYRQAPGKEREFVAGIGTGGITYYADSVKGRFTISRDNAKNTVYLQMNSLKPEDTAVYYCAVNVRADEYGDVTTTLNMYWGQGTQVTVSS

SEQ ID NO: 7273 - protein, 122 aa, Artificial Sequence
  Chemically Synthesized
QVQLQESGGGLVQAGGSLRLSCAASGNISYGAYMGWYRQAPGKEREFVASIDHGGTTYYADSVKGRFTISRDNAKNTVYLQMNSLKPEDTAVYYCAVDVANADVTGVLYDYWGQGTQVTVSS

SEQ ID NO: 7274 - protein, 118 aa, Artificial Sequence
  Chemically Synthesized
QVQLQESGGGLVQAGGSLRLSCAASGNIFTSTYMGWYRQAPGKEREFVAAIAQGTITNYADSVKGRFTISRDNAKNTVYLQMNSLKPEDTAVYYCAVDAYDYLVHAYWGQGTQVTVSS

SEQ ID NO: 7275 - protein, 118 aa, Artificial Sequence
  Chemically Synthesized
QVQLQESGGGLVQAGGSLRLSCAASGTISTDGTMGWYRQAPGKEREFVAGIGYGSITYYADSVKGRFTISRDNAKNTVYLQMNSLKPEDTAVYYCAVWIDVRTSYGYWGQGTQVTVSS

SEQ ID NO: 7276 - protein, 117 aa, Artificial Sequence
  Chemically Synthesized
QVQLQESGGGLVQAGGSLRLSCAASGSISGRTYMGWYRQAPGKEREFVATIGAGGNTYYADSVKGRFTISRDNAKNTVYLQMNSLKPEDTAVYYCAADGLTTTSIYWGQGTQVTVSS

SEQ ID NO: 7277 - protein, 115 aa, Artificial Sequence
  Chemically Synthesized
QVQLQESGGGLVQAGGSLRLSCAASGTISSRLFMGWYRQAPGKEREFVAGIARGGNTYYADSVKGRFTISRDNAKNTVYLQMNSLKPEDTAVYYCAQPYKRFYYWGQGTQVTVSS

SEQ ID NO: 7278 - protein, 122 aa, Artificial Sequence
  Chemically Synthesized
QVQLQESGGGLVQAGGSLRLSCAASGTIFYLYTMGWYRQAPGKEREFVAAITVGTNTYYADSVKGRFTISRDNAKNTVYLQMNSLKPEDTAVYYCAADAPGQTSQYDYHDYWGQGTQVTVSS

SEQ ID NO: 7279 - protein, 126 aa, Artificial Sequence
  Chemically Synthesized
QVQLQESGGGLVQAGGSLRLSCAASGTIFRVYYMGWYRQAPGKERELVATISVGATTNYADSVKGRFTISRDNAKNTVYLQMNSLKPEDTAVYYCAVWTRYWRSDYYYYPNRHPYWGQGTQVTVSS

SEQ ID NO: 7280 - protein, 121 aa, Artificial Sequence
  Chemically Synthesized
QVQLQESGGGLVQAGGSLRLSCAASGNISKFYMGWYRQAPGKEREFVAGITLGSITNYADSVKGRFTISRDNAKNTVYLQMNSLKPEDTAVYYCAAINSWYDAVWDYHEYWGQGTQVTVSS

SEQ ID NO: 7281 - protein, 125 aa, Artificial Sequence
  Chemically Synthesized
QVQLQESGGGLVQAGGSLRLSCAASGTISAEGYMGWYRQAPGKEREFVAGIDDGTTTYYADSVKGRFTISRDNAKNTVYLQMNSLKPEDTAVYYCAVTKGAADYNTDPPDDLTYWGQGTQVTVSS

SEQ ID NO: 7282 - protein, 120 aa, Artificial Sequence
  Chemically Synthesized
QVQLQESGGGLVQAGGSLRLSCAASGNISRVGIMGWYRQAPGKEREFVATITLGATTNYADSVKGRFTISRDNAKNTVYLQMNSLKPEDTAVYYCAVTYIDVRDGAFGYWGQGTQVTVSS

SEQ ID NO: 7283 - protein, 121 aa, Artificial Sequence
  Chemically Synthesized
QVQLQESGGGLVQAGGSLRLSCAASGTIFADIRMGWYRQAPGKERELVAGIDRGTITYYADSVKGRFTISRDNAKNTVYLQMNSLKPEDTAVYYCAAGLFYPGYDYDLVYWGQGTQVTVSS

SEQ ID NO: 7284 - protein, 118 aa, Artificial Sequence
  Chemically Synthesized
QVQLQESGGGLVQAGGSLRLSCAASGTIFDDGNMGWYRQAPGKEREFVASIGYGATTNYADSVKGRFTISRDNAKNTVYLQMNSLKPEDTAVYYCAAYIAEYYDFPYWGQGTQVTVSS

SEQ ID NO: 7285 - protein, 118 aa, Artificial Sequence
  Chemically Synthesized
QVQLQESGGGLVQAGGSLRLSCAASGYISTAGGMGWYRQAPGKEREFVAAIGDGATTYYADSVKGRFTISRDNAKNTVYLQMNSLKPEDTAVYYCAVYSDLTGYYGYWGQGTQVTVSS

SEQ ID NO: 7286 - protein, 117 aa, Artificial Sequence
  Chemically Synthesized
QVQLQESGGGLVQAGGSLRLSCAASGTISLLGKMGWYRQAPGKERELVATIGFGGSTNYADSVKGRFTISRDNAKNTVYLQMNSLKPEDTAVYYCAADSSTTTTFYWGQGTQVTVSS

SEQ ID NO: 7287 - protein, 126 aa, Artificial Sequence
  Chemically Synthesized
QVQLQESGGGLVQAGGSLRLSCAASGYIFLTSYMGWYRQAPGKEREFVAGIDYGSTTYYADSVKGRFTISRDNAKNTVYLQMNSLKPEDTAVYYCAVVDGEWKQSQWYRYIGHYYWGQGTQVTVSS

SEQ ID NO: 7288 - protein, 118 aa, Artificial Sequence
  Chemically Synthesized
QVQLQESGGGLVQAGGSLRLSCAASGSIFWLPSMGWYRQAPGKERELVAAIDYGGSTNYADSVKGRFTISRDNAKNTVYLQMNSLKPEDTAVYYCAAVRYYYPNFGYWGQGTQVTVSS

SEQ ID NO: 7289 - protein, 118 aa, Artificial Sequence
  Chemically Synthesized
QVQLQESGGGLVQAGGSLRLSCAASGNISPYSSMGWYRQAPGKERELVATINSGTITNYADSVKGRFTISRDNAKNTVYLQMNSLKPEDTAVYYCAANSSGYVDHIYWGQGTQVTVSS

SEQ ID NO: 7290 - protein, 118 aa, Artificial Sequence
  Chemically Synthesized
QVQLQESGGGLVQAGGSLRLSCAASGYIFRYRTMGWYRQAPGKERELVATINPGSSTNYADSVKGRFTISRDNAKNTVYLQMNSLKPEDTAVYYCAASYTARQWHGYWGQGTQVTVSS

SEQ ID NO: 7291 - protein, 116 aa, Artificial Sequence
  Chemically Synthesized
QVQLQESGGGLVQAGGSLRLSCAASGTMGWYRQAPGKEREFVAAIGSGGTTYYADSVKGRFTISRDNAKNTVYLQMNSLKPEDTAVYYCAAYEAADIRYRSRHLYWGQGTQVTVSS

SEQ ID NO: 7292 - protein, 126 aa, Artificial Sequence
  Chemically Synthesized
QVQLQESGGGLVQAGGSLRLSCAASGTISFGTYMGWYRQAPGKERELVATITTGSITYYADSVKGRFTISRDNAKNTVYLQMNSLKPEDTAVYYCAAEFYQTIPSENLPTNIYWYWGQGTQVTVSS

SEQ ID NO: 7293 - protein, 118 aa, Artificial Sequence
  Chemically Synthesized
QVQLQESGGGLVQAGGSLRLSCAASGSIFRRDGMGWYRQAPGKERELVASISAGTTTYYADSVKGRFTISRDNAKNTVYLQMNSLKPEDTAVYYCAAYQRSVDWYPYWGQGTQVTVSS

SEQ ID NO: 7294 - protein, 122 aa, Artificial Sequence
  Chemically Synthesized
QVQLQESGGGLVQAGGSLRLSCAASGTIFRALYMGWYRQAPGKEREFVAGIAFGTTTNYADSVKGRFTISRDNAKNTVYLQMNSLKPEDTAVYYCAANTQGYRDGWFDFNYWGQGTQVTVSS

SEQ ID NO: 7295 - protein, 117 aa, Artificial Sequence
  Chemically Synthesized
QVQLQESGGGLVQAGGSLRLSCAASGYISAPRIMGWYRQAPGKEREFVAAIDAGGTNYADSVKGRFTISRDNAKNTVYLQMNSLKPEDTAVYYCAVAYFRRNALRYWGQGTQVTVSS

SEQ ID NO: 7296 - protein, 118 aa, Artificial Sequence
  Chemically Synthesized
QVQLQESGGGLVQAGGSLRLSCAASGTISYWGDMGWYRQAPGKEREFVAGIGLGTITYYADSVKGRFTISRDNAKNTVYLQMNSLKPEDTAVYYCAAGDRYSSLYSYWGQGTQVTVSS

SEQ ID NO: 7297 - protein, 122 aa, Artificial Sequence
  Chemically Synthesized
QVQLQESGGGLVQAGGSLRLSCAASGTISYDLYMGWYRQAPGKEREFVATINNGTTTNYADSVKGRFTISRDNAKNTVYLQMNSLKPEDTAVYYCALTTTPTALYYDRLSYWGQGTQVTVSS

SEQ ID NO: 7298 - protein, 118 aa, Artificial Sequence
  Chemically Synthesized
QVQLQESGGGLVQAGGSLRLSCAASGTIFSTYTMGWYRQAPGKERELVASITQGASTNYADSVKGRFTISRDNAKNTVYLQMNSLKPEDTAVYYCAVVGGYYYDLAYWGQGTQVTVSS

SEQ ID NO: 7299 - protein, 122 aa, Artificial Sequence
  Chemically Synthesized
QVQLQESGGGLVQAGGSLRLSCAASGNIFVHAYMGWYRQAPGKERELVAAIGYGGNTYYADSVKGRFTISRDNAKNTVYLQMNSLKPEDTAVYYCAAAGWWGYGNRIWHTYWGQGTQVTVSS

SEQ ID NO: 7300 - protein, 126 aa, Artificial Sequence
  Chemically Synthesized
QVQLQESGGGLVQAGGSLRLSCAASGTIFRYGAMGWYRQAPGKERELVAAIGYGSTTYYADSVKGRFTISRDNAKNTVYLQMNSLKPEDTAVYYCAAAYIAGTDAAIYNFYYFYYWGQGTQVTVSS

SEQ ID NO: 7301 - protein, 122 aa, Artificial Sequence
  Chemically Synthesized
QVQLQESGGGLVQAGGSLRLSCAASGSIFGRWDMGWYRQAPGKEREFVATINYGTSTYYADSVKGRFTISRDNAKNTVYLQMNSLKPEDTAVYYCAATGSGYDRSAYYHAYWGQGTQVTVSS

SEQ ID NO: 7302 - protein, 118 aa, Artificial Sequence
  Chemically Synthesized
QVQLQESGGGLVQAGGSLRLSCAASGNISPYRTMGWYRQAPGKEREFVATINGGASTNYADSVKGRFTISRDNAKNTVYLQMNSLKPEDTAVYYCAVYDFTLASLTYWGQGTQVTVSS

SEQ ID NO: 7303 - protein, 118 aa, Artificial Sequence
  Chemically Synthesized
QVQLQESGGGLVQAGGSLRLSCAASGNIFRGYQMGWYRQAPGKEREFVASIADGTTTYYADSVKGRFTISRDNAKNTVYLQMNSLKPEDTAVYYCAVTVKLSTSFEYWGQGTQVTVSS

SEQ ID NO: 7304 - protein, 126 aa, Artificial Sequence
  Chemically Synthesized
QVQLQESGGGLVQAGGSLRLSCAASGYISRYSYMGWYRQAPGKERELVATITRGATTYYADSVKGRFTISRDNAKNTVYLQMNSLKPEDTAVYYCAVSVFTYVPYRIHYVPGLPYWGQGTQVTVSS

SEQ ID NO: 7305 - protein, 122 aa, Artificial Sequence
  Chemically Synthesized
QVQLQESGGGLVQAGGSLRLSCAASGSISGDLNMGWYRQAPGKEREFVATIDYGTTTNYADSVKGRFTISRDNAKNTVYLQMNSLKPEDTAVYYCAATTTAGPYIYPYHYYWGQGTQVTVSS

SEQ ID NO: 7306 - protein, 118 aa, Artificial Sequence
  Chemically Synthesized
QVQLQESGGGLVQAGGSLRLSCAASGNISQSLSMGWYRQAPGKEREFVATIDYGAITYYADSVKGRFTISRDNAKNTVYLQMNSLKPEDTAVYYCAVGIYDLLSYPYWGQGTQVTVSS

SEQ ID NO: 7307 - protein, 122 aa, Artificial Sequence
  Chemically Synthesized
QVQLQESGGGLVQAGGSLRLSCAASGSIFDRGVMGWYRQAPGKERELVAGIAWGSNTYYADSVKGRFTISRDNAKNTVYLQMNSLKPEDTAVYYCAARRGWKLFWYFVHDYWGQGTQVTVSS

SEQ ID NO: 7308 - protein, 122 aa, Artificial Sequence
  Chemically Synthesized
QVQLQESGGGLVQAGGSLRLSCAASGNIFYSFGMGWYRQAPGKERELVASIDYGANTYYADSVKGRFTISRDNAKNTVYLQMNSLKPEDTAVYYCAVYYAEQQGGRSTTMYWGQGTQVTVSS

SEQ ID NO: 7309 - protein, 122 aa, Artificial Sequence
  Chemically Synthesized
QVQLQESGGGLVQAGGSLRLSCAASGNISRRVRMGWYRQAPGKEREFVASIGRGAITNYADSVKGRFTISRDNAKNTVYLQMNSLKPEDTAVYYCAAILYPTYATGQFYAYWGQGTQVTVSS

SEQ ID NO: 7310 - protein, 117 aa, Artificial Sequence
  Chemically Synthesized
QVQLQESGGGLVQAGGSLRLSCAASGTISYRYKMGWYRQAPGKEREFVAIDTGTSTYYADSVKGRFTISRDNAKNTVYLQMNSLKPEDTAVYYCAVRYRTHYGHWYWGQGTQVTVSS

SEQ ID NO: 7311 - protein, 118 aa, Artificial Sequence
  Chemically Synthesized
QVQLQESGGGLVQAGGSLRLSCAASGTIFGRESMGWYRQAPGKERELVAAIARGSSTYYADSVKGRFTISRDNAKNTVYLQMNSLKPEDTAVYYCAAFTRTVLPHYYWGQGTQVTVSS

SEQ ID NO: 7312 - protein, 118 aa, Artificial Sequence
  Chemically Synthesized
QVQLQESGGGLVQAGGSLRLSCAASGNIFTYAYMGWYRQAPGKERELVAGIDRGTITYYADSVKGRFTISRDNAKNTVYLQMNSLKPEDTAVYYCAATYYRYHAYGYWGQGTQVTVSS

SEQ ID NO: 7313 - protein, 118 aa, Artificial Sequence
  Chemically Synthesized
QVQLQESGGGLVQAGGSLRLSCAASGNIFYLIRMGWYRQAPGKERELVATISGGTTTYYADSVKGRFTISRDNAKNTVYLQMNSLKPEDTAVYYCAAAWSWRYYYGYWGQGTQVTVSS

SEQ ID NO: 7314 - protein, 122 aa, Artificial Sequence
  Chemically Synthesized
QVQLQESGGGLVQAGGSLRLSCAASGNIFPTIYMGWYRQAPGKEREFVATIGPGSITYYADSVKGRFTISRDNAKNTVYLQMNSLKPEDTAVYYCAAGYNYVDWIRYYYGYWGQGTQVTVSS

SEQ ID NO: 7315 - protein, 118 aa, Artificial Sequence
  Chemically Synthesized
QVQLQESGGGLVQAGGSLRLSCAASGNISRPLGMGWYRQAPGKERELVATIGVGGSTNYADSVKGRFTISRDNAKNTVYLQMNSLKPEDTAVYYCAVRPAYYAWHEYWGQGTQVTVSS

SEQ ID NO: 7316 - protein, 122 aa, Artificial Sequence
  Chemically Synthesized
QVQLQESGGGLVQAGGSLRLSCAASGTISGWDDMGWYRQAPGKERELVAGIGYGATTYYADSVKGRFTISRDNAKNTVYLQMNSLKPEDTAVYYCAVLRDETDTDSAHHSYWGQGTQVTVSS

SEQ ID NO: 7317 - protein, 122 aa, Artificial Sequence
  Chemically Synthesized
QVQLQESGGGLVQAGGSLRLSCAASGTIFRRIGMGWYRQAPGKERELVAAITRGGTTYYADSVKGRFTISRDNAKNTVYLQMNSLKPEDTAVYYCAVIGNSRQGYYQRFNYWGQGTQVTVSS

SEQ ID NO: 7318 - protein, 122 aa, Artificial Sequence
  Chemically Synthesized
QVQLQESGGGLVQAGGSLRLSCAASGNIFPYYYMGWYRQAPGKEREFVASIGYGAITYYADSVKGRFTISRDNAKNTVYLQMNSLKPEDTAVYYCAADWYWYGDSYRTYWYWGQGTQVTVSS

SEQ ID NO: 7319 - protein, 122 aa, Artificial Sequence
  Chemically Synthesized
QVQLQESGGGLVQAGGSLRLSCAASGTIFDYRHMGWYRQAPGKERELVATIAYGSTTNYADSVKGRFTISRDNAKNTVYLQMNSLKPEDTAVYYCAVLGYGGYDSAYAHTYWGQGTQVTVSS

SEQ ID NO: 7320 - protein, 118 aa, Artificial Sequence
  Chemically Synthesized
QVQLQESGGGLVQAGGSLRLSCAASGYISLYYLMGWYRQAPGKEREFVASISFGSSTYYADSVKGRFTISRDNAKNTVYLQMNSLKPEDTAVYYCAARSLRNKRLRYWGQGTQVTVSS

SEQ ID NO: 7321 - protein, 117 aa, Artificial Sequence
  Chemically Synthesized
QVQLQESGGGLVQAGGSLRLSCAASGTIFRGQYMGWYRQAPGKEREFVATIGNGGITNYADSVKGRFTISRDNAKNTVYLQMNSLKPEDTAVYYCAVWSLCTTVMYWGQGTQVTVSS

SEQ ID NO: 7322 - protein, 118 aa, Artificial Sequence
  Chemically Synthesized
QVQLQESGGGLVQAGGSLRLSCAASGSISATSFMGWYRQAPGKEREFVASIDLGGNTNYADSVKGRFTISRDNAKNTVYLQMNSLKPEDTAVYYCAVGRYYRHGFAYWGQGTQVTVSS

SEQ ID NO: 7323 - protein, 122 aa, Artificial Sequence
  Chemically Synthesized
QVQLQESGGGLVQAGGSLRLSCAASGTISADNYMGWYRQAPGKEREFVATISIGTSTYYADSVKGRFTISRDNAKNTVYLQMNSLKPEDTAVYYCAAYEGVSYPYVYSHYYWGQGTQVTVSS

SEQ ID NO: 7324 - protein, 118 aa, Artificial Sequence
  Chemically Synthesized
QVQLQESGGGLVQAGGSLRLSCAASGYISQSDYMGWYRQAPGKERELVAGIDYGGTTYYADSVKGRFTISRDNAKNTVYLQMNSLKPEDTAVYYCAAFYYYDYILYYWGQGTQVTVSS

SEQ ID NO: 7325 - protein, 121 aa, Artificial Sequence
  Chemically Synthesized
QVQLQESGGGLVQAGGSLRLSCAASGYISAPYDMGWYRQAPGKERELVAAIADGAITYYADSVKGRFTISRDNAKNTVYLQMNSLKPEDTAVYYCAALSDDDLPYQGSIYWGQGTQVTVSS

SEQ ID NO: 7326 - protein, 118 aa, Artificial Sequence
  Chemically Synthesized
QVQLQESGGGLVQAGGSLRLSCAASGTIFVWVYMGWYRQAPGKEREFVASIAYGANTYYADSVKGRFTISRDNAKNTVYLQMNSLKPEDTAVYYCAVYYLENDYYGYWGQGTQVTVSS

SEQ ID NO: 7327 - protein, 118 aa, Artificial Sequence
  Chemically Synthesized
QVQLQESGGGLVQAGGSLRLSCAASGYIFRGANMGWYRQAPGKEREFVAAIAHGGSTYYADSVKGRFTISRDNAKNTVYLQMNSLKPEDTAVYYCAVWSSRGYRHVYWGQGTQVTVSS

SEQ ID NO: 7328 - protein, 118 aa, Artificial Sequence
  Chemically Synthesized
QVQLQESGGGLVQAGGSLRLSCAASGYIFRGGYMGWYRQAPGKEREFVAGINLGATTYYADSVKGRFTISRDNAKNTVYLQMNSLKPEDTAVYYCAASYQYDGYLPYWGQGTQVTVSS

SEQ ID NO: 7329 - protein, 122 aa, Artificial Sequence
  Chemically Synthesized
QVQLQESGGGLVQAGGSLRLSCAASGYISIYGYMGWYRQAPGKERELVAAINSGATTNYADSVKGRFTISRDNAKNTVYLQMNSLKPEDTAVYYCAVGHTFWRYNDAYHIYWGQGTQVTVSS

SEQ ID NO: 7330 - protein, 122 aa, Artificial Sequence
  Chemically Synthesized
QVQLQESGGGLVQAGGSLRLSCAASGNISHYGGMGWYRQAPGKERELVAAITRGANTNYADSVKGRFTISRDNAKNTVYLQMNSLKPEDTAVYYCAAENIISIYFSGSHVYWGQGTQVTVSS

SEQ ID NO: 7331 - protein, 114 aa, Artificial Sequence
  Chemically Synthesized
QVQLQESGGGLVQAGGSLRLSCAASGYISRGASMGWYRQAPGKERELVATIDTGGTTYYADSVKGRFTISRDNAKNTVYLQMNSLKPEDTAVYYCALYGTHYYWGQGTQVTVSS

SEQ ID NO: 7332 - protein, 117 aa, Artificial Sequence
  Chemically Synthesized
QVQLQESGGGLVQAGGSLRLSCAASGSIFLDRGMGWYRQAPGKEREFVASINGGGTTNYADSVKGRFTISRDNAKNTVYLQMNSLKPEDTAVYYCAANTPTFTYPYWGQGTQVTVSS

SEQ ID NO: 7333 - protein, 118 aa, Artificial Sequence
  Chemically Synthesized
QVQLQESGGGLVQAGGSLRLSCAASGNISFARIMGWYRQAPGKERELVAAIDAGGITYYADSVKGRFTISRDNAKNTVYLQMNSLKPEDTAVYYCAVRDYFPYGYRYWGQGTQVTVSS

SEQ ID NO: 7334 - protein, 118 aa, Artificial Sequence
  Chemically Synthesized
QVQLQESGGGLVQAGGSLRLSCAASGTIFRWTNMGWYRQAPGKERELVATITSGANTYYADSVKGRFTISRDNAKNTVYLQMNSLKPEDTAVYYCAAPYLYASSHPYWGQGTQVTVSS

SEQ ID NO: 7335 - protein, 126 aa, Artificial Sequence
  Chemically Synthesized
QVQLQESGGGLVQAGGSLRLSCAASGTISTLLGMGWYRQAPGKERELVAAISAGTNTYYADSVKGRFTISRDNAKNTVYLQMNSLKPEDTAVYYCAVTQEKQQGQQEYRRVDFGYWGQGTQVTVSS

SEQ ID NO: 7336 - protein, 122 aa, Artificial Sequence
  Chemically Synthesized
QVQLQESGGGLVQAGGSLRLSCAASGNISVRVGMGWYRQAPGKERELVASISAGSTTNYADSVKGRFTISRDNAKNTVYLQMNSLKPEDTAVYYCAAGPRPVEREITVHWYWGQGTQVTVSS

SEQ ID NO: 7337 - protein, 121 aa, Artificial Sequence
  Chemically Synthesized
QVQLQESGGGLVQAGGSLRLSCAASGYISAVWYMGWYRQAPGKERELVAAINSVVLPYADSVKGRFTISRDNAKNTVYLQMNSLKPEDTAVYYCAADDRASPAVASALIYWGQGTQVTVSS

SEQ ID NO: 7338 - protein, 125 aa, Artificial Sequence
  Chemically Synthesized
QVQLQESGGGLVQAGGSLRLSCAASGYILLRYMGWYRQAPGKERELVAAITIGSSTYYADSVKGRFTISRDNAKNTVYLQMNSLKPEDTAVYYCAVPNDVVNRIAYDALGGHDYWGQGTQVTVSS

SEQ ID NO: 7339 - protein, 113 aa, Artificial Sequence
  Chemically Synthesized
QVQLQESGGGLVQAGGSLRLSCAASGSISALKYMGWYRQAPGKERELVAGISNGTNTNYADSVKGRFTISRDNAKNTVYLQMNSLKPEDTAVYYCAVVWHDYWGQGTQVTVSS

SEQ ID NO: 7340 - protein, 118 aa, Artificial Sequence
  Chemically Synthesized
QVQLQESGGGLVQAGGSLRLSCAASGTISAVTYMGWYRQAPGKEREFVATIGTGGITNYADSVKGRFTISRDNAKNTVYLQMNSLKPEDTAVYYCAVAWSALAYFVYWGQGTQVTVSS

SEQ ID NO: 7341 - protein, 117 aa, Artificial Sequence
  Chemically Synthesized
QVQLQESGGGLVQAGGSLRLSCAASGNISYDYYMGWYRQAPGKERELVAGIARGSTTNYADSVKGRFTISRDNAKNTVYLQMNSLKPEDTAVYYCAARRVYDYHIYWGQGTQVTVSS

SEQ ID NO: 7342 - protein, 118 aa, Artificial Sequence
  Chemically Synthesized
QVQLQESGGGLVQAGGSLRLSCAASGNISYGIYMGWYRQAPGKERELVAGITKGGTTYYADSVKGRFTISRDNAKNTVYLQMNSLKPEDTAVYYCAVLDYLDKWYVYWGQGTQVTVSS

SEQ ID NO: 7343 - protein, 118 aa, Artificial Sequence
  Chemically Synthesized
QVQLQESGGGLVQAGGSLRLSCAASGYISDTTLMGWYRQAPGKEREFVAGISDGTSTYYADSVKGRFTISRDNAKNTVYLQMNSLKPEDTAVYYCAVDVYLGDTLYYWGQGTQVTVSS

SEQ ID NO: 7344 - protein, 118 aa, Artificial Sequence
  Chemically Synthesized
QVQLQESGGGLVQAGGSLRLSCAASGNIFLRYYMGWYRQAPGKERELVATIAAGATTYYADSVKGRFTISRDNAKNTVYLQMNSLKPEDTAVYYCAAVARQDGIYGYWGQGTQVTVSS

SEQ ID NO: 7345 - protein, 118 aa, Artificial Sequence
  Chemically Synthesized
QVQLQESGGGLVQAGGSLRLSCAASGTIFWVDVMGWYRQAPGKERELVASIDDGTNTNYADSVKGRFTISRDNAKNTVYLQMNSLKPEDTAVYYCAAVDYSARAFDYWGQGTQVTVSS

SEQ ID NO: 7346 - protein, 126 aa, Artificial Sequence
  Chemically Synthesized
QVQLQESGGGLVQAGGSLRLSCAASGSISYYSTMGWYRQAPGKERELVASISVGGTTNYADSVKGRFTISRDNAKNTVYLQMNSLKPEDTAVYYCAAYLKPYAWSIGDTDTPLKYWGQGTQVTVSS

SEQ ID NO: 7347 - protein, 122 aa, Artificial Sequence
  Chemically Synthesized
QVQLQESGGGLVQAGGSLRLSCAASGSIFSGVFMGWYRQAPGKEREFVASINVGTITYYADSVKGRFTISRDNAKNTVYLQMNSLKPEDTAVYYCAVGRVSRLYYVPTHEYWGQGTQVTVSS

SEQ ID NO: 7348 - protein, 118 aa, Artificial Sequence
  Chemically Synthesized
QVQLQESGGGLVQAGGSLRLSCAASGYIFLHIPMGWYRQAPGKERELVATIASGGTTYYADSVKGRFTISRDNAKNTVYLQMNSLKPEDTAVYYCAVYRWNRLLHAYWGQGTQVTVSS

SEQ ID NO: 7349 - protein, 125 aa, Artificial Sequence
  Chemically Synthesized
QVQLQESGGGLVQAGGSLRLSCAASGTIFEYYYMGWYRQAPGKERELVATISLGTSTYYADSVKGRFTISRDNAKNTVYLQMNSLKPEDTAVYYCAAYSGLVTTTCSLFLLSMYWGQGTQVTVSS

SEQ ID NO: 7350 - protein, 117 aa, Artificial Sequence
  Chemically Synthesized
QVQLQESGGGLVQAGGSLRLSCAASGTISRTDMGWYRQAPGKEREFVASITPGGNTNYADSVKGRFTISRDNAKNTVYLQMNSLKPEDTAVYYCAAQHVTLDGHYYWGQGTQVTVSS

SEQ ID NO: 7351 - protein, 118 aa, Artificial Sequence
  Chemically Synthesized
QVQLQESGGGLVQAGGSLRLSCAASGYIFRGDFMGWYRQAPGKERELVASISEGGNTYYADSVKGRFTISRDNAKNTVYLQMNSLKPEDTAVYYCAVPADRGYVHQYWGQGTQVTVSS

SEQ ID NO: 7352 - protein, 126 aa, Artificial Sequence
  Chemically Synthesized
QVQLQESGGGLVQAGGSLRLSCAASGSISLYPTMGWYRQAPGKERELVASINEGGITYYADSVKGRFTISRDNAKNTVYLQMNSLKPEDTAVYYCAAVTAIYQYIYWYTGVGYDYWGQGTQVTVSS

SEQ ID NO: 7353 - protein, 117 aa, Artificial Sequence
  Chemically Synthesized
QVQLQESGGGLVQAGGSLRLSCAASGNIFSWVMGWYRQAPGKEREFVAGINNGSSTNYADSVKGRFTISRDNAKNTVYLQMNSLKPEDTAVYYCAAYPLRDDPLSYWGQGTQVTVSS

SEQ ID NO: 7354 - protein, 117 aa, Artificial Sequence
  Chemically Synthesized
QVQLQESGGGLVQAGGSLRLSCAASGSISVRSMGWYRQAPGKEREFVAGITLGGNTNYADSVKGRFTISRDNAKNTVYLQMNSLKPEDTAVYYCAARDAYLLDYSYWGQGTQVTVSS

SEQ ID NO: 7355 - protein, 118 aa, Artificial Sequence
  Chemically Synthesized
QVQLQESGGGLVQAGGSLRLSCAASGSISKDWGMGWYRQAPGKEREFVAGIGIGTITNYADSVKGRFTISRDNAKNTVYLQMNSLKPEDTAVYYCAVANIPRYGHAYWGQGTQVTVSS

SEQ ID NO: 7356 - protein, 113 aa, Artificial Sequence
  Chemically Synthesized
QVQLQESGGGLVQAGGSLRLSCAASGTISVLFDMGWYRQAPGKEREFVASIGNGANTYYADSVKGRFTISRDNAKNTVYLQMNSLKPEDTAVYYCAVGSYGYWGQGTQVTVSS

SEQ ID NO: 7357 - protein, 121 aa, Artificial Sequence
  Chemically Synthesized
QVQLQESGGGLVQAGGSLRLSCAASGNISVEYVMGWYRQAPGKERELVASIAYGANTNYADSVKGRFTISRDNAKNTVYLQMNSLKPEDTAVYYCAANPRTDEVGGRHYYWGQGTQVTVSS

SEQ ID NO: 7358 - protein, 125 aa, Artificial Sequence
  Chemically Synthesized
QVQLQESGGGLVQAGGSLRLSCAASGSIFDSRGMGWYRQAPGKEREFVAGITFGGSTYYADSVKGRFTISRDNAKNTVYLQMNSLKPEDTAVYYCAVDYFYGDVPGTRQLPFAYWGQGTQVTVSS

SEQ ID NO: 7359 - protein, 117 aa, Artificial Sequence
  Chemically Synthesized
QVQLQESGGGLVQAGGSLRLSCAASGTIFTGQSMGWYRQAPGKERELVATIDGGSTYYADSVKGRFTISRDNAKNTVYLQMNSLKPEDTAVYYCAVVYSPYYGYGYWGQGTQVTVSS

SEQ ID NO: 7360 - protein, 122 aa, Artificial Sequence
  Chemically Synthesized
QVQLQESGGGLVQAGGSLRLSCAASGTIFYAFAMGWYRQAPGKERELVAAIDRGASTYYADSVKGRFTISRDNAKNTVYLQMNSLKPEDTAVYYCAVDAPWPLYILYTHVYWGQGTQVTVSS

SEQ ID NO: 7361 - protein, 122 aa, Artificial Sequence
  Chemically Synthesized
QVQLQESGGGLVQAGGSLRLSCAASGSIFQYSLMGWYRQAPGKERELVAGITRGTTTNYADSVKGRFTISRDNAKNTVYLQMNSLKPEDTAVYYCAVRASWLPRYPRAYAYWGQGTQVTVSS

SEQ ID NO: 7362 - protein, 122 aa, Artificial Sequence
  Chemically Synthesized
QVQLQESGGGLVQAGGSLRLSCAASGYISVTSDMGWYRQAPGKEREFVAGIDRGANTYYADSVKGRFTISRDNAKNTVYLQMNSLKPEDTAVYYCAAPLAYGFDTYSGHGYWGQGTQVTVSS

SEQ ID NO: 7363 - protein, 126 aa, Artificial Sequence
  Chemically Synthesized
QVQLQESGGGLVQAGGSLRLSCAASGTISVSSNMGWYRQAPGKERELVAAINAGSSTNYADSVKGRFTISRDNAKNTVYLQMNSLKPEDTAVYYCAVDGTTNELQKRDEVGGLGYWGQGTQVTVSS

SEQ ID NO: 7364 - protein, 118 aa, Artificial Sequence
  Chemically Synthesized
QVQLQESGGGLVQAGGSLRLSCAASGYIFYYYFMGWYRQAPGKERELVATISAGGTTNYADSVKGRFTISRDNAKNTVYLQMNSLKPEDTAVYYCAVGQRHPSYHRYWGQGTQVTVSS

SEQ ID NO: 7365 - protein, 122 aa, Artificial Sequence
  Chemically Synthesized
QVQLQESGGGLVQAGGSLRLSCAASGYIFTAYYMGWYRQAPGKEREFVATITAGSNTYYADSVKGRFTISRDNAKNTVYLQMNSLKPEDTAVYYCAAGAAWPYSGPSIHQYWGQGTQVTVSS

SEQ ID NO: 7366 - protein, 118 aa, Artificial Sequence
  Chemically Synthesized
QVQLQESGGGLVQAGGSLRLSCAASGNISDSPVMGWYRQAPGKEREFVASIANGTTTYYADSVKGRFTISRDNAKNTVYLQMNSLKPEDTAVYYCAAEEYVAGYLLYWGQGTQVTVSS

SEQ ID NO: 7367 - protein, 118 aa, Artificial Sequence
  Chemically Synthesized
QVQLQESGGGLVQAGGSLRLSCAASGTISDQNKMGWYRQAPGKERELVATIGDGATTNYADSVKGRFTISRDNAKNTVYLQMNSLKPEDTAVYYCAVKVDHVDLYTYWGQGTQVTVSS

SEQ ID NO: 7368 - protein, 118 aa, Artificial Sequence
  Chemically Synthesized
QVQLQESGGGLVQAGGSLRLSCAASGNISDSLGMGWYRQAPGKERELVAAISYGTTTYYADSVKGRFTISRDNAKNTVYLQMNSLKPEDTAVYYCAAHISDTGDYRYWGQGTQVTVSS

SEQ ID NO: 7369 - protein, 118 aa, Artificial Sequence
  Chemically Synthesized
QVQLQESGGGLVQAGGSLRLSCAASGSISYRNCMGWYRQAPGKERELVAAIGYGANTNYADSVKGRFTISRDNAKNTVYLQMNSLKPEDTAVYYCAVTPGDPLYHYYWGQGTQVTVSS

SEQ ID NO: 7370 - protein, 118 aa, Artificial Sequence
  Chemically Synthesized
QVQLQESGGGLVQAGGSLRLSCAASGYISPDDVMGWYRQAPGKEREFVAAINWGGNTYYADSVKGRFTISRDNAKNTVYLQMNSLKPEDTAVYYCAVTWAFIGLFPYWGQGTQVTVSS

SEQ ID NO: 7371 - protein, 108 aa, Artificial Sequence
  Chemically Synthesized
QVQLQESGGGLVQAGGSLRLSCAASGNISIVDYMGWYRQAPGKEREFDGGTNTYYADSVKGRFTISRDNAKNTVYLQMNSLKPEDTAVYYCAAVHIYWGQGTQVTVSS

SEQ ID NO: 7372 - protein, 118 aa, Artificial Sequence
  Chemically Synthesized
QVQLQESGGGLVQAGGSLRLSCAASGNIFPVSVMGWYRQAPGKEREFVASIGYGGTTYYADSVKGRFTISRDNAKNTVYLQMNSLKPEDTAVYYCAVRVWRYYRLSYWGQGTQVTVSS

SEQ ID NO: 7373 - protein, 126 aa, Artificial Sequence
  Chemically Synthesized
QVQLQESGGGLVQAGGSLRLSCAASGTIFLDHVMGWYRQAPGKERELVAAISTGGSTNYADSVKGRFTISRDNAKNTVYLQMNSLKPEDTAVYYCAASVAYDPFPGGYRGYELAYWGQGTQVTVSS

SEQ ID NO: 7374 - protein, 119 aa, Artificial Sequence
  Chemically Synthesized
QVQLQESGGGLVQAGGSLRLSCAASGNIFSGYIMGWYRQAPGKEREFVAAIGQGGTITYYADSVKGRFTISRDNAKNTVYLQMNSLKPEDTAVYYCAVYEPKGGKFRYWGQGTQVTVSS

SEQ ID NO: 7375 - protein, 126 aa, Artificial Sequence
  Chemically Synthesized
QVQLQESGGGLVQAGGSLRLSCAASGSISGITYMGWYRQAPGKERELVATISHGANTYYADSVKGRFTISRDNAKNTVYLQMNSLKPEDTAVYYCAVVKNLRYPSASGSDYLFPYWGQGTQVTVSS

SEQ ID NO: 7376 - protein, 124 aa, Artificial Sequence
  Chemically Synthesized
QVQLQESGGGLVQAGGSLRLSCAASGSISYLRWMGWYRQAPGKEREFVASIGNGSSTNYADSVKGRFTISRDNAKNTVYLQMNSLKPEDTAVYYCAVGDDNTIKSYYGRYHDYWGQGTQVTVSS

SEQ ID NO: 7377 - protein, 118 aa, Artificial Sequence
  Chemically Synthesized
QVQLQESGGGLVQAGGSLRLSCAASGYISAVGVMGWYRQAPGKERELVASIAAGTITYYADSVKGRFTISRDNAKNTVYLQMNSLKPEDTAVYYCAVYYVRWWRHGYWGQGTQVTVSS

SEQ ID NO: 7378 - protein, 109 aa, Artificial Sequence
  Chemically Synthesized
QVQLQESGGGLVQAGGSLRLSCAASGSISPDDYMGWYRQAPGKEREFVAAIGPGGTTYYADSVKGRFTISRDNAKNTVYLQMNSLKPEDTAVYYCAAYWGQGTQVTVSS

SEQ ID NO: 7379 - protein, 122 aa, Artificial Sequence
  Chemically Synthesized
QVQLQESGGGLVQAGGSLRLSCAASGSIFAGLIMGWYRQAPGKERELVATINRGASTYYADSVKGRFTISRDNAKNTVYLQMNSLKPEDTAVYYCAVHGYGYTTYASAHVYWGQGTQVTVSS

SEQ ID NO: 7380 - protein, 118 aa, Artificial Sequence
  Chemically Synthesized
QVQLQESGGGLVQAGGSLRLSCAASGYIFLWGNMGWYRQAPGKEREFVATISWGTITYYADSVKGRFTISRDNAKNTVYLQMNSLKPEDTAVYYCAAGDSYYRYHTYWGQGTQVTVSS

SEQ ID NO: 7381 - protein, 118 aa, Artificial Sequence
  Chemically Synthesized
QVQLQESGGGLVQAGGSLRLSCAASGTISVYYFMGWYRQAPGKEREFVATISAGAITNYADSVKGRFTISRDNAKNTVYLQMNSLKPEDTAVYYCAVYQDRYAPFGYWGQGTQVTVSS

SEQ ID NO: 7382 - protein, 122 aa, Artificial Sequence
  Chemically Synthesized
QVQLQESGGGLVQAGGSLRLSCAASGTISYLFYMGWYRQAPGKERELVASIAPGTITNYADSVKGRFTISRDNAKNTVYLQMNSLKPEDTAVYYCAARYLLDLRRSVYHYYWGQGTQVTVSS

SEQ ID NO: 7383 - protein, 118 aa, Artificial Sequence
  Chemically Synthesized
QVQLQESGGGLVQAGGSLRLSCAASGSIFYKHYMGWYRQAPGKERELVAAIGAGTITNYADSVKGRFTISRDNAKNTVYLQMNSLKPEDTAVYYCAVVAAYQTDYFYWGQGTQVTVSS

SEQ ID NO: 7384 - protein, 122 aa, Artificial Sequence
  Chemically Synthesized
QVQLQESGGGLVQAGGSLRLSCAASGYIFRYIYMGWYRQAPGKEREFVAGIDWGTSTNYADSVKGRFTISRDNAKNTVYLQMNSLKPEDTAVYYCAVYSREPSGIYPGHVYWGQGTQVTVSS

SEQ ID NO: 7385 - protein, 115 aa, Artificial Sequence
  Chemically Synthesized
QVQLQESGGGLVQAGGSLRLSCAASGYISYGNMGWYRQAPGKERELPVLLTVLIPYADSVKGRFTISRDNAKNTVYLQMNSLKPEDTAVYYCAAFAYRHVFHWYWGQGTQVTVSS

SEQ ID NO: 7386 - protein, 126 aa, Artificial Sequence
  Chemically Synthesized
QVQLQESGGGLVQAGGSLRLSCAASGSIFYNQVMGWYRQAPGKERELVAAITPGANTNYADSVKGRFTISRDNAKNTVYLQMNSLKPEDTAVYYCAVYAHLYGYPRDADYLHHGYWGQGTQVTVSS

SEQ ID NO: 7387 - protein, 118 aa, Artificial Sequence
  Chemically Synthesized
QVQLQESGGGLVQAGGSLRLSCAASGTISKDAGMGWYRQAPGKERELVATITGGANTYYADSVKGRFTISRDNAKNTVYLQMNSLKPEDTAVYYCAVGRNGGPAFAYWGQGTQVTVSS

SEQ ID NO: 7388 - protein, 118 aa, Artificial Sequence
  Chemically Synthesized
QVQLQESGGGLVQAGGSLRLSCAASGYISQSYDMGWYRQAPGKERELVAGIALGTTTNYADSVKGRFTISRDNAKNTVYLQMNSLKPEDTAVYYCAVVITRDDLYYYWGQGTQVTVSS

SEQ ID NO: 7389 - protein, 125 aa, Artificial Sequence
  Chemically Synthesized
QVQLQESGGGLVQAGGSLRLSCAASGSIFIGDAMGWYRQAPGKERELVAAITFGSTTNYADSVKGRFTISRDNAKNTVYLQMNSLKPEDTAVYYCAVSVTVITLLTSLSNLRFYWGQGTQVTVSS

SEQ ID NO: 7390 - protein, 117 aa, Artificial Sequence
  Chemically Synthesized
QVQLQESGGGLVQAGGSLRLSCAASGNIFYPDDMGWYRQAPGKEREFVASINSGSSTYYADSVKGRFTISRDNAKNTVYLQMNSLKPEDTAVYYCAVDSVSCLSIYWGQGTQVTVSS

SEQ ID NO: 7391 - protein, 118 aa, Artificial Sequence
  Chemically Synthesized
QVQLQESGGGLVQAGGSLRLSCAASGSISWSSDMGWYRQAPGKEREFVATIDGGATTNYADSVKGRFTISRDNAKNTVYLQMNSLKPEDTAVYYCAVAWWTDAYHGYWGQGTQVTVSS

SEQ ID NO: 7392 - protein, 124 aa, Artificial Sequence
  Chemically Synthesized
QVQLQESGGGLVQAGGSLRLSCAASGSISPSTMGWYRQAPGKERELVATINYGSITYYADSVKGRFTISRDNAKNTVYLQMNSLKPEDTAVYYCAVQGDASWDRDRYSDDLTYWGQGTQVTVSS

SEQ ID NO: 7393 - protein, 119 aa, Artificial Sequence
  Chemically Synthesized
QVQLQESGGGLVQAGGSLRLSCAASGTIFGTRAMGWYRQAPGKERELVATISQGGNTYYADSVKGRFTISRDNAKNTVYLQMNSLKPEDTAVYYCAVDGGGWDTTHGYWGQGTQVTVSS

SEQ ID NO: 7394 - protein, 126 aa, Artificial Sequence
  Chemically Synthesized
QVQLQESGGGLVQAGGSLRLSCAASGNISGPSRMGWYRQAPGKERELVAAIDYGSTTYYADSVKGRFTISRDNAKNTVYLQMNSLKPEDTAVYYCAVGYYRRVWYAYQYNYRHQYWGQGTQVTVSS

SEQ ID NO: 7395 - protein, 118 aa, Artificial Sequence
  Chemically Synthesized
QVQLQESGGGLVQAGGSLRLSCAASGTISSYHDMGWYRQAPGKERELVATIAYGGNTYYADSVKGRFTISRDNAKNTVYLQMNSLKPEDTAVYYCAAYAGRYGAYYYWGQGTQVTVSS

SEQ ID NO: 7396 - protein, 122 aa, Artificial Sequence
  Chemically Synthesized
QVQLQESGGGLVQAGGSLRLSCAASGNIFDYAYMGWYRQAPGKEREFVASIAVGGTTYYADSVKGRFTISRDNAKNTVYLQMNSLKPEDTAVYYCAANNQGSNYRWYYFSYWGQGTQVTVSS

SEQ ID NO: 7397 - protein, 118 aa, Artificial Sequence
  Chemically Synthesized
QVQLQESGGGLVQAGGSLRLSCAASGSIFATYKMGWYRQAPGKEREFVAGIGKGGTTNYADSVKGRFTISRDNAKNTVYLQMNSLKPEDTAVYYCAASDRRRPYFDYWGQGTQVTVSS

SEQ ID NO: 7398 - protein, 111 aa, Artificial Sequence
  Chemically Synthesized
QVQLQESGGGLVQAGGSLRLSCAASGTIFPYYYMGWYRQAPGKERELVATIAFGAITNYADSVKGRFTISRDNAKNTVYLQMNSLKPEDTAVYYCAVRYYWGQGTQVTVSS

SEQ ID NO: 7399 - protein, 119 aa, Artificial Sequence
  Chemically Synthesized
QVQLQESGGGLVQAGGSLRLSCAASGNISGYAPMGWYRQAPGKERELVAAITDQGANTNYADSVKGRFTISRDNAKNTVYLQMNSLKPEDTAVYYCAAWRSYLELLVYWGQGTQVTVSS

SEQ ID NO: 7400 - protein, 126 aa, Artificial Sequence
  Chemically Synthesized
QVQLQESGGGLVQAGGSLRLSCAASGTISPYTAMGWYRQAPGKEREFVATIAGGSTTNYADSVKGRFTISRDNAKNTVYLQMNSLKPEDTAVYYCAAYYNLDYPYPYGVVAYYDYWGQGTQVTVSS

SEQ ID NO: 7401 - protein, 118 aa, Artificial Sequence
  Chemically Synthesized
QVQLQESGGGLVQAGGSLRLSCAASGNIFISYWMGWYRQAPGKEREFVATIDRGGITNYADSVKGRFTISRDNAKNTVYLQMNSLKPEDTAVYYCAAGSRADGYFSYWGQGTQVTVSS

SEQ ID NO: 7402 - protein, 122 aa, Artificial Sequence
  Chemically Synthesized
QVQLQESGGGLVQAGGSLRLSCAASGYISTSDIMGWYRQAPGKERELVATIALGANTNYADSVKGRFTISRDNAKNTVYLQMNSLKPEDTAVYYCAAYYAGTLGTQDELNYWGQGTQVTVSS

SEQ ID NO: 7403 - protein, 121 aa, Artificial Sequence
  Chemically Synthesized
QVQLQESGGGLVQAGGSLRLSCAASGYISAGEGMGWYRQAPGKERELVAAIGQGASTNYADSVKGRFTISRDNAKNTVYLQMNSLKPEDTAVYYCAASGTTTVVTTCTMYWGQGTQVTVSS

SEQ ID NO: 7404 - protein, 115 aa, Artificial Sequence
  Chemically Synthesized
QVQLQESGGGLVQAGGSLRLSCAASGYISTDGDMGWYRQAPGKEREFVAANYADSVKGRFTISRDNAKNTVYLQMNSLKPEDTAVYYCAVSDRDGYRLADQYRYWGQGTQVTVSS

SEQ ID NO: 7405 - protein, 122 aa, Artificial Sequence
  Chemically Synthesized
QVQLQESGGGLVQAGGSLRLSCAASGNISTGPGMGWYRQAPGKEREFVAAINPGGTTNYADSVKGRFTISRDNAKNTVYLQMNSLKPEDTAVYYCAVAGNVVWPDHGPHDYWGQGTQVTVSS

SEQ ID NO: 7406 - protein, 118 aa, Artificial Sequence
  Chemically Synthesized
QVQLQESGGGLVQAGGSLRLSCAASGSISQWTLMGWYRQAPGKERELVATIDPGSNTYYADSVKGRFTISRDNAKNTVYLQMNSLKPEDTAVYYCAVPGEFDDIHSYWGQGTQVTVSS

SEQ ID NO: 7407 - protein, 118 aa, Artificial Sequence
  Chemically Synthesized
QVQLQESGGGLVQAGGSLRLSCAASGTIFSYYTMGWYRQAPGKEREFVASISYGTSTNYADSVKGRFTISRDNAKNTVYLQMNSLKPEDTAVYYCAARGKRGGVHSYWGQGTQVTVSS

SEQ ID NO: 7408 - protein, 118 aa, Artificial Sequence
  Chemically Synthesized
QVQLQESGGGLVQAGGSLRLSCAASGYISLGNTMGWYRQAPGKEREFVASINDGGTTNYADSVKGRFTISRDNAKNTVYLQMNSLKPEDTAVYYCAADGFTLEPYYYWGQGTQVTVSS

SEQ ID NO: 7409 - protein, 118 aa, Artificial Sequence
  Chemically Synthesized
QVQLQESGGGLVQAGGSLRLSCAASGNISNRTLMGWYRQAPGKERELVASITFGGITYYADSVKGRFTISRDNAKNTVYLQMNSLKPEDTAVYYCAVDWSAYYNLYYWGQGTQVTVSS

SEQ ID NO: 7410 - protein, 118 aa, Artificial Sequence
  Chemically Synthesized
QVQLQESGGGLVQAGGSLRLSCAASGSIFSDLYMGWYRQAPGKEREFVAGIAWGTITYYADSVKGRFTISRDNAKNTVYLQMNSLKPEDTAVYYCAAFLDYGTGHTYWGQGTQVTVSS

SEQ ID NO: 7411 - protein, 118 aa, Artificial Sequence
  Chemically Synthesized
QVQLQESGGGLVQAGGSLRLSCAASGYISYRYSMGWYRQAPGKEREFVATIDYGTTTYYADSVKGRFTISRDNAKNTVYLQMNSLKPEDTAVYYCAVYYISDGAHYYWGQGTQVTVSS

SEQ ID NO: 7412 - protein, 118 aa, Artificial Sequence
  Chemically Synthesized
QVQLQESGGGLVQAGGSLRLSCAASGSIFQTDRMGWYRQAPGKERELVATITFGASTNYADSVKGRFTISRDNAKNTVYLQMNSLKPEDTAVYYCAVDYTTSPYYDYWGQGTQVTVSS

SEQ ID NO: 7413 - protein, 121 aa, Artificial Sequence
  Chemically Synthesized
QVQLQESGGGLVQAGGSLRLSCAASGNIFDSGRMGWYRQAPGKERELVATIGAGGSTNYADSVKGRFTISRDNAKNTVYLQMNSLKPEDTAVYYCAVAGRYNYESLTSIYWGQGTQVTVSS

SEQ ID NO: 7414 - protein, 118 aa, Artificial Sequence
  Chemically Synthesized
QVQLQESGGGLVQAGGSLRLSCAASGNIFGDKYMGWYRQAPGKEREFVAAISPGAITNYADSVKGRFTISRDNAKNTVYLQMNSLKPEDTAVYYCAVWSYGQYTYDYWGQGTQVTVSS

SEQ ID NO: 7415 - protein, 118 aa, Artificial Sequence
  Chemically Synthesized
QVQLQESGGGLVQAGGSLRLSCAASGTISVRRYMGWYRQAPGKERELVAAIAYGSTTNYADSVKGRFTISRDNAKNTVYLQMNSLKPEDTAVYYCAVELWLSSPHDYWGQGTQVTVSS

SEQ ID NO: 7416 - protein, 126 aa, Artificial Sequence
  Chemically Synthesized
QVQLQESGGGLVQAGGSLRLSCAASGYISYAYNMGWYRQAPGKERELVAGIGVGTTTNYADSVKGRFTISRDNAKNTVYLQMNSLKPEDTAVYYCAAVKSDISRGVVAEYVYHPYWGQGTQVTVSS

SEQ ID NO: 7417 - protein, 118 aa, Artificial Sequence
  Chemically Synthesized
QVQLQESGGGLVQAGGSLRLSCAASGYISRPYYMGWYRQAPGKEREFVATINTGGNTNYADSVKGRFTISRDNAKNTVYLQMNSLKPEDTAVYYCAAGAGYLQYLDYWGQGTQVTVSS

SEQ ID NO: 7418 - protein, 122 aa, Artificial Sequence
  Chemically Synthesized
QVQLQESGGGLVQAGGSLRLSCAASGNISGTALMGWYRQAPGKERELVAAISEGSITYYADSVKGRFTISRDNAKNTVYLQMNSLKPEDTAVYYCAAGYQYYVHFKRVHDYWGQGTQVTVSS

SEQ ID NO: 7419 - protein, 118 aa, Artificial Sequence
  Chemically Synthesized
QVQLQESGGGLVQAGGSLRLSCAASGYIFPNAYMGWYRQAPGKEREFVATIGPGATTNYADSVKGRFTISRDNAKNTVYLQMNSLKPEDTAVYYCAVPYSTSKSHTYWGQGTQVTVSS

SEQ ID NO: 7420 - protein, 113 aa, Artificial Sequence
  Chemically Synthesized
QVQLQESGGGLVQAGGSLRLSCAASGNISSLGVMGWYRQAPGKERELVAGIASGATTYYADSVKGRFTISRDNAKNTVYLQMNSLKPEDTAVYYCAAHYFDYWGQGTQVTVSS

SEQ ID NO: 7421 - protein, 122 aa, Artificial Sequence
  Chemically Synthesized
QVQLQESGGGLVQAGGSLRLSCAASGSIFGAGTMGWYRQAPGKEREFVASISAGTNTNYADSVKGRFTISRDNAKNTVYLQMNSLKPEDTAVYYCAATTYPSYPDDLDYVYWGQGTQVTVSS

SEQ ID NO: 7422 - protein, 118 aa, Artificial Sequence
  Chemically Synthesized
QVQLQESGGGLVQAGGSLRLSCAASGTISGSEGMGWYRQAPGKERELVASISSGSTTYYADSVKGRFTISRDNAKNTVYLQMNSLKPEDTAVYYCAADFPFTTTYRYWGQGTQVTVSS

SEQ ID NO: 7423 - protein, 118 aa, Artificial Sequence
  Chemically Synthesized
QVQLQESGGGLVQAGGSLRLSCAASGTISPQRYMGWYRQAPGKEREFVATIGVGGTTYYADSVKGRFTISRDNAKNTVYLQMNSLKPEDTAVYYCAAYDQPYRHHSYWGQGTQVTVSS

SEQ ID NO: 7424 - protein, 117 aa, Artificial Sequence
  Chemically Synthesized
QVQLQESGGGLVQAGGSLRLSCAASGNISFSGHMGWYRQAPGKERELVASISSGGTTNYADSVKGRFTISRDNAKNTVYLQMNSLKPEDTAVYYCAVTLVTLVLMYWGQGTQVTVSS

SEQ ID NO: 7425 - protein, 120 aa, Artificial Sequence
  Chemically Synthesized
QVQLQESGGGLVQAGGSLRLSCAASGNISQDVAMGWYRQAPGKEREFVAGITGGGNTYYADSVKGRFTISRDNAKNTVYLQMNSLKPEDTAVYYCAVSGLPDRDYPHTYWGQGTQVTVSS

SEQ ID NO: 7426 - protein, 118 aa, Artificial Sequence
  Chemically Synthesized
QVQLQESGGGLVQAGGSLRLSCAASGNIFVDDAMGWYRQAPGKEREFVAAIASGGITNYADSVKGRFTISRDNAKNTVYLQMNSLKPEDTAVYYCAVSQGVYRKFTYWGQGTQVTVSS

SEQ ID NO: 7427 - protein, 117 aa, Artificial Sequence
  Chemically Synthesized
QVQLQESGGGLVQAGGSLRLSCAASGTISYGYQMGWYRQAPGKEREFVASIASGGNTNYADSVKGRFTISRDNAKNTVYLQMNSLKPEDTAVYYCAAWSKSAWDHYWGQGTQVTVSS

SEQ ID NO: 7428 - protein, 118 aa, Artificial Sequence
  Chemically Synthesized
QVQLQESGGGLVQAGGSLRLSCAASGNIFDAAVMGWYRQAPGKEREFVAGIGWGSTTYYADSVKGRFTISRDNAKNTVYLQMNSLKPEDTAVYYCAAEDRRSGRFGYWGQGTQVTVSS

SEQ ID NO: 7429 - protein, 122 aa, Artificial Sequence
  Chemically Synthesized
QVQLQESGGGLVQAGGSLRLSCAASGNISHAGLMGWYRQAPGKEREFVAGIGRGATTYYADSVKGRFTISRDNAKNTVYLQMNSLKPEDTAVYYCAADGAYTASTSEGYVYWGQGTQVTVSS

SEQ ID NO: 7430 - protein, 118 aa, Artificial Sequence
  Chemically Synthesized
QVQLQESGGGLVQAGGSLRLSCAASGTIFRYDVMGWYRQAPGKERELVASINGGATTYYADSVKGRFTISRDNAKNTVYLQMNSLKPEDTAVYYCAAYYLRHPRLIYWGQGTQVTVSS

SEQ ID NO: 7431 - protein, 114 aa, Artificial Sequence
  Chemically Synthesized
QVQLQESGGGLVQAGGSLRLSCAASGTISGHADMGWYRQAPGKEREFVATIDGGGTTYYADSVKGRFTISRDNAKNTVYLQMNSLKPEDTAVYYCAASDGYAYWGQGTQVTVSS

SEQ ID NO: 7432 - protein, 114 aa, Artificial Sequence
  Chemically Synthesized
QVQLQESGGGLVQAGGSLRLSCAASGSISHKQFMGWYRQAPGKERELVAGINVGSTTNYADSVKGRFTISRDNAKNTVYLQMNSLKPEDTAVYYCAVILYQNYWGQGTQVTVSS

SEQ ID NO: 7433 - protein, 117 aa, Artificial Sequence
  Chemically Synthesized
QVQLQESGGGLVQAGGSLRLSCAASGSIFGDIRMGWYRQAPGKERELVAVLLLVLIPYADSVKGRFTISRDNAKNTVYLQMNSLKPEDTAVYYCAAHASYRTELSYWGQGTQVTVSS

SEQ ID NO: 7434 - protein, 125 aa, Artificial Sequence
  Chemically Synthesized
QVQLQESGGGLVQAGGSLRLSCAASGTFLLVTMGWYRQAPGKERELVAAINDGATTNYADSVKGRFTISRDNAKNTVYLQMNSLKPEDTAVYYCAARGTYVYIYDYPVNPYHDYWGQGTQVTVSS

SEQ ID NO: 7435 - protein, 121 aa, Artificial Sequence
  Chemically Synthesized
QVQLQESGGGLVQAGGSLRLSCAASGYISDTAFMGWYRQAPGKEREFVASISSVLIPYADSVKGRFTISRDNAKNTVYLQMNSLKPEDTAVYYCAVYGTAGDVVGGDLWYWGQGTQVTVSS

SEQ ID NO: 7436 - protein, 118 aa, Artificial Sequence
  Chemically Synthesized
QVQLQESGGGLVQAGGSLRLSCAASGSISPLVDMGWYRQAPGKEREFVASIGHGTSTYYADSVKGRFTISRDNAKNTVYLQMNSLKPEDTAVYYCAAWGTFADLFIYWGQGTQVTVSS

SEQ ID NO: 7437 - protein, 126 aa, Artificial Sequence
  Chemically Synthesized
QVQLQESGGGLVQAGGSLRLSCAASGTIFIDYDMGWYRQAPGKEREFVASISDGTSTNYADSVKGRFTISRDNAKNTVYLQMNSLKPEDTAVYYCAAFDDGTDYDIPPYLEWYKYWGQGTQVTVSS

SEQ ID NO: 7438 - protein, 118 aa, Artificial Sequence
  Chemically Synthesized
QVQLQESGGGLVQAGGSLRLSCAASGTIFVWSLMGWYRQAPGKEREFVAAIAQGAITYYADSVKGRFTISRDNAKNTVYLQMNSLKPEDTAVYYCAVYYGPYTPLPYWGQGTQVTVSS

SEQ ID NO: 7439 - protein, 110 aa, Artificial Sequence
  Chemically Synthesized
QVQLQESGGGLVQAGGSLRLSCAASGTISATVRMGWYRQAPGKERELVAGITDGAITNYADSVKGRFTISRDNAKNTVYLQMNSLKPEDTAVYYCAADYWGQGTQVTVSS

SEQ ID NO: 7440 - protein, 114 aa, Artificial Sequence
  Chemically Synthesized
QVQLQESGGGLVQAGGSLRLSCAASGTISYAYPMGWYRQAPGKEREFVAGISFGGSTNYADSVKGRFTISRDNAKNTVYLQMNSLKPEDTAVYYCAATADSAYWGQGTQVTVSS

SEQ ID NO: 7441 - protein, 121 aa, Artificial Sequence
  Chemically Synthesized
QVQLQESGGGLVQAGGSLRLSCAASGTISYFYWMGWYRQAPGKEREFVASISNGVLPYADSVKGRFTISRDNAKNTVYLQMNSLKPEDTAVYYCAARTGDRRGDEFYYGYWGQGTQVTVSS

SEQ ID NO: 7442 - protein, 118 aa, Artificial Sequence
  Chemically Synthesized
QVQLQESGGGLVQAGGSLRLSCAASGYIFAYGAMGWYRQAPGKERELVATITGGTTTNYADSVKGRFTISRDNAKNTVYLQMNSLKPEDTAVYYCAVLYHISWQYVYWGQGTQVTVSS

SEQ ID NO: 7443 - protein, 122 aa, Artificial Sequence
  Chemically Synthesized
QVQLQESGGGLVQAGGSLRLSCAASGNIFHWYDMGWYRQAPGKERELVAAIDNGATTYYADSVKGRFTISRDNAKNTVYLQMNSLKPEDTAVYYCAAWYDYPDYDYGDFYYWGQGTQVTVSS

SEQ ID NO: 7444 - protein, 122 aa, Artificial Sequence
  Chemically Synthesized
QVQLQESGGGLVQAGGSLRLSCAASGYIFAFFGMGWYRQAPGKERELVAGINSGGSTYYADSVKGRFTISRDNAKNTVYLQMNSLKPEDTAVYYCAAVPYPYDDPYPPYDYWGQGTQVTVSS

SEQ ID NO: 7445 - protein, 118 aa, Artificial Sequence
  Chemically Synthesized
QVQLQESGGGLVQAGGSLRLSCAASGYIFDDIYMGWYRQAPGKERELVASITGGGTTYYADSVKGRFTISRDNAKNTVYLQMNSLKPEDTAVYYCAAYRGTYYTHSYWGQGTQVTVSS

SEQ ID NO: 7446 - protein, 126 aa, Artificial Sequence
  Chemically Synthesized
QVQLQESGGGLVQAGGSLRLSCAASGSISPGRYMGWYRQAPGKEREFVAAIGRGGITYYADSVKGRFTISRDNAKNTVYLQMNSLKPEDTAVYYCAVVHDKPTSDRDQYSLGYRYWGQGTQVTVSS

SEQ ID NO: 7447 - protein, 118 aa, Artificial Sequence
  Chemically Synthesized
QVQLQESGGGLVQAGGSLRLSCAASGTIFGDGYMGWYRQAPGKERELVAAITSGGNTYYADSVKGRFTISRDNAKNTVYLQMNSLKPEDTAVYYCAAEITNFHYHRYWGQGTQVTVSS

SEQ ID NO: 7448 - protein, 118 aa, Artificial Sequence
  Chemically Synthesized
QVQLQESGGGLVQAGGSLRLSCAASGTISPGVVMGWYRQAPGKERELVASINIGGNTNYADSVKGRFTISRDNAKNTVYLQMNSLKPEDTAVYYCAATQEVTPPLIYWGQGTQVTVSS

SEQ ID NO: 7449 - protein, 118 aa, Artificial Sequence
  Chemically Synthesized
QVQLQESGGGLVQAGGSLRLSCAASGYISPAGYMGWYRQAPGKERELVATIAYGATTYYADSVKGRFTISRDNAKNTVYLQMNSLKPEDTAVYYCAAFINFEALHDYWGQGTQVTVSS

SEQ ID NO: 7450 - protein, 122 aa, Artificial Sequence
  Chemically Synthesized
QVQLQESGGGLVQAGGSLRLSCAASGNIFLQSWMGWYRQAPGKEREFVAAIGEGANTYYADSVKGRFTISRDNAKNTVYLQMNSLKPEDTAVYYCAANRLGNDRIQYSHVYWGQGTQVTVSS

SEQ ID NO: 7451 - protein, 113 aa, Artificial Sequence
  Chemically Synthesized
QVQLQESGGGLVQAGGSLRLSCAASGTIFYGYIMGWYRQAPGKERELVAAINQGSSTNYADSVKGRFTISRDNAKNTVYLQMNSLKPEDTAVYYCAVLSHRYWGQGTQVTVSS

SEQ ID NO: 7452 - protein, 122 aa, Artificial Sequence
  Chemically Synthesized
QVQLQESGGGLVQAGGSLRLSCAASGTIFDPYQMGWYRQAPGKERELVATIGYGTNTNYADSVKGRFTISRDNAKNTVYLQMNSLKPEDTAVYYCAVTGHYFNPTWPEHYYWGQGTQVTVSS

SEQ ID NO: 7453 - protein, 122 aa, Artificial Sequence
  Chemically Synthesized
QVQLQESGGGLVQAGGSLRLSCAASGTISSRDYMGWYRQAPGKEREFVATISDGATTYYADSVKGRFTISRDNAKNTVYLQMNSLKPEDTAVYYCAVTHYGNDYYYWFHYYWGQGTQVTVSS

SEQ ID NO: 7454 - protein, 118 aa, Artificial Sequence
  Chemically Synthesized
QVQLQESGGGLVQAGGSLRLSCAASGNIFGPSYMGWYRQAPGKEREFVAAIDRGTSTNYADSVKGRFTISRDNAKNTVYLQMNSLKPEDTAVYYCAVYLRYDAKYGYWGQGTQVTVSS

SEQ ID NO: 7455 - protein, 113 aa, Artificial Sequence
  Chemically Synthesized
QVQLQESGGGLVQAGGSLRLSCAASGTIFRLSWMGWYRQAPGKERELVATIADGANTNYADSVKGRFTISRDNAKNTVYLQMNSLKPEDTAVYYCAVFDPFYWGQGTQVTVSS

SEQ ID NO: 7456 - protein, 118 aa, Artificial Sequence
  Chemically Synthesized
QVQLQESGGGLVQAGGSLRLSCAASGYIFYPNYMGWYRQAPGKEREFVASIGYGGITYYADSVKGRFTISRDNAKNTVYLQMNSLKPEDTAVYYCAVADGLYGKHVYWGQGTQVTVSS

SEQ ID NO: 7457 - protein, 122 aa, Artificial Sequence
  Chemically Synthesized
QVQLQESGGGLVQAGGSLRLSCAASGTIFPRTDMGWYRQAPGKERELVATIAYGSSTNYADSVKGRFTISRDNAKNTVYLQMNSLKPEDTAVYYCAATHTRNLHTSDYFGYWGQGTQVTVSS

SEQ ID NO: 7458 - protein, 116 aa, Artificial Sequence
  Chemically Synthesized
QVQLQESGGGLVQAGGSLRLSCAASGSILLVTMGWYRQAPGKEREFVAGIGDGGTTNYADSVKGRFTISRDNAKNTVYLQMNSLKPEDTAVYYCAVYALRVGYRYWGQGTQVTVSS

SEQ ID NO: 7459 - protein, 122 aa, Artificial Sequence
  Chemically Synthesized
QVQLQESGGGLVQAGGSLRLSCAASGTISDYDTMGWYRQAPGKERELVATISQGATTYYADSVKGRFTISRDNAKNTVYLQMNSLKPEDTAVYYCAATPTTPHDPWDLYLYWGQGTQVTVSS

SEQ ID NO: 7460 - protein, 118 aa, Artificial Sequence
  Chemically Synthesized
QVQLQESGGGLVQAGGSLRLSCAASGNISTQRYMGWYRQAPGKERELVAGIGAGGTTYYADSVKGRFTISRDNAKNTVYLQMNSLKPEDTAVYYCAVYAYGAPYFFYWGQGTQVTVSS

SEQ ID NO: 7461 - protein, 118 aa, Artificial Sequence
  Chemically Synthesized
QVQLQESGGGLVQAGGSLRLSCAASGNISLAGDMGWYRQAPGKEREFVAAIAYGANTYYADSVKGRFTISRDNAKNTVYLQMNSLKPEDTAVYYCAVVTPGPDYLYYWGQGTQVTVSS

SEQ ID NO: 7462 - protein, 122 aa, Artificial Sequence
  Chemically Synthesized
QVQLQESGGGLVQAGGSLRLSCAASGNIFDAPQMGWYRQAPGKERELVAGINFGGSTNYADSVKGRFTISRDNAKNTVYLQMNSLKPEDTAVYYCAAGIEYVYKPDDLYGYWGQGTQVTVSS

SEQ ID NO: 7463 - protein, 126 aa, Artificial Sequence
  Chemically Synthesized
QVQLQESGGGLVQAGGSLRLSCAASGNIFYIRIMGWYRQAPGKEREFVASINDGGITNYADSVKGRFTISRDNAKNTVYLQMNSLKPEDTAVYYCAVNWEVGQLDNYHSAHQYYYWGQGTQVTVSS

SEQ ID NO: 7464 - protein, 110 aa, Artificial Sequence
  Chemically Synthesized
QVQLQESGGGLVQAGGSLRLSCAASGSIFLGYAMGWYRQAPGKEREFVDAIDNGGITNYADSVKGRFTISRDNAKNTVYLQMNSLKPEDTAVYYCAHGYWGQGTQVTVSS

SEQ ID NO: 7465 - protein, 121 aa, Artificial Sequence
  Chemically Synthesized
QVQLQESGGGLVQAGGSLRLSCAASGTILTLIMGWYRQAPGKERELVASISDGANTYYADSVKGRFTISRDNAKNTVYLQMNSLKPEDTAVYYCAVYVAPDLHKYDWHEYWGQGTQVTVSS

SEQ ID NO: 7466 - protein, 114 aa, Artificial Sequence
  Chemically Synthesized
QVQLQESGGGLVQAGGSLRLSCAASGTISGDVYMGWYRQAPGKERELVATIGAGSNTYYADSVKGRFTISRDNAKNTVYLQMNSLKPEDTAVYYCAGVTDLTYWGQGTQVTVSS

SEQ ID NO: 7467 - protein, 113 aa, Artificial Sequence
  Chemically Synthesized
QVQLQESGGGLVQAGGSLRLSCAASGYISVIYAMGWYRQAPGKEREFVASISGGTTTYYADSVKGRFTISRDNAKNTVYLQMNSLKPEDTAVYYCAVDTHSYWGQGTQVTVSS

SEQ ID NO: 7468 - protein, 121 aa, Artificial Sequence
  Chemically Synthesized
QVQLQESGGGLVQAGGSLRLSCAASGNISPAYNMGWYRQAPGKERELVASIARGTSTYYADSVKGRFTISRDNAKNTVYLQMNSLKPEDTAVYYCAVSPPYGELTNTVLYWGQGTQVTVSS

SEQ ID NO: 7469 - protein, 121 aa, Artificial Sequence
  Chemically Synthesized
QVQLQESGGGLVQAGGSLRLSCAASGYISRHYYMGWYRQAPGKEREFVAILLSVVLPYADSVKGRFTISRDNAKNTVYLQMNSLKPEDTAVYYCAAWYETQRDGDPAYWYWGQGTQVTVSS

SEQ ID NO: 7470 - protein, 122 aa, Artificial Sequence
  Chemically Synthesized
QVQLQESGGGLVQAGGSLRLSCAASGSISDSAYMGWYRQAPGKEREFVAGISLGTNTNYADSVKGRFTISRDNAKNTVYLQMNSLKPEDTAVYYCAVTAAQYYYKRDAHTYWGQGTQVTVSS

SEQ ID NO: 7471 - protein, 117 aa, Artificial Sequence
  Chemically Synthesized
QVQLQESGGGLVQAGGSLRLSCAASGYIFRLRMGWYRQAPGKEREFVAAIANGGSTYYADSVKGRFTISRDNAKNTVYLQMNSLKPEDTAVYYCAVPVQSDTRHGYWGQGTQVTVSS

SEQ ID NO: 7472 - protein, 115 aa, Artificial Sequence
  Chemically Synthesized
QVQLQESGGGLVQAGGSLRLSCAASGTISYAYGMGWYRQAPGKERELVAAIADGGNTYYADSVKGRFTISRDNAKNTVYLQMNSLKPEDTAVYYCAVTYDRYYYWGQGTQVTVSS

SEQ ID NO: 7473 - protein, 118 aa, Artificial Sequence
  Chemically Synthesized
QVQLQESGGGLVQAGGSLRLSCAASGYIFAPDIMGWYRQAPGKERELVAAITFGTSTYYADSVKGRFTISRDNAKNTVYLQMNSLKPEDTAVYYCAAPWWTDDAHDYWGQGTQVTVSS

SEQ ID NO: 7474 - protein, 119 aa, Artificial Sequence
  Chemically Synthesized
QVQLQESGGGLVQAGGSLRLSCAASGTIFGFDIMGWYRQAPGKEREFVASIYADSVKGRFTISRDNAKNTVYLQMNSLKPEDTAVYYCAADNIYSVKRTSAVERHYRYWGQGTQVTVSS

SEQ ID NO: 7475 - protein, 117 aa, Artificial Sequence
  Chemically Synthesized
QVQLQESGGGLVQAGGSLRLSCAASGTISDSGLMGWYRQAPGKEREFVASIAYGANTNYADSVKGRFTISRDNAKNTVYLQMNSLKPEDTAVYYCAVTWLLTTGFYWGQGTQVTVSS

SEQ ID NO: 7476 - protein, 118 aa, Artificial Sequence
  Chemically Synthesized
QVQLQESGGGLVQAGGSLRLSCAASGNIFIRYDMGWYRQAPGKERELVATIDVGSNTYYADSVKGRFTISRDNAKNTVYLQMNSLKPEDTAVYYCAASIRGDDELYYWGQGTQVTVSS

SEQ ID NO: 7477 - protein, 122 aa, Artificial Sequence
  Chemically Synthesized
QVQLQESGGGLVQAGGSLRLSCAASGNIFIPRAMGWYRQAPGKEREFVASINDGTNTNYADSVKGRFTISRDNAKNTVYLQMNSLKPEDTAVYYCAVRLHRATNRYNYLRYWGQGTQVTVSS

SEQ ID NO: 7478 - protein, 122 aa, Artificial Sequence
  Chemically Synthesized
QVQLQESGGGLVQAGGSLRLSCAASGYISDNVLMGWYRQAPGKERELVASIGRGSTTNYADSVKGRFTISRDNAKNTVYLQMNSLKPEDTAVYYCAVAYGFSDGDYSNHIYWGQGTQVTVSS

SEQ ID NO: 7479 - protein, 113 aa, Artificial Sequence
  Chemically Synthesized
QVQLQESGGGLVQAGGSLRLSCAASGTISYYLYMGWYRQAPGKERELVASIDYGSNTNYADSVKGRFTISRDNAKNTVYLQMNSLKPEDTAVYYCATGPYGYWGQGTQVTVSS

SEQ ID NO: 7480 - protein, 122 aa, Artificial Sequence
  Chemically Synthesized
QVQLQESGGGLVQAGGSLRLSCAASGSISPPAWMGWYRQAPGKEREFVASIDAGTITYYADSVKGRFTISRDNAKNTVYLQMNSLKPEDTAVYYCAVYANYDPYGVTAHYYWGQGTQVTVSS

SEQ ID NO: 7481 - protein, 118 aa, Artificial Sequence
  Chemically Synthesized
QVQLQESGGGLVQAGGSLRLSCAASGYISYEYWMGWYRQAPGKEREFVASISYGGSTYYADSVKGRFTISRDNAKNTVYLQMNSLKPEDTAVYYCAVITLTDWPLTYWGQGTQVTVSS

SEQ ID NO: 7482 - protein, 113 aa, Artificial Sequence
  Chemically Synthesized
QVQLQESGGGLVQAGGSLRLSCAASGSISLSPMGWYRQAPGKEREFVAGIVVPYADSVKGRFTISRDNAKNTVYLQMNSLKPEDTAVYYCAAGGRYYIIHYYWGQGTQVTVSS

SEQ ID NO: 7483 - protein, 117 aa, Artificial Sequence
  Chemically Synthesized
QVQLQESGGGLVQAGGSLRLSCAASGYISYTPYMGWYRQAPGKEREFVAAINYGGNTYYADSVKGRFTISRDNAKNTVYLQMNSLKPEDTAVYYCAVTVTLTVLMYWGQGTQVTVSS

SEQ ID NO: 7484 - protein, 117 aa, Artificial Sequence
  Chemically Synthesized
QVQLQESGGGLVQAGGSLRLSCAASGSISGRDMGWYRQAPGKERELVATIATGATTNYADSVKGRFTISRDNAKNTVYLQMNSLKPEDTAVYYCAAHVTYASYFEYWGQGTQVTVSS

SEQ ID NO: 7485 - protein, 118 aa, Artificial Sequence
  Chemically Synthesized
QVQLQESGGGLVQAGGSLRLSCAASGYISHLVSMGWYRQAPGKEREFVASISKGGITNYADSVKGRFTISRDNAKNTVYLQMNSLKPEDTAVYYCAASPYYRGVFPYWGQGTQVTVSS

SEQ ID NO: 7486 - protein, 122 aa, Artificial Sequence
  Chemically Synthesized
QVQLQESGGGLVQAGGSLRLSCAASGSISTKHGMGWYRQAPGKERELVAAIGLGATTNYADSVKGRFTISRDNAKNTVYLQMNSLKPEDTAVYYCAANDYFPDVGYVYYPYWGQGTQVTVSS

SEQ ID NO: 7487 - protein, 118 aa, Artificial Sequence
  Chemically Synthesized
QVQLQESGGGLVQAGGSLRLSCAASGTIFAGYVMGWYRQAPGKERELVATIGFGAITNYADSVKGRFTISRDNAKNTVYLQMNSLKPEDTAVYYCAAAVWWDRDHYYWGQGTQVTVSS

SEQ ID NO: 7488 - protein, 121 aa, Artificial Sequence
  Chemically Synthesized
QVQLQESGGGLVQAGGSLRLSCAASGTIFYRYMGWYRQAPGKERELVAAIATGGITYYADSVKGRFTISRDNAKNTVYLQMNSLKPEDTAVYYCAVYYQYEVYGYYDFPYWGQGTQVTVSS

SEQ ID NO: 7489 - protein, 114 aa, Artificial Sequence
  Chemically Synthesized
QVQLQESGGGLVQAGGSLRLSCAASGNISTSLDMGWYRQAPGKERELVAGIGPAYADSVKGRFTISRDNAKNTVYLQMNSLKPEDTAVYYCAVGADTYNNHLYWGQGTQVTVSS

SEQ ID NO: 7490 - protein, 126 aa, Artificial Sequence
  Chemically Synthesized
QVQLQESGGGLVQAGGSLRLSCAASGNISYLAPMGWYRQAPGKERELVAAIDHGGNTNYADSVKGRFTISRDNAKNTVYLQMNSLKPEDTAVYYCAVWGYGTYENSELSQVGFGYWGQGTQVTVSS

SEQ ID NO: 7491 - protein, 117 aa, Artificial Sequence
  Chemically Synthesized
QVQLQESGGGLVQAGGSLRLSCAASGSISDAGAMGWYRQAPGKERELVAGINSGTSTNYADSVKGRFTISRDNAKNTVYLQMNSLKPEDTAVYYCAVPVERSRRIYWGQGTQVTVSS

SEQ ID NO: 7492 - protein, 126 aa, Artificial Sequence
  Chemically Synthesized
QVQLQESGGGLVQAGGSLRLSCAASGSIFGRNPMGWYRQAPGKERELVAGIDDGTTTYYADSVKGRFTISRDNAKNTVYLQMNSLKPEDTAVYYCAVGYIDQDDATDADNQNHGYWGQGTQVTVSS

SEQ ID NO: 7493 - protein, 126 aa, Artificial Sequence
  Chemically Synthesized
QVQLQESGGGLVQAGGSLRLSCAASGSISDLRTMGWYRQAPGKEREFVASIADGGTTYYADSVKGRFTISRDNAKNTVYLQMNSLKPEDTAVYYCAVQQRRRADWSYRWYWRLGYWGQGTQVTVSS

SEQ ID NO: 7494 - protein, 117 aa, Artificial Sequence
  Chemically Synthesized
QVQLQESGGGLVQAGGSLRLSCAASGTIFEVYYMGWYRQAPGKERELVALLITVVLPYADSVKGRFTISRDNAKNTVYLQMNSLKPEDTAVYYCAAFFTSDGQHDYWGQGTQVTVSS

SEQ ID NO: 7495 - protein, 118 aa, Artificial Sequence
  Chemically Synthesized
QVQLQESGGGLVQAGGSLRLSCAASGTISLELAMGWYRQAPGKEREFVASIGLGANTYYADSVKGRFTISRDNAKNTVYLQMNSLKPEDTAVYYCAVWYRYQDDHTYWGQGTQVTVSS

SEQ ID NO: 7496 - protein, 122 aa, Artificial Sequence
  Chemically Synthesized
QVQLQESGGGLVQAGGSLRLSCAASGTIFFAQDMGWYRQAPGKERELVATIDIGGNTKYADSVKGRFTISRDNAKNTVYLQMNSLKPEDTAVYYCAVHWDYVDGDDDTFVYWGQGTQVTVSS

SEQ ID NO: 7497 - protein, 118 aa, Artificial Sequence
  Chemically Synthesized
QVQLQESGGGLVQAGGSLRLSCAASGSIFGPYDMGWYRQAPGKEREFVAAIARGGNTYYADSVKGRFTISRDNAKNTVYLQMNSLKPEDTAVYYCAARRVHYPRYSYWGQGTQVTVSS

SEQ ID NO: 7498 - protein, 122 aa, Artificial Sequence
  Chemically Synthesized
QVQLQESGGGLVQAGGSLRLSCAASGSISPSVDMGWYRQAPGKEREFVAGITVGSTTYYADSVKGRFTISRDNAKNTVYLQMNSLKPEDTAVYYCAVYDDYNTDIIDDHYYWGQGTQVTVSS

SEQ ID NO: 7499 - protein, 117 aa, Artificial Sequence
  Chemically Synthesized
QVQLQESGGGLVQAGGSLRLSCAASGNISTLTRMGWYRQAPGKEREFVAGITEGGSTNYADSVKGRFTISRDNAKNTVYLQMNSLKPEDTAVYYCAVSVTTVTVMYWGQGTQVTVSS

SEQ ID NO: 7500 - protein, 118 aa, Artificial Sequence
  Chemically Synthesized
QVQLQESGGGLVQAGGSLRLSCAASGYISYPYGMGWYRQAPGKEREFVAAITGGTTTYYADSVKGRFTISRDNAKNTVYLQMNSLKPEDTAVYYCAAYLGYTEELGYWGQGTQVTVSS

SEQ ID NO: 7501 - protein, 121 aa, Artificial Sequence
  Chemically Synthesized
QVQLQESGGGLVQAGGSLRLSCAASGYISPYQMGWYRQAPGKEREFVAAITTGTSTYYADSVKGRFTISRDNAKNTVYLQMNSLKPEDTAVYYCAVTRLGNDPRGYSYSYWGQGTQVTVSS

SEQ ID NO: 7502 - protein, 117 aa, Artificial Sequence
  Chemically Synthesized
QVQLQESGGGLVQAGGSLRLSCAASGYIFKTSGMGWYRQAPGKERELVASIGHGGITNYADSVKGRFTISRDNAKNTVYLQMNSLKPEDTAVYYCAASGTVTVGMYWGQGTQVTVSS

SEQ ID NO: 7503 - protein, 126 aa, Artificial Sequence
  Chemically Synthesized
QVQLQESGGGLVQAGGSLRLSCAASGYIFGYYVMGWYRQAPGKERELVATITYGTTTNYADSVKGRFTISRDNAKNTVYLQMNSLKPEDTAVYYCAVYRYHRTYAYGYYSNPHTYWGQGTQVTVSS

SEQ ID NO: 7504 - protein, 111 aa, Artificial Sequence
  Chemically Synthesized
QVQLQESGGGLVQAGGSLRLSCAASGSISSFYLMGWYRQAPGKERELVLIPYADSVKGRFTISRDNAKNTVYLQMNSLKPEDTAVYYCAAVSTGYIRFEYWGQGTQVTVSS

SEQ ID NO: 7505 - protein, 118 aa, Artificial Sequence
  Chemically Synthesized
QVQLQESGGGLVQAGGSLRLSCAASGYISSYVDMGWYRQAPGKEREFVAGIARGTITNYADSVKGRFTISRDNAKNTVYLQMNSLKPEDTAVYYCAVYESISAQFRYWGQGTQVTVSS

SEQ ID NO: 7506 - protein, 118 aa, Artificial Sequence
  Chemically Synthesized
QVQLQESGGGLVQAGGSLRLSCAASGNIFSDINMGWYRQAPGKERELVAGITYGTNTNYADSVKGRFTISRDNAKNTVYLQMNSLKPEDTAVYYCAAHYSDREILYYWGQGTQVTVSS

SEQ ID NO: 7507 - protein, 118 aa, Artificial Sequence
  Chemically Synthesized
QVQLQESGGGLVQAGGSLRLSCAASGYISYDGYMGWYRQAPGKEREFVAAITLGATTNYADSVKGRFTISRDNAKNTVYLQMNSLKPEDTAVYYCAVYYRQPPYHTYWGQGTQVTVSS

SEQ ID NO: 7508 - protein, 122 aa, Artificial Sequence
  Chemically Synthesized
QVQLQESGGGLVQAGGSLRLSCAASGNIFPDPKMGWYRQAPGKERELVASIDHGGNTNYADSVKGRFTISRDNAKNTVYLQMNSLKPEDTAVYYCAAYSVPLDRSVYVHQYWGQGTQVTVSS

SEQ ID NO: 7509 - protein, 122 aa, Artificial Sequence
  Chemically Synthesized
QVQLQESGGGLVQAGGSLRLSCAASGSISYGENMGWYRQAPGKEREFVAGIASGTNTNYADSVKGRFTISRDNAKNTVYLQMNSLKPEDTAVYYCAVDDNDQYWFGYHHKYWGQGTQVTVSS

SEQ ID NO: 7510 - protein, 118 aa, Artificial Sequence
  Chemically Synthesized
QVQLQESGGGLVQAGGSLRLSCAASGTISDYGIMGWYRQAPGKEREFVAAITDGGNTNYADSVKGRFTISRDNAKNTVYLQMNSLKPEDTAVYYCAVYTPYSPYFFYWGQGTQVTVSS

SEQ ID NO: 7511 - protein, 118 aa, Artificial Sequence
  Chemically Synthesized
QVQLQESGGGLVQAGGSLRLSCAASGTISYDHYMGWYRQAPGKERELVASIAGGGTTNYADSVKGRFTISRDNAKNTVYLQMNSLKPEDTAVYYCAVDTTPTTFLNYWGQGTQVTVSS

SEQ ID NO: 7512 - protein, 122 aa, Artificial Sequence
  Chemically Synthesized
QVQLQESGGGLVQAGGSLRLSCAASGSIFSAHDMGWYRQAPGKERELVATIDTGGNTYYADSVKGRFTISRDNAKNTVYLQMNSLKPEDTAVYYCAAYTSLDLVWDYVHYYWGQGTQVTVSS

SEQ ID NO: 7513 - protein, 122 aa, Artificial Sequence
  Chemically Synthesized
QVQLQESGGGLVQAGGSLRLSCAASGYIFRSGYMGWYRQAPGKERELVAAITVGSSTYYADSVKGRFTISRDNAKNTVYLQMNSLKPEDTAVYYCAAPLARYTPYPNVHRYWGQGTQVTVSS

SEQ ID NO: 7514 - protein, 118 aa, Artificial Sequence
  Chemically Synthesized
QVQLQESGGGLVQAGGSLRLSCAASGYISNVSRMGWYRQAPGKERELVAAISAGGITYYADSVKGRFTISRDNAKNTVYLQMNSLKPEDTAVYYCAAVQRGTPRLYYWGQGTQVTVSS

SEQ ID NO: 7515 - protein, 118 aa, Artificial Sequence
  Chemically Synthesized
QVQLQESGGGLVQAGGSLRLSCAASGTIFGPYLMGWYRQAPGKERELVASITYGSSTYYADSVKGRFTISRDNAKNTVYLQMNSLKPEDTAVYYCAADRYYDIWHSYWGQGTQVTVSS

SEQ ID NO: 7516 - protein, 122 aa, Artificial Sequence
  Chemically Synthesized
QVQLQESGGGLVQAGGSLRLSCAASGYIFAPYGMGWYRQAPGKEREFVASISGGGSTYYADSVKGRFTISRDNAKNTVYLQMNSLKPEDTAVYYCAATDPPYIEKYAGLYYWGQGTQVTVSS

SEQ ID NO: 7517 - protein, 118 aa, Artificial Sequence
  Chemically Synthesized
QVQLQESGGGLVQAGGSLRLSCAASGSIFPDSSMGWYRQAPGKEREFVAAINTGTNTNYADSVKGRFTISRDNAKNTVYLQMNSLKPEDTAVYYCAAVYVDVAPHDYWGQGTQVTVSS

SEQ ID NO: 7518 - protein, 117 aa, Artificial Sequence
  Chemically Synthesized
QVQLQESGGGLVQAGGSLRLSCAASGSISYVVYMGWYRQAPGKEREFVATINAGSNTYYADSVKGRFTISRDNAKNTVYLQMNSLKPEDTAVYYCAVSFLVSTLFYWGQGTQVTVSS

SEQ ID NO: 7519 - protein, 122 aa, Artificial Sequence
  Chemically Synthesized
QVQLQESGGGLVQAGGSLRLSCAASGYILVTVMGWYRQAPGKERELVAAISVGSSTYYADSVKGRFTISRDNAKNTVYLQMNSLKPEDTAVYYCAVYGYSDPDSQYAPHAYWGQGTQVTVSS

SEQ ID NO: 7520 - protein, 118 aa, Artificial Sequence
  Chemically Synthesized
QVQLQESGGGLVQAGGSLRLSCAASGSIFYVLFMGWYRQAPGKEREFVASIDTGTITYYADSVKGRFTISRDNAKNTVYLQMNSLKPEDTAVYYCAVKYYVYAGYNYWGQGTQVTVSS

SEQ ID NO: 7521 - protein, 116 aa, Artificial Sequence
  Chemically Synthesized
QVQLQESGGGLVQAGGSLRLSCAASGSMGWYRQAPGKERELVASINVGSTTNYADSVKGRFTISRDNAKNTVYLQMNSLKPEDTAVYYCAVDSDQYNPDLDGHVYWGQGTQVTVSS

SEQ ID NO: 7522 - protein, 118 aa, Artificial Sequence
  Chemically Synthesized
QVQLQESGGGLVQAGGSLRLSCAASGSISYWRTMGWYRQAPGKERELVAGISYGGTTNYADSVKGRFTISRDNAKNTVYLQMNSLKPEDTAVYYCAVYFVIPLFFWYWGQGTQVTVSS

SEQ ID NO: 7523 - protein, 107 aa, Artificial Sequence
  Chemically Synthesized
QVQLQESGGGLVQAGGSLRLSCAASGSIFAGYAMGWYRQAPGKEREPYADSVKGRFTISRDNAKNTVYLQMNSLKPEDTAVYYCAATGGTYAYHSYWGQGTQVTVSS

SEQ ID NO: 7524 - protein, 125 aa, Artificial Sequence
  Chemically Synthesized
QVQLQESGGGLVQAGGSLRLSCAASGSISFRSVMGWYRQAPGKERELVASINVGGITYYADSVKGRFTISRDNAKNTVYLQMNSLKPEDTAVYYCAVRYPPYDYLKLSTLRCIYWGQGTQVTVSS

SEQ ID NO: 7525 - protein, 126 aa, Artificial Sequence
  Chemically Synthesized
QVQLQESGGGLVQAGGSLRLSCAASGSIFTVAVMGWYRQAPGKERELVAAISTGGTTYYADSVKGRFTISRDNAKNTVYLQMNSLKPEDTAVYYCAALGWIGSYPISGQGLTFSYWGQGTQVTVSS

SEQ ID NO: 7526 - protein, 122 aa, Artificial Sequence
  Chemically Synthesized
QVQLQESGGGLVQAGGSLRLSCAASGTISGLHAMGWYRQAPGKERELVAGIGPGAITNYADSVKGRFTISRDNAKNTVYLQMNSLKPEDTAVYYCAAWYDDVGNAGIGLSYWGQGTQVTVSS

SEQ ID NO: 7527 - protein, 118 aa, Artificial Sequence
  Chemically Synthesized
QVQLQESGGGLVQAGGSLRLSCAASGYIFLSAIMGWYRQAPGKERELVASISLGASTYYADSVKGRFTISRDNAKNTVYLQMNSLKPEDTAVYYCAADSITDDYHDYWGQGTQVTVSS

SEQ ID NO: 7528 - protein, 121 aa, Artificial Sequence
  Chemically Synthesized
QVQLQESGGGLVQAGGSLRLSCAASGSIFPDTYMGWYRQAPGKEREFVAGIAEGSITYYADSVKGRFTISRDNAKNTVYLQMNSLKPEDTAVYYCAAHNDVGTWRDADHYWGQGTQVTVSS

SEQ ID NO: 7529 - protein, 117 aa, Artificial Sequence
  Chemically Synthesized
QVQLQESGGGLVQAGGSLRLSCAASGNIFRTTMGWYRQAPGKERELVAGITPGGTTNYADSVKGRFTISRDNAKNTVYLQMNSLKPEDTAVYYCAVYTNSYTYYIYWGQGTQVTVSS

SEQ ID NO: 7530 - protein, 113 aa, Artificial Sequence
  Chemically Synthesized
QVQLQESGGGLVQAGGSLRLSCAASGYIFWLVAMGWYRQAPGKEREFVASSTNYADSVKGRFTISRDNAKNTVYLQMNSLKPEDTAVYYCAVDLVGAGAHWYWGQGTQVTVSS

SEQ ID NO: 7531 - protein, 122 aa, Artificial Sequence
  Chemically Synthesized
QVQLQESGGGLVQAGGSLRLSCAASGNISFIPYMGWYRQAPGKEREFVAAIGSGGITYYADSVKGRFTISRDNAKNTVYLQMNSLKPEDTAVYYCAVYISHGSNRYIDFYYWGQGTQVTVSS

SEQ ID NO: 7532 - protein, 122 aa, Artificial Sequence
  Chemically Synthesized
QVQLQESGGGLVQAGGSLRLSCAASGYIFWYYVMGWYRQAPGKERELVATIGWGTSTYYADSVKGRFTISRDNAKNTVYLQMNSLKPEDTAVYYCAAYSYDTADQRGEYWYWGQGTQVTVSS

SEQ ID NO: 7533 - protein, 122 aa, Artificial Sequence
  Chemically Synthesized
QVQLQESGGGLVQAGGSLRLSCAASGNISIIYTMGWYRQAPGKEREFVASINYGANTNYADSVKGRFTISRDNAKNTVYLQMNSLKPEDTAVYYCAAPYETYGHLLDGFNYWGQGTQVTVSS

SEQ ID NO: 7534 - protein, 118 aa, Artificial Sequence
  Chemically Synthesized
QVQLQESGGGLVQAGGSLRLSCAASGSIFDGDGMGWYRQAPGKEREFVAGIGTGGTTNYADSVKGRFTISRDNAKNTVYLQMNSLKPEDTAVYYCAVEYNFLYHLAYWGQGTQVTVSS

SEQ ID NO: 7535 - protein, 122 aa, Artificial Sequence
  Chemically Synthesized
QVQLQESGGGLVQAGGSLRLSCAASGYISYYGYMGWYRQAPGKEREFVAAISYGGNTYYADSVKGRFTISRDNAKNTVYLQMNSLKPEDTAVYYCAAVAIWTLHLGRPHWYWGQGTQVTVSS

SEQ ID NO: 7536 - protein, 118 aa, Artificial Sequence
  Chemically Synthesized
QVQLQESGGGLVQAGGSLRLSCAASGTIFDQTAMGWYRQAPGKERELVAAINSGGSTYYADSVKGRFTISRDNAKNTVYLQMNSLKPEDTAVYYCAVVAASDGAHVYWGQGTQVTVSS

SEQ ID NO: 7537 - protein, 112 aa, Artificial Sequence
  Chemically Synthesized
QVQLQESGGGLVQAGGSLRLSCAASGYISYNVSMGWYRQAPGKERELVATIDGGATTNYADSVKGRFTISRDNAKNTVYLQMNSLKPEDTAVYYCAATFTYWGQGTQVTVSS

SEQ ID NO: 7538 - protein, 118 aa, Artificial Sequence
  Chemically Synthesized
QVQLQESGGGLVQAGGSLRLSCAASGYIFIAYAMGWYRQAPGKERELVAAIAGGAITNYADSVKGRFTISRDNAKNTVYLQMNSLKPEDTAVYYCAVQHNNDDGFDYWGQGTQVTVSS

SEQ ID NO: 7539 - protein, 118 aa, Artificial Sequence
  Chemically Synthesized
QVQLQESGGGLVQAGGSLRLSCAASGYISLGAYMGWYRQAPGKERELVASIAPGSSTYYADSVKGRFTISRDNAKNTVYLQMNSLKPEDTAVYYCAATYYGEYVHRYWGQGTQVTVSS

SEQ ID NO: 7540 - protein, 110 aa, Artificial Sequence
  Chemically Synthesized
QVQLQESGGGLVQAGGSLRLSCAASGTISYVEVMGWYRQAPGKERELVAGINEGSSTNYADSVKGRFTISRDNAKNTVYLQMNSLKPEDTAVYYCAALYWGQGTQVTVSS

SEQ ID NO: 7541 - protein, 122 aa, Artificial Sequence
  Chemically Synthesized
QVQLQESGGGLVQAGGSLRLSCAASGSIFYSDDMGWYRQAPGKERELVASIDAGGSTYYADSVKGRFTISRDNAKNTVYLQMNSLKPEDTAVYYCAAVYRGVDISRDTYGYWGQGTQVTVSS

SEQ ID NO: 7542 - protein, 109 aa, Artificial Sequence
  Chemically Synthesized
QVQLQESGGGLVQAGGSLRLSCAASGNIFVANAMGWYRQAPGKEREFVATIAIGSSTYYADSVKGRFTISRDNAKNTVYLQMNSLKPEDTAVYYCAVYWGQGTQVTVSS

SEQ ID NO: 7543 - protein, 118 aa, Artificial Sequence
  Chemically Synthesized
QVQLQESGGGLVQAGGSLRLSCAASGYISLFTAMGWYRQAPGKEREFVAAIASGGNTYYADSVKGRFTISRDNAKNTVYLQMNSLKPEDTAVYYCAVSGDRVTGHAYWGQGTQVTVSS

SEQ ID NO: 7544 - protein, 118 aa, Artificial Sequence
  Chemically Synthesized
QVQLQESGGGLVQAGGSLRLSCAASGSIFDRLGMGWYRQAPGKERELVASIAWGTTTNYADSVKGRFTISRDNAKNTVYLQMNSLKPEDTAVYYCAGYYVPLYRLRYWGQGTQVTVSS

SEQ ID NO: 7545 - protein, 122 aa, Artificial Sequence
  Chemically Synthesized
QVQLQESGGGLVQAGGSLRLSCAASGSIFDGLGMGWYRQAPGKERELVAGITGGANTYYADSVKGRFTISRDNAKNTVYLQMNSLKPEDTAVYYCAALEPLDFYIDVNYYYWGQGTQVTVSS

SEQ ID NO: 7546 - protein, 125 aa, Artificial Sequence
  Chemically Synthesized
QVQLQESGGGLVQAGGSLRLSCAASGTIFYTFFMGWYRQAPGKERELVALLVTVLVPYADSVKGRFTISRDNAKNTVYLQMNSLKPEDTAVYYCAAQWYGPYVIYNTSTSDYLYWGQGTQVTVSS

SEQ ID NO: 7547 - protein, 122 aa, Artificial Sequence
  Chemically Synthesized
QVQLQESGGGLVQAGGSLRLSCAASGNIFTLRAMGWYRQAPGKERELVASISGGGITYYADSVKGRFTISRDNAKNTVYLQMNSLKPEDTAVYYCAAQGPPAYLPGNRLDYWGQGTQVTVSS

SEQ ID NO: 7548 - protein, 122 aa, Artificial Sequence
  Chemically Synthesized
QVQLQESGGGLVQAGGSLRLSCAASGTIFTSYVMGWYRQAPGKEREFVAAIGTGSSTYYADSVKGRFTISRDNAKNTVYLQMNSLKPEDTAVYYCAVDGYGWATEYYYHQYWGQGTQVTVSS

SEQ ID NO: 7549 - protein, 121 aa, Artificial Sequence
  Chemically Synthesized
QVQLQESGGGLVQAGGSLRLSCAASGSISGYPYMGWYRQAPGKERELVAGIAVVLLPYADSVKGRFTISRDNAKNTVYLQMNSLKPEDTAVYYCAVWYWASEQYVYYFWYWGQGTQVTVSS

SEQ ID NO: 7550 - protein, 120 aa, Artificial Sequence
  Chemically Synthesized
QVQLQESGGGLVQAGGSLRLSCAASGNISGIAYMGWYRQAPGKEREFVAAISVGGTTYYADSVKGRFTISRDNAKNTVYLQMNSLKPEDTAVYYCAVAGDGDRLVWLRYWGQGTQVTVSS

SEQ ID NO: 7551 - protein, 122 aa, Artificial Sequence
  Chemically Synthesized
QVQLQESGGGLVQAGGSLRLSCAASGSISYTHSMGWYRQAPGKERELVAGIARGGSTYYADSVKGRFTISRDNAKNTVYLQMNSLKPEDTAVYYCAVLVDDPRRYDDYLLYWGQGTQVTVSS

SEQ ID NO: 7552 - protein, 121 aa, Artificial Sequence
  Chemically Synthesized
QVQLQESGGGLVQAGGSLRLSCAASGNISHRPDMGWYRQAPGKERELVASIGYGATTNYADSVKGRFTISRDNAKNTVYLQMNSLKPEDTAVYYCAAPSTTVRLSLLTIYWGQGTQVTVSS

SEQ ID NO: 7553 - protein, 118 aa, Artificial Sequence
  Chemically Synthesized
QVQLQESGGGLVQAGGSLRLSCAASGTISFVQPMGWYRQAPGKEREFVASIDGGGSTNYADSVKGRFTISRDNAKNTVYLQMNSLKPEDTAVYYCAAPYGPALWLVYWGQGTQVTVSS

SEQ ID NO: 7554 - protein, 118 aa, Artificial Sequence
  Chemically Synthesized
QVQLQESGGGLVQAGGSLRLSCAASGSIFRISYMGWYRQAPGKEREFVASIARGTSTNYADSVKGRFTISRDNAKNTVYLQMNSLKPEDTAVYYCAVAYVFRAYHAYWGQGTQVTVSS

SEQ ID NO: 7555 - protein, 121 aa, Artificial Sequence
  Chemically Synthesized
QVQLQESGGGLVQAGGSLRLSCAASGTISIDGFMGWYRQAPGKERELLPVLMTVVLPYADSVKGRFTISRDNAKNTVYLQMNSLKPEDTAVYYCAVNIYLQYGQGVELSYWGQGTQVTVSS

SEQ ID NO: 7556 - protein, 122 aa, Artificial Sequence
  Chemically Synthesized
QVQLQESGGGLVQAGGSLRLSCAASGSISRGWHMGWYRQAPGKEREFVATITGGGITYYADSVKGRFTISRDNAKNTVYLQMNSLKPEDTAVYYCAVYIGDVYDVFEDHYYWGQGTQVTVSS

SEQ ID NO: 7557 - protein, 120 aa, Artificial Sequence
  Chemically Synthesized
QVQLQESGGGLVQAGGSLRLSCAASGLFLKLLMGWYRQAPGKERELVAAIAGGGNTNYADSVKGRFTISRDNAKNTVYLQMNSLKPEDTAVYYCAVDDNGYVDVVVRIYWGQGTQVTVSS

SEQ ID NO: 7558 - protein, 126 aa, Artificial Sequence
  Chemically Synthesized
QVQLQESGGGLVQAGGSLRLSCAASGSISWGGYMGWYRQAPGKEREFVASINAGSNTNYADSVKGRFTISRDNAKNTVYLQMNSLKPEDTAVYYCAAVLGRVYELYARYYTILEYWGQGTQVTVSS

SEQ ID NO: 7559 - protein, 116 aa, Artificial Sequence
  Chemically Synthesized
QVQLQESGGGLVQAGGSLRLSCAASGTISAGADMGWYRQAPGKERELVATIAFGAITNYADSVKGRFTISRDNAKNTVYLQMNSLKPEDTAVYYCAVRAADVYTYWGQGTQVTVSS

SEQ ID NO: 7560 - protein, 117 aa, Artificial Sequence
  Chemically Synthesized
QVQLQESGGGLVQAGGSLRLSCAASGTIFTIHDMGWYRQAPGKEREFVAGIGQGTTTYADSVKGRFTISRDNAKNTVYLQMNSLKPEDTAVYYCAAYSGVDRYYTYWGQGTQVTVSS

SEQ ID NO: 7561 - protein, 122 aa, Artificial Sequence
  Chemically Synthesized
QVQLQESGGGLVQAGGSLRLSCAASGYISGDYSMGWYRQAPGKERELVAGIGQGTNTYYADSVKGRFTISRDNAKNTVYLQMNSLKPEDTAVYYCAVYPIFVQAQGWYLRYWGQGTQVTVSS

SEQ ID NO: 7562 - protein, 118 aa, Artificial Sequence
  Chemically Synthesized
QVQLQESGGGLVQAGGSLRLSCAASGTIFYGGRMGWYRQAPGKEREFVATISRGSNTYYADSVKGRFTISRDNAKNTVYLQMNSLKPEDTAVYYCAVAAGYKPVYRYWGQGTQVTVSS

SEQ ID NO: 7563 - protein, 118 aa, Artificial Sequence
  Chemically Synthesized
QVQLQESGGGLVQAGGSLRLSCAASGSISTRNNMGWYRQAPGKEREFVATIDTGGSTYYADSVKGRFTISRDNAKNTVYLQMNSLKPEDTAVYYCAVRTRDSGNLWYWGQGTQVTVSS

SEQ ID NO: 7564 - protein, 122 aa, Artificial Sequence
  Chemically Synthesized
QVQLQESGGGLVQAGGSLRLSCAASGNIFRPGDMGWYRQAPGKEREFVASINSGSNTYYADSVKGRFTISRDNAKNTVYLQMNSLKPEDTAVYYCAAEGVDYRPRIDALYYWGQGTQVTVSS

SEQ ID NO: 7565 - protein, 122 aa, Artificial Sequence
  Chemically Synthesized
QVQLQESGGGLVQAGGSLRLSCAASGYIFAGSYMGWYRQAPGKERELVAAIADGSITYYADSVKGRFTISRDNAKNTVYLQMNSLKPEDTAVYYCAVLTVRLTEYTDGYIYWGQGTQVTVSS

SEQ ID NO: 7566 - protein, 126 aa, Artificial Sequence
  Chemically Synthesized
QVQLQESGGGLVQAGGSLRLSCAASGNISFSIDMGWYRQAPGKERELVAAIGGGGNTNYADSVKGRFTISRDNAKNTVYLQMNSLKPEDTAVYYCAAGQYYRLYPYYYSVGAHVYWGQGTQVTVSS

SEQ ID NO: 7567 - protein, 116 aa, Artificial Sequence
  Chemically Synthesized
QVQLQESGGGLVQAGGSLRLSCAASGSISYYDSMGWYRQAPGKEREFVASISGGASTYYADSVKGRFTISRDNAKNTVYLQMNSLKPEDTAVYYCAVDRYVNQDYWGQGTQVTVSS

SEQ ID NO: 7568 - protein, 117 aa, Artificial Sequence
  Chemically Synthesized
QVQLQESGGGLVQAGGSLRLSCAASGYISTDSGMGWYRQAPGKEREFVPVLVLVLIPYADSVKGRFTISRDNAKNTVYLQMNSLKPEDTAVYYCAAVGQDEPIYPYWGQGTQVTVSS

SEQ ID NO: 7569 - protein, 118 aa, Artificial Sequence
  Chemically Synthesized
QVQLQESGGGLVQAGGSLRLSCAASGTIFYDGFMGWYRQAPGKEREFVAGITPGGTTYYADSVKGRFTISRDNAKNTVYLQMNSLKPEDTAVYYCAAQYYGYGPHAYWGQGTQVTVSS

SEQ ID NO: 7570 - protein, 118 aa, Artificial Sequence
  Chemically Synthesized
QVQLQESGGGLVQAGGSLRLSCAASGTISWDPDMGWYRQAPGKEREFVAGITVGTTTNYADSVKGRFTISRDNAKNTVYLQMNSLKPEDTAVYYCAVYANTEEQHGYWGQGTQVTVSS

SEQ ID NO: 7571 - protein, 126 aa, Artificial Sequence
  Chemically Synthesized
QVQLQESGGGLVQAGGSLRLSCAASGTISTGDRMGWYRQAPGKERELVAAITAGAITNYADSVKGRFTISRDNAKNTVYLQMNSLKPEDTAVYYCAAPWQQPIRPDPGYYYYHGYWGQGTQVTVSS

SEQ ID NO: 7572 - protein, 117 aa, Artificial Sequence
  Chemically Synthesized
QVQLQESGGGLVQAGGSLRLSCAASGTISFGQMGWYRQAPGKERELVAAITSGATTYYADSVKGRFTISRDNAKNTVYLQMNSLKPEDTAVYYCAADADYGLALEYWGQGTQVTVSS

SEQ ID NO: 7573 - protein, 122 aa, Artificial Sequence
  Chemically Synthesized
QVQLQESGGGLVQAGGSLRLSCAASGYISDTTWMGWYRQAPGKERELVAGIGTGGSTYYADSVKGRFTISRDNAKNTVYLQMNSLKPEDTAVYYCAADNLDQSGLSAVCLYWGQGTQVTVSS

SEQ ID NO: 7574 - protein, 118 aa, Artificial Sequence
  Chemically Synthesized
QVQLQESGGGLVQAGGSLRLSCAASGNISTRFYMGWYRQAPGKEREFVAAIGRGATTYYADSVKGRFTISRDNAKNTVYLQMNSLKPEDTAVYYCAAGRWDDGAHYYWGQGTQVTVSS

SEQ ID NO: 7575 - protein, 122 aa, Artificial Sequence
  Chemically Synthesized
QVQLQESGGGLVQAGGSLRLSCAASGSISQPAIMGWYRQAPGKERELVAGITDGTSTYYADSVKGRFTISRDNAKNTVYLQMNSLKPEDTAVYYCAVSDSYAPFWIAYHEYWGQGTQVTVSS

SEQ ID NO: 7576 - protein, 117 aa, Artificial Sequence
  Chemically Synthesized
QVQLQESGGGLVQAGGSLRLSCAASGSISSFTMGWYRQAPGKERELVASISYGGITNYADSVKGRFTISRDNAKNTVYLQMNSLKPEDTAVYYCAVSGDSNYYFVYWGQGTQVTVSS

SEQ ID NO: 7577 - protein, 118 aa, Artificial Sequence
  Chemically Synthesized
QVQLQESGGGLVQAGGSLRLSCAASGTISVQYFMGWYRQAPGKEREFVAGINYGTITYYADSVKGRFTISRDNAKNTVYLQMNSLKPEDTAVYYCAAYRRYSYALRYWGQGTQVTVSS

SEQ ID NO: 7578 - protein, 118 aa, Artificial Sequence
  Chemically Synthesized
QVQLQESGGGLVQAGGSLRLSCAASGNISYDPDMGWYRQAPGKERELVAGISEGAITNYADSVKGRFTISRDNAKNTVYLQMNSLKPEDTAVYYCAAPFTLTTLYYYWGQGTQVTVSS

SEQ ID NO: 7579 - protein, 122 aa, Artificial Sequence
  Chemically Synthesized
QVQLQESGGGLVQAGGSLRLSCAASGSISNEPSMGWYRQAPGKEREFVAGIDAGTTTYYADSVKGRFTISRDNAKNTVYLQMNSLKPEDTAVYYCAVDVDKYDVTVQDHEYWGQGTQVTVSS

SEQ ID NO: 7580 - protein, 121 aa, Artificial Sequence
  Chemically Synthesized
QVQLQESGGGLVQAGGSLRLSCAASGSISYDRLMGWYRQAPGKERELVAGINDGAITNYADSVKGRFTISRDNAKNTVYLQMNSLKPEDTAVYYCAVYDLQDSKLTTTMYWGQGTQVTVSS

SEQ ID NO: 7581 - protein, 127 aa, Artificial Sequence
  Chemically Synthesized
QVQLQESGGGLVQAGGSLRLSCAASGNIFAYVAMGWYRQAPGKEREFVASIDYGTTTYYADSVKGRFTISRDNAKNTVYLQMNSLKPEDTAVYYCAAYDGPAVDSYSARYDGPHHYWGQGTQVTVSS

SEQ ID NO: 7582 - protein, 122 aa, Artificial Sequence
  Chemically Synthesized
QVQLQESGGGLVQAGGSLRLSCAASGNIFFVVSMGWYRQAPGKERELVAAIAFGASTNYADSVKGRFTISRDNAKNTVYLQMNSLKPEDTAVYYCAATVPYYDVTYRIHGYWGQGTQVTVSS

SEQ ID NO: 7583 - protein, 124 aa, Artificial Sequence
  Chemically Synthesized
QVQLQESGGGLVQAGGSLRLSCAASGNILWTLMGWYRQAPGKEREFVASIGSGTNTNYADSVKGRFTISRDNAKNTVYLQMNSLKPEDTAVYYCAAEYGYTVTTVTTVLTTMYWGQGTQVTVSS

SEQ ID NO: 7584 - protein, 118 aa, Artificial Sequence
  Chemically Synthesized
QVQLQESGGGLVQAGGSLRLSCAASGYIFPSYVMGWYRQAPGKERELVASIYQYADSVKGRFTISRDNAKNTVYLQMNSLKPEDTAVYYCAAWGIYRDRGDGVGHAYWGQGTQVTVSS

SEQ ID NO: 7585 - protein, 118 aa, Artificial Sequence
  Chemically Synthesized
QVQLQESGGGLVQAGGSLRLSCAASGSISPSIYMGWYRQAPGKEREFVAGISWGGSTYYADSVKGRFTISRDNAKNTVYLQMNSLKPEDTAVYYCAAYRPGDDGHYYWGQGTQVTVSS

SEQ ID NO: 7586 - protein, 122 aa, Artificial Sequence
  Chemically Synthesized
QVQLQESGGGLVQAGGSLRLSCAASGNIFPLDGMGWYRQAPGKEREFVAGINDGTITNYADSVKGRFTISRDNAKNTVYLQMNSLKPEDTAVYYCAVPYGWRYDGDGDYEYWGQGTQVTVSS

SEQ ID NO: 7587 - protein, 122 aa, Artificial Sequence
  Chemically Synthesized
QVQLQESGGGLVQAGGSLRLSCAASGYISADVYMGWYRQAPGKERELVAGIGPGANTNYADSVKGRFTISRDNAKNTVYLQMNSLKPEDTAVYYCAARHAPYDYPYTRLPYWGQGTQVTVSS

SEQ ID NO: 7588 - protein, 118 aa, Artificial Sequence
  Chemically Synthesized
QVQLQESGGGLVQAGGSLRLSCAASGNIFDSPYMGWYRQAPGKEREFVAGIAYGAITNYADSVKGRFTISRDNAKNTVYLQMNSLKPEDTAVYYCAVDSLTALHFAYWGQGTQVTVSS

SEQ ID NO: 7589 - protein, 118 aa, Artificial Sequence
  Chemically Synthesized
QVQLQESGGGLVQAGGSLRLSCAASGSISYYDYMGWYRQAPGKEREFVASISTGGNTYYADSVKGRFTISRDNAKNTVYLQMNSLKPEDTAVYYCAAYPYLSSTYTYWGQGTQVTVSS

SEQ ID NO: 7590 - protein, 119 aa, Artificial Sequence
  Chemically Synthesized
QVQLQESGGGLVQAGGSLRLSCAASGNISSSRSMGWYRQAPGKERELVASITAGTSTNYADSVKGRFTISRDNAKNTVYLQMNSLKPEDTAVYYCAAGGASYTVQFSYWGQGTQVTVSS

SEQ ID NO: 7591 - protein, 117 aa, Artificial Sequence
  Chemically Synthesized
QVQLQESGGGLVQAGGSLRLSCAASGYISSRLMGWYRQAPGKERELVATIDHGSSTNYADSVKGRFTISRDNAKNTVYLQMNSLKPEDTAVYYCAASFVDDGYLYYWGQGTQVTVSS

SEQ ID NO: 7592 - protein, 118 aa, Artificial Sequence
  Chemically Synthesized
QVQLQESGGGLVQAGGSLRLSCAASGTISYPWTMGWYRQAPGKERELVAAIARGGNTYYADSVKGRFTISRDNAKNTVYLQMNSLKPEDTAVYYCAAVGTYQRDFTYWGQGTQVTVSS

SEQ ID NO: 7593 - protein, 118 aa, Artificial Sequence
  Chemically Synthesized
QVQLQESGGGLVQAGGSLRLSCAASGTISRGDYMGWYRQAPGKERELVAAINVGGSTNYADSVKGRFTISRDNAKNTVYLQMNSLKPEDTAVYYCAAIYNAGSEYWYWGQGTQVTVSS

SEQ ID NO: 7594 - protein, 122 aa, Artificial Sequence
  Chemically Synthesized
QVQLQESGGGLVQAGGSLRLSCAASGTISGPTWMGWYRQAPGKERELVAGIATGTITYYADSVKGRFTISRDNAKNTVYLQMNSLKPEDTAVYYCAVENDDGYPAYGHLVYWGQGTQVTVSS

SEQ ID NO: 7595 - protein, 122 aa, Artificial Sequence
  Chemically Synthesized
QVQLQESGGGLVQAGGSLRLSCAASGYIFGPGRMGWYRQAPGKERELVATIDTGANTNYADSVKGRFTISRDNAKNTVYLQMNSLKPEDTAVYYCAAHLAGYANGPGWFRYWGQGTQVTVSS

SEQ ID NO: 7596 - protein, 122 aa, Artificial Sequence
  Chemically Synthesized
QVQLQESGGGLVQAGGSLRLSCAASGYIFDLEYMGWYRQAPGKEREFVAAIATGSITNYADSVKGRFTISRDNAKNTVYLQMNSLKPEDTAVYYCAARAKNIGGLSANLQYWGQGTQVTVSS

SEQ ID NO: 7597 - protein, 118 aa, Artificial Sequence
  Chemically Synthesized
QVQLQESGGGLVQAGGSLRLSCAASGTIFDRGYMGWYRQAPGKEREFVAGITTGSSTYYADSVKGRFTISRDNAKNTVYLQMNSLKPEDTAVYYCAVVDASSRELSYWGQGTQVTVSS

SEQ ID NO: 7598 - protein, 122 aa, Artificial Sequence
  Chemically Synthesized
QVQLQESGGGLVQAGGSLRLSCAASGTIFQYVYMGWYRQAPGKERELVASITQGGTTNYADSVKGRFTISRDNAKNTVYLQMNSLKPEDTAVYYCAADWRDYIYVYAYYPYWGQGTQVTVSS

SEQ ID NO: 7599 - protein, 118 aa, Artificial Sequence
  Chemically Synthesized
QVQLQESGGGLVQAGGSLRLSCAASGNIFIYKTMGWYRQAPGKERELVAAITYGTSTYYADSVKGRFTISRDNAKNTVYLQMNSLKPEDTAVYYCAAYWFGRDTYVYWGQGTQVTVSS

SEQ ID NO: 7600 - protein, 125 aa, Artificial Sequence
  Chemically Synthesized
QVQLQESGGGLVQAGGSLRLSCAASGSISTESTMGWYRQAPGKERELVATIDYGGITYYADSVKGRFTISRDNAKNTVYLQMNSLKPEDTAVYYCAVYWWFPPIYGQRYLPFGYWGQGTQVTVSS

SEQ ID NO: 7601 - protein, 116 aa, Artificial Sequence
  Chemically Synthesized
QVQLQESGGGLVQAGGSLRLSCAASGTISRGDYMGWYRQAPGKERELVAAINVGGSTNYADSVKGRFTISRDNAKNTVYLQMNSLKPEDTAVYYCAVVDPQYHIYWGQGTQVTVSS

SEQ ID NO: 7602 - protein, 118 aa, Artificial Sequence
  Chemically Synthesized
QVQLQESGGGLVQAGGSLRLSCAASGNISGAYDMGWYRQAPGKERELVAAITGGSSTNYADSVKGRFTISRDNAKNTVYLQMNSLKPEDTAVYYCAVTWLHTLPFDYWGQGTQVTVSS

SEQ ID NO: 7603 - protein, 118 aa, Artificial Sequence
  Chemically Synthesized
QVQLQESGGGLVQAGGSLRLSCAASGNIFATSYMGWYRQAPGKEREFVAGINSGSNTYYADSVKGRFTISRDNAKNTVYLQMNSLKPEDTAVYYCAVYDYIDSTHGYWGQGTQVTVSS

SEQ ID NO: 7604 - protein, 122 aa, Artificial Sequence
  Chemically Synthesized
QVQLQESGGGLVQAGGSLRLSCAASGTIFDVEYMGWYRQAPGKEREFVAAISFGAITYYADSVKGRFTISRDNAKNTVYLQMNSLKPEDTAVYYCAAHLAGYANGPGWFRYWGQGTQVTVSS

SEQ ID NO: 7605 - protein, 120 aa, Artificial Sequence
  Chemically Synthesized
QVQLQESGGGLVQAGGSLRLSCAASGNISESLMGWYRQAPGKEREFVAAIGFGANTNYADSVKGRFTISRDNAKNTVYLQMNSLKPEDTAVYYCAARSCSTTLGFTTIYWGQGTQVTVSS

SEQ ID NO: 7606 - protein, 125 aa, Artificial Sequence
  Chemically Synthesized
QVQLQESGGGLVQAGGSLRLSCAASGNISVVGYMGWYRQAPGKEREFVAAITYGATTYYADSVKGRFTISRDNAKNTVYLQMNSLKPEDTAVYYCAATSRLVVCWTVFLGLFLYWGQGTQVTVSS

SEQ ID NO: 7607 - protein, 118 aa, Artificial Sequence
  Chemically Synthesized
QVQLQESGGGLVQAGGSLRLSCAASGTIFAQYTMGWYRQAPGKERELVAAISKGASTQYADSVKGRFTISRDNAKNTVYLQMNSLKPEDTAVYYCAADIPDLYGHAYWGQGTQVTVSS

SEQ ID NO: 7608 - protein, 126 aa, Artificial Sequence
  Chemically Synthesized
QVQLQESGGGLVQAGGSLRLSCAASGTIFNDAIMGWYRQAPGKERELVAGIASGANTYYADSVKGRFTISRDNAKNTVYLQMNSLKPEDTAVYYCAVAWRQYDRTDQVHGVPHWYWGQGTQVTVSS

SEQ ID NO: 7609 - protein, 122 aa, Artificial Sequence
  Chemically Synthesized
QVQLQESGGGLVQAGGSLRLSCAASGTISYGHYEMGWYRQAPGKEREFVASIGWGSSTNYADSVKGRFTISRDNAKNTVYLQMNSLKPEDTAVYYCAAGTDNARAVLDSIYWGQGTQVTVSS

SEQ ID NO: 7610 - protein, 125 aa, Artificial Sequence
  Chemically Synthesized
QVQLQESGGGLVQAGGSLRLSCAASGYISSYGMGWYRQAPGKEREFVAAIDYGGTTYYADSVKGRFTISRDNAKNTVYLQMNSLKPEDTAVYYCAVISHRGDSLYTYYDGRYDYWGQGTQVTVSS

SEQ ID NO: 7611 - protein, 126 aa, Artificial Sequence
  Chemically Synthesized
QVQLQESGGGLVQAGGSLRLSCAASGTISYADVMGWYRQAPGKEREFVAGITGGSTTKYADSVKGRFTISRDNAKNTVYLQMNSLKPEDTAVYYCAVKAYSNYLERTPSYYVYPYWGQGTQVTVSS

SEQ ID NO: 7612 - protein, 122 aa, Artificial Sequence
  Chemically Synthesized
QVQLQESGGGLVQAGGSLRLSCAASGNIFWYRYMGWYRQAPGKEREFVATIDGGSSTYYADSVKGRFTISRDNAKNTVYLQMNSLKPEDTAVYYCAVDGAPYPYDYRDLFYWGQGTQVTVSS

SEQ ID NO: 7613 - protein, 125 aa, Artificial Sequence
  Chemically Synthesized
QVQLQESGGGLVQAGGSLRLSCAASGSISWGSMGWYRQAPGKERELVAAINDGATTNYADSVKGRFTISRDNAKNTVYLQMNSLKPEDTAVYYCAAYTGFNVLSHVRYPGPLGYWGQGTQVTVSS

SEQ ID NO: 7614 - protein, 111 aa, Artificial Sequence
  Chemically Synthesized
QVQLQESGGGLVQAGGSLRLSCAASGTISGPLHMGWYRQAPGKERELVATINYGASTNYADSVKGRFTISRDNAKNTVYLQMNSLKPEDTAVYYCAEFDYWGQGTQVTVSS

SEQ ID NO: 7615 - protein, 116 aa, Artificial Sequence
  Chemically Synthesized
QVQLQESGGGLVQAGGSLRLSCAASGSISASTMGWYRQAPGKEREFVASITEGTTTYYADSVKGRFTISRDNAKNTVYLQMNSLKPEDTAVYYCAVPYYFYGYAYWGQGTQVTVSS

SEQ ID NO: 7616 - protein, 122 aa, Artificial Sequence
  Chemically Synthesized
QVQLQESGGGLVQAGGSLRLSCAASGNIFDQFYMGWYRQAPGKEREFVASIDYGTNTNYADSVKGRFTISRDNAKNTVYLQMNSLKPEDTAVYYCAVWPYDQYYEQAEHYYWGQGTQVTVSS

SEQ ID NO: 7617 - protein, 118 aa, Artificial Sequence
  Chemically Synthesized
QVQLQESGGGLVQAGGSLRLSCAASGTISEYDVMGWYRQAPGKERELVAAIGDGSNTYYADSVKGRFTISRDNAKNTVYLQMNSLKPEDTAVYYCAAYITGYAVLYYWGQGTQVTVSS

SEQ ID NO: 7618 - protein, 122 aa, Artificial Sequence
  Chemically Synthesized
QVQLQESGGGLVQAGGSLRLSCAASGNISSYPYMGWYRQAPGKEREFVATITYGGSTYYADSVKGRFTISRDNAKNTVYLQMNSLKPEDTAVYYCAVVDNTGGATKSILWYWGQGTQVTVSS

SEQ ID NO: 7619 - protein, 117 aa, Artificial Sequence
  Chemically Synthesized
QVQLQESGGGLVQAGGSLRLSCAASGSISSTSMGWYRQAPGKEREFVASIDTGSNTYYADSVKGRFTISRDNAKNTVYLQMNSLKPEDTAVYYCAAAGYYSRDYHYWGQGTQVTVSS

SEQ ID NO: 7620 - protein, 122 aa, Artificial Sequence
  Chemically Synthesized
QVQLQESGGGLVQAGGSLRLSCAASGTISGYYKMGWYRQAPGKERELVAAIDGGGTTYYADSVKGRFTISRDNAKNTVYLQMNSLKPEDTAVYYCAAYTVPSYSNYDYYGYWGQGTQVTVSS

SEQ ID NO: 7621 - protein, 117 aa, Artificial Sequence
  Chemically Synthesized
QVQLQESGGGLVQAGGSLRLSCAASGSIFTTTMGWYRQAPGKERELVAGIDWGGSTNYADSVKGRFTISRDNAKNTVYLQMNSLKPEDTAVYYCAVNAYDGALHVYWGQGTQVTVSS

SEQ ID NO: 7622 - protein, 118 aa, Artificial Sequence
  Chemically Synthesized
QVQLQESGGGLVQAGGSLRLSCAASGYISRRNFMGWYRQAPGKERELVASIAGGSNTYYADSVKGRFTISRDNAKNTVYLQMNSLKPEDTAVYYCAVYSRDTSVFDYWGQGTQVTVSS

SEQ ID NO: 7623 - protein, 122 aa, Artificial Sequence
  Chemically Synthesized
QVQLQESGGGLVQAGGSLRLSCAASGTISGDQSMGWYRQAPGKEREFVATISDGTTTYYADSVKGRFTISRDNAKNTVYLQMNSLKPEDTAVYYCAADYSNRRSPPWDFWYWGQGTQVTVSS

SEQ ID NO: 7624 - protein, 121 aa, Artificial Sequence
  Chemically Synthesized
QVQLQESGGGLVQAGGSLRLSCAASGYISYEPYMGWYRQAPGKERELLPLLGRWYYLYADSVKGRFTISRDNAKNTVYLQMNSLKPEDTAVYYCAAEHYYTGVVTVGYLYWGQGTQVTVSS

SEQ ID NO: 7625 - protein, 118 aa, Artificial Sequence
  Chemically Synthesized
QVQLQESGGGLVQAGGSLRLSCAASGSISRVYAMGWYRQAPGKERELVATIGHGANTNYADSVKGRFTISRDNAKNTVYLQMNSLKPEDTAVYYCAVEGDYAGRHGYWGQGTQVTVSS

SEQ ID NO: 7626 - protein, 117 aa, Artificial Sequence
  Chemically Synthesized
QVQLQESGGGLVQAGGSLRLSCAASGSISEDNSMGWYRQAPGKERELVASISRGGSTYYADSVKGRFTISRDNAKNTVYLQMNSLKPEDTAVYYCAADTSVVTLLYWGQGTQVTVSS

SEQ ID NO: 7627 - protein, 126 aa, Artificial Sequence
  Chemically Synthesized
QVQLQESGGGLVQAGGSLRLSCAASGYISERPYMGWYRQAPGKEREFVATIAVGGTTNYADSVKGRFTISRDNAKNTVYLQMNSLKPEDTAVYYCAVDVQVEVKYDGYDITGHGYWGQGTQVTVSS

SEQ ID NO: 7628 - protein, 126 aa, Artificial Sequence
  Chemically Synthesized
QVQLQESGGGLVQAGGSLRLSCAASGSISVGHVMGWYRQAPGKERELVASISYGGSTNYADSVKGRFTISRDNAKNTVYLQMNSLKPEDTAVYYCAAGRYYYGRWRYPYRGALHYWGQGTQVTVSS

SEQ ID NO: 7629 - protein, 118 aa, Artificial Sequence
  Chemically Synthesized
QVQLQESGGGLVQAGGSLRLSCAASGYIFDHPYMGWYRQAPGKERELVAAIGLGTTTNYADSVKGRFTISRDNAKNTVYLQMNSLKPEDTAVYYCAVGRVNQDPLPYWGQGTQVTVSS

SEQ ID NO: 7630 - protein, 118 aa, Artificial Sequence
  Chemically Synthesized
QVQLQESGGGLVQAGGSLRLSCAASGYISVRAKMGWYRQAPGKERELVAAIASGGSTYYADSVKGRFTISRDNAKNTVYLQMNSLKPEDTAVYYCAVYVTFSRGHGYWGQGTQVTVSS

SEQ ID NO: 7631 - protein, 119 aa, Artificial Sequence
  Chemically Synthesized
QVQLQESGGGLVQAGGSLRLSCAASGTISWFAQMGWYRQAPGKERELVAAINRGTNTNYADSVKGRFTISRDNAKNTVYLQMNSLKPEDTAVYYCAVPNRDAYGGYAYWGQGTQVTVSS

SEQ ID NO: 7632 - protein, 126 aa, Artificial Sequence
  Chemically Synthesized
QVQLQESGGGLVQAGGSLRLSCAASGNISPIYYMGWYRQAPGKEREFVASISLGATTNYADSVKGRFTISRDNAKNTVYLQMNSLKPEDTAVYYCAAGYLTYRWNWVRDHTVLVYWGQGTQVTVSS

SEQ ID NO: 7633 - protein, 118 aa, Artificial Sequence
  Chemically Synthesized
QVQLQESGGGLVQAGGSLRLSCAASGNIFPGVSMGWYRQAPGKERELVAAISLGGNTNYADSVKGRFTISRDNAKNTVYLQMNSLKPEDTAVYYCAVGGGSRTYFYYWGQGTQVTVSS

SEQ ID NO: 7634 - protein, 117 aa, Artificial Sequence
  Chemically Synthesized
QVQLQESGGGLVQAGGSLRLSCAASGYISSSVMGWYRQAPGKEREFVASINTGAITYYADSVKGRFTISRDNAKNTVYLQMNSLKPEDTAVYYCAADNERYYALVYWGQGTQVTVSS

SEQ ID NO: 7635 - protein, 116 aa, Artificial Sequence
  Chemically Synthesized
QVQLQESGGGLVQAGGSLRLSCAASGSISWVWDMGWYRQAPGKERELKVVLPYADSVKGRFTISRDNAKNTVYLQMNSLKPEDTAVYYCAATQTPYLNDDGEYRYWGQGTQVTVSS

SEQ ID NO: 7636 - protein, 112 aa, Artificial Sequence
  Chemically Synthesized
QVQLQESGGGLVQAGGSLRLSCAASGYIFIIDWMGWYRQAPGKERELVGYYQYADSVKGRFTISRDNAKNTVYLQMNSLKPEDTAVYYCAVIDQAYPSFVYWGQGTQVTVSS

SEQ ID NO: 7637 - protein, 117 aa, Artificial Sequence
  Chemically Synthesized
QVQLQESGGGLVQAGGSLRLSCAASGSIFAYSFMGWYRQAPGKERELVAGISGGTSTNYADSVKGRFTISRDNAKNTVYLQMNSLKPEDTAVYYCAVRYRTLLRLYWGQGTQVTVSS

SEQ ID NO: 7638 - protein, 120 aa, Artificial Sequence
  Chemically Synthesized
QVQLQESGGGLVQAGGSLRLSCAASGSISASVRMGWYRQAPGKERELVAGIGWYYQYADSVKGRFTISRDNAKNTVYLQMNSLKPEDTAVYYCAAEYLSPVSNGTRHVYWGQGTQVTVSS

SEQ ID NO: 7639 - protein, 118 aa, Artificial Sequence
  Chemically Synthesized
QVQLQESGGGLVQAGGSLRLSCAASGTIFQGAEMGWYRQAPGKEREFVAAISRGTNTNYADSVKGRFTISRDNAKNTVYLQMNSLKPEDTAVYYCAADHRNGADFDYWGQGTQVTVSS

SEQ ID NO: 7640 - protein, 118 aa, Artificial Sequence
  Chemically Synthesized
QVQLQESGGGLVQAGGSLRLSCAASGTISYYRRMGWYRQAPGKERELVAGISDGSTTYYADSVKGRFTISRDNAKNTVYLQMNSLKPEDTAVYYCAVPSRRTASHDYWGQGTQVTVSS

SEQ ID NO: 7641 - protein, 116 aa, Artificial Sequence
  Chemically Synthesized
QVQLQESGGGLVQAGGSLRLSCAASGYISGSVMGWYRQAPGKERELVAAIDNGTSTNYADSVKGRFTISRDNAKNTVYLQMNSLKPEDTAVYYCAVTVTWTTTIYWGQGTQVTVSS

SEQ ID NO: 7642 - protein, 122 aa, Artificial Sequence
  Chemically Synthesized
QVQLQESGGGLVQAGGSLRLSCAASGNISRYSDMGWYRQAPGKEREFVATIDYGGSTNYADSVKGRFTISRDNAKNTVYLQMNSLKPEDTAVYYCAAGGSYGTYNETGHAYWGQGTQVTVSS

SEQ ID NO: 7643 - protein, 118 aa, Artificial Sequence
  Chemically Synthesized
QVQLQESGGGLVQAGGSLRLSCAASGTIFSRSGMGWYRQAPGKERELVAGISYGTNTYYADSVKGRFTISRDNAKNTVYLQMNSLKPEDTAVYYCAADQGDGRPLGYWGQGTQVTVSS

SEQ ID NO: 7644 - protein, 118 aa, Artificial Sequence
  Chemically Synthesized
QVQLQESGGGLVQAGGSLRLSCAASGNIFIYSNMGWYRQAPGKEREFVASITDGGSTYYADSVKGRFTISRDNAKNTVYLQMNSLKPEDTAVYYCAAGQDTLYAFYYWGQGTQVTVSS

SEQ ID NO: 7645 - protein, 118 aa, Artificial Sequence
  Chemically Synthesized
QVQLQESGGGLVQAGGSLRLSCAASGSISAVRTMGWYRQAPGKERELVAGITLGTSTNYADSVKGRFTISRDNAKNTVYLQMNSLKPEDTAVYYCAARPTLLSGYDYWGQGTQVTVSS

SEQ ID NO: 7646 - protein, 118 aa, Artificial Sequence
  Chemically Synthesized
QVQLQESGGGLVQAGGSLRLSCAASGNIFGRGYMGWYRQAPGKERELVASIGRGAITYYADSVKGRFTISRDNAKNTVYLQMNSLKPEDTAVYYCAVHRGASRLFGYWGQGTQVTVSS

SEQ ID NO: 7647 - protein, 122 aa, Artificial Sequence
  Chemically Synthesized
QVQLQESGGGLVQAGGSLRLSCAASGTISPYLAMGWYRQAPGKERELVATIGWGGITYYADSVKGRFTISRDNAKNTVYLQMNSLKPEDTAVYYCAAANRDFGYWRAVHRYWGQGTQVTVSS

SEQ ID NO: 7648 - protein, 118 aa, Artificial Sequence
  Chemically Synthesized
QVQLQESGGGLVQAGGSLRLSCAASGTIFGTQGMGWYRQAPGKEREFVATIDPGGSTYYADSVKGRFTISRDNAKNTVYLQMNSLKPEDTAVYYCAADEGYGDYFWYWGQGTQVTVSS

SEQ ID NO: 7649 - protein, 122 aa, Artificial Sequence
  Chemically Synthesized
QVQLQESGGGLVQAGGSLRLSCAASGNISRSRSMGWYRQAPGKEREFVAAIAGGAITNYADSVKGRFTISRDNAKNTVYLQMNSLKPEDTAVYYCAVTPYRTYGQRYSHAYWGQGTQVTVSS

SEQ ID NO: 7650 - protein, 118 aa, Artificial Sequence
  Chemically Synthesized
QVQLQESGGGLVQAGGSLRLSCAASGTISDSVRMGWYRQAPGKEREFVASITEGASTYYADSVKGRFTISRDNAKNTVYLQMNSLKPEDTAVYYCAAETTGYYAYYYWGQGTQVTVSS

SEQ ID NO: 7651 - protein, 118 aa, Artificial Sequence
  Chemically Synthesized
QVQLQESGGGLVQAGGSLRLSCAASGTISRRYSMGWYRQAPGKERELVAAISQGGNTNYADSVKGRFTISRDNAKNTVYLQMNSLKPEDTAVYYCAVFAYGTYRHNYWGQGTQVTVSS

SEQ ID NO: 7652 - protein, 126 aa, Artificial Sequence
  Chemically Synthesized
QVQLQESGGGLVQAGGSLRLSCAASGSISRDPDMGWYRQAPGKERELVAGIGYGSNTNYADSVKGRFTISRDNAKNTVYLQMNSLKPEDTAVYYCAVGTQYDPPYGYSDYAGYDYWGQGTQVTVSS

SEQ ID NO: 7653 - protein, 118 aa, Artificial Sequence
  Chemically Synthesized
QVQLQESGGGLVQAGGSLRLSCAASGSIFQRNYMGWYRQAPGKERELVAAIGYGTITYYADSVKGRFTISRDNAKNTVYLQMNSLKPEDTAVYYCAVGVFESRAHTYWGQGTQVTVSS

SEQ ID NO: 7654 - protein, 118 aa, Artificial Sequence
  Chemically Synthesized
QVQLQESGGGLVQAGGSLRLSCAASGNISHGRSMGWYRQAPGKEREFVATINRGTTTNYADSVKGRFTISRDNAKNTVYLQMNSLKPEDTAVYYCAAYRLGWRYLVYWGQGTQVTVSS

SEQ ID NO: 7655 - protein, 122 aa, Artificial Sequence
  Chemically Synthesized
QVQLQESGGGLVQAGGSLRLSCAASGNIFRHRRMGWYRQAPGKERELVATIGKGASTYYADSVKGRFTISRDNAKNTVYLQMNSLKPEDTAVYYCAVSTYSARWHGEDYAYWGQGTQVTVSS

SEQ ID NO: 7656 - protein, 122 aa, Artificial Sequence
  Chemically Synthesized
QVQLQESGGGLVQAGGSLRLSCAASGSISDYHTMGWYRQAPGKEREFVAGITFGSTTYYADSVKGRFTISRDNAKNTVYLQMNSLKPEDTAVYYCAAPLPKDNVFIAEHRYWGQGTQVTVSS

SEQ ID NO: 7657 - protein, 118 aa, Artificial Sequence
  Chemically Synthesized
QVQLQESGGGLVQAGGSLRLSCAASGSISRRKYMGWYRQAPGKEREFVAAISRGGSTYYADSVKGRFTISRDNAKNTVYLQMNSLKPEDTAVYYCAVNVGSSIYHGYWGQGTQVTVSS

SEQ ID NO: 7658 - protein, 119 aa, Artificial Sequence
  Chemically Synthesized
QVQLQESGGGLVQAGGSLRLSCAASGYISGRDDMGWYRQAPGKERELVAGIGYGDYADSVKGRFTISRDNAKNTVYLQMNSLKPEDTAVYYCAAGFAIGGASYDDLLYWGQGTQVTVSS

SEQ ID NO: 7659 - protein, 118 aa, Artificial Sequence
  Chemically Synthesized
QVQLQESGGGLVQAGGSLRLSCAASGTIFTSGVMGWYRQAPGKEREFVASISPGTNTYYADSVKGRFTISRDNAKNTVYLQMNSLKPEDTAVYYCAAPLPDSDALWYWGQGTQVTVSS

SEQ ID NO: 7660 - protein, 122 aa, Artificial Sequence
  Chemically Synthesized
QVQLQESGGGLVQAGGSLRLSCAASGTIFNNYDMGWYRQAPGKEREFVAAINPGTTTYYADSVKGRFTISRDNAKNTVYLQMNSLKPEDTAVYYCAAYDYDVPDRFYPHGYWGQGTQVTVSS

SEQ ID NO: 7661 - protein, 116 aa, Artificial Sequence
  Chemically Synthesized
QVQLQESGGGLVQAGGSLRLSCAASGYIFKTNTMGWYRQAPGKERELVAMVTVVIPYADSVKGRFTISRDNAKNTVYLQMNSLKPEDTAVYYCAALVWGDAYLGYWGQGTQVTVSS

SEQ ID NO: 7662 - protein, 111 aa, Artificial Sequence
  Chemically Synthesized
QVQLQESGGGLVQAGGSLRLSCAASGYISEYQYMGWYRQAPGKERELVAGINNGATTNYADSVKGRFTISRDNAKNTVYLQMNSLKPEDTAVYYCAAGFYWGQGTQVTVSS

SEQ ID NO: 7663 - protein, 122 aa, Artificial Sequence
  Chemically Synthesized
QVQLQESGGGLVQAGGSLRLSCAASGTISDDTYMGWYRQAPGKEREFVASITGGTTTNYADSVKGRFTISRDNAKNTVYLQMNSLKPEDTAVYYCAVGGLYYAGLFYDLSYWGQGTQVTVSS

SEQ ID NO: 7664 - protein, 118 aa, Artificial Sequence
  Chemically Synthesized
QVQLQESGGGLVQAGGSLRLSCAASGNISPSHAMGWYRQAPGKEREFVAAITYGGNTNYADSVKGRFTISRDNAKNTVYLQMNSLKPEDTAVYYCAVILEYHGDHTYWGQGTQVTVSS

SEQ ID NO: 7665 - protein, 117 aa, Artificial Sequence
  Chemically Synthesized
QVQLQESGGGLVQAGGSLRLSCAASGTIFAQARMGWYRQAPGKEREFVAAINTVLLPYADSVKGRFTISRDNAKNTVYLQMNSLKPEDTAVYYCAVFPSQPTDLAYWGQGTQVTVSS

SEQ ID NO: 7666 - protein, 110 aa, Artificial Sequence
  Chemically Synthesized
QVQLQESGGGLVQAGGSLRLSCAASGTISADLDMGWYRQAPGKERELVAGINDGANTNYADSVKGRFTISRDNAKNTVYLQMNSLKPEDTAVYYCAFYYWGQGTQVTVSS

SEQ ID NO: 7667 - protein, 118 aa, Artificial Sequence
  Chemically Synthesized
QVQLQESGGGLVQAGGSLRLSCAASGYISRPSAMGWYRQAPGKERELVASISTGGITYYADSVKGRFTISRDNAKNTVYLQMNSLKPEDTAVYYCAVHPTPTESLDYWGQGTQVTVSS

SEQ ID NO: 7668 - protein, 118 aa, Artificial Sequence
  Chemically Synthesized
QVQLQESGGGLVQAGGSLRLSCAASGNISWQYFMGWYRQAPGKERELVAAINEGGITNYADSVKGRFTISRDNAKNTVYLQMNSLKPEDTAVYYCAALFDNAWDYEYWGQGTQVTVSS

SEQ ID NO: 7669 - protein, 118 aa, Artificial Sequence
  Chemically Synthesized
QVQLQESGGGLVQAGGSLRLSCAASGSISDWYLMGWYRQAPGKERELVATITHGGSTNYADSVKGRFTISRDNAKNTVYLQMNSLKPEDTAVYYCAAQGYEASAFVYWGQGTQVTVSS

SEQ ID NO: 7670 - protein, 126 aa, Artificial Sequence
  Chemically Synthesized
QVQLQESGGGLVQAGGSLRLSCAASGSISRFYDMGWYRQAPGKERELVATIGPGATTNYADSVKGRFTISRDNAKNTVYLQMNSLKPEDTAVYYCAAYLAYVPYWSYQSFNGFPYWGQGTQVTVSS

SEQ ID NO: 7671 - protein, 122 aa, Artificial Sequence
  Chemically Synthesized
QVQLQESGGGLVQAGGSLRLSCAASGYISAVRDMGWYRQAPGKERELVAAIAYGGNTYYADSVKGRFTISRDNAKNTVYLQMNSLKPEDTAVYYCAAYLRYDRSDQYDYDYWGQGTQVTVSS

SEQ ID NO: 7672 - protein, 117 aa, Artificial Sequence
  Chemically Synthesized
QVQLQESGGGLVQAGGSLRLSCAASGTIFAPAMGWYRQAPGKERELVAAITVGSTTYYADSVKGRFTISRDNAKNTVYLQMNSLKPEDTAVYYCAALYWLPVILGYWGQGTQVTVSS

SEQ ID NO: 7673 - protein, 118 aa, Artificial Sequence
  Chemically Synthesized
QVQLQESGGGLVQAGGSLRLSCAASGSIFAPTDMGWYRQAPGKERELVAAITGGANTNYADSVKGRFTISRDNAKNTVYLQMNSLKPEDTAVYYCAVYDGDNSQYYYWGQGTQVTVSS

SEQ ID NO: 7674 - protein, 126 aa, Artificial Sequence
  Chemically Synthesized
QVQLQESGGGLVQAGGSLRLSCAASGTIFDLPHMGWYRQAPGKEREFVATIGEGTNTNYADSVKGRFTISRDNAKNTVYLQMNSLKPEDTAVYYCAVYGYYDGDPDGGDPPQHAYWGQGTQVTVSS

SEQ ID NO: 7675 - protein, 109 aa, Artificial Sequence
  Chemically Synthesized
QVQLQESGGGLVQAGGSLRLSCAASGSISGLSMGWYRQAPGKEREFVAGIAGGGSTNYADSVKGRFTISRDNAKNTVYLQMNSLKPEDTAVYYCALDYWGQGTQVTVSS

SEQ ID NO: 7676 - protein, 117 aa, Artificial Sequence
  Chemically Synthesized
QVQLQESGGGLVQAGGSLRLSCAASGTIFQPFNMGWYRQAPGKEREFVASIDHGGNTYYADSVKGRFTISRDNAKNTVYLQMNSLKPEDTAVYYCAVSSTRLTNFYWGQGTQVTVSS

SEQ ID NO: 7677 - protein, 117 aa, Artificial Sequence
  Chemically Synthesized
QVQLQESGGGLVQAGGSLRLSCAASGTIFRPYTMGWYRQAPGKERELVATIAAGGTTNYADSVKGRFTISRDNAKNTVYLQMNSLKPEDTAVYYCAVESKKFTVIYWGQGTQVTVSS

SEQ ID NO: 7678 - protein, 119 aa, Artificial Sequence
  Chemically Synthesized
QVQLQESGGGLVQAGGSLRLSCAASGSISGAVVMGWYRQAPGKERELVAAIDDGTITYYADSVKGRFTISRDNAKNTVYLQMNSLKPEDTAVYYCAAYGLEVSPHDIYWGQGTQVTVSS

SEQ ID NO: 7679 - protein, 118 aa, Artificial Sequence
  Chemically Synthesized
QVQLQESGGGLVQAGGSLRLSCAASGYIFLSDYMGWYRQAPGKEREFVASIGAGSTTNYADSVKGRFTISRDNAKNTVYLQMNSLKPEDTAVYYCAAYSDIEAPHQYWGQGTQVTVSS

SEQ ID NO: 7680 - protein, 109 aa, Artificial Sequence
  Chemically Synthesized
QVQLQESGGGLVQAGGSLRLSCAASGTIFPYYTMGWYRQAPGKERELVAGISRGSSTNYADSVKGRFTISRDNAKNTVYLQMNSLKPEDTAVYYCAIYWGQGTQVTVSS

SEQ ID NO: 7681 - protein, 117 aa, Artificial Sequence
  Chemically Synthesized
QVQLQESGGGLVQAGGSLRLSCAASGNISLNDDMGWYRQAPGKEREFVAAINRGSTTNYADSVKGRFTISRDNAKNTVYLQMNSLKPEDTAVYYCAVTQQYRLPQYWGQGTQVTVSS

SEQ ID NO: 7682 - protein, 122 aa, Artificial Sequence
  Chemically Synthesized
QVQLQESGGGLVQAGGSLRLSCAASGYISTSRNMGWYRQAPGKEREFVAGIAFGGTTNYADSVKGRFTISRDNAKNTVYLQMNSLKPEDTAVYYCAATTAPPYLWLYRHIYWGQGTQVTVSS

SEQ ID NO: 7683 - protein, 117 aa, Artificial Sequence
  Chemically Synthesized
QVQLQESGGGLVQAGGSLRLSCAASGTIFPEDNMGWYRQAPGKERELVAAIASGATTNYADSVKGRFTISRDNAKNTVYLQMNSLKPEDTAVYYCAADHTSRLGLYWGQGTQVTVSS

SEQ ID NO: 7684 - protein, 122 aa, Artificial Sequence
  Chemically Synthesized
QVQLQESGGGLVQAGGSLRLSCAASGTISPDTWMGWYRQAPGKEREFVATIGYGSSTNYADSVKGRFTISRDNAKNTVYLQMNSLKPEDTAVYYCAADYTGRYYNGGDYYYWGQGTQVTVSS

SEQ ID NO: 7685 - protein, 118 aa, Artificial Sequence
  Chemically Synthesized
QVQLQESGGGLVQAGGSLRLSCAASGYISSPSYMGWYRQAPGKERELVAAIDYGTNTYYADSVKGRFTISRDNAKNTVYLQMNSLKPEDTAVYYCAVYPYQYGRHGYWGQGTQVTVSS

SEQ ID NO: 7686 - protein, 110 aa, Artificial Sequence
  Chemically Synthesized
QVQLQESGGGLVQAGGSLRLSCAASGNIFAYFDMGWYRQAPGKERELVVLPYADSVKGRFTISRDNAKNTVYLQMNSLKPEDTAVYYCAASYDGRLVFYWGQGTQVTVSS

SEQ ID NO: 7687 - protein, 113 aa, Artificial Sequence
  Chemically Synthesized
QVQLQESGGGLVQAGGSLRLSCAASGNISRGTGMGWYRQAPGKERELVASISVGTNTNYADSVKGRFTISRDNAKNTVYLQMNSLKPEDTAVYYCAVYSFTYWGQGTQVTVSS

SEQ ID NO: 7688 - protein, 116 aa, Artificial Sequence
  Chemically Synthesized
QVQLQESGGGLVQAGGSLRLSCAASGYIFRFYLMGWYRQAPGKEREFVAGITGGTTYADSVKGRFTISRDNAKNTVYLQMNSLKPEDTAVYYCAADTVQTDGHSYWGQGTQVTVSS

SEQ ID NO: 7689 - protein, 117 aa, Artificial Sequence
  Chemically Synthesized
QVQLQESGGGLVQAGGSLRLSCAASGNIFADYYMGWYRQAPGKEREFVAAINYGATPYADSVKGRFTISRDNAKNTVYLQMNSLKPEDTAVYYCAVTKNTDYYHLYWGQGTQVTVSS

SEQ ID NO: 7690 - protein, 126 aa, Artificial Sequence
  Chemically Synthesized
QVQLQESGGGLVQAGGSLRLSCAASGTISPRRAMGWYRQAPGKERELVAAISGGATTNYADSVKGRFTISRDNAKNTVYLQMNSLKPEDTAVYYCAVLHSYPTPWWVRDWRYHDYWGQGTQVTVSS

SEQ ID NO: 7691 - protein, 121 aa, Artificial Sequence
  Chemically Synthesized
QVQLQESGGGLVQAGGSLRLSCAASGSISPQWYMGWYRQAPGKEREFVATIDNGGSTNYADSVKGRFTISRDNAKNTVYLQMNSLKPEDTAVYYCAVPDDTYTYSTTTMYWGQGTQVTVSS

SEQ ID NO: 7692 - protein, 115 aa, Artificial Sequence
  Chemically Synthesized
QVQLQESGGGLVQAGGSLRLSCAASGYISPPYWMGWYRQAPGKEREFVASISDGANTYYADSVKGRFTISRDNAKNTVYLQMNSLKPEDTAVYYCAVFNYLFDYWGQGTQVTVSS

SEQ ID NO: 7693 - protein, 122 aa, Artificial Sequence
  Chemically Synthesized
QVQLQESGGGLVQAGGSLRLSCAASGTIFDLGDMGWYRQAPGKERELVAGIATGTSTYYADSVKGRFTISRDNAKNTVYLQMNSLKPEDTAVYYCAGDYHEYTGDRAVYGYWGQGTQVTVSS

SEQ ID NO: 7694 - protein, 122 aa, Artificial Sequence
  Chemically Synthesized
QVQLQESGGGLVQAGGSLRLSCAASGSISISWWMGWYRQAPGKEREFVAAIGYGGITNYADSVKGRFTISRDNAKNTVYLQMNSLKPEDTAVYYCAVQRGGLTATYSRHAYWGQGTQVTVSS

SEQ ID NO: 7695 - protein, 122 aa, Artificial Sequence
  Chemically Synthesized
QVQLQESGGGLVQAGGSLRLSCAASGSISQYFYMGWYRQAPGKEREFVAGIGGGGSTNYADSVKGRFTISRDNAKNTVYLQMNSLKPEDTAVYYCAATDLYRANDSVTHVYWGQGTQVTVSS

SEQ ID NO: 7696 - protein, 121 aa, Artificial Sequence
  Chemically Synthesized
QVQLQESGGGLVQAGGSLRLSCAASGTIFYDLYMGWYRQAPGKERELVAGIAHGSITYYADSVKGRFTISRDNAKNTVYLQMNSLKPEDTAVYYCAADHDDLRYRGYQHYWGQGTQVTVSS

SEQ ID NO: 7697 - protein, 125 aa, Artificial Sequence
  Chemically Synthesized
QVQLQESGGGLVQAGGSLRLSCAASGTISALDDMGWYRQAPGKEREFVASITDGASTYYADSVKGRFTISRDNAKNTVYLQMNSLKPEDTAVYYCAVFLQYQGSTSVFSLTVLYWGQGTQVTVSS

SEQ ID NO: 7698 - protein, 121 aa, Artificial Sequence
  Chemically Synthesized
QVQLQESGGGLVQAGGSLRLSCAASGYISSLKMGWYRQAPGKERELVASIDDGGTTNYADSVKGRFTISRDNAKNTVYLQMNSLKPEDTAVYYCAVDTGVQDEDTDDHNYWGQGTQVTVSS

SEQ ID NO: 7699 - protein, 117 aa, Artificial Sequence
  Chemically Synthesized
QVQLQESGGGLVQAGGSLRLSCAASGTIFRYHYMGWYRQAPGKERELVPVLLLVVVPYADSVKGRFTISRDNAKNTVYLQMNSLKPEDTAVYYCAVGVYSQYYHDYWGQGTQVTVSS

SEQ ID NO: 7700 - protein, 117 aa, Artificial Sequence
  Chemically Synthesized
QVQLQESGGGLVQAGGSLRLSCAASGNISWSLMGWYRQAPGKEREFVATINDGSNTYYADSVKGRFTISRDNAKNTVYLQMNSLKPEDTAVYYCAAATLTGDGHYYWGQGTQVTVSS

SEQ ID NO: 7701 - protein, 125 aa, Artificial Sequence
  Chemically Synthesized
QVQLQESGGGLVQAGGSLRLSCAASGSIFFTGPMGWYRQAPGKEREFVATINRGGTTYYADSVKGRFTISRDNAKNTVYLQMNSLKPEDTAVYYCAAWLDGDVAYNVYDTYLAYWGQGTQVTVSS

SEQ ID NO: 7702 - protein, 117 aa, Artificial Sequence
  Chemically Synthesized
QVQLQESGGGLVQAGGSLRLSCAASGNIFVPYTMGWYRQAPGKERELVAAIALGGNTYYADSVKGRFTISRDNAKNTVYLQMNSLKPEDTAVYYCAAVLESLVLNYWGQGTQVTVSS

SEQ ID NO: 7703 - protein, 118 aa, Artificial Sequence
  Chemically Synthesized
QVQLQESGGGLVQAGGSLRLSCAASGTIFDFTYMGWYRQAPGKERELVAAIAYGSNTYYADSVKGRFTISRDNAKNTVYLQMNSLKPEDTAVYYCAVRNPPRDNHIYWGQGTQVTVSS

SEQ ID NO: 7704 - protein, 112 aa, Artificial Sequence
  Chemically Synthesized
QVQLQESGGGLVQAGGSLRLSCAASGTISSGSGMGWYRQAPGKEREFVAGIGAGGSTTNYADSVKGRFTISRDNAKNTVYLQMNSLKPEDTAVYYCAAFFYWGQGTQVTVSS

SEQ ID NO: 7705 - protein, 118 aa, Artificial Sequence
  Chemically Synthesized
QVQLQESGGGLVQAGGSLRLSCAASGTISATDYMGWYRQAPGKERELVAAISYGAITNYADSVKGRFTISRDNAKNTVYLQMNSLKPEDTAVYYCAADHEGDTGLYYWGQGTQVTVSS

SEQ ID NO: 7706 - protein, 121 aa, Artificial Sequence
  Chemically Synthesized
QVQLQESGGGLVQAGGSLRLSCAASGTIFHLIRMGWYRQAPGKEREFVASISRGGTTNYADSVKGRFTISRDNAKNTVYLQMNSLKPEDTAVYYCAAYEYYSDTDVTTLYWGQGTQVTVSS

SEQ ID NO: 7707 - protein, 118 aa, Artificial Sequence
  Chemically Synthesized
QVQLQESGGGLVQAGGSLRLSCAASGYIFARRIMGWYRQAPGKERELVASINHGGTTYYADSVKGRFTISRDNAKNTVYLQMNSLKPEDTAVYYCAVETYRYGYYPYWGQGTQVTVSS

SEQ ID NO: 7708 - protein, 118 aa, Artificial Sequence
  Chemically Synthesized
QVQLQESGGGLVQAGGSLRLSCAASGNISGYQEMGWYRQAPGKEREFVVGIGAGTSTYYADSVKGRFTISRDNAKNTVYLQMNSLKPEDTAVYYCAAFLYDVPDLTYWGQGTQVTVSS

SEQ ID NO: 7709 - protein, 118 aa, Artificial Sequence
  Chemically Synthesized
QVQLQESGGGLVQAGGSLRLSCAASGYIFWRRTMGWYRQAPGKERELVATITQGANTYYADSVKGRFTISRDNAKNTVYLQMNSLKPEDTAVYYCAVSVVRYNVFIYWGQGTQVTVSS

SEQ ID NO: 7710 - protein, 123 aa, Artificial Sequence
  Chemically Synthesized
QVQLQESGGGLVQAGGSLRLSCAASGYISTASQMGWYRQAPGKEREFVAGISYGTSTYYADSVKGRFTISRDNAKNTVYLQMNSLKPEDTAVYYCAVRGGGTIVDDDTNLSYWGQGTQVTVSS

SEQ ID NO: 7711 - protein, 125 aa, Artificial Sequence
  Chemically Synthesized
QVQLQESGGGLVQAGGSLRLSCAASGNISDYYYMGWYRQAPGKERELVAGISYGAITYYADSVKGRFTISRDNAKNTVYLQMNSLKPEDTAVYYCAVIYSYGITHWGESVLSLYWGQGTQVTVSS

SEQ ID NO: 7712 - protein, 126 aa, Artificial Sequence
  Chemically Synthesized
QVQLQESGGGLVQAGGSLRLSCAASGTISDDVYMGWYRQAPGKERELVATIALGTSTYYADSVKGRFTISRDNAKNTVYLQMNSLKPEDTAVYYCAALVGDAVGIGDQWRHSHDYWGQGTQVTVSS

SEQ ID NO: 7713 - protein, 125 aa, Artificial Sequence
  Chemically Synthesized
QVQLQESGGGLVQAGGSLRLSCAASGTIFDTAIMGWYRQAPGKERELVAAIGDGGTTYYADSVKGRFTISRDNAKNTVYLQMNSLKPEDTAVYYCAAWLNHSINDVDYGRDFLYWGQGTQVTVSS

SEQ ID NO: 7714 - protein, 117 aa, Artificial Sequence
  Chemically Synthesized
QVQLQESGGGLVQAGGSLRLSCAASGTIFNSRQMGWYRQAPGKEREFVAGIMLVLVPYADSVKGRFTISRDNAKNTVYLQMNSLKPEDTAVYYCAASGRAGELHSYWGQGTQVTVSS

SEQ ID NO: 7715 - protein, 118 aa, Artificial Sequence
  Chemically Synthesized
QVQLQESGGGLVQAGGSLRLSCAASGNIFERDDMGWYRQAPGKERELVAGIDAGTTTNYADSVKGRFTISRDNAKNTVYLQMNSLKPEDTAVYYCAVPYGEQDPHTYWGQGTQVTVSS

SEQ ID NO: 7716 - protein, 122 aa, Artificial Sequence
  Chemically Synthesized
QVQLQESGGGLVQAGGSLRLSCAASGYISRYWYMGWYRQAPGKEREFVAAITGGTITYYADSVKGRFTISRDNAKNTVYLQMNSLKPEDTAVYYCAVNYPYQYFAWGTHYYWGQGTQVTVSS

SEQ ID NO: 7717 - protein, 127 aa, Artificial Sequence
  Chemically Synthesized
QVQLQESGGGLVQAGGSLRLSCAASGTISVSKLMGWYRQAPGKEREFVASINIGTNTYYADSVKGRFTISRDNAKNTVYLQMNSLKPEDTAVYYCAVGNGTDWIDYVGLDGVHHPYWGQGTQVTVSS

SEQ ID NO: 7718 - protein, 118 aa, Artificial Sequence
  Chemically Synthesized
QVQLQESGGGLVQAGGSLRLSCAASGYISHAYVMGWYRQAPGKERELVAAIAGGTTTYYADSVKGRFTISRDNAKNTVYLQMNSLKPEDTAVYYCAANWLYLTKHAYWGQGTQVTVSS

SEQ ID NO: 7719 - protein, 122 aa, Artificial Sequence
  Chemically Synthesized
QVQLQESGGGLVQAGGSLRLSCAASGYISAVRKMGWYRQAPGKERELVAAINGGANTNYADSVKGRFTISRDNAKNTVYLQMNSLKPEDTAVYYCAVWAGSVSRETLQLEYWGQGTQVTVSS

SEQ ID NO: 7720 - protein, 121 aa, Artificial Sequence
  Chemically Synthesized
QVQLQESGGGLVQAGGSLRLSCAASGYISYRPYMGWYRQAPGKEREFVAAITDGTTTYYADSVKGRFTISRDNAKNTVYLQMNSLKPEDTAVYYCAAYRYRWSWRYPHFYWGQGTQVTVSS

SEQ ID NO: 7721 - protein, 124 aa, Artificial Sequence
  Chemically Synthesized
QVQLQESGGGLVQAGGSLRLSCAASGSISSTYYMGWYRQAPGKEREFVASIASVLVPYADSVKGRFTISRDNAKNTVYLQMNSLKPEDTAVYYCAAYYYYRDPSGYSDDVFQYWGQGTQVTVSS

SEQ ID NO: 7722 - protein, 124 aa, Artificial Sequence
  Chemically Synthesized
QVQLQESGGGLVQAGGSLRLSCAASGYISYYYWMGWYRQAPGKEREFVAAIAFGGSTYYADSVKGRFTISRDNAKNTVYLQMNSLKPEDTAVYYCAVDRYDIDPTDDDYPHGYWGQGTQVTVSS

SEQ ID NO: 7723 - protein, 122 aa, Artificial Sequence
  Chemically Synthesized
QVQLQESGGGLVQAGGSLRLSCAASGSISTYDRMGWYRQAPGKEREFVAGITAGAITYYADSVKGRFTISRDNAKNTVYLQMNSLKPEDTAVYYCAVWTKYISYYYDALDYWGQGTQVTVSS

SEQ ID NO: 7724 - protein, 118 aa, Artificial Sequence
  Chemically Synthesized
QVQLQESGGGLVQAGGSLRLSCAASGSIFGQWLMGWYRQAPGKERELVATISYGSNTYYADSVKGRFTISRDNAKNTVYLQMNSLKPEDTAVYYCAVNPYVDVLLNYWGQGTQVTVSS

SEQ ID NO: 7725 - protein, 126 aa, Artificial Sequence
  Chemically Synthesized
QVQLQESGGGLVQAGGSLRLSCAASGNIFIVLYMGWYRQAPGKERELVASITDGANTYYADSVKGRFTISRDNAKNTVYLQMNSLKPEDTAVYYCAVTWIDYDFSWELTQSPYHYWGQGTQVTVSS

SEQ ID NO: 7726 - protein, 121 aa, Artificial Sequence
  Chemically Synthesized
QVQLQESGGGLVQAGGSLRLSCAASGSISGDAMGWYRQAPGKEREFVAGIDAGGNTYYADSVKGRFTISRDNAKNTVYLQMNSLKPEDTAVYYCAAYIPQEYYSDDGHVYWGQGTQVTVSS

SEQ ID NO: 7727 - protein, 126 aa, Artificial Sequence
  Chemically Synthesized
QVQLQESGGGLVQAGGSLRLSCAASGTISQTSYMGWYRQAPGKERELVAAINTGGTTNYADSVKGRFTISRDNAKNTVYLQMNSLKPEDTAVYYCAALDKADDGFRNDDGTWLVYWGQGTQVTVSS

SEQ ID NO: 7728 - protein, 118 aa, Artificial Sequence
  Chemically Synthesized
QVQLQESGGGLVQAGGSLRLSCAASGNIFVGGNMGWYRQAPGKEREFVATISGGGITYYADSVKGRFTISRDNAKNTVYLQMNSLKPEDTAVYYCAAHATRVGLLTYWGQGTQVTVSS

SEQ ID NO: 7729 - protein, 122 aa, Artificial Sequence
  Chemically Synthesized
QVQLQESGGGLVQAGGSLRLSCAASGSIFHSRYMGWYRQAPGKEREFVAAIAKGTTTYYADSVKGRFTISRDNAKNTVYLQMNSLKPEDTAVYYCAAHYFRPLVYVPPFYYWGQGTQVTVSS

SEQ ID NO: 7730 - protein, 118 aa, Artificial Sequence
  Chemically Synthesized
QVQLQESGGGLVQAGGSLRLSCAASGSISRVAYMGWYRQAPGKEREFVASISIGANTNYADSVKGRFTISRDNAKNTVYLQMNSLKPEDTAVYYCAAYADYHTYLYYWGQGTQVTVSS

SEQ ID NO: 7731 - protein, 125 aa, Artificial Sequence
  Chemically Synthesized
QVQLQESGGGLVQAGGSLRLSCAASGTISQLRTMGWYRQAPGKERELVATISYGANTNYADSVKGRFTISRDNAKNTVYLQMNSLKPEDTAVYYCAARRGLAYTFWVNHTAKHYWGQGTQVTVSS

SEQ ID NO: 7732 - protein, 116 aa, Artificial Sequence
  Chemically Synthesized
QVQLQESGGGLVQAGGSLRLSCAASGTIFFYAYMGWYRQAPGKERELVAGIGSGGITNYADSVKGRFTISRDNAKNTVYLQMNSLKPEDTAVYYCAAGRPASFPYWGQGTQVTVSS

SEQ ID NO: 7733 - protein, 118 aa, Artificial Sequence
  Chemically Synthesized
QVQLQESGGGLVQAGGSLRLSCAASGYISLWRAMGWYRQAPGKERELVASINAGTTTNYADSVKGRFTISRDNAKNTVYLQMNSLKPEDTAVYYCAVTGIVAPQYIYWGQGTQVTVSS

SEQ ID NO: 7734 - protein, 118 aa, Artificial Sequence
  Chemically Synthesized
QVQLQESGGGLVQAGGSLRLSCAASGSISDPGNMGWYRQAPGKERELVATITGGATTNYADSVKGRFTISRDNAKNTVYLQMNSLKPEDTAVYYCAADEDHEYGYVYWGQGTQVTVSS

SEQ ID NO: 7735 - protein, 122 aa, Artificial Sequence
  Chemically Synthesized
QVQLQESGGGLVQAGGSLRLSCAASGTISPFQNMGWYRQAPGKEREFVAGISRGANTYYADSVKGRFTISRDNAKNTVYLQMNSLKPEDTAVYYCAVQYASAQFDPGQYEYWGQGTQVTVSS

SEQ ID NO: 7736 - protein, 122 aa, Artificial Sequence
  Chemically Synthesized
QVQLQESGGGLVQAGGSLRLSCAASGTIFATDAMGWYRQAPGKEREFVAGIGSGGITNYADSVKGRFTISRDNAKNTVYLQMNSLKPEDTAVYYCAADLGNYVDVEADLDYWGQGTQVTVSS

SEQ ID NO: 7737 - protein, 122 aa, Artificial Sequence
  Chemically Synthesized
QVQLQESGGGLVQAGGSLRLSCAASGYISRGFRMGWYRQAPGKERELVASISRGGTTYYADSVKGRFTISRDNAKNTVYLQMNSLKPEDTAVYYCAVVYGPRGRYKYYHTYWGQGTQVTVSS

SEQ ID NO: 7738 - protein, 118 aa, Artificial Sequence
  Chemically Synthesized
QVQLQESGGGLVQAGGSLRLSCAASGNIFYDNHMGWYRQAPGKERELVATIGYGATTYYADSVKGRFTISRDNAKNTVYLQMNSLKPEDTAVYYCAATADTTLYFHYWGQGTQVTVSS

SEQ ID NO: 7739 - protein, 126 aa, Artificial Sequence
  Chemically Synthesized
QVQLQESGGGLVQAGGSLRLSCAASGYIFRRFTMGWYRQAPGKERELVASIDRGTNTNYADSVKGRFTISRDNAKNTVYLQMNSLKPEDTAVYYCAAYVYYRLLSQRYPRFQYDYWGQGTQVTVSS

SEQ ID NO: 7740 - protein, 122 aa, Artificial Sequence
  Chemically Synthesized
QVQLQESGGGLVQAGGSLRLSCAASGTIFRFAFMGWYRQAPGKEREFVASISGGSITNYADSVKGRFTISRDNAKNTVYLQMNSLKPEDTAVYYCAVVKRPNGLRDTSHGYWGQGTQVTVSS

SEQ ID NO: 7741 - protein, 122 aa, Artificial Sequence
  Chemically Synthesized
QVQLQESGGGLVQAGGSLRLSCAASGNIFYRYTMGWYRQAPGKERELVAGIDRGASTYYADSVKGRFTISRDNAKNTVYLQMNSLKPEDTAVYYCAAAYRYYGNYYRAYQYWGQGTQVTVSS

SEQ ID NO: 7742 - protein, 120 aa, Artificial Sequence
  Chemically Synthesized
QVQLQESGGGLVQAGGSLRLSCAASGTISANSMGWYRQAPGKEREFVATIGTGSSTYYADSVKGRFTISRDNAKNTVYLQMNSLKPEDTAVYYCAASGDAASTSNWTIYWGQGTQVTVSS

SEQ ID NO: 7743 - protein, 119 aa, Artificial Sequence
  Chemically Synthesized
QVQLQESGGGLVQAGGSLRLSCAASGYIFYARIMGWYRQAPGKEREFVAAISKGTITNYADSVKGRFTISRDNAKNTVYLQMNSLKPEDTAVYYCAAAGYYPAGRHGYWGQGTQVTVSS

SEQ ID NO: 7744 - protein, 118 aa, Artificial Sequence
  Chemically Synthesized
QVQLQESGGGLVQAGGSLRLSCAASGNISTAYRMGWYRQAPGKEREFVAGINEGGITYYADSVKGRFTISRDNAKNTVYLQMNSLKPEDTAVYYCAANRPEVLPYGYWGQGTQVTVSS

SEQ ID NO: 7745 - protein, 122 aa, Artificial Sequence
  Chemically Synthesized
QVQLQESGGGLVQAGGSLRLSCAASGYISRTYSMGWYRQAPGKERELVAGIGAGATTNYADSVKGRFTISRDNAKNTVYLQMNSLKPEDTAVYYCAAYRLSYTQGYRRYRYWGQGTQVTVSS

SEQ ID NO: 7746 - protein, 122 aa, Artificial Sequence
  Chemically Synthesized
QVQLQESGGGLVQAGGSLRLSCAASGYIFPTTRMGWYRQAPGKERELVAGISYGGNTYYADSVKGRFTISRDNAKNTVYLQMNSLKPEDTAVYYCAAQYGAGRGQRYYFGYWGQGTQVTVSS

SEQ ID NO: 7747 - protein, 126 aa, Artificial Sequence
  Chemically Synthesized
QVQLQESGGGLVQAGGSLRLSCAASGTIFAGGYMGWYRQAPGKERELVAAIASGAITYYADSVKGRFTISRDNAKNTVYLQMNSLKPEDTAVYYCAVDPPRQRYADTRDRDSYVYWGQGTQVTVSS

SEQ ID NO: 7748 - protein, 126 aa, Artificial Sequence
  Chemically Synthesized
QVQLQESGGGLVQAGGSLRLSCAASGNIFYGWTMGWYRQAPGKERELVASITFGTNTYYADSVKGRFTISRDNAKNTVYLQMNSLKPEDTAVYYCAAQGGYDPVPYRYPYPSASYWGQGTQVTVSS

SEQ ID NO: 7749 - protein, 126 aa, Artificial Sequence
  Chemically Synthesized
QVQLQESGGGLVQAGGSLRLSCAASGYIFPTSDMGWYRQAPGKEREFVATIDLGSNTYYADSVKGRFTISRDNAKNTVYLQMNSLKPEDTAVYYCAVAALGDYSQSDDWDTDHDYWGQGTQVTVSS

SEQ ID NO: 7750 - protein, 122 aa, Artificial Sequence
  Chemically Synthesized
QVQLQESGGGLVQAGGSLRLSCAASGNISALIRMGWYRQAPGKEREFVATIGRGSTTYYADSVKGRFTISRDNAKNTVYLQMNSLKPEDTAVYYCAVPDDYDFTSSWEFTYWGQGTQVTVSS

SEQ ID NO: 7751 - protein, 118 aa, Artificial Sequence
  Chemically Synthesized
QVQLQESGGGLVQAGGSLRLSCAASGTISALRAMGWYRQAPGKERELVAAIARGSSTYYADSVKGRFTISRDNAKNTVYLQMNSLKPEDTAVYYCAAPQPWEPLHYYWGQGTQVTVSS

SEQ ID NO: 7752 - protein, 118 aa, Artificial Sequence
  Chemically Synthesized
QVQLQESGGGLVQAGGSLRLSCAASGTISTAITMGWYRQAPGKERELVAGIDWGGTTYYADSVKGRFTISRDNAKNTVYLQMNSLKPEDTAVYYCAARPYPYSYHGYWGQGTQVTVSS

SEQ ID NO: 7753 - protein, 125 aa, Artificial Sequence
  Chemically Synthesized
QVQLQESGGGLVQAGGSLRLSCAASGNISYRSSMGWYRQAPGKEREFVASIITVVVPYADSVKGRFTISRDNAKNTVYLQMNSLKPEDTAVYYCAADDEYGAPDASYDLHYHAYWGQGTQVTVSS

SEQ ID NO: 7754 - protein, 126 aa, Artificial Sequence
  Chemically Synthesized
QVQLQESGGGLVQAGGSLRLSCAASGYIFDSPDMGWYRQAPGKEREFVASIAAGGITYYADSVKGRFTISRDNAKNTVYLQMNSLKPEDTAVYYCAAGYVYNQYLSWTYWSPFLYWGQGTQVTVSS

SEQ ID NO: 7755 - protein, 118 aa, Artificial Sequence
  Chemically Synthesized
QVQLQESGGGLVQAGGSLRLSCAASGTISYYATMGWYRQAPGKERELVAAIAFGGTTNYADSVKGRFTISRDNAKNTVYLQMNSLKPEDTAVYYCAVYPGLWRRFWYWGQGTQVTVSS

SEQ ID NO: 7756 - protein, 113 aa, Artificial Sequence
  Chemically Synthesized
QVQLQESGGGLVQAGGSLRLSCAASGSIFGELYMGWYRQAPGKERELAGINTGASTNYADSVKGRFTISRDNAKNTVYLQMNSLKPEDTAVYYCAALWNDAYWGQGTQVTVSS

SEQ ID NO: 7757 - protein, 117 aa, Artificial Sequence
  Chemically Synthesized
QVQLQESGGGLVQAGGSLRLSCAASGSIFTTTMGWYRQAPGKERELVAGIDYGGNTNYADSVKGRFTISRDNAKNTVYLQMNSLKPEDTAVYYCAVDEGLTGGFLYWGQGTQVTVSS

SEQ ID NO: 7758 - protein, 118 aa, Artificial Sequence
  Chemically Synthesized
QVQLQESGGGLVQAGGSLRLSCAASGYISAEHDMGWYRQAPGKEREFVATIGWGANTYYADSVKGRFTISRDNAKNTVYLQMNSLKPEDTAVYYCAVGTDDDPNLQYWGQGTQVTVSS

SEQ ID NO: 7759 - protein, 113 aa, Artificial Sequence
  Chemically Synthesized
QVQLQESGGGLVQAGGSLRLSCAASGYISNPESMGWYRQAPGKEREFVAGISGANTYYADSVKGRFTISRDNAKNTVYLQMNSLKPEDTAVYYCAAYAYLGYWGQGTQVTVSS

SEQ ID NO: 7760 - protein, 122 aa, Artificial Sequence
  Chemically Synthesized
QVQLQESGGGLVQAGGSLRLSCAASGNIFPGPRMGWYRQAPGKERELVATIGKGTNTNYADSVKGRFTISRDNAKNTVYLQMNSLKPEDTAVYYCAVGYDINVESVYAYYYWGQGTQVTVSS

SEQ ID NO: 7761 - protein, 114 aa, Artificial Sequence
  Chemically Synthesized
QVQLQESGGGLVQAGGSLRLSCAASGTISSYGYMGWYRQAPGKEREFVAGIALGASTYYADSVKGRFTISRDNAKNTVYLQMNSLKPEDTAVYYCADLLQLYYWGQGTQVTVSS

SEQ ID NO: 7762 - protein, 118 aa, Artificial Sequence
  Chemically Synthesized
QVQLQESGGGLVQAGGSLRLSCAASGTISDSDDMGWYRQAPGKEREFVAAITYGATTYYADSVKGRFTISRDNAKNTVYLQMNSLKPEDTAVYYCAAVYSARDGLKYWGQGTQVTVSS

SEQ ID NO: 7763 - protein, 122 aa, Artificial Sequence
  Chemically Synthesized
QVQLQESGGGLVQAGGSLRLSCAASGSIFGLLYMGWYRQAPGKEREFVAGINYGSTTYYADSVKGRFTISRDNAKNTVYLQMNSLKPEDTAVYYCAVNLPYSQDYYTGHPYWGQGTQVTVSS

SEQ ID NO: 7764 - protein, 118 aa, Artificial Sequence
  Chemically Synthesized
QVQLQESGGGLVQAGGSLRLSCAASGNISDLQYMGWYRQAPGKEREFVAAITIGSSTYYADSVKGRFTISRDNAKNTVYLQMNSLKPEDTAVYYCAARDWRDWDYPYWGQGTQVTVSS

SEQ ID NO: 7765 - protein, 118 aa, Artificial Sequence
  Chemically Synthesized
QVQLQESGGGLVQAGGSLRLSCAASGTIFLTYWMGWYRQAPGKERELVATISYGSSTYYADSVKGRFTISRDNAKNTVYLQMNSLKPEDTAVYYCAVFGQGRGYHVYWGQGTQVTVSS

SEQ ID NO: 7766 - protein, 118 aa, Artificial Sequence
  Chemically Synthesized
QVQLQESGGGLVQAGGSLRLSCAASGYISRITRMGWYRQAPGKERELVAAIAFGGNTNYADSVKGRFTISRDNAKNTVYLQMNSLKPEDTAVYYCAARDWRDWDYPYWGQGTQVTVSS

SEQ ID NO: 7767 - protein, 122 aa, Artificial Sequence
  Chemically Synthesized
QVQLQESGGGLVQAGGSLRLSCAASGTISRYTVMGWYRQAPGKEREFVAGINYGSTTYYADSVKGRFTISRDNAKNTVYLQMNSLKPEDTAVYYCAVNLPYSQDYYTGHPYWGQGTQVTVSS

SEQ ID NO: 7768 - protein, 114 aa, Artificial Sequence
  Chemically Synthesized
QVQLQESGGGLVQAGGSLRLSCAASGSISDLDYMGWYRQAPGKEREFVAAITEGTSTYYADSVKGRFTISRDNAKNTVYLQMNSLKPEDTAVYYCAVLRQLGYWGQGTQVTVSS

SEQ ID NO: 7769 - protein, 118 aa, Artificial Sequence
  Chemically Synthesized
QVQLQESGGGLVQAGGSLRLSCAASGTISDYAYMGWYRQAPGKEREFVAAITIGTTTYYADSVKGRFTISRDNAKNTVYLQMNSLKPEDTAVYYCAAYVYGTHYYAYWGQGTQVTVSS

SEQ ID NO: 7770 - protein, 114 aa, Artificial Sequence
  Chemically Synthesized
QVQLQESGGGLVQAGGSLRLSCAASGNISTRTYMGWYRQAPGKERELVAAISDGATTYYADSVKGRFTISRDNAKNTVYLQMNSLKPEDTAVYYCADYYDYGYWGQGTQVTVSS

SEQ ID NO: 7771 - protein, 122 aa, Artificial Sequence
  Chemically Synthesized
QVQLQESGGGLVQAGGSLRLSCAASGNIFVGPTMGWYRQAPGKERELVATIGAGSITYYADSVKGRFTISRDNAKNTVYLQMNSLKPEDTAVYYCAVGYWDADWRYVGYYYWGQGTQVTVSS

SEQ ID NO: 7772 - protein, 114 aa, Artificial Sequence
  Chemically Synthesized
QVQLQESGGGLVQAGGSLRLSCAASGSIFGLLYMGWYRQAPGKEREFVAAITEGTSTYYADSVKGRFTISRDNAKNTVYLQMNSLKPEDTAVYYCAVLRQLGYWGQGTQVTVSS

SEQ ID NO: 7773 - protein, 118 aa, Artificial Sequence
  Chemically Synthesized
QVQLQESGGGLVQAGGSLRLSCAASGSISDLDYMGWYRQAPGKEREFVAAITEGTSTYYADSVKGRFTISRDNAKNTVYLQMNSLKPEDTAVYYCAVPNYVTVYHLYWGQGTQVTVSS

SEQ ID NO: 7774 - protein, 118 aa, Artificial Sequence
  Chemically Synthesized
QVQLQESGGGLVQAGGSLRLSCAASGNISDLQYMGWYRQAPGKEREFVAAITIGSSTYYADSVKGRFTISRDNAKNTVYLQMNSLKPEDTAVYYCAVHDYYDWSHRYWGQGTQVTVSS

SEQ ID NO: 7775 - protein, 114 aa, Artificial Sequence
  Chemically Synthesized
QVQLQESGGGLVQAGGSLRLSCAASGTISSYGYMGWYRQAPGKEREFVAGINYGSTTYYADSVKGRFTISRDNAKNTVYLQMNSLKPEDTAVYYCAVYYPHYYWGQGTQVTVSS

SEQ ID NO: 7776 - protein, 122 aa, Artificial Sequence
  Chemically Synthesized
QVQLQESGGGLVQAGGSLRLSCAASGTISTRPAMGWYRQAPGKEREFVAGINYGSTTYYADSVKGRFTISRDNAKNTVYLQMNSLKPEDTAVYYCAVNLPYSQDYYTGHPYWGQGTQVTVSS

SEQ ID NO: 7777 - protein, 122 aa, Artificial Sequence
  Chemically Synthesized
QVQLQESGGGLVQAGGSLRLSCAASGTISDYAYMGWYRQAPGKEREFVAGINYGSTTYYADSVKGRFTISRDNAKNTVYLQMNSLKPEDTAVYYCAVNLPYSQDYYTGHPYWGQGTQVTVSS

SEQ ID NO: 7778 - protein, 114 aa, Artificial Sequence
  Chemically Synthesized
QVQLQESGGGLVQAGGSLRLSCAASGTIFYGPAMGWYRQAPGKEREFVAAITAGTNTNYADSVKGRFTISRDNAKNTVYLQMNSLKPEDTAVYYCADLYDLGYWGQGTQVTVSS

SEQ ID NO: 7779 - protein, 118 aa, Artificial Sequence
  Chemically Synthesized
QVQLQESGGGLVQAGGSLRLSCAASGTISAALYMGWYRQAPGKEREFVAGITSGASTYYADSVKGRFTISRDNAKNTVYLQMNSLKPEDTAVYYCAVVSQADTGYWYWGQGTQVTVSS

SEQ ID NO: 7780 - protein, 118 aa, Artificial Sequence
  Chemically Synthesized
QVQLQESGGGLVQAGGSLRLSCAASGTISRYTVMGWYRQAPGKERELVAAIAFGGNTNYADSVKGRFTISRDNAKNTVYLQMNSLKPEDTAVYYCAVPNYVTVYHLYWGQGTQVTVSS

SEQ ID NO: 7781 - protein, 114 aa, Artificial Sequence
  Chemically Synthesized
QVQLQESGGGLVQAGGSLRLSCAASGSIFDHYGMGWYRQAPGKEREFVAAIAGGTNTYYADSVKGRFTISRDNAKNTVYLQMNSLKPEDTAVYYCAVLARLGYWGQGTQVTVSS

SEQ ID NO: 7782 - protein, 122 aa, Artificial Sequence
  Chemically Synthesized
QVQLQESGGGLVQAGGSLRLSCAASGNISDLQYMGWYRQAPGKEREFVAAITIGSSTYYADSVKGRFTISRDNAKNTVYLQMNSLKPEDTAVYYCAFGKAGVRNTYRDLGYWGQGTQVTVSS

SEQ ID NO: 7783 - protein, 114 aa, Artificial Sequence
  Chemically Synthesized
QVQLQESGGGLVQAGGSLRLSCAASGNISRSEAMGWYRQAPGKEREFVAAIAAGGTTYYADSVKGRFTISRDNAKNTVYLQMNSLKPEDTAVYYCAAYTYLGYWGQGTQVTVSS

SEQ ID NO: 7784 - protein, 118 aa, Artificial Sequence
  Chemically Synthesized
QVQLQESGGGLVQAGGSLRLSCAASGTISRYTVMGWYRQAPGKERELVAAIAFGGNTNYADSVKGRFTISRDNAKNTVYLQMNSLKPEDTAVYYCAAYVYGTHYYAYWGQGTQVTVSS

SEQ ID NO: 7785 - protein, 118 aa, Artificial Sequence
  Chemically Synthesized
QVQLQESGGGLVQAGGSLRLSCAASGNIFRIGYMGWYRQAPGKERELVAAIAFGGNTNYADSVKGRFTISRDNAKNTVYLQMNSLKPEDTAVYYCAARDWRDWDYPYWGQGTQVTVSS

SEQ ID NO: 7786 - protein, 122 aa, Artificial Sequence
  Chemically Synthesized
QVQLQESGGGLVQAGGSLRLSCAASGNIFLGPYMGWYRQAPGKEREFVASINYGASTNYADSVKGRFTISRDNAKNTVYLQMNSLKPEDTAVYYCAAGYYSNDYYYYEYSYWGQGTQVTVSS

SEQ ID NO: 7787 - protein, 118 aa, Artificial Sequence
  Chemically Synthesized
QVQLQESGGGLVQAGGSLRLSCAASGTISPGYGMGWYRQAPGKEREFVATIAFGSSTYYADSVKGRFTISRDNAKNTVYLQMNSLKPEDTAVYYCAVAIYIPYFFRYWGQGTQVTVSS

SEQ ID NO: 7788 - protein, 118 aa, Artificial Sequence
  Chemically Synthesized
QVQLQESGGGLVQAGGSLRLSCAASGTISRSSIMGWYRQAPGKEREFVAGISYGSTTYYADSVKGRFTISRDNAKNTVYLQMNSLKPEDTAVYYCAVRDLYVWDHAYWGQGTQVTVSS

SEQ ID NO: 7789 - protein, 122 aa, Artificial Sequence
  Chemically Synthesized
QVQLQESGGGLVQAGGSLRLSCAASGTISQYWSMGWYRQAPGKERELVASINSGSSTYYADSVKGRFTISRDNAKNTVYLQMNSLKPEDTAVYYCAVIYNAYPYAVYRHPYWGQGTQVTVSS

SEQ ID NO: 7790 - protein, 118 aa, Artificial Sequence
  Chemically Synthesized
QVQLQESGGGLVQAGGSLRLSCAASGNISYSPIMGWYRQAPGKEREFVAAIAYGGTTYYADSVKGRFTISRDNAKNTVYLQMNSLKPEDTAVYYCAVPRGTQAYHIYWGQGTQVTVSS

SEQ ID NO: 7791 - protein, 113 aa, Artificial Sequence
  Chemically Synthesized
QVQLQESGGGLVQAGGSLRLSCAASGSIFGSSMGWYRQAPGKERELVASIGAGTITYYADSVKGRFTISRDNAKNTVYLQMNSLKPEDTAVYYCAVTTVRMYWGQGTQVTVSS

SEQ ID NO: 7792 - protein, 118 aa, Artificial Sequence
  Chemically Synthesized
QVQLQESGGGLVQAGGSLRLSCAASGTIFGRNDMGWYRQAPGKERELVASIDQGSTTYYADSVKGRFTISRDNAKNTVYLQMNSLKPEDTAVYYCAADGRIRGGLDYWGQGTQVTVSS

SEQ ID NO: 7793 - protein, 117 aa, Artificial Sequence
  Chemically Synthesized
QVQLQESGGGLVQAGGSLRLSCAASGYISYDSMGWYRQAPGKERELVATITRGGNTNYADSVKGRFTISRDNAKNTVYLQMNSLKPEDTAVYYCAAWDVSIQSHDYWGQGTQVTVSS

SEQ ID NO: 7794 - protein, 116 aa, Artificial Sequence
  Chemically Synthesized
QVQLQESGGGLVQAGGSLRLSCAASGSIFDTMGWYRQAPGKERELVASIAPGSITYYADSVKGRFTISRDNAKNTVYLQMNSLKPEDTAVYYCAVYAPGTVPHSYWGQGTQVTVSS

SEQ ID NO: 7795 - protein, 126 aa, Artificial Sequence
  Chemically Synthesized
QVQLQESGGGLVQAGGSLRLSCAASGTISYDDVMGWYRQAPGKERELVATISVGGTTNYADSVKGRFTISRDNAKNTVYLQMNSLKPEDTAVYYCAAQRRDAENALVGVDGPLQYWGQGTQVTVSS

SEQ ID NO: 7796 - protein, 126 aa, Artificial Sequence
  Chemically Synthesized
QVQLQESGGGLVQAGGSLRLSCAASGSIFGGYYMGWYRQAPGKEREFVASIGYGGTTNYADSVKGRFTISRDNAKNTVYLQMNSLKPEDTAVYYCAAVVVFDYYGWGGYDSWYIYWGQGTQVTVSS

SEQ ID NO: 7797 - protein, 116 aa, Artificial Sequence
  Chemically Synthesized
QVQLQESGGGLVQAGGSLRLSCAASGNISVDDWMGWYRQAPGKEREFVAAISAGASTYADSVKGRFTISRDNAKNTVYLQMNSLKPEDTAVYYCAAVGPVGGYYYWGQGTQVTVSS

SEQ ID NO: 7798 - protein, 118 aa, Artificial Sequence
  Chemically Synthesized
QVQLQESGGGLVQAGGSLRLSCAASGSIFQLGYMGWYRQAPGKEREFVAAIGTGAITYYADSVKGRFTISRDNAKNTVYLQMNSLKPEDTAVYYCAALIRDSWLHYYWGQGTQVTVSS

SEQ ID NO: 7799 - protein, 122 aa, Artificial Sequence
  Chemically Synthesized
QVQLQESGGGLVQAGGSLRLSCAASGNISDVVWMGWYRQAPGKEREFVASITYGGTTNYADSVKGRFTISRDNAKNTVYLQMNSLKPEDTAVYYCAVWYRQLDGDDYVFLYWGQGTQVTVSS

SEQ ID NO: 7800 - protein, 125 aa, Artificial Sequence
  Chemically Synthesized
QVQLQESGGGLVQAGGSLRLSCAASGSIFADLYMGWYRQAPGKERELVASIAWGATTYYADSVKGRFTISRDNAKNTVYLQMNSLKPEDTAVYYCAVVYPQIWYGGGSDSYLDYWGQGTQVTVSS

SEQ ID NO: 7801 - protein, 118 aa, Artificial Sequence
  Chemically Synthesized
QVQLQESGGGLVQAGGSLRLSCAASGTIFYLSTDMGWYRQAPGKEREFVATINSVLLPYADSVKGRFTISRDNAKNTVYLQMNSLKPEDTAVYYCAAWPYFSGYHWYWGQGTQVTVSS

SEQ ID NO: 7802 - protein, 117 aa, Artificial Sequence
  Chemically Synthesized
QVQLQESGGGLVQAGGSLRLSCAASGTISHINDMGWYRQAPGKERELVAGITYGGITNYADSVKGRFTISRDNAKNTVYLQMNSLKPEDTAVYYCAATCRTTSVLYWGQGTQVTVSS

SEQ ID NO: 7803 - protein, 121 aa, Artificial Sequence
  Chemically Synthesized
QVQLQESGGGLVQAGGSLRLSCAASGTIFGTGMGWYRQAPGKERELVAGIDYGSNTYYADSVKGRFTISRDNAKNTVYLQMNSLKPEDTAVYYCAVDNVWEGGLAEPHRYWGQGTQVTVSS

SEQ ID NO: 7804 - protein, 117 aa, Artificial Sequence
  Chemically Synthesized
QVQLQESGGGLVQAGGSLRLSCAASGYISTVTMGWYRQAPGKEREFVAAIADGGTTNYADSVKGRFTISRDNAKNTVYLQMNSLKPEDTAVYYCAASVYTWNIHYYWGQGTQVTVSS

SEQ ID NO: 7805 - protein, 120 aa, Artificial Sequence
  Chemically Synthesized
QVQLQESGGGLVQAGGSLRLSCAASGTIFVLLMGWYRQAPGKEREFVASISIGGTTYYADSVKGRFTISRDNAKNTVYLQMNSLKPEDTAVYYCAAIAGGRYPLQDSFYWGQGTQVTVSS

SEQ ID NO: 7806 - protein, 122 aa, Artificial Sequence
  Chemically Synthesized
QVQLQESGGGLVQAGGSLRLSCAASGTIFISATMGWYRQAPGKERELVAAIDQGASTNYADSVKGRFTISRDNAKNTVYLQMNSLKPEDTAVYYCAAATLRGTHYFLDHVYWGQGTQVTVSS

SEQ ID NO: 7807 - protein, 118 aa, Artificial Sequence
  Chemically Synthesized
QVQLQESGGGLVQAGGSLRLSCAASGYISDLSLMGWYRQAPGKEREFVATISLGAITNYADSVKGRFTISRDNAKNTVYLQMNSLKPEDTAVYYCAADYFWGPYHAYWGQGTQVTVSS

SEQ ID NO: 7808 - protein, 118 aa, Artificial Sequence
  Chemically Synthesized
QVQLQESGGGLVQAGGSLRLSCAASGSISPSDLMGWYRQAPGKERELVAGINQGATTYYADSVKGRFTISRDNAKNTVYLQMNSLKPEDTAVYYCAAINQALPGSSYWGQGTQVTVSS

SEQ ID NO: 7809 - protein, 126 aa, Artificial Sequence
  Chemically Synthesized
QVQLQESGGGLVQAGGSLRLSCAASGSIFSARRMGWYRQAPGKERELVAAITTGGNTNYADSVKGRFTISRDNAKNTVYLQMNSLKPEDTAVYYCAATYDEAHDLSRSLLVPHGYWGQGTQVTVSS

SEQ ID NO: 7810 - protein, 117 aa, Artificial Sequence
  Chemically Synthesized
QVQLQESGGGLVQAGGSLRLSCAASGTISSYSMGWYRQAPGKERELVASIAIGGNTYYADSVKGRFTISRDNAKNTVYLQMNSLKPEDTAVYYCAVDVIYVRFHGYWGQGTQVTVSS

SEQ ID NO: 7811 - protein, 118 aa, Artificial Sequence
  Chemically Synthesized
QVQLQESGGGLVQAGGSLRLSCAASGNISGYDLMGWYRQAPGKEREFVASIAPGGITNYADSVKGRFTISRDNAKNTVYLQMNSLKPEDTAVYYCAVAWDDVTYHLYWGQGTQVTVSS

SEQ ID NO: 7812 - protein, 118 aa, Artificial Sequence
  Chemically Synthesized
QVQLQESGGGLVQAGGSLRLSCAASGTIFERWVMGWYRQAPGKERELVATITDGSNTYYADSVKGRFTISRDNAKNTVYLQMNSLKPEDTAVYYCAADDWYLDAFAYWGQGTQVTVSS

SEQ ID NO: 7813 - protein, 121 aa, Artificial Sequence
  Chemically Synthesized
QVQLQESGGGLVQAGGSLRLSCAASGTIFDLTMGWYRQAPGKEREFVAAITGGANTYYADSVKGRFTISRDNAKNTVYLQMNSLKPEDTAVYYCAAGGGAGAVSYHFHHYWGQGTQVTVSS

SEQ ID NO: 7814 - protein, 118 aa, Artificial Sequence
  Chemically Synthesized
QVQLQESGGGLVQAGGSLRLSCAASGTIFLPFYMGWYRQAPGKERELVAGISLGTTTYYADSVKGRFTISRDNAKNTVYLQMNSLKPEDTAVYYCAVADAIRIFYRYWGQGTQVTVSS

SEQ ID NO: 7815 - protein, 118 aa, Artificial Sequence
  Chemically Synthesized
QVQLQESGGGLVQAGGSLRLSCAASGTISRIYIMGWYRQAPGKEREFVAAIGYGTSTYYADSVKGRFTISRDNAKNTVYLQMNSLKPEDTAVYYCAVPSVWVDIHDYWGQGTQVTVSS

SEQ ID NO: 7816 - protein, 118 aa, Artificial Sequence
  Chemically Synthesized
QVQLQESGGGLVQAGGSLRLSCAASGNIFRFLLMGWYRQAPGKERELVAAIGLGGTTYYADSVKGRFTISRDNAKNTVYLQMNSLKPEDTAVYYCAVPATPITYLRYWGQGTQVTVSS

SEQ ID NO: 7817 - protein, 122 aa, Artificial Sequence
  Chemically Synthesized
QVQLQESGGGLVQAGGSLRLSCAASGNISDYYYMGWYRQAPGKERELVAGISPGANTNYADSVKGRFTISRDNAKNTVYLQMNSLKPEDTAVYYCAVYTYQDLIAYTGLGYWGQGTQVTVSS

SEQ ID NO: 7818 - protein, 122 aa, Artificial Sequence
  Chemically Synthesized
QVQLQESGGGLVQAGGSLRLSCAASGTISGVGYMGWYRQAPGKERELVASIGNGGNTYYADSVKGRFTISRDNAKNTVYLQMNSLKPEDTAVYYCAAPRPDWDNARYYSIYWGQGTQVTVSS

SEQ ID NO: 7819 - protein, 122 aa, Artificial Sequence
  Chemically Synthesized
QVQLQESGGGLVQAGGSLRLSCAASGTIFALLIMGWYRQAPGKERELVAGINRGTTTYYADSVKGRFTISRDNAKNTVYLQMNSLKPEDTAVYYCAVYVDADGFSYWALDYWGQGTQVTVSS

SEQ ID NO: 7820 - protein, 118 aa, Artificial Sequence
  Chemically Synthesized
QVQLQESGGGLVQAGGSLRLSCAASGNIFDWQYMGWYRQAPGKERELVAGINTGTTTYYADSVKGRFTISRDNAKNTVYLQMNSLKPEDTAVYYCAVNTDEVVAYTYWGQGTQVTVSS

SEQ ID NO: 7821 - protein, 118 aa, Artificial Sequence
  Chemically Synthesized
QVQLQESGGGLVQAGGSLRLSCAASGTISGYWYMGWYRQAPGKEREFVASINYGATTNYADSVKGRFTISRDNAKNTVYLQMNSLKPEDTAVYYCAVDWLEARRHSYWGQGTQVTVSS

SEQ ID NO: 7822 - protein, 118 aa, Artificial Sequence
  Chemically Synthesized
QVQLQESGGGLVQAGGSLRLSCAASGYIFHRSTMGWYRQAPGKERELVATIDYGGNTYYADSVKGRFTISRDNAKNTVYLQMNSLKPEDTAVYYCAVDGSSPYRHVYWGQGTQVTVSS

SEQ ID NO: 7823 - protein, 118 aa, Artificial Sequence
  Chemically Synthesized
QVQLQESGGGLVQAGGSLRLSCAASGTISYYYYMGWYRQAPGKERELVAAIAFGGSTNYADSVKGRFTISRDNAKNTVYLQMNSLKPEDTAVYYCAANYVQHGDHGYWGQGTQVTVSS

SEQ ID NO: 7824 - protein, 118 aa, Artificial Sequence
  Chemically Synthesized
QVQLQESGGGLVQAGGSLRLSCAASGYISTTYVMGWYRQAPGKERELVAGIGVGTNTNYADSVKGRFTISRDNAKNTVYLQMNSLKPEDTAVYYCAVEQDSSSPYYYWGQGTQVTVSS

SEQ ID NO: 7825 - protein, 118 aa, Artificial Sequence
  Chemically Synthesized
QVQLQESGGGLVQAGGSLRLSCAASGTIFVYYNMGWYRQAPGKEREFVAGITAGGTTYYADSVKGRFTISRDNAKNTVYLQMNSLKPEDTAVYYCAVGYDLYYYHAYWGQGTQVTVSS

SEQ ID NO: 7826 - protein, 120 aa, Artificial Sequence
  Chemically Synthesized
QVQLQESGGGLVQAGGSLRLSCAASGSIFQLGPMGWYRQAPGKEREFVAAIGSGGTTNYADSVKGRFTISRDNAKNTVYLQMNSLKPEDTAVYYCAAIGPDTDVPYHLYWGQGTQVTVSS

SEQ ID NO: 7827 - protein, 118 aa, Artificial Sequence
  Chemically Synthesized
QVQLQESGGGLVQAGGSLRLSCAASGNISAPSYMGWYRQAPGKERELVASITSVVLPYADSVKGRFTISRDNAKNTVYLQMNSLKPEDTAVYYCATVVWTLLSVIFYWGQGTQVTVSS

SEQ ID NO: 7828 - protein, 118 aa, Artificial Sequence
  Chemically Synthesized
QVQLQESGGGLVQAGGSLRLSCAASGNIFTYDVMGWYRQAPGKERELVATIGAGGITNYADSVKGRFTISRDNAKNTVYLQMNSLKPEDTAVYYCAVVSDRNYAHPYWGQGTQVTVSS

SEQ ID NO: 7829 - protein, 122 aa, Artificial Sequence
  Chemically Synthesized
QVQLQESGGGLVQAGGSLRLSCAASGTISYYNDMGWYRQAPGKERELVATISAGGITYYADSVKGRFTISRDNAKNTVYLQMNSLKPEDTAVYYCAASYYDVGVLQGPYGYWGQGTQVTVSS

SEQ ID NO: 7830 - protein, 117 aa, Artificial Sequence
  Chemically Synthesized
QVQLQESGGGLVQAGGSLRLSCAASGNIFVVTMGWYRQAPGKERELVAAIAYGSITNYADSVKGRFTISRDNAKNTVYLQMNSLKPEDTAVYYCAADDPGYALLWYWGQGTQVTVSS

SEQ ID NO: 7831 - protein, 122 aa, Artificial Sequence
  Chemically Synthesized
QVQLQESGGGLVQAGGSLRLSCAASGNIFRNLYMGWYRQAPGKEREFVASIAFGGSTNYADSVKGRFTISRDNAKNTVYLQMNSLKPEDTAVYYCAADAIKDDYWSDDFGYWGQGTQVTVSS

SEQ ID NO: 7832 - protein, 122 aa, Artificial Sequence
  Chemically Synthesized
QVQLQESGGGLVQAGGSLRLSCAASGTIFFREGMGWYRQAPGKEREFVATIDYGTTTNYADSVKGRFTISRDNAKNTVYLQMNSLKPEDTAVYYCAVRWYPDDSRDHRYYYWGQGTQVTVSS

SEQ ID NO: 7833 - protein, 120 aa, Artificial Sequence
  Chemically Synthesized
QVQLQESGGGLVQAGGSLRLSCAASGYISYAKYMGWYRQAPGKEREFVAAIDYGTNTYYADSVKGRFTISRDNAKNTVYLQMNSLKPEDTAVYYCAAHYNRSYYWRFPYWGQGTQVTVSS

SEQ ID NO: 7834 - protein, 118 aa, Artificial Sequence
  Chemically Synthesized
QVQLQESGGGLVQAGGSLRLSCAASGTISLAYTMGWYRQAPGKERELVATIAKGTITYYADSVKGRFTISRDNAKNTVYLQMNSLKPEDTAVYYCAVLWRDHTRYLYWGQGTQVTVSS

SEQ ID NO: 7835 - protein, 126 aa, Artificial Sequence
  Chemically Synthesized
QVQLQESGGGLVQAGGSLRLSCAASGYIFTRGAMGWYRQAPGKERELVAAIDNGASTNYADSVKGRFTISRDNAKNTVYLQMNSLKPEDTAVYYCAVLTRVYEPNQGVSTLYHDYWGQGTQVTVSS

SEQ ID NO: 7836 - protein, 118 aa, Artificial Sequence
  Chemically Synthesized
QVQLQESGGGLVQAGGSLRLSCAASGYIFPTILMGWYRQAPGKERELVAGITIGTSTNYADSVKGRFTISRDNAKNTVYLQMNSLKPEDTAVYYCAVDAYEAGNYDYWGQGTQVTVSS

SEQ ID NO: 7837 - protein, 118 aa, Artificial Sequence
  Chemically Synthesized
QVQLQESGGGLVQAGGSLRLSCAASGYIFDGLYMGWYRQAPGKERELVATITYGSSTYYADSVKGRFTISRDNAKNTVYLQMNSLKPEDTAVYYCAAHHAYQSRFSYWGQGTQVTVSS

SEQ ID NO: 7838 - protein, 122 aa, Artificial Sequence
  Chemically Synthesized
QVQLQESGGGLVQAGGSLRLSCAASGTISGAVTMGWYRQAPGKERELVASISAGAITNYADSVKGRFTISRDNAKNTVYLQMNSLKPEDTAVYYCAAVHRYYDTADTALTYWGQGTQVTVSS

SEQ ID NO: 7839 - protein, 118 aa, Artificial Sequence
  Chemically Synthesized
QVQLQESGGGLVQAGGSLRLSCAASGTIFAWRSMGWYRQAPGKEREFVAGINIGGITYYADSVKGRFTISRDNAKNTVYLQMNSLKPEDTAVYYCAVGNWYHWRHRYWGQGTQVTVSS

SEQ ID NO: 7840 - protein, 125 aa, Artificial Sequence
  Chemically Synthesized
QVQLQESGGGLVQAGGSLRLSCAASGTISDAVTMGWYRQAPGKEREFVAAITYGGNTNYADSVKGRFTISRDNAKNTVYLQMNSLKPEDTAVYYCAASDYYDRQNKDASVLPSYWGQGTQVTVSS

SEQ ID NO: 7841 - protein, 121 aa, Artificial Sequence
  Chemically Synthesized
QVQLQESGGGLVQAGGSLRLSCAASGSISTRKMGWYRQAPGKEREFVASISYGANTNYADSVKGRFTISRDNAKNTVYLQMNSLKPEDTAVYYCAAYYLARQRLETFLEYWGQGTQVTVSS

SEQ ID NO: 7842 - protein, 118 aa, Artificial Sequence
  Chemically Synthesized
QVQLQESGGGLVQAGGSLRLSCAASGSISTLDDMGWYRQAPGKERELVAGIDFGTTTYYADSVKGRFTISRDNAKNTVYLQMNSLKPEDTAVYYCAVEATGYDTHIYWGQGTQVTVSS

SEQ ID NO: 7843 - protein, 118 aa, Artificial Sequence
  Chemically Synthesized
QVQLQESGGGLVQAGGSLRLSCAASGTISDPWYMGWYRQAPGKEREFVATIADGGNTNYADSVKGRFTISRDNAKNTVYLQMNSLKPEDTAVYYCAVTPYYTPYHWYWGQGTQVTVSS

SEQ ID NO: 7844 - protein, 118 aa, Artificial Sequence
  Chemically Synthesized
QVQLQESGGGLVQAGGSLRLSCAASGNISYSGCMGWYRQAPGKERELVATIDIGTNTYYADSVKGRFTISRDNAKNTVYLQMNSLKPEDTAVYYCAVDYYIRGLHGYWGQGTQVTVSS

SEQ ID NO: 7845 - protein, 126 aa, Artificial Sequence
  Chemically Synthesized
QVQLQESGGGLVQAGGSLRLSCAASGSIFAGWGMGWYRQAPGKERELVAGIDDGGSTYYADSVKGRFTISRDNAKNTVYLQMNSLKPEDTAVYYCAARYAGWPIEVAAVTYPLYYWGQGTQVTVSS

SEQ ID NO: 7846 - protein, 121 aa, Artificial Sequence
  Chemically Synthesized
QVQLQESGGGLVQAGGSLRLSCAASGNISFFGKMGWYRQAPGKERELVAGISTGGSTYYADSVKGRFTISRDNAKNTVYLQMNSLKPEDTAVYYCADTRYYAGNAYDHSYWGQGTQVTVSS

SEQ ID NO: 7847 - protein, 126 aa, Artificial Sequence
  Chemically Synthesized
QVQLQESGGGLVQAGGSLRLSCAASGNISYDADMGWYRQAPGKEREFVATIGAGTNTNYADSVKGRFTISRDNAKNTVYLQMNSLKPEDTAVYYCAPAYYLDTSSRWRDTGGYRYWGQGTQVTVSS

SEQ ID NO: 7848 - protein, 110 aa, Artificial Sequence
  Chemically Synthesized
QVQLQESGGGLVQAGGSLRLSCAASGYISYFAPMGWYRQAPGKEREFVAAITPGSTTYYADSVKGRFTISRDNAKNTVYLQMNSLKPEDTAVYYCALAYWGQGTQVTVSS

SEQ ID NO: 7849 - protein, 122 aa, Artificial Sequence
  Chemically Synthesized
QVQLQESGGGLVQAGGSLRLSCAASGYIFGSHYMGWYRQAPGKERELVASIDIGTSTNYADSVKGRFTISRDNAKNTVYLQMNSLKPEDTAVYYCAAYGYRPYGRAQYLGYWGQGTQVTVSS

SEQ ID NO: 7850 - protein, 118 aa, Artificial Sequence
  Chemically Synthesized
QVQLQESGGGLVQAGGSLRLSCAASGTIFGDPLMGWYRQAPGKEREFVATITGGANTYYADSVKGRFTISRDNAKNTVYLQMNSLKPEDTAVYYCAVDPDLYRYHSYWGQGTQVTVSS

SEQ ID NO: 7851 - protein, 118 aa, Artificial Sequence
  Chemically Synthesized
QVQLQESGGGLVQAGGSLRLSCAASGTIFTSKYMGWYRQAPGKEREFVASITNGASTYYADSVKGRFTISRDNAKNTVYLQMNSLKPEDTAVYYCAAGYIYLYWFRYWGQGTQVTVSS

SEQ ID NO: 7852 - protein, 110 aa, Artificial Sequence
  Chemically Synthesized
QVQLQESGGGLVQAGGSLRLSCAASGYISARDGMGWYRQAPGKERELVATIDYGTSTNYADSVKGRFTISRDNAKNTVYLQMNSLKPEDTAVYYCAASYWGQGTQVTVSS

SEQ ID NO: 7853 - protein, 114 aa, Artificial Sequence
  Chemically Synthesized
QVQLQESGGGLVQAGGSLRLSCAASGSISNWGDMGWYRQAPGKERELVATIATGGITNYADSVKGRFTISRDNAKNTVYLQMNSLKPEDTAVYYCAARYGLDYWGQGTQVTVSS

SEQ ID NO: 7854 - protein, 122 aa, Artificial Sequence
  Chemically Synthesized
QVQLQESGGGLVQAGGSLRLSCAASGTIFRRGNMGWYRQAPGKEREFVAGITDGTNTNYADSVKGRFTISRDNAKNTVYLQMNSLKPEDTAVYYCAVDYSWVPRIQDLHVYWGQGTQVTVSS

SEQ ID NO: 7855 - protein, 109 aa, Artificial Sequence
  Chemically Synthesized
QVQLQESGGGLVQAGGSLRLSCAASGTISFVGGMGWYRQAPGKEREFVAAIGSVVVPYADSVKGRFTISRDNAKNTVYLQMNSLKPEDTAVYYCALGYWGQGTQVTVSS

SEQ ID NO: 7856 - protein, 118 aa, Artificial Sequence
  Chemically Synthesized
QVQLQESGGGLVQAGGSLRLSCAASGSIFYYTWMGWYRQAPGKEREFVAAIDNGSTTYYADSVKGRFTISRDNAKNTVYLQMNSLKPEDTAVYYCAAGPRGVYYFWYWGQGTQVTVSS

SEQ ID NO: 7857 - protein, 122 aa, Artificial Sequence
  Chemically Synthesized
QVQLQESGGGLVQAGGSLRLSCAASGNISDSYSMGWYRQAPGKEREFVASIGYGTNTNYADSVKGRFTISRDNAKNTVYLQMNSLKPEDTAVYYCAVGGADGAPPSYPYTYWGQGTQVTVSS

SEQ ID NO: 7858 - protein, 126 aa, Artificial Sequence
  Chemically Synthesized
QVQLQESGGGLVQAGGSLRLSCAASGTIFKAPTMGWYRQAPGKEREFVASISIGTSTYYADSVKGRFTISRDNAKNTVYLQMNSLKPEDTAVYYCAVLQQHAPQLNYRPLRDHGYWGQGTQVTVSS

SEQ ID NO: 7859 - protein, 118 aa, Artificial Sequence
  Chemically Synthesized
QVQLQESGGGLVQAGGSLRLSCAASGYISRSSYMGWYRQAPGKEREFVAGINYGANTNYADSVKGRFTISRDNAKNTVYLQMNSLKPEDTAVYYCAVYPWFVRTYWYWGQGTQVTVSS

SEQ ID NO: 7860 - protein, 125 aa, Artificial Sequence
  Chemically Synthesized
QVQLQESGGGLVQAGGSLRLSCAASGTIFDYDMGWYRQAPGKEREFVAAINLGGSTNYADSVKGRFTISRDNAKNTVYLQMNSLKPEDTAVYYCAVEGWGYTDYFRDDFYYLGYWGQGTQVTVSS

SEQ ID NO: 7861 - protein, 122 aa, Artificial Sequence
  Chemically Synthesized
QVQLQESGGGLVQAGGSLRLSCAASGTISQIPVMGWYRQAPGKERELVAAIGLGATTYYADSVKGRFTISRDNAKNTVYLQMNSLKPEDTAVYYCAVWFGSVPRRRIGYSYWGQGTQVTVSS

SEQ ID NO: 7862 - protein, 118 aa, Artificial Sequence
  Chemically Synthesized
QVQLQESGGGLVQAGGSLRLSCAASGYISARSDMGWYRQAPGKERELVASIDYGGSTYYADSVKGRFTISRDNAKNTVYLQMNSLKPEDTAVYYCAAYDWDYGGYAYWGQGTQVTVSS

SEQ ID NO: 7863 - protein, 121 aa, Artificial Sequence
  Chemically Synthesized
QVQLQESGGGLVQAGGSLRLSCAASGTISYPRQMGWYRQAPGKERELVAAITYGSITYYADSVKGRFTISRDNAKNTVYLQMNSLKPEDTAVYYCAVRGSYYNNYYDYTYWGQGTQVTVSS

SEQ ID NO: 7864 - protein, 122 aa, Artificial Sequence
  Chemically Synthesized
QVQLQESGGGLVQAGGSLRLSCAASGTIFVVVGMGWYRQAPGKERELVAAIAWGSSTNYADSVKGRFTISRDNAKNTVYLQMNSLKPEDTAVYYCAGSLLVRLLVLLFFCYWGQGTQVTVSS

SEQ ID NO: 7865 - protein, 117 aa, Artificial Sequence
  Chemically Synthesized
QVQLQESGGGLVQAGGSLRLSCAASGTIFINKNMGWYRQAPGKERELVAAITLGGTTNYADSVKGRFTISRDNAKNTVYLQMNSLKPEDTAVYYCAVYNDFGKYSYWGQGTQVTVSS

SEQ ID NO: 7866 - protein, 117 aa, Artificial Sequence
  Chemically Synthesized
QVQLQESGGGLVQAGGSLRLSCAASGSIFQRYMGWYRQAPGKERELVASISPGSTTYYADSVKGRFTISRDNAKNTVYLQMNSLKPEDTAVYYCAVPRTYYTDHAYWGQGTQVTVSS

SEQ ID NO: 7867 - protein, 120 aa, Artificial Sequence
  Chemically Synthesized
QVQLQESGGGLVQAGGSLRLSCAASGYISYIGYMGWYRQAPGKERELVATITYGTITNYADSVKGRFTISRDNAKNTVYLQMNSLKPEDTAVYYCAAILAYQFDRDHEYWGQGTQVTVSS

SEQ ID NO: 7868 - protein, 118 aa, Artificial Sequence
  Chemically Synthesized
QVQLQESGGGLVQAGGSLRLSCAASGTISSRHNMGWYRQAPGKERELVATITQGGITNYADSVKGRFTISRDNAKNTVYLQMNSLKPEDTAVYYCAAIVASHYWYTYWGQGTQVTVSS

SEQ ID NO: 7869 - protein, 126 aa, Artificial Sequence
  Chemically Synthesized
QVQLQESGGGLVQAGGSLRLSCAASGSIFYVPYMGWYRQAPGKERELVAAINPGGNTYYADSVKGRFTISRDNAKNTVYLQMNSLKPEDTAVYYCAVRPDYTGRAVRQGWPLHIYWGQGTQVTVSS

SEQ ID NO: 7870 - protein, 122 aa, Artificial Sequence
  Chemically Synthesized
QVQLQESGGGLVQAGGSLRLSCAASGYISDLNAMGWYRQAPGKEREFVATIARGGITYYADSVKGRFTISRDNAKNTVYLQMNSLKPEDTAVYYCAVNPRGAEYRYTRHDYWGQGTQVTVSS

SEQ ID NO: 7871 - protein, 121 aa, Artificial Sequence
  Chemically Synthesized
QVQLQESGGGLVQAGGSLRLSCAASGSISSYQMGWYRQAPGKEREFVAAIDTGGSTYYADSVKGRFTISRDNAKNTVYLQMNSLKPEDTAVYYCAVITNSWSADDGEYLYWGQGTQVTVSS

SEQ ID NO: 7872 - protein, 118 aa, Artificial Sequence
  Chemically Synthesized
QVQLQESGGGLVQAGGSLRLSCAASGTISAIEIMGWYRQAPGKEREFVAGIATGGTTYYADSVKGRFTISRDNAKNTVYLQMNSLKPEDTAVYYCAVNRGDDHSHYYWGQGTQVTVSS

SEQ ID NO: 7873 - protein, 122 aa, Artificial Sequence
  Chemically Synthesized
QVQLQESGGGLVQAGGSLRLSCAASGNIFEGYDMGWYRQAPGKERELVAGIADGSITNYADSVKGRFTISRDNAKNTVYLQMNSLKPEDTAVYYCAARYGYDGGTPVYHRYWGQGTQVTVSS

SEQ ID NO: 7874 - protein, 118 aa, Artificial Sequence
  Chemically Synthesized
QVQLQESGGGLVQAGGSLRLSCAASGNISVASHMGWYRQAPGKERELVASIARGGNTYYADSVKGRFTISRDNAKNTVYLQMNSLKPEDTAVYYCAVQFAQNVAHSYWGQGTQVTVSS

SEQ ID NO: 7875 - protein, 122 aa, Artificial Sequence
  Chemically Synthesized
QVQLQESGGGLVQAGGSLRLSCAASGNISRTTAMGWYRQAPGKEREFVAAIGNGANTYYADSVKGRFTISRDNAKNTVYLQMNSLKPEDTAVYYCAVNIDYDGNLIDYYYYWGQGTQVTVSS

SEQ ID NO: 7876 - protein, 122 aa, Artificial Sequence
  Chemically Synthesized
QVQLQESGGGLVQAGGSLRLSCAASGTISTHLTMGWYRQAPGKERELVATINYGGSTNYADSVKGRFTISRDNAKNTVYLQMNSLKPEDTAVYYCAVVIGTSLTVNPQFYYWGQGTQVTVSS

SEQ ID NO: 7877 - protein, 118 aa, Artificial Sequence
  Chemically Synthesized
QVQLQESGGGLVQAGGSLRLSCAASGYISAGDGMGWYRQAPGKERELVAAISVGGTTYYADSVKGRFTISRDNAKNTVYLQMNSLKPEDTAVYYCAVTAYDYVPHGYWGQGTQVTVSS

SEQ ID NO: 7878 - protein, 118 aa, Artificial Sequence
  Chemically Synthesized
QVQLQESGGGLVQAGGSLRLSCAASGTIFDLYNMGWYRQAPGKEREFVASIGSGTNTYYADSVKGRFTISRDNAKNTVYLQMNSLKPEDTAVYYCAAGPPAQYSYGYWGQGTQVTVSS

SEQ ID NO: 7879 - protein, 118 aa, Artificial Sequence
  Chemically Synthesized
QVQLQESGGGLVQAGGSLRLSCAASGNIFNPVWMGWYRQAPGKEREFVATITSGTITNYADSVKGRFTISRDNAKNTVYLQMNSLKPEDTAVYYCAAGNRPKWDHAYWGQGTQVTVSS

SEQ ID NO: 7880 - protein, 118 aa, Artificial Sequence
  Chemically Synthesized
QVQLQESGGGLVQAGGSLRLSCAASGTIFGPGVMGWYRQAPGKERELVASIDQGASTNYADSVKGRFTISRDNAKNTVYLQMNSLKPEDTAVYYCAVNGDLIHLLQYWGQGTQVTVSS

SEQ ID NO: 7881 - protein, 118 aa, Artificial Sequence
  Chemically Synthesized
QVQLQESGGGLVQAGGSLRLSCAASGTISSVTFMGWYRQAPGKERELVAGITWGGTTYYADSVKGRFTISRDNAKNTVYLQMNSLKPEDTAVYYCAATHAWYAPHDYWGQGTQVTVSS

SEQ ID NO: 7882 - protein, 126 aa, Artificial Sequence
  Chemically Synthesized
QVQLQESGGGLVQAGGSLRLSCAASGNISRLGDMGWYRQAPGKEREFVATIDRGASTYYADSVKGRFTISRDNAKNTVYLQMNSLKPEDTAVYYCAADGDRYTRYDSGLGDALDYWGQGTQVTVSS

SEQ ID NO: 7883 - protein, 122 aa, Artificial Sequence
  Chemically Synthesized
QVQLQESGGGLVQAGGSLRLSCAASGSISTTWEMGWYRQAPGKEREFVASIATGGNTNYADSVKGRFTISRDNAKNTVYLQMNSLKPEDTAVYYCAVESRAVVYPQPDLVYWGQGTQVTVSS

SEQ ID NO: 7884 - protein, 126 aa, Artificial Sequence
  Chemically Synthesized
QVQLQESGGGLVQAGGSLRLSCAASGSISQYPRMGWYRQAPGKEREFVAGIAWGGTTYYADSVKGRFTISRDNAKNTVYLQMNSLKPEDTAVYYCAVIDNGTYDDPVDRHDNYSYWGQGTQVTVSS

SEQ ID NO: 7885 - protein, 117 aa, Artificial Sequence
  Chemically Synthesized
QVQLQESGGGLVQAGGSLRLSCAASGTISRTYPMGWYRQAPGKEREFVAGITYGTTTNYADSVKGRFTISRDNAKNTVYLQMNSLKPEDTAVYYCAASVTSTVGFYWGQGTQVTVSS

SEQ ID NO: 7886 - protein, 118 aa, Artificial Sequence
  Chemically Synthesized
QVQLQESGGGLVQAGGSLRLSCAASGNIFARIWMGWYRQAPGKERELVATINYGTSTNYADSVKGRFTISRDNAKNTVYLQMNSLKPEDTAVYYCAVRYAEWFVYEYWGQGTQVTVSS

SEQ ID NO: 7887 - protein, 126 aa, Artificial Sequence
  Chemically Synthesized
QVQLQESGGGLVQAGGSLRLSCAASGSIFGYHVMGWYRQAPGKEREFVAGINYGTITYYADSVKGRFTISRDNAKNTVYLQMNSLKPEDTAVYYCAVGETLRYLNDDTYIDWHWYWGQGTQVTVSS

SEQ ID NO: 7888 - protein, 126 aa, Artificial Sequence
  Chemically Synthesized
QVQLQESGGGLVQAGGSLRLSCAASGNIFYLFDMGWYRQAPGKERELVASIDIGATTNYADSVKGRFTISRDNAKNTVYLQMNSLKPEDTAVYYCAVDTTGRLTHPYYNYIFFYYWGQGTQVTVSS

SEQ ID NO: 7889 - protein, 125 aa, Artificial Sequence
  Chemically Synthesized
QVQLQESGGGLVQAGGSLRLSCAASGTIFAPYKMGWYRQAPGKERELVPVLVVVLLPYADSVKGRFTISRDNAKNTVYLQMNSLKPEDTAVYYCAAVHEYLLVYNTQGNYDHKYWGQGTQVTVSS

SEQ ID NO: 7890 - protein, 118 aa, Artificial Sequence
  Chemically Synthesized
QVQLQESGGGLVQAGGSLRLSCAASGTIFNTSIMGWYRQAPGKERELVAAIAPGGSTYYADSVKGRFTISRDNAKNTVYLQMNSLKPEDTAVYYCAVSRDGYYSHPYWGQGTQVTVSS

SEQ ID NO: 7891 - protein, 118 aa, Artificial Sequence
  Chemically Synthesized
QVQLQESGGGLVQAGGSLRLSCAASGNIFHSALMGWYRQAPGKERELVAAIAQGGTTYYADSVKGRFTISRDNAKNTVYLQMNSLKPEDTAVYYCAASTGNYNAYPYWGQGTQVTVSS

SEQ ID NO: 7892 - protein, 116 aa, Artificial Sequence
  Chemically Synthesized
QVQLQESGGGLVQAGGSLRLSCAASGYISGPGLMGWYRQAPGKERELVAAIANGTNTYYADSVKGRFTISRDNAKNTVYLQMNSLKPEDTAVYYCAANYFLGLVYWGQGTQVTVSS

SEQ ID NO: 7893 - protein, 122 aa, Artificial Sequence
  Chemically Synthesized
QVQLQESGGGLVQAGGSLRLSCAASGNIFTVGIMGWYRQAPGKERELVAAIAEGSSTYYADSVKGRFTISRDNAKNTVYLQMNSLKPEDTAVYYCAVTARPYHNAHAYHVYWGQGTQVTVSS

SEQ ID NO: 7894 - protein, 117 aa, Artificial Sequence
  Chemically Synthesized
QVQLQESGGGLVQAGGSLRLSCAASGILMGWYRQAPGKERELVAAIDDGSNTYYADSVKGRFTISRDNAKNTVYLQMNSLKPEDTAVYYCAAGYDLYSSDRGYHDYWGQGTQVTVSS

SEQ ID NO: 7895 - protein, 126 aa, Artificial Sequence
  Chemically Synthesized
QVQLQESGGGLVQAGGSLRLSCAASGNISYGGTMGWYRQAPGKERELVAAITTGSNTYYADSVKGRFTISRDNAKNTVYLQMNSLKPEDTAVYYCAAPYEDDAWYYIGVFDGYEYWGQGTQVTVSS

SEQ ID NO: 7896 - protein, 122 aa, Artificial Sequence
  Chemically Synthesized
QVQLQESGGGLVQAGGSLRLSCAASGNISLYSLMGWYRQAPGKERELVAAIGAGTSTYYADSVKGRFTISRDNAKNTVYLQMNSLKPEDTAVYYCAASRPSYNEYGHPHPYWGQGTQVTVSS

SEQ ID NO: 7897 - protein, 122 aa, Artificial Sequence
  Chemically Synthesized
QVQLQESGGGLVQAGGSLRLSCAASGSISPDGLMGWYRQAPGKERELVAAIAPGANTYYADSVKGRFTISRDNAKNTVYLQMNSLKPEDTAVYYCAATPTEIYERAKHYFYWGQGTQVTVSS

SEQ ID NO: 7898 - protein, 118 aa, Artificial Sequence
  Chemically Synthesized
QVQLQESGGGLVQAGGSLRLSCAASGSISISSLMGWYRQAPGKERELVAAIAYGANTYYADSVKGRFTISRDNAKNTVYLQMNSLKPEDTAVYYCAADATGVPYHVYWGQGTQVTVSS

SEQ ID NO: 7899 - protein, 117 aa, Artificial Sequence
  Chemically Synthesized
QVQLQESGGGLVQAGGSLRLSCAASGSISPSLMGWYRQAPGKERELVAAIASGTITYYADSVKGRFTISRDNAKNTVYLQMNSLKPEDTAVYYCAADDDRTYYHIYWGQGTQVTVSS

SEQ ID NO: 7900 - protein, 117 aa, Artificial Sequence
  Chemically Synthesized
QVQLQESGGGLVQAGGSLRLSCAASGTISRRNIMGWYRQAPGKERELVAAITTGSSTYYADSVKGRFTISRDNAKNTVYLQMNSLKPEDTAVYYCAASAPYKRLPYWGQGTQVTVSS

SEQ ID NO: 7901 - protein, 118 aa, Artificial Sequence
  Chemically Synthesized
QVQLQESGGGLVQAGGSLRLSCAASGSISQDHLMGWYRQAPGKERELVAAIASGASTYYADSVKGRFTISRDNAKNTVYLQMNSLKPEDTAVYYCAASDGAYAYHVYWGQGTQVTVSS

SEQ ID NO: 7902 - protein, 118 aa, Artificial Sequence
  Chemically Synthesized
QVQLQESGGGLVQAGGSLRLSCAASGYISYAGLMGWYRQAPGKERELVAAIATGSNTYYADSVKGRFTISRDNAKNTVYLQMNSLKPEDTAVYYCAATTGHSSDHLYWGQGTQVTVSS

SEQ ID NO: 7903 - protein, 119 aa, Artificial Sequence
  Chemically Synthesized
QVQLQESGGGLVQAGGSLRLSCAASGSIFKYDDVMGWYRQAPGKERELVAAISTGANTYYADSVKGRFTISRDNAKNTVYLQMNSLKPEDTAVYYCAVYPSDTGELPYWGQGTQVTVSS

SEQ ID NO: 7904 - protein, 118 aa, Artificial Sequence
  Chemically Synthesized
QVQLQESGGGLVQAGGSLRLSCAASGTISSWAVMGWYRQAPGKERELVAAIDSGTSTYYADSVKGRFTISRDNAKNTVYLQMNSLKPEDTAVYYCAAPYSAYGDHIYWGQGTQVTVSS

SEQ ID NO: 7905 - protein, 117 aa, Artificial Sequence
  Chemically Synthesized
QVQLQESGGGLVQAGGSLRLSCAASGTISNDVVMGWYRQAPGKERELVAAISTGTTTYYADSVKGRFTISRDNAKNTVYLQMNSLKPEDTAVYYCAAYTSYAYLPYWGQGTQVTVSS

SEQ ID NO: 7906 - protein, 118 aa, Artificial Sequence
  Chemically Synthesized
QVQLQESGGGLVQAGGSLRLSCAASGYIFYIALMGWYRQAPGKERELVAAIAPGGSTYYADSVKGRFTISRDNAKNTVYLQMNSLKPEDTAVYYCAVDNTVQFGLPYWGQGTQVTVSS

SEQ ID NO: 7907 - protein, 122 aa, Artificial Sequence
  Chemically Synthesized
QVQLQESGGGLVQAGGSLRLSCAASGNISNYGIMGWYRQAPGKERELVAAIDHGTITYYADSVKGRFTISRDNAKNTVYLQMNSLKPEDTAVYYCAASYVRYVGSSDIYYYWGQGTQVTVSS

SEQ ID NO: 7908 - protein, 117 aa, Artificial Sequence
  Chemically Synthesized
QVQLQESGGGLVQAGGSLRLSCAASGTIFGGTVMGWYRQAPGKERELVAAIAYGSSTYYADSVKGRFTISRDNAKNTVYLQMNSLKPEDTAVYYCAAYPDQGAHSYWGQGTQVTVSS

SEQ ID NO: 7909 - protein, 118 aa, Artificial Sequence
  Chemically Synthesized
QVQLQESGGGLVQAGGSLRLSCAASGYIFSQSIMGWYRQAPGKERELVAAIDAGSTTYYADSVKGRFTISRDNAKNTVYLQMNSLKPEDTAVYYCAAPYLYRDDYSYWGQGTQVTVSS

SEQ ID NO: 7910 - protein, 118 aa, Artificial Sequence
  Chemically Synthesized
QVQLQESGGGLVQAGGSLRLSCAASGYISTSVLMGWYRQAPGKERELVAAIAPGGSTYYADSVKGRFTISRDNAKNTVYLQMNSLKPEDTAVYYCAADNYGYPQHPYWGQGTQVTVSS

SEQ ID NO: 7911 - protein, 118 aa, Artificial Sequence
  Chemically Synthesized
QVQLQESGGGLVQAGGSLRLSCAASGSIFQYSLMGWYRQAPGKERELVAAISTGTSTYYADSVKGRFTISRDNAKNTVYLQMNSLKPEDTAVYYCAVASPYYSDHPYWGQGTQVTVSS

SEQ ID NO: 7912 - protein, 122 aa, Artificial Sequence
  Chemically Synthesized
QVQLQESGGGLVQAGGSLRLSCAASGNIFTLSDMGWYRQAPGKERELVAAIAYGGSTYYADSVKGRFTISRDNAKNTVYLQMNSLKPEDTAVYYCAVYYFGDRGYGGYYTYWGQGTQVTVSS

SEQ ID NO: 7913 - protein, 118 aa, Artificial Sequence
  Chemically Synthesized
QVQLQESGGGLVQAGGSLRLSCAASGNISTATIMGWYRQAPGKERELVAAIADGSSTYYADSVKGRFTISRDNAKNTVYLQMNSLKPEDTAVYYCAADNPTWYALPYWGQGTQVTVSS

SEQ ID NO: 7914 - protein, 117 aa, Artificial Sequence
  Chemically Synthesized
QVQLQESGGGLVQAGGSLRLSCAASGTIFSAETMGWYRQAPGKERELVAAIARGATTYYADSVKGRFTISRDNAKNTVYLQMNSLKPEDTAVYYCAAYGDTRYLPYWGQGTQVTVSS

SEQ ID NO: 7915 - protein, 117 aa, Artificial Sequence
  Chemically Synthesized
QVQLQESGGGLVQAGGSLRLSCAASGTISANPVMGWYRQAPGKERELVAAISDGANTYYADSVKGRFTISRDNAKNTVYLQMNSLKPEDTAVYYCAAYLQFNYHPYWGQGTQVTVSS

SEQ ID NO: 7916 - protein, 118 aa, Artificial Sequence
  Chemically Synthesized
QVQLQESGGGLVQAGGSLRLSCAASGNISGALVMGWYRQAPGKERELVAAISTGTITYYADSVKGRFTISRDNAKNTVYLQMNSLKPEDTAVYYCAAANYLLPDHPYWGQGTQVTVSS

SEQ ID NO: 7917 - protein, 118 aa, Artificial Sequence
  Chemically Synthesized
QVQLQESGGGLVQAGGSLRLSCAASGNIFSDDLMGWYRQAPGKERELVAAIADGASTYYADSVKGRFTISRDNAKNTVYLQMNSLKPEDTAVYYCAVPSYLSPSFPYWGQGTQVTVSS

SEQ ID NO: 7918 - protein, 118 aa, Artificial Sequence
  Chemically Synthesized
QVQLQESGGGLVQAGGSLRLSCAASGNIFRGAIMGWYRQAPGKERELVAAINGGSSTYYADSVKGRFTISRDNAKNTVYLQMNSLKPEDTAVYYCAAPYAGDARHVYWGQGTQVTVSS

SEQ ID NO: 7919 - protein, 119 aa, Artificial Sequence
  Chemically Synthesized
QVQLQESGGGLVQAGGSLRLSCAASGTISQVGIMGWYRQAPGKERELVAAIADGSNTYYADSVKGRFTISRDNAKNTVYLQMNSLKPEDTAVYYCAANDTLSRYDHVYWGQGTQVTVSS

SEQ ID NO: 7920 - protein, 118 aa, Artificial Sequence
  Chemically Synthesized
QVQLQESGGGLVQAGGSLRLSCAASGNIFPLVIMGWYRQAPGKERELVAAIDPGSITYYADSVKGRFTISRDNAKNTVYLQMNSLKPEDTAVYYCAAQSYYYSYFVYWGQGTQVTVSS

SEQ ID NO: 7921 - protein, 122 aa, Artificial Sequence
  Chemically Synthesized
QVQLQESGGGLVQAGGSLRLSCAASGYISRRNLMGWYRQAPGKERELVAAIDYGSSTYYADSVKGRFTISRDNAKNTVYLQMNSLKPEDTAVYYCAASHVSPDPYYTNHVYWGQGTQVTVSS

SEQ ID NO: 7922 - protein, 118 aa, Artificial Sequence
  Chemically Synthesized
QVQLQESGGGLVQAGGSLRLSCAASGSIFYHPLMGWYRQAPGKERELVAAIADGSTTYYADSVKGRFTISRDNAKNTVYLQMNSLKPEDTAVYYCAAAHQSYTGHPYWGQGTQVTVSS

SEQ ID NO: 7923 - protein, 118 aa, Artificial Sequence
  Chemically Synthesized
QVQLQESGGGLVQAGGSLRLSCAASGYIFQPGLMGWYRQAPGKERELVAAIAEGTSTYYADSVKGRFTISRDNAKNTVYLQMNSLKPEDTAVYYCAVTGAATAYLTYWGQGTQVTVSS

SEQ ID NO: 7924 - protein, 118 aa, Artificial Sequence
  Chemically Synthesized
QVQLQESGGGLVQAGGSLRLSCAASGSIFSYYFMGWYRQAPGKERELVAAIDDGSTTYYADSVKGRFTISRDNAKNTVYLQMNSLKPEDTAVYYCAAPGGEGYAHVYWGQGTQVTVSS

SEQ ID NO: 7925 - protein, 118 aa, Artificial Sequence
  Chemically Synthesized
QVQLQESGGGLVQAGGSLRLSCAASGNIFNKAIMGWYRQAPGKERELVAAISVGSSTYYADSVKGRFTISRDNAKNTVYLQMNSLKPEDTAVYYCAASANSYVSYPYWGQGTQVTVSS

SEQ ID NO: 7926 - protein, 110 aa, Artificial Sequence
  Chemically Synthesized
QVQLQESGGGLVQAGGSLRLSCAASGTISWPEGMGWYRQAPGKERELVATISPGTSTNYADSVKGRFTISRDNAKNTVYLQMNSLKPEDTAVYYCAVIYWGQGTQVTVSS

SEQ ID NO: 7927 - protein, 118 aa, Artificial Sequence
  Chemically Synthesized
QVQLQESGGGLVQAGGSLRLSCAASGNIFPVRAMGWYRQAPGKERELVAAIALGGSTYYADSVKGRFTISRDNAKNTVYLQMNSLKPEDTAVYYCAAKPPYRSYHQYWGQGTQVTVSS

SEQ ID NO: 7928 - protein, 118 aa, Artificial Sequence
  Chemically Synthesized
QVQLQESGGGLVQAGGSLRLSCAASGTISAPDFMGWYRQAPGKEREFVAAIAWGSTTNYADSVKGRFTISRDNAKNTVYLQMNSLKPEDTAVYYCAVVLSFYADFTYWGQGTQVTVSS

SEQ ID NO: 7929 - protein, 118 aa, Artificial Sequence
  Chemically Synthesized
QVQLQESGGGLVQAGGSLRLSCAASGNIFYPDKMGWYRQAPGKERELVAAIALGTTTYYADSVKGRFTISRDNAKNTVYLQMNSLKPEDTAVYYCAAKFRRLRNHRYWGQGTQVTVSS

SEQ ID NO: 7930 - protein, 122 aa, Artificial Sequence
  Chemically Synthesized
QVQLQESGGGLVQAGGSLRLSCAASGYISDYYAMGWYRQAPGKERELVAAITSGSTTYYADSVKGRFTISRDNAKNTVYLQMNSLKPEDTAVYYCAVDDYADEYAVDWHIYWGQGTQVTVSS

SEQ ID NO: 7931 - protein, 119 aa, Artificial Sequence
  Chemically Synthesized
QVQLQESGGGLVQAGGSLRLSCAASGYISRGAGIMGWYRQAPGKERELVAAIATGTITYYADSVKGRFTISRDNAKNTVYLQMNSLKPEDTAVYYCAVTYGASRAHVYWGQGTQVTVSS

SEQ ID NO: 7932 - protein, 116 aa, Artificial Sequence
  Chemically Synthesized
QVQLQESGGGLVQAGGSLRLSCAASGTISGPGLMGWYRQAPGKERELVAAIDSGTSTYYADSVKGRFTISRDNAKNTVYLQMNSLKPEDTAVYYCAASSPSRLPYWGQGTQVTVSS

SEQ ID NO: 7933 - protein, 117 aa, Artificial Sequence
  Chemically Synthesized
QVQLQESGGGLVQAGGSLRLSCAASGNISLVGLMGWYRQAPGKERELVAAISLGASTYYADSVKGRFTISRDNAKNTVYLQMNSLKPEDTAVYYCAVARGTDYYPYWGQGTQVTVSS

SEQ ID NO: 7934 - protein, 122 aa, Artificial Sequence
  Chemically Synthesized
QVQLQESGGGLVQAGGSLRLSCAASGTISDYYLMGWYRQAPGKERELVAAIDDGATTYYADSVKGRFTISRDNAKNTVYLQMNSLKPEDTAVYYCAALTGGYHYPPRDYLYWGQGTQVTVSS

SEQ ID NO: 7935 - protein, 118 aa, Artificial Sequence
  Chemically Synthesized
QVQLQESGGGLVQAGGSLRLSCAASGTISRYDWMGWYRQAPGKERELVASISYGGITYYADSVKGRFTISRDNAKNTVYLQMNSLKPEDTAVYYCAVDWEDYGYHWYWGQGTQVTVSS

SEQ ID NO: 7936 - protein, 118 aa, Artificial Sequence
  Chemically Synthesized
QVQLQESGGGLVQAGGSLRLSCAASGNISDAVWGMGWYRQAPGKERELVATIDIGTNTNYADSVKGRFTISRDNAKNTVYLQMNSLKPEDTAVYYCAASLVTTTTMYWGQGTQVTVSS

SEQ ID NO: 7937 - protein, 118 aa, Artificial Sequence
  Chemically Synthesized
QVQLQESGGGLVQAGGSLRLSCAASGNISTGRLMGWYRQAPGKERELVAAIDPGTNTYYADSVKGRFTISRDNAKNTVYLQMNSLKPEDTAVYYCAVDRTVTDYYPYWGQGTQVTVSS

SEQ ID NO: 7938 - protein, 122 aa, Artificial Sequence
  Chemically Synthesized
QVQLQESGGGLVQAGGSLRLSCAASGTISDPSIMGWYRQAPGKERELVAAIDQGSSTYYADSVKGRFTISRDNAKNTVYLQMNSLKPEDTAVYYCAVIVDPPYAYDDEFRYWGQGTQVTVSS

SEQ ID NO: 7939 - protein, 122 aa, Artificial Sequence
  Chemically Synthesized
QVQLQESGGGLVQAGGSLRLSCAASGNIFYPALMGWYRQAPGKERELVAAIADGANTYYADSVKGRFTISRDNAKNTVYLQMNSLKPEDTAVYYCAVGGYDDDYGDYAYPYWGQGTQVTVSS

SEQ ID NO: 7940 - protein, 122 aa, Artificial Sequence
  Chemically Synthesized
QVQLQESGGGLVQAGGSLRLSCAASGNIFDTGLMGWYRQAPGKERELVAAIDPGTSTYYADSVKGRFTISRDNAKNTVYLQMNSLKPEDTAVYYCAVGYGGGYIGYVPLVYWGQGTQVTVSS

SEQ ID NO: 7941 - protein, 118 aa, Artificial Sequence
  Chemically Synthesized
QVQLQESGGGLVQAGGSLRLSCAASGNISAYNYMGWYRQAPGKERELVAAIDYGGSTNYADSVKGRFTISRDNAKNTVYLQMNSLKPEDTAVYYCAVVDRPRPAYVYWGQGTQVTVSS

SEQ ID NO: 7942 - protein, 117 aa, Artificial Sequence
  Chemically Synthesized
QVQLQESGGGLVQAGGSLRLSCAASGNIFRSSVMGWYRQAPGKERELVAAINEGTSTYYADSVKGRFTISRDNAKNTVYLQMNSLKPEDTAVYYCAVYPPYPYFAYWGQGTQVTVSS

SEQ ID NO: 7943 - protein, 118 aa, Artificial Sequence
  Chemically Synthesized
QVQLQESGGGLVQAGGSLRLSCAASGSIFSAEDMGWYRQAPGKEREFVASISHGSSTYYADSVKGRFTISRDNAKNTVYLQMNSLKPEDTAVYYCAVDDDRWRGFAYWGQGTQVTVSS

SEQ ID NO: 7944 - protein, 118 aa, Artificial Sequence
  Chemically Synthesized
QVQLQESGGGLVQAGGSLRLSCAASGYISDYGIMGWYRQAPGKERELVAAIADGGNTYYADSVKGRFTISRDNAKNTVYLQMNSLKPEDTAVYYCAASRPDSDYHPYWGQGTQVTVSS

SEQ ID NO: 7945 - protein, 125 aa, Artificial Sequence
  Chemically Synthesized
QVQLQESGGGLVQAGGSLRLSCAASGYIFRAEIMGWYRQAPGKERELVAAIDQGATTYYADSVKGRFTISRDNAKNTVYLQMNSLKPEDTAVYYCAVPYPEYYKDYEEVWPHGYWGQGTQVTVSS

SEQ ID NO: 7946 - protein, 117 aa, Artificial Sequence
  Chemically Synthesized
QVQLQESGGGLVQAGGSLRLSCAASGTISPYGLMGWYRQAPGKERELVAAIDPGANTYYADSVKGRFTISRDNAKNTVYLQMNSLKPEDTAVYYCAATYSGRLYVYWGQGTQVTVSS

SEQ ID NO: 7947 - protein, 118 aa, Artificial Sequence
  Chemically Synthesized
QVQLQESGGGLVQAGGSLRLSCAASGNISPWGIMGWYRQAPGKERELVAAIAYGTNTYYADSVKGRFTISRDNAKNTVYLQMNSLKPEDTAVYYCAATRWSEQLFVYWGQGTQVTVSS

SEQ ID NO: 7948 - protein, 122 aa, Artificial Sequence
  Chemically Synthesized
QVQLQESGGGLVQAGGSLRLSCAASGYIFYRDLMGWYRQAPGKERELVAAIDPGSSTYYADSVKGRFTISRDNAKNTVYLQMNSLKPEDTAVYYCAVPYYSITDDTWDHPYWGQGTQVTVSS

SEQ ID NO: 7949 - protein, 118 aa, Artificial Sequence
  Chemically Synthesized
QVQLQESGGGLVQAGGSLRLSCAASGYISLRGLMGWYRQAPGKERELVAAIADGSNTYYADSVKGRFTISRDNAKNTVYLQMNSLKPEDTAVYYCAATQSAQVYLVYWGQGTQVTVSS

SEQ ID NO: 7950 - protein, 117 aa, Artificial Sequence
  Chemically Synthesized
QVQLQESGGGLVQAGGSLRLSCAASGTISAADVMGWYRQAPGKERELVAAIDGGTTTYYADSVKGRFTISRDNAKNTVYLQMNSLKPEDTAVYYCAAYSRYAYHAYWGQGTQVTVSS

SEQ ID NO: 7951 - protein, 117 aa, Artificial Sequence
  Chemically Synthesized
QVQLQESGGGLVQAGGSLRLSCAASGNIFAASVMGWYRQAPGKERELVAGIDRGGSTYYADSVKGRFTISRDNAKNTVYLQMNSLKPEDTAVYYCAAYPQNNDHVYWGQGTQVTVSS

SEQ ID NO: 7952 - protein, 122 aa, Artificial Sequence
  Chemically Synthesized
QVQLQESGGGLVQAGGSLRLSCAASGSISPSGLMGWYRQAPGKERELVAAIAEGATTYYADSVKGRFTISRDNAKNTVYLQMNSLKPEDTAVYYCAATKPVDWRYQDYHVYWGQGTQVTVSS

SEQ ID NO: 7953 - protein, 122 aa, Artificial Sequence
  Chemically Synthesized
QVQLQESGGGLVQAGGSLRLSCAASGYISGGNVMGWYRQAPGKERELVAAITTGTITYYADSVKGRFTISRDNAKNTVYLQMNSLKPEDTAVYYCAATRGITKGNPAIHVYWGQGTQVTVSS

SEQ ID NO: 7954 - protein, 118 aa, Artificial Sequence
  Chemically Synthesized
QVQLQESGGGLVQAGGSLRLSCAASGYIFYRALMGWYRQAPGKERELVAAIADGGSTYYADSVKGRFTISRDNAKNTVYLQMNSLKPEDTAVYYCAVPDEHADDHVYWGQGTQVTVSS

SEQ ID NO: 7955 - protein, 118 aa, Artificial Sequence
  Chemically Synthesized
QVQLQESGGGLVQAGGSLRLSCAASGSIFFGYLMGWYRQAPGKERELVAAIAPGANTYYADSVKGRFTISRDNAKNTVYLQMNSLKPEDTAVYYCAADGPGEYYHPYWGQGTQVTVSS

SEQ ID NO: 7956 - protein, 118 aa, Artificial Sequence
  Chemically Synthesized
QVQLQESGGGLVQAGGSLRLSCAASGYIFGHPVMGWYRQAPGKERELVAAIDWGGSTYYADSVKGRFTISRDNAKNTVYLQMNSLKPEDTAVYYCAVPYLDQTPFGYWGQGTQVTVSS

SEQ ID NO: 7957 - protein, 118 aa, Artificial Sequence
  Chemically Synthesized
QVQLQESGGGLVQAGGSLRLSCAASGTIFDDYVMGWYRQAPGKERELVAAINYGANTYYADSVKGRFTISRDNAKNTVYLQMNSLKPEDTAVYYCAAYAPYIGTYPYWGQGTQVTVSS

SEQ ID NO: 7958 - protein, 112 aa, Artificial Sequence
  Chemically Synthesized
QVQLQESGGGLVQAGGSLRLSCAASGSISRSLGMGWYRQAPGKEREFVAAITIGTITNYADSVKGRFTISRDNAKNTVYLQMNSLKPEDTAVYYCAFSSLYWGQGTQVTVSS

SEQ ID NO: 7959 - protein, 115 aa, Artificial Sequence
  Chemically Synthesized
QVQLQESGGGLVQAGGSLRLSCAASGSIFHTLSMGWYRQAPGKERELVAAIGNGTNTYYADSVKGRFTISRDNAKNTVYLQMNSLKPEDTAVYYCAAADYIHLYWGQGTQVTVSS

SEQ ID NO: 7960 - protein, 118 aa, Artificial Sequence
  Chemically Synthesized
QVQLQESGGGLVQAGGSLRLSCAASGNISWRWLMGWYRQAPGKERELVAAIALGASTYYADSVKGRFTISRDNAKNTVYLQMNSLKPEDTAVYYCAAYGPVASTHSYWGQGTQVTVSS

SEQ ID NO: 7961 - protein, 118 aa, Artificial Sequence
  Chemically Synthesized
QVQLQESGGGLVQAGGSLRLSCAASGTISGAYIMGWYRQAPGKERELVAAIAEGANTYYADSVKGRFTISRDNAKNTVYLQMNSLKPEDTAVYYCAVSRRSDQDYPYWGQGTQVTVSS

SEQ ID NO: 7962 - protein, 118 aa, Artificial Sequence
  Chemically Synthesized
QVQLQESGGGLVQAGGSLRLSCAASGNISHRDVMGWYRQAPGKERELVAAIDDGTSTYYADSVKGRFTISRDNAKNTVYLQMNSLKPEDTAVYYCAAYLYDYRYLAYWGQGTQVTVSS

SEQ ID NO: 7963 - protein, 118 aa, Artificial Sequence
  Chemically Synthesized
QVQLQESGGGLVQAGGSLRLSCAASGYISIWYIMGWYRQAPGKERELVAAISYGANTYYADSVKGRFTISRDNAKNTVYLQMNSLKPEDTAVYYCAVDNYTDSRYPYWGQGTQVTVSS

SEQ ID NO: 7964 - protein, 118 aa, Artificial Sequence
  Chemically Synthesized
QVQLQESGGGLVQAGGSLRLSCAASGSISYAINMGWYRQAPGKEREFVAGISYGGTTYYADSVKGRFTISRDNAKNTVYLQMNSLKPEDTAVYYCAVESYYDQYHFYWGQGTQVTVSS

SEQ ID NO: 7965 - protein, 122 aa, Artificial Sequence
  Chemically Synthesized
QVQLQESGGGLVQAGGSLRLSCAASGSIFATGLMGWYRQAPGKERELVAAIADGTNTYYADSVKGRFTISRDNAKNTVYLQMNSLKPEDTAVYYCAAGRVGAIGQYRGLPYWGQGTQVTVSS

SEQ ID NO: 7966 - protein, 118 aa, Artificial Sequence
  Chemically Synthesized
QVQLQESGGGLVQAGGSLRLSCAASGYIFSKGLMGWYRQAPGKERELVAAIALGGNTYYADSVKGRFTISRDNAKNTVYLQMNSLKPEDTAVYYCAVNALRPYYHIYWGQGTQVTVSS

SEQ ID NO: 7967 - protein, 126 aa, Artificial Sequence
  Chemically Synthesized
QVQLQESGGGLVQAGGSLRLSCAASGNISVRPRMGWYRQAPGKEREFVASIDRGASTYYADSVKGRFTISRDNAKNTVYLQMNSLKPEDTAVYYCAVRGWKQWGGSYGYYHYHSYWGQGTQVTVSS

SEQ ID NO: 7968 - protein, 118 aa, Artificial Sequence
  Chemically Synthesized
QVQLQESGGGLVQAGGSLRLSCAASGYIFSPSLMGWYRQAPGKERELVAAIADGATTYYADSVKGRFTISRDNAKNTVYLQMNSLKPEDTAVYYCAADNPYDYNYPYWGQGTQVTVSS

SEQ ID NO: 7969 - protein, 118 aa, Artificial Sequence
  Chemically Synthesized
QVQLQESGGGLVQAGGSLRLSCAASGTIFPIKDMGWYRQAPGKEREFVAAISDGTITYYADSVKGRFTISRDNAKNTVYLQMNSLKPEDTAVYYCAADNWDDGYHLYWGQGTQVTVSS

SEQ ID NO: 7970 - protein, 118 aa, Artificial Sequence
  Chemically Synthesized
QVQLQESGGGLVQAGGSLRLSCAASGSIFDAEYMGWYRQAPGKEREFVASINGGGTTYYADSVKGRFTISRDNAKNTVYLQMNSLKPEDTAVYYCAAFYIRRYRYTYWGQGTQVTVSS

SEQ ID NO: 7971 - protein, 118 aa, Artificial Sequence
  Chemically Synthesized
QVQLQESGGGLVQAGGSLRLSCAASGNIFDYWAMGWYRQAPGKERELVAAIDYGTNTYYADSVKGRFTISRDNAKNTVYLQMNSLKPEDTAVYYCAASSFDTGDHLYWGQGTQVTVSS

SEQ ID NO: 7972 - protein, 122 aa, Artificial Sequence
  Chemically Synthesized
QVQLQESGGGLVQAGGSLRLSCAASGYIFTSSIMGWYRQAPGKERELVAAIDDGASTYYADSVKGRFTISRDNAKNTVYLQMNSLKPEDTAVYYCAAPYLYRRLEHVNHTYWGQGTQVTVSS

SEQ ID NO: 7973 - protein, 118 aa, Artificial Sequence
  Chemically Synthesized
QVQLQESGGGLVQAGGSLRLSCAASGNISSEQLMGWYRQAPGKERELVAAISIGANTYYADSVKGRFTISRDNAKNTVYLQMNSLKPEDTAVYYCAAEQDGYYDFPYWGQGTQVTVSS

SEQ ID NO: 7974 - protein, 117 aa, Artificial Sequence
  Chemically Synthesized
QVQLQESGGGLVQAGGSLRLSCAASGYISDDSDMGWYRQAPGKEREFVAAITDGGNTYYADSVKGRFTISRDNAKNTVYLQMNSLKPEDTAVYYCAAYDYYLGLLYWGQGTQVTVSS

SEQ ID NO: 7975 - protein, 126 aa, Artificial Sequence
  Chemically Synthesized
QVQLQESGGGLVQAGGSLRLSCAASGTISSVWLMGWYRQAPGKERELVAAIALGASTYYADSVKGRFTISRDNAKNTVYLQMNSLKPEDTAVYYCAVPYRTDDEYIGYYYDYLVYWGQGTQVTVSS

SEQ ID NO: 7976 - protein, 119 aa, Artificial Sequence
  Chemically Synthesized
QVQLQESGGGLVQAGGSLRLSCAASGNIFDVGIMGWYRQAPGKERELVAAIDYGSSTYYADSVKGRFTISRDNAKNTVYLQMNSLKPEDTAVYYCAVTGGPGLYIHAYWGQGTQVTVSS

SEQ ID NO: 7977 - protein, 118 aa, Artificial Sequence
  Chemically Synthesized
QVQLQESGGGLVQAGGSLRLSCAASGNIFADVPMGWYRQAPGKEREFVASIGDGTTTNYADSVKGRFTISRDNAKNTVYLQMNSLKPEDTAVYYCAVDVDGLGYFEYWGQGTQVTVSS

SEQ ID NO: 7978 - protein, 118 aa, Artificial Sequence
  Chemically Synthesized
QVQLQESGGGLVQAGGSLRLSCAASGSIFFIQIMGWYRQAPGKERELVAAIGYGTTTYYADSVKGRFTISRDNAKNTVYLQMNSLKPEDTAVYYCAASRGGPYRHPYWGQGTQVTVSS

SEQ ID NO: 7979 - protein, 122 aa, Artificial Sequence
  Chemically Synthesized
QVQLQESGGGLVQAGGSLRLSCAASGTISGNYIMGWYRQAPGKERELVAAIAAGGNTYYADSVKGRFTISRDNAKNTVYLQMNSLKPEDTAVYYCAVPELERYEPHDIFWYWGQGTQVTVSS

SEQ ID NO: 7980 - protein, 122 aa, Artificial Sequence
  Chemically Synthesized
QVQLQESGGGLVQAGGSLRLSCAASGSISSTYVMGWYRQAPGKERELVAAINRGGTTYYADSVKGRFTISRDNAKNTVYLQMNSLKPEDTAVYYCAVYDYYDDPGQTYYGYWGQGTQVTVSS

SEQ ID NO: 7981 - protein, 118 aa, Artificial Sequence
  Chemically Synthesized
QVQLQESGGGLVQAGGSLRLSCAASGSISVQVTMGWYRQAPGKERELVAAIAGGSSTYYADSVKGRFTISRDNAKNTVYLQMNSLKPEDTAVYYCAAYLDYGEYLVYWGQGTQVTVSS

SEQ ID NO: 7982 - protein, 118 aa, Artificial Sequence
  Chemically Synthesized
QVQLQESGGGLVQAGGSLRLSCAASGSISTAYLMGWYRQAPGKERELVAAIALGGNTYYADSVKGRFTISRDNAKNTVYLQMNSLKPEDTAVYYCAAANPNGYNLPYWGQGTQVTVSS

SEQ ID NO: 7983 - protein, 117 aa, Artificial Sequence
  Chemically Synthesized
QVQLQESGGGLVQAGGSLRLSCAASGNISTAYVMGWYRQAPGKERELVAAINNGAITYYADSVKGRFTISRDNAKNTVYLQMNSLKPEDTAVYYCAFYHVGRYHAYWGQGTQVTVSS

SEQ ID NO: 7984 - protein, 118 aa, Artificial Sequence
  Chemically Synthesized
QVQLQESGGGLVQAGGSLRLSCAASGTIFGLLAMGWYRQAPGKERELVAAIATGANTNYADSVKGRFTISRDNAKNTVYLQMNSLKPEDTAVYYCAVSRNSRDWLWYWGQGTQVTVSS

SEQ ID NO: 7985 - protein, 122 aa, Artificial Sequence
  Chemically Synthesized
QVQLQESGGGLVQAGGSLRLSCAASGNISYDAYMGWYRQAPGKEREFVAAIAVGASTNYADSVKGRFTISRDNAKNTVYLQMNSLKPEDTAVYYCAVPSDTTYSGWNAYGYWGQGTQVTVSS

SEQ ID NO: 7986 - protein, 118 aa, Artificial Sequence
  Chemically Synthesized
QVQLQESGGGLVQAGGSLRLSCAASGYISYYAIMGWYRQAPGKERELVAAIDTGGSTYYADSVKGRFTISRDNAKNTVYLQMNSLKPEDTAVYYCAVPYANDVDLWYWGQGTQVTVSS

SEQ ID NO: 7987 - protein, 118 aa, Artificial Sequence
  Chemically Synthesized
QVQLQESGGGLVQAGGSLRLSCAASGNIFIIGIMGWYRQAPGKERELVAAIAGGASTYYADSVKGRFTISRDNAKNTVYLQMNSLKPEDTAVYYCAATEADTRYHVYWGQGTQVTVSS

SEQ ID NO: 7988 - protein, 125 aa, Artificial Sequence
  Chemically Synthesized
QVQLQESGGGLVQAGGSLRLSCAASGTIFDDVYMGWYRQAPGKEREFVASIGDGTSTNYADSVKGRFTISRDNAKNTVYLQMNSLKPEDTAVYYCAARGPVKSRLRVTFRKVMYWGQGTQVTVSS

SEQ ID NO: 7989 - protein, 121 aa, Artificial Sequence
  Chemically Synthesized
QVQLQESGGGLVQAGGSLRLSCAASGSISWYGYMGWYRQAPGKERELVATLVTVVIPYADSVKGRFTISRDNAKNTVYLQMNSLKPEDTAVYYCAVWGGRGRDYAADHYYWGQGTQVTVSS

SEQ ID NO: 7990 - protein, 118 aa, Artificial Sequence
  Chemically Synthesized
QVQLQESGGGLVQAGGSLRLSCAASGNISTSDVMGWYRQAPGKERELVAGISRGANTNYADSVKGRFTISRDNAKNTVYLQMNSLKPEDTAVYYCAARNWQVYIFPYWGQGTQVTVSS

SEQ ID NO: 7991 - protein, 118 aa, Artificial Sequence
  Chemically Synthesized
QVQLQESGGGLVQAGGSLRLSCAASGSISGANYMGWYRQAPGKEREFVAGINYGGSTNYADSVKGRFTISRDNAKNTVYLQMNSLKPEDTAVYYCAVPYDLGFYHWYWGQGTQVTVSS

SEQ ID NO: 7992 - protein, 121 aa, Artificial Sequence
  Chemically Synthesized
QVQLQESGGGLVQAGGSLRLSCAASGTISYDAQMGWYRQAPGKEREFVATIGGGATTNYADSVKGRFTISRDNAKNTVYLQMNSLKPEDTAVYYCAVYDYQYPAPDGHHYWGQGTQVTVSS

SEQ ID NO: 7993 - protein, 121 aa, Artificial Sequence
  Chemically Synthesized
QVQLQESGGGLVQAGGSLRLSCAASGNIFKRSMGWYRQAPGKEREFVAGITSGASTYYADSVKGRFTISRDNAKNTVYLQMNSLKPEDTAVYYCAADGLRYGGGERAYYYWGQGTQVTVSS

SEQ ID NO: 7994 - protein, 117 aa, Artificial Sequence
  Chemically Synthesized
QVQLQESGGGLVQAGGSLRLSCAASGYIFAFGGMGWYRQAPGKEREFVATITYGAITNYADSVKGRFTISRDNAKNTVYLQMNSLKPEDTAVYYCALVWLLTCGMYWGQGTQVTVSS

SEQ ID NO: 7995 - protein, 117 aa, Artificial Sequence
  Chemically Synthesized
QVQLQESGGGLVQAGGSLRLSCAASGTISPSARMGWYRQAPGKERELVASINSVLIPYADSVKGRFTISRDNAKNTVYLQMNSLKPEDTAVYYCAVLDDYYYPYLYWGQGTQVTVSS

SEQ ID NO: 7996 - protein, 118 aa, Artificial Sequence
  Chemically Synthesized
QVQLQESGGGLVQAGGSLRLSCAASGTISGLYIMGWYRQAPGKERELVAAITRGGNTYYADSVKGRFTISRDNAKNTVYLQMNSLKPEDTAVYYCAAYDRAYDPYAYWGQGTQVTVSS

SEQ ID NO: 7997 - protein, 118 aa, Artificial Sequence
  Chemically Synthesized
QVQLQESGGGLVQAGGSLRLSCAASGYISDPDTMGWYRQAPGKERELVAAINTGGSTYYADSVKGRFTISRDNAKNTVYLQMNSLKPEDTAVYYCAVVAAYQKAHVYWGQGTQVTVSS

SEQ ID NO: 7998 - protein, 126 aa, Artificial Sequence
  Chemically Synthesized
QVQLQESGGGLVQAGGSLRLSCAASGYIFGRRRMGWYRQAPGKEREFVASITFGGTTNYADSVKGRFTISRDNAKNTVYLQMNSLKPEDTAVYYCAAALYYQGGNTYRYAWEYSYWGQGTQVTVSS

SEQ ID NO: 7999 - protein, 118 aa, Artificial Sequence
  Chemically Synthesized
QVQLQESGGGLVQAGGSLRLSCAASGNISSYVYMGWYRQAPGKEREFVAAIAVGTITYYADSVKGRFTISRDNAKNTVYLQMNSLKPEDTAVYYCAVDVADDNAFGYWGQGTQVTVSS

SEQ ID NO: 8000 - protein, 116 aa, Artificial Sequence
  Chemically Synthesized
QVQLQESGGGLVQAGGSLRLSCAASGTMGWYRQAPGKERELVASIGYGTSTYYADSVKGRFTISRDNAKNTVYLQMNSLKPEDTAVYYCAAYDFHVYVGSYYFTYWGQGTQVTVSS

SEQ ID NO: 8001 - protein, 118 aa, Artificial Sequence
  Chemically Synthesized
QVQLQESGGGLVQAGGSLRLSCAASGYISDSNDMGWYRQAPGKEREFVASIAFGSTTYYADSVKGRFTISRDNAKNTVYLQMNSLKPEDTAVYYCAVYIIRHAGYFYWGQGTQVTVSS

SEQ ID NO: 8002 - protein, 118 aa, Artificial Sequence
  Chemically Synthesized
QVQLQESGGGLVQAGGSLRLSCAASGYISSDIDMGWYRQAPGKERELVAGIALGSSTNYADSVKGRFTISRDNAKNTVYLQMNSLKPEDTAVYYCAVPTGSKYVYYYWGQGTQVTVSS

SEQ ID NO: 8003 - protein, 118 aa, Artificial Sequence
  Chemically Synthesized
QVQLQESGGGLVQAGGSLRLSCAASGNIFPSYGMGWYRQAPGKERELVAAIARGGSTYYADSVKGRFTISRDNAKNTVYLQMNSLKPEDTAVYYCAVTDHSYRDHGYWGQGTQVTVSS

SEQ ID NO: 8004 - protein, 126 aa, Artificial Sequence
  Chemically Synthesized
QVQLQESGGGLVQAGGSLRLSCAASGTISGTTYMGWYRQAPGKERELVAAISFGAITYYADSVKGRFTISRDNAKNTVYLQMNSLKPEDTAVYYCAVGTDPYSYQPYYTNGTHIYWGQGTQVTVSS

SEQ ID NO: 8005 - protein, 126 aa, Artificial Sequence
  Chemically Synthesized
QVQLQESGGGLVQAGGSLRLSCAASGNIFYYLYMGWYRQAPGKEREFVAAISRGASTNYADSVKGRFTISRDNAKNTVYLQMNSLKPEDTAVYYCAANEGTDWTPWYVAIGPLRYWGQGTQVTVSS

SEQ ID NO: 8006 - protein, 122 aa, Artificial Sequence
  Chemically Synthesized
QVQLQESGGGLVQAGGSLRLSCAASGYISGGGDMGWYRQAPGKEREFVAAIGDGTSTNYADSVKGRFTISRDNAKNTVYLQMNSLKPEDTAVYYCAVTYIFRARYSRAHYYWGQGTQVTVSS

SEQ ID NO: 8007 - protein, 121 aa, Artificial Sequence
  Chemically Synthesized
QVQLQESGGGLVQAGGSLRLSCAASGTISADFDMGWYRQAPGKERELVATIGLGSSTYYADSVKGRFTISRDNAKNTVYLQMNSLKPEDTAVYYCAVYPSEREYYGLHGYWGQGTQVTVSS

SEQ ID NO: 8008 - protein, 122 aa, Artificial Sequence
  Chemically Synthesized
QVQLQESGGGLVQAGGSLRLSCAASGSISYLYYMGWYRQAPGKEREFVATIDSGGNTYYADSVKGRFTISRDNAKNTVYLQMNSLKPEDTAVYYCAVYRINYNWVGVRYQYWGQGTQVTVSS

SEQ ID NO: 8009 - protein, 117 aa, Artificial Sequence
  Chemically Synthesized
QVQLQESGGGLVQAGGSLRLSCAASGNISYSSSMGWYRQAPGKERELVASIATGGTTNYADSVKGRFTISRDNAKNTVYLQMNSLKPEDTAVYYCAVPSPLASLIYWGQGTQVTVSS

SEQ ID NO: 8010 - protein, 118 aa, Artificial Sequence
  Chemically Synthesized
QVQLQESGGGLVQAGGSLRLSCAASGNIFRSDYMGWYRQAPGKERELVATIDGGATTYYADSVKGRFTISRDNAKNTVYLQMNSLKPEDTAVYYCAVYYTISYYLYYWGQGTQVTVSS

SEQ ID NO: 8011 - protein, 122 aa, Artificial Sequence
  Chemically Synthesized
QVQLQESGGGLVQAGGSLRLSCAASGNIFYFRDMGWYRQAPGKERELVASIAWGASTYYADSVKGRFTISRDNAKNTVYLQMNSLKPEDTAVYYCAVVDQDYFDDYYIHQYWGQGTQVTVSS

SEQ ID NO: 8012 - protein, 125 aa, Artificial Sequence
  Chemically Synthesized
QVQLQESGGGLVQAGGSLRLSCAASGTISSFSYMGWYRQAPGKERELVASIANVVLPYADSVKGRFTISRDNAKNTVYLQMNSLKPEDTAVYYCAAQSYDYIPYNDPSYNSLDYWGQGTQVTVSS

SEQ ID NO: 8013 - protein, 113 aa, Artificial Sequence
  Chemically Synthesized
QVQLQESGGGLVQAGGSLRLSCAASGTISTLALMGWYRQAPGKERELVAAISTGATTYYADSVKGRFTISRDNAKNTVYLQMNSLKPEDTAVYYCAAGKYVYWGQGTQVTVSS

SEQ ID NO: 8014 - protein, 118 aa, Artificial Sequence
  Chemically Synthesized
QVQLQESGGGLVQAGGSLRLSCAASGYIFDRYIMGWYRQAPGKERELVATIDIGATTNYADSVKGRFTISRDNAKNTVYLQMNSLKPEDTAVYYCAAVVVDRVPHGYWGQGTQVTVSS

SEQ ID NO: 8015 - protein, 118 aa, Artificial Sequence
  Chemically Synthesized
QVQLQESGGGLVQAGGSLRLSCAASGNIFPQSYMGWYRQAPGKEREFVASIAIGASTNYADSVKGRFTISRDNAKNTVYLQMNSLKPEDTAVYYCAVVHYHVHWFGYWGQGTQVTVSS

SEQ ID NO: 8016 - protein, 116 aa, Artificial Sequence
  Chemically Synthesized
QVQLQESGGGLVQAGGSLRLSCAASGTISQNQDMGWYRQAPGKEREFVASIGYGGSYADSVKGRFTISRDNAKNTVYLQMNSLKPEDTAVYYCAVVTRRSRYFPYWGQGTQVTVSS

SEQ ID NO: 8017 - protein, 117 aa, Artificial Sequence
  Chemically Synthesized
QVQLQESGGGLVQAGGSLRLSCAASGTISAVGLMGWYRQAPGKEREFVAGIGGGSTTNYADSVKGRFTISRDNAKNTVYLQMNSLKPEDTAVYYCAAQVANVTCIYWGQGTQVTVSS

SEQ ID NO: 8018 - protein, 118 aa, Artificial Sequence
  Chemically Synthesized
QVQLQESGGGLVQAGGSLRLSCAASGNIFTTFVMGWYRQAPGKEREFVAAINSGGTTNYADSVKGRFTISRDNAKNTVYLQMNSLKPEDTAVYYCAVGRRQAPHYYYWGQGTQVTVSS

SEQ ID NO: 8019 - protein, 126 aa, Artificial Sequence
  Chemically Synthesized
QVQLQESGGGLVQAGGSLRLSCAASGTISLYYFMGWYRQAPGKERELVAGISDGGTTYYADSVKGRFTISRDNAKNTVYLQMNSLKPEDTAVYYCAAYIDARGTTYWGGEGEHTYWGQGTQVTVSS

SEQ ID NO: 8020 - protein, 118 aa, Artificial Sequence
  Chemically Synthesized
QVQLQESGGGLVQAGGSLRLSCAASGTISDYPNMGWYRQAPGKEREFVATITYGSITYYADSVKGRFTISRDNAKNTVYLQMNSLKPEDTAVYYCAATTYHSNDHGYWGQGTQVTVSS

SEQ ID NO: 8021 - protein, 122 aa, Artificial Sequence
  Chemically Synthesized
QVQLQESGGGLVQAGGSLRLSCAASGTISDSLDMGWYRQAPGKERELVAAIADGTSTYYADSVKGRFTISRDNAKNTVYLQMNSLKPEDTAVYYCAAGLSYTYRGDVNFGYWGQGTQVTVSS

SEQ ID NO: 8022 - protein, 118 aa, Artificial Sequence
  Chemically Synthesized
QVQLQESGGGLVQAGGSLRLSCAASGTISNVGIMGWYRQAPGKERELVAAISIGGSTNYADSVKGRFTISRDNAKNTVYLQMNSLKPEDTAVYYCAAGYQFGHRHDYWGQGTQVTVSS

SEQ ID NO: 8023 - protein, 118 aa, Artificial Sequence
  Chemically Synthesized
QVQLQESGGGLVQAGGSLRLSCAASGNISRFSPMGWYRQAPGKERELVAAIGTGASTNYADSVKGRFTISRDNAKNTVYLQMNSLKPEDTAVYYCAVNYGFATRHWYWGQGTQVTVSS

SEQ ID NO: 8024 - protein, 126 aa, Artificial Sequence
  Chemically Synthesized
QVQLQESGGGLVQAGGSLRLSCAASGNIFDPSYMGWYRQAPGKEREFVASITGGTITNYADSVKGRFTISRDNAKNTVYLQMNSLKPEDTAVYYCAAWYGDQPWGADIGNVDHWYWGQGTQVTVSS

SEQ ID NO: 8025 - protein, 118 aa, Artificial Sequence
  Chemically Synthesized
QVQLQESGGGLVQAGGSLRLSCAASGTIFDEGIMGWYRQAPGKEREFVASISPGGITNYADSVKGRFTISRDNAKNTVYLQMNSLKPEDTAVYYCAALRTIYHYHYYWGQGTQVTVSS

SEQ ID NO: 8026 - protein, 122 aa, Artificial Sequence
  Chemically Synthesized
QVQLQESGGGLVQAGGSLRLSCAASGTISYPPSMGWYRQAPGKERELVATISEGTSTNYADSVKGRFTISRDNAKNTVYLQMNSLKPEDTAVYYCAVSDALSDRLRIYSSYWGQGTQVTVSS

SEQ ID NO: 8027 - protein, 118 aa, Artificial Sequence
  Chemically Synthesized
QVQLQESGGGLVQAGGSLRLSCAASGSISTWYTMGWYRQAPGKEREFVAGITQGTTTNYADSVKGRFTISRDNAKNTVYLQMNSLKPEDTAVYYCAALTYAGAWYYYWGQGTQVTVSS

SEQ ID NO: 8028 - protein, 118 aa, Artificial Sequence
  Chemically Synthesized
QVQLQESGGGLVQAGGSLRLSCAASGNISYYDYMGWYRQAPGKERELVAGIDIGGTTYYADSVKGRFTISRDNAKNTVYLQMNSLKPEDTAVYYCAVSQSRNVVHVYWGQGTQVTVSS

SEQ ID NO: 8029 - protein, 117 aa, Artificial Sequence
  Chemically Synthesized
QVQLQESGGGLVQAGGSLRLSCAASGTIFIFSDMGWYRQAPGKEREFVATIGGGTNTNYADSVKGRFTISRDNAKNTVYLQMNSLKPEDTAVYYCAAVSTGFRCLYWGQGTQVTVSS

SEQ ID NO: 8030 - protein, 118 aa, Artificial Sequence
  Chemically Synthesized
QVQLQESGGGLVQAGGSLRLSCAASGNISSGGAMGWYRQAPGKEREFVAGITPGASTNYADSVKGRFTISRDNAKNTVYLQMNSLKPEDTAVYYCAAIAYVYPRYFYWGQGTQVTVSS

SEQ ID NO: 8031 - protein, 118 aa, Artificial Sequence
  Chemically Synthesized
QVQLQESGGGLVQAGGSLRLSCAASGNISYLWVMGWYRQAPGKEREFVAGIAYGTSTYYADSVKGRFTISRDNAKNTVYLQMNSLKPEDTAVYYCAVSYYFYVSHYYWGQGTQVTVSS

SEQ ID NO: 8032 - protein, 118 aa, Artificial Sequence
  Chemically Synthesized
QVQLQESGGGLVQAGGSLRLSCAASGYISQQGDMGWYRQAPGKERELVATITYGSITNYADSVKGRFTISRDNAKNTVYLQMNSLKPEDTAVYYCAVGYYDDYRHAYWGQGTQVTVSS

SEQ ID NO: 8033 - protein, 121 aa, Artificial Sequence
  Chemically Synthesized
QVQLQESGGGLVQAGGSLRLSCAASGYIFYGHMGWYRQAPGKEREFVAGITAGANTNYADSVKGRFTISRDNAKNTVYLQMNSLKPEDTAVYYCAVGGVIAQDYGSPLDYWGQGTQVTVSS

SEQ ID NO: 8034 - protein, 117 aa, Artificial Sequence
  Chemically Synthesized
QVQLQESGGGLVQAGGSLRLSCAASGTISSLVMGWYRQAPGKERELVATITVGGNTYYADSVKGRFTISRDNAKNTVYLQMNSLKPEDTAVYYCAVSNWDAGDHPYWGQGTQVTVSS

SEQ ID NO: 8035 - protein, 118 aa, Artificial Sequence
  Chemically Synthesized
QVQLQESGGGLVQAGGSLRLSCAASGYIFSTWYMGWYRQAPGKERELVATIDRGANTYYADSVKGRFTISRDNAKNTVYLQMNSLKPEDTAVYYCAVYTASGALFDYWGQGTQVTVSS

SEQ ID NO: 8036 - protein, 118 aa, Artificial Sequence
  Chemically Synthesized
QVQLQESGGGLVQAGGSLRLSCAASGSISGRLIMGWYRQAPGKERELVASITQGGNTNYADSVKGRFTISRDNAKNTVYLQMNSLKPEDTAVYYCAALLVGDGYHYYWGQGTQVTVSS

SEQ ID NO: 8037 - protein, 122 aa, Artificial Sequence
  Chemically Synthesized
QVQLQESGGGLVQAGGSLRLSCAASGTISNAYRMGWYRQAPGKEREFVAAIDDGGNTNYADSVKGRFTISRDNAKNTVYLQMNSLKPEDTAVYYCAVLLFGVWGAYRYHGYWGQGTQVTVSS

SEQ ID NO: 8038 - protein, 118 aa, Artificial Sequence
  Chemically Synthesized
QVQLQESGGGLVQAGGSLRLSCAASGSISAGPLMGWYRQAPGKEREFVAAINDGATTYYADSVKGRFTISRDNAKNTVYLQMNSLKPEDTAVYYCAAIGALRDDLAYWGQGTQVTVSS

SEQ ID NO: 8039 - protein, 122 aa, Artificial Sequence
  Chemically Synthesized
QVQLQESGGGLVQAGGSLRLSCAASGTISSTDDMGWYRQAPGKERELVAGIGYGGTTNYADSVKGRFTISRDNAKNTVYLQMNSLKPEDTAVYYCAVYIQYDPQVTGLYSYWGQGTQVTVSS

SEQ ID NO: 8040 - protein, 118 aa, Artificial Sequence
  Chemically Synthesized
QVQLQESGGGLVQAGGSLRLSCAASGTISNDTVMGWYRQAPGKEREFVAGIGKGGTTNYADSVKGRFTISRDNAKNTVYLQMNSLKPEDTAVYYCAAVQATGYRHYYWGQGTQVTVSS

SEQ ID NO: 8041 - protein, 121 aa, Artificial Sequence
  Chemically Synthesized
QVQLQESGGGLVQAGGSLRLSCAASGTISPALYMGWYRQAPGKERELVATIAAGGNTYYADSVKGRFTISRDNAKNTVYLQMNSLKPEDTAVYYCAVYDTVSLTGLKLIYWGQGTQVTVSS

SEQ ID NO: 8042 - protein, 121 aa, Artificial Sequence
  Chemically Synthesized
QVQLQESGGGLVQAGGSLRLSCAASGYIFGYDTMGWYRQAPGKEREFVAGCLRWYYLYADSVKGRFTISRDNAKNTVYLQMNSLKPEDTAVYYCAVGSIVYTSLRYFHDYWGQGTQVTVSS

SEQ ID NO: 8043 - protein, 118 aa, Artificial Sequence
  Chemically Synthesized
QVQLQESGGGLVQAGGSLRLSCAASGNISNVAYMGWYRQAPGKERELVATIDYGSSTYYADSVKGRFTISRDNAKNTVYLQMNSLKPEDTAVYYCAVGTYRGYLHEYWGQGTQVTVSS

SEQ ID NO: 8044 - protein, 121 aa, Artificial Sequence
  Chemically Synthesized
QVQLQESGGGLVQAGGSLRLSCAASGTISGDDIMGWYRQAPGKERELVAAIAYGANTNYADSVKGRFTISRDNAKNTVYLQMNSLKPEDTAVYYCAVVWSLLCSLVVTLYWGQGTQVTVSS

SEQ ID NO: 8045 - protein, 121 aa, Artificial Sequence
  Chemically Synthesized
QVQLQESGGGLVQAGGSLRLSCAASGYISTGDVMGWYRQAPGKERELVATIDRGGITNYADSVKGRFTISRDNAKNTVYLQMNSLKPEDTAVYYCAAGFTDVSTTKLLMYWGQGTQVTVSS

SEQ ID NO: 8046 - protein, 126 aa, Artificial Sequence
  Chemically Synthesized
QVQLQESGGGLVQAGGSLRLSCAASGNISASYKMGWYRQAPGKERELVATIGLGTTTNYADSVKGRFTISRDNAKNTVYLQMNSLKPEDTAVYYCAVAFGTWYNGYNGAWYNHPYWGQGTQVTVSS

SEQ ID NO: 8047 - protein, 117 aa, Artificial Sequence
  Chemically Synthesized
QVQLQESGGGLVQAGGSLRLSCAASGNIFSSFRMGWYRQAPGKERELVAAINDGAITYYADSVKGRFTISRDNAKNTVYLQMNSLKPEDTAVYYCAAGSDYSGLQYWGQGTQVTVSS

SEQ ID NO: 8048 - protein, 117 aa, Artificial Sequence
  Chemically Synthesized
QVQLQESGGGLVQAGGSLRLSCAASGTISYFGDMGWYRQAPGKERELVATINDGTITYYADSVKGRFTISRDNAKNTVYLQMNSLKPEDTAVYYCAANYSGWCFLYWGQGTQVTVSS

SEQ ID NO: 8049 - protein, 118 aa, Artificial Sequence
  Chemically Synthesized
QVQLQESGGGLVQAGGSLRLSCAASGNIFAKANMGWYRQAPGKERELVAAISLGSSTYYADSVKGRFTISRDNAKNTVYLQMNSLKPEDTAVYYCAAVIASSPSHYYWGQGTQVTVSS

SEQ ID NO: 8050 - protein, 121 aa, Artificial Sequence
  Chemically Synthesized
QVQLQESGGGLVQAGGSLRLSCAASGSISWTTYMGWYRQAPGKEREFVAAIATGTSTYYADSVKGRFTISRDNAKNTVYLQMNSLKPEDTAVYYCAVYTASVTTLTTCLYWGQGTQVTVSS

SEQ ID NO: 8051 - protein, 113 aa, Artificial Sequence
  Chemically Synthesized
QVQLQESGGGLVQAGGSLRLSCAASGSISPHIMGWYRQAPGKEREFVASINSGANTYYADSVKGRFTISRDNAKNTVYLQMNSLKPEDTAVYYCAAPPYHLYWGQGTQVTVSS

SEQ ID NO: 8052 - protein, 118 aa, Artificial Sequence
  Chemically Synthesized
QVQLQESGGGLVQAGGSLRLSCAASGTIFGPLGMGWYRQAPGKERELVATIDVGGNTNYADSVKGRFTISRDNAKNTVYLQMNSLKPEDTAVYYCAVATYGHTTFGYWGQGTQVTVSS

SEQ ID NO: 8053 - protein, 118 aa, Artificial Sequence
  Chemically Synthesized
QVQLQESGGGLVQAGGSLRLSCAASGSIFVARVMGWYRQAPGKEREFVAAISDGTSTNYADSVKGRFTISRDNAKNTVYLQMNSLKPEDTAVYYCAALYVDSFRHYYWGQGTQVTVSS

SEQ ID NO: 8054 - protein, 118 aa, Artificial Sequence
  Chemically Synthesized
QVQLQESGGGLVQAGGSLRLSCAASGSISYYALMGWYRQAPGKEREFVAAITFGGITNYADSVKGRFTISRDNAKNTVYLQMNSLKPEDTAVYYCAAVHYVSSWHGYWGQGTQVTVSS

SEQ ID NO: 8055 - protein, 118 aa, Artificial Sequence
  Chemically Synthesized
QVQLQESGGGLVQAGGSLRLSCAASGSISRGGDMGWYRQAPGKERELLPVLITVVVQYADSVKGRFTISRDNAKNTVYLQMNSLKPEDTAVYYCAADALLYNRGLQYWGQGTQVTVSS

SEQ ID NO: 8056 - protein, 118 aa, Artificial Sequence
  Chemically Synthesized
QVQLQESGGGLVQAGGSLRLSCAASGTISNRSYMGWYRQAPGKEREFVAAIDIGTTTNYADSVKGRFTISRDNAKNTVYLQMNSLKPEDTAVYYCAAVYVGLDKYYYWGQGTQVTVSS

SEQ ID NO: 8057 - protein, 121 aa, Artificial Sequence
  Chemically Synthesized
QVQLQESGGGLVQAGGSLRLSCAASGYISAFCMGWYRQAPGKERELVAAIAHGSTTNYADSVKGRFTISRDNAKNTVYLQMNSLKPEDTAVYYCAAYGLLTSLWATLHWYWGQGTQVTVSS

SEQ ID NO: 8058 - protein, 118 aa, Artificial Sequence
  Chemically Synthesized
QVQLQESGGGLVQAGGSLRLSCAASGTIFYYGLMGWYRQAPGKERELVASIARGANTNYADSVKGRFTISRDNAKNTVYLQMNSLKPEDTAVYYCAVSYHTSGVYYYWGQGTQVTVSS

SEQ ID NO: 8059 - protein, 111 aa, Artificial Sequence
  Chemically Synthesized
QVQLQESGGGLVQAGGSLRLSCAASGTIFPGAWMGWYRQAPGKERELVAGISSGGNTYYADSVKGRFTISRDNAKNTVYLQMNSLKPEDTAVYYCALTIYWGQGTQVTVSS

SEQ ID NO: 8060 - protein, 122 aa, Artificial Sequence
  Chemically Synthesized
QVQLQESGGGLVQAGGSLRLSCAASGNIFPLTQMGWYRQAPGKEREFVASIGYGGITYYADSVKGRFTISRDNAKNTVYLQMNSLKPEDTAVYYCAVTGRGFVAKDHDYTYWGQGTQVTVSS

SEQ ID NO: 8061 - protein, 122 aa, Artificial Sequence
  Chemically Synthesized
QVQLQESGGGLVQAGGSLRLSCAASGYISARYVMGWYRQAPGKERELVAGIDYGTITNYADSVKGRFTISRDNAKNTVYLQMNSLKPEDTAVYYCAVDDRRNSYFTDYHYYWGQGTQVTVSS

SEQ ID NO: 8062 - protein, 127 aa, Artificial Sequence
  Chemically Synthesized
QVQLQESGGGLVQAGGSLRLSCAASGTISDVVFMGWYRQAPGKERELVATIGYGATTYYADSVKGRFTISRDNAKNTVYLQMNSLKPEDTAVYYCAVRSLIYSPYYSIVKDYVLPYWGQGTQVTVSS

SEQ ID NO: 8063 - protein, 122 aa, Artificial Sequence
  Chemically Synthesized
QVQLQESGGGLVQAGGSLRLSCAASGSIFHSGYMGWYRQAPGKERELVATIDLGGNTYYADSVKGRFTISRDNAKNTVYLQMNSLKPEDTAVYYCAAGYDVLYHIYYWHIYWGQGTQVTVSS

SEQ ID NO: 8064 - protein, 125 aa, Artificial Sequence
  Chemically Synthesized
QVQLQESGGGLVQAGGSLRLSCAASGNISWSTDMGWYRQAPGKEREFVASIAAGTITNYADSVKGRFTISRDNAKNTVYLQMNSLKPEDTAVYYCAVVFRKSTDNYSRGRWYYYWGQGTQVTVSS

SEQ ID NO: 8065 - protein, 126 aa, Artificial Sequence
  Chemically Synthesized
QVQLQESGGGLVQAGGSLRLSCAASGYISYLTPMGWYRQAPGKEREFVASISGGSSTNYADSVKGRFTISRDNAKNTVYLQMNSLKPEDTAVYYCAVYSPFTTGDTQGGYVGYDYWGQGTQVTVSS

SEQ ID NO: 8066 - protein, 121 aa, Artificial Sequence
  Chemically Synthesized
QVQLQESGGGLVQAGGSLRLSCAASGNIFRDSTMGWYRQAPGKEREFVAAIDYGSNTNYADSVKGRFTISRDNAKNTVYLQMNSLKPEDTAVYYCAALRIDRYDSQYLYYWGQGTQVTVSS

SEQ ID NO: 8067 - protein, 117 aa, Artificial Sequence
  Chemically Synthesized
QVQLQESGGGLVQAGGSLRLSCAASGTISVYRKMGWYRQAPGKEREFVATIADGGITYYADSVKGRFTISRDNAKNTVYLQMNSLKPEDTAVYYCAADSSRLRTMYWGQGTQVTVSS

SEQ ID NO: 8068 - protein, 118 aa, Artificial Sequence
  Chemically Synthesized
QVQLQESGGGLVQAGGSLRLSCAASGYISEHYTMGWYRQAPGKEREFVAGIGVGAITYYADSVKGRFTISRDNAKNTVYLQMNSLKPEDTAVYYCAAIDTPRGRHYYWGQGTQVTVSS

SEQ ID NO: 8069 - protein, 117 aa, Artificial Sequence
  Chemically Synthesized
QVQLQESGGGLVQAGGSLRLSCAASGTISGPWTMGWYRQAPGKEREFVAGINSGGNTNYADSVKGRFTISRDNAKNTVYLQMNSLKPEDTAVYYCAAVYKVYLHYYWGQGTQVTVSS

SEQ ID NO: 8070 - protein, 121 aa, Artificial Sequence
  Chemically Synthesized
QVQLQESGGGLVQAGGSLRLSCAASGTIFPDYTMGWYRQAPGKERELVAAISYGANTYYADSVKGRFTISRDNAKNTVYLQMNSLKPEDTAVYYCAVKTWYSRNGQRPYYWGQGTQVTVSS

SEQ ID NO: 8071 - protein, 117 aa, Artificial Sequence
  Chemically Synthesized
QVQLQESGGGLVQAGGSLRLSCAASGNIFMGWYRQAPGKEREFVATITYGTNTNYADSVKGRFTISRDNAKNTVYLQMNSLKPEDTAVYYCAAYGGRDADAYAYNYWGQGTQVTVSS

SEQ ID NO: 8072 - protein, 118 aa, Artificial Sequence
  Chemically Synthesized
QVQLQESGGGLVQAGGSLRLSCAASGTIFDHQYMGWYRQAPGKEREFVAAIATGAITNYADSVKGRFTISRDNAKNTVYLQMNSLKPEDTAVYYCAAYLYDTPYHYYWGQGTQVTVSS

SEQ ID NO: 8073 - protein, 114 aa, Artificial Sequence
  Chemically Synthesized
QVQLQESGGGLVQAGGSLRLSCAASGTIFTQYVMGWYRQAPGKERELVASIDSGTTTYYADSVKGRFTISRDNAKNTVYLQMNSLKPEDTAVYYCAVVFYYYYWGQGTQVTVSS

SEQ ID NO: 8074 - protein, 126 aa, Artificial Sequence
  Chemically Synthesized
QVQLQESGGGLVQAGGSLRLSCAASGTIFPVAIMGWYRQAPGKEREFVAAIAIGSNTYYADSVKGRFTISRDNAKNTVYLQMNSLKPEDTAVYYCAVADDRDEYIDYPRRRDLHYWGQGTQVTVSS

SEQ ID NO: 8075 - protein, 118 aa, Artificial Sequence
  Chemically Synthesized
QVQLQESGGGLVQAGGSLRLSCAASGTISPPSYMGWYRQAPGKERELVASIGAGGTTYYADSVKGRFTISRDNAKNTVYLQMNSLKPEDTAVYYCAAYYGDDYTYDYWGQGTQVTVSS

SEQ ID NO: 8076 - protein, 116 aa, Artificial Sequence
  Chemically Synthesized
QVQLQESGGGLVQAGGSLRLSCAASGYIFGIRMGWYRQAPGKERELVAAIGGGVLPYADSVKGRFTISRDNAKNTVYLQMNSLKPEDTAVYYCAVYYRYYPDLVYWGQGTQVTVSS

SEQ ID NO: 8077 - protein, 118 aa, Artificial Sequence
  Chemically Synthesized
QVQLQESGGGLVQAGGSLRLSCAASGTIFTYIAMGWYRQAPGKEREFVASISTGANTNYADSVKGRFTISRDNAKNTVYLQMNSLKPEDTAVYYCAADVYASRYHTYWGQGTQVTVSS

SEQ ID NO: 8078 - protein, 118 aa, Artificial Sequence
  Chemically Synthesized
QVQLQESGGGLVQAGGSLRLSCAASGSIFHSRYMGWYRQAPGKERELVATITTGAITYYADSVKGRFTISRDNAKNTVYLQMNSLKPEDTAVYYCAATPRGAEYLYYWGQGTQVTVSS

SEQ ID NO: 8079 - protein, 117 aa, Artificial Sequence
  Chemically Synthesized
QVQLQESGGGLVQAGGSLRLSCAASGYISYRYYMGWYRQAPGKEREFVASINYGGTTYYADSVKGRFTISRDNAKNTVYLQMNSLKPEDTAVYYCAADSPYHYLYYWGQGTQVTVSS

SEQ ID NO: 8080 - protein, 117 aa, Artificial Sequence
  Chemically Synthesized
QVQLQESGGGLVQAGGSLRLSCAASGSFFWTTMGWYRQAPGKEREFVAGIGTGGITNYADSVKGRFTISRDNAKNTVYLQMNSLKPEDTAVYYCAVEDLTGDGHYYWGQGTQVTVSS

SEQ ID NO: 8081 - protein, 122 aa, Artificial Sequence
  Chemically Synthesized
QVQLQESGGGLVQAGGSLRLSCAASGYIFDSYYMGWYRQAPGKERELVAGITSGGNTYYADSVKGRFTISRDNAKNTVYLQMNSLKPEDTAVYYCAVYVAYRVYGQADLYYWGQGTQVTVSS

SEQ ID NO: 8082 - protein, 118 aa, Artificial Sequence
  Chemically Synthesized
QVQLQESGGGLVQAGGSLRLSCAASGTISSGWAMGWYRQAPGKEREFVASIASGASTNYADSVKGRFTISRDNAKNTVYLQMNSLKPEDTAVYYCAAIDGGDYRHYYWGQGTQVTVSS

SEQ ID NO: 8083 - protein, 122 aa, Artificial Sequence
  Chemically Synthesized
QVQLQESGGGLVQAGGSLRLSCAASGNISTWWAMGWYRQAPGKERELVAGITVGTSTNYADSVKGRFTISRDNAKNTVYLQMNSLKPEDTAVYYCAVRNSYGGVYSDSFNYWGQGTQVTVSS

SEQ ID NO: 8084 - protein, 118 aa, Artificial Sequence
  Chemically Synthesized
QVQLQESGGGLVQAGGSLRLSCAASGTISGAIIMGWYRQAPGKEREFVAGINYGGTTYYADSVKGRFTISRDNAKNTVYLQMNSLKPEDTAVYYCAAIVQDHSAYYYWGQGTQVTVSS

SEQ ID NO: 8085 - protein, 116 aa, Artificial Sequence
  Chemically Synthesized
QVQLQESGGGLVQAGGSLRLSCAASGNISDHSMGWYRQAPGKERELVATIAYGANTNYADSVKGRFTISRDNAKNTVYLQMNSLKPEDTAVYYCAVNGTGTVSIYWGQGTQVTVSS

SEQ ID NO: 8086 - protein, 122 aa, Artificial Sequence
  Chemically Synthesized
QVQLQESGGGLVQAGGSLRLSCAASGYISAPYYMGWYRQAPGKERELVASITLGTSTNYADSVKGRFTISRDNAKNTVYLQMNSLKPEDTAVYYCAARLSYGQVYSWSHSYWGQGTQVTVSS

SEQ ID NO: 8087 - protein, 121 aa, Artificial Sequence
  Chemically Synthesized
QVQLQESGGGLVQAGGSLRLSCAASGTIFAYVEMGWYRQAPGKERELVAAIASVLLPYADSVKGRFTISRDNAKNTVYLQMNSLKPEDTAVYYCAARQGDAYGTRYRHSYWGQGTQVTVSS

SEQ ID NO: 8088 - protein, 118 aa, Artificial Sequence
  Chemically Synthesized
QVQLQESGGGLVQAGGSLRLSCAASGSIFRYYAMGWYRQAPGKEREFVAAIGHGGSTYYADSVKGRFTISRDNAKNTVYLQMNSLKPEDTAVYYCAAIWRSGQAHYYWGQGTQVTVSS

SEQ ID NO: 8089 - protein, 122 aa, Artificial Sequence
  Chemically Synthesized
QVQLQESGGGLVQAGGSLRLSCAASGTIFDYTIMGWYRQAPGKEREFVAAIGDGANTYYADSVKGRFTISRDNAKNTVYLQMNSLKPEDTAVYYCAVSNILSFPPRDSLRYWGQGTQVTVSS

SEQ ID NO: 8090 - protein, 118 aa, Artificial Sequence
  Chemically Synthesized
QVQLQESGGGLVQAGGSLRLSCAASGTISAGWTMGWYRQAPGKEREFVAAIDYGAITNYADSVKGRFTISRDNAKNTVYLQMNSLKPEDTAVYYCAAIAYQVPRYYYWGQGTQVTVSS

SEQ ID NO: 8091 - protein, 118 aa, Artificial Sequence
  Chemically Synthesized
QVQLQESGGGLVQAGGSLRLSCAASGYISDASSMGWYRQAPGKEREFVAGIDGGAITNYADSVKGRFTISRDNAKNTVYLQMNSLKPEDTAVYYCAANDRLETFYAYWGQGTQVTVSS

SEQ ID NO: 8092 - protein, 122 aa, Artificial Sequence
  Chemically Synthesized
QVQLQESGGGLVQAGGSLRLSCAASGYIFVDEAMGWYRQAPGKERELVAAIADGAITYYADSVKGRFTISRDNAKNTVYLQMNSLKPEDTAVYYCAAGEVGWSLSPDTYYYWGQGTQVTVSS

SEQ ID NO: 8093 - protein, 121 aa, Artificial Sequence
  Chemically Synthesized
QVQLQESGGGLVQAGGSLRLSCAASGTIFRPFYMGWYRQAPGKEREFVAGIGNGAITLYADSVKGRFTISRDNAKNTVYLQMNSLKPEDTAVYYCAAYAYRADEPVDLTYWGQGTQVTVSS

SEQ ID NO: 8094 - protein, 118 aa, Artificial Sequence
  Chemically Synthesized
QVQLQESGGGLVQAGGSLRLSCAASGYIFVPRSMGWYRQAPGKEREFVASIASGGNTNYADSVKGRFTISRDNAKNTVYLQMNSLKPEDTAVYYCAAIYYDHSHHYYWGQGTQVTVSS

SEQ ID NO: 8095 - protein, 118 aa, Artificial Sequence
  Chemically Synthesized
QVQLQESGGGLVQAGGSLRLSCAASGTIFHYDYMGWYRQAPGKERELVAGIGYGANTNYADSVKGRFTISRDNAKNTVYLQMNSLKPEDTAVYYCAVPRAYVYLFAYWGQGTQVTVSS

SEQ ID NO: 8096 - protein, 126 aa, Artificial Sequence
  Chemically Synthesized
QVQLQESGGGLVQAGGSLRLSCAASGTISFDNVMGWYRQAPGKEREFVAGINYGSSTNYADSVKGRFTISRDNAKNTVYLQMNSLKPEDTAVYYCAVIGYWSTDLDPGRPALHWYWGQGTQVTVSS

SEQ ID NO: 8097 - protein, 126 aa, Artificial Sequence
  Chemically Synthesized
QVQLQESGGGLVQAGGSLRLSCAASGSIFAGRGMGWYRQAPGKERELVAAISRGTNTYYADSVKGRFTISRDNAKNTVYLQMNSLKPEDTAVYYCAVPKYTTLTDSYGLSDHYAYWGQGTQVTVSS

SEQ ID NO: 8098 - protein, 122 aa, Artificial Sequence
  Chemically Synthesized
QVQLQESGGGLVQAGGSLRLSCAASGTISGGRTMGWYRQAPGKEREFVAAINRGTNTNYADSVKGRFTISRDNAKNTVYLQMNSLKPEDTAVYYCAVVGYRTYYPRNYYWYWGQGTQVTVSS

SEQ ID NO: 8099 - protein, 110 aa, Artificial Sequence
  Chemically Synthesized
QVQLQESGGGLVQAGGSLRLSCAASGSISSNTSMGWYRQAPGKERELVAGIGTGATTYYADSVKGRFTISRDNAKNTVYLQMNSLKPEDTAVYYCAHAYWGQGTQVTVSS

SEQ ID NO: 8100 - protein, 122 aa, Artificial Sequence
  Chemically Synthesized
QVQLQESGGGLVQAGGSLRLSCAASGSISVVLAMGWYRQAPGKEREFVAGINAGSTTYYADSVKGRFTISRDNAKNTVYLQMNSLKPEDTAVYYCAAGYFQYQDPRKYHYYWGQGTQVTVSS

SEQ ID NO: 8101 - protein, 118 aa, Artificial Sequence
  Chemically Synthesized
QVQLQESGGGLVQAGGSLRLSCAASGNISATYVMGWYRQAPGKEREFVAAISFGTSTNYADSVKGRFTISRDNAKNTVYLQMNSLKPEDTAVYYCAVIAAYPPYHWYWGQGTQVTVSS

SEQ ID NO: 8102 - protein, 118 aa, Artificial Sequence
  Chemically Synthesized
QVQLQESGGGLVQAGGSLRLSCAASGTISGYSYMGWYRQAPGKERELVAGIAGGGSTNYADSVKGRFTISRDNAKNTVYLQMNSLKPEDTAVYYCAAYGNGDGSLTYWGQGTQVTVSS

SEQ ID NO: 8103 - protein, 123 aa, Artificial Sequence
  Chemically Synthesized
QVQLQESGGGLVQAGGSLRLSCAASGYISAPAIMGWYRQAPGKEREFVAAIDTGGSTNYADSVKGRFTISRDNAKNTVYLQMNSLKPEDTAVYYCAVYGQPAVDAYFALHGYWGQGTQVTVSS

SEQ ID NO: 8104 - protein, 117 aa, Artificial Sequence
  Chemically Synthesized
QVQLQESGGGLVQAGGSLRLSCAASGSISADYPMGWYRQAPGKERELVASIDGGSSTNYADSVKGRFTISRDNAKNTVYLQMNSLKPEDTAVYYCAAITALTGFNYWGQGTQVTVSS

SEQ ID NO: 8105 - protein, 118 aa, Artificial Sequence
  Chemically Synthesized
QVQLQESGGGLVQAGGSLRLSCAASGYISGPVNMGWYRQAPGKEREFVAGITHGSITYYADSVKGRFTISRDNAKNTVYLQMNSLKPEDTAVYYCAAYTTVSPYYYYWGQGTQVTVSS

SEQ ID NO: 8106 - protein, 122 aa, Artificial Sequence
  Chemically Synthesized
QVQLQESGGGLVQAGGSLRLSCAASGYISSRNIMGWYRQAPGKEREFVASIGHGGITNYADSVKGRFTISRDNAKNTVYLQMNSLKPEDTAVYYCAVLDYDTHQRTIRLYYWGQGTQVTVSS

SEQ ID NO: 8107 - protein, 112 aa, Artificial Sequence
  Chemically Synthesized
QVQLQESGGGLVQAGGSLRLSCAASGTISNTAVMGWYRQAPGKERELVAGINSGASTYYADSVKGRFTISRDNAKNTVYLQMNSLKPEDTAVYYCAVALVYWGQGTQVTVSS

SEQ ID NO: 8108 - protein, 118 aa, Artificial Sequence
  Chemically Synthesized
QVQLQESGGGLVQAGGSLRLSCAASGNISRVVGMGWYRQAPGKEREFVAGITQGGSTNYADSVKGRFTISRDNAKNTVYLQMNSLKPEDTAVYYCAAVLYHDISHGYWGQGTQVTVSS

SEQ ID NO: 8109 - protein, 126 aa, Artificial Sequence
  Chemically Synthesized
QVQLQESGGGLVQAGGSLRLSCAASGNISDQVNMGWYRQAPGKERELVAAISYGGTTNYADSVKGRFTISRDNAKNTVYLQMNSLKPEDTAVYYCAALTNYRGYTRGYDGGYHYYWGQGTQVTVSS

SEQ ID NO: 8110 - protein, 118 aa, Artificial Sequence
  Chemically Synthesized
QVQLQESGGGLVQAGGSLRLSCAASGTISQYTNMGWYRQAPGKEREFVASIAQGSITYYADSVKGRFTISRDNAKNTVYLQMNSLKPEDTAVYYCAAVIRRQRYLGYWGQGTQVTVSS

SEQ ID NO: 8111 - protein, 118 aa, Artificial Sequence
  Chemically Synthesized
QVQLQESGGGLVQAGGSLRLSCAASGTISDIQRMGWYRQAPGKERELVASISGGTNTYYADSVKGRFTISRDNAKNTVYLQMNSLKPEDTAVYYCAAYWYEGYRHDYWGQGTQVTVSS

SEQ ID NO: 8112 - protein, 118 aa, Artificial Sequence
  Chemically Synthesized
QVQLQESGGGLVQAGGSLRLSCAASGTIFFDGSMGWYRQAPGKEREFVATITKGGSTNYADSVKGRFTISRDNAKNTVYLQMNSLKPEDTAVYYCAAVRDKGTYYYYWGQGTQVTVSS

SEQ ID NO: 8113 - protein, 118 aa, Artificial Sequence
  Chemically Synthesized
QVQLQESGGGLVQAGGSLRLSCAASGNIFYYIAMGWYRQAPGKEREFVAAITAGANTNYADSVKGRFTISRDNAKNTVYLQMNSLKPEDTAVYYCAAIFGWATRHWYWGQGTQVTVSS

SEQ ID NO: 8114 - protein, 121 aa, Artificial Sequence
  Chemically Synthesized
QVQLQESGGGLVQAGGSLRLSCAASGNIFSEGAMGWYRQAPGKERELVATITRGTNTNYADSVKGRFTISRDNAKNTVYLQMNSLKPEDTAVYYCAAAVNGTRVDTLYHYWGQGTQVTVSS

SEQ ID NO: 8115 - protein, 118 aa, Artificial Sequence
  Chemically Synthesized
QVQLQESGGGLVQAGGSLRLSCAASGNISYYSFMGWYRQAPGKERELVAGIGEGSSTNYADSVKGRFTISRDNAKNTVYLQMNSLKPEDTAVYYCAVDDKQTAHYGYWGQGTQVTVSS

SEQ ID NO: 8116 - protein, 110 aa, Artificial Sequence
  Chemically Synthesized
QVQLQESGGGLVQAGGSLRLSCAASGTIFSRALMGWYRQAPGKERELVASIGLGTNTYYADSVKGRFTISRDNAKNTVYLQMNSLKPEDTAVYYCAAFYWGQGTQVTVSS

SEQ ID NO: 8117 - protein, 122 aa, Artificial Sequence
  Chemically Synthesized
QVQLQESGGGLVQAGGSLRLSCAASGTIFGGPIMGWYRQAPGKEREFVASINPGGSTNYADSVKGRFTISRDNAKNTVYLQMNSLKPEDTAVYYCAAYLQDTYTRLYSLGYWGQGTQVTVSS

SEQ ID NO: 8118 - protein, 117 aa, Artificial Sequence
  Chemically Synthesized
QVQLQESGGGLVQAGGSLRLSCAASGYISDDTGMGWYRQAPGKEREFVATIGSVLLPYADSVKGRFTISRDNAKNTVYLQMNSLKPEDTAVYYCAVATTHPDQHYYWGQGTQVTVSS

SEQ ID NO: 8119 - protein, 118 aa, Artificial Sequence
  Chemically Synthesized
QVQLQESGGGLVQAGGSLRLSCAASGYIFDSSVMGWYRQAPGKEREFVAAIAGGSTTNYADSVKGRFTISRDNAKNTVYLQMNSLKPEDTAVYYCAAVYRQRGYFYYWGQGTQVTVSS

SEQ ID NO: 8120 - protein, 126 aa, Artificial Sequence
  Chemically Synthesized
QVQLQESGGGLVQAGGSLRLSCAASGSISWEHRMGWYRQAPGKERELVASIASGSNTYYADSVKGRFTISRDNAKNTVYLQMNSLKPEDTAVYYCAVYGDGDDNYGSYDVPPYIYWGQGTQVTVSS

SEQ ID NO: 8121 - protein, 112 aa, Artificial Sequence
  Chemically Synthesized
QVQLQESGGGLVQAGGSLRLSCAASGSISSWPYMGWYRQAPGKEREFVATINPGSSTNYADSVKGRFTISRDNAKNTVYLQMNSLKPEDTAVYYCAVSQSYWGQGTQVTVSS

SEQ ID NO: 8122 - protein, 122 aa, Artificial Sequence
  Chemically Synthesized
QVQLQESGGGLVQAGGSLRLSCAASGTISDAWDMGWYRQAPGKEREFVAGIDPGSNTNYADSVKGRFTISRDNAKNTVYLQMNSLKPEDTAVYYCAAWQEDTWARSGPHSYWGQGTQVTVSS

SEQ ID NO: 8123 - protein, 119 aa, Artificial Sequence
  Chemically Synthesized
QVQLQESGGGLVQAGGSLRLSCAASGTIFSHGYMGWYRQAPGKEREFVASIAGGASTYYADSVKGRFTISRDNAKNTVYLQMNSLKPEDTAVYYCAAVIRTRAGYFYYWGQGTQVTVSS

SEQ ID NO: 8124 - protein, 118 aa, Artificial Sequence
  Chemically Synthesized
QVQLQESGGGLVQAGGSLRLSCAASGSIFGYTDMGWYRQAPGKERELVAAITSWWYYQYADSVKGRFTISRDNAKNTVYLQMNSLKPEDTAVYYCAVVDELWWELQYWGQGTQVTVSS

SEQ ID NO: 8125 - protein, 118 aa, Artificial Sequence
  Chemically Synthesized
QVQLQESGGGLVQAGGSLRLSCAASGSISDQFSMGWYRQAPGKEREFVAGIGRGAITNYADSVKGRFTISRDNAKNTVYLQMNSLKPEDTAVYYCAVVTRVPRRLYYWGQGTQVTVSS

SEQ ID NO: 8126 - protein, 118 aa, Artificial Sequence
  Chemically Synthesized
QVQLQESGGGLVQAGGSLRLSCAASGNIFILAAMGWYRQAPGKERELVAAITRGASTNYADSVKGRFTISRDNAKNTVYLQMNSLKPEDTAVYYCAVYYNWGEPFDYWGQGTQVTVSS

SEQ ID NO: 8127 - protein, 118 aa, Artificial Sequence
  Chemically Synthesized
QVQLQESGGGLVQAGGSLRLSCAASGYISYEYAMGWYRQAPGKEREFVAGITSGSTTNYADSVKGRFTISRDNAKNTVYLQMNSLKPEDTAVYYCAAVFYDRQYHHYWGQGTQVTVSS

SEQ ID NO: 8128 - protein, 126 aa, Artificial Sequence
  Chemically Synthesized
QVQLQESGGGLVQAGGSLRLSCAASGTIFSTYYMGWYRQAPGKEREFVASIDKGSTTNYADSVKGRFTISRDNAKNTVYLQMNSLKPEDTAVYYCAAIVLDTYDYGEYTVLYHYYWGQGTQVTVSS

SEQ ID NO: 8129 - protein, 126 aa, Artificial Sequence
  Chemically Synthesized
QVQLQESGGGLVQAGGSLRLSCAASGYISGRGSMGWYRQAPGKERELVAAIGGGASTNYADSVKGRFTISRDNAKNTVYLQMNSLKPEDTAVYYCAAGNYHPWASGYNAGESHYYWGQGTQVTVSS

SEQ ID NO: 8130 - protein, 118 aa, Artificial Sequence
  Chemically Synthesized
QVQLQESGGGLVQAGGSLRLSCAASGSIFTLDRMGWYRQAPGKEREFVAAIAYGANTYYADSVKGRFTISRDNAKNTVYLQMNSLKPEDTAVYYCAALILVTPTHYYWGQGTQVTVSS

SEQ ID NO: 8131 - protein, 125 aa, Artificial Sequence
  Chemically Synthesized
QVQLQESGGGLVQAGGSLRLSCAASGYIFVVSMGWYRQAPGKERELVASITNGANTYYADSVKGRFTISRDNAKNTVYLQMNSLKPEDTAVYYCAVGAGEHVPYNYRDNLKYAYWGQGTQVTVSS

SEQ ID NO: 8132 - protein, 117 aa, Artificial Sequence
  Chemically Synthesized
QVQLQESGGGLVQAGGSLRLSCAASGTIFIYYMGWYRQAPGKEREFVAGIGLGGSTYYADSVKGRFTISRDNAKNTVYLQMNSLKPEDTAVYYCAVDNDRVDDLLYWGQGTQVTVSS

SEQ ID NO: 8133 - protein, 117 aa, Artificial Sequence
  Chemically Synthesized
QVQLQESGGGLVQAGGSLRLSCAASGTISDVPAMGWYRQAPGKEREFVAAIDGGATTYYADSVKGRFTISRDNAKNTVYLQMNSLKPEDTAVYYCAAYYVGSRLYYWGQGTQVTVSS

SEQ ID NO: 8134 - protein, 122 aa, Artificial Sequence
  Chemically Synthesized
QVQLQESGGGLVQAGGSLRLSCAASGSIFYQSSMGWYRQAPGKEREFVASISTGANTNYADSVKGRFTISRDNAKNTVYLQMNSLKPEDTAVYYCAAVTLDYYFNGGYHAYWGQGTQVTVSS

SEQ ID NO: 8135 - protein, 118 aa, Artificial Sequence
  Chemically Synthesized
QVQLQESGGGLVQAGGSLRLSCAASGNIFPYRTMGWYRQAPGKERELVATINFGSTTYYADSVKGRFTISRDNAKNTVYLQMNSLKPEDTAVYYCAAGRGHYRAYHYWGQGTQVTVSS

SEQ ID NO: 8136 - protein, 122 aa, Artificial Sequence
  Chemically Synthesized
QVQLQESGGGLVQAGGSLRLSCAASGYISHGDTMGWYRQAPGKEREFVAGIDRGGITNYADSVKGRFTISRDNAKNTVYLQMNSLKPEDTAVYYCAAVVRWQDYESAYHGYWGQGTQVTVSS

SEQ ID NO: 8137 - protein, 122 aa, Artificial Sequence
  Chemically Synthesized
QVQLQESGGGLVQAGGSLRLSCAASGSIFGHASMGWYRQAPGKEREFVAAINSGASTNYADSVKGRFTISRDNAKNTVYLQMNSLKPEDTAVYYCAAYYRAGYTKWYVLVYWGQGTQVTVSS

SEQ ID NO: 8138 - protein, 118 aa, Artificial Sequence
  Chemically Synthesized
QVQLQESGGGLVQAGGSLRLSCAASGSISDYNSMGWYRQAPGKEREFVAAISYGANTNYADSVKGRFTISRDNAKNTVYLQMNSLKPEDTAVYYCAVVWWDSYYHYYWGQGTQVTVSS

SEQ ID NO: 8139 - protein, 118 aa, Artificial Sequence
  Chemically Synthesized
QVQLQESGGGLVQAGGSLRLSCAASGNISQAANMGWYRQAPGKEREFVAGIGYGTTTNYADSVKGRFTISRDNAKNTVYLQMNSLKPEDTAVYYCAVVIYYAYYYWYWGQGTQVTVSS

SEQ ID NO: 8140 - protein, 118 aa, Artificial Sequence
  Chemically Synthesized
QVQLQESGGGLVQAGGSLRLSCAASGNISPFGTMGWYRQAPGKERELVASIAVGGTTNYADSVKGRFTISRDNAKNTVYLQMNSLKPEDTAVYYCAALIYQHGHHGYWGQGTQVTVSS

SEQ ID NO: 8141 - protein, 118 aa, Artificial Sequence
  Chemically Synthesized
QVQLQESGGGLVQAGGSLRLSCAASGTISTLYAMGWYRQAPGKEREFVASISRGGTTNYADSVKGRFTISRDNAKNTVYLQMNSLKPEDTAVYYCAAVSVHQRVHGYWGQGTQVTVSS

SEQ ID NO: 8142 - protein, 126 aa, Artificial Sequence
  Chemically Synthesized
QVQLQESGGGLVQAGGSLRLSCAASGSISGYYPMGWYRQAPGKERELVASINSGTTTYYADSVKGRFTISRDNAKNTVYLQMNSLKPEDTAVYYCAVGGWAYDTGTRLSPKVYDYWGQGTQVTVSS

SEQ ID NO: 8143 - protein, 118 aa, Artificial Sequence
  Chemically Synthesized
QVQLQESGGGLVQAGGSLRLSCAASGYISDRIVMGWYRQAPGKEREFVAAINSGSITNYADSVKGRFTISRDNAKNTVYLQMNSLKPEDTAVYYCAALLYDRTYHYYWGQGTQVTVSS

SEQ ID NO: 8144 - protein, 122 aa, Artificial Sequence
  Chemically Synthesized
QVQLQESGGGLVQAGGSLRLSCAASGNISATLYMGWYRQAPGKEREFVAAIDYGGSTNYADSVKGRFTISRDNAKNTVYLQMNSLKPEDTAVYYCAVLSRDDYNSPIYHYYWGQGTQVTVSS

SEQ ID NO: 8145 - protein, 121 aa, Artificial Sequence
  Chemically Synthesized
QVQLQESGGGLVQAGGSLRLSCAASGTIFAWYLMGWYRQAPGKERELVALLMLVLVPYADSVKGRFTISRDNAKNTVYLQMNSLKPEDTAVYYCAATATDADDYNWLYSYWGQGTQVTVSS

SEQ ID NO: 8146 - protein, 118 aa, Artificial Sequence
  Chemically Synthesized
QVQLQESGGGLVQAGGSLRLSCAASGSISSAYTMGWYRQAPGKEREFVAAIDPGGTTNYADSVKGRFTISRDNAKNTVYLQMNSLKPEDTAVYYCAALRKESRYFYYWGQGTQVTVSS

SEQ ID NO: 8147 - protein, 122 aa, Artificial Sequence
  Chemically Synthesized
QVQLQESGGGLVQAGGSLRLSCAASGTISDSYVMGWYRQAPGKEREFVAAIDSGGTTNYADSVKGRFTISRDNAKNTVYLQMNSLKPEDTAVYYCAVDEGYESYAYGYFYYWGQGTQVTVSS

SEQ ID NO: 8148 - protein, 118 aa, Artificial Sequence
  Chemically Synthesized
QVQLQESGGGLVQAGGSLRLSCAASGSIFNIDAMGWYRQAPGKEREFVAAIGGGASTYYADSVKGRFTISRDNAKNTVYLQMNSLKPEDTAVYYCAVYDQGDDTHAYWGQGTQVTVSS

SEQ ID NO: 8149 - protein, 121 aa, Artificial Sequence
  Chemically Synthesized
QVQLQESGGGLVQAGGSLRLSCAASGNISWAQQMGWYRQAPGKEREFVATINTGSNTNYADSVKGRFTISRDNAKNTVYLQMNSLKPEDTAVYYCAAGTGLNSQEEILGYWGQGTQVTVSS

SEQ ID NO: 8150 - protein, 125 aa, Artificial Sequence
  Chemically Synthesized
QVQLQESGGGLVQAGGSLRLSCAASGTISRVYSMGWYRQAPGKERELVATIGSVLIPYADSVKGRFTISRDNAKNTVYLQMNSLKPEDTAVYYCAARYWSRNGWPYYASQTHAYWGQGTQVTVSS

SEQ ID NO: 8151 - protein, 118 aa, Artificial Sequence
  Chemically Synthesized
QVQLQESGGGLVQAGGSLRLSCAASGTIFRRYKMGWYRQAPGKERELVASITQGASTNYADSVKGRFTISRDNAKNTVYLQMNSLKPEDTAVYYCAAQRNRKARHTYWGQGTQVTVSS

SEQ ID NO: 8152 - protein, 118 aa, Artificial Sequence
  Chemically Synthesized
QVQLQESGGGLVQAGGSLRLSCAASGSISTTAYMGWYRQAPGKERELVAAIGDGAITNYADSVKGRFTISRDNAKNTVYLQMNSLKPEDTAVYYCAAIQADDVNLTYWGQGTQVTVSS

SEQ ID NO: 8153 - protein, 118 aa, Artificial Sequence
  Chemically Synthesized
QVQLQESGGGLVQAGGSLRLSCAASGSISGRFYMGWYRQAPGKERELVATIASGATTNYADSVKGRFTISRDNAKNTVYLQMNSLKPEDTAVYYCAVDDQSYAFHAYWGQGTQVTVSS

SEQ ID NO: 8154 - protein, 125 aa, Artificial Sequence
  Chemically Synthesized
QVQLQESGGGLVQAGGSLRLSCAASGYIFTIPYMGWYRQAPGKEREFVASIGYGATTYYADSVKGRFTISRDNAKNTVYLQMNSLKPEDTAVYYCAAWTDGYNTYGAGGDAYLYWGQGTQVTVSS

SEQ ID NO: 8155 - protein, 120 aa, Artificial Sequence
  Chemically Synthesized
QVQLQESGGGLVQAGGSLRLSCAASGNISSRDSMGWYRQAPGKERELVATTYYADSVKGRFTISRDNAKNTVYLQMNSLKPEDTAVYYCAVWSGIIPRADDDQSSYLEYWGQGTQVTVSS

SEQ ID NO: 8156 - protein, 115 aa, Artificial Sequence
  Chemically Synthesized
QVQLQESGGGLVQAGGSLRLSCAASGSIGRSMGWYRQAPGKERELVASIGYGGVPYADSVKGRFTISRDNAKNTVYLQMNSLKPEDTAVYYCAADYSGAGIHGYWGQGTQVTVSS

SEQ ID NO: 8157 - protein, 121 aa, Artificial Sequence
  Chemically Synthesized
QVQLQESGGGLVQAGGSLRLSCAASGYIFTWVMGWYRQAPGKEREFVATISNGSTTNYADSVKGRFTISRDNAKNTVYLQMNSLKPEDTAVYYCAAAPYTSFNFGTGFAYWGQGTQVTVSS

SEQ ID NO: 8158 - protein, 116 aa, Artificial Sequence
  Chemically Synthesized
QVQLQESGGGLVQAGGSLRLSCAASGNISITAAMGWYRQAPGKERELVAGIDYGTSYADSVKGRFTISRDNAKNTVYLQMNSLKPEDTAVYYCAVGRYLVRNLGYWGQGTQVTVSS

SEQ ID NO: 8159 - protein, 111 aa, Artificial Sequence
  Chemically Synthesized
QVQLQESGGGLVQAGGSLRLSCAASGTIFQQTEMGWYRQAPGKEREGSSTYYADSVKGRFTISRDNAKNTVYLQMNSLKPEDTAVYYCAVQVGYIHLLYYWGQGTQVTVSS

SEQ ID NO: 8160 - protein, 122 aa, Artificial Sequence
  Chemically Synthesized
QVQLQESGGGLVQAGGSLRLSCAASGSIFPPDDMGWYRQAPGKERELVAGIANGSITNYADSVKGRFTISRDNAKNTVYLQMNSLKPEDTAVYYCAAGQALYSAQYDDYAYWGQGTQVTVSS

SEQ ID NO: 8161 - protein, 116 aa, Artificial Sequence
  Chemically Synthesized
QVQLQESGGGLVQAGGSLRLSCAASGTIFLVLGMGWYRQAPGKERELVAAIGTGASTYYADSVKGRFTISRDNAKNTVYLQMNSLKPEDTAVYYCAVGSLLTIIYWGQGTQVTVSS

SEQ ID NO: 8162 - protein, 118 aa, Artificial Sequence
  Chemically Synthesized
QVQLQESGGGLVQAGGSLRLSCAASGTISYDEYMGWYRQAPGKERELVAAIGYGGITYYADSVKGRFTISRDNAKNTVYLQMNSLKPEDTAVYYCAADDRSPYDLDYWGQGTQVTVSS

SEQ ID NO: 8163 - protein, 122 aa, Artificial Sequence
  Chemically Synthesized
QVQLQESGGGLVQAGGSLRLSCAASGTISTWTRMGWYRQAPGKERELVAAISAGGNTYYADSVKGRFTISRDNAKNTVYLQMNSLKPEDTAVYYCAAGRYLYDADSVNYIYWGQGTQVTVSS

SEQ ID NO: 8164 - protein, 111 aa, Artificial Sequence
  Chemically Synthesized
QVQLQESGGGLVQAGGSLRLSCAASGSISGDGYMGWYRQAPGKERELVAGITDGTITYYADSVKGRFTISRDNAKNTVYLQMNSLKPEDTAVYYCAVHSYWGQGTQVTVSS

SEQ ID NO: 8165 - protein, 118 aa, Artificial Sequence
  Chemically Synthesized
QVQLQESGGGLVQAGGSLRLSCAASGYISFVGSMGWYRQAPGKEREFVASINRGSNTNYADSVKGRFTISRDNAKNTVYLQMNSLKPEDTAVYYCAALNYAATSYPYWGQGTQVTVSS

SEQ ID NO: 8166 - protein, 117 aa, Artificial Sequence
  Chemically Synthesized
QVQLQESGGGLVQAGGSLRLSCAASGTISDHFYMGWYRQAPGKERELVAAISLVLIPYADSVKGRFTISRDNAKNTVYLQMNSLKPEDTAVYYCAVLYYDGGSHAYWGQGTQVTVSS

SEQ ID NO: 8167 - protein, 118 aa, Artificial Sequence
  Chemically Synthesized
QVQLQESGGGLVQAGGSLRLSCAASGYISAVHGMGWYRQAPGKEREFVASITHGGTTYYADSVKGRFTISRDNAKNTVYLQMNSLKPEDTAVYYCAVDYYYDSPHYYWGQGTQVTVSS

SEQ ID NO: 8168 - protein, 126 aa, Artificial Sequence
  Chemically Synthesized
QVQLQESGGGLVQAGGSLRLSCAASGTISQYYIMGWYRQAPGKEREFVAAISFGASTNYADSVKGRFTISRDNAKNTVYLQMNSLKPEDTAVYYCAAIAEFDTRRWTVQYSPHTYWGQGTQVTVSS

SEQ ID NO: 8169 - protein, 127 aa, Artificial Sequence
  Chemically Synthesized
QVQLQESGGGLVQAGGSLRLSCAASGTIFLGGYMGWYRQAPGKERELVAAISYGGTTYYADSVKGRFTISRDNAKNTVYLQMNSLKPEDTAVYYCAAYWTLVHTYHVYFGGDYHRYWGQGTQVTVSS

SEQ ID NO: 8170 - protein, 119 aa, Artificial Sequence
  Chemically Synthesized
QVQLQESGGGLVQAGGSLRLSCAASGYIFYIAAMGWYRQAPGKEREFVATIDTGTTTYYADSVKGRFTISRDNAKNTVYLQMNSLKPEDTAVYYCAVFGGRLGLFLPYWGQGTQVTVSS

SEQ ID NO: 8171 - protein, 126 aa, Artificial Sequence
  Chemically Synthesized
QVQLQESGGGLVQAGGSLRLSCAASGNIFHYFDMGWYRQAPGKEREFVATISAGSSTYYADSVKGRFTISRDNAKNTVYLQMNSLKPEDTAVYYCAVGAYVDNRTTSDSYPWYYYWGQGTQVTVSS

SEQ ID NO: 8172 - protein, 118 aa, Artificial Sequence
  Chemically Synthesized
QVQLQESGGGLVQAGGSLRLSCAASGNIFIGYDMGWYRQAPGKEREFVASIAKGGTTYYADSVKGRFTISRDNAKNTVYLQMNSLKPEDTAVYYCAAGSGIDEYHSYWGQGTQVTVSS

SEQ ID NO: 8173 - protein, 118 aa, Artificial Sequence
  Chemically Synthesized
QVQLQESGGGLVQAGGSLRLSCAASGSIFRFDTMGWYRQAPGKEREFVAGITSGASTNYADSVKGRFTISRDNAKNTVYLQMNSLKPEDTAVYYCAALRWFDYYFGYWGQGTQVTVSS

SEQ ID NO: 8174 - protein, 121 aa, Artificial Sequence
  Chemically Synthesized
QVQLQESGGGLVQAGGSLRLSCAASGYIFYVYMGWYRQAPGKERELVATIDDGGTTNYADSVKGRFTISRDNAKNTVYLQMNSLKPEDTAVYYCAAYHGRYPSDNSSHFYWGQGTQVTVSS

SEQ ID NO: 8175 - protein, 126 aa, Artificial Sequence
  Chemically Synthesized
QVQLQESGGGLVQAGGSLRLSCAASGNIFAWKTMGWYRQAPGKERELVASIDYGGNTYYADSVKGRFTISRDNAKNTVYLQMNSLKPEDTAVYYCAVDASRAHYASDSPRIWYIYWGQGTQVTVSS

SEQ ID NO: 8176 - protein, 126 aa, Artificial Sequence
  Chemically Synthesized
QVQLQESGGGLVQAGGSLRLSCAASGYISRLYFMGWYRQAPGKERELVASITLGSNTNYADSVKGRFTISRDNAKNTVYLQMNSLKPEDTAVYYCAVDYASGKGWLDTGLAAYPYWGQGTQVTVSS

SEQ ID NO: 8177 - protein, 117 aa, Artificial Sequence
  Chemically Synthesized
QVQLQESGGGLVQAGGSLRLSCAASGSISGDSMGWYRQAPGKERELVAGITIGTITYYADSVKGRFTISRDNAKNTVYLQMNSLKPEDTAVYYCAVQYYYFDDYLYWGQGTQVTVSS

SEQ ID NO: 8178 - protein, 117 aa, Artificial Sequence
  Chemically Synthesized
QVQLQESGGGLVQAGGSLRLSCAASGNISPVVDMGWYRQAPGKEREFVAAIGSVLLPYADSVKGRFTISRDNAKNTVYLQMNSLKPEDTAVYYCAARHVARLIHGYWGQGTQVTVSS

SEQ ID NO: 8179 - protein, 118 aa, Artificial Sequence
  Chemically Synthesized
QVQLQESGGGLVQAGGSLRLSCAASGYISRPDYMGWYRQAPGKEREFVAAIGYGGNTYYADSVKGRFTISRDNAKNTVYLQMNSLKPEDTAVYYCAAPRYDSSLHVYWGQGTQVTVSS

SEQ ID NO: 8180 - protein, 118 aa, Artificial Sequence
  Chemically Synthesized
QVQLQESGGGLVQAGGSLRLSCAASGSISYIDSMGWYRQAPGKEREFVAGIADGANTNYADSVKGRFTISRDNAKNTVYLQMNSLKPEDTAVYYCAVRPYTWTVHLYWGQGTQVTVSS

SEQ ID NO: 8181 - protein, 117 aa, Artificial Sequence
  Chemically Synthesized
QVQLQESGGGLVQAGGSLRLSCAASGTIFYNTYMGWYRQAPGKERELVAGIGGGTTNYADSVKGRFTISRDNAKNTVYLQMNSLKPEDTAVYYCAAPSAPLGQYQYWGQGTQVTVSS

SEQ ID NO: 8182 - protein, 118 aa, Artificial Sequence
  Chemically Synthesized
QVQLQESGGGLVQAGGSLRLSCAASGNISPASRMGWYRQAPGKERELVATIDYGTNTNYADSVKGRFTISRDNAKNTVYLQMNSLKPEDTAVYYCAARLYPGVGLVYWGQGTQVTVSS

SEQ ID NO: 8183 - protein, 113 aa, Artificial Sequence
  Chemically Synthesized
QVQLQESGGGLVQAGGSLRLSCAASGTILMGWYRQAPGKERELVAAIDGGTNTYYADSVKGRFTISRDNAKNTVYLQMNSLKPEDTAVYYCALLTVTSLNMYWGQGTQVTVSS

SEQ ID NO: 8184 - protein, 126 aa, Artificial Sequence
  Chemically Synthesized
QVQLQESGGGLVQAGGSLRLSCAASGTISYHWDMGWYRQAPGKEREFVASIDYGGSTNYADSVKGRFTISRDNAKNTVYLQMNSLKPEDTAVYYCAAGKYQGPTYTLAGRLPYPYWGQGTQVTVSS

SEQ ID NO: 8185 - protein, 118 aa, Artificial Sequence
  Chemically Synthesized
QVQLQESGGGLVQAGGSLRLSCAASGYIFTQAGMGWYRQAPGKERELVAAIAYGSTTNYADSVKGRFTISRDNAKNTVYLQMNSLKPEDTAVYYCAAQFYEDDTHRYWGQGTQVTVSS

SEQ ID NO: 8186 - protein, 118 aa, Artificial Sequence
  Chemically Synthesized
QVQLQESGGGLVQAGGSLRLSCAASGSIFAQTIMGWYRQAPGKERELVAGISVGTNTYYADSVKGRFTISRDNAKNTVYLQMNSLKPEDTAVYYCAAIVPKHDGHYYWGQGTQVTVSS

SEQ ID NO: 8187 - protein, 122 aa, Artificial Sequence
  Chemically Synthesized
QVQLQESGGGLVQAGGSLRLSCAASGTIFETYDMGWYRQAPGKERELVATIDYGGITNYADSVKGRFTISRDNAKNTVYLQMNSLKPEDTAVYYCAVGGITDGPPPDGHEYWGQGTQVTVSS

SEQ ID NO: 8188 - protein, 116 aa, Artificial Sequence
  Chemically Synthesized
QVQLQESGGGLVQAGGSLRLSCAASGTISRSVMGWYRQAPGKEREFVASIDFGILPYADSVKGRFTISRDNAKNTVYLQMNSLKPEDTAVYYCAADSDRTTGHAYWGQGTQVTVSS

SEQ ID NO: 8189 - protein, 122 aa, Artificial Sequence
  Chemically Synthesized
QVQLQESGGGLVQAGGSLRLSCAASGSIFLINRMGWYRQAPGKEREFVAAITQGGTTNYADSVKGRFTISRDNAKNTVYLQMNSLKPEDTAVYYCAAWSGRDTAYDVVHWYWGQGTQVTVSS

SEQ ID NO: 8190 - protein, 118 aa, Artificial Sequence
  Chemically Synthesized
QVQLQESGGGLVQAGGSLRLSCAASGTIFYRSDMGWYRQAPGKEREFVAAITFGGSTNYADSVKGRFTISRDNAKNTVYLQMNSLKPEDTAVYYCAANYIDAHSHTYWGQGTQVTVSS

SEQ ID NO: 8191 - protein, 118 aa, Artificial Sequence
  Chemically Synthesized
QVQLQESGGGLVQAGGSLRLSCAASGNISQFDSMGWYRQAPGKEREFVAAITTGSNTNYADSVKGRFTISRDNAKNTVYLQMNSLKPEDTAVYYCAAYLVQITSYAYWGQGTQVTVSS

SEQ ID NO: 8192 - protein, 122 aa, Artificial Sequence
  Chemically Synthesized
QVQLQESGGGLVQAGGSLRLSCAASGNIFPLTSMGWYRQAPGKEREFVASISIGGITYYADSVKGRFTISRDNAKNTVYLQMNSLKPEDTAVYYCAVVYYRYIADFYSLYYWGQGTQVTVSS

SEQ ID NO: 8193 - protein, 118 aa, Artificial Sequence
  Chemically Synthesized
QVQLQESGGGLVQAGGSLRLSCAASGTIFYYYDMGWYRQAPGKERELVATIDHGGNTNYADSVKGRFTISRDNAKNTVYLQMNSLKPEDTAVYYCAAPFFYAPDFAYWGQGTQVTVSS

SEQ ID NO: 8194 - protein, 118 aa, Artificial Sequence
  Chemically Synthesized
QVQLQESGGGLVQAGGSLRLSCAASGYISIDRSMGWYRQAPGKEREFVASIGSGSITNYADSVKGRFTISRDNAKNTVYLQMNSLKPEDTAVYYCAVLPLDYDLLSYWGQGTQVTVSS

SEQ ID NO: 8195 - protein, 126 aa, Artificial Sequence
  Chemically Synthesized
QVQLQESGGGLVQAGGSLRLSCAASGSISPAYLMGWYRQAPGKERELVATISIGGNTNYADSVKGRFTISRDNAKNTVYLQMNSLKPEDTAVYYCAVRPGRARADYRTYSRPYWYWGQGTQVTVSS

SEQ ID NO: 8196 - protein, 118 aa, Artificial Sequence
  Chemically Synthesized
QVQLQESGGGLVQAGGSLRLSCAASGNISPKFFMGWYRQAPGKERELVASIAQGSTTYYADSVKGRFTISRDNAKNTVYLQMNSLKPEDTAVYYCAAYYTVYSPFAYWGQGTQVTVSS

SEQ ID NO: 8197 - protein, 118 aa, Artificial Sequence
  Chemically Synthesized
QVQLQESGGGLVQAGGSLRLSCAASGSISNSYNMGWYRQAPGKERELVAAISSGTITNYADSVKGRFTISRDNAKNTVYLQMNSLKPEDTAVYYCAVGRAPDTLFDYWGQGTQVTVSS

SEQ ID NO: 8198 - protein, 117 aa, Artificial Sequence
  Chemically Synthesized
QVQLQESGGGLVQAGGSLRLSCAASGYISRTWYMGWYRQAPGKEREFVASITDGATTYYADSVKGRFTISRDNAKNTVYLQMNSLKPEDTAVYYCAAYNKDDDYHYWGQGTQVTVSS

SEQ ID NO: 8199 - protein, 110 aa, Artificial Sequence
  Chemically Synthesized
QVQLQESGGGLVQAGGSLRLSCAASGSISPGRGMGWYRQAPGKERELVAAIAYGTITNYADSVKGRFTISRDNAKNTVYLQMNSLKPEDTAVYYCAVMYWGQGTQVTVSS

SEQ ID NO: 8200 - protein, 118 aa, Artificial Sequence
  Chemically Synthesized
QVQLQESGGGLVQAGGSLRLSCAASGNIFYRRTMGWYRQAPGKEREFVAAIDSGGTTYYADSVKGRFTISRDNAKNTVYLQMNSLKPEDTAVYYCAVGFARWRGHYYWGQGTQVTVSS

SEQ ID NO: 8201 - protein, 126 aa, Artificial Sequence
  Chemically Synthesized
QVQLQESGGGLVQAGGSLRLSCAASGYISGDTEMGWYRQAPGKERELVATIGRGANTNYADSVKGRFTISRDNAKNTVYLQMNSLKPEDTAVYYCAATAYFYPLRHWQVSYRHEYWGQGTQVTVSS

SEQ ID NO: 8202 - protein, 119 aa, Artificial Sequence
  Chemically Synthesized
QVQLQESGGGLVQAGGSLRLSCAASGYISDLRYMGWYRQAPGKERELVAGIGVGANTNYADSVKGRFTISRDNAKNTVYLQMNSLKPEDTAVYYCAAGRDYDSSPFVYWGQGTQVTVSS

SEQ ID NO: 8203 - protein, 121 aa, Artificial Sequence
  Chemically Synthesized
QVQLQESGGGLVQAGGSLRLSCAASGTIFGDWYMGWYRQAPGKEREFVASIALGGNTNYADSVKGRFTISRDNAKNTVYLQMNSLKPEDTAVYYCAAGDIEDLGYTVVIYWGQGTQVTVSS

SEQ ID NO: 8204 - protein, 121 aa, Artificial Sequence
  Chemically Synthesized
QVQLQESGGGLVQAGGSLRLSCAASGYIFLMVMGWYRQAPGKEREFVAGIDLGGNTNYADSVKGRFTISRDNAKNTVYLQMNSLKPEDTAVYYCAVTYYRDVTNNVILQYWGQGTQVTVSS

SEQ ID NO: 8205 - protein, 117 aa, Artificial Sequence
  Chemically Synthesized
QVQLQESGGGLVQAGGSLRLSCAASGNISLEPSMGWYRQAPGKEREFVASIAHGTNTNYADSVKGRFTISRDNAKNTVYLQMNSLKPEDTAVYYCAAIRDLSRLLYWGQGTQVTVSS

SEQ ID NO: 8206 - protein, 122 aa, Artificial Sequence
  Chemically Synthesized
QVQLQESGGGLVQAGGSLRLSCAASGYIFHTPDMGWYRQAPGKEREFVAGISPGGITYYADSVKGRFTISRDNAKNTVYLQMNSLKPEDTAVYYCAAIFNPPPHDNGLLSYWGQGTQVTVSS

SEQ ID NO: 8207 - protein, 118 aa, Artificial Sequence
  Chemically Synthesized
QVQLQESGGGLVQAGGSLRLSCAASGTIFAQRVMGWYRQAPGKERELVAAISDGTNTYYADSVKGRFTISRDNAKNTVYLQMNSLKPEDTAVYYCAAYQYAAELLYYWGQGTQVTVSS

SEQ ID NO: 8208 - protein, 125 aa, Artificial Sequence
  Chemically Synthesized
QVQLQESGGGLVQAGGSLRLSCAASGYIFQDAYMGWYRQAPGKERELVAGITVGSTTYADSVKGRFTISRDNAKNTVYLQMNSLKPEDTAVYYCAVDSGGDTELAPSRFPSHLYWGQGTQVTVSS

SEQ ID NO: 8209 - protein, 119 aa, Artificial Sequence
  Chemically Synthesized
QVQLQESGGGLVQAGGSLRLSCAASGNIFYPAYVMGWYRQAPGKERELVASINTGTTTYYADSVKGRFTISRDNAKNTVYLQMNSLKPEDTAVYYCAVPIAEAFTYYYWGQGTQVTVSS

SEQ ID NO: 8210 - protein, 121 aa, Artificial Sequence
  Chemically Synthesized
QVQLQESGGGLVQAGGSLRLSCAASGTISELLMGWYRQAPGKEREFVATITLGGNTNYADSVKGRFTISRDNAKNTVYLQMNSLKPEDTAVYYCAAYDFGGTQIDVYLGYWGQGTQVTVSS

SEQ ID NO: 8211 - protein, 124 aa, Artificial Sequence
  Chemically Synthesized
QVQLQESGGGLVQAGGSLRLSCAASGYILTTCMGWYRQAPGKERELVAGIGGGATTYYADSVKGRFTISRDNAKNTVYLQMNSLKPEDTAVYYCALTLTTGCTLTLTTLFVLYWGQGTQVTVSS

SEQ ID NO: 8212 - protein, 122 aa, Artificial Sequence
  Chemically Synthesized
QVQLQESGGGLVQAGGSLRLSCAASGSISTLYPMGWYRQAPGKEREFVATIAVGSTTYYADSVKGRFTISRDNAKNTVYLQMNSLKPEDTAVYYCAVVTTHYTYSYANHGYWGQGTQVTVSS

SEQ ID NO: 8213 - protein, 118 aa, Artificial Sequence
  Chemically Synthesized
QVQLQESGGGLVQAGGSLRLSCAASGSIFTWAGMGWYRQAPGKERELVATIGDGANTNYADSVKGRFTISRDNAKNTVYLQMNSLKPEDTAVYYCAAPSGYAGYYGYWGQGTQVTVSS

SEQ ID NO: 8214 - protein, 117 aa, Artificial Sequence
  Chemically Synthesized
QVQLQESGGGLVQAGGSLRLSCAASGNISANHVMGWYRQAPGKEREFVATIATGGITYYADSVKGRFTISRDNAKNTVYLQMNSLKPEDTAVYYCAVSFGGVLLLYWGQGTQVTVSS

SEQ ID NO: 8215 - protein, 116 aa, Artificial Sequence
  Chemically Synthesized
QVQLQESGGGLVQAGGSLRLSCAASGYISLVGNMGWYRQAPGKEREFVAAIGYGLVPYADSVKGRFTISRDNAKNTVYLQMNSLKPEDTAVYYCAAISTNLLRIYWGQGTQVTVSS

SEQ ID NO: 8216 - protein, 121 aa, Artificial Sequence
  Chemically Synthesized
QVQLQESGGGLVQAGGSLRLSCAASGSIFYVVMGWYRQAPGKERELVAAISPGGSTNYADSVKGRFTISRDNAKNTVYLQMNSLKPEDTAVYYCAADTDTIKETVAIFWYWGQGTQVTVSS

SEQ ID NO: 8217 - protein, 125 aa, Artificial Sequence
  Chemically Synthesized
QVQLQESGGGLVQAGGSLRLSCAASGNIFRASVMGWYRQAPGKEREFVPVLITVLIPYADSVKGRFTISRDNAKNTVYLQMNSLKPEDTAVYYCAAEAGTPQGYEDDDYFRFDYWGQGTQVTVSS

SEQ ID NO: 8218 - protein, 124 aa, Artificial Sequence
  Chemically Synthesized
QVQLQESGGGLVQAGGSLRLSCAASGTIFPLTGMGWYRQAPGKEREFVASIAYGSSTYYADSVKGRFTISRDNAKNTVYLQMNSLKPEDTAVYYCAVRNSSNVVGWVSDVHRYWGQGTQVTVSS

SEQ ID NO: 8219 - protein, 122 aa, Artificial Sequence
  Chemically Synthesized
QVQLQESGGGLVQAGGSLRLSCAASGNIFRYYAMGWYRQAPGKEREFVASIGAGTSTNYADSVKGRFTISRDNAKNTVYLQMNSLKPEDTAVYYCAVSSGDFEAGASRHYYWGQGTQVTVSS

SEQ ID NO: 8220 - protein, 126 aa, Artificial Sequence
  Chemically Synthesized
QVQLQESGGGLVQAGGSLRLSCAASGTIFTYPTMGWYRQAPGKEREFVASITRGTNTYYADSVKGRFTISRDNAKNTVYLQMNSLKPEDTAVYYCAVGDKAFTPLPPIARVAHSYWGQGTQVTVSS

SEQ ID NO: 8221 - protein, 118 aa, Artificial Sequence
  Chemically Synthesized
QVQLQESGGGLVQAGGSLRLSCAASGYISQSAQMGWYRQAPGKERELVATIATGSNTYYADSVKGRFTISRDNAKNTVYLQMNSLKPEDTAVYYCAAYYWYVYYYTYWGQGTQVTVSS

SEQ ID NO: 8222 - protein, 111 aa, Artificial Sequence
  Chemically Synthesized
QVQLQESGGGLVQAGGSLRLSCAASGYISRHGYMGWYRQAPGKEREFVAAIAYGTITNYADSVKGRFTISRDNAKNTVYLQMNSLKPEDTAVYYCAVFGYWGQGTQVTVSS

SEQ ID NO: 8223 - protein, 123 aa, Artificial Sequence
  Chemically Synthesized
QVQLQESGGGLVQAGGSLRLSCAASGYISDGNIYMGWYRQAPGKERELVATITGGGTTYYADSVKGRFTISRDNAKNTVYLQMNSLKPEDTAVYYCAVYHIPEDDYTQRYDYWGQGTQVTVSS

SEQ ID NO: 8224 - protein, 126 aa, Artificial Sequence
  Chemically Synthesized
QVQLQESGGGLVQAGGSLRLSCAASGSIFIWSYMGWYRQAPGKEREFVATITGGANTNYADSVKGRFTISRDNAKNTVYLQMNSLKPEDTAVYYCAVYGNGIGPVRSYWYSTLPYWGQGTQVTVSS

SEQ ID NO: 8225 - protein, 122 aa, Artificial Sequence
  Chemically Synthesized
QVQLQESGGGLVQAGGSLRLSCAASGTIFDGWSMGWYRQAPGKERELVATINDGGITNYADSVKGRFTISRDNAKNTVYLQMNSLKPEDTAVYYCAAYDDTRTRYDYPYVYWGQGTQVTVSS

SEQ ID NO: 8226 - protein, 118 aa, Artificial Sequence
  Chemically Synthesized
QVQLQESGGGLVQAGGSLRLSCAASGNISSGRGMGWYRQAPGKEREFVAGINSGATTNYADSVKGRFTISRDNAKNTVYLQMNSLKPEDTAVYYCAADAVDSYYLSYWGQGTQVTVSS

SEQ ID NO: 8227 - protein, 122 aa, Artificial Sequence
  Chemically Synthesized
QVQLQESGGGLVQAGGSLRLSCAASGSIFTDYDMGWYRQAPGKERELVATIDAGGSTNYADSVKGRFTISRDNAKNTVYLQMNSLKPEDTAVYYCAVYYPPYGYYRRVHDYWGQGTQVTVSS

SEQ ID NO: 8228 - protein, 122 aa, Artificial Sequence
  Chemically Synthesized
QVQLQESGGGLVQAGGSLRLSCAASGNISYRGRMGWYRQAPGKEREFVAGIGHGTNTNYADSVKGRFTISRDNAKNTVYLQMNSLKPEDTAVYYCAVVYNVWWWQDWYYRYWGQGTQVTVSS

SEQ ID NO: 8229 - protein, 122 aa, Artificial Sequence
  Chemically Synthesized
QVQLQESGGGLVQAGGSLRLSCAASGNISDSVAMGWYRQAPGKEREFVAGINRGASTNYADSVKGRFTISRDNAKNTVYLQMNSLKPEDTAVYYCAAEYVDGITAHRPHTYWGQGTQVTVSS

SEQ ID NO: 8230 - protein, 121 aa, Artificial Sequence
  Chemically Synthesized
QVQLQESGGGLVQAGGSLRLSCAASGTIFPYYAMGWYRQAPGKERELVAGIDFGAITNYADSVKGRFTISRDNAKNTVYLQMNSLKPEDTAVYYCAVGYDQAGDVYLVMYWGQGTQVTVSS

SEQ ID NO: 8231 - protein, 118 aa, Artificial Sequence
  Chemically Synthesized
QVQLQESGGGLVQAGGSLRLSCAASGNISGRGYMGWYRQAPGKERELVAAIALGSITNYADSVKGRFTISRDNAKNTVYLQMNSLKPEDTAVYYCAAQAGDAYRLAYWGQGTQVTVSS

SEQ ID NO: 8232 - protein, 122 aa, Artificial Sequence
  Chemically Synthesized
QVQLQESGGGLVQAGGSLRLSCAASGSISAGGVMGWYRQAPGKEREFVAGITIGASTNYADSVKGRFTISRDNAKNTVYLQMNSLKPEDTAVYYCAVYSGDDHYTNVYLRYWGQGTQVTVSS

SEQ ID NO: 8233 - protein, 118 aa, Artificial Sequence
  Chemically Synthesized
QVQLQESGGGLVQAGGSLRLSCAASGNISFRYIMGWYRQAPGKEREFVAGISPGTITYYADSVKGRFTISRDNAKNTVYLQMNSLKPEDTAVYYCAVKDTDGADLAYWGQGTQVTVSS

SEQ ID NO: 8234 - protein, 118 aa, Artificial Sequence
  Chemically Synthesized
QVQLQESGGGLVQAGGSLRLSCAASGSISHYYYMGWYRQAPGKERELVAAISYGGSTYYADSVKGRFTISRDNAKNTVYLQMNSLKPEDTAVYYCAADYAYSYAYSYWGQGTQVTVSS

SEQ ID NO: 8235 - protein, 126 aa, Artificial Sequence
  Chemically Synthesized
QVQLQESGGGLVQAGGSLRLSCAASGTIFAALYMGWYRQAPGKERELVAGIGQGSSTYYADSVKGRFTISRDNAKNTVYLQMNSLKPEDTAVYYCAAEEVYIIDQGYYRWTNYGYWGQGTQVTVSS

SEQ ID NO: 8236 - protein, 117 aa, Artificial Sequence
  Chemically Synthesized
QVQLQESGGGLVQAGGSLRLSCAASGTISYDSYMGWYRQAPGKEREFVASISDGSNTNYADSVKGRFTISRDNAKNTVYLQMNSLKPEDTAVYYCAVYSYTRSHSYWGQGTQVTVSS

SEQ ID NO: 8237 - protein, 118 aa, Artificial Sequence
  Chemically Synthesized
QVQLQESGGGLVQAGGSLRLSCAASGTISAAEGMGWYRQAPGKEREFVATIDVGSSTYYADSVKGRFTISRDNAKNTVYLQMNSLKPEDTAVYYCAAAVYGAWYYSYWGQGTQVTVSS

SEQ ID NO: 8238 - protein, 114 aa, Artificial Sequence
  Chemically Synthesized
QVQLQESGGGLVQAGGSLRLSCAASGYIFHYRTMGWYRQAPGKEREFVAAITPGTTTYYADSVKGRFTISRDNAKNTVYLQMNSLKPEDTAVYYCAVVVGSAYWGQGTQVTVSS

SEQ ID NO: 8239 - protein, 123 aa, Artificial Sequence
  Chemically Synthesized
QVQLQESGGGLVQAGGSLRLSCAASGTISPGDYMGWYRQAPGKEREFVATIDLGATTNYADSVKGRFTISRDNAKNTVYLQMNSLKPEDTAVYYCAALQYGRVTYLSQYHYYWGQGTQVTVSS

SEQ ID NO: 8240 - protein, 118 aa, Artificial Sequence
  Chemically Synthesized
QVQLQESGGGLVQAGGSLRLSCAASGSISAVNYMGWYRQAPGKERELVAAIDGGGSTYYADSVKGRFTISRDNAKNTVYLQMNSLKPEDTAVYYCAVLENRHLYFSYWGQGTQVTVSS

SEQ ID NO: 8241 - protein, 125 aa, Artificial Sequence
  Chemically Synthesized
QVQLQESGGGLVQAGGSLRLSCAASGTISADVQMGWYRQAPGKERELVASIGYGATTYYADSVKGRFTISRDNAKNTVYLQMNSLKPEDTAVYYCAAYLYRYWGWIRYYSGYDYWGQGTQVTVSS

SEQ ID NO: 8242 - protein, 118 aa, Artificial Sequence
  Chemically Synthesized
QVQLQESGGGLVQAGGSLRLSCAASGYISKIAYMGWYRQAPGKEREFVAGISYGTNTNYADSVKGRFTISRDNAKNTVYLQMNSLKPEDTAVYYCAAPWSGRYGHWYWGQGTQVTVSS

SEQ ID NO: 8243 - protein, 115 aa, Artificial Sequence
  Chemically Synthesized
QVQLQESGGGLVQAGGSLRLSCAASGSISDVTAMGWYRQAPGKERELVAGIDQGGTTYYADSVKGRFTISRDNAKNTVYLQMNSLKPEDTAVYYCAALRLPSSYWGQGTQVTVSS

SEQ ID NO: 8244 - protein, 118 aa, Artificial Sequence
  Chemically Synthesized
QVQLQESGGGLVQAGGSLRLSCAASGSISAIDDMGWYRQAPGKERELVATITIGANTYYADSVKGRFTISRDNAKNTVYLQMNSLKPEDTAVYYCAVLRSVSGYHGYWGQGTQVTVSS

SEQ ID NO: 8245 - protein, 118 aa, Artificial Sequence
  Chemically Synthesized
QVQLQESGGGLVQAGGSLRLSCAASGTIFNGYYMGWYRQAPGKERELVAAIAPGSTTYYADSVKGRFTISRDNAKNTVYLQMNSLKPEDTAVYYCAVSRRRYFRFPYWGQGTQVTVSS

SEQ ID NO: 8246 - protein, 118 aa, Artificial Sequence
  Chemically Synthesized
QVQLQESGGGLVQAGGSLRLSCAASGSISDYLYMGWYRQAPGKERELVATIAPGATTNYADSVKGRFTISRDNAKNTVYLQMNSLKPEDTAVYYCAVTYRVNDYLAYWGQGTQVTVSS

SEQ ID NO: 8247 - protein, 122 aa, Artificial Sequence
  Chemically Synthesized
QVQLQESGGGLVQAGGSLRLSCAASGSISQPTPMGWYRQAPGKEREFVASINDGATTNYADSVKGRFTISRDNAKNTVYLQMNSLKPEDTAVYYCAVAESSIYAGGLTYYYWGQGTQVTVSS

SEQ ID NO: 8248 - protein, 126 aa, Artificial Sequence
  Chemically Synthesized
QVQLQESGGGLVQAGGSLRLSCAASGTIFIYDVMGWYRQAPGKEREFVAAIDGGTSTYYADSVKGRFTISRDNAKNTVYLQMNSLKPEDTAVYYCAAAWATYDGYSVPYPRYHYYWGQGTQVTVSS

SEQ ID NO: 8249 - protein, 122 aa, Artificial Sequence
  Chemically Synthesized
QVQLQESGGGLVQAGGSLRLSCAASGNISTRYYMGWYRQAPGKERELVAAIGYGATTYYADSVKGRFTISRDNAKNTVYLQMNSLKPEDTAVYYCAVIRRSYVGHTHYHDYWGQGTQVTVSS

SEQ ID NO: 8250 - protein, 118 aa, Artificial Sequence
  Chemically Synthesized
QVQLQESGGGLVQAGGSLRLSCAASGYISDYATMGWYRQAPGKEREFVASIDYGGTTYYADSVKGRFTISRDNAKNTVYLQMNSLKPEDTAVYYCAVQSPQSHDYGYWGQGTQVTVSS

SEQ ID NO: 8251 - protein, 122 aa, Artificial Sequence
  Chemically Synthesized
QVQLQESGGGLVQAGGSLRLSCAASGYISAGTTMGWYRQAPGKERELVAGISYGGSTNYADSVKGRFTISRDNAKNTVYLQMNSLKPEDTAVYYCAVNPGTEWRKDRVHQYWGQGTQVTVSS

SEQ ID NO: 8252 - protein, 122 aa, Artificial Sequence
  Chemically Synthesized
QVQLQESGGGLVQAGGSLRLSCAASGTIFDNIYMGWYRQAPGKEREFVATIDSGTSTYYADSVKGRFTISRDNAKNTVYLQMNSLKPEDTAVYYCAVGPYLYGPSGYEYDYWGQGTQVTVSS

SEQ ID NO: 8253 - protein, 122 aa, Artificial Sequence
  Chemically Synthesized
QVQLQESGGGLVQAGGSLRLSCAASGSISDVAFMGWYRQAPGKERELVAGIDVGTSTNYADSVKGRFTISRDNAKNTVYLQMNSLKPEDTAVYYCAAAIADRYYYLPHHEYWGQGTQVTVSS

SEQ ID NO: 8254 - protein, 118 aa, Artificial Sequence
  Chemically Synthesized
QVQLQESGGGLVQAGGSLRLSCAASGTISLAFVMGWYRQAPGKERELVAGIDRGTNTNYADSVKGRFTISRDNAKNTVYLQMNSLKPEDTAVYYCAVDYDQSVEHWYWGQGTQVTVSS

SEQ ID NO: 8255 - protein, 124 aa, Artificial Sequence
  Chemically Synthesized
QVQLQESGGGLVQAGGSLRLSCAASGSIFVDADMGWYRQAPGKERELVASINDGGNTNYADSVKGRFTISRDNAKNTVYLQMNSLKPEDTAVYYCAAQGDDWPYTRYYDQSIYWGQGTQVTVSS

SEQ ID NO: 8256 - protein, 122 aa, Artificial Sequence
  Chemically Synthesized
QVQLQESGGGLVQAGGSLRLSCAASGSISTTDNMGWYRQAPGKERELVATIDRGTTTNYADSVKGRFTISRDNAKNTVYLQMNSLKPEDTAVYYCAVYDYLAPDTSGPSSYWGQGTQVTVSS

SEQ ID NO: 8257 - protein, 117 aa, Artificial Sequence
  Chemically Synthesized
QVQLQESGGGLVQAGGSLRLSCAASGSIFYDTMGWYRQAPGKERELVASISDGTNTNYADSVKGRFTISRDNAKNTVYLQMNSLKPEDTAVYYCAASYDGYWIHGYWGQGTQVTVSS

SEQ ID NO: 8258 - protein, 126 aa, Artificial Sequence
  Chemically Synthesized
QVQLQESGGGLVQAGGSLRLSCAASGSIFAVWYMGWYRQAPGKEREFVASIAYGATTYYADSVKGRFTISRDNAKNTVYLQMNSLKPEDTAVYYCAAAALPYWALTRFLNDRFDYWGQGTQVTVSS

SEQ ID NO: 8259 - protein, 123 aa, Artificial Sequence
  Chemically Synthesized
QVQLQESGGGLVQAGGSLRLSCAASGTISAYDYMGWYRQAPGKERELVAAITQGSTTNYADSVKGRFTISRDNAKNTVYLQMNSLKPEDTAVYYCAVYYYYDLYHSALRHEYWGQGTQVTVSS

SEQ ID NO: 8260 - protein, 118 aa, Artificial Sequence
  Chemically Synthesized
QVQLQESGGGLVQAGGSLRLSCAASGNIFWPTDMGWYRQAPGKEREFVATIGQGTSTYYADSVKGRFTISRDNAKNTVYLQMNSLKPEDTAVYYCAVFSTLRGYLPYWGQGTQVTVSS

SEQ ID NO: 8261 - protein, 118 aa, Artificial Sequence
  Chemically Synthesized
QVQLQESGGGLVQAGGSLRLSCAASGSIFRSYQMGWYRQAPGKEREFVAAITVGSNTNYADSVKGRFTISRDNAKNTVYLQMNSLKPEDTAVYYCAADDLDSFDYPYWGQGTQVTVSS

SEQ ID NO: 8262 - protein, 122 aa, Artificial Sequence
  Chemically Synthesized
QVQLQESGGGLVQAGGSLRLSCAASGNISDYIRMGWYRQAPGKEREFVAAIALGGTTYYADSVKGRFTISRDNAKNTVYLQMNSLKPEDTAVYYCAVISDYIRTATPHLFYWGQGTQVTVSS

SEQ ID NO: 8263 - protein, 118 aa, Artificial Sequence
  Chemically Synthesized
QVQLQESGGGLVQAGGSLRLSCAASGYISGPRYMGWYRQAPGKEREFVAAIGPGTNTYYADSVKGRFTISRDNAKNTVYLQMNSLKPEDTAVYYCAVYYYRKAGFLYWGQGTQVTVSS

SEQ ID NO: 8264 - protein, 122 aa, Artificial Sequence
  Chemically Synthesized
QVQLQESGGGLVQAGGSLRLSCAASGTIFDTDWMGWYRQAPGKEREFVASIADGAITYYADSVKGRFTISRDNAKNTVYLQMNSLKPEDTAVYYCAAYYRYWYVYYLGLFYWGQGTQVTVSS

SEQ ID NO: 8265 - protein, 122 aa, Artificial Sequence
  Chemically Synthesized
QVQLQESGGGLVQAGGSLRLSCAASGNISGKGDMGWYRQAPGKEREFVAAISAGSTYQYADSVKGRFTISRDNAKNTVYLQMNSLKPEDTAVYYCAAGVRTDYTTDGDYGYWGQGTQVTVSS

SEQ ID NO: 8266 - protein, 122 aa, Artificial Sequence
  Chemically Synthesized
QVQLQESGGGLVQAGGSLRLSCAASGTISYSSWMGWYRQAPGKERELVASIDSGGTTNYADSVKGRFTISRDNAKNTVYLQMNSLKPEDTAVYYCAANGYDATGYHTEHYYWGQGTQVTVSS

SEQ ID NO: 8267 - protein, 118 aa, Artificial Sequence
  Chemically Synthesized
QVQLQESGGGLVQAGGSLRLSCAASGNIFRYLDMGWYRQAPGKERELVASITLGAITNYADSVKGRFTISRDNAKNTVYLQMNSLKPEDTAVYYCAAQYRHGSDFGYWGQGTQVTVSS

SEQ ID NO: 8268 - protein, 118 aa, Artificial Sequence
  Chemically Synthesized
QVQLQESGGGLVQAGGSLRLSCAASGSISKLRHMGWYRQAPGKEREFVAGISVGGITYYADSVKGRFTISRDNAKNTVYLQMNSLKPEDTAVYYCAVEYDRWRYLAYWGQGTQVTVSS

SEQ ID NO: 8269 - protein, 118 aa, Artificial Sequence
  Chemically Synthesized
QVQLQESGGGLVQAGGSLRLSCAASGNIFVTHDMGWYRQAPGKEREFVATIASGTSTYYADSVKGRFTISRDNAKNTVYLQMNSLKPEDTAVYYCAAIYSAIYPHWYWGQGTQVTVSS

SEQ ID NO: 8270 - protein, 118 aa, Artificial Sequence
  Chemically Synthesized
QVQLQESGGGLVQAGGSLRLSCAASGNIFHDDYMGWYRQAPGKEREFVAGIAQGTTTNYADSVKGRFTISRDNAKNTVYLQMNSLKPEDTAVYYCAVRAYRSDTYDYWGQGTQVTVSS

SEQ ID NO: 8271 - protein, 122 aa, Artificial Sequence
  Chemically Synthesized
QVQLQESGGGLVQAGGSLRLSCAASGNISTVYDMGWYRQAPGKEREFVAGITYGANTNYADSVKGRFTISRDNAKNTVYLQMNSLKPEDTAVYYCAVELWNYPYRTATHYYWGQGTQVTVSS

SEQ ID NO: 8272 - protein, 126 aa, Artificial Sequence
  Chemically Synthesized
QVQLQESGGGLVQAGGSLRLSCAASGSISRPGYMGWYRQAPGKERELVAAINYGGSTNYADSVKGRFTISRDNAKNTVYLQMNSLKPEDTAVYYCAAGGWRLDRTYYVPYDWYSYWGQGTQVTVSS

SEQ ID NO: 8273 - protein, 118 aa, Artificial Sequence
  Chemically Synthesized
QVQLQESGGGLVQAGGSLRLSCAASGSIFYYEYMGWYRQAPGKERELVASITIGGTTYYADSVKGRFTISRDNAKNTVYLQMNSLKPEDTAVYYCAVYYPYVWHHWYWGQGTQVTVSS

SEQ ID NO: 8274 - protein, 122 aa, Artificial Sequence
  Chemically Synthesized
QVQLQESGGGLVQAGGSLRLSCAASGNISPGDAMGWYRQAPGKERELVAAITRGGTTNYADSVKGRFTISRDNAKNTVYLQMNSLKPEDTAVYYCAATWQADRAVVDGYLYWGQGTQVTVSS

SEQ ID NO: 8275 - protein, 122 aa, Artificial Sequence
  Chemically Synthesized
QVQLQESGGGLVQAGGSLRLSCAASGYISDTYKMGWYRQAPGKEREFVATIDLGSSTYYADSVKGRFTISRDNAKNTVYLQMNSLKPEDTAVYYCAVQGTVPVAPRTLHAYWGQGTQVTVSS

SEQ ID NO: 8276 - protein, 118 aa, Artificial Sequence
  Chemically Synthesized
QVQLQESGGGLVQAGGSLRLSCAASGNISGYRAMGWYRQAPGKERELVAAISPGGSTNYADSVKGRFTISRDNAKNTVYLQMNSLKPEDTAVYYCAVKLDPYLWYAYWGQGTQVTVSS

SEQ ID NO: 8277 - protein, 122 aa, Artificial Sequence
  Chemically Synthesized
QVQLQESGGGLVQAGGSLRLSCAASGTISVVYFMGWYRQAPGKEREFVASINNGTSTNYADSVKGRFTISRDNAKNTVYLQMNSLKPEDTAVYYCAAPERPDIYRIIAYEYWGQGTQVTVSS

SEQ ID NO: 8278 - protein, 122 aa, Artificial Sequence
  Chemically Synthesized
QVQLQESGGGLVQAGGSLRLSCAASGSIFPALYMGWYRQAPGKERELVATIAIGSTTNYADSVKGRFTISRDNAKNTVYLQMNSLKPEDTAVYYCAVQTTGWADNYADHFYWGQGTQVTVSS

SEQ ID NO: 8279 - protein, 122 aa, Artificial Sequence
  Chemically Synthesized
QVQLQESGGGLVQAGGSLRLSCAASGNIFIATRMGWYRQAPGKEREFVAGINDGSSTYYADSVKGRFTISRDNAKNTVYLQMNSLKPEDTAVYYCAADILQYAGGAIAHSYWGQGTQVTVSS

SEQ ID NO: 8280 - protein, 126 aa, Artificial Sequence
  Chemically Synthesized
QVQLQESGGGLVQAGGSLRLSCAASGSISHYVYMGWYRQAPGKERELVATIGPGGTTYYADSVKGRFTISRDNAKNTVYLQMNSLKPEDTAVYYCAADTGYVYWRRVYTNTPYRYWGQGTQVTVSS

SEQ ID NO: 8281 - protein, 117 aa, Artificial Sequence
  Chemically Synthesized
QVQLQESGGGLVQAGGSLRLSCAASGTISYTLAMGWYRQAPGKERELVAEYYLYADSVKGRFTISRDNAKNTVYLQMNSLKPEDTAVYYCAVGDYVWANQNITYAYWGQGTQVTVSS

SEQ ID NO: 8282 - protein, 118 aa, Artificial Sequence
  Chemically Synthesized
QVQLQESGGGLVQAGGSLRLSCAASGNISPYYYMGWYRQAPGKERELVAAISVGTSTNYADSVKGRFTISRDNAKNTVYLQMNSLKPEDTAVYYCAAYYPIYDRYEYWGQGTQVTVSS

SEQ ID NO: 8283 - protein, 122 aa, Artificial Sequence
  Chemically Synthesized
QVQLQESGGGLVQAGGSLRLSCAASGYISIYISMGWYRQAPGKEREFVAAINGGGNTYYADSVKGRFTISRDNAKNTVYLQMNSLKPEDTAVYYCAAERADARYVIVVLPYWGQGTQVTVSS

SEQ ID NO: 8284 - protein, 118 aa, Artificial Sequence
  Chemically Synthesized
QVQLQESGGGLVQAGGSLRLSCAASGTIFWVDTMGWYRQAPGKEREFVAAIGLGTSTYYADSVKGRFTISRDNAKNTVYLQMNSLKPEDTAVYYCAVGDAGGDYHPYWGQGTQVTVSS

SEQ ID NO: 8285 - protein, 118 aa, Artificial Sequence
  Chemically Synthesized
QVQLQESGGGLVQAGGSLRLSCAASGTIFVLKYMGWYRQAPGKEREFVATIGHGATTNYADSVKGRFTISRDNAKNTVYLQMNSLKPEDTAVYYCAVDGLGTDQFDYWGQGTQVTVSS

SEQ ID NO: 8286 - protein, 118 aa, Artificial Sequence
  Chemically Synthesized
QVQLQESGGGLVQAGGSLRLSCAASGYISYYSYMGWYRQAPGKERELVASIGGGTNTNYADSVKGRFTISRDNAKNTVYLQMNSLKPEDTAVYYCAVTYIDSPWHSYWGQGTQVTVSS

SEQ ID NO: 8287 - protein, 122 aa, Artificial Sequence
  Chemically Synthesized
QVQLQESGGGLVQAGGSLRLSCAASGYIFYDPYMGWYRQAPGKERELVAAITDGTTTNYADSVKGRFTISRDNAKNTVYLQMNSLKPEDTAVYYCAVTYTLWEYYTFDHAYWGQGTQVTVSS

SEQ ID NO: 8288 - protein, 121 aa, Artificial Sequence
  Chemically Synthesized
QVQLQESGGGLVQAGGSLRLSCAASGTISLPIGMGWYRQAPGKERELVAGIGVGGITYYADSVKGRFTISRDNAKNTVYLQMNSLKPEDTAVYYCAVVVRRPGPAGYYHYWGQGTQVTVSS

SEQ ID NO: 8289 - protein, 122 aa, Artificial Sequence
  Chemically Synthesized
QVQLQESGGGLVQAGGSLRLSCAASGTISASLRMGWYRQAPGKEREFVAGIALGTSTYYADSVKGRFTISRDNAKNTVYLQMNSLKPEDTAVYYCAALSSKDKSDRVRHYYWGQGTQVTVSS

SEQ ID NO: 8290 - protein, 118 aa, Artificial Sequence
  Chemically Synthesized
QVQLQESGGGLVQAGGSLRLSCAASGNISGLLRMGWYRQAPGKEREFVAGIAKGSNTYYADSVKGRFTISRDNAKNTVYLQMNSLKPEDTAVYYCAALGGNYARFYYWGQGTQVTVSS

SEQ ID NO: 8291 - protein, 122 aa, Artificial Sequence
  Chemically Synthesized
QVQLQESGGGLVQAGGSLRLSCAASGTISDTVTMGWYRQAPGKEREFVATIDYGSTTNYADSVKGRFTISRDNAKNTVYLQMNSLKPEDTAVYYCAVGVRYLEPGYSLLCYWGQGTQVTVSS

SEQ ID NO: 8292 - protein, 118 aa, Artificial Sequence
  Chemically Synthesized
QVQLQESGGGLVQAGGSLRLSCAASGNIFHGIYMGWYRQAPGKEREFVATIARGSSTNYADSVKGRFTISRDNAKNTVYLQMNSLKPEDTAVYYCAATTDDDNDHFYWGQGTQVTVSS

SEQ ID NO: 8293 - protein, 126 aa, Artificial Sequence
  Chemically Synthesized
QVQLQESGGGLVQAGGSLRLSCAASGTIFQLRTMGWYRQAPGKERELVASITDGSSTNYADSVKGRFTISRDNAKNTVYLQMNSLKPEDTAVYYCAALTYDRTPSGLAVKRYHYYWGQGTQVTVSS

SEQ ID NO: 8294 - protein, 118 aa, Artificial Sequence
  Chemically Synthesized
QVQLQESGGGLVQAGGSLRLSCAASGTIFSYPCMGWYRQAPGKERELVAAIARGGSTYYADSVKGRFTISRDNAKNTVYLQMNSLKPEDTAVYYCAVVTHADDVYYYWGQGTQVTVSS

SEQ ID NO: 8295 - protein, 126 aa, Artificial Sequence
  Chemically Synthesized
QVQLQESGGGLVQAGGSLRLSCAASGSIFSYPRMGWYRQAPGKERELVAGIDWGATTYYADSVKGRFTISRDNAKNTVYLQMNSLKPEDTAVYYCAAHYRLSGYVSQYWNVELGYWGQGTQVTVSS

SEQ ID NO: 8296 - protein, 118 aa, Artificial Sequence
  Chemically Synthesized
QVQLQESGGGLVQAGGSLRLSCAASGNIFRDVNMGWYRQAPGKERELVATISRGTNTNYADSVKGRFTISRDNAKNTVYLQMNSLKPEDTAVYYCAANYTIFDQHYYWGQGTQVTVSS

SEQ ID NO: 8297 - protein, 118 aa, Artificial Sequence
  Chemically Synthesized
QVQLQESGGGLVQAGGSLRLSCAASGYISVRLPMGWYRQAPGKEREFVAGISYGGNTYYADSVKGRFTISRDNAKNTVYLQMNSLKPEDTAVYYCAAYRYRQDYHFYWGQGTQVTVSS

SEQ ID NO: 8298 - protein, 118 aa, Artificial Sequence
  Chemically Synthesized
QVQLQESGGGLVQAGGSLRLSCAASGNISHDLYMGWYRQAPGKEREFVAGITLGGNTNYADSVKGRFTISRDNAKNTVYLQMNSLKPEDTAVYYCAVIDADVGYHAYWGQGTQVTVSS

SEQ ID NO: 8299 - protein, 118 aa, Artificial Sequence
  Chemically Synthesized
QVQLQESGGGLVQAGGSLRLSCAASGSISTNYGMGWYRQAPGKEREFVAAISAGSTTNYADSVKGRFTISRDNAKNTVYLQMNSLKPEDTAVYYCAAVYYDGQFHAYWGQGTQVTVSS

SEQ ID NO: 8300 - protein, 122 aa, Artificial Sequence
  Chemically Synthesized
QVQLQESGGGLVQAGGSLRLSCAASGSIFRGVWMGWYRQAPGKERELVATITDGANTYYADSVKGRFTISRDNAKNTVYLQMNSLKPEDTAVYYCAAYDATTDSDGIRHRYWGQGTQVTVSS

SEQ ID NO: 8301 - protein, 126 aa, Artificial Sequence
  Chemically Synthesized
QVQLQESGGGLVQAGGSLRLSCAASGSISAYIDMGWYRQAPGKERELVAAISSGANTYYADSVKGRFTISRDNAKNTVYLQMNSLKPEDTAVYYCAVNYVGRDRSSRQRYGPFGYWGQGTQVTVSS

SEQ ID NO: 8302 - protein, 120 aa, Artificial Sequence
  Chemically Synthesized
QVQLQESGGGLVQAGGSLRLSCAASGTIFYGYYMGWYRQAPGKEREFVGYGGTTYYADSVKGRFTISRDNAKNTVYLQMNSLKPEDTAVYYCAAEYPVDDTLADDHYYYWGQGTQVTVSS

SEQ ID NO: 8303 - protein, 111 aa, Artificial Sequence
  Chemically Synthesized
QVQLQESGGGLVQAGGSLRLSCAASGYISFPTPMGWYRQAPGKERELVATIDVGGITYYADSVKGRFTISRDNAKNTVYLQMNSLKPEDTAVYYCALYDYWGQGTQVTVSS

SEQ ID NO: 8304 - protein, 118 aa, Artificial Sequence
  Chemically Synthesized
QVQLQESGGGLVQAGGSLRLSCAASGTISWDIYMGWYRQAPGKERELVATIAYGGITNYADSVKGRFTISRDNAKNTVYLQMNSLKPEDTAVYYCAVGVDTYTTYWYWGQGTQVTVSS

SEQ ID NO: 8305 - protein, 111 aa, Artificial Sequence
  Chemically Synthesized
QVQLQESGGGLVQAGGSLRLSCAASGTIFHRQWMGWYRQAPGKERELVASITSGTTYYADSVKGRFTISRDNAKNTVYLQMNSLKPEDTAVYYCADQLAYWGQGTQVTVSS

SEQ ID NO: 8306 - protein, 117 aa, Artificial Sequence
  Chemically Synthesized
QVQLQESGGGLVQAGGSLRLSCAASGYIFELQRMGWYRQAPGKERELVAGITPGTTTNYADSVKGRFTISRDNAKNTVYLQMNSLKPEDTAVYYCAASNVRLVTFYWGQGTQVTVSS

SEQ ID NO: 8307 - protein, 118 aa, Artificial Sequence
  Chemically Synthesized
QVQLQESGGGLVQAGGSLRLSCAASGNIFGTPPMGWYRQAPGKERELVASINLGGNTNYADSVKGRFTISRDNAKNTVYLQMNSLKPEDTAVYYCAVAYDNYADYPYWGQGTQVTVSS

SEQ ID NO: 8308 - protein, 122 aa, Artificial Sequence
  Chemically Synthesized
QVQLQESGGGLVQAGGSLRLSCAASGNIFYNDDMGWYRQAPGKERELVASISAGASTNYADSVKGRFTISRDNAKNTVYLQMNSLKPEDTAVYYCAVQLDDIGQYLYRHTYWGQGTQVTVSS

SEQ ID NO: 8309 - protein, 120 aa, Artificial Sequence
  Chemically Synthesized
QVQLQESGGGLVQAGGSLRLSCAASGNIFDTVMGWYRQAPGKERELVASIAGGGNTNYADSVKGRFTISRDNAKNTVYLQMNSLKPEDTAVYYCAVDQRYVGSTLNGMYWGQGTQVTVSS

SEQ ID NO: 8310 - protein, 118 aa, Artificial Sequence
  Chemically Synthesized
QVQLQESGGGLVQAGGSLRLSCAASGNISSSPRMGWYRQAPGKEREFVAGIAGGSTTYYADSVKGRFTISRDNAKNTVYLQMNSLKPEDTAVYYCAAIDTGTVRHWYWGQGTQVTVSS

SEQ ID NO: 8311 - protein, 116 aa, Artificial Sequence
  Chemically Synthesized
QVQLQESGGGLVQAGGSLRLSCAASGSISVARPMGWYRQAPGKERELVATIAGSSTNYADSVKGRFTISRDNAKNTVYLQMNSLKPEDTAVYYCAASGHSSRTIYWGQGTQVTVSS

SEQ ID NO: 8312 - protein, 124 aa, Artificial Sequence
  Chemically Synthesized
QVQLQESGGGLVQAGGSLRLSCAASGTISDDGNMGWYRQAPGKEREFVASIAIRWYYQYADSVKGRFTISRDNAKNTVYLQMNSLKPEDTAVYYCAAWLLLLSLVFTTTRTFYWGQGTQVTVSS

SEQ ID NO: 8313 - protein, 118 aa, Artificial Sequence
  Chemically Synthesized
QVQLQESGGGLVQAGGSLRLSCAASGTISPRANMGWYRQAPGKEREFVAGINYGGNTYYADSVKGRFTISRDNAKNTVYLQMNSLKPEDTAVYYCAALTADYRRHHYWGQGTQVTVSS

SEQ ID NO: 8314 - protein, 118 aa, Artificial Sequence
  Chemically Synthesized
QVQLQESGGGLVQAGGSLRLSCAASGSISPTVRMGWYRQAPGKEREFVASITYGGTTNYADSVKGRFTISRDNAKNTVYLQMNSLKPEDTAVYYCAAVDGISPYYGYWGQGTQVTVSS

SEQ ID NO: 8315 - protein, 118 aa, Artificial Sequence
  Chemically Synthesized
QVQLQESGGGLVQAGGSLRLSCAASGNISGTRIMGWYRQAPGKERELVAGINSGATTYYADSVKGRFTISRDNAKNTVYLQMNSLKPEDTAVYYCAVQTRDADQLTYWGQGTQVTVSS

SEQ ID NO: 8316 - protein, 117 aa, Artificial Sequence
  Chemically Synthesized
QVQLQESGGGLVQAGGSLRLSCAASGNIFDRGYMGWYRQAPGKERELVASLMTVVLPYADSVKGRFTISRDNAKNTVYLQMNSLKPEDTAVYYCAADVWPGRYLEYWGQGTQVTVSS

SEQ ID NO: 8317 - protein, 118 aa, Artificial Sequence
  Chemically Synthesized
QVQLQESGGGLVQAGGSLRLSCAASGNISYNANMGWYRQAPGKEREFVAGIGYGATTNYADSVKGRFTISRDNAKNTVYLQMNSLKPEDTAVYYCAVVGYQDGYHFYWGQGTQVTVSS

SEQ ID NO: 8318 - protein, 118 aa, Artificial Sequence
  Chemically Synthesized
QVQLQESGGGLVQAGGSLRLSCAASGYIFGKYGMGWYRQAPGKEREFVASITYGTNTYYADSVKGRFTISRDNAKNTVYLQMNSLKPEDTAVYYCAVVYYYYYFHRYWGQGTQVTVSS

SEQ ID NO: 8319 - protein, 118 aa, Artificial Sequence
  Chemically Synthesized
QVQLQESGGGLVQAGGSLRLSCAASGTIFDLAYMGWYRQAPGKERELVAAIGYGGSTYYADSVKGRFTISRDNAKNTVYLQMNSLKPEDTAVYYCAVDDDEGAYLIYWGQGTQVTVSS

SEQ ID NO: 8320 - protein, 115 aa, Artificial Sequence
  Chemically Synthesized
QVQLQESGGGLVQAGGSLRLSCAASGNISYFLYMGWYRQAPGKEREFVAAISGGTSTYYADSVKGRFTISRDNAKNTVYLQMNSLKPEDTAVYYCAAKVTFVFYWGQGTQVTVSS

SEQ ID NO: 8321 - protein, 118 aa, Artificial Sequence
  Chemically Synthesized
QVQLQESGGGLVQAGGSLRLSCAASGNISYSYYMGWYRQAPGKEREFVATITYGSNTNYADSVKGRFTISRDNAKNTVYLQMNSLKPEDTAVYYCAVWPYFYTAYPYWGQGTQVTVSS

SEQ ID NO: 8322 - protein, 117 aa, Artificial Sequence
  Chemically Synthesized
QVQLQESGGGLVQAGGSLRLSCAASGNISLDSYMGWYRQAPGKERELLPVLIRVLLPYADSVKGRFTISRDNAKNTVYLQMNSLKPEDTAVYYCAATYYWAYILEYWGQGTQVTVSS

SEQ ID NO: 8323 - protein, 121 aa, Artificial Sequence
  Chemically Synthesized
QVQLQESGGGLVQAGGSLRLSCAASGNIFDWHAMGWYRQAPGKERELVASIDYGTITYYADSVKGRFTISRDNAKNTVYLQMNSLKPEDTAVYYCAVEYGTYTGDAGSMYWGQGTQVTVSS

SEQ ID NO: 8324 - protein, 117 aa, Artificial Sequence
  Chemically Synthesized
QVQLQESGGGLVQAGGSLRLSCAASGNISDGPYMGWYRQAPGKEREFVAAIFWYYYLYADSVKGRFTISRDNAKNTVYLQMNSLKPEDTAVYYCAAYYPDYLTFSYWGQGTQVTVSS

SEQ ID NO: 8325 - protein, 118 aa, Artificial Sequence
  Chemically Synthesized
QVQLQESGGGLVQAGGSLRLSCAASGTIFYVYLMGWYRQAPGKEREFVAGIGTGSSTYYADSVKGRFTISRDNAKNTVYLQMNSLKPEDTAVYYCAVPVADHDRFHYWGQGTQVTVSS

SEQ ID NO: 8326 - protein, 118 aa, Artificial Sequence
  Chemically Synthesized
QVQLQESGGGLVQAGGSLRLSCAASGTISILERMGWYRQAPGKERELVASISLGATTNYADSVKGRFTISRDNAKNTVYLQMNSLKPEDTAVYYCAAPSGYPTDLGYWGQGTQVTVSS

SEQ ID NO: 8327 - protein, 110 aa, Artificial Sequence
  Chemically Synthesized
QVQLQESGGGLVQAGGSLRLSCAASGNIFWSDIMGWYRQAPGKEREFVASIDVGASTNYADSVKGRFTISRDNAKNTVYLQMNSLKPEDTAVYYCAYIYWGQGTQVTVSS

SEQ ID NO: 8328 - protein, 118 aa, Artificial Sequence
  Chemically Synthesized
QVQLQESGGGLVQAGGSLRLSCAASGSISYISAMGWYRQAPGKEREFVAGISRGTTTNYADSVKGRFTISRDNAKNTVYLQMNSLKPEDTAVYYCAVTTRVTSYHGYWGQGTQVTVSS

SEQ ID NO: 8329 - protein, 111 aa, Artificial Sequence
  Chemically Synthesized
QVQLQESGGGLVQAGGSLRLSCAASGTISWRGMGWYRQAPGKERELVATIDDGTNTNYADSVKGRFTISRDNAKNTVYLQMNSLKPEDTAVYYCAASSCYWGQGTQVTVSS

SEQ ID NO: 8330 - protein, 117 aa, Artificial Sequence
  Chemically Synthesized
QVQLQESGGGLVQAGGSLRLSCAASGTISDSAYMGWYRQAPGKERELVASIAYGGNTNYADSVKGRFTISRDNAKNTVYLQMNSLKPEDTAVYYCAARNRSTTTIYWGQGTQVTVSS

SEQ ID NO: 8331 - protein, 109 aa, Artificial Sequence
  Chemically Synthesized
QVQLQESGGGLVQAGGSLRLSCAASGYISTRSMGWYRQAPGKERELVAGINVGGSTNYADSVKGRFTISRDNAKNTVYLQMNSLKPEDTAVYYCATMYWGQGTQVTVSS

SEQ ID NO: 8332 - protein, 122 aa, Artificial Sequence
  Chemically Synthesized
QVQLQESGGGLVQAGGSLRLSCAASGTIFYDPVMGWYRQAPGKEREFVAAISPGTNTNYADSVKGRFTISRDNAKNTVYLQMNSLKPEDTAVYYCAVYTGDRGYTVWYFTYWGQGTQVTVSS

SEQ ID NO: 8333 - protein, 118 aa, Artificial Sequence
  Chemically Synthesized
QVQLQESGGGLVQAGGSLRLSCAASGNIFYTATMGWYRQAPGKEREFVATITAGGITYYADSVKGRFTISRDNAKNTVYLQMNSLKPEDTAVYYCAVVRALPYGHVYWGQGTQVTVSS

SEQ ID NO: 8334 - protein, 124 aa, Artificial Sequence
  Chemically Synthesized
QVQLQESGGGLVQAGGSLRLSCAASGNILTTVMGWYRQAPGKEREFVAAINWGTITYYADSVKGRFTISRDNAKNTVYLQMNSLKPEDTAVYYCAVTSYASKTVTRTVVLTMYWGQGTQVTVSS

SEQ ID NO: 8335 - protein, 121 aa, Artificial Sequence
  Chemically Synthesized
QVQLQESGGGLVQAGGSLRLSCAASGTIFVYSGMGWYRQAPGKERELVAGITYGTNTNYADSVKGRFTISRDNAKNTVYLQMNSLKPEDTAVYYCAVVDSGIWRSSFSFYWGQGTQVTVSS

SEQ ID NO: 8336 - protein, 117 aa, Artificial Sequence
  Chemically Synthesized
QVQLQESGGGLVQAGGSLRLSCAASGYIFQRWMGWYRQAPGKEREFVATIDHGTTTNYADSVKGRFTISRDNAKNTVYLQMNSLKPEDTAVYYCAAYYYTLRDHPYWGQGTQVTVSS

SEQ ID NO: 8337 - protein, 126 aa, Artificial Sequence
  Chemically Synthesized
QVQLQESGGGLVQAGGSLRLSCAASGNISRRYTMGWYRQAPGKEREFVATIGVGTSTYYADSVKGRFTISRDNAKNTVYLQMNSLKPEDTAVYYCAVKYSTQASGYSDLLDWLVYWGQGTQVTVSS

SEQ ID NO: 8338 - protein, 121 aa, Artificial Sequence
  Chemically Synthesized
QVQLQESGGGLVQAGGSLRLSCAASGTISSRYDMGWYRQAPGKERELVAAINYGGSTYYADSVKGRFTISRDNAKNTVYLQMNSLKPEDTAVYYCAAYTDLPGRFNAHDYWGQGTQVTVSS

SEQ ID NO: 8339 - protein, 118 aa, Artificial Sequence
  Chemically Synthesized
QVQLQESGGGLVQAGGSLRLSCAASGNISGTSAMGWYRQAPGKEREFVAGIGAGTITNYADSVKGRFTISRDNAKNTVYLQMNSLKPEDTAVYYCAAITVDRPYHHYWGQGTQVTVSS

SEQ ID NO: 8340 - protein, 118 aa, Artificial Sequence
  Chemically Synthesized
QVQLQESGGGLVQAGGSLRLSCAASGNIFYLYRMGWYRQAPGKEREFVAGISVGTSTYYADSVKGRFTISRDNAKNTVYLQMNSLKPEDTAVYYCAALWYDYHWHYYWGQGTQVTVSS

SEQ ID NO: 8341 - protein, 118 aa, Artificial Sequence
  Chemically Synthesized
QVQLQESGGGLVQAGGSLRLSCAASGYISRTTNMGWYRQAPGKEREFVAGITEGGTTNYADSVKGRFTISRDNAKNTVYLQMNSLKPEDTAVYYCAATPDRAPYFGYWGQGTQVTVSS

SEQ ID NO: 8342 - protein, 118 aa, Artificial Sequence
  Chemically Synthesized
QVQLQESGGGLVQAGGSLRLSCAASGSISDSWAMGWYRQAPGKERELVASISYGAITYYADSVKGRFTISRDNAKNTVYLQMNSLKPEDTAVYYCAADSTWLADYGYWGQGTQVTVSS

SEQ ID NO: 8343 - protein, 126 aa, Artificial Sequence
  Chemically Synthesized
QVQLQESGGGLVQAGGSLRLSCAASGNIFEPHTMGWYRQAPGKEREFVAGIGLGGNTYYADSVKGRFTISRDNAKNTVYLQMNSLKPEDTAVYYCAARRRFQADRDTRAHGVHRYWGQGTQVTVSS

SEQ ID NO: 8344 - protein, 122 aa, Artificial Sequence
  Chemically Synthesized
QVQLQESGGGLVQAGGSLRLSCAASGNISFWFAMGWYRQAPGKEREFVAAITDGGSTNYADSVKGRFTISRDNAKNTVYLQMNSLKPEDTAVYYCAVLYSQGNGGGARLYYWGQGTQVTVSS

SEQ ID NO: 8345 - protein, 122 aa, Artificial Sequence
  Chemically Synthesized
QVQLQESGGGLVQAGGSLRLSCAASGNIFPYIYMGWYRQAPGKEREFVAAINTGGITNYADSVKGRFTISRDNAKNTVYLQMNSLKPEDTAVYYCAAHTYAGAVPTLLYEYWGQGTQVTVSS

SEQ ID NO: 8346 - protein, 126 aa, Artificial Sequence
  Chemically Synthesized
QVQLQESGGGLVQAGGSLRLSCAASGNISAYPYMGWYRQAPGKEREFVASIDYGGSTYYADSVKGRFTISRDNAKNTVYLQMNSLKPEDTAVYYCAVEWVAGEGRWRGAAYYYGYWGQGTQVTVSS

SEQ ID NO: 8347 - protein, 118 aa, Artificial Sequence
  Chemically Synthesized
QVQLQESGGGLVQAGGSLRLSCAASGTISVTPFMGWYRQAPGKEREFVASISHGSNTNYADSVKGRFTISRDNAKNTVYLQMNSLKPEDTAVYYCAAVGYSGTYLGYWGQGTQVTVSS

SEQ ID NO: 8348 - protein, 122 aa, Artificial Sequence
  Chemically Synthesized
QVQLQESGGGLVQAGGSLRLSCAASGTIFVTDIMGWYRQAPGKEREFVATIAAGSNTYYADSVKGRFTISRDNAKNTVYLQMNSLKPEDTAVYYCAVYDDYDLDGDYTFDYWGQGTQVTVSS

SEQ ID NO: 8349 - protein, 118 aa, Artificial Sequence
  Chemically Synthesized
QVQLQESGGGLVQAGGSLRLSCAASGYISTYYIMGWYRQAPGKEREFVAGITDGANTNYADSVKGRFTISRDNAKNTVYLQMNSLKPEDTAVYYCAASPAYSARYPYWGQGTQVTVSS

SEQ ID NO: 8350 - protein, 118 aa, Artificial Sequence
  Chemically Synthesized
QVQLQESGGGLVQAGGSLRLSCAASGTIFLDIEMGWYRQAPGKERELVATITTGASTNYADSVKGRFTISRDNAKNTVYLQMNSLKPEDTAVYYCAANGVVYLSYRYWGQGTQVTVSS

SEQ ID NO: 8351 - protein, 123 aa, Artificial Sequence
  Chemically Synthesized
QVQLQESGGGLVQAGGSLRLSCAASGYIFDYVAMGWYRQAPGKEREFVASINRGSNTNYADSVKGRFTISRDNAKNTVYLQMNSLKPEDTAVYYCAVVVRVRRDVGNGYLGYWGQGTQVTVSS

SEQ ID NO: 8352 - protein, 126 aa, Artificial Sequence
  Chemically Synthesized
QVQLQESGGGLVQAGGSLRLSCAASGSISGYLTMGWYRQAPGKERELVASIGTGGNTNYADSVKGRFTISRDNAKNTVYLQMNSLKPEDTAVYYCAVIADKPNYPYQVDPYLYGYWGQGTQVTVSS

SEQ ID NO: 8353 - protein, 122 aa, Artificial Sequence
  Chemically Synthesized
QVQLQESGGGLVQAGGSLRLSCAASGNISRTTRMGWYRQAPGKEREFVAGIGVGASTYYADSVKGRFTISRDNAKNTVYLQMNSLKPEDTAVYYCAALHLVYLGTGTWHYYWGQGTQVTVSS

SEQ ID NO: 8354 - protein, 118 aa, Artificial Sequence
  Chemically Synthesized
QVQLQESGGGLVQAGGSLRLSCAASGYIFDIQVMGWYRQAPGKEREFVAGIASGAITNYADSVKGRFTISRDNAKNTVYLQMNSLKPEDTAVYYCAAIIRDEHWYYYWGQGTQVTVSS

SEQ ID NO: 8355 - protein, 115 aa, Artificial Sequence
  Chemically Synthesized
QVQLQESGGGLVQAGGSLRLSCAASGTISRGRYMGWYRQAPGKERELVAAISIGSITNYADSVKGRFTISRDNAKNTVYLQMNSLKPEDTAVYYCAARDRSYFYWGQGTQVTVSS

SEQ ID NO: 8356 - protein, 117 aa, Artificial Sequence
  Chemically Synthesized
QVQLQESGGGLVQAGGSLRLSCAASGTIFRRYGMGWYRQAPGKEREFVAGINLGGNTNYADSVKGRFTISRDNAKNTVYLQMNSLKPEDTAVYYCAVRDYYYYHTYWGQGTQVTVSS

SEQ ID NO: 8357 - protein, 118 aa, Artificial Sequence
  Chemically Synthesized
QVQLQESGGGLVQAGGSLRLSCAASGYISSYVYMGWYRQAPGKERELVAGISTGAITNYADSVKGRFTISRDNAKNTVYLQMNSLKPEDTAVYYCAAYQRYGYVYDYWGQGTQVTVSS

SEQ ID NO: 8358 - protein, 122 aa, Artificial Sequence
  Chemically Synthesized
QVQLQESGGGLVQAGGSLRLSCAASGYIFDDYDMGWYRQAPGKEREFVAGITRGGSTNYADSVKGRFTISRDNAKNTVYLQMNSLKPEDTAVYYCAADDGEQCFWRQLHFYWGQGTQVTVSS

SEQ ID NO: 8359 - protein, 120 aa, Artificial Sequence
  Chemically Synthesized
QVQLQESGGGLVQAGGSLRLSCAASGSISYDSHMGWYRQAPGKEREFVATIPYADSVKGRFTISRDNAKNTVYLQMNSLKPEDTAVYYCAVWDDAVHQGYRGIYPHHLYWGQGTQVTVSS

SEQ ID NO: 8360 - protein, 125 aa, Artificial Sequence
  Chemically Synthesized
QVQLQESGGGLVQAGGSLRLSCAASGNIFHPLMGWYRQAPGKERELVAAIGEGTTTNYADSVKGRFTISRDNAKNTVYLQMNSLKPEDTAVYYCAAYTYDWTHPRSNRQQRLEYWGQGTQVTVSS

SEQ ID NO: 8361 - protein, 118 aa, Artificial Sequence
  Chemically Synthesized
QVQLQESGGGLVQAGGSLRLSCAASGYISGRYYMGWYRQAPGKEREFVASIDYGGTTQYADSVKGRFTISRDNAKNTVYLQMNSLKPEDTAVYYCAVRARKAPVLDYWGQGTQVTVSS

SEQ ID NO: 8362 - protein, 122 aa, Artificial Sequence
  Chemically Synthesized
QVQLQESGGGLVQAGGSLRLSCAASGTIFVLFSMGWYRQAPGKEREFVASIDAGAITYYADSVKGRFTISRDNAKNTVYLQMNSLKPEDTAVYYCAVIYIDFLTTDVLFTYWGQGTQVTVSS

SEQ ID NO: 8363 - protein, 126 aa, Artificial Sequence
  Chemically Synthesized
QVQLQESGGGLVQAGGSLRLSCAASGYISALVYMGWYRQAPGKERELVATIDGGAITNYADSVKGRFTISRDNAKNTVYLQMNSLKPEDTAVYYCAVDASGGTGQRITYTGYLQYWGQGTQVTVSS

SEQ ID NO: 8364 - protein, 118 aa, Artificial Sequence
  Chemically Synthesized
QVQLQESGGGLVQAGGSLRLSCAASGNIFVGGLMGWYRQAPGKERELVAAIGVGASTYYADSVKGRFTISRDNAKNTVYLQMNSLKPEDTAVYYCAVYTGSRRRHYYWGQGTQVTVSS

SEQ ID NO: 8365 - protein, 118 aa, Artificial Sequence
  Chemically Synthesized
QVQLQESGGGLVQAGGSLRLSCAASGNISSGTLMGWYRQAPGKEREFVATINYGGSTNYADSVKGRFTISRDNAKNTVYLQMNSLKPEDTAVYYCAVLYYDTRYFYYWGQGTQVTVSS

SEQ ID NO: 8366 - protein, 124 aa, Artificial Sequence
  Chemically Synthesized
QVQLQESGGGLVQAGGSLRLSCAASGTIFSPMGWYRQAPGKERELVATISSGGNTNYADSVKGRFTISRDNAKNTVYLQMNSLKPEDTAVYYCAVPRGDYLPYAQQVQWRFAYWGQGTQVTVSS

SEQ ID NO: 8367 - protein, 121 aa, Artificial Sequence
  Chemically Synthesized
QVQLQESGGGLVQAGGSLRLSCAASGYILLVLMGWYRQAPGKERELVASIDLGSNTNYADSVKGRFTISRDNAKNTVYLQMNSLKPEDTAVYYCAAPDQYGDYLYYWFHYWGQGTQVTVSS

SEQ ID NO: 8368 - protein, 121 aa, Artificial Sequence
  Chemically Synthesized
QVQLQESGGGLVQAGGSLRLSCAASGNISQASMGWYRQAPGKEREFVAAITLGANTNYADSVKGRFTISRDNAKNTVYLQMNSLKPEDTAVYYCAATQADDSAALLDLRYWGQGTQVTVSS

SEQ ID NO: 8369 - protein, 125 aa, Artificial Sequence
  Chemically Synthesized
QVQLQESGGGLVQAGGSLRLSCAASGTIFWTTMGWYRQAPGKEREFVATITQGASTNYADSVKGRFTISRDNAKNTVYLQMNSLKPEDTAVYYCAAGRHDYRVFIPYRYIRHTYWGQGTQVTVSS

SEQ ID NO: 8370 - protein, 121 aa, Artificial Sequence
  Chemically Synthesized
QVQLQESGGGLVQAGGSLRLSCAASGTIFILCCMGWYRQAPGKERELVAAIGDGGSTYYADSVKGRFTISRDNAKNTVYLQMNSLKPEDTAVYYCAVTRKTRCRGLVRFYWGQGTQVTVSS

SEQ ID NO: 8371 - protein, 118 aa, Artificial Sequence
  Chemically Synthesized
QVQLQESGGGLVQAGGSLRLSCAASGTISYTYYMGWYRQAPGKEREFVAGISRGSTTNYADSVKGRFTISRDNAKNTVYLQMNSLKPEDTAVYYCAVAGYLAGYHGYWGQGTQVTVSS

SEQ ID NO: 8372 - protein, 118 aa, Artificial Sequence
  Chemically Synthesized
QVQLQESGGGLVQAGGSLRLSCAASGSIFPTLRMGWYRQAPGKEREFVAGIAYGSNTYYADSVKGRFTISRDNAKNTVYLQMNSLKPEDTAVYYCAALRAGYHSHYYWGQGTQVTVSS

SEQ ID NO: 8373 - protein, 115 aa, Artificial Sequence
  Chemically Synthesized
QVQLQESGGGLVQAGGSLRLSCAASGNISGYIMGWYRQAPGKERELVATITDGATTNYADSVKGRFTISRDNAKNTVYLQMNSLKPEDTAVYYCAVKLRWTSIYWGQGTQVTVSS

SEQ ID NO: 8374 - protein, 118 aa, Artificial Sequence
  Chemically Synthesized
QVQLQESGGGLVQAGGSLRLSCAASGTISYSRAMGWYRQAPGKEREFVASITYGGSTNYADSVKGRFTISRDNAKNTVYLQMNSLKPEDTAVYYCAVYIPFDYSLGYWGQGTQVTVSS

SEQ ID NO: 8375 - protein, 118 aa, Artificial Sequence
  Chemically Synthesized
QVQLQESGGGLVQAGGSLRLSCAASGYIFSADYMGWYRQAPGKERELVATIGHGSTTNYADSVKGRFTISRDNAKNTVYLQMNSLKPEDTAVYYCAAASTGSDLHYYWGQGTQVTVSS

SEQ ID NO: 8376 - protein, 112 aa, Artificial Sequence
  Chemically Synthesized
QVQLQESGGGLVQAGGSLRLSCAASGTIFGHYSMGWYRQAPGKERELVAGITRGANTYYADSVKGRFTISRDNAKNTVYLQMNSLKPEDTAVYYCAVDYAYWGQGTQVTVSS

SEQ ID NO: 8377 - protein, 122 aa, Artificial Sequence
  Chemically Synthesized
QVQLQESGGGLVQAGGSLRLSCAASGTISYPGPMGWYRQAPGKEREFVATITYGSNTYYADSVKGRFTISRDNAKNTVYLQMNSLKPEDTAVYYCAVYLDYPYNDDGQLIYWGQGTQVTVSS

SEQ ID NO: 8378 - protein, 118 aa, Artificial Sequence
  Chemically Synthesized
QVQLQESGGGLVQAGGSLRLSCAASGSISTPYTMGWYRQAPGKERELVAAINEGANTNYADSVKGRFTISRDNAKNTVYLQMNSLKPEDTAVYYCAATAYTDGKYGYWGQGTQVTVSS

SEQ ID NO: 8379 - protein, 117 aa, Artificial Sequence
  Chemically Synthesized
QVQLQESGGGLVQAGGSLRLSCAASGNIFLDYSMGWYRQAPGKEREFVATINRGSSTNYADSVKGRFTISRDNAKNTVYLQMNSLKPEDTAVYYCAVIAPGVMAFYWGQGTQVTVSS

SEQ ID NO: 8380 - protein, 121 aa, Artificial Sequence
  Chemically Synthesized
QVQLQESGGGLVQAGGSLRLSCAASGSIFSTGMGWYRQAPGKERELVASISGGGSTNYADSVKGRFTISRDNAKNTVYLQMNSLKPEDTAVYYCAAAIDTYVTHAGDHEYWGQGTQVTVSS

SEQ ID NO: 8381 - protein, 118 aa, Artificial Sequence
  Chemically Synthesized
QVQLQESGGGLVQAGGSLRLSCAASGTISRNDPMGWYRQAPGKEREFVASIDDGANTYYADSVKGRFTISRDNAKNTVYLQMNSLKPEDTAVYYCAAVQNSIPYHGYWGQGTQVTVSS

SEQ ID NO: 8382 - protein, 118 aa, Artificial Sequence
  Chemically Synthesized
QVQLQESGGGLVQAGGSLRLSCAASGNISRDLRMGWYRQAPGKEREFVAGINLGGITYYADSVKGRFTISRDNAKNTVYLQMNSLKPEDTAVYYCAALEYYSGYHVYWGQGTQVTVSS

SEQ ID NO: 8383 - protein, 115 aa, Artificial Sequence
  Chemically Synthesized
QVQLQESGGGLVQAGGSLRLSCAASGNISYLAGMGWYRQAPGKERELVASIDSVVLPYADSVKGRFTISRDNAKNTVYLQMNSLKPEDTAVYYCAVLPCWWSLYWGQGTQVTVSS

SEQ ID NO: 8384 - protein, 118 aa, Artificial Sequence
  Chemically Synthesized
QVQLQESGGGLVQAGGSLRLSCAASGYISRVGSMGWYRQAPGKERELVASIGLGGNTYYADSVKGRFTISRDNAKNTVYLQMNSLKPEDTAVYYCAARDDRDADLYYWGQGTQVTVSS

SEQ ID NO: 8385 - protein, 114 aa, Artificial Sequence
  Chemically Synthesized
QVQLQESGGGLVQAGGSLRLSCAASGYISDRIMGWYRQAPGKEREGGTTNYADSVKGRFTISRDNAKNTVYLQMNSLKPEDTAVYYCAVYGYDTGNIHVAHYYWGQGTQVTVSS

SEQ ID NO: 8386 - protein, 116 aa, Artificial Sequence
  Chemically Synthesized
QVQLQESGGGLVQAGGSLRLSCAASGNIFEISDMGWYRQAPGKEREFVAAITGGSTYYADSVKGRFTISRDNAKNTVYLQMNSLKPEDTAVYYCAAPDVRVVRMYWGQGTQVTVSS

SEQ ID NO: 8387 - protein, 114 aa, Artificial Sequence
  Chemically Synthesized
QVQLQESGGGLVQAGGSLRLSCAASGTILMGWYRQAPGKERELVASITTGSITYYADSVKGRFTISRDNAKNTVYLQMNSLKPEDTAVYYCAVGWDSRVHYGYWGQGTQVTVSS

SEQ ID NO: 8388 - protein, 122 aa, Artificial Sequence
  Chemically Synthesized
QVQLQESGGGLVQAGGSLRLSCAASGSISATDVMGWYRQAPGKERELVAAIDPGSITYYADSVKGRFTISRDNAKNTVYLQMNSLKPEDTAVYYCAAGSQRGHVQIVAHQYWGQGTQVTVSS

SEQ ID NO: 8389 - protein, 118 aa, Artificial Sequence
  Chemically Synthesized
QVQLQESGGGLVQAGGSLRLSCAASGSISSPQYMGWYRQAPGKEREFVAGITDGGITYYADSVKGRFTISRDNAKNTVYLQMNSLKPEDTAVYYCAVRGWDDGQLDYWGQGTQVTVSS

SEQ ID NO: 8390 - protein, 121 aa, Artificial Sequence
  Chemically Synthesized
QVQLQESGGGLVQAGGSLRLSCAASGSISLLLMGWYRQAPGKEREFVASINVGSSTNYADSVKGRFTISRDNAKNTVYLQMNSLKPEDTAVYYCAVEDAYDYYGPIWHEYWGQGTQVTVSS

SEQ ID NO: 8391 - protein, 118 aa, Artificial Sequence
  Chemically Synthesized
QVQLQESGGGLVQAGGSLRLSCAASGNIFGVYAMGWYRQAPGKEREFVAGISRGANTNYADSVKGRFTISRDNAKNTVYLQMNSLKPEDTAVYYCAVLYYSLGWLDYWGQGTQVTVSS

SEQ ID NO: 8392 - protein, 118 aa, Artificial Sequence
  Chemically Synthesized
QVQLQESGGGLVQAGGSLRLSCAASGTISPGFGMGWYRQAPGKEREFVAAINKGTITYYADSVKGRFTISRDNAKNTVYLQMNSLKPEDTAVYYCAVLWWDITYHFYWGQGTQVTVSS

SEQ ID NO: 8393 - protein, 118 aa, Artificial Sequence
  Chemically Synthesized
QVQLQESGGGLVQAGGSLRLSCAASGTISWYDVMGWYRQAPGKEREFVASINKGGTTNYADSVKGRFTISRDNAKNTVYLQMNSLKPEDTAVYYCAAIAYYDTYYWYWGQGTQVTVSS

SEQ ID NO: 8394 - protein, 118 aa, Artificial Sequence
  Chemically Synthesized
QVQLQESGGGLVQAGGSLRLSCAASGTIFRDTYMGWYRQAPGKEREFVAAISSGASTNYADSVKGRFTISRDNAKNTVYLQMNSLKPEDTAVYYCAVVTYYYRYHYYWGQGTQVTVSS

SEQ ID NO: 8395 - protein, 118 aa, Artificial Sequence
  Chemically Synthesized
QVQLQESGGGLVQAGGSLRLSCAASGTIFDRSRMGWYRQAPGKEREFVASIDAGTTTYYADSVKGRFTISRDNAKNTVYLQMNSLKPEDTAVYYCAVVLAHNYSLYYWGQGTQVTVSS

SEQ ID NO: 8396 - protein, 109 aa, Artificial Sequence
  Chemically Synthesized
QVQLQESGGGLVQAGGSLRLSCAASGYISYIKMGWYRQAPGKERELVAGISDGATTYYADSVKGRFTISRDNAKNTVYLQMNSLKPEDTAVYYCAALYWGQGTQVTVSS

SEQ ID NO: 8397 - protein, 118 aa, Artificial Sequence
  Chemically Synthesized
QVQLQESGGGLVQAGGSLRLSCAASGNISPLDIMGWYRQAPGKEREFVAGIGYGSNTNYADSVKGRFTISRDNAKNTVYLQMNSLKPEDTAVYYCAALTRYYGPFYYWGQGTQVTVSS

SEQ ID NO: 8398 - protein, 117 aa, Artificial Sequence
  Chemically Synthesized
QVQLQESGGGLVQAGGSLRLSCAASGYISQAVLMGWYRQAPGKEREFVLVVYQYADSVKGRFTISRDNAKNTVYLQMNSLKPEDTAVYYCAVTPPPDTWAYDGYFYWGQGTQVTVSS

SEQ ID NO: 8399 - protein, 118 aa, Artificial Sequence
  Chemically Synthesized
QVQLQESGGGLVQAGGSLRLSCAASGYIFSYRTMGWYRQAPGKEREFVAAIDAGGNTYYADSVKGRFTISRDNAKNTVYLQMNSLKPEDTAVYYCAARGTYPDTHDYWGQGTQVTVSS

SEQ ID NO: 8400 - protein, 118 aa, Artificial Sequence
  Chemically Synthesized
QVQLQESGGGLVQAGGSLRLSCAASGYIYMGWYRQAPGKERELVAGISHGGSTYYADSVKGRFTISRDNAKNTVYLQMNSLKPEDTAVYYCAVGLVVYYATVLALDYWGQGTQVTVSS

SEQ ID NO: 8401 - protein, 117 aa, Artificial Sequence
  Chemically Synthesized
QVQLQESGGGLVQAGGSLRLSCAASGTIFGSLDMGWYRQAPGKEREFVATIGSVLLPYADSVKGRFTISRDNAKNTVYLQMNSLKPEDTAVYYCAAGIDADQYHSYWGQGTQVTVSS

SEQ ID NO: 8402 - protein, 118 aa, Artificial Sequence
  Chemically Synthesized
QVQLQESGGGLVQAGGSLRLSCAASGYISDYRAMGWYRQAPGKEREFVASIGNGSSTYYADSVKGRFTISRDNAKNTVYLQMNSLKPEDTAVYYCAAIVKTTFYHYYWGQGTQVTVSS

SEQ ID NO: 8403 - protein, 122 aa, Artificial Sequence
  Chemically Synthesized
QVQLQESGGGLVQAGGSLRLSCAASGYIFARGNMGWYRQAPGKEREFVAAITAGAITNYADSVKGRFTISRDNAKNTVYLQMNSLKPEDTAVYYCAALDRRDARASPYYYYWGQGTQVTVSS

SEQ ID NO: 8404 - protein, 121 aa, Artificial Sequence
  Chemically Synthesized
QVQLQESGGGLVQAGGSLRLSCAASGTISRDYMGWYRQAPGKERELVATIGPGGTTYYADSVKGRFTISRDNAKNTVYLQMNSLKPEDTAVYYCAAGGADFPAHYDRHVYWGQGTQVTVSS

SEQ ID NO: 8405 - protein, 122 aa, Artificial Sequence
  Chemically Synthesized
QVQLQESGGGLVQAGGSLRLSCAASGTIFGSPTMGWYRQAPGKEREFVAGIAQGANTNYADSVKGRFTISRDNAKNTVYLQMNSLKPEDTAVYYCAAVLTSANRTRYFHYYWGQGTQVTVSS

SEQ ID NO: 8406 - protein, 118 aa, Artificial Sequence
  Chemically Synthesized
QVQLQESGGGLVQAGGSLRLSCAASGTISFRNFMGWYRQAPGKEREFVAAIAYGANTNYADSVKGRFTISRDNAKNTVYLQMNSLKPEDTAVYYCAVRPYKYFRHTYWGQGTQVTVSS

SEQ ID NO: 8407 - protein, 116 aa, Artificial Sequence
  Chemically Synthesized
QVQLQESGGGLVQAGGSLRLSCAASGSISHDVMGWYRQAPGKERELVAGIGGGTSTYYADSVKGRFTISRDNAKNTVYLQMNSLKPEDTAVYYCAASLLRTHLCYWGQGTQVTVSS

SEQ ID NO: 8408 - protein, 118 aa, Artificial Sequence
  Chemically Synthesized
QVQLQESGGGLVQAGGSLRLSCAASGNISGRYHMGWYRQAPGKEREFVASINAGGSTNYADSVKGRFTISRDNAKNTVYLQMNSLKPEDTAVYYCAAIHTHPYYHYYWGQGTQVTVSS

SEQ ID NO: 8409 - protein, 118 aa, Artificial Sequence
  Chemically Synthesized
QVQLQESGGGLVQAGGSLRLSCAASGYISLLGGMGWYRQAPGKEREFVATIGFGGTTNYADSVKGRFTISRDNAKNTVYLQMNSLKPEDTAVYYCAAVVRDRSYHAYWGQGTQVTVSS

SEQ ID NO: 8410 - protein, 118 aa, Artificial Sequence
  Chemically Synthesized
QVQLQESGGGLVQAGGSLRLSCAASGTISTYLVMGWYRQAPGKEREFVAGIGYGGSTNYADSVKGRFTISRDNAKNTVYLQMNSLKPEDTAVYYCAAVYALGAYHYYWGQGTQVTVSS

SEQ ID NO: 8411 - protein, 122 aa, Artificial Sequence
  Chemically Synthesized
QVQLQESGGGLVQAGGSLRLSCAASGNISDLLNMGWYRQAPGKEREFVAGIAPGGNTYYADSVKGRFTISRDNAKNTVYLQMNSLKPEDTAVYYCAALVQSYDSYRHLHYYWGQGTQVTVSS

SEQ ID NO: 8412 - protein, 122 aa, Artificial Sequence
  Chemically Synthesized
QVQLQESGGGLVQAGGSLRLSCAASGTISIPAYMGWYRQAPGKEREFVATINYGASTNYADSVKGRFTISRDNAKNTVYLQMNSLKPEDTAVYYCAVYYAYQDTSDYTFYYWGQGTQVTVSS

SEQ ID NO: 8413 - protein, 122 aa, Artificial Sequence
  Chemically Synthesized
QVQLQESGGGLVQAGGSLRLSCAASGTIFPRVQMGWYRQAPGKEREFVATIADGGITNYADSVKGRFTISRDNAKNTVYLQMNSLKPEDTAVYYCAALIHPHVPYRQYHYYWGQGTQVTVSS

SEQ ID NO: 8414 - protein, 118 aa, Artificial Sequence
  Chemically Synthesized
QVQLQESGGGLVQAGGSLRLSCAASGNISDYSSMGWYRQAPGKEREFVAGIGRGANTNYADSVKGRFTISRDNAKNTVYLQMNSLKPEDTAVYYCAALEYRDRYYPYWGQGTQVTVSS

SEQ ID NO: 8415 - protein, 118 aa, Artificial Sequence
  Chemically Synthesized
QVQLQESGGGLVQAGGSLRLSCAASGSISVNGVMGWYRQAPGKEREFVATITQGGTTNYADSVKGRFTISRDNAKNTVYLQMNSLKPEDTAVYYCAAVTYESYWHGYWGQGTQVTVSS

SEQ ID NO: 8416 - protein, 122 aa, Artificial Sequence
  Chemically Synthesized
QVQLQESGGGLVQAGGSLRLSCAASGTISRLPRMGWYRQAPGKEREFVAGISTGGSTYYADSVKGRFTISRDNAKNTVYLQMNSLKPEDTAVYYCAAVTDGDAVNRRWHGYWGQGTQVTVSS

SEQ ID NO: 8417 - protein, 122 aa, Artificial Sequence
  Chemically Synthesized
QVQLQESGGGLVQAGGSLRLSCAASGSISQYAYMGWYRQAPGKERELVAGIGYGSTTYYADSVKGRFTISRDNAKNTVYLQMNSLKPEDTAVYYCAVRRGDPDGNGAIYWYWGQGTQVTVSS

SEQ ID NO: 8418 - protein, 126 aa, Artificial Sequence
  Chemically Synthesized
QVQLQESGGGLVQAGGSLRLSCAASGSISIVGVMGWYRQAPGKEREFVAGISDGGTTNYADSVKGRFTISRDNAKNTVYLQMNSLKPEDTAVYYCAAIHLHPPSDSGTRKYRHYYWGQGTQVTVSS

SEQ ID NO: 8419 - protein, 118 aa, Artificial Sequence
  Chemically Synthesized
QVQLQESGGGLVQAGGSLRLSCAASGNISYRDSMGWYRQAPGKEREFVAAITEGGNTNYADSVKGRFTISRDNAKNTVYLQMNSLKPEDTAVYYCAAVVRTSNRHGYWGQGTQVTVSS

SEQ ID NO: 8420 - protein, 118 aa, Artificial Sequence
  Chemically Synthesized
QVQLQESGGGLVQAGGSLRLSCAASGTIFDSDFMGWYRQAPGKEREFVAGIADGTITNYADSVKGRFTISRDNAKNTVYLQMNSLKPEDTAVYYCAAATTYTRLLTYWGQGTQVTVSS

SEQ ID NO: 8421 - protein, 122 aa, Artificial Sequence
  Chemically Synthesized
QVQLQESGGGLVQAGGSLRLSCAASGSISSRDSMGWYRQAPGKEREFVAAISKGGTTNYADSVKGRFTISRDNAKNTVYLQMNSLKPEDTAVYYCAVLRDAAYSAYRYHYYWGQGTQVTVSS

SEQ ID NO: 8422 - protein, 122 aa, Artificial Sequence
  Chemically Synthesized
QVQLQESGGGLVQAGGSLRLSCAASGNIFSAGYMGWYRQAPGKERELVAAISFGTSTYYADSVKGRFTISRDNAKNTVYLQMNSLKPEDTAVYYCAVKYGKAVGWVNDHPYWGQGTQVTVSS

SEQ ID NO: 8423 - protein, 117 aa, Artificial Sequence
  Chemically Synthesized
QVQLQESGGGLVQAGGSLRLSCAASGSIFRYGYMGWYRQAPGKEREFVASIDRGGSTYADSVKGRFTISRDNAKNTVYLQMNSLKPEDTAVYYCAVVNDSGGKYVYWGQGTQVTVSS

SEQ ID NO: 8424 - protein, 122 aa, Artificial Sequence
  Chemically Synthesized
QVQLQESGGGLVQAGGSLRLSCAASGSIFGNSTMGWYRQAPGKEREFVAGIDHGSNTYYADSVKGRFTISRDNAKNTVYLQMNSLKPEDTAVYYCAAVLNTPTVHRAYFYYWGQGTQVTVSS

SEQ ID NO: 8425 - protein, 121 aa, Artificial Sequence
  Chemically Synthesized
QVQLQESGGGLVQAGGSLRLSCAASGYISHRDRMGWYRQAPGKEREFVAGIGVGTSTYYADSVKGRFTISRDNAKNTVYLQMNSLKPEDTAVYYCAALTRTYSANQYGYYWGQGTQVTVSS

SEQ ID NO: 8426 - protein, 118 aa, Artificial Sequence
  Chemically Synthesized
QVQLQESGGGLVQAGGSLRLSCAASGYIFYEFYMGWYRQAPGKEREFVAAINPGSSTNYADSVKGRFTISRDNAKNTVYLQMNSLKPEDTAVYYCAALRNYYGYYWYWGQGTQVTVSS

SEQ ID NO: 8427 - protein, 117 aa, Artificial Sequence
  Chemically Synthesized
QVQLQESGGGLVQAGGSLRLSCAASGNISVTTAMGWYRQAPGKERELVATITTGGITYYADSVKGRFTISRDNAKNTVYLQMNSLKPEDTAVYYCAVDRADVSVMYWGQGTQVTVSS

SEQ ID NO: 8428 - protein, 118 aa, Artificial Sequence
  Chemically Synthesized
QVQLQESGGGLVQAGGSLRLSCAASGSISLYVSMGWYRQAPGKEREFVASITAGANTNYADSVKGRFTISRDNAKNTVYLQMNSLKPEDTAVYYCAALVRRSYYHGYWGQGTQVTVSS

SEQ ID NO: 8429 - protein, 117 aa, Artificial Sequence
  Chemically Synthesized
QVQLQESGGGLVQAGGSLRLSCAASGYISIHYEMGWYRQAPGKEREFVASIASGTITYYADSVKGRFTISRDNAKNTVYLQMNSLKPEDTAVYYCAAGGSTSKVIYWGQGTQVTVSS

SEQ ID NO: 8430 - protein, 118 aa, Artificial Sequence
  Chemically Synthesized
QVQLQESGGGLVQAGGSLRLSCAASGNIFDALSMGWYRQAPGKEREFVAAISTGGTTNYADSVKGRFTISRDNAKNTVYLQMNSLKPEDTAVYYCAAVRRQQFSYYYWGQGTQVTVSS

SEQ ID NO: 8431 - protein, 118 aa, Artificial Sequence
  Chemically Synthesized
QVQLQESGGGLVQAGGSLRLSCAASGTISSIPIMGWYRQAPGKEREFVASINPGSNTNYADSVKGRFTISRDNAKNTVYLQMNSLKPEDTAVYYCAAIRQQHGYLYYWGQGTQVTVSS

SEQ ID NO: 8432 - protein, 122 aa, Artificial Sequence
  Chemically Synthesized
QVQLQESGGGLVQAGGSLRLSCAASGNIFVIGKMGWYRQAPGKERELVASISGGGTTYYADSVKGRFTISRDNAKNTVYLQMNSLKPEDTAVYYCAARRGIGYYLRPRHGYWGQGTQVTVSS

SEQ ID NO: 8433 - protein, 126 aa, Artificial Sequence
  Chemically Synthesized
QVQLQESGGGLVQAGGSLRLSCAASGNISPYRYMGWYRQAPGKERELVASIAFGTNTNYADSVKGRFTISRDNAKNTVYLQMNSLKPEDTAVYYCAARNGGLGEGPWYGNYVHRYWGQGTQVTVSS

SEQ ID NO: 8434 - protein, 126 aa, Artificial Sequence
  Chemically Synthesized
QVQLQESGGGLVQAGGSLRLSCAASGSIFIIDAMGWYRQAPGKERELVATIGYGSITYYADSVKGRFTISRDNAKNTVYLQMNSLKPEDTAVYYCAARNILEYWSIDGYYSPYTYWGQGTQVTVSS

SEQ ID NO: 8435 - protein, 122 aa, Artificial Sequence
  Chemically Synthesized
QVQLQESGGGLVQAGGSLRLSCAASGNISNVAGMGWYRQAPGKEREFVAAIGLGGSTNYADSVKGRFTISRDNAKNTVYLQMNSLKPEDTAVYYCAALYVARGASNRYYWYWGQGTQVTVSS

SEQ ID NO: 8436 - protein, 122 aa, Artificial Sequence
  Chemically Synthesized
QVQLQESGGGLVQAGGSLRLSCAASGNISRLYAMGWYRQAPGKERELVAGIAGGGITYYADSVKGRFTISRDNAKNTVYLQMNSLKPEDTAVYYCAAYYYDDILRGAYFRYWGQGTQVTVSS

SEQ ID NO: 8437 - protein, 118 aa, Artificial Sequence
  Chemically Synthesized
QVQLQESGGGLVQAGGSLRLSCAASGSISGGDAMGWYRQAPGKEREFVAAIGSGAITNYADSVKGRFTISRDNAKNTVYLQMNSLKPEDTAVYYCAAAVRYGTWHPYWGQGTQVTVSS

SEQ ID NO: 8438 - protein, 122 aa, Artificial Sequence
  Chemically Synthesized
QVQLQESGGGLVQAGGSLRLSCAASGNIFYTYAMGWYRQAPGKERELVAGIAYGGNTYYADSVKGRFTISRDNAKNTVYLQMNSLKPEDTAVYYCAVLRRYYAYIPSDHIYWGQGTQVTVSS

SEQ ID NO: 8439 - protein, 126 aa, Artificial Sequence
  Chemically Synthesized
QVQLQESGGGLVQAGGSLRLSCAASGYIFQDNVMGWYRQAPGKERELVAAIGDGASTNYADSVKGRFTISRDNAKNTVYLQMNSLKPEDTAVYYCAVFYAVRDADHDGTSNKFGYWGQGTQVTVSS

SEQ ID NO: 8440 - protein, 126 aa, Artificial Sequence
  Chemically Synthesized
QVQLQESGGGLVQAGGSLRLSCAASGYISFTSDMGWYRQAPGKERELVASIGYGSTTYYADSVKGRFTISRDNAKNTVYLQMNSLKPEDTAVYYCAADTGRETLTYRIDDTYFYYWGQGTQVTVSS

SEQ ID NO: 8441 - protein, 118 aa, Artificial Sequence
  Chemically Synthesized
QVQLQESGGGLVQAGGSLRLSCAASGSIFPFSYMGWYRQAPGKERELVAGIADGTTTNYADSVKGRFTISRDNAKNTVYLQMNSLKPEDTAVYYCAVWLSGYAILYYWGQGTQVTVSS

SEQ ID NO: 8442 - protein, 118 aa, Artificial Sequence
  Chemically Synthesized
QVQLQESGGGLVQAGGSLRLSCAASGTIFDTSDMGWYRQAPGKERELVAAIGIGAITNYADSVKGRFTISRDNAKNTVYLQMNSLKPEDTAVYYCAVVSLAESDHGYWGQGTQVTVSS

SEQ ID NO: 8443 - protein, 122 aa, Artificial Sequence
  Chemically Synthesized
QVQLQESGGGLVQAGGSLRLSCAASGYISGWSYMGWYRQAPGKERELVAGIGDGSITYYADSVKGRFTISRDNAKNTVYLQMNSLKPEDTAVYYCAVIDGSHRAYDHAHIYWGQGTQVTVSS

SEQ ID NO: 8444 - protein, 118 aa, Artificial Sequence
  Chemically Synthesized
QVQLQESGGGLVQAGGSLRLSCAASGNISAISHMGWYRQAPGKEREFVAAISNGGITNYADSVKGRFTISRDNAKNTVYLQMNSLKPEDTAVYYCAVTSYTYTWHYYWGQGTQVTVSS

SEQ ID NO: 8445 - protein, 125 aa, Artificial Sequence
  Chemically Synthesized
QVQLQESGGGLVQAGGSLRLSCAASGTISSYGLMGWYRQAPGKERELVAAIARGGTTNYADSVKGRFTISRDNAKNTVYLQMNSLKPEDTAVYYCAVRGSRYSGYRYYPFQHYYWGQGTQVTVSS

SEQ ID NO: 8446 - protein, 121 aa, Artificial Sequence
  Chemically Synthesized
QVQLQESGGGLVQAGGSLRLSCAASGNIFYLRHMGWYRQAPGKERELVAGISDGANTNYADSVKGRFTISRDNAKNTVYLQMNSLKPEDTAVYYCAVPLAYDIGVYYHNYWGQGTQVTVSS

SEQ ID NO: 8447 - protein, 118 aa, Artificial Sequence
  Chemically Synthesized
QVQLQESGGGLVQAGGSLRLSCAASGNIFYGPYMGWYRQAPGKEREFVASIDTGASTYYADSVKGRFTISRDNAKNTVYLQMNSLKPEDTAVYYCAVVGYAKRWLYYWGQGTQVTVSS

SEQ ID NO: 8448 - protein, 118 aa, Artificial Sequence
  Chemically Synthesized
QVQLQESGGGLVQAGGSLRLSCAASGTISYGGYMGWYRQAPGKEREFVASITYGAITYYADSVKGRFTISRDNAKNTVYLQMNSLKPEDTAVYYCAASYQGAYAYPYWGQGTQVTVSS

SEQ ID NO: 8449 - protein, 118 aa, Artificial Sequence
  Chemically Synthesized
QVQLQESGGGLVQAGGSLRLSCAASGNIFASDAMGWYRQAPGKERELVAGINYGTITNYADSVKGRFTISRDNAKNTVYLQMNSLKPEDTAVYYCAADAQYYVPFDYWGQGTQVTVSS

SEQ ID NO: 8450 - protein, 117 aa, Artificial Sequence
  Chemically Synthesized
QVQLQESGGGLVQAGGSLRLSCAASGYISLQLTMGWYRQAPGKEREFVAGIDYGANTNYADSVKGRFTISRDNAKNTVYLQMNSLKPEDTAVYYCAAVTYRPVFGYWGQGTQVTVSS

SEQ ID NO: 8451 - protein, 125 aa, Artificial Sequence
  Chemically Synthesized
QVQLQESGGGLVQAGGSLRLSCAASGTISHRWDMGWYRQAPGKEREFVATITSGGTTNYADSVKGRFTISRDNAKNTVYLQMNSLKPEDTAVYYCAAYWAYIYTLLGLKLLNLYWGQGTQVTVSS

SEQ ID NO: 8452 - protein, 122 aa, Artificial Sequence
  Chemically Synthesized
QVQLQESGGGLVQAGGSLRLSCAASGTISKWRAMGWYRQAPGKEREFVASIDTGGNTNYADSVKGRFTISRDNAKNTVYLQMNSLKPEDTAVYYCAAIGYYANAPHRGHGYWGQGTQVTVSS

SEQ ID NO: 8453 - protein, 122 aa, Artificial Sequence
  Chemically Synthesized
QVQLQESGGGLVQAGGSLRLSCAASGTISSLAGMGWYRQAPGKEREFVASISTGTSTNYADSVKGRFTISRDNAKNTVYLQMNSLKPEDTAVYYCAALGGRSRIDGTYHHYWGQGTQVTVSS

SEQ ID NO: 8454 - protein, 117 aa, Artificial Sequence
  Chemically Synthesized
QVQLQESGGGLVQAGGSLRLSCAASGTIFASNTMGWYRQAPGKEREFVATIDAGTITYYADSVKGRFTISRDNAKNTVYLQMNSLKPEDTAVYYCAVTTYLPYYDYWGQGTQVTVSS

SEQ ID NO: 8455 - protein, 126 aa, Artificial Sequence
  Chemically Synthesized
QVQLQESGGGLVQAGGSLRLSCAASGTISPDPRMGWYRQAPGKEREFVATIDYGGSTNYADSVKGRFTISRDNAKNTVYLQMNSLKPEDTAVYYCAAITYVRGRSDGTRHRWHYYWGQGTQVTVSS

SEQ ID NO: 8456 - protein, 118 aa, Artificial Sequence
  Chemically Synthesized
QVQLQESGGGLVQAGGSLRLSCAASGYISRRYYMGWYRQAPGKERELVAAIAQGTNTYYADSVKGRFTISRDNAKNTVYLQMNSLKPEDTAVYYCAAAHPSFHTFRYWGQGTQVTVSS

SEQ ID NO: 8457 - protein, 121 aa, Artificial Sequence
  Chemically Synthesized
QVQLQESGGGLVQAGGSLRLSCAASGYISDSLYMGWYRQAPGKEREFVAGIGYGGNTNYADSVKGRFTISRDNAKNTVYLQMNSLKPEDTAVYYCAVFADRPPVLTLLIYWGQGTQVTVSS

SEQ ID NO: 8458 - protein, 126 aa, Artificial Sequence
  Chemically Synthesized
QVQLQESGGGLVQAGGSLRLSCAASGTISAPTYMGWYRQAPGKERELVATIGVGSTTYYADSVKGRFTISRDNAKNTVYLQMNSLKPEDTAVYYCAAWFQSVADGYSGYGRYFFYWGQGTQVTVSS

SEQ ID NO: 8459 - protein, 118 aa, Artificial Sequence
  Chemically Synthesized
QVQLQESGGGLVQAGGSLRLSCAASGTIFTYRAMGWYRQAPGKEREFVATITLGTSTNYADSVKGRFTISRDNAKNTVYLQMNSLKPEDTAVYYCAALGHPDKYLYYWGQGTQVTVSS

SEQ ID NO: 8460 - protein, 126 aa, Artificial Sequence
  Chemically Synthesized
QVQLQESGGGLVQAGGSLRLSCAASGYISTRYFMGWYRQAPGKERELVATIGYGGSTYYADSVKGRFTISRDNAKNTVYLQMNSLKPEDTAVYYCAVYGYLSSTGYSRYDNDHPYWGQGTQVTVSS

SEQ ID NO: 8461 - protein, 122 aa, Artificial Sequence
  Chemically Synthesized
QVQLQESGGGLVQAGGSLRLSCAASGSISYYIAMGWYRQAPGKEREFVAGIAIGGTTNYADSVKGRFTISRDNAKNTVYLQMNSLKPEDTAVYYCAAISFDTTQQSRPYGYWGQGTQVTVSS

SEQ ID NO: 8462 - protein, 117 aa, Artificial Sequence
  Chemically Synthesized
QVQLQESGGGLVQAGGSLRLSCAASGNISDNNWMGWYRQAPGKEREFVASIGQGANTYYADSVKGRFTISRDNAKNTVYLQMNSLKPEDTAVYYCALLSGVTRVIYWGQGTQVTVSS

SEQ ID NO: 8463 - protein, 121 aa, Artificial Sequence
  Chemically Synthesized
QVQLQESGGGLVQAGGSLRLSCAASGNISGRSMGWYRQAPGKERELVAGIGWGTSTYYADSVKGRFTISRDNAKNTVYLQMNSLKPEDTAVYYCAVYHAWRYTWHHFHGYWGQGTQVTVSS

SEQ ID NO: 8464 - protein, 118 aa, Artificial Sequence
  Chemically Synthesized
QVQLQESGGGLVQAGGSLRLSCAASGSISNAPPMGWYRQAPGKEREFVAAINTGGNTNYADSVKGRFTISRDNAKNTVYLQMNSLKPEDTAVYYCAVVIYGDGYHAYWGQGTQVTVSS

SEQ ID NO: 8465 - protein, 118 aa, Artificial Sequence
  Chemically Synthesized
QVQLQESGGGLVQAGGSLRLSCAASGTISGESYMGWYRQAPGKEREFVASIAAGTSTYYADSVKGRFTISRDNAKNTVYLQMNSLKPEDTAVYYCAVPYTVGYLLGYWGQGTQVTVSS

SEQ ID NO: 8466 - protein, 122 aa, Artificial Sequence
  Chemically Synthesized
QVQLQESGGGLVQAGGSLRLSCAASGTIFRYRLMGWYRQAPGKEREFVATIDAGTTTYYADSVKGRFTISRDNAKNTVYLQMNSLKPEDTAVYYCAVYKNAYYDLDDLHDYWGQGTQVTVSS

SEQ ID NO: 8467 - protein, 122 aa, Artificial Sequence
  Chemically Synthesized
QVQLQESGGGLVQAGGSLRLSCAASGNIFARYLMGWYRQAPGKEREFVAGIGQGASTNYADSVKGRFTISRDNAKNTVYLQMNSLKPEDTAVYYCAAVYRDYDYRGPLHYYWGQGTQVTVSS

SEQ ID NO: 8468 - protein, 122 aa, Artificial Sequence
  Chemically Synthesized
QVQLQESGGGLVQAGGSLRLSCAASGTIFDQGYMGWYRQAPGKERELVASISDGSITYYADSVKGRFTISRDNAKNTVYLQMNSLKPEDTAVYYCAAEYTDFLYWLQRFAYWGQGTQVTVSS

SEQ ID NO: 8469 - protein, 122 aa, Artificial Sequence
  Chemically Synthesized
QVQLQESGGGLVQAGGSLRLSCAASGSIFNPQGMGWYRQAPGKERELVAGISHGSTTYYADSVKGRFTISRDNAKNTVYLQMNSLKPEDTAVYYCAVYHSGDSVDTALLPYWGQGTQVTVSS

SEQ ID NO: 8470 - protein, 122 aa, Artificial Sequence
  Chemically Synthesized
QVQLQESGGGLVQAGGSLRLSCAASGSISNPYPMGWYRQAPGKERELVAGISYGGITYYADSVKGRFTISRDNAKNTVYLQMNSLKPEDTAVYYCAADYQYSASGGYGLVYWGQGTQVTVSS

SEQ ID NO: 8471 - protein, 110 aa, Artificial Sequence
  Chemically Synthesized
QVQLQESGGGLVQAGGSLRLSCAASGSIFPSTYMGWYRQAPGKERELYADSVKGRFTISRDNAKNTVYLQMNSLKPEDTAVYYCAAATGYSLLTMLLLYWGQGTQVTVSS

SEQ ID NO: 8472 - protein, 122 aa, Artificial Sequence
  Chemically Synthesized
QVQLQESGGGLVQAGGSLRLSCAASGTIFTGAYMGWYRQAPGKEREFVATIDPGASTNYADSVKGRFTISRDNAKNTVYLQMNSLKPEDTAVYYCAAEWLVSRGADWRHKYWGQGTQVTVSS

SEQ ID NO: 8473 - protein, 121 aa, Artificial Sequence
  Chemically Synthesized
QVQLQESGGGLVQAGGSLRLSCAASGLFLCVTMGWYRQAPGKERELVASINDGATTYYADSVKGRFTISRDNAKNTVYLQMNSLKPEDTAVYYCAVAGADGSGDDFNFDYWGQGTQVTVSS

SEQ ID NO: 8474 - protein, 122 aa, Artificial Sequence
  Chemically Synthesized
QVQLQESGGGLVQAGGSLRLSCAASGTIFTPELMGWYRQAPGKERELVAAISTGSNTYYADSVKGRFTISRDNAKNTVYLQMNSLKPEDTAVYYCAVHDWIYAYRNSYHDYWGQGTQVTVSS

SEQ ID NO: 8475 - protein, 122 aa, Artificial Sequence
  Chemically Synthesized
QVQLQESGGGLVQAGGSLRLSCAASGSISPTRDMGWYRQAPGKEREFVATIGYGAITNYADSVKGRFTISRDNAKNTVYLQMNSLKPEDTAVYYCAVTYSQAVVRYRYLPYWGQGTQVTVSS

SEQ ID NO: 8476 - protein, 122 aa, Artificial Sequence
  Chemically Synthesized
QVQLQESGGGLVQAGGSLRLSCAASGSISSYNYMGWYRQAPGKERELVAAIAIGATTYYADSVKGRFTISRDNAKNTVYLQMNSLKPEDTAVYYCAADYYSAYDLRGYFLYWGQGTQVTVSS

SEQ ID NO: 8477 - protein, 118 aa, Artificial Sequence
  Chemically Synthesized
QVQLQESGGGLVQAGGSLRLSCAASGTISHTGLIMGWYRQAPGKERELVAGIDGGSTTYYADSVKGRFTISRDNAKNTVYLQMNSLKPEDTAVYYCASRQDGSFGIYWGQGTQVTVSS

SEQ ID NO: 8478 - protein, 117 aa, Artificial Sequence
  Chemically Synthesized
QVQLQESGGGLVQAGGSLRLSCAASGTISYYNMGWYRQAPGKEREFVAAIDIGAITNYADSVKGRFTISRDNAKNTVYLQMNSLKPEDTAVYYCAAIGANRDRHYYWGQGTQVTVSS

SEQ ID NO: 8479 - protein, 123 aa, Artificial Sequence
  Chemically Synthesized
QVQLQESGGGLVQAGGSLRLSCAASGNISTEGYMGWYRQAPGKEREFVAAINNGGITYYADSVKGRFTISRDNAKNTVYLQMNSLKPEDTAVYYCAVYYGWPYRHYQPHDPYWGQGTQVTVSS

SEQ ID NO: 8480 - protein, 125 aa, Artificial Sequence
  Chemically Synthesized
QVQLQESGGGLVQAGGSLRLSCAASGSISSYGKMGWYRQAPGKERELVAAIAVGAITNYADSVKGRFTISRDNAKNTVYLQMNSLKPEDTAVYYCAVSSLNTLGSLTLLVFRLYWGQGTQVTVSS

SEQ ID NO: 8481 - protein, 118 aa, Artificial Sequence
  Chemically Synthesized
QVQLQESGGGLVQAGGSLRLSCAASGSISFWYSMGWYRQAPGKEREFVATIDYGSSTNYADSVKGRFTISRDNAKNTVYLQMNSLKPEDTAVYYCAAVSHGNQYHYYWGQGTQVTVSS

SEQ ID NO: 8482 - protein, 117 aa, Artificial Sequence
  Chemically Synthesized
QVQLQESGGGLVQAGGSLRLSCAASGNISAESMGWYRQAPGKERELVATINRGATTNYADSVKGRFTISRDNAKNTVYLQMNSLKPEDTAVYYCAAKRYGDDHLPYWGQGTQVTVSS

SEQ ID NO: 8483 - protein, 126 aa, Artificial Sequence
  Chemically Synthesized
QVQLQESGGGLVQAGGSLRLSCAASGTIFVYWRMGWYRQAPGKERELVATIATGSNTNYADSVKGRFTISRDNAKNTVYLQMNSLKPEDTAVYYCAAIGKHYAKYDNEGAPPYYYWGQGTQVTVSS

SEQ ID NO: 8484 - protein, 118 aa, Artificial Sequence
  Chemically Synthesized
QVQLQESGGGLVQAGGSLRLSCAASGTISGAVPMGWYRQAPGKERELVAAINAGGTTYYADSVKGRFTISRDNAKNTVYLQMNSLKPEDTAVYYCAVHTNTDLHFFYWGQGTQVTVSS

SEQ ID NO: 8485 - protein, 118 aa, Artificial Sequence
  Chemically Synthesized
QVQLQESGGGLVQAGGSLRLSCAASGTIFDNAYMGWYRQAPGKEREFVATIDSGTNTNYADSVKGRFTISRDNAKNTVYLQMNSLKPEDTAVYYCAVSDQPYPYLYYWGQGTQVTVSS

SEQ ID NO: 8486 - protein, 126 aa, Artificial Sequence
  Chemically Synthesized
QVQLQESGGGLVQAGGSLRLSCAASGYISGGDGMGWYRQAPGKEREFVATIGRGGSTYYADSVKGRFTISRDNAKNTVYLQMNSLKPEDTAVYYCAVSIGYLYDPFGDDQQYHPYWGQGTQVTVSS

SEQ ID NO: 8487 - protein, 122 aa, Artificial Sequence
  Chemically Synthesized
QVQLQESGGGLVQAGGSLRLSCAASGTIFYDATMGWYRQAPGKEREFVAGIGSGGTTNYADSVKGRFTISRDNAKNTVYLQMNSLKPEDTAVYYCAAYRRARNYPGGHYGYWGQGTQVTVSS

SEQ ID NO: 8488 - protein, 121 aa, Artificial Sequence
  Chemically Synthesized
QVQLQESGGGLVQAGGSLRLSCAASGNIFAYYYMGWYRQAPGKERELLPLLLRVLIPYADSVKGRFTISRDNAKNTVYLQMNSLKPEDTAVYYCAVRDYGRGGNPYDLTYWGQGTQVTVSS

SEQ ID NO: 8489 - protein, 126 aa, Artificial Sequence
  Chemically Synthesized
QVQLQESGGGLVQAGGSLRLSCAASGYIFDRNFMGWYRQAPGKERELVAGIADGSITNYADSVKGRFTISRDNAKNTVYLQMNSLKPEDTAVYYCAVYYGSADDTPYRRTERYLYWGQGTQVTVSS

SEQ ID NO: 8490 - protein, 120 aa, Artificial Sequence
  Chemically Synthesized
QVQLQESGGGLVQAGGSLRLSCAASGTISSVTMGWYRQAPGKEREFVATIDLGASTNYADSVKGRFTISRDNAKNTVYLQMNSLKPEDTAVYYCAAIAYGTDNYEAYLYWGQGTQVTVSS

SEQ ID NO: 8491 - protein, 122 aa, Artificial Sequence
  Chemically Synthesized
QVQLQESGGGLVQAGGSLRLSCAASGSIFRPYTMGWYRQAPGKERELVAGITPGGNTYYADSVKGRFTISRDNAKNTVYLQMNSLKPEDTAVYYCAVIRGRWHTTRYHLYYWGQGTQVTVSS

SEQ ID NO: 8492 - protein, 121 aa, Artificial Sequence
  Chemically Synthesized
QVQLQESGGGLVQAGGSLRLSCAASGNISGNAYMGWYRQAPGKERELVASINTGTNTYYADSVKGRFTISRDNAKNTVYLQMNSLKPEDTAVYYCAVFQYDGSGTAYHDYWGQGTQVTVSS

SEQ ID NO: 8493 - protein, 118 aa, Artificial Sequence
  Chemically Synthesized
QVQLQESGGGLVQAGGSLRLSCAASGNIFGPGDMGWYRQAPGKERELVATINHGSSTNYADSVKGRFTISRDNAKNTVYLQMNSLKPEDTAVYYCAVWDFPQFGFWYWGQGTQVTVSS

SEQ ID NO: 8494 - protein, 122 aa, Artificial Sequence
  Chemically Synthesized
QVQLQESGGGLVQAGGSLRLSCAASGTISAPVSMGWYRQAPGKEREFVASIGYGTTTNYADSVKGRFTISRDNAKNTVYLQMNSLKPEDTAVYYCAAVTAERYEHNFYLYYWGQGTQVTVSS

SEQ ID NO: 8495 - protein, 125 aa, Artificial Sequence
  Chemically Synthesized
QVQLQESGGGLVQAGGSLRLSCAASGSISYKYIMGWYRQAPGKEREFVAGISYGTTTNYADSVKGRFTISRDNAKNTVYLQMNSLKPEDTAVYYCAVLITYRDGTVRSPGRHYYWGQGTQVTVSS

SEQ ID NO: 8496 - protein, 118 aa, Artificial Sequence
  Chemically Synthesized
QVQLQESGGGLVQAGGSLRLSCAASGSISNPLIMGWYRQAPGKEREFVAAIGSGSTTNYADSVKGRFTISRDNAKNTVYLQMNSLKPEDTAVYYCAAVGNVVTRLGYWGQGTQVTVSS

SEQ ID NO: 8497 - protein, 122 aa, Artificial Sequence
  Chemically Synthesized
QVQLQESGGGLVQAGGSLRLSCAASGYIFPYRQMGWYRQAPGKERELVATIDAGGSTYYADSVKGRFTISRDNAKNTVYLQMNSLKPEDTAVYYCAVQYTTDFYYIVSHAYWGQGTQVTVSS

SEQ ID NO: 8498 - protein, 122 aa, Artificial Sequence
  Chemically Synthesized
QVQLQESGGGLVQAGGSLRLSCAASGYISVYRLMGWYRQAPGKEREFVAGISYGTTTYYADSVKGRFTISRDNAKNTVYLQMNSLKPEDTAVYYCAVYNYAEYRPRLDHFYWGQGTQVTVSS

SEQ ID NO: 8499 - protein, 118 aa, Artificial Sequence
  Chemically Synthesized
QVQLQESGGGLVQAGGSLRLSCAASGSIFRGSWMGWYRQAPGKEREFVAGIAPGSNTYYADSVKGRFTISRDNAKNTVYLQMNSLKPEDTAVYYCAAEDTVPANHGYWGQGTQVTVSS

SEQ ID NO: 8500 - protein, 122 aa, Artificial Sequence
  Chemically Synthesized
QVQLQESGGGLVQAGGSLRLSCAASGNISSYYRMGWYRQAPGKERELVAGIASGTSTYYADSVKGRFTISRDNAKNTVYLQMNSLKPEDTAVYYCAAIDIQLQDHKRYYGYWGQGTQVTVSS

SEQ ID NO: 8501 - protein, 118 aa, Artificial Sequence
  Chemically Synthesized
QVQLQESGGGLVQAGGSLRLSCAASGSISDRSYMGWYRQAPGKEREFVAGIGDGGTTNYADSVKGRFTISRDNAKNTVYLQMNSLKPEDTAVYYCAALYKRKNYLNYWGQGTQVTVSS

SEQ ID NO: 8502 - protein, 118 aa, Artificial Sequence
  Chemically Synthesized
QVQLQESGGGLVQAGGSLRLSCAASGTISYHGDMGWYRQAPGKEREFVAGIAGGGTTYYADSVKGRFTISRDNAKNTVYLQMNSLKPEDTAVYYCAVAYDRTGDFPYWGQGTQVTVSS

SEQ ID NO: 8503 - protein, 122 aa, Artificial Sequence
  Chemically Synthesized
QVQLQESGGGLVQAGGSLRLSCAASGSISAPYAMGWYRQAPGKEREFVATINRGTSTYYADSVKGRFTISRDNAKNTVYLQMNSLKPEDTAVYYCAVLTYHVYGDSVWHDYWGQGTQVTVSS

SEQ ID NO: 8504 - protein, 122 aa, Artificial Sequence
  Chemically Synthesized
QVQLQESGGGLVQAGGSLRLSCAASGTISQGPYMGWYRQAPGKEREFVAAITGGGNTNYADSVKGRFTISRDNAKNTVYLQMNSLKPEDTAVYYCAADVIWLLTYVIDYRYWGQGTQVTVSS

SEQ ID NO: 8505 - protein, 122 aa, Artificial Sequence
  Chemically Synthesized
QVQLQESGGGLVQAGGSLRLSCAASGSISSSNAMGWYRQAPGKEREFVAGIASGATTYYADSVKGRFTISRDNAKNTVYLQMNSLKPEDTAVYYCAAVDRAGDTGVRYLYYWGQGTQVTVSS

SEQ ID NO: 8506 - protein, 126 aa, Artificial Sequence
  Chemically Synthesized
QVQLQESGGGLVQAGGSLRLSCAASGYIFGPTSMGWYRQAPGKEREFVASIAFGTSTYYADSVKGRFTISRDNAKNTVYLQMNSLKPEDTAVYYCAAGGNRYEYSYVGSDQEFVYWGQGTQVTVSS

SEQ ID NO: 8507 - protein, 118 aa, Artificial Sequence
  Chemically Synthesized
QVQLQESGGGLVQAGGSLRLSCAASGSIFPDPIMGWYRQAPGKEREFVATISIGGITNYADSVKGRFTISRDNAKNTVYLQMNSLKPEDTAVYYCAVIPYAWFNYSYWGQGTQVTVSS

SEQ ID NO: 8508 - protein, 118 aa, Artificial Sequence
  Chemically Synthesized
QVQLQESGGGLVQAGGSLRLSCAASGTIFYPFYMGWYRQAPGKEREFVASIAGGTNTNYADSVKGRFTISRDNAKNTVYLQMNSLKPEDTAVYYCAARGYSYPSYRYWGQGTQVTVSS

SEQ ID NO: 8509 - protein, 118 aa, Artificial Sequence
  Chemically Synthesized
QVQLQESGGGLVQAGGSLRLSCAASGNIFTGSIMGWYRQAPGKEREFVASINSGAITYYADSVKGRFTISRDNAKNTVYLQMNSLKPEDTAVYYCAVLVRRQKLYWYWGQGTQVTVSS

SEQ ID NO: 8510 - protein, 122 aa, Artificial Sequence
  Chemically Synthesized
QVQLQESGGGLVQAGGSLRLSCAASGTISTYPEMGWYRQAPGKEREFVAGIGDGSSTNYADSVKGRFTISRDNAKNTVYLQMNSLKPEDTAVYYCAVYTNYTDYYYTYHAYWGQGTQVTVSS

SEQ ID NO: 8511 - protein, 121 aa, Artificial Sequence
  Chemically Synthesized
QVQLQESGGGLVQAGGSLRLSCAASGSISYVDAMGWYRQAPGKEREFVAAIAIGGTTYADSVKGRFTISRDNAKNTVYLQMNSLKPEDTAVYYCAVRVWDRVYVDYTHDYWGQGTQVTVSS

SEQ ID NO: 8512 - protein, 118 aa, Artificial Sequence
  Chemically Synthesized
QVQLQESGGGLVQAGGSLRLSCAASGSIFTGGIMGWYRQAPGKEREFVAGISDGTTTYYADSVKGRFTISRDNAKNTVYLQMNSLKPEDTAVYYCAAVTKGQPRFYYWGQGTQVTVSS

SEQ ID NO: 8513 - protein, 118 aa, Artificial Sequence
  Chemically Synthesized
QVQLQESGGGLVQAGGSLRLSCAASGNISGDDNMGWYRQAPGKEREFVAAITFGTTTYYADSVKGRFTISRDNAKNTVYLQMNSLKPEDTAVYYCAAVIQRGNTHYYWGQGTQVTVSS

SEQ ID NO: 8514 - protein, 118 aa, Artificial Sequence
  Chemically Synthesized
QVQLQESGGGLVQAGGSLRLSCAASGTISLGQAMGWYRQAPGKEREFVAGIAYGGSTYYADSVKGRFTISRDNAKNTVYLQMNSLKPEDTAVYYCAVRQDLSQRHGYWGQGTQVTVSS

SEQ ID NO: 8515 - protein, 118 aa, Artificial Sequence
  Chemically Synthesized
QVQLQESGGGLVQAGGSLRLSCAASGTIFTAYIMGWYRQAPGKEREFVAGINAGSNTNYADSVKGRFTISRDNAKNTVYLQMNSLKPEDTAVYYCAAVSLSTPHYNYWGQGTQVTVSS

SEQ ID NO: 8516 - protein, 122 aa, Artificial Sequence
  Chemically Synthesized
QVQLQESGGGLVQAGGSLRLSCAASGTISALVAMGWYRQAPGKEREFVAAISFGATTYYADSVKGRFTISRDNAKNTVYLQMNSLKPEDTAVYYCAAVYYLFGETYYIYQYWGQGTQVTVSS

SEQ ID NO: 8517 - protein, 118 aa, Artificial Sequence
  Chemically Synthesized
QVQLQESGGGLVQAGGSLRLSCAASGTISAYQDMGWYRQAPGKEREFVAGIDDGSITYYADSVKGRFTISRDNAKNTVYLQMNSLKPEDTAVYYCAAPKYAVYEHPYWGQGTQVTVSS

SEQ ID NO: 8518 - protein, 118 aa, Artificial Sequence
  Chemically Synthesized
QVQLQESGGGLVQAGGSLRLSCAASGYISVALVMGWYRQAPGKEREFVATINFGGTTNYADSVKGRFTISRDNAKNTVYLQMNSLKPEDTAVYYCAVYDIYFYYHPYWGQGTQVTVSS

SEQ ID NO: 8519 - protein, 110 aa, Artificial Sequence
  Chemically Synthesized
QVQLQESGGGLVQAGGSLRLSCAASGTISTYGSMGWYRQAPGKERELVAGIAYGSITNYADSVKGRFTISRDNAKNTVYLQMNSLKPEDTAVYYCAAMYWGQGTQVTVSS

SEQ ID NO: 8520 - protein, 118 aa, Artificial Sequence
  Chemically Synthesized
QVQLQESGGGLVQAGGSLRLSCAASGYISGYDYMGWYRQAPGKERELVAGINPGTITNYADSVKGRFTISRDNAKNTVYLQMNSLKPEDTAVYYCAAVKRKPPYYYYWGQGTQVTVSS

SEQ ID NO: 8521 - protein, 117 aa, Artificial Sequence
  Chemically Synthesized
QVQLQESGGGLVQAGGSLRLSCAASGYIFLKWYMGWYRQAPGKERELVATIDRGSNTNYADSVKGRFTISRDNAKNTVYLQMNSLKPEDTAVYYCAADGYGAVYGYWGQGTQVTVSS

SEQ ID NO: 8522 - protein, 117 aa, Artificial Sequence
  Chemically Synthesized
QVQLQESGGGLVQAGGSLRLSCAASGYIFYTDYMGWYRQAPGKEREFVASIDDGGNTNYADSVKGRFTISRDNAKNTVYLQMNSLKPEDTAVYYCAVQYRSPYRLYWGQGTQVTVSS

SEQ ID NO: 8523 - protein, 118 aa, Artificial Sequence
  Chemically Synthesized
QVQLQESGGGLVQAGGSLRLSCAASGNISALVRMGWYRQAPGKEREFVAGIAEGSNTNYADSVKGRFTISRDNAKNTVYLQMNSLKPEDTAVYYCAAIAFNGDYHAYWGQGTQVTVSS

SEQ ID NO: 8524 - protein, 122 aa, Artificial Sequence
  Chemically Synthesized
QVQLQESGGGLVQAGGSLRLSCAASGTISLQIIMGWYRQAPGKERELVAGISDGGITYYADSVKGRFTISRDNAKNTVYLQMNSLKPEDTAVYYCAAPNDTLFATTQWHGYWGQGTQVTVSS

SEQ ID NO: 8525 - protein, 118 aa, Artificial Sequence
  Chemically Synthesized
QVQLQESGGGLVQAGGSLRLSCAASGSISDYVAMGWYRQAPGKEREFVAGIGLGGTTNYADSVKGRFTISRDNAKNTVYLQMNSLKPEDTAVYYCAVLASQYPYLYYWGQGTQVTVSS

SEQ ID NO: 8526 - protein, 117 aa, Artificial Sequence
  Chemically Synthesized
QVQLQESGGGLVQAGGSLRLSCAASGSISFSYRMGWYRQAPGKERELVAGINTGTSTYYADSVKGRFTISRDNAKNTVYLQMNSLKPEDTAVYYCAVGSGLTTTMYWGQGTQVTVSS

SEQ ID NO: 8527 - protein, 122 aa, Artificial Sequence
  Chemically Synthesized
QVQLQESGGGLVQAGGSLRLSCAASGNIFAGRYMGWYRQAPGKEREFVASINNGSSTNYADSVKGRFTISRDNAKNTVYLQMNSLKPEDTAVYYCAAVYPDRAYRYGYYYYWGQGTQVTVSS

SEQ ID NO: 8528 - protein, 122 aa, Artificial Sequence
  Chemically Synthesized
QVQLQESGGGLVQAGGSLRLSCAASGTISSLGHMGWYRQAPGKEREFVAGIDLGATTNYADSVKGRFTISRDNAKNTVYLQMNSLKPEDTAVYYCAVIARGYYDGYSIHWYWGQGTQVTVSS

SEQ ID NO: 8529 - protein, 126 aa, Artificial Sequence
  Chemically Synthesized
QVQLQESGGGLVQAGGSLRLSCAASGTISGPPYMGWYRQAPGKEREFVASIDTGSTTYYADSVKGRFTISRDNAKNTVYLQMNSLKPEDTAVYYCAVVIRGRGQRTYDIGAYHHYWGQGTQVTVSS

SEQ ID NO: 8530 - protein, 118 aa, Artificial Sequence
  Chemically Synthesized
QVQLQESGGGLVQAGGSLRLSCAASGTISSSSAMGWYRQAPGKEREFVATISVGAITYYADSVKGRFTISRDNAKNTVYLQMNSLKPEDTAVYYCAVYYGPPRSHDYWGQGTQVTVSS

SEQ ID NO: 8531 - protein, 122 aa, Artificial Sequence
  Chemically Synthesized
QVQLQESGGGLVQAGGSLRLSCAASGNIFDGYTMGWYRQAPGKEREFVAGINYGSTTYYADSVKGRFTISRDNAKNTVYLQMNSLKPEDTAVYYCAALSKRVTPTGRYYFYWGQGTQVTVSS

SEQ ID NO: 8532 - protein, 126 aa, Artificial Sequence
  Chemically Synthesized
QVQLQESGGGLVQAGGSLRLSCAASGNIFDLTAMGWYRQAPGKEREFVASIDEGTTTYYADSVKGRFTISRDNAKNTVYLQMNSLKPEDTAVYYCAVRPDDGKLHYGSYGYGFDYWGQGTQVTVSS

SEQ ID NO: 8533 - protein, 118 aa, Artificial Sequence
  Chemically Synthesized
QVQLQESGGGLVQAGGSLRLSCAASGTISLVDVMGWYRQAPGKERELVASIGYGASTNYADSVKGRFTISRDNAKNTVYLQMNSLKPEDTAVYYCAVYLHPTISYWYWGQGTQVTVSS

SEQ ID NO: 8534 - protein, 118 aa, Artificial Sequence
  Chemically Synthesized
QVQLQESGGGLVQAGGSLRLSCAASGNISDGVAMGWYRQAPGKEREFVAGIGYGGSTNYADSVKGRFTISRDNAKNTVYLQMNSLKPEDTAVYYCAAVHHDRGWYYYWGQGTQVTVSS

SEQ ID NO: 8535 - protein, 118 aa, Artificial Sequence
  Chemically Synthesized
QVQLQESGGGLVQAGGSLRLSCAASGYISIIVGMGWYRQAPGKEREFVAGINNGANTNYADSVKGRFTISRDNAKNTVYLQMNSLKPEDTAVYYCAAIARTGRYFSYWGQGTQVTVSS

SEQ ID NO: 8536 - protein, 126 aa, Artificial Sequence
  Chemically Synthesized
QVQLQESGGGLVQAGGSLRLSCAASGTIFDTAGMGWYRQAPGKERELVATIASGGTTYYADSVKGRFTISRDNAKNTVYLQMNSLKPEDTAVYYCAVYDATADYYIYRDPSRLSYWGQGTQVTVSS

SEQ ID NO: 8537 - protein, 118 aa, Artificial Sequence
  Chemically Synthesized
QVQLQESGGGLVQAGGSLRLSCAASGNISTISVMGWYRQAPGKERELVASIDPGGTTYYADSVKGRFTISRDNAKNTVYLQMNSLKPEDTAVYYCAVVLTFGTNFNYWGQGTQVTVSS

SEQ ID NO: 8538 - protein, 118 aa, Artificial Sequence
  Chemically Synthesized
QVQLQESGGGLVQAGGSLRLSCAASGNISSRYVMGWYRQAPGKEREFVAGIDIGGITYYADSVKGRFTISRDNAKNTVYLQMNSLKPEDTAVYYCAVVKYVRNWFYYWGQGTQVTVSS

SEQ ID NO: 8539 - protein, 122 aa, Artificial Sequence
  Chemically Synthesized
QVQLQESGGGLVQAGGSLRLSCAASGTIFSVLVMGWYRQAPGKERELVATIDPGTNTNYADSVKGRFTISRDNAKNTVYLQMNSLKPEDTAVYYCAANGGSDPPREGYYGYWGQGTQVTVSS

SEQ ID NO: 8540 - protein, 125 aa, Artificial Sequence
  Chemically Synthesized
QVQLQESGGGLVQAGGSLRLSCAASGTIFRVYFMGWYRQAPGKERELVATISYGGTTNYADSVKGRFTISRDNAKNTVYLQMNSLKPEDTAVYYCAVQGPLSNNDARADIATYYWGQGTQVTVSS

SEQ ID NO: 8541 - protein, 122 aa, Artificial Sequence
  Chemically Synthesized
QVQLQESGGGLVQAGGSLRLSCAASGTISGYKDMGWYRQAPGKEREFVAAITIGTNTNYADSVKGRFTISRDNAKNTVYLQMNSLKPEDTAVYYCAVQYYHIPAGIWSLLYWGQGTQVTVSS

SEQ ID NO: 8542 - protein, 121 aa, Artificial Sequence
  Chemically Synthesized
QVQLQESGGGLVQAGGSLRLSCAASGSISAYYDMGWYRQAPGKEREFVASISDGSTTNYADSVKGRFTISRDNAKNTVYLQMNSLKPEDTAVYYCAVRDYDFYYYAPSLYWGQGTQVTVSS

SEQ ID NO: 8543 - protein, 116 aa, Artificial Sequence
  Chemically Synthesized
QVQLQESGGGLVQAGGSLRLSCAASGTIFPPIQMGWYRQAPGKERELVAIDYGTITNYADSVKGRFTISRDNAKNTVYLQMNSLKPEDTAVYYCAVVTCRTVRIYWGQGTQVTVSS

SEQ ID NO: 8544 - protein, 117 aa, Artificial Sequence
  Chemically Synthesized
QVQLQESGGGLVQAGGSLRLSCAASGNISRPDYMGWYRQAPGKERELVAGIGGGGSTYYADSVKGRFTISRDNAKNTVYLQMNSLKPEDTAVYYCAVAEGLLCSWYWGQGTQVTVSS

SEQ ID NO: 8545 - protein, 121 aa, Artificial Sequence
  Chemically Synthesized
QVQLQESGGGLVQAGGSLRLSCAASGNIFGTTMGWYRQAPGKEREFVATIAVGGTTNYADSVKGRFTISRDNAKNTVYLQMNSLKPEDTAVYYCAVYTAFTRYIPFVLRYWGQGTQVTVSS

SEQ ID NO: 8546 - protein, 118 aa, Artificial Sequence
  Chemically Synthesized
QVQLQESGGGLVQAGGSLRLSCAASGNISTYQLMGWYRQAPGKERELVAAIDIGGSTYYADSVKGRFTISRDNAKNTVYLQMNSLKPEDTAVYYCAVYGKNIIRHPYWGQGTQVTVSS

SEQ ID NO: 8547 - protein, 117 aa, Artificial Sequence
  Chemically Synthesized
QVQLQESGGGLVQAGGSLRLSCAASGTIFYYYMGWYRQAPGKEREFVATITKGTNTNYADSVKGRFTISRDNAKNTVYLQMNSLKPEDTAVYYCAADIAFHSYHLYWGQGTQVTVSS

SEQ ID NO: 8548 - protein, 118 aa, Artificial Sequence
  Chemically Synthesized
QVQLQESGGGLVQAGGSLRLSCAASGYISSDSPMGWYRQAPGKERELVAAIDRGANTYYADSVKGRFTISRDNAKNTVYLQMNSLKPEDTAVYYCAVLHSGNSLHYYWGQGTQVTVSS

SEQ ID NO: 8549 - protein, 117 aa, Artificial Sequence
  Chemically Synthesized
QVQLQESGGGLVQAGGSLRLSCAASGTISGRTMGWYRQAPGKEREFVAGIAVGTTTYYADSVKGRFTISRDNAKNTVYLQMNSLKPEDTAVYYCAVSLLAFRYFDYWGQGTQVTVSS

SEQ ID NO: 8550 - protein, 122 aa, Artificial Sequence
  Chemically Synthesized
QVQLQESGGGLVQAGGSLRLSCAASGTISVDGTMGWYRQAPGKERELVASIAVGASTNYADSVKGRFTISRDNAKNTVYLQMNSLKPEDTAVYYCAVIGLTSYYYPTCFWYWGQGTQVTVSS

SEQ ID NO: 8551 - protein, 118 aa, Artificial Sequence
  Chemically Synthesized
QVQLQESGGGLVQAGGSLRLSCAASGYISAYNTMGWYRQAPGKERELVAAISPGATTNYADSVKGRFTISRDNAKNTVYLQMNSLKPEDTAVYYCAATYPTFDYHGYWGQGTQVTVSS

SEQ ID NO: 8552 - protein, 125 aa, Artificial Sequence
  Chemically Synthesized
QVQLQESGGGLVQAGGSLRLSCAASGYIFGVTMGWYRQAPGKERELVATINDGSSTNYADSVKGRFTISRDNAKNTVYLQMNSLKPEDTAVYYCAVGQGKVDAIRSGPLYRHYYWGQGTQVTVSS

SEQ ID NO: 8553 - protein, 126 aa, Artificial Sequence
  Chemically Synthesized
QVQLQESGGGLVQAGGSLRLSCAASGNIFSGYFMGWYRQAPGKEREFVATIAIGGSTNYADSVKGRFTISRDNAKNTVYLQMNSLKPEDTAVYYCAAPGYAWYYVPYLRGGGHRYWGQGTQVTVSS

SEQ ID NO: 8554 - protein, 117 aa, Artificial Sequence
  Chemically Synthesized
QVQLQESGGGLVQAGGSLRLSCAASGTIFYIFMGWYRQAPGKEREFVATITYGGNTYYADSVKGRFTISRDNAKNTVYLQMNSLKPEDTAVYYCAVGYKRRYNLGYWGQGTQVTVSS

SEQ ID NO: 8555 - protein, 121 aa, Artificial Sequence
  Chemically Synthesized
QVQLQESGGGLVQAGGSLRLSCAASGTILCLPMGWYRQAPGKERELVATIATGTTTNYADSVKGRFTISRDNAKNTVYLQMNSLKPEDTAVYYCAVGYRGGYEYAPIHGYWGQGTQVTVSS

SEQ ID NO: 8556 - protein, 118 aa, Artificial Sequence
  Chemically Synthesized
QVQLQESGGGLVQAGGSLRLSCAASGSIFPINIMGWYRQAPGKEREFVAGIASGASTNYADSVKGRFTISRDNAKNTVYLQMNSLKPEDTAVYYCAAPDTGVQDHLYWGQGTQVTVSS

SEQ ID NO: 8557 - protein, 118 aa, Artificial Sequence
  Chemically Synthesized
QVQLQESGGGLVQAGGSLRLSCAASGTISVDRYMGWYRQAPGKEREFVAGITSGGNTNYADSVKGRFTISRDNAKNTVYLQMNSLKPEDTAVYYCAVDGGKRHGHNYWGQGTQVTVSS

SEQ ID NO: 8558 - protein, 116 aa, Artificial Sequence
  Chemically Synthesized
QVQLQESGGGLVQAGGSLRLSCAASGSISPARGMGWYRQAPGKERELVASIAVGGITYADSVKGRFTISRDNAKNTVYLQMNSLKPEDTAVYYCAVIYYDFSTFYWGQGTQVTVSS

SEQ ID NO: 8559 - protein, 118 aa, Artificial Sequence
  Chemically Synthesized
QVQLQESGGGLVQAGGSLRLSCAASGNISTYPMGWYRQAPGKEREFVASITIGTITNYADSVKGRFTISRDNAKNTVYLQMNSLKPEDTAVYYCAAVFYAVGYPRLYWGQGTQVTVSS

SEQ ID NO: 8560 - protein, 126 aa, Artificial Sequence
  Chemically Synthesized
QVQLQESGGGLVQAGGSLRLSCAASGNISGDNVMGWYRQAPGKEREFVASIDWGGTTNYADSVKGRFTISRDNAKNTVYLQMNSLKPEDTAVYYCAVGGTYHDQSNYRLVSILRYWGQGTQVTVSS

SEQ ID NO: 8561 - protein, 118 aa, Artificial Sequence
  Chemically Synthesized
QVQLQESGGGLVQAGGSLRLSCAASGYIFYLTDMGWYRQAPGKEREFVASISYGGSTNYADSVKGRFTISRDNAKNTVYLQMNSLKPEDTAVYYCAAGGWDHKSLGYWGQGTQVTVSS

SEQ ID NO: 8562 - protein, 118 aa, Artificial Sequence
  Chemically Synthesized
QVQLQESGGGLVQAGGSLRLSCAASGNIFYTHSMGWYRQAPGKEREFVAAIDGGANTYYADSVKGRFTISRDNAKNTVYLQMNSLKPEDTAVYYCAVFTPYQRLYGYWGQGTQVTVSS

SEQ ID NO: 8563 - protein, 118 aa, Artificial Sequence
  Chemically Synthesized
QVQLQESGGGLVQAGGSLRLSCAASGNIFHVDYMGWYRQAPGKEREFVASISYGATTYYADSVKGRFTISRDNAKNTVYLQMNSLKPEDTAVYYCAADPEAGLQYRYWGQGTQVTVSS

SEQ ID NO: 8564 - protein, 116 aa, Artificial Sequence
  Chemically Synthesized
QVQLQESGGGLVQAGGSLRLSCAASGNISYRYMGWYRQAPGKERELVATISVGTNTNYADSVKGRFTISRDNAKNTVYLQMNSLKPEDTAVYYCAVSALYGSWLYWGQGTQVTVSS

SEQ ID NO: 8565 - protein, 122 aa, Artificial Sequence
  Chemically Synthesized
QVQLQESGGGLVQAGGSLRLSCAASGYIFWVYAMGWYRQAPGKEREFVASIAGGSNTNYADSVKGRFTISRDNAKNTVYLQMNSLKPEDTAVYYCAAPYFGRSPVPPGFDYWGQGTQVTVSS

SEQ ID NO: 8566 - protein, 121 aa, Artificial Sequence
  Chemically Synthesized
QVQLQESGGGLVQAGGSLRLSCAASGNIFGISRMGWYRQAPGKERELVAGINRGGITYYADSVKGRFTISRDNAKNTVYLQMNSLKPEDTAVYYCAVYDLADSGGYLYSYWGQGTQVTVSS

SEQ ID NO: 8567 - protein, 126 aa, Artificial Sequence
  Chemically Synthesized
QVQLQESGGGLVQAGGSLRLSCAASGTIFLNYIMGWYRQAPGKEREFVATIADGSITNYADSVKGRFTISRDNAKNTVYLQMNSLKPEDTAVYYCAVPYNGNTHHFGVDGHYLVYWGQGTQVTVSS

SEQ ID NO: 8568 - protein, 122 aa, Artificial Sequence
  Chemically Synthesized
QVQLQESGGGLVQAGGSLRLSCAASGSISYIGYMGWYRQAPGKEREFVASITLGTNTNYADSVKGRFTISRDNAKNTVYLQMNSLKPEDTAVYYCAADSADVKWDDTVHYYWGQGTQVTVSS

SEQ ID NO: 8569 - protein, 125 aa, Artificial Sequence
  Chemically Synthesized
QVQLQESGGGLVQAGGSLRLSCAASGYISDRAVMGWYRQAPGKERELVASISTGSITNYADSVKGRFTISRDNAKNTVYLQMNSLKPEDTAVYYCAVHSKTTDRPTPVQSEYGYWGQGTQVTVSS

SEQ ID NO: 8570 - protein, 126 aa, Artificial Sequence
  Chemically Synthesized
QVQLQESGGGLVQAGGSLRLSCAASGTIFYGYDMGWYRQAPGKEREFVAAITSGGSTNYADSVKGRFTISRDNAKNTVYLQMNSLKPEDTAVYYCAAYSDNTYAGGDATYDPFDYWGQGTQVTVSS

SEQ ID NO: 8571 - protein, 118 aa, Artificial Sequence
  Chemically Synthesized
QVQLQESGGGLVQAGGSLRLSCAASGNIFPFDYMGWYRQAPGKERELVASISYGTSTNYADSVKGRFTISRDNAKNTVYLQMNSLKPEDTAVYYCAVYRQRYVYYAYWGQGTQVTVSS

SEQ ID NO: 8572 - protein, 122 aa, Artificial Sequence
  Chemically Synthesized
QVQLQESGGGLVQAGGSLRLSCAASGTISLANDMGWYRQAPGKERELVASISNGGSTNYADSVKGRFTISRDNAKNTVYLQMNSLKPEDTAVYYCAVGGRRQSRYAYAHQYWGQGTQVTVSS

SEQ ID NO: 8573 - protein, 117 aa, Artificial Sequence
  Chemically Synthesized
QVQLQESGGGLVQAGGSLRLSCAASGYISPQDYMGWYRQAPGKERELVAAIGLGTTYYADSVKGRFTISRDNAKNTVYLQMNSLKPEDTAVYYCAVRYLYYSLLTYWGQGTQVTVSS

SEQ ID NO: 8574 - protein, 121 aa, Artificial Sequence
  Chemically Synthesized
QVQLQESGGGLVQAGGSLRLSCAASGSISSSLMGWYRQAPGKEREFVAAIGYGASTNYADSVKGRFTISRDNAKNTVYLQMNSLKPEDTAVYYCAAWPIISGGILEVYSYWGQGTQVTVSS

SEQ ID NO: 8575 - protein, 112 aa, Artificial Sequence
  Chemically Synthesized
QVQLQESGGGLVQAGGSLRLSCAASGSISSVRMGWYRQAPGKERELVAVLLPYADSVKGRFTISRDNAKNTVYLQMNSLKPEDTAVYYCAAVRLIYWPHSYWGQGTQVTVSS

SEQ ID NO: 8576 - protein, 126 aa, Artificial Sequence
  Chemically Synthesized
QVQLQESGGGLVQAGGSLRLSCAASGTISRWRYMGWYRQAPGKEREFVATIGRGGNTNYADSVKGRFTISRDNAKNTVYLQMNSLKPEDTAVYYCAALRIAWTSSNRYDYPLHRYWGQGTQVTVSS

SEQ ID NO: 8577 - protein, 120 aa, Artificial Sequence
  Chemically Synthesized
QVQLQESGGGLVQAGGSLRLSCAASGNISVRTTMGWYRQAPGKEREFVAGIAGGTSTYADSVKGRFTISRDNAKNTVYLQMNSLKPEDTAVYYCAVTTVITRLVLTTMYWGQGTQVTVSS

SEQ ID NO: 8578 - protein, 122 aa, Artificial Sequence
  Chemically Synthesized
QVQLQESGGGLVQAGGSLRLSCAASGSISFIHVMGWYRQAPGKERELVASIGSGGSTNYADSVKGRFTISRDNAKNTVYLQMNSLKPEDTAVYYCAVGVYYRYAPRADHDYWGQGTQVTVSS

SEQ ID NO: 8579 - protein, 122 aa, Artificial Sequence
  Chemically Synthesized
QVQLQESGGGLVQAGGSLRLSCAASGSIFHRDYMGWYRQAPGKERELVATIGIGTSTNYADSVKGRFTISRDNAKNTVYLQMNSLKPEDTAVYYCAVLAQGRAYEDDVHPYWGQGTQVTVSS

SEQ ID NO: 8580 - protein, 116 aa, Artificial Sequence
  Chemically Synthesized
QVQLQESGGGLVQAGGSLRLSCAASGTISDYTMGWYRQAPGKEREFVASIGRGSTTYYADSVKGRFTISRDNAKNTVYLQMNSLKPEDTAVYYCAAYLWYYAYAYWGQGTQVTVSS

SEQ ID NO: 8581 - protein, 117 aa, Artificial Sequence
  Chemically Synthesized
QVQLQESGGGLVQAGGSLRLSCAASGSIFDGAYMGWYRQAPGKEREFVAAIAVGASTYYADSVKGRFTISRDNAKNTVYLQMNSLKPEDTAVYYCAVRYNPYSLIYWGQGTQVTVSS

SEQ ID NO: 8582 - protein, 118 aa, Artificial Sequence
  Chemically Synthesized
QVQLQESGGGLVQAGGSLRLSCAASGSIFGTIPMGWYRQAPGKERELVAGIAGGTITYYADSVKGRFTISRDNAKNTVYLQMNSLKPEDTAVYYCAVWDAGTGTLAYWGQGTQVTVSS

SEQ ID NO: 8583 - protein, 126 aa, Artificial Sequence
  Chemically Synthesized
QVQLQESGGGLVQAGGSLRLSCAASGYIFRNRYMGWYRQAPGKERELVATIDQGTTTYYADSVKGRFTISRDNAKNTVYLQMNSLKPEDTAVYYCAAPWHVYTLARVWGTIYFGYWGQGTQVTVSS

SEQ ID NO: 8584 - protein, 118 aa, Artificial Sequence
  Chemically Synthesized
QVQLQESGGGLVQAGGSLRLSCAASGNIFLYDTMGWYRQAPGKEREFVASINFGTSTNYADSVKGRFTISRDNAKNTVYLQMNSLKPEDTAVYYCAAYAPDSTDYPYWGQGTQVTVSS

SEQ ID NO: 8585 - protein, 120 aa, Artificial Sequence
  Chemically Synthesized
QVQLQESGGGLVQAGGSLRLSCAASGSISGAMGWYRQAPGKERELVASISDGTSTYYADSVKGRFTISRDNAKNTVYLQMNSLKPEDTAVYYCAVVSNGRSLDYVNHWYWGQGTQVTVSS

SEQ ID NO: 8586 - protein, 121 aa, Artificial Sequence
  Chemically Synthesized
QVQLQESGGGLVQAGGSLRLSCAASGSISEWQDMGWYRQAPGKERELVATIGQGGTTNYADSVKGRFTISRDNAKNTVYLQMNSLKPEDTAVYYCAVDTYHNVYTEPHLYWGQGTQVTVSS

SEQ ID NO: 8587 - protein, 118 aa, Artificial Sequence
  Chemically Synthesized
QVQLQESGGGLVQAGGSLRLSCAASGNISNQGRMGWYRQAPGKERELVATIGSGTITYYADSVKGRFTISRDNAKNTVYLQMNSLKPEDTAVYYCAVYTAGFSKLYYWGQGTQVTVSS

SEQ ID NO: 8588 - protein, 117 aa, Artificial Sequence
  Chemically Synthesized
QVQLQESGGGLVQAGGSLRLSCAASGNISSTFMGWYRQAPGKEREFVAAIAYGAITYYADSVKGRFTISRDNAKNTVYLQMNSLKPEDTAVYYCAAVLHWRDVFRYWGQGTQVTVSS

SEQ ID NO: 8589 - protein, 118 aa, Artificial Sequence
  Chemically Synthesized
QVQLQESGGGLVQAGGSLRLSCAASGYIFYYYYMGWYRQAPGKEREFVAGISDGGITYYADSVKGRFTISRDNAKNTVYLQMNSLKPEDTAVYYCAVDYSDDSPLGYWGQGTQVTVSS

SEQ ID NO: 8590 - protein, 117 aa, Artificial Sequence
  Chemically Synthesized
QVQLQESGGGLVQAGGSLRLSCAASGTIFAEHMGWYRQAPGKERELVAAITWGAITNYADSVKGRFTISRDNAKNTVYLQMNSLKPEDTAVYYCAALQYADTDYGYWGQGTQVTVSS

SEQ ID NO: 8591 - protein, 122 aa, Artificial Sequence
  Chemically Synthesized
QVQLQESGGGLVQAGGSLRLSCAASGSISNTRYMGWYRQAPGKERELVASIAYGGNTNYADSVKGRFTISRDNAKNTVYLQMNSLKPEDTAVYYCAVRPRNTTRTIFGLPYWGQGTQVTVSS

SEQ ID NO: 8592 - protein, 118 aa, Artificial Sequence
  Chemically Synthesized
QVQLQESGGGLVQAGGSLRLSCAASGTISGIFYMGWYRQAPGKERELVAAISSGASTYYADSVKGRFTISRDNAKNTVYLQMNSLKPEDTAVYYCAAGFYSAIYYYYWGQGTQVTVSS

SEQ ID NO: 8593 - protein, 125 aa, Artificial Sequence
  Chemically Synthesized
QVQLQESGGGLVQAGGSLRLSCAASGNISDTSYMGWYRQAPGKERELVATIDDGGTTNYADSVKGRFTISRDNAKNTVYLQMNSLKPEDTAVYYCAAQGVNILQFIHPFIYHWYWGQGTQVTVSS

SEQ ID NO: 8594 - protein, 121 aa, Artificial Sequence
  Chemically Synthesized
QVQLQESGGGLVQAGGSLRLSCAASGTISYRPYMGWYRQAPGKERELVAGITEGGSTNYADSVKGRFTISRDNAKNTVYLQMNSLKPEDTAVYYCAAASKTYYYVSTFLYWGQGTQVTVSS

SEQ ID NO: 8595 - protein, 122 aa, Artificial Sequence
  Chemically Synthesized
QVQLQESGGGLVQAGGSLRLSCAASGTIFRDVTMGWYRQAPGKEREFVATINDGAITYYADSVKGRFTISRDNAKNTVYLQMNSLKPEDTAVYYCAADDDRDNIGQADLYYWGQGTQVTVSS

SEQ ID NO: 8596 - protein, 118 aa, Artificial Sequence
  Chemically Synthesized
QVQLQESGGGLVQAGGSLRLSCAASGSISFGTWMGWYRQAPGKERELVAAINNGSNTNYADSVKGRFTISRDNAKNTVYLQMNSLKPEDTAVYYCAVTQGQYLYHFYWGQGTQVTVSS

SEQ ID NO: 8597 - protein, 121 aa, Artificial Sequence
  Chemically Synthesized
QVQLQESGGGLVQAGGSLRLSCAASGYISSVADMGWYRQAPGKERELVAGIDTGTSTNYADSVKGRFTISRDNAKNTVYLQMNSLKPEDTAVYYCAATRTTYDYHIYLYYWGQGTQVTVSS

SEQ ID NO: 8598 - protein, 118 aa, Artificial Sequence
  Chemically Synthesized
QVQLQESGGGLVQAGGSLRLSCAASGYIFDPSYMGWYRQAPGKERELVATISGGGITNYADSVKGRFTISRDNAKNTVYLQMNSLKPEDTAVYYCAALLWRYSGFVYWGQGTQVTVSS

SEQ ID NO: 8599 - protein, 118 aa, Artificial Sequence
  Chemically Synthesized
QVQLQESGGGLVQAGGSLRLSCAASGSIFDTHGMGWYRQAPGKERELVAGIDHGATTNYADSVKGRFTISRDNAKNTVYLQMNSLKPEDTAVYYCAVPYTTVPEHFYWGQGTQVTVSS

SEQ ID NO: 8600 - protein, 118 aa, Artificial Sequence
  Chemically Synthesized
QVQLQESGGGLVQAGGSLRLSCAASGSIFLRIPMGWYRQAPGKEREFVAAISGGTITYYADSVKGRFTISRDNAKNTVYLQMNSLKPEDTAVYYCAVYLYPIIGHSYWGQGTQVTVSS

SEQ ID NO: 8601 - protein, 118 aa, Artificial Sequence
  Chemically Synthesized
QVQLQESGGGLVQAGGSLRLSCAASGNIFGYGYMGWYRQAPGKEREFVAAIDSGSITNYADSVKGRFTISRDNAKNTVYLQMNSLKPEDTAVYYCAVRPRYWIRFSYWGQGTQVTVSS

SEQ ID NO: 8602 - protein, 122 aa, Artificial Sequence
  Chemically Synthesized
QVQLQESGGGLVQAGGSLRLSCAASGTISYNVAMGWYRQAPGKERELVAAIDGGTITNYADSVKGRFTISRDNAKNTVYLQMNSLKPEDTAVYYCAVDWDTGVHFPLLLAYWGQGTQVTVSS

SEQ ID NO: 8603 - protein, 118 aa, Artificial Sequence
  Chemically Synthesized
QVQLQESGGGLVQAGGSLRLSCAASGTISYRSYMGWYRQAPGKEREFVAAISSGSNTYYADSVKGRFTISRDNAKNTVYLQMNSLKPEDTAVYYCAAEVADQRWHTYWGQGTQVTVSS

SEQ ID NO: 8604 - protein, 111 aa, Artificial Sequence
  Chemically Synthesized
QVQLQESGGGLVQAGGSLRLSCAASGSISRKPYMGWYRQAPGKEREFVAGISYGTTTNYADSVKGRFTISRDNAKNTVYLQMNSLKPEDTAVYYCASTLYWGQGTQVTVSS

SEQ ID NO: 8605 - protein, 121 aa, Artificial Sequence
  Chemically Synthesized
QVQLQESGGGLVQAGGSLRLSCAASGSISSADGMGWYRQAPGKEREFVAGISRGGTTYYADSVKGRFTISRDNAKNTVYLQMNSLKPEDTAVYYCAARTNADVDISNRFYWGQGTQVTVSS

SEQ ID NO: 8606 - protein, 118 aa, Artificial Sequence
  Chemically Synthesized
QVQLQESGGGLVQAGGSLRLSCAASGTIFWLADMGWYRQAPGKEREFVAGINDGTNTNYADSVKGRFTISRDNAKNTVYLQMNSLKPEDTAVYYCAVGDWADVADIYWGQGTQVTVSS

SEQ ID NO: 8607 - protein, 118 aa, Artificial Sequence
  Chemically Synthesized
QVQLQESGGGLVQAGGSLRLSCAASGNISYLFYMGWYRQAPGKERELVASITAGGNTNYADSVKGRFTISRDNAKNTVYLQMNSLKPEDTAVYYCAAYNGDWDGHGYWGQGTQVTVSS

SEQ ID NO: 8608 - protein, 121 aa, Artificial Sequence
  Chemically Synthesized
QVQLQESGGGLVQAGGSLRLSCAASGNISAQYGMGWYRQAPGKEREFVASIADGTSTNYADSVKGRFTISRDNAKNTVYLQMNSLKPEDTAVYYCAAYSVTTSLRVTTIYWGQGTQVTVSS

SEQ ID NO: 8609 - protein, 122 aa, Artificial Sequence
  Chemically Synthesized
QVQLQESGGGLVQAGGSLRLSCAASGYISYRENMGWYRQAPGKEREFVASITGGGTTYYADSVKGRFTISRDNAKNTVYLQMNSLKPEDTAVYYCAVLNHYYDPARTRHLYWGQGTQVTVSS

SEQ ID NO: 8610 - protein, 125 aa, Artificial Sequence
  Chemically Synthesized
QVQLQESGGGLVQAGGSLRLSCAASGNISRYDYMGWYRQAPGKEREFVATIDSVVLPYADSVKGRFTISRDNAKNTVYLQMNSLKPEDTAVYYCAVTDQEDQSGYALDGDYFPYWGQGTQVTVSS

SEQ ID NO: 8611 - protein, 118 aa, Artificial Sequence
  Chemically Synthesized
QVQLQESGGGLVQAGGSLRLSCAASGYISHYPWMGWYRQAPGKEREFVAAINDGASTNYADSVKGRFTISRDNAKNTVYLQMNSLKPEDTAVYYCAVYIRRPYLHYYWGQGTQVTVSS

SEQ ID NO: 8612 - protein, 118 aa, Artificial Sequence
  Chemically Synthesized
QVQLQESGGGLVQAGGSLRLSCAASGNISGTEYMGWYRQAPGKEREFVAAITEGATTYYADSVKGRFTISRDNAKNTVYLQMNSLKPEDTAVYYCAVADYEQNAHQYWGQGTQVTVSS

SEQ ID NO: 8613 - protein, 122 aa, Artificial Sequence
  Chemically Synthesized
QVQLQESGGGLVQAGGSLRLSCAASGYIFPHPGMGWYRQAPGKEREFVAGIGNGASTNYADSVKGRFTISRDNAKNTVYLQMNSLKPEDTAVYYCAVVTPYDDYEWREYDYWGQGTQVTVSS

SEQ ID NO: 8614 - protein, 118 aa, Artificial Sequence
  Chemically Synthesized
QVQLQESGGGLVQAGGSLRLSCAASGTIFVGRDMGWYRQAPGKERELVASISDGGITYYADSVKGRFTISRDNAKNTVYLQMNSLKPEDTAVYYCAAWYVSYQSHYYWGQGTQVTVSS

SEQ ID NO: 8615 - protein, 118 aa, Artificial Sequence
  Chemically Synthesized
QVQLQESGGGLVQAGGSLRLSCAASGTIFVDIYMGWYRQAPGKEREFVATIAFGTTTYYADSVKGRFTISRDNAKNTVYLQMNSLKPEDTAVYYCAARYYEREPYSYWGQGTQVTVSS

SEQ ID NO: 8616 - protein, 123 aa, Artificial Sequence
  Chemically Synthesized
QVQLQESGGGLVQAGGSLRLSCAASGNISRDWTMGWYRQAPGKERELVAAITKGSSTYYADSVKGRFTISRDNAKNTVYLQMNSLKPEDTAVYYCAADGRDIYWYPRRYHRYWGQGTQVTVSS

SEQ ID NO: 8617 - protein, 118 aa, Artificial Sequence
  Chemically Synthesized
QVQLQESGGGLVQAGGSLRLSCAASGTISGGVDMGWYRQAPGKEREFVASIGTGGSTNYADSVKGRFTISRDNAKNTVYLQMNSLKPEDTAVYYCAADYVWYLQLAYWGQGTQVTVSS

SEQ ID NO: 8618 - protein, 122 aa, Artificial Sequence
  Chemically Synthesized
QVQLQESGGGLVQAGGSLRLSCAASGNIFRFYDMGWYRQAPGKERELVAGITSGTSTNYADSVKGRFTISRDNAKNTVYLQMNSLKPEDTAVYYCAADDYAASSGYTVFDYWGQGTQVTVSS

SEQ ID NO: 8619 - protein, 123 aa, Artificial Sequence
  Chemically Synthesized
QVQLQESGGGLVQAGGSLRLSCAASGNIFGGVGMGWYRQAPGKEREFVAGIGSGGSTYYADSVKGRFTISRDNAKNTVYLQMNSLKPEDTAVYYCAVIRWAVVLSRARYYRYWGQGTQVTVSS

SEQ ID NO: 8620 - protein, 117 aa, Artificial Sequence
  Chemically Synthesized
QVQLQESGGGLVQAGGSLRLSCAASGTIFRYPYMGWYRQAPGKERELVAAIDDGSSTNYADSVKGRFTISRDNAKNTVYLQMNSLKPEDTAVYYCAALMVSTCTFYWGQGTQVTVSS

SEQ ID NO: 8621 - protein, 126 aa, Artificial Sequence
  Chemically Synthesized
QVQLQESGGGLVQAGGSLRLSCAASGTIFDTALMGWYRQAPGKEREFVAAIADGGSTYYADSVKGRFTISRDNAKNTVYLQMNSLKPEDTAVYYCAVYARADIASDNGPVATYGYWGQGTQVTVSS

SEQ ID NO: 8622 - protein, 122 aa, Artificial Sequence
  Chemically Synthesized
QVQLQESGGGLVQAGGSLRLSCAASGYIFDDYDMGWYRQAPGKEREFVASIGVGTNTYYADSVKGRFTISRDNAKNTVYLQMNSLKPEDTAVYYCAADYTYRRSSPDELRYWGQGTQVTVSS

SEQ ID NO: 8623 - protein, 118 aa, Artificial Sequence
  Chemically Synthesized
QVQLQESGGGLVQAGGSLRLSCAASGTISERGAMGWYRQAPGKERELVASIGPGAITYYADSVKGRFTISRDNAKNTVYLQMNSLKPEDTAVYYCAAGYGGYDDYWYWGQGTQVTVSS

SEQ ID NO: 8624 - protein, 118 aa, Artificial Sequence
  Chemically Synthesized
QVQLQESGGGLVQAGGSLRLSCAASGNISGTGEMGWYRQAPGKEREFVAAIDAGATTNYADSVKGRFTISRDNAKNTVYLQMNSLKPEDTAVYYCAVYRFGYSLFGYWGQGTQVTVSS

SEQ ID NO: 8625 - protein, 118 aa, Artificial Sequence
  Chemically Synthesized
QVQLQESGGGLVQAGGSLRLSCAASGTISYGESMGWYRQAPGKEREFVASITSGGNTNYADSVKGRFTISRDNAKNTVYLQMNSLKPEDTAVYYCAVGLHGYYYHGYWGQGTQVTVSS

SEQ ID NO: 8626 - protein, 118 aa, Artificial Sequence
  Chemically Synthesized
QVQLQESGGGLVQAGGSLRLSCAASGNISIRHDMGWYRQAPGKERELVAGIDAGGSTNYADSVKGRFTISRDNAKNTVYLQMNSLKPEDTAVYYCAVDDLIWSDHYYWGQGTQVTVSS

SEQ ID NO: 8627 - protein, 118 aa, Artificial Sequence
  Chemically Synthesized
QVQLQESGGGLVQAGGSLRLSCAASGYISWRHTMGWYRQAPGKERELVATITWGGTTNYADSVKGRFTISRDNAKNTVYLQMNSLKPEDTAVYYCAVYNRWYLSHYYWGQGTQVTVSS

SEQ ID NO: 8628 - protein, 118 aa, Artificial Sequence
  Chemically Synthesized
QVQLQESGGGLVQAGGSLRLSCAASGNIFQSWRMGWYRQAPGKEREFVASIGFGSNTYYADSVKGRFTISRDNAKNTVYLQMNSLKPEDTAVYYCAVDGPLVYFHGYWGQGTQVTVSS

SEQ ID NO: 8629 - protein, 118 aa, Artificial Sequence
  Chemically Synthesized
QVQLQESGGGLVQAGGSLRLSCAASGSIFYRRDMGWYRQAPGKEREFVAGISRGSSTYYADSVKGRFTISRDNAKNTVYLQMNSLKPEDTAVYYCAVYPYYVRGHGYWGQGTQVTVSS

SEQ ID NO: 8630 - protein, 118 aa, Artificial Sequence
  Chemically Synthesized
QVQLQESGGGLVQAGGSLRLSCAASGTIFARVNMGWYRQAPGKEREFVAGIDYGSSTYYADSVKGRFTISRDNAKNTVYLQMNSLKPEDTAVYYCAVPRPSTGYHLYWGQGTQVTVSS

SEQ ID NO: 8631 - protein, 122 aa, Artificial Sequence
  Chemically Synthesized
QVQLQESGGGLVQAGGSLRLSCAASGTIFSAIYMGWYRQAPGKEREFVAAISKGASTNYADSVKGRFTISRDNAKNTVYLQMNSLKPEDTAVYYCAAYSDIYTYNRDYFPYWGQGTQVTVSS

SEQ ID NO: 8632 - protein, 118 aa, Artificial Sequence
  Chemically Synthesized
QVQLQESGGGLVQAGGSLRLSCAASGNISRRGTMGWYRQAPGKEREFVAAIAYGSNTYYADSVKGRFTISRDNAKNTVYLQMNSLKPEDTAVYYCAVVYAYYRDLYYWGQGTQVTVSS

SEQ ID NO: 8633 - protein, 121 aa, Artificial Sequence
  Chemically Synthesized
QVQLQESGGGLVQAGGSLRLSCAASGTISRYLRMGWYRQAPGKERELVASIAKGATTNYADSVKGRFTISRDNAKNTVYLQMNSLKPEDTAVYYCAATYAGRPSLHDYYYWGQGTQVTVSS

SEQ ID NO: 8634 - protein, 121 aa, Artificial Sequence
  Chemically Synthesized
QVQLQESGGGLVQAGGSLRLSCAASGSIFTYLMGWYRQAPGKERELVATIDAGANTNYADSVKGRFTISRDNAKNTVYLQMNSLKPEDTAVYYCAVDVQPLYDAIYSLDYWGQGTQVTVSS

SEQ ID NO: 8635 - protein, 110 aa, Artificial Sequence
  Chemically Synthesized
QVQLQESGGGLVQAGGSLRLSCAASGTISYSGDMGWYRQAPGKEREFVATIGYGANTYYADSVKGRFTISRDNAKNTVYLQMNSLKPEDTAVYYCAVAYWGQGTQVTVSS

SEQ ID NO: 8636 - protein, 118 aa, Artificial Sequence
  Chemically Synthesized
QVQLQESGGGLVQAGGSLRLSCAASGYIFTTGLMGWYRQAPGKERELVAGIAYGGNTNYADSVKGRFTISRDNAKNTVYLQMNSLKPEDTAVYYCAVTYGDHYVHPYWGQGTQVTVSS

SEQ ID NO: 8637 - protein, 118 aa, Artificial Sequence
  Chemically Synthesized
QVQLQESGGGLVQAGGSLRLSCAASGYISAYGYMGWYRQAPGKEREFVAGITWGGTTNYADSVKGRFTISRDNAKNTVYLQMNSLKPEDTAVYYCAVYTLLRYLHPYWGQGTQVTVSS

SEQ ID NO: 8638 - protein, 113 aa, Artificial Sequence
  Chemically Synthesized
QVQLQESGGGLVQAGGSLRLSCAASGNISFVSDMGWYRQAPGKERELVAAISYGTNTYYADSVKGRFTISRDNAKNTVYLQMNSLKPEDTAVYYCAVLRPSYWGQGTQVTVSS

SEQ ID NO: 8639 - protein, 122 aa, Artificial Sequence
  Chemically Synthesized
QVQLQESGGGLVQAGGSLRLSCAASGSISYWPRMGWYRQAPGKEREFVAGITYGTTTNYADSVKGRFTISRDNAKNTVYLQMNSLKPEDTAVYYCAVPWQQDVNPVPIYPYWGQGTQVTVSS

SEQ ID NO: 8640 - protein, 118 aa, Artificial Sequence
  Chemically Synthesized
QVQLQESGGGLVQAGGSLRLSCAASGYISRLDKMGWYRQAPGKERELVASINYGTITYYADSVKGRFTISRDNAKNTVYLQMNSLKPEDTAVYYCAVRLIGYRAHSYWGQGTQVTVSS

SEQ ID NO: 8641 - protein, 122 aa, Artificial Sequence
  Chemically Synthesized
QVQLQESGGGLVQAGGSLRLSCAASGSFLTLMGWYRQAPGKERELVASIAVGTTTYYADSVKGRFTISRDNAKNTVYLQMNSLKPEDTAVYYCAAYYYGDGDDSDYFFFQYWGQGTQVTVSS

SEQ ID NO: 8642 - protein, 115 aa, Artificial Sequence
  Chemically Synthesized
QVQLQESGGGLVQAGGSLRLSCAASGNISYYDRMGWYRQAPGKERELLPLLVMVLLPYADSVKGRFTISRDNAKNTVYLQMNSLKPEDTAVYYCAVDLPYGFAYWGQGTQVTVSS

SEQ ID NO: 8643 - protein, 126 aa, Artificial Sequence
  Chemically Synthesized
QVQLQESGGGLVQAGGSLRLSCAASGTISVVDYMGWYRQAPGKERELVAGIDYGAKYQYADSVKGRFTISRDNAKNTVYLQMNSLKPEDTAVYYCAVIHRPYVRYPYGRERYFDYWGQGTQVTVSS

SEQ ID NO: 8644 - protein, 118 aa, Artificial Sequence
  Chemically Synthesized
QVQLQESGGGLVQAGGSLRLSCAASGTIFIRRVMGWYRQAPGKERELVAGITYGGNTYYADSVKGRFTISRDNAKNTVYLQMNSLKPEDTAVYYCAAESRWYNYHSYWGQGTQVTVSS

SEQ ID NO: 8645 - protein, 118 aa, Artificial Sequence
  Chemically Synthesized
QVQLQESGGGLVQAGGSLRLSCAASGYIFRYRHMGWYRQAPGKERELVAAIGYGATTNYADSVKGRFTISRDNAKNTVYLQMNSLKPEDTAVYYCAVWRYIYDYHQYWGQGTQVTVSS

SEQ ID NO: 8646 - protein, 126 aa, Artificial Sequence
  Chemically Synthesized
QVQLQESGGGLVQAGGSLRLSCAASGNISYGQDMGWYRQAPGKEREFVATISVGGNTNYADSVKGRFTISRDNAKNTVYLQMNSLKPEDTAVYYCAAVTYLSRYQWRIWKADHQYWGQGTQVTVSS

SEQ ID NO: 8647 - protein, 121 aa, Artificial Sequence
  Chemically Synthesized
QVQLQESGGGLVQAGGSLRLSCAASGSISQAGYMGWYRQAPGKEREFVAAIDAGATTNYADSVKGRFTISRDNAKNTVYLQMNSLKPEDTAVYYCAVAGAVGSTSVVVFYWGQGTQVTVSS

SEQ ID NO: 8648 - protein, 125 aa, Artificial Sequence
  Chemically Synthesized
QVQLQESGGGLVQAGGSLRLSCAASGNIFARSIMGWYRQAPGKEREFVATINTGTTTYYADSVKGRFTISRDNAKNTVYLQMNSLKPEDTAVYYCAANEVFGPGTATVGLRRMYWGQGTQVTVSS

SEQ ID NO: 8649 - protein, 119 aa, Artificial Sequence
  Chemically Synthesized
QVQLQESGGGLVQAGGSLRLSCAASGTIFALRTKMGWYRQAPGKERELVATISNGTSTYYADSVKGRFTISRDNAKNTVYLQMNSLKPEDTAVYYCAVLHAYDTPYYYWGQGTQVTVSS

SEQ ID NO: 8650 - protein, 122 aa, Artificial Sequence
  Chemically Synthesized
QVQLQESGGGLVQAGGSLRLSCAASGTISNITGMGWYRQAPGKEREFVAGIASGTTTYYADSVKGRFTISRDNAKNTVYLQMNSLKPEDTAVYYCAAVYDYRPYRTAVHRYWGQGTQVTVSS

SEQ ID NO: 8651 - protein, 109 aa, Artificial Sequence
  Chemically Synthesized
QVQLQESGGGLVQAGGSLRLSCAASGTIFRTDYMGWYRQAPGKEREFVATINAGVIPYADSVKGRFTISRDNAKNTVYLQMNSLKPEDTAVYYCAVWYWGQGTQVTVSS

SEQ ID NO: 8652 - protein, 118 aa, Artificial Sequence
  Chemically Synthesized
QVQLQESGGGLVQAGGSLRLSCAASGNIFEVRFMGWYRQAPGKERELVAGIGYGGITYYADSVKGRFTISRDNAKNTVYLQMNSLKPEDTAVYYCAVRAYVGDFHFYWGQGTQVTVSS

SEQ ID NO: 8653 - protein, 117 aa, Artificial Sequence
  Chemically Synthesized
QVQLQESGGGLVQAGGSLRLSCAASGNIFFPFYMGWYRQAPGKERELVASIGYGAITYYADSVKGRFTISRDNAKNTVYLQMNSLKPEDTAVYYCAVTFSSSGTFYWGQGTQVTVSS

SEQ ID NO: 8654 - protein, 118 aa, Artificial Sequence
  Chemically Synthesized
QVQLQESGGGLVQAGGSLRLSCAASGTISRYVDMGWYRQAPGKEREFVATIGTGGITYYADSVKGRFTISRDNAKNTVYLQMNSLKPEDTAVYYCAADHRYLLDYYYWGQGTQVTVSS

SEQ ID NO: 8655 - protein, 121 aa, Artificial Sequence
  Chemically Synthesized
QVQLQESGGGLVQAGGSLRLSCAASGSISDIDFMGWYRQAPGKERELVAAIDGGTSTNYADSVKGRFTISRDNAKNTVYLQMNSLKPEDTAVYYCAVRPFNYDSLTTTIYWGQGTQVTVSS

SEQ ID NO: 8656 - protein, 117 aa, Artificial Sequence
  Chemically Synthesized
QVQLQESGGGLVQAGGSLRLSCAASGSIFALYYMGWYRQAPGKERELVAAIGDGLLPYADSVKGRFTISRDNAKNTVYLQMNSLKPEDTAVYYCAAYGSHWTYHYYWGQGTQVTVSS

SEQ ID NO: 8657 - protein, 126 aa, Artificial Sequence
  Chemically Synthesized
QVQLQESGGGLVQAGGSLRLSCAASGTISRPDKMGWYRQAPGKEREFVASIGYGGTTYYADSVKGRFTISRDNAKNTVYLQMNSLKPEDTAVYYCAVVDAYRAGRWWKGYFQFAYWGQGTQVTVSS

SEQ ID NO: 8658 - protein, 117 aa, Artificial Sequence
  Chemically Synthesized
QVQLQESGGGLVQAGGSLRLSCAASGIFLTTTMGWYRQAPGKEREFVAAINYGGTTYYADSVKGRFTISRDNAKNTVYLQMNSLKPEDTAVYYCAAGIPYPFYLGYWGQGTQVTVSS

SEQ ID NO: 8659 - protein, 117 aa, Artificial Sequence
  Chemically Synthesized
QVQLQESGGGLVQAGGSLRLSCAASGTISYDYYMGWYRQAPGKERELVAAISYGGTTYYADSVKGRFTISRDNAKNTVYLQMNSLKPEDTAVYYCAAASLTTTLLYWGQGTQVTVSS

SEQ ID NO: 8660 - protein, 122 aa, Artificial Sequence
  Chemically Synthesized
QVQLQESGGGLVQAGGSLRLSCAASGTIFYSDTMGWYRQAPGKEREFVATIAVGAITYYADSVKGRFTISRDNAKNTVYLQMNSLKPEDTAVYYCAVGFPDRLYDLQTYQYWGQGTQVTVSS

SEQ ID NO: 8661 - protein, 118 aa, Artificial Sequence
  Chemically Synthesized
QVQLQESGGGLVQAGGSLRLSCAASGTIFYRGYMGWYRQAPGKERELVASITYGGITYYADSVKGRFTISRDNAKNTVYLQMNSLKPEDTAVYYCAVYRSQTGYHVYWGQGTQVTVSS

SEQ ID NO: 8662 - protein, 118 aa, Artificial Sequence
  Chemically Synthesized
QVQLQESGGGLVQAGGSLRLSCAASGYISPLALMGWYRQAPGKEREFVAAISVGSITNYADSVKGRFTISRDNAKNTVYLQMNSLKPEDTAVYYCAAATNAYYIYAYWGQGTQVTVSS

SEQ ID NO: 8663 - protein, 117 aa, Artificial Sequence
  Chemically Synthesized
QVQLQESGGGLVQAGGSLRLSCAASGNISSFRYMGWYRQAPGKERELVAGITPGTSTYADSVKGRFTISRDNAKNTVYLQMNSLKPEDTAVYYCAVAWNTDRLYDYWGQGTQVTVSS

SEQ ID NO: 8664 - protein, 126 aa, Artificial Sequence
  Chemically Synthesized
QVQLQESGGGLVQAGGSLRLSCAASGSISWADDMGWYRQAPGKEREFVATIAYGSSTNYADSVKGRFTISRDNAKNTVYLQMNSLKPEDTAVYYCAVTPDNTTYTPLHKTILLGYWGQGTQVTVSS

SEQ ID NO: 8665 - protein, 126 aa, Artificial Sequence
  Chemically Synthesized
QVQLQESGGGLVQAGGSLRLSCAASGYISSDPFMGWYRQAPGKERELVASITDGSNTYYADSVKGRFTISRDNAKNTVYLQMNSLKPEDTAVYYCAAYYIVDEDGEDTTATFLGYWGQGTQVTVSS

SEQ ID NO: 8666 - protein, 118 aa, Artificial Sequence
  Chemically Synthesized
QVQLQESGGGLVQAGGSLRLSCAASGSISTPLVMGWYRQAPGKERELVAAIDRGGNTYYADSVKGRFTISRDNAKNTVYLQMNSLKPEDTAVYYCAANTYYSTRHPYWGQGTQVTVSS

SEQ ID NO: 8667 - protein, 117 aa, Artificial Sequence
  Chemically Synthesized
QVQLQESGGGLVQAGGSLRLSCAASGNISYTRFMGWYRQAPGKEREFVAGIRWYYYLYADSVKGRFTISRDNAKNTVYLQMNSLKPEDTAVYYCAVTSYAVIQHGYWGQGTQVTVSS

SEQ ID NO: 8668 - protein, 118 aa, Artificial Sequence
  Chemically Synthesized
QVQLQESGGGLVQAGGSLRLSCAASGYISPTGDMGWYRQAPGKEREFVASIGPGAITNYADSVKGRFTISRDNAKNTVYLQMNSLKPEDTAVYYCAAYYSSFTQHGYWGQGTQVTVSS

SEQ ID NO: 8669 - protein, 121 aa, Artificial Sequence
  Chemically Synthesized
QVQLQESGGGLVQAGGSLRLSCAASGTIFVLYTMGWYRQAPGKERELVATISSGGITNYADSVKGRFTISRDNAKNTVYLQMNSLKPEDTAVYYCAANRSIASSVTTLLYWGQGTQVTVSS

SEQ ID NO: 8670 - protein, 115 aa, Artificial Sequence
  Chemically Synthesized
QVQLQESGGGLVQAGGSLRLSCAASGYISLNTDMGWYRQAPGKEREFVAAIAYGATTNYADSVKGRFTISRDNAKNTVYLQMNSLKPEDTAVYYCAAIQWSYLYWGQGTQVTVSS

SEQ ID NO: 8671 - protein, 117 aa, Artificial Sequence
  Chemically Synthesized
QVQLQESGGGLVQAGGSLRLSCAASGYISGLSRMGWYRQAPGKEREFVAAIAAGATTNYADSVKGRFTISRDNAKNTVYLQMNSLKPEDTAVYYCAAYRLSLLNLYWGQGTQVTVSS

SEQ ID NO: 8672 - protein, 117 aa, Artificial Sequence
  Chemically Synthesized
QVQLQESGGGLVQAGGSLRLSCAASGTISDDAYMGWYRQAPGKEREFVAGITEGGTTNYADSVKGRFTISRDNAKNTVYLQMNSLKPEDTAVYYCAAYTNGYAHPYWGQGTQVTVSS

SEQ ID NO: 8673 - protein, 122 aa, Artificial Sequence
  Chemically Synthesized
QVQLQESGGGLVQAGGSLRLSCAASGTIFVNWDMGWYRQAPGKERELVATIGVGGSTYYADSVKGRFTISRDNAKNTVYLQMNSLKPEDTAVYYCAVEYFWDYRDGYDHTYWGQGTQVTVSS

SEQ ID NO: 8674 - protein, 121 aa, Artificial Sequence
  Chemically Synthesized
QVQLQESGGGLVQAGGSLRLSCAASGSISDNTGMGWYRQAPGKEREFVATIGSVLIPYADSVKGRFTISRDNAKNTVYLQMNSLKPEDTAVYYCAVYPPQYSFTLDDLAYWGQGTQVTVSS

SEQ ID NO: 8675 - protein, 118 aa, Artificial Sequence
  Chemically Synthesized
QVQLQESGGGLVQAGGSLRLSCAASGNIFDQDLMGWYRQAPGKERELVAAITFGGSTNYADSVKGRFTISRDNAKNTVYLQMNSLKPEDTAVYYCAALTNVAPGFAYWGQGTQVTVSS

SEQ ID NO: 8676 - protein, 121 aa, Artificial Sequence
  Chemically Synthesized
QVQLQESGGGLVQAGGSLRLSCAASGSISSNYMGWYRQAPGKERELVASINYGANTNYADSVKGRFTISRDNAKNTVYLQMNSLKPEDTAVYYCAAITGRSPEWYDTHIYWGQGTQVTVSS

SEQ ID NO: 8677 - protein, 118 aa, Artificial Sequence
  Chemically Synthesized
QVQLQESGGGLVQAGGSLRLSCAASGYRLMGWYRQAPGKEREFVASITITYYADSVKGRFTISRDNAKNTVYLQMNSLKPEDTAVYYCAAERPGEQRANWFLVVTMYWGQGTQVTVSS

SEQ ID NO: 8678 - protein, 118 aa, Artificial Sequence
  Chemically Synthesized
QVQLQESGGGLVQAGGSLRLSCAASGSISLYHNMGWYRQAPGKERELVAAITHGGTTNYADSVKGRFTISRDNAKNTVYLQMNSLKPEDTAVYYCAASLNSGGNHGYWGQGTQVTVSS

SEQ ID NO: 8679 - protein, 118 aa, Artificial Sequence
  Chemically Synthesized
QVQLQESGGGLVQAGGSLRLSCAASGTIFAATKMGWYRQAPGKERELVATINVGGITNYADSVKGRFTISRDNAKNTVYLQMNSLKPEDTAVYYCAVNINYSGVHGYWGQGTQVTVSS

SEQ ID NO: 8680 - protein, 126 aa, Artificial Sequence
  Chemically Synthesized
QVQLQESGGGLVQAGGSLRLSCAASGNISIQYYMGWYRQAPGKERELVAGITTGGYYQYADSVKGRFTISRDNAKNTVYLQMNSLKPEDTAVYYCAAGYAGYHNRRDAGPFDLPYWGQGTQVTVSS

SEQ ID NO: 8681 - protein, 115 aa, Artificial Sequence
  Chemically Synthesized
QVQLQESGGGLVQAGGSLRLSCAASGTISVDGFMGWYRQAPGKERELVATIALGTTTYYADSVKGRFTISRDNAKNTVYLQMNSLKPEDTAVYYCAVRTLRFDYWGQGTQVTVSS

SEQ ID NO: 8682 - protein, 116 aa, Artificial Sequence
  Chemically Synthesized
QVQLQESGGGLVQAGGSLRLSCAASGSISDPDYMGWYRQAPGKERELVASIDGGTITYYADSVKGRFTISRDNAKNTVYLQMNSLKPEDTAVYYCANTVGTVGIYWGQGTQVTVSS

SEQ ID NO: 8683 - protein, 118 aa, Artificial Sequence
  Chemically Synthesized
QVQLQESGGGLVQAGGSLRLSCAASGYISDAGAMGWYRQAPGKERELVAAIAQGTTTNYADSVKGRFTISRDNAKNTVYLQMNSLKPEDTAVYYCAVYYVYVYSLSYWGQGTQVTVSS

SEQ ID NO: 8684 - protein, 114 aa, Artificial Sequence
  Chemically Synthesized
QVQLQESGGGLVQAGGSLRLSCAASGTISSLVMGWYRQAPGKERELVAAIDYGASTYYADSVKGRFTISRDNAKNTVYLQMNSLKPEDTAVYYCAVTTLGLAYWGQGTQVTVSS

SEQ ID NO: 8685 - protein, 120 aa, Artificial Sequence
  Chemically Synthesized
QVQLQESGGGLVQAGGSLRLSCAASGTISPVELMGWYRQAPGKEREFVATINRGAITNYADSVKGRFTISRDNAKNTVYLQMNSLKPEDTAVYYCAVWFPETQDLYLYYWGQGTQVTVSS

SEQ ID NO: 8686 - protein, 126 aa, Artificial Sequence
  Chemically Synthesized
QVQLQESGGGLVQAGGSLRLSCAASGNIFGARNMGWYRQAPGKEREFVAAINIWYYYLYADSVKGRFTISRDNAKNTVYLQMNSLKPEDTAVYYCAAYDHAERDYLPYDAHDYDYWGQGTQVTVSS

SEQ ID NO: 8687 - protein, 126 aa, Artificial Sequence
  Chemically Synthesized
QVQLQESGGGLVQAGGSLRLSCAASGTISAYVYMGWYRQAPGKERELVAGIALGGITYYADSVKGRFTISRDNAKNTVYLQMNSLKPEDTAVYYCAAGGDNPYYTWQYAYQTFGYWGQGTQVTVSS

SEQ ID NO: 8688 - protein, 114 aa, Artificial Sequence
  Chemically Synthesized
QVQLQESGGGLVQAGGSLRLSCAASGNIFGPYYAMGWYRQAPGKERELVASIAGGAITYYADSVKGRFTISRDNAKNTVYLQMNSLKPEDTAVYYCAATTVMYWGQGTQVTVSS

SEQ ID NO: 8689 - protein, 116 aa, Artificial Sequence
  Chemically Synthesized
QVQLQESGGGLVQAGGSLRLSCAASGNISSEPSMGWYRQAPGKEREFVASINYGSSTYADSVKGRFTISRDNAKNTVYLQMNSLKPEDTAVYYCALVKFRWTFTYWGQGTQVTVSS

SEQ ID NO: 8690 - protein, 117 aa, Artificial Sequence
  Chemically Synthesized
QVQLQESGGGLVQAGGSLRLSCAASGNISTASRMGWYRQAPGKEREFVAWVVLPYADSVKGRFTISRDNAKNTVYLQMNSLKPEDTAVYYCAVYRAPFSLSVSSMYWGQGTQVTVSS

SEQ ID NO: 8691 - protein, 122 aa, Artificial Sequence
  Chemically Synthesized
QVQLQESGGGLVQAGGSLRLSCAASGSIFYHPFMGWYRQAPGKERELVATIAYGGNTYYADSVKGRFTISRDNAKNTVYLQMNSLKPEDTAVYYCAAIYGWDDIYDYAYAYWGQGTQVTVSS

SEQ ID NO: 8692 - protein, 117 aa, Artificial Sequence
  Chemically Synthesized
QVQLQESGGGLVQAGGSLRLSCAASGNIFDQDMGWYRQAPGKEREFVASIAVGGITNYADSVKGRFTISRDNAKNTVYLQMNSLKPEDTAVYYCAASQRQSRYLVYWGQGTQVTVSS

SEQ ID NO: 8693 - protein, 116 aa, Artificial Sequence
  Chemically Synthesized
QVQLQESGGGLVQAGGSLRLSCAASGSIFRTQGMGWYRQAPGKERELVASIDYGGTTYADSVKGRFTISRDNAKNTVYLQMNSLKPEDTAVYYCAVLHGYDEYAYWGQGTQVTVSS

SEQ ID NO: 8694 - protein, 122 aa, Artificial Sequence
  Chemically Synthesized
QVQLQESGGGLVQAGGSLRLSCAASGSISPYFDMGWYRQAPGKERELVASIGNGGTTYYADSVKGRFTISRDNAKNTVYLQMNSLKPEDTAVYYCAARADRDGWYSYPYKYWGQGTQVTVSS

SEQ ID NO: 8695 - protein, 118 aa, Artificial Sequence
  Chemically Synthesized
QVQLQESGGGLVQAGGSLRLSCAASGTISLSDYMGWYRQAPGKEREFVAGIGDGGSTYYADSVKGRFTISRDNAKNTVYLQMNSLKPEDTAVYYCAVPSVFSYDHDYWGQGTQVTVSS

SEQ ID NO: 8696 - protein, 122 aa, Artificial Sequence
  Chemically Synthesized
QVQLQESGGGLVQAGGSLRLSCAASGNISWYYRMGWYRQAPGKEREFVASIAYGTITNYADSVKGRFTISRDNAKNTVYLQMNSLKPEDTAVYYCAVNAYPDGIGASYYPYWGQGTQVTVSS

SEQ ID NO: 8697 - protein, 122 aa, Artificial Sequence
  Chemically Synthesized
QVQLQESGGGLVQAGGSLRLSCAASGSIFYGGYMGWYRQAPGKERELVAAISYGSTTYYADSVKGRFTISRDNAKNTVYLQMNSLKPEDTAVYYCAVYYKFYDYLQNEFGYWGQGTQVTVSS

SEQ ID NO: 8698 - protein, 117 aa, Artificial Sequence
  Chemically Synthesized
QVQLQESGGGLVQAGGSLRLSCAASGSISKDVAMGWYRQAPGKERELVAAINSVVIPYADSVKGRFTISRDNAKNTVYLQMNSLKPEDTAVYYCAAPRYGDGDFGYWGQGTQVTVSS

SEQ ID NO: 8699 - protein, 117 aa, Artificial Sequence
  Chemically Synthesized
QVQLQESGGGLVQAGGSLRLSCAASGNISFTTWMGWYRQAPGKERELVAGIVTVLVPYADSVKGRFTISRDNAKNTVYLQMNSLKPEDTAVYYCAARGLRDADYYYWGQGTQVTVSS

SEQ ID NO: 8700 - protein, 126 aa, Artificial Sequence
  Chemically Synthesized
QVQLQESGGGLVQAGGSLRLSCAASGTIFSSLYMGWYRQAPGKERELVATIAFGGSTNYADSVKGRFTISRDNAKNTVYLQMNSLKPEDTAVYYCAALDALDLTHDTDGYGYHSYWGQGTQVTVSS

SEQ ID NO: 8701 - protein, 117 aa, Artificial Sequence
  Chemically Synthesized
QVQLQESGGGLVQAGGSLRLSCAASGSISFPLNMGWYRQAPGKERELVATIGAGLLPYADSVKGRFTISRDNAKNTVYLQMNSLKPEDTAVYYCAVLYPGDLQLRYWGQGTQVTVSS

SEQ ID NO: 8702 - protein, 117 aa, Artificial Sequence
  Chemically Synthesized
QVQLQESGGGLVQAGGSLRLSCAASGYISYNYLMGWYRQAPGKEREFVAAITSVVLPYADSVKGRFTISRDNAKNTVYLQMNSLKPEDTAVYYCAVYYERGYDFDYWGQGTQVTVSS

SEQ ID NO: 8703 - protein, 126 aa, Artificial Sequence
  Chemically Synthesized
QVQLQESGGGLVQAGGSLRLSCAASGTISAGYYMGWYRQAPGKEREFVASITPGSTTYYADSVKGRFTISRDNAKNTVYLQMNSLKPEDTAVYYCAVALLLLRPVGEAFKYSFYYWGQGTQVTVSS

SEQ ID NO: 8704 - protein, 125 aa, Artificial Sequence
  Chemically Synthesized
QVQLQESGGGLVQAGGSLRLSCAASGTIFLYPYMGWYRQAPGKEREFVASINYGATTYYADSVKGRFTISRDNAKNTVYLQMNSLKPEDTAVYYCAAPSWIADRDSLKLLWTIYWGQGTQVTVSS

SEQ ID NO: 8705 - protein, 118 aa, Artificial Sequence
  Chemically Synthesized
QVQLQESGGGLVQAGGSLRLSCAASGYIFSTEDMGWYRQAPGKEREFVATIDYGSSTNYADSVKGRFTISRDNAKNTVYLQMNSLKPEDTAVYYCAAYGLIYYPLWYWGQGTQVTVSS

SEQ ID NO: 8706 - protein, 118 aa, Artificial Sequence
  Chemically Synthesized
QVQLQESGGGLVQAGGSLRLSCAASGNIFLYELMGWYRQAPGKERELVAAISYGTTTNYADSVKGRFTISRDNAKNTVYLQMNSLKPEDTAVYYCAAADDDFVEFGYWGQGTQVTVSS

SEQ ID NO: 8707 - protein, 122 aa, Artificial Sequence
  Chemically Synthesized
QVQLQESGGGLVQAGGSLRLSCAASGTIFPTIIMGWYRQAPGKEREFVASIAAGGNTNYADSVKGRFTISRDNAKNTVYLQMNSLKPEDTAVYYCAADKGDVDWIVDTHTYWGQGTQVTVSS

SEQ ID NO: 8708 - protein, 118 aa, Artificial Sequence
  Chemically Synthesized
QVQLQESGGGLVQAGGSLRLSCAASGTIFASYYMGWYRQAPGKEREFVAAIGRGTSTNYADSVKGRFTISRDNAKNTVYLQMNSLKPEDTAVYYCAAIPRGGAPHSYWGQGTQVTVSS

SEQ ID NO: 8709 - protein, 118 aa, Artificial Sequence
  Chemically Synthesized
QVQLQESGGGLVQAGGSLRLSCAASGSIFGLDVMGWYRQAPGKEREFVATINRGSTTYYADSVKGRFTISRDNAKNTVYLQMNSLKPEDTAVYYCAALDPRGGWFYYWGQGTQVTVSS

SEQ ID NO: 8710 - protein, 118 aa, Artificial Sequence
  Chemically Synthesized
QVQLQESGGGLVQAGGSLRLSCAASGYIFNIPVMGWYRQAPGKERELVAGINGGANTNYADSVKGRFTISRDNAKNTVYLQMNSLKPEDTAVYYCAAYFSEYGVLAYWGQGTQVTVSS

SEQ ID NO: 8711 - protein, 118 aa, Artificial Sequence
  Chemically Synthesized
QVQLQESGGGLVQAGGSLRLSCAASGTISTNPFMGWYRQAPGKERELVATITGGGITNYADSVKGRFTISRDNAKNTVYLQMNSLKPEDTAVYYCAVRSPWHYVFGYWGQGTQVTVSS

SEQ ID NO: 8712 - protein, 118 aa, Artificial Sequence
  Chemically Synthesized
QVQLQESGGGLVQAGGSLRLSCAASGSIFELSTMGWYRQAPGKERELVASISTGGNTYYADSVKGRFTISRDNAKNTVYLQMNSLKPEDTAVYYCAVYNGNVRALYYWGQGTQVTVSS

SEQ ID NO: 8713 - protein, 121 aa, Artificial Sequence
  Chemically Synthesized
QVQLQESGGGLVQAGGSLRLSCAASGSISDTYYMGWYRQAPGKERELVAGIDSGATTYYADSVKGRFTISRDNAKNTVYLQMNSLKPEDTAVYYCAVWRSVTTTNTTFIYWGQGTQVTVSS

SEQ ID NO: 8714 - protein, 122 aa, Artificial Sequence
  Chemically Synthesized
QVQLQESGGGLVQAGGSLRLSCAASGSISGPGHMGWYRQAPGKERELVASIDNGSTTNYADSVKGRFTISRDNAKNTVYLQMNSLKPEDTAVYYCAVYAYVEADTRNDHFYWGQGTQVTVSS

SEQ ID NO: 8715 - protein, 122 aa, Artificial Sequence
  Chemically Synthesized
QVQLQESGGGLVQAGGSLRLSCAASGNIFGLQSMGWYRQAPGKEREFVAAISGGASTNYADSVKGRFTISRDNAKNTVYLQMNSLKPEDTAVYYCAAVSVAKIYLADNLVYWGQGTQVTVSS

SEQ ID NO: 8716 - protein, 122 aa, Artificial Sequence
  Chemically Synthesized
QVQLQESGGGLVQAGGSLRLSCAASGNIFNYRGMGWYRQAPGKEREFVAGIGDGSNTYYADSVKGRFTISRDNAKNTVYLQMNSLKPEDTAVYYCAAYTTDLKRDSYGHRYWGQGTQVTVSS

SEQ ID NO: 8717 - protein, 122 aa, Artificial Sequence
  Chemically Synthesized
QVQLQESGGGLVQAGGSLRLSCAASGSISSQNTMGWYRQAPGKERELVAAITAGGNTNYADSVKGRFTISRDNAKNTVYLQMNSLKPEDTAVYYCAANVYYRVGATTTFRYWGQGTQVTVSS

SEQ ID NO: 8718 - protein, 121 aa, Artificial Sequence
  Chemically Synthesized
QVQLQESGGGLVQAGGSLRLSCAASGYISYYGFMGWYRQAPGKEREFVASIAGGGSTYYADSVKGRFTISRDNAKNTVYLQMNSLKPEDTAVYYCAVPIYRYSLWTTTFYWGQGTQVTVSS

SEQ ID NO: 8719 - protein, 118 aa, Artificial Sequence
  Chemically Synthesized
QVQLQESGGGLVQAGGSLRLSCAASGYISLQYYMGWYRQAPGKEREFVAGIAYGAITYYADSVKGRFTISRDNAKNTVYLQMNSLKPEDTAVYYCAAVTQYAVPYPYWGQGTQVTVSS

SEQ ID NO: 8720 - protein, 117 aa, Artificial Sequence
  Chemically Synthesized
QVQLQESGGGLVQAGGSLRLSCAASGNISYWDTMGWYRQAPGKERELVAYYSRVLVPYADSVKGRFTISRDNAKNTVYLQMNSLKPEDTAVYYCAVQRDYTCLPCYWGQGTQVTVSS

SEQ ID NO: 8721 - protein, 118 aa, Artificial Sequence
  Chemically Synthesized
QVQLQESGGGLVQAGGSLRLSCAASGTISRYYVMGWYRQAPGKEREFVAAISTGATTYYADSVKGRFTISRDNAKNTVYLQMNSLKPEDTAVYYCAADEIPDVLHWYWGQGTQVTVSS

SEQ ID NO: 8722 - protein, 114 aa, Artificial Sequence
  Chemically Synthesized
QVQLQESGGGLVQAGGSLRLSCAASGSLGMGWYRQAPGKEREFVASINYGGNTNYADSVKGRFTISRDNAKNTVYLQMNSLKPEDTAVYYCAVDYDYWDEFTYWGQGTQVTVSS

SEQ ID NO: 8723 - protein, 121 aa, Artificial Sequence
  Chemically Synthesized
QVQLQESGGGLVQAGGSLRLSCAASGNISGSNMGWYRQAPGKERELVAAITDGTITYYADSVKGRFTISRDNAKNTVYLQMNSLKPEDTAVYYCAVWEWAWGWIAEDHDYWGQGTQVTVSS

SEQ ID NO: 8724 - protein, 118 aa, Artificial Sequence
  Chemically Synthesized
QVQLQESGGGLVQAGGSLRLSCAASGYISIGALMGWYRQAPGKEREFVAGIGNGTSTYYADSVKGRFTISRDNAKNTVYLQMNSLKPEDTAVYYCAVPGGSSPDFQYWGQGTQVTVSS

SEQ ID NO: 8725 - protein, 124 aa, Artificial Sequence
  Chemically Synthesized
QVQLQESGGGLVQAGGSLRLSCAASGNISRTASMGWYRQAPGKERELVAAINVGSTTNYADSVKGRFTISRDNAKNTVYLQMNSLKPEDTAVYYCAVHDAVRLTLSYPDELHYWGQGTQVTVSS

SEQ ID NO: 8726 - protein, 118 aa, Artificial Sequence
  Chemically Synthesized
QVQLQESGGGLVQAGGSLRLSCAASGSISTPSLMGWYRQAPGKERELVATISYGGNTNYADSVKGRFTISRDNAKNTVYLQMNSLKPEDTAVYYCAVYERRDFDHVYWGQGTQVTVSS

SEQ ID NO: 8727 - protein, 123 aa, Artificial Sequence
  Chemically Synthesized
QVQLQESGGGLVQAGGSLRLSCAASGNIFYPDDMGWYRQAPGKERELVAGITADGSNTNYADSVKGRFTISRDNAKNTVYLQMNSLKPEDTAVYYCAARSTFYKLQYDYHIYWGQGTQVTVSS

SEQ ID NO: 8728 - protein, 125 aa, Artificial Sequence
  Chemically Synthesized
QVQLQESGGGLVQAGGSLRLSCAASGNISGLAWMGWYRQAPGKERELVATITDGGITYYADSVKGRFTISRDNAKNTVYLQMNSLKPEDTAVYYCAATVYGIYDDPDDSSISLYWGQGTQVTVSS

SEQ ID NO: 8729 - protein, 117 aa, Artificial Sequence
  Chemically Synthesized
QVQLQESGGGLVQAGGSLRLSCAASGYILTCTMGWYRQAPGKEREFVAGITGGTNTNYADSVKGRFTISRDNAKNTVYLQMNSLKPEDTAVYYCAASSVNRYAFHYWGQGTQVTVSS

SEQ ID NO: 8730 - protein, 122 aa, Artificial Sequence
  Chemically Synthesized
QVQLQESGGGLVQAGGSLRLSCAASGSIFQDAYMGWYRQAPGKERELVAAISQGGTTNYADSVKGRFTISRDNAKNTVYLQMNSLKPEDTAVYYCAVDVYGHTWYIARYYYWGQGTQVTVSS

SEQ ID NO: 8731 - protein, 126 aa, Artificial Sequence
  Chemically Synthesized
QVQLQESGGGLVQAGGSLRLSCAASGNISFPYIMGWYRQAPGKEREFVAGINAGGTTNYADSVKGRFTISRDNAKNTVYLQMNSLKPEDTAVYYCAVYQDYVWSYGWAPYAALAYWGQGTQVTVSS

SEQ ID NO: 8732 - protein, 122 aa, Artificial Sequence
  Chemically Synthesized
QVQLQESGGGLVQAGGSLRLSCAASGYISVGSDMGWYRQAPGKEREFVATIGVGTTTYYADSVKGRFTISRDNAKNTVYLQMNSLKPEDTAVYYCAAWYHADVYQTYPYAYWGQGTQVTVSS

SEQ ID NO: 8733 - protein, 126 aa, Artificial Sequence
  Chemically Synthesized
QVQLQESGGGLVQAGGSLRLSCAASGNIFDDSTMGWYRQAPGKERELVAAIDLGTITYYADSVKGRFTISRDNAKNTVYLQMNSLKPEDTAVYYCAVVTTDDGDAPGTSAGAHDYWGQGTQVTVSS

SEQ ID NO: 8734 - protein, 118 aa, Artificial Sequence
  Chemically Synthesized
QVQLQESGGGLVQAGGSLRLSCAASGSIFDYDPMGWYRQAPGKERELVATISDGANTNYADSVKGRFTISRDNAKNTVYLQMNSLKPEDTAVYYCAAYSRDGGSLTYWGQGTQVTVSS

SEQ ID NO: 8735 - protein, 118 aa, Artificial Sequence
  Chemically Synthesized
QVQLQESGGGLVQAGGSLRLSCAASGSISGYELMGWYRQAPGKERELVATIARGGSTNYADSVKGRFTISRDNAKNTVYLQMNSLKPEDTAVYYCAVYKYYEYTHGYWGQGTQVTVSS

SEQ ID NO: 8736 - protein, 118 aa, Artificial Sequence
  Chemically Synthesized
QVQLQESGGGLVQAGGSLRLSCAASGTIFLYWDMGWYRQAPGKEREFVAGIDLGTTTNYADSVKGRFTISRDNAKNTVYLQMNSLKPEDTAVYYCAVYIASYPDHAYWGQGTQVTVSS

SEQ ID NO: 8737 - protein, 122 aa, Artificial Sequence
  Chemically Synthesized
QVQLQESGGGLVQAGGSLRLSCAASGNISGWYTMGWYRQAPGKEREFVASINDGATTYYADSVKGRFTISRDNAKNTVYLQMNSLKPEDTAVYYCAAGNGTYFNPYSYHYYWGQGTQVTVSS

SEQ ID NO: 8738 - protein, 118 aa, Artificial Sequence
  Chemically Synthesized
QVQLQESGGGLVQAGGSLRLSCAASGTIFWRAEMGWYRQAPGKEREFVASIDYGGNTNYADSVKGRFTISRDNAKNTVYLQMNSLKPEDTAVYYCAAEIPWCSGSSYWGQGTQVTVSS

SEQ ID NO: 8739 - protein, 126 aa, Artificial Sequence
  Chemically Synthesized
QVQLQESGGGLVQAGGSLRLSCAASGNISSTHDMGWYRQAPGKEREFVASITAGGTTYYADSVKGRFTISRDNAKNTVYLQMNSLKPEDTAVYYCAVRIDLTSYWSDTTGYQYFYWGQGTQVTVSS

SEQ ID NO: 8740 - protein, 118 aa, Artificial Sequence
  Chemically Synthesized
QVQLQESGGGLVQAGGSLRLSCAASGTIFYVFFMGWYRQAPGKEREFVASISAGANTNYADSVKGRFTISRDNAKNTVYLQMNSLKPEDTAVYYCAATKRHAGFLNYWGQGTQVTVSS

SEQ ID NO: 8741 - protein, 118 aa, Artificial Sequence
  Chemically Synthesized
QVQLQESGGGLVQAGGSLRLSCAASGTIFQGYTMGWYRQAPGKEREFVASISRGTNTNYADSVKGRFTISRDNAKNTVYLQMNSLKPEDTAVYYCAVAPYVDADYRYWGQGTQVTVSS

SEQ ID NO: 8742 - protein, 118 aa, Artificial Sequence
  Chemically Synthesized
QVQLQESGGGLVQAGGSLRLSCAASGSISYPYVMGWYRQAPGKERELVAGISFGGITNYADSVKGRFTISRDNAKNTVYLQMNSLKPEDTAVYYCAAADLATVDLTYWGQGTQVTVSS

SEQ ID NO: 8743 - protein, 114 aa, Artificial Sequence
  Chemically Synthesized
QVQLQESGGGLVQAGGSLRLSCAASGYISPAEEMGWYRQAPGKERELVAGISGGTNTNYADSVKGRFTISRDNAKNTVYLQMNSLKPEDTAVYYCAVYYGYVYWGQGTQVTVSS

SEQ ID NO: 8744 - protein, 125 aa, Artificial Sequence
  Chemically Synthesized
QVQLQESGGGLVQAGGSLRLSCAASGSIFASLMGWYRQAPGKERELVAAIAQGGTTYYADSVKGRFTISRDNAKNTVYLQMNSLKPEDTAVYYCAAYAQGRYSGDTNGDDDYYYWGQGTQVTVSS

SEQ ID NO: 8745 - protein, 122 aa, Artificial Sequence
  Chemically Synthesized
QVQLQESGGGLVQAGGSLRLSCAASGNIFYSYYMGWYRQAPGKEREFVAAIAYGAITYYADSVKGRFTISRDNAKNTVYLQMNSLKPEDTAVYYCAADRPYKEPGLAGHSYWGQGTQVTVSS

SEQ ID NO: 8746 - protein, 122 aa, Artificial Sequence
  Chemically Synthesized
QVQLQESGGGLVQAGGSLRLSCAASGNISIGPAMGWYRQAPGKERELVASIAEGTITNYADSVKGRFTISRDNAKNTVYLQMNSLKPEDTAVYYCAVQRDAIHSYRGYYLYWGQGTQVTVSS

SEQ ID NO: 8747 - protein, 120 aa, Artificial Sequence
  Chemically Synthesized
QVQLQESGGGLVQAGGSLRLSCAASGSILVLTMGWYRQAPGKERELVASIDSGGITNYADSVKGRFTISRDNAKNTVYLQMNSLKPEDTAVYYCAAGDDVAYLGVSHGYWGQGTQVTVSS

SEQ ID NO: 8748 - protein, 122 aa, Artificial Sequence
  Chemically Synthesized
QVQLQESGGGLVQAGGSLRLSCAASGSISTYSIMGWYRQAPGKERELVAAIGGGATTYYADSVKGRFTISRDNAKNTVYLQMNSLKPEDTAVYYCAVPEGYRADRVSPFDYWGQGTQVTVSS

SEQ ID NO: 8749 - protein, 126 aa, Artificial Sequence
  Chemically Synthesized
QVQLQESGGGLVQAGGSLRLSCAASGNISIDNYMGWYRQAPGKEREFVATISLGGTTYYADSVKGRFTISRDNAKNTVYLQMNSLKPEDTAVYYCAVPLTRRIPDSYVTYASYWYWGQGTQVTVSS

SEQ ID NO: 8750 - protein, 124 aa, Artificial Sequence
  Chemically Synthesized
QVQLQESGGGLVQAGGSLRLSCAASGTIFSGRTMGWYRQAPGKERELVASITAGGTTNYADSVKGRFTISRDNAKNTVYLQMNSLKPEDTAVYYCAVHVYDDYGRQWDVLFIYWGQGTQVTVSS

SEQ ID NO: 8751 - protein, 118 aa, Artificial Sequence
  Chemically Synthesized
QVQLQESGGGLVQAGGSLRLSCAASGTIFRWAGMGWYRQAPGKERELVAGINAGATTYYADSVKGRFTISRDNAKNTVYLQMNSLKPEDTAVYYCAVYRGNDHVYTYWGQGTQVTVSS

SEQ ID NO: 8752 - protein, 121 aa, Artificial Sequence
  Chemically Synthesized
QVQLQESGGGLVQAGGSLRLSCAASGTIFWYGDMGWYRQAPGKEREFVASINRGSITYYADSVKGRFTISRDNAKNTVYLQMNSLKPEDTAVYYCAAPYFSIWALRGLYYWGQGTQVTVSS

SEQ ID NO: 8753 - protein, 117 aa, Artificial Sequence
  Chemically Synthesized
QVQLQESGGGLVQAGGSLRLSCAASGNISRRDDMGWYRQAPGKEREFVATINAGTNTNYADSVKGRFTISRDNAKNTVYLQMNSLKPEDTAVYYCAAPYYRVVCFYWGQGTQVTVSS

SEQ ID NO: 8754 - protein, 118 aa, Artificial Sequence
  Chemically Synthesized
QVQLQESGGGLVQAGGSLRLSCAASGNIFRYDVMGWYRQAPGKERELVAAIGNGGNTNYADSVKGRFTISRDNAKNTVYLQMNSLKPEDTAVYYCAVDPYPIYWLLYWGQGTQVTVSS

SEQ ID NO: 8755 - protein, 122 aa, Artificial Sequence
  Chemically Synthesized
QVQLQESGGGLVQAGGSLRLSCAASGYISRLSYMGWYRQAPGKEREFVAGISYGGNTYYADSVKGRFTISRDNAKNTVYLQMNSLKPEDTAVYYCAATAETTDPYSDPHLYWGQGTQVTVSS

SEQ ID NO: 8756 - protein, 118 aa, Artificial Sequence
  Chemically Synthesized
QVQLQESGGGLVQAGGSLRLSCAASGTIFLNDEMGWYRQAPGKERELVATIDNGATTYYADSVKGRFTISRDNAKNTVYLQMNSLKPEDTAVYYCAAVVSPTGPHSYWGQGTQVTVSS

SEQ ID NO: 8757 - protein, 122 aa, Artificial Sequence
  Chemically Synthesized
QVQLQESGGGLVQAGGSLRLSCAASGTISPYTVMGWYRQAPGKEREFVAGIDFGGITNYADSVKGRFTISRDNAKNTVYLQMNSLKPEDTAVYYCAVYPGWIENARYAHSYWGQGTQVTVSS

SEQ ID NO: 8758 - protein, 118 aa, Artificial Sequence
  Chemically Synthesized
QVQLQESGGGLVQAGGSLRLSCAASGYISGAVNMGWYRQAPGKEREFVASIGSGTSTYYADSVKGRFTISRDNAKNTVYLQMNSLKPEDTAVYYCAAQDEYGAVYHYWGQGTQVTVSS

SEQ ID NO: 8759 - protein, 122 aa, Artificial Sequence
  Chemically Synthesized
QVQLQESGGGLVQAGGSLRLSCAASGTIFHRRLMGWYRQAPGKERELVAAISLGATTYYADSVKGRFTISRDNAKNTVYLQMNSLKPEDTAVYYCAVTDVNTPSDSYRLAYWGQGTQVTVSS

SEQ ID NO: 8760 - protein, 126 aa, Artificial Sequence
  Chemically Synthesized
QVQLQESGGGLVQAGGSLRLSCAASGYISADRYMGWYRQAPGKERELVASIAYGSITNYADSVKGRFTISRDNAKNTVYLQMNSLKPEDTAVYYCAAGDQEEGDDPQPWAGGLAYWGQGTQVTVSS

SEQ ID NO: 8761 - protein, 118 aa, Artificial Sequence
  Chemically Synthesized
QVQLQESGGGLVQAGGSLRLSCAASGNIFLPYSMGWYRQAPGKEREFVAGINVGANTNYADSVKGRFTISRDNAKNTVYLQMNSLKPEDTAVYYCAVVRDGGPYHLYWGQGTQVTVSS

SEQ ID NO: 8762 - protein, 118 aa, Artificial Sequence
  Chemically Synthesized
QVQLQESGGGLVQAGGSLRLSCAASGNISPPQYMGWYRQAPGKERELVAAIAIGSTTYYADSVKGRFTISRDNAKNTVYLQMNSLKPEDTAVYYCAVWDASLRDYQYWGQGTQVTVSS

SEQ ID NO: 8763 - protein, 126 aa, Artificial Sequence
  Chemically Synthesized
QVQLQESGGGLVQAGGSLRLSCAASGNIFYPYSMGWYRQAPGKERELVAGIGYGANTNYADSVKGRFTISRDNAKNTVYLQMNSLKPEDTAVYYCAAFAYTTEFNVDTSGLGLFYWGQGTQVTVSS

SEQ ID NO: 8764 - protein, 126 aa, Artificial Sequence
  Chemically Synthesized
QVQLQESGGGLVQAGGSLRLSCAASGYIFNVWRMGWYRQAPGKERELVAGIGPGGITYYADSVKGRFTISRDNAKNTVYLQMNSLKPEDTAVYYCAVYRTGDYAAYRGDGPWYYYWGQGTQVTVSS

SEQ ID NO: 8765 - protein, 117 aa, Artificial Sequence
  Chemically Synthesized
QVQLQESGGGLVQAGGSLRLSCAASGYISYDHWMGWYRQAPGKEREFVASINQGGITYYADSVKGRFTISRDNAKNTVYLQMNSLKPEDTAVYYCAANETNGVVMYWGQGTQVTVSS

SEQ ID NO: 8766 - protein, 118 aa, Artificial Sequence
  Chemically Synthesized
QVQLQESGGGLVQAGGSLRLSCAASGNIFRHQIMGWYRQAPGKERELVATISPGGTTYYADSVKGRFTISRDNAKNTVYLQMNSLKPEDTAVYYCAAYYLYGARYRYWGQGTQVTVSS

SEQ ID NO: 8767 - protein, 122 aa, Artificial Sequence
  Chemically Synthesized
QVQLQESGGGLVQAGGSLRLSCAASGTIFSSRYMGWYRQAPGKERELVAAISYGTTTNYADSVKGRFTISRDNAKNTVYLQMNSLKPEDTAVYYCAVDYYADQQTYTGHNYWGQGTQVTVSS

SEQ ID NO: 8768 - protein, 117 aa, Artificial Sequence
  Chemically Synthesized
QVQLQESGGGLVQAGGSLRLSCAASGNISLSVMGWYRQAPGKERELVAAISYGTSTYYADSVKGRFTISRDNAKNTVYLQMNSLKPEDTAVYYCAVFNYVTTYLEYWGQGTQVTVSS

SEQ ID NO: 8769 - protein, 126 aa, Artificial Sequence
  Chemically Synthesized
QVQLQESGGGLVQAGGSLRLSCAASGTISDTLGMGWYRQAPGKERELVAAISIGTNTYYADSVKGRFTISRDNAKNTVYLQMNSLKPEDTAVYYCAAYYEADYPSPSRSLDLHVYWGQGTQVTVSS

SEQ ID NO: 8770 - protein, 118 aa, Artificial Sequence
  Chemically Synthesized
QVQLQESGGGLVQAGGSLRLSCAASGYIFFWFTMGWYRQAPGKEREFVASITRGTTTYYADSVKGRFTISRDNAKNTVYLQMNSLKPEDTAVYYCAVEDRYGFPFPYWGQGTQVTVSS

SEQ ID NO: 8771 - protein, 121 aa, Artificial Sequence
  Chemically Synthesized
QVQLQESGGGLVQAGGSLRLSCAASGNIFGAPNMGWYRQAPGKERELVAAIDYGSNTNYADSVKGRFTISRDNAKNTVYLQMNSLKPEDTAVYYCAAYPSDGRNQEFTHYWGQGTQVTVSS

SEQ ID NO: 8772 - protein, 118 aa, Artificial Sequence
  Chemically Synthesized
QVQLQESGGGLVQAGGSLRLSCAASGSISSGYVMGWYRQAPGKERELVAGITSGTITYYADSVKGRFTISRDNAKNTVYLQMNSLKPEDTAVYYCAAWWYVARDFDYWGQGTQVTVSS

SEQ ID NO: 8773 - protein, 118 aa, Artificial Sequence
  Chemically Synthesized
QVQLQESGGGLVQAGGSLRLSCAASGSIFYASVMGWYRQAPGKERELVATIAYGAITYYADSVKGRFTISRDNAKNTVYLQMNSLKPEDTAVYYCAVEHWGPYDHLYWGQGTQVTVSS

SEQ ID NO: 8774 - protein, 114 aa, Artificial Sequence
  Chemically Synthesized
QVQLQESGGGLVQAGGSLRLSCAASGNISRNFPMGWYRQAPGKERELVATITDGGYYLYADSVKGRFTISRDNAKNTVYLQMNSLKPEDTAVYYCAVDEYHGYWGQGTQVTVSS

SEQ ID NO: 8775 - protein, 114 aa, Artificial Sequence
  Chemically Synthesized
QVQLQESGGGLVQAGGSLRLSCAASGSIFDTYGMGWYRQAPGKEREFVITVVVPYADSVKGRFTISRDNAKNTVYLQMNSLKPEDTAVYYCAAERDLTYYHLYWGQGTQVTVSS

SEQ ID NO: 8776 - protein, 122 aa, Artificial Sequence
  Chemically Synthesized
QVQLQESGGGLVQAGGSLRLSCAASGSISSSGQMGWYRQAPGKEREFVASISLGTNTYYADSVKGRFTISRDNAKNTVYLQMNSLKPEDTAVYYCAAQRGWFDETGDDHAYWGQGTQVTVSS

SEQ ID NO: 8777 - protein, 118 aa, Artificial Sequence
  Chemically Synthesized
QVQLQESGGGLVQAGGSLRLSCAASGSIFGSPSMGWYRQAPGKERELVAGISRGAITYYADSVKGRFTISRDNAKNTVYLQMNSLKPEDTAVYYCAVVPYDPVGYGYWGQGTQVTVSS

SEQ ID NO: 8778 - protein, 118 aa, Artificial Sequence
  Chemically Synthesized
QVQLQESGGGLVQAGGSLRLSCAASGNIFAFRYMGWYRQAPGKEREFVAGIGSGAITNYADSVKGRFTISRDNAKNTVYLQMNSLKPEDTAVYYCAAYRLKYGRHYYWGQGTQVTVSS

SEQ ID NO: 8779 - protein, 121 aa, Artificial Sequence
  Chemically Synthesized
QVQLQESGGGLVQAGGSLRLSCAASGSIFSYYYMGWYRQAPGKEREFVASIAGGSITNYADSVKGRFTISRDNAKNTVYLQMNSLKPEDTAVYYCAARYDHGDTRHSRLYWGQGTQVTVSS

SEQ ID NO: 8780 - protein, 118 aa, Artificial Sequence
  Chemically Synthesized
QVQLQESGGGLVQAGGSLRLSCAASGTISAYYGMGWYRQAPGKEREFVAGITDGTNTYYADSVKGRFTISRDNAKNTVYLQMNSLKPEDTAVYYCAVDDSKATHLDYWGQGTQVTVSS

SEQ ID NO: 8781 - protein, 118 aa, Artificial Sequence
  Chemically Synthesized
QVQLQESGGGLVQAGGSLRLSCAASGNISPYGVMGWYRQAPGKEREFVAAIAPGTNTNYADSVKGRFTISRDNAKNTVYLQMNSLKPEDTAVYYCAVRADAVLQFEYWGQGTQVTVSS

SEQ ID NO: 8782 - protein, 126 aa, Artificial Sequence
  Chemically Synthesized
QVQLQESGGGLVQAGGSLRLSCAASGTISDYGYMGWYRQAPGKERELVAGISPGGNTYYADSVKGRFTISRDNAKNTVYLQMNSLKPEDTAVYYCAAVGYDFQSDHWERYRVHSYWGQGTQVTVSS

SEQ ID NO: 8783 - protein, 117 aa, Artificial Sequence
  Chemically Synthesized
QVQLQESGGGLVQAGGSLRLSCAASGNISPRTDMGWYRQAPGKEREFVAGIGFGASTYYADSVKGRFTISRDNAKNTVYLQMNSLKPEDTAVYYCAVSVLLCGLIYWGQGTQVTVSS

SEQ ID NO: 8784 - protein, 117 aa, Artificial Sequence
  Chemically Synthesized
QVQLQESGGGLVQAGGSLRLSCAASGSISYLWYMGWYRQAPGKERELVASIDEVVIPYADSVKGRFTISRDNAKNTVYLQMNSLKPEDTAVYYCAAHIDARLALDYWGQGTQVTVSS

SEQ ID NO: 8785 - protein, 122 aa, Artificial Sequence
  Chemically Synthesized
QVQLQESGGGLVQAGGSLRLSCAASGSISDYGTMGWYRQAPGKEREFVAAITEGASTNYADSVKGRFTISRDNAKNTVYLQMNSLKPEDTAVYYCAVLEQYSRSYFNVLYYWGQGTQVTVSS

SEQ ID NO: 8786 - protein, 122 aa, Artificial Sequence
  Chemically Synthesized
QVQLQESGGGLVQAGGSLRLSCAASGNIFGYTYMGWYRQAPGKEREFVAAINYGSITYYADSVKGRFTISRDNAKNTVYLQMNSLKPEDTAVYYCAAYWVSYPRRSANLRYWGQGTQVTVSS

SEQ ID NO: 8787 - protein, 118 aa, Artificial Sequence
  Chemically Synthesized
QVQLQESGGGLVQAGGSLRLSCAASGYIFPREDMGWYRQAPGKERELVASIGEGTSTNYADSVKGRFTISRDNAKNTVYLQMNSLKPEDTAVYYCAATGEYPLYHEYWGQGTQVTVSS

SEQ ID NO: 8788 - protein, 122 aa, Artificial Sequence
  Chemically Synthesized
QVQLQESGGGLVQAGGSLRLSCAASGNISDGYDMGWYRQAPGKERELVAAITHGTITYYADSVKGRFTISRDNAKNTVYLQMNSLKPEDTAVYYCAVYIYYSSYWPQGFSYWGQGTQVTVSS

SEQ ID NO: 8789 - protein, 118 aa, Artificial Sequence
  Chemically Synthesized
QVQLQESGGGLVQAGGSLRLSCAASGTISLYYKMGWYRQAPGKEREFVATISVGANTNYADSVKGRFTISRDNAKNTVYLQMNSLKPEDTAVYYCAALNWSGYRFPYWGQGTQVTVSS

SEQ ID NO: 8790 - protein, 121 aa, Artificial Sequence
  Chemically Synthesized
QVQLQESGGGLVQAGGSLRLSCAASGNISYEGSMGWYRQAPGKERELVATINAGGNTYYADSVKGRFTISRDNAKNTVYLQMNSLKPEDTAVYYCAVTDRTATSSFGHRYWGQGTQVTVSS

SEQ ID NO: 8791 - protein, 122 aa, Artificial Sequence
  Chemically Synthesized
QVQLQESGGGLVQAGGSLRLSCAASGNIFTTRWMGWYRQAPGKERELVAGINVGTTTNYADSVKGRFTISRDNAKNTVYLQMNSLKPEDTAVYYCAVVDDPSFGKTPHHPYWGQGTQVTVSS

SEQ ID NO: 8792 - protein, 118 aa, Artificial Sequence
  Chemically Synthesized
QVQLQESGGGLVQAGGSLRLSCAASGSIFRDIDMGWYRQAPGKERELVASIGGGGITYYADSVKGRFTISRDNAKNTVYLQMNSLKPEDTAVYYCAAHTQYPYFHVYWGQGTQVTVSS

SEQ ID NO: 8793 - protein, 122 aa, Artificial Sequence
  Chemically Synthesized
QVQLQESGGGLVQAGGSLRLSCAASGSIFSRWRMGWYRQAPGKERELVATIGPGTNTYYADSVKGRFTISRDNAKNTVYLQMNSLKPEDTAVYYCAVLGNWFATWHPHLAYWGQGTQVTVSS

SEQ ID NO: 8794 - protein, 118 aa, Artificial Sequence
  Chemically Synthesized
QVQLQESGGGLVQAGGSLRLSCAASGNISKLSSMGWYRQAPGKERELVAAIAAGTSTYYADSVKGRFTISRDNAKNTVYLQMNSLKPEDTAVYYCAVGYYAYDELTYWGQGTQVTVSS

SEQ ID NO: 8795 - protein, 118 aa, Artificial Sequence
  Chemically Synthesized
QVQLQESGGGLVQAGGSLRLSCAASGTISITYTMGWYRQAPGKEREFVAAISSGGTTNYADSVKGRFTISRDNAKNTVYLQMNSLKPEDTAVYYCAVVDAHVYLLRYWGQGTQVTVSS

SEQ ID NO: 8796 - protein, 126 aa, Artificial Sequence
  Chemically Synthesized
QVQLQESGGGLVQAGGSLRLSCAASGYISRYQYMGWYRQAPGKERELVASIATGGTTNYADSVKGRFTISRDNAKNTVYLQMNSLKPEDTAVYYCAVYTVIYSRGSYGVGGGHSYWGQGTQVTVSS

SEQ ID NO: 8797 - protein, 126 aa, Artificial Sequence
  Chemically Synthesized
QVQLQESGGGLVQAGGSLRLSCAASGYISFTRYMGWYRQAPGKEREFVATIDYGSNTNYADSVKGRFTISRDNAKNTVYLQMNSLKPEDTAVYYCAARRGHYRFYRGGFQADYDYWGQGTQVTVSS

SEQ ID NO: 8798 - protein, 121 aa, Artificial Sequence
  Chemically Synthesized
QVQLQESGGGLVQAGGSLRLSCAASGNIFYYTYMGWYRQAPGKEREFVATLLRWYYLYADSVKGRFTISRDNAKNTVYLQMNSLKPEDTAVYYCAADGDTYYGQHASLYYWGQGTQVTVSS

SEQ ID NO: 8799 - protein, 122 aa, Artificial Sequence
  Chemically Synthesized
QVQLQESGGGLVQAGGSLRLSCAASGYISTVGDMGWYRQAPGKERELVAAITYGGSTYYADSVKGRFTISRDNAKNTVYLQMNSLKPEDTAVYYCAVTAAKDDRYVATLVYWGQGTQVTVSS

SEQ ID NO: 8800 - protein, 118 aa, Artificial Sequence
  Chemically Synthesized
QVQLQESGGGLVQAGGSLRLSCAASGNISAVIVMGWYRQAPGKERELVATISVGATTNYADSVKGRFTISRDNAKNTVYLQMNSLKPEDTAVYYCAVYANEPRDFWYWGQGTQVTVSS

SEQ ID NO: 8801 - protein, 118 aa, Artificial Sequence
  Chemically Synthesized
QVQLQESGGGLVQAGGSLRLSCAASGYISWGEYMGWYRQAPGKEREFVAAITVGSSTNYADSVKGRFTISRDNAKNTVYLQMNSLKPEDTAVYYCAVIGYSEYGHGYWGQGTQVTVSS

SEQ ID NO: 8802 - protein, 118 aa, Artificial Sequence
  Chemically Synthesized
QVQLQESGGGLVQAGGSLRLSCAASGYISWQSQMGWYRQAPGKERELVATINVGGTTNYADSVKGRFTISRDNAKNTVYLQMNSLKPEDTAVYYCAANEWYGAYHLYWGQGTQVTVSS

SEQ ID NO: 8803 - protein, 126 aa, Artificial Sequence
  Chemically Synthesized
QVQLQESGGGLVQAGGSLRLSCAASGNISGGSDMGWYRQAPGKERELVAAIDDGTTTNYADSVKGRFTISRDNAKNTVYLQMNSLKPEDTAVYYCAVNISTVIPSSTKSVLSNFYWGQGTQVTVSS

SEQ ID NO: 8804 - protein, 117 aa, Artificial Sequence
  Chemically Synthesized
QVQLQESGGGLVQAGGSLRLSCAASGSIFDTDSMGWYRQAPGKERELVAGINNGSITNYADSVKGRFTISRDNAKNTVYLQMNSLKPEDTAVYYCAVQYVLLSLFYWGQGTQVTVSS

SEQ ID NO: 8805 - protein, 118 aa, Artificial Sequence
  Chemically Synthesized
QVQLQESGGGLVQAGGSLRLSCAASGNIFYYVSMGWYRQAPGKEREFVAAIDVGGTTNYADSVKGRFTISRDNAKNTVYLQMNSLKPEDTAVYYCAAGHQRDDDHSYWGQGTQVTVSS

SEQ ID NO: 8806 - protein, 122 aa, Artificial Sequence
  Chemically Synthesized
QVQLQESGGGLVQAGGSLRLSCAASGSIFYVTGMGWYRQAPGKEREFVATIDRGANTYYADSVKGRFTISRDNAKNTVYLQMNSLKPEDTAVYYCAAVYYYYSSVYRNLYYWGQGTQVTVSS

SEQ ID NO: 8807 - protein, 122 aa, Artificial Sequence
  Chemically Synthesized
QVQLQESGGGLVQAGGSLRLSCAASGYISVKPYMGWYRQAPGKEREFVASIAPGGITNYADSVKGRFTISRDNAKNTVYLQMNSLKPEDTAVYYCAVDQNGLPYDYQPFYYWGQGTQVTVSS

SEQ ID NO: 8808 - protein, 122 aa, Artificial Sequence
  Chemically Synthesized
QVQLQESGGGLVQAGGSLRLSCAASGNISVGSVMGWYRQAPGKEREFVAAITYGTSTYYADSVKGRFTISRDNAKNTVYLQMNSLKPEDTAVYYCAASDPRDGIYDDIYGYWGQGTQVTVSS

SEQ ID NO: 8809 - protein, 122 aa, Artificial Sequence
  Chemically Synthesized
QVQLQESGGGLVQAGGSLRLSCAASGTISAGHPMGWYRQAPGKERELVAAIDTGTTTNYADSVKGRFTISRDNAKNTVYLQMNSLKPEDTAVYYCAAAEYTDRDEAYYHYYWGQGTQVTVSS

SEQ ID NO: 8810 - protein, 118 aa, Artificial Sequence
  Chemically Synthesized
QVQLQESGGGLVQAGGSLRLSCAASGYISRNDFMGWYRQAPGKEREFVASIAWGGSTYYADSVKGRFTISRDNAKNTVYLQMNSLKPEDTAVYYCAAYSYTTDSLDYWGQGTQVTVSS

SEQ ID NO: 8811 - protein, 126 aa, Artificial Sequence
  Chemically Synthesized
QVQLQESGGGLVQAGGSLRLSCAASGYISPPNFMGWYRQAPGKEREFVATIAWGTSTYYADSVKGRFTISRDNAKNTVYLQMNSLKPEDTAVYYCAAAYPVEKQGYNDTDYNFRYWGQGTQVTVSS

SEQ ID NO: 8812 - protein, 118 aa, Artificial Sequence
  Chemically Synthesized
QVQLQESGGGLVQAGGSLRLSCAASGTIFRLTTMGWYRQAPGKERELVAAIAYGTITNYADSVKGRFTISRDNAKNTVYLQMNSLKPEDTAVYYCAVRDTFAVQYDYWGQGTQVTVSS

SEQ ID NO: 8813 - protein, 116 aa, Artificial Sequence
  Chemically Synthesized
QVQLQESGGGLVQAGGSLRLSCAASGNIFTYWLMGWYRQAPGKERELVPVLLLVVLPYADSVKGRFTISRDNAKNTVYLQMNSLKPEDTAVYYCAAPSYDFVTLYWGQGTQVTVSS

SEQ ID NO: 8814 - protein, 123 aa, Artificial Sequence
  Chemically Synthesized
QVQLQESGGGLVQAGGSLRLSCAASGNIFADFYMGWYRQAPGKEREFVATITSTYYADSVKGRFTISRDNAKNTVYLQMNSLKPEDTAVYYCAVVGYVTATYTTTTDAYYDYWGQGTQVTVSS

SEQ ID NO: 8815 - protein, 121 aa, Artificial Sequence
  Chemically Synthesized
QVQLQESGGGLVQAGGSLRLSCAASGSIFDAWQMGWYRQAPGKERELVASIDGGTNTYYADSVKGRFTISRDNAKNTVYLQMNSLKPEDTAVYYCAVPYYQEHGAIYSMYWGQGTQVTVSS

SEQ ID NO: 8816 - protein, 126 aa, Artificial Sequence
  Chemically Synthesized
QVQLQESGGGLVQAGGSLRLSCAASGSIFLSYYMGWYRQAPGKERELVAAIAGGANTNYADSVKGRFTISRDNAKNTVYLQMNSLKPEDTAVYYCAVTFGYPTYGYDARYYAHYYWGQGTQVTVSS

SEQ ID NO: 8817 - protein, 113 aa, Artificial Sequence
  Chemically Synthesized
QVQLQESGGGLVQAGGSLRLSCAASGSISSWQYMGWYRQAPGKERELVAGIADGTSTNYADSVKGRFTISRDNAKNTVYLQMNSLKPEDTAVYYCAAVPHWYWGQGTQVTVSS

SEQ ID NO: 8818 - protein, 121 aa, Artificial Sequence
  Chemically Synthesized
QVQLQESGGGLVQAGGSLRLSCAASGYISYLRVMGWYRQAPGKERELVAGIGGGASTYYADSVKGRFTISRDNAKNTVYLQMNSLKPEDTAVYYCAARDAGVRDGVALPYWGQGTQVTVSS

SEQ ID NO: 8819 - protein, 118 aa, Artificial Sequence
  Chemically Synthesized
QVQLQESGGGLVQAGGSLRLSCAASGNISYYVTMGWYRQAPGKERELVAAINIGGTTYYADSVKGRFTISRDNAKNTVYLQMNSLKPEDTAVYYCAVYIVNYLDHFYWGQGTQVTVSS

SEQ ID NO: 8820 - protein, 118 aa, Artificial Sequence
  Chemically Synthesized
QVQLQESGGGLVQAGGSLRLSCAASGSIFGPIYMGWYRQAPGKERELVASIDYGAITNYADSVKGRFTISRDNAKNTVYLQMNSLKPEDTAVYYCAVYDVYYDVHDYWGQGTQVTVSS

SEQ ID NO: 8821 - protein, 118 aa, Artificial Sequence
  Chemically Synthesized
QVQLQESGGGLVQAGGSLRLSCAASGSIFDDTGMGWYRQAPGKEREFVAGIAYGGTTNYADSVKGRFTISRDNAKNTVYLQMNSLKPEDTAVYYCAVYSASTPDLYYWGQGTQVTVSS

SEQ ID NO: 8822 - protein, 122 aa, Artificial Sequence
  Chemically Synthesized
QVQLQESGGGLVQAGGSLRLSCAASGNIFDYRVMGWYRQAPGKERELVASINSGGTTYYADSVKGRFTISRDNAKNTVYLQMNSLKPEDTAVYYCAVTYTEGAIGTGNFVYWGQGTQVTVSS

SEQ ID NO: 8823 - protein, 125 aa, Artificial Sequence
  Chemically Synthesized
QVQLQESGGGLVQAGGSLRLSCAASGTISYESYMGWYRQAPGKEREFVAAIGQGGSTYYADSVKGRFTISRDNAKNTVYLQMNSLKPEDTAVYYCAVYTDGYQQTLLYSTTCIYWGQGTQVTVSS

SEQ ID NO: 8824 - protein, 121 aa, Artificial Sequence
  Chemically Synthesized
QVQLQESGGGLVQAGGSLRLSCAASGYIFDITQMGWYRQAPGKERELVATIGGGITNYADSVKGRFTISRDNAKNTVYLQMNSLKPEDTAVYYCAAVGDRYAYLLRRYPYWGQGTQVTVSS

SEQ ID NO: 8825 - protein, 117 aa, Artificial Sequence
  Chemically Synthesized
QVQLQESGGGLVQAGGSLRLSCAASGSISNYGWMGWYRQAPGKEREFVASINRGITYYADSVKGRFTISRDNAKNTVYLQMNSLKPEDTAVYYCAADGTPRYDLEYWGQGTQVTVSS

SEQ ID NO: 8826 - protein, 123 aa, Artificial Sequence
  Chemically Synthesized
QVQLQESGGGLVQAGGSLRLSCAASGNISDHEIMGWYRQAPGKERELVASIDTGASTYYADSVKGRFTISRDNAKNTVYLQMNSLKPEDTAVYYCAVIPPQSSPDGWDRYRYWGQGTQVTVSS

SEQ ID NO: 8827 - protein, 122 aa, Artificial Sequence
  Chemically Synthesized
QVQLQESGGGLVQAGGSLRLSCAASGTIFAAYVMGWYRQAPGKERELVATIGRGATTNYADSVKGRFTISRDNAKNTVYLQMNSLKPEDTAVYYCAVRHRPQWPYYYYHWYWGQGTQVTVSS

SEQ ID NO: 8828 - protein, 121 aa, Artificial Sequence
  Chemically Synthesized
QVQLQESGGGLVQAGGSLRLSCAASGYIFHQRDMGWYRQAPGKERELVAAITYGGNTYYADSVKGRFTISRDNAKNTVYLQMNSLKPEDTAVYYCAAYFEALRYIALLPYWGQGTQVTVSS

SEQ ID NO: 8829 - protein, 118 aa, Artificial Sequence
  Chemically Synthesized
QVQLQESGGGLVQAGGSLRLSCAASGSISVAFQMGWYRQAPGKERELVASIAHGTNTYYADSVKGRFTISRDNAKNTVYLQMNSLKPEDTAVYYCAVIVVFQWYHRYWGQGTQVTVSS

SEQ ID NO: 8830 - protein, 118 aa, Artificial Sequence
  Chemically Synthesized
QVQLQESGGGLVQAGGSLRLSCAASGSIFWLGVMGWYRQAPGKEREFVASINYGANTNYADSVKGRFTISRDNAKNTVYLQMNSLKPEDTAVYYCAVLYVYPYTLNYWGQGTQVTVSS

SEQ ID NO: 8831 - protein, 119 aa, Artificial Sequence
  Chemically Synthesized
QVQLQESGGGLVQAGGSLRLSCAASGYISYDVSMGWYRQAPGKERELVATINDGTNTNYADSVKGRFTISRDNAKNTVYLQMNSLKPEDTAVYYCAVYDTGTTTVTIYWGQGTQVTVSS

SEQ ID NO: 8832 - protein, 122 aa, Artificial Sequence
  Chemically Synthesized
QVQLQESGGGLVQAGGSLRLSCAASGTIFVHDRMGWYRQAPGKEREFVATISPGSNTYYADSVKGRFTISRDNAKNTVYLQMNSLKPEDTAVYYCAAVLHYKYDYEYYLDYWGQGTQVTVSS

SEQ ID NO: 8833 - protein, 123 aa, Artificial Sequence
  Chemically Synthesized
QVQLQESGGGLVQAGGSLRLSCAASGTISSRDFMGWYRQAPGKEREFVATIAAGASTNYADSVKGRFTISRDNAKNTVYLQMNSLKPEDTAVYYCAVVITGYYRRVYDALAYWGQGTQVTVSS

SEQ ID NO: 8834 - protein, 118 aa, Artificial Sequence
  Chemically Synthesized
QVQLQESGGGLVQAGGSLRLSCAASGSISVPVPMGWYRQAPGKEREFVASIDLGTNTNYADSVKGRFTISRDNAKNTVYLQMNSLKPEDTAVYYCAVYTRVTTPFTYWGQGTQVTVSS

SEQ ID NO: 8835 - protein, 114 aa, Artificial Sequence
  Chemically Synthesized
QVQLQESGGGLVQAGGSLRLSCAASGYISAVTYMGWYRQAPGKERELVASINNGGNTYYADSVKGRFTISRDNAKNTVYLQMNSLKPEDTAVYYCAVYTRHVYWGQGTQVTVSS

SEQ ID NO: 8836 - protein, 126 aa, Artificial Sequence
  Chemically Synthesized
QVQLQESGGGLVQAGGSLRLSCAASGKYFCSVRMGWYRQAPGKEREFVATINHGTSTNYADSVKGRFTISRDNAKNTVYLQMNSLKPEDTAVYYCAVQYHTVDGNPIYDVPIFSYWGQGTQVTVSS

SEQ ID NO: 8837 - protein, 117 aa, Artificial Sequence
  Chemically Synthesized
QVQLQESGGGLVQAGGSLRLSCAASGYISDSYTMGWYRQAPGKERELVAAIGLGGSTNYADSVKGRFTISRDNAKNTVYLQMNSLKPEDTAVYYCAVISSGLVTIYWGQGTQVTVSS

SEQ ID NO: 8838 - protein, 118 aa, Artificial Sequence
  Chemically Synthesized
QVQLQESGGGLVQAGGSLRLSCAASGTISAAYNMGWYRQAPGKEREFVATISYGGTTYYADSVKGRFTISRDNAKNTVYLQMNSLKPEDTAVYYCAVYYSYYDDHTYWGQGTQVTVSS

SEQ ID NO: 8839 - protein, 120 aa, Artificial Sequence
  Chemically Synthesized
QVQLQESGGGLVQAGGSLRLSCAASGTIFDTGYMGWYRQAPGKEREFVAAIGSGTTTYYADSVKGRFTISRDNAKNTVYLQMNSLKPEDTAVYYCAASLGNVLTTTFFYWGQGTQVTVSS

SEQ ID NO: 8840 - protein, 122 aa, Artificial Sequence
  Chemically Synthesized
QVQLQESGGGLVQAGGSLRLSCAASGTIFLRSWMGWYRQAPGKEREFVAAINNGTNTYYADSVKGRFTISRDNAKNTVYLQMNSLKPEDTAVYYCAVVQPFYRDASPLYYYWGQGTQVTVSS

SEQ ID NO: 8841 - protein, 118 aa, Artificial Sequence
  Chemically Synthesized
QVQLQESGGGLVQAGGSLRLSCAASGTISPFKFMGWYRQAPGKERELVATISYGTTTNYADSVKGRFTISRDNAKNTVYLQMNSLKPEDTAVYYCAVLYYATGHLPYWGQGTQVTVSS

SEQ ID NO: 8842 - protein, 118 aa, Artificial Sequence
  Chemically Synthesized
QVQLQESGGGLVQAGGSLRLSCAASGTIFPTNGMGWYRQAPGKEREFVAAISVGASTNYADSVKGRFTISRDNAKNTVYLQMNSLKPEDTAVYYCAVGEQFGTAHVYWGQGTQVTVSS

SEQ ID NO: 8843 - protein, 115 aa, Artificial Sequence
  Chemically Synthesized
QVQLQESGGGLVQAGGSLRLSCAASGTILTMGWYRQAPGKEREFVAAIGSGSNTNYADSVKGRFTISRDNAKNTVYLQMNSLKPEDTAVYYCAVTKGNTQAHYYWGQGTQVTVSS

SEQ ID NO: 8844 - protein, 117 aa, Artificial Sequence
  Chemically Synthesized
QVQLQESGGGLVQAGGSLRLSCAASGSIFLTNMGWYRQAPGKEREFVAGIDYGTSTNYADSVKGRFTISRDNAKNTVYLQMNSLKPEDTAVYYCAVYGHSATGHYYWGQGTQVTVSS

SEQ ID NO: 8845 - protein, 121 aa, Artificial Sequence
  Chemically Synthesized
QVQLQESGGGLVQAGGSLRLSCAASGTISATGVMGWYRQAPGKEREFVASISIGTTTYYADSVKGRFTISRDNAKNTVYLQMNSLKPEDTAVYYCAAYDRYLDVSPVFAYWGQGTQVTVSS

SEQ ID NO: 8846 - protein, 118 aa, Artificial Sequence
  Chemically Synthesized
QVQLQESGGGLVQAGGSLRLSCAASGNISKGYYMGWYRQAPGKERELVATIADGTNTYYADSVKGRFTISRDNAKNTVYLQMNSLKPEDTAVYYCAAYDNVYELYSYWGQGTQVTVSS

SEQ ID NO: 8847 - protein, 119 aa, Artificial Sequence
  Chemically Synthesized
QVQLQESGGGLVQAGGSLRLSCAASGTISHDIGMGWYRQAPGKEREFVATITTGAITYYADSVKGRFTISRDNAKNTVYLQMNSLKPEDTAVYYCAVDQPGYQDQLYYWGQGTQVTVSS

SEQ ID NO: 8848 - protein, 122 aa, Artificial Sequence
  Chemically Synthesized
QVQLQESGGGLVQAGGSLRLSCAASGNISLDVHMGWYRQAPGKERELVASIDPGATTYYADSVKGRFTISRDNAKNTVYLQMNSLKPEDTAVYYCAVKTGTDYPYVDSHAYWGQGTQVTVSS

SEQ ID NO: 8849 - protein, 119 aa, Artificial Sequence
  Chemically Synthesized
QVQLQESGGGLVQAGGSLRLSCAASGSISVVTNYMGWYRQAPGKERELVAGIANGGITYYADSVKGRFTISRDNAKNTVYLQMNSLKPEDTAVYYCAAEHSYYRWYDYWGQGTQVTVSS

SEQ ID NO: 8850 - protein, 118 aa, Artificial Sequence
  Chemically Synthesized
QVQLQESGGGLVQAGGSLRLSCAASGTISDNDNMGWYRQAPGKERELVATIAGGASTNYADSVKGRFTISRDNAKNTVYLQMNSLKPEDTAVYYCAVPYRYYGQHAYWGQGTQVTVSS

SEQ ID NO: 8851 - protein, 121 aa, Artificial Sequence
  Chemically Synthesized
QVQLQESGGGLVQAGGSLRLSCAASGSISAVRYMGWYRQAPGKEREFVASIGIGVVPYADSVKGRFTISRDNAKNTVYLQMNSLKPEDTAVYYCAADSGYLPFGYTLHVYWGQGTQVTVSS

SEQ ID NO: 8852 - protein, 126 aa, Artificial Sequence
  Chemically Synthesized
QVQLQESGGGLVQAGGSLRLSCAASGSIFERYGMGWYRQAPGKEREFVASIDEGASTYYADSVKGRFTISRDNAKNTVYLQMNSLKPEDTAVYYCAVPPVWLLIWLYYAYVLLIYWGQGTQVTVSS

SEQ ID NO: 8853 - protein, 118 aa, Artificial Sequence
  Chemically Synthesized
QVQLQESGGGLVQAGGSLRLSCAASGTIFLIHGMGWYRQAPGKEREFVAAIALGGTTYYADSVKGRFTISRDNAKNTVYLQMNSLKPEDTAVYYCAAFPSFTLVFAYWGQGTQVTVSS

SEQ ID NO: 8854 - protein, 111 aa, Artificial Sequence
  Chemically Synthesized
QVQLQESGGGLVQAGGSLRLSCAASGSIFGDDYMGWYRQAPGKEREFGTTYYADSVKGRFTISRDNAKNTVYLQMNSLKPEDTAVYYCAALHDFAETFTYWGQGTQVTVSS

SEQ ID NO: 8855 - protein, 122 aa, Artificial Sequence
  Chemically Synthesized
QVQLQESGGGLVQAGGSLRLSCAASGTISYYYIMGWYRQAPGKERELVATIDGGGITNYADSVKGRFTISRDNAKNTVYLQMNSLKPEDTAVYYCAVRYEYDRPQTRPFSYWGQGTQVTVSS

SEQ ID NO: 8856 - protein, 122 aa, Artificial Sequence
  Chemically Synthesized
QVQLQESGGGLVQAGGSLRLSCAASGNISDDEAMGWYRQAPGKEREFVAAISHGGSTYYADSVKGRFTISRDNAKNTVYLQMNSLKPEDTAVYYCAVIYNYSGRDYHPYDYWGQGTQVTVSS

SEQ ID NO: 8857 - protein, 126 aa, Artificial Sequence
  Chemically Synthesized
QVQLQESGGGLVQAGGSLRLSCAASGTIFYLGAMGWYRQAPGKEREFVAGIASGAITNYADSVKGRFTISRDNAKNTVYLQMNSLKPEDTAVYYCAARLFDIGPYGQESDAYYLYWGQGTQVTVSS

SEQ ID NO: 8858 - protein, 118 aa, Artificial Sequence
  Chemically Synthesized
QVQLQESGGGLVQAGGSLRLSCAASGYIFRQTRMGWYRQAPGKERELVASIGAGGTTNYADSVKGRFTISRDNAKNTVYLQMNSLKPEDTAVYYCAVYDWLYVWFHYWGQGTQVTVSS

SEQ ID NO: 8859 - protein, 122 aa, Artificial Sequence
  Chemically Synthesized
QVQLQESGGGLVQAGGSLRLSCAASGNISVYYTMGWYRQAPGKERELVAGIGTGTNTNYADSVKGRFTISRDNAKNTVYLQMNSLKPEDTAVYYCAVGDWDQEGVYTYYAYWGQGTQVTVSS

SEQ ID NO: 8860 - protein, 117 aa, Artificial Sequence
  Chemically Synthesized
QVQLQESGGGLVQAGGSLRLSCAASGSIFQFDVMGWYRQAPGKERELVAGINIGTITNYADSVKGRFTISRDNAKNTVYLQMNSLKPEDTAVYYCAAGQRATPSLYWGQGTQVTVSS

SEQ ID NO: 8861 - protein, 126 aa, Artificial Sequence
  Chemically Synthesized
QVQLQESGGGLVQAGGSLRLSCAASGSIFDYIYMGWYRQAPGKERELVATIDYGAITYYADSVKGRFTISRDNAKNTVYLQMNSLKPEDTAVYYCAAYVAWTWGEPERYGFRYYYWGQGTQVTVSS

SEQ ID NO: 8862 - protein, 126 aa, Artificial Sequence
  Chemically Synthesized
QVQLQESGGGLVQAGGSLRLSCAASGYISGPWYMGWYRQAPGKEREFVAAIDKGTTTNYADSVKGRFTISRDNAKNTVYLQMNSLKPEDTAVYYCAVVYWVHDWDIGYIGGDHPYWGQGTQVTVSS

SEQ ID NO: 8863 - protein, 117 aa, Artificial Sequence
  Chemically Synthesized
QVQLQESGGGLVQAGGSLRLSCAASGYIFGDDYMGWYRQAPGKERELVASMITVLLPYADSVKGRFTISRDNAKNTVYLQMNSLKPEDTAVYYCAVVLAYAHDHYYWGQGTQVTVSS

SEQ ID NO: 8864 - protein, 122 aa, Artificial Sequence
  Chemically Synthesized
QVQLQESGGGLVQAGGSLRLSCAASGSIFRYGGMGWYRQAPGKEREFVASISVGGNTNYADSVKGRFTISRDNAKNTVYLQMNSLKPEDTAVYYCAVDVYGHGRGFYIHVYWGQGTQVTVSS

SEQ ID NO: 8865 - protein, 122 aa, Artificial Sequence
  Chemically Synthesized
QVQLQESGGGLVQAGGSLRLSCAASGSISPTVPMGWYRQAPGKEREFVASIGIGATTNYADSVKGRFTISRDNAKNTVYLQMNSLKPEDTAVYYCAVIHQQDADRSGTLGYWGQGTQVTVSS

SEQ ID NO: 8866 - protein, 126 aa, Artificial Sequence
  Chemically Synthesized
QVQLQESGGGLVQAGGSLRLSCAASGNIFSGLSMGWYRQAPGKERELVATIGIGASTYYADSVKGRFTISRDNAKNTVYLQMNSLKPEDTAVYYCAASGQTGLGAPGQDHLPHRYWGQGTQVTVSS

SEQ ID NO: 8867 - protein, 118 aa, Artificial Sequence
  Chemically Synthesized
QVQLQESGGGLVQAGGSLRLSCAASGTISSATTMGWYRQAPGKERELVASIGYGSSTYYADSVKGRFTISRDNAKNTVYLQMNSLKPEDTAVYYCAVWGQTYNSHVYWGQGTQVTVSS

SEQ ID NO: 8868 - protein, 118 aa, Artificial Sequence
  Chemically Synthesized
QVQLQESGGGLVQAGGSLRLSCAASGYIFATEYMGWYRQAPGKEREFVATIDYGASTNYADSVKGRFTISRDNAKNTVYLQMNSLKPEDTAVYYCAVSSGDYSHHSYWGQGTQVTVSS

SEQ ID NO: 8869 - protein, 126 aa, Artificial Sequence
  Chemically Synthesized
QVQLQESGGGLVQAGGSLRLSCAASGTISYSYSMGWYRQAPGKERELVAAINAGGSTYYADSVKGRFTISRDNAKNTVYLQMNSLKPEDTAVYYCAVDGYVDKSSYYDVDADFLYWGQGTQVTVSS

SEQ ID NO: 8870 - protein, 120 aa, Artificial Sequence
  Chemically Synthesized
QVQLQESGGGLVQAGGSLRLSCAASGSISYTDMGWYRQAPGKERELVATISYGGITYYADSVKGRFTISRDNAKNTVYLQMNSLKPEDTAVYYCAATDRPWYGYYYLLYWGQGTQVTVSS

SEQ ID NO: 8871 - protein, 126 aa, Artificial Sequence
  Chemically Synthesized
QVQLQESGGGLVQAGGSLRLSCAASGTIFYYGDMGWYRQAPGKERELVATISSGGITNYADSVKGRFTISRDNAKNTVYLQMNSLKPEDTAVYYCAVLYPGGASYFLPSWLELVYWGQGTQVTVSS

SEQ ID NO: 8872 - protein, 121 aa, Artificial Sequence
  Chemically Synthesized
QVQLQESGGGLVQAGGSLRLSCAASGNIFSQADMGWYRQAPGKERELVAGISIGASTNYADSVKGRFTISRDNAKNTVYLQMNSLKPEDTAVYYCAAEWDGYRPSNRSIYWGQGTQVTVSS

SEQ ID NO: 8873 - protein, 118 aa, Artificial Sequence
  Chemically Synthesized
QVQLQESGGGLVQAGGSLRLSCAASGNISAYYEMGWYRQAPGKEREFVASITRGGTTYYADSVKGRFTISRDNAKNTVYLQMNSLKPEDTAVYYCAVEDYDGDSHDYWGQGTQVTVSS

SEQ ID NO: 8874 - protein, 121 aa, Artificial Sequence
  Chemically Synthesized
QVQLQESGGGLVQAGGSLRLSCAASGTISGLLMGWYRQAPGKERELVAGISGGSTTYYADSVKGRFTISRDNAKNTVYLQMNSLKPEDTAVYYCAVHAVAGVDQGEGHDYWGQGTQVTVSS

SEQ ID NO: 8875 - protein, 122 aa, Artificial Sequence
  Chemically Synthesized
QVQLQESGGGLVQAGGSLRLSCAASGYISYGWLMGWYRQAPGKERELVAAINGGGNTNYADSVKGRFTISRDNAKNTVYLQMNSLKPEDTAVYYCAVVYLWDIDIIVSFEYWGQGTQVTVSS

SEQ ID NO: 8876 - protein, 122 aa, Artificial Sequence
  Chemically Synthesized
QVQLQESGGGLVQAGGSLRLSCAASGSIFDDIFMGWYRQAPGKEREFVAAITDGTITYYADSVKGRFTISRDNAKNTVYLQMNSLKPEDTAVYYCAAPNGRWPYGLPSLDYWGQGTQVTVSS

SEQ ID NO: 8877 - protein, 126 aa, Artificial Sequence
  Chemically Synthesized
QVQLQESGGGLVQAGGSLRLSCAASGYIFGIYPMGWYRQAPGKEREFVAAIATGSITYYADSVKGRFTISRDNAKNTVYLQMNSLKPEDTAVYYCAVLYDGYIRYHYTAHDALAYWGQGTQVTVSS

SEQ ID NO: 8878 - protein, 122 aa, Artificial Sequence
  Chemically Synthesized
QVQLQESGGGLVQAGGSLRLSCAASGYISAKYVMGWYRQAPGKERELVATIGRGATTNYADSVKGRFTISRDNAKNTVYLQMNSLKPEDTAVYYCAVPRGYNRPPDYPYFYWGQGTQVTVSS

SEQ ID NO: 8879 - protein, 126 aa, Artificial Sequence
  Chemically Synthesized
QVQLQESGGGLVQAGGSLRLSCAASGTIFYGSMGWYRQAPGKEREFVATIADGSNTNYADSVKGRFTISRDNAKNTVYLQMNSLKPEDTAVYYCAVASVYTGRVGDEATTGRHAYWGQGTQVTVSS

SEQ ID NO: 8880 - protein, 122 aa, Artificial Sequence
  Chemically Synthesized
QVQLQESGGGLVQAGGSLRLSCAASGTISSNINMGWYRQAPGKERELVAAIDRGGTTYYADSVKGRFTISRDNAKNTVYLQMNSLKPEDTAVYYCAVGDYTGLDDRYILTYWGQGTQVTVSS

SEQ ID NO: 8881 - protein, 118 aa, Artificial Sequence
  Chemically Synthesized
QVQLQESGGGLVQAGGSLRLSCAASGSISLHINMGWYRQAPGKERELVASINRGGNTNYADSVKGRFTISRDNAKNTVYLQMNSLKPEDTAVYYCAVWHQDYRLHQYWGQGTQVTVSS

SEQ ID NO: 8882 - protein, 118 aa, Artificial Sequence
  Chemically Synthesized
QVQLQESGGGLVQAGGSLRLSCAASGTISYAPYMGWYRQAPGKERELVASISYGSTTNYADSVKGRFTISRDNAKNTVYLQMNSLKPEDTAVYYCAAFPKRYDGHSYWGQGTQVTVSS

SEQ ID NO: 8883 - protein, 125 aa, Artificial Sequence
  Chemically Synthesized
QVQLQESGGGLVQAGGSLRLSCAASGYISPYGYMGWYRQAPGKERELVATIAKGATYYADSVKGRFTISRDNAKNTVYLQMNSLKPEDTAVYYCAAVRASYFVYLSADAWYHYYWGQGTQVTVSS

SEQ ID NO: 8884 - protein, 118 aa, Artificial Sequence
  Chemically Synthesized
QVQLQESGGGLVQAGGSLRLSCAASGSISYRRAMGWYRQAPGKERELVATIGHGTSTYYADSVKGRFTISRDNAKNTVYLQMNSLKPEDTAVYYCAVYLVNIPYFGYWGQGTQVTVSS

SEQ ID NO: 8885 - protein, 121 aa, Artificial Sequence
  Chemically Synthesized
QVQLQESGGGLVQAGGSLRLSCAASGYISRAAYMGWYRQAPGKERELVATISRGANTNYADSVKGRFTISRDNAKNTVYLQMNSLKPEDTAVYYCAVHDGAYTSPNRHYYWGQGTQVTVSS

SEQ ID NO: 8886 - protein, 118 aa, Artificial Sequence
  Chemically Synthesized
QVQLQESGGGLVQAGGSLRLSCAASGTIFHLTFMGWYRQAPGKEREFVATIDDGSSTYYADSVKGRFTISRDNAKNTVYLQMNSLKPEDTAVYYCAVWSQAPYRHDYWGQGTQVTVSS

SEQ ID NO: 8887 - protein, 117 aa, Artificial Sequence
  Chemically Synthesized
QVQLQESGGGLVQAGGSLRLSCAASGSISPATRMGWYRQAPGKEREFVATINDGTSTYYADSVKGRFTISRDNAKNTVYLQMNSLKPEDTAVYYCAAGICTTSVIYWGQGTQVTVSS

SEQ ID NO: 8888 - protein, 116 aa, Artificial Sequence
  Chemically Synthesized
QVQLQESGGGLVQAGGSLRLSCAASGTISFSDGMGWYRQAPGKEREFVASIAGGGSTNYADSVKGRFTISRDNAKNTVYLQMNSLKPEDTAVYYCAFRTRMTNIYWGQGTQVTVSS

SEQ ID NO: 8889 - protein, 126 aa, Artificial Sequence
  Chemically Synthesized
QVQLQESGGGLVQAGGSLRLSCAASGYISDHGYMGWYRQAPGKERELVAGIAYGGTTYYADSVKGRFTISRDNAKNTVYLQMNSLKPEDTAVYYCAVPDTVNYYQGYVRGYDHRYWGQGTQVTVSS

SEQ ID NO: 8890 - protein, 118 aa, Artificial Sequence
  Chemically Synthesized
QVQLQESGGGLVQAGGSLRLSCAASGSIFRTEAMGWYRQAPGKERELVAGIDPGGITNYADSVKGRFTISRDNAKNTVYLQMNSLKPEDTAVYYCAVDGQTGPRFPYWGQGTQVTVSS

SEQ ID NO: 8891 - protein, 118 aa, Artificial Sequence
  Chemically Synthesized
QVQLQESGGGLVQAGGSLRLSCAASGTIFGRDDMGWYRQAPGKEREFVATISNGANTNYADSVKGRFTISRDNAKNTVYLQMNSLKPEDTAVYYCAAPYTGVRALLYWGQGTQVTVSS

SEQ ID NO: 8892 - protein, 125 aa, Artificial Sequence
  Chemically Synthesized
QVQLQESGGGLVQAGGSLRLSCAASGYISSRVGMGWYRQAPGKEREFVAAIDAGGNTYYADSVKGRFTISRDNAKNTVYLQMNSLKPEDTAVYYCAAYPLVDYVYTKWYDNYGYWGQGTQVTVSS

SEQ ID NO: 8893 - protein, 126 aa, Artificial Sequence
  Chemically Synthesized
QVQLQESGGGLVQAGGSLRLSCAASGTISYATWMGWYRQAPGKEREFVAAINVGGTTNYADSVKGRFTISRDNAKNTVYLQMNSLKPEDTAVYYCAVHAVDPQLYPDYETYPYGYWGQGTQVTVSS

SEQ ID NO: 8894 - protein, 126 aa, Artificial Sequence
  Chemically Synthesized
QVQLQESGGGLVQAGGSLRLSCAASGSIFLVRAMGWYRQAPGKEREFVAGINEGTSTYYADSVKGRFTISRDNAKNTVYLQMNSLKPEDTAVYYCAAYRWYVSDPYVTTVRYLRYWGQGTQVTVSS

SEQ ID NO: 8895 - protein, 126 aa, Artificial Sequence
  Chemically Synthesized
QVQLQESGGGLVQAGGSLRLSCAASGNIFDNTRMGWYRQAPGKERELVAAIAYGAITNYADSVKGRFTISRDNAKNTVYLQMNSLKPEDTAVYYCAANHHPGQGQGAYTETALNYWGQGTQVTVSS

SEQ ID NO: 8896 - protein, 118 aa, Artificial Sequence
  Chemically Synthesized
QVQLQESGGGLVQAGGSLRLSCAASGNIFPVYAMGWYRQAPGKEREFVASITTGSNTYYADSVKGRFTISRDNAKNTVYLQMNSLKPEDTAVYYCAAQFLDTYRYVYWGQGTQVTVSS

SEQ ID NO: 8897 - protein, 126 aa, Artificial Sequence
  Chemically Synthesized
QVQLQESGGGLVQAGGSLRLSCAASGTIFPSLAMGWYRQAPGKEREFVAGINTGTSTYYADSVKGRFTISRDNAKNTVYLQMNSLKPEDTAVYYCAAIVGYYRSSDGVNYKLHRYWGQGTQVTVSS

SEQ ID NO: 8898 - protein, 122 aa, Artificial Sequence
  Chemically Synthesized
QVQLQESGGGLVQAGGSLRLSCAASGYISVGVDMGWYRQAPGKERELVASITVGATTYYADSVKGRFTISRDNAKNTVYLQMNSLKPEDTAVYYCAALLDYYYGTGTYYLYWGQGTQVTVSS

SEQ ID NO: 8899 - protein, 118 aa, Artificial Sequence
  Chemically Synthesized
QVQLQESGGGLVQAGGSLRLSCAASGYIFLGPYMGWYRQAPGKEREFVAAIGLGTITNYADSVKGRFTISRDNAKNTVYLQMNSLKPEDTAVYYCAVWYTYGADHWYWGQGTQVTVSS

SEQ ID NO: 8900 - protein, 122 aa, Artificial Sequence
  Chemically Synthesized
QVQLQESGGGLVQAGGSLRLSCAASGSISVQYYMGWYRQAPGKERELVAGITYGSNTNYADSVKGRFTISRDNAKNTVYLQMNSLKPEDTAVYYCAVYLYYLYNLRVNHWYWGQGTQVTVSS

SEQ ID NO: 8901 - protein, 118 aa, Artificial Sequence
  Chemically Synthesized
QVQLQESGGGLVQAGGSLRLSCAASGYIFQSVLMGWYRQAPGKEREFVAGIGNGGSTYYADSVKGRFTISRDNAKNTVYLQMNSLKPEDTAVYYCAVLPYIDSLHDYWGQGTQVTVSS

SEQ ID NO: 8902 - protein, 118 aa, Artificial Sequence
  Chemically Synthesized
QVQLQESGGGLVQAGGSLRLSCAASGYIFLVKGMGWYRQAPGKEREFVAGISYGTNTYYADSVKGRFTISRDNAKNTVYLQMNSLKPEDTAVYYCAAYVYGAITHRYWGQGTQVTVSS

SEQ ID NO: 8903 - protein, 125 aa, Artificial Sequence
  Chemically Synthesized
QVQLQESGGGLVQAGGSLRLSCAASGTISYRDAMGWYRQAPGKEREFVAAIDGGTTTNYADSVKGRFTISRDNAKNTVYLQMNSLKPEDTAVYYCAATSAQREYDQVVPGTLDYWGQGTQVTVSS

SEQ ID NO: 8904 - protein, 118 aa, Artificial Sequence
  Chemically Synthesized
QVQLQESGGGLVQAGGSLRLSCAASGTIFYQDSMGWYRQAPGKERELVAAINDGGITYYADSVKGRFTISRDNAKNTVYLQMNSLKPEDTAVYYCAAAGITRWWHSYWGQGTQVTVSS

SEQ ID NO: 8905 - protein, 126 aa, Artificial Sequence
  Chemically Synthesized
QVQLQESGGGLVQAGGSLRLSCAASGSIFAAGYMGWYRQAPGKERELVAGITYGGNTYYADSVKGRFTISRDNAKNTVYLQMNSLKPEDTAVYYCAVDLVVWYDRSGESYTPLGYWGQGTQVTVSS

SEQ ID NO: 8906 - protein, 126 aa, Artificial Sequence
  Chemically Synthesized
QVQLQESGGGLVQAGGSLRLSCAASGNISWIVAMGWYRQAPGKERELVASIGRGGNTNYADSVKGRFTISRDNAKNTVYLQMNSLKPEDTAVYYCAASSRHAYYYGYRQHYGFPYWGQGTQVTVSS

SEQ ID NO: 8907 - protein, 117 aa, Artificial Sequence
  Chemically Synthesized
QVQLQESGGGLVQAGGSLRLSCAASGNISVPDLMGWYRQAPGKERELVAGIAGGTTYYADSVKGRFTISRDNAKNTVYLQMNSLKPEDTAVYYCAAFSPYRTGHDYWGQGTQVTVSS

SEQ ID NO: 8908 - protein, 122 aa, Artificial Sequence
  Chemically Synthesized
QVQLQESGGGLVQAGGSLRLSCAASGSISSRYYMGWYRQAPGKERELVAGIDKGATTNYADSVKGRFTISRDNAKNTVYLQMNSLKPEDTAVYYCAAPRDGFDFWRYYLSYWGQGTQVTVSS

SEQ ID NO: 8909 - protein, 122 aa, Artificial Sequence
  Chemically Synthesized
QVQLQESGGGLVQAGGSLRLSCAASGSISQRDNMGWYRQAPGKEREFVASITYGTSTYYADSVKGRFTISRDNAKNTVYLQMNSLKPEDTAVYYCAAFPRGPDWYRRPYYYWGQGTQVTVSS

SEQ ID NO: 8910 - protein, 126 aa, Artificial Sequence
  Chemically Synthesized
QVQLQESGGGLVQAGGSLRLSCAASGSIFSRGSMGWYRQAPGKERELVASISRGSITNYADSVKGRFTISRDNAKNTVYLQMNSLKPEDTAVYYCAVPRYWYLSDGRPVWRPHGYWGQGTQVTVSS

SEQ ID NO: 8911 - protein, 118 aa, Artificial Sequence
  Chemically Synthesized
QVQLQESGGGLVQAGGSLRLSCAASGNISYDSLMGWYRQAPGKEREFVAGITDGTTTYYADSVKGRFTISRDNAKNTVYLQMNSLKPEDTAVYYCAAFDWFLVKLDYWGQGTQVTVSS

SEQ ID NO: 8912 - protein, 126 aa, Artificial Sequence
  Chemically Synthesized
QVQLQESGGGLVQAGGSLRLSCAASGNIFGAFQMGWYRQAPGKEREFVATIAIGSSTNYADSVKGRFTISRDNAKNTVYLQMNSLKPEDTAVYYCAARHGDWGDRAYPRIDLYYYWGQGTQVTVSS

SEQ ID NO: 8913 - protein, 117 aa, Artificial Sequence
  Chemically Synthesized
QVQLQESGGGLVQAGGSLRLSCAASGYISYSLGMGWYRQAPGKERELVASITEVLLPYADSVKGRFTISRDNAKNTVYLQMNSLKPEDTAVYYCAAYNQYYISHGYWGQGTQVTVSS

SEQ ID NO: 8914 - protein, 118 aa, Artificial Sequence
  Chemically Synthesized
QVQLQESGGGLVQAGGSLRLSCAASGYIFGGYAMGWYRQAPGKEREFVAGIDYGGTTYYADSVKGRFTISRDNAKNTVYLQMNSLKPEDTAVYYCAVFFYWGPPLDYWGQGTQVTVSS

SEQ ID NO: 8915 - protein, 118 aa, Artificial Sequence
  Chemically Synthesized
QVQLQESGGGLVQAGGSLRLSCAASGNIFYYHLMGWYRQAPGKEREFVAGISYGGSTYYADSVKGRFTISRDNAKNTVYLQMNSLKPEDTAVYYCAAYAWFDTGYDYWGQGTQVTVSS

SEQ ID NO: 8916 - protein, 118 aa, Artificial Sequence
  Chemically Synthesized
QVQLQESGGGLVQAGGSLRLSCAASGYISSGVLMGWYRQAPGKEREFVAGISYGSTTYYADSVKGRFTISRDNAKNTVYLQMNSLKPEDTAVYYCAAYSWPSLILDYWGQGTQVTVSS

SEQ ID NO: 8917 - protein, 124 aa, Artificial Sequence
  Chemically Synthesized
QVQLQESGGGLVQAGGSLRLSCAASGNISLYTYMGWYRQAPGKEREFVASIDVGIPYADSVKGRFTISRDNAKNTVYLQMNSLKPEDTAVYYCAAYGYQESVNDRERWGDHQYWGQGTQVTVSS

SEQ ID NO: 8918 - protein, 117 aa, Artificial Sequence
  Chemically Synthesized
QVQLQESGGGLVQAGGSLRLSCAASGNISIIAMGWYRQAPGKERELVAAINYGSTTYYADSVKGRFTISRDNAKNTVYLQMNSLKPEDTAVYYCAAWARAHPRFGYWGQGTQVTVSS

SEQ ID NO: 8919 - protein, 117 aa, Artificial Sequence
  Chemically Synthesized
QVQLQESGGGLVQAGGSLRLSCAASGTIFPGYSMGWYRQAPGKERELVAAIARGTSTYYADSVKGRFTISRDNAKNTVYLQMNSLKPEDTAVYYCAVYTWYRDSIYWGQGTQVTVSS

SEQ ID NO: 8920 - protein, 117 aa, Artificial Sequence
  Chemically Synthesized
QVQLQESGGGLVQAGGSLRLSCAASGSFLLLLMGWYRQAPGKERELVATISEGTTTNYADSVKGRFTISRDNAKNTVYLQMNSLKPEDTAVYYCAAYNGKLGPHHYWGQGTQVTVSS

SEQ ID NO: 8921 - protein, 118 aa, Artificial Sequence
  Chemically Synthesized
QVQLQESGGGLVQAGGSLRLSCAASGYISPQYSMGWYRQAPGKEREFVAAINNGATTYYADSVKGRFTISRDNAKNTVYLQMNSLKPEDTAVYYCAAEALRDAALFYWGQGTQVTVSS

SEQ ID NO: 8922 - protein, 122 aa, Artificial Sequence
  Chemically Synthesized
QVQLQESGGGLVQAGGSLRLSCAASGSISSVWYMGWYRQAPGKEREFVASIDLGSITYYADSVKGRFTISRDNAKNTVYLQMNSLKPEDTAVYYCAALPIYYNWRAEGYPYWGQGTQVTVSS

SEQ ID NO: 8923 - protein, 118 aa, Artificial Sequence
  Chemically Synthesized
QVQLQESGGGLVQAGGSLRLSCAASGYIFTREPMGWYRQAPGKERELVAGISSGGNTNYADSVKGRFTISRDNAKNTVYLQMNSLKPEDTAVYYCAAATYYWSAHYYWGQGTQVTVSS

SEQ ID NO: 8924 - protein, 117 aa, Artificial Sequence
  Chemically Synthesized
QVQLQESGGGLVQAGGSLRLSCAASGNISDQSMGWYRQAPGKEREFVASIALGANTNYADSVKGRFTISRDNAKNTVYLQMNSLKPEDTAVYYCAADDYGTVGHGYWGQGTQVTVSS

SEQ ID NO: 8925 - protein, 122 aa, Artificial Sequence
  Chemically Synthesized
QVQLQESGGGLVQAGGSLRLSCAASGNISDTVSMGWYRQAPGKERELVASIADGANTNYADSVKGRFTISRDNAKNTVYLQMNSLKPEDTAVYYCAAYVDVDGADYARHYYWGQGTQVTVSS

SEQ ID NO: 8926 - protein, 126 aa, Artificial Sequence
  Chemically Synthesized
QVQLQESGGGLVQAGGSLRLSCAASGSIFPPDVMGWYRQAPGKEREFVAGISVGGTTYYADSVKGRFTISRDNAKNTVYLQMNSLKPEDTAVYYCAALYQQDVYTNFGYYVYYRYWGQGTQVTVSS

SEQ ID NO: 8927 - protein, 124 aa, Artificial Sequence
  Chemically Synthesized
QVQLQESGGGLVQAGGSLRLSCAASGTIFIVDFMGWYRQAPGKERELVASIGRGGITNYADSVKGRFTISRDNAKNTVYLQMNSLKPEDTAVYYCAATGVDRGAYTDWYYFYYWGQGTQVTVSS

SEQ ID NO: 8928 - protein, 122 aa, Artificial Sequence
  Chemically Synthesized
QVQLQESGGGLVQAGGSLRLSCAASGYISQDSYMGWYRQAPGKEREFVAGIDTGGTTNYADSVKGRFTISRDNAKNTVYLQMNSLKPEDTAVYYCAVYDWASYTPPSLHLYWGQGTQVTVSS

SEQ ID NO: 8929 - protein, 118 aa, Artificial Sequence
  Chemically Synthesized
QVQLQESGGGLVQAGGSLRLSCAASGTIFQYFYMGWYRQAPGKERELVAGIAWGASTYYADSVKGRFTISRDNAKNTVYLQMNSLKPEDTAVYYCAVEDQLVVNYPYWGQGTQVTVSS

SEQ ID NO: 8930 - protein, 110 aa, Artificial Sequence
  Chemically Synthesized
QVQLQESGGGLVQAGGSLRLSCAASGSISAAAFMGWYRQAPGKEREFVATYADSVKGRFTISRDNAKNTVYLQMNSLKPEDTAVYYCAALGGLIYILGYWGQGTQVTVSS

SEQ ID NO: 8931 - protein, 122 aa, Artificial Sequence
  Chemically Synthesized
QVQLQESGGGLVQAGGSLRLSCAASGSIFRKVPMGWYRQAPGKEREFVAGISWGSSTYYADSVKGRFTISRDNAKNTVYLQMNSLKPEDTAVYYCAAFERATGTFYGYLRYWGQGTQVTVSS

SEQ ID NO: 8932 - protein, 121 aa, Artificial Sequence
  Chemically Synthesized
QVQLQESGGGLVQAGGSLRLSCAASGSISIVYTMGWYRQAPGKERELVAGIGVGTITNYADSVKGRFTISRDNAKNTVYLQMNSLKPEDTAVYYCAAHFSPSRPFQSTFYWGQGTQVTVSS

SEQ ID NO: 8933 - protein, 116 aa, Artificial Sequence
  Chemically Synthesized
QVQLQESGGGLVQAGGSLRLSCAASGYIFYGRWMGWYRQAPGKEREFVAAAYGGTTYYADSVKGRFTISRDNAKNTVYLQMNSLKPEDTAVYYCAAYTRSGLHVYWGQGTQVTVSS

SEQ ID NO: 8934 - protein, 117 aa, Artificial Sequence
  Chemically Synthesized
QVQLQESGGGLVQAGGSLRLSCAASGTISYDVDMGWYRQAPGKEREFVASIGGGTTTNYADSVKGRFTISRDNAKNTVYLQMNSLKPEDTAVYYCAAYTGNSLVLYWGQGTQVTVSS

SEQ ID NO: 8935 - protein, 122 aa, Artificial Sequence
  Chemically Synthesized
QVQLQESGGGLVQAGGSLRLSCAASGNIFGPGGMGWYRQAPGKEREFVAGINNGGTTYYADSVKGRFTISRDNAKNTVYLQMNSLKPEDTAVYYCAAYILYNPKVYRLYRYWGQGTQVTVSS

SEQ ID NO: 8936 - protein, 126 aa, Artificial Sequence
  Chemically Synthesized
QVQLQESGGGLVQAGGSLRLSCAASGNISYYYWMGWYRQAPGKERELVAAITQGGNTYYADSVKGRFTISRDNAKNTVYLQMNSLKPEDTAVYYCAAWDWRSGKTSIYDDAGYVYWGQGTQVTVSS

SEQ ID NO: 8937 - protein, 122 aa, Artificial Sequence
  Chemically Synthesized
QVQLQESGGGLVQAGGSLRLSCAASGTISGVFDMGWYRQAPGKEREFVASISYGTNTYYADSVKGRFTISRDNAKNTVYLQMNSLKPEDTAVYYCAAIVYAQWSGVLWHDYWGQGTQVTVSS

SEQ ID NO: 8938 - protein, 121 aa, Artificial Sequence
  Chemically Synthesized
QVQLQESGGGLVQAGGSLRLSCAASGSISALSMGWYRQAPGKERELVAAIAWGATTYYADSVKGRFTISRDNAKNTVYLQMNSLKPEDTAVYYCAAPENDQYVRDWRYFYWGQGTQVTVSS

SEQ ID NO: 8939 - protein, 118 aa, Artificial Sequence
  Chemically Synthesized
QVQLQESGGGLVQAGGSLRLSCAASGTIFVDYYMGWYRQAPGKEREFVASISYGATTYYADSVKGRFTISRDNAKNTVYLQMNSLKPEDTAVYYCAVGADRDISYPYWGQGTQVTVSS

SEQ ID NO: 8940 - protein, 118 aa, Artificial Sequence
  Chemically Synthesized
QVQLQESGGGLVQAGGSLRLSCAASGNIFTYYVMGWYRQAPGKERELVAAINQGAITNYADSVKGRFTISRDNAKNTVYLQMNSLKPEDTAVYYCAVRYASYADFSYWGQGTQVTVSS

SEQ ID NO: 8941 - protein, 122 aa, Artificial Sequence
  Chemically Synthesized
QVQLQESGGGLVQAGGSLRLSCAASGNIFPDYFMGWYRQAPGKEREFVATIDYGATTNYADSVKGRFTISRDNAKNTVYLQMNSLKPEDTAVYYCAVGLKYLRDGTAEYDYWGQGTQVTVSS

SEQ ID NO: 8942 - protein, 118 aa, Artificial Sequence
  Chemically Synthesized
QVQLQESGGGLVQAGGSLRLSCAASGNISQGSKMGWYRQAPGKEREFVAGIGTGAITYYADSVKGRFTISRDNAKNTVYLQMNSLKPEDTAVYYCAAWKYARYTYRYWGQGTQVTVSS

SEQ ID NO: 8943 - protein, 126 aa, Artificial Sequence
  Chemically Synthesized
QVQLQESGGGLVQAGGSLRLSCAASGSIFGRVDMGWYRQAPGKERELVATIARGGNTYYADSVKGRFTISRDNAKNTVYLQMNSLKPEDTAVYYCAVDYPWVERGYDYRYFLLGYWGQGTQVTVSS

SEQ ID NO: 8944 - protein, 118 aa, Artificial Sequence
  Chemically Synthesized
QVQLQESGGGLVQAGGSLRLSCAASGNIFRIYGMGWYRQAPGKEREFVAGIGTGSNTNYADSVKGRFTISRDNAKNTVYLQMNSLKPEDTAVYYCAALYYYYAWHRYWGQGTQVTVSS

SEQ ID NO: 8945 - protein, 121 aa, Artificial Sequence
  Chemically Synthesized
QVQLQESGGGLVQAGGSLRLSCAASGSISFSLMGWYRQAPGKERELVASIDGGSTTYYADSVKGRFTISRDNAKNTVYLQMNSLKPEDTAVYYCAVDWRRSHRSVETHGYWGQGTQVTVSS

SEQ ID NO: 8946 - protein, 120 aa, Artificial Sequence
  Chemically Synthesized
QVQLQESGGGLVQAGGSLRLSCAASGSIFSRVAMGWYRQAPGKEREFVAGIGWGAITNYADSVKGRFTISRDNAKNTVYLQMNSLKPEDTAVYYCAVIDYTYGGDFYPYWGQGTQVTVSS

SEQ ID NO: 8947 - protein, 118 aa, Artificial Sequence
  Chemically Synthesized
QVQLQESGGGLVQAGGSLRLSCAASGTIFHWDYMGWYRQAPGKEREFVAAITAGSSTYYADSVKGRFTISRDNAKNTVYLQMNSLKPEDTAVYYCAAHTILTYTHFYWGQGTQVTVSS

SEQ ID NO: 8948 - protein, 122 aa, Artificial Sequence
  Chemically Synthesized
QVQLQESGGGLVQAGGSLRLSCAASGSISRFDVMGWYRQAPGKERELVAAIAYGTSTNYADSVKGRFTISRDNAKNTVYLQMNSLKPEDTAVYYCAAGIGYLWYYRDDHTYWGQGTQVTVSS

SEQ ID NO: 8949 - protein, 122 aa, Artificial Sequence
  Chemically Synthesized
QVQLQESGGGLVQAGGSLRLSCAASGSIFADTVMGWYRQAPGKEREFVASINYGSNTYYADSVKGRFTISRDNAKNTVYLQMNSLKPEDTAVYYCAAPQHRYLSYTDRYFYWGQGTQVTVSS

SEQ ID NO: 8950 - protein, 122 aa, Artificial Sequence
  Chemically Synthesized
QVQLQESGGGLVQAGGSLRLSCAASGSISAGPYMGWYRQAPGKEREFVATIASGGSTYYADSVKGRFTISRDNAKNTVYLQMNSLKPEDTAVYYCAVGNRGNADVLHGFLYWGQGTQVTVSS

SEQ ID NO: 8951 - protein, 119 aa, Artificial Sequence
  Chemically Synthesized
QVQLQESGGGLVQAGGSLRLSCAASGYISGPDNMGWYRQAPGKERELVATINVGGSTNYADSVKGRFTISRDNAKNTVYLQMNSLKPEDTAVYYCAVGKALYSLLHAYWGQGTQVTVSS

SEQ ID NO: 8952 - protein, 122 aa, Artificial Sequence
  Chemically Synthesized
QVQLQESGGGLVQAGGSLRLSCAASGYISWYDYMGWYRQAPGKEREFVAAIDVGASTYYADSVKGRFTISRDNAKNTVYLQMNSLKPEDTAVYYCAAPTNNENKTPYLHNYWGQGTQVTVSS

SEQ ID NO: 8953 - protein, 117 aa, Artificial Sequence
  Chemically Synthesized
QVQLQESGGGLVQAGGSLRLSCAASGNIFYYYDMGWYRQAPGKERELVATINRGTSTNYADSVKGRFTISRDNAKNTVYLQMNSLKPEDTAVYYCAVNPSTISLIYWGQGTQVTVSS

SEQ ID NO: 8954 - protein, 126 aa, Artificial Sequence
  Chemically Synthesized
QVQLQESGGGLVQAGGSLRLSCAASGTISYNGAMGWYRQAPGKERELVAGINRGGSTNYADSVKGRFTISRDNAKNTVYLQMNSLKPEDTAVYYCAANVPQPAEGWYYAYGYYTYWGQGTQVTVSS

SEQ ID NO: 8955 - protein, 118 aa, Artificial Sequence
  Chemically Synthesized
QVQLQESGGGLVQAGGSLRLSCAASGSISDPFVMGWYRQAPGKERELVASIDYGTNTYYADSVKGRFTISRDNAKNTVYLQMNSLKPEDTAVYYCAVTAESRSRYLYWGQGTQVTVSS

SEQ ID NO: 8956 - protein, 122 aa, Artificial Sequence
  Chemically Synthesized
QVQLQESGGGLVQAGGSLRLSCAASGTIFVAIYMGWYRQAPGKEREFVATISTGGSTNYADSVKGRFTISRDNAKNTVYLQMNSLKPEDTAVYYCAVDYRAFADIYGPYSYWGQGTQVTVSS

SEQ ID NO: 8957 - protein, 117 aa, Artificial Sequence
  Chemically Synthesized
QVQLQESGGGLVQAGGSLRLSCAASGYIFLDAGMGWYRQAPGKERELVAAITSGGNTNYADSVKGRFTISRDNAKNTVYLQMNSLKPEDTAVYYCAVNYHDDSVMYWGQGTQVTVSS

SEQ ID NO: 8958 - protein, 122 aa, Artificial Sequence
  Chemically Synthesized
QVQLQESGGGLVQAGGSLRLSCAASGNISYPNVMGWYRQAPGKERELVASINAGSITNYADSVKGRFTISRDNAKNTVYLQMNSLKPEDTAVYYCAVPDRWSYDWYDQYVYWGQGTQVTVSS

SEQ ID NO: 8959 - protein, 125 aa, Artificial Sequence
  Chemically Synthesized
QVQLQESGGGLVQAGGSLRLSCAASGTISYRVNMGWYRQAPGKEREFVAGIGAGGNTNYADSVKGRFTISRDNAKNTVYLQMNSLKPEDTAVYYCAARDVVVTTTLLLGKVTIYWGQGTQVTVSS

SEQ ID NO: 8960 - protein, 118 aa, Artificial Sequence
  Chemically Synthesized
QVQLQESGGGLVQAGGSLRLSCAASGNISYIIHMGWYRQAPGKERELVATIDAGTTTQYADSVKGRFTISRDNAKNTVYLQMNSLKPEDTAVYYCAAAWPQNVSYLYWGQGTQVTVSS

SEQ ID NO: 8961 - protein, 126 aa, Artificial Sequence
  Chemically Synthesized
QVQLQESGGGLVQAGGSLRLSCAASGNISVVGAMGWYRQAPGKERELVAAIAWGSNTNYADSVKGRFTISRDNAKNTVYLQMNSLKPEDTAVYYCAVDDRTYSYTDRDAKYWHRYWGQGTQVTVSS

SEQ ID NO: 8962 - protein, 122 aa, Artificial Sequence
  Chemically Synthesized
QVQLQESGGGLVQAGGSLRLSCAASGSISTFLVMGWYRQAPGKERELVAAIGYGTSTYYADSVKGRFTISRDNAKNTVYLQMNSLKPEDTAVYYCAVYSGLAGKAYLRHYYWGQGTQVTVSS

SEQ ID NO: 8963 - protein, 118 aa, Artificial Sequence
  Chemically Synthesized
QVQLQESGGGLVQAGGSLRLSCAASGSIFYADNMGWYRQAPGKERELVAAIGDGGNTNYADSVKGRFTISRDNAKNTVYLQMNSLKPEDTAVYYCAVYRAGDDPHAYWGQGTQVTVSS

SEQ ID NO: 8964 - protein, 118 aa, Artificial Sequence
  Chemically Synthesized
QVQLQESGGGLVQAGGSLRLSCAASGTISAGWYMGWYRQAPGKERELVASIDDGSTTNYADSVKGRFTISRDNAKNTVYLQMNSLKPEDTAVYYCAVYRDGEPTYYYWGQGTQVTVSS

SEQ ID NO: 8965 - protein, 118 aa, Artificial Sequence
  Chemically Synthesized
QVQLQESGGGLVQAGGSLRLSCAASGNISWDYLMGWYRQAPGKEREFVASITGGTTTNYADSVKGRFTISRDNAKNTVYLQMNSLKPEDTAVYYCAAFYPKSIGHQYWGQGTQVTVSS

SEQ ID NO: 8966 - protein, 125 aa, Artificial Sequence
  Chemically Synthesized
QVQLQESGGGLVQAGGSLRLSCAASGTIFGSSYMGWYRQAPGKEREFVASINPGANTYYADSVKGRFTISRDNAKNTVYLQMNSLKPEDTAVYYCAADYESKFDNNWRSYQHPYWGQGTQVTVSS

SEQ ID NO: 8967 - protein, 121 aa, Artificial Sequence
  Chemically Synthesized
QVQLQESGGGLVQAGGSLRLSCAASGSIFSSTMGWYRQAPGKERELVASINPGSSTYYADSVKGRFTISRDNAKNTVYLQMNSLKPEDTAVYYCAVDDAYQAYYYEIHHYWGQGTQVTVSS

SEQ ID NO: 8968 - protein, 122 aa, Artificial Sequence
  Chemically Synthesized
QVQLQESGGGLVQAGGSLRLSCAASGTISITYWMGWYRQAPGKEREFVAAISYGGSTYYADSVKGRFTISRDNAKNTVYLQMNSLKPEDTAVYYCAAVAPYGGTRTRGHAYWGQGTQVTVSS

SEQ ID NO: 8969 - protein, 123 aa, Artificial Sequence
  Chemically Synthesized
QVQLQESGGGLVQAGGSLRLSCAASGTICCSMGWYRQAPGKERELVASINSVLLPYADSVKGRFTISRDNAKNTVYLQMNSLKPEDTAVYYCAAYYSADSRALYASGTTHGYWGQGTQVTVSS

SEQ ID NO: 8970 - protein, 117 aa, Artificial Sequence
  Chemically Synthesized
QVQLQESGGGLVQAGGSLRLSCAASGTIFSAYTMGWYRQAPGKERELVASINSGTRPYADSVKGRFTISRDNAKNTVYLQMNSLKPEDTAVYYCAAKIYVLAEHLYWGQGTQVTVSS

SEQ ID NO: 8971 - protein, 125 aa, Artificial Sequence
  Chemically Synthesized
QVQLQESGGGLVQAGGSLRLSCAASGYISGNVQMGWYRQAPGKEREFVATIGYGTTTYYADSVKGRFTISRDNAKNTVYLQMNSLKPEDTAVYYCAATSYSDYYDYETDTVHYYWGQGTQVTVSS

SEQ ID NO: 8972 - protein, 117 aa, Artificial Sequence
  Chemically Synthesized
QVQLQESGGGLVQAGGSLRLSCAASGTIFVVLRMGWYRQAPGKEREFVATIGAGGTTYYADSVKGRFTISRDNAKNTVYLQMNSLKPEDTAVYYCAADAGLGSHAYWGQGTQVTVSS

SEQ ID NO: 8973 - protein, 118 aa, Artificial Sequence
  Chemically Synthesized
QVQLQESGGGLVQAGGSLRLSCAASGNISTWAGMGWYRQAPGKEREFVATINVGGITNYADSVKGRFTISRDNAKNTVYLQMNSLKPEDTAVYYCAADYKLGPDYWYWGQGTQVTVSS

SEQ ID NO: 8974 - protein, 116 aa, Artificial Sequence
  Chemically Synthesized
QVQLQESGGGLVQAGGSLRLSCAASGSIFIAGGMGWYRQAPGKEREFVATISDGASTNYADSVKGRFTISRDNAKNTVYLQMNSLKPEDTAVYYCAKAIIVWHWYWGQGTQVTVSS

SEQ ID NO: 8975 - protein, 117 aa, Artificial Sequence
  Chemically Synthesized
QVQLQESGGGLVQAGGSLRLSCAASGNISSAVYMGWYRQAPGKERELVAGIDYGSSTYADSVKGRFTISRDNAKNTVYLQMNSLKPEDTAVYYCAAGVYSYTNHKYWGQGTQVTVSS

SEQ ID NO: 8976 - protein, 122 aa, Artificial Sequence
  Chemically Synthesized
QVQLQESGGGLVQAGGSLRLSCAASGTIFNGPGMGWYRQAPGKERELVAGINDGAITNYADSVKGRFTISRDNAKNTVYLQMNSLKPEDTAVYYCAVYTIDYRYGEYLYIYWGQGTQVTVSS

SEQ ID NO: 8977 - protein, 118 aa, Artificial Sequence
  Chemically Synthesized
QVQLQESGGGLVQAGGSLRLSCAASGNISYRPYMGWYRQAPGKEREFVAGITVGGSTNYADSVKGRFTISRDNAKNTVYLQMNSLKPEDTAVYYCAVDKYQGQYLWYWGQGTQVTVSS

SEQ ID NO: 8978 - protein, 123 aa, Artificial Sequence
  Chemically Synthesized
QVQLQESGGGLVQAGGSLRLSCAASGSIFYARYMGWYRQAPGKERELVATINYGGSTYYADSVKGRFTISRDNAKNTVYLQMNSLKPEDTAVYYCAVAHLVGDPDLYRIYNYWGQGTQVTVSS

SEQ ID NO: 8979 - protein, 118 aa, Artificial Sequence
  Chemically Synthesized
QVQLQESGGGLVQAGGSLRLSCAASGSISDPTAMGWYRQAPGKEREFVATIGSGGSTNYADSVKGRFTISRDNAKNTVYLQMNSLKPEDTAVYYCAVLYFDSIYLSYWGQGTQVTVSS

SEQ ID NO: 8980 - protein, 118 aa, Artificial Sequence
  Chemically Synthesized
QVQLQESGGGLVQAGGSLRLSCAASGYIFARRVMGWYRQAPGKERELVATIAQGGNTNYADSVKGRFTISRDNAKNTVYLQMNSLKPEDTAVYYCAALAWWRSHLYYWGQGTQVTVSS

SEQ ID NO: 8981 - protein, 122 aa, Artificial Sequence
  Chemically Synthesized
QVQLQESGGGLVQAGGSLRLSCAASGTIFYYNGMGWYRQAPGKEREFVAAISSGGSTNYADSVKGRFTISRDNAKNTVYLQMNSLKPEDTAVYYCAADHTYSWLTAVLYDYWGQGTQVTVSS

SEQ ID NO: 8982 - protein, 110 aa, Artificial Sequence
  Chemically Synthesized
QVQLQESGGGLVQAGGSLRLSCAASGNIFFERYMGWYRQAPGKERELVASISSGGSTNYADSVKGRFTISRDNAKNTVYLQMNSLKPEDTAVYYCANIYWGQGTQVTVSS

SEQ ID NO: 8983 - protein, 115 aa, Artificial Sequence
  Chemically Synthesized
QVQLQESGGGLVQAGGSLRLSCAASGNIFRYDYMGWYRQAPGKEREFVATIDYADSVKGRFTISRDNAKNTVYLQMNSLKPEDTAVYYCAVWDPSYVPYGSHRYWGQGTQVTVSS

SEQ ID NO: 8984 - protein, 122 aa, Artificial Sequence
  Chemically Synthesized
QVQLQESGGGLVQAGGSLRLSCAASGYIFGIFYMGWYRQAPGKERELVATISYGSTTNYADSVKGRFTISRDNAKNTVYLQMNSLKPEDTAVYYCAVADYHFAGDDYSFIYWGQGTQVTVSS

SEQ ID NO: 8985 - protein, 122 aa, Artificial Sequence
  Chemically Synthesized
QVQLQESGGGLVQAGGSLRLSCAASGTIFEYEDMGWYRQAPGKEREFVAAIGDGTSTYYADSVKGRFTISRDNAKNTVYLQMNSLKPEDTAVYYCAVDRDNSDLGDAIYGYWGQGTQVTVSS

SEQ ID NO: 8986 - protein, 118 aa, Artificial Sequence
  Chemically Synthesized
QVQLQESGGGLVQAGGSLRLSCAASGNISYLISMGWYRQAPGKEREFVASIGVGSITNYADSVKGRFTISRDNAKNTVYLQMNSLKPEDTAVYYCAADYPYDYILAYWGQGTQVTVSS

SEQ ID NO: 8987 - protein, 121 aa, Artificial Sequence
  Chemically Synthesized
QVQLQESGGGLVQAGGSLRLSCAASGTISYYTTMGWYRQAPGKERELVATITYGGTTYYADSVKGRFTISRDNAKNTVYLQMNSLKPEDTAVYYCAARYDDPYASNYFAYWGQGTQVTVSS

SEQ ID NO: 8988 - protein, 124 aa, Artificial Sequence
  Chemically Synthesized
QVQLQESGGGLVQAGGSLRLSCAASGNIFEAYDMGWYRQAPGKERELVASISYGTITYYADSVKGRFTISRDNAKNTVYLQMNSLKPEDTAVYYCAVESWALNKVTHYDSTFYWGQGTQVTVSS

SEQ ID NO: 8989 - protein, 117 aa, Artificial Sequence
  Chemically Synthesized
QVQLQESGGGLVQAGGSLRLSCAASGTFLWVMGWYRQAPGKEREFVAGMCYYQYADSVKGRFTISRDNAKNTVYLQMNSLKPEDTAVYYCAVFYEYLPITLYGLDYWGQGTQVTVSS

SEQ ID NO: 8990 - protein, 118 aa, Artificial Sequence
  Chemically Synthesized
QVQLQESGGGLVQAGGSLRLSCAASGTISASGFMGWYRQAPGKEREFVAGIAAGTSTNYADSVKGRFTISRDNAKNTVYLQMNSLKPEDTAVYYCAADNYYSVAHTYWGQGTQVTVSS

SEQ ID NO: 8991 - protein, 126 aa, Artificial Sequence
  Chemically Synthesized
QVQLQESGGGLVQAGGSLRLSCAASGTISTTDNMGWYRQAPGKEREFVATITDGTTTNYADSVKGRFTISRDNAKNTVYLQMNSLKPEDTAVYYCATDLKTRASWVPLRDSQHAYWGQGTQVTVSS

SEQ ID NO: 8992 - protein, 126 aa, Artificial Sequence
  Chemically Synthesized
QVQLQESGGGLVQAGGSLRLSCAASGSISTLSFMGWYRQAPGKEREFVAGIGYGGTTYYADSVKGRFTISRDNAKNTVYLQMNSLKPEDTAVYYCAVNAPYRASITYAYADDLYYWGQGTQVTVSS

SEQ ID NO: 8993 - protein, 121 aa, Artificial Sequence
  Chemically Synthesized
QVQLQESGGGLVQAGGSLRLSCAASGTIFYGRYMGWYRQAPGKERELVATINQGSITNYADSVKGRFTISRDNAKNTVYLQMNSLKPEDTAVYYCAVWYVYDVAAYAYEYWGQGTQVTVSS

SEQ ID NO: 8994 - protein, 122 aa, Artificial Sequence
  Chemically Synthesized
QVQLQESGGGLVQAGGSLRLSCAASGNISYSPYMGWYRQAPGKEREFVATIDPGTITNYADSVKGRFTISRDNAKNTVYLQMNSLKPEDTAVYYCAALFRWYPYSDTYYWYWGQGTQVTVSS

SEQ ID NO: 8995 - protein, 117 aa, Artificial Sequence
  Chemically Synthesized
QVQLQESGGGLVQAGGSLRLSCAASGNIFGQLLMGWYRQAPGKEREFVAGIDDGASTYYADSVKGRFTISRDNAKNTVYLQMNSLKPEDTAVYYCAVDGYYYPDHYWGQGTQVTVSS

SEQ ID NO: 8996 - protein, 126 aa, Artificial Sequence
  Chemically Synthesized
QVQLQESGGGLVQAGGSLRLSCAASGTISYSYFMGWYRQAPGKERELVATINTGASTYYADSVKGRFTISRDNAKNTVYLQMNSLKPEDTAVYYCAVDYHYIDWGDQIRDSQYRYWGQGTQVTVSS

SEQ ID NO: 8997 - protein, 118 aa, Artificial Sequence
  Chemically Synthesized
QVQLQESGGGLVQAGGSLRLSCAASGNIFYLHYMGWYRQAPGKEREFVAGIAKGANTYYADSVKGRFTISRDNAKNTVYLQMNSLKPEDTAVYYCAAGWVHLDVHWYWGQGTQVTVSS

SEQ ID NO: 8998 - protein, 118 aa, Artificial Sequence
  Chemically Synthesized
QVQLQESGGGLVQAGGSLRLSCAASGTIFDVEYMGWYRQAPGKEREFVAAISFGAITYYADSVKGRFTISRDNAKNTVYLQMNSLKPEDTAVYYCAADHQSDPNHAYWGQGTQVTVSS

SEQ ID NO: 8999 - protein, 118 aa, Artificial Sequence
  Chemically Synthesized
QVQLQESGGGLVQAGGSLRLSCAASGNISLWDDMGWYRQAPGKERELVAAIGHGTNTNYADSVKGRFTISRDNAKNTVYLQMNSLKPEDTAVYYCAVGDGYAYTHAYWGQGTQVTVSS

SEQ ID NO: 9000 - protein, 126 aa, Artificial Sequence
  Chemically Synthesized
QVQLQESGGGLVQAGGSLRLSCAASGTISTQDVMGWYRQAPGKERELVAGINGGSTTYYADSVKGRFTISRDNAKNTVYLQMNSLKPEDTAVYYCAVVQYGGDDDWDIDIEYHEYWGQGTQVTVSS

SEQ ID NO: 9001 - protein, 117 aa, Artificial Sequence
  Chemically Synthesized
QVQLQESGGGLVQAGGSLRLSCAASGTISWGGKMGWYRQAPGKERELVATIASVVLPYADSVKGRFTISRDNAKNTVYLQMNSLKPEDTAVYYCAAYGVAQIGFEYWGQGTQVTVSS

SEQ ID NO: 9002 - protein, 116 aa, Artificial Sequence
  Chemically Synthesized
QVQLQESGGGLVQAGGSLRLSCAASGNISGPYYMGWYRQAPGKERELVAVLVLVVIPYADSVKGRFTISRDNAKNTVYLQMNSLKPEDTAVYYCALTWTVLLTLYWGQGTQVTVSS

SEQ ID NO: 9003 - protein, 118 aa, Artificial Sequence
  Chemically Synthesized
QVQLQESGGGLVQAGGSLRLSCAASGTIFNDYYMGWYRQAPGKEREFVASIDFGTNTNYADSVKGRFTISRDNAKNTVYLQMNSLKPEDTAVYYCAAGGDDRKRFGYWGQGTQVTVSS

SEQ ID NO: 9004 - protein, 117 aa, Artificial Sequence
  Chemically Synthesized
QVQLQESGGGLVQAGGSLRLSCAASGYISRFTDMGWYRQAPGKEREFVATITGGSTTNYADSVKGRFTISRDNAKNTVYLQMNSLKPEDTAVYYCAVRDVSTLRIYWGQGTQVTVSS

SEQ ID NO: 9005 - protein, 118 aa, Artificial Sequence
  Chemically Synthesized
QVQLQESGGGLVQAGGSLRLSCAASGNIFSLSDMGWYRQAPGKERELVAAIAWGASTNYADSVKGRFTISRDNAKNTVYLQMNSLKPEDTAVYYCAVTGQYYKPYEYWGQGTQVTVSS

SEQ ID NO: 9006 - protein, 117 aa, Artificial Sequence
  Chemically Synthesized
QVQLQESGGGLVQAGGSLRLSCAASGNISGSGYMGWYRQAPGKEREFVATIDDGGTTYYADSVKGRFTISRDNAKNTVYLQMNSLKPEDTAVYYCAAYDSRSTLFYWGQGTQVTVSS

SEQ ID NO: 9007 - protein, 114 aa, Artificial Sequence
  Chemically Synthesized
QVQLQESGGGLVQAGGSLRLSCAASGTIFLFLVMGWYRQAPGKERELVAAITRGTSTYYADSVKGRFTISRDNAKNTVYLQMNSLKPEDTAVYYCAAYYRHDYWGQGTQVTVSS

SEQ ID NO: 9008 - protein, 122 aa, Artificial Sequence
  Chemically Synthesized
QVQLQESGGGLVQAGGSLRLSCAASGYIFQLASMGWYRQAPGKERELVAGIAYGTTTYYADSVKGRFTISRDNAKNTVYLQMNSLKPEDTAVYYCAAIDRINPNSVWAYWYWGQGTQVTVSS

SEQ ID NO: 9009 - protein, 117 aa, Artificial Sequence
  Chemically Synthesized
QVQLQESGGGLVQAGGSLRLSCAASGNIFPEIWMGWYRQAPGKEREFVASISGGSITNYADSVKGRFTISRDNAKNTVYLQMNSLKPEDTAVYYCAAHYDDVGTFYWGQGTQVTVSS

SEQ ID NO: 9010 - protein, 122 aa, Artificial Sequence
  Chemically Synthesized
QVQLQESGGGLVQAGGSLRLSCAASGSISRFSRMGWYRQAPGKEREFVASIGVGGNTYYADSVKGRFTISRDNAKNTVYLQMNSLKPEDTAVYYCAVPSFLPILYRGYHFYWGQGTQVTVSS

SEQ ID NO: 9011 - protein, 122 aa, Artificial Sequence
  Chemically Synthesized
QVQLQESGGGLVQAGGSLRLSCAASGNIFLYFYMGWYRQAPGKERELVAGIANGTSTYYADSVKGRFTISRDNAKNTVYLQMNSLKPEDTAVYYCAATDGGIRWYKYRHRYWGQGTQVTVSS

SEQ ID NO: 9012 - protein, 118 aa, Artificial Sequence
  Chemically Synthesized
QVQLQESGGGLVQAGGSLRLSCAASGYIFRPPYMGWYRQAPGKERELVAAIGYGGTTNYADSVKGRFTISRDNAKNTVYLQMNSLKPEDTAVYYCAAYWWYYLYYQYWGQGTQVTVSS

SEQ ID NO: 9013 - protein, 122 aa, Artificial Sequence
  Chemically Synthesized
QVQLQESGGGLVQAGGSLRLSCAASGYIFTETRMGWYRQAPGKEREFVAAITPGGSTNYADSVKGRFTISRDNAKNTVYLQMNSLKPEDTAVYYCAVYPYWGRPVGYEHYYWGQGTQVTVSS

SEQ ID NO: 9014 - protein, 117 aa, Artificial Sequence
  Chemically Synthesized
QVQLQESGGGLVQAGGSLRLSCAASGSIFYWAYMGWYRQAPGKEREFVAAISTVVVPYADSVKGRFTISRDNAKNTVYLQMNSLKPEDTAVYYCAVSRHPGFSLTYWGQGTQVTVSS

SEQ ID NO: 9015 - protein, 118 aa, Artificial Sequence
  Chemically Synthesized
QVQLQESGGGLVQAGGSLRLSCAASGNIFDPLQMGWYRQAPGKERELVAGIDVGASTNYADSVKGRFTISRDNAKNTVYLQMNSLKPEDTAVYYCAAYRSRIALYDYWGQGTQVTVSS

SEQ ID NO: 9016 - protein, 126 aa, Artificial Sequence
  Chemically Synthesized
QVQLQESGGGLVQAGGSLRLSCAASGTIFPLYYMGWYRQAPGKEREFVATIAAGGTTYYADSVKGRFTISRDNAKNTVYLQMNSLKPEDTAVYYCAAIDPYQPWAYWTLVNFFPYWGQGTQVTVSS

SEQ ID NO: 9017 - protein, 122 aa, Artificial Sequence
  Chemically Synthesized
QVQLQESGGGLVQAGGSLRLSCAASGSISNYNYMGWYRQAPGKERELVAGIAHGTTTNYADSVKGRFTISRDNAKNTVYLQMNSLKPEDTAVYYCAATDGGDGAGLIPYYYWGQGTQVTVSS

SEQ ID NO: 9018 - protein, 116 aa, Artificial Sequence
  Chemically Synthesized
QVQLQESGGGLVQAGGSLRLSCAASGYISPIIYMGWYRQAPGKERELVASITQGTITNYADSVKGRFTISRDNAKNTVYLQMNSLKPEDTAVYYCAAYLLTKTIYWGQGTQVTVSS

SEQ ID NO: 9019 - protein, 116 aa, Artificial Sequence
  Chemically Synthesized
QVQLQESGGGLVQAGGSLRLSCAASGTISRFSMGWYRQAPGKEREFVAAIGSVVIPYADSVKGRFTISRDNAKNTVYLQMNSLKPEDTAVYYCAARYSLYLLYYYWGQGTQVTVSS

SEQ ID NO: 9020 - protein, 125 aa, Artificial Sequence
  Chemically Synthesized
QVQLQESGGGLVQAGGSLRLSCAASGTIFRWTAMGWYRQAPGKERELVAGIGRGTTYYADSVKGRFTISRDNAKNTVYLQMNSLKPEDTAVYYCAAYYTPYVFYLSWTDRPHYYWGQGTQVTVSS

SEQ ID NO: 9021 - protein, 117 aa, Artificial Sequence
  Chemically Synthesized
QVQLQESGGGLVQAGGSLRLSCAASGTISPIDKMGWYRQAPGKERELVAAISVGAITNYADSVKGRFTISRDNAKNTVYLQMNSLKPEDTAVYYCAAYTHGFPSMYWGQGTQVTVSS

SEQ ID NO: 9022 - protein, 115 aa, Artificial Sequence
  Chemically Synthesized
QVQLQESGGGLVQAGGSLRLSCAASGNIFSRYTMGWYRQAPGKERELVATITDGSTTNYADSVKGRFTISRDNAKNTVYLQMNSLKPEDTAVYYCATLTTTTIYWGQGTQVTVSS

SEQ ID NO: 9023 - protein, 125 aa, Artificial Sequence
  Chemically Synthesized
QVQLQESGGGLVQAGGSLRLSCAASGNIFYHHYMGWYRQAPGKEREFVASITRGASTNYADSVKGRFTISRDNAKNTVYLQMNSLKPEDTAVYYCAAKVLRDSYGVDPTSFSIYWGQGTQVTVSS

SEQ ID NO: 9024 - protein, 117 aa, Artificial Sequence
  Chemically Synthesized
QVQLQESGGGLVQAGGSLRLSCAASGTISLTSQMGWYRQAPGKEREFVAGIDNGGSTNYADSVKGRFTISRDNAKNTVYLQMNSLKPEDTAVYYCAATFITTTTLYWGQGTQVTVSS

SEQ ID NO: 9025 - protein, 117 aa, Artificial Sequence
  Chemically Synthesized
QVQLQESGGGLVQAGGSLRLSCAASGYISRRGMGWYRQAPGKEREFVATIARGGITYYADSVKGRFTISRDNAKNTVYLQMNSLKPEDTAVYYCAARYASALRYYYWGQGTQVTVSS

SEQ ID NO: 9026 - protein, 118 aa, Artificial Sequence
  Chemically Synthesized
QVQLQESGGGLVQAGGSLRLSCAASGTIFSDHYMGWYRQAPGKEREFVAGIDYGGNTYYADSVKGRFTISRDNAKNTVYLQMNSLKPEDTAVYYCAVLFYYSQPLDYWGQGTQVTVSS

SEQ ID NO: 9027 - protein, 122 aa, Artificial Sequence
  Chemically Synthesized
QVQLQESGGGLVQAGGSLRLSCAASGSISGARIMGWYRQAPGKERELVATIASGGTTNYADSVKGRFTISRDNAKNTVYLQMNSLKPEDTAVYYCAVPLGIYLRRQPGHDYWGQGTQVTVSS

SEQ ID NO: 9028 - protein, 117 aa, Artificial Sequence
  Chemically Synthesized
QVQLQESGGGLVQAGGSLRLSCAASGNISIYDDMGWYRQAPGKERELVAGIDRGGTTYYADSVKGRFTISRDNAKNTVYLQMNSLKPEDTAVYYCAAEPHYAGLGYWGQGTQVTVSS

SEQ ID NO: 9029 - protein, 118 aa, Artificial Sequence
  Chemically Synthesized
QVQLQESGGGLVQAGGSLRLSCAASGTISDGDNMGWYRQAPGKERELVAGISYGSITYYADSVKGRFTISRDNAKNTVYLQMNSLKPEDTAVYYCAAYPDRYYDLGYWGQGTQVTVSS

SEQ ID NO: 9030 - protein, 118 aa, Artificial Sequence
  Chemically Synthesized
QVQLQESGGGLVQAGGSLRLSCAASGNIFIYYLMGWYRQAPGKERELVAGITWGGSTNYADSVKGRFTISRDNAKNTVYLQMNSLKPEDTAVYYCAAYVTRSTSHTYWGQGTQVTVSS

SEQ ID NO: 9031 - protein, 118 aa, Artificial Sequence
  Chemically Synthesized
QVQLQESGGGLVQAGGSLRLSCAASGSISDRYPMGWYRQAPGKERELVAAISVGGTTYYADSVKGRFTISRDNAKNTVYLQMNSLKPEDTAVYYCAVQRTSYQYLGYWGQGTQVTVSS

SEQ ID NO: 9032 - protein, 121 aa, Artificial Sequence
  Chemically Synthesized
QVQLQESGGGLVQAGGSLRLSCAASGSISPADIMGWYRQAPGKERELVATITEGAITNYADSVKGRFTISRDNAKNTVYLQMNSLKPEDTAVYYCAARKGKRQTQESLYYWGQGTQVTVSS

SEQ ID NO: 9033 - protein, 125 aa, Artificial Sequence
  Chemically Synthesized
QVQLQESGGGLVQAGGSLRLSCAASGSIFRVSMGWYRQAPGKERELVATIALGTNTNYADSVKGRFTISRDNAKNTVYLQMNSLKPEDTAVYYCAVQEYYRYGDTTHQLSYHVYWGQGTQVTVSS

SEQ ID NO: 9034 - protein, 122 aa, Artificial Sequence
  Chemically Synthesized
QVQLQESGGGLVQAGGSLRLSCAASGYIFVPFLMGWYRQAPGKERELVAAIDGGTITNYADSVKGRFTISRDNAKNTVYLQMNSLKPEDTAVYYCAVTTGRRILIVHILLYWGQGTQVTVSS

SEQ ID NO: 9035 - protein, 117 aa, Artificial Sequence
  Chemically Synthesized
QVQLQESGGGLVQAGGSLRLSCAASGNIFVSGYMGWYRQAPGKERELVAALMVVLIPYADSVKGRFTISRDNAKNTVYLQMNSLKPEDTAVYYCAVDSGTGYWFEYWGQGTQVTVSS

SEQ ID NO: 9036 - protein, 121 aa, Artificial Sequence
  Chemically Synthesized
QVQLQESGGGLVQAGGSLRLSCAASGYISDPPEMGWYRQAPGKERELVADIGFGANTNYADSVKGRFTISRDNAKNTVYLQMNSLKPEDTAVYYCAVYWDSLVTTKVSLYWGQGTQVTVSS

SEQ ID NO: 9037 - protein, 115 aa, Artificial Sequence
  Chemically Synthesized
QVQLQESGGGLVQAGGSLRLSCAASGYIFASFGMGWYRQAPGKERELVAAIARGASTYYADSVKGRFTISRDNAKNTVYLQMNSLKPEDTAVYYCAAGGGHLLYWGQGTQVTVSS

SEQ ID NO: 9038 - protein, 118 aa, Artificial Sequence
  Chemically Synthesized
QVQLQESGGGLVQAGGSLRLSCAASGNIFLDRYMGWYRQAPGKERELVAAITGGGTTYYADSVKGRFTISRDNAKNTVYLQMNSLKPEDTAVYYCAAYGGYDGYLGYWGQGTQVTVSS

SEQ ID NO: 9039 - protein, 118 aa, Artificial Sequence
  Chemically Synthesized
QVQLQESGGGLVQAGGSLRLSCAASGYISADSQMGWYRQAPGKERELVASITRGASTYYADSVKGRFTISRDNAKNTVYLQMNSLKPEDTAVYYCAVVRSGGAWLQYWGQGTQVTVSS

SEQ ID NO: 9040 - protein, 122 aa, Artificial Sequence
  Chemically Synthesized
QVQLQESGGGLVQAGGSLRLSCAASGTISPVHRMGWYRQAPGKERELVASIATGASTNYADSVKGRFTISRDNAKNTVYLQMNSLKPEDTAVYYCAAVGVVGQDSLWWHAYWGQGTQVTVSS

SEQ ID NO: 9041 - protein, 118 aa, Artificial Sequence
  Chemically Synthesized
QVQLQESGGGLVQAGGSLRLSCAASGTISWYTGMGWYRQAPGKERELVAGIDTGANTYYADSVKGRFTISRDNAKNTVYLQMNSLKPEDTAVYYCAVYQYPWYRYLYWGQGTQVTVSS

SEQ ID NO: 9042 - protein, 118 aa, Artificial Sequence
  Chemically Synthesized
QVQLQESGGGLVQAGGSLRLSCAASGNISTPSYMGWYRQAPGKERELVASISPGTITYYADSVKGRFTISRDNAKNTVYLQMNSLKPEDTAVYYCAVKPSSTYPYAYWGQGTQVTVSS

SEQ ID NO: 9043 - protein, 118 aa, Artificial Sequence
  Chemically Synthesized
QVQLQESGGGLVQAGGSLRLSCAASGNIFTRGDMGWYRQAPGKEREFVAGIALGTNTYYADSVKGRFTISRDNAKNTVYLQMNSLKPEDTAVYYCAVPVYVFYTHGYWGQGTQVTVSS

SEQ ID NO: 9044 - protein, 118 aa, Artificial Sequence
  Chemically Synthesized
QVQLQESGGGLVQAGGSLRLSCAASGSISTYATMGWYRQAPGKEREFVAGINLGTNTNYADSVKGRFTISRDNAKNTVYLQMNSLKPEDTAVYYCAADIYPSNWFVYWGQGTQVTVSS

SEQ ID NO: 9045 - protein, 116 aa, Artificial Sequence
  Chemically Synthesized
QVQLQESGGGLVQAGGSLRLSCAASGSIFYIYAMGWYRQAPGKEREFVAGITLGGSTNYADSVKGRFTISRDNAKNTVYLQMNSLKPEDTAVYYCAVYIDKDHAYWGQGTQVTVSS

SEQ ID NO: 9046 - protein, 118 aa, Artificial Sequence
  Chemically Synthesized
QVQLQESGGGLVQAGGSLRLSCAASGSIFYPFHMGWYRQAPGKERELVASIAHGSTTYYADSVKGRFTISRDNAKNTVYLQMNSLKPEDTAVYYCAVPDDKGEPHPYWGQGTQVTVSS

SEQ ID NO: 9047 - protein, 122 aa, Artificial Sequence
  Chemically Synthesized
QVQLQESGGGLVQAGGSLRLSCAASGTISDRAHMGWYRQAPGKERELVAAISAGATTYYADSVKGRFTISRDNAKNTVYLQMNSLKPEDTAVYYCAVNYYLIGRYTVRHDYWGQGTQVTVSS

SEQ ID NO: 9048 - protein, 118 aa, Artificial Sequence
  Chemically Synthesized
QVQLQESGGGLVQAGGSLRLSCAASGNISLSKYMGWYRQAPGKERELVAAISIGTNTYYADSVKGRFTISRDNAKNTVYLQMNSLKPEDTAVYYCAADSTFDRVHPYWGQGTQVTVSS

SEQ ID NO: 9049 - protein, 126 aa, Artificial Sequence
  Chemically Synthesized
QVQLQESGGGLVQAGGSLRLSCAASGYISSPSIMGWYRQAPGKERELVASITFGSITNYADSVKGRFTISRDNAKNTVYLQMNSLKPEDTAVYYCAVSNDYAYSGFRLSIFLHAYWGQGTQVTVSS

SEQ ID NO: 9050 - protein, 117 aa, Artificial Sequence
  Chemically Synthesized
QVQLQESGGGLVQAGGSLRLSCAASGTIFSQDYMGWYRQAPGKERELVASIDPGGTTYYADSVKGRFTISRDNAKNTVYLQMNSLKPEDTAVYYCAVVYSTNRRIYWGQGTQVTVSS

SEQ ID NO: 9051 - protein, 117 aa, Artificial Sequence
  Chemically Synthesized
QVQLQESGGGLVQAGGSLRLSCAASGNISPEAAMGWYRQAPGKEREFVATIATGSNTYYADSVKGRFTISRDNAKNTVYLQMNSLKPEDTAVYYCAFTMTLLSLIYWGQGTQVTVSS

SEQ ID NO: 9052 - protein, 118 aa, Artificial Sequence
  Chemically Synthesized
QVQLQESGGGLVQAGGSLRLSCAASGNIFAYGDMGWYRQAPGKERELVAGISYGAITNYADSVKGRFTISRDNAKNTVYLQMNSLKPEDTAVYYCAVYGGSSYNHYYWGQGTQVTVSS

SEQ ID NO: 9053 - protein, 118 aa, Artificial Sequence
  Chemically Synthesized
QVQLQESGGGLVQAGGSLRLSCAASGNISADYTMGWYRQAPGKERELVASITRGANTYYADSVKGRFTISRDNAKNTVYLQMNSLKPEDTAVYYCAVTYNSGYYHVYWGQGTQVTVSS

SEQ ID NO: 9054 - protein, 118 aa, Artificial Sequence
  Chemically Synthesized
QVQLQESGGGLVQAGGSLRLSCAASGSISLISDMGWYRQAPGKERELVATIGPGGNTLYADSVKGRFTISRDNAKNTVYLQMNSLKPEDTAVYYCAARWYADVSYDYWGQGTQVTVSS

SEQ ID NO: 9055 - protein, 119 aa, Artificial Sequence
  Chemically Synthesized
QVQLQESGGGLVQAGGSLRLSCAASGYIFTWDDMGWYRQAPGKERELVASIGEGSNTNYADSVKGRFTISRDNAKNTVYLQMNSLKPEDTAVYYCAADYQDPDYHHYYWGQGTQVTVSS

SEQ ID NO: 9056 - protein, 110 aa, Artificial Sequence
  Chemically Synthesized
QVQLQESGGGLVQAGGSLRLSCAASGYIFDYADMGWYRQAPGKERELVAGIDQGGITYYADSVKGRFTISRDNAKNTVYLQMNSLKPEDTAVYYCAASYWGQGTQVTVSS

SEQ ID NO: 9057 - protein, 118 aa, Artificial Sequence
  Chemically Synthesized
QVQLQESGGGLVQAGGSLRLSCAASGTIFHDHIMGWYRQAPGKERELVATINSGGSTYYADSVKGRFTISRDNAKNTVYLQMNSLKPEDTAVYYCAAQHYSIQYLDYWGQGTQVTVSS

SEQ ID NO: 9058 - protein, 117 aa, Artificial Sequence
  Chemically Synthesized
QVQLQESGGGLVQAGGSLRLSCAASGNISYHALMGWYRQAPGKERELVATITPGGSTYADSVKGRFTISRDNAKNTVYLQMNSLKPEDTAVYYCAVDYHDDYTFLYWGQGTQVTVSS

SEQ ID NO: 9059 - protein, 121 aa, Artificial Sequence
  Chemically Synthesized
QVQLQESGGGLVQAGGSLRLSCAASGTISPDDYMGWYRQAPGKEREFVATIDIGGNTNYADSVKGRFTISRDNAKNTVYLQMNSLKPEDTAVYYCAADGDTDHYSTRVFYWGQGTQVTVSS

SEQ ID NO: 9060 - protein, 121 aa, Artificial Sequence
  Chemically Synthesized
QVQLQESGGGLVQAGGSLRLSCAASGNIFGDIYMGWYRQAPGKERELVASITYGSTTNYADSVKGRFTISRDNAKNTVYLQMNSLKPEDTAVYYCAAAGPITLLTILSSYWGQGTQVTVSS

SEQ ID NO: 9061 - protein, 126 aa, Artificial Sequence
  Chemically Synthesized
QVQLQESGGGLVQAGGSLRLSCAASGNIFATHEMGWYRQAPGKEREFVATIDEGTITNYADSVKGRFTISRDNAKNTVYLQMNSLKPEDTAVYYCAVYLPYYYADDDVTGDPVWYWGQGTQVTVSS

SEQ ID NO: 9062 - protein, 114 aa, Artificial Sequence
  Chemically Synthesized
QVQLQESGGGLVQAGGSLRLSCAASGNIFWWDGMGWYRQAPGKERELVAGISYGASTNYADSVKGRFTISRDNAKNTVYLQMNSLKPEDTAVYYCAGLPVLFYWGQGTQVTVSS

SEQ ID NO: 9063 - protein, 117 aa, Artificial Sequence
  Chemically Synthesized
QVQLQESGGGLVQAGGSLRLSCAASGSIFDPDYMGWYRQAPGKERELVAAINTGGSTYYADSVKGRFTISRDNAKNTVYLQMNSLKPEDTAVYYCAAYVSLLTTIYWGQGTQVTVSS

SEQ ID NO: 9064 - protein, 116 aa, Artificial Sequence
  Chemically Synthesized
QVQLQESGGGLVQAGGSLRLSCAASGSIFWHDGMGWYRQAPGKERELVAGIEWYYLYADSVKGRFTISRDNAKNTVYLQMNSLKPEDTAVYYCAADPVNDPGLVYWGQGTQVTVSS

SEQ ID NO: 9065 - protein, 118 aa, Artificial Sequence
  Chemically Synthesized
QVQLQESGGGLVQAGGSLRLSCAASGYMTMGWYRQAPGKEREFVAGIDPGSTTNYADSVKGRFTISRDNAKNTVYLQMNSLKPEDTAVYYCAVRTRYAWDTPQYHGYWGQGTQVTVSS

SEQ ID NO: 9066 - protein, 121 aa, Artificial Sequence
  Chemically Synthesized
QVQLQESGGGLVQAGGSLRLSCAASGTIFAYYVMGWYRQAPGKEREFVAGIGAGASTYYADSVKGRFTISRDNAKNTVYLQMNSLKPEDTAVYYCAVQAQREYTITWFDYWGQGTQVTVSS

SEQ ID NO: 9067 - protein, 118 aa, Artificial Sequence
  Chemically Synthesized
QVQLQESGGGLVQAGGSLRLSCAASGNIFGSDAMGWYRQAPGKERELVAGISAGTTTNYADSVKGRFTISRDNAKNTVYLQMNSLKPEDTAVYYCAAAFDLYDNYLYWGQGTQVTVSS

SEQ ID NO: 9068 - protein, 113 aa, Artificial Sequence
  Chemically Synthesized
QVQLQESGGGLVQAGGSLRLSCAASGYISSAYSMGWYRQAPGKERELVAGIDLGASTYYADSVKGRFTISRDNAKNTVYLQMNSLKPEDTAVYYCAVDSLDYWGQGTQVTVSS

SEQ ID NO: 9069 - protein, 117 aa, Artificial Sequence
  Chemically Synthesized
QVQLQESGGGLVQAGGSLRLSCAASGTISSDYVMGWYRQAPGKEREFVAAITYGTITNYADSVKGRFTISRDNAKNTVYLQMNSLKPEDTAVYYCAASSYSTLLLYWGQGTQVTVSS

SEQ ID NO: 9070 - protein, 121 aa, Artificial Sequence
  Chemically Synthesized
QVQLQESGGGLVQAGGSLRLSCAASGNIFVLPDMGWYRQAPGKEREFVAGIARGASTNYADSVKGRFTISRDNAKNTVYLQMNSLKPEDTAVYYCAATTTVTWFSLLLIYWGQGTQVTVSS

SEQ ID NO: 9071 - protein, 122 aa, Artificial Sequence
  Chemically Synthesized
QVQLQESGGGLVQAGGSLRLSCAASGNISSLRIMGWYRQAPGKEREFVAGIASGSNTNYADSVKGRFTISRDNAKNTVYLQMNSLKPEDTAVYYCAVIYGYGRAPTYYHRYWGQGTQVTVSS

SEQ ID NO: 9072 - protein, 118 aa, Artificial Sequence
  Chemically Synthesized
QVQLQESGGGLVQAGGSLRLSCAASGTIFAYVSMGWYRQAPGKERELVASINDGGTTYYADSVKGRFTISRDNAKNTVYLQMNSLKPEDTAVYYCAVIYDRVPYLSYWGQGTQVTVSS

SEQ ID NO: 9073 - protein, 120 aa, Artificial Sequence
  Chemically Synthesized
QVQLQESGGGLVQAGGSLRLSCAASGNISPDGTMGWYRQAPGKERELVAALVLVLLPYADSVKGRFTISRDNAKNTVYLQMNSLKPEDTAVYYCAAHTYYWRDSYSLLYWGQGTQVTVSS

SEQ ID NO: 9074 - protein, 117 aa, Artificial Sequence
  Chemically Synthesized
QVQLQESGGGLVQAGGSLRLSCAASGTISYGDSMGWYRQAPGKERELVASIGGSTTYYADSVKGRFTISRDNAKNTVYLQMNSLKPEDTAVYYCAVQVDPDQDHSYWGQGTQVTVSS

SEQ ID NO: 9075 - protein, 122 aa, Artificial Sequence
  Chemically Synthesized
QVQLQESGGGLVQAGGSLRLSCAASGTISWYGNMGWYRQAPGKEREFVATIGSGGSTNYADSVKGRFTISRDNAKNTVYLQMNSLKPEDTAVYYCAVKPIEDYDVAVYLRYWGQGTQVTVSS

SEQ ID NO: 9076 - protein, 117 aa, Artificial Sequence
  Chemically Synthesized
QVQLQESGGGLVQAGGSLRLSCAASGTISDSGLMGWYRQAPGKERELVATIGKGTTTNYADSVKGRFTISRDNAKNTVYLQMNSLKPEDTAVYYCAADDLYYSVIYWGQGTQVTVSS

SEQ ID NO: 9077 - protein, 118 aa, Artificial Sequence
  Chemically Synthesized
QVQLQESGGGLVQAGGSLRLSCAASGSISHVLYMGWYRQAPGKEREFVATIDDGGSTNYADSVKGRFTISRDNAKNTVYLQMNSLKPEDTAVYYCAVYVHIYAIHDYWGQGTQVTVSS

SEQ ID NO: 9078 - protein, 122 aa, Artificial Sequence
  Chemically Synthesized
QVQLQESGGGLVQAGGSLRLSCAASGNISLPARMGWYRQAPGKEREFVAAITLGGITNYADSVKGRFTISRDNAKNTVYLQMNSLKPEDTAVYYCAAYYQYDAQYGRRHGYWGQGTQVTVSS

SEQ ID NO: 9079 - protein, 118 aa, Artificial Sequence
  Chemically Synthesized
QVQLQESGGGLVQAGGSLRLSCAASGYIFLLYTMGWYRQAPGKERELVASIAPGSSTNYADSVKGRFTISRDNAKNTVYLQMNSLKPEDTAVYYCAVAGGSYLNHAYWGQGTQVTVSS

SEQ ID NO: 9080 - protein, 122 aa, Artificial Sequence
  Chemically Synthesized
QVQLQESGGGLVQAGGSLRLSCAASGTIFVWRDMGWYRQAPGKEREFVASITPGANTNYADSVKGRFTISRDNAKNTVYLQMNSLKPEDTAVYYCAVSIASYYTTVAVLRYWGQGTQVTVSS

SEQ ID NO: 9081 - protein, 125 aa, Artificial Sequence
  Chemically Synthesized
QVQLQESGGGLVQAGGSLRLSCAASGNISDAHGMGWYRQAPGKERELVAGISTGASTNYADSVKGRFTISRDNAKNTVYLQMNSLKPEDTAVYYCAATEKRTLVQFYAKSLLLYWGQGTQVTVSS

SEQ ID NO: 9082 - protein, 120 aa, Artificial Sequence
  Chemically Synthesized
QVQLQESGGGLVQAGGSLRLSCAASGTIFAHKYMGWYRQAPGKEREFVAAIDVGSNTYYADSVKGRFTISRDNAKNTVYLQMNSLKPEDTAVYYCAVYRPLTDTDTFGYWGQGTQVTVSS

SEQ ID NO: 9083 - protein, 117 aa, Artificial Sequence
  Chemically Synthesized
QVQLQESGGGLVQAGGSLRLSCAASGSISHLPMGWYRQAPGKERELVATIGYGANTNYADSVKGRFTISRDNAKNTVYLQMNSLKPEDTAVYYCAVTRYVRYAHDYWGQGTQVTVSS

SEQ ID NO: 9084 - protein, 118 aa, Artificial Sequence
  Chemically Synthesized
QVQLQESGGGLVQAGGSLRLSCAASGYIFDRSVMGWYRQAPGKEREFVAAIGSGGNTNYADSVKGRFTISRDNAKNTVYLQMNSLKPEDTAVYYCAVYHVADEYFIYWGQGTQVTVSS

SEQ ID NO: 9085 - protein, 111 aa, Artificial Sequence
  Chemically Synthesized
QVQLQESGGGLVQAGGSLRLSCAASGTIFPVDGMGWYRQAPGKEREFVAGISWGGSTYYADSVKGRFTISRDNAKNTVYLQMNSLKPEDTAVYYCAVYTYWGQGTQVTVSS

SEQ ID NO: 9086 - protein, 118 aa, Artificial Sequence
  Chemically Synthesized
QVQLQESGGGLVQAGGSLRLSCAASGSISPDGDMGWYRQAPGKERELVAGISLGSNTNYADSVKGRFTISRDNAKNTVYLQMNSLKPEDTAVYYCAAGDSFHRNFPYWGQGTQVTVSS

SEQ ID NO: 9087 - protein, 126 aa, Artificial Sequence
  Chemically Synthesized
QVQLQESGGGLVQAGGSLRLSCAASGYISVFTGMGWYRQAPGKERELVAGIDRGANTNYADSVKGRFTISRDNAKNTVYLQMNSLKPEDTAVYYCAAYAPSYRPYDETYGYTYAYWGQGTQVTVSS

SEQ ID NO: 9088 - protein, 118 aa, Artificial Sequence
  Chemically Synthesized
QVQLQESGGGLVQAGGSLRLSCAASGTISRYARMGWYRQAPGKERELVAAISYGGITYYADSVKGRFTISRDNAKNTVYLQMNSLKPEDTAVYYCAVRTIWWAGHTYWGQGTQVTVSS

SEQ ID NO: 9089 - protein, 118 aa, Artificial Sequence
  Chemically Synthesized
QVQLQESGGGLVQAGGSLRLSCAASGSIFDIVYMGWYRQAPGKEREFVAGIDYGTTTYYADSVKGRFTISRDNAKNTVYLQMNSLKPEDTAVYYCAAYYAYYYYFSYWGQGTQVTVSS

SEQ ID NO: 9090 - protein, 121 aa, Artificial Sequence
  Chemically Synthesized
QVQLQESGGGLVQAGGSLRLSCAASGNIFGYEHMGWYRQAPGKERELVATIDDGTSTNYADSVKGRFTISRDNAKNTVYLQMNSLKPEDTAVYYCAADGGAGYAPYLVMYWGQGTQVTVSS

SEQ ID NO: 9091 - protein, 108 aa, Artificial Sequence
  Chemically Synthesized
QVQLQESGGGLVQAGGSLRLSCAASGSISNRIDMGWYRQAPGKEREFIPYADSVKGRFTISRDNAKNTVYLQMNSLKPEDTAVYYCAADPSYKEVFYWGQGTQVTVSS

SEQ ID NO: 9092 - protein, 118 aa, Artificial Sequence
  Chemically Synthesized
QVQLQESGGGLVQAGGSLRLSCAASGSIFGSCCMGWYRQAPGKEREFVATISWGTTTYYADSVKGRFTISRDNAKNTVYLQMNSLKPEDTAVYYCAVGQSAQDVHAYWGQGTQVTVSS

SEQ ID NO: 9093 - protein, 117 aa, Artificial Sequence
  Chemically Synthesized
QVQLQESGGGLVQAGGSLRLSCAASGNISGRHTMGWYRQAPGKERELVAAIVTVLVPYADSVKGRFTISRDNAKNTVYLQMNSLKPEDTAVYYCAVDSGDGYGHDYWGQGTQVTVSS

SEQ ID NO: 9094 - protein, 122 aa, Artificial Sequence
  Chemically Synthesized
QVQLQESGGGLVQAGGSLRLSCAASGYISDPYLMGWYRQAPGKEREFVAGIDAGSNTNYADSVKGRFTISRDNAKNTVYLQMNSLKPEDTAVYYCAVSYDYGGADGDYHAYWGQGTQVTVSS

SEQ ID NO: 9095 - protein, 118 aa, Artificial Sequence
  Chemically Synthesized
QVQLQESGGGLVQAGGSLRLSCAASGTIFAYHTMGWYRQAPGKEREFVASINGGTNTNYADSVKGRFTISRDNAKNTVYLQMNSLKPEDTAVYYCAVDDASGYIFSYWGQGTQVTVSS

SEQ ID NO: 9096 - protein, 116 aa, Artificial Sequence
  Chemically Synthesized
QVQLQESGGGLVQAGGSLRLSCAASGYISGGDEMGWYRQAPGKERELVYADSVKGRFTISRDNAKNTVYLQMNSLKPEDTAVYYCAASNQNPVRGDNKYVGYLGYWGQGTQVTVSS

SEQ ID NO: 9097 - protein, 118 aa, Artificial Sequence
  Chemically Synthesized
QVQLQESGGGLVQAGGSLRLSCAASGTISGYYYMGWYRQAPGKEREFVAGISIRYYYLYADSVKGRFTISRDNAKNTVYLQMNSLKPEDTAVYYCAAASYSWWDHDYWGQGTQVTVSS

SEQ ID NO: 9098 - protein, 122 aa, Artificial Sequence
  Chemically Synthesized
QVQLQESGGGLVQAGGSLRLSCAASGSISSTAAMGWYRQAPGKERELVAAIAYGATTYYADSVKGRFTISRDNAKNTVYLQMNSLKPEDTAVYYCAATGYALYPFQRSHYYWGQGTQVTVSS

SEQ ID NO: 9099 - protein, 117 aa, Artificial Sequence
  Chemically Synthesized
QVQLQESGGGLVQAGGSLRLSCAASGNIFDQYYMGWYRQAPGKEREFLPVLVTVVIPYADSVKGRFTISRDNAKNTVYLQMNSLKPEDTAVYYCAAYLWAYNGHDYWGQGTQVTVSS

SEQ ID NO: 9100 - protein, 110 aa, Artificial Sequence
  Chemically Synthesized
QVQLQESGGGLVQAGGSLRLSCAASGTICCLMGWYRQAPGKERELVATIDPGSTTNYADSVKGRFTISRDNAKNTVYLQMNSLKPEDTAVYYCAAKHPYWGQGTQVTVSS

SEQ ID NO: 9101 - protein, 117 aa, Artificial Sequence
  Chemically Synthesized
QVQLQESGGGLVQAGGSLRLSCAASGNISSTCMGWYRQAPGKEREFVATITPGANTNYADSVKGRFTISRDNAKNTVYLQMNSLKPEDTAVYYCAAYTDGTATYYYWGQGTQVTVSS

SEQ ID NO: 9102 - protein, 122 aa, Artificial Sequence
  Chemically Synthesized
QVQLQESGGGLVQAGGSLRLSCAASGSIFHFVTMGWYRQAPGKEREFVAGISRGGNTYYADSVKGRFTISRDNAKNTVYLQMNSLKPEDTAVYYCAVDSGSGDYPWSRHFYWGQGTQVTVSS

SEQ ID NO: 9103 - protein, 120 aa, Artificial Sequence
  Chemically Synthesized
QVQLQESGGGLVQAGGSLRLSCAASGNISTGTMGWYRQAPGKEREFVATITKGGSTYYADSVKGRFTISRDNAKNTVYLQMNSLKPEDTAVYYCAVRYYVHTVLTRTIYWGQGTQVTVSS

SEQ ID NO: 9104 - protein, 126 aa, Artificial Sequence
  Chemically Synthesized
QVQLQESGGGLVQAGGSLRLSCAASGTISRWSPMGWYRQAPGKERELVAGIADGTTTNYADSVKGRFTISRDNAKNTVYLQMNSLKPEDTAVYYCAVYYETYGYRGHNDTPPYTYWGQGTQVTVSS

SEQ ID NO: 9105 - protein, 120 aa, Artificial Sequence
  Chemically Synthesized
QVQLQESGGGLVQAGGSLRLSCAASGTIFENRYMGWYRQAPGKEREFVATISGGTNTYYADSVKGRFTISRDNAKNTVYLQMNSLKPEDTAVYYCAVNVLTDYGDYPFYWGQGTQVTVSS

SEQ ID NO: 9106 - protein, 118 aa, Artificial Sequence
  Chemically Synthesized
QVQLQESGGGLVQAGGSLRLSCAASGTISYYFAMGWYRQAPGKERELVAGIGAGASTYYADSVKGRFTISRDNAKNTVYLQMNSLKPEDTAVYYCAADGEYIPAFAYWGQGTQVTVSS

SEQ ID NO: 9107 - protein, 124 aa, Artificial Sequence
  Chemically Synthesized
QVQLQESGGGLVQAGGSLRLSCAASGTLFTLMGWYRQAPGKEREFVASIGSGATTNYADSVKGRFTISRDNAKNTVYLQMNSLKPEDTAVYYCAAAAQRDVDASDRSGVPFTYWGQGTQVTVSS

SEQ ID NO: 9108 - protein, 118 aa, Artificial Sequence
  Chemically Synthesized
QVQLQESGGGLVQAGGSLRLSCAASGTIFLDFAMGWYRQAPGKEREFVAAIAYGTNYADSVKGRFTISRDNAKNTVYLQMNSLKPEDTAVYYCAVGGSTSRVSCVMYWGQGTQVTVSS

SEQ ID NO: 9109 - protein, 117 aa, Artificial Sequence
  Chemically Synthesized
QVQLQESGGGLVQAGGSLRLSCAASGTISAALSMGWYRQAPGKERELVAAISYGAITYYADSVKGRFTISRDNAKNTVYLQMNSLKPEDTAVYYCAFLDGGPYHYYWGQGTQVTVSS

SEQ ID NO: 9110 - protein, 118 aa, Artificial Sequence
  Chemically Synthesized
QVQLQESGGGLVQAGGSLRLSCAASGSIFYSYFMGWYRQAPGKEREFVASIAWGSSTYYADSVKGRFTISRDNAKNTVYLQMNSLKPEDTAVYYCAVRYDLARYLSYWGQGTQVTVSS

SEQ ID NO: 9111 - protein, 122 aa, Artificial Sequence
  Chemically Synthesized
QVQLQESGGGLVQAGGSLRLSCAASGTIFSEYDMGWYRQAPGKEREFVAAIAYGTSTYYADSVKGRFTISRDNAKNTVYLQMNSLKPEDTAVYYCAATYLEYADYDQVYYYWGQGTQVTVSS

SEQ ID NO: 9112 - protein, 118 aa, Artificial Sequence
  Chemically Synthesized
QVQLQESGGGLVQAGGSLRLSCAASGSISSRVYMGWYRQAPGKERELVATISPGSSTYYADSVKGRFTISRDNAKNTVYLQMNSLKPEDTAVYYCAVYPDSYDLHTYWGQGTQVTVSS

SEQ ID NO: 9113 - protein, 119 aa, Artificial Sequence
  Chemically Synthesized
QVQLQESGGGLVQAGGSLRLSCAASGSIFGTKWMGWYRQAPGKEREFVATITIGSSTNYADSVKGRFTISRDNAKNTVYLQMNSLKPEDTAVYYCAVGDALTTVVLMYWGQGTQVTVSS

SEQ ID NO: 9114 - protein, 110 aa, Artificial Sequence
  Chemically Synthesized
QVQLQESGGGLVQAGGSLRLSCAASGSISPHDVMGWYRQAPGKEREGIIPYADSVKGRFTISRDNAKNTVYLQMNSLKPEDTAVYYCAAYGEVQWYLDYWGQGTQVTVSS

SEQ ID NO: 9115 - protein, 121 aa, Artificial Sequence
  Chemically Synthesized
QVQLQESGGGLVQAGGSLRLSCAASGYIFTTYMGWYRQAPGKEREFVASIDYGTTTYYADSVKGRFTISRDNAKNTVYLQMNSLKPEDTAVYYCAVLRNYSYSYGAYHDYWGQGTQVTVSS

SEQ ID NO: 9116 - protein, 118 aa, Artificial Sequence
  Chemically Synthesized
QVQLQESGGGLVQAGGSLRLSCAASGNISSHRRMGWYRQAPGKERELVATIGLGANTNYADSVKGRFTISRDNAKNTVYLQMNSLKPEDTAVYYCAVYLFDPAQHAYWGQGTQVTVSS

SEQ ID NO: 9117 - protein, 117 aa, Artificial Sequence
  Chemically Synthesized
QVQLQESGGGLVQAGGSLRLSCAASGNISAPYDMGWYRQAPGKERELVATISYGGNTNYADSVKGRFTISRDNAKNTVYLQMNSLKPEDTAVYYCAVPLYPDGLYYWGQGTQVTVSS

SEQ ID NO: 9118 - protein, 126 aa, Artificial Sequence
  Chemically Synthesized
QVQLQESGGGLVQAGGSLRLSCAASGYISRSPSMGWYRQAPGKEREFVATIGQGSSTYYADSVKGRFTISRDNAKNTVYLQMNSLKPEDTAVYYCAVRFTAWYLDWVRVPPDHRYWGQGTQVTVSS

SEQ ID NO: 9119 - protein, 118 aa, Artificial Sequence
  Chemically Synthesized
QVQLQESGGGLVQAGGSLRLSCAASGSIFASAVMGWYRQAPGKEREFVASIDPGGSTNYADSVKGRFTISRDNAKNTVYLQMNSLKPEDTAVYYCAVLPNSERSFAYWGQGTQVTVSS

SEQ ID NO: 9120 - protein, 116 aa, Artificial Sequence
  Chemically Synthesized
QVQLQESGGGLVQAGGSLRLSCAASGSISYILSMGWYRQAPGKEREFVASIALGGNTYYADSVKGRFTISRDNAKNTVYLQMNSLKPEDTAVYYCAVPRSRYTDYWGQGTQVTVSS

SEQ ID NO: 9121 - protein, 122 aa, Artificial Sequence
  Chemically Synthesized
QVQLQESGGGLVQAGGSLRLSCAASGTISYQENMGWYRQAPGKERELVASIDYGGNTYYADSVKGRFTISRDNAKNTVYLQMNSLKPEDTAVYYCAAWDAYHTDADVVHIYWGQGTQVTVSS

SEQ ID NO: 9122 - protein, 122 aa, Artificial Sequence
  Chemically Synthesized
QVQLQESGGGLVQAGGSLRLSCAASGSISIYLIMGWYRQAPGKERELVAGIGVGGTTYYADSVKGRFTISRDNAKNTVYLQMNSLKPEDTAVYYCAAYTFGQDANPRYLGYWGQGTQVTVSS

SEQ ID NO: 9123 - protein, 117 aa, Artificial Sequence
  Chemically Synthesized
QVQLQESGGGLVQAGGSLRLSCAASGNIFTTDAMGWYRQAPGKEREFVATIGPGTSTYADSVKGRFTISRDNAKNTVYLQMNSLKPEDTAVYYCAAGRGDSSAHRYWGQGTQVTVSS

SEQ ID NO: 9124 - protein, 125 aa, Artificial Sequence
  Chemically Synthesized
QVQLQESGGGLVQAGGSLRLSCAASGYFLPSGMGWYRQAPGKERELVASISIGTITYYADSVKGRFTISRDNAKNTVYLQMNSLKPEDTAVYYCAALTAGYSYIIRAVVQWHTYWGQGTQVTVSS

SEQ ID NO: 9125 - protein, 120 aa, Artificial Sequence
  Chemically Synthesized
QVQLQESGGGLVQAGGSLRLSCAASGYIFVTLMGWYRQAPGKERELVAGITSGTSTNYADSVKGRFTISRDNAKNTVYLQMNSLKPEDTAVYYCAAWYDRSDAWDKDMYWGQGTQVTVSS

SEQ ID NO: 9126 - protein, 117 aa, Artificial Sequence
  Chemically Synthesized
QVQLQESGGGLVQAGGSLRLSCAASGNIFDAVPMGWYRQAPGKEREFVALLMTVVVPYADSVKGRFTISRDNAKNTVYLQMNSLKPEDTAVYYCAANFDFQPYFAYWGQGTQVTVSS

SEQ ID NO: 9127 - protein, 126 aa, Artificial Sequence
  Chemically Synthesized
QVQLQESGGGLVQAGGSLRLSCAASGTIFRYDDMGWYRQAPGKERELVAAIGGGGNTNYADSVKGRFTISRDNAKNTVYLQMNSLKPEDTAVYYCAVYSTSTYYFGVGWRRSFGYWGQGTQVTVSS

SEQ ID NO: 9128 - protein, 119 aa, Artificial Sequence
  Chemically Synthesized
QVQLQESGGGLVQAGGSLRLSCAASGYMVLMGWYRQAPGKERELVAAINYGTITYYADSVKGRFTISRDNAKNTVYLQMNSLKPEDTAVYYCAVDPDIKDDLLYSLEYWGQGTQVTVSS

SEQ ID NO: 9129 - protein, 126 aa, Artificial Sequence
  Chemically Synthesized
QVQLQESGGGLVQAGGSLRLSCAASGNISRTVNMGWYRQAPGKERELVATIGVGGTTNYADSVKGRFTISRDNAKNTVYLQMNSLKPEDTAVYYCAVDASRPYWPFGYGSWLLWYWGQGTQVTVSS

SEQ ID NO: 9130 - protein, 117 aa, Artificial Sequence
  Chemically Synthesized
QVQLQESGGGLVQAGGSLRLSCAASGYIFDYHDMGWYRQAPGKERELVAGYYQYADSVKGRFTISRDNAKNTVYLQMNSLKPEDTAVYYCAVFKIVHGYYFYALRYWGQGTQVTVSS

SEQ ID NO: 9131 - protein, 125 aa, Artificial Sequence
  Chemically Synthesized
QVQLQESGGGLVQAGGSLRLSCAASGTISSTTMGWYRQAPGKEREFVAGITPGSNTYYADSVKGRFTISRDNAKNTVYLQMNSLKPEDTAVYYCAVSEGYTAGQWYKAYDSYDYWGQGTQVTVSS

SEQ ID NO: 9132 - protein, 116 aa, Artificial Sequence
  Chemically Synthesized
QVQLQESGGGLVQAGGSLRLSCAASGNIFLRIGMGWYRQAPGKERELVDYYQYADSVKGRFTISRDNAKNTVYLQMNSLKPEDTAVYYCAAYNWYSDSYTHVHYYWGQGTQVTVSS

SEQ ID NO: 9133 - protein, 117 aa, Artificial Sequence
  Chemically Synthesized
QVQLQESGGGLVQAGGSLRLSCAASGTISFVDLMGWYRQAPGKEREFVAAISEGLVPYADSVKGRFTISRDNAKNTVYLQMNSLKPEDTAVYYCAVWYSGRPLHRYWGQGTQVTVSS

SEQ ID NO: 9134 - protein, 118 aa, Artificial Sequence
  Chemically Synthesized
QVQLQESGGGLVQAGGSLRLSCAASGTISYVGYMGWYRQAPGKEREFVAGIGAGGTTYYADSVKGRFTISRDNAKNTVYLQMNSLKPEDTAVYYCAVRGDDPNDFLYWGQGTQVTVSS

SEQ ID NO: 9135 - protein, 126 aa, Artificial Sequence
  Chemically Synthesized
QVQLQESGGGLVQAGGSLRLSCAASGYISDYVYMGWYRQAPGKERELVATIAVGANTNYADSVKGRFTISRDNAKNTVYLQMNSLKPEDTAVYYCAATPAENPYVLRYYYVAHYYWGQGTQVTVSS

SEQ ID NO: 9136 - protein, 122 aa, Artificial Sequence
  Chemically Synthesized
QVQLQESGGGLVQAGGSLRLSCAASGSISVVGYMGWYRQAPGKERELVAAIGYGGNTYYADSVKGRFTISRDNAKNTVYLQMNSLKPEDTAVYYCAAYTGYLLLQGYDYRYWGQGTQVTVSS

SEQ ID NO: 9137 - protein, 118 aa, Artificial Sequence
  Chemically Synthesized
QVQLQESGGGLVQAGGSLRLSCAASGNIFDYVGMGWYRQAPGKEREFVAGIALGGSTYYADSVKGRFTISRDNAKNTVYLQMNSLKPEDTAVYYCAVGYGSRRSHNYWGQGTQVTVSS

SEQ ID NO: 9138 - protein, 118 aa, Artificial Sequence
  Chemically Synthesized
QVQLQESGGGLVQAGGSLRLSCAASGTIFFDYSMGWYRQAPGKEREFVAGIGHGSNTYYADSVKGRFTISRDNAKNTVYLQMNSLKPEDTAVYYCAAPDGGDFTLAYWGQGTQVTVSS

SEQ ID NO: 9139 - protein, 118 aa, Artificial Sequence
  Chemically Synthesized
QVQLQESGGGLVQAGGSLRLSCAASGYISGPEYMGWYRQAPGKERELVAAIDIGSTTYYADSVKGRFTISRDNAKNTVYLQMNSLKPEDTAVYYCAVYFDQDLTHYYWGQGTQVTVSS

SEQ ID NO: 9140 - protein, 125 aa, Artificial Sequence
  Chemically Synthesized
QVQLQESGGGLVQAGGSLRLSCAASGYISTHSDMGWYRQAPGKEREFVAGIATGTITNYADSVKGRFTISRDNAKNTVYLQMNSLKPEDTAVYYCAAGDSTTVLSLTGVVCLIYWGQGTQVTVSS

SEQ ID NO: 9141 - protein, 126 aa, Artificial Sequence
  Chemically Synthesized
QVQLQESGGGLVQAGGSLRLSCAASGNISRPQAMGWYRQAPGKEREFVATISDGGSTYYADSVKGRFTISRDNAKNTVYLQMNSLKPEDTAVYYCAAVNHAYTHFGDNYYLRHAYWGQGTQVTVSS

SEQ ID NO: 9142 - protein, 118 aa, Artificial Sequence
  Chemically Synthesized
QVQLQESGGGLVQAGGSLRLSCAASGSISWDFYMGWYRQAPGKEREFVASIDYGSNTYYADSVKGRFTISRDNAKNTVYLQMNSLKPEDTAVYYCAVAVYDRDSVIYWGQGTQVTVSS

SEQ ID NO: 9143 - protein, 118 aa, Artificial Sequence
  Chemically Synthesized
QVQLQESGGGLVQAGGSLRLSCAASGTISVHITMGWYRQAPGKEREFVASISTGTNTNYADSVKGRFTISRDNAKNTVYLQMNSLKPEDTAVYYCAVDYGSYNVYLYWGQGTQVTVSS

SEQ ID NO: 9144 - protein, 118 aa, Artificial Sequence
  Chemically Synthesized
QVQLQESGGGLVQAGGSLRLSCAASGNIFQYPYMGWYRQAPGKERELVAAISWGTSTNYADSVKGRFTISRDNAKNTVYLQMNSLKPEDTAVYYCAALRLAYEVHAYWGQGTQVTVSS

SEQ ID NO: 9145 - protein, 121 aa, Artificial Sequence
  Chemically Synthesized
QVQLQESGGGLVQAGGSLRLSCAASGSISDVDAMGWYRQAPGKERELVASIGYGASTNYADSVKGRFTISRDNAKNTVYLQMNSLKPEDTAVYYCAAGPIDADGSARSIYWGQGTQVTVSS

SEQ ID NO: 9146 - protein, 117 aa, Artificial Sequence
  Chemically Synthesized
QVQLQESGGGLVQAGGSLRLSCAASGSIFDGYIMGWYRQAPGKERELVPVLILVLVPYADSVKGRFTISRDNAKNTVYLQMNSLKPEDTAVYYCAVWGYEQVHSYYWGQGTQVTVSS

SEQ ID NO: 9147 - protein, 118 aa, Artificial Sequence
  Chemically Synthesized
QVQLQESGGGLVQAGGSLRLSCAASGSIFDRTLMGWYRQAPGKERELVATIGLGTSTYYADSVKGRFTISRDNAKNTVYLQMNSLKPEDTAVYYCAVPRDYFRQYGYWGQGTQVTVSS

SEQ ID NO: 9148 - protein, 123 aa, Artificial Sequence
  Chemically Synthesized
QVQLQESGGGLVQAGGSLRLSCAASGYISTPSNMGWYRQAPGKEREFVAAISKNGTNTYYADSVKGRFTISRDNAKNTVYLQMNSLKPEDTAVYYCAATGYDIWYRAVDFHYWGQGTQVTVSS

SEQ ID NO: 9149 - protein, 122 aa, Artificial Sequence
  Chemically Synthesized
QVQLQESGGGLVQAGGSLRLSCAASGTIFDGDGMGWYRQAPGKERELVAAITHGTITNYADSVKGRFTISRDNAKNTVYLQMNSLKPEDTAVYYCAAIWYDYYDQPRDLLYWGQGTQVTVSS

SEQ ID NO: 9150 - protein, 122 aa, Artificial Sequence
  Chemically Synthesized
QVQLQESGGGLVQAGGSLRLSCAASGTISGIYQMGWYRQAPGKEREFVATIDVGANTYYADSVKGRFTISRDNAKNTVYLQMNSLKPEDTAVYYCAAVGYPHGYVSRYRYYWGQGTQVTVSS

SEQ ID NO: 9151 - protein, 123 aa, Artificial Sequence
  Chemically Synthesized
QVQLQESGGGLVQAGGSLRLSCAASGSISRARSMGWYRQAPGKEREFVAGIGLGGNTNYADSVKGRFTISRDNAKNTVYLQMNSLKPEDTAVYYCAALAQYRYDGTSYGYWYWGQGTQVTVSS

SEQ ID NO: 9152 - protein, 118 aa, Artificial Sequence
  Chemically Synthesized
QVQLQESGGGLVQAGGSLRLSCAASGTISYRYSMGWYRQAPGKEREFVAAITYGANTYYADSVKGRFTISRDNAKNTVYLQMNSLKPEDTAVYYCAALYRGESWHYYWGQGTQVTVSS

SEQ ID NO: 9153 - protein, 110 aa, Artificial Sequence
  Chemically Synthesized
QVQLQESGGGLVQAGGSLRLSCAASGYISGYGTMGWYRQAPGKERELVAAIDLGSSTNYADSVKGRFTISRDNAKNTVYLQMNSLKPEDTAVYYCALNYWGQGTQVTVSS

SEQ ID NO: 9154 - protein, 117 aa, Artificial Sequence
  Chemically Synthesized
QVQLQESGGGLVQAGGSLRLSCAASGSIFRVYAMGWYRQAPGKERELVATKYWYYYLYADSVKGRFTISRDNAKNTVYLQMNSLKPEDTAVYYCAAYTGRYPSYGYWGQGTQVTVSS

SEQ ID NO: 9155 - protein, 118 aa, Artificial Sequence
  Chemically Synthesized
QVQLQESGGGLVQAGGSLRLSCAASGSIFVTVYMGWYRQAPGKERELVAGISPGATTNYADSVKGRFTISRDNAKNTVYLQMNSLKPEDTAVYYCAVASYAGRWFHYWGQGTQVTVSS

SEQ ID NO: 9156 - protein, 116 aa, Artificial Sequence
  Chemically Synthesized
QVQLQESGGGLVQAGGSLRLSCAASGNISSSTMGWYRQAPGKERELVAGITWGSTTNYADSVKGRFTISRDNAKNTVYLQMNSLKPEDTAVYYCAATDLAYVSFYWGQGTQVTVSS

SEQ ID NO: 9157 - protein, 122 aa, Artificial Sequence
  Chemically Synthesized
QVQLQESGGGLVQAGGSLRLSCAASGNISSSLNMGWYRQAPGKEREFVASINFGATTNYADSVKGRFTISRDNAKNTVYLQMNSLKPEDTAVYYCAVHVVADAWPRYAHAYWGQGTQVTVSS

SEQ ID NO: 9158 - protein, 118 aa, Artificial Sequence
  Chemically Synthesized
QVQLQESGGGLVQAGGSLRLSCAASGTISEAFDMGWYRQAPGKERELVASISQGGNTNYADSVKGRFTISRDNAKNTVYLQMNSLKPEDTAVYYCAAGYVRDYWHDYWGQGTQVTVSS

SEQ ID NO: 9159 - protein, 118 aa, Artificial Sequence
  Chemically Synthesized
QVQLQESGGGLVQAGGSLRLSCAASGYISAYVVMGWYRQAPGKERELVAGIANGTITNYADSVKGRFTISRDNAKNTVYLQMNSLKPEDTAVYYCAVYTDGGTPYFYWGQGTQVTVSS

SEQ ID NO: 9160 - protein, 118 aa, Artificial Sequence
  Chemically Synthesized
QVQLQESGGGLVQAGGSLRLSCAASGTISYPLLMGWYRQAPGKEREFVASIGAGSTTNYADSVKGRFTISRDNAKNTVYLQMNSLKPEDTAVYYCAVLYRDQQWLAYWGQGTQVTVSS

SEQ ID NO: 9161 - protein, 121 aa, Artificial Sequence
  Chemically Synthesized
QVQLQESGGGLVQAGGSLRLSCAASGYISTVYGMGWYRQAPGKEREFVASIDGGTTNYADSVKGRFTISRDNAKNTVYLQMNSLKPEDTAVYYCAAEVYKYVYTYGDHSYWGQGTQVTVSS

SEQ ID NO: 9162 - protein, 117 aa, Artificial Sequence
  Chemically Synthesized
QVQLQESGGGLVQAGGSLRLSCAASGTISDTSTMGWYRQAPGKEREFVAVLLVVVLPYADSVKGRFTISRDNAKNTVYLQMNSLKPEDTAVYYCAARVNNTQTSFYWGQGTQVTVSS

SEQ ID NO: 9163 - protein, 122 aa, Artificial Sequence
  Chemically Synthesized
QVQLQESGGGLVQAGGSLRLSCAASGTISSVYTMGWYRQAPGKEREFVAAIGFGGITNYADSVKGRFTISRDNAKNTVYLQMNSLKPEDTAVYYCAARGWVWALEDLAHWYWGQGTQVTVSS

SEQ ID NO: 9164 - protein, 126 aa, Artificial Sequence
  Chemically Synthesized
QVQLQESGGGLVQAGGSLRLSCAASGYISRYAFMGWYRQAPGKEREFVATIALGANTYYADSVKGRFTISRDNAKNTVYLQMNSLKPEDTAVYYCAVVGADVPTDRYVVWYALYYWGQGTQVTVSS

SEQ ID NO: 9165 - protein, 117 aa, Artificial Sequence
  Chemically Synthesized
QVQLQESGGGLVQAGGSLRLSCAASGNILLSLMGWYRQAPGKEREFVAGIDDGASTNYADSVKGRFTISRDNAKNTVYLQMNSLKPEDTAVYYCAVGDNRYRGHGYWGQGTQVTVSS

SEQ ID NO: 9166 - protein, 118 aa, Artificial Sequence
  Chemically Synthesized
QVQLQESGGGLVQAGGSLRLSCAASGNISGGVNMGWYRQAPGKERELVAAIAYGGTTNYADSVKGRFTISRDNAKNTVYLQMNSLKPEDTAVYYCAAVTRTVPYHYYWGQGTQVTVSS

SEQ ID NO: 9167 - protein, 118 aa, Artificial Sequence
  Chemically Synthesized
QVQLQESGGGLVQAGGSLRLSCAASGTIFRIGSMGWYRQAPGKERELVATIGRGSTTYYADSVKGRFTISRDNAKNTVYLQMNSLKPEDTAVYYCAAYAYLYLAYHYWGQGTQVTVSS

SEQ ID NO: 9168 - protein, 125 aa, Artificial Sequence
  Chemically Synthesized
QVQLQESGGGLVQAGGSLRLSCAASGTISSTGSMGWYRQAPGKEREFVASIGYGGNTYYADSVKGRFTISRDNAKNTVYLQMNSLKPEDTAVYYCAADAPFYGTIEQYSRLTLYWGQGTQVTVSS

SEQ ID NO: 9169 - protein, 121 aa, Artificial Sequence
  Chemically Synthesized
QVQLQESGGGLVQAGGSLRLSCAASGSISPAGYMGWYRQAPGKERELVAAINDGASTYADSVKGRFTISRDNAKNTVYLQMNSLKPEDTAVYYCAADQTFRTGDYYYHIYWGQGTQVTVSS

SEQ ID NO: 9170 - protein, 122 aa, Artificial Sequence
  Chemically Synthesized
QVQLQESGGGLVQAGGSLRLSCAASGNISNPYFMGWYRQAPGKERELVASIGRGANTNYADSVKGRFTISRDNAKNTVYLQMNSLKPEDTAVYYCAAYPPPTDEGWYDHSYWGQGTQVTVSS

SEQ ID NO: 9171 - protein, 112 aa, Artificial Sequence
  Chemically Synthesized
QVQLQESGGGLVQAGGSLRLSCAASGTISYTGYMGWYRQAPGKEREFVASINTGGTTNYADSVKGRFTISRDNAKNTVYLQMNSLKPEDTAVYYCAPGPCYWGQGTQVTVSS

SEQ ID NO: 9172 - protein, 118 aa, Artificial Sequence
  Chemically Synthesized
QVQLQESGGGLVQAGGSLRLSCAASGTISVDYTMGWYRQAPGKEREFVASITYGSNTNYADSVKGRFTISRDNAKNTVYLQMNSLKPEDTAVYYCAVLSYGSAWLYYWGQGTQVTVSS

SEQ ID NO: 9173 - protein, 122 aa, Artificial Sequence
  Chemically Synthesized
QVQLQESGGGLVQAGGSLRLSCAASGTIFWIYTMGWYRQAPGKEREFVASIDDGSNTYYADSVKGRFTISRDNAKNTVYLQMNSLKPEDTAVYYCAVHVSLYNRYDAYHYYWGQGTQVTVSS

SEQ ID NO: 9174 - protein, 119 aa, Artificial Sequence
  Chemically Synthesized
QVQLQESGGGLVQAGGSLRLSCAASGSIFRLLGMGWYRQAPGKEREFVASIGWGANTNYADSVKGRFTISRDNAKNTVYLQMNSLKPEDTAVYYCAALARYQDGYHYYWGQGTQVTVSS

SEQ ID NO: 9175 - protein, 126 aa, Artificial Sequence
  Chemically Synthesized
QVQLQESGGGLVQAGGSLRLSCAASGSISKRLAMGWYRQAPGKEREFVASITEGGNTYYADSVKGRFTISRDNAKNTVYLQMNSLKPEDTAVYYCAAYYGDPLYYERGINDGHRYWGQGTQVTVSS

SEQ ID NO: 9176 - protein, 122 aa, Artificial Sequence
  Chemically Synthesized
QVQLQESGGGLVQAGGSLRLSCAASGYIFYDAEMGWYRQAPGKERELVATITSGTTTNYADSVKGRFTISRDNAKNTVYLQMNSLKPEDTAVYYCAVKYLKIERYTSAHAYWGQGTQVTVSS

SEQ ID NO: 9177 - protein, 123 aa, Artificial Sequence
  Chemically Synthesized
QVQLQESGGGLVQAGGSLRLSCAASGTISGDLYMGWYRQAPGKEREFVATIGRGTTTYYADSVKGRFTISRDNAKNTVYLQMNSLKPEDTAVYYCAAVHVTYTDTTSDRHYYWGQGTQVTVSS

SEQ ID NO: 9178 - protein, 126 aa, Artificial Sequence
  Chemically Synthesized
QVQLQESGGGLVQAGGSLRLSCAASGNISVRRAMGWYRQAPGKERELVATIASGGSTYYADSVKGRFTISRDNAKNTVYLQMNSLKPEDTAVYYCAVRRAAELDTGPDDGYYHRYWGQGTQVTVSS

SEQ ID NO: 9179 - protein, 116 aa, Artificial Sequence
  Chemically Synthesized
QVQLQESGGGLVQAGGSLRLSCAASGSISDLSHMGWYRQAPGKERESNYADSVKGRFTISRDNAKNTVYLQMNSLKPEDTAVYYCAATYWYTDYIVRPGFARHDYWGQGTQVTVSS

SEQ ID NO: 9180 - protein, 118 aa, Artificial Sequence
  Chemically Synthesized
QVQLQESGGGLVQAGGSLRLSCAASGSISAYYRMGWYRQAPGKERELVASIAAGGITYYADSVKGRFTISRDNAKNTVYLQMNSLKPEDTAVYYCAVLYKGVTWYFYWGQGTQVTVSS

SEQ ID NO: 9181 - protein, 114 aa, Artificial Sequence
  Chemically Synthesized
QVQLQESGGGLVQAGGSLRLSCAASGNISTDSYMGWYRQAPGKERELVASISSGTTTNYADSVKGRFTISRDNAKNTVYLQMNSLKPEDTAVYYCAVGRDHLYWGQGTQVTVSS

SEQ ID NO: 9182 - protein, 115 aa, Artificial Sequence
  Chemically Synthesized
QVQLQESGGGLVQAGGSLRLSCAASGTISQVVGMGWYRQAPGKERELVAAIAYGTSTYYADSVKGRFTISRDNAKNTVYLQMNSLKPEDTAVYYCAVRTRYFYYWGQGTQVTVSS

SEQ ID NO: 9183 - protein, 122 aa, Artificial Sequence
  Chemically Synthesized
QVQLQESGGGLVQAGGSLRLSCAASGYISETATMGWYRQAPGKEREFVAGITAGGSTYYADSVKGRFTISRDNAKNTVYLQMNSLKPEDTAVYYCAAVYSVRNSAYRAHYYWGQGTQVTVSS

SEQ ID NO: 9184 - protein, 118 aa, Artificial Sequence
  Chemically Synthesized
QVQLQESGGGLVQAGGSLRLSCAASGYISDVDYMGWYRQAPGKEREFVAGINRGTTTNYADSVKGRFTISRDNAKNTVYLQMNSLKPEDTAVYYCAVLVKLRIYHGYWGQGTQVTVSS

SEQ ID NO: 9185 - protein, 118 aa, Artificial Sequence
  Chemically Synthesized
QVQLQESGGGLVQAGGSLRLSCAASGTIFHYHSMGWYRQAPGKERELVASITYGGTTNYADSVKGRFTISRDNAKNTVYLQMNSLKPEDTAVYYCAVELPLYVAHAYWGQGTQVTVSS

SEQ ID NO: 9186 - protein, 118 aa, Artificial Sequence
  Chemically Synthesized
QVQLQESGGGLVQAGGSLRLSCAASGSIFGTVAMGWYRQAPGKERELVAGITSGSSTNYADSVKGRFTISRDNAKNTVYLQMNSLKPEDTAVYYCAAYWYDRCGYHYWGQGTQVTVSS

SEQ ID NO: 9187 - protein, 118 aa, Artificial Sequence
  Chemically Synthesized
QVQLQESGGGLVQAGGSLRLSCAASGSIFERFTMGWYRQAPGKEREFVAAISNGSTTYYADSVKGRFTISRDNAKNTVYLQMNSLKPEDTAVYYCAALYIDRDAYYYWGQGTQVTVSS

SEQ ID NO: 9188 - protein, 117 aa, Artificial Sequence
  Chemically Synthesized
QVQLQESGGGLVQAGGSLRLSCAASGSISGFSMGWYRQAPGKEREFVAGIDIGASTYYADSVKGRFTISRDNAKNTVYLQMNSLKPEDTAVYYCAAYALDRPVHPYWGQGTQVTVSS

SEQ ID NO: 9189 - protein, 116 aa, Artificial Sequence
  Chemically Synthesized
QVQLQESGGGLVQAGGSLRLSCAASGTIFGITLMGWYRQAPGKERELVAAIAQGGSTNYADSVKGRFTISRDNAKNTVYLQMNSLKPEDTAVYYCAVVQADEFAYWGQGTQVTVSS

SEQ ID NO: 9190 - protein, 126 aa, Artificial Sequence
  Chemically Synthesized
QVQLQESGGGLVQAGGSLRLSCAASGTISNRRYMGWYRQAPGKERELVAAITSGATTNYADSVKGRFTISRDNAKNTVYLQMNSLKPEDTAVYYCAAIFRRGGDNYQYERVWYWYWGQGTQVTVSS

SEQ ID NO: 9191 - protein, 118 aa, Artificial Sequence
  Chemically Synthesized
QVQLQESGGGLVQAGGSLRLSCAASGTISRGDAMGWYRQAPGKEREFVAAIGPGATTNYADSVKGRFTISRDNAKNTVYLQMNSLKPEDTAVYYCAAYVHRGNRHYYWGQGTQVTVSS

SEQ ID NO: 9192 - protein, 118 aa, Artificial Sequence
  Chemically Synthesized
QVQLQESGGGLVQAGGSLRLSCAASGSIFNIRGMGWYRQAPGKEREFVAAIGGGGNTYYADSVKGRFTISRDNAKNTVYLQMNSLKPEDTAVYYCAAIHDDRGLHGYWGQGTQVTVSS

SEQ ID NO: 9193 - protein, 122 aa, Artificial Sequence
  Chemically Synthesized
QVQLQESGGGLVQAGGSLRLSCAASGNIFGVVVMGWYRQAPGKEREFVAGISVGTNTNYADSVKGRFTISRDNAKNTVYLQMNSLKPEDTAVYYCAVLQGAQPYDTRYHYYWGQGTQVTVSS

SEQ ID NO: 9194 - protein, 118 aa, Artificial Sequence
  Chemically Synthesized
QVQLQESGGGLVQAGGSLRLSCAASGTISVPFIMGWYRQAPGKEREFVATITDGTSTYYADSVKGRFTISRDNAKNTVYLQMNSLKPEDTAVYYCAVVGYYRVGFWYWGQGTQVTVSS

SEQ ID NO: 9195 - protein, 118 aa, Artificial Sequence
  Chemically Synthesized
QVQLQESGGGLVQAGGSLRLSCAASGTISGPAAMGWYRQAPGKERELVASINYGGNTYYADSVKGRFTISRDNAKNTVYLQMNSLKPEDTAVYYCAVIYYIRSWHWYWGQGTQVTVSS

SEQ ID NO: 9196 - protein, 122 aa, Artificial Sequence
  Chemically Synthesized
QVQLQESGGGLVQAGGSLRLSCAASGNISYLYIMGWYRQAPGKEREFVAAIGAGASTYYADSVKGRFTISRDNAKNTVYLQMNSLKPEDTAVYYCAVYLSEYTAHYPIYLYWGQGTQVTVSS

SEQ ID NO: 9197 - protein, 118 aa, Artificial Sequence
  Chemically Synthesized
QVQLQESGGGLVQAGGSLRLSCAASGTISPYTVMGWYRQAPGKERELVATISKGGSTYYADSVKGRFTISRDNAKNTVYLQMNSLKPEDTAVYYCAVYDDILQYLGYWGQGTQVTVSS

SEQ ID NO: 9198 - protein, 118 aa, Artificial Sequence
  Chemically Synthesized
QVQLQESGGGLVQAGGSLRLSCAASGYIFPKYSMGWYRQAPGKEREFVASISVGGNTYYADSVKGRFTISRDNAKNTVYLQMNSLKPEDTAVYYCAADSYLPIVLYYWGQGTQVTVSS

SEQ ID NO: 9199 - protein, 118 aa, Artificial Sequence
  Chemically Synthesized
QVQLQESGGGLVQAGGSLRLSCAASGTISNGGVMGWYRQAPGKEREFVAGIGYGGSTNYADSVKGRFTISRDNAKNTVYLQMNSLKPEDTAVYYCAVVYRRSGIFYYWGQGTQVTVSS

SEQ ID NO: 9200 - protein, 118 aa, Artificial Sequence
  Chemically Synthesized
QVQLQESGGGLVQAGGSLRLSCAASGSIFRLLGMGWYRQAPGKEREFVAGIAYGGITNYADSVKGRFTISRDNAKNTVYLQMNSLKPEDTAVYYCAAKRYVYLSHYYWGQGTQVTVSS

SEQ ID NO: 9201 - protein, 121 aa, Artificial Sequence
  Chemically Synthesized
QVQLQESGGGLVQAGGSLRLSCAASGTISQYPYMGWYRQAPGKERELVASIASGGITNYADSVKGRFTISRDNAKNTVYLQMNSLKPEDTAVYYCAVATYPGISGTTTIYWGQGTQVTVSS

SEQ ID NO: 9202 - protein, 118 aa, Artificial Sequence
  Chemically Synthesized
QVQLQESGGGLVQAGGSLRLSCAASGSISGLASMGWYRQAPGKEREFVAGITVGASTNYADSVKGRFTISRDNAKNTVYLQMNSLKPEDTAVYYCAVVARQVYYHGYWGQGTQVTVSS

SEQ ID NO: 9203 - protein, 118 aa, Artificial Sequence
  Chemically Synthesized
QVQLQESGGGLVQAGGSLRLSCAASGTISSYYSMGWYRQAPGKEREFVAAINYGGSTNYADSVKGRFTISRDNAKNTVYLQMNSLKPEDTAVYYCAAAAYDGTWYAYWGQGTQVTVSS

SEQ ID NO: 9204 - protein, 122 aa, Artificial Sequence
  Chemically Synthesized
QVQLQESGGGLVQAGGSLRLSCAASGSISYPNYMGWYRQAPGKERELVASIANGGSTYYADSVKGRFTISRDNAKNTVYLQMNSLKPEDTAVYYCAVYTNSLPFTTLRFVYWGQGTQVTVSS

SEQ ID NO: 9205 - protein, 118 aa, Artificial Sequence
  Chemically Synthesized
QVQLQESGGGLVQAGGSLRLSCAASGNIFDVVWMGWYRQAPGKERELVASITAGGTTNYADSVKGRFTISRDNAKNTVYLQMNSLKPEDTAVYYCAVDTGYPLIYQYWGQGTQVTVSS

SEQ ID NO: 9206 - protein, 124 aa, Artificial Sequence
  Chemically Synthesized
QVQLQESGGGLVQAGGSLRLSCAASGYIFGLTMGWYRQAPGKERELVATIDNGASTYYADSVKGRFTISRDNAKNTVYLQMNSLKPEDTAVYYCAAGQIGYLYATSLPRGFAYWGQGTQVTVSS

SEQ ID NO: 9207 - protein, 122 aa, Artificial Sequence
  Chemically Synthesized
QVQLQESGGGLVQAGGSLRLSCAASGNISRDDYMGWYRQAPGKERELVAAITTGSTTNYADSVKGRFTISRDNAKNTVYLQMNSLKPEDTAVYYCAADAHYYADGADGLPYWGQGTQVTVSS

SEQ ID NO: 9208 - protein, 122 aa, Artificial Sequence
  Chemically Synthesized
QVQLQESGGGLVQAGGSLRLSCAASGNISTATFMGWYRQAPGKERELVATIGRGGSTYYADSVKGRFTISRDNAKNTVYLQMNSLKPEDTAVYYCAAVYVGNYRVDDYHYYWGQGTQVTVSS

SEQ ID NO: 9209 - protein, 118 aa, Artificial Sequence
  Chemically Synthesized
QVQLQESGGGLVQAGGSLRLSCAASGSISDKWTMGWYRQAPGKERELVATIARGGSTNYADSVKGRFTISRDNAKNTVYLQMNSLKPEDTAVYYCAAETDEDYTYFYWGQGTQVTVSS

SEQ ID NO: 9210 - protein, 122 aa, Artificial Sequence
  Chemically Synthesized
QVQLQESGGGLVQAGGSLRLSCAASGTISESVSMGWYRQAPGKEREFVATITRGTSTYYADSVKGRFTISRDNAKNTVYLQMNSLKPEDTAVYYCAALGIYGGYQYNTHDYWGQGTQVTVSS

SEQ ID NO: 9211 - protein, 109 aa, Artificial Sequence
  Chemically Synthesized
QVQLQESGGGLVQAGGSLRLSCAASGTISVPRSMGWYRQAPGKEREFVATISLGTSTYYADSVKGRFTISRDNAKNTVYLQMNSLKPEDTAVYYCAIYWGQGTQVTVSS

SEQ ID NO: 9212 - protein, 117 aa, Artificial Sequence
  Chemically Synthesized
QVQLQESGGGLVQAGGSLRLSCAASGTIFLDWMGWYRQAPGKERELVAAITTGSITYYADSVKGRFTISRDNAKNTVYLQMNSLKPEDTAVYYCAAGIVRNSDFDYWGQGTQVTVSS

SEQ ID NO: 9213 - protein, 114 aa, Artificial Sequence
  Chemically Synthesized
QVQLQESGGGLVQAGGSLRLSCAASGYIFWSQKMGWYRQAPGKERELVASIADGGNTNYADSVKGRFTISRDNAKNTVYLQMNSLKPEDTAVYYCAFTTRSLYWGQGTQVTVSS

SEQ ID NO: 9214 - protein, 126 aa, Artificial Sequence
  Chemically Synthesized
QVQLQESGGGLVQAGGSLRLSCAASGSISRRYYMGWYRQAPGKEREFVAAITDGATTNYADSVKGRFTISRDNAKNTVYLQMNSLKPEDTAVYYCAVVGQYQPRDNTYRTNYFWYWGQGTQVTVSS

SEQ ID NO: 9215 - protein, 126 aa, Artificial Sequence
  Chemically Synthesized
QVQLQESGGGLVQAGGSLRLSCAASGYISSYKVMGWYRQAPGKERELVAAIGGGGNTYYADSVKGRFTISRDNAKNTVYLQMNSLKPEDTAVYYCAVYFPDTAEDYTRFDALHVYWGQGTQVTVSS

SEQ ID NO: 9216 - protein, 118 aa, Artificial Sequence
  Chemically Synthesized
QVQLQESGGGLVQAGGSLRLSCAASGTISATLYMGWYRQAPGKEREFVASIAYGSTTNYADSVKGRFTISRDNAKNTVYLQMNSLKPEDTAVYYCAVVADKPSYLYYWGQGTQVTVSS

SEQ ID NO: 9217 - protein, 126 aa, Artificial Sequence
  Chemically Synthesized
QVQLQESGGGLVQAGGSLRLSCAASGNIFIDFRMGWYRQAPGKEREFVASIGRGGSTYYADSVKGRFTISRDNAKNTVYLQMNSLKPEDTAVYYCAALYDLRKTTGDVHVAYLYYWGQGTQVTVSS

SEQ ID NO: 9218 - protein, 118 aa, Artificial Sequence
  Chemically Synthesized
QVQLQESGGGLVQAGGSLRLSCAASGYISDDQIMGWYRQAPGKEREFVASITAGTITYYADSVKGRFTISRDNAKNTVYLQMNSLKPEDTAVYYCAVFEKGSDIHVYWGQGTQVTVSS

SEQ ID NO: 9219 - protein, 118 aa, Artificial Sequence
  Chemically Synthesized
QVQLQESGGGLVQAGGSLRLSCAASGNISRAPVMGWYRQAPGKEREFVAGIDAGTSTNYADSVKGRFTISRDNAKNTVYLQMNSLKPEDTAVYYCAVIGRNGGWLAYWGQGTQVTVSS

SEQ ID NO: 9220 - protein, 118 aa, Artificial Sequence
  Chemically Synthesized
QVQLQESGGGLVQAGGSLRLSCAASGSISYVGGMGWYRQAPGKERELVASITYGSSTYYADSVKGRFTISRDNAKNTVYLQMNSLKPEDTAVYYCAAAKGDVLFHGYWGQGTQVTVSS

SEQ ID NO: 9221 - protein, 118 aa, Artificial Sequence
  Chemically Synthesized
QVQLQESGGGLVQAGGSLRLSCAASGNIFDRYIMGWYRQAPGKEREFVAAIGYGGITNYADSVKGRFTISRDNAKNTVYLQMNSLKPEDTAVYYCAVLSVSSVYHYYWGQGTQVTVSS

SEQ ID NO: 9222 - protein, 118 aa, Artificial Sequence
  Chemically Synthesized
QVQLQESGGGLVQAGGSLRLSCAASGNIFRYAYMGWYRQAPGKEREFVAAINRGTTTYYADSVKGRFTISRDNAKNTVYLQMNSLKPEDTAVYYCAVVYLYRPAYRYWGQGTQVTVSS

SEQ ID NO: 9223 - protein, 118 aa, Artificial Sequence
  Chemically Synthesized
QVQLQESGGGLVQAGGSLRLSCAASGNISARSLMGWYRQAPGKEREFVAGIDGGSSTNYADSVKGRFTISRDNAKNTVYLQMNSLKPEDTAVYYCAALLSYEGWHAYWGQGTQVTVSS

SEQ ID NO: 9224 - protein, 118 aa, Artificial Sequence
  Chemically Synthesized
QVQLQESGGGLVQAGGSLRLSCAASGTISPYGVMGWYRQAPGKEREFVAGIGDGSNTNYADSVKGRFTISRDNAKNTVYLQMNSLKPEDTAVYYCAVAIYTDRYHGYWGQGTQVTVSS

SEQ ID NO: 9225 - protein, 118 aa, Artificial Sequence
  Chemically Synthesized
QVQLQESGGGLVQAGGSLRLSCAASGYISAYQGMGWYRQAPGKEREFVASINTGTTTYYADSVKGRFTISRDNAKNTVYLQMNSLKPEDTAVYYCAAVAHARGYFYYWGQGTQVTVSS

SEQ ID NO: 9226 - protein, 117 aa, Artificial Sequence
  Chemically Synthesized
QVQLQESGGGLVQAGGSLRLSCAASGNISYNHYMGWYRQAPGKEREFVAAISPGTNTNYADSVKGRFTISRDNAKNTVYLQMNSLKPEDTAVYYCAAVTNYAYHYYWGQGTQVTVSS

SEQ ID NO: 9227 - protein, 118 aa, Artificial Sequence
  Chemically Synthesized
QVQLQESGGGLVQAGGSLRLSCAASGSIFDQGLMGWYRQAPGKEREFVAGINAGGNTYYADSVKGRFTISRDNAKNTVYLQMNSLKPEDTAVYYCAAIYLYAGWHYYWGQGTQVTVSS

SEQ ID NO: 9228 - protein, 118 aa, Artificial Sequence
  Chemically Synthesized
QVQLQESGGGLVQAGGSLRLSCAASGTISGPVAMGWYRQAPGKERELVAAISQGGSTNYADSVKGRFTISRDNAKNTVYLQMNSLKPEDTAVYYCAALLYRDRYHAYWGQGTQVTVSS

SEQ ID NO: 9229 - protein, 118 aa, Artificial Sequence
  Chemically Synthesized
QVQLQESGGGLVQAGGSLRLSCAASGTISAPYAMGWYRQAPGKERELVAAIASGASTNYADSVKGRFTISRDNAKNTVYLQMNSLKPEDTAVYYCAVGYVELIDLRYWGQGTQVTVSS

SEQ ID NO: 9230 - protein, 122 aa, Artificial Sequence
  Chemically Synthesized
QVQLQESGGGLVQAGGSLRLSCAASGSISRARDMGWYRQAPGKERELVASISDGGNTNYADSVKGRFTISRDNAKNTVYLQMNSLKPEDTAVYYCAVGDSYIYGRDPVHAYWGQGTQVTVSS

SEQ ID NO: 9231 - protein, 122 aa, Artificial Sequence
  Chemically Synthesized
QVQLQESGGGLVQAGGSLRLSCAASGNISGVATMGWYRQAPGKEREFVAGITYGATTNYADSVKGRFTISRDNAKNTVYLQMNSLKPEDTAVYYCAAIGTSDDGYARYHYYWGQGTQVTVSS

SEQ ID NO: 9232 - protein, 121 aa, Artificial Sequence
  Chemically Synthesized
QVQLQESGGGLVQAGGSLRLSCAASGNIFLYAVMGWYRQAPGKEREFVAAIAYGGNTYYADSVKGRFTISRDNAKNTVYLQMNSLKPEDTAVYYCAVEYTPDWAIGSVLYWGQGTQVTVSS

SEQ ID NO: 9233 - protein, 118 aa, Artificial Sequence
  Chemically Synthesized
QVQLQESGGGLVQAGGSLRLSCAASGYIFAIATMGWYRQAPGKERELVAGIGSGSSTNYADSVKGRFTISRDNAKNTVYLQMNSLKPEDTAVYYCAAYWYQDKYYYYWGQGTQVTVSS

SEQ ID NO: 9234 - protein, 118 aa, Artificial Sequence
  Chemically Synthesized
QVQLQESGGGLVQAGGSLRLSCAASGSISTYDTMGWYRQAPGKERELVATIAPGGTTNYADSVKGRFTISRDNAKNTVYLQMNSLKPEDTAVYYCAVDDYYDILLLYWGQGTQVTVSS

SEQ ID NO: 9235 - protein, 122 aa, Artificial Sequence
  Chemically Synthesized
QVQLQESGGGLVQAGGSLRLSCAASGNIFSRRDMGWYRQAPGKERELVASIAYGTNNLYADSVKGRFTISRDNAKNTVYLQMNSLKPEDTAVYYCAVPGRSKDTYYDRHYYWGQGTQVTVSS

SEQ ID NO: 9236 - protein, 118 aa, Artificial Sequence
  Chemically Synthesized
QVQLQESGGGLVQAGGSLRLSCAASGNISQRTLMGWYRQAPGKEREFVAAIARGSSTNYADSVKGRFTISRDNAKNTVYLQMNSLKPEDTAVYYCAVSYWEYTYHPYWGQGTQVTVSS

SEQ ID NO: 9237 - protein, 116 aa, Artificial Sequence
  Chemically Synthesized
QVQLQESGGGLVQAGGSLRLSCAASGSISTRIRMGWYRQAPGKEREFVASMLTVVLPYADSVKGRFTISRDNAKNTVYLQMNSLKPEDTAVYYCAVYYRLYELGYWGQGTQVTVSS

SEQ ID NO: 9238 - protein, 122 aa, Artificial Sequence
  Chemically Synthesized
QVQLQESGGGLVQAGGSLRLSCAASGNISYSTTMGWYRQAPGKERELVATITRGGNTNYADSVKGRFTISRDNAKNTVYLQMNSLKPEDTAVYYCAVRHRRTDYYYVRFIYWGQGTQVTVSS

SEQ ID NO: 9239 - protein, 118 aa, Artificial Sequence
  Chemically Synthesized
QVQLQESGGGLVQAGGSLRLSCAASGNISGRAPMGWYRQAPGKERELVAAINYGSTTYYADSVKGRFTISRDNAKNTVYLQMNSLKPEDTAVYYCAVTENDRSYFPYWGQGTQVTVSS

SEQ ID NO: 9240 - protein, 115 aa, Artificial Sequence
  Chemically Synthesized
QVQLQESGGGLVQAGGSLRLSCAASGSISEGRMGWYRQAPGKERELVAGIGIGANTNYADSVKGRFTISRDNAKNTVYLQMNSLKPEDTAVYYCAAYYDYVHWYWGQGTQVTVSS

SEQ ID NO: 9241 - protein, 118 aa, Artificial Sequence
  Chemically Synthesized
QVQLQESGGGLVQAGGSLRLSCAASGNIFYLNSMGWYRQAPGKEREFVVSIGAGGITNYADSVKGRFTISRDNAKNTVYLQMNSLKPEDTAVYYCAAVSTYGGYYGYWGQGTQVTVSS

SEQ ID NO: 9242 - protein, 118 aa, Artificial Sequence
  Chemically Synthesized
QVQLQESGGGLVQAGGSLRLSCAASGSISIQRVMGWYRQAPGKEREFVAGIAYGGSTNYADSVKGRFTISRDNAKNTVYLQMNSLKPEDTAVYYCAVLLLAKRWYAYWGQGTQVTVSS

SEQ ID NO: 9243 - protein, 126 aa, Artificial Sequence
  Chemically Synthesized
QVQLQESGGGLVQAGGSLRLSCAASGTISYLTAMGWYRQAPGKERELVAAITHGASTNYADSVKGRFTISRDNAKNTVYLQMNSLKPEDTAVYYCAAIGSRQGDVPDARNGYHSYWGQGTQVTVSS

SEQ ID NO: 9244 - protein, 121 aa, Artificial Sequence
  Chemically Synthesized
QVQLQESGGGLVQAGGSLRLSCAASGSIFPYYMGWYRQAPGKEREFVAGIGIGGSTNYADSVKGRFTISRDNAKNTVYLQMNSLKPEDTAVYYCAALNRYPSRLIYGLDYWGQGTQVTVSS

SEQ ID NO: 9245 - protein, 125 aa, Artificial Sequence
  Chemically Synthesized
QVQLQESGGGLVQAGGSLRLSCAASGSISGDDNMGWYRQAPGKERELVAGLLLVLLPYADSVKGRFTISRDNAKNTVYLQMNSLKPEDTAVYYCAVIYVSSRYVNNGTYDFHPYWGQGTQVTVSS

SEQ ID NO: 9246 - protein, 122 aa, Artificial Sequence
  Chemically Synthesized
QVQLQESGGGLVQAGGSLRLSCAASGYISVPSTMGWYRQAPGKEREFVAGIDYGSNTYYADSVKGRFTISRDNAKNTVYLQMNSLKPEDTAVYYCAALTRAESTHNDYLYYWGQGTQVTVSS

SEQ ID NO: 9247 - protein, 117 aa, Artificial Sequence
  Chemically Synthesized
QVQLQESGGGLVQAGGSLRLSCAASGYIFYTSMGWYRQAPGKERELVATIARGSTTYYADSVKGRFTISRDNAKNTVYLQMNSLKPEDTAVYYCAVFVYLPPYYIYWGQGTQVTVSS

SEQ ID NO: 9248 - protein, 117 aa, Artificial Sequence
  Chemically Synthesized
QVQLQESGGGLVQAGGSLRLSCAASGNISNPYWMGWYRQAPGKEREFVASIDSGANTYYADSVKGRFTISRDNAKNTVYLQMNSLKPEDTAVYYCALWLLSWTVIYWGQGTQVTVSS

SEQ ID NO: 9249 - protein, 118 aa, Artificial Sequence
  Chemically Synthesized
QVQLQESGGGLVQAGGSLRLSCAASGYISADKVMGWYRQAPGKERELVASIAPGAITNYADSVKGRFTISRDNAKNTVYLQMNSLKPEDTAVYYCAAIQYEDKWYWYWGQGTQVTVSS

SEQ ID NO: 9250 - protein, 124 aa, Artificial Sequence
  Chemically Synthesized
QVQLQESGGGLVQAGGSLRLSCAASGTIFWPPNMGWYRQAPGKERELVASINRGVPYADSVKGRFTISRDNAKNTVYLQMNSLKPEDTAVYYCAAKEYGYDYDQYRSIFSHVYWGQGTQVTVSS

SEQ ID NO: 9251 - protein, 121 aa, Artificial Sequence
  Chemically Synthesized
QVQLQESGGGLVQAGGSLRLSCAASGTISSFYDMGWYRQAPGKERELVAGITTGSNTYYADSVKGRFTISRDNAKNTVYLQMNSLKPEDTAVYYCAVYYVWTTPSHDRHYWGQGTQVTVSS

SEQ ID NO: 9252 - protein, 109 aa, Artificial Sequence
  Chemically Synthesized
QVQLQESGGGLVQAGGSLRLSCAASGTISYPYKMGWYRQAPGKEREFVATISEGGNTYYADSVKGRFTISRDNAKNTVYLQMNSLKPEDTAVYYCAHYWGQGTQVTVSS

SEQ ID NO: 9253 - protein, 122 aa, Artificial Sequence
  Chemically Synthesized
QVQLQESGGGLVQAGGSLRLSCAASGNISSAYVMGWYRQAPGKEREFVASIGQGANTNYADSVKGRFTISRDNAKNTVYLQMNSLKPEDTAVYYCAAVKIRHYYGQGFHYYWGQGTQVTVSS

SEQ ID NO: 9254 - protein, 118 aa, Artificial Sequence
  Chemically Synthesized
QVQLQESGGGLVQAGGSLRLSCAASGYIFLPTVMGWYRQAPGKEREFVATISQGANTYYADSVKGRFTISRDNAKNTVYLQMNSLKPEDTAVYYCAANGYWGFVYAYWGQGTQVTVSS

SEQ ID NO: 9255 - protein, 118 aa, Artificial Sequence
  Chemically Synthesized
QVQLQESGGGLVQAGGSLRLSCAASGTIFTTPYMGWYRQAPGKEREFVASIGPGGNTNYADSVKGRFTISRDNAKNTVYLQMNSLKPEDTAVYYCAVLVTVGQYFYYWGQGTQVTVSS

SEQ ID NO: 9256 - protein, 124 aa, Artificial Sequence
  Chemically Synthesized
QVQLQESGGGLVQAGGSLRLSCAASGTISTPIQMGWYRQAPGKEREFVASRRWYYLYADSVKGRFTISRDNAKNTVYLQMNSLKPEDTAVYYCAVGPQHKYGDNEGLIGGFYYWGQGTQVTVSS

SEQ ID NO: 9257 - protein, 118 aa, Artificial Sequence
  Chemically Synthesized
QVQLQESGGGLVQAGGSLRLSCAASGTIFIYYTMGWYRQAPGKEREFVAGIAFGSNTYYADSVKGRFTISRDNAKNTVYLQMNSLKPEDTAVYYCAVRLYYGTTHPYWGQGTQVTVSS

SEQ ID NO: 9258 - protein, 117 aa, Artificial Sequence
  Chemically Synthesized
QVQLQESGGGLVQAGGSLRLSCAASGNIFRYRMGWYRQAPGKERELVAAIDEGSTTNYADSVKGRFTISRDNAKNTVYLQMNSLKPEDTAVYYCAVPYNVYIIHFYWGQGTQVTVSS

SEQ ID NO: 9259 - protein, 122 aa, Artificial Sequence
  Chemically Synthesized
QVQLQESGGGLVQAGGSLRLSCAASGYISYLDRMGWYRQAPGKEREFVASITGGTNTYYADSVKGRFTISRDNAKNTVYLQMNSLKPEDTAVYYCAVVWGVQGSTVYWHYYWGQGTQVTVSS

SEQ ID NO: 9260 - protein, 122 aa, Artificial Sequence
  Chemically Synthesized
QVQLQESGGGLVQAGGSLRLSCAASGNISIHLTMGWYRQAPGKEREFVAAIATGSNTNYADSVKGRFTISRDNAKNTVYLQMNSLKPEDTAVYYCAVLYGGNGEGGQYYYYWGQGTQVTVSS

SEQ ID NO: 9261 - protein, 118 aa, Artificial Sequence
  Chemically Synthesized
QVQLQESGGGLVQAGGSLRLSCAASGSIFSPASMGWYRQAPGKEREFVAGINAGSNTNYADSVKGRFTISRDNAKNTVYLQMNSLKPEDTAVYYCAALYVDNRYHGYWGQGTQVTVSS

SEQ ID NO: 9262 - protein, 118 aa, Artificial Sequence
  Chemically Synthesized
QVQLQESGGGLVQAGGSLRLSCAASGNISARTVMGWYRQAPGKEREFVAGIAFGGTTNYADSVKGRFTISRDNAKNTVYLQMNSLKPEDTAVYYCAALTSSDRLHYYWGQGTQVTVSS

SEQ ID NO: 9263 - protein, 122 aa, Artificial Sequence
  Chemically Synthesized
QVQLQESGGGLVQAGGSLRLSCAASGNISYLRDMGWYRQAPGKEREFVATIDAGTTTNYADSVKGRFTISRDNAKNTVYLQMNSLKPEDTAVYYCAAIGNWEGEYGTYHGYWGQGTQVTVSS

SEQ ID NO: 9264 - protein, 122 aa, Artificial Sequence
  Chemically Synthesized
QVQLQESGGGLVQAGGSLRLSCAASGNIFDPHRMGWYRQAPGKEREFVAAITPGTNTNYADSVKGRFTISRDNAKNTVYLQMNSLKPEDTAVYYCAVVYNPRDRPWSYYYYWGQGTQVTVSS

SEQ ID NO: 9265 - protein, 118 aa, Artificial Sequence
  Chemically Synthesized
QVQLQESGGGLVQAGGSLRLSCAASGNIFHFGRSMGWYRQAPGKEREFVAGIADGAITNYADSVKGRFTISRDNAKNTVYLQMNSLKPEDTAVYYCAVVDGAVSFLYWGQGTQVTVSS

SEQ ID NO: 9266 - protein, 122 aa, Artificial Sequence
  Chemically Synthesized
QVQLQESGGGLVQAGGSLRLSCAASGTIFADGTMGWYRQAPGKEREFVAAIGSGAITNYADSVKGRFTISRDNAKNTVYLQMNSLKPEDTAVYYCAVLFLGPHGYGRYHYYWGQGTQVTVSS

SEQ ID NO: 9267 - protein, 117 aa, Artificial Sequence
  Chemically Synthesized
QVQLQESGGGLVQAGGSLRLSCAASGSIFDTYYMGWYRQAPGKEREFVAGISLGTNTNYADSVKGRFTISRDNAKNTVYLQMNSLKPEDTAVYYCAAVSRDLFHYYWGQGTQVTVSS

SEQ ID NO: 9268 - protein, 118 aa, Artificial Sequence
  Chemically Synthesized
QVQLQESGGGLVQAGGSLRLSCAASGNISAFVGMGWYRQAPGKEREFVAAINAGTITNYADSVKGRFTISRDNAKNTVYLQMNSLKPEDTAVYYCAAIIYYVKYLYYWGQGTQVTVSS

SEQ ID NO: 9269 - protein, 122 aa, Artificial Sequence
  Chemically Synthesized
QVQLQESGGGLVQAGGSLRLSCAASGTISIDEYMGWYRQAPGKERELVASIARGSITYYADSVKGRFTISRDNAKNTVYLQMNSLKPEDTAVYYCAVTAGSAGKIGGSHVYWGQGTQVTVSS

SEQ ID NO: 9270 - protein, 122 aa, Artificial Sequence
  Chemically Synthesized
QVQLQESGGGLVQAGGSLRLSCAASGSISYLARMGWYRQAPGKEREFVAAITPGAITYYADSVKGRFTISRDNAKNTVYLQMNSLKPEDTAVYYCAAYPSYDYEYIVALSYWGQGTQVTVSS

SEQ ID NO: 9271 - protein, 118 aa, Artificial Sequence
  Chemically Synthesized
QVQLQESGGGLVQAGGSLRLSCAASGTIFDTGFMGWYRQAPGKEREFVASINPGANTYYADSVKGRFTISRDNAKNTVYLQMNSLKPEDTAVYYCAALYVYQHTLYYWGQGTQVTVSS

SEQ ID NO: 9272 - protein, 121 aa, Artificial Sequence
  Chemically Synthesized
QVQLQESGGGLVQAGGSLRLSCAASGNIFFTTDMGWYRQAPGKEREFVATIADGSITNYADSVKGRFTISRDNAKNTVYLQMNSLKPEDTAVYYCAVISRGYGVSLVVIYWGQGTQVTVSS

SEQ ID NO: 9273 - protein, 118 aa, Artificial Sequence
  Chemically Synthesized
QVQLQESGGGLVQAGGSLRLSCAASGNISPDAYMGWYRQAPGKEREFVASINYGSTTYYADSVKGRFTISRDNAKNTVYLQMNSLKPEDTAVYYCAAIYYRHAWFYYWGQGTQVTVSS

SEQ ID NO: 9274 - protein, 118 aa, Artificial Sequence
  Chemically Synthesized
QVQLQESGGGLVQAGGSLRLSCAASGYISTRGYMGWYRQAPGKERELVASIGSGTSTNYADSVKGRFTISRDNAKNTVYLQMNSLKPEDTAVYYCAAVYRDISWHGYWGQGTQVTVSS

SEQ ID NO: 9275 - protein, 118 aa, Artificial Sequence
  Chemically Synthesized
QVQLQESGGGLVQAGGSLRLSCAASGNISGLQVMGWYRQAPGKERELVAGINSGGITNYADSVKGRFTISRDNAKNTVYLQMNSLKPEDTAVYYCAAGGYYFTWYGYWGQGTQVTVSS

SEQ ID NO: 9276 - protein, 118 aa, Artificial Sequence
  Chemically Synthesized
QVQLQESGGGLVQAGGSLRLSCAASGNISAGRDMGWYRQAPGKEREFVASIAAGTNTYYADSVKGRFTISRDNAKNTVYLQMNSLKPEDTAVYYCAVNAAGVGAYKYWGQGTQVTVSS

SEQ ID NO: 9277 - protein, 122 aa, Artificial Sequence
  Chemically Synthesized
QVQLQESGGGLVQAGGSLRLSCAASGTISDFYGMGWYRQAPGKEREFVATITKGGTTNYADSVKGRFTISRDNAKNTVYLQMNSLKPEDTAVYYCAAVTNVKGIAGYYHGYWGQGTQVTVSS

SEQ ID NO: 9278 - protein, 114 aa, Artificial Sequence
  Chemically Synthesized
QVQLQESGGGLVQAGGSLRLSCAASGNISDHHVMGWYRQAPGKERELVAAITSGAITYYADSVKGRFTISRDNAKNTVYLQMNSLKPEDTAVYYCAAYYYHDYWGQGTQVTVSS

SEQ ID NO: 9279 - protein, 116 aa, Artificial Sequence
  Chemically Synthesized
QVQLQESGGGLVQAGGSLRLSCAASGSIFTHGVMGWYRQAPGKERELVAAITSGAITYYADSVKGRFTISRDNAKNTVYLQMNSLKPEDTAVYYCAYYDPILYDYWGQGTQVTVSS

SEQ ID NO: 9280 - protein, 114 aa, Artificial Sequence
  Chemically Synthesized
QVQLQESGGGLVQAGGSLRLSCAASGSIFTHGVMGWYRQAPGKEREFVAAINYGANTNYADSVKGRFTISRDNAKNTVYLQMNSLKPEDTAVYYCAAYYYPDYWGQGTQVTVSS

SEQ ID NO: 9281 - protein, 115 aa, Artificial Sequence
  Chemically Synthesized
QVQLQESGGGLVQAGGSLRLSCAASGSIFTHGVMGWYRQAPGKEREFVAAINYGANTNYADSVKGRFTISRDNAKNTVYLQMNSLKPEDTAVYYCAAYTGLLDYWGQGTQVTVSS

SEQ ID NO: 9282 - protein, 114 aa, Artificial Sequence
  Chemically Synthesized
QVQLQESGGGLVQAGGSLRLSCAASGSIFTHGVMGWYRQAPGKEREFVAAINYGANTNYADSVKGRFTISRDNAKNTVYLQMNSLKPEDTAVYYCADYYYHDYWGQGTQVTVSS

SEQ ID NO: 9283 - protein, 114 aa, Artificial Sequence
  Chemically Synthesized
QVQLQESGGGLVQAGGSLRLSCAASGNIFSQGIMGWYRQAPGKEREFVAAISYGTITYYADSVKGRFTISRDNAKNTVYLQMNSLKPEDTAVYYCAAYYYHDYWGQGTQVTVSS

SEQ ID NO: 9284 - protein, 114 aa, Artificial Sequence
  Chemically Synthesized
QVQLQESGGGLVQAGGSLRLSCAASGSIFTHGGMGWYRQAPGKEREFVAAINYGANTNYADSVKGRFTISRDNAKNTVYLQMNSLKPEDTAVYYCAAYYYHDYWGQGTQVTVSS

SEQ ID NO: 9285 - protein, 118 aa, Artificial Sequence
  Chemically Synthesized
QVQLQESGGGLVQAGGSLRLSCAASGNISPSRYMGWYRQAPGKEREFVASIDDGANTYYADSVKGRFTISRDNAKNTVYLQMNSLKPEDTAVYYCAAFYDFPVGHGYWGQGTQVTVSS

SEQ ID NO: 9286 - protein, 122 aa, Artificial Sequence
  Chemically Synthesized
QVQLQESGGGLVQAGGSLRLSCAASGSISRWNIMGWYRQAPGKERELVATIAFGGTTNYADSVKGRFTISRDNAKNTVYLQMNSLKPEDTAVYYCAVGGRRPTDETSYHPYWGQGTQVTVSS

SEQ ID NO: 9287 - protein, 118 aa, Artificial Sequence
  Chemically Synthesized
QVQLQESGGGLVQAGGSLRLSCAASGSISWTDIMGWYRQAPGKERELVAGIDGGGSTYYADSVKGRFTISRDNAKNTVYLQMNSLKPEDTAVYYCAVPPWQADLHDYWGQGTQVTVSS

SEQ ID NO: 9288 - protein, 118 aa, Artificial Sequence
  Chemically Synthesized
QVQLQESGGGLVQAGGSLRLSCAASGYISDGSAMGWYRQAPGKERELVAGIASGASTNYADSVKGRFTISRDNAKNTVYLQMNSLKPEDTAVYYCAVWLWTNAQHVYWGQGTQVTVSS

SEQ ID NO: 9289 - protein, 122 aa, Artificial Sequence
  Chemically Synthesized
QVQLQESGGGLVQAGGSLRLSCAASGTISNGITMGWYRQAPGKERELVATIDAGGSTNYADSVKGRFTISRDNAKNTVYLQMNSLKPEDTAVYYCAVDRLSKDGISYPFRYWGQGTQVTVSS

SEQ ID NO: 9290 - protein, 118 aa, Artificial Sequence
  Chemically Synthesized
QVQLQESGGGLVQAGGSLRLSCAASGTIFINTYMGWYRQAPGKERELVAAITWGSSTYYADSVKGRFTISRDNAKNTVYLQMNSLKPEDTAVYYCAVRGDYPSDLTYWGQGTQVTVSS

SEQ ID NO: 9291 - protein, 122 aa, Artificial Sequence
  Chemically Synthesized
QVQLQESGGGLVQAGGSLRLSCAASGSIFRAYSMGWYRQAPGKERELVAAISYGANTYYADSVKGRFTISRDNAKNTVYLQMNSLKPEDTAVYYCAVGYDYWVDSYAELQYWGQGTQVTVSS

SEQ ID NO: 9292 - protein, 117 aa, Artificial Sequence
  Chemically Synthesized
QVQLQESGGGLVQAGGSLRLSCAASGYIFGVIMGWYRQAPGKEREFVASIGPGSNTYYADSVKGRFTISRDNAKNTVYLQMNSLKPEDTAVYYCAAYYVVPSDHYYWGQGTQVTVSS

SEQ ID NO: 9293 - protein, 126 aa, Artificial Sequence
  Chemically Synthesized
QVQLQESGGGLVQAGGSLRLSCAASGNISIGPYMGWYRQAPGKEREFVATINVGATTNYADSVKGRFTISRDNAKNTVYLQMNSLKPEDTAVYYCAAYSAAYDATFQPYWYPLGYWGQGTQVTVSS

SEQ ID NO: 9294 - protein, 118 aa, Artificial Sequence
  Chemically Synthesized
QVQLQESGGGLVQAGGSLRLSCAASGYIFWVYWMGWYRQAPGKEREFVATISDGGTTNYADSVKGRFTISRDNAKNTVYLQMNSLKPEDTAVYYCAVELDTSAFHYYWGQGTQVTVSS

SEQ ID NO: 9295 - protein, 122 aa, Artificial Sequence
  Chemically Synthesized
QVQLQESGGGLVQAGGSLRLSCAASGSIFNVWSMGWYRQAPGKEREFVATISAGAITYYADSVKGRFTISRDNAKNTVYLQMNSLKPEDTAVYYCAAITYGGDNIIVGYWYWGQGTQVTVSS

SEQ ID NO: 9296 - protein, 121 aa, Artificial Sequence
  Chemically Synthesized
QVQLQESGGGLVQAGGSLRLSCAASGTISRSLMGWYRQAPGKEREFVASIDYGTITYYADSVKGRFTISRDNAKNTVYLQMNSLKPEDTAVYYCAANRPVGWGGGGRHTYWGQGTQVTVSS

SEQ ID NO: 9297 - protein, 122 aa, Artificial Sequence
  Chemically Synthesized
QVQLQESGGGLVQAGGSLRLSCAASGSISYVRSMGWYRQAPGKEREFVAGIDEGGNTNYADSVKGRFTISRDNAKNTVYLQMNSLKPEDTAVYYCAAQWDGTVGTWLVHSYWGQGTQVTVSS

SEQ ID NO: 9298 - protein, 118 aa, Artificial Sequence
  Chemically Synthesized
QVQLQESGGGLVQAGGSLRLSCAASGYISYYIYMGWYRQAPGKEREFVASIGAGSITNYADSVKGRFTISRDNAKNTVYLQMNSLKPEDTAVYYCAVATDHAYAYFYWGQGTQVTVSS

SEQ ID NO: 9299 - protein, 117 aa, Artificial Sequence
  Chemically Synthesized
QVQLQESGGGLVQAGGSLRLSCAASGYISVASTMGWYRQAPGKERELVATITYGASTYADSVKGRFTISRDNAKNTVYLQMNSLKPEDTAVYYCAADRYQYDDHGYWGQGTQVTVSS

SEQ ID NO: 9300 - protein, 122 aa, Artificial Sequence
  Chemically Synthesized
QVQLQESGGGLVQAGGSLRLSCAASGYISQDNSMGWYRQAPGKERELVAAISYGGITYYADSVKGRFTISRDNAKNTVYLQMNSLKPEDTAVYYCAVADDYYIGRDVPFNYWGQGTQVTVSS

SEQ ID NO: 9301 - protein, 118 aa, Artificial Sequence
  Chemically Synthesized
QVQLQESGGGLVQAGGSLRLSCAASGNISFVGWMGWYRQAPGKERELVAAISYGGNTYYADSVKGRFTISRDNAKNTVYLQMNSLKPEDTAVYYCAVYDKYAGYYRYWGQGTQVTVSS

SEQ ID NO: 9302 - protein, 115 aa, Artificial Sequence
  Chemically Synthesized
QVQLQESGGGLVQAGGSLRLSCAASGSISYYVAMGWYRQAPGKERELVAAGGTTYYADSVKGRFTISRDNAKNTVYLQMNSLKPEDTAVYYCAADARGHPDLYYWGQGTQVTVSS

SEQ ID NO: 9303 - protein, 117 aa, Artificial Sequence
  Chemically Synthesized
QVQLQESGGGLVQAGGSLRLSCAASGIFLTLNMGWYRQAPGKEREFVAAIGNGTITNYADSVKGRFTISRDNAKNTVYLQMNSLKPEDTAVYYCAADYYAVGDLSYWGQGTQVTVSS

SEQ ID NO: 9304 - protein, 122 aa, Artificial Sequence
  Chemically Synthesized
QVQLQESGGGLVQAGGSLRLSCAASGNIFTAYAMGWYRQAPGKEREFVATITYGSITYYADSVKGRFTISRDNAKNTVYLQMNSLKPEDTAVYYCAAYIKRPDDRAIYYDYWGQGTQVTVSS

SEQ ID NO: 9305 - protein, 117 aa, Artificial Sequence
  Chemically Synthesized
QVQLQESGGGLVQAGGSLRLSCAASGNISPYYVMGWYRQAPGKERELVAGIGAGTITYYADSVKGRFTISRDNAKNTVYLQMNSLKPEDTAVYYCAATVTSDGLDYWGQGTQVTVSS

SEQ ID NO: 9306 - protein, 122 aa, Artificial Sequence
  Chemically Synthesized
QVQLQESGGGLVQAGGSLRLSCAASGNIFSYAVMGWYRQAPGKEREFVAAIAWGGTTYYADSVKGRFTISRDNAKNTVYLQMNSLKPEDTAVYYCAVYIQDYTFLTWGYSYWGQGTQVTVSS

SEQ ID NO: 9307 - protein, 123 aa, Artificial Sequence
  Chemically Synthesized
QVQLQESGGGLVQAGGSLRLSCAASGSISGTDSMGWYRQAPGKEREFVASIDYGAITYYADSVKGRFTISRDNAKNTVYLQMNSLKPEDTAVYYCAVTTYWGYDVDKYALYYWGQGTQVTVSS

SEQ ID NO: 9308 - protein, 118 aa, Artificial Sequence
  Chemically Synthesized
QVQLQESGGGLVQAGGSLRLSCAASGYIFGREIMGWYRQAPGKEREFVAAISYGGNTYYADSVKGRFTISRDNAKNTVYLQMNSLKPEDTAVYYCAARYLIGDHLGYWGQGTQVTVSS

SEQ ID NO: 9309 - protein, 117 aa, Artificial Sequence
  Chemically Synthesized
QVQLQESGGGLVQAGGSLRLSCAASGSISDSFMGWYRQAPGKEREFVAGINDGSNTYYADSVKGRFTISRDNAKNTVYLQMNSLKPEDTAVYYCAAGDPGVVHHDYWGQGTQVTVSS

SEQ ID NO: 9310 - protein, 126 aa, Artificial Sequence
  Chemically Synthesized
QVQLQESGGGLVQAGGSLRLSCAASGSISQVWYMGWYRQAPGKEREFVAGISDGTTTYYADSVKGRFTISRDNAKNTVYLQMNSLKPEDTAVYYCAVGLLYNDGADSIVLGYYRYWGQGTQVTVSS

SEQ ID NO: 9311 - protein, 116 aa, Artificial Sequence
  Chemically Synthesized
QVQLQESGGGLVQAGGSLRLSCAASGTISYQAVMGWYRQAPGKERELVATINPGGSTNYADSVKGRFTISRDNAKNTVYLQMNSLKPEDTAVYYCAAGDSYVYLYWGQGTQVTVSS

SEQ ID NO: 9312 - protein, 118 aa, Artificial Sequence
  Chemically Synthesized
QVQLQESGGGLVQAGGSLRLSCAASGSISRYTTMGWYRQAPGKERELVASIAAGTTTYYADSVKGRFTISRDNAKNTVYLQMNSLKPEDTAVYYCAVTWNSLPTFGYWGQGTQVTVSS

SEQ ID NO: 9313 - protein, 122 aa, Artificial Sequence
  Chemically Synthesized
QVQLQESGGGLVQAGGSLRLSCAASGSISGDYTMGWYRQAPGKEREFVASIDRGTTTYYADSVKGRFTISRDNAKNTVYLQMNSLKPEDTAVYYCAADQDSAGGGYTDFGYWGQGTQVTVSS

SEQ ID NO: 9314 - protein, 122 aa, Artificial Sequence
  Chemically Synthesized
QVQLQESGGGLVQAGGSLRLSCAASGYIFGTYWMGWYRQAPGKEREFVASIDTGGNTNYADSVKGRFTISRDNAKNTVYLQMNSLKPEDTAVYYCAAGLGGERYRIYEYLYWGQGTQVTVSS

SEQ ID NO: 9315 - protein, 122 aa, Artificial Sequence
  Chemically Synthesized
QVQLQESGGGLVQAGGSLRLSCAASGTIFVRGYMGWYRQAPGKERELVAAIGDGGTTNYADSVKGRFTISRDNAKNTVYLQMNSLKPEDTAVYYCAAVDYYDPEIDDYHPYWGQGTQVTVSS

SEQ ID NO: 9316 - protein, 118 aa, Artificial Sequence
  Chemically Synthesized
QVQLQESGGGLVQAGGSLRLSCAASGYISSIGQMGWYRQAPGKERELVAAIDRGGNTNYADSVKGRFTISRDNAKNTVYLQMNSLKPEDTAVYYCAADVYGNSTHWYWGQGTQVTVSS

SEQ ID NO: 9317 - protein, 118 aa, Artificial Sequence
  Chemically Synthesized
QVQLQESGGGLVQAGGSLRLSCAASGTIFDRYSMGWYRQAPGKERELVAAISYGANTYYADSVKGRFTISRDNAKNTVYLQMNSLKPEDTAVYYCAASLWSWWYHSYWGQGTQVTVSS

SEQ ID NO: 9318 - protein, 122 aa, Artificial Sequence
  Chemically Synthesized
QVQLQESGGGLVQAGGSLRLSCAASGNISRTSTMGWYRQAPGKERELVAAIGVGSITNYADSVKGRFTISRDNAKNTVYLQMNSLKPEDTAVYYCAATTVVDYDRAGVHYYWGQGTQVTVSS

SEQ ID NO: 9319 - protein, 118 aa, Artificial Sequence
  Chemically Synthesized
QVQLQESGGGLVQAGGSLRLSCAASGNISSRGWMGWYRQAPGKERELVAGIAPGSITNYADSVKGRFTISRDNAKNTVYLQMNSLKPEDTAVYYCAANAADYSTYLYWGQGTQVTVSS

SEQ ID NO: 9320 - protein, 126 aa, Artificial Sequence
  Chemically Synthesized
QVQLQESGGGLVQAGGSLRLSCAASGYISDRQTMGWYRQAPGKEREFVASIGYGGSTYYADSVKGRFTISRDNAKNTVYLQMNSLKPEDTAVYYCAAFDDTYELYPGDRILWFAYWGQGTQVTVSS

SEQ ID NO: 9321 - protein, 122 aa, Artificial Sequence
  Chemically Synthesized
QVQLQESGGGLVQAGGSLRLSCAASGSISAYPTMGWYRQAPGKERELVASIAGGGSTYYADSVKGRFTISRDNAKNTVYLQMNSLKPEDTAVYYCAVDYRTYRHYGLWHYYWGQGTQVTVSS

SEQ ID NO: 9322 - protein, 121 aa, Artificial Sequence
  Chemically Synthesized
QVQLQESGGGLVQAGGSLRLSCAASGYISRGDMGWYRQAPGKEREFVATISLGGSTYYADSVKGRFTISRDNAKNTVYLQMNSLKPEDTAVYYCAAVIVSDGYSTSQYGYWGQGTQVTVSS

SEQ ID NO: 9323 - protein, 125 aa, Artificial Sequence
  Chemically Synthesized
QVQLQESGGGLVQAGGSLRLSCAASGSIFPGNKMGWYRQAPGKEREFVATITWGGNTNYADSVKGRFTISRDNAKNTVYLQMNSLKPEDTAVYYCAVLTDGYYYQYGKASIYLYWGQGTQVTVSS

SEQ ID NO: 9324 - protein, 122 aa, Artificial Sequence
  Chemically Synthesized
QVQLQESGGGLVQAGGSLRLSCAASGSISQTAYMGWYRQAPGKERELVATITLGTSTNYADSVKGRFTISRDNAKNTVYLQMNSLKPEDTAVYYCAVSEDTGFTPYGDLSYWGQGTQVTVSS

SEQ ID NO: 9325 - protein, 117 aa, Artificial Sequence
  Chemically Synthesized
QVQLQESGGGLVQAGGSLRLSCAASGNIFSAHWMGWYRQAPGKERELVAGIDIGGSTNYADSVKGRFTISRDNAKNTVYLQMNSLKPEDTAVYYCAAYDGARALTYWGQGTQVTVSS

SEQ ID NO: 9326 - protein, 126 aa, Artificial Sequence
  Chemically Synthesized
QVQLQESGGGLVQAGGSLRLSCAASGSIFGRRGMGWYRQAPGKERELVASIGDGTTTYYADSVKGRFTISRDNAKNTVYLQMNSLKPEDTAVYYCAVDYYVLHQGYFTGVASHLYWGQGTQVTVSS

SEQ ID NO: 9327 - protein, 122 aa, Artificial Sequence
  Chemically Synthesized
QVQLQESGGGLVQAGGSLRLSCAASGSISYFDYMGWYRQAPGKERELVASIGAGGTTYYADSVKGRFTISRDNAKNTVYLQMNSLKPEDTAVYYCAAYSYDVGTTYYILDYWGQGTQVTVSS

SEQ ID NO: 9328 - protein, 122 aa, Artificial Sequence
  Chemically Synthesized
QVQLQESGGGLVQAGGSLRLSCAASGNISADVWMGWYRQAPGKEREFVAGITTGGTTYYADSVKGRFTISRDNAKNTVYLQMNSLKPEDTAVYYCAVPYYGKIPDYYNFAYWGQGTQVTVSS

SEQ ID NO: 9329 - protein, 118 aa, Artificial Sequence
  Chemically Synthesized
QVQLQESGGGLVQAGGSLRLSCAASGTIFYWAGMGWYRQAPGKERELVATISRGGNTYYADSVKGRFTISRDNAKNTVYLQMNSLKPEDTAVYYCAARTDYYRTYRYWGQGTQVTVSS

SEQ ID NO: 9330 - protein, 112 aa, Artificial Sequence
  Chemically Synthesized
QVQLQESGGGLVQAGGSLRLSCAASGYISAGDSYMGWYRQAPGKERELVATQYADSVKGRFTISRDNAKNTVYLQMNSLKPEDTAVYYCAAGNVSRGRHDYWGQGTQVTVSS

SEQ ID NO: 9331 - protein, 118 aa, Artificial Sequence
  Chemically Synthesized
QVQLQESGGGLVQAGGSLRLSCAASGSIFVTSFMGWYRQAPGKEREFVAGISDGGSTYYADSVKGRFTISRDNAKNTVYLQMNSLKPEDTAVYYCAVTDRDGLGLGYWGQGTQVTVSS

SEQ ID NO: 9332 - protein, 118 aa, Artificial Sequence
  Chemically Synthesized
QVQLQESGGGLVQAGGSLRLSCAASGYIFGWAVMGWYRQAPGKEREFVAGIGQGGSTYYADSVKGRFTISRDNAKNTVYLQMNSLKPEDTAVYYCAAYLYRGYAFRYWGQGTQVTVSS

SEQ ID NO: 9333 - protein, 118 aa, Artificial Sequence
  Chemically Synthesized
QVQLQESGGGLVQAGGSLRLSCAASGSISQPYQMGWYRQAPGKERELVASIAYGTTTYYADSVKGRFTISRDNAKNTVYLQMNSLKPEDTAVYYCAATYDLQPDYTYWGQGTQVTVSS

SEQ ID NO: 9334 - protein, 120 aa, Artificial Sequence
  Chemically Synthesized
QVQLQESGGGLVQAGGSLRLSCAASGTISTGAVMGWYRQAPGKEREFVAAISIGGTTNYADSVKGRFTISRDNAKNTVYLQMNSLKPEDTAVYYCAAVVGDLYVLQHYYWGQGTQVTVSS

SEQ ID NO: 9335 - protein, 124 aa, Artificial Sequence
  Chemically Synthesized
QVQLQESGGGLVQAGGSLRLSCAASGSISYVLMGWYRQAPGKEREFVAAIADGAITYYADSVKGRFTISRDNAKNTVYLQMNSLKPEDTAVYYCAVISLTTTLTLTLTVTTMYWGQGTQVTVSS

SEQ ID NO: 9336 - protein, 119 aa, Artificial Sequence
  Chemically Synthesized
QVQLQESGGGLVQAGGSLRLSCAASGNISTTPAMGWYRQAPGKERELLPLLITVLLPYADSVKGRFTISRDNAKNTVYLQMNSLKPEDTAVYYCAAKGYGRDYPLDDYWGQGTQVTVSS

SEQ ID NO: 9337 - protein, 118 aa, Artificial Sequence
  Chemically Synthesized
QVQLQESGGGLVQAGGSLRLSCAASGSISRPFWMGWYRQAPGKEREFVATIDTGTSTNYADSVKGRFTISRDNAKNTVYLQMNSLKPEDTAVYYCAVDDRGYGWHIYWGQGTQVTVSS

SEQ ID NO: 9338 - protein, 119 aa, Artificial Sequence
  Chemically Synthesized
QVQLQESGGGLVQAGGSLRLSCAASGNISRYVKMGWYRQAPGKERELVATIGPGGITNYADSVKGRFTISRDNAKNTVYLQMNSLKPEDTAVYYCAVVKGDIADYNTYWGQGTQVTVSS

SEQ ID NO: 9339 - protein, 121 aa, Artificial Sequence
  Chemically Synthesized
QVQLQESGGGLVQAGGSLRLSCAASGTIFDYDTMGWYRQAPGKEREFVAAITVGATTYYADSVKGRFTISRDNAKNTVYLQMNSLKPEDTAVYYCAADVVTTNVTVTVIYWGQGTQVTVSS

SEQ ID NO: 9340 - protein, 122 aa, Artificial Sequence
  Chemically Synthesized
QVQLQESGGGLVQAGGSLRLSCAASGNIFLDLPMGWYRQAPGKERELVATITLGANTYYADSVKGRFTISRDNAKNTVYLQMNSLKPEDTAVYYCAADYLYADRWQRPYWYWGQGTQVTVSS

SEQ ID NO: 9341 - protein, 121 aa, Artificial Sequence
  Chemically Synthesized
QVQLQESGGGLVQAGGSLRLSCAASGSILTLRMGWYRQAPGKEREFVAGISDGSITNYADSVKGRFTISRDNAKNTVYLQMNSLKPEDTAVYYCAASAIYVLFVYPSHLYWGQGTQVTVSS

SEQ ID NO: 9342 - protein, 117 aa, Artificial Sequence
  Chemically Synthesized
QVQLQESGGGLVQAGGSLRLSCAASGYIFYDYMGWYRQAPGKERELVAAISRGGSTYYADSVKGRFTISRDNAKNTVYLQMNSLKPEDTAVYYCAVNAGVHRVHLYWGQGTQVTVSS

SEQ ID NO: 9343 - protein, 117 aa, Artificial Sequence
  Chemically Synthesized
QVQLQESGGGLVQAGGSLRLSCAASGNISVNEYMGWYRQAPGKERELVAAITLGTSTYYADSVKGRFTISRDNAKNTVYLQMNSLKPEDTAVYYCAADSADIDTLYWGQGTQVTVSS

SEQ ID NO: 9344 - protein, 118 aa, Artificial Sequence
  Chemically Synthesized
QVQLQESGGGLVQAGGSLRLSCAASGSIFDYALMGWYRQAPGKEREFVAAIDIGATTNYADSVKGRFTISRDNAKNTVYLQMNSLKPEDTAVYYCAVSVLTLPRLPYWGQGTQVTVSS

SEQ ID NO: 9345 - protein, 117 aa, Artificial Sequence
  Chemically Synthesized
QVQLQESGGGLVQAGGSLRLSCAASGSISPALYMGWYRQAPGKEREFVAGIAYGGSTYADSVKGRFTISRDNAKNTVYLQMNSLKPEDTAVYYCAVLAADGAGLSYWGQGTQVTVSS

SEQ ID NO: 9346 - protein, 126 aa, Artificial Sequence
  Chemically Synthesized
QVQLQESGGGLVQAGGSLRLSCAASGTISYGFSMGWYRQAPGKERELVAGIADGAITNYADSVKGRFTISRDNAKNTVYLQMNSLKPEDTAVYYCAAVVPTYNYYRFGDGGLLLYWGQGTQVTVSS

SEQ ID NO: 9347 - protein, 122 aa, Artificial Sequence
  Chemically Synthesized
QVQLQESGGGLVQAGGSLRLSCAASGNIFQSEVMGWYRQAPGKERELVAGITYGGNTNYADSVKGRFTISRDNAKNTVYLQMNSLKPEDTAVYYCAVWRDAYRGYITDYYYWGQGTQVTVSS

SEQ ID NO: 9348 - protein, 118 aa, Artificial Sequence
  Chemically Synthesized
QVQLQESGGGLVQAGGSLRLSCAASGTISGNFKMGWYRQAPGKEREFVAGIDRGTNTYYADSVKGRFTISRDNAKNTVYLQMNSLKPEDTAVYYCAAEPGSHYAFDYWGQGTQVTVSS

SEQ ID NO: 9349 - protein, 118 aa, Artificial Sequence
  Chemically Synthesized
QVQLQESGGGLVQAGGSLRLSCAASGSISGQENMGWYRQAPGKEREFVATIDPGTSTYYADSVKGRFTISRDNAKNTVYLQMNSLKPEDTAVYYCAAPYYVYGIHPYWGQGTQVTVSS

SEQ ID NO: 9350 - protein, 122 aa, Artificial Sequence
  Chemically Synthesized
QVQLQESGGGLVQAGGSLRLSCAASGNIFYITIMGWYRQAPGKEREFVAGIDTGTTTYYADSVKGRFTISRDNAKNTVYLQMNSLKPEDTAVYYCAVTRRYYSKYNRKFLYWGQGTQVTVSS

SEQ ID NO: 9351 - protein, 126 aa, Artificial Sequence
  Chemically Synthesized
QVQLQESGGGLVQAGGSLRLSCAASGSIFYYATMGWYRQAPGKEREFVASIDTGSNTYYADSVKGRFTISRDNAKNTVYLQMNSLKPEDTAVYYCAVGYYSRYSTGGYTRYGLSYWGQGTQVTVSS

SEQ ID NO: 9352 - protein, 126 aa, Artificial Sequence
  Chemically Synthesized
QVQLQESGGGLVQAGGSLRLSCAASGTIFGPAIMGWYRQAPGKERELVASITDGGNTYYADSVKGRFTISRDNAKNTVYLQMNSLKPEDTAVYYCAVVPYSRWYQSQVAGGVFWYWGQGTQVTVSS

SEQ ID NO: 9353 - protein, 118 aa, Artificial Sequence
  Chemically Synthesized
QVQLQESGGGLVQAGGSLRLSCAASGTISYYYYMGWYRQAPGKERELVASITYGTNTNYADSVKGRFTISRDNAKNTVYLQMNSLKPEDTAVYYCAVYRRGRWAYYYWGQGTQVTVSS

SEQ ID NO: 9354 - protein, 121 aa, Artificial Sequence
  Chemically Synthesized
QVQLQESGGGLVQAGGSLRLSCAASGSISTDDYMGWYRQAPGKERELVAAINDGGNTNYADSVKGRFTISRDNAKNTVYLQMNSLKPEDTAVYYCAATWLSARGSIETFYWGQGTQVTVSS

SEQ ID NO: 9355 - protein, 126 aa, Artificial Sequence
  Chemically Synthesized
QVQLQESGGGLVQAGGSLRLSCAASGTISKPDWMGWYRQAPGKEREFVATINYGGNTYYADSVKGRFTISRDNAKNTVYLQMNSLKPEDTAVYYCAVAAPVPSYPVRPFPWVYYYWGQGTQVTVSS

SEQ ID NO: 9356 - protein, 118 aa, Artificial Sequence
  Chemically Synthesized
QVQLQESGGGLVQAGGSLRLSCAASGSIFRDLTMGWYRQAPGKEREFVASINGGGNTYYADSVKGRFTISRDNAKNTVYLQMNSLKPEDTAVYYCAVKGITDFGLAYWGQGTQVTVSS

SEQ ID NO: 9357 - protein, 126 aa, Artificial Sequence
  Chemically Synthesized
QVQLQESGGGLVQAGGSLRLSCAASGNISRYYVMGWYRQAPGKERELVATIANGASTNYADSVKGRFTISRDNAKNTVYLQMNSLKPEDTAVYYCAVLYEARNVVDRYYTLNLKYWGQGTQVTVSS

SEQ ID NO: 9358 - protein, 123 aa, Artificial Sequence
  Chemically Synthesized
QVQLQESGGGLVQAGGSLRLSCAASGTISSPEFMGWYRQAPGKERELLPLLLTVLLPYADSVKGRFTISRDNAKNTVYLQMNSLKPEDTAVYYCAAPGYPYEVESYIQPHAYWGQGTQVTVSS

SEQ ID NO: 9359 - protein, 122 aa, Artificial Sequence
  Chemically Synthesized
QVQLQESGGGLVQAGGSLRLSCAASGSISYIKFMGWYRQAPGKEREFVATINRGGNTNYADSVKGRFTISRDNAKNTVYLQMNSLKPEDTAVYYCAAYHIRAYYTYRGHGYWGQGTQVTVSS

SEQ ID NO: 9360 - protein, 126 aa, Artificial Sequence
  Chemically Synthesized
QVQLQESGGGLVQAGGSLRLSCAASGNIFRVGRMGWYRQAPGKERELVAAIDRGGSTYYADSVKGRFTISRDNAKNTVYLQMNSLKPEDTAVYYCAAVWRSGFTGYHRGPYPYTYWGQGTQVTVSS

SEQ ID NO: 9361 - protein, 118 aa, Artificial Sequence
  Chemically Synthesized
QVQLQESGGGLVQAGGSLRLSCAASGTIFVYFVMGWYRQAPGKEREFVATINDGGITYYADSVKGRFTISRDNAKNTVYLQMNSLKPEDTAVYYCAVWDYSPLWLGYWGQGTQVTVSS

SEQ ID NO: 9362 - protein, 122 aa, Artificial Sequence
  Chemically Synthesized
QVQLQESGGGLVQAGGSLRLSCAASGNIFRFWSMGWYRQAPGKERELVATISYGSNTNYADSVKGRFTISRDNAKNTVYLQMNSLKPEDTAVYYCAADAIGLLVRFYSFSYWGQGTQVTVSS

SEQ ID NO: 9363 - protein, 122 aa, Artificial Sequence
  Chemically Synthesized
QVQLQESGGGLVQAGGSLRLSCAASGYIFALLIMGWYRQAPGKERELVASIAGGTSTYYADSVKGRFTISRDNAKNTVYLQMNSLKPEDTAVYYCAAAYPDQYGYDNELPYWGQGTQVTVSS

SEQ ID NO: 9364 - protein, 125 aa, Artificial Sequence
  Chemically Synthesized
QVQLQESGGGLVQAGGSLRLSCAASGTISQRGQMGWYRQAPGKERELVAGIAYGGITYYADSVKGRFTISRDNAKNTVYLQMNSLKPEDTAVYYCAASGVRTVVGTVTLSLSLYWGQGTQVTVSS

SEQ ID NO: 9365 - protein, 118 aa, Artificial Sequence
  Chemically Synthesized
QVQLQESGGGLVQAGGSLRLSCAASGNISDLFFMGWYRQAPGKERELVASISYGTITYYADSVKGRFTISRDNAKNTVYLQMNSLKPEDTAVYYCAVYASPFQLFGYWGQGTQVTVSS

SEQ ID NO: 9366 - protein, 118 aa, Artificial Sequence
  Chemically Synthesized
QVQLQESGGGLVQAGGSLRLSCAASGTISTVAIMGWYRQAPGKEREFVAGISSGSNTYYADSVKGRFTISRDNAKNTVYLQMNSLKPEDTAVYYCAVPVQGGIEHYYWGQGTQVTVSS

SEQ ID NO: 9367 - protein, 118 aa, Artificial Sequence
  Chemically Synthesized
QVQLQESGGGLVQAGGSLRLSCAASGTIFAEGVMGWYRQAPGKEREFVAAIAHGANTNYADSVKGRFTISRDNAKNTVYLQMNSLKPEDTAVYYCAVYPSQGYYHQYWGQGTQVTVSS

SEQ ID NO: 9368 - protein, 122 aa, Artificial Sequence
  Chemically Synthesized
QVQLQESGGGLVQAGGSLRLSCAASGYISGGSWMGWYRQAPGKERELVATITPGSNTYYADSVKGRFTISRDNAKNTVYLQMNSLKPEDTAVYYCAVYDDGRGRDDARYAYWGQGTQVTVSS

SEQ ID NO: 9369 - protein, 118 aa, Artificial Sequence
  Chemically Synthesized
QVQLQESGGGLVQAGGSLRLSCAASGTISRSDDMGWYRQAPGKEREFVAGIDRGSITNYADSVKGRFTISRDNAKNTVYLQMNSLKPEDTAVYYCAAGRDGYDDFGYWGQGTQVTVSS

SEQ ID NO: 9370 - protein, 118 aa, Artificial Sequence
  Chemically Synthesized
QVQLQESGGGLVQAGGSLRLSCAASGSIFDRYSMGWYRQAPGKEREFVAAINYGSNTNYADSVKGRFTISRDNAKNTVYLQMNSLKPEDTAVYYCAVWSDVRGGLLYWGQGTQVTVSS

SEQ ID NO: 9371 - protein, 117 aa, Artificial Sequence
  Chemically Synthesized
QVQLQESGGGLVQAGGSLRLSCAASGSIFSRYEMGWYRQAPGKEREFVATIAAGTIPYADSVKGRFTISRDNAKNTVYLQMNSLKPEDTAVYYCAVIIVYQYLFWYWGQGTQVTVSS

SEQ ID NO: 9372 - protein, 119 aa, Artificial Sequence
  Chemically Synthesized
QVQLQESGGGLVQAGGSLRLSCAASGTISNSFVMGWYRQAPGKERELVAAISYGGITNYADSVKGRFTISRDNAKNTVYLQMNSLKPEDTAVYYCAAYRTLWVQYLFYWGQGTQVTVSS

SEQ ID NO: 9373 - protein, 118 aa, Artificial Sequence
  Chemically Synthesized
QVQLQESGGGLVQAGGSLRLSCAASGTISTSHYMGWYRQAPGKERELVASINGGSTTYYADSVKGRFTISRDNAKNTVYLQMNSLKPEDTAVYYCAVIADEAPTHYYWGQGTQVTVSS

SEQ ID NO: 9374 - protein, 118 aa, Artificial Sequence
  Chemically Synthesized
QVQLQESGGGLVQAGGSLRLSCAASGSIFGQAVMGWYRQAPGKERELVATIAYGGSTNYADSVKGRFTISRDNAKNTVYLQMNSLKPEDTAVYYCAVVYLQYHVHSYWGQGTQVTVSS

SEQ ID NO: 9375 - protein, 118 aa, Artificial Sequence
  Chemically Synthesized
QVQLQESGGGLVQAGGSLRLSCAASGTISPYTYMGWYRQAPGKERELVAGIGGGASTYYADSVKGRFTISRDNAKNTVYLQMNSLKPEDTAVYYCAVVRDAYTIHPYWGQGTQVTVSS

SEQ ID NO: 9376 - protein, 122 aa, Artificial Sequence
  Chemically Synthesized
QVQLQESGGGLVQAGGSLRLSCAASGYISDWYIMGWYRQAPGKEREFVAGINDGSTTNYADSVKGRFTISRDNAKNTVYLQMNSLKPEDTAVYYCAVPRVTVGYDYYAHWYWGQGTQVTVSS

SEQ ID NO: 9377 - protein, 118 aa, Artificial Sequence
  Chemically Synthesized
QVQLQESGGGLVQAGGSLRLSCAASGYIFGAAYMGWYRQAPGKERELVAGIGWGTTTNYADSVKGRFTISRDNAKNTVYLQMNSLKPEDTAVYYCAVDAYYDPLFTYWGQGTQVTVSS

SEQ ID NO: 9378 - protein, 117 aa, Artificial Sequence
  Chemically Synthesized
QVQLQESGGGLVQAGGSLRLSCAASGNIFLDGSMGWYRQAPGKEREFVATIALGLIPYADSVKGRFTISRDNAKNTVYLQMNSLKPEDTAVYYCAAYPIGKSAFVYWGQGTQVTVSS

SEQ ID NO: 9379 - protein, 125 aa, Artificial Sequence
  Chemically Synthesized
QVQLQESGGGLVQAGGSLRLSCAASGTISEDAGMGWYRQAPGKEREFVAAITTGGITNYADSVKGRFTISRDNAKNTVYLQMNSLKPEDTAVYYCAVYDPLADLLHRCSAWSLYWGQGTQVTVSS

SEQ ID NO: 9380 - protein, 118 aa, Artificial Sequence
  Chemically Synthesized
QVQLQESGGGLVQAGGSLRLSCAASGTISWNYYMGWYRQAPGKEREFVASISYGATTYYADSVKGRFTISRDNAKNTVYLQMNSLKPEDTAVYYCAAIQTYDATHYYWGQGTQVTVSS

SEQ ID NO: 9381 - protein, 117 aa, Artificial Sequence
  Chemically Synthesized
QVQLQESGGGLVQAGGSLRLSCAASGTIFYDANMGWYRQAPGKERELVASITAGANTYYADSVKGRFTISRDNAKNTVYLQMNSLKPEDTAVYYCAANYTLHQPYYWGQGTQVTVSS

SEQ ID NO: 9382 - protein, 125 aa, Artificial Sequence
  Chemically Synthesized
QVQLQESGGGLVQAGGSLRLSCAASGNISERDAMGWYRQAPGKEREFVAAIGGWYYLYADSVKGRFTISRDNAKNTVYLQMNSLKPEDTAVYYCAAWRWVYGPRYQSYGIQLGYWGQGTQVTVSS

SEQ ID NO: 9383 - protein, 118 aa, Artificial Sequence
  Chemically Synthesized
QVQLQESGGGLVQAGGSLRLSCAASGTISDTTEMGWYRQAPGKEREFVASISAGTTTYYADSVKGRFTISRDNAKNTVYLQMNSLKPEDTAVYYCAADRHYSVPLYYWGQGTQVTVSS

SEQ ID NO: 9384 - protein, 122 aa, Artificial Sequence
  Chemically Synthesized
QVQLQESGGGLVQAGGSLRLSCAASGSISVYTIMGWYRQAPGKEREFVATINTGATTNYADSVKGRFTISRDNAKNTVYLQMNSLKPEDTAVYYCAVYDDVNYHRATLHHYWGQGTQVTVSS

SEQ ID NO: 9385 - protein, 126 aa, Artificial Sequence
  Chemically Synthesized
QVQLQESGGGLVQAGGSLRLSCAASGYIFSREGMGWYRQAPGKEREFVAGISKGGNTYYADSVKGRFTISRDNAKNTVYLQMNSLKPEDTAVYYCAAYEPYWDEYQKVSYFDHHYWGQGTQVTVSS

SEQ ID NO: 9386 - protein, 116 aa, Artificial Sequence
  Chemically Synthesized
QVQLQESGGGLVQAGGSLRLSCAASGSISDDTDMGWYRQAPGKERELVAGIAYGANTYYADSVKGRFTISRDNAKNTVYLQMNSLKPEDTAVYYCAAIVYDYHDYWGQGTQVTVSS

SEQ ID NO: 9387 - protein, 118 aa, Artificial Sequence
  Chemically Synthesized
QVQLQESGGGLVQAGGSLRLSCAASGYIFWYTIMGWYRQAPGKERELVAAIAYGGTTYYADSVKGRFTISRDNAKNTVYLQMNSLKPEDTAVYYCAVVWRYAHLLKYWGQGTQVTVSS

SEQ ID NO: 9388 - protein, 122 aa, Artificial Sequence
  Chemically Synthesized
QVQLQESGGGLVQAGGSLRLSCAASGSIFPKYFMGWYRQAPGKERELVASINWGTSTYYADSVKGRFTISRDNAKNTVYLQMNSLKPEDTAVYYCAAHGKGTVWPRYVLGYWGQGTQVTVSS

SEQ ID NO: 9389 - protein, 121 aa, Artificial Sequence
  Chemically Synthesized
QVQLQESGGGLVQAGGSLRLSCAASGTIFSTTMGWYRQAPGKEREFVASIGPGASTYYADSVKGRFTISRDNAKNTVYLQMNSLKPEDTAVYYCAANSGTTVEGTRAHDYWGQGTQVTVSS

SEQ ID NO: 9390 - protein, 118 aa, Artificial Sequence
  Chemically Synthesized
QVQLQESGGGLVQAGGSLRLSCAASGNISDVSKMGWYRQAPGKEREFVASIGVGANTNYADSVKGRFTISRDNAKNTVYLQMNSLKPEDTAVYYCAAPKTAITSLHYWGQGTQVTVSS

SEQ ID NO: 9391 - protein, 121 aa, Artificial Sequence
  Chemically Synthesized
QVQLQESGGGLVQAGGSLRLSCAASGYIFPYAWMGWYRQAPGKERELVATIAWGSNTYYADSVKGRFTISRDNAKNTVYLQMNSLKPEDTAVYYCAVQGPYQSVLRTLMYWGQGTQVTVSS

SEQ ID NO: 9392 - protein, 118 aa, Artificial Sequence
  Chemically Synthesized
QVQLQESGGGLVQAGGSLRLSCAASGNIFSYLTMGWYRQAPGKERELVAAIDAGAITNYADSVKGRFTISRDNAKNTVYLQMNSLKPEDTAVYYCAVGVNWYLSHGYWGQGTQVTVSS

SEQ ID NO: 9393 - protein, 122 aa, Artificial Sequence
  Chemically Synthesized
QVQLQESGGGLVQAGGSLRLSCAASGTISIYVYMGWYRQAPGKERELVAGIAPGANTYYADSVKGRFTISRDNAKNTVYLQMNSLKPEDTAVYYCAAIYIVDAYPYQLYWYWGQGTQVTVSS

SEQ ID NO: 9394 - protein, 122 aa, Artificial Sequence
  Chemically Synthesized
QVQLQESGGGLVQAGGSLRLSCAASGSISGTVYMGWYRQAPGKERELVATINVGASTNYADSVKGRFTISRDNAKNTVYLQMNSLKPEDTAVYYCAVYFYIYPGSEPYLRYWGQGTQVTVSS

SEQ ID NO: 9395 - protein, 118 aa, Artificial Sequence
  Chemically Synthesized
QVQLQESGGGLVQAGGSLRLSCAASGYISRQYPMGWYRQAPGKEREFVAGINYGGTTYYADSVKGRFTISRDNAKNTVYLQMNSLKPEDTAVYYCAAGQAAYRNHYYWGQGTQVTVSS

SEQ ID NO: 9396 - protein, 124 aa, Artificial Sequence
  Chemically Synthesized
QVQLQESGGGLVQAGGSLRLSCAASGSIFPYDWMGWYRQAPGKERELVAAIDNGASTNYADSVKGRFTISRDNAKNTVYLQMNSLKPEDTAVYYCAVRHYGGGPRYTSYGFYYWGQGTQVTVSS

SEQ ID NO: 9397 - protein, 107 aa, Artificial Sequence
  Chemically Synthesized
QVQLQESGGGLVQAGGSLRLSCAASGYILLTMGWYRQAPGKERELVASITRGTTTYYADSVKGRFTISRDNAKNTVYLQMNSLKPEDTAVYYCAVYWGQGTQVTVSS

SEQ ID NO: 9398 - protein, 118 aa, Artificial Sequence
  Chemically Synthesized
QVQLQESGGGLVQAGGSLRLSCAASGTIFSPLWMGWYRQAPGKERELVATIALGTSTYYADSVKGRFTISRDNAKNTVYLQMNSLKPEDTAVYYCAVRGIPSVFYPYWGQGTQVTVSS

SEQ ID NO: 9399 - protein, 118 aa, Artificial Sequence
  Chemically Synthesized
QVQLQESGGGLVQAGGSLRLSCAASGTISYYVSMGWYRQAPGKERELVATIDPGSITNYADSVKGRFTISRDNAKNTVYLQMNSLKPEDTAVYYCAVVLSRYGVHDYWGQGTQVTVSS

SEQ ID NO: 9400 - protein, 117 aa, Artificial Sequence
  Chemically Synthesized
QVQLQESGGGLVQAGGSLRLSCAASGYISYIAGMGWYRQAPGKERELVAGITVGITNYADSVKGRFTISRDNAKNTVYLQMNSLKPEDTAVYYCAVAPRDITSFYYWGQGTQVTVSS

SEQ ID NO: 9401 - protein, 122 aa, Artificial Sequence
  Chemically Synthesized
QVQLQESGGGLVQAGGSLRLSCAASGYISRSIKMGWYRQAPGKEREFVATIAYGTTTYYADSVKGRFTISRDNAKNTVYLQMNSLKPEDTAVYYCAVRGSRYERPRGLHYYWGQGTQVTVSS

SEQ ID NO: 9402 - protein, 122 aa, Artificial Sequence
  Chemically Synthesized
QVQLQESGGGLVQAGGSLRLSCAASGYIFLVVGMGWYRQAPGKERELVAGINGGGSTYYADSVKGRFTISRDNAKNTVYLQMNSLKPEDTAVYYCAAAVLSYITNRIPLFYWGQGTQVTVSS

SEQ ID NO: 9403 - protein, 118 aa, Artificial Sequence
  Chemically Synthesized
QVQLQESGGGLVQAGGSLRLSCAASGSISLPYSMGWYRQAPGKERELVATIGSGANTNYADSVKGRFTISRDNAKNTVYLQMNSLKPEDTAVYYCAASADYSRLYPYWGQGTQVTVSS

SEQ ID NO: 9404 - protein, 125 aa, Artificial Sequence
  Chemically Synthesized
QVQLQESGGGLVQAGGSLRLSCAASGYIFVLVMGWYRQAPGKERELVATIAGGGSTNYADSVKGRFTISRDNAKNTVYLQMNSLKPEDTAVYYCAVVSYQNDQDVEDWPGGYGYWGQGTQVTVSS

SEQ ID NO: 9405 - protein, 118 aa, Artificial Sequence
  Chemically Synthesized
QVQLQESGGGLVQAGGSLRLSCAASGNISRRAGMGWYRQAPGKEREFVASINYGSSTYYADSVKGRFTISRDNAKNTVYLQMNSLKPEDTAVYYCAVYYRRRYYLTYWGQGTQVTVSS

SEQ ID NO: 9406 - protein, 118 aa, Artificial Sequence
  Chemically Synthesized
QVQLQESGGGLVQAGGSLRLSCAASGYIFSDYVMGWYRQAPGKEREFVAAIATGTSTYYADSVKGRFTISRDNAKNTVYLQMNSLKPEDTAVYYCAVFGPSSGYFAYWGQGTQVTVSS

SEQ ID NO: 9407 - protein, 125 aa, Artificial Sequence
  Chemically Synthesized
QVQLQESGGGLVQAGGSLRLSCAASGYISASDGMGWYRQAPGKEREFVATIDAGGITNYADSVKGRFTISRDNAKNTVYLQMNSLKPEDTAVYYCAVPTTWVWLPRGVDADVYYWGQGTQVTVSS

SEQ ID NO: 9408 - protein, 126 aa, Artificial Sequence
  Chemically Synthesized
QVQLQESGGGLVQAGGSLRLSCAASGTISAYVLMGWYRQAPGKERELVASISAGSTTNYADSVKGRFTISRDNAKNTVYLQMNSLKPEDTAVYYCAANDYYTLFEPPRGSNHHDYWGQGTQVTVSS

SEQ ID NO: 9409 - protein, 116 aa, Artificial Sequence
  Chemically Synthesized
QVQLQESGGGLVQAGGSLRLSCAASGNIFRSRYMGWYRQAPGKERELVAGIDVGGTTYYADSVKGRFTISRDNAKNTVYLQMNSLKPEDTAVYYCAVRSGYPHRYWGQGTQVTVSS

SEQ ID NO: 9410 - protein, 113 aa, Artificial Sequence
  Chemically Synthesized
QVQLQESGGGLVQAGGSLRLSCAASGYISFTPPMGWYRQAPGKEREFVAAINSGTSTYYADSVKGRFTISRDNAKNTVYLQMNSLKPEDTAVYYCAVYIYDYWGQGTQVTVSS

SEQ ID NO: 9411 - protein, 122 aa, Artificial Sequence
  Chemically Synthesized
QVQLQESGGGLVQAGGSLRLSCAASGYIFRPYDMGWYRQAPGKERELVATIGYGTITNYADSVKGRFTISRDNAKNTVYLQMNSLKPEDTAVYYCAAWYYGVDLTLYRLAYWGQGTQVTVSS

SEQ ID NO: 9412 - protein, 111 aa, Artificial Sequence
  Chemically Synthesized
QVQLQESGGGLVQAGGSLRLSCAASGYIFIIFYMGWYRQAPGKEREFVAGISDGTSTNYADSVKGRFTISRDNAKNTVYLQMNSLKPEDTAVYYCASYRYWGQGTQVTVSS

SEQ ID NO: 9413 - protein, 122 aa, Artificial Sequence
  Chemically Synthesized
QVQLQESGGGLVQAGGSLRLSCAASGNISWWRGMGWYRQAPGKERELVATIAYGTITYYADSVKGRFTISRDNAKNTVYLQMNSLKPEDTAVYYCAVVLDKRPRDDTHHIYWGQGTQVTVSS

SEQ ID NO: 9414 - protein, 118 aa, Artificial Sequence
  Chemically Synthesized
QVQLQESGGGLVQAGGSLRLSCAASGTIFYPYIMGWYRQAPGKERELVAGIAYGGNTNYADSVKGRFTISRDNAKNTVYLQMNSLKPEDTAVYYCAAYYVTDPYFAYWGQGTQVTVSS

SEQ ID NO: 9415 - protein, 118 aa, Artificial Sequence
  Chemically Synthesized
QVQLQESGGGLVQAGGSLRLSCAASGTISYVPWMGWYRQAPGKERELVASIDTGGITYYADSVKGRFTISRDNAKNTVYLQMNSLKPEDTAVYYCAADYLFNRFYGYWGQGTQVTVSS

SEQ ID NO: 9416 - protein, 126 aa, Artificial Sequence
  Chemically Synthesized
QVQLQESGGGLVQAGGSLRLSCAASGYIFHWDDMGWYRQAPGKERELVATIASGSITYYADSVKGRFTISRDNAKNTVYLQMNSLKPEDTAVYYCAVYYTYYVYRLPFEDIPFVYWGQGTQVTVSS

SEQ ID NO: 9417 - protein, 122 aa, Artificial Sequence
  Chemically Synthesized
QVQLQESGGGLVQAGGSLRLSCAASGNISVDPDMGWYRQAPGKERELVAAINRGTTTYYADSVKGRFTISRDNAKNTVYLQMNSLKPEDTAVYYCAARNLDSDSITWDLSYWGQGTQVTVSS

SEQ ID NO: 9418 - protein, 118 aa, Artificial Sequence
  Chemically Synthesized
QVQLQESGGGLVQAGGSLRLSCAASGSISIYDYMGWYRQAPGKEREFVATIGVGGNTYYADSVKGRFTISRDNAKNTVYLQMNSLKPEDTAVYYCAVYDRGLSLLYYWGQGTQVTVSS

SEQ ID NO: 9419 - protein, 122 aa, Artificial Sequence
  Chemically Synthesized
QVQLQESGGGLVQAGGSLRLSCAASGSISTVYAMGWYRQAPGKEREFVAAINRGTSTNYADSVKGRFTISRDNAKNTVYLQMNSLKPEDTAVYYCAAVAGGVRDYDVHYGYWGQGTQVTVSS

SEQ ID NO: 9420 - protein, 122 aa, Artificial Sequence
  Chemically Synthesized
QVQLQESGGGLVQAGGSLRLSCAASGNISLVTSMGWYRQAPGKERELVAAIAGGATTNYADSVKGRFTISRDNAKNTVYLQMNSLKPEDTAVYYCAANGHNHPVREGYHGYWGQGTQVTVSS

SEQ ID NO: 9421 - protein, 122 aa, Artificial Sequence
  Chemically Synthesized
QVQLQESGGGLVQAGGSLRLSCAASGYIFNFLQMGWYRQAPGKEREFVASIASGASTNYADSVKGRFTISRDNAKNTVYLQMNSLKPEDTAVYYCAAIGGPLLPQNASLDYWGQGTQVTVSS

SEQ ID NO: 9422 - protein, 118 aa, Artificial Sequence
  Chemically Synthesized
QVQLQESGGGLVQAGGSLRLSCAASGTIFDTRSMGWYRQAPGKERELVAAISDGANTNYADSVKGRFTISRDNAKNTVYLQMNSLKPEDTAVYYCAAAYYAFYIYYYWGQGTQVTVSS

SEQ ID NO: 9423 - protein, 126 aa, Artificial Sequence
  Chemically Synthesized
QVQLQESGGGLVQAGGSLRLSCAASGTIFAYGPMGWYRQAPGKEREFVASITYGGSTYYADSVKGRFTISRDNAKNTVYLQMNSLKPEDTAVYYCAAQYYVRYWYSASWAEAHNYWGQGTQVTVSS

SEQ ID NO: 9424 - protein, 118 aa, Artificial Sequence
  Chemically Synthesized
QVQLQESGGGLVQAGGSLRLSCAASGTISTLLGMGWYRQAPGKERELVASINRGGSTNYADSVKGRFTISRDNAKNTVYLQMNSLKPEDTAVYYCAAIDDDDVILAYWGQGTQVTVSS

SEQ ID NO: 9425 - protein, 118 aa, Artificial Sequence
  Chemically Synthesized
QVQLQESGGGLVQAGGSLRLSCAASGNISVWEPMGWYRQAPGKEREFVATISRGGITYYADSVKGRFTISRDNAKNTVYLQMNSLKPEDTAVYYCAAYYAYYTLLDYWGQGTQVTVSS

SEQ ID NO: 9426 - protein, 122 aa, Artificial Sequence
  Chemically Synthesized
QVQLQESGGGLVQAGGSLRLSCAASGSISARLAMGWYRQAPGKERELVATISYGGNTNYADSVKGRFTISRDNAKNTVYLQMNSLKPEDTAVYYCAVRNDDREDPDPYYLYWGQGTQVTVSS

SEQ ID NO: 9427 - protein, 109 aa, Artificial Sequence
  Chemically Synthesized
QVQLQESGGGLVQAGGSLRLSCAASGSISGSSLMGWYRQAPGKEREFVASIGNGGSTYYADSVKGRFTISRDNAKNTVYLQMNSLKPEDTAVYYCAAYWGQGTQVTVSS

SEQ ID NO: 9428 - protein, 117 aa, Artificial Sequence
  Chemically Synthesized
QVQLQESGGGLVQAGGSLRLSCAASGYIFISDDMGWYRQAPGKEREFVAAINYGGSTYYADSVKGRFTISRDNAKNTVYLQMNSLKPEDTAVYYCAAHYDYTQHSYWGQGTQVTVSS

SEQ ID NO: 9429 - protein, 122 aa, Artificial Sequence
  Chemically Synthesized
QVQLQESGGGLVQAGGSLRLSCAASGNISYWEWMGWYRQAPGKERELVASIDSGGNTNYADSVKGRFTISRDNAKNTVYLQMNSLKPEDTAVYYCAANWRDIYTRYDILDYWGQGTQVTVSS

SEQ ID NO: 9430 - protein, 118 aa, Artificial Sequence
  Chemically Synthesized
QVQLQESGGGLVQAGGSLRLSCAASGNISLPWTMGWYRQAPGKEREFVAGISRGGTTYYADSVKGRFTISRDNAKNTVYLQMNSLKPEDTAVYYCAVETNGYSWFGYWGQGTQVTVSS

SEQ ID NO: 9431 - protein, 121 aa, Artificial Sequence
  Chemically Synthesized
QVQLQESGGGLVQAGGSLRLSCAASGYISQYTTMGWYRQAPGKERELVAAIGGGSITYYADSVKGRFTISRDNAKNTVYLQMNSLKPEDTAVYYCAVYDEGTTGGSLLDYWGQGTQVTVSS

SEQ ID NO: 9432 - protein, 118 aa, Artificial Sequence
  Chemically Synthesized
QVQLQESGGGLVQAGGSLRLSCAASGYIFAPHYMGWYRQAPGKEREFVASIASGGNTYYADSVKGRFTISRDNAKNTVYLQMNSLKPEDTAVYYCAVYLGVYYAFRYWGQGTQVTVSS

SEQ ID NO: 9433 - protein, 118 aa, Artificial Sequence
  Chemically Synthesized
QVQLQESGGGLVQAGGSLRLSCAASGTISYRLYMGWYRQAPGKERELVAAIAGGGNTYYADSVKGRFTISRDNAKNTVYLQMNSLKPEDTAVYYCAADSPIYSDYQYWGQGTQVTVSS

SEQ ID NO: 9434 - protein, 115 aa, Artificial Sequence
  Chemically Synthesized
QVQLQESGGGLVQAGGSLRLSCAASGSIFDRGYMGWYRQAPGKEREFVATIGTGSNTYYADSVKGRFTISRDNAKNTVYLQMNSLKPEDTAVYYCALLGSLTIYWGQGTQVTVSS

SEQ ID NO: 9435 - protein, 122 aa, Artificial Sequence
  Chemically Synthesized
QVQLQESGGGLVQAGGSLRLSCAASGYIFDVTDMGWYRQAPGKEREFVAGIGYGYYYQYADSVKGRFTISRDNAKNTVYLQMNSLKPEDTAVYYCAAYDTQTDDYENYHLYWGQGTQVTVSS

SEQ ID NO: 9436 - protein, 120 aa, Artificial Sequence
  Chemically Synthesized
QVQLQESGGGLVQAGGSLRLSCAASGTISISTMGWYRQAPGKEREFVAAINSGGSTYYADSVKGRFTISRDNAKNTVYLQMNSLKPEDTAVYYCAVYGNSGVLSVTVLYWGQGTQVTVSS

SEQ ID NO: 9437 - protein, 115 aa, Artificial Sequence
  Chemically Synthesized
QVQLQESGGGLVQAGGSLRLSCAASGSIFSVYSMGWYRQAPGKERELVATIGPGSTTNYADSVKGRFTISRDNAKNTVYLQMNSLKPEDTAVYYCATLGRTLAYWGQGTQVTVSS

SEQ ID NO: 9438 - protein, 125 aa, Artificial Sequence
  Chemically Synthesized
QVQLQESGGGLVQAGGSLRLSCAASGYISRAYWMGWYRQAPGKEREFVAAIDSGSSTYYADSVKGRFTISRDNAKNTVYLQMNSLKPEDTAVYYCAVYVYTYVSQYIRWSYLGYWGQGTQVTVSS

SEQ ID NO: 9439 - protein, 122 aa, Artificial Sequence
  Chemically Synthesized
QVQLQESGGGLVQAGGSLRLSCAASGYISRSRHMGWYRQAPGKERELVASIGNGTSTNYADSVKGRFTISRDNAKNTVYLQMNSLKPEDTAVYYCAAYRRYSRTDYAALTYWGQGTQVTVSS

SEQ ID NO: 9440 - protein, 117 aa, Artificial Sequence
  Chemically Synthesized
QVQLQESGGGLVQAGGSLRLSCAASGSIFHRVMMGWYRQAPGKERELVAAITLGGSTYADSVKGRFTISRDNAKNTVYLQMNSLKPEDTAVYYCAVVAVLRGSFVYWGQGTQVTVSS

SEQ ID NO: 9441 - protein, 120 aa, Artificial Sequence
  Chemically Synthesized
QVQLQESGGGLVQAGGSLRLSCAASGYISYTWPMGWYRQAPGKEREFVAVLIRVVIPYADSVKGRFTISRDNAKNTVYLQMNSLKPEDTAVYYCAAGWYYRDYGYYLTYWGQGTQVTVSS

SEQ ID NO: 9442 - protein, 118 aa, Artificial Sequence
  Chemically Synthesized
QVQLQESGGGLVQAGGSLRLSCAASGTISDLKDMGWYRQAPGKERELVAGIGYGATTYYADSVKGRFTISRDNAKNTVYLQMNSLKPEDTAVYYCAVEREGLRYFYYWGQGTQVTVSS

SEQ ID NO: 9443 - protein, 123 aa, Artificial Sequence
  Chemically Synthesized
QVQLQESGGGLVQAGGSLRLSCAASGTISSLYYMGWYRQAPGKERELVASITKGSITNYADSVKGRFTISRDNAKNTVYLQMNSLKPEDTAVYYCAVVITTNGLVLRSSSSYWGQGTQVTVSS

SEQ ID NO: 9444 - protein, 118 aa, Artificial Sequence
  Chemically Synthesized
QVQLQESGGGLVQAGGSLRLSCAASGNIFGKAPMGWYRQAPGKEREFVASITFGTTTYYADSVKGRFTISRDNAKNTVYLQMNSLKPEDTAVYYCAVYDDSGGPLFYWGQGTQVTVSS

SEQ ID NO: 9445 - protein, 126 aa, Artificial Sequence
  Chemically Synthesized
QVQLQESGGGLVQAGGSLRLSCAASGYISGRITMGWYRQAPGKERELVAAIGYGGTTYYADSVKGRFTISRDNAKNTVYLQMNSLKPEDTAVYYCAADDVPDSVSRQLDLQDYGYWGQGTQVTVSS

SEQ ID NO: 9446 - protein, 120 aa, Artificial Sequence
  Chemically Synthesized
QVQLQESGGGLVQAGGSLRLSCAASGYISYDYIMGWYRQAPGKERELVAGIGYGATTNYADSVKGRFTISRDNAKNTVYLQMNSLKPEDTAVYYCAASRYYINGLWDLYWGQGTQVTVSS

SEQ ID NO: 9447 - protein, 118 aa, Artificial Sequence
  Chemically Synthesized
QVQLQESGGGLVQAGGSLRLSCAASGYIFVTRWMGWYRQAPGKEREFVASISPGGITNYADSVKGRFTISRDNAKNTVYLQMNSLKPEDTAVYYCAAIISIYQGFTYWGQGTQVTVSS

SEQ ID NO: 9448 - protein, 126 aa, Artificial Sequence
  Chemically Synthesized
QVQLQESGGGLVQAGGSLRLSCAASGTIFARRYMGWYRQAPGKERELVAGIGDGTSTYYADSVKGRFTISRDNAKNTVYLQMNSLKPEDTAVYYCAARYVFQSRLWNERWAWLPYWGQGTQVTVSS

SEQ ID NO: 9449 - protein, 118 aa, Artificial Sequence
  Chemically Synthesized
QVQLQESGGGLVQAGGSLRLSCAASGSIFTDYFMGWYRQAPGKERELVAAISRGGITNYADSVKGRFTISRDNAKNTVYLQMNSLKPEDTAVYYCAAPDTWYDYHSYWGQGTQVTVSS

SEQ ID NO: 9450 - protein, 119 aa, Artificial Sequence
  Chemically Synthesized
QVQLQESGGGLVQAGGSLRLSCAASGYIFRVVYMGWYRQAPGKEREFVAAIGIGSTTYYADSVKGRFTISRDNAKNTVYLQMNSLKPEDTAVYYCAAARNGRTARYRYWGQGTQVTVSS

SEQ ID NO: 9451 - protein, 126 aa, Artificial Sequence
  Chemically Synthesized
QVQLQESGGGLVQAGGSLRLSCAASGYIFGDGYMGWYRQAPGKERELVATITLGGITNYADSVKGRFTISRDNAKNTVYLQMNSLKPEDTAVYYCAVQDLATGGYGAFFRRFFNYWGQGTQVTVSS

SEQ ID NO: 9452 - protein, 126 aa, Artificial Sequence
  Chemically Synthesized
QVQLQESGGGLVQAGGSLRLSCAASGYISGPPNMGWYRQAPGKERELVATIDYGTTTNYADSVKGRFTISRDNAKNTVYLQMNSLKPEDTAVYYCAANVDLDQGGYYFPGYAFYYWGQGTQVTVSS

SEQ ID NO: 9453 - protein, 121 aa, Artificial Sequence
  Chemically Synthesized
QVQLQESGGGLVQAGGSLRLSCAASGNIFRGTYMGWYRQAPGKEREFVASIAGGSNTNYADSVKGRFTISRDNAKNTVYLQMNSLKPEDTAVYYCAVRYASLSTVTLGLYWGQGTQVTVSS

SEQ ID NO: 9454 - protein, 118 aa, Artificial Sequence
  Chemically Synthesized
QVQLQESGGGLVQAGGSLRLSCAASGYISHYSAMGWYRQAPGKEREFVAAIATGTITNYADSVKGRFTISRDNAKNTVYLQMNSLKPEDTAVYYCAAANSIAFDFQYWGQGTQVTVSS

SEQ ID NO: 9455 - protein, 126 aa, Artificial Sequence
  Chemically Synthesized
QVQLQESGGGLVQAGGSLRLSCAASGNISDQYDMGWYRQAPGKERELVAGITVGGTTNYADSVKGRFTISRDNAKNTVYLQMNSLKPEDTAVYYCAAYYPVNDQRSQFAWLDYDYWGQGTQVTVSS

SEQ ID NO: 9456 - protein, 114 aa, Artificial Sequence
  Chemically Synthesized
QVQLQESGGGLVQAGGSLRLSCAASGTISEQSMGWYRQAPGKEREFVALWCVLPYADSVKGRFTISRDNAKNTVYLQMNSLKPEDTAVYYCAAYFYYPEHFYYWGQGTQVTVSS

SEQ ID NO: 9457 - protein, 122 aa, Artificial Sequence
  Chemically Synthesized
QVQLQESGGGLVQAGGSLRLSCAASGTISGGSAMGWYRQAPGKEREFVAAIASGATTNYADSVKGRFTISRDNAKNTVYLQMNSLKPEDTAVYYCAVLQATDYGFDIDHDYWGQGTQVTVSS

SEQ ID NO: 9458 - protein, 122 aa, Artificial Sequence
  Chemically Synthesized
QVQLQESGGGLVQAGGSLRLSCAASGYISNYASMGWYRQAPGKERELVASIGAGSSTNYADSVKGRFTISRDNAKNTVYLQMNSLKPEDTAVYYCAARYPFYYPNSDDLNYWGQGTQVTVSS

SEQ ID NO: 9459 - protein, 127 aa, Artificial Sequence
  Chemically Synthesized
QVQLQESGGGLVQAGGSLRLSCAASGYISYPSGMGWYRQAPGKERELVATIAGGTSTNYADSVKGRFTISRDNAKNTVYLQMNSLKPEDTAVYYCAVDRSAYVGSRAGDEWYYFDYWGQGTQVTVSS

SEQ ID NO: 9460 - protein, 121 aa, Artificial Sequence
  Chemically Synthesized
QVQLQESGGGLVQAGGSLRLSCAASGYIFGTSAMGWYRQAPGKERELVATITAGGNPYADSVKGRFTISRDNAKNTVYLQMNSLKPEDTAVYYCAAPDGPEGNGARVHDYWGQGTQVTVSS

SEQ ID NO: 9461 - protein, 117 aa, Artificial Sequence
  Chemically Synthesized
QVQLQESGGGLVQAGGSLRLSCAASGNIFPTYDMGWYRQAPGKERELVAGIAVGTSTYYADSVKGRFTISRDNAKNTVYLQMNSLKPEDTAVYYCAASLGGLSLLYWGQGTQVTVSS

SEQ ID NO: 9462 - protein, 126 aa, Artificial Sequence
  Chemically Synthesized
QVQLQESGGGLVQAGGSLRLSCAASGTISDRIYMGWYRQAPGKEREFVASITYGTTTYYADSVKGRFTISRDNAKNTVYLQMNSLKPEDTAVYYCAVDTQYSSYRRGFGYYTYLYWGQGTQVTVSS

SEQ ID NO: 9463 - protein, 117 aa, Artificial Sequence
  Chemically Synthesized
QVQLQESGGGLVQAGGSLRLSCAASGTIFRDYVMGWYRQAPGKEREFVASITYGAITYADSVKGRFTISRDNAKNTVYLQMNSLKPEDTAVYYCAVSDRYTTALDYWGQGTQVTVSS

SEQ ID NO: 9464 - protein, 126 aa, Artificial Sequence
  Chemically Synthesized
QVQLQESGGGLVQAGGSLRLSCAASGTISAAVSMGWYRQAPGKEREFVAGIDSGSSTNYADSVKGRFTISRDNAKNTVYLQMNSLKPEDTAVYYCAVNGAYERYRRGPPWYAHIYWGQGTQVTVSS

SEQ ID NO: 9465 - protein, 118 aa, Artificial Sequence
  Chemically Synthesized
QVQLQESGGGLVQAGGSLRLSCAASGTISAFVVMGWYRQAPGKERELVAAITWGSITYYADSVKGRFTISRDNAKNTVYLQMNSLKPEDTAVYYCAVYKNDTDGLVYWGQGTQVTVSS

SEQ ID NO: 9466 - protein, 116 aa, Artificial Sequence
  Chemically Synthesized
QVQLQESGGGLVQAGGSLRLSCAASGNIFGEVVMGWYRQAPGKEREFVATINDGSTTNYADSVKGRFTISRDNAKNTVYLQMNSLKPEDTAVYYCAADVGWSFAYWGQGTQVTVSS

SEQ ID NO: 9467 - protein, 117 aa, Artificial Sequence
  Chemically Synthesized
QVQLQESGGGLVQAGGSLRLSCAASGYIFDSYMGWYRQAPGKEREFVATIADGSTTNYADSVKGRFTISRDNAKNTVYLQMNSLKPEDTAVYYCAAYTIPTNYLEYWGQGTQVTVSS

SEQ ID NO: 9468 - protein, 118 aa, Artificial Sequence
  Chemically Synthesized
QVQLQESGGGLVQAGGSLRLSCAASGYISLLFYMGWYRQAPGKERELVATISEGASTYYADSVKGRFTISRDNAKNTVYLQMNSLKPEDTAVYYCAAYDLYLSRFPYWGQGTQVTVSS

SEQ ID NO: 9469 - protein, 118 aa, Artificial Sequence
  Chemically Synthesized
QVQLQESGGGLVQAGGSLRLSCAASGNIFWRYYMGWYRQAPGKERELVAGINDGSITNYADSVKGRFTISRDNAKNTVYLQMNSLKPEDTAVYYCAADFITSLRHDYWGQGTQVTVSS

SEQ ID NO: 9470 - protein, 116 aa, Artificial Sequence
  Chemically Synthesized
QVQLQESGGGLVQAGGSLRLSCAASGYISKPYLMGWYRQAPGKERELVAAITGGTSTYYADSVKGRFTISRDNAKNTVYLQMNSLKPEDTAVYYCAADLISSYYYWGQGTQVTVSS

SEQ ID NO: 9471 - protein, 126 aa, Artificial Sequence
  Chemically Synthesized
QVQLQESGGGLVQAGGSLRLSCAASGTIFFFYLMGWYRQAPGKERELVAGISWGSSTYYADSVKGRFTISRDNAKNTVYLQMNSLKPEDTAVYYCAVYVGKHYSYYSSYIQGYSYWGQGTQVTVSS

SEQ ID NO: 9472 - protein, 122 aa, Artificial Sequence
  Chemically Synthesized
QVQLQESGGGLVQAGGSLRLSCAASGTISYSTDMGWYRQAPGKEREFVATIAAGGSTYYADSVKGRFTISRDNAKNTVYLQMNSLKPEDTAVYYCAVVYYGGYYDGARHDYWGQGTQVTVSS

SEQ ID NO: 9473 - protein, 125 aa, Artificial Sequence
  Chemically Synthesized
QVQLQESGGGLVQAGGSLRLSCAASGTISFYGQMGWYRQAPGKERELVAGIGSGGSTNYADSVKGRFTISRDNAKNTVYLQMNSLKPEDTAVYYCAVWDYDDYLWDDSVRYSLYWGQGTQVTVSS

SEQ ID NO: 9474 - protein, 124 aa, Artificial Sequence
  Chemically Synthesized
QVQLQESGGGLVQAGGSLRLSCAASGNISHGRVMGWYRQAPGKEREFVASIAGGSTNYADSVKGRFTISRDNAKNTVYLQMNSLKPEDTAVYYCAAPIEDGLSGTVTTLTSMYWGQGTQVTVSS

SEQ ID NO: 9475 - protein, 118 aa, Artificial Sequence
  Chemically Synthesized
QVQLQESGGGLVQAGGSLRLSCAASGTISDYSYMGWYRQAPGKERELVATISGGTTTNYADSVKGRFTISRDNAKNTVYLQMNSLKPEDTAVYYCAVHASGGAYLVYWGQGTQVTVSS

SEQ ID NO: 9476 - protein, 122 aa, Artificial Sequence
  Chemically Synthesized
QVQLQESGGGLVQAGGSLRLSCAASGNIFIVDRMGWYRQAPGKEREFVAAIATGSITNYADSVKGRFTISRDNAKNTVYLQMNSLKPEDTAVYYCAVISGARHSVDYYYLYWGQGTQVTVSS

SEQ ID NO: 9477 - protein, 122 aa, Artificial Sequence
  Chemically Synthesized
QVQLQESGGGLVQAGGSLRLSCAASGTISSTYDMGWYRQAPGKERELVAAITAGTTTYYADSVKGRFTISRDNAKNTVYLQMNSLKPEDTAVYYCAVARPVLDSLGSRHVYWGQGTQVTVSS

SEQ ID NO: 9478 - protein, 114 aa, Artificial Sequence
  Chemically Synthesized
QVQLQESGGGLVQAGGSLRLSCAASGTISWHSYMGWYRQAPGKERELVATITRGTTNYADSVKGRFTISRDNAKNTVYLQMNSLKPEDTAVYYCAAGEGDHDYWGQGTQVTVSS

SEQ ID NO: 9479 - protein, 121 aa, Artificial Sequence
  Chemically Synthesized
QVQLQESGGGLVQAGGSLRLSCAASGYISDAYYMGWYRQAPGKEREFVAGISVGAITYYADSVKGRFTISRDNAKNTVYLQMNSLKPEDTAVYYCAVGGSGNRIFSHDFYWGQGTQVTVSS

SEQ ID NO: 9480 - protein, 122 aa, Artificial Sequence
  Chemically Synthesized
QVQLQESGGGLVQAGGSLRLSCAASGNISDSVIMGWYRQAPGKERELVATIATGGNTYYADSVKGRFTISRDNAKNTVYLQMNSLKPEDTAVYYCAAEYTRDLSPVAGHWYWGQGTQVTVSS

SEQ ID NO: 9481 - protein, 122 aa, Artificial Sequence
  Chemically Synthesized
QVQLQESGGGLVQAGGSLRLSCAASGNIFQYVYMGWYRQAPGKERELVAGINYGSSTNYADSVKGRFTISRDNAKNTVYLQMNSLKPEDTAVYYCAASAVDYRNFRFFYGYWGQGTQVTVSS

SEQ ID NO: 9482 - protein, 126 aa, Artificial Sequence
  Chemically Synthesized
QVQLQESGGGLVQAGGSLRLSCAASGYISTRTPMGWYRQAPGKERELVAAISRGATTNYADSVKGRFTISRDNAKNTVYLQMNSLKPEDTAVYYCAAYPYYYTDRPAHSLWNHVYWGQGTQVTVSS

SEQ ID NO: 9483 - protein, 126 aa, Artificial Sequence
  Chemically Synthesized
QVQLQESGGGLVQAGGSLRLSCAASGNIFDEYTMGWYRQAPGKERELVAAIDRGSNTYYADSVKGRFTISRDNAKNTVYLQMNSLKPEDTAVYYCAAYVYWSVLWPWSRYRQYRYWGQGTQVTVSS

SEQ ID NO: 9484 - protein, 117 aa, Artificial Sequence
  Chemically Synthesized
QVQLQESGGGLVQAGGSLRLSCAASGYISYVDTMGWYRQAPGKEREFVAAINGGSSTNYADSVKGRFTISRDNAKNTVYLQMNSLKPEDTAVYYCAAGGEYSTSMYWGQGTQVTVSS

SEQ ID NO: 9485 - protein, 122 aa, Artificial Sequence
  Chemically Synthesized
QVQLQESGGGLVQAGGSLRLSCAASGYISPYSVMGWYRQAPGKEREFVATINVGSITNYADSVKGRFTISRDNAKNTVYLQMNSLKPEDTAVYYCAADVIPPVTYRDPFVYWGQGTQVTVSS

SEQ ID NO: 9486 - protein, 113 aa, Artificial Sequence
  Chemically Synthesized
QVQLQESGGGLVQAGGSLRLSCAASGSISSADVMGWYRQAPGKEREFVAGIAYGATTNYADSVKGRFTISRDNAKNTVYLQMNSLKPEDTAVYYCAAIPHAYWGQGTQVTVSS

SEQ ID NO: 9487 - protein, 118 aa, Artificial Sequence
  Chemically Synthesized
QVQLQESGGGLVQAGGSLRLSCAASGNIFRTRDMGWYRQAPGKERELVASIDPGTTTNYADSVKGRFTISRDNAKNTVYLQMNSLKPEDTAVYYCAAYDYSSTYYQYWGQGTQVTVSS

SEQ ID NO: 9488 - protein, 117 aa, Artificial Sequence
  Chemically Synthesized
QVQLQESGGGLVQAGGSLRLSCAASGTISYDVMGWYRQAPGKEREFVAGIGHGSNTYYADSVKGRFTISRDNAKNTVYLQMNSLKPEDTAVYYCAVGDPPEGVLRYWGQGTQVTVSS

SEQ ID NO: 9489 - protein, 126 aa, Artificial Sequence
  Chemically Synthesized
QVQLQESGGGLVQAGGSLRLSCAASGSISRYIAMGWYRQAPGKERELVASIGQGATTNYADSVKGRFTISRDNAKNTVYLQMNSLKPEDTAVYYCAAYWLVYTGSVFRESDAFWYWGQGTQVTVSS

SEQ ID NO: 9490 - protein, 122 aa, Artificial Sequence
  Chemically Synthesized
QVQLQESGGGLVQAGGSLRLSCAASGNIFGDYSMGWYRQAPGKEREFVAAILLPYADSVKGRFTISRDNAKNTVYLQMNSLKPEDTAVYYCAARIPQDYYARYAVDRPHPYWGQGTQVTVSS

SEQ ID NO: 9491 - protein, 118 aa, Artificial Sequence
  Chemically Synthesized
QVQLQESGGGLVQAGGSLRLSCAASGNISRLYFMGWYRQAPGKERELVASISFGSTTNYADSVKGRFTISRDNAKNTVYLQMNSLKPEDTAVYYCAVYVGPYDGLEYWGQGTQVTVSS

SEQ ID NO: 9492 - protein, 126 aa, Artificial Sequence
  Chemically Synthesized
QVQLQESGGGLVQAGGSLRLSCAASGSIFRVKIMGWYRQAPGKEREFVASIDSGATTYYADSVKGRFTISRDNAKNTVYLQMNSLKPEDTAVYYCAAGNLDYWYTPLDHPSLLGYWGQGTQVTVSS

SEQ ID NO: 9493 - protein, 117 aa, Artificial Sequence
  Chemically Synthesized
QVQLQESGGGLVQAGGSLRLSCAASGNIFAPWYMGWYRQAPGKEREFVATIILVVVPYADSVKGRFTISRDNAKNTVYLQMNSLKPEDTAVYYCAVYYPAFTSFRYWGQGTQVTVSS

SEQ ID NO: 9494 - protein, 112 aa, Artificial Sequence
  Chemically Synthesized
QVQLQESGGGLVQAGGSLRLSCAASGSISTYYGMGWYRQAPGKEREFVAGISVGSNTNYADSVKGRFTISRDNAKNTVYLQMNSLKPEDTAVYYCAAYHTYWGQGTQVTVSS

SEQ ID NO: 9495 - protein, 118 aa, Artificial Sequence
  Chemically Synthesized
QVQLQESGGGLVQAGGSLRLSCAASGTISGSPLMGWYRQAPGKERELVASIAVGSSTYYADSVKGRFTISRDNAKNTVYLQMNSLKPEDTAVYYCAVGNYNYGELIYWGQGTQVTVSS

SEQ ID NO: 9496 - protein, 118 aa, Artificial Sequence
  Chemically Synthesized
QVQLQESGGGLVQAGGSLRLSCAASGTIFSANDMGWYRQAPGKERELVATIAYGTSTYYADSVKGRFTISRDNAKNTVYLQMNSLKPEDTAVYYCAAPRNTYYVHYYWGQGTQVTVSS

SEQ ID NO: 9497 - protein, 118 aa, Artificial Sequence
  Chemically Synthesized
QVQLQESGGGLVQAGGSLRLSCAASGNISETYTMGWYRQAPGKEREFVATITSGTITNYADSVKGRFTISRDNAKNTVYLQMNSLKPEDTAVYYCAVVTALIQIFLYWGQGTQVTVSS

SEQ ID NO: 9498 - protein, 126 aa, Artificial Sequence
  Chemically Synthesized
QVQLQESGGGLVQAGGSLRLSCAASGTISGGSFMGWYRQAPGKERELVASIDGGGITYYADSVKGRFTISRDNAKNTVYLQMNSLKPEDTAVYYCAVFQPWYLRAIPYVTGYLEYWGQGTQVTVSS

SEQ ID NO: 9499 - protein, 122 aa, Artificial Sequence
  Chemically Synthesized
QVQLQESGGGLVQAGGSLRLSCAASGTISWGDYMGWYRQAPGKEREFVAGIDRGAITYYADSVKGRFTISRDNAKNTVYLQMNSLKPEDTAVYYCAVTHDADYYRDTDHDYWGQGTQVTVSS

SEQ ID NO: 9500 - protein, 117 aa, Artificial Sequence
  Chemically Synthesized
QVQLQESGGGLVQAGGSLRLSCAASGNISSGPMGWYRQAPGKERELVATIAYGTNTNYADSVKGRFTISRDNAKNTVYLQMNSLKPEDTAVYYCAATYLTQWNHRYWGQGTQVTVSS

SEQ ID NO: 9501 - protein, 126 aa, Artificial Sequence
  Chemically Synthesized
QVQLQESGGGLVQAGGSLRLSCAASGSISYVHPMGWYRQAPGKERELVAAITYGGTTNYADSVKGRFTISRDNAKNTVYLQMNSLKPEDTAVYYCAAIWLIDYRRYYDWYWYYEYWGQGTQVTVSS

SEQ ID NO: 9502 - protein, 118 aa, Artificial Sequence
  Chemically Synthesized
QVQLQESGGGLVQAGGSLRLSCAASGTIFGDYTMGWYRQAPGKERELVATIASGGITNYADSVKGRFTISRDNAKNTVYLQMNSLKPEDTAVYYCAAVGSAHRPLGYWGQGTQVTVSS

SEQ ID NO: 9503 - protein, 118 aa, Artificial Sequence
  Chemically Synthesized
QVQLQESGGGLVQAGGSLRLSCAASGNISVTNDMGWYRQAPGKEREFVAAINRGGNTNYADSVKGRFTISRDNAKNTVYLQMNSLKPEDTAVYYCAVAYSYDRSHIYWGQGTQVTVSS

SEQ ID NO: 9504 - protein, 121 aa, Artificial Sequence
  Chemically Synthesized
QVQLQESGGGLVQAGGSLRLSCAASGSISSTTMGWYRQAPGKEREFVASISAGGNTNYADSVKGRFTISRDNAKNTVYLQMNSLKPEDTAVYYCAVAYRLQYQQVQSHYYWGQGTQVTVSS

SEQ ID NO: 9505 - protein, 122 aa, Artificial Sequence
  Chemically Synthesized
QVQLQESGGGLVQAGGSLRLSCAASGNIFFGYYMGWYRQAPGKEREFVAGIDRGGSTNYADSVKGRFTISRDNAKNTVYLQMNSLKPEDTAVYYCAVKRREYYVPWRTHGYWGQGTQVTVSS

SEQ ID NO: 9506 - protein, 118 aa, Artificial Sequence
  Chemically Synthesized
QVQLQESGGGLVQAGGSLRLSCAASGTIFDIASMGWYRQAPGKERELVAGIALGGTTNYADSVKGRFTISRDNAKNTVYLQMNSLKPEDTAVYYCAASYTTQYRYDYWGQGTQVTVSS

SEQ ID NO: 9507 - protein, 122 aa, Artificial Sequence
  Chemically Synthesized
QVQLQESGGGLVQAGGSLRLSCAASGSISWPWEMGWYRQAPGKEREFVAGINYGGITNYADSVKGRFTISRDNAKNTVYLQMNSLKPEDTAVYYCAVDTQYGNYREQEYNYWGQGTQVTVSS

SEQ ID NO: 9508 - protein, 116 aa, Artificial Sequence
  Chemically Synthesized
QVQLQESGGGLVQAGGSLRLSCAASGNISLYKMGWYRQAPGKERELVATIANGGITYYADSVKGRFTISRDNAKNTVYLQMNSLKPEDTAVYYCAAPGQYYDYRYWGQGTQVTVSS

SEQ ID NO: 9509 - protein, 118 aa, Artificial Sequence
  Chemically Synthesized
QVQLQESGGGLVQAGGSLRLSCAASGNISDQATMGWYRQAPGKEREFVATIAAGTTTYYADSVKGRFTISRDNAKNTVYLQMNSLKPEDTAVYYCAAPRDYYHSLDYWGQGTQVTVSS

SEQ ID NO: 9510 - protein, 117 aa, Artificial Sequence
  Chemically Synthesized
QVQLQESGGGLVQAGGSLRLSCAASGSISYYYYMGWYRQAPGKERELVAGITGGTSTYYADSVKGRFTISRDNAKNTVYLQMNSLKPEDTAVYYCAVFLRVVRYRYWGQGTQVTVSS

SEQ ID NO: 9511 - protein, 122 aa, Artificial Sequence
  Chemically Synthesized
QVQLQESGGGLVQAGGSLRLSCAASGNISHINGMGWYRQAPGKERELVAGIGSGTTTYYADSVKGRFTISRDNAKNTVYLQMNSLKPEDTAVYYCAVRWAVPGTVVQTHTYWGQGTQVTVSS

SEQ ID NO: 9512 - protein, 118 aa, Artificial Sequence
  Chemically Synthesized
QVQLQESGGGLVQAGGSLRLSCAASGYISYSYYMGWYRQAPGKEREFVASITWGATTNYADSVKGRFTISRDNAKNTVYLQMNSLKPEDTAVYYCAVRHEDEYVLSYWGQGTQVTVSS

SEQ ID NO: 9513 - protein, 122 aa, Artificial Sequence
  Chemically Synthesized
QVQLQESGGGLVQAGGSLRLSCAASGSIFDDYYMGWYRQAPGKERELVAAIGRGGTTNYADSVKGRFTISRDNAKNTVYLQMNSLKPEDTAVYYCAVTRQSARRGNDVHHYWGQGTQVTVSS

SEQ ID NO: 9514 - protein, 118 aa, Artificial Sequence
  Chemically Synthesized
QVQLQESGGGLVQAGGSLRLSCAASGTISRASYMGWYRQAPGKERELVATITEGGITYYADSVKGRFTISRDNAKNTVYLQMNSLKPEDTAVYYCAVVDVTDHTHLYWGQGTQVTVSS

SEQ ID NO: 9515 - protein, 121 aa, Artificial Sequence
  Chemically Synthesized
QVQLQESGGGLVQAGGSLRLSCAASGTISVLYMGWYRQAPGKEREFVATIGSGTITNYADSVKGRFTISRDNAKNTVYLQMNSLKPEDTAVYYCAAGPNIPGGWYWYYHYWGQGTQVTVSS

SEQ ID NO: 9516 - protein, 122 aa, Artificial Sequence
  Chemically Synthesized
QVQLQESGGGLVQAGGSLRLSCAASGNISGVPLMGWYRQAPGKERELVASIGVLLPYADSVKGRFTISRDNAKNTVYLQMNSLKPEDTAVYYCAVLTDPTSVVTGPYDLGYWGQGTQVTVSS

SEQ ID NO: 9517 - protein, 122 aa, Artificial Sequence
  Chemically Synthesized
QVQLQESGGGLVQAGGSLRLSCAASGTISPRRWMGWYRQAPGKERELVAGIGVGTSTNYADSVKGRFTISRDNAKNTVYLQMNSLKPEDTAVYYCAVRDWPYSNHGYAHHYWGQGTQVTVSS

SEQ ID NO: 9518 - protein, 121 aa, Artificial Sequence
  Chemically Synthesized
QVQLQESGGGLVQAGGSLRLSCAASGNISGSMMGWYRQAPGKERELVATISRGTTTNYADSVKGRFTISRDNAKNTVYLQMNSLKPEDTAVYYCAVIGHYGYSNVWFYDYWGQGTQVTVSS

SEQ ID NO: 9519 - protein, 115 aa, Artificial Sequence
  Chemically Synthesized
QVQLQESGGGLVQAGGSLRLSCAASGTISPSRMGWYRQAPGKEREFVAAIGYGATNYADSVKGRFTISRDNAKNTVYLQMNSLKPEDTAVYYCAVIYDPLQLFYWGQGTQVTVSS

SEQ ID NO: 9520 - protein, 122 aa, Artificial Sequence
  Chemically Synthesized
QVQLQESGGGLVQAGGSLRLSCAASGTIFRQGIMGWYRQAPGKEREFVATIGPGTITNYADSVKGRFTISRDNAKNTVYLQMNSLKPEDTAVYYCAVKYYAWIRHEVFLHYWGQGTQVTVSS

SEQ ID NO: 9521 - protein, 125 aa, Artificial Sequence
  Chemically Synthesized
QVQLQESGGGLVQAGGSLRLSCAASGTISTIFEMGWYRQAPGKERELVATIAGGGNTYYADSVKGRFTISRDNAKNTVYLQMNSLKPEDTAVYYCAAGNIRYGYVFDDSWRSIYWGQGTQVTVSS

SEQ ID NO: 9522 - protein, 126 aa, Artificial Sequence
  Chemically Synthesized
QVQLQESGGGLVQAGGSLRLSCAASGSIFLARDMGWYRQAPGKERELVAAITRGGITNYADSVKGRFTISRDNAKNTVYLQMNSLKPEDTAVYYCAVYHTTVPNYRLSAYDGYSYWGQGTQVTVSS

SEQ ID NO: 9523 - protein, 114 aa, Artificial Sequence
  Chemically Synthesized
QVQLQESGGGLVQAGGSLRLSCAASGTIFITRRMGWYRQAPGKEREFVASINFGGNTYYADSVKGRFTISRDNAKNTVYLQMNSLKPEDTAVYYCAVLGEHTYWGQGTQVTVSS

SEQ ID NO: 9524 - protein, 118 aa, Artificial Sequence
  Chemically Synthesized
QVQLQESGGGLVQAGGSLRLSCAASGNISRNGYMGWYRQAPGKEREFVAAIDPGGTTYYADSVKGRFTISRDNAKNTVYLQMNSLKPEDTAVYYCAAYPYSVAVHPYWGQGTQVTVSS

SEQ ID NO: 9525 - protein, 117 aa, Artificial Sequence
  Chemically Synthesized
QVQLQESGGGLVQAGGSLRLSCAASGYISDSYYMGWYRQAPGKEREFVAAISGSTTYYADSVKGRFTISRDNAKNTVYLQMNSLKPEDTAVYYCAATYGYDGLLSYWGQGTQVTVSS

SEQ ID NO: 9526 - protein, 122 aa, Artificial Sequence
  Chemically Synthesized
QVQLQESGGGLVQAGGSLRLSCAASGTIFRVDIMGWYRQAPGKEREFVAAITPGGNTYYADSVKGRFTISRDNAKNTVYLQMNSLKPEDTAVYYCAVQFIYSTTTDGGYAYWGQGTQVTVSS

SEQ ID NO: 9527 - protein, 118 aa, Artificial Sequence
  Chemically Synthesized
QVQLQESGGGLVQAGGSLRLSCAASGNIFSADLMGWYRQAPGKERELVASINGGASTNYADSVKGRFTISRDNAKNTVYLQMNSLKPEDTAVYYCAATSRYLTYLDYWGQGTQVTVSS

SEQ ID NO: 9528 - protein, 118 aa, Artificial Sequence
  Chemically Synthesized
QVQLQESGGGLVQAGGSLRLSCAASGNISAPSFMGWYRQAPGKEREFVAAINYGGTTNYADSVKGRFTISRDNAKNTVYLQMNSLKPEDTAVYYCAVSYYPYVGLDYWGQGTQVTVSS

SEQ ID NO: 9529 - protein, 122 aa, Artificial Sequence
  Chemically Synthesized
QVQLQESGGGLVQAGGSLRLSCAASGNISYVYYMGWYRQAPGKERELVAAINRGGSTNYADSVKGRFTISRDNAKNTVYLQMNSLKPEDTAVYYCAVVHYDYGGVKDWHVYWGQGTQVTVSS

SEQ ID NO: 9530 - protein, 126 aa, Artificial Sequence
  Chemically Synthesized
QVQLQESGGGLVQAGGSLRLSCAASGTISVDVRMGWYRQAPGKERELVAAITRGGNTYYADSVKGRFTISRDNAKNTVYLQMNSLKPEDTAVYYCAAVIVDGSTGQADGGRAFDYWGQGTQVTVSS

SEQ ID NO: 9531 - protein, 121 aa, Artificial Sequence
  Chemically Synthesized
QVQLQESGGGLVQAGGSLRLSCAASGYIFDYRRMGWYRQAPGKERELVAAISSLVVLPYADSVKGRFTISRDNAKNTVYLQMNSLKPEDTAVYYCAALRLSMFTTSTLIYWGQGTQVTVSS

SEQ ID NO: 9532 - protein, 118 aa, Artificial Sequence
  Chemically Synthesized
QVQLQESGGGLVQAGGSLRLSCAASGTISVTGTMGWYRQAPGKEREFVAGITPGGITYYADSVKGRFTISRDNAKNTVYLQMNSLKPEDTAVYYCAVVYHSVDWYWYWGQGTQVTVSS

SEQ ID NO: 9533 - protein, 118 aa, Artificial Sequence
  Chemically Synthesized
QVQLQESGGGLVQAGGSLRLSCAASGYISPPNIMGWYRQAPGKEREFVAGIAYGSNTNYADSVKGRFTISRDNAKNTVYLQMNSLKPEDTAVYYCAAILVDDGLHGYWGQGTQVTVSS

SEQ ID NO: 9534 - protein, 118 aa, Artificial Sequence
  Chemically Synthesized
QVQLQESGGGLVQAGGSLRLSCAASGYIFGVYLMGWYRQAPGKEREFVATIGVGSITNYADSVKGRFTISRDNAKNTVYLQMNSLKPEDTAVYYCAVQRHFVRAFGYWGQGTQVTVSS

SEQ ID NO: 9535 - protein, 118 aa, Artificial Sequence
  Chemically Synthesized
QVQLQESGGGLVQAGGSLRLSCAASGNISTEGGMGWYRQAPGKEREFVASINDGGITYYADSVKGRFTISRDNAKNTVYLQMNSLKPEDTAVYYCAAINLRYPYLYYWGQGTQVTVSS

SEQ ID NO: 9536 - protein, 117 aa, Artificial Sequence
  Chemically Synthesized
QVQLQESGGGLVQAGGSLRLSCAASGYISRNRRMGWYRQAPGKEREFVAGIDQGASTNYADSVKGRFTISRDNAKNTVYLQMNSLKPEDTAVYYCAVVYPTSRFYYWGQGTQVTVSS

SEQ ID NO: 9537 - protein, 118 aa, Artificial Sequence
  Chemically Synthesized
QVQLQESGGGLVQAGGSLRLSCAASGYISYDPYMGWYRQAPGKERELVAAIGLGTTTYYADSVKGRFTISRDNAKNTVYLQMNSLKPEDTAVYYCAAYNGYTDWLVYWGQGTQVTVSS

SEQ ID NO: 9538 - protein, 118 aa, Artificial Sequence
  Chemically Synthesized
QVQLQESGGGLVQAGGSLRLSCAASGSISYDAYMGWYRQAPGKEREFVAAIAYGTSTNYADSVKGRFTISRDNAKNTVYLQMNSLKPEDTAVYYCAVGQHKYTAHLYWGQGTQVTVSS

SEQ ID NO: 9539 - protein, 118 aa, Artificial Sequence
  Chemically Synthesized
QVQLQESGGGLVQAGGSLRLSCAASGTIFITSWMGWYRQAPGKEREFVATISGGATTNYADSVKGRFTISRDNAKNTVYLQMNSLKPEDTAVYYCAAIYYSGQYFYYWGQGTQVTVSS

SEQ ID NO: 9540 - protein, 122 aa, Artificial Sequence
  Chemically Synthesized
QVQLQESGGGLVQAGGSLRLSCAASGTIFPVYRMGWYRQAPGKEREFVATIAIGSTTNYADSVKGRFTISRDNAKNTVYLQMNSLKPEDTAVYYCAAWYTPAYDRQDDHFYWGQGTQVTVSS

SEQ ID NO: 9541 - protein, 118 aa, Artificial Sequence
  Chemically Synthesized
QVQLQESGGGLVQAGGSLRLSCAASGYISPYYYMGWYRQAPGKERELVATIANGSITNYADSVKGRFTISRDNAKNTVYLQMNSLKPEDTAVYYCAARYRTQRPYDYWGQGTQVTVSS

SEQ ID NO: 9542 - protein, 122 aa, Artificial Sequence
  Chemically Synthesized
QVQLQESGGGLVQAGGSLRLSCAASGTIFIAQNMGWYRQAPGKEREFVASITQGTSTNYADSVKGRFTISRDNAKNTVYLQMNSLKPEDTAVYYCAVVGTSESYPKSYLYYWGQGTQVTVSS

SEQ ID NO: 9543 - protein, 118 aa, Artificial Sequence
  Chemically Synthesized
QVQLQESGGGLVQAGGSLRLSCAASGTIFGLDTMGWYRQAPGKEREFVAAITSGGNTNYADSVKGRFTISRDNAKNTVYLQMNSLKPEDTAVYYCAAIGYRLAYYYYWGQGTQVTVSS

SEQ ID NO: 9544 - protein, 126 aa, Artificial Sequence
  Chemically Synthesized
QVQLQESGGGLVQAGGSLRLSCAASGTIFGSYAMGWYRQAPGKERELVASIGRGSNTNYADSVKGRFTISRDNAKNTVYLQMNSLKPEDTAVYYCAVDRYPDYDYLYADDTLYHYWGQGTQVTVSS

SEQ ID NO: 9545 - protein, 122 aa, Artificial Sequence
  Chemically Synthesized
QVQLQESGGGLVQAGGSLRLSCAASGNISHYTSMGWYRQAPGKEREFVAGINAGSNTYYADSVKGRFTISRDNAKNTVYLQMNSLKPEDTAVYYCAALGLDSYDYDRPHAYWGQGTQVTVSS

SEQ ID NO: 9546 - protein, 122 aa, Artificial Sequence
  Chemically Synthesized
QVQLQESGGGLVQAGGSLRLSCAASGYISKGGVMGWYRQAPGKERELVAAIDIGGNTYYADSVKGRFTISRDNAKNTVYLQMNSLKPEDTAVYYCAVTYQPYIYTDVLHDYWGQGTQVTVSS

SEQ ID NO: 9547 - protein, 118 aa, Artificial Sequence
  Chemically Synthesized
QVQLQESGGGLVQAGGSLRLSCAASGSISIAWYMGWYRQAPGKEREFVASIAYGTITNYADSVKGRFTISRDNAKNTVYLQMNSLKPEDTAVYYCAAGSTGGQFLYYWGQGTQVTVSS

SEQ ID NO: 9548 - protein, 121 aa, Artificial Sequence
  Chemically Synthesized
QVQLQESGGGLVQAGGSLRLSCAASGTISPYYYMGWYRQAPGKERELVPLLLGVVLPYADSVKGRFTISRDNAKNTVYLQMNSLKPEDTAVYYCAVRVFQYSKWLPSLTYWGQGTQVTVSS

SEQ ID NO: 9549 - protein, 118 aa, Artificial Sequence
  Chemically Synthesized
QVQLQESGGGLVQAGGSLRLSCAASGSISRTYYMGWYRQAPGKERELVASITGGTITNYADSVKGRFTISRDNAKNTVYLQMNSLKPEDTAVYYCAVTWPESQYFSYWGQGTQVTVSS

SEQ ID NO: 9550 - protein, 118 aa, Artificial Sequence
  Chemically Synthesized
QVQLQESGGGLVQAGGSLRLSCAASGNISSLHSMGWYRQAPGKERELVAGISAGASTNYADSVKGRFTISRDNAKNTVYLQMNSLKPEDTAVYYCAAIVWLRKYFGYWGQGTQVTVSS

SEQ ID NO: 9551 - protein, 125 aa, Artificial Sequence
  Chemically Synthesized
QVQLQESGGGLVQAGGSLRLSCAASGNFLVLRMGWYRQAPGKERELVAGITLGSNTNYADSVKGRFTISRDNAKNTVYLQMNSLKPEDTAVYYCAAGRDYWYDQDYADRSTFRYWGQGTQVTVSS

SEQ ID NO: 9552 - protein, 126 aa, Artificial Sequence
  Chemically Synthesized
QVQLQESGGGLVQAGGSLRLSCAASGNIFVDTYMGWYRQAPGKEREFVAGIGIGSSTYYADSVKGRFTISRDNAKNTVYLQMNSLKPEDTAVYYCAVPNDYGYNDGVYLGDEYGYWGQGTQVTVSS

SEQ ID NO: 9553 - protein, 118 aa, Artificial Sequence
  Chemically Synthesized
QVQLQESGGGLVQAGGSLRLSCAASGSISTYPYMGWYRQAPGKEREFVAGIGPGGITNYADSVKGRFTISRDNAKNTVYLQMNSLKPEDTAVYYCAVLSTSNVILYYWGQGTQVTVSS

SEQ ID NO: 9554 - protein, 118 aa, Artificial Sequence
  Chemically Synthesized
QVQLQESGGGLVQAGGSLRLSCAASGTISGRQYMGWYRQAPGKEREFVASISHGASTNYADSVKGRFTISRDNAKNTVYLQMNSLKPEDTAVYYCAAIAYYATYHYYWGQGTQVTVSS

SEQ ID NO: 9555 - protein, 121 aa, Artificial Sequence
  Chemically Synthesized
QVQLQESGGGLVQAGGSLRLSCAASGTILLVLMGWYRQAPGKERELVAGIALGSTTNYADSVKGRFTISRDNAKNTVYLQMNSLKPEDTAVYYCAVDAYGIGYDVRYHSYWGQGTQVTVSS

SEQ ID NO: 9556 - protein, 117 aa, Artificial Sequence
  Chemically Synthesized
QVQLQESGGGLVQAGGSLRLSCAASGTISTEYAMGWYRQAPGKEREFVASITSGGITYYADSVKGRFTISRDNAKNTVYLQMNSLKPEDTAVYYCAVYQYLSYYLYWGQGTQVTVSS

SEQ ID NO: 9557 - protein, 117 aa, Artificial Sequence
  Chemically Synthesized
QVQLQESGGGLVQAGGSLRLSCAASGYFLLLFMGWYRQAPGKERELVATITGGGITYYADSVKGRFTISRDNAKNTVYLQMNSLKPEDTAVYYCAATVPRGLYLDYWGQGTQVTVSS

SEQ ID NO: 9558 - protein, 122 aa, Artificial Sequence
  Chemically Synthesized
QVQLQESGGGLVQAGGSLRLSCAASGTISWSFLMGWYRQAPGKEREFVAGINGGTNTYYADSVKGRFTISRDNAKNTVYLQMNSLKPEDTAVYYCAAGSDVLRDAWTVFVYWGQGTQVTVSS

SEQ ID NO: 9559 - protein, 122 aa, Artificial Sequence
  Chemically Synthesized
QVQLQESGGGLVQAGGSLRLSCAASGNISAGYSMGWYRQAPGKERELVASIDSGSNTYYADSVKGRFTISRDNAKNTVYLQMNSLKPEDTAVYYCAVSAGQYPNLYSYFQYWGQGTQVTVSS

SEQ ID NO: 9560 - protein, 122 aa, Artificial Sequence
  Chemically Synthesized
QVQLQESGGGLVQAGGSLRLSCAASGNISSPKSMGWYRQAPGKERELVATITYGTTTNYADSVKGRFTISRDNAKNTVYLQMNSLKPEDTAVYYCAVPRYFLHRDSSYFRYWGQGTQVTVSS

SEQ ID NO: 9561 - protein, 125 aa, Artificial Sequence
  Chemically Synthesized
QVQLQESGGGLVQAGGSLRLSCAASGYIFDGRYMGWYRQAPGKERELLPLLVTVVLPYADSVKGRFTISRDNAKNTVYLQMNSLKPEDTAVYYCAAQTYYRGYTYVRGDAVHDYWGQGTQVTVSS

SEQ ID NO: 9562 - protein, 122 aa, Artificial Sequence
  Chemically Synthesized
QVQLQESGGGLVQAGGSLRLSCAASGNIFVWRGMGWYRQAPGKEREFVASIDEGGSTNYADSVKGRFTISRDNAKNTVYLQMNSLKPEDTAVYYCAAIAWNDRDDQGPHYYWGQGTQVTVSS

SEQ ID NO: 9563 - protein, 118 aa, Artificial Sequence
  Chemically Synthesized
QVQLQESGGGLVQAGGSLRLSCAASGYISYPSIMGWYRQAPGKEREFVAAIDYGGTTNYADSVKGRFTISRDNAKNTVYLQMNSLKPEDTAVYYCAVLRLDSQWHYYWGQGTQVTVSS

SEQ ID NO: 9564 - protein, 118 aa, Artificial Sequence
  Chemically Synthesized
QVQLQESGGGLVQAGGSLRLSCAASGTIFSGQHMGWYRQAPGKEREFVAAINGGSITYYADSVKGRFTISRDNAKNTVYLQMNSLKPEDTAVYYCAAVLGGRGWHYYWGQGTQVTVSS

SEQ ID NO: 9565 - protein, 120 aa, Artificial Sequence
  Chemically Synthesized
QVQLQESGGGLVQAGGSLRLSCAASGYISYDDYMGWYRQAPGKERELVASINYGGNTNYADSVKGRFTISRDNAKNTVYLQMNSLKPEDTAVYYCAALLDDDTYYIYYYWGQGTQVTVSS

SEQ ID NO: 9566 - protein, 118 aa, Artificial Sequence
  Chemically Synthesized
QVQLQESGGGLVQAGGSLRLSCAASGTISYPTSMGWYRQAPGKEREFVASINQGGSTYYADSVKGRFTISRDNAKNTVYLQMNSLKPEDTAVYYCAAIYYSEGYLGYWGQGTQVTVSS

SEQ ID NO: 9567 - protein, 116 aa, Artificial Sequence
  Chemically Synthesized
QVQLQESGGGLVQAGGSLRLSCAASGTISGPQAMGWYRQAPGKEREFVASIAGGAITYYADSVKGRFTISRDNAKNTVYLQMNSLKPEDTAVYYCAAVYDTKHGYWGQGTQVTVSS

SEQ ID NO: 9568 - protein, 121 aa, Artificial Sequence
  Chemically Synthesized
QVQLQESGGGLVQAGGSLRLSCAASGNIFGGQIMGWYRQAPGKEREFVAYCSWCYYQYADSVKGRFTISRDNAKNTVYLQMNSLKPEDTAVYYCAVTRNYDGDFTGGLLYWGQGTQVTVSS

SEQ ID NO: 9569 - protein, 122 aa, Artificial Sequence
  Chemically Synthesized
QVQLQESGGGLVQAGGSLRLSCAASGSIFAWPFMGWYRQAPGKEREFVATINHGTTTNYADSVKGRFTISRDNAKNTVYLQMNSLKPEDTAVYYCAALAYYRTDGAGWHYYWGQGTQVTVSS

SEQ ID NO: 9570 - protein, 125 aa, Artificial Sequence
  Chemically Synthesized
QVQLQESGGGLVQAGGSLRLSCAASGYISCRTMGWYRQAPGKEREFVASIADGGITNYADSVKGRFTISRDNAKNTVYLQMNSLKPEDTAVYYCAAEAYYWYPPYVQQSPSFAYWGQGTQVTVSS

SEQ ID NO: 9571 - protein, 118 aa, Artificial Sequence
  Chemically Synthesized
QVQLQESGGGLVQAGGSLRLSCAASGTISYRDTMGWYRQAPGKEREFVAGITFGTNTNYADSVKGRFTISRDNAKNTVYLQMNSLKPEDTAVYYCAALDTGPQLHFYWGQGTQVTVSS

SEQ ID NO: 9572 - protein, 118 aa, Artificial Sequence
  Chemically Synthesized
QVQLQESGGGLVQAGGSLRLSCAASGNISYLTVMGWYRQAPGKERELVATITYGGTTNYADSVKGRFTISRDNAKNTVYLQMNSLKPEDTAVYYCAAYGVWDVDYPYWGQGTQVTVSS

SEQ ID NO: 9573 - protein, 118 aa, Artificial Sequence
  Chemically Synthesized
QVQLQESGGGLVQAGGSLRLSCAASGNIFGEQGMGWYRQAPGKEREFVASISEGGSTNYADSVKGRFTISRDNAKNTVYLQMNSLKPEDTAVYYCAVVIWPDLELDYWGQGTQVTVSS

SEQ ID NO: 9574 - protein, 126 aa, Artificial Sequence
  Chemically Synthesized
QVQLQESGGGLVQAGGSLRLSCAASGYISTRSYMGWYRQAPGKEREFVATITYGTNTYYADSVKGRFTISRDNAKNTVYLQMNSLKPEDTAVYYCAVYGHYQIYRTGNYDTEFTYWGQGTQVTVSS

SEQ ID NO: 9575 - protein, 126 aa, Artificial Sequence
  Chemically Synthesized
QVQLQESGGGLVQAGGSLRLSCAASGYISDTTSMGWYRQAPGKERELVATITDGTITYYADSVKGRFTISRDNAKNTVYLQMNSLKPEDTAVYYCAVYDQLDRYPSDLITSFLAYWGQGTQVTVSS

SEQ ID NO: 9576 - protein, 122 aa, Artificial Sequence
  Chemically Synthesized
QVQLQESGGGLVQAGGSLRLSCAASGYISANNDMGWYRQAPGKERELVAGIAYGGITNYADSVKGRFTISRDNAKNTVYLQMNSLKPEDTAVYYCAADPVPDDADGTTFTYWGQGTQVTVSS

SEQ ID NO: 9577 - protein, 118 aa, Artificial Sequence
  Chemically Synthesized
QVQLQESGGGLVQAGGSLRLSCAASGYISYPVYMGWYRQAPGKEREFVAAIDGGSTTNYADSVKGRFTISRDNAKNTVYLQMNSLKPEDTAVYYCAALTYEYAWHQYWGQGTQVTVSS

SEQ ID NO: 9578 - protein, 126 aa, Artificial Sequence
  Chemically Synthesized
QVQLQESGGGLVQAGGSLRLSCAASGSISYTEYMGWYRQAPGKEREFVASIAKGSNTNYADSVKGRFTISRDNAKNTVYLQMNSLKPEDTAVYYCAALTQPDVYLVRRYSSTFDYWGQGTQVTVSS

SEQ ID NO: 9579 - protein, 117 aa, Artificial Sequence
  Chemically Synthesized
QVQLQESGGGLVQAGGSLRLSCAASGTIFPSLMGWYRQAPGKERELVAGITQGASTNYADSVKGRFTISRDNAKNTVYLQMNSLKPEDTAVYYCAVPADSTLTHDYWGQGTQVTVSS

SEQ ID NO: 9580 - protein, 126 aa, Artificial Sequence
  Chemically Synthesized
QVQLQESGGGLVQAGGSLRLSCAASGTISNVPWMGWYRQAPGKERELVAGIAIGGITYYADSVKGRFTISRDNAKNTVYLQMNSLKPEDTAVYYCAAGPFDGNREYHGSDVPFGYWGQGTQVTVSS

SEQ ID NO: 9581 - protein, 122 aa, Artificial Sequence
  Chemically Synthesized
QVQLQESGGGLVQAGGSLRLSCAASGYIFASVIMGWYRQAPGKEREFVAAINRGTSTNYADSVKGRFTISRDNAKNTVYLQMNSLKPEDTAVYYCAVTWKDRYDSSSWHYYWGQGTQVTVSS

SEQ ID NO: 9582 - protein, 118 aa, Artificial Sequence
  Chemically Synthesized
QVQLQESGGGLVQAGGSLRLSCAASGNIFPHNVMGWYRQAPGKERELVAGITDGATTNYADSVKGRFTISRDNAKNTVYLQMNSLKPEDTAVYYCAVVGYYGDYFYYWGQGTQVTVSS

SEQ ID NO: 9583 - protein, 118 aa, Artificial Sequence
  Chemically Synthesized
QVQLQESGGGLVQAGGSLRLSCAASGNISRSNVMGWYRQAPGKERELVASIAQGSSTNYADSVKGRFTISRDNAKNTVYLQMNSLKPEDTAVYYCAAVGYKRYWHGYWGQGTQVTVSS

SEQ ID NO: 9584 - protein, 121 aa, Artificial Sequence
  Chemically Synthesized
QVQLQESGGGLVQAGGSLRLSCAASGSISDAIYMGWYRQAPGKERELLPLLVMVVLPYADSVKGRFTISRDNAKNTVYLQMNSLKPEDTAVYYCAVRSNRSGEVRYDHTYWGQGTQVTVSS

SEQ ID NO: 9585 - protein, 118 aa, Artificial Sequence
  Chemically Synthesized
QVQLQESGGGLVQAGGSLRLSCAASGNIFGDPTMGWYRQAPGKEREFVAAISRGGTTNYADSVKGRFTISRDNAKNTVYLQMNSLKPEDTAVYYCAVIEYYTRWHYYWGQGTQVTVSS

SEQ ID NO: 9586 - protein, 117 aa, Artificial Sequence
  Chemically Synthesized
QVQLQESGGGLVQAGGSLRLSCAASGYIFSDRVMGWYRQAPGKEREFVAGISSVVIPYADSVKGRFTISRDNAKNTVYLQMNSLKPEDTAVYYCAARAYDYDYHSYWGQGTQVTVSS

SEQ ID NO: 9587 - protein, 122 aa, Artificial Sequence
  Chemically Synthesized
QVQLQESGGGLVQAGGSLRLSCAASGNIFRYYVMGWYRQAPGKERELVATINQGATTYYADSVKGRFTISRDNAKNTVYLQMNSLKPEDTAVYYCAVTIVRAYDGYLALQYWGQGTQVTVSS

SEQ ID NO: 9588 - protein, 118 aa, Artificial Sequence
  Chemically Synthesized
QVQLQESGGGLVQAGGSLRLSCAASGNISYDLIMGWYRQAPGKERELVAAITYGSTTNYADSVKGRFTISRDNAKNTVYLQMNSLKPEDTAVYYCAVVTYEGSWLYYWGQGTQVTVSS

SEQ ID NO: 9589 - protein, 122 aa, Artificial Sequence
  Chemically Synthesized
QVQLQESGGGLVQAGGSLRLSCAASGTISKSILMGWYRQAPGKEREFVASIAYGTTTNYADSVKGRFTISRDNAKNTVYLQMNSLKPEDTAVYYCAAVAQSRTVWGEWHGYWGQGTQVTVSS

SEQ ID NO: 9590 - protein, 116 aa, Artificial Sequence
  Chemically Synthesized
QVQLQESGGGLVQAGGSLRLSCAASGTISYARAMGWYRQAPGKEREFVAAITGGSSTNYADSVKGRFTISRDNAKNTVYLQMNSLKPEDTAVYYCAVYERINHYYWGQGTQVTVSS

SEQ ID NO: 9591 - protein, 119 aa, Artificial Sequence
  Chemically Synthesized
QVQLQESGGGLVQAGGSLRLSCAASGNIFLVGYMGWYRQAPGKERELVAAISAGGTTYYADSVKGRFTISRDNAKNTVYLQMNSLKPEDTAVYYCAALYGRFRHRHRYWGQGTQVTVSS

SEQ ID NO: 9592 - protein, 121 aa, Artificial Sequence
  Chemically Synthesized
QVQLQESGGGLVQAGGSLRLSCAASGTIFGFNSMGWYRQAPGKERELVATIDGGITYYADSVKGRFTISRDNAKNTVYLQMNSLKPEDTAVYYCAVYVVAYYYPGYSLTYWGQGTQVTVSS

SEQ ID NO: 9593 - protein, 118 aa, Artificial Sequence
  Chemically Synthesized
QVQLQESGGGLVQAGGSLRLSCAASGYISYKAYMGWYRQAPGKEREFVATIGAGSTTNYADSVKGRFTISRDNAKNTVYLQMNSLKPEDTAVYYCAVLRYGSGWYYYWGQGTQVTVSS

SEQ ID NO: 9594 - protein, 117 aa, Artificial Sequence
  Chemically Synthesized
QVQLQESGGGLVQAGGSLRLSCAASGNISYIVMGWYRQAPGKERELVAAISYGGNTYYADSVKGRFTISRDNAKNTVYLQMNSLKPEDTAVYYCAATTAYYYTLEYWGQGTQVTVSS

SEQ ID NO: 9595 - protein, 118 aa, Artificial Sequence
  Chemically Synthesized
QVQLQESGGGLVQAGGSLRLSCAASGNISRDPVMGWYRQAPGKEREFVAGIGQGSTTNYADSVKGRFTISRDNAKNTVYLQMNSLKPEDTAVYYCAVGWLGGYYHYYWGQGTQVTVSS

SEQ ID NO: 9596 - protein, 122 aa, Artificial Sequence
  Chemically Synthesized
QVQLQESGGGLVQAGGSLRLSCAASGYISYTTAMGWYRQAPGKERELVATISAGGNTNYADSVKGRFTISRDNAKNTVYLQMNSLKPEDTAVYYCAAYDYRGQKYEFIHDYWGQGTQVTVSS

SEQ ID NO: 9597 - protein, 122 aa, Artificial Sequence
  Chemically Synthesized
QVQLQESGGGLVQAGGSLRLSCAASGNISTNLGMGWYRQAPGKEREFVATIADGGSTYYADSVKGRFTISRDNAKNTVYLQMNSLKPEDTAVYYCAASNRWDYQLKYGFAYWGQGTQVTVSS

SEQ ID NO: 9598 - protein, 118 aa, Artificial Sequence
  Chemically Synthesized
QVQLQESGGGLVQAGGSLRLSCAASGTISDYISMGWYRQAPGKEREFVAGIGKGANTNYADSVKGRFTISRDNAKNTVYLQMNSLKPEDTAVYYCAALQYGAGYHGYWGQGTQVTVSS

SEQ ID NO: 9599 - protein, 118 aa, Artificial Sequence
  Chemically Synthesized
QVQLQESGGGLVQAGGSLRLSCAASGSISYFRWMGWYRQAPGKEREFVAAIATGATTNYADSVKGRFTISRDNAKNTVYLQMNSLKPEDTAVYYCAVVDWLGRYFFYWGQGTQVTVSS

SEQ ID NO: 9600 - protein, 117 aa, Artificial Sequence
  Chemically Synthesized
QVQLQESGGGLVQAGGSLRLSCAASGNISSWTYMGWYRQAPGKEREFVATINTGTSTNYADSVKGRFTISRDNAKNTVYLQMNSLKPEDTAVYYCAADYKGGSLFYWGQGTQVTVSS

SEQ ID NO: 9601 - protein, 118 aa, Artificial Sequence
  Chemically Synthesized
QVQLQESGGGLVQAGGSLRLSCAASGNISSWLAMGWYRQAPGKEREFVAAIDKGSTTNYADSVKGRFTISRDNAKNTVYLQMNSLKPEDTAVYYCAAVWREGRNLSYWGQGTQVTVSS

SEQ ID NO: 9602 - protein, 121 aa, Artificial Sequence
  Chemically Synthesized
QVQLQESGGGLVQAGGSLRLSCAASGTIFRSASMGWYRQAPGKEREFVAGINVGTTTNYADSVKGRFTISRDNAKNTVYLQMNSLKPEDTAVYYCAAVYGDRVTSGYHYYWGQGTQVTVSS

SEQ ID NO: 9603 - protein, 122 aa, Artificial Sequence
  Chemically Synthesized
QVQLQESGGGLVQAGGSLRLSCAASGNIFYDSPMGWYRQAPGKEREFVATISYGSTTNYADSVKGRFTISRDNAKNTVYLQMNSLKPEDTAVYYCAVDGSHRNRRYESHYYWGQGTQVTVSS

SEQ ID NO: 9604 - protein, 118 aa, Artificial Sequence
  Chemically Synthesized
QVQLQESGGGLVQAGGSLRLSCAASGNIFYYSSMGWYRQAPGKERELVASINSGGNTYYADSVKGRFTISRDNAKNTVYLQMNSLKPEDTAVYYCAALQYSDGWHGYWGQGTQVTVSS

SEQ ID NO: 9605 - protein, 121 aa, Artificial Sequence
  Chemically Synthesized
QVQLQESGGGLVQAGGSLRLSCAASGNISVYEMGWYRQAPGKEREFVATISYGTTTNYADSVKGRFTISRDNAKNTVYLQMNSLKPEDTAVYYCAAVLLISLYVTDYLLYWGQGTQVTVSS

SEQ ID NO: 9606 - protein, 118 aa, Artificial Sequence
  Chemically Synthesized
QVQLQESGGGLVQAGGSLRLSCAASGNISHPSNMGWYRQAPGKERELVAAISDGSTTYYADSVKGRFTISRDNAKNTVYLQMNSLKPEDTAVYYCAVVWYDQRYLYYWGQGTQVTVSS

SEQ ID NO: 9607 - protein, 126 aa, Artificial Sequence
  Chemically Synthesized
QVQLQESGGGLVQAGGSLRLSCAASGYISELVNMGWYRQAPGKEREFVATIGTGTITNYADSVKGRFTISRDNAKNTVYLQMNSLKPEDTAVYYCAVYKNAARYYNLVAPYYHSYWGQGTQVTVSS

SEQ ID NO: 9608 - protein, 123 aa, Artificial Sequence
  Chemically Synthesized
QVQLQESGGGLVQAGGSLRLSCAASGNITRMGWYRQAPGKERELVAAIDIGATTNYADSVKGRFTISRDNAKNTVYLQMNSLKPEDTAVYYCAAIDYGAYEYPVNSDPYYDYWGQGTQVTVSS

SEQ ID NO: 9609 - protein, 122 aa, Artificial Sequence
  Chemically Synthesized
QVQLQESGGGLVQAGGSLRLSCAASGNIFFSSNMGWYRQAPGKEREFVAAINSGAITNYADSVKGRFTISRDNAKNTVYLQMNSLKPEDTAVYYCAAIYYIPQDPTGRFYYWGQGTQVTVSS

SEQ ID NO: 9610 - protein, 118 aa, Artificial Sequence
  Chemically Synthesized
QVQLQESGGGLVQAGGSLRLSCAASGSISDNNAMGWYRQAPGKEREFVAGINSGSNTNYADSVKGRFTISRDNAKNTVYLQMNSLKPEDTAVYYCAAVRGRSYTLYYWGQGTQVTVSS

SEQ ID NO: 9611 - protein, 118 aa, Artificial Sequence
  Chemically Synthesized
QVQLQESGGGLVQAGGSLRLSCAASGTIFSYLIMGWYRQAPGKEREFVAGITRGGTTNYADSVKGRFTISRDNAKNTVYLQMNSLKPEDTAVYYCAAVGGADYRYGYWGQGTQVTVSS

SEQ ID NO: 9612 - protein, 118 aa, Artificial Sequence
  Chemically Synthesized
QVQLQESGGGLVQAGGSLRLSCAASGYIFVRDRMGWYRQAPGKEREFVATISYGTNTNYADSVKGRFTISRDNAKNTVYLQMNSLKPEDTAVYYCAALSLKTDVHYYWGQGTQVTVSS

SEQ ID NO: 9613 - protein, 121 aa, Artificial Sequence
  Chemically Synthesized
QVQLQESGGGLVQAGGSLRLSCAASGSISRRPDMGWYRQAPGKERELVAGIAQGTTTNYADSVKGRFTISRDNAKNTVYLQMNSLKPEDTAVYYCAASSRTLLLTLVSIYWGQGTQVTVSS

SEQ ID NO: 9614 - protein, 116 aa, Artificial Sequence
  Chemically Synthesized
QVQLQESGGGLVQAGGSLRLSCAASGSILNLVMGWYRQAPGKERELVAGISHGSTTYYADSVKGRFTISRDNAKNTVYLQMNSLKPEDTAVYYCAAAAYYAPYRYWGQGTQVTVSS

SEQ ID NO: 9615 - protein, 118 aa, Artificial Sequence
  Chemically Synthesized
QVQLQESGGGLVQAGGSLRLSCAASGNISYGVKMGWYRQAPGKEREFVAAITSGGSTNYADSVKGRFTISRDNAKNTVYLQMNSLKPEDTAVYYCAALTRYTRYHWYWGQGTQVTVSS

SEQ ID NO: 9616 - protein, 126 aa, Artificial Sequence
  Chemically Synthesized
QVQLQESGGGLVQAGGSLRLSCAASGYISPFPSMGWYRQAPGKERELVATITSGSNTNYADSVKGRFTISRDNAKNTVYLQMNSLKPEDTAVYYCAVFKQAWQTAQDPDDRSLGYWGQGTQVTVSS

SEQ ID NO: 9617 - protein, 118 aa, Artificial Sequence
  Chemically Synthesized
QVQLQESGGGLVQAGGSLRLSCAASGNISGHDRMGWYRQAPGKEREFVAAIGNGSITYYADSVKGRFTISRDNAKNTVYLQMNSLKPEDTAVYYCAAVHAQDGYHGYWGQGTQVTVSS

SEQ ID NO: 9618 - protein, 118 aa, Artificial Sequence
  Chemically Synthesized
QVQLQESGGGLVQAGGSLRLSCAASGTISQPYAMGWYRQAPGKEREFVAGIGYGATTNYADSVKGRFTISRDNAKNTVYLQMNSLKPEDTAVYYCAVVYLSPSAHYYWGQGTQVTVSS

SEQ ID NO: 9619 - protein, 118 aa, Artificial Sequence
  Chemically Synthesized
QVQLQESGGGLVQAGGSLRLSCAASGSISATTQMGWYRQAPGKEREFVAGISVGANTNYADSVKGRFTISRDNAKNTVYLQMNSLKPEDTAVYYCAAITFDRGWYHYWGQGTQVTVSS

SEQ ID NO: 9620 - protein, 121 aa, Artificial Sequence
  Chemically Synthesized
QVQLQESGGGLVQAGGSLRLSCAASGSISDLSTMGWYRQAPGKERELVAAIADGAITYYADSVKGRFTISRDNAKNTVYLQMNSLKPEDTAVYYCAAYDNSSTTSTVTFYWGQGTQVTVSS

SEQ ID NO: 9621 - protein, 118 aa, Artificial Sequence
  Chemically Synthesized
QVQLQESGGGLVQAGGSLRLSCAASGTISKATYMGWYRQAPGKEREFVASIAGGATTNYADSVKGRFTISRDNAKNTVYLQMNSLKPEDTAVYYCAAIYRSGYYYGYWGQGTQVTVSS

SEQ ID NO: 9622 - protein, 118 aa, Artificial Sequence
  Chemically Synthesized
QVQLQESGGGLVQAGGSLRLSCAASGNISYPTYMGWYRQAPGKEREFVATISLGANTNYADSVKGRFTISRDNAKNTVYLQMNSLKPEDTAVYYCAVIYQRKQYHYYWGQGTQVTVSS

SEQ ID NO: 9623 - protein, 117 aa, Artificial Sequence
  Chemically Synthesized
QVQLQESGGGLVQAGGSLRLSCAASGYISGYNDMGWYRQAPGKERELVASINTVVIPYADSVKGRFTISRDNAKNTVYLQMNSLKPEDTAVYYCAAYDLGWLDYTYWGQGTQVTVSS

SEQ ID NO: 9624 - protein, 118 aa, Artificial Sequence
  Chemically Synthesized
QVQLQESGGGLVQAGGSLRLSCAASGNISDRSYMGWYRQAPGKEREFVATITVGGNTNYADSVKGRFTISRDNAKNTVYLQMNSLKPEDTAVYYCAVIWRVNQHFWYWGQGTQVTVSS

SEQ ID NO: 9625 - protein, 121 aa, Artificial Sequence
  Chemically Synthesized
QVQLQESGGGLVQAGGSLRLSCAASGSISGNYFMGWYRQAPGKERELVAGITHGAITNYADSVKGRFTISRDNAKNTVYLQMNSLKPEDTAVYYCAAFLTLVLTLVLVFYWGQGTQVTVSS

SEQ ID NO: 9626 - protein, 118 aa, Artificial Sequence
  Chemically Synthesized
QVQLQESGGGLVQAGGSLRLSCAASGYIFIYWPMGWYRQAPGKERELVAAITYGTITYYADSVKGRFTISRDNAKNTVYLQMNSLKPEDTAVYYCAAWIFTSEYLAYWGQGTQVTVSS

SEQ ID NO: 9627 - protein, 116 aa, Artificial Sequence
  Chemically Synthesized
QVQLQESGGGLVQAGGSLRLSCAASGNISDYSAMGWYRQAPGKEREFVAGISSGANTNYADSVKGRFTISRDNAKNTVYLQMNSLKPEDTAVYYCAVIWGAKHGYWGQGTQVTVSS

SEQ ID NO: 9628 - protein, 118 aa, Artificial Sequence
  Chemically Synthesized
QVQLQESGGGLVQAGGSLRLSCAASGNISTDPYMGWYRQAPGKEREFVASINVGASTYYADSVKGRFTISRDNAKNTVYLQMNSLKPEDTAVYYCAVVYRVRGYHYYWGQGTQVTVSS

SEQ ID NO: 9629 - protein, 118 aa, Artificial Sequence
  Chemically Synthesized
QVQLQESGGGLVQAGGSLRLSCAASGYIFGWGYMGWYRQAPGKEREFVAAISQGASTNYADSVKGRFTISRDNAKNTVYLQMNSLKPEDTAVYYCAARYSDVYRYDYWGQGTQVTVSS

SEQ ID NO: 9630 - protein, 118 aa, Artificial Sequence
  Chemically Synthesized
QVQLQESGGGLVQAGGSLRLSCAASGTIFHRYTMGWYRQAPGKEREFVASIGVGATTYYADSVKGRFTISRDNAKNTVYLQMNSLKPEDTAVYYCAAVRYAWSGYDYWGQGTQVTVSS

SEQ ID NO: 9631 - protein, 118 aa, Artificial Sequence
  Chemically Synthesized
QVQLQESGGGLVQAGGSLRLSCAASGSISYRSDMGWYRQAPGKEREFVASIGFGTITNYADSVKGRFTISRDNAKNTVYLQMNSLKPEDTAVYYCAADADGWPYHYYWGQGTQVTVSS

SEQ ID NO: 9632 - protein, 118 aa, Artificial Sequence
  Chemically Synthesized
QVQLQESGGGLVQAGGSLRLSCAASGNISGQYSMGWYRQAPGKERELVATINIGGITNYADSVKGRFTISRDNAKNTVYLQMNSLKPEDTAVYYCAVVYGWDRGLYYWGQGTQVTVSS

SEQ ID NO: 9633 - protein, 113 aa, Artificial Sequence
  Chemically Synthesized
QVQLQESGGGLVQAGGSLRLSCAASGNIFGYLRMGWYRQAPGKEREFVALLLRVVLPYADSVKGRFTISRDNAKNTVYLQMNSLKPEDTAVYYCAADYILIYWGQGTQVTVSS

SEQ ID NO: 9634 - protein, 122 aa, Artificial Sequence
  Chemically Synthesized
QVQLQESGGGLVQAGGSLRLSCAASGSIFRIGSMGWYRQAPGKERELVATINDGSNTNYADSVKGRFTISRDNAKNTVYLQMNSLKPEDTAVYYCAAGKGHRGYEWYYLQYWGQGTQVTVSS

SEQ ID NO: 9635 - protein, 118 aa, Artificial Sequence
  Chemically Synthesized
QVQLQESGGGLVQAGGSLRLSCAASGNIFTVQYMGWYRQAPGKEREFVAAIDAGSNTNYADSVKGRFTISRDNAKNTVYLQMNSLKPEDTAVYYCAALYQLTRYHSYWGQGTQVTVSS

SEQ ID NO: 9636 - protein, 118 aa, Artificial Sequence
  Chemically Synthesized
QVQLQESGGGLVQAGGSLRLSCAASGSISQLSVMGWYRQAPGKERELVASINSGGSTNYADSVKGRFTISRDNAKNTVYLQMNSLKPEDTAVYYCAAINYGLAWHAYWGQGTQVTVSS

SEQ ID NO: 9637 - protein, 118 aa, Artificial Sequence
  Chemically Synthesized
QVQLQESGGGLVQAGGSLRLSCAASGYIFGDLDMGWYRQAPGKEREFVAAITPGGSTYYADSVKGRFTISRDNAKNTVYLQMNSLKPEDTAVYYCAATYLTYGAHSYWGQGTQVTVSS

SEQ ID NO: 9638 - protein, 117 aa, Artificial Sequence
  Chemically Synthesized
QVQLQESGGGLVQAGGSLRLSCAASGTISPAYMGWYRQAPGKEREFVAGINPGGNTYYADSVKGRFTISRDNAKNTVYLQMNSLKPEDTAVYYCAAIAYHDTLFGYWGQGTQVTVSS

SEQ ID NO: 9639 - protein, 126 aa, Artificial Sequence
  Chemically Synthesized
QVQLQESGGGLVQAGGSLRLSCAASGYIFAQAIMGWYRQAPGKERELVAAIDTGSITYYADSVKGRFTISRDNAKNTVYLQMNSLKPEDTAVYYCAVAWAQRDAYSSFYGRTHIYWGQGTQVTVSS

SEQ ID NO: 9640 - protein, 123 aa, Artificial Sequence
  Chemically Synthesized
QVQLQESGGGLVQAGGSLRLSCAASGYISRYRVMGWYRQAPGKEREFVAAIDLGGTTYYADSVKGRFTISRDNAKNTVYLQMNSLKPEDTAVYYCAAWYRGRGYTPYIWHRYWGQGTQVTVSS

SEQ ID NO: 9641 - protein, 116 aa, Artificial Sequence
  Chemically Synthesized
QVQLQESGGGLVQAGGSLRLSCAASGSISADCMGWYRQAPGKERELVASISFGTITNYADSVKGRFTISRDNAKNTVYLQMNSLKPEDTAVYYCAATTVRLVFLYWGQGTQVTVSS

SEQ ID NO: 9642 - protein, 118 aa, Artificial Sequence
  Chemically Synthesized
QVQLQESGGGLVQAGGSLRLSCAASGNISRSRGMGWYRQAPGKEREFVATIAPGASTNYADSVKGRFTISRDNAKNTVYLQMNSLKPEDTAVYYCAAIDWRGRWHWYWGQGTQVTVSS

SEQ ID NO: 9643 - protein, 118 aa, Artificial Sequence
  Chemically Synthesized
QVQLQESGGGLVQAGGSLRLSCAASGTIFIPIGMGWYRQAPGKEREFVAGIAVGGSTNYADSVKGRFTISRDNAKNTVYLQMNSLKPEDTAVYYCAAKRYFYPYRAYWGQGTQVTVSS

SEQ ID NO: 9644 - protein, 118 aa, Artificial Sequence
  Chemically Synthesized
QVQLQESGGGLVQAGGSLRLSCAASGTISGPYDMGWYRQAPGKERELVATISNGSSTYYADSVKGRFTISRDNAKNTVYLQMNSLKPEDTAVYYCAAVQPYYVKFSYWGQGTQVTVSS

SEQ ID NO: 9645 - protein, 122 aa, Artificial Sequence
  Chemically Synthesized
QVQLQESGGGLVQAGGSLRLSCAASGNIFTYYGMGWYRQAPGKEREFVAGIANGTITYYADSVKGRFTISRDNAKNTVYLQMNSLKPEDTAVYYCAVDKYHNYYRYRTHWYWGQGTQVTVSS

SEQ ID NO: 9646 - protein, 122 aa, Artificial Sequence
  Chemically Synthesized
QVQLQESGGGLVQAGGSLRLSCAASGTIFYLSYMGWYRQAPGKERELVAAITVGGSTNYADSVKGRFTISRDNAKNTVYLQMNSLKPEDTAVYYCAAYKPWWDPYRNGFNYWGQGTQVTVSS

SEQ ID NO: 9647 - protein, 122 aa, Artificial Sequence
  Chemically Synthesized
QVQLQESGGGLVQAGGSLRLSCAASGTIFTPYVMGWYRQAPGKEREFVASINVGATTNYADSVKGRFTISRDNAKNTVYLQMNSLKPEDTAVYYCAVQPFTTTLAGFDHVYWGQGTQVTVSS

SEQ ID NO: 9648 - protein, 121 aa, Artificial Sequence
  Chemically Synthesized
QVQLQESGGGLVQAGGSLRLSCAASGTIFYSEMGWYRQAPGKEREFVATIDQGTNTYYADSVKGRFTISRDNAKNTVYLQMNSLKPEDTAVYYCAVTEYTFDSERYDHDYWGQGTQVTVSS

SEQ ID NO: 9649 - protein, 118 aa, Artificial Sequence
  Chemically Synthesized
QVQLQESGGGLVQAGGSLRLSCAASGSISYSSQMGWYRQAPGKEREFVAAINYGSTTNYADSVKGRFTISRDNAKNTVYLQMNSLKPEDTAVYYCAVDRYSVQGHVYWGQGTQVTVSS

SEQ ID NO: 9650 - protein, 117 aa, Artificial Sequence
  Chemically Synthesized
QVQLQESGGGLVQAGGSLRLSCAASGTIFVDNGMGWYRQAPGKERELVASIAPGASTNYADSVKGRFTISRDNAKNTVYLQMNSLKPEDTAVYYCAATSTVTTLLYWGQGTQVTVSS

SEQ ID NO: 9651 - protein, 122 aa, Artificial Sequence
  Chemically Synthesized
QVQLQESGGGLVQAGGSLRLSCAASGNIFDGDVMGWYRQAPGKERELVATIGYGSNTNYADSVKGRFTISRDNAKNTVYLQMNSLKPEDTAVYYCAVYWYDGHILRDYLGYWGQGTQVTVSS

SEQ ID NO: 9652 - protein, 126 aa, Artificial Sequence
  Chemically Synthesized
QVQLQESGGGLVQAGGSLRLSCAASGYIFYRQYMGWYRQAPGKERELVAGIAKGAITYYADSVKGRFTISRDNAKNTVYLQMNSLKPEDTAVYYCAAGDTGASATFEVRGLSHNYWGQGTQVTVSS

SEQ ID NO: 9653 - protein, 118 aa, Artificial Sequence
  Chemically Synthesized
QVQLQESGGGLVQAGGSLRLSCAASGYIFTYIGMGWYRQAPGKEREFVAGIAYGSSTNYADSVKGRFTISRDNAKNTVYLQMNSLKPEDTAVYYCAVGWLLGTWYWYWGQGTQVTVSS

SEQ ID NO: 9654 - protein, 116 aa, Artificial Sequence
  Chemically Synthesized
QVQLQESGGGLVQAGGSLRLSCAASGYIFQYLPMGWYRQAPGKEREFVATIGAGGITYADSVKGRFTISRDNAKNTVYLQMNSLKPEDTAVYYCAVVNHFYDALYWGQGTQVTVSS

SEQ ID NO: 9655 - protein, 118 aa, Artificial Sequence
  Chemically Synthesized
QVQLQESGGGLVQAGGSLRLSCAASGNIFTDFKMGWYRQAPGKERELVAAIAVGGNTYYADSVKGRFTISRDNAKNTVYLQMNSLKPEDTAVYYCAALTVRRIIYYYWGQGTQVTVSS

SEQ ID NO: 9656 - protein, 122 aa, Artificial Sequence
  Chemically Synthesized
QVQLQESGGGLVQAGGSLRLSCAASGNISRAPYMGWYRQAPGKERELVAGISGGATTYYADSVKGRFTISRDNAKNTVYLQMNSLKPEDTAVYYCAVLDSNVYPHKYEHYYWGQGTQVTVSS

SEQ ID NO: 9657 - protein, 118 aa, Artificial Sequence
  Chemically Synthesized
QVQLQESGGGLVQAGGSLRLSCAASGTIFLPYGMGWYRQAPGKERELVASINRGGTTYYADSVKGRFTISRDNAKNTVYLQMNSLKPEDTAVYYCAALWERHRLYWYWGQGTQVTVSS

SEQ ID NO: 9658 - protein, 119 aa, Artificial Sequence
  Chemically Synthesized
QVQLQESGGGLVQAGGSLRLSCAASGSISQPRTMGWYRQAPGKEREFVAGINVGASTNYADSVKGRFTISRDNAKNTVYLQMNSLKPEDTAVYYCAVVYYDYDRYLGYWGQGTQVTVSS

SEQ ID NO: 9659 - protein, 117 aa, Artificial Sequence
  Chemically Synthesized
QVQLQESGGGLVQAGGSLRLSCAASGTISSYYDMGWYRQAPGKERELVAILVRVVLPYADSVKGRFTISRDNAKNTVYLQMNSLKPEDTAVYYCAAFPDVDSDFSYWGQGTQVTVSS

SEQ ID NO: 9660 - protein, 125 aa, Artificial Sequence
  Chemically Synthesized
QVQLQESGGGLVQAGGSLRLSCAASGYIFRQGSMGWYRQAPGKEREFVAAINYGSITYYADSVKGRFTISRDNAKNTVYLQMNSLKPEDTAVYYCAALPEDYLPYELTTTVLMYWGQGTQVTVSS

SEQ ID NO: 9661 - protein, 118 aa, Artificial Sequence
  Chemically Synthesized
QVQLQESGGGLVQAGGSLRLSCAASGNIFDPSDMGWYRQAPGKEREFVAAIDNGSTTYYADSVKGRFTISRDNAKNTVYLQMNSLKPEDTAVYYCAVIDNQSSDYLYWGQGTQVTVSS

SEQ ID NO: 9662 - protein, 126 aa, Artificial Sequence
  Chemically Synthesized
QVQLQESGGGLVQAGGSLRLSCAASGYISPLDRMGWYRQAPGKERELVASISDGSNTYYADSVKGRFTISRDNAKNTVYLQMNSLKPEDTAVYYCAVPDRYYPGRAEYRGDTHDYWGQGTQVTVSS

SEQ ID NO: 9663 - protein, 117 aa, Artificial Sequence
  Chemically Synthesized
QVQLQESGGGLVQAGGSLRLSCAASGTIFSGAAMGWYRQAPGKEREFVAGIGGGANTNYADSVKGRFTISRDNAKNTVYLQMNSLKPEDTAVYYCAAVSDPPYLCYWGQGTQVTVSS

SEQ ID NO: 9664 - protein, 125 aa, Artificial Sequence
  Chemically Synthesized
QVQLQESGGGLVQAGGSLRLSCAASGNIFDHYAMGWYRQAPGKERELVAGIAGGATTNYADSVKGRFTISRDNAKNTVYLQMNSLKPEDTAVYYCAAYSYYHLDVYTFGEPYQYWGQGTQVTVSS

SEQ ID NO: 9665 - protein, 112 aa, Artificial Sequence
  Chemically Synthesized
QVQLQESGGGLVQAGGSLRLSCAASGTISLVTMGWYRQAPGKERELVASITIGATTNYADSVKGRFTISRDNAKNTVYLQMNSLKPEDTAVYYCAATTTFYWGQGTQVTVSS

SEQ ID NO: 9666 - protein, 110 aa, Artificial Sequence
  Chemically Synthesized
QVQLQESGGGLVQAGGSLRLSCAASGTIFAGNYMGWYRQAPGKEREFVASINKGGNTYYADSVKGRFTISRDNAKNTVYLQMNSLKPEDTAVYYCAAMYWGQGTQVTVSS

SEQ ID NO: 9667 - protein, 121 aa, Artificial Sequence
  Chemically Synthesized
QVQLQESGGGLVQAGGSLRLSCAASGSIFPYPAMGWYRQAPGKEREFVAGISSVLIPYADSVKGRFTISRDNAKNTVYLQMNSLKPEDTAVYYCAAYLAIGILRQFAYPYWGQGTQVTVSS

SEQ ID NO: 9668 - protein, 118 aa, Artificial Sequence
  Chemically Synthesized
QVQLQESGGGLVQAGGSLRLSCAASGYIFNGYDMGWYRQAPGKERELVASIGSGTTTNYADSVKGRFTISRDNAKNTVYLQMNSLKPEDTAVYYCAVFAYIGSYYSYWGQGTQVTVSS

SEQ ID NO: 9669 - protein, 117 aa, Artificial Sequence
  Chemically Synthesized
QVQLQESGGGLVQAGGSLRLSCAASGTISRYVKMGWYRQAPGKEREFVATIDVGGITNYADSVKGRFTISRDNAKNTVYLQMNSLKPEDTAVYYCAVYSVFCRVMYWGQGTQVTVSS

SEQ ID NO: 9670 - protein, 118 aa, Artificial Sequence
  Chemically Synthesized
QVQLQESGGGLVQAGGSLRLSCAASGSISSNFFMGWYRQAPGKEREFVATINWGAITNYADSVKGRFTISRDNAKNTVYLQMNSLKPEDTAVYYCAALDGQNYRLYYWGQGTQVTVSS

SEQ ID NO: 9671 - protein, 121 aa, Artificial Sequence
  Chemically Synthesized
QVQLQESGGGLVQAGGSLRLSCAASGTISRSLMGWYRQAPGKEREFVAGINRGAITYYADSVKGRFTISRDNAKNTVYLQMNSLKPEDTAVYYCAVSADVYALWEIWFEYWGQGTQVTVSS

SEQ ID NO: 9672 - protein, 118 aa, Artificial Sequence
  Chemically Synthesized
QVQLQESGGGLVQAGGSLRLSCAASGSISTLRGMGWYRQAPGKEREFVAGIASGTTTNYADSVKGRFTISRDNAKNTVYLQMNSLKPEDTAVYYCAAIIYGGHYHWYWGQGTQVTVSS

SEQ ID NO: 9673 - protein, 118 aa, Artificial Sequence
  Chemically Synthesized
QVQLQESGGGLVQAGGSLRLSCAASGYISRQGTMGWYRQAPGKEREFVAGIDLGGNTNYADSVKGRFTISRDNAKNTVYLQMNSLKPEDTAVYYCAAVGRYNGLHYYWGQGTQVTVSS

SEQ ID NO: 9674 - protein, 118 aa, Artificial Sequence
  Chemically Synthesized
QVQLQESGGGLVQAGGSLRLSCAASGTISYVHYMGWYRQAPGKERELVATITYGGTTNYADSVKGRFTISRDNAKNTVYLQMNSLKPEDTAVYYCAAYAYPLYYFRYWGQGTQVTVSS

SEQ ID NO: 9675 - protein, 121 aa, Artificial Sequence
  Chemically Synthesized
QVQLQESGGGLVQAGGSLRLSCAASGTIFPLRTMGWYRQAPGKERELVATIDEGSITNYADSVKGRFTISRDNAKNTVYLQMNSLKPEDTAVYYCAAQYYTDLYSPRYFYWGQGTQVTVSS

SEQ ID NO: 9676 - protein, 118 aa, Artificial Sequence
  Chemically Synthesized
QVQLQESGGGLVQAGGSLRLSCAASGYISDANVMGWYRQAPGKEREFVAGISYGGSTNYADSVKGRFTISRDNAKNTVYLQMNSLKPEDTAVYYCAVLDTRGGYHAYWGQGTQVTVSS

SEQ ID NO: 9677 - protein, 118 aa, Artificial Sequence
  Chemically Synthesized
QVQLQESGGGLVQAGGSLRLSCAASGTISWDTIMGWYRQAPGKERELVAGISRGATTNYADSVKGRFTISRDNAKNTVYLQMNSLKPEDTAVYYCAAILYDGRYHHYWGQGTQVTVSS

SEQ ID NO: 9678 - protein, 122 aa, Artificial Sequence
  Chemically Synthesized
QVQLQESGGGLVQAGGSLRLSCAASGTISHQDTMGWYRQAPGKEREFVAAINYGGTTNYADSVKGRFTISRDNAKNTVYLQMNSLKPEDTAVYYCAALFYEYDDQGQYYYYWGQGTQVTVSS

SEQ ID NO: 9679 - protein, 126 aa, Artificial Sequence
  Chemically Synthesized
QVQLQESGGGLVQAGGSLRLSCAASGNISAPLIMGWYRQAPGKEREFVATIGGGTTTNYADSVKGRFTISRDNAKNTVYLQMNSLKPEDTAVYYCAAIIKRTSYQYRPPSLYHSYWGQGTQVTVSS

SEQ ID NO: 9680 - protein, 117 aa, Artificial Sequence
  Chemically Synthesized
QVQLQESGGGLVQAGGSLRLSCAASGSIFWRIYMGWYRQAPGKERELVAGIAPGSNTNYADSVKGRFTISRDNAKNTVYLQMNSLKPEDTAVYYCAAGASDVVVMYWGQGTQVTVSS

SEQ ID NO: 9681 - protein, 122 aa, Artificial Sequence
  Chemically Synthesized
QVQLQESGGGLVQAGGSLRLSCAASGTISDPRGMGWYRQAPGKEREFVASIANGASTYYADSVKGRFTISRDNAKNTVYLQMNSLKPEDTAVYYCAVPTPYNAVDLRHLNYWGQGTQVTVSS

SEQ ID NO: 9682 - protein, 118 aa, Artificial Sequence
  Chemically Synthesized
QVQLQESGGGLVQAGGSLRLSCAASGNIFRDDIMGWYRQAPGKERELVAAIANGGITNYADSVKGRFTISRDNAKNTVYLQMNSLKPEDTAVYYCAAYYAPDDNYSYWGQGTQVTVSS

SEQ ID NO: 9683 - protein, 118 aa, Artificial Sequence
  Chemically Synthesized
QVQLQESGGGLVQAGGSLRLSCAASGTIFTILVMGWYRQAPGKEREFVASINDGGNTNYADSVKGRFTISRDNAKNTVYLQMNSLKPEDTAVYYCAAVRVKQVRHYYWGQGTQVTVSS

SEQ ID NO: 9684 - protein, 122 aa, Artificial Sequence
  Chemically Synthesized
QVQLQESGGGLVQAGGSLRLSCAASGNISYSPWMGWYRQAPGKERELVAGINAGATTNYADSVKGRFTISRDNAKNTVYLQMNSLKPEDTAVYYCAATTYQYYDDTTDHAYWGQGTQVTVSS

SEQ ID NO: 9685 - protein, 121 aa, Artificial Sequence
  Chemically Synthesized
QVQLQESGGGLVQAGGSLRLSCAASGTISYGTYMGWYRQAPGKERELVAAIAYGTNTNYADSVKGRFTISRDNAKNTVYLQMNSLKPEDTAVYYCAAFRSTEGTVDGHVYWGQGTQVTVSS

SEQ ID NO: 9686 - protein, 118 aa, Artificial Sequence
  Chemically Synthesized
QVQLQESGGGLVQAGGSLRLSCAASGTISDSDAMGWYRQAPGKEREFVAGIGIGASTNYADSVKGRFTISRDNAKNTVYLQMNSLKPEDTAVYYCAAVTRLAGYFSYWGQGTQVTVSS

SEQ ID NO: 9687 - protein, 118 aa, Artificial Sequence
  Chemically Synthesized
QVQLQESGGGLVQAGGSLRLSCAASGNISARAPMGWYRQAPGKEREFVAAITYGATTNYADSVKGRFTISRDNAKNTVYLQMNSLKPEDTAVYYCAVVERTYRYLHYWGQGTQVTVSS

SEQ ID NO: 9688 - protein, 117 aa, Artificial Sequence
  Chemically Synthesized
QVQLQESGGGLVQAGGSLRLSCAASGSISPYNNMGWYRQAPGKEREFVAAIDQGTSTNYADSVKGRFTISRDNAKNTVYLQMNSLKPEDTAVYYCAAGYLSKLNMYWGQGTQVTVSS

SEQ ID NO: 9689 - protein, 118 aa, Artificial Sequence
  Chemically Synthesized
QVQLQESGGGLVQAGGSLRLSCAASGTISYSAAMGWYRQAPGKEREFVASITFGASTNYADSVKGRFTISRDNAKNTVYLQMNSLKPEDTAVYYCAVDGYTVPIYDYWGQGTQVTVSS

SEQ ID NO: 9690 - protein, 122 aa, Artificial Sequence
  Chemically Synthesized
QVQLQESGGGLVQAGGSLRLSCAASGSIFPHGSMGWYRQAPGKEREFVAGINYGGNTNYADSVKGRFTISRDNAKNTVYLQMNSLKPEDTAVYYCAVVYQESIAAYARHWYWGQGTQVTVSS

SEQ ID NO: 9691 - protein, 118 aa, Artificial Sequence
  Chemically Synthesized
QVQLQESGGGLVQAGGSLRLSCAASGTIFGSPYMGWYRQAPGKERELVAAISLGANTNYADSVKGRFTISRDNAKNTVYLQMNSLKPEDTAVYYCAAYAYYAAAYVYWGQGTQVTVSS

SEQ ID NO: 9692 - protein, 122 aa, Artificial Sequence
  Chemically Synthesized
QVQLQESGGGLVQAGGSLRLSCAASGNISAPHSMGWYRQAPGKEREFVASINYGGITYYADSVKGRFTISRDNAKNTVYLQMNSLKPEDTAVYYCAALANRGYSYITPHYYWGQGTQVTVSS

SEQ ID NO: 9693 - protein, 118 aa, Artificial Sequence
  Chemically Synthesized
QVQLQESGGGLVQAGGSLRLSCAASGTISYAGLMGWYRQAPGKEREFVAGIAPGSSTNYADSVKGRFTISRDNAKNTVYLQMNSLKPEDTAVYYCAALKNQEGWHSYWGQGTQVTVSS

SEQ ID NO: 9694 - protein, 118 aa, Artificial Sequence
  Chemically Synthesized
QVQLQESGGGLVQAGGSLRLSCAASGYISGSVRMGWYRQAPGKEREFVASIDDGGITNYADSVKGRFTISRDNAKNTVYLQMNSLKPEDTAVYYCAALLYRKYYHWYWGQGTQVTVSS

SEQ ID NO: 9695 - protein, 118 aa, Artificial Sequence
  Chemically Synthesized
QVQLQESGGGLVQAGGSLRLSCAASGTISTHTGMGWYRQAPGKEREFVAGISDGGITNYADSVKGRFTISRDNAKNTVYLQMNSLKPEDTAVYYCAAIYKLGTLFYYWGQGTQVTVSS

SEQ ID NO: 9696 - protein, 117 aa, Artificial Sequence
  Chemically Synthesized
QVQLQESGGGLVQAGGSLRLSCAASGYISWAGYMGWYRQAPGKEREFVASIGSVVIPYADSVKGRFTISRDNAKNTVYLQMNSLKPEDTAVYYCAAAGAYYVAFYYWGQGTQVTVSS

SEQ ID NO: 9697 - protein, 124 aa, Artificial Sequence
  Chemically Synthesized
QVQLQESGGGLVQAGGSLRLSCAASGTIFVWTAMGWYRQAPGKERELVASIAKGSKPYADSVKGRFTISRDNAKNTVYLQMNSLKPEDTAVYYCAVDSDRSVRQDRTTTLRMYWGQGTQVTVSS

SEQ ID NO: 9698 - protein, 118 aa, Artificial Sequence
  Chemically Synthesized
QVQLQESGGGLVQAGGSLRLSCAASGSIFSQFDMGWYRQAPGKEREFVAGITSGSSTYYADSVKGRFTISRDNAKNTVYLQMNSLKPEDTAVYYCAVDDYYTAGHQYWGQGTQVTVSS

SEQ ID NO: 9699 - protein, 110 aa, Artificial Sequence
  Chemically Synthesized
QVQLQESGGGLVQAGGSLRLSCAASGYIFDITAMGWYRQAPGKERELVAGIGRGGNTNYADSVKGRFTISRDNAKNTVYLQMNSLKPEDTAVYYCAVMYWGQGTQVTVSS

SEQ ID NO: 9700 - protein, 122 aa, Artificial Sequence
  Chemically Synthesized
QVQLQESGGGLVQAGGSLRLSCAASGTISDYIEMGWYRQAPGKEREFVAGIDDGTTTYYADSVKGRFTISRDNAKNTVYLQMNSLKPEDTAVYYCAVNWSPRTSDGDPYGYWGQGTQVTVSS

SEQ ID NO: 9701 - protein, 118 aa, Artificial Sequence
  Chemically Synthesized
QVQLQESGGGLVQAGGSLRLSCAASGYIFARRAMGWYRQAPGKERELVATIGPGGTTYYADSVKGRFTISRDNAKNTVYLQMNSLKPEDTAVYYCAVLYGLRADLSYWGQGTQVTVSS

SEQ ID NO: 9702 - protein, 116 aa, Artificial Sequence
  Chemically Synthesized
QVQLQESGGGLVQAGGSLRLSCAASGSIFDSMGWYRQAPGKEREFVAGISLGGNTNYADSVKGRFTISRDNAKNTVYLQMNSLKPEDTAVYYCAVTYRRIGHHYYWGQGTQVTVSS

SEQ ID NO: 9703 - protein, 121 aa, Artificial Sequence
  Chemically Synthesized
QVQLQESGGGLVQAGGSLRLSCAASGSIFRRVMGWYRQAPGKERELVAAISHGANTYYADSVKGRFTISRDNAKNTVYLQMNSLKPEDTAVYYCAAYAESQGDRGQSLWYWGQGTQVTVSS

SEQ ID NO: 9704 - protein, 118 aa, Artificial Sequence
  Chemically Synthesized
QVQLQESGGGLVQAGGSLRLSCAASGTISSTFYMGWYRQAPGKEREFVATIDWGATTYYADSVKGRFTISRDNAKNTVYLQMNSLKPEDTAVYYCAVLYWGAGRFWYWGQGTQVTVSS

SEQ ID NO: 9705 - protein, 122 aa, Artificial Sequence
  Chemically Synthesized
QVQLQESGGGLVQAGGSLRLSCAASGTISYYVSMGWYRQAPGKEREFVAAIAVGGSTYYADSVKGRFTISRDNAKNTVYLQMNSLKPEDTAVYYCAVGWGNYGYTVPIHFYWGQGTQVTVSS

SEQ ID NO: 9706 - protein, 122 aa, Artificial Sequence
  Chemically Synthesized
QVQLQESGGGLVQAGGSLRLSCAASGNISSWTVMGWYRQAPGKEREFVAAIGVGSTTNYADSVKGRFTISRDNAKNTVYLQMNSLKPEDTAVYYCAVVTQYYTPSSTYHYYWGQGTQVTVSS

SEQ ID NO: 9707 - protein, 117 aa, Artificial Sequence
  Chemically Synthesized
QVQLQESGGGLVQAGGSLRLSCAASGTIFQGDSMGWYRQAPGKERELVASISGGTTYYADSVKGRFTISRDNAKNTVYLQMNSLKPEDTAVYYCAAVAGAYRDLDYWGQGTQVTVSS

SEQ ID NO: 9708 - protein, 118 aa, Artificial Sequence
  Chemically Synthesized
QVQLQESGGGLVQAGGSLRLSCAASGSIFGGYGMGWYRQAPGKEREFVAGINYGGTTYYADSVKGRFTISRDNAKNTVYLQMNSLKPEDTAVYYCAVVGYTDGWHYYWGQGTQVTVSS

SEQ ID NO: 9709 - protein, 111 aa, Artificial Sequence
  Chemically Synthesized
QVQLQESGGGLVQAGGSLRLSCAASGYIFLIVVMGWYRQAPGKERELVATINFGANTNYADSVKGRFTISRDNAKNTVYLQMNSLKPEDTAVYYCAYYGYWGQGTQVTVSS

SEQ ID NO: 9710 - protein, 117 aa, Artificial Sequence
  Chemically Synthesized
QVQLQESGGGLVQAGGSLRLSCAASGSISGPLYMGWYRQAPGKERELVATIGGGNTNYADSVKGRFTISRDNAKNTVYLQMNSLKPEDTAVYYCAAVTYNAPYFGYWGQGTQVTVSS

SEQ ID NO: 9711 - protein, 126 aa, Artificial Sequence
  Chemically Synthesized
QVQLQESGGGLVQAGGSLRLSCAASGSIFYDRGMGWYRQAPGKERELVAGIATGSNTNYADSVKGRFTISRDNAKNTVYLQMNSLKPEDTAVYYCAVGIDPYQETASYLYRYHYYWGQGTQVTVSS

SEQ ID NO: 9712 - protein, 122 aa, Artificial Sequence
  Chemically Synthesized
QVQLQESGGGLVQAGGSLRLSCAASGNISASLYMGWYRQAPGKERELVAAIGDGASTYYADSVKGRFTISRDNAKNTVYLQMNSLKPEDTAVYYCAAPYHIPYLGGYYLRYWGQGTQVTVSS

SEQ ID NO: 9713 - protein, 118 aa, Artificial Sequence
  Chemically Synthesized
QVQLQESGGGLVQAGGSLRLSCAASGTIFNYYAMGWYRQAPGKEREFVATINHGSITNYADSVKGRFTISRDNAKNTVYLQMNSLKPEDTAVYYCAAVEQTIPHHWYWGQGTQVTVSS

SEQ ID NO: 9714 - protein, 114 aa, Artificial Sequence
  Chemically Synthesized
QVQLQESGGGLVQAGGSLRLSCAASGYISAVPNMGWYRQAPGKERELVATIGDGAITNYADSVKGRFTISRDNAKNTVYLQMNSLKPEDTAVYYCALTLTVMYWGQGTQVTVSS

SEQ ID NO: 9715 - protein, 117 aa, Artificial Sequence
  Chemically Synthesized
QVQLQESGGGLVQAGGSLRLSCAASGSIFYGDGMGWYRQAPGKERELVASIALGTSTNYADSVKGRFTISRDNAKNTVYLQMNSLKPEDTAVYYCAVYSGGDYVHYWGQGTQVTVSS

SEQ ID NO: 9716 - protein, 126 aa, Artificial Sequence
  Chemically Synthesized
QVQLQESGGGLVQAGGSLRLSCAASGTISGYKLMGWYRQAPGKERELVAGITYGTSTYYADSVKGRFTISRDNAKNTVYLQMNSLKPEDTAVYYCAVPLRRRDLTSDSYANIHVYWGQGTQVTVSS

SEQ ID NO: 9717 - protein, 119 aa, Artificial Sequence
  Chemically Synthesized
QVQLQESGGGLVQAGGSLRLSCAASGIFDEVYMGWYRQAPGKERELVATITKGSNTNYADSVKGRFTISRDNAKNTVYLQMNSLKPEDTAVYYCAAWEYQDDDWWHIYWGQGTQVTVSS

SEQ ID NO: 9718 - protein, 119 aa, Artificial Sequence
  Chemically Synthesized
QVQLQESGGGLVQAGGSLRLSCAASGTISDYILMGWYRQAPGKERELVATIDYGGTTTYYADSVKGRFTISRDNAKNTVYLQMNSLKPEDTAVYYCAANDPVGIVFTYWGQGTQVTVSS

SEQ ID NO: 9719 - protein, 122 aa, Artificial Sequence
  Chemically Synthesized
QVQLQESGGGLVQAGGSLRLSCAASGNISIVPYMGWYRQAPGKEREFVAAITYGSSTNYADSVKGRFTISRDNAKNTVYLQMNSLKPEDTAVYYCAADTYGDYYGDLRYDYWGQGTQVTVSS

SEQ ID NO: 9720 - protein, 118 aa, Artificial Sequence
  Chemically Synthesized
QVQLQESGGGLVQAGGSLRLSCAASGNIFAVYEMGWYRQAPGKERELVAAIGIGGTTYYADSVKGRFTISRDNAKNTVYLQMNSLKPEDTAVYYCAAGARTYDAYGYWGQGTQVTVSS

SEQ ID NO: 9721 - protein, 126 aa, Artificial Sequence
  Chemically Synthesized
QVQLQESGGGLVQAGGSLRLSCAASGTIFEPYEMGWYRQAPGKERELVATITDGGTTNYADSVKGRFTISRDNAKNTVYLQMNSLKPEDTAVYYCAADSYVLFIYLGYYYDALPYWGQGTQVTVSS

SEQ ID NO: 9722 - protein, 122 aa, Artificial Sequence
  Chemically Synthesized
QVQLQESGGGLVQAGGSLRLSCAASGSISFYLYMGWYRQAPGKERELVAGIAKGTSTYYADSVKGRFTISRDNAKNTVYLQMNSLKPEDTAVYYCAVAHDDGDSFGYNLYYWGQGTQVTVSS

SEQ ID NO: 9723 - protein, 122 aa, Artificial Sequence
  Chemically Synthesized
QVQLQESGGGLVQAGGSLRLSCAASGYIFYRPYMGWYRQAPGKERELVAGITSGGTTYYADSVKGRFTISRDNAKNTVYLQMNSLKPEDTAVYYCAVPYWSYSYSVEDYTYWGQGTQVTVSS

SEQ ID NO: 9724 - protein, 114 aa, Artificial Sequence
  Chemically Synthesized
QVQLQESGGGLVQAGGSLRLSCAASGTISGYDYMGWYRQAPGKERELVAAIGDGASTYYADSVKGRFTISRDNAKNTVYLQMNSLKPEDTAVYYCADNYGHLYWGQGTQVTVSS

SEQ ID NO: 9725 - protein, 122 aa, Artificial Sequence
  Chemically Synthesized
QVQLQESGGGLVQAGGSLRLSCAASGNISGGGYMGWYRQAPGKERELVAGITTGASTNYADSVKGRFTISRDNAKNTVYLQMNSLKPEDTAVYYCAASYGRQNEGYPDHDYWGQGTQVTVSS

SEQ ID NO: 9726 - protein, 121 aa, Artificial Sequence
  Chemically Synthesized
QVQLQESGGGLVQAGGSLRLSCAASGSIFWSNMGWYRQAPGKERELVASIDDGASTNYADSVKGRFTISRDNAKNTVYLQMNSLKPEDTAVYYCAAWDADSWDGYLDYQYWGQGTQVTVSS

SEQ ID NO: 9727 - protein, 117 aa, Artificial Sequence
  Chemically Synthesized
QVQLQESGGGLVQAGGSLRLSCAASGNISAFGVMGWYRQAPGKERELVAAIDAGTTPYADSVKGRFTISRDNAKNTVYLQMNSLKPEDTAVYYCAVWDPAREYLGYWGQGTQVTVSS

SEQ ID NO: 9728 - protein, 116 aa, Artificial Sequence
  Chemically Synthesized
QVQLQESGGGLVQAGGSLRLSCAASGSISYTMGWYRQAPGKERELVASIAVGSTTYYADSVKGRFTISRDNAKNTVYLQMNSLKPEDTAVYYCAVWYATSLAFDYWGQGTQVTVSS

SEQ ID NO: 9729 - protein, 118 aa, Artificial Sequence
  Chemically Synthesized
QVQLQESGGGLVQAGGSLRLSCAASGTISLYGYMGWYRQAPGKEREFVAGIAPGAITYYADSVKGRFTISRDNAKNTVYLQMNSLKPEDTAVYYCAVYRDVFTDLWYWGQGTQVTVSS

SEQ ID NO: 9730 - protein, 122 aa, Artificial Sequence
  Chemically Synthesized
QVQLQESGGGLVQAGGSLRLSCAASGYISFKYEMGWYRQAPGKERELVAGIGHGSTTNYADSVKGRFTISRDNAKNTVYLQMNSLKPEDTAVYYCAVDTGYNTISESQYVYWGQGTQVTVSS

SEQ ID NO: 9731 - protein, 118 aa, Artificial Sequence
  Chemically Synthesized
QVQLQESGGGLVQAGGSLRLSCAASGYISLPYSMGWYRQAPGKERELVATITDGSSTYYADSVKGRFTISRDNAKNTVYLQMNSLKPEDTAVYYCAAGIYYFAYHRYWGQGTQVTVSS

SEQ ID NO: 9732 - protein, 118 aa, Artificial Sequence
  Chemically Synthesized
QVQLQESGGGLVQAGGSLRLSCAASGNISQYYLMGWYRQAPGKEREFVASIAWGGITYYADSVKGRFTISRDNAKNTVYLQMNSLKPEDTAVYYCAAVEQGGPLYPYWGQGTQVTVSS

SEQ ID NO: 9733 - protein, 117 aa, Artificial Sequence
  Chemically Synthesized
QVQLQESGGGLVQAGGSLRLSCAASGTIFPIIVMGWYRQAPGKERELVAGIASGTSTYYADSVKGRFTISRDNAKNTVYLQMNSLKPEDTAVYYCAASNTLSNTIYWGQGTQVTVSS

SEQ ID NO: 9734 - protein, 120 aa, Artificial Sequence
  Chemically Synthesized
QVQLQESGGGLVQAGGSLRLSCAASGSISADLYMGWYRQAPGKEREFVAAITGSTTYYADSVKGRFTISRDNAKNTVYLQMNSLKPEDTAVYYCAVQDWRNSLCSSVLYWGQGTQVTVSS

SEQ ID NO: 9735 - protein, 118 aa, Artificial Sequence
  Chemically Synthesized
QVQLQESGGGLVQAGGSLRLSCAASGNISPELAMGWYRQAPGKEREFVATIGYGAITNYADSVKGRFTISRDNAKNTVYLQMNSLKPEDTAVYYCAVDNSRRGKFVYWGQGTQVTVSS

SEQ ID NO: 9736 - protein, 118 aa, Artificial Sequence
  Chemically Synthesized
QVQLQESGGGLVQAGGSLRLSCAASGYISPPDPMGWYRQAPGKEREFVASIGYGSITNYADSVKGRFTISRDNAKNTVYLQMNSLKPEDTAVYYCAVVWYRWDIFRYWGQGTQVTVSS

SEQ ID NO: 9737 - protein, 117 aa, Artificial Sequence
  Chemically Synthesized
QVQLQESGGGLVQAGGSLRLSCAASGTISAHGAMGWYRQAPGKERELVAGIGRGASTNYADSVKGRFTISRDNAKNTVYLQMNSLKPEDTAVYYCAVATFVNYRFYWGQGTQVTVSS

SEQ ID NO: 9738 - protein, 121 aa, Artificial Sequence
  Chemically Synthesized
QVQLQESGGGLVQAGGSLRLSCAASGSIFVVFMGWYRQAPGKEREFVAAIDVGGNTYYADSVKGRFTISRDNAKNTVYLQMNSLKPEDTAVYYCAAQGSDGLGQEDRFRYWGQGTQVTVSS

SEQ ID NO: 9739 - protein, 118 aa, Artificial Sequence
  Chemically Synthesized
QVQLQESGGGLVQAGGSLRLSCAASGTIFLTGAMGWYRQAPGKEREFVASINSGSSTNYADSVKGRFTISRDNAKNTVYLQMNSLKPEDTAVYYCAAVVYWAFDLLYWGQGTQVTVSS

SEQ ID NO: 9740 - protein, 112 aa, Artificial Sequence
  Chemically Synthesized
QVQLQESGGGLVQAGGSLRLSCAASGSISYSPVMGWYRQAPGKEREFVATITTGSITNYADSVKGRFTISRDNAKNTVYLQMNSLKPEDTAVYYCAVRFLYWGQGTQVTVSS

SEQ ID NO: 9741 - protein, 113 aa, Artificial Sequence
  Chemically Synthesized
QVQLQESGGGLVQAGGSLRLSCAASGNISHVYAMGWYRQAPGKERELVAAIAYGANTYYADSVKGRFTISRDNAKNTVYLQMNSLKPEDTAVYYCAAGDYYYWGQGTQVTVSS

SEQ ID NO: 9742 - protein, 116 aa, Artificial Sequence
  Chemically Synthesized
QVQLQESGGGLVQAGGSLRLSCAASGNISDYTSMGWYRQAPGKEREFVAAIDHGTTYADSVKGRFTISRDNAKNTVYLQMNSLKPEDTAVYYCAVGFGQSRGHPYWGQGTQVTVSS

SEQ ID NO: 9743 - protein, 121 aa, Artificial Sequence
  Chemically Synthesized
QVQLQESGGGLVQAGGSLRLSCAASGSISSYVQMGWYRQAPGKEREFVAAIGIGGTTYYADSVKGRFTISRDNAKNTVYLQMNSLKPEDTAVYYCAAWDSTTVLIVTCFYWGQGTQVTVSS

SEQ ID NO: 9744 - protein, 118 aa, Artificial Sequence
  Chemically Synthesized
QVQLQESGGGLVQAGGSLRLSCAASGNIFPSPYMGWYRQAPGKEREFVAGISTGGTTYYADSVKGRFTISRDNAKNTVYLQMNSLKPEDTAVYYCAVDRVFGTLHYYWGQGTQVTVSS

SEQ ID NO: 9745 - protein, 126 aa, Artificial Sequence
  Chemically Synthesized
QVQLQESGGGLVQAGGSLRLSCAASGTISGYDDMGWYRQAPGKEREFVAGIAYGSTTYYADSVKGRFTISRDNAKNTVYLQMNSLKPEDTAVYYCAVYDSAYPTTYYYVDAILWYWGQGTQVTVSS

SEQ ID NO: 9746 - protein, 122 aa, Artificial Sequence
  Chemically Synthesized
QVQLQESGGGLVQAGGSLRLSCAASGYISRKTNMGWYRQAPGKERELVATIGYGTSTNYADSVKGRFTISRDNAKNTVYLQMNSLKPEDTAVYYCAVFDWGGHHIDDTYGYWGQGTQVTVSS

SEQ ID NO: 9747 - protein, 118 aa, Artificial Sequence
  Chemically Synthesized
QVQLQESGGGLVQAGGSLRLSCAASGSIFPRHPMGWYRQAPGKEREFVAAIAFGANTYYADSVKGRFTISRDNAKNTVYLQMNSLKPEDTAVYYCAVVNYRLTAYGYWGQGTQVTVSS

SEQ ID NO: 9748 - protein, 118 aa, Artificial Sequence
  Chemically Synthesized
QVQLQESGGGLVQAGGSLRLSCAASGTIFATHGMGWYRQAPGKEREFVAGIDGGSSTYYADSVKGRFTISRDNAKNTVYLQMNSLKPEDTAVYYCAARYLYYRWFHYWGQGTQVTVSS

SEQ ID NO: 9749 - protein, 122 aa, Artificial Sequence
  Chemically Synthesized
QVQLQESGGGLVQAGGSLRLSCAASGYISFDGKMGWYRQAPGKERELVASITRGTTTNYADSVKGRFTISRDNAKNTVYLQMNSLKPEDTAVYYCAVADYQHSQGPPIHGYWGQGTQVTVSS

SEQ ID NO: 9750 - protein, 118 aa, Artificial Sequence
  Chemically Synthesized
QVQLQESGGGLVQAGGSLRLSCAASGTIFPPFLMGWYRQAPGKERELVAAIDDGTTTNYADSVKGRFTISRDNAKNTVYLQMNSLKPEDTAVYYCAVRRPNWPFLPYWGQGTQVTVSS

SEQ ID NO: 9751 - protein, 117 aa, Artificial Sequence
  Chemically Synthesized
QVQLQESGGGLVQAGGSLRLSCAASGSISLGRYMGWYRQAPGKERELVATIGTGGLPYADSVKGRFTISRDNAKNTVYLQMNSLKPEDTAVYYCAVPSRDTPLFPYWGQGTQVTVSS

SEQ ID NO: 9752 - protein, 115 aa, Artificial Sequence
  Chemically Synthesized
QVQLQESGGGLVQAGGSLRLSCAASGNISDSSYMGWYRQAPGKEREFVAGITYGGNTNYADSVKGRFTISRDNAKNTVYLQMNSLKPEDTAVYYCAVPGQYHTYWGQGTQVTVSS

SEQ ID NO: 9753 - protein, 118 aa, Artificial Sequence
  Chemically Synthesized
QVQLQESGGGLVQAGGSLRLSCAASGNIFVPQDMGWYRQAPGKEREFVAGINYGGNTYYADSVKGRFTISRDNAKNTVYLQMNSLKPEDTAVYYCAVSYVVKRYHVYWGQGTQVTVSS

SEQ ID NO: 9754 - protein, 117 aa, Artificial Sequence
  Chemically Synthesized
QVQLQESGGGLVQAGGSLRLSCAASGSISLSEIMGWYRQAPGKEREFVAAIGRGYYLYADSVKGRFTISRDNAKNTVYLQMNSLKPEDTAVYYCAAQWQRNGYHDYWGQGTQVTVSS

SEQ ID NO: 9755 - protein, 118 aa, Artificial Sequence
  Chemically Synthesized
QVQLQESGGGLVQAGGSLRLSCAASGNISSYLYMGWYRQAPGKEREFVASINYGSTTNYADSVKGRFTISRDNAKNTVYLQMNSLKPEDTAVYYCAADYTREHYHSYWGQGTQVTVSS

SEQ ID NO: 9756 - protein, 125 aa, Artificial Sequence
  Chemically Synthesized
QVQLQESGGGLVQAGGSLRLSCAASGSIFDVNDMGWYRQAPGKEREFVASITPGANTNYADSVKGRFTISRDNAKNTVYLQMNSLKPEDTAVYYCAAADDRFESTLTVFSNGFYWGQGTQVTVSS

SEQ ID NO: 9757 - protein, 118 aa, Artificial Sequence
  Chemically Synthesized
QVQLQESGGGLVQAGGSLRLSCAASGTIFYVDPMGWYRQAPGKERELVTTITDGTTTNYADSVKGRFTISRDNAKNTVYLQMNSLKPEDTAVYYCAVGYTEYRSHDYWGQGTQVTVSS

SEQ ID NO: 9758 - protein, 122 aa, Artificial Sequence
  Chemically Synthesized
QVQLQESGGGLVQAGGSLRLSCAASGYISFVGSMGWYRQAPGKERELVAAITYGGSTYYADSVKGRFTISRDNAKNTVYLQMNSLKPEDTAVYYCAAWGFYDTGDVYPHYYWGQGTQVTVSS

SEQ ID NO: 9759 - protein, 125 aa, Artificial Sequence
  Chemically Synthesized
QVQLQESGGGLVQAGGSLRLSCAASGTISILYYMGWYRQAPGKERELVASITYGTITYYADSVKGRFTISRDNAKNTVYLQMNSLKPEDTAVYYCAVLVDVYYYHDDRSPSYRYWGQGTQVTVSS

SEQ ID NO: 9760 - protein, 118 aa, Artificial Sequence
  Chemically Synthesized
QVQLQESGGGLVQAGGSLRLSCAASGSISPIYDMGWYRQAPGKEREFVASIGLGTNTYYADSVKGRFTISRDNAKNTVYLQMNSLKPEDTAVYYCAVYDTTPYTFPYWGQGTQVTVSS

SEQ ID NO: 9761 - protein, 118 aa, Artificial Sequence
  Chemically Synthesized
QVQLQESGGGLVQAGGSLRLSCAASGTIFADDGMGWYRQAPGKERELVATIDLGGITYYADSVKGRFTISRDNAKNTVYLQMNSLKPEDTAVYYCAVTGYLYPFHDYWGQGTQVTVSS

SEQ ID NO: 9762 - protein, 126 aa, Artificial Sequence
  Chemically Synthesized
QVQLQESGGGLVQAGGSLRLSCAASGNIFRLYDMGWYRQAPGKEREFVAAITYGTSTYYADSVKGRFTISRDNAKNTVYLQMNSLKPEDTAVYYCAVYYYRLYHDYLVQRSPFGYWGQGTQVTVSS

SEQ ID NO: 9763 - protein, 118 aa, Artificial Sequence
  Chemically Synthesized
QVQLQESGGGLVQAGGSLRLSCAASGSIFSRNSMGWYRQAPGKEREFVASISLGGTTNYADSVKGRFTISRDNAKNTVYLQMNSLKPEDTAVYYCAVYYSYLSYLHYWGQGTQVTVSS

SEQ ID NO: 9764 - protein, 117 aa, Artificial Sequence
  Chemically Synthesized
QVQLQESGGGLVQAGGSLRLSCAASGSIFVYYMGWYRQAPGKERELVAGINRGSSTNYADSVKGRFTISRDNAKNTVYLQMNSLKPEDTAVYYCAVYYGVYVYHDYWGQGTQVTVSS

SEQ ID NO: 9765 - protein, 126 aa, Artificial Sequence
  Chemically Synthesized
QVQLQESGGGLVQAGGSLRLSCAASGNIFQPGNMGWYRQAPGKEREFVAGIDYGGTTYYADSVKGRFTISRDNAKNTVYLQMNSLKPEDTAVYYCAADRRYSGFSDKQKRDFHYYWGQGTQVTVSS

SEQ ID NO: 9766 - protein, 117 aa, Artificial Sequence
  Chemically Synthesized
QVQLQESGGGLVQAGGSLRLSCAASGTIFRQSMGWYRQAPGKEREFVASITPGTTTNYADSVKGRFTISRDNAKNTVYLQMNSLKPEDTAVYYCAVAFLVTEDHDYWGQGTQVTVSS

SEQ ID NO: 9767 - protein, 112 aa, Artificial Sequence
  Chemically Synthesized
QVQLQESGGGLVQAGGSLRLSCAASGYISVRYDMGWYRQAPGKEREFVATIAPGGITYYADSVKGRFTISRDNAKNTVYLQMNSLKPEDTAVYYCAVLLLYWGQGTQVTVSS

SEQ ID NO: 9768 - protein, 118 aa, Artificial Sequence
  Chemically Synthesized
QVQLQESGGGLVQAGGSLRLSCAASGSISGRYVMGWYRQAPGKERELVASIDYGTNTNYADSVKGRFTISRDNAKNTVYLQMNSLKPEDTAVYYCAAYYRYDTGYSYWGQGTQVTVSS

SEQ ID NO: 9769 - protein, 118 aa, Artificial Sequence
  Chemically Synthesized
QVQLQESGGGLVQAGGSLRLSCAASGTIFYLRAMGWYRQAPGKEREFVAGITYGGITYYADSVKGRFTISRDNAKNTVYLQMNSLKPEDTAVYYCAVLYLTYYPLSYWGQGTQVTVSS

SEQ ID NO: 9770 - protein, 118 aa, Artificial Sequence
  Chemically Synthesized
QVQLQESGGGLVQAGGSLRLSCAASGSISYWGGMGWYRQAPGKEREFVAAISSGGITNYADSVKGRFTISRDNAKNTVYLQMNSLKPEDTAVYYCAVPVLGTGLLGYWGQGTQVTVSS

SEQ ID NO: 9771 - protein, 117 aa, Artificial Sequence
  Chemically Synthesized
QVQLQESGGGLVQAGGSLRLSCAASGTIFTSVMGWYRQAPGKEREFVATIAKGGSTYYADSVKGRFTISRDNAKNTVYLQMNSLKPEDTAVYYCAVYDTVSTGHRYWGQGTQVTVSS

SEQ ID NO: 9772 - protein, 118 aa, Artificial Sequence
  Chemically Synthesized
QVQLQESGGGLVQAGGSLRLSCAASGNISNGYYMGWYRQAPGKEREFVASIDRGSSTNYADSVKGRFTISRDNAKNTVYLQMNSLKPEDTAVYYCAVDGSLANGLYYWGQGTQVTVSS

SEQ ID NO: 9773 - protein, 122 aa, Artificial Sequence
  Chemically Synthesized
QVQLQESGGGLVQAGGSLRLSCAASGTISYVHYMGWYRQAPGKEREFVASISGGGSTNYADSVKGRFTISRDNAKNTVYLQMNSLKPEDTAVYYCAAGLIYKSSGNDEHYYWGQGTQVTVSS

SEQ ID NO: 9774 - protein, 126 aa, Artificial Sequence
  Chemically Synthesized
QVQLQESGGGLVQAGGSLRLSCAASGTIFNDSGMGWYRQAPGKERELVAAIASGTSTNYADSVKGRFTISRDNAKNTVYLQMNSLKPEDTAVYYCAAIPTKHSDVYRRRHVGYQYWGQGTQVTVSS

SEQ ID NO: 9775 - protein, 118 aa, Artificial Sequence
  Chemically Synthesized
QVQLQESGGGLVQAGGSLRLSCAASGSISDTSVMGWYRQAPGKEREFVAGIDGGTSTYYADSVKGRFTISRDNAKNTVYLQMNSLKPEDTAVYYCAVDIRAWVSHYYWGQGTQVTVSS

SEQ ID NO: 9776 - protein, 119 aa, Artificial Sequence
  Chemically Synthesized
QVQLQESGGGLVQAGGSLRLSCAASGNISLPPYMGWYRQAPGKEREFVASISFGGSTTNYADSVKGRFTISRDNAKNTVYLQMNSLKPEDTAVYYCAVSAQRDYYHSYWGQGTQVTVSS

SEQ ID NO: 9777 - protein, 122 aa, Artificial Sequence
  Chemically Synthesized
QVQLQESGGGLVQAGGSLRLSCAASGTISLAPYMGWYRQAPGKEREFVATITYGGSTNYADSVKGRFTISRDNAKNTVYLQMNSLKPEDTAVYYCAAITGGRSNSQRDHHYWGQGTQVTVSS

SEQ ID NO: 9778 - protein, 118 aa, Artificial Sequence
  Chemically Synthesized
QVQLQESGGGLVQAGGSLRLSCAASGSISLGPYMGWYRQAPGKEREFVAGINYGASTNYADSVKGRFTISRDNAKNTVYLQMNSLKPEDTAVYYCAARATPQRRYQYWGQGTQVTVSS

SEQ ID NO: 9779 - protein, 118 aa, Artificial Sequence
  Chemically Synthesized
QVQLQESGGGLVQAGGSLRLSCAASGNISLGPFMGWYRQAPGKERELVASITYGGTTNYADSVKGRFTISRDNAKNTVYLQMNSLKPEDTAVYYCAAYAARVSYHTYWGQGTQVTVSS

SEQ ID NO: 9780 - protein, 118 aa, Artificial Sequence
  Chemically Synthesized
QVQLQESGGGLVQAGGSLRLSCAASGYISRRGTMGWYRQAPGKEREFVAGIAVGGNTNYADSVKGRFTISRDNAKNTVYLQMNSLKPEDTAVYYCAAGAPPYYRFKYWGQGTQVTVSS

SEQ ID NO: 9781 - protein, 122 aa, Artificial Sequence
  Chemically Synthesized
QVQLQESGGGLVQAGGSLRLSCAASGSISRALVMGWYRQAPGKEREFVATISYGGNTYYADSVKGRFTISRDNAKNTVYLQMNSLKPEDTAVYYCAVDTVYRYFNGGPLRYWGQGTQVTVSS

SEQ ID NO: 9782 - protein, 122 aa, Artificial Sequence
  Chemically Synthesized
QVQLQESGGGLVQAGGSLRLSCAASGNISIGPYMGWYRQAPGKERELVATITTGSTTNYADSVKGRFTISRDNAKNTVYLQMNSLKPEDTAVYYCAALRYSRLYPNRQHTYWGQGTQVTVSS

SEQ ID NO: 9783 - protein, 118 aa, Artificial Sequence
  Chemically Synthesized
QVQLQESGGGLVQAGGSLRLSCAASGTISLGPHMGWYRQAPGKEREFVASIDYGANTYYADSVKGRFTISRDNAKNTVYLQMNSLKPEDTAVYYCAASGTRLPRYFYWGQGTQVTVSS

SEQ ID NO: 9784 - protein, 122 aa, Artificial Sequence
  Chemically Synthesized
QVQLQESGGGLVQAGGSLRLSCAASGNISYYGAMGWYRQAPGKERELVATINNGSNTYYADSVKGRFTISRDNAKNTVYLQMNSLKPEDTAVYYCAAIYYYGDEYDDGLWYWGQGTQVTVSS

SEQ ID NO: 9785 - protein, 118 aa, Artificial Sequence
  Chemically Synthesized
QVQLQESGGGLVQAGGSLRLSCAASGTIFRGYYMGWYRQAPGKERELVASITYGTTTNYADSVKGRFTISRDNAKNTVYLQMNSLKPEDTAVYYCAAGAPPYYRFKYWGQGTQVTVSS

SEQ ID NO: 9786 - protein, 122 aa, Artificial Sequence
  Chemically Synthesized
QVQLQESGGGLVQAGGSLRLSCAASGNIFLPYGMGWYRQAPGKERELVAAIGYGGITNYADSVKGRFTISRDNAKNTVYLQMNSLKPEDTAVYYCAAAIPARDRTTFRHYYWGQGTQVTVSS

SEQ ID NO: 9787 - protein, 122 aa, Artificial Sequence
  Chemically Synthesized
QVQLQESGGGLVQAGGSLRLSCAASGNISIGPYMGWYRQAPGKEREFVATITYGGSTNYADSVKGRFTISRDNAKNTVYLQMNSLKPEDTAVYYCAAITGGRSNSQRDHHYWGQGTQVTVSS

SEQ ID NO: 9788 - protein, 122 aa, Artificial Sequence
  Chemically Synthesized
QVQLQESGGGLVQAGGSLRLSCAASGNISLGPYMGWYRQAPGKERELVATITYGGTTNYADSVKGRFTISRDNAKNTVYLQMNSLKPEDTAVYYCAVIPWRQIADYRGYHYWGQGTQVTVSS

SEQ ID NO: 9789 - protein, 118 aa, Artificial Sequence
  Chemically Synthesized
QVQLQESGGGLVQAGGSLRLSCAASGYISLGPYMGWYRQAPGKEREFVATITYGGTTYYADSVKGRFTISRDNAKNTVYLQMNSLKPEDTAVYYCAAFGRLSGGHYYWGQGTQVTVSS

SEQ ID NO: 9790 - protein, 123 aa, Artificial Sequence
  Chemically Synthesized
QVQLQESGGGLVQAGGSLRLSCAASGNISLPPYMGWYRQAPGKEREFVASISFGGSTTNYADSVKGRFTISRDNAKNTVYLQMNSLKPEDTAVYYCAALRYSRLYPNRQHTYWGQGTQVTVSS

SEQ ID NO: 9791 - protein, 122 aa, Artificial Sequence
  Chemically Synthesized
QVQLQESGGGLVQAGGSLRLSCAASGSISRWPGMGWYRQAPGKEREFVASITRGATTNYADSVKGRFTISRDNAKNTVYLQMNSLKPEDTAVYYCAAITGGRSNSQRDHHYWGQGTQVTVSS

SEQ ID NO: 9792 - protein, 118 aa, Artificial Sequence
  Chemically Synthesized
QVQLQESGGGLVQAGGSLRLSCAASGNISIGPYMGWYRQAPGKERELVATITTGSTTNYADSVKGRFTISRDNAKNTVYLQMNSLKPEDTAVYYCAAPRRYGPTHTYWGQGTQVTVSS

SEQ ID NO: 9793 - protein, 122 aa, Artificial Sequence
  Chemically Synthesized
QVQLQESGGGLVQAGGSLRLSCAASGYISRRGTMGWYRQAPGKEREFVAGIAVGGNTNYADSVKGRFTISRDNAKNTVYLQMNSLKPEDTAVYYCAAITGGRSNSQRDHHYWGQGTQVTVSS

SEQ ID NO: 9794 - protein, 118 aa, Artificial Sequence
  Chemically Synthesized
QVQLQESGGGLVQAGGSLRLSCAASGTISQYRPMGWYRQAPGKERELVAAIGRGSSTYYADSVKGRFTISRDNAKNTVYLQMNSLKPEDTAVYYCAAGAPPYYRFKYWGQGTQVTVSS

SEQ ID NO: 9795 - protein, 118 aa, Artificial Sequence
  Chemically Synthesized
QVQLQESGGGLVQAGGSLRLSCAASGSISLGPYMGWYRQAPGKEREFVAGITYGGTTNYADSVKGRFTISRDNAKNTVYLQMNSLKPEDTAVYYCAARSRHNKWYNYWGQGTQVTVSS

SEQ ID NO: 9796 - protein, 122 aa, Artificial Sequence
  Chemically Synthesized
QVQLQESGGGLVQAGGSLRLSCAASGTISLAPYMGWYRQAPGKEREFVATITYGGSTNYADSVKGRFTISRDNAKNTVYLQMNSLKPEDTAVYYCAALRYSRLYPNRQHTYWGQGTQVTVSS

SEQ ID NO: 9797 - protein, 122 aa, Artificial Sequence
  Chemically Synthesized
QVQLQESGGGLVQAGGSLRLSCAASGYIFAAAPMGWYRQAPGKEREFVAAITDGASTNYADSVKGRFTISRDNAKNTVYLQMNSLKPEDTAVYYCAAIVGYRGAQDEYLLYWGQGTQVTVSS

SEQ ID NO: 9798 - protein, 122 aa, Artificial Sequence
  Chemically Synthesized
QVQLQESGGGLVQAGGSLRLSCAASGTIFPFFPMGWYRQAPGKEREFVAAINVGGSTNYADSVKGRFTISRDNAKNTVYLQMNSLKPEDTAVYYCAAAVRDAYRYDTYLQYWGQGTQVTVSS

SEQ ID NO: 9799 - protein, 122 aa, Artificial Sequence
  Chemically Synthesized
QVQLQESGGGLVQAGGSLRLSCAASGTIFVDTPMGWYRQAPGKEREFVAGINQGATTNYADSVKGRFTISRDNAKNTVYLQMNSLKPEDTAVYYCAAISTAEDYRHGYLLYWGQGTQVTVSS

SEQ ID NO: 9800 - protein, 122 aa, Artificial Sequence
  Chemically Synthesized
QVQLQESGGGLVQAGGSLRLSCAASGNISYEPSMGWYRQAPGKEREFVAGIASGGSTNYADSVKGRFTISRDNAKNTVYLQMNSLKPEDTAVYYCAAILYYLIYADAYHLYWGQGTQVTVSS

SEQ ID NO: 9801 - protein, 117 aa, Artificial Sequence
  Chemically Synthesized
QVQLQESGGGLVQAGGSLRLSCAASGTIFGYSMGWYRQAPGKERELVASIDRGSNTYYADSVKGRFTISRDNAKNTVYLQMNSLKPEDTAVYYCAAPGKLRIDHSYWGQGTQVTVSS

SEQ ID NO: 9802 - protein, 126 aa, Artificial Sequence
  Chemically Synthesized
QVQLQESGGGLVQAGGSLRLSCAASGTIFPGSGMGWYRQAPGKEREFVAGINDGGITNYADSVKGRFTISRDNAKNTVYLQMNSLKPEDTAVYYCAAIGQDDSSTYPGDDAYHLYWGQGTQVTVSS

SEQ ID NO: 9803 - protein, 122 aa, Artificial Sequence
  Chemically Synthesized
QVQLQESGGGLVQAGGSLRLSCAASGSISDYLGMGWYRQAPGKEREFVAAINHGSSTNYADSVKGRFTISRDNAKNTVYLQMNSLKPEDTAVYYCAALRYDVGGDYSTLQYWGQGTQVTVSS

SEQ ID NO: 9804 - protein, 117 aa, Artificial Sequence
  Chemically Synthesized
QVQLQESGGGLVQAGGSLRLSCAASGNIFQRVPMGWYRQAPGKERELVASINYGGNTNYADSVKGRFTISRDNAKNTVYLQMNSLKPEDTAVYYCAADRATPYSIYWGQGTQVTVSS

SEQ ID NO: 9805 - protein, 118 aa, Artificial Sequence
  Chemically Synthesized
QVQLQESGGGLVQAGGSLRLSCAASGSISDDGDMGWYRQAPGKEREFVASIAHGTNTNYADSVKGRFTISRDNAKNTVYLQMNSLKPEDTAVYYCAADSKQGSALGYWGQGTQVTVSS

SEQ ID NO: 9806 - protein, 125 aa, Artificial Sequence
  Chemically Synthesized
QVQLQESGGGLVQAGGSLRLSCAASGNISAPPAMGWYRQAPGKEREFVPVLITVVLPYADSVKGRFTISRDNAKNTVYLQMNSLKPEDTAVYYCAVEGPSTYDPTGRYTDWFAYWGQGTQVTVSS

SEQ ID NO: 9807 - protein, 122 aa, Artificial Sequence
  Chemically Synthesized
QVQLQESGGGLVQAGGSLRLSCAASGTISRLYAMGWYRQAPGKEREFVATINVGATTYYADSVKGRFTISRDNAKNTVYLQMNSLKPEDTAVYYCAALYVIGDYDYGSHQYWGQGTQVTVSS

SEQ ID NO: 9808 - protein, 122 aa, Artificial Sequence
  Chemically Synthesized
QVQLQESGGGLVQAGGSLRLSCAASGTISQALPMGWYRQAPGKEREFVAAISSGASTNYADSVKGRFTISRDNAKNTVYLQMNSLKPEDTAVYYCAAIDLTHDDEDAYYLYWGQGTQVTVSS

SEQ ID NO: 9809 - protein, 118 aa, Artificial Sequence
  Chemically Synthesized
QVQLQESGGGLVQAGGSLRLSCAASGTISRYWDMGWYRQAPGKERELVAGIAEGTTTYYADSVKGRFTISRDNAKNTVYLQMNSLKPEDTAVYYCAADRTDHDAHIYWGQGTQVTVSS

SEQ ID NO: 9810 - protein, 122 aa, Artificial Sequence
  Chemically Synthesized
QVQLQESGGGLVQAGGSLRLSCAASGNISIYRDMGWYRQAPGKEREFVASISGGANTNYADSVKGRFTISRDNAKNTVYLQMNSLKPEDTAVYYCAANPANFVHRYRALFYWGQGTQVTVSS

SEQ ID NO: 9811 - protein, 118 aa, Artificial Sequence
  Chemically Synthesized
QVQLQESGGGLVQAGGSLRLSCAASGSISRRNAMGWYRQAPGKERELVAGIGPGTSTNYADSVKGRFTISRDNAKNTVYLQMNSLKPEDTAVYYCAAGYTEDSTLWYWGQGTQVTVSS

SEQ ID NO: 9812 - protein, 118 aa, Artificial Sequence
  Chemically Synthesized
QVQLQESGGGLVQAGGSLRLSCAASGTISPRDDMGWYRQAPGKEREFVASISEGGTTNYADSVKGRFTISRDNAKNTVYLQMNSLKPEDTAVYYCAVRFGTYYAFPYWGQGTQVTVSS

SEQ ID NO: 9813 - protein, 122 aa, Artificial Sequence
  Chemically Synthesized
QVQLQESGGGLVQAGGSLRLSCAASGTIFRLHGMGWYRQAPGKEREFVAAINEGATTNYADSVKGRFTISRDNAKNTVYLQMNSLKPEDTAVYYCAALGSGISVDGVYYQYWGQGTQVTVSS

SEQ ID NO: 9814 - protein, 122 aa, Artificial Sequence
  Chemically Synthesized
QVQLQESGGGLVQAGGSLRLSCAASGTIFTFGPMGWYRQAPGKEREFVAGITGGTITNYADSVKGRFTISRDNAKNTVYLQMNSLKPEDTAVYYCAAVDRYQGHANEFYLYWGQGTQVTVSS

SEQ ID NO: 9815 - protein, 119 aa, Artificial Sequence
  Chemically Synthesized
QVQLQESGGGLVQAGGSLRLSCAASGTISPDDLMGWYRQAPGKERELVAAIGSGGTTNYADSVKGRFTISRDNAKNTVYLQMNSLKPEDTAVYYCAADQYEAYIILYYWGQGTQVTVSS

SEQ ID NO: 9816 - protein, 118 aa, Artificial Sequence
  Chemically Synthesized
QVQLQESGGGLVQAGGSLRLSCAASGSIFGSFDMGWYRQAPGKEREFVAAIGTGASTYYADSVKGRFTISRDNAKNTVYLQMNSLKPEDTAVYYCAVWTYDDPRHYYWGQGTQVTVSS

SEQ ID NO: 9817 - protein, 122 aa, Artificial Sequence
  Chemically Synthesized
QVQLQESGGGLVQAGGSLRLSCAASGSISGSITMGWYRQAPGKERELVATIDYGTTTNYADSVKGRFTISRDNAKNTVYLQMNSLKPEDTAVYYCAAVAGYASLGYDYYPYWGQGTQVTVSS

SEQ ID NO: 9818 - protein, 124 aa, Artificial Sequence
  Chemically Synthesized
QVQLQESGGGLVQAGGSLRLSCAASGTIFYTRYMGWYRQAPGKERELVATIGYGSNTYYADSVKGRFTISRDNAKNTVYLQMNSLKPEDTAVYYCAVIVRQWYGYPHEWSHRYWGQGTQVTVSS

SEQ ID NO: 9819 - protein, 121 aa, Artificial Sequence
  Chemically Synthesized
QVQLQESGGGLVQAGGSLRLSCAASGYISPNVTMGWYRQAPGKEREFVPLLIWVVIPYADSVKGRFTISRDNAKNTVYLQMNSLKPEDTAVYYCAAPDRGYHWPEDNHRYWGQGTQVTVSS

SEQ ID NO: 9820 - protein, 126 aa, Artificial Sequence
  Chemically Synthesized
QVQLQESGGGLVQAGGSLRLSCAASGSIFTIAGMGWYRQAPGKEREFVAGITYGATTNYADSVKGRFTISRDNAKNTVYLQMNSLKPEDTAVYYCAVIIDYVYELPNVDHYYHQYWGQGTQVTVSS

SEQ ID NO: 9821 - protein, 126 aa, Artificial Sequence
  Chemically Synthesized
QVQLQESGGGLVQAGGSLRLSCAASGSISGWSKMGWYRQAPGKERELVATINGGTTTNYADSVKGRFTISRDNAKNTVYLQMNSLKPEDTAVYYCAVYYPYRYHGPSSVYELYYYWGQGTQVTVSS

SEQ ID NO: 9822 - protein, 126 aa, Artificial Sequence
  Chemically Synthesized
QVQLQESGGGLVQAGGSLRLSCAASGSISGYIYMGWYRQAPGKERELVATISLGTNTYYADSVKGRFTISRDNAKNTVYLQMNSLKPEDTAVYYCAAYYAYDNYTNDRQKYYYGYWGQGTQVTVSS

SEQ ID NO: 9823 - protein, 122 aa, Artificial Sequence
  Chemically Synthesized
QVQLQESGGGLVQAGGSLRLSCAASGTIFFPYSMGWYRQAPGKERELVATITSGGSTYYADSVKGRFTISRDNAKNTVYLQMNSLKPEDTAVYYCAARYWQRSSRRERFNYWGQGTQVTVSS

SEQ ID NO: 9824 - protein, 126 aa, Artificial Sequence
  Chemically Synthesized
QVQLQESGGGLVQAGGSLRLSCAASGNIFRDDPMGWYRQAPGKEREFVAGINDGSITNYADSVKGRFTISRDNAKNTVYLQMNSLKPEDTAVYYCAANLRERDTDGGQWDAWHQYWGQGTQVTVSS

SEQ ID NO: 9825 - protein, 110 aa, Artificial Sequence
  Chemically Synthesized
QVQLQESGGGLVQAGGSLRLSCAASGTIFGDYVMGWYRQAPGKERELVAAITYGTNTNYADSVKGRFTISRDNAKNTVYLQMNSLKPEDTAVYYCALIYWGQGTQVTVSS

SEQ ID NO: 9826 - protein, 122 aa, Artificial Sequence
  Chemically Synthesized
QVQLQESGGGLVQAGGSLRLSCAASGTISYYLDMGWYRQAPGKEREFVAAIGYGSSTNYADSVKGRFTISRDNAKNTVYLQMNSLKPEDTAVYYCAVFFQHYANAAGDLWYWGQGTQVTVSS

SEQ ID NO: 9827 - protein, 126 aa, Artificial Sequence
  Chemically Synthesized
QVQLQESGGGLVQAGGSLRLSCAASGSISALVAMGWYRQAPGKEREFVAGISGGAITNYADSVKGRFTISRDNAKNTVYLQMNSLKPEDTAVYYCAVLYYYAHRAGTASGDTFQYWGQGTQVTVSS

SEQ ID NO: 9828 - protein, 118 aa, Artificial Sequence
  Chemically Synthesized
QVQLQESGGGLVQAGGSLRLSCAASGNIFPGTWMGWYRQAPGKEREFVAAIASGSITYYADSVKGRFTISRDNAKNTVYLQMNSLKPEDTAVYYCAVNYLYSDKYSYWGQGTQVTVSS

SEQ ID NO: 9829 - protein, 126 aa, Artificial Sequence
  Chemically Synthesized
QVQLQESGGGLVQAGGSLRLSCAASGSIFVTGYMGWYRQAPGKEREFVAGISPGSSTYYADSVKGRFTISRDNAKNTVYLQMNSLKPEDTAVYYCAAFSQSTAPQPSFYIYFHDYWGQGTQVTVSS

SEQ ID NO: 9830 - protein, 118 aa, Artificial Sequence
  Chemically Synthesized
QVQLQESGGGLVQAGGSLRLSCAASGSIFAQSAMGWYRQAPGKERELVAAISRGTTTNYADSVKGRFTISRDNAKNTVYLQMNSLKPEDTAVYYCAAYGYLQEFYVYWGQGTQVTVSS

SEQ ID NO: 9831 - protein, 118 aa, Artificial Sequence
  Chemically Synthesized
QVQLQESGGGLVQAGGSLRLSCAASGTISRALYMGWYRQAPGKEREFVAGIDAGSNTYYADSVKGRFTISRDNAKNTVYLQMNSLKPEDTAVYYCAVTGSYDTDHSYWGQGTQVTVSS

SEQ ID NO: 9832 - protein, 125 aa, Artificial Sequence
  Chemically Synthesized
QVQLQESGGGLVQAGGSLRLSCAASGNISGTGHMGWYRQAPGKERELVAGIALGVVPYADSVKGRFTISRDNAKNTVYLQMNSLKPEDTAVYYCAVRTRDPYGKALYVPTQHYYWGQGTQVTVSS

SEQ ID NO: 9833 - protein, 122 aa, Artificial Sequence
  Chemically Synthesized
QVQLQESGGGLVQAGGSLRLSCAASGNISPWNAMGWYRQAPGKERELVAGINRGAITNYADSVKGRFTISRDNAKNTVYLQMNSLKPEDTAVYYCAAWRKYARYRYTRHDYWGQGTQVTVSS

SEQ ID NO: 9834 - protein, 122 aa, Artificial Sequence
  Chemically Synthesized
QVQLQESGGGLVQAGGSLRLSCAASGTISDHLDMGWYRQAPGKEREFVAAIGDGGNTYYADSVKGRFTISRDNAKNTVYLQMNSLKPEDTAVYYCAVYFYGIYLRGDTYQYWGQGTQVTVSS

SEQ ID NO: 9835 - protein, 122 aa, Artificial Sequence
  Chemically Synthesized
QVQLQESGGGLVQAGGSLRLSCAASGNISRRGFMGWYRQAPGKERELVATIDRGGNTNYADSVKGRFTISRDNAKNTVYLQMNSLKPEDTAVYYCAVNVGDTPRKWHALRYWGQGTQVTVSS

SEQ ID NO: 9836 - protein, 121 aa, Artificial Sequence
  Chemically Synthesized
QVQLQESGGGLVQAGGSLRLSCAASGNISRVYGMGWYRQAPGKEREFVASISPGSTNYADSVKGRFTISRDNAKNTVYLQMNSLKPEDTAVYYCAVIITYYATTSEYYQYWGQGTQVTVSS

SEQ ID NO: 9837 - protein, 118 aa, Artificial Sequence
  Chemically Synthesized
QVQLQESGGGLVQAGGSLRLSCAASGTIFSPRGMGWYRQAPGKERELVASITYGANTYYADSVKGRFTISRDNAKNTVYLQMNSLKPEDTAVYYCAVYYQRLWGLYYWGQGTQVTVSS

SEQ ID NO: 9838 - protein, 118 aa, Artificial Sequence
  Chemically Synthesized
QVQLQESGGGLVQAGGSLRLSCAASGNIFGLDYMGWYRQAPGKEREFVAGITQGTITNYADSVKGRFTISRDNAKNTVYLQMNSLKPEDTAVYYCAVGNDGSDDHTYWGQGTQVTVSS

SEQ ID NO: 9839 - protein, 120 aa, Artificial Sequence
  Chemically Synthesized
QVQLQESGGGLVQAGGSLRLSCAASGNIFGSYYMGWYRQAPGKERELVAAITNGTSTYYADSVKGRFTISRDNAKNTVYLQMNSLKPEDTAVYYCAVSDDRYPDDYHYYWGQGTQVTVSS

SEQ ID NO: 9840 - protein, 126 aa, Artificial Sequence
  Chemically Synthesized
QVQLQESGGGLVQAGGSLRLSCAASGTIFAPRPMGWYRQAPGKEREFVAAIAVGASTNYADSVKGRFTISRDNAKNTVYLQMNSLKPEDTAVYYCAVPIWAISGYYRLDSPYFIYWGQGTQVTVSS

SEQ ID NO: 9841 - protein, 122 aa, Artificial Sequence
  Chemically Synthesized
QVQLQESGGGLVQAGGSLRLSCAASGTIFAPSDMGWYRQAPGKEREFVASIGPGSITNYADSVKGRFTISRDNAKNTVYLQMNSLKPEDTAVYYCAVQSKVGYVPLYKYDYWGQGTQVTVSS

SEQ ID NO: 9842 - protein, 122 aa, Artificial Sequence
  Chemically Synthesized
QVQLQESGGGLVQAGGSLRLSCAASGSISDGGGMGWYRQAPGKERELVAAISLGANTYYADSVKGRFTISRDNAKNTVYLQMNSLKPEDTAVYYCAAGLGGRWDDYYLHLYWGQGTQVTVSS

SEQ ID NO: 9843 - protein, 117 aa, Artificial Sequence
  Chemically Synthesized
QVQLQESGGGLVQAGGSLRLSCAASGSIFSGYVMGWYRQAPGKERELVAGIDKGTSTNYADSVKGRFTISRDNAKNTVYLQMNSLKPEDTAVYYCAAFPSLCTSIYWGQGTQVTVSS

SEQ ID NO: 9844 - protein, 122 aa, Artificial Sequence
  Chemically Synthesized
QVQLQESGGGLVQAGGSLRLSCAASGSISNIYYMGWYRQAPGKEREFVASIGSGAITNYADSVKGRFTISRDNAKNTVYLQMNSLKPEDTAVYYCAALYHGYDRPNYYYQYWGQGTQVTVSS

SEQ ID NO: 9845 - protein, 122 aa, Artificial Sequence
  Chemically Synthesized
QVQLQESGGGLVQAGGSLRLSCAASGTIFPPYYMGWYRQAPGKEREFVATITDGTSTYYADSVKGRFTISRDNAKNTVYLQMNSLKPEDTAVYYCAVPYTWVLDWLYRLYYWGQGTQVTVSS

SEQ ID NO: 9846 - protein, 117 aa, Artificial Sequence
  Chemically Synthesized
QVQLQESGGGLVQAGGSLRLSCAASGNIFWYGSMGWYRQAPGKEREFVATISWGSITYYADSVKGRFTISRDNAKNTVYLQMNSLKPEDTAVYYCAVPTRDPPYYYWGQGTQVTVSS

SEQ ID NO: 9847 - protein, 118 aa, Artificial Sequence
  Chemically Synthesized
QVQLQESGGGLVQAGGSLRLSCAASGNISDGGYMGWYRQAPGKEREFVAAISYGGTTNYADSVKGRFTISRDNAKNTVYLQMNSLKPEDTAVYYCAALYYRYDYHWYWGQGTQVTVSS

SEQ ID NO: 9848 - protein, 118 aa, Artificial Sequence
  Chemically Synthesized
QVQLQESGGGLVQAGGSLRLSCAASGNISYLRGMGWYRQAPGKEREFVAAIGRGANTYYADSVKGRFTISRDNAKNTVYLQMNSLKPEDTAVYYCAVYVRRYYSHYYWGQGTQVTVSS

SEQ ID NO: 9849 - protein, 114 aa, Artificial Sequence
  Chemically Synthesized
QVQLQESGGGLVQAGGSLRLSCAASGTISKDLQRMGWYRQAPGKEREFVASITYGGSTNYADSVKGRFTISRDNAKNTVYLQMNSLKPEDTAVYYCAAYPLWYWGQGTQVTVSS

SEQ ID NO: 9850 - protein, 122 aa, Artificial Sequence
  Chemically Synthesized
QVQLQESGGGLVQAGGSLRLSCAASGNIFSDSNMGWYRQAPGKEREFVAAITAGGITNYADSVKGRFTISRDNAKNTVYLQMNSLKPEDTAVYYCAALQSKRTVSKYYLYYWGQGTQVTVSS

SEQ ID NO: 9851 - protein, 118 aa, Artificial Sequence
  Chemically Synthesized
QVQLQESGGGLVQAGGSLRLSCAASGTIFSDYDMGWYRQAPGKEREFVAGIGQGATTNYADSVKGRFTISRDNAKNTVYLQMNSLKPEDTAVYYCAVGYRGPSQFVYWGQGTQVTVSS

SEQ ID NO: 9852 - protein, 117 aa, Artificial Sequence
  Chemically Synthesized
QVQLQESGGGLVQAGGSLRLSCAASGSISRVYDMGWYRQAPGKERELVAGIDDGGNPYADSVKGRFTISRDNAKNTVYLQMNSLKPEDTAVYYCAAYRDIYTDHAYWGQGTQVTVSS

SEQ ID NO: 9853 - protein, 118 aa, Artificial Sequence
  Chemically Synthesized
QVQLQESGGGLVQAGGSLRLSCAASGTISRGGAMGWYRQAPGKEREFVAGITTGATTNYADSVKGRFTISRDNAKNTVYLQMNSLKPEDTAVYYCAVLIYAAVYHSYWGQGTQVTVSS

SEQ ID NO: 9854 - protein, 118 aa, Artificial Sequence
  Chemically Synthesized
QVQLQESGGGLVQAGGSLRLSCAASGSIFRPSDMGWYRQAPGKEREFVATITYGSSTYYADSVKGRFTISRDNAKNTVYLQMNSLKPEDTAVYYCAVYGVELYDHYYWGQGTQVTVSS

SEQ ID NO: 9855 - protein, 125 aa, Artificial Sequence
  Chemically Synthesized
QVQLQESGGGLVQAGGSLRLSCAASGNISATANMGWYRQAPGKEREFVAAISDGASTYYADSVKGRFTISRDNAKNTVYLQMNSLKPEDTAVYYCALTLVTLLTLSVLTGTFIYWGQGTQVTVSS

SEQ ID NO: 9856 - protein, 118 aa, Artificial Sequence
  Chemically Synthesized
QVQLQESGGGLVQAGGSLRLSCAASGSIFPQRSMGWYRQAPGKEREFVAAIADGTSTNYADSVKGRFTISRDNAKNTVYLQMNSLKPEDTAVYYCAAIYGARPYHWYWGQGTQVTVSS

SEQ ID NO: 9857 - protein, 121 aa, Artificial Sequence
  Chemically Synthesized
QVQLQESGGGLVQAGGSLRLSCAASGYISSVYLMGWYRQAPGKEREFVATISLGGNTNYADSVKGRFTISRDNAKNTVYLQMNSLKPEDTAVYYCAADKEGDVGPDRAIYWGQGTQVTVSS

SEQ ID NO: 9858 - protein, 118 aa, Artificial Sequence
  Chemically Synthesized
QVQLQESGGGLVQAGGSLRLSCAASGNISSLNYMGWYRQAPGKERELVAAITYGSNTYYADSVKGRFTISRDNAKNTVYLQMNSLKPEDTAVYYCAVADRYGTGFLYWGQGTQVTVSS

SEQ ID NO: 9859 - protein, 121 aa, Artificial Sequence
  Chemically Synthesized
QVQLQESGGGLVQAGGSLRLSCAASGTISSPWFMGWYRQAPGKEREFVATIADGTSTYYADSVKGRFTISRDNAKNTVYLQMNSLKPEDTAVYYCAVGEGSTTTIRGLMYWGQGTQVTVSS

SEQ ID NO: 9860 - protein, 122 aa, Artificial Sequence
  Chemically Synthesized
QVQLQESGGGLVQAGGSLRLSCAASGSIFPHDTMGWYRQAPGKERELVASISYGGTTYYADSVKGRFTISRDNAKNTVYLQMNSLKPEDTAVYYCAVEPSNDSPVQDAYVYWGQGTQVTVSS

SEQ ID NO: 9861 - protein, 118 aa, Artificial Sequence
  Chemically Synthesized
QVQLQESGGGLVQAGGSLRLSCAASGTISPFVYMGWYRQAPGKERELVASIAYGGSTYYADSVKGRFTISRDNAKNTVYLQMNSLKPEDTAVYYCAATRYSDVRFYYWGQGTQVTVSS

SEQ ID NO: 9862 - protein, 118 aa, Artificial Sequence
  Chemically Synthesized
QVQLQESGGGLVQAGGSLRLSCAASGYISVEAYMGWYRQAPGKEREFVAGIGVGTSTYYADSVKGRFTISRDNAKNTVYLQMNSLKPEDTAVYYCAATVQYGLWHYYWGQGTQVTVSS

SEQ ID NO: 9863 - protein, 122 aa, Artificial Sequence
  Chemically Synthesized
QVQLQESGGGLVQAGGSLRLSCAASGTISLYLDMGWYRQAPGKERELVAAISYGGTTNYADSVKGRFTISRDNAKNTVYLQMNSLKPEDTAVYYCAVQGYDTWSVQRSACYWGQGTQVTVSS

SEQ ID NO: 9864 - protein, 111 aa, Artificial Sequence
  Chemically Synthesized
QVQLQESGGGLVQAGGSLRLSCAASGYIFGDEYMGWYRQAPGKEREFVAAIDRGGSPYADSVKGRFTISRDNAKNTVYLQMNSLKPEDTAVYYCASLYPYWGQGTQVTVSS

SEQ ID NO: 9865 - protein, 122 aa, Artificial Sequence
  Chemically Synthesized
QVQLQESGGGLVQAGGSLRLSCAASGNISGLLVMGWYRQAPGKEREFVATIANGSTTNYADSVKGRFTISRDNAKNTVYLQMNSLKPEDTAVYYCAARNDAEDRGWDDFYYWGQGTQVTVSS

SEQ ID NO: 9866 - protein, 118 aa, Artificial Sequence
  Chemically Synthesized
QVQLQESGGGLVQAGGSLRLSCAASGSIFADLDMGWYRQAPGKEREFVASIGTGAITYYADSVKGRFTISRDNAKNTVYLQMNSLKPEDTAVYYCAADGLPTSTHAYWGQGTQVTVSS

SEQ ID NO: 9867 - protein, 115 aa, Artificial Sequence
  Chemically Synthesized
QVQLQESGGGLVQAGGSLRLSCAASGTISPFFLPYMGWYRQAPGKEREFVAAIDDGGNTYYADSVKGRFTISRDNAKNTVYLQMNSLKPEDTAVYYCAADQYQYWGQGTQVTVSS

SEQ ID NO: 9868 - protein, 119 aa, Artificial Sequence
  Chemically Synthesized
QVQLQESGGGLVQAGGSLRLSCAASGYIFDPNSMGWYRQAPGKERELVASISFGGNTNYADSVKGRFTISRDNAKNTVYLQMNSLKPEDTAVYYCAVLYRSNSGFHYYWGQGTQVTVSS

SEQ ID NO: 9869 - protein, 118 aa, Artificial Sequence
  Chemically Synthesized
QVQLQESGGGLVQAGGSLRLSCAASGNIFGSYYMGWYRQAPGKEREFVAGIGRGATTNYADSVKGRFTISRDNAKNTVYLQMNSLKPEDTAVYYCAVVIAGVRYLYYWGQGTQVTVSS

SEQ ID NO: 9870 - protein, 117 aa, Artificial Sequence
  Chemically Synthesized
QVQLQESGGGLVQAGGSLRLSCAASGTISRDTQMGWYRQAPGKERELVATIDVGGSTYYADSVKGRFTISRDNAKNTVYLQMNSLKPEDTAVYYCAVGGYGGSLIYWGQGTQVTVSS

SEQ ID NO: 9871 - protein, 122 aa, Artificial Sequence
  Chemically Synthesized
QVQLQESGGGLVQAGGSLRLSCAASGTISTIYGMGWYRQAPGKERELVASIDSGGNTNYADSVKGRFTISRDNAKNTVYLQMNSLKPEDTAVYYCAAWEAGRPGRRWQFVYWGQGTQVTVSS

SEQ ID NO: 9872 - protein, 118 aa, Artificial Sequence
  Chemically Synthesized
QVQLQESGGGLVQAGGSLRLSCAASGNISSLLNMGWYRQAPGKERELVASIGPGGTTNYADSVKGRFTISRDNAKNTVYLQMNSLKPEDTAVYYCAAVTSGPRYLSYWGQGTQVTVSS

SEQ ID NO: 9873 - protein, 121 aa, Artificial Sequence
  Chemically Synthesized
QVQLQESGGGLVQAGGSLRLSCAASGSIFGIRSMGWYRQAPGKERELVASIAGGASTNYADSVKGRFTISRDNAKNTVYLQMNSLKPEDTAVYYCAAYFWRGGQLAHHFYWGQGTQVTVSS

SEQ ID NO: 9874 - protein, 118 aa, Artificial Sequence
  Chemically Synthesized
QVQLQESGGGLVQAGGSLRLSCAASGNIFTIVYMGWYRQAPGKERELVASIGGGSITNYADSVKGRFTISRDNAKNTVYLQMNSLKPEDTAVYYCAAVGRYRSLHPYWGQGTQVTVSS

SEQ ID NO: 9875 - protein, 117 aa, Artificial Sequence
  Chemically Synthesized
QVQLQESGGGLVQAGGSLRLSCAASGNISYITYMGWYRQAPGKEREFVATIDSGAITYYADSVKGRFTISRDNAKNTVYLQMNSLKPEDTAVYYCAARLSRLVTLYWGQGTQVTVSS

SEQ ID NO: 9876 - protein, 118 aa, Artificial Sequence
  Chemically Synthesized
QVQLQESGGGLVQAGGSLRLSCAASGTIFYPKYMGWYRQAPGKERELVAAIGAGTSTYYADSVKGRFTISRDNAKNTVYLQMNSLKPEDTAVYYCAAYSRLDLRLLYWGQGTQVTVSS

SEQ ID NO: 9877 - protein, 117 aa, Artificial Sequence
  Chemically Synthesized
QVQLQESGGGLVQAGGSLRLSCAASGNIFDFAQMGWYRQAPGKEREFVATITIGTSTYYADSVKGRFTISRDNAKNTVYLQMNSLKPEDTAVYYCAAVGPPSTTMYWGQGTQVTVSS

SEQ ID NO: 9878 - protein, 118 aa, Artificial Sequence
  Chemically Synthesized
QVQLQESGGGLVQAGGSLRLSCAASGTISVPGDMGWYRQAPGKERELVATIAYGTNTNYADSVKGRFTISRDNAKNTVYLQMNSLKPEDTAVYYCAAYDRDTDTLTYWGQGTQVTVSS

SEQ ID NO: 9879 - protein, 122 aa, Artificial Sequence
  Chemically Synthesized
QVQLQESGGGLVQAGGSLRLSCAASGNIFDPRYMGWYRQAPGKERELVAGIGLGGSTYYADSVKGRFTISRDNAKNTVYLQMNSLKPEDTAVYYCAVTYDAYVHDIAAYQYWGQGTQVTVSS

SEQ ID NO: 9880 - protein, 122 aa, Artificial Sequence
  Chemically Synthesized
QVQLQESGGGLVQAGGSLRLSCAASGSIFELYIMGWYRQAPGKERELVATITYGTTTNYADSVKGRFTISRDNAKNTVYLQMNSLKPEDTAVYYCAADSYGDGDYSGDHGYWGQGTQVTVSS

SEQ ID NO: 9881 - protein, 117 aa, Artificial Sequence
  Chemically Synthesized
QVQLQESGGGLVQAGGSLRLSCAASGSIFAYYYMGWYRQAPGKEREFVATIGSVVVPYADSVKGRFTISRDNAKNTVYLQMNSLKPEDTAVYYCAADYTLRWDFGYWGQGTQVTVSS

SEQ ID NO: 9882 - protein, 118 aa, Artificial Sequence
  Chemically Synthesized
QVQLQESGGGLVQAGGSLRLSCAASGNISRGPYMGWYRQAPGKEREFVAAIDVGAITYYADSVKGRFTISRDNAKNTVYLQMNSLKPEDTAVYYCAVYTQPSYVHDYWGQGTQVTVSS

SEQ ID NO: 9883 - protein, 118 aa, Artificial Sequence
  Chemically Synthesized
QVQLQESGGGLVQAGGSLRLSCAASGNISFYRMGWYRQAPGKERELVAAINYGGITYYADSVKGRFTISRDNAKNTVYLQMNSLKPEDTAVYYCAAIRRRYGITYRYWGQGTQVTVSS

SEQ ID NO: 9884 - protein, 125 aa, Artificial Sequence
  Chemically Synthesized
QVQLQESGGGLVQAGGSLRLSCAASGSIFSPRDMGWYRQAPGKEREFVAAIADVVLPYADSVKGRFTISRDNAKNTVYLQMNSLKPEDTAVYYCAVFRLYYYYEGYTVWVGHLYWGQGTQVTVSS

SEQ ID NO: 9885 - protein, 122 aa, Artificial Sequence
  Chemically Synthesized
QVQLQESGGGLVQAGGSLRLSCAASGTISGPIGMGWYRQAPGKEREFVATINGGGITNYADSVKGRFTISRDNAKNTVYLQMNSLKPEDTAVYYCAAWVTPVDRPKGGLDYWGQGTQVTVSS

SEQ ID NO: 9886 - protein, 122 aa, Artificial Sequence
  Chemically Synthesized
QVQLQESGGGLVQAGGSLRLSCAASGSIFQDAIMGWYRQAPGKERELVAAITAGSTTYYADSVKGRFTISRDNAKNTVYLQMNSLKPEDTAVYYCAADDASRAYFYDSYYYWGQGTQVTVSS

SEQ ID NO: 9887 - protein, 118 aa, Artificial Sequence
  Chemically Synthesized
QVQLQESGGGLVQAGGSLRLSCAASGYIFQQGDMGWYRQAPGKEREFVAGIDYGTITNYADSVKGRFTISRDNAKNTVYLQMNSLKPEDTAVYYCAVEYDGNDVFDYWGQGTQVTVSS

SEQ ID NO: 9888 - protein, 126 aa, Artificial Sequence
  Chemically Synthesized
QVQLQESGGGLVQAGGSLRLSCAASGYISVKDDMGWYRQAPGKERELVAAIGLGGTTYYADSVKGRFTISRDNAKNTVYLQMNSLKPEDTAVYYCAAYRYGDDWGLYQTDDYPSYWGQGTQVTVSS

SEQ ID NO: 9889 - protein, 122 aa, Artificial Sequence
  Chemically Synthesized
QVQLQESGGGLVQAGGSLRLSCAASGTISDTSHMGWYRQAPGKERELVAGIGSGATTYYADSVKGRFTISRDNAKNTVYLQMNSLKPEDTAVYYCAVSGPLFVTPYGDLPYWGQGTQVTVSS

SEQ ID NO: 9890 - protein, 126 aa, Artificial Sequence
  Chemically Synthesized
QVQLQESGGGLVQAGGSLRLSCAASGNISYVRGMGWYRQAPGKERELVAGINYGSSTNYADSVKGRFTISRDNAKNTVYLQMNSLKPEDTAVYYCAAGISYYFASYLYVTWYFYYWGQGTQVTVSS

SEQ ID NO: 9891 - protein, 122 aa, Artificial Sequence
  Chemically Synthesized
QVQLQESGGGLVQAGGSLRLSCAASGNIFYTAYMGWYRQAPGKEREFVLLLVLVPYADSVKGRFTISRDNAKNTVYLQMNSLKPEDTAVYYCAADSLLLGLTGLVVLVTIYWGQGTQVTVSS

SEQ ID NO: 9892 - protein, 122 aa, Artificial Sequence
  Chemically Synthesized
QVQLQESGGGLVQAGGSLRLSCAASGTISLATYMGWYRQAPGKEREFVAGIDTGSNTNYADSVKGRFTISRDNAKNTVYLQMNSLKPEDTAVYYCAASAAYRHTYTVDHTYWGQGTQVTVSS

SEQ ID NO: 9893 - protein, 117 aa, Artificial Sequence
  Chemically Synthesized
QVQLQESGGGLVQAGGSLRLSCAASGSIFYIAMGWYRQAPGKERELVASIDLGGTTNYADSVKGRFTISRDNAKNTVYLQMNSLKPEDTAVYYCAVWSGPLYDLVYWGQGTQVTVSS

SEQ ID NO: 9894 - protein, 117 aa, Artificial Sequence
  Chemically Synthesized
QVQLQESGGGLVQAGGSLRLSCAASGSISGSVMGWYRQAPGKEREFVAAIGIGSSTNYADSVKGRFTISRDNAKNTVYLQMNSLKPEDTAVYYCAAGNEPEDSLYYWGQGTQVTVSS

SEQ ID NO: 9895 - protein, 118 aa, Artificial Sequence
  Chemically Synthesized
QVQLQESGGGLVQAGGSLRLSCAASGTISGSSDMGWYRQAPGKEREFVASISLGGSNLYADSVKGRFTISRDNAKNTVYLQMNSLKPEDTAVYYCAASVLTISRLQYWGQGTQVTVSS

SEQ ID NO: 9896 - protein, 118 aa, Artificial Sequence
  Chemically Synthesized
QVQLQESGGGLVQAGGSLRLSCAASGTISGYVWMGWYRQAPGKEREFVATINSGGSTYYADSVKGRFTISRDNAKNTVYLQMNSLKPEDTAVYYCAVTGFPEDGHAYWGQGTQVTVSS

SEQ ID NO: 9897 - protein, 118 aa, Artificial Sequence
  Chemically Synthesized
QVQLQESGGGLVQAGGSLRLSCAASGNISMGWYRQAPGKERELVATIGYGGNTNYADSVKGRFTISRDNAKNTVYLQMNSLKPEDTAVYYCAVDVPYIDDTDGGFDYWGQGTQVTVSS

SEQ ID NO: 9898 - protein, 126 aa, Artificial Sequence
  Chemically Synthesized
QVQLQESGGGLVQAGGSLRLSCAASGSIFILTVMGWYRQAPGKERELVATINDGTNTYYADSVKGRFTISRDNAKNTVYLQMNSLKPEDTAVYYCAAGPRVDDGRLFTDYPYYAYWGQGTQVTVSS

SEQ ID NO: 9899 - protein, 117 aa, Artificial Sequence
  Chemically Synthesized
QVQLQESGGGLVQAGGSLRLSCAASGTIFALVMGWYRQAPGKEREFVASISKGSSTYYADSVKGRFTISRDNAKNTVYLQMNSLKPEDTAVYYCAASDSSGTNLEYWGQGTQVTVSS

SEQ ID NO: 9900 - protein, 118 aa, Artificial Sequence
  Chemically Synthesized
QVQLQESGGGLVQAGGSLRLSCAASGNIFRYRFMGWYRQAPGKERELVAGIAPGSTTNYADSVKGRFTISRDNAKNTVYLQMNSLKPEDTAVYYCAAFHYSIGYLNYWGQGTQVTVSS

SEQ ID NO: 9901 - protein, 118 aa, Artificial Sequence
  Chemically Synthesized
QVQLQESGGGLVQAGGSLRLSCAASGSIFYALAMGWYRQAPGKERELVAAIATGGNTYYADSVKGRFTISRDNAKNTVYLQMNSLKPEDTAVYYCAARRPYWRRYPYWGQGTQVTVSS

SEQ ID NO: 9902 - protein, 113 aa, Artificial Sequence
  Chemically Synthesized
QVQLQESGGGLVQAGGSLRLSCAASGTISGYGWMGWYRQAPGKEREFVASISYGGTTYYADSVKGRFTISRDNAKNTVYLQMNSLKPEDTAVYYCAAAGYGYWGQGTQVTVSS

SEQ ID NO: 9903 - protein, 120 aa, Artificial Sequence
  Chemically Synthesized
QVQLQESGGGLVQAGGSLRLSCAASGNIFYLITMGWYRQAPGKEREFVAAIDYGATTYYADSVKGRFTISRDNAKNTVYLQMNSLKPEDTAVYYCAVTLRYDDYSFLLYWGQGTQVTVSS

SEQ ID NO: 9904 - protein, 118 aa, Artificial Sequence
  Chemically Synthesized
QVQLQESGGGLVQAGGSLRLSCAASGYIFSTHYMGWYRQAPGKERELVATISEGGNTNYADSVKGRFTISRDNAKNTVYLQMNSLKPEDTAVYYCAVFLRYRYRHHYWGQGTQVTVSS

SEQ ID NO: 9905 - protein, 118 aa, Artificial Sequence
  Chemically Synthesized
QVQLQESGGGLVQAGGSLRLSCAASGTISPEARMGWYRQAPGKERELVAGISPGTSTNYADSVKGRFTISRDNAKNTVYLQMNSLKPEDTAVYYCAVPVVQGTKHRYWGQGTQVTVSS

SEQ ID NO: 9906 - protein, 112 aa, Artificial Sequence
  Chemically Synthesized
QVQLQESGGGLVQAGGSLRLSCAASGNISGDRAMGWYRQAPGKERELVAAIDYGGTTNYADSVKGRFTISRDNAKNTVYLQMNSLKPEDTAVYYCAASTLYWGQGTQVTVSS

SEQ ID NO: 9907 - protein, 118 aa, Artificial Sequence
  Chemically Synthesized
QVQLQESGGGLVQAGGSLRLSCAASGNISTPIEMGWYRQAPGKERELVAAIATGGITYYADSVKGRFTISRDNAKNTVYLQMNSLKPEDTAVYYCAVDRYYRRAYPYWGQGTQVTVSS

SEQ ID NO: 9908 - protein, 122 aa, Artificial Sequence
  Chemically Synthesized
QVQLQESGGGLVQAGGSLRLSCAASGNIFVYTNMGWYRQAPGKERELVAAIGPGATTYYADSVKGRFTISRDNAKNTVYLQMNSLKPEDTAVYYCAADGGTLSRKLVRLRYWGQGTQVTVSS

SEQ ID NO: 9909 - protein, 122 aa, Artificial Sequence
  Chemically Synthesized
QVQLQESGGGLVQAGGSLRLSCAASGSIFRPGYMGWYRQAPGKERELVASIGLGSTTNYADSVKGRFTISRDNAKNTVYLQMNSLKPEDTAVYYCAARRRYWESHRYPFTYWGQGTQVTVSS

SEQ ID NO: 9910 - protein, 122 aa, Artificial Sequence
  Chemically Synthesized
QVQLQESGGGLVQAGGSLRLSCAASGYISYPRDMGWYRQAPGKERELVAGITYGSITYYADSVKGRFTISRDNAKNTVYLQMNSLKPEDTAVYYCAVVAPRRYAYGQHLTYWGQGTQVTVSS

SEQ ID NO: 9911 - protein, 109 aa, Artificial Sequence
  Chemically Synthesized
QVQLQESGGGLVQAGGSLRLSCAASGTIFSYNGMGWYRQAPGKERELVAGITGTITNYADSVKGRFTISRDNAKNTVYLQMNSLKPEDTAVYYCADNYWGQGTQVTVSS

SEQ ID NO: 9912 - protein, 116 aa, Artificial Sequence
  Chemically Synthesized
QVQLQESGGGLVQAGGSLRLSCAASGYISIVLFMGWYRQAPGKERELVAAIAYGGTTNYADSVKGRFTISRDNAKNTVYLQMNSLKPEDTAVYYCAVGYPVDFDYWGQGTQVTVSS

SEQ ID NO: 9913 - protein, 122 aa, Artificial Sequence
  Chemically Synthesized
QVQLQESGGGLVQAGGSLRLSCAASGTISYYYYMGWYRQAPGKEREFVASITTGSTTNYADSVKGRFTISRDNAKNTVYLQMNSLKPEDTAVYYCAVTPRYFALWTYRHYYWGQGTQVTVSS

SEQ ID NO: 9914 - protein, 118 aa, Artificial Sequence
  Chemically Synthesized
QVQLQESGGGLVQAGGSLRLSCAASGTIFGNPPMGWYRQAPGKERELVASIANGGTTNYADSVKGRFTISRDNAKNTVYLQMNSLKPEDTAVYYCAVDRRYYKFHRYWGQGTQVTVSS

SEQ ID NO: 9915 - protein, 118 aa, Artificial Sequence
  Chemically Synthesized
QVQLQESGGGLVQAGGSLRLSCAASGYISVVTAMGWYRQAPGKERELVAAINNGASTYYADSVKGRFTISRDNAKNTVYLQMNSLKPEDTAVYYCAVYYDYDPYHQYWGQGTQVTVSS

SEQ ID NO: 9916 - protein, 117 aa, Artificial Sequence
  Chemically Synthesized
QVQLQESGGGLVQAGGSLRLSCAASGNISGNDFMGWYRQAPGKEREFVASIGGGTITNYADSVKGRFTISRDNAKNTVYLQMNSLKPEDTAVYYCAVDYTASPFVYWGQGTQVTVSS

SEQ ID NO: 9917 - protein, 122 aa, Artificial Sequence
  Chemically Synthesized
QVQLQESGGGLVQAGGSLRLSCAASGTIFPNDAMGWYRQAPGKEREFVAAITGGATTYYADSVKGRFTISRDNAKNTVYLQMNSLKPEDTAVYYCAARDDNGYHYIPYLLYWGQGTQVTVSS

SEQ ID NO: 9918 - protein, 126 aa, Artificial Sequence
  Chemically Synthesized
QVQLQESGGGLVQAGGSLRLSCAASGTISSRRYMGWYRQAPGKEREFVAAIAWGSTTYYADSVKGRFTISRDNAKNTVYLQMNSLKPEDTAVYYCAAYLRYYSGLSYPGAPYHYYWGQGTQVTVSS

SEQ ID NO: 9919 - protein, 126 aa, Artificial Sequence
  Chemically Synthesized
QVQLQESGGGLVQAGGSLRLSCAASGSISTDIYMGWYRQAPGKERELVAAIGAGTITYYADSVKGRFTISRDNAKNTVYLQMNSLKPEDTAVYYCAVYPSSYVTASLDADTYFSYWGQGTQVTVSS

SEQ ID NO: 9920 - protein, 117 aa, Artificial Sequence
  Chemically Synthesized
QVQLQESGGGLVQAGGSLRLSCAASGNISVSTGMGWYRQAPGKERELVAGIAAGSSTNYADSVKGRFTISRDNAKNTVYLQMNSLKPEDTAVYYCAALDQAVSCIYWGQGTQVTVSS

SEQ ID NO: 9921 - protein, 118 aa, Artificial Sequence
  Chemically Synthesized
QVQLQESGGGLVQAGGSLRLSCAASGSIFGVYAMGWYRQAPGKERELVAAIGRGSTTYYADSVKGRFTISRDNAKNTVYLQMNSLKPEDTAVYYCAALARGRQRFPYWGQGTQVTVSS

SEQ ID NO: 9922 - protein, 122 aa, Artificial Sequence
  Chemically Synthesized
QVQLQESGGGLVQAGGSLRLSCAASGTISLRGNFMGWYRQAPGKEREFVAGIDKGTNTNYADSVKGRFTISRDNAKNTVYLQMNSLKPEDTAVYYCAAGVDDLYADDYLAYWGQGTQVTVSS

SEQ ID NO: 9923 - protein, 118 aa, Artificial Sequence
  Chemically Synthesized
QVQLQESGGGLVQAGGSLRLSCAASGYISLTYVMGWYRQAPGKERELVAAIARGGNTYYADSVKGRFTISRDNAKNTVYLQMNSLKPEDTAVYYCAVRRTRVGRLRYWGQGTQVTVSS

SEQ ID NO: 9924 - protein, 117 aa, Artificial Sequence
  Chemically Synthesized
QVQLQESGGGLVQAGGSLRLSCAASGYISRATIMGWYRQAPGKERELVATIAYGTNTNYADSVKGRFTISRDNAKNTVYLQMNSLKPEDTAVYYCAATFYYRALRYWGQGTQVTVSS

SEQ ID NO: 9925 - protein, 118 aa, Artificial Sequence
  Chemically Synthesized
QVQLQESGGGLVQAGGSLRLSCAASGTISYLYAMGWYRQAPGKERELVAAISLGANTYYADSVKGRFTISRDNAKNTVYLQMNSLKPEDTAVYYCAVSYGRYRYHHYWGQGTQVTVSS

SEQ ID NO: 9926 - protein, 121 aa, Artificial Sequence
  Chemically Synthesized
QVQLQESGGGLVQAGGSLRLSCAASGNISYRQPMGWYRQAPGKERELVAGIDDGATTYYADSVKGRFTISRDNAKNTVYLQMNSLKPEDTAVYYCAVRVWTLTTTRSLIYWGQGTQVTVSS

SEQ ID NO: 9927 - protein, 122 aa, Artificial Sequence
  Chemically Synthesized
QVQLQESGGGLVQAGGSLRLSCAASGTISAIIYMGWYRQAPGKEREFVATITYGGNTNYADSVKGRFTISRDNAKNTVYLQMNSLKPEDTAVYYCAVYAYKGWGRYYRYYYWGQGTQVTVSS

SEQ ID NO: 9928 - protein, 117 aa, Artificial Sequence
  Chemically Synthesized
QVQLQESGGGLVQAGGSLRLSCAASGSISGHFLMGWYRQAPGKERELVAGINQGTSTYYADSVKGRFTISRDNAKNTVYLQMNSLKPEDTAVYYCAVGTTTLNTLYWGQGTQVTVSS

SEQ ID NO: 9929 - protein, 118 aa, Artificial Sequence
  Chemically Synthesized
QVQLQESGGGLVQAGGSLRLSCAASGTISYGYDMGWYRQAPGKERELVAGIDEGGTTYYADSVKGRFTISRDNAKNTVYLQMNSLKPEDTAVYYCAAYDWSIFRYTYWGQGTQVTVSS

SEQ ID NO: 9930 - protein, 122 aa, Artificial Sequence
  Chemically Synthesized
QVQLQESGGGLVQAGGSLRLSCAASGNIFTGYDMGWYRQAPGKERELVAAISTGSSTNYADSVKGRFTISRDNAKNTVYLQMNSLKPEDTAVYYCAAYYGYDPYIVAQHGYWGQGTQVTVSS

SEQ ID NO: 9931 - protein, 122 aa, Artificial Sequence
  Chemically Synthesized
QVQLQESGGGLVQAGGSLRLSCAASGTISRRDSMGWYRQAPGKERELVAGITYGGTTYYADSVKGRFTISRDNAKNTVYLQMNSLKPEDTAVYYCAVWSYSYWYRYWPLYYWGQGTQVTVSS

SEQ ID NO: 9932 - protein, 116 aa, Artificial Sequence
  Chemically Synthesized
QVQLQESGGGLVQAGGSLRLSCAASGSIFFNYLMGWYRQAPGKERELVAGIDTGGSTYYADSVKGRFTISRDNAKNTVYLQMNSLKPEDTAVYYCAVLINSAHVYWGQGTQVTVSS

SEQ ID NO: 9933 - protein, 118 aa, Artificial Sequence
  Chemically Synthesized
QVQLQESGGGLVQAGGSLRLSCAASGTISRKYIMGWYRQAPGKEREFVAAIDGGSTTYYADSVKGRFTISRDNAKNTVYLQMNSLKPEDTAVYYCAVVHYRDGQFAYWGQGTQVTVSS

SEQ ID NO: 9934 - protein, 122 aa, Artificial Sequence
  Chemically Synthesized
QVQLQESGGGLVQAGGSLRLSCAASGTISRIFVMGWYRQAPGKEREFVASINTGTSTNYADSVKGRFTISRDNAKNTVYLQMNSLKPEDTAVYYCAALDYGYDPYFTPFHYWGQGTQVTVSS

SEQ ID NO: 9935 - protein, 126 aa, Artificial Sequence
  Chemically Synthesized
QVQLQESGGGLVQAGGSLRLSCAASGTIFGWFNMGWYRQAPGKERELVASIAYGTITYYADSVKGRFTISRDNAKNTVYLQMNSLKPEDTAVYYCAAYDDVLVPPWYTGYDTLGYWGQGTQVTVSS

SEQ ID NO: 9936 - protein, 126 aa, Artificial Sequence
  Chemically Synthesized
QVQLQESGGGLVQAGGSLRLSCAASGSISYDIAMGWYRQAPGKEREFVASINAGASTNYADSVKGRFTISRDNAKNTVYLQMNSLKPEDTAVYYCAAYEQVNYTSQLGDRIEFQYWGQGTQVTVSS

SEQ ID NO: 9937 - protein, 117 aa, Artificial Sequence
  Chemically Synthesized
QVQLQESGGGLVQAGGSLRLSCAASGYISSTSMGWYRQAPGKEREFVASISYGGTTYYADSVKGRFTISRDNAKNTVYLQMNSLKPEDTAVYYCAADTRYGGDHTYWGQGTQVTVSS

SEQ ID NO: 9938 - protein, 118 aa, Artificial Sequence
  Chemically Synthesized
QVQLQESGGGLVQAGGSLRLSCAASGYIFSRIYMGWYRQAPGKERELVAGIAYGSNTYYADSVKGRFTISRDNAKNTVYLQMNSLKPEDTAVYYCAVYDRLERDFLYWGQGTQVTVSS

SEQ ID NO: 9939 - protein, 125 aa, Artificial Sequence
  Chemically Synthesized
QVQLQESGGGLVQAGGSLRLSCAASGYISRVAMGWYRQAPGKEREFVASIGRGANTNYADSVKGRFTISRDNAKNTVYLQMNSLKPEDTAVYYCAADTDTADNVYYSRSGHHDYWGQGTQVTVSS

SEQ ID NO: 9940 - protein, 126 aa, Artificial Sequence
  Chemically Synthesized
QVQLQESGGGLVQAGGSLRLSCAASGSISYGEAMGWYRQAPGKERELVAAIGIGGTTYYADSVKGRFTISRDNAKNTVYLQMNSLKPEDTAVYYCAAGWDVYPYSTLPVQDTYTYWGQGTQVTVSS

SEQ ID NO: 9941 - protein, 122 aa, Artificial Sequence
  Chemically Synthesized
QVQLQESGGGLVQAGGSLRLSCAASGTIFWYVAMGWYRQAPGKERELVATITQGGTTNYADSVKGRFTISRDNAKNTVYLQMNSLKPEDTAVYYCAVGGYFNGYKTVYYGYWGQGTQVTVSS

SEQ ID NO: 9942 - protein, 113 aa, Artificial Sequence
  Chemically Synthesized
QVQLQESGGGLVQAGGSLRLSCAASGNIFTDLYMGWYRQAPGKEREFVATIGIGAITNYADSVKGRFTISRDNAKNTVYLQMNSLKPEDTAVYYCAASEHYYWGQGTQVTVSS

SEQ ID NO: 9943 - protein, 118 aa, Artificial Sequence
  Chemically Synthesized
QVQLQESGGGLVQAGGSLRLSCAASGNISHAGRMGWYRQAPGKEREFVATITQGANTNYADSVKGRFTISRDNAKNTVYLQMNSLKPEDTAVYYCAVIDNKGPAHTYWGQGTQVTVSS

SEQ ID NO: 9944 - protein, 118 aa, Artificial Sequence
  Chemically Synthesized
QVQLQESGGGLVQAGGSLRLSCAASGSISTGRPMGWYRQAPGKERELVAAITYGGTTNYADSVKGRFTISRDNAKNTVYLQMNSLKPEDTAVYYCAAGDYDPPVHRYWGQGTQVTVSS

SEQ ID NO: 9945 - protein, 122 aa, Artificial Sequence
  Chemically Synthesized
QVQLQESGGGLVQAGGSLRLSCAASGTISRRVYMGWYRQAPGKEREFVAAINYGTITNYADSVKGRFTISRDNAKNTVYLQMNSLKPEDTAVYYCAVISRYHIWSYYNHYYWGQGTQVTVSS

SEQ ID NO: 9946 - protein, 122 aa, Artificial Sequence
  Chemically Synthesized
QVQLQESGGGLVQAGGSLRLSCAASGYISVHDDMGWYRQAPGKEREFVASITRGATTYYADSVKGRFTISRDNAKNTVYLQMNSLKPEDTAVYYCAVTGFENDVKNAIHLYWGQGTQVTVSS

SEQ ID NO: 9947 - protein, 118 aa, Artificial Sequence
  Chemically Synthesized
QVQLQESGGGLVQAGGSLRLSCAASGTIFVPGGMGWYRQAPGKERELVASIGQGATTYYADSVKGRFTISRDNAKNTVYLQMNSLKPEDTAVYYCAVDSVRRYRLRYWGQGTQVTVSS

SEQ ID NO: 9948 - protein, 114 aa, Artificial Sequence
  Chemically Synthesized
QVQLQESGGGLVQAGGSLRLSCAASGYISWRNRMGWYRQAPGKEREFVAAIGYGTTTNYADSVKGRFTISRDNAKNTVYLQMNSLKPEDTAVYYCAAGLAYGYWGQGTQVTVSS

SEQ ID NO: 9949 - protein, 118 aa, Artificial Sequence
  Chemically Synthesized
QVQLQESGGGLVQAGGSLRLSCAASGYIFVPRGMGWYRQAPGKERELVAAITRGGNTYYADSVKGRFTISRDNAKNTVYLQMNSLKPEDTAVYYCAVQVAYYYALRYWGQGTQVTVSS

SEQ ID NO: 9950 - protein, 118 aa, Artificial Sequence
  Chemically Synthesized
QVQLQESGGGLVQAGGSLRLSCAASGNIFVYNYMGWYRQAPGKEREFVAAIDWGAITNYADSVKGRFTISRDNAKNTVYLQMNSLKPEDTAVYYCAVPWPLNHRHYYWGQGTQVTVSS

SEQ ID NO: 9951 - protein, 117 aa, Artificial Sequence
  Chemically Synthesized
QVQLQESGGGLVQAGGSLRLSCAASGSIFYPAVMGWYRQAPGKERELVATIAAGATTYYADSVKGRFTISRDNAKNTVYLQMNSLKPEDTAVYYCAVNHGAEGGYYWGQGTQVTVSS

SEQ ID NO: 9952 - protein, 121 aa, Artificial Sequence
  Chemically Synthesized
QVQLQESGGGLVQAGGSLRLSCAASGTIFTGGYMGWYRQAPGKERELVAGIILVLLPYADSVKGRFTISRDNAKNTVYLQMNSLKPEDTAVYYCAVRPSHPTQADNYHRYWGQGTQVTVSS

SEQ ID NO: 9953 - protein, 118 aa, Artificial Sequence
  Chemically Synthesized
QVQLQESGGGLVQAGGSLRLSCAASGTIFIYIYMGWYRQAPGKERELVATITDGGNTNYADSVKGRFTISRDNAKNTVYLQMNSLKPEDTAVYYCAANLYYAIGHLYWGQGTQVTVSS

SEQ ID NO: 9954 - protein, 121 aa, Artificial Sequence
  Chemically Synthesized
QVQLQESGGGLVQAGGSLRLSCAASGTISFTADMGWYRQAPGKEREFVAAIAAGGTTYYADSVKGRFTISRDNAKNTVYLQMNSLKPEDTAVYYCAVVDRTTRFVVSTIYWGQGTQVTVSS

SEQ ID NO: 9955 - protein, 119 aa, Artificial Sequence
  Chemically Synthesized
QVQLQESGGGLVQAGGSLRLSCAASGNISSAWKMGWYRQAPGKEREFVAAISAGGNTNYADSVKGRFTISRDNAKNTVYLQMNSLKPEDTAVYYCAVVIVAGLGLYIYWGQGTQVTVSS

SEQ ID NO: 9956 - protein, 128 aa, Artificial Sequence
  Chemically Synthesized
QVQLQESGGGLVQAGGSLRLSCAASGNIFTQGTMGWYRQAPGKEREFVAAIGYGTSTYYADSVKGRFTISRDNAKNTVYLQMNSLKPEDTAVYYCAVFYPSFAQGYFAFYGLHNYLYWGQGTQVTVSS

SEQ ID NO: 9957 - protein, 122 aa, Artificial Sequence
  Chemically Synthesized
QVQLQESGGGLVQAGGSLRLSCAASGNISQFDSMGWYRQAPGKERELVATITPGGITYYADSVKGRFTISRDNAKNTVYLQMNSLKPEDTAVYYCAVGRDHDAYTAYYLDYWGQGTQVTVSS

SEQ ID NO: 9958 - protein, 118 aa, Artificial Sequence
  Chemically Synthesized
QVQLQESGGGLVQAGGSLRLSCAASGNISYGLIMGWYRQAPGKERELVAGIDQGSITYYADSVKGRFTISRDNAKNTVYLQMNSLKPEDTAVYYCAVDAESEVSHNYWGQGTQVTVSS

SEQ ID NO: 9959 - protein, 118 aa, Artificial Sequence
  Chemically Synthesized
QVQLQESGGGLVQAGGSLRLSCAASGTIFGYVYMGWYRQAPGKERELVATIADGTITYYADSVKGRFTISRDNAKNTVYLQMNSLKPEDTAVYYCAAYVNAGWVHTYWGQGTQVTVSS

SEQ ID NO: 9960 - protein, 114 aa, Artificial Sequence
  Chemically Synthesized
QVQLQESGGGLVQAGGSLRLSCAASGNIFYNDPMGWYRQAPGKERELVPVLIRVVVPYADSVKGRFTISRDNAKNTVYLQMNSLKPEDTAVYYCAVRGGDYYYWGQGTQVTVSS

SEQ ID NO: 9961 - protein, 124 aa, Artificial Sequence
  Chemically Synthesized
QVQLQESGGGLVQAGGSLRLSCAASGTIFFDSVMGWYRQAPGKEREFVAGISAGGNTNYADSVKGRFTISRDNAKNTVYLQMNSLKPEDTAVYYCAVYFPPFPYRPNGQELGYWGQGTQVTVSS

SEQ ID NO: 9962 - protein, 118 aa, Artificial Sequence
  Chemically Synthesized
QVQLQESGGGLVQAGGSLRLSCAASGSIFSWLRMGWYRQAPGKEREFVASIDSGSTTNYADSVKGRFTISRDNAKNTVYLQMNSLKPEDTAVYYCAVPYTRLWEFRYWGQGTQVTVSS

SEQ ID NO: 9963 - protein, 126 aa, Artificial Sequence
  Chemically Synthesized
QVQLQESGGGLVQAGGSLRLSCAASGYIFRYKVMGWYRQAPGKEREFVASIAYGGNTYYADSVKGRFTISRDNAKNTVYLQMNSLKPEDTAVYYCAVAYLGGYIRSNPVAHSHRYWGQGTQVTVSS

SEQ ID NO: 9964 - protein, 115 aa, Artificial Sequence
  Chemically Synthesized
QVQLQESGGGLVQAGGSLRLSCAASGYISRDNNMGWYRQAPGKERELVAVLILVLIPYADSVKGRFTISRDNAKNTVYLQMNSLKPEDTAVYYCAVDYYAVSIYWGQGTQVTVSS

SEQ ID NO: 9965 - protein, 118 aa, Artificial Sequence
  Chemically Synthesized
QVQLQESGGGLVQAGGSLRLSCAASGSISQYTYMGWYRQAPGKEREFVASIDAGGSTYYADSVKGRFTISRDNAKNTVYLQMNSLKPEDTAVYYCAVNYVIYFGFPYWGQGTQVTVSS

SEQ ID NO: 9966 - protein, 125 aa, Artificial Sequence
  Chemically Synthesized
QVQLQESGGGLVQAGGSLRLSCAASGYISQWDDMGWYRQAPGKERELVATITLGAITYYADSVKGRFTISRDNAKNTVYLQMNSLKPEDTAVYYCAVVGEGYRNPWGIWAPHWYWGQGTQVTVSS

SEQ ID NO: 9967 - protein, 114 aa, Artificial Sequence
  Chemically Synthesized
QVQLQESGGGLVQAGGSLRLSCAASGYIFNDDDMGWYRQAPGKEREFVAGIDGGTNTNYADSVKGRFTISRDNAKNTVYLQMNSLKPEDTAVYYCAVPDYLYYWGQGTQVTVSS

SEQ ID NO: 9968 - protein, 118 aa, Artificial Sequence
  Chemically Synthesized
QVQLQESGGGLVQAGGSLRLSCAASGYIFTSPFMGWYRQAPGKERELVAGITYGTITYYADSVKGRFTISRDNAKNTVYLQMNSLKPEDTAVYYCAAGERTDYQFEYWGQGTQVTVSS

SEQ ID NO: 9969 - protein, 122 aa, Artificial Sequence
  Chemically Synthesized
QVQLQESGGGLVQAGGSLRLSCAASGSIFLLRIMGWYRQAPGKERELVATINGGGSTYYADSVKGRFTISRDNAKNTVYLQMNSLKPEDTAVYYCAVYVYDYLYIATGLDYWGQGTQVTVSS

SEQ ID NO: 9970 - protein, 118 aa, Artificial Sequence
  Chemically Synthesized
QVQLQESGGGLVQAGGSLRLSCAASGSIFREYGMGWYRQAPGKEREFVAGITDGGNTYYADSVKGRFTISRDNAKNTVYLQMNSLKPEDTAVYYCAVDTYWRWNFWYWGQGTQVTVSS

SEQ ID NO: 9971 - protein, 122 aa, Artificial Sequence
  Chemically Synthesized
QVQLQESGGGLVQAGGSLRLSCAASGNIFDGLSMGWYRQAPGKERELVAGITGGGSTYYADSVKGRFTISRDNAKNTVYLQMNSLKPEDTAVYYCAVDSNYPYSYGTSHPYWGQGTQVTVSS

SEQ ID NO: 9972 - protein, 122 aa, Artificial Sequence
  Chemically Synthesized
QVQLQESGGGLVQAGGSLRLSCAASGSISRRGTMGWYRQAPGKERELVASIAWGGNTNYADSVKGRFTISRDNAKNTVYLQMNSLKPEDTAVYYCAVRVRTRYTNYGRHIYWGQGTQVTVSS

SEQ ID NO: 9973 - protein, 118 aa, Artificial Sequence
  Chemically Synthesized
QVQLQESGGGLVQAGGSLRLSCAASGYISRKRYMGWYRQAPGKERELVASITTGTNTNYADSVKGRFTISRDNAKNTVYLQMNSLKPEDTAVYYCAARAYYYTYHYYWGQGTQVTVSS

SEQ ID NO: 9974 - protein, 122 aa, Artificial Sequence
  Chemically Synthesized
QVQLQESGGGLVQAGGSLRLSCAASGNISSWDYMGWYRQAPGKEREFVASIGSGSNTYYADSVKGRFTISRDNAKNTVYLQMNSLKPEDTAVYYCAADGSSSWYADANLTYWGQGTQVTVSS

SEQ ID NO: 9975 - protein, 122 aa, Artificial Sequence
  Chemically Synthesized
QVQLQESGGGLVQAGGSLRLSCAASGSIFLGGHMGWYRQAPGKEREFVATIGTGANTYYADSVKGRFTISRDNAKNTVYLQMNSLKPEDTAVYYCAVRYFKDRRDLSGLGYWGQGTQVTVSS

SEQ ID NO: 9976 - protein, 118 aa, Artificial Sequence
  Chemically Synthesized
QVQLQESGGGLVQAGGSLRLSCAASGSISPSSTMGWYRQAPGKERELVASITAGAITNYADSVKGRFTISRDNAKNTVYLQMNSLKPEDTAVYYCAAVYLYDDGFHYWGQGTQVTVSS

SEQ ID NO: 9977 - protein, 120 aa, Artificial Sequence
  Chemically Synthesized
QVQLQESGGGLVQAGGSLRLSCAASGTIFPSPIMGWYRQAPGKEREFVAGIDLGGSTYYADSVKGRFTISRDNAKNTVYLQMNSLKPEDTAVYYCAVVIDYTYGDRHTYWGQGTQVTVSS

SEQ ID NO: 9978 - protein, 126 aa, Artificial Sequence
  Chemically Synthesized
QVQLQESGGGLVQAGGSLRLSCAASGSISIPPTMGWYRQAPGKEREFVAGIAVGTSTNYADSVKGRFTISRDNAKNTVYLQMNSLKPEDTAVYYCAVRPRRAYYGPDPDTYYYRYWGQGTQVTVSS

SEQ ID NO: 9979 - protein, 126 aa, Artificial Sequence
  Chemically Synthesized
QVQLQESGGGLVQAGGSLRLSCAASGTIFSWYWMGWYRQAPGKERELVAGISYGTITNYADSVKGRFTISRDNAKNTVYLQMNSLKPEDTAVYYCAADPGLYNLLGLYVTPYLGYWGQGTQVTVSS

SEQ ID NO: 9980 - protein, 118 aa, Artificial Sequence
  Chemically Synthesized
QVQLQESGGGLVQAGGSLRLSCAASGNISIQHPMGWYRQAPGKEREFVATISAGATTNYADSVKGRFTISRDNAKNTVYLQMNSLKPEDTAVYYCAVLDDNNDYHLYWGQGTQVTVSS

SEQ ID NO: 9981 - protein, 117 aa, Artificial Sequence
  Chemically Synthesized
QVQLQESGGGLVQAGGSLRLSCAASGYIFQAYEMGWYRQAPGKEREFVAGISSGGNTYYADSVKGRFTISRDNAKNTVYLQMNSLKPEDTAVYYCAADTGWVLVIYWGQGTQVTVSS

SEQ ID NO: 9982 - protein, 122 aa, Artificial Sequence
  Chemically Synthesized
QVQLQESGGGLVQAGGSLRLSCAASGNIFYSGRMGWYRQAPGKEREFVAGIGPGGNTNYADSVKGRFTISRDNAKNTVYLQMNSLKPEDTAVYYCAAVYRYSSNYWGRHRYWGQGTQVTVSS

SEQ ID NO: 9983 - protein, 117 aa, Artificial Sequence
  Chemically Synthesized
QVQLQESGGGLVQAGGSLRLSCAASGSIFYDHFMGWYRQAPGKERELLPVLVTVVVPYADSVKGRFTISRDNAKNTVYLQMNSLKPEDTAVYYCAADVTGSDSFGYWGQGTQVTVSS

SEQ ID NO: 9984 - protein, 122 aa, Artificial Sequence
  Chemically Synthesized
QVQLQESGGGLVQAGGSLRLSCAASGTIFRPYYMGWYRQAPGKEREFVATIDTGGNTNYADSVKGRFTISRDNAKNTVYLQMNSLKPEDTAVYYCAARNYFYLVRARNFTYWGQGTQVTVSS

SEQ ID NO: 9985 - protein, 122 aa, Artificial Sequence
  Chemically Synthesized
QVQLQESGGGLVQAGGSLRLSCAASGYISYQRWMGWYRQAPGKEREFVAAISLGSTTNYADSVKGRFTISRDNAKNTVYLQMNSLKPEDTAVYYCAVTGRYVWPYYRYHTYWGQGTQVTVSS

SEQ ID NO: 9986 - protein, 126 aa, Artificial Sequence
  Chemically Synthesized
QVQLQESGGGLVQAGGSLRLSCAASGTISLVYYMGWYRQAPGKERELVAAIGYGSTTYYADSVKGRFTISRDNAKNTVYLQMNSLKPEDTAVYYCAVFLLYYVLPYGEQLFGLDYWGQGTQVTVSS

SEQ ID NO: 9987 - protein, 118 aa, Artificial Sequence
  Chemically Synthesized
QVQLQESGGGLVQAGGSLRLSCAASGTISDGVGMGWYRQAPGKERELVASIASGATTYYADSVKGRFTISRDNAKNTVYLQMNSLKPEDTAVYYCAARYAGRGAYRYWGQGTQVTVSS

SEQ ID NO: 9988 - protein, 126 aa, Artificial Sequence
  Chemically Synthesized
QVQLQESGGGLVQAGGSLRLSCAASGYIFRWRGMGWYRQAPGKERELVAGINYGSTTNYADSVKGRFTISRDNAKNTVYLQMNSLKPEDTAVYYCAAYAATGYYGYWRSDRYHYYWGQGTQVTVSS

SEQ ID NO: 9989 - protein, 122 aa, Artificial Sequence
  Chemically Synthesized
QVQLQESGGGLVQAGGSLRLSCAASGNISDDYAMGWYRQAPGKERELVAAITTGGSTNYADSVKGRFTISRDNAKNTVYLQMNSLKPEDTAVYYCAAYPSPLRGWGNDFGYWGQGTQVTVSS

SEQ ID NO: 9990 - protein, 117 aa, Artificial Sequence
  Chemically Synthesized
QVQLQESGGGLVQAGGSLRLSCAASGYIFRHGWMGWYRQAPGKERELVAGIDYGGTTNYADSVKGRFTISRDNAKNTVYLQMNSLKPEDTAVYYCAASTTLTNRMYWGQGTQVTVSS

SEQ ID NO: 9991 - protein, 122 aa, Artificial Sequence
  Chemically Synthesized
QVQLQESGGGLVQAGGSLRLSCAASGTISTPYGMGWYRQAPGKERELVAGISAGSSTNYADSVKGRFTISRDNAKNTVYLQMNSLKPEDTAVYYCAAFFASSDDARYSFTYWGQGTQVTVSS

SEQ ID NO: 9992 - protein, 118 aa, Artificial Sequence
  Chemically Synthesized
QVQLQESGGGLVQAGGSLRLSCAASGYIFTYRRMGWYRQAPGKEREFVATINRGSSTYYADSVKGRFTISRDNAKNTVYLQMNSLKPEDTAVYYCAVQARFQRAHYYWGQGTQVTVSS

SEQ ID NO: 9993 - protein, 118 aa, Artificial Sequence
  Chemically Synthesized
QVQLQESGGGLVQAGGSLRLSCAASGYIFGLRKMGWYRQAPGKEREFVAAISGGGNTNYADSVKGRFTISRDNAKNTVYLQMNSLKPEDTAVYYCAAGSRGRIGHYYWGQGTQVTVSS

SEQ ID NO: 9994 - protein, 118 aa, Artificial Sequence
  Chemically Synthesized
QVQLQESGGGLVQAGGSLRLSCAASGTISPIWNMGWYRQAPGKERELVASIGVGGSTNYADSVKGRFTISRDNAKNTVYLQMNSLKPEDTAVYYCAAWSYTYGDHYYWGQGTQVTVSS

SEQ ID NO: 9995 - protein, 117 aa, Artificial Sequence
  Chemically Synthesized
QVQLQESGGGLVQAGGSLRLSCAASGTIFFRTIMGWYRQAPGKERELVATISLVLIPYADSVKGRFTISRDNAKNTVYLQMNSLKPEDTAVYYCAVPATGYYDFLYWGQGTQVTVSS

SEQ ID NO: 9996 - protein, 118 aa, Artificial Sequence
  Chemically Synthesized
QVQLQESGGGLVQAGGSLRLSCAASGSIFSVRYMGWYRQAPGKEREFVAAIGRGASTYYADSVKGRFTISRDNAKNTVYLQMNSLKPEDTAVYYCAARGYGKSQHPYWGQGTQVTVSS

SEQ ID NO: 9997 - protein, 123 aa, Artificial Sequence
  Chemically Synthesized
QVQLQESGGGLVQAGGSLRLSCAASGSISDHDYMGWYRQAPGKERELVAAIDDGTTTNYADSVKGRFTISRDNAKNTVYLQMNSLKPEDTAVYYCAVPADDQEINIELSTHYWGQGTQVTVSS

SEQ ID NO: 9998 - protein, 118 aa, Artificial Sequence
  Chemically Synthesized
QVQLQESGGGLVQAGGSLRLSCAASGTISRLAYMGWYRQAPGKERELVAAIDAGASTNYADSVKGRFTISRDNAKNTVYLQMNSLKPEDTAVYYCAVYTGFEYDHDYWGQGTQVTVSS

SEQ ID NO: 9999 - protein, 118 aa, Artificial Sequence
  Chemically Synthesized
QVQLQESGGGLVQAGGSLRLSCAASGNISSDRSMGWYRQAPGKEREFVAGINDGANTYYADSVKGRFTISRDNAKNTVYLQMNSLKPEDTAVYYCAAYTNYGLDHGYWGQGTQVTVSS

SEQ ID NO: 10000 - protein, 122 aa, Artificial Sequence
  Chemically Synthesized
QVQLQESGGGLVQAGGSLRLSCAASGYISPPPYMGWYRQAPGKEREFVAAIGLGGTTNYADSVKGRFTISRDNAKNTVYLQMNSLKPEDTAVYYCAVGAPYDRFGATILDYWGQGTQVTVSS

SEQ ID NO: 10001 - protein, 122 aa, Artificial Sequence
  Chemically Synthesized
QVQLQESGGGLVQAGGSLRLSCAASGNISKPRGMGWYRQAPGKEREFVAAINWGTNTYYADSVKGRFTISRDNAKNTVYLQMNSLKPEDTAVYYCAVSRYSVTRPYIGHQYWGQGTQVTVSS

SEQ ID NO: 10002 - protein, 118 aa, Artificial Sequence
  Chemically Synthesized
QVQLQESGGGLVQAGGSLRLSCAASGTISPDFAMGWYRQAPGKERELVAGIAGGGNTYYADSVKGRFTISRDNAKNTVYLQMNSLKPEDTAVYYCAVWDIPYQYHDYWGQGTQVTVSS

SEQ ID NO: 10003 - protein, 118 aa, Artificial Sequence
  Chemically Synthesized
QVQLQESGGGLVQAGGSLRLSCAASGSIFWLYQMGWYRQAPGKERELVASIDIGSNTNYADSVKGRFTISRDNAKNTVYLQMNSLKPEDTAVYYCAAVATNVTQLYYWGQGTQVTVSS

SEQ ID NO: 10004 - protein, 122 aa, Artificial Sequence
  Chemically Synthesized
QVQLQESGGGLVQAGGSLRLSCAASGTISARRAMGWYRQAPGKEREFVASIARGGSTYYADSVKGRFTISRDNAKNTVYLQMNSLKPEDTAVYYCAVWGRWYDTGYNRHAYWGQGTQVTVSS

SEQ ID NO: 10005 - protein, 118 aa, Artificial Sequence
  Chemically Synthesized
QVQLQESGGGLVQAGGSLRLSCAASGYISYAVFMGWYRQAPGKERELVATIAVGATTNYADSVKGRFTISRDNAKNTVYLQMNSLKPEDTAVYYCAAPDTSFRVLAYWGQGTQVTVSS

SEQ ID NO: 10006 - protein, 122 aa, Artificial Sequence
  Chemically Synthesized
QVQLQESGGGLVQAGGSLRLSCAASGSISMGWYRQAPGKEREFVAAIAYGATTYYADSVKGRFTISRDNAKNTVYLQMNSLKPEDTAVYYCAAFPYIVWRDQIYFWEWFKYWGQGTQVTVSS

SEQ ID NO: 10007 - protein, 117 aa, Artificial Sequence
  Chemically Synthesized
QVQLQESGGGLVQAGGSLRLSCAASGNISTVAYMGWYRQAPGKEREFVAAIGSVLLPYADSVKGRFTISRDNAKNTVYLQMNSLKPEDTAVYYCAAGSYRDGRHWYWGQGTQVTVSS

SEQ ID NO: 10008 - protein, 122 aa, Artificial Sequence
  Chemically Synthesized
QVQLQESGGGLVQAGGSLRLSCAASGYISYIWGMGWYRQAPGKEREFVASISDGATTYYADSVKGRFTISRDNAKNTVYLQMNSLKPEDTAVYYCAVTQVDTGFDGGGYDYWGQGTQVTVSS

SEQ ID NO: 10009 - protein, 118 aa, Artificial Sequence
  Chemically Synthesized
QVQLQESGGGLVQAGGSLRLSCAASGSISFYTSMGWYRQAPGKERELVAAIASGASTYYADSVKGRFTISRDNAKNTVYLQMNSLKPEDTAVYYCAAHVNVRGKHYYWGQGTQVTVSS

SEQ ID NO: 10010 - protein, 113 aa, Artificial Sequence
  Chemically Synthesized
QVQLQESGGGLVQAGGSLRLSCAASGNISDADTMGWYRQAPGKERELVAGINVGSTTNYADSVKGRFTISRDNAKNTVYLQMNSLKPEDTAVYYCAVLTVMYWGQGTQVTVSS

SEQ ID NO: 10011 - protein, 118 aa, Artificial Sequence
  Chemically Synthesized
QVQLQESGGGLVQAGGSLRLSCAASGSIFKAYGMGWYRQAPGKERELVATIASGANTNYADSVKGRFTISRDNAKNTVYLQMNSLKPEDTAVYYCAAVVRYVRTYRYWGQGTQVTVSS

SEQ ID NO: 10012 - protein, 118 aa, Artificial Sequence
  Chemically Synthesized
QVQLQESGGGLVQAGGSLRLSCAASGYISGDSDMGWYRQAPGKERELVAAITAGTNTYYADSVKGRFTISRDNAKNTVYLQMNSLKPEDTAVYYCAAGDVWGDYLYYWGQGTQVTVSS

SEQ ID NO: 10013 - protein, 118 aa, Artificial Sequence
  Chemically Synthesized
QVQLQESGGGLVQAGGSLRLSCAASGYIFDYYYMGWYRQAPGKERELVAAIASGTITNYADSVKGRFTISRDNAKNTVYLQMNSLKPEDTAVYYCAAQTPWSADHYYWGQGTQVTVSS

SEQ ID NO: 10014 - protein, 126 aa, Artificial Sequence
  Chemically Synthesized
QVQLQESGGGLVQAGGSLRLSCAASGTIFWRRWMGWYRQAPGKERELVASIDVGGSTYYADSVKGRFTISRDNAKNTVYLQMNSLKPEDTAVYYCAADLYDGPGRYFLPFPVYGYWGQGTQVTVSS

SEQ ID NO: 10015 - protein, 118 aa, Artificial Sequence
  Chemically Synthesized
QVQLQESGGGLVQAGGSLRLSCAASGNISLHGRMGWYRQAPGKERELVASITYGTNTNYADSVKGRFTISRDNAKNTVYLQMNSLKPEDTAVYYCAVKRYRYLSHDYWGQGTQVTVSS

SEQ ID NO: 10016 - protein, 126 aa, Artificial Sequence
  Chemically Synthesized
QVQLQESGGGLVQAGGSLRLSCAASGNISRYNDMGWYRQAPGKEREFVATIDTGTITYYADSVKGRFTISRDNAKNTVYLQMNSLKPEDTAVYYCAVDDYYIWPLSYHAPYYHDYWGQGTQVTVSS

SEQ ID NO: 10017 - protein, 112 aa, Artificial Sequence
  Chemically Synthesized
QVQLQESGGGLVQAGGSLRLSCAASGTISRKLMGWYRQAPGKEREFVATITNYADSVKGRFTISRDNAKNTVYLQMNSLKPEDTAVYYCAAGVPYEDPLGYWGQGTQVTVSS

SEQ ID NO: 10018 - protein, 122 aa, Artificial Sequence
  Chemically Synthesized
QVQLQESGGGLVQAGGSLRLSCAASGTIFRLTHMGWYRQAPGKEREFVATIGVGGNTNYADSVKGRFTISRDNAKNTVYLQMNSLKPEDTAVYYCAATYIVGWTYFKGLRYWGQGTQVTVSS

SEQ ID NO: 10019 - protein, 117 aa, Artificial Sequence
  Chemically Synthesized
QVQLQESGGGLVQAGGSLRLSCAASGSIFTDRSMGWYRQAPGKEREFVATITTGTNTNYADSVKGRFTISRDNAKNTVYLQMNSLKPEDTAVYYCAARASTLSTFYWGQGTQVTVSS

SEQ ID NO: 10020 - protein, 118 aa, Artificial Sequence
  Chemically Synthesized
QVQLQESGGGLVQAGGSLRLSCAASGSIFYFRRMGWYRQAPGKEREFVATIGFGANTNYADSVKGRFTISRDNAKNTVYLQMNSLKPEDTAVYYCAVRTGSADYLYYWGQGTQVTVSS

SEQ ID NO: 10021 - protein, 122 aa, Artificial Sequence
  Chemically Synthesized
QVQLQESGGGLVQAGGSLRLSCAASGTIFPYYDMGWYRQAPGKEREFVASITRGGTTYYADSVKGRFTISRDNAKNTVYLQMNSLKPEDTAVYYCAVVYYDYENIHGNHGYWGQGTQVTVSS

SEQ ID NO: 10022 - protein, 122 aa, Artificial Sequence
  Chemically Synthesized
QVQLQESGGGLVQAGGSLRLSCAASGSIFQSIGMGWYRQAPGKERELVAAITLGTTTYYADSVKGRFTISRDNAKNTVYLQMNSLKPEDTAVYYCAAILVLWDGTDVQLEYWGQGTQVTVSS

SEQ ID NO: 10023 - protein, 118 aa, Artificial Sequence
  Chemically Synthesized
QVQLQESGGGLVQAGGSLRLSCAASGYIFFYNSMGWYRQAPGKERELVAGIAYGANTNYADSVKGRFTISRDNAKNTVYLQMNSLKPEDTAVYYCAVIRGWYSRHVYWGQGTQVTVSS

SEQ ID NO: 10024 - protein, 116 aa, Artificial Sequence
  Chemically Synthesized
QVQLQESGGGLVQAGGSLRLSCAASGSISVWRYMGWYRQAPGKERELVATINFGANTYYADSVKGRFTISRDNAKNTVYLQMNSLKPEDTAVYYCAATVTTLPFYWGQGTQVTVSS

SEQ ID NO: 10025 - protein, 118 aa, Artificial Sequence
  Chemically Synthesized
QVQLQESGGGLVQAGGSLRLSCAASGSISAPYAMGWYRQAPGKERELVASISRGGSTYYADSVKGRFTISRDNAKNTVYLQMNSLKPEDTAVYYCAATRRGVPDFWYWGQGTQVTVSS

SEQ ID NO: 10026 - protein, 122 aa, Artificial Sequence
  Chemically Synthesized
QVQLQESGGGLVQAGGSLRLSCAASGYISRRSYMGWYRQAPGKERELVATISYGAITYYADSVKGRFTISRDNAKNTVYLQMNSLKPEDTAVYYCAAINRYGPRPYAPLRYWGQGTQVTVSS

SEQ ID NO: 10027 - protein, 118 aa, Artificial Sequence
  Chemically Synthesized
QVQLQESGGGLVQAGGSLRLSCAASGSISPDVRMGWYRQAPGKEREFVASINTGANTYYADSVKGRFTISRDNAKNTVYLQMNSLKPEDTAVYYCAATWYTWGKHPYWGQGTQVTVSS

SEQ ID NO: 10028 - protein, 118 aa, Artificial Sequence
  Chemically Synthesized
QVQLQESGGGLVQAGGSLRLSCAASGTIFISPHMGWYRQAPGKERELVAGIAGGTNTYYADSVKGRFTISRDNAKNTVYLQMNSLKPEDTAVYYCAVRRRYYITHRYWGQGTQVTVSS

SEQ ID NO: 10029 - protein, 122 aa, Artificial Sequence
  Chemically Synthesized
QVQLQESGGGLVQAGGSLRLSCAASGSIFPYHLMGWYRQAPGKEREFVAAITVGANTYYADSVKGRFTISRDNAKNTVYLQMNSLKPEDTAVYYCAAIPTLYWYYYATYLYWGQGTQVTVSS

SEQ ID NO: 10030 - protein, 118 aa, Artificial Sequence
  Chemically Synthesized
QVQLQESGGGLVQAGGSLRLSCAASGSIFYLFYMGWYRQAPGKEREFVAAINPGGSTNYADSVKGRFTISRDNAKNTVYLQMNSLKPEDTAVYYCAVRDADYYLYRYWGQGTQVTVSS

SEQ ID NO: 10031 - protein, 122 aa, Artificial Sequence
  Chemically Synthesized
QVQLQESGGGLVQAGGSLRLSCAASGTIFRKWYMGWYRQAPGKERELVAGISGGGSTYYADSVKGRFTISRDNAKNTVYLQMNSLKPEDTAVYYCAVYYRPRYYYRLYYYYWGQGTQVTVSS

SEQ ID NO: 10032 - protein, 118 aa, Artificial Sequence
  Chemically Synthesized
QVQLQESGGGLVQAGGSLRLSCAASGYIFYSYSMGWYRQAPGKERELVATINYGAITYYADSVKGRFTISRDNAKNTVYLQMNSLKPEDTAVYYCAVGVLLLPYHRYWGQGTQVTVSS

SEQ ID NO: 10033 - protein, 126 aa, Artificial Sequence
  Chemically Synthesized
QVQLQESGGGLVQAGGSLRLSCAASGNIFLLHGMGWYRQAPGKERELVAAIDAGSSTYYADSVKGRFTISRDNAKNTVYLQMNSLKPEDTAVYYCAVLEAYYVYNIWYYGAYLGYWGQGTQVTVSS

SEQ ID NO: 10034 - protein, 118 aa, Artificial Sequence
  Chemically Synthesized
QVQLQESGGGLVQAGGSLRLSCAASGYISSRRFMGWYRQAPGKEREFVAAINFGGTTNYADSVKGRFTISRDNAKNTVYLQMNSLKPEDTAVYYCAARYYVSNKHYYWGQGTQVTVSS

SEQ ID NO: 10035 - protein, 118 aa, Artificial Sequence
  Chemically Synthesized
QVQLQESGGGLVQAGGSLRLSCAASGSIFSFTPMGWYRQAPGKEREFVAAIGYGTNTYYADSVKGRFTISRDNAKNTVYLQMNSLKPEDTAVYYCAAYGYYSPNFYYWGQGTQVTVSS

SEQ ID NO: 10036 - protein, 120 aa, Artificial Sequence
  Chemically Synthesized
QVQLQESGGGLVQAGGSLRLSCAASGTISYANGMGWYRQAPGKERELVASITNGGTTYYADSVKGRFTISRDNAKNTVYLQMNSLKPEDTAVYYCAVYVGQTGGSKHAYWGQGTQVTVSS

SEQ ID NO: 10037 - protein, 118 aa, Artificial Sequence
  Chemically Synthesized
QVQLQESGGGLVQAGGSLRLSCAASGNISLDTAMGWYRQAPGKEREFVATIDLGGNTNYADSVKGRFTISRDNAKNTVYLQMNSLKPEDTAVYYCAVDYYYEPYLSYWGQGTQVTVSS

SEQ ID NO: 10038 - protein, 118 aa, Artificial Sequence
  Chemically Synthesized
QVQLQESGGGLVQAGGSLRLSCAASGYISRTLSMGWYRQAPGKEREFVAAIGYGGNTYYADSVKGRFTISRDNAKNTVYLQMNSLKPEDTAVYYCAVRTYYRWKYGYWGQGTQVTVSS

SEQ ID NO: 10039 - protein, 118 aa, Artificial Sequence
  Chemically Synthesized
QVQLQESGGGLVQAGGSLRLSCAASGNISNDLSMGWYRQAPGKEREFVASINPGTSTYYADSVKGRFTISRDNAKNTVYLQMNSLKPEDTAVYYCAVDYRSIDDYYYWGQGTQVTVSS

SEQ ID NO: 10040 - protein, 126 aa, Artificial Sequence
  Chemically Synthesized
QVQLQESGGGLVQAGGSLRLSCAASGNIFSLVDMGWYRQAPGKERELVASITLGGITYYADSVKGRFTISRDNAKNTVYLQMNSLKPEDTAVYYCAVHPNATGTEYKRYAWDHSYWGQGTQVTVSS

SEQ ID NO: 10041 - protein, 122 aa, Artificial Sequence
  Chemically Synthesized
QVQLQESGGGLVQAGGSLRLSCAASGTIFLPLVMGWYRQAPGKERELVAAITYGGNTNYADSVKGRFTISRDNAKNTVYLQMNSLKPEDTAVYYCAVVRHPRWTAYHGHVYWGQGTQVTVSS

SEQ ID NO: 10042 - protein, 122 aa, Artificial Sequence
  Chemically Synthesized
QVQLQESGGGLVQAGGSLRLSCAASGYISEQYGMGWYRQAPGKEREFVAGITIGATTYYADSVKGRFTISRDNAKNTVYLQMNSLKPEDTAVYYCAALLYNVVADGDYHVYWGQGTQVTVSS

SEQ ID NO: 10043 - protein, 122 aa, Artificial Sequence
  Chemically Synthesized
QVQLQESGGGLVQAGGSLRLSCAASGNIFYYHTMGWYRQAPGKERELVAAIDIGGTTYYADSVKGRFTISRDNAKNTVYLQMNSLKPEDTAVYYCAASREAPYDVAYEHGYWGQGTQVTVSS

SEQ ID NO: 10044 - protein, 118 aa, Artificial Sequence
  Chemically Synthesized
QVQLQESGGGLVQAGGSLRLSCAASGSIFPTPAMGWYRQAPGKERELVAAIAYGATTNYADSVKGRFTISRDNAKNTVYLQMNSLKPEDTAVYYCAANVNGDISFYYWGQGTQVTVSS

SEQ ID NO: 10045 - protein, 118 aa, Artificial Sequence
  Chemically Synthesized
QVQLQESGGGLVQAGGSLRLSCAASGYISNYVFMGWYRQAPGKEREFVAGINSGANTYYADSVKGRFTISRDNAKNTVYLQMNSLKPEDTAVYYCAAFRTTKSTTMYWGQGTQVTVSS

SEQ ID NO: 10046 - protein, 122 aa, Artificial Sequence
  Chemically Synthesized
QVQLQESGGGLVQAGGSLRLSCAASGTISPRSIMGWYRQAPGKEREFVASINDGTITYYADSVKGRFTISRDNAKNTVYLQMNSLKPEDTAVYYCAAGVRPRRYYYYYHYYWGQGTQVTVSS

SEQ ID NO: 10047 - protein, 111 aa, Artificial Sequence
  Chemically Synthesized
QVQLQESGGGLVQAGGSLRLSCAASGTIFRDNYMGWYRQAPGKERELVATIYADSVKGRFTISRDNAKNTVYLQMNSLKPEDTAVYYCAAVLSEYVNHSYWGQGTQVTVSS

SEQ ID NO: 10048 - protein, 126 aa, Artificial Sequence
  Chemically Synthesized
QVQLQESGGGLVQAGGSLRLSCAASGTIFYYYYMGWYRQAPGKERELVAAITDGASTNYADSVKGRFTISRDNAKNTVYLQMNSLKPEDTAVYYCAVLYEFGHSPAVYPTRRHYYWGQGTQVTVSS

SEQ ID NO: 10049 - protein, 117 aa, Artificial Sequence
  Chemically Synthesized
QVQLQESGGGLVQAGGSLRLSCAASGNIFDTSMGWYRQAPGKEREFVAAIDFGGNTNYADSVKGRFTISRDNAKNTVYLQMNSLKPEDTAVYYCAASRKTSYQYDYWGQGTQVTVSS

SEQ ID NO: 10050 - protein, 118 aa, Artificial Sequence
  Chemically Synthesized
QVQLQESGGGLVQAGGSLRLSCAASGSISNWHRMGWYRQAPGKERELVATISYGASTNYADSVKGRFTISRDNAKNTVYLQMNSLKPEDTAVYYCAAPYRYYRWHRYWGQGTQVTVSS

SEQ ID NO: 10051 - protein, 126 aa, Artificial Sequence
  Chemically Synthesized
QVQLQESGGGLVQAGGSLRLSCAASGYISVLLKMGWYRQAPGKEREFVAGIGRGANTYYADSVKGRFTISRDNAKNTVYLQMNSLKPEDTAVYYCAVTPGGWYRLPGDTYAYHRYWGQGTQVTVSS

SEQ ID NO: 10052 - protein, 126 aa, Artificial Sequence
  Chemically Synthesized
QVQLQESGGGLVQAGGSLRLSCAASGSIFFYTYMGWYRQAPGKEREFVATINDGSTTNYADSVKGRFTISRDNAKNTVYLQMNSLKPEDTAVYYCAVSYGFTYVTPFVFHLILTYWGQGTQVTVSS

SEQ ID NO: 10053 - protein, 122 aa, Artificial Sequence
  Chemically Synthesized
QVQLQESGGGLVQAGGSLRLSCAASGSIFWRPFMGWYRQAPGKEREFVAAIDKGTNTYYADSVKGRFTISRDNAKNTVYLQMNSLKPEDTAVYYCAVLWIYGYRAAPLHKYWGQGTQVTVSS

SEQ ID NO: 10054 - protein, 117 aa, Artificial Sequence
  Chemically Synthesized
QVQLQESGGGLVQAGGSLRLSCAASGSIFGYFMGWYRQAPGKEREFVATIDDGTSTYYADSVKGRFTISRDNAKNTVYLQMNSLKPEDTAVYYCAANGYGVLLYSYWGQGTQVTVSS

SEQ ID NO: 10055 - protein, 114 aa, Artificial Sequence
  Chemically Synthesized
QVQLQESGGGLVQAGGSLRLSCAASGSIFSPGTMGWYRQAPGKEREFVAGISIGGSSTNYADSVKGRFTISRDNAKNTVYLQMNSLKPEDTAVYYCAVGYYRYWGQGTQVTVSS

SEQ ID NO: 10056 - protein, 118 aa, Artificial Sequence
  Chemically Synthesized
QVQLQESGGGLVQAGGSLRLSCAASGNISINTGMGWYRQAPGKEREFVASISEGSSTYYADSVKGRFTISRDNAKNTVYLQMNSLKPEDTAVYYCAATAYRFSVLPYWGQGTQVTVSS

SEQ ID NO: 10057 - protein, 117 aa, Artificial Sequence
  Chemically Synthesized
QVQLQESGGGLVQAGGSLRLSCAASGNIFGETMGWYRQAPGKEREFVATIGTGGTTNYADSVKGRFTISRDNAKNTVYLQMNSLKPEDTAVYYCAGWSLVRSVSSYWGQGTQVTVSS

SEQ ID NO: 10058 - protein, 118 aa, Artificial Sequence
  Chemically Synthesized
QVQLQESGGGLVQAGGSLRLSCAASGYISPARGMGWYRQAPGKERELVAAIAWGTTTYYADSVKGRFTISRDNAKNTVYLQMNSLKPEDTAVYYCAVGGRYWLRFGYWGQGTQVTVSS

SEQ ID NO: 10059 - protein, 126 aa, Artificial Sequence
  Chemically Synthesized
QVQLQESGGGLVQAGGSLRLSCAASGNISTPVLMGWYRQAPGKERELVAAISRGANTYYADSVKGRFTISRDNAKNTVYLQMNSLKPEDTAVYYCAARLGRRTYRQDPRYQWLNYWGQGTQVTVSS

SEQ ID NO: 10060 - protein, 122 aa, Artificial Sequence
  Chemically Synthesized
QVQLQESGGGLVQAGGSLRLSCAASGSIFAPAYMGWYRQAPGKEREFVASIDVGSSTYYADSVKGRFTISRDNAKNTVYLQMNSLKPEDTAVYYCAASDVPYYYPQSEHYYWGQGTQVTVSS

SEQ ID NO: 10061 - protein, 126 aa, Artificial Sequence
  Chemically Synthesized
QVQLQESGGGLVQAGGSLRLSCAASGTIFGPSRMGWYRQAPGKERELVASIGTGSNTNYADSVKGRFTISRDNAKNTVYLQMNSLKPEDTAVYYCAVPTAYYAILPIRYGFPYVYWGQGTQVTVSS

SEQ ID NO: 10062 - protein, 118 aa, Artificial Sequence
  Chemically Synthesized
QVQLQESGGGLVQAGGSLRLSCAASGSIFPSSSMGWYRQAPGKERELVATIAGGTITYYADSVKGRFTISRDNAKNTVYLQMNSLKPEDTAVYYCAANLVAFAPFLYWGQGTQVTVSS

SEQ ID NO: 10063 - protein, 126 aa, Artificial Sequence
  Chemically Synthesized
QVQLQESGGGLVQAGGSLRLSCAASGTISYYSWMGWYRQAPGKEREFVATIAHGANTNYADSVKGRFTISRDNAKNTVYLQMNSLKPEDTAVYYCAAPYYAYGHNKDYHGASYDYWGQGTQVTVSS

SEQ ID NO: 10064 - protein, 117 aa, Artificial Sequence
  Chemically Synthesized
QVQLQESGGGLVQAGGSLRLSCAASGYISDYGSMGWYRQAPGKERELVAGISSVLLPYADSVKGRFTISRDNAKNTVYLQMNSLKPEDTAVYYCAVVRSRYVWYWYWGQGTQVTVSS

SEQ ID NO: 10065 - protein, 122 aa, Artificial Sequence
  Chemically Synthesized
QVQLQESGGGLVQAGGSLRLSCAASGSIFENDAMGWYRQAPGKERELVASITAGTTTYYADSVKGRFTISRDNAKNTVYLQMNSLKPEDTAVYYCAVGDDVVRYVDDGHWYWGQGTQVTVSS

SEQ ID NO: 10066 - protein, 118 aa, Artificial Sequence
  Chemically Synthesized
QVQLQESGGGLVQAGGSLRLSCAASGNISTAYLMGWYRQAPGKERELVATINSGGNTYYADSVKGRFTISRDNAKNTVYLQMNSLKPEDTAVYYCAVEWYGQRGHYYWGQGTQVTVSS

SEQ ID NO: 10067 - protein, 117 aa, Artificial Sequence
  Chemically Synthesized
QVQLQESGGGLVQAGGSLRLSCAASGTISIRPLMGWYRQAPGKERELVATIGLGSNTNYADSVKGRFTISRDNAKNTVYLQMNSLKPEDTAVYYCAVRPTVVRTLYWGQGTQVTVSS

SEQ ID NO: 10068 - protein, 118 aa, Artificial Sequence
  Chemically Synthesized
QVQLQESGGGLVQAGGSLRLSCAASGTISASYWMGWYRQAPGKERELVATINVGASTYYADSVKGRFTISRDNAKNTVYLQMNSLKPEDTAVYYCAVVGQSGTYLQYWGQGTQVTVSS

SEQ ID NO: 10069 - protein, 117 aa, Artificial Sequence
  Chemically Synthesized
QVQLQESGGGLVQAGGSLRLSCAASGTISYYNMGWYRQAPGKERELVASIDAGGNTYYADSVKGRFTISRDNAKNTVYLQMNSLKPEDTAVYYCAVALTGETAHWYWGQGTQVTVSS

SEQ ID NO: 10070 - protein, 118 aa, Artificial Sequence
  Chemically Synthesized
QVQLQESGGGLVQAGGSLRLSCAASGNISGVVYMGWYRQAPGKERELVASIAGGANTYYADSVKGRFTISRDNAKNTVYLQMNSLKPEDTAVYYCAADWYDSADHHYWGQGTQVTVSS

SEQ ID NO: 10071 - protein, 111 aa, Artificial Sequence
  Chemically Synthesized
QVQLQESGGGLVQAGGSLRLSCAASGNISDFSRMGWYRQAPGKERELVAAINRGANTYYADSVKGRFTISRDNAKNTVYLQMNSLKPEDTAVYYCAVRQYWGQGTQVTVSS

SEQ ID NO: 10072 - protein, 117 aa, Artificial Sequence
  Chemically Synthesized
QVQLQESGGGLVQAGGSLRLSCAASGTIFYDNMGWYRQAPGKEREFVAGIADGSNTNYADSVKGRFTISRDNAKNTVYLQMNSLKPEDTAVYYCAVYWGPILSFYYWGQGTQVTVSS

SEQ ID NO: 10073 - protein, 118 aa, Artificial Sequence
  Chemically Synthesized
QVQLQESGGGLVQAGGSLRLSCAASGSIFGKAVMGWYRQAPGKERELVASIDWGSSTNYADSVKGRFTISRDNAKNTVYLQMNSLKPEDTAVYYCAVGTAGPVRLSYWGQGTQVTVSS

SEQ ID NO: 10074 - protein, 126 aa, Artificial Sequence
  Chemically Synthesized
QVQLQESGGGLVQAGGSLRLSCAASGSISRYLYMGWYRQAPGKEREFVAGIDYGGITYYADSVKGRFTISRDNAKNTVYLQMNSLKPEDTAVYYCAARDISPRGASGDDFDGLDYWGQGTQVTVSS

SEQ ID NO: 10075 - protein, 118 aa, Artificial Sequence
  Chemically Synthesized
QVQLQESGGGLVQAGGSLRLSCAASGSISRYQYMGWYRQAPGKEREFVATIDPGGTTYYADSVKGRFTISRDNAKNTVYLQMNSLKPEDTAVYYCAVQDLDYVHYTYWGQGTQVTVSS

SEQ ID NO: 10076 - protein, 122 aa, Artificial Sequence
  Chemically Synthesized
QVQLQESGGGLVQAGGSLRLSCAASGTIFPKDVMGWYRQAPGKERELVAGIGIGSNTYYADSVKGRFTISRDNAKNTVYLQMNSLKPEDTAVYYCAAQSIGTDSIYYYFAYWGQGTQVTVSS

SEQ ID NO: 10077 - protein, 121 aa, Artificial Sequence
  Chemically Synthesized
QVQLQESGGGLVQAGGSLRLSCAASGSIFYAQAMGWYRQAPGKERELVATITSVVIPYADSVKGRFTISRDNAKNTVYLQMNSLKPEDTAVYYCAVGPYKYQDQYSDLIYWGQGTQVTVSS

SEQ ID NO: 10078 - protein, 118 aa, Artificial Sequence
  Chemically Synthesized
QVQLQESGGGLVQAGGSLRLSCAASGNIFNVYQMGWYRQAPGKEREFVAGISRGGITNYADSVKGRFTISRDNAKNTVYLQMNSLKPEDTAVYYCAVQLTESVAYSYWGQGTQVTVSS

SEQ ID NO: 10079 - protein, 118 aa, Artificial Sequence
  Chemically Synthesized
QVQLQESGGGLVQAGGSLRLSCAASGSIFDKETMGWYRQAPGKERELVATIDGGGNTYYADSVKGRFTISRDNAKNTVYLQMNSLKPEDTAVYYCAVLFYVPSTHLYWGQGTQVTVSS

SEQ ID NO: 10080 - protein, 117 aa, Artificial Sequence
  Chemically Synthesized
QVQLQESGGGLVQAGGSLRLSCAASGNISTQRYMGWYRQAPGKERELVAGISDGTTTNYADSVKGRFTISRDNAKNTVYLQMNSLKPEDTAVYYCAVTRTTTWVIYWGQGTQVTVSS

SEQ ID NO: 10081 - protein, 122 aa, Artificial Sequence
  Chemically Synthesized
QVQLQESGGGLVQAGGSLRLSCAASGYIFYYTPMGWYRQAPGKEREFVAAIDQGGITNYADSVKGRFTISRDNAKNTVYLQMNSLKPEDTAVYYCAVDDTDIRSADLRPWYWGQGTQVTVSS

SEQ ID NO: 10082 - protein, 122 aa, Artificial Sequence
  Chemically Synthesized
QVQLQESGGGLVQAGGSLRLSCAASGYISQYRFMGWYRQAPGKEREFVAAIGWGGNTYYADSVKGRFTISRDNAKNTVYLQMNSLKPEDTAVYYCAVADGRAPYYPSVHYYWGQGTQVTVSS

SEQ ID NO: 10083 - protein, 118 aa, Artificial Sequence
  Chemically Synthesized
QVQLQESGGGLVQAGGSLRLSCAASGTISDYDGMGWYRQAPGKEREFVAAIDDGGITNYADSVKGRFTISRDNAKNTVYLQMNSLKPEDTAVYYCAVWFRVKTRFQYWGQGTQVTVSS

SEQ ID NO: 10084 - protein, 117 aa, Artificial Sequence
  Chemically Synthesized
QVQLQESGGGLVQAGGSLRLSCAASGTISDYSMGWYRQAPGKEREFVATIAKGSNTNYADSVKGRFTISRDNAKNTVYLQMNSLKPEDTAVYYCAVYGIQARQHTYWGQGTQVTVSS

SEQ ID NO: 10085 - protein, 118 aa, Artificial Sequence
  Chemically Synthesized
QVQLQESGGGLVQAGGSLRLSCAASGYISYNDAMGWYRQAPGKEREFVAGIAPGSSTLYADSVKGRFTISRDNAKNTVYLQMNSLKPEDTAVYYCAAYLAGDYPLGYWGQGTQVTVSS

SEQ ID NO: 10086 - protein, 117 aa, Artificial Sequence
  Chemically Synthesized
QVQLQESGGGLVQAGGSLRLSCAASGYIFRYGEMGWYRQAPGKEREFVAAISYGGSTYYADSVKGRFTISRDNAKNTVYLQMNSLKPEDTAVYYCAAVYAQYWFLYWGQGTQVTVSS

SEQ ID NO: 10087 - protein, 118 aa, Artificial Sequence
  Chemically Synthesized
QVQLQESGGGLVQAGGSLRLSCAASGSIFSTQVMGWYRQAPGKERELVAAITAGSNTYYADSVKGRFTISRDNAKNTVYLQMNSLKPEDTAVYYCAVYYGYAISLPYWGQGTQVTVSS

SEQ ID NO: 10088 - protein, 126 aa, Artificial Sequence
  Chemically Synthesized
QVQLQESGGGLVQAGGSLRLSCAASGSISSAYYMGWYRQAPGKERELVATINYGGITYYADSVKGRFTISRDNAKNTVYLQMNSLKPEDTAVYYCAVDADEVRNIYILAYGDHSYWGQGTQVTVSS

SEQ ID NO: 10089 - protein, 126 aa, Artificial Sequence
  Chemically Synthesized
QVQLQESGGGLVQAGGSLRLSCAASGTIFWVFYMGWYRQAPGKEREFVATIANGSITYYADSVKGRFTISRDNAKNTVYLQMNSLKPEDTAVYYCAALHTLNRYGYGQYDLNLAYWGQGTQVTVSS

SEQ ID NO: 10090 - protein, 117 aa, Artificial Sequence
  Chemically Synthesized
QVQLQESGGGLVQAGGSLRLSCAASGSISYVLYMGWYRQAPGKEREFVASITHGASTNYADSVKGRFTISRDNAKNTVYLQMNSLKPEDTAVYYCAARYYDIHDLYWGQGTQVTVSS

SEQ ID NO: 10091 - protein, 126 aa, Artificial Sequence
  Chemically Synthesized
QVQLQESGGGLVQAGGSLRLSCAASGTIFAKAYMGWYRQAPGKERELVAAISRGGSTYYADSVKGRFTISRDNAKNTVYLQMNSLKPEDTAVYYCAVLYDYTQAYPTVKGYPHWYWGQGTQVTVSS

SEQ ID NO: 10092 - protein, 121 aa, Artificial Sequence
  Chemically Synthesized
QVQLQESGGGLVQAGGSLRLSCAASGSIFVGRYMGWYRQAPGKEREFVASIGTGSNLYADSVKGRFTISRDNAKNTVYLQMNSLKPEDTAVYYCAVAGRYKYWDDARLGYWGQGTQVTVSS

SEQ ID NO: 10093 - protein, 117 aa, Artificial Sequence
  Chemically Synthesized
QVQLQESGGGLVQAGGSLRLSCAASGTISVYTMGWYRQAPGKERELVATISSGGITNYADSVKGRFTISRDNAKNTVYLQMNSLKPEDTAVYYCAVGVSPTDIHQYWGQGTQVTVSS

SEQ ID NO: 10094 - protein, 117 aa, Artificial Sequence
  Chemically Synthesized
QVQLQESGGGLVQAGGSLRLSCAASGTISSNLDMGWYRQAPGKEREFVAGINTGSSTNYADSVKGRFTISRDNAKNTVYLQMNSLKPEDTAVYYCAAYSRLSRFLYWGQGTQVTVSS

SEQ ID NO: 10095 - protein, 118 aa, Artificial Sequence
  Chemically Synthesized
QVQLQESGGGLVQAGGSLRLSCAASGNIFGYADMGWYRQAPGKEREFVASIGDGAITYYADSVKGRFTISRDNAKNTVYLQMNSLKPEDTAVYYCAADEDFPTTNMYWGQGTQVTVSS

SEQ ID NO: 10096 - protein, 122 aa, Artificial Sequence
  Chemically Synthesized
QVQLQESGGGLVQAGGSLRLSCAASGSIFFLYDMGWYRQAPGKEREFVATIDYGSTTNYADSVKGRFTISRDNAKNTVYLQMNSLKPEDTAVYYCAVPPNGGYKFADRHVYWGQGTQVTVSS

SEQ ID NO: 10097 - protein, 122 aa, Artificial Sequence
  Chemically Synthesized
QVQLQESGGGLVQAGGSLRLSCAASGNISFTYKMGWYRQAPGKEREFVAGIGRGGITNYADSVKGRFTISRDNAKNTVYLQMNSLKPEDTAVYYCAVVDPRGQYHGGDHYYWGQGTQVTVSS

SEQ ID NO: 10098 - protein, 119 aa, Artificial Sequence
  Chemically Synthesized
QVQLQESGGGLVQAGGSLRLSCAASGSILVRLMGWYRQAPGKEREFVAGIDVGGNTNYADSVKGRFTISRDNAKNTVYLQMNSLKPEDTAVYYCAVTRGRASTSDYSYWGQGTQVTVSS

SEQ ID NO: 10099 - protein, 118 aa, Artificial Sequence
  Chemically Synthesized
QVQLQESGGGLVQAGGSLRLSCAASGTIFLGQYMGWYRQAPGKERELVAAISEGGTTYYADSVKGRFTISRDNAKNTVYLQMNSLKPEDTAVYYCAVPVGDGDAHLYWGQGTQVTVSS

SEQ ID NO: 10100 - protein, 118 aa, Artificial Sequence
  Chemically Synthesized
QVQLQESGGGLVQAGGSLRLSCAASGTISTGQQMGWYRQAPGKEREFVAAISDGGNTNYADSVKGRFTISRDNAKNTVYLQMNSLKPEDTAVYYCAAHRADNPNHTYWGQGTQVTVSS

SEQ ID NO: 10101 - protein, 118 aa, Artificial Sequence
  Chemically Synthesized
QVQLQESGGGLVQAGGSLRLSCAASGTISEYTYMGWYRQAPGKEREFVAGINDGSNTNYADSVKGRFTISRDNAKNTVYLQMNSLKPEDTAVYYCAVNPGGGRPFTYWGQGTQVTVSS

SEQ ID NO: 10102 - protein, 121 aa, Artificial Sequence
  Chemically Synthesized
QVQLQESGGGLVQAGGSLRLSCAASGSISIIIDMGWYRQAPGKERELVAVLMLVLVPYADSVKGRFTISRDNAKNTVYLQMNSLKPEDTAVYYCAVQGTSDLSGAGRFLYWGQGTQVTVSS

SEQ ID NO: 10103 - protein, 118 aa, Artificial Sequence
  Chemically Synthesized
QVQLQESGGGLVQAGGSLRLSCAASGYISYTGPMGWYRQAPGKEREFVASIGAGGITYYADSVKGRFTISRDNAKNTVYLQMNSLKPEDTAVYYCAVLYGQDTVYTYWGQGTQVTVSS

SEQ ID NO: 10104 - protein, 118 aa, Artificial Sequence
  Chemically Synthesized
QVQLQESGGGLVQAGGSLRLSCAASGSIFAVFFMGWYRQAPGKEREFVATIALGASTNYADSVKGRFTISRDNAKNTVYLQMNSLKPEDTAVYYCAVADDVRYVHWYWGQGTQVTVSS

SEQ ID NO: 10105 - protein, 126 aa, Artificial Sequence
  Chemically Synthesized
QVQLQESGGGLVQAGGSLRLSCAASGYIFVYEDMGWYRQAPGKERELVATIGYGASTNYADSVKGRFTISRDNAKNTVYLQMNSLKPEDTAVYYCAVSQSISVQPRLANVGDLEYWGQGTQVTVSS

SEQ ID NO: 10106 - protein, 122 aa, Artificial Sequence
  Chemically Synthesized
QVQLQESGGGLVQAGGSLRLSCAASGYISGRYRMGWYRQAPGKERELVATINYGASTYYADSVKGRFTISRDNAKNTVYLQMNSLKPEDTAVYYCAVRRKYPTAFWDRLYYWGQGTQVTVSS

SEQ ID NO: 10107 - protein, 126 aa, Artificial Sequence
  Chemically Synthesized
QVQLQESGGGLVQAGGSLRLSCAASGTISGDTIMGWYRQAPGKEREFVAAINDGTSTNYADSVKGRFTISRDNAKNTVYLQMNSLKPEDTAVYYCAVGNGWDLSVYSNRGIDFAYWGQGTQVTVSS

SEQ ID NO: 10108 - protein, 118 aa, Artificial Sequence
  Chemically Synthesized
QVQLQESGGGLVQAGGSLRLSCAASGSISLWYTMGWYRQAPGKEREFVATISYGTNTNYADSVKGRFTISRDNAKNTVYLQMNSLKPEDTAVYYCAVYYVHQPFLRYWGQGTQVTVSS

SEQ ID NO: 10109 - protein, 122 aa, Artificial Sequence
  Chemically Synthesized
QVQLQESGGGLVQAGGSLRLSCAASGNISYQNNMGWYRQAPGKEREFVASIAGGAITNYADSVKGRFTISRDNAKNTVYLQMNSLKPEDTAVYYCAVYYWSLTYTYTRYYYWGQGTQVTVSS

SEQ ID NO: 10110 - protein, 107 aa, Artificial Sequence
  Chemically Synthesized
QVQLQESGGGLVQAGGSLRLSCAASGNISARGLMGWYRQAPGKERELVATYLYADSVKGRFTISRDNAKNTVYLQMNSLKPEDTAVYYCAVPFLYYWGQGTQVTVSS

SEQ ID NO: 10111 - protein, 125 aa, Artificial Sequence
  Chemically Synthesized
QVQLQESGGGLVQAGGSLRLSCAASGNISDTDAMGWYRQAPGKEREFVAGISDGGNTNYADSVKGRFTISRDNAKNTVYLQMNSLKPEDTAVYYCAVHTYDDPTHYGEGGDYRYWGQGTQVTVSS

SEQ ID NO: 10112 - protein, 118 aa, Artificial Sequence
  Chemically Synthesized
QVQLQESGGGLVQAGGSLRLSCAASGTIFGDGDMGWYRQAPGKERELVAGIGLGGNTYYADSVKGRFTISRDNAKNTVYLQMNSLKPEDTAVYYCAADEWLSRYLDYWGQGTQVTVSS

SEQ ID NO: 10113 - protein, 126 aa, Artificial Sequence
  Chemically Synthesized
QVQLQESGGGLVQAGGSLRLSCAASGTIFRDQGMGWYRQAPGKEREFVAGITVGTTTNYADSVKGRFTISRDNAKNTVYLQMNSLKPEDTAVYYCAVYWVNAVWIYVGDYHSHVYWGQGTQVTVSS

SEQ ID NO: 10114 - protein, 116 aa, Artificial Sequence
  Chemically Synthesized
QVQLQESGGGLVQAGGSLRLSCAASGTIFYQSTMGWYRQAPGKEREFVASIVLVVIPYADSVKGRFTISRDNAKNTVYLQMNSLKPEDTAVYYCAVASRAGHLGYWGQGTQVTVSS

SEQ ID NO: 10115 - protein, 126 aa, Artificial Sequence
  Chemically Synthesized
QVQLQESGGGLVQAGGSLRLSCAASGTIFYVGAMGWYRQAPGKERELVAGITSGGTTNYADSVKGRFTISRDNAKNTVYLQMNSLKPEDTAVYYCAVAYAGGYVIRDDLGLPFAYWGQGTQVTVSS

SEQ ID NO: 10116 - protein, 125 aa, Artificial Sequence
  Chemically Synthesized
QVQLQESGGGLVQAGGSLRLSCAASGNISYYAMGWYRQAPGKERELVAAIAGGSITYYADSVKGRFTISRDNAKNTVYLQMNSLKPEDTAVYYCAVRYSSAYDDPIDVYYFLIYWGQGTQVTVSS

SEQ ID NO: 10117 - protein, 122 aa, Artificial Sequence
  Chemically Synthesized
QVQLQESGGGLVQAGGSLRLSCAASGSIFYALRMGWYRQAPGKERELVAAIAYGAITYYADSVKGRFTISRDNAKNTVYLQMNSLKPEDTAVYYCAATAKGKRTEPYAHTYWGQGTQVTVSS

SEQ ID NO: 10118 - protein, 118 aa, Artificial Sequence
  Chemically Synthesized
QVQLQESGGGLVQAGGSLRLSCAASGSIFDYGAMGWYRQAPGKEREFVATIDYGTNTYYADSVKGRFTISRDNAKNTVYLQMNSLKPEDTAVYYCAAEPRADQPFYYWGQGTQVTVSS

SEQ ID NO: 10119 - protein, 118 aa, Artificial Sequence
  Chemically Synthesized
QVQLQESGGGLVQAGGSLRLSCAASGTISSGGIMGWYRQAPGKERELVAAISSGGNTYYADSVKGRFTISRDNAKNTVYLQMNSLKPEDTAVYYCAVTVYWHYWLEYWGQGTQVTVSS

SEQ ID NO: 10120 - protein, 118 aa, Artificial Sequence
  Chemically Synthesized
QVQLQESGGGLVQAGGSLRLSCAASGTIFFAPYMGWYRQAPGKEREFVAAIGGGSITYYADSVKGRFTISRDNAKNTVYLQMNSLKPEDTAVYYCAANFRRIVIYKYWGQGTQVTVSS

SEQ ID NO: 10121 - protein, 122 aa, Artificial Sequence
  Chemically Synthesized
QVQLQESGGGLVQAGGSLRLSCAASGYIFHPEYMGWYRQAPGKERELVAGISSGGSTNYADSVKGRFTISRDNAKNTVYLQMNSLKPEDTAVYYCAVYARYYYALWSIFYYWGQGTQVTVSS

SEQ ID NO: 10122 - protein, 126 aa, Artificial Sequence
  Chemically Synthesized
QVQLQESGGGLVQAGGSLRLSCAASGSISVDYVMGWYRQAPGKERELVAGIALGGITNYADSVKGRFTISRDNAKNTVYLQMNSLKPEDTAVYYCAVRFYRKSQPTRVAVGAHVYWGQGTQVTVSS

SEQ ID NO: 10123 - protein, 118 aa, Artificial Sequence
  Chemically Synthesized
QVQLQESGGGLVQAGGSLRLSCAASGSISDSDAMGWYRQAPGKEREFVAAINRGTITYYADSVKGRFTISRDNAKNTVYLQMNSLKPEDTAVYYCAAINPFTNIHYYWGQGTQVTVSS

SEQ ID NO: 10124 - protein, 118 aa, Artificial Sequence
  Chemically Synthesized
QVQLQESGGGLVQAGGSLRLSCAASGNIFYYRPMGWYRQAPGKEREFVAGIGRGGSTNYADSVKGRFTISRDNAKNTVYLQMNSLKPEDTAVYYCAAQYDRTGDLPYWGQGTQVTVSS

SEQ ID NO: 10125 - protein, 127 aa, Artificial Sequence
  Chemically Synthesized
QVQLQESGGGLVQAGGSLRLSCAASGYIFDGYPMGWYRQAPGKEREFVAGIGIGGSTYYADSVKGRFTISRDNAKNTVYLQMNSLKPEDTAVYYCAVYRNVLYRPYADLSSPDFGYWGQGTQVTVSS

SEQ ID NO: 10126 - protein, 117 aa, Artificial Sequence
  Chemically Synthesized
QVQLQESGGGLVQAGGSLRLSCAASGYISARYGMGWYRQAPGKERELVATITWGAITYYADSVKGRFTISRDNAKNTVYLQMNSLKPEDTAVYYCAVTYPVNHSFYWGQGTQVTVSS

SEQ ID NO: 10127 - protein, 122 aa, Artificial Sequence
  Chemically Synthesized
QVQLQESGGGLVQAGGSLRLSCAASGYISYVYVMGWYRQAPGKEREFVASIGGGTNTNYADSVKGRFTISRDNAKNTVYLQMNSLKPEDTAVYYCAAIIDSVGRDQAPHGYWGQGTQVTVSS

SEQ ID NO: 10128 - protein, 118 aa, Artificial Sequence
  Chemically Synthesized
QVQLQESGGGLVQAGGSLRLSCAASGSISVRAYMGWYRQAPGKEREFVAAIDAGGSTNYADSVKGRFTISRDNAKNTVYLQMNSLKPEDTAVYYCAALAPSYPPHTYWGQGTQVTVSS

SEQ ID NO: 10129 - protein, 116 aa, Artificial Sequence
  Chemically Synthesized
QVQLQESGGGLVQAGGSLRLSCAASGNISDNGLMGWYRQAPGKEREFVAAIDYGATTNYADSVKGRFTISRDNAKNTVYLQMNSLKPEDTAVYYCAAAGTNYHTYWGQGTQVTVSS

SEQ ID NO: 10130 - protein, 122 aa, Artificial Sequence
  Chemically Synthesized
QVQLQESGGGLVQAGGSLRLSCAASGSISAFQYMGWYRQAPGKEREFVAAITDGGNTNYADSVKGRFTISRDNAKNTVYLQMNSLKPEDTAVYYCAATYYAYLDGYTVHTYWGQGTQVTVSS

SEQ ID NO: 10131 - protein, 122 aa, Artificial Sequence
  Chemically Synthesized
QVQLQESGGGLVQAGGSLRLSCAASGYISTLRYMGWYRQAPGKEREFVAGIGYGGITNYADSVKGRFTISRDNAKNTVYLQMNSLKPEDTAVYYCAVKNDGYYYPYWYLDYWGQGTQVTVSS

SEQ ID NO: 10132 - protein, 126 aa, Artificial Sequence
  Chemically Synthesized
QVQLQESGGGLVQAGGSLRLSCAASGNIFYDYAMGWYRQAPGKERELVASINDGGTTNYADSVKGRFTISRDNAKNTVYLQMNSLKPEDTAVYYCAADYWYYTGSGYPHYQQLSYWGQGTQVTVSS

SEQ ID NO: 10133 - protein, 121 aa, Artificial Sequence
  Chemically Synthesized
QVQLQESGGGLVQAGGSLRLSCAASGNIFKPEVMGWYRQAPGKEREFVAAIAQGATTNYADSVKGRFTISRDNAKNTVYLQMNSLKPEDTAVYYCAVGVTAITGDAYHEYWGQGTQVTVSS

SEQ ID NO: 10134 - protein, 118 aa, Artificial Sequence
  Chemically Synthesized
QVQLQESGGGLVQAGGSLRLSCAASGNISDRAVMGWYRQAPGKEREFVAAIDVGSTTNYADSVKGRFTISRDNAKNTVYLQMNSLKPEDTAVYYCAALYEAYPPHAYWGQGTQVTVSS

SEQ ID NO: 10135 - protein, 118 aa, Artificial Sequence
  Chemically Synthesized
QVQLQESGGGLVQAGGSLRLSCAASGNIFVESYMGWYRQAPGKERELVASIAGGSTTNYADSVKGRFTISRDNAKNTVYLQMNSLKPEDTAVYYCAALFYDTVTHNYWGQGTQVTVSS

SEQ ID NO: 10136 - protein, 122 aa, Artificial Sequence
  Chemically Synthesized
QVQLQESGGGLVQAGGSLRLSCAASGNISWVPVMGWYRQAPGKEREFVATIDWGANTNYADSVKGRFTISRDNAKNTVYLQMNSLKPEDTAVYYCAVLVAAEDYSFDAHEYWGQGTQVTVSS

SEQ ID NO: 10137 - protein, 119 aa, Artificial Sequence
  Chemically Synthesized
QVQLQESGGGLVQAGGSLRLSCAASGTIFSLANMGWYRQAPGKERELVAAIGYGSTTYYADSVKGRFTISRDNAKNTVYLQMNSLKPEDTAVYYCAAPRTQAYDYHIYWGQGTQVTVSS

SEQ ID NO: 10138 - protein, 125 aa, Artificial Sequence
  Chemically Synthesized
QVQLQESGGGLVQAGGSLRLSCAASGSISEPAIMGWYRQAPGKEREFVASISYGASTYYADSVKGRFTISRDNAKNTVYLQMNSLKPEDTAVYYCAALIEDYVTYGYYDGAHTYWGQGTQVTVSS

SEQ ID NO: 10139 - protein, 126 aa, Artificial Sequence
  Chemically Synthesized
QVQLQESGGGLVQAGGSLRLSCAASGYISYPYVMGWYRQAPGKEREFVASIGYGTNTYYADSVKGRFTISRDNAKNTVYLQMNSLKPEDTAVYYCAAGVYGLWNDTTNTFTDLFYWGQGTQVTVSS

SEQ ID NO: 10140 - protein, 121 aa, Artificial Sequence
  Chemically Synthesized
QVQLQESGGGLVQAGGSLRLSCAASGTISDTVIMGWYRQAPGKEREFVAGIAGANTNYADSVKGRFTISRDNAKNTVYLQMNSLKPEDTAVYYCAATYYVDNAGYYIFNYWGQGTQVTVSS

SEQ ID NO: 10141 - protein, 122 aa, Artificial Sequence
  Chemically Synthesized
QVQLQESGGGLVQAGGSLRLSCAASGNISSYWYMGWYRQAPGKEREFVASIDSGTNTYYADSVKGRFTISRDNAKNTVYLQMNSLKPEDTAVYYCAVLRYDDAYSTDPHTYWGQGTQVTVSS

SEQ ID NO: 10142 - protein, 122 aa, Artificial Sequence
  Chemically Synthesized
QVQLQESGGGLVQAGGSLRLSCAASGSISGGYYMGWYRQAPGKEREFVASIDHGTITYYADSVKGRFTISRDNAKNTVYLQMNSLKPEDTAVYYCAALIYEGYDRYDVFDYWGQGTQVTVSS

SEQ ID NO: 10143 - protein, 116 aa, Artificial Sequence
  Chemically Synthesized
QVQLQESGGGLVQAGGSLRLSCAASGSIFELMGWYRQAPGKERELVASIAYGGTTNYADSVKGRFTISRDNAKNTVYLQMNSLKPEDTAVYYCAAWYDTYFFHAYWGQGTQVTVSS

SEQ ID NO: 10144 - protein, 118 aa, Artificial Sequence
  Chemically Synthesized
QVQLQESGGGLVQAGGSLRLSCAASGYISQPDYMGWYRQAPGKEREFVASITNGGNTNYADSVKGRFTISRDNAKNTVYLQMNSLKPEDTAVYYCAALQASYPAHTYWGQGTQVTVSS

SEQ ID NO: 10145 - protein, 124 aa, Artificial Sequence
  Chemically Synthesized
QVQLQESGGGLVQAGGSLRLSCAASGNIFAGYIMGWYRQAPGKEREFVASIDSGSTTYYADSVKGRFTISRDNAKNTVYLQMNSLKPEDTAVYYCAVTAYSVDQYNHYTLHNYWGQGTQVTVSS

SEQ ID NO: 10146 - protein, 121 aa, Artificial Sequence
  Chemically Synthesized
QVQLQESGGGLVQAGGSLRLSCAASGSISYVLYMGWYRQAPGKERELVAAINHGTTTYYADSVKGRFTISRDNAKNTVYLQMNSLKPEDTAVYYCAVPYTARADYYYLGYWGQGTQVTVSS

SEQ ID NO: 10147 - protein, 122 aa, Artificial Sequence
  Chemically Synthesized
QVQLQESGGGLVQAGGSLRLSCAASGSIFDVVLMGWYRQAPGKEREFVAAINEGSSTNYADSVKGRFTISRDNAKNTVYLQMNSLKPEDTAVYYCAVSTYRQDAVEVYHSYWGQGTQVTVSS

SEQ ID NO: 10148 - protein, 122 aa, Artificial Sequence
  Chemically Synthesized
QVQLQESGGGLVQAGGSLRLSCAASGSIFEVIVMGWYRQAPGKEREFVAAISRGSNTNYADSVKGRFTISRDNAKNTVYLQMNSLKPEDTAVYYCAVGYYADKGYGDYHEYWGQGTQVTVSS

SEQ ID NO: 10149 - protein, 123 aa, Artificial Sequence
  Chemically Synthesized
QVQLQESGGGLVQAGGSLRLSCAASGNISLIYTMGWYRQAPGKEREFVAGISEGAITNYADSVKGRFTISRDNAKNTVYLQMNSLKPEDTAVYYCAVIARYSDGELWGTHGYWGQGTQVTVSS

SEQ ID NO: 10150 - protein, 118 aa, Artificial Sequence
  Chemically Synthesized
QVQLQESGGGLVQAGGSLRLSCAASGNISPSTRMGWYRQAPGKERELVATIGYGSTTNYADSVKGRFTISRDNAKNTVYLQMNSLKPEDTAVYYCAVVYYGKQYHVYWGQGTQVTVSS

SEQ ID NO: 10151 - protein, 122 aa, Artificial Sequence
  Chemically Synthesized
QVQLQESGGGLVQAGGSLRLSCAASGTISSVAAMGWYRQAPGKEREFVAGIAEGGSTNYADSVKGRFTISRDNAKNTVYLQMNSLKPEDTAVYYCAALYYSYAATYATYLYWGQGTQVTVSS

SEQ ID NO: 10152 - protein, 126 aa, Artificial Sequence
  Chemically Synthesized
QVQLQESGGGLVQAGGSLRLSCAASGYISRDGHMGWYRQAPGKERELVAGIAPGSTTNYADSVKGRFTISRDNAKNTVYLQMNSLKPEDTAVYYCAVLDYGVVGGDNGYYVIYQYWGQGTQVTVSS

SEQ ID NO: 10153 - protein, 122 aa, Artificial Sequence
  Chemically Synthesized
QVQLQESGGGLVQAGGSLRLSCAASGTIFRAVVMGWYRQAPGKEREFVAAISDGTTTNYADSVKGRFTISRDNAKNTVYLQMNSLKPEDTAVYYCAAGLFTPDDEPPYLEYWGQGTQVTVSS

SEQ ID NO: 10154 - protein, 122 aa, Artificial Sequence
  Chemically Synthesized
QVQLQESGGGLVQAGGSLRLSCAASGNISGYIIMGWYRQAPGKEREFVATIANGTNTNYADSVKGRFTISRDNAKNTVYLQMNSLKPEDTAVYYCAVTRVQGEETYYVLNYWGQGTQVTVSS

SEQ ID NO: 10155 - protein, 117 aa, Artificial Sequence
  Chemically Synthesized
QVQLQESGGGLVQAGGSLRLSCAASGTISVNYYMGWYRQAPGKEREFVAGIGGGSTNYADSVKGRFTISRDNAKNTVYLQMNSLKPEDTAVYYCAVLYEDYPAHTYWGQGTQVTVSS

SEQ ID NO: 10156 - protein, 118 aa, Artificial Sequence
  Chemically Synthesized
QVQLQESGGGLVQAGGSLRLSCAASGTIFTFDYMGWYRQAPGKEREFVASIDDGGNTNYADSVKGRFTISRDNAKNTVYLQMNSLKPEDTAVYYCAALGERVPGLSYWGQGTQVTVSS

SEQ ID NO: 10157 - protein, 118 aa, Artificial Sequence
  Chemically Synthesized
QVQLQESGGGLVQAGGSLRLSCAASGNIFAEVYMGWYRQAPGKEREFVAAITQGGTTNYADSVKGRFTISRDNAKNTVYLQMNSLKPEDTAVYYCAALFYDYRAHSYWGQGTQVTVSS

SEQ ID NO: 10158 - protein, 117 aa, Artificial Sequence
  Chemically Synthesized
QVQLQESGGGLVQAGGSLRLSCAASGSISAAALMGWYRQAPGKEREFVAGIDTGANTNYADSVKGRFTISRDNAKNTVYLQMNSLKPEDTAVYYCAVLYEQFPFAYWGQGTQVTVSS

SEQ ID NO: 10159 - protein, 118 aa, Artificial Sequence
  Chemically Synthesized
QVQLQESGGGLVQAGGSLRLSCAASGNISYTSIMGWYRQAPGKEREFVAGIAPGASTNYADSVKGRFTISRDNAKNTVYLQMNSLKPEDTAVYYCAALVVDIDYHAYWGQGTQVTVSS

SEQ ID NO: 10160 - protein, 122 aa, Artificial Sequence
  Chemically Synthesized
QVQLQESGGGLVQAGGSLRLSCAASGTISTDYYMGWYRQAPGKEREFVAAIAHGSNTNYADSVKGRFTISRDNAKNTVYLQMNSLKPEDTAVYYCAALDADYNYDGGAYSYWGQGTQVTVSS

SEQ ID NO: 10161 - protein, 122 aa, Artificial Sequence
  Chemically Synthesized
QVQLQESGGGLVQAGGSLRLSCAASGNISHETYMGWYRQAPGKEREFVASIDYGATTNYADSVKGRFTISRDNAKNTVYLQMNSLKPEDTAVYYCAALAYDDIEIYIVHNYWGQGTQVTVSS

SEQ ID NO: 10162 - protein, 122 aa, Artificial Sequence
  Chemically Synthesized
QVQLQESGGGLVQAGGSLRLSCAASGSISFEYIMGWYRQAPGKEREFVAAITDGASTNYADSVKGRFTISRDNAKNTVYLQMNSLKPEDTAVYYCAATYWQESSYYDIHTYWGQGTQVTVSS

SEQ ID NO: 10163 - protein, 117 aa, Artificial Sequence
  Chemically Synthesized
QVQLQESGGGLVQAGGSLRLSCAASGSIFTADIMGWYRQAPGKEREFVAAIDTGGNTNYADSVKGRFTISRDNAKNTVYLQMNSLKPEDTAVYYCAALFQYYPFGYWGQGTQVTVSS

SEQ ID NO: 10164 - protein, 122 aa, Artificial Sequence
  Chemically Synthesized
QVQLQESGGGLVQAGGSLRLSCAASGTISLSYIMGWYRQAPGKEREFVASISRGANTYYADSVKGRFTISRDNAKNTVYLQMNSLKPEDTAVYYCAALYYDYDETYDVHTYWGQGTQVTVSS

SEQ ID NO: 10165 - protein, 125 aa, Artificial Sequence
  Chemically Synthesized
QVQLQESGGGLVQAGGSLRLSCAASGSIFGYYMGWYRQAPGKEREFVAAITNGTSTNYADSVKGRFTISRDNAKNTVYLQMNSLKPEDTAVYYCAALYQGYEEGHVDYYIIHTYWGQGTQVTVSS

SEQ ID NO: 10166 - protein, 118 aa, Artificial Sequence
  Chemically Synthesized
QVQLQESGGGLVQAGGSLRLSCAASGTISEWDVMGWYRQAPGKEREFVAAISFGSSTNYADSVKGRFTISRDNAKNTVYLQMNSLKPEDTAVYYCAALYYEERLHSYWGQGTQVTVSS

SEQ ID NO: 10167 - protein, 118 aa, Artificial Sequence
  Chemically Synthesized
QVQLQESGGGLVQAGGSLRLSCAASGTISWPEVMGWYRQAPGKEREFVAGIADGASTNYADSVKGRFTISRDNAKNTVYLQMNSLKPEDTAVYYCAVLVYDITSHTYWGQGTQVTVSS

SEQ ID NO: 10168 - protein, 118 aa, Artificial Sequence
  Chemically Synthesized
QVQLQESGGGLVQAGGSLRLSCAASGSISQRPDMGWYRQAPGKERELVASIGYGSTTYYADSVKGRFTISRDNAKNTVYLQMNSLKPEDTAVYYCAALVVDIDYHAYWGQGTQVTVSS

SEQ ID NO: 10169 - protein, 118 aa, Artificial Sequence
  Chemically Synthesized
QVQLQESGGGLVQAGGSLRLSCAASGNISHETYMGWYRQAPGKEREFVASIDYGATTNYADSVKGRFTISRDNAKNTVYLQMNSLKPEDTAVYYCAVGWADAQYHVYWGQGTQVTVSS

SEQ ID NO: 10170 - protein, 117 aa, Artificial Sequence
  Chemically Synthesized
QVQLQESGGGLVQAGGSLRLSCAASGTISVLAQMGWYRQAPGKERELVAAISDGTITNYADSVKGRFTISRDNAKNTVYLQMNSLKPEDTAVYYCAVPYSLKVFIYWGQGTQVTVSS

SEQ ID NO: 10171 - protein, 122 aa, Artificial Sequence
  Chemically Synthesized
QVQLQESGGGLVQAGGSLRLSCAASGYIFGAEVMGWYRQAPGKERELVASIADGASTNYADSVKGRFTISRDNAKNTVYLQMNSLKPEDTAVYYCAALAYDPRKNKPVHAYWGQGTQVTVSS

SEQ ID NO: 10172 - protein, 122 aa, Artificial Sequence
  Chemically Synthesized
QVQLQESGGGLVQAGGSLRLSCAASGSISGEHYMGWYRQAPGKEREFVAAIAWGGNTNYADSVKGRFTISRDNAKNTVYLQMNSLKPEDTAVYYCAALYADSYGPYVPHQYWGQGTQVTVSS

SEQ ID NO: 10173 - protein, 118 aa, Artificial Sequence
  Chemically Synthesized
QVQLQESGGGLVQAGGSLRLSCAASGTIFLKGPMGWYRQAPGKERELVAAIGLGSTTYYADSVKGRFTISRDNAKNTVYLQMNSLKPEDTAVYYCAAVTAQATGHYYWGQGTQVTVSS

SEQ ID NO: 10174 - protein, 117 aa, Artificial Sequence
  Chemically Synthesized
QVQLQESGGGLVQAGGSLRLSCAASGNISVFPVMGWYRQAPGKEREFVASIDDGSITYYADSVKGRFTISRDNAKNTVYLQMNSLKPEDTAVYYCAALSDRWPYDYWGQGTQVTVSS

SEQ ID NO: 10175 - protein, 122 aa, Artificial Sequence
  Chemically Synthesized
QVQLQESGGGLVQAGGSLRLSCAASGNIFPYYLMGWYRQAPGKEREFVATIDAGASTYYADSVKGRFTISRDNAKNTVYLQMNSLKPEDTAVYYCAVLWVFGDDTYDLYDYWGQGTQVTVSS

SEQ ID NO: 10176 - protein, 118 aa, Artificial Sequence
  Chemically Synthesized
QVQLQESGGGLVQAGGSLRLSCAASGYIFRIDLMGWYRQAPGKEREFVASISQGANTYYADSVKGRFTISRDNAKNTVYLQMNSLKPEDTAVYYCAAIIEGRSVHGYWGQGTQVTVSS

SEQ ID NO: 10177 - protein, 118 aa, Artificial Sequence
  Chemically Synthesized
QVQLQESGGGLVQAGGSLRLSCAASGNIFGEWYMGWYRQAPGKEREFVATIDYGANTNYADSVKGRFTISRDNAKNTVYLQMNSLKPEDTAVYYCAALTYIQQYHTYWGQGTQVTVSS

SEQ ID NO: 10178 - protein, 118 aa, Artificial Sequence
  Chemically Synthesized
QVQLQESGGGLVQAGGSLRLSCAASGYISDDRYMGWYRQAPGKEREFVAAIGPGASTNYADSVKGRFTISRDNAKNTVYLQMNSLKPEDTAVYYCAALYADYPPHHYWGQGTQVTVSS

SEQ ID NO: 10179 - protein, 119 aa, Artificial Sequence
  Chemically Synthesized
QVQLQESGGGLVQAGGSLRLSCAASGTISVDDVIMGWYRQAPGKEREFVAAITYGTTTNYADSVKGRFTISRDNAKNTVYLQMNSLKPEDTAVYYCAALTQGYPPYNYWGQGTQVTVSS

SEQ ID NO: 10180 - protein, 122 aa, Artificial Sequence
  Chemically Synthesized
QVQLQESGGGLVQAGGSLRLSCAASGNISDPFGMGWYRQAPGKERELVAGITTGGSTNYADSVKGRFTISRDNAKNTVYLQMNSLKPEDTAVYYCAAGAEYYPLYLYDLAYWGQGTQVTVSS

SEQ ID NO: 10181 - protein, 118 aa, Artificial Sequence
  Chemically Synthesized
QVQLQESGGGLVQAGGSLRLSCAASGSIFARLYMGWYRQAPGKEREFVASISYGATTNYADSVKGRFTISRDNAKNTVYLQMNSLKPEDTAVYYCAALDERGPPFDYWGQGTQVTVSS

SEQ ID NO: 10182 - protein, 118 aa, Artificial Sequence
  Chemically Synthesized
QVQLQESGGGLVQAGGSLRLSCAASGTIFYLEFMGWYRQAPGKEREFVASIAYGANTNYADSVKGRFTISRDNAKNTVYLQMNSLKPEDTAVYYCAAVGYPDYPYSYWGQGTQVTVSS

SEQ ID NO: 10183 - protein, 118 aa, Artificial Sequence
  Chemically Synthesized
QVQLQESGGGLVQAGGSLRLSCAASGYISVTYLMGWYRQAPGKEREFVASIGEGTTTYYADSVKGRFTISRDNAKNTVYLQMNSLKPEDTAVYYCAALAGAAIVHQYWGQGTQVTVSS

SEQ ID NO: 10184 - protein, 118 aa, Artificial Sequence
  Chemically Synthesized
QVQLQESGGGLVQAGGSLRLSCAASGYIFYEGVMGWYRQAPGKEREFVASIGDGGNTYYADSVKGRFTISRDNAKNTVYLQMNSLKPEDTAVYYCAVLFGWPIYHTYWGQGTQVTVSS

SEQ ID NO: 10185 - protein, 118 aa, Artificial Sequence
  Chemically Synthesized
QVQLQESGGGLVQAGGSLRLSCAASGSISQRPDMGWYRQAPGKEREFVASIDYGATTNYADSVKGRFTISRDNAKNTVYLQMNSLKPEDTAVYYCAALVVDIDYHAYWGQGTQVTVSS

SEQ ID NO: 10186 - protein, 122 aa, Artificial Sequence
  Chemically Synthesized
QVQLQESGGGLVQAGGSLRLSCAASGNISTVRVMGWYRQAPGKEREFVAAIGDGASTNYADSVKGRFTISRDNAKNTVYLQMNSLKPEDTAVYYCAVGIADTPPQYKYHEYWGQGTQVTVSS

SEQ ID NO: 10187 - protein, 116 aa, Artificial Sequence
  Chemically Synthesized
QVQLQESGGGLVQAGGSLRLSCAASGTIFRHWSMGWYRQAPGKERELVASIGWGGTTYYADSVKGRFTISRDNAKNTVYLQMNSLKPEDTAVYYCAAASLRSHLYWGQGTQVTVSS

SEQ ID NO: 10188 - protein, 118 aa, Artificial Sequence
  Chemically Synthesized
QVQLQESGGGLVQAGGSLRLSCAASGNISWIYAMGWYRQAPGKEREFVAAITDGAITNYADSVKGRFTISRDNAKNTVYLQMNSLKPEDTAVYYCAVLVLSYDYHTYWGQGTQVTVSS

SEQ ID NO: 10189 - protein, 122 aa, Artificial Sequence
  Chemically Synthesized
QVQLQESGGGLVQAGGSLRLSCAASGNISYVHLMGWYRQAPGKEREFVASIADGSSTNYADSVKGRFTISRDNAKNTVYLQMNSLKPEDTAVYYCAVGHSRDPDGYWYHEYWGQGTQVTVSS

SEQ ID NO: 10190 - protein, 126 aa, Artificial Sequence
  Chemically Synthesized
QVQLQESGGGLVQAGGSLRLSCAASGSIFGGSYMGWYRQAPGKERELVASIAPGGSTYYADSVKGRFTISRDNAKNTVYLQMNSLKPEDTAVYYCAVDYAGYEYLYVPVYVGHSYWGQGTQVTVSS

SEQ ID NO: 10191 - protein, 118 aa, Artificial Sequence
  Chemically Synthesized
QVQLQESGGGLVQAGGSLRLSCAASGNISYTSIMGWYRQAPGKEREFVASIDYGATTNYADSVKGRFTISRDNAKNTVYLQMNSLKPEDTAVYYCAALVVDIDYHAYWGQGTQVTVSS

SEQ ID NO: 10192 - protein, 122 aa, Artificial Sequence
  Chemically Synthesized
QVQLQESGGGLVQAGGSLRLSCAASGNISHETYMGWYRQAPGKEREFVAGIAPGASTNYADSVKGRFTISRDNAKNTVYLQMNSLKPEDTAVYYCAALAYDDIEIYIVHNYWGQGTQVTVSS

SEQ ID NO: 10193 - protein, 118 aa, Artificial Sequence
  Chemically Synthesized
QVQLQESGGGLVQAGGSLRLSCAASGTIFTYDYMGWYRQAPGKEREFVAAIAPGSITNYADSVKGRFTISRDNAKNTVYLQMNSLKPEDTAVYYCAALAYYGQIYAYWGQGTQVTVSS

SEQ ID NO: 10194 - protein, 118 aa, Artificial Sequence
  Chemically Synthesized
QVQLQESGGGLVQAGGSLRLSCAASGNISHETYMGWYRQAPGKEREFVASIDYGATTNYADSVKGRFTISRDNAKNTVYLQMNSLKPEDTAVYYCAALYYDVDGHAYWGQGTQVTVSS

SEQ ID NO: 10195 - protein, 122 aa, Artificial Sequence
  Chemically Synthesized
QVQLQESGGGLVQAGGSLRLSCAASGTIFDVYAMGWYRQAPGKEREFVAAIANGTNTNYADSVKGRFTISRDNAKNTVYLQMNSLKPEDTAVYYCAVGYVTAQQDTQYHEYWGQGTQVTVSS

SEQ ID NO: 10196 - protein, 122 aa, Artificial Sequence
  Chemically Synthesized
QVQLQESGGGLVQAGGSLRLSCAASGTISLDVVMGWYRQAPGKEREFVAGIAIGTITNYADSVKGRFTISRDNAKNTVYLQMNSLKPEDTAVYYCAVSDYSWYEGYIVHNYWGQGTQVTVSS

SEQ ID NO: 10197 - protein, 113 aa, Artificial Sequence
  Chemically Synthesized
QVQLQESGGGLVQAGGSLRLSCAASGYIFASPIMGWYRQAPGKEREFVASIGDGTITNYADSVKGRFTISRDNAKNTVYLQMNSLKPEDTAVYYCAVDYYGYWGQGTQVTVSS

SEQ ID NO: 10198 - protein, 118 aa, Artificial Sequence
  Chemically Synthesized
QVQLQESGGGLVQAGGSLRLSCAASGTISRITYMGWYRQAPGKEREFVASITYGSNTNYADSVKGRFTISRDNAKNTVYLQMNSLKPEDTAVYYCAALQSTYPPYAYWGQGTQVTVSS

SEQ ID NO: 10199 - protein, 118 aa, Artificial Sequence
  Chemically Synthesized
QVQLQESGGGLVQAGGSLRLSCAASGNISTSDIMGWYRQAPGKEREFVAAIGYGATTNYADSVKGRFTISRDNAKNTVYLQMNSLKPEDTAVYYCAVLVADYDPHDYWGQGTQVTVSS

SEQ ID NO: 10200 - protein, 125 aa, Artificial Sequence
  Chemically Synthesized
QVQLQESGGGLVQAGGSLRLSCAASGSIFDSVSMGWYRQAPGKERELVASISRGTSTYYADSVKGRFTISRDNAKNTVYLQMNSLKPEDTAVYYCAAGWLIGKYDHPQYYTYYYWGQGTQVTVSS

SEQ ID NO: 10201 - protein, 122 aa, Artificial Sequence
  Chemically Synthesized
QVQLQESGGGLVQAGGSLRLSCAASGSIFLWSYMGWYRQAPGKEREFVASITPGASTNYADSVKGRFTISRDNAKNTVYLQMNSLKPEDTAVYYCAALYISGVDTYDVFEYWGQGTQVTVSS

SEQ ID NO: 10202 - protein, 118 aa, Artificial Sequence
  Chemically Synthesized
QVQLQESGGGLVQAGGSLRLSCAASGTIFDAEFMGWYRQAPGKEREFVASIDLGSSTYYADSVKGRFTISRDNAKNTVYLQMNSLKPEDTAVYYCAALYDGLIPLAYWGQGTQVTVSS

SEQ ID NO: 10203 - protein, 117 aa, Artificial Sequence
  Chemically Synthesized
QVQLQESGGGLVQAGGSLRLSCAASGTIFAPTIMGWYRQAPGKEREFVASIDIGTNTYYADSVKGRFTISRDNAKNTVYLQMNSLKPEDTAVYYCAAYYYSADHNYWGQGTQVTVSS

SEQ ID NO: 10204 - protein, 118 aa, Artificial Sequence
  Chemically Synthesized
QVQLQESGGGLVQAGGSLRLSCAASGNIFSPPIMGWYRQAPGKEREFVAAIGDGASTNYADSVKGRFTISRDNAKNTVYLQMNSLKPEDTAVYYCAVLVTDDIAHTYWGQGTQVTVSS

SEQ ID NO: 10205 - protein, 118 aa, Artificial Sequence
  Chemically Synthesized
QVQLQESGGGLVQAGGSLRLSCAASGNISDEWYMGWYRQAPGKEREFVAAITSGGTTNYADSVKGRFTISRDNAKNTVYLQMNSLKPEDTAVYYCAALVVDIDYHAYWGQGTQVTVSS

SEQ ID NO: 10206 - protein, 122 aa, Artificial Sequence
  Chemically Synthesized
QVQLQESGGGLVQAGGSLRLSCAASGNISGLPYMGWYRQAPGKERELVASITYGGTTNYADSVKGRFTISRDNAKNTVYLQMNSLKPEDTAVYYCAVYVRTYVDYYAGFVYWGQGTQVTVSS

SEQ ID NO: 10207 - protein, 126 aa, Artificial Sequence
  Chemically Synthesized
QVQLQESGGGLVQAGGSLRLSCAASGTISGYLVMGWYRQAPGKEREFVAGIAEGSITNYADSVKGRFTISRDNAKNTVYLQMNSLKPEDTAVYYCAAILSSAYGQPDTGYEIHDYWGQGTQVTVSS

SEQ ID NO: 10208 - protein, 122 aa, Artificial Sequence
  Chemically Synthesized
QVQLQESGGGLVQAGGSLRLSCAASGSISRYSDMGWYRQAPGKERELVATIAPGANTYYADSVKGRFTISRDNAKNTVYLQMNSLKPEDTAVYYCAAARVRAWVPDGILIYWGQGTQVTVSS

SEQ ID NO: 10209 - protein, 118 aa, Artificial Sequence
  Chemically Synthesized
QVQLQESGGGLVQAGGSLRLSCAASGTISYYQYMGWYRQAPGKEREFVASIAGGGTTNYADSVKGRFTISRDNAKNTVYLQMNSLKPEDTAVYYCAALVVDIDYHAYWGQGTQVTVSS

SEQ ID NO: 10210 - protein, 118 aa, Artificial Sequence
  Chemically Synthesized
QVQLQESGGGLVQAGGSLRLSCAASGYISRRYFMGWYRQAPGKERELVAAIGKGGITYYADSVKGRFTISRDNAKNTVYLQMNSLKPEDTAVYYCAVRERGTYWHTYWGQGTQVTVSS

SEQ ID NO: 10211 - protein, 118 aa, Artificial Sequence
  Chemically Synthesized
QVQLQESGGGLVQAGGSLRLSCAASGSISGRWYMGWYRQAPGKERELVAAIGKGSNTYYADSVKGRFTISRDNAKNTVYLQMNSLKPEDTAVYYCAAVVGYPDRHYYWGQGTQVTVSS

SEQ ID NO: 10212 - protein, 118 aa, Artificial Sequence
  Chemically Synthesized
QVQLQESGGGLVQAGGSLRLSCAASGSISGRWYMGWYRQAPGKERELVAAIGKGGITYYADSVKGRFTISRDNAKNTVYLQMNSLKPEDTAVYYCAAVVGYPDRHYYWGQGTQVTVSS

SEQ ID NO: 10213 - protein, 126 aa, Artificial Sequence
  Chemically Synthesized
QVQLQESGGGLVQAGGSLRLSCAASGSIFGNAAMGWYRQAPGKERELVAGIGDGGITNYADSVKGRFTISRDNAKNTVYLQMNSLKPEDTAVYYCAVVLRERYPNEKFVYDYHLYWGQGTQVTVSS

SEQ ID NO: 10214 - protein, 118 aa, Artificial Sequence
  Chemically Synthesized
QVQLQESGGGLVQAGGSLRLSCAASGSISSRFAMGWYRQAPGKERELVAAIGKGSNTYYADSVKGRFTISRDNAKNTVYLQMNSLKPEDTAVYYCAVRERGTYWHTYWGQGTQVTVSS

SEQ ID NO: 10215 - protein, 118 aa, Artificial Sequence
  Chemically Synthesized
QVQLQESGGGLVQAGGSLRLSCAASGTISYNYWMGWYRQAPGKERELVAAIAGGATTYYADSVKGRFTISRDNAKNTVYLQMNSLKPEDTAVYYCAVRERGTYWHTYWGQGTQVTVSS

SEQ ID NO: 10216 - protein, 122 aa, Artificial Sequence
  Chemically Synthesized
QVQLQESGGGLVQAGGSLRLSCAASGSISSYRGMGWYRQAPGKERELVAGINAGASTYYADSVKGRFTISRDNAKNTVYLQMNSLKPEDTAVYYCAAVHTNYRTNSGGYEYWGQGTQVTVSS

SEQ ID NO: 10217 - protein, 118 aa, Artificial Sequence
  Chemically Synthesized
QVQLQESGGGLVQAGGSLRLSCAASGSISKSYAMGWYRQAPGKERELVAGIGIGSSTYYADSVKGRFTISRDNAKNTVYLQMNSLKPEDTAVYYCAVRERGTYWHTYWGQGTQVTVSS

SEQ ID NO: 10218 - protein, 122 aa, Artificial Sequence
  Chemically Synthesized
QVQLQESGGGLVQAGGSLRLSCAASGNISDPYFMGWYRQAPGKERELVASISPGGITNYADSVKGRFTISRDNAKNTVYLQMNSLKPEDTAVYYCAAWFAAKPGPGGTHAYWGQGTQVTVSS

SEQ ID NO: 10219 - protein, 122 aa, Artificial Sequence
  Chemically Synthesized
QVQLQESGGGLVQAGGSLRLSCAASGSISNTAYMGWYRQAPGKERELVAGIGTGGNTYYADSVKGRFTISRDNAKNTVYLQMNSLKPEDTAVYYCAVYDVRAVRYGLSHGYWGQGTQVTVSS

SEQ ID NO: 10220 - protein, 121 aa, Artificial Sequence
  Chemically Synthesized
QVQLQESGGGLVQAGGSLRLSCAASGNIFAYYIMGWYRQAPGKEREFVASISPGATTYYADSVKGRFTISRDNAKNTVYLQMNSLKPEDTAVYYCAASSSTTLTTTLLIYWGQGTQVTVSS

SEQ ID NO: 10221 - protein, 122 aa, Artificial Sequence
  Chemically Synthesized
QVQLQESGGGLVQAGGSLRLSCAASGSIFSTDGMGWYRQAPGKEREVVAGIGYGTTTNYADSVKGRFTISRDNAKNTVYLQMNSLKPEDTAVYYCAVVLPWEDYYDTDFYYWGQGTQVTVSS

SEQ ID NO: 10222 - protein, 117 aa, Artificial Sequence
  Chemically Synthesized
QVQLQESGGGLVQAGGSLRLSCAASGNISSGVDMGWYRQAPGKERELVAGIGKGSITYYADSVKGRFTISRDNAKNTVYLQMNSLKPEDTAVYYCAVVGSYYAGHYWGQGTQVTVSS

SEQ ID NO: 10223 - protein, 118 aa, Artificial Sequence
  Chemically Synthesized
QVQLQESGGGLVQAGGSLRLSCAASGNISSVEYMGWYRQAPGKERELVAGISLGTTTNYADSVKGRFTISRDNAKNTVYLQMNSLKPEDTAVYYCAAFNRTSRALSYWGQGTQVTVSS

SEQ ID NO: 10224 - protein, 122 aa, Artificial Sequence
  Chemically Synthesized
QVQLQESGGGLVQAGGSLRLSCAASGSIFSTDGMGWYRQAPGKEREFVAGIGYGTTTKYADSVKGRFTISRDNAKNTVYLQMNSLKPEDTAVYYCAVVLPWEDYYDTDFYYWGQGTQVTVSS

SEQ ID NO: 10225 - protein, 118 aa, Artificial Sequence
  Chemically Synthesized
QVQLQESGGGLVQAGGSLRLSCAASGYIFRFDQMGWYRQAPGKERELVATIDYGTITYYADSVKGRFTISRDNAKNTVYLQMNSLKPEDTAVYYCAAGQWFTTRFYYWGQGTQVTVSS

SEQ ID NO: 10226 - protein, 118 aa, Artificial Sequence
  Chemically Synthesized
QVQLQESGGGLVQAGGSLRLSCAASGSISPYLYMGWYRQAPGKEREFVAAITQGGNTNYADSVKGRFTISRDNAKNTVYLQMNSLKPEDTAVYYCAVYYSSVWALTYWGQGTQVTVSS

SEQ ID NO: 10227 - protein, 122 aa, Artificial Sequence
  Chemically Synthesized
QVQLQESGGGLVQAGGSLRLSCAASGNISFQYTMGWYRQAPGKEREFVAGIALGGITYYADSVKGRFTISRDNAKNTVYLQMNSLKPEDTAVYYCAAIYDGNYHYGDVHDYWGQGTQVTVSS

SEQ ID NO: 10228 - protein, 126 aa, Artificial Sequence
  Chemically Synthesized
QVQLQESGGGLVQAGGSLRLSCAASGNIFAGADMGWYRQAPGKEREFVAGIGVGGTTNYADSVKGRFTISRDNAKNTVYLQMNSLKPEDTAVYYCAALYYPYTDARWVVWWYHFYWGQGTQVTVSS

SEQ ID NO: 10229 - protein, 118 aa, Artificial Sequence
  Chemically Synthesized
QVQLQESGGGLVQAGGSLRLSCAASGNISTRETMGWYRQAPGKERELVAAIATGANTNYADSVKGRFTISRDNAKNTVYLQMNSLKPEDTAVYYCAVGYRYGEQHNYWGQGTQVTVSS

SEQ ID NO: 10230 - protein, 126 aa, Artificial Sequence
  Chemically Synthesized
QVQLQESGGGLVQAGGSLRLSCAASGNIFYVDSMGWYRQAPGKERELVAAISVGTITYYADSVKGRFTISRDNAKNTVYLQMNSLKPEDTAVYYCAVYGGVIYRYIGDFDYDHRYWGQGTQVTVSS

SEQ ID NO: 10231 - protein, 118 aa, Artificial Sequence
  Chemically Synthesized
QVQLQESGGGLVQAGGSLRLSCAASGTISYPTSMGWYRQAPGKERELVATIDLGGITNYADSVKGRFTISRDNAKNTVYLQMNSLKPEDTAVYYCAVRHVWGDWFAYWGQGTQVTVSS

SEQ ID NO: 10232 - protein, 122 aa, Artificial Sequence
  Chemically Synthesized
QVQLQESGGGLVQAGGSLRLSCAASGSISTGGTMGWYRQAPGKERELVAAIATGTNTNYADSVKGRFTISRDNAKNTVYLQMNSLKPEDTAVYYCAAGFDYTGRRAVELTYWGQGTQVTVSS

SEQ ID NO: 10233 - protein, 110 aa, Artificial Sequence
  Chemically Synthesized
QVQLQESGGGLVQAGGSLRLSCAASGNIFESYNMGWYRQAPGKEREFVAGIGEGATTNYADSVKGRFTISRDNAKNTVYLQMNSLKPEDTAVYYCAHYYWGQGTQVTVSS

SEQ ID NO: 10234 - protein, 115 aa, Artificial Sequence
  Chemically Synthesized
QVQLQESGGGLVQAGGSLRLSCAASGTISDLTDMGWYRQAPGKERELVASIAQGTSTYYADSVKGRFTISRDNAKNTVYLQMNSLKPEDTAVYYCAVDDDVLYYWGQGTQVTVSS

SEQ ID NO: 10235 - protein, 118 aa, Artificial Sequence
  Chemically Synthesized
QVQLQESGGGLVQAGGSLRLSCAASGSISVVPNMGWYRQAPGKEREFVASIDYGGSTYYADSVKGRFTISRDNAKNTVYLQMNSLKPEDTAVYYCAVYTEAGTFHVYWGQGTQVTVSS

SEQ ID NO: 10236 - protein, 118 aa, Artificial Sequence
  Chemically Synthesized
QVQLQESGGGLVQAGGSLRLSCAASGYIFPPIAMGWYRQAPGKERELVASISSGGITYYADSVKGRFTISRDNAKNTVYLQMNSLKPEDTAVYYCAALFYGFIRFPYWGQGTQVTVSS

SEQ ID NO: 10237 - protein, 126 aa, Artificial Sequence
  Chemically Synthesized
QVQLQESGGGLVQAGGSLRLSCAASGYISPYEDMGWYRQAPGKEREFVATIDGGGSTYYADSVKGRFTISRDNAKNTVYLQMNSLKPEDTAVYYCAAGDLYLVYILGVRDIRFWYWGQGTQVTVSS

SEQ ID NO: 10238 - protein, 126 aa, Artificial Sequence
  Chemically Synthesized
QVQLQESGGGLVQAGGSLRLSCAASGTIFARYFMGWYRQAPGKEREFVAAIGYGSTTNYADSVKGRFTISRDNAKNTVYLQMNSLKPEDTAVYYCAATYWADRLYYDAPVSYYGYWGQGTQVTVSS

SEQ ID NO: 10239 - protein, 121 aa, Artificial Sequence
  Chemically Synthesized
QVQLQESGGGLVQAGGSLRLSCAASGSISYIYPMGWYRQAPGKERELVATIDAGASTYYADSVKGRFTISRDNAKNTVYLQMNSLKPEDTAVYYCAARERTDDNGTSLMYWGQGTQVTVSS

SEQ ID NO: 10240 - protein, 122 aa, Artificial Sequence
  Chemically Synthesized
QVQLQESGGGLVQAGGSLRLSCAASGNISPEPNMGWYRQAPGKERELVAAIDYGGTTNYADSVKGRFTISRDNAKNTVYLQMNSLKPEDTAVYYCAAFIWLDKYYYGDFTYWGQGTQVTVSS

SEQ ID NO: 10241 - protein, 118 aa, Artificial Sequence
  Chemically Synthesized
QVQLQESGGGLVQAGGSLRLSCAASGYIFGHRFMGWYRQAPGKEREFVATIADGGITNYADSVKGRFTISRDNAKNTVYLQMNSLKPEDTAVYYCAAGTVPYAYHKYWGQGTQVTVSS

SEQ ID NO: 10242 - protein, 118 aa, Artificial Sequence
  Chemically Synthesized
QVQLQESGGGLVQAGGSLRLSCAASGTISSFGYMGWYRQAPGKERELVAAISTGATTYYADSVKGRFTISRDNAKNTVYLQMNSLKPEDTAVYYCAAVNVGGPPFYYWGQGTQVTVSS

SEQ ID NO: 10243 - protein, 118 aa, Artificial Sequence
  Chemically Synthesized
QVQLQESGGGLVQAGGSLRLSCAASGNISYRPRMGWYRQAPGKERELVAAIGTGGNTNYADSVKGRFTISRDNAKNTVYLQMNSLKPEDTAVYYCAAIYTYWPTYIYWGQGTQVTVSS

SEQ ID NO: 10244 - protein, 121 aa, Artificial Sequence
  Chemically Synthesized
QVQLQESGGGLVQAGGSLRLSCAASGTISGDRFMGWYRQAPGKERELVASIDSGGSTNYADSVKGRFTISRDNAKNTVYLQMNSLKPEDTAVYYCAVYAIKEGRGDRLAYWGQGTQVTVSS

SEQ ID NO: 10245 - protein, 118 aa, Artificial Sequence
  Chemically Synthesized
QVQLQESGGGLVQAGGSLRLSCAASGTISRTGAMGWYRQAPGKERELVAAINGGGITNYADSVKGRFTISRDNAKNTVYLQMNSLKPEDTAVYYCAVDYDFYHYFGYWGQGTQVTVSS

SEQ ID NO: 10246 - protein, 118 aa, Artificial Sequence
  Chemically Synthesized
QVQLQESGGGLVQAGGSLRLSCAASGTISFLFAMGWYRQAPGKERELVASIDYGSNTNYADSVKGRFTISRDNAKNTVYLQMNSLKPEDTAVYYCAVYYLQDYDYLYWGQGTQVTVSS

SEQ ID NO: 10247 - protein, 118 aa, Artificial Sequence
  Chemically Synthesized
QVQLQESGGGLVQAGGSLRLSCAASGTISRTAVMGWYRQAPGKERELVAGIAIGTTTYYADSVKGRFTISRDNAKNTVYLQMNSLKPEDTAVYYCAADTWAYGLLYYWGQGTQVTVSS

SEQ ID NO: 10248 - protein, 118 aa, Artificial Sequence
  Chemically Synthesized
QVQLQESGGGLVQAGGSLRLSCAASGYIFGWGSMGWYRQAPGKERELVASISYGGSTYYADSVKGRFTISRDNAKNTVYLQMNSLKPEDTAVYYCAAGYIAYVVFDYWGQGTQVTVSS

SEQ ID NO: 10249 - protein, 124 aa, Artificial Sequence
  Chemically Synthesized
QVQLQESGGGLVQAGGSLRLSCAASGTIFYVERMGWYRQAPGKEREFVAGIGYGSITNYADSVKGRFTISRDNAKNTVYLQMNSLKPEDTAVYYCAARTILSGYYPYYDWHEYWGQGTQVTVSS

SEQ ID NO: 10250 - protein, 121 aa, Artificial Sequence
  Chemically Synthesized
QVQLQESGGGLVQAGGSLRLSCAASGYIFDIVFMGWYRQAPGKEREFVAGITNGASTNYADSVKGRFTISRDNAKNTVYLQMNSLKPEDTAVYYCAAGDARYGGYSVTIYWGQGTQVTVSS

SEQ ID NO: 10251 - protein, 126 aa, Artificial Sequence
  Chemically Synthesized
QVQLQESGGGLVQAGGSLRLSCAASGSISYDTLMGWYRQAPGKEREFVATIAYGTSTYYADSVKGRFTISRDNAKNTVYLQMNSLKPEDTAVYYCAVRHDVHTYDDGDDNPYYPYWGQGTQVTVSS

SEQ ID NO: 10252 - protein, 118 aa, Artificial Sequence
  Chemically Synthesized
QVQLQESGGGLVQAGGSLRLSCAASGSISAQGGMGWYRQAPGKERELVATITFGATTYYADSVKGRFTISRDNAKNTVYLQMNSLKPEDTAVYYCAAIELEQGYYFYWGQGTQVTVSS

SEQ ID NO: 10253 - protein, 119 aa, Artificial Sequence
  Chemically Synthesized
QVQLQESGGGLVQAGGSLRLSCAASGNISVIATLMGWYRQAPGKEREFVASIGYGSTTYYADSVKGRFTISRDNAKNTVYLQMNSLKPEDTAVYYCAAGYDGGDAHYYWGQGTQVTVSS

SEQ ID NO: 10254 - protein, 122 aa, Artificial Sequence
  Chemically Synthesized
QVQLQESGGGLVQAGGSLRLSCAASGTISRHYYMGWYRQAPGKERELVATIGPGSNTYYADSVKGRFTISRDNAKNTVYLQMNSLKPEDTAVYYCAVYPVDYQLPYTLYPYWGQGTQVTVSS

SEQ ID NO: 10255 - protein, 118 aa, Artificial Sequence
  Chemically Synthesized
QVQLQESGGGLVQAGGSLRLSCAASGSISALDWMGWYRQAPGKEREFVAGIAYGTSTNYADSVKGRFTISRDNAKNTVYLQMNSLKPEDTAVYYCAVQSDSDSYLLYWGQGTQVTVSS

SEQ ID NO: 10256 - protein, 111 aa, Artificial Sequence
  Chemically Synthesized
QVQLQESGGGLVQAGGSLRLSCAASGTIFLETMGWYRQAPGKEREFVASIGGGTSTNYADSVKGRFTISRDNAKNTVYLQMNSLKPEDTAVYYCAKYPSYWGQGTQVTVSS

SEQ ID NO: 10257 - protein, 117 aa, Artificial Sequence
  Chemically Synthesized
QVQLQESGGGLVQAGGSLRLSCAASGNISTIYSMGWYRQAPGKEREFVAGISYGTSTYYADSVKGRFTISRDNAKNTVYLQMNSLKPEDTAVYYCAALRYRGRHAYWGQGTQVTVSS

SEQ ID NO: 10258 - protein, 120 aa, Artificial Sequence
  Chemically Synthesized
QVQLQESGGGLVQAGGSLRLSCAASGTISTLYMGWYRQAPGKEREFVATIGYGTNTYYADSVKGRFTISRDNAKNTVYLQMNSLKPEDTAVYYCAAGRHGHTFLCFSSYWGQGTQVTVSS

SEQ ID NO: 10259 - protein, 118 aa, Artificial Sequence
  Chemically Synthesized
QVQLQESGGGLVQAGGSLRLSCAASGSISDDTYMGWYRQAPGKERELVASISSGGTTYYADSVKGRFTISRDNAKNTVYLQMNSLKPEDTAVYYCAAIVVYRDDFGYWGQGTQVTVSS

SEQ ID NO: 10260 - protein, 118 aa, Artificial Sequence
  Chemically Synthesized
QVQLQESGGGLVQAGGSLRLSCAASGTISEGYIMGWYRQAPGKEREFVAAIGRGGTTYYADSVKGRFTISRDNAKNTVYLQMNSLKPEDTAVYYCAVWPVGNAYYDYWGQGTQVTVSS

SEQ ID NO: 10261 - protein, 117 aa, Artificial Sequence
  Chemically Synthesized
QVQLQESGGGLVQAGGSLRLSCAASGSIFYSTMGWYRQAPGKEREFVATITYGGTTNYADSVKGRFTISRDNAKNTVYLQMNSLKPEDTAVYYCAVYDVIGGSYRYWGQGTQVTVSS

SEQ ID NO: 10262 - protein, 122 aa, Artificial Sequence
  Chemically Synthesized
QVQLQESGGGLVQAGGSLRLSCAASGNISYVSYMGWYRQAPGKEREFVAAIDDGGITYYADSVKGRFTISRDNAKNTVYLQMNSLKPEDTAVYYCAAISTGDQTYTYVFHYWGQGTQVTVSS

SEQ ID NO: 10263 - protein, 122 aa, Artificial Sequence
  Chemically Synthesized
QVQLQESGGGLVQAGGSLRLSCAASGTISDVKSMGWYRQAPGKEREFVAGISSGGITNYADSVKGRFTISRDNAKNTVYLQMNSLKPEDTAVYYCAADHWNTLPYYPYHEYWGQGTQVTVSS

SEQ ID NO: 10264 - protein, 118 aa, Artificial Sequence
  Chemically Synthesized
QVQLQESGGGLVQAGGSLRLSCAASGNISTERPMGWYRQAPGKEREFVATIDAGGSTYYADSVKGRFTISRDNAKNTVYLQMNSLKPEDTAVYYCAANPARYGGHAYWGQGTQVTVSS

SEQ ID NO: 10265 - protein, 122 aa, Artificial Sequence
  Chemically Synthesized
QVQLQESGGGLVQAGGSLRLSCAASGSISQWYGMGWYRQAPGKEREFVAGITYGTNTYYADSVKGRFTISRDNAKNTVYLQMNSLKPEDTAVYYCAAATTPIYPRDADLLYWGQGTQVTVSS

SEQ ID NO: 10266 - protein, 118 aa, Artificial Sequence
  Chemically Synthesized
QVQLQESGGGLVQAGGSLRLSCAASGNISPYVDMGWYRQAPGKEREFVAGISYGGTTNYADSVKGRFTISRDNAKNTVYLQMNSLKPEDTAVYYCAAFFYRPFVYDYWGQGTQVTVSS

SEQ ID NO: 10267 - protein, 118 aa, Artificial Sequence
  Chemically Synthesized
QVQLQESGGGLVQAGGSLRLSCAASGTISDVDYMGWYRQAPGKERELVASIADGGITNYADSVKGRFTISRDNAKNTVYLQMNSLKPEDTAVYYCAVDYYIPDSHYYWGQGTQVTVSS

SEQ ID NO: 10268 - protein, 125 aa, Artificial Sequence
  Chemically Synthesized
QVQLQESGGGLVQAGGSLRLSCAASGNISRAYDMGWYRQAPGKEREFVASIAHGTITNYADSVKGRFTISRDNAKNTVYLQMNSLKPEDTAVYYCAASGGVDPQDLKWLNDGFYWGQGTQVTVSS

SEQ ID NO: 10269 - protein, 126 aa, Artificial Sequence
  Chemically Synthesized
QVQLQESGGGLVQAGGSLRLSCAASGYISGYYDMGWYRQAPGKERELVATIDTGAITNYADSVKGRFTISRDNAKNTVYLQMNSLKPEDTAVYYCAAADHSYPWQGAASLRQFQYWGQGTQVTVSS

SEQ ID NO: 10270 - protein, 118 aa, Artificial Sequence
  Chemically Synthesized
QVQLQESGGGLVQAGGSLRLSCAASGSISRYKYMGWYRQAPGKERELVAAIDYGTITYYADSVKGRFTISRDNAKNTVYLQMNSLKPEDTAVYYCAAPAWPYYRLAYWGQGTQVTVSS

SEQ ID NO: 10271 - protein, 118 aa, Artificial Sequence
  Chemically Synthesized
QVQLQESGGGLVQAGGSLRLSCAASGTISFLIYMGWYRQAPGKEREFVASITYGTSTYYADSVKGRFTISRDNAKNTVYLQMNSLKPEDTAVYYCAAYGVGVGRYGYWGQGTQVTVSS

SEQ ID NO: 10272 - protein, 120 aa, Artificial Sequence
  Chemically Synthesized
QVQLQESGGGLVQAGGSLRLSCAASGSISATYMGWYRQAPGKEREFVAGINPGTSTYYADSVKGRFTISRDNAKNTVYLQMNSLKPEDTAVYYCAVYSLVTLMVTVCIYWGQGTQVTVSS

SEQ ID NO: 10273 - protein, 118 aa, Artificial Sequence
  Chemically Synthesized
QVQLQESGGGLVQAGGSLRLSCAASGTIFKRYYMGWYRQAPGKERELVATIGAGSTTYYADSVKGRFTISRDNAKNTVYLQMNSLKPEDTAVYYCAARWLLYRAHEYWGQGTQVTVSS

SEQ ID NO: 10274 - protein, 118 aa, Artificial Sequence
  Chemically Synthesized
QVQLQESGGGLVQAGGSLRLSCAASGTIFVYRYMGWYRQAPGKERELVATITRGATTYYADSVKGRFTISRDNAKNTVYLQMNSLKPEDTAVYYCAVANRAGAPHSYWGQGTQVTVSS

SEQ ID NO: 10275 - protein, 121 aa, Artificial Sequence
  Chemically Synthesized
QVQLQESGGGLVQAGGSLRLSCAASGNISPDTSMGWYRQAPGKEREFVAAINDGTTTYYADSVKGRFTISRDNAKNTVYLQMNSLKPEDTAVYYCAVYALEGYYIIALLYWGQGTQVTVSS

SEQ ID NO: 10276 - protein, 122 aa, Artificial Sequence
  Chemically Synthesized
QVQLQESGGGLVQAGGSLRLSCAASGSIFVNRRMGWYRQAPGKEREFVASINYGATTYYADSVKGRFTISRDNAKNTVYLQMNSLKPEDTAVYYCAARYKWRAQYDRFHYYWGQGTQVTVSS

SEQ ID NO: 10277 - protein, 122 aa, Artificial Sequence
  Chemically Synthesized
QVQLQESGGGLVQAGGSLRLSCAASGYIFYLDSMGWYRQAPGKEREFVATIASGGTTYYADSVKGRFTISRDNAKNTVYLQMNSLKPEDTAVYYCAVIIWDSDPYYTPHYYWGQGTQVTVSS

SEQ ID NO: 10278 - protein, 118 aa, Artificial Sequence
  Chemically Synthesized
QVQLQESGGGLVQAGGSLRLSCAASGYISRSPGMGWYRQAPGKERELVAAIDGGTITNYADSVKGRFTISRDNAKNTVYLQMNSLKPEDTAVYYCAVTSSWNSLTIYWGQGTQVTVSS

SEQ ID NO: 10279 - protein, 122 aa, Artificial Sequence
  Chemically Synthesized
QVQLQESGGGLVQAGGSLRLSCAASGTIFSNLQMGWYRQAPGKEREFVAGISVGAITNYADSVKGRFTISRDNAKNTVYLQMNSLKPEDTAVYYCAAEDDPYILQDYRFDYWGQGTQVTVSS

SEQ ID NO: 10280 - protein, 126 aa, Artificial Sequence
  Chemically Synthesized
QVQLQESGGGLVQAGGSLRLSCAASGYISYRGIMGWYRQAPGKEREFVATIGVGGNTNYADSVKGRFTISRDNAKNTVYLQMNSLKPEDTAVYYCAVIVLYGYGIDGVSEDGYDYWGQGTQVTVSS

SEQ ID NO: 10281 - protein, 118 aa, Artificial Sequence
  Chemically Synthesized
QVQLQESGGGLVQAGGSLRLSCAASGSIFPYYYMGWYRQAPGKEREFVAAIDTGTTTNYADSVKGRFTISRDNAKNTVYLQMNSLKPEDTAVYYCAAVWGNYWIHQYWGQGTQVTVSS

SEQ ID NO: 10282 - protein, 121 aa, Artificial Sequence
  Chemically Synthesized
QVQLQESGGGLVQAGGSLRLSCAASGYIFRGSSMGWYRQAPGKERELVAGIGAVVIPYADSVKGRFTISRDNAKNTVYLQMNSLKPEDTAVYYCAAHNRNDDTGFDIHLYWGQGTQVTVSS

SEQ ID NO: 10283 - protein, 118 aa, Artificial Sequence
  Chemically Synthesized
QVQLQESGGGLVQAGGSLRLSCAASGTIFRNDVMGWYRQAPGKERELVATIDYGATTYYADSVKGRFTISRDNAKNTVYLQMNSLKPEDTAVYYCAVPQYRKTYLDYWGQGTQVTVSS

SEQ ID NO: 10284 - protein, 118 aa, Artificial Sequence
  Chemically Synthesized
QVQLQESGGGLVQAGGSLRLSCAASGYIFTIFSMGWYRQAPGKERELVAAIGYGSTTNYADSVKGRFTISRDNAKNTVYLQMNSLKPEDTAVYYCAAANTYPFLHWYWGQGTQVTVSS

SEQ ID NO: 10285 - protein, 122 aa, Artificial Sequence
  Chemically Synthesized
QVQLQESGGGLVQAGGSLRLSCAASGNISRYVWMGWYRQAPGKERELVATIDDGATTYYADSVKGRFTISRDNAKNTVYLQMNSLKPEDTAVYYCAVDSVIIFLYYLGHRYWGQGTQVTVSS

SEQ ID NO: 10286 - protein, 118 aa, Artificial Sequence
  Chemically Synthesized
QVQLQESGGGLVQAGGSLRLSCAASGTIFTGTFMGWYRQAPGKEREFVATIDGGGNTNYADSVKGRFTISRDNAKNTVYLQMNSLKPEDTAVYYCAVIGNQDGSHGYWGQGTQVTVSS

SEQ ID NO: 10287 - protein, 112 aa, Artificial Sequence
  Chemically Synthesized
QVQLQESGGGLVQAGGSLRLSCAASGTIFYYYVMGWYRQAPGKEREFVATITDGATTYYADSVKGRFTISRDNAKNTVYLQMNSLKPEDTAVYYCAAYHHYWGQGTQVTVSS

SEQ ID NO: 10288 - protein, 122 aa, Artificial Sequence
  Chemically Synthesized
QVQLQESGGGLVQAGGSLRLSCAASGSISPYIYMGWYRQAPGKERELVASIGHGGITNYADSVKGRFTISRDNAKNTVYLQMNSLKPEDTAVYYCAVRPVGGYDERRSYGYWGQGTQVTVSS

SEQ ID NO: 10289 - protein, 123 aa, Artificial Sequence
  Chemically Synthesized
QVQLQESGGGLVQAGGSLRLSCAASGYISFQAYMGWYRQAPGKEREFVAAINWGTNTNYADSVKGRFTISRDNAKNTVYLQMNSLKPEDTAVYYCAAKSIYPYAYLPRWHYYWGQGTQVTVSS

SEQ ID NO: 10290 - protein, 117 aa, Artificial Sequence
  Chemically Synthesized
QVQLQESGGGLVQAGGSLRLSCAASGSIFYYYMGWYRQAPGKEREFVAAISQGATTYYADSVKGRFTISRDNAKNTVYLQMNSLKPEDTAVYYCAVDHGLGDPFFYWGQGTQVTVSS

SEQ ID NO: 10291 - protein, 118 aa, Artificial Sequence
  Chemically Synthesized
QVQLQESGGGLVQAGGSLRLSCAASGTISFRNYMGWYRQAPGKERELVASIASGAITYYADSVKGRFTISRDNAKNTVYLQMNSLKPEDTAVYYCAVVGYDDRDLAYWGQGTQVTVSS

SEQ ID NO: 10292 - protein, 118 aa, Artificial Sequence
  Chemically Synthesized
QVQLQESGGGLVQAGGSLRLSCAASGSISLVGYMGWYRQAPGKEREFVATIDLGTITYYADSVKGRFTISRDNAKNTVYLQMNSLKPEDTAVYYCAANSFYPHPYPYWGQGTQVTVSS

SEQ ID NO: 10293 - protein, 118 aa, Artificial Sequence
  Chemically Synthesized
QVQLQESGGGLVQAGGSLRLSCAASGYISRATRMGWYRQAPGKEREFVASIDGGSNTNYADSVKGRFTISRDNAKNTVYLQMNSLKPEDTAVYYCAVVPLVTESFVYWGQGTQVTVSS

SEQ ID NO: 10294 - protein, 116 aa, Artificial Sequence
  Chemically Synthesized
QVQLQESGGGLVQAGGSLRLSCAASGYISLSYGMGWYRQAPGKEREFVALLVSVLIPYADSVKGRFTISRDNAKNTVYLQMNSLKPEDTAVYYCAVSLTTSLVLYWGQGTQVTVSS

SEQ ID NO: 10295 - protein, 118 aa, Artificial Sequence
  Chemically Synthesized
QVQLQESGGGLVQAGGSLRLSCAASGYISSVSYMGWYRQAPGKERELVAAITSGTITYYADSVKGRFTISRDNAKNTVYLQMNSLKPEDTAVYYCAVGAGNQWSHLYWGQGTQVTVSS

SEQ ID NO: 10296 - protein, 122 aa, Artificial Sequence
  Chemically Synthesized
QVQLQESGGGLVQAGGSLRLSCAASGYIFHDGDMGWYRQAPGKEREFVAAITDGSSTYYADSVKGRFTISRDNAKNTVYLQMNSLKPEDTAVYYCAANSTYPHSAYVYHYYWGQGTQVTVSS

SEQ ID NO: 10297 - protein, 122 aa, Artificial Sequence
  Chemically Synthesized
QVQLQESGGGLVQAGGSLRLSCAASGNISGYGDMGWYRQAPGKEREFVASIDYGSNTYYADSVKGRFTISRDNAKNTVYLQMNSLKPEDTAVYYCAADEASIKGYYWSLYYWGQGTQVTVSS

SEQ ID NO: 10298 - protein, 122 aa, Artificial Sequence
  Chemically Synthesized
QVQLQESGGGLVQAGGSLRLSCAASGTISRKAPMGWYRQAPGKERELVAGISDGTNTYYADSVKGRFTISRDNAKNTVYLQMNSLKPEDTAVYYCAVDQYDSDYDDYILDYWGQGTQVTVSS

SEQ ID NO: 10299 - protein, 126 aa, Artificial Sequence
  Chemically Synthesized
QVQLQESGGGLVQAGGSLRLSCAASGYIFVLYYMGWYRQAPGKEREFVAAISAGGNTYYADSVKGRFTISRDNAKNTVYLQMNSLKPEDTAVYYCAVYYYPTWGPTYAKLGYLRYWGQGTQVTVSS

SEQ ID NO: 10300 - protein, 118 aa, Artificial Sequence
  Chemically Synthesized
QVQLQESGGGLVQAGGSLRLSCAASGNIFWHDIMGWYRQAPGKERELVASISFGGSTNYADSVKGRFTISRDNAKNTVYLQMNSLKPEDTAVYYCAAWYTYSPSHLYWGQGTQVTVSS

SEQ ID NO: 10301 - protein, 122 aa, Artificial Sequence
  Chemically Synthesized
QVQLQESGGGLVQAGGSLRLSCAASGTISDLLFMGWYRQAPGKERELVASIGIGSITYYADSVKGRFTISRDNAKNTVYLQMNSLKPEDTAVYYCAVNVLHHQVHTDQHAYWGQGTQVTVSS

SEQ ID NO: 10302 - protein, 118 aa, Artificial Sequence
  Chemically Synthesized
QVQLQESGGGLVQAGGSLRLSCAASGNISATGSMGWYRQAPGKEREFVASIDEGGITNYADSVKGRFTISRDNAKNTVYLQMNSLKPEDTAVYYCAAYSEQQRTLPYWGQGTQVTVSS

SEQ ID NO: 10303 - protein, 122 aa, Artificial Sequence
  Chemically Synthesized
QVQLQESGGGLVQAGGSLRLSCAASGNISLYGGMGWYRQAPGKERELVAAITHGATTYYADSVKGRFTISRDNAKNTVYLQMNSLKPEDTAVYYCAAYRQYFIGDRAPHPYWGQGTQVTVSS

SEQ ID NO: 10304 - protein, 109 aa, Artificial Sequence
  Chemically Synthesized
QVQLQESGGGLVQAGGSLRLSCAASGYISHRGDMGWYRQAPGKERELVATITYGTNTYADSVKGRFTISRDNAKNTVYLQMNSLKPEDTAVYYCAHVYWGQGTQVTVSS

SEQ ID NO: 10305 - protein, 122 aa, Artificial Sequence
  Chemically Synthesized
QVQLQESGGGLVQAGGSLRLSCAASGTIFDRHGMGWYRQAPGKERELVAAITDGTSTNYADSVKGRFTISRDNAKNTVYLQMNSLKPEDTAVYYCAAFDQGDTTVPRGFPYWGQGTQVTVSS

SEQ ID NO: 10306 - protein, 121 aa, Artificial Sequence
  Chemically Synthesized
QVQLQESGGGLVQAGGSLRLSCAASGTISYANYMGWYRQAPGKERELVAGIDNGTTTNYADSVKGRFTISRDNAKNTVYLQMNSLKPEDTAVYYCAVWSSVTLWLLVVLYWGQGTQVTVSS

SEQ ID NO: 10307 - protein, 126 aa, Artificial Sequence
  Chemically Synthesized
QVQLQESGGGLVQAGGSLRLSCAASGTISTTARMGWYRQAPGKEREFVATIAVGASTNYADSVKGRFTISRDNAKNTVYLQMNSLKPEDTAVYYCAARDNDIAGGQRPRTIVYDYWGQGTQVTVSS

SEQ ID NO: 10308 - protein, 117 aa, Artificial Sequence
  Chemically Synthesized
QVQLQESGGGLVQAGGSLRLSCAASGTISDSLRMGWYRQAPGKEREFVAGITDGYYQYADSVKGRFTISRDNAKNTVYLQMNSLKPEDTAVYYCAVTSNRLQDHRYWGQGTQVTVSS

SEQ ID NO: 10309 - protein, 126 aa, Artificial Sequence
  Chemically Synthesized
QVQLQESGGGLVQAGGSLRLSCAASGNIFPGYDMGWYRQAPGKEREFVATINEGASTYYADSVKGRFTISRDNAKNTVYLQMNSLKPEDTAVYYCAVVSTWYAVRRLDAFDYLVYWGQGTQVTVSS

SEQ ID NO: 10310 - protein, 122 aa, Artificial Sequence
  Chemically Synthesized
QVQLQESGGGLVQAGGSLRLSCAASGTISGFDYMGWYRQAPGKEREFVASISNGTITYYADSVKGRFTISRDNAKNTVYLQMNSLKPEDTAVYYCAAGFSVITDDYTNHYYWGQGTQVTVSS

SEQ ID NO: 10311 - protein, 118 aa, Artificial Sequence
  Chemically Synthesized
QVQLQESGGGLVQAGGSLRLSCAASGNIFAQDGMGWYRQAPGKEREFVASISYGSITYYADSVKGRFTISRDNAKNTVYLQMNSLKPEDTAVYYCAAYPYTITYHYYWGQGTQVTVSS

SEQ ID NO: 10312 - protein, 114 aa, Artificial Sequence
  Chemically Synthesized
QVQLQESGGGLVQAGGSLRLSCAASGNISVDPGMGWYRQAPGKEREFVASIGFGTSTNYADSVKGRFTISRDNAKNTVYLQMNSLKPEDTAVYYCAADGSYYYWGQGTQVTVSS

SEQ ID NO: 10313 - protein, 117 aa, Artificial Sequence
  Chemically Synthesized
QVQLQESGGGLVQAGGSLRLSCAASGTISFVPWMGWYRQAPGKEREFVAVLVRVLLPYADSVKGRFTISRDNAKNTVYLQMNSLKPEDTAVYYCAAWDRSRLLYLYWGQGTQVTVSS

SEQ ID NO: 10314 - protein, 122 aa, Artificial Sequence
  Chemically Synthesized
QVQLQESGGGLVQAGGSLRLSCAASGTISGPYDMGWYRQAPGKEREFVASIGSGASTYYADSVKGRFTISRDNAKNTVYLQMNSLKPEDTAVYYCAVKTWATSQRNTYLTYWGQGTQVTVSS

SEQ ID NO: 10315 - protein, 126 aa, Artificial Sequence
  Chemically Synthesized
QVQLQESGGGLVQAGGSLRLSCAASGNIFDDKLMGWYRQAPGKEREFVAAISRGGTTYYADSVKGRFTISRDNAKNTVYLQMNSLKPEDTAVYYCAAVLRYRNTYDYRPHYLYDYWGQGTQVTVSS

SEQ ID NO: 10316 - protein, 118 aa, Artificial Sequence
  Chemically Synthesized
QVQLQESGGGLVQAGGSLRLSCAASGSIFTILFMGWYRQAPGKEREFVAGISDGGTTYYADSVKGRFTISRDNAKNTVYLQMNSLKPEDTAVYYCAVYDVYYPYHVYWGQGTQVTVSS

SEQ ID NO: 10317 - protein, 118 aa, Artificial Sequence
  Chemically Synthesized
QVQLQESGGGLVQAGGSLRLSCAASGNISAYWYMGWYRQAPGKEREFVASISGGASTNYADSVKGRFTISRDNAKNTVYLQMNSLKPEDTAVYYCAVDDDDTRSHVYWGQGTQVTVSS

SEQ ID NO: 10318 - protein, 125 aa, Artificial Sequence
  Chemically Synthesized
QVQLQESGGGLVQAGGSLRLSCAASGYISGRRMGWYRQAPGKERELVATINRGGNTNYADSVKGRFTISRDNAKNTVYLQMNSLKPEDTAVYYCAARQYSRLPSRVDSRYYLQYWGQGTQVTVSS

SEQ ID NO: 10319 - protein, 118 aa, Artificial Sequence
  Chemically Synthesized
QVQLQESGGGLVQAGGSLRLSCAASGSISLTGYMGWYRQAPGKERELVAAIGDGSNTYYADSVKGRFTISRDNAKNTVYLQMNSLKPEDTAVYYCAVWYEPQPYHTYWGQGTQVTVSS

SEQ ID NO: 10320 - protein, 122 aa, Artificial Sequence
  Chemically Synthesized
QVQLQESGGGLVQAGGSLRLSCAASGSISYRLPMGWYRQAPGKERELVAGISYGSTTYYADSVKGRFTISRDNAKNTVYLQMNSLKPEDTAVYYCAAAYRRAYWQDLSHSYWGQGTQVTVSS

SEQ ID NO: 10321 - protein, 126 aa, Artificial Sequence
  Chemically Synthesized
QVQLQESGGGLVQAGGSLRLSCAASGTIFKFHSMGWYRQAPGKEREFVAGITLGAITYYADSVKGRFTISRDNAKNTVYLQMNSLKPEDTAVYYCAVGKIDYGGRDTSDALRLWYWGQGTQVTVSS

SEQ ID NO: 10322 - protein, 122 aa, Artificial Sequence
  Chemically Synthesized
QVQLQESGGGLVQAGGSLRLSCAASGSISAGSAMGWYRQAPGKEREFVASINYGTSTNYADSVKGRFTISRDNAKNTVYLQMNSLKPEDTAVYYCAVDTWFTSSRFNAHAYWGQGTQVTVSS

SEQ ID NO: 10323 - protein, 119 aa, Artificial Sequence
  Chemically Synthesized
QVQLQESGGGLVQAGGSLRLSCAASGSIFWTGLMGWYRQAPGKERELVATITVGVLPYADSVKGRFTISRDNAKNTVYLQMNSLKPEDTAVYYCAVSRTLSITVLVIYWGQGTQVTVSS

SEQ ID NO: 10324 - protein, 118 aa, Artificial Sequence
  Chemically Synthesized
QVQLQESGGGLVQAGGSLRLSCAASGYIFRNWSMGWYRQAPGKEREFVASIGPGGITYYADSVKGRFTISRDNAKNTVYLQMNSLKPEDTAVYYCAADRDDYVDHEYWGQGTQVTVSS

SEQ ID NO: 10325 - protein, 118 aa, Artificial Sequence
  Chemically Synthesized
QVQLQESGGGLVQAGGSLRLSCAASGYIFGNDVMGWYRQAPGKERELVAAIDTGANTYYADSVKGRFTISRDNAKNTVYLQMNSLKPEDTAVYYCAVWSGRNDYYVYWGQGTQVTVSS

SEQ ID NO: 10326 - protein, 117 aa, Artificial Sequence
  Chemically Synthesized
QVQLQESGGGLVQAGGSLRLSCAASGSIFQPEGMGWYRQAPGKEREFVAGITRGGTQYADSVKGRFTISRDNAKNTVYLQMNSLKPEDTAVYYCAVWGSQSYLFDYWGQGTQVTVSS

SEQ ID NO: 10327 - protein, 121 aa, Artificial Sequence
  Chemically Synthesized
QVQLQESGGGLVQAGGSLRLSCAASGTIFGAYWMGWYRQAPGKEREFVATINSGSSTNYADSVKGRFTISRDNAKNTVYLQMNSLKPEDTAVYYCAVTVAGPSPPARPWYWGQGTQVTVSS

SEQ ID NO: 10328 - protein, 122 aa, Artificial Sequence
  Chemically Synthesized
QVQLQESGGGLVQAGGSLRLSCAASGTISTTRNMGWYRQAPGKERELVATITDGTITNYADSVKGRFTISRDNAKNTVYLQMNSLKPEDTAVYYCAADESQRYDFAESHDYWGQGTQVTVSS

SEQ ID NO: 10329 - protein, 118 aa, Artificial Sequence
  Chemically Synthesized
QVQLQESGGGLVQAGGSLRLSCAASGNISQGIAMGWYRQAPGKEREFVASIAKGASTYYADSVKGRFTISRDNAKNTVYLQMNSLKPEDTAVYYCAVQTDDYNDHFYWGQGTQVTVSS

SEQ ID NO: 10330 - protein, 122 aa, Artificial Sequence
  Chemically Synthesized
QVQLQESGGGLVQAGGSLRLSCAASGSIFVYWFMGWYRQAPGKERELVAGINYGSITNYADSVKGRFTISRDNAKNTVYLQMNSLKPEDTAVYYCAVYRSRWGYILTRHDYWGQGTQVTVSS

SEQ ID NO: 10331 - protein, 117 aa, Artificial Sequence
  Chemically Synthesized
QVQLQESGGGLVQAGGSLRLSCAASGYIFSYSMGWYRQAPGKEREFVASIAYGSTTNYADSVKGRFTISRDNAKNTVYLQMNSLKPEDTAVYYCAALVRRDYLHYYWGQGTQVTVSS

SEQ ID NO: 10332 - protein, 126 aa, Artificial Sequence
  Chemically Synthesized
QVQLQESGGGLVQAGGSLRLSCAASGYIFGRYYMGWYRQAPGKERELVAGINNGGSTYYADSVKGRFTISRDNAKNTVYLQMNSLKPEDTAVYYCAVLGPVVAHQLTYARENYRYWGQGTQVTVSS

SEQ ID NO: 10333 - protein, 118 aa, Artificial Sequence
  Chemically Synthesized
QVQLQESGGGLVQAGGSLRLSCAASGYISSRSVMGWYRQAPGKERELVASIGFGGTTYYADSVKGRFTISRDNAKNTVYLQMNSLKPEDTAVYYCAVLLAYYPLYDYWGQGTQVTVSS

SEQ ID NO: 10334 - protein, 118 aa, Artificial Sequence
  Chemically Synthesized
QVQLQESGGGLVQAGGSLRLSCAASGNIFRGVTMGWYRQAPGKERELVAGIGEGAITYYADSVKGRFTISRDNAKNTVYLQMNSLKPEDTAVYYCAAYGDYGATLSYWGQGTQVTVSS

SEQ ID NO: 10335 - protein, 122 aa, Artificial Sequence
  Chemically Synthesized
QVQLQESGGGLVQAGGSLRLSCAASGSISAPAYMGWYRQAPGKERELVASISYGSSTYYADSVKGRFTISRDNAKNTVYLQMNSLKPEDTAVYYCAAVQPDDFQSDAYLLYWGQGTQVTVSS

SEQ ID NO: 10336 - protein, 122 aa, Artificial Sequence
  Chemically Synthesized
QVQLQESGGGLVQAGGSLRLSCAASGTISWLRLMGWYRQAPGKEREFVATIADGGNTNYADSVKGRFTISRDNAKNTVYLQMNSLKPEDTAVYYCAATDVAYDGGWDDLVYWGQGTQVTVSS

SEQ ID NO: 10337 - protein, 117 aa, Artificial Sequence
  Chemically Synthesized
QVQLQESGGGLVQAGGSLRLSCAASGNISTVGDMGWYRQAPGKEREFVAAISLGTNTNYADSVKGRFTISRDNAKNTVYLQMNSLKPEDTAVYYCAVVYGVRWFFYWGQGTQVTVSS

SEQ ID NO: 10338 - protein, 118 aa, Artificial Sequence
  Chemically Synthesized
QVQLQESGGGLVQAGGSLRLSCAASGNISAWGDMGWYRQAPGKERELVATIGLGSITNYADSVKGRFTISRDNAKNTVYLQMNSLKPEDTAVYYCAVDFKYIYAHGYWGQGTQVTVSS

SEQ ID NO: 10339 - protein, 118 aa, Artificial Sequence
  Chemically Synthesized
QVQLQESGGGLVQAGGSLRLSCAASGNISYTLYMGWYRQAPGKEREFVATISYGTTTNYADSVKGRFTISRDNAKNTVYLQMNSLKPEDTAVYYCAAPGYKRASYPYWGQGTQVTVSS

SEQ ID NO: 10340 - protein, 125 aa, Artificial Sequence
  Chemically Synthesized
QVQLQESGGGLVQAGGSLRLSCAASGYISAGLDMGWYRQAPGKERELVAAIATGGTTNYADSVKGRFTISRDNAKNTVYLQMNSLKPEDTAVYYCAVYNFIYISRTVLLNSGFYWGQGTQVTVSS

SEQ ID NO: 10341 - protein, 126 aa, Artificial Sequence
  Chemically Synthesized
QVQLQESGGGLVQAGGSLRLSCAASGTISKYRQMGWYRQAPGKERELVAGIGPGGITYYADSVKGRFTISRDNAKNTVYLQMNSLKPEDTAVYYCAVDTYYSDGFRWSDQVDYVYWGQGTQVTVSS

SEQ ID NO: 10342 - protein, 122 aa, Artificial Sequence
  Chemically Synthesized
QVQLQESGGGLVQAGGSLRLSCAASGTISQLDYMGWYRQAPGKEREFVAGIDDGATTNYADSVKGRFTISRDNAKNTVYLQMNSLKPEDTAVYYCAVWQGTYWYINNGFYYWGQGTQVTVSS

SEQ ID NO: 10343 - protein, 118 aa, Artificial Sequence
  Chemically Synthesized
QVQLQESGGGLVQAGGSLRLSCAASGTISYPHYMGWYRQAPGKEREFVAAISSGTSTYYADSVKGRFTISRDNAKNTVYLQMNSLKPEDTAVYYCAVIRQGDGDHYYWGQGTQVTVSS

SEQ ID NO: 10344 - protein, 118 aa, Artificial Sequence
  Chemically Synthesized
QVQLQESGGGLVQAGGSLRLSCAASGTIFRGGGMGWYRQAPGKERELVATIAWGGNTYYADSVKGRFTISRDNAKNTVYLQMNSLKPEDTAVYYCAVGQAANAYHYYWGQGTQVTVSS

SEQ ID NO: 10345 - protein, 126 aa, Artificial Sequence
  Chemically Synthesized
QVQLQESGGGLVQAGGSLRLSCAASGYIFYGYYMGWYRQAPGKEREFVASITWGSTTYYADSVKGRFTISRDNAKNTVYLQMNSLKPEDTAVYYCAVSLTYKPYWLSQYSTTHWYWGQGTQVTVSS

SEQ ID NO: 10346 - protein, 118 aa, Artificial Sequence
  Chemically Synthesized
QVQLQESGGGLVQAGGSLRLSCAASGTIFGRGSMGWYRQAPGKEREFVATIDYGTNTNYADSVKGRFTISRDNAKNTVYLQMNSLKPEDTAVYYCAAQSRRQSDHKYWGQGTQVTVSS

SEQ ID NO: 10347 - protein, 125 aa, Artificial Sequence
  Chemically Synthesized
QVQLQESGGGLVQAGGSLRLSCAASGTISLVRMGWYRQAPGKEREFVASIATGTNTNYADSVKGRFTISRDNAKNTVYLQMNSLKPEDTAVYYCAVYYPWIYRDRYWYNYAFPYWGQGTQVTVSS

SEQ ID NO: 10348 - protein, 118 aa, Artificial Sequence
  Chemically Synthesized
QVQLQESGGGLVQAGGSLRLSCAASGSISYYSYMGWYRQAPGKEREFVATISDGSSTNYADSVKGRFTISRDNAKNTVYLQMNSLKPEDTAVYYCAAYEWNSLAYLYWGQGTQVTVSS

SEQ ID NO: 10349 - protein, 122 aa, Artificial Sequence
  Chemically Synthesized
QVQLQESGGGLVQAGGSLRLSCAASGTISDPYYMGWYRQAPGKEREFVATITVGSTTYYADSVKGRFTISRDNAKNTVYLQMNSLKPEDTAVYYCAAWSYPDTDDGNLHHYWGQGTQVTVSS

SEQ ID NO: 10350 - protein, 122 aa, Artificial Sequence
  Chemically Synthesized
QVQLQESGGGLVQAGGSLRLSCAASGNIFGYAFMGWYRQAPGKEREFVAGISRGTITYYADSVKGRFTISRDNAKNTVYLQMNSLKPEDTAVYYCAVVYYRPRAYVYAHYYWGQGTQVTVSS

SEQ ID NO: 10351 - protein, 118 aa, Artificial Sequence
  Chemically Synthesized
QVQLQESGGGLVQAGGSLRLSCAASGTIFPSNDMGWYRQAPGKERELVATIDLGANTYYADSVKGRFTISRDNAKNTVYLQMNSLKPEDTAVYYCAVYTYDYYGFAYWGQGTQVTVSS

SEQ ID NO: 10352 - protein, 122 aa, Artificial Sequence
  Chemically Synthesized
QVQLQESGGGLVQAGGSLRLSCAASGYIFARTAMGWYRQAPGKERELVAAIGSGSTTYYADSVKGRFTISRDNAKNTVYLQMNSLKPEDTAVYYCAAAASADDNDYGAYRYWGQGTQVTVSS

SEQ ID NO: 10353 - protein, 118 aa, Artificial Sequence
  Chemically Synthesized
QVQLQESGGGLVQAGGSLRLSCAASGNISILKYMGWYRQAPGKEREFVATINKGGTTNYADSVKGRFTISRDNAKNTVYLQMNSLKPEDTAVYYCAAEYGYRAHLDYWGQGTQVTVSS

SEQ ID NO: 10354 - protein, 122 aa, Artificial Sequence
  Chemically Synthesized
QVQLQESGGGLVQAGGSLRLSCAASGYIFDPAFMGWYRQAPGKERELVASIGVGGNTYYADSVKGRFTISRDNAKNTVYLQMNSLKPEDTAVYYCAAESVITYLDGYLFQYWGQGTQVTVSS

SEQ ID NO: 10355 - protein, 116 aa, Artificial Sequence
  Chemically Synthesized
QVQLQESGGGLVQAGGSLRLSCAASGTISPGAYMGWYRQAPGKERELVASIADGGNTNYADSVKGRFTISRDNAKNTVYLQMNSLKPEDTAVYYCAVTLNGTTMYWGQGTQVTVSS

SEQ ID NO: 10356 - protein, 122 aa, Artificial Sequence
  Chemically Synthesized
QVQLQESGGGLVQAGGSLRLSCAASGNISTLWYMGWYRQAPGKERELVASIDYGTTTNYADSVKGRFTISRDNAKNTVYLQMNSLKPEDTAVYYCAVLWWLVQYSYPLLHYWGQGTQVTVSS

SEQ ID NO: 10357 - protein, 118 aa, Artificial Sequence
  Chemically Synthesized
QVQLQESGGGLVQAGGSLRLSCAASGSIFIRVYMGWYRQAPGKERELVATIDPGGNTNYADSVKGRFTISRDNAKNTVYLQMNSLKPEDTAVYYCAARYYYHEYYLYWGQGTQVTVSS

SEQ ID NO: 10358 - protein, 117 aa, Artificial Sequence
  Chemically Synthesized
QVQLQESGGGLVQAGGSLRLSCAASGYISPSADMGWYRQAPGKERELLPLLVSVLIPYADSVKGRFTISRDNAKNTVYLQMNSLKPEDTAVYYCAAQRYDSRFLSYWGQGTQVTVSS

SEQ ID NO: 10359 - protein, 118 aa, Artificial Sequence
  Chemically Synthesized
QVQLQESGGGLVQAGGSLRLSCAASGNIFYLNQMGWYRQAPGKEREFVATISYGATTYYADSVKGRFTISRDNAKNTVYLQMNSLKPEDTAVYYCAASYYQDYLFDYWGQGTQVTVSS

SEQ ID NO: 10360 - protein, 126 aa, Artificial Sequence
  Chemically Synthesized
QVQLQESGGGLVQAGGSLRLSCAASGTISSATSMGWYRQAPGKERELVASIGVGGITYYADSVKGRFTISRDNAKNTVYLQMNSLKPEDTAVYYCAVRPYTYGDVDPYTTYGFYYWGQGTQVTVSS

SEQ ID NO: 10361 - protein, 122 aa, Artificial Sequence
  Chemically Synthesized
QVQLQESGGGLVQAGGSLRLSCAASGTISQDGTMGWYRQAPGKERELVATIATGTTTYYADSVKGRFTISRDNAKNTVYLQMNSLKPEDTAVYYCAADYVTRLDDWLWLHYWGQGTQVTVSS

SEQ ID NO: 10362 - protein, 118 aa, Artificial Sequence
  Chemically Synthesized
QVQLQESGGGLVQAGGSLRLSCAASGTIFYPIYMGWYRQAPGKEREFVASIGAGATTNYADSVKGRFTISRDNAKNTVYLQMNSLKPEDTAVYYCAAGDQVYYLFVYWGQGTQVTVSS

SEQ ID NO: 10363 - protein, 122 aa, Artificial Sequence
  Chemically Synthesized
QVQLQESGGGLVQAGGSLRLSCAASGNIFDRYGMGWYRQAPGKEREFVAAISYGSSTYYADSVKGRFTISRDNAKNTVYLQMNSLKPEDTAVYYCAVRYKAYHNWYRYHRYWGQGTQVTVSS

SEQ ID NO: 10364 - protein, 124 aa, Artificial Sequence
  Chemically Synthesized
QVQLQESGGGLVQAGGSLRLSCAASGYISDYSTMGWYRQAPGKEREFVAVLRVLLPYADSVKGRFTISRDNAKNTVYLQMNSLKPEDTAVYYCAAEDVGDEDGWRYDNPDYHYWGQGTQVTVSS

SEQ ID NO: 10365 - protein, 118 aa, Artificial Sequence
  Chemically Synthesized
QVQLQESGGGLVQAGGSLRLSCAASGTISSFVVMGWYRQAPGKEREFVAAIAVGTITYYADSVKGRFTISRDNAKNTVYLQMNSLKPEDTAVYYCAVPGYYTGTHGYWGQGTQVTVSS

SEQ ID NO: 10366 - protein, 118 aa, Artificial Sequence
  Chemically Synthesized
QVQLQESGGGLVQAGGSLRLSCAASGSIFRPLDMGWYRQAPGKERELVASIAQGANTNYADSVKGRFTISRDNAKNTVYLQMNSLKPEDTAVYYCAVARVDSGPYGYWGQGTQVTVSS

SEQ ID NO: 10367 - protein, 122 aa, Artificial Sequence
  Chemically Synthesized
QVQLQESGGGLVQAGGSLRLSCAASGYISVNGNMGWYRQAPGKEREFVATIDNGSITNYADSVKGRFTISRDNAKNTVYLQMNSLKPEDTAVYYCAATTFGVGGPLDDYPYWGQGTQVTVSS

SEQ ID NO: 10368 - protein, 118 aa, Artificial Sequence
  Chemically Synthesized
QVQLQESGGGLVQAGGSLRLSCAASGTIFVLYLMGWYRQAPGKERELVATIGYGSTTNYADSVKGRFTISRDNAKNTVYLQMNSLKPEDTAVYYCAAGHTYSGAHSYWGQGTQVTVSS

SEQ ID NO: 10369 - protein, 122 aa, Artificial Sequence
  Chemically Synthesized
QVQLQESGGGLVQAGGSLRLSCAASGYISLYYYMGWYRQAPGKERELVAAISRGGTTYYADSVKGRFTISRDNAKNTVYLQMNSLKPEDTAVYYCAVRDSYTDAIRTTFQYWGQGTQVTVSS

SEQ ID NO: 10370 - protein, 121 aa, Artificial Sequence
  Chemically Synthesized
QVQLQESGGGLVQAGGSLRLSCAASGSIFVGDDMGWYRQAPGKEREFVAAIGHGSITNYADSVKGRFTISRDNAKNTVYLQMNSLKPEDTAVYYCAATGLLVLTVLTFMYWGQGTQVTVSS

SEQ ID NO: 10371 - protein, 122 aa, Artificial Sequence
  Chemically Synthesized
QVQLQESGGGLVQAGGSLRLSCAASGYISGSEYMGWYRQAPGKERELVATIGDGTTTNYADSVKGRFTISRDNAKNTVYLQMNSLKPEDTAVYYCAADPYNYYDHSADLIYWGQGTQVTVSS

SEQ ID NO: 10372 - protein, 117 aa, Artificial Sequence
  Chemically Synthesized
QVQLQESGGGLVQAGGSLRLSCAASGTISDVGYMGWYRQAPGKEREFVASIAYGSNTNYADSVKGRFTISRDNAKNTVYLQMNSLKPEDTAVYYCAFTLTRLVTIYWGQGTQVTVSS

SEQ ID NO: 10373 - protein, 110 aa, Artificial Sequence
  Chemically Synthesized
QVQLQESGGGLVQAGGSLRLSCAASGYIFLYGNMGWYRQAPGKERELVAGISFGTNTYYADSVKGRFTISRDNAKNTVYLQMNSLKPEDTAVYYCAVGYWGQGTQVTVSS

SEQ ID NO: 10374 - protein, 126 aa, Artificial Sequence
  Chemically Synthesized
QVQLQESGGGLVQAGGSLRLSCAASGNIFDFNGMGWYRQAPGKERELVAAIGVGGITNYADSVKGRFTISRDNAKNTVYLQMNSLKPEDTAVYYCAVVDDTYLYPYYYRTSYHYYWGQGTQVTVSS

SEQ ID NO: 10375 - protein, 122 aa, Artificial Sequence
  Chemically Synthesized
QVQLQESGGGLVQAGGSLRLSCAASGNISSFRDMGWYRQAPGKEREFVAAITVGGTTYYADSVKGRFTISRDNAKNTVYLQMNSLKPEDTAVYYCAATVNGLYVLDDRYSYWGQGTQVTVSS

SEQ ID NO: 10376 - protein, 118 aa, Artificial Sequence
  Chemically Synthesized
QVQLQESGGGLVQAGGSLRLSCAASGTIFPYAGMGWYRQAPGKEREFVAAIGYGGITYYADSVKGRFTISRDNAKNTVYLQMNSLKPEDTAVYYCAVYLTHRETFGYWGQGTQVTVSS

SEQ ID NO: 10377 - protein, 112 aa, Artificial Sequence
  Chemically Synthesized
QVQLQESGGGLVQAGGSLRLSCAASGNIFPLDYMGWYRQAPGKERELVATITRGSNTNYADSVKGRFTISRDNAKNTVYLQMNSLKPEDTAVYYCAATLMYWGQGTQVTVSS

SEQ ID NO: 10378 - protein, 122 aa, Artificial Sequence
  Chemically Synthesized
QVQLQESGGGLVQAGGSLRLSCAASGNISLRAVMGWYRQAPGKERELVAGIAQGSTTNYADSVKGRFTISRDNAKNTVYLQMNSLKPEDTAVYYCAVRYWIGATSWAAFIYWGQGTQVTVSS

SEQ ID NO: 10379 - protein, 118 aa, Artificial Sequence
  Chemically Synthesized
QVQLQESGGGLVQAGGSLRLSCAASGNISYRYYMGWYRQAPGKEREFVAAIGVGSITNYADSVKGRFTISRDNAKNTVYLQMNSLKPEDTAVYYCAAYIPYDRWLSYWGQGTQVTVSS

SEQ ID NO: 10380 - protein, 122 aa, Artificial Sequence
  Chemically Synthesized
QVQLQESGGGLVQAGGSLRLSCAASGTISDYVDMGWYRQAPGKEREFVASIADGAITYYADSVKGRFTISRDNAKNTVYLQMNSLKPEDTAVYYCAADGDGDYYSVEDLLYWGQGTQVTVSS

SEQ ID NO: 10381 - protein, 118 aa, Artificial Sequence
  Chemically Synthesized
QVQLQESGGGLVQAGGSLRLSCAASGNIFSTTAMGWYRQAPGKEREFVAAIARGTNTYYADSVKGRFTISRDNAKNTVYLQMNSLKPEDTAVYYCAAEISVFDDHNYWGQGTQVTVSS

SEQ ID NO: 10382 - protein, 122 aa, Artificial Sequence
  Chemically Synthesized
QVQLQESGGGLVQAGGSLRLSCAASGTIFLRRGMGWYRQAPGKEREFVATIGYGGNTYYADSVKGRFTISRDNAKNTVYLQMNSLKPEDTAVYYCAASQLVYPGGTPSFAYWGQGTQVTVSS

SEQ ID NO: 10383 - protein, 122 aa, Artificial Sequence
  Chemically Synthesized
QVQLQESGGGLVQAGGSLRLSCAASGTIFQTLGMGWYRQAPGKERELVAGITGGGITYYADSVKGRFTISRDNAKNTVYLQMNSLKPEDTAVYYCAVYYDRYNYYLYLHDYWGQGTQVTVSS

SEQ ID NO: 10384 - protein, 122 aa, Artificial Sequence
  Chemically Synthesized
QVQLQESGGGLVQAGGSLRLSCAASGYISPSYRMGWYRQAPGKEREFVAGIAAGANTYYADSVKGRFTISRDNAKNTVYLQMNSLKPEDTAVYYCAVRSSRTLWQFWPYTYWGQGTQVTVSS

SEQ ID NO: 10385 - protein, 117 aa, Artificial Sequence
  Chemically Synthesized
QVQLQESGGGLVQAGGSLRLSCAASGYIFPVQGMGWYRQAPGKERELVATINDGSNQYADSVKGRFTISRDNAKNTVYLQMNSLKPEDTAVYYCAAYYTATYLHWYWGQGTQVTVSS

SEQ ID NO: 10386 - protein, 118 aa, Artificial Sequence
  Chemically Synthesized
QVQLQESGGGLVQAGGSLRLSCAASGTIFAWYDMGWYRQAPGKEREFVATISRGTTTYYADSVKGRFTISRDNAKNTVYLQMNSLKPEDTAVYYCAAKTLHFLRHTYWGQGTQVTVSS

SEQ ID NO: 10387 - protein, 118 aa, Artificial Sequence
  Chemically Synthesized
QVQLQESGGGLVQAGGSLRLSCAASGNISYDPEMGWYRQAPGKEREFVAGIGYGTTTNYADSVKGRFTISRDNAKNTVYLQMNSLKPEDTAVYYCAAYYDDSDLCIYWGQGTQVTVSS

SEQ ID NO: 10388 - protein, 121 aa, Artificial Sequence
  Chemically Synthesized
QVQLQESGGGLVQAGGSLRLSCAASGNISYGYLMGWYRQAPGKEREFVATINAGATTNYADSVKGRFTISRDNAKNTVYLQMNSLKPEDTAVYYCAAQSPISRLNRGGLYWGQGTQVTVSS

SEQ ID NO: 10389 - protein, 126 aa, Artificial Sequence
  Chemically Synthesized
QVQLQESGGGLVQAGGSLRLSCAASGTIFQSGSMGWYRQAPGKERELVATIDWGSSTNYADSVKGRFTISRDNAKNTVYLQMNSLKPEDTAVYYCAVLTSNLYWRGILGYLYLSYWGQGTQVTVSS

SEQ ID NO: 10390 - protein, 122 aa, Artificial Sequence
  Chemically Synthesized
QVQLQESGGGLVQAGGSLRLSCAASGNIFREYVMGWYRQAPGKEREFVAAIGYGGNTNYADSVKGRFTISRDNAKNTVYLQMNSLKPEDTAVYYCAVSYGSYRVDPNFLDYWGQGTQVTVSS

SEQ ID NO: 10391 - protein, 121 aa, Artificial Sequence
  Chemically Synthesized
QVQLQESGGGLVQAGGSLRLSCAASGTISAALMGWYRQAPGKERELVAAIAFGTNTNYADSVKGRFTISRDNAKNTVYLQMNSLKPEDTAVYYCAVYYPYPHGSDDRHPYWGQGTQVTVSS

SEQ ID NO: 10392 - protein, 126 aa, Artificial Sequence
  Chemically Synthesized
QVQLQESGGGLVQAGGSLRLSCAASGTISATSRMGWYRQAPGKERELVAAISDGANTYYADSVKGRFTISRDNAKNTVYLQMNSLKPEDTAVYYCAAQDYQRVTYYWSPYDSHRYWGQGTQVTVSS

SEQ ID NO: 10393 - protein, 117 aa, Artificial Sequence
  Chemically Synthesized
QVQLQESGGGLVQAGGSLRLSCAASGSILLLRMGWYRQAPGKERELVAGINYGGNTNYADSVKGRFTISRDNAKNTVYLQMNSLKPEDTAVYYCAAVNAAITSHHYWGQGTQVTVSS

SEQ ID NO: 10394 - protein, 118 aa, Artificial Sequence
  Chemically Synthesized
QVQLQESGGGLVQAGGSLRLSCAASGSIFNYRYMGWYRQAPGKERELVATIAGGTNTYYADSVKGRFTISRDNAKNTVYLQMNSLKPEDTAVYYCAVRNTYRYRHYYWGQGTQVTVSS

SEQ ID NO: 10395 - protein, 116 aa, Artificial Sequence
  Chemically Synthesized
QVQLQESGGGLVQAGGSLRLSCAASGTIFDDVYMGWYRQAPGKERELVAAIGWGSSTNYADSVKGRFTISRDNAKNTVYLQMNSLKPEDTAVYYCAVDYYGWHDYWGQGTQVTVSS

SEQ ID NO: 10396 - protein, 126 aa, Artificial Sequence
  Chemically Synthesized
QVQLQESGGGLVQAGGSLRLSCAASGNISADVGMGWYRQAPGKEREFVASIASGSTTNYADSVKGRFTISRDNAKNTVYLQMNSLKPEDTAVYYCAATDRIGRYYGDVTYNYFLYWGQGTQVTVSS

SEQ ID NO: 10397 - protein, 118 aa, Artificial Sequence
  Chemically Synthesized
QVQLQESGGGLVQAGGSLRLSCAASGTIFAWFTMGWYRQAPGKERELVASISWGTSTNYADSVKGRFTISRDNAKNTVYLQMNSLKPEDTAVYYCAAVVQRHDLLGYWGQGTQVTVSS

SEQ ID NO: 10398 - protein, 117 aa, Artificial Sequence
  Chemically Synthesized
QVQLQESGGGLVQAGGSLRLSCAASGTIFTAYRMGWYRQAPGKERELVATITYGTNTYYADSVKGRFTISRDNAKNTVYLQMNSLKPEDTAVYYCAVVSTKPREVYWGQGTQVTVSS

SEQ ID NO: 10399 - protein, 125 aa, Artificial Sequence
  Chemically Synthesized
QVQLQESGGGLVQAGGSLRLSCAASGSIFHDVSMGWYRQAPGKERELVASINSGVLPYADSVKGRFTISRDNAKNTVYLQMNSLKPEDTAVYYCAVRDNVVTDNYGAYDTGLEYWGQGTQVTVSS

SEQ ID NO: 10400 - protein, 118 aa, Artificial Sequence
  Chemically Synthesized
QVQLQESGGGLVQAGGSLRLSCAASGYIFYTGTMGWYRQAPGKEREFVAAIDHGGTTNYADSVKGRFTISRDNAKNTVYLQMNSLKPEDTAVYYCAVTPGHRYIYGYWGQGTQVTVSS

SEQ ID NO: 10401 - protein, 122 aa, Artificial Sequence
  Chemically Synthesized
QVQLQESGGGLVQAGGSLRLSCAASGSISRYFGMGWYRQAPGKEREFVAGISVGANTNYADSVKGRFTISRDNAKNTVYLQMNSLKPEDTAVYYCAVLTNGADTLDQDYAYWGQGTQVTVSS

SEQ ID NO: 10402 - protein, 118 aa, Artificial Sequence
  Chemically Synthesized
QVQLQESGGGLVQAGGSLRLSCAASGTISSVPTMGWYRQAPGKERELVASITAGATTYYADSVKGRFTISRDNAKNTVYLQMNSLKPEDTAVYYCAAHRVAVTLLYYWGQGTQVTVSS

SEQ ID NO: 10403 - protein, 118 aa, Artificial Sequence
  Chemically Synthesized
QVQLQESGGGLVQAGGSLRLSCAASGYISRVGVMGWYRQAPGKEREFVAAISTGATTYYADSVKGRFTISRDNAKNTVYLQMNSLKPEDTAVYYCAVNPVGYVTYGYWGQGTQVTVSS

SEQ ID NO: 10404 - protein, 115 aa, Artificial Sequence
  Chemically Synthesized
QVQLQESGGGLVQAGGSLRLSCAASGYIFPVGYMGWYRQAPGKEREFVAGIGQGSTTNYADSVKGRFTISRDNAKNTVYLQMNSLKPEDTAVYYCAAVYVLHYYWGQGTQVTVSS

SEQ ID NO: 10405 - protein, 118 aa, Artificial Sequence
  Chemically Synthesized
QVQLQESGGGLVQAGGSLRLSCAASGSIFHTQEMGWYRQAPGKERELVASIDGGASTYYADSVKGRFTISRDNAKNTVYLQMNSLKPEDTAVYYCAALSTIAVLLYYWGQGTQVTVSS

SEQ ID NO: 10406 - protein, 118 aa, Artificial Sequence
  Chemically Synthesized
QVQLQESGGGLVQAGGSLRLSCAASGSISTPYYMGWYRQAPGKERELVAGIGIGTNTYYADSVKGRFTISRDNAKNTVYLQMNSLKPEDTAVYYCAAPGARGADHIYWGQGTQVTVSS

SEQ ID NO: 10407 - protein, 126 aa, Artificial Sequence
  Chemically Synthesized
QVQLQESGGGLVQAGGSLRLSCAASGYISGYRYMGWYRQAPGKERELVATIGRGGNTYYADSVKGRFTISRDNAKNTVYLQMNSLKPEDTAVYYCAVPWIFQRHRPGGQRPYLYYWGQGTQVTVSS

SEQ ID NO: 10408 - protein, 118 aa, Artificial Sequence
  Chemically Synthesized
QVQLQESGGGLVQAGGSLRLSCAASGTISVRTPMGWYRQAPGKEREFVATITRGGSTYYADSVKGRFTISRDNAKNTVYLQMNSLKPEDTAVYYCAVSRILYSVLRYWGQGTQVTVSS

SEQ ID NO: 10409 - protein, 122 aa, Artificial Sequence
  Chemically Synthesized
QVQLQESGGGLVQAGGSLRLSCAASGTIFLPTTMGWYRQAPGKEREFVAAINFGTNTYYADSVKGRFTISRDNAKNTVYLQMNSLKPEDTAVYYCAVYYYYNWVRRWYHKYWGQGTQVTVSS

SEQ ID NO: 10410 - protein, 123 aa, Artificial Sequence
  Chemically Synthesized
QVQLQESGGGLVQAGGSLRLSCAASGYIFFLPSMGWYRQAPGKEREFVAGIAYGTTYADSVKGRFTISRDNAKNTVYLQMNSLKPEDTAVYYCAATPRWYDVYSYYLVGFDYWGQGTQVTVSS

SEQ ID NO: 10411 - protein, 126 aa, Artificial Sequence
  Chemically Synthesized
QVQLQESGGGLVQAGGSLRLSCAASGTIFRTIHMGWYRQAPGKEREFVASISYGASTYYADSVKGRFTISRDNAKNTVYLQMNSLKPEDTAVYYCAVPYRLDRISAEGYYSYFTYWGQGTQVTVSS

SEQ ID NO: 10412 - protein, 122 aa, Artificial Sequence
  Chemically Synthesized
QVQLQESGGGLVQAGGSLRLSCAASGYIFGPYYMGWYRQAPGKERELVASIAYGTSTNYADSVKGRFTISRDNAKNTVYLQMNSLKPEDTAVYYCAAGSAITLLRLGYFYYWGQGTQVTVSS

SEQ ID NO: 10413 - protein, 118 aa, Artificial Sequence
  Chemically Synthesized
QVQLQESGGGLVQAGGSLRLSCAASGTIFRPYIMGWYRQAPGKEREFVAAINSGSSTYYADSVKGRFTISRDNAKNTVYLQMNSLKPEDTAVYYCAVPKYRWQYFTYWGQGTQVTVSS

SEQ ID NO: 10414 - protein, 118 aa, Artificial Sequence
  Chemically Synthesized
QVQLQESGGGLVQAGGSLRLSCAASGTIFGGAVMGWYRQAPGKEREFVASIADGTITYYADSVKGRFTISRDNAKNTVYLQMNSLKPEDTAVYYCAVAKYQQSGYLYWGQGTQVTVSS

SEQ ID NO: 10415 - protein, 118 aa, Artificial Sequence
  Chemically Synthesized
QVQLQESGGGLVQAGGSLRLSCAASGNISHYSYMGWYRQAPGKEREFVAAIGTGSNTNYADSVKGRFTISRDNAKNTVYLQMNSLKPEDTAVYYCAVVSPRQDLHYYWGQGTQVTVSS

SEQ ID NO: 10416 - protein, 118 aa, Artificial Sequence
  Chemically Synthesized
QVQLQESGGGLVQAGGSLRLSCAASGNISDFDYMGWYRQAPGKERELVATITYGSNTNYADSVKGRFTISRDNAKNTVYLQMNSLKPEDTAVYYCAATKAGYFPFPYWGQGTQVTVSS

SEQ ID NO: 10417 - protein, 126 aa, Artificial Sequence
  Chemically Synthesized
QVQLQESGGGLVQAGGSLRLSCAASGNIFLAYYMGWYRQAPGKEREFVATIDHGSITNYADSVKGRFTISRDNAKNTVYLQMNSLKPEDTAVYYCAAQSEDKYGYRRTFAGVHLYWGQGTQVTVSS

SEQ ID NO: 10418 - protein, 121 aa, Artificial Sequence
  Chemically Synthesized
QVQLQESGGGLVQAGGSLRLSCAASGYISDYIVMGWYRQAPGKEREFVAAIATGATTNYADSVKGRFTISRDNAKNTVYLQMNSLKPEDTAVYYCAVPYLYYYGYIAHGYWGQGTQVTVSS

SEQ ID NO: 10419 - protein, 118 aa, Artificial Sequence
  Chemically Synthesized
QVQLQESGGGLVQAGGSLRLSCAASGYISRGYYMGWYRQAPGKEREFVASIGYGGTTNYADSVKGRFTISRDNAKNTVYLQMNSLKPEDTAVYYCAVYYADRGGHPYWGQGTQVTVSS

SEQ ID NO: 10420 - protein, 126 aa, Artificial Sequence
  Chemically Synthesized
QVQLQESGGGLVQAGGSLRLSCAASGNISYTDYMGWYRQAPGKEREFVATIGYGAITNYADSVKGRFTISRDNAKNTVYLQMNSLKPEDTAVYYCAVTSWYLDTPSYSATNPFVYWGQGTQVTVSS

SEQ ID NO: 10421 - protein, 125 aa, Artificial Sequence
  Chemically Synthesized
QVQLQESGGGLVQAGGSLRLSCAASGYISTIGDMGWYRQAPGKERELVATIDWGGITYYADSVKGRFTISRDNAKNTVYLQMNSLKPEDTAVYYCAADWYTYRLNVIYGYLFRYWGQGTQVTVSS

SEQ ID NO: 10422 - protein, 129 aa, Artificial Sequence
  Chemically Synthesized
QVQLQESGGGLVQAGGSLRLSCAASGYIFDLSAMGWYRQAPGKEREFVAAIDAGSITNYADSVKGRFTISRDNAKNTVYLQMNSLKPEDTAVYYCAAYYRYATNPPPYTSRGHDYPSYWGQGTQVTVSS

SEQ ID NO: 10423 - protein, 118 aa, Artificial Sequence
  Chemically Synthesized
QVQLQESGGGLVQAGGSLRLSCAASGYISRVRYMGWYRQAPGKERELVAAIDWGGTTYYADSVKGRFTISRDNAKNTVYLQMNSLKPEDTAVYYCAARRWGAKWHLYWGQGTQVTVSS

SEQ ID NO: 10424 - protein, 118 aa, Artificial Sequence
  Chemically Synthesized
QVQLQESGGGLVQAGGSLRLSCAASGTIFSPYYMGWYRQAPGKERELVAGINYGATTNYADSVKGRFTISRDNAKNTVYLQMNSLKPEDTAVYYCAVTATIRTPLYYWGQGTQVTVSS

SEQ ID NO: 10425 - protein, 122 aa, Artificial Sequence
  Chemically Synthesized
QVQLQESGGGLVQAGGSLRLSCAASGTIFDAAYMGWYRQAPGKERELVAGIGFGTTTYYADSVKGRFTISRDNAKNTVYLQMNSLKPEDTAVYYCAVYYDTPWIPSPLFKYWGQGTQVTVSS

SEQ ID NO: 10426 - protein, 116 aa, Artificial Sequence
  Chemically Synthesized
QVQLQESGGGLVQAGGSLRLSCAASGSISSHRGMGWYRQAPGKERELVAGIDYGGTTYYADSVKGRFTISRDNAKNTVYLQMNSLKPEDTAVYYCAARYGRGHVYWGQGTQVTVSS

SEQ ID NO: 10427 - protein, 117 aa, Artificial Sequence
  Chemically Synthesized
QVQLQESGGGLVQAGGSLRLSCAASGTIFRDQYMGWYRQAPGKERELVASIGGGSTYYADSVKGRFTISRDNAKNTVYLQMNSLKPEDTAVYYCAAYIGPYFPLQYWGQGTQVTVSS

SEQ ID NO: 10428 - protein, 120 aa, Artificial Sequence
  Chemically Synthesized
QVQLQESGGGLVQAGGSLRLSCAASGTIFRVGMGWYRQAPGKERELVAAIGSGSNTYYADSVKGRFTISRDNAKNTVYLQMNSLKPEDTAVYYCAARRRTASAWPGYAYWGQGTQVTVSS

SEQ ID NO: 10429 - protein, 126 aa, Artificial Sequence
  Chemically Synthesized
QVQLQESGGGLVQAGGSLRLSCAASGSISPTQIMGWYRQAPGKEREFVAGIAYGGSTNYADSVKGRFTISRDNAKNTVYLQMNSLKPEDTAVYYCAAGLDLGDFVIWFRWIAHYYWGQGTQVTVSS

SEQ ID NO: 10430 - protein, 124 aa, Artificial Sequence
  Chemically Synthesized
QVQLQESGGGLVQAGGSLRLSCAASGTIFAPSMGWYRQAPGKEREFVAGIGAGATTNYADSVKGRFTISRDNAKNTVYLQMNSLKPEDTAVYYCAATHSRSRLCTTVKTVIIYWGQGTQVTVSS

SEQ ID NO: 10431 - protein, 126 aa, Artificial Sequence
  Chemically Synthesized
QVQLQESGGGLVQAGGSLRLSCAASGTIFTSFVMGWYRQAPGKEREFVASIAYGAITYYADSVKGRFTISRDNAKNTVYLQMNSLKPEDTAVYYCAAVTGSGTEYLYPFSYDYDYWGQGTQVTVSS

SEQ ID NO: 10432 - protein, 120 aa, Artificial Sequence
  Chemically Synthesized
QVQLQESGGGLVQAGGSLRLSCAASGNIFSTTMGWYRQAPGKEREFVAAITVGGSTYYADSVKGRFTISRDNAKNTVYLQMNSLKPEDTAVYYCAVTSTCSRSLRLFLYWGQGTQVTVSS

SEQ ID NO: 10433 - protein, 118 aa, Artificial Sequence
  Chemically Synthesized
QVQLQESGGGLVQAGGSLRLSCAASGTIFGAFDMGWYRQAPGKERELVAGIDSGSTTYYADSVKGRFTISRDNAKNTVYLQMNSLKPEDTAVYYCAVYDYGGHRHDYWGQGTQVTVSS

SEQ ID NO: 10434 - protein, 112 aa, Artificial Sequence
  Chemically Synthesized
QVQLQESGGGLVQAGGSLRLSCAASGNIFYALVMGWYRQAPGKEREFVASIDEGTTTNYADSVKGRFTISRDNAKNTVYLQMNSLKPEDTAVYYCAARSIYWGQGTQVTVSS

SEQ ID NO: 10435 - protein, 120 aa, Artificial Sequence
  Chemically Synthesized
QVQLQESGGGLVQAGGSLRLSCAASGTIFNGGNMGWYRQAPGKERELVAAIGLGTSTNYADSVKGRFTISRDNAKNTVYLQMNSLKPEDTAVYYCAVRYHYVTDYPHYYWGQGTQVTVSS

SEQ ID NO: 10436 - protein, 126 aa, Artificial Sequence
  Chemically Synthesized
QVQLQESGGGLVQAGGSLRLSCAASGYISDNAYMGWYRQAPGKEREFVATITGGTITYYADSVKGRFTISRDNAKNTVYLQMNSLKPEDTAVYYCAVAHRYRARDTAYGFAVFVYWGQGTQVTVSS

SEQ ID NO: 10437 - protein, 118 aa, Artificial Sequence
  Chemically Synthesized
QVQLQESGGGLVQAGGSLRLSCAASGSIFPTLIMGWYRQAPGKEREFVASIGSGTITYYADSVKGRFTISRDNAKNTVYLQMNSLKPEDTAVYYCAAALQYGTLYQYWGQGTQVTVSS

SEQ ID NO: 10438 - protein, 126 aa, Artificial Sequence
  Chemically Synthesized
QVQLQESGGGLVQAGGSLRLSCAASGYISPRYGMGWYRQAPGKERELVASIGYGSTTNYADSVKGRFTISRDNAKNTVYLQMNSLKPEDTAVYYCAATYTRIRPPAYDYQYLLYYWGQGTQVTVSS

SEQ ID NO: 10439 - protein, 117 aa, Artificial Sequence
  Chemically Synthesized
QVQLQESGGGLVQAGGSLRLSCAASGSIFFDNRMGWYRQAPGKERELLPLLVLVLIPYADSVKGRFTISRDNAKNTVYLQMNSLKPEDTAVYYCAAEIDYQDVFGYWGQGTQVTVSS

SEQ ID NO: 10440 - protein, 122 aa, Artificial Sequence
  Chemically Synthesized
QVQLQESGGGLVQAGGSLRLSCAASGNISYLYVMGWYRQAPGKEREFVATIDGGSSTYYADSVKGRFTISRDNAKNTVYLQMNSLKPEDTAVYYCAVRIYEYWSYLGYYDYWGQGTQVTVSS

SEQ ID NO: 10441 - protein, 125 aa, Artificial Sequence
  Chemically Synthesized
QVQLQESGGGLVQAGGSLRLSCAASGSISPWYPMGWYRQAPGKEREFVAGINSVVLPYADSVKGRFTISRDNAKNTVYLQMNSLKPEDTAVYYCAVYRWLDGGGYRQPATVHRYWGQGTQVTVSS

SEQ ID NO: 10442 - protein, 118 aa, Artificial Sequence
  Chemically Synthesized
QVQLQESGGGLVQAGGSLRLSCAASGTIFGLGTMGWYRQAPGKEREFVAGITPGTTTNYADSVKGRFTISRDNAKNTVYLQMNSLKPEDTAVYYCAVTYGYWYGHDYWGQGTQVTVSS

SEQ ID NO: 10443 - protein, 121 aa, Artificial Sequence
  Chemically Synthesized
QVQLQESGGGLVQAGGSLRLSCAASGNISSLLHMGWYRQAPGKEREFVAAITSVLLPYADSVKGRFTISRDNAKNTVYLQMNSLKPEDTAVYYCAVGYYWSNDRGPDLTYWGQGTQVTVSS

SEQ ID NO: 10444 - protein, 125 aa, Artificial Sequence
  Chemically Synthesized
QVQLQESGGGLVQAGGSLRLSCAASGNISRYDYMGWYRQAPGKERELVAGIDTGGTTNYADSVKGRFTISRDNAKNTVYLQMNSLKPEDTAVYYCAAGQGNAPAPSWRWDADYYWGQGTQVTVSS

SEQ ID NO: 10445 - protein, 118 aa, Artificial Sequence
  Chemically Synthesized
QVQLQESGGGLVQAGGSLRLSCAASGNISPTQDMGWYRQAPGKEREFVASIDGGGITNYADSVKGRFTISRDNAKNTVYLQMNSLKPEDTAVYYCAVRYTDSGDHLYWGQGTQVTVSS

SEQ ID NO: 10446 - protein, 126 aa, Artificial Sequence
  Chemically Synthesized
QVQLQESGGGLVQAGGSLRLSCAASGYISDRELMGWYRQAPGKEREFVATINPGSSTYYADSVKGRFTISRDNAKNTVYLQMNSLKPEDTAVYYCAVPYLDLYLLKYPYYVYLYYWGQGTQVTVSS

SEQ ID NO: 10447 - protein, 123 aa, Artificial Sequence
  Chemically Synthesized
QVQLQESGGGLVQAGGSLRLSCAASGTISPYKYMGWYRQAPGKERELVAAITKGATTNYADSVKGRFTISRDNAKNTVYLQMNSLKPEDTAVYYCAAIRKYYDYYGPAGLWYWGQGTQVTVSS

SEQ ID NO: 10448 - protein, 115 aa, Artificial Sequence
  Chemically Synthesized
QVQLQESGGGLVQAGGSLRLSCAASGNISRRLYMGWYRQAPGKERELVASITSGATTNYADSVKGRFTISRDNAKNTVYLQMNSLKPEDTAVYYCAAARRLHEYWGQGTQVTVSS

SEQ ID NO: 10449 - protein, 118 aa, Artificial Sequence
  Chemically Synthesized
QVQLQESGGGLVQAGGSLRLSCAASGTIFYLLDMGWYRQAPGKERELVAGITYGATTYYADSVKGRFTISRDNAKNTVYLQMNSLKPEDTAVYYCAVATDGTQNFYYWGQGTQVTVSS

SEQ ID NO: 10450 - protein, 118 aa, Artificial Sequence
  Chemically Synthesized
QVQLQESGGGLVQAGGSLRLSCAASGTISYVNYMGWYRQAPGKERELVASIARGSITNYADSVKGRFTISRDNAKNTVYLQMNSLKPEDTAVYYCAALKRSFFTHKYWGQGTQVTVSS

SEQ ID NO: 10451 - protein, 122 aa, Artificial Sequence
  Chemically Synthesized
QVQLQESGGGLVQAGGSLRLSCAASGSIFAIWTMGWYRQAPGKEREFVAGITLGATTNYADSVKGRFTISRDNAKNTVYLQMNSLKPEDTAVYYCAVKASSYYRQVALYQYWGQGTQVTVSS

SEQ ID NO: 10452 - protein, 122 aa, Artificial Sequence
  Chemically Synthesized
QVQLQESGGGLVQAGGSLRLSCAASGTIFLRYPMGWYRQAPGKEREFVASITAGASTNYADSVKGRFTISRDNAKNTVYLQMNSLKPEDTAVYYCAARIRRVPNGWTPHRYWGQGTQVTVSS

SEQ ID NO: 10453 - protein, 116 aa, Artificial Sequence
  Chemically Synthesized
QVQLQESGGGLVQAGGSLRLSCAASGYISKRREMGWYRQAPGKERELVAAIGYGTSTYYADSVKGRFTISRDNAKNTVYLQMNSLKPEDTAVYYCAASYARRYGYWGQGTQVTVSS

SEQ ID NO: 10454 - protein, 122 aa, Artificial Sequence
  Chemically Synthesized
QVQLQESGGGLVQAGGSLRLSCAASGYISWGWIMGWYRQAPGKERELVAAIGDGSTTNYADSVKGRFTISRDNAKNTVYLQMNSLKPEDTAVYYCAVVDGPRPRNAYRHAYWGQGTQVTVSS

SEQ ID NO: 10455 - protein, 112 aa, Artificial Sequence
  Chemically Synthesized
QVQLQESGGGLVQAGGSLRLSCAASGNISGSSNMGWYRQAPGKERELVASIDTGSSTYYADSVKGRFTISRDNAKNTVYLQMNSLKPEDTAVYYCAVLLDYWGQGTQVTVSS

SEQ ID NO: 10456 - protein, 120 aa, Artificial Sequence
  Chemically Synthesized
QVQLQESGGGLVQAGGSLRLSCAASGTIFYVYMGWYRQAPGKERELVAAIAHGYYQYADSVKGRFTISRDNAKNTVYLQMNSLKPEDTAVYYCAAGSHPDQGHLRLPYYWGQGTQVTVSS

SEQ ID NO: 10457 - protein, 120 aa, Artificial Sequence
  Chemically Synthesized
QVQLQESGGGLVQAGGSLRLSCAASGSISRIRRMGWYRQAPGKERELVAAIGVGGSTYYADSVKGRFTISRDNAKNTVYLQMNSLKPEDTAVYYCAVYFYYYEAVLHYYWGQGTQVTVSS

SEQ ID NO: 10458 - protein, 121 aa, Artificial Sequence
  Chemically Synthesized
QVQLQESGGGLVQAGGSLRLSCAASGSIFSTTMGWYRQAPGKEREFVATITDGTSTNYADSVKGRFTISRDNAKNTVYLQMNSLKPEDTAVYYCAAITPDSDVDNEFFAYWGQGTQVTVSS

SEQ ID NO: 10459 - protein, 118 aa, Artificial Sequence
  Chemically Synthesized
QVQLQESGGGLVQAGGSLRLSCAASGNISATPQMGWYRQAPGKERELVASIGYGAITYYADSVKGRFTISRDNAKNTVYLQMNSLKPEDTAVYYCAAWDQDDDRYYYWGQGTQVTVSS

SEQ ID NO: 10460 - protein, 121 aa, Artificial Sequence
  Chemically Synthesized
QVQLQESGGGLVQAGGSLRLSCAASGYISQDLVMGWYRQAPGKEREFVASITYGGITYYADSVKGRFTISRDNAKNTVYLQMNSLKPEDTAVYYCAVGSTTVVGVVVTFYWGQGTQVTVSS

SEQ ID NO: 10461 - protein, 116 aa, Artificial Sequence
  Chemically Synthesized
QVQLQESGGGLVQAGGSLRLSCAASGNIFGRRFMGWYRQAPGKEREFVATIGVGTITYYADSVKGRFTISRDNAKNTVYLQMNSLKPEDTAVYYCAAGYRPYYYYWGQGTQVTVSS

SEQ ID NO: 10462 - protein, 118 aa, Artificial Sequence
  Chemically Synthesized
QVQLQESGGGLVQAGGSLRLSCAASGTIFGPYGMGWYRQAPGKERELVAAIGDGTITNYADSVKGRFTISRDNAKNTVYLQMNSLKPEDTAVYYCAVAGTDISYDIYWGQGTQVTVSS

SEQ ID NO: 10463 - protein, 118 aa, Artificial Sequence
  Chemically Synthesized
QVQLQESGGGLVQAGGSLRLSCAASGNISTAYNMGWYRQAPGKEREFVAGISRGTTTYYADSVKGRFTISRDNAKNTVYLQMNSLKPEDTAVYYCAALGYRYSRFRYWGQGTQVTVSS

SEQ ID NO: 10464 - protein, 117 aa, Artificial Sequence
  Chemically Synthesized
QVQLQESGGGLVQAGGSLRLSCAASGYISRPPNMGWYRQAPGKEREFVAAIADGSITYYADSVKGRFTISRDNAKNTVYLQMNSLKPEDTAVYYCAADYVFDYSFYWGQGTQVTVSS

SEQ ID NO: 10465 - protein, 117 aa, Artificial Sequence
  Chemically Synthesized
QVQLQESGGGLVQAGGSLRLSCAASGNISKTSDMGWYRQAPGKEREFVAAIGVGGTTNYADSVKGRFTISRDNAKNTVYLQMNSLKPEDTAVYYCAAQYDIYNIIYWGQGTQVTVSS

SEQ ID NO: 10466 - protein, 120 aa, Artificial Sequence
  Chemically Synthesized
QVQLQESGGGLVQAGGSLRLSCAASGNIFGPNAMGWYRQAPGKERELVATIDNGSSTNYADSVKGRFTISRDNAKNTVYLQMNSLKPEDTAVYYCAVPPHFDSALRGFYWGQGTQVTVSS

SEQ ID NO: 10467 - protein, 122 aa, Artificial Sequence
  Chemically Synthesized
QVQLQESGGGLVQAGGSLRLSCAASGTISGDSIMGWYRQAPGKEREFVASITSGGTTNYADSVKGRFTISRDNAKNTVYLQMNSLKPEDTAVYYCAAYWGPYALRIRNHTYWGQGTQVTVSS

SEQ ID NO: 10468 - protein, 121 aa, Artificial Sequence
  Chemically Synthesized
QVQLQESGGGLVQAGGSLRLSCAASGTRMGWYRQAPGKERELVATISDGSSTNYADSVKGRFTISRDNAKNTVYLQMNSLKPEDTAVYYCAADLSYYSHRYALYGDWHPYWGQGTQVTVSS

SEQ ID NO: 10469 - protein, 118 aa, Artificial Sequence
  Chemically Synthesized
QVQLQESGGGLVQAGGSLRLSCAASGTISGRRTMGWYRQAPGKERELVAGIGYGGSTYYADSVKGRFTISRDNAKNTVYLQMNSLKPEDTAVYYCAAYRWYSASFYYWGQGTQVTVSS

SEQ ID NO: 10470 - protein, 118 aa, Artificial Sequence
  Chemically Synthesized
QVQLQESGGGLVQAGGSLRLSCAASGTIFLDSVMGWYRQAPGKERELVAGIGYGSTTYYADSVKGRFTISRDNAKNTVYLQMNSLKPEDTAVYYCAVDIDGFRKHEYWGQGTQVTVSS

SEQ ID NO: 10471 - protein, 118 aa, Artificial Sequence
  Chemically Synthesized
QVQLQESGGGLVQAGGSLRLSCAASGSISRWPYMGWYRQAPGKERELVAGIDYGSITNYADSVKGRFTISRDNAKNTVYLQMNSLKPEDTAVYYCAVGPDDKAYHDYWGQGTQVTVSS

SEQ ID NO: 10472 - protein, 126 aa, Artificial Sequence
  Chemically Synthesized
QVQLQESGGGLVQAGGSLRLSCAASGSIFPTYLMGWYRQAPGKERELVAAISRGGTTNYADSVKGRFTISRDNAKNTVYLQMNSLKPEDTAVYYCAVLQYDWLRRYSETRWYFRYWGQGTQVTVSS

SEQ ID NO: 10473 - protein, 117 aa, Artificial Sequence
  Chemically Synthesized
QVQLQESGGGLVQAGGSLRLSCAASGTISGTSMGWYRQAPGKEREFVASIGHGGSTYYADSVKGRFTISRDNAKNTVYLQMNSLKPEDTAVYYCAVYWPDDAELGYWGQGTQVTVSS

SEQ ID NO: 10474 - protein, 122 aa, Artificial Sequence
  Chemically Synthesized
QVQLQESGGGLVQAGGSLRLSCAASGTISRTYSMGWYRQAPGKERELVAAISFGTSTNYADSVKGRFTISRDNAKNTVYLQMNSLKPEDTAVYYCAAPYAINDLAPGQYVYWGQGTQVTVSS

SEQ ID NO: 10475 - protein, 118 aa, Artificial Sequence
  Chemically Synthesized
QVQLQESGGGLVQAGGSLRLSCAASGSIFADVYMGWYRQAPGKEREFVATITRGGNTNYADSVKGRFTISRDNAKNTVYLQMNSLKPEDTAVYYCAVYFTYRGVHRYWGQGTQVTVSS

SEQ ID NO: 10476 - protein, 118 aa, Artificial Sequence
  Chemically Synthesized
QVQLQESGGGLVQAGGSLRLSCAASGTIFLSYYMGWYRQAPGKEREFVATITHGTTTYYADSVKGRFTISRDNAKNTVYLQMNSLKPEDTAVYYCAADVVGLGRYAYWGQGTQVTVSS

SEQ ID NO: 10477 - protein, 121 aa, Artificial Sequence
  Chemically Synthesized
QVQLQESGGGLVQAGGSLRLSCAASGYISLDTLMGWYRQAPGKEREFVAAIAAGGSTYYADSVKGRFTISRDNAKNTVYLQMNSLKPEDTAVYYCAAISVTRLTLSKTMYWGQGTQVTVSS

SEQ ID NO: 10478 - protein, 122 aa, Artificial Sequence
  Chemically Synthesized
QVQLQESGGGLVQAGGSLRLSCAASGYIFYYNYMGWYRQAPGKEREFVAGINRGATTYYADSVKGRFTISRDNAKNTVYLQMNSLKPEDTAVYYCAVPIFRVGIVFTGYHYWGQGTQVTVSS

SEQ ID NO: 10479 - protein, 118 aa, Artificial Sequence
  Chemically Synthesized
QVQLQESGGGLVQAGGSLRLSCAASGSISGTQYMGWYRQAPGKEREFVASIDIGTSTYYADSVKGRFTISRDNAKNTVYLQMNSLKPEDTAVYYCAVTRYTYYGHTYWGQGTQVTVSS

SEQ ID NO: 10480 - protein, 117 aa, Artificial Sequence
  Chemically Synthesized
QVQLQESGGGLVQAGGSLRLSCAASGYISLASKMGWYRQAPGKEREFVAGILLVLIPYADSVKGRFTISRDNAKNTVYLQMNSLKPEDTAVYYCAARASYPSSLVYWGQGTQVTVSS

SEQ ID NO: 10481 - protein, 122 aa, Artificial Sequence
  Chemically Synthesized
QVQLQESGGGLVQAGGSLRLSCAASGYISPDYNMGWYRQAPGKEREFVASIDNGGSTYYADSVKGRFTISRDNAKNTVYLQMNSLKPEDTAVYYCAAEFDSDYVPIAFYLYWGQGTQVTVSS

SEQ ID NO: 10482 - protein, 117 aa, Artificial Sequence
  Chemically Synthesized
QVQLQESGGGLVQAGGSLRLSCAASGNISDFYAMGWYRQAPGKEREFVAGISHGSNTYYADSVKGRFTISRDNAKNTVYLQMNSLKPEDTAVYYCAADLQSAYHYYWGQGTQVTVSS

SEQ ID NO: 10483 - protein, 117 aa, Artificial Sequence
  Chemically Synthesized
QVQLQESGGGLVQAGGSLRLSCAASGYISYGSYMGWYRQAPGKEREYWFWYYYLYADSVKGRFTISRDNAKNTVYLQMNSLKPEDTAVYYCAAITTVLLSLSGTFYWGQGTQVTVSS

SEQ ID NO: 10484 - protein, 120 aa, Artificial Sequence
  Chemically Synthesized
QVQLQESGGGLVQAGGSLRLSCAASGNIFSSVGMGWYRQAPGKERELVALLLLVVVPYADSVKGRFTISRDNAKNTVYLQMNSLKPEDTAVYYCAARQYTSSWDERAHYWGQGTQVTVSS

SEQ ID NO: 10485 - protein, 126 aa, Artificial Sequence
  Chemically Synthesized
QVQLQESGGGLVQAGGSLRLSCAASGTIFTLAIMGWYRQAPGKERELVATIANGGTTYYADSVKGRFTISRDNAKNTVYLQMNSLKPEDTAVYYCAVWYQLTRTFDYLYFENFRYWGQGTQVTVSS

SEQ ID NO: 10486 - protein, 125 aa, Artificial Sequence
  Chemically Synthesized
QVQLQESGGGLVQAGGSLRLSCAASGYIFSYTYMGWYRQAPGKERELVAGIAAGSTTNYADSVKGRFTISRDNAKNTVYLQMNSLKPEDTAVYYCAASPYGYWRPSSFVADHEYWGQGTQVTVSS

SEQ ID NO: 10487 - protein, 111 aa, Artificial Sequence
  Chemically Synthesized
QVQLQESGGGLVQAGGSLRLSCAASGNIFVLSSMGWYRQAPGKERELVAAIDAGTSTNYADSVKGRFTISRDNAKNTVYLQMNSLKPEDTAVYYCAAHPYWGQGTQVTVSS

SEQ ID NO: 10488 - protein, 118 aa, Artificial Sequence
  Chemically Synthesized
QVQLQESGGGLVQAGGSLRLSCAASGSIFSRLFMGWYRQAPGKEREFVATIGNGSNTYYADSVKGRFTISRDNAKNTVYLQMNSLKPEDTAVYYCAAWGDVTQPLFYWGQGTQVTVSS

SEQ ID NO: 10489 - protein, 120 aa, Artificial Sequence
  Chemically Synthesized
QVQLQESGGGLVQAGGSLRLSCAASGYIFWRWAMGWYRQAPGKERELVATINGGTTYYADSVKGRFTISRDNAKNTVYLQMNSLKPEDTAVYYCAVRGHELGTTVTVLYWGQGTQVTVSS

SEQ ID NO: 10490 - protein, 118 aa, Artificial Sequence
  Chemically Synthesized
QVQLQESGGGLVQAGGSLRLSCAASGTIFRPTDMGWYRQAPGKERELVAAIGDGSITNYADSVKGRFTISRDNAKNTVYLQMNSLKPEDTAVYYCAAGAYLSSSHDYWGQGTQVTVSS

SEQ ID NO: 10491 - protein, 126 aa, Artificial Sequence
  Chemically Synthesized
QVQLQESGGGLVQAGGSLRLSCAASGNISDSYSMGWYRQAPGKEREFVATISGGAITNYADSVKGRFTISRDNAKNTVYLQMNSLKPEDTAVYYCAADQTYAGPYPPDRDTLYAYWGQGTQVTVSS

SEQ ID NO: 10492 - protein, 114 aa, Artificial Sequence
  Chemically Synthesized
QVQLQESGGGLVQAGGSLRLSCAASGYISDTPIMGWYRQAPGKERELVAAINGGGTSTNYADSVKGRFTISRDNAKNTVYLQMNSLKPEDTAVYYCAALLTIYWGQGTQVTVSS

SEQ ID NO: 10493 - protein, 117 aa, Artificial Sequence
  Chemically Synthesized
QVQLQESGGGLVQAGGSLRLSCAASGYISYYNMGWYRQAPGKEREFVAAIGHGGITNYADSVKGRFTISRDNAKNTVYLQMNSLKPEDTAVYYCAVWSYDRRSLLYWGQGTQVTVSS

SEQ ID NO: 10494 - protein, 117 aa, Artificial Sequence
  Chemically Synthesized
QVQLQESGGGLVQAGGSLRLSCAASGYIFSPRYMGWYRQAPGKERELVASIALGGKPYADSVKGRFTISRDNAKNTVYLQMNSLKPEDTAVYYCAAPAGGPDDLAYWGQGTQVTVSS

SEQ ID NO: 10495 - protein, 118 aa, Artificial Sequence
  Chemically Synthesized
QVQLQESGGGLVQAGGSLRLSCAASGSISYYGGMGWYRQAPGKERELVAAISWGGSTYYADSVKGRFTISRDNAKNTVYLQMNSLKPEDTAVYYCAVYTNDQPGFTYWGQGTQVTVSS

SEQ ID NO: 10496 - protein, 118 aa, Artificial Sequence
  Chemically Synthesized
QVQLQESGGGLVQAGGSLRLSCAASGTISYPYFMGWYRQAPGKEREFVAGIGYGGTTNYADSVKGRFTISRDNAKNTVYLQMNSLKPEDTAVYYCAALPQRRDALYYWGQGTQVTVSS

SEQ ID NO: 10497 - protein, 118 aa, Artificial Sequence
  Chemically Synthesized
QVQLQESGGGLVQAGGSLRLSCAASGYIFWIENMGWYRQAPGKEREFVAAINYGGTTYYADSVKGRFTISRDNAKNTVYLQMNSLKPEDTAVYYCAVNYFLADGHNYWGQGTQVTVSS

SEQ ID NO: 10498 - protein, 124 aa, Artificial Sequence
  Chemically Synthesized
QVQLQESGGGLVQAGGSLRLSCAASGTIFESVMGWYRQAPGKERELVASIDYGSTTNYADSVKGRFTISRDNAKNTVYLQMNSLKPEDTAVYYCAVEYGLDDGYVVVGEIYYYWGQGTQVTVSS

SEQ ID NO: 10499 - protein, 125 aa, Artificial Sequence
  Chemically Synthesized
QVQLQESGGGLVQAGGSLRLSCAASGSISRRGSMGWYRQAPGKEREFVASIADGGTTYYADSVKGRFTISRDNAKNTVYLQMNSLKPEDTAVYYCAVDGYYWKRDYVDGPSVFYWGQGTQVTVSS

SEQ ID NO: 10500 - protein, 126 aa, Artificial Sequence
  Chemically Synthesized
QVQLQESGGGLVQAGGSLRLSCAASGTISLAYRMGWYRQAPGKEREFVASIAYGAITYYADSVKGRFTISRDNAKNTVYLQMNSLKPEDTAVYYCAADHSYAQVYAFAYYYPYLYWGQGTQVTVSS

SEQ ID NO: 10501 - protein, 118 aa, Artificial Sequence
  Chemically Synthesized
QVQLQESGGGLVQAGGSLRLSCAASGYISGKYVMGWYRQAPGKERELVASITSGANTNYADSVKGRFTISRDNAKNTVYLQMNSLKPEDTAVYYCAAIGLAADSLVYWGQGTQVTVSS

SEQ ID NO: 10502 - protein, 118 aa, Artificial Sequence
  Chemically Synthesized
QVQLQESGGGLVQAGGSLRLSCAASGTIFIYPFMGWYRQAPGKERELVATITVGSNTYYADSVKGRFTISRDNAKNTVYLQMNSLKPEDTAVYYCAAWGDRDPLHVYWGQGTQVTVSS

SEQ ID NO: 10503 - protein, 117 aa, Artificial Sequence
  Chemically Synthesized
QVQLQESGGGLVQAGGSLRLSCAASGTIFTSLMGWYRQAPGKEREFVASIGSGSSTYYADSVKGRFTISRDNAKNTVYLQMNSLKPEDTAVYYCAAYSPPWYSHVYWGQGTQVTVSS

SEQ ID NO: 10504 - protein, 122 aa, Artificial Sequence
  Chemically Synthesized
QVQLQESGGGLVQAGGSLRLSCAASGTISDDYYMGWYRQAPGKEREFVASIAYGTTTYYADSVKGRFTISRDNAKNTVYLQMNSLKPEDTAVYYCAADSWYGLGRYSGYPYWGQGTQVTVSS

SEQ ID NO: 10505 - protein, 118 aa, Artificial Sequence
  Chemically Synthesized
QVQLQESGGGLVQAGGSLRLSCAASGTIFGYDSMGWYRQAPGKEREFVATIGWGGNTNYADSVKGRFTISRDNAKNTVYLQMNSLKPEDTAVYYCAVDTGPDVTLNYWGQGTQVTVSS

SEQ ID NO: 10506 - protein, 122 aa, Artificial Sequence
  Chemically Synthesized
QVQLQESGGGLVQAGGSLRLSCAASGYISASNRMGWYRQAPGKERELVAAIAPGATTNYADSVKGRFTISRDNAKNTVYLQMNSLKPEDTAVYYCAVWWYLYGWYAYSHYYWGQGTQVTVSS

SEQ ID NO: 10507 - protein, 112 aa, Artificial Sequence
  Chemically Synthesized
QVQLQESGGGLVQAGGSLRLSCAASGYIFVTGLMGWYRQAPGKEREFVASIGYGTTTYYADSVKGRFTISRDNAKNTVYLQMNSLKPEDTAVYYCAGWFWYWGQGTQVTVSS

SEQ ID NO: 10508 - protein, 124 aa, Artificial Sequence
  Chemically Synthesized
QVQLQESGGGLVQAGGSLRLSCAASGSIFPGQVMGWYRQAPGKERELVAAIGTGGITNYADSVKGRFTISRDNAKNTVYLQMNSLKPEDTAVYYCAAYYELRYNVQDDLLHSYWGQGTQVTVSS

SEQ ID NO: 10509 - protein, 117 aa, Artificial Sequence
  Chemically Synthesized
QVQLQESGGGLVQAGGSLRLSCAASGTIFPSYSMGWYRQAPGKEREFVAGIAPGTTTNYADSVKGRFTISRDNAKNTVYLQMNSLKPEDTAVYYCAADYQTYYFYYWGQGTQVTVSS

SEQ ID NO: 10510 - protein, 126 aa, Artificial Sequence
  Chemically Synthesized
QVQLQESGGGLVQAGGSLRLSCAASGTISALALMGWYRQAPGKERELVATISTGGNTYYADSVKGRFTISRDNAKNTVYLQMNSLKPEDTAVYYCAAHWIWYDYWSETEHTSHGYWGQGTQVTVSS

SEQ ID NO: 10511 - protein, 122 aa, Artificial Sequence
  Chemically Synthesized
QVQLQESGGGLVQAGGSLRLSCAASGNISFYHVMGWYRQAPGKERELVATITYGGSTNYADSVKGRFTISRDNAKNTVYLQMNSLKPEDTAVYYCAVIPVYVYYTNVAHDYWGQGTQVTVSS

SEQ ID NO: 10512 - protein, 126 aa, Artificial Sequence
  Chemically Synthesized
QVQLQESGGGLVQAGGSLRLSCAASGNISQDWYMGWYRQAPGKERELVAGISAGGSTNYADSVKGRFTISRDNAKNTVYLQMNSLKPEDTAVYYCAVTYYGYYDTDDTRLGDLSYWGQGTQVTVSS

SEQ ID NO: 10513 - protein, 126 aa, Artificial Sequence
  Chemically Synthesized
QVQLQESGGGLVQAGGSLRLSCAASGNIFYPYAMGWYRQAPGKEREFVASIDYGGSTNYADSVKGRFTISRDNAKNTVYLQMNSLKPEDTAVYYCAAWRVGYDLIDYAADIIHWYWGQGTQVTVSS

SEQ ID NO: 10514 - protein, 118 aa, Artificial Sequence
  Chemically Synthesized
QVQLQESGGGLVQAGGSLRLSCAASGSISDYDYMGWYRQAPGKEREFVAAISYGANTYYADSVKGRFTISRDNAKNTVYLQMNSLKPEDTAVYYCAAYRTGDNHYTYWGQGTQVTVSS

SEQ ID NO: 10515 - protein, 118 aa, Artificial Sequence
  Chemically Synthesized
QVQLQESGGGLVQAGGSLRLSCAASGYIFDIYVMGWYRQAPGKEREFVAAITRGTITNYADSVKGRFTISRDNAKNTVYLQMNSLKPEDTAVYYCAVYYWDGDVFDYWGQGTQVTVSS

SEQ ID NO: 10516 - protein, 115 aa, Artificial Sequence
  Chemically Synthesized
QVQLQESGGGLVQAGGSLRLSCAASGTIFGPVLMGWYRQAPGKERELVAGIGVGGTTNYADSVKGRFTISRDNAKNTVYLQMNSLKPEDTAVYYCAADDYYLHYWGQGTQVTVSS

SEQ ID NO: 10517 - protein, 118 aa, Artificial Sequence
  Chemically Synthesized
QVQLQESGGGLVQAGGSLRLSCAASGYISYVSAMGWYRQAPGKEREFVAAIGGGTSTNYADSVKGRFTISRDNAKNTVYLQMNSLKPEDTAVYYCAADRNSSTLFGYWGQGTQVTVSS

SEQ ID NO: 10518 - protein, 125 aa, Artificial Sequence
  Chemically Synthesized
QVQLQESGGGLVQAGGSLRLSCAASGYIFPIYYMGWYRQAPGKERELVASIAGGGNTNYADSVKGRFTISRDNAKNTVYLQMNSLKPEDTAVYYCAVYYSGDGPVGRYVYELQYWGQGTQVTVSS

SEQ ID NO: 10519 - protein, 118 aa, Artificial Sequence
  Chemically Synthesized
QVQLQESGGGLVQAGGSLRLSCAASGNISFYAGMGWYRQAPGKEREFVASIAAGTSTYYADSVKGRFTISRDNAKNTVYLQMNSLKPEDTAVYYCAVYVARVTEHNYWGQGTQVTVSS

SEQ ID NO: 10520 - protein, 118 aa, Artificial Sequence
  Chemically Synthesized
QVQLQESGGGLVQAGGSLRLSCAASGSISLPSIMGWYRQAPGKERELVAGIGWGGITYYADSVKGRFTISRDNAKNTVYLQMNSLKPEDTAVYYCAVYYPYTRSFDYWGQGTQVTVSS

SEQ ID NO: 10521 - protein, 122 aa, Artificial Sequence
  Chemically Synthesized
QVQLQESGGGLVQAGGSLRLSCAASGNISTDVLMGWYRQAPGKERELVASITDGGNTNYADSVKGRFTISRDNAKNTVYLQMNSLKPEDTAVYYCAANDTSYYVPDWTHIYWGQGTQVTVSS

SEQ ID NO: 10522 - protein, 125 aa, Artificial Sequence
  Chemically Synthesized
QVQLQESGGGLVQAGGSLRLSCAASGSISSSVMGWYRQAPGKERELVAAINYGGTTYYADSVKGRFTISRDNAKNTVYLQMNSLKPEDTAVYYCAVGDWSYDPDHLRDDSQHDYWGQGTQVTVSS

SEQ ID NO: 10523 - protein, 118 aa, Artificial Sequence
  Chemically Synthesized
QVQLQESGGGLVQAGGSLRLSCAASGNISWYDSMGWYRQAPGKERELVATIAYGASTNYADSVKGRFTISRDNAKNTVYLQMNSLKPEDTAVYYCAVYDWGDISHIYWGQGTQVTVSS

SEQ ID NO: 10524 - protein, 118 aa, Artificial Sequence
  Chemically Synthesized
QVQLQESGGGLVQAGGSLRLSCAASGNISTDTYMGWYRQAPGKERELVAAIGDGANTNYADSVKGRFTISRDNAKNTVYLQMNSLKPEDTAVYYCAADPVTNTGHSYWGQGTQVTVSS

SEQ ID NO: 10525 - protein, 118 aa, Artificial Sequence
  Chemically Synthesized
QVQLQESGGGLVQAGGSLRLSCAASGNIFTFSVMGWYRQAPGKERELVATIGYGSITYYADSVKGRFTISRDNAKNTVYLQMNSLKPEDTAVYYCAARGEDTSYHGYWGQGTQVTVSS

SEQ ID NO: 10526 - protein, 121 aa, Artificial Sequence
  Chemically Synthesized
QVQLQESGGGLVQAGGSLRLSCAASGSIFDYPYMGWYRQAPGKERELVASIGSGSTTYYADSVKGRFTISRDNAKNTVYLQMNSLKPEDTAVYYCAAPVDQESVLVFTMYWGQGTQVTVSS

SEQ ID NO: 10527 - protein, 118 aa, Artificial Sequence
  Chemically Synthesized
QVQLQESGGGLVQAGGSLRLSCAASGYISAGLYMGWYRQAPGKERELVASITDGTNTNYADSVKGRFTISRDNAKNTVYLQMNSLKPEDTAVYYCAVLVYQGAYYPYWGQGTQVTVSS

SEQ ID NO: 10528 - protein, 122 aa, Artificial Sequence
  Chemically Synthesized
QVQLQESGGGLVQAGGSLRLSCAASGNISDAWYMGWYRQAPGKERELVATIGSGGTTNYADSVKGRFTISRDNAKNTVYLQMNSLKPEDTAVYYCAVWRTGSPDPYHSHIYWGQGTQVTVSS

SEQ ID NO: 10529 - protein, 117 aa, Artificial Sequence
  Chemically Synthesized
QVQLQESGGGLVQAGGSLRLSCAASGTIFAVSMGWYRQAPGKEREFVATIAAGGTTNYADSVKGRFTISRDNAKNTVYLQMNSLKPEDTAVYYCAVGRGRALLHTYWGQGTQVTVSS

SEQ ID NO: 10530 - protein, 118 aa, Artificial Sequence
  Chemically Synthesized
QVQLQESGGGLVQAGGSLRLSCAASGYISDVRGMGWYRQAPGKERELVASIAVGATTYYADSVKGRFTISRDNAKNTVYLQMNSLKPEDTAVYYCAVWHQRLSDYWYWGQGTQVTVSS

SEQ ID NO: 10531 - protein, 118 aa, Artificial Sequence
  Chemically Synthesized
QVQLQESGGGLVQAGGSLRLSCAASGYIFTYYAMGWYRQAPGKERELVAGIGSGTTTNYADSVKGRFTISRDNAKNTVYLQMNSLKPEDTAVYYCAVVGGEIGNHLYWGQGTQVTVSS

SEQ ID NO: 10532 - protein, 117 aa, Artificial Sequence
  Chemically Synthesized
QVQLQESGGGLVQAGGSLRLSCAASGTISTLPLMGWYRQAPGKEREFVAGIDAGGTTYYADSVKGRFTISRDNAKNTVYLQMNSLKPEDTAVYYCAVVYAVLLGIYWGQGTQVTVSS

SEQ ID NO: 10533 - protein, 117 aa, Artificial Sequence
  Chemically Synthesized
QVQLQESGGGLVQAGGSLRLSCAASGYISRIWGMGWYRQAPGKERELVAGIAAGGITNYADSVKGRFTISRDNAKNTVYLQMNSLKPEDTAVYYCAVGNVLHSTFYWGQGTQVTVSS

SEQ ID NO: 10534 - protein, 118 aa, Artificial Sequence
  Chemically Synthesized
QVQLQESGGGLVQAGGSLRLSCAASGTISRVGLMGWYRQAPGKEREFVATIAHGSNTNYADSVKGRFTISRDNAKNTVYLQMNSLKPEDTAVYYCAAVRASYIFLTYWGQGTQVTVSS

SEQ ID NO: 10535 - protein, 118 aa, Artificial Sequence
  Chemically Synthesized
QVQLQESGGGLVQAGGSLRLSCAASGYISRFGIMGWYRQAPGKERELVAAIGSGGNTYYADSVKGRFTISRDNAKNTVYLQMNSLKPEDTAVYYCAAVVSRLLRHTYWGQGTQVTVSS

SEQ ID NO: 10536 - protein, 111 aa, Artificial Sequence
  Chemically Synthesized
QVQLQESGGGLVQAGGSLRLSCAASGNISVADSMGWYRQAPGKEREFVAAIATGTITNYADSVKGRFTISRDNAKNTVYLQMNSLKPEDTAVYYCAAGYYWGQGTQVTVSS

SEQ ID NO: 10537 - protein, 126 aa, Artificial Sequence
  Chemically Synthesized
QVQLQESGGGLVQAGGSLRLSCAASGYIFYWEDMGWYRQAPGKERELVATISYGGNTYYADSVKGRFTISRDNAKNTVYLQMNSLKPEDTAVYYCAVRGIPYRGWLGVRVWRYAYWGQGTQVTVSS

SEQ ID NO: 10538 - protein, 118 aa, Artificial Sequence
  Chemically Synthesized
QVQLQESGGGLVQAGGSLRLSCAASGTIFGTGVMGWYRQAPGKERELVASITTGGITNYADSVKGRFTISRDNAKNTVYLQMNSLKPEDTAVYYCAVYRLGPLGHVYWGQGTQVTVSS

SEQ ID NO: 10539 - protein, 118 aa, Artificial Sequence
  Chemically Synthesized
QVQLQESGGGLVQAGGSLRLSCAASGYIFGPYQMGWYRQAPGKERELVAAIATGTSTYYADSVKGRFTISRDNAKNTVYLQMNSLKPEDTAVYYCAADPFVRDAYTYWGQGTQVTVSS

SEQ ID NO: 10540 - protein, 118 aa, Artificial Sequence
  Chemically Synthesized
QVQLQESGGGLVQAGGSLRLSCAASGTIFDDIDMGWYRQAPGKERELVAAIDDGGTTYYADSVKGRFTISRDNAKNTVYLQMNSLKPEDTAVYYCAALDFDSTSHDYWGQGTQVTVSS

SEQ ID NO: 10541 - protein, 121 aa, Artificial Sequence
  Chemically Synthesized
QVQLQESGGGLVQAGGSLRLSCAASGTIFYPYVMGWYRQAPGKEREFVAGIAYGTSTNYADSVKGRFTISRDNAKNTVYLQMNSLKPEDTAVYYCAVIPDYDTVSSLVIYWGQGTQVTVSS

SEQ ID NO: 10542 - protein, 122 aa, Artificial Sequence
  Chemically Synthesized
QVQLQESGGGLVQAGGSLRLSCAASGSISFLGDMGWYRQAPGKERELVAAIGYGSSTNYADSVKGRFTISRDNAKNTVYLQMNSLKPEDTAVYYCAADLTTDQSYQQHHPYWGQGTQVTVSS

SEQ ID NO: 10543 - protein, 116 aa, Artificial Sequence
  Chemically Synthesized
QVQLQESGGGLVQAGGSLRLSCAASGNIFETEMGWYRQAPGKEREFVAGINYGTSTNYADSVKGRFTISRDNAKNTVYLQMNSLKPEDTAVYYCAVTYQSLTVIYWGQGTQVTVSS

SEQ ID NO: 10544 - protein, 127 aa, Artificial Sequence
  Chemically Synthesized
QVQLQESGGGLVQAGGSLRLSCAASGNIFAAGSMGWYRQAPGKEREFVAAINDGGNTYYADSVKGRFTISRDNAKNTVYLQMNSLKPEDTAVYYCAADAYPVHAFFIRGGPTGHIYWGQGTQVTVSS

SEQ ID NO: 10545 - protein, 118 aa, Artificial Sequence
  Chemically Synthesized
QVQLQESGGGLVQAGGSLRLSCAASGTISGYAIMGWYRQAPGKEREFVASIGLGTTTNYADSVKGRFTISRDNAKNTVYLQMNSLKPEDTAVYYCAAYYWIYRAFDYWGQGTQVTVSS

SEQ ID NO: 10546 - protein, 112 aa, Artificial Sequence
  Chemically Synthesized
QVQLQESGGGLVQAGGSLRLSCAASGTIFRASAMGWYRQAPGKEREFVATIAPGNQYADSVKGRFTISRDNAKNTVYLQMNSLKPEDTAVYYCAAQDLYTYWGQGTQVTVSS

SEQ ID NO: 10547 - protein, 118 aa, Artificial Sequence
  Chemically Synthesized
QVQLQESGGGLVQAGGSLRLSCAASGSIFDAYQMGWYRQAPGKERELVAGITVGSSTNYADSVKGRFTISRDNAKNTVYLQMNSLKPEDTAVYYCAATDATAHLLDYWGQGTQVTVSS

SEQ ID NO: 10548 - protein, 118 aa, Artificial Sequence
  Chemically Synthesized
QVQLQESGGGLVQAGGSLRLSCAASGTIFAFYIMGWYRQAPGKERELVAGIGAGSTTNYADSVKGRFTISRDNAKNTVYLQMNSLKPEDTAVYYCAAYTDIISYYLYWGQGTQVTVSS

SEQ ID NO: 10549 - protein, 122 aa, Artificial Sequence
  Chemically Synthesized
QVQLQESGGGLVQAGGSLRLSCAASGNIFAFTYMGWYRQAPGKEREFVAAIDGGGNTYYADSVKGRFTISRDNAKNTVYLQMNSLKPEDTAVYYCAVWRTYRGDRDGIYPYWGQGTQVTVSS

SEQ ID NO: 10550 - protein, 118 aa, Artificial Sequence
  Chemically Synthesized
QVQLQESGGGLVQAGGSLRLSCAASGNIFRPAIMGWYRQAPGKEREFVATISAGTSTNYADSVKGRFTISRDNAKNTVYLQMNSLKPEDTAVYYCAVQGGLTEGHDYWGQGTQVTVSS

SEQ ID NO: 10551 - protein, 122 aa, Artificial Sequence
  Chemically Synthesized
QVQLQESGGGLVQAGGSLRLSCAASGYIFGFRDMGWYRQAPGKERELVAGIAYGGTTNYADSVKGRFTISRDNAKNTVYLQMNSLKPEDTAVYYCAVDSYVYLWWSYYYDYWGQGTQVTVSS

SEQ ID NO: 10552 - protein, 122 aa, Artificial Sequence
  Chemically Synthesized
QVQLQESGGGLVQAGGSLRLSCAASGTISRDNLMGWYRQAPGKERELVATIGDGGNTYYADSVKGRFTISRDNAKNTVYLQMNSLKPEDTAVYYCAAIDAERSYTQYPHGYWGQGTQVTVSS

SEQ ID NO: 10553 - protein, 117 aa, Artificial Sequence
  Chemically Synthesized
QVQLQESGGGLVQAGGSLRLSCAASGTIFYPSMGWYRQAPGKEREFVAAIATGASTNYADSVKGRFTISRDNAKNTVYLQMNSLKPEDTAVYYCAVYADGGYRFQYWGQGTQVTVSS

SEQ ID NO: 10554 - protein, 118 aa, Artificial Sequence
  Chemically Synthesized
QVQLQESGGGLVQAGGSLRLSCAASGNISPVSVMGWYRQAPGKEREFVASITYGTNTNYADSVKGRFTISRDNAKNTVYLQMNSLKPEDTAVYYCAVPTWYWIELAYWGQGTQVTVSS

SEQ ID NO: 10555 - protein, 126 aa, Artificial Sequence
  Chemically Synthesized
QVQLQESGGGLVQAGGSLRLSCAASGYISAAYPMGWYRQAPGKERELVASISNGATTYYADSVKGRFTISRDNAKNTVYLQMNSLKPEDTAVYYCAAGLRWYLKRYAIGDYDFPYWGQGTQVTVSS

SEQ ID NO: 10556 - protein, 118 aa, Artificial Sequence
  Chemically Synthesized
QVQLQESGGGLVQAGGSLRLSCAASGSISRQQFMGWYRQAPGKERELVAGINSGTSTNYADSVKGRFTISRDNAKNTVYLQMNSLKPEDTAVYYCAATQVYRWNHFYWGQGTQVTVSS

SEQ ID NO: 10557 - protein, 118 aa, Artificial Sequence
  Chemically Synthesized
QVQLQESGGGLVQAGGSLRLSCAASGSIFAYTNMGWYRQAPGKERELVAAIDYGTTTNYADSVKGRFTISRDNAKNTVYLQMNSLKPEDTAVYYCAVYYLPQDSHQYWGQGTQVTVSS

SEQ ID NO: 10558 - protein, 119 aa, Artificial Sequence
  Chemically Synthesized
QVQLQESGGGLVQAGGSLRLSCAASGYISYLDSMGWYRQAPGKEREFVASISYGTNTNYADSVKGRFTISRDNAKNTVYLQMNSLKPEDTAVYYCAANDYRWDYPLYYWGQGTQVTVSS

SEQ ID NO: 10559 - protein, 118 aa, Artificial Sequence
  Chemically Synthesized
QVQLQESGGGLVQAGGSLRLSCAASGNISAYGQMGWYRQAPGKEREFVASIDAGGITNYADSVKGRFTISRDNAKNTVYLQMNSLKPEDTAVYYCAVPYPVRSSLDYWGQGTQVTVSS

SEQ ID NO: 10560 - protein, 117 aa, Artificial Sequence
  Chemically Synthesized
QVQLQESGGGLVQAGGSLRLSCAASGTISGGLIMGWYRQAPGKEREFVASINSVVIPYADSVKGRFTISRDNAKNTVYLQMNSLKPEDTAVYYCAVYYVITYRFYYWGQGTQVTVSS

SEQ ID NO: 10561 - protein, 118 aa, Artificial Sequence
  Chemically Synthesized
QVQLQESGGGLVQAGGSLRLSCAASGNISHYYAMGWYRQAPGKEREFVAAISNGTSTNYADSVKGRFTISRDNAKNTVYLQMNSLKPEDTAVYYCAVATVLYDAFRYWGQGTQVTVSS

SEQ ID NO: 10562 - protein, 118 aa, Artificial Sequence
  Chemically Synthesized
QVQLQESGGGLVQAGGSLRLSCAASGNIFAPRYMGWYRQAPGKEREFVATIADGAITNYADSVKGRFTISRDNAKNTVYLQMNSLKPEDTAVYYCAAIETNRDDFDYWGQGTQVTVSS

SEQ ID NO: 10563 - protein, 118 aa, Artificial Sequence
  Chemically Synthesized
QVQLQESGGGLVQAGGSLRLSCAASGYISAFWRMGWYRQAPGKEREFVAAIGTGSSTYYADSVKGRFTISRDNAKNTVYLQMNSLKPEDTAVYYCAARRPYYDTHRYWGQGTQVTVSS

SEQ ID NO: 10564 - protein, 113 aa, Artificial Sequence
  Chemically Synthesized
QVQLQESGGGLVQAGGSLRLSCAASGSISGPSTMGWYRQAPGKERELVATITGGSLPYADSVKGRFTISRDNAKNTVYLQMNSLKPEDTAVYYCAATSSDWYWGQGTQVTVSS

SEQ ID NO: 10565 - protein, 117 aa, Artificial Sequence
  Chemically Synthesized
QVQLQESGGGLVQAGGSLRLSCAASGTISQGTTMGWYRQAPGKEREFVAGIDDGASTYYADSVKGRFTISRDNAKNTVYLQMNSLKPEDTAVYYCAVRVYAPAYHYWGQGTQVTVSS

SEQ ID NO: 10566 - protein, 118 aa, Artificial Sequence
  Chemically Synthesized
QVQLQESGGGLVQAGGSLRLSCAASGYIFQGSGMGWYRQAPGKEREFVAGITYGTSTYYADSVKGRFTISRDNAKNTVYLQMNSLKPEDTAVYYCAVNYRDFTDFAYWGQGTQVTVSS

SEQ ID NO: 10567 - protein, 122 aa, Artificial Sequence
  Chemically Synthesized
QVQLQESGGGLVQAGGSLRLSCAASGNISTTDSMGWYRQAPGKEREFVAAIDQGTNTNYADSVKGRFTISRDNAKNTVYLQMNSLKPEDTAVYYCAVQPESPDIQTDAHTYWGQGTQVTVSS

SEQ ID NO: 10568 - protein, 119 aa, Artificial Sequence
  Chemically Synthesized
QVQLQESGGGLVQAGGSLRLSCAASGTIFWSPYMGWYRQAPGKERELVATISHGSITNYADSVKGRFTISRDNAKNTVYLQMNSLKPEDTAVYYCAVDTSQWHYGHKYWGQGTQVTVSS

SEQ ID NO: 10569 - protein, 122 aa, Artificial Sequence
  Chemically Synthesized
QVQLQESGGGLVQAGGSLRLSCAASGTIFLRRDMGWYRQAPGKEREFVAAIDAGGITNYADSVKGRFTISRDNAKNTVYLQMNSLKPEDTAVYYCAAGGGQVLNDVYAYSYWGQGTQVTVSS

SEQ ID NO: 10570 - protein, 126 aa, Artificial Sequence
  Chemically Synthesized
QVQLQESGGGLVQAGGSLRLSCAASGTIFTADRMGWYRQAPGKERELVASIARGSITNYADSVKGRFTISRDNAKNTVYLQMNSLKPEDTAVYYCAATPGVDQYPTNYDTNSYYYWGQGTQVTVSS

SEQ ID NO: 10571 - protein, 118 aa, Artificial Sequence
  Chemically Synthesized
QVQLQESGGGLVQAGGSLRLSCAASGSISVVDAMGWYRQAPGKERELVATIGAGGNTNYADSVKGRFTISRDNAKNTVYLQMNSLKPEDTAVYYCAAYIAHWDLHDYWGQGTQVTVSS

SEQ ID NO: 10572 - protein, 118 aa, Artificial Sequence
  Chemically Synthesized
QVQLQESGGGLVQAGGSLRLSCAASGSIFYRLYMGWYRQAPGKEREFVATISQGSNTNYADSVKGRFTISRDNAKNTVYLQMNSLKPEDTAVYYCAANAYDSADYTYWGQGTQVTVSS

SEQ ID NO: 10573 - protein, 117 aa, Artificial Sequence
  Chemically Synthesized
QVQLQESGGGLVQAGGSLRLSCAASGSISKDGYMGWYRQAPGKEREFVAAIARGTTNYADSVKGRFTISRDNAKNTVYLQMNSLKPEDTAVYYCAAFDSIGWSYYYWGQGTQVTVSS

SEQ ID NO: 10574 - protein, 118 aa, Artificial Sequence
  Chemically Synthesized
QVQLQESGGGLVQAGGSLRLSCAASGTISWLSDMGWYRQAPGKERELVASITKGATTYYADSVKGRFTISRDNAKNTVYLQMNSLKPEDTAVYYCAAYGSTFYFHYYWGQGTQVTVSS

SEQ ID NO: 10575 - protein, 117 aa, Artificial Sequence
  Chemically Synthesized
QVQLQESGGGLVQAGGSLRLSCAASGTIFDFATMGWYRQAPGKEREFVATINEGSSTYYADSVKGRFTISRDNAKNTVYLQMNSLKPEDTAVYYCAVTRYREVTMYWGQGTQVTVSS

SEQ ID NO: 10576 - protein, 117 aa, Artificial Sequence
  Chemically Synthesized
QVQLQESGGGLVQAGGSLRLSCAASGTIFQSWYMGWYRQAPGKERELVASIAGGGSTYYADSVKGRFTISRDNAKNTVYLQMNSLKPEDTAVYYCAAHATQDYSFYWGQGTQVTVSS

SEQ ID NO: 10577 - protein, 122 aa, Artificial Sequence
  Chemically Synthesized
QVQLQESGGGLVQAGGSLRLSCAASGSISYPGHMGWYRQAPGKERELVAAIGRGANTYYADSVKGRFTISRDNAKNTVYLQMNSLKPEDTAVYYCAVHGVYNVVYIGSHRYWGQGTQVTVSS

SEQ ID NO: 10578 - protein, 119 aa, Artificial Sequence
  Chemically Synthesized
QVQLQESGGGLVQAGGSLRLSCAASGNISDPFVMGWYRQAPGKEREFVATIDHGSSTNYADSVKGRFTISRDNAKNTVYLQMNSLKPEDTAVYYCAADIDTNTSYLVYWGQGTQVTVSS

SEQ ID NO: 10579 - protein, 121 aa, Artificial Sequence
  Chemically Synthesized
QVQLQESGGGLVQAGGSLRLSCAASGNISSDEYMGWYRQAPGKERELVATIAWGTSTNYADSVKGRFTISRDNAKNTVYLQMNSLKPEDTAVYYCAAYPGPYYYYGDLHYWGQGTQVTVSS

SEQ ID NO: 10580 - protein, 118 aa, Artificial Sequence
  Chemically Synthesized
QVQLQESGGGLVQAGGSLRLSCAASGTIFSSHYMGWYRQAPGKERELVAAIDGGSTTNYADSVKGRFTISRDNAKNTVYLQMNSLKPEDTAVYYCAVRLSYASGLNYWGQGTQVTVSS

SEQ ID NO: 10581 - protein, 118 aa, Artificial Sequence
  Chemically Synthesized
QVQLQESGGGLVQAGGSLRLSCAASGNIFHIYYMGWYRQAPGKERELVAGISQGAITNYADSVKGRFTISRDNAKNTVYLQMNSLKPEDTAVYYCAAQTTARIYLDYWGQGTQVTVSS

SEQ ID NO: 10582 - protein, 118 aa, Artificial Sequence
  Chemically Synthesized
QVQLQESGGGLVQAGGSLRLSCAASGNIFYSHSMGWYRQAPGKERELVAAISDGATTNYADSVKGRFTISRDNAKNTVYLQMNSLKPEDTAVYYCAAYWLTPYTYDYWGQGTQVTVSS

SEQ ID NO: 10583 - protein, 118 aa, Artificial Sequence
  Chemically Synthesized
QVQLQESGGGLVQAGGSLRLSCAASGTIFDYYVMGWYRQAPGKERELVASIGTGTSTNYADSVKGRFTISRDNAKNTVYLQMNSLKPEDTAVYYCAVTNLVGAEHDYWGQGTQVTVSS

SEQ ID NO: 10584 - protein, 123 aa, Artificial Sequence
  Chemically Synthesized
QVQLQESGGGLVQAGGSLRLSCAASGYIFDVYQMGWYRQAPGKEREFVASISDGANTNYADSVKGRFTISRDNAKNTVYLQMNSLKPEDTAVYYCAAYVWYPGSYAKVIYYYWGQGTQVTVSS

SEQ ID NO: 10585 - protein, 117 aa, Artificial Sequence
  Chemically Synthesized
QVQLQESGGGLVQAGGSLRLSCAASGTIFSRWYMGWYRQAPGKERELVASIDTVVLPYADSVKGRFTISRDNAKNTVYLQMNSLKPEDTAVYYCAVKYLDFRDLPYWGQGTQVTVSS

SEQ ID NO: 10586 - protein, 117 aa, Artificial Sequence
  Chemically Synthesized
QVQLQESGGGLVQAGGSLRLSCAASGTILTLTMGWYRQAPGKERELVAGIAQGTNTYYADSVKGRFTISRDNAKNTVYLQMNSLKPEDTAVYYCAVADVKGPQLWYWGQGTQVTVSS

SEQ ID NO: 10587 - protein, 126 aa, Artificial Sequence
  Chemically Synthesized
QVQLQESGGGLVQAGGSLRLSCAASGTIFDDGAMGWYRQAPGKERELVAGIDYGANTYYADSVKGRFTISRDNAKNTVYLQMNSLKPEDTAVYYCAVADGVWWYDLFAYDTWYYYWGQGTQVTVSS

SEQ ID NO: 10588 - protein, 118 aa, Artificial Sequence
  Chemically Synthesized
QVQLQESGGGLVQAGGSLRLSCAASGNIFEDGTMGWYRQAPGKEREFVAAIATGASTNYADSVKGRFTISRDNAKNTVYLQMNSLKPEDTAVYYCAAGDTYDGVHYYWGQGTQVTVSS

SEQ ID NO: 10589 - protein, 118 aa, Artificial Sequence
  Chemically Synthesized
QVQLQESGGGLVQAGGSLRLSCAASGNISDVYKMGWYRQAPGKEREFVAGIAAGANTYYADSVKGRFTISRDNAKNTVYLQMNSLKPEDTAVYYCAAYPSFNRYHVYWGQGTQVTVSS

SEQ ID NO: 10590 - protein, 126 aa, Artificial Sequence
  Chemically Synthesized
QVQLQESGGGLVQAGGSLRLSCAASGNISSVRVMGWYRQAPGKERELVASINGGGNTYYADSVKGRFTISRDNAKNTVYLQMNSLKPEDTAVYYCAAVYSALYTADQPTYGYHLYWGQGTQVTVSS

SEQ ID NO: 10591 - protein, 118 aa, Artificial Sequence
  Chemically Synthesized
QVQLQESGGGLVQAGGSLRLSCAASGTIFKDYLMGWYRQAPGKERELVAGIAYGGNTYYADSVKGRFTISRDNAKNTVYLQMNSLKPEDTAVYYCAATLGVTRSYLYWGQGTQVTVSS

SEQ ID NO: 10592 - protein, 118 aa, Artificial Sequence
  Chemically Synthesized
QVQLQESGGGLVQAGGSLRLSCAASGNISDDLNMGWYRQAPGKEREFVATISTGTITNYADSVKGRFTISRDNAKNTVYLQMNSLKPEDTAVYYCAALYIYIPWYFYWGQGTQVTVSS

SEQ ID NO: 10593 - protein, 126 aa, Artificial Sequence
  Chemically Synthesized
QVQLQESGGGLVQAGGSLRLSCAASGYISAINRMGWYRQAPGKERELVAAIAAGGITYYADSVKGRFTISRDNAKNTVYLQMNSLKPEDTAVYYCAAAVYTRGTDTKYTHRYHFYWGQGTQVTVSS

SEQ ID NO: 10594 - protein, 122 aa, Artificial Sequence
  Chemically Synthesized
QVQLQESGGGLVQAGGSLRLSCAASGSISKSTWMGWYRQAPGKERELVASIDIGGNTNYADSVKGRFTISRDNAKNTVYLQMNSLKPEDTAVYYCAANGYRADPYNYAYTYWGQGTQVTVSS

SEQ ID NO: 10595 - protein, 121 aa, Artificial Sequence
  Chemically Synthesized
QVQLQESGGGLVQAGGSLRLSCAASGNISWIEAMGWYRQAPGKERELVASINAGAITNYADSVKGRFTISRDNAKNTVYLQMNSLKPEDTAVYYCAAVATHPYTRGYLGYWGQGTQVTVSS

SEQ ID NO: 10596 - protein, 118 aa, Artificial Sequence
  Chemically Synthesized
QVQLQESGGGLVQAGGSLRLSCAASGNISVGYDMGWYRQAPGKERELVATIDYGTSTNYADSVKGRFTISRDNAKNTVYLQMNSLKPEDTAVYYCAAPSPELYYYRYWGQGTQVTVSS

SEQ ID NO: 10597 - protein, 121 aa, Artificial Sequence
  Chemically Synthesized
QVQLQESGGGLVQAGGSLRLSCAASGNIFASWTMGWYRQAPGKEREFVASIDLGTITNYADSVKGRFTISRDNAKNTVYLQMNSLKPEDTAVYYCAVLGPFDLDRVMVMYWGQGTQVTVSS

SEQ ID NO: 10598 - protein, 122 aa, Artificial Sequence
  Chemically Synthesized
QVQLQESGGGLVQAGGSLRLSCAASGNIFYLDLMGWYRQAPGKERELVAGIDYGSNTYYADSVKGRFTISRDNAKNTVYLQMNSLKPEDTAVYYCAVYPFHDHHRGRPHSYWGQGTQVTVSS

SEQ ID NO: 10599 - protein, 117 aa, Artificial Sequence
  Chemically Synthesized
QVQLQESGGGLVQAGGSLRLSCAASGYISYIGYMGWYRQAPGKEREFVATIGHGGSTYYADSVKGRFTISRDNAKNTVYLQMNSLKPEDTAVYYCAARLRGRGHRYWGQGTQVTVSS

SEQ ID NO: 10600 - protein, 118 aa, Artificial Sequence
  Chemically Synthesized
QVQLQESGGGLVQAGGSLRLSCAASGNISQIRAMGWYRQAPGKEREFVASIAYGGSTYYADSVKGRFTISRDNAKNTVYLQMNSLKPEDTAVYYCAALTFDAKWHAYWGQGTQVTVSS

SEQ ID NO: 10601 - protein, 118 aa, Artificial Sequence
  Chemically Synthesized
QVQLQESGGGLVQAGGSLRLSCAASGNIFDWNAMGWYRQAPGKEREFVAAINSGSTTNYADSVKGRFTISRDNAKNTVYLQMNSLKPEDTAVYYCAALLYNYRWYQYWGQGTQVTVSS

SEQ ID NO: 10602 - protein, 126 aa, Artificial Sequence
  Chemically Synthesized
QVQLQESGGGLVQAGGSLRLSCAASGSISQSGDMGWYRQAPGKEREFVAGIAVGANTNYADSVKGRFTISRDNAKNTVYLQMNSLKPEDTAVYYCAVVYYANNGPQRGRHRYHWYWGQGTQVTVSS

SEQ ID NO: 10603 - protein, 121 aa, Artificial Sequence
  Chemically Synthesized
QVQLQESGGGLVQAGGSLRLSCAASGNISYYDVMGWYRQAPGKEREFVATIAYGLLPYADSVKGRFTISRDNAKNTVYLQMNSLKPEDTAVYYCAAVISIAQYDYFYYDYWGQGTQVTVSS

SEQ ID NO: 10604 - protein, 121 aa, Artificial Sequence
  Chemically Synthesized
QVQLQESGGGLVQAGGSLRLSCAASGTISVDSGMGWYRQAPGKERELVASINYGSITYADSVKGRFTISRDNAKNTVYLQMNSLKPEDTAVYYCAVASGRDPDLTYPHKYWGQGTQVTVSS

SEQ ID NO: 10605 - protein, 126 aa, Artificial Sequence
  Chemically Synthesized
QVQLQESGGGLVQAGGSLRLSCAASGNIFHYTRMGWYRQAPGKEREFVAAIGYGSSTYYADSVKGRFTISRDNAKNTVYLQMNSLKPEDTAVYYCAVYRLYGQSTPYYRNVRLFYWGQGTQVTVSS

SEQ ID NO: 10606 - protein, 118 aa, Artificial Sequence
  Chemically Synthesized
QVQLQESGGGLVQAGGSLRLSCAASGTIFKIRRMGWYRQAPGKERELVAGIASGGNTYYADSVKGRFTISRDNAKNTVYLQMNSLKPEDTAVYYCAALTYDDQWLYYWGQGTQVTVSS

SEQ ID NO: 10607 - protein, 118 aa, Artificial Sequence
  Chemically Synthesized
QVQLQESGGGLVQAGGSLRLSCAASGNISYLHAMGWYRQAPGKEREFVAAIDQGAITNYADSVKGRFTISRDNAKNTVYLQMNSLKPEDTAVYYCAAVHYREGYHWYWGQGTQVTVSS

SEQ ID NO: 10608 - protein, 118 aa, Artificial Sequence
  Chemically Synthesized
QVQLQESGGGLVQAGGSLRLSCAASGNISAIYGMGWYRQAPGKEREFVAAINPGGITYYADSVKGRFTISRDNAKNTVYLQMNSLKPEDTAVYYCAAAYYVGLWYRYWGQGTQVTVSS

SEQ ID NO: 10609 - protein, 118 aa, Artificial Sequence
  Chemically Synthesized
QVQLQESGGGLVQAGGSLRLSCAASGSIFGPYVMGWYRQAPGKEREFVASITLGSNTNYADSVKGRFTISRDNAKNTVYLQMNSLKPEDTAVYYCAADGIYVEYYRYWGQGTQVTVSS

SEQ ID NO: 10610 - protein, 122 aa, Artificial Sequence
  Chemically Synthesized
QVQLQESGGGLVQAGGSLRLSCAASGSISAPYVMGWYRQAPGKEREFVATIGYGGNTNYADSVKGRFTISRDNAKNTVYLQMNSLKPEDTAVYYCAATRDVTYYWGYGYDYWGQGTQVTVSS

SEQ ID NO: 10611 - protein, 126 aa, Artificial Sequence
  Chemically Synthesized
QVQLQESGGGLVQAGGSLRLSCAASGTISRVTAMGWYRQAPGKEREFVAGINAGGITNYADSVKGRFTISRDNAKNTVYLQMNSLKPEDTAVYYCAAAVLAKTRDRELTGSYHGYWGQGTQVTVSS

SEQ ID NO: 10612 - protein, 122 aa, Artificial Sequence
  Chemically Synthesized
QVQLQESGGGLVQAGGSLRLSCAASGNISTLEYMGWYRQAPGKERELVAGIGIGSSTYYADSVKGRFTISRDNAKNTVYLQMNSLKPEDTAVYYCAASYYDQLRYLKAYLYWGQGTQVTVSS

SEQ ID NO: 10613 - protein, 114 aa, Artificial Sequence
  Chemically Synthesized
QVQLQESGGGLVQAGGSLRLSCAASGYISDSIIMGWYRQAPGKERELVAGIGGGSSTYYADSVKGRFTISRDNAKNTVYLQMNSLKPEDTAVYYCASGYVHRYWGQGTQVTVSS

SEQ ID NO: 10614 - protein, 113 aa, Artificial Sequence
  Chemically Synthesized
QVQLQESGGGLVQAGGSLRLSCAASGNISRYYIMGWYRQAPGKERELVAAITNGASTYYADSVKGRFTISRDNAKNTVYLQMNSLKPEDTAVYYCAAPYHDYWGQGTQVTVSS

SEQ ID NO: 10615 - protein, 112 aa, Artificial Sequence
  Chemically Synthesized
QVQLQESGGGLVQAGGSLRLSCAASGNIFAYKVMGWYRQAPGKERELVATIGQGAITYYADSVKGRFTISRDNAKNTVYLQMNSLKPEDTAVYYCAAAATYWGQGTQVTVSS

SEQ ID NO: 10616 - protein, 120 aa, Artificial Sequence
  Chemically Synthesized
QVQLQESGGGLVQAGGSLRLSCAASGTIFWYTAMGWYRQAPGKERELVAAIDDGLPYADSVKGRFTISRDNAKNTVYLQMNSLKPEDTAVYYCAATSYDADAYDYGHDYWGQGTQVTVSS

SEQ ID NO: 10617 - protein, 117 aa, Artificial Sequence
  Chemically Synthesized
QVQLQESGGGLVQAGGSLRLSCAASGTISYSDAMGWYRQAPGKERELVAGIDTGANTNYADSVKGRFTISRDNAKNTVYLQMNSLKPEDTAVYYCAVLAYSGRSFYWGQGTQVTVSS

SEQ ID NO: 10618 - protein, 122 aa, Artificial Sequence
  Chemically Synthesized
QVQLQESGGGLVQAGGSLRLSCAASGYISGKQYMGWYRQAPGKEREFVASIGDGTNTNYADSVKGRFTISRDNAKNTVYLQMNSLKPEDTAVYYCAAIYYISAGYANFHYYWGQGTQVTVSS

SEQ ID NO: 10619 - protein, 126 aa, Artificial Sequence
  Chemically Synthesized
QVQLQESGGGLVQAGGSLRLSCAASGYIFQRPTMGWYRQAPGKEREFVAAIGRGAITNYADSVKGRFTISRDNAKNTVYLQMNSLKPEDTAVYYCAARYPAAYSAYPRLYDDYAYWGQGTQVTVSS

SEQ ID NO: 10620 - protein, 122 aa, Artificial Sequence
  Chemically Synthesized
QVQLQESGGGLVQAGGSLRLSCAASGTISPGDPMGWYRQAPGKERELVAGITTGSSTNYADSVKGRFTISRDNAKNTVYLQMNSLKPEDTAVYYCAALVRPVYPNRRWHAYWGQGTQVTVSS

SEQ ID NO: 10621 - protein, 122 aa, Artificial Sequence
  Chemically Synthesized
QVQLQESGGGLVQAGGSLRLSCAASGTISFRWYMGWYRQAPGKEREFVASISQGGNTNYADSVKGRFTISRDNAKNTVYLQMNSLKPEDTAVYYCAAVFWTYDTIDRIHYYWGQGTQVTVSS

SEQ ID NO: 10622 - protein, 111 aa, Artificial Sequence
  Chemically Synthesized
QVQLQESGGGLVQAGGSLRLSCAASGNIFRRQDMGWYRQAPGKERELVAGINYGSNTYYADSVKGRFTISRDNAKNTVYLQMNSLKPEDTAVYYCAFLLYWGQGTQVTVSS

SEQ ID NO: 10623 - protein, 118 aa, Artificial Sequence
  Chemically Synthesized
QVQLQESGGGLVQAGGSLRLSCAASGSIFNDGDMGWYRQAPGKEREFVASINGGGSTNYADSVKGRFTISRDNAKNTVYLQMNSLKPEDTAVYYCAASLEEYQPFDYWGQGTQVTVSS

SEQ ID NO: 10624 - protein, 122 aa, Artificial Sequence
  Chemically Synthesized
QVQLQESGGGLVQAGGSLRLSCAASGTIFIDWSMGWYRQAPGKERELVATITDGGTTNYADSVKGRFTISRDNAKNTVYLQMNSLKPEDTAVYYCAVNNYIEPGYVAKLTYWGQGTQVTVSS

SEQ ID NO: 10625 - protein, 117 aa, Artificial Sequence
  Chemically Synthesized
QVQLQESGGGLVQAGGSLRLSCAASGTIFRYDIMGWYRQAPGKERELVAAISGGSTTYYADSVKGRFTISRDNAKNTVYLQMNSLKPEDTAVYYCAACTTTTFCIYWGQGTQVTVSS

SEQ ID NO: 10626 - protein, 126 aa, Artificial Sequence
  Chemically Synthesized
QVQLQESGGGLVQAGGSLRLSCAASGSISQSNQMGWYRQAPGKERELVATINPGAITNYADSVKGRFTISRDNAKNTVYLQMNSLKPEDTAVYYCAARAGGTRNHGSATRTVHRYWGQGTQVTVSS

SEQ ID NO: 10627 - protein, 126 aa, Artificial Sequence
  Chemically Synthesized
QVQLQESGGGLVQAGGSLRLSCAASGNISSFFYMGWYRQAPGKERELVAAIDLGTITYYADSVKGRFTISRDNAKNTVYLQMNSLKPEDTAVYYCAVGPTRNIPTYLPGLYRLGYWGQGTQVTVSS

SEQ ID NO: 10628 - protein, 125 aa, Artificial Sequence
  Chemically Synthesized
QVQLQESGGGLVQAGGSLRLSCAASGNIFTLGRMGWYRQAPGKEREFVAGIADGGTTYYADSVKGRFTISRDNAKNTVYLQMNSLKPEDTAVYYCAFLTLILCLLLTTVTGTIYWGQGTQVTVSS

SEQ ID NO: 10629 - protein, 121 aa, Artificial Sequence
  Chemically Synthesized
QVQLQESGGGLVQAGGSLRLSCAASGTIFDDKYMGWYRQAPGKEREFVAGITHGGTTYYADSVKGRFTISRDNAKNTVYLQMNSLKPEDTAVYYCAVNDVNHSLTVTSIYWGQGTQVTVSS

SEQ ID NO: 10630 - protein, 118 aa, Artificial Sequence
  Chemically Synthesized
QVQLQESGGGLVQAGGSLRLSCAASGTISDQLEMGWYRQAPGKERELVAGIAVGSNTYYADSVKGRFTISRDNAKNTVYLQMNSLKPEDTAVYYCAVGAKYVADLDYWGQGTQVTVSS

SEQ ID NO: 10631 - protein, 118 aa, Artificial Sequence
  Chemically Synthesized
QVQLQESGGGLVQAGGSLRLSCAASGNIFRARKMGWYRQAPGKEREFVATISKGGITYYADSVKGRFTISRDNAKNTVYLQMNSLKPEDTAVYYCAAYRIGYSPHAYWGQGTQVTVSS

SEQ ID NO: 10632 - protein, 122 aa, Artificial Sequence
  Chemically Synthesized
QVQLQESGGGLVQAGGSLRLSCAASGTIFDRYLMGWYRQAPGKEREFVASITTGGNTYYADSVKGRFTISRDNAKNTVYLQMNSLKPEDTAVYYCAAYTAYISFSGDAYRYWGQGTQVTVSS

SEQ ID NO: 10633 - protein, 118 aa, Artificial Sequence
  Chemically Synthesized
QVQLQESGGGLVQAGGSLRLSCAASGTISYIRYMGWYRQAPGKEREFVAAITGGTITNYADSVKGRFTISRDNAKNTVYLQMNSLKPEDTAVYYCAALDDLSYYHGYWGQGTQVTVSS

SEQ ID NO: 10634 - protein, 118 aa, Artificial Sequence
  Chemically Synthesized
QVQLQESGGGLVQAGGSLRLSCAASGYISSTDDMGWYRQAPGKEREFVAGIAIGTITNYADSVKGRFTISRDNAKNTVYLQMNSLKPEDTAVYYCAANGSTALGYTYWGQGTQVTVSS

SEQ ID NO: 10635 - protein, 122 aa, Artificial Sequence
  Chemically Synthesized
QVQLQESGGGLVQAGGSLRLSCAASGTISVDGYMGWYRQAPGKEREFVAAINNGASTNYADSVKGRFTISRDNAKNTVYLQMNSLKPEDTAVYYCAALFGYYGGRRVYYWYWGQGTQVTVSS

SEQ ID NO: 10636 - protein, 121 aa, Artificial Sequence
  Chemically Synthesized
QVQLQESGGGLVQAGGSLRLSCAASGSIFGRDMGWYRQAPGKERELVAAITEGATTNYADSVKGRFTISRDNAKNTVYLQMNSLKPEDTAVYYCAAQDRDDRSDIRDYNYWGQGTQVTVSS

SEQ ID NO: 10637 - protein, 118 aa, Artificial Sequence
  Chemically Synthesized
QVQLQESGGGLVQAGGSLRLSCAASGNIFQSLLMGWYRQAPGKEREFVAAIGYGSTTNYADSVKGRFTISRDNAKNTVYLQMNSLKPEDTAVYYCAALSWARTRYWYWGQGTQVTVSS

SEQ ID NO: 10638 - protein, 118 aa, Artificial Sequence
  Chemically Synthesized
QVQLQESGGGLVQAGGSLRLSCAASGTISSRVTMGWYRQAPGKEREFVAAINEGGTTNYADSVKGRFTISRDNAKNTVYLQMNSLKPEDTAVYYCAAVRLRPRVHGYWGQGTQVTVSS

SEQ ID NO: 10639 - protein, 118 aa, Artificial Sequence
  Chemically Synthesized
QVQLQESGGGLVQAGGSLRLSCAASGSIFDRGEMGWYRQAPGKERELVAAIANGTITYYADSVKGRFTISRDNAKNTVYLQMNSLKPEDTAVYYCAVHIYLDYLHEYWGQGTQVTVSS

SEQ ID NO: 10640 - protein, 122 aa, Artificial Sequence
  Chemically Synthesized
QVQLQESGGGLVQAGGSLRLSCAASGTISYYVDMGWYRQAPGKEREFVAGIAYGGNTNYADSVKGRFTISRDNAKNTVYLQMNSLKPEDTAVYYCAVPRYVLEAYTYTHWYWGQGTQVTVSS

SEQ ID NO: 10641 - protein, 118 aa, Artificial Sequence
  Chemically Synthesized
QVQLQESGGGLVQAGGSLRLSCAASGSIFSWPLMGWYRQAPGKERELVASIGTGATTNYADSVKGRFTISRDNAKNTVYLQMNSLKPEDTAVYYCAVLNYDAYWHYYWGQGTQVTVSS

SEQ ID NO: 10642 - protein, 118 aa, Artificial Sequence
  Chemically Synthesized
QVQLQESGGGLVQAGGSLRLSCAASGTISRATRMGWYRQAPGKEREFVAGITRGGNTNYADSVKGRFTISRDNAKNTVYLQMNSLKPEDTAVYYCAAKLYTIRGHPYWGQGTQVTVSS

SEQ ID NO: 10643 - protein, 121 aa, Artificial Sequence
  Chemically Synthesized
QVQLQESGGGLVQAGGSLRLSCAASGYISYLTTMGWYRQAPGKERELVATIGRGGTNYADSVKGRFTISRDNAKNTVYLQMNSLKPEDTAVYYCAAISDYDSKYRRYYYYWGQGTQVTVSS

SEQ ID NO: 10644 - protein, 118 aa, Artificial Sequence
  Chemically Synthesized
QVQLQESGGGLVQAGGSLRLSCAASGSISGPSTMGWYRQAPGKEREFVAGINVGTTTNYADSVKGRFTISRDNAKNTVYLQMNSLKPEDTAVYYCAALSWRGIYHPYWGQGTQVTVSS

SEQ ID NO: 10645 - protein, 114 aa, Artificial Sequence
  Chemically Synthesized
QVQLQESGGGLVQAGGSLRLSCAASGTIFQYGAMGWYRQAPGKERELVAAIGQGGITYYADSVKGRFTISRDNAKNTVYLQMNSLKPEDTAVYYCAAVDTHFYWGQGTQVTVSS

SEQ ID NO: 10646 - protein, 110 aa, Artificial Sequence
  Chemically Synthesized
QVQLQESGGGLVQAGGSLRLSCAASGNIFVDYAMGWYRQAPGKEREFVATINSGGITNYADSVKGRFTISRDNAKNTVYLQMNSLKPEDTAVYYCAALYWGQGTQVTVSS

SEQ ID NO: 10647 - protein, 124 aa, Artificial Sequence
  Chemically Synthesized
QVQLQESGGGLVQAGGSLRLSCAASGTIFDGAYMGWYRQAPGKERELVATIAKGGNTYYADSVKGRFTISRDNAKNTVYLQMNSLKPEDTAVYYCAVSYGPLYAPDRNTTVFYWGQGTQVTVSS

SEQ ID NO: 10648 - protein, 118 aa, Artificial Sequence
  Chemically Synthesized
QVQLQESGGGLVQAGGSLRLSCAASGTISNPYAMGWYRQAPGKERELVAAIGHGTSTYYADSVKGRFTISRDNAKNTVYLQMNSLKPEDTAVYYCAALYKGRQYHWYWGQGTQVTVSS

SEQ ID NO: 10649 - protein, 118 aa, Artificial Sequence
  Chemically Synthesized
QVQLQESGGGLVQAGGSLRLSCAASGTISDLRYMGWYRQAPGKEREFVAAITLGGTTNYADSVKGRFTISRDNAKNTVYLQMNSLKPEDTAVYYCAAVHRTYRVYYYWGQGTQVTVSS

SEQ ID NO: 10650 - protein, 109 aa, Artificial Sequence
  Chemically Synthesized
QVQLQESGGGLVQAGGSLRLSCAASGSISSVVMGWYRQAPGKERELVAGIAYGTNTNYADSVKGRFTISRDNAKNTVYLQMNSLKPEDTAVYYCAVLYWGQGTQVTVSS

SEQ ID NO: 10651 - protein, 118 aa, Artificial Sequence
  Chemically Synthesized
QVQLQESGGGLVQAGGSLRLSCAASGTIFRRDVMGWYRQAPGKERELVASIGYGGSTYYADSVKGRFTISRDNAKNTVYLQMNSLKPEDTAVYYCAAWRGFGRDFYYWGQGTQVTVSS

SEQ ID NO: 10652 - protein, 122 aa, Artificial Sequence
  Chemically Synthesized
QVQLQESGGGLVQAGGSLRLSCAASGTISDLIAMGWYRQAPGKEREFVASINRGSNTNYADSVKGRFTISRDNAKNTVYLQMNSLKPEDTAVYYCAAIFGADRIRTTIHYYWGQGTQVTVSS

SEQ ID NO: 10653 - protein, 122 aa, Artificial Sequence
  Chemically Synthesized
QVQLQESGGGLVQAGGSLRLSCAASGTISTYDRMGWYRQAPGKEREFVASIGFGATTYYADSVKGRFTISRDNAKNTVYLQMNSLKPEDTAVYYCAVTLPIRPFDPSYHPYWGQGTQVTVSS

SEQ ID NO: 10654 - protein, 122 aa, Artificial Sequence
  Chemically Synthesized
QVQLQESGGGLVQAGGSLRLSCAASGTIFDARAMGWYRQAPGKEREFVAGIDQGGNTNYADSVKGRFTISRDNAKNTVYLQMNSLKPEDTAVYYCAAIYLSTERTSAYFWYWGQGTQVTVSS

SEQ ID NO: 10655 - protein, 119 aa, Artificial Sequence
  Chemically Synthesized
QVQLQESGGGLVQAGGSLRLSCAASGNTGLMGWYRQAPGKEREFVASISYGTNTYYADSVKGRFTISRDNAKNTVYLQMNSLKPEDTAVYYCAADYKTPVDYWNGFSYWGQGTQVTVSS

SEQ ID NO: 10656 - protein, 118 aa, Artificial Sequence
  Chemically Synthesized
QVQLQESGGGLVQAGGSLRLSCAASGSISRLFPMGWYRQAPGKEREFVASISNGSNTNYADSVKGRFTISRDNAKNTVYLQMNSLKPEDTAVYYCAVVVYQDSWHNYWGQGTQVTVSS

SEQ ID NO: 10657 - protein, 118 aa, Artificial Sequence
  Chemically Synthesized
QVQLQESGGGLVQAGGSLRLSCAASGYISGFQGMGWYRQAPGKERELVATIGTGGNTYYADSVKGRFTISRDNAKNTVYLQMNSLKPEDTAVYYCAAYYEGSTGYDYWGQGTQVTVSS

SEQ ID NO: 10658 - protein, 114 aa, Artificial Sequence
  Chemically Synthesized
QVQLQESGGGLVQAGGSLRLSCAASGNDPPAMGWYRQAPGKEREFVATIDVGTSTYYADSVKGRFTISRDNAKNTVYLQMNSLKPEDTAVYYCAVDLPDQHGYWGQGTQVTVSS

SEQ ID NO: 10659 - protein, 121 aa, Artificial Sequence
  Chemically Synthesized
QVQLQESGGGLVQAGGSLRLSCAASGNIFVRPRMGWYRQAPGKEREFVASIGLGTTTNYADSVKGRFTISRDNAKNTVYLQMNSLKPEDTAVYYCAAWDAGFSTFTTTMYWGQGTQVTVSS

SEQ ID NO: 10660 - protein, 122 aa, Artificial Sequence
  Chemically Synthesized
QVQLQESGGGLVQAGGSLRLSCAASGNIFRATAMGWYRQAPGKEREFVATIGTGATTNYADSVKGRFTISRDNAKNTVYLQMNSLKPEDTAVYYCAALTVVAGYLGRYHYYWGQGTQVTVSS

SEQ ID NO: 10661 - protein, 118 aa, Artificial Sequence
  Chemically Synthesized
QVQLQESGGGLVQAGGSLRLSCAASGNIFLSAYMGWYRQAPGKEREFVATIAYGTSTYYADSVKGRFTISRDNAKNTVYLQMNSLKPEDTAVYYCAVDYTSFTYFPYWGQGTQVTVSS

SEQ ID NO: 10662 - protein, 126 aa, Artificial Sequence
  Chemically Synthesized
QVQLQESGGGLVQAGGSLRLSCAASGNIFAVSFMGWYRQAPGKEREFVATINYGGTTYYADSVKGRFTISRDNAKNTVYLQMNSLKPEDTAVYYCAVIKLVDTLTTSHRYAAYDYWGQGTQVTVSS

SEQ ID NO: 10663 - protein, 126 aa, Artificial Sequence
  Chemically Synthesized
QVQLQESGGGLVQAGGSLRLSCAASGYISYYSVMGWYRQAPGKEREFVAGIGSGTNTNYADSVKGRFTISRDNAKNTVYLQMNSLKPEDTAVYYCAVLDVYRDDYDDKGISRHYYWGQGTQVTVSS

SEQ ID NO: 10664 - protein, 122 aa, Artificial Sequence
  Chemically Synthesized
QVQLQESGGGLVQAGGSLRLSCAASGNIFAYYLMGWYRQAPGKERELVASIAPGGSTNYADSVKGRFTISRDNAKNTVYLQMNSLKPEDTAVYYCAAAWQYFTDTDYTLHYWGQGTQVTVSS

SEQ ID NO: 10665 - protein, 119 aa, Artificial Sequence
  Chemically Synthesized
QVQLQESGGGLVQAGGSLRLSCAASGTISYYTVMGWYRQAPGKEREFVAGIGGGTITYYADSVKGRFTISRDNAKNTVYLQMNSLKPEDTAVYYCAVDYASSGVRLGYWGQGTQVTVSS

SEQ ID NO: 10666 - protein, 122 aa, Artificial Sequence
  Chemically Synthesized
QVQLQESGGGLVQAGGSLRLSCAASGSISGDVVMGWYRQAPGKEREFVASIGGGSITYYADSVKGRFTISRDNAKNTVYLQMNSLKPEDTAVYYCAAYTYDFTDLTAYHVYWGQGTQVTVSS

SEQ ID NO: 10667 - protein, 112 aa, Artificial Sequence
  Chemically Synthesized
QVQLQESGGGLVQAGGSLRLSCAASGYIFPPQWMGWYRQAPGKERELVAAISYGTTTNYADSVKGRFTISRDNAKNTVYLQMNSLKPEDTAVYYCAVDFHYWGQGTQVTVSS

SEQ ID NO: 10668 - protein, 126 aa, Artificial Sequence
  Chemically Synthesized
QVQLQESGGGLVQAGGSLRLSCAASGTISYVNRMGWYRQAPGKEREFVASIGRGASTYYADSVKGRFTISRDNAKNTVYLQMNSLKPEDTAVYYCAAVATFEGGNRAGYSIWHYYWGQGTQVTVSS

SEQ ID NO: 10669 - protein, 118 aa, Artificial Sequence
  Chemically Synthesized
QVQLQESGGGLVQAGGSLRLSCAASGTISDANYMGWYRQAPGKEREFVAGIGYGATTNYADSVKGRFTISRDNAKNTVYLQMNSLKPEDTAVYYCAVDYLRGLDFAYWGQGTQVTVSS

SEQ ID NO: 10670 - protein, 117 aa, Artificial Sequence
  Chemically Synthesized
QVQLQESGGGLVQAGGSLRLSCAASGNIFSWLMGWYRQAPGKERELVAGITVGGNTNYADSVKGRFTISRDNAKNTVYLQMNSLKPEDTAVYYCAVYYYIVVQFAYWGQGTQVTVSS

SEQ ID NO: 10671 - protein, 103 aa, Artificial Sequence
  Chemically Synthesized
QVQLQESGGGLVQAGGSLRLSCAASGYIFSLFMGWYRQAPGKEREPYADSVKGRFTISRDNAKNTVYLQMNSLKPEDTAVYYCAASTWTLMYWGQGTQVTVSS

SEQ ID NO: 10672 - protein, 118 aa, Artificial Sequence
  Chemically Synthesized
QVQLQESGGGLVQAGGSLRLSCAASGTISYVWYMGWYRQAPGKEREFVASIAGGGTTNYADSVKGRFTISRDNAKNTVYLQMNSLKPEDTAVYYCAALGRRRGYFYYWGQGTQVTVSS

SEQ ID NO: 10673 - protein, 122 aa, Artificial Sequence
  Chemically Synthesized
QVQLQESGGGLVQAGGSLRLSCAASGTISYVSYMGWYRQAPGKEREFVAGIAAGGTTNYADSVKGRFTISRDNAKNTVYLQMNSLKPEDTAVYYCAVRGVQQDSFDIVHRYWGQGTQVTVSS

SEQ ID NO: 10674 - protein, 118 aa, Artificial Sequence
  Chemically Synthesized
QVQLQESGGGLVQAGGSLRLSCAASGTISKLYLMGWYRQAPGKERELVAAIGAGSITYYADSVKGRFTISRDNAKNTVYLQMNSLKPEDTAVYYCAVLHRVRADHTYWGQGTQVTVSS

SEQ ID NO: 10675 - protein, 122 aa, Artificial Sequence
  Chemically Synthesized
QVQLQESGGGLVQAGGSLRLSCAASGNIFGGAQMGWYRQAPGKEREFVASINTGSITYYADSVKGRFTISRDNAKNTVYLQMNSLKPEDTAVYYCAALQDYDKYRKERYYYWGQGTQVTVSS

SEQ ID NO: 10676 - protein, 126 aa, Artificial Sequence
  Chemically Synthesized
QVQLQESGGGLVQAGGSLRLSCAASGYIFDDYAMGWYRQAPGKERELVAAIGPGSITYYADSVKGRFTISRDNAKNTVYLQMNSLKPEDTAVYYCAVRGSVALYNATDYSADFYYWGQGTQVTVSS

SEQ ID NO: 10677 - protein, 118 aa, Artificial Sequence
  Chemically Synthesized
QVQLQESGGGLVQAGGSLRLSCAASGYISAYAFMGWYRQAPGKEREFVASISRGASTNYADSVKGRFTISRDNAKNTVYLQMNSLKPEDTAVYYCAVQSGLYVDYSYWGQGTQVTVSS

SEQ ID NO: 10678 - protein, 118 aa, Artificial Sequence
  Chemically Synthesized
QVQLQESGGGLVQAGGSLRLSCAASGTISVYPSMGWYRQAPGKEREFVASINDGTTTNYADSVKGRFTISRDNAKNTVYLQMNSLKPEDTAVYYCAVVYHDAQWYWYWGQGTQVTVSS

SEQ ID NO: 10679 - protein, 118 aa, Artificial Sequence
  Chemically Synthesized
QVQLQESGGGLVQAGGSLRLSCAASGNISPYTSMGWYRQAPGKEREFVAGIGQGSSTYYADSVKGRFTISRDNAKNTVYLQMNSLKPEDTAVYYCAAVGSRRPYHYYWGQGTQVTVSS

SEQ ID NO: 10680 - protein, 118 aa, Artificial Sequence
  Chemically Synthesized
QVQLQESGGGLVQAGGSLRLSCAASGNISTVYNMGWYRQAPGKEREFVAGINQGSSTYYADSVKGRFTISRDNAKNTVYLQMNSLKPEDTAVYYCAVVSRYRAAYYYWGQGTQVTVSS

SEQ ID NO: 10681 - protein, 122 aa, Artificial Sequence
  Chemically Synthesized
QVQLQESGGGLVQAGGSLRLSCAASGTIFELAGMGWYRQAPGKEREFVAGIAYGTITNYADSVKGRFTISRDNAKNTVYLQMNSLKPEDTAVYYCAVGLWNYYYNQVAHSYWGQGTQVTVSS

SEQ ID NO: 10682 - protein, 118 aa, Artificial Sequence
  Chemically Synthesized
QVQLQESGGGLVQAGGSLRLSCAASGNISAADDMGWYRQAPGKEREFVAAIAQGAITYYADSVKGRFTISRDNAKNTVYLQMNSLKPEDTAVYYCAAYRWDNLDHQYWGQGTQVTVSS

SEQ ID NO: 10683 - protein, 118 aa, Artificial Sequence
  Chemically Synthesized
QVQLQESGGGLVQAGGSLRLSCAASGNISSRYGMGWYRQAPGKERELVATIDDGCYYLYADSVKGRFTISRDNAKNTVYLQMNSLKPEDTAVYYCAVYPADQGGFHYWGQGTQVTVSS

SEQ ID NO: 10684 - protein, 118 aa, Artificial Sequence
  Chemically Synthesized
QVQLQESGGGLVQAGGSLRLSCAASGYIFEEDVMGWYRQAPGKEREFVAAIGQGGSTNYADSVKGRFTISRDNAKNTVYLQMNSLKPEDTAVYYCAAAYWDGAWFWYWGQGTQVTVSS

SEQ ID NO: 10685 - protein, 118 aa, Artificial Sequence
  Chemically Synthesized
QVQLQESGGGLVQAGGSLRLSCAASGTIFPHAGMGWYRQAPGKERELVASINYGSNTNYADSVKGRFTISRDNAKNTVYLQMNSLKPEDTAVYYCAAYADRRITLTYWGQGTQVTVSS

SEQ ID NO: 10686 - protein, 118 aa, Artificial Sequence
  Chemically Synthesized
QVQLQESGGGLVQAGGSLRLSCAASGYIFGAVRMGWYRQAPGKEREFVAGISRGANTNYADSVKGRFTISRDNAKNTVYLQMNSLKPEDTAVYYCAARYVSYSRFKYWGQGTQVTVSS

SEQ ID NO: 10687 - protein, 118 aa, Artificial Sequence
  Chemically Synthesized
QVQLQESGGGLVQAGGSLRLSCAASGNISIYGYMGWYRQAPGKERELVASILLGTITNYADSVKGRFTISRDNAKNTVYLQMNSLKPEDTAVYYCAVYSYDQTYFVYWGQGTQVTVSS

SEQ ID NO: 10688 - protein, 126 aa, Artificial Sequence
  Chemically Synthesized
QVQLQESGGGLVQAGGSLRLSCAASGYISRDYSMGWYRQAPGKEREFVATISLGTSTNYADSVKGRFTISRDNAKNTVYLQMNSLKPEDTAVYYCAAYQYLDADYTTYYYDTHTYWGQGTQVTVSS

SEQ ID NO: 10689 - protein, 125 aa, Artificial Sequence
  Chemically Synthesized
QVQLQESGGGLVQAGGSLRLSCAASGSISYAYRMGWYRQAPGKERELVATISDGSITYYADSVKGRFTISRDNAKNTVYLQMNSLKPEDTAVYYCAVYGREGTTSTVTSSVVMYWGQGTQVTVSS

SEQ ID NO: 10690 - protein, 127 aa, Artificial Sequence
  Chemically Synthesized
QVQLQESGGGLVQAGGSLRLSCAASGNISNRRWYMGWYRQAPGKEREFVAAISRGGNTNYADSVKGRFTISRDNAKNTVYLQMNSLKPEDTAVYYCAAYGGQDYGERYDNYNNFDYWGQGTQVTVSS

SEQ ID NO: 10691 - protein, 122 aa, Artificial Sequence
  Chemically Synthesized
QVQLQESGGGLVQAGGSLRLSCAASGYISDLPYMGWYRQAPGKEREFVAAISQGGTTNYADSVKGRFTISRDNAKNTVYLQMNSLKPEDTAVYYCAVYDRTATYPSYLLDYWGQGTQVTVSS

SEQ ID NO: 10692 - protein, 117 aa, Artificial Sequence
  Chemically Synthesized
QVQLQESGGGLVQAGGSLRLSCAASGTIFRSTYMGWYRQAPGKERELVAGIGTGGSTNYADSVKGRFTISRDNAKNTVYLQMNSLKPEDTAVYYCAVDRYYRSHRYWGQGTQVTVSS

SEQ ID NO: 10693 - protein, 118 aa, Artificial Sequence
  Chemically Synthesized
QVQLQESGGGLVQAGGSLRLSCAASGYISRASSMGWYRQAPGKEREFVAGISGGATTNYADSVKGRFTISRDNAKNTVYLQMNSLKPEDTAVYYCAVVISGAGFFYYWGQGTQVTVSS

SEQ ID NO: 10694 - protein, 121 aa, Artificial Sequence
  Chemically Synthesized
QVQLQESGGGLVQAGGSLRLSCAASGNISYLHHMGWYRQAPGKEREFVAYCLRWYYQYADSVKGRFTISRDNAKNTVYLQMNSLKPEDTAVYYCAVGGDDIVDGDADYAYWGQGTQVTVSS

SEQ ID NO: 10695 - protein, 121 aa, Artificial Sequence
  Chemically Synthesized
QVQLQESGGGLVQAGGSLRLSCAASGSISPGSGMGWYRQAPGKERELVATIGAGSNTNYADSVKGRFTISRDNAKNTVYLQMNSLKPEDTAVYYCAVTDLRAFELSTPCYWGQGTQVTVSS

SEQ ID NO: 10696 - protein, 125 aa, Artificial Sequence
  Chemically Synthesized
QVQLQESGGGLVQAGGSLRLSCAASGTISRVERMGWYRQAPGKERELVATIGAGTTTNYADSVKGRFTISRDNAKNTVYLQMNSLKPEDTAVYYCAAKPYWISYQDFFGGYLYYWGQGTQVTVSS

SEQ ID NO: 10697 - protein, 122 aa, Artificial Sequence
  Chemically Synthesized
QVQLQESGGGLVQAGGSLRLSCAASGNISQDGDMGWYRQAPGKERELVASIDPGGTTNYADSVKGRFTISRDNAKNTVYLQMNSLKPEDTAVYYCAVTYGTNNLWTVHLYYWGQGTQVTVSS

SEQ ID NO: 10698 - protein, 115 aa, Artificial Sequence
  Chemically Synthesized
QVQLQESGGGLVQAGGSLRLSCAASGYILLTVMGWYRQAPGKEREFVAAISDGAITNYADSVKGRFTISRDNAKNTVYLQMNSLKPEDTAVYYCAVPYQDWLPYWGQGTQVTVSS

SEQ ID NO: 10699 - protein, 118 aa, Artificial Sequence
  Chemically Synthesized
QVQLQESGGGLVQAGGSLRLSCAASGTIFSDYAMGWYRQAPGKEREFVAAISYGASTNYADSVKGRFTISRDNAKNTVYLQMNSLKPEDTAVYYCAAVWFTPKYHYYWGQGTQVTVSS

SEQ ID NO: 10700 - protein, 121 aa, Artificial Sequence
  Chemically Synthesized
QVQLQESGGGLVQAGGSLRLSCAASGTIFDIYYMGWYRQAPGKERELVATIDYGGITYYADSVKGRFTISRDNAKNTVYLQMNSLKPEDTAVYYCAAVDYIRPLLLRSYYWGQGTQVTVSS

SEQ ID NO: 10701 - protein, 118 aa, Artificial Sequence
  Chemically Synthesized
QVQLQESGGGLVQAGGSLRLSCAASGNISRRYGMGWYRQAPGKEREFVAAITIGGNTNYADSVKGRFTISRDNAKNTVYLQMNSLKPEDTAVYYCAVLTYGPGFHYYWGQGTQVTVSS

SEQ ID NO: 10702 - protein, 122 aa, Artificial Sequence
  Chemically Synthesized
QVQLQESGGGLVQAGGSLRLSCAASGSISRTDVMGWYRQAPGKERELVAGIGYGASTNYADSVKGRFTISRDNAKNTVYLQMNSLKPEDTAVYYCAVIHVYWAYYNDGLYYWGQGTQVTVSS

SEQ ID NO: 10703 - protein, 118 aa, Artificial Sequence
  Chemically Synthesized
QVQLQESGGGLVQAGGSLRLSCAASGTISDHHVMGWYRQAPGKEREFVAGIANGAITNYADSVKGRFTISRDNAKNTVYLQMNSLKPEDTAVYYCAALQAEKKYHYYWGQGTQVTVSS

SEQ ID NO: 10704 - protein, 126 aa, Artificial Sequence
  Chemically Synthesized
QVQLQESGGGLVQAGGSLRLSCAASGSISRDVTMGWYRQAPGKERELVATISLGATTNYADSVKGRFTISRDNAKNTVYLQMNSLKPEDTAVYYCAVLYPDYALYTYPVWGVHYYWGQGTQVTVSS

SEQ ID NO: 10705 - protein, 125 aa, Artificial Sequence
  Chemically Synthesized
QVQLQESGGGLVQAGGSLRLSCAASGNIFGSYKMGWYRQAPGKERELVATISSVVIPYADSVKGRFTISRDNAKNTVYLQMNSLKPEDTAVYYCAVVDDAYPYHQVDAAYVHYYWGQGTQVTVSS

SEQ ID NO: 10706 - protein, 125 aa, Artificial Sequence
  Chemically Synthesized
QVQLQESGGGLVQAGGSLRLSCAASGTISPDITMGWYRQAPGKEREFVATISAGGSTYYADSVKGRFTISRDNAKNTVYLQMNSLKPEDTAVYYCAADSSSVVLTVLTKTTTFYWGQGTQVTVSS

SEQ ID NO: 10707 - protein, 122 aa, Artificial Sequence
  Chemically Synthesized
QVQLQESGGGLVQAGGSLRLSCAASGNISQSDAMGWYRQAPGKEREFVAAISWGGTTNYADSVKGRFTISRDNAKNTVYLQMNSLKPEDTAVYYCAATVRSDGSGRTWHYYWGQGTQVTVSS

SEQ ID NO: 10708 - protein, 118 aa, Artificial Sequence
  Chemically Synthesized
QVQLQESGGGLVQAGGSLRLSCAASGTIFYDWAMGWYRQAPGKERELVAGIGTGSNTYYADSVKGRFTISRDNAKNTVYLQMNSLKPEDTAVYYCAVRYGAGSYLSYWGQGTQVTVSS

SEQ ID NO: 10709 - protein, 117 aa, Artificial Sequence
  Chemically Synthesized
QVQLQESGGGLVQAGGSLRLSCAASGTISRQGQMGWYRQAPGKEREFVATITLGASTYYADSVKGRFTISRDNAKNTVYLQMNSLKPEDTAVYYCAADDAEADSIYWGQGTQVTVSS

SEQ ID NO: 10710 - protein, 118 aa, Artificial Sequence
  Chemically Synthesized
QVQLQESGGGLVQAGGSLRLSCAASGYISKTYEMGWYRQAPGKERELVATIAPGGNTYYADSVKGRFTISRDNAKNTVYLQMNSLKPEDTAVYYCAAYQYDQLHHAYWGQGTQVTVSS

SEQ ID NO: 10711 - protein, 125 aa, Artificial Sequence
  Chemically Synthesized
QVQLQESGGGLVQAGGSLRLSCAASGNISRETQMGWYRQAPGKERELVASISYGAITNYADSVKGRFTISRDNAKNTVYLQMNSLKPEDTAVYYCAVDSRWDDTHRDNISKLIYWGQGTQVTVSS

SEQ ID NO: 10712 - protein, 118 aa, Artificial Sequence
  Chemically Synthesized
QVQLQESGGGLVQAGGSLRLSCAASGNISSNTAMGWYRQAPGKEREFVASIAEGGITNYADSVKGRFTISRDNAKNTVYLQMNSLKPEDTAVYYCAVLVRDRGYHSYWGQGTQVTVSS

SEQ ID NO: 10713 - protein, 118 aa, Artificial Sequence
  Chemically Synthesized
QVQLQESGGGLVQAGGSLRLSCAASGTISDYAWMGWYRQAPGKERELVAGISSGGSTYYADSVKGRFTISRDNAKNTVYLQMNSLKPEDTAVYYCAVYDYVATQHGYWGQGTQVTVSS

SEQ ID NO: 10714 - protein, 122 aa, Artificial Sequence
  Chemically Synthesized
QVQLQESGGGLVQAGGSLRLSCAASGYISLGSYMGWYRQAPGKERELVASIDQGSTTNYADSVKGRFTISRDNAKNTVYLQMNSLKPEDTAVYYCAADSSDHYYGDALLDYWGQGTQVTVSS

SEQ ID NO: 10715 - protein, 118 aa, Artificial Sequence
  Chemically Synthesized
QVQLQESGGGLVQAGGSLRLSCAASGTISDYYVMGWYRQAPGKEREFVASIGAGAITNYADSVKGRFTISRDNAKNTVYLQMNSLKPEDTAVYYCAVVYRRDRWLWYWGQGTQVTVSS

SEQ ID NO: 10716 - protein, 118 aa, Artificial Sequence
  Chemically Synthesized
QVQLQESGGGLVQAGGSLRLSCAASGNIFDWGDMGWYRQAPGKERELVAGITQGTNTNYADSVKGRFTISRDNAKNTVYLQMNSLKPEDTAVYYCAAYHSSGFPLFYWGQGTQVTVSS

SEQ ID NO: 10717 - protein, 118 aa, Artificial Sequence
  Chemically Synthesized
QVQLQESGGGLVQAGGSLRLSCAASGYIFRDLYMGWYRQAPGKEREFVATIGFGSSTNYADSVKGRFTISRDNAKNTVYLQMNSLKPEDTAVYYCAAVSYDKPPHGYWGQGTQVTVSS

SEQ ID NO: 10718 - protein, 121 aa, Artificial Sequence
  Chemically Synthesized
QVQLQESGGGLVQAGGSLRLSCAASGSILNVVMGWYRQAPGKEREFVAGIAPGGNTNYADSVKGRFTISRDNAKNTVYLQMNSLKPEDTAVYYCAVVDDYWSDYVHDLVYWGQGTQVTVSS

SEQ ID NO: 10719 - protein, 118 aa, Artificial Sequence
  Chemically Synthesized
QVQLQESGGGLVQAGGSLRLSCAASGYISPYTGMGWYRQAPGKERELVAGITYGGSTYYADSVKGRFTISRDNAKNTVYLQMNSLKPEDTAVYYCAAWYDTDRTYYYWGQGTQVTVSS

SEQ ID NO: 10720 - protein, 118 aa, Artificial Sequence
  Chemically Synthesized
QVQLQESGGGLVQAGGSLRLSCAASGTISANTTMGWYRQAPGKEREFVAAIAAGATTNYADSVKGRFTISRDNAKNTVYLQMNSLKPEDTAVYYCAAYWYEYRIHAYWGQGTQVTVSS

SEQ ID NO: 10721 - protein, 119 aa, Artificial Sequence
  Chemically Synthesized
QVQLQESGGGLVQAGGSLRLSCAASGNIFPRATYMGWYRQAPGKEREFVAGINWGGNTNYADSVKGRFTISRDNAKNTVYLQMNSLKPEDTAVYYCAVIGYAGGYYWYWGQGTQVTVSS

SEQ ID NO: 10722 - protein, 126 aa, Artificial Sequence
  Chemically Synthesized
QVQLQESGGGLVQAGGSLRLSCAASGSIFYSLLMGWYRQAPGKEREFVATINYGGNTNYADSVKGRFTISRDNAKNTVYLQMNSLKPEDTAVYYCAVDFGAKLNRDQYYYLLFQYWGQGTQVTVSS

SEQ ID NO: 10723 - protein, 122 aa, Artificial Sequence
  Chemically Synthesized
QVQLQESGGGLVQAGGSLRLSCAASGSISWRSIMGWYRQAPGKERELVATIDTGSTTNYADSVKGRFTISRDNAKNTVYLQMNSLKPEDTAVYYCAVSLLQNGIPLDDLSYWGQGTQVTVSS

SEQ ID NO: 10724 - protein, 118 aa, Artificial Sequence
  Chemically Synthesized
QVQLQESGGGLVQAGGSLRLSCAASGSISKDTIMGWYRQAPGKEREFVAGISDGANTNYADSVKGRFTISRDNAKNTVYLQMNSLKPEDTAVYYCAAVTFLSSYFWYWGQGTQVTVSS

SEQ ID NO: 10725 - protein, 122 aa, Artificial Sequence
  Chemically Synthesized
QVQLQESGGGLVQAGGSLRLSCAASGNISAGSYMGWYRQAPGKERELVAAIAGGSNTYYADSVKGRFTISRDNAKNTVYLQMNSLKPEDTAVYYCAVADTAPRSSNYVLGYWGQGTQVTVSS

SEQ ID NO: 10726 - protein, 126 aa, Artificial Sequence
  Chemically Synthesized
QVQLQESGGGLVQAGGSLRLSCAASGSISRHISMGWYRQAPGKERELVASIDFGGNTNYADSVKGRFTISRDNAKNTVYLQMNSLKPEDTAVYYCAALAQKVDHAGRESRGYLYYWGQGTQVTVSS

SEQ ID NO: 10727 - protein, 117 aa, Artificial Sequence
  Chemically Synthesized
QVQLQESGGGLVQAGGSLRLSCAASGYIFVTTMGWYRQAPGKEREFVASIGGGTNTNYADSVKGRFTISRDNAKNTVYLQMNSLKPEDTAVYYCAVYGPFADALYYWGQGTQVTVSS

SEQ ID NO: 10728 - protein, 122 aa, Artificial Sequence
  Chemically Synthesized
QVQLQESGGGLVQAGGSLRLSCAASGTIFEWYYMGWYRQAPGKERELVASINAGSSTYYADSVKGRFTISRDNAKNTVYLQMNSLKPEDTAVYYCAAYASHPIEIVSWHDYWGQGTQVTVSS

SEQ ID NO: 10729 - protein, 121 aa, Artificial Sequence
  Chemically Synthesized
QVQLQESGGGLVQAGGSLRLSCAASGSILTFGMGWYRQAPGKERELVATIGTGASTYYADSVKGRFTISRDNAKNTVYLQMNSLKPEDTAVYYCAVSQGQYAGWWAIFRYWGQGTQVTVSS

SEQ ID NO: 10730 - protein, 125 aa, Artificial Sequence
  Chemically Synthesized
QVQLQESGGGLVQAGGSLRLSCAASGSIFGALMGWYRQAPGKEREFVAAIGTGSNTNYADSVKGRFTISRDNAKNTVYLQMNSLKPEDTAVYYCAVGENAYGDRGRSYYDTYGYWGQGTQVTVSS

SEQ ID NO: 10731 - protein, 122 aa, Artificial Sequence
  Chemically Synthesized
QVQLQESGGGLVQAGGSLRLSCAASGNISADILMGWYRQAPGKERELVAAINKGTNTNYADSVKGRFTISRDNAKNTVYLQMNSLKPEDTAVYYCAVYRRYYWEYDQYHRYWGQGTQVTVSS

SEQ ID NO: 10732 - protein, 118 aa, Artificial Sequence
  Chemically Synthesized
QVQLQESGGGLVQAGGSLRLSCAASGTISYWYVMGWYRQAPGKERELVATITYGTITNYADSVKGRFTISRDNAKNTVYLQMNSLKPEDTAVYYCAVYYITDYALYYWGQGTQVTVSS

SEQ ID NO: 10733 - protein, 117 aa, Artificial Sequence
  Chemically Synthesized
QVQLQESGGGLVQAGGSLRLSCAASGYISARRMGWYRQAPGKEREFVASIGWGTSTNYADSVKGRFTISRDNAKNTVYLQMNSLKPEDTAVYYCAVDDDGDGQYYYWGQGTQVTVSS

SEQ ID NO: 10734 - protein, 126 aa, Artificial Sequence
  Chemically Synthesized
QVQLQESGGGLVQAGGSLRLSCAASGNISSYIFMGWYRQAPGKERELVAAINDGTNTYYADSVKGRFTISRDNAKNTVYLQMNSLKPEDTAVYYCAVTYTKDWYDQGNAGVTLTYWGQGTQVTVSS

SEQ ID NO: 10735 - protein, 113 aa, Artificial Sequence
  Chemically Synthesized
QVQLQESGGGLVQAGGSLRLSCAASGNIFNLLDMGWYRQAPGKERELVAGINIGSSTNYADSVKGRFTISRDNAKNTVYLQMNSLKPEDTAVYYCAVVFLIYWGQGTQVTVSS

SEQ ID NO: 10736 - protein, 122 aa, Artificial Sequence
  Chemically Synthesized
QVQLQESGGGLVQAGGSLRLSCAASGTISSILYMGWYRQAPGKEREFVAAITDGTTTNYADSVKGRFTISRDNAKNTVYLQMNSLKPEDTAVYYCAAISPVYTQQYEYHYYWGQGTQVTVSS

SEQ ID NO: 10737 - protein, 118 aa, Artificial Sequence
  Chemically Synthesized
QVQLQESGGGLVQAGGSLRLSCAASGYISYSYIMGWYRQAPGKEREFVASITSGGTTYYADSVKGRFTISRDNAKNTVYLQMNSLKPEDTAVYYCAVYDHEVWPFGYWGQGTQVTVSS

SEQ ID NO: 10738 - protein, 122 aa, Artificial Sequence
  Chemically Synthesized
QVQLQESGGGLVQAGGSLRLSCAASGSISDDKRMGWYRQAPGKERELVATIAPGTSTYYADSVKGRFTISRDNAKNTVYLQMNSLKPEDTAVYYCAAGQADGSRRDPSHPYWGQGTQVTVSS

SEQ ID NO: 10739 - protein, 121 aa, Artificial Sequence
  Chemically Synthesized
QVQLQESGGGLVQAGGSLRLSCAASGNISPRPFMGWYRQAPGKEREFVATIDSVVVPYADSVKGRFTISRDNAKNTVYLQMNSLKPEDTAVYYCAVNNDATGRWSDRYYYWGQGTQVTVSS

SEQ ID NO: 10740 - protein, 118 aa, Artificial Sequence
  Chemically Synthesized
QVQLQESGGGLVQAGGSLRLSCAASGTIFAQRYMGWYRQAPGKERELVASIGGGANTNYADSVKGRFTISRDNAKNTVYLQMNSLKPEDTAVYYCAVVIGGKFFLTYWGQGTQVTVSS

SEQ ID NO: 10741 - protein, 121 aa, Artificial Sequence
  Chemically Synthesized
QVQLQESGGGLVQAGGSLRLSCAASGNISYRDWMGWYRQAPGKERELVATIDWGSSTYYADSVKGRFTISRDNAKNTVYLQMNSLKPEDTAVYYCAVVLTSLVVLLKVIYWGQGTQVTVSS

SEQ ID NO: 10742 - protein, 118 aa, Artificial Sequence
  Chemically Synthesized
QVQLQESGGGLVQAGGSLRLSCAASGNISDQLSMGWYRQAPGKEREFVATISYGSTTYYADSVKGRFTISRDNAKNTVYLQMNSLKPEDTAVYYCAAHLFSAWHYWYWGQGTQVTVSS

SEQ ID NO: 10743 - protein, 118 aa, Artificial Sequence
  Chemically Synthesized
QVQLQESGGGLVQAGGSLRLSCAASGYIFYTSAMGWYRQAPGKEREFVAAIADGTSTYYADSVKGRFTISRDNAKNTVYLQMNSLKPEDTAVYYCAAYPQDLSWHYYWGQGTQVTVSS

SEQ ID NO: 10744 - protein, 118 aa, Artificial Sequence
  Chemically Synthesized
QVQLQESGGGLVQAGGSLRLSCAASGYISGVIYMGWYRQAPGKERELVASISDGGTTNYADSVKGRFTISRDNAKNTVYLQMNSLKPEDTAVYYCAVLIGYSGAHAYWGQGTQVTVSS

SEQ ID NO: 10745 - protein, 126 aa, Artificial Sequence
  Chemically Synthesized
QVQLQESGGGLVQAGGSLRLSCAASGNISSYEPMGWYRQAPGKERELVAAINLGTTTNYADSVKGRFTISRDNAKNTVYLQMNSLKPEDTAVYYCAAGDIEDHLLIQTGHIAHRYWGQGTQVTVSS

SEQ ID NO: 10746 - protein, 118 aa, Artificial Sequence
  Chemically Synthesized
QVQLQESGGGLVQAGGSLRLSCAASGTISPTSIMGWYRQAPGKEREFVASIGYGSNTYYADSVKGRFTISRDNAKNTVYLQMNSLKPEDTAVYYCAALLRDIYYYWYWGQGTQVTVSS

SEQ ID NO: 10747 - protein, 118 aa, Artificial Sequence
  Chemically Synthesized
QVQLQESGGGLVQAGGSLRLSCAASGTISTTTFMGWYRQAPGKERELVASISDGTITNYADSVKGRFTISRDNAKNTVYLQMNSLKPEDTAVYYCAVTSRTYGPYYYWGQGTQVTVSS

SEQ ID NO: 10748 - protein, 122 aa, Artificial Sequence
  Chemically Synthesized
QVQLQESGGGLVQAGGSLRLSCAASGSISPPLIMGWYRQAPGKEREFVAAISSGTNTYYADSVKGRFTISRDNAKNTVYLQMNSLKPEDTAVYYCAAYYLEDDYFARALDYWGQGTQVTVSS

SEQ ID NO: 10749 - protein, 118 aa, Artificial Sequence
  Chemically Synthesized
QVQLQESGGGLVQAGGSLRLSCAASGNISPPDAMGWYRQAPGKEREFVAAIGVGGNTNYADSVKGRFTISRDNAKNTVYLQMNSLKPEDTAVYYCAAVYWDHVYHGYWGQGTQVTVSS

SEQ ID NO: 10750 - protein, 117 aa, Artificial Sequence
  Chemically Synthesized
QVQLQESGGGLVQAGGSLRLSCAASGSIFSTTMGWYRQAPGKEREFVAAIDNGSITNYADSVKGRFTISRDNAKNTVYLQMNSLKPEDTAVYYCAAPFRGGHLFSYWGQGTQVTVSS

SEQ ID NO: 10751 - protein, 118 aa, Artificial Sequence
  Chemically Synthesized
QVQLQESGGGLVQAGGSLRLSCAASGYISSEDYMGWYRQAPGKEREFVATISYGGITNYADSVKGRFTISRDNAKNTVYLQMNSLKPEDTAVYYCAAYWQDNGLHAYWGQGTQVTVSS

SEQ ID NO: 10752 - protein, 125 aa, Artificial Sequence
  Chemically Synthesized
QVQLQESGGGLVQAGGSLRLSCAASGYISYNEVMGWYRQAPGKEREFVASIAPGATTNYADSVKGRFTISRDNAKNTVYLQMNSLKPEDTAVYYCAVGGTYFADVWAYDWYSFYWGQGTQVTVSS

SEQ ID NO: 10753 - protein, 118 aa, Artificial Sequence
  Chemically Synthesized
QVQLQESGGGLVQAGGSLRLSCAASGYIFIRDSMGWYRQAPGKERELVAGISYGATTNYADSVKGRFTISRDNAKNTVYLQMNSLKPEDTAVYYCAVGYGYSGTYAYWGQGTQVTVSS

SEQ ID NO: 10754 - protein, 118 aa, Artificial Sequence
  Chemically Synthesized
QVQLQESGGGLVQAGGSLRLSCAASGTIFTLLDMGWYRQAPGKEREFVTTIDYGTITYYADSVKGRFTISRDNAKNTVYLQMNSLKPEDTAVYYCAVDPWAGGIHAYWGQGTQVTVSS

SEQ ID NO: 10755 - protein, 122 aa, Artificial Sequence
  Chemically Synthesized
QVQLQESGGGLVQAGGSLRLSCAASGTIFDAKYMGWYRQAPGKEREFVATINEGSTTNYADSVKGRFTISRDNAKNTVYLQMNSLKPEDTAVYYCAVLYIYGRTARVWHSYWGQGTQVTVSS

SEQ ID NO: 10756 - protein, 118 aa, Artificial Sequence
  Chemically Synthesized
QVQLQESGGGLVQAGGSLRLSCAASGTIFGRVYMGWYRQAPGKEREFVASIDYGANTNYADSVKGRFTISRDNAKNTVYLQMNSLKPEDTAVYYCAAVSGNSYAHYYWGQGTQVTVSS

SEQ ID NO: 10757 - protein, 121 aa, Artificial Sequence
  Chemically Synthesized
QVQLQESGGGLVQAGGSLRLSCAASGTISHKAYMGWYRQAPGKEREFVAAINFGTSTYYADSVKGRFTISRDNAKNTVYLQMNSLKPEDTAVYYCAVGQATVNYSWLSFYWGQGTQVTVSS

SEQ ID NO: 10758 - protein, 118 aa, Artificial Sequence
  Chemically Synthesized
QVQLQESGGGLVQAGGSLRLSCAASGNIFTRRAMGWYRQAPGKEREFVATISWGTNTYYADSVKGRFTISRDNAKNTVYLQMNSLKPEDTAVYYCAVNSQYFPFHGYWGQGTQVTVSS

SEQ ID NO: 10759 - protein, 118 aa, Artificial Sequence
  Chemically Synthesized
QVQLQESGGGLVQAGGSLRLSCAASGNIFPWGAMGWYRQAPGKERELVATIDSGATTNYADSVKGRFTISRDNAKNTVYLQMNSLKPEDTAVYYCAAGGPSARDFHYWGQGTQVTVSS

SEQ ID NO: 10760 - protein, 118 aa, Artificial Sequence
  Chemically Synthesized
QVQLQESGGGLVQAGGSLRLSCAASGYIFDYYAMGWYRQAPGKEREFVASISAGTTTNYADSVKGRFTISRDNAKNTVYLQMNSLKPEDTAVYYCAAILYIRGYHGYWGQGTQVTVSS

SEQ ID NO: 10761 - protein, 118 aa, Artificial Sequence
  Chemically Synthesized
QVQLQESGGGLVQAGGSLRLSCAASGNISIADGMGWYRQAPGKERELVAAIDYGGTTYYADSVKGRFTISRDNAKNTVYLQMNSLKPEDTAVYYCAVDYGYKTPHGYWGQGTQVTVSS

SEQ ID NO: 10762 - protein, 118 aa, Artificial Sequence
  Chemically Synthesized
QVQLQESGGGLVQAGGSLRLSCAASGNISNQWTMGWYRQAPGKEREFVAGITAGTSTNYADSVKGRFTISRDNAKNTVYLQMNSLKPEDTAVYYCAVHGADVDGYNYWGQGTQVTVSS

SEQ ID NO: 10763 - protein, 118 aa, Artificial Sequence
  Chemically Synthesized
QVQLQESGGGLVQAGGSLRLSCAASGSIFGYTVMGWYRQAPGKERELVATISGGSTTYYADSVKGRFTISRDNAKNTVYLQMNSLKPEDTAVYYCAALTTDIALLLYWGQGTQVTVSS

SEQ ID NO: 10764 - protein, 118 aa, Artificial Sequence
  Chemically Synthesized
QVQLQESGGGLVQAGGSLRLSCAASGSIFGDDNMGWYRQAPGKERELVAAITRGAITNYADSVKGRFTISRDNAKNTVYLQMNSLKPEDTAVYYCAVGYRAYFYHAYWGQGTQVTVSS

SEQ ID NO: 10765 - protein, 122 aa, Artificial Sequence
  Chemically Synthesized
QVQLQESGGGLVQAGGSLRLSCAASGSISLGTTMGWYRQAPGKERELVATIALGANTNYADSVKGRFTISRDNAKNTVYLQMNSLKPEDTAVYYCAADYGNGWDPPRKYSYWGQGTQVTVSS

SEQ ID NO: 10766 - protein, 116 aa, Artificial Sequence
  Chemically Synthesized
QVQLQESGGGLVQAGGSLRLSCAASGNISDDDAMGWYRQAPGKEREFVAGIAGGYQYADSVKGRFTISRDNAKNTVYLQMNSLKPEDTAVYYCAVGFHGSSGYYYWGQGTQVTVSS

SEQ ID NO: 10767 - protein, 122 aa, Artificial Sequence
  Chemically Synthesized
QVQLQESGGGLVQAGGSLRLSCAASGYIFSNDVMGWYRQAPGKEREFVATIGAGSNTNYADSVKGRFTISRDNAKNTVYLQMNSLKPEDTAVYYCAAWPVLGDYLVLTYGYWGQGTQVTVSS

SEQ ID NO: 10768 - protein, 123 aa, Artificial Sequence
  Chemically Synthesized
QVQLQESGGGLVQAGGSLRLSCAASGNIFVGPRMGWYRQAPGKERELVATIGPGSNTNYADSVKGRFTISRDNAKNTVYLQMNSLKPEDTAVYYCAVDSRGRAYNTSEWYYYWGQGTQVTVSS

SEQ ID NO: 10769 - protein, 126 aa, Artificial Sequence
  Chemically Synthesized
QVQLQESGGGLVQAGGSLRLSCAASGNIFYAYIMGWYRQAPGKERELVASIGLGGNTYYADSVKGRFTISRDNAKNTVYLQMNSLKPEDTAVYYCAAQQSHPGSYYDQYNVGFYYWGQGTQVTVSS

SEQ ID NO: 10770 - protein, 126 aa, Artificial Sequence
  Chemically Synthesized
QVQLQESGGGLVQAGGSLRLSCAASGSISLYVNMGWYRQAPGKERELVASIGNGSITYYADSVKGRFTISRDNAKNTVYLQMNSLKPEDTAVYYCAAGTWADEARTLRWDILYAYWGQGTQVTVSS

SEQ ID NO: 10771 - protein, 122 aa, Artificial Sequence
  Chemically Synthesized
QVQLQESGGGLVQAGGSLRLSCAASGYISFDYMGWYRQAPGKERELVAGIAQGGSTNYADSVKGRFTISRDNAKNTVYLQMNSLKPEDTAVYYCAVDRDTTYSYVSDLHDYWGQGTQVTVSS

SEQ ID NO: 10772 - protein, 117 aa, Artificial Sequence
  Chemically Synthesized
QVQLQESGGGLVQAGGSLRLSCAASGNISEYTMGWYRQAPGKEREFVAGINHGTNTNYADSVKGRFTISRDNAKNTVYLQMNSLKPEDTAVYYCAAYDTITPYHDYWGQGTQVTVSS

SEQ ID NO: 10773 - protein, 120 aa, Artificial Sequence
  Chemically Synthesized
QVQLQESGGGLVQAGGSLRLSCAASGNIFRRVTMGWYRQAPGKERELVAAISDGAITNYADSVKGRFTISRDNAKNTVYLQMNSLKPEDTAVYYCAVYYLISWYQYFDYWGQGTQVTVSS

SEQ ID NO: 10774 - protein, 118 aa, Artificial Sequence
  Chemically Synthesized
QVQLQESGGGLVQAGGSLRLSCAASGSIFSPGNMGWYRQAPGKEREFVAAIGYGTTTYYADSVKGRFTISRDNAKNTVYLQMNSLKPEDTAVYYCAVTYAGVYSFRYWGQGTQVTVSS

SEQ ID NO: 10775 - protein, 114 aa, Artificial Sequence
  Chemically Synthesized
QVQLQESGGGLVQAGGSLRLSCAASGNIFGLRRMGWYRQAPGKERELVASISYGTTTNYADSVKGRFTISRDNAKNTVYLQMNSLKPEDTAVYYCAVPRFYRYWGQGTQVTVSS

SEQ ID NO: 10776 - protein, 118 aa, Artificial Sequence
  Chemically Synthesized
QVQLQESGGGLVQAGGSLRLSCAASGYIFGDRYMGWYRQAPGKERELVAAIDSGGSTNYADSVKGRFTISRDNAKNTVYLQMNSLKPEDTAVYYCAAYRQFSKLLYYWGQGTQVTVSS

SEQ ID NO: 10777 - protein, 126 aa, Artificial Sequence
  Chemically Synthesized
QVQLQESGGGLVQAGGSLRLSCAASGTIFGSDAMGWYRQAPGKERELVAAIDAGGNTYYADSVKGRFTISRDNAKNTVYLQMNSLKPEDTAVYYCAAYQTYQRLPRVYDGAYHNYWGQGTQVTVSS

SEQ ID NO: 10778 - protein, 118 aa, Artificial Sequence
  Chemically Synthesized
QVQLQESGGGLVQAGGSLRLSCAASGYISTRRVMGWYRQAPGKERELVASIDYGGNTYYADSVKGRFTISRDNAKNTVYLQMNSLKPEDTAVYYCAVRYVVRSYHYYWGQGTQVTVSS

SEQ ID NO: 10779 - protein, 118 aa, Artificial Sequence
  Chemically Synthesized
QVQLQESGGGLVQAGGSLRLSCAASGSISRRYGMGWYRQAPGKEREFVAAIGLGSSTNYADSVKGRFTISRDNAKNTVYLQMNSLKPEDTAVYYCAAIRTDTYEYHYWGQGTQVTVSS

SEQ ID NO: 10780 - protein, 121 aa, Artificial Sequence
  Chemically Synthesized
QVQLQESGGGLVQAGGSLRLSCAASGSISEYRPMGWYRQAPGKEREFVASINYGGSTNYADSVKGRFTISRDNAKNTVYLQMNSLKPEDTAVYYCAAGENAGVNVLRRYYWGQGTQVTVSS

SEQ ID NO: 10781 - protein, 118 aa, Artificial Sequence
  Chemically Synthesized
QVQLQESGGGLVQAGGSLRLSCAASGNIFRFPYMGWYRQAPGKEREFVATIGYGGSTNYADSVKGRFTISRDNAKNTVYLQMNSLKPEDTAVYYCAAQNYYRHPFGYWGQGTQVTVSS

SEQ ID NO: 10782 - protein, 119 aa, Artificial Sequence
  Chemically Synthesized
QVQLQESGGGLVQAGGSLRLSCAASGTISLRVVMGWYRQAPGKEREFVAGIDYGTSTYYADSVKGRFTISRDNAKNTVYLQMNSLKPEDTAVYYCAVVYQDRRVTHDYWGQGTQVTVSS

SEQ ID NO: 10783 - protein, 126 aa, Artificial Sequence
  Chemically Synthesized
QVQLQESGGGLVQAGGSLRLSCAASGYIFLIDYMGWYRQAPGKERELVATIDRGTITYYADSVKGRFTISRDNAKNTVYLQMNSLKPEDTAVYYCAANYGVYPYYYWFRRAVHAYWGQGTQVTVSS

SEQ ID NO: 10784 - protein, 122 aa, Artificial Sequence
  Chemically Synthesized
QVQLQESGGGLVQAGGSLRLSCAASGTISRAAPMGWYRQAPGKERELVASIARGANTYYADSVKGRFTISRDNAKNTVYLQMNSLKPEDTAVYYCAVYYYDYYDGPHWHTYWGQGTQVTVSS

SEQ ID NO: 10785 - protein, 118 aa, Artificial Sequence
  Chemically Synthesized
QVQLQESGGGLVQAGGSLRLSCAASGNISGLDYMGWYRQAPGKEREFVASIADGTSTYYADSVKGRFTISRDNAKNTVYLQMNSLKPEDTAVYYCAVDYDVVRNLRYWGQGTQVTVSS

SEQ ID NO: 10786 - protein, 110 aa, Artificial Sequence
  Chemically Synthesized
QVQLQESGGGLVQAGGSLRLSCAASGNIFSFDDMGWYRQAPGKERELVAAIDDGTSPYADSVKGRFTISRDNAKNTVYLQMNSLKPEDTAVYYCAVTVYWGQGTQVTVSS

SEQ ID NO: 10787 - protein, 125 aa, Artificial Sequence
  Chemically Synthesized
QVQLQESGGGLVQAGGSLRLSCAASGYISQQIYMGWYRQAPGKEREFVATIDNGTNTNYADSVKGRFTISRDNAKNTVYLQMNSLKPEDTAVYYCAASSDRKLGTYPYGTVHAYWGQGTQVTVSS

SEQ ID NO: 10788 - protein, 118 aa, Artificial Sequence
  Chemically Synthesized
QVQLQESGGGLVQAGGSLRLSCAASGTIFPLDNMGWYRQAPGKERELVAGISYGTNTNYADSVKGRFTISRDNAKNTVYLQMNSLKPEDTAVYYCAVRDGHSRYFAYWGQGTQVTVSS

SEQ ID NO: 10789 - protein, 117 aa, Artificial Sequence
  Chemically Synthesized
QVQLQESGGGLVQAGGSLRLSCAASGTIFIDSMGWYRQAPGKEREFVAAIDYGAITNYADSVKGRFTISRDNAKNTVYLQMNSLKPEDTAVYYCAVDSYIANGLGYWGQGTQVTVSS

SEQ ID NO: 10790 - protein, 122 aa, Artificial Sequence
  Chemically Synthesized
QVQLQESGGGLVQAGGSLRLSCAASGTISNLAYMGWYRQAPGKERELVATITGGTITNYADSVKGRFTISRDNAKNTVYLQMNSLKPEDTAVYYCAVGPYLYAADASGFGYWGQGTQVTVSS

SEQ ID NO: 10791 - protein, 126 aa, Artificial Sequence
  Chemically Synthesized
QVQLQESGGGLVQAGGSLRLSCAASGSIFRDGVMGWYRQAPGKEREFVATISYGTTTNYADSVKGRFTISRDNAKNTVYLQMNSLKPEDTAVYYCAVITYDYDDYDLPDRLRLLYWGQGTQVTVSS

SEQ ID NO: 10792 - protein, 122 aa, Artificial Sequence
  Chemically Synthesized
QVQLQESGGGLVQAGGSLRLSCAASGNISLRDAMGWYRQAPGKERELVATIGYGGSTYYADSVKGRFTISRDNAKNTVYLQMNSLKPEDTAVYYCAVGQYATAYTAVEYFYWGQGTQVTVSS

SEQ ID NO: 10793 - protein, 120 aa, Artificial Sequence
  Chemically Synthesized
QVQLQESGGGLVQAGGSLRLSCAASGYISRVSAMGWYRQAPGKERELPVLVRVVLPYADSVKGRFTISRDNAKNTVYLQMNSLKPEDTAVYYCAAQRDNWDGYGTYLGYWGQGTQVTVSS

SEQ ID NO: 10794 - protein, 118 aa, Artificial Sequence
  Chemically Synthesized
QVQLQESGGGLVQAGGSLRLSCAASGNIFRYDIMGWYRQAPGKERELVAAIGDGTNTNYADSVKGRFTISRDNAKNTVYLQMNSLKPEDTAVYYCAVDSQSDRYHYYWGQGTQVTVSS

SEQ ID NO: 10795 - protein, 121 aa, Artificial Sequence
  Chemically Synthesized
QVQLQESGGGLVQAGGSLRLSCAASGNIFRAAAMGWYRQAPGKEREFVATIAGGTTTNYADSVKGRFTISRDNAKNTVYLQMNSLKPEDTAVYYCAAVPRHYYVISEWLYWGQGTQVTVSS

SEQ ID NO: 10796 - protein, 122 aa, Artificial Sequence
  Chemically Synthesized
QVQLQESGGGLVQAGGSLRLSCAASGTISSHHRMGWYRQAPGKEREFVAGINAGASTYYADSVKGRFTISRDNAKNTVYLQMNSLKPEDTAVYYCAVLYYVDGYRTTSLTYWGQGTQVTVSS

SEQ ID NO: 10797 - protein, 118 aa, Artificial Sequence
  Chemically Synthesized
QVQLQESGGGLVQAGGSLRLSCAASGNIFNGAVMGWYRQAPGKEREFVATIDRGGSTYYADSVKGRFTISRDNAKNTVYLQMNSLKPEDTAVYYCAAWTGAPVTHAYWGQGTQVTVSS

SEQ ID NO: 10798 - protein, 118 aa, Artificial Sequence
  Chemically Synthesized
QVQLQESGGGLVQAGGSLRLSCAASGTIFVKDWMGWYRQAPGKEREFVASINTGTNTYYADSVKGRFTISRDNAKNTVYLQMNSLKPEDTAVYYCAVVDGLLYQHAYWGQGTQVTVSS

SEQ ID NO: 10799 - protein, 122 aa, Artificial Sequence
  Chemically Synthesized
QVQLQESGGGLVQAGGSLRLSCAASGYIFQWQFMGWYRQAPGKEREFVAGISYGATTYYADSVKGRFTISRDNAKNTVYLQMNSLKPEDTAVYYCAADHVVYDVDPAWFDYWGQGTQVTVSS

SEQ ID NO: 10800 - protein, 118 aa, Artificial Sequence
  Chemically Synthesized
QVQLQESGGGLVQAGGSLRLSCAASGTIFRTYAMGWYRQAPGKERELVASIASGSNTYYADSVKGRFTISRDNAKNTVYLQMNSLKPEDTAVYYCAAIPDTSYSHDYWGQGTQVTVSS

SEQ ID NO: 10801 - protein, 122 aa, Artificial Sequence
  Chemically Synthesized
QVQLQESGGGLVQAGGSLRLSCAASGTISRVDYMGWYRQAPGKEREFVASITPGGSTNYADSVKGRFTISRDNAKNTVYLQMNSLKPEDTAVYYCAVDPYYAATGADYHHYWGQGTQVTVSS

SEQ ID NO: 10802 - protein, 118 aa, Artificial Sequence
  Chemically Synthesized
QVQLQESGGGLVQAGGSLRLSCAASGTISVWEHMGWYRQAPGKEREFVASISRGGTTNYADSVKGRFTISRDNAKNTVYLQMNSLKPEDTAVYYCAVYADYDASHWYWGQGTQVTVSS

SEQ ID NO: 10803 - protein, 122 aa, Artificial Sequence
  Chemically Synthesized
QVQLQESGGGLVQAGGSLRLSCAASGNISGYTYMGWYRQAPGKERELVAAIDGGAITYYADSVKGRFTISRDNAKNTVYLQMNSLKPEDTAVYYCAVGQYWNGYTTDNHKYWGQGTQVTVSS

SEQ ID NO: 10804 - protein, 125 aa, Artificial Sequence
  Chemically Synthesized
QVQLQESGGGLVQAGGSLRLSCAASGNISTVSLMGWYRQAPGKEREFVASINSGANTYYADSVKGRFTISRDNAKNTVYLQMNSLKPEDTAVYYCAAGYLNEPTWGDYAVSTIYWGQGTQVTVSS

SEQ ID NO: 10805 - protein, 118 aa, Artificial Sequence
  Chemically Synthesized
QVQLQESGGGLVQAGGSLRLSCAASGSISTYVYMGWYRQAPGKEREFVAGISYGAITNYADSVKGRFTISRDNAKNTVYLQMNSLKPEDTAVYYCAAILPWGYLLDYWGQGTQVTVSS

SEQ ID NO: 10806 - protein, 118 aa, Artificial Sequence
  Chemically Synthesized
QVQLQESGGGLVQAGGSLRLSCAASGNISVDSGMGWYRQAPGKERELVAAIGTGANTNYADSVKGRFTISRDNAKNTVYLQMNSLKPEDTAVYYCAADDSAFPHYTYWGQGTQVTVSS

SEQ ID NO: 10807 - protein, 116 aa, Artificial Sequence
  Chemically Synthesized
QVQLQESGGGLVQAGGSLRLSCAASGNISIEVMGWYRQAPGKEREFVAAIAYGGTTNYADSVKGRFTISRDNAKNTVYLQMNSLKPEDTAVYYCAVPSPWNGSIYWGQGTQVTVSS

SEQ ID NO: 10808 - protein, 121 aa, Artificial Sequence
  Chemically Synthesized
QVQLQESGGGLVQAGGSLRLSCAASGYISQYPVMGWYRQAPGKEREFVASIDFGSNTNYADSVKGRFTISRDNAKNTVYLQMNSLKPEDTAVYYCAADGNAVYYDNDELYWGQGTQVTVSS

SEQ ID NO: 10809 - protein, 118 aa, Artificial Sequence
  Chemically Synthesized
QVQLQESGGGLVQAGGSLRLSCAASGNIFPGVFMGWYRQAPGKERELVAGIAYGGNTYYADSVKGRFTISRDNAKNTVYLQMNSLKPEDTAVYYCAVEGTVFGPFVYWGQGTQVTVSS

SEQ ID NO: 10810 - protein, 128 aa, Artificial Sequence
  Chemically Synthesized
QVQLQESGGGLVQAGGSLRLSCAASGTIFYRDDMGWYRQAPGKEREFVASITDGANTNYADSVKGRFTISRDNAKNTVYLQMNSLKPEDTAVYYCAVDKNPVTGLYIGGQGPYAVLYWGQGTQVTVSS

SEQ ID NO: 10811 - protein, 115 aa, Artificial Sequence
  Chemically Synthesized
QVQLQESGGGLVQAGGSLRLSCAASGTISGVDDMGWYRQAPGKERELVAAITYYLYADSVKGRFTISRDNAKNTVYLQMNSLKPEDTAVYYCAVYHYSFYPFDYWGQGTQVTVSS

SEQ ID NO: 10812 - protein, 123 aa, Artificial Sequence
  Chemically Synthesized
QVQLQESGGGLVQAGGSLRLSCAASGYISSRVYMGWYRQAPGKERELVAAIGHGSITYYADSVKGRFTISRDNAKNTVYLQMNSLKPEDTAVYYCAVYKNYLYVEGYAPFYYWGQGTQVTVSS

SEQ ID NO: 10813 - protein, 109 aa, Artificial Sequence
  Chemically Synthesized
QVQLQESGGGLVQAGGSLRLSCAASGTISRYSMGWYRQAPGKERELVASIGLGSTTYYADSVKGRFTISRDNAKNTVYLQMNSLKPEDTAVYYCALYYWGQGTQVTVSS

SEQ ID NO: 10814 - protein, 123 aa, Artificial Sequence
  Chemically Synthesized
QVQLQESGGGLVQAGGSLRLSCAASGTISYYKGMGWYRQAPGKEREFVGTGGNTYYADSVKGRFTISRDNAKNTVYLQMNSLKPEDTAVYYCAATYWHYVVDGDTLYTLLEYWGQGTQVTVSS

SEQ ID NO: 10815 - protein, 118 aa, Artificial Sequence
  Chemically Synthesized
QVQLQESGGGLVQAGGSLRLSCAASGTIFGHYVMGWYRQAPGKEREFVAAISGGSNTYYADSVKGRFTISRDNAKNTVYLQMNSLKPEDTAVYYCAAQYWDPVYLDYWGQGTQVTVSS

SEQ ID NO: 10816 - protein, 118 aa, Artificial Sequence
  Chemically Synthesized
QVQLQESGGGLVQAGGSLRLSCAASGTIFPPTGMGWYRQAPGKERELVAAINGGANTYYADSVKGRFTISRDNAKNTVYLQMNSLKPEDTAVYYCAVTLEGADNYTYWGQGTQVTVSS

SEQ ID NO: 10817 - protein, 112 aa, Artificial Sequence
  Chemically Synthesized
QVQLQESGGGLVQAGGSLRLSCAASGNMGWYRQAPGKEREFVASIDTGASTNYADSVKGRFTISRDNAKNTVYLQMNSLKPEDTAVYYCAVDGEYQSVLDYWGQGTQVTVSS

SEQ ID NO: 10818 - protein, 118 aa, Artificial Sequence
  Chemically Synthesized
QVQLQESGGGLVQAGGSLRLSCAASGNISTSGLMGWYRQAPGKERELVAGIGDGGTTNYADSVKGRFTISRDNAKNTVYLQMNSLKPEDTAVYYCAAYYSYWEQLYYWGQGTQVTVSS

SEQ ID NO: 10819 - protein, 122 aa, Artificial Sequence
  Chemically Synthesized
QVQLQESGGGLVQAGGSLRLSCAASGNISDFQNMGWYRQAPGKERELVASISSGSSTYYADSVKGRFTISRDNAKNTVYLQMNSLKPEDTAVYYCAAWEPYTASQLLYHDYWGQGTQVTVSS

SEQ ID NO: 10820 - protein, 121 aa, Artificial Sequence
  Chemically Synthesized
QVQLQESGGGLVQAGGSLRLSCAASGSISYEWGMGWYRQAPGKEREFVAAIALGASTYYADSVKGRFTISRDNAKNTVYLQMNSLKPEDTAVYYCAFTLLWVWLTTTGMYWGQGTQVTVSS

SEQ ID NO: 10821 - protein, 120 aa, Artificial Sequence
  Chemically Synthesized
QVQLQESGGGLVQAGGSLRLSCAASGYISTSYADTMGWYRQAPGKERELVAGIGNGGSTNYADSVKGRFTISRDNAKNTVYLQMNSLKPEDTAVYYCAADVTKRRYHGYWGQGTQVTVSS

SEQ ID NO: 10822 - protein, 116 aa, Artificial Sequence
  Chemically Synthesized
QVQLQESGGGLVQAGGSLRLSCAASGTISYYGFMGWYRQAPGKERELVAAISEGIPYADSVKGRFTISRDNAKNTVYLQMNSLKPEDTAVYYCAAGVEYYHSHGYWGQGTQVTVSS

SEQ ID NO: 10823 - protein, 118 aa, Artificial Sequence
  Chemically Synthesized
QVQLQESGGGLVQAGGSLRLSCAASGTSVMGWYRQAPGKERELVASINVGTNTNYADSVKGRFTISRDNAKNTVYLQMNSLKPEDTAVYYCAARRSWPGGDDYTHGYWGQGTQVTVSS

SEQ ID NO: 10824 - protein, 118 aa, Artificial Sequence
  Chemically Synthesized
QVQLQESGGGLVQAGGSLRLSCAASGSISAYGDMGWYRQAPGKERELVAGISGGTITYYADSVKGRFTISRDNAKNTVYLQMNSLKPEDTAVYYCAAYETQFGRHDYWGQGTQVTVSS

SEQ ID NO: 10825 - protein, 118 aa, Artificial Sequence
  Chemically Synthesized
QVQLQESGGGLVQAGGSLRLSCAASGTISDLGYMGWYRQAPGKEREFVASITYGTITYYADSVKGRFTISRDNAKNTVYLQMNSLKPEDTAVYYCAATSEPGPVHQYWGQGTQVTVSS

SEQ ID NO: 10826 - protein, 126 aa, Artificial Sequence
  Chemically Synthesized
QVQLQESGGGLVQAGGSLRLSCAASGTIFIDGPMGWYRQAPGKEREFVASIDPGTNTQYADSVKGRFTISRDNAKNTVYLQMNSLKPEDTAVYYCAVVPWVYWSKAQPGWRRHPYWGQGTQVTVSS

SEQ ID NO: 10827 - protein, 118 aa, Artificial Sequence
  Chemically Synthesized
QVQLQESGGGLVQAGGSLRLSCAASGSISTTKRMGWYRQAPGKERELVASIDTGGNTNYADSVKGRFTISRDNAKNTVYLQMNSLKPEDTAVYYCAASQLGDKWYFYWGQGTQVTVSS

SEQ ID NO: 10828 - protein, 117 aa, Artificial Sequence
  Chemically Synthesized
QVQLQESGGGLVQAGGSLRLSCAASGTIFDNLRMGWYRQAPGKERELVAAIGQGANTYADSVKGRFTISRDNAKNTVYLQMNSLKPEDTAVYYCAAREYDGRPYDYWGQGTQVTVSS

SEQ ID NO: 10829 - protein, 118 aa, Artificial Sequence
  Chemically Synthesized
QVQLQESGGGLVQAGGSLRLSCAASGTISWDTAMGWYRQAPGKERELVAAITGGGSTYYADSVKGRFTISRDNAKNTVYLQMNSLKPEDTAVYYCAAGRERSVYHPYWGQGTQVTVSS

SEQ ID NO: 10830 - protein, 118 aa, Artificial Sequence
  Chemically Synthesized
QVQLQESGGGLVQAGGSLRLSCAASGNIFSYDLMGWYRQAPGKERELVAGIDWGGNTYYADSVKGRFTISRDNAKNTVYLQMNSLKPEDTAVYYCAVPDYRYYSLAYWGQGTQVTVSS

SEQ ID NO: 10831 - protein, 118 aa, Artificial Sequence
  Chemically Synthesized
QVQLQESGGGLVQAGGSLRLSCAASGTIFTYYTMGWYRQAPGKERELVAGINSGGTTYYADSVKGRFTISRDNAKNTVYLQMNSLKPEDTAVYYCAVADAYEADHLYWGQGTQVTVSS

SEQ ID NO: 10832 - protein, 118 aa, Artificial Sequence
  Chemically Synthesized
QVQLQESGGGLVQAGGSLRLSCAASGSIFYPGTMGWYRQAPGKERELVAAITYGTTTNYADSVKGRFTISRDNAKNTVYLQMNSLKPEDTAVYYCAVNAIVTSYHGYWGQGTQVTVSS

SEQ ID NO: 10833 - protein, 122 aa, Artificial Sequence
  Chemically Synthesized
QVQLQESGGGLVQAGGSLRLSCAASGNISVFAEMGWYRQAPGKERELVASISAGGNTYYADSVKGRFTISRDNAKNTVYLQMNSLKPEDTAVYYCAVYYIFAGSLWLLYHYWGQGTQVTVSS

SEQ ID NO: 10834 - protein, 121 aa, Artificial Sequence
  Chemically Synthesized
QVQLQESGGGLVQAGGSLRLSCAASGTISSVSMGWYRQAPGKERELVAAIDPGGSTNYADSVKGRFTISRDNAKNTVYLQMNSLKPEDTAVYYCAAGTGVGVVRSTKYYYWGQGTQVTVSS

SEQ ID NO: 10835 - protein, 118 aa, Artificial Sequence
  Chemically Synthesized
QVQLQESGGGLVQAGGSLRLSCAASGYIFPYLFMGWYRQAPGKEREFVATIASGGSTNYADSVKGRFTISRDNAKNTVYLQMNSLKPEDTAVYYCAVYGLYTSSYAYWGQGTQVTVSS

SEQ ID NO: 10836 - protein, 116 aa, Artificial Sequence
  Chemically Synthesized
QVQLQESGGGLVQAGGSLRLSCAASGNISSPFLMGWYRQAPGKEREFVAAIGNGGSTNYADSVKGRFTISRDNAKNTVYLQMNSLKPEDTAVYYCAAYYVTAYYYWGQGTQVTVSS

SEQ ID NO: 10837 - protein, 118 aa, Artificial Sequence
  Chemically Synthesized
QVQLQESGGGLVQAGGSLRLSCAASGNIFRAVYMGWYRQAPGKERELVAAISVGANTNYADSVKGRFTISRDNAKNTVYLQMNSLKPEDTAVYYCAAYTRRGYWHIYWGQGTQVTVSS

SEQ ID NO: 10838 - protein, 118 aa, Artificial Sequence
  Chemically Synthesized
QVQLQESGGGLVQAGGSLRLSCAASGSIFRFPHMGWYRQAPGKERELVATINRGGSTYYADSVKGRFTISRDNAKNTVYLQMNSLKPEDTAVYYCAVRAPYQPRHIYWGQGTQVTVSS

SEQ ID NO: 10839 - protein, 118 aa, Artificial Sequence
  Chemically Synthesized
QVQLQESGGGLVQAGGSLRLSCAASGNISPDNYMGWYRQAPGKERELVATIAYGTTTNYADSVKGRFTISRDNAKNTVYLQMNSLKPEDTAVYYCAVGVYTDSPLLYWGQGTQVTVSS

SEQ ID NO: 10840 - protein, 118 aa, Artificial Sequence
  Chemically Synthesized
QVQLQESGGGLVQAGGSLRLSCAASGTISTNIGMGWYRQAPGKERELVAGITDGTITNYADSVKGRFTISRDNAKNTVYLQMNSLKPEDTAVYYCAVYYLRYPGFNYWGQGTQVTVSS

SEQ ID NO: 10841 - protein, 118 aa, Artificial Sequence
  Chemically Synthesized
QVQLQESGGGLVQAGGSLRLSCAASGTISTVNAMGWYRQAPGKEREFVAAIGDGSNTNYADSVKGRFTISRDNAKNTVYLQMNSLKPEDTAVYYCAVLLYYKRYHRYWGQGTQVTVSS

SEQ ID NO: 10842 - protein, 122 aa, Artificial Sequence
  Chemically Synthesized
QVQLQESGGGLVQAGGSLRLSCAASGSIFNFSIMGWYRQAPGKEREFVASIGYGANTNYADSVKGRFTISRDNAKNTVYLQMNSLKPEDTAVYYCAALYLPVIDDGYLYYYWGQGTQVTVSS

SEQ ID NO: 10843 - protein, 118 aa, Artificial Sequence
  Chemically Synthesized
QVQLQESGGGLVQAGGSLRLSCAASGNISRTAVMGWYRQAPGKEREFVASIAVGGNTNYADSVKGRFTISRDNAKNTVYLQMNSLKPEDTAVYYCAVYYRYISYLGYWGQGTQVTVSS

SEQ ID NO: 10844 - protein, 118 aa, Artificial Sequence
  Chemically Synthesized
QVQLQESGGGLVQAGGSLRLSCAASGSISTHSQMGWYRQAPGKEREFVAAIAYGSITNYADSVKGRFTISRDNAKNTVYLQMNSLKPEDTAVYYCAVHDYDGGIYSYWGQGTQVTVSS

SEQ ID NO: 10845 - protein, 113 aa, Artificial Sequence
  Chemically Synthesized
QVQLQESGGGLVQAGGSLRLSCAASGYIFRVGDMGWYRQAPGKEREFVAAIDPGANTNYADSVKGRFTISRDNAKNTVYLQMNSLKPEDTAVYYCAAYDNIYWGQGTQVTVSS

SEQ ID NO: 10846 - protein, 112 aa, Artificial Sequence
  Chemically Synthesized
QVQLQESGGGLVQAGGSLRLSCAASGTISTLYYMGWYRQAPGKERELVGYYQYADSVKGRFTISRDNAKNTVYLQMNSLKPEDTAVYYCAVGLGDAYYHFYWGQGTQVTVSS

SEQ ID NO: 10847 - protein, 117 aa, Artificial Sequence
  Chemically Synthesized
QVQLQESGGGLVQAGGSLRLSCAASGTISSLTMGWYRQAPGKEREFVAAISYGGTTNYADSVKGRFTISRDNAKNTVYLQMNSLKPEDTAVYYCAVYKYDIYKHYYWGQGTQVTVSS

SEQ ID NO: 10848 - protein, 118 aa, Artificial Sequence
  Chemically Synthesized
QVQLQESGGGLVQAGGSLRLSCAASGSISTGDGMGWYRQAPGKERELVATIAWGTSTNYADSVKGRFTISRDNAKNTVYLQMNSLKPEDTAVYYCAAVDRSHADLLYWGQGTQVTVSS

SEQ ID NO: 10849 - protein, 118 aa, Artificial Sequence
  Chemically Synthesized
QVQLQESGGGLVQAGGSLRLSCAASGSIFQFVGMGWYRQAPGKEREFVAGISNGGNTNYADSVKGRFTISRDNAKNTVYLQMNSLKPEDTAVYYCAVILRPERTLYYWGQGTQVTVSS

SEQ ID NO: 10850 - protein, 122 aa, Artificial Sequence
  Chemically Synthesized
QVQLQESGGGLVQAGGSLRLSCAASGSISFTHSMGWYRQAPGKERELVAGINRGASTNYADSVKGRFTISRDNAKNTVYLQMNSLKPEDTAVYYCAVRRGGVYGIRWYLDYWGQGTQVTVSS

SEQ ID NO: 10851 - protein, 126 aa, Artificial Sequence
  Chemically Synthesized
QVQLQESGGGLVQAGGSLRLSCAASGSISPPYVMGWYRQAPGKEREFVATINLGSITYYADSVKGRFTISRDNAKNTVYLQMNSLKPEDTAVYYCAVYASTYYYARDDGGDAFLYWGQGTQVTVSS

SEQ ID NO: 10852 - protein, 118 aa, Artificial Sequence
  Chemically Synthesized
QVQLQESGGGLVQAGGSLRLSCAASGNISTFGTMGWYRQAPGKEREFVAGITTGGSTNYADSVKGRFTISRDNAKNTVYLQMNSLKPEDTAVYYCAVVYVGGRVHYYWGQGTQVTVSS

SEQ ID NO: 10853 - protein, 122 aa, Artificial Sequence
  Chemically Synthesized
QVQLQESGGGLVQAGGSLRLSCAASGNIFDRGRMGWYRQAPGKERELVATINTGGTTNYADSVKGRFTISRDNAKNTVYLQMNSLKPEDTAVYYCAVYDPIGYYVYYDYAYWGQGTQVTVSS

SEQ ID NO: 10854 - protein, 118 aa, Artificial Sequence
  Chemically Synthesized
QVQLQESGGGLVQAGGSLRLSCAASGYISYPYTMGWYRQAPGKEREFVASIDSGGTTYYADSVKGRFTISRDNAKNTVYLQMNSLKPEDTAVYYCAVLYYRQRHHYYWGQGTQVTVSS

SEQ ID NO: 10855 - protein, 117 aa, Artificial Sequence
  Chemically Synthesized
QVQLQESGGGLVQAGGSLRLSCAASGSISLLDHMGWYRQAPGKERELVATIGAGAIPYADSVKGRFTISRDNAKNTVYLQMNSLKPEDTAVYYCAAPTQYAGTHFYWGQGTQVTVSS

SEQ ID NO: 10856 - protein, 118 aa, Artificial Sequence
  Chemically Synthesized
QVQLQESGGGLVQAGGSLRLSCAASGTIFSYRYMGWYRQAPGKERELVAAITSGGNTYYADSVKGRFTISRDNAKNTVYLQMNSLKPEDTAVYYCAARGYYSSHHTYWGQGTQVTVSS

SEQ ID NO: 10857 - protein, 118 aa, Artificial Sequence
  Chemically Synthesized
QVQLQESGGGLVQAGGSLRLSCAASGNISAWIAMGWYRQAPGKEREFVAAITRGSTTNYADSVKGRFTISRDNAKNTVYLQMNSLKPEDTAVYYCAVLLYGYDYHSYWGQGTQVTVSS

SEQ ID NO: 10858 - protein, 116 aa, Artificial Sequence
  Chemically Synthesized
QVQLQESGGGLVQAGGSLRLSCAASGNISDGWLMGWYRQAPGKEREFVATIGGGAITNYADSVKGRFTISRDNAKNTVYLQMNSLKPEDTAVYYCAANYRGYYDYWGQGTQVTVSS

SEQ ID NO: 10859 - protein, 118 aa, Artificial Sequence
  Chemically Synthesized
QVQLQESGGGLVQAGGSLRLSCAASGSISDSRDMGWYRQAPGKERELVAGINYGSTTYYADSVKGRFTISRDNAKNTVYLQMNSLKPEDTAVYYCAAQQPDSTLFDYWGQGTQVTVSS

SEQ ID NO: 10860 - protein, 117 aa, Artificial Sequence
  Chemically Synthesized
QVQLQESGGGLVQAGGSLRLSCAASGNIFRHDMGWYRQAPGKERELVATISGGSNTNYADSVKGRFTISRDNAKNTVYLQMNSLKPEDTAVYYCAAYYYDGNPFAYWGQGTQVTVSS

SEQ ID NO: 10861 - protein, 126 aa, Artificial Sequence
  Chemically Synthesized
QVQLQESGGGLVQAGGSLRLSCAASGYISEWYYMGWYRQAPGKERELVAGIDGGASTNYADSVKGRFTISRDNAKNTVYLQMNSLKPEDTAVYYCAANVPYDYIYPQIYDDLHPYWGQGTQVTVSS

SEQ ID NO: 10862 - protein, 118 aa, Artificial Sequence
  Chemically Synthesized
QVQLQESGGGLVQAGGSLRLSCAASGTISRAYTMGWYRQAPGKERELVAAIAAGSNTNYADSVKGRFTISRDNAKNTVYLQMNSLKPEDTAVYYCAAIRDVRPFHYYWGQGTQVTVSS

SEQ ID NO: 10863 - protein, 121 aa, Artificial Sequence
  Chemically Synthesized
QVQLQESGGGLVQAGGSLRLSCAASGNIFASQDMGWYRQAPGKERELVAAIAIGTTTNYADSVKGRFTISRDNAKNTVYLQMNSLKPEDTAVYYCAARYAQRYDSLTLIYWGQGTQVTVSS

SEQ ID NO: 10864 - protein, 118 aa, Artificial Sequence
  Chemically Synthesized
QVQLQESGGGLVQAGGSLRLSCAASGTISATDIMGWYRQAPGKEREFVAGIAYGSSTNYADSVKGRFTISRDNAKNTVYLQMNSLKPEDTAVYYCAVIDGSSPYHYYWGQGTQVTVSS

SEQ ID NO: 10865 - protein, 126 aa, Artificial Sequence
  Chemically Synthesized
QVQLQESGGGLVQAGGSLRLSCAASGTISTYIAMGWYRQAPGKEREFVAAIAYGGTTNYADSVKGRFTISRDNAKNTVYLQMNSLKPEDTAVYYCAALAVYKAVYQGTGRPGLYYWGQGTQVTVSS

SEQ ID NO: 10866 - protein, 110 aa, Artificial Sequence
  Chemically Synthesized
QVQLQESGGGLVQAGGSLRLSCAASGSIFQTYNMGWYRQAPGKERELVVLLLVLLPYADSVKGRFTISRDNAKNTVYLQMNSLKPEDTAVYYCAVVDGYWGQGTQVTVSS

SEQ ID NO: 10867 - protein, 113 aa, Artificial Sequence
  Chemically Synthesized
QVQLQESGGGLVQAGGSLRLSCAASGTIFGSMMGWYRQAPGKERELVATITGGTNTNYADSVKGRFTISRDNAKNTVYLQMNSLKPEDTAVYYCAAGIGHSYWGQGTQVTVSS

SEQ ID NO: 10868 - protein, 118 aa, Artificial Sequence
  Chemically Synthesized
QVQLQESGGGLVQAGGSLRLSCAASGSISHGQYMGWYRQAPGKEREFVAGINAGTTTNYADSVKGRFTISRDNAKNTVYLQMNSLKPEDTAVYYCAVLEQLRPYHYYWGQGTQVTVSS

SEQ ID NO: 10869 - protein, 116 aa, Artificial Sequence
  Chemically Synthesized
QVQLQESGGGLVQAGGSLRLSCAASGSISYGYNMGWYRQAPGKERELVASIGDGGNTYYADSVKGRFTISRDNAKNTVYLQMNSLKPEDTAVYYCAVVSGSKVMYWGQGTQVTVSS

SEQ ID NO: 10870 - protein, 117 aa, Artificial Sequence
  Chemically Synthesized
QVQLQESGGGLVQAGGSLRLSCAASGYIFWFGMGWYRQAPGKERELVATIDYGASTNYADSVKGRFTISRDNAKNTVYLQMNSLKPEDTAVYYCAAYLYEESYLDYWGQGTQVTVSS

SEQ ID NO: 10871 - protein, 122 aa, Artificial Sequence
  Chemically Synthesized
QVQLQESGGGLVQAGGSLRLSCAASGYISYSYIMGWYRQAPGKEREFVAGIAHGASTNYADSVKGRFTISRDNAKNTVYLQMNSLKPEDTAVYYCAAIDKYRNYDGSRHFYWGQGTQVTVSS

SEQ ID NO: 10872 - protein, 118 aa, Artificial Sequence
  Chemically Synthesized
QVQLQESGGGLVQAGGSLRLSCAASGTIFAAYAMGWYRQAPGKERELVATIDYGSSTYYADSVKGRFTISRDNAKNTVYLQMNSLKPEDTAVYYCAVGAYVYQYHAYWGQGTQVTVSS

SEQ ID NO: 10873 - protein, 116 aa, Artificial Sequence
  Chemically Synthesized
QVQLQESGGGLVQAGGSLRLSCAASGSFTTLMGWYRQAPGKEREFVAGIDSGTITNYADSVKGRFTISRDNAKNTVYLQMNSLKPEDTAVYYCAADAVPHYVYHYWGQGTQVTVSS

SEQ ID NO: 10874 - protein, 122 aa, Artificial Sequence
  Chemically Synthesized
QVQLQESGGGLVQAGGSLRLSCAASGSISSTQHMGWYRQAPGKEREFVATITGGASTYYADSVKGRFTISRDNAKNTVYLQMNSLKPEDTAVYYCAAGFDAFRYRVPYLYYWGQGTQVTVSS

SEQ ID NO: 10875 - protein, 117 aa, Artificial Sequence
  Chemically Synthesized
QVQLQESGGGLVQAGGSLRLSCAASGNISPYGGMGWYRQAPGKEREFVASIDYGTNTYYADSVKGRFTISRDNAKNTVYLQMNSLKPEDTAVYYCAAEDTWANLVYWGQGTQVTVSS

SEQ ID NO: 10876 - protein, 122 aa, Artificial Sequence
  Chemically Synthesized
QVQLQESGGGLVQAGGSLRLSCAASGTISDRSTMGWYRQAPGKEREFVAAITYGSNTNYADSVKGRFTISRDNAKNTVYLQMNSLKPEDTAVYYCAALYHVSGATNSYLWYWGQGTQVTVSS

SEQ ID NO: 10877 - protein, 122 aa, Artificial Sequence
  Chemically Synthesized
QVQLQESGGGLVQAGGSLRLSCAASGNIFLLAGMGWYRQAPGKERELVAAIGGGSSTNYADSVKGRFTISRDNAKNTVYLQMNSLKPEDTAVYYCAVTSGNGAGDDYHLPYWGQGTQVTVSS

SEQ ID NO: 10878 - protein, 118 aa, Artificial Sequence
  Chemically Synthesized
QVQLQESGGGLVQAGGSLRLSCAASGYISEAYIMGWYRQAPGKEREFVAGISAGATTYYADSVKGRFTISRDNAKNTVYLQMNSLKPEDTAVYYCAALKRGLPRYWYWGQGTQVTVSS

SEQ ID NO: 10879 - protein, 122 aa, Artificial Sequence
  Chemically Synthesized
QVQLQESGGGLVQAGGSLRLSCAASGTIFSYSVMGWYRQAPGKEREFVASINRGATTNYADSVKGRFTISRDNAKNTVYLQMNSLKPEDTAVYYCAVLAYNPQADSPYYYYWGQGTQVTVSS

SEQ ID NO: 10880 - protein, 119 aa, Artificial Sequence
  Chemically Synthesized
QVQLQESGGGLVQAGGSLRLSCAASGSISDLTYGMGWYRQAPGKEREFVASIAKGGITNYADSVKGRFTISRDNAKNTVYLQMNSLKPEDTAVYYCAVVSYSYIYLYYWGQGTQVTVSS

SEQ ID NO: 10881 - protein, 126 aa, Artificial Sequence
  Chemically Synthesized
QVQLQESGGGLVQAGGSLRLSCAASGTIFSPTDMGWYRQAPGKEREFVAAIDDGTITYYADSVKGRFTISRDNAKNTVYLQMNSLKPEDTAVYYCAASDNGYDYDTTDDYDTYAYWGQGTQVTVSS

SEQ ID NO: 10882 - protein, 122 aa, Artificial Sequence
  Chemically Synthesized
QVQLQESGGGLVQAGGSLRLSCAASGSISVRLVMGWYRQAPGKERELVASIADGANTNYADSVKGRFTISRDNAKNTVYLQMNSLKPEDTAVYYCAVFGGRYYDRRLSHDYWGQGTQVTVSS

SEQ ID NO: 10883 - protein, 120 aa, Artificial Sequence
  Chemically Synthesized
QVQLQESGGGLVQAGGSLRLSCAASGNISWDQGMGWYRQAPGKERELVAGISWYYQYADSVKGRFTISRDNAKNTVYLQMNSLKPEDTAVYYCAAARKLPKLLGDVYTYWGQGTQVTVSS

SEQ ID NO: 10884 - protein, 118 aa, Artificial Sequence
  Chemically Synthesized
QVQLQESGGGLVQAGGSLRLSCAASGYISARRNMGWYRQAPGKEREFVATIGGGGSTNYADSVKGRFTISRDNAKNTVYLQMNSLKPEDTAVYYCAVIYQDGDYHWYWGQGTQVTVSS

SEQ ID NO: 10885 - protein, 122 aa, Artificial Sequence
  Chemically Synthesized
QVQLQESGGGLVQAGGSLRLSCAASGTISSYATMGWYRQAPGKEREFVAGINYGSTTNYADSVKGRFTISRDNAKNTVYLQMNSLKPEDTAVYYCAAVAGAPRNGGRSYYYWGQGTQVTVSS

SEQ ID NO: 10886 - protein, 121 aa, Artificial Sequence
  Chemically Synthesized
QVQLQESGGGLVQAGGSLRLSCAASGTILVTLMGWYRQAPGKEREFVAAIASGGSTNYADSVKGRFTISRDNAKNTVYLQMNSLKPEDTAVYYCAVSTGNLYAEYYGHYYWGQGTQVTVSS

SEQ ID NO: 10887 - protein, 118 aa, Artificial Sequence
  Chemically Synthesized
QVQLQESGGGLVQAGGSLRLSCAASGTISGLDGMGWYRQAPGKEREFVATINAGSSTNYADSVKGRFTISRDNAKNTVYLQMNSLKPEDTAVYYCAAISYKRTYHWYWGQGTQVTVSS

SEQ ID NO: 10888 - protein, 122 aa, Artificial Sequence
  Chemically Synthesized
QVQLQESGGGLVQAGGSLRLSCAASGTISYILAMGWYRQAPGKEREFVAAINGGANTNYADSVKGRFTISRDNAKNTVYLQMNSLKPEDTAVYYCAALYYDRLRHRQLLAYWGQGTQVTVSS

SEQ ID NO: 10889 - protein, 118 aa, Artificial Sequence
  Chemically Synthesized
QVQLQESGGGLVQAGGSLRLSCAASGNISYHTSMGWYRQAPGKERELVAGIAYGATTNYADSVKGRFTISRDNAKNTVYLQMNSLKPEDTAVYYCAAYTAVDIDHPYWGQGTQVTVSS

SEQ ID NO: 10890 - protein, 116 aa, Artificial Sequence
  Chemically Synthesized
QVQLQESGGGLVQAGGSLRLSCAASGNIFDSPGMGWYRQAPGKERELVAAIDTGTITYYADSVKGRFTISRDNAKNTVYLQMNSLKPEDTAVYYCAVGYAYSYLYWGQGTQVTVSS

SEQ ID NO: 10891 - protein, 118 aa, Artificial Sequence
  Chemically Synthesized
QVQLQESGGGLVQAGGSLRLSCAASGTISYPPYMGWYRQAPGKEREFVATIGDGGTTNYADSVKGRFTISRDNAKNTVYLQMNSLKPEDTAVYYCAVGYLYRPPLLYWGQGTQVTVSS

SEQ ID NO: 10892 - protein, 118 aa, Artificial Sequence
  Chemically Synthesized
QVQLQESGGGLVQAGGSLRLSCAASGYISGYDGMGWYRQAPGKEREFVAGINRGTNTNYADSVKGRFTISRDNAKNTVYLQMNSLKPEDTAVYYCAVAYRREQWHYYWGQGTQVTVSS

SEQ ID NO: 10893 - protein, 120 aa, Artificial Sequence
  Chemically Synthesized
QVQLQESGGGLVQAGGSLRLSCAASGNILRYMGWYRQAPGKEREFVAAIDQGTTTNYADSVKGRFTISRDNAKNTVYLQMNSLKPEDTAVYYCAAIFLAPGTDRYRHYYWGQGTQVTVSS

SEQ ID NO: 10894 - protein, 119 aa, Artificial Sequence
  Chemically Synthesized
QVQLQESGGGLVQAGGSLRLSCAASGTISPSWIMGWYRQAPGKERELVAAINIGSSTNYADSVKGRFTISRDNAKNTVYLQMNSLKPEDTAVYYCAADYTLDAYLGHYWGQGTQVTVSS

SEQ ID NO: 10895 - protein, 118 aa, Artificial Sequence
  Chemically Synthesized
QVQLQESGGGLVQAGGSLRLSCAASGNIFGYLGMGWYRQAPGKEREFVAGIGSGASTNYADSVKGRFTISRDNAKNTVYLQMNSLKPEDTAVYYCAVAEGYRVDFPYWGQGTQVTVSS

SEQ ID NO: 10896 - protein, 122 aa, Artificial Sequence
  Chemically Synthesized
QVQLQESGGGLVQAGGSLRLSCAASGSISSRYRMGWYRQAPGKEREFVATINLGGSTYYADSVKGRFTISRDNAKNTVYLQMNSLKPEDTAVYYCAVAAYVHWRYRYQLGYWGQGTQVTVSS

SEQ ID NO: 10897 - protein, 126 aa, Artificial Sequence
  Chemically Synthesized
QVQLQESGGGLVQAGGSLRLSCAASGTIFPRYLMGWYRQAPGKEREFVASISIGAITNYADSVKGRFTISRDNAKNTVYLQMNSLKPEDTAVYYCAVSYLYTYVTAGPYGQNHAYWGQGTQVTVSS

SEQ ID NO: 10898 - protein, 117 aa, Artificial Sequence
  Chemically Synthesized
QVQLQESGGGLVQAGGSLRLSCAASGYISTSGDMGWYRQAPGKERELVAAIAHGASTNYADSVKGRFTISRDNAKNTVYLQMNSLKPEDTAVYYCAVVNYAVALLYWGQGTQVTVSS

SEQ ID NO: 10899 - protein, 126 aa, Artificial Sequence
  Chemically Synthesized
QVQLQESGGGLVQAGGSLRLSCAASGTIFSSFGMGWYRQAPGKEREFVAAITLGTSTYYADSVKGRFTISRDNAKNTVYLQMNSLKPEDTAVYYCAVNQDEYNGLSPPSGIYLAYWGQGTQVTVSS

SEQ ID NO: 10900 - protein, 122 aa, Artificial Sequence
  Chemically Synthesized
QVQLQESGGGLVQAGGSLRLSCAASGNIFLHVNMGWYRQAPGKEREFVAAIGDGGNTNYADSVKGRFTISRDNAKNTVYLQMNSLKPEDTAVYYCAAVKRYSAADHYYHYYWGQGTQVTVSS

SEQ ID NO: 10901 - protein, 118 aa, Artificial Sequence
  Chemically Synthesized
QVQLQESGGGLVQAGGSLRLSCAASGNIFGYYGMGWYRQAPGKEREFVASISGGATTNYADSVKGRFTISRDNAKNTVYLQMNSLKPEDTAVYYCAVVVYGDKYHGYWGQGTQVTVSS

SEQ ID NO: 10902 - protein, 126 aa, Artificial Sequence
  Chemically Synthesized
QVQLQESGGGLVQAGGSLRLSCAASGTISGAYAMGWYRQAPGKEREFVAGITVGGTTNYADSVKGRFTISRDNAKNTVYLQMNSLKPEDTAVYYCAVFYYGPIGTFGQDNDHHSYWGQGTQVTVSS

SEQ ID NO: 10903 - protein, 118 aa, Artificial Sequence
  Chemically Synthesized
QVQLQESGGGLVQAGGSLRLSCAASGTISGPSPMGWYRQAPGKEREFVAGIDGGTNTNYADSVKGRFTISRDNAKNTVYLQMNSLKPEDTAVYYCAAPSWYYILFYYWGQGTQVTVSS

SEQ ID NO: 10904 - protein, 118 aa, Artificial Sequence
  Chemically Synthesized
QVQLQESGGGLVQAGGSLRLSCAASGNIFRSSIMGWYRQAPGKEREFVASINTGASTNYADSVKGRFTISRDNAKNTVYLQMNSLKPEDTAVYYCAAVYPYVPYLYYWGQGTQVTVSS

SEQ ID NO: 10905 - protein, 118 aa, Artificial Sequence
  Chemically Synthesized
QVQLQESGGGLVQAGGSLRLSCAASGNIFPRASMGWYRQAPGKEREFVASISVGGNTYYADSVKGRFTISRDNAKNTVYLQMNSLKPEDTAVYYCAAVYRDGAYYGYWGQGTQVTVSS

SEQ ID NO: 10906 - protein, 122 aa, Artificial Sequence
  Chemically Synthesized
QVQLQESGGGLVQAGGSLRLSCAASGTIFDIHSMGWYRQAPGKERELVAGIGWGGNTNYADSVKGRFTISRDNAKNTVYLQMNSLKPEDTAVYYCAALQYNPDAYYAWYAYWGQGTQVTVSS

SEQ ID NO: 10907 - protein, 122 aa, Artificial Sequence
  Chemically Synthesized
QVQLQESGGGLVQAGGSLRLSCAASGTIFQKRYMGWYRQAPGKERELVAAISGGGTTYYADSVKGRFTISRDNAKNTVYLQMNSLKPEDTAVYYCAATTRRYYYYGRDHRYWGQGTQVTVSS

SEQ ID NO: 10908 - protein, 118 aa, Artificial Sequence
  Chemically Synthesized
QVQLQESGGGLVQAGGSLRLSCAASGTIFRIAGMGWYRQAPGKERELVASIDYGGTTYYADSVKGRFTISRDNAKNTVYLQMNSLKPEDTAVYYCAVYVYFIDYLYYWGQGTQVTVSS

SEQ ID NO: 10909 - protein, 118 aa, Artificial Sequence
  Chemically Synthesized
QVQLQESGGGLVQAGGSLRLSCAASGSIFGPVYMGWYRQAPGKEREFVATIADGSNTYYADSVKGRFTISRDNAKNTVYLQMNSLKPEDTAVYYCAVVIDGTARYYYWGQGTQVTVSS

SEQ ID NO: 10910 - protein, 126 aa, Artificial Sequence
  Chemically Synthesized
QVQLQESGGGLVQAGGSLRLSCAASGYISTATNMGWYRQAPGKERELVAAIDTGTNTYYADSVKGRFTISRDNAKNTVYLQMNSLKPEDTAVYYCAVIDQVYYYWYYYTYGPFYYWGQGTQVTVSS

SEQ ID NO: 10911 - protein, 118 aa, Artificial Sequence
  Chemically Synthesized
QVQLQESGGGLVQAGGSLRLSCAASGNISRPTVMGWYRQAPGKEREFVAAIDPGAITNYADSVKGRFTISRDNAKNTVYLQMNSLKPEDTAVYYCAVTYYAVNWYYYWGQGTQVTVSS

SEQ ID NO: 10912 - protein, 121 aa, Artificial Sequence
  Chemically Synthesized
QVQLQESGGGLVQAGGSLRLSCAASGTISRYAYMGWYRQAPGKERELVAAIGFGTITNYADSVKGRFTISRDNAKNTVYLQMNSLKPEDTAVYYCAAWWTPDYPDAYKLYWGQGTQVTVSS

SEQ ID NO: 10913 - protein, 118 aa, Artificial Sequence
  Chemically Synthesized
QVQLQESGGGLVQAGGSLRLSCAASGNISANGAMGWYRQAPGKERELVAGISYGSNTYYADSVKGRFTISRDNAKNTVYLQMNSLKPEDTAVYYCAVWYVTIQYHQYWGQGTQVTVSS

SEQ ID NO: 10914 - protein, 126 aa, Artificial Sequence
  Chemically Synthesized
QVQLQESGGGLVQAGGSLRLSCAASGYISYTVAMGWYRQAPGKERELVAGINQGGSTYYADSVKGRFTISRDNAKNTVYLQMNSLKPEDTAVYYCAAYAPNADFDYYAYDQPYRYWGQGTQVTVSS

SEQ ID NO: 10915 - protein, 116 aa, Artificial Sequence
  Chemically Synthesized
QVQLQESGGGLVQAGGSLRLSCAASGTSRVTMGWYRQAPGKEREFVAGIDYGGTTNYADSVKGRFTISRDNAKNTVYLQMNSLKPEDTAVYYCAARTNARPYHGYWGQGTQVTVSS

SEQ ID NO: 10916 - protein, 118 aa, Artificial Sequence
  Chemically Synthesized
QVQLQESGGGLVQAGGSLRLSCAASGSISQTAYMGWYRQAPGKERELVAAIAEGANTNYADSVKGRFTISRDNAKNTVYLQMNSLKPEDTAVYYCAAVGYDTYWHGYWGQGTQVTVSS

SEQ ID NO: 10917 - protein, 118 aa, Artificial Sequence
  Chemically Synthesized
QVQLQESGGGLVQAGGSLRLSCAASGTIFGSIIMGWYRQAPGKEREFVAGIDDGTNTNYADSVKGRFTISRDNAKNTVYLQMNSLKPEDTAVYYCAAVQHYRAPLYYWGQGTQVTVSS

SEQ ID NO: 10918 - protein, 117 aa, Artificial Sequence
  Chemically Synthesized
QVQLQESGGGLVQAGGSLRLSCAASGNISNDHPMGWYRQAPGKERELVAGIDEGTTTYYADSVKGRFTISRDNAKNTVYLQMNSLKPEDTAVYYCAAYDSTVFSLYWGQGTQVTVSS

SEQ ID NO: 10919 - protein, 117 aa, Artificial Sequence
  Chemically Synthesized
QVQLQESGGGLVQAGGSLRLSCAASGYISGWYDMGWYRQAPGKEREFVATIAYGTSTNYADSVKGRFTISRDNAKNTVYLQMNSLKPEDTAVYYCAVRTSCSWNMYWGQGTQVTVSS

SEQ ID NO: 10920 - protein, 118 aa, Artificial Sequence
  Chemically Synthesized
QVQLQESGGGLVQAGGSLRLSCAASGYISRTPTMGWYRQAPGKEREFVAAISYGTITNYADSVKGRFTISRDNAKNTVYLQMNSLKPEDTAVYYCAVIRVYPRYFRYWGQGTQVTVSS

SEQ ID NO: 10921 - protein, 118 aa, Artificial Sequence
  Chemically Synthesized
QVQLQESGGGLVQAGGSLRLSCAASGNISVILYMGWYRQAPGKEREFVATINGGTITNYADSVKGRFTISRDNAKNTVYLQMNSLKPEDTAVYYCAAITLPADSAWYWGQGTQVTVSS

SEQ ID NO: 10922 - protein, 121 aa, Artificial Sequence
  Chemically Synthesized
QVQLQESGGGLVQAGGSLRLSCAASGTISYQYMGWYRQAPGKEREFVAAIDYGGSTNYADSVKGRFTISRDNAKNTVYLQMNSLKPEDTAVYYCAAVYYPHTRKLAYYYYWGQGTQVTVSS

SEQ ID NO: 10923 - protein, 122 aa, Artificial Sequence
  Chemically Synthesized
QVQLQESGGGLVQAGGSLRLSCAASGYISHYWWMGWYRQAPGKERELVASINYGSTTNYADSVKGRFTISRDNAKNTVYLQMNSLKPEDTAVYYCAAVIWSDDGDRRYHYYWGQGTQVTVSS

SEQ ID NO: 10924 - protein, 118 aa, Artificial Sequence
  Chemically Synthesized
QVQLQESGGGLVQAGGSLRLSCAASGNIFHRAAMGWYRQAPGKEREFVAGIDKGTITNYADSVKGRFTISRDNAKNTVYLQMNSLKPEDTAVYYCAALITAEYSLYYWGQGTQVTVSS

SEQ ID NO: 10925 - protein, 118 aa, Artificial Sequence
  Chemically Synthesized
QVQLQESGGGLVQAGGSLRLSCAASGSISKTAGMGWYRQAPGKERELVAAIDHGGTTNYADSVKGRFTISRDNAKNTVYLQMNSLKPEDTAVYYCAAVIYFDRWYAYWGQGTQVTVSS

SEQ ID NO: 10926 - protein, 118 aa, Artificial Sequence
  Chemically Synthesized
QVQLQESGGGLVQAGGSLRLSCAASGTISPPPIMGWYRQAPGKEREFVAGIGGGSNTNYADSVKGRFTISRDNAKNTVYLQMNSLKPEDTAVYYCAVLFPYPVVFYYWGQGTQVTVSS

SEQ ID NO: 10927 - protein, 118 aa, Artificial Sequence
  Chemically Synthesized
QVQLQESGGGLVQAGGSLRLSCAASGTISYFVTMGWYRQAPGKERELVASITYGSTTYYADSVKGRFTISRDNAKNTVYLQMNSLKPEDTAVYYCAVYYNGDGSHDYWGQGTQVTVSS

SEQ ID NO: 10928 - protein, 118 aa, Artificial Sequence
  Chemically Synthesized
QVQLQESGGGLVQAGGSLRLSCAASGTIFGAAYMGWYRQAPGKEREFVASINFGGNTNYADSVKGRFTISRDNAKNTVYLQMNSLKPEDTAVYYCAAITTVGRLHYYWGQGTQVTVSS

SEQ ID NO: 10929 - protein, 118 aa, Artificial Sequence
  Chemically Synthesized
QVQLQESGGGLVQAGGSLRLSCAASGTISYNYRMGWYRQAPGKERELVAGIAYGSTTYYADSVKGRFTISRDNAKNTVYLQMNSLKPEDTAVYYCAARPYRRGYLYYWGQGTQVTVSS

SEQ ID NO: 10930 - protein, 122 aa, Artificial Sequence
  Chemically Synthesized
QVQLQESGGGLVQAGGSLRLSCAASGSIFPSYYMGWYRQAPGKERELVAAITNGTSTNYADSVKGRFTISRDNAKNTVYLQMNSLKPEDTAVYYCAADVRPGDPDGGYHDYWGQGTQVTVSS

SEQ ID NO: 10931 - protein, 122 aa, Artificial Sequence
  Chemically Synthesized
QVQLQESGGGLVQAGGSLRLSCAASGYISSSALMGWYRQAPGKERELVAGIDGGANTYYADSVKGRFTISRDNAKNTVYLQMNSLKPEDTAVYYCAAFNLHTTGFRSRHRYWGQGTQVTVSS

SEQ ID NO: 10932 - protein, 127 aa, Artificial Sequence
  Chemically Synthesized
QVQLQESGGGLVQAGGSLRLSCAASGYIFPYRSMGWYRQAPGKERELVASIAVGANTYYADSVKGRFTISRDNAKNTVYLQMNSLKPEDTAVYYCAAVPPYYHYVGNVPSGRVLYYWGQGTQVTVSS

SEQ ID NO: 10933 - protein, 118 aa, Artificial Sequence
  Chemically Synthesized
QVQLQESGGGLVQAGGSLRLSCAASGYISFRRWMGWYRQAPGKERELVAGITFGGTTNYADSVKGRFTISRDNAKNTVYLQMNSLKPEDTAVYYCAASYVVYRRHVYWGQGTQVTVSS

SEQ ID NO: 10934 - protein, 126 aa, Artificial Sequence
  Chemically Synthesized
QVQLQESGGGLVQAGGSLRLSCAASGNISSFYVMGWYRQAPGKEREFVAGISTGGTTNYADSVKGRFTISRDNAKNTVYLQMNSLKPEDTAVYYCAANVTDRAGYARWWYTLLDYWGQGTQVTVSS

SEQ ID NO: 10935 - protein, 117 aa, Artificial Sequence
  Chemically Synthesized
QVQLQESGGGLVQAGGSLRLSCAASGYISGALYMGWYRQAPGKERELVAAITRGANTNYADSVKGRFTISRDNAKNTVYLQMNSLKPEDTAVYYCAAGTGARPSFYWGQGTQVTVSS

SEQ ID NO: 10936 - protein, 122 aa, Artificial Sequence
  Chemically Synthesized
QVQLQESGGGLVQAGGSLRLSCAASGTIFRKGRMGWYRQAPGKEREFVAGITWGGNTYYADSVKGRFTISRDNAKNTVYLQMNSLKPEDTAVYYCAVGYYYRKPDRALHLYWGQGTQVTVSS

SEQ ID NO: 10937 - protein, 118 aa, Artificial Sequence
  Chemically Synthesized
QVQLQESGGGLVQAGGSLRLSCAASGTISAPLTMGWYRQAPGKERELVAGITHGSNTYYADSVKGRFTISRDNAKNTVYLQMNSLKPEDTAVYYCAVYYDTHPDHAYWGQGTQVTVSS

SEQ ID NO: 10938 - protein, 122 aa, Artificial Sequence
  Chemically Synthesized
QVQLQESGGGLVQAGGSLRLSCAASGTISRYVIMGWYRQAPGKERELVATINFGTITYYADSVKGRFTISRDNAKNTVYLQMNSLKPEDTAVYYCAADVDLHREAFRYLSYWGQGTQVTVSS

SEQ ID NO: 10939 - protein, 126 aa, Artificial Sequence
  Chemically Synthesized
QVQLQESGGGLVQAGGSLRLSCAASGTIFRYYYMGWYRQAPGKEREFVATIGRGTSTYYADSVKGRFTISRDNAKNTVYLQMNSLKPEDTAVYYCAVSGRDVGTTGYGKRNRFRYWGQGTQVTVSS

SEQ ID NO: 10940 - protein, 118 aa, Artificial Sequence
  Chemically Synthesized
QVQLQESGGGLVQAGGSLRLSCAASGNIFWTRYMGWYRQAPGKERELVATIDAGTSTNYADSVKGRFTISRDNAKNTVYLQMNSLKPEDTAVYYCAAYYRRTSWFQYWGQGTQVTVSS

SEQ ID NO: 10941 - protein, 122 aa, Artificial Sequence
  Chemically Synthesized
QVQLQESGGGLVQAGGSLRLSCAASGYISPLRGMGWYRQAPGKEREFVAGIDGGGITYYADSVKGRFTISRDNAKNTVYLQMNSLKPEDTAVYYCAAKRWKRGSRGGLLWYWGQGTQVTVSS

SEQ ID NO: 10942 - protein, 121 aa, Artificial Sequence
  Chemically Synthesized
QVQLQESGGGLVQAGGSLRLSCAASGSIFVPTYMGWYRQAPGKEREFVATITQGGTTYYADSVKGRFTISRDNAKNTVYLQMNSLKPEDTAVYYCAVDTSSVTDFNSSIYWGQGTQVTVSS

SEQ ID NO: 10943 - protein, 118 aa, Artificial Sequence
  Chemically Synthesized
QVQLQESGGGLVQAGGSLRLSCAASGTISRVRSMGWYRQAPGKEREFVAGIAAGATTYYADSVKGRFTISRDNAKNTVYLQMNSLKPEDTAVYYCAATRGYQRYHPYWGQGTQVTVSS

SEQ ID NO: 10944 - protein, 118 aa, Artificial Sequence
  Chemically Synthesized
QVQLQESGGGLVQAGGSLRLSCAASGSISRSTYMGWYRQAPGKERELVASIANGANTNYADSVKGRFTISRDNAKNTVYLQMNSLKPEDTAVYYCAVLQYYRHYFYYWGQGTQVTVSS

SEQ ID NO: 10945 - protein, 118 aa, Artificial Sequence
  Chemically Synthesized
QVQLQESGGGLVQAGGSLRLSCAASGSIFYPYGMGWYRQAPGKEREFVAAISLGGITNYADSVKGRFTISRDNAKNTVYLQMNSLKPEDTAVYYCAAYYVRYRHHLYWGQGTQVTVSS

SEQ ID NO: 10946 - protein, 118 aa, Artificial Sequence
  Chemically Synthesized
QVQLQESGGGLVQAGGSLRLSCAASGYIFAPRYMGWYRQAPGKERELVAGISFGGNTNYADSVKGRFTISRDNAKNTVYLQMNSLKPEDTAVYYCAVSRSYRPALRYWGQGTQVTVSS

SEQ ID NO: 10947 - protein, 118 aa, Artificial Sequence
  Chemically Synthesized
QVQLQESGGGLVQAGGSLRLSCAASGSIFYYYRMGWYRQAPGKERELVASISLGATTNYADSVKGRFTISRDNAKNTVYLQMNSLKPEDTAVYYCAARTRWWATHTYWGQGTQVTVSS

SEQ ID NO: 10948 - protein, 118 aa, Artificial Sequence
  Chemically Synthesized
QVQLQESGGGLVQAGGSLRLSCAASGTIFRLWFMGWYRQAPGKERELVAAIARGGTTYYADSVKGRFTISRDNAKNTVYLQMNSLKPEDTAVYYCAATRNRESRLFYWGQGTQVTVSS

SEQ ID NO: 10949 - protein, 118 aa, Artificial Sequence
  Chemically Synthesized
QVQLQESGGGLVQAGGSLRLSCAASGNIFRVYSMGWYRQAPGKERELVATITDGSSTYYADSVKGRFTISRDNAKNTVYLQMNSLKPEDTAVYYCAVVTGYRRPHGYWGQGTQVTVSS

SEQ ID NO: 10950 - protein, 122 aa, Artificial Sequence
  Chemically Synthesized
QVQLQESGGGLVQAGGSLRLSCAASGTISFLGKMGWYRQAPGKEREFVAAIARGSSTYYADSVKGRFTISRDNAKNTVYLQMNSLKPEDTAVYYCAVRSEYYYYPGRRHGYWGQGTQVTVSS

SEQ ID NO: 10951 - protein, 118 aa, Artificial Sequence
  Chemically Synthesized
QVQLQESGGGLVQAGGSLRLSCAASGSIFYRRAMGWYRQAPGKERELVAAISGGGSTYYADSVKGRFTISRDNAKNTVYLQMNSLKPEDTAVYYCAAVPGGRFRHLYWGQGTQVTVSS

SEQ ID NO: 10952 - protein, 118 aa, Artificial Sequence
  Chemically Synthesized
QVQLQESGGGLVQAGGSLRLSCAASGNIFAHYRMGWYRQAPGKERELVAGITGGSTTYYADSVKGRFTISRDNAKNTVYLQMNSLKPEDTAVYYCAVIGRRYWRYRYWGQGTQVTVSS

SEQ ID NO: 10953 - protein, 126 aa, Artificial Sequence
  Chemically Synthesized
QVQLQESGGGLVQAGGSLRLSCAASGNISWWLAMGWYRQAPGKERELVAGITAGATTYYADSVKGRFTISRDNAKNTVYLQMNSLKPEDTAVYYCAAWNSWYYRYDWAYYIRHYYWGQGTQVTVSS

SEQ ID NO: 10954 - protein, 122 aa, Artificial Sequence
  Chemically Synthesized
QVQLQESGGGLVQAGGSLRLSCAASGTISKRPLMGWYRQAPGKEREFVATIDRGSITNYADSVKGRFTISRDNAKNTVYLQMNSLKPEDTAVYYCAVAQRESAWHYARHGYWGQGTQVTVSS

SEQ ID NO: 10955 - protein, 118 aa, Artificial Sequence
  Chemically Synthesized
QVQLQESGGGLVQAGGSLRLSCAASGTISQPWYMGWYRQAPGKERELVATITDGASTYYADSVKGRFTISRDNAKNTVYLQMNSLKPEDTAVYYCAAVYYQTFLHRYWGQGTQVTVSS

SEQ ID NO: 10956 - protein, 122 aa, Artificial Sequence
  Chemically Synthesized
QVQLQESGGGLVQAGGSLRLSCAASGTIFDADYMGWYRQAPGKEREFVATIGTGANTNYADSVKGRFTISRDNAKNTVYLQMNSLKPEDTAVYYCAVVIGGVYGTGLGHQYWGQGTQVTVSS

SEQ ID NO: 10957 - protein, 118 aa, Artificial Sequence
  Chemically Synthesized
QVQLQESGGGLVQAGGSLRLSCAASGYISRLAIMGWYRQAPGKERELVASITRGANTNYADSVKGRFTISRDNAKNTVYLQMNSLKPEDTAVYYCAVSSWRLRGHRYWGQGTQVTVSS

SEQ ID NO: 10958 - protein, 126 aa, Artificial Sequence
  Chemically Synthesized
QVQLQESGGGLVQAGGSLRLSCAASGTISYEPYMGWYRQAPGKEREFVAAIGRGSNTYYADSVKGRFTISRDNAKNTVYLQMNSLKPEDTAVYYCAVGVRRHYSRDRWRLYSHPYWGQGTQVTVSS

SEQ ID NO: 10959 - protein, 122 aa, Artificial Sequence
  Chemically Synthesized
QVQLQESGGGLVQAGGSLRLSCAASGTIFTPDIMGWYRQAPGKERELVAGIAVGTTTYYADSVKGRFTISRDNAKNTVYLQMNSLKPEDTAVYYCAAHYPTRPWRHRRLVYWGQGTQVTVSS

SEQ ID NO: 10960 - protein, 118 aa, Artificial Sequence
  Chemically Synthesized
QVQLQESGGGLVQAGGSLRLSCAASGSIFDNANMGWYRQAPGKEREFVAAILTVLVPYADSVKGRFTISRDNAKNTVYLQMNSLKPEDTAVYYCAVTYDSILVDLVYWGQGTQVTVSS

SEQ ID NO: 10961 - protein, 123 aa, Artificial Sequence
  Chemically Synthesized
QVQLQESGGGLVQAGGSLRLSCAASGNIFTNAYMGWYRQAPGKEREFVAAIGTGAITYYADSVKGRFTISRDNAKNTVYLQMNSLKPEDTAVYYCAVEYGGQGWAAPPEHLYWGQGTQVTVSS

SEQ ID NO: 10962 - protein, 118 aa, Artificial Sequence
  Chemically Synthesized
QVQLQESGGGLVQAGGSLRLSCAASGSIFRVQRMGWYRQAPGKERELVAAINRGATTYYADSVKGRFTISRDNAKNTVYLQMNSLKPEDTAVYYCAVRVRYAYDHYYWGQGTQVTVSS

SEQ ID NO: 10963 - protein, 123 aa, Artificial Sequence
  Chemically Synthesized
QVQLQESGGGLVQAGGSLRLSCAASGSISDLWYMGWYRQAPGKEREFVASINYGGTTYYADSVKGRFTISRDNAKNTVYLQMNSLKPEDTAVYYCAAVRYRRFFNGRKRLGYWGQGTQVTVSS

SEQ ID NO: 10964 - protein, 117 aa, Artificial Sequence
  Chemically Synthesized
QVQLQESGGGLVQAGGSLRLSCAASGYISRLRGMGWYRQAPGKEREFVAAIAGGANTNYADSVKGRFTISRDNAKNTVYLQMNSLKPEDTAVYYCAAWRYAGRYVYWGQGTQVTVSS

SEQ ID NO: 10965 - protein, 118 aa, Artificial Sequence
  Chemically Synthesized
QVQLQESGGGLVQAGGSLRLSCAASGSIFRHRVMGWYRQAPGKERELVATITYGTITYYADSVKGRFTISRDNAKNTVYLQMNSLKPEDTAVYYCAAGWGRTSYHRYWGQGTQVTVSS

SEQ ID NO: 10966 - protein, 118 aa, Artificial Sequence
  Chemically Synthesized
QVQLQESGGGLVQAGGSLRLSCAASGYIFTTIEMGWYRQAPGKERELVATIAAGGSTNYADSVKGRFTISRDNAKNTVYLQMNSLKPEDTAVYYCAVYAYYILFHWYWGQGTQVTVSS

SEQ ID NO: 10967 - protein, 118 aa, Artificial Sequence
  Chemically Synthesized
QVQLQESGGGLVQAGGSLRLSCAASGYIFLLTVMGWYRQAPGKEREFVASITEGSTTNYADSVKGRFTISRDNAKNTVYLQMNSLKPEDTAVYYCAARFSRIYLYYYWGQGTQVTVSS

SEQ ID NO: 10968 - protein, 118 aa, Artificial Sequence
  Chemically Synthesized
QVQLQESGGGLVQAGGSLRLSCAASGTISRGRYMGWYRQAPGKERELVAGISWGAITYYADSVKGRFTISRDNAKNTVYLQMNSLKPEDTAVYYCAVNTRYYGRHVYWGQGTQVTVSS

SEQ ID NO: 10969 - protein, 118 aa, Artificial Sequence
  Chemically Synthesized
QVQLQESGGGLVQAGGSLRLSCAASGYIFRWVYMGWYRQAPGKEREFVAGIDTGGSTNYADSVKGRFTISRDNAKNTVYLQMNSLKPEDTAVYYCAALSNWRFAYKYWGQGTQVTVSS

SEQ ID NO: 10970 - protein, 122 aa, Artificial Sequence
  Chemically Synthesized
QVQLQESGGGLVQAGGSLRLSCAASGNIFRIRAMGWYRQAPGKERELVASIAGGGITYYADSVKGRFTISRDNAKNTVYLQMNSLKPEDTAVYYCAALYTIVDELPRYHRYWGQGTQVTVSS

SEQ ID NO: 10971 - protein, 122 aa, Artificial Sequence
  Chemically Synthesized
QVQLQESGGGLVQAGGSLRLSCAASGTIFSRRSMGWYRQAPGKEREFVAGISFGSNTNYADSVKGRFTISRDNAKNTVYLQMNSLKPEDTAVYYCAARVRTPYPYGWRYPYWGQGTQVTVSS

SEQ ID NO: 10972 - protein, 120 aa, Artificial Sequence
  Chemically Synthesized
QVQLQESGGGLVQAGGSLRLSCAASGTIFRHAMGWYRQAPGKERELVASIAHGANTYYADSVKGRFTISRDNAKNTVYLQMNSLKPEDTAVYYCAAQYLYTRYADTTIYWGQGTQVTVSS

SEQ ID NO: 10973 - protein, 122 aa, Artificial Sequence
  Chemically Synthesized
QVQLQESGGGLVQAGGSLRLSCAASGYIFGYRYMGWYRQAPGKEREFVAAIARGGTTNYADSVKGRFTISRDNAKNTVYLQMNSLKPEDTAVYYCAAGRKYNYQNQRVHRYWGQGTQVTVSS

SEQ ID NO: 10974 - protein, 118 aa, Artificial Sequence
  Chemically Synthesized
QVQLQESGGGLVQAGGSLRLSCAASGNIFGKSVMGWYRQAPGKERELVASITKGGITNYADSVKGRFTISRDNAKNTVYLQMNSLKPEDTAVYYCAVYRLVAYRYSYWGQGTQVTVSS

SEQ ID NO: 10975 - protein, 118 aa, Artificial Sequence
  Chemically Synthesized
QVQLQESGGGLVQAGGSLRLSCAASGTISPDLRMGWYRQAPGKERELVAAIAYGASTNYADSVKGRFTISRDNAKNTVYLQMNSLKPEDTAVYYCAVDGNTYFALGYWGQGTQVTVSS

SEQ ID NO: 10976 - protein, 120 aa, Artificial Sequence
  Chemically Synthesized
QVQLQESGGGLVQAGGSLRLSCAASGTISFNLRMGWYRQAPGKERELVAGIGFGTNTYYADSVKGRFTISRDNAKNTVYLQMNSLKPEDTAVYYCAVTSADIYGDYFPYWGQGTQVTVSS

SEQ ID NO: 10977 - protein, 126 aa, Artificial Sequence
  Chemically Synthesized
QVQLQESGGGLVQAGGSLRLSCAASGTIFWTGWMGWYRQAPGKEREFVATIGNGTITYYADSVKGRFTISRDNAKNTVYLQMNSLKPEDTAVYYCAVKARSKWYPYRGSYNTYRYWGQGTQVTVSS

SEQ ID NO: 10978 - protein, 118 aa, Artificial Sequence
  Chemically Synthesized
QVQLQESGGGLVQAGGSLRLSCAASGYISYQGIMGWYRQAPGKERELVASISYGSNTYYADSVKGRFTISRDNAKNTVYLQMNSLKPEDTAVYYCAVYYWRQGNLGYWGQGTQVTVSS

SEQ ID NO: 10979 - protein, 126 aa, Artificial Sequence
  Chemically Synthesized
QVQLQESGGGLVQAGGSLRLSCAASGNIFRRYYMGWYRQAPGKERELVATIGRGSTTNYADSVKGRFTISRDNAKNTVYLQMNSLKPEDTAVYYCAARYYGWRYQSDGYYHAHLYWGQGTQVTVSS

SEQ ID NO: 10980 - protein, 118 aa, Artificial Sequence
  Chemically Synthesized
QVQLQESGGGLVQAGGSLRLSCAASGSIFRKRSMGWYRQAPGKEREFVAAITWGTNTYYADSVKGRFTISRDNAKNTVYLQMNSLKPEDTAVYYCAVQEWRYGSHAYWGQGTQVTVSS

SEQ ID NO: 10981 - protein, 122 aa, Artificial Sequence
  Chemically Synthesized
QVQLQESGGGLVQAGGSLRLSCAASGNISDTVGMGWYRQAPGKEREFVATITYGGSTYYADSVKGRFTISRDNAKNTVYLQMNSLKPEDTAVYYCAARDSGGHGDYSYHSYWGQGTQVTVSS

SEQ ID NO: 10982 - protein, 126 aa, Artificial Sequence
  Chemically Synthesized
QVQLQESGGGLVQAGGSLRLSCAASGTISQVRRMGWYRQAPGKEREFVATIARGTTTNYADSVKGRFTISRDNAKNTVYLQMNSLKPEDTAVYYCAAYYDWQTLSRYDGGFRFRYWGQGTQVTVSS

SEQ ID NO: 10983 - protein, 118 aa, Artificial Sequence
  Chemically Synthesized
QVQLQESGGGLVQAGGSLRLSCAASGSISRRQKMGWYRQAPGKEREFVATISYGSTTYYADSVKGRFTISRDNAKNTVYLQMNSLKPEDTAVYYCAARRYYDQRHTYWGQGTQVTVSS

SEQ ID NO: 10984 - protein, 126 aa, Artificial Sequence
  Chemically Synthesized
QVQLQESGGGLVQAGGSLRLSCAASGSIFTSPAMGWYRQAPGKEREFVASITRGSITYYADSVKGRFTISRDNAKNTVYLQMNSLKPEDTAVYYCAAYYRTYQYVWYGTREHHFYWGQGTQVTVSS

SEQ ID NO: 10985 - protein, 126 aa, Artificial Sequence
  Chemically Synthesized
QVQLQESGGGLVQAGGSLRLSCAASGSISGFAYMGWYRQAPGKERELVAAITGGATTYYADSVKGRFTISRDNAKNTVYLQMNSLKPEDTAVYYCAVRSAPYSWYVADVTTRLGYWGQGTQVTVSS

SEQ ID NO: 10986 - protein, 119 aa, Artificial Sequence
  Chemically Synthesized
QVQLQESGGGLVQAGGSLRLSCAASGTIFPTRSMGWYRQAPGKEREFVASISTGATTYYADSVKGRFTISRDNAKNTVYLQMNSLKPEDTAVYYCAARTRRRYYTHVYWGQGTQVTVSS

SEQ ID NO: 10987 - protein, 118 aa, Artificial Sequence
  Chemically Synthesized
QVQLQESGGGLVQAGGSLRLSCAASGNIFVTRRMGWYRQAPGKEREFVAGISRGSITNYADSVKGRFTISRDNAKNTVYLQMNSLKPEDTAVYYCAAWGWYYYPHTYWGQGTQVTVSS

SEQ ID NO: 10988 - protein, 118 aa, Artificial Sequence
  Chemically Synthesized
QVQLQESGGGLVQAGGSLRLSCAASGTIFGSDPMGWYRQAPGKERELVASITDGSITNYADSVKGRFTISRDNAKNTVYLQMNSLKPEDTAVYYCAVESYTNVDLLYWGQGTQVTVSS

SEQ ID NO: 10989 - protein, 125 aa, Artificial Sequence
  Chemically Synthesized
QVQLQESGGGLVQAGGSLRLSCAASGTIFGPYDMGWYRQAPGKERELVASIGVGAITNYADSVKGRFTISRDNAKNTVYLQMNSLKPEDTAVYYCAAYYYAGTAYRRVDVTFPYWGQGTQVTVSS

SEQ ID NO: 10990 - protein, 120 aa, Artificial Sequence
  Chemically Synthesized
QVQLQESGGGLVQAGGSLRLSCAASGYIFPTLDMGWYRQAPGKERELVASITKGAITYYADSVKGRFTISRDNAKNTVYLQMNSLKPEDTAVYYCAVDYFVITPYNYAYWGQGTQVTVSS

SEQ ID NO: 10991 - protein, 118 aa, Artificial Sequence
  Chemically Synthesized
QVQLQESGGGLVQAGGSLRLSCAASGNIFYVPIMGWYRQAPGKEREFVAAITRGASTNYADSVKGRFTISRDNAKNTVYLQMNSLKPEDTAVYYCAVRRLRAKNFVYWGQGTQVTVSS

SEQ ID NO: 10992 - protein, 124 aa, Artificial Sequence
  Chemically Synthesized
QVQLQESGGGLVQAGGSLRLSCAASGNISWYYNMGWYRQAPGKEREFVAAINYGTTTYYADSVKGRFTISRDNAKNTVYLQMNSLKPEDTAVYYCAARRRPSNNSDRYRSHDYWGQGTQVTVSS

SEQ ID NO: 10993 - protein, 118 aa, Artificial Sequence
  Chemically Synthesized
QVQLQESGGGLVQAGGSLRLSCAASGNISTRWKMGWYRQAPGKERELVASISRGGTTYYADSVKGRFTISRDNAKNTVYLQMNSLKPEDTAVYYCAVYYLGWPNFNYWGQGTQVTVSS

SEQ ID NO: 10994 - protein, 118 aa, Artificial Sequence
  Chemically Synthesized
QVQLQESGGGLVQAGGSLRLSCAASGTISRGKYMGWYRQAPGKEREFVAGIGAGGSTYYADSVKGRFTISRDNAKNTVYLQMNSLKPEDTAVYYCAARVRYYYRYYYWGQGTQVTVSS

SEQ ID NO: 10995 - protein, 118 aa, Artificial Sequence
  Chemically Synthesized
QVQLQESGGGLVQAGGSLRLSCAASGNISNRADMGWYRQAPGKEREFVAGISVGTSTYYADSVKGRFTISRDNAKNTVYLQMNSLKPEDTAVYYCAVRRYYRWYHEYWGQGTQVTVSS

SEQ ID NO: 10996 - protein, 118 aa, Artificial Sequence
  Chemically Synthesized
QVQLQESGGGLVQAGGSLRLSCAASGNIFADSYMGWYRQAPGKERELVAGIAEGAITNYADSVKGRFTISRDNAKNTVYLQMNSLKPEDTAVYYCAVRNAYLVSHDYWGQGTQVTVSS

SEQ ID NO: 10997 - protein, 122 aa, Artificial Sequence
  Chemically Synthesized
QVQLQESGGGLVQAGGSLRLSCAASGSIFSDYGMGWYRQAPGKERELVASIDYGGSTNYADSVKGRFTISRDNAKNTVYLQMNSLKPEDTAVYYCAAIKAAGFFFPYDHYYWGQGTQVTVSS

SEQ ID NO: 10998 - protein, 126 aa, Artificial Sequence
  Chemically Synthesized
QVQLQESGGGLVQAGGSLRLSCAASGYISLIYSMGWYRQAPGKEREFVAGITAGGITNYADSVKGRFTISRDNAKNTVYLQMNSLKPEDTAVYYCAVTWPSYHQDAIDIYYVYDYWGQGTQVTVSS

SEQ ID NO: 10999 - protein, 118 aa, Artificial Sequence
  Chemically Synthesized
QVQLQESGGGLVQAGGSLRLSCAASGNISRTYRMGWYRQAPGKERELVAAIGAGGSTYYADSVKGRFTISRDNAKNTVYLQMNSLKPEDTAVYYCAAYRWWRYRLPYWGQGTQVTVSS

SEQ ID NO: 11000 - protein, 118 aa, Artificial Sequence
  Chemically Synthesized
QVQLQESGGGLVQAGGSLRLSCAASGTISGHYAMGWYRQAPGKERELVASISYGGITNYADSVKGRFTISRDNAKNTVYLQMNSLKPEDTAVYYCAVRFAWRWRHSYWGQGTQVTVSS

SEQ ID NO: 11001 - protein, 117 aa, Artificial Sequence
  Chemically Synthesized
QVQLQESGGGLVQAGGSLRLSCAASGSISQRRYMGWYRQAPGKEREFVAAIGGGITNYADSVKGRFTISRDNAKNTVYLQMNSLKPEDTAVYYCAARPWYWVYLRYWGQGTQVTVSS

SEQ ID NO: 11002 - protein, 118 aa, Artificial Sequence
  Chemically Synthesized
QVQLQESGGGLVQAGGSLRLSCAASGTIFVQVVMGWYRQAPGKEREFVAGITGGGITYYADSVKGRFTISRDNAKNTVYLQMNSLKPEDTAVYYCAVDRLQDTPHAYWGQGTQVTVSS

SEQ ID NO: 11003 - protein, 125 aa, Artificial Sequence
  Chemically Synthesized
QVQLQESGGGLVQAGGSLRLSCAASGYIFYPYYMGWYRQAPGKERELVAAIAGGSSTNYADSVKGRFTISRDNAKNTVYLQMNSLKPEDTAVYYCAVASRRPKSWIPFYKPFGYWGQGTQVTVSS

SEQ ID NO: 11004 - protein, 122 aa, Artificial Sequence
  Chemically Synthesized
QVQLQESGGGLVQAGGSLRLSCAASGYIFKRAQMGWYRQAPGKEREFVASINDGGSTYYADSVKGRFTISRDNAKNTVYLQMNSLKPEDTAVYYCAVPKSADGGSYVGYVYWGQGTQVTVSS

SEQ ID NO: 11005 - protein, 126 aa, Artificial Sequence
  Chemically Synthesized
QVQLQESGGGLVQAGGSLRLSCAASGNISGYGVMGWYRQAPGKERELVAGIASGTTTNYADSVKGRFTISRDNAKNTVYLQMNSLKPEDTAVYYCAATIQFRTRYYWWQRVQHVYWGQGTQVTVSS

SEQ ID NO: 11006 - protein, 118 aa, Artificial Sequence
  Chemically Synthesized
QVQLQESGGGLVQAGGSLRLSCAASGYIFRKRYMGWYRQAPGKERELVAAIALGSTTNYADSVKGRFTISRDNAKNTVYLQMNSLKPEDTAVYYCAASNWWRWRHTYWGQGTQVTVSS

SEQ ID NO: 11007 - protein, 123 aa, Artificial Sequence
  Chemically Synthesized
QVQLQESGGGLVQAGGSLRLSCAASGTISSRRYMGWYRQAPGKERELVATIGKGSTTYYADSVKGRFTISRDNAKNTVYLQMNSLKPEDTAVYYCAARWYRYIYPDAYYYRYWGQGTQVTVSS

SEQ ID NO: 11008 - protein, 118 aa, Artificial Sequence
  Chemically Synthesized
QVQLQESGGGLVQAGGSLRLSCAASGSISTTRSMGWYRQAPGKEREFVATITLRGTTYYADSVKGRFTISRDNAKNTVYLQMNSLKPEDTAVYYCAVRYFRSQRFVYWGQGTQVTVSS

SEQ ID NO: 11009 - protein, 122 aa, Artificial Sequence
  Chemically Synthesized
QVQLQESGGGLVQAGGSLRLSCAASGNIFARYRMGWYRQAPGKERELVASITAGASTNYADSVKGRFTISRDNAKNTVYLQMNSLKPEDTAVYYCAAGSPVYTYGWLYHYYWGQGTQVTVSS

SEQ ID NO: 11010 - protein, 118 aa, Artificial Sequence
  Chemically Synthesized
QVQLQESGGGLVQAGGSLRLSCAASGTIFTNPAMGWYRQAPGKEREFVATIGYGSTTYYADSVKGRFTISRDNAKNTVYLQMNSLKPEDTAVYYCAVYYWKYYQYVYWGQGTQVTVSS

SEQ ID NO: 11011 - protein, 118 aa, Artificial Sequence
  Chemically Synthesized
QVQLQESGGGLVQAGGSLRLSCAASGTISAWLRMGWYRQAPGKERELVAAINFGTNTNYADSVKGRFTISRDNAKNTVYLQMNSLKPEDTAVYYCAVPAQHAGSFNYWGQGTQVTVSS

SEQ ID NO: 11012 - protein, 116 aa, Artificial Sequence
  Chemically Synthesized
QVQLQESGGGLVQAGGSLRLSCAASGTISSVDAMGWYRQAPGKERELVAAIGTGTITNYADSVKGRFTISRDNAKNTVYLQMNSLKPEDTAVYYCAVVDPQYHIYWGQGTQVTVSS

SEQ ID NO: 11013 - protein, 118 aa, Artificial Sequence
  Chemically Synthesized
QVQLQESGGGLVQAGGSLRLSCAASGTIFDVEYMGWYRQAPGKEREFVAAISFGAITYYADSVKGRFTISRDNAKNTVYLQMNSLKPEDTAVYYCAVHYYQSRSHFYWGQGTQVTVSS

SEQ ID NO: 11014 - protein, 118 aa, Artificial Sequence
  Chemically Synthesized
QVQLQESGGGLVQAGGSLRLSCAASGNIFYADSMGWYRQAPGKERELVASIGTGGNTYYADSVKGRFTISRDNAKNTVYLQMNSLKPEDTAVYYCAADVNGYLQFYYWGQGTQVTVSS

SEQ ID NO: 11015 - protein, 121 aa, Artificial Sequence
  Chemically Synthesized
QVQLQESGGGLVQAGGSLRLSCAASGNISYNASMGWYRQAPGKERELVAAISGGTITYYADSVKGRFTISRDNAKNTVYLQMNSLKPEDTAVYYCAAASDWGYTSDGPCYWGQGTQVTVSS

SEQ ID NO: 11016 - protein, 117 aa, Artificial Sequence
  Chemically Synthesized
QVQLQESGGGLVQAGGSLRLSCAASGSIFLTVAMGWYRQAPGKERELVATIATGAIPYADSVKGRFTISRDNAKNTVYLQMNSLKPEDTAVYYCAADNDVYYGFSYWGQGTQVTVSS

SEQ ID NO: 11017 - protein, 109 aa, Artificial Sequence
  Chemically Synthesized
QVQLQESGGGLVQAGGSLRLSCAASGYISYDSLMGWYRQAPGKERELVAAIDQGSSTYYADSVKGRFTISRDNAKNTVYLQMNSLKPEDTAVYYCAVYWGQGTQVTVSS

SEQ ID NO: 11018 - protein, 126 aa, Artificial Sequence
  Chemically Synthesized
QVQLQESGGGLVQAGGSLRLSCAASGYISDLTFMGWYRQAPGKERELVAGIDYGGSTNYADSVKGRFTISRDNAKNTVYLQMNSLKPEDTAVYYCAAVAGKYGPSGGGSTWQLSYWGQGTQVTVSS

SEQ ID NO: 11019 - protein, 118 aa, Artificial Sequence
  Chemically Synthesized
QVQLQESGGGLVQAGGSLRLSCAASGTIFRGNHMGWYRQAPGKEREFVASISSGASTYYADSVKGRFTISRDNAKNTVYLQMNSLKPEDTAVYYCAARRWYIYTHAYWGQGTQVTVSS

SEQ ID NO: 11020 - protein, 118 aa, Artificial Sequence
  Chemically Synthesized
QVQLQESGGGLVQAGGSLRLSCAASGNISTRYYMGWYRQAPGKERELVAGIGYGTSTNYADSVKGRFTISRDNAKNTVYLQMNSLKPEDTAVYYCAAPYYFSSGLAYWGQGTQVTVSS

SEQ ID NO: 11021 - protein, 118 aa, Artificial Sequence
  Chemically Synthesized
QVQLQESGGGLVQAGGSLRLSCAASGTISPVPYMGWYRQAPGKEREFVASITGGTITNYADSVKGRFTISRDNAKNTVYLQMNSLKPEDTAVYYCAAYKPSLYGHIYWGQGTQVTVSS

SEQ ID NO: 11022 - protein, 121 aa, Artificial Sequence
  Chemically Synthesized
QVQLQESGGGLVQAGGSLRLSCAASGTISRSLMGWYRQAPGKEREFVAGITYGANTNYADSVKGRFTISRDNAKNTVYLQMNSLKPEDTAVYYCAALIWGRYVRPYRHYYWGQGTQVTVSS

SEQ ID NO: 11023 - protein, 118 aa, Artificial Sequence
  Chemically Synthesized
QVQLQESGGGLVQAGGSLRLSCAASGNIFPWRYMGWYRQAPGKERELVAAIDPGSNTYYADSVKGRFTISRDNAKNTVYLQMNSLKPEDTAVYYCAADNTTRLAHTYWGQGTQVTVSS

SEQ ID NO: 11024 - protein, 121 aa, Artificial Sequence
  Chemically Synthesized
QVQLQESGGGLVQAGGSLRLSCAASGTISRPENMGWYRQAPGKEREFVATIADGATTNYADSVKGRFTISRDNAKNTVYLQMNSLKPEDTAVYYCAARNGDDDSTLTFIYWGQGTQVTVSS

SEQ ID NO: 11025 - protein, 122 aa, Artificial Sequence
  Chemically Synthesized
QVQLQESGGGLVQAGGSLRLSCAASGSISPPKDMGWYRQAPGKERELVAGIAYGSNTNYADSVKGRFTISRDNAKNTVYLQMNSLKPEDTAVYYCAADPDSGQYPGDYHDYWGQGTQVTVSS

SEQ ID NO: 11026 - protein, 106 aa, Artificial Sequence
  Chemically Synthesized
QVQLQESGGGLVQAGGSLRLSCAASGSIFPPVDMGWYRQAPGKEREPYADSVKGRFTISRDNAKNTVYLQMNSLKPEDTAVYYCAVYYSFVGLIYWGQGTQVTVSS

SEQ ID NO: 11027 - protein, 117 aa, Artificial Sequence
  Chemically Synthesized
QVQLQESGGGLVQAGGSLRLSCAASGNIFEPHYMGWYRQAPGKERELVATIAFGTITYYADSVKGRFTISRDNAKNTVYLQMNSLKPEDTAVYYCAARDLFLPHGYWGQGTQVTVSS

SEQ ID NO: 11028 - protein, 118 aa, Artificial Sequence
  Chemically Synthesized
QVQLQESGGGLVQAGGSLRLSCAASGTISNYLRMGWYRQAPGKEREFVATIAGGASTNYADSVKGRFTISRDNAKNTVYLQMNSLKPEDTAVYYCAAGRTHLAYLDYWGQGTQVTVSS

SEQ ID NO: 11029 - protein, 119 aa, Artificial Sequence
  Chemically Synthesized
QVQLQESGGGLVQAGGSLRLSCAASGSIFDFGDMGWYRQAPGKERELVATINTGGITNYADSVKGRFTISRDNAKNTVYLQMNSLKPEDTAVYYCAVDRYYVSRGFAYWGQGTQVTVSS

SEQ ID NO: 11030 - protein, 118 aa, Artificial Sequence
  Chemically Synthesized
QVQLQESGGGLVQAGGSLRLSCAASGTIFVSTFMGWYRQAPGKEREFVAAIAYGTTTNYADSVKGRFTISRDNAKNTVYLQMNSLKPEDTAVYYCAVYPGSNPYFAYWGQGTQVTVSS

SEQ ID NO: 11031 - protein, 118 aa, Artificial Sequence
  Chemically Synthesized
QVQLQESGGGLVQAGGSLRLSCAASGTISSNADMGWYRQAPGKEREFVAAIGPGSSTNYADSVKGRFTISRDNAKNTVYLQMNSLKPEDTAVYYCAADGQGGDRYPYWGQGTQVTVSS

SEQ ID NO: 11032 - protein, 117 aa, Artificial Sequence
  Chemically Synthesized
QVQLQESGGGLVQAGGSLRLSCAASGTISRVPYMGWYRQAPGKEREFVAGIDDGSNTNYADSVKGRFTISRDNAKNTVYLQMNSLKPEDTAVYYCAASQYAYDHAYWGQGTQVTVSS

SEQ ID NO: 11033 - protein, 118 aa, Artificial Sequence
  Chemically Synthesized
QVQLQESGGGLVQAGGSLRLSCAASGYISSLWFMGWYRQAPGKERELVAGITQGASTNYADSVKGRFTISRDNAKNTVYLQMNSLKPEDTAVYYCAVHYPYYYGYGYWGQGTQVTVSS

SEQ ID NO: 11034 - protein, 121 aa, Artificial Sequence
  Chemically Synthesized
QVQLQESGGGLVQAGGSLRLSCAASGSIFHRMGWYRQAPGKEREFVAAINDGATTYYADSVKGRFTISRDNAKNTVYLQMNSLKPEDTAVYYCAVGYGSYYPDDATAHEYWGQGTQVTVSS

SEQ ID NO: 11035 - protein, 125 aa, Artificial Sequence
  Chemically Synthesized
QVQLQESGGGLVQAGGSLRLSCAASGSISPRYRMGWYRQAPGKERELVASIILVVLPYADSVKGRFTISRDNAKNTVYLQMNSLKPEDTAVYYCAVYPGNLQEYWGYLKWYYLYWGQGTQVTVSS

SEQ ID NO: 11036 - protein, 114 aa, Artificial Sequence
  Chemically Synthesized
QVQLQESGGGLVQAGGSLRLSCAASGSIFDQYYMGWYRQAPGKERELLPGTNTYYADSVKGRFTISRDNAKNTVYLQMNSLKPEDTAVYYCAVGYDDNDDYPYWGQGTQVTVSS

SEQ ID NO: 11037 - protein, 118 aa, Artificial Sequence
  Chemically Synthesized
QVQLQESGGGLVQAGGSLRLSCAASGNISYTLLMGWYRQAPGKEREFVAAIDYGTSTNYADSVKGRFTISRDNAKNTVYLQMNSLKPEDTAVYYCAADSLTVSYLPYWGQGTQVTVSS

SEQ ID NO: 11038 - protein, 116 aa, Artificial Sequence
  Chemically Synthesized
QVQLQESGGGLVQAGGSLRLSCAASGTISSVDAMGWYRQAPGKEREFVAAISFGAITYYADSVKGRFTISRDNAKNTVYLQMNSLKPEDTAVYYCAVVDPQYHIYWGQGTQVTVSS

SEQ ID NO: 11039 - protein, 118 aa, Artificial Sequence
  Chemically Synthesized
QVQLQESGGGLVQAGGSLRLSCAASGNIFQVYGMGWYRQAPGKEREFVAGINNGSSTYYADSVKGRFTISRDNAKNTVYLQMNSLKPEDTAVYYCAAWLDWDDLHQYWGQGTQVTVSS

SEQ ID NO: 11040 - protein, 117 aa, Artificial Sequence
  Chemically Synthesized
QVQLQESGGGLVQAGGSLRLSCAASGTIFVLSMGWYRQAPGKERELVATITRGAITNYADSVKGRFTISRDNAKNTVYLQMNSLKPEDTAVYYCAVYLQAVVYYYYWGQGTQVTVSS

SEQ ID NO: 11041 - protein, 118 aa, Artificial Sequence
  Chemically Synthesized
QVQLQESGGGLVQAGGSLRLSCAASGNIFTRTTMGWYRQAPGKERELVAGIDNGSNTYYADSVKGRFTISRDNAKNTVYLQMNSLKPEDTAVYYCAVGYYGDDWYYYWGQGTQVTVSS

SEQ ID NO: 11042 - protein, 126 aa, Artificial Sequence
  Chemically Synthesized
QVQLQESGGGLVQAGGSLRLSCAASGSISNGTWMGWYRQAPGKEREFVAAIDVGTSTYYADSVKGRFTISRDNAKNTVYLQMNSLKPEDTAVYYCAVYYDLLYVKAARYYVYHPYWGQGTQVTVSS

SEQ ID NO: 11043 - protein, 121 aa, Artificial Sequence
  Chemically Synthesized
QVQLQESGGGLVQAGGSLRLSCAASGTIFRISMGWYRQAPGKEREFVATISYGSNTNYADSVKGRFTISRDNAKNTVYLQMNSLKPEDTAVYYCAVVPGRGDVSQGRLYYWGQGTQVTVSS

SEQ ID NO: 11044 - protein, 118 aa, Artificial Sequence
  Chemically Synthesized
QVQLQESGGGLVQAGGSLRLSCAASGTISSVDAMGWYRQAPGKERELVAAIGTGTITNYADSVKGRFTISRDNAKNTVYLQMNSLKPEDTAVYYCAVHYYQSRSHVYWGQGTQVTVSS

SEQ ID NO: 11045 - protein, 118 aa, Artificial Sequence
  Chemically Synthesized
QVQLQESGGGLVQAGGSLRLSCAASGSIFSYTFMGWYRQAPGKERELVATISWGATTNYADSVKGRFTISRDNAKNTVYLQMNSLKPEDTAVYYCAVYYGTLDGHRYWGQGTQVTVSS

SEQ ID NO: 11046 - protein, 118 aa, Artificial Sequence
  Chemically Synthesized
QVQLQESGGGLVQAGGSLRLSCAASGSISRRYAMGWYRQAPGKERELVAAIGSGAITNYADSVKGRFTISRDNAKNTVYLQMNSLKPEDTAVYYCAVDVYDHGVLDYWGQGTQVTVSS

SEQ ID NO: 11047 - protein, 122 aa, Artificial Sequence
  Chemically Synthesized
QVQLQESGGGLVQAGGSLRLSCAASGYISYTSIMGWYRQAPGKEREFVAAINVGGTTYYADSVKGRFTISRDNAKNTVYLQMNSLKPEDTAVYYCAVRPHYRDSKTYNHRYWGQGTQVTVSS

SEQ ID NO: 11048 - protein, 118 aa, Artificial Sequence
  Chemically Synthesized
QVQLQESGGGLVQAGGSLRLSCAASGNIFDIGQMGWYRQAPGKERELVASIGLGSTTYYADSVKGRFTISRDNAKNTVYLQMNSLKPEDTAVYYCAAYQNAGGYHDYWGQGTQVTVSS

SEQ ID NO: 11049 - protein, 118 aa, Artificial Sequence
  Chemically Synthesized
QVQLQESGGGLVQAGGSLRLSCAASGSISRRIQMGWYRQAPGKEREFVAAISWGSNTYYADSVKGRFTISRDNAKNTVYLQMNSLKPEDTAVYYCAVRGYGVGKYYYWGQGTQVTVSS

SEQ ID NO: 11050 - protein, 118 aa, Artificial Sequence
  Chemically Synthesized
QVQLQESGGGLVQAGGSLRLSCAASGNIFVSWYMGWYRQAPGKEREFVAGINYGASTNYADSVKGRFTISRDNAKNTVYLQMNSLKPEDTAVYYCAVQGVTYSQFVYWGQGTQVTVSS

SEQ ID NO: 11051 - protein, 118 aa, Artificial Sequence
  Chemically Synthesized
QVQLQESGGGLVQAGGSLRLSCAASGTIFWSYVMGWYRQAPGKEREFVAAISYGASTYYADSVKGRFTISRDNAKNTVYLQMNSLKPEDTAVYYCAARRYSYPYLTYWGQGTQVTVSS

SEQ ID NO: 11052 - protein, 126 aa, Artificial Sequence
  Chemically Synthesized
QVQLQESGGGLVQAGGSLRLSCAASGNISGWQDMGWYRQAPGKERELVASIANGGNTYYADSVKGRFTISRDNAKNTVYLQMNSLKPEDTAVYYCAVVIVRYYFNAIGQGSGHQYWGQGTQVTVSS

SEQ ID NO: 11053 - protein, 118 aa, Artificial Sequence
  Chemically Synthesized
QVQLQESGGGLVQAGGSLRLSCAASGTIFWDTYMGWYRQAPGKERELVASITAGGTTYYADSVKGRFTISRDNAKNTVYLQMNSLKPEDTAVYYCAAIAKDLLYLGYWGQGTQVTVSS

SEQ ID NO: 11054 - protein, 118 aa, Artificial Sequence
  Chemically Synthesized
QVQLQESGGGLVQAGGSLRLSCAASGNISGTYTMGWYRQAPGKERELVAGIGYGGITYYADSVKGRFTISRDNAKNTVYLQMNSLKPEDTAVYYCAVGLAGSNPHFYWGQGTQVTVSS

SEQ ID NO: 11055 - protein, 117 aa, Artificial Sequence
  Chemically Synthesized
QVQLQESGGGLVQAGGSLRLSCAASGTIFTLTMGWYRQAPGKERELVAGIDAGTTTYYADSVKGRFTISRDNAKNTVYLQMNSLKPEDTAVYYCAAYPSATRYYAYWGQGTQVTVSS

SEQ ID NO: 11056 - protein, 122 aa, Artificial Sequence
  Chemically Synthesized
QVQLQESGGGLVQAGGSLRLSCAASGYISEYLYMGWYRQAPGKERELVATISKGTNTYYADSVKGRFTISRDNAKNTVYLQMNSLKPEDTAVYYCAVTKYSGGTGLWNYDYWGQGTQVTVSS

SEQ ID NO: 11057 - protein, 118 aa, Artificial Sequence
  Chemically Synthesized
QVQLQESGGGLVQAGGSLRLSCAASGYIFYPNVMGWYRQAPGKERELVATINNGANTNYADSVKGRFTISRDNAKNTVYLQMNSLKPEDTAVYYCAAYDYRLARHDYWGQGTQVTVSS

SEQ ID NO: 11058 - protein, 117 aa, Artificial Sequence
  Chemically Synthesized
QVQLQESGGGLVQAGGSLRLSCAASGNISGWDFMGWYRQAPGKEREFVPVLVTVVVPYADSVKGRFTISRDNAKNTVYLQMNSLKPEDTAVYYCAVPPFYTADHVYWGQGTQVTVSS

SEQ ID NO: 11059 - protein, 117 aa, Artificial Sequence
  Chemically Synthesized
QVQLQESGGGLVQAGGSLRLSCAASGYISPYLMGWYRQAPGKERELVASIDSGATTNYADSVKGRFTISRDNAKNTVYLQMNSLKPEDTAVYYCAVSYYDLAPYGYWGQGTQVTVSS

SEQ ID NO: 11060 - protein, 126 aa, Artificial Sequence
  Chemically Synthesized
QVQLQESGGGLVQAGGSLRLSCAASGSISTDSSMGWYRQAPGKERELVATITRGSNTNYADSVKGRFTISRDNAKNTVYLQMNSLKPEDTAVYYCAVSDQQRRDYASVATTALYYWGQGTQVTVSS

SEQ ID NO: 11061 - protein, 118 aa, Artificial Sequence
  Chemically Synthesized
QVQLQESGGGLVQAGGSLRLSCAASGTISSDFYMGWYRQAPGKEREFVAAIDPGGTTYYADSVKGRFTISRDNAKNTVYLQMNSLKPEDTAVYYCAVALYGRRYHAYWGQGTQVTVSS

SEQ ID NO: 11062 - protein, 117 aa, Artificial Sequence
  Chemically Synthesized
QVQLQESGGGLVQAGGSLRLSCAASGYIFGPGRMGWYRQAPGKERELVATIDTGANTNYADSVKGRFTISRDNAKNTVYLQMNSLKPEDTAVYYCAAGSLRTGPGYWGQGTQVTVSS

SEQ ID NO: 11063 - protein, 126 aa, Artificial Sequence
  Chemically Synthesized
QVQLQESGGGLVQAGGSLRLSCAASGTIFTGSAMGWYRQAPGKERELVASIAGGGITYYADSVKGRFTISRDNAKNTVYLQMNSLKPEDTAVYYCAAYPWQQYYYYVSSVRQYYYWGQGTQVTVSS

SEQ ID NO: 11064 - protein, 121 aa, Artificial Sequence
  Chemically Synthesized
QVQLQESGGGLVQAGGSLRLSCAASGNISYSTYMGWYRQAPGKEREFVATIDDGGNTYADSVKGRFTISRDNAKNTVYLQMNSLKPEDTAVYYCAAYYVLDYYYVLYLYYWGQGTQVTVSS

SEQ ID NO: 11065 - protein, 118 aa, Artificial Sequence
  Chemically Synthesized
QVQLQESGGGLVQAGGSLRLSCAASGNIFLRDTMGWYRQAPGKEREFVASIGYGTTTNYADSVKGRFTISRDNAKNTVYLQMNSLKPEDTAVYYCAVLIGYRRRHAYWGQGTQVTVSS

SEQ ID NO: 11066 - protein, 121 aa, Artificial Sequence
  Chemically Synthesized
QVQLQESGGGLVQAGGSLRLSCAASGYIFDDPDMGWYRQAPGKEREFVASINDGSTPYADSVKGRFTISRDNAKNTVYLQMNSLKPEDTAVYYCAVYSYFIIYAIDQHRYWGQGTQVTVSS

SEQ ID NO: 11067 - protein, 118 aa, Artificial Sequence
  Chemically Synthesized
QVQLQESGGGLVQAGGSLRLSCAASGTISPNYTMGWYRQAPGKERELVAGIGYGGITYYADSVKGRFTISRDNAKNTVYLQMNSLKPEDTAVYYCAAQQSGRLDYGYWGQGTQVTVSS

SEQ ID NO: 11068 - protein, 118 aa, Artificial Sequence
  Chemically Synthesized
QVQLQESGGGLVQAGGSLRLSCAASGSISYEDDMGWYRQAPGKEREFVAAIAYGATTNYADSVKGRFTISRDNAKNTVYLQMNSLKPEDTAVYYCAAPAYYAGYYRYWGQGTQVTVSS

SEQ ID NO: 11069 - protein, 122 aa, Artificial Sequence
  Chemically Synthesized
QVQLQESGGGLVQAGGSLRLSCAASGYISAFAYMGWYRQAPGKEREFVAAITYGAITNYADSVKGRFTISRDNAKNTVYLQMNSLKPEDTAVYYCAARYNSRTVDDGGFDYWGQGTQVTVSS

SEQ ID NO: 11070 - protein, 117 aa, Artificial Sequence
  Chemically Synthesized
QVQLQESGGGLVQAGGSLRLSCAASGTIFTEYVMGWYRQAPGKERELVASIAVGSTTYYADSVKGRFTISRDNAKNTVYLQMNSLKPEDTAVYYCATTFRNASSIYWGQGTQVTVSS

SEQ ID NO: 11071 - protein, 118 aa, Artificial Sequence
  Chemically Synthesized
QVQLQESGGGLVQAGGSLRLSCAASGYIFGYINMGWYRQAPGKEREFVASITHGGSTNYADSVKGRFTISRDNAKNTVYLQMNSLKPEDTAVYYCAVYTIGYSTHSYWGQGTQVTVSS

SEQ ID NO: 11072 - protein, 111 aa, Artificial Sequence
  Chemically Synthesized
QVQLQESGGGLVQAGGSLRLSCAASGNISQSYVMGWYRQAPGKERELVATIDEGGTTNYADSVKGRFTISRDNAKNTVYLQMNSLKPEDTAVYYCAATNYWGQGTQVTVSS

SEQ ID NO: 11073 - protein, 122 aa, Artificial Sequence
  Chemically Synthesized
QVQLQESGGGLVQAGGSLRLSCAASGTISRLRYMGWYRQAPGKERELVLVVLLMVLLPYADSVKGRFTISRDNAKNTVYLQMNSLKPEDTAVYYCAVVTFRRGEYGRGHRYWGQGTQVTVSS

SEQ ID NO: 11074 - protein, 122 aa, Artificial Sequence
  Chemically Synthesized
QVQLQESGGGLVQAGGSLRLSCAASGTISSIVGMGWYRQAPGKEREFVAAIGSGGITYYADSVKGRFTISRDNAKNTVYLQMNSLKPEDTAVYYCAAIYGYDSYQYELLTYWGQGTQVTVSS

SEQ ID NO: 11075 - protein, 126 aa, Artificial Sequence
  Chemically Synthesized
QVQLQESGGGLVQAGGSLRLSCAASGYIFPISYMGWYRQAPGKEREFVASITGGSSTNYADSVKGRFTISRDNAKNTVYLQMNSLKPEDTAVYYCAAGKLLYAYAQSGNGVTYVYWGQGTQVTVSS

SEQ ID NO: 11076 - protein, 110 aa, Artificial Sequence
  Chemically Synthesized
QVQLQESGGGLVQAGGSLRLSCAASGSIFAIYTMGWYRQAPGKERELVATIAVGGTTNYADSVKGRFTISRDNAKNTVYLQMNSLKPEDTAVYYCAAMYWGQGTQVTVSS

SEQ ID NO: 11077 - protein, 122 aa, Artificial Sequence
  Chemically Synthesized
QVQLQESGGGLVQAGGSLRLSCAASGYISPANYMGWYRQAPGKEREFVAGITAGASTYYADSVKGRFTISRDNAKNTVYLQMNSLKPEDTAVYYCAVRYAEQYYFSYTHTYWGQGTQVTVSS

SEQ ID NO: 11078 - protein, 111 aa, Artificial Sequence
  Chemically Synthesized
QVQLQESGGGLVQAGGSLRLSCAASGTISQSPVMGWYRQAPGKERELVATIGSGSSTYYADSVKGRFTISRDNAKNTVYLQMNSLKPEDTAVYYCAVTMYWGQGTQVTVSS

SEQ ID NO: 11079 - protein, 118 aa, Artificial Sequence
  Chemically Synthesized
QVQLQESGGGLVQAGGSLRLSCAASGYIFYVVVMGWYRQAPGKERELVAGIDGGGITYYADSVKGRFTISRDNAKNTVYLQMNSLKPEDTAVYYCAAYKPDPSGFYYWGQGTQVTVSS

SEQ ID NO: 11080 - protein, 124 aa, Artificial Sequence
  Chemically Synthesized
QVQLQESGGGLVQAGGSLRLSCAASGNIDQRNMGWYRQAPGKERELVAGINFGTTTYYADSVKGRFTISRDNAKNTVYLQMNSLKPEDTAVYYCAAWYYYYIGEAFQTGDYSYWGQGTQVTVSS

SEQ ID NO: 11081 - protein, 118 aa, Artificial Sequence
  Chemically Synthesized
QVQLQESGGGLVQAGGSLRLSCAASGTIFVLLIMGWYRQAPGKERELVASIGYGGITNYADSVKGRFTISRDNAKNTVYLQMNSLKPEDTAVYYCAAYSAYVVHLSYWGQGTQVTVSS

SEQ ID NO: 11082 - protein, 122 aa, Artificial Sequence
  Chemically Synthesized
QVQLQESGGGLVQAGGSLRLSCAASGYISTYQIMGWYRQAPGKERELVATIDEGGITYYADSVKGRFTISRDNAKNTVYLQMNSLKPEDTAVYYCAAYGWGYAGFTSRYNYWGQGTQVTVSS

SEQ ID NO: 11083 - protein, 118 aa, Artificial Sequence
  Chemically Synthesized
QVQLQESGGGLVQAGGSLRLSCAASGTISGLGYMGWYRQAPGKERELVAAISVGGSTYYADSVKGRFTISRDNAKNTVYLQMNSLKPEDTAVYYCAVFYSDSGFHYYWGQGTQVTVSS

SEQ ID NO: 11084 - protein, 117 aa, Artificial Sequence
  Chemically Synthesized
QVQLQESGGGLVQAGGSLRLSCAASGSISGYDMGWYRQAPGKEREFVAGIARGGNTYYADSVKGRFTISRDNAKNTVYLQMNSLKPEDTAVYYCAAPITLNGAHPYWGQGTQVTVSS

SEQ ID NO: 11085 - protein, 118 aa, Artificial Sequence
  Chemically Synthesized
QVQLQESGGGLVQAGGSLRLSCAASGNIFTLLRMGWYRQAPGKERELVATIDGGATTNYADSVKGRFTISRDNAKNTVYLQMNSLKPEDTAVYYCAAAVYGYPGHWYWGQGTQVTVSS

SEQ ID NO: 11086 - protein, 118 aa, Artificial Sequence
  Chemically Synthesized
QVQLQESGGGLVQAGGSLRLSCAASGNISSHDRMGWYRQAPGKEREFVATISPGSSTYYADSVKGRFTISRDNAKNTVYLQMNSLKPEDTAVYYCAATRGTQRDHAYWGQGTQVTVSS

SEQ ID NO: 11087 - protein, 116 aa, Artificial Sequence
  Chemically Synthesized
QVQLQESGGGLVQAGGSLRLSCAASGTIFRDPMGWYRQAPGKEREFVALLLTVLLPYADSVKGRFTISRDNAKNTVYLQMNSLKPEDTAVYYCAVRSTNLVDHYYWGQGTQVTVSS

SEQ ID NO: 11088 - protein, 126 aa, Artificial Sequence
  Chemically Synthesized
QVQLQESGGGLVQAGGSLRLSCAASGSIFGRPSMGWYRQAPGKERELVATITTGGTTNYADSVKGRFTISRDNAKNTVYLQMNSLKPEDTAVYYCAVDADASLGRIRLRSGCSYYWGQGTQVTVSS

SEQ ID NO: 11089 - protein, 126 aa, Artificial Sequence
  Chemically Synthesized
QVQLQESGGGLVQAGGSLRLSCAASGTISPVNQMGWYRQAPGKEREFVASINIGASTYYADSVKGRFTISRDNAKNTVYLQMNSLKPEDTAVYYCAVYNYDYSSDGPYFYYSHAYWGQGTQVTVSS

SEQ ID NO: 11090 - protein, 121 aa, Artificial Sequence
  Chemically Synthesized
QVQLQESGGGLVQAGGSLRLSCAASGTIFDDVQMGWYRQAPGKEREFVAAITDVVVPYADSVKGRFTISRDNAKNTVYLQMNSLKPEDTAVYYCAADWHTPSYAYIFLLYWGQGTQVTVSS

SEQ ID NO: 11091 - protein, 126 aa, Artificial Sequence
  Chemically Synthesized
QVQLQESGGGLVQAGGSLRLSCAASGSISLYGDMGWYRQAPGKERELVASIDVGTTTYYADSVKGRFTISRDNAKNTVYLQMNSLKPEDTAVYYCAAYYPADSYYAYYYYWRHWYWGQGTQVTVSS

SEQ ID NO: 11092 - protein, 118 aa, Artificial Sequence
  Chemically Synthesized
QVQLQESGGGLVQAGGSLRLSCAASGNIFAELHMGWYRQAPGKERELVAAIDYGASTYYADSVKGRFTISRDNAKNTVYLQMNSLKPEDTAVYYCAAGGTSYADFGYWGQGTQVTVSS

SEQ ID NO: 11093 - protein, 118 aa, Artificial Sequence
  Chemically Synthesized
QVQLQESGGGLVQAGGSLRLSCAASGTIFPWGPMGWYRQAPGKEREFVAGITSGSNTNYADSVKGRFTISRDNAKNTVYLQMNSLKPEDTAVYYCAAPRPLPPTLAYWGQGTQVTVSS

SEQ ID NO: 11094 - protein, 126 aa, Artificial Sequence
  Chemically Synthesized
QVQLQESGGGLVQAGGSLRLSCAASGNISAYSAMGWYRQAPGKERELVATITVGGNTNYADSVKGRFTISRDNAKNTVYLQMNSLKPEDTAVYYCAVGRSGQYYDESPTDETYAYWGQGTQVTVSS

SEQ ID NO: 11095 - protein, 125 aa, Artificial Sequence
  Chemically Synthesized
QVQLQESGGGLVQAGGSLRLSCAASGNIWWWYMGWYRQAPGKERELVAGINRGGSNTYYADSVKGRFTISRDNAKNTVYLQMNSLKPEDTAVYYCAAGDYDIWDDQIYYGDHQYWGQGTQVTVSS

SEQ ID NO: 11096 - protein, 117 aa, Artificial Sequence
  Chemically Synthesized
QVQLQESGGGLVQAGGSLRLSCAASGYIFPYNLMGWYRQAPGKEREFTYYADSVKGRFTISRDNAKNTVYLQMNSLKPEDTAVYYCAATFRGYSASSTYHDRDHRYWGQGTQVTVSS

SEQ ID NO: 11097 - protein, 118 aa, Artificial Sequence
  Chemically Synthesized
QVQLQESGGGLVQAGGSLRLSCAASGNISTDVLMGWYRQAPGKERELVASITDGTTTYYADSVKGRFTISRDNAKNTVYLQMNSLKPEDTAVYYCAADLYIYIWLSYWGQGTQVTVSS

SEQ ID NO: 11098 - protein, 118 aa, Artificial Sequence
  Chemically Synthesized
QVQLQESGGGLVQAGGSLRLSCAASGTISADYNMGWYRQAPGKERELVASITLGGITNYADSVKGRFTISRDNAKNTVYLQMNSLKPEDTAVYYCAVSVLNFDGHSYWGQGTQVTVSS

SEQ ID NO: 11099 - protein, 117 aa, Artificial Sequence
  Chemically Synthesized
QVQLQESGGGLVQAGGSLRLSCAASGYISQSRDMGWYRQAPGKERELVASIGYGATTYYADSVKGRFTISRDNAKNTVYLQMNSLKPEDTAVYYCAAWLDDTDLTYWGQGTQVTVSS

SEQ ID NO: 11100 - protein, 109 aa, Artificial Sequence
  Chemically Synthesized
QVQLQESGGGLVQAGGSLRLSCAASGTIFHRDGMGWYRQAPGKERESTYYADSVKGRFTISRDNAKNTVYLQMNSLKPEDTAVYYCAAYYDVYNSFYYWGQGTQVTVSS

SEQ ID NO: 11101 - protein, 122 aa, Artificial Sequence
  Chemically Synthesized
QVQLQESGGGLVQAGGSLRLSCAASGNIFVAGVMGWYRQAPGKEREFVASIADGSTTNYADSVKGRFTISRDNAKNTVYLQMNSLKPEDTAVYYCAAGTGPYYQQSPRHQYWGQGTQVTVSS

SEQ ID NO: 11102 - protein, 117 aa, Artificial Sequence
  Chemically Synthesized
QVQLQESGGGLVQAGGSLRLSCAASGTISQFGRMGWYRQAPGKEREFVASITDGTSTNYADSVKGRFTISRDNAKNTVYLQMNSLKPEDTAVYYCAVSWDVYIYDYWGQGTQVTVSS

SEQ ID NO: 11103 - protein, 118 aa, Artificial Sequence
  Chemically Synthesized
QVQLQESGGGLVQAGGSLRLSCAASGTISAARDMGWYRQAPGKERELVAGIDLGTTTYYADSVKGRFTISRDNAKNTVYLQMNSLKPEDTAVYYCAARGVYKWDFDYWGQGTQVTVSS

SEQ ID NO: 11104 - protein, 114 aa, Artificial Sequence
  Chemically Synthesized
QVQLQESGGGLVQAGGSLRLSCAASGSISDIDGMGWYRQAPGKEREFVASINRGASTYYADSVKGRFTISRDNAKNTVYLQMNSLKPEDTAVYYCASDVIHSYWGQGTQVTVSS

SEQ ID NO: 11105 - protein, 114 aa, Artificial Sequence
  Chemically Synthesized
QVQLQESGGGLVQAGGSLRLSCAASGTIFMGWYRQAPGKERELVASINIGTSTYYADSVKGRFTISRDNAKNTVYLQMNSLKPEDTAVYYCAAYDHAPTVYAYWGQGTQVTVSS

SEQ ID NO: 11106 - protein, 121 aa, Artificial Sequence
  Chemically Synthesized
QVQLQESGGGLVQAGGSLRLSCAASGSISPLPYMGWYRQAPGKERELVASIDVVVVPYADSVKGRFTISRDNAKNTVYLQMNSLKPEDTAVYYCAVIRLQGERTPDYFLYWGQGTQVTVSS

SEQ ID NO: 11107 - protein, 118 aa, Artificial Sequence
  Chemically Synthesized
QVQLQESGGGLVQAGGSLRLSCAASGSISNERTMGWYRQAPGKEREFVAAITPGAITYYADSVKGRFTISRDNAKNTVYLQMNSLKPEDTAVYYCAAGWRQLRRYRYWGQGTQVTVSS

SEQ ID NO: 11108 - protein, 117 aa, Artificial Sequence
  Chemically Synthesized
QVQLQESGGGLVQAGGSLRLSCAASGTISHTHAMGWYRQAPGKEREFVASITLVLIPYADSVKGRFTISRDNAKNTVYLQMNSLKPEDTAVYYCAAARQFSETHIYWGQGTQVTVSS

SEQ ID NO: 11109 - protein, 118 aa, Artificial Sequence
  Chemically Synthesized
QVQLQESGGGLVQAGGSLRLSCAASGNIFSVGDMGWYRQAPGKERELVAGIARGGTTNYADSVKGRFTISRDNAKNTVYLQMNSLKPEDTAVYYCAATSAHYRDLVYWGQGTQVTVSS

SEQ ID NO: 11110 - protein, 122 aa, Artificial Sequence
  Chemically Synthesized
QVQLQESGGGLVQAGGSLRLSCAASGSIFYYFPMGWYRQAPGKERELVASIGVGATTYYADSVKGRFTISRDNAKNTVYLQMNSLKPEDTAVYYCAATYFSKLYDYGYLLYWGQGTQVTVSS

SEQ ID NO: 11111 - protein, 122 aa, Artificial Sequence
  Chemically Synthesized
QVQLQESGGGLVQAGGSLRLSCAASGNISGWYYMGWYRQAPGKEREFVAAIGTGATTNYADSVKGRFTISRDNAKNTVYLQMNSLKPEDTAVYYCAATDYREYRTRDYHTYWGQGTQVTVSS

SEQ ID NO: 11112 - protein, 122 aa, Artificial Sequence
  Chemically Synthesized
QVQLQESGGGLVQAGGSLRLSCAASGNISDPWAMGWYRQAPGKEREFVASINAGTSTNYADSVKGRFTISRDNAKNTVYLQMNSLKPEDTAVYYCAVLPQILGYVRWYHRYWGQGTQVTVSS

SEQ ID NO: 11113 - protein, 122 aa, Artificial Sequence
  Chemically Synthesized
QVQLQESGGGLVQAGGSLRLSCAASGYISPYLDMGWYRQAPGKEREFVATIGWGATTYYADSVKGRFTISRDNAKNTVYLQMNSLKPEDTAVYYCAVDGDERDVDYVYHSYWGQGTQVTVSS

SEQ ID NO: 11114 - protein, 117 aa, Artificial Sequence
  Chemically Synthesized
QVQLQESGGGLVQAGGSLRLSCAASGSISSDYDMGWYRQAPGKEREFVAGIDFGGITYADSVKGRFTISRDNAKNTVYLQMNSLKPEDTAVYYCAAYWFYQGQFGYWGQGTQVTVSS

SEQ ID NO: 11115 - protein, 118 aa, Artificial Sequence
  Chemically Synthesized
QVQLQESGGGLVQAGGSLRLSCAASGTISFLEPMGWYRQAPGKEREFVATIAQGGNTYYADSVKGRFTISRDNAKNTVYLQMNSLKPEDTAVYYCAAYANRYVSLAYWGQGTQVTVSS

SEQ ID NO: 11116 - protein, 118 aa, Artificial Sequence
  Chemically Synthesized
QVQLQESGGGLVQAGGSLRLSCAASGYISYLLDMGWYRQAPGKERELVAAIGYGATTYYADSVKGRFTISRDNAKNTVYLQMNSLKPEDTAVYYCAVGEPVVQYLRYWGQGTQVTVSS

SEQ ID NO: 11117 - protein, 110 aa, Artificial Sequence
  Chemically Synthesized
QVQLQESGGGLVQAGGSLRLSCAASGSISPNGYTMGWYRQAPGKEREFVATIDSGSNTNYADSVKGRFTISRDNAKNTVYLQMNSLKPEDTAVYYCAVYWGQGTQVTVSS

SEQ ID NO: 11118 - protein, 118 aa, Artificial Sequence
  Chemically Synthesized
QVQLQESGGGLVQAGGSLRLSCAASGTISAYYVMGWYRQAPGKERELVAGIAIGTTTYYADSVKGRFTISRDNAKNTVYLQMNSLKPEDTAVYYCAVYYSANRDHYYWGQGTQVTVSS

SEQ ID NO: 11119 - protein, 118 aa, Artificial Sequence
  Chemically Synthesized
QVQLQESGGGLVQAGGSLRLSCAASGTISIADTMGWYRQAPGKEREFVAGIDYGGITYYADSVKGRFTISRDNAKNTVYLQMNSLKPEDTAVYYCAVEGDGDVYHWYWGQGTQVTVSS

SEQ ID NO: 11120 - protein, 122 aa, Artificial Sequence
  Chemically Synthesized
QVQLQESGGGLVQAGGSLRLSCAASGTIFYDRAMGWYRQAPGKERELVATITYGGSTYYADSVKGRFTISRDNAKNTVYLQMNSLKPEDTAVYYCAATLQDDQYFRGAHAYWGQGTQVTVSS

SEQ ID NO: 11121 - protein, 122 aa, Artificial Sequence
  Chemically Synthesized
QVQLQESGGGLVQAGGSLRLSCAASGNISAVVPMGWYRQAPGKERELVAAIGNGGNTYYADSVKGRFTISRDNAKNTVYLQMNSLKPEDTAVYYCAVYDYNAGQIGYDYSYWGQGTQVTVSS

SEQ ID NO: 11122 - protein, 122 aa, Artificial Sequence
  Chemically Synthesized
QVQLQESGGGLVQAGGSLRLSCAASGSISPTNYMGWYRQAPGKERELVAAIDYGAITNYADSVKGRFTISRDNAKNTVYLQMNSLKPEDTAVYYCAVPVYRDIYVAADHQYWGQGTQVTVSS

SEQ ID NO: 11123 - protein, 121 aa, Artificial Sequence
  Chemically Synthesized
QVQLQESGGGLVQAGGSLRLSCAASGNISAAGPMGWYRQAPGKERELVAGITDGGNTYYADSVKGRFTISRDNAKNTVYLQMNSLKPEDTAVYYCAVSTWTVTTLLGLFYWGQGTQVTVSS

SEQ ID NO: 11124 - protein, 118 aa, Artificial Sequence
  Chemically Synthesized
QVQLQESGGGLVQAGGSLRLSCAASGNISDRNAMGWYRQAPGKERELVAGIDYGGTTNYADSVKGRFTISRDNAKNTVYLQMNSLKPEDTAVYYCAARTDAADVYEYWGQGTQVTVSS

SEQ ID NO: 11125 - protein, 125 aa, Artificial Sequence
  Chemically Synthesized
QVQLQESGGGLVQAGGSLRLSCAASGTISYESYMGWYRQAPGKERELVAGITRGGITYYADSVKGRFTISRDNAKNTVYLQMNSLKPEDTAVYYCAVGAYIGRSYLRFQSGHAYWGQGTQVTVSS

SEQ ID NO: 11126 - protein, 126 aa, Artificial Sequence
  Chemically Synthesized
QVQLQESGGGLVQAGGSLRLSCAASGNIFESTDMGWYRQAPGKEREFVATITPGGTTYYADSVKGRFTISRDNAKNTVYLQMNSLKPEDTAVYYCAVLEGDAYYAYRRDGVDFAYWGQGTQVTVSS

SEQ ID NO: 11127 - protein, 122 aa, Artificial Sequence
  Chemically Synthesized
QVQLQESGGGLVQAGGSLRLSCAASGNISGYTTMGWYRQAPGKERELVASISYGGTTYYADSVKGRFTISRDNAKNTVYLQMNSLKPEDTAVYYCAVVGQRSADESALLPYWGQGTQVTVSS

SEQ ID NO: 11128 - protein, 118 aa, Artificial Sequence
  Chemically Synthesized
QVQLQESGGGLVQAGGSLRLSCAASGNIFPFDWMGWYRQAPGKERELVATITVGGSTNYADSVKGRFTISRDNAKNTVYLQMNSLKPEDTAVYYCAAPAKYPSVFSYWGQGTQVTVSS

SEQ ID NO: 11129 - protein, 121 aa, Artificial Sequence
  Chemically Synthesized
QVQLQESGGGLVQAGGSLRLSCAASGYIFYSAGMGWYRQAPGKEREFVATINVGASTYYADSVKGRFTISRDNAKNTVYLQMNSLKPEDTAVYYCAVYPQAPSTTLVTLYWGQGTQVTVSS

SEQ ID NO: 11130 - protein, 118 aa, Artificial Sequence
  Chemically Synthesized
QVQLQESGGGLVQAGGSLRLSCAASGSISAYEYMGWYRQAPGKEREFVATINIGSTTNYADSVKGRFTISRDNAKNTVYLQMNSLKPEDTAVYYCAVPTASPSYHTYWGQGTQVTVSS

SEQ ID NO: 11131 - protein, 118 aa, Artificial Sequence
  Chemically Synthesized
QVQLQESGGGLVQAGGSLRLSCAASGTIFPADVMGWYRQAPGKEREFVAGIASGATTNYADSVKGRFTISRDNAKNTVYLQMNSLKPEDTAVYYCAVYANLGTVHYYWGQGTQVTVSS

SEQ ID NO: 11132 - protein, 122 aa, Artificial Sequence
  Chemically Synthesized
QVQLQESGGGLVQAGGSLRLSCAASGNISRTHAMGWYRQAPGKEREFVATIDVGGSTYYADSVKGRFTISRDNAKNTVYLQMNSLKPEDTAVYYCAALYPTYRSDRWNYWYWGQGTQVTVSS

SEQ ID NO: 11133 - protein, 122 aa, Artificial Sequence
  Chemically Synthesized
QVQLQESGGGLVQAGGSLRLSCAASGNIFGVSDMGWYRQAPGKERELVAGINAGSNTNYADSVKGRFTISRDNAKNTVYLQMNSLKPEDTAVYYCAAGPVSVWQPGYVLTYWGQGTQVTVSS

SEQ ID NO: 11134 - protein, 126 aa, Artificial Sequence
  Chemically Synthesized
QVQLQESGGGLVQAGGSLRLSCAASGNISYYGNMGWYRQAPGKEREFVASIGQGGITYYADSVKGRFTISRDNAKNTVYLQMNSLKPEDTAVYYCAVQPYSDDYRVTPGQPDHGYWGQGTQVTVSS

SEQ ID NO: 11135 - protein, 121 aa, Artificial Sequence
  Chemically Synthesized
QVQLQESGGGLVQAGGSLRLSCAASGTIFWRGAMGWYRQAPGKEREFVASINYGSSTYYADSVKGRFTISRDNAKNTVYLQMNSLKPEDTAVYYCAAHRSSTRSSTTLLYWGQGTQVTVSS

SEQ ID NO: 11136 - protein, 118 aa, Artificial Sequence
  Chemically Synthesized
QVQLQESGGGLVQAGGSLRLSCAASGSISDPSPMGWYRQAPGKERELVAAIGVGSTTNYADSVKGRFTISRDNAKNTVYLQMNSLKPEDTAVYYCAVDQDDRDDHGYWGQGTQVTVSS

SEQ ID NO: 11137 - protein, 118 aa, Artificial Sequence
  Chemically Synthesized
QVQLQESGGGLVQAGGSLRLSCAASGSISATPVMGWYRQAPGKERELVAAIGAGGTTNYADSVKGRFTISRDNAKNTVYLQMNSLKPEDTAVYYCAAVGYGQSTHGYWGQGTQVTVSS

SEQ ID NO: 11138 - protein, 120 aa, Artificial Sequence
  Chemically Synthesized
QVQLQESGGGLVQAGGSLRLSCAASGNISFSNYMGWYRQAPGKERELVAGIDDGTSTNYADSVKGRFTISRDNAKNTVYLQMNSLKPEDTAVYYCAASYCWLPFPVPYYWGQGTQVTVSS

SEQ ID NO: 11139 - protein, 122 aa, Artificial Sequence
  Chemically Synthesized
QVQLQESGGGLVQAGGSLRLSCAASGSISFLDSMGWYRQAPGKERELVAAIDRGSTTNYADSVKGRFTISRDNAKNTVYLQMNSLKPEDTAVYYCAADQQGYVGWSYQLRYWGQGTQVTVSS

SEQ ID NO: 11140 - protein, 118 aa, Artificial Sequence
  Chemically Synthesized
QVQLQESGGGLVQAGGSLRLSCAASGYIFNRYDMGWYRQAPGKERELVASIAFGGTTYYADSVKGRFTISRDNAKNTVYLQMNSLKPEDTAVYYCAARDWDDNHLVYWGQGTQVTVSS

SEQ ID NO: 11141 - protein, 118 aa, Artificial Sequence
  Chemically Synthesized
QVQLQESGGGLVQAGGSLRLSCAASGTISTFVYMGWYRQAPGKEREFVAAIDHGANTYYADSVKGRFTISRDNAKNTVYLQMNSLKPEDTAVYYCAAATSDYGQHIYWGQGTQVTVSS

SEQ ID NO: 11142 - protein, 111 aa, Artificial Sequence
  Chemically Synthesized
QVQLQESGGGLVQAGGSLRLSCAASGYIFPWYPMGWYRQAPGKEREFVASIGYGTSTNYADSVKGRFTISRDNAKNTVYLQMNSLKPEDTAVYYCAVYEYWGQGTQVTVSS

SEQ ID NO: 11143 - protein, 126 aa, Artificial Sequence
  Chemically Synthesized
QVQLQESGGGLVQAGGSLRLSCAASGTIFVHELMGWYRQAPGKEREFVATISYGSTTNYADSVKGRFTISRDNAKNTVYLQMNSLKPEDTAVYYCAVGLRQYPRSRGYGNASLYYWGQGTQVTVSS

SEQ ID NO: 11144 - protein, 126 aa, Artificial Sequence
  Chemically Synthesized
QVQLQESGGGLVQAGGSLRLSCAASGYISGQIDMGWYRQAPGKEREFVASIDRGGTTYYADSVKGRFTISRDNAKNTVYLQMNSLKPEDTAVYYCAVYDVPYYWSGYYYGDTLVYWGQGTQVTVSS

SEQ ID NO: 11145 - protein, 121 aa, Artificial Sequence
  Chemically Synthesized
QVQLQESGGGLVQAGGSLRLSCAASGNIFSRYVMGWYRQAPGKERELVAGINGGSNTNYADSVKGRFTISRDNAKNTVYLQMNSLKPEDTAVYYCAAHDSDLSLNTTTLYWGQGTQVTVSS

SEQ ID NO: 11146 - protein, 118 aa, Artificial Sequence
  Chemically Synthesized
QVQLQESGGGLVQAGGSLRLSCAASGTISGYYLMGWYRQAPGKEREFVAGIGYGAITNYADSVKGRFTISRDNAKNTVYLQMNSLKPEDTAVYYCAVYLQYDTDLFYWGQGTQVTVSS

SEQ ID NO: 11147 - protein, 126 aa, Artificial Sequence
  Chemically Synthesized
QVQLQESGGGLVQAGGSLRLSCAASGNIFTQYNMGWYRQAPGKERELVATITYGGSTYYADSVKGRFTISRDNAKNTVYLQMNSLKPEDTAVYYCAARQKGHTEVSYYADPPYGYWGQGTQVTVSS

SEQ ID NO: 11148 - protein, 122 aa, Artificial Sequence
  Chemically Synthesized
QVQLQESGGGLVQAGGSLRLSCAASGSISWVDDMGWYRQAPGKERELVAGIGAGGNTYYADSVKGRFTISRDNAKNTVYLQMNSLKPEDTAVYYCAAGRDLEYGAYFIHDYWGQGTQVTVSS

SEQ ID NO: 11149 - protein, 118 aa, Artificial Sequence
  Chemically Synthesized
QVQLQESGGGLVQAGGSLRLSCAASGNISYYYYMGWYRQAPGKERELVATIDYGGNTYYADSVKGRFTISRDNAKNTVYLQMNSLKPEDTAVYYCAAGYYYRQQHSYWGQGTQVTVSS

SEQ ID NO: 11150 - protein, 121 aa, Artificial Sequence
  Chemically Synthesized
QVQLQESGGGLVQAGGSLRLSCAASGYIFTVTMGWYRQAPGKERELVAAIDAGSSTNYADSVKGRFTISRDNAKNTVYLQMNSLKPEDTAVYYCAAAADYVANFNGGLQYWGQGTQVTVSS

SEQ ID NO: 11151 - protein, 118 aa, Artificial Sequence
  Chemically Synthesized
QVQLQESGGGLVQAGGSLRLSCAASGNISSEEQMGWYRQAPGKEREFVAAIGVGSITYYADSVKGRFTISRDNAKNTVYLQMNSLKPEDTAVYYCAVVPFASTRFQYWGQGTQVTVSS

SEQ ID NO: 11152 - protein, 122 aa, Artificial Sequence
  Chemically Synthesized
QVQLQESGGGLVQAGGSLRLSCAASGSISWYRTMGWYRQAPGKERELVAGITTGGNTNYADSVKGRFTISRDNAKNTVYLQMNSLKPEDTAVYYCAATRSRWWAWSRHFWYWGQGTQVTVSS

SEQ ID NO: 11153 - protein, 118 aa, Artificial Sequence
  Chemically Synthesized
QVQLQESGGGLVQAGGSLRLSCAASGSIFGYRYMGWYRQAPGKEREFVASIAVGANTYYADSVKGRFTISRDNAKNTVYLQMNSLKPEDTAVYYCAANLYYPYLHAYWGQGTQVTVSS

SEQ ID NO: 11154 - protein, 122 aa, Artificial Sequence
  Chemically Synthesized
QVQLQESGGGLVQAGGSLRLSCAASGSIFGVYLMGWYRQAPGKERELVAGITLGSSTYYADSVKGRFTISRDNAKNTVYLQMNSLKPEDTAVYYCAADGPGYTDTDYNFYYWGQGTQVTVSS

SEQ ID NO: 11155 - protein, 118 aa, Artificial Sequence
  Chemically Synthesized
QVQLQESGGGLVQAGGSLRLSCAASGSIFTTVNMGWYRQAPGKEREFVAAIGFGTITYYADSVKGRFTISRDNAKNTVYLQMNSLKPEDTAVYYCAAQTVLVDILIYWGQGTQVTVSS

SEQ ID NO: 11156 - protein, 126 aa, Artificial Sequence
  Chemically Synthesized
QVQLQESGGGLVQAGGSLRLSCAASGTISGVYYMGWYRQAPGKERELVATIAWGSITNYADSVKGRFTISRDNAKNTVYLQMNSLKPEDTAVYYCAAAYIYGNVYDLQPRDAHRYWGQGTQVTVSS

SEQ ID NO: 11157 - protein, 118 aa, Artificial Sequence
  Chemically Synthesized
QVQLQESGGGLVQAGGSLRLSCAASGTIFPGYDMGWYRQAPGKERELVAAINYGSTTYYADSVKGRFTISRDNAKNTVYLQMNSLKPEDTAVYYCAVNYRQEYHYGYWGQGTQVTVSS

SEQ ID NO: 11158 - protein, 122 aa, Artificial Sequence
  Chemically Synthesized
QVQLQESGGGLVQAGGSLRLSCAASGSIFWQDYMGWYRQAPGKERELVAAIADGTTTNYADSVKGRFTISRDNAKNTVYLQMNSLKPEDTAVYYCAVDQLYDYYWNRYFSYWGQGTQVTVSS

SEQ ID NO: 11159 - protein, 118 aa, Artificial Sequence
  Chemically Synthesized
QVQLQESGGGLVQAGGSLRLSCAASGTISHWYVMGWYRQAPGKERELVAGISVGSNTNYADSVKGRFTISRDNAKNTVYLQMNSLKPEDTAVYYCAAYWEHGHRHNYWGQGTQVTVSS

SEQ ID NO: 11160 - protein, 118 aa, Artificial Sequence
  Chemically Synthesized
QVQLQESGGGLVQAGGSLRLSCAASGTISRTQYMGWYRQAPGKEREFVAAIGRGGNTYYADSVKGRFTISRDNAKNTVYLQMNSLKPEDTAVYYCAARGYYYTTHRYWGQGTQVTVSS

SEQ ID NO: 11161 - protein, 118 aa, Artificial Sequence
  Chemically Synthesized
QVQLQESGGGLVQAGGSLRLSCAASGTISYPSIMGWYRQAPGKERELVATIGVGGNTYYADSVKGRFTISRDNAKNTVYLQMNSLKPEDTAVYYCAVFGRSEPLYYYWGQGTQVTVSS

SEQ ID NO: 11162 - protein, 121 aa, Artificial Sequence
  Chemically Synthesized
QVQLQESGGGLVQAGGSLRLSCAASGTISGAAYMGWYRQAPGKEREFVAGIGAGTSTYYADSVKGRFTISRDNAKNTVYLQMNSLKPEDTAVYYCAVDLYLSNLSLSLLYWGQGTQVTVSS

SEQ ID NO: 11163 - protein, 117 aa, Artificial Sequence
  Chemically Synthesized
QVQLQESGGGLVQAGGSLRLSCAASGTIFYYEGMGWYRQAPGKERELVAAIDNGGTTYYADSVKGRFTISRDNAKNTVYLQMNSLKPEDTAVYYCAVRVRSQPYYYWGQGTQVTVSS

SEQ ID NO: 11164 - protein, 126 aa, Artificial Sequence
  Chemically Synthesized
QVQLQESGGGLVQAGGSLRLSCAASGNIFGQQGMGWYRQAPGKERELVAGISSGTSTYYADSVKGRFTISRDNAKNTVYLQMNSLKPEDTAVYYCAVYSYGRYREGPYWYDGHQYWGQGTQVTVSS

SEQ ID NO: 11165 - protein, 117 aa, Artificial Sequence
  Chemically Synthesized
QVQLQESGGGLVQAGGSLRLSCAASGSISGYDAMGWYRQAPGKERELVAGINGGANTNYADSVKGRFTISRDNAKNTVYLQMNSLKPEDTAVYYCAAGLTLVLRMYWGQGTQVTVSS

SEQ ID NO: 11166 - protein, 122 aa, Artificial Sequence
  Chemically Synthesized
QVQLQESGGGLVQAGGSLRLSCAASGTISGQPSMGWYRQAPGKEREFVAAINYGTNTNYADSVKGRFTISRDNAKNTVYLQMNSLKPEDTAVYYCAAIRGEAYRAVAYLQYWGQGTQVTVSS

SEQ ID NO: 11167 - protein, 122 aa, Artificial Sequence
  Chemically Synthesized
QVQLQESGGGLVQAGGSLRLSCAASGSISLSLDMGWYRQAPGKERELVASIGDGAITNYADSVKGRFTISRDNAKNTVYLQMNSLKPEDTAVYYCAAVGRHGRDGYISYLYWGQGTQVTVSS

SEQ ID NO: 11168 - protein, 122 aa, Artificial Sequence
  Chemically Synthesized
QVQLQESGGGLVQAGGSLRLSCAASGYISSNQYMGWYRQAPGKERELVASIADGTNTNYADSVKGRFTISRDNAKNTVYLQMNSLKPEDTAVYYCAVLDLGRARQRGYLFYWGQGTQVTVSS

SEQ ID NO: 11169 - protein, 118 aa, Artificial Sequence
  Chemically Synthesized
QVQLQESGGGLVQAGGSLRLSCAASGTISRYDSMGWYRQAPGKEREFVAGIDRGTNTYYADSVKGRFTISRDNAKNTVYLQMNSLKPEDTAVYYCAVASQYASDHVYWGQGTQVTVSS

SEQ ID NO: 11170 - protein, 122 aa, Artificial Sequence
  Chemically Synthesized
QVQLQESGGGLVQAGGSLRLSCAASGSISAGRNMGWYRQAPGKEREFVASIADGTTTNYADSVKGRFTISRDNAKNTVYLQMNSLKPEDTAVYYCAVYYSWLYVYETGHYYWGQGTQVTVSS

SEQ ID NO: 11171 - protein, 118 aa, Artificial Sequence
  Chemically Synthesized
QVQLQESGGGLVQAGGSLRLSCAASGSIFALIAMGWYRQAPGKEREFVAAISYGGNTNYADSVKGRFTISRDNAKNTVYLQMNSLKPEDTAVYYCAAYWNATDDLYYWGQGTQVTVSS

SEQ ID NO: 11172 - protein, 122 aa, Artificial Sequence
  Chemically Synthesized
QVQLQESGGGLVQAGGSLRLSCAASGYIFDGGYMGWYRQAPGKEREFVASITYGSSTYYADSVKGRFTISRDNAKNTVYLQMNSLKPEDTAVYYCAAEGVRQHGGYAYLAYWGQGTQVTVSS

SEQ ID NO: 11173 - protein, 118 aa, Artificial Sequence
  Chemically Synthesized
QVQLQESGGGLVQAGGSLRLSCAASGYISFDEYMGWYRQAPGKERELVAGINDGTSTYYADSVKGRFTISRDNAKNTVYLQMNSLKPEDTAVYYCAADSYSSSCLSYWGQGTQVTVSS

SEQ ID NO: 11174 - protein, 126 aa, Artificial Sequence
  Chemically Synthesized
QVQLQESGGGLVQAGGSLRLSCAASGTISYYSVMGWYRQAPGKERELVAGIDYGASTNYADSVKGRFTISRDNAKNTVYLQMNSLKPEDTAVYYCAVAHDPGDQYGYYAGTYHSYWGQGTQVTVSS

SEQ ID NO: 11175 - protein, 117 aa, Artificial Sequence
  Chemically Synthesized
QVQLQESGGGLVQAGGSLRLSCAASGTIFFRYIMGWYRQAPGKERELVAAIGLGGITYYADSVKGRFTISRDNAKNTVYLQMNSLKPEDTAVYYCAVGYRRATHVYWGQGTQVTVSS

SEQ ID NO: 11176 - protein, 118 aa, Artificial Sequence
  Chemically Synthesized
QVQLQESGGGLVQAGGSLRLSCAASGTISVVASMGWYRQAPGKERELVATIGHGTTTNYADSVKGRFTISRDNAKNTVYLQMNSLKPEDTAVYYCAANLRNGWSHGYWGQGTQVTVSS

SEQ ID NO: 11177 - protein, 122 aa, Artificial Sequence
  Chemically Synthesized
QVQLQESGGGLVQAGGSLRLSCAASGSISIPVFMGWYRQAPGKERELVASITRGATTNYADSVKGRFTISRDNAKNTVYLQMNSLKPEDTAVYYCAVTDPSYGGRHQSHPYWGQGTQVTVSS

SEQ ID NO: 11178 - protein, 118 aa, Artificial Sequence
  Chemically Synthesized
QVQLQESGGGLVQAGGSLRLSCAASGNISPWYSMGWYRQAPGKERELVATIDRGASTNYADSVKGRFTISRDNAKNTVYLQMNSLKPEDTAVYYCAVEGYYLNTHSYWGQGTQVTVSS

SEQ ID NO: 11179 - protein, 115 aa, Artificial Sequence
  Chemically Synthesized
QVQLQESGGGLVQAGGSLRLSCAASGSISFDPYMGWYRQAPGKEREFVASISNGGITNYADSVKGRFTISRDNAKNTVYLQMNSLKPEDTAVYYCAAQQDQHPYWGQGTQVTVSS

SEQ ID NO: 11180 - protein, 122 aa, Artificial Sequence
  Chemically Synthesized
QVQLQESGGGLVQAGGSLRLSCAASGTIFRIVGMGWYRQAPGKEREFVAAITDGGSTYYADSVKGRFTISRDNAKNTVYLQMNSLKPEDTAVYYCAAARPTGGLVFHTYYYWGQGTQVTVSS

SEQ ID NO: 11181 - protein, 122 aa, Artificial Sequence
  Chemically Synthesized
QVQLQESGGGLVQAGGSLRLSCAASGYIFGPYGMGWYRQAPGKERELVATIGSGANTNYADSVKGRFTISRDNAKNTVYLQMNSLKPEDTAVYYCAADGHPTDLYAIWHLYWGQGTQVTVSS

SEQ ID NO: 11182 - protein, 117 aa, Artificial Sequence
  Chemically Synthesized
QVQLQESGGGLVQAGGSLRLSCAASGNISDADMGWYRQAPGKERELVATIDSGSSTYYADSVKGRFTISRDNAKNTVYLQMNSLKPEDTAVYYCAAYDDDRYFYAYWGQGTQVTVSS

SEQ ID NO: 11183 - protein, 118 aa, Artificial Sequence
  Chemically Synthesized
QVQLQESGGGLVQAGGSLRLSCAASGSISSWSYMGWYRQAPGKERELVAGINYGGITYYADSVKGRFTISRDNAKNTVYLQMNSLKPEDTAVYYCAARDRLYSYYWYWGQGTQVTVSS

SEQ ID NO: 11184 - protein, 126 aa, Artificial Sequence
  Chemically Synthesized
QVQLQESGGGLVQAGGSLRLSCAASGYIFTRPGMGWYRQAPGKEREFVATITYGGNTNYADSVKGRFTISRDNAKNTVYLQMNSLKPEDTAVYYCAAYINARQYVYGQGDDKHYYWGQGTQVTVSS

SEQ ID NO: 11185 - protein, 118 aa, Artificial Sequence
  Chemically Synthesized
QVQLQESGGGLVQAGGSLRLSCAASGSIFGSRYMGWYRQAPGKERELVAAITFGASTYYADSVKGRFTISRDNAKNTVYLQMNSLKPEDTAVYYCAVAYRYRWQHGYWGQGTQVTVSS

SEQ ID NO: 11186 - protein, 118 aa, Artificial Sequence
  Chemically Synthesized
QVQLQESGGGLVQAGGSLRLSCAASGNIFYAGNMGWYRQAPGKERELVASIGYGASTYYADSVKGRFTISRDNAKNTVYLQMNSLKPEDTAVYYCAVGYDYWSDLGYWGQGTQVTVSS

SEQ ID NO: 11187 - protein, 120 aa, Artificial Sequence
  Chemically Synthesized
QVQLQESGGGLVQAGGSLRLSCAASGSIFGVGYMGWYRQAPGKEREFVAAINDGIPYADSVKGRFTISRDNAKNTVYLQMNSLKPEDTAVYYCAVVKWYDGPSLRLHWYWGQGTQVTVSS

SEQ ID NO: 11188 - protein, 117 aa, Artificial Sequence
  Chemically Synthesized
QVQLQESGGGLVQAGGSLRLSCAASGTISTLIMGWYRQAPGKERELVATIGRGAITNYADSVKGRFTISRDNAKNTVYLQMNSLKPEDTAVYYCAAGDQSTDYLYYWGQGTQVTVSS

SEQ ID NO: 11189 - protein, 118 aa, Artificial Sequence
  Chemically Synthesized
QVQLQESGGGLVQAGGSLRLSCAASGNISTDTYMGWYRQAPGKEREFVAGIGDGSITYYADSVKGRFTISRDNAKNTVYLQMNSLKPEDTAVYYCAVGFPYYDVLDYWGQGTQVTVSS

SEQ ID NO: 11190 - protein, 114 aa, Artificial Sequence
  Chemically Synthesized
QVQLQESGGGLVQAGGSLRLSCAASGNISGGYYMGWYRQAPGKERELVAGIGVGASTYYADSVKGRFTISRDNAKNTVYLQMNSLKPEDTAVYYCAAYPNHLYWGQGTQVTVSS

SEQ ID NO: 11191 - protein, 122 aa, Artificial Sequence
  Chemically Synthesized
QVQLQESGGGLVQAGGSLRLSCAASGSIFSRDLMGWYRQAPGKEREFVAAIGDGGTTYYADSVKGRFTISRDNAKNTVYLQMNSLKPEDTAVYYCAVISQYASFYWDGHTYWGQGTQVTVSS

SEQ ID NO: 11192 - protein, 125 aa, Artificial Sequence
  Chemically Synthesized
QVQLQESGGGLVQAGGSLRLSCAASGNISRLDTMGWYRQAPGKEREFVASIDSVLLPYADSVKGRFTISRDNAKNTVYLQMNSLKPEDTAVYYCAVGIYVPRYPSTYYRAELSYWGQGTQVTVSS

SEQ ID NO: 11193 - protein, 117 aa, Artificial Sequence
  Chemically Synthesized
QVQLQESGGGLVQAGGSLRLSCAASGYIFPDRAMGWYRQAPGKERELVAGIAGGSSTNYADSVKGRFTISRDNAKNTVYLQMNSLKPEDTAVYYCAVSVLLTTSLYWGQGTQVTVSS

SEQ ID NO: 11194 - protein, 113 aa, Artificial Sequence
  Chemically Synthesized
QVQLQESGGGLVQAGGSLRLSCAASGYIFGDYKMGWYRQAPGKEREFVAAIGYGTITNYADSVKGRFTISRDNAKNTVYLQMNSLKPEDTAVYYCARGGSMYWGQGTQVTVSS

SEQ ID NO: 11195 - protein, 118 aa, Artificial Sequence
  Chemically Synthesized
QVQLQESGGGLVQAGGSLRLSCAASGNISHPRAMGWYRQAPGKEREFVAGIGPGGNTNYADSVKGRFTISRDNAKNTVYLQMNSLKPEDTAVYYCAAWYQGESWHTYWGQGTQVTVSS

SEQ ID NO: 11196 - protein, 118 aa, Artificial Sequence
  Chemically Synthesized
QVQLQESGGGLVQAGGSLRLSCAASGNIFRTPYMGWYRQAPGKERELVAAIDNGGNTNYADSVKGRFTISRDNAKNTVYLQMNSLKPEDTAVYYCAVVGDPDFQHFYWGQGTQVTVSS

SEQ ID NO: 11197 - protein, 118 aa, Artificial Sequence
  Chemically Synthesized
QVQLQESGGGLVQAGGSLRLSCAASGTISGDYGMGWYRQAPGKEREFVASIGHGGTTNYADSVKGRFTISRDNAKNTVYLQMNSLKPEDTAVYYCAARFYTDGEHGYWGQGTQVTVSS

SEQ ID NO: 11198 - protein, 122 aa, Artificial Sequence
  Chemically Synthesized
QVQLQESGGGLVQAGGSLRLSCAASGTISTSDWMGWYRQAPGKEREFVAGITGGGITYYADSVKGRFTISRDNAKNTVYLQMNSLKPEDTAVYYCAVARYAYQPSRYGFDYWGQGTQVTVSS

SEQ ID NO: 11199 - protein, 118 aa, Artificial Sequence
  Chemically Synthesized
QVQLQESGGGLVQAGGSLRLSCAASGYISSNRGMGWYRQAPGKEREFVASIGTGSNTNYADSVKGRFTISRDNAKNTVYLQMNSLKPEDTAVYYCAVQYVSYLSFPYWGQGTQVTVSS

SEQ ID NO: 11200 - protein, 117 aa, Artificial Sequence
  Chemically Synthesized
QVQLQESGGGLVQAGGSLRLSCAASGYIFYYRPMGWYRQAPGKEREFVAAIASVVLPYADSVKGRFTISRDNAKNTVYLQMNSLKPEDTAVYYCAVADAIDRYLDYWGQGTQVTVSS

SEQ ID NO: 11201 - protein, 122 aa, Artificial Sequence
  Chemically Synthesized
QVQLQESGGGLVQAGGSLRLSCAASGYIFFDYGMGWYRQAPGKERELVATIGLGANTNYADSVKGRFTISRDNAKNTVYLQMNSLKPEDTAVYYCAADNHQSQYTYDYFGYWGQGTQVTVSS

SEQ ID NO: 11202 - protein, 118 aa, Artificial Sequence
  Chemically Synthesized
QVQLQESGGGLVQAGGSLRLSCAASGYISRYGAMGWYRQAPGKERELVAGIDVGTITNYADSVKGRFTISRDNAKNTVYLQMNSLKPEDTAVYYCAVPYRVRILYDYWGQGTQVTVSS

SEQ ID NO: 11203 - protein, 122 aa, Artificial Sequence
  Chemically Synthesized
QVQLQESGGGLVQAGGSLRLSCAASGNIFDNYTMGWYRQAPGKERELVAAITVGGTTYYADSVKGRFTISRDNAKNTVYLQMNSLKPEDTAVYYCAAYTYHLSDYIASHIYWGQGTQVTVSS

SEQ ID NO: 11204 - protein, 118 aa, Artificial Sequence
  Chemically Synthesized
QVQLQESGGGLVQAGGSLRLSCAASGNISYAYEMGWYRQAPGKERELVAAINGGAITYYADSVKGRFTISRDNAKNTVYLQMNSLKPEDTAVYYCAVLTPYYDYYRYWGQGTQVTVSS

SEQ ID NO: 11205 - protein, 125 aa, Artificial Sequence
  Chemically Synthesized
QVQLQESGGGLVQAGGSLRLSCAASGNIFSVTMGWYRQAPGKERELVAGISVGATTYYADSVKGRFTISRDNAKNTVYLQMNSLKPEDTAVYYCAVGLNWDTYYSALPLSNYAYWGQGTQVTVSS

SEQ ID NO: 11206 - protein, 117 aa, Artificial Sequence
  Chemically Synthesized
QVQLQESGGGLVQAGGSLRLSCAASGTIFVDDDMGWYRQAPGKEREFVAAIARGATTYYADSVKGRFTISRDNAKNTVYLQMNSLKPEDTAVYYCAVGIGDDAYHYWGQGTQVTVSS

SEQ ID NO: 11207 - protein, 117 aa, Artificial Sequence
  Chemically Synthesized
QVQLQESGGGLVQAGGSLRLSCAASGSISEKAHMGWYRQAPGKEREFVATIGSVVLPYADSVKGRFTISRDNAKNTVYLQMNSLKPEDTAVYYCAADDDPTLPLPYWGQGTQVTVSS

SEQ ID NO: 11208 - protein, 121 aa, Artificial Sequence
  Chemically Synthesized
QVQLQESGGGLVQAGGSLRLSCAASGYFFCSLMGWYRQAPGKERELVAAIGTGGTTNYADSVKGRFTISRDNAKNTVYLQMNSLKPEDTAVYYCAVYAWPDTDYYRDYYYWGQGTQVTVSS

SEQ ID NO: 11209 - protein, 126 aa, Artificial Sequence
  Chemically Synthesized
QVQLQESGGGLVQAGGSLRLSCAASGNISVGRYMGWYRQAPGKEREFVATIGAGANTYYADSVKGRFTISRDNAKNTVYLQMNSLKPEDTAVYYCAAGYDFWPRYKGGNNADYGYWGQGTQVTVSS

SEQ ID NO: 11210 - protein, 117 aa, Artificial Sequence
  Chemically Synthesized
QVQLQESGGGLVQAGGSLRLSCAASGTISFRRSMGWYRQAPGKEREFVATIASGGNTNYADSVKGRFTISRDNAKNTVYLQMNSLKPEDTAVYYCAAAYVGAVHGYWGQGTQVTVSS

SEQ ID NO: 11211 - protein, 117 aa, Artificial Sequence
  Chemically Synthesized
QVQLQESGGGLVQAGGSLRLSCAASGYISYALDMGWYRQAPGKEREFVASINSVLLPYADSVKGRFTISRDNAKNTVYLQMNSLKPEDTAVYYCAADYLSDWWYYYWGQGTQVTVSS

SEQ ID NO: 11212 - protein, 122 aa, Artificial Sequence
  Chemically Synthesized
QVQLQESGGGLVQAGGSLRLSCAASGYISYRDAMGWYRQAPGKERELVATIAYGTNTYYADSVKGRFTISRDNAKNTVYLQMNSLKPEDTAVYYCAVAITTHQVSKPQLVYWGQGTQVTVSS

SEQ ID NO: 11213 - protein, 122 aa, Artificial Sequence
  Chemically Synthesized
QVQLQESGGGLVQAGGSLRLSCAASGNIFRERTMGWYRQAPGKERELVASIADGSITYYADSVKGRFTISRDNAKNTVYLQMNSLKPEDTAVYYCAVENDAQGVGSVWYVYWGQGTQVTVSS

SEQ ID NO: 11214 - protein, 116 aa, Artificial Sequence
  Chemically Synthesized
QVQLQESGGGLVQAGGSLRLSCAASGTIFYGSMGWYRQAPGKERELVASITTGASTNYADSVKGRFTISRDNAKNTVYLQMNSLKPEDTAVYYCAAAYLSITGIYWGQGTQVTVSS

SEQ ID NO: 11215 - protein, 118 aa, Artificial Sequence
  Chemically Synthesized
QVQLQESGGGLVQAGGSLRLSCAASGTIFTSYHMGWYRQAPGKEREFVATIDFGAITYYADSVKGRFTISRDNAKNTVYLQMNSLKPEDTAVYYCAATNGSLYDHAYWGQGTQVTVSS

SEQ ID NO: 11216 - protein, 118 aa, Artificial Sequence
  Chemically Synthesized
QVQLQESGGGLVQAGGSLRLSCAASGTISTPDYMGWYRQAPGKEREFVATINSGGSTYYADSVKGRFTISRDNAKNTVYLQMNSLKPEDTAVYYCAVFQASPGALGYWGQGTQVTVSS

SEQ ID NO: 11217 - protein, 118 aa, Artificial Sequence
  Chemically Synthesized
QVQLQESGGGLVQAGGSLRLSCAASGSISTGWYMGWYRQAPGKERELVAGIDLGGSTYYADSVKGRFTISRDNAKNTVYLQMNSLKPEDTAVYYCAVEARARGWHSYWGQGTQVTVSS

SEQ ID NO: 11218 - protein, 120 aa, Artificial Sequence
  Chemically Synthesized
QVQLQESGGGLVQAGGSLRLSCAASGNIFSSFMGWYRQAPGKERELVATILLVLLPYADSVKGRFTISRDNAKNTVYLQMNSLKPEDTAVYYCAADLDDQDRPRKYHPYWGQGTQVTVSS

SEQ ID NO: 11219 - protein, 118 aa, Artificial Sequence
  Chemically Synthesized
QVQLQESGGGLVQAGGSLRLSCAASGYIFSDAYMGWYRQAPGKEREFVATIAFGGNTNYADSVKGRFTISRDNAKNTVYLQMNSLKPEDTAVYYCAAYTLRYETHPYWGQGTQVTVSS

SEQ ID NO: 11220 - protein, 118 aa, Artificial Sequence
  Chemically Synthesized
QVQLQESGGGLVQAGGSLRLSCAASGYISPYDHMGWYRQAPGKERELVAGITIGSTTYYADSVKGRFTISRDNAKNTVYLQMNSLKPEDTAVYYCAVFRGYGAYHRYWGQGTQVTVSS

SEQ ID NO: 11221 - protein, 121 aa, Artificial Sequence
  Chemically Synthesized
QVQLQESGGGLVQAGGSLRLSCAASGTISFPYMGWYRQAPGKEREFVAAIDDGASTYYADSVKGRFTISRDNAKNTVYLQMNSLKPEDTAVYYCAALRDPYIYRTYVHDYWGQGTQVTVSS

SEQ ID NO: 11222 - protein, 116 aa, Artificial Sequence
  Chemically Synthesized
QVQLQESGGGLVQAGGSLRLSCAASGTISYYNYMGWYRQAPGKERELVAAITYGGTTYYADSVKGRFTISRDNAKNTVYLQMNSLKPEDTAVYYCAATSGPVHRYWGQGTQVTVSS

SEQ ID NO: 11223 - protein, 118 aa, Artificial Sequence
  Chemically Synthesized
QVQLQESGGGLVQAGGSLRLSCAASGTISDDYGMGWYRQAPGKEREFVATIAAGTTTNYADSVKGRFTISRDNAKNTVYLQMNSLKPEDTAVYYCAVRDYEDYAYQYWGQGTQVTVSS

SEQ ID NO: 11224 - protein, 125 aa, Artificial Sequence
  Chemically Synthesized
QVQLQESGGGLVQAGGSLRLSCAASGNIFYAWAMGWYRQAPGKERELVASIGSGASTYYADSVKGRFTISRDNAKNTVYLQMNSLKPEDTAVYYCAAVRYEKWYYYPPWITLVYWGQGTQVTVSS

SEQ ID NO: 11225 - protein, 118 aa, Artificial Sequence
  Chemically Synthesized
QVQLQESGGGLVQAGGSLRLSCAASGNIFQGYSMGWYRQAPGKEREFVAAINAGGTTNYADSVKGRFTISRDNAKNTVYLQMNSLKPEDTAVYYCAAYTFGLAYFAYWGQGTQVTVSS

SEQ ID NO: 11226 - protein, 122 aa, Artificial Sequence
  Chemically Synthesized
QVQLQESGGGLVQAGGSLRLSCAASGTISQRTYMGWYRQAPGKERELVATINPGGNTYYADSVKGRFTISRDNAKNTVYLQMNSLKPEDTAVYYCAAWVYVLVIWDYRHFYWGQGTQVTVSS

SEQ ID NO: 11227 - protein, 118 aa, Artificial Sequence
  Chemically Synthesized
QVQLQESGGGLVQAGGSLRLSCAASGTISPGTTMGWYRQAPGKERELVAGITPGGTTYYADSVKGRFTISRDNAKNTVYLQMNSLKPEDTAVYYCAAIYHLDYDLIYWGQGTQVTVSS

SEQ ID NO: 11228 - protein, 126 aa, Artificial Sequence
  Chemically Synthesized
QVQLQESGGGLVQAGGSLRLSCAASGSISVGRYMGWYRQAPGKERELVATIDVGANTNYADSVKGRFTISRDNAKNTVYLQMNSLKPEDTAVYYCAVLSDDQRERDTSGIYNYWYWGQGTQVTVSS

SEQ ID NO: 11229 - protein, 126 aa, Artificial Sequence
  Chemically Synthesized
QVQLQESGGGLVQAGGSLRLSCAASGTIFTQASMGWYRQAPGKERELVAAIDVSASTYYADSVKGRFTISRDNAKNTVYLQMNSLKPEDTAVYYCAVATGDNSVVAPHDQRGLGYWGQGTQVTVSS

SEQ ID NO: 11230 - protein, 118 aa, Artificial Sequence
  Chemically Synthesized
QVQLQESGGGLVQAGGSLRLSCAASGTISGGAYMGWYRQAPGKEREFVASITDGGNTNYADSVKGRFTISRDNAKNTVYLQMNSLKPEDTAVYYCAVAVARDSPLAYWGQGTQVTVSS

SEQ ID NO: 11231 - protein, 122 aa, Artificial Sequence
  Chemically Synthesized
QVQLQESGGGLVQAGGSLRLSCAASGNISQDSFMGWYRQAPGKERELVASIGTGSTTYYADSVKGRFTISRDNAKNTVYLQMNSLKPEDTAVYYCAAQSWRHGNTHYQLAYWGQGTQVTVSS

SEQ ID NO: 11232 - protein, 121 aa, Artificial Sequence
  Chemically Synthesized
QVQLQESGGGLVQAGGSLRLSCAASGSIFYGLVMGWYRQAPGKEREFVASITSGGSTNYADSVKGRFTISRDNAKNTVYLQMNSLKPEDTAVYYCAAWGFTGYTGSLSFYWGQGTQVTVSS

SEQ ID NO: 11233 - protein, 122 aa, Artificial Sequence
  Chemically Synthesized
QVQLQESGGGLVQAGGSLRLSCAASGNIFLYPYMGWYRQAPGKERELVAAIAFGSTTYYADSVKGRFTISRDNAKNTVYLQMNSLKPEDTAVYYCAADRLRYYQDSVGHPYWGQGTQVTVSS

SEQ ID NO: 11234 - protein, 117 aa, Artificial Sequence
  Chemically Synthesized
QVQLQESGGGLVQAGGSLRLSCAASGNISPWVYMGWYRQAPGKERELVASITRGGITYYADSVKGRFTISRDNAKNTVYLQMNSLKPEDTAVYYCAAYAWLLYLYYWGQGTQVTVSS

SEQ ID NO: 11235 - protein, 118 aa, Artificial Sequence
  Chemically Synthesized
QVQLQESGGGLVQAGGSLRLSCAASGTISLRRYMGWYRQAPGKERELVATITSGGTTYYADSVKGRFTISRDNAKNTVYLQMNSLKPEDTAVYYCAAPVQWGYVHRYWGQGTQVTVSS

SEQ ID NO: 11236 - protein, 121 aa, Artificial Sequence
  Chemically Synthesized
QVQLQESGGGLVQAGGSLRLSCAASGSIFLSYMGWYRQAPGKERELVATIAYGASTNYADSVKGRFTISRDNAKNTVYLQMNSLKPEDTAVYYCAVYAYAHTDDLLNLTYWGQGTQVTVSS

SEQ ID NO: 11237 - protein, 111 aa, Artificial Sequence
  Chemically Synthesized
QVQLQESGGGLVQAGGSLRLSCAASGNISGVAAMGWYRQAPGKERELVAGIAAGTTTNYADSVKGRFTISRDNAKNTVYLQMNSLKPEDTAVYYCASAYYWGQGTQVTVSS

SEQ ID NO: 11238 - protein, 117 aa, Artificial Sequence
  Chemically Synthesized
QVQLQESGGGLVQAGGSLRLSCAASGNIFSTRLMGWYRQAPGKERELVASITEGTNTYADSVKGRFTISRDNAKNTVYLQMNSLKPEDTAVYYCAAQDISHGYYTYWGQGTQVTVSS

SEQ ID NO: 11239 - protein, 118 aa, Artificial Sequence
  Chemically Synthesized
QVQLQESGGGLVQAGGSLRLSCAASGNIFATRYMGWYRQAPGKEREFVATIGYGATTNYADSVKGRFTISRDNAKNTVYLQMNSLKPEDTAVYYCAVQDNPPIKLAYWGQGTQVTVSS

SEQ ID NO: 11240 - protein, 122 aa, Artificial Sequence
  Chemically Synthesized
QVQLQESGGGLVQAGGSLRLSCAASGYFCWFRMGWYRQAPGKEREFVAGIDAGAITYYADSVKGRFTISRDNAKNTVYLQMNSLKPEDTAVYYCAATYYDPVDWGIPYHTYWGQGTQVTVSS

SEQ ID NO: 11241 - protein, 125 aa, Artificial Sequence
  Chemically Synthesized
QVQLQESGGGLVQAGGSLRLSCAASGSISRQSRMGWYRQAPGKERELVAGIAYGAITYYADSVKGRFTISRDNAKNTVYLQMNSLKPEDTAVYYCAVSDGRARYYVSQRSSLIYWGQGTQVTVSS

SEQ ID NO: 11242 - protein, 126 aa, Artificial Sequence
  Chemically Synthesized
QVQLQESGGGLVQAGGSLRLSCAASGNISDRVYMGWYRQAPGKERELVATIDEGANTYYADSVKGRFTISRDNAKNTVYLQMNSLKPEDTAVYYCAVGDALLYLRAQYLVYGYAYWGQGTQVTVSS

SEQ ID NO: 11243 - protein, 118 aa, Artificial Sequence
  Chemically Synthesized
QVQLQESGGGLVQAGGSLRLSCAASGTIFYTDGMGWYRQAPGKERELVAAIGYGASTNYADSVKGRFTISRDNAKNTVYLQMNSLKPEDTAVYYCAAYRGRGYLLTYWGQGTQVTVSS

SEQ ID NO: 11244 - protein, 121 aa, Artificial Sequence
  Chemically Synthesized
QVQLQESGGGLVQAGGSLRLSCAASGSISTSYGMGWYRQAPGKEREFVATIADGTITNYADSVKGRFTISRDNAKNTVYLQMNSLKPEDTAVYYCAVASLLLTTRTFCLYWGQGTQVTVSS

SEQ ID NO: 11245 - protein, 118 aa, Artificial Sequence
  Chemically Synthesized
QVQLQESGGGLVQAGGSLRLSCAASGSIFLLAYMGWYRQAPGKERELVASITVGASTYYADSVKGRFTISRDNAKNTVYLQMNSLKPEDTAVYYCAVYGDRTARFRYWGQGTQVTVSS

SEQ ID NO: 11246 - protein, 122 aa, Artificial Sequence
  Chemically Synthesized
QVQLQESGGGLVQAGGSLRLSCAASGNIFGFPYMGWYRQAPGKEREFVAGIGLGGNTYYADSVKGRFTISRDNAKNTVYLQMNSLKPEDTAVYYCAVYYAYDFAWQSRFYYWGQGTQVTVSS

SEQ ID NO: 11247 - protein, 118 aa, Artificial Sequence
  Chemically Synthesized
QVQLQESGGGLVQAGGSLRLSCAASGYISRYTFMGWYRQAPGKERELVASISGGTITNYADSVKGRFTISRDNAKNTVYLQMNSLKPEDTAVYYCAVYYRRDRTFRYWGQGTQVTVSS

SEQ ID NO: 11248 - protein, 118 aa, Artificial Sequence
  Chemically Synthesized
QVQLQESGGGLVQAGGSLRLSCAASGYISRVSYMGWYRQAPGKERELVASITYGATTNYADSVKGRFTISRDNAKNTVYLQMNSLKPEDTAVYYCAVWYAYYYALGYWGQGTQVTVSS

SEQ ID NO: 11249 - protein, 118 aa, Artificial Sequence
  Chemically Synthesized
QVQLQESGGGLVQAGGSLRLSCAASGTISVYHYMGWYRQAPGKERELVASITTGATTYYADSVKGRFTISRDNAKNTVYLQMNSLKPEDTAVYYCAARRISHSDLYYWGQGTQVTVSS

SEQ ID NO: 11250 - protein, 122 aa, Artificial Sequence
  Chemically Synthesized
QVQLQESGGGLVQAGGSLRLSCAASGYISDRLGMGWYRQAPGKEREFVAAIGPGGSTNYADSVKGRFTISRDNAKNTVYLQMNSLKPEDTAVYYCAVGYRVYGYPYETYTYWGQGTQVTVSS

SEQ ID NO: 11251 - protein, 117 aa, Artificial Sequence
  Chemically Synthesized
QVQLQESGGGLVQAGGSLRLSCAASGSIFGGAWMGWYRQAPGKERELLPLLVSVVIPYADSVKGRFTISRDNAKNTVYLQMNSLKPEDTAVYYCAVRGQPPSTHDYWGQGTQVTVSS

SEQ ID NO: 11252 - protein, 127 aa, Artificial Sequence
  Chemically Synthesized
QVQLQESGGGLVQAGGSLRLSCAASGNISVDDYMGWYRQAPGKEREFVASIGEGANTNYADSVKGRFTISRDNAKNTVYLQMNSLKPEDTAVYYCAVGWYVGDGSGRTASAVVLYYWGQGTQVTVSS

SEQ ID NO: 11253 - protein, 126 aa, Artificial Sequence
  Chemically Synthesized
QVQLQESGGGLVQAGGSLRLSCAASGTIFWTGYMGWYRQAPGKEREFVASIGYGGITYYADSVKGRFTISRDNAKNTVYLQMNSLKPEDTAVYYCAAGTDDYQYLTWWYYGYHIYWGQGTQVTVSS

SEQ ID NO: 11254 - protein, 118 aa, Artificial Sequence
  Chemically Synthesized
QVQLQESGGGLVQAGGSLRLSCAASGTIFLENLMGWYRQAPGKEREFVATIGHGANTNYADSVKGRFTISRDNAKNTVYLQMNSLKPEDTAVYYCAARRFLDGPHYYWGQGTQVTVSS

SEQ ID NO: 11255 - protein, 122 aa, Artificial Sequence
  Chemically Synthesized
QVQLQESGGGLVQAGGSLRLSCAASGTIFYFDLMGWYRQAPGKERELVASIDRGTTTYYADSVKGRFTISRDNAKNTVYLQMNSLKPEDTAVYYCAANGNQGVVDGRYLVYWGQGTQVTVSS

SEQ ID NO: 11256 - protein, 122 aa, Artificial Sequence
  Chemically Synthesized
QVQLQESGGGLVQAGGSLRLSCAASGTISPGLDMGWYRQAPGKEREFVATIDYGASTYYADSVKGRFTISRDNAKNTVYLQMNSLKPEDTAVYYCAAVPYVLPYAPWYFLYWGQGTQVTVSS

SEQ ID NO: 11257 - protein, 121 aa, Artificial Sequence
  Chemically Synthesized
QVQLQESGGGLVQAGGSLRLSCAASGYISRVDYMGWYRQAPGKERELVAGIDFGTNTNYADSVKGRFTISRDNAKNTVYLQMNSLKPEDTAVYYCAVNDPTSYTTRRVFYWGQGTQVTVSS

SEQ ID NO: 11258 - protein, 118 aa, Artificial Sequence
  Chemically Synthesized
QVQLQESGGGLVQAGGSLRLSCAASGSIFGDIGMGWYRQAPGKEREFVASIGYGGITYYADSVKGRFTISRDNAKNTVYLQMNSLKPEDTAVYYCAVYGVYLDDLYYWGQGTQVTVSS

SEQ ID NO: 11259 - protein, 118 aa, Artificial Sequence
  Chemically Synthesized
QVQLQESGGGLVQAGGSLRLSCAASGTIFEAYAMGWYRQAPGKERELVATIANGGSTYYADSVKGRFTISRDNAKNTVYLQMNSLKPEDTAVYYCAVTATRLPVHGYWGQGTQVTVSS

SEQ ID NO: 11260 - protein, 126 aa, Artificial Sequence
  Chemically Synthesized
QVQLQESGGGLVQAGGSLRLSCAASGTIFLVYSMGWYRQAPGKEREFVASISYGTNTYYADSVKGRFTISRDNAKNTVYLQMNSLKPEDTAVYYCAGVYRDGYYTSDQYVYFHYYWGQGTQVTVSS

SEQ ID NO: 11261 - protein, 113 aa, Artificial Sequence
  Chemically Synthesized
QVQLQESGGGLVQAGGSLRLSCAASGNISTLYIMGWYRQAPGKEREFVASITSGASTNYADSVKGRFTISRDNAKNTVYLQMNSLKPEDTAVYYCAVDDYWYWGQGTQVTVSS

SEQ ID NO: 11262 - protein, 118 aa, Artificial Sequence
  Chemically Synthesized
QVQLQESGGGLVQAGGSLRLSCAASGNISEHYYMGWYRQAPGKERELVAGIGQGTTTNYADSVKGRFTISRDNAKNTVYLQMNSLKPEDTAVYYCAVAITSVGSSYYWGQGTQVTVSS

SEQ ID NO: 11263 - protein, 122 aa, Artificial Sequence
  Chemically Synthesized
QVQLQESGGGLVQAGGSLRLSCAASGSISVWPSMGWYRQAPGKEREFVAAIGRGAITYYADSVKGRFTISRDNAKNTVYLQMNSLKPEDTAVYYCAAPSRRPARTYPNHAYWGQGTQVTVSS

SEQ ID NO: 11264 - protein, 118 aa, Artificial Sequence
  Chemically Synthesized
QVQLQESGGGLVQAGGSLRLSCAASGSIFGYAYMGWYRQAPGKERELVAGITLGTNTYYADSVKGRFTISRDNAKNTVYLQMNSLKPEDTAVYYCAVSFPVGPHHYYWGQGTQVTVSS

SEQ ID NO: 11265 - protein, 118 aa, Artificial Sequence
  Chemically Synthesized
QVQLQESGGGLVQAGGSLRLSCAASGNIFGEISMGWYRQAPGKEREFVASIAAGATTNYADSVKGRFTISRDNAKNTVYLQMNSLKPEDTAVYYCAVWVHGLDDLQYWGQGTQVTVSS

SEQ ID NO: 11266 - protein, 115 aa, Artificial Sequence
  Chemically Synthesized
QVQLQESGGGLVQAGGSLRLSCAASGYIFGGGNMGWYRQAPGKERELVAGIDGGTTTNYADSVKGRFTISRDNAKNTVYLQMNSLKPEDTAVYYCAAYAGVLVYWGQGTQVTVSS

SEQ ID NO: 11267 - protein, 122 aa, Artificial Sequence
  Chemically Synthesized
QVQLQESGGGLVQAGGSLRLSCAASGTIFVELMGWYRQAPGKEREFVAAINSGATTYYADSVKGRFTISRDNAKNTVYLQMNSLKPEDTAVYYCAATILGTGLSTPTYLGYWGQGTQVTVSS

SEQ ID NO: 11268 - protein, 122 aa, Artificial Sequence
  Chemically Synthesized
QVQLQESGGGLVQAGGSLRLSCAASGYIFYTQFMGWYRQAPGKERELVATITQGASTYYADSVKGRFTISRDNAKNTVYLQMNSLKPEDTAVYYCAAVDYAWQYLFPQHYYWGQGTQVTVSS

SEQ ID NO: 11269 - protein, 118 aa, Artificial Sequence
  Chemically Synthesized
QVQLQESGGGLVQAGGSLRLSCAASGYISTPYTMGWYRQAPGKERELVATISGGSTTYYADSVKGRFTISRDNAKNTVYLQMNSLKPEDTAVYYCAVDGDYIGEHLYWGQGTQVTVSS

SEQ ID NO: 11270 - protein, 118 aa, Artificial Sequence
  Chemically Synthesized
QVQLQESGGGLVQAGGSLRLSCAASGYIFASYDMGWYRQAPGKEREFVAAINTGTNTNYADSVKGRFTISRDNAKNTVYLQMNSLKPEDTAVYYCAARDKARDYLSYWGQGTQVTVSS

SEQ ID NO: 11271 - protein, 126 aa, Artificial Sequence
  Chemically Synthesized
QVQLQESGGGLVQAGGSLRLSCAASGNIFWYATMGWYRQAPGKEREFVASISYGASTYYADSVKGRFTISRDNAKNTVYLQMNSLKPEDTAVYYCAAWPHPDVSERYTYLRSYDYWGQGTQVTVSS

SEQ ID NO: 11272 - protein, 118 aa, Artificial Sequence
  Chemically Synthesized
QVQLQESGGGLVQAGGSLRLSCAASGNISYVAYMGWYRQAPGKEREFVASIDLGGNTNYADSVKGRFTISRDNAKNTVYLQMNSLKPEDTAVYYCAASPERQAVHRYWGQGTQVTVSS

SEQ ID NO: 11273 - protein, 118 aa, Artificial Sequence
  Chemically Synthesized
QVQLQESGGGLVQAGGSLRLSCAASGNISRYIDMGWYRQAPGKERELVAAITAGSITNYADSVKGRFTISRDNAKNTVYLQMNSLKPEDTAVYYCAVAVYDRDPLYYWGQGTQVTVSS

SEQ ID NO: 11274 - protein, 122 aa, Artificial Sequence
  Chemically Synthesized
QVQLQESGGGLVQAGGSLRLSCAASGTISTSLAMGWYRQAPGKEREFVATIAHGTNTNYADSVKGRFTISRDNAKNTVYLQMNSLKPEDTAVYYCAVYALYSPLYPPRLVYWGQGTQVTVSS

SEQ ID NO: 11275 - protein, 118 aa, Artificial Sequence
  Chemically Synthesized
QVQLQESGGGLVQAGGSLRLSCAASGTIFQYYSMGWYRQAPGKERELVAGITLGSTTYYADSVKGRFTISRDNAKNTVYLQMNSLKPEDTAVYYCAVIYHVVGFYGYWGQGTQVTVSS

SEQ ID NO: 11276 - protein, 122 aa, Artificial Sequence
  Chemically Synthesized
QVQLQESGGGLVQAGGSLRLSCAASGYISYGIPMGWYRQAPGKERELVAAITYGGTTNYADSVKGRFTISRDNAKNTVYLQMNSLKPEDTAVYYCAATYGDAISSRAGLSYWGQGTQVTVSS

SEQ ID NO: 11277 - protein, 118 aa, Artificial Sequence
  Chemically Synthesized
QVQLQESGGGLVQAGGSLRLSCAASGYIFTVRVMGWYRQAPGKEREFVAAIGSGANTYYADSVKGRFTISRDNAKNTVYLQMNSLKPEDTAVYYCAVQYGRYLRHVYWGQGTQVTVSS

SEQ ID NO: 11278 - protein, 118 aa, Artificial Sequence
  Chemically Synthesized
QVQLQESGGGLVQAGGSLRLSCAASGTISHNAYMGWYRQAPGKERELVAAIDDGTITYYADSVKGRFTISRDNAKNTVYLQMNSLKPEDTAVYYCAVYTPDVGTLLYWGQGTQVTVSS

SEQ ID NO: 11279 - protein, 118 aa, Artificial Sequence
  Chemically Synthesized
QVQLQESGGGLVQAGGSLRLSCAASGNISYIVRMGWYRQAPGKERELVAGIARGGITYYADSVKGRFTISRDNAKNTVYLQMNSLKPEDTAVYYCAAKRYRSGNHWYWGQGTQVTVSS

SEQ ID NO: 11280 - protein, 111 aa, Artificial Sequence
  Chemically Synthesized
QVQLQESGGGLVQAGGSLRLSCAASGYISHLDFMGWYRQAPGKEREFVATINIGGNTYYADSVKGRFTISRDNAKNTVYLQMNSLKPEDTAVYYCAAAFYWGQGTQVTVSS

SEQ ID NO: 11281 - protein, 118 aa, Artificial Sequence
  Chemically Synthesized
QVQLQESGGGLVQAGGSLRLSCAASGSIFTTYVMGWYRQAPGKEREFVAAITYGGNTNYADSVKGRFTISRDNAKNTVYLQMNSLKPEDTAVYYCAVYYPWGYWFAYWGQGTQVTVSS

SEQ ID NO: 11282 - protein, 121 aa, Artificial Sequence
  Chemically Synthesized
QVQLQESGGGLVQAGGSLRLSCAASGYISFYGDMGWYRQAPGKERELVAAMIGVLLPYADSVKGRFTISRDNAKNTVYLQMNSLKPEDTAVYYCAVRRGQNWDSGNTFAYWGQGTQVTVSS

SEQ ID NO: 11283 - protein, 122 aa, Artificial Sequence
  Chemically Synthesized
QVQLQESGGGLVQAGGSLRLSCAASGYISDTSAMGWYRQAPGKERELVAGIGYGSTTYYADSVKGRFTISRDNAKNTVYLQMNSLKPEDTAVYYCAAWLKYDTDVYSTHGYWGQGTQVTVSS

SEQ ID NO: 11284 - protein, 117 aa, Artificial Sequence
  Chemically Synthesized
QVQLQESGGGLVQAGGSLRLSCAASGSISYYTMGWYRQAPGKEREFVASINYGASTNYADSVKGRFTISRDNAKNTVYLQMNSLKPEDTAVYYCAASPQYTNYYRYWGQGTQVTVSS

SEQ ID NO: 11285 - protein, 118 aa, Artificial Sequence
  Chemically Synthesized
QVQLQESGGGLVQAGGSLRLSCAASGNIFPPWIMGWYRQAPGKEREFVASIDYGSITYYADSVKGRFTISRDNAKNTVYLQMNSLKPEDTAVYYCAVVGYDNSGHSYWGQGTQVTVSS

SEQ ID NO: 11286 - protein, 125 aa, Artificial Sequence
  Chemically Synthesized
QVQLQESGGGLVQAGGSLRLSCAASGTISRSYDMGWYRQAPGKEREFVAAISQGGSTNYADSVKGRFTISRDNAKNTVYLQMNSLKPEDTAVYYCAVWYDNEDRYVVFYHYFRYWGQGTQVTVSS

SEQ ID NO: 11287 - protein, 118 aa, Artificial Sequence
  Chemically Synthesized
QVQLQESGGGLVQAGGSLRLSCAASGNISDRGVMGWYRQAPGKERELVASIDSGTITNYADSVKGRFTISRDNAKNTVYLQMNSLKPEDTAVYYCAVRDKRESTHPYWGQGTQVTVSS

SEQ ID NO: 11288 - protein, 122 aa, Artificial Sequence
  Chemically Synthesized
QVQLQESGGGLVQAGGSLRLSCAASGSISTWPYMGWYRQAPGKERELVAAITSGASTYYADSVKGRFTISRDNAKNTVYLQMNSLKPEDTAVYYCAVIFVSYGDVTDTYLYWGQGTQVTVSS

SEQ ID NO: 11289 - protein, 122 aa, Artificial Sequence
  Chemically Synthesized
QVQLQESGGGLVQAGGSLRLSCAASGYISRTTYMGWYRQAPGKERELVAAISRGTNTNYADSVKGRFTISRDNAKNTVYLQMNSLKPEDTAVYYCAAHYRRYAYSWRYHDYWGQGTQVTVSS

SEQ ID NO: 11290 - protein, 122 aa, Artificial Sequence
  Chemically Synthesized
QVQLQESGGGLVQAGGSLRLSCAASGTIFPNGVMGWYRQAPGKEREFVAGISSGTTTNYADSVKGRFTISRDNAKNTVYLQMNSLKPEDTAVYYCAAYSYIYYNKQYHHDYWGQGTQVTVSS

SEQ ID NO: 11291 - protein, 118 aa, Artificial Sequence
  Chemically Synthesized
QVQLQESGGGLVQAGGSLRLSCAASGNISYQYVMGWYRQAPGKEREFVASIDWGANTNYADSVKGRFTISRDNAKNTVYLQMNSLKPEDTAVYYCAVLNVDGQEYDYWGQGTQVTVSS

SEQ ID NO: 11292 - protein, 122 aa, Artificial Sequence
  Chemically Synthesized
QVQLQESGGGLVQAGGSLRLSCAASGYISFDDQMGWYRQAPGKEREFVAAIADGATTYYADSVKGRFTISRDNAKNTVYLQMNSLKPEDTAVYYCAVLSYVLVPDIRSHQYWGQGTQVTVSS

SEQ ID NO: 11293 - protein, 117 aa, Artificial Sequence
  Chemically Synthesized
QVQLQESGGGLVQAGGSLRLSCAASGNISRLLHMGWYRQAPGKEREFVATITQGTTTNYADSVKGRFTISRDNAKNTVYLQMNSLKPEDTAVYYCAAYRWSYAHSYWGQGTQVTVSS

SEQ ID NO: 11294 - protein, 126 aa, Artificial Sequence
  Chemically Synthesized
QVQLQESGGGLVQAGGSLRLSCAASGYISSQVYMGWYRQAPGKEREFVAGIASGTTTNYADSVKGRFTISRDNAKNTVYLQMNSLKPEDTAVYYCAVRYSYWVGDRRHSDYAYAYWGQGTQVTVSS

SEQ ID NO: 11295 - protein, 122 aa, Artificial Sequence
  Chemically Synthesized
QVQLQESGGGLVQAGGSLRLSCAASGTISGVRFMGWYRQAPGKERELVAAIANGTNTNYADSVKGRFTISRDNAKNTVYLQMNSLKPEDTAVYYCAVVSIGSEDELSYHRYWGQGTQVTVSS

SEQ ID NO: 11296 - protein, 118 aa, Artificial Sequence
  Chemically Synthesized
QVQLQESGGGLVQAGGSLRLSCAASGSISPYGFMGWYRQAPGKEREFVAGIAGGTSTNYADSVKGRFTISRDNAKNTVYLQMNSLKPEDTAVYYCAVQRAVGYRLVYWGQGTQVTVSS

SEQ ID NO: 11297 - protein, 118 aa, Artificial Sequence
  Chemically Synthesized
QVQLQESGGGLVQAGGSLRLSCAASGTIFDWGVMGWYRQAPGKERELVAAISLGASTNYADSVKGRFTISRDNAKNTVYLQMNSLKPEDTAVYYCAVKRAGDVTLQYWGQGTQVTVSS

SEQ ID NO: 11298 - protein, 118 aa, Artificial Sequence
  Chemically Synthesized
QVQLQESGGGLVQAGGSLRLSCAASGTISSRGDMGWYRQAPGKEREFVATINSGATTNYADSVKGRFTISRDNAKNTVYLQMNSLKPEDTAVYYCAAGAYAIWHHRYWGQGTQVTVSS

SEQ ID NO: 11299 - protein, 118 aa, Artificial Sequence
  Chemically Synthesized
QVQLQESGGGLVQAGGSLRLSCAASGYISVYRIMGWYRQAPGKEREFVASITTGTNTYYADSVKGRFTISRDNAKNTVYLQMNSLKPEDTAVYYCAAPSTASTGHYYWGQGTQVTVSS

SEQ ID NO: 11300 - protein, 122 aa, Artificial Sequence
  Chemically Synthesized
QVQLQESGGGLVQAGGSLRLSCAASGTISYPYTMGWYRQAPGKERELVAAIADRCYYQYADSVKGRFTISRDNAKNTVYLQMNSLKPEDTAVYYCAAVFASRTTPTVWFVYWGQGTQVTVSS

SEQ ID NO: 11301 - protein, 112 aa, Artificial Sequence
  Chemically Synthesized
QVQLQESGGGLVQAGGSLRLSCAASGSIFGGPGMGWYRQAPGKERELVASITGGAITYYADSVKGRFTISRDNAKNTVYLQMNSLKPEDTAVYYCALGHVYWGQGTQVTVSS

SEQ ID NO: 11302 - protein, 126 aa, Artificial Sequence
  Chemically Synthesized
QVQLQESGGGLVQAGGSLRLSCAASGSIFRARYMGWYRQAPGKEREFVAAITQGSSTNYADSVKGRFTISRDNAKNTVYLQMNSLKPEDTAVYYCAAYRPLYYSRGDGQSRYFQYWGQGTQVTVSS

SEQ ID NO: 11303 - protein, 118 aa, Artificial Sequence
  Chemically Synthesized
QVQLQESGGGLVQAGGSLRLSCAASGTIFEDGLMGWYRQAPGKERELVASINEGTSTYYADSVKGRFTISRDNAKNTVYLQMNSLKPEDTAVYYCAAPSILQYAYPYWGQGTQVTVSS

SEQ ID NO: 11304 - protein, 126 aa, Artificial Sequence
  Chemically Synthesized
QVQLQESGGGLVQAGGSLRLSCAASGSISTTRDMGWYRQAPGKERELVATITYGASTNYADSVKGRFTISRDNAKNTVYLQMNSLKPEDTAVYYCAVNTYYRAKAQHTVPYYHNYWGQGTQVTVSS

SEQ ID NO: 11305 - protein, 118 aa, Artificial Sequence
  Chemically Synthesized
QVQLQESGGGLVQAGGSLRLSCAASGTISYYTYMGWYRQAPGKEREFVAGINGGGTTYYADSVKGRFTISRDNAKNTVYLQMNSLKPEDTAVYYCAVIETSEAIHFYWGQGTQVTVSS

SEQ ID NO: 11306 - protein, 124 aa, Artificial Sequence
  Chemically Synthesized
QVQLQESGGGLVQAGGSLRLSCAASGTIFRPGSMGWYRQAPGKERELVATISWGSSTYYADSVKGRFTISRDNAKNTVYLQMNSLKPEDTAVYYCAATTYGGYRRPYGHYYYYWGQGTQVTVSS

SEQ ID NO: 11307 - protein, 122 aa, Artificial Sequence
  Chemically Synthesized
QVQLQESGGGLVQAGGSLRLSCAASGNISEVYYMGWYRQAPGKERELVAAIGKGTTTYYADSVKGRFTISRDNAKNTVYLQMNSLKPEDTAVYYCAAYVDQYTNPSRVYAYWGQGTQVTVSS

SEQ ID NO: 11308 - protein, 122 aa, Artificial Sequence
  Chemically Synthesized
QVQLQESGGGLVQAGGSLRLSCAASGSIFYIQSMGWYRQAPGKEREFVASIAAGASTNYADSVKGRFTISRDNAKNTVYLQMNSLKPEDTAVYYCAANFYDDQYPDDYHPYWGQGTQVTVSS

SEQ ID NO: 11309 - protein, 118 aa, Artificial Sequence
  Chemically Synthesized
QVQLQESGGGLVQAGGSLRLSCAASGSIFAIRNMGWYRQAPGKEREFVASIAGGAITNYADSVKGRFTISRDNAKNTVYLQMNSLKPEDTAVYYCAAHLENDLLHLYWGQGTQVTVSS

SEQ ID NO: 11310 - protein, 121 aa, Artificial Sequence
  Chemically Synthesized
QVQLQESGGGLVQAGGSLRLSCAASGNIFYVRVMGWYRQAPGKERELVATIARGSTNYADSVKGRFTISRDNAKNTVYLQMNSLKPEDTAVYYCAVVDVDEDYDFGDFYYWGQGTQVTVSS

SEQ ID NO: 11311 - protein, 117 aa, Artificial Sequence
  Chemically Synthesized
QVQLQESGGGLVQAGGSLRLSCAASGTISWQSMGWYRQAPGKEREFVAGIDNGTTTNYADSVKGRFTISRDNAKNTVYLQMNSLKPEDTAVYYCAVSVGPSGPYDYWGQGTQVTVSS

SEQ ID NO: 11312 - protein, 118 aa, Artificial Sequence
  Chemically Synthesized
QVQLQESGGGLVQAGGSLRLSCAASGSIFGDNTMGWYRQAPGKEREFVAAINYGANTYYADSVKGRFTISRDNAKNTVYLQMNSLKPEDTAVYYCAAWPQSYSSLPYWGQGTQVTVSS

SEQ ID NO: 11313 - protein, 122 aa, Artificial Sequence
  Chemically Synthesized
QVQLQESGGGLVQAGGSLRLSCAASGSIFYIRSMGWYRQAPGKEREFVAAIAGGSTTNYADSVKGRFTISRDNAKNTVYLQMNSLKPEDTAVYYCAADYRANGQGYIPFWYWGQGTQVTVSS

SEQ ID NO: 11314 - protein, 117 aa, Artificial Sequence
  Chemically Synthesized
QVQLQESGGGLVQAGGSLRLSCAASGTIFQSTMGWYRQAPGKEREFVASINYGGNTNYADSVKGRFTISRDNAKNTVYLQMNSLKPEDTAVYYCAADTDHAWYHDYWGQGTQVTVSS

SEQ ID NO: 11315 - protein, 111 aa, Artificial Sequence
  Chemically Synthesized
QVQLQESGGGLVQAGGSLRLSCAASGYISNHKIMGWYRQAPGKEREFVAAISSGTTTYYADSVKGRFTISRDNAKNTVYLQMNSLKPEDTAVYYCAAAWYWGQGTQVTVSS

SEQ ID NO: 11316 - protein, 118 aa, Artificial Sequence
  Chemically Synthesized
QVQLQESGGGLVQAGGSLRLSCAASGYIFRYDKMGWYRQAPGKERELVAGISTGSSTNYADSVKGRFTISRDNAKNTVYLQMNSLKPEDTAVYYCAAYRQYTEPLTYWGQGTQVTVSS

SEQ ID NO: 11317 - protein, 122 aa, Artificial Sequence
  Chemically Synthesized
QVQLQESGGGLVQAGGSLRLSCAASGSIFFFAFMGWYRQAPGKERELVATIDPGTSTNYADSVKGRFTISRDNAKNTVYLQMNSLKPEDTAVYYCAVWSDVDGYPTPYHLYWGQGTQVTVSS

SEQ ID NO: 11318 - protein, 118 aa, Artificial Sequence
  Chemically Synthesized
QVQLQESGGGLVQAGGSLRLSCAASGTISYVTAMGWYRQAPGKERELVATISYGTNTYYADSVKGRFTISRDNAKNTVYLQMNSLKPEDTAVYYCAAYQYSYARHYYWGQGTQVTVSS

SEQ ID NO: 11319 - protein, 118 aa, Artificial Sequence
  Chemically Synthesized
QVQLQESGGGLVQAGGSLRLSCAASGSISSNGAMGWYRQAPGKEREFVAAITSGASTNYADSVKGRFTISRDNAKNTVYLQMNSLKPEDTAVYYCAAIQSEAPEHEYWGQGTQVTVSS

SEQ ID NO: 11320 - protein, 118 aa, Artificial Sequence
  Chemically Synthesized
QVQLQESGGGLVQAGGSLRLSCAASGNISSYGDMGWYRQAPGKEREFVAAIADGSITYYADSVKGRFTISRDNAKNTVYLQMNSLKPEDTAVYYCAATSQYTDYYNYWGQGTQVTVSS

SEQ ID NO: 11321 - protein, 123 aa, Artificial Sequence
  Chemically Synthesized
QVQLQESGGGLVQAGGSLRLSCAASGNISDPWYMGWYRQAPGKERELVATIDHGTTTNYADSVKGRFTISRDNAKNTVYLQMNSLKPEDTAVYYCAAYAYRDRDSAYSDLAYWGQGTQVTVSS

SEQ ID NO: 11322 - protein, 122 aa, Artificial Sequence
  Chemically Synthesized
QVQLQESGGGLVQAGGSLRLSCAASGTISARYAMGWYRQAPGKERELVAAISSGSNTYYADSVKGRFTISRDNAKNTVYLQMNSLKPEDTAVYYCAVYIDLRYLSDRQYTYWGQGTQVTVSS

SEQ ID NO: 11323 - protein, 122 aa, Artificial Sequence
  Chemically Synthesized
QVQLQESGGGLVQAGGSLRLSCAASGSIFPRNIMGWYRQAPGKERELVAAINYGAITYYADSVKGRFTISRDNAKNTVYLQMNSLKPEDTAVYYCAALYAHAPYRYNSLYYWGQGTQVTVSS

SEQ ID NO: 11324 - protein, 118 aa, Artificial Sequence
  Chemically Synthesized
QVQLQESGGGLVQAGGSLRLSCAASGNISFPGQMGWYRQAPGKERELVAAIGDGANTNYADSVKGRFTISRDNAKNTVYLQMNSLKPEDTAVYYCAVAGDLITDHVYWGQGTQVTVSS

SEQ ID NO: 11325 - protein, 117 aa, Artificial Sequence
  Chemically Synthesized
QVQLQESGGGLVQAGGSLRLSCAASGNIFARPDMGWYRQAPGKEREFVAAITYGGNTNYADSVKGRFTISRDNAKNTVYLQMNSLKPEDTAVYYCAAIVGSSCRIYWGQGTQVTVSS

SEQ ID NO: 11326 - protein, 111 aa, Artificial Sequence
  Chemically Synthesized
QVQLQESGGGLVQAGGSLRLSCAASGYIFQGDAMGWYRQAPGKERELVAAINSGATTNYADSVKGRFTISRDNAKNTVYLQMNSLKPEDTAVYYCAVNFYWGQGTQVTVSS

SEQ ID NO: 11327 - protein, 117 aa, Artificial Sequence
  Chemically Synthesized
QVQLQESGGGLVQAGGSLRLSCAASGNIFPSDFMGWYRQAPGKEREFVAAIALGVLPYADSVKGRFTISRDNAKNTVYLQMNSLKPEDTAVYYCAVRYHYNWYLPYWGQGTQVTVSS

SEQ ID NO: 11328 - protein, 117 aa, Artificial Sequence
  Chemically Synthesized
QVQLQESGGGLVQAGGSLRLSCAASGYIFRARDMGWYRQAPGKEREFVAGINYGGITYYADSVKGRFTISRDNAKNTVYLQMNSLKPEDTAVYYCAVQDVRQYHPYWGQGTQVTVSS

SEQ ID NO: 11329 - protein, 115 aa, Artificial Sequence
  Chemically Synthesized
QVQLQESGGGLVQAGGSLRLSCAASGNISTKDDMGWYRQAPGKEREFVAVLVWVLLPYADSVKGRFTISRDNAKNTVYLQMNSLKPEDTAVYYCALPGYLAHPYWGQGTQVTVSS

SEQ ID NO: 11330 - protein, 118 aa, Artificial Sequence
  Chemically Synthesized
QVQLQESGGGLVQAGGSLRLSCAASGYISYGSHMGWYRQAPGKERELVAAIGYGGSTYYADSVKGRFTISRDNAKNTVYLQMNSLKPEDTAVYYCAVVGPNPGGFYYWGQGTQVTVSS

SEQ ID NO: 11331 - protein, 122 aa, Artificial Sequence
  Chemically Synthesized
QVQLQESGGGLVQAGGSLRLSCAASGNIFTDAVMGWYRQAPGKERELVAGIGYGAITNYADSVKGRFTISRDNAKNTVYLQMNSLKPEDTAVYYCAAARHTGHLYVQVLRYWGQGTQVTVSS

SEQ ID NO: 11332 - protein, 118 aa, Artificial Sequence
  Chemically Synthesized
QVQLQESGGGLVQAGGSLRLSCAASGNIFGPTYMGWYRQAPGKERELVAGIAIGTTTNYADSVKGRFTISRDNAKNTVYLQMNSLKPEDTAVYYCAVITQLGYLFEYWGQGTQVTVSS

SEQ ID NO: 11333 - protein, 112 aa, Artificial Sequence
  Chemically Synthesized
QVQLQESGGGLVQAGGSLRLSCAASGYMGWYRQAPGKEREFVASIDYGSNTNYADSVKGRFTISRDNAKNTVYLQMNSLKPEDTAVYYCAADYLWDYHYAYWGQGTQVTVSS

SEQ ID NO: 11334 - protein, 118 aa, Artificial Sequence
  Chemically Synthesized
QVQLQESGGGLVQAGGSLRLSCAASGTISSYYYMGWYRQAPGKEREFVATIGAGTTTYYADSVKGRFTISRDNAKNTVYLQMNSLKPEDTAVYYCAVGVYDNYILGYWGQGTQVTVSS

SEQ ID NO: 11335 - protein, 115 aa, Artificial Sequence
  Chemically Synthesized
QVQLQESGGGLVQAGGSLRLSCAASGTISSTVMGWYRQAPGKEREFVATISAGATTYYADSVKGRFTISRDNAKNTVYLQMNSLKPEDTAVYYCAADQEYTYAYWGQGTQVTVSS

SEQ ID NO: 11336 - protein, 117 aa, Artificial Sequence
  Chemically Synthesized
QVQLQESGGGLVQAGGSLRLSCAASGSIFYGGFMGWYRQAPGKERELVASINQGSNTNYADSVKGRFTISRDNAKNTVYLQMNSLKPEDTAVYYCAAPVPYHSFDYWGQGTQVTVSS

SEQ ID NO: 11337 - protein, 118 aa, Artificial Sequence
  Chemically Synthesized
QVQLQESGGGLVQAGGSLRLSCAASGTIFNYTRMGWYRQAPGKERELVATIDQGGNTNYADSVKGRFTISRDNAKNTVYLQMNSLKPEDTAVYYCAVDLYYAGYLVYWGQGTQVTVSS

SEQ ID NO: 11338 - protein, 118 aa, Artificial Sequence
  Chemically Synthesized
QVQLQESGGGLVQAGGSLRLSCAASGSISDGIAMGWYRQAPGKEREFVASISSGTTTYYADSVKGRFTISRDNAKNTVYLQMNSLKPEDTAVYYCAAPASSFTAHSYWGQGTQVTVSS

SEQ ID NO: 11339 - protein, 125 aa, Artificial Sequence
  Chemically Synthesized
QVQLQESGGGLVQAGGSLRLSCAASGTIFPSSMGWYRQAPGKEREFVAGITAGTSTYYADSVKGRFTISRDNAKNTVYLQMNSLKPEDTAVYYCAVYAKDLLIPGPSDYADFQYWGQGTQVTVSS

SEQ ID NO: 11340 - protein, 122 aa, Artificial Sequence
  Chemically Synthesized
QVQLQESGGGLVQAGGSLRLSCAASGSISSIAYMGWYRQAPGKERELVATITSGTTTYYADSVKGRFTISRDNAKNTVYLQMNSLKPEDTAVYYCAVYVGYTPTAWGSLYYWGQGTQVTVSS

SEQ ID NO: 11341 - protein, 118 aa, Artificial Sequence
  Chemically Synthesized
QVQLQESGGGLVQAGGSLRLSCAASGTIFYFRYMGWYRQAPGKEREFVASITNGGITNYADSVKGRFTISRDNAKNTVYLQMNSLKPEDTAVYYCAVYVERATQHSYWGQGTQVTVSS

SEQ ID NO: 11342 - protein, 118 aa, Artificial Sequence
  Chemically Synthesized
QVQLQESGGGLVQAGGSLRLSCAASGTISRGSYMGWYRQAPGKERELVASIGWGGITYYADSVKGRFTISRDNAKNTVYLQMNSLKPEDTAVYYCAAYAGYYRRYIYWGQGTQVTVSS

SEQ ID NO: 11343 - protein, 121 aa, Artificial Sequence
  Chemically Synthesized
QVQLQESGGGLVQAGGSLRLSCAASGSISTVRYMGWYRQAPGKEREFVAAINIGATTYYADSVKGRFTISRDNAKNTVYLQMNSLKPEDTAVYYCAASVGTTVTTLTTMYWGQGTQVTVSS

SEQ ID NO: 11344 - protein, 122 aa, Artificial Sequence
  Chemically Synthesized
QVQLQESGGGLVQAGGSLRLSCAASGYISLGDSMGWYRQAPGKEREFVATIGDGTSTYYADSVKGRFTISRDNAKNTVYLQMNSLKPEDTAVYYCAVQYSSPRLANGWHRYWGQGTQVTVSS

SEQ ID NO: 11345 - protein, 122 aa, Artificial Sequence
  Chemically Synthesized
QVQLQESGGGLVQAGGSLRLSCAASGNISNITDMGWYRQAPGKEREFVASIGDGSNTNYADSVKGRFTISRDNAKNTVYLQMNSLKPEDTAVYYCAVARVGGNYYGIPHHYWGQGTQVTVSS

SEQ ID NO: 11346 - protein, 118 aa, Artificial Sequence
  Chemically Synthesized
QVQLQESGGGLVQAGGSLRLSCAASGTISSGSAMGWYRQAPGKERELVAAIGYGGTTYYADSVKGRFTISRDNAKNTVYLQMNSLKPEDTAVYYCAAGLYEGAYHPYWGQGTQVTVSS

SEQ ID NO: 11347 - protein, 122 aa, Artificial Sequence
  Chemically Synthesized
QVQLQESGGGLVQAGGSLRLSCAASGTISRVGEMGWYRQAPGKERELVASIATGTNTNYADSVKGRFTISRDNAKNTVYLQMNSLKPEDTAVYYCAADYTDRPWIDQDYGYWGQGTQVTVSS

SEQ ID NO: 11348 - protein, 118 aa, Artificial Sequence
  Chemically Synthesized
QVQLQESGGGLVQAGGSLRLSCAASGTISYTRWMGWYRQAPGKERELVATIADGSNTNYADSVKGRFTISRDNAKNTVYLQMNSLKPEDTAVYYCAVSHPRDRDLDYWGQGTQVTVSS

SEQ ID NO: 11349 - protein, 118 aa, Artificial Sequence
  Chemically Synthesized
QVQLQESGGGLVQAGGSLRLSCAASGSIFLDGGMGWYRQAPGKERELVAAISPGSNTYYADSVKGRFTISRDNAKNTVYLQMNSLKPEDTAVYYCAAWYNLRGDYPYWGQGTQVTVSS

SEQ ID NO: 11350 - protein, 118 aa, Artificial Sequence
  Chemically Synthesized
QVQLQESGGGLVQAGGSLRLSCAASGNIFLSLWMGWYRQAPGKEREFVAAITDGSTTNYADSVKGRFTISRDNAKNTVYLQMNSLKPEDTAVYYCAAYDRHAYAYIYWGQGTQVTVSS

SEQ ID NO: 11351 - protein, 118 aa, Artificial Sequence
  Chemically Synthesized
QVQLQESGGGLVQAGGSLRLSCAASGTISYRNDMGWYRQAPGKERELVAGITIGANTNYADSVKGRFTISRDNAKNTVYLQMNSLKPEDTAVYYCAAPVLYRSEHAYWGQGTQVTVSS

SEQ ID NO: 11352 - protein, 125 aa, Artificial Sequence
  Chemically Synthesized
QVQLQESGGGLVQAGGSLRLSCAASGYIFWYSSMGWYRQAPGKEREFVAAITEGATTNYADSVKGRFTISRDNAKNTVYLQMNSLKPEDTAVYYCAVFVTGTFAVGYVRGDRHYWGQGTQVTVSS

SEQ ID NO: 11353 - protein, 122 aa, Artificial Sequence
  Chemically Synthesized
QVQLQESGGGLVQAGGSLRLSCAASGNIFAYDNMGWYRQAPGKERELVATITKGGNTNYADSVKGRFTISRDNAKNTVYLQMNSLKPEDTAVYYCAVFLTYEKYPGRDLGYWGQGTQVTVSS

SEQ ID NO: 11354 - protein, 126 aa, Artificial Sequence
  Chemically Synthesized
QVQLQESGGGLVQAGGSLRLSCAASGSISGGPSMGWYRQAPGKERELVAAIDRGGTTNYADSVKGRFTISRDNAKNTVYLQMNSLKPEDTAVYYCAVDYQVWQLYPEIITYVHWYWGQGTQVTVSS

SEQ ID NO: 11355 - protein, 118 aa, Artificial Sequence
  Chemically Synthesized
QVQLQESGGGLVQAGGSLRLSCAASGNISTLQTMGWYRQAPGKEREFVAAIGDGTNTNYADSVKGRFTISRDNAKNTVYLQMNSLKPEDTAVYYCAVDEDGNVSYRYWGQGTQVTVSS

SEQ ID NO: 11356 - protein, 118 aa, Artificial Sequence
  Chemically Synthesized
QVQLQESGGGLVQAGGSLRLSCAASGYISRPYFMGWYRQAPGKERELVAAISVGAITYYADSVKGRFTISRDNAKNTVYLQMNSLKPEDTAVYYCAVPHGRYARHAYWGQGTQVTVSS

SEQ ID NO: 11357 - protein, 122 aa, Artificial Sequence
  Chemically Synthesized
QVQLQESGGGLVQAGGSLRLSCAASGYISTPYEMGWYRQAPGKERELVATITRGATTNYADSVKGRFTISRDNAKNTVYLQMNSLKPEDTAVYYCAVYYLIDGYIDYSYSYWGQGTQVTVSS

SEQ ID NO: 11358 - protein, 118 aa, Artificial Sequence
  Chemically Synthesized
QVQLQESGGGLVQAGGSLRLSCAASGTISGVYNMGWYRQAPGKEREFVAAITDGSITNYADSVKGRFTISRDNAKNTVYLQMNSLKPEDTAVYYCAASSDYPDVLEYWGQGTQVTVSS

SEQ ID NO: 11359 - protein, 122 aa, Artificial Sequence
  Chemically Synthesized
QVQLQESGGGLVQAGGSLRLSCAASGYISRYTAMGWYRQAPGKEREFVATINYGANTNYADSVKGRFTISRDNAKNTVYLQMNSLKPEDTAVYYCAVNYYEYTHEQPIYSYWGQGTQVTVSS

SEQ ID NO: 11360 - protein, 118 aa, Artificial Sequence
  Chemically Synthesized
QVQLQESGGGLVQAGGSLRLSCAASGTIFADGYMGWYRQAPGKEREFVASIAQGANTNYADSVKGRFTISRDNAKNTVYLQMNSLKPEDTAVYYCAVKYVSPQGHPYWGQGTQVTVSS

SEQ ID NO: 11361 - protein, 126 aa, Artificial Sequence
  Chemically Synthesized
QVQLQESGGGLVQAGGSLRLSCAASGNISYYYDMGWYRQAPGKERELVATIDGGSNTNYADSVKGRFTISRDNAKNTVYLQMNSLKPEDTAVYYCAVVDGHYRYRHEYWDTYHTYWGQGTQVTVSS

SEQ ID NO: 11362 - protein, 112 aa, Artificial Sequence
  Chemically Synthesized
QVQLQESGGGLVQAGGSLRLSCAASGSISTGDGMGWYRQAPGKERELVATITNGASTNYADSVKGRFTISRDNAKNTVYLQMNSLKPEDTAVYYCAVAYPYWGQGTQVTVSS

SEQ ID NO: 11363 - protein, 118 aa, Artificial Sequence
  Chemically Synthesized
QVQLQESGGGLVQAGGSLRLSCAASGNISVSRAMGWYRQAPGKEREFVAAIASWVVVPYADSVKGRFTISRDNAKNTVYLQMNSLKPEDTAVYYCAVDRKRIYRHYYWGQGTQVTVSS

SEQ ID NO: 11364 - protein, 118 aa, Artificial Sequence
  Chemically Synthesized
QVQLQESGGGLVQAGGSLRLSCAASGSISYYPSMGWYRQAPGKEREFVAGISNGTSTYYADSVKGRFTISRDNAKNTVYLQMNSLKPEDTAVYYCAVIQDRYNRLEYWGQGTQVTVSS

SEQ ID NO: 11365 - protein, 118 aa, Artificial Sequence
  Chemically Synthesized
QVQLQESGGGLVQAGGSLRLSCAASGNIFYEYYMGWYRQAPGKEREFVAGIDDGTNTNYADSVKGRFTISRDNAKNTVYLQMNSLKPEDTAVYYCAAGDELYVDHFYWGQGTQVTVSS

SEQ ID NO: 11366 - protein, 126 aa, Artificial Sequence
  Chemically Synthesized
QVQLQESGGGLVQAGGSLRLSCAASGYISRGGAMGWYRQAPGKEREFVASINHGSNTNYADSVKGRFTISRDNAKNTVYLQMNSLKPEDTAVYYCAAYYYVRAYGYWGKYAALNYWGQGTQVTVSS

SEQ ID NO: 11367 - protein, 122 aa, Artificial Sequence
  Chemically Synthesized
QVQLQESGGGLVQAGGSLRLSCAASGTISPWWAMGWYRQAPGKEREFVASIGYGASTYYADSVKGRFTISRDNAKNTVYLQMNSLKPEDTAVYYCAAYGEHYVHSDGDHNYWGQGTQVTVSS

SEQ ID NO: 11368 - protein, 117 aa, Artificial Sequence
  Chemically Synthesized
QVQLQESGGGLVQAGGSLRLSCAASGNISYVGHMGWYRQAPGKERELVAAIGTGGTTYYADSVKGRFTISRDNAKNTVYLQMNSLKPEDTAVYYCAVVDDDLLGHYWGQGTQVTVSS

SEQ ID NO: 11369 - protein, 116 aa, Artificial Sequence
  Chemically Synthesized
QVQLQESGGGLVQAGGSLRLSCAASGNISRPSDMGWYRQAPGKEREFVATIAYGGTTYADSVKGRFTISRDNAKNTVYLQMNSLKPEDTAVYYCAVTYVYDEYTYWGQGTQVTVSS

SEQ ID NO: 11370 - protein, 118 aa, Artificial Sequence
  Chemically Synthesized
QVQLQESGGGLVQAGGSLRLSCAASGYISGYSIMGWYRQAPGKEREFVAGITYGGTTNYADSVKGRFTISRDNAKNTVYLQMNSLKPEDTAVYYCAVDSYIDTWLGYWGQGTQVTVSS

SEQ ID NO: 11371 - protein, 126 aa, Artificial Sequence
  Chemically Synthesized
QVQLQESGGGLVQAGGSLRLSCAASGTISWVGVMGWYRQAPGKEREFVAGITPGSITYYADSVKGRFTISRDNAKNTVYLQMNSLKPEDTAVYYCAADVTSKVGRGYDDRYVLGYWGQGTQVTVSS

SEQ ID NO: 11372 - protein, 115 aa, Artificial Sequence
  Chemically Synthesized
QVQLQESGGGLVQAGGSLRLSCAASGSIFGRELMGWYRQAPGKEREFVAAINYGATTNYADSVKGRFTISRDNAKNTVYLQMNSLKPEDTAVYYCAYTDDYFSYWGQGTQVTVSS

SEQ ID NO: 11373 - protein, 118 aa, Artificial Sequence
  Chemically Synthesized
QVQLQESGGGLVQAGGSLRLSCAASGNISLRDDMGWYRQAPGKEREFVAGIDDGTSTYYADSVKGRFTISRDNAKNTVYLQMNSLKPEDTAVYYCAAEDTPYGYFRYWGQGTQVTVSS

SEQ ID NO: 11374 - protein, 126 aa, Artificial Sequence
  Chemically Synthesized
QVQLQESGGGLVQAGGSLRLSCAASGNISTDANMGWYRQAPGKERELVAGIGDGGNTYYADSVKGRFTISRDNAKNTVYLQMNSLKPEDTAVYYCAAGYGFLYGEPSEYRPYFYYWGQGTQVTVSS

SEQ ID NO: 11375 - protein, 122 aa, Artificial Sequence
  Chemically Synthesized
QVQLQESGGGLVQAGGSLRLSCAASGTISQVYVMGWYRQAPGKEREFVAAINLGGITNYADSVKGRFTISRDNAKNTVYLQMNSLKPEDTAVYYCAVDSRWDRPPYEWHGYWGQGTQVTVSS

SEQ ID NO: 11376 - protein, 121 aa, Artificial Sequence
  Chemically Synthesized
QVQLQESGGGLVQAGGSLRLSCAASGSISGYTIMGWYRQAPGKEREFVAAINRGATTNYADSVKGRFTISRDNAKNTVYLQMNSLKPEDTAVYYCAVDWREVDDAYYHAYWGQGTQVTVSS

SEQ ID NO: 11377 - protein, 127 aa, Artificial Sequence
  Chemically Synthesized
QVQLQESGGGLVQAGGSLRLSCAASGYISHPTLMGWYRQAPGKERELVAGIDLGGSSTNYADSVKGRFTISRDNAKNTVYLQMNSLKPEDTAVYYCAADSYVQSGDATGRGVWHGYWGQGTQVTVSS

SEQ ID NO: 11378 - protein, 118 aa, Artificial Sequence
  Chemically Synthesized
QVQLQESGGGLVQAGGSLRLSCAASGTIFQPYIMGWYRQAPGKEREFVAGITRGAITNYADSVKGRFTISRDNAKNTVYLQMNSLKPEDTAVYYCAADTYREAYLWYWGQGTQVTVSS

SEQ ID NO: 11379 - protein, 122 aa, Artificial Sequence
  Chemically Synthesized
QVQLQESGGGLVQAGGSLRLSCAASGYIFAYGGMGWYRQAPGKEREFVATISNGAITYYADSVKGRFTISRDNAKNTVYLQMNSLKPEDTAVYYCAVEGYGADVSGAYYYYWGQGTQVTVSS

SEQ ID NO: 11380 - protein, 118 aa, Artificial Sequence
  Chemically Synthesized
QVQLQESGGGLVQAGGSLRLSCAASGTISIVYVMGWYRQAPGKERELVAGINTGSNTYYADSVKGRFTISRDNAKNTVYLQMNSLKPEDTAVYYCAAEYYQTYWHGYWGQGTQVTVSS

SEQ ID NO: 11381 - protein, 119 aa, Artificial Sequence
  Chemically Synthesized
QVQLQESGGGLVQAGGSLRLSCAASGTIFDGEYMGWYRQAPGKERELVAGIGRGGITNYADSVKGRFTISRDNAKNTVYLQMNSLKPEDTAVYYCAAELSDLDSDLTYWGQGTQVTVSS

SEQ ID NO: 11382 - protein, 126 aa, Artificial Sequence
  Chemically Synthesized
QVQLQESGGGLVQAGGSLRLSCAASGTISQGGSMGWYRQAPGKEREFVASINVGSNTNYADSVKGRFTISRDNAKNTVYLQMNSLKPEDTAVYYCAAGQFDGPYSRYADSYYLYYWGQGTQVTVSS

SEQ ID NO: 11383 - protein, 122 aa, Artificial Sequence
  Chemically Synthesized
QVQLQESGGGLVQAGGSLRLSCAASGTISTYIVMGWYRQAPGKEREFVAAINTGATTYYADSVKGRFTISRDNAKNTVYLQMNSLKPEDTAVYYCAVGYRAQDLWDETLWYWGQGTQVTVSS

SEQ ID NO: 11384 - protein, 121 aa, Artificial Sequence
  Chemically Synthesized
QVQLQESGGGLVQAGGSLRLSCAASGTIFGYYNMGWYRQAPGKERELVAAISDGSITYADSVKGRFTISRDNAKNTVYLQMNSLKPEDTAVYYCAAAPRTYGRDGDTHFYWGQGTQVTVSS

SEQ ID NO: 11385 - protein, 122 aa, Artificial Sequence
  Chemically Synthesized
QVQLQESGGGLVQAGGSLRLSCAASGTIFIRSGMGWYRQAPGKEREFVAGISYGANTNYADSVKGRFTISRDNAKNTVYLQMNSLKPEDTAVYYCAVYWYRWRTQYSVLGYWGQGTQVTVSS

SEQ ID NO: 11386 - protein, 122 aa, Artificial Sequence
  Chemically Synthesized
QVQLQESGGGLVQAGGSLRLSCAASGSISSIDYMGWYRQAPGKEREFVATIDDGTSTYYADSVKGRFTISRDNAKNTVYLQMNSLKPEDTAVYYCAASWDDDDPWDDTLEYWGQGTQVTVSS

SEQ ID NO: 11387 - protein, 122 aa, Artificial Sequence
  Chemically Synthesized
QVQLQESGGGLVQAGGSLRLSCAASGYISWHAVMGWYRQAPGKERELVASISNGASTNYADSVKGRFTISRDNAKNTVYLQMNSLKPEDTAVYYCAVGVGGRSYPWFEHSYWGQGTQVTVSS

SEQ ID NO: 11388 - protein, 117 aa, Artificial Sequence
  Chemically Synthesized
QVQLQESGGGLVQAGGSLRLSCAASGNIFYYYLMGWYRQAPGKERELVAAIGSGGNTNYADSVKGRFTISRDNAKNTVYLQMNSLKPEDTAVYYCAAQSLTTTCIYWGQGTQVTVSS

SEQ ID NO: 11389 - protein, 116 aa, Artificial Sequence
  Chemically Synthesized
QVQLQESGGGLVQAGGSLRLSCAASGYISTTMGWYRQAPGKEREFVASISYGANTNYADSVKGRFTISRDNAKNTVYLQMNSLKPEDTAVYYCAAYSTRTTSVWYWGQGTQVTVSS

SEQ ID NO: 11390 - protein, 123 aa, Artificial Sequence
  Chemically Synthesized
QVQLQESGGGLVQAGGSLRLSCAASGTISPYRYMGWYRQAPGKEREFVATGGSTNYADSVKGRFTISRDNAKNTVYLQMNSLKPEDTAVYYCAANDGTDQPYPNWYYQAHNYWGQGTQVTVSS

SEQ ID NO: 11391 - protein, 112 aa, Artificial Sequence
  Chemically Synthesized
QVQLQESGGGLVQAGGSLRLSCAASGYIFQYSTMGWYRQAPGKERELVAAIGGGGSTNYADSVKGRFTISRDNAKNTVYLQMNSLKPEDTAVYYCAANLTYWGQGTQVTVSS

SEQ ID NO: 11392 - protein, 122 aa, Artificial Sequence
  Chemically Synthesized
QVQLQESGGGLVQAGGSLRLSCAASGNISDLDHMGWYRQAPGKERELVAGIGPGTITNYADSVKGRFTISRDNAKNTVYLQMNSLKPEDTAVYYCAVEWGGREDRSIVHSYWGQGTQVTVSS

SEQ ID NO: 11393 - protein, 118 aa, Artificial Sequence
  Chemically Synthesized
QVQLQESGGGLVQAGGSLRLSCAASGNISDAYVMGWYRQAPGKERELVAGISIGTSTNYADSVKGRFTISRDNAKNTVYLQMNSLKPEDTAVYYCAAIGYWYDYFHYWGQGTQVTVSS

SEQ ID NO: 11394 - protein, 118 aa, Artificial Sequence
  Chemically Synthesized
QVQLQESGGGLVQAGGSLRLSCAASGTIFSPSSMGWYRQAPGKERELVAGIGQGSITYYADSVKGRFTISRDNAKNTVYLQMNSLKPEDTAVYYCAADIPTVTVLIYWGQGTQVTVSS

SEQ ID NO: 11395 - protein, 118 aa, Artificial Sequence
  Chemically Synthesized
QVQLQESGGGLVQAGGSLRLSCAASGNISYGEAMGWYRQAPGKERELVASIGLGGITNYADSVKGRFTISRDNAKNTVYLQMNSLKPEDTAVYYCAVTVEDVGNHYYWGQGTQVTVSS

SEQ ID NO: 11396 - protein, 118 aa, Artificial Sequence
  Chemically Synthesized
QVQLQESGGGLVQAGGSLRLSCAASGYIFDEENMGWYRQAPGKEREFVASIGYGGTTYYADSVKGRFTISRDNAKNTVYLQMNSLKPEDTAVYYCAAAFYQSGIYGYWGQGTQVTVSS

SEQ ID NO: 11397 - protein, 122 aa, Artificial Sequence
  Chemically Synthesized
QVQLQESGGGLVQAGGSLRLSCAASGNIFSTYGMGWYRQAPGKEREFVATISAGGSTNYADSVKGRFTISRDNAKNTVYLQMNSLKPEDTAVYYCAVDEPSPYYDPAAFDYWGQGTQVTVSS

SEQ ID NO: 11398 - protein, 121 aa, Artificial Sequence
  Chemically Synthesized
QVQLQESGGGLVQAGGSLRLSCAASGSISLLLMGWYRQAPGKERELVAGITRGGNTYYADSVKGRFTISRDNAKNTVYLQMNSLKPEDTAVYYCAAPPYVDQDILRDYDYWGQGTQVTVSS

SEQ ID NO: 11399 - protein, 124 aa, Artificial Sequence
  Chemically Synthesized
QVQLQESGGGLVQAGGSLRLSCAASGNIFGTRFMGWYRQAPGKERELVAGIDYGGTTNYADSVKGRFTISRDNAKNTVYLQMNSLKPEDTAVYYCAAYDYDGGYGGYYYPHGYWGQGTQVTVSS

SEQ ID NO: 11400 - protein, 117 aa, Artificial Sequence
  Chemically Synthesized
QVQLQESGGGLVQAGGSLRLSCAASGYISALRMGWYRQAPGKERELVATITFGGNTNYADSVKGRFTISRDNAKNTVYLQMNSLKPEDTAVYYCAADDYQPALLGYWGQGTQVTVSS

SEQ ID NO: 11401 - protein, 126 aa, Artificial Sequence
  Chemically Synthesized
QVQLQESGGGLVQAGGSLRLSCAASGNISDLYYMGWYRQAPGKEREFVAGIDDGTTTNYADSVKGRFTISRDNAKNTVYLQMNSLKPEDTAVYYCAVYQRYVADPKRGWLRYHSYWGQGTQVTVSS

SEQ ID NO: 11402 - protein, 126 aa, Artificial Sequence
  Chemically Synthesized
QVQLQESGGGLVQAGGSLRLSCAASGNISYKSGMGWYRQAPGKEREFVAAITDGGITNYADSVKGRFTISRDNAKNTVYLQMNSLKPEDTAVYYCAAYAYDPDYIWYVYGWLHDYWGQGTQVTVSS

SEQ ID NO: 11403 - protein, 118 aa, Artificial Sequence
  Chemically Synthesized
QVQLQESGGGLVQAGGSLRLSCAASGNISELGWMGWYRQAPGKEREFVAGIAWGSSTNYADSVKGRFTISRDNAKNTVYLQMNSLKPEDTAVYYCAAGPRNRDALHYWGQGTQVTVSS

SEQ ID NO: 11404 - protein, 127 aa, Artificial Sequence
  Chemically Synthesized
QVQLQESGGGLVQAGGSLRLSCAASGNISSSWIMGWYRQAPGKERELVAGIGNGATTNYADSVKGRFTISRDNAKNTVYLQMNSLKPEDTAVYYCAAPYDYYYYSFLGGTTRAHYYWGQGTQVTVSS

SEQ ID NO: 11405 - protein, 118 aa, Artificial Sequence
  Chemically Synthesized
QVQLQESGGGLVQAGGSLRLSCAASGSISHGRWMGWYRQAPGKEREFVASIAYGANTYYADSVKGRFTISRDNAKNTVYLQMNSLKPEDTAVYYCAVSLGFPYAHLYWGQGTQVTVSS

SEQ ID NO: 11406 - protein, 118 aa, Artificial Sequence
  Chemically Synthesized
QVQLQESGGGLVQAGGSLRLSCAASGNISAWYYMGWYRQAPGKERELVASIADGASTYYADSVKGRFTISRDNAKNTVYLQMNSLKPEDTAVYYCAASGNQYPDYYYWGQGTQVTVSS

SEQ ID NO: 11407 - protein, 117 aa, Artificial Sequence
  Chemically Synthesized
QVQLQESGGGLVQAGGSLRLSCAASGNISADNYMGWYRQAPGKEREFVAAIGQGATTYYADSVKGRFTISRDNAKNTVYLQMNSLKPEDTAVYYCAAYWYDRYLWYWGQGTQVTVSS

SEQ ID NO: 11408 - protein, 111 aa, Artificial Sequence
  Chemically Synthesized
QVQLQESGGGLVQAGGSLRLSCAASGTIFVNTTMGWYRQAPGKERELVAGITHGGTTNYADSVKGRFTISRDNAKNTVYLQMNSLKPEDTAVYYCAVYFYWGQGTQVTVSS

SEQ ID NO: 11409 - protein, 125 aa, Artificial Sequence
  Chemically Synthesized
QVQLQESGGGLVQAGGSLRLSCAASGYISDEYPMGWYRQAPGKEREFVAGISYGASTNYADSVKGRFTISRDNAKNTVYLQMNSLKPEDTAVYYCAAGFNDYGYTYYTNIDHGYWGQGTQVTVSS

SEQ ID NO: 11410 - protein, 118 aa, Artificial Sequence
  Chemically Synthesized
QVQLQESGGGLVQAGGSLRLSCAASGTISYLHNMGWYRQAPGKEREFVAGISQGGTTYYADSVKGRFTISRDNAKNTVYLQMNSLKPEDTAVYYCAVYYFIDYQFRYWGQGTQVTVSS

SEQ ID NO: 11411 - protein, 118 aa, Artificial Sequence
  Chemically Synthesized
QVQLQESGGGLVQAGGSLRLSCAASGNIFLFSFMGWYRQAPGKEREFVASIAYGTSTNYADSVKGRFTISRDNAKNTVYLQMNSLKPEDTAVYYCAADYFTYQRYDYWGQGTQVTVSS

SEQ ID NO: 11412 - protein, 122 aa, Artificial Sequence
  Chemically Synthesized
QVQLQESGGGLVQAGGSLRLSCAASGSISRGPYMGWYRQAPGKEREFVASIDWGGSTYYADSVKGRFTISRDNAKNTVYLQMNSLKPEDTAVYYCAVYDTLDGARTGIFYYWGQGTQVTVSS

SEQ ID NO: 11413 - protein, 121 aa, Artificial Sequence
  Chemically Synthesized
QVQLQESGGGLVQAGGSLRLSCAASGTISYFNTMGWYRQAPGKEREFVASISDGGIPYADSVKGRFTISRDNAKNTVYLQMNSLKPEDTAVYYCAARSYIDYTDGDDFYYWGQGTQVTVSS

SEQ ID NO: 11414 - protein, 118 aa, Artificial Sequence
  Chemically Synthesized
QVQLQESGGGLVQAGGSLRLSCAASGNISFDVSMGWYRQAPGKERELVAAIGQGSITYYADSVKGRFTISRDNAKNTVYLQMNSLKPEDTAVYYCAVDSLSDTYHQYWGQGTQVTVSS

SEQ ID NO: 11415 - protein, 118 aa, Artificial Sequence
  Chemically Synthesized
QVQLQESGGGLVQAGGSLRLSCAASGYIFRRSVMGWYRQAPGKERELVASIARGSTTNYADSVKGRFTISRDNAKNTVYLQMNSLKPEDTAVYYCAVFNDLDYTHTYWGQGTQVTVSS

SEQ ID NO: 11416 - protein, 125 aa, Artificial Sequence
  Chemically Synthesized
QVQLQESGGGLVQAGGSLRLSCAASGTISTSTMGWYRQAPGKERELVATISSGTNTNYADSVKGRFTISRDNAKNTVYLQMNSLKPEDTAVYYCAAVLADGIYANLSQQAYHDYWGQGTQVTVSS

SEQ ID NO: 11417 - protein, 113 aa, Artificial Sequence
  Chemically Synthesized
QVQLQESGGGLVQAGGSLRLSCAASGSISSPAYMGWYRQAPGKERELVASIAYGSSTNYADSVKGRFTISRDNAKNTVYLQMNSLKPEDTAVYYCAGRTVLYWGQGTQVTVSS

SEQ ID NO: 11418 - protein, 109 aa, Artificial Sequence
  Chemically Synthesized
QVQLQESGGGLVQAGGSLRLSCAASGTISYDNLMGWYRQAPGKERELVPYADSVKGRFTISRDNAKNTVYLQMNSLKPEDTAVYYCAAYYSDRYYFQYWGQGTQVTVSS

SEQ ID NO: 11419 - protein, 126 aa, Artificial Sequence
  Chemically Synthesized
QVQLQESGGGLVQAGGSLRLSCAASGTIFVLPSMGWYRQAPGKERELVATIATGGNTYYADSVKGRFTISRDNAKNTVYLQMNSLKPEDTAVYYCAVGYYGYGDIQPYRQQHHLYWGQGTQVTVSS

SEQ ID NO: 11420 - protein, 118 aa, Artificial Sequence
  Chemically Synthesized
QVQLQESGGGLVQAGGSLRLSCAASGYIFAFPPMGWYRQAPGKERELVASIDNGTSTNYADSVKGRFTISRDNAKNTVYLQMNSLKPEDTAVYYCAASDSYEFTHFYWGQGTQVTVSS

SEQ ID NO: 11421 - protein, 123 aa, Artificial Sequence
  Chemically Synthesized
QVQLQESGGGLVQAGGSLRLSCAASGYISGYYYMGWYRQAPGKEREFVAAITKGAITYYADSVKGRFTISRDNAKNTVYLQMNSLKPEDTAVYYCAAQDSYGAGAGTGSFTYWGQGTQVTVSS

SEQ ID NO: 11422 - protein, 122 aa, Artificial Sequence
  Chemically Synthesized
QVQLQESGGGLVQAGGSLRLSCAASGTISPYDTMGWYRQAPGKERELVAAISGGASTNYADSVKGRFTISRDNAKNTVYLQMNSLKPEDTAVYYCAVDYRDWSTDDYPHEYWGQGTQVTVSS

SEQ ID NO: 11423 - protein, 118 aa, Artificial Sequence
  Chemically Synthesized
QVQLQESGGGLVQAGGSLRLSCAASGYISGRSRMGWYRQAPGKERELVAAISLGTNTYYADSVKGRFTISRDNAKNTVYLQMNSLKPEDTAVYYCAAYRWRSRDFGYWGQGTQVTVSS

SEQ ID NO: 11424 - protein, 117 aa, Artificial Sequence
  Chemically Synthesized
QVQLQESGGGLVQAGGSLRLSCAASGTIFWPYDMGWYRQAPGKERELVAVLVMVVVPYADSVKGRFTISRDNAKNTVYLQMNSLKPEDTAVYYCAARAQRSVEFYYWGQGTQVTVSS

SEQ ID NO: 11425 - protein, 118 aa, Artificial Sequence
  Chemically Synthesized
QVQLQESGGGLVQAGGSLRLSCAASGNIFTDLSMGWYRQAPGKERELVASIDYGTSTNYADSVKGRFTISRDNAKNTVYLQMNSLKPEDTAVYYCAAYRQYGNDHRYWGQGTQVTVSS

SEQ ID NO: 11426 - protein, 116 aa, Artificial Sequence
  Chemically Synthesized
QVQLQESGGGLVQAGGSLRLSCAASGTIFYVAYMGWYRQAPGKEREFVAAIGEGATTNYADSVKGRFTISRDNAKNTVYLQMNSLKPEDTAVYYCAVYYVIDLKYWGQGTQVTVSS

SEQ ID NO: 11427 - protein, 118 aa, Artificial Sequence
  Chemically Synthesized
QVQLQESGGGLVQAGGSLRLSCAASGTISAYATMGWYRQAPGKERELVASIDDGTITNYADSVKGRFTISRDNAKNTVYLQMNSLKPEDTAVYYCAVTEEFQAGLVYWGQGTQVTVSS

SEQ ID NO: 11428 - protein, 121 aa, Artificial Sequence
  Chemically Synthesized
QVQLQESGGGLVQAGGSLRLSCAASGYISYYVMGWYRQAPGKEREFVAAIATGSNTQYADSVKGRFTISRDNAKNTVYLQMNSLKPEDTAVYYCAAYYWPVRTYYDYHWYWGQGTQVTVSS

SEQ ID NO: 11429 - protein, 112 aa, Artificial Sequence
  Chemically Synthesized
QVQLQESGGGLVQAGGSLRLSCAASGNISDDWVMGWYRQAPGKEREFVAGIAYGAITYYADSVKGRFTISRDNAKNTVYLQMNSLKPEDTAVYYCAARIIYWGQGTQVTVSS

SEQ ID NO: 11430 - protein, 122 aa, Artificial Sequence
  Chemically Synthesized
QVQLQESGGGLVQAGGSLRLSCAASGYIFHPYSMGWYRQAPGKEREFVAGINPGGSTNYADSVKGRFTISRDNAKNTVYLQMNSLKPEDTAVYYCAAALLVYLWYGYAHYYWGQGTQVTVSS

SEQ ID NO: 11431 - protein, 120 aa, Artificial Sequence
  Chemically Synthesized
QVQLQESGGGLVQAGGSLRLSCAASGTIFLDNMGWYRQAPGKERELLPVLVTVLVPYADSVKGRFTISRDNAKNTVYLQMNSLKPEDTAVYYCAVADGDIKQSIRRHLYWGQGTQVTVSS

SEQ ID NO: 11432 - protein, 117 aa, Artificial Sequence
  Chemically Synthesized
QVQLQESGGGLVQAGGSLRLSCAASGTISYTDDMGWYRQAPGKERELVATIGDGSNTNYADSVKGRFTISRDNAKNTVYLQMNSLKPEDTAVYYCALLNTLVRVLYWGQGTQVTVSS

SEQ ID NO: 11433 - protein, 126 aa, Artificial Sequence
  Chemically Synthesized
QVQLQESGGGLVQAGGSLRLSCAASGTIFSTDRMGWYRQAPGKEREFVASIGVGGNTNYADSVKGRFTISRDNAKNTVYLQMNSLKPEDTAVYYCAVQFPYFLKVRQILYDYLPYWGQGTQVTVSS

SEQ ID NO: 11434 - protein, 117 aa, Artificial Sequence
  Chemically Synthesized
QVQLQESGGGLVQAGGSLRLSCAASGLFFGVVMGWYRQAPGKEREFVASIGYGTNTYYADSVKGRFTISRDNAKNTVYLQMNSLKPEDTAVYYCAAIRYYWNDLHYWGQGTQVTVSS

SEQ ID NO: 11435 - protein, 118 aa, Artificial Sequence
  Chemically Synthesized
QVQLQESGGGLVQAGGSLRLSCAASGNISGQISMGWYRQAPGKERELVATIGYGSNTYYADSVKGRFTISRDNAKNTVYLQMNSLKPEDTAVYYCAAPRGDQYYFYYWGQGTQVTVSS

SEQ ID NO: 11436 - protein, 121 aa, Artificial Sequence
  Chemically Synthesized
QVQLQESGGGLVQAGGSLRLSCAASGNISDTLIMGWYRQAPGKERELVAAIGYGSTTYADSVKGRFTISRDNAKNTVYLQMNSLKPEDTAVYYCAVYLYAAYTRQTPHVYWGQGTQVTVSS

SEQ ID NO: 11437 - protein, 122 aa, Artificial Sequence
  Chemically Synthesized
QVQLQESGGGLVQAGGSLRLSCAASGTISPLYAMGWYRQAPGKERELVAGINPGANTYYADSVKGRFTISRDNAKNTVYLQMNSLKPEDTAVYYCAVPFAWSVIAYEYHNYWGQGTQVTVSS

SEQ ID NO: 11438 - protein, 118 aa, Artificial Sequence
  Chemically Synthesized
QVQLQESGGGLVQAGGSLRLSCAASGTISTKPLMGWYRQAPGKERELVASIDRGANTNYADSVKGRFTISRDNAKNTVYLQMNSLKPEDTAVYYCAARTRPRASHQYWGQGTQVTVSS

SEQ ID NO: 11439 - protein, 118 aa, Artificial Sequence
  Chemically Synthesized
QVQLQESGGGLVQAGGSLRLSCAASGTISHTYQMGWYRQAPGKERELVATISTGGTTNYADSVKGRFTISRDNAKNTVYLQMNSLKPEDTAVYYCAVEVWGSWTLAYWGQGTQVTVSS

SEQ ID NO: 11440 - protein, 118 aa, Artificial Sequence
  Chemically Synthesized
QVQLQESGGGLVQAGGSLRLSCAASGTIFYRDYMGWYRQAPGKERELVASINDGSITYYADSVKGRFTISRDNAKNTVYLQMNSLKPEDTAVYYCAAGADRYVGHYYWGQGTQVTVSS

SEQ ID NO: 11441 - protein, 122 aa, Artificial Sequence
  Chemically Synthesized
QVQLQESGGGLVQAGGSLRLSCAASGSISAYRYMGWYRQAPGKEREFVASIATGAITNYADSVKGRFTISRDNAKNTVYLQMNSLKPEDTAVYYCAAQIYWYKILTREYLYWGQGTQVTVSS

SEQ ID NO: 11442 - protein, 117 aa, Artificial Sequence
  Chemically Synthesized
QVQLQESGGGLVQAGGSLRLSCAASGNIFGHTYMGWYRQAPGKERELVAGIGSVVIPYADSVKGRFTISRDNAKNTVYLQMNSLKPEDTAVYYCAVYYISGKHLSYWGQGTQVTVSS

SEQ ID NO: 11443 - protein, 117 aa, Artificial Sequence
  Chemically Synthesized
QVQLQESGGGLVQAGGSLRLSCAASGSISYDYLMGWYRQAPGKEREFVATIDAGGNTNYADSVKGRFTISRDNAKNTVYLQMNSLKPEDTAVYYCAVRYRAVSVIYWGQGTQVTVSS

SEQ ID NO: 11444 - protein, 122 aa, Artificial Sequence
  Chemically Synthesized
QVQLQESGGGLVQAGGSLRLSCAASGNIFDTYTMGWYRQAPGKERELVATINIGGNTYYADSVKGRFTISRDNAKNTVYLQMNSLKPEDTAVYYCAAYRRDTHDAQYGYAYWGQGTQVTVSS

SEQ ID NO: 11445 - protein, 118 aa, Artificial Sequence
  Chemically Synthesized
QVQLQESGGGLVQAGGSLRLSCAASGTIFLSGLMGWYRQAPGKERELVASIDYGGTTNYADSVKGRFTISRDNAKNTVYLQMNSLKPEDTAVYYCAVQDGIISPHTYWGQGTQVTVSS

SEQ ID NO: 11446 - protein, 122 aa, Artificial Sequence
  Chemically Synthesized
QVQLQESGGGLVQAGGSLRLSCAASGTIFQDTYMGWYRQAPGKEREFVATISQGSNTYYADSVKGRFTISRDNAKNTVYLQMNSLKPEDTAVYYCAADGYDAYLDSYDYNYWGQGTQVTVSS

SEQ ID NO: 11447 - protein, 118 aa, Artificial Sequence
  Chemically Synthesized
QVQLQESGGGLVQAGGSLRLSCAASGYISSLLDMGWYRQAPGKERELVAAIAAGATTYYADSVKGRFTISRDNAKNTVYLQMNSLKPEDTAVYYCAVGNFDDVRLQYWGQGTQVTVSS

SEQ ID NO: 11448 - protein, 121 aa, Artificial Sequence
  Chemically Synthesized
QVQLQESGGGLVQAGGSLRLSCAASGYIFPTSRMGWYRQAPGKERELVASIDGGATPYADSVKGRFTISRDNAKNTVYLQMNSLKPEDTAVYYCAVDWYRRLYWTQDHYYWGQGTQVTVSS

SEQ ID NO: 11449 - protein, 118 aa, Artificial Sequence
  Chemically Synthesized
QVQLQESGGGLVQAGGSLRLSCAASGYISDHTLMGWYRQAPGKEREFVAAIAYGSSTNYADSVKGRFTISRDNAKNTVYLQMNSLKPEDTAVYYCAVWYRRPYGHHYWGQGTQVTVSS

SEQ ID NO: 11450 - protein, 126 aa, Artificial Sequence
  Chemically Synthesized
QVQLQESGGGLVQAGGSLRLSCAASGNIFRQNSMGWYRQAPGKERELVAAITYGTNTNYADSVKGRFTISRDNAKNTVYLQMNSLKPEDTAVYYCAVKNDFSYWSSPDRRQPHYYWGQGTQVTVSS

SEQ ID NO: 11451 - protein, 115 aa, Artificial Sequence
  Chemically Synthesized
QVQLQESGGGLVQAGGSLRLSCAASGSIFYTDYMGWYRQAPGKERELVAAIGSVVIPYADSVKGRFTISRDNAKNTVYLQMNSLKPEDTAVYYCAAYYGYIYDYWGQGTQVTVSS

SEQ ID NO: 11452 - protein, 122 aa, Artificial Sequence
  Chemically Synthesized
QVQLQESGGGLVQAGGSLRLSCAASGTIFGSDYMGWYRQAPGKEREFVAAITLGTSTNYADSVKGRFTISRDNAKNTVYLQMNSLKPEDTAVYYCAAGTQYWDYVFTILRYWGQGTQVTVSS

SEQ ID NO: 11453 - protein, 118 aa, Artificial Sequence
  Chemically Synthesized
QVQLQESGGGLVQAGGSLRLSCAASGTIFGQYAMGWYRQAPGKERELVAAIGYGTNTNYADSVKGRFTISRDNAKNTVYLQMNSLKPEDTAVYYCAAGQWNASNHYYWGQGTQVTVSS

SEQ ID NO: 11454 - protein, 121 aa, Artificial Sequence
  Chemically Synthesized
QVQLQESGGGLVQAGGSLRLSCAASGSIFLTTMGWYRQAPGKEREFVASIARGTNTNYADSVKGRFTISRDNAKNTVYLQMNSLKPEDTAVYYCAAVYYDTAYTLSYHDYWGQGTQVTVSS

SEQ ID NO: 11455 - protein, 126 aa, Artificial Sequence
  Chemically Synthesized
QVQLQESGGGLVQAGGSLRLSCAASGNIFLYNDMGWYRQAPGKERELVATIAWGANTNYADSVKGRFTISRDNAKNTVYLQMNSLKPEDTAVYYCAAAYAEPEWRWGIRVLNLSYWGQGTQVTVSS

SEQ ID NO: 11456 - protein, 125 aa, Artificial Sequence
  Chemically Synthesized
QVQLQESGGGLVQAGGSLRLSCAASGTISPGPRMGWYRQAPGKERELVAGIDYGANTYYADSVKGRFTISRDNAKNTVYLQMNSLKPEDTAVYYCAAPGWLYDYSLTTVWVVIYWGQGTQVTVSS

SEQ ID NO: 11457 - protein, 117 aa, Artificial Sequence
  Chemically Synthesized
QVQLQESGGGLVQAGGSLRLSCAASGTILHCSMGWYRQAPGKERELVAGIAFGSITNYADSVKGRFTISRDNAKNTVYLQMNSLKPEDTAVYYCAARPVAWPDHLYWGQGTQVTVSS

SEQ ID NO: 11458 - protein, 117 aa, Artificial Sequence
  Chemically Synthesized
QVQLQESGGGLVQAGGSLRLSCAASGTIFGFLMGWYRQAPGKEREFVAAIGSGTTTNYADSVKGRFTISRDNAKNTVYLQMNSLKPEDTAVYYCAANAGYNGNYSYWGQGTQVTVSS

SEQ ID NO: 11459 - protein, 117 aa, Artificial Sequence
  Chemically Synthesized
QVQLQESGGGLVQAGGSLRLSCAASGYISSLLYMGWYRQAPGKEREFVATISGGTITYYADSVKGRFTISRDNAKNTVYLQMNSLKPEDTAVYYCAVILPIPSYRYWGQGTQVTVSS

SEQ ID NO: 11460 - protein, 117 aa, Artificial Sequence
  Chemically Synthesized
QVQLQESGGGLVQAGGSLRLSCAASGYISSGGGMGWYRQAPGKEREFVASMTWYYYLYADSVKGRFTISRDNAKNTVYLQMNSLKPEDTAVYYCAADGPKRRRYYYWGQGTQVTVSS

SEQ ID NO: 11461 - protein, 117 aa, Artificial Sequence
  Chemically Synthesized
QVQLQESGGGLVQAGGSLRLSCAASGTISRLYDMGWYRQAPGKEREFVAGITDGGNTNYADSVKGRFTISRDNAKNTVYLQMNSLKPEDTAVYYCAAYAYCGTTLYWGQGTQVTVSS

SEQ ID NO: 11462 - protein, 118 aa, Artificial Sequence
  Chemically Synthesized
QVQLQESGGGLVQAGGSLRLSCAASGNISEAAAMGWYRQAPGKEREFVATIGGGANTNYADSVKGRFTISRDNAKNTVYLQMNSLKPEDTAVYYCADYSFSVIKHVYWGQGTQVTVSS

SEQ ID NO: 11463 - protein, 118 aa, Artificial Sequence
  Chemically Synthesized
QVQLQESGGGLVQAGGSLRLSCAASGYIFYLEPMGWYRQAPGKEREFVAAINSGGSTNYADSVKGRFTISRDNAKNTVYLQMNSLKPEDTAVYYCAAPEKGTYYYSYWGQGTQVTVSS

SEQ ID NO: 11464 - protein, 118 aa, Artificial Sequence
  Chemically Synthesized
QVQLQESGGGLVQAGGSLRLSCAASGTISATQYMGWYRQAPGKERELVATIGIGGSTNYADSVKGRFTISRDNAKNTVYLQMNSLKPEDTAVYYCAASSRDVYLYVYWGQGTQVTVSS

SEQ ID NO: 11465 - protein, 126 aa, Artificial Sequence
  Chemically Synthesized
QVQLQESGGGLVQAGGSLRLSCAASGNISDVYTMGWYRQAPGKEREFVATISGGSTTYYADSVKGRFTISRDNAKNTVYLQMNSLKPEDTAVYYCAADQLAEHYARATWTTYYNYWGQGTQVTVSS

SEQ ID NO: 11466 - protein, 112 aa, Artificial Sequence
  Chemically Synthesized
QVQLQESGGGLVQAGGSLRLSCAASGYIFPYETMGWYRQAPGKERELVATINDGTNTNYADSVKGRFTISRDNAKNTVYLQMNSLKPEDTAVYYCAAQHHYWGQGTQVTVSS

SEQ ID NO: 11467 - protein, 106 aa, Artificial Sequence
  Chemically Synthesized
QVQLQESGGGLVQAGGSLRLSCAASGYIFDGWYMGWYRQAPGKERELVASISQYADSVKGRFTISRDNAKNTVYLQMNSLKPEDTAVYYCALVIYWGQGTQVTVSS

SEQ ID NO: 11468 - protein, 122 aa, Artificial Sequence
  Chemically Synthesized
QVQLQESGGGLVQAGGSLRLSCAASGSISGIPGMGWYRQAPGKERELVAGIGDGASTYYADSVKGRFTISRDNAKNTVYLQMNSLKPEDTAVYYCAARAHSETGPHDYFDYWGQGTQVTVSS

SEQ ID NO: 11469 - protein, 122 aa, Artificial Sequence
  Chemically Synthesized
QVQLQESGGGLVQAGGSLRLSCAASGTISYPEGMGWYRQAPGKERELVAAIDPGASTNYADSVKGRFTISRDNAKNTVYLQMNSLKPEDTAVYYCAAQTRDLVSPLAGHYYWGQGTQVTVSS

SEQ ID NO: 11470 - protein, 122 aa, Artificial Sequence
  Chemically Synthesized
QVQLQESGGGLVQAGGSLRLSCAASGSISRYASMGWYRQAPGKEREFVATIAGGSTTYYADSVKGRFTISRDNAKNTVYLQMNSLKPEDTAVYYCAVQYRYRDPDSRGYRYWGQGTQVTVSS

SEQ ID NO: 11471 - protein, 118 aa, Artificial Sequence
  Chemically Synthesized
QVQLQESGGGLVQAGGSLRLSCAASGSIFGDPVMGWYRQAPGKERELVASIGSGTNTNYADSVKGRFTISRDNAKNTVYLQMNSLKPEDTAVYYCAVWRGRYVDLYYWGQGTQVTVSS

SEQ ID NO: 11472 - protein, 118 aa, Artificial Sequence
  Chemically Synthesized
QVQLQESGGGLVQAGGSLRLSCAASGTISDALSMGWYRQAPGKEREFVAAISFGGTTNYADSVKGRFTISRDNAKNTVYLQMNSLKPEDTAVYYCAVIGNGQDPFAYWGQGTQVTVSS

SEQ ID NO: 11473 - protein, 118 aa, Artificial Sequence
  Chemically Synthesized
QVQLQESGGGLVQAGGSLRLSCAASGYIFTEDYMGWYRQAPGKERELVASIAISTSTNYADSVKGRFTISRDNAKNTVYLQMNSLKPEDTAVYYCAVGGIYILNFRYWGQGTQVTVSS

SEQ ID NO: 11474 - protein, 118 aa, Artificial Sequence
  Chemically Synthesized
QVQLQESGGGLVQAGGSLRLSCAASGTIFADQAMGWYRQAPGKEREFVASIAYGGITYYADSVKGRFTISRDNAKNTVYLQMNSLKPEDTAVYYCAVGWAKYTYHHYWGQGTQVTVSS

SEQ ID NO: 11475 - protein, 122 aa, Artificial Sequence
  Chemically Synthesized
QVQLQESGGGLVQAGGSLRLSCAASGSIFAYYYMGWYRQAPGKEREFVAAIAYGGITNYADSVKGRFTISRDNAKNTVYLQMNSLKPEDTAVYYCAVSWQDYAQYNSYLDYWGQGTQVTVSS

SEQ ID NO: 11476 - protein, 114 aa, Artificial Sequence
  Chemically Synthesized
QVQLQESGGGLVQAGGSLRLSCAASGTISQQSYMGWYRQAPGKEREFVASIGYGGITNYADSVKGRFTISRDNAKNTVYLQMNSLKPEDTAVYYCADGSLVIYWGQGTQVTVSS

SEQ ID NO: 11477 - protein, 121 aa, Artificial Sequence
  Chemically Synthesized
QVQLQESGGGLVQAGGSLRLSCAASGSISWQYLMGWYRQAPGKEREFVATISHGGTTNYADSVKGRFTISRDNAKNTVYLQMNSLKPEDTAVYYCAATYPDRIKTSSVMYWGQGTQVTVSS

SEQ ID NO: 11478 - protein, 122 aa, Artificial Sequence
  Chemically Synthesized
QVQLQESGGGLVQAGGSLRLSCAASGNIFAYVTMGWYRQAPGKERELVAAITGGATTYYADSVKGRFTISRDNAKNTVYLQMNSLKPEDTAVYYCAVYQPFAWDDGDRYDYWGQGTQVTVSS

SEQ ID NO: 11479 - protein, 118 aa, Artificial Sequence
  Chemically Synthesized
QVQLQESGGGLVQAGGSLRLSCAASGTIFEYYRMGWYRQAPGKERELVAGISYGGSTYYADSVKGRFTISRDNAKNTVYLQMNSLKPEDTAVYYCAATSLRGDYFQYWGQGTQVTVSS

SEQ ID NO: 11480 - protein, 126 aa, Artificial Sequence
  Chemically Synthesized
QVQLQESGGGLVQAGGSLRLSCAASGYISNGDAMGWYRQAPGKERELVASIAQGGSTNYADSVKGRFTISRDNAKNTVYLQMNSLKPEDTAVYYCAAPARVRGYSHQDASRWHRYWGQGTQVTVSS

SEQ ID NO: 11481 - protein, 118 aa, Artificial Sequence
  Chemically Synthesized
QVQLQESGGGLVQAGGSLRLSCAASGTISYGDWMGWYRQAPGKEREFVAGIGVGGTTNYADSVKGRFTISRDNAKNTVYLQMNSLKPEDTAVYYCAANSRYTTDFVYWGQGTQVTVSS

SEQ ID NO: 11482 - protein, 122 aa, Artificial Sequence
  Chemically Synthesized
QVQLQESGGGLVQAGGSLRLSCAASGSIFLYPSMGWYRQAPGKEREFVASIGYGGTTNYADSVKGRFTISRDNAKNTVYLQMNSLKPEDTAVYYCAVIYGWEDVFWVVYGYWGQGTQVTVSS

SEQ ID NO: 11483 - protein, 118 aa, Artificial Sequence
  Chemically Synthesized
QVQLQESGGGLVQAGGSLRLSCAASGNIFQWGYMGWYRQAPGKEREFVATIAVGGSTYYADSVKGRFTISRDNAKNTVYLQMNSLKPEDTAVYYCAAEDDLTGYLYYWGQGTQVTVSS

SEQ ID NO: 11484 - protein, 118 aa, Artificial Sequence
  Chemically Synthesized
QVQLQESGGGLVQAGGSLRLSCAASGTIFQAYYMGWYRQAPGKERELVASITYGSITNYADSVKGRFTISRDNAKNTVYLQMNSLKPEDTAVYYCAVSPSRLSGYRYWGQGTQVTVSS

SEQ ID NO: 11485 - protein, 122 aa, Artificial Sequence
  Chemically Synthesized
QVQLQESGGGLVQAGGSLRLSCAASGYIFRYDDMGWYRQAPGKERELVASISYGTSTNYADSVKGRFTISRDNAKNTVYLQMNSLKPEDTAVYYCAAYSLFGHQDGGTYRYWGQGTQVTVSS

SEQ ID NO: 11486 - protein, 118 aa, Artificial Sequence
  Chemically Synthesized
QVQLQESGGGLVQAGGSLRLSCAASGNISDGDYMGWYRQAPGKERELVAGISYGAITNYADSVKGRFTISRDNAKNTVYLQMNSLKPEDTAVYYCAVTRWGYGTLDYWGQGTQVTVSS

SEQ ID NO: 11487 - protein, 118 aa, Artificial Sequence
  Chemically Synthesized
QVQLQESGGGLVQAGGSLRLSCAASGNIFRPVVMGWYRQAPGKEREFVAGIGKGASTNYADSVKGRFTISRDNAKNTVYLQMNSLKPEDTAVYYCAAYGGGYDLHTYWGQGTQVTVSS

SEQ ID NO: 11488 - protein, 121 aa, Artificial Sequence
  Chemically Synthesized
QVQLQESGGGLVQAGGSLRLSCAASGTISHPLMGWYRQAPGKEREFVASITTGTITYYADSVKGRFTISRDNAKNTVYLQMNSLKPEDTAVYYCAVYDSALFYNYHDLWYWGQGTQVTVSS

SEQ ID NO: 11489 - protein, 118 aa, Artificial Sequence
  Chemically Synthesized
QVQLQESGGGLVQAGGSLRLSCAASGTIFPYDSMGWYRQAPGKERELVAAIAVGGITYYADSVKGRFTISRDNAKNTVYLQMNSLKPEDTAVYYCAVRPGPVQGHGYWGQGTQVTVSS

SEQ ID NO: 11490 - protein, 118 aa, Artificial Sequence
  Chemically Synthesized
QVQLQESGGGLVQAGGSLRLSCAASGTISDAKRMGWYRQAPGKERELVAAIDAGGITNYADSVKGRFTISRDNAKNTVYLQMNSLKPEDTAVYYCAVQYAGLLIYAYWGQGTQVTVSS

SEQ ID NO: 11491 - protein, 121 aa, Artificial Sequence
  Chemically Synthesized
QVQLQESGGGLVQAGGSLRLSCAASGTIFYRDYMGWYRQAPGKERELLPLLILVVIPYADSVKGRFTISRDNAKNTVYLQMNSLKPEDTAVYYCAAGGLLFPPWSVPFRYWGQGTQVTVSS

SEQ ID NO: 11492 - protein, 117 aa, Artificial Sequence
  Chemically Synthesized
QVQLQESGGGLVQAGGSLRLSCAASGTISYRSMGWYRQAPGKERELVATIDDGSNTNYADSVKGRFTISRDNAKNTVYLQMNSLKPEDTAVYYCAARGVPYDDHVYWGQGTQVTVSS

SEQ ID NO: 11493 - protein, 118 aa, Artificial Sequence
  Chemically Synthesized
QVQLQESGGGLVQAGGSLRLSCAASGTIFYYVWMGWYRQAPGKEREFVASINYGGTTYYADSVKGRFTISRDNAKNTVYLQMNSLKPEDTAVYYCAAYQYDGVYHLYWGQGTQVTVSS

SEQ ID NO: 11494 - protein, 122 aa, Artificial Sequence
  Chemically Synthesized
QVQLQESGGGLVQAGGSLRLSCAASGNIFDTSWMGWYRQAPGKERELVASIAYGSSTNYADSVKGRFTISRDNAKNTVYLQMNSLKPEDTAVYYCAVHGHYGSLFTLHLPYWGQGTQVTVSS

SEQ ID NO: 11495 - protein, 110 aa, Artificial Sequence
  Chemically Synthesized
QVQLQESGGGLVQAGGSLRLSCAASGTIFGRYDMGWYRQAPGKERELVATIDSGGNTNYADSVKGRFTISRDNAKNTVYLQMNSLKPEDTAVYYCAVDYWGQGTQVTVSS

SEQ ID NO: 11496 - protein, 121 aa, Artificial Sequence
  Chemically Synthesized
QVQLQESGGGLVQAGGSLRLSCAASGNISETSDMGWYRQAPGKERELVASITYGANTKYADSVKGRFTISRDNAKNTVYLQMNSLKPEDTAVYYCAAWLTPSGGYYGYAYWGQGTQVTVSS

SEQ ID NO: 11497 - protein, 118 aa, Artificial Sequence
  Chemically Synthesized
QVQLQESGGGLVQAGGSLRLSCAASGTIFRQGQMGWYRQAPGKERELVAAINDGATTYYADSVKGRFTISRDNAKNTVYLQMNSLKPEDTAVYYCAVWEPVGDVHTYWGQGTQVTVSS

SEQ ID NO: 11498 - protein, 118 aa, Artificial Sequence
  Chemically Synthesized
QVQLQESGGGLVQAGGSLRLSCAASGTISDPLGMGWYRQAPGKERELVAAITVGGSTYYADSVKGRFTISRDNAKNTVYLQMNSLKPEDTAVYYCAVKPYYRYIHGYWGQGTQVTVSS

SEQ ID NO: 11499 - protein, 122 aa, Artificial Sequence
  Chemically Synthesized
QVQLQESGGGLVQAGGSLRLSCAASGNIFADRAMGWYRQAPGKEREFVATIGRGTTTNYADSVKGRFTISRDNAKNTVYLQMNSLKPEDTAVYYCAVPPLYWLDSLNYHQYWGQGTQVTVSS

SEQ ID NO: 11500 - protein, 117 aa, Artificial Sequence
  Chemically Synthesized
QVQLQESGGGLVQAGGSLRLSCAASGTISPALYMGWYRQAPGKERELVAAIGYGANTNYADSVKGRFTISRDNAKNTVYLQMNSLKPEDTAVYYCAVPGYSGDYYYWGQGTQVTVSS

SEQ ID NO: 11501 - protein, 123 aa, Artificial Sequence
  Chemically Synthesized
QVQLQESGGGLVQAGGSLRLSCAASGNISAQGYMGWYRQAPGKEREFVAAIGSGGNTNYADSVKGRFTISRDNAKNTVYLQMNSLKPEDTAVYYCAVVGDYIDLDGQGPFLYWGQGTQVTVSS

SEQ ID NO: 11502 - protein, 122 aa, Artificial Sequence
  Chemically Synthesized
QVQLQESGGGLVQAGGSLRLSCAASGTIFSYVYMGWYRQAPGKEREFVATINYGTTTNYADSVKGRFTISRDNAKNTVYLQMNSLKPEDTAVYYCAVDYYDEHNGYALLVYWGQGTQVTVSS

SEQ ID NO: 11503 - protein, 122 aa, Artificial Sequence
  Chemically Synthesized
QVQLQESGGGLVQAGGSLRLSCAASGSISLLGPMGWYRQAPGKEREFVASIDRGSTTNYADSVKGRFTISRDNAKNTVYLQMNSLKPEDTAVYYCAAYLYGVPQPDRTLTYWGQGTQVTVSS

SEQ ID NO: 11504 - protein, 121 aa, Artificial Sequence
  Chemically Synthesized
QVQLQESGGGLVQAGGSLRLSCAASGTIFNTHYMGWYRQAPGKEREFVAAIDEGANTYYADSVKGRFTISRDNAKNTVYLQMNSLKPEDTAVYYCAVDNSYGDGSIAHYYWGQGTQVTVSS

SEQ ID NO: 11505 - protein, 118 aa, Artificial Sequence
  Chemically Synthesized
QVQLQESGGGLVQAGGSLRLSCAASGTIFLYENMGWYRQAPGKEREFVAGIAGGTITYYADSVKGRFTISRDNAKNTVYLQMNSLKPEDTAVYYCAAEQHTTVYHAYWGQGTQVTVSS

SEQ ID NO: 11506 - protein, 109 aa, Artificial Sequence
  Chemically Synthesized
QVQLQESGGGLVQAGGSLRLSCAASGYISGVASMGWYRQAPGKEREFVAAINDGGITNYADSVKGRFTISRDNAKNTVYLQMNSLKPEDTAVYYCASYWGQGTQVTVSS

SEQ ID NO: 11507 - protein, 126 aa, Artificial Sequence
  Chemically Synthesized
QVQLQESGGGLVQAGGSLRLSCAASGTISERIVMGWYRQAPGKERELVATITDGSSTYYADSVKGRFTISRDNAKNTVYLQMNSLKPEDTAVYYCAVIDPWSYDVGAWGTGSFGYWGQGTQVTVSS

SEQ ID NO: 11508 - protein, 122 aa, Artificial Sequence
  Chemically Synthesized
QVQLQESGGGLVQAGGSLRLSCAASGYIFQTSYMGWYRQAPGKEREFVAAIGRGGNTYYADSVKGRFTISRDNAKNTVYLQMNSLKPEDTAVYYCAVIYSPDYGDGAAYVYWGQGTQVTVSS

SEQ ID NO: 11509 - protein, 118 aa, Artificial Sequence
  Chemically Synthesized
QVQLQESGGGLVQAGGSLRLSCAASGNISDAVPMGWYRQAPGKERELVAGIGFGGSTNYADSVKGRFTISRDNAKNTVYLQMNSLKPEDTAVYYCAALGTGAHWFTYWGQGTQVTVSS

SEQ ID NO: 11510 - protein, 121 aa, Artificial Sequence
  Chemically Synthesized
QVQLQESGGGLVQAGGSLRLSCAASGNIFRYHSMGWYRQAPGKERELVAGISTGGNTNYADSVKGRFTISRDNAKNTVYLQMNSLKPEDTAVYYCAVKYDEYAVISTRMYWGQGTQVTVSS

SEQ ID NO: 11511 - protein, 125 aa, Artificial Sequence
  Chemically Synthesized
QVQLQESGGGLVQAGGSLRLSCAASGYISSDLLMGWYRQAPGKERELVASITDGSNTNYADSVKGRFTISRDNAKNTVYLQMNSLKPEDTAVYYCAAVVHFQPPLSYPQTYHYYWGQGTQVTVSS

SEQ ID NO: 11512 - protein, 118 aa, Artificial Sequence
  Chemically Synthesized
QVQLQESGGGLVQAGGSLRLSCAASGNIFKWYKMGWYRQAPGKEREFVAGIGAGASTNYADSVKGRFTISRDNAKNTVYLQMNSLKPEDTAVYYCAVYRYRAYLHDYWGQGTQVTVSS

SEQ ID NO: 11513 - protein, 118 aa, Artificial Sequence
  Chemically Synthesized
QVQLQESGGGLVQAGGSLRLSCAASGSISDYGRMGWYRQAPGKERELVAGIGLGTTTNYADSVKGRFTISRDNAKNTVYLQMNSLKPEDTAVYYCAVNTYAVNDHDYWGQGTQVTVSS

SEQ ID NO: 11514 - protein, 112 aa, Artificial Sequence
  Chemically Synthesized
QVQLQESGGGLVQAGGSLRLSCAASGSMGWYRQAPGKEREFVATINAGASTYYADSVKGRFTISRDNAKNTVYLQMNSLKPEDTAVYYCAVVGKYRCLPSYWGQGTQVTVSS

SEQ ID NO: 11515 - protein, 121 aa, Artificial Sequence
  Chemically Synthesized
QVQLQESGGGLVQAGGSLRLSCAASGYIFGYGHMGWYRQAPGKERELVAAIALGSTTNYADSVKGRFTISRDNAKNTVYLQMNSLKPEDTAVYYCAATELFTTVVTTTMYWGQGTQVTVSS

SEQ ID NO: 11516 - protein, 117 aa, Artificial Sequence
  Chemically Synthesized
QVQLQESGGGLVQAGGSLRLSCAASGNISSSLMGWYRQAPGKERELVASIAYGTSTYYADSVKGRFTISRDNAKNTVYLQMNSLKPEDTAVYYCAAEGPDNGPYTYWGQGTQVTVSS

SEQ ID NO: 11517 - protein, 125 aa, Artificial Sequence
  Chemically Synthesized
QVQLQESGGGLVQAGGSLRLSCAASGTISGYSAMGWYRQAPGKERELVATISYGSITNYADSVKGRFTISRDNAKNTVYLQMNSLKPEDTAVYYCAAGPYHRGARYSKRYGHAYWGQGTQVTVSS

SEQ ID NO: 11518 - protein, 117 aa, Artificial Sequence
  Chemically Synthesized
QVQLQESGGGLVQAGGSLRLSCAASGTISRGDYMGWYRQAPGKEREFVAAISKGSNTNYADSVKGRFTISRDNAKNTVYLQMNSLKPEDTAVYYCAVYDPYNYTFYWGQGTQVTVSS

SEQ ID NO: 11519 - protein, 126 aa, Artificial Sequence
  Chemically Synthesized
QVQLQESGGGLVQAGGSLRLSCAASGSISARSFMGWYRQAPGKEREFVAGIAVGGTTNYADSVKGRFTISRDNAKNTVYLQMNSLKPEDTAVYYCAAKLYDVGQNTADGLATFLYWGQGTQVTVSS

SEQ ID NO: 11520 - protein, 122 aa, Artificial Sequence
  Chemically Synthesized
QVQLQESGGGLVQAGGSLRLSCAASGYIFDLPSMGWYRQAPGKEREFVAAIDDGATTYYADSVKGRFTISRDNAKNTVYLQMNSLKPEDTAVYYCAVASIQTDGTAGQYPYWGQGTQVTVSS

SEQ ID NO: 11521 - protein, 121 aa, Artificial Sequence
  Chemically Synthesized
QVQLQESGGGLVQAGGSLRLSCAASGSISRPDTMGWYRQAPGKERELVAAIASGATTNYADSVKGRFTISRDNAKNTVYLQMNSLKPEDTAVYYCAALSSSTVRNRTFIYWGQGTQVTVSS

SEQ ID NO: 11522 - protein, 116 aa, Artificial Sequence
  Chemically Synthesized
QVQLQESGGGLVQAGGSLRLSCAASGTISATGVMGWYRQAPGKERELVATIGRGGTTYYADSVKGRFTISRDNAKNTVYLQMNSLKPEDTAVYYCAVRDNVDFSYWGQGTQVTVSS

SEQ ID NO: 11523 - protein, 126 aa, Artificial Sequence
  Chemically Synthesized
QVQLQESGGGLVQAGGSLRLSCAASGTISVPTIMGWYRQAPGKERELVAAINGGGTTNYADSVKGRFTISRDNAKNTVYLQMNSLKPEDTAVYYCAVYFLYWGTNAAGGDYYFIYWGQGTQVTVSS

SEQ ID NO: 11524 - protein, 122 aa, Artificial Sequence
  Chemically Synthesized
QVQLQESGGGLVQAGGSLRLSCAASGNIFFLYQMGWYRQAPGKEREFVATISDGGITYYADSVKGRFTISRDNAKNTVYLQMNSLKPEDTAVYYCAATRYASRVVRYYHGYWGQGTQVTVSS

SEQ ID NO: 11525 - protein, 117 aa, Artificial Sequence
  Chemically Synthesized
QVQLQESGGGLVQAGGSLRLSCAASGSIFGLSMGWYRQAPGKEREFVASITTGGSTNYADSVKGRFTISRDNAKNTVYLQMNSLKPEDTAVYYCAVYTGEGWYLYYWGQGTQVTVSS

SEQ ID NO: 11526 - protein, 126 aa, Artificial Sequence
  Chemically Synthesized
QVQLQESGGGLVQAGGSLRLSCAASGTIFYQIRMGWYRQAPGKEREFVAGITIGGNTYYADSVKGRFTISRDNAKNTVYLQMNSLKPEDTAVYYCAVGADDYVRDLVDFSHSHSYWGQGTQVTVSS

SEQ ID NO: 11527 - protein, 126 aa, Artificial Sequence
  Chemically Synthesized
QVQLQESGGGLVQAGGSLRLSCAASGYISSRGHMGWYRQAPGKEREFVAGITAGATTNYADSVKGRFTISRDNAKNTVYLQMNSLKPEDTAVYYCAVITAAPKYGTWTYARDHWYWGQGTQVTVSS

SEQ ID NO: 11528 - protein, 118 aa, Artificial Sequence
  Chemically Synthesized
QVQLQESGGGLVQAGGSLRLSCAASGYISGYDVMGWYRQAPGKERELVATITRGGTTYYADSVKGRFTISRDNAKNTVYLQMNSLKPEDTAVYYCAVATDEYAGFVYWGQGTQVTVSS

SEQ ID NO: 11529 - protein, 122 aa, Artificial Sequence
  Chemically Synthesized
QVQLQESGGGLVQAGGSLRLSCAASGNISTSYNMGWYRQAPGKEREFVASIGYGANTYYADSVKGRFTISRDNAKNTVYLQMNSLKPEDTAVYYCAVIQANQARNTPRYWYWGQGTQVTVSS

SEQ ID NO: 11530 - protein, 126 aa, Artificial Sequence
  Chemically Synthesized
QVQLQESGGGLVQAGGSLRLSCAASGTISFVPYMGWYRQAPGKEREFVATIAGGGNTNYADSVKGRFTISRDNAKNTVYLQMNSLKPEDTAVYYCAAVQTGDGDTIHGRVAYYYYWGQGTQVTVSS

SEQ ID NO: 11531 - protein, 116 aa, Artificial Sequence
  Chemically Synthesized
QVQLQESGGGLVQAGGSLRLSCAASGTIFTVDYMGWYRQAPGKEREFVASITVGGITYADSVKGRFTISRDNAKNTVYLQMNSLKPEDTAVYYCAVGADCRTVMYWGQGTQVTVSS

SEQ ID NO: 11532 - protein, 118 aa, Artificial Sequence
  Chemically Synthesized
QVQLQESGGGLVQAGGSLRLSCAASGTISRTSYMGWYRQAPGKEREFVATISVGTITYYADSVKGRFTISRDNAKNTVYLQMNSLKPEDTAVYYCAVRGWYPQYLAYWGQGTQVTVSS

SEQ ID NO: 11533 - protein, 116 aa, Artificial Sequence
  Chemically Synthesized
QVQLQESGGGLVQAGGSLRLSCAASGNMGWYRQAPGKERELVAAIDAGTSTNYADSVKGRFTISRDNAKNTVYLQMNSLKPEDTAVYYCAVTGHLGYRIDTILIYWGQGTQVTVSS

SEQ ID NO: 11534 - protein, 122 aa, Artificial Sequence
  Chemically Synthesized
QVQLQESGGGLVQAGGSLRLSCAASGYISSADGMGWYRQAPGKERELVAGITYGATTNYADSVKGRFTISRDNAKNTVYLQMNSLKPEDTAVYYCAVDPSIRYVIHYVHYYWGQGTQVTVSS

SEQ ID NO: 11535 - protein, 122 aa, Artificial Sequence
  Chemically Synthesized
QVQLQESGGGLVQAGGSLRLSCAASGTISEYAGMGWYRQAPGKEREFVAAISYGTTTNYADSVKGRFTISRDNAKNTVYLQMNSLKPEDTAVYYCAAVDPKRVSLRGRHYYWGQGTQVTVSS

SEQ ID NO: 11536 - protein, 118 aa, Artificial Sequence
  Chemically Synthesized
QVQLQESGGGLVQAGGSLRLSCAASGNISELRVMGWYRQAPGKEREFVAGIGVGGITNYADSVKGRFTISRDNAKNTVYLQMNSLKPEDTAVYYCAVILKGAQYHGYWGQGTQVTVSS

SEQ ID NO: 11537 - protein, 117 aa, Artificial Sequence
  Chemically Synthesized
QVQLQESGGGLVQAGGSLRLSCAASGSIFDSDMGWYRQAPGKERELVAGIDIGSTTNYADSVKGRFTISRDNAKNTVYLQMNSLKPEDTAVYYCAALSPLYYNHGYWGQGTQVTVSS

SEQ ID NO: 11538 - protein, 122 aa, Artificial Sequence
  Chemically Synthesized
QVQLQESGGGLVQAGGSLRLSCAASGTISDKDYMGWYRQAPGKEREFVASIGAGGSTYYADSVKGRFTISRDNAKNTVYLQMNSLKPEDTAVYYCAAEANPNYREYYTHPYWGQGTQVTVSS

SEQ ID NO: 11539 - protein, 119 aa, Artificial Sequence
  Chemically Synthesized
QVQLQESGGGLVQAGGSLRLSCAASGNIFYPRRMGWYRQAPGKERELVAAISGGGSITYYADSVKGRFTISRDNAKNTVYLQMNSLKPEDTAVYYCAVRGRGSQAYKYWGQGTQVTVSS

SEQ ID NO: 11540 - protein, 117 aa, Artificial Sequence
  Chemically Synthesized
QVQLQESGGGLVQAGGSLRLSCAASGNISKTNMGWYRQAPGKERELVAGIDRGGSTNYADSVKGRFTISRDNAKNTVYLQMNSLKPEDTAVYYCAAIYWPDIPFSYWGQGTQVTVSS

SEQ ID NO: 11541 - protein, 124 aa, Artificial Sequence
  Chemically Synthesized
QVQLQESGGGLVQAGGSLRLSCAASGYISDEAYMGWYRQAPGKERELVASINSGGSTNYADSVKGRFTISRDNAKNTVYLQMNSLKPEDTAVYYCAWYYAQVQYLPNTSSFDYWGQGTQVTVSS

SEQ ID NO: 11542 - protein, 118 aa, Artificial Sequence
  Chemically Synthesized
QVQLQESGGGLVQAGGSLRLSCAASGTISRRWAMGWYRQAPGKERELVATIGGGASTYYADSVKGRFTISRDNAKNTVYLQMNSLKPEDTAVYYCAAYSLNGVVFRYWGQGTQVTVSS

SEQ ID NO: 11543 - protein, 121 aa, Artificial Sequence
  Chemically Synthesized
QVQLQESGGGLVQAGGSLRLSCAASGTIFLRKMGWYRQAPGKEREFVAAIDYGSTTNYADSVKGRFTISRDNAKNTVYLQMNSLKPEDTAVYYCAALYTRAYVGRDTLPYWGQGTQVTVSS

SEQ ID NO: 11544 - protein, 121 aa, Artificial Sequence
  Chemically Synthesized
QVQLQESGGGLVQAGGSLRLSCAASGTISEFDSMGWYRQAPGKERELVASITYGATTNYADSVKGRFTISRDNAKNTVYLQMNSLKPEDTAVYYCAAYPATTTDSDIFHYWGQGTQVTVSS

SEQ ID NO: 11545 - protein, 115 aa, Artificial Sequence
  Chemically Synthesized
QVQLQESGGGLVQAGGSLRLSCAASGTISTRTMGWYRQAPGKEREFVAGITGGTTTNYADSVKGRFTISRDNAKNTVYLQMNSLKPEDTAVYYCAALGDSYHQYWGQGTQVTVSS

SEQ ID NO: 11546 - protein, 118 aa, Artificial Sequence
  Chemically Synthesized
QVQLQESGGGLVQAGGSLRLSCAASGYISFIDQMGWYRQAPGKEREFVASIGDGTNTNYADSVKGRFTISRDNAKNTVYLQMNSLKPEDTAVYYCAVYGARAEGFDYWGQGTQVTVSS

SEQ ID NO: 11547 - protein, 116 aa, Artificial Sequence
  Chemically Synthesized
QVQLQESGGGLVQAGGSLRLSCAASGTISYVDWMGWYRQAPGKERELVAGIAQVLIPYADSVKGRFTISRDNAKNTVYLQMNSLKPEDTAVYYCAVGGYRWWHSYWGQGTQVTVSS

SEQ ID NO: 11548 - protein, 123 aa, Artificial Sequence
  Chemically Synthesized
QVQLQESGGGLVQAGGSLRLSCAASGTISDRWWMGWYRQAPGKEREFVATIAYGAITYYADSVKGRFTISRDNAKNTVYLQMNSLKPEDTAVYYCAAIWYYKLVYYADRLTYWGQGTQVTVSS

SEQ ID NO: 11549 - protein, 118 aa, Artificial Sequence
  Chemically Synthesized
QVQLQESGGGLVQAGGSLRLSCAASGTIFGALTMGWYRQAPGKERELVATITTGSTTYYADSVKGRFTISRDNAKNTVYLQMNSLKPEDTAVYYCAVWYRHIGAHYYWGQGTQVTVSS

SEQ ID NO: 11550 - protein, 118 aa, Artificial Sequence
  Chemically Synthesized
QVQLQESGGGLVQAGGSLRLSCAASGTISPRYGMGWYRQAPGKEREFVAGITVGGITNYADSVKGRFTISRDNAKNTVYLQMNSLKPEDTAVYYCAVVSGGSGQHYYWGQGTQVTVSS

SEQ ID NO: 11551 - protein, 115 aa, Artificial Sequence
  Chemically Synthesized
QVQLQESGGGLVQAGGSLRLSCAASGTISDSINMGWYRQAPGKEREFVASITGGATTNYADSVKGRFTISRDNAKNTVYLQMNSLKPEDTAVYYCAAIYNRHGYWGQGTQVTVSS

SEQ ID NO: 11552 - protein, 121 aa, Artificial Sequence
  Chemically Synthesized
QVQLQESGGGLVQAGGSLRLSCAASGSISDPPYMGWYRQAPGKEREFVAGITPGAITNYADSVKGRFTISRDNAKNTVYLQMNSLKPEDTAVYYCAVLGYLSGRAGRYYYWGQGTQVTVSS

SEQ ID NO: 11553 - protein, 118 aa, Artificial Sequence
  Chemically Synthesized
QVQLQESGGGLVQAGGSLRLSCAASGTISRDVTMGWYRQAPGKEREFVAAIAYGTITNYADSVKGRFTISRDNAKNTVYLQMNSLKPEDTAVYYCAAGYVVLGVLDYWGQGTQVTVSS

SEQ ID NO: 11554 - protein, 118 aa, Artificial Sequence
  Chemically Synthesized
QVQLQESGGGLVQAGGSLRLSCAASGNIFADDGMGWYRQAPGKERELVATITSGGNTNYADSVKGRFTISRDNAKNTVYLQMNSLKPEDTAVYYCAVYWWYGLVHYYWGQGTQVTVSS

SEQ ID NO: 11555 - protein, 122 aa, Artificial Sequence
  Chemically Synthesized
QVQLQESGGGLVQAGGSLRLSCAASGYIFRYGYMGWYRQAPGKEREFVATITGGASTNYADSVKGRFTISRDNAKNTVYLQMNSLKPEDTAVYYCAAVIDIKDVDGRYYYYWGQGTQVTVSS

SEQ ID NO: 11556 - protein, 118 aa, Artificial Sequence
  Chemically Synthesized
QVQLQESGGGLVQAGGSLRLSCAASGSISRARDMGWYRQAPGKERELVASITRGGSTNYADSVKGRFTISRDNAKNTVYLQMNSLKPEDTAVYYCAAVYYRWSYHTYWGQGTQVTVSS

SEQ ID NO: 11557 - protein, 121 aa, Artificial Sequence
  Chemically Synthesized
QVQLQESGGGLVQAGGSLRLSCAASGNISYREDMGWYRQAPGKEREFVAGISSGASTNYADSVKGRFTISRDNAKNTVYLQMNSLKPEDTAVYYCAVLQGGTNSTLLVLYWGQGTQVTVSS

SEQ ID NO: 11558 - protein, 117 aa, Artificial Sequence
  Chemically Synthesized
QVQLQESGGGLVQAGGSLRLSCAASGSISAAGLMGWYRQAPGKEREFVAAIDWGAITNYADSVKGRFTISRDNAKNTVYLQMNSLKPEDTAVYYCAVDDHRSTLFYWGQGTQVTVSS

SEQ ID NO: 11559 - protein, 126 aa, Artificial Sequence
  Chemically Synthesized
QVQLQESGGGLVQAGGSLRLSCAASGYISNSGNMGWYRQAPGKERELVATIDDGGTTNYADSVKGRFTISRDNAKNTVYLQMNSLKPEDTAVYYCAVRFHRDGPDGGYDDPDYGYWGQGTQVTVSS

SEQ ID NO: 11560 - protein, 118 aa, Artificial Sequence
  Chemically Synthesized
QVQLQESGGGLVQAGGSLRLSCAASGSIFDFATMGWYRQAPGKEREFVASISNGGTTNYADSVKGRFTISRDNAKNTVYLQMNSLKPEDTAVYYCAVVYYGGNWHYYWGQGTQVTVSS

SEQ ID NO: 11561 - protein, 118 aa, Artificial Sequence
  Chemically Synthesized
QVQLQESGGGLVQAGGSLRLSCAASGSIFYYQNMGWYRQAPGKERELVAGIGWGAITNYADSVKGRFTISRDNAKNTVYLQMNSLKPEDTAVYYCAAPSYQNGWYQYWGQGTQVTVSS

SEQ ID NO: 11562 - protein, 118 aa, Artificial Sequence
  Chemically Synthesized
QVQLQESGGGLVQAGGSLRLSCAASGTISPLGIMGWYRQAPGKEREFVAGINGGATTNYADSVKGRFTISRDNAKNTVYLQMNSLKPEDTAVYYCAALTYDVRHFAYWGQGTQVTVSS

SEQ ID NO: 11563 - protein, 122 aa, Artificial Sequence
  Chemically Synthesized
QVQLQESGGGLVQAGGSLRLSCAASGTIFTRTVMGWYRQAPGKEREFVAGIALGGITNYADSVKGRFTISRDNAKNTVYLQMNSLKPEDTAVYYCAAIYAHDDGRDYRYYYWGQGTQVTVSS

SEQ ID NO: 11564 - protein, 118 aa, Artificial Sequence
  Chemically Synthesized
QVQLQESGGGLVQAGGSLRLSCAASGYIFTQAPMGWYRQAPGKEREFVAAIGNGTNTNYADSVKGRFTISRDNAKNTVYLQMNSLKPEDTAVYYCAAEYDTEPVLAYWGQGTQVTVSS

SEQ ID NO: 11565 - protein, 117 aa, Artificial Sequence
  Chemically Synthesized
QVQLQESGGGLVQAGGSLRLSCAASGTIFGDRYMGWYRQAPGKERELVASIGGGAIPYADSVKGRFTISRDNAKNTVYLQMNSLKPEDTAVYYCAAPTNGSGDYNYWGQGTQVTVSS

SEQ ID NO: 11566 - protein, 122 aa, Artificial Sequence
  Chemically Synthesized
QVQLQESGGGLVQAGGSLRLSCAASGSISADLYMGWYRQAPGKERELVAGITRGGTTYYADSVKGRFTISRDNAKNTVYLQMNSLKPEDTAVYYCAVYPDSDFGYRWGLHYWGQGTQVTVSS

SEQ ID NO: 11567 - protein, 121 aa, Artificial Sequence
  Chemically Synthesized
QVQLQESGGGLVQAGGSLRLSCAASGNIFGYYVMGWYRQAPGKEREFVASIAQGGTTYYADSVKGRFTISRDNAKNTVYLQMNSLKPEDTAVYYCAADGGYGTDSTLIMYWGQGTQVTVSS

SEQ ID NO: 11568 - protein, 118 aa, Artificial Sequence
  Chemically Synthesized
QVQLQESGGGLVQAGGSLRLSCAASGTISDNGVMGWYRQAPGKEREFVAGIAFGGSTNYADSVKGRFTISRDNAKNTVYLQMNSLKPEDTAVYYCAVVYGRGYRLYYWGQGTQVTVSS

SEQ ID NO: 11569 - protein, 118 aa, Artificial Sequence
  Chemically Synthesized
QVQLQESGGGLVQAGGSLRLSCAASGSIFQTDGMGWYRQAPGKERELVAAIASGGTTNYADSVKGRFTISRDNAKNTVYLQMNSLKPEDTAVYYCAVYYNNGYVHGYWGQGTQVTVSS

SEQ ID NO: 11570 - protein, 122 aa, Artificial Sequence
  Chemically Synthesized
QVQLQESGGGLVQAGGSLRLSCAASGYISSYHAMGWYRQAPGKERELVAGIGSGSTTNYADSVKGRFTISRDNAKNTVYLQMNSLKPEDTAVYYCAAWPYNYYRDYRQHDYWGQGTQVTVSS

SEQ ID NO: 11571 - protein, 118 aa, Artificial Sequence
  Chemically Synthesized
QVQLQESGGGLVQAGGSLRLSCAASGNISIGVRMGWYRQAPGKERELVASIANGSNTNYADSVKGRFTISRDNAKNTVYLQMNSLKPEDTAVYYCAAIWSNGRWHYYWGQGTQVTVSS

SEQ ID NO: 11572 - protein, 118 aa, Artificial Sequence
  Chemically Synthesized
QVQLQESGGGLVQAGGSLRLSCAASGNISRLNYMGWYRQAPGKEREFVAGITRGGNTYYADSVKGRFTISRDNAKNTVYLQMNSLKPEDTAVYYCAAQTDENDDLAYWGQGTQVTVSS

SEQ ID NO: 11573 - protein, 126 aa, Artificial Sequence
  Chemically Synthesized
QVQLQESGGGLVQAGGSLRLSCAASGNISDRDRMGWYRQAPGKERELVAAIAYGTNTNYADSVKGRFTISRDNAKNTVYLQMNSLKPEDTAVYYCAVVGDYVPLQFRYYVYAHYYWGQGTQVTVSS

SEQ ID NO: 11574 - protein, 118 aa, Artificial Sequence
  Chemically Synthesized
QVQLQESGGGLVQAGGSLRLSCAASGTISNSISMGWYRQAPGKEREFVAAIASGGTTYYADSVKGRFTISRDNAKNTVYLQMNSLKPEDTAVYYCAAIARTQDYHGYWGQGTQVTVSS

SEQ ID NO: 11575 - protein, 118 aa, Artificial Sequence
  Chemically Synthesized
QVQLQESGGGLVQAGGSLRLSCAASGTIFIDNDMGWYRQAPGKERELVASISYGSTTNYADSVKGRFTISRDNAKNTVYLQMNSLKPEDTAVYYCAAYDFYLRAHAYWGQGTQVTVSS

SEQ ID NO: 11576 - protein, 121 aa, Artificial Sequence
  Chemically Synthesized
QVQLQESGGGLVQAGGSLRLSCAASGTIFRLAVMGWYRQAPGKEREFVAAINGGTSTNYADSVKGRFTISRDNAKNTVYLQMNSLKPEDTAVYYCAVYPYDYDSSVVDYYWGQGTQVTVSS

SEQ ID NO: 11577 - protein, 118 aa, Artificial Sequence
  Chemically Synthesized
QVQLQESGGGLVQAGGSLRLSCAASGNISSNFVMGWYRQAPGKEREFVASISQGASTYYADSVKGRFTISRDNAKNTVYLQMNSLKPEDTAVYYCAAVTRIVRYHYYWGQGTQVTVSS

SEQ ID NO: 11578 - protein, 118 aa, Artificial Sequence
  Chemically Synthesized
QVQLQESGGGLVQAGGSLRLSCAASGYISDTLLMGWYRQAPGKERELVATINQGASTYYADSVKGRFTISRDNAKNTVYLQMNSLKPEDTAVYYCAAGLWYDDAFHYWGQGTQVTVSS

SEQ ID NO: 11579 - protein, 118 aa, Artificial Sequence
  Chemically Synthesized
QVQLQESGGGLVQAGGSLRLSCAASGYIFDYTNMGWYRQAPGKERELVASINIGSSTNYADSVKGRFTISRDNAKNTVYLQMNSLKPEDTAVYYCAVYRPDLSGHLYWGQGTQVTVSS

SEQ ID NO: 11580 - protein, 117 aa, Artificial Sequence
  Chemically Synthesized
QVQLQESGGGLVQAGGSLRLSCAASGSISSCTMGWYRQAPGKERELVAGIAHGTNTNYADSVKGRFTISRDNAKNTVYLQMNSLKPEDTAVYYCAVTHRGLRPLGYWGQGTQVTVSS

SEQ ID NO: 11581 - protein, 122 aa, Artificial Sequence
  Chemically Synthesized
QVQLQESGGGLVQAGGSLRLSCAASGNIFRDRAMGWYRQAPGKERELVATIGPGAITNYADSVKGRFTISRDNAKNTVYLQMNSLKPEDTAVYYCAAYVAGEARDGDNWLYWGQGTQVTVSS

SEQ ID NO: 11582 - protein, 119 aa, Artificial Sequence
  Chemically Synthesized
QVQLQESGGGLVQAGGSLRLSCAASGNISARGGMGWYRQAPGKEREFVATISDGANTNYADSVKGRFTISRDNAKNTVYLQMNSLKPEDTAVYYCAVLVYRQQRYFGYWGQGTQVTVSS

SEQ ID NO: 11583 - protein, 125 aa, Artificial Sequence
  Chemically Synthesized
QVQLQESGGGLVQAGGSLRLSCAASGTILTLVMGWYRQAPGKEREFVAAIDYGGTTNYADSVKGRFTISRDNAKNTVYLQMNSLKPEDTAVYYCAAWRDVRYVDQVEVPHDYPYWGQGTQVTVSS

SEQ ID NO: 11584 - protein, 118 aa, Artificial Sequence
  Chemically Synthesized
QVQLQESGGGLVQAGGSLRLSCAASGYISVYPYMGWYRQAPGKEREFVATIGTGGTTNYADSVKGRFTISRDNAKNTVYLQMNSLKPEDTAVYYCAALVRNGGYHSYWGQGTQVTVSS

SEQ ID NO: 11585 - protein, 117 aa, Artificial Sequence
  Chemically Synthesized
QVQLQESGGGLVQAGGSLRLSCAASGYIFQDAYMGWYRQAPGKEREFVAAIAGGSNTNYADSVKGRFTISRDNAKNTVYLQMNSLKPEDTAVYYCAAWDYRRSRMYWGQGTQVTVSS

SEQ ID NO: 11586 - protein, 118 aa, Artificial Sequence
  Chemically Synthesized
QVQLQESGGGLVQAGGSLRLSCAASGTISSFVRMGWYRQAPGKERELVATIDWGGSTNYADSVKGRFTISRDNAKNTVYLQMNSLKPEDTAVYYCAAYGDRGGWYVYWGQGTQVTVSS

SEQ ID NO: 11587 - protein, 116 aa, Artificial Sequence
  Chemically Synthesized
QVQLQESGGGLVQAGGSLRLSCAASGTIFWIKGMGWYRQAPGKEREFVAAIGSGGTTYYADSVKGRFTISRDNAKNTVYLQMNSLKPEDTAVYYCAVVADGNRYYWGQGTQVTVSS

SEQ ID NO: 11588 - protein, 122 aa, Artificial Sequence
  Chemically Synthesized
QVQLQESGGGLVQAGGSLRLSCAASGNISDPKYMGWYRQAPGKEREFVATINYGANTNYADSVKGRFTISRDNAKNTVYLQMNSLKPEDTAVYYCAVDDDQRKYADSSHTYWGQGTQVTVSS

SEQ ID NO: 11589 - protein, 118 aa, Artificial Sequence
  Chemically Synthesized
QVQLQESGGGLVQAGGSLRLSCAASGYISLIYVMGWYRQAPGKEREFVAAIADGGITNYADSVKGRFTISRDNAKNTVYLQMNSLKPEDTAVYYCAVVSRRSSYHYYWGQGTQVTVSS

SEQ ID NO: 11590 - protein, 122 aa, Artificial Sequence
  Chemically Synthesized
QVQLQESGGGLVQAGGSLRLSCAASGSISTTHTMGWYRQAPGKERELVASIAPGTSTYYADSVKGRFTISRDNAKNTVYLQMNSLKPEDTAVYYCAADPHVIIQRITGLGYWGQGTQVTVSS

SEQ ID NO: 11591 - protein, 122 aa, Artificial Sequence
  Chemically Synthesized
QVQLQESGGGLVQAGGSLRLSCAASGTISYNSAMGWYRQAPGKEREFVATIDLGASTYYADSVKGRFTISRDNAKNTVYLQMNSLKPEDTAVYYCAATYRVTPVDSHYYDYWGQGTQVTVSS

SEQ ID NO: 11592 - protein, 118 aa, Artificial Sequence
  Chemically Synthesized
QVQLQESGGGLVQAGGSLRLSCAASGSIFHRVAMGWYRQAPGKEREFVAAIATGTSTNYADSVKGRFTISRDNAKNTVYLQMNSLKPEDTAVYYCAVHEFALGSYFYWGQGTQVTVSS

SEQ ID NO: 11593 - protein, 118 aa, Artificial Sequence
  Chemically Synthesized
QVQLQESGGGLVQAGGSLRLSCAASGSISDTSYMGWYRQAPGKERELVAGIGSGSTTYYADSVKGRFTISRDNAKNTVYLQMNSLKPEDTAVYYCAAWRYYPRDLTYWGQGTQVTVSS

SEQ ID NO: 11594 - protein, 126 aa, Artificial Sequence
  Chemically Synthesized
QVQLQESGGGLVQAGGSLRLSCAASGSISGPTSMGWYRQAPGKEREFVATIDWGGSTYYADSVKGRFTISRDNAKNTVYLQMNSLKPEDTAVYYCAVGQYDYLDQLLTRLITYLYWGQGTQVTVSS

SEQ ID NO: 11595 - protein, 122 aa, Artificial Sequence
  Chemically Synthesized
QVQLQESGGGLVQAGGSLRLSCAASGSIFYHYRMGWYRQAPGKEREFVAAIASGGNTYYADSVKGRFTISRDNAKNTVYLQMNSLKPEDTAVYYCAAVDYDYGSGAGVFYYWGQGTQVTVSS

SEQ ID NO: 11596 - protein, 122 aa, Artificial Sequence
  Chemically Synthesized
QVQLQESGGGLVQAGGSLRLSCAASGYISRGAGMGWYRQAPGKEREFVAAIGYGSNTNYADSVKGRFTISRDNAKNTVYLQMNSLKPEDTAVYYCAVSDASIIDGADSYDYWGQGTQVTVSS

SEQ ID NO: 11597 - protein, 118 aa, Artificial Sequence
  Chemically Synthesized
QVQLQESGGGLVQAGGSLRLSCAASGSIFRYAVMGWYRQAPGKEREFVASIAEGANTNYADSVKGRFTISRDNAKNTVYLQMNSLKPEDTAVYYCAALVKVPRYHGYWGQGTQVTVSS

SEQ ID NO: 11598 - protein, 118 aa, Artificial Sequence
  Chemically Synthesized
QVQLQESGGGLVQAGGSLRLSCAASGTIFSAYAMGWYRQAPGKEREFVASIGAGATTNYADSVKGRFTISRDNAKNTVYLQMNSLKPEDTAVYYCAAKIVYYASLPYWGQGTQVTVSS

SEQ ID NO: 11599 - protein, 117 aa, Artificial Sequence
  Chemically Synthesized
QVQLQESGGGLVQAGGSLRLSCAASGNISPSGYMGWYRQAPGKERELVASIDGGGITYYADSVKGRFTISRDNAKNTVYLQMNSLKPEDTAVYYCAARVYYASTLYWGQGTQVTVSS

SEQ ID NO: 11600 - protein, 118 aa, Artificial Sequence
  Chemically Synthesized
QVQLQESGGGLVQAGGSLRLSCAASGNIFIDPFMGWYRQAPGKERELVAAINGGSSTYYADSVKGRFTISRDNAKNTVYLQMNSLKPEDTAVYYCAAGGYNYLWFGYWGQGTQVTVSS

SEQ ID NO: 11601 - protein, 116 aa, Artificial Sequence
  Chemically Synthesized
QVQLQESGGGLVQAGGSLRLSCAASGTIFTTMGWYRQAPGKERELVAGISEGGITNYADSVKGRFTISRDNAKNTVYLQMNSLKPEDTAVYYCAVESAPKVGHTYWGQGTQVTVSS

SEQ ID NO: 11602 - protein, 122 aa, Artificial Sequence
  Chemically Synthesized
QVQLQESGGGLVQAGGSLRLSCAASGTISESERMGWYRQAPGKEREFVAAIAYGATTNYADSVKGRFTISRDNAKNTVYLQMNSLKPEDTAVYYCAVLGITRGSPRQYHYYWGQGTQVTVSS

SEQ ID NO: 11603 - protein, 122 aa, Artificial Sequence
  Chemically Synthesized
QVQLQESGGGLVQAGGSLRLSCAASGYISQVWLMGWYRQAPGKEREFVAAIGAGSTTNYADSVKGRFTISRDNAKNTVYLQMNSLKPEDTAVYYCALTTTRILLTTWFTLYWGQGTQVTVSS

SEQ ID NO: 11604 - protein, 118 aa, Artificial Sequence
  Chemically Synthesized
QVQLQESGGGLVQAGGSLRLSCAASGTISPRDYMGWYRQAPGKEREFVAGIGPGGNTNYADSVKGRFTISRDNAKNTVYLQMNSLKPEDTAVYYCAALRWIGVWFYYWGQGTQVTVSS

SEQ ID NO: 11605 - protein, 125 aa, Artificial Sequence
  Chemically Synthesized
QVQLQESGGGLVQAGGSLRLSCAASGYISRWYTMGWYRQAPGKEREFVAGITVGGNTYYADSVKGRFTISRDNAKNTVYLQMNSLKPEDTAVYYCAARANSRPLGWTIIGQHHYWGQGTQVTVSS

SEQ ID NO: 11606 - protein, 118 aa, Artificial Sequence
  Chemically Synthesized
QVQLQESGGGLVQAGGSLRLSCAASGNIFRYPGMGWYRQAPGKEREFVAGITAGGNTYYADSVKGRFTISRDNAKNTVYLQMNSLKPEDTAVYYCAAYHELKDALGYWGQGTQVTVSS

SEQ ID NO: 11607 - protein, 121 aa, Artificial Sequence
  Chemically Synthesized
QVQLQESGGGLVQAGGSLRLSCAASGYIFYRDSMGWYRQAPGKEREFVASINGGITYYADSVKGRFTISRDNAKNTVYLQMNSLKPEDTAVYYCAVVIRDDNVRPSNHYYWGQGTQVTVSS

SEQ ID NO: 11608 - protein, 122 aa, Artificial Sequence
  Chemically Synthesized
QVQLQESGGGLVQAGGSLRLSCAASGNIFHRTVMGWYRQAPGKEREFVAAITDGSNTYYADSVKGRFTISRDNAKNTVYLQMNSLKPEDTAVYYCAAVWFSNFSGVGGHSYWGQGTQVTVSS

SEQ ID NO: 11609 - protein, 121 aa, Artificial Sequence
  Chemically Synthesized
QVQLQESGGGLVQAGGSLRLSCAASGTIFYNAAMGWYRQAPGKEREFVAGISVGGITNYADSVKGRFTISRDNAKNTVYLQMNSLKPEDTAVYYCAAYGPWDLRLLTRIYWGQGTQVTVSS

SEQ ID NO: 11610 - protein, 118 aa, Artificial Sequence
  Chemically Synthesized
QVQLQESGGGLVQAGGSLRLSCAASGNIFNASHMGWYRQAPGKEREFVAAITLGGNTNYADSVKGRFTISRDNAKNTVYLQMNSLKPEDTAVYYCAAIRQDPKYLWYWGQGTQVTVSS

SEQ ID NO: 11611 - protein, 122 aa, Artificial Sequence
  Chemically Synthesized
QVQLQESGGGLVQAGGSLRLSCAASGNISWYINMGWYRQAPGKERELVAGIGSGSTTYYADSVKGRFTISRDNAKNTVYLQMNSLKPEDTAVYYCAAYVARRNTSYDGHKYWGQGTQVTVSS

SEQ ID NO: 11612 - protein, 126 aa, Artificial Sequence
  Chemically Synthesized
QVQLQESGGGLVQAGGSLRLSCAASGSISLIVRMGWYRQAPGKERELVASIGFGAITNYADSVKGRFTISRDNAKNTVYLQMNSLKPEDTAVYYCAVLGYPGVLLGQLDQGLYGYWGQGTQVTVSS

SEQ ID NO: 11613 - protein, 122 aa, Artificial Sequence
  Chemically Synthesized
QVQLQESGGGLVQAGGSLRLSCAASGNISPLVAMGWYRQAPGKEREFVAGISTGGSTNYADSVKGRFTISRDNAKNTVYLQMNSLKPEDTAVYYCAALFDKQGLRGTRHPYWGQGTQVTVSS

SEQ ID NO: 11614 - protein, 122 aa, Artificial Sequence
  Chemically Synthesized
QVQLQESGGGLVQAGGSLRLSCAASGTISDAITMGWYRQAPGKEREFVAGIGYGAITNYADSVKGRFTISRDNAKNTVYLQMNSLKPEDTAVYYCAAVVYTRGPYARHHGYWGQGTQVTVSS

SEQ ID NO: 11615 - protein, 118 aa, Artificial Sequence
  Chemically Synthesized
QVQLQESGGGLVQAGGSLRLSCAASGSISSWAGMGWYRQAPGKERELVAGITLGGTTNYADSVKGRFTISRDNAKNTVYLQMNSLKPEDTAVYYCAVVTYIYSYHGYWGQGTQVTVSS

SEQ ID NO: 11616 - protein, 118 aa, Artificial Sequence
  Chemically Synthesized
QVQLQESGGGLVQAGGSLRLSCAASGTIFGLHYMGWYRQAPGKERELVATINGGGNTNYADSVKGRFTISRDNAKNTVYLQMNSLKPEDTAVYYCAAYPYDGPWHVYWGQGTQVTVSS

SEQ ID NO: 11617 - protein, 122 aa, Artificial Sequence
  Chemically Synthesized
QVQLQESGGGLVQAGGSLRLSCAASGNISLDPYMGWYRQAPGKEREFVAAISQGSTTNYADSVKGRFTISRDNAKNTVYLQMNSLKPEDTAVYYCAAVAYTADESQRYHYYWGQGTQVTVSS

SEQ ID NO: 11618 - protein, 118 aa, Artificial Sequence
  Chemically Synthesized
QVQLQESGGGLVQAGGSLRLSCAASGSISYYLYMGWYRQAPGKERELVASITVGASTNYADSVKGRFTISRDNAKNTVYLQMNSLKPEDTAVYYCAVYRGTDVGFGYWGQGTQVTVSS

SEQ ID NO: 11619 - protein, 122 aa, Artificial Sequence
  Chemically Synthesized
QVQLQESGGGLVQAGGSLRLSCAASGTISDLWAMGWYRQAPGKEREFVATIGGGANTYYADSVKGRFTISRDNAKNTVYLQMNSLKPEDTAVYYCAAYYYYSQEDSGTFEYWGQGTQVTVSS

SEQ ID NO: 11620 - protein, 117 aa, Artificial Sequence
  Chemically Synthesized
QVQLQESGGGLVQAGGSLRLSCAASGNISHAATMGWYRQAPGKEREFVATITYGATPYADSVKGRFTISRDNAKNTVYLQMNSLKPEDTAVYYCAAGDARVQYLTYWGQGTQVTVSS

SEQ ID NO: 11621 - protein, 122 aa, Artificial Sequence
  Chemically Synthesized
QVQLQESGGGLVQAGGSLRLSCAASGNIFQAATMGWYRQAPGKEREFVAGIGHGTSTNYADSVKGRFTISRDNAKNTVYLQMNSLKPEDTAVYYCAVQGWYTASGHRYFEYWGQGTQVTVSS

SEQ ID NO: 11622 - protein, 122 aa, Artificial Sequence
  Chemically Synthesized
QVQLQESGGGLVQAGGSLRLSCAASGYISRRLVMGWYRQAPGKERELVAAISQGGITNYADSVKGRFTISRDNAKNTVYLQMNSLKPEDTAVYYCAVQPARKYGYYISHLYWGQGTQVTVSS

SEQ ID NO: 11623 - protein, 126 aa, Artificial Sequence
  Chemically Synthesized
QVQLQESGGGLVQAGGSLRLSCAASGNIFQYRDMGWYRQAPGKEREFVASINDGGSTYYADSVKGRFTISRDNAKNTVYLQMNSLKPEDTAVYYCAAFQGGSAYLDAEYPLDLLYWGQGTQVTVSS

SEQ ID NO: 11624 - protein, 122 aa, Artificial Sequence
  Chemically Synthesized
QVQLQESGGGLVQAGGSLRLSCAASGTIFLAGLMGWYRQAPGKERELVAAIAPGTTTYYADSVKGRFTISRDNAKNTVYLQMNSLKPEDTAVYYCAAGNAYYGQQGYEYAYWGQGTQVTVSS

SEQ ID NO: 11625 - protein, 122 aa, Artificial Sequence
  Chemically Synthesized
QVQLQESGGGLVQAGGSLRLSCAASGSISRYRTMGWYRQAPGKEREFVAAIGHGGNTNYADSVKGRFTISRDNAKNTVYLQMNSLKPEDTAVYYCAVYVTNKATPGYRHRYWGQGTQVTVSS

SEQ ID NO: 11626 - protein, 117 aa, Artificial Sequence
  Chemically Synthesized
QVQLQESGGGLVQAGGSLRLSCAASGSISQSTDMGWYRQAPGKERELVATIGRGASTYYADSVKGRFTISRDNAKNTVYLQMNSLKPEDTAVYYCAVPSQEVVSYYWGQGTQVTVSS

SEQ ID NO: 11627 - protein, 122 aa, Artificial Sequence
  Chemically Synthesized
QVQLQESGGGLVQAGGSLRLSCAASGTISATDDMGWYRQAPGKEREFVAAIAYGGTTNYADSVKGRFTISRDNAKNTVYLQMNSLKPEDTAVYYCAANGFTGSYLQPRHYYWGQGTQVTVSS

SEQ ID NO: 11628 - protein, 122 aa, Artificial Sequence
  Chemically Synthesized
QVQLQESGGGLVQAGGSLRLSCAASGSIFFVQGMGWYRQAPGKEREFVASIDNGGNTNYADSVKGRFTISRDNAKNTVYLQMNSLKPEDTAVYYCAAYTYIWAHFVGYHAYWGQGTQVTVSS

SEQ ID NO: 11629 - protein, 118 aa, Artificial Sequence
  Chemically Synthesized
QVQLQESGGGLVQAGGSLRLSCAASGYISRYTYMGWYRQAPGKERELVASIDRGTTTNYADSVKGRFTISRDNAKNTVYLQMNSLKPEDTAVYYCAAYFPVVRSHHYWGQGTQVTVSS

SEQ ID NO: 11630 - protein, 111 aa, Artificial Sequence
  Chemically Synthesized
QVQLQESGGGLVQAGGSLRLSCAASGSIFAYRSMGWYRQAPGKEREFVATIGVGGSTNYADSVKGRFTISRDNAKNTVYLQMNSLKPEDTAVYYCAAYMYWGQGTQVTVSS

SEQ ID NO: 11631 - protein, 117 aa, Artificial Sequence
  Chemically Synthesized
QVQLQESGGGLVQAGGSLRLSCAASGSIFVDLMGWYRQAPGKEREFVATIGGGTITYYADSVKGRFTISRDNAKNTVYLQMNSLKPEDTAVYYCAVVSQFDAYHYYWGQGTQVTVSS

SEQ ID NO: 11632 - protein, 117 aa, Artificial Sequence
  Chemically Synthesized
QVQLQESGGGLVQAGGSLRLSCAASGTIFWGAMGWYRQAPGKEREFVASITDGSNTNYADSVKGRFTISRDNAKNTVYLQMNSLKPEDTAVYYCAVIARAYYGFVYWGQGTQVTVSS

SEQ ID NO: 11633 - protein, 121 aa, Artificial Sequence
  Chemically Synthesized
QVQLQESGGGLVQAGGSLRLSCAASGTIFLYAVMGWYRQAPGKERELVATIDTGGNTYYADSVKGRFTISRDNAKNTVYLQMNSLKPEDTAVYYCAVPGEYQSISTTRMYWGQGTQVTVSS

SEQ ID NO: 11634 - protein, 118 aa, Artificial Sequence
  Chemically Synthesized
QVQLQESGGGLVQAGGSLRLSCAASGTISYSSGMGWYRQAPGKEREFVAGITIGGNTYYADSVKGRFTISRDNAKNTVYLQMNSLKPEDTAVYYCAVLTPFGTRYFYWGQGTQVTVSS

SEQ ID NO: 11635 - protein, 118 aa, Artificial Sequence
  Chemically Synthesized
QVQLQESGGGLVQAGGSLRLSCAASGSISERPSMGWYRQAPGKERELVASIASGASTYYADSVKGRFTISRDNAKNTVYLQMNSLKPEDTAVYYCAVIDEYDYRHDYWGQGTQVTVSS

SEQ ID NO: 11636 - protein, 117 aa, Artificial Sequence
  Chemically Synthesized
QVQLQESGGGLVQAGGSLRLSCAASGTISAAYYMGWYRQAPGKERELVAGINVGSIQYADSVKGRFTISRDNAKNTVYLQMNSLKPEDTAVYYCAVYTTWLYRYYYWGQGTQVTVSS

SEQ ID NO: 11637 - protein, 118 aa, Artificial Sequence
  Chemically Synthesized
QVQLQESGGGLVQAGGSLRLSCAASGTISETLFMGWYRQAPGKEREFVAAIGRGANTNYADSVKGRFTISRDNAKNTVYLQMNSLKPEDTAVYYCAVHDAEFPNLGYWGQGTQVTVSS

SEQ ID NO: 11638 - protein, 116 aa, Artificial Sequence
  Chemically Synthesized
QVQLQESGGGLVQAGGSLRLSCAASGYMGWYRQAPGKERELVAGIDYGGTTNYADSVKGRFTISRDNAKNTVYLQMNSLKPEDTAVYYCAAYDDYDFLPETYYGYWGQGTQVTVSS

SEQ ID NO: 11639 - protein, 122 aa, Artificial Sequence
  Chemically Synthesized
QVQLQESGGGLVQAGGSLRLSCAASGNIFGNQYMGWYRQAPGKERELVAGINAGSITYYADSVKGRFTISRDNAKNTVYLQMNSLKPEDTAVYYCAVTYRAYIYRADYLAYWGQGTQVTVSS

SEQ ID NO: 11640 - protein, 111 aa, Artificial Sequence
  Chemically Synthesized
QVQLQESGGGLVQAGGSLRLSCAASGSIFTEDYMGWYRQAPGKEREFVAAIGSGASTNYADSVKGRFTISRDNAKNTVYLQMNSLKPEDTAVYYCAGPCYWGQGTQVTVSS

SEQ ID NO: 11641 - protein, 119 aa, Artificial Sequence
  Chemically Synthesized
QVQLQESGGGLVQAGGSLRLSCAASGTISLMGWYRQAPGKERELVATIAGGSITNYADSVKGRFTISRDNAKNTVYLQMNSLKPEDTAVYYCAAWSGTYRDYPYSHHYWGQGTQVTVSS

SEQ ID NO: 11642 - protein, 126 aa, Artificial Sequence
  Chemically Synthesized
QVQLQESGGGLVQAGGSLRLSCAASGNIFTDAYMGWYRQAPGKERELVASINYGAITNYADSVKGRFTISRDNAKNTVYLQMNSLKPEDTAVYYCAADDPGEDRGKTYVHAYHVYWGQGTQVTVSS

SEQ ID NO: 11643 - protein, 118 aa, Artificial Sequence
  Chemically Synthesized
QVQLQESGGGLVQAGGSLRLSCAASGSISGDVDMGWYRQAPGKEREFVAGITTGATTYYADSVKGRFTISRDNAKNTVYLQMNSLKPEDTAVYYCAAPDTDYDYYTYWGQGTQVTVSS

SEQ ID NO: 11644 - protein, 121 aa, Artificial Sequence
  Chemically Synthesized
QVQLQESGGGLVQAGGSLRLSCAASGYISGGVRMGWYRQAPGKEREFVASIGQGGNTNYADSVKGRFTISRDNAKNTVYLQMNSLKPEDTAVYYCAVQGPDRYSVTTVIYWGQGTQVTVSS

SEQ ID NO: 11645 - protein, 118 aa, Artificial Sequence
  Chemically Synthesized
QVQLQESGGGLVQAGGSLRLSCAASGTISIFSEDMGWYRQAPGKERELVPVLMTVLLPYADSVKGRFTISRDNAKNTVYLQMNSLKPEDTAVYYCAVYRYERIPFDYWGQGTQVTVSS

SEQ ID NO: 11646 - protein, 118 aa, Artificial Sequence
  Chemically Synthesized
QVQLQESGGGLVQAGGSLRLSCAASGTIFYQDYMGWYRQAPGKERELVASIGDGASTYYADSVKGRFTISRDNAKNTVYLQMNSLKPEDTAVYYCAVAVGNVGPFFYWGQGTQVTVSS

SEQ ID NO: 11647 - protein, 118 aa, Artificial Sequence
  Chemically Synthesized
QVQLQESGGGLVQAGGSLRLSCAASGTISLDIVMGWYRQAPGKEREFVAAISTGASTNYADSVKGRFTISRDNAKNTVYLQMNSLKPEDTAVYYCAAYRYDYKPFWYWGQGTQVTVSS

SEQ ID NO: 11648 - protein, 115 aa, Artificial Sequence
  Chemically Synthesized
QVQLQESGGGLVQAGGSLRLSCAASGTISRPVVMGWYRQAPGKEREFVSSIGYGTSTYYADSVKGRFTISRDNAKNTVYLQMNSLKPEDTAVYYCAVLHLPALYWGQGTQVTVSS

SEQ ID NO: 11649 - protein, 118 aa, Artificial Sequence
  Chemically Synthesized
QVQLQESGGGLVQAGGSLRLSCAASGNISTWWWMGWYRQAPGKERELVATINNGTTTNYADSVKGRFTISRDNAKNTVYLQMNSLKPEDTAVYYCAVDYGVDDRHGYWGQGTQVTVSS

SEQ ID NO: 11650 - protein, 111 aa, Artificial Sequence
  Chemically Synthesized
QVQLQESGGGLVQAGGSLRLSCAASGNISTGPFMGWYRQAPGKEREFVATIASVVIPYADSVKGRFTISRDNAKNTVYLQMNSLKPEDTAVYYCAVTCIYWGQGTQVTVSS

SEQ ID NO: 11651 - protein, 126 aa, Artificial Sequence
  Chemically Synthesized
QVQLQESGGGLVQAGGSLRLSCAASGNIFIGDWMGWYRQAPGKEREFVAGIAYGGITYYADSVKGRFTISRDNAKNTVYLQMNSLKPEDTAVYYCAVGYVNADGPALQRYRYLAYWGQGTQVTVSS

SEQ ID NO: 11652 - protein, 121 aa, Artificial Sequence
  Chemically Synthesized
QVQLQESGGGLVQAGGSLRLSCAASGSISDNTDMGWYRQAPGKEREFVAGIDSVVLPYADSVKGRFTISRDNAKNTVYLQMNSLKPEDTAVYYCAVQRVDNPGGPVGHQYWGQGTQVTVSS

SEQ ID NO: 11653 - protein, 122 aa, Artificial Sequence
  Chemically Synthesized
QVQLQESGGGLVQAGGSLRLSCAASGYISNDDDMGWYRQAPGKERELVAGISSGGNTYYADSVKGRFTISRDNAKNTVYLQMNSLKPEDTAVYYCAVVLERDRWGTGPHRYWGQGTQVTVSS

SEQ ID NO: 11654 - protein, 118 aa, Artificial Sequence
  Chemically Synthesized
QVQLQESGGGLVQAGGSLRLSCAASGTISTLGFMGWYRQAPGKEREFVAAIDYGGTTNYADSVKGRFTISRDNAKNTVYLQMNSLKPEDTAVYYCAARRYRSSYHIYWGQGTQVTVSS

SEQ ID NO: 11655 - protein, 122 aa, Artificial Sequence
  Chemically Synthesized
QVQLQESGGGLVQAGGSLRLSCAASGSIFRTRDMGWYRQAPGKEREFVAGIANGGNTNYADSVKGRFTISRDNAKNTVYLQMNSLKPEDTAVYYCAVPDVDGLVDFRDFAYWGQGTQVTVSS

SEQ ID NO: 11656 - protein, 126 aa, Artificial Sequence
  Chemically Synthesized
QVQLQESGGGLVQAGGSLRLSCAASGYIFDQYPMGWYRQAPGKEREFVATIGYGASTYYADSVKGRFTISRDNAKNTVYLQMNSLKPEDTAVYYCAVLDGFPVLAYEVNGGAYRYWGQGTQVTVSS

SEQ ID NO: 11657 - protein, 118 aa, Artificial Sequence
  Chemically Synthesized
QVQLQESGGGLVQAGGSLRLSCAASGSIFVPHLMGWYRQAPGKERELVASIARGSTTYYADSVKGRFTISRDNAKNTVYLQMNSLKPEDTAVYYCAVYIYREDEFSYWGQGTQVTVSS

SEQ ID NO: 11658 - protein, 121 aa, Artificial Sequence
  Chemically Synthesized
QVQLQESGGGLVQAGGSLRLSCAASGTISPYGDMGWYRQAPGKEREFVAAITSVLIPYADSVKGRFTISRDNAKNTVYLQMNSLKPEDTAVYYCAAFDGFRASYGYWFYYWGQGTQVTVSS

SEQ ID NO: 11659 - protein, 123 aa, Artificial Sequence
  Chemically Synthesized
QVQLQESGGGLVQAGGSLRLSCAASGSIFSRYYMGWYRQAPGKEREFVASISNGTITNYADSVKGRFTISRDNAKNTVYLQMNSLKPEDTAVYYCAAYPRGPSGYTGSTVIYWGQGTQVTVSS

SEQ ID NO: 11660 - protein, 118 aa, Artificial Sequence
  Chemically Synthesized
QVQLQESGGGLVQAGGSLRLSCAASGNIFYNAYMGWYRQAPGKERELVATIDAGATTYYADSVKGRFTISRDNAKNTVYLQMNSLKPEDTAVYYCAVVVYWRDRYYYWGQGTQVTVSS

SEQ ID NO: 11661 - protein, 118 aa, Artificial Sequence
  Chemically Synthesized
QVQLQESGGGLVQAGGSLRLSCAASGSIFDSYYMGWYRQAPGKEREFVAGIDTGSNTNYADSVKGRFTISRDNAKNTVYLQMNSLKPEDTAVYYCAAGDGYALVHDYWGQGTQVTVSS

SEQ ID NO: 11662 - protein, 118 aa, Artificial Sequence
  Chemically Synthesized
QVQLQESGGGLVQAGGSLRLSCAASGNIFRRRPMGWYRQAPGKERELVATIAGGTSTNYADSVKGRFTISRDNAKNTVYLQMNSLKPEDTAVYYCAVYRNYEGAFAYWGQGTQVTVSS

SEQ ID NO: 11663 - protein, 126 aa, Artificial Sequence
  Chemically Synthesized
QVQLQESGGGLVQAGGSLRLSCAASGNIFTVRYMGWYRQAPGKEREFVAGIASGGITNYADSVKGRFTISRDNAKNTVYLQMNSLKPEDTAVYYCAVDDRVSDIGYGAQAYYHGYWGQGTQVTVSS

SEQ ID NO: 11664 - protein, 118 aa, Artificial Sequence
  Chemically Synthesized
QVQLQESGGGLVQAGGSLRLSCAASGYISDGSNMGWYRQAPGKERELVASINGGANTYYADSVKGRFTISRDNAKNTVYLQMNSLKPEDTAVYYCAVDWDLTSYYDYWGQGTQVTVSS

SEQ ID NO: 11665 - protein, 122 aa, Artificial Sequence
  Chemically Synthesized
QVQLQESGGGLVQAGGSLRLSCAASGTISDLGPMGWYRQAPGKEREFVASITFGGSTYYADSVKGRFTISRDNAKNTVYLQMNSLKPEDTAVYYCAVWYARKRVGWYAFIYWGQGTQVTVSS

SEQ ID NO: 11666 - protein, 122 aa, Artificial Sequence
  Chemically Synthesized
QVQLQESGGGLVQAGGSLRLSCAASGNISPVSDMGWYRQAPGKERELVAGITDGGNTNYADSVKGRFTISRDNAKNTVYLQMNSLKPEDTAVYYCAAKLSYFYGIIAIHDYWGQGTQVTVSS

SEQ ID NO: 11667 - protein, 122 aa, Artificial Sequence
  Chemically Synthesized
QVQLQESGGGLVQAGGSLRLSCAASGNISQQYRMGWYRQAPGKERELVATISYGASTYYADSVKGRFTISRDNAKNTVYLQMNSLKPEDTAVYYCAAYPYGDGYDFPNYFYWGQGTQVTVSS

SEQ ID NO: 11668 - protein, 118 aa, Artificial Sequence
  Chemically Synthesized
QVQLQESGGGLVQAGGSLRLSCAASGNISRPYKMGWYRQAPGKEREFVAAISAGANTNYADSVKGRFTISRDNAKNTVYLQMNSLKPEDTAVYYCAAYYERGDPLPYWGQGTQVTVSS

SEQ ID NO: 11669 - protein, 118 aa, Artificial Sequence
  Chemically Synthesized
QVQLQESGGGLVQAGGSLRLSCAASGSISARAQMGWYRQAPGKERELVASIAEGAITYYADSVKGRFTISRDNAKNTVYLQMNSLKPEDTAVYYCAVRDPSYSELVYWGQGTQVTVSS

SEQ ID NO: 11670 - protein, 120 aa, Artificial Sequence
  Chemically Synthesized
QVQLQESGGGLVQAGGSLRLSCAASGNISVYYIMGWYRQAPGKEREFVATIAPGGSTNYADSVKGRFTISRDNAKNTVYLQMNSLKPEDTAVYYCAAWFGDGPYIPYDYWGQGTQVTVSS

SEQ ID NO: 11671 - protein, 122 aa, Artificial Sequence
  Chemically Synthesized
QVQLQESGGGLVQAGGSLRLSCAASGNIFLYFPMGWYRQAPGKEREFVAAIGSGTITNYADSVKGRFTISRDNAKNTVYLQMNSLKPEDTAVYYCAVPLLYSSVLPDLGIYWGQGTQVTVSS

SEQ ID NO: 11672 - protein, 124 aa, Artificial Sequence
  Chemically Synthesized
QVQLQESGGGLVQAGGSLRLSCAASGTTTAYAMGWYRQAPGKERELVATITSGATTYYADSVKGRFTISRDNAKNTVYLQMNSLKPEDTAVYYCAARASDDADQPQWYDSRMYWGQGTQVTVSS

SEQ ID NO: 11673 - protein, 118 aa, Artificial Sequence
  Chemically Synthesized
QVQLQESGGGLVQAGGSLRLSCAASGSISASYIMGWYRQAPGKERELVAGIDSGGNTYYADSVKGRFTISRDNAKNTVYLQMNSLKPEDTAVYYCAAWRDGQYEHRYWGQGTQVTVSS

SEQ ID NO: 11674 - protein, 118 aa, Artificial Sequence
  Chemically Synthesized
QVQLQESGGGLVQAGGSLRLSCAASGTIFVGSGMGWYRQAPGKERELVATIDYGSNTNYADSVKGRFTISRDNAKNTVYLQMNSLKPEDTAVYYCAADYTFAGYYDYWGQGTQVTVSS

SEQ ID NO: 11675 - protein, 118 aa, Artificial Sequence
  Chemically Synthesized
QVQLQESGGGLVQAGGSLRLSCAASGNIFEPNRMGWYRQAPGKERELVASIDRGAITNYADSVKGRFTISRDNAKNTVYLQMNSLKPEDTAVYYCAVDYSDNDVYYYWGQGTQVTVSS

SEQ ID NO: 11676 - protein, 118 aa, Artificial Sequence
  Chemically Synthesized
QVQLQESGGGLVQAGGSLRLSCAASGSISPYVVMGWYRQAPGKERELVAGIGPGGITYYADSVKGRFTISRDNAKNTVYLQMNSLKPEDTAVYYCAAYLFDQGSFEYWGQGTQVTVSS

SEQ ID NO: 11677 - protein, 117 aa, Artificial Sequence
  Chemically Synthesized
QVQLQESGGGLVQAGGSLRLSCAASGYIFREDGMGWYRQAPGKEREFVAAIALGAITYYADSVKGRFTISRDNAKNTVYLQMNSLKPEDTAVYYCAVRYGDPIFDYWGQGTQVTVSS

SEQ ID NO: 11678 - protein, 126 aa, Artificial Sequence
  Chemically Synthesized
QVQLQESGGGLVQAGGSLRLSCAASGYISRAGDMGWYRQAPGKERELVASISYGTSTNYADSVKGRFTISRDNAKNTVYLQMNSLKPEDTAVYYCAADTPDDRWGYRRWLRGHYYWGQGTQVTVSS

SEQ ID NO: 11679 - protein, 116 aa, Artificial Sequence
  Chemically Synthesized
QVQLQESGGGLVQAGGSLRLSCAASGSISPDTPMGWYRQAPGKERELVAASLGGTTYYADSVKGRFTISRDNAKNTVYLQMNSLKPEDTAVYYCAVTTFTLRTMYWGQGTQVTVSS

SEQ ID NO: 11680 - protein, 126 aa, Artificial Sequence
  Chemically Synthesized
QVQLQESGGGLVQAGGSLRLSCAASGTISDHNYMGWYRQAPGKERELVAGIDAGTSTNYADSVKGRFTISRDNAKNTVYLQMNSLKPEDTAVYYCAAGYGEYKYRGDLIYDEHYYWGQGTQVTVSS

SEQ ID NO: 11681 - protein, 127 aa, Artificial Sequence
  Chemically Synthesized
QVQLQESGGGLVQAGGSLRLSCAASGYISDTYSKMGWYRQAPGKERELVAAIAGGTTTYYADSVKGRFTISRDNAKNTVYLQMNSLKPEDTAVYYCAVLGYEVRHVGYDARYDLYYWGQGTQVTVSS

SEQ ID NO: 11682 - protein, 122 aa, Artificial Sequence
  Chemically Synthesized
QVQLQESGGGLVQAGGSLRLSCAASGSIFTYRIMGWYRQAPGKEREFVATIGGGGTTNYADSVKGRFTISRDNAKNTVYLQMNSLKPEDTAVYYCAVDLPDQDRYYRALHYWGQGTQVTVSS

SEQ ID NO: 11683 - protein, 122 aa, Artificial Sequence
  Chemically Synthesized
QVQLQESGGGLVQAGGSLRLSCAASGNIFHYPVMGWYRQAPGKEREFVAGISYGATTNYADSVKGRFTISRDNAKNTVYLQMNSLKPEDTAVYYCAARYVWTAGNYHYLEYWGQGTQVTVSS

SEQ ID NO: 11684 - protein, 119 aa, Artificial Sequence
  Chemically Synthesized
QVQLQESGGGLVQAGGSLRLSCAASGNIFTSNFMGWYRQAPGKEREFVAGITEGTSTNYADSVKGRFTISRDNAKNTVYLQMNSLKPEDTAVYYCAVVDYVPYLYFIYWGQGTQVTVSS

SEQ ID NO: 11685 - protein, 122 aa, Artificial Sequence
  Chemically Synthesized
QVQLQESGGGLVQAGGSLRLSCAASGTISYLTYMGWYRQAPGKERELVATIDTGSNTNYADSVKGRFTISRDNAKNTVYLQMNSLKPEDTAVYYCAVLPDETHYDDTWYQYWGQGTQVTVSS

SEQ ID NO: 11686 - protein, 118 aa, Artificial Sequence
  Chemically Synthesized
QVQLQESGGGLVQAGGSLRLSCAASGTIFRPYVMGWYRQAPGKEREFVAGIGWGGITNYADSVKGRFTISRDNAKNTVYLQMNSLKPEDTAVYYCAALGIGYIRHYYWGQGTQVTVSS

SEQ ID NO: 11687 - protein, 118 aa, Artificial Sequence
  Chemically Synthesized
QVQLQESGGGLVQAGGSLRLSCAASGNISQYTYMGWYRQAPGKEREFVAAIDYGAINQYADSVKGRFTISRDNAKNTVYLQMNSLKPEDTAVYYCAAQDDPRHGFGYWGQGTQVTVSS

SEQ ID NO: 11688 - protein, 118 aa, Artificial Sequence
  Chemically Synthesized
QVQLQESGGGLVQAGGSLRLSCAASGTISSDYDMGWYRQAPGKEREFVATIGTGTTTNYADSVKGRFTISRDNAKNTVYLQMNSLKPEDTAVYYCAAFTYAVDLHYYWGQGTQVTVSS

SEQ ID NO: 11689 - protein, 118 aa, Artificial Sequence
  Chemically Synthesized
QVQLQESGGGLVQAGGSLRLSCAASGTIFSAVYMGWYRQAPGKEREFVASISDGASTYYADSVKGRFTISRDNAKNTVYLQMNSLKPEDTAVYYCAAVYYRSGYLGYWGQGTQVTVSS

SEQ ID NO: 11690 - protein, 121 aa, Artificial Sequence
  Chemically Synthesized
QVQLQESGGGLVQAGGSLRLSCAASGNIFWVGMGWYRQAPGKEREFVASIGDGGSTNYADSVKGRFTISRDNAKNTVYLQMNSLKPEDTAVYYCAAYVGPISYWGPYHPYWGQGTQVTVSS

SEQ ID NO: 11691 - protein, 116 aa, Artificial Sequence
  Chemically Synthesized
QVQLQESGGGLVQAGGSLRLSCAASGYISFSRGMGWYRQAPGKEREFVAAISYGTNTYYADSVKGRFTISRDNAKNTVYLQMNSLKPEDTAVYYCAAVASRRHYYWGQGTQVTVSS

SEQ ID NO: 11692 - protein, 126 aa, Artificial Sequence
  Chemically Synthesized
QVQLQESGGGLVQAGGSLRLSCAASGNIFPYSGMGWYRQAPGKERELVAGIAGGSNTNYADSVKGRFTISRDNAKNTVYLQMNSLKPEDTAVYYCAVRPALAAPLPHAYYYLFRYWGQGTQVTVSS

SEQ ID NO: 11693 - protein, 117 aa, Artificial Sequence
  Chemically Synthesized
QVQLQESGGGLVQAGGSLRLSCAASGNISDSPYMGWYRQAPGKEREFVASINSGTITYADSVKGRFTISRDNAKNTVYLQMNSLKPEDTAVYYCAVTDGPYTYYFYWGQGTQVTVSS

SEQ ID NO: 11694 - protein, 117 aa, Artificial Sequence
  Chemically Synthesized
QVQLQESGGGLVQAGGSLRLSCAASGYISSLRSMGWYRQAPGKEREFVASIATGGRNYADSVKGRFTISRDNAKNTVYLQMNSLKPEDTAVYYCAVITYERGYHYYWGQGTQVTVSS

SEQ ID NO: 11695 - protein, 114 aa, Artificial Sequence
  Chemically Synthesized
QVQLQESGGGLVQAGGSLRLSCAASGNISDDKYMGWYRQAPGKERELVAGISYGGNTNYADSVKGRFTISRDNAKNTVYLQMNSLKPEDTAVYYCAEYDAHGYWGQGTQVTVSS

SEQ ID NO: 11696 - protein, 117 aa, Artificial Sequence
  Chemically Synthesized
QVQLQESGGGLVQAGGSLRLSCAASGYIFSTLMGWYRQAPGKEREFVAAIGQGGSTNYADSVKGRFTISRDNAKNTVYLQMNSLKPEDTAVYYCAVGAHADHGHEYWGQGTQVTVSS

SEQ ID NO: 11697 - protein, 114 aa, Artificial Sequence
  Chemically Synthesized
QVQLQESGGGLVQAGGSLRLSCAASGNISYGYLMGWYRQAPGKEREFVASISGGSSTNYADSVKGRFTISRDNAKNTVYLQMNSLKPEDTAVYYCAVRVPHWYWGQGTQVTVSS

SEQ ID NO: 11698 - protein, 118 aa, Artificial Sequence
  Chemically Synthesized
QVQLQESGGGLVQAGGSLRLSCAASGSISTRYIMGWYRQAPGKEREFVAGITYGSNTNYADSVKGRFTISRDNAKNTVYLQMNSLKPEDTAVYYCAVALWYRRYYYYWGQGTQVTVSS

SEQ ID NO: 11699 - protein, 118 aa, Artificial Sequence
  Chemically Synthesized
QVQLQESGGGLVQAGGSLRLSCAASGTISTAWDMGWYRQAPGKEREFVATITKGGNTNYADSVKGRFTISRDNAKNTVYLQMNSLKPEDTAVYYCAAVYWINDRYAYWGQGTQVTVSS

SEQ ID NO: 11700 - protein, 118 aa, Artificial Sequence
  Chemically Synthesized
QVQLQESGGGLVQAGGSLRLSCAASGNIFPAYSMGWYRQAPGKEREFVAAISAGGSTYYADSVKGRFTISRDNAKNTVYLQMNSLKPEDTAVYYCAVELPDDVTFVYWGQGTQVTVSS

SEQ ID NO: 11701 - protein, 118 aa, Artificial Sequence
  Chemically Synthesized
QVQLQESGGGLVQAGGSLRLSCAASGSISTYSAMGWYRQAPGKEREFVAGISPGATTYYADSVKGRFTISRDNAKNTVYLQMNSLKPEDTAVYYCAVYTGPRGHLAYWGQGTQVTVSS

SEQ ID NO: 11702 - protein, 118 aa, Artificial Sequence
  Chemically Synthesized
QVQLQESGGGLVQAGGSLRLSCAASGSISRRRAMGWYRQAPGKERELVATISYGGNTYYADSVKGRFTISRDNAKNTVYLQMNSLKPEDTAVYYCAVVQLRGAKHVYWGQGTQVTVSS

SEQ ID NO: 11703 - protein, 122 aa, Artificial Sequence
  Chemically Synthesized
QVQLQESGGGLVQAGGSLRLSCAASGTISRYGTMGWYRQAPGKEREFVAGISPGGTTYYADSVKGRFTISRDNAKNTVYLQMNSLKPEDTAVYYCAALSTTVRPYGTRLYYWGQGTQVTVSS

SEQ ID NO: 11704 - protein, 116 aa, Artificial Sequence
  Chemically Synthesized
QVQLQESGGGLVQAGGSLRLSCAASGNISWRIRMGWYRQAPGKEREFVAAIGAGGITYYADSVKGRFTISRDNAKNTVYLQMNSLKPEDTAVYYCATLDGYLHYYWGQGTQVTVSS

SEQ ID NO: 11705 - protein, 126 aa, Artificial Sequence
  Chemically Synthesized
QVQLQESGGGLVQAGGSLRLSCAASGNISFPVSMGWYRQAPGKERELVASIDGGGTTNYADSVKGRFTISRDNAKNTVYLQMNSLKPEDTAVYYCAVYLPGRLRLYYPYWRGYYYWGQGTQVTVSS

SEQ ID NO: 11706 - protein, 111 aa, Artificial Sequence
  Chemically Synthesized
QVQLQESGGGLVQAGGSLRLSCAASGSIFQYGDMGWYRQAPGKEREFYADSVKGRFTISRDNAKNTVYLQMNSLKPEDTAVYYCAALVVGTPFQVWAFGYWGQGTQVTVSS

SEQ ID NO: 11707 - protein, 121 aa, Artificial Sequence
  Chemically Synthesized
QVQLQESGGGLVQAGGSLRLSCAASGNISQNEYMGWYRQAPGKERELVAAIDGGGTTYYADSVKGRFTISRDNAKNTVYLQMNSLKPEDTAVYYCAVPSTLTTKFRMFIYWGQGTQVTVSS

SEQ ID NO: 11708 - protein, 126 aa, Artificial Sequence
  Chemically Synthesized
QVQLQESGGGLVQAGGSLRLSCAASGTISSHSGMGWYRQAPGKERELVATINQGAITNYADSVKGRFTISRDNAKNTVYLQMNSLKPEDTAVYYCAVSDPYYLAAIPRDEPYFPYWGQGTQVTVSS

SEQ ID NO: 11709 - protein, 118 aa, Artificial Sequence
  Chemically Synthesized
QVQLQESGGGLVQAGGSLRLSCAASGYISISSVMGWYRQAPGKERELVATINYGGTTYYADSVKGRFTISRDNAKNTVYLQMNSLKPEDTAVYYCAANYVYPDRLDYWGQGTQVTVSS

SEQ ID NO: 11710 - protein, 126 aa, Artificial Sequence
  Chemically Synthesized
QVQLQESGGGLVQAGGSLRLSCAASGSISYNTGMGWYRQAPGKEREFVAGIAIGTNTYYADSVKGRFTISRDNAKNTVYLQMNSLKPEDTAVYYCAVARAIVQTTYPGADYYLTYWGQGTQVTVSS

SEQ ID NO: 11711 - protein, 123 aa, Artificial Sequence
  Chemically Synthesized
QVQLQESGGGLVQAGGSLRLSCAASGSISRAYAMGWYRQAPGKEREFVAGINDGGITYYADSVKGRFTISRDNAKNTVYLQMNSLKPEDTAVYYCAALWRYADLDRGPYHGYWGQGTQVTVSS

SEQ ID NO: 11712 - protein, 114 aa, Artificial Sequence
  Chemically Synthesized
QVQLQESGGGLVQAGGSLRLSCAASGYISMGWYRQAPGKEREFVAGIANGGNTNYADSVKGRFTISRDNAKNTVYLQMNSLKPEDTAVYYCAVAYAWDNYHEYWGQGTQVTVSS

SEQ ID NO: 11713 - protein, 122 aa, Artificial Sequence
  Chemically Synthesized
QVQLQESGGGLVQAGGSLRLSCAASGYIFDPPSMGWYRQAPGKEREFVASIDVGGNTYYADSVKGRFTISRDNAKNTVYLQMNSLKPEDTAVYYCAVDVKLLTHVTSPHYYWGQGTQVTVSS

SEQ ID NO: 11714 - protein, 118 aa, Artificial Sequence
  Chemically Synthesized
QVQLQESGGGLVQAGGSLRLSCAASGYISQSLWMGWYRQAPGKEREFVATINGGSITNYADSVKGRFTISRDNAKNTVYLQMNSLKPEDTAVYYCAVPAAYVATHAYWGQGTQVTVSS

SEQ ID NO: 11715 - protein, 118 aa, Artificial Sequence
  Chemically Synthesized
QVQLQESGGGLVQAGGSLRLSCAASGYISLYYVMGWYRQAPGKEREFVASISDGSNTNYADSVKGRFTISRDNAKNTVYLQMNSLKPEDTAVYYCAAITRTASYHGYWGQGTQVTVSS

SEQ ID NO: 11716 - protein, 118 aa, Artificial Sequence
  Chemically Synthesized
QVQLQESGGGLVQAGGSLRLSCAASGYISYTSYMGWYRQAPGKEREFVAGITPGSSTNYADSVKGRFTISRDNAKNTVYLQMNSLKPEDTAVYYCAALVHDLSYHGYWGQGTQVTVSS

SEQ ID NO: 11717 - protein, 118 aa, Artificial Sequence
  Chemically Synthesized
QVQLQESGGGLVQAGGSLRLSCAASGSISLTYPMGWYRQAPGKEREFVAAITSGANTNYADSVKGRFTISRDNAKNTVYLQMNSLKPEDTAVYYCAAIQYAYGYHYYWGQGTQVTVSS

SEQ ID NO: 11718 - protein, 118 aa, Artificial Sequence
  Chemically Synthesized
QVQLQESGGGLVQAGGSLRLSCAASGNISLLYYMGWYRQAPGKEREFVAAINTGTSTNYADSVKGRFTISRDNAKNTVYLQMNSLKPEDTAVYYCAAITGTRPLHYYWGQGTQVTVSS

SEQ ID NO: 11719 - protein, 118 aa, Artificial Sequence
  Chemically Synthesized
QVQLQESGGGLVQAGGSLRLSCAASGNISTTYAMGWYRQAPGKEREFVASIAVGSSTNYADSVKGRFTISRDNAKNTVYLQMNSLKPEDTAVYYCAVITRFHGYHSYWGQGTQVTVSS

SEQ ID NO: 11720 - protein, 117 aa, Artificial Sequence
  Chemically Synthesized
QVQLQESGGGLVQAGGSLRLSCAASGNIFLVSMGWYRQAPGKERELVASISYGGSTNYADSVKGRFTISRDNAKNTVYLQMNSLKPEDTAVYYCAVYTIFRSDHPYWGQGTQVTVSS

SEQ ID NO: 11721 - protein, 122 aa, Artificial Sequence
  Chemically Synthesized
QVQLQESGGGLVQAGGSLRLSCAASGTIFGPISMGWYRQAPGKERELVASIAGGGNTYYADSVKGRFTISRDNAKNTVYLQMNSLKPEDTAVYYCAAPQLAVYQIRSDHPYWGQGTQVTVSS

SEQ ID NO: 11722 - protein, 122 aa, Artificial Sequence
  Chemically Synthesized
QVQLQESGGGLVQAGGSLRLSCAASGNIFDYHDMGWYRQAPGKERELVATIAYGSTTNYADSVKGRFTISRDNAKNTVYLQMNSLKPEDTAVYYCAVDLGGDASVTWYLFYWGQGTQVTVSS

SEQ ID NO: 11723 - protein, 118 aa, Artificial Sequence
  Chemically Synthesized
QVQLQESGGGLVQAGGSLRLSCAASGTIFGGTTMGWYRQAPGKEREFVAGIGQGTNTNYADSVKGRFTISRDNAKNTVYLQMNSLKPEDTAVYYCAVVVVTNIVHYYWGQGTQVTVSS

SEQ ID NO: 11724 - protein, 121 aa, Artificial Sequence
  Chemically Synthesized
QVQLQESGGGLVQAGGSLRLSCAASGTIFLGLTMGWYRQAPGKEREFVAAIDPGTITNYADSVKGRFTISRDNAKNTVYLQMNSLKPEDTAVYYCAALTRHRGFITETFYWGQGTQVTVSS

SEQ ID NO: 11725 - protein, 118 aa, Artificial Sequence
  Chemically Synthesized
QVQLQESGGGLVQAGGSLRLSCAASGTISYPAIMGWYRQAPGKEREFVASINLGSSTYYADSVKGRFTISRDNAKNTVYLQMNSLKPEDTAVYYCAALDRGDYWHYYWGQGTQVTVSS

SEQ ID NO: 11726 - protein, 118 aa, Artificial Sequence
  Chemically Synthesized
QVQLQESGGGLVQAGGSLRLSCAASGYIFIYVDMGWYRQAPGKERELVASIDYGTITNYADSVKGRFTISRDNAKNTVYLQMNSLKPEDTAVYYCAVGYKYGYILRYWGQGTQVTVSS

SEQ ID NO: 11727 - protein, 126 aa, Artificial Sequence
  Chemically Synthesized
QVQLQESGGGLVQAGGSLRLSCAASGTISPTAYMGWYRQAPGKERELVAAINDGTTTYYADSVKGRFTISRDNAKNTVYLQMNSLKPEDTAVYYCAAYGVYGGLRLWRYAGSFGYWGQGTQVTVSS

SEQ ID NO: 11728 - protein, 118 aa, Artificial Sequence
  Chemically Synthesized
QVQLQESGGGLVQAGGSLRLSCAASGSISWAYVMGWYRQAPGKEREFVATITVGGTTYYADSVKGRFTISRDNAKNTVYLQMNSLKPEDTAVYYCAVIYYALFPHTYWGQGTQVTVSS

SEQ ID NO: 11729 - protein, 117 aa, Artificial Sequence
  Chemically Synthesized
QVQLQESGGGLVQAGGSLRLSCAASGTISLRRHMGWYRQAPGKERELVAAISYGGSTYYADSVKGRFTISRDNAKNTVYLQMNSLKPEDTAVYYCAVRHQYSYHGYWGQGTQVTVSS

SEQ ID NO: 11730 - protein, 118 aa, Artificial Sequence
  Chemically Synthesized
QVQLQESGGGLVQAGGSLRLSCAASGYISGNYDMGWYRQAPGKEREFVAAIGIGGTTYYADSVKGRFTISRDNAKNTVYLQMNSLKPEDTAVYYCAAFGAVGPSLRYWGQGTQVTVSS

SEQ ID NO: 11731 - protein, 126 aa, Artificial Sequence
  Chemically Synthesized
QVQLQESGGGLVQAGGSLRLSCAASGTISEYDIMGWYRQAPGKERELVAGIGYGGTTNYADSVKGRFTISRDNAKNTVYLQMNSLKPEDTAVYYCAAFGDSGDRGISSNLPSHPYWGQGTQVTVSS

SEQ ID NO: 11732 - protein, 118 aa, Artificial Sequence
  Chemically Synthesized
QVQLQESGGGLVQAGGSLRLSCAASGSIFKWLDMGWYRQAPGKEREFVAGIALGGTTNYADSVKGRFTISRDNAKNTVYLQMNSLKPEDTAVYYCAAIRRWYYAHYYWGQGTQVTVSS

SEQ ID NO: 11733 - protein, 122 aa, Artificial Sequence
  Chemically Synthesized
QVQLQESGGGLVQAGGSLRLSCAASGYISDDTYMGWYRQAPGKERELVAAINDGAITNYADSVKGRFTISRDNAKNTVYLQMNSLKPEDTAVYYCAVLGYGLHVDPGAHGYWGQGTQVTVSS

SEQ ID NO: 11734 - protein, 117 aa, Artificial Sequence
  Chemically Synthesized
QVQLQESGGGLVQAGGSLRLSCAASGNILVTPMGWYRQAPGKERELVAGITWGGTTNYADSVKGRFTISRDNAKNTVYLQMNSLKPEDTAVYYCAAVEGWLYLHGYWGQGTQVTVSS

SEQ ID NO: 11735 - protein, 118 aa, Artificial Sequence
  Chemically Synthesized
QVQLQESGGGLVQAGGSLRLSCAASGTIFRYAVMGWYRQAPGKEREFVAGINWGSNTNYADSVKGRFTISRDNAKNTVYLQMNSLKPEDTAVYYCAVVITGEGYLYYWGQGTQVTVSS

SEQ ID NO: 11736 - protein, 125 aa, Artificial Sequence
  Chemically Synthesized
QVQLQESGGGLVQAGGSLRLSCAASGTIFPAGMGWYRQAPGKERELVATISQGAITNYADSVKGRFTISRDNAKNTVYLQMNSLKPEDTAVYYCAARAYYQSSSYYLGSNQYLYWGQGTQVTVSS

SEQ ID NO: 11737 - protein, 117 aa, Artificial Sequence
  Chemically Synthesized
QVQLQESGGGLVQAGGSLRLSCAASGNISNHARMGWYRQAPGKEREFVASIDSVLLPYADSVKGRFTISRDNAKNTVYLQMNSLKPEDTAVYYCAADQVQFIVYAYWGQGTQVTVSS

SEQ ID NO: 11738 - protein, 118 aa, Artificial Sequence
  Chemically Synthesized
QVQLQESGGGLVQAGGSLRLSCAASGSISSDSFMGWYRQAPGKEREFVAGIAWGGSTNYADSVKGRFTISRDNAKNTVYLQMNSLKPEDTAVYYCAAGGIFAAYLRYWGQGTQVTVSS

SEQ ID NO: 11739 - protein, 118 aa, Artificial Sequence
  Chemically Synthesized
QVQLQESGGGLVQAGGSLRLSCAASGSIFPPDYMGWYRQAPGKERELVAAIDNGANTNYADSVKGRFTISRDNAKNTVYLQMNSLKPEDTAVYYCAVLVYGTGWHSYWGQGTQVTVSS

SEQ ID NO: 11740 - protein, 126 aa, Artificial Sequence
  Chemically Synthesized
QVQLQESGGGLVQAGGSLRLSCAASGNISNTPIMGWYRQAPGKERELVAAISRGATTNYADSVKGRFTISRDNAKNTVYLQMNSLKPEDTAVYYCAAGYNPRYVGDNGTPYPHDYWGQGTQVTVSS

SEQ ID NO: 11741 - protein, 122 aa, Artificial Sequence
  Chemically Synthesized
QVQLQESGGGLVQAGGSLRLSCAASGTISPQSDMGWYRQAPGKEREFVASIAAGASTNYADSVKGRFTISRDNAKNTVYLQMNSLKPEDTAVYYCAVGYSYTGGILGTFGYWGQGTQVTVSS

SEQ ID NO: 11742 - protein, 122 aa, Artificial Sequence
  Chemically Synthesized
QVQLQESGGGLVQAGGSLRLSCAASGTISYTYFMGWYRQAPGKEREFVAGISSGTTTNYADSVKGRFTISRDNAKNTVYLQMNSLKPEDTAVYYCAAVRYARSREGHYYYYWGQGTQVTVSS

SEQ ID NO: 11743 - protein, 122 aa, Artificial Sequence
  Chemically Synthesized
QVQLQESGGGLVQAGGSLRLSCAASGTISVDISHMGWYRQAPGKEREFVATIDWGTITNYADSVKGRFTISRDNAKNTVYLQMNSLKPEDTAVYYCAADDELAVSGSGPYYWGQGTQVTVSS

SEQ ID NO: 11744 - protein, 126 aa, Artificial Sequence
  Chemically Synthesized
QVQLQESGGGLVQAGGSLRLSCAASGYIFGPRLMGWYRQAPGKERELVATISDGGSTNYADSVKGRFTISRDNAKNTVYLQMNSLKPEDTAVYYCAVRWYYDLLLRYETRSRYDYWGQGTQVTVSS

SEQ ID NO: 11745 - protein, 115 aa, Artificial Sequence
  Chemically Synthesized
QVQLQESGGGLVQAGGSLRLSCAASGYIFRYMGWYRQAPGKERELVATIYQYADSVKGRFTISRDNAKNTVYLQMNSLKPEDTAVYYCAVDDDGLPDDDYIYYYWGQGTQVTVSS

SEQ ID NO: 11746 - protein, 122 aa, Artificial Sequence
  Chemically Synthesized
QVQLQESGGGLVQAGGSLRLSCAASGSIFDDDTMGWYRQAPGKERELVATISGGTTTNYADSVKGRFTISRDNAKNTVYLQMNSLKPEDTAVYYCAAIRSYGDSPYSTFDYWGQGTQVTVSS

SEQ ID NO: 11747 - protein, 118 aa, Artificial Sequence
  Chemically Synthesized
QVQLQESGGGLVQAGGSLRLSCAASGSISPLGAMGWYRQAPGKEREFVATITSGGSTYYADSVKGRFTISRDNAKNTVYLQMNSLKPEDTAVYYCAALYYSSGWYPYWGQGTQVTVSS

SEQ ID NO: 11748 - protein, 122 aa, Artificial Sequence
  Chemically Synthesized
QVQLQESGGGLVQAGGSLRLSCAASGSISHAAPMGWYRQAPGKEREFVATIAQGAITYYADSVKGRFTISRDNAKNTVYLQMNSLKPEDTAVYYCAAIVYYDAPGSGWHYYWGQGTQVTVSS

SEQ ID NO: 11749 - protein, 118 aa, Artificial Sequence
  Chemically Synthesized
QVQLQESGGGLVQAGGSLRLSCAASGTISTRTTMGWYRQAPGKEREFVAGISNGAITNYADSVKGRFTISRDNAKNTVYLQMNSLKPEDTAVYYCAAISNSPRYHYYWGQGTQVTVSS

SEQ ID NO: 11750 - protein, 122 aa, Artificial Sequence
  Chemically Synthesized
QVQLQESGGGLVQAGGSLRLSCAASGSIFPHGFMGWYRQAPGKERELVASIGGGGTTNYADSVKGRFTISRDNAKNTVYLQMNSLKPEDTAVYYCAAISWTNTGRRSYYSYWGQGTQVTVSS

SEQ ID NO: 11751 - protein, 127 aa, Artificial Sequence
  Chemically Synthesized
QVQLQESGGGLVQAGGSLRLSCAASGSISYGQGYMGWYRQAPGKERELVATISFGATTNYADSVKGRFTISRDNAKNTVYLQMNSLKPEDTAVYYCAVPFYWDYTRTKGYGHYPLYWGQGTQVTVSS

SEQ ID NO: 11752 - protein, 121 aa, Artificial Sequence
  Chemically Synthesized
QVQLQESGGGLVQAGGSLRLSCAASGTIFYSTNMGWYRQAPGKEREFVASIDQGGITYYADSVKGRFTISRDNAKNTVYLQMNSLKPEDTAVYYCAALIKRPQVQTVHGYWGQGTQVTVSS

SEQ ID NO: 11753 - protein, 126 aa, Artificial Sequence
  Chemically Synthesized
QVQLQESGGGLVQAGGSLRLSCAASGTIFYLGAMGWYRQAPGKERELVAAISYGTSTNYADSVKGRFTISRDNAKNTVYLQMNSLKPEDTAVYYCAAGYPYLTDDGKWNLYSHGYWGQGTQVTVSS

SEQ ID NO: 11754 - protein, 120 aa, Artificial Sequence
  Chemically Synthesized
QVQLQESGGGLVQAGGSLRLSCAASGTISRDYRMGWYRQAPGKEREFVAAIASGSSTNYADSVKGRFTISRDNAKNTVYLQMNSLKPEDTAVYYCAAVYRKSPGGWYGYWGQGTQVTVSS

SEQ ID NO: 11755 - protein, 118 aa, Artificial Sequence
  Chemically Synthesized
QVQLQESGGGLVQAGGSLRLSCAASGTISYVHYMGWYRQAPGKEREFVATIDYGTNTYYADSVKGRFTISRDNAKNTVYLQMNSLKPEDTAVYYCAAVTRYDRYYAYWGQGTQVTVSS

SEQ ID NO: 11756 - protein, 122 aa, Artificial Sequence
  Chemically Synthesized
QVQLQESGGGLVQAGGSLRLSCAASGTISKFGYMGWYRQAPGKEREFVAAINYGASTNYADSVKGRFTISRDNAKNTVYLQMNSLKPEDTAVYYCAVLGYDDQETTRYYYYWGQGTQVTVSS

SEQ ID NO: 11757 - protein, 122 aa, Artificial Sequence
  Chemically Synthesized
QVQLQESGGGLVQAGGSLRLSCAASGYISDTDNMGWYRQAPGKEREFVASIDDGAITYYADSVKGRFTISRDNAKNTVYLQMNSLKPEDTAVYYCAVQTYAYDGDPDSHLYWGQGTQVTVSS

SEQ ID NO: 11758 - protein, 118 aa, Artificial Sequence
  Chemically Synthesized
QVQLQESGGGLVQAGGSLRLSCAASGTISRYLTMGWYRQAPGKEREFVAGISYGGSTNYADSVKGRFTISRDNAKNTVYLQMNSLKPEDTAVYYCAAIYQSDSLYYYWGQGTQVTVSS

SEQ ID NO: 11759 - protein, 125 aa, Artificial Sequence
  Chemically Synthesized
QVQLQESGGGLVQAGGSLRLSCAASGYIFAGDGMGWYRQAPGKERELVASITHGGSTYYADSVKGRFTISRDNAKNTVYLQMNSLKPEDTAVYYCAVTVQYLNGYAYIFAYHYYWGQGTQVTVSS

SEQ ID NO: 11760 - protein, 126 aa, Artificial Sequence
  Chemically Synthesized
QVQLQESGGGLVQAGGSLRLSCAASGNISNAWNMGWYRQAPGKEREFVAAIARGSITYYADSVKGRFTISRDNAKNTVYLQMNSLKPEDTAVYYCAARRTEGGVLRIVAPPIHLYWGQGTQVTVSS

SEQ ID NO: 11761 - protein, 118 aa, Artificial Sequence
  Chemically Synthesized
QVQLQESGGGLVQAGGSLRLSCAASGTISPYQIMGWYRQAPGKEREFVAAINGGSTTNYADSVKGRFTISRDNAKNTVYLQMNSLKPEDTAVYYCAVILYADYYHYYWGQGTQVTVSS

SEQ ID NO: 11762 - protein, 126 aa, Artificial Sequence
  Chemically Synthesized
QVQLQESGGGLVQAGGSLRLSCAASGYIFDVYNMGWYRQAPGKEREFVATIAKGGTTNYADSVKGRFTISRDNAKNTVYLQMNSLKPEDTAVYYCAAVTYARPFDDEYSGKYHYYWGQGTQVTVSS

SEQ ID NO: 11763 - protein, 122 aa, Artificial Sequence
  Chemically Synthesized
QVQLQESGGGLVQAGGSLRLSCAASGSISYRLPMGWYRQAPGKEREFVAAIGYGTITNYADSVKGRFTISRDNAKNTVYLQMNSLKPEDTAVYYCAAHWPDYVWALYGHGYWGQGTQVTVSS

SEQ ID NO: 11764 - protein, 122 aa, Artificial Sequence
  Chemically Synthesized
QVQLQESGGGLVQAGGSLRLSCAASGSISRRTSMGWYRQAPGKERELVASIAVGASTNYADSVKGRFTISRDNAKNTVYLQMNSLKPEDTAVYYCAADTLTYYDYRVVLDYWGQGTQVTVSS

SEQ ID NO: 11765 - protein, 118 aa, Artificial Sequence
  Chemically Synthesized
QVQLQESGGGLVQAGGSLRLSCAASGSISTKGAMGWYRQAPGKEREFVATIAYGANTNYADSVKGRFTISRDNAKNTVYLQMNSLKPEDTAVYYCAVLYSSGGYYYYWGQGTQVTVSS

SEQ ID NO: 11766 - protein, 118 aa, Artificial Sequence
  Chemically Synthesized
QVQLQESGGGLVQAGGSLRLSCAASGNISDATVMGWYRQAPGKEREFVAAIGTGAITNYADSVKGRFTISRDNAKNTVYLQMNSLKPEDTAVYYCAALAYDVRYHYYWGQGTQVTVSS

SEQ ID NO: 11767 - protein, 122 aa, Artificial Sequence
  Chemically Synthesized
QVQLQESGGGLVQAGGSLRLSCAASGSISLFGGMGWYRQAPGKEREFVASIDYGTSTNYADSVKGRFTISRDNAKNTVYLQMNSLKPEDTAVYYCAVGAFAGVDYIVAYLYWGQGTQVTVSS

SEQ ID NO: 11768 - protein, 122 aa, Artificial Sequence
  Chemically Synthesized
QVQLQESGGGLVQAGGSLRLSCAASGSISYQTYMGWYRQAPGKEREFVASIGPGATTNYADSVKGRFTISRDNAKNTVYLQMNSLKPEDTAVYYCAAVFRSTGRIRGYYSYWGQGTQVTVSS

SEQ ID NO: 11769 - protein, 118 aa, Artificial Sequence
  Chemically Synthesized
QVQLQESGGGLVQAGGSLRLSCAASGTISGPYYMGWYRQAPGKEREFVAAIDVGSSTNYADSVKGRFTISRDNAKNTVYLQMNSLKPEDTAVYYCAVLVWRPPYYYYWGQGTQVTVSS

SEQ ID NO: 11770 - protein, 118 aa, Artificial Sequence
  Chemically Synthesized
QVQLQESGGGLVQAGGSLRLSCAASGYISAPYPMGWYRQAPGKERELVAAIADGTTTYYADSVKGRFTISRDNAKNTVYLQMNSLKPEDTAVYYCAADGYSNYYHLYWGQGTQVTVSS

SEQ ID NO: 11771 - protein, 118 aa, Artificial Sequence
  Chemically Synthesized
QVQLQESGGGLVQAGGSLRLSCAASGTISARALMGWYRQAPGKEREFVASIADGGTTNYADSVKGRFTISRDNAKNTVYLQMNSLKPEDTAVYYCAAVQYRQSWHYYWGQGTQVTVSS

SEQ ID NO: 11772 - protein, 123 aa, Artificial Sequence
  Chemically Synthesized
QVQLQESGGGLVQAGGSLRLSCAASGSIFWAYQMGWYRQAPGKEREFVATIAYGANTYYADSVKGRFTISRDNAKNTVYLQMNSLKPEDTAVYYCAVSYPTLGDSRGQSHVYWGQGTQVTVSS

SEQ ID NO: 11773 - protein, 126 aa, Artificial Sequence
  Chemically Synthesized
QVQLQESGGGLVQAGGSLRLSCAASGNIFPVDVMGWYRQAPGKERELVATITSGGTTNYADSVKGRFTISRDNAKNTVYLQMNSLKPEDTAVYYCAVWAIYPWSRSFNLYTDFAYWGQGTQVTVSS

SEQ ID NO: 11774 - protein, 118 aa, Artificial Sequence
  Chemically Synthesized
QVQLQESGGGLVQAGGSLRLSCAASGTISDLLIMGWYRQAPGKEREFVAAITAGSNTNYADSVKGRFTISRDNAKNTVYLQMNSLKPEDTAVYYCAAINTQRRYYYYWGQGTQVTVSS

SEQ ID NO: 11775 - protein, 118 aa, Artificial Sequence
  Chemically Synthesized
QVQLQESGGGLVQAGGSLRLSCAASGSISLLSAMGWYRQAPGKERELVATITGGTTTYYADSVKGRFTISRDNAKNTVYLQMNSLKPEDTAVYYCAADLFFAAFLYYWGQGTQVTVSS

SEQ ID NO: 11776 - protein, 118 aa, Artificial Sequence
  Chemically Synthesized
QVQLQESGGGLVQAGGSLRLSCAASGYISGNSRMGWYRQAPGKEREFVAAIGTGTNTYYADSVKGRFTISRDNAKNTVYLQMNSLKPEDTAVYYCAVLIYGGSWYHYWGQGTQVTVSS

SEQ ID NO: 11777 - protein, 118 aa, Artificial Sequence
  Chemically Synthesized
QVQLQESGGGLVQAGGSLRLSCAASGNIFATSLMGWYRQAPGKEREFVASIDSGASTNYADSVKGRFTISRDNAKNTVYLQMNSLKPEDTAVYYCAALRQRVTWHYYWGQGTQVTVSS

SEQ ID NO: 11778 - protein, 126 aa, Artificial Sequence
  Chemically Synthesized
QVQLQESGGGLVQAGGSLRLSCAASGTISSTSIMGWYRQAPGKEREFVATIAPGSNTYYADSVKGRFTISRDNAKNTVYLQMNSLKPEDTAVYYCAAVIYLRDVWYARQGAYHGYWGQGTQVTVSS

SEQ ID NO: 11779 - protein, 116 aa, Artificial Sequence
  Chemically Synthesized
QVQLQESGGGLVQAGGSLRLSCAASGNISQPRSMGWYRQAPGKEREFVASIAFGGITNYADSVKGRFTISRDNAKNTVYLQMNSLKPEDTAVYYCAAIYYDWHGYWGQGTQVTVSS

SEQ ID NO: 11780 - protein, 122 aa, Artificial Sequence
  Chemically Synthesized
QVQLQESGGGLVQAGGSLRLSCAASGSISDLYAMGWYRQAPGKERELVAGITTGTSTYYADSVKGRFTISRDNAKNTVYLQMNSLKPEDTAVYYCAVVGYRRDLEHRHYAYWGQGTQVTVSS

SEQ ID NO: 11781 - protein, 118 aa, Artificial Sequence
  Chemically Synthesized
QVQLQESGGGLVQAGGSLRLSCAASGNIFLLPYMGWYRQAPGKEREFVATIAPGTNTYYADSVKGRFTISRDNAKNTVYLQMNSLKPEDTAVYYCAAVQYIRQWLSYWGQGTQVTVSS

SEQ ID NO: 11782 - protein, 124 aa, Artificial Sequence
  Chemically Synthesized
QVQLQESGGGLVQAGGSLRLSCAASGTISDVSYMGWYRQAPGKEREFVAAITTGATTNYADSVKGRFTISRDNAKNTVYLQMNSLKPEDTAVYYCAVGYPNLNVDRDVYNHPYWGQGTQVTVSS

SEQ ID NO: 11783 - protein, 122 aa, Artificial Sequence
  Chemically Synthesized
QVQLQESGGGLVQAGGSLRLSCAASGSISAAYYMGWYRQAPGKEREFVAAITYGSSTNYADSVKGRFTISRDNAKNTVYLQMNSLKPEDTAVYYCAVITWRARRDPYYHYYWGQGTQVTVSS

SEQ ID NO: 11784 - protein, 118 aa, Artificial Sequence
  Chemically Synthesized
QVQLQESGGGLVQAGGSLRLSCAASGTIFKYYDMGWYRQAPGKEREFVATITDGGITYYADSVKGRFTISRDNAKNTVYLQMNSLKPEDTAVYYCAVDRHRLQVLDYWGQGTQVTVSS

SEQ ID NO: 11785 - protein, 118 aa, Artificial Sequence
  Chemically Synthesized
QVQLQESGGGLVQAGGSLRLSCAASGTIFRYYDMGWYRQAPGKERELVAAIDLGGTTYYADSVKGRFTISRDNAKNTVYLQMNSLKPEDTAVYYCAVYSIPWSELRYWGQGTQVTVSS

SEQ ID NO: 11786 - protein, 118 aa, Artificial Sequence
  Chemically Synthesized
QVQLQESGGGLVQAGGSLRLSCAASGSIFSPYIMGWYRQAPGKEREFVAAIAGGTSTNYADSVKGRFTISRDNAKNTVYLQMNSLKPEDTAVYYCAAIGNRPRYLYYWGQGTQVTVSS

SEQ ID NO: 11787 - protein, 118 aa, Artificial Sequence
  Chemically Synthesized
QVQLQESGGGLVQAGGSLRLSCAASGSISRTHGMGWYRQAPGKEREFVAAISYGSNTYYADSVKGRFTISRDNAKNTVYLQMNSLKPEDTAVYYCAVRVYVGWKLPYWGQGTQVTVSS

SEQ ID NO: 11788 - protein, 113 aa, Artificial Sequence
  Chemically Synthesized
QVQLQESGGGLVQAGGSLRLSCAASGYIMGWYRQAPGKEREFVASISTGGTTNYADSVKGRFTISRDNAKNTVYLQMNSLKPEDTAVYYCAAITDVPYFFGYWGQGTQVTVSS

SEQ ID NO: 11789 - protein, 114 aa, Artificial Sequence
  Chemically Synthesized
QVQLQESGGGLVQAGGSLRLSCAASGNISGTLVMGWYRQAPGKERELVAAIGDGAITNYADSVKGRFTISRDNAKNTVYLQMNSLKPEDTAVYYCAGCYRSYYWGQGTQVTVSS

SEQ ID NO: 11790 - protein, 118 aa, Artificial Sequence
  Chemically Synthesized
QVQLQESGGGLVQAGGSLRLSCAASGSISRGTPMGWYRQAPGKEREFVATIATGAITNYADSVKGRFTISRDNAKNTVYLQMNSLKPEDTAVYYCAAYKDLYESHDYWGQGTQVTVSS

SEQ ID NO: 11791 - protein, 126 aa, Artificial Sequence
  Chemically Synthesized
QVQLQESGGGLVQAGGSLRLSCAASGSIFYNTYMGWYRQAPGKEREFVAGITYGAITNYADSVKGRFTISRDNAKNTVYLQMNSLKPEDTAVYYCAVYGDQPYRYRDNTVGELYYWGQGTQVTVSS

SEQ ID NO: 11792 - protein, 122 aa, Artificial Sequence
  Chemically Synthesized
QVQLQESGGGLVQAGGSLRLSCAASGTIFTFKSMGWYRQAPGKERELVAGIGYGSITYYADSVKGRFTISRDNAKNTVYLQMNSLKPEDTAVYYCAATQWWYLADYYSHSYWGQGTQVTVSS

SEQ ID NO: 11793 - protein, 118 aa, Artificial Sequence
  Chemically Synthesized
QVQLQESGGGLVQAGGSLRLSCAASGSIFDTWTMGWYRQAPGKEREFVAGITYGGITYYADSVKGRFTISRDNAKNTVYLQMNSLKPEDTAVYYCAARSRHRRAYVYWGQGTQVTVSS

SEQ ID NO: 11794 - protein, 122 aa, Artificial Sequence
  Chemically Synthesized
QVQLQESGGGLVQAGGSLRLSCAASGTISDTHIMGWYRQAPGKERELVATIDTGTITNYADSVKGRFTISRDNAKNTVYLQMNSLKPEDTAVYYCAADGDVRKATASTFGYWGQGTQVTVSS

SEQ ID NO: 11795 - protein, 121 aa, Artificial Sequence
  Chemically Synthesized
QVQLQESGGGLVQAGGSLRLSCAASGSISYRYDMGWYRQAPGKERELVAAITPGTSTNYADSVKGRFTISRDNAKNTVYLQMNSLKPEDTAVYYCAAAYAYRTTAGYHYYWGQGTQVTVSS

SEQ ID NO: 11796 - protein, 117 aa, Artificial Sequence
  Chemically Synthesized
QVQLQESGGGLVQAGGSLRLSCAASGYISRYPYMGWYRQAPGKEREFVAAIDGGSSTNYADSVKGRFTISRDNAKNTVYLQMNSLKPEDTAVYYCAVRTYHRSHHYWGQGTQVTVSS

SEQ ID NO: 11797 - protein, 126 aa, Artificial Sequence
  Chemically Synthesized
QVQLQESGGGLVQAGGSLRLSCAASGNISPRWDMGWYRQAPGKEREFVATIGYRCYYLYADSVKGRFTISRDNAKNTVYLQMNSLKPEDTAVYYCAVYVRYGGYVRYIYYFALYYWGQGTQVTVSS

SEQ ID NO: 11798 - protein, 122 aa, Artificial Sequence
  Chemically Synthesized
QVQLQESGGGLVQAGGSLRLSCAASGSIFYRFTMGWYRQAPGKEREFVAAIDGGSNTNYADSVKGRFTISRDNAKNTVYLQMNSLKPEDTAVYYCAARRDDDHWDAGDYSYWGQGTQVTVSS

SEQ ID NO: 11799 - protein, 117 aa, Artificial Sequence
  Chemically Synthesized
QVQLQESGGGLVQAGGSLRLSCAASGNISGRVYMGWYRQAPGKERELVAAIATGGSTNYADSVKGRFTISRDNAKNTVYLQMNSLKPEDTAVYYCAVDEYVKNYFYWGQGTQVTVSS

SEQ ID NO: 11800 - protein, 118 aa, Artificial Sequence
  Chemically Synthesized
QVQLQESGGGLVQAGGSLRLSCAASGSISFDYYMGWYRQAPGKEREFVASITDGTITNYADSVKGRFTISRDNAKNTVYLQMNSLKPEDTAVYYCAVPSDPAGYLFYWGQGTQVTVSS

SEQ ID NO: 11801 - protein, 118 aa, Artificial Sequence
  Chemically Synthesized
QVQLQESGGGLVQAGGSLRLSCAASGSISADGVMGWYRQAPGKEREFVATIDLGGTTNYADSVKGRFTISRDNAKNTVYLQMNSLKPEDTAVYYCAATISGYDTYAYWGQGTQVTVSS

SEQ ID NO: 11802 - protein, 122 aa, Artificial Sequence
  Chemically Synthesized
QVQLQESGGGLVQAGGSLRLSCAASGTIFRAPPMGWYRQAPGKERELVATITPGSITNYADSVKGRFTISRDNAKNTVYLQMNSLKPEDTAVYYCAAEVKGRESTYVRYVYWGQGTQVTVSS

SEQ ID NO: 11803 - protein, 118 aa, Artificial Sequence
  Chemically Synthesized
QVQLQESGGGLVQAGGSLRLSCAASGTISTLNVMGWYRQAPGKEREFVAGIGSVLLPYADSVKGRFTISRDNAKNTVYLQMNSLKPEDTAVYYCAAVTGTVGDIYRYWGQGTQVTVSS

SEQ ID NO: 11804 - protein, 122 aa, Artificial Sequence
  Chemically Synthesized
QVQLQESGGGLVQAGGSLRLSCAASGTIFQYREMGWYRQAPGKERELVASINYGTNTYYADSVKGRFTISRDNAKNTVYLQMNSLKPEDTAVYYCAVSYGNARLPRGKHYYWGQGTQVTVSS

SEQ ID NO: 11805 - protein, 117 aa, Artificial Sequence
  Chemically Synthesized
QVQLQESGGGLVQAGGSLRLSCAASGSIFPRYIMGWYRQAPGKERELLPVLVTVLIPYADSVKGRFTISRDNAKNTVYLQMNSLKPEDTAVYYCAVRRGDNPSYNYWGQGTQVTVSS

SEQ ID NO: 11806 - protein, 118 aa, Artificial Sequence
  Chemically Synthesized
QVQLQESGGGLVQAGGSLRLSCAASGNISQTARMGWYRQAPGKEREFVAGITRGTSTNYADSVKGRFTISRDNAKNTVYLQMNSLKPEDTAVYYCAAYSDYTRRHDYWGQGTQVTVSS

SEQ ID NO: 11807 - protein, 118 aa, Artificial Sequence
  Chemically Synthesized
QVQLQESGGGLVQAGGSLRLSCAASGNISRYSPMGWYRQAPGKERELVASIGRGSITNYADSVKGRFTISRDNAKNTVYLQMNSLKPEDTAVYYCAAYSYADIVHVYWGQGTQVTVSS

SEQ ID NO: 11808 - protein, 117 aa, Artificial Sequence
  Chemically Synthesized
QVQLQESGGGLVQAGGSLRLSCAASGTISVFGSMGWYRQAPGKEREFVASIGDCYYQYADSVKGRFTISRDNAKNTVYLQMNSLKPEDTAVYYCAAIGNQIALFYYWGQGTQVTVSS

SEQ ID NO: 11809 - protein, 122 aa, Artificial Sequence
  Chemically Synthesized
QVQLQESGGGLVQAGGSLRLSCAASGNISRRAFMGWYRQAPGKEREFVATINYGSTTNYADSVKGRFTISRDNAKNTVYLQMNSLKPEDTAVYYCAVRTRVHATVTRRHTYWGQGTQVTVSS

SEQ ID NO: 11810 - protein, 118 aa, Artificial Sequence
  Chemically Synthesized
QVQLQESGGGLVQAGGSLRLSCAASGTIFANTVMGWYRQAPGKERELVATISLGGNTYYADSVKGRFTISRDNAKNTVYLQMNSLKPEDTAVYYCAASTTPYYPYNYWGQGTQVTVSS

SEQ ID NO: 11811 - protein, 121 aa, Artificial Sequence
  Chemically Synthesized
QVQLQESGGGLVQAGGSLRLSCAASGSISWSTMGWYRQAPGKERELVAGISSGGSTYYADSVKGRFTISRDNAKNTVYLQMNSLKPEDTAVYYCAARRAYDEGTTDTHAYWGQGTQVTVSS

SEQ ID NO: 11812 - protein, 117 aa, Artificial Sequence
  Chemically Synthesized
QVQLQESGGGLVQAGGSLRLSCAASGSIFDQFVMGWYRQAPGKERELVAAITDGTITNYADSVKGRFTISRDNAKNTVYLQMNSLKPEDTAVYYCAAIILYTVFGYWGQGTQVTVSS

SEQ ID NO: 11813 - protein, 126 aa, Artificial Sequence
  Chemically Synthesized
QVQLQESGGGLVQAGGSLRLSCAASGSISKRISMGWYRQAPGKEREFVASIGYGTITNYADSVKGRFTISRDNAKNTVYLQMNSLKPEDTAVYYCAAYSWHNIFRYYDYLGRLWYWGQGTQVTVSS

SEQ ID NO: 11814 - protein, 122 aa, Artificial Sequence
  Chemically Synthesized
QVQLQESGGGLVQAGGSLRLSCAASGYISYYDFMGWYRQAPGKERELVAAIAWGSITYYADSVKGRFTISRDNAKNTVYLQMNSLKPEDTAVYYCAVLRPSDQAYRATYGYWGQGTQVTVSS

SEQ ID NO: 11815 - protein, 122 aa, Artificial Sequence
  Chemically Synthesized
QVQLQESGGGLVQAGGSLRLSCAASGTISDGIYMGWYRQAPGKERELVASIGDGSTTYYADSVKGRFTISRDNAKNTVYLQMNSLKPEDTAVYYCAAYYRTDGRGTWAFPYWGQGTQVTVSS

SEQ ID NO: 11816 - protein, 118 aa, Artificial Sequence
  Chemically Synthesized
QVQLQESGGGLVQAGGSLRLSCAASGTISRLPYMGWYRQAPGKERELVASITSGTSTYYADSVKGRFTISRDNAKNTVYLQMNSLKPEDTAVYYCAVVSESQYYLHYWGQGTQVTVSS

SEQ ID NO: 11817 - protein, 118 aa, Artificial Sequence
  Chemically Synthesized
QVQLQESGGGLVQAGGSLRLSCAASGSISVIYAMGWYRQAPGKERELVAAINEGSSTYYADSVKGRFTISRDNAKNTVYLQMNSLKPEDTAVYYCAVVHDDDIGLTYWGQGTQVTVSS

SEQ ID NO: 11818 - protein, 122 aa, Artificial Sequence
  Chemically Synthesized
QVQLQESGGGLVQAGGSLRLSCAASGNIFNTGEMGWYRQAPGKEREFVATINSGGNTNYADSVKGRFTISRDNAKNTVYLQMNSLKPEDTAVYYCAAYPAPSVNYDEDHIYWGQGTQVTVSS

SEQ ID NO: 11819 - protein, 122 aa, Artificial Sequence
  Chemically Synthesized
QVQLQESGGGLVQAGGSLRLSCAASGYISPGIYMGWYRQAPGKERELVAGIAHGSTTYYADSVKGRFTISRDNAKNTVYLQMNSLKPEDTAVYYCAVGAWINYYWNGYLWYWGQGTQVTVSS

SEQ ID NO: 11820 - protein, 112 aa, Artificial Sequence
  Chemically Synthesized
QVQLQESGGGLVQAGGSLRLSCAASGSISVWFVMGWYRQAPGKEREFVAAIITVLLPYADSVKGRFTISRDNAKNTVYLQMNSLKPEDTAVYYCAADDWLYWGQGTQVTVSS

SEQ ID NO: 11821 - protein, 122 aa, Artificial Sequence
  Chemically Synthesized
QVQLQESGGGLVQAGGSLRLSCAASGTISVQKDMGWYRQAPGKERELVASIDPGASTNYADSVKGRFTISRDNAKNTVYLQMNSLKPEDTAVYYCAVYRGYQGARIASFYYWGQGTQVTVSS

SEQ ID NO: 11822 - protein, 122 aa, Artificial Sequence
  Chemically Synthesized
QVQLQESGGGLVQAGGSLRLSCAASGNIFGGQEMGWYRQAPGKEREFVAAIGFGSSTNYADSVKGRFTISRDNAKNTVYLQMNSLKPEDTAVYYCAADWGSRVGHVYEHYYWGQGTQVTVSS

SEQ ID NO: 11823 - protein, 121 aa, Artificial Sequence
  Chemically Synthesized
QVQLQESGGGLVQAGGSLRLSCAASGTIFVHYWMGWYRQAPGKERELVATISYGGTTNYADSVKGRFTISRDNAKNTVYLQMNSLKPEDTAVYYCAAATAVGYFDIWHDYWGQGTQVTVSS

SEQ ID NO: 11824 - protein, 123 aa, Artificial Sequence
  Chemically Synthesized
QVQLQESGGGLVQAGGSLRLSCAASGSIFTMGWYRQAPGKERELVAGINAGGSTYYADSVKGRFTISRDNAKNTVYLQMNSLKPEDTAVYYCAVGIYLSYARADPKIPRHYYWGQGTQVTVSS

SEQ ID NO: 11825 - protein, 118 aa, Artificial Sequence
  Chemically Synthesized
QVQLQESGGGLVQAGGSLRLSCAASGYIFYYDLMGWYRQAPGKERELVASISGGTNTYYADSVKGRFTISRDNAKNTVYLQMNSLKPEDTAVYYCAVVQPTYSAHYYWGQGTQVTVSS

SEQ ID NO: 11826 - protein, 122 aa, Artificial Sequence
  Chemically Synthesized
QVQLQESGGGLVQAGGSLRLSCAASGYIFRSLIMGWYRQAPGKERELVAAITSGANTNYADSVKGRFTISRDNAKNTVYLQMNSLKPEDTAVYYCAVLSSSAPDSDGILDYWGQGTQVTVSS

SEQ ID NO: 11827 - protein, 121 aa, Artificial Sequence
  Chemically Synthesized
QVQLQESGGGLVQAGGSLRLSCAASGYIFDSYDMGWYRQAPGKERELVAAITLGSTTYYADSVKGRFTISRDNAKNTVYLQMNSLKPEDTAVYYCAASVTLLLITVVTIYWGQGTQVTVSS

SEQ ID NO: 11828 - protein, 122 aa, Artificial Sequence
  Chemically Synthesized
QVQLQESGGGLVQAGGSLRLSCAASGSISDNRYMGWYRQAPGKEREFVATINYGGITYADSVKGRFTISRDNAKNTVYLQMNSLKPEDTAVYYCAAGYGYTDYRRYVAHYYWGQGTQVTVSS

SEQ ID NO: 11829 - protein, 126 aa, Artificial Sequence
  Chemically Synthesized
QVQLQESGGGLVQAGGSLRLSCAASGSISSRPDMGWYRQAPGKERELVAGISAGTITYYADSVKGRFTISRDNAKNTVYLQMNSLKPEDTAVYYCAATHPRYLADADQDWARHDYWGQGTQVTVSS

SEQ ID NO: 11830 - protein, 117 aa, Artificial Sequence
  Chemically Synthesized
QVQLQESGGGLVQAGGSLRLSCAASGYISYSTSMGWYRQAPGKEREFVAAIDTGSNTNYADSVKGRFTISRDNAKNTVYLQMNSLKPEDTAVYYCAALGEWSVTFYWGQGTQVTVSS

SEQ ID NO: 11831 - protein, 118 aa, Artificial Sequence
  Chemically Synthesized
QVQLQESGGGLVQAGGSLRLSCAASGNIFLNNGMGWYRQAPGKERELVAGITRGANTYYADSVKGRFTISRDNAKNTVYLQMNSLKPEDTAVYYCAADQHSATFHPYWGQGTQVTVSS

SEQ ID NO: 11832 - protein, 117 aa, Artificial Sequence
  Chemically Synthesized
QVQLQESGGGLVQAGGSLRLSCAASGSIFTHYIMGWYRQAPGKEREFVATISDGTSTNYADSVKGRFTISRDNAKNTVYLQMNSLKPEDTAVYYCAALSVSTLSMYWGQGTQVTVSS

SEQ ID NO: 11833 - protein, 118 aa, Artificial Sequence
  Chemically Synthesized
QVQLQESGGGLVQAGGSLRLSCAASGNIFDQYSMGWYRQAPGKERELVAGITRGTTTYYADSVKGRFTISRDNAKNTVYLQMNSLKPEDTAVYYCAAEDRYYYPYYYWGQGTQVTVSS

SEQ ID NO: 11834 - protein, 122 aa, Artificial Sequence
  Chemically Synthesized
QVQLQESGGGLVQAGGSLRLSCAASGNISGWSMGWYRQAPGKERELVASIGYGTSTNYADSVKGRFTISRDNAKNTVYLQMNSLKPEDTAVYYCAAGDSWEDETYNSGYYYWGQGTQVTVSS

SEQ ID NO: 11835 - protein, 118 aa, Artificial Sequence
  Chemically Synthesized
QVQLQESGGGLVQAGGSLRLSCAASGTIFVLGSMGWYRQAPGKEREFVATIADGASTNYADSVKGRFTISRDNAKNTVYLQMNSLKPEDTAVYYCAATDARHSSHYYWGQGTQVTVSS

SEQ ID NO: 11836 - protein, 122 aa, Artificial Sequence
  Chemically Synthesized
QVQLQESGGGLVQAGGSLRLSCAASGTISDPEYMGWYRQAPGKEREFVAGIGVGATTNYADSVKGRFTISRDNAKNTVYLQMNSLKPEDTAVYYCAAYLYDYRALDPILTYWGQGTQVTVSS

SEQ ID NO: 11837 - protein, 122 aa, Artificial Sequence
  Chemically Synthesized
QVQLQESGGGLVQAGGSLRLSCAASGNISQVQSMGWYRQAPGKERELVAAISYGGNTNYADSVKGRFTISRDNAKNTVYLQMNSLKPEDTAVYYCAVIDRNYDSDSTDYGYWGQGTQVTVSS

SEQ ID NO: 11838 - protein, 122 aa, Artificial Sequence
  Chemically Synthesized
QVQLQESGGGLVQAGGSLRLSCAASGSIFDAVYMGWYRQAPGKERELVASIDRGSTTNYADSVKGRFTISRDNAKNTVYLQMNSLKPEDTAVYYCAAAGKDADLATPYLYYWGQGTQVTVSS

SEQ ID NO: 11839 - protein, 126 aa, Artificial Sequence
  Chemically Synthesized
QVQLQESGGGLVQAGGSLRLSCAASGTISGSYEMGWYRQAPGKEREFVAAIGGGSTTYYADSVKGRFTISRDNAKNTVYLQMNSLKPEDTAVYYCAVRLYYDRDWDRDYQGPYLYWGQGTQVTVSS

SEQ ID NO: 11840 - protein, 122 aa, Artificial Sequence
  Chemically Synthesized
QVQLQESGGGLVQAGGSLRLSCAASGYISPKAIMGWYRQAPGKERELVAAIAYGGSTNYADSVKGRFTISRDNAKNTVYLQMNSLKPEDTAVYYCAVVGSQYGDADVLYVYWGQGTQVTVSS

SEQ ID NO: 11841 - protein, 118 aa, Artificial Sequence
  Chemically Synthesized
QVQLQESGGGLVQAGGSLRLSCAASGYISYYGYMGWYRQAPGKERELVATIGSWCYYLYADSVKGRFTISRDNAKNTVYLQMNSLKPEDTAVYYCAVERLSATWLWYWGQGTQVTVSS

SEQ ID NO: 11842 - protein, 121 aa, Artificial Sequence
  Chemically Synthesized
QVQLQESGGGLVQAGGSLRLSCAASGTIFGSLMGWYRQAPGKERELVAAIDSGGNTNYADSVKGRFTISRDNAKNTVYLQMNSLKPEDTAVYYCAAGYPLWDETFIGHDYWGQGTQVTVSS

SEQ ID NO: 11843 - protein, 118 aa, Artificial Sequence
  Chemically Synthesized
QVQLQESGGGLVQAGGSLRLSCAASGSIFYYYYMGWYRQAPGKERELVAGITYGTTTYYADSVKGRFTISRDNAKNTVYLQMNSLKPEDTAVYYCAATRYYNLAHSYWGQGTQVTVSS

SEQ ID NO: 11844 - protein, 125 aa, Artificial Sequence
  Chemically Synthesized
QVQLQESGGGLVQAGGSLRLSCAASGTIFLKSMGWYRQAPGKEREFVAGISDGTNTYYADSVKGRFTISRDNAKNTVYLQMNSLKPEDTAVYYCAVDNGGEQNKQLHDYDPYDYWGQGTQVTVSS

SEQ ID NO: 11845 - protein, 118 aa, Artificial Sequence
  Chemically Synthesized
QVQLQESGGGLVQAGGSLRLSCAASGTIFWYYFMGWYRQAPGKEREFVASINYGTNTYYADSVKGRFTISRDNAKNTVYLQMNSLKPEDTAVYYCAARYGDYVYLAYWGQGTQVTVSS

SEQ ID NO: 11846 - protein, 117 aa, Artificial Sequence
  Chemically Synthesized
QVQLQESGGGLVQAGGSLRLSCAASGNISYYYKMGWYRQAPGKEREFVAGITYGSSTNYADSVKGRFTISRDNAKNTVYLQMNSLKPEDTAVYYCAALDGDYLTIYWGQGTQVTVSS

SEQ ID NO: 11847 - protein, 117 aa, Artificial Sequence
  Chemically Synthesized
QVQLQESGGGLVQAGGSLRLSCAASGTIFHYNMGWYRQAPGKERELVAAITVGAITNYADSVKGRFTISRDNAKNTVYLQMNSLKPEDTAVYYCAVWPLYSQLYDYWGQGTQVTVSS

SEQ ID NO: 11848 - protein, 122 aa, Artificial Sequence
  Chemically Synthesized
QVQLQESGGGLVQAGGSLRLSCAASGNIFYRYTMGWYRQAPGKERELVASIAIGANTNYADSVKGRFTISRDNAKNTVYLQMNSLKPEDTAVYYCAVQYYNTGEFYYIHSYWGQGTQVTVSS

SEQ ID NO: 11849 - protein, 118 aa, Artificial Sequence
  Chemically Synthesized
QVQLQESGGGLVQAGGSLRLSCAASGTISAAYNMGWYRQAPGKEREFVASITGGTNTYYADSVKGRFTISRDNAKNTVYLQMNSLKPEDTAVYYCAADFVDYYRYNYWGQGTQVTVSS

SEQ ID NO: 11850 - protein, 117 aa, Artificial Sequence
  Chemically Synthesized
QVQLQESGGGLVQAGGSLRLSCAASGSISRTGMGWYRQAPGKEREFVAGIDRGGITNYADSVKGRFTISRDNAKNTVYLQMNSLKPEDTAVYYCAAQGGQYQAYPYWGQGTQVTVSS

SEQ ID NO: 11851 - protein, 126 aa, Artificial Sequence
  Chemically Synthesized
QVQLQESGGGLVQAGGSLRLSCAASGNISIHYYMGWYRQAPGKEREFVASIANGGSTYYADSVKGRFTISRDNAKNTVYLQMNSLKPEDTAVYYCAVAYSKILPRGGPYRGDYWYWGQGTQVTVSS

SEQ ID NO: 11852 - protein, 117 aa, Artificial Sequence
  Chemically Synthesized
QVQLQESGGGLVQAGGSLRLSCAASGSIFRAGDMGWYRQAPGKEREFVATIGYGGTYYADSVKGRFTISRDNAKNTVYLQMNSLKPEDTAVYYCAANYGLVFRFDYWGQGTQVTVSS

SEQ ID NO: 11853 - protein, 121 aa, Artificial Sequence
  Chemically Synthesized
QVQLQESGGGLVQAGGSLRLSCAASGSISSRQLMGWYRQAPGKERELVAGINDGGSTYYADSVKGRFTISRDNAKNTVYLQMNSLKPEDTAVYYCAVDVFSVPVLVLPSYWGQGTQVTVSS

SEQ ID NO: 11854 - protein, 117 aa, Artificial Sequence
  Chemically Synthesized
QVQLQESGGGLVQAGGSLRLSCAASGYISNVPYMGWYRQAPGKERELVAAIDGTTTYYADSVKGRFTISRDNAKNTVYLQMNSLKPEDTAVYYCAVIYYVFPDHYYWGQGTQVTVSS

SEQ ID NO: 11855 - protein, 121 aa, Artificial Sequence
  Chemically Synthesized
QVQLQESGGGLVQAGGSLRLSCAASGTIFPTYWMGWYRQAPGKERELVAGINTGGTTNYADSVKGRFTISRDNAKNTVYLQMNSLKPEDTAVYYCAVILHVPANGWYYGYWGQGTQVTVSS

SEQ ID NO: 11856 - protein, 122 aa, Artificial Sequence
  Chemically Synthesized
QVQLQESGGGLVQAGGSLRLSCAASGNISRWRYMGWYRQAPGKERELVAAINPGATTYYADSVKGRFTISRDNAKNTVYLQMNSLKPEDTAVYYCAVEDYEGQGAYVRYDYWGQGTQVTVSS

SEQ ID NO: 11857 - protein, 121 aa, Artificial Sequence
  Chemically Synthesized
QVQLQESGGGLVQAGGSLRLSCAASGTIFTPVGMGWYRQAPGKEREFVATIAGGGTNYADSVKGRFTISRDNAKNTVYLQMNSLKPEDTAVYYCAAQRAYRRALIRQLVYWGQGTQVTVSS

SEQ ID NO: 11858 - protein, 122 aa, Artificial Sequence
  Chemically Synthesized
QVQLQESGGGLVQAGGSLRLSCAASGTISDSRYMGWYRQAPGKEREFVAAIDHGSITNYADSVKGRFTISRDNAKNTVYLQMNSLKPEDTAVYYCAAIYIDPYDPAYYLGYWGQGTQVTVSS

SEQ ID NO: 11859 - protein, 118 aa, Artificial Sequence
  Chemically Synthesized
QVQLQESGGGLVQAGGSLRLSCAASGSISRVGYMGWYRQAPGKERELVAAISYGGTTYYADSVKGRFTISRDNAKNTVYLQMNSLKPEDTAVYYCAVRRAHDSALRYWGQGTQVTVSS

SEQ ID NO: 11860 - protein, 117 aa, Artificial Sequence
  Chemically Synthesized
QVQLQESGGGLVQAGGSLRLSCAASGNIFNAYDMGWYRQAPGKERELVAGIATGGITNYADSVKGRFTISRDNAKNTVYLQMNSLKPEDTAVYYCAVGRDYGYFAYWGQGTQVTVSS

SEQ ID NO: 11861 - protein, 112 aa, Artificial Sequence
  Chemically Synthesized
QVQLQESGGGLVQAGGSLRLSCAASGSISHTSDMGWYRQAPGKEREFVATISYGTTTNYADSVKGRFTISRDNAKNTVYLQMNSLKPEDTAVYYCAVELSYWGQGTQVTVSS

SEQ ID NO: 11862 - protein, 120 aa, Artificial Sequence
  Chemically Synthesized
QVQLQESGGGLVQAGGSLRLSCAASGYMGWYRQAPGKERELVASITYGGNTNYADSVKGRFTISRDNAKNTVYLQMNSLKPEDTAVYYCAVEIDDYDQGYDFYRYYYDYWGQGTQVTVSS

SEQ ID NO: 11863 - protein, 118 aa, Artificial Sequence
  Chemically Synthesized
QVQLQESGGGLVQAGGSLRLSCAASGYIFRFYKMGWYRQAPGKERELVATIGYGSTTYYADSVKGRFTISRDNAKNTVYLQMNSLKPEDTAVYYCAVVRHRGRYYVYWGQGTQVTVSS

SEQ ID NO: 11864 - protein, 123 aa, Artificial Sequence
  Chemically Synthesized
QVQLQESGGGLVQAGGSLRLSCAASGNISRWDDMGWYRQAPGKERELVATITYDGASTYYADSVKGRFTISRDNAKNTVYLQMNSLKPEDTAVYYCAAQSWPDAGNYDGYPYWGQGTQVTVSS

SEQ ID NO: 11865 - protein, 126 aa, Artificial Sequence
  Chemically Synthesized
QVQLQESGGGLVQAGGSLRLSCAASGYIFPNPYMGWYRQAPGKERELVAGIALGGITYYADSVKGRFTISRDNAKNTVYLQMNSLKPEDTAVYYCAASLFVVGGLFALQNYAFRYWGQGTQVTVSS

SEQ ID NO: 11866 - protein, 118 aa, Artificial Sequence
  Chemically Synthesized
QVQLQESGGGLVQAGGSLRLSCAASGYIFRTFYMGWYRQAPGKEREFVAAINKGSSTNYADSVKGRFTISRDNAKNTVYLQMNSLKPEDTAVYYCAAATDYVQPFAYWGQGTQVTVSS

SEQ ID NO: 11867 - protein, 117 aa, Artificial Sequence
  Chemically Synthesized
QVQLQESGGGLVQAGGSLRLSCAASGNISRYDAMGWYRQAPGKERELVATIDYGASTNYADSVKGRFTISRDNAKNTVYLQMNSLKPEDTAVYYCAVSRTSTRTFYWGQGTQVTVSS

SEQ ID NO: 11868 - protein, 118 aa, Artificial Sequence
  Chemically Synthesized
QVQLQESGGGLVQAGGSLRLSCAASGSISRARSMGWYRQAPGKEREFVAGIDGGGTTYYADSVKGRFTISRDNAKNTVYLQMNSLKPEDTAVYYCAVRLRNFRVYWYWGQGTQVTVSS

SEQ ID NO: 11869 - protein, 126 aa, Artificial Sequence
  Chemically Synthesized
QVQLQESGGGLVQAGGSLRLSCAASGYIFYTAVMGWYRQAPGKEREFVAAIDDGSSTNYADSVKGRFTISRDNAKNTVYLQMNSLKPEDTAVYYCAVNGQGDTVAYYDSPNPYPYWGQGTQVTVSS

SEQ ID NO: 11870 - protein, 122 aa, Artificial Sequence
  Chemically Synthesized
QVQLQESGGGLVQAGGSLRLSCAASGNIFDYSGMGWYRQAPGKEREFVAGITYGGSTYYADSVKGRFTISRDNAKNTVYLQMNSLKPEDTAVYYCAAFGLSRYYAEAYHGYWGQGTQVTVSS

SEQ ID NO: 11871 - protein, 118 aa, Artificial Sequence
  Chemically Synthesized
QVQLQESGGGLVQAGGSLRLSCAASGNIFRYSVMGWYRQAPGKEREFVAAISTGTTTYYADSVKGRFTISRDNAKNTVYLQMNSLKPEDTAVYYCAAIFRFYLGHRYWGQGTQVTVSS

SEQ ID NO: 11872 - protein, 116 aa, Artificial Sequence
  Chemically Synthesized
QVQLQESGGGLVQAGGSLRLSCAASGNISVAAYMGWYRQAPGKEREFVAAIASGANTYYADSVKGRFTISRDNAKNTVYLQMNSLKPEDTAVYYCAAGVSRALGYWGQGTQVTVSS

SEQ ID NO: 11873 - protein, 117 aa, Artificial Sequence
  Chemically Synthesized
QVQLQESGGGLVQAGGSLRLSCAASGSIFRYYAMGWYRQAPGKERELVATIASGATTYYADSVKGRFTISRDNAKNTVYLQMNSLKPEDTAVYYCAVRNERYRYGYWGQGTQVTVSS

SEQ ID NO: 11874 - protein, 117 aa, Artificial Sequence
  Chemically Synthesized
QVQLQESGGGLVQAGGSLRLSCAASGTISSVNNMGWYRQAPGKERELVATIAYGSTTNYADSVKGRFTISRDNAKNTVYLQMNSLKPEDTAVYYCAADDVYDSTLYWGQGTQVTVSS

SEQ ID NO: 11875 - protein, 122 aa, Artificial Sequence
  Chemically Synthesized
QVQLQESGGGLVQAGGSLRLSCAASGSIFSYRRMGWYRQAPGKEREFVAAISTGSTTYYADSVKGRFTISRDNAKNTVYLQMNSLKPEDTAVYYCAVALGQPVGYADDHYYWGQGTQVTVSS

SEQ ID NO: 11876 - protein, 125 aa, Artificial Sequence
  Chemically Synthesized
QVQLQESGGGLVQAGGSLRLSCAASGIFLSLNMGWYRQAPGKERELVAAISRGGSTYYADSVKGRFTISRDNAKNTVYLQMNSLKPEDTAVYYCAVLQWSYYEYAYTYFFAHGYWGQGTQVTVSS

SEQ ID NO: 11877 - protein, 116 aa, Artificial Sequence
  Chemically Synthesized
QVQLQESGGGLVQAGGSLRLSCAASGSISYRSMGWYRQAPGKEREFVAAIAYGATTNYADSVKGRFTISRDNAKNTVYLQMNSLKPEDTAVYYCAVTCVRTILIYWGQGTQVTVSS

SEQ ID NO: 11878 - protein, 118 aa, Artificial Sequence
  Chemically Synthesized
QVQLQESGGGLVQAGGSLRLSCAASGYISFATFMGWYRQAPGKERELVASISDGSTTYYADSVKGRFTISRDNAKNTVYLQMNSLKPEDTAVYYCAAQRQYGAHHFYWGQGTQVTVSS

SEQ ID NO: 11879 - protein, 122 aa, Artificial Sequence
  Chemically Synthesized
QVQLQESGGGLVQAGGSLRLSCAASGSISDPTGMGWYRQAPGKEREFVAGITDGGITYYADSVKGRFTISRDNAKNTVYLQMNSLKPEDTAVYYCAVYEIDYETARGWHRYWGQGTQVTVSS

SEQ ID NO: 11880 - protein, 118 aa, Artificial Sequence
  Chemically Synthesized
QVQLQESGGGLVQAGGSLRLSCAASGSIFYARVMGWYRQAPGKERELVASINSGTSTNYADSVKGRFTISRDNAKNTVYLQMNSLKPEDTAVYYCAAYYRRFLGHNYWGQGTQVTVSS

SEQ ID NO: 11881 - protein, 118 aa, Artificial Sequence
  Chemically Synthesized
QVQLQESGGGLVQAGGSLRLSCAASGTISYSKYMGWYRQAPGKEREFVAAIAFGTTTYYADSVKGRFTISRDNAKNTVYLQMNSLKPEDTAVYYCAAVRGPTYVHRYWGQGTQVTVSS

SEQ ID NO: 11882 - protein, 117 aa, Artificial Sequence
  Chemically Synthesized
QVQLQESGGGLVQAGGSLRLSCAASGYISLEEDMGWYRQAPGKERELVASISFGTTTNYADSVKGRFTISRDNAKNTVYLQMNSLKPEDTAVYYCAVTGDPSCLIYWGQGTQVTVSS

SEQ ID NO: 11883 - protein, 117 aa, Artificial Sequence
  Chemically Synthesized
QVQLQESGGGLVQAGGSLRLSCAASGTIFIRYFMGWYRQAPGKERELVATIAYGGTTYYADSVKGRFTISRDNAKNTVYLQMNSLKPEDTAVYYCAFPWWAWYHDYWGQGTQVTVSS

SEQ ID NO: 11884 - protein, 118 aa, Artificial Sequence
  Chemically Synthesized
QVQLQESGGGLVQAGGSLRLSCAASGNISRTRFMGWYRQAPGKEREFVASINAGAITNYADSVKGRFTISRDNAKNTVYLQMNSLKPEDTAVYYCAADNYHLVVLAYWGQGTQVTVSS

SEQ ID NO: 11885 - protein, 110 aa, Artificial Sequence
  Chemically Synthesized
QVQLQESGGGLVQAGGSLRLSCAASGTISPSHSMGWYRQAPGKERELVAGITYGAITNYADSVKGRFTISRDNAKNTVYLQMNSLKPEDTAVYYCAATYWGQGTQVTVSS

SEQ ID NO: 11886 - protein, 122 aa, Artificial Sequence
  Chemically Synthesized
QVQLQESGGGLVQAGGSLRLSCAASGYISRTYRMGWYRQAPGKERELVATIGYGATTNYADSVKGRFTISRDNAKNTVYLQMNSLKPEDTAVYYCAVATYRKGGRYGYHSYWGQGTQVTVSS

SEQ ID NO: 11887 - protein, 126 aa, Artificial Sequence
  Chemically Synthesized
QVQLQESGGGLVQAGGSLRLSCAASGNIFRSSQMGWYRQAPGKERELVATIDKGGTTNYADSVKGRFTISRDNAKNTVYLQMNSLKPEDTAVYYCAVNSSRYWYPWYPRGWYLRYWGQGTQVTVSS

SEQ ID NO: 11888 - protein, 122 aa, Artificial Sequence
  Chemically Synthesized
QVQLQESGGGLVQAGGSLRLSCAASGYISYYGYMGWYRQAPGKEREFVAGISDGAITYYADSVKGRFTISRDNAKNTVYLQMNSLKPEDTAVYYCAAYAWQGFPFVSYYRYWGQGTQVTVSS

SEQ ID NO: 11889 - protein, 122 aa, Artificial Sequence
  Chemically Synthesized
QVQLQESGGGLVQAGGSLRLSCAASGSISSRDQMGWYRQAPGKEREFVAGIAPGTNTYYADSVKGRFTISRDNAKNTVYLQMNSLKPEDTAVYYCAAHVLFYYGGDYAHDYWGQGTQVTVSS

SEQ ID NO: 11890 - protein, 126 aa, Artificial Sequence
  Chemically Synthesized
QVQLQESGGGLVQAGGSLRLSCAASGNISTSYSMGWYRQAPGKEREFVATIGVGGTTYYADSVKGRFTISRDNAKNTVYLQMNSLKPEDTAVYYCAVGWHVVYDPSPYIAYELRYWGQGTQVTVSS

SEQ ID NO: 11891 - protein, 122 aa, Artificial Sequence
  Chemically Synthesized
QVQLQESGGGLVQAGGSLRLSCAASGNIFNWYDMGWYRQAPGKERELVAGINYGGITNYADSVKGRFTISRDNAKNTVYLQMNSLKPEDTAVYYCAVPTVSAPYKYDELYYWGQGTQVTVSS

SEQ ID NO: 11892 - protein, 117 aa, Artificial Sequence
  Chemically Synthesized
QVQLQESGGGLVQAGGSLRLSCAASGYILLRVMGWYRQAPGKEREFVAGIDAGSNTNYADSVKGRFTISRDNAKNTVYLQMNSLKPEDTAVYYCAAGQQPYVVHGYWGQGTQVTVSS

SEQ ID NO: 11893 - protein, 114 aa, Artificial Sequence
  Chemically Synthesized
QVQLQESGGGLVQAGGSLRLSCAASGYISAYGYMGWYRQAPGKERELVAAISYGGNTYYADSVKGRFTISRDNAKNTVYLQMNSLKPEDTAVYYCAVRRRHYYWGQGTQVTVSS

SEQ ID NO: 11894 - protein, 118 aa, Artificial Sequence
  Chemically Synthesized
QVQLQESGGGLVQAGGSLRLSCAASGYIFSGPVMGWYRQAPGKERELVATINDGGNTNYADSVKGRFTISRDNAKNTVYLQMNSLKPEDTAVYYCAVDDDYLYHYDYWGQGTQVTVSS

SEQ ID NO: 11895 - protein, 126 aa, Artificial Sequence
  Chemically Synthesized
QVQLQESGGGLVQAGGSLRLSCAASGNISDNYYMGWYRQAPGKEREFVASISYGGSTYYADSVKGRFTISRDNAKNTVYLQMNSLKPEDTAVYYCAAITYDIIDPKSGYYYAHYYWGQGTQVTVSS

SEQ ID NO: 11896 - protein, 118 aa, Artificial Sequence
  Chemically Synthesized
QVQLQESGGGLVQAGGSLRLSCAASGNIFGSPIMGWYRQAPGKEREFVASISTGANTYYADSVKGRFTISRDNAKNTVYLQMNSLKPEDTAVYYCAVRRGRYYYHRYWGQGTQVTVSS

SEQ ID NO: 11897 - protein, 118 aa, Artificial Sequence
  Chemically Synthesized
QVQLQESGGGLVQAGGSLRLSCAASGNISYDRYMGWYRQAPGKEREFVATIDYGSSTNYADSVKGRFTISRDNAKNTVYLQMNSLKPEDTAVYYCAVWDVYALRYYYWGQGTQVTVSS

SEQ ID NO: 11898 - protein, 118 aa, Artificial Sequence
  Chemically Synthesized
QVQLQESGGGLVQAGGSLRLSCAASGSISDYDFMGWYRQAPGKEREFVATINRGGNTNYADSVKGRFTISRDNAKNTVYLQMNSLKPEDTAVYYCAAQGDVDRALGYWGQGTQVTVSS

SEQ ID NO: 11899 - protein, 119 aa, Artificial Sequence
  Chemically Synthesized
QVQLQESGGGLVQAGGSLRLSCAASGSIFRISIMGWYRQAPGKEREFVATIDRGGTTYYADSVKGRFTISRDNAKNTVYLQMNSLKPEDTAVYYCAVIDYERGTWLGYWGQGTQVTVSS

SEQ ID NO: 11900 - protein, 118 aa, Artificial Sequence
  Chemically Synthesized
QVQLQESGGGLVQAGGSLRLSCAASGSIFTFLTMGWYRQAPGKERELVATIGPGGNTYYADSVKGRFTISRDNAKNTVYLQMNSLKPEDTAVYYCAVVPDGLGYHLYWGQGTQVTVSS

SEQ ID NO: 11901 - protein, 118 aa, Artificial Sequence
  Chemically Synthesized
QVQLQESGGGLVQAGGSLRLSCAASGYISYYAYMGWYRQAPGKERELVAAIARGGNTYYADSVKGRFTISRDNAKNTVYLQMNSLKPEDTAVYYCAVTRTVYNNHRYWGQGTQVTVSS

SEQ ID NO: 11902 - protein, 118 aa, Artificial Sequence
  Chemically Synthesized
QVQLQESGGGLVQAGGSLRLSCAASGTIFHLSAMGWYRQAPGKERELVAGIGKGATTNYADSVKGRFTISRDNAKNTVYLQMNSLKPEDTAVYYCAAQAGWWHRYAYWGQGTQVTVSS

SEQ ID NO: 11903 - protein, 122 aa, Artificial Sequence
  Chemically Synthesized
QVQLQESGGGLVQAGGSLRLSCAASGNISLYAAMGWYRQAPGKEREFVATISAGGITYYADSVKGRFTISRDNAKNTVYLQMNSLKPEDTAVYYCAAGTGYTDQPAPSLDYWGQGTQVTVSS

SEQ ID NO: 11904 - protein, 118 aa, Artificial Sequence
  Chemically Synthesized
QVQLQESGGGLVQAGGSLRLSCAASGSISQLGFMGWYRQAPGKEREFVASISYGTSTNYADSVKGRFTISRDNAKNTVYLQMNSLKPEDTAVYYCAALHKLPYLLYYWGQGTQVTVSS

SEQ ID NO: 11905 - protein, 118 aa, Artificial Sequence
  Chemically Synthesized
QVQLQESGGGLVQAGGSLRLSCAASGYISKRDQMGWYRQAPGKEREFVAGINTGATTNYADSVKGRFTISRDNAKNTVYLQMNSLKPEDTAVYYCAARRRYYYYHWYWGQGTQVTVSS

SEQ ID NO: 11906 - protein, 117 aa, Artificial Sequence
  Chemically Synthesized
QVQLQESGGGLVQAGGSLRLSCAASGTIFVPYYMGWYRQAPGKERELVAGISWGGSTYYADSVKGRFTISRDNAKNTVYLQMNSLKPEDTAVYYCAVPDYEYGSLYWGQGTQVTVSS

SEQ ID NO: 11907 - protein, 118 aa, Artificial Sequence
  Chemically Synthesized
QVQLQESGGGLVQAGGSLRLSCAASGYISAVRGMGWYRQAPGKEREFVATISRGTSTNYADSVKGRFTISRDNAKNTVYLQMNSLKPEDTAVYYCAADQRSYGQYYYWGQGTQVTVSS

SEQ ID NO: 11908 - protein, 123 aa, Artificial Sequence
  Chemically Synthesized
QVQLQESGGGLVQAGGSLRLSCAASGNIFYMGWYRQAPGKEREFVATISYGGSTNYADSVKGRFTISRDNAKNTVYLQMNSLKPEDTAVYYCAVPGDYYDQVYGTGFSYLYYWGQGTQVTVSS

SEQ ID NO: 11909 - protein, 118 aa, Artificial Sequence
  Chemically Synthesized
QVQLQESGGGLVQAGGSLRLSCAASGYISRYRKMGWYRQAPGKEREFVATIAYGGITNYADSVKGRFTISRDNAKNTVYLQMNSLKPEDTAVYYCAVRAIPLSPYYYWGQGTQVTVSS

SEQ ID NO: 11910 - protein, 118 aa, Artificial Sequence
  Chemically Synthesized
QVQLQESGGGLVQAGGSLRLSCAASGNIFPLLYMGWYRQAPGKERELVAGITQGTSTNYADSVKGRFTISRDNAKNTVYLQMNSLKPEDTAVYYCAVAFLDQDYYQYWGQGTQVTVSS

SEQ ID NO: 11911 - protein, 118 aa, Artificial Sequence
  Chemically Synthesized
QVQLQESGGGLVQAGGSLRLSCAASGNIFRWDIMGWYRQAPGKERELVAAIGAGTTTNYADSVKGRFTISRDNAKNTVYLQMNSLKPEDTAVYYCAVRRRRLTLHSYWGQGTQVTVSS

SEQ ID NO: 11912 - protein, 121 aa, Artificial Sequence
  Chemically Synthesized
QVQLQESGGGLVQAGGSLRLSCAASGSIFDRDYMGWYRQAPGKEREFVASISGGNTNYADSVKGRFTISRDNAKNTVYLQMNSLKPEDTAVYYCAAIRYNSSDAYPYHGYWGQGTQVTVSS

SEQ ID NO: 11913 - protein, 126 aa, Artificial Sequence
  Chemically Synthesized
QVQLQESGGGLVQAGGSLRLSCAASGSISRAPGMGWYRQAPGKEREFVAAIARGTNTNYADSVKGRFTISRDNAKNTVYLQMNSLKPEDTAVYYCAAYTRWRNYFRPLTSSGHEYWGQGTQVTVSS

SEQ ID NO: 11914 - protein, 122 aa, Artificial Sequence
  Chemically Synthesized
QVQLQESGGGLVQAGGSLRLSCAASGYIFRRYYMGWYRQAPGKEREFVASIGYGTITNYADSVKGRFTISRDNAKNTVYLQMNSLKPEDTAVYYCAVRVWNYYASYQRYYYWGQGTQVTVSS

SEQ ID NO: 11915 - protein, 118 aa, Artificial Sequence
  Chemically Synthesized
QVQLQESGGGLVQAGGSLRLSCAASGNIFSTRYMGWYRQAPGKEREFVAAIGKGISTNYADSVKGRFTISRDNAKNTVYLQMNSLKPEDTAVYYCAVPARYRVYYWYWGQGTQVTVSS

SEQ ID NO: 11916 - protein, 118 aa, Artificial Sequence
  Chemically Synthesized
QVQLQESGGGLVQAGGSLRLSCAASGYISRWYQMGWYRQAPGKEREFVATIGYGGSTYYADSVKGRFTISRDNAKNTVYLQMNSLKPEDTAVYYCAAGWRYSRQFPYWGQGTQVTVSS

SEQ ID NO: 11917 - protein, 122 aa, Artificial Sequence
  Chemically Synthesized
QVQLQESGGGLVQAGGSLRLSCAASGYIFDGGIMGWYRQAPGKERELVAGIDTGATTYYADSVKGRFTISRDNAKNTVYLQMNSLKPEDTAVYYCAALLLDHDSGGTYHDYWGQGTQVTVSS

SEQ ID NO: 11918 - protein, 118 aa, Artificial Sequence
  Chemically Synthesized
QVQLQESGGGLVQAGGSLRLSCAASGSIFRARAMGWYRQAPGKEREFVAGIGRGSSTYYADSVKGRFTISRDNAKNTVYLQMNSLKPEDTAVYYCAALRSRRYLFAYWGQGTQVTVSS

SEQ ID NO: 11919 - protein, 126 aa, Artificial Sequence
  Chemically Synthesized
QVQLQESGGGLVQAGGSLRLSCAASGTIFITWLMGWYRQAPGKEREFVAGISVGTNTYYADSVKGRFTISRDNAKNTVYLQMNSLKPEDTAVYYCAVHTIGLANVLPSWTEYHDYWGQGTQVTVSS

SEQ ID NO: 11920 - protein, 126 aa, Artificial Sequence
  Chemically Synthesized
QVQLQESGGGLVQAGGSLRLSCAASGYIFQYYYMGWYRQAPGKERELVASIGGGSTTNYADSVKGRFTISRDNAKNTVYLQMNSLKPEDTAVYYCAANRDDYIWGGNYRADDLPYWGQGTQVTVSS

SEQ ID NO: 11921 - protein, 118 aa, Artificial Sequence
  Chemically Synthesized
QVQLQESGGGLVQAGGSLRLSCAASGYIFGPYLMGWYRQAPGKERELVAAIGRGTTTYYADSVKGRFTISRDNAKNTVYLQMNSLKPEDTAVYYCAAVPYRRAYYDYWGQGTQVTVSS

SEQ ID NO: 11922 - protein, 122 aa, Artificial Sequence
  Chemically Synthesized
QVQLQESGGGLVQAGGSLRLSCAASGYISIGLTMGWYRQAPGKEREFVAGIAPGSSTYYADSVKGRFTISRDNAKNTVYLQMNSLKPEDTAVYYCAVADQQYADYFLQYAYWGQGTQVTVSS

SEQ ID NO: 11923 - protein, 126 aa, Artificial Sequence
  Chemically Synthesized
QVQLQESGGGLVQAGGSLRLSCAASGNISAKDYMGWYRQAPGKERELVASISDGTSTNYADSVKGRFTISRDNAKNTVYLQMNSLKPEDTAVYYCAAYPVGYPGRYAKGYRQLEYWGQGTQVTVSS

SEQ ID NO: 11924 - protein, 118 aa, Artificial Sequence
  Chemically Synthesized
QVQLQESGGGLVQAGGSLRLSCAASGNISRARHMGWYRQAPGKERELVASIAWGASTYYADSVKGRFTISRDNAKNTVYLQMNSLKPEDTAVYYCAVGRYRTSWYNYWGQGTQVTVSS

SEQ ID NO: 11925 - protein, 125 aa, Artificial Sequence
  Chemically Synthesized
QVQLQESGGGLVQAGGSLRLSCAASGTISRRDGMGWYRQAPGKERELVATIAEGATTYYADSVKGRFTISRDNAKNTVYLQMNSLKPEDTAVYYCAVSLKVTVVNTVTTVCSLYWGQGTQVTVSS

SEQ ID NO: 11926 - protein, 122 aa, Artificial Sequence
  Chemically Synthesized
QVQLQESGGGLVQAGGSLRLSCAASGTISEPAPMGWYRQAPGKEREFVAGIAYGATTYYADSVKGRFTISRDNAKNTVYLQMNSLKPEDTAVYYCAVYTWDEDEYRYYHSYWGQGTQVTVSS

SEQ ID NO: 11927 - protein, 122 aa, Artificial Sequence
  Chemically Synthesized
QVQLQESGGGLVQAGGSLRLSCAASGSISRARYMGWYRQAPGKEREFVAAIGYGASTYYADSVKGRFTISRDNAKNTVYLQMNSLKPEDTAVYYCAVTGRARYPYVYGHVYWGQGTQVTVSS

SEQ ID NO: 11928 - protein, 124 aa, Artificial Sequence
  Chemically Synthesized
QVQLQESGGGLVQAGGSLRLSCAASGSISDPPVMGWYRQAPGKERELVASIDDGTSTNYADSVKGRFTISRDNAKNTVYLQMNSLKPEDTAVYYCAVNHGNSVPADDPLFHQYWGQGTQVTVSS

SEQ ID NO: 11929 - protein, 118 aa, Artificial Sequence
  Chemically Synthesized
QVQLQESGGGLVQAGGSLRLSCAASGSIFYRRYMGWYRQAPGKERELVATIGVGGTTNYADSVKGRFTISRDNAKNTVYLQMNSLKPEDTAVYYCAVLPFYSGRHAYWGQGTQVTVSS

SEQ ID NO: 11930 - protein, 122 aa, Artificial Sequence
  Chemically Synthesized
QVQLQESGGGLVQAGGSLRLSCAASGTISSRAIMGWYRQAPGKERELVAAIAAGGSTNYADSVKGRFTISRDNAKNTVYLQMNSLKPEDTAVYYCAVKWLNWLIPYRYFLYWGQGTQVTVSS

SEQ ID NO: 11931 - protein, 126 aa, Artificial Sequence
  Chemically Synthesized
QVQLQESGGGLVQAGGSLRLSCAASGTIFRQLYMGWYRQAPGKERELVAAISWGGITYYADSVKGRFTISRDNAKNTVYLQMNSLKPEDTAVYYCAVWFPDRSTSRQEYSGWLFYWGQGTQVTVSS

SEQ ID NO: 11932 - protein, 126 aa, Artificial Sequence
  Chemically Synthesized
QVQLQESGGGLVQAGGSLRLSCAASGNISRNRWMGWYRQAPGKERELVATISGGTTTNYADSVKGRFTISRDNAKNTVYLQMNSLKPEDTAVYYCAVTFRAGHLGTAHYWYRHPYWGQGTQVTVSS

SEQ ID NO: 11933 - protein, 124 aa, Artificial Sequence
  Chemically Synthesized
QVQLQESGGGLVQAGGSLRLSCAASGTISTWMGWYRQAPGKERELVAAISTGGTTNYADSVKGRFTISRDNAKNTVYLQMNSLKPEDTAVYYCAAASYVIFGTDLGGRYYHTYWGQGTQVTVSS

SEQ ID NO: 11934 - protein, 118 aa, Artificial Sequence
  Chemically Synthesized
QVQLQESGGGLVQAGGSLRLSCAASGYISRVVYMGWYRQAPGKERELVASIAYGATTNYADSVKGRFTISRDNAKNTVYLQMNSLKPEDTAVYYCAVGGTAYHTFVYWGQGTQVTVSS

SEQ ID NO: 11935 - protein, 126 aa, Artificial Sequence
  Chemically Synthesized
QVQLQESGGGLVQAGGSLRLSCAASGTISAYWGMGWYRQAPGKERELVASISDGGTTNYADSVKGRFTISRDNAKNTVYLQMNSLKPEDTAVYYCAALYVAARDSDSRFYSTYLYWGQGTQVTVSS

SEQ ID NO: 11936 - protein, 125 aa, Artificial Sequence
  Chemically Synthesized
QVQLQESGGGLVQAGGSLRLSCAASGTIFNWYGMGWYRQAPGKEREFVAGIDTGGTTNYADSVKGRFTISRDNAKNTVYLQMNSLKPEDTAVYYCAVRDPRWWPYYYANVDGHYWGQGTQVTVSS

SEQ ID NO: 11937 - protein, 122 aa, Artificial Sequence
  Chemically Synthesized
QVQLQESGGGLVQAGGSLRLSCAASGYIFGHPVMGWYRQAPGKERELVATINEGGNTNYADSVKGRFTISRDNAKNTVYLQMNSLKPEDTAVYYCAVYLLYYTYAPSWLVYWGQGTQVTVSS

SEQ ID NO: 11938 - protein, 121 aa, Artificial Sequence
  Chemically Synthesized
QVQLQESGGGLVQAGGSLRLSCAASGYIFRQRDMGWYRQAPGKEREFVAAIGAGGNTNYADSVKGRFTISRDNAKNTVYLQMNSLKPEDTAVYYCAAITLELTDDDAYLYWGQGTQVTVSS

SEQ ID NO: 11939 - protein, 126 aa, Artificial Sequence
  Chemically Synthesized
QVQLQESGGGLVQAGGSLRLSCAASGYIFDRSKMGWYRQAPGKERELVATIGVGGTTYYADSVKGRFTISRDNAKNTVYLQMNSLKPEDTAVYYCAAEFRGGWNFRYPYPVRHHYWGQGTQVTVSS

SEQ ID NO: 11940 - protein, 118 aa, Artificial Sequence
  Chemically Synthesized
QVQLQESGGGLVQAGGSLRLSCAASGSIFTRTTMGWYRQAPGKERELVAAINYGTNTYYADSVKGRFTISRDNAKNTVYLQMNSLKPEDTAVYYCAVLSRRYWRYTYWGQGTQVTVSS

SEQ ID NO: 11941 - protein, 122 aa, Artificial Sequence
  Chemically Synthesized
QVQLQESGGGLVQAGGSLRLSCAASGNIFWRNIMGWYRQAPGKERELVAGIAFGAITNYADSVKGRFTISRDNAKNTVYLQMNSLKPEDTAVYYCAVHPYFGRYGGKRLPYWGQGTQVTVSS

SEQ ID NO: 11942 - protein, 122 aa, Artificial Sequence
  Chemically Synthesized
QVQLQESGGGLVQAGGSLRLSCAASGTISVYVSMGWYRQAPGKEREFVATIDRGAITYYADSVKGRFTISRDNAKNTVYLQMNSLKPEDTAVYYCAVSPYVRDGDSELHLYWGQGTQVTVSS

SEQ ID NO: 11943 - protein, 118 aa, Artificial Sequence
  Chemically Synthesized
QVQLQESGGGLVQAGGSLRLSCAASGNISSFHLMGWYRQAPGKEREFVAAIGVGATTNYADSVKGRFTISRDNAKNTVYLQMNSLKPEDTAVYYCAAELVKDHQYHYWGQGTQVTVSS

SEQ ID NO: 11944 - protein, 122 aa, Artificial Sequence
  Chemically Synthesized
QVQLQESGGGLVQAGGSLRLSCAASGNIFPVYVMGWYRQAPGKERELVASIGQGGTTYYADSVKGRFTISRDNAKNTVYLQMNSLKPEDTAVYYCAAWWRIGQVKYYEFGYWGQGTQVTVSS

SEQ ID NO: 11945 - protein, 122 aa, Artificial Sequence
  Chemically Synthesized
QVQLQESGGGLVQAGGSLRLSCAASGYIFGIRAMGWYRQAPGKERELVATITYGGNTYYADSVKGRFTISRDNAKNTVYLQMNSLKPEDTAVYYCAVTRRGRTGWWKPYRYWGQGTQVTVSS

SEQ ID NO: 11946 - protein, 122 aa, Artificial Sequence
  Chemically Synthesized
QVQLQESGGGLVQAGGSLRLSCAASGYIFGLVRMGWYRQAPGKEREFVAAIANGSITYYADSVKGRFTISRDNAKNTVYLQMNSLKPEDTAVYYCAAPQTEGYGYTWKHQYWGQGTQVTVSS

SEQ ID NO: 11947 - protein, 121 aa, Artificial Sequence
  Chemically Synthesized
QVQLQESGGGLVQAGGSLRLSCAASGYIFVVVAMGWYRQAPGKEREFVAGISAGGSTYYADSVKGRFTISRDNAKNTVYLQMNSLKPEDTAVYYCAWYRWYPYDFYIYHYWGQGTQVTVSS

SEQ ID NO: 11948 - protein, 118 aa, Artificial Sequence
  Chemically Synthesized
QVQLQESGGGLVQAGGSLRLSCAASGSIFGITYMGWYRQAPGKEREFVASISIGGSTYYADSVKGRFTISRDNAKNTVYLQMNSLKPEDTAVYYCAVLRSRKYTLAYWGQGTQVTVSS

SEQ ID NO: 11949 - protein, 126 aa, Artificial Sequence
  Chemically Synthesized
QVQLQESGGGLVQAGGSLRLSCAASGNIFDSSFMGWYRQAPGKEREFVATIAPGTSTNYADSVKGRFTISRDNAKNTVYLQMNSLKPEDTAVYYCAAWSRGQPYSTRYATPYHDYWGQGTQVTVSS

SEQ ID NO: 11950 - protein, 122 aa, Artificial Sequence
  Chemically Synthesized
QVQLQESGGGLVQAGGSLRLSCAASGYISRVGAMGWYRQAPGKERELVAAISRGATTNYADSVKGRFTISRDNAKNTVYLQMNSLKPEDTAVYYCAVGYYYSLGGRAYFGYWGQGTQVTVSS

SEQ ID NO: 11951 - protein, 118 aa, Artificial Sequence
  Chemically Synthesized
QVQLQESGGGLVQAGGSLRLSCAASGYISFTPNMGWYRQAPGKEREFVASISIGGNTNYADSVKGRFTISRDNAKNTVYLQMNSLKPEDTAVYYCAVGYYRYYYHRYWGQGTQVTVSS

SEQ ID NO: 11952 - protein, 118 aa, Artificial Sequence
  Chemically Synthesized
QVQLQESGGGLVQAGGSLRLSCAASGSISSTGAMGWYRQAPGKEREFVATIGAGTTTYYADSVKGRFTISRDNAKNTVYLQMNSLKPEDTAVYYCAVGGASEGRLIYWGQGTQVTVSS

SEQ ID NO: 11953 - protein, 126 aa, Artificial Sequence
  Chemically Synthesized
QVQLQESGGGLVQAGGSLRLSCAASGNISYYRRMGWYRQAPGKERELVAGITYGTTTYYADSVKGRFTISRDNAKNTVYLQMNSLKPEDTAVYYCAADHYRTWAYPRGGHHGHYYWGQGTQVTVSS

SEQ ID NO: 11954 - protein, 122 aa, Artificial Sequence
  Chemically Synthesized
QVQLQESGGGLVQAGGSLRLSCAASGTISYRRLMGWYRQAPGKERELVATINSGSITYYADSVKGRFTISRDNAKNTVYLQMNSLKPEDTAVYYCAVHPYYYLYRFGYHRYWGQGTQVTVSS

SEQ ID NO: 11955 - protein, 121 aa, Artificial Sequence
  Chemically Synthesized
QVQLQESGGGLVQAGGSLRLSCAASGYIFPWDPMGWYRQAPGKERELVAAINVGATTNYADSVKGRFTISRDNAKNTVYLQMNSLKPEDTAVYYCAVDQNESLVTKTVIYWGQGTQVTVSS

SEQ ID NO: 11956 - protein, 122 aa, Artificial Sequence
  Chemically Synthesized
QVQLQESGGGLVQAGGSLRLSCAASGNISTLVFMGWYRQAPGKEREFVASITYGATTNYADSVKGRFTISRDNAKNTVYLQMNSLKPEDTAVYYCAAVIYLQTDYHYFLKYWGQGTQVTVSS

SEQ ID NO: 11957 - protein, 122 aa, Artificial Sequence
  Chemically Synthesized
QVQLQESGGGLVQAGGSLRLSCAASGNIFTYGYMGWYRQAPGKEREFVASINYGTNTNYADSVKGRFTISRDNAKNTVYLQMNSLKPEDTAVYYCAVYYLLPWRFVQSHGYWGQGTQVTVSS

SEQ ID NO: 11958 - protein, 118 aa, Artificial Sequence
  Chemically Synthesized
QVQLQESGGGLVQAGGSLRLSCAASGYIFGRYRMGWYRQAPGKEREFVATISFGSNTYYADSVKGRFTISRDNAKNTVYLQMNSLKPEDTAVYYCAAVALYWYSHAYWGQGTQVTVSS

SEQ ID NO: 11959 - protein, 118 aa, Artificial Sequence
  Chemically Synthesized
QVQLQESGGGLVQAGGSLRLSCAASGNISRSATMGWYRQAPGKEREFVAGINWGASTYYADSVKGRFTISRDNAKNTVYLQMNSLKPEDTAVYYCAAEHYEPDSLFYWGQGTQVTVSS

SEQ ID NO: 11960 - protein, 118 aa, Artificial Sequence
  Chemically Synthesized
QVQLQESGGGLVQAGGSLRLSCAASGNIFRRWSMGWYRQAPGKEREFVASIGYGGSTNYADSVKGRFTISRDNAKNTVYLQMNSLKPEDTAVYYCAVRLRYYTQHPYWGQGTQVTVSS

SEQ ID NO: 11961 - protein, 122 aa, Artificial Sequence
  Chemically Synthesized
QVQLQESGGGLVQAGGSLRLSCAASGYISRVVYMGWYRQAPGKERELVAAIGRGGNTYYADSVKGRFTISRDNAKNTVYLQMNSLKPEDTAVYYCAARDRGLYYQTTRHYYWGQGTQVTVSS

SEQ ID NO: 11962 - protein, 126 aa, Artificial Sequence
  Chemically Synthesized
QVQLQESGGGLVQAGGSLRLSCAASGTISGSGGMGWYRQAPGKEREFVAGIAGGGNTYYADSVKGRFTISRDNAKNTVYLQMNSLKPEDTAVYYCAVVIVGFPQKLSSAPYWLYYWGQGTQVTVSS

SEQ ID NO: 11963 - protein, 126 aa, Artificial Sequence
  Chemically Synthesized
QVQLQESGGGLVQAGGSLRLSCAASGNIFPDIYMGWYRQAPGKEREFVASINRGGSTYYADSVKGRFTISRDNAKNTVYLQMNSLKPEDTAVYYCAVVRGQYAWAIYFQHYWYSYWGQGTQVTVSS

SEQ ID NO: 11964 - protein, 118 aa, Artificial Sequence
  Chemically Synthesized
QVQLQESGGGLVQAGGSLRLSCAASGNIFNRYKMGWYRQAPGKERELVATINYGGSTNYADSVKGRFTISRDNAKNTVYLQMNSLKPEDTAVYYCAVRKWYAYPFAYWGQGTQVTVSS

SEQ ID NO: 11965 - protein, 122 aa, Artificial Sequence
  Chemically Synthesized
QVQLQESGGGLVQAGGSLRLSCAASGTISTVHYMGWYRQAPGKEREFVASIGAGGTTYYADSVKGRFTISRDNAKNTVYLQMNSLKPEDTAVYYCAVQATRQYYPYYDYVYWGQGTQVTVSS

SEQ ID NO: 11966 - protein, 122 aa, Artificial Sequence
  Chemically Synthesized
QVQLQESGGGLVQAGGSLRLSCAASGNISNYGDMGWYRQAPGKERELVAAIGVGASTYYADSVKGRFTISRDNAKNTVYLQMNSLKPEDTAVYYCAAVNPGWWYASNPYDYWGQGTQVTVSS

SEQ ID NO: 11967 - protein, 118 aa, Artificial Sequence
  Chemically Synthesized
QVQLQESGGGLVQAGGSLRLSCAASGTISGDVEMGWYRQAPGKEREFVASITQGATTYYADSVKGRFTISRDNAKNTVYLQMNSLKPEDTAVYYCAAEYGWRYPHEYWGQGTQVTVSS

SEQ ID NO: 11968 - protein, 118 aa, Artificial Sequence
  Chemically Synthesized
QVQLQESGGGLVQAGGSLRLSCAASGTISIAAYMGWYRQAPGKERELVAGINGGGNTYYADSVKGRFTISRDNAKNTVYLQMNSLKPEDTAVYYCAVDDLDWTKLPYWGQGTQVTVSS

SEQ ID NO: 11969 - protein, 118 aa, Artificial Sequence
  Chemically Synthesized
QVQLQESGGGLVQAGGSLRLSCAASGSISPTYSMGWYRQAPGKERELVAAITGGANTYYADSVKGRFTISRDNAKNTVYLQMNSLKPEDTAVYYCAAQGDVYPWHVYWGQGTQVTVSS

SEQ ID NO: 11970 - protein, 122 aa, Artificial Sequence
  Chemically Synthesized
QVQLQESGGGLVQAGGSLRLSCAASGSIFVRRYMGWYRQAPGKERELVAGIAAGGTTNYADSVKGRFTISRDNAKNTVYLQMNSLKPEDTAVYYCAAIYWHYFDSRWYYPYWGQGTQVTVSS

SEQ ID NO: 11971 - protein, 122 aa, Artificial Sequence
  Chemically Synthesized
QVQLQESGGGLVQAGGSLRLSCAASGTIFVYGDMGWYRQAPGKERELVAAIGSGGSTYYADSVKGRFTISRDNAKNTVYLQMNSLKPEDTAVYYCAAVAYERLLYNHSFQYWGQGTQVTVSS

SEQ ID NO: 11972 - protein, 118 aa, Artificial Sequence
  Chemically Synthesized
QVQLQESGGGLVQAGGSLRLSCAASGNISDAGEMGWYRQAPGKEREFVASITRGTTTYYADSVKGRFTISRDNAKNTVYLQMNSLKPEDTAVYYCAAQGKWPSYYYYWGQGTQVTVSS

SEQ ID NO: 11973 - protein, 118 aa, Artificial Sequence
  Chemically Synthesized
QVQLQESGGGLVQAGGSLRLSCAASGTISYRVYMGWYRQAPGKERELVASIAFGTITNYADSVKGRFTISRDNAKNTVYLQMNSLKPEDTAVYYCAADRYYGWRHYYWGQGTQVTVSS

SEQ ID NO: 11974 - protein, 126 aa, Artificial Sequence
  Chemically Synthesized
QVQLQESGGGLVQAGGSLRLSCAASGSISRVYDMGWYRQAPGKEREFVASIGNGGTTNYADSVKGRFTISRDNAKNTVYLQMNSLKPEDTAVYYCAAIAIPDYADGRFDYLPHAYWGQGTQVTVSS

SEQ ID NO: 11975 - protein, 118 aa, Artificial Sequence
  Chemically Synthesized
QVQLQESGGGLVQAGGSLRLSCAASGNISDVLQMGWYRQAPGKEREFVASITSGSNTYYADSVKGRFTISRDNAKNTVYLQMNSLKPEDTAVYYCAAQGDWPYWHHYWGQGTQVTVSS

SEQ ID NO: 11976 - protein, 118 aa, Artificial Sequence
  Chemically Synthesized
QVQLQESGGGLVQAGGSLRLSCAASGSIFGYRPMGWYRQAPGKERELVAGINVGGSTYYADSVKGRFTISRDNAKNTVYLQMNSLKPEDTAVYYCAVRGYLGDTFRYWGQGTQVTVSS

SEQ ID NO: 11977 - protein, 118 aa, Artificial Sequence
  Chemically Synthesized
QVQLQESGGGLVQAGGSLRLSCAASGYIFDAQYMGWYRQAPGKEREFVASIAKGGNTYYADSVKGRFTISRDNAKNTVYLQMNSLKPEDTAVYYCAAYGIVYWQLDYWGQGTQVTVSS

SEQ ID NO: 11978 - protein, 122 aa, Artificial Sequence
  Chemically Synthesized
QVQLQESGGGLVQAGGSLRLSCAASGNISGPSDMGWYRQAPGKERELVAAIAAGASTYYADSVKGRFTISRDNAKNTVYLQMNSLKPEDTAVYYCAVQYTEGWVYDYVHLYWGQGTQVTVSS

SEQ ID NO: 11979 - protein, 122 aa, Artificial Sequence
  Chemically Synthesized
QVQLQESGGGLVQAGGSLRLSCAASGSIFAPFEMGWYRQAPGKERELVATIGRGGSTYYADSVKGRFTISRDNAKNTVYLQMNSLKPEDTAVYYCAVNAYTGSGQYYQHTYWGQGTQVTVSS

SEQ ID NO: 11980 - protein, 118 aa, Artificial Sequence
  Chemically Synthesized
QVQLQESGGGLVQAGGSLRLSCAASGNIFTYAEMGWYRQAPGKERELVAAITAGSITYYADSVKGRFTISRDNAKNTVYLQMNSLKPEDTAVYYCAADTGNPWRYPYWGQGTQVTVSS

SEQ ID NO: 11981 - protein, 118 aa, Artificial Sequence
  Chemically Synthesized
QVQLQESGGGLVQAGGSLRLSCAASGYISWYIVMGWYRQAPGKEREFVAAITPGGSTYYADSVKGRFTISRDNAKNTVYLQMNSLKPEDTAVYYCAVISWWGVEHDYWGQGTQVTVSS

SEQ ID NO: 11982 - protein, 118 aa, Artificial Sequence
  Chemically Synthesized
QVQLQESGGGLVQAGGSLRLSCAASGTISRINYMGWYRQAPGKERELVATIDDGASTYYADSVKGRFTISRDNAKNTVYLQMNSLKPEDTAVYYCAAQERIYPWLLYWGQGTQVTVSS

SEQ ID NO: 11983 - protein, 118 aa, Artificial Sequence
  Chemically Synthesized
QVQLQESGGGLVQAGGSLRLSCAASGTISYRDAMGWYRQAPGKEREFVAAIAWGATTYYADSVKGRFTISRDNAKNTVYLQMNSLKPEDTAVYYCAVTYHSNLILLYWGQGTQVTVSS

SEQ ID NO: 11984 - protein, 118 aa, Artificial Sequence
  Chemically Synthesized
QVQLQESGGGLVQAGGSLRLSCAASGSISAGYDMGWYRQAPGKERELVASIGSGAITYYADSVKGRFTISRDNAKNTVYLQMNSLKPEDTAVYYCAADARQPWYLPYWGQGTQVTVSS

SEQ ID NO: 11985 - protein, 122 aa, Artificial Sequence
  Chemically Synthesized
QVQLQESGGGLVQAGGSLRLSCAASGTIFELQGMGWYRQAPGKERELVASIGRGGTTYYADSVKGRFTISRDNAKNTVYLQMNSLKPEDTAVYYCAASEYGRKDPYHGHYYWGQGTQVTVSS

SEQ ID NO: 11986 - protein, 121 aa, Artificial Sequence
  Chemically Synthesized
QVQLQESGGGLVQAGGSLRLSCAASGTISDQHHMGWYRQAPGKERELVATISPGASTYYADSVKGRFTISRDNAKNTVYLQMNSLKPEDTAVYYCAVRSAYVDTAFGFYYWGQGTQVTVSS

SEQ ID NO: 11987 - protein, 120 aa, Artificial Sequence
  Chemically Synthesized
QVQLQESGGGLVQAGGSLRLSCAASGSISPPKDMGWYRQAPGKERELVAAIAPGGSTYYADSVKGRFTISRDNAKNTVYLQMNSLKPEDTAVYYCAAVYYDPYLIDLYYWGQGTQVTVSS

SEQ ID NO: 11988 - protein, 122 aa, Artificial Sequence
  Chemically Synthesized
QVQLQESGGGLVQAGGSLRLSCAASGNISPLGVMGWYRQAPGKERELVASIGRGGTTYYADSVKGRFTISRDNAKNTVYLQMNSLKPEDTAVYYCAARINAVEGGRFGLYYWGQGTQVTVSS

SEQ ID NO: 11989 - protein, 122 aa, Artificial Sequence
  Chemically Synthesized
QVQLQESGGGLVQAGGSLRLSCAASGSISRLYDMGWYRQAPGKERELVAAIAYGGSTYYADSVKGRFTISRDNAKNTVYLQMNSLKPEDTAVYYCAVGVPAYGQPYYDHWYWGQGTQVTVSS

SEQ ID NO: 11990 - protein, 122 aa, Artificial Sequence
  Chemically Synthesized
QVQLQESGGGLVQAGGSLRLSCAASGSISDLRYMGWYRQAPGKEREFVASIGAGGTTYYADSVKGRFTISRDNAKNTVYLQMNSLKPEDTAVYYCAVVVNRDGYPWYAHYYWGQGTQVTVSS

SEQ ID NO: 11991 - protein, 122 aa, Artificial Sequence
  Chemically Synthesized
QVQLQESGGGLVQAGGSLRLSCAASGNIFDYREMGWYRQAPGKEREFVASITSGASTYYADSVKGRFTISRDNAKNTVYLQMNSLKPEDTAVYYCAVDRQGGTWDNLRHSYWGQGTQVTVSS

SEQ ID NO: 11992 - protein, 118 aa, Artificial Sequence
  Chemically Synthesized
QVQLQESGGGLVQAGGSLRLSCAASGTISYVYGMGWYRQAPGKEREVVAGINYGGTTYYADSVKGRFTISRDNAKNTVYLQMNSLKPEDTAVYYCAALWYRASRHRYWGQGTQVTVSS

SEQ ID NO: 11993 - protein, 118 aa, Artificial Sequence
  Chemically Synthesized
QVQLQESGGGLVQAGGSLRLSCAASGNISGLYFMGWYRQAPGKEREFVAAIGFGTNTNYADSVKGRFTISRDNAKNTVYLQMNSLKPEDTAVYYCAAFYYDTTHLTYWGQGTQVTVSS

SEQ ID NO: 11994 - protein, 120 aa, Artificial Sequence
  Chemically Synthesized
QVQLQESGGGLVQAGGSLRLSCAASGNIFAVYAMGWYRQAPGKEREFVAGIARGANTYYADSVKGRFTISRDNAKNTVYLQMNSLKPEDTAVYYCAALDYGPSKTRFRYWGQGTQVTVSS

SEQ ID NO: 11995 - protein, 118 aa, Artificial Sequence
  Chemically Synthesized
QVQLQESGGGLVQAGGSLRLSCAASGTISYVYGMGWYRQAPGKEREFVAGINYGGTTYYADSVKGRFTISRDNAKNTVYLQMNSLKPEDTAVYYCAVLVIDRIWYRYWGQGTQVTVSS

(The sequence listing continues in the following parts.)

What is claimed is:

1. An isolated antibody or antibody fragment that specifically binds to a target protein or peptide, wherein the target protein or peptide is selected from the group consisting of a secreted protein or peptide and an extracellular protein or peptide.

2. The antibody or antibody fragment of claim 1, wherein the antibody or antibody fragment is selected from the group consisting of a monoclonal antibody, a polyclonal antibody, a single chain antibody, an immunoconjugate, a glycoengineered antibody, and a bispecific antibody or other multispecific antibody.

3. The antibody or antibody fragment of claim 2, wherein the antibody is a single chain antibody, and further wherein the single chain antibody is a nanobody.

4. The antibody or antibody fragment of claim 3, wherein the nanobody has a predicted binding score of at least 0.5, and further wherein the predicted binding score is determined using a machine learning algorithm wherein the machine learning algorithm comprises a multi-class classifier based on a logistic regression model.

5. The antibody or antibody fragment of claim 1, comprising an antibody or binding portion thereof that specifically binds to the secreted or extracellular protein or peptide with an affinity of at least 10⁻⁶ M.

6. The antibody or antibody fragment of claim 2, wherein the antibody or antibody fragment comprises a therapeutic agent or a detection moiety.

7. The antibody or antibody fragment of claim 2, wherein the antibody is selected from the group consisting of a humanized antibody, a chimeric antibody, a fully human antibody, an antibody mimetic.

8. The antibody or antibody fragment of claim 3, wherein the secreted or extracellular protein or peptide is selected from the group consisting of a target provided in Table 2.

9. The antibody or antibody fragment of claim 8, wherein the extracellular protein or peptide is selected from the group consisting of CCL16, CD302, CD3D, CD3E, CEACAM4, ILlORA, IL13, IL17A, IL1RN, IL21, PROCR, TIGIT, TNF, TNFRSF17, and TNFSF18.

10. The antibody or antibody fragment of claim 8, wherein the antibody comprises at least one selected from the group consisting of: a) the heavy chain CDR1 sequence selected from the group consisting of a CDR1 of SEQ ID NO:1-SEQ ID NO:42890 comprising a sequence between the flanking sequence of SEQ ID NO:42891 and SEQ ID NO:42892; b) the heavy chain CDR2 sequence selected from the group consisting of a CDR2 of SEQ ID NO:1-SEQ ID NO:42890 comprising a sequence between the flanking sequence of SEQ ID NO:42893 and SEQ ID NO:42894; and c) the heavy chain CDR3 sequence selected from the group consisting of a CDR3 of SEQ ID NO:1-SEQ ID NO:42890 comprising a sequence between the flanking sequence of SEQ ID NO:42895 and SEQ ID NO:42896.

11. The antibody or antibody fragment of claim 8, wherein the antibody comprises each of: a) the heavy chain CDR1 sequence selected from the group consisting of a CDR1 of SEQ ID NO:1-SEQ ID NO:42890 comprising a sequence between the flanking sequence of SEQ ID NO:42891 and SEQ ID NO:42892; b) the heavy chain CDR2 sequence selected from the group consisting of a CDR2 of SEQ ID NO:1-SEQ ID NO:42890 comprising a sequence between the flanking sequence of SEQ ID NO:42893 and SEQ ID NO:42894; and c) the heavy chain CDR3 sequence selected from the group consisting of a CDR3 of SEQ ID NO:1-SEQ ID NO:42890 comprising a sequence between the flanking sequence of SEQ ID NO:42895 and SEQ ID NO:42896, wherein each of the CDR1, CDR2 and CDR3 sequence are from the same SEQ ID NO.

12. The antibody or antibody fragment of claim 8, wherein the antibody comprises an amino acid sequence as set forth in any one of SEQ ID NO:1-SEQ ID NO:42890.

13. A composition comprising an antibody or antibody fragment of any one of claims 1-12.

14. A nucleic acid molecule comprising a nucleotide sequence encoding an antibody or antibody fragment of any one of claims 1-12.

15. A composition comprising a nucleic acid molecule of claim 14.

16. An expression vector comprising the nucleic acid molecule of claim 14.

17. A host cell comprising the nucleic acid molecule of claim 14.

18. A method of treating or preventing a disease or disorder in a subject in need thereof, the method comprising the step of administering the antibody or antibody fragment of any one of claims 1-12, the nucleic acid molecule of claim 14, or the composition of claim 13 or 15 to the subject.

19. A method of detecting a target secreted or extracellular protein or peptide in a sample, the method comprising:
a) contacting the sample with the antibody or antibody fragment of any one of claims 1-12, or the composition of claim 13, and
b) detecting binding of the antibody or antibody fragment of any one of claims 1-12, or the composition of claim 13 to the target secreted or extracellular protein or peptide.

20. A method of diagnosing a disease or disorder in a subject in need thereof, the method comprising
a. Contacting a biological sample of the subject with the antibody or antibody fragment of any one of claims 1-12, or the composition of claim 13,
b. determining the level of the target secreted or extracellular protein or peptide in the biological sample of the subject,
c. comparing the level of the target secreted or extracellular protein or peptide in the biological sample of the subject with a comparator control, and
d. diagnosing the subject with a disease or disorder associated with a differential level of the target secreted or extracellular protein or peptide when the level of the target secreted or extracellular protein or peptide in the biological sample of the subject of subject is significantly different when compared with the level of the target secreted or extracellular protein or peptide in the comparator control.

21. The method of claim 20, comprising the further step of administering a treatment to the subject that was diagnosed as having a disease or disorder.

22. The method of claim 20, wherein the comparator control is at least one selected from the group consisting of: a positive control, a negative control, a historical control, a historical norm, or the level of a reference molecule in the biological sample.

23. A method of selecting an antibody or antibody fragment of claim 1, the method comprising the steps of:
a) contacting a support comprising a display library of target secreted and extracellular proteins or peptides with a phage display library of candidate antibodies or antibody fragments, such that a complex is formed between the candidate antibody and the target secreted and extracellular proteins or peptide;
b) cleaving the complex from the support using a protease;
c) isolating the nucleic acid molecule encoding the antibody or antibody fragment; and
d) sequencing the nucleic acid molecule encoding the antibody or antibody fragment.

24. The method of claim 23, wherein the method further comprises predicting the binding score of the antibody or antibody fragment using a machine learning algorithm, wherein the machine learning algorithm comprises a multi-class classifier based on a logistic regression model.
